(19) United States
(12) Patent Application Publication
(10) Pub. No.: US 2025/0361525 A1
(43) Pub. Date: Nov. 27, 2025

(54) AAV VECTORS FOR GENE EDITING

(71) Applicant: Scribe Therapeutics Inc., Alameda, CA (US)

(72) Inventors: Fred DEITER, Alameda, CA (US); Wenyuan ZHOU, Dublin, CA (US); Katherine BANEY, Berkeley, CA (US); Isabel COLIN, Oakland, CA (US); Cécile FORTUNY, Oakland, CA (US); Addison WRIGHT, El Cerrito, CA (US); Brett T. STAAHL, Tiburon, CA (US); Sean HIGGINS, Alameda, CA (US); Benjamin OAKES, El Cerrito, CA (US); Suraj MAKHIJA, San Francisco, CA (US); Sarah DENNY, San Francisco, CA (US); Manuel MOHR, Berkeley, CA (US); Torrey BROWNELL, Oakland, CA (US); Angus SIDORE, Oakland, CA (US)

(21) Appl. No.: 18/872,584

(22) PCT Filed: Jun. 7, 2023
(86) PCT No.: PCT/US2023/068097

§ 371 Date: Dec. 6, 2024

Related U.S. Application Data
(60) Provisional application No. 63/350,376, filed on Jun. 8, 2022.

(51) Int. Cl. C12N 15/86; A61K 48/00; C12N 9/22; C12N 15/11; C12N 15/90

(52) U.S. Cl. CPC C12N 15/86; A61K 48/0041; C12N 9/226; C12N 15/11; C12N 15/907; C12N 2310/20; C12N 2750/14144; C12N 2750/14152

(57) ABSTRACT

Provided herein are recombinant adeno-associated virus (rAAV) compositions and methods for use of the rAAV encoding CasX proteins and guide ribonucleic acid (gRNA) sequences useful for nucleic acid sequence editing, and including transgene components. The rAAV may be delivered to cells to target a gene of interest.

### CROSS-REFERENCE TO RELATED APPLICATIONS

[0001] This application claims priority to U.S. Provisional Patent Application No. 63/350,376, filed on Jun. 8, 2022, the contents of which are incorporated by reference in their entirety herein.

### INCORPORATION BY REFERENCE OF SEQUENCE LISTING

[0002] The contents of the electronic sequence listing (SCRB_044_01WO_SeqList_ST26.xml; Size: 14,517,322 bytes; and Date of Creation: Jun. 6, 2023) are herein incorporated by reference in its entirety.

### BACKGROUND

[0003] Gene editing holds great promise for treating or preventing many genetic diseases. However, safe and targeted delivery of CRISPR gene editing machinery into the desired cells is necessary to achieve therapeutic benefit. There remains a need in the art for compositions and methods for delivering CRISPR gene editing machinery to cells in vitro and/or in vivo.

### SUMMARY

[0004] The present disclosure relates to recombinant adeno-associated virus vectors (rAAV) for the delivery of Class 2, Type V CRISPR proteins and guide nucleic acids to cells for the modification of target nucleic acids.

[0005] In some embodiments, the present disclosure provides rAAV transgenes and transgene plasmids, as well as methods for the production of rAAV encoding the Class 2, Type V CRISPR proteins and guide ribonucleic acids (gRNA). In particular embodiments, the rAAV encode CasX nucleases and gRNA. In an advantage of the Type V systems, particularly the CasX system, the smaller size of the encoding sequences, relative to Cas9, permits the inclusion of encoding sequences for complete nuclease and multiple gRNA components, as well as promoters, accessory elements, or other useful payloads in the transgene that permit the formation of functional rAAV particles for transduction of target cells and the expression of the encoded CRISPR components. In some embodiments, the present disclosure provides rAAV comprising a first and a second gRNA wherein the first and/or the second gRNA comprise targeting sequences complementary to different or overlapping regions of a target DNA sequence. The rAAV are useful in a variety of methods for modification of target nucleic acids and in the treatment of diseases and disorders where modification of a gene can lead to amelioration or prevention of the disease or disorder.

[0006] In some embodiments, the present disclosure provides a method for treating a disease in a subject (e.g., a human) caused by one or more mutations in a gene of the subject, comprising administering a therapeutically effective dose of the rAAV of any of the embodiments disclosed herein.

[0007] In some embodiments, the present disclosure provides a method of reducing the immunogenicity of AAV vector components, comprising deleting all or a portion of the CpG dinucleotides of the sequences of the AAV components selected from the group consisting of 5′ ITR, 3′ ITR, Pol III promoter, Pol II promoter, encoding sequence for CRISPR nuclease, encoding sequence for gRNA, accessory element, and poly(A) signal sequences.

### BRIEF DESCRIPTION OF THE DRAWINGS

[0008] The novel features of the disclosure are set forth with particularity in the appended claims. A better understanding of the features and advantages of the present disclosure will be obtained by reference to the following detailed description that sets forth illustrative embodiments, in which the principles of the disclosure are utilized, and the accompanying drawings of which:

[0009] FIG. 1 shows a schematic of the AAV construct described in Example 1.

[0010] FIG. 2 shows results of an editing assay using AAV transgene plasmids nucleofected into mNPCs, as described in Example 1, demonstrating that the CasX and targeting guide in three different vectors (constructs 1, 2, and 3) edits on target (tdTomato) with high efficiency compared to non-targeting control (NT). Editing was assessed by FACS 5 days post-transfection. Data are presented as mean±SEM for n=3 replicates.

[0011] FIG. 3 shows results of an editing assay using AAV transgene plasmids nucleofected into mNPCs at four different dose levels, as described in Example 1. CasX delivered as an AAV transgene plasmid to mNPCs edits on target with high efficiency in a dose-dependent manner, compared to non-targeting control (NT). CasX variant 491 with gRNA scaffold 174 (gRNA scaffolds are also referred to herein gRNA variants, guide scaffolds) and spacer targeting tdTomato in three different vectors (constructs 1, 2, and 3) were nucleofected in mNPCs, and editing was assessed by FACS 5 days post-transfection. Data are presented as mean±SEM for n=3 replicates. #

[0012] FIG. 4 shows results of an editing assay using AAV vector construct 3 transduced into mNPCs at 3-fold dilutions, assessed by FACS five days post-transduction, as described in Example 1. Data are presented as mean±SEM for n=3 replicates. MOI. multiplicity of infection.

[0013] FIG. 5 is a scanning transmission micrograph showing AAV particles with packaged CasX variant 438, gRNA scaffold 174 and spacer 12.7, as described in Example 2. AAV were negatively stained with 1% uranyl acetate. Empty particles are identified by a dark electron dense circle at the center of the capsid.

[0014] FIG. 6 shows results of an immunohistochemistry staining of mouse coronal brain sections, as described in Example 3. Mice received an ICV injection of 1×10¹¹ AAV packaged with CasX 491, gRNA scaffold 174 with spacer 12.7 (top panel), which were able to edit the tdTom locus in the Ai9 mice (edited cells appear white). The bottom panel shows that CasX 491 and gRNA scaffold 174 with a non-targeting spacer administered as an AAV ICV injection did not edit at the tdTom locus. Tissues were processed for immunohistochemical analysis 1 month post-injection.

[0015] FIG. 7 shows the results of an editing assay of the tdTom locus in mNPCs using AAV transgene plasmids of constructs having variations in the CasX promoters, as described in Example 4. Editing was assessed by FACS 5 days post-transfection. Data are presented as mean±SEM for n=3 replicates.

[0016] FIG. 8 shows the results of an editing assay of the tdTom locus in mNPCs using AAV transgene plasmids of constructs having variations in the CasX promoters, as described in Example 4. Editing was assessed by FACS 5 days post-transfection. Data are presented as mean±SEM for n=3 replicates.

[0017] FIG. 9 shows the results of an editing assay of the tdTom locus in mNPCs using AAV transgene plasmids of constructs having variations in the CasX promoters and transgene size (see table insert), as described in Example 4. Editing was assessed by FACS 5 days post-transfection. Data are presented as mean±SEM for n=3 replicates.

[0018] FIG. 10 shows the results of an editing assay of the tdTom locus in mNPCs using AAV vectors incorporating the same promoters as shown in FIG. 9, as described in Example 4. The graph on the left are results testing 3-fold dilutions of the constructs, while the graph on the right are results of editing using an MOI of 2×10⁵ vg/cell. Editing was assessed by FACS 5 days post-transfection. Data are presented as mean±SEM for n=3 replicates.

[0019] FIG. 11 shows the results of an editing assay of the tdTom locus in mNPCs using AAV vectors with protein promoter variants designed to reduce transgene size, compared to AAV with the top 4 protein promoter variants identified previously (AAV.3, AAV.4, AAV.5 and AAV.6), as described in Example 4. Editing was assessed by FACS 5 days post-transfection. Data are presented as mean±SEM for n=3 replicates. The dashed line shows editing levels of AAV.4, the AAV construct that in this experiment was used as a baseline for comparison across the variants.

[0020] FIG. 12 is a graph of percent editing versus transgene size for all constructs having varying promoters tested in this study. Constructs circled with dashes were identified as having above average editing while minimizing transgene size. The dashed line shows editing levels of AAV.4, the AAV construct that in this experiment was used as a baseline for comparison across variants.

[0021] FIG. 13 shows the results of an editing assay of mNPCs using AAV transgene plasmids having variations in gRNA promoter strength, as described in Example 5. Editing was assessed by FACS 5 days post-transfection. Data are presented as mean±SEM for n=3 replicates.

[0022] FIG. 14 shows the results of an editing assay of mNPCs using three different AAV vectors having variations in gRNA promoter strength, as described in Example 5. The graph on the left are results testing 3-fold dilutions of the constructs ranging from 1×10⁴ to 5×10⁵ vg/cell, while the graph on the right are results of editing using an MOI of 3×10⁵ vg/cell. Editing was assessed by FACS 5 days post-transfection. Data are presented as mean±SEM for n=3 replicates.

[0023] FIG. 15 is a bar graph that shows percent editing of the tdTom locus in mNPCs in an experiment to assess use of truncated U6 RNA promoters in constructs when delivered in AAV transgene plasmids designed to minimize the footprint of the Pol III promoter in the delivered transgene, as described in Example 5. Editing was assessed by FACS 5 days post-transfection. Data are presented as mean±SEM for n=3 replicates.

[0024] FIG. 16 is a bar graph that shows percent editing of the tdTom locus in mNPCs comparing base construct 53 to construct 85, when delivered as AAV vector designed to minimize the footprint of the Pol III promoter in the delivered transgene, as described in Example 5.

[0025] FIG. 17 is a bar graph that shows editing results of the tdTom locus in an experiment to assess the effects of constructs having engineered U6 RNA promoters when delivered to mNPCs in an AAV vector designed to minimize the footprint of the Pol III promoter in the AAV transgene, as described in Example 5. Editing was assessed by FACS 5 days post-transfection. Data are presented as mean±SEM for n=3 replicates.

[0026] FIG. 18 is a scatter plot depicting transgene size of all AAV variants tested having engineered U6 RNA promoters on the X-axis vs. percent of mNPCs edited on the Y-axis, as described in Example 5. The dashed line indicates construct 53, having the largest promoter tested, while the dotted line indicates construct 89, having the smallest promoter tested.

[0027] FIG. 19 shows the results of an editing assay of the tdTom locus in mNPCs in an experiment to assess the effects of constructs having engineered Pol III RNA promoters when delivered in an AAV vector designed to minimize the footprint of the Pol III promoter in the AAV transgene, as described in Example 5. Editing was assessed by FACS 5 days post-transfection. Data are presented as mean±SEM for n=3 replicates.

[0028] FIG. 20 is a bar graph showing AAV-mediated editing level in mNPCs at an MOI of 3.0E+5 vg/cell using the indicated constructs, as described in Example 5.

[0029] FIG. 21 is a scatter plot depicting the transgene size (inclusive of ITRs) of all variants tested on the X-axis vs. the percent of mNPCs edited on the Y-axis, as described in Example 5.

[0030] FIG. 22 shows the results of an editing assay of the tdTom locus in mNPCs using AAV transgene plasmids having variations in poly(A) signals, as described in Example 6. Data are presented as mean±SEM for n=3 replicates.

[0031] FIG. 23 shows the results of an editing assay of the tdTom locus in mNPCs using two AAV vectors having the top poly(A) signals, as described in Example 6. Editing was assessed by FACS 5 days post-transfection. Data are presented as mean±SEM for n=3 replicates.

[0032] FIG. 24 is a graph plotting the RNA abundance ratio, determined as log 2(cDNA reads/viral DNA input reads) calculated across ten summed technical replicates per unique poly(A) library member assessed during the high-throughput screen, as described in Example 6. The depicted data were for one biological replicate. The bGH poly(A) signal sequence is highlighted as a positive control.

[0033] FIG. 25 are schematics of AAV plasmid constructs containing guide RNA transcriptional units (gRNA scaffold-spacer stack driven by a U6 promoter) in different orientations in regards to the protein promoter transcriptional unit, as described in Example 7. The tapered points depicts the orientation of the transcriptional unit for protein or guide RNA.

[0034] FIG. 26 shows the results of an editing assay of the tdTom locus in mNPCs using AAV transgene plasmids having differences in regulatory element orientation, as described in Example 7. Editing was assessed by FACS 5 days post-transfection. Data are presented as mean±SEM for n=3 replicates.

[0035] FIG. 27 shows the results of an editing assay of NPCs using AAV vectors containing guide RNA transcriptional units (gRNA scaffold-spacer stack driven by a U6 promoter) in different orientations in relation to the protein promoter transcriptional unit, as described in Example 7. The graph on the left shows results testing 3-fold dilutions of the constructs ranging from 1×10⁴ to 2×10⁶ vg/cell. The bar graph on the right shows AAV-mediated percent editing in mNPCs at an MOI of 3.0E+5 vg/cell. Editing was assessed by FACS 5 days post-transfection. Data are presented as mean±SEM for n=3 replicates.

[0036] FIG. 28 illustrates the schematics of AAV plasmid constructs containing various configurations of the gRNA transcriptional unit (Pol III U6 promoter driving the expression of the gRNA scaffold and indicated spacer) as described in Example 7.

[0037] FIG. 29 is a graph showing the quantification of percent editing at the tdTomato locus in mNPCs 5 days post-transduction with AAVs produced from the indicated AAV constructs, as described in Example 7. Editing was assessed by FACS five days post-transduction.

[0038] FIG. 30 is a bar graph of results of an editing assay of the tdTom locus in mNPCs using AAV transgene plasmid constructs having different post-transcriptional regulatory elements compared to constructs not having post-transcriptional regulatory elements, as described in Example 8. Editing was assessed by FACS 5 days post-transfection. Data are presented as mean±SEM for n=3 replicates.

[0039] FIG. 31 is bar graph showing AAV-mediated editing levels (grey bars) of mNPCs at a viral MOI of 3.0E+5 compared to nucleofection editing using 150 ng of AAV-cis plasmids (dark bars) expressing the CasX protein 491 under the control of top promoters without (constructs 4, 5, 6) or in combination with different post-transcriptional regulatory element sequences (constructs 35-37 for base plasmid 4, constructs 38-39 for base plasmid 5, and constructs 42-43 for base plasmid 6)., as described in Example 8. Editing was assessed by FACS 5 days post-transfection. Data are presented as mean±SEM for n=3 replicates.

[0040] FIG. 32 is a bar graph showing AAV-mediated editing levels of mNPCs at a viral MOI of 3.0E+5 for constructs under promoters without (constructs 58, 59, 53) or in combination of different post-transcriptional regulatory element sequences (respectively constructs 72-74 for base plasmid 58 containing Jet promoter, constructs 75-77 for base plasmid 59 containing Jet+USP promoter, and constructs 80-81 for base plasmid 53 containing UbC promoter), as described in Example 8. Editing was assessed by FACS 5 days post-transfection. Data (n=3) are presented as mean±SEM.

[0041] FIG. 33 is a scatterplot comparing the transgene size of each construct evaluated (from ITR to ITR, in bp) to AAV-mediated editing levels in mNPCs at a MOI of 3.0e+5 vg/cell, as described in Example 8. The circled data points represent the top identified constructs in terms of editing levels of select transgene size. The horizontal grey line shows the editing level of the benchmark vector AAV.53 for comparative purposes. The vertical grey line delimits vectors that are over or under a 4.9kb transgene size.

[0042] FIG. 34 is a violin plot displaying AAV-mediated fold-improvement from the inclusion of the indicated PTRE element in the transgene plasmid, relative to its base (transgene with same promoter but no PTRE, indicated by gray dashed line), as described in Example 8.

[0043] FIG. 35 is a bar chart showing editing results of constructs with different neuronal enhancers delivered as AAV transgene plasmids to mNPCs, as described in Example 8. The gray lines show editing levels of reference plasmid 64, harboring CMV enhancer+core promoter. Editing was assessed by FACS 5 days post-transfection. Data are presented as mean±SEM for n=3 replicates.

[0044] FIG. 36 depicts the results of an editing assay measured as indel rate detected by NGS at the DMPK 3′ UTR locus for the indicated AAV dual-guide systems transduced into HEK293T cells in a series of three-fold dilution, as described in Example 9.

[0045] FIG. 37 is a bar chart displaying the breakdown of indels generated by type of editing (single edit at the 5′ or 3′ of CTG repeat or double-cut resulting in CTG repeat dropout) at the DMPK 3′ UTR locus by AAVs harboring the dual guide spacer combination (spacers 20.7 and 20.11), as described in Example 9. The percentage of single or dual-edits were calculated from the total percent of reads analyzed.

[0046] FIG. 38 shows schematics of AAV constructs with alternative gRNA configurations for constructs having multiple gRNA, as described in Example 9. The top schematic is architecture 1, while the bottom is architecture 2. The tapered points depict the orientation of the transcriptional unit for protein or guide RNA.

[0047] FIG. 39 shows schematics of AAV constructs with alternative gRNA configurations for constructs having multiple gRNA, as described in Example 9. The tapered points depict the orientation of the transcriptional unit for protein or guide RNA.

[0048] FIG. 40 shows schematics of guide RNA stack (Pol III promoter, scaffold, spacer) architectures tested with nucleofection and AAV transduction, as described in Example 9. Transgene harbors dual stacks in different orientations, with spacer 12.7, 12.2 and non-target spacer NT. The tapered points depict the orientation of the transcriptional unit for protein or guide RNA.

[0049] FIG. 41 shows the results of an editing assay for constructs having guide RNA stacks delivered via plasmid transfection to mNPCs, showing constructs with RNA stacks edit with enhanced potency compared to non-targeting control (NT), as described in Example 9. Editing was assessed by FACS 5 days post-transfection. Data are presented as mean±SEM for n=3 replicates.

[0050] FIG. 42 shows the results of an editing assay of mNPCs using AAV transgene plasmid constructs having multiple gRNA in different architectures and with different combinations of spacers (see FIG. 35) compared to construct 3 having a single gRNA and to a non-targeting construct, as described in Example 9. Editing was assessed by FACS 5 days post-transfection. Data are presented as mean±SEM for n=3 replicates.

[0051] FIG. 43 shows the results of an editing assay of mNPCs using AAV vector constructs 45-48 having multiple gRNA in different architectures and with different combinations of spacers (see FIG. 35) compared to construct 3, as described in Example 9. The left panel shows editing results using 3-fold MOI dilutions ranging from 1×10⁴ to 3×10⁵ vg/cell, while the right panel shows editing results at an MOI of 3×10⁵ vg/cell. Editing was assessed by FACS 5 days post-transfection. Data are presented as mean±SEM for n=3 replicates.

[0052] FIG. 44 is a bar graph of percent editing in mNPCs using AAV transgene plasmid constructs with varying 5′ NLS combinations (2, 7, and 9 in Table 20) with 3′ NLS 1, 8 and 9 in mNPCs, as described in Example 10.

[0053] FIG. 45 is a bar graph of percent editing in mNPCs using AAV vectors with varying 5′ NLS combinations with 3′ NLS 1, 8 and 9 in mNPCs, as described in Example 10.

[0054] FIG. 46 is a bar graph of percent editing in mNPCs using AAV vectors with varying NLS combinations when delivered in a vector designed to minimize the footprint of Pol III promoter in the transgene.

[0055] FIG. 47 is a schematic showing the organization of the components of an exemplary AAV transgene between the 5′ and 3′ ITRs, as described in Example 12.

[0056] FIG. 48A show results of editing assays in mNPCs nucleofected with 1000 of AAV-cis plasmids expressing CasX protein 491 expression of CMV and gRNA scaffolds 174 and 229-237 with spacer 11.30 targeting the mouse RHO exon 1 locus demonstrating improved activity at mouse RHO exon 1 in a dose-dependent manner, as described in Example 12. Triplicate wells were pooled together for gDNA extraction and therefore treated as n=1.

[0057] FIG. 48B is a bar graph showing fold-change in editing levels for each engineered gRNA scaffolds (229-237) relative to gRNA scaffold174 with spacer 11.30 (set to a value of 1.0) across two plasmid nucleofection doses 1000 and 500ng of AAV-cis plasmids, as described in Example 12. Triplicate wells were pooled together for gDNA extraction and therefore treated as n=1.

[0058] FIG. 49A show editing results of engineered gRNA scaffold 235 compared to gRNA scaffold 174 with spacer 11.1 targeting RHO at the exogenous RHO-GFP locus (with GFP as the reporter), under the expression of Pol III hU6 promote in ARPE-19 cells, demonstrating improved activity by the 235 variant at the human RHO locus, with increased on-target activity at WT exogenous RHO without off-target cleavage at the mutant RHO reporter gene, as described in Example 12. Data (n=3) are presented as mean±SD.

[0059] FIG. 49B is a bar graph displaying fold-change in editing levels of engineered gRNA scaffold 235 compared to gRNA scaffold 174 at the human RHO locus, with p59.491.235.11.1 normalized to benchmark p59.491.174.11.1 levels (set to value 1.0) in cells nucleofected with 1000 ng of each plasmid, as described in Example 12. Data (n=3) are presented as mean±SD.

[0060] FIG. 50A shows editing levels in mNPCs by AAV-mediated expression of CasX molecule and engineered gRNA scaffold 235 compared to gRNA scaffold 174 with spacer 11.30 at 3 different MOI levels, confirming increased editing levels at the endogenous mouse Rho exon 1 locus with no off-target locus, as described in Example 12.

[0061] FIG. 50B is a bar graph displaying fold-change in editing levels in mNPCs by AAV-mediated expression of CasX molecule and engineered guide variant 235 compared to gRNA scaffold 174 with spacer 11.30 in cells infected at a 5.0e+5 MOI, as described in Example 12. Data are presented as the mean of n=3.

[0062] FIG. 51A shows editing results at the human RHO locus in mNPCs nucleofected with 1000 and 500 ng of AAV-cis plasmids expressing CasX protein 491 and gRNA-scaffold 174 with on-target spacers of varying length, demonstrating improved on-target editing at the mouse RHO locus, as described in Example 12. Spacers variants are: 11.30 (20 nt WT RHO), 11.38 (18 nt WT RHO), and 11.39 (19 nt WT RHO), respectively. A control spacer, no-target (NT), designed to not recognize any sequence across the mouse and human genomes, was also tested as a negative control to ensure no unspecific targeting resulting from the expression of the CasX protein alone. Triplicate wells were pooled together for gDNA extraction and therefore treated as n=1.

[0063] FIG. 51B is a bar graph showing editing levels at the human RHO locus in nucleofected mNPCs with 1000 ng of AAV-cis plasmids expressing CasX protein 491 and gRNA-scaffold 174 with the indicated off-target spacers, as described in Example 12.

[0064] FIG. 51C is a bar graph displaying fold-change in editing levels at the human RHO locus in nucleofected mNPCs for each gRNA-scaffold 174 with spacer variants 11.38 and 11.39 normalized to levels of parental gRNA-scaffold-spacer 174.11.30, as described in Example 12. Data shows means+SD across 3 different biological replicates.

[0065] FIG. 52A is a Whisker box graph showing editing results of RHO in a mouse model comparing AAV-mediated delivery of gRNA scaffold variants and optimized spacers compared to benchmark construct, as described in Example 13. Each dot represents one retina (n=8-16). One-way ANOVA statistical test was performed, ***=p<0.001.

[0066] FIG. 52B is a Whisker box graph showing the relative fold-change in editing of RHO in a mouse model comparing AAV-mediated delivery of gRNA scaffold variants 174 and 235 and optimized spacers compared to benchmark construct, as described in Example 13. Values are relative to the benchmark vector AAV.RHO.174.11.30 (set to a value of 1). Each dot represents one retina (n=8-16).

[0067] FIG. 53A is a bar graph showing CTC-PAM editing levels (indel rates) at the mouse RHO locus in mNPCs nucleofected with 1000 and 500 ng of AAV-cis plasmids expressing the CasX protein variant 491, 515, 527, 528, 535, 536 or 537, respectively, and gRNA-scaffold 235.11.37 (on target), as described in Example 14. A control spacer, no-target (NT), designed to not recognize any sequence across the mouse and human genomes, was also tested as a negative control to ensure no unspecific targeting resulting from the expression of the CasX protein alone. Triplicate wells were pooled together for gDNA extraction and therefore treated as n=1.

[0068] FIG. 53B is a bar graph showing CTC-PAM editing levels (indel rates) at the mouse RHO locus in mNPCs nucleofected with AAV-cis plasmids expressing the CasX protein variant 491, 515, 527, 528, 535, 536 or 537, respectively, and gRNA-scaffold 235.11.39 (off-target), as described in Example 14.

[0069] FIG. 53C shows a bar graph displaying fold-change in editing levels for each indicated CasX protein variant with guide 235 and spacer 11.39, with results normalized to levels of the parental CasX protein 491, as described in Example 14.

[0070] FIG. 54A shows a bar graph showing editing levels in ARPE-19 mNPC nucleofected with 1000 ng of AAV-cis plasmids expressing CasX protein variant 491, 515, 527, 528, 535, 536 or 537 and guide variant 235 with spacer 11.41 or 11.43, as described in Example 14. Data (n=3) are presented as mean±SD.

[0071] FIG. 54B shows a bar graph displaying fold-change in editing levels in ARPE-19 mNPC nucleofected with 1000 ng of AAV-cis plasmids expressing CasX protein variant 515, 527, 528, 535, 536 or 537 and guide variant 235 with spacer 11.41 or 11.43 relative to benchmark p59.491.235.11.41 levels (set to a value of 1.0), as described in Example 14. Data (n=3) are presented as mean±SD.

[0072] FIG. 55A shows a bar graph of AAV-mediated editing levels in mNPCs at the endogenous mouse Rho exon 1 locus, as described in Example 14. mNPCs were infected using a 3.0e+5 and 1.0e+5 vg/cell MOI with AAV vectors expressing the indicated CasX protein 491, 515, 527, 528, 535, or 537 and gRNA-scaffold variant 235.11.39, as described in Example 14. Data (n=3) are presented as the mean.

[0073] FIG. 55B is a bar graph displaying fold-change in editing levels for the indicated CasX variant with gRNA scaffold 235 relative to gRNA scaffold 174 with spacer 11.39 in cells infected with the indicated MOI, as described in Example 14.

[0074] FIG. 56 is an illustration of reference mRHO exon 1 locus and target amino acid residue P23 (CCC) sequence (highlighted in bold), showing spacer 11.30 target sequence and expected CasX-mediated cleavage, as described in Example 15. The most common predicted edits quantified in CRISPResso edits (substitution/deletions) are displayed under the reference genome).

[0075] FIG. 57A shows results of in vivo AAV CasX-mediated editing of the mRHO P23 locus in retinae in C57BL6J mice (n=6-8; quantification in percent of total indels detected by NGS), as described in Example 15.

[0076] FIG. 57B shows the fraction (%) of AAV CasX-mediated frame-shift edits of the mRHO P23 locus in the retinae in C57BL6J (n=6-8) mice (n=6-8; quantification in percent of total indels detected by NGS), as described in Example 15.

[0077] FIGS. 58A-58F show representative fluorescence imaging of retinas from AAV-CasX treated mice or negative controls and stained, as described in Example 15. Cell nuclei were counterstained with DAPI (top row; FIGS. 58A-58C) to visualized retinal layers and stained with HA-tag (bottom row, FIGS. 58D-58F) antibody to detect CasX expression in photoreceptors (ONL) and other retinal layers (INL; GCL). Legends: ONL=Outer nuclear layer; INL=Inner nuclear layer, GCL=Ganglion cell layer.

[0078] FIG. 59A is a box plot showing median, minimal and highest editing values using AAV-mediated expression of CasX 491 detected by NGS 3 weeks post-injection in wild-type retinae injected with 5.0e+9 vg/eye of AAV.X.491.174.11.30 vectors, in which the 491 protein is driven by promoter variants designed to selectively express in rod photoreceptors (X=RP1−RP5) or a ubiquitous promoter (X=CMV), as described in Example 16. The grey line is placed at the editing levels achieved by AAV.RP1.491.174.11.30 to compare to other viral vectors tested.

[0079] FIG. 59B is a plot displaying levels of editing achieved by AAV vectors in wild-type retinae injected with 5.0e+9 vg/eye of AAV.X.491.174.11.30 vectors, compared to total transgene size (bp), as described in Example 16. The grey line delimitates transgenes below or above 4.9kb size.

[0080] FIG. 60 shows in vivo editing results that AAV-mediated expression of CasX 491 and gRNA spacer 174.4.76 in rod photoreceptors led to detectable levels of editing levels at integrated Nrl-GFP locus in a dose-dependent manner, as described in Example 16. The bar graph shows editing levels detected by NGS at the integrated GFP locus 4-weeks and 12-weeks post-injection in heterozygous Nrl-GFP mice injected with the indicated doses of AAV.RP1.491.174.4.76 vectors in one eye, and the vehicle control in the contralateral eye).

[0081] FIG. 61A shows a western blot of retinal lysates from positive (C1, uninjected homozygous Nrl-GFP retinae) and negative (N, uninjected C57BL/6J retinae) controls, vehicle groups (V, AAV formulation buffer injected retinae) and AAV-CasX 491, gRNA scaffold 174 and spacer 4.76 treated retinae with the medium dose 1.9e+9 (M) or high dose 1.0e+10 vg (H arm. Blots display the respective bands for the HA protein (CasX protein, top), GFP protein (middle) and GAPDH (bottom panels) used as a loading control, as described in Example 16. Levels of percent editing in the retinae detected by NGS are displayed under the blot for each sample.

[0082] FIG. 61B is a scatter boxplot representing levels of GFP protein detected in the western blots of FIG. 56A (ratios of densitometric values of the GFP band for total amount of proteins, normalized to the vehicle group levels), as described in Example 16. One-way ANOVA statistical analysis was performed (*=p<0.5).

[0083] FIG. 61C is a plot correlating GFP protein fraction to levels of editing achieved in mouse retinae of the AAV-treated mice, for both the 1.0e+9 and 1.0e+10 dose groups, as described in Example 16.

[0084] FIG. 62A is a bar graph representing the ratio of GFP fluorescence levels (superior to inferior retina mean grey values) detected by fundus imaging at 4-weeks compared to 12-weeks post-injection in mice injected with two dose levels of AAV constructs, as described in Example 16.

[0085] FIG. 62B displays representative images of fluorescence fundus imaging of GFP in retina from mice injected with 1.0e+9 vg (#13) or 1.0e+10vg (#34) with the AAV constructs at 4-weeks and (left panel) or 12-weeks (right panel), as described in Example 16.

[0086] FIGS. 63A-63L present histology images or retinae of mice stained with various immunochemistry reagents, as described in Example 16, confirming efficient knock-down of GFP in photoreceptor cells in an AAV-dose dependent manner. The images are representative confocal images of cross-sectioned retinae injected with vehicle (FIGS. 63A, 63B, 63C, 63D), AAV-CasX at a 1.0e+9 vg dose (FIGS. 63E, 63F, 63G, and 63H) and 1.0E+10vg dose (FIGS. 631, 63J, 63K, and 63L). Structural imaging shows GFP expression by rod photoreceptors in the outer segment (images in FIGS. 63A, 63E, 63I and images FIGS. 63C, 63G, and 63K for 20× and 40× magnifications, respectively). Cell nuclei were counterstained with Hoechst (FIGS. 63B, 63F, and 63J) and cells stained with anti-HA to correlate levels of HA (CasX transgene levels; FIGS. 63D, 63H, and 63L; 40× magnification) and GFP expressed in photoreceptors. White box outlines in B and F indicate retinal regions analyzed at 40× magnification in FIGS. 63C and 63G. Legend: RPE=retinal pigment epithelium, OS=outer segment, ONL=outer nuclear layer, INL=inner nuclear layer, GCL=ganglion.

[0087] FIG. 64A shows results of an immunohistochemistry staining of a mouse liver section showing that CasX 491 and gRNA scaffold 174 with spacer 12.7 administered as an AAV IV injection was able to edit the tdTom locus in vivo in Ai9 mice, as described in Example 3. The images are representative of n=3 animals.

[0088] FIG. 64B shows results of an immunohistochemistry staining of a mouse heart section showing that CasX 491 and gRNA scaffold 174 with spacer 12.7 administered as an AAV IV injection was able to edit the tdTom locus in vivo in Ai9 mice, as described in Example 3. The images are representative of n=3 animals.

[0089] FIG. 65 is a graph of the quantification of percent editing at the exemplary B2M locus 5 days post-transduction of AAVs into human NPCs in a series of three-fold dilution of MOI, as described in Example 17. Editing levels were determined by NGS as indel rate and by flow cytometry as population of cells that do not express the HLA protein due to successful editing at the B2M locus.

[0090] FIG. 66 shows the results of an editing assay measured as indel rate detected by NGS at the human AAVS1 locus in human induced neurons (iNs) using the three indicated AAVs, each containing CasX 491 and gRNA with a specific spacer targeting AAVS1, as described in Example 17.

[0091] FIG. 67 is a bar graph exhibiting percent editing at the B2M locus in human iNs 14 days post-transduction of AAVs expressing CasX 491 driven by various protein promoters at an MOI of 2E4 or 6.67E3, as described in Example 17.

[0092] FIG. 68 shows the results of an editing assay using AAV transgene plasmids nucleofected into hNPCs, as described in Example 18, demonstrating that CpG reduction or depletion within the U1a promoter (construct ID 178 and 179), U6 promoter (construct ID 180 and 181), or bGH poly(A) (construct ID 182) did not significantly reduce CasX-mediated editing at the B2M locus compared to the editing achieved with the original CpG+AAV vector (construct ID 177). The controls used in this experiment were the non-targeting (NT) spacer and no treatment (NTx).

[0093] FIG. 69 is a bar graph showing editing results of the tdTomato locus in an experiment to assess the effects of AAV constructs having engineered Pol III promoter hybrid variants when delivered to mNPCs in an AAV vector, as described in Example 18. Editing was assessed by FACS five days post-nucleofection.

[0094] FIG. 70 illustrates the quantification of percent editing at the B2M locus as detected by NGS seven days post-transduction of AAVs into human iNs at an MOI of 3E3 (top bar chart) or 1E3 (middle bar chart), as described in Example 18. Various CpG-reduced or CpG-depleted AAV elements were tested (bottom table) to assess the effects of their use on editing efficiency at the B2M locus.

[0095] FIG. 71 is a bar plot showing the quantification of percent editing measured as indel rate detected by NGS at the ROSA26 locus for the indicated AAV constructs nucleofected into C2C12 myoblasts or mouse NPCs to assess the effects of individual muscle-specific promoters on editing rates, as described in Example 21.

[0096] FIG. 72 is a scatter plot of percent editing versus promoter size for all the AAV constructs with varying promoters tested, as described in Example 21.

[0097] FIG. 73 is a bar graph showing editing results of the tdTomato locus in an experiment to assess the effects of AAV constructs having engineered Pol III promoter hybrid variants when delivered to mNPCs in an AAV vector, as described in Example 5. Editing was assessed by FACS five days post-nucleofection.

[0098] FIG. 74A is a bar plot showing the quantification of percent editing at the B2M locus in human induced neurons (iNs) transduced with AAVs expressing the indicated constructs containing various poly(A) signal sequences at an MOI of 1E2 vg/cell, as described in Example 6.

[0099] FIG. 74B is a bar plot showing the quantification of percent editing at the B2M locus in human induced neurons (iNs) transduced with AAVs expressing the indicated constructs containing various poly(A) signal sequences at an MOI of 1E3 vg/cell, as described in Example 6.

[0100] FIG. 75 shows the schematics of AAV constructs with additional alternative gRNA configurations for constructs having two gRNAs, as described in Example 9. The tapered points depict the orientation of the transcriptional unit for CasX protein or gRNA.

[0101] FIG. 76A is a diagram of the secondary structure of guide RNA scaffold 235, noting the regions with CpG motifs, as described in Example 18. CpG motifs in (1) the pseudoknot stem, (2) the scaffold stem, (3) the extended stem bubble, (4) the extended step, and (5) the extended stem loop are labeled on the structure.

[0102] FIG. 76B is a diagram of the CpG-reducing mutations that were introduced into each of the five regions in the coding sequence of the guide RNA scaffold, as described in Example 18.

[0103] FIG. 77A provides the results of an editing experiment in which AAV vectors with various CpG-reduced or CpG-depleted guide RNA scaffolds were used to edit the B2M locus in induced neurons, as described in Example 18. The AAV vectors were administered at a multiplicity of infection (MOI) of 4e3. The bars show the mean±the SD of two replicates per sample. “No Tx” indicates a non-transduced control, and “NT” indicates a control with a non-targeting spacer.

[0104] FIG. 77B provides the results of an editing experiment in which AAV vectors with various CpG-reduced or CpG-depleted guide RNA scaffolds were used to edit the B2M locus in induced neurons, as described in Example 18. The AAV vectors were administered at an MOI of 3e3. The bars show the mean±the SD of two replicates per sample. “No Tx” indicates a non-transduced control.

[0105] FIG. 77C provides the results of an editing experiment in which AAV vectors with various CpG-reduced or CpG-depleted guide RNA scaffolds were used to edit the B2M locus in induced neurons, as described in Example 18. The AAV vectors were administered at an MOI of 1e3. The bars show the mean±the SD of two replicates per sample. “No Tx” indicates a non-transduced control.

[0106] FIG. 77D provides the results of an editing experiment in which AAV vectors with various CpG-reduced or CpG-depleted guide RNA scaffolds were used to edit the B2M locus in induced neurons, as described in Example 18. The AAV vectors were administered at an MOI of MOI=3e2. The bars show the mean±the SD of two replicates per sample. “No Tx” indicates a non-transduced control.

[0107] FIG. 78A is a bar graph showing the quantification of percent editing measured as indel rate detected at the ROSA26 locus in C2C12 myoblasts and myotubes transduced with AAVs containing the indicated promoters to drive CasX expression at an MOI of 3E5 vg/cell, as described in Example 21.

[0108] FIG. 78B is a bar graph showing the quantification of percent editing measured as indel rate detected at the ROSA26 locus in C2C12 myoblasts and myotubes transduced with AAVs containing the indicated promoters to drive CasX expression at an MOI of 1E5 vg/cell, as described in Example 21.

[0109] FIG. 79 is a bar graph showing the quantification of percent editing measured as indel rate detected at the ROSA26 locus in the indicated tissues harvested from mice injected with AAVs containing the indicated promoters driving CasX expression, as described in Example 21. As experimental controls, mice were either untreated (naïve) or injected with AAVs containing UbC promoter driving CasX expression with a non-targeting gRNA. N=3 animals per promoter experimental condition; N=2 animals for the untreated control group.

[0110] FIG. 80 is a bar graph quantifying average CasX expression, normalized by vg/dg, driven by muscle-specific promoters CK8e or MHC7 relative to CasX expression driven by UbC, for the indicated tissues harvested from mice injected with AAVs containing the indicated promoters, as described in Example 21. N=3 animals per promoter experimental condition.

[0111] FIG. 81 is a box plot showing the quantification of percent editing at the ROSA26 locus in retinae harvested from mice treated with subretinal injections of AAVs expressing CasX 491 driven by the indicated photoreceptor-specific promoters with a ROSA26-targeting spacer, as described in Example 28. The dashed line indicates the theoretical maximum editing of photoreceptors that can be achieved with optimal transduction.

[0112] FIG. 82A is a panel of scatterplots for promoter variants GRK1(292)-SV40 and GRK1(292), showing the correlation of vg/dg with the editing level achieved for a particular promoter used to drive CasX expression in the retinae, as described in Example 28. A nonlinear regression curve was fitted to assess the correlation, and the values of the slopes, along with their corresponding standard deviation values, of these curves were determined and reported in Table 47.

[0113] FIG. 82B is a panel of scatterplots for promoter variants GRK1(241) and GRK1(199), showing the correlation of vg/dg with the editing level achieved for a particular promoter used to drive CasX expression in the retinae, as described in Example 28. A nonlinear regression curve was fitted to assess the correlation, and the values of the slopes, along with their corresponding standard deviation values, of these curves were determined and reported in Table 47.

[0114] FIG. 82C is a panel of scatterplots for the indicated promoter variants GRK1(94) and GRK1(93), showing the correlation of vg/dg with the editing level achieved for a particular promoter used to drive CasX expression in the retinae, as described in Example 28. A nonlinear regression curve was fitted to assess the correlation, and the values of the slopes, along with their corresponding standard deviation values, of these curves were determined and reported in Table 47.

[0115] FIG. 83 is a bar plot showing the results of an editing assay at the tdTomato locus assessed by FACS in mNPCs nucleofected with AAV plasmids encoding for XAAVs expressing the CasX:dual-gRNA system with the indicated configurations and spacer combinations for the two gRNA units relative to the CasX construct, as described in Example 29. The “R” preceding the spacer denotes the reverse orientation of the transcription of the indicated gRNA unit. An AAV plasmid encoding for AAVs expressing CasX 491 with a single gRNA transcriptional unit using spacer 12.7 as well as an untreated well served as experimental controls.

[0116] FIG. 84A is a line graph showing the results of an editing assay at the tdTomato locus assessed by FACS in mNPCs transduced with XAAVs expressing the CasX:dual-gRNA system at varying MOIs, with the indicated spacer combinations of the two gRNA units arranged in configuration #1 relative to the CasX construct, as described in Example 29. An untreated control was included for comparison.

[0117] FIG. 84B is a line graph showing the results of an editing assay at the tdTomato locus assessed by FACS in mNPCs transduced with XAAVs expressing the CasX:dual-gRNA system at varying MOIs, with the indicated spacer combinations of the two gRNA units arranged in configuration #4 relative to the CasX construct, as described in Example 29. The “R” preceding the spacer denotes the reverse orientation of the transcription of the indicated gRNA unit. An untreated control was included for comparison.

[0118] FIG. 84C is a line graph showing the results of an editing assay at the tdTomato locus assessed by FACS in mNPCs transduced with XAAVs expressing the CasX:dual-gRNA system at varying MOIs, with the indicated spacer combinations of the two gRNA units arranged in configuration #2 relative to the CasX construct, as described in Example 29 An untreated control was included for comparison.

[0119] FIG. 85 is a bar graph showing the results of an editing assay at the tdTomato locus assessed by FACS in mNPCs transduced with XAAVs expressing the CasX:dual-gRNA system for indicated configurations #1, #4, and #2, as described in Example 29. XAAVs expressing CasX 491 with a single gRNA transcriptional unit using spacer 12.7 served as an experimental control.

[0120] FIG. 86 is a bar plot showing percent editing at the AAVS1 locus in human induced neurons (iNs) transduced with AAVs expressing the CasX:gRNA system using the indicated U6 promoter variants, at the MOI of 1E3 and 3E2 vg/cell, for N=1, as described in Example 31.

[0121] FIG. 87 is a bar plot showing percent editing at the AAVS1 locus in human iNs transduced with AAVs expressing the CasX:gRNA system using the indicated U6 promoter variants, at the MOI of 1E3 and 3E2 vg/cell, for N=2, as described in Example 31.

[0122] FIG. 88 is a bar plot showing percent editing at the AAVS1 locus in human iNs transduced with AAVs expressing the CasX:gRNA system using the indicated U6 promoter variants, at the MOI of 2E3, 6.67E2, and 2E2 vg/cell, for N=1, as described in Example 31.

[0123] FIG. 89 is a bar plot showing percent editing at the AAVS1 locus in human iNs transduced with AAVs expressing the CasX:gRNA system using the indicated U6 promoter variants, at the MOI of 2E3, 6.67E2, and 2E2 vg/cell, for N=2, as described in Example 31.

[0124] FIG. 90 is a bar plot showing percent editing at the AAVS1 locus in human iNs transduced with AAVs expressing the CasX:gRNA system using the indicated U6 promoter variants, at the MOI of 3E4, 1E4, 3.33E3, and 1.11E3 vg/cell, for N=1, as described in Example 31.

[0125] FIG. 91 is a bar plot showing percent editing at the AAVS1 locus in human iNs transduced with AAVs expressing the CasX:gRNA system using the indicated CasX proteins, at the MOI of 3E3, 1E3, and 3E2 vg/cell, as described in Example 34.

[0126] FIG. 92A is a bar plot showing percent editing at the AAVS1 locus in human iNs transduced with AAVs expressing the CasX:gRNA system using the indicated protein promoter and WPRE elements, at the MOI of 1E3 vg/cell, as described in Example 35.

[0127] FIG. 92B is a bar plot showing percent editing at the AAVS1 locus in human iNs transduced with AAVs expressing the CasX:gRNA system using the indicated protein promoter and WPRE elements, at the MOI of 1E4 vg/cell, as described in Example 35.

[0128] FIG. 93 is a bar graph showing the quantification of percent knockout of B2M in HEK293 cells transfected with CpG-depleted AAV plasmids containing the indicated gRNA scaffolds with spacer 7.37, as described in Example 33. The dotted line annotates the ˜41% transfection efficiency.

[0129] FIG. 94A is a bar plot showing percent editing at the AAVS1 locus in human iNs transduced with AAVs expressing the CasX:gRNA system using the indicated gRNA scaffolds (AAV construct ID #262-274) at the MOI of 3E4 vg/cell, as described in Example 33.

[0130] FIG. 94B is a bar plot showing percent editing at the AAVS1 locus in human iNs transduced with AAVs expressing the CasX:gRNA system using the indicated gRNA scaffolds (AAV construct ID #262-274) at the MOI of 1E4 vg/cell, as described in Example 33.

[0131] FIG. 94C is a bar plot showing percent editing at the AAVS1 locus in human iNs transduced with AAVs expressing the CasX:gRNA system using the indicated gRNA scaffolds (AAV construct ID #262-274) at the MOI of 3E3 vg/cell, as described in Example 33.

[0132] FIG. 95A is a bar plot showing the quantification of percent knockout of B2M in HEK293 cells transfected with CpG-depleted AAV plasmids containing the indicated gRNA scaffolds with spacer 7.37 (AAV construct ID #275-289) at the MOI of 1E4 vg/cell, as described in Example 33.

[0133] FIG. 95B is a bar plot showing the quantification of percent knockout of B2M in HEK293 cells transfected with CpG-depleted AAV plasmids containing the indicated gRNA scaffolds with spacer 7.37 (AAV construct ID #275-289) at the MOI of 3E3 vg/cell, as described in Example 33.

[0134] FIG. 95C is a bar plot showing the quantification of percent knockout of B2M in HEK293 cells transfected with CpG-depleted AAV plasmids containing the indicated gRNA scaffolds with spacer 7.37 (AAV construct ID #275-289) at the MOI of 1E3 vg/cell, as described in Example 33.

[0135] FIG. 96 is a western blot showing the levels of CasX expression (top western blot) in HEK293 cells transfected with AAV plasmids containing a CpG+CasX 515 sequence (lane 1) or CpG⁻ v1 CasX 515 sequence (lanes 2-3), as described in Example 32. Lysate from untransfected HEK293 cells were used as a ‘no plasmid’ control (lane 4). The bottom western blot shows the total protein loading control. Three technical replicates are shown.

[0136] FIG. 97 is a bar plot showing the results of AAV titering determined via ddPCR using a primer-probe set specific to either BGH or CasXfor the indicated AAV constructs, as described in Example 30.

[0137] FIG. 98 is a bar plot showing percent editing at the AAVS1 locus in human induced neurons (iNs) transduced with AAVs expressing the indicated AAV constructs (either dual-guide or single-guide), at the MOI of 1.3E4, 4.33E3, and 1.44E3 vg/cell, for N=1, as described in Example 30.

[0138] FIG. 99 is a bar plot showing percent editing at the B2M locus in human iNs transduced with AAVs expressing the indicated AAV constructs (either dual-guide or single-guide), at the MOI of 1.3E4, 4.33E3, and 1.44E3 vg/cell, for N=1, as described in Example 30.

[0139] FIG. 100 is a bar plot showing percent editing at the AAVS1 locus in human iNs transduced with AAVs expressing the indicated AAV constructs (either dual-guide or single-guide), at the MOI of 1E4, 3E3, and 1E3 vg/cell, for N=2, as described in Example 30.

[0140] FIG. 101 is a bar plot showing percent editing at the B2M locus in human iNs transduced with AAVs expressing the indicated AAV constructs (either dual-guide or single-guide), at the MOI of 1E4, 3E3, and 1E3 vg/cell, for N=2, as described in Example 30.

[0141] FIG. 102 shows the results of an editing experiment in which HEK293T cells were transduced with lentiviral particles expressing CasX variant 515 and a gRNA made up of either gRNA scaffold 174, 235, 316, 382, or 392 targeting the B2M locus or a non-targeting (“NT”) control, as described in Example 39. The lentiviruses were transduced at an MOI of 0.1. The bars show the mean of three samples, and the error bars represent the standard error of the mean (SEM).

[0142] FIG. 103 shows the results of an editing experiment in which HEK293T cells were transduced with lentiviral particles expressing CasX variant 515 and a gRNA made up of either gRNA scaffold 174, 235, 316, 382, or 392 targeting the B2M locus or a non-targeting (“NT”) control, as described in Example 39. The lentiviruses were transduced at a MOI of 0.05. The bars show the mean of three samples, and the error bars represent the SEM.

### DETAILED DESCRIPTION

[0143] While exemplary embodiments have been shown and described herein, it will be obvious to those skilled in the art that such embodiments are provided by way of example only. Numerous variations, changes, and substitutions will now occur to those skilled in the art without departing from the inventions claimed herein. It should be understood that various alternatives to the embodiments described herein may be employed in practicing the embodiments of the disclosure. It is intended that the claims define the scope of the invention and that methods and structures within the scope of these claims and their equivalents be covered thereby.

[0144] Unless otherwise defined, all technical and scientific terms used herein have the same meaning as commonly understood by one of ordinary skill in the art to which this invention belongs. Although methods and materials similar or equivalent to those described herein can be used in the practice or testing of the present embodiments, suitable methods and materials are described below. In case of conflict, the patent specification, including definitions, will control. In addition, the materials, methods, and examples are illustrative only and not intended to be limiting. Numerous variations, changes, and substitutions will now occur to those skilled in the art without departing from the invention.

### Definitions

[0145] “Hybridizable” or “complementary” are used interchangeably to mean that a nucleic acid (e.g., RNA, DNA) comprises a sequence of nucleotides that enables it to non-covalently bind, i.e., form Watson-Crick base pairs and/or G/U base pairs, “anneal”, or “hybridize,” to another nucleic acid in a sequence-specific, antiparallel, manner (i.e., a nucleic acid specifically binds to a complementary nucleic acid) under the appropriate in vitro and/or in vivo conditions of temperature and solution ionic strength. It is understood that the sequence of a polynucleotide need not be 100% complementary to that of its target nucleic acid to be specifically hybridizable; it can have at least about 70%, at least about 80%, or at least about 90%, or at least about 95% sequence identity and still hybridize to the target nucleic acid. Moreover, a polynucleotide may hybridize over one or more segments such that intervening or adjacent segments are not involved in the hybridization event (e.g., a loop structure or hairpin structure, a ‘bulge’, ‘bubble’ and the like). Thus, the skilled artisan will understand that while individual bases within a sequence may not be complementary to another sequence, the sequence as a whole is still considered to be complementary.

[0146] A “gene,” for the purposes of the present disclosure, includes a DNA region encoding a gene product (e.g., a protein, RNA), as well as all DNA regions which regulate the production of the gene product, whether or not such regulatory sequences are adjacent to coding and/or transcribed sequences. Accordingly, a gene may include accessory element sequences including, but not necessarily limited to, promoter sequences, terminators, translational regulatory sequences such as ribosome binding sites and internal ribosome entry sites, enhancers, silencers, insulators, boundary elements, replication origins, matrix attachment sites and locus control regions. Coding sequences encode a gene product upon transcription or transcription and translation; the coding sequences of the disclosure may comprise fragments and need not contain a full-length open reading frame. A gene can include both the strand that is transcribed as well as the complementary strand containing the anticodons.

[0147] The term “downstream” refers to a nucleotide sequence that is located 3′ to a reference nucleotide sequence. In certain embodiments, downstream nucleotide sequences relate to sequences that follow the starting point of transcription. For example, the translation initiation codon of a gene is located downstream of the start site of transcription.

[0148] The term “upstream” refers to a nucleotide sequence that is located 5′ to a reference nucleotide sequence. In certain embodiments, upstream nucleotide sequences relate to sequences that are located on the 5′ side of a coding region or starting point of transcription. For example, most promoters are located upstream of the start site of transcription.

[0149] The term “adjacent to” with respect to polynucleotide or amino acid sequences refers to sequences that are next to, or adjoining each other in a polynucleotide or polypeptide. The skilled artisan will appreciate that two sequences can be considered to be adjacent to each other and still encompass a limited amount of intervening sequence, e.g., 1, 2, 3, 4, 5, 6, 7, 8, 9 or 10 nucleotides or amino acids.

[0150] The term “regulatory element” is used interchangeably herein with the term “regulatory sequence,” and is intended to include promoters, enhancers, and other expression regulatory elements. It will be understood that the choice of the appropriate regulatory element will depend on the encoded component to be expressed (e.g., protein or RNA) or whether the nucleic acid comprises multiple components that require different polymerases or are not intended to be expressed as a fusion protein.

[0151] The term “accessory element” is used interchangeably herein with the term “accessory sequence,” and is intended to include, inter alia, polyadenylation signals (poly(A) signal), enhancer elements, introns, posttranscriptional regulatory elements (PTREs), nuclear localization signals (NLS), deaminases, DNA glycosylase inhibitors, factors that stimulate CRISPR-mediated homology-directed repair (e.g. in cis or in trans), activators or repressors of transcription, self-cleaving sequences, and fusion domains, for example a fusion domain fused to a CRISPR protein. It will be understood that the choice of the appropriate accessory element or elements will depend on the encoded component to be expressed (e.g., protein or RNA) or whether the nucleic acid comprises multiple components that require different polymerases or are not intended to be expressed as a fusion protein.

[0152] The term “promoter” refers to a DNA sequence that contains a transcription start site and additional sequences to facilitate polymerase binding and transcription. Exemplary eukaryotic promoters include elements such as a TATA box, and/or B recognition element (BRE) and assists or promotes the transcription and expression of an associated transcribable polynucleotide sequence and/or gene (or transgene). A promoter can be synthetically produced or can be derived from a known or naturally occurring promoter sequence or another promoter sequence. A promoter can also include a chimeric promoter comprising a combination of two or more heterologous sequences to confer certain properties. A promoter of the present disclosure can include variants of promoter sequences that are similar in composition, but not identical to, other promoter sequence(s) known or provided herein. A promoter can be classified according to criteria relating to the pattern of expression of an associated coding or transcribable sequence or gene operably linked to the promoter, such as constitutive, developmental, tissue-specific, inducible, etc. A promoter can also be classified according to its strength. As used in the context of a promoter, “strength” refers to the rate of transcription of the gene controlled by the promoter. A “strong” promoter means the rate of transcription is high, while a “weak” promoter means the rate of transcription is relatively low.

[0153] A promoter of the disclosure can be a Polymerase II (Pol II) promoter. Polymerase II transcribes all protein coding and many non-coding genes. A representative Pol II promoter includes a core promoter, which is a sequence of about 100 base pairs surrounding the transcription start site, and serves as a binding platform for the Pol II polymerase and associated general transcription factors. The promoter may contain one or more core promoter elements such as the TATA box, BRE, Initiator (INR), motif ten element (MTE), downstream core promoter element (DPE), downstream core element (DCE), although core promoters lacking these elements are known in the art. All Pol II promoters are envisaged as within the scope of the instant disclosure.

[0154] A promoter of the disclosure can be a Polymerase III (Pol III) promoter. Pol III transcribes DNA to synthesize small ribosomal RNAs such as the 5S rRNA, tRNAs, and other small RNAs. Representative Pol III promoters use internal control sequences (sequences within the transcribed section of the gene) to support transcription, although upstream elements such as the TATA box are also sometimes used. All Pol III promoters are envisaged as within the scope of the instant disclosure.

[0155] The term “enhancer” refers to regulatory DNA sequences that, when bound by specific proteins called transcription factors, regulate the expression of an associated gene. Enhancers may be located in the intron of the gene, or 5′ or 3′ of the coding sequence of the gene. Enhancers may be proximal to the gene (i.e., within a few tens or hundreds of base pairs (bp) of the promoter), or may be located distal to the gene (i.e., thousands of bp, hundreds of thousands of bp, or even millions of bp away from the promoter). A single gene may be regulated by more than one enhancer, all of which are envisaged as within the scope of the instant disclosure. Non-limiting examples of enhancers include CMV enhancer, muscle enhancer, cardiac muscle enhancer, skeletal muscle enhancer, myoblast muscle enhancer, and PTRE.

[0156] As used herein, a “post-transcriptional regulatory element (PTRE, or TRE),” such as a hepatitis PTRE, refers to a DNA sequence that, when transcribed creates a tertiary structure capable of exhibiting post-transcriptional activity to enhance or promote expression of an associated gene operably linked thereto.

[0157] “Recombinant,” as used herein, means that a particular nucleic acid (DNA or RNA) is the product of various combinations of cloning, restriction, and/or ligation steps resulting in a construct having a structural coding or non-coding sequence distinguishable from endogenous nucleic acids found in natural systems. Generally, DNA sequences encoding the structural coding sequence can be assembled from cDNA fragments and short oligonucleotide linkers, or from a series of synthetic oligonucleotides, to provide a synthetic nucleic acid which is capable of being expressed from a recombinant transcriptional unit contained in a cell or in a cell-free transcription and translation system. Such sequences can be provided in the form of an open reading frame uninterrupted by internal non-translated sequences, or introns, which are typically present in eukaryotic genes. Genomic DNA comprising the relevant sequences can also be used in the formation of a recombinant gene or transcriptional unit. Sequences of non-translated DNA may be present 5′ or 3′ from the open reading frame, where such sequences do not interfere with manipulation or expression of the coding regions, and may indeed act to modulate production of a desired product by various mechanisms (see “enhancers” and “promoters”, above).

[0158] The term “recombinant polynucleotide” or “recombinant nucleic acid” refers to one which is not naturally occurring, e.g., is made by the artificial combination of two otherwise separated segments of sequence through human intervention. This artificial combination is often accomplished by either chemical synthesis means, or by the artificial manipulation of isolated segments of nucleic acids, e.g., by genetic engineering techniques. Such is usually done to replace a codon with a redundant codon encoding the same or a conservative amino acid, while typically introducing or removing a sequence recognition site. Alternatively, it is performed to join together nucleic acid segments of desired functions to generate a desired combination of functions. This artificial combination is often accomplished by either chemical synthesis means, or by the artificial manipulation of isolated segments of nucleic acids, e.g., by genetic engineering techniques.

[0159] Similarly, the term “recombinant polypeptide” or “recombinant protein” refers to a polypeptide or protein which is not naturally occurring, e.g., is made by the artificial combination of two otherwise separated segments of amino sequence through human intervention. Thus, e.g., a protein that comprises a heterologous amino acid sequence is recombinant.

[0160] As used herein, the term “contacting” means establishing a physical connection between two or more entities. For example, contacting a target nucleic acid with a guide nucleic acid means that the target nucleic acid and the guide nucleic acid are made to share a physical connection; e.g., can hybridize if the sequences share sequence similarity.

[0161] “Dissociation constant”, or “Ka”, are used interchangeably and mean the affinity between a ligand “L” and a protein “P”; i.e., how tightly a ligand binds to a particular protein. It can be calculated using the formula K_{d}=[L][P]/[LP], where [P], [L] and [LP] represent molar concentrations of the protein, ligand and complex, respectively.

[0162] The disclosure provides systems and methods useful for editing a target nucleic acid sequence. As used herein “editing” is used interchangeably with “modifying” and “modification” and includes but is not limited to cleaving, nicking, deleting, knocking in, knocking out, and the like. Modifying can also encompass epigenetic modifications to a nucleic acid, or chromatin containing the nucleic acid, such as, but not limited to, changes in DNA methylation, and histone methylation and acetylation.

[0163] By “cleavage” it is meant the breakage of the covalent backbone of a target nucleic acid molecule (e.g., RNA, DNA). Cleavage can be initiated by a variety of methods including, but not limited to, enzymatic or chemical hydrolysis of a phosphodiester bond. Both single-stranded cleavage and double-stranded cleavage are possible, and double-stranded cleavage can occur as a result of two distinct single-stranded cleavage events.

[0164] The term “knock-out” refers to the elimination of a gene or the expression of a gene. For example, a gene can be knocked out by either a deletion or an addition of a nucleotide sequence that leads to a disruption of the reading frame. As another example, a gene may be knocked out by replacing a part of the gene with an irrelevant sequence. The term “knock-down” as used herein refers to reduction in the expression of a gene or its gene product(s). As a result of a gene knock-down, the protein activity or function may be attenuated or the protein levels may be reduced or eliminated.

[0165] As used herein, “homology-directed repair” (HDR) refers to the form of DNA repair that takes place during repair of double-strand breaks in cells. This process requires nucleotide sequence homology, and uses a donor template to repair or knock-out a target DNA, and leads to the transfer of genetic information from the donor to the target. Homology-directed repair can result in an alteration of the sequence of the target sequence by insertion, deletion, or mutation if the donor template differs from the target DNA sequence and part or all of the sequence of the donor template is incorporated into the target DNA.

[0166] As used herein, “non-homologous end joining” (NHEJ) refers to the repair of double-strand breaks in DNA by direct ligation of the break ends to one another without the need for a homologous template (in contrast to homology-directed repair, which requires a homologous sequence to guide repair). NHEJ often results in the loss (deletion) of nucleotide sequence near the site of the double-strand break.

[0167] As used herein “micro-homology mediated end joining” (MMEJ) refers to a mutagenic DSB repair mechanism, which always associates with deletions flanking the break sites without the need for a homologous template (in contrast to homology-directed repair, which requires a homologous sequence to guide repair). MMEJ often results in the loss (deletion) of nucleotide sequence near the site of the double-strand break.

[0168] A polynucleotide or polypeptide has a certain percent “sequence similarity” or “sequence identity” to another polynucleotide or polypeptide, meaning that, when aligned, that percentage of bases or amino acids are the same, and in the same relative position, when comparing the two sequences. Sequence similarity (sometimes referred to as percent similarity, percent identity, or homology) can be determined in a number of different manners. To determine sequence similarity, sequences can be aligned using the methods and computer programs that are known in the art, including BLAST, available over the world wide web at ncbi.nlm.nih.gov/BLAST. Percent complementarity between particular stretches of nucleic acid sequences within nucleic acids can be determined using any convenient method. Example methods include BLAST programs (basic local alignment search tools) and PowerBLAST programs (Altschul et al., J. Mol. Biol., 1990, 215, 403-410; Zhang and Madden, Genome Res., 1997, 7, 649-656) or by using the Gap program (Wisconsin Sequence Analysis Package, Version 8 for Unix, Genetics Computer Group, University Research Park, Madison Wis.), e.g., using default settings, which uses the algorithm of Smith and Waterman (Adv. Appl. Math., 1981, 2, 482-489).

[0169] The terms “polypeptide,” and “protein” are used interchangeably herein, and refer to a polymeric form of amino acids of any length, which can include coded and non-coded amino acids, chemically or biochemically modified or derivatized amino acids, and polypeptides having modified peptide backbones. The term includes fusion proteins, including, but not limited to, fusion proteins with a heterologous amino acid sequence.

[0170] A “vector” or “expression vector” comprises a replicon, such as plasmid, phage, virus, or cosmid, to which another DNA segment, (e.g., an expression cassette), may be attached so as to bring about the replication or expression of the attached segment in a cell.

[0171] The term “naturally-occurring” or “unmodified” or “wild type” as used herein as applied to a nucleic acid, a polypeptide, a cell, or an organism, refers to a nucleic acid, polypeptide, cell, or organism that is found in nature.

[0172] As used herein, a “mutation” refers to an insertion, deletion, substitution, duplication, or inversion of one or more amino acids or nucleotides as compared to a wild-type or reference amino acid sequence or to a wild-type or reference nucleotide sequence.

[0173] As used herein the term “isolated” is meant to describe a polynucleotide, a polypeptide, or a cell that is in an environment different from that in which the polynucleotide, the polypeptide, or the cell naturally occurs. An isolated genetically modified host cell may be present in a mixed population of genetically modified host cells.

[0174] A “host cell,” as used herein, denotes a eukaryotic cell, a prokaryotic cell, or a cell from a multicellular organism (e.g., a cell line) cultured as a unicellular entity, which eukaryotic or prokaryotic cells are used as recipients for a nucleic acid (e.g., an AAV vector), and include the progeny of the original cell which has been genetically modified by the nucleic acid. It is understood that the progeny of a single cell may not necessarily be completely identical in morphology or in genomic or total DNA complement as the original parent, due to natural, accidental, or deliberate mutation. A “recombinant host cell” (also referred to as a “genetically modified host cell”) is a host cell into which has been introduced a heterologous nucleic acid, e.g., an AAV vector.

[0175] The disclosure provides systems and methods useful for editing a target nucleic acid sequence. As used herein “editing” is used interchangeably with “modifying” and “modification” and includes but is not limited to cleaving, nicking, deleting, knocking in, knocking out, and the like.

[0176] By “cleavage” it is meant the breakage of the covalent backbone of a target nucleic acid molecule (e.g., RNA, DNA). Cleavage can be initiated by a variety of methods including, but not limited to, enzymatic or chemical hydrolysis of a phosphodiester bond. Both single-stranded cleavage and double-stranded cleavage are possible, and double-stranded cleavage can occur as a result of two distinct single-stranded cleavage events.

[0177] As used herein, a “mutation” refers to an insertion, deletion, substitution, duplication, or inversion of one or more amino acids or nucleotides as compared to a wild-type or reference amino acid sequence or to a wild-type or reference nucleotide sequence.

[0178] As used herein the term “isolated” is meant to describe a polynucleotide, a polypeptide, or a cell that is in an environment different from that in which the polynucleotide, the polypeptide, or the cell naturally occurs. An isolated genetically modified host cell may be present in a mixed population of genetically modified host cells.

[0179] A “host cell,” as used herein, denotes a eukaryotic cell, a prokaryotic cell, or a cell from a multicellular organism (e.g., in a cell line), which eukaryotic or prokaryotic cells are used as recipients for a nucleic acid (e.g., an expression vector), and include the progeny of the original cell which has been genetically modified by the nucleic acid. It is understood that the progeny of a single cell may not necessarily be completely identical in morphology or in genomic or total DNA complement as the original parent, due to natural, accidental, or deliberate mutation. A “recombinant host cell” (also referred to as a “genetically modified host cell”) is a host cell into which has been introduced a heterologous nucleic acid, e.g., an expression vector.

[0180] A “target cell marker” refers to a molecule expressed by a target cell including but not limited to cell-surface receptors, cytokine receptors, antigens, tumor-associated antigens, glycoproteins, oligonucleotides, enzymatic substrates, antigenic determinants, or binding sites that may be present in the on the surface of a target tissue or cell that may serve as ligands for an antibody fragment or glycoprotein tropism factor.

[0181] The term “conservative amino acid substitution” refers to the interchangeability in proteins of amino acid residues having similar side chains. For example, a group of amino acids having aliphatic side chains consists of glycine, alanine, valine, leucine, and isoleucine; a group of amino acids having aliphatic-hydroxyl side chains consists of serine and threonine; a group of amino acids having amide-containing side chains consists of asparagine and glutamine; a group of amino acids having aromatic side chains consists of phenylalanine, tyrosine, and tryptophan; a group of amino acids having basic side chains consists of lysine, arginine, and histidine; and a group of amino acids having sulfur-containing side chains consists of cysteine and methionine. Exemplary conservative amino acid substitution groups are: valine-leucine-isoleucine, phenylalanine-tyrosine, lysine-arginine, alanine-valine, and asparagine-glutamine.

[0182] The term “antibody,” as used herein, encompasses various antibody structures, including but not limited to monoclonal antibodies, polyclonal antibodies, multispecific antibodies (e.g., bispecific antibodies), nanobodies, single domain antibodies such as VHH antibodies, and antibody fragments so long as they exhibit the desired antigen-binding activity or immunological activity. Antibodies represent a large family of molecules that include several types of molecules, such as IgD, IgG, IgA, IgM and IgE.

[0183] An “antibody fragment” refers to a molecule other than an intact antibody that comprises a portion of an intact antibody and that binds the antigen to which the intact antibody binds. Examples of antibody fragments include but are not limited to Fv, Fab, Fab′, Fab′-SH, F(ab′)2, diabodies, single chain diabodies, linear antibodies, a single domain antibody, a single domain camelid antibody, single-chain variable fragment (scFv) antibody molecules, and multispecific antibodies formed from antibody fragments.

[0184] As used herein, “treatment” or “treating,” are used interchangeably herein and refer to an approach for obtaining beneficial or desired results, including but not limited to a therapeutic benefit and/or a prophylactic benefit. By therapeutic benefit is meant eradication or amelioration of the underlying disorder or disease being treated. A therapeutic benefit can also be achieved with the eradication or amelioration of one or more of the symptoms or an improvement in one or more clinical parameters associated with the underlying disease such that an improvement is observed in the subject, notwithstanding that the subject may still be afflicted with the underlying disorder.

[0185] The terms “therapeutically effective amount” and “therapeutically effective dose”, as used herein, refer to an amount of a drug or a biologic, alone or as a part of a composition, that is capable of having any detectable, beneficial effect on any symptom, aspect, measured parameter or characteristics of a disease state or condition when administered in one or repeated doses to a subject such as a human or an experimental animal. Such effect need not be absolute to be beneficial.

[0186] As used herein, “administering” means a method of giving a dosage of a compound (e.g., a composition of the disclosure) or a composition (e.g., a pharmaceutical composition) to a subject.

[0187] A “subject” is a mammal. Mammals include, but are not limited to, domesticated animals, non-human primates, humans, dogs, rabbits, mice, rats and other rodents.

[0188] Some of the numerical results herein, for example multiplicity of infection (MOI), are expressed in scientific notation, in which a numerical value is expressed as a number multiplied by 10 raised to a certain exponent. There are various well-known ways to express a number in scientific notation. For example, each of 1E9, 1e9, 1e+9, or 1×10⁹ are variant formats of scientific notation, and is known to have the same meaning of 1 times 10 to the power of 9, or 1,000,000,000.

[0189] All publications, patents, and patent applications mentioned in this specification are herein incorporated by reference to the same extent as if each individual publication, patent, or patent application was specifically and individually indicated to be incorporated by reference. The contents of WO 2020/247882, filed on Jun. 5, 2020, WO 2020/247883, filed Jun. 5, 2020, WO 2021/050593, filed on Sep. 9, 2020, WO 2021/050601, filed on Sep. 9, 2021, WO 2021/142342, filed on Jan. 8, 2021, WO 2021/113763, filed on Dec. 4, 2020, WO 2021/113769, filed on Dec. 4, 2020, WO 2021/113772, filed on Dec. 4, 2020, WO 2022/120095, filed Dec. 2, 2021, WO 2022/120094, filed on Dec. 2, 2021, WO 2022/125843, filed on Dec. 9, 2021, WO 2022/261150, filed on Jun. 7, 2022, WO 2023/049742, filed on Sep. 21, 2022, WO 2022/261149, filed on Jun. 7, 2022, PCT/US2023/067791, filed on Jun. 1, 2023, and PCT/US2023/067901, filed on Jun. 3, 2023 which disclose CasX variants and gRNA variants, are hereby incorporated by reference in their entirety.

### I. General Methods

[0190] The practice of the present invention employs, unless otherwise indicated, conventional techniques of immunology, biochemistry, chemistry, molecular biology, microbiology, cell biology, genomics and recombinant DNA, which can be found in such standard textbooks as Molecular Cloning: A Laboratory Manual, 3rd Ed. (Sambrook et al., Harbor Laboratory Press 2001); Short Protocols in Molecular Biology, 4th Ed. (Ausubel et al. eds., John Wiley & Sons 1999); Protein Methods (Bollag et al., John Wiley & Sons 1996); Nonviral Vectors for Gene Therapy (Wagner et al. eds., Academic Press 1999); Viral Vectors (Kaplift & Loewy eds., Academic Press 1995); Immunology Methods Manual (I. Lefkovits ed., Academic Press 1997); and Cell and Tissue Culture: Laboratory Procedures in Biotechnology (Doyle & Griffiths, John Wiley & Sons 1998), the disclosures of which are incorporated herein by reference.

[0191] Where a range of values is provided, it is understood that endpoints are included and that each intervening value, to the tenth of the unit of the lower limit unless the context clearly dictates otherwise, between the upper and lower limit of that range and any other stated or intervening value in that stated range, is encompassed. The upper and lower limits of these smaller ranges may independently be included in the smaller ranges, and are also encompassed, subject to any specifically excluded limit in the stated range. Where the stated range includes one or both of the limits, ranges excluding either or both of those included limits are also included.

[0192] Unless defined otherwise, all technical and scientific terms used herein have the same meaning as commonly understood by one of ordinary skill in the art to which this invention belongs. All publications mentioned herein are incorporated herein by reference to disclose and describe the methods and/or materials in connection with which the publications are cited.

[0193] It must be noted that as used herein and in the appended claims, the singular forms “a,” “an,” and “the” include plural referents unless the context clearly dictates otherwise.

[0194] It will be appreciated that certain features of the disclosure, which are, for clarity, described in the context of separate embodiments, may also be provided in combination in a single embodiment. In other cases, various features of the disclosure, which are, for brevity, described in the context of a single embodiment, may also be provided separately or in any suitable sub-combination. It is intended that all combinations of the embodiments pertaining to the disclosure are specifically embraced by the present disclosure and are disclosed herein just as if each and every combination was individually and explicitly disclosed. In addition, all sub-combinations of the various embodiments and elements thereof are also specifically embraced by the present disclosure and are disclosed herein just as if each and every such sub-combination was individually and explicitly disclosed herein.

### II. Recombinant AAV Vectors

[0195] In a first aspect, the present disclosure relates to recombinant AAV vectors (rAAV) optimized for the expression and delivery of CRISPR nucleases to target cells and/or tissues for genetic editing.

[0196] Wild-type AAV is a small, single-stranded DNA virus belonging to the parvovirus family. The wild-type AAV genome is made up of two genes that encode four replication proteins and three capsid proteins, respectively, and is flanked on either side by inverted terminal repeats (ITRs) having 130-145 nucleotides that fold into a hairpin shape important for replication. The virion is composed of three capsid proteins, Vp1, Vp2, and Vp3, produced in a 1:1:10 ratio from the same open reading frame but from differential splicing (Vp1) and alternative translational start sites (Vp2 and Vp3, respectively). The cap gene produces an additional, non-structural protein called the Assembly-Activating Protein (AAP). This protein is produced from ORF2 and is essential for the capsid-assembly process. The capsid forms a supramolecular assembly of approximately 60 individual capsid protein subunits into a non-enveloped, T-1 icosahedral lattice capable of protecting the AAV genome.

[0197] Being naturally replication-defective and capable of transducing nearly every cell type in the human body, AAV represents a suitable vector for therapeutic use in gene therapy or vaccine delivery. Typically, when producing a recombinant AAV vector, the sequence between the two ITRs is replaced with one or more sequences of interest as a part of the transgene, and the Rep and Cap sequences are provided in trans, making the ITRs the only viral DNA that remains in the vector. The resulting recombinant AAV vector genome construct comprises two cis-acting 130 to 145-nucleotide ITRs flanking an expression cassette encoding the transgene sequences of interest, providing at least 4.7 kb or more for packaging of foreign DNA such that the total size of the vector is below 4.8 to 5 kb, which is compatible with packaging within the AAV capsid (it being understood that as the size of the construct exceeds this threshold, the packaging efficiency of the vector decreases). As used herein, “transgene” includes ITRs and an expression cassette incorporated between the ITRs. In the context of CRISPR-mediated gene editing, however, the size limitation of the expression cassette is a challenge for most CRISPR systems for incorporation into an AAV, given the large size of the nucleases.

[0198] In one aspect, the present disclosure relates to rAAV transgene compositions. In some embodiments, the disclosure provides transgenes wherein the transgene comprises a polynucleotide sequence encoding a Class 2, Type V CRISPR nuclease protein and a polynucleotide sequence encoding a first guide RNA (gRNA) with a linked targeting sequence of 15 to 20 nucleotides complementary to a target nucleic acid of a cell. In some embodiments, the disclosure provides an rAAV transgene comprising a polynucleotide sequence encoding a CasX nuclease protein and a polynucleotide sequence encoding a first guide RNA (gRNA) with a linked targeting sequence of 15 to 20 nucleotides complementary to a target nucleic acid of a cell. In some embodiments, the disclosure provides an rAAV transgene comprising a polynucleotide sequence encoding a CasX nuclease protein, and a polynucleotide sequence encoding a first and a second guide RNA (gRNA), each with a linked targeting sequence of 15 to 20 nucleotides complementary to a target nucleic acid of a cell, wherein the targeting sequence of the second gRNA is complementary to a different or overlapping region of the target nucleic acid. In some embodiments, the transgene has less than about 4800, less than about 4700, less than about 4600, less than about 4500, less than about 4400 nucleotides, less than about 4300 nucleotides, or less than about 4250 nucleotides, and the rAAV transgene is configured for incorporation into an rAAV capsid. In some embodiments, the transgene has about 4250 to about 4800 nucleotides, or any integer in between. The CasX nuclease, gRNA, and other components of the rAAV transgene are described more fully, below.

[0199] In some embodiments, the transgene comprises components selected from a polynucleotide sequence encoding a CasX nuclease protein and a polynucleotide sequence encoding a first guide RNA (gRNA) with a linked targeting sequence of 15 to 20 nucleotides complementary to a target nucleic acid of a cell, a first and a second rAAV inverted terminal repeat (ITR) sequence, a first promoter sequence operably linked to the CasX protein, a sequence encoding a nuclear localization signal (NLS), a 3′ UTR, a poly(A) signal sequence, a second promoter operably linked to the first gRNA, and, optionally, an accessory element, wherein the rAAV transgene is configured for incorporation into an rAAV capsid. In some embodiments, the transgene comprises components selected from a polynucleotide sequence encoding a CasX nuclease protein and a polynucleotide sequence encoding a first guide RNA (gRNA) with a linked targeting sequence of 15 to 20 nucleotides complementary to a target nucleic acid of a cell, a first and a second rAAV inverted terminal repeat (ITR) sequence, a first promoter sequence operably linked to the CasX protein, a sequence encoding a nuclear localization signal (NLS), a 3′ UTR, a poly(A) signal sequence, a second promoter operably linked to the first gRNA, a second gRNA, a third promoter operably linked to the second gRNA, and, optionally, an accessory element, wherein the rAAV transgene is configured for incorporation into an rAAV capsid.

[0200] The promoter and accessory elements can be operably linked to components within the transgene, e.g., the CRISPR protein and/or gRNA, in a manner which permits its transcription, translation and/or expression in a cell transfected with the rAAV of the embodiments. As used herein, “operably linked” sequences include both accessory element sequences that are contiguous with the gene of interest and accessory element sequences that are at a distance to control the gene of interest.

[0201] In some embodiments, the disclosure provides accessory elements for inclusion in the rAAV that include, but are not limited to sequences that control transcription initiation, termination, enhancer elements, RNA processing signal sequences, enhancer elements, sequences that stabilize cytoplasmic mRNA, sequences that enhance translation efficiency (i.e., Kozak consensus sequence), an intron, a post-transcriptional regulatory element (PTRE), a deaminase, a DNA glycosylase inhibitor, a stimulator of CRISPR-mediated homology-directed repair, and an activator or repressor of transcription. In some cases, the PTRE is selected from the group consisting of cytomegalovirus immediate/early intronA, hepatitis B virus PRE (HPRE), Woodchuck Hepatitis virus PRE (WPRE), and 5′ untranslated region (UTR) of human heat shock protein 70 mRNA (Hsp70). In some embodiments, the PTRE comprises a sequence selected from the group consisting of SEQ ID NOS: 3615-3617, or a sequence having at least about 70%, at least about 80%, at least about 85%, at least about 90%, at least about 95%, at least about 95%, at least about 96%, at least about 97%, at least about 98%, or at least about 99% identity thereto. In the foregoing, the one or more accessory elements are operably linked to the CRISPR protein. It has been discovered that the inclusion of the accessory element(s) in the polynucleotide of the rAAV construct can enhance the expression, binding, activity, or performance of the CRISPR protein as compared to the CRISPR protein in the absence of said accessory element in the transgene of an rAAV vector. In one embodiment, the inclusion of the one or more accessory elements the transgene of the rAAV results in an increase in editing of a target nucleic acid by the CRISPR protein in an in vitro assay of at least about 10%, at least about 20%, at least about 30%, at least about 40%, at least about 50%, at least about 60%, at least about 70%, at least about 80%, at least about 90%, at least about 100%, at least about 150%, at least about 200%, or at least about 300% as compared to the CRISPR protein in the absence of said accessory element in an rAAV vector.

[0202] By “adeno-associated virus inverted terminal repeats” or “AAV ITRs” is meant the art recognized regions found at each end of the AAV genome which function together in cis as origins of DNA replication and as packaging signals for the virus. AAV ITRs, together with the AAV rep coding region, provide for the efficient excision and rescue from, and integration of a nucleotide sequence interposed between two flanking ITRs into a mammalian cell genome.

[0203] The nucleotide sequences of AAV ITR regions are known. See, for example Kotin, R. M. (1994) Human Gene Therapy 5:793-801; Berns, K. I. “Parvoviridae and their Replication” in Fundamental Virology, 2nd Edition, (B. N. Fields and D. M. Knipe, eds.). As used herein, an AAV ITR need not have the wild-type nucleotide sequence depicted, but may be altered, e.g., by the insertion, deletion or substitution of nucleotides. Additionally, the AAV ITR may be derived from any of several AAV serotypes, including without limitation, AAV1, AAV2, AAV3, AAV4, AAV5, AAV6, AAV7, AAV8, AAV9, AAV10, AAV11, AAV12, AAV 9.45, AAV 9.61, AAV 44.9, AAV-Rh74, AAVRh10, MyoAAV 1A1, MyoAAV 1A2, and MyoAAV 2A, and modified capsids of these serotypes. Furthermore, 5′ and 3′ ITRs which flank a selected nucleotide sequence in an AAV vector need not necessarily be identical or derived from the same AAV serotype or isolate, so long as they function as intended, i.e., to allow for excision and rescue of the sequence of interest from a host cell genome or vector, and to allow integration of the heterologous sequence into the recipient cell genome when AAV Rep gene products are present in the cell. Use of AAV serotypes for integration of heterologous sequences into a host cell is known in the art (see, e.g., WO2018195555A1 and US20180258424A1, incorporated by reference herein). In some embodiments, the ITRs are derived from serotype AAV1. In other embodiments, the ITRs are derived from serotype AAV2, including the 5′ ITR having sequence CCTGCAGGCAGCTGCGCGCTCGCTCGCTCACTGAGGCCGCCCGGGCGTCGGGCGAC CTTTGGTCGCCCGGCCTCAGTGAGCGAGCGAGCGCGCAGAGAGGGAGTGGCCAACT CCATCACTAGGGGTTCCT (SEQ ID NO: 17) and the 3′ ITR having sequence AGGAACCCCTAGTGATGGAGTTGGCCACTCCCTCTCTGCGCGCTCGCTCGCTCACTG AGGCCGGGCGACCAAAGGTCGCCCGACGCCCGGGCTTTGCCCGGGCGGCCTCAGTG AGCGAGCGAGCGCGCAGCTGCCTGCAGG (SEQ ID NO: 18). In other embodiments, the ITR sequences are modified to remove CpG motifs to reduce immunogenic responses. In one embodiment, the modified AAV2 5′ ITR sequence is the sequence of SEQ ID NO: 3749 and the 3′ ITR sequence is the sequence of SEQ ID NO: 4047.

[0204] By “AAV rep coding region” is meant the region of the AAV genome which encodes the replication proteins Rep 78, Rep 68, Rep 52 and Rep 40. These Rep expression products have been shown to possess many functions, including recognition, binding and nicking of the AAV origin of DNA replication, DNA helicase activity and modulation of transcription from AAV (or other heterologous) promoters. The Rep expression products are collectively required for replicating the AAV genome.

[0205] By “AAV cap coding region” is meant the region of the AAV genome which encodes the capsid proteins VP1, VP2, and VP3, or functional homologues thereof. These Cap expression products supply the packaging functions which are collectively required for packaging the viral genome.

[0206] In some embodiments, the rAAV is of serotype 9 or of serotype 6, which have been demonstrated to effectively deliver polynucleotides to motor neurons and glia throughout the spinal cord in preclinical models of Amyotrophic lateral sclerosis (ALS) (Foust, K D. et al. Therapeutic AAV9-mediated suppression of mutant RHO slows disease progression and extends survival in models of inherited ALS. Mol Ther. 21(12):2148 (2013)). In some embodiments, the methods provide use of rAAV9 or rAAV6 for targeting of neurons via intraparenchymal brain injection. In some embodiments, the methods provide use of rAAV9 for intravenous administering of the vector wherein the rAAV9 has the ability to penetrate the blood-brain barrier and drive gene expression in the nervous system via both neuronal and glial tropism of the vector. In other embodiments, the rAAV is of serotype 8, which have been demonstrated to effectively deliver polynucleotides to retinal cells.

[0207] In a feature of the rAAV of the present disclosure, it has been discovered that utilization of certain Class 2 CRISPR systems of smaller size permit the inclusion of additional sequence space in the polynucleotides used in the making of the rAAV that can be utilized for the remaining components of the transgene, as described herein. In some embodiments, the encoded Class 2 CRISPR system comprises a Type V protein selected from the group consisting of Cas12a (Cpf1), Cas12b (C2c1), Cas12c (C2c3), Cas12d (CasY), Cas12e (CasX), Cas12f, Cas12g, Cas12h, Cas12i, Cas12j, Cas12k, Cas14, and/or CasΦ, and the associated guide RNA of the respective system. In some embodiments, the encoded Class 2, Type V CRISPR nuclease protein is a CasX protein. In some embodiments, the encoded Class 2, Type V CRISPR nuclease protein is a CasX, and the guide is a CasX guide; embodiments of which are described herein.

[0208] As described, supra, the smaller size of the Class 2, Type V proteins and gRNA contemplated for inclusion in the transgene of the rAAV permit inclusion of additional or larger components in a transgene that can be incorporated into a single rAAV particle. In some embodiments, the transgene encoding the Class 2, Type V proteins and a first gRNA with a linked targeting sequence complementary to a target nucleic acid and one or more accessory elements has less than about 4800, less than about 4700, less than about 4600, less than about 4500, less than about 4400 nucleotides, less than about 4300 nucleotides, or less than about 4250 nucleotides, wherein the rAAV transgene is configured for incorporation into a rAAV capsid. In other embodiments, the transgene encoding the Class 2, Type V proteins and a first and a second gRNA with linked targeting sequences complementary to a target nucleic acid and one or more accessory elements has less than about 4800, less than about 4700, less than about 4600, less than about 4500, less than about 4400 nucleotides, less than about 4300 nucleotides, or less than about 4250 nucleotides, wherein the rAAV transgene is configured for incorporation into a rAAV capsid. In some embodiments, the rAAV transgene has about 4250 to about 4800 nucleotides, or any integer in between.

[0209] In some embodiments, the polynucleotide of the transgene encoding the Class 2, Type V CRISPR nuclease protein sequence and the gRNA sequence are less than about 3100, about 3090, about 3080, about 3070, about 3060, about 3050, or less than about 3040 nucleotides in length. In other embodiments, the polynucleotide of the transgene encoding the Class 2, Type V CRISPR nuclease protein sequence and the gRNA sequence are less than about 3040 to about 3100 nucleotides in combined length. Thus, in light of the total length of the expression cassette that can be packaged into an rAAV particle, in some embodiments, the polynucleotide sequences of the transgene of a first promoter and the at least one accessory element have greater than at least about 1300, at least about 1350, at least about 1360, at least about 1370, at least about 1380, at least about 1390, at least about 1400, at least about 1500, at least about 1600 nucleotides, at least 1650, at least about 1700, at least about 1750, at least about 1800, at least about 1850, or at least about 1900 nucleotides in combined length. In other embodiments, the polynucleotide sequences of the transgene of the first promoter and the at least one accessory element have greater than at least about 1300 to at least about 1900 nucleotides in combined length. In one embodiment, the polynucleotide sequences of the transgene of the first promoter and the at least one accessory element have greater than 1314 nucleotides in combined length. In another embodiment, the polynucleotide sequences of the transgene of the first promoter and the at least one accessory element have greater than 1381 nucleotides in combined length. In other embodiments, the polynucleotide sequences of the transgene of the first promoter, the second promoter and the at least one accessory element have greater than at least about 1300, at least about 1350, at least about 1360, at least about 1370, at least about 1380, at least about 1390, at least about 1400, at least about 1500, at least about 1600 nucleotides, at least 1650, at least about 1700, at least about 1750, at least about 1800, at least about 1850, or at least about 1900 nucleotides in combined length. In other embodiments, the polynucleotide sequences of the transgene of the first promoter, the second promoter and the at least one accessory element have greater than at least about 1300 to at least about 1900 nucleotides in combined length. In one embodiment, the polynucleotide sequences of the transgene of the first promoter, the second promoter, and the at least one accessory element have greater than 1314 nucleotides in combined length. In other embodiments, the polynucleotide sequences of the transgene of the first promoter, the second promoter, and the at least one accessory element have greater than 1381 nucleotides in combined length. In still other embodiments, the polynucleotide sequences of the transgene of the first promoter, the second promoter, and the two or more accessory elements have greater than at least about 1300, at least about 1350, at least about 1360, at least about 1370, at least about 1380, at least about 1390, at least about 1400, at least about 1500, at least about 1600 nucleotides, at least 1650, at least about 1700, at least about 1750, at least about 1800, at least about 1850, or at least about 1900 nucleotides in combined length. In other embodiments, the polynucleotide sequences of the transgene of the first promoter, the second promoter, and the two or more accessory elements have greater than at least about 1300 to at least about 1900 nucleotides in combined length. In one embodiment, the polynucleotide sequences of the transgene of the first promoter, the second promoter, and the two or more accessory elements have greater than 1314 nucleotides in combined length. In another embodiment, the polynucleotide sequences of the transgene of the first promoter, the second promoter, and the two or more accessory elements have greater than 1381 nucleotides in combined length.

[0210] It has been discovered that use of shorter or truncated promoters in the rAAV transgene also permits a shorter total transgene size for inclusion of all the CRISPR and regulatory elements, while increasing the percentage of correctly packaged rAAV particles. In some embodiments, the total length of the transgene polynucleotide sequences of the first promoter and at least one accessory element are greater than at least about 1200, at least about 1300, at least about 1350, at least about 1360, at least about 1370, at least about 1380, at least about 1390, at least about 1400, at least about 1500, at least about 1600 nucleotides, at least 1650, at least about 1700 nucleotides in an rAAV construct with a total length of not more than 4700 nucleotides, wherein the transgene is capable of being integrated into an rAAV particle. In other embodiments, the total length of the transgene the polynucleotide sequences of the first promoter and at least one accessory element are greater than at least about 1300, at least about 1350, at least about 1360, at least about 1370, at least about 1380, at least about 1390, at least about 1400, at least about 1500, at least about 1600 nucleotides, at least 1650, at least about 1700 nucleotides in an rAAV construct with a total length of not more than 4800 nucleotides, wherein the transgene is configured for incorporation into an rAAV particle.

[0211] In some embodiments, the present disclosure provides a transgene polynucleotide comprising a first adeno-associated virus (AAV) inverted terminal repeat (ITR) sequence, a second AAV ITR sequence, a first promoter sequence, a sequence encoding a Class 2, Type V CRISPR nuclease protein, a second promoter sequence, a sequence encoding at least a first guide RNA (gRNA), and one or more accessory element sequences, wherein at least 25%, 26%, 27%, 28%, 29%, 30%, 31%, 32%, 33%, 34%, or 35% or more of the nucleotides of the polynucleotide sequence comprise the first and second promoters and the one or more accessory element sequences in combined length. In other embodiments, the present disclosure provides a transgene polynucleotide comprising a first adeno-associated virus (AAV) inverted terminal repeat (ITR) sequence, a second AAV ITR sequence, a first promoter sequence, a sequence encoding a Class 2, Type V CRISPR nuclease protein, a second promoter sequence, a sequence encoding a first guide RNA (gRNA), a third promoter sequence, a sequence encoding a second gRNA, and one or more accessory element sequences, wherein at least 25%, 26%, 27%, 28%, 29%, 30%, 31%, 32%, 33%, 34%, or 35% or more of the nucleotides of the polynucleotide sequences comprising the first, second, and third promoters and the one or more accessory element sequences in combined length. As detailed in the Examples, it has been discovered that the ability to devote more of the total polynucleotide of the expression cassette of an rAAV transgene to the promoters, a second gRNA, and/or the accessory elements results in enhanced expression of and/or performance of the CRISPR protein and gRNA, when expressed in the target host cell; either in an in vitro assay or in vivo in a subject. In some embodiments, the use of alternative or longer promoters and/or accessory elements (e.g., poly(A) signal, a gene enhancer element, an intron, a posttranscriptional regulatory element (PTRE), a nuclear localization signal (NLS), a deaminase, a DNA glycosylase inhibitor, a stimulator of CRISPR-mediated homology-directed repair, and an activator or repressor of transcription) in the rAAV polynucleotides and resulting rAAV results in an increase in editing of a target nucleic acid of at least about 10%, at least about 20%, at least about 30%, at least about 40%, at least about 50%, at least about 60%, at least about 70%, at least about 80%, at least about 90%, at least about 100%, at least about 150%, at least about 200%, or at least about 300% when the rAAV is assessed in an in vitro assay compared to a construct not having the alternative or longer promoters and/or accessory elements. In one embodiment, a Pol II promoter sequence of the transgene polynucleotide has at least about 35, at least about 50, at least about 80, at least about 100, at least about 200, at least about 300, at least about 400, at least about 500, at least about 600, at least about 700, or at least about 800 nucleotides. In another embodiments, a Pol III promoter sequence of the transgene polynucleotide has at least about 50, at least about 80, at least about 100, at least about 200, at least about 300, at least about 400, at least about 500, at least about 600, at least about 700, or at least about 800 nucleotides. Embodiments of the promoters are described more fully, below.

[0212] In some embodiments, the present disclosure provides a transgene polynucleotide, wherein the polynucleotide comprises one or more sequences selected from the group of sequences set forth in Tables 7-10, 12-17, 19, 22-38, 39-43, 45-46, 50-55, 57-58, 60-61, and 78 or a sequence having at least 85%, at least 90%, at least 95%, at least 95%, at least 96%, at least 97%, at least 98%, or at least 99% identity thereto. In another embodiment, the present disclosure provides a polynucleotide, wherein the polynucleotide comprises a sequence selected from the group of sequences set forth in Tables 7-10, 12-17, 19, 22-38, 39-43, 45-46, 50-55, 57-58, 60-61, and 78. In some embodiments, the polynucleotide sequence differs from those set forth in Tables 7-10, 12-17, 19, 22-38, 39-43, 45-46, 50-55, 57-58, 60-61, and 78 only in the selection of the targeting sequences of the gRNA or gRNAs encoded by the polynucleotide, wherein the targeting sequence is a sequence having 15 to 20 nucleotides capable of hybridizing with the sequence of a target nucleic acid. In some embodiments, the present disclosure provides a transgene polynucleotide of any of the embodiments described herein, wherein the polynucleotide has the configuration of a construct of FIG. 1, FIG. 25, FIG. 28, FIGS. 38-40, FIG. 47, or FIG. 75.

III. Guide Nucleic Acids of the rAAV

[0213] In some embodiments, the disclosure relates to guide ribonucleic acids (gRNA) utilized in the rAAV that have utility in genome editing of a target nucleic acid in a cell. As used herein, the term “gRNA” covers naturally-occurring molecules and gRNA variants, including chimeric gRNA variants comprising domains from different gRNA. gRNAs of the disclosure comprise a scaffold and a targeting sequence complementary to a target nucleic acid of a cell.

[0214] The present disclosure provides gRNAs with targeting sequences that are complementary to (and are therefore able to hybridize with) the target nucleic acid as a component of the gene editing rAAV. It is envisioned that in some embodiments, multiple gRNAs are delivered in the rAAV for the modification of a target nucleic acid. For example, a pair of gRNAs with targeting sequences to different or overlapping regions of the target nucleic acid sequence can be used, when each is complexed with a CRISPR nuclease, in order to bind and cleave at two different or overlapping sites within the gene, which is then edited by non-homologous end joining (NHEJ), homology-directed repair (HDR), homology-independent targeted integration (HITI), micro-homology mediated end joining (MMEJ), single strand annealing (SSA) or base excision repair (BER). For example, when an editing event designed to delete one or more exons of a gene is desired, a pair of gRNAs can be used in order to bind and cleave at two different sites 5′ and 3′ of the targeted exon(s) within the gene in order to excise the intervening sequence. In other cases, a pair of gRNAs can be used in order to bind, cleave, and modify two different genes. Both single-stranded cleavage and double-stranded cleavage are possible, and double-stranded cleavage can occur as a result of two distinct single-stranded cleavage events by the CRISPR nuclease.

a. Reference gRNA and gRNA Variants

[0215] As used herein, a “reference gRNA” refers to a CRISPR guide ribonucleic acid comprising a wild-type sequence of a naturally-occurring gRNA. In some embodiments, a gRNA scaffold of the disclosure may be subjected to one or more mutagenesis methods, such as the mutagenesis methods described in WO2022120095A1 and WO2020247882A1, incorporated by reference herein, which may include Deep Mutational Evolution (DME), deep mutational scanning (DMS), error prone PCR, cassette mutagenesis, random mutagenesis, staggered extension PCR, gene shuffling, domain swapping, or chemical modification to generate one or more gRNA variants with enhanced or varied properties relative to the gRNA scaffold that was modified. The activity of the gRNA scaffold from which a gRNA variant was derived may be used as a benchmark against which the activity of the gRNA variant is compared, thereby measuring improvements in function or other characteristics of the gRNA scaffold.

[0216] Table 1 provides the sequences of reference gRNAs tracr and scaffold sequences. In some embodiments, the disclosure provides gRNA variant sequences wherein the gRNA has a scaffold comprising a sequence having one or more nucleotide modifications relative to a reference gRNA sequence having a sequence of any one of SEQ ID NOS:4-16 of Table 1.

TABLE 1
Reference gRNA tracr and scaffold sequences

| SEQ ID NO. | Nucleotide Sequence |
|---|---|
| 4 | ACAUCUGGCGCGUUUAUUCCAUUACUUUGGAGCCAGUCCCAGCGACUAUGUCGUAUGGACGAAG |
| | CGCUUAUUUAUCGGAGAGAAACCGAUAAGUAAAACGCAUCAAAG |
| 5 | UACUGGCGCUUUUAUCUCAUUACUUUGAGAGCCAUCACCAGCGACUAUGUCGUAUGGGUAAAGC |
| | GCUUAUUUAUCGGAGAGAAAUCCGAUAAAUAAGAAGCAUCAAAG |
| 6 | ACAUCUGGCGCGUUUAUUCCAUUACUUUGGAGCCAGUCCCAGCGACUAUGUCGUAUGGACGAAG |
| | CGCUUAUUUAUCGGAGA |
| 7 | ACAUCUGGCGCGUUUAUUCCAUUACUUUGGAGCCAGUCCCAGCGACUAUGUCGUAUGGACGAAG |
| | CGCUUAUUUAUCGG |
| 8 | UACUGGCGCUUUUAUCUCAUUACUUUGAGAGCCAUCACCAGCGACUAUGUCGUAUGGGUAAAGC |
| | GCUUAUUUAUCGGAGA |
| 9 | UACUGGCGCUUUUAUCUCAUUACUUUGAGAGCCAUCACCAGCGACUAUGUCGUAUGGGUAAAGC |
| | GCUUAUUUAUCGG |
| 10 | GUUUACACACUCCCUCUCAUAGGGU |
| 11 | GUUUACACACUCCCUCUCAUGAGGU |
| 12 | UUUUACAUACCCCCUCUCAUGGGAU |
| 13 | GUUUACACACUCCCUCUCAUGGGGG |
| 14 | CCAGCGACUAUGUCGUAUGG |
| 15 | GCGCUUAUUUAUCGGAGAGAAAUCCGAUAAAUAAGAAGC |
| 16 | GGCGCUUUUAUCUCAUUACUUUGAGAGCCAUCACCAGCGACUAUGUCGUAUGGGUAAAGCGCUU |
| | AUUUAUCGGA |

b. GRNA Domains and their Function

[0217] The gRNAs of the rAAV of the disclosure comprise two segments: a targeting sequence and a protein-binding segment. The targeting segment of a gRNA includes a nucleotide sequence (referred to interchangeably as a guide sequence, a spacer, a targeter, or a targeting sequence) that is complementary to (and therefore hybridizes with) a specific sequence (a target site) within the target nucleic acid sequence (e.g., a strand of a double stranded target DNA, a target ssRNA, a target ssDNA, etc.), described more fully below. The targeting sequence of a gRNA is capable of binding to a target nucleic acid sequence, including, in the context of the present disclosure, a coding sequence, a complement of a coding sequence, a non-coding sequence, and to accessory elements. The protein-binding segment (or “activator” or “protein-binding sequence”) interacts with (e.g., binds to) a CasX protein as a complex, forming an RNP (described more fully, below). The protein-binding segment is alternatively referred to herein as a “scaffold”, which is comprised of several regions, described more fully, below. The properties and characteristics of CasX gRNA, both wild-type and variants, are described in WO2020247882A1, US20220220508A1, and WO2022120095A1, incorporated by reference herein.

[0218] In the case of a reference gRNA, the gRNA occurs naturally as a dual guide RNA (dgRNA), wherein the targeter and the activator portions each have a duplex-forming segment that have complementarity with one another and hybridize to one another to form a double stranded duplex (dsRNA duplex for a gRNA). The term “targeter” or “targeter RNA” is used herein to refer to a crRNA-like molecule (crRNA: “CRISPR RNA”) of a CasX dual guide RNA (and therefore of a CasX single guide RNA when the “activator” and the “targeter” are linked together, e.g., by intervening nucleotides). The crRNA has a 5′ region that anneals with the tracrRNA followed by the nucleotides of the targeting sequence. In the case of the gRNA for use in the systems of the disclosure, the scaffolds are designed such that the activator and targeter portions are covalently linked to one another (rather than hybridizing to one another) and comprise a single molecule, and can be referred to as a “single-molecule gRNA,” “single guide RNA”, a “single-molecule guide RNA,” a “one-molecule guide RNA”, or a “sgRNA”. In some embodiments, the gRNA utilized in the rAAV are single molecule versions.

[0219] Collectively, the assembled gRNAs of the disclosure comprise distinct structured regions, or domains: the RNA triplex, the scaffold stem loop, the extended stem loop, the pseudoknot, and the targeting sequence that, in the embodiments of the disclosure is specific for a target nucleic acid and is located on the 3′ end of the gRNA. The RNA triplex, the scaffold stem loop, the pseudoknot and the extended stem loop, together with the unstructured triplex loop that bridges portions of the triplex, together, are referred to as the “scaffold” of the gRNA. In some cases, the scaffold stem further comprises a bubble. In other cases, the scaffold further comprises a triplex loop region. In still other cases, the scaffold further comprises a 5′ unstructured region. In some embodiments, the gRNA scaffolds of the disclosure for use in the CasX:gRNA systems comprise a scaffold stem loop having the sequence of CCAGCGACUAUGUCGUAGUGG (SEQ ID NO: 14), or a sequence having 1, 2, 3, 4, or 5 mismatches thereto.

[0220] Each of the structured domains contribute to establishing the global RNA fold of the guide and retain functionality of the guide; particularly the ability to properly complex with the CasX protein. For example, the guide scaffold stem interacts with the helical I domain of CasX protein, while residues within the triplex, triplex loop, and pseudoknot stem interact with the OBD of the CasX protein. Together, these interactions confer the ability of the guide to bind and form an RNP with the CasX that retains stability, while the spacer (or targeting sequence) directs and defines the specificity of the RNP for binding a specific sequence of DNA.

[0221] Site-specific binding and/or cleavage of a target nucleic acid sequence (e.g., genomic DNA) by the CasX protein can occur at one or more locations (e.g., a sequence of a target nucleic acid) determined by base-pairing complementarity between the targeting sequence of the gRNA and the target nucleic acid sequence. Thus, for example, the gRNA of the disclosure have sequences complementarity to and therefore can hybridize with the target nucleic acid that is adjacent to a sequence complementary to a TC protospacer adjacent motif (PAM) motif or a PAM sequence, such as ATC, CTC, GTC, or TTC. Because the targeting sequence of a guide sequence hybridizes with a sequence of a target nucleic acid sequence, a targeting sequence can be modified by a user to hybridize with a specific target nucleic acid sequence, so long as the location of the PAM sequence is considered. In some embodiments, the target nucleic acid comprises a PAM sequence located 5′ of the targeting sequence with at least a single nucleotide separating the PAM from the first nucleotide of the targeting sequence. In some embodiments, the PAM is located on the non-targeted strand of the target region, i.e. the strand that is complementary to the target nucleic acid. By selection of the targeting sequences of the gRNA, defined regions of the target nucleic acid sequence or sequences bracketing a particular location within the target nucleic acid can be modified or edited using the gRNA and CRISPR nuclease proteins described herein. In some embodiments, the targeting sequence of the gRNA has between 15 and 20 consecutive nucleotides. In some embodiments, the targeting sequence has 15, 16, 17, 18, 19, and 20 consecutive nucleotides. In some embodiments, the targeting sequence consists of 20 consecutive nucleotides. In some embodiments, the targeting sequence consists of 19 consecutive nucleotides. In some embodiments, the targeting sequence consists of 18 consecutive nucleotides. In some embodiments, the targeting sequence consists of 17 consecutive nucleotides. In some embodiments, the targeting sequence consists of 16 consecutive nucleotides. In some embodiments, the targeting sequence consists of 15 consecutive nucleotides. In some embodiments, the gRNA and linked targeting sequence exhibit a low degree of off-target effects to the DNA of a cell. As used herein, “off-target effects” refers to effects of unintended cleavage, such as mutations and indel formation, at untargeted genomic sites showing a similar but not an identical sequence compared to the target site (i.e., the sequence complementary to the targeting sequence of the gRNA). In some embodiments, the off-target effects exhibited by the gRNA and linked targeting sequence are less than about 5%, less than about 4%, less than 3%, less than about 2%, less than about 1%, less than about 0.5%, less than 0.1% in cells. In some embodiments, the off-target effects are determined in silico. In some embodiments, the off-target effects are determined in an in vitro cell-free assay. In some embodiments, the off-target effects are determined in a cell-based assay.

[0222] In another aspect, the disclosure relates to gRNA variants for use in the rAAV systems, which comprise one or more modifications relative to a reference gRNA scaffold or to another gRNA variant from which it was derived. All gRNA variants that have one or more improved functions, characteristics, or add one or more new functions when the gRNA variant is compared to a reference gRNA or to another gRNA variant from which it was derived, while retaining the functional properties of being able to complex with the CasX and guide the CasX ribonucleoprotein holo complex to the target nucleic acid are envisaged as within the scope of the disclosure. In some embodiments, the gRNA variant has an improved characteristic selected from the group consisting of increased editing activity, increased pseudoknot stem stability, increased triplex region stability, increased scaffold stem stability, extended stem stability, reduced off-target folding intermediates, and increased binding affinity to a Class 2, Type V CRISPR protein, or any combination thereof. In some cases of the foregoing, the improved characteristic is assessed in an in vitro assay, including the assays of the Examples. In other cases of the foregoing, the improved characteristic is assessed in vivo.

[0223] In some embodiments, a reference gRNA of the disclosure may be subjected to one or more mutagenesis methods, such as the mutagenesis methods described herein (as well as in PCT/US20/36506 and WO2020247883A2, incorporated by reference herein), which may include Deep Mutational Evolution (DME), deep mutational scanning (DMS), error prone PCR, cassette mutagenesis, random mutagenesis, staggered extension PCR, gene shuffling, or domain swapping, in order to generate one or more guide nucleic acid variants (referred to herein as “gRNA variant”) with enhanced or varied properties relative to the reference gRNA. gRNA variants also include variants comprising one or more exogenous sequences, for example fused to either the 5′ or 3′ end, or inserted internally. The activity of reference gRNAs may be used as a benchmark against which the activity of gRNA variants are compared, thereby measuring improvements in function or other characteristics of the gRNA variants. In other embodiments, a reference gRNA may be subjected to one or more deliberate, specifically-targeted mutations in order to produce a gRNA variant, for example a rationally designed variant. Exemplary gRNA variants produced by such methods are described in the Examples and representative sequences of gRNA scaffolds are presented in Table 2.

[0224] In some embodiments, a gRNA variant for use in the rAAV systems of the disclosure comprises one or more nucleotide substitutions, insertions, deletions, or swapped or replaced regions relative to a reference gRNA sequence of the disclosure that improve a characteristic relative to the reference gRNA. A representative example of such a gRNA variant is guide 235 (SEQ ID NO: 2292). Exemplary regions for modifications include the RNA triplex, the pseudoknot, the scaffold stem loop, and the extended stem loop. In some cases, the variant scaffold stem further comprises a bubble. In other cases, the variant scaffold further comprises a triplex loop region. In still other cases, the variant scaffold further comprises a 5′ unstructured region. In one embodiment, the gRNA variant scaffold comprises a scaffold stem loop having the sequence of CCAGCGACUAUGUCGUAGUGG (SEQ ID NO:14). In another embodiment, the disclosure provides a gRNA scaffold comprising, relative to SEQ ID NO:5, a C18G substitution, a G55 insertion, a U1 deletion, and a modified extended stem loop in which the original 6 nt loop and 13 most-loop-proximal base pairs (32 nucleotides total) are replaced by a Uvsx hairpin (4 nt loop and 5 loop-proximal base pairs; 14 nucleotides total) and the loop-distal base of the extended stem was converted to a fully base-paired stem contiguous with the new Uvsx hairpin by deletion of the A99 and substitution of G64U. In the foregoing embodiment, the gRNA scaffold comprises the sequence

(SEQ ID NO: 2238)
ACUGGCGCUUUUAUCUGAUUACUUUGAGAGCCAUCACCAGCGACUAUGU
CGUAGUGGGUAAAGCUCCCUCUUCGGAGGGAGCAUCAAAG.

[0225] In exemplary embodiments, a gRNA variant for use in the rAAV systems comprises one or more modifications relative to gRNA scaffold variant 215 (SEQ ID NO:2275), wherein the resulting gRNA variant exhibits an improved functional characteristic compared to the parent 215, when assessed in an in vitro or in vivo assay under comparable conditions.

[0226] In exemplary embodiments, a gRNA variant for use in the rAAV systems comprises one or more modifications relative to gRNA scaffold variant 221 (SEQ ID NO: 2281), wherein the resulting gRNA variant exhibits an improved functional characteristic compared to the parent 221, when assessed in an in vitro or in vivo assay under comparable conditions.

[0227] In exemplary embodiments, a gRNA variant for use in the rAAV systems comprises one or more modifications relative to gRNA scaffold variant 225 (SEQ ID NO: 2285), wherein the resulting gRNA variant exhibits an improved functional characteristic compared to the parent 225, when assessed in an in vitro or in vivo assay under comparable conditions.

[0228] In exemplary embodiments, a gRNA variant for use in the rAAV systems comprises one or more modifications relative to gRNA scaffold variant 235 (SEQ ID NO: 2292), wherein the resulting gRNA variant exhibits an improved functional characteristic compared to the parent 225, when assessed in an in vitro or in vivo assay under comparable conditions.

[0229] In exemplary embodiments, a gRNA variant for use in the rAAV systems comprises one or more modifications relative to gRNA scaffold variant 251 (SEQ ID NO: 2308), wherein the resulting gRNA variant exhibits an improved functional characteristic compared to the parent 251, when assessed in an in vitro or in vivo assay under comparable conditions.

[0230] In exemplary embodiments, a gRNA variant for use in the rAAV systems comprises one or more modifications relative to gRNA scaffold 316 (SEQ ID NO: 9588), wherein the resulting gRNA variant exhibits an improved functional characteristic compared to the parent 235, when assessed in an in vitro or in vivo assay under comparable conditions.

[0231] Table 2 provides exemplary gRNA scaffold sequences of the disclosure for use in the rAAV. In some embodiments, the rAAV comprises a first and a second gRNA, wherein the first and/or the second gRNA are identical. In other embodiments, the rAAV comprises a first and a second gRNA, wherein the first and/or the second gRNA are different. In both cases, the first and the second gRNA would comprise targeting sequences complementary to different target nucleic acid sequences. In some embodiments, the encoded gRNA scaffold for use in the rAAV comprises a sequence selected from the group consisting of SEQ ID NOS: 2238-2400, 9257-9289 and 9588, (of which 2238-2285, 2287-2352, 2376, 2378, 2383-2400, and 9588 are presented in Table 2), wherein the gRNA variant retains the ability to form an RNP with a CasX and to bind a target nucleic acid. In other embodiments, the encoded gRNA variant scaffold for use in the rAAV of the disclosure comprises a sequence having at least about 70%, at least about 80%, at least about 90%, at least about 95%, at least about 95%, at least about 96%, at least about 97%, at least about 98%, at least about 99% sequence identity to a sequence selected from the group consisting of SEQ ID NOS: 2238-2400, 9257-9289 and 9588, wherein the gRNA variant retains the ability to form an RNP with a CasX of the disclosure and to bind a target nucleic acid. In other embodiments, the encoded gRNA variant scaffold for use in the rAAV of the disclosure comprises a sequence selected from the group consisting of SEQ ID NOS: 2238-2400, 9257-9289 and 9588, further comprising 1, 2, 3, 4, or 5 mismatches thereto, wherein the gRNA variant retains the ability to form an RNP with a CasX of the disclosure and to bind a target nucleic acid, whereupon the RNP modifies the target nucleic acid. In one embodiment, the encoded gRNA variant scaffold for use in the rAAV of the disclosure comprises a sequence of SEQ ID NO: 2292. In another embodiment, the encoded gRNA variant scaffold for use in the rAAV of the disclosure comprises a sequence of SEQ ID NO: 9588. It will be understood that in those embodiments wherein the rAAV transgene comprises a DNA encoding sequence for a gRNA, that thymine (T) bases can be substituted for the uracil (U) bases of any of the gRNA sequence embodiments described herein.

TABLE 2
Exemplary gRNA Scaffold Sequences

| SEQ ID | | |
|---|---|---|
| NO: | Name | NUCLEOTIDE SEQUENCE OR DESCRIPTION OF MODIFICATION |
| 2238 | 174 | ACUGGCGCUUUUAUCUGAUUACUUUGAGAGCCAUCACCAGCGACUAUGUCGUAGUGGGU |
| | | AAAGCUCCCUCUUCGGAGGGAGCAUCAAAG |
| 2239 | 175 | ACUGGCGCCUUUAUCUCAUUACUUUGAGAGCCAUCACCAGCGACUAUGUCGUAUGGGUA |
| | | AAGCGCUUACGGACUUCGGUCCGUAAGAAGCAUCAAAG |
| 2240 | 176 | GCUGGCGCUUUUAUCUGAUUACUUUGAGAGCCAUCACCAGCGACUAUGUCGUAGUGGGU |
| | | AAAGCUCCCUCUUCGGAGGGAGCAUCAAAG |
| 2241 | 177 | ACUGGCGCUUUUAUCUGAUUACUUUGAGAGCCAUCACCAGCGACUAUGUCGUAUGGGUA |
| | | AAGCUCCCUCUUCGGAGGGAGCAUCAAAG |
| 2242 | 181 | ACUGGCGCCUUUAUCUGAUUACUUUGAGAGCCAUCACCAGCGACUAUGUCGUAUGGGUA |
| | | AAGCGCUUACGGACUUCGGUCCGUAAGAAGCAUCAAAG |
| 2243 | 182 | ACUGGCGCUUUUAUCUGAUUACUUUGAGAGCCAUCACCAGCGACUAUGUCGUAUGGGUA |
| | | AAGCGCUUACGGACUUCGGUCCGUAAGAAGCAUCAAAG |
| 2244 | 183 | ACUGGCGCUUUUAUCUGAUUACUUUGAGAGCCAUCACCAGCGACUAUGUCGUAGUGGGU |
| | | AAAGCGCUUACGGACUUCGGUCCGUAAGAAGCAUCAAAG |
| 2245 | 184 | ACUGGCGCUUUUAUCUGAUUACUUUGAGAGCCAUCACCAGCGACUAUGUCGUAUUGGGU |
| | | AAAGCUCCCUCUUCGGAGGGAGCAUCAAAG |
| 2246 | 185 | ACUGGCGCUUUUAUCUGAUUACUUUGAGAGCCAUCACCAGCGACUAUGUCGUAUUGGGU |
| | | AAAGCGCUUACGGACUUCGGUCCGUAAGAAGCAUCAAAG |
| 2247 | 186 | ACUGGCGCCUUUAUCAUCAUUACUUUGAGAGCCAUCACCAGCGACUAUGUCGUAUGGGU |
| | | AAAGCGCUUACGGACUUCGGUCCGUAAGAAGCAUCAAAG |
| 2248 | 187 | ACUGGCGCUUUUAUCUGAUUACUUUGAGAGCCAUCACCAGCGACUAUGUCGUAGUGGGU |
| | | AAAGCGCCCUCUUCGGAGGGAAGCAUCAAAG |
| 2249 | 188 | ACUGGCGCUUUUAUCUGAUUACUUUGAGAGCCAUCACCAGCGACUAUGUCGUAGUGGGU |
| | | AAAGCUCACAUGAGGAUCACCCAUGUGAGCAUCAAAG |
| 2250 | 189 | ACUGGCACUUUUACCUGAUUACUUUGAGAGCCAACACCAGCGACUAUGUCGUAGUGGGU |
| | | AAAGCUCCCUCUUCGGAGGGAGCAUCAAAG |
| 2251 | 190 | ACUGGCACUUUUAUCUGAUUACUUUGAGAGCCAUCACCAGCGACUAUGUCGUAGUGGGU |
| | | AAAGCUCCCUCUUCGGAGGGAGCAUCAAAG |
| 2252 | 191 | ACUGGCCCUUUUAUCUGAUUACUUUGAGAGCCAUCACCAGCGACUAUGUCGUAGUGGGU |
| | | AAAGCUCCCUCUUCGGAGGGAGCAUCAAAG |
| 2253 | 192 | ACUGGCGCUUUUACCUGAUUACUUUGAGAGCCAUCACCAGCGACUAUGUCGUAGUGGGU |
| | | AAAGCUCCCUCUUCGGAGGGAGCAUCAAAG |
| 2254 | 193 | ACUGGCGCUUUUAUCUGAUUACUUUGAGAGCCAACACCAGCGACUAUGUCGUAGUGGGU |
| | | AAAGCUCCCUCUUCGGAGGGAGCAUCAAAG |
| 2255 | 195 | ACUGGCACCUUUACCUGAUUACUUUGAGAGCCAACACCAGCGACUAUGUCGUAUGGGUA |
| | | AAGCGCUUACGGACUUCGGUCCGUAAGAAGCAUCAAAG |
| 2256 | 196 | ACUGGCACCUUUAUCUGAUUACUUUGAGAGCCAUCACCAGCGACUAUGUCGUAUGGGUA |
| | | AAGCGCUUACGGACUUCGGUCCGUAAGAAGCAUCAAAG |
| 2257 | 197 | ACUGGCCCCUUUAUCUGAUUACUUUGAGAGCCAUCACCAGCGACUAUGUCGUAUGGGUA |
| | | AAGCGCUUACGGACUUCGGUCCGUAAGAAGCAUCAAAG |
| 2258 | 198 | ACUGGCGCCUUUAUCUGAUUACUUUGAGAGCCAACACCAGCGACUAUGUCGUAUGGGUA |
| | | AAGCGCUUACGGACUUCGGUCCGUAAGAAGCAUCAAAG |
| 2259 | 199 | GCUGGCGCUUUUAUCUGAUUACUUUGAGAGCCAUCACCAGCGACUAUGUCGUAGUGGGU |
| | | AAAGCUCCCUCUUCGGAGGGAGCAUCAAAG |
| 2260 | 200 | GACUGGCGCUUUUAUCUGAUUACUUUGAGAGCCAUCACCAGCGACUAUGUCGUAGUGGG |
| | | UAAAGCUCCCUCUUCGGAGGGAGCAUCAAAG |
| 2261 | 201 | ACUGGCGCCUUUAUCUGAUUACUUUGGAGAGCCAUCACCAGCGACUAUGUCGUAGUGGG |
| | | UAAAGCUCCCUCUUCGGAGGGAGCAUCAAAG |
| 2262 | 202 | ACUGGCGCAUUUAUCUGAUUACUUUGUGAGCCAUCACCAGCGACUAUGUCGUAGUGGGU |
| | | AAAGCUCCCUCUUCGGAGGGAGCAUCAAAG |
| 2263 | 203 | ACUGGCGCCUUUAUCUGAUUACUUUGAGAGCCAUCACCAGCGACUAUGUCGUAGUGGGU |
| | | AAAGCUCCCUCUUCGGAGGGAGCAUCAAAG |
| 2264 | 204 | ACUGGCGCUUUUAUCUGAUUACUUUGGAGAGCCAUCACCAGCGACUAUGUCGUAGUGGG |
| | | UAAAGCUCCCUCUUCGGAGGGAGCAUCAAAG |
| 2265 | 205 | ACUGGCGCAUUUAUCUGAUUACUUUGAGAGCCAUCACCAGCGACUAUGUCGUAGUGGGU |
| | | AAAGCUCCCUCUUCGGAGGGAGCAUCAAAG |
| 2266 | 206 | ACUGGCGCUUUUAUCUGAUUACUUUGUGAGCCAUCACCAGCGACUAUGUCGUAGUGGGU |
| | | AAAGCUCCCUCUUCGGAGGGAGCAUCAAAG |
| 2267 | 207 | ACUGGCGCUUUUAUUCUGAUUACUUUGAGAGCCAUCACCAGCGACUAUGUCGUAGUGGG |
| | | UAAAGCUCCCUCUUCGGAGGGAGCAUCAAAG |
| 2268 | 208 | ACGGCGCUUUUAUCUGAUUACUUUGAGAGCCAUCACCAGCGACUAUGUCGUAGUGGGUA |
| | | AAGCUCCCUCUUCGGAGGGAGCAUCAAAG |
| 2269 | 209 | ACUGGCGCUUUUAUAUGAUUACUUUGAGAGCCAUCACCAGCGACUAUGUCGUAGUGGGU |
| | | AAAGCUCCCUCUUCGGAGGGAGCAUCAAAG |
| 2270 | 210 | ACUGGCGCUUUUAUCUUGAUUACUUUGAGAGCCAUCACCAGCGACUAUGUCGUAGUGGG |
| | | UAAAGCUCCCUCUUCGGAGGGAGCAUCAAAG |
| 2271 | 211 | ACUGGCGCUUUUAUCUGAUUACUUUGAGAGCCAGCACCAGCGACUAUGUCGUAGUGGGU |
| | | AAAGCUCCCUCUUCGGAGGGAGCAUCAAAG |
| 2272 | 212 | ACUGGCGCUGUUAUCUGAUUACUUCGAGAGCCAUCACCAGCGACUAUGUCGUAGUGGGU |
| | | AAAGCUCCCUCUUCGGAGGGAGCAUCGAAG |
| 2273 | 213 | ACUGGCGCUCUUAUCUGAUUACUUCGAGAGCCAUCACCAGCGACUAUGUCGUAGUGGGU |
| | | AAAGCUCCCUCUUCGGAGGGAGCAUCGAAG |
| 2274 | 214 | ACUGGCGCUUGUAUCUGAUUACUCUGAGAGCCAUCACCAGCGACUAUGUCGUAGUGGGU |
| | | AAAGCUCCCUCUUCGGAGGGAGCAUCAGAG |
| 2275 | 215 | ACUGGCGCUUCUAUCUGAUUACUCUGAGAGCCAUCACCAGCGACUAUGUCGUAGUGGGU |
| | | AAAGCUCCCUCUUCGGAGGGAGCAUCAGAG |
| 2276 | 216 | ACUGGCGCUUUGAUCUGAUUACCUUGAGAGCCAUCACCAGCGACUAUGUCGUAGUGGGU |
| | | AAAGCUCCCUCUUCGGAGGGAGCAUCAAGG |
| 2277 | 217 | ACUGGCGCUUUCAUCUGAUUACCUUGAGAGCCAUCACCAGCGACUAUGUCGUAGUGGGU |
| | | AAAGCUCCCUCUUCGGAGGGAGCAUCAAGG |
| 2278 | 218 | ACUGGCGCUGUUAUCUGAUUACUUUGAGAGCCAUCACCAGCGACUAUGUCGUAGUGGGU |
| | | AAAGCUCCCUCUUCGGAGGGAGCAUCAAAG |
| 2279 | 219 | ACUGGCGCUUUUAUCUGAUUACUUUGAGAGCCAUCACCAGCGACUAUGUCGUAGUGGGU |
| | | AAAGCUCCCUCUUCGGAGGGAGCAUCGAAG |
| 2280 | 220 | ACUGGCGCUUUUAUCUGAUUACUUCGAGAGCCAUCACCAGCGACUAUGUCGUAGUGGGU |
| | | AAAGCUCCCUCUUCGGAGGGAGCAUCAAAG |
| 2281 | 221 | ACUGGCACUUCUAUCUGAUUACUCUGAGAGCCAUCACCAGCGACUAUGUCGUAUGGGUA |
| | | AAGCCGCUUACGGACUUCGGUCCGUAAGAGGCAUCAGAG |
| 2282 | 222 | ACUGGCACUUCUAUCUGAUUACUCUGAGAGCCAUCACCAGCGACUAUGUCGUAGUGGGU |
| | | AAAGCUCCCUCUUCGGAGGGAGCAUCAGAG |
| 2283 | 223 | ACUGGCACCUUUAUCUGAUUACUUUGAGAGCCAUCACCAGCGACUAUGUCGUAUGGGUA |
| | | AAGCCGCUUACGGACUUCGGUCCGUAAGAGGCAUCAAAG |
| 2284 | 224 | ACUGGCACUUGUAUCUGAUUACUCUGAGAGCCAUCACCAGCGACUAUGUCGUAUGGGUA |
| | | AAGCCGCUUACGGACUUCGGUCCGUAAGAGGCAUCAGAG |
| 2285 | 225 | ACUGGCACUUGUAUCUGAUUACUCUGAGAGCCAUCACCAGCGACUAUGUCGUAGUGGGU |
| | | AAAGCUCCCUCUUCGGAGGGAGCAUCAGAG |
| 2287 | 230 | ACUGGCACUUCUAUCUGAUUACUCUGAGAGCCAUCACCAGCGACUAUGUCGUAUGGGUA |
| | | AAGCGCUUACGGACUUCGGUCCGUAAGAAGCAUCAGAG |
| 2288 | 231 | ACUGGCGCUUCUAUCUGAUUACUCUGAGAGCCAUCACCAGCGACUAUGUCGUAUGGGUA |
| | | AAGCCGCUUACGGACUUCGGUCCGUAAGAGGCAUCAGAG |
| 2289 | 232 | ACUGGCACUUCUAUCUGAUUACUCUGAGCGCCAUCACCAGCGACUAUGUCGUAUGGGUA |
| | | AAGCCGCUUACGGACUUCGGUCCGUAAGAGGCAUCAGAG |
| 2290 | 233 | ACUGGCGCUUCUAUCUGAUUACUCUGAGCGCCAUCACCAGCGACUAUGUCGUAUGGGUA |
| | | AAGCCGCUUACGGACUUCGGUCCGUAAGAGGCAUCAGAG |
| 2291 | 234 | ACUGGCGCUUCUAUCUGAUUACUCUGAGCGCCAUCACCAGCGACUAUGUCGUAUGGGUA |
| | | AAGCGCCUUACGGACUUCGGUCCGUAAGGAGCAUCAGAG |
| 2292 | 235 | ACUGGCGCUUCUAUCUGAUUACUCUGAGCGCCAUCACCAGCGACUAUGUCGUAGUGGGU |
| | | AAAGCCGCUUACGGACUUCGGUCCGUAAGAGGCAUCAGAG |
| 2293 | 236 | ACGGGACUUUCUAUCUGAUUACUCUGAAGUCCCUCACCAGCGACUAUGUCGUAUGGGUA |
| | | AAGCCGCUUACGGACUUCGGUCCGUAAGAGGCAUCAGAG |
| 2294 | 237 | ACCUGUAGUUCUAUCUGAUUACUCUGACUACAGUCACCAGCGACUAUGUCGUAUGGGUA |
| | | AAGCCGCUUACGGACUUCGGUCCGUAAGAGGCAUCAGAG |
| 2295 | 238 | ACUGGCGCUUUUAUCUGAUUACUUUGAGAGCCAUCACCAGCGACUAUGUCGUAGUGGGU |
| | | AAAGCUGCACGGUGGGCGCAGCUUCGGCUGACGGUACACCGUGCAGCAUCAAAG |
| 2296 | 239 | ACUGGCGCUUUUAUCUGAUUACUUUGAGAGCCAUCACCAGCGACUAUGUCGUAGUGGGU |
| | | AAAGCUGCACGGUGGGCGCAGCUUCGGCUGACGGUACACCGGUGGGCGCAGCUUCGGCU |
| | | GACGGUACACCGUGCAGCAUCAAAG |
| 2297 | 240 | ACUGGCGCUUUUAUCUGAUUACUUUGAGAGCCAUCACCAGCGACUAUGUCGUAGUGGGU |
| | | AAAGCUGCACGGUGGGCGCAGCUUCGGCUGACGGUACACCGGUGGGCGCAGCUUCGGCU |
| | | GACGGUACACCGGUGGGCGCAGCUUCGGCUGACGGUACACCGUGCAGCAUCAAAG |
| 2298 | 241 | ACUGGCGCUUUUAUCUGAUUACUUUGAGAGCCAUCACCAGCGACUAUGUCGUAGUGGGU |
| | | AAAGCUGCACGGUGGGCGCAGCUUCGGCUGACGGUACACCGGUGGGCGCAGCUUCGGCU |
| | | GACGGUACACCGGUGGGCGCAGCUUCGGCUGACGGUACACCGGUGGGCGCAGCUUCGGC |
| | | UGACGGUACACCGUGCAGCAUCAAAG |
| 2299 | 242 | ACUGGCGCUUUUAUCUGAUUACUUUGAGAGCCAUCACCAGCGACUAUGUCGUAGUGGGU |
| | | AAAGCUGCACGGUGGGCGCAGCUUCGGCUGACGGUACACCGGUGGGCGCAGCUUCGGCU |
| | | GACGGUACACCGGUGGGCGCAGCUUCGGCUGACGGUACACCGGUGGGCGCAGCUUCGGC |
| | | UGACGGUACACCGGUGGGCGCAGCUUCGGCUGACGGUACACCGUGCAGCAUCAAAG |
| 2300 | 243 | ACUGGCGCUUUUAUCUGAUUACUUUGAGAGCCAUCACCAGCGACUAUGUCGUAGUGGGU |
| | | AAAGCUGCACCUAGCGGAGGCUAGGUGCAGCAUCAAAG |
| 2301 | 244 | ACUGGCGCUUUUAUCUGAUUACUUUGAGAGCCAUCACCAGCGACUAUGUCGUAGUGGGU |
| | | AAAGCUGCACCUCGGCUUGCUGAAGCGCGCACGGCAAGAGGCGAGGUGCAGCAUCAAAG |
| 2302 | 245 | ACUGGCGCUUUUAUCUGAUUACUUUGAGAGCCAUCACCAGCGACUAUGUCGUAGUGGGU |
| | | AAAGCUGCACCUCUCUCGACGCAGGACUCGGCUUGCUGAAGCGCGCACGGCAAGAGGCG |
| | | AGGGGCGGCGACUGGUGAGUACGCCAAAAAUUUUGACUAGCGGAGGCUAGAAGGAGAGA |
| | | GGUGCAGCAUCAAAG |
| 2303 | 246 | ACUGGCGCUUUUAUCUGAUUACUUUGAGAGCCAUCACCAGCGACUAUGUCGUAGUGGGU |
| | | AAAGCUGCACGGUGCCCGUCUGUUGUGUCGAGAGACGCCAAAAAUUUUGACUAGCGGAG |
| | | GCUAGAAGGAGAGAGAUGGGUGCCGUGCAGCAUCAAAG |
| 2304 | 247 | ACUGGCGCUUUUAUCUGAUUACUUUGAGAGCCAUCACCAGCGACUAUGUCGUAGUGGGU |
| | | AAAGCUGCACAUGGAGAGGAGAUGUGCAGCAUCAAAG |
| 2305 | 248 | ACUGGCGCUUUUAUCUGAUUACUUUGAGAGCCAUCACCAGCGACUAUGUCGUAGUGGGU |
| | | AAAGCUGCACAUGGAGAUGUGCAGCAUCAAAG |
| 2306 | 249 | ACUGGCGCUUUUAUCUGAUUACUUUGAGAGCCAUCACCAGCGACUAUGUCGUAGUGGGU |
| | | AAAGCUUGGGCGCAGCGUCAAUGACGCUGACGGUACAAGCAUCAAAG |
| 2307 | 250 | ACUGGCGCUUUUAUCUGAUUACUUUGAGAGCCAUCACCAGCGACUAUGUCGUAGUGGGU |
| | | AAAGCUGCACUAUGGGCGCAGCGUCAAUGACGCUGACGGUACAGGCCACAUGAGGAUCA |
| | | CCCAUGUGGUAUAGUGCAGCAUCAAAG |
| 2308 | 251 | ACUGGCGCUUUUAUCUGAUUACUUUGAGAGCCAUCACCAGCGACUAUGUCGUAGUGGGU |
| | | AAAGCUGCACUAUGGGCGCAGCUCAUGAGGAUCACCCAUGAGCUGACGGUACAGGCCAC |
| | | AUGAGGAUCACCCAUGUGGUAUAGUGCAGCAUCAAAG |
| 2309 | 252 | ACUGGCGCUUUUAUCUGAUUACUUUGAGAGCCAUCACCAGCGACUAUGUCGUAGUGGGU |
| | | AAAGCUGCACUAUGGGCGCAGCGUCAAUGACGCUGACGGUACAGGCCACAUGGCAGUCG |
| | | UAACGACGCGGGUGGUAUAGUGCAGCAUCAAAG |
| 2310 | 253 | ACUGGCGCUUUUAUCUGAUUACUUUGAGAGCCAUCACCAGCGACUAUGUCGUAGUGGGU |
| | | AAAGCUGCACUAUGGGCGCAGCAAACAUGGCAGUCCUAAGGACGCGGGUUUUGCUGACG |
| | | GUACAGGCCACAUGGCAGUCGUAACGACGCGGGUGGUAUAGUGCAGCAUCAAAG |
| 2311 | 254 | ACUGGCGCUUUUAUCUGAUUACUUUGAGAGCCAUCACCAGCGACUAUGUCGUAGUGGGU |
| | | AAAGCUGCACUAUGGGCGCAGACAUGGCAGUCGUAACGACGCGGGUCUGACGGUACAGG |
| | | CCACAUGAGGAUCACCCAUGUGGUAUAGUGCAGCAUCAAAG |
| 2312 | 255 | ACUGGCGCUUUUAUCUGAUUACUUUGAGAGCCAUCACCAGCGACUAUGUCGUAGUGGGU |
| | | AAAGCUGCACUAAGGAGUUUAUAUGGAAACCCUUAGUGCAGCAUCAAAG |
| 2313 | 256 | ACUGGCGCUUUUAUCUGAUUACUUUGAGAGCCAUCACCAGCGACUAUGUCGUAGUGGGU |
| | | AAAGCUCAGGAAGCACUAUGGGCGCAGCGUCAAUGACGCUGACGGUACAGGCCAGACAA |
| | | UUAUUGUCUGGUAUAGUGCAGCAGCAGAACAAUUUGCUGAGGGCUAUUGAGGCGCAACA |
| | | GCAUCUGUUGCAACUCACAGUCUGGGGCAUCAAGCAGCUCCAGGCAAGAAUCCUGAGCA |
| | | UCAAAG |
| 2314 | 257 | ACUGGCGCUUUUAUCUGAUUACUUUGAGAGCCAUCACCAGCGACUAUGUCGUAGUGGGU |
| | | AAAGCUGCACGCCCUGAAGAAGGGCGUGCAGCAUCAAAG |
| 2315 | 258 | ACUGGCGCUUUUAUCUGAUUACUUUGAGAGCCAUCACCAGCGACUAUGUCGUAGUGGGU |
| | | AAAGCUGCACGGCUCGUGUAGCUCAUUAGCUCCGAGCCGUGCAGCAUCAAAG |
| 2316 | 259 | ACUGGCGCUUUUAUCUGAUUACUUUGAGAGCCAUCACCAGCGACUAUGUCGUAGUGGGU |
| | | AAAGCUGCACCCGUGUGCAUCCGCAGUGUCGGAUCCACGGGUGCAGCAUCAAAG |
| 2317 | 260 | ACUGGCGCUUUUAUCUGAUUACUUUGAGAGCCAUCACCAGCGACUAUGUCGUAGUGGGU |
| | | AAAGCUGCACGGAAUCCAUUGCACUCCGGAUUUCACUAGGUGCAGCAUCAAAG |
| 2318 | 261 | ACUGGCGCUUUUAUCUGAUUACUUUGAGAGCCAUCACCAGCGACUAUGUCGUAGUGGGU |
| | | AAAGCUGCACAUGCAUGUCUAAGACAGCAUGUGCAGCAUCAAAG |
| 2319 | 262 | ACUGGCGCUUUUAUCUGAUUACUUUGAGAGCCAUCACCAGCGACUAUGUCGUAGUGGGU |
| | | AAAGCUGCACAAAACAUAAGGAAAACCUAUGUUGUGCAGCAUCAAAG |
| 2320 | 263 | ACUGGCGCUUCUAUCUGAUUACUCUGAGCGCCAUCACCAGCGACUAUGUCGUAGUGGGU |
| | | AAAGCCGCUUACGGACUAUGGGCGCAGCGUCAAUGACGCUGACGGUACAGGCCAGACAA |
| | | UUAUUGUCUGGUAUAGUCCGUAAGAGGCAUCAGAG |
| 2321 | 264 | ACUGGCGCUUCUAUCUGAUUACUCUGAGCGCCAUCACCAGCGACUAUGUCGUAGUGGGU |
| | | AAAGCCGCUUACGGGUGGGCGCAGCGUCAAUGACGCUGACGGUACAGGCCAGACAAUUA |
| | | UUGUCUGGUACCCGUAAGAGGCAUCAGAG |
| 2322 | 265 | ACUGGCGCUUCUAUCUGAUUACUCUGAGCGCCAUCACCAGCGACUAUGUCGUAGUGGGU |
| | | AAAGCCGCUUACGGACUAUGGGCGCAGCGUCAAUGACGCUGACGGUACAGGCCACAUGA |
| | | GGAUCACCCAUGUGGUAUAGUCCGUAAGAGGCAUCAGAG |
| 2323 | 266 | ACUGGCGCUUUUAUCUGAUUACUUUGAGAGCCAUCACCAGCGACUAUGUCGUAGUGGGU |
| | | AAAGCUCCCUAUGGGCGCAGCGUCAAUGACGCUGACGGUACAGGCCACAUGAGGAUCAC |
| | | CCAUGUGGUAUAGGGAGCAUCAAAG |
| 2324 | 267 | ACUGGCGCUUCUAUCUGAUUACUCUGAGCGCCAUCACCAGCGACUAUGUCGUAGUGGGU |
| | | AAAGCCGCUUACGGACUAUGGGCGCAGCUCAUGAGGAUCACCCAUGAGCUGACGGUACA |
| | | GGCCACAUGAGGAUCACCCAUGUGGUAUAGUCCGUAAGAGGCAUCAGAG |
| 2325 | 268 | ACUGGCGCUUUUAUCUGAUUACUUUGAGAGCCAUCACCAGCGACUAUGUCGUAGUGGGU |
| | | AAAGCUCCCUAUGGGCGCAGCUCAUGAGGAUCACCCAUGAGCUGACGGUACAGGCCACA |
| | | UGAGGAUCACCCAUGUGGUAUAGGGAGCAUCAAAG |
| 2326 | 269 | ACUGGCGCUUCUAUCUGAUUACUCUGAGCGCCAUCACCAGCGACUAUGUCGUAGUGGGU |
| | | AAAGCCGCUUACGGACUAUGGGCGCAGCGUCAAUGACGCUGACGGUACAGGCCACAUGG |
| | | CAGUCGUAACGACGCGGGUGGUAUAGUCCGUAAGAGGCAUCAGAG |
| 2327 | 270 | ACUGGCGCUUUUAUCUGAUUACUUUGAGAGCCAUCACCAGCGACUAUGUCGUAGUGGGU |
| | | AAAGCUCCCUAUGGGCGCAGCGUCAAUGACGCUGACGGUACAGGCCACAUGGCAGUCGU |
| | | AACGACGCGGGUGGUAUAGGGAGCAUCAAAG |
| 2328 | 27 | ACUGGCGCUUCUAUCUGAUUACUCUGAGCGCCAUCACCAGCGACUAUGUCGUAGUGGGU |
| | | AAAGCCGCUUACGGACUAUGGGCGCAGCAAACAUGGCAGUCCUAAGGACGCGGGUUUUG |
| | | CUGACGGUACAGGCCACAUGGCAGUCGUAACGACGCGGGUGGUAUAGUCCGUAAGAGGC |
| | | AUCAGAG |
| 2329 | 272 | ACUGGCGCUUUUAUCUGAUUACUUUGAGAGCCAUCACCAGCGACUAUGUCGUAGUGGGU |
| | | AAAGCUCCCUAUGGGCGCAGCAAACAUGGCAGUCCUAAGGACGCGGGUUUUGCUGACGG |
| | | UACAGGCCACAUGGCAGUCGUAACGACGCGGGUGGUAUAGGGAGCAUCAAAG |
| 2330 | 273 | ACUGGCGCUUCUAUCUGAUUACUCUGAGCGCCAUCACCAGCGACUAUGUCGUAGUGGGU |
| | | AAAGCCGCUUACGGACUAUGGGCGCAGACAUGGCAGUCGUAACGACGCGGGUCUGACGG |
| | | UACAGGCCACAUGAGGAUCACCCAUGUGGUAUAGUCCGUAAGAGGCAUCAGAG |
| 2331 | 274 | ACUGGCGCUUUUAUCUGAUUACUUUGAGAGCCAUCACCAGCGACUAUGUCGUAGUGGGU |
| | | AAAGCUCCCUAUGGGCGCAGACAUGGCAGUCGUAACGACGCGGGUCUGACGGUACAGGC |
| | | CACAUGAGGAUCACCCAUGUGGUAUAGGGAGCAUCAAAG |
| 2332 | 275 | ACUGGCGCUUUUAUCUGAUUACUUUGAGAGCCAUCACCAGCGACUAUGUCGUAGUGGGU |
| | | AAAGCUGCACUAUGGGCGCAGCACCUGAGGAUCACCCAGGUGCUGACGGUACAGGCCAC |
| | | CUGAGGAUCACCCAGGUGGUAUAGUGCAGCAUCAAAG |
| 2333 | 276 | ACUGGCGCUUUUAUCUGAUUACUUUGAGAGCCAUCACCAGCGACUAUGUCGUAGUGGGU |
| | | AAAGCUGCACUAUGGGCGCAGCGCAUGAGGAUCACCCAUGCGCUGACGGUACAGGCCGC |
| | | AUGAGGAUCACCCAUGCGGUAUAGUGCAGCAUCAAAG |
| 2334 | 277 | ACUGGCGCUUUUAUCUGAUUACUUUGAGAGCCAUCACCAGCGACUAUGUCGUAGUGGGU |
| | | AAAGCUGCACUAUGGGCGCAGCGCCUGAGGAUCACCCAGGCGCUGACGGUACAGGCCGC |
| | | CUGAGGAUCACCCAGGCGGUAUAGUGCAGCAUCAAAG |
| 2335 | 278 | ACUGGCGCUUUUAUCUGAUUACUUUGAGAGCCAUCACCAGCGACUAUGUCGUAGUGGGU |
| | | AAAGCUGCACUAUGGGCGCAGCGCCUGAGCAUCAGCCAGGCGCUGACGGUACAGGCCGC |
| | | CUGAGCAUCAGCCAGGCGGUAUAGUGCAGCAUCAAAG |
| 2336 | 279 | ACUGGCGCUUUUAUCUGAUUACUUUGAGAGCCAUCACCAGCGACUAUGUCGUAGUGGGU |
| | | AAAGCUGCACUAUGGGCGCAGCACAUGAGCAUCAGCCAUGUGCUGACGGUACAGGCCAC |
| | | AUGAGCAUCAGCCAUGUGGUAUAGUGCAGCAUCAAAG |
| 2337 | 280 | ACUGGCGCUUUUAUCUGAUUACUUUGAGAGCCAUCACCAGCGACUAUGUCGUAGUGGGU |
| | | AAAGCUGCACUAUGGGCGCAGCACAUGAGUAUCAACCAUGUGCUGACGGUACAGGCCAC |
| | | AUGAGUAUCAACCAUGUGGUAUAGUGCAGCAUCAAAG |
| 2338 | 281 | ACUGGCGCUUUUAUCUGAUUACUUUGAGAGCCAUCACCAGCGACUAUGUCGUAGUGGGU |
| | | AAAGCUGCACUAUGGGCGCAGCACAUGAGAAUCAGCCAUGUGCUGACGGUACAGGCCAC |
| | | AUGAGAAUCAGCCAUGUGGUAUAGUGCAGCAUCAAAG |
| 2339 | 282 | ACUGGCGCUUUUAUCUGAUUACUUUGAGAGCCAUCACCAGCGACUAUGUCGUAGUGGGU |
| | | AAAGCUGCACUAUGGGCGCAGCCCUUGAGGAUCACCCAUGUGCUGACGGUACAGGCCCC |
| | | UUGAGGAUCACCCAUGUGGUAUAGUGCAGCAUCAAAG |
| 2340 | 283 | ACUGGCGCUUUUAUCUGAUUACUUUGAGAGCCAUCACCAGCGACUAUGUCGUAGUGGGU |
| | | AAAGCUGCACUAUGGGCGCAGCACUUGAGGAUCACCCAUGUGCUGACGGUACAGGCCAC |
| | | UUGAGGAUCACCCAUGUGGUAUAGUGCAGCAUCAAAG |
| 2341 | 284 | ACUGGCGCUUUUAUCUGAUUACUUUGAGAGCCAUCACCAGCGACUAUGUCGUAGUGGGU |
| | | AAAGCUGCACUAUGGGCGCAGCACCUGAGGAUCACCCAUGUGCUGACGGUACAGGCCAC |
| | | CUGAGGAUCACCCAUGUGGUAUAGUGCAGCAUCAAAG |
| 2342 | 285 | ACUGGCGCUUUUAUCUGAUUACUUUGAGAGCCAUCACCAGCGACUAUGUCGUAGUGGGU |
| | | AAAGCUGCACUAUGGGCGCAGCACAUGAGGAUCACCUAUGUGCUGACGGUACAGGCCAC |
| | | AUGAGGAUCACCUAUGUGGUAUAGUGCAGCAUCAAAG |
| 2343 | 286 | ACUGGCGCUUUUAUCUGAUUACUUUGAGAGCCAUCACCAGCGACUAUGUCGUAGUGGGU |
| | | AAAGCUGCACUAUGGGCGCAGCACAUUAGGAUCACCAAUGUGCUGACGGUACAGGCCAC |
| | | AUUAGGAUCACCAAUGUGGUAUAGUGCAGCAUCAAAG |
| 2344 | 287 | ACUGGCGCUUUUAUCUGAUUACUUUGAGAGCCAUCACCAGCGACUAUGUCGUAGUGGGU |
| | | AAAGCUGCACUAUGGGCGCAGCACAUUAGGAUCACCGAUGUGCUGACGGUACAGGCCAC |
| | | AUUAGGAUCACCGAUGUGGUAUAGUGCAGCAUCAAAG |
| 2345 | 288 | ACUGGCGCUUUUAUCUGAUUACUUUGAGAGCCAUCACCAGCGACUAUGUCGUAGUGGGU |
| | | AAAGCUGCACUAUGGGCGCAGCACAUUAGGAUCACCUAUGUGCUGACGGUACAGGCCAC |
| | | AUUAGGAUCACCUAUGUGGUAUAGUGCAGCAUCAAAG |
| 2346 | 289 | ACUGGCGCUUUUAUCUGAUUACUUUGAGAGCCAUCACCAGCGACUAUGUCGUAGUGGGU |
| | | AAAGCUGCACUAUGGGCGCAGCACAUGAGGAUUACCCAUGUGCUGACGGUACAGGCCAC |
| | | AUGAGGAUUACCCAUGUGGUAUAGUGCAGCAUCAAAG |
| 2347 | 290 | ACUGGCGCUUUUAUCUGAUUACUUUGAGAGCCAUCACCAGCGACUAUGUCGUAGUGGGU |
| | | AAAGCUGCACUAUGGGCGCAGCACAUGAGGAUAACCCAUGUGCUGACGGUACAGGCCAC |
| | | AUGAGGAUAACCCAUGUGGUAUAGUGCAGCAUCAAAG |
| 2348 | 291 | ACUGGCGCUUUUAUCUGAUUACUUUGAGAGCCAUCACCAGCGACUAUGUCGUAGUGGGU |
| | | AAAGCUGCACUAUGGGCGCAGCACAUGAGGAUGACCCAUGUGCUGACGGUACAGGCCAC |
| | | AUGAGGAUGACCCAUGUGGUAUAGUGCAGCAUCAAAG |
| 2349 | 292 | ACUGGCGCUUUUAUCUGAUUACUUUGAGAGCCAUCACCAGCGACUAUGUCGUAGUGGGU |
| | | AAAGCUGCACUAUGGGCGCAGCACAUGAGGACCACCCAUGUGCUGACGGUACAGGCCAC |
| | | AUGAGGACCACCCAUGUGGUAUAGUGCAGCAUCAAAG |
| 2350 | 293 | ACUGGCGCUUUUAUCUGAUUACUUUGAGAGCCAUCACCAGCGACUAUGUCGUAGUGGGU |
| | | AAAGCUGCACUAUGGGCGCAGCAGAUGAGGAUCACCCAUGGGCUGACGGUACAGGCCAG |
| | | AUGAGGAUCACCCAUGGGGUAUAGUGCAGCAUCAAAG |
| 2351 | 294 | ACUGGCGCUUUUAUCUGAUUACUUUGAGAGCCAUCACCAGCGACUAUGUCGUAGUGGGU |
| | | AAAGCUGCACUAUGGGCGCAGCACAUGGGGAUCACCCAUGUGCUGACGGUACAGGCCAC |
| | | AUGGGGAUCACCCAUGUGGUAUAGUGCAGCAUCAAAG |
| 2352 | 295 | ACUGGCGCUUUUAUCUGAUUACUUUGAGAGCCAUCACCAGCGACUAUGUCGUAGUGGGU |
| | | AAAGCUGCACUAUGGGCGCAGCACAUGAGGAUCACCCAUGUGCUGACGGUACAGGCCAC |
| | | AUGAGGAUCACCCAUGUGGUAUAGUGCAGCAUCAAAG |
| 9588 | 316 | ACUGGCGCUUCUAUCUGAUUACUCUGAGCGCCAUCACCAGCGACUAUGUCGUAGUGGGU |
| | | AAAGCUCCCUCUUCGGAGGGAGCAUCAGAG |
| 2376 | 320 | ACUGGGCCUUCUAUCUGAUUACUCUGAGGCCCAUCACCAGCGACUAUGUCGUAGUGGGU |
| | | AAAGCCGCUUAGGGACUUCGGUCCCUAAGAGGCAUCAGAG |
| 2378 | 321 | ACUGGGCCUUCUAUCUGAUUACUCUGAGGCCCAUCACCAGCGACUAUGUCGUAGUGGGU |
| | | AAAGCCCUUAGGGACUUCGGUCCCUAAGGGCAUCAGAG |
| 2382 | 323 | ACUGGGCCUUCUAUCUGAUUACUCUGAGGCCCAUCACCAGCGACUAUGUCGUAGUGGGU |
| | | AAAGCUCCCUCUUCGGAGGGAGCAUCAGAG |
| 2383 | 324 | ACUGGGCCUUCUAUCUGAUUACUCUGAGGCCCAUCACCAGCGACUAUGUCGUAGUGGGU |
| | | AAAGCCCUUAGGGACCUUGGUCCCUAAGGGCAUCAGAG |
| 2384 | 325 | ACUGGGCCUUCUAUCUGAUUACUCUGAGGCCCAUCACCAGCGACUAUGUCGUAGUGGGU |
| | | AAAGCCUCUUAGGGACCUUGGUCCCUAAGAGGCAUCAGAG |
| 2385 | 326 | ACUGGGCCUUCUAUCUGAUUACUCUGAGGCCCAUCACCAGCGACUAUGUCGUAGUGGGU |
| | | AAAGCUCCCUCCUUGGAGGGAGCAUCAGAG |
| 2386 | 327 | ACUGGGCCUUCUAUCUGAUUACUCUGAGGCCCAUCACCAGCGACUAUGUCGUAGUGGGU |
| | | AAAGCCCUUAGGGAGGAAACUCCCUAAGGGCAUCAGAG |
| 2387 | 328 | ACUGGGCCUUCUAUCUGAUUACUCUGAGGCCCAUCACCAGCGACUAUGUCGUAGUGGGU |
| | | AAAGCCUCUUAGGGAGGAAACUCCCUAAGAGGCAUCAGAG |
| 2388 | 329 | ACUGGGCCUUCUAUCUGAUUACUCUGAGGCCCAUCACCAGCGACUAUGUCGUAGUGGGU |
| | | AAAGCUCCCUGGAAACAGGGAGCAUCAGAG |
| 2389 | 330 | ACUGGGCCUUCUAUCUGAUUACUCUGAGGCCCAUCACCAGCGACUAUGUCGUAGUGGGU |
| | | AAAGCCCUUAGGGACUUCAGGUCCCUAAGGGCAUCAGAG |
| 2390 | 331 | ACUGGGCCUUCUAUCUGAUUACUCUGAGGCCCAUCACCAGCGACUAUGUCGUAGUGGGU |
| | | AAAGCCUCUUAGGGACUUCAGGUCCCUAAGAGGCAUCAGAG |
| 2391 | 332 | ACUGGGCCUUCUAUCUGAUUACUCUGAGGCCCAUCACCAGCGACUAUGUCGUAGUGGGU |
| | | AAAGCUCCCUCUUCAGGAGGGAGCAUCAGAG |
| 2392 | 333 | ACUGGGCCUUCUAUCUGAUUACUCUGAGGCCCAUCACCAGGCACUAUGUGCUAGUGGGU |
| | | AAAGCCCUUAGGGACCUUGGUCCCUAAGGGCAUCAGAG |
| 2393 | 334 | ACUGGGCCUUCUAUCUGAUUACUCUGAGGCCCAUCACCAGGCACUAUGUGCUAGUGGGU |
| | | AAAGCCUCUUAGGGACCUUGGUCCCUAAGAGGCAUCAGAG |
| 2394 | 335 | ACUGGGCCUUCUAUCUGAUUACUCUGAGGCCCAUCACCAGGCACUAUGUGCUAGUGGGU |
| | | AAAGCUCCCUCCUUGGAGGGAGCAUCAGAG |
| 2395 | 336 | ACUGGGCCUUCUAUCUGAUUACUCUGAGGCCCAUCACCAGGCACUAUGUGCUAGUGGGU |
| | | AAAGCCCUUAGGGAGGAAACUCCCUAAGGGCAUCAGAG |
| 2396 | 337 | ACUGGGCCUUCUAUCUGAUUACUCUGAGGCCCAUCACCAGGCACUAUGUGCUAGUGGGU |
| | | AAAGCCUCUUAGGGAGGAAACUCCCUAAGAGGCAUCAGAG |
| 2397 | 338 | ACUGGGCCUUCUAUCUGAUUACUCUGAGGCCCAUCACCAGGCACUAUGUGCUAGUGGGU |
| | | AAAGCUCCCUGGAAACAGGGAGCAUCAGAG |
| 2398 | 339 | ACUGGGCCUUCUAUCUGAUUACUCUGAGGCCCAUCACCAGGCACUAUGUGCUAGUGGGU |
| | | AAAGCCCUUAGGGACUUCAGGUCCCUAAGGGCAUCAGAG |
| 2399 | 340 | ACUGGGCCUUCUAUCUGAUUACUCUGAGGCCCAUCACCAGGCACUAUGUGCUAGUGGGU |
| | | AAAGCCUCUUAGGGACUUCAGGUCCCUAAGAGGCAUCAGAG |
| 2400 | 341 | ACUGGGCCUUCUAUCUGAUUACUCUGAGGCCCAUCACCAGGCACUAUGUGCUAGUGGGU |
| | | AAAGCUCCCUCUUCAGGAGGGAGCAUCAGAG |

[0232] Additional gRNA variants are presented in the attached sequence listing, as SEQ ID NOS: 2101-2237 and 9257-9289 and 9588.

[0233] In some embodiments, a gRNA variant comprises one or more additional modifications to a sequence of SEQ ID NO:2238, SEQ ID NO:2239, SEQ ID NO:2240, SEQ ID NO:2241, SEQ ID NO:2243, SEQ ID NO:2256, SEQ ID NO:2274, SEQ ID NO:2275, SEQ ID NO:2279, SEQ ID NO:2281, SEQ ID NO: 2285, SEQ ID NO: 2289, SEQ ID NO: 2292, SEQ ID NO: 2308, or 9588 of Table 2.

c. Complex Formation with CasX Protein

[0234] In some embodiments, upon expression of the components of the rAAV vector, a gRNA variant of the disclosure has an improved ability to form an RNP complex with a Class 2, Type V protein and bind a target nucleic acid, including CasX variant proteins comprising any one of the sequences SEQ ID NOS: 190, 197, 348, 351, 355, 484, 9382-9542, and 9607-9609, or a sequence having at least about 70%, at least about 80%, at least about 85%, at least about 90%, at least about 91%, at least about 92%, at least about 93%, at least about 94%, at least about 95%, at least about 96%, at least about 97%, at least about 98%, or at least about 99% identity thereto. In some embodiments of the rAAV vector, upon expression, the gRNA variant is complexed as an RNP with a CasX variant protein comprising any one of the sequences SEQ ID NOS: 190, 197, 348, 351, 355, 484, 9382-9542, or 9607-9609, or a sequence having at least about 70%, at least about 80%, at least about 85%, at least about 90%, at least about 91%, at least about 92%, at least about 93%, at least about 94%, at least about 95%, at least about 96%, at least about 97%, at least about 98%, or at least about 99% identity thereto.

[0235] In some embodiments of the rAAV vector, a gRNA variant has an improved ability to form a complex with a CasX variant protein when compared to a reference gRNA, thereby improving its ability to form a cleavage-competent ribonucleoprotein (RNP) complex with the CasX protein, as described in the Examples. Improving ribonucleoprotein complex formation may, in some embodiments, improve the efficiency with which functional RNPs are assembled. In some embodiments, greater than 90%, greater than 93%, greater than 95%, greater than 96%, greater than 97%, greater than 98% or greater than 99% of RNPs comprising a gRNA variant and its targeting sequence are competent for gene editing of a target nucleic acid.

d. gRNA Scaffold 316

[0236] In order to generate a gRNA scaffold with improved characteristics, but that had a scaffold length shorter than 90 nucleotides, a gRNA variant scaffold was designed wherein the gRNA scaffold 174 (SEQ ID NO: 2238) sequence, was modified by introducing one, two, three, four or more mutations at positions selected from the group consisting of U11, U24, A29, and A87. In some embodiments, the gRNA variant comprises a sequence of SEQ ID NO: 2238, or a sequence having at least about 70% sequence identity thereto, and four mutations at positions selected from the group consisting of U11, U24, A29, and A87. In one embodiment of the foregoing, the mutations consist of U11C, U24C, A29C, and A87G, resulting in the gRNA scaffold 316 sequence of SEQ ID NO: 9588, having 89 nucleotides.

[0237] In another embodiments, the gRNA sequence was generated wherein the scaffold 235 sequence (SEQ ID NO: 2292) was modified by a domain swap in which the extended stemloop of gRNA scaffold 174 replaced the extended stemloop of the 235 scaffold, resulting in the gRNA scaffold 316 sequence of SEQ ID NO: 9588, having 89 nucleotides in the scaffold, compared with the 99 nucleotides of gRNA scaffold235. The 316 scaffold was determined to perform comparably or more favorably than gRNA scaffold 174 in editing assays, as described in the Examples. The resulting 316 scaffold had the further advantage in that the extended stemloop did not contain CpG motifs; an enhanced property described more fully, below.

e. Complex Formation with CasX Protein

[0238] Upon delivery of the rAAV to a target cell and expression of the encoded components, the gRNA variant is capable of complexing as an RNP with a CasX protein and binding to the target nucleic acid. In some embodiments, a gRNA variant has an improved ability to form an RNP complex with a CasX protein when compared to a reference gRNA or another gRNA variant from which it was derived. Improving ribonucleoprotein complex formation may, in some embodiments, improve the efficiency with which functional RNPs are assembled. In some embodiments, greater than 90%, greater than 93%, greater than 95%, greater than 96%, greater than 97%, greater than 98% or greater than 99% of RNPs comprising a gRNA variant and its targeting sequence are competent for gene editing or modification of a target nucleic acid.

IV. CRISPR Proteins of the rAAV

[0239] The present disclosure provides rAAV encoding a CRISPR nuclease that have utility in genome editing of eukaryotic cells. In some embodiments, the CRISPR nuclease employed in the genome editing systems is a Class 2, Type V nuclease. Although members of Class 2, Type V CRISPR-Cas systems have differences, they share some common characteristics that distinguish them from the Cas9 systems. Firstly, the Class 2, Type V nucleases possess a single RNA-guided RuvC domain-containing effector but no HNH domain, and they recognize T-rich PAM 5′ upstream to the target region on the non-targeted strand, which is different from Cas9 systems which rely on G-rich PAM at 3′ side of target sequences. Type V nucleases generate staggered double-stranded breaks distal to the PAM sequence, unlike Cas9, which generates a blunt end in the proximal site close to the PAM. In addition, Type V nucleases degrade ssDNA in trans when activated by target dsDNA or ssDNA binding in cis. In some embodiments, the Type V nucleases of the embodiments recognize a 5′-TC PAM motif and produce staggered ends cleaved solely by the RuvC domain. In some embodiments, the Type V nuclease is selected from the group consisting of Cas12a (Cpf1), Cas12b (C2c1), Cas12c (C2c3), Cas12d (CasY), Cas12e (CasX), Cas12f, Cas12g, Cas12h, Cas12i, Cas12j, Cas12k, Cas14, and Cas(D. In some embodiments, the present disclosure provides rAAV encoding a CasX variant protein and one or more gRNAs that upon expression in a transfected cell are able to form an RNP complex and modify a target nucleic acid sequence in eukaryotic cells.

[0240] The term “CasX protein”, as used herein, refers to a family of proteins, and encompasses all naturally occurring CasX proteins, proteins that share at least 50% identity to naturally occurring CasX proteins, as well as CasX variants possessing one or more improved characteristics relative to a naturally-occurring reference CasX protein, described more fully, below.

[0241] The present disclosure provides highly-modified CasX proteins having multiple mutations relative to one or more reference CasX proteins. Any changes in the amino acid sequence of a reference CasX protein which results in a CasX and that leads to an improved characteristic relative to the reference CasX protein is considered a CasX variant protein of the disclosure, provided the CasX retains the ability to form an RNP with a gRNA and retains nuclease activity.

[0242] CasX proteins of the disclosure comprise at least one of the following domains: a non-target strand binding (NTSB) domain, a target strand loading (TSL) domain, a helical I domain (which is further divided into helical I-I and I-II subdomains), a helical II domain, an oligonucleotide binding domain (OBD, which is further divided into OBD-I and OBD-II subdomains), and a RuvC DNA cleavage domain (which is further divided into RuvC-I and II subdomains). The RuvC domain may be modified or deleted in a catalytically-dead CasX variant, described more fully, below.

[0243] In some embodiments, a CasX variant protein can bind and/or modify (e.g., nick, catalyze a double-strand break, methylate, demethylate, etc.) a target nucleic acid at a specific sequence targeted by an associated gRNA, which hybridizes to a sequence within the target nucleic acid sequence. In some embodiments, the CasX comprises a nuclease domain having double-stranded cleavage activity that generates a double-stranded break within 18-26 nucleotides 5′ of a PAM site on the target strand and 10-18 nucleotides 3′ on the non-target strand, resulting in overhangs that can facilitate a higher degree of editing efficiency or insertion of a donor template nucleic acid by HDR or HITI repair mechanisms of the host cell, compared to other CRISPR systems.

a. Reference CasX Proteins

[0244] The disclosure provides naturally-occurring CasX proteins (referred to herein as a “reference CasX protein”), which were subsequently modified to create the CasX variants of the disclosure. For example, reference CasX proteins can be isolated from naturally occurring prokaryotes, such as Deltaproteobacteria, Planctomycetes, or Candidatus sungbacteria species. A reference CasX protein is a type V CRISPR/Cas endonuclease belonging to the CasX (interchangeably referred to as Cas12e) family of proteins that interacts with a guide RNA to form a ribonucleoprotein (RNP) complex.

[0245] In some cases, a reference CasX protein is isolated or derived from Deltaproteobacter. In some embodiments, a reference CasX protein comprises a sequence identical to a sequence of:

| (SEQ ID NO: 1) | |
|---|---|
| 1 | MEKRINKIRK KLSADNATKP VSRSGPMKTL LVRVMTDDLK KRLEKRRKKP EVMPQVISNN |
| 61 | AANNLRMLLD DYTKMKEAIL QVYWQEFKDD HVGLMCKFAQ PASKKIDQNK LKPEMDEKGN |
| 121 | LTTAGFACSQ CGQPLFVYKL EQVSEKGKAY TNYFGRCNVA EHEKLILLAQ LKPEKDSDEA |
| 181 | VTYSLGKFGQ RALDFYSIHV TKESTHPVKP LAQIAGNRYA SGPVGKALSD ACMGTIASFL |
| 241 | SKYQDIIIEH QKVVKGNQKR LESLRELAGK ENLEYPSVTL PPQPHTKEGV DAYNEVIARV |
| 301 | RMWVNLNLWQ KLKLSRDDAK PLLRLKGFPS FPVVERRENE VDWWNTINEV KKLIDAKRDM |
| 361 | GRVFWSGVTA EKRNTILEGY NYLPNENDHK KREGSLENPK KPAKRQFGDL LLYLEKKYAG |
| 421 | DWGKVFDEAW ERIDKKIAGL TSHIEREEAR NAEDAQSKAV LTDWLRAKAS FVLERLKEMD |
| 481 | EKEFYACEIQ LQKWYGDLRG NPFAVEAENR VVDISGFSIG SDGHSIQYRN LLAWKYLENG |
| 541 | KREFYLLMNY GKKGRIRFTD GTDIKKSGKW QGLLYGGGKA KVIDLTFDPD DEQLIILPLA |
| 601 | FGTRQGREFI WNDLLSLETG LIKLANGRVI EKTIYNKKIG RDEPALFVAL TFERREVVDP |
| 661 | SNIKPVNLIG VDRGENIPAV IALTDPEGCP LPEFKDSSGG PTDILRIGEG YKEKQRAIQA |
| 721 | AKEVEQRRAG GYSRKFASKS RNLADDMVRN SARDLFYHAV THDAVLVFEN LSRGFGRQGK |
| 781 | RTFMTERQYT KMEDWLTAKL AYEGLTSKTY LSKTLAQYTS KTCSNCGFTI TTADYDGMLV |
| 841 | RLKKTSDGWA TTLNNKELKA EGQITYYNRY KRQTVEKELS AELDRLSEES GNNDISKWTK |
| 901 | GRRDEALFLL KKRFSHRPVQ EQFVCLDCGH EVHADEQAAL NIARSWLFLN SNSTEFKSYK |
| 961 | SGKQPFVGAW QAFYKRRLKE VWKPNA. |

[0246] In some cases, a reference CasX protein is isolated or derived from Planctomycetes. In some embodiments, a reference CasX protein comprises a sequence identical to a sequence of:

| (SEQ ID NO: 2) | |
|---|---|
| 1 | MQEIKRINKI RRRLVKDSNT KKAGKTGPMK TLLVRVMTPD LRERLENLRK KPENIPQPIS |
| 61 | NTSRANLNKL LTDYTEMKKA ILHVYWEEFQ KDPVGLMSRV AQPAPKNIDQ RKLIPVKDGN |
| 121 | ERLTSSGFAC SQCCQPLYVY KLEQVNDKGK PHTNYFGRCN VSEHERLILL SPHKPEANDE |
| 181 | LVTYSLGKFG QRALDFYSIH VTRESNHPVK PLEQIGGNSC ASGPVGKALS DACMGAVASF |
| 241 | LTKYQDIILE HQKVIKKNEK RLANLKDIAS ANGLAFPKIT LPPQPHTKEG IEAYNNVVAQ |
| 301 | IVIWVNLNLW QKLKIGRDEA KPLQRLKGFP SFPLVERQAN EVDWWDMVCN VKKLINEKKE |
| 361 | DGKVFWQNLA GYKRQEALLP YLSSEEDRKK GKKFARYQFG DLLLHLEKKH GEDWGKVYDE |
| 421 | AWERIDKKVE GLSKHIKLEE ERRSEDAQSK AALTDWLRAK ASFVIEGLKE ADKDEFCRCE |
| 481 | LKLQKWYGDL RGKPFAIEAE NSILDISGFS KQYNCAFIWQ KDGVKKLNLY LIINYFKGGK |
| 541 | LRFKKIKPEA FEANRFYTVI NKKSGEIVPM EVNENFDDPN LIILPLAFGK RQGREFIWND |
| 601 | LLSLETGSLK LANGRVIEKT LYNRRTRQDE PALEVALTFE RREVLDSSNI KPMNLIGIDR |
| 661 | GENIPAVIAL TDPEGCPLSR FKDSLGNPTH ILRIGESYKE KQRTIQAAKE VEQRRAGGYS |
| 721 | RKYASKAKNL ADDMVRNTAR DLLYYAVTQD AMLIFENLSR GFGRQGKRTF MAERQYTRME |
| 781 | DWLTAKLAYE GLPSKTYLSK TLAQYTSKTC SNCGFTITSA DYDRVLEKLK KTATGWMTTI |
| 841 | NGKELKVEGQ ITYYNRYKRQ NVVKDLSVEL DRLSEESVNN DISSWTKGRS GEALSLLKKR |
| 901 | FSHRPVQEKF VCLNCGFETH ADEQAALNIA RSWLFLRSQE YKKYQTNKTT GNTDKRAFVE |
| 961 | TWQSFYRKKL KEVWKPAV. |

[0247] In some cases, a reference CasX protein is isolated or derived from Candidatus Sungbacteria. In some embodiments, a reference CasX protein comprises a sequence identical to a sequence of

| (SEQ ID NO: 3) | |
|---|---|
| 1 | MDNANKPSTK SLVNTTRISD HFGVTPGQVT RVFSFGIIPT KRQYAIIERW FAAVEAARER |
| 61 | LYGMLYAHFQ ENPPAYLKEK FSYETFFKGR PVLNGLRDID PTIMTSAVFT ALRHKAEGAM |
| 121 | AAFHTNHRRL FEEARKKMRE YAECLKANEA LLRGAADIDW DKIVNALRTR LNTCLAPEYD |
| 181 | AVIADFGALC AFRALIAETN ALKGAYNHAL NOMLPALVKV DEPEEAEESP RLRFENGRIN |
| 241 | DLPKFPVAER ETPPDTETII RQLEDMARVI PDTAEILGYI HRIRHKAARR KPGSAVPLPQ |
| 301 | RVALYCAIRM ERNPEEDPST VAGHELGEID RVCEKRRQGL VRTPEDSQIR ARYMDIISER |
| 361 | ATLAHPDRWT EIQFLRSNAA SRRVRAETIS APFEGFSWTS NRTNPAPQYG MALAKDANAP |
| 421 | ADAPELCICL SPSSAAFSVR EKGGDLIYMR PTGGRRGKDN PGKEITWVPG SFDEYPASGV |
| 481 | ALKLRLYFGR SQARRMLINK TWGLLSDNPR VFAANAELVG KKRNPODRWK LFFHMVISGP |
| 541 | PPVEYLDFSS DVRSRARTVI GINRGEVNPL AYAVVSVEDG QVLEEGLLGK KEYIDOLIET |
| 601 | RRRISEYQSR EQTPPRDLRQ RVRHLODTVL GSARAKIHSL IAFWKGILAI ERLDDQFHGR |
| 661 | EQKIIPKKTY LANKTGFMNA LSFSGAVRVD KKGNPWGGMI EIYPGGISRT CTQCGTVWLA |
| 721 | RRPKNPGHRD AMVVIPDIVD DAAATGFDNV DCDAGTVDYG ELFTLSREWV RLTPRYSRVM |
| 781 | RGTLGDLERA IRQGDDRKSR QMLELALEPQ POWGOFFCHR CGENGQSDVL AATNLARRAI |
| 841 | SLIRRLPDTD TPPTP. |

b. Class 2, Type V CasX Variant Proteins

[0248] The present disclosure provides Class 2, Type V, CasX variants of a reference CasX protein or variants derived from other CasX variants (interchangeably referred to herein as “Class 2, Type V CasX variant”, “CasX variant” or “CasX variant protein”) for use in the rAAV, wherein the Class 2, Type V CasX variants comprise at least one modification in at least one domain relative to the reference CasX protein, including but not limited to the sequences of SEQ ID NOS:1-3, or at least one modification relative to another CasX variant. Any change in amino acid sequence of a reference CasX protein or to another CasX variant protein that leads to an improved characteristic of the CasX protein is considered a CasX variant protein of the disclosure. For example, CasX variants can comprise one or more amino acid substitutions, insertions, deletions, or swapped domains, or any combinations thereof, relative to a reference CasX protein sequence.

[0249] The CasX variants of the disclosure have one or more improved characteristics compared to a reference CasX protein of SEQ ID NO:1, SEQ ID NO:2 or SEQ ID NO:3. Exemplary improved characteristics are described in WO2020247882A1 and PCT/US20/36505, incorporated by reference herein.

[0250] Exemplary improved characteristics of the CasX variant embodiments include, but are not limited to improved folding of the variant, increased binding affinity to the gRNA, increased binding affinity to the target nucleic acid, improved ability to utilize a greater spectrum of PAM sequences in the editing and/or binding of target nucleic acid, improved unwinding of the target DNA, improved editing activity, improved editing efficiency, improved editing specificity for the target nucleic acid, improved specificity ratio for the target nucleic acid, decreased off-target editing or cleavage, increased percentage of a eukaryotic genome that can be efficiently edited, increased activity of the nuclease, increased target strand loading for double strand cleavage, decreased target strand loading for single strand nicking, increased binding of the non-target strand of DNA, improved protein stability, improved protein:gRNA (RNP) complex stability, and improved fusion characteristics. In particular, the CasX variant proteins of the disclosure have an enhanced ability to efficiently edit and/or bind target DNA, when complexed with a guide RNA scaffold as an RNP, utilizing a PAM TC motif, including PAM sequences selected from TTC, ATC, GTC, or CTC, compared to an RNP of a reference CasX protein and a reference gRNA. In the foregoing, the PAM sequence is located at least 1 nucleotide 5′ to the non-target strand of the protospacer having identity with the targeting sequence of the gRNA in an assay system compared to the editing efficiency and/or binding of an RNP comprising the reference CasX protein and reference gRNA in a comparable assay system. In the foregoing embodiments, the one or more of the improved characteristics of the CasX variant is at least about 1.1 to about 100,000-fold improved relative to the reference CasX protein of SEQ ID NO: 1, SEQ ID NO: 2, or SEQ ID NO: 3, when assayed in a comparable fashion. In other embodiments, the improvement is at least about 1.1-fold, at least about 2-fold, at least about 5-fold, at least about 10-fold, at least about 50-fold, at least about 100-fold, at least about 500-fold, at least about 1000-fold, at least about 5000-fold, at least about 10,000-fold, or at least about 100,000-fold compared to the reference CasX protein of SEQ ID NO: 1, SEQ ID NO: 2, or SEQ ID NO: 3. In some embodiments, an RNP comprising the CasX variant protein and a gRNA variants of the disclosure, at a concentration of 20 pM or less, is capable of cleaving a double stranded DNA target with an efficiency of at least 80%. In some embodiments, the RNP at a concentration of 20 pM or less is capable of cleaving a double stranded DNA target with an efficiency of at least 40%, at least 50%, at least 60%, at least 70%, at least 80%, at least 85%, at least 90% or at least 95%. In some embodiments, the RNP at a concentration of 50 pM or less, 40 pM or less, 30 pM or less, 20 pM or less, 10 pM or less, or 5 pM or less, is capable of cleaving a double stranded DNA target with an efficiency of at least 40%, at least 50%, at least 60%, at least 70%, at least 80%, at least 85%, at least 90% or at least 95%. These improved characteristics are described in more detail, below.

[0251] In some embodiments, the modification of the CasX variant is a mutation in one or more amino acids of the reference CasX. In other embodiments, the modification is an insertion or substitution of a part or all of a domain from a different CasX protein. Mutations can be introduced in any one or more domains of the reference CasX protein or in a CasX variant to result in a CasX variant, and may include, for example, deletion of part or all of one or more domains, or one or more amino acid substitutions, deletions, or insertions in any domain of the reference CasX protein or the CasX variant from which it was derived.

[0252] In other embodiments, the disclosure provides CasX variants wherein the CasX variants comprise one or more modifications relative to another CasX variant; e.g., CasX variant 515 and 527 is a variant of CasX variant 491 and CasX variants 668 and 672 are variants of CasX 535.

[0253] In some embodiments, a CasX variant protein comprises between 500 and 1500 amino acids, between 700 and 1200 amino acids, between 800 and 1100 amino acids, or between 900 and 1000 amino acids.

c. CasX Variant Proteins with Domains from Multiple Source Proteins

[0254] Also contemplated within the scope of the disclosure are chimeric CasX proteins for use in the rAAV. As used herein, a “chimeric CasX” protein refers to both a CasX protein containing at least two domains from different sources, as well a CasX protein containing at least one domain that itself is chimeric. Accordingly, in some embodiments, a chimeric CasX protein is one that includes at least two domains isolated or derived from different sources, such as from two different naturally occurring CasX proteins, (e.g., from two different CasX reference proteins), or from two different CasX variant proteins. In other embodiments, the chimeric CasX protein is one that contains at least one domain that is a chimeric domain, e.g., in some embodiments, part of a domain comprises a substitution from a different CasX protein (from a reference CasX protein, or another CasX variant protein).

[0255] In some embodiments, a CasX variant protein of the disclosure comprises a modification, and the modification is an insertion or substitution of a part or all of a domain from a different CasX protein. In particular embodiments, the CasX variants 514-840 and SEQ ID NOS: 9382-9542 and 9607-9609 have a NTSB and helical 1-I domain derived from the sequence of SEQ ID NO: 1, while the other domains are derived from SEQ ID NO: 2, it being understood that the variants may have 1, 2, 3, 4 or more amino acid changes at select locations. In one embodiment, the CasX variant of 494 has a NTSB domain derived from the sequence of SEQ ID NO: 1, while the other domains are derived from SEQ ID NO: 2.

[0256] In some embodiments, a CasX variant protein for use in the rAAV comprises at least one chimeric domain comprising a first part from a first CasX protein and a second part from a second, different CasX protein. As used herein, a “chimeric domain” refers to a domain containing at least two parts isolated or derived from different sources, such as two naturally occurring proteins or portions of domains from two reference CasX proteins, or even portions of two CasX variant proteins. The at least one chimeric domain can be any of the NTSB, TSL, helical I, helical II, OBD or RuvC domains as described herein. As an example of the foregoing, a chimeric RuvC domain comprises amino acids 660 to 823 of SEQ ID NO: 1 and amino acids 921 to 978 of SEQ ID NO: 2. As an alternative example of the foregoing, a chimeric RuvC domain comprises amino acids 647 to 810 of SEQ ID NO: 2 and amino acids 934 to 986 of SEQ ID NO: 1. In the case of split or non-contiguous domains such as helical I, RuvC and OBD, a portion of the non-contiguous domain can be replaced with the corresponding portion from any other source. For example, the helical I-I domain in SEQ ID NO: 2 can be replaced with the corresponding helical I-I sequence from SEQ ID NO: 1, and the like. Domain sequences from reference CasX proteins, and their coordinates, are shown in Table 4.

[0257] Representative examples of chimeric CasX proteins of the disclosure include the CasX variants of SEQ ID NOS: 184-190, 197, 484, 9382-9542 and 9607-9609.

TABLE 3
Domain coordinates in Reference CasX proteins

| | Coordinates in | Coordinates in |
|---|---|---|
| Domain Name | SEQ ID NO: 1 | SEQ ID NO: 2 |
| OBD-I | 1-55 | 1-57 |
| helical I-I | 56-99 | 58-101 |
| NTSB | 100-190 | 102-191 |
| helical I_II | 191-331 | 192-332 |
| helical II | 332-508 | 333-500 |
| OBD_II | 509-659 | 501-646 |
| RuvC-I | 660-823 | 647-810 |
| TSL | 824-933 | 811-920 |
| RuvC-II | 934-986 | 921-978 |

[0258] Exemplary domain sequences are provided in Table 4 below.

TABLE 4
Exemplary Domain Sequences in Reference CasX proteins
Deltaproteobacter sp. (reference CasX of SEQ ID NO: 1)

| SEQ | | |
|---|---|---|
| ID | Domain | Sequence |
| 567 | OBD-I | EKRINKIRKKLSADNATKPVSRSGPMKTLLVRVMTDDLKKRLEKRRKKPEVMPQ |
| 568 | helical I-I | VISNNAANNLRMLLDDYTKMKEAILQVYWQEFKDDHVGLMCKFA |
| 569 | NTSB | QPASKKIDQNKLKPEMDEKGNLTTAGFACSQCGQPLFVYKLEQVSEKGKAYTNYFGRCNV |
| | | AEHEKLILLAQLKPEKDSDEAVTYSLGKFGQ |
| 570 | helical I-II | RALDFYSIHVTKESTHPVKPLAQIAGNRYASGPVGKALSDACMGTIASFLSKYQDIIIEH |
| | | QKVVKGNQKRLESLRELAGKENLEYPSVTLPPQPHTKEGVDAYNEVIARVRMWVNLNLWQ |
| | | KLKLSRDDAKPLLRLKGFPSF |
| 571 | helical II | PVVERRENEVDWWNTINEVKKLIDAKRDMGRVFWSGVTAEKRNTILEGYNYLPNENDHKK |
| | | REGSLENPKKPAKRQFGDLLLYLEKKYAGDWGKVFDEAWERIDKKIAGLTSHIEREEARN |
| | | AEDAQSKAVLTDWLRAKASFVLERLKEMDEKEFYACEIQLQKWYGDLRGNPFAVEAE |
| 572 | OBD-II | NRVVDISGFSIGSDGHSIQYRNLLAWKYLENGKREFYLLMNYGKKGRIRFTDGTDIKKSG |
| | | KWQGLLYGGGKAKVIDLTFDPDDEQLIILPLAFGTRQGREFIWNDLLSLETGLIKLANGR |
| | | VIEKTIYNKKIGRDEPALFVALTFERREVVD |
| 573 | RuvC-I | PSNIKPVNLIGVDRGENIPAVIALTDPEGCPLPEFKDSSGGPTDILRIGEGYKEKORAIQ |
| | | AAKEVEQRRAGGYSRKFASKSRNLADDMVRNSARDLFYHAVTHDAVLVFENLSRGFGROG |
| | | KRTFMTERQYTKMEDWLTAKLAYEGLTSKTYLSKTLAQYTSKTC |
| 574 | TSL | SNCGFTITTADYDGMLVRLKKTSDGWATTLNNKELKAEGQITYYNRYKRQTVEKELSAEL |
| | | DRLSEESGNNDISKWTKGRRDEALFLLKKRFSHRPVQEQFVCLDCGHEVH |
| 575 | RuvC-II | ADEQAALNIARSWLFLNSNSTEFKSYKSGKQPFVGAWQAFYKRRLKEVWKPNA |

Planctomycetes sp. (Reference CasX of SEQ ID NO: 2)

| SEQ | | |
|---|---|---|
| ID | Domain | Sequence |
| 576 | OBD-I | QEIKRINKIRRRLVKDSNTKKAGKTGPMKTLLVRVMTPDLRERLENLRKKPENIPQ |
| 577 | helical I-II | PISNTSRANLNKLLTDYTEMKKAILHVYWEEFQKDPVGLMSRVA |
| 578 | NTSB | QPAPKNIDORKLIPVKDGNERLTSSGFACSQCCQPLYVYKLEQVNDKGKPHTNYFGRCNV |
| | | SEHERLILLSPHKPEANDELVTYSLGKFGQ |
| 579 | helical I-II | RALDFYSIHVTRESNHPVKPLEQIGGNSCASGPVGKALSDACMGAVASFLTKYQDIILEH |
| | | QKVIKKNEKRLANLKDIASANGLAFPKITLPPQPHTKEGIEAYNNVVAQIVIWVNLNLWQ |
| | | KLKIGRDEAKPLQRLKGFPSF |
| 580 | helical II | PLVERQANEVDWWDMVCNVKKLINEKKEDGKVFWQNLAGYKRQEALLPYLSSEEDRKKGK |
| | | KFARYQFGDLLLHLEKKHGEDWGKVYDEAWERIDKKVEGLSKHIKLEEERRSEDAQSKAA |
| | | LTDWLRAKASFVIEGLKEADKDEFCRCELKLQKWYGDLRGKPFAIEAE |
| 581 | OBD-II | NSILDISGFSKQYNCAFIWQKDGVKKLNLYLIINYFKGGKLRFKKIKPEAFEANRFYTVI |
| | | NKKSGEIVPMEVNENFDDPNLIILPLAFGKROGREFIWNDLLSLETGSLK |
| | | LANGRVIEKTLYNRRTRQDEPALFVALTFERREVLD |
| 582 | RuvC-I | SSNIKPMNLIGIDRGENIPAVIALTDPEGCPLSRFKDSLGNPTHILRIGESYKEKORTIQ |
| | | AAKEVEQRRAGGYSRKYASKAKNLADDMVRNTARDLLYYAVTQDAMLIFENLSRGFGRQG |
| | | KRTEMAERQYTRMEDWLTAKLAYEGLPSKTYLSKTLAQYTSKTC |
| 583 | TSL | SNCGFTITSADYDRVLEKLKKTATGWMTTINGKELKVEGQITYYNRYKRONVVKDLSVEL |
| | | DRLSEESVNNDISSWTKGRSGEALSLLKKRFSHRPVQEKFVCLNCGFETH |
| 584 | RuvC-II | ADEQAALNIARSWLFLRSQEYKKYQTNKTTGNTDKRAFVETWQSFYRKKLKEVWKPAV |

d. Exemplary CasX Variants

[0259] In some embodiments, a CasX variant protein for use in the rAAV comprises a sequence set forth in Table 5 (SEQ ID NOS: 190, 197, 348, 351, 355, and 484). In some embodiments, a CasX variant protein for use in the rAAV comprises a sequence of SEQ ID NO: 197. In some embodiments, a CasX variant protein for use in the rAAV comprises a sequence of SEQ ID NO: 484. In other embodiments, a CasX variant protein comprises a sequence at least 70% identical, at least 75% identical, at least 80% identical, at least 81% identical, at least 82% identical, at least 83% identical, at least 84% identical, at least 85% identical, at least 86% identical, at least 86% identical, at least 87% identical, at least 88% identical, at least 89% identical, at least 89% identical, at least 90% identical, at least 91% identical, at least 92% identical, at least 93% identical, at least 94% identical, at least 95% identical, at least 96% identical, at least 97% identical, at least 98% identical, at least 99% identical, at least 99.5% identical to a sequence selected from the group consisting of the sequences as set forth in SEQ ID NOS: 137-512, 9382-9542, and 9607-9609, wherein the variant retains the functional properties of the ability to form an RNP with a gRNA and to bind and cleave a target nucleic acid. In some embodiments, a CasX variant protein comprises a sequence selected from the group consisting of SEQ ID NOS: 9382-9542, and 9607-9609, or a sequence having at least about 70%, at least about 80%, at least about 90%, or at least about 95%, or at least about 95%, or at least about 96%, or at least about 97%, or at least about 98%, or at least about 99% sequence identity thereto, wherein the variant retains the functional properties of the ability to form an RNP with a gRNA and to bind and cleave a target nucleic acid. In some embodiments, a CasX variant protein comprises a sequence selected from the group consisting of SEQ ID NOS: 9382-9542, and 9607-9609. In other embodiments, a CasX variant comprises a sequence at least 60% identical, at least 65% identical, at least 70% identical, at least 75% identical, at least 80% identical, at least 81% identical, at least 82% identical, at least 83% identical, at least 84% identical, at least 85% identical, at least 86% identical, at least 86% identical, at least 87% identical, at least 88% identical, at least 89% identical, at least 90% identical, at least 91% identical, at least 92% identical, at least 93% identical, at least 94% identical, at least 95% identical, at least 96% identical, at least 97% identical, at least 98% identical, at least 99% identical, or at least 99.5% identical to a sequence selected from the group consisting of SEQ ID NOS: 197, 484, 9382-9542, and 9607-9609, and comprises a P at position 793 relative to SEQ ID NO: 2, wherein the CasX variant protein retains the functional properties of the ability to form an RNP with a gRNA and retains nuclease activity. In some embodiments, a CasX variant comprises a P at position 793 relative to SEQ TD NO: 2. In some embodiments, a CasX variant protein comprises a sequence of SEQ ID NO: 5. In some embodiments, a CasX variant protein consists of a sequence of SEQ ID NO: 5. As the results of the Examples demonstrate, despite changes in amino acid composition amongst the variants, the CasX variants retain the functional properties of the ability to form an RNP with a gRNA and retains nuclease activity, underscoring that the variants collectively have the ability to be utilized for a common use; the genetic editing of DNA.

TABLE 5
CasX Variant Sequences

| SEQ | | |
|---|---|---|
| ID NO | Variant | Description of Variant |
| 190 | 491 | QEIKRINKIRRRLVKDSNTKKAGKTGPMKTLLVRVMTPDLRERLENLRKKPENIPQPISNTSR |
| | | ANLNKLLTDYTEMKKAILHVYWEEFQKDPVGLMSRVAQPASKKIDQNKLKPEMDEKGNLTTAG |
| | | FACSQCGQPLFVYKLEQVSEKGKAYTNYFGRCNVAEHEKLILLAQLKPEKDSDEAVTYSLGKF |
| | | GQRALDFYSIHVTKESTHPVKPLAQIAGNRYASGPVGKALSDACMGTIASFLSKYQDIIIEHQ |
| | | KVVKGNQKRLESLRELAGKENLEYPSVTLPPQPHTKEGVDAYNEVIARVRMWVNLNLWQKLKL |
| | | SRDDAKPLLRLKGFPSFPLVERQANEVDWWDMVCNVKKLINEKKEDGKVFWQNLAGYKRQEAL |
| | | RPYLSSEEDRKKGKKFARYQLGDLLLHLEKKHGEDWGKVYDEAWERIDKKVEGLSKHIKLEEE |
| | | RRSEDAQSKAALTDWLRAKASFVIEGLKEADKDEFCRCELKLQKWYGDLRGKPFAIEAENSIL |
| | | DISGFSKQYNCAFIWQKDGVKKLNLYLIINYFKGGKLRFKKIKPEAFEANRFYTVINKKSGEI |
| | | VPMEVNENFDDPNLIILPLAFGKRQGREFIWNDLLSLETGSLKLANGRVIEKTLYNRRTRQDE |
| | | PALFVALTFERREVLDSSNIKPMNLIGVDRGENIPAVIALTDPEGCPLSRFKDSLGNPTHILR |
| | | IGESYKEKQRTIQAKKEVEQRRAGGYSRKYASKAKNLADDMVRNTARDLLYYAVTQDAMLIFE |
| | | NLSRGFGRQGKRTEMAERQYTRMEDWLTAKLAYEGLSKTYLSKTLAQYTSKTCSNCGFTITSA |
| | | DYDRVLEKLKKTATGWMTTINGKELKVEGQITYYNRYKRQNVVKDLSVELDRLSEESVNNDIS |
| | | SWTKGRSGEALSLLKKRFSHRPVQEKFVCLNCGFETHADEQAALNIARSWLFLRSQEYKKYQT |
| | | NKTTGNTDKRAFVETWQSFYRKKLKEVWKPAV |
| 197 | 515 | QEIKRINKIRRRLVKDSNTKKAGKTGPMKTLLVRVMTPDLRERLENLRKKPENIPQPISNTSR |
| | | ANLNKLLTDYTEMKKAILHVYWEEFQKDPVGLMSRVAQPASKKIDQNKLKPEMDEKGNLTTAG |
| | | FACSQCGQPLFVYKLEQVSEKGKAYTNYFGRCNVAEHEKLILLAQLKPEKDSDEAVTYSLGKF |
| | | GQRALDFYSIHVTKESTHPVKPLAQIAGNRYASGPVGKALSDACMGTIASFLSKYQDIIIEHQ |
| | | KVVKGNQKRLESLRELAGKENLEYPSVTLPPQPHTKEGVDAYNEVIARVRMWVNLNLWQKLKL |
| | | SRDDAKPLLRLKGFPSFPLVERQANEVDWWDMVCNVKKLINEKKEDGKVFWQNLAGYKRQEAL |
| | | RPYLSSEEDRKKGKKFARYQLGDLLLHLEKKHGEDWGKVYDEAWERIDKKVEGLSKHIKLEEE |
| | | RRSEDAQSKAALTDWLRAKASFVIEGLKEADKDEFCRCELKLQKWYGDLRGKPFAIEAENSIL |
| | | DISGFSKQYNCAFIWQKDGVKKLNLYLIINYFKGGKLRFKKIKPEAFEANRFYTVINKKSGEI |
| | | VPMEVNENFDDPNLIILPLAFGKRQGREFIWNDLLSLETGSLKLANGRVIEKTLYNRRTRQDE |
| | | PALFVALTFERREVLDSSNIKPMNLIGVDRGENIPAVIALTDPEGCPLSRFKDSLGNPTHILR |
| | | IGESYKEKQRTIQAKKEVEQRRAGGYSRKYASKAKNLADDMVRNTARDLLYYAVTQDAMLIFE |
| | | NLSRGFGRQGKRTFMAERQYTRMEDWLTAKLAYEGLPSKTYLSKTLAQYTSKTCSNCGFTITS |
| | | ADYDRVLEKLKKTATGWMTTINGKELKVEGQITYYNRYKRQNVVKDLSVELDRLSEESVNNDI |
| | | SSWTKGRSGEALSLLKKRFSHRPVQEKFVCLNCGFETHADEQAALNIARSWLELRSQEYKKYQ |
| | | TNKTTGNTDKRAFVETWQSFYRKKLKEVWKPAV |
| 348 | 668 | QEIKRINKIRRRLVKDSNTKKAGKTRGPMKTLLVRVMTPDLRERLENLRKKPENIPQPISNTS |
| | | RANLNKLLTDYTEMKKAILHVYWEEFQKDPVGLMSRVAQPASKKIDQNKLKPEMDEKGNLTTA |
| | | GFACSQCGQPLFVYKLEQVSEKGKAYTNYFGRCNVAEHEKLILLAQLKPEKDSDEAVTYSLGK |
| | | FGQRALDFYSIHVTKESTHPVKPLAQIAGNRYASSPVGKALSDACMGTIASFLSKYQDIIIEH |
| | | QKVVKGNQKRLESLRELAGKENLEYPSVTLPPQPHTKEGVDAYNEVIARVRMWVNLNLWQKLK |
| | | LSRDDAKPLLRLKGFPSFPLVERQANEVDWWDMVCNVKKLINEKKEDGKVFWQNLAGYKRQEA |
| | | LRPYLSSEEDRKKGKKFARYQLGDLLLHLEKKHGEDWGKVYDEAWERIDKKVEGLSKHIKLEE |
| | | ERRSEDAQSKAALTDWLRAKASFVIEGLKEADKDEFCRCELKLQKWYGDLRGKPFAIEAENSI |
| | | LDISGFSKQYNCAFIWQKDGVKKLNLYLIINYFKGGKLRFKKIKPEAFEANRFYTVINKKSGE |
| | | IVPMEVNENFDDPNLIILPLAFGKRQGREFIWNDLLSLETGSLKLANGRVIEKTLYNRRTRQD |
| | | EPALFVALTFERREVLDSSNIKPMNLIGVDRGENIPAVIALTDPEGCPLSRFKDSLGNPTHIL |
| | | RIGESYKEKQRTIQAKKEVEQRRAGGYSRKYASKAKNLADDMVRNTARDLLYYAVTQDAMLIF |
| | | ENLSRGFGRQGKRTFMAERQYTRMEDWLTAKLAYEGLPSKTYLSKTLAQYTSKTCSNCGFTIT |
| | | SADYDRVLEKLKKTATGWMTTINGKELKVEGQITYYNRYKRQNVVKDLSVELDRLSEESVNND |
| | | ISSWTKGRSGEALSLLKKRFSHRPVQEKFVCLNCGFETHADEQAALNIARSWLFLRSQEYKKY |
| | | QTNKTTGNTDKRAFVETWQSFYRKKLKEVWKPAV |
| 351 | 672 | QEIKRINKIRRRLVKDSNTKKAGKTGPMKTLLVRVMTPDLRERLENLRKKPENIPQPISNTSR |
| | | ANLNKLLTDYTEMKKAILHVYWEEFQKDPVGLMSRVAQPASKKIDQNKLKPEMDEKGNLTTAG |
| | | FACSQCGQPLFVYKLEQVSEKGKAYTNYFGRCNVAEHEKLIKLAQLKPEKDSDEAVTYSLGKF |
| | | GQRALDFYSIHVTKESTHPVKPLAQIAGNRYASSPVGKALSDACMGTIASFLSKYQDIIIEHQ |
| | | KVVKGNQKRLESLRELAGKENLEYPSVTLPPQPHTKEGVDAYNEVIARVRMWVNLNLWQKLKL |
| | | SRDDAKPLLRLKGFPSFPLVERQANEVDWWDMVCNVKKLINEKKEDGKVFWQNLAGYKRQEAL |
| | | RPYLSSEEDRKKGKKFARYQLGDLLLHLEKKHGEDWGKVYDEAWERIDKKVEGLSKHIKLEEE |
| | | RRSEDAQSKAALTDWLRAKASFVIEGLKEADKDEFCRCELKLQKWYGDLRGKPFAIEAENSIL |
| | | DISGFSKQYNCAFIWQKDGVKKLNLYLIINYFKGGKLRFKKIKPEAFEANRFYTVINKKSGEI |
| | | VPMEVNENFDDPNLIILPLAFGKRQGREFIWNDLLSLETGSLKLANGRVIEKTLYNRRTRQDE |
| | | PALFVALTFERREVLDSSNIKPMNLIGVDRGENIPAVIALTDPEGCPLSRFKDSLGNPTHILR |
| | | IGESYKEKQRTIQAKKEVEQRRAGGYSRKYASKAKNLADDMVRNTARDLLYYAVTQDAMLIFE |
| | | NLSRGFGRQGKRTEMAERQYTRMEDWLTAKLAYEGLPSKTYLSKTLAQYTSKTCSNCGFTITS |
| | | ADYDRVLEKLKKTATGWMTTINGKELKVEGQITYYNRYKRQNVVKDLSVELDRLSEESVNNDI |
| | | SSWTKGRSGEALSLLKKRFSHRPVQEKFVCLNCGFETHADEQAALNIARSWLFLRSQEYKKYQ |
| | | TNKTTGNTDKRAFVETWQSFYRKKLKEVWKPAV |
| 355 | 676 | QEIKRINKIRRRLVKDSNTKKAGKTRGPMKTLLVRVMTPDLRERLENLRKKPENIPQPISNTS |
| | | RANLNKLLTDYTEMKKAILHVYWEEFQKDPVGLMSRVAQPASKKIDQNKLKPEMDEKGNLTTA |
| | | GFACSQCGQPLFVYKLEQVSEKGKAYTNYFGRCNVAEHEKLIKLAQLKPEKDSDEAVTYSLGK |
| | | FGQRALDFYSIHVTKESTHPVKPLAQIAGNRYASSPVGKALSDACMGTIASFLSKYQDIIIEH |
| | | QKVVKGNQKRLESLRELAGKENLEYPSVTLPPQPHTKEGVDAYNEVIARVRMWVNLNLWQKLK |
| | | LSRDDAKPLLRLKGFPSFPLVERQANEVDWWDMVCNVKKLINEKKEDGKVFWQNLAGYKRQEA |
| | | LRPYLSSEEDRKKGKKFARYQLGDLLLHLEKKHGEDWGKVYDEAWERIDKKVEGLSKHIKLEE |
| | | ERRSEDAQSKAALTDWLRAKASFVIEGLKEADKDEFCRCELKLQKWYGDLRGKPFAIEAENSI |
| | | LDISGFSKQYNCAFIWQKDGVKKLNLYLIINYFKGGKLRFKKIKPEAFEANRFYTVINKKSGE |
| | | IVPMEVNENFDDPNLIILPLAFGKRQGREFIWNDLLSLETGSLKLANGRVIEKTLYNRRTRQD |
| | | EPALFVALTFERREVLDSSNIKPMNLIGVDRGENIPAVIALTDPEGCPLSRFKDSLGNPTHIL |
| | | RIGESYKEKQRTIQAKKEVEQRRAGGYSRKYASKAKNLADDMVRNTARDLLYYAVTQDAMLIF |
| | | ENLSRGFGRQGKRTFMAERQYTRMEDWLTAKLAYEGLPSKTYLSKTLAQYTSKTCSNCGFTIT |
| | | SADYDRVLEKLKKTATGWMTTINGKELKVEGQITYYNRYKRQNVVKDLSVELDRLSEESVNND |
| | | ISSWTKGRSGEALSLLKKRFSHRPVQEKFVCLNCGFETHADEQAALNIARSWLFLRSQEYKKY |
| | | QTNKTTGNTDKRAFVETWQSFYRKKLKEVWKPAV |
| 484 | 812 | QEIKRINKIRRRLVKDSNTKKAGKTGPMKTLLVRVMTPDLRERLENLRKKPENIPQPISNTSR |
| | | ANLNKLLTDYTEMKKAILHVYWEEFQKDPVGLMSRVAQPASKKIDQNKLKPEMDEKGNLTTAG |
| | | FACSQCGQPLFVYKLEQVSEKGKAYTNYFGRCNVAEHEKLILLAQLKPEKDSDEAVTYSLGKF |
| | | GQRALDFYSIHVTKESTHPVKPLAQIAGNRYASGPVGKALSDACMGTIASFLSKYQDIIIEHQ |
| | | KVVKGNQKRLESLRELAGKENLEYPSVTLPPQPHTKEGVDAYNEVIARVRMWVNLNLWQKLKL |
| | | SRDDAKPLLRLKKFPSFPLVERQANEVDWWDMVCNVKKLINEKKEDGKVFWQNLAGYKRQEAL |
| | | RPYLSSEEDRKKGKKFARYQLGDLLLHLEKKHGEDWGKVYDEAWERIDKKVEGLSKHIKLEEE |
| | | RRSEDAQSKAALTDWLRAKASFVIEGLKEADKDEFCRCELKLQKWYGDLRGKPFAIEAENSIL |
| | | DISGFSKQYNCAFIWQKDGVKKLNLYLIINYFKGGKLRFKKIKPEAFEANRFYTVINKKSGEI |
| | | VPMEVNENFDDPNLIILPLAFGKRQGREFIWNDLLSLETGSLKLANGRVIEKTLYNRRTRQDE |
| | | PALFVALTFERREVLDSSNIKPMNLIGVDRGENIPAVIALTDPEGCPLSRFKDSLGNPTHILR |
| | | IGESYKEKQRTIQAKKEVEQRRAGGYSRKYASKAKNLADDMVRNTARDLLYYAVTQDAMLIFE |
| | | NLSRGFGRQGKRTEMAERQYTRMEDWLTAKLAYEGLPSKTYLSKTLAQYTSKTCSNCGFTITS |
| | | ADYDRVLEKLKKTATGWMTTINGKELKVEGQITYYNRYKRQNVVKDLSVELDRLSEESVNNDI |
| | | SSWTKGRSGEALSLLKKRFSHRPVQEKFVCLNCGFETHADEQAALNIARSWLFLRSQEYKKYQ |
| | | TNKTTGNTDKRAFVETWQSFYRKKLKEVWKPAV |

[0260] Further CasX variants contemplated for use in the vectors of the disclosure are described in International Publication Nos. WO2020247882 and WO2022120095, which are hereby incorporated by reference in their entirety.

e. CasX Variants Derived from Other CasX Variants

[0261] In further iterations of the generation of variant proteins, a variant protein can be utilized to generate additional CasX variants of the disclosure. For example, CasX 119 (SEQ ID NO: 124), CasX 491 (SEQ ID NO: 190), and CasX 515 (SEQ ID NO: 197) are exemplary variant proteins that are modified to generate additional CasX variants of the disclosure having improvements or additional properties relative to a reference CasX or CasX variants from which they were derived. CasX 119 contains a substitution of L379R, a substitution of A708K and a deletion of P at position 793 of SEQ ID NO: 2. CasX 491 contains an NTSB and Helical 1B domain swap from SEQ ID NO: 1. CasX 515 was derived from CasX 491 by insertion of P at position 793 (relative to SEQ ID NO: 2) and was used to create additional CasX variants. For example, CasX 668 has an insertion of R at position 26 and a substitution of G223S relative to CasX 515. CasX 672 has substitutions of L169K and G223S relative to CasX 515. CasX 676 has substitutions of L169K and G223S and an insertion of R at position 26 relative to CasX 515. For purposes of the disclosure, the sequences of the domains of CasX 515 are provided in Table 6 and include an OBD-I domain having the sequence of SEQ ID NO: 585, an OBD-II domain having the sequence of SEQ ID NO: 590, NTSB domain having the sequence of SEQ ID NO: 587, a helical I-I domain having the sequence of SEQ ID NO: 586, a helical I-II domain having the sequence of SEQ ID NO: 588, a helical II domain having the sequence of SEQ ID NO: 589, a RuvC-I domain having the sequence of SEQ ID NO: 591, a RuvC-II domain having the sequence of SEQ ID NO: 593, and a TSL domain having the sequence of SEQ ID NO: 592.

[0262] Mutations can be introduced in any one or combinations of domains of the CasX variant to result in a CasX variant. These alterations can be amino acid insertions, deletions, substitutions, or any combinations thereof. Any amino acid can be substituted for any other amino acid in the substitutions described herein. The substitution can be a conservative substitution (e.g., a basic amino acid is substituted for another basic amino acid). The substitution can be a non-conservative substitution (e.g., a basic amino acid is substituted for an acidic amino acid or vice versa). For example, a proline in a CasX protein can be substituted for any of arginine, histidine, lysine, aspartic acid, glutamic acid, serine, threonine, asparagine, glutamine, cysteine, glycine, alanine, isoleucine, leucine, methionine, phenylalanine, tryptophan, tyrosine or valine to generate a CasX variant protein of the disclosure.

[0263] In some embodiments, a CasX variant comprises two mutations relative to the CasX protein from which it was derived. In some embodiments, a CasX variant comprises three mutations relative to the CasX protein from which it was derived. In some embodiments, a CasX variant comprises 2, 3, 4, 5, 6, 7, 8, 9, 10 or more mutations relative to the CasX protein from which it was derived. In some embodiments, the 2, 3, 4, 5, 6, 7, 8, 9, 10 or more mutations are made in locations of the CasX protein sequence separated from one another. In other embodiments, the 2, 3, 4, 5, 6, 7, 8, 9, 10 or more mutations can be made in adjacent amino acids in the CasX protein sequence. In some embodiments, a CasX variant comprises two or more mutations relative to two or more different CasX proteins from which they were derived. The methods utilized for the design and creation of the CasX variant are described below, including the methods of the Examples.

[0264] Suitable mutagenesis methods for generating CasX variant proteins of the disclosure may include, for example, random mutagenesis, site-directed mutagenesis, Markov Chain Monte Carlo (MCMC)-directed evolution, staggered extension PCR, gene shuffling, rational design, or domain swapping (described in PCT/US2021/061673 and WO2020247882A1, incorporated by reference herein). In some embodiments, the CasX variant are designed, for example by selecting multiple desired mutations in a CasX variant identified, for example, using the approaches described in the Examples. In certain embodiments, the activity of the CasX variant protein prior to mutagenesis is used as a benchmark against which the activity of one or more resulting CasX variant are compared, thereby measuring improvements in function of the CasX variant.

k. CasX Variants Derived from CasX 515 (SEQ ID NO: 197)

[0265] The present disclosure provides highly-modified CasX variant proteins having multiple mutations relative to CasX 515. The mutations can be in one or more domains of the parental CasX 515 from which it was derived. The CasX domains and their positions, relative to CasX 515 (SEQ ID NO: 197) are presented in Table 5.

TABLE 6
CasX 515 domain sequences

| Domain | SEQ ID NO | Amino Acid Sequence |
|---|---|---|
| OBD-I | 585 | QEIKRINKIRRRLVKDSNTKKAGKTGPMKTLLVRVMTPDLRERLENLRK |
| | | KPENIPQ |
| Helical I-I | 586 | PISNTSRANLNKLLTDYTEMKKAILHVYWEEFQKDPVGLMSRVA |
| NTSB | 587 | QPASKKIDQNKLKPEMDEKGNLTTAGFACSQCGQPLFVYKLEQVSEKGK |
| | | AYTNY FGRCNVAEHEKLILLAQLKPEKDSDEAVTYSLGKFGQ |
| Helical I-II | 588 | RALDFYSIHVTKESTHPVKPLAQIAGNRYASGPVGKALSDACMGTIASF |
| | | LSKYQDIIIEHQKVVKGNQKRLESLRELAGKENLEYPSVTLPPQPHTKE |
| | | GVDAYNEVIARVRMWVNLNLWQKLKLSRDDAKPLLRLKGFPSF |
| Helical II | 589 | PLVERQANEVDWWDMVCNVKKLINEKKEDGKVFWQNLAGYKRQEALRPY |
| | | LSSEEDRKKGKKFARYQLGDLLLHLEKKHGEDWGKVYDEAWERIDKKVE |
| | | GLSKHIKLEEERRSEDAQSKAALTDWLRAKASFVIEGLKEADKDEFCRC |
| | | ELKLQKWYGDLRGKPFAIEAE |
| OBD-II | 590 | NSILDISGFSKQYNCAFIWQKDGVKKLNLYLIINYFKGGKLRFKKIKPE |
| | | AFEANRFYTVINKKSGEIVPMEVNENEDDPNLIILPLAFGKROGREFIW |
| | | NDLLSLETGSLKLANGRVIEKTLYNRRTRQDEPALEVALTFERREVLD |
| RuvC-I | 591 | SSNIKPMNLIGVDRGENIPAVIALTDPEGCPLSREKDSLGNPTHILRIG |
| | | ESYKEKQRTIQAKKEVEQRRAGGYSRKYASKAKNLADDMVRNTARDLLY |
| | | YAVTQDAMLIFENLSRGFGRQGKRTEMAERQYTRMEDWLTAKLAYEGLP |
| | | SKTYLSKTLAQYTSKTC |
| TSL | 592 | SNCGFTITSADYDRVLEKLKKTATGWMTTINGKELKVEGQITYYNRYKR |
| | | QNVVKDLSVELDRLSEESVNNDISSWTKGRSGEALSLLKKRFSHRPVQE |
| | | KFVCLNCGFETH |
| RuvC-II | 593 | ADEQAALNIARSWLFLRSQEYKKYQTNKTTGNTDKRAFVETWQSFYRKK |
| | | LKEVWKPAV |

[0266] In some embodiments of the CasX variant described herein, the approach to design the CasX variant utilizes a directed evolution method adapted from a Markov Chain Monte Carlo (MCMC)-directed evolution simulation (Biswas N., et al. Coupled Markov Chain Monte Carlo for high-dimensional regression with Half-t priors. arViV: 2012.04798v2 (2021)), as described in the Examples.

[0267] In further iterations of the generation of the CasX variant proteins, CasX 515 protein can be mutagenized to generate sequences resulting in amino acid substitutions, deletions, or insertions at one or more positions in one or more domains of the parental CasX 515 protein that are screened to identity CasX variants having improved or enhanced characteristics. Exemplary methods used to generate and evaluate CasX variants derived from the CasX 515 protein are described in the Examples. In some embodiments, the resulting mutagenized sequences are screened to identify those having enhanced nuclease activity. In other embodiments, the mutagenized sequences are screened to identify those having enhanced editing specificity and reduced off-target editing. In other embodiments, the mutagenized sequences are screened to identify those having enhanced PAM utilization; i.e., the ability to utilize non-canonical PAM sequences. In still other embodiments, the mutagenized sequences are screened to identify those having improved properties of any two or three of the foregoing categories; i.e., increased nuclease activity, increased specificity (reduced off-target editing), and enhanced PAM utilization. In other embodiments, libraries of sequence variants having one, two, three or more mutations at select positions relative to a parental CasX protein can be generated and screened in assays such as an E. coli CcdB toxin assay or a multiplexed pooled approach using a PASS assay to identify those CasX variants that had improved nuclease activity, improved specificity, and/or increased PAM utilization compared to the cleavage of the E. coli nucleic acid compared to the parental CasX 515 protein, as described in the Examples. In addition, the CasX variant can be screened for increased percentage of a eukaryotic genome that can be efficiently edited, improved ability to form cleavage-competent RNP with an gRNA, and improved stability of an RNP complex. In some embodiments, the improved characteristic compared to the parental CasX 515 is at least about 0.1-fold improved, at least about 0.5-fold improved, at least about 1-fold improved, at least about 1-fold improved, at least about 1-fold improved, at least about 1.5-fold improved, at least about 2-fold improved, at least about 3-fold improved, at least about 4-fold improved, at least about 5-fold improved, at least about 6-fold improved, at least about 7-fold improved, at least about 8-fold improved, at least about 9-fold improved, at least about 10-fold improved, or any integer in between the foregoing. In some embodiments, the characteristics are assayed in an in vitro assay.

[0268] In some embodiments, the disclosure provides CasX variants derived from CasX 515 (SEQ ID NO: 197) comprising two or more modifications; an insertion, a deletion, or a substitution of amino acid(s) in one or more domains (see Table 6 for CasX 515 domain sequences). In some embodiments, the disclosure provides CasX variant proteins comprising a pair of mutations relative to CasX 515 (SEQ ID NO: 9590) as depicted in Table 71, or further variations thereof. In some embodiments, a CasX variant comprising two or more modifications comprises a sequence selected from the group consisting of SEQ ID NOS: 9382-9542, and 9607-9609, or a sequence having at least about 70%, at least about 80%, at least about 90%, or at least about 95%, or at least about 95%, or at least about 96%, or at least about 97%, or at least about 98%, or at least about 99% sequence identity thereto. In a particular approach, as detailed in Example 38, single mutations of CasX 515 (SEQ ID NO: 9590) that demonstrated enhanced activity and/or specificity, were selected based on locations deemed to be potentially complementary, and combined (i.e., having two or three mutations) to make CasX variants that were then screened for activity and specificity in in vitro assays. The positions of the mutations within domains of CasX are described in detail in Table 72 in the Examples, below.

[0269] In some embodiments, the CasX variant derived from CasX 515 for use in the rAAV comprises a pair of mutations selected from the group consisting of 4.I.G & 64.R.Q, 4.I.G & 169.L.K, 4.I.G & 169.L.Q, 4.I.G & 171.A.D, 4.I.G & 171.A.Y, 41G & 171.A.S, 41G & 224.G.T, 4.I.G & 304.M.T, 4.1G & 398.Y.T, 4.I.G & 826.V.M, 4.I.G & 887.T.D, 4.I.G & 891.S.Q, 5.-.G & 64.R.Q, 5.-.G & 169.L.K, 5.-.G & 169.L.Q, 5.-.G & 171.A.D, 5.-.G & 171.A.Y, 5.-.G & 171.A.S, 5.-.G & 224.G.T, 5.-.G & 304.M.T, 5.-.G & 398.Y.T, 5.-.G & 826.V.M, 5.-.G & 887.T.D, 5.-.G & 891.S.Q, 9.K.G & 64.R.Q, 9.K.G & 169.L.K, 9.K.G & 169.L.Q, 9.K.G & 171.A.D, 9.K.G & 171AY, 9.K.G & 171.A.S, 9.K.G & 224.G.T, 9.K.G & 304.M.T, 9.K.G & 398.Y.T, 9.K.G & 826.V.M, 9.K.G & 887.T.D, 9.K.G & 891.S.Q, 27.-.R & 64.R.Q, 27.-.R & 169.L.K, 27.-.R & 169.L.Q, 27.-.R & 171.A.D, 27.-.R & 171AY, 27.-.R & 171.A.S, 27.-.R & 224.G.T, 27.-.R & 304.M. T, 27.-.R & 398.Y. T, 27.-.R & 826.V.M, 27.-.R & 887.T.D, 27.-.R & 891.S.Q, 35.R.P & 64.R.Q, 35.R.P & 169.L.K, 35.R.P & 169.L.Q, 35.R.P & 171.AD,35RP&71 AY, 35.R.P & 171.A.S, 35.R.P & 224.G.T, 35.R.P & 304.M.T, 35.R.P & 398.Y.T, 35.R.P & 826.V.M, 35.R.P & 887.T.D, 35.R.P & 891.S.Q, 887.T.D & 891.S.Q, 64.R.Q & 169.L.K, 64.R.Q & 169.L.Q, 64.R.Q & 171.A.D, 64.R.Q & 171.AY, 64.R.Q & 171.A.S, 64.R.Q & 224.G.T, 64.R.Q & 304.M.T, 64.R.Q & 398.Y.T, 64.R.Q & 826.V.M, 64.R.Q & 887.T.D, 64.R.Q & 891.S.Q, 169.L.K & 171.A.D, 169.L.K & 171AY, 169.L.K & 171.A.S, 169.L.K & 224.G.T, 169.L.K & 304.M.T, 169.L.K & 398.Y.T, 169.L.K & 826.V.M, 169.L.K & 887.T.D, 169.L.K & 891.S.Q, 169.L.Q & 171.A.D, 169.L.Q & 171.A.Y, 169.L.Q & 171.A.S, 169.L.Q & 224.G.T, 169.L.Q & 304.M.T, 169.L.Q & 398.Y.T, 169.L.Q & 826.V.M, 169.L.Q & 887.T.D, 169.L.Q & 891.S.Q, 171.A.D & 224.G.T, 171.A.D & 304.M.T, 171.A.D & 398.Y.T, 171AD & 826.V.M, 171.A.D & 887.T.D, 171AD & 891.S.Q, 171.A.Y & 224.G.T, 171.A.Y & 304.M.T, 171.A.Y & 398.Y.T, 171.A.Y & 826.V.M, 171.A.Y & 887.T.D, 171.A.Y & 891.S.Q, 171.A.S & 224.G.T, 171.A.S & 304.M.T, 171.A.S & 398.Y.T, 171.A.S & 826.V.M, 171.A.S & 887.T.D, 171.A.S & 891.S.Q, 4.1.G& 35.R.P, 224.G.T & 304.M.T, 224.G.T & 398.Y.T, 224.G.T & 826.V.M, 224.G.T & 887.T.D, 224.G.T & 891.S.Q, 5.-.G & 35.R.P, 4.I.G & 27.-.R, 304.M.T & 398.Y.T, 304.M.T & 826.V.M, 304.M.T & 887.T.D, 304.M.T & 891.S.Q, 9.K.G & 35.R.P, 5.-.G & 27.-.R, 41G & 9.K.G, 398.Y.T & 826.V.M, 398.Y.T & 887.T.D, 398.Y.T & 891.S.Q, 27.-.R & 35.R.P, 9.K.G & 27.-.R, 5.-.G & 9.K.G, 41G & 5.-.G, 826.V.M & 887.T.D, 826.V.M & 891.S.Q, 5.K.G & 27.-.R, 5.K.G & 169.L.K, 5.K.G & 171.A.D, 5.K.G & 304.M.T, 5.K.G & 398.Y.T, 5.K.G & 891.S.Q, 6.-.G & 27.-.R, 6.-.G & 169.L.K, 6.-.G & 171.A.D, 6.-.G & 304.M.T, 6.-.G & 398.Y.T, 6.-.G & 891.S.Q, 304.M.W & 27.-.R, 304.M.W & 169.L.K, 304.M.W & 171.A.D, 304.M.W & 398.Y.T, 304.M.W & 891.S.Q, 481.E.D & 27.-.R, 481.E.D & 169.L.K, 481.E.D & 171.A.D, 481.E.D & 304.M.T, 481.E.D & 398.Y.T, 481.E.D & 891.S.Q, 698.S.R & 27.-.R, 698.S.R & 169.L.K, 698.S.R & 171.A.D, 698.S.R & 304.M.T, 698.S.R & 398.Y.T, and 698.S.R & 891.S.Q, as provided in Table 22, wherein the position of the mutations is relative to the CasX sequence of SEQ ID NO: 9590. In some embodiments, the CasX variant comprises one or more mutations from Table 22, wherein the one or more mutations result in an improved characteristic when expressed from an rAAV in a target cell compared to unmodified CasX 515 (SEQ ID NO: 197). In some embodiments, the improved characteristics is determined in an in vitro assay comprising a target nucleic acid, with the CasX complexed with a gRNA having a targeting sequence complementary to the target nucleic acid, compared to the unmodified parental CasX 515 under comparable conditions. In some embodiments, the improved characteristic is decreased off-target editing (or increased editing specificity), e.g., as shown in Table 76. In some embodiments, the improved characteristic is increased on-target editing, e.g., as shown in Table 75. In some embodiments, the improved characteristic is increased specificity ratio, e.g., as shown in Table 77.

[0270] In some embodiments, the CasX variant for use in an rAAV comprises three mutations in the sequence of CasX 515 (SEQ ID NO: 9590), wherein the three mutations are selected from the group consisting of 27.-.R, 169.L.K, and 329.G.K; 27.-.R, 171.A.D, and 224.G.T; and 35.R.P, 171.A.Y, and 304.M.T, wherein the mutations result in an improved characteristic compared to unmodified CasX 515.

[0271] In some embodiments, a CasX variant for use in an rAAV is selected from the group consisting of SEQ ID NOS: 9385, 9391, 9393, 9401, 9409, 9417, 9419, 9423, 9429, 9443, 9444, 9447, 9449, 9450, 9452, 9453, 9455, 9456, 9458, 9462, 9466, 9469, 9470, 9472, 9478, 9483, 9485, 9491, 9495, 9499, 9501, 9512, 9513, 9517, 9519, 9521, 9536, 9542, 9607, and 9609, wherein the CasX variant exhibits improved editing activity of a target nucleic acid compared to the unmodified parental CasX 515. In some embodiments, the improved characteristics is determined in an in vitro assay, complexed with a gRNA having a targeting sequence complementary to the target nucleic acid, compared to the unmodified parental CasX 515 and assayed under comparable conditions.

[0272] In some embodiments, a CasX variant for use in an rAAV is selected from the group consisting of SEQ ID NOS: 9385, 9386, 9388, 9390, 9409, 9412, 9417, 9432, 9433, 9434, 9436, 9437, 9438, 9440, 9441, 9443, 9444, 9446, 9447, 9448, 9450, 9452, 9455, 9459, 9464, 9466, 9468, 9469, 9470, 9472, 9474, 9478, 9479, 9480, 9481, 9486, 9487, 9488, 9492, 9493, 9496, 9509, 9512, 9516, 9517, 9519, 9521, 9522, 9529, 9536, 9542, 9608, and 9609, wherein the CasX variant exhibits improved editing specificity of a target nucleic acid compared to the unmodified parental CasX 515, In some embodiments, the improved characteristics is determined in an in vitro assay, complexed with a gRNA having a targeting sequence complementary to the target nucleic acid, compared to the unmodified parental CasX 515 and assayed under comparable conditions.

[0273] In some embodiments, a CasX variant for use in an rAAV is selected from the group consisting of SEQ ID NOS: 9385, 9409, 9417, 9443, 9444, 9447, 9450, 9452, 9455, 9466, 9469, 9470, 9472, 9478, 9512, 9513, 9517, 9519, 9521, 9536, 9542, and 9609, wherein the CasX variant exhibits improved editing activity and specificity of a target nucleic acid compared to the unmodified parental CasX 515. In some embodiments, the improved characteristics is determined in an in vitro assay, complexed with a gRNA having a targeting sequence complementary to the target nucleic acid, compared to the unmodified parental CasX 515 and assayed under comparable conditions.

[0274] In some embodiments, a CasX variant for use in an rAAV is selected from the group consisting of SEQ ID NOS: 9385, 9386, 9388, 9390, 9393, 9409, 9412, 9417, 9432, 9433, 9434, 9436, 9437, 9438, 9440, 9441, 9443, 9444, 9446, 9447, 9448, 9450, 9452, 9455, 9459, 9464, 9466, 9468, 9469, 9470, 9472, 9474, 9478, 9479, 9480, 9481, 9483, 9486, 9488, 9491, 9492, 9493, 9495, 9496, 9509, 9512, 9513, 9516, 9517, 9519, 9521, 9522, 9529, 9536, 9542, 9608, and 9609, wherein the CasX variant exhibits improved specificity ratio compared to the unmodified parental CasX 515. In some embodiments, the improved characteristics is determined in an in vitro assay, complexed with a gRNA having a targeting sequence complementary to the target nucleic acid, compared to the unmodified parental CasX 515 and assayed under comparable conditions.

[0275] In some embodiments, a CasX variant for use in an rAAV is selected from the group consisting of SEQ ID NOS: 9385, 9393, 9409, 9417, 9443, 9444, 9447, 9450, 9452, 9455, 9466, 9469, 9470, 9472, 9478, 9483, 9491, 9495, 9512, 9513, 9517, 9519, 9521, 9536, 9542, and 9609, wherein the CasX variant exhibits improved editing activity and improved specificity ratio compared to the unmodified parental CasX 515. In some embodiments, the improved characteristics is determined in an in vitro assay, complexed with a gRNA having a targeting sequence complementary to the target nucleic acid, compared to the unmodified parental CasX 515 and assayed under comparable conditions.

[0276] In some embodiments, the foregoing characteristics of the CasX variants are improved be at least about 0.1-fold, at least about 0.5-fold, at least about 1-fold, at least about 2-fold, at least about 4-fold, at least about 5-fold, at least about 6-fold, at least about 7-fold, at least about 8-fold, at least about 9-fold, or at least about 10-fold improved compared to the unmodified parental CasX 515.

l. CasX Fusion Proteins

[0277] Also contemplated within the scope of the disclosure are CasX variant proteins comprising a heterologous protein fused to the CasX. This includes CasX variants comprising N-terminal or C-terminal fusions of the CasX to a heterologous protein or domain thereof. In some embodiments, the CasX variant protein is fused to one or more proteins or domains thereof that has a different activity of interest, resulting in a fusion protein. For example, in some embodiments, the CasX variant protein is fused to a protein (or domain thereof) that inhibits transcription, modifies a target nucleic acid, or modifies a polypeptide associated with a nucleic acid (e.g., histone modification).

[0278] A variety of heterologous polypeptides are suitable for inclusion in a CasX variant fusion protein of the disclosure. In some cases, the fusion partner can modulate transcription (e.g., inhibit transcription, increase transcription) of a target DNA. For example, in some cases the fusion partner is a protein (or a domain from a protein) that inhibits transcription (e.g., a transcriptional repressor, a protein that functions via recruitment of transcription inhibitor proteins, modification of target DNA such as methylation, recruitment of a DNA modifier, modulation of histones associated with target DNA, recruitment of a histone modifier such as those that modify acetylation and/or methylation of histones, and the like). In some cases the fusion partner is a protein (or a domain from a protein) that increases transcription (e.g., a transcription activator, a protein that acts via recruitment of transcription activator proteins, modification of target DNA such as demethylation, recruitment of a DNA modifier, modulation of histones associated with target DNA, recruitment of a histone modifier such as those that modify acetylation and/or methylation of histones, and the like).

[0279] In some cases, a fusion partner has enzymatic activity that modifies a target nucleic acid sequence; e.g., nuclease activity, methyltransferase activity, demethylase activity, DNA repair activity, DNA damage activity, deamination activity, dismutase activity, alkylation activity, depurination activity, oxidation activity, pyrimidine dimer forming activity, integrase activity, transposase activity, recombinase activity, polymerase activity, ligase activity, helicase activity, photolyase activity or glycosylase activity. In some cases, the fusion partner to a CasX variant has enzymatic activity that modifies the target nucleic acid (e.g., ssRNA, dsRNA, ssDNA, dsDNA). Examples of enzymatic activity that can be provided by the fusion partner include but are not limited to: nuclease activity such as that provided by a restriction enzyme (e.g., FokI nuclease), methyltransferase activity such as that provided by a methyltransferase (e.g., Hhal DNA m5c-methyltransferase (M.Hhal), DNA methyltransferase 1 (DNMT1), DNA methyltransferase 3 alpha (DNMT3A) and subdomains such as DNMT3A catalytic domain and ATRX-DNMT3-DNMT3L domain (ADD), DNMT3L interaction domain (DNMT3L), DNA methyltransferase 3 beta (DNMT3B), METI, ZMET2, CMT1, CMT2 (plants), and the like); demethylase activity such as that provided by a demethylase (e.g., Ten-Eleven Translocation (TET) dioxygenase 1 (TET 1 CD), TET1, DME, DML1, DML2, ROS1, and the like), DNA repair activity, DNA damage activity, deamination activity such as that provided by a deaminase (e.g., a cytosine deaminase enzyme, e.g., an APOBEC protein such as rat apolipoprotein B mRNA editing enzyme, catalytic polypeptide 1 {APOBEC1}), dismutase activity, alkylation activity, depurination activity, oxidation activity, pyrimidine dimer forming activity, integrase activity such as that provided by an integrase and/or resolvase (e.g., Gin invertase such as the hyperactive mutant of the Gin invertase, GinH106Y; human immunodeficiency virus type 1 integrase (IN); Tn3 resolvase; and the like), transposase activity, recombinase activity such as that provided by a recombinase (e.g., catalytic domain of Gin recombinase), polymerase activity, ligase activity, helicase activity, photolyase activity, and glycosylase activity).

[0280] In some cases, a heterologous polypeptide (a fusion partner) for use with a CasX variant provides for subcellular localization, i.e., the heterologous polypeptide contains a subcellular localization sequence (e.g., a nuclear localization signal (NLS) for targeting to the nucleus, a sequence to keep the fusion protein out of the nucleus, e.g., a nuclear export sequence (NES), a sequence to keep the fusion protein retained in the cytoplasm, a mitochondrial localization signal for targeting to the mitochondria, a chloroplast localization signal for targeting to a chloroplast, an ER retention signal, and the like). In some embodiments, a subject RNA-guided polypeptide or a conditionally active RNA-guided polypeptide and/or subject CasX fusion protein does not include a NLS so that the protein is not targeted to the nucleus (which can be advantageous, e.g., when the target nucleic acid sequence is an RNA that is present in the cytosol). In some embodiments, a fusion partner can provide a tag (i.e., the heterologous polypeptide is a detectable label) for ease of tracking and/or purification (e.g., a fluorescent protein, e.g., green fluorescent protein (GFP), yellow fluorescent protein (YFP), red fluorescent protein (RFP), cyan fluorescent protein (CFP), mCherry, tdTomato, and the like; a histidine tag, e.g., a 6×His tag; a hemagglutinin (HA) tag; a FLAG tag; a Myc tag; and the like).

[0281] In some cases, a CasX variant protein for use in the rAAV includes (is fused to) a nuclear localization signal (NLS) for targeting the CasX/gRNA to the nucleus of the cell. In some cases, a CasX variant protein is fused to 2 or more, 3 or more, 4 or more, or 5 or more 6 or more, 7 or more, 8 or more NLSs. In some embodiments, an NLS for incorporation into an rAAV of the disclosure comprises a sequence selected from the group consisting of SEQ ID NOS: 3411-3486, 3939-3971, 4065-4111. Non-limiting examples of NLSs suitable for use with a CasX variant include sequences having at least about 80%, at least about 90%, or at least about 95% identity or are identical to sequences derived from: the NLS of the SV40 virus large T-antigen, having the amino acid sequence PKKKRKV (SEQ ID NO: 3411); the NLS from nucleoplasmin (e.g., the nucleoplasmin bipartite NLS with the sequence KRPAATKKAGQAKKKK (SEQ ID NO: 3418); the c-myc NLS having the amino acid sequence PAAKRVKLD (SEQ ID NO: 3420) or RQRRNELKRSP (SEQ ID NO: 4065); the hRNPAI M9 NLS having the sequence NQSSNFGPMKGGNFGGRSSGPYGGGGQYFAKPRNQGGY (SEQ ID NO: 4066); the sequence RMRIZFKNKGKDTAELRRRRVEVSVELRKAKKDEQILKRRNV (SEQ ID NO: 4067) of the IBB domain from importin-alpha; the sequences VSRKRPRP (SEQ ID NO: 4068) and PPKKARED (SEQ ID NO: 4069) of the myoma T protein; the sequence PQPKKKPL (SEQ ID NO: 4070) of human p53; the sequence SALIKKKKKMAP (SEQ ID NO: 4071) of mouse c-abl IV; the sequences DRLRR (SEQ ID NO: 4072) and PKQKKRK (SEQ ID NO: 4073) of the influenza virus NS1; the sequence RKLKKKIKKL (SEQ ID NO: 4074) of the Hepatitis virus delta antigen; the sequence REKKKFLKRR (SEQ ID NO: 4075) of the mouse Mxl protein; the sequence KRKGDEVDGVDEVAKKKSKK (SEQ ID NO: 4076) of the human poly(ADP-ribose) polymerase; the sequence RKCLQAGMNLEARKTKK (SEQ ID NO: 4077) of the steroid hormone receptors (human) glucocorticoid; the sequence PRPRKIPR (SEQ ID NO: 4078) of Borna disease virus P protein (BDV-P1); the sequence PPRKKRTVV (SEQ ID NO: 4079) of hepatitis C virus nonstructural protein (HCV-NS5A); the sequence NLSKKKKRKREK (SEQ ID NO: 4080) of LEF1; the sequence RRPSRPFRKP (SEQ ID NO: 4081) of ORF57 simirae; the sequence KRPRSPSS (SEQ ID NO: 4082) of EBV LANA; the sequence KRGINDRNFWRGENERKTR (SEQ ID NO: 4083) of Influenza A protein; the sequence PRPPKMARYDN (SEQ ID NO: 4084) of human RNA helicase A (RHA); the sequence KRSFSKAF (SEQ ID NO: 4085) of nucleolar RNA helicase II; the sequence KLKIKRPVK (SEQ ID NO: 4086) of TUS-protein; the sequence PKKKRKVPPPPAAKRVKLD (SEQ ID NO: 4087) associated with importin-alpha; the sequence PKTRRRPRRSQRKRPPT (SEQ ID NO: 4088) from the Rex protein in HTLV-1; the sequence MSRRRKANPTKLSENAKKLAKEVEN (SEQ ID NO: 4089) from the EGL-13 protein of Caenorhabditis elegans; and the sequences KTRRRPRRSQRKRPPT (SEQ ID NO: 4090), RRKKRRPRRKKRR (SEQ ID NO: 4091), PKKKSRKPKKKSRK (SEQ ID NO: 4092), HKKKHPDASVNFSEFSK (SEQ ID NO: 4093), QRPGPYDRPQRPGPYDRP (SEQ ID NO: 4094), LSPSLSPLLSPSLSPL (SEQ ID NO: 4095), RGKGGKGLGKGGAKRHRK (SEQ ID NO: 14096), PKRGRGRPKRGRGR (SEQ ID NO: 4097), PKKKRKVPPPPAAKRVKLD (SEQ ID NO: 4098) and PKKKRKVPPPPKKKRKV (SEQ ID NO: 4099), PAKRARRGYKC (SEQ ID NO: 3425), KLGPRKATGRW (SEQ ID NO: 4100), PRRKREE (SEQ ID NO: 4101), PYRGRKE (SEQ ID NO: 4102), PLRKRPRR (SEQ ID NO: 4103), PLRKRPRRGSPLRKRPRR (SEQ ID NO: 4104), PAAKRVKLDGGKRTADGSEFESPKKKRKV (SEQ ID NO: 4105), PAAKRVKLDGGKRTADGSEFESPKKKRKVGIHGVPAA (SEQ ID NO: 4106), PAAKRVKLDGGKRTADGSEFESPKKKRKVAEAAAKEAAAKEAAAKA (SEQ ID NO: 4107), PAAKRVKLDGGKRTADGSEFESPKKKRKVPG (SEQ ID NO: 4108), KRKGSPERGERKRHW (SEQ ID NO: 4109), KRTADSQHSTPPKTKRKVEFEPKKKRKV (SEQ ID NO: 4110), and PKKKRKVGGSKRTADSQHSTPPKTKRKVEFEPKKKRKV (SEQ ID NO: 4111). Additional NLS for incorporation in the rAAV of the disclosure are provided in Tables 20 and 21, indicating NLS for linking to the N- or C-terminus of the CasX. In some embodiments, the one or more NLS are linked to the CasX or to an adjacent NLS by a linker peptide wherein the linker peptide is selected from the group consisting of RS, (G)n (SEQ ID NO: 26), (GS)n (SEQ ID NO: 27), (GSGGS)n (SEQ ID NO: 20), (GGSGGS)n (SEQ ID NO: 21), (GGGS)n (SEQ ID NO: 22), GGSG (SEQ ID NO: 23), GGSGG (SEQ ID NO: 24), GSGSG (SEQ ID NO: 25), GSGGG (SEQ ID NO: 28), GGGSG (SEQ ID NO: 45), GSSSG (SEQ ID NO: 46), GPGP (SEQ ID NO: 29), GGP, PPP, PPAPPA (SEQ ID NO: 30), PPPG (SEQ ID NO: 47), PPPGPPP (SEQ ID NO: 31), PPP(GGGS)n (SEQ ID NO: 44), (GGGS)nPPP (SEQ ID NO: 32), AEAAAKEAAAKEAAAKA (SEQ ID NO: 4112), and TPPKTKRKVEFE (SEQ ID NO: 4113), wherein n is 1 to 5. In some embodiments, the rAAV constructs of the disclosure comprise polynucleic acids encoding the NLS and linker peptides of any of the foregoing embodiments of the paragraph, as well as the NLS of Tables 20 and 21, and can be, in some cases, configured in relation to the other components of the transgene constructs as depicted in any one of FIG. 1, 25, 38-40, 47, or 75.

[0282] In general, NLS (or multiple NLSs) are of sufficient strength to drive accumulation of a CasX variant fusion protein in the nucleus of a eukaryotic cell. Detection of accumulation in the nucleus may be performed by any suitable technique. For example, a detectable marker may be fused to a CasX variant fusion protein such that location within a cell may be visualized. Cell nuclei may also be isolated from cells, the contents of which may then be analyzed by any suitable process for detecting protein, such as immunohistochemistry, Western blot, or enzyme activity assay. Accumulation in the nucleus may also be determined indirectly.

[0283] In some embodiments, a CasX variant fusion protein can include a CasX protein that is linked to an internally inserted heterologous amino acid or heterologous polypeptide (a heterologous amino acid sequence) via a linker polypeptide (e.g., one or more linker polypeptides). In some embodiments, a CasX variant fusion protein can be linked at the C-terminal and/or N-terminal end to a heterologous polypeptide (fusion partner) via a linker polypeptide (e.g., one or more linker polypeptides). The linker polypeptide may have any of a variety of amino acid sequences. Proteins can be joined by a spacer peptide, generally of a flexible nature, although other chemical linkages are not excluded. Suitable linkers include polypeptides of between 4 amino acids and 40 amino acids in length, or between 4 amino acids and 25 amino acids in length. These linkers are generally produced by using synthetic, linker-encoding oligonucleotides to couple the proteins. Peptide linkers with a degree of flexibility can be used. The linking peptides may have virtually any amino acid sequence, bearing in mind that the preferred linkers will have a sequence that results in a generally flexible peptide. The use of small amino acids, such as glycine and alanine, are of use in creating a flexible peptide. The creation of such sequences is routine to those of skill in the art. A variety of different linkers are commercially available and are considered suitable for use. Example linker polypeptides include glycine polymers (G)n, glycine-serine polymers, glycine-alanine polymers, alanine-serine polymers, glycine-proline polymers, proline polymers and proline-alanine polymers. Example linkers can comprise amino acid sequences including, but not limited to (G)n (SEQ ID NO: 26), (GS)n (SEQ ID NO: 27), (GSGGS)n (SEQ ID NO: 20), (GGSGGS)n (SEQ ID NO: 21), (GGGS)n (SEQ ID NO: 22), GGSG (SEQ ID NO: 23), GGSGG (SEQ ID NO: 24), GSGSG (SEQ ID NO: 25), GSGGG (SEQ ID NO: 28), GGGSG (SEQ ID NO: 45), GSSSG (SEQ ID NO: 46), GPGP (SEQ ID NO: 29), GGP, PPP, PPAPPA (SEQ ID NO: 30), PPPG (SEQ ID NO: 47), PPPGPPP (SEQ ID NO: 31), PPP(GGGS)n (SEQ ID NO: 44), (GGGS)nPPP (SEQ ID NO: 32), AEAAAKEAAAKEAAAKA (SEQ ID NO:4112), and TPPKTKRKVEFE (SEQ ID NO: 4113), where n is 1 to 5, where n is 1 to 5. The ordinarily skilled artisan will recognize that design of a peptide conjugated to any elements described above can include linkers that are all or partially flexible, such that the linker can include a flexible linker as well as one or more portions that confer less flexible structure.

V. rAAV and Methods for Modification of Target Nucleic Acids

[0284] The rAAV provided herein are useful for various applications, including as therapeutics, diagnostics, and for research. To effect the methods of the disclosure for gene editing, provided herein are programmable rAAV to modify the target nucleic acid in eukaryotic cells; either in vitro, ex vivo, or in vivo in a subject. Generally, any portion of a gene can be targeted using the programmable systems and methods provided herein. In some embodiments of the rAAV vector, the CRISPR nuclease is a Class 2, Type V nuclease. In some embodiments, the disclosure provides a Class 2, Type V nuclease selected from the group consisting of Cas12a (Cpf1), Cas12b (C2c1), Cas12c (C2c3), Cas12d (CasY), Cas12e (CasX), Cas12f, Cas12g, Cas12h, Cas12i, Cas12j, Cas12k, Cas14, and Cas(D. In some embodiments, the disclosure provides vectors encoding a CasX variant protein and one or more guide nucleic acid (gRNA) variants as gene editing pairs. The programmable nature of the CasX and gRNA components of the rAAV provided herein allows for the precise targeting to achieve the desired effect (nicking, cleaving, etc.) at one or more regions of predetermined interest in the target nucleic acid sequence. In some embodiments, the rAAV provided herein comprise sequences encoding a CasX variant protein and a first, and optionally a second gRNA wherein the targeting sequence of the gRNA is complementary to, and therefore is capable of hybridizing with, a target nucleic acid sequence. In some cases, the rAAV further comprises a donor template nucleic acid.

[0285] In some embodiments of the disclosure, provided herein are methods of modifying a target nucleic acid sequence. In some embodiments, the methods comprise contacting a cell comprising the target nucleic acid sequence with an rAAV encoding a CasX protein of the disclosure and a gRNA of the disclosure comprising a targeting sequence, wherein the targeting sequence of the gRNA has a sequence complementary to and that can hybridize with the sequence of the target nucleic acid. Upon hybridization with the target nucleic acid by the CasX and the gRNA, the CasX introduces one or more single-strand breaks or double-strand breaks within or near the target nucleic acid, which may include sequences that contain regulatory elements or non-coding regions of the gene, that results in a permanent indel (deletion or insertion) or mutation in the target nucleic acid, as described herein, with a corresponding modulation of expression or alteration in the function of the gene product, thereby creating an edited cell. In some embodiments of the method, the modification comprises introducing an in-frame mutation in the target nucleic acid. In some embodiments of the method, the modification comprises introducing a frame-shifting mutation in the target nucleic acid. In some embodiments of the method, the modification comprises introducing a premature stop codon in the coding sequence in the target nucleic acid. In some embodiments of the method, the modification results in expression of a non-functional protein in the modified cells of the population. In some embodiments of the method, the modification results in the correction of a mutation to wild-type or results in the ability of the cell to express a functional gene product.

[0286] In some embodiments of the method of modifying a target nucleic acid sequence, the method comprises contacting a cell with an rAAV comprising an encoded CasX protein wherein the CasX is an encoded CasX variant having a sequence of any one of SEQ ID NOS: 137-512, 9382-9542, and 9607-9609, or a sequence having at least about 80%, at least about 90%, or at least about 95%, or at least about 96%, or at least about 97%, or at least about 98%, or at least about 99% sequence identity thereto, and comprises a gRNA scaffold having a sequence of SEQ ID NOS: 2238-2400, 9257-9289 and 9588, or a sequence having at least about 80%, at least about 90%, or at least about 95%, or at least about 96%, or at least about 97%, or at least about 98%, or at least about 99% sequence identity thereto, and comprises a targeting sequence complementary to the target nucleic acid to be modified, wherein the expressed CasX and gRNA retain the ability to form an RNP complex and to bind and cleave the target nucleic acid. In some embodiments of the method of modifying a target nucleic acid sequence, the method comprises contacting a cell with an rAAV comprising an encoded CasX variant having a sequence selected from the group consisting of SEQ ID NOS: 190, 197, 278, 352, 355, 359, and 484, or a sequence having at least about 80%, at least about 90%, or at least about 95%, or at least about 96%, or at least about 97%, or at least about 98%, or at least about 99% sequence identity thereto, and comprises a gRNA scaffold having a sequence of SEQ ID NOS: 2292, or a sequence having at least about 80%, at least about 90%, or at least about 95%, or at least about 96%, or at least about 97%, or at least about 98%, or at least about 99% sequence identity thereto, and comprises a targeting sequence complementary to the target nucleic acid to be modified, wherein the expressed CasX and gRNA retain the ability to form an RNP complex and to bind and cleave the target nucleic acid. In some embodiments of the method of modifying a target nucleic acid sequence, the method comprises contacting a cell with an rAAV comprising an encoded CasX variant having a sequence selected from the group consisting of SEQ ID NOS: 190, 197, 278, 352, 355, 359, and 484, or a sequence having at least about 80%, at least about 90%, or at least about 95%, or at least about 96%, or at least about 97%, or at least about 98%, or at least about 99% sequence identity thereto, and comprises a gRNA scaffold having a sequence of SEQ ID NOS: 9588, or a sequence having at least about 80%, at least about 90%, or at least about 95%, or at least about 96%, or at least about 97%, or at least about 98%, or at least about 99% sequence identity thereto, and comprises a targeting sequence complementary to the target nucleic acid to be modified, wherein the expressed CasX and gRNA retain the ability to form an RNP complex and to bind and cleave the target nucleic acid.

[0287] In other embodiments, the method comprises contacting a cell comprising the target nucleic acid sequence with an rAAV encoding a first and a second of gRNA targeted to different or overlapping portions of the target nucleic acid wherein the CasX protein introduces multiple breaks in the target nucleic acid that result in a permanent indel, mutation, or excision of the intervening sequence in the target nucleic acid, with a corresponding modulation of expression or alteration in the function of the gene product, thereby creating an edited cell. In some embodiments of the method, the gRNA scaffold of the first and the second comprises a sequence selected from the group consisting of SEQ ID NOS: 2238-2400, 9257-9289 and 9588. In some embodiments of the method, the gRNA scaffold of the first and the second comprises a sequence selected from the group consisting of SEQ ID NOS: 2238 and 2292.

[0288] In some embodiments of the method, the modification of the target nucleic acid results in reduced expression of a gene product of a gene comprising the target nucleic acid, wherein expression is reduced by at least about 10%, at least about 20%, at least about 30%, at least about 40%, at least about 50%, at least about 60%, at least about 70%, at least about 80%, or at least about 90% in comparison to a cell that has not been modified. In some embodiments of the method, the modification of the target nucleic acid results in correction of a mutation in the target nucleic acid such that a wild-type or a functional gene product can be express.

[0289] In some embodiments, the modifying of the target nucleic acid sequence is carried out ex vivo. In some embodiments, the modifying of the target nucleic acid sequence is carried out in vitro inside a cell. In some embodiments of the modification of the target nucleic acid sequence in a cell, the cell is a eukaryotic cell selected from the group consisting of a rodent cell, a mouse cell, a rat cell, a primate cell, a non-human primate cell, and a human cell. In particular embodiments, the eukaryotic cell is a human cell. In some embodiments, the modifying of the target nucleic acid sequence is carried out in vivo in a subject. In some embodiments, the subject is selected from the group consisting of mouse, rat, pig, non-human primate. In some embodiments, the subject is a human.

[0290] In some embodiments, the method of modifying a target nucleic acid sequence comprises contacting a target nucleic acid with an rAAV encoding a CasX protein and gRNA pair and further comprising a donor template. The donor template may be inserted into the target nucleic acid such that all, some or none of the gene product is expressed. Depending on whether the vector is used to knock-down/knock-out or to knock-in a protein-coding sequence, the donor template can be a short single-stranded or double-stranded oligonucleotide, or can be a long single-stranded or double-stranded oligonucleotide. For knock-down/knock-outs, the donor template sequence need not be identical to the genomic sequence that it replaces and may contain one or more single base changes, insertions, deletions, inversions or rearrangements with respect to the genomic sequence. Provided that there are arms with sufficient numbers of nucleotides having sufficient homology flanking the cleavage site(s) of the target nucleic acid sequence targeted by the CasX:gRNA (i.e., 5′ and 3′ to the cleavage site) to support homology-directed repair (“homologous arms”), use of such donor templates can result in a frame-shift or other mutation such that the gene product is not expressed or is expressed at a lower level. In some embodiments, the homologous arms comprise between 10 and 100 nucleotides. The upstream and downstream homology arm sequences share at least about 80%, 85%, 90%, 95%, or 100% homology with the nucleotide sequences within 1-50 bases flanking either side of the cleavage site where the CasX cleaves the target nucleic acid sequence, facilitating insertion of the donor template sequence by HDR. In some embodiments, the donor template sequence comprises a non-homologous or a heterologous sequence flanked by two homologous arms, such that homology-directed repair between the target DNA region and the two flanking arm sequences results in insertion of the non-homologous or heterologous sequence at the target region, resulting in the knock-down or knock-out of the target gene, with a resulting reduction or elimination of expression of the gene product. In such knock-down cases, expression of the gene product is reduced by at least about 10%, at least about 20%, at least about 30%, at least about 40%, at least about 50%, at least about 60%, at least about 70%, at least about 80%, or at least about 90% in comparison to target nucleic acid that has not been modified. In other cases, an exogenous donor template may comprise a corrective sequence to be integrated, and is flanked by an upstream homologous arm and a downstream homologous arm, each having homology to the target nucleic acid sequence that is introduced into a cell. Use of such donor templates can result in expression of functional protein or expression of physiologically normal levels of functional protein after gene editing. In other cases, an exogenous donor template, which may comprise a mutation, a heterologous sequence, or a corrective sequence, is inserted between the ends generated by CasX cleavage by homology-independent targeted integration (HITI) mechanisms. The exogenous sequence inserted by HITI can be any length, for example, a relatively short sequence of between 1 and 50 nucleotides in length, or a longer sequence of about 50-1000 nucleotides in length. The lack of homology can be, for example, having no more than 20-50% sequence identity and/or lacking in specific hybridization at low stringency. In other cases, the lack of homology can further include a criterion of having no more than 5, 6, 7, 8, or 9 bp identity.

[0291] Introducing recombinant rAAV into a target cell can be carried out in vivo, in vitro or ex vivo. Introducing recombinant rAAV comprising sequences encoding the transgene components (e.g., the CasX, gRNA, promoters and accessory components and, optionally, the donor template sequences) of the disclosure into cells under in vitro conditions can occur in any suitable culture media and under any suitable culture conditions that promote the survival of the cells and production of the CasX:gRNA. In some embodiments of the method, vectors may be provided directly to a target host cell. For example, cells may be contacted with vectors having nucleic acids encoding the CasX and gRNA of any of the embodiments described herein and, optionally, having a donor template sequence such that the vectors are taken up by the cells.

[0292] In some embodiments, the vector is administered in vivo to a subject at a therapeutically effective dose. In the foregoing, the subject is selected from the group consisting of mouse, rat, pig, non-human primate, and human. In particular embodiments, the subject is a human. In some embodiments of the methods, the vector is administered to a subject at a dose of at least about 1×10⁵ vector genomes/kg (vg/kg), at least about 1×10⁶ vg/kg, at least about 1×10⁷ vg/kg, at least about 1×10⁸ vg/kg, at least about 1×10⁹ vg/kg, at least about 1×10¹⁰ vg/kg, at least about 1×10¹¹ vg/kg, at least about 1×10¹² vg/kg, at least about 1×10¹³ vg/kg, at least about 1×10¹⁴ vg/kg, at least about 1×10¹⁵ vg/kg, at least about 1×10¹⁶ vg/kg. In other embodiments, the vector is administered to the subject at a dose of at least about 1×10⁵ vg/kg to at least about 1×10¹⁶ vg/kg, or at least about 1×10⁶ vg/kg to about 1×10¹⁵ vg/kg, or at least about 1×10⁷ vg/kg to about 1×10¹⁴ vg/kg, or at least about 1×10¹ vg/kg to about 1×10¹⁴ vg/kg.

[0293] The vector can be administered by a route of administration selected from the group consisting of subcutaneous, intradermal, intraneural, intranodal, intramedullary, intramuscular, intralumbar, intrathecal, subarachnoid, intraventricular, intracapsular, intravenous, intralymphatical, or intraperitoneal routes, wherein the administering method is injection, transfusion, or implantation.

VI. rAAV

[0294] In other embodiments, the present disclosure provides recombinant rAAV comprising polynucleotides encoding the CasX proteins, the gRNAs, and the regulatory and accessory elements described herein that are integrated into the rAAV transgene.

[0295] In some embodiments, the disclosure provides a recombinant adeno-associated virus (rAAV) comprising: a) an AAV capsid protein, and b) the transgene polynucleotide of any one of the embodiments described herein. In the foregoing embodiment, the polynucleotide can comprise sequences of components selected from: a first adeno-associated virus (AAV) inverted terminal repeat (ITR) sequence; a second AAV ITR sequence; a first promoter sequence operably linked to the CRISPR protein; a second promoter sequence operably linked to the gRNA; a sequence encoding a CRISPR protein; a sequence encoding at least a first guide RNA (gRNA); and one or more accessory element sequences (e.g., a 3′ UTR, a poly(A) signal sequence, an enhancer, an intron, a posttranscriptional regulatory element (PTREs), an NLS, a deaminases, a DNA glycosylase inhibitor, a factor that stimulates CRISPR-mediated homology-directed repair, an activator or repressor of transcription, a self-cleaving sequence, or a fusion domain. In some embodiments, the polynucleotide comprises one or more sequences selected from the group of sequences set forth in Tables 7-10, 12-17, 19, 23-43, 45-46, 50-55, 57-58, and 60-61, or a sequence having at least 85%, at least 90%, at least 95%, at least 95%, at least 96%, at least 97%, at least 98%, or at least 99% identity thereto. In another embodiment, the polynucleotide comprises a sequence selected from the group of sequences set forth in Tables 7-10, 12-17, 19, 23-43, 45-46, 50-55, 57-58, and 60-61. In some embodiments, the polynucleotide sequence differs from those set forth in Tables 7-10, 12-17, 19, 23-43, 45-46, 50-55, 57-58, and 60-61 only in the selection of the targeting sequences of the gRNA or gRNAs encoded by the polynucleotide, wherein the targeting sequence is a sequence having 15 to 20 nucleotides capable of hybridizing with the sequence of a target nucleic acid. In some embodiments, the present disclosure provides a transgene polynucleotide, wherein the polynucleotide has the configuration of a construct of any one of FIG. 1, 25, 28, 38-40, 47 or 75.

[0296] In some embodiments, the AAV capsid protein is derived from serotype AAV1, AAV2, AAV3, AAV4, AAV5, AAV6, AAV7, AAV8, AAV9, AAV10, AAV11, AAV12, AAV 9.45, AAV 9.61, AAV 44.9, AAV-Rh74, AAVRh10, MyoAAV 1Al, MyoAAV 1A2, or MyoAAV 2A. In some embodiments, the AAV capsid protein and the 5′ and 3′ ITR are derived from the same serotype of AAV. In other embodiments, the AAV capsid protein and the 5′ and 3′ ITR are derived from different serotypes of AAV. In a particular embodiment, the 5′ and 3′ ITR are derived from AAV1. In a particular embodiment, the ITRs are derived from serotype AAV2, including the 5′ ITR having sequence CCTGCAGGCAGCTGCGCGCTCGCTCGCTCACTGAGGCCGCCCGGGCGTCGGGCGAC CTTTGGTCGCCCGGCCTCAGTGAGCGAGCGAGCGCGCAGAGAGGGAGTGGCCAACT CCATCACTAGGGGTTCCT (SEQ ID NO: 3683) and the 3′ ITR having sequence AGGAACCCCTAGTGATGGAGTTGGCCACTCCCTCTCTGCGCGCTCGCTCGCTCACTG AGGCCGGGCGACCAAAGGTCGCCCGACGCCCGGGCTTTGCCCGGGCGGCCTCAGTG AGCGAGCGAGCGCGCAGCTGCCTGCAGG (SEQ ID NO: 3701).

[0297] In some embodiments, the polynucleotides utilized in the rAAV comprise sequences encoding a CasX variant selected from the group consisting of SEQ ID NOS: 137-512, 9382-9542, and 9607-9609, or sequences having at least about 70%, at least about 80%, at least about 90%, at least about 95%, at least about 96%, at least about 97%, at least about 98%, or at least about 99% sequence identity thereto. In some embodiments, the polynucleotides utilized in the rAAV comprise sequences encoding the CasX variants selected from the group consisting of SEQ ID NOS: 190, 197, 348, 351, 355, or 484, or sequences having at least about 70%, at least about 80%, at least about 90%, at least about 95%, at least about 96%, at least about 97%, at least about 98%, or at least about 99% sequence identity thereto. In some embodiments, the polynucleotides utilized in the rAAV encode gRNA scaffold sequences selected from the group consisting of SEQ ID NOS: 2238-2400, 9257-9289 and 9588, or sequences having at least about 70%, at least about 80%, at least about 90%, at least about 95%, at least about 95%, at least about 96%, at least about 97%, at least about 98%, at least about 99% sequence identity thereto. In some embodiments, the polynucleotides utilized in the rAAV encode gRNA scaffold sequences selected from the group consisting of SEQ ID NOS: 2292 and 9588 as set forth in Table 2, or sequences having at least about 70%, at least about 80%, at least about 90%, at least about 95%, at least about 95%, at least about 96%, at least about 97%, at least about 98%, at least about 99% sequence identity thereto. In some embodiments, the gRNA comprises a targeting sequence having 15 to 20 nucleotides that is complementary to, and therefore hybridizes with, the target nucleic acid in a cell, and is linked to the 3′ end of the gRNA scaffold sequence. In one embodiment, the polynucleotide utilized in the rAAV transgene encodes CasX 515 (SEQ ID NO: 197), gRNA scaffold 235 (SEQ ID NO: 2292), and the gRNA comprises a targeting sequence having 15 to 20 nucleotides that is complementary to, and therefore hybridizes with, the target nucleic acid in a cell, and is linked to the 3′ end of the gRNA scaffold sequence. In another embodiment, the polynucleotide utilized in the rAAV transgene encodes CasX 515 (SEQ ID NO: 197), gRNA scaffold 316 (SEQ ID NO: 9588), and the gRNA comprises a targeting sequence having 15 to 20 nucleotides that is complementary to, and therefore hybridizes with, the target nucleic acid in a cell, and is linked to the 3′ end of the gRNA scaffold sequence.

[0298] In other embodiments, the disclosure provides an rAAV comprising a donor template nucleic acid, wherein the donor template comprises a nucleotide sequence having homology to a target nucleic acid sequence. In some embodiments, the donor template is intended for gene editing and comprises all or at least a portion of a target gene wherein upon insertion of the donor template, the gene is either knocked down, knocked out, or the mutation is corrected. In some embodiments, the donor template comprises a sequence that encodes at least a portion of a target nucleic acid exon. In other embodiments, the donor template has a sequence that encodes at least a portion of a target nucleic acid intron. In other embodiments, the donor template has a sequence that encodes at least a portion of a target nucleic acid intron-exon junction. In still other cases, the donor template sequence of the rAAV comprises one or more mutations relative to a target nucleic acid. In the foregoing embodiments, the donor template can range in size from 10-700 nucleotides. In some embodiments, the donor template is a single-stranded DNA template.

[0299] In other aspects, the disclosure relates to methods to produce polynucleotide sequences encoding the rAAV, as well as methods to express and recover the rAAV. In general, the methods include producing a polynucleotide sequence coding for the components of the expression cassette plus the flanking ITRs and incorporating the encoding gene into an expression vector appropriate for a host cell. For production of the rAAV, the methods include transforming an appropriate host cell with an expression vector comprising the encoding polynucleotide, together with and the Rep and Cap sequences provided in trans, and culturing the host cell under conditions causing or permitting the resulting rAAV to be produced, which are recovered by methods described herein or by standard purification methods known in the art. Rep and Cap can be provided to the packaging host cell as plasmids. Alternatively, the host cell genome may comprise stably integrated Rep and Cap genes. Suitable packaging cell lines are known to one of ordinary skill in the art. See for example, www.cellbiolabs.com/aav-expression-and-packaging. Methods of purifying rAAV produced by host cell lines will be known to one of ordinary skill in the art, and include, without limitation, affinity chromatography, gradient centrifugation, and ion exchange chromatography. Standard recombinant techniques in molecular biology are used, along with the methods of the Examples, to make the polynucleotides and rAAV of the present disclosure.

[0300] In accordance with the disclosure, nucleic acid sequences that encode the CasX variants or the gRNA described herein (or their complement) are used to generate recombinant DNA molecules that direct the expression in appropriate host cells. Several cloning strategies are suitable for performing the present disclosure, many of which are used to generate a construct that comprises a gene coding for a composition of the present disclosure, or its complement. In some embodiments, the cloning strategy is used to create a gene that encodes a construct that comprises nucleotides encoding the CasX variants or the gRNA that is used to transform a host cell for expression of the composition.

[0301] In some approaches, a construct is first prepared containing the DNA sequences encoding the components of the rAAV and transgene. Exemplary methods for the preparation of such constructs are described in the Examples. The construct is then used to create an expression vector suitable for transforming a host packaging cell, such as a eukaryotic host cell for the expression and recovery of the rAAV comprising the transgene. The eukaryotic host packaging cell can be selected from Baby Hamster Kidney fibroblast (BHK) cells, human embryonic kidney 293 (HEK293), human embryonic kidney 293T (HEK293T), NSO cells, SP2/0 cells, YO myeloma cells, P3X63 mouse myeloma cells, PER cells, PER.C6 cells, hybridoma cells, NIH3T3 cells, CV-1 (simian) in Origin with SV40 genetic material (COS), HeLa, Chinese hamster ovary (CHO) cells, or other eukaryotic cells known in the art suitable for the production of recombinant AAV. A number of transfection techniques are generally known in the art; see, e.g., Sambrook et al. (1989) Molecular Cloning, a laboratory manual, Cold Spring Harbor Laboratories, New York. Particularly suitable transfection methods include calcium phosphate co-precipitation, direct microinjection into cultured cells, electroporation, liposome mediated gene transfer, lipid-mediated transduction, and nucleic acid delivery using high-velocity microprojectiles. Exemplary methods for the creation of expression vectors, the transformation of host cells and the expression and recovery of the nucleic acids and the rAAV are described in the Examples.

[0302] The gene encoding the rAAV can be made in one or more steps, either fully synthetically or by synthesis combined with enzymatic processes, such as restriction enzyme-mediated cloning, PCR and overlap extension, including methods more fully described in the Examples. The methods disclosed herein can be used, for example, to ligate sequences of polynucleotides encoding the various components (e.g., ITRs, CasX and gRNA, promoters and accessory elements) of a desired sequence to create the expression vector.

[0303] In some embodiments, host cells transfected with the above-described rAAV expression vectors are rendered capable of providing AAV helper functions in order to replicate and encapsidate the nucleotide sequences flanked by the AAV ITRs to produce rAAV viral particles. AAV helper functions are generally AAV-derived coding sequences which can be expressed to provide AAV gene products that, in turn, function in trans for productive AAV replication. AAV helper functions are used herein to complement necessary AAV functions that are missing from the AAV expression vectors. Thus, AAV helper functions include one, or both of the major AAV ORFs (open reading frames), encoding the rep and cap coding regions, or functional homologues thereof. Accessory functions can be introduced into and then expressed in host cells using methods known to those of skill in the art. Commonly, accessory functions are provided by infection of the host cells with an unrelated helper virus. In some embodiments, accessory functions are provided using an accessory function vector. Depending on the host/vector system utilized, any of a number of suitable transcription and translation control elements, including constitutive and inducible promoters, transcription enhancer elements, transcription terminators, etc., may be used in the expression vector.

[0304] In some embodiments, the nucleotide sequence encoding the CRISPR protein components of the rAAV is codon optimized. This type of optimization can entail a mutation of an encoding nucleotide sequence to mimic the codon preferences of the intended host organism or cell while encoding the same CasX protein or other protein component. Thus, the codons can be changed, but the encoded protein remains unchanged. For example, if the intended host cell was a human cell, a human codon-optimized CasX-encoding nucleotide sequence could be used. The gene design can be performed using algorithms that optimize codon usage and amino acid composition appropriate for the host cell utilized in the production of the rAAV vector. In one method of the disclosure, a library of polynucleotides encoding the components of the constructs is created and then assembled, as described above. The resulting genes are then assembled and the resulting genes used to transform a host cell and produce and recover the rAAV compositions for evaluation of its properties, as described herein. In some embodiments, as described more fully below, the nucleotide sequence encoding the components of the rAAV are engineered to remove CpG dinucleotides in order to reduce the immunogenicity of the components, while retaining their functional characteristics.

[0305] In some embodiments, a nucleotide sequence encoding a gRNA is operably linked to a regulatory element. In some embodiments, a nucleotide sequence encoding a CasX protein is operably linked to a regulatory element. In other cases, the nucleotide encoding the CasX and gRNA are linked and are operably linked to a single regulatory element. Exemplary accessory elements include a transcription promoter, a transcription enhancer element, a transcription termination signal, internal ribosome entry site (IRES) or P2A peptide to permit translation of multiple genes from a single transcript, polyadenylation sequences to promote downstream transcriptional termination, sequences for optimization of initiation of translation, and translation termination sequences. In some cases, the promoter is a constitutively active promoter. In some cases, the promoter is a regulatable promoter. In some cases, the promoter is an inducible promoter. In some cases, the promoter is a tissue-specific promoter. In some cases, the promoter is a cell type-specific promoter. In some cases, the transcriptional accessory element (e.g., the promoter) is functional in a targeted cell type or targeted cell population. For example, in some cases, the transcriptional accessory element can be functional in eukaryotic cells, e.g., packaging host cells for the production of the rAAV vector. In some cases, the accessory element is a transcription activator that works in concert with a promoter to initiate transcription. By transcriptional activation, it is intended that transcription will be increased above basal levels in the target cell by 10-fold, by 100-fold, more usually by 1000-fold.

[0306] Non-limiting examples of Pol II promoters suitable for use in the transgene of the rAAV of the disclosure include, but are not limited to polyubiquitin C (UBC), cytomegalovirus (CMV), simian virus 40 (SV40), chicken beta-Actin promoter and rabbit beta-Globin splice acceptor site fusion (CAG), chicken β-actin promoter with cytomegalovirus enhancer (CB7), PGK, Jens Tornoe (JeT), GUSB, CBA hybrid (CBh), elongation factor-1 alpha (EF-1alpha), beta-actin, Rous sarcoma virus (RSV), silencing-prone spleen focus forming virus (SFFV), CMVd1 promoter, truncated human CMV (tCMVd2), minimal CMV promoter, chicken β-actin promoter, chicken β-actin promoter with cytomegalovirus enhancer (CB7), HSV TK promoter, Mini-TK promoter, minimal IL-2 promoter, GRP94 promoter, Super Core Promoter 1, Super Core Promoter 2, MLC, MCK, GRK1 protein promoter, Rho promoter, CAR protein promoter, hSyn Promoter, U1A promoter, Ribsomal Rpl and Rps promoters (e.g., hRpl30 and hRps18), CMV53 promoter, minimal SV40 promoter, CMV53 promoter, SFCp promoter, pJB42CAT5 promoter, MLP promoter, rhodopsin promoter, EFS promoter, MeP426 promoter, MecP2 promoter, MHCK7 promoter, beta-glucuronidase (GUSB), CK7 promoter, and CK8e promoter. In some embodiments, an rAAV construct of the disclosure comprises a Pol II promoter comprising a sequence of SEQ ID NOS: 3532-3562, 3714-3739, 3773-3778, and 9344-9350, or a sequence having at least about 70%, at least about 80%, at least about 85%, at least about 90%, at least about 95%, at least about 95%, at least about 96%, at least about 97%, at least about 98%, or at least about 99% identity thereto. In one embodiment, the Pol II promoter is EF-1alpha, wherein the promoter enhances transfection efficiency, the transgene transcription or expression of the CRISPR nuclease, the proportion of expression-positive clones and the copy number of the episomal vector in long-term culture. In one embodiment, the Pol II promoter is JeT, wherein the promoter enhances transfection efficiency, the transgene transcription or expression of the CRISPR nuclease, the proportion of expression-positive clones and the copy number of the episomal vector in long-term culture. In one embodiment, the Pol II promoter is U1A, wherein the promoter enhances transfection efficiency, the transgene transcription or expression of the CRISPR nuclease, the proportion of expression-positive clones and the copy number of the episomal vector in long-term culture. In one embodiment, the Pol II promoter is UbC, wherein the promoter enhances transfection efficiency, the transgene transcription or expression of the CRISPR nuclease, the proportion of expression-positive clones and the copy number of the episomal vector in long-term culture. In some embodiments, the Pol II promoter is a truncated version of the foregoing promoters. In some embodiments the Pol II promoter in an rAAV construct has less than about 400 nucleotides, less than about 350 nucleotides, less than about 300 nucleotides, less than about 200 nucleotides, less than about 150 nucleotides, less than about 100 nucleotides, less than about 80 nucleotides, or less than about 40 nucleotides. In some embodiments, the Pol II promoter in an rAAV construct has between about 40 to about 585 nucleotides, between about 100 to about 400 nucleotides, or between about 150 to about 300 nucleotides. In some embodiments, the rAAV constructs comprise polynucleic acids comprising the Pol II promoters of any of the foregoing embodiments of the paragraph, as well as the promoters of Table 7, and can be, in some cases, configured in relation to the other components of the constructs as depicted in any one of FIGS. 1, FIG. 25, FIG. 28, FIGS. 38-40, FIG. 47, or FIG. 75.

[0307] In some embodiments, an rAAV construct of the disclosure comprises a Pol II promoter with a linked intron, wherein the intron enhances the ability of the promoter to increase transfection efficiency, the transgene transcription or expression of the CRISPR nuclease, the proportion of expression-positive clones and the copy number of the episomal vector in long-term culture. Exemplary embodiments of such promoter-intron combinations are described in the Examples.

[0308] Non-limiting examples of Pol III promoters suitable for use in the transgene of the rAAV of the disclosure include, but are notlimited to human U6, human U6 variant, human U6 isoform variant, mini U61, mini U62, mini U63, BiH1 (Bidrectional H1 promoter), BiU6 (Bidirectional U6 promoter), gorilla U6, rhesus U6, human 7sk, and human H1 promoters. In some embodiments, the Pol III promoter comprises a sequence selected from the group consisting of SEQ ID NOS: 3563, 3566-3582, 3599-3602, 3740-3746, 4025, 4029, 4032, and 4743, or a sequence having at least about 70%, at least about 80%, at least about 85%, at least about 90%, at least about 95%, at least about 95%, at least about 96%, at least about 97%, at least about 98%, or at least about 99% identity thereto. In the foregoing embodiments, the Pol III promoter enhances the transcription of the gRNA encoded by the rAAV. In some embodiments, an rAAV construct of the disclosure comprises a Pol III promoter comprising a sequence as set forth in Table 8, or a sequence having at least 85%, at least 90%, at least 95%, at least 95%, at least 96%, at least 97%, at least 98%, or at least 99% identity thereto. In some embodiments, the Pol III promoter is a truncated version of the foregoing promoters. In some embodiments the Pol III promoter in an rAAV construct of the disclosure has less than about 250 nucleotides, less than about 220 nucleotides, less than about 200 nucleotides, less than about 160 nucleotides, less than about 140 nucleotides, less than about 130 nucleotides, less than about 120 nucleotides, less than about 100 nucleotides, less than about 80 nucleotides, or less than about 70 nucleotides. In some embodiments the Pol III promoter in an rAAV construct of the disclosure has between about 70 to about 245 nucleotides, between about 100 to about 220 nucleotides, or between about 120 to about 160 nucleotides. In some embodiments, the rAAV constructs comprise polynucleic acids encoding the Pol III promoters of any of the foregoing embodiments of the paragraph, as well as the promoters of Table 8, and can be, in some cases, configured in relation to the other components of the constructs as depicted in any one of FIG. 1, FIG. 25, FIG. 28, FIGS. 38-40, FIG. 47, or FIG. 75.

[0309] Selection of the appropriate promoter is well within the level of ordinary skill in the art, as it relates to controlling expression, e.g., for modifying a gene or other target nucleic acid. The expression vector may also contain a ribosome binding site for translation initiation and a transcription terminator. The expression vector may also include appropriate sequences for amplifying expression. The expression vector may also include nucleotide sequences encoding protein tags (e.g., 6×His tag, hemagglutinin tag, fluorescent protein, etc.) that can be fused to the CasX protein, thus resulting in a chimeric CasX protein that are used for purification or detection.

[0310] In some embodiments, the disclosure provides rAAV transgenes comprising promoters and gRNA oriented in the forward direction (i.e., 5′ to 3′) relative to the orientation of the sequence encoding the Class 2, Type V CRISPR protein. In such a case, the gRNA would be 3′ of the promoter in the transgene. In some embodiments, the disclosure provides rAAV transgenes comprising promoters and gRNA oriented in the reverse direction (i.e., 3′ to 5′) relative to the orientation of the sequence encoding the Class 2, Type V CRISPR protein. In such a case, the gRNA would be 5′ of the promoter in the transgene. Exemplary promoters in the reverse orientation are described in the Examples and Table 50 and transgene constructs incorporating promoters in various locations and orientations are portrayed schematically in FIG. 1, FIG. 25, FIG. 28, FIGS. 38-40, FIG. 47, or FIG. 75.

[0311] In some embodiments, the present disclosure provides a polynucleotide sequence wherein one or more components of the transgene are operably linked to (under the control of) an inducible promoter operable in a eukaryotic cell. Examples of inducible promoters may include, but are not limited to, T7 RNA polymerase promoter, T3 RNA polymerase promoter, isopropyl-beta-D-thiogalactopyranoside (IPTG)-regulated promoter, lactose induced promoter, heat shock promoter, tetracycline-regulated promoter, kanamycin-regulated promoter, steroid-regulated promoter, metal-regulated promoter, estrogen receptor-regulated promoter, etc. Inducible promoters can therefore, in some embodiments, be regulated by molecules including, but not limited to, doxycycline, estrogen and/or an estrogen analog, IPTG, etc. Additional examples of inducible promoters include, without limitation, chemically/biochemically-regulated and physically-regulated promoters such as alcohol-regulated promoters, kanamycin-regulated promoters, tetracycline-regulated promoters (e.g., anhydrotetracycline (aTc)-responsive promoters and other tetracycline-responsive promoter systems, which include a tetracycline repressor protein (tetR), a tetracycline operator sequence (tetO) and a tetracycline transactivator fusion protein (tTA), steroid-regulated promoters (e.g., promoters based on the rat glucocorticoid receptor, human estrogen receptor, moth ecdysone receptors, and promoters from the steroid/retinoid/thyroid receptor superfamily), metal-regulated promoters (e.g., promoters derived from metallothionein (proteins that bind and sequester metal ions) genes from yeast, mouse and human), pathogenesis-regulated promoters (e.g., induced by salicylic acid, ethylene or benzothiadiazole (BTH)), temperature/heat-inducible promoters (e.g., heat shock promoters), and light-regulated promoters (e.g., light responsive promoters from plant cells).

[0312] In some cases, the promoter is a reversible promoter. Suitable reversible promoters, including reversible inducible promoters are known in the art. Such reversible promoters may be isolated and derived from many organisms, e.g., eukaryotes and prokaryotes. Modification of reversible promoters derived from a first organism for use in a second organism, e.g., a first prokaryote and a second a eukaryote, a first eukaryote and a second a prokaryote, etc., is well known in the art. Such reversible promoters, and systems based on such reversible promoters but also comprising additional control proteins, include, but are not limited to, alcohol regulated promoters (e.g., alcohol dehydrogenase I (alcA) gene promoter, promoters responsive to alcohol transactivator proteins (AlcR, etc.), tetracycline regulated promoters, (e.g., promoter systems including Tet Activators, TetON, TetOFF, etc.), steroid regulated promoters (e.g., rat glucocorticoid receptor promoter systems, human estrogen receptor promoter systems, retinoid promoter systems, thyroid promoter systems, ecdysone promoter systems, mifepristone promoter systems, etc.), metal regulated promoters (e.g., metallothionein promoter systems, etc.), pathogenesis-related regulated promoters (e.g., salicylic acid regulated promoters, ethylene regulated promoters, benzothiadiazole regulated promoters, etc.), temperature regulated promoters (e.g., heat shock inducible promoters (e.g., HSP-70, HSP-90, soybean heat shock promoter, etc.), light regulated promoters, synthetic inducible promoters, and the like.

[0313] Recombinant expression vectors of the disclosure can also comprise elements that facilitate robust expression components of the disclosure (e.g., the CasX or the gRNA). For example, recombinant expression vectors utilized in the rAAV constructs of the disclosure can include one or more of a polyadenylation signal (poly(A) signal), an intronic sequence or a post-transcriptional accessory element (PTRE) such as a woodchuck hepatitis post-transcriptional accessory element (WPRE). Non-limiting examples of PTRE suitable for the rAAV constructs of the disclosure include the sequences of SEQ ID NOS: 3615-3617 of Table 16, or a sequence having at least 85%, at least 90%, at least 95%, at least 95%, at least 96%, at least 97%, at least 98%, or at least 99% identity thereto. Exemplary poly(A) signal sequences suitable for inclusion in the expression vectors of the disclosure include hGH poly(A) signal (short), HSV TK poly(A) signal, synthetic polyadenylation signals, SV40 poly(A) signal, SV40 Late PolyA signal, β-globin poly(A) signal, β-globin poly(A) short, and the like. Non-limiting examples of poly(A) signals suitable for the rAAV constructs of the disclosure include the sequences of SEQ ID NOS: 2401-3401 of Table 12, or a sequence having at least 85%, at least 90%, at least 95%, at least 95%, at least 96%, at least 97%, at least 98%, or at least 99% identity thereto. Non-limiting examples of introns suitable for the rAAV of the disclosure include the sequences of SEQ ID NOS: 3487-3531 of Table 22, or a sequence having at least 85%, at least 90%, at least 95%, at least 95%, at least 96%, at least 97%, at least 98%, or at least 99% identity thereto. A person of ordinary skill in the art will be able to select suitable elements to include in the recombinant expression vectors described herein.

[0314] The polynucleotides encoding the transgene components can be individually cloned into the rAAV expression vector. In some embodiments, the polynucleotide is a recombinant expression vector that comprises a nucleotide sequence encoding a CasX protein. In other embodiments, the disclosure provides a recombinant expression vector comprising a polynucleotide sequence encoding a CasX protein and a nucleotide sequence encoding a first gRNA with a linked targeting sequence complementary to a target nucleic acid of a cell, and, optionally, a second gRNA with a linked targeting sequence complementary to different or overlapping regions of a target nucleic acid of a cell. In some cases, the nucleotide sequence encoding the CasX protein variant and/or the nucleotide sequence encoding the gRNA are each operably linked to a promoter that is operable in a cell type of choice. In other embodiments, the nucleotide sequence encoding the CasX protein variant and the nucleotide sequence encoding the gRNA are provided in separate vectors.

[0315] The nucleic acid sequences encoding the transgene components are inserted into the vector by a variety of procedures. In general, DNA is inserted into an appropriate restriction endonuclease site(s) using techniques known in the art. Vector components generally include, but are not limited to, one or more of a signal sequence, an origin of replication, one or more marker genes, an enhancer element, a promoter, and a transcription termination sequence. Construction of suitable vectors containing one or more of these components employs standard ligation techniques which are known to the skilled artisan. Such techniques are well known in the art and well described in the scientific and patent literature. Various vectors are publicly available.

[0316] The recombinant expression vectors can be delivered to the target host cells by a variety of methods, as described more fully, below, and in the Examples. Such methods include, e.g., viral infection, transfection, lipofection, electroporation, calcium phosphate precipitation, polyethyleneimine (PEI)-mediated transfection, DEAE-dextran mediated transfection, liposome-mediated transfection, particle gun technology, nucleofection, electroporation, cell squeezing, calcium phosphate precipitation, direct microinjection, nanoparticle-mediated nucleic acid delivery, and the like. A number of transfection techniques are generally known in the art; see, e.g., Sambrook et al. (1989) Molecular Cloning, a laboratory manual, Cold Spring Harbor Laboratories, New York. Packaging cells are typically used to form virus particles; such cells include BHK cells, HEK293 cells, HEK293T cells, NSO cells, SP2/0 cells, YO myeloma cells, P3X63 mouse myeloma cells, PER cells, PER.C6 cells, hybridoma cells, NIH3T3 cells, COS cells, HeLa cells, and CHO cells (and other cells known in the art), which package adenovirus, which are then recovered by conventional methods known in the art.

[0317] In some embodiments, host cells transfected with the above-described rAAV expression vectors are rendered capable of providing rAAV helper functions in order to replicate and encapsidate the nucleotide sequences flanked by the AAV ITRs to produce rAAV viral particles. AAV helper functions are generally AAV-derived coding sequences which can be expressed to provide AAV gene products that, in turn, function in trans for productive AAV replication. In some embodiments, packaging cells are transfected with plasmids comprising AAV helper functions to complement necessary AAV functions that are missing from the rAAV expression vectors. Thus, AAV helper function plasmids include one, or both of the major AAV ORFs (open reading frames), encoding the rep and cap coding regions, the aap (assembly) gene, or functional homologues thereof, and the adenoviral helper genes comprising E2A, E4, and VA genes, operably linked to a promoter. Accessory functions can be introduced into and then expressed in host cells using methods known to those of skill in the art. Commonly, accessory functions are provided by infection of the host cells with an unrelated helper virus. In some embodiments, accessory functions are provided using an accessory function vector. Depending on the host/vector system utilized, any of a number of suitable transcription and translation accessory elements, including constitutive and inducible promoters, transcription enhancer elements, transcription terminators, etc., may be used in the expression vector.

### VII. Therapeutic Methods

[0318] The present disclosure provides methods of treating a disease in a subject in need thereof. In some embodiments of the method, the subject has one or more mutations in a gene, wherein administration of the rAAV is administered to modify the gene, either to knock down or knock out expression of the gene product. In some embodiments of the method, the rAAV is administered to correct a mutation in a gene of the subject. In some embodiments, the methods of the disclosure can prevent, treat and/or ameliorate a disease of a subject by the administering to the subject of an rAAV composition of the disclosure. In some embodiments, the composition administered to the subject further comprises pharmaceutically acceptable carrier, diluent or excipient.

[0319] In some embodiments, the disclosure provides methods of treating a disease in a subject in need thereof comprising modifying a target nucleic acid in a cell of the subject, the modifying comprising administering to the subject a therapeutically effective dose of an rAAV of any of the embodiments described herein wherein the targeting sequence of the encoded gRNA has a sequence that hybridizes with the target nucleic acid, resulting in the modification of the target nucleic acid by the CasX protein.

[0320] In other embodiments, the methods of treating a disease in a subject in need thereof comprise administering to the subject a therapeutically effective dose of an rAAV of any of the embodiments described herein wherein the targeting sequence of the encoded gRNA has a sequence that hybridizes with the target nucleic acid and wherein the rAAV further comprises a donor template comprises one or more mutations or a heterologous sequence that is inserted into or replaces the target nucleic acid sequence to knock-down or knock-out the gene comprising the target nucleic acid. In the foregoing, the insertion of the donor template serves to disrupt expression of the gene and the resulting gene product. In some embodiments of the foregoing methods, the donor DNA template ranges in size from 10-5,000 nucleotides. In other embodiments of the foregoing methods, the donor template ranges in size from 100-1,000 nucleotides. In some cases, the donor template is a single-stranded RNA or DNA template.

[0321] The modified cell of the treated subject can be a eukaryotic cell selected from the group consisting of a rodent cell, a mouse cell, a rat cell, a primate cell, a non-human primate cell, and a human cell. In some embodiments, the eukaryotic cell of the treated subject is a human cell.

[0322] In some embodiments, the method comprises administering to the subject the rAAV of the embodiments described herein via an administration route selected from the group consisting of subcutaneous, intradermal, intraneural, intranodal, intramedullary, intramuscular, intralumbar, intrathecal, subarachnoid, intraventricular, intracapsular, intravenous, intralymphatical, intraocular or intraperitoneal routes, wherein the administering method is injection, transfusion, or implantation. In some embodiments of the methods of treating a disease in a subject, the subject is selected from the group consisting of mouse, rat, pig, non-human primate, and human. In a particular embodiment, the subject is a human.

[0323] In some embodiments of the method of treating a disease in a subject in need thereof, the rAAV is administered at a dose of at least about 1×10⁵ vector genomes/kg (vg), at least about 1×10⁶ vector genomes/kilogram (vg/kg), at least about 1×10⁷ vg/kg, at least about 1×10⁸ vg/kg, at least about 1×10⁹ vg/kg, at least about 1×10¹⁰ vg/kg, at least about 1×10¹¹ vg/kg, at least about 1×10¹² vg/kg, at least about 1×10¹³ vg/kg, at least about 1×10¹⁴ vg/kg, at least about 1×10¹⁵ vg/kg, at least about 1×101⁶ vg/kg. In other embodiments of the method of treatment, the rAAV is administered to a subject at a dose of at least about 1×10⁵ vg/kg to about 1×10¹⁶ vg/kg, at least about 1×10⁶ vg/kg to about 1×10¹⁵ vg/kg, or at least about 1×10⁷ vg/kg to about 1×10¹⁴ vg/kg.

[0324] In organ systems like the eye, the rAAV is administered at a dose of at least about 1×10⁵ vector genomes (vg), at least about 1×10⁶ vg, at least about 1×10⁷ vg, at least about 1×10⁸ vg, at least about 1×10⁹ vg, at least about 1×10¹⁰ vg, at least about 1×10¹¹ vg, at least about 1×10¹² vg, at least about 1×10¹³ vg, at least about 1×10¹⁴ vg, at least about 1×10¹⁵ vg, at least about 1×10¹⁶ vg.

[0325] A number of therapeutic strategies have been used to design the compositions for use in the methods of treatment of a subject with a disease. In some embodiments, the invention provides a method of treatment of a subject having a disease, the method comprising administering to the subject an rAAV of any of the embodiments disclosed herein according to a treatment regimen comprising one or more consecutive doses using a therapeutically effective dose. In some embodiments of the treatment regimen, the therapeutically effective dose of the rAAV is administered as a single dose. In other embodiments of the treatment regimen, the therapeutically effective dose is administered to the subject as two or more doses over a period of at least two weeks, or at least one month, or at least two months, or at least three months, or at least four months, or at least five months, or at least six months. In some embodiments of the treatment regiment, the effective doses are administered by a route selected from the group consisting of subcutaneous, intradermal, intraneural, intranodal, intramedullary, intramuscular, intralumbar, intrathecal, subarachnoid, intraventricular, intracapsular, intravenous, intralymphatical, intraocular, subretinal, intravitreal, or intraperitoneal routes, wherein the administering method is injection, transfusion, or implantation.

[0326] In some embodiments, the administering of the therapeutically effective amount of an rAAV to knock down or knock out expression of a gene having one or more mutations leads to the prevention or amelioration of the underlying disease such that an improvement is observed in the subject, notwithstanding that the subject may still be afflicted with the underlying disease. In some embodiments, the administration of the therapeutically effective amount of the rAAV leads to an improvement in at least one clinically-relevant parameter for the disease. In some embodiments of the method of treatment, the subject is selected from mouse, rat, pig, dog, non-human primate, and human.

[0327] In some embodiments, the disclosure provides compositions of any of the rAAV embodiments described herein for the manufacture of a medicament for the treatment of a human in need thereof. In some embodiments, the medicament is administered to the subject according to a treatment regimen comprising one or more consecutive doses using a therapeutically effective dose.

VIII. rAAV Engineered to Reduce Immunogenicity Retain Editing Properties

[0328] rAAV-associated pathogen associated molecular patterns (PAMPs) that contribute to immune responses in mammalians hosts include: i) ligands present on rAAV viral capsids that bind toll-like receptor 2 (TLR2), a cell-surface PRR on non-parenchymal cells in the liver; and ii) unmethylated CpG dinucleotides in viral DNA that bind TLR9, an endosomal PRR in plasmacytoid dendritic cells (pDCs) and B cells (Faust, S M, et al. CpG-depleted adeno-associated virus vectors evade immune detection. J. Clinical Invest. 123:2294 (2013)). In particular, CpG dinucleotide motifs (CpG PAMPs) in AAV vectors are immunostimulatory because of their high degree of hypomethylation, relative to mammalian CpG motifs, which have a high degree of methylation. Accordingly, reducing the frequency of unmethylated CpGs in rAAV genomes to a level below the threshold that activates human TLR9 is expected to reduce the immune response to exogenously administered rAAV-based biologics. Similarly, methylation of CpG PAMPs in rAAV constructs is similarly expected to reduce the immune response to rAAV-based biologics.

[0329] In some embodiments, the present disclosure provides rAAV wherein one or more components of the transgene are optimized for depletion of CpG dinucleotides by the substitution of homologous nucleotide sequences from mammalian species, wherein the one or more components substantially retain their functional properties upon expression in a transduced cell; e.g., ability to drive expression of the CRISPR nuclease, ability to drive expression of the gRNA, enhance the expression of the CRISPR nuclease and/or the gRNA, and enhanced ability to edit a target nucleic acid sequence. In some embodiments, the present disclosure provides rAAV wherein one or more rAAV transgene component sequences selected from the group consisting of 5′ ITR, 3′ ITR, Pol III promoter, Pol II promoter, encoding sequence for CRISPR nuclease, encoding sequence for gRNA, 3′ UTR, poly(A) signal sequence, and accessory element are optimized for depletion of all or a portion of the CpG dinucleotides, wherein the resulting rAAV transgene is substantially devoid of CpG dinucleotides. In some embodiments, the present disclosure provides rAAV wherein one or more rAAV transgene component sequences selected from the group consisting of 5′ ITR, 3′ ITR, Pol III promoter, Pol II promoter, encoding sequence for a CRISPR nuclease, encoding sequence for gRNA, poly(A) signal, and accessory element comprise less than about 10%, less than about 5%, or less than about 1% CpG dinucleotides. In some embodiments, the present disclosure provides rAAV wherein one or more rAAV transgene component sequences selected from the group consisting of 5′ ITR, 3 ITR, Pol III promoter, Pol II promoter, encoding sequence for the CRISPR nuclease, encoding sequence for the gRNA, and poly(A) signal are devoid of CpG dinucleotides. In some embodiments, the present disclosure provides rAAV wherein the transgene comprises less than about 10%, less than about 5%, or less than about 1% CpG dinucleotides. In some embodiments, the present disclosure provides rAAV wherein the one or more rAAV component sequences optimized for depletion of CpG dinucleotides are selected from the group of sequences consisting of SEQ ID NOS: 9327-9333, 9369-9380, and 3735-3772 or a sequence having at least about 70%, at least about 80%, at least about 90%, at least about 95%, at least about 96%, at least about 97%, at least about 98%, or at least about 99% sequence identity thereto. In some embodiments, the present disclosure provides rAAV wherein the sequence encoding the CasX nuclease protein component sequences are optimized for depletion of CpG dinucleotides, selected from the group consisting of SEQ ID NOS: 9327-9333 and 9369-9380, or a sequence having at least about 70%, at least about 80%, at least about 90%, at least about 95%, at least about 96%, at least about 97%, at least about 98%, or at least about 99% sequence identity thereto. In some embodiments, the disclosure provides a CpG-depleted polynucleotide sequence encoding a gRNA scaffold, wherein the sequence is selected from the group consisting of SEQ ID NOS: 3751-3772, or a sequence having at least about 70%, at least about 80%, at least about 90%, at least about 95%, at least about 97%, at least about 98%, or at least about 99% sequence identity thereto. In some embodiments, the disclosure provides a CpG-depleted polynucleotide sequence encoding an ITR, wherein the sequence is selected from the group consisting of SEQ ID NOS: 3749 and 3750. In some embodiments, the disclosure provides a CpG-depleted polynucleotide sequence encoding a promoter, wherein the sequence is selected from the group consisting of SEQ ID NOS: 3735-3746. In some embodiments, the disclosure provides a CpG-depleted polynucleotide sequence encoding a poly(A) signal sequence, wherein the sequence is SEQ ID NO: 3748. In some embodiments, the disclosure provides rAAV having one or more components of the transgene optimized for depletion of CpG dinucleotides, wherein the expressed CRISPR nuclease and gRNA retain at least about 60%, at least about 70%, at least about 80%, or at least about 90% of the editing potential for a target nucleic acid compared to an rAAV wherein the transgene has not been optimized for depletion of CpG dinucleotides, when assayed in an in vitro assay under comparable conditions. In a particular embodiment, the present disclosure provides rAAV wherein the one or more rAAV component sequences optimized for depletion of CpG dinucleotides that retain editing potential are selected from the group of sequences consisting of SEQ ID NOS: 9327-9333, 9369-9380, and 3735-3772, or a sequence having at least about 80%, at least about 80%, at least about 90%, at least about 95%, at least about 96%, at least about 97%, at least about 98%, or at least about 99% sequence identity thereto.

[0330] The embodiments of the rAAV comprising the one or more components of the transgene optimized for depletion of CpG dinucleotides have, as an improved characteristic, a lower potential for inducing an immune response, either in vivo (when administered to a subject) or in in vitro mammalian cell assays designed to detect markers of an inflammatory response. In some embodiments, the administration of a therapeutically effective dose of the rAAV comprising the one or more components of the transgene optimized for depletion of CpG dinucleotides to a subject results in a reduced immune response compared to the immune response of a comparable rAAV wherein the transgene has not been optimized for depletion of CpG dinucleotides, wherein the reduced response is determined by the measurement of one or more parameters such as production of antibodies or a delayed-type hypersensitivity to an rAAV component, or the production of inflammatory cytokines and markers, such as, but not limited to TLR9, interleukin-1 (IL-1), IL-6, IL-12, IL-18, tumor necrosis factor alpha (TNF-α), interferon gamma (IFNγ), and granulocyte-macrophage colony stimulating factor (GM-CSF). In some embodiments, the rAAV comprising the one or more components of the transgene that are substantially devoid of CpG dinucleotides elicits reduced production of one or more inflammatory markers selected from the group consisting of TLR9, interleukin-1 (IL-1), IL-6, IL-12, IL-18, tumor necrosis factor alpha (TNF-α), interferon gamma (IFNγ), and granulocyte-macrophage colony stimulating factor (GM-CSF) of at least about 10%, at least about 20%, at least about 30%, at least about 40%, at least about 50%, at least about 60%, at least about 80%, or at least about 90% compared to the comparable rAAV that is not CpG depleted, when assayed in a cell-based vitro assay using cells known in the art appropriate for such assays; e.g., monocytes, macrophages, T-cells, B-cells, etc. In a particular embodiment, the rAAV comprising the one or more components of the transgene optimized for depletion of CpG dinucleotides exhibits a reduced activation of TLR9 in hNPCs in an in vitro assay of at least about 10%, at least about 20%, at least about 30%, at least about 40%, at least about 50%, at least about 60%, at least about 80%, or at least about 90% compared to the comparable rAAV that is not CpG depleted.

### IX. Kits and Articles of Manufacture

[0331] In other embodiments, provided herein are kits comprising an rAAV of any of the embodiments of the disclosure, and a suitable container (for example a tube, vial or plate).

[0332] In some embodiments, the kit further comprises a buffer, a nuclease inhibitor, a protease inhibitor, a liposome, a therapeutic agent, a label, a label visualization reagent, or any combination of the foregoing. In some embodiments, the kit further comprises a pharmaceutically acceptable carrier, diluent or excipient.

[0333] In some embodiments, the kit comprises appropriate control compositions for gene modifying applications, and instructions for use.

### ENUMERATED EMBODIMENTS

[0334] The following sets of enumerated embodiments are included for illustrative purposes and are not intend to limit the scope of the invention.

### Set I

[0335] Embodiment I-1. A polynucleotide comprising the following component sequences:
[0336] a. a first AAV inverted terminal repeat (ITR) sequence as disclosed in the present disclosure;
[0337] b. a second AAV ITR sequence as disclosed in the present disclosure;
[0338] c. a first promoter sequence as disclosed in the present disclosure;
[0339] d. a sequence encoding a CRISPR protein as disclosed in the present disclosure;
[0340] e. a sequence encoding a first guide RNA (gRNA) as disclosed in the present disclosure; and,
[0341] f. optionally, at least one accessory element sequence as disclosed in the present disclosure, wherein the polynucleotide is configured for incorporation into a recombinant adeno-associated virus (AAV).

[0342] Embodiment I-2. The polynucleotide of embodiment I-1, wherein the first AAV ITR, the second AAV ITR, the first promoter sequence, the sequence encoding the CRISPR protein, the sequence encoding the first gRNA, the at least one accessory element sequence, or a combination thereof, is modified to reduce or deplete at least one CpG dinucleotide.

[0343] Embodiment I-3. The polynucleotide of embodiment I-1 or embodiment I-2, wherein the first promoter sequence is a muscle-specific promoter.

[0344] Embodiment I-4. The polynucleotide of any one of embodiments 1-3, wherein the accessory element sequence encodes a muscle-specific accessory element.

[0345] Embodiment I-5. The polynucleotide of any one of embodiments 1-4, wherein the gRNA is modified to exhibit improved activity for double strand DNA cleavage.

[0346] Embodiment I-6. The polynucleotide of any one of embodiments 1-5 wherein the CRISPR protein is modified to exhibit improved activity for double strand DNA cleavage or spacer specificity at TTC, ATC, or CTC PAM sequences.

### Set II

[0347] Embodiment II-1. A recombinant adeno-associated virus (rAAV) transgene wherein
[0348] a. the transgene comprises:
   [0349] i) a polynucleotide sequence encoding a CasX protein comprising a sequence selected from the group consisting of SEQ ID NOS: 137-512, 9382-9542, and 9607-9609, or a sequence having at least about 70% sequence identity thereto; and
   [0350] ii) a polynucleotide sequence encoding a first guide RNA (gRNA) comprising a targeting sequence of 15 to 20 nucleotides complementary to a target nucleic acid of a cell;
[0351] b. the transgene has less than about 4700 nucleotides; and
[0352] c. the rAAV transgene is configured for incorporation into a rAAV capsid.

[0353] Embodiment II-2. The rAAV transgene of embodiment II-1, wherein the CasX protein comprises a sequence selected from the group consisting of SEQ ID NOS: 137-512, 9382-9542 and 9607-9609.

[0354] Embodiment II-3. The rAAV of embodiment II-1 or II-2, wherein the wherein the CasX protein is a CasX variant selected from the group consisting of SEQ ID NOS: 9385, 9391, 9393, 9401, 9409, 9417, 9419, 9423, 9429, 9443, 9444, 9447, 9449, 9450, 9452, 9453, 9455, 9456, 9458, 9462, 9466, 9469, 9470, 9472, 9478, 9483, 9485, 9491, 9495, 9499, 9501, 9512, 9513, 9517, 9519, 9521, 9536, 9542, 9607, and 9609, wherein the encoded CasX variant exhibits improved editing of a target nucleic acid in an in vitro assay, compared to a CasX variant of SEQ ID NO: 197 and assayed under comparable conditions.

[0355] Embodiment II-4. The rAAV of embodiment II-1 or II-2, wherein the wherein the CasX protein is a CasX variant selected from the group consisting of SEQ ID NOS: 9385, 9386, 9388, 9390, 9409, 9412, 9417, 9432, 9433, 9434, 9436, 9437, 9438, 9440, 9441, 9443, 9444, 9446, 9447, 9448, 9450, 9452, 9455, 9459, 9464, 9466, 9468, 9469, 9470, 9472, 9474, 9478, 9479, 9480, 9481, 9486, 9487, 9488, 9492, 9493, 9496, 9509, 9512, 9516, 9517, 9519, 9521, 9522, 9529, 9536, 9542, 9608, and 9609, wherein the encoded CasX variant exhibits improved editing specificity of a target nucleic acid in an in vitro assay, compared to a CasX variant of SEQ ID NO: 197 and assayed under comparable conditions.

[0356] Embodiment II-5. The rAAV of embodiment II-1 or II-2, wherein the wherein the CasX protein is a CasX variant selected from the group consisting of SEQ ID NOS: 9385, 9386, 9388, 9390, 9393, 9409, 9412, 9417, 9432, 9433, 9434, 9436, 9437, 9438, 9440, 9441, 9443, 9444, 9446, 9447, 9448, 9450, 9452, 9455, 9459, 9464, 9466, 9468, 9469, 9470, 9472, 9474, 9478, 9479, 9480, 9481, 9483, 9486, 9488, 9491, 9492, 9493, 9495, 9496, 9509, 9512, 9513, 9516, 9517, 9519, 9521, 9522, 9529, 9536, 9542, 9608, and 9609, wherein the encoded CasX variant exhibits improved editing specificity ratio of a target nucleic acid in an in vitro assay, compared to a CasX variant of SEQ ID NO: 197 and assayed under comparable conditions.

[0357] Embodiment II-6. The rAAV of embodiment II-1 or II-2, wherein the wherein the CasX protein is a CasX variant selected from the group consisting of SEQ ID NOS: 9385, 9409, 9417, 9443, 9444, 9447, 9450, 9452, 9455, 9466, 9469, 9470, 9472, 9478, 9512, 9513, 9517, 9519, 9521, 9536, 9542, and 9609, wherein the encoded CasX variant exhibits improved editing and improved specificity of a target nucleic acid in an in vitro assay, compared to a CasX variant of SEQ ID NO: 197 and assayed under comparable conditions.

[0358] Embodiment II-7. The rAAV of embodiment II-1 or II-2, wherein the wherein the CasX protein is a CasX variant selected from the group consisting of SEQ ID NOS: 9385, 9393, 9409, 9417, 9443, 9444, 9447, 9450, 9452, 9455, 9466, 9469, 9470, 9472, 9478, 9483, 9491, 9495, 9512, 9513, 9517, 9519, 9521, 9536, 9542, and 9609, wherein the encoded CasX variant exhibits improved editing and improved specificity ratio of a target nucleic acid in an in vitro assay, compared to a CasX variant of SEQ ID NO: 197 and assayed under comparable conditions.

[0359] Embodiment II-8. The rAAV transgene of embodiment II-2, wherein the CasX protein comprises a sequence selected from the group consisting of SEQ ID NOS: 190 and 197.

[0360] Embodiment II-9. The rAAV transgene of any one of embodiments II-1 to II-7, wherein the transgene further comprises one or more components selected from the group consisting of:
[0361] a. a first and a second rAAV inverted terminal repeat (ITR) sequence;
[0362] b. a first promoter sequence operably linked to the Type V CRISPR protein;
[0363] c. a sequence encoding a nuclear localization signal (NLS);
[0364] d. a 3′ UTR;
[0365] e. a poly(A) signal sequence;
[0366] f. a second promoter operably linked to the first gRNA; and
[0367] g. an accessory element.

[0368] Embodiment II-10. The rAAV transgene of embodiment II-9, wherein the first promoter is a pol II promoter selected from the group consisting of polyubiquitin C (UBC) promoter, cytomegalovirus (CMV) promoter, simian virus 40 (SV40) promoter, chicken beta-Actin promoter and rabbit beta-Globin splice acceptor site fusion (CAG), chicken β-actin promoter with cytomegalovirus enhancer (CB7), PGK promoter, Jens Tornoe (JeT) promoter, GUSB promoter, CBA hybrid (CBh) promoter, elongation factor-1 alpha (EF-1alpha) promoter, beta-actin promoter, Rous sarcoma virus (RSV) promoter, silencing-prone spleen focus forming virus (SFFV) promoter, CMVd1 promoter, truncated human CMV (tCMVd2) promoter, minimal CMV promoter, hepB promoter, chicken β-actin promoter, HSV TK promoter, Mini-TK promoter, minimal IL-2 promoter, GRP94 promoter, Super Core Promoter 1, Super Core Promoter 2, Super Core Promoter 3, adenovirus major late (AdML) promoter, MLC promoter, MCK promoter, GRK1 protein promoter, Rho promoter, CAR protein promoter, hSyn Promoter, U1a promoter, Ribosomal Protein Large subunit 30 (Rp130) promoter, Ribosomal Protein Small subunit 18 (Rps18) promoter, CMV53 promoter, minimal SV40 promoter, CMV53 promoter, SFCp promoter, Mecp2 promoter, pJB42CAT5 promoter, MLP promoter, EFS promoter, rhodopsin promoter, MeP426 promoter, MecP2 promoter, Desmin promoter, MHCK promoter, MHCK7 promoter, beta-glucuronidase (GUSB) promoter, CK7 promoter, and CK8e promoter.

[0369] Embodiment II-11. The rAAV transgene of embodiment II-9 or II-10, wherein the first promoter is a pol II promoter selected from the group consisting of U1A, UbC, and JeT.

[0370] Embodiment II-12. The rAAV transgene of any one of embodiments II-9 to II-13, wherein the first promoter comprises a sequence selected from the group consisting of SEQ ID NOS: 3532-3562, 3714-3739, 3773-3778, and 9344-9350, or a sequence having at least about 70%, at least about 80%, at least about 85%, at least about 90%, at least about 95%, at least about 95%, at least about 96%, at least about 97%, at least about 98%, or at least about 99% identity thereto.

[0371] Embodiment II-13. The polynucleotide of any one of embodiments II-9 to II-12, wherein the first promoter sequence has less than about 400 nucleotides, less than about 350 nucleotides, less than about 300 nucleotides, less than about 200 nucleotides, less than about 150 nucleotides, less than about 100 nucleotides, less than about 80 nucleotides, or less than about 40 nucleotides.

[0372] Embodiment II-14. The rAAV transgene of any one of embodiments II-9, wherein the second promoter is a pol III promoter selected from the group consisting of human U6 promoter, human U6 variant promoter, human U6 isoform variant promoter, mini U61 promoter, mini U62 promoter, mini U63 promoter, BiH1 (Bidrectional H1 promoter), BiU6 (Bidirectional U6 promoter), gorilla U6 promoter, rhesus U6 promoter, human 7sk promoter, and human H1 promoter.

[0373] Embodiment II-15. The rAAV transgene of embodiment II-14, wherein the second promoter is a pol III promoter selected from the group consisting of human U6, human U6 variant, or human U6 isoform variant.

[0374] Embodiment II-16. The rAAV transgene of embodiment II-15, wherein the second promoter comprises a sequence selected from the group consisting of SEQ ID NOS: 3563, 3566-3582, 3599-3602, 3740-3746, 4025, 4029, 4032, and 4743 or a sequence having at least about 70%, at least about 80%, at least about 85%, at least about 90%, at least about 95%, at least about 95%, at least about 96%, at least about 97%, at least about 98%, or at least about 99% identity thereto.

[0375] Embodiment II-17. The rAAV transgene of any one of embodiments II-14 to II-16, wherein the second promoter sequence has less than about 250 nucleotides, less than about 220 nucleotides, less than about 200 nucleotides, less than about 160 nucleotides, less than about 140 nucleotides, less than about 130 nucleotides, less than about 120 nucleotides, less than about 100 nucleotides, less than about 80 nucleotides, or less than about 70 nucleotides.

[0376] Embodiment II-18. The rAAV transgene of any one of embodiments II-9, wherein the poly(A) signal sequence is selected from the group consisting of SEQ ID NOS: 2401-3401, or a sequence having at least about 70%, at least about 80%, at least about 85%, at least about 90%, at least about 95%, at least about 95%, at least about 96%, at least about 97%, at least about 98%, or at least about 99% identity thereto.

[0377] Embodiment II-19. The rAAV transgene of any one of embodiments II-9, wherein the encoded NLS comprises a sequence selected from the group consisting of SEQ ID NOS: 3411-3486, 3939-3971, and 4065-4111.

[0378] Embodiment II-20. The rAAV transgene of any one of embodiments II-1 to II-19, wherein the transgene comprises a polynucleotide sequence encoding a second gRNA with a linked targeting sequence of 15 to 20 nucleotides complementary to a different or overlapping region of a target nucleic acid of a cell, as compared to the targeting sequence of the first gRNA.

[0379] Embodiment II-21. The rAAV transgene of any one of embodiments II-1 to II-20, wherein the first and/or the second gRNA each comprise:
[0380] a. a scaffold sequence selected from the group consisting of SEQ ID NOS: 2238-2400, 9257-9289 and 9588, or a sequence having at least about 70%, at least about 80%, at least about 85%, at least about 90%, at least about 91%, at least about 92%, at least about 93%, at least about 94%, at least about 95%, at least about 96%, at least about 97%, at least about 98%, or at least about 99% sequence identity thereto; or
[0381] b. a scaffold sequence selected from the group consisting of SEQ ID NOS: 2238-2400, 9257-9289 and 9588, further comprising at least 1, 2, 3, 4, or 5 mismatches thereto.

[0382] Embodiment II-22. The rAAV transgene of embodiment II-20 or II-21, wherein the first and the second gRNA each comprise a scaffold sequence of SEQ ID NO: 2293 or SEQ ID NO: 9588.

[0383] Embodiment II-23. The rAAV transgene of any one of embodiments II-20 to II-22, comprising a third promoter operably linked to the second gRNA.

[0384] Embodiment II-24. The rAAV transgene of embodiment II-23, wherein the third promoter is a pol III promoter selected from the group consisting of human U6, human U6 variant, human U6 isoform variant, mini U61, mini U62, mini U63, BiH1 (Bidirectional H1 promoter), BiU6 (Bidirectional U6 promoter), gorilla U6, rhesus U6, human 7sk, and human H1 promoters.

[0385] Embodiment II-25. The rAAV transgene of embodiment II-23, wherein the third promoter is a pol III promoter selected from the group consisting of human U6, human U6 variant, and human U6 isoform variant.

[0386] Embodiment II-26. The rAAV transgene of any one of embodiments II-23 to II-25, wherein the third promoter comprises a sequence selected from the group consisting of SEQ ID NOS: 3563, 3566-3582, 3599-3602, 3740-3746, 4025, 4029, 4032, and 4743, or a sequence having at least about 70%, at least about 80%, at least about 85%, at least about 90%, at least about 95%, at least about 95%, at least about 96%, at least about 97%, at least about 98%, or at least about 99% identity thereto.

[0387] Embodiment II-27. The rAAV transgene of any one of embodiments II-23 to II-26, wherein the third promoter sequence has less than about 250 nucleotides, less than about 220 nucleotides, less than about 200 nucleotides, less than about 160 nucleotides, less than about 140 nucleotides, less than about 130 nucleotides, less than about 120 nucleotides, less than about 100 nucleotides, less than about 80 nucleotides, or less than about 70 nucleotides.

[0388] Embodiment II-28. The rAAV transgene of any one of embodiments II-20 to II-27, wherein:
[0389] a. the polynucleotide sequence encoding the first gRNA and the polynucleotide sequence encoding the second gRNA are 5′ of the polynucleotide sequence encoding the CasX protein;
[0390] b. the polynucleotide sequence encoding the first gRNA is 5′ of the polynucleotide sequence encoding the CasX protein and the polynucleotide sequence encoding the second gRNA is 3′ of the polynucleotide sequence encoding the CasX protein;
[0391] c. the polynucleotide sequence encoding the first gRNA is 3′ of the polynucleotide sequence encoding the CasX protein and the polynucleotide sequence encoding the second gRNA is 5′ of the polynucleotide sequence encoding the CasX protein; or
[0392] d. the polynucleotide sequence encoding the first gRNA and the polynucleotide sequence encoding the second gRNA are 3′ of the polynucleotide sequence encoding the CasX protein.

[0393] Embodiment II-29. The rAAV transgene of any one of embodiments II-20 to II-28, wherein:
[0394] a. the polynucleotide sequence encoding the first gRNA and the polynucleotide sequence encoding the second gRNA are encoded in a forward orientation relative to the polynucleotide sequence encoding the CasX protein;
[0395] b. the polynucleotide sequence encoding the first gRNA is encoded in a forward orientation relative to the polynucleotide sequence encoding the CasX protein and the polynucleotide sequence encoding the second gRNA is encoded in a reverse orientation relative to the polynucleotide sequence encoding the CasX protein;
[0396] c. the polynucleotide sequence encoding the first gRNA is encoded in a reverse orientation relative to the polynucleotide sequence encoding the CasX protein and the polynucleotide sequence encoding the second gRNA is encoded in a forward orientation relative to the polynucleotide sequence encoding the CasX protein; or
[0397] d. the polynucleotide sequence encoding the first gRNA and the polynucleotide sequence encoding the second gRNA are encoded in a reverse orientation relative to the polynucleotide sequence encoding the CasX protein.

[0398] Embodiment II-30. The rAAV transgene of any one of embodiments II-20 to II-29, wherein the transgene has less than about 4800, less than about 4750, less than about 4700, less than about 4650 nucleotides, or less than about 4600 nucleotides.

[0399] Embodiment II-31. The rAAV transgene of any one of embodiments II-20 to II-30, wherein the rAAV transgene is configured for incorporation into an rAAV capsid.

[0400] Embodiment II-32. The rAAV transgene of any one of embodiments II-1 to II-31, wherein one or more components of the transgene are optimized to reduce or deplete CpG motifs.

[0401] Embodiment II-33. The rAAV transgene of embodiment II-32, wherein the one or more components comprise less than about 10%, less than about 5%, or less than about 1% CpG dinucleotides.

[0402] Embodiment II-34. The rAAV transgene of embodiment II-32 or II-33, wherein the CpG-depleted polynucleotide sequence encoding the CasX protein is selected from the group consisting of SEQ ID NOS: 9327-9333 and 9369-9380.

[0403] Embodiment II-35. The rAAV transgene of embodiment II-32 or II-33, wherein the CpG-depleted polynucleotide sequence encodes a gRNA scaffold, and is selected from the group consisting of SEQ ID NOS: 3751-3772.

[0404] Embodiment II-36. The rAAV transgene of embodiment II-32 or II-33, wherein the CpG-depleted polynucleotide sequence of the ITR is selected from the group consisting of SEQ ID NOS: 3749 and 3750.

[0405] Embodiment II-37. The rAAV transgene of embodiment II-32 or II-33, wherein the CpG-depleted polynucleotide sequence of the promoter is selected from the group consisting of SEQ ID NOS: 3735-3746.

[0406] Embodiment II-38. The rAAV transgene of embodiment II-32 or II-33, wherein the CpG-depleted polynucleotide sequence of the poly(A) signal is SEQ ID NO: 3748.

[0407] Embodiment II-39. The rAAV transgene of any one of embodiments II-1 to II-38, wherein the transgene has the configuration of a construct depicted in any one of FIGS. 1, 25, 28, 38-40, 47 and 75.

[0408] Embodiment II-40. A recombinant adeno-associated virus (rAAV) comprising:
[0409] a. an AAV capsid protein, and
[0410] b. the transgene of any one of embodiments II-1 to II-39.

[0411] Embodiment II-41. The rAAV of embodiment II-40, wherein the AAV capsid protein is derived from serotype AAV1, AAV2, AAV3, AAV4, AAV5, AAV6, AAV7, AAV8, AAV9, AAV10, AAV 11, AAV12, AAV 9.45, AAV 9.61, AAV 44.9, AAV-Rh74, AAVRh10, MyoAAV 1A1, MyoAAV 1A2, or MyoAAV 2A.

[0412] Embodiment II-42. The rAAV of embodiment II-41, wherein the AAV capsid protein and the 5′ and 3′ ITR are derived from the same serotype of AAV.

[0413] Embodiment II-43. The rAAV of embodiment II-41, wherein the AAV capsid protein and the 5′ and 3′ ITR are derived from different serotypes of AAV.

[0414] Embodiment II-44. The rAAV of embodiment II-43, wherein the 5′ and 3′ ITR are derived from AAV serotype 2.

[0415] Embodiment II-45. The rAAV of any one of embodiments II-40 to II-44, wherein upon transduction of a cell with the rAAV, the CasX protein and the first and/or the second gRNA encoded in the rAAV transgene are expressed.

[0416] Embodiment II-46. The rAAV of embodiment II-45, wherein upon expression, the first and/or the second gRNA is capable of forming a ribonucleoprotein (RNP) complex with the CasX protein.

[0417] Embodiment II-47. The rAAV of embodiment II-46, wherein the RNP is capable of binding and modifying a target nucleic acid of the cell.

[0418] Embodiment II-48. The rAAV of any one of embodiments II-40 to II-47, wherein inclusion of a poly(A) signal in the transgene enhances expression of the CasX protein and editing efficiency of a target nucleic acid in a cell transduced by the rAAV.

[0419] Embodiment II-49. The rAAV of any one of embodiments II-40 to II-47, wherein inclusion of a posttranscriptional regulatory element (PTRE) accessory element in the transgene enhances editing efficiency of a target nucleic acid in a cell transduced by the rAAV.

[0420] Embodiment II-50. The rAAV of embodiment II-49, wherein the PTRE comprises a sequence selected from the group consisting of SEQ ID NOS: 3615-3617, or a sequence having at least about 70%, at least about 80%, at least about 85%, at least about 90%, at least about 95%, at least about 95%, at least about 96%, at least about 97%, at least about 98%, or at least about 99% identity thereto.

[0421] Embodiment II-51. The rAAV of any one of embodiments II-40 to II-50, wherein components of the transgene modified for depletion of all or a portion of the CpG dinucleotides exhibit a lower potential for inducing an immune response in a cell transduced with the rAAV, compared to a rAAV wherein the components are not modified for depletion of the CpG dinucleotides.

[0422] Embodiment II-52. The rAAV of embodiment II-51, wherein the lower potential for inducing an immune response is exhibited in an in vitro mammalian cell assay designed to detect production of one or more markers of an inflammatory response selected from the group consisting of TLR9, interleukin-1 (IL-1), IL-6, IL-12, IL-18, tumor necrosis factor alpha (TNF-a), interferon gamma (IFNγ), and granulocyte-macrophage colony stimulating factor (GM-CSF).

[0423] Embodiment II-53. The rAAV of embodiment II-51 or II-52, wherein the rAAV comprising the component sequences modified for depletion of all or a portion of the CpG dinucleotides elicits reduced production of the one or more inflammatory markers of at least about 10%, at least about 20%, at least about 30%, at least about 40%, at least about 50%, at least about 60%, at least about 80%, or at least about 90% less compared to the comparable rAAV that is not CpG depleted.

[0424] Embodiment II-54. The rAAV of any one of embodiments II-51 to II-53, wherein the expressed CasX and the first and/or the second gRNA retain at least about 60%, at least about 70%, at least about 80%, or at least about 90% of the editing potential for a target nucleic acid compared to an rAAV wherein the transgene has not been optimized for depletion of CpG dinucleotides, when assayed in an in vitro assay under comparable conditions.

[0425] Embodiment II-55. The rAAV of embodiment II-40, wherein incorporation of a Pol II promoter selected from the group consisting of CK8e, MHCK7, and MHCK in the transgene of a rAAV used to transduce a muscle cell results in higher expression of the CasX protein in the muscle cell compared to incorporation of a UbC promoter.

[0426] Embodiment II-56. The rAAV of embodiment II-40, wherein incorporation of a muscle enhancer sequence selected from the group consisting of SEQ ID NOS: 3779-3809 in the transgene of a rAAV used to transduce a muscle cell results in higher expression of the CasX protein in the muscle cell compared to a rAAV not incorporating the muscle enhancer.

[0427] Embodiment II-57. A method for modifying a target nucleic acid of a gene in a population of mammalian cells, comprising contacting a plurality of the cells with an effective amount of the rAAV of any one of embodiments II-40 to II-56, wherein the target nucleic acid of the gene targeted by the first and/or the second gRNA is modified by the expressed CasX protein.

[0428] Embodiment II-58. The method of embodiment II-57, wherein the gene comprises one or more mutations.

[0429] Embodiment II-59. The method of embodiment II-57 or II-58, wherein the modifying comprises introducing an insertion, deletion, substitution, duplication, or inversion of one or more nucleotides in the target nucleic acid of the cells of the population.

[0430] Embodiment II-60. The method of any one of embodiments II-57 to II-59, wherein the gene is knocked down or knocked out.

[0431] Embodiment II-61. The method of any one of embodiments II-57 to II-59, wherein the gene is modified such that a functional gene product can be expressed.

[0432] Embodiment II-62. The method of any one of embodiments II-57 to II-61, wherein the rAAV comprises the first and the second gRNA, wherein the second gRNA comprises a targeting sequence complementary to a different target site in a gene targeted by the targeting sequence of the first gRNA, wherein the nucleotides between the target sites are excised by cleavage of the target sites by the CasX protein.

[0433] Embodiment II-63. The method of any one of embodiments II-57 to II-61, wherein the rAAV comprises the first and the second gRNA, wherein the second gRNA comprises a targeting sequence complementary to a target site in a different gene targeted by the targeting sequence of the first gRNA, wherein the target nucleic acid at each target site is modified by the CasX protein.

[0434] Embodiment II-64. A method of treating a disease in a subject caused by one or more mutations in a gene of the subject, comprising administering a therapeutically effective dose of the rAAV of any one of embodiments II-40 to II-56 to the subject.

[0435] Embodiment II-65. The method of embodiment II-62, wherein the rAAV is administered to the subject by a route of administration selected from subcutaneous, intradermal, intraneural, intranodal, intramedullary, intramuscular, intralumbar, intrathecal, subarachnoid, intraventricular, intracapsular, intravenous, intralymphatical, intraocular and intraperitoneal routes, and wherein the administration method is injection, transfusion, or implantation.

[0436] Embodiment II-66. The method of embodiment II-64 or II-65, wherein the subject is selected from the group consisting of mouse, rat, pig, and non-human primate.

[0437] Embodiment II-67. The method of embodiment II-64 or II-65, wherein the subject is a human.

[0438] Embodiment II-68. A method of making a rAAV, comprising:
[0439] a. providing a population of packaging cells; and
[0440] b. transfecting the population of cells with:
   [0441] i) a vector comprising the transgene of any one of embodiments II-1 to II-39;
   [0442] ii) a vector comprising an Assembly-Activating Protein (AAP) gene; and
   [0443] iii) a vector comprising rep and cap genomes.

[0444] Embodiment II-69. The method of embodiment II-68, wherein the packaging cell is selected from the group consisting of BHK cells, HEK293 cells, HEK293T cells, NSO cells, SP2/0 cells, YO myeloma cells, P3X63 mouse myeloma cells, PER cells, PER.C6 cells, hybridoma cells, NIH3T3 cells, COS cells, HeLa cells, and CHO cells.

[0445] Embodiment II-70. The method of embodiment II-68 or II-69, the method further comprising recovering the rAAV.

[0446] Embodiment II-71. The method of any one of embodiments II-68 to II-70, wherein the component sequences of the transgene are encompassed in a single recombinant adeno-associated virus particle.

[0447] Embodiment II-72. A composition of a recombinant adeno-associated virus of any one of embodiments II-35 to II-56, for use in the manufacture of a medicament for the treatment of a disease in a human in need thereof.

[0448] Embodiment II-73. A kit comprising the rAAV of any one of embodiment II-35 to II-56 and a suitable container.

[0449] Embodiment II-74. The kit of embodiment II-73, comprising a pharmaceutically acceptable carrier, diluent, buffer, or excipient.

### EXAMPLES

### Example 1: Small Class 2, Type V CRISPR Proteins can Edit the Genome when Expressed from an AAV Episome In Vitro

[0450] Experiments were conducted to demonstrate that small Class 2, Type V CRISPR proteins can edit a genome when expressed from an AAV plasmid or an AAV vector in vitro.

### Materials and Methods

[0451] The AAV transgene between the ITRs was broken into different parts, which consisted of the therapeutic cargo and accessory elements relevant to expression of the therapeutic cargo in mammalian cells. AAV vectorology consisted of identifying a parts list and subsequently designing, building, and testing vectors in both plasmid and AAV form in mammalian cells. A schematic of a representative AAV transgene and one configuration of its components is shown in FIG. 1.

[0452] In this first example, three plasmids were constructed (construct 1, construct 2, and construct 3; see Table 45 for component sequences), where the only difference in the plasmid sequence between the ITRs was in the affinity tag region.

### Cloning and QC:

[0453] AAV vectors were cloned using a 4-part Golden Gate Assembly consisting of a pre-digested AAV backbone, small CRISPR protein-encoding DNA, and flanking 5′ and 3′ DNA sequences. 5′ sequences contained enhancer, protein promoter and N-terminal NLS, while 3′ sequences contained C-terminal NLS, Woodchuck Hepatitis Virus (WHV) Posttranscriptional Regulatory Element (WPRE), poly(A) signal, RNA promoter and guide RNA containing spacer 12.7, targeting tdTomato (DNA sequence: CTGCATTCTAGTTGTGGTTT (SEQ ID NO: 4049)). 5′ and 3′ parts were ordered as gene fragments, PCR-amplified, and assembled into AAV vectors through cyclical Golden Gate reactions using T4 Ligase and BbsI.

[0454] Assembled AAV vectors were then transformed into chemically-competent E. coli (Stbl3s). Transformed cells were recovered for 1 hour in a 37° C. shaking incubator, plated on Kanamycin LB-Agar plates and allowed to grow at 37° C. for 12-16 hours. Colony PCR was performed to determine clones that contained full transgenes. Correct clones were inoculated in 50 mL of LB media with kanamycin and grown overnight. Plasmids were then midiprepped the following day and sequence-verified. To assess the quality of plasmid preparations, constructs were processed in restriction digests with XmaI (which cuts in each of the ITRs) and XhoI (which cuts once in the AAV genome). Digests and uncut constructs were then run on a 1% agarose gel and imaged on a ChemiDoc™. If the plasmid was >90% supercoiled, the correct size, and the ITRs were intact, the construct was tested via nucleofection and/or transduction.

### Method for Plasmid Nucleofection:

[0455] Plasmids containing the AAV genome were transfected in a mouse immortalized neural progenitor cell line isolated from the Ai9-tdTomato mouse neuroprogenitor cells (tdTomato mNPCs) using the Lonza P3 Primary Cell 96-well Nucleofector Kit. Briefly, Ai9 is a Cre reporter tool strain designed to have a loxP flanked STOP cassette preventing the transcription of a CAG promoter-driven tdTomato marker. Ai9 mice, or Ai9 mNPCs, express tdTomato following Cre-mediated recombination to remove the STOP cassette. Sequence-validated plasmids were diluted to concentrations of 200 ng/μl, 100 ng/μl, 50 ng/μL and 25 ng/μL, and 5 μL of each (1000 ng, 500 ng, 250 ng and 125 ng) were added to P3 solution containing 200,000 tdTomato mNPCs. The combined solution was nucleofected using a Lonza 4D Nucleofector System following program EH-100. Following nucleofection, the solution was quenched with pre-equilibrated mNPC medium (DMEM/F12 with GlutaMax™, 10 mM HEPES, 1×MEM Non-Essential Amino Acids, 1× penicillin/streptomycin, 1:1000 2-mercaptoethanol, 1×B-27 supplement, minus vitamin A, 1×N2 with supplemented growth factors bFGF and EGF (20 ng/mL final concentration). The solution was then aliquoted in triplicate (approx. 67,000 cells per well) in a 96-well plate coated with PLF (1× Poly-DL-ornithine hydrobromide, 10 mg/mL in sterile diH20, 1× laminin, and 1× fibronectin). 48 hours after transfection, treated cells were replenished with fresh mNPC media containing growth factors. 5 days after transfection, tdTomato mNPCs were lifted and activity was assessed by fluorescence activated cell sorting (FACS).

AAV production:

[0456] Suspension HEK293T cells were adapted from parental HEK293T and grown in FreeStyle 293 media. For screening purposes, small scale cultures (20-30 mL cultured in 125 mL Erlenmeyer flasks and agitated at 110 rpm) were diluted to a density of 1.5e+6 cells/mL on the day of transfection. Endotoxin-free pAAV plasmids with the transgene flanked by ITR repeats were co-transfected with plasmids supplying the adenoviral helper genes for replication and encoding AAV rep/cap proteins using PEI MAX® (Polysciences) in serum-free OPTI-MEM® media. Cultures were supplemented with 10% CDM4HEK293 (HyClone) 3 hours post-transfection. Three days later, cultures were centrifuged at 1000 rpm for 10 minutes to separate the supernatant from the cell pellet. The supernatant was mixed with 40% PEG 2.5M NaCl (8% final concentration) and incubated on ice for at least 2 hours to precipitate AAV viral particles. The cell pellet, containing the majority of the AAV vectors, was resuspended in lysis media (0.15 M NaCl, 50 mM Tris HCl, 0.05% Tween, pH 8.5), sonicated on ice (15 seconds, 30% amplitude) and treated with Benzonase (250 U/μL, Novagen) for 30 minutes at 37° C. Crude lysate and PEG-treated supernatant were then centrifuged at 4000 rpm for 20 minutes at 4° C. to resuspend the PEG precipitated AAV (pellet) with cell debris-free crude lysate (supernatant), and then clarified further using a 0.45 μM filter.

[0457] To determine the viral genome titer, 1 μL from crude lysate containing viruses was digested with DNase and proteinase K, followed by quantitative PCR. 5 μL of digested virus was used in a 25 μL qPCR reaction composed of IDT primetime master mix and a set of primer and 6′FAM/Zen/IBFQ probe (IDT) designed to amplify the CMV promoter region or a 62 nucleotide-fragment located in the AAV2-ITR. Ten-fold serial dilutions of an AAV ITR plasmid was used as reference standards to calculate the titer (viral genome (vg)/mL) of viral samples.

### AAV Transduction:

[0458] 10,000 cells/well of mNPCs were seeded on PLF-coated wells in 96-well plates 48-hours before AAV transduction. All viral infection conditions were performed in triplicate, with normalized number of vg among experimental vectors, in a series of 3-fold dilution of multiplicity of infection (MOI) ranging from −1.0e+6 to 1.0e+4 vg/cell. Final volumes of 50 μL of AAV vectors diluted in pre-equilibrated mNPC medium supplemented with bFGF/EGF growth factors (20 ng/ml final concentration) were applied to each well. 48 hours post-transfection, a complete media change was performed with fresh media supplemented with growth factors. Editing activity (tdT+ cell quantification) was assessed by FACS 5 days post-transfection.

### Method for Assessing Activity by FACS:

[0459] Five days after transfection, treated tdTomato mNPCs in 96-well plates were washed with dPBS and treated with 50 μL TrypLE for 15 minutes. Following cell dissociation, treated wells were quenched with media containing DMEM, 10% FBS and 1× penicillin/streptomycin. Resuspended cells were transferred to round-bottom 96-well plates and centrifuged for 5 min at 1000×g. Cell pellets were then resuspended with dPBS containing 1×DAPI, and plates were loaded into an Attune™ NxT Flow Cytometer Autosampler. The Attune™ NxT flow cytometer was run using the following gating parameters: FSC-A×SSC-A to select cells, FSC-H×FSC-A to select single cells, FSC-A×VL1-A to select DAPI-negative alive cells, and FSC-A×YL1-A to select tdTomato positive cells.

### Results

[0460] The results in the graph in FIG. 2 shows that CasX variant 491 and guide variant 174 with spacer 12.7 targeting the tdTomato stop cassette, when delivered by nucleofection of an AAV transgene plasmid, was able to edit the target stop cassette in mNPCs (measured by percentage of cells that are tdTom+ by FACS). Among the vectors tested, CasX 491.174 delivered in construct 3 (with 80% tdTomato+cells) outperformed the others. FIG. 3 shows that all three vectors tested achieved editing at the tdTomato locus in a dose-dependent manner. FIG. 4 shows results of editing using construct 3 in an AAV vector, which demonstrated a dose-dependent response, achieving a high degree of editing.

[0461] The experiments demonstrate that small Class 2, Type V CRISPR proteins (such as CasX) and targeted guides can edit the genome when expressed from an AAV transgene plasmid or episome in vitro.

### Example 2: Packaging of Small Class 2, Type V CRISPR Systems within an AAV Vector

[0462] Experiments were conducted to demonstrate that systems of small Class 2, Type V CRISPR proteins such as CasX and gRNA can be encoded and efficiently packaged within a single AAV vector.

### Materials and Methods

[0463] For this experiment, AAV vectors were generated with transgenes packaging CasX variant 438, gRNA scaffold 174 and spacer 12.7 using the methods for AAV production, purification and characterization, as described in Example 1. For characterization, AAV viral genomes were titered by qPCR, and the empty-full ratio was quantified using scanning transmission electron microscopy (STEM). The AAV were negatively stained with 1% uranyl acetate and visualized. Empty particles were identified by presence of a dark electron dense circle at the center of the capsid.

### Results

[0464] The genomic DNA titers (by qPCR) for the AAV preparation was measured to be 6e12 vg/mL, generated from 1 L of HEK293T cell culture. FIG. 5 is an image from a scanning transmission electron microscopy (STEM) micrograph showing that an estimated 90% of the particles in this AAV formulation contained viral genomes, i.e., loaded with the CRISPR cargo. These results demonstrate that sequences encoding CasX variant proteins and gRNA can be efficiently packaged in an AAV vector, resulting in high titers and high packaging efficiency.

### Example 3: In Vivo Editing of a Genome with Small Class 2, Type V CRISPR Proteins Expressed from an AAV Episome

[0465] Experiments were conducted to demonstrate that small Class 2, Type V CRISPR proteins, such as CasX, are capable of being delivered by AAV and can edit the genome when expressed from an AAV episome in vivo.

### Materials and Methods

[0466] For this experiment, AAV vectors were generated using the methods for AAV production, purification and characterization, as described in Example 1.

### In Vivo AAV Administration and Tissue Processing

[0467] P0-P1 pups from Ai9 mice were injected with AAV with a transgene encoding CasX variant 491 and guide variant 174 with spacer 12.7. Briefly, mice were cryo-anesthetized and 1-2 μL of AAV vector (˜1e11 viral genomes (vg)) was unilaterally injected into the intracerebroventricular (ICV) space using a Hamilton syringe (10 μL, Model 1701 RN SYR Cat No: 7653-01) fitted with a 33-gauge needle (small hub RN NDL—custom length 0.5 inches, point 4 (45 degrees)). Post-injection, pups were recovered on a warm heating pad before being returned to their cages. 1 month after ICV injections, animals were terminally anesthetized with an intraperitoneal injection of ketamine/xylazine, and perfused transcardially with saline and fixative (4% paraformaldehyde). Brains were dissected and further post-fixed in 4% PFA, followed by infiltration with 30% sucrose solution, and embedding in OCT compound. OCT-embedded brains were coronally sectioned using a cryostat. Sections were then mounted on slides, counter-stained with DAPI to label cell nuclei, cover slipped and imaged on a fluorescence microscope. Images were processed using ImageJ software and editing levels were quantified by counting the number of tdTom+ cells as a percentage of DAPI-labeled nuclei.

[0468] In a subsequent experiment to assess editing in peripheral tissues, particularly in the liver and in the heart, P0-P1 pups from Ai9 mice were cryo-anesthetized and were intravenously injected with ˜1e12 viral genomes (vg) of the same AAV construct in a 40 μL volume. Post-injection, pups were recovered on a warm heating pad before being returned to their cages. 1-month post-administration, animals were terminally anesthetized and heart and liver tissues were necropsied and processed as described above.

### Results

[0469] FIG. 6 provides comparative immunohistochemistry (IHC) images of brain tissue processed from an Ai9 mouse that received an ICV injection of AAV packaging CasX variant 491 and guide scaffold 174 with spacer 12.7. The tissue was stained with 4′,6-diamidino-2-phenylindole. The signal from cells in the tdTom channel indicates that the tdTom locus within these cells was successfully edited. The tdTom+ cells (in white) are distributed evenly across all regions of the brain, indicating that ICV-administered AAVs packaging the encoded CasX, guide and spacer were able to reach and edit these cells (top panel) as compared to a non-targeting control (bottom panel). The FIG. 6 images are representative of those obtained from 3 mice for each group. Additionally, the results presented in FIG. 59A (liver) and 59B (heart) demonstrate that the AAV were able to distribute within the liver and the heart (edited cells in white) and edit the genome when expressed from single AAV episomes in vivo.

[0470] The results demonstrate that that AAV encoding small CRISPR proteins (such as CasX) and a targeting guide can distribute within the tissues, when delivered either locally (brain) or systemically, and edit the target genome when expressed from single AAV episomes in vivo.

### Example 4: Small CRISPR Protein Potency is Enhanced by AAV Vector Protein Promoter Choice

[0471] Experiments were conducted to demonstrate that small CRISPR protein expression and editing can be enhanced by utilizing different promoters in an AAV construct for the encoded protein. Cargo space in the AAV transgene can be maximized with the use of short promoters in combination with small CRISPR proteins such as CasX. Additionally, experiments were conducted to demonstrate that expression can be enhanced with the use of promoters that would otherwise be too long to be efficiently packaged in AAV vector, if they were combined with larger CRISPR proteins, such as Cas9. The use of long, cell-type-specific promoters to enhance small CRISPR proteins is an advantage to the AAV system described herein, and not possible in traditional CRISPR systems due to the size of traditional CRISPR proteins.

### Materials and Methods

[0472] Cloning and QC were conducted as described in Example 1. Promoter variants (Table 7) were cloned upstream of CasX protein in an AAV-cis plasmid. The sequences of the additional components of the AAV constructs, with the exception of sequences encoding the CasX (Table 26) and the one or more gRNA (Tables 23 and 24), are listed in Table 45.

TABLE 7
Promoter variant sequences

| | | | Promoter |
|---|---|---|---|
| SEQ | Construct | Promoter | length |
| ID NO: | ID | based on | (bp) |
| 3532 | 1, 2, 3, 7, 44 | CMV | 584 |
| 3533 | 4 | UbC | 400 |
| 3534 | 5 | EFS | 234 |
| 3535 | 6 | CMV-s | 335 |
| 3536 | 8 | CMVd1 | 100 |
| 3537 | 9 | CMVd2 | 52 |
| 3538 | 10 | miniCMV | 39 |
| 3539 | 11, 26 | HSVTK | 146 |
| 3540 | 12 | miniTK | 63 |
| 3541 | 13 | miniIL2 | 114 |
| 3542 | 14 | GRP94 | 710 |
| 3543 | 15 | Supercore 1 | 81 |
| 3544 | 16 | Supercore 2 | 81 |
| 3545 | 17 | Supercore 3 | 81 |
| 3546 | 18 | Mecp2 | 229 |
| 3547 | 19 | CMVmini | 68 |
| 3548 | 20 | CMVmini2 | 65 |
| 3549 | 21 | miniCMVIE | 39 |
| 3550 | 22 | adML | 81 |
| 3551 | 23 | hepB | 107 |
| 3552 | 54 | RSV | 227 |
| 3553 | 55 | hSyn | 448 |
| 3554 | 56 | SV40 | 330 |
| 3555 | 57 | hPGK | 551 |
| 3556 | 58 | Jet | 164 |
| 3557 | 59 | Jet + UsP intron | 326 |
| 3558 | 60 | hRLP30 | 325 |
| 3559 | 61 | hRPS18 | 243 |
| 3560 | 62 | CBA | 493 |
| 3561 | 63 | CBH | 565 |
| 3562 | 64 | CMV core | 204 |

### Method for Plasmid Nucleofection:

[0473] Immortalized neural progenitor cells were nucleofected as described in Example 1. Sequence-validated plasmids were diluted to concentrations of 200 ng/ul, 100 ng/ul, 50 ng/μL and 25 ng/μL, and 5 μL of each (1000 ng, 500 ng, 250 ng and 125 ng) were added to P3 solution containing 200,000 tdTomato mNPCs.

[0474] AAV viral production and QC, and AAV transduction and editing level assessment in mNPTC-tdT cells by FACS were conducted as described in Example 1.

### Results

[0475] The results of FIG. 7 demonstrate that several different promoters with CasX protein 438, scaffold variant 174 and spacer targeting the tdTomato stop cassette (spacer 12.7, with sequence CTGCATTCTAGTTGTGGTTT (SEQ ID NO: 4049)), when delivered by nucleofection of AAV transgene plasmid, were able to edit the target stop cassette in mNPCs at a dose of 1000 ng. These promoters ranged in length from over 700 nucleotides to as short as 81 nucleotides (Table 7). Among the promoters tested, construct 7 and 14 showed considerable editing potency.

[0476] The results of FIG. 8 demonstrate that several short promoters combined with CasX variant 491, scaffold variant 174 and spacer 12.7, when delivered by nucleofection of AAV transgene plasmid, edit the target stop cassette in mNPCs at a dose of 500 ng. Other than construct 2, which had a promoter of 584 nucleotides, all constructs had promoters that were less than 250 nucleotides in length. Among the protein promoters tested, construct 15 showed considerable editing potency, especially given its short length (81 nucleotides).

[0477] The results of FIG. 9 demonstrate that four promoters with CasX variant 491 and scaffold variant 174 with spacer 12.7, when delivered by nucleofection of AAV transgene plasmid, edit the target stop cassette in mNPCs at doses of 125 ng and 62.5 ng. Constructs 4, 5 and 6 have promoter lengths less than or equal to 400 nucleotides, and thus may maximize editing potency while minimizing AAV cargo capacity.

[0478] The results shown in FIG. 10 demonstrate that use of four promoter variants in the AAV also result in robust editing. Briefly, AAVs (AAV.3, AAV.4, AAV.5 and AAV.6) were generated with transgene constructs 3-6, respectively. Each construct showed dose-dependent editing at the target locus (FIG. 10, left panel). At an MOI of 2e5, AAV.4 showed editing at 38%±3% at the target locus, outperforming the other constructs (FIG. 10, right panel).

[0479] In the experiments performed for the results portrayed in FIG. 11, several new protein promoters were compared against the top 4 protein promoter variants identified previously (AAV.3, AAV.4, AAV.5 and AAV.6). Briefly, AAVs were generated with corresponding transgene constructs and transduced in tdTomato mNPCs. At an MOI of 3e5 at 5 days after transduction, multiple promoters displayed improved editing (FIG. 11). In particular, constructs 58 and 59 had editing activity above 30% while minimizing transgene size (FIG. 12). Construct 58 and 59 contained promoters that are 420 and 258 bp smaller, respectively, than construct 3, yet resulted in similar or improved editing of the target locus. In particular, inclusion of an intron in the promoter of construct 59 led to increased editing compared to construct 58, which lacked the intron, demonstrating that the inclusion of introns in the AAV construct promoters is beneficial.

[0480] The results demonstrate that expression of small CRISPR proteins (such as CasX) can be enhanced by utilizing long promoters that would otherwise be unusable in AAV constructs with traditional CRISPR proteins due to the size constraints of the AAV genome. Furthermore, combining short promoters with small CRISPR proteins (such as CasX) allows for significant reductions in AAV transgene cargo capacity without compromising expression efficiency. This conservation of space allows for the inclusion of additional accessory elements, such as enhancers and regulatory elements in the transgene, which would enable increased editing potential. Example 35 further demonstrates and evaluates various protein promoters on CasX protein editing activity in a cell-based assay.

### Example 5: Potency of Small CRISPR Systems is Enhanced by AAV RNA Promoter Choice

[0481] Experiments were conducted to demonstrate that the editing potency of small CRISPR systems, such as CasX, can be enhanced if certain promoters are chosen for expression of the guide RNA, which recognizes target DNA for editing, in an AAV vector. By using RNA promoters with different strengths, guide RNA expression can be modulated, which affects editing potency. The AAV platform based on the CasX system provides enough cargo space in the AAV to include at least 2 independent promoters for the expression of two incorporated guide RNAs. By combining different promoters, expression of multiple guide RNAs can be tuned within a single AAV transgene. Engineering shorter versions of RNA promoters that still retain editing potency also results in increased space in the vector for the inclusion of other accessory elements in the AAV transgene.

### Materials and Methods

[0482] The methods of Example 1 were used for cloning and quality control of the constructs, as well as for plasmid nucleofection and AAV production, transduction, and FACS analyses. The sequences of the Pol III promoters are presented in Table 8. The sequences of the additional components of the AAV constructs, with the exception of sequences encoding the CasX (Table 26) and the one or more gRNA (Tables 23 and 24), are listed in Table 45.

TABLE 8
Sequences of Pol III promoters.

| | | | Promoter |
|---|---|---|---|
| SEQ | AAV | Pol III | length |
| ID NO: | construct ID | promoter | (bp) |
| 3563 | 3, 53, 157 | hU6 isoform 1 | 241 |
| 3564 | 32, 158 | H1 | 215 |
| 3565 | 33 | 7SK | 267 |
| 3566 | 85/89 | hU6 variant 1 | 103 |
| 3567 | 86 | hU6 variant 2 | 38 |
| 3568 | 87 | hU6 variant 3 | 67 |
| 3569 | 88 | hU6 variant 4 | 79 |
| 3570 | 90 | hU6 variant 5 | 111 |
| 3571 | 91 | hU6 variant 6 | 127 |
| 3572 | 92 | hU6 variant 7 | 123 |
| 3573 | 93 | hU6 variant 8 | 143 |
| 3574 | 94 | hU6 variant 9 | 131 |
| 3575 | 95 | hU6 variant 10 | 159 |
| 3576 | 96 | hU6 variant 11 | 103 |
| 3577 | 97 | hU6 variant 12 | 111 |
| 3578 | 98 | hU6 variant 13 | 127 |
| 3579 | 99 | hU6 variant 14 | 103 |
| 3580 | 100 | hU6 variant 15 | 131 |
| 3581 | 101 | hU6 variant 16 | 159 |
| 3582 | 102 | hU6 variant 17 | 128 |
| 3583 | 159 | H1 core | 91 |
| 3584 | 160 | H1 core + 7SK hybrid 1 | 92 |
| 3585 | 161 | H1 core + 7SK hybrid 2 | 92 |
| 3586 | 162 | H1 core + 7SK hybrid 3 | 91 |
| 3587 | 163 | H1 core + 7SK hybrid 4 | 91 |
| 3588 | 164 | H1 core + 7SK hybrid 5 | 92 |
| 3589 | 165 | H1 core + 7SK hybrid 6 | 91 |
| 3590 | 166 | H1 core + 7SK hybrid 7 | 91 |
| 3591 | 167 | H1 core + 7SK hybrid 8 | 91 |
| 3592 | 168 | H1 core + 7SK hybrid 9 | 92 |
| 3593 | 169 | H1 core + U6 hybrid 1 | 91 |
| 3594 | 170 | H1 core + U6 hybrid 2 | 94 |
| 3595 | 171 | H1 core + 7SK + | 92 |
| | | U6 hybrid 1 | |
| 3596 | 172 | H1 core + U6 hybrid 3 | 90 |
| 3597 | 173 | H1 core + 7SK + | 94 |
| | | U6 hybrid 2 | |
| 3598 | 174 | H1 core + 7SK + | 94 |
| | | U6 hybrid 3 | |
| 3599 | — | hU6 isoform 2 | 249 |
| 3600 | — | hU6 isoform 3 | 249 |
| 3601 | — | hU6 isoform 4 | 249 |
| 3602 | — | hU6 isoform 5 | 249 |
| 3603 | — | mU6 | 304 |
| 3604 | — | mU6 isoform | 314 |
| 3605 | — | gorilla U6 | 241 |
| 3606 | — | Saimiri U6 | 229 |
| 3607 | — | Macaca U6 | 240 |
| 3608 | — | Papio U6 | 240 |
| 3609 | — | Rhinopithecus U6 | 240 |
| 3610 | — | Mini Gorilla U6 | 103 |
| 3611 | — | Mini Saimiri U6 | 102 |
| 3612 | — | Mini Macaca U6 | 102 |
| 3613 | — | Mini Papio U6 | 102 |
| 3614 | — | Mini Rhinopithecus U6 | 102 |

### Results

[0483] The results portrayed in FIG. 13 demonstrate that AAV vectors using three distinct RNA promoters, in combination with CasX protein 491, scaffold variant 174 and spacer 12.7, when delivered by nucleofection of the AAV transgene plasmid, edit the target stop cassette in mNPCs at doses of 250 ng and 125 ng. Construct 3 (U6 promoter) and construct 32 (H1 promoter) have similar activity, editing at the target locus with 42% efficiency. Construct 33 shows ˜56% of the activity of constructs 3 and 32.

[0484] The results portrayed in FIG. 14 demonstrate that the same three distinct promoters, in combination with CasX protein 491, scaffold variant 174 and spacer 12.7, when delivered as AAV, edit the target stop cassette in mNPCs. AAV.3, AAV.32, AAV.33 were generated with transgene constructs 3, 32 and 33 respectively. Each vector displayed dose-dependent editing at the target locus (FIG. 14, left panel). At an MOI of 3e5, AAV.32 and AAV.33 had 50-60% of the potency of AAV.3 (FIG. 14, right panel).

[0485] The results shown in FIG. 15 demonstrate that constructs having one of four different truncations of the U6 promoter, in combination with CasX protein 491, scaffold variant 174 and spacer 12.7, when delivered by nucleofection of the AAV transgene plasmid, were each able to edit the target stop cassette at different levels in mNPCs at doses of 250 ng and 125 ng. Construct 85 (hU6 variant 1) had 33% of the potency of the base construct 53 (hU6), while construct 86 (hU6 variant 2), construct 87 (hU6 variant 3) and construct 88 (hU6 variant 4) did not show any editing and were comparable to a non-targeting control.

[0486] FIG. 16 presents results of an experiment comparing editing in mNPCs between AAV generated with base construct 53 (hU6 promoter) to AAV generated with construct 85 (hU6 variant 1). When delivered as AAV, AAV.85 was able to edit at 7% compared to 15% for AAV.53 at an MOI of 3e5, consistent with the results from FIG. 15.

[0487] The results of FIG. 17 demonstrate that constructs with engineered U6 promoters were able to edit the target stop cassette at different levels in mNPCs at doses of 250 ng and 125 ng. Engineered U6 promoters were designed to minimize the size of the promoter relative to the base U6 promoter. Construct AAV.53 carried the hU6 promoter, in combination with encoded CasX protein 491, scaffold variant 174 and spacer 12.7, and the constructs with the variant promoters carried the same CasX, scaffold and spacer as AAV.53. Constructs were delivered to mNPCs by nucleofection of AAV transgene plasmid, and were able to edit the target stop cassette at different levels in mNPCs at doses of 250 ng and 125 ng. One cluster of constructs (AAV.89 (hU6 variant 1), 90 (hU6 variant 5), 92 (hU6 variant 7), 93 (hU6 variant 8), 96 (hU6 variant 11), 97 (hU6 variant 12), 98 (hU6 variant 13), and 99 (hU6 variant 14)) all edited in the range of 15-20%, compared to 55% for construct AAV53. Other Pol III variants (constructs AAV94 (hU6 variant 9), 95 (hU6 variant 10) and 100 (hU6 variant 15)) all exhibited higher levels of editing at around 32% editing while construct 101 resulted in 48% editing. These promoters are all smaller than the Pol III promoter in the base construct AAV53, as shown in the scatterplot of FIG. 18, depicting transgene size of all AAV variants tested having engineered U6 RNA promoters on the X-axis vs. percent of mNPCs edited on the Y-axis.

[0488] The results depicted in FIG. 19 show that constructs with engineered U6 promoters with CasX 491, scaffold variant 174 and spacer 12.7, when delivered as AAV, were able to edit the target stop cassette in mNPCs in a dose-dependent fashion. Variable rates of editing mediated by AAV with constructs AAV.94, AAV.95, AAV.100, and AAV.101 were seen, all editing at rates between the base construct AAV.53 and AAV.89, which has the same Pol III promoter as AAV.85 from FIGS. 15 and 16.

[0489] The results in FIG. 20 show that constructs with engineered U6 promoters with CasX protein 491, scaffold variant 174 and spacer 12.7, when delivered as AAV, were able to edit the target stop cassette in mNPCs. Variable rates of editing with AAV with constructs AAV.94, AAV.95, AAV.100, and AAV.101 were seen, all editing at rates between the base construct AAV.53 and AAV.89, which has the same Pol III promoter as AAV.85 from FIGS. 15 and 16. FIG. 21 shows the results as a scatterplot of editing versus transgene size.

[0490] The results depicted in FIG. 73 demonstrate that AAV constructs with rationally engineered Pol III promoters, with sequences encoding for CasX protein 491, scaffold variant 174, and spacer 12.7, were able to edit the target tdTomato stop cassette at varying efficiencies when nucleofected as AAV transgene plasmids into mouse NPCs at doses 250 ng and 125 ng. Constructs 159 to 174 were designed to minimize the size of the promoter relative to the base U6 (construct ID 157) or H1 (construct ID 158) promoter, and constructs 160 to 174 were engineered as short, hybrid variants based on a core region of the H1 promoter (construct 159) with variations of domain swaps from 7SK and/or U6 promoters. FIG. 73 shows that most of these promoter variants, which are substantially shorter than the base U6 and H1 promoters, were able to function as Pol III promoters to drive sufficient gRNA transcription and editing at the tdTomato locus. Specifically, constructs 159, 161, 162, 165, and 167 were able to achieve at least 30% editing at the higher dose of 250 ng. These variants serve as promoter alternatives in AAV construct design that would permit significant reductions in AAV cargo capacity while driving adequate gRNA expression for targeted editing.

[0491] Additional RNA promoters can be identified via substitutions and deletions of the U6 promoter and mining for alternative guide RNA promoters from non-human species. To test these RNA promoters in a high-throughput manner, a screening assay is developed to test a library of U6 promotor sequences (SEQ ID NOS: 48-100, 513-566, 594-2100, and 4133-9256) containing all single bp substitutions and single-, double-, 5-, and 10-bp deletions of the human U6 promoter and alternative non-human primate RNA promoters. This library of sequences is synthesized as DNA oligos, amplified and cloned into a lentiviral construct containing different CasX variants, including CasX variants 491, 515, 593, 668, 672, 676, and 812, gRNA scaffold 235 with spacer 34.19, which edits the HBEGF locus and confers cell survival. Briefly, HBEGF is a receptor that mediates entry of diphtheria toxin, which, when added to the cells, inhibits translation and results in cell death. Targeting the HBEGF locus with CasX and HBEGF-targeting spacer should prevent toxin entry and allow cell survival. The resulting lentiviral library is used to transduce HEK293T cells, followed by selection at 2 ng/mL of toxin for 48 hours. After selection, genomic DNA (gDNA) is isolated and used to PCR an amplicon containing the U6 promoter in the surviving cells. These amplicons are sequenced, and frequencies are compared to the pre-selection library to identify U6 promoters that increase in frequency by resulting in more potent CasX:gRNA-mediated editing of the HBEGF locus. This screening assay may be repeated at higher doses, various timepoints, and different cell types to identify more active U6 promoters that induce greater CasX:gRNA-mediated editing. The results of these screens are expected to allow for a ranking of U6 promoters by fitness scores, many of which are anticipated to be better than the current set of lead molecules described in the preceding Examples. The U6 promoters that result in strong survival in all cell types across the doses utilized are prioritized for further characterization as elements in AAV vectors.

[0492] The results of these experiments demonstrate that expression of small CRISPR systems, such as CasX and gRNAs, can be modulated in various ways by utilizing alternative RNA promoters to express the gRNA. While most other CRISPR systems utilized in AAV do not have sufficient space in the transgene to include a separate promoter to express the gRNA, the CasX CRISPR system, and other systems with similarly small size, enable the use of multiple gRNA promoters of varying lengths within a single AAV transgene. These promoters can be used to differentially control expression and editing by the AAV transgene. The data also show that shorter versions of Pol III promoters can be engineered to retain their ability to facilitate transcription of functional guides. This increases the capacity of the AAV transgene to include additional promoters and/or accessory elements. Furthermore, adjusting other elements in the AAV transgene allows for the combination of multiple gRNA transcriptional units that could result in the following: 1) increased gRNA expression and thus CasX-mediated editing; or 2) driving the expression of more than one gRNA from a single AAV system, which would enable the ability to deliver CasX with a dual-gRNA system from a single AAV vector for targeted editing at different locations in the genome (further discussed in Example 9).

### Example 6: Choice of Poly(A) Signal Sequence Enhances Potency of AAV Vectors

[0493] Experiments were conducted to demonstrate that small CRISPR proteins, such as CasX, can be expressed from an AAV genome utilizing a variety of polyadenylation (poly(A)) signal sequences. Specifically, use of sequences encoding smaller CRISPR systems enable the inclusion of larger poly(A) signal sequences in the transgene of AAV vectors. In addition, experiments were conducted to demonstrate that the inclusion of shorter synthetic poly(A) signal sequences in the AAV constructs allows for further reductions in the AAV transgene cargo capacity.

### Materials and Methods

### AAV Plasmid Cloning:

[0494] Poly(A) signal sequences within the AAV genome were separated by restriction enzyme sites to allow for modular cloning. Polyadenylation sequences were ordered as gene fragments and cloned into vector restriction sites according to standard techniques.

[0495] To generate the AAV plasmids assessed in the experiments resulting in the data presented in FIG. 22 and FIG. 23, the methods of Example 1 were used for cloning and quality control of the constructs, as well as for plasmid nucleofection and FACS analysis. The sequences of the poly(A) signals are presented in Table 9. The sequences of the additional components of AAV constructs, with the exception of sequences encoding the CasX (Table 26) and the one or more gRNA (Tables 23 and 24), are listed in Table 45.

TABLE 9
Poly(A) signal sequences

| AAV | | Poly(A) signal | SEQ |
|---|---|---|---|
| Construct ID | Poly(A) signal | sequence length (bp) | ID NO |
| 1, 3, 37, 232 | bGH | 208 | 3401 |
| 24, 227 | hGH | 623 | 3402 |
| 25, 228 | hGHshort | 477 | 3403 |
| 26, 231 | HSVTK | 49 | 3404 |
| 27, 221 | SynPolyA | 49 | 3405 |
| 28, 226 | SV40 | 122 | 3406 |
| 29 | SV40short | 82 | 3407 |
| 30, 229 | bglob | 395 | 3408 |
| 31, 230 | bglobshort | 56 | 3409 |
| 34 | SV40polyA late (SL) | 181 | 3410 |
| 222 | T7 Tphi | 119 | 9336 |
| 223 | CaMV | 175 | 9337 |
| 224 | RDH1 | 171 | 9338 |
| 225 | Sv40 polyA late | 241 | 9339 |

[0496] Methods for plasmid nucleofection and assessing activity by FACS were conducted as described in Example 1.

### Neuronal Cell Culture:

[0497] All neuronal cell culture was performed using N2B327-based media. To induce neuronal differentiation, iPSCs were plated in neuronal plating media (N2B327 base media with 1 μg/mL doxycycline, 200 μM L-ascorbic acid, 1 μM dibutyryl cAMP sodium salt, 10 μM CultureOne, 100 ng/ml of BDNF, 100 ng/ml of GDNF). iNs (induced neurons) were dissociated, aliquoted, and frozen for long term storage after three days of differentiation (DIV3). DIV3 iNs were thawed and seeded on a 96-well plate at ˜30,000-50,000 cells per well. iNs were cultured for one week in plating media and thereafter, half-media changes were performed once every week using feeding media (N2B327 base media with 200 μM L-ascorbic acid, 1 μM dibutyryl cAMP sodium salt, 200 ng/ml of BDNF, 200 ng/ml of GDNF).

### AAV Transduction of iNs In Vitro:

[0498] 24 hours prior to transduction, -30,000-50,000 iNs per well were seeded on Matrigel-coated 96-well plates. AAVs expressing the CasX:gRNA system, which included constructs encoding for poly(A) signal sequences listed in Table 12, were then diluted in neuronal plating media and added to cells. Cells were transduced at two MOIs (1E2 or 1E3 vg/cell). Seven days post-transduction, iNs were replenished using feeding media. Seven days post-transduction, cells were lifted using lysis buffer, 4-well replicates were pooled per experimental condition, and genomic DNA (gDNA) was harvested and prepared for editing analysis at the B2M locus using next generation sequencing (NGS).

### NGS Processing and Analysis:

[0499] Genomic DNA (gDNA) from harvested cells was extracted using the Zymo Quick-DNA™ Miniprep Plus kit following the manufacturer's instructions. Target amplicons were formed by amplifying regions of interest from 200 ng of extracted gDNA with a set of primers specific to the target locus, such as the human B2M gene. These gene-specific primers contained an additional sequence at the 5′ end to introduce an Illumina™ adapter and a 16-nucleotide unique molecule identifier. Amplified DNA products were purified with the Ampure XP DNA cleanup kit. Quality and quantification of the amplicon were assessed using a Fragment Analyzer DNA Analysis kit (Agilent, dsDNA 35-1500 bp). Amplicons were sequenced on the Illumina™ Miseq™ according to the manufacturer's instructions. Raw fastq files from sequencing were quality-controlled and processed using cutadapt v2.1, flash2 v2.2.00, and CRISPResso2 v2.0.29. Each sequence was quantified for containing an insertion or deletion (indel) relative to the reference sequence, in a window around the 3′ end of the spacer (30 bp window centered at −3 bp from 3′ end of spacer). CasX activity was quantified as the total percent of reads that contain insertions, substitutions, and/or deletions anywhere within this window for each sample.

### Cloning Poly(A) Signal Sequence Library for High-Throughput Screen:

[0500] To identify poly(A) signals that enable CasX to be expressed in an AAV genome in a high-throughput manner, a massively parallel reporter assay was conducted. Briefly, 10,000 poly(A) constructs (1,000 unique poly(A) signal sequences×10 barcodes per poly(A) signal sequence) were amplified, digested, and ligated into a restriction enzyme-digested AAV plasmid backbone harboring sequences coding for CasX protein 491 and gRNA scaffold variant 235 with spacer 7.37 (GGCCGAGAUGUCUCGCUCCG; SEQ ID NO: 4059) targeting the endogenous B2M (beta-2-microglobulin) locus. The 1000 unique poly(A) signal sequences, designated as Poly(A)_1 through Poly(A)_1001 (SEQ ID NOS: 2401-3401) are provided in Table 10. Cloned AAV plasmids were then transformed into electrocompetent bacterial cells (MegaX DH1B T1® Electrocomp™). Titer of poly(A) signal sequence library transformation was determined by counting E. coli colony-forming units (CFUs) from electroporated library yEGA-X Competent cells. After transformation and overnight growth in liquid cultures, the library was purified using the ZymoPURE™ Midiprep Kit. To determine adequate library coverage, barcoded amplicons were detected via PCR amplification followed by NGS on the Illumina™ MiSeq™. Raw fastq files were processed using cutadapt v3.5, mapped using bowtie2 v9.3.0, and barcodes were extracted using custom software. Barcoded counts were normalized by total read counts to calculate the representation of each library member.

TABLE 10
Poly(A) Signal Sequence Library

| | Poly(A) signal |
|---|---|
| Poly(A) | sequence |
| signal ID | (SEQ ID NO) |
| Poly(A)_1 | 2401 |
| Poly(A)_2 | 2402 |
| Poly(A)_3 | 2403 |
| Poly(A)_4 | 2404 |
| Poly(A)_5 | 2405 |
| Poly(A)_6 | 2406 |
| Poly(A)_7 | 2407 |
| Poly(A)_8 | 2408 |
| Poly(A)_9 | 2409 |
| Poly(A)_10 | 2410 |
| Poly(A)_11 | 2411 |
| Poly(A)_12 | 2412 |
| Poly(A)_13 | 2413 |
| Poly(A)_14 | 2414 |
| Poly(A)_15 | 2415 |
| Poly(A)_16 | 2416 |
| Poly(A)_17 | 2417 |
| Poly(A)_18 | 2418 |
| Poly(A)_19 | 2419 |
| Poly(A)_20 | 2420 |
| Poly(A)_21 | 2421 |
| Poly(A)_22 | 2422 |
| Poly(A)_23 | 2423 |
| Poly(A)_24 | 2424 |
| Poly(A)_25 | 2425 |
| Poly(A)_26 | 2426 |
| Poly(A)_27 | 2427 |
| Poly(A)_28 | 2428 |
| Poly(A)_29 | 2429 |
| Poly(A)_30 | 2430 |
| Poly(A)_31 | 2431 |
| Poly(A)_32 | 2432 |
| Poly(A)_33 | 2433 |
| Poly(A)_34 | 2434 |
| Poly(A)_35 | 2435 |
| Poly(A)_36 | 2436 |
| Poly(A)_37 | 2437 |
| Poly(A)_38 | 2438 |
| Poly(A)_39 | 2439 |
| Poly(A)_40 | 2440 |
| Poly(A)_41 | 2441 |
| Poly(A)_42 | 2442 |
| Poly(A)_43 | 2443 |
| Poly(A)_44 | 2444 |
| Poly(A)_45 | 2445 |
| Poly(A)_46 | 2446 |
| Poly(A)_47 | 2447 |
| Poly(A)_48 | 2448 |
| Poly(A)_49 | 2449 |
| Poly(A)_50 | 2450 |
| Poly(A)_51 | 2451 |
| Poly(A)_52 | 2452 |
| Poly(A)_53 | 2453 |
| Poly(A)_54 | 2454 |
| Poly(A)_55 | 2455 |
| Poly(A)_56 | 2456 |
| Poly(A)_57 | 2457 |
| Poly(A)_58 | 2458 |
| Poly(A)_59 | 2459 |
| Poly(A)_60 | 2460 |
| Poly(A)_61 | 2461 |
| Poly(A)_62 | 2462 |
| Poly(A)_63 | 2463 |
| Poly(A)_64 | 2464 |
| Poly(A)_65 | 2465 |
| Poly(A)_66 | 2466 |
| Poly(A)_67 | 2467 |
| Poly(A)_68 | 2468 |
| Poly(A)_69 | 2469 |
| Poly(A)_70 | 2470 |
| Poly(A)_71 | 2471 |
| Poly(A)_72 | 2472 |
| Poly(A)_73 | 2473 |
| Poly(A)_74 | 2474 |
| Poly(A)_75 | 2475 |
| Poly(A)_76 | 2476 |
| Poly(A)_77 | 2477 |
| Poly(A)_78 | 2478 |
| Poly(A)_79 | 2479 |
| Poly(A)_80 | 2480 |
| Poly(A)_81 | 2481 |
| Poly(A)_82 | 2482 |
| Poly(A)_83 | 2483 |
| Poly(A)_84 | 2484 |
| Poly(A)_85 | 2485 |
| Poly(A)_86 | 2486 |
| Poly(A)_87 | 2487 |
| Poly(A)_88 | 2488 |
| Poly(A)_89 | 2489 |
| Poly(A)_90 | 2490 |
| Poly(A)_91 | 2491 |
| Poly(A)_92 | 2492 |
| Poly(A)_93 | 2493 |
| Poly(A)_94 | 2494 |
| Poly(A)_95 | 2495 |
| Poly(A)_96 | 2496 |
| Poly(A)_97 | 2497 |
| Poly(A)_98 | 2498 |
| Poly(A)_99 | 2499 |
| Poly(A)_100 | 2500 |
| Poly(A)_101 | 2501 |
| Poly(A)_102 | 2502 |
| Poly(A)_103 | 2503 |
| Poly(A)_104 | 2504 |
| Poly(A)_105 | 2505 |
| Poly(A)_106 | 2506 |
| Poly(A)_107 | 2507 |
| Poly(A)_108 | 2508 |
| Poly(A)_109 | 2509 |
| Poly(A)_110 | 2510 |
| Poly(A)_111 | 2511 |
| Poly(A)_112 | 2512 |
| Poly(A)_113 | 2513 |
| Poly(A)_114 | 2514 |
| Poly(A)_115 | 2515 |
| Poly(A)_116 | 2516 |
| Poly(A)_117 | 2517 |
| Poly(A)_118 | 2518 |
| Poly(A)_119 | 2519 |
| Poly(A)_120 | 2520 |
| Poly(A)_121 | 2521 |
| Poly(A)_122 | 2522 |
| Poly(A)_123 | 2523 |
| Poly(A)_124 | 2524 |
| Poly(A)_125 | 2525 |
| Poly(A)_126 | 2526 |
| Poly(A)_127 | 2527 |
| Poly(A)_128 | 2528 |
| Poly(A)_129 | 2529 |
| Poly(A)_130 | 2530 |
| Poly(A)_131 | 2531 |
| Poly(A)_132 | 2532 |
| Poly(A)_133 | 2533 |
| Poly(A)_134 | 2534 |
| Poly(A)_135 | 2535 |
| Poly(A)_136 | 2536 |
| Poly(A)_137 | 2537 |
| Poly(A)_138 | 2538 |
| Poly(A)_139 | 2539 |
| Poly(A)_140 | 2540 |
| Poly(A)_141 | 2541 |
| Poly(A)_142 | 2542 |
| Poly(A)_143 | 2543 |
| Poly(A)_144 | 2544 |
| Poly(A)_145 | 2545 |
| Poly(A)_146 | 2546 |
| Poly(A)_147 | 2547 |
| Poly(A)_148 | 2548 |
| Poly(A)_149 | 2549 |
| Poly(A)_150 | 2550 |
| Poly(A)_151 | 2551 |
| Poly(A)_152 | 2552 |
| Poly(A)_153 | 2553 |
| Poly(A)_154 | 2554 |
| Poly(A)_155 | 2555 |
| Poly(A)_156 | 2556 |
| Poly(A)_157 | 2557 |
| Poly(A)_158 | 2558 |
| Poly(A)_159 | 2559 |
| Poly(A)_160 | 2560 |
| Poly(A)_161 | 2561 |
| Poly(A)_162 | 2562 |
| Poly(A)_163 | 2563 |
| Poly(A)_164 | 2564 |
| Poly(A)_165 | 2565 |
| Poly(A)_166 | 2566 |
| Poly(A)_167 | 2567 |
| Poly(A)_168 | 2568 |
| Poly(A)_169 | 2569 |
| Poly(A)_170 | 2570 |
| Poly(A)_171 | 2571 |
| Poly(A)_172 | 2572 |
| Poly(A)_173 | 2573 |
| Poly(A)_174 | 2574 |
| Poly(A)_175 | 2575 |
| Poly(A)_176 | 2576 |
| Poly(A)_177 | 2577 |
| Poly(A)_178 | 2578 |
| Poly(A)_179 | 2579 |
| Poly(A)_180 | 2580 |
| Poly(A)_181 | 2581 |
| Poly(A)_182 | 2582 |
| Poly(A)_183 | 2583 |
| Poly(A)_184 | 2584 |
| Poly(A)_185 | 2585 |
| Poly(A)_186 | 2586 |
| Poly(A)_187 | 2587 |
| Poly(A)_188 | 2588 |
| Poly(A)_189 | 2589 |
| Poly(A)_190 | 2590 |
| Poly(A)_191 | 2591 |
| Poly(A)_192 | 2592 |
| Poly(A)_193 | 2593 |
| Poly(A)_194 | 2594 |
| Poly(A)_195 | 2595 |
| Poly(A)_196 | 2596 |
| Poly(A)_197 | 2597 |
| Poly(A)_198 | 2598 |
| Poly(A)_199 | 2599 |
| Poly(A)_200 | 2600 |
| Poly(A)_201 | 2601 |
| Poly(A)_202 | 2602 |
| Poly(A)_203 | 2603 |
| Poly(A)_204 | 2604 |
| Poly(A)_205 | 2605 |
| Poly(A)_206 | 2606 |
| Poly(A)_207 | 2607 |
| Poly(A)_208 | 2608 |
| Poly(A)_209 | 2609 |
| Poly(A)_210 | 2610 |
| Poly(A)_211 | 2611 |
| Poly(A)_212 | 2612 |
| Poly(A)_213 | 2613 |
| Poly(A)_214 | 2614 |
| Poly(A)_215 | 2615 |
| Poly(A)_216 | 2616 |
| Poly(A)_217 | 2617 |
| Poly(A)_218 | 2618 |
| Poly(A)_219 | 2619 |
| Poly(A)_220 | 2620 |
| Poly(A)_221 | 2621 |
| Poly(A)_222 | 2622 |
| Poly(A)_223 | 2623 |
| Poly(A)_224 | 2624 |
| Poly(A)_225 | 2625 |
| Poly(A)_226 | 2626 |
| Poly(A)_227 | 2627 |
| Poly(A)_228 | 2628 |
| Poly(A)_229 | 2629 |
| Poly(A)_230 | 2630 |
| Poly(A)_231 | 2631 |
| Poly(A)_232 | 2632 |
| Poly(A)_233 | 2633 |
| Poly(A)_234 | 2634 |
| Poly(A)_235 | 2635 |
| Poly(A)_236 | 2636 |
| Poly(A)_237 | 2637 |
| Poly(A)_238 | 2638 |
| Poly(A)_239 | 2639 |
| Poly(A)_240 | 2640 |
| Poly(A)_241 | 2641 |
| Poly(A)_242 | 2642 |
| Poly(A)_243 | 2643 |
| Poly(A)_244 | 2644 |
| Poly(A)_245 | 2645 |
| Poly(A)_246 | 2646 |
| Poly(A)_247 | 2647 |
| Poly(A)_248 | 2648 |
| Poly(A)_249 | 2649 |
| Poly(A)_250 | 2650 |
| Poly(A)_251 | 2651 |
| Poly(A)_252 | 2652 |
| Poly(A)_253 | 2653 |
| Poly(A)_254 | 2654 |
| Poly(A)_255 | 2655 |
| Poly(A)_256 | 2656 |
| Poly(A)_257 | 2657 |
| Poly(A)_258 | 2658 |
| Poly(A)_259 | 2659 |
| Poly(A)_260 | 2660 |
| Poly(A)_261 | 2661 |
| Poly(A)_262 | 2662 |
| Poly(A)_263 | 2663 |
| Poly(A)_264 | 2664 |
| Poly(A)_265 | 2665 |
| Poly(A)_266 | 2666 |
| Poly(A)_267 | 2667 |
| Poly(A)_268 | 2668 |
| Poly(A)_269 | 2669 |
| Poly(A)_270 | 2670 |
| Poly(A)_271 | 2671 |
| Poly(A)_272 | 2672 |
| Poly(A)_273 | 2673 |
| Poly(A)_274 | 2674 |
| Poly(A)_275 | 2675 |
| Poly(A)_276 | 2676 |
| Poly(A)_277 | 2677 |
| Poly(A)_278 | 2678 |
| Poly(A)_279 | 2679 |
| Poly(A)_280 | 2680 |
| Poly(A)_281 | 2681 |
| Poly(A)_282 | 2682 |
| Poly(A)_283 | 2683 |
| Poly(A)_284 | 2684 |
| Poly(A)_285 | 2685 |
| Poly(A)_286 | 2686 |
| Poly(A)_287 | 2687 |
| Poly(A)_288 | 2688 |
| Poly(A)_289 | 2689 |
| Poly(A)_290 | 2690 |
| Poly(A)_291 | 2691 |
| Poly(A)_292 | 2692 |
| Poly(A)_293 | 2693 |
| Poly(A)_294 | 2694 |
| Poly(A)_295 | 2695 |
| Poly(A)_296 | 2696 |
| Poly(A)_297 | 2697 |
| Poly(A)_298 | 2698 |
| Poly(A)_299 | 2699 |
| Poly(A)_300 | 2700 |
| Poly(A)_301 | 2701 |
| Poly(A)_302 | 2702 |
| Poly(A)_303 | 2703 |
| Poly(A)_304 | 2704 |
| Poly(A)_305 | 2705 |
| Poly(A)_306 | 2706 |
| Poly(A)_307 | 2707 |
| Poly(A)_308 | 2708 |
| Poly(A)_309 | 2709 |
| Poly(A)_310 | 2710 |
| Poly(A)_311 | 2711 |
| Poly(A)_312 | 2712 |
| Poly(A)_313 | 2713 |
| Poly(A)_314 | 2714 |
| Poly(A)_315 | 2715 |
| Poly(A)_316 | 2716 |
| Poly(A)_317 | 2717 |
| Poly(A)_318 | 2718 |
| Poly(A)_319 | 2719 |
| Poly(A)_320 | 2720 |
| Poly(A)_321 | 2721 |
| Poly(A)_322 | 2722 |
| Poly(A)_323 | 2723 |
| Poly(A)_324 | 2724 |
| Poly(A)_325 | 2725 |
| Poly(A)_326 | 2726 |
| Poly(A)_327 | 2727 |
| Poly(A)_328 | 2728 |
| Poly(A)_329 | 2729 |
| Poly(A)_330 | 2730 |
| Poly(A)_331 | 2731 |
| Poly(A)_332 | 2732 |
| Poly(A)_333 | 2733 |
| Poly(A)_334 | 2734 |
| Poly(A)_335 | 2735 |
| Poly(A)_336 | 2736 |
| Poly(A)_337 | 2737 |
| Poly(A)_338 | 2738 |
| Poly(A)_339 | 2739 |
| Poly(A)_340 | 2740 |
| Poly(A)_341 | 2741 |
| Poly(A)_342 | 2742 |
| Poly(A)_343 | 2743 |
| Poly(A)_344 | 2744 |
| Poly(A)_345 | 2745 |
| Poly(A)_346 | 2746 |
| Poly(A)_347 | 2747 |
| Poly(A)_348 | 2748 |
| Poly(A)_349 | 2749 |
| Poly(A)_350 | 2750 |
| Poly(A)_351 | 2751 |
| Poly(A)_352 | 2752 |
| Poly(A)_353 | 2753 |
| Poly(A)_354 | 2754 |
| Poly(A)_355 | 2755 |
| Poly(A)_356 | 2756 |
| Poly(A)_357 | 2757 |
| Poly(A)_358 | 2758 |
| Poly(A)_359 | 2759 |
| Poly(A)_360 | 2760 |
| Poly(A)_361 | 2761 |
| Poly(A)_362 | 2762 |
| Poly(A)_363 | 2763 |
| Poly(A)_364 | 2764 |
| Poly(A)_365 | 2765 |
| Poly(A)_366 | 2766 |
| Poly(A)_367 | 2767 |
| Poly(A)_368 | 2768 |
| Poly(A)_369 | 2769 |
| Poly(A)_370 | 2770 |
| Poly(A)_371 | 2771 |
| Poly(A)_372 | 2772 |
| Poly(A)_373 | 2773 |
| Poly(A)_374 | 2774 |
| Poly(A)_375 | 2775 |
| Poly(A)_376 | 2776 |
| Poly(A)_377 | 2777 |
| Poly(A)_378 | 2778 |
| Poly(A)_379 | 2779 |
| Poly(A)_380 | 2780 |
| Poly(A)_381 | 2781 |
| Poly(A)_382 | 2782 |
| Poly(A)_383 | 2783 |
| Poly(A)_384 | 2784 |
| Poly(A)_385 | 2785 |
| Poly(A)_386 | 2786 |
| Poly(A)_387 | 2787 |
| Poly(A)_388 | 2788 |
| Poly(A)_389 | 2789 |
| Poly(A)_390 | 2790 |
| Poly(A)_391 | 2791 |
| Poly(A)_392 | 2792 |
| Poly(A)_393 | 2793 |
| Poly(A)_394 | 2794 |
| Poly(A)_395 | 2795 |
| Poly(A)_396 | 2796 |
| Poly(A)_397 | 2797 |
| Poly(A)_398 | 2798 |
| Poly(A)_399 | 2799 |
| Poly(A)_400 | 2800 |
| Poly(A)_401 | 2801 |
| Poly(A)_402 | 2802 |
| Poly(A)_403 | 2803 |
| Poly(A)_404 | 2804 |
| Poly(A)_405 | 2805 |
| Poly(A)_406 | 2806 |
| Poly(A)_407 | 2807 |
| Poly(A)_408 | 2808 |
| Poly(A)_409 | 2809 |
| Poly(A)_410 | 2810 |
| Poly(A)_411 | 2811 |
| Poly(A)_412 | 2812 |
| Poly(A)_413 | 2813 |
| Poly(A)_414 | 2814 |
| Poly(A)_415 | 2815 |
| Poly(A)_416 | 2816 |
| Poly(A)_417 | 2817 |
| Poly(A)_418 | 2818 |
| Poly(A)_419 | 2819 |
| Poly(A)_420 | 2820 |
| Poly(A)_421 | 2821 |
| Poly(A)_422 | 2822 |
| Poly(A)_423 | 2823 |
| Poly(A)_424 | 2824 |
| Poly(A)_425 | 2825 |
| Poly(A)_426 | 2826 |
| Poly(A)_427 | 2827 |
| Poly(A)_428 | 2828 |
| Poly(A)_429 | 2829 |
| Poly(A)_430 | 2830 |
| Poly(A)_431 | 2831 |
| Poly(A)_432 | 2832 |
| Poly(A)_433 | 2833 |
| Poly(A)_434 | 2834 |
| Poly(A)_435 | 2835 |
| Poly(A)_436 | 2836 |
| Poly(A)_437 | 2837 |
| Poly(A)_438 | 2838 |
| Poly(A)_439 | 2839 |
| Poly(A)_440 | 2840 |
| Poly(A)_441 | 2841 |
| Poly(A)_442 | 2842 |
| Poly(A)_443 | 2843 |
| Poly(A)_444 | 2844 |
| Poly(A)_445 | 2845 |
| Poly(A)_446 | 2846 |
| Poly(A)_447 | 2847 |
| Poly(A)_448 | 2848 |
| Poly(A)_449 | 2849 |
| Poly(A)_450 | 2850 |
| Poly(A)_451 | 2851 |
| Poly(A)_452 | 2852 |
| Poly(A)_453 | 2853 |
| Poly(A)_454 | 2854 |
| Poly(A)_455 | 2855 |
| Poly(A)_456 | 2856 |
| Poly(A)_457 | 2857 |
| Poly(A)_458 | 2858 |
| Poly(A)_459 | 2859 |
| Poly(A)_460 | 2860 |
| Poly(A)_461 | 2861 |
| Poly(A)_462 | 2862 |
| Poly(A)_463 | 2863 |
| Poly(A)_464 | 2864 |
| Poly(A)_465 | 2865 |
| Poly(A)_466 | 2866 |
| Poly(A)_467 | 2867 |
| Poly(A)_468 | 2868 |
| Poly(A)_469 | 2869 |
| Poly(A)_470 | 2870 |
| Poly(A)_471 | 2871 |
| Poly(A)_472 | 2872 |
| Poly(A)_473 | 2873 |
| Poly(A)_474 | 2874 |
| Poly(A)_475 | 2875 |
| Poly(A)_476 | 2876 |
| Poly(A)_477 | 2877 |
| Poly(A)_478 | 2878 |
| Poly(A)_479 | 2879 |
| Poly(A)_480 | 2880 |
| Poly(A)_481 | 2881 |
| Poly(A)_482 | 2882 |
| Poly(A)_483 | 2883 |
| Poly(A)_484 | 2884 |
| Poly(A)_485 | 2885 |
| Poly(A)_486 | 2886 |
| Poly(A)_487 | 2887 |
| Poly(A)_488 | 2888 |
| Poly(A)_489 | 2889 |
| Poly(A)_490 | 2890 |
| Poly(A)_491 | 2891 |
| Poly(A)_492 | 2892 |
| Poly(A)_493 | 2893 |
| Poly(A)_494 | 2894 |
| Poly(A)_495 | 2895 |
| Poly(A)_496 | 2896 |
| Poly(A)_497 | 2897 |
| Poly(A)_498 | 2898 |
| Poly(A)_499 | 2899 |
| Poly(A)_500 | 2900 |
| Poly(A)_501 | 2901 |
| Poly(A)_502 | 2902 |
| Poly(A)_503 | 2903 |
| Poly(A)_504 | 2904 |
| Poly(A)_505 | 2905 |
| Poly(A)_506 | 2906 |
| Poly(A)_507 | 2907 |
| Poly(A)_508 | 2908 |
| Poly(A)_509 | 2909 |
| Poly(A)_510 | 2910 |
| Poly(A)_511 | 2911 |
| Poly(A)_512 | 2912 |
| Poly(A)_513 | 2913 |
| Poly(A)_514 | 2914 |
| Poly(A)_515 | 2915 |
| Poly(A)_516 | 2916 |
| Poly(A)_517 | 2917 |
| Poly(A)_518 | 2918 |
| Poly(A)_519 | 2919 |
| Poly(A)_520 | 2920 |
| Poly(A)_521 | 2921 |
| Poly(A)_522 | 2922 |
| Poly(A)_523 | 2923 |
| Poly(A)_524 | 2924 |
| Poly(A)_525 | 2925 |
| Poly(A)_526 | 2926 |
| Poly(A)_527 | 2927 |
| Poly(A)_528 | 2928 |
| Poly(A)_529 | 2929 |
| Poly(A)_530 | 2930 |
| Poly(A)_531 | 2931 |
| Poly(A)_532 | 2932 |
| Poly(A)_533 | 2933 |
| Poly(A)_534 | 2934 |
| Poly(A)_535 | 2935 |
| Poly(A)_536 | 2936 |
| Poly(A)_537 | 2937 |
| Poly(A)_538 | 2938 |
| Poly(A)_539 | 2939 |
| Poly(A)_540 | 2940 |
| Poly(A)_541 | 2941 |
| Poly(A)_542 | 2942 |
| Poly(A)_543 | 2943 |
| Poly(A)_544 | 2944 |
| Poly(A)_545 | 2945 |
| Poly(A)_546 | 2946 |
| Poly(A)_547 | 2947 |
| Poly(A)_548 | 2948 |
| Poly(A)_549 | 2949 |
| Poly(A)_550 | 2950 |
| Poly(A)_551 | 2951 |
| Poly(A)_552 | 2952 |
| Poly(A)_553 | 2953 |
| Poly(A)_554 | 2954 |
| Poly(A)_555 | 2955 |
| Poly(A)_556 | 2956 |
| Poly(A)_557 | 2957 |
| Poly(A)_558 | 2958 |
| Poly(A)_559 | 2959 |
| Poly(A)_560 | 2960 |
| Poly(A)_561 | 2961 |
| Poly(A)_562 | 2962 |
| Poly(A)_563 | 2963 |
| Poly(A)_564 | 2964 |
| Poly(A)_565 | 2965 |
| Poly(A)_566 | 2966 |
| Poly(A)_567 | 2967 |
| Poly(A)_568 | 2968 |
| Poly(A)_569 | 2969 |
| Poly(A)_570 | 2970 |
| Poly(A)_571 | 2971 |
| Poly(A)_572 | 2972 |
| Poly(A)_573 | 2973 |
| Poly(A)_574 | 2974 |
| Poly(A)_575 | 2975 |
| Poly(A)_576 | 2976 |
| Poly(A)_577 | 2977 |
| Poly(A)_578 | 2978 |
| Poly(A)_579 | 2979 |
| Poly(A)_580 | 2980 |
| Poly(A)_581 | 2981 |
| Poly(A)_582 | 2982 |
| Poly(A)_583 | 2983 |
| Poly(A)_584 | 2984 |
| Poly(A)_585 | 2985 |
| Poly(A)_586 | 2986 |
| Poly(A)_587 | 2987 |
| Poly(A)_588 | 2988 |
| Poly(A)_589 | 2989 |
| Poly(A)_590 | 2990 |
| Poly(A)_591 | 2991 |
| Poly(A)_592 | 2992 |
| Poly(A)_593 | 2993 |
| Poly(A)_594 | 2994 |
| Poly(A)_595 | 2995 |
| Poly(A)_596 | 2996 |
| Poly(A)_597 | 2997 |
| Poly(A)_598 | 2998 |
| Poly(A)_599 | 2999 |
| Poly(A)_600 | 3000 |
| Poly(A)_601 | 3001 |
| Poly(A)_602 | 3002 |
| Poly(A)_603 | 3003 |
| Poly(A)_604 | 3004 |
| Poly(A)_605 | 3005 |
| Poly(A)_606 | 3006 |
| Poly(A)_607 | 3007 |
| Poly(A)_608 | 3008 |
| Poly(A)_609 | 3009 |
| Poly(A)_610 | 3010 |
| Poly(A)_611 | 3011 |
| Poly(A)_612 | 3012 |
| Poly(A)_613 | 3013 |
| Poly(A)_614 | 3014 |
| Poly(A)_615 | 3015 |
| Poly(A)_616 | 3016 |
| Poly(A)_617 | 3017 |
| Poly(A)_618 | 3018 |
| Poly(A)_619 | 3019 |
| Poly(A)_620 | 3020 |
| Poly(A)_621 | 3021 |
| Poly(A)_622 | 3022 |
| Poly(A)_623 | 3023 |
| Poly(A)_624 | 3024 |
| Poly(A)_625 | 3025 |
| Poly(A)_626 | 3026 |
| Poly(A)_627 | 3027 |
| Poly(A)_628 | 3028 |
| Poly(A)_629 | 3029 |
| Poly(A)_630 | 3030 |
| Poly(A)_631 | 3031 |
| Poly(A)_632 | 3032 |
| Poly(A)_633 | 3033 |
| Poly(A)_634 | 3034 |
| Poly(A)_635 | 3035 |
| Poly(A)_636 | 3036 |
| Poly(A)_637 | 3037 |
| Poly(A)_638 | 3038 |
| Poly(A)_639 | 3039 |
| Poly(A)_640 | 3040 |
| Poly(A)_641 | 3041 |
| Poly(A)_642 | 3042 |
| Poly(A)_643 | 3043 |
| Poly(A)_644 | 3044 |
| Poly(A)_645 | 3045 |
| Poly(A)_646 | 3046 |
| Poly(A)_647 | 3047 |
| Poly(A)_648 | 3048 |
| Poly(A)_649 | 3049 |
| Poly(A)_650 | 3050 |
| Poly(A)_651 | 3051 |
| Poly(A)_652 | 3052 |
| Poly(A)_653 | 3053 |
| Poly(A)_654 | 3054 |
| Poly(A)_655 | 3055 |
| Poly(A)_656 | 3056 |
| Poly(A)_657 | 3057 |
| Poly(A)_658 | 3058 |
| Poly(A)_659 | 3059 |
| Poly(A)_660 | 3060 |
| Poly(A)_661 | 3061 |
| Poly(A)_662 | 3062 |
| Poly(A)_663 | 3063 |
| Poly(A)_664 | 3064 |
| Poly(A)_665 | 3065 |
| Poly(A)_666 | 3066 |
| Poly(A)_667 | 3067 |
| Poly(A)_668 | 3068 |
| Poly(A)_669 | 3069 |
| Poly(A)_670 | 3070 |
| Poly(A)_671 | 3071 |
| Poly(A)_672 | 3072 |
| Poly(A)_673 | 3073 |
| Poly(A)_674 | 3074 |
| Poly(A)_675 | 3075 |
| Poly(A)_676 | 3076 |
| Poly(A)_677 | 3077 |
| Poly(A)_678 | 3078 |
| Poly(A)_679 | 3079 |
| Poly(A)_680 | 3080 |
| Poly(A)_681 | 3081 |
| Poly(A)_682 | 3082 |
| Poly(A)_683 | 3083 |
| Poly(A)_684 | 3084 |
| Poly(A)_685 | 3085 |
| Poly(A)_686 | 3086 |
| Poly(A)_687 | 3087 |
| Poly(A)_688 | 3088 |
| Poly(A)_689 | 3089 |
| Poly(A)_690 | 3090 |
| Poly(A)_691 | 3091 |
| Poly(A)_692 | 3092 |
| Poly(A)_693 | 3093 |
| Poly(A)_694 | 3094 |
| Poly(A)_695 | 3095 |
| Poly(A)_696 | 3096 |
| Poly(A)_697 | 3097 |
| Poly(A)_698 | 3098 |
| Poly(A)_699 | 3099 |
| Poly(A)_700 | 3100 |
| Poly(A)_701 | 3101 |
| Poly(A)_702 | 3102 |
| Poly(A)_703 | 3103 |
| Poly(A)_704 | 3104 |
| Poly(A)_705 | 3105 |
| Poly(A)_706 | 3106 |
| Poly(A)_707 | 3107 |
| Poly(A)_708 | 3108 |
| Poly(A)_709 | 3109 |
| Poly(A)_710 | 3110 |
| Poly(A)_711 | 3111 |
| Poly(A)_712 | 3112 |
| Poly(A)_713 | 3113 |
| Poly(A)_714 | 3114 |
| Poly(A)_715 | 3115 |
| Poly(A)_716 | 3116 |
| Poly(A)_717 | 3117 |
| Poly(A)_718 | 3118 |
| Poly(A)_719 | 3119 |
| Poly(A)_720 | 3120 |
| Poly(A)_721 | 3121 |
| Poly(A)_722 | 3122 |
| Poly(A)_723 | 3123 |
| Poly(A)_724 | 3124 |
| Poly(A)_725 | 3125 |
| Poly(A)_726 | 3126 |
| Poly(A)_727 | 3127 |
| Poly(A)_728 | 3128 |
| Poly(A)_729 | 3129 |
| Poly(A)_730 | 3130 |
| Poly(A)_731 | 3131 |
| Poly(A)_732 | 3132 |
| Poly(A)_733 | 3133 |
| Poly(A)_734 | 3134 |
| Poly(A)_735 | 3135 |
| Poly(A)_736 | 3136 |
| Poly(A)_737 | 3137 |
| Poly(A)_738 | 3138 |
| Poly(A)_739 | 3139 |
| Poly(A)_740 | 3140 |
| Poly(A)_741 | 3141 |
| Poly(A)_742 | 3142 |
| Poly(A)_743 | 3143 |
| Poly(A)_744 | 3144 |
| Poly(A)_745 | 3145 |
| Poly(A)_746 | 3146 |
| Poly(A)_747 | 3147 |
| Poly(A)_748 | 3148 |
| Poly(A)_749 | 3149 |
| Poly(A)_750 | 3150 |
| Poly(A)_751 | 3151 |
| Poly(A)_752 | 3152 |
| Poly(A)_753 | 3153 |
| Poly(A)_754 | 3154 |
| Poly(A)_755 | 3155 |
| Poly(A)_756 | 3156 |
| Poly(A)_757 | 3157 |
| Poly(A)_758 | 3158 |
| Poly(A)_759 | 3159 |
| Poly(A)_760 | 3160 |
| Poly(A)_761 | 3161 |
| Poly(A)_762 | 3162 |
| Poly(A)_763 | 3163 |
| Poly(A)_764 | 3164 |
| Poly(A)_765 | 3165 |
| Poly(A)_766 | 3166 |
| Poly(A)_767 | 3167 |
| Poly(A)_768 | 3168 |
| Poly(A)_769 | 3169 |
| Poly(A)_770 | 3170 |
| Poly(A)_771 | 3171 |
| Poly(A)_772 | 3172 |
| Poly(A)_773 | 3173 |
| Poly(A)_774 | 3174 |
| Poly(A)_775 | 3175 |
| Poly(A)_776 | 3176 |
| Poly(A)_777 | 3177 |
| Poly(A)_778 | 3178 |
| Poly(A)_779 | 3179 |
| Poly(A)_780 | 3180 |
| Poly(A)_781 | 3181 |
| Poly(A)_782 | 3182 |
| Poly(A)_783 | 3183 |
| Poly(A)_784 | 3184 |
| Poly(A)_785 | 3185 |
| Poly(A)_786 | 3186 |
| Poly(A)_787 | 3187 |
| Poly(A)_788 | 3188 |
| Poly(A)_789 | 3189 |
| Poly(A)_790 | 3190 |
| Poly(A)_791 | 3191 |
| Poly(A)_792 | 3192 |
| Poly(A)_793 | 3193 |
| Poly(A)_794 | 3194 |
| Poly(A)_795 | 3195 |
| Poly(A)_796 | 3196 |
| Poly(A)_797 | 3197 |
| Poly(A)_798 | 3198 |
| Poly(A)_799 | 3199 |
| Poly(A)_800 | 3200 |
| Poly(A)_801 | 3201 |
| Poly(A)_802 | 3202 |
| Poly(A)_803 | 3203 |
| Poly(A)_804 | 3204 |
| Poly(A)_805 | 3205 |
| Poly(A)_806 | 3206 |
| Poly(A)_807 | 3207 |
| Poly(A)_808 | 3208 |
| Poly(A)_809 | 3209 |
| Poly(A)_810 | 3210 |
| Poly(A)_811 | 3211 |
| Poly(A)_812 | 3212 |
| Poly(A)_813 | 3213 |
| Poly(A)_814 | 3214 |
| Poly(A)_815 | 3215 |
| Poly(A)_816 | 3216 |
| Poly(A)_817 | 3217 |
| Poly(A)_818 | 3218 |
| Poly(A)_819 | 3219 |
| Poly(A)_820 | 3220 |
| Poly(A)_821 | 3221 |
| Poly(A)_822 | 3222 |
| Poly(A)_823 | 3223 |
| Poly(A)_824 | 3224 |
| Poly(A)_825 | 3225 |
| Poly(A)_826 | 3226 |
| Poly(A)_827 | 3227 |
| Poly(A)_828 | 3228 |
| Poly(A)_829 | 3229 |
| Poly(A)_830 | 3230 |
| Poly(A)_831 | 3231 |
| Poly(A)_832 | 3232 |
| Poly(A)_833 | 3233 |
| Poly(A)_834 | 3234 |
| Poly(A)_835 | 3235 |
| Poly(A)_836 | 3236 |
| Poly(A)_837 | 3237 |
| Poly(A)_838 | 3238 |
| Poly(A)_839 | 3239 |
| Poly(A)_840 | 3240 |
| Poly(A)_841 | 3241 |
| Poly(A)_842 | 3242 |
| Poly(A)_843 | 3243 |
| Poly(A)_844 | 3244 |
| Poly(A)_845 | 3245 |
| Poly(A)_846 | 3246 |
| Poly(A)_847 | 3247 |
| Poly(A)_848 | 3248 |
| Poly(A)_849 | 3249 |
| Poly(A)_850 | 3250 |
| Poly(A)_851 | 3251 |
| Poly(A)_852 | 3252 |
| Poly(A)_853 | 3253 |
| Poly(A)_854 | 3254 |
| Poly(A)_855 | 3255 |
| Poly(A)_856 | 3256 |
| Poly(A)_857 | 3257 |
| Poly(A)_858 | 3258 |
| Poly(A)_859 | 3259 |
| Poly(A)_860 | 3260 |
| Poly(A)_861 | 3261 |
| Poly(A)_862 | 3262 |
| Poly(A)_863 | 3263 |
| Poly(A)_864 | 3264 |
| Poly(A)_865 | 3265 |
| Poly(A)_866 | 3266 |
| Poly(A)_867 | 3267 |
| Poly(A)_868 | 3268 |
| Poly(A)_869 | 3269 |
| Poly(A)_870 | 3270 |
| Poly(A)_871 | 3271 |
| Poly(A)_872 | 3272 |
| Poly(A)_873 | 3273 |
| Poly(A)_874 | 3274 |
| Poly(A)_875 | 3275 |
| Poly(A)_876 | 3276 |
| Poly(A)_877 | 3277 |
| Poly(A)_878 | 3278 |
| Poly(A)_879 | 3279 |
| Poly(A)_880 | 3280 |
| Poly(A)_881 | 3281 |
| Poly(A)_882 | 3282 |
| Poly(A)_883 | 3283 |
| Poly(A)_884 | 3284 |
| Poly(A)_885 | 3285 |
| Poly(A)_886 | 3286 |
| Poly(A)_887 | 3287 |
| Poly(A)_888 | 3288 |
| Poly(A)_889 | 3289 |
| Poly(A)_890 | 3290 |
| Poly(A)_891 | 3291 |
| Poly(A)_892 | 3292 |
| Poly(A)_893 | 3293 |
| Poly(A)_894 | 3294 |
| Poly(A)_895 | 3295 |
| Poly(A)_896 | 3296 |
| Poly(A)_897 | 3297 |
| Poly(A)_898 | 3298 |
| Poly(A)_899 | 3299 |
| Poly(A)_900 | 3300 |
| Poly(A)_901 | 3301 |
| Poly(A)_902 | 3302 |
| Poly(A)_903 | 3303 |
| Poly(A)_904 | 3304 |
| Poly(A)_905 | 3305 |
| Poly(A)_906 | 3306 |
| Poly(A)_907 | 3307 |
| Poly(A)_908 | 3308 |
| Poly(A)_909 | 3309 |
| Poly(A)_910 | 3310 |
| Poly(A)_911 | 3311 |
| Poly(A)_912 | 3312 |
| Poly(A)_913 | 3313 |
| Poly(A)_914 | 3314 |
| Poly(A)_915 | 3315 |
| Poly(A)_916 | 3316 |
| Poly(A)_917 | 3317 |
| Poly(A)_918 | 3318 |
| Poly(A)_919 | 3319 |
| Poly(A)_920 | 3320 |
| Poly(A)_921 | 3321 |
| Poly(A)_922 | 3322 |
| Poly(A)_923 | 3323 |
| Poly(A)_924 | 3324 |
| Poly(A)_925 | 3325 |
| Poly(A)_926 | 3326 |
| Poly(A)_927 | 3327 |
| Poly(A)_928 | 3328 |
| Poly(A)_929 | 3329 |
| Poly(A)_930 | 3330 |
| Poly(A)_931 | 3331 |
| Poly(A)_932 | 3332 |
| Poly(A)_933 | 3333 |
| Poly(A)_934 | 3334 |
| Poly(A)_935 | 3335 |
| Poly(A)_936 | 3336 |
| Poly(A)_937 | 3337 |
| Poly(A)_938 | 3338 |
| Poly(A)_939 | 3339 |
| Poly(A)_940 | 3340 |
| Poly(A)_941 | 3341 |
| Poly(A)_942 | 3342 |
| Poly(A)_943 | 3343 |
| Poly(A)_944 | 3344 |
| Poly(A)_945 | 3345 |
| Poly(A)_946 | 3346 |
| Poly(A)_947 | 3347 |
| Poly(A)_948 | 3348 |
| Poly(A)_949 | 3349 |
| Poly(A)_950 | 3350 |
| Poly(A)_951 | 3351 |
| Poly(A)_952 | 3352 |
| Poly(A)_953 | 3353 |
| Poly(A)_954 | 3354 |
| Poly(A)_955 | 3355 |
| Poly(A)_956 | 3356 |
| Poly(A)_957 | 3357 |
| Poly(A)_958 | 3358 |
| Poly(A)_959 | 3359 |
| Poly(A)_960 | 3360 |
| Poly(A)_961 | 3361 |
| Poly(A)_962 | 3362 |
| Poly(A)_963 | 3363 |
| Poly(A)_964 | 3364 |
| Poly(A)_965 | 3365 |
| Poly(A)_966 | 3366 |
| Poly(A)_967 | 3367 |
| Poly(A)_968 | 3368 |
| Poly(A)_969 | 3369 |
| Poly(A)_970 | 3370 |
| Poly(A)_971 | 3371 |
| Poly(A)_972 | 3372 |
| Poly(A)_973 | 3373 |
| Poly(A)_974 | 3374 |
| Poly(A)_975 | 3375 |
| Poly(A)_976 | 3376 |
| Poly(A)_977 | 3377 |
| Poly(A)_978 | 3378 |
| Poly(A)_979 | 3379 |
| Poly(A)_980 | 3380 |
| Poly(A)_981 | 3381 |
| Poly(A)_982 | 3382 |
| Poly(A)_983 | 3383 |
| Poly(A)_984 | 3384 |
| Poly(A)_985 | 3385 |
| Poly(A)_986 | 3386 |
| Poly(A)_987 | 3387 |
| Poly(A)_988 | 3388 |
| Poly(A)_989 | 3389 |
| Poly(A)_990 | 3390 |
| Poly(A)_991 | 3391 |
| Poly(A)_992 | 3392 |
| Poly(A)_993 | 3393 |
| Poly(A)_994 | 3394 |
| Poly(A)_995 | 3395 |
| Poly(A)_996 | 3396 |
| Poly(A)_997 | 3397 |
| Poly(A)_998 | 3398 |
| Poly(A)_999 | 3399 |
| Poly(A)_1000 | 3400 |
| Poly(A)_1001 | 3401 |

### AAV Vector Production:

[0501] AAV vectors were produced according to standard methods, which are described in Example 1.

[0502] To determine the viral genome (vg) titer, 1 μL from crude lysate viruses was digested with DNase and Proteinase K, followed by quantitative PCR. 5 μL of digested virus was used in a 25 μL qPCR reaction composed of IDT primetime master mix and a set of primer and 6′FAM/Zen/IBFQ probe (IDT) designed to amplify a 62 bp-fragment located in the AAV2-ITR. Ten-fold serial dilutions of an AAV ITR plasmid was used as reference standards to calculate the titer (vg/mL) of viral samples.

[0503] After production, AAVs from the pooled library were lysed to release AAV virion DNA, which was then purified according to standard methods. Barcoded amplicons were PCR-amplified from the viral DNA input, sequenced, and processed as described earlier to determine the coverage of the AAV pool. Barcode counts were normalized by total read counts to calculate an RPM value.

### AAV Transduction and Method for RNA Transcript Analysis:

[0504] 10,000 HEK293T cells were seeded per well in PLF-coated 24-well plates 48 hours before AAV transduction. At the time of transduction, HEK293 Ts were transduced with the pooled library of AAVs containing the library of poly(A) signal sequences. All viral infection conditions were performed in triplicate, with normalized number of vg among experimental vectors, at an MOI of 1E5 and 1E4 vg/cell. Two days post-transduction, total RNA was isolated and converted into cDNA by reverse transcription. Barcoded amplicons were PCR-amplified from the resulting cDNA, sequenced, and processed as described earlier. Barcode counts were normalized by total read counts to calculate an RPM value. To calculate the RNA abundance ratio for each poly(A) signal sequence from the library, normalized barcode counts from cDNA amplicons were divided by normalized barcode counts from viral DNA input. Poly(A) signal sequences with a high RNA abundance ratio, i.e., with the highest accumulation in HEK293 Ts, were identified as the poly(A) signal sequences of interest for further CasX editing assessments in vitro or in vivo.

### Results

[0505] The results portrayed in FIGS. 22 and 23 demonstrate that AAV constructs with several alternative poly(A) signals, in combination with CasX variant 491, scaffold variant 174 and spacer 12.7, when delivered by nucleofection of AAV transgene plasmid, were able to edit the target stop cassette in mNPCs at doses of 250 ng and 125 ng. Construct AAV3 (bGH poly(A) signal sequence) showed the highest potency out of the three constructs tested in this experiment, editing the target locus at 60% efficiency (250 ng dose). Constructs 28 (SV40) and 29 (SV40 short), which have poly(A) signal sequences that are 59% and 39% of the size of the poly(A) signal sequence of construct 3, respectively (see Table 11), edited at 21% and 24% respectively (250 ng dose).

TABLE 11
AAV constructs with poly(A) signal sequence variants.

| | Poly(A) Signal | |
|---|---|---|
| Construct | Sequence | AAV Transgene |
| ID | Length (bp) | Length (bp) |
| 3 | 208 | 4550 |
| 25 | 477 | 4795 |
| 26 | 49 | 4367 |
| 27 | 49 | 4367 |
| 28 | 122 | 4440 |
| 29 | 82 | 4400 |
| 30 | 395 | 4713 |
| 31 | 56 | 4374 |
| 34 | 181 | 4565 |
| 37 | 208 | 4619 |

[0506] The results portrayed in FIG. 23 demonstrate that the two different poly(A) signals, combined with CasX protein 491, scaffold variant 174 and spacer 12.7, when delivered as an AAV vector, were able to edit the target stop cassette in mNPCs. AAV.34 and AAV.37 were generated with transgene constructs 34 (with a poly(A) signal of 186 nucleotides and a total transgene length of 4565 nucleotides) and 37 (with a poly(A) signal of 208 nucleotides and a total transgene length of 4619 nucleotides), respectively. Each vector displayed dose-dependent editing at the target locus, and AAV.34, which contains a shorter poly(A) signal, had approximately 75% of the editing potency of AAV.37 for both doses.

[0507] The results portrayed in FIGS. 74A-74B demonstrate that use of AAV constructs containing the SV40 poly(A) late poly(A) signal (construct ID 225) resulted in improved editing compared to that when using constructs with other poly(A) signals. Furthermore, multiple constructs containing poly(A) signals less than 70 bp contained high activity. Each vector displayed dose-dependent editing at the target locus.

[0508] Experiments were performed in HEK293T cells to screen for poly(A) signal sequences for incorporation into future AAV construct designs that would improve CasX expression. As described above, poly(A) signal sequences with a high RNA abundance ratio would be identified as the poly(A) signal sequences of interest for further testing. The RNA abundance ratio was calculated across ten technical replicates by summing the counts across technical replicates and plotted for each unique poly(A) signal sequence from the library for each biological replicate (FIG. 24). Approximately 42% of poly(A) signal sequences screened demonstrated a positive RNA abundance ratio in any of the three biological replicates assessed, indicating that use of these poly(A) signal sequences resulted in higher CasX expression. Here, the bGH poly(A) signal sequence served as a positive control and is annotated in FIG. 24. The mean RNA abundance ratio was also calculated and plotted against the sequence length for each poly(A) signal candidate (data not shown). It was determined that approximately 71% of the poly(A) signal sequences with a positive RNA abundance ratio in any of the three biological replicates also have a sequence length shorter than the sequence of the bGH control (109 bp) from start of the sequence to polyadenylation site. A list of poly(A) signal sequences with a positive mean RNA abundance ratio across all three biological replicates and with a sequence length shorter than bGH across all three biological replicates is presented in Table 12. These identified poly(A) signal sequences, as well as sequences listed in Table 13, are incorporated in future AAV construct designs for further assessment in vitro or in vivo. The findings here support use of the unique poly(A) signal sequences in designing AAV vectors that would provide additional flexibility for increased AAV transgene cargo capacity while potentially enhancing CasX expression and editing efficiency.

[0509] Overall, the results demonstrate that the expression of small CRISPR proteins, such as CasX, can be modulated by poly(A) signals of varying lengths. Longer poly(A) signal sequences can be utilized in the AAV constructs for enhanced CasX activity, while shorter poly(A) signal sequences can be utilized in the AAV constructs to make more sequence space available for the inclusion of additional accessory elements within the AAV transgene.

TABLE 12
List of poly(A) signals identified from a high-throughput screen that
demonstrated a positive mean RNA abundance ratio observed in three biological
replicates and harbor a sequence length shorter than the bGH control (109 bp).

| | Poly(A) | | | Poly(A) | |
|---|---|---|---|---|---|
| Name | signal ID | SEQ ID NO | Name | signal ID | SEQ ID NO |
| SPATA24 | Poly(A)_812 | 3212 | CCDC180 | Poly(A)_946 | 3346 |
| C14orf28 | Poly(A)_269 | 2668 | KCNJ13 | Poly(A)_645 | 3045 |
| TSKS | Poly(A)_554 | 2954 | SCO2 | Poly(A)_707 | 3107 |
| NUP153 | Poly(A)_833 | 3233 | TUT1 | Poly(A)_145 | 2545 |
| RPS12 | Poly(A)_862 | 3262 | PTH2 | Poly(A)_543 | 2943 |
| IL17RC | Poly(A)_709 | 3109 | THOCI | Poly(A)_442 | 2842 |
| CALM2 | Poly(A)_594 | 2994 | ACKR1 | Poly(A)_76 | 2476 |
| KLK13 | Poly(A)_562 | 2962 | RPL38 | Poly(A)_429 | 2829 |
| STPG4 | Poly(A)_593 | 2993 | SAMD8 | Poly(A)_102 | 2502 |
| RNF181 | Poly(A)_612 | 3012 | RPS8 | Poly(A)_33 | 2433 |
| SPAG4 | Poly(A)_663 | 3063 | SCNM1 | Poly(A)_55 | 2455 |
| RHOT2 | Poly(A)_306 | 2706 | HEXDC | Poly(A)_441 | 2841 |
| GLG1 | Poly(A)_359 | 2759 | EXOSC4 | Poly(A)_931 | 3331 |
| ACTA2 | Poly(A)_105 | 2505 | IDH3B | Poly(A)_652 | 3052 |
| SMPD2 | Poly(A)_859 | 3259 | UBE2D2 | Poly(A)_813 | 3213 |
| MRPL52 | Poly(A)_254 | 2654 | CBR3 | Poly(A)_678 | 3078 |
| ETV2 | Poly(A)_499 | 2899 | GPR19 | Poly(A)_195 | 2595 |
| TMEM102 | Poly(A)_383 | 2783 | ALKBH7 | Poly(A)_462 | 2862 |
| CLCNKB | Poly(A)_13 | 2413 | UBE2D3 | Poly(A)_782 | 3182 |
| AAAS | Poly(A)_203 | 2603 | SUPV3L1 | Poly(A)_99 | 2499 |
| SPATA7 | Poly(A)_273 | 2673 | SENP3 | Poly(A)_384 | 2784 |
| FKBP11 | Poly(A)_200 | 2600 | RNF166 | Poly(A)_366 | 2766 |
| NOP16 | Poly(A)_821 | 3221 | EEF1D | Poly(A)_927 | 3327 |
| CDC34 | Poly(A)_450 | 2850 | TEKT1 | Poly(A)_380 | 2780 |
| NLRX1 | Poly(A)_188 | 2588 | PSTK | Poly(A)_115 | 2515 |
| PRPF8 | Poly(A)_370 | 2770 | RETREG1 | Poly(A)_792 | 3192 |
| EIF3K | Poly(A)_508 | 2908 | RPL7 | Poly(A)_910 | 3310 |
| KRTCAP2 | Poly(A)_71 | 2471 | SLIT2 | Poly(A)_775 | 3175 |
| RPS15 | Poly(A)_455 | 2855 | CALHM6 | Poly(A)_861 | 3261 |
| ELOC | Poly(A)_911 | 3311 | Clorf53 | Poly(A)_87 | 2487 |
| TFPT | Poly(A)_568 | 2968 | AURKAIP1 | Poly(A)_3 | 2403 |
| CEP350 | Poly(A)_86 | 2486 | EEF1D | Poly(A)_928 | 3328 |
| RAB33A | Poly(A)_993 | 3393 | CRYGD | Poly(A)_636 | 3036 |
| WDR36 | Poly(A)_808 | 3208 | MSRB3 | Poly(A)_215 | 2615 |
| ARMC12 | Poly(A)_846 | 3246 | ABHD1 | Poly(A)_584 | 2984 |
| NNMT | Poly(A)_184 | 2584 | HCCS | Poly(A)_972 | 3372 |
| NAA50 | Poly(A)_744 | 3144 | POLD1 | Poly(A)_558 | 2958 |
| RPL14 | Poly(A)_716 | 3116 | ZBTB48 | Poly(A)_7 | 2407 |
| RPL18 | Poly(A)_537 | 2937 | C17orf98 | Poly(A)_405 | 2805 |
| TMEM205 | Poly(A)_474 | 2874 | ATRIP | Poly(A)_721 | 3121 |
| MRPL52 | Poly(A)_253 | 2721 | TRO | Poly(A)_983 | 3383 |
| CORO7- | Poly(A)_321 | 2470 | U2AF1L4 | Poly(A)_502 | 2902 |
| PAM16 | | | | | |
| DPM3 | Poly(A)_70 | 2970 | PRIM1 | Poly(A)_211 | 2611 |
| RPS9 | Poly(A)_570 | | S100A2 | Poly(A)_65 | 2464 |
| SYCEIL | Poly(A)_362 | 2762 | PRKAA1 | Poly(A)_794 | 3194 |
| AKAP8L | Poly(A)_479 | 2879 | CPVL | Poly(A)_870 | 3270 |
| DHX30 | Poly(A)_719 | 3119 | PIP | Poly(A)_896 | 3296 |
| RABGGTA | Poly(A)_265 | 2665 | MAPKAPK5 | Poly(A)_227 | 2627 |
| RNF181 | Poly(A)_611 | 3011 | IL13RA2 | Poly(A)_988 | 3388 |
| PPP1R35 | Poly(A)_881 | 3281 | C2orf70 | Poly(A)_582 | 2982 |
| RRP9 | Poly(A)_735 | 3135 | TMEM219 | Poly(A)_331 | 2731 |
| VPS29 | Poly(A)_225 | 2625 | EXOSC8 | Poly(A)_238 | 2638 |
| NUP85 | Poly(A)_431 | 2831 | CUTA | Poly(A)_843 | 3243 |
| EXOC3L1 | Poly(A)_347 | 2747 | PLCB2 | Poly(A)_282 | 2682 |
| TAF10 | Poly(A)_126 | 2526 | PCGF1 | Poly(A)_608 | 3008 |
| PPP1R13L | Poly(A)_531 | 2931 | PFDN5 | Poly(A)_201 | 2601 |
| POLB | Poly(A)_907 | 3307 | IFT27 | Poly(A)_697 | 3097 |
| INTS8 | Poly(A)_916 | 3316 | VMA21 | Poly(A)_994 | 3394 |
| PLA2G1B | Poly(A)_229 | 2629 | PSMB1 | Poly(A)_864 | 3264 |
| ZFAND5 | Poly(A)_945 | 3345 | EEF1D | Poly(A)_929 | 3329 |
| RPL30 | Poly(A)_918 | 3318 | ARMC3 | Poly(A)_98 | 2498 |
| SGF29 | Poly(A)_329 | 2729 | AP1M1 | Poly(A)_480 | 2880 |
| NUDT14 | Poly(A)_279 | 2679 | BOLA3 | Poly(A)_604 | 3004 |
| IFT122 | Poly(A)_751 | 3151 | TMEM258 | Poly(A)_143 | 2543 |
| CUTA | Poly(A)_842 | 3242 | TCTEX1D2 | Poly(A)_764 | 3164 |
| FBL | Poly(A)_516 | 2916 | ALAS1 | Poly(A)_737 | 3137 |
| ZCRB1 | Poly(A)_197 | 2597 | AKAP14 | Poly(A)_991 | 3391 |
| C2orf70 | Poly(A)_583 | 2983 | TEX10 | Poly(A)_947 | 3347 |
| CCDC33 | Poly(A)_291 | 2691 | CTNNBL1 | Poly(A)_665 | 3065 |
| MPHOSPH10 | Poly(A)_603 | 3003 | UBL5 | Poly(A)_472 | 2872 |
| BAG6 | Poly(A)_836 | 3236 | FGF21 | Poly(A)_540 | 2940 |
| C11orf80 | Poly(A)_167 | 2567 | PPP2R3C | Poly(A)_268 | 2668 |
| PPIL6 | Poly(A)_858 | 3258 | SEPT11 | Poly(A)_778 | 3178 |
| SNRNP27 | Poly(A)_600 | 3000 | | | |
| NUP93 | Poly(A)_339 | 2739 | | | |

TABLE 13
List of additional poly(A) signal sequences for incorporation
into future AAV construct designs and further testing.

| | Poly(A) | SEQ |
|---|---|---|
| Name | signal ID | ID NO |
| RPL10 | Poly(A)_1000 | 3400 |
| RPL11 | Poly(A)_16 | 2416 |
| RPL12 | Poly(A)_952 | 3352 |
| RPL13A | Poly(A)_546 | 2946 |
| RPL22 | Poly(A)_6 | 2406 |
| RPL22L1 | Poly(A)_757 | 3157 |
| RPL26 | Poly(A)_390 | 2790 |
| RPL26 | Poly(A)_391 | 2791 |
| RPL26 | Poly(A)_392 | 2792 |
| RPL27A | Poly(A)_127 | 2527 |
| RPL3 | Poly(A)_700 | 3100 |
| RPL30 | Poly(A)_919 | 3319 |
| RPL32 | Poly(A)_713 | 3113 |
| RPL35A | Poly(A)_765 | 3165 |
| RPL35A | Poly(A)_766 | 3166 |
| RPL5 | Poly(A)_43 | 2442 |
| RPL8 | Poly(A)_935 | 3335 |
| RPS11 | Poly(A)_547 | 2947 |
| RPS15A | Poly(A)_326 | 2726 |
| RPS16 | Poly(A)_513 | 2913 |
| RPS16 | Poly(A)_514 | 2914 |
| RPS19 | Poly(A)_521 | 2921 |
| RPS3A | Poly(A)_786 | 3186 |
| RPS5 | Poly(A)_574 | 2974 |
| RPS7 | Poly(A)_578 | 2978 |

### Example 7: Small CRISPR Protein Potency is Modulated by the Position of Regulatory Elements in the AAV Vector

[0510] Orientation (forward or reverse) and position (upstream or downstream of CRISPR gene) of regulatory elements such as the gRNA promoter and guide scaffold complex can modulate the underlying expression of the small CRISPR protein and the overall editing efficiency of CRISPR systems in AAV vectors. Experiments were performed to assess the best orientation and position of regulatory elements within the AAV genome to enhance the potency of small CRISPR proteins and guide RNAs.

### Materials and Methods

[0511] AAV vector production and QC, nucleofection, AAV viral production and editing level assessment in mNPTC-tdT cells by FACS were conducted as described in Example 1.

### Results

[0512] Construct 44 (configuration shown in FIG. 25, second from top) contains a Pol III promoter driving expression of guide scaffold 174 and spacer 12.7 in the reverse orientation of construct 3 (top configuration in FIG. 15). FIG. 26 demonstrates that construct 44, when delivered by nucleofection of an AAV transgene plasmid, modifies the target stop cassette in mNPCs similarly to construct 3 at in a dose-dependent manner.

[0513] FIG. 27 shows that construct 44, delivered as an AAV vector, edits the target stop cassette in mNPCs, further supporting the utility of this construct. AAV.3 and AAV.44 were generated with transgene constructs 3 and 44, respectively. Each vector displayed dose-dependent editing at the target locus (FIG. 26, left panel, in which the vector was assayed using 3-fold dilutions). FIG. 27, right panel, shows editing results at an MOI of 3×10⁵, in which AAV.44 had 60% of the editing potency of the original configuration of vector AAV.3.

[0514] Additional configurations were explored, such that the gRNA transcriptional unit (Pol III U6 promoter driving the expression of the gRNA scaffold and indicated spacer) was placed either upstream or downstream of the CasX gene and was either in the forward or reverse orientation (FIG. 28). Table 14 lists the sequences of key AAV elements with varying positions and orientations of the gRNA promoter to drive gRNA expression, and Table 15 lists the full AAV transgene sequences within ITRs. The resulting AAV constructs were used to produce AAVs, which were used to transduce mNPCs to assess editing level at the tdTomato locus. The results of this experiment are illustrated in FIG. 29. The data demonstrate that AAVs produced from Constructs 207B, 209B, and 210 were able to induce similar levels of editing at the tdTomato locus in a dose-dependent manner. Meanwhile, the configuration used in Construct 208, where the U6-gRNA transcriptional unit was in the reverse orientation downstream of the CasX gene, appeared to adversely affect gene editing rate at the target locus.

TABLE 14
Sequences of key AAV elements with varying positions
and orientations of the gRNA transcriptional unit. “Rev
comp” denotes the reverse complementary sequence.

| | Component | SEQ | Length of |
|---|---|---|---|
| Construct ID | Name | ID NO: | Component (bp) |
| 207A/B, 208, | 5′ ITR | 3683 | 130 |
| 209A/B, 210 | UbC promoter | 3720 | 400 |
| | 5′ c-MYC NLS | 9290 | 27 |
| | CasX 491 | 9291 | 2931 |
| | 3′ c-MYC NLS | 9292 | 27 |
| | bGH poly(A) signal | 3696 | 209 |
| 207A/B, 209A/B | U6 promoter (Fwd) | 3698 | 242 |
| | Scaffold 235 (Fwd) | 3631 | 89 |
| 207B, 209B | Spacer 12.7 (Fwd) | 4049 | 21 |
| 207A, 209A | Spacer NT (Fwd) | 4057 | 18 |
| 208, 210 | U6 promoter | 3987 | 241 |
| | (Rev Comp) | | |
| | Scaffold 235 | 9293 | 99 |
| | (Rev Comp) | | |
| | Spacer 12.7 | 9294 | 20 |
| | (Rev Comp) | | |
| 207A/B, 208, | 3′ ITR | 3701 | 141 |
| 209A/B, 210 | | | |

TABLE 15
Sequences of AAV constructs within AAV ITRs.

| | Sequence | |
|---|---|---|
| Construct | (within AAV ITR) | Length of |
| ID | SEQ ID NO: | Construct (bp) |
| 207A | 9295 | 4352 |
| 207B | 9296 | 4352 |
| 208 | 9297 | 4344 |
| 209A | 9298 | 4354 |
| 209B | 9299 | 4354 |
| 210 | 9300 | 4364 |

[0515] The results of these experiments demonstrate that the orientation of parts within the AAV genome can be varied, yet result in sufficient expression of the CRISPR proteins and the guide RNA. This shows that specific orientations or positions of the regulatory elements relative to the encoded protein or RNA components may allow controlled modulation of expression in CasX-packaging AAV constructs that contain one or multiple guides.

### Example 8: Small CRISPR Protein Potency is Enhanced by Inclusion of Additional Regulatory Elements in the AAV Vector that are not Possible with a Larger Protein

[0516] Experiments were performed to demonstrate that transcriptional levels mediated by AAV vectors delivering small CRISPR proteins (such as CasX) can be enhanced by inclusion of different regulatory elements (intronic sequences, enhancers, etc.) that conventionally do not fit in AAV vectors expressing large transgene (e.g., spCas9) plasmids.

### Materials and Methods

[0517] Cloning and QC: A 4-part Golden Gate Assembly consisting of a pre-digested AAV backbone, small CRISPR protein-encoding DNA, and flanking 5′ and 3′ DNA sequences were used to generate AAV-cis plasmid as described in Example 1. 5′ sequences contained enhancer, protein promoter and N-terminal NLS, while 3′ sequences contained C-terminal NLS, WPRE, poly(A) signal, RNA promoter and guide RNA containing spacer 12.7. 5′ and 3′ parts were ordered as gene fragments, PCR-amplified, and assembled and assembled into AAV vectors. Cloning and plasmid QC, nucleofection, and FACS methods were conducted as described in Example 1.

[0518] Enhancement of editing by the inclusion of post-translation regulatory element (PTRE) 1, 2, or 3 in the AAV cis plasmid 3 was tested in combination with different promoters driving expression of CasX. A first set of promoters were tested; transgene plasmids 4, 35, 36 37, transgene plasmid 5, 38, 39, 40 and transgene plasmids 6, 42, 43 have the CasX protein expression driven by the CMV, UbC, EFS, CMV-s promoters, respectively. A second set of constructs tested included PTREs between the protein and poly(A) signal sequences and were generated with the Jet and JetUsp promoters compared to the UbC promoter (transgenes 58, 72, 73, 74; transgenes 59, 75, 76, 77 and transgenes 53, 80 and 81 respectively) driving expression of CasX. The PTRE sequences are listed in Table 16, and enhancer plus promoter sequences are listed in Table 17. The sequences of the additional components of the AAV constructs, with the exception of sequences encoding the CasX (Table 26) and the one or more gRNA (Tables 23 and 24), are listed in Table 45.

TABLE 16
Constructs and sequences of post-transcription elements (PTRE)
tested on base construct ID 4, 5, 6, 53, 58, and 59

| SEQ | | | Length of |
|---|---|---|---|
| ID NO: | Construct ID | PTRE | PTRE (bp) |
| 3615 | 35, 38, 72, 75 | 1 | 598 |
| 3616 | 36, 39, 42, 73, 76, 80 | 2 | 593 |
| 3617 | 37, 40, 43, 74, 77, 81 | 3 | 247 |

TABLE 17
Enhancer elements and sequences tested in
combination with the CMV core promoter

| SEQ | | | Core | Length of |
|---|---|---|---|---|
| ID NO: | ID | Enhancer | promoter | Promoter (bp) |
| 3618 | 3 | CMV | CMV | 584 |
| 3619 | 64 | N/A | CMV | 204 |
| 3620 | 65 | Syn 1 | CMV | 414 |
| 3621 | 66 | NPC5 | CMV | 314 |
| 3622 | 67 | NPC7 | CMV | 324 |
| 3623 | 68 | NPC127 | CMV | 304 |
| 3624 | 69 | NPC190 | CMV | 364 |
| 3625 | 70 | NPC249 | CMV | 274 |
| 3626 | 71 | NPC286 | CMV | 354 |

### Results

[0519] The effects of PTREs on transgene expression were assessed by cloning 3 enhancer sequences (PTRE1, PTRE2, and PTR3, Table 16) into an AAV-cis plasmid (construct 3) and construct plasmids containing shorter protein promoters (constructs 4, 5, 6, 53, 57 and 58 contain 400, 234, 335, 400, 164 and 326 bp promoter sequences, respectively).

[0520] AAV-cis plasmid activity was first confirmed by nucleofection in mNPC-tdT cells. For each vector, addition of PTRE enhanced editing activity at various levels (FIG. 30). Table 18 provides the lengths of promoter and PTREs. The addition of PTRE2 to the transgene cassette showed the highest CasX editing activity enhancement, with a 2-fold increase in editing levels for construct 36 compared to construct 4 (58.5% vs 25%), a 1.5-fold increase for construct 39 (35.4% vs 22.9%) compared to construct 5 and a 3-fold increase for construct 42 compared to construct 6 (30.5% vs 12%). The shortest enhancer sequence, PTRE3, also increased protein activity at various levels among construct 37 and 43 compared to other vectors.

[0521] Improvements in editing levels were also observed when constructs were packaged into AAV. Inclusion of PTRE2 in transgene increased editing across the AAV vectors in a similar manner. Trends in on-target editing observed in mNPCs with the AAV infection generally correlated with the AAV plasmid nucleofection data set (FIG. 31).

[0522] The trend was confirmed by testing another set of promoters with inclusion of these enhancer sequences. Across all AAV vectors tested, constructs including PTRE1 or PTRE2 in genomes yielded an average 1.5-fold increase compared to base vectors (FIG. 32). Unique combinations of short promoter and these post-transcriptional sequences led to the identification of vectors with increased editing levels with shorter promoters (e.g., AAV.74), which represents an advantage both for AAV manufacturing being under the carrying capacity limit of AAV, and allows for inclusion of more regulatory elements and CRISPR elements (e.g., additional guides). Comparisons of editing versus transgene size are plotted in FIG. 33.

[0523] The results also demonstrate that inclusion of PTRE1 in the transgene plasmid improved editing levels across all promoters evaluated (FIG. 34), with less variability, while PTRE2 yielded the highest transgene improvement but with more variability across the promoters tested.

[0524] Several constructs with tissue-specific neuronal enhancers upstream of a single constitutive promoter were also tested. In this assay, 7 neuronal enhancer sequences (constructs 65-72) were cloned into a single AAV-cis plasmid (construct 64) harboring a core CMV promoter and all demonstrated improved editing via nucleofection over base construct 64 (FIG. 35). These constructs also outperformed construct 53, which contains a UbC promoter but did not outperform construct 3 which harbors the full CMV promoter (CMV enhancer+CMV core promoter).

TABLE 18
Constructs with or without PTREs and indicated sequence lengths
AAV construct
(Sequence length indicated below)

| | 3 | 4 | 35 | 36 | 37 | 5 | 38 | 39 | 40 | 6 | 42 | 43 |
|---|---|---|---|---|---|---|---|---|---|---|---|---|
| Promoter | 584 | 400 | | | | 234 | | | | 335 | | |
| Length | | | | | | | | | | | | |
| PTRE 1 | — | — | 592 | — | — | — | 592 | — | — | — | — | — |
| PTRE 2 | — | — | — | 593 | — | — | — | 593 | — | — | 593 | — |
| PTRE 3 | — | — | — | — | 247 | — | — | — | 247 | — | — | 247 |
| AAV.transgene | 4550 | 4349 | 4964 | 4965 | 4619 | 4183 | 4798 | 4799 | 4453 | 4284 | 4900 | 4554 |

[0525] The results demonstrate that use of small promoters in the AAV transgene constructs permits the inclusion of additional accessory elements. These additional accessory elements, such as post-transcriptional regulatory elements to AAV-transgenes expressing CasX under the control of short but strong promoter sequences enable increased CasX expression and on-target editing while reducing cargo size such that all components can be incorporated into a single AAV vector.

### Example 9: Demonstration that a CasX:Dual-gRNA System Expressed from a Single AAV Vector can Edit the Target Locus In Vitro

[0526] Experiments were performed to demonstrate the following: 1) CasX and dual gRNAs expressed from an all-in-one AAV vector can edit the target locus; 2) the ability to package and deliver CasX with a dual-guide system within a single AAV vector for targeted editing; and 3) editing of a therapeutically-relevant locus by CasX and dual gRNAs delivered via a single AAV vector can excise the targeted genomic region. For the editing at a therapeutically-relevant locus by the CasX-dual-gRNA system, experiments were conducted to demonstrate the ability of CasX and the dual-guide system to mediate excision of a CTG repeat in the 3′UTR region of the human DMPK gene when delivered via AAVs in vitro into HEK293T cells. The ability to demonstrate editing mediated by the CasX:dual-gRNA system delivered and expressed from a single all-in-one AAV vector is significant because this is not achievable with traditionally used Cas9-based systems.

### Materials and Methods

[0527] AAV plasmid cloning and nucleofection were conducted as described in Example 1.

[0528] Various configurations of two gRNA transcriptional unit blocks, also referred as “guide RNA stacks”, of the AAV transgene are illustrated in FIGS. 38-39 and FIG. 75.

[0529] FIG. 40 illustrates the configurations of the dual-guide stacks, with each stack composed of a gRNA scaffold-spacer combination 174.12.7, 174.12.2 or 174.NT driven by the human U6 promoter listed in Table 8. These specific dual-guide stacks were investigated by cloning two gRNA stacks in a tail-to-tail orientation (Construct ID 45-49) on the 3′ end of the poly(A) or in the same transcriptional orientation as the protein promoter-CasX unit, one on each side of the CasX unit (Construct ID 50-52). Pentagon-shaped boxes for CasX protein promoter and Pol III gRNA promoter depict orientation of transcription (tapered point; 5′ to 3′ or 3′ to 5′ orientation). Spacer sequences are 12.2 (TATAGCATACATTATACGAA; SEQ ID NO: 4056)); 12.7 (CTGCATTCTAGTTGTGGTTT; SEQ ID NO: 4049); and NT (GGGTCTTCGAGAAGACCC; SEQ ID NO: 4057).

[0530] AAV vector production and titering were conducted as described in Example 1. AAV transduction and editing assessment via FACs sorting were conducted as described in Example 1.

[0531] AAV constructs (Construct ID 211-214) assessed in FIG. 36 and FIG. 37 were generated using methods described in Example 1. Sequences for these AAV plasmids are listed in Table 19.

TABLE 19
Sequences of AAV constructs with dual-guides targeting either side of the CTG
repeat in DMPK 3' UTR. NT=non-targeting guide*

| | | DNA sequence | Length of |
|---|---|---|---|
| Construct ID | Component Name | or SEQ ID NO: | Component (bp) |
| 211 through | 5′ ITR | 3683 | 130 |
| 214 | buffer sequence | 3684 | 23 |
| | CMV enhancer + promoter | 9301 | 584 |
| | buffer sequence | 9302 | 18 |
| | Kozak | GCCACC | 6 |
| | start codon | ATGGCC | 6 |
| | SV40 NLS | 9305 | 21 |
| | linker | TCTAGA | 6 |
| | CasX 491 | 9291 | 2931 |
| | linker | GGATCC | 6 |
| | SV40 NLS | 9308 | 21 |
| | HA tag | 9309 | 27 |
| | linker + stop codon | GGATCCTAA | 9 |
| | buffer sequence | 3695 | 30 |
| | bGH poly(A) signal | 3696 | 209 |
| | buffer sequence | GGTACCGT | 8 |
| | U6 promoter | 3698 | 242 |
| | buffer sequence | GAAACACC | 8 |
| | Scaffold 174 | 9311 | 89 |
| | Spacer 1 | See specific dual guide combos below | |
| | (5′ CTG) | | |
| | buffer sequence | 9312 | 20 |
| | U6 promoter | 3698 | 242 |
| | buffer sequence | GAAACACC | 8 |
| | Scaffold 174 | 9311 | 89 |
| | Spacer 2 | See specific dual guide combos below | |
| | (3′ CTG) | | |
| | buffer sequence | 3700 | 17 |
| | 3' ITR | 3701 | 141 |
| 211 | Spacer 1 (20.7) | 9312 | 20 |
| | Spacer 2 (20.11) | 9313 | 20 |
| 212 | Spacer 1 (20.7) | 9312 | 20 |
| | Spacer 2 (NT) | 9314 | 18 |
| 213 | Spacer 1 (NT) | 9314 | 18 |
| | Spacer 2 (20.11) | 9313 | 20 |
| 214 | Spacer 1 (NT) | 9314 | 18 |
| | Spacer 2 (NT) | 9314 | 18 |

*Components are listed in a 5' to 3' order within the constructs

[0532] Production of AAV vectors from AAV constructs 211-214 and subsequent titering were performed as described in Example 1.

### AAV Transduction of HEK293T Cells:

[0533] ˜10,000 ITEK293T cells per well were seeded in 96-well plates. 24 hours later, seeded cells were treated with AAVs encoding CasX variant 491 with the dual-guide system (i.e., scaffold 174 with spacers 20.7-20.11, 20.7-NT, NT-20.11, or NT-NT; refer to Table 19 for sequences). Viral infection conditions were performed in triplicate, with normalized number of viral genomes (vg) among experimental vectors, in a series of three-fold dilution of multiplicity of infection (MOI) ranging from ˜1E6 to 1E4 vg/cell. Five days post-transduction, AAV-treated ITEK293T cells were harvested for gDNA extraction for editing analysis at the DMPK locus by next generation sequencing (NGS). Briefly, amplicons were amplified from 200 ng of extracted gDNA with a set of primers targeting the CTG repeat region in the DMPK 3′ UTR and processed as described in Example 18.

### Results

[0534] FIG. 38 is a schematic of two AAV construct configurations (architecture 1 and architecture 2). FIG. 39 and FIG. 75 illustrate additional AAV construct configurations, while FIG. 40 depicts the specific dual-spacer combinations. The results of the editing assay portrayed in FIG. 41 demonstrate that the constructs delivered as AAV transgene plasmids to mNPCs in architecture 2 were able to edit with enhanced potency. The results from the assay assessing the different combinations of targeting and non-targeting spacers demonstrate that each individual gRNA was active, although, architectures with one targeting spacer and one non-targeting spacer (constructs 45 and 46) yielded approximately 18% lower editing levels. Certain combinations of targeting spacers yielded increased efficacy. While use of the dual-spacer combination 12.7-12.2 (construct 48) resulted in editing with significant potency, use of two sets of 12.7 spacers (construct 47) resulted in editing with 10% greater potency than that seen with the single gRNA architecture (construct 3) (FIG. 41).

[0535] The bar plot in FIG. 42 shows the results that use of AAV constructs 49, 50, and 52, which had the arrangements where two gRNA transcriptional units were placed on either side of the CasX gene, were also able to edit the target nucleic acid when delivered to mNPCs.

[0536] The bar plot in FIG. 43 shows that use of AAV constructs 3, 45, 46, 47, and 48, delivered as AAVs, were able to edit the target stop cassette in mNPCs. Each vector displayed dose-dependent editing at the target locus (FIG. 43, left panel). At an MOI of 3E5, AAV.47 had <5% less potency than the level observed with the original orientation vector AAV.3 (FIG. 43, right panel).

[0537] Experiments were also performed to demonstrate the use of CasX and a dual-guide system in targeting and excising the CTG repeat in the 3′UTR region of the human DMPK gene. The significance of evaluating the ability to target this repeat is that the neuromuscular disease myotonic dystrophy type 1 (DM1) is caused by the abnormal CTG repeat expansion in the 3′ noncoding region of the human DMPK gene. Here, HEK293T cells were transduced with dual-guide AAVs harboring either two DMPK-targeting spacers (20.7 and 20.11), the combination of one DMPK-targeting spacer and one non-targeting (NT) spacer (20.7 and NT or NT and 20.11), or two non-targeting spacers (NT-NT) at various MOIs. The results shown in FIG. 36 demonstrate on-target editing at either side or both sides flanking the CTG repeat expansion in transduced HEK293T cells occurred in a dose-dependent manner. The highest level of indel rate was attained with the dual-guide AAV (spacers 20.7 and 20.11), reaching ˜70% editing efficiency at the highest MOI of 1E6 vg/cell. In addition, infecting cells with AAVs expressing the combination of one DMPK-targeting spacer and one NT spacer (20.7 and NT or NT and 20.11) revealed that a higher editing efficiency was achieved on the 5′ region (by spacer 20.7 and NT) of the CTG repeat in comparison to editing on the 3′ region (by spacer NT and 20.11) (FIG. 36). FIG. 37 illustrates the quantification of percent editing of indel rate detected by NGS for the various types of editing (i.e., editing at 5′ or 3′ of CTG repeat, or dual-editing resulting in dropout of CTG repeat) induced by the AAVs harboring two DMPK-targeting spacers (20.7-20.11). Double-cut editing resulting in CTG repeat excision occurred in a dose-dependent manner, with 21% excision rate achieved at the highest MOI of 1E6 (FIG. 37). High levels of editing were similarly observed at the individual 5′ or 3′ region of the CTG repeat, with a majority of indel events occurring in the 5′ region.

[0538] Altogether, these experiments demonstrate the feasibility of using dual gRNAs in combination with the full CasX protein sequence in a single AAV, which would not be achievable with the use of larger CRISPR proteins, such as Cas9, due to the transgene packaging constraints of the AAV capsid. The experiments also show that dual guide RNAs in an all-in-one vector construct were able to retain the ability to edit the target nucleic acid. Furthermore, the results demonstrate the ability to package and deliver CasX with the dual-guide system from an all-in-one single AAV vector in vitro, which resulted in efficient editing and excision of the target genomic region. In addition to using a dual-guide system to excise a target genomic region, combining two gRNA transcriptional units could also provide the ability to 1) increase gRNA expression and thus CasX-mediated editing or 2) target two distinct genes that might have cooperative therapeutic effects. The effects of varying the orientation and position of gRNA promoters are further investigated in Examples 31 and 32.

### Example 10: Nuclear Localization Sequence (NLS) Selection Enhances Small CRISPR Protein Potency

[0539] Experiments were conducted to determine whether alteration of the nuclear localization sequence (NLS) utilized in constructs can modulate editing.

### Materials and Methods

[0540] AAV vectors were cloned and produced according to standard methods, which are described in Example 1. The amino acid sequences of the encoded NLS are presented in Tables 20 and 21.

[0541] Methods for production of AAV vectors and nucleofection were conducted as described in Example 1. The sequences of the additional components of AAV constructs, with the exception of sequences encoding the CasX (Table 26) and the one or more gRNA (Tables 23 and 24), are listed in Table 45.

TABLE 20
N-terminal NLS sequences

| SEQ ID | | |
|---|---|---|
| NO: | NLS Amino Acid Sequence* | NLS ID |
| 3411 | PKKKRKVSR | 1 |
| 3412 | PKKKRKVGGSPKKKRKVGGSPKKKRKVGGSPKKKRKVSR | 2 |
| 3413 | PKKKRKVGGSPKKKRKVGGSPKKKRKVGGSPKKKRKVGGSPKKKRKVGGSPKKKRKVSR | 3 |
| 3414 | PAAKRVKLDSR | 4 |
| 3415 | PAAKRVKLDGGSPAAKRVKLDSR | 5 |
| 3416 | PAAKRVKLDGGSPAAKRVKLDGGSPAAKRVKLDGGSPAAKRVKLDSR | 6 |
| 3417 | PAAKRVKLDGGSPAAKRVKLDGGSPAAKRVKLDGGSPAAKRVKLDGGSPAAKRVKLDGGSPA | 7 |
| | AKRVKLDSR | |
| 3418 | KRPAATKKAGQAKKKKSR | 8 |
| 3419 | KRPAATKKAGQAKKKKGGSKRPAATKKAGQAKKKKSR | 9 |
| 3420 | PAAKRVKLDGGSPKKKRKVSR | 10 |
| 3421 | PAAKKKKLDGGSPKKKRKVSR | 11 |
| 3422 | PAAKKKKLDSR | 12 |
| 3423 | PAAKKKKLDGGSPAAKKKKLDGGSPAAKKKKLDSR | 13 |
| 3424 | PAAKKKKLDGGSPAAKKKKLDGGSPAAKKKKLDGGSPAAKKKKLDSR | 14 |
| 3425 | PAKRARRGYKCSR | 15 |
| 3426 | PAKRARRGYKCGSPAKRARRGYKCSR | 16 |
| 3427 | PRRKREESR | 17 |
| 3428 | PYRGRKESR | 18 |
| 3429 | PLRKRPRRSR | 19 |
| 3430 | PLRKRPRRGSPLRKRPRRSR | 20 |
| 3431 | PAAKRVKLDGGKRTADGSEFESPKKKRKVGGS | 21 |
| 3432 | PAAKRVKLDGGKRTADGSEFESPKKKRKVPPPPG | 22 |
| 3433 | PAAKRVKLDGGKRTADGSEFESPKKKRKVGIHGVPAAPG | 23 |
| 3434 | PAAKRVKLDGGKRTADGSEFESPKKKRKVGGGSGGGSPG | 24 |
| 3435 | PAAKRVKLDGGKRTADGSEFESPKKKRKVPGGGSGGGSPG | 25 |
| 3436 | PAAKRVKLDGGKRTADGSEFESPKKKRKVAEAAAKEAAAKEAAAKAPG | 26 |
| 3437 | PAAKRVKLDGGKRTADGSEFESPKKKRKVPG | 27 |
| 3438 | PAAKRVKLDGGSPKKKRKVGGS | 28 |
| 3439 | PAAKRVKLDPPPPKKKRKVPG | 29 |
| 3440 | PAAKRVKLDPG | 30 |
| 3441 | PAAKRVKLDGGGSGGGSGGGS | 31 |
| 3442 | PAAKRVKLDPPP | 32 |
| 3443 | PAAKRVKLDGGGSGGGSGGGSPPP | 33 |
| 3444 | PKKKRKVPPP | 34 |
| 3445 | PKKKRKVGGS | 35 |

*Sequences in bold are NLS, while unbolded sequences are linkers.

TABLE 21
C-terminal NLS sequences

| SEQ ID | | |
|---|---|---|
| NO: | NLS Amino Acid Sequence* | NLS ID |
| 3446 | GSPKKKRKV | 1 |
| 3447 | GSPKKKRKVGGSPKKKRKVGGSPKKKRKVGGSPKKKRKV | 2 |
| 3448 | GSPKKKRKVGGSPKKKRKVGGSPKKKRKVGGSPKKKRKVGGSPKKKRKVGGSPKKKRKV | 3 |
| 3449 | GSPAAKRVKLD | 4 |
| 3450 | GSPAAKRVKLDGGSPAAKRVKLD | 5 |
| 3451 | GSPAAKRVKLDGGSPAAKRVKLDGGSPAAKRVKLDGGSPAAKRVKLD | 6 |
| 3452 | GSPAAKRVKLDGGSPAAKRVKLDGGSPAAKRVKLDGGSPAAKRVKLDGGSPAAKRVKLDGG | 7 |
| | SPAAKRVKLD | |
| 3453 | GSKRPAATKKAGQAKKKK | 8 |
| 3454 | KRPAATKKAGQAKKKKGGSKRPAATKKAGQAKKKK | 9 |
| 3455 | GSPAAKRVKLGGSPAAKRVKLGGSPKKKRKVGGSPKKKRKV | 10 |
| 3456 | GSKLGPRKATGRWGS | 11 |
| 3457 | GSKRKGSPERGERKRHWGS | 12 |
| 3458 | GSPKKKRKVGSGSKRPAATKKAGQAKKKKLE | 13 |
| 3459 | GPKRTADSQHSTPPKTKRKVEFEPKKKRKV | 14 |
| 3460 | GGGSGGGSKRTADSQHSTPPKTKRKVEFEPKKKRKV | 15 |
| 3461 | AEAAAKEAAAKEAAAKAKRTADSQHSTPPKTKRKVEFEPKKKRKV | 16 |
| 3462 | GPPKKKRKVGGSKRTADSQHSTPPKTKRKVEFEPKKKRKV | 17 |
| 3463 | GPAEAAAKEAAAKEAAAKAPAAKRVKLD | 18 |
| 3464 | GPGGGSGGGSGGGSPAAKRVKLD | 19 |
| 3465 | GPPKKKRKVPPPPAAKRVKLD | 20 |
| 3466 | GPPAAKRVKLD | 21 |
| 3467 | GSPKKKRKV | 22 |
| 3468 | GSPAAKRVKLD | 23 |
| 3469 | VGSKRPAATKKAGQAKKKK | 24 |
| 3470 | TGGGPGGGAAAGSGSPKKKRKVGSGSKRPAATKKAGQAKKKKLE | 25 |
| 3471 | TGGGPGGGAAAGSGSPKKKRKVGSGSKRPAATKKAGQAKKKKLE | 26 |
| 3472 | TGGGPGGGAAAGSGSPKKKRKVGSGS | 27 |
| 3473 | PPPPKKKRKVPPP | 28 |
| 3474 | GGSPKKKRKVPPP | 29 |
| 3475 | PPPPKKKRKV | 30 |
| 3476 | GGSPKKKRKV | 31 |
| 3477 | GGSPKKKRKVGGSGGSGGS | 32 |
| 3478 | GGSPKKKRKVGGSPKKKRKV | 33 |
| 3479 | GGSGGSGGSPKKKRKVGGSPKKKRKV | 34 |
| 3480 | VGGGSGGGSGGGSPAAKRVKLD | 35 |
| 3481 | VPPPPAAKRVKLD | 36 |
| 3482 | VPPPGGGSGGGSGGGSPAAKRVKLD | 37 |
| 3483 | VGGGSGGGSGGGSPAAKRVKLD | 38 |
| 3484 | VPPPPAAKRVKLD | 39 |
| 3485 | VPPPGGGSGGGSGGGSPAAKRVKLD | 40 |
| 3486 | VGSPAAKRVKLD | 41 |

*Sequences in bold are NLS, while unbolded sequences are linkers.

[0542] AAV transduction and editing level assessment in mNPTC-tdT cells by FACS were conducted as described in Example 1.

### Results

[0543] Initial plasmid nucleofection revealed that a number of NLS permutations displayed improved editing when compared to control (1×SV40 NLS on both the N- and C-termini). In particular, N-terminal variants containing c-MYC or Nucleoplasmin NLSs significantly outperformed SV40 NLS combinations (FIG. 44). This trend in N-terminal NLS variation was replicated in AAV transduction, where c-MYC and Nucleoplasmin NLS variants again outperformed SV40 NLS variants (FIG. 45). Finally, variations holding the c-MYC constant (FIG. 46) were tested, and the results demonstrated that the constructs with the highest level of editing contained a c-MYC NLS on both the N- and C-terminus.

[0544] The data show that selecting the amino acid sequence of the NLS can enhance editing outcomes in the AAV setting. Specifically, N-terminal Cmyc-containing NLS variants showed a clear improvement compared to N-terminal SV40 NLS variants. In addition, C-terminal c-MYC and Nucleoplasmin variants improve editing over SV40 NLS variants. Repetitions of the SV40 NLS seem to be deleterious for editing efficiency on both the N- and C-terminals.

### Example 11: Introns in the 5′ UTR can Enhance Small CRISPR Protein Expression

[0545] An experiment is performed to test whether transcriptional levels mediated by AAV vectors delivering small CRISPR proteins (such as CasX) can be enhanced by inclusion of different regulatory elements such as intronic sequences taken from viral, mouse, or human genomes that conventionally do not fit in AAV vectors expressing large transgene (e.g., spCas9) plasmids.

### Methods

[0546] AAV cloning and production are as described in Example 1. 5′ sequences used to generate the AAV cis plasmid contain protein promoters including UbC, JeT, CMV, CAG, CBH, hSyn, or other Pol2 promoter, intronic region, and N-terminal NLS, while 3′ sequences contain C-terminal NLS, poly A signal, RNA promoter and guide RNA containing spacer 12.7. Non-limiting examples of intron sequences to be incorporated into the constructs are listed in Table 22.

[0547] Enhancement in editing by the inclusion of intron 36 (transgene plasmid 59) is tested against transgene plasmid 58, which was the baseline construct not containing the intron. The rest of the introns in Table 22 have been derived from viral, mouse, and human origin.

TABLE 22
Intron sequences for incorporation into base construct 58

| | SEQ | Length of |
|---|---|---|
| Intron | ID NO | intron (bp) |
| 1 | 3487 | 54 |
| 2 | 3488 | 67 |
| 3 | 3489 | 62 |
| 4 | 3490 | 49 |
| 5 | 3491 | 59 |
| 6 | 3492 | 67 |
| 7 | 3493 | 66 |
| 8 | 3494 | 86 |
| 9 | 3495 | 67 |
| 10 | 3496 | 70 |
| 11 | 3497 | 476 |
| 12 | 3498 | 69 |
| 13 | 3499 | 69 |
| 14 | 3500 | 70 |
| 15 | 3501 | 70 |
| 16 | 3502 | 108 |
| 17 | 3503 | 69 |
| 18 | 3504 | 206 |
| 19 | 3505 | 70 |
| 20 | 3506 | 68 |
| 21 | 3507 | 299 |
| 22 | 3508 | 226 |
| 23 | 3509 | 71 |
| 24 | 3510 | 69 |
| 25 | 3511 | 87 |
| 26 | 3512 | 84 |
| 27 | 3513 | 82 |
| 28 | 3514 | 66 |
| 29 | 3515 | 65 |
| 30 | 3516 | 66 |
| 31 | 3517 | 106 |
| 32 | 3518 | 69 |
| 33 | 3519 | 68 |
| 34 | 3520 | 68 |
| 35 | 3521 | 97 |
| 36 | 3522 | 140 |
| 37 | 3523 | 133 |
| 38 | 3524 | 190 |
| 39 | 3525 | 271 |
| 40 | 3526 | 96 |
| 41 | 3527 | 110 |
| 42 | 2528 | 270 |
| 43 | 3529 | 116 |
| 44 | 3530 | 67 |
| 45 | 3531 | 66# |

### Results

[0548] The effects of introns on transgene expression are assessed by cloning 50 different introns into AAV-cis plasmid and then assaying for editing in the tdTomato assay used in the Examples supra.

[0549] When compared to the base construct without an intron, the addition of an intronic sequence generally increases the overall editing efficiency of AAV transgenes.

[0550] The results are expected to support that the addition of introns to AAV-transgenes expressing CasX under the control of short but strong promoter sequences enables increased CasX expression and on-target editing while reducing cargo size, further optimizing the AAV system.

### Example 12: Improved Guide Variants Demonstrate Enhanced On-Target Activity In Vitro

[0551] Experiments were conducted to identify engineered guide RNA variants with increased activity at different genomic targets, including the therapeutically-relevant mouse and human RHO exon 1. Previous assays identified many different “hotspot” regions (e.g., stem loop) within the scaffold sequences holding the potential to significantly increase editing efficiency as well as specificity. Additionally, screens were conducted to identify scaffold variants that would increase the overall activity of the tested CRISPR system in an AAV vector across multiple different PAM-spacer combinations, without triggering off-target or non-specific editing. Achieving increased editing efficiency compared to current benchmark vectors would allow reduced viral vector doses to be used in in vivo studies, improving the safety of AAV-mediated CasX-guide systems.

### Methods

[0552] New gRNA scaffold and spacer variants were inserted into an AAV transgene construct for plasmid and viral vector validation (encoding sequences in Tables 23 and 24). CasX 491 variant protein was used for all constructs evaluated in this experiment, however the disclosure contemplates utilizing any of the CasX variants, including those of Table 5 and the encoding sequences of Table 26. The AAV transgene was conceptually broken up between ITRs into different parts, which consisted of the therapeutic cargo and accessory elements relevant to expression in mammalian cells and the nuclease-guide RNA complex (protein nuclease, scaffold, spacer). A schematic with its conceptual parts is shown in FIG. 47. The nucleic acid sequences of the remaining components common to the various constructs are presented in Table 45, the encoding sequences of the guides are presented in Tables 23 and 24, and the encoding sequences of the CasX are presented in Table 26 such that the various permutations of the transgene can be elucidated.

### Cloning:

[0553] Each part in the AAV genome was separated by restriction enzyme sites to allow for modular cloning. Parts were ordered as gene fragments from Twist, PCR amplified, and digested with corresponding restriction enzymes, cleaned, then ligated into a vector also digested with the same enzymes. New AAV constructs were then transformed into chemically competent E. coli (Turbos or Stbl3s). Transformed cells were recovered for 1 hour in a 37° C. shaking incubator then plated on Kanamycin LB-Agar plates and allowed to grow at 37° C. for 12-16 hours. Colonies were picked into 6 mL of 2×yt treated with Kanamycin and allowed to grow for 7-14 hours, then mini-prepped and Sanger sequenced. The transformation and miniprep protocol were then repeated and spacer-cloned vectors were sequence verified again. Validated constructs were maxi-prepped. To assess the quality of maxi-preps, constructs were processed in two separate digests with XmaI (which cuts at several sites in each of the ITRs) and XhoI which cuts once in the AAV genome. These digests and the uncut construct were then run on a 1% Agarose gel and imaged on a ChemiDoc™. If the plasmid was >90% supercoiled, the correct size, and the ITRs were intact, the construct moved on to be tested via nucleofection and subsequently used for AAV vector production.

TABLE 23
Guide sequences cloned into p59.491.U6.X.Y. plasmids
(X = guide; Y = spacer)

| | | gRNA Guide | gRNA Guide + |
|---|---|---|---|
| Guide.spacer | Spacer Sequence | Sequence | Spacer Sequence |
| Construct | (SEQ ID NO) | (SEQ ID NO) | (SEQ ID NO) |
| 174.11.30 | 3627 | 3631 | 3643 |
| 229.11.30 | 3627 | 3632 | 3644 |
| 230.11.30 | 3627 | 3633 | 3645 |
| 231.11.30 | 3627 | 3634 | 3646 |
| 232.11.30 | 3627 | 3635 | 3647 |
| 233.11.30 | 3627 | 3636 | 3648 |
| 234.11.30 | 3627 | 3637 | 3649 |
| 235.11.30 | 3627 | 3638 | 3650 |
| 236.11.30 | 3627 | 3639 | 3651 |
| 237.11.30 | 3627 | 3640 | 3652 |
| 174.11.31 | 3628 | 3641 | 3653 |
| 235.11.31 | 3628 | 3631 | 3654 |
| 174.11.1 | 3629 | 3631 | 3655 |
| 235.11.1 | 3629 | 3642 | 3656 |
| 235.NT | 3630 | 3631 | 3657 |

TABLE 24
Guide sequences cloned into p59.491.U6.X.Y. plasmids. (X =
guide; Y = spacer) with spacer length variants

| | | Spacer | Guide | Guide + Spacer |
|---|---|---|---|---|
| Guide.spacer | Spacer | Sequence | Sequence | Sequence |
| Construct | length | (SEQ ID NO) | (SEQ ID NO) | (SEQ ID NO) |
| 174.11.30 | 20 nt | 3658 | 3669 | 3671 |
| 174.11.39 | 19 nt | 3659 | 3669 | 3672 |
| 174.11.38 | 18 nt | 3660 | 3669 | 3673 |
| 174.11.31 | 20 nt | 3661 | 3669 | 3674 |
| 174.11.37 | 19 nt | 3662 | 3669 | 3675 |
| 174.11.36 | 18 nt | 3663 | 3669 | 3676 |
| 235.11.1 | 20 nt | 3664 | 3670 | 3677 |
| 235.11.41 | 19 nt | 3665 | 3670 | 3678 |
| 235.11.40 | 18 nt | 3666 | 3670 | 3679 |
| 235.11.2 | 20 nt | 3667 | 3670 | 3680 |
| 235.11.43 | 19 nt | 3668 | 3670 | 3681 |
| 235.11.42 | 18 nt | 40542 | 3670 | 3682# |

TABLE 25
Sequences of AAV vector components common to the plasmids

| | | DNA sequence | Length of |
|---|---|---|---|
| Component | Part Name | or SEQ ID NO | Component (bp) |
| 5′ITR | | 3683 | 130 |
| buffer seq | | 3684 | 23 |
| enhancer | CMV | 3685 | 380 |
| Pol II promoter | CMV | 3619 | 204 |
| buffer seq | | 3686 | 15 |
| Kozak | | 3687 | 12 |
| start codon | MA | ATGGCC | 6 |
| 5′NLS | SV40 | 3689 | 21 |
| 5′linker | SR | TCTAGA | 6 |
| 3′NLS linker | GS | GGATCC | 6 |
| 3′NLS | SV40 | 3692 | 21 |
| tag | HA | 3693 | 27 |
| linker | GS | GGATCCTAA | 9 |
| buffer seq | | 3695 | 30 |
| Poly(A) | BgH poly A | 3696 | 209 |
| buffer seq | | GGTACCGT | 8 |
| Pol III promoter | U6 promoter | 3698 | 242 |
| buffer | | GAAACACC | 8 |
| buffer | | 3700 | 17 |
| 3′ITR | | 3701 | 141 |

TABLE 26
DNA sequences encoding CasX utilized in AAV

| CasX | SEQ | Length of coding |
|---|---|---|
| protein no. | ID NO: | sequence (bp) |
| 438 | 3702 | 2931 |
| 491 | 3703 | 2932 |
| 527 | 3704 | 2934 |
| 535 | 3705 | 2935 |
| 536 | 3706 | 2935 |
| 537 | 3707 | 2935 |
| 583 | 3708 | 2935 |
| 668 | 3709 | 2938 |
| 672 | 3710 | 2934 |
| 669 | 3711 | 2938 |
| 670 | 3712 | 2938 |
| 676 | 3713 | 2938 |

### Reporter Cell Lines:

[0554] A neural progenitor cell line isolated from the Ai9-tdTomato was cultured in suspension in pre-equilibrated mNPC medium (DMEM/F12 with GlutaMax™, 10 mM HEPES, 1×MEM Non-Essential Amino Acids, 1× penicillin/streptomycin, 1:1000 2-mercaptoethanol, 1×B-27 supplement, minus vitamin A, 1×N2 with supplemented growth factors bFGF and EGF). Prior to testing, cells were dissociated using accutase, with gentle resuspension, monitoring for complete separation of the neurospheres. Cells were then quenched with media, spun down and resuspended in fresh media. Cells were counted and directly used for nucleofection or 10,000 cells were plated in a 96-well plate coated with PLF (1×Poly-DL-ornithine hydrobromide, 10 mg/mL in sterile diH20, 1× Laminin, and 1× Fibronectin), 2 days prior to AAV transduction.

[0555] A HEK293T dual reporter cell line was generated by knocking into HEK293T cells two transgene cassettes that constitutively expressed exon 1 of the human RHO gene linked to GFP and exon 1 of the human P23H.RHO gene linked to mScarlet. The modified cells were expanded by serial passage every 3-5 days and maintained in Fibroblast (FB) medium, consisting of Dulbecco's Modified Eagle Medium (DMEM; Corning Cellgro, #10-013-CV) supplemented with 10% fetal bovine serum (FBS; Seradigm, #1500-500), and 100 Units/mL penicillin and 100 mg/mL streptomycin (100×-Pen-Strep; GIBCO #15140-122), and can additionally include sodium pyruvate (100×, Thermofisher #11360070), non-essential amino acids (100× ThermoFisher #11140050), HEPES buffer (100× ThermoFisher #15630080), and 2-mercaptoethanol (1000× ThermoFisher #21985023). The cells were incubated at 37° C. and 5% CO2. After 1-2 weeks, GFP+/mscarlet+ cells were bulk sorted into FB medium. The reporter lines were expanded by serial passage every 3-5 days and maintained in FB medium in an incubator at 37° C. and 5% CO2. Reporter clones were generated by a limiting dilution method. The clonal lines were characterized via flow cytometry, genomic sequencing, and functional modification of the RHO locus using a previously validated RHO targeting CasX molecule. The optimal reporter lines were identified as ones that: i) had a single copy of WTRHO.GFP and mutRHO.mScarlet correctly integrated per cell; ii) maintained doubling times equivalent to unmodified cells; and iii) resulted in reduction in GFP and mscarlet fluorescence upon disruption of the RHO gene when assayed using the methods described below.

### Plasmid Nucleofection:

[0556] AAV cis-plasmids driving expression of the CasX-scaffold-guide system were nucleofected in mNPCs using the Lonza P3 Primary Cell 96-well Nucleofector Kit. For the ARPE-19 line, the Lonza SF solution and supplement was used. Plasmids were diluted to concentrations of 200 ng/μl, 100 ng/μL. 5 μL of DNA per construct was added to the P3 or SF solution containing 200,000 tdTomato mNPCs or ARPE-19 cells respectively. The combined solution was nucleofected using a Lonza 4D Nucleofector System according to manufacturer's guidelines. Following nucleofection, the solution was quenched with appropriate culture media. The solution was then aliquoted in triplicate (approx. 67,000 cells per well) in a 96-well plate. 48 hours after transfection, treated mNPCs were replenished with fresh mNPC media containing growth factors and treated ARPE-19 cells were replenished with fresh FB medium. 5 days after transfection, tdTomato mNPCs and ARPE-19 cells were lifted and activity was assessed by FACS.

### AAV Vectors Production:

[0557] Suspension HEK293T cells were adapted from parental HEK293T and grown in FreeStyle 293 media. For screening purposes, small scale cultures (20-30 mL cultured in 125 mL Erlenmeyer flasks and agitated at 110 rpm) were diluted to a density of 1.5e+6 cells/mL on the day of transfection. Endotoxin-free pAAV plasmids with the transgene flanked by ITR repeats were co-transfected with plasmids supplying the adenoviral helper genes for replication and encoding AAV rep/cap proteins using PEI MAX® (Polysciences) in serum-free Opti-MEM™ media. Cultures were supplemented with 10% CDM4HEK293 (HyClone) 3 hours post-transfection. Three days later, cultures were centrifuged at 1000 rpm for 10 minutes to separate the supernatant from the cell pellet. The supernatant was mixed with 40% PEG 2.5M NaCl (8% final concentration) and incubated on ice for at least 2 hours to precipitate AAV viral particles. The cell pellet, containing the majority of the AAV vectors, was resuspended in lysis media (0.15M NaCl, 50 mM Tris HCl, 0.05% Tween, pH 8.5), sonicated on ice (15 seconds, 30% amplitude) and treated with Benzonase (250 U/μL, Novagen) for 30 minutes at 37° C. Crude lysate and PEG-treated supernatant were then spin at 4000 rpm for 20 minutes at 4° C. to resuspend the PEG precipitated AAV (pellet) with cell debris-free crude lysate (supernatant) clarified further using a 0.45 μM filter.

[0558] To determine the viral genome titer, 1 μL from crude lysate viruses was digested with DNase and proteinase K, followed by quantitative PCR. 5 μL of digested virus was used in a 25 μL qPCR reaction composed of IDT primetime master mix and a set of primer and 6′FAM/Zen/IBFQ probe (IDT) designed to amplify the CMV promoter region or a 62 bp-fragment located in the AAV2-ITR. Ten-fold serial dilutions (5 pl each of 2e+9 to 2e+4 DNA copies/mL) of an AAV ITR plasmid was used as reference standards to calculate the titer (viral genome (vg)/mL) of viral samples.

### AAV Transduction:

[0559] 10,000 cells/well of mNPCs were seeded on PLF-coated wells in 96-well plates 48-hours before AAV transduction. All viral infection conditions were performed in triplicate, with normalized number of vg among experimental vectors, in a series of 3-fold dilution of multiplicity of infection (MOI) ranging from ˜1.0e+6 to 1.0e+4 vg/cell. Calculations were based on an estimated number of 20,000 cells per well at the time of transfection. Final volume of 50 μL of AAV vectors diluted in pre-equilibrated mNPC medium supplemented with bFGF/EGF growth factors (20 ng/ml final concentration) were applied to each well. 48 hours post-transfection, complete media change was performed with fresh media supplemented with growth factors. Editing activity (tdT+ cell quantification) was assessed by FACS 5 days post-transfection.

[0560] Assessing editing activity by FACS: 5 days after transfection, treated tdTomato mNPCs or ARPE-19 cells in 96-well plates were washed with dPBS and treated with 50 μL TrypLE and Trypsin (0.25%) for 15 and 5 minutes respectively. Following cell dissociation, treated wells were quenched with media containing DMEM, 10% FBS and 1×penicillin/streptomycin. Resuspended cells were transferred to round-bottom 96-well plates and centrifuged for 5 min at 1000×g. Cell pellets were then resuspended with dPBS containing 1×DAPI, and plates were loaded into an Attune NxT Flow Cytometer Autosampler. The Attune NxT flow cytometer was run using the following gating parameters: FSC-A×SSC-A to select cells, FSC-H×FSC-A to select single cells, FSC-A×VL1-A to select DAPI-negative alive cells, and FSC-A×YL1-A to select tdTomato positive cells.

[0561] NGS analysis of indels at mRHO exon 1 locus: 5 days after transfection, treated tdTomato mNPCs in 96-well plates were washed with dPBS and treated with 50 μL TrypLE and trypsin (0.25%) for 15 and 5 minutes respectively. Following cell dissociation, treated wells were quenched with media containing DMEM, 10% FBS and 1× penicillin/streptomycin. Cells were then spun down and resulting cell pellets washed with PBS prior to processing them for gDNA extraction using the Zymo mini DNA kit according to the manufacturer's instructions. For assessing editing levels occurring at the mouse RHO exon 1 locus, amplicons were amplified from 200ng of gDNA with a set of primers targeting the RHO exon 1 locus, bead-purified (Beckman coulter, Agencourt Ampure XP) and then re-amplified to incorporate Illumina™ adapter sequences. Specifically, these primers contained an additional sequence at the 5′ ends to introduce Illumina™ read and 2 sequences as well as a 16 nt random sequence that functions as a unique molecular identifier (UMI). Quality and quantification of the amplicon was assessed using a Fragment Analyzer DNA analyzer kit (Agilent, dsDNA 35-1500 bp). Amplicons were sequenced on the Illumina™ Miseq™ according to the manufacturer's instructions. Raw fastq files from sequencing were processed as follows: (1) the sequences were trimmed for quality and for adapter sequences using the program cutadapt (v. 2.1); (2) the sequences from read 1 and read 2 were merged into a single insert sequence using the program flash2 (v2.2.00); and (3) the consensus insert sequences were run through the program CRISPResso2 (v 2.0.29), along with the expected amplicon sequence and the spacer sequence. This program quantifies the percent of reads that were modified in a window around the 3′ end of the spacer (30 bp window centered at −3 bp from 3′ end of spacer). The activity of the CasX molecule was quantified as the total percent of reads that contain insertions, substitutions and/or deletions anywhere within this window.

### Results

[0562] Different editing experiments were conducted to quantify on-target cleavage mediated by CasX 491 paired with gRNA scaffold variants (guides 174 & 229-237) with different spacers targeting multiple genomic loci of interest. Constructs were cloned into the AAV backbone p59, flanked by ITR2 sequences, driving expression of the protein Cas 491 under the control of a CMV promoter, as well as the scaffold-spacer under the control of the human U6 promoter.

[0563] The mNPC-tdT reporter cell line was used to assess single-cut efficiency at the endogenous mouse RHO exon 1 locus (spacer 11.30, CTC PAM). A dual reporter system integrated in a ARPE-19 derived cell line was also used to assess on-target editing at the exogenously expressed human WT RHO locus (spacer 11.1, CTC PAM).

[0564] Scaffold variants with spacer 11.30 were tested via nucleofection in the mouse NPC cell line at two different doses, 1000ng and 500ng. Constructs were compared to the current benchmark gRNA scaffold 174 activity. Constructs expressing scaffold variants 231, 233, 234, 235 performed at higher levels than ones with scaffold 174.11.30 (FIGS. 48A and 48B). Scaffold 235 displayed a 2-fold increased activity at mRHO exon 1 locus compared to gRNA scaffold 174. Whether scaffold 235 consistently improved activity without increased off-target cleavage was further validated by nucleofecting the dual reporter ARPE-19 cell line with construct p59.491.174.11.1 and p59.491.235.11.1, as well as a non-target spacer control. Spacer 11.1 was targeting the exogenously expressed hRHO-GFP gene. Scaffold 235 displayed 3-fold increased activity compared to 174 (9% vs 3% of Rho-GFP− cells respectively, FIGS. 49A and 49B). Allele-specificity was assessed by looking at the frequency of hP23H-RHO-Scarlet-cell population, whose sequence differs from the wild-type by 1 bp.

[0565] Experiments were performed to test whether these scaffold variants packaged efficiently in AAV and remained potent when delivered virally. mNPC transduced with AAV vectors expressing guide scaffold 235 with spacer 11.30 (on-target, mouse WT RHO) showed increased activity at the on-target locus (>5-fold increase, FIGS. 50A and 59B) compared to ones infected with AAV.491.174.11.30 at 3.0e+5 MOI, with significant no off-target indels detectable with both AAV.491.174.11.31 and AAV.491.235.11.31 vectors targeting the P23H-RHO SNP, respectively.

[0566] Assessing effects of spacer length: Another set of experiments was conducted to test whether spacer length variants could improve on-target activity. Spacers 11.39, 11.38 and spacer 11.37 (19 nt P23H RHO), 11.36 (18 nt P23H RHO) were designed from parental spacer 11.30 (20 nt WT RHO) and 11.31 (20 nt P23H RHO), respectively, harboring 1 or 2 bp truncations on the 3′ end of the sequence. mfNPC-tdT cells were nucleofected with 1000 ng and 500 ng of constructs p59.491.174.11.30 (20 nt WT RHO), p59.491.174.11.39 (19 nt WT RHO), p49.491.174.11.38 (18 nt WT RHO), and editing levels were assessed 5 days later. All truncated spacer versions improved editing levels (FIGS. 51A and 51C), with highest improvement observed with p59.491.11.39 constructs (˜2-fold improvement achieved with the 19 bp spacer relative to the 20 bp spacer length construct). No increase in off-target cleavage was observed with truncation spacer variants of the 11.31 spacer targeting the mouse P23H-RHO locus (FIG. 51B).

[0567] These results support that scaffold variants with structural mutations can be engineered with increased activity in dual reporter systems investigating therapeutically relevant genomic targets such as the mouse and human RHO exon 1 loci. Furthermore, while the newly characterized scaffold displayed overall >2-fold increase in activity, no off-target cleavage with a 1-bp mismatch spacer region was detected. This is relevant for allele-specific therapeutic strategy such as autosomal dominant retinitis pigmentosa P23H RHO, which mutated allele differs from WT sequence by 1 nucleotide, targeted by spacer 11.31. This study further validates the use of guide scaffold 235 in AAV vectors designed for P23H RHO rescue and genotoxic studies as well as for other therapeutic targets.

### Example 13: Improved Scaffold and Guide Variants Demonstrate Enhanced On-Target Activity In Vivo

[0568] Experiments were conducted to demonstrate that engineered CasX & gRNA-guide and spacer variants harboring structural mutations that improve selectivity and on-target activity lead to increase edits when delivered in vivo to photoreceptors in the mouse retina, with a spacer targeting the P23 residue at a therapeutically relevant level in the WT. Here, it was assessed whether vector expressing CasX variant 491, guide variant 235 and spacer 11.39 improves editing levels compared to parental CasX 491, guide variant 174 and spacer 11.30 in vivo.

### Materials and Methods

[0569] Generation of AAV Plasmids and Viral Vectors: The CasX variant 491 under the control of the RHO promoter, and gRNA.guide variant 174 with spacer 11.30 and spacer 11.31 (AAGTGGCTCCGCACCACGCC (SEQ ID NO: 3628)) or gRNA-guide variant 235 with spacer 11.39 (AAGGGGCTCCGCACCACGCC (SEQ ID NO: 3658)) and 11.37 (AAGTGGCTCCGCACCACGC (SEQ ID NO: 3662)) targeting mouse RHO exon 1 at P23 residues) under the U6 promoter were cloned into the p59 plasmid flanked with AAV2 ITR.

[0570] Cloning: Each part in the AAV genome was separated by restriction enzyme sites to allow for modular cloning. Parts were ordered as gene fragments from Twist, PCR amplified, and digested with corresponding restriction enzymes, cleaned, then ligated into a vector also digested with the same enzymes. Cas X variant 491 under the RHO promoter and scaffold variants 174 and 235, under the control of the human U6 promoter, were cloned into an AAV backbone, flanked by AAV2 ITRs. Spacers 11.30, 11.31 and variants 11.39, 11.37 were cloned respectively into pAAV.RHO.491.174 and pAAV.RHO.491.235 using Golden Gate cloning. New AAV constructs were then transformed into chemically competent E. coli (Stbl3s). Validated constructs were maxi-prepped. To assess the quality of maxi-preps, constructs were processed in two separate digests with XmaI (which cuts at several sites in each of the ITRs) and XhoI which cuts once in the AAV genome. If the plasmid was >90% supercoiled, the correct size, and the ITRs were intact, the construct was subsequently used for AAV vector production.

### AAV Vectors Production:

[0571] Suspension HEK293T cells were adapted from parental HEK293T and grown in FreeStyle 293 media. 500 mL cultures were diluted to a density of 2e+6 cells/mL on the day of transfection. Endotoxin-free pAAV plasmids with the transgene flanked by ITR repeats were co-transfected with plasmids supplying the adenoviral helper genes for replication and encoding AAV rep/cap proteins using PEI MAX® (Polysciences) in serum-free Opti-MEM™ media. Three days later, cultures were centrifuged to separate the supernatant from the cell pellet, and the AAV particles were collected, concentrated, and filtered following standard procedures.

[0572] To determine the viral genome titer, 1 μL from crude lysate viruses was digested with DNase and proteinase K, followed by quantitative PCR. 5 μL of digested virus was used in a 25 μL qPCR reaction composed of IDT primetime master mix and a set of primers and 6′FAM/Zen/IBFQ probe (IDT) designed to amplify a 62 bp-fragment located in the AAV2-ITR. An AAV ITR plasmid was used as reference standards to calculate the titer (viral genome (vg)/mL) of viral samples.

[0573] Subretinal injections C57BL6J mice were obtained from the Jackson Laboratories and were maintained in a normal 12-hour light/dark cycle. Subretinal injections were performed on 3-4 weeks old mice. Mice were anesthetized with isoflurane inhalation. Proparacaine (0.5%) was applied topically on the cornea and the eyes were dilated with drops of tropicamide (1%) and phenylephrine (2.5%). Eyes were kept lubricated with Genteal® gel during the surgery. Under a surgical microscope, an ultrafine 30½-gauge disposable needle was passed through the sclera, at the equator and next to the limbus, to create a small hole into the vitreous cavity. Using a blunt-end needle, 1-1.5 μL of virus was injected directly into the subretinal space, between the RPE and retinal layer. Each mouse from the experimental groups was injected with 1.5.0e+9 viral genome (vg)/eye.

[0574] NGS analysis: 3 weeks post-injection, animals were sacrificed, and the eyes enucleated in fresh PBS. Whole retinae were isolated from the eye cups and processed for gDNA extraction using the DNeasy® Blood & Tissue Kit (Qiagen) according to the manufacturer's instructions. Amplicons were amplified from 200 ng of gDNA with a set of primers targeting the mouse RHO, exon 1 locus, bead-purified (Beckman coulter, Agencourt Ampure XP) and then re-amplified to incorporate Illumina™ adapter sequences. Specifically, these primers contained an additional sequence at the 5′ ends to introduce Illumina™ read and 2 sequences, as well as a 16 nt random sequence that functions as a unique molecular identifier (UMI). Quality and quantification of the amplicon was assessed using a Fragment Analyzer DNA analyzer kit (Agilent, dsDNA 35-1500 bp). Amplicons were sequenced on the Illumina™ Miseq™ according to the manufacturer's instructions. Raw fastq files from sequencing were processed as follows: (1) the sequences were trimmed for quality and for adapter sequences using the program cutadapt (v. 2.1); (2) the sequences from read 1 and read 2 were merged into a single insert sequence using the program flash2 (v2.2.00); and (3) the consensus insert sequences were run through the program CRISPResso2 (v 2.0.29), along with the expected amplicon sequence and the spacer sequence. This program quantifies the percent of reads that were modified in a window around the 3′ end of the spacer (30 bp window centered at −3 bp from 3′ end of spacer). The activity of the CasX molecule was quantified as the total percent of reads that contain insertions, substitutions and/or deletions anywhere within this window.

### Results

[0575] The benchmark vector, AAV.491.174.11.30 (on-target) achieved ˜8% editing across all samples (FIG. 52A; n=8 retinas). A similar vector with spacer 11.31 (off-target, 1 bp mismatch from 11.30 targeting P23H-RHO SNP) showed background level of editing (˜0.4%). An AAV vector expressing scaffold variant 235 and spacer 11.39 achieved over a 2-fold improvement relative to the AAV.491.174.11.30 parental vector (FIG. 52B), with a mean of 16% editing, and as high as 25% in some retinas. This increase in on-target editing remained selective, as no increase in off-target with spacer 11.37 (targeting P23H-RHO SNP, 1 bp-mismatch compared to spacer 11.39) levels compared to AAV.491.174.11.31 parental vector.

[0576] These experiments demonstrate proof-of-concept that CasX 491 expression driven by a rod photoreceptor-selective promoter with scaffold 174, and a spacer targeting the mouse P23 RHO locus can achieve therapeutic-relevant levels of edits at the P23 mouse locus when sub-retinally delivered via AAV in the murine retina. These results also support that editing levels achieved from engineered gRNA guide (235) and spacer variants (11.39) screened previously in vitro translate as well in vivo, and retain allele-specific selectivity. This study further validates the use of guide scaffold 235 in AAV vectors designed for P23H RHO rescue and genotoxic studies, as well as for other therapeutic targets.

[0577] The results of Examples 11 and 12 support that scaffold variants with structural mutation can be engineered with increased activity in dual reporter systems investigating therapeutically relevant genomic targets such as the mouse and human RHO exon 1 loci. Furthermore, while the newly characterized 235 scaffold displayed an overall >2-fold increase in activity, no off-target cleavage with 1-bp mismatch spacer region was detected. This is relevant for allele-specific therapeutic strategy such as autosomal dominant retinitis pigmentosa P23H RHO, which mutated allele differs from WT sequence by 1 nucleotide, targeted by spacer 11.31. The present study was conducted to further validate the use of guide scaffold 235 in AAV vectors designed for mouse P23H RHO rescue and genotoxic studies, as well as for other therapeutic targets.

### Example 14: Improved CasX Variants Demonstrate Enhanced On-Target Activity In Vitro

[0578] The CasX protospacer adjacent motif allows for genomic targeting with precision, which is necessary for various genome editing therapeutic applications, such as autosomal dominant RHO, which requires an allele-specific targeting of the P23H mutation without altering the wild-type sequence.

[0579] Experiments were conducted to investigate whether rationally-designed engineered CasX nucleases, with introduced mutations predicted to increase CTC-PAM mediated on-target activity while keeping fidelity high, and with reduced off-target events, improved editing levels at the endogenous mouse RHO locus when delivered in vivo to rod photoreceptors cells,

[0580] Additionally, experiments were conducted to further validate the use of guide scaffold 235 in AAV vectors designed for mouse P23H RHO rescue and genotoxic studies, as well as for other therapeutic targets.

### Methods

[0581] CasX protein variants identified in different assays looking at PAM activity were selected for their increased activity at CTC PAM. The CasX proteins were cloned into an AAV transgene construct for plasmid and viral vector validation. The AAV transgene was conceptually broken up between ITRs into different parts, which consisted of the therapeutic cargo and accessory elements relevant to expression in mammalian cells and the nuclease-guide RNA complex (Protein, scaffold, spacer).

### Cloning:

[0582] Each part in the AAV genome was separated by restriction enzyme sites to allow for modular cloning. Parts were ordered as gene fragments from Twist, PCR amplified, and digested with corresponding restriction enzymes, cleaned, then ligated into a vector also digested with the same enzymes. New AAV constructs were then transformed into chemically competent E. coli (Stbl3s). Validated constructs were maxi-prepped. To assess the quality of maxi-preps, constructs were processed in two separate digests with XmaI (which cuts at several sites in each of the ITRs) and XhoI which cuts once in the AAV genome. These digests and the uncut construct were then run on a 1% agarose gel. If the plasmid was >90% supercoiled, the correct size, and the ITRs were intact, the construct moved on to be tested via nucleofection and subsequently used for AAV vector production.

### Reporter Cell Lines:

[0583] An immortalized neural progenitor cell line isolated from the Ai9-tdTomato was cultured in suspension in pre-equilibrated mNPC medium (DMEM/F12 with GlutaMax™, 10 mM HEPES, 1×MEM Non-Essential Amino Acids, 1× penicillin/streptomycin, 1:1000 2-mercaptoethanol, 1×B-27 supplement, minus vitamin A, 1×N2 with supplemented growth factors bFGF and EGF. Prior to testing, cells were lifted using accutase, with gentle resuspension, monitoring for complete separation of the neurospheres. Cells were then quenched with media, spun down and resuspended in fresh media. Cells were counted and directly used for nucleofection or 10,000 cells were plated in a 96-well plate coated with PLF (1×Poly-DL-ornithine hydrobromide, 10 mg/mL in sterile diH20, 1×Laminin, and 1×Fibronectin), 2 days prior to AAV transduction.

[0584] A HEK293T dual reporter cell line was generated by knocking into HEK293T cells two transgene cassettes that constitutively expressed exon 1 of the human RHO gene linked to GFP and exon 1 of the human P23H.RHO gene linked to mscarlet. The modified cells were expanded by serial passage every 3-5 days and maintained in Fibroblast (FB) medium, consisting of Dulbecco's Modified Eagle Medium (DMEM; Corning Cellgro, #10-013-CV) supplemented with 10% fetal bovine serum (FBS; Seradigm, #1500-500), and 100 Units/mL penicillin and 100 mg/mL streptomycin (100×-Pen-Strep; GIBCO #15140-122), and can additionally include sodium pyruvate (100×, Thermofisher #11360070), non-essential amino acids (100× ThermoFisher #11140050), HEPES buffer (100× ThermoFisher #15630080), and 2-mercaptoethanol (1000× ThermoFisher #21985023). The cells were incubated at 37° C. and 5% CO2. After 1-2 weeks, GFP+/mscarlet+ cells were bulk sorted into FB medium. The reporter lines were expanded by serial passage every 3-5 days and maintained in FB medium in an incubator at 37° C. and 5% CO2. Reporter clones were generated by a limiting dilution method. The clonal lines were characterized via flow cytometry, genomic sequencing, and functional modification of the RHO locus using a previously validated RHO targeting CasX molecule. The optimal reporter lines were identified as ones that: i) had a single copy of WT-RHO.GFP and P23H-RHO.mScarlet correctly integrated per cell; ii) maintained doubling times equivalent to unmodified cells; and iii) resulted in reduction in GFP and mScarlet fluorescence upon disruption of the RHO gene when assayed using the methods described below.

### Plasmid Nucleofection:

[0585] AAV cis-plasmids driving expression of the CasX-scaffold-guide system were nucleofected in mNPCs using the Lonza P3 Primary Cell 96-well Nucleofector Kit. For the ARPE-19 line, the Lonza SF solution and supplement was used. Plasmids were diluted to concentrations of 200 ng/ul, 100 ng/μL. 5 μL of DNA per construct was added to the P3 or SF solution containing 200,000 tdTomato mNPCs or ARPE-19 cells respectively. The combined solution was nucleofected using a Lonza 4D Nucleofector System according to manufacturer's guidelines. Following nucleofection, the solution was quenched with appropriate culture media. The solution was then aliquoted in triplicate (approx. 67,000 cells per well) in a 96-well plate. 48 hours after transfection, treated cells were replenished with fresh mNPC media containing growth factors. 5 days after transfection, tdTomato mNPCs were lifted and activity was assessed by FACS.

### AAV Vectors Production:

[0586] Suspension HEK293T cells were adapted from parental HEK293T and grown in FreeStyle 293 media. For screening purposes, small scale cultures (20-30 mL) were diluted to a density of 1.5e+6 cells/mL on the day of transfection. Endotoxin-free pAAV plasmids with the transgene flanked by ITR repeats were co-transfected with plasmids supplying the adenoviral helper genes for replication and encoding AAV rep/cap proteins using PEI MAX® (Polysciences) in serum-free Opti-MEM™ media. Three days later, cultures were centrifuged to separate the supernatant from the cell pellet, and the AAV particles were collected, concentrated, and filtered following standard procedures.

[0587] To determine the viral genome titer, 1 μL from crude lysate viruses was digested with DNase and proteinase K, followed by quantitative PCR. 5 μL of digested virus was used in a 25 μL qPCR reaction composed of IDT primetime master mix and a set of primers and 6′FAM/Zen/IBFQ probe (IDT) designed to amplify the CMV promoter region or a 62 nucleotide-fragment located in the AAV2-ITR. Ten-fold serial dilutions (5 pl each of 2e+9 to 2e+4 DNA copies/mL) of an AAV ITR plasmid was used as reference standards to calculate the titer (viral genome (vg)/mL) of viral samples.

### AAV Transduction:

[0588] 10,000 cells/well of mNPCs were seeded on PLF-coated wells in 96-well plates 48-hours before AAV transduction. All viral infection conditions were performed in triplicate, with normalized number of vg among experimental vectors, in a series of 3-fold dilution of multiplicity of infection (MOI) ranging from ˜1.0e+6 to 1.0e+4 vg/cell. Calculations were based on an estimated number of 20,000 cells per well at the time of transfection. Final volumes of 50 μL of AAV vectors diluted in pre-equilibrated mNPC medium supplemented with bFGF/EGF growth factors (20 ng/ml final concentration) were applied to each well. 48 hours post-transfection, complete media change was performed with fresh media supplemented with growth factors. Editing activity (tdT+ cell quantification) was assessed by FACS 5 days post-transfection.

### Assessing Editing Activity by FACS:

[0589] 5 days after transfection, treated tdTomato mNPCs or ARPE-19 cells in 96-well plates were washed with dPBS and treated with 50 μL TrypLE and Trypsin (0.25%) for 15 and 5 minutes, respectively. Following cell dissociation, treated wells were quenched with media containing DMEM, 10% FBS and 1× penicillin/streptomycin. Resuspended cells were transferred to round-bottom 96-well plates and centrifuged for 5 min at 1000×g. Cell pellets were then resuspended with dPBS containing 1×DAPI, and plates were loaded into an Attune NxT Flow Cytometer Autosampler. The Attune NxT flow cytometer was run using the following gating parameters: FSC-A×SSC-A to select cells, FSC-H×FSC-A to select single cells, FSC-A×VL1-A to select DAPI-negative alive cells, and FSC-A×YL1-A to select tdTomato positive cells.

NGS Analysis of Indels at mRHO Exon I Locus:

[0590] 5 days after transfection, treated tdTomato mNPCs in 96-well plates were washed with dPBS and treated with 50 μL TrypLE and trypsin (0.25%) for 15 and 5 minutes, respectively. Following cell dissociation, treated wells were quenched with media containing DMEM, 10% FBS and 1× penicillin/streptomycin. Cells were then spun down and resulting cell pellets washed with PBS prior to processing them for gDNA extraction using the Zymo mini DNA kit according to the manufacturer's instructions. For assessing editing levels occurring at the mouse RHO exon 1 locus, amplicons were amplified from 200 ng of gDNA with a set of primers targeting the mouse RHO exon 1 locus, bead-purified (Beckman coulter, Agencourt Ampure XP) and then re-amplified to incorporate Illumina™ adapter sequences. Specifically, these primers contained an additional sequence at the 5′ ends to introduce Illumina™ read and 2 sequences as well as a 16 nt random sequence that functions as a unique molecular identifier (UMI). Quality and quantification of the amplicon was assessed using a Fragment Analyzer DNA analyzer kit (Agilent, dsDNA 35-1500 bp). Amplicons were sequenced on the Illumina™ Miseq according to the manufacturer's instructions. Raw fastq files from sequencing were processed as follows: (1) the sequences were trimmed for quality and for adapter sequences using the program cutadapt (v. 2.1); (2) the sequences from read 1 and read 2 were merged into a single insert sequence using the program flash2 (v2.2.00); and (3) the consensus insert sequences were run through the program CRISPResso2 (v 2.0.29), along with the expected amplicon sequence and the spacer sequence. This program quantifies the percent of reads that were modified in a window around the 3′ end of the spacer (30 bp window centered at −3 bp from 3′ end of spacer). The activity of the CasX molecule was quantified as the total percent of reads that contain insertions, substitutions and/or deletions anywhere within this window.

### Results

[0591] Engineered mutations in prior assays identified CasX variants with the ability to increase both overall activity, specificity of the nuclease, as well as increased activity with spacers targeting CTC-PAM sites. These mutations to the CasX 491 protein gave rise to CasX variant proteins 515, 527, 528, 535, 536 and 537 (see Table 5 for sequences).

[0592] Multiple editing screens were conducted to quantify on-target editing levels mediated by these CasX variant proteins paired with gRNA scaffolds 174 or 235 and different spacers targeting multiple genomic loci of interest (the encoding sequences of the guides and spacers are presented in Tables 23 and 24). Constructs were cloned into the AAV backbone p59, flanked by ITR2 sequences, driving expression of the Cas X under the control of a CMV promoter, as well the scaffold-spacer under the control of the human U6 promoter. The mNPC-tdT reporter cell line was used to assess single-cut efficiency at the endogenous mouse RHO exon 1 locus (spacer 11.39, CTC PAM, FIG. 53A). A dual reporter system integrated in an ARPE-19 derived cell line was also used to assess on-target editing at the exogenously expressed human WT RHO locus (spacer 11.41, CTC PAM) or at the P23H-RHO locus (spacer 11.43, CTC PAM, FIG. 53B).

[0593] The CasX protein variants with spacer 11.39 were tested via nucleofection in the mouse NPC cell line at two different doses, 1000 ng and 500 ng. Constructs were compared to the parental CasX 491 activity. AAV constructs expressing CasX 535 and 537 with scaffold 174 and spacer 11.30 demonstrated the greatest editing activity at the mRHO exon 1 locus of any of the CasX variants (by percent editing, FIG. 53A), which was increased 1.5-fold relative to CasX 491 (FIG. 53C, normalized to 1), without increased off-target cleavage, shown by the nucleofection of the protein variants with spacer 11.37 (targeting mutant P23H-RHO allele, FIG. 53B).

[0594] Experiments were then conducted to determine whether the improvements observed at the mouse RHO locus with the mutated variants translated at the human RHO locus, which is more clinically-relevant. The dual reporter ARPE-19 cell line was nucleofected with constructs expressing the CasX variant proteins paired with either gRNA-scaffold 235 with spacer 11.41 or spacer11.43, targeting human RHO. CasX 535 and 537 also displayed over 1.5-fold increased editing activity compared to CasX 491 (˜4.3% and 4.1% editing compared to 2.4% editing of Rho-GFP− cells respectively, FIGS. 54A and 54B) when targeting the exogenous WT-RHO-GFP locus. Constructs expressing CasX variants 515, 527 and 536 edited at similar levels to CasX 491. Interestingly, when using a spacer targeting the P23H-RHO-mScarlet locus, all the variant proteins demonstrated improved editing compared to CasX 491. The highest activity levels were achieved by constructs expressing CasX 527 (2-fold increase) and CasX 535 (1.8-fold increase).

[0595] Finally, experiments were performed to assess whether these protein variants packaged efficiently in AAV and remained potent when delivered virally. mNPC transduced with AAV vectors expressing CasX 527, 535 and 537 and guide scaffold 235 with spacer 11.39 (on target, mouse WT RHO) showed increased activity at the on-target locus (>2-fold increase, FIGS. 55A and 55B) relative to AAV CasX 491 and guide scaffold 235 with spacer 11.39 with transduction at 3.0e+5 MOI. Fold-improvement in activity were observed in a dose-dependent manner.

[0596] These results support that CasX variants with structural mutations can be engineered resulting in increased editing activity in dual reporter systems at therapeutically-relevant genomic targets, such as the mouse and human RHO exon 1 loci. Furthermore, while the newly-characterized variants displayed an overall 1.5-2-fold increase in activity, they retained allele-specific targeting with no off-target cleavage detected with a 1-bp mismatch spacer. This is relevant for allele-specific therapeutic strategy, such as editing at autosomal dominant retinitis pigmentosa P23H RHO, where the mutated allele differs from WT sequence by 1 nucleotide (targeted by spacer 11.37). This study further validates the use of CasX variants 527, 535, 536 with scaffold 235 in AAV vectors designed for P23H RHO rescue and genotoxic studies, as well as for other therapeutic targets.

### Example 15: AAV Constructs with CasX and Targeted Guides Edit the P23 RHO Locus In Vivo in C57BL/6J Mice

[0597] Experiments were conducted to demonstrate the ability of CasX to edit in vivo the endogenous RHO locus in the mouse retina, with a spacer targeting the P23 residue at a therapeutically relevant level, to generate proof-of-concept data that is expected to justify and inform experiments in the P23H mouse disease model. Here, it was assessed whether CasX variant 491 and guide variant 174, and a spacer targeting the P23 locus of the mouse RHO gene can generate significant, detectable in the retina when injected sub-retinally, and evaluate efficacy and safety of two different viral doses (1.0e+9 and 1.0e+10 vg). Rescue of 10% of rod photoreceptors can restore vision in cases of autosomal dominant retinitis pigmentosa (adRP). Therefore, editing 10% of the RHO loci in rod photoreceptors in the retina may provide a therapeutic benefit in a disease context by reducing the levels of the mutant rhodopsin protein and preventing rod photoreceptor degeneration.

### Materials and Methods

### Generation of AAV Plasmids and Viral Vectors:

[0598] The CasX variant 491 under the control of the CMV promoter and RNA guide variant 174/spacer 11.30 (AAGGGGCTCCGCACCACGCC (SEQ ID NO: 3627), targeting mouse RHO exon 1 at P23 residues) under the U6 promoter were cloned into a pAAV plasmid flanked with AAV2 ITR. AAV.491.174.11.30 vectors were produced in HEK293 cells using the triple-transfection method.

### Subretinal Injections:

[0599] C57BL/6J mice were obtained from the Jackson Laboratories and maintained in a normal 12-hour light/dark cycle. Subretinal injections were performed on 5-6 weeks old mice. Mice were anesthetized with isoflurane inhalation. Proparacaine (0.5%) was applied topically on the cornea and the eyes were dilated with drops of tropicamide (1%) and phenylephrine (2.5%). Eyes were kept lubricated with Genteal® gel during the surgery. Under a surgical microscope, an ultrafine 30½-gauge disposable needle was passed through the sclera, at the equator and next to the limbus, to create a small hole into the vitreous cavity. Using a blunt-end needle, 1-1.5 μL of virus was injected directly into the subretinal space, between the RPE and retinal layer. Each experimental group (n=5) were injected in one eye with 1e+9 vg or 1e+10 viral genome (vg)/eye, and the contralateral eye injected with the AAV formulation buffer.

### NGS Analysis:

[0600] 3 weeks post-injection, animals were sacrificed, and the eyes enucleated in fresh PBS. Whole retinae were isolated from the eye cups and processed for gDNA extraction using the DNeasy® Blood & Tissue Kit (Qiagen) according to the manufacturer's instructions. Amplicons were amplified from 200ng of gDNA with a set of primers targeting the mouse RHO, exon 1 locus, bead-purified (Beckman coulter, Agencourt Ampure XP) and then re-amplified to incorporate Illumina™ adapter sequences. Specifically, these primers contained an additional sequence at the 5′ ends to introduce Illumina™ read and 2 sequences as well as a 16 nt random sequence that functions as a unique molecular identifier (UMI). Quality and quantification of the amplicon was assessed using a Fragment Analyzer DNA analyzer kit (Agilent, dsDNA 35-1500 bp). Amplicons were sequenced on the Illumina™ Miseq™ according to the manufacturer's instructions. Raw fastq files from sequencing were processed as follows: (1) the sequences were trimmed for quality and for adapter sequences using the program cutadapt (v. 2.1); (2) the sequences from read 1 and read 2 were merged into a single insert sequence using the program flash2 (v2.2.00); and (3) the consensus insert sequences were run through the program CRISPResso2 (v 2.0.29), along with the expected amplicon sequence and the spacer sequence. This program quantifies the percent of reads that were modified in a window around the 3′ end of the spacer (30 bp window centered at −3 bp from 3′ end of spacer). The activity of the CasX molecule was quantified as the total percent of reads that contain insertions, substitutions and/or deletions anywhere within this window.

### Immunohistology:

[0601] Mice were euthanized 3-4 weeks post-injection. Enucleated eyes were placed in 10% formalin overnight at 4° C. Retinae were dissected out from the eye cups, rinsed in PBS thoroughly and immersed in 15%-30% sucrose gradient. Tissues were embedded in optimal cutting temperature (OCT), froze on dry ice before being transferred to −80′C storage. 20 M sections were cut using a cryostat. The sections were blocked for ≥1 hour at room temperature in blocking buffer (2% normal goat serum, 1% BSA, 0.1% Triton-X 100) before antibody labeling. The antibodies used were anti-mouse HA (Abcam, 1:500) and Alexa Fluor 488 rabbit anti-mouse (Invitrogen, 1:2000). Sections were counterstained with DAPI to label nuclei, mounted on slides and imaged on a fluorescent microscope.

### Results

[0602] The ability of CasX to edit the P23 RHO locus in the mouse retina was assessed. Two therapeutically relevant doses, 1.0e+9 and 1.0E+10 vg of AAV-CasX.491.174.11.30 were administered in the subretinal space of 5-6 weeks old C57BL/6J mice. Three weeks post-injections, retinae were harvested and editing levels quantified via NGS and the CRISPResso analysis pipeline. The spacer 11.30 targets the WT P23 genomic locus (FIG. 56) located at the beginning of the first exon of RHO. Overexpression of CasX-491.174.11.30 led to significant, dose-dependent, editing of mRHO exon 1 locus in treated-compared to sham-injected retinae (FIGS. 57A-57B). The left panel (FIG. 57A) shows the quantification in % of total indels detected by NGS at the mouse P23 RHO locus in AAV-CasX or sham-injected retinae compared to the mouse reference genome. The right panel (FIG. 57B) shows the fraction (%) of edits predicted to lead to frameshift mutations in RHO protein. Data are presented as average of NGS readouts of editing outcomes from the entire retina, from six to eight animals per experimental cohort. The highest AAV dose, 1e+10 vg/eye, increased indels rate by 4-fold compared to the 1.0e+9 vg dose, with 40.3±22% versus 12.3±5% RHO editing detected respectively. The majority of indels generated by CasX.491 were deletions (left panel), predicted to translate to a high frequency of frameshift-mutations (64.7 versus 76.9% for 1.0e+9 and 1.0e+10 vg/dose respectively), and hypothetically high levels of RHO protein knock down. These results suggest that with a spacer driving allele-specific target of mutant P23H locus in the P23H+/− mouse model, CasX could efficiently editing 10% of rod photoreceptor, with the majority of edits translating to a knocking-down the mutant P23H RHO and significantly delay photoreceptor degeneration.

[0603] Immunohistochemistry performed on injected retinal cross-sectioned confirmed CasX expression in the photoreceptor layers, but also showed spread of the virus to the inner layers as show in in FIGS. 58A-53F. The treatment groups were 1.0e+9 vg of AAV-CasX (FIGS. 58B and 58E); 1.0e+10 vg AAV-CasX (FIGS. 58C and 58F); or PBS (FIGS. 58A and 58D). Levels of HA-tagged CasX was assessed by Anti-HA antibody staining (lower panels of FIGS. 53E, and 53F) in the photoreceptor cell bodies in the located in the outer nuclear layer (ONL) as well as outer segments, in retinas injected with both the 1e9 vg (FIGS. 58B and 58E) and 1e10 vg (FIGS. 58C and 58F). The control retinas that received a sham (FIGS. 58A and 59C) injection only showed background levels of signal for HA staining (FIG. 58D) in the RPE/sclera and had no detectable level in the ONL/INL layer. Additionally, gross histological analysis showed that the retinal structure was maintained after subretinal administration of AAV packaging CasX constructs.

[0604] Under the conditions of the experiments, the results demonstrate proof-of-concept that CasX 491, scaffold 174, and a spacer targeting the mouse P23 RHO locus can achieve therapeutically-relevant levels of edits at the P23 mouse locus when sub-retinally delivered via AAV in the murine retina.

### Example 16: AAV-Mediated Selective Expression of CasX in Photoreceptors Result in Strong On-Target Activity In Vivo by NGS and Structural Analysis

[0605] Experiments were conducted to demonstrate the ability of CasX to edit selectively photoreceptors in the mouse retina by restricting its expression with a selective photoreceptor promoter, with a spacer targeting the P23 residue at a therapeutically relevant level in the wild-type retina. Further, a strong correlation between editing and proteomic levels was shown in a transgenic reporter model expressing GFP only in rod photoreceptors. Here, it was assessed whether CasX variant 491 and guide variant 174 with a spacer targeting the integrated GFP locus generated significant, detectable editing levels in the retina when injected sub-retinally, and evaluated the efficacy of two different viral doses (1.0e+9 and 1.0e+10 vg per eye).

### Methods

[0606] Generation of AAV Plasmids and Viral Vectors: The CasX variant 491 under the control of the various photoreceptor-specific promoters (RP1, RP2, RP3 based on endogenous rhodopsin RHO promoter, and RP4, RP5 based on endogenous G-coupled Retinal Kinase GRK1 promoter; sequences in Table 27) as well as the CMV promoter, and the gRNA guide variant 174/spacer 11.30 (AAGGGGCUCCGCACCACGCC; SEQ ID NO: 9340), targeting mouse RHO exon 1 at P23 residue) under the U6 promoter were cloned into pAAV plasmid flanked with AAV2 ITR. A WPRE sequence was also included in the p59.RP4.491.174.11.30, and p59.RP5.491.174.11.30 plasmids. For the efficacy study in the Nrl-GFP model, spacer 4.76 (UGUGGUCGGGGUAGCGGCUG; SEQ ID NO: 9341) targeting GFP was cloned into AAV-cis plasmid p59.RP1.491.174 using the standard cloning methods.

TABLE 27
Rhodopsin promoter sequences

| | PR | SEQ |
|---|---|---|
| Promoter | construct | ID NO: |
| RHO | RP1 | 3714 |
| RHO535-CAG | RP2 | 3715 |
| RHO-intron | RP3 | 3716 |
| GRK1 | RP4 | 3717 |
| GRK1-SV40 | RP5 | 3718 |
| GRK1-CAG | RP6 | 3719 |

[0607] AAV vector production and titering were performed as described in Example 1.

[0608] The AAV vector AAV.RP1.491.174.4.76 was produced at the University of North Carolina (UNC) Vector Core using the triple transfection methods in HEK239T.

### Subretinal Injections:

[0609] C57BL/6J mice and heterozygous Nrl-GFP/C57BL/5J mice (Jackson Laboratories) were maintained in a normal 12-hour light/dark cycle. Subretinal injections were performed on 4-5 week-old mice. Mice were anesthetized with isoflurane inhalation. Proparacaine (0.5%) was applied topically on the cornea and the eyes were dilated with drops of tropicamide (1%) and phenylephrine (2.5%). Eyes were kept lubricated with Genteal® gel during the surgery. Under a surgical microscope, an ultrafine 30½-gauge disposable needle was passed through the sclera, at the equator and next to the limbus, to create a small hole into the vitreous cavity. Using a blunt-end needle, 1-1.5 μL of virus was injected directly into the subretinal space, between the RPE and retinal layer. Each mouse from the experimental groups was injected in one eye with 1.0e+9, 5.0e+9 or 1.0e+10 genome (vg)/eye, and the contralateral eye injected with the AAV formulation buffer.

### Western Blot:

[0610] To generate protein lysates, eyes were freshly enucleated and dissected in ice-cold PBS, snap-frozen in dry ice, and resuspended in RIPA buffer (150 mM NaCl, 1% NP40, 0.5% deoxycholate, 0.1% SDS, 50 mM Tris pH8.0, dH20) freshly supplemented with protease inhibitors (5 mg/mL final concentration), DTT and PMSF (final concentration 1 mM respectively) in individual 1.5 mL Eppendorf tube per retina. Retinal tissue was further homogenized in small pieces using an RNA-free disposable pellet pestles (Fisher scientific, #12-141-364) and incubated on ice for 30 minutes, flipping the tube occasionally to gently mix. Samples were then centrifuged at 4° C. at full speed for 20 minutes to pellet genomic DNA. Protein extracts and gDNA cell pellets were then separated. For protein extracts, supernatants were collected. Protein concentrations were determined by BCA assay and read on Tecan plate reader. 15 μg of total protein lysate of mouse retina were separated by SDS-PAGE (Bio-Rad TGX gels) and transferred to polyvinylidene difluoride membranes using the Transblot Turbo. The membranes were blocked with 5% nonfat dry milk for 1 hour at room temperature and incubated overnight at 4° C. with the primary antibody. Then, blots were washed with Tris-buffered saline with the Tween-20 (137 mM sodium chloride, 20 mM Tris, 0.1% Tween-20, pH 7.6) for three times and incubated with the horseradish peroxidase-conjugated anti-rabbit or anti-mouse secondary antibody for 1 hour at room temperature. After washing three times, the membranes were developed using Chemiluminescent substrate ECL and imaged on the ChemicDoc™. Blot images were processed with ImageLab.

### Tissue Processing and NGS Analysis:

[0611] Animals were sacrificed and the eyes enucleated in fresh PBS. Whole retinae were isolated from the eye cups and processed for gDNA extraction as described previously in western blot section. Genomic gDNA pellets were processed with the DNeasy® Blood & Tissue Kit (Qiagen®) according to the manufacturer's instructions. Amplicons were amplified from 200 ng of gDNA with a set of primers targeting the genomic region of interest. Amplicons were bead-purified (Beckman coulter, Agencourt Ampure XP) and then re-amplified to incorporate Illumina™ adapter sequence. Specifically, these primers contained an additional sequence at the 5′ ends to introduce Illumina™ read and 2 sequences as well as a 16 nt random sequence that functions as a unique molecular identifier (UMI). Quality and quantification of the amplicon was assessed using a Fragment Analyzer DNA analyzer kit (Agilent, dsDNA 35-1500 bp). Amplicons were sequenced on the Illumina™ Miseq™ according to the manufacturer's instructions. Raw fastq files from sequencing were processed as follows: (1) the sequences were trimmed for quality and for adapter sequences using the program cutadapt (v. 2.1); (2) the sequences from read 1 and read 2 were merged into a single insert sequence using the program flash2 (v2.2.00); and (3) the consensus insert sequences were run through the program CRISPResso2 (v 2.0.29), along with the expected amplicon sequence and the spacer sequence. This program quantifies the percent of reads that were modified in a window around the 3′ end of the spacer (30 bp window centered at −3 bp from 3′ end of spacer). The activity of the CasX molecule was quantified as the total percent of reads that contain insertions, substitutions and/or deletions anywhere within this window.

### Immunohistology:

[0612] Enucleated eyes were placed in 10% formalin overnight at 4° C. Retinae were dissected out from the eye cups, rinsed in PBS thoroughly and immersed in 15%-30% sucrose gradient. Tissues were embedded in optimal cutting temperature (OCT), frozen on dry ice before being transferred to −80′C storage. 20 μM sections were cut using a cryostat. The sections were blocked for ≥1 hour at room temperature in the blocking buffer (2% normal goat serum, 1% BSA, 0.1% Triton-X 100) before antibody labeling. The antibodies used were: anti-mouse HA (Abcam, 1:500); Alexa Fluor 488 rabbit anti-mouse (Invitrogen™, 1:2000). Slides were counterstained with Hoechst 33342 (Thermo Fisher Scientific™, Hemel Hempstead, UK) and mounted with Prolong Diamond antifade mounting medium (Thermo Fisher Scientific™, Hemel Hempstead, UK). Confocal fluorescence imaging was subsequently performed using the LSM-710 inverted confocal microscope system (Carl Zeiss, Cambridge, UK).

### Results

[0613] Editing levels were quantified at the mRHO exon locus in 3 week-old C57BL/6J that were injected sub-retinally with AAV vectors expressing CasX 491 under the control of multiple engineered retinal and ubiquitous promoters to identify promoters driving strong levels of editing in the photoreceptors, with spacer 11.30. Rod-specific RP1, RP2, RP3, RP4 promoters mediated very similar levels of editing (˜20%). Vectors AAV.RP5.491.174.11.30 and AAV RP5.491.WPRE.174.11.30 led to lower expression levels (˜10 and 8% respectively, FIG. 59A). Optimized vectors AAV.RP1.491.174.11.30 were identified as the most potent vectors for further functional and distribution study, with the goal of achieving high levels of editing in vivo in photoreceptors as well as making the transgene plasmid significantly smaller in size to package within the AAV (100-400 bp shorter than other constructs with similar level of activity (FIG. 59B). This optimized construct was further validated by conducting an efficacy study in a transgenic model expressing GFP in rod photoreceptors, a convenient model used in the field to validate rod-specific or knock down of protein. AAV.RP1.491.174.4.76 vectors were injected at 2 different doses to study efficacy. 4 and 12-weeks post-injections, editing levels at the integrated GFP locus were quantified by NGS, and detectable editing levels were observed. With the 1.0E+9 vg/eye dose arm, ˜8% of editing levels were observed. With the increased dose group injected with 1.0e+10 vg, 10% editing levels were detectable at 4 weeks, which increased by 2-fold in the follow-up time point, 12 weeks post-injections (FIG. 60).

[0614] Editing levels were confirmed by structural and proteomic analysis. Western blot analysis of 12-week post-injection retinal lysates showed strong correlation between levels of editing and reduction in GFP protein (FIGS. 61A and 61C), with protein knock-down detected with as low as 5% editing in whole-retina. GFP protein levels were significantly lower than the vehicle group in the AAV-CasX-treated retinas at the 1.0e+10 vg/eye dose (FIG. 61).

[0615] These results were also confirmed by in vivo fundus imaging of GFP fluorescence. The ratio of superior to inferior retina mean grey values showed a reduction in 20% and 50% GFP fluorescence by week 12 (FIG. 62A). A complete decrease in GFP fluorescence over time was visible within the quadrant who received the subretinal injection only in the injected retinas compared to the vehicle group (FIG. 62B).

[0616] Immunochemistry staining confirmed (FIG. 63) the decrease of GFP protein expression in rod photoreceptors. Representative confocal images show strong GFP expression in the retinae injected with only the AAV formulation buffer. Whole retina is expressing GFP, matching with the nuclei staining (panels A-C of FIG. 63). No HA expression was detectable, as a read-out of AAV-mediated CasX transgene expression (panel D of FIG. 63). Retinae injected with 1.0e+9 and 1.0e+10 showed strong decrease in GFP expression in whole retina sections, in a dose-dependent manner (panels E-L of FIG. 63), which correlated with detectable levels of HA only rod outer segments (OS) and outer nuclear layers (ONL), confirming the promoter RP1 selectivity for rod photoreceptors. High dose treatment resulted in complete knockdown of injected retina (˜50% of GFP knockdown in whole-retina, as injection is limited to the superior gradient) while the 1.0e+9vg dose decreased ˜50% of GFP expression in localized area (panels G and K of FIG. 63) compared to control (panel C of FIG. 63).

[0617] The results demonstrate proof-of-concept that CasX with a gRNA targeting the mouse P23 RHO locus can achieve therapeutically-relevant levels of editing at the mouse P23 locus when only expressed in rod-photoreceptors, the therapeutic cell target, via AAV-mediated subretinal delivery. Furthermore, the specificity and efficacy of the vector were demonstrated by conducting a follow-up study targeting a GFP locus integrated in a reporter model overexpressing GFP in photoreceptors in which the results show a strong correlation between editing levels and protein knock-down assessed by western blot, fundus imaging and histology.

### Example 17: Demonstration that the CasX:gNA System can Edit Human Neural Progenitor Cells and Induced Neurons Efficiently when Packaged and Delivered Via AAVs

[0618] Experiments were performed to demonstrate the efficiency of AAV-expressed CasX:gNA system in editing human neural progenitor cells (hNPCs) and induced neurons (iNs) in vitro.

### Materials and Methods

### AAV Construct Cloning:

[0619] CasX variant 491 and guide scaffold variant 235 were used in these experiments.

[0620] To evaluate the editing capability of AAV-expressed CasX:gNA system in hNPCs, AAV constructs containing a UbC promoter driving CasX expression and a Pol III promoter scaffold driving the expression of a gRNA with scaffold variant 235 and spacer 7.37 (GGCCGAGAUGUCUCGCUCCG; SEQ ID NO: 4059; incorporated in construct ID 183), which targeted the endogenous B2M locus, were generated using standard molecular cloning techniques. Cloned and sequence-validated constructs were maxi-prepped and subjected to quality assessment prior to transfection for AAV production.

[0621] For experiments assessing the editing capability of AAV-expressed CasX:gNA system in human iNs, AAV constructs encoding for CasX protein and gRNA with AAVS1-targeting spacer 31.12 (UUCUCGGCGCUGCACCACGU; SEQ ID NO: 4060; incorporated in construct ID 188), 31.63 (CAAGAGGAGAAGCAGUUUGG; SEQ ID NO: 4061; incorporated in construct ID 189), or 31.82 (GGGGCCUGUGCCAUCUCUCG; SEQ ID NO: 4062; construct ID 190), were similarly generated as described. The non-targeting spacer 0.1 (AGGGGUCUUCGAGAAGACCC; SEQ ID NO: 4063) was also used in these experiments. For experiments assessing various protein promoters driving the expression of CasX 491 with gRNA spacer 7.37 to edit the B2M locus in human iNs, AAV constructs containing these protein promoter variants were similarly generated as described (see Table 28 for sequences of protein promoter variants). The sequences of the additional components of the AAV constructs, except for sequences encoding the CasX protein (Table 26), are listed in Table 45.

TABLE 28
Sequences of protein promoter variants, construct IDs of AAV constructs
that comprise each respective protein promoter variant, and SEQ
ID NOs for the sequences of each protein promoter variant.

| Promoter | Construct | SEQ | Length of |
|---|---|---|---|
| variant | ID | ID NO: | Promoter (bp) |
| UbC | 183 | 3720 | 400 |
| Jet | 191 | 3721 | 164 |
| U1a | 177 | 3722 | 252 |
| MeP426 | 192 | 3723 | 229 |
| miniCMV | 193 | 3724 | 38 |
| SFCp | 194 | 3725 | 354 |
| miniSV40 | 195 | 3726 | 197 |
| pJB42CAT5 | 196 | 3727 | 178 |
| MLP | 197 | 3728 | 41 |
| CMV core | 198 | 3729 | 204 |
| EFS | ND | 3730 | 234 |
| miniEF1α | ND | 3731 | 212 |
| hRPL30 | ND | 3732 | 325 |
| hRPS18 | ND | 3733 | 243 |
| hRPL13a | ND | 3734 | 223 |

*ND = no description.

### AAV Production:

[0622] Suspension-adapted HEK293T cells, maintained in FreeStyle 293 media, were seeded in 20-30 mL of media at 1.5E6 cells/mL on the day of transfection. Endotoxin-free pAAV plasmids with the transgene flanked by ITR repeats were co-transfected with plasmids supplying the adenoviral helper genes for replication and encoding AAV rep/cap proteins using PEI MAX® (Polysciences) in serum-free Opti-MEM media. Three days later, cultures were centrifuged to separate the supernatant from the cell pellet, and the AAV particles were collected, concentrated, and filtered following standard procedures.

[0623] To determine the viral genome (vg) titer, 1 μL from crude lysate viruses was digested with DNase and proteinase K, followed by quantitative PCR. 5 μL of digested virus was used in a 25 μL qPCR reaction composed of IDT primetime master mix and a set of primer and 6′FAM/Zen/IBFQ probe (IDT) designed to amplify a 62 bp-fragment located in the AAV2-ITR. An AAV ITR plasmid was used as reference standards to calculate the titer (vg/mL) of viral samples.

Culturing hNPCs In Vitro:

[0624] Immortalized hNPCs were cultured in hNPC medium (DMEM/F12 with GlutaMax™, 10 mM HEPES, 1×NEAA, 1×B-27 without vitamin A, 1×N2 supplemented growth factors hFGF and EGF, Pen/Strep, and 2-mercaptoethanol). Prior to testing, cells were lifted with TrypLE, gently resuspended to dissociate neurospheres, quenched with media, spun down, and resuspended in fresh media. Cells were counted and directly seeded at a density of ˜10,000 cells per well on a 96-well plate coated with PLF (poly-DL-omithine hydrobromide, laminin, and fibronectin) 24 hours prior to AAV transduction.

AAV Transduction of hNPCs, Followed by HLA Immunostaining and Flow Cytometry:

[0625] ˜7,000 cells/well of hNPCs were seeded on PLF-coated 96-well plates. 24 hours later, seeded cells were treated with AAVs expressing the CasX:gRNA system. All viral infection conditions were performed at least in duplicate, with normalized number of viral genomes (vg) among experimental vectors, in a series of three-fold serial dilution of MOI ranging from 1E4 to 1E6 vg/cell. Five days post-transduction, AAV-treated hNPCs were lifted with TrypLE. After cell dissociation, staining buffer (3% fetal bovine serum in dPBS) was used for quenching. The dissociated cells were transferred to a round-bottom 96-well plate, followed by centrifugation and resuspension of cell pellets with staining buffer. After another centrifugation, cell pellets were resuspended in staining buffer containing the antibody (BioLegend) that would detect the B2M-dependent HLA protein expressed on the cell surface. After HLA immunostaining, cells were stained with DAPI to label cell nuclei. HLA+hNPCs were measured using the Attune NxT flow cytometer. Decreased or lack of HLA protein expression would indicate successful editing at the B2M locus in these hNPCs. A subset of transduced hNPCs were also lifted for genomic DNA extraction and editing analysis via next-generation sequencing (NGS).

### NGS Processing and Analysis:

[0626] Genomic DNA (gDNA) from harvested cells were extracted using the Zymo Quick-DNA Miniprep Plus kit following the manufacturer's instructions. Target amplicons were formed by amplifying regions of interest from 200 ng of extracted gDNA with a set of primers specific to the target locus, such as the human B2M locus. These gene-specific primers contain an additional sequence at the 5′ end to introduce an Illumina™ adapter and a 16-nucleotide unique molecule identifier. Amplified DNA products were purified with the Ampure XP DNA cleanup kit. Quality and quantification of the amplicon were assessed using a Fragment Analyzer DNA Analysis kit (Agilent, dsDNA 35-1500 bp). Amplicons were sequenced on the Illumina™ Miseq™ according to the manufacturer's instructions. Raw fastq files from sequencing were quality-controlled and processed using cutadapt v2.1, flash2 v2.2.00, and CRISPResso2 v2.0.29. Each sequence was quantified for containing an insertion or deletion (indel) relative to the reference sequence, in a window around the 3′ end of the spacer (30 bp window centered at −3 bp from 3′ end of spacer). CasX activity was quantified as the total percent of reads that contain insertions, substitutions, and/or deletions anywhere within this window for each sample.

Reprogramming of Induced Pluripotent Stem Cells (iPSCs):

[0627] Fibroblast cells from a patient were obtained from the Coriell Cell Repository. iPSCs were generated from these lines by episomal reprogramming and genetically engineered to ectopically express Neurogenin 2 (Neurog2) to accelerate neuronal differentiation. Three iPSC clones were selected for downstream experiments.

### Neuronal Cell Culture:

[0628] All neuronal cell culture was performed using N2B27-based media. To induce neuronal differentiation, iPSCs were plated in neuronal plating media (N2B27 base media with 1 g/mL doxycycline, 200 μM L-ascorbic acid, 1 μM dibutyryl cAMP sodium salt, 10 M CultureOne, 100 ng/ml of BDNF, 100 ng/ml of GDNF). iNs were dissociated, aliquoted, and frozen for long term storage after three days of differentiation (DIV3). DIV3 iNs were thawed and seeded on a 96-well plate at 30,000 cells per well. iNs were cultured for one week in plating media and thereafter, half-media changes were performed once every week using feeding media (N2B27 base media with 200 μM L-ascorbic acid, 1 μM dibutyryl cAMP sodium salt, 200 ng/ml of BDNF, 200 ng/ml of GDNF).

### AAV Transduction of iNs In Vitro:

[0629] 24 hours prior to transduction, -30,000-50,000 iNs per well were seeded on Matrigel-coated 96-well plates. AAVs expressing the CasX:gRNA system were then diluted in neuronal plating media and added to cells, with six wells per condition used as replicates. Cells were transduced at various MOIs (1E4 or 1E5 vg/cell for FIG. 66; 2E4 or 6.67E3 for FIG. 67). Seven days post-transduction, iNs were replenished using feeding media. 14 days post-transduction, cells were lifted using lysis buffer, 6-well replicates were pooled, and gDNA was harvested and prepared for editing analysis at either the human AAVS1 or B2M locus using NGS.

### Results

[0630] FIG. 65 shows the quantification of percent editing at the B2M locus measured via two different assessments (as indel rate quantified genotypically by NGS and as a phenotypic readout B2M-cell population detected by flow cytometry) in human NPCs five days post-transduction with AAVs at various MOIs. Efficient editing at the human B2M locus was observed, with the highest level of editing achieved at the MOI of ˜3E5: ˜50% indel rate and ˜13% of cells exhibiting the B2M protein knockout phenotype. FIG. 66 also illustrates efficient editing at the AAVS1 locus in human iNs, with construct ID 189 achieving ˜90% editing at the higher MOI of 1E5. As expected, no editing was observed at the AAVS1 locus with the non-targeting spacer.

[0631] FIG. 67 shows that robust editing at the B2M locus was achieved for several of the various protein promoters used to drive expression of CasX variant 491. Briefly, AAVs were generated with the indicated transgene constructs and transduced into human iNs at either an MOI of 2E4 or 6.67E3. AAV constructs 177 and 183 contained promoters that demonstrated the highest editing activity, with at least 80% efficiency at either MOI.

[0632] The results of these experiments demonstrate that CasX variant 491 and guide scaffold 235 with spacer targeting either the human B2M locus or the human AAVS1 locus can edit on-target efficiently when packaged and delivered in vitro via AAVs into human NPCs or iNs.

### Example 18: CpG-Depleted AAVs Demonstrate CasX-Mediated Editing In Vitro

[0633] Pathogen-associated molecular patterns (PAMPs) such as unmethylated CpG motifs are small molecular motifs conserved within a class of microbes. They are recognized by toll-like receptors (TLRs) and other pattern recognition receptors in eukaryotes and often induce a non-specific immune activation. In the context of gene therapy, therapeutics containing PAMPs are often not as well-tolerated and are rapidly cleared from the patient given the strong immune response triggered, which ultimately leads to reduced therapeutic efficiency. As a result, there is an unmet need for well-tolerated gene therapy vectors that are not cleared rapidly to achieve the necessary therapeutic benefit.

[0634] CpG motifs are short single-stranded DNA sequences containing the dinucleotide CG. When these CpG motifs are unmethylated, they act as PAMPs and therefore potently stimulate the immune response. In this example, experiments were performed to deplete CpG motifs in the AAV construct encoding CasX variant 491, guide scaffold variant 235, and spacer 7.37 targeting the endogenous B2M(beta-2-microglobulin) locus to demonstrate that CpG-depleted AAV vectors can edit effectively in vitro. The editing activity induced from use of the individual elements of the AAV genome and their respective CpG-reduced versions, as well as combinations of these elements, was assessed in vitro. In vitro assessment of immunogenicity is presented in Example 19.

### Materials and Methods

### Design of CpG-Depleted AAV Components:

[0635] Nucleotide substitutions to replace native CpG motifs in AAV components were designed in silico. For exemplary regulatory elements, nucleotide substitutions to replace native CpG motifs were designed based on homologous nucleotide sequences from related species to produce CpG-reduced variants for the following elements: the murine U1a snRNA (small nuclear RNA) gene promoter, the human UbC (polyubiquitin C) gene promoter, and the human U6 promoter. See Table 29, which provides parental sequences of a murine U1a promoter, a human UbC promoter, and a human U6 promoter prior to CpG reduction and Table 30, which provides sequences of CpG-reduced variants of the promoters listed in Table 29. Similar modifications were made to produce a CpG-reduced variant of a bGHpA (bovine growth hormone polyadenylation) sequence. See Table 31, which provides a parental sequence of a bGHpA prior to CpG reduction and Table 32, which provides a sequence of a CpG-reduced variant of the bGHpA listed in Table 31.

[0636] AAV2 ITRs were CpG-depleted as previously described (Pan X, Yue Y, Boftsi M. et al., 2021, Rational engineering of a functional CpG-free ITR for AAV gene therapy. Gene Ther.) See Table 33, which provides parental ITR sequences prior to CpG reduction and Table 34, which provides sequences of CpG-reduced variants of the ITRs listed in Table 33.

[0637] Nucleotide substitutions to replace native CpG motifs in exemplary Cas protein variants (CasX variants) were rationally designed with codon optimization, so that the amino acid sequence of the CpG-reduced Cas-encoding sequence would be the same as the amino acid sequence of the corresponding native Cas-encoding sequence. See Table 35, which provides parental Cas sequences prior to CpG reduction and Table 36, which provides sequences of CpG-reduced variants of the Cas proteins listed in Table 35. Furthermore, nucleotide substitutions to replace native CpG motifs within the base gRNA scaffold variants (gRNA scaffold 235 and 316) were rationally designed with the intent to preserve editing activity. The rational design process for the CpG reduction of the gRNA sequences is further described herein below. See Table 37, which provides parental gRNA sequences prior to CpG reduction and Table 38, which provides sequences of CpG-reduced variants of the gRNAs listed in Table 37.

[0638] All resulting sequences were ordered from a third-party commercial source as synthesized gene fragments with the appropriate overhangs for cloning and isothermal assembly to replace individually the corresponding elements of the existing base AAV plasmid (construct ID 183). Spacer 7.37 (GGCCGAGAUGUCUCGCUCCG; SEQ ID NO: 4059), which targets the endogenous B2M gene, was used for the relevant experiments discussed in this example. The resulting AAV constructs were generated using standard molecular cloning techniques. Cloned and sequence-validated plasmid constructs were midi-prepped for subsequent nucleofection and AAV vector production.

TABLE 29
Parental sequences of promoters

| | SEQ |
|---|---|
| Parental element | ID NO |
| Parental UbC promoter (human) | 3533 |
| Parental U1A promoter (murine) | 3722 |
| Parental U6 promoter (human) | 3563 |

TABLE 30
Sequences of CpG-reduced or depleted promoters

| | AAV | SEQ |
|---|---|---|
| CpG-reduced or depleted element | construct ID | ID NO |
| CpG-reduced UbC promoter (human) | 184 | 3735 |
| Strongly CpG-reduced UbC promoter | 185 | 3736 |
| (human) | | |
| CpG-depleted UbC promoter (human) | 186 | 3737 |
| CpG-reduced U1a promoter (murine) | 178, 206 | 3738 |
| CpG-depleted U1a promoter (murine) | 179, 205 | 3739 |
| CpG-reduced U6 promoter (human) | 180 | 3740 |
| CpG-depleted U6 promoter (human) | 181, 205, 206 | 3741 |
| CpG-reduced hU6 Isoform 2 | — | 3742 |
| CpG-depleted hU6 Isoform 2 | — | 4743 |
| CpG-depleted hU6 Isoform 3 | — | 3744 |
| CpG-depleted hU6 Isoform 4 | — | 3745 |
| CpG-depleted hU6 Isoform 5 | — | 3746 |

TABLE 31
Parental sequence for Poly(A) signal sequence

| Parental element | SEQ ID NO |
|---|---|
| Parental bGH-polyA | 3401 |
| sequence (bovine) | |

TABLE 32
Sequences of CpG-reduced Poly(A) signal sequence

| CpG-reduced or depleted element | AAV construct ID | SEQ ID NO |
|---|---|---|
| CpG-depleted bGH-polyA sequence | 182, 205, 206 | 3748 |
| (bovine) | | |

TABLE 33
Sequences of parental AAV ITR sequences

| Parental element | SEQ ID NO |
|---|---|
| 5′ITR | 17 |
| 3′ITR | 3701 |

TABLE 34
Sequences of CpG-reduced or depleted AAV ITR sequences

| CpG-reduced or depleted element | SEQ ID NO |
|---|---|
| CpG-depleted 5′ITR | 3749 |
| CpG-depleted 3′ITR | 3750 |

TABLE 35
Parental sequences of CasX proteins

| Parental element | SEQ ID NO: |
|---|---|
| CasX 491 | 9320 |
| CasX 515 | 9321 |
| CasX 676 | 9322 |
| CasX 593 | 9323 |
| CasX 812 | 9324 |
| CasX 668 | 9325 |
| CasX 672 | 9326 |

TABLE 36
CpG- depleted sequences of CasX proteins

| CpG- depleted element | AAV construct ID: | SEQ ID NO: |
|---|---|---|
| CpG-depleted CasX 491 | 205, 206 | 9327 |
| CpG-depleted CasX 515 | — | 9328 |
| CpG-depleted CasX 593 | — | 9329 |
| CpG-depleted CasX 812 | — | 9330 |
| CpG-depleted CasX 668 | — | 9331 |
| CpG-depleted CasX 676 | — | 9332 |
| CpG-depleted CasX 672 | — | 9333 |

TABLE 37
Parental sequences of gRNA scaffolds

| Parental element | SEQ ID NO: |
|---|---|
| Scaffold 235 | 9334 |
| Scaffold 316 | 9335 |

TABLE 38
Sequences of CpG-reduced or depleted gRNA scaffolds

| Scaffold ID: | Derived from parent scaffold: | SEQ ID NO: |
|---|---|---|
| Scaffold 320 | Scaffold 235 | 3751 |
| Scaffold 321 | Scaffold 235 | 3752 |
| Scaffold 322 | Scaffold 235 | 3753 |
| Scaffold 323 | Scaffold 316 | 3754 |
| Scaffold 324 | Scaffold 235 | 3755 |
| Scaffold 325 | Scaffold 235 | 3756 |
| Scaffold 326 | Scaffold 316 | 3757 |
| Scaffold 327 | Scaffold 235 | 3758 |
| Scaffold 328 | Scaffold 235 | 3559 |
| Scaffold 329 | Scaffold 316 | 3760 |
| Scaffold 330 | Scaffold 235 | 3761 |
| Scaffold 331 | Scaffold 235 | 3762 |
| Scaffold 332 | Scaffold 316 | 3763 |
| Scaffold 333 | Scaffold 235 | 3764 |
| Scaffold 334 | Scaffold 235 | 3765 |
| Scaffold 335 | Scaffold 316 | 3766 |
| Scaffold 336 | Scaffold 235 | 3767 |
| Scaffold 337 | Scaffold 235 | 3768 |
| Scaffold 338 | Scaffold 316 | 3769 |
| Scaffold 339 | Scaffold 235 | 3770 |
| Scaffold 340 | Scaffold 235 | 3771 |
| Scaffold 341 | Scaffold 316 | 3772 |

### Design of CpG-Depleted Guide Scaffolds:

[0639] Nucleotide substitutions were rationally-designed to replace native CpG motifs within the base gRNA scaffold variant (gRNA scaffold 235) with the intent to preserve editing activity while reducing scaffold immunogenicity. CpG-motifs were removed from the scaffold coding sequence to reduce immunogenicity. Scaffold 235 contains a total of eight CpG elements; six of which are predicted to basepair and form complementary strands of a double-stranded secondary structure (FIG. 76A). Therefore, the six basepairing CpGs forming three pairs were mutated in concert to maintain these double-stranded secondary structures. These mutations reduced the count of independent CpG-containing regions to five (three CpG pairs and two single CpGs) to be considered independently for CpG-removal. Specifically, mutations were designed in (1) the pseudoknot stem, (2) the scaffold stem, (3) the extended stem bubble, (4) the extended step, and (5) the extended stem loop, as diagrammed in FIG. 76B and described in detail below.

[0640] In the pseudoknot stem (region 1), the CpG pair was flipped to a GpC to minimize the alteration of the base composition and sequence. Based on previous experiments involving replacing individual base pairs, it was anticipated that this mutation was not likely to be detrimental to the structure and function of the guide RNA scaffold.

[0641] Similarly, in the scaffold stem (region 2) the CpG pair was flipped to a GpC to minimize the alteration of the base composition and sequence. It was anticipated that this mutation was likely to be detrimental to the structure and function of the guide RNA scaffold because strong sequence conservation was seen in this region in previous experiments mutating individual bases or base pairs. This strong sequence conservation is likely due to the scaffold stem loop being important in interacting with the CasX protein as well as in the formation of a triplex structural element with the pseudoknot region.

[0642] In the extended stem bubble (region 3) the single CpG was removed by one of three strategies. First, the bubble was deleted by mutating CG->C (removing the guanine from the CpG dinucleotide). Second, the bubble was resolved to restore ideal basepairing by mutating CG->CT (substituting thymine for guanine in the CpG dinucleotide). Third, the entire extended stem loop was replaced with the extended stem loop of scaffold 174. Note that, by itself, the replacement of the extended stem loop with that of scaffold 174 recapitulates scaffold 316, which has previously been shown to edit efficiently. There are no CpG motifs in the extended stem loop of scaffold 174. Therefore, replacing the extended stem loop with that of scaffold 174 also removes the CpG motif in the extended stem (region 4). Based on previous experiments showing the relative robustness of the extended stem to small changes, it was anticipated that mutating the extended stem bubble was moderately likely to be detrimental to the structure and function of the guide RNA scaffold.

[0643] In the extended stem (region 4), the CpG pair could not be flipped to GpC without generating additional CpG motifs. Therefore, the CpGs were changed to a GG and a complementary CC motif Similar to region 3, based on the relative robustness of the extended stem to small changes, it was anticipated that this mutation was not likely to be detrimental to the structure and function of the guide RNA scaffold.

[0644] Finally, the extended stem loop (region 5) was mutated in one of three ways that were designed based on previous experiments examining the stability of the stem loop. In particular, several variations of the stem loop had previously been shown to have similar stability levels, and some of these variations of the stem loop do not contain CpGs. Based on these findings, first, the loop was replaced with a new loop with a CUUG sequence. Second, the loop was replaced with a new loop with a GAAA sequence. Since the GAAA loop replacement would generate a novel CpG adjacent to the loop, it was combined with a C->G base swap and the corresponding G->C base swap on the complementary strand, ultimately resulting in a CUUCGG->GGAAAC exchange. Third, the loop was mutated by the insertion of an A to interrupt the CpG motif and thereby increase the size of the loop from 4 to 5 bases. It was anticipated that randomly mutating the extended stem loop would likely have detrimental effects on secondary structure stability and hence on editing. However, relying on previously confirmed sequences was believed to have a lower risk associated with a replacement.

[0645] To generate guide RNA scaffolds encoded by DNA with reduced CpG levels, the mutations described above were combined in various configurations. Table 39, below, summarizes combinations of the mutations that were used. In Table 39, a 0 indicates that no mutation was introduced to a given region, a 1, 2, or 3 indicates that a mutation was introduced in that region, as diagrammed in FIG. 76B, and n/a indicates not applicable. Specifically, for region 1, the pseudoknot stem, a 1 indicates that a CG->GC mutation was introduced. For region 2, the scaffold stem, a 1 indicates that a CG->GC mutation was introduced. For region 3, the extended stem bubble, a 1 indicates that the bubble was removed by the deletion of the G and A bases that form the bubble, a 2 indicates that the bubble was resolved by a CG->CT mutation that allows for basepairing between the A and T bases, and a 3 indicates that the extended stem loop was replaced with the extended step loop from guide scaffold 174. For region 4, the extended stem, a 1 indicates that a CG->GC mutation was introduced. For region 5, the extended stem loop, a 1 indicates that the loop was replaced from TTCG to CTTG, a 2 indicates that the loop was replaced along with a basepair adjacent to the loop, from CTTCGG to GGAAAC, and a 3 indicates that an A was inserted between the C and the G.

TABLE 39
Summary of mutations for CpG-reduction
and depletion in guide scaffold 235

| | | | Region 3 | | |
|---|---|---|---|---|---|
| | Region 1 | Region 2 | (Extended | Region 4 | Region 5 |
| Scaffold | (Pseudoknot | (Scaffold | stem | (Extended | (Extended |
| ID | stem) | stem) | bubble) | stem) | stem loop) |
| 320 | 1 | 0 | 0 | 1 | 0 |
| 321 | 1 | 0 | 1 | 1 | 0 |
| 322 | 1 | 0 | 2 | 1 | 0 |
| 323 | 1 | 0 | 3 | n/a | 0 |
| 324 | 1 | 0 | 1 | 1 | 1 |
| 325 | 1 | 0 | 2 | 1 | 1 |
| 326 | 1 | 0 | 3 | n/a | 1 |
| 327 | 1 | 0 | 1 | 1 | 2 |
| 328 | 1 | 0 | 2 | 1 | 2 |
| 329 | 1 | 0 | 3 | n/a | 2 |
| 330 | 1 | 0 | 1 | 1 | 3 |
| 331 | 1 | 0 | 2 | 1 | 3 |
| 332 | 1 | 0 | 3 | n/a | 3 |
| 334 | 1 | 1 | 2 | 1 | 1 |
| 335 | 1 | 1 | 3 | n/a | 1 |
| 336 | 1 | 1 | 1 | 1 | 2 |
| 337 | 1 | 1 | 2 | 1 | 2 |
| 338 | 1 | 1 | 3 | n/a | 2 |
| 339 | 1 | 1 | 1 | 1 | 3 |
| 340 | 1 | 1 | 2 | 1 | 3 |
| 341 | 1 | 1 | 3 | n/a | 3 |
| 235 | 0 | 0 | 0 | 0 | 0 |

Generation of CpG-Depleted AAV Plasmids to Assess CpG-Reduced or Depleted gRNA Scaffolds:

[0646] The CpG-reduced or depleted gRNA scaffolds were tested in the context of AAV vectors that were otherwise CpG-depleted, with the exception of the AAV2 ITRs. Specifically, nucleotide substitutions to replace native CpG motifs in AAV components were designed in silico based on homologous nucleotide sequences from related species for the following elements: the murine U1a snRNA (small nuclear RNA) gene promoter, the bGHpA (bovine growth hormone polyadenylation) sequence, and the human U6 promoter. The coding sequence for CasX 491 was optimized for CpG depletion. All resulting sequences (Tables 38 and 40) were ordered as gene fragments with the appropriate overhangs for cloning and isothermal assembly to replace individually the corresponding elements of the existing base AAV plasmid (construct ID 183). Spacer 7.37 (GGCCGAGAUGUCUCGCUCCG; SEQ ID NO: 4059), which targets the endogenous B2M gene, was used for the experiments discussed in this example. The first time that the experiment was performed (“N=1”), a sample with the non-targeting spacer 0.0 was also included as a control (CGAGACGUAAUUACGUCUCG; SEQ ID NO: 9342).

[0647] The resulting AAV constructs were generated using standard molecular cloning techniques. Cloned and sequence-validated plasmid constructs were midi-prepped for subsequent nucleofection and AAV vector production. The sequences of the additional components of AAV constructs, with the exception of sequences encoding the gRNAs (Table 38), are listed in Table 40.

TABLE 40
Sequences of AAV elements (5′-3′ in AAV construct)

| Element | SEQ ID NO: |
|---|---|
| AAV2 5′ ITR | 17 |
| CpG-depleted U1a promoter | 3739 |
| CpG-depleted cMycNLS-CasX491-cMycNLS | 3747 |
| CpG-depleted bGH-polyA sequence | 3748 |
| CpG-depleted U6 promoter | 3741 |
| AAV2 3′ ITR | 3701 |

### AAV Production

[0648] Suspension-adapted HEK293T cells, maintained in FreeStyle 293 media, were seeded in 20-30 mL of media at 1.5E6 cells/mL on the day of transfection. Endotoxin-free pAAV plasmids with the transgene flanked by ITR repeats were co-transfected with plasmids supplying the adenoviral helper genes for replication and encoding AAV rep/cap proteins using PEI MAX® (Polysciences) in serum-free Opti-MEM media. Three days later, cultures were centrifuged to separate the supernatant from the cell pellet, and the AAV particles were collected, concentrated, and filtered following standard procedures.

[0649] To determine the viral genome (vg) titer, 1 μL from crude lysate viruses was digested with DNase and proteinase K, followed by quantitative PCR. 5 μL of digested virus was used in a 25 μL qPCR reaction composed of IDT primetime master mix and a set of primer and 6′FAM/Zen/IBFQ probe (IDT) designed to amplify a 62 bp-fragment located in the AAV2-ITR. An AAV ITR plasmid was used as reference standards to calculate the titer (vg/mL) of viral samples.

Culturing Human Neural Progenitor Cells (hNPCs) In Vitro:

[0650] Immortalized hNPCs were cultured in hNPC medium (DMEM/F12 with GlutaMax™, 10 mM HEPES, 1×NEAA, 1×B-27 without vitamin A, 1×N2 supplemented growth factors hFGF and EGF, Pen/Strep, and 2-mercaptoethanol). Prior to testing, cells were lifted with TrypLE, gently resuspended to dissociate neurospheres, quenched with media, spun down, and resuspended in fresh media. Cells were counted and directly used for nucleofection or are seeded at a density of ˜10,000 cells per well on a 96-well plate coated with PLF (poly-DL-ornithine hydrobromide, laminin, and fibronectin) 48 hours prior to AAV transduction.

Plasmid Nucleofection into Human Neural Progenitor Cells (hNPCs):

[0651] AAV plasmids encoding the CasX:gRNA system, with or without CpG depletion of the individual elements of the AAV genome, were nucleofected into hNPCs using the Lonza P3 Primary Cell 96-well Nucleofector Kit. Plasmids were diluted into two concentrations: 50 ng/μL and 25 ng/μL. 5 μL of DNA was mixed with 20 μL of 200,000 hNPCs in the Lonza P3 solution supplemented with 18% V/V P3 supplement. The combined solution was nucleofected using the Lonza 4D Nucleofector System following program EH-100. The nucleofected solution was subsequently quenched with the appropriate culture media and then divided into three wells of a 96-well plate coated with PLF. Seven days post-nucleofection, hNPCs were lifted for B2M protein expression analysis via HLA immunostaining followed by flow cytometry. Subsequently, stacking of individual CpG-depleted elements to create a combined AAV genome with substantial CpG depletion was performed and similarly tested for editing assessment at the B2M locus in vitro.

### Editing Activity Assessment by HLA Immunostaining and Flow Cytometry:

[0652] Seven days after nucleofection, AAV-treated hNPCs were lifted with TrypLE. After cell dissociation, staining buffer (3% fetal bovine serum in dPBS) was used for quenching. The dissociated cells were transferred to a round-bottom 96-well plate, followed by centrifugation and resuspension of cell pellets with staining buffer. After another centrifugation, cell pellets were resuspended in staining buffer containing the antibody (BioLegend) that would detect the B2M-dependent HLA protein expressed on the cell surface. After HLA immunostaining, cells were stained with DAPI to label cell nuclei. HLA+hNPCs were measured using the Attune NxT flow cytometer.

Reprogramming of Induced Pluripotent Stem Cells (iPSCs):

[0653] Fibroblast cells from a patient were obtained from the Coriell Cell Repository. iPSCs were generated from these lines by episomal reprogramming and genetically engineered to ectopically express Neurogenin 2 (Neurog2) to accelerate neuronal differentiation. Three iPSC clones were selected for downstream experiments.

### Neuronal Cell Culture:

[0654] All neuronal cell culture was performed using N2B27-based media. To induce neuronal differentiation, iPSCs were plated in neuronal plating media (N2B27 base media with 1 g/mL doxycycline, 200 μM L-ascorbic acid, 1 μM dibutyryl cAMP sodium salt, 10 μM CultureOne, 100 ng/ml of BDNF, 100 ng/ml of GDNF). iNs (induced neurons) were dissociated, aliquoted, and frozen for long term storage after three days of differentiation (DIV3). DIV3 iNs were thawed and seeded on a 96-well plate at ˜30,000-50,000 cells per well. iNs were cultured for one week in plating media and thereafter, half-media changes were performed once every week using feeding media (N2B27 base media with 200 μM L-ascorbic acid, 1 μM dibutyryl cAMP sodium salt, 200 ng/ml of BDNF, 200 ng/ml of GDNF).

### AAV Transduction of iNs in Vitro:

[0655] 24 hours prior to transduction, ˜30,000-50,000 iNs per well were seeded on Matrigel-coated 96-well plates. AAVs expressing the CasX:gRNA system, with or without CpG depletion of the individual elements of the AAV genome, were then diluted in neuronal plating media and added to cells. Cells were transduced at two MOIs (1E3 or 3E3vg/cell). Seven days post-transduction, iNs were replenished using feeding media. Seven days post-transduction, cells were lifted using lysis buffer, 4-well replicates were pooled per experimental condition, and genomic DNA (gDNA) was harvested and prepared for editing analysis at the B2M locus using next generation sequencing (NGS). Subsequently, combining individual CpG-reduced or CpG-depleted elements to create a combined AAV genome with substantial CpG depletion was performed and similarly tested for editing assessment at the B2M locus in vitro. Experiments assessing the effects of incorporating CpG-depleted gRNA scaffold constructs on editing at the B2M locus in vitro are also conducted.

[0656] In a separate experiment, CpG-depleted guide scaffolds were assessed. Here, iNs were transduced with AAVs expressing the CasX:gRNA system with various versions of the guide scaffold. The first time that the experiment was performed (“N=1”), cells were transduced at an MOI of 4e3 vg/cell (see FIG. 77A). Seven days post-plating, iNs were transduced with virus diluted in fresh feeding media. Eight days post-transduction, cells were lifted using lysis buffer, 4-well replicates were pooled per experimental condition, and gDNA was harvested and prepared for editing analysis at the B2M locus using NGS. The second time that the experiment was performed (“N=2”), cells were transduced at an MOI of 3e3 vg/cell, 1e3 vg/cell, or 3e2 vg/cell (see FIG. 77B, FIG. 77C, and FIG. 77D. Seven days post-plating, induced neurons were transduced with virus diluted in fresh feeding media. Seven days post-transduction, cells were lifted using lysis buffer, 2-well replicates were pooled per experimental condition, and gDNA was harvested and prepared for editing analysis at the B2M locus using NGS. Samples that were not transduced with AAV were included as controls.

### NGS Processing and Analysis:

[0657] Genomic DNA (gDNA) from harvested cells was extracted using the Zymo Quick-DNA™ Miniprep Plus kit following the manufacturer's instructions. Target amplicons were formed by amplifying regions of interest from 200 ng of extracted gDNA with a set of primers specific to the target locus, such as the human B2M gene. These gene-specific primers contained an additional sequence at the 5′ end to introduce an Illumina™ adapter and a 16-nucleotide unique molecule identifier. Amplified DNA products were purified with the Ampure XP DNA cleanup kit. Quality and quantification of the amplicon were assessed using a Fragment Analyzer DNA Analysis kit (Agilent, dsDNA 35-1500 bp). Amplicons were sequenced on the Illumina™ Miseq™ according to the manufacturer's instructions. Raw fastq files from sequencing were quality-controlled and processed using cutadapt v2.1, flash2 v2.2.00, and CRISPResso2 v2.0.29. Each sequence was quantified for containing an insertion or deletion (indel) relative to the reference sequence, in a window around the 3′ end of the spacer (30 bp window centered at −3 bp from 3′ end of spacer). CasX activity was quantified as the total percent of reads that contain insertions, substitutions, and/or deletions anywhere within this window for each sample.

### Results

### Assessment of Use of CpG-Depleted AAV Vector Elements on Editing in a Cell-Based Assay:

[0658] The findings of an assay assessing the editing activity at the B2M locus in hNPCs nucleofected with CpG-containing (CpG⁺) or CpG-reduced/depleted (CpG⁻) AAV vectors are illustrated in FIG. 68. Editing activity was measured as the percentage of hNPCs that were edited at the B2M locus, resulting in reduced or lack of B2M expression (B2M-) on the cell surface. The results shown in FIG. 68 illustrate that reducing or depleting CpG motifs within the sequences of the U1a promoter (construct ID 178 and 179), Pol III U6 promoter (construct ID 180 and 181), or bGH poly(A) (construct ID 182) did not significantly decrease editing activity compared to the editing level achieved with the original CpG⁺ AAV construct (construct ID 177). Specifically, CpG⁻ Ula, CpG⁻ U6, or CpG⁻ bGH resulted in ˜80%, ˜94%, or ˜83% editing of the editing level attained with the base CpG⁺ AAV construct. However, reducing or depleting CpG motifs within the UbC promoter sequence (construct ID 184, 185, and 186) substantially diminished editing activity compared to the level seen with the base UbC construct (construct ID 183), highlighting context-dependent effects of CpG depletion on AAV editing activity and underscoring the importance of screening individual CpG-depleted AAV elements to retain potent editing.

[0659] The results presented in bar plot in FIG. 69 illustrate that use of the U1a promoter (construct ID 177) resulted in higher editing at the B2M locus when compared to the editing level after use of the UbC promoter (construct ID 183) at both MOIs. This improvement in editing was recapitulated when comparing the use of their CpG-reduced and CpG-depleted counterparts at both MOIs (compare construct ID 178-179 to construct ID 184-186; FIG. 69). Furthermore, depleting CpGs in either U1a or UbC resulted in reduced editing when compared to the editing observed from using their wild-type (WT) or CpG-reduced counterparts (FIG. 69). Interestingly, depleting CpGs in the U1a promoter nevertheless resulted in relatively higher editing compared to the editing level achieved when depleting CpGs in the UbC promoter (FIG. 69).

[0660] In addition to evaluating the effects of depleting CpGs in different protein promoters (e.g., U1a compared to UbC) on editing mediated by the CasX:gRNA system delivered by AAVs, the effects of depleting CpGs in other elements on editing were analyzed at two MOIs (FIG. 70). Furthermore, individual CpG⁻ elements were combined to generate an AAV genome with substantial CpG depletion, and the consequential effects on editing at the B2M locus were assessed (FIG. 70).

[0661] FIG. 70 shows bar plots that illustrate the quantification of percent editing at the B2M locus as detected by NGS seven days post-transduction of AAVs into human iNs at an MOI of 3E3 (FIG. 70, top) or 1E3 (FIG. 70, bottom). Various CpG-reduced or CpG-depleted AAV elements were tested to assess the effects of their use on editing efficiency at the B2M locus as follows: 177 (no CpG depletion); 178 (U1A promoter with reduced CpG); 179: (U1A promoter with CpG depleted); 180 (U6 promoter with reduced CpG); 181(U6 promoter with CpG depleted); 182 (bGH poly(A) with CpG depleted); 206 (U1A promoter with reduced CpG, CasX491 with CpG depleted, bGH with CpG depleted, and U6 promoter with CpG depleted); 205 (U1A promoter with CpG depleted, CasX491 with CpG depleted, bGH with CpG depleted, and U6 promoter with CpG depleted). ITRs are wild-type sequence.

[0662] Several key conclusions were determined from these results, illustrated in FIG. 70: 1) use of CpG-depleted U1a promoter resulted in a drastic decrease in editing compared to the editing from using the WT or CpG-reduced Ula, supporting findings observed in the results presented FIG. 69; 2) depleting CpGs in either the bGH-polyA or U6 RNA promoter resulted in similar editing levels as that achieved by their WT counterpart; and 3) combining CpG-depleted or CpG-reduced elements to build a combined AAV genome with substantial CpG reduction could still retain editing activity, as shown in FIG. 70.

[0663] Additionally, results from experiments aimed to assess the effects of incorporating CpG-depleted gRNA scaffold constructs into a combined AAV genome with substantial CpG depletion on editing at the B2M locus may reveal that varying levels of editing potency can be achieved when delivered and packaged via AAVs.

[0664] These experiments demonstrated that using AAV elements with different levels of CpG depletion can result in varying levels of editing mediated by the CasX:gRNA system when packaged and delivered in vitro via AAVs. The data also demonstrated that depleting CpGs in certain elements could result in similar levels of editing as that achieved when using their WT counterparts. Incorporating CpG-reduced or CpG-depleted elements further expands the inventory of diverse sequences that could be used to build an AAV genome, potentially reducing the risk of recombination during AAV packaging and production.

### Assessment of Use of CpG-Depleted Guide Scaffolds on Editing in a Cell-Based Assay:

[0665] Mutations were introduced into the guide scaffold 235 to reduce the CpG content of the DNA sequence coding the guide scaffold. Surprisingly, compared to scaffold 235, all CpG-reduced and CpG-depleted scaffold variants produced higher levels of editing in induced neurons. This was the case with two independent repeats of the experiment (with the results from the first repeat of the experiment shown in FIG. 77A, and the results of the second repeat of the experiment shown in FIGS. 77B-77D), and across multiple MOIs (FIGS. 77B-77D). The enhanced level of editing was surprising because the goal of reducing CpG content was to simply preserve editing activity while reducing immunogenicity. Instead, the mutations enhanced editing activity, rather than merely preserving it.

[0666] Notably, scaffold 320 showed a significant increase in potency over scaffold 235. Scaffold 320 includes mutations to only two regions of the scaffold: in the pseudoknot stem and the extended stem (regions 1 and 4). Further, some combinations of mutations produced worse editing than scaffold 320. However, even the CpG-reduced scaffolds that performed worse than scaffold 320, such as scaffolds 331 and 334, performed similarly to or better than scaffold 235.

[0667] Based on these results, without wishing to be bound by theory, it is believed that the boost in potency seen in many of the CpG-reduced and CpG-depleted scaffolds is likely caused by one of the mutations present in all CpG-reduced scaffolds (i.e., region 1 and/or 4). Since the mutation to region 4 is not present in the scaffolds with the extended stem loop replacement (i.e., the third mutation to region 3) and these scaffolds show a similar improvement in potency over 235 as 320 did, it is believed that the beneficial effect is likely caused by the mutation in region 1 (pseudoknot stem), which is present in all tested scaffolds. Further experiments are performed to test the effect of the individual mutations in the pseudoknot stem (region 1) and the extended stem (region 4) separately.

[0668] Further, the N=1 data as presented in FIG. 77A indicate that all the new scaffolds carrying the mutation in region 2 (scaffold stem) edited at a slightly lower level than their respective counterparts without this mutation. This suggests that mutating this position in the scaffold stem may have a small deleterious effect on editing potency. This is examined in additional experiments.

[0669] The results described here demonstrate that introducing mutations that reduced the CpG content of the DNA encoding the guide RNA scaffold resulted in improvements in gene editing relative to guide scaffold 235.

### Example 19: CpG-Depleted AAVs Induce Less TLR9-Mediated Immune Response In Vitro

[0670] In the preceding example, CpG-reduced and CpG-depleted AAVs were shown to achieve effective editing at the targeted human B2M locus (as exemplary). Here, experiments are performed to assess the effects of CpG reduction or CpG depletion on the activation of TLR9-mediated immune response in vitro. Individual elements of the AAV genome and their respective CpG-reduced or CpG-depleted versions are subjected to in vitro assessment of immunogenicity to identify the optimal CpG-depleted sequences that reduce undesired TLR9 activation and yield potent editing (as demonstrated in Example 18), before being combined to generate an AAV genome with drastically reduced CpG presence for further evaluation.

### Materials and Methods

[0671] AAV plasmid cloning, production of AAV vectors, and titering are performed as described in Example 18.

Use of Human TLR9 Reporter HEK293 Cells (HEK-Blue™ hTLR9) for the In Vitro Immunogenicity Assessment Post-Transduction with CpG-Containing (CpG+) or CpG-Depleted (CpG−) AAVs:

[0672] The HEK-Blue™ hTLR9 line (InvivoGen) is derived from HEK293 cells, specifically designed for the study of TLR9-induced NF-κB signaling. These HEK-Blue™ hTLR9 cells overexpress the human TLR9 gene, as well as a SEAP (secreted embryonic alkaline phosphatase) reporter gene under the control of an NF-κB inducible promoter. SEAP levels in the cell culture medium supernatant, which can be quantified using colorimetric assays, report TLR9 activation.

[0673] For this experiment, 5,000 HEK-Blue™ hTLR9 cells are plated in each well of a 96-well plate in DMEM medium with 10% FBS and Pen/Strep. The next day, seeded cells were transduced with CpG⁺ or CpG⁻ AAVs expressing the CasX:gRNA system. All viral infection conditions are performed at least in duplicate, with normalized number of viral genomes (vg) among experimental vectors, in a series of three-fold serial dilution of MOI starting with the effective MOI of 1E6 vg/cell. Levels of secreted SEAP in the cell culture medium supernatant are assessed using the HEK-Blue™ Detection kit at 1, 2, 3, and 4 days post-transduction following the manufacturer's instructions.

[0674] The experiments using HEK-Blue™ hTLR9 cells to assess TLR9-modulated immune response are expected to show reduced levels of secreted SEAP from cells treated with CpG-AAVs in comparison to levels from cells treated with unmodified CpG⁺ AAVs. Reduced SEAP levels would indicate decreased TLR9-mediated immune activation.

### Example 20: In Vivo Administration of AAV Vectors with or without CpG-Depleted Genomes to Assess the Effects on Inflammatory Cytokine Production and CasX-Mediated Editing

[0675] Experiments are performed to assess the effects of administering AAV vectors with or without CpG-depleted genomes in vivo. Briefly, AAV particles expressing the CasX:gRNA system (with or without CpG depletion) are administered into C57BL/6J mice. In these experiments, the combined AAV genome with substantial CpG depletion are used for assessment. After AAV administration, mice are bled at various time points to collect blood samples. Production of inflammatory cytokines such as IL-1β, IL-6, IL-12, and TNF-α is measured using ELISA and an assay that assesses transgene-specific T cell populations generated against the SIINFEKL (SEQ ID NO: 9589) peptide.

### Materials and Methods

### Generation of CpG-Depleted AAV Plasmids:

[0676] To assess the generation of transgene-specific T cells, a sequence encoding a SIINFEKL peptide (SEQ ID NO: 9589) is cloned into an AAV transgene plasmid on the 5′- and 3′-terminus of the encoded CasX protein, along with a gRNA with a ROSA26-targeting spacer. The SIINFEKL peptide (SEQ ID NO: 9589) is an ovalbumin-derived peptide that is well-characterized and has widely available reagents to probe for T cells specific for this peptide epitope.

[0677] Production of AAV vectors and determination of viral genome titer is performed as described earlier in Example 17.

### Measurement of Inflammatory Cytokines to Assess Humoral Immune Activation:

[0678] ˜1E12 vg AAVs are injected intravenously or intraperitoneally into C57BL/6J mice. Blood is drawn daily from the tail vein or saphenous vein for seven days after AAV injection. Collected blood serum is assessed for the levels of inflammatory cytokines, such as IL-1β, IL-6, IL-12, and TNF-α using commercially available ELISA kits according to the manufacturer's recommendations for murine blood samples (Abcam). Briefly, 50 μL of standard, control buffer, and sample is loaded to the wells of an ELISA plate, pre-coated with a specific antibody to IL-1β, IL-6, IL-12, or TNF-α, incubated at room temperature (RT) for two hours, washed, and incubated with horseradish peroxidase enzyme (HRP) for two hours at RT, followed by additional washes. Wells are treated with TMB ELISA substrate and incubated for 30 minutes at RT in the dark, followed by quenching with H₂SO₄. Absorbance is measured at 450 nm using a TECAN spectrophotometer with wavelength correction at 570 nm.

### Assessment of Transgene-Specific T Cell Populations:

[0679] Ten days after intravenous injection with AAVs, the spleen is collected from mice, and T cells are isolated using the EasySep™ Mouse T Cell Isolation kit. Isolated T cells are incubated with the following: FITC mouse anti-human CD4 antibody (BD Biosciences), APC mouse anti-human CD8 antibody (BD Biosciences), and BV421 ovalbumin SIINFEKL MHC tetramer (Tetramer Shop). The percentage of CD4+ and CD8+ T cells specific to the SIINFEKL MHC tetramer is quantified using flow cytometry. FITC, APC, and BV421 are excited by the 488 nm, 561 nm, and 405 nm lasers and signal are quantified using suitable filter sets.

### Quantification of AAV-Mediated Genome Editing at the ROSA26 Locus:

[0680] To demonstrate that CpG⁻ AAVs exhibit enhanced CasX editing activity relative to CpG⁺ AAVs in vivo, ˜1E12 AAV particles containing CasX protein 491 with gRNA targeting the ROSA26 locus are administered intravenously via the facial vein of C57BL/6J mice. Four weeks post-injection, mice are euthanized, and the liver and/or muscle tissue are harvested for gDNA extraction using the Zymo Quick DNA/RNA miniprep Kit following the manufacturer's instructions. Target amplicons are amplified from 200 ng of extracted gDNA with a set of primers targeting the mouse ROSA26 locus of interest and processed for NGS as described earlier in Example 18.

[0681] In vivo experiments measuring serum inflammatory cytokine levels are expected to show that CpG-depleted AAVs would significantly dampen production of inflammatory cytokines, such as IL-1β, IL-6, IL-12, and TNF-α, thereby reducing immunogenicity and toxicity. In addition, CpG-depleted AAVs are likely to cause less TLR9 activation leading to reduced expansion of T cells against the SIINFEKL peptide (SEQ ID NO: 9589)fused to CasX. Therefore, injections with CpG-depleted AAVs are expected to yield decreased levels of SIINFEKL-specific CD4+ and CD8+ T cells compared to levels from AAV constructs containing CpG elements.

[0682] Since CpG-depleted AAVs are likely to cause less humoral immune activation and non-specific inflammation, as well as less T-cell mediated immunity, titers of CasX-reactive antibodies are also expected to be reduced (i.e., lower ELISA signal quantifying CasX antibodies are anticipated).

[0683] Finally, editing capabilities of CpG-depleted AAVs are assessed by harvesting muscle and/or liver tissue for genomic DNA extraction and subjected to NGS to determine editing levels at the ROSA26 locus. Enhanced CasX editing activity at the ROSA26 locus is anticipated with CpG-depleted AAVs, given their expected likelihood to elicit less humoral immune response in vivo.

### Example 21: Use of Muscle-Specific Promoters to Drive CasX Expression Results in Editing Activity in Muscle Cells and Tissue when the CasX:gRNA System is Expressed from a Transfected AAV Plasmid In Vitro or Packaged and Delivered Via AAVs In Vitro and In Vivo

[0684] Experiments were performed to demonstrate that use of muscle-specific promoters to drive CasX expression in an AAV vector results in higher and more selective editing activity in muscle cells than in non-muscle cell types, when the CasX:gRNA system is expressed from an AAV plasmid transfected in vitro. Experiments were also performed to demonstrate that use of muscle-specific promoters to drive CasX expression results in editing at a target locus in muscle cells when the CasX:gRNA system is packaged and delivered via AAVs in vitro and in vivo.

### Materials and Methods

[0685] CasX variant 491 and guide scaffold variant 235 were used in these experiments. AAV construct cloning was performed as similarly described in Example 1. Briefly, AAV constructs containing a muscle-specific promoter driving CasX expression and a Pol III U6 promoter driving the expression of gRNA scaffold 235 and a ROSA26-targeting spacer (spacer 35.2; refer to Table 41 for sequences) were generated using standard molecular cloning techniques. Sequence-validated plasmid constructs were midi-prepped for subsequent nucleofection.

TABLE 41
Sequences of AAV constructs used in this example for testing muscle-specific
promoters.

| | | DNA sequence | Length of |
|---|---|---|---|
| Construct ID | Component Name | or SEQ ID NO | Component (bp) |
| 215 through 220 | 5′ ITR | 3683 | 130 |
| | buffer sequence | 3684 | 23 |
| 215, 220 | UbC promoter | 3720 | 400 |
| 216 | CK8e promoter | 3775 | 450 |
| 217 | MHCK7 promoter | 3777 | 776 |
| 218 | Desmin promoter | 3774 | 724 |
| 219 | MHCK promoter | 3776 | 742 |
| 215 through 220 | buffer sequence | 9302 | 18 |
| | Kozak | GCCACC | 6 |
| | start codon | ATGGCC | 6 |
| | c-MYC NLS | 9290 | 27 |
| | linker | 9306 | 6 |
| | CasX 491 | 9291 | 2931 |
| | linker | GGCTCC | 6 |
| | c-MYC NLS | 9292 | 27 |
| | stop codon | TAA | 3 |
| | buffer sequence | 3695 | 30 |
| | bGH poly(A) | 3696 | 209 |
| | buffer sequence | GGTACCGT | 8 |
| | U6 promoter | 3698 | 242 |
| | buffer sequence | GAAACACC | 8 |
| | Scaffold 235 | 3631 | 89 |
| 215 through 219 | Spacer 35.2 | 9317 | 20 |
| 220 | Spacer NT | 9314 | 18 |
| 215 through 220 | buffer sequence | 3700 | 17 |
| | 3′ ITR | 3701 | 141 |

*Components are listed in a 5′ to 3′ order within the constructs

Plasmid Nucleofection into Mouse NPCs and Mouse C2C12 Myoblasts:

[0686] Briefly, 1 g of individual AAV plasmids (Table 41) expressing the CasX under the control of different muscle promoters were nucleofected into mouse muscle C2C12 myoblast cells, as well as neuronal NPCs for each experimental condition using methods as described in Example 1. Full media replacement was performed 48 hours post-nucleofections. Five days post-nucleofection, treated cells were harvested for gDNA extraction using the Zymo Quick DNA™ 96 Kit following the manufacturer's instructions. Target amplicons were then amplified from 200 ng of extracted gDNA with a set of primers targeting the mouse ROSA26 locus and processed as described earlier in Example 18 for editing assessment by NGS. As experimental controls, AAV plasmid constructs encoding the following were also tested: 1) UbC promoter driving CasX expression with gRNA containing spacer 35.2; and 2) UbC promoter driving CasX expression with a non-targeting gRNA. A ‘no treatment’ control was also included as an experimental control.

[0687] AAV production and AAV titering were performed as described in Example 1.

### AAV Transduction of C2C12 Myoblasts and Myotubes:

[0688] AAVs were used to transduce two differentiated states of C2C12 cells—myoblasts and myotubes.

[0689] To determine the level of CasX-mediated editing in myoblasts, ˜5,000 C2C12 myoblasts were plated and transduced the next day with AAVs encoding the various CasX:gRNA systems (Table 41) at varying MOIs. Five days following transduction, cells were harvested for gDNA extraction for editing analysis at the ROSA26 locus as described above.

[0690] To determine the level of CasX-mediated editing in myotubes, ˜10,000 C2C12 myoblasts were plated and cultured in differentiation media for seven days to induce differentiation into myotubes. After myotube formation, cells were transduced with AAVs encoding the various CasX:gRNA systems (Table 41) at varying MOIs. Five days following transduction, cells were harvested for gDNA extraction for editing analysis at the ROSA26 locus as described above.

### In Vivo Administration of AAVs and Tissue Processing:

[0691] ˜8E11 AAV viral particles encoding the various CasX:gRNA systems (Table 41) were administered retro-orbitally in C57BL/6J adults. Naïve, untreated mice served as experimental controls. Mice were euthanized at four weeks post-injection. Various tissues were harvested for gDNA extraction using the Zymo Quick DNA/RNA™ miniprep Kit following the manufacturer's instructions. Tissues harvested were skeletal muscles (i.e., tibialis anterior (TA), gastrocnemius (GA), quadriceps (Quad), heart, and diaphragm (DIA)) and non-muscle organs (i.e., liver and lung). Target amplicons were amplified from 200 ng of extracted gDNA with a set of primers targeting the mouse ROSA26 locus and processed as described in Example 18 for editing assessment by NGS. The number of AAV viral genomes (vg) per diploid genome (dg) was determined in the harvested gDNA samples by droplet digital PCR (ddPCR) using the Bio-Rad QX200 Droplet Digital PCR instrument according to standard methods and following the manufacturer's guidelines (see additional detail in Example 28). The vg/dg analysis is an indication of the amount of AAV viral particles delivered into that specific tissue.

### Results

[0692] AAV plasmids containing constructs encoding for muscle-specific promoters used to drive CasX expression were nucleofected into C2C12 myoblasts and mouse NPCs to assess the level of specificity of the editing activity in muscle cells compared to neuroprogenitor cells. FIG. 71 shows the quantification of editing measured as indel rate detected by NGS at the mouse ROSA26 locus in C2C12 cells and mouse NPCs for the indicated AAV plasmids. Of the four muscle-specific promoters assessed, use of promoters CK8e (construct ID 216), MHCK7 (construct ID 217), and MHCK (construct ID 219) resulted in higher CasX-mediated editing activity in C2C12 muscle cells compared to that seen in mouse NPCs. Specifically, use of the CK8e promoter resulted in ˜60% editing at the ROSA26 locus in myoblasts but ˜20% editing in mNPCs, indicating that use of the CK8e promoter would result in more selective expression and higher activity in muscle cell types than neuronal cell types (FIG. 71). Meanwhile, use of the Desmin promoter (construct ID 218) resulted in similar editing levels in both C2C12 cells and mouse NPCs, suggesting minimal tissue-specificity effects when utilizing the Desmin promoter. As anticipated, use of the ubiquitous UbC promoter resulted in similar levels of editing activity in both cell types, while no editing was observed with use of the non-targeting spacer or in the ‘no treatment’ control (FIG. 71).

[0693] Furthermore, the percent editing at the ROSA26 locus was plotted against the size of the muscle-specific protein promoter, with the results presented in FIG. 72. Of the four tested muscle-specific promoters, the CK8e promoter (construct ID 216) has a similar size of ˜400 bp as that of the UbC promoter and demonstrated a similar level of editing activity.

[0694] AAVs encoding the CasX:gRNA system, in which muscle-specific promoters were used to drive CasX expression, were used to transduce C2C12 myoblasts and myotubes to assess the level of editing activity in muscle cells at the ROSA26 locus, and the editing results are illustrated in FIGS. 78A and 78B for MOI of 3E5 vg/cell and 1E5 vg/cell respectively. The data demonstrate that use of all four muscle-specific promoters, Desmin, CK8e, MHCK7, and MHCK, were able to induce editing at the ROSA26 locus in both types of muscle cells, albeit at variable levels, when packaged and delivered within AAVs.

[0695] An initial proof-of-concept experiment assessing use of the four different muscle-specific promoters was performed in vivo. AAVs containing CasX protein 491, driven by the muscle-specific promoters or the UbC promoter, and guide scaffold 235 with the ROSA26-targeting spacer were delivered in vivo. Both muscle and non-muscle organs were harvested for editing and vg/dg analyses, depicted in bar graphs in FIG. 79 and FIG. 80 respectively. The data in FIG. 79 show that use of AAVs containing muscle-specific promoters driving CasX expression and a ROSA26-targeting gRNA resulted in varying levels of editing activity across all the harvested tissues. In the muscle tissues (DIA, heart, TA, GA, and Quad), AAVs with the muscle-specific promoters demonstrated lower editing activity compared to that when using the UbC promoter to drive CasX expression. However, in the lung, selective editing activity was detected, such that use of muscle-specific promoters resulted in substantially lower editing activity in the lung compared to that of the UbC promoter, suggesting de-targeting of editing activity in the lung (FIG. 79). The results also show that systemic administration of AAVs using either UbC or muscle-specific promoters induced high editing levels in the liver.

[0696] AAV biodistribution was evaluated by quantifying AAV viral particles delivered for a specific tissue using a vg/dg analysis. The vg/dg analysis revealed that similar biodistribution levels were achieved for AAVs containing a muscle-specific promoter or the UbC promoter within a particular tissue (data not shown). Further analysis was performed to determine the relative CasX expression (normalized by vg/dg) driven by muscle-specific promoters CK8e or MHC7 compared to that driven by UbC, and the results are illustrated in FIG. 80. The data demonstrate that after normalizing for delivery to each tissue, use of either muscle-specific promoter CK8e or MHCK7 resulted in higher CasX expression in the muscle tissues relative to the UbC promoter overall, whereas CasX expression in the liver was similar among the promoters compared (FIG. 80). These findings support the significance of using tissue-specific promoters to drive CasX expression within the target tissue to induce editing.

[0697] The results demonstrate that muscle-specific promoters can be used to drive CasX expression and induce higher editing activity in muscle cell types than in non-muscle cell types when delivered via nucleofection. The data also show that AAVs produced from these AAV plasmids containing muscle-specific promoters were able to induce CasX expression and editing activity in muscle cells in vitro and in vivo when delivered via transduction. The findings also indicate the tissue specificity of using muscle-specific promoters to drive CasX expression compared to use of ubiquitous promoter like UbC.

### Example 22: Use of Muscle-Specific Regulatory Elements to Generate AAV Constructs to Produce AAVs that would Transduce and Express CasX More Selectively in Muscle Cells and Tissue

[0698] Experiments are performed to demonstrate that incorporation of muscle-specific regulatory elements, e.g., promoters and enhancers, into AAV plasmids used for AAV production, results in more selective expression of CasX and higher editing activity in muscle cell types than in non-muscle cell types when the CasX:gRNA system is delivered by AAVs.

### Materials and Methods

[0699] CasX variant 491, 515, 593, 668, 672, 676, or 812 are used for the experiments described herein. AAV construct cloning, AAV production, and AAV titering are performed as described in Example 1. Various muscle-specific regulatory elements, e.g., promoters (Table 42) and enhancers (Table 43), are individually cloned into AAV plasmids harboring sequences encoding for a CasX protein and a gRNA with scaffold 235 and an AAVS1-targeting spacer. The resulting AAV plasmids are used for AAV production and transduction of human skeletal muscle cells (hSKMCs) to determine editing levels at the AAVS1 locus.

TABLE 42
Sequences of muscle-specific promoters.

| SEQ ID NO | Promoter | Promoter length (bp) |
|---|---|---|
| 3773 | SP-301 | 579 |
| 3774 | Desmin | 724 |
| 3775 | CK8e | 450 |
| 3776 | MHCK | 742 |
| 3777 | MHCK7 | 776 |
| 3778 | SpC5-12 | 358 |

TABLE 43
Sequences of muscle-specific enhancers.

| SEQ ID NO | Enhancer | Enhancer length (bp) |
|---|---|---|
| 3779 | Muscle Enhancer 1 | 495 |
| 3780 | Muscle Enhancer 2 | 344 |
| 3781 | Muscle Enhancer 3 | 429 |
| 3782 | Muscle Enhancer 4 | 434 |
| 3783 | Muscle Enhancer 5 | 171 |
| 3784 | Muscle Enhancer 6 | 51 |
| 3785 | Muscle Enhancer 7 | 60 |
| 3786 | Muscle Enhancer 8 | 41 |
| 3787 | Muscle Enhancer 9 | 120 |
| 3788 | Muscle Enhancer 10 | 474 |
| 3789 | Muscle Enhancer 11 | 519 |
| 3790 | Muscle Enhancer 12 | 372 |
| 3791 | MyoD Enhancer | 256 |
| 3792 | Cardiac Muscle Enhancer 1 | 206 |
| 3793 | Cardiac Muscle Enhancer 2 | 255 |
| 3794 | Cardiac Muscle Enhancer 3 | 277 |
| 3795 | Cardiac Muscle Enhancer 4 | 660 |
| 3796 | Myoblast Muscle Enhancer 1 | 221 |
| 3797 | Myoblast Muscle Enhancer 2 | 310 |
| 3798 | Myoblast Muscle Enhancer 3 | 218 |
| 3799 | Myoblast Muscle Enhancer 4 | 353 |
| 3800 | Myoblast Muscle Enhancer 5 | 50 |
| 3801 | Skeletal Muscle Enhancer 1 | 395 |
| 3802 | Skeletal Muscle Enhancer 2 | 382 |
| 3803 | Skeletal Muscle Enhancer 3 | 135 |
| 3804 | Skeletal Muscle Enhancer 4 | 326 |
| 3805 | Skeletal Muscle Enhancer 5 | 273 |
| 3806 | Skeletal Muscle Enhancer 6 | 148 |
| 3807 | Skeletal Muscle Enhancer 7 | 80 |
| 3808 | Skeletal Muscle Enhancer 8 | 437 |
| 3809 | Skeletal Muscle Enhancer 9 | 297 |

### AAV Transduction In Vitro:

[0700] AAVs are used to transduce two differentiated states of hSKMCs—myoblasts versus myotubes.

[0701] 500,000 primary hSKMC cells (ATCC, PCS-950-010) are plated per 2-4×15 cm dishes in growth media (DMEM/F-12, 20% FBS, 1% PenStrep, 2.5 ng/mL b-FGF). Once cells reach 7000 confluency, cells are lifted and re-seeded in a 96-well plate at 5,000-10,000 cells per well in differentiation media (DMVEM, 200 horse serum, 1% PenStrep).

[0702] To determine level of CasX-mediated editing in myoblasts, hSKMCs are transduced with AAVs 4-6 hours after re-seeding in differentiation media at multiple MOIs. Five days following transduction, cells are harvested for gDNA extraction for editing analysis at the AAVS1 locus by NGS. Briefly, target amplicons are amplified from 200 ng of extracted gDNA with a set of primers targeting the human AAVS1 locus and processed for NGS as described in Example 18.

[0703] To determine the level of CasX-mediated editing in myotubes, re-seeded hSKMCs into differentiation media are cultured in differentiation media for an additional 7-10 days to promote differentiation into myotubes. After myotube formation, cells are transduced with AAVs at multiple MOIs. Five days following transduction, cells are harvested for editing assessment at the AAVS1 locus by NGS as described above.

[0704] As a comparison to assess muscle-cell specificity of the produced AAVs, non-muscle cells such as HepG2 hepatocytes or human NPCs are also transduced with AAVs produced from the same AAV plasmids containing the muscle-specific regulatory elements described herein.

[0705] In addition, assessing the incorporation of muscle-specific regulatory elements within an AAV transgene to selectively express CasX in muscle-specific cell types in vivo are also investigated. These methods for these in vivo experiments are further described in Example 23.

[0706] The results of these experiments are expected to demonstrate that AAVs produced from AAV plasmids containing constructs incorporating muscle-specific regulatory elements (promoter and/or enhancer, see Tables 42 and 43) to drive CasX expression, demonstrate higher editing activity in muscle-specific cell lines compared to non-muscle cell types.

### Example 23: Use of Muscle-Specific AAV Serotypes to Increase Muscle-Specific Cellular and Tissue Tropism to Enhance CasX-Mediated Editing In Vivo

[0707] Experiments are performed to demonstrate that use of muscle-specific AAV serotypes may improve specific cellular and tissue tropism and, therefore, enhance delivery and potency of AAVs in the target muscle cells with minimal editing in off-target cell types in vivo.

### Materials and Methods

[0708] AAV plasmid cloning and AAV production and titering are performed using similar methods described in Example 1. Specifically, the sequences encoding the AAV VP1 serotypes and variants listed in Table 44 are cloned into relevant pRep/Cap plasmids for use in AAV production.

TABLE 44
Sequences of AAV serotypes to be assessed in vivo.

| | Amino acid sequence |
|---|---|
| AAV serotype | (SEQ ID NO) |
| AAV6 | 3810 |
| Rh74 | 3811 |
| RhM4-1 | 3812 |
| AAV9 | 3813 |
| MyoAAV 1A1 | 3814 |
| MyoAAV 1A2 | 3815 |
| MyoAAV 2A | 3816 |

### In Vivo Administration of AAVs and Tissue Processing:

[0709] A dose response experiment is performed, where ˜1E9 to 1E12 AAV viral particles containing CasX protein 491, 515, 672, or 676 and guide scaffold variant 235 with spacer 35.2 targeting the safe harbor ROSA26 locus are administered retro-orbitally in C57BL/6J adults. Naïve, untreated mice serve as experimental controls. Mice are euthanized at different time points, up to four weeks post-injection. Various tissues, including skeletal muscles (e.g., tibialis anterior, gastrocnemius, soleus, quadriceps, heart, and diaphragm) and other organs (liver, spleen, lung etc.) are harvested for gDNA extraction using the Zymo Quick DNA/RNA miniprep Kit following the manufacturer's instructions. Target amplicons are then amplified from 200 ng of extracted gDNA with a set of primers targeting the mouse ROSA26 locus and processed as described earlier in Example 18 for editing assessment by NGS.

[0710] Results from the experiments are expected to show that AAVs containing CasX protein and guide scaffold 235 with the ROSA26-targeting spacer are able to edit the target ROSA26 locus in various muscle tissues. Furthermore, it is expected that higher editing activity is detected in muscle tissues compared to that detected in other tissues, such as the liver or spleen, which would indicate the ability to increase muscle-specific tissue tropism in vivo by incorporating constructs encoding for muscle-specific AAV serotypes into the pRep/Cap plasmid.

### Example 24: Small Class 2, Type V CRISPR Proteins can Edit the Genome when Expressed from an AAV Episome In Vitro

[0711] Experiments are conducted to demonstrate that small Class 2, Type V CRISPR proteins, such as CasX, are able edit a genome when expressed from an AAV plasmid or an AAV vector in vitro.

### Materials and Methods

[0712] The AAV transgene is conceptually broken up between ITRs into different parts, consisting of the therapeutic cargo and accessory elements relevant to expression of the therapeutic cargo in mammalian cells. AAV vectorology consists of identifying the relevant parts and subsequently designing, building, and testing vectors in both plasmid and AAV vector form in mammalian cells. A schematic of one configuration of its components is shown in FIG. 1.

[0713] For the experiments in this example, constructs encoding for CasX variants 515, 593, 668, 672, 676, or 812 with gRNA scaffold variant 235 are used to generate AAV plasmids for AAV production.

[0714] AAV vector cloning and quality control are performed as described in Example 1.

[0715] Method for plasmid nucleofection are performed as described in Example 1.

[0716] AAV production and titer determination are performed as described in Example 1.

[0717] AAV transduction of mNPCs and subsequent FACS analysis for tdTomato+ cell quantification are performed as described in Example 1.

[0718] The results are expected to demonstrate that small CRISPR proteins, such as CasX, and targeted gRNAs are able to edit the genome when expressed from an AAV transgene plasmid or episome in vitro. For the experiments described in this example, the results are expected to show that CasX variant proteins complexed with a gRNA containing scaffold 235 and a tdTomato-targeting spacer are able to edit the target STOP cassette in mNPCs as measured by FACs.

### Example 25: Packaging of Small Class 2, Type V CRISPR Systems within an AAV Vector

[0719] Experiments are conducted to demonstrate that systems of small Class 2, Type V CRISPR proteins, such as CasX, and gRNA can be encoded and efficiently packaged within a single AAV vector.

### Materials and Methods

[0720] For this experiment, AAV vectors are generated with transgenes packaging CasX variant 515, 668, 672, or 676, with gRNA scaffold variant 235 and spacer 12.7 using the methods for AAV production, purification and characterization, as described in Example 24. For characterization, AAV viral genomes are titered by qPCR, and the empty-full ratio are quantified using scanning transmission electron microscopy (STEM). AAVs are negatively stained with 1% uranyl acetate and visualized. Empty particles are identified by the presence of a dark electron dense circle at the center of the capsid.

[0721] The results from these experiments are expected to demonstrate that the CRISPR system (CasX variant proteins and gRNA) can be efficiently packaged within a single AAV vector. qPCR results reveal high AAV genome titers, and STEM micrographs are expected to show that a vast majority of the AAV particles contain viral genomes.

### Example 26: Demonstration of In Vivo Editing with Small Class 2, Type V CRISPR Proteins Expressed from an AAV Episome

[0722] Experiments are conducted to demonstrate that small Class 2, Type V CRISPR proteins, such as CasX, can edit the genome when expressed from an AAV episome in vivo.

### Materials and Methods

[0723] For this experiment, AAV vectors are generated using the methods for AAV production, purification and characterization, as described in Example 24.

### In Vivo Administration of AAVs and Tissue Processing:

[0724] Ai9 neonate mice are injected with AAVs with a transgene encoding CasX variant 515, 593, 668, 672, 676, or 812, and gRNA scaffold variant 235 with spacer 12.7. Briefly, mice are cryo-anesthetized, and ˜1E11 viral genomes of AAV particles are unilaterally injected into the intracerebroventricular (ICV) space. One month after ICV injections, animals are terminally anesthetized with an intraperitoneal injection of ketamine/xylazine and perfused transcardially with saline and fixative (4% PFA). Brains are dissected and further post-fixed in 4% PFA, followed by infiltration with 30% sucrose solution, and OCT embedding. OCT-embedded brains are coronally sectioned using a cryostat. Sections are mounted on slides, counterstained with DAPI to label cell nuclei, cover-slipped and imaged on a fluorescence microscope. Images are processed using the ImageJ software and editing levels are quantified by counting the number of tdTomato+ cells as a percentage of DAPI-labeled nuclei.

[0725] In a subsequent experiment to assess editing in peripheral tissues, particularly in the liver and heart, P0-P1 pups from Ai9 mice are cryo-anesthetized and intravenously injected with ˜1E12 viral genomes (vg) of the same AAV construct. One month post-AAV administration, animals are terminally anesthetized, and heart and liver tissues are necropsied and processed as described above.

[0726] The results of these experiments are expected to demonstrate that AAVs encoding small CRISPR proteins, such as CasX, and a targeting gRNA can be distributed within the tissues, when delivered either locally (brain) or systemically. Given the use of the Ai9 mouse model, the results are expected to show tdTomato fluorescence throughout the target tissue, an indication that the AAV delivery modality would be able to achieve sufficient biodistribution. The results are also expected to show that the CasX:gRNA system can edit the target genome (here, the tdTomato locus) when expressed from single AAV episomes in vivo.

### Example 27: Small CRISPR Protein Potency is Enhanced by AAV Vector Protein Promoter Choice

[0727] Experiments are conducted to demonstrate that small CRISPR protein expression, such as CasX, can be enhanced by utilizing different promoters in an AAV construct for the encoded protein. Cargo space in the AAV transgene can be maximized with the use of short promoters in combination with CasX. Additionally, experiments are conducted to demonstrate that expression can be enhanced with the use of promoters that would otherwise be too long to be efficiently packaged within an AAV vector, if combined with larger CRISPR proteins such as Cas9. The use of long, cell-type-specific promoters to enhance small CRISPR proteins is an advantage to the AAV system described herein, and not possible in traditional CRISPR systems due to the size of other CRISPR proteins.

### Materials and Methods

[0728] Cloning and QC are conducted as described in Example 24. Promoter variants (listed in Table 7 in example 4) are cloned upstream of the CasX gene in an AAV-cis plasmid. The sequences of additional components of the AAV constructs, with the exception of sequences encoding the CasX (Table 26) and the one or more gRNA (Tables 23 and 24), are listed in Table 45.

### Method for Plasmid Nucleofection:

[0729] Immortalized neural progenitor cells are nucleofected as described in Example 24.

[0730] AAV viral production and QC, and AAV transduction and editing level assessment in mNPTC-tdT cells by FACS are conducted as described in Example 24.

[0731] The results of these experiments are expected to demonstrate that several different promoters used to drive CasX expression, when delivered by nucleofection as an AAV transgene plasmid or by transduction of AAV vectors, are able to induce editing of the target STOP cassette in mNPCs. It is possible that use of certain promoters results in higher editing than use of other promoters. These data are expected to demonstrate that expression of small CRISPR proteins, such as CasX, can be enhanced by utilizing long promoters that would otherwise be unusable with traditional CRISPR proteins due to the size constraints of the AAV genome. Furthermore, combining short promoters with small CRISPR proteins, such as CasX, is expected to allow for significant reductions in the AAV transgene cargo capacity without compromising expression efficiency. This conservation of space allows for the inclusion of additional accessory elements, such as enhancers and regulatory elements in the transgene, which would enable increased editing potential.

TABLE 45
AAV transgene constructs and component sequences*
*Table lists component sequences except for sequences encoding nuclease, guide RNA, and
linking peptides

| | | SEQ | |
|---|---|---|---|
| Component | Name | ID NO | Constructs |
| 5′ ITR | AAV2 ITR (alternate) | 3817 | 1-174, 177-186, 188-198, 207-220 |
| | CpG-depleted 5′ITR | 3749 | none |
| Enhancer + | CMV | 4048 | 1-3, 7, 24-33, 44-52, 103-117, 211-214 |
| core | N/A | 3562 | 1-3, 7, 24-33, 44-52, 64-71, 103-117, 156 |
| promoter | Syn 1 | 3818 | 65 |
| | NPC5 | 3819 | 66 |
| | NPC7 | 3820 | 67 |
| | NPC127 | 3821 | 68 |
| | NPC190 | 3822 | 69 |
| | NPC249 | 3823 | 70 |
| | NPC286 | 3824 | 71 |
| Enhancer | Muscle Enhancer 1 | 3825 | none |
| | Muscle Enhancer 2 | 3826 | none |
| | Muscle Enhancer 3 | 3827 | none |
| | Muscle Enhancer 4 | 3828 | none |
| | Muscle Enhancer 5 | 3829 | none |
| | Muscle Enhancer 6 | 3830 | none |
| | Muscle Enhancer 7 | 3831 | none |
| | Muscle Enhancer 8 | 3832 | none |
| | Muscle Enhancer 9 | 3833 | none |
| | Muscle Enhancer 10 | 3834 | none |
| | Muscle Enhancer 11 | 3835 | none |
| | Muscle Enhancer 12 | 3836 | none |
| | MyoD Enhancer | 3837 | none |
| | Cardiac Muscle Enhancer | 3838 | none |
| | 1 | | |
| | Cardiac Muscle Enhancer | 3839 | none |
| | 2 | | |
| | Cardiac Muscle Enhancer | 3840 | none |
| | 3 | | |
| | Cardiac Muscle Enhancer | 3841 | none |
| | 4 | | |
| | Myoblast Muscle | 3842 | none |
| | Enhancer 1 | | |
| | Myoblast Muscle | 3843 | none |
| | Enhancer 2 | | |
| | Myoblast Muscle | 3844 | none |
| | Enhancer 3 | | |
| | Myoblast Muscle | 3845 | none |
| | Enhancer 4 | | |
| | Myoblast Muscle | 3846 | none |
| | Enhancer 5 | | |
| | Skeletal Muscle Enhancer | 3847 | none |
| | 1 | | |
| | Skeletal Muscle Enhancer | 3848 | none |
| | 2 | | |
| | Skeletal Muscle Enhancer | 3849 | none |
| | 3 | | |
| | Skeletal Muscle Enhancer | 3850 | none |
| | 4 | | |
| | Skeletal Muscle Enhancer | 3851 | none |
| | 5 | | |
| | Skeletal Muscle Enhancer | 3852 | none |
| | 6 | | |
| | Skeletal Muscle Enhancer | 3853 | none |
| | 7 | | |
| | Skeletal Muscle Enhancer | 3854 | none |
| | 8 | | |
| | Skeletal Muscle Enhancer | 3855 | none |
| | 9 | | |
| Protein | CMV | 3856 | 1-3, 7, 24-33, 44-52, 103-117, 211-214 |
| promoter | UbC | 3857 | 4, 34-37, 53, 78, 79-102, 119-155, 157- |
| | | | 174, 183, 188-190, 207-210, 215, 220 |
| | EFS | 3858 | 5, 38-40 |
| | CMV-s | 3859 | 6, 41-43 |
| | CMVd1 | 3860 | 8 |
| | CMVd2 | 3861 | 9 |
| | miniCMV | 3862 | 10 |
| | HSVTK | 3863 | 11 |
| | miniTK | 3864 | 12 |
| | miniIL2 | 3865 | 13 |
| | GRP94 | 3866 | 14 |
| | Supercore 1 | 3867 | 15 |
| | Supercore 2 | 3868 | 16 |
| | Supercore 3 | 3869 | 17 |
| | Mecp2 | 3870 | 18, 192 |
| | CMVmini | 3871 | 19 |
| | CMVmini2 | 3872 | 20 |
| | miniCMVIE | 3873 | 21, 193 |
| | adML | 3874 | 22 |
| | hepB | 3875 | 23 |
| | RSV | 3876 | 54 |
| | hSyn | 3877 | 55 |
| | SV40 | 3878 | 56 |
| | hPGK | 3879 | 57 |
| | Jet | 3880 | 58, 72-74, 191 |
| | Jet + UsP intron | 3881 | 59, 75-77 |
| | hRLP30 | 3882 | 60 |
| | hRPS18 | 3883 | 61 |
| | CBA | 3884 | 62 |
| | CBH | 3885 | 63 |
| | CMV core | 3562 | 64, 198 |
| | U1a | 3886 | 177, 180, 181, 182, |
| | CpG-reduced U1a | 3887 | 178, 206 |
| | promoter | | |
| | CpG-depleted U1a | 3888 | 179, 205 |
| | promoter | | |
| | CpG-reduced UbC | 3889 | 184 |
| | promoter | | |
| | Strongly CpG-reduced | 3890 | 185 |
| | UbC promoter | | |
| | CpG-depleted UbC | 3891 | 186 |
| | promoter | | |
| | SFCp | 3892 | 194 |
| | miniSV40 | 3893 | 195 |
| | pJB42CAT5 | 3894 | 196 |
| | MLP | 3895 | 197 |
| | miniEF1α | 3896 | none |
| | hRPL13a | 3897 | none |
| | CK8e promoter | 3898 | 216 |
| | MHCK7 promoter | 3899 | 217 |
| | Desmin promoter | 3900 | 218 |
| | MHCK promoter | 3901 | 219 |
| | SP-301 | 3902 | none |
| | SpC5-12 | 3903 | none |
| 5′ NLS aa | 1X SV40 NLS | 3904 | |
| sequence | 4X SV40 NLS | 3905 | 121-123 |
| | 1X Cmyc NLS | 3906 | 83, 84, 89-102, 124-131, 135-137, 141-155, |
| | | | 157-174, 177-186, 188-198, 207-210 215- |
| | | | 220 |
| | 2X Cmyc NLS | 3907 | 127-129 |
| | 4X Cmyc NLS | 3908 | 130, 131 |
| | 6X Cmyc NLS | 3909 | 135-137, 142 |
| | 1X Nucleoplasmin NLS | 3910 | 132-134 |
| | 2X Nucleoplasmin NLS | 3911 | 138-140 |
| | 1X Cmyc 1X SV40 NLS | 3912 | none |
| | 1X Cmyc 2′ 1X SV40 | 3913 | none |
| | NLS | | |
| | 1X Cmyc 2′ NLS | 3914 | none |
| | 3X Cmyc 2′ NLS | 3915 | none |
| | 4X Cmyc 2′ NLS | 3916 | none |
| | 1X CPV NLS IN | 3917 | none |
| | 2X CPV NLS IN | 3918 | none |
| | 1X hBOVc NLS IN | 3919 | none |
| | 1X hBOVc NLS 2N | 3920 | none |
| | 1X SIRT NLS | 3921 | none |
| | 2X SIRT NLS | 3922 | none |
| | 1X Cmyc NLS 1X | 3923 | none |
| | BPSV40 NLS GGS | | |
| | 1X Cmyc NLS 1X | 3924 | none |
| | BPSV40 NLS PPPPG | | |
| | 1X Cmyc NLS 1X | 3925 | none |
| | BPSV40 NLS px330 PG | | |
| | 1X Cmyc NLS 1X | 3926 | none |
| | BPSV40 NLS (GGGS)2 | | |
| | PG | | |
| | 1X Cmyc NLS 1X | 3927 | none |
| | BPSV40 NLS P(GGGS)2 | | |
| | PG | | |
| | 1X Cmyc NLS 1X | 3928 | none |
| | BPSV40 NLS alpha PG | | |
| | 1X Cmyc NLS 1X | 3929 | none |
| | BPSV40 NLS PG | | |
| | 1X Cmyc GGS 1X SV40 | 3930 | none |
| | GGS | | |
| | 1X Cmyc PPP 1X SV40 | 3931 | none |
| | PG | | |
| | 1X Cmyc PG | 3932 | none |
| | 1X Cmyc (GGGS)3 | 3933 | none |
| | 1X Cmyc PPP | 3934 | none |
| | 1X Cmyc (GGGS)3 PPP | 3935 | none |
| | 1X SV40 PPP | 3936 | none |
| | 1X SV40 GGS | 3937 | none |
| CasX | CpG-free cMycNLS- | 3938 | 205, 206 |
| | Stx491-cMycNLS | | |
| 3′ NLS aa | 1X SV40 NLS | 3940 | 211-214 |
| sequence | 4X SV40 NLS | 3941 | 149 |
| | 6S SV40 NLS | 3942 | none |
| | 1X Cmyc NLS | 3939 | 141, 142, 150, 157-174, 177-186, 188-198, |
| | | | 207-210 |
| | 2X Cmyc NLS | 3943 | 151 |
| | 4x Cmyc NLS | 3944 | none |
| | 6x Cmyc NLS | 3945 | 152 |
| | 1X Nucleoplasmin NLS | 3946 | 119, 122, 125, 128, 130, 133, 136, 139, 153 |
| | 2X Nucleoplasmin NLS | 3947 | 120, 123, 126, 129, 131, 134, 137, 140, 154 |
| | 2x Nucleoplasmin 2x | 3948 | 155 |
| | SV40 NLS | | |
| | B19 NLS 1C | 3949 | none |
| | BoV NLS 3C | 3950 | none |
| | 1X SV40 GS 1X | 3951 | none |
| | Nuceloplasmin NLS | | |
| | GP vBPSV40 12 aa SV40 | 3952 | 143 |
| | NLS | | |
| | (GGGs)2vBPSV40 12 aa | 3953 | none |
| | SV40 | | |
| | 3′alphahelix vBPSV40 | 3954 | 144 |
| | 12aa SV40 | | |
| | GP SV40 GGS vBPSV40 | 3955 | none |
| | 12aa SV40 | | |
| | GP alpha helix Cmyc | 3956 | 145 |
| | NLS | | |
| | GP (GGGS)3 Cmyc NLS | 3957 | 146 |
| | GP SV40 PPP Cmyc | 3958 | 148 |
| | NLS | | |
| | GP Cmyc NLS | 3959 | 147 |
| | TGGGPGGGAAAGSGS- | 3960 | none |
| | 1xSV40-GS-Nuc | | |
| | TGGGPGGGAAAGSGS- | 3961 | none |
| | 1xSV40-GS | | |
| | PPPlinker 1xSV40 | 3962 | none |
| | PPPlinker | | |
| | GGSlinker 1xSV40 | 3963 | none |
| | PPPlinker | | |
| | PPPlinker 1xSV40 | 3964 | none |
| | GGSlinker 1xSV40 | 3965 | none |
| | GGSlinker 1xSV40 | 3966 | none |
| | (GGS)3linker | | |
| | GGSlinker 2xSV40 | 3967 | none |
| | (GGS)3linker 1xSV40 | 3968 | none |
| | GGS 1XSV40 | | |
| | PPP(GGGS)3linker | 3969 | none |
| | 1xCmyc | | |
| | PPPlinker 1xCmyc | 3970 | none |
| | PPP(GGGS)3linker | 3971 | none |
| | 1xCmyc | | |
| PTRE | WPRE1 | 3972 | 35, 38, 41, 72, 75, 78, 81, 83 |
| | WPRE2 | 3973 | 36, 39, 42, 73, 76, 79, 82, 84, 188-190 |
| | WPRE3 | 3974 | 34, 37, 40, 43, 74, 77, 80 |
| Poly(A) | bGH | 3975 | 1-23, 32, 33, 35-174, 177-181, 183-186, |
| signal | | | 188-198, 207-220 |
| | hGH | 3976 | 24 |
| | hGHshort | 3977 | 25 |
| | HSVTK | 3978 | 26 |
| | SynPolyA | 3979 | 27 |
| | SV40 | 3980 | 28 |
| | SV40short | 3981 | 29 |
| | bglob | 3982 | 30 |
| | bglobshort | 3983 | 31 |
| | SV40polyA late | 3984 | 34 |
| | CpG-depleted bGH- | 3985 | 182, 205, 206 |
| | polyA sequence | | |
| RNA | human U6 | 3986 | 1-31, 34-84, 103-157, 177-179, 182-186, |
| promoter | | | 188-198, 207, 209, 211-220 |
| | human U6 (rev comp) | 3987 | 208, 210 |
| | H1 | 3988 | 32, 158 |
| | 7SK | 3989 | 33 |
| | hU6 variant 1 | 3990 | 85, 89 |
| | hU6 variant 2 | 3991 | 86 |
| | hU6 variant 3 | 3992 | 87 |
| | hU6 variant 4 | 3993 | 88 |
| | hU6 variant 5 | 3994 | 90 |
| | hU6 variant 6 | 3995 | 91 |
| | hU6 variant 7 | 3996 | 92 |
| | hU6 variant 8 | 3997 | 93 |
| | hU6 variant 9 | 3998 | 94 |
| | hU6 variant 10 | 3999 | 95 |
| | hU6 variant 11 | 4000 | 96 |
| | hU6 variant 12 | 4001 | 97 |
| | hU6 variant 13 | 4002 | 98 |
| | hU6 variant 14 | 4003 | 99 |
| | hU6 variant 15 | 4004 | 100 |
| | hU6 variant 16 | 4005 | 101 |
| | hU6 variant 17 | 4006 | 102 |
| | H1 core | 4007 | 159 |
| | H1 core + 7SK hybrid 1 | 4008 | 160 |
| | H1 core + 7SK hybrid 2 | 4009 | 161 |
| | H1 core + 7SK hybrid 3 | 4010 | 162 |
| | H1 core + 7SK hybrid 4 | 4011 | 163 |
| | H1 core + 7SK hybrid 5 | 4012 | 164 |
| | H1 core + 7SK hybrid 6 | 4013 | 165 |
| | H1 core + 7SK hybrid 7 | 4014 | 166 |
| | H1 core + 7SK hybrid 8 | 4015 | 167 |
| | H1 core + 7SK hybrid 9 | 4016 | 168 |
| | H1 core + U6 hybrid 1 | 4017 | 169 |
| | H1 core + U6 hybrid 2 | 4018 | 170 |
| | H1 core + 7SK + U6 | 4019 | 171 |
| | hybrid 1 | | |
| | H1 core + U6 hybrid 3 | 4020 | 172 |
| | H1 core + 7SK + U6 | 4021 | 173 |
| | hybrid 2 | | |
| | H1 core + 7SK + U6 | 4022 | 174 |
| | hybrid 3 | | |
| | hU6 isoform 2 | 4023 | none |
| | hU6 isoform 3 | 4024 | none |
| | hU6 isoform 4 | 4025 | none |
| | hU6 isoform 5 | 4026 | none |
| | CpG-reduced U6 | 4027 | 180 |
| | promoter | | |
| | CpG-depleted U6 | 4028 | 181, 205, 206 |
| | promoter | | |
| | CpG-reduced hU6 | 4029 | none |
| | Isoform 2 | | |
| | CpG-depleted hU6 | 4030 | none |
| | Isoform 2 | | |
| | CpG-depleted hU6 | 4031 | none |
| | Isoform 3 | | |
| | CpG-depleted hU6 | 4032 | none |
| | Isoform 4 | | |
| | CpG-depleted hU6 | 4033 | none |
| | Isoform 5 | | |
| | mU6 | 4034 | none |
| | mU6 isoform | 4035 | none |
| | gorilla U6 | 4036 | none |
| | Saimiri U6 | 4037 | none |
| | Macaca U6 | 4038 | none |
| | Papio U6 | 4039 | none |
| | Rhinopithecus U6 | 4040 | none |
| | Mini Gorilla U6 | 4041 | none |
| | Mini Saimiri U6 | 4042 | none |
| | Mini Macaca U6 | 4043 | none |
| | Mini Papio U6 | 4044 | none |
| | Mini Rhinopithecus U6 | 4045 | none |
| 3′ ITR | AAV2 ITR | 4046 | 1-174, 177-186, 188-198, 207-220 |
| | CpG-depleted 3′ITR | 4047 | none |

### Example 28: AAV-Mediated Selective Expression of CasX in Rod and Cone Photoreceptors Results in Strong On-Target Activity at a Safe Harbor Locus in the Murine Retinae

[0732] Experiments were performed to demonstrate the ability of CasX to edit selectively rod and cone photoreceptors in the mouse retina by restricting its expression with a selective photoreceptor promoter, with a gRNA spacer targeting a safe harbor locus in the mouse genome. The correlation between editing and proteomic levels was demonstrated in a transgenic reporter mouse model that expressed GFP only in the rod photoreceptors.

### Materials and Methods

### Generation of AAV Plasmids and Viral Vectors:

[0733] CasX variant 491, flanked on either side by a c-MYC NLS, under the control of the various photoreceptor-specific promoters (listed in Table 46) based on the endogenous G-coupled Rhodopsin Kinase 1 (GRK1) promoter, and the gRNA guide variant 235 with spacer 35.2 (AGAAGAUGGGCGGGAGUCUU; SEQ ID NO: 9343) targeting the mouse ROSA26 locus under the U6 promoter, were cloned into a pAAV plasmid flanked with AAV2 ITR using standard cloning methods.

TABLE 46
Sequences of GRK1 promoter variants.

| Promoter | SEQ ID NO |
|---|---|
| GRK1(93) | 9344 |
| GRK1(94) | 9345 |
| GRK1(174) | 9346 |
| GRK1(199) | 9347 |
| GRK1(241) | 9348 |
| GRK1(292) | 9349 |
| GRK1(292)-SV40 | 9350 |
| GRK1-SV40 | 3718 |

[0734] AAV production and AAV titering were performed as described in Example 1.

[0735] Subretinal injections were performed in C57BL/6J mice as described in Example 16. Each mouse from the experimental groups was injected in one eye with 5E8 vg per eye. AAVs containing the GRK1-SV40 with a non-targeting (NT) gRNA served as an experimental control.

[0736] The processing of tissues, which were harvested three weeks post-injection, and subsequent NGS analysis were performed as described in Example 16. Briefly, gDNA was extracted using the Zymo Quick DNA/RNA™ miniprep Kit following the manufacturer's instructions and used for the amplification of the target amplicon at the ROSA26 locus. Target amplicons were sequenced and processed as described in Example 16.

ddPCR Analysis of AAV Genomes (Vg Dg):

[0737] The number of AAV viral genomes (vg) per diploid genome (dg) was determined in gDNA samples extracted from harvested tissues by ddPCR using the Bio-Rad QX200 Droplet Digital PCR instrument according to standard methods and following the manufacturer's protocol and guidelines. Briefly, ddPCR reactions containing the extracted gDNA samples were set up, serially diluted, and subjected to droplet formation using the droplet generator. Within each droplet, a PCR amplification reaction was performed using a primer-probe set specific to CasX, an indicator of the transgene, and mouse RPP30, an indicator of the mouse genome. Subsequently, droplet fluorescence was determined using a QX200 Droplet Reader with Bio-Rad QuantaSoft software. To calculate total vg/dg for each tissue, the total quantified copy amount for CasX was divided by the copy amount calculated for RPP30, and then divided by 2 (diploid genome per cell).

### Results

[0738] Editing levels at the ROSA26 locus were quantified in retinae harvested from mice injected sub-retinally with AAVs expressing CasX 491 under the control of various engineered retinal promoters (listed in Table 46) to identify promoters driving the strongest levels of CasX-mediated editing in the photoreceptors. FIG. 81 is a box plot that shows the quantification of these editing levels at the ROSA26 locus for the indicated GRK1 promoter variants. The data demonstrate that use of the GRK1 promoter variants to drive CasX expression resulted in similar levels of editing (˜30-38%). Of the promoter variants tested, AAVs containing the GRK1(292)-SV40 and GRK1(241) promoter variants yielded the highest average editing levels, achieving 37.73±10.89% and 38.27±11.98% editing respectively (FIG. 81). As illustrated in FIG. 81, use of GRK1(292)-SV40 and GRK1(241) promoters resulted in the maximum editing that could be achieved in the photoreceptors (dashed line, which indicates the theoretical maximum editing of photoreceptors that can be achieved with optimal transduction).

[0739] Additional analyses were performed by correlating editing levels achieved when using a particular promoter variant with the vg/dg quantification, to account for potential variation in AAV delivery. The editing profile for each promoter variant was plotted with the corresponding vg/dg value, and a nonlinear regression curve was fitted to assess the correlation (FIGS. 82A-82C). The data demonstrate that there is an overall positive correlation between AAV dose (vg/dg) and percent editing, such that higher amount of AAV delivered would correlate with higher editing. Slope values were calculated for each regression plot, and the calculations are displayed in Table 47. Analysis of the slope values revealed that an increase from 1 vg/dg to 2 vg/dg for AAVs containing the GRK1(292)-SV40 or GRK1(292) promoter resulted in the highest incremental change in editing levels compared to the incremental changes achieved for the shorter promoter variants (Table 47, FIGS. 82A-82C). Furthermore, higher variability in editing levels was observed with use of the shorter promoter variants, especially with use of GRK1(199) and GRK1(94), indicated by the higher standard deviation values calculated for the corresponding slopes of the curves (Table 47, FIGS. 82A-82C). The data also show that saturation in editing was achieved when >1.5vg/dg, given the flattening of the curve observed (FIGS. 82A-82C). Interestingly, use of the GRK1(93) promoter appeared to exhibit stronger editing kinetics compared to the GRK1(199) and GRK1(94) promoters, given the higher slope value observed (Table 47).

TABLE 47
Slope values calculated from the nonlinear
regression curves in FIGS. 82A-82C.

| Promoter | Slope value | Standard deviation of slope |
|---|---|---|
| GRK1(292)-SV40 | 23.78 | 5.809 |
| GRK1(292) | 26.65 | 8.124 |
| GRK1(241) | 15.17 | 11.78 |
| GRK1(199) | 8.792 | 21.35 |
| GRK1(94) | 11.44 | 12.02 |
| GRK1(93) | 16.6 | 15.31 |

[0740] The results from these experiments demonstrate proof-of-concept that CasX, driven by the various photoreceptor-specific promoters with the targeting gRNA, can achieve editing in the photoreceptor cells of the retinae when delivered by AAVs via subretinal administration. Variable levels of editing were achieved when using the different promoter variants. Furthermore, given the limited cargo capacity of the AAV transgene, use of a shorter tissue-specific promoter to drive sufficient CasX expression to induce editing would be especially beneficial in the context of a dual-guide AAV vector.

### Example 29: Demonstration that Varying the Placement and Orientation of the gRNA Promoter in the CasX:Dual-gRNA System Expressed from an all-In-One AAV Vector can Affect Editing of the Target Locus

[0741] The experiments in Example 9 showed that the CasX:dual-gRNA system packaged and delivered within a single AAV was able to edit the target gene. Here, experiments were performed to demonstrate that placement and orientation of the gRNA promoters within the AAV transgene to drive expression of dual gRNAs can affect the efficiency of the dual-cut editing of a target locus. Within the AAV plasmid, gRNA promoters could be placed upstream, downstream, or flanking the CasX construct and could be in a forward or reverse orientation. The various configurations of the dual-gRNA transcriptional units relative to the CasX construct within the AAV transgene are illustrated in FIGS. 38-39 and FIG. 75.

### Materials and Methods

[0742] AAV plasmid constructs were generated and cloned into a pAAV plasmid flanked with AAV2 ITRs using standard molecular cloning methods as described in Example 1. Briefly, dual-gRNA AAV plasmids were generated to express CasX variant 491 driven by the ubiquitous UbC promoter and two gRNA transcriptional units that each expressed a Pol III U6 promoter-guide scaffold 235-a specific spacer combination (spacer 12.7 targeting the tdTomato locus (SEQ ID NO: 4049) and/or a non-targeting spacer. In this example, the two gRNA transcriptional units were cloned relative to the CasX construct using configuration #1, #2, and #4 (illustrated in FIGS. 38-39) and tested. Table 48 below shows the combinations of spacers tested for each of the three configurations of dual gRNA units relative to the CasX construct.

TABLE 48
Combinations of a tdTomato-targeting spacer (12.7) and a non-targeting
(NT) spacer tested in this example in configuration #1, #2, and
#4 (illustrated in FIGS. 38-39) of dual gRNA units relative to
the CasX 491 construct. The “R” preceding the spacer denotes
the reverse orientation of the transcription of the indicated gRNA unit.

| Configuration # | Specific spacer combination tested |
|---|---|
| #1 | NT-CasX 491-NT |
| #1 | 12.7-CasX 491-NT |
| #1 | NT-CasX 491-12.7 |
| #1 | 12.7-CasX 491-12.7 |
| #4 | R.NT-CasX491-NT |
| #4 | R.12.7-CasX 491-NT |
| #4 | R.NT- CasX 491-12.7 |
| #4 | R.12.7- CasX 491-12.7 |
| #2 | CasX 491-NT-NT |
| #2 | CasX 491-12.7-NT |
| #2 | CasX 491-NT-12.7 |
| #2 | CasX-12.7-12.7 |

[0743] AAV nucleofection of tdTomato mNPCs was performed as described in Example 1. Briefly, 125 ng of AAV plasmid encoding for XAAVs expressing the CasX:dual-gRNA system with the various configurations listed in Table 48 were nucleofected mNPCs. Five days post-nucleofection, mNPCs were harvested for editing analysis at the tdTomato locus by FACS, as described in Example 1. For comparison, AAV plasmid encoding for XAAVs expressing CasX 491 with a single gRNA transcriptional unit using spacer 12.7 was also used in this example.

[0744] AAV production and AAV titering were performed as described in Example 1.

AAV Transduction of tdTomato mNPCs, Followed by Flow Cytometry:

[0745] ˜10,000 mNPCs were seeded per well in PLF-coated 96-well plates; 48 hours later, seeded cells were transduced with AAVs expressing the CasX:dual-gRNA system of various configurations (Table 48). All viral infection conditions were performed in triplicate, with a normalized number of viral genomes (vg) among experimental vectors, in a series of three-fold dilution of MOI ranging from −1E5 to 1E3 vg/cell. Five days post-transduction, XAAV-treated mNPCs were harvested for editing analysis at the tdTomato locus by FACS, as described earlier in Example 1. For comparison, AAVs expressing CasX 491 with a single gRNA transcriptional unit using spacer 12.7 were also assayed in this example.

### Results

[0746] tdTomato mNPCs were nucleofected with AAV plasmids encoding for dual-guide AAVs expressing the CasX:dual-gRNA system in various vector configurations with different spacer combinations of spacer 12.7 or a non-targeting spacer (listed in Table 48). Editing levels at the tdTomato locus were subsequently assessed to determine the difference in editing level achieved and driven by a spacer in a particular orientation and position, and the results are illustrated in FIG. 83. The data indicate that for configuration #1 (FIG. 38), the editing levels achieved appeared to be primarily driven by the second gRNA positioned on the 3′ end of the CasX construct in the sense orientation, since use of the NT-CasX 491-12.7 AAV construct resulted in ˜80% editing, while use of the 12.7-CasX 491-NT construct resulted in ˜20% editing (FIG. 83). In addition, use of the NT-CasX 491-12.7 construct resulted in similar levels of editing as use of the AAV construct with two 12.7 spacers (12.7-CasX 491-12.7; FIG. 83). The data further showed that positioning and orienting the gRNA units in configurations #4 and #2 (FIG. 38) appeared to induce similar levels of editing overall between the two gRNA units within an AAV transgene (FIG. 83).

[0747] tdTomato mNPCs were also transduced with dual-guide AAVs expressing the CasX:dual-gRNA system in configurations #1, #2, and #4 (FIGS. 38-39) with different spacer combinations (Table 48) at varying MOIs, and editing levels were subsequently assessed, with the resulted portrayed in FIGS. 84A-84C. The data demonstrate that for configuration #1, each gRNA unit was able to achieve similar levels of editing, when comparing the editing levels induced by AAVs containing the 12.7-CasX 491-NT construct with those achieved by AAVs containing the NT-CasX 491-12.7 construct (FIG. 84A). Notably, AAVs containing the 12.7-CasX 491-12.7 construct induced comparatively higher editing than either of the spacer 12.7-NT combination (FIG. 84A). For configuration #4, AAVs containing the R.12.7-CasX 491-NT construct appeared to achieve a slightly higher editing level at the highest MOI tested (˜1E5 vg/cell), suggesting that the gRNA placed 5′ of the CasX construct and in antisense orientation was more active than its counterpart positioned 3′ to the CasX construct in the sense orientation (FIG. 84B). Interestingly, AAVs containing the R12.7-CasX 491-12.7 construct did not induce the highest level of editing out of all the spacer combinations tested for configuration #4, suggesting a saturation in editing levels achieved given the limitation in gRNA expression (FIG. 84B). Lastly, for configuration #2, the data demonstrate that at the highest MOI tested of 1E5; XAAVs with the CasX 491-12.7-NT construct induced ˜20% editing and XAAVs with the CasX 491-12.7-12.7 induced ˜40% editing, suggesting that each gRNA in either position in the sense orientation was able to drive a similar level of editing as its partner (FIG. 84C). A comparison of AAVs expressing a CasX:dual-guide system with two 12.7 spacers in configuration #1, #2, and #4 revealed that use of AAVs expressing the CasX:dual-gRNA system in configuration #2 induced the highest level of editing (˜47.6±8%), compared to −27.7±3.3% editing and ˜14.3±5% editing for configuration #4 and #1 respectively (FIG. 85).

[0748] The results from these experiments demonstrate that use of gRNAs in different positions and orientations relative to the CasX encoding construct within the AAV transgene can achieve efficient dual-cut editing at the target locus. Furthermore, varying the specific position and orientation of the gRNA unit can affect the editing efficiency.

### Example 30: Further Demonstration that Altering the Placement and Orientation of the gRNA Promoter in the CasX:Dual-gRNA System Expressed from an all-In-One AAV Vector Affects Editing of the Target Locus

[0749] Experiments were performed to demonstrate further that placement and orientation of the gRNA promoters within the AAV transgene to drive expression of dual gRNAs can affect the efficiency of the dual-cut editing of a target locus. As discussed in Examples 9 and 31, gRNA promoters may be placed upstream, downstream, or flanking the CasX construct and may be in a forward or reverse orientation. The various configurations of the dual-gRNA transcriptional units relative to the CasX construct within the AAV transgene are illustrated in FIGS. 38-39 and FIG. 75.

### Materials and Methods

[0750] AAV plasmid constructs were generated and cloned into a pAAV plasmid flanked with AAV2 ITRs using standard molecular cloning methods as described in Example 1. Briefly, dual-gRNA AAV plasmids were generated to express CasX variant 515 driven by the U1A promoter and two gRNA transcriptional units that each expressed a Pol III U6 promoter-guide scaffold 235-a specific spacer combination (spacer 31.63 targeting the AAVS1 locus and spacer 7.37 targeting the B2M locus). In this example, efforts were made to clone the two gRNA transcriptional units relative to the CasX construct using all 12 configurations (illustrated in FIGS. 38-39, and FIG. 75). However, efforts to clone the constructs using configurations #3, #6, #9 and #11 were not successful. Furthermore, two additional configurations, #5 and #12, were not cloned. Therefore, dual-guide AAV constructs having the configurations #1-2, #4, #7-8, and #10 were further evaluated in a cell-based assay. Table 49 below shows the combinations of spacers for each of the 12 configurations of dual gRNA units relative to the CasX construct. Table 50 below shows the sequences of AAV elements with varying positions and orientations of the gRNA promoter to drive gRNA expression in a dual-guide context. Table 51 provides the sequences of AAV elements for single-guide AAV constructs that were used as controls.

TABLE 49
Combinations of a B2M-targeting spacer (7.37) and an AAVS1-targeting
spacer (31.63) spacer designed using all 12 configurations (FIGS.
38-39, and FIG. 75) of dual gRNA units relative to the CasX 515
construct. The “R” preceding the spacer denotes the reverse
orientation of the transcription of the indicated gRNA unit.

| Configuration | Specific spacer | AAV |
|---|---|---|
| # | combination tested | construct ID |
| #1 | 31.63-CasX 515-7.37 | 299 |
| #2 | CasX 515-31.63-7.37 | 300 |
| #3 | CasX 515-31.63-R.7.37 | N/A |
| #4 | R.31.63-CasX 515-7.37 | 301 |
| #5 | 31.63-CasX515-R.7.37 | N/A |
| #6 | 7.37-R.31.63-CasX 515 | N/A |
| #7 | 7.37-31.63-CasX 515 | 302 |
| #8 | R.7.37-R.31.63-CasX 515 | 303 |
| #9 | CasX 515-R.31.63-7.37 | N/A |
| #10 | CasX 515-R.31.63-R.7.37 | 304 |
| #11 | R.7.37-31.63-CasX 515 | N/A |
| #12 | R.31.63-CasX 515-R.7.37 | N/A |

TABLE 50
Sequences of AAV elements for constructs with varying positions
and orientations of gRNA transcriptional units. Note that
the table does not contain buffer sequences. “Rev comp”
denotes the reverse complementary sequence.

| | | | Length of |
|---|---|---|---|
| AAV | | SEQ | Component |
| construct ID | Component Name | ID NO | (bp) |
| 299 through 304 | 5′ ITR | 17 | 130 |
| | UlA promoter | 3722 | 252 |
| | cMyc NLS | 9290 | 27 |
| | CasX 515 | 9352 | 2934 |
| | cMyc NLS | 9353 | 27 |
| | bGH poly(A) | 3401 | 208 |
| 299 through 302 | U6 promoter (Fwd) | 3563 | 241 |
| 299 through 302 | Scaffold 235 (Fwd) | 3638 | 99 |
| 299, 300 | AAVS1 Spacer 31.63 (Fwd) | 9354 | 20 |
| 299 through 302 | B2M Spacer 7.37 (Fwd) | 9360 | 20 |
| 301 through 304 | U6 promoter (Rev Comp) | 3987 | 241 |
| 301 through 304 | Scaffold 235 (Rev Comp) | 9293 | 99 |
| 301 through 304 | AAVSI Spacer 31.63 (Rev | 9367 | 20 |
| | Comp) | | |
| 303, 304 | B2M Spacer 7.37 (Rev | 9368 | 20 |
| | Comp) | | |
| 299 through 304 | 3′ ITR | 3701 | 141 |

TABLE 51
Sequences of AAV elements for constructs with single gRNA transcriptional
units.

| | | DNA Sequence | Length of |
|---|---|---|---|
| AAV construct ID | Component Name | or SEQ ID NO | Component (bp) |
| 305 through 307 | 5′ ITR | 17 | 130 |
| | buffer sequence | 3684 | 23 |
| | UlA promoter | 3722 | 252 |
| | buffer sequence | 9302 | 18 |
| | Kozak | GCCACC | 6 |
| | CasX 515 | 9352 | 2934 |
| | stop codon | TGA | 3 |
| | buffer sequence | 9366 | 30 |
| | bGH poly(A) | 3401 | 208 |
| | buffer sequence | GGTACCGT | 8 |
| | U6 promoter | 3563 | 241 |
| | buffer sequence | GAAACACC | 8 |
| | Scaffold 235 | 3638 | 99 |
| 305 | AAVS1 spacer (31.63) | 9354 | 20 |
| 306 | B2M spacer (7.37) | 9360 | 20 |
| 307 | Non-targeting spacer | 9318 | 20 |
| | (0.0) | | |
| 305 through 307 | buffer sequence | 3700 | 17 |
| | 3′ ITR | 3701 | 141 |

### AAV Production and Titering:

[0751] The resulting AAV constructs were used to produce AAVs following similar methods as described in Example 18. AAV titering was performed by ddPCR following similar methods as described in Example 31. Two separate primer-probe sets were used for AAV titering by ddPCR: a primer-probe set specific to BGH and another primer-probe set specific to CasX.

### AAV Transduction of iNs (Induced Neurons) In Vitro:

[0752] Produced AAVs were used to transduce human iNs to assess editing level at the AAVS1 and B2M loci. AAV transduction of iNs was performed following similar methods as described in Example 32. In one replicate, cells were transduced at the following MOIs: 1.3E4, 4.33E3, or 1.44E3 vg/cell. In the second replicate, cells were transduced at the following MOIs: 1E4, 3E3, or 1E3 vg/cell. The following three constructs were included as experimental controls: 1) a single-guide AAV construct with the AAVS1-targeting spacer (AAV construct ID #305); 2) a single-guide AAV construct with the B2M-targeting spacer (AAV construct ID #306); 3) an AAV construct with a non-targeting spacer (AAV construct ID #307). The results of this experiment are illustrated in FIGS. 97-101.

### Results

[0753] In this example, dual-guide AAV constructs were designed to harbor each of the 12 configurations shown in FIGS. 38-39 and FIG. 75. As discussed above, efforts to clone the dual-guide constructs using configurations #3, #6, #9 and #11 were not successful. Furthermore, constructs using two additional configurations, #5 and #12, were not cloned. Therefore, AAVs were produced using the remaining dual-guide AAV constructs having the configurations #1-2, #4, #7-8, and #10 and titered via ddPCR using two independent primer-probe sets: one to BGH and one to CasX. Titering results are shown in FIG. 97. The data show that titering using the BGH probe was unusually high for AAV particles produced using AAV construct ID #302 and #303 compared to titering levels using the CasX probe. One potential explanation for this observed titering discrepancy is that AAV particles produced using AAV construct ID #302 and #303 primarily packaged truncated AAV transgenes; however, additional experiments are needed to assess this phenomenon further. As a result, MOIs for AAV transduction experiments were calculated based on titering results determined using the CasX primer-probe set.

[0754] Human iNs were transduced with AAVs containing the transgene encoding for dual-guide AAVs expressing the CasX:dual-gRNA system in various vector configurations with different spacer combinations of spacer 31.63 and spacer 7.37 (listed in Table 49). Editing levels at the AAVS1 and B2M loci were subsequently assessed to determine the difference in editing level achieved and driven by a spacer in a particular orientation and placement, and the results are illustrated in FIGS. 98-99 for the first replicate and FIGS. 100-101 for the second replicate. The data show that all tested constructs having the 6 configurations were able to edit the two target loci successfully, albeit at varying editing rates. Further experiments are performed to assess the effects of each dual-guide orientation on CasX expression and packaging of AAV transgenes (full-length vs. truncations).

[0755] The results from these experiments demonstrate that use of gRNAs in different positions and orientations relative to the CasX encoding construct within the AAV transgene can achieve efficient dual-cut editing at the target locus. Furthermore, varying the specific position and orientation of the gRNA unit can affect AAV production and editing efficiency.

### Example 31: Assessment of U6 Isoforms as Alternative Guide RNA Promoters

[0756] Experiments were performed to assess various U6 isoforms as alternative gRNA promoters. Utilization of an alternative U6 gRNA promoter would enable the following: 1) in the context of a dual-guide AAV construct, mitigate the potential for recombination risk during cloning while also maintain a balance in editing levels between the two gRNA transcriptional units; 2) increase overall AAV editing efficiency and potency; and 3) result in the identification of smaller U6 promoter alternatives given the limited capacity of the AAV transgene.

### Materials and Methods

[0757] AAV plasmid constructs were generated and cloned into a pAAV plasmid flanked with AAV2 ITRs using standard molecular cloning methods as described in Example 1. Briefly, AAV plasmids were generated to express CasX protein 515 driven by the U1A promoter with a bGH poly(A) signal sequence and a gRNA transcriptional unit that expressed a Pol III promoter-guide scaffold 235 with spacer 31.63 targeting the AAVS1 locus. In this example, various U6 isoforms were assessed as Pol III promoter variants, which were cloned downstream relative to the CasX construct in the AAV plasmid; the sequences of the U6 isoforms tested are shown in Table 52. Table 53 shows the sequences of the constructs encoding for full-length AAV transgene used in this example.

TABLE 52
Sequences of Pol III promoters assessed in this example.

| SEQ | Pol | AAV | Length of |
|---|---|---|---|
| ID NO: | III promoter | construct ID | Promoter (bp) |
| 3599 | hU6 isoform 2 | 233 | 249 |
| 4743 | CpG-depleted hU6 | 235 | 249 |
| | Isoform 2 | | |
| 4029 | CpG-reduced hU6 | 234 | 249 |
| | Isoform 2 | | |
| 3600 | hU6 isoform 3 | 236 | 249 |
| 3744 | CpG-depleted hU6 | 237 | 249 |
| | Isoform 3 | | |
| 4025 | hU6 isoform 4 | 238 | 249 |
| 4032 | CpG-depleted hU6 | 239 | 249 |
| | Isoform 4 | | |
| 3602 | hU6 isoform 5 | 240 | 249 |
| 3746 | CpG-depleted hU6 | 241 | 244 |
| | Isoform 5 | | |
| 3563 | hU6 isoform 1 | 242 | 241 |
| 3603 | mU6 | 243 | 304 |
| 9351 | mU6 with G | 244 | 305 |

TABLE 53
Sequences of AAV constructs encoding for the transgene used in this example.

| | | DNA Sequence | Length of |
|---|---|---|---|
| AAV construct ID | Component Name | or SEQ ID NO | Component (bp) |
| 233 through 244 | 5′ ITR | 17 | 130 |
| | buffer sequence | 3684 | 23 |
| | UlA promoter | 3722 | 252 |
| | buffer sequence | 9302 | 18 |
| | Kozak | GCCACC | 6 |
| | start codon | ATGGCC | 6 |
| | c-MYC NLS | 9290 | 27 |
| | linker | TCTAGA | 6 |
| | CasX 515 | 9352 | 2934 |
| | linker | GGATCC | 6 |
| | c-MYC NLS | 9353 | 27 |
| | stop codon | TAA | 3 |
| | buffer sequence | 3695 | 30 |
| | bGH poly(A) | 3401 | 208 |
| | buffer sequence | GGTACCGT | 8 |
| | U6 promoter variants | See sequences | — |
| | | listed in | |
| | | Table 52 above | |
| | Scaffold 235 | 3638 | 99 |
| | AAVS1 spacer (31.63) | 9354 | 20 |
| | buffer sequence | 3700 | 17 |
| | 3′ ITR | 3701 | 141 |

*Components are listed in a 5′ to 3′ order within the constructs

[0758] AAV production was performed following similar methods as described in Example 1. AAV titering was performed by ddPCR according to standard methods and following the manufacturer's protocol and guidelines. Briefly, ddPCR reactions containing the AAV viral samples were set up, serially diluted, and subjected to droplet formation using the droplet generator. Within each droplet, a PCR amplification reaction was performed using a primer-probe set specific to bGH, an indicator of the AAV transgene. Subsequently, droplet fluorescence was determined using a QX200 Droplet Reader with Bio-Rad QuantaSoft software.

### AAV Transduction of iNs (Induced Neurons) In Vitro:

[0759] In a first transduction experiment, ˜50,000 iNs per well were seeded on Matrigel-coated 96-well plates 7 days prior to transduction. AAVs expressing the CasX:gRNA system, containing various U6 promoters listed in Table 52, were then diluted in neuronal plating media and added to cells. Cells were transduced at two MOIs (1E3 or 3E2 vg/cell). 7 days post-transduction, cells were lifted using lysis buffer, and gDNA was harvested and prepared for editing analysis at the AAVS1 locus using NGS following similar methods as described in Example 18. Samples that were not transduced with AAV were included as controls. Wild-type human U6 (hU6 isoform 1) served as the benchmark for comparison. Two replicates were performed, and the results of this experiment are shown in FIGS. 86 and 87.

[0760] In a second AAV transduction experiment, ˜50,000 iNs per well were seeded on Matrigel-coated 96-well plates 14 days prior to transduction. Cells were transduced at three MOIs (2E3, 6.67E2, or 2.2E2 vg/cell). Cells were harvested for editing analysis at the AAVS1 locus 7 days post-transduction using NGS following similar methods as described in Example 18. Samples that were not transduced with AAV were included as controls. Wild-type human U6 (hU6 isoform 1) served as the benchmark for comparison. Two replicates were performed, and the results of this experiment are shown in FIGS. 88 and 89.

[0761] In a third AAV transduction experiment, ˜50,000 iNs per well were seeded on Matrigel-coated 96-well plates 14 days prior to transduction. Cells were transduced at the following MOIs: 3E4, 1E3, 3.33E3, and 1.11E3. Cells were harvested for editing analysis at the AAVS1 locus 7 days post-transduction using NGS following similar methods as described in Example 18. Samples that were not transduced with AAV were included as controls. Wild-type human U6 (hU6 isoform 1) served as the benchmark for comparison. One replicate was performed, and the results of this experiment are shown in FIG. 90.

### Results

[0762] Three sets of experiments were performed in iNs to assess various U6 isoforms for use as alternative gRNA promoters. The results from the first AAV transduction experiment are portrayed in the bar plots shown in FIGS. 86-87. These data demonstrate that use of AAV constructs containing the alternative U6 promoter isoforms resulted in similar or worse levels of editing compared to the editing level achieved when using AAV constructs containing the benchmark hU6 isoform 1 promoter. The results in FIGS. 86-87 further indicate that among the isoforms evaluated in this first experiment, use of the hU6 isoform 5 promoter may be the most promising and comparable to the benchmark hU6 isoform 1 promoter. Each vector also displayed dose-dependent editing at the target AAVS1 locus.

[0763] The results from the second AAV transduction experiment are portrayed in the bar plots shown in FIGS. 88-89. The data similarly demonstrate that use of AAV constructs containing the alternative U6 promoter isoforms resulted in similar or worse levels of editing compared to the editing level achieved when using AAV constructs with the benchmark hU6 isoform 1 promoter, recapitulating findings observed in FIGS. 86-87. The results continue to indicate the hU6 isoform 5 promoter as a comparable alternative to the benchmark hU6 isoform 1 promoter. The results also suggest use of the following U6 isoforms as comparable alternatives given that the editing levels achieved were comparable to that attained for the benchmark promoter: hU6 isoform 2 and its CpG-reduced forms (CpG-depleted hU6 isoform 2 and CpG-reduced hU6 isoform 2), and hU6 isoform 4 (FIGS. 88-89).

[0764] The results from the third AAV transduction experiment are portrayed in the bar plots shown in FIG. 90. The data similarly show that use of AAV constructs containing the indicated alternative U6 promoter isoforms resulted in comparable or slightly worse levels of editing as that achieved by the benchmark hU6 isoform 1 promoter. The results continue to support hU6 isoform 2 as a promising alternative Pol III promoter; the data also further show that use of the mU6 promoter as a comparable alternative Pol III promoter (FIG. 90).

[0765] These experiments demonstrate that alternative gRNA promoters, such as the various U6 isoforms evaluated in this example (in addition to the promoters identified and tested in Example 5), can be used to drive expression of the gRNA. Use of these alternative gRNA promoters would help reduce recombination risk during AAV production and packaging (especially if utilized in the context of a dual-guide AAV construct), while also modulate the resulting editing activity and potency of the Cas:gRNA system by differentially regulating the activity of the gRNAs. Furthermore, the identification and use of CpG-depleted U6 isoform promoters as alternative gRNA promoters would help mitigate potential undesired immune activation and enable therapeutic efficacy.

### Example 32: Assessment of CpG-Depleted CasX 515 Variants on CasX-Mediated Editing

[0766] As discussed in Example 18, unmethylated CpG motifs act as PAMPs (pathogen associated molecular patterns) that potently trigger undesired immune activation. Therefore, experiments were performed to deplete CpG motifs in the AAV construct encoding for CasX protein 515 and demonstrate that these CpG-depleted CasX 515 variants can edit effectively in vitro.

### Materials and Methods

### Design of CpG-Depleted and Codon-Optimized CasX 515 Variants and AAV Plasmid Cloning:

[0767] Nucleotide substitutions to replace native CpG motifs in CasX protein 515, as well as the flanking c-MYC NLSes, were rationally designed with codon optimization using various publicly available algorithms. As a result, the amino acid sequence of the encoding sequence of CpG-depleted CasX 515 with flanking c-MYC NLSes would be the same as the amino acid sequence of the corresponding encoding sequence of native CasX 515 with flanking c-MYC NLSes. Table 54 provides the sequences of CpG-depleted and codon-optimized variants of CasX 515 with flanking c-MYC NLSes, as well as the corresponding non-CpG depleted CasX 515 with flanking c-MYC NLSes.

TABLE 54
Sequences of CpG-depleted and codon-optimized
variants of CasX 515 with flanking c-MYC NLSes.

| CpG-depleted or non-CpG-depleted | | |
|---|---|---|
| variant 515 with flanking c-MYC NLSes | AAV | SEQ |
| (version no.) | construct ID | ID NO |
| CpG-depleted 515 (v1) | 290 | 9369 |
| CpG-depleted 515 (v2) | 291 | 9370 |
| CpG-depleted 515 (v3) | 292 | 9371 |
| CpG-depleted 515 (v4) | 293 | 9372 |
| CpG-depleted 515 (v5) | 294 | 9373 |
| CpG-depleted 515 (v6) | 295 | 9374 |
| CpG-depleted 515 (v7) | 296 | 9375 |
| CpG-depleted 515 (v8) | — | 9376 |
| CpG-depleted 515 (v9) | — | 9377 |
| CpG-depleted 515 (v10) | — | 9378 |
| CpG-depleted 515 (v11) | 297 | 9379 |
| CpG-depleted 515 (v12) | — | 9380 |
| Non-CpG-depleted 515 | 298 | 9381 |

[0768] All resulting sequences of the CpG-depleted and codon-optimized variants of CasX 515 with flanking c-MYC NLSes were cloned into a base AAV plasmid (sequences shown in Table 55). gRNA scaffold 235 and spacer 31.63, which targets the AAVS1 locus, were used for the experiments discussed in this example. The resulting AAV constructs were generated using standard molecular cloning techniques. Cloned and sequence-validated plasmid constructs were midi-prepped for subsequent nucleofection and AAV vector production.

TABLE 55
Sequences encoding for a base AAV plasmid into which CpG-depleted variants
of CasX 515 in Table 54 were cloned.

| | | DNA Sequence | Length of |
|---|---|---|---|
| AAV construct ID | Component Name | or SEQ ID NO | Component (bp) |
| 290 through 298 | 5′ ITR | 17 | 130 |
| | buffer sequence | 3684 | 23 |
| | UIA promoter | 3722 | 252 |
| | buffer sequence | 9302 | 18 |
| | Kozak | GCCACC | 6 |
| | start codon + CpG- | See sequences | |
| | depleted (or non- | listed in | |
| | CpG-depleted) & | Table 54 | |
| | codon-optimized | | |
| | CasX 515 with | | |
| | flanking c-MYC | | |
| | NLSes | | |
| | stop codon | TGA | 3 |
| | buffer sequence | 9366 | 30 |
| | bGH poly(A) | 3401 | 208 |
| | buffer sequence | GGTACCGT | 8 |
| | U6 promoter | 3563 | 241 |
| | buffer sequence | GAAACACC | 8 |
| | Scaffold 235 | 3638 | 99 |
| | AAVS1 spacer | 9354 | 20 |
| | (31.63) | | |
| | buffer sequence | 3700 | 17 |
| | 3′ ITR | 3701 | 141 |

### Transfection of HEK293 Cells In Vitro:

[0769] ˜50,000 HEK293 cells per well were seeded on 24-well plates; two days later, cells were transfected with AAV plasmids containing sequences for a non-CpG-depleted (CpG⁺) CasX 515 (Table 54) or a version 1 of a CpG-depleted and codon-optimized CasX 515 variant (CpG⁻ vi CasX 515; SEQ ID NO: 9369, Table 54) following standard methods using lipofectamine. Two days later, cells were harvested to extract total protein lysate for western blotting analysis. Quantification of protein concentration and western blotting were performed using standard procedures. Three technical replicates were performed (Replicates 1-3) for the western blot. The results of this experiment are shown in FIG. 96. Untransfected cells served as an experimental control.

### AAV Production and Titering:

[0770] AAV production was performed using similar methods as described in Example 18. AAV titering was performed by ddPCR using a primer-probe set specific to bGH, an indicator of the AAV transgene, following similar methods as described in Example 31.

### AAV Transduction of iNs (Induced Neurons) In Vitro:

[0771] For one experiment, ˜30,000 iNs per well were seeded Matrigel-coated 96-well plates 7 days prior to transduction. Cells were transduced with AAVs expressing the CasX:gRNA system, a non-CpG-depleted CasX 515 (CpG⁺; Table 54) or version 1 of the CpG-depleted and codon-optimized CasX 515 variant (CpG⁻ v1; Table 54) and codon-optimized variants of CasX 515, at an MOI of 1E4 vg/cell. 7 days post-transduction, cells were harvested for gDNA extraction for editing analysis at the AAVS1 locus using NGS following similar methods as described in Example 18. One replicate was performed this experiment, and the results are shown in Table 56.

### AAV Transduction of HEK293 Cells In Vitro:

[0772] In a second experiment, ˜5,000 HEK293 cells per well are seeded on 96-well plates two days prior to transduction. AAVs expressing the CasX:gRNA system, containing various CpG-depleted and codon-optimized variants of CasX 515, are diluted in neuronal plating media and added to cells. Cells are transduced at four MOIs (1E4, 3E3, 1E3, or 3.7E2 vg/cell). Five days post-transduction, cells are harvested for gDNA extraction for editing analysis at the AAVS1 locus using NGS following similar methods as described in Example 18.

### Results

[0773] In one experiment, HEK293 cells were transiently transfected with AAV plasmids containing a CpG⁺ CasX 515 sequence or CpG⁻ v1 CasX 515 sequence. Four days post-transfection, CasX expression and editing activity at the AAVS1 locus were evaluated by western blotting and NGS respectively. The results of the western blotting analysis are portrayed in FIG. 96, showing CasX protein levels in transfected HEK293 cells, with a total protein stain blot (bottom blot) serving as the loading control. Cells transfected with the AAV plasmid containing a CpG⁺ CasX 515 sequence are labeled as “CpG⁺ CasX 515” (lane 1), while cells transfected with the construct harboring a CpG⁻ CasX 515 sequence are labelled as “CpG⁻ CasX 515_A” (lane 2) and “CpG⁻ CasX 515_B” (lane 3). Untransfected HEK293 cells are labelled “No plasmid control” (lane 4). The results in FIG. 96 show that expressing the AAV plasmid containing either the CpG⁻ or CpG⁺ CasX 515 sequence resulted in CasX expression. Editing activity at the AAVS1 locus was also assessed in human iNs; the results show that use of the AAV plasmid with either CpG⁻ v1 or CpG⁺ CasX 515 sequence resulting in editing at the target locus (Table 56).

TABLE 56
Results of the editing assay at the AAVS1
locus when using AAV plasmid containing either
CpG⁻ or CpG⁺ CasX 515.

| Experimental condition | Indel rate at AAVS1 locus |
|---|---|
| AAV plasmid with CpG⁺ 515 | 20.82% |
| AAV plasmid with CpG⁻ 515 (v1) | 16.55% |
| ‘No plasmid’ control | 0.06% |

[0774] The experiments demonstrate that depleting CpG motifs in the AAV construct encoding for CasX protein 515 resulted in sufficient CasX expression to induce effective editing at the target locus in vitro. Incorporating CpG-depleted AAV elements into the AAV genome would potentially reduce the risk of immunogenicity post-delivery of AAVs into target cells and tissues.

### Example 33: Additional Assessment of the Effects of Using CpG-Reduced or Depleted gRNA Scaffolds on CasX-Mediated Editing Activity

[0775] As discussed in Example 18, unmethylated CpG motifs act as PAMPs that potently trigger undesired immune activation; therefore, nucleotide substitutions to replace native CpG motifs in the AAV constructs, including that encoding for guide scaffold variants 235 and 316, were designed and generated. Here, experiments were performed to evaluate further the effects of using these resulting CpG-reduced or depleted gRNA scaffolds on CasX-mediated editing activity.

### Materials and Methods

[0776] The CpG-reduced or depleted scaffolds 320-341 were evaluated in three in vitro experiments described below; the sequences of scaffolds 320-341 are listed in Table 38. In addition, two newly engineered gRNA scaffolds, scaffold 382 and 392 (sequences listed in Table 57), were also assessed. As benchmark comparisons, scaffold 174, 235, and 316 (sequences listed in Table 37 and Table 57) were also included for evaluation.

TABLE 57
Sequences of additional gRNA scaffolds tested in this example.

| Scaffold ID | DNA SEQ ID NO: | RNA SEQ ID NO: |
|---|---|---|
| Scaffold 382 | 9355 | 9357 |
| Scaffold 392 | 9356 | 9358 |
| Scaffold 174 | 3631 | 2238 |

[0777] AAV constructs were designed and generated as previously described in Example 18. The CpG-reduced or depleted gRNA scaffolds were tested in two different AAV backbones. Specifically, for the experiment involving lipofection of HEK293 cells as described below, scaffolds 235 and 320-341 were tested in AAV vectors that were CpG-depleted, with the exception of AAV2 ITRs, as previously described in Example 18. Briefly, the CpG-depleted AAV backbone construct encoded for CpG-depleted versions of the following elements: U1A promoter, CasX 491, bGH poly(A) signal sequence, and U6 promoter. For the experiment involving AAV transduction of human induced neurons (iNs) and HEK293 cells as described below, scaffolds 174, 235, 316, 320-341, 382, and 392 were tested in an AAV backbone that was not CpG-depleted (see Table 58 for sequences). Furthermore, spacer 7.37 targeting the B2M locus was used in two experiments described below involving HEK293 cells: lipofection and AAV transduction. Spacer 31.63 targeting the AAVS1 locus was used in an experiment described below involving human iNs. Table 59 below lists the AAV constructs that were tested in the context of a non-CpG-depleted AAV vector and the experimental conditions in which these constructs were assessed.

TABLE 58
Sequences encoding for a base AAV plasmid into which gRNA scaffolds in Table
57 were cloned.

| | | Length of |
|---|---|---|
| Component Name | DNA sequence or SEQ ID | Component (bp) |
| 5′ ITR | 17 | 130 |
| buffer sequence | 3684 | 23 |
| U1A promoter | 3722 | 252 |
| buffer sequence | 9302 | 18 |
| Kozak | GCCACC | 6 |
| start codon + c-MYC NLS | 9359 | 33 |
| linker | TCTAGA | 6 |
| CasX 515 | 9352 | 2934 |
| linker | GGATCC | 6 |
| c-MYC NLS | 9353 | 27 |
| stop codon | TAA | 3 |
| buffer sequence | 3695 | 30 |
| bGH poly(A) | 3401 | 208 |
| buffer sequence | GGTACCGT | 8 |
| U6 promoter | 3563 | 241 |
| buffer sequence | GAAACACC | 8 |
| Scaffold variants | See sequences listed in | — |
| | Tables 37, 38, and 57 | |
| B2M spacer (spacer 7.37) | 9360 | 20 |
| AAVS1 spacer (spacer | 9354 | 20 |
| 31.63) | | |
| Non-targeting spacer | 9318 | 20 |
| (spacer 0.0) | | |
| buffer sequence | 3700 | 17 |
| 3′ ITR | 3701 | 141 |

TABLE 59
List of AAV constructs and scaffold variants tested in a non-CpG-
depleted AAV vector (see Table 58 for sequences) and the experimental
conditions in which these constructs were assessed.

| AAV | Scaffold | | |
|---|---|---|---|
| construct ID | variant | Spacer | Experimental conditions |
| 262 | 235 | 31.63 | AAV transduction in iNs |
| 263 | 328 | 31.63 | AAV transduction in iNs |
| 264 | 329 | 31.63 | AAV transduction in iNs |
| 265 | 382 | 31.63 | AAV transduction in iNs |
| 266 | 174 | 31.63 | AAV transduction in iNs |
| 267 | 335 | 31.63 | AAV transduction in iNs |
| 268 | 325 | 31.63 | AAV transduction in iNs |
| 269 | 330 | 31.63 | AAV transduction in iNs |
| 270 | 327 | 31.63 | AAV transduction in iNs |
| 271 | 334 | 31.63 | AAV transduction in iNs |
| 272 | 339 | 31.63 | AAV transduction in iNs |
| 273 | 337 | 31.63 | AAV transduction in iNs |
| 274 | 235 | Non-targeting | AAV transduction in iNs |
| 275 | 331 | 7.37 | AAV transduction in HEK293s |
| 276 | 335 | 7.37 | AAV transduction in HEK293s |
| 277 | 316 | 7.37 | AAV transduction in HEK293s |
| 278 | 392 | 7.37 | AAV transduction in HEK293s |
| 279 | 325 | 7.37 | AAV transduction in HEK293s |
| 280 | 334 | 7.37 | AAV transduction in HEK293s |
| 281 | 324 | 7.37 | AAV transduction in HEK293s |
| 282 | 336 | 7.37 | AAV transduction in HEK293s |
| 283 | 330 | 7.37 | AAV transduction in HEK293s |
| 284 | 320 | 7.37 | AAV transduction in HEK293s |
| 285 | 332 | 7.37 | AAV transduction in HEK293s |
| 286 | 321 | 7.37 | AAV transduction in HEK293s |
| 287 | 339 | 7.37 | AAV transduction in HEK293s |
| 288 | 235 | 7.37 | AAV transduction in HEK293s |
| 289 | 235 | Non-targeting | AAV transduction in HEK293s |

[0778] AAV production was performed using similar methods described in Example 18. For the experiment involving lipofection of HEK293 cells as described below, AAV titering was performed following similar methods as described in Example 1. For the two experiments involving AAV transduction of human iNs or HEK293 cells as described below, AAV titering was performed by ddPCR following similar methods as described in Example 31.

Cell-Based Assays Evaluating the Effects of Using CpG-Depleted or Reduced gRNA Scaffolds on Editing Activity:

[0779] In one experiment, ˜20,000 HEK293 cells per well were seeded in 96-well plates 24 hours prior to transfection. Seeded cells were then transfected with CpG-depleted AAV plasmids containing various versions of the guide scaffold (scaffolds 320-341). 5 days post transfection, cells were harvested for B2M protein expression analysis via HLA immunostaining following by flow cytometry, following methods as described in Example 18. A CpG-depleted AAV plasmid with scaffold variant 235 served as an experimental control. An AAV plasmid with a CMV promoter driving mCherry expression was used as a transfection control, and a ˜41% transfection rate was observed. The results from this experiment are shown in FIG. 93.

[0780] In a second experiment, ˜20,000 iNs per well were seeded on Matrigel-coated 96-well plates 7 days prior to transduction. AAVs expressing the CasX:gRNA system, containing various versions of the guide scaffold (AAV construct ID #262-274; see Table 59), were diluted in neuronal plating media and added to cells 7 days post-plating. Cells were transduced at three MOIs (3E4, 1E4 or 3E3 vg/cell). 7 days post-transduction, cells were gDNA extraction for editing analysis at the AAVS1 locus using NGS following similar methods as described in Example 18. The results from this experiment are shown in FIGS. 94A-94C.

[0781] In a third experiment, ˜10,000 HEK293 cells per well were seeded in 96-well plates 24 hours prior to transfection. Seeded cells were then transduced with AAVs expressing the CasX:gRNA system, containing various versions of the guide scaffold (AAV construct ID #275-289; see Table 59). Cells were transduced at three MOIs (1E4, 3E3, or 1E3 vg/cell). 5 days post-transduction, cells were harvested for B2M protein expression analysis via HLA immunostaining following by flow cytometry, following methods as described in Example 18. The results from this experiment are shown in FIGS. 95A-95C.

### Results

[0782] Experiments were performed to evaluate further the effects of using CpG-reduced or depleted gRNA scaffolds on CasX-mediated editing activity. In the first experiment (N=1), HEK293 cells were lipofected with CpG-depleted AAV plasmids containing various versions of the gRNA scaffold (scaffolds 320-341). B2M protein expression was subsequently analyzed, and the results of the assay are shown in FIG. 93. The data demonstrate that use of scaffolds 320-341 did not improve editing activity at the target B2M locus, since use of these scaffolds produced a lower percentage of cells with B2M-relative to the level achieved when using an AAV construct containing scaffold 235. These results do not recapitulate the results observed in Example 18 (see FIGS. 77A-77B).

[0783] In the second experiment (N=1), human iNs were transduced with AAV particles expressing the CasX:gRNA system, containing various versions of the guide scaffold (AAV construct ID #262-274). Editing at the AAVS1 locus was analyzed, and the results of the assay are shown in FIGS. 94A-94C. The data demonstrate that of the scaffold variants tested, use of scaffold variant 329 and 382 appeared to improve editing at the AAVS1 locus when compared to use of scaffold 235, especially at MOI of 1E4 and 3E3 vg/cell. Furthermore, the effects on editing activity were observed in a dose-dependent manner.

[0784] In the third experiment (N=1), HEK293 cells were transduced with AAV particles expressing the CasX:gRNA system, containing various versions of the guide scaffold (AAV construct ID #275-289). B2M protein expression was subsequently analyzed, and the results of the assay are shown in FIGS. 95A-95C. The data demonstrate that of the scaffold variants tested, use of scaffolds 316, 392 and 332 appeared to improve editing at the B2M locus when compared to use of scaffold 235 overall. Specifically, at the higher MOI of 1E4 and 3E3 vg/cell, slightly improved editing was observed with use of scaffolds 316, 392, and 332 (FIGS. 95A-95B), while a stronger editing improvement was observed at the lower MOI of 1E3 vg/cell (FIG. 95C). Notably, scaffold 332 and 392 both include CG >GC mutations in the pseudoknot stem (region 1; FIGS. 76A-76B), effectively reducing the overall number of CpGs when compared to scaffold 235, thereby potentially contributing to the increase in editing activity. Furthermore, scaffolds 316 and 332 both have a truncated extended stem when compared to scaffold 235, removing the bubble and the CG dinucleotide (region 3; FIGS. 76A-76B), thereby also potentially contributing to the observed increase in editing activity. Further experiments are performed, especially at lower MOIs, to unravel the intricacies of the effects of individual CpG mutations on editing potency.

[0785] The results from the experiments described here demonstrate that use of guide scaffolds with different levels of CpG depletion can result in varying levels of editing mediated by the CasX:gRNA system, and that the resulting editing levels can vary by method of delivery (e.g., plasmid transfection vs. AAV transduction).

### Example 34: Assessment of Editing by Engineered Variants of CasX Nucleases at a Target Locus in Human Cells Transduced by AAVs

[0786] Experiments were performed to demonstrate that engineered variants of CasX nucleases were able to edit a target locus in human cells when delivered via AAV transduction.

### Materials and Methods

[0787] AAV plasmid constructs were generated and cloned into a pAAV plasmid flanked with AAV2 ITRs using standard molecular cloning methods as described in Example 1. Briefly, AAV plasmids were generated to express a CasX protein driven by the UbC promoter with a bGH poly(A) signal sequence and a gRNA transcriptional unit that expressed a Pol III promoter-guide scaffold 235 with spacer 31.63 targeting the AAVS1 locus. In this example, CasX variants 491, 515, 528, 572, 593, 672, 676, and 690 were assessed for their editing activity in human induced neurons (iNs). The sequences of the AAV constructs with the various CasX proteins and AAVS1-targeting gRNA are shown in Table 60.

TABLE 60
Sequences of AAV constructs with various CasX proteins assessed in this
example.

| | | DNA sequence or | Length of |
|---|---|---|---|
| AAV construct ID | Component Name | SEQ ID NO | Component (bp) |
| 245 through 252 | 5′ ITR | 17 | 130 |
| | buffer sequence | 3684 | 23 |
| | UbC promoter | 3533 | 400 |
| | buffer sequence | 9302 | 18 |
| | Kozak | GCCACC | 6 |
| | start codon + c-MYC | 9359 | 33 |
| | NLS | | |
| | linker | TCTAGA | 6 |
| 245 | CasX 491 | 9291 | 2931 |
| 246 | CasX 672 | 3710 | 2934 |
| 247 | CasX 676 | 9361 | 2937 |
| 248 | CasX 528 | 9362 | 2934 |
| 249 | CasX 690 | 9363 | 2934 |
| 250 | CasX 515 | 9352 | 2934 |
| 251 | CasX 572 | 9364 | 2934 |
| 252 | CasX 593 | 9365 | 2934 |
| 245 through 252 | linker | GGATCC | 6 |
| | c-MYC NLS | 9353 | 27 |
| | stop codon | TAA | 3 |
| | buffer sequence | 3695 | 30 |
| | bGH poly(A) | 3401 | 208 |
| | buffer sequence | GGTACCGT | 8 |
| | U6 promoter | 3563 | 241 |
| | buffer sequence | GAAACACC | 8 |
| | Scaffold 235 | 3638 | 99 |
| | AAVS1 spacer | 9354 | 20 |
| | (31.63) | | |
| | buffer sequence | 3700 | 17 |
| | 3′ ITR | 3701 | 141 |

* Components are listed in a 5′ to 3′ order within the constructs

[0788] AAV production and titering were performed following similar methods as described in Example 1.

### AAV Transduction of iNs (Induced Neurons) In Vitro:

[0789] ˜50,000 iNs per well were seeded on Matrigel-coated 96-well plates 7 days prior to transduction. AAVs expressing the CasX:gRNA system, containing various CasX proteins (sequences in Table 60), were diluted in neuronal plating media and added to cells. Cells were transduced at three MOIs (3E3, 1E3 or 3E2 vg/cell). 7 days post-transduction, cells were lifted using lysis buffer, and gDNA was harvested and prepared for editing analysis at the AAVS1 locus using NGS following similar methods as described in Example 18.

### Results

[0790] Human iNs were transduced with AAVs containing CasX proteins 491, 515, 528, 572, 593, 672, 676, or 690 and guide scaffold variant 235 with spacer 31.63 targeting the safe harbor AAVS1 locus to assess the editing activity of these various CasX proteins. The results of this editing assay are displayed in FIG. 101. The data demonstrate that of the CasX variants paired with the spacer 31.63, a spacer with the TTC motif, CasX 515 demonstrated the highest editing activity (≥20%) at the highest MOI of 3E3 vg/cell. Furthermore, as anticipated, ATC-specific variants CasX 528 and 690 were unable to edit at the AAVS1 locus when paired with the TTC-specific spacer 31.63 (FIG. 91). A dose-dependent response was also observed across all CasX variants that demonstrated editing activity.

[0791] The experiments demonstrate that engineered variants of CasX nucleases, when paired with the appropriate spacer, were able to edit a target locus in human cells when delivered via AAV transduction.

### Example 35: Assessment of Various Protein Promoters on CasX Protein Editing Activity

[0792] Experiments were performed to demonstrate that CasX protein editing activity and potency can be influenced by using different protein promoters in an AAV construct to drive expression of the encoded protein. Furthermore, the effects incorporating a WPRE element on editing activity were also evaluated.

### Materials and Methods

[0793] AAV plasmid constructs were generated and cloned into a pAAV plasmid flanked with AAV2 ITRs using standard molecular cloning methods as described in Example 1. Briefly, AAV plasmids were generated to express CasX 491 driven by a protein promoter variant with a bGH poly(A) signal sequence and a gRNA transcriptional unit that expressed a Pol III promoter-guide scaffold 235 with spacer 31.63 targeting the AAVS1 locus. Three protein promoters were assessed in this example: U1A, Jet, and UbC, which were cloned upstream of the construct encoding for CasX 491. Each protein promoter variant was also assessed with or without a WPRE element (WPRE2 or WPRE3). For constructs with a WPRE element, the WPRE element was cloned downstream of the construct encoding for CasX 491. Sequences for the three protein promoters and two WPRE elements are listed in Table 61. The specific combinations of protein promoter and WPRE elements with the corresponding AAV construct IDs are listed in Table 62.

TABLE 61
Sequences of protein promoter variants and
WPRE elements assessed in this example.

| SEQ | | AAV | Length of |
|---|---|---|---|
| ID NO | Element | construct ID | element (bp) |
| 3533 | UbC protein promoter | 253, 254, 255 | 400 |
| 3556 | Jet protein promoter | 256, 257, 258 | 164 |
| 3722 | U1A protein promoter | 259, 260, 261 | 252 |
| 3616 | WPRE2 | 253, 256, 259 | 593 |
| 3617 | WPRE3 | 254, 257, 260 | 247 |

TABLE 62
Combination of protein promoter and WPRE
elements assessed in this example.

| AAV construct ID | Protein promoter | WPRE element |
|---|---|---|
| 253 | UbC | WPRE2 |
| 254 | UbC | WPRE3 |
| 255 | UbC | N/A |
| 256 | Jet | WPRE2 |
| 257 | Jet | WPRE3 |
| 258 | Jet | N/A |
| 259 | U1A | WPRE2 |
| 260 | U1A | WPRE3 |
| 261 | U1A | N/A |

[0794] AAV production and titering were performed following similar methods as described in Example 1.

### AAV Transduction of iNs (Induced Neurons) In Vitro:

[0795] ˜50,000 iNs per well were seeded on Matrigel-coated 96-well plates 24 hours prior to transduction. AAVs expressing the CasX:gRNA system, containing various protein promoter variants with or without a WPRE element, were diluted in neuronal plating media and added to cells. Cells were transduced at two MOIs (1E3 or 1E4 vg/cell). 7 days post-transduction, cells were lifted using lysis buffer, and gDNA was harvested and prepared for editing analysis at the AAVS1 locus using NGS following similar methods as described in Example 18.

### Results

[0796] The effects of using different protein promoters (U1A, Jet, and UbC), with or without a WPRE element, on editing activity were evaluated. The results of this editing assay are shown in FIGS. 92A-92B. The data demonstrate that use of the U1A protein promoter resulted in the highest editing activity at the AAVS1 locus at both MOIs. Specifically, use of the U1A protein promoter to drive CasX expression resulted in >20% editing at the MOI of 1E3, and this editing level increased to >80% at the MOI of 1E4. Furthermore, incorporation of a WPRE appeared to result in reduced editing activity at the AAVS1 locus (FIGS. 92A-92B).

[0797] The experiments demonstrate that the editing activity of CasX proteins can be modulated by protein promoter choice; here, of the three protein promoters assessed, use of the U1A promoter resulted in the highest level of CasX editing activity.

### Example 36: CasX:gRNA In Vitro Cleavage Assays

[0798] Experiments were performed to assess in vitro DNA cleavage by CasX:gRNA ribonucleoproteins (RNPs).

### Materials and Methods

### Assembly of RNP

[0799] RNPs of either CasX variant 119 (SEQ ID NO: 124), CasX variant 491 (SEQ ID NO: 190), CasX variant 515 (SEQ ID NO: 197), or CasX variant 812 (SEQ ID NO: 484) were assembled with single guide RNAs (sgRNA) with scaffold 316 (SEQ ID NO: 9588) and one of two spacers, as described in detail below. Separately, RNPs of CasX variant 515 were assembled with sgRNA with either scaffold 2 (SEQ ID NO: 5), 174 (SEQ ID NO: 2238), 235 (SEQ ID NO: 2292), or 316 (SEQ ID NO: 9588) and one of two spacers.

[0800] Purified RNP of CasX variants and sgRNA were prepared same-day prior to experiments. For experiments where protein variants were being compared, the CasX protein was incubated with sgRNA at 1:1.2 molar ratio. When scaffolds were compared, the protein was added in 1.2:1 ratio to guide. Briefly, sgRNA was added to Buffer #1 (20 mM Tris HCl pH 7.5, 150 mM NaCl, 1 mM TCEP, 5% glycerol, 10 mM MgCl₂) on ice, then CasX was added to the sgRNA solution, slowly with swirling, and immediately incubated at 37° C. for 20 minutes to form RNP complexes. RNP complexes were centrifuged at 4° C. for 5 minutes at 16,000×g to remove any precipitate. Formation of competent (active) RNP was assessed as described below.

### In Vitro Cleavage Assays

[0801] The ability of CasX variants to form active RNP compared to a CasX variant 119 was determined using an in vitro cleavage assay. The beta-2 microglobulin (B2M) 7.9 and 7.37 target for the cleavage assay was created as follows. DNA oligos (sequences in Table 63) were generated with 5′ terminal amino modification for conjugation to Cy-dyes with an amino-reactive handle (N-hydroxysuccinimide). Oligo-dye conjugation reactions of 100 uM oligo and 1 mM dye were performed in 100 mM sodium borate pH 8.3 at 4° C. for 16 h. Target strands (TS) were labeled with Cy5.5 and non-targeting strands (NTS) were labeled with Cy7.5. After quenching the reactions with 1 mM Tris pH 7.5, the conjugated oligos were purified via ethanol precipitation. Double-stranded DNA (dsDNA) targets were formed by mixing the oligos in a 1:1 ratio in 1× hybridization buffer (20 mM Tris HCl pH 7.5, 100 mM KCl, 5 mM MgCl₂), heating to 95° C. for 10 minutes, and allowing the solution to cool to room temperature.

TABLE 63
DNA sequences and descriptions of target DNAs

| DNA Sequence (5′-3′)* | SEQ ID NO: | Description |
|---|---|---|
| /5AmMC6/TGAAGCTGACAGCATTCGGGCCGAGA | 9591 | 7.37 NTS with 5′ amine for NHS ester |
| TGTCTCGCTCCGTGGCCTTAGCTGTGCTCGCGCT | | linkages** |
| /5AmMC6/AGCGCGAGCACAGCTAAGGCCACGGA | 9592 | 7.37 TS with 5′ amine** |
| GCGAGACATCTCGGCCCGAATGCTGTCAGCTTCA | | |
| /5AmMC6/TGAAGCTGACAGCATTCGGGCCTAGA | 9593 | 7.37 gel probe NTS, mismatch at 5 |
| TGTCTCGCTCCGTGGCCTTAGCTGTGCTCGCGCT | | |
| /5AmMC6/AGCGCGAGCACAGCTAAGGCCACGGA | 9594 | 7.37 gel probe TS, mismatch at 5 |
| GCGAGACATCTAGGCCCGAATGCTGTCAGCTTCA | | |
| /5AmMC6/TGAAGCTGACAGCATTCGGGCCGAGA | 9595 | 7.37 gel probe NTS, mismatch at 10 |
| TATCTCGCTCCGTGGCCTTAGCTGTGCTCGCGCT | | |
| /5AmMC6/AGCGCGAGCACAGCTAAGGCCACGGA | 9596 | 7.37 gel probe TS, mismatch at 10 |
| GCGAGATATCTCGGCCCGAATGCTGTCAGCTTCA | | |
| /5AmMC6/TGAAGCTGACAGCATTCGGGCCGAGA | 9597 | 7.37 gel probe NTS, mismatch at 15 |
| TGTCTCGATCCGTGGCCTTAGCTGTGCTCGCGCT | | |
| /5AmMC6/AGCGCGAGCACAGCTAAGGCCACGGA | 9598 | 7.37 gel probe TS, mismatch at 15 |
| TCGAGACATCTCGGCCCGAATGCTGTCAGCTTCA | | |
| /5AmMC6/CTTTCAGCAAGGACTGGTCTTTCTAT | 9599 | 7.9 target TS |
| CTCTTGTACTACACTGAATTCACCCCCACTGAAA | | |
| /5AmMC6/TTTCAGTGGGGGTGAATTCAGTGTAG | 9600 | 7.9 target NTS |
| TACAAGAGATAGAAAGACCAGTCCTTGCTGAAAG | | |
| /5AmMC6/CTTTCAGCAAGGACTGGTCTTTCTAT | 9601 | 7.9 gel probe TS, mismatch at 5 |
| CTCTTGTACGACACTGAATTCACCCCCACTGAAA | | |
| /5AmMC6/TTTCAGTGGGGGTGAATTCAGTGTCG | 9602 | 7.9 gel probe NTS, mismatch at 5 |
| TACAAGAGATAGAAAGACCAGTCCTTGCTGAAAG | | |
| /5AmMC6/CTTTCAGCAAGGACTGGTCTTTCTAT | 9603 | 7.9 gel probe TS, mismatch at 10 |
| CTCTCGTACTACACTGAATTCACCCCCACTGAAA | | |
| /5AmMC6/TTTCAGTGGGGGTGAATTCAGTGTAG | 9604 | 7.9 gel probe NTS, mismatch at 10 |
| TACGAGAGATAGAAAGACCAGTCCTTGCTGAAAG | | |
| /5AmMC6/CTTTCAGCAAGGACTGGTCTTTCTGT | 9605 | 7.9 gel probe TS, mismatch at 15 |
| CTCTTGTACTACACTGAATTCACCCCCACTGAAA | | |
| /5AmMC6/TTTCAGTGGGGGTGAATTCAGTGTAG | 9606 | 7.9 gel probe NTS, mismatch at 15 |
| TACAAGAGACAGAAAGACCAGTCCTTGCTGAAAG | | |

*5AmMC6 indicates the 5′ Amino Modifier C6. The target sequences are underlined.
**The Kcleave assay using the mismatched position 5 dsDNA target was run at 37° C.

### Determining Cleavage-Competent Fractions for RNPs

[0802] Cleavage reactions were prepared with final RNP concentrations of 100 nM and final target concentration of 100 nM. Reactions were carried out at 37° C. and initiated by the addition of the dye-labeled dsDNA target. Aliquots were taken at 5, 30, and 60 minutes and quenched by adding to 9500 formamide, 25 mM EDTA. Samples were denatured by heating at 95° C. for 10 minutes and run on a 1000 urea-PAGE gel. The gels were imaged with a Cytiva Typhoon and quantified using the Cytiva IQTL software.

### Kcleave Assay

[0803] Cleavage reactions were set up with a final RNP concentration of 200 nM and a final target concentration of 10 nM. Reactions were carried out at 16° C., except where otherwise noted, and initiated by the addition of the target DNA. Aliquots were taken at 15, 30, 60, 120, 180, 240, and 480 seconds, and quenched by adding to 9500 formamide, 25 mM EDTA. Samples were denatured by heating at 95° C. for 10 minutes and run on a 10o urea-PAGE gel. The gels were imaged with a Cytiva Typhoon and quantified using the Cytiva IQTL software. The apparent first-order rate constant of non-target strand cleavage (k_{cleave}) was determined for each CasX:sgRNA combination replicate individually.

[0804] To test the relative specificities of engineered proteins in vitro, apparent cleavage rate constants were compared for targets with mismatched bases at various positions (5, 10, and 15 nt downstream of PAM, Table 63). Cleavage assays were performed in large excess of RNP (200 nM RNP and 1 nM target dsDNA) at 16° C., with the exception of assays measuring cleavage of the target with a mismatch at 5 nt, which were conducted at 37° C. in order to observe measurable cleavage rates. Aliquots were taken at 15, 30, 60, 120, 180, 240, and 480 seconds, and quenched by adding to 95% formamide, 25 mM EDTA. Samples were denatured by heating at 95° C. for 10 minutes and run on a 10% urea-PAGE gel. The gels were imaged with a Cytiva Typhoon and quantified using the Cytiva IQTL software. The apparent first-order rate constant of non-target strand cleavage (k_{cleave}) was determined for each CasX:sgRNA combination replicate individually.

### Results

### Determining Cleavage-Competent Fractions for Protein Variants Compared to CasX Variant 119

[0805] To determine the cleavage-competent fraction for the tested CasX variants, it was assumed that CasX acts essentially as a single-turnover enzyme under the assayed conditions, as indicated by the observation that sub-stoichiometric amounts of enzyme fail to cleave a greater-than-stoichiometric amount of target even under extended time-scales and instead approach a plateau that scales with the amount of enzyme present. Thus, the fraction of target cleaved over long time-scales by an equimolar amount of RNP is indicative of what fraction of the RNP is properly formed and active for cleavage. Thus, the active (competent) fraction for each RNP was derived from the cleaved fraction over the total signal at the 60-minute timepoint, upon confirming an increase in cleaved fraction from the 5-minute timepoint, and relative plateau in cleaved fraction from the 30-minute timepoint.

[0806] Apparent competent fractions were determined for the RNPs with various CasX variants and are provided in Table 64.

TABLE 64
Protein variant RNP comparison of fraction competence and Kcleave rates

| | | Kcleave (sec⁻¹) | | | |
|---|---|---|---|---|---|
| | | On- | Position 15 | Position 10 | Position 5 |
| RNP | Fraction competence* | target | mismatch | mismatch | mismatch |
| (CasX.Scaffold.Spacer) | (mean ± stdev) | spacer | spacer | spacer | spacer** |
| 119.174.7.9 | 26.71 ± 9.65% | 0.0292 | 0.0158 | 0.0047 | 0.0127 |
| 491.174.7.9 | 49.23 ± 6.37% | 0.0966 | 0.0552 | 0.03 | 0.0616 |
| 515.174.7.9 | 30.15 ± 3.58% | 0.0782 | 0.0625 | 0.0324 | 0.0392 |
| 812.174.7.9 | 53.28 ± 5.14% | 0.0909 | 0.0512 | 0.0142 | 0.01 |
| 119.174.7.37 | 29.01 ± 2.67% | 0.0022 | 0.0061 | 0.0028 | 0.0034 |
| 491.174.7.37 | 48.73 ± 5.44% | 0.0425 | 0.015 | 0.0297 | 0.0301 |
| 515.174.7.37 | 43.54 ± 16.19% | 0.0396 | 0.0127 | 0.0297 | 0.0347 |
| 812.174.7.37 | 38.23 ± 2.49% | 0.027 | 0.0111 | 0.0119 | 0.014 |

*Active fraction was calculated by averaging three experimental replicates.
**The Kcleave assay using the mismatched position 5 dsDNA target was run at 37° C.

[0807] For protein variant comparison, the following CasX variants were used with guide scaffold 316 and spacer 7.9 or guide 316 and spacer 7.37: CasX variant 119, CasX variant 491, CasX variant 515, and CasX variant 812. CasX variant 119 had the lowest active fraction for both spacers, indicating that CasX variant 491, CasX variant 515, and CasX variant 812 form more active and stable RNP with the identical guides under the tested conditions as compared to CasX variant 119. CasX variants 491, 515, and 812 did not show consistent trends in their competent fractions across the two spacers, consistent with the expectation that the additional engineering following CasX 491 primarily affects target engagement and cleavage, rather than guide binding or stability.

Kcleave Assay to Understand Specificity of RNPs Formed from CasX Variants

[0808] Assays were performed to measure the apparent first-order rate constant of non-target strand cleavage (k_{cleave}), and the results are presented in Table 64, above. A drastic effect on the kinetics of CasX variant 812 RNP cleavage was observed for on-target versus the mismatched dsDNA target for both spacers. CasX variant 812 had comparable on-target cleavage rates to CasX variant 491 and CasX variant 515 for both spacers, with a slightly higher cleavage rate than CasX variant 515 on spacer 7.9, which might be explained by the lower competent fraction observed for the CasX variant 515 RNP with that spacer, and a lower cleavage rate on 7.37.

[0809] The off-target rates for CasX variant 812 were much more substantially reduced for most of the mismatched substrates. The difference in kcleave rates was readily apparent for the target with a mismatch at position 10, with 812 having a roughly 6-fold (7.9) and 2-fold (7.37) reduction in cleavage rate, as compared to its on-target rate. CasX variant 515, by comparison, exhibited a 2.4-fold and a 25% reduction on the same targets. A substantial difference was also observed for the position 5 mismatch targets. Even though the assay was run at 37° C. to enable measurable cleavage rates, as the position 5 mismatch targets were essentially uncleaved by the CasX RNPs at the lower temperature used for the other targets, CasX variant 812 against spacer 7.9 exhibited a 9-fold reduction in cleavage rate from on-target rate run at 16° C. and a 2-fold reduction for the 7.37 spacer with a position 5 mismatch. CasX variant 515 showed a 2-fold reduction for mismatched 7.9 and a nearly equivalent cleavage rate for 7.37 with the position 5 mismatch (note that the “equivalent” cleavage rate is due to the increased temperature).

[0810] For the position 15 mismatch substrate, CasX variant 812 exhibited modest reductions in cleavage rates relative to on-target rates, comparable to the reduction observed for 515. This suggests that the increased sensitivity of CasX variant 812 to mismatches declines by the PAM distal region, at least for the specific mismatches and spacers tested here. The increased sensitivity at positions 5 and 10 in particular correlates with the position of the G329K mutation present in CasX variant 812. This mutation introduces a positive charge near the RNA spacer around position 8 and may help CasX to better read out distortions caused by mismatches. Mismatches closer to this new site of contact would be more likely to significantly disrupt either R-loop propagation or allosteric activation of the RuvC (depending on the precise mechanism of increased specificity), while mismatches farther away (as in the position 15 mismatch) might have more variable effects depending on the nature of the mismatch and its effects on the broader heteroduplex structure. Taken together, these data confirm that CasX variant 812 is inherently more sensitive to mismatches between the RNA spacer and the DNA target and is not simply a less active enzyme, as the decrease in cleavage rate at mismatched targets is in excess of the decrease in cleavage rate at properly matched targets. This is consistent with the results in Examples 37 and 38 that indicate that CasX variant 812 is a highly specific enzyme, with lower off-target editing compared to the other nucleases tested.

### Determining Cleavage-Competent Fractions for Single Guide Variants Relative to Reference Single Guide 2

[0811] RNPs were complexed using the aforementioned methods. To isolate the effect of sgRNA identity on RNP formation, guide-limiting conditions were employed. sgRNAs with scaffolds 2, 174, 235, or 316 with spacers 7.9 or 7.37 were mixed with CasX variant 515 at final concentrations of 1 μM for the guide and 1.2 μM for the protein. Fraction competence was calculated as described above, and the results are provided in Table 65.

TABLE 65
Guide variant RNP comparison of fraction
competence and Kcleave assay

| RNP construct | Competent fraction | Kcleave |
|---|---|---|
| (CasX.Scaffold.Spacer) | (mean ± stdev) | (sec⁻¹) |
| 515.2.7.9 | 28.146.87% | 0.1346 ± 0.0118 |
| 515.174.7.9 | 42.779.62% | 0.1723 ± 0.0046 |
| 515.235.7.9 | 34.111.15% | 0.1696 ± 0.0571 |
| 515.316.7.9 | 30.896.87% | 0.1413 ± 0.0301 |
| 515.2.7.37 | 10.422.24% | 0.0204 ± 0.0002 |
| 515.174.7.37 | 19.962.88% | 0.0534 ± 0.0200 |
| 515.235.7.37 | 32.6411.60% | 0.0647 ± 0.0163 |
| 515.316.7.37 | 26.9811.08% | 0.0851 ± 0.0071 |

* active fraction was calculated by averaging two experimental replicates

[0812] Given the complex folding structure of the CasX guide, fraction competence is expected to largely be determined by how much of the guide is properly folded for interaction with the protein. All guides with engineered scaffolds showed improvements over scaffold 2, but guides with scaffold 235 or 316 showed improvements relative to 174 for spacer 7.37. This is consistent with the introduction of mutations in the pseudoknot and triplex that are expected to stabilize the properly folded form.

[0813] Higher competent fractions of all guides were observed for spacer 7.9. For this spacer, scaffold 174 had the highest competent fraction, followed by scaffolds 316, 235, and 2. Proper guide folding is expected to be highly dependent on the potential for undesired interactions between the scaffold and spacer sequences, so the observed differences may be attributable to differential sequence-specific interactions, variations in prep quality, or noise in the assay.

Determining k_{Cleave} for Single Guide Variants Compared to Reference Scaffold 2

[0814] Cleavage assays were performed with CasX variant 515 and guides with reference scaffold 2 compared to guides with scaffolds 174, 235, or 316 with spacer 7.9 or 7.37 to determine relative cleavage rates. The mean and standard deviation of three replicates with independent fits are presented in Table 65, above.

[0815] To reduce cleavage kinetics to a range measurable with the assay, the cleavage reactions were incubated at 16° C. Under these conditions, all guides supported faster cleavage rates as compared to scaffold 2. For spacer 7.37, the cleavage kinetics aligned with those guides that contributed to the highest fraction competence, with the highest cleavage rate being sg174 (0.1723 s⁻¹), followed by scaffold 235 (0.1696 s⁻¹) and scaffold 316 (0.1413 s⁻¹), versus scaffold 2 (0.1346 s⁻¹). For spacer 7.9, scaffold 316 yielded the highest cleavage rate (0.0851 s⁻¹), followed by scaffold 235 (0.0647 s⁻¹) and sg174 (0.0534 s⁻¹), versus scaffold 2 (0.0204 s⁻¹). The fraction competence and k_{cleave} data did not demonstrate differences across the engineered variants that were consistent across both spacers, although all are consistently better than scaffold 2. This suggests that the improvements seen for scaffold 235 and 316 over 174 are primarily due to behavior in the cell, whether it be stability in the cytoplasm, folding in the cytoplasm, transcription when delivered via plasmid or AAV, or refolding ability when delivered via LNP, that are not captured by guides that have been in vitro transcribed, refolded, and tested for cleavage biochemically.

### Example 37: Identification of CasX Variants with Enhanced Activity or Specificity Relative to CasX Variant 515

[0816] An experiment was performed to identify CasX variants with single mutations and increased editing activity or improved specificity relative to CasX variant 515.

### Materials and Methods

[0817] A multiplexed pooled approach was taken to assay clonal proteins derived from CasX variant 515 using a pooled activity and specificity (PASS) assay. A pooled HEK cell line, which was adapted to suspension culture from adherent cells, was generated and termed PASS_V1.03. Methods to complete the production of the PASS_V1.03 line were previously described in International Publication No. WO2022120095A1, incorporated herein by reference.

[0818] CasX variants were expressed using a relatively weakly-expressing promoter to reduce CasX protein expression and thereby improve the sensitivity of the assay. Samples were tested in quadruplicate. The list of CasX variants tested and their mutations relative to CasX variant 515 is provided in Tables 66 and 67, below. All of the tested CasX variants had single mutations (i.e., a single amino acid substitution, deletion, or insertion) relative to CasX variant 515, except for CasX variant 676, which has three mutations relative to CasX variant 515. Streptococcus pyogenes Cas9 without a guide RNA served as a negative control.

[0819] To assess the editing activity and specificity of the tested CasX variants at human target sites, two sets of target sites were quantified. First, editing was quantified at TTC PAM on-target sites in which the twenty nucleotides of each gRNA spacer targeting these on-target sites were perfectly complementary to the target site. For each sample and spacer-target pair, data based on <500 reads were removed. Fraction indel values for each sample and spacer-target pair were subtracted by the average fraction indel value across Cas9-treated samples with the same spacer-target pair; Cas9 served as a negative control due to the absence of a compatible guide RNA. Second, editing was quantified at TTC PAM off-target sites, in which one of the twenty nucleotides of the spacer was mismatched with the target site. As above, for each sample and spacer-target pair, data based on <500 reads were removed, and fraction indel values for each sample and spacer-target pair were subtracted by the average fraction indel value across Cas9-treated samples with the same spacer-target pair. Finally, for those TTC PAM spacer-target pairs that had both an on-target and an off-target version, the average editing activity and standard error of the mean (SEM) were calculated.

### Results

[0820] Table 66 provides the level of on-target editing produced by various CasX variants with mutations relative to CasX variant 515, ranked from highest to lowest activity.

TABLE 66
Average on-targeting editing activity, ranked from highest to lowest

| Protein Designation | Mutation relative to | Average on-target TTC | SEM on-target TTC |
|---|---|---|---|
| (CasX variant no., | CasX 515* | PAM editing activity | PAM editing activity |
| or Cas9) | (Position.Reference.Alternative) | (fraction) | (fraction) |
| 607 | 398.Y.T | 2.72E−01 | 4.08E−02 |
| 532 | 27.—.R | 2.59E−01 | 3.34E−02 |
| 676 | 27.—.R & 170.L.K & | 2.36E−01 | 3.42E−02 |
| | 224.G.S | | |
| 592 | 304.M.T | 2.19E−01 | 3.73E−02 |
| 788 | 891.S.Q | 2.18E−01 | 3.43E−02 |
| 583 | 169.L.K | 2.17E−01 | 3.66E−02 |
| 555 | 171.A.D | 2.14E−01 | 3.73E−02 |
| 515 | — | 2.09E−01 | 3.82E−02 |
| 569 | 9.K.G | 2.08E−01 | 3.12E−02 |
| 787 | 826.V.M | 2.07E−01 | 3.45E−02 |
| 561 | 5.—.G | 1.98E−01 | 3.41E−02 |
| 577 | 64.R.Q | 1.94E−01 | 3.48E−02 |
| 585 | 171.A.S | 1.94E−01 | 3.40E−02 |
| 572 | 35.R.P | 1.89E−01 | 3.95E−02 |
| 536 | 224.G.T | 1.88E−01 | 3.43E−02 |
| 656 | 887.T.D | 1.87E−01 | 3.34E−02 |
| 559 | 4.I.G | 1.87E−01 | 3.22E−02 |
| 777 | 169.L.Q | 1.84E−01 | 3.36E−02 |
| 584 | 171.A.Y | 1.83E−01 | 3.66E−02 |
| 779 | 372.G.I | 1.79E−01 | 3.15E−02 |
| 566 | 7.I.A | 1.77E−01 | 3.37E−02 |
| 638 | 481.E.D | 1.77E−01 | 3.37E−02 |
| 593 | 304.M.W | 1.76E−01 | 3.35E−02 |
| 568 | 8.N.S | 1.76E−01 | 3.34E−02 |
| 562 | 5.K.G | 1.74E−01 | 3.04E−02 |
| 564 | 6.—.G | 1.73E−01 | 3.32E−02 |
| 757 | 796.K.Q | 1.73E−01 | 2.94E−02 |
| 654 | 772.M.S | 1.70E−01 | 3.18E−02 |
| 760 | 797.T.V | 1.70E−01 | 3.12E−02 |
| 818 | 698.S.R | 1.67E−01 | 3.31E−02 |
| 646 | 653.—.T | 1.66E−01 | 3.06E−02 |
| 784 | 570.P.I | 1.65E−01 | 2.64E−02 |
| 762 | 793.—.P | 1.64E−01 | 2.99E−02 |
| 789 | 917.G.E | 1.61E−01 | 2.91E−02 |
| 649 | 655.—.S | 1.58E−01 | 3.13E−02 |
| 594 | 329.G.N | 1.56E−01 | 3.26E−02 |
| 604 | 342.—.A | 1.55E−01 | 2.87E−02 |
| 612 | 412.G.P | 1.55E−01 | 2.81E−02 |
| 644 | 593.Q.V | 1.52E−01 | 2.97E−02 |
| 736 | 794.P.A | 1.52E−01 | 2.85E−02 |
| 790 | 951.—.S | 1.51E−01 | 2.87E−02 |
| 780 | 389.—.V | 1.49E−01 | 3.02E−02 |
| 717 | 390.K.Q | 1.43E−01 | 2.84E−02 |
| 633 | 473.—.D | 1.41E−01 | 2.71E−02 |
| 590 | 289.K.S | 1.40E−01 | 2.92E−02 |
| 657 | 893.—.N | 1.39E−01 | 2.96E−02 |
| 643 | 593.Q.F | 1.38E−01 | 2.80E−02 |
| 544 | 232.D.G | 1.37E−01 | 3.19E−02 |
| 591 | 292.V.L | 1.37E−01 | 2.76E−02 |
| 534 | 224.G.H | 1.36E−01 | 2.24E−02 |
| 791 | 953.—.K | 1.34E−01 | 2.60E−02 |
| 781 | 390.K.E | 1.33E−01 | 2.71E−02 |
| 718 | 7.I.L | 1.32E−01 | 2.85E−02 |
| 812 | 329.G.K | 1.29E−01 | 2.97E−02 |
| 609 | 405.L.N | 1.26E−01 | 2.57E−02 |
| 758 | 791.E.N | 1.24E−01 | 2.33E−02 |
| 616 | 414.—.Y | 1.22E−01 | 2.44E−02 |
| 632 | 469.L.S | 1.22E−01 | 2.79E−02 |
| 614 | 414.—.R | 1.18E−01 | 2.32E−02 |
| 721 | 156.F.V | 1.14E−01 | 2.48E−02 |
| 611 | 408.E.Y | 1.11E−01 | 2.08E−02 |
| 622 | 420.D.G | 1.07E−01 | 2.41E−02 |
| 610 | 405.L.W | 1.06E−01 | 2.21E−02 |
| 619 | 417.K.D | 1.05E−01 | 2.59E−02 |
| 580 | 86.W.D | 1.00E−01 | 2.22E−02 |
| 602 | 339.—.Q | 9.82E−02 | 2.53E−02 |
| 537 | 224.G.A | 9.21E−02 | 2.34E−02 |
| 587 | 224.G.— | 8.18E−02 | 2.19E−02 |
| 538 | 224.G.V | 7.16E−02 | 2.16E−02 |
| 702 | 91.K.V | 6.31E−02 | 1.93E−02 |
| 824 | 611.K.Q | 4.07E−02 | 1.23E−02 |
| 631 | 469.L.K | 3.01E−02 | 1.30E−02 |
| 573 | 53.E.P | 2.65E−02 | 1.11E−02 |
| 528 | 224.G.Y | 8.98E−03 | 7.97E−03 |
| 535 | 224.G.S | 7.92E−03 | 7.31E−03 |
| Cas9 | n/a | 7.17E−03 | 8.11E−03 |

*Positions of mutations are shown relative to a CasX 515 sequence with an N-terminal methionine residue (SEQ ID NO: 9590). Each mutation is indicated by its position, reference sequence, and alt sequence, separated by ‘.’ Insertions are indicated with a ‘—’ in the reference sequence (first position), and deletions with a ‘—’ in the alt sequence (second position). Multiple individual mutations are separated by “&”.

[0821] As shown in Table 66, CasX variants 607, 532, 676, 592, 788, 583, and 555 produced higher levels of on-target editing than did CasX variant 515. CasX variants 569, 787, 561, 577, 585, and 572 also produced relatively high levels of on-target editing, with at least 9000 of the activity of CasX variant 515 (i.e., greater than 1.88E-01 on-target editing).

[0822] Table 67 provides the level of off-target editing produced by various CasX variants with mutations relative to CasX variant 515, ranked from lowest to highest activity.

TABLE 67
Average off-targeting editing activity, ranked from lowest to highest

| Protein Designation | Mutation relative to | Average off-target TTC | SEM off-target TTC |
|---|---|---|---|
| (CasX variant no., | CasX 515* | PAM editing activity | PAM editing activity |
| or Cas9) | (Position.Reference.Alternative) | (fraction) | (fraction) |
| 528 | 224.G.Y | 1.73E−03 | 1.84E−03 |
| Cas9 | n/a | 2.18E−03 | 2.72E−03 |
| 535 | 224.G.S | 2.33E−03 | 2.63E−03 |
| 573 | 53.E.P | 5.01E−03 | 3.29E−03 |
| 824 | 611.K.Q | 5.86E−03 | 2.93E−03 |
| 631 | 469.L.K | 6.23E−03 | 3.45E−03 |
| 587 | 224.G.— | 1.15E−02 | 4.68E−03 |
| 538 | 224.G.V | 1.45E−02 | 7.45E−03 |
| 702 | 91.K.V | 1.52E−02 | 6.87E−03 |
| 812 | 329.G.K | 1.58E−02 | 7.16E−03 |
| 580 | 86.W.D | 1.78E−02 | 6.27E−03 |
| 619 | 417.K.D | 1.94E−02 | 6.80E−03 |
| 610 | 405.L.W | 2.08E−02 | 6.80E−03 |
| 758 | 791.E.N | 2.11E−02 | 7.51E−03 |
| 721 | 156.F.V | 2.12E−02 | 6.94E−03 |
| 591 | 292.V.L | 2.15E−02 | 7.81E−03 |
| 537 | 224.G.A | 2.18E−02 | 8.82E−03 |
| 590 | 289.K.S | 2.28E−02 | 8.23E−03 |
| 622 | 420.D.G | 2.30E−02 | 7.70E−03 |
| 632 | 469.L.S | 2.34E−02 | 7.92E−03 |
| 633 | 473.—.D | 2.36E−02 | 8.67E−03 |
| 614 | 414.—.R | 2.38E−02 | 7.57E−03 |
| 594 | 329.G.N | 2.41E−02 | 9.14E−03 |
| 643 | 593.Q.F | 2.46E−02 | 8.93E−03 |
| 609 | 405.L.N | 2.47E−02 | 8.24E−03 |
| 781 | 390.K.E | 2.48E−02 | 8.34E−03 |
| 616 | 414.—.Y | 2.48E−02 | 7.29E−03 |
| 602 | 339.—.Q | 2.55E−02 | 9.70E−03 |
| 791 | 953.—.K | 2.71E−02 | 7.83E−03 |
| 593 | 304.M.W | 2.87E−02 | 1.04E−02 |
| 644 | 593.Q.V | 2.88E−02 | 9.11E−03 |
| 657 | 893.—.N | 2.89E−02 | 1.02E−02 |
| 717 | 390.K.Q | 2.99E−02 | 1.00E−02 |
| 611 | 408.E.Y | 3.00E−02 | 8.86E−03 |
| 572 | 35.R.P | 3.06E−02 | 1.07E−02 |
| 780 | 389.—.V | 3.07E−02 | 9.83E−03 |
| 818 | 698.S.R | 3.15E−02 | 1.02E−02 |
| 638 | 481.E.D | 3.16E−02 | 1.01E−02 |
| 584 | 171.A.Y | 3.39E−02 | 1.07E−02 |
| 790 | 951.—.S | 3.47E−02 | 1.02E−02 |
| 718 | 7.I.L | 3.47E−02 | 1.06E−02 |
| 649 | 655.—.S | 3.54E−02 | 1.09E−02 |
| 562 | 5.K.G | 3.56E−02 | 1.09E−02 |
| 784 | 570.P.I | 3.60E−02 | 9.80E−03 |
| 736 | 794.P.A | 3.61E−02 | 1.03E−02 |
| 789 | 917.G.E | 3.63E−02 | 1.11E−02 |
| 544 | 232.D.G | 3.64E−02 | 1.15E−02 |
| 612 | 412.G.P | 3.64E−02 | 1.12E−02 |
| 604 | 342.—.A | 3.66E−02 | 1.11E−02 |
| 564 | 6.—.G | 3.67E−02 | 1.07E−02 |
| 568 | 8.N.S | 3.91E−02 | 1.15E−02 |
| 779 | 372.G.I | 3.98E−02 | 1.20E−02 |
| 760 | 797.T.V | 3.99E−02 | 1.09E−02 |
| 777 | 169.L.Q | 4.11E−02 | 1.16E−02 |
| 566 | 7.I.A | 4.20E−02 | 1.15E−02 |
| 569 | 9.K.G | 4.29E−02 | 1.03E−02 |
| 577 | 64.R.Q | 4.38E−02 | 1.28E−02 |
| 536 | 224.G.T | 4.44E−02 | 1.32E−02 |
| 656 | 887.T.D | 4.54E−02 | 1.22E−02 |
| 646 | 653.—.T | 4.56E−02 | 1.21E−02 |
| 757 | 796.K.Q | 4.60E−02 | 1.25E−02 |
| 559 | 4.I.G | 4.71E−02 | 1.19E−02 |
| 585 | 171.A.S | 4.73E−02 | 1.24E−02 |
| 515 | — | 4.85E−02 | 1.33E−02 |
| 762 | 793.—.P | 4.91E−02 | 1.25E−02 |
| 561 | 5.—.G | 4.92E−02 | 1.37E−02 |
| 788 | 891.S.Q | 5.50E−02 | 1.45E−02 |
| 555 | 171.A.D | 5.53E−02 | 1.52E−02 |
| 787 | 826.V.M | 5.68E−02 | 1.33E−02 |
| 654 | 772.M.S | 5.84E−02 | 1.61E−02 |
| 583 | 169.L.K | 5.95E−02 | 1.48E−02 |
| 592 | 304.M.T | 5.97E−02 | 1.48E−02 |
| 534 | 224.G.H | 6.37E−02 | 1.52E−02 |
| 676 | 27.—.R + 170.L.K + | 7.13E−02 | 1.68E−02 |
| | 224.G.S | | |
| 607 | 398.Y.T | 8.25E−02 | 1.82E−02 |
| 532 | 27.—.R | 8.70E−02 | 1.73E−02 |

*Positions of mutations are shown relative to a CasX 515 sequence with an N-terminal methionine residue (SEQ ID NO: 9590). Each mutation is indicated by its position, reference sequence, and alt sequence, separated by ‘.’ Insertions are indicated with a ‘—’ in the reference sequence (first position), and deletions with a ‘—’ in the alt sequence (second position). Multiple individual mutations are separated by “&”.

[0823] As shown in Table 67, many of the tested CasX variants showed lower levels of off-target editing than did CasX variant 515. For example, consistent with previous results, CasX variant 812 produced relatively low levels of off-target editing. Further, some of the tested CasX proteins showed even lower levels of off-target editing than did CasX variant 812 (specifically, CasX variants 528, 535, 573, 824, 631, 587, 538, and 702).

[0824] Based on these results, a set of mutation conferring a high degree of editing activity and/or specificity was chosen for introducing in pairs into CasX variant 515. First, high activity mutations were defined as those that showed a level of on-target editing equal to at least 87.3% of the level of on-target editing by CasX variant 515. CasX variants 607, 532, 676, 592, 788, 583, 555, 569, 787, 561, 577, 585, 572, 536, 656, 559, 777, and 584 met this threshold, and were therefore selected as potential activity-enhancing mutations (see Table 68). Second, high specificity mutations were defined as those producing 80% or lower of the level of off-target editing produced by CasX variant 515, while maintaining at least 79.95% of the on-target editing activity of CasX variant 515. This 80% on-target editing activity requirement was implemented to avoid selecting mutations that were simply loss-of-function mutations and would therefore not be expected to be useful as gene editors. CasX variants 593, 572, 818, 638, 584, 562, and 784 met these criteria, and were therefore selected as potential specificity-enhancing mutations (see Table 68).

[0825] In total, 22 individual mutations were chosen as candidates for introducing in pairs into CasX variant 515 and testing for improved properties, as described in Example 38, below. The positions of the individual mutations relative to full-length CasX variant 515, as well as amino acid sequences of full-length CasX variants with the individual mutations, are provided in Table 68. Table 69, below, shows the amino acid sequences and coordinates of the domains of CasX variant 515, and Table 70 shows the positions of the 22 individual mutations within the domains of CasX variant 515, as well as the amino acid sequences of domains with each individual mutations.

TABLE 68
Summary of positions of single mutations
within the CasX 515 variant

| | | Mutation relative | Full-length CasX |
|---|---|---|---|
| CasX | | to CasX 515* | variant amino |
| variant | | (Position. Reference. | acid sequence |
| no. | Phenotype | Alternative) | (SEQ ID NO) |
| 532 | Activity | 27.-.R | 213 |
| 536 | Activity | 224.G.T | 217 |
| 555 | Activity | 171.A.D | 235 |
| 559 | Activity | 4.I.G | 239 |
| 561 | Activity | 5.-.G | 241 |
| 562 | Specificity | 5.K.G | 242 |
| 564 | Specificity | 6.-.G | 244 |
| 569 | Activity | 9.K.G | 249 |
| 572 | Activity (and | 35.R.P | 252 |
| | specificity) | | |
| 577 | Activity | 64.R.Q | 257 |
| 583 | Activity | 169.L.K | 263 |
| 584 | Activity (and | 171.A.Y | 264 |
| | specificity) | | |
| 585 | Activity | 171.A.S | 265 |
| 592 | Activity | 304.M.T | 272 |
| 593 | Specificity | 304.M.W | 273 |
| 607 | Activity | 398.Y.T | 287 |
| 638 | Specificity | 481.E.D | 318 |
| 656 | Activity | 887.T.D | 336 |
| 777 | Activity | 169.L.Q | 450 |
| 787 | Activity | 826.V.M | 460 |
| 788 | Activity | 891.S.Q | 461 |
| 818 | Specificity | 698.S.R | 490 |

*Positions of mutations are shown relative to a CasX 515 sequence with an N-terminal methionine residue (SEQ ID NO: 9590). Each mutation is indicated by its position, reference sequence, and alt sequence, separated by ‘.’ Insertions are indicated with a ‘-’ in the reference sequence (first position), and deletions with a ‘-’ in the alt sequence (second position). Multiple individual mutations are separated by “&”

TABLE 69
CasX variant 515 domain sequences and coordinates

| | SEQ | | |
|---|---|---|---|
| Domain | ID NO | Amino Acid Sequence | Coordinates |
| N-terminal | — | M | 1 |
| methionine | | | |
| OBD-I | 585 | QEIKRINKIRRRLVKDSNTKKAGKTGPMKTLLVRVMTPDLRERLEN | 2-57 |
| | | LRKKPENIPQ | |
| Helical I-I | 586 | PISNTSRANLNKLLTDYTEMKKAILHVYWEEFQKDPVGLMSRVA | 58-101 |
| NTSB | 587 | QPASKKIDQNKLKPEMDEKGNLTTAGFACSQCGQPLFVYKLEQVSE | 102-192 |
| | | KGKAYTNYFGRCNVAEHEKLILLAQLKPEKDSDEAVTYSLGKFGQ | |
| Helical I-II | 588 | RALDFYSIHVTKESTHPVKPLAQIAGNRYASGPVGKALSDACMGTI | 193-333 |
| | | ASFLSKYQDIIIEHQKVVKGNQKRLESLRELAGKENLEYPSVTLPP | |
| | | QPHTKEGVDAYNEVIARVRMWVNLNLWQKLKLSRDDAKPLLRLKGF | |
| | | PSF | |
| Helical II | 589 | PLVERQANEVDWWDMVCNVKKLINEKKEDGKVFWQNLAGYKRQEAL | 334-501 |
| | | RPYLSSEEDRKKGKKFARYQLGDLLLHLEKKHGEDWGKVYDEAWER | |
| | | IDKKVEGLSKHIKLEEERRSEDAQSKAALTDWLRAKASFVIEGLKE | |
| | | ADKDEFCRCELKLQKWYGDLRGKPFAIEAE | |
| OBD-II | 590 | NSILDISGFSKQYNCAFIWQKDGVKKLNLYLIINYFKGGKLRFKKI | 502-647 |
| | | KPEAFEANRFYTVINKKSGEIVPMEVNENFDDPNLIILPLAFGKRQ | |
| | | GREFIWNDLLSLETGSLKLANGRVIEKTLYNRRTRQDEPALFVALT | |
| | | FERREVLD | |
| RuvC-I | 591 | SSNIKPMNLIGVDRGENIPAVIALTDPEGCPLSRFKDSLGNPTHIL | 648-811 |
| | | RIGESYKEKQRTIQAKKEVEQRRAGGYSRKYASKAKNLADDMVRNT | |
| | | ARDLLYYAVTQDAMLIFENLSRGFGRQGKRTFMAERQYTRMEDWLT | |
| | | AKLAYEGLPSKTYLSKTLAQYTSKTC | |
| TSL | 592 | SNCGFTITSADYDRVLEKLKKTATGWMTTINGKELKVEGQITYYNR | 812-921 |
| | | YKRQNVVKDLSVELDRLSEESVNNDISSWTKGRSGEALSLLKKRES | |
| | | HRPVQEKFVCLNCGFETH | |
| RuvC-II | 593 | ADEQAALNIARSWLFLRSQEYKKYQTNKTTGNTDKRAFVETWQSFY | 922-979 |
| | | RKKLKEVWKPAV | |

TABLE 70
Summary of positions of single mutations within CasX 515 variant domains

| | | Position of | | |
|---|---|---|---|---|
| | | mutation within | | Amino acid |
| | | CasX 515 domain* | | sequence of |
| CasX | | (Position. | | mutated |
| variant | Mutated | Reference. | Amino acid sequence of | domain |
| no. | domain | Alternative) | mutated domain† | (SEQ ID NO) |
| 532 | OBD-I | 26.-.R | QEIKRINKIRRRLVKDSNTKKAGKTRGPMK | 9543 |
| | | | TLLVRVMTPDLRERLENLRKKPENIPQ | |
| 536 | Helical I-II | 32.G.T | RALDFYSIHVTKESTHPVKPLAQIAGNRYA | 9544 |
| | | | STPVGKALSDACMGTIASFLSKYQDIIIEH | |
| | | | QKVVKGNQKRLESLRELAGKENLEYPSVTL | |
| | | | PPQPHTKEGVDAYNEVIARVRMWVNLNLWQ | |
| | | | KLKLSRDDAKPLLRLKGFPSF | |
| 555 | NTSB | 70.A.D | QPASKKIDQNKLKPEMDEKGNLTTAGFACS | 9545 |
| | | | QCGQPLFVYKLEQVSEKGKAYTNYFGRCNV | |
| | | | AEHEKLILLDQLKPEKDSDEAVTYSLGKFG | |
| | | | Q | |
| 559 | OBD-I | 3.I.G | QEGKRINKIRRRLVKDSNTKKAGKTGPMKT | 9546 |
| | | | LLVRVMTPDLRERLENLRKKPENIPQ | |
| 561 | OBD-I | 4.-.G | QEIGKRINKIRRRLVKDSNTKKAGKTGPMK | 9547 |
| | | | TLLVRVMTPDLRERLENLRKKPENIPQ | |
| 562 | OBD-I | 4.K.G | QEIGRINKIRRRLVKDSNTKKAGKTGPMKT | 9548 |
| | | | LLVRVMTPDLRERLENLRKKPENIPQ | |
| 564 | OBD-I | 5.-.G | QEIKGRINKIRRRLVKDSNTKKAGKTGPMK | 9549 |
| | | | TLLVRVMTPDLRERLENLRKKPENIPQ | |
| 569 | OBD-I | 8.K.G | QEIKRINGIRRRLVKDSNTKKAGKTGPMKT | 9550 |
| | | | LLVRVMTPDLRERLENLRKKPENIPQ | |
| 572 | OBD-I | 34.R.P | QEIKRINKIRRRLVKDSNTKKAGKTGPMKT | 9551 |
| | | | LLVPVMTPDLRERLENLRKKPENIPQ | |
| 577 | Helical I-I | 7.R.Q | PISNTSQANLNKLLTDYTEMKKAILHVYWE | 9552 |
| | | | EFQKDPVGLMSRVA | |
| 583 | NTSB | 68.L.K | QPASKKIDQNKLKPEMDEKGNLTTAGFACS | 9553 |
| | | | QCGQPLFVYKLEQVSEKGKAYTNYFGRCNV | |
| | | | AEHEKLIKLAQLKPEKDSDEAVTYSLGKFG | |
| | | | Q | |
| 584 | NTSB | 70.A.Y | QPASKKIDQNKLKPEMDEKGNLTTAGFACS | 9554 |
| | | | QCGQPLFVYKLEQVSEKGKAYTNYFGRCNV | |
| | | | AEHEKLILLYQLKPEKDSDEAVTYSLGKFG | |
| | | | Q | |
| 585 | NTSB | 70.A.S | QPASKKIDQNKLKPEMDEKGNLTTAGFACS | 9555 |
| | | | QCGQPLFVYKLEQVSEKGKAYTNYFGRCNV | |
| | | | AEHEKLILLSQLKPEKDSDEAVTYSLGKFG | |
| | | | Q | |
| 592 | Helical I-II | 112.M.T | RALDFYSIHVTKESTHPVKPLAQIAGNRYA | 9556 |
| | | | SGPVGKALSDACMGTIASFLSKYQDIIIEH | |
| | | | QKVVKGNQKRLESLRELAGKENLEYPSVTL | |
| | | | PPQPHTKEGVDAYNEVIARVRTWVNLNLWQ | |
| | | | KLKLSRDDAKPLLRLKGFPSF | |
| 593 | Helical I-II | 112.M.W | RALDFYSIHVTKESTHPVKPLAQIAGNRYA | 9557 |
| | | | SGPVGKALSDACMGTIASFLSKYQDIIIEH | |
| | | | QKVVKGNQKRLESLRELAGKENLEYPSVTL | |
| | | | PPQPHTKEGVDAYNEVIARVRWWVNLNLWQ | |
| | | | KLKLSRDDAKPLLRLKGFPSF | |
| 607 | Helical II | 65.Y.T | PLVERQANEVDWWDMVCNVKKLINEKKEDG | 9558 |
| | | | KVFWQNLAGYKRQEALRPYLSSEEDRKKGK | |
| | | | KFARTQLGDLLLHLEKKHGEDWGKVYDEAW | |
| | | | ERIDKKVEGLSKHIKLEEERRSEDAQSKAA | |
| | | | LTDWLRAKASFVIEGLKEADKDEFCRCELK | |
| | | | LQKWYGDLRGKPFAIEAE | |
| 638 | Helical II | 148.E.D | PLVERQANEVDWWDMVCNVKKLINEKKEDG | 9559 |
| | | | KVFWQNLAGYKRQEALRPYLSSEEDRKKGK | |
| | | | KFARYQLGDLLLHLEKKHGEDWGKVYDEAW | |
| | | | ERIDKKVEGLSKHIKLEEERRSEDAQSKAA | |
| | | | LTDWLRAKASFVIEGLKEADKDEFCRCDLK | |
| | | | LQKWYGDLRGKPFAIEAE | |
| 656 | TSL | 76.T.D | SNCGFTITSADYDRVLEKLKKTATGWMTTI | 9560 |
| | | | NGKELKVEGQITYYNRYKRQNVVKDLSVEL | |
| | | | DRLSEESVNNDISSWDKGRSGEALSLLKKR | |
| | | | FSHRPVQEKFVCLNCGFETH | |
| 777 | NTSB | 68.L.Q | QPASKKIDQNKLKPEMDEKGNLTTAGFACS | 9561 |
| | | | QCGQPLFVYKLEQVSEKGKAYTNYFGRCNV | |
| | | | AEHEKLIQLAQLKPEKDSDEAVTYSLGKFG | |
| | | | Q | |
| 787 | TSL | 15.V.M | SNCGFTITSADYDRMLEKLKKTATGWMTTI | 9562 |
| | | | NGKELKVEGQITYYNRYKRQNVVKDLSVEL | |
| | | | DRLSEESVNNDISSWTKGRSGEALSLLKKR | |
| | | | FSHRPVQEKFVCLNCGFETH | |
| 788 | TSL | 80.S.Q | SNCGFTITSADYDRVLEKLKKTATGWMTTI | 9563 |
| | | | NGKELKVEGQITYYNRYKRQNVVKDLSVEL | |
| | | | DRLSEESVNNDISSWTKGRQGEALSLLKKR | |
| | | | FSHRPVQEKFVCLNCGFETH | |
| 818 | RuvC-I | 51.S.R | SSNIKPMNLIGVDRGENIPAVIALTDPEGC | 9564 |
| | | | PLSRFKDSLGNPTHILRIGERYKEKQRTIQ | |
| | | | AKKEVEQRRAGGYSRKYASKAKNLADDMVR | |
| | | | NTARDLLYYAVTQDAMLIFENLSRGFGRQG | |
| | | | KRTFMAERQYTRMEDWLTAKLAYEGLPSKT | |
| | | | YLSKTLAQYTSKTC | |

*Positions of mutations within domains are shown relative to the CasX 515 domain sequences provided in Table 69, above. Each mutation is indicated by its position, reference sequence, and alt sequence, separated by ‘.’ Insertions are indicated with a ‘—’ in the reference sequence (first position), and deletions with a ‘—’ in the alt sequence (second position).
†Mutated residues are bolded and underlined.

### Example 38: CasX Variants with Two or Three Mutations Relative to CasX Variant 515

[0826] CasX variants were generated with two or three mutations relative to CasX variant 515, and assessed for their on and off-target gene editing activity.

### Materials and Methods

[0827] Pairs of mutations listed in Tables 68 and 70, above, were introduced into the CasX variant 515 amino acid sequence to generate 161 amino acid sequences of CasX variants. The pairs of mutations and full-length amino acid sequences of the 161 CasX variants tested are listed in Table 71, and Table 72 provides the amino acid sequences of each of the domains of the 161 CasX variants.

TABLE 71
Pairs of mutations and amino acid sequences of CasX variants

| Mutations relative | Phenotypes of | Full-length |
|---|---|---|
| to CasX 515* (Position. | single mutations | CasX amino acid |
| Reference. Alternative) | (see Example 37) | SEQ ID NO |
| 4.I.G & 64.R.Q | Activity + activity | 9382 |
| 4.I.G & 169.L.K | Activity + activity | 9383 |
| 4.I.G & 169.L.Q | Activity + activity | 9384 |
| 4.I.G & 171.A.D | Activity + activity | 9385 |
| 4.I.G & 171.A.Y | Activity + activity | 9386 |
| 4.I.G & 171.A.S | Activity + activity | 9387 |
| 4.I.G & 224.G.T | Activity + activity | 9388 |
| 4.I.G & 304.M.T | Activity + activity | 9389 |
| 4.I.G & 398.Y.T | Activity + activity | 9390 |
| 4.I.G & 826.V.M | Activity + activity | 9391 |
| 4.I.G & 887.T.D | Activity + activity | 9392 |
| 4.I.G & 891.S.Q | Activity + activity | 9393 |
| 5.-.G & 64.R.Q | Activity + activity | 9394 |
| 5.-.G & 169.L.K | Activity + activity | 9395 |
| 5.-.G & 169.L.Q | Activity + activity | 9396 |
| 5.-.G & 171.A.D | Activity + activity | 9397 |
| 5.-.G & 171.A.Y | Activity + activity | 9398 |
| 5.-.G & 171.A.S | Activity + activity | 9399 |
| 5.-.G & 224.G.T | Activity + activity | 9400 |
| 5.-.G & 304.M.T | Activity + activity | 9401 |
| 5.-.G & 398.Y.T | Activity + activity | 9402 |
| 5.-.G & 826.V.M | Activity + activity | 9403 |
| 5.-.G & 887.T.D | Activity + activity | 9404 |
| 5.-.G & 891.S.Q | Activity + activity | 9405 |
| 9.K.G & 64.R.Q | Activity + activity | 9406 |
| 9.K.G & 169.L.K | Activity + activity | 9407 |
| 9.K.G & 169.L.Q | Activity + activity | 9408 |
| 9.K.G & 171.A.D | Activity + activity | 9409 |
| 9.K.G & 171.A.Y | Activity + activity | 9410 |
| 9.K.G & 171.A.S | Activity + activity | 9411 |
| 9.K.G & 224.G.T | Activity + activity | 9412 |
| 9.K.G & 304.M.T | Activity + activity | 9413 |
| 9.K.G & 398.Y.T | Activity + activity | 9414 |
| 9.K.G & 826.V.M | Activity + activity | 9415 |
| 9.K.G & 887.T.D | Activity + activity | 9416 |
| 9.K.G & 891.S.Q | Activity + activity | 9417 |
| 27.-.R & 64.R.Q | Activity + activity | 9418 |
| 27.-.R & 169.L.K | Activity + activity | 9419 |
| 27.-.R & 169.L.Q | Activity + activity | 9420 |
| 27.-.R & 171.A.D | Activity + activity | 9421 |
| 27.-.R & 171.A.Y | Activity + activity | 9422 |
| 27.-.R & 171.A.S | Activity + activity | 9423 |
| 27.-.R & 224.G.T | Activity + activity | 9424 |
| 27.-.R & 304.M.T | Activity + activity | 9425 |
| 27.-.R & 398.Y.T | Activity + activity | 9426 |
| 27.-.R & 826.V.M | Activity + activity | 9427 |
| 27.-.R & 887.T.D | Activity + activity | 9428 |
| 27.-.R & 891.S.Q | Activity + activity | 9429 |
| 35.R.P & 64.R.Q | Activity + activity | 9430 |
| 35.R.P & 169.L.K | Activity + activity | 9431 |
| 35.R.P & 169.L.Q | Activity + activity | 9432 |
| 35.R.P & 171.A.D | Activity + activity | 9433 |
| 35.R.P & 171.A.Y | Activity + activity | 9434 |
| 35.R.P & 171.A.S | Activity + activity | 9435 |
| 35.R.P & 224.G.T | Activity + activity | 9436 |
| 35.R.P & 304.M.T | Activity + activity | 9437 |
| 35.R.P & 398.Y.T | Activity + activity | 9438 |
| 35.R.P & 826.V.M | Activity + activity | 9439 |
| 35.R.P & 887.T.D | Activity + activity | 9440 |
| 35.R.P & 891.S.Q | Activity + activity | 9441 |
| 887.T.D & 891.S.Q | Activity + activity | 9442 |
| 64.R.Q & 169.L.K | Activity + activity | 9443 |
| 64.R.Q & 169.L.Q | Activity + activity | 9444 |
| 64.R.Q & 171.A.D | Activity + activity | 9445 |
| 64.R.Q & 171.A.Y | Activity + activity | 9446 |
| 64.R.Q & 171.A.S | Activity + activity | 9447 |
| 64.R.Q & 224.G.T | Activity + activity | 9448 |
| 64.R.Q & 304.M.T | Activity + activity | 9449 |
| 64.R.Q & 398.Y.T | Activity + activity | 9450 |
| 64.R.Q & 826.V.M | Activity + activity | 9451 |
| 64.R.Q & 887.T.D | Activity + activity | 9452 |
| 64.R.Q & 891.S.Q | Activity + activity | 9453 |
| 169.L.K & 171.A.D | Activity + activity | 9454 |
| 169.L.K & 171.A.Y | Activity + activity | 9455 |
| 169.L.K & 171.A.S | Activity + activity | 9456 |
| 169.L.K & 224.G.T | Activity + activity | 9457 |
| 169.L.K & 304.M.T | Activity + activity | 9458 |
| 169.L.K & 398.Y.T | Activity + activity | 9459 |
| 169.L.K & 826.V.M | Activity + activity | 9460 |
| 169.L.K & 887.T.D | Activity + activity | 9461 |
| 169.L.K & 891.S.Q | Activity + activity | 9462 |
| 169.L.Q & 171.A.D | Activity + activity | 9463 |
| 169.L.Q & 171.A.Y | Activity + activity | 9464 |
| 169.L.Q & 171.A.S | Activity + activity | 9465 |
| 169.L.Q & 224.G.T | Activity + activity | 9466 |
| 169.L.Q & 304.M.T | Activity + activity | 9467 |
| 169.L.Q & 398.Y.T | Activity + activity | 9468 |
| 169.L.Q & 826.V.M | Activity + activity | 9469 |
| 169.L.Q & 887.T.D | Activity + activity | 9470 |
| 169.L.Q & 891.S.Q | Activity + activity | 9471 |
| 171.A.D & 224.G.T | Activity + activity | 9472 |
| 171.A.D & 304.M.T | Activity + activity | 9473 |
| 171.A.D & 398.Y.T | Activity + activity | 9474 |
| 171.A.D & 826.V.M | Activity + activity | 9475 |
| 171.A.D & 887.T.D | Activity + activity | 9476 |
| 171.A.D & 891.S.Q | Activity + activity | 9477 |
| 171.A.Y & 224.G.T | Activity + activity | 9478 |
| 171.A.Y & 304.M.T | Activity + activity | 9479 |
| 171.A.Y & 398.Y.T | Activity + activity | 9480 |
| 171.A.Y & 826.V.M | Activity + activity | 9481 |
| 171.A.Y & 887.T.D | Activity + activity | 9482 |
| 171.A.Y & 891.S.Q | Activity + activity | 9483 |
| 171.A.S & 224.G.T | Activity + activity | 9484 |
| 171.A.S & 304.M.T | Activity + activity | 9485 |
| 171.A.S & 398.Y.T | Activity + activity | 9486 |
| 171.A.S & 826.V.M | Activity + activity | 9487 |
| 171.A.S & 887.T.D | Activity + activity | 9488 |
| 171.A.S & 891.S.Q | Activity + activity | 9489 |
| 4.I.G & 35.R.P | Activity + activity | 9490 |
| 224.G.T & 304.M.T | Activity + activity | 9491 |
| 224.G.T & 398.Y.T | Activity + activity | 9492 |
| 224.G.T & 826.V.M | Activity + activity | 9493 |
| 224.G.T & 887.T.D | Activity + activity | 9494 |
| 224.G.T & 891.S.Q | Activity + activity | 9495 |
| 5.-.G & 35.R.P | Activity + activity | 9496 |
| 4.I.G & 27.-.R | Activity + activity | 9497 |
| 304.M.T & 398.Y.T | Activity + activity | 9498 |
| 304.M.T & 826.V.M | Activity + activity | 9499 |
| 304.M.T & 887.T.D | Activity + activity | 9500 |
| 304.M.T & 891.S.Q | Activity + activity | 9501 |
| 9.K.G & 35.R.P | Activity + activity | 9502 |
| 5.-.G & 27.-.R | Activity + activity | 9503 |
| 4.I.G & 9.K.G | Activity + activity | 9504 |
| 398.Y.T & 826.V.M | Activity + activity | 9505 |
| 398.Y.T & 887.T.D | Activity + activity | 9506 |
| 398.Y.T & 891.S.Q | Activity + activity | 9507 |
| 27.-.R & 35.R.P | Activity + activity | 9508 |
| 9.K.G & 27.-.R | Activity + activity | 9509 |
| 5.-.G & 9.K.G | Activity + activity | 9510 |
| 4.I.G & 5.-.G | Activity + activity | 9511 |
| 826.V.M & 887.T.D | Activity + activity | 9512 |
| 826.V.M & 891.S.Q | Activity + activity | 9513 |
| 5.K.G & 27.-.R | Activity + specificity | 9514 |
| 5.K.G & 169.L.K | Activity + specificity | 9515 |
| 5.K.G & 171.A.D | Activity + specificity | 9516 |
| 5.K.G & 304.M.T | Activity + specificity | 9517 |
| 5.K.G & 398.Y.T | Activity + specificity | 9518 |
| 5.K.G & 891.S.Q | Activity + specificity | 9519 |
| 6.-.G & 27.-.R | Activity + specificity | 9520 |
| 6.-.G & 169.L.K | Activity + specificity | 9521 |
| 6.-.G & 171.A.D | Activity + specificity | 9522 |
| 6.-.G & 304.M.T | Activity + specificity | 9523 |
| 6.-.G & 398.Y.T | Activity + specificity | 9524 |
| 6.-.G & 891.S.Q | Activity + specificity | 9525 |
| 304.M.W & 27.-.R | Activity + specificity | 9526 |
| 304.M.W & 169.L.K | Activity + specificity | 9527 |
| 304.M.W & 171.A.D | Activity + specificity | 9528 |
| 304.M.W & 398.Y.T | Activity + specificity | 9529 |
| 304.M.W & 891.S.Q | Activity + specificity | 9530 |
| 481.E.D & 27.-.R | Activity + specificity | 9531 |
| 481.E.D & 169.L.K | Activity + specificity | 9532 |
| 481.E.D & 171.A.D | Activity + specificity | 9533 |
| 481.E.D & 304.M.T | Activity + specificity | 9534 |
| 481.E.D & 398.Y.T | Activity + specificity | 9535 |
| 481.E.D & 891.S.Q | Activity + specificity | 9536 |
| 698.S.R & 27.-.R | Activity + specificity | 9537 |
| 698.S.R & 169.L.K | Activity + specificity | 9538 |
| 698.S.R & 171.A.D | Activity + specificity | 9539 |
| 698.S.R & 304.M.T | Activity + specificity | 9540 |
| 698.S.R & 398.Y.T | Activity + specificity | 9541 |
| 698.S.R & 891.S.Q | Activity + specificity | 9542 |

*Positions of mutations are shown relative to a CasX 515 sequence with an N-terminal methionine residue (SEQ ID NO: 9590). Each mutation is indicated by its position, reference sequence, and alt sequence, separated by ‘.’ Insertions are indicated with a ‘-’ in the reference sequence (first position), and deletions with a ‘-’ in the alt sequence (second position). Multiple individual mutations are separated by “&”.

TABLE 72
Amino acid sequences of domains of CasX variants, N- to C-terminus

| Mutations relative | | | | | | | | | |
|---|---|---|---|---|---|---|---|---|---|
| to CasX 515* | Amino acid sequences of domains of CasX variants (SEQ ID NOs) | | | | | | | | |
| (Position. Reference. | OBD- | Helical | | Helical | Helical | OBD- | RuvC- | | RuvC- |
| Alternative) | I | I-I | NTSB | I-II | II | II | I | TSL | II |
| None (non-mutated | 585 | 586 | 587 | 588 | 589 | 590 | 591 | 592 | 593 |
| CasX 515) | | | | | | | | | |
| 4.I.G & 64.R.Q | 9546 | 9552 | 587 | 588 | 589 | 590 | 591 | 592 | 593 |
| 4.I.G & 169.L.K | 9546 | 586 | 9553 | 588 | 589 | 590 | 591 | 592 | 593 |
| 4.I.G & 169.L.Q | 9546 | 586 | 9561 | 588 | 589 | 590 | 591 | 592 | 593 |
| 4.I.G & 171.A.D | 9546 | 586 | 9545 | 588 | 589 | 590 | 591 | 592 | 593 |
| 4.I.G & 171.A.Y | 9546 | 586 | 9554 | 588 | 589 | 590 | 591 | 592 | 593 |
| 4.I.G & 171.A.S | 9546 | 586 | 9555 | 588 | 589 | 590 | 591 | 592 | 593 |
| 4.I.G & 224.G.T | 9546 | 586 | 587 | 9544 | 589 | 590 | 591 | 592 | 593 |
| 4.I.G & 304.M.T | 9546 | 586 | 587 | 9556 | 589 | 590 | 591 | 592 | 593 |
| 4.I.G & 398.Y.T | 9546 | 586 | 587 | 588 | 9558 | 590 | 591 | 592 | 593 |
| 4.I.G & 826.V.M | 9546 | 586 | 587 | 588 | 589 | 590 | 591 | 9562 | 593 |
| 4.I.G & 887.T.D | 9546 | 586 | 587 | 588 | 589 | 590 | 591 | 9560 | 593 |
| 4.I.G & 891.S.Q | 9546 | 586 | 587 | 588 | 589 | 590 | 591 | 9563 | 593 |
| 5.—.G & 64.R.Q | 9547 | 9552 | 587 | 588 | 589 | 590 | 591 | 592 | 593 |
| 5.—.G & 169.L.K | 9547 | 586 | 9553 | 588 | 589 | 590 | 591 | 592 | 593 |
| 5.—.G & 169.L.Q | 9547 | 586 | 9561 | 588 | 589 | 590 | 591 | 592 | 593 |
| 5.—.G & 171.A.D | 9547 | 586 | 9545 | 588 | 589 | 590 | 591 | 592 | 593 |
| 5.—.G & 171.A.Y | 9547 | 586 | 9554 | 588 | 589 | 590 | 591 | 592 | 593 |
| 5.—.G & 171.A.S | 9547 | 586 | 9555 | 588 | 589 | 590 | 591 | 592 | 593 |
| 5.—.G & 224.G.T | 9547 | 586 | 587 | 9544 | 589 | 590 | 591 | 592 | 593 |
| 5.—.G & 304.M.T | 9547 | 586 | 587 | 9556 | 589 | 590 | 591 | 592 | 593 |
| 5.—.G & 398.Y.T | 9547 | 586 | 587 | 588 | 9558 | 590 | 59 | 592 | 593 |
| 5.—.G & 826.V.M | 9547 | 586 | 587 | 588 | 589 | 590 | 591 | 9562 | 593 |
| 5.—.G & 887.T.D | 9547 | 586 | 587 | 588 | 589 | 590 | 591 | 9560 | 593 |
| 5.—.G & 891.S.Q | 9547 | 586 | 587 | 588 | 589 | 590 | 591 | 9563 | 593 |
| 9.K.G & 64.R.Q | 9550 | 9552 | 587 | 588 | 589 | 590 | 591 | 592 | 593 |
| 9.K.G & 169.L.K | 9550 | 586 | 9553 | 588 | 589 | 590 | 591 | 592 | 593 |
| 9.K.G & 169.L.Q | 9550 | 586 | 9561 | 588 | 589 | 590 | 591 | 592 | 593 |
| 9.K.G & 171.A.D | 9550 | 586 | 9545 | 588 | 589 | 590 | 591 | 592 | 593 |
| 9.K.G & 171.A.Y | 9550 | 586 | 9554 | 588 | 589 | 590 | 591 | 592 | 593 |
| 9.K.G & 171.A.S | 9550 | 586 | 9555 | 588 | 589 | 590 | 591 | 592 | 593 |
| 9.K.G & 224.G.T | 9550 | 586 | 587 | 9544 | 589 | 590 | 591 | 592 | 593 |
| 9.K.G & 304.M.T | 9550 | 586 | 587 | 9556 | 589 | 590 | 59 | 592 | 593 |
| 9.K.G & 398.Y.T | 9550 | 586 | 587 | 588 | 9558 | 590 | 591 | 592 | 593 |
| 9.K.G & 826.V.M | 9550 | 586 | 587 | 588 | 589 | 590 | 59 | 9562 | 593 |
| 9.K.G & 887.T.D | 9550 | 586 | 587 | 588 | 589 | 590 | 591 | 9560 | 593 |
| 9.K.G & 891.S.Q | 9550 | 586 | 587 | 588 | 589 | 590 | 591 | 9563 | 593 |
| 27.—.R & 64.R.Q | 9543 | 9552 | 587 | 588 | 589 | 590 | 591 | 592 | 593 |
| 27.—.R & 169.L.K | 9543 | 586 | 9553 | 588 | 589 | 590 | 591 | 592 | 593 |
| 27.—.R & 169.L.Q | 9543 | 586 | 9561 | 588 | 589 | 590 | 591 | 592 | 593 |
| 27.—.R & 171.A.D | 9543 | 586 | 9545 | 588 | 589 | 590 | 591 | 592 | 593 |
| 27.—.R & 171.A.Y | 9543 | 586 | 9554 | 588 | 589 | 590 | 591 | 592 | 593 |
| 27.—.R & 171.A.S | 9543 | 586 | 9555 | 588 | 589 | 590 | 591 | 592 | 593 |
| 27.—.R & 224.G.T | 9543 | 586 | 587 | 9544 | 589 | 590 | 591 | 592 | 593 |
| 27.—.R & 304.M.T | 9543 | 586 | 587 | 9556 | 589 | 590 | 591 | 592 | 593 |
| 27.—.R & 398.Y.T | 9543 | 586 | 587 | 588 | 9558 | 590 | 591 | 592 | 593 |
| 27.—.R & 826.V.M | 9543 | 586 | 587 | 588 | 589 | 590 | 591 | 9562 | 593 |
| 27.—.R & 887.T.D | 9543 | 586 | 587 | 588 | 589 | 590 | 591 | 9560 | 593 |
| 27.—.R & 891.S.Q | 9543 | 586 | 587 | 588 | 589 | 590 | 591 | 9563 | 593 |
| 35.R.P & 64.R.Q | 9551 | 9552 | 587 | 588 | 589 | 590 | 591 | 592 | 593 |
| 35.R.P & 169.L.K | 9551 | 586 | 9553 | 588 | 589 | 590 | 591 | 592 | 593 |
| 35.R.P & 169.L.Q | 9551 | 586 | 9561 | 588 | 589 | 590 | 591 | 592 | 593 |
| 35.R.P & 171.A.D | 9551 | 586 | 9545 | 588 | 589 | 590 | 591 | 592 | 593 |
| 35.R.P & 171.A.Y | 9551 | 586 | 9554 | 588 | 589 | 590 | 591 | 592 | 593 |
| 35.R.P & 171.A.S | 9551 | 586 | 9555 | 588 | 589 | 590 | 591 | 592 | 593 |
| 35.R.P & 224.G.T | 9551 | 586 | 587 | 9544 | 589 | 590 | 591 | 592 | 593 |
| 35.R.P & 304.M.T | 9551 | 586 | 587 | 9556 | 589 | 590 | 591 | 592 | 593 |
| 35.R.P & 398.Y.T | 9551 | 586 | 587 | 588 | 9558 | 590 | 591 | 592 | 593 |
| 35.R.P & 826.V.M | 9551 | 586 | 587 | 588 | 589 | 590 | 591 | 9562 | 593 |
| 35.R.P & 887.T.D | 9551 | 586 | 587 | 588 | 589 | 590 | 591 | 9560 | 593 |
| 35.R.P & 891.S.Q | 9551 | 586 | 587 | 588 | 589 | 590 | 591 | 9563 | 593 |
| 887.T.D & 891.S.Q | 585 | 586 | 587 | 588 | 589 | 590 | 591 | 9585 | 593 |
| 64.R.Q & 169.L.K | 585 | 9552 | 9553 | 588 | 589 | 590 | 591 | 592 | 593 |
| 64.R.Q & 169.L.Q | 585 | 9552 | 9561 | 588 | 589 | 590 | 591 | 592 | 593 |
| 64.R.Q & 171.A.D | 585 | 9552 | 9545 | 588 | 589 | 590 | 591 | 592 | 593 |
| 64.R.Q & 171.A.Y | 585 | 9552 | 9554 | 588 | 589 | 590 | 591 | 592 | 593 |
| 64.R.Q & 171.A.S | 585 | 9552 | 9555 | 588 | 589 | 590 | 591 | 592 | 593 |
| 64.R.Q & 224.G.T | 585 | 9552 | 587 | 9544 | 589 | 590 | 591 | 592 | 593 |
| 64.R.Q & 304.M.T | 585 | 9552 | 587 | 9556 | 589 | 590 | 591 | 592 | 593 |
| 64.R.Q & 398.Y.T | 585 | 9552 | 587 | 588 | 9558 | 590 | 591 | 592 | 593 |
| 64.R.Q & 826.V.M | 585 | 9552 | 587 | 588 | 589 | 590 | 591 | 9562 | 593 |
| 64.R.Q & 887.T.D | 585 | 9552 | 587 | 588 | 589 | 590 | 591 | 9560 | 593 |
| 64.R.Q & 891.S.Q | 585 | 9552 | 587 | 588 | 589 | 590 | 591 | 9563 | 593 |
| 169.L.K & 171.A.D | 585 | 586 | 9577 | 588 | 589 | 590 | 591 | 592 | 593 |
| 169.L.K & 171.A.Y | 585 | 586 | 9578 | 588 | 589 | 590 | 591 | 592 | 593 |
| 169.L.K & 171.A.S | 585 | 586 | 9579 | 588 | 589 | 590 | 591 | 592 | 593 |
| 169.L.K & 224.G.T | 585 | 586 | 9553 | 9544 | 589 | 590 | 591 | 592 | 593 |
| 169.L.K & 304.M.T | 585 | 586 | 9553 | 9556 | 589 | 590 | 591 | 592 | 593 |
| 169.L.K & 398.Y.T | 585 | 586 | 9553 | 588 | 9558 | 590 | 591 | 592 | 593 |
| 169.L.K & 826.V.M | 585 | 586 | 9553 | 588 | 589 | 590 | 591 | 9562 | 593 |
| 169.L.K & 887.T.D | 585 | 586 | 9553 | 588 | 589 | 590 | 591 | 9560 | 593 |
| 169.L.K & 891.S.Q | 585 | 586 | 9553 | 588 | 589 | 590 | 591 | 9563 | 593 |
| 169.L.Q & 171.A.D | 585 | 586 | 9580 | 588 | 589 | 590 | 591 | 592 | 593 |
| 169.L.Q & 171.A.Y | 585 | 586 | 9581 | 588 | 589 | 590 | 591 | 592 | 593 |
| 169.L.Q & 171.A.S | 585 | 586 | 9582 | 588 | 589 | 590 | 591 | 592 | 593 |
| 169.L.Q & 224.G.T | 585 | 586 | 9561 | 9544 | 589 | 590 | 591 | 592 | 593 |
| 169.L.Q & 304.M.T | 585 | 586 | 9561 | 9556 | 589 | 590 | 591 | 592 | 593 |
| 169.L.Q & 398.Y.T | 585 | 586 | 9561 | 588 | 9558 | 590 | 591 | 592 | 593 |
| 169.L.Q & 826.V.M | 585 | 586 | 9561 | 588 | 589 | 590 | 591 | 9562 | 593 |
| 169.L.Q & 887.T.D | 585 | 586 | 9561 | 588 | 589 | 590 | 591 | 9560 | 593 |
| 169.L.Q & 891.S.Q | 585 | 586 | 9561 | 588 | 589 | 590 | 591 | 9563 | 593 |
| 171.A.D & 224.G.T | 585 | 586 | 9545 | 9544 | 589 | 590 | 591 | 592 | 593 |
| 171.A.D & 304.M.T | 585 | 586 | 9545 | 9556 | 589 | 590 | 591 | 592 | 593 |
| 171.A.D & 398.Y.T | 585 | 586 | 9545 | 588 | 9558 | 590 | 591 | 592 | 593 |
| 171.A.D & 826.V.M | 585 | 586 | 9545 | 588 | 589 | 590 | 591 | 9562 | 593 |
| 171.A.D & 887.T.D | 585 | 586 | 9545 | 588 | 589 | 590 | 591 | 9560 | 593 |
| 171.A.D & 891.S.Q | 585 | 586 | 9545 | 588 | 589 | 590 | 591 | 9563 | 593 |
| 171.A.Y & 224.G.T | 585 | 586 | 9554 | 9544 | 589 | 590 | 591 | 592 | 593 |
| 171.A.Y & 304.M.T | 585 | 586 | 9554 | 9556 | 589 | 590 | 591 | 592 | 593 |
| 171.A.Y & 398.Y.T | 585 | 586 | 9554 | 588 | 9558 | 590 | 591 | 592 | 593 |
| 171.A.Y & 826.V.M | 585 | 586 | 9554 | 588 | 589 | 590 | 591 | 9562 | 593 |
| 171.A.Y & 887.T.D | 585 | 586 | 9554 | 588 | 589 | 590 | 591 | 9560 | 593 |
| 171.A.Y & 891.S.Q | 585 | 586 | 9554 | 588 | 589 | 590 | 591 | 9563 | 593 |
| 171.A.S & 224.G.T | 585 | 586 | 9555 | 9544 | 589 | 590 | 591 | 592 | 593 |
| 171.A.S & 304.M.T | 585 | 586 | 9555 | 9556 | 589 | 590 | 591 | 592 | 593 |
| 171.A.S & 398.Y.T | 585 | 586 | 9555 | 588 | 9558 | 590 | 591 | 592 | 593 |
| 171.A.S & 826.V.M | 585 | 586 | 9555 | 588 | 589 | 590 | 591 | 9562 | 593 |
| 171.A.S & 887.T.D | 585 | 586 | 9555 | 588 | 589 | 590 | 591 | 9560 | 593 |
| 171.A.S & 891.S.Q | 585 | 586 | 9555 | 588 | 589 | 590 | 591 | 9563 | 593 |
| 4.I.G & 35.R.P | 9565 | 586 | 587 | 588 | 589 | 590 | 591 | 592 | 593 |
| 224.G.T & 304.M.T | 585 | 586 | 587 | 9583 | 589 | 590 | 591 | 592 | 593 |
| 224.G.T & 398.Y.T | 585 | 586 | 587 | 9544 | 9558 | 590 | 591 | 592 | 593 |
| 224.G.T & 826.V.M | 585 | 586 | 587 | 9544 | 589 | 590 | 591 | 9562 | 593 |
| 224.G.T & 887.T.D | 585 | 586 | 587 | 9544 | 589 | 590 | 591 | 9560 | 593 |
| 224.G.T & 891.S.Q | 585 | 586 | 587 | 9544 | 589 | 590 | 591 | 9563 | 593 |
| 5.—.G & 35.R.P | 9566 | 586 | 587 | 588 | 589 | 590 | 591 | 592 | 593 |
| 4.I.G & 27.—.R | 9567 | 586 | 587 | 588 | 589 | 590 | 591 | 592 | 593 |
| 304.M.T & 398.Y.T | 585 | 586 | 587 | 9556 | 9558 | 590 | 591 | 592 | 593 |
| 304.M.T & 826.V.M | 585 | 586 | 587 | 9556 | 589 | 590 | 591 | 9562 | 593 |
| 304.M.T & 887.T.D | 585 | 586 | 587 | 9556 | 589 | 590 | 591 | 9560 | 593 |
| 304.M.T & 891.S.Q | 585 | 586 | 587 | 9556 | 589 | 590 | 591 | 9563 | 593 |
| 9.K.G & 35.R.P | 9568 | 586 | 587 | 588 | 589 | 590 | 591 | 592 | 593 |
| 5.—.G & 27.—.R | 9569 | 586 | 587 | 588 | 589 | 590 | 591 | 592 | 593 |
| 4.I.G & 9.K.G | 9570 | 586 | 587 | 588 | 589 | 590 | 591 | 592 | 593 |
| 398.Y.T & 826.V.M | 585 | 586 | 587 | 588 | 9558 | 590 | 591 | 9562 | 593 |
| 398.Y.T & 887.T.D | 585 | 586 | 587 | 588 | 9558 | 590 | 591 | 9560 | 593 |
| 398.Y.T & 891.S.Q | 585 | 586 | 587 | 588 | 9558 | 590 | 591 | 9563 | 593 |
| 27.—.R & 35.R.P | 9571 | 586 | 587 | 588 | 589 | 590 | 591 | 592 | 593 |
| 9.K.G & 27.—.R | 9572 | 586 | 587 | 588 | 589 | 590 | 591 | 592 | 593 |
| 5.—.G & 9.K.G | 9573 | 586 | 587 | 588 | 589 | 590 | 591 | 592 | 593 |
| 4.I.G & 5.—.G | 9574 | 586 | 587 | 588 | 589 | 590 | 591 | 592 | 593 |
| 826.V.M & 887.T.D | 585 | 586 | 587 | 588 | 589 | 590 | 591 | 9586 | 593 |
| 826.V.M & 891.S.Q | 585 | 586 | 587 | 588 | 589 | 590 | 591 | 9587 | 593 |
| 5.K.G & 27.—.R | 9575 | 586 | 587 | 588 | 589 | 590 | 591 | 592 | 593 |
| 5.K.G & 169.L.K | 9548 | 586 | 9553 | 588 | 589 | 590 | 591 | 592 | 593 |
| 5.K.G & 171.A.D | 9548 | 586 | 9545 | 588 | 589 | 590 | 591 | 592 | 593 |
| 5.K.G & 304.M.T | 9548 | 586 | 587 | 9556 | 589 | 590 | 591 | 592 | 593 |
| 5.K.G & 398.Y.T | 9548 | 586 | 587 | 588 | 9558 | 590 | 591 | 592 | 593 |
| 5.K.G & 891.S.Q | 9548 | 586 | 587 | 588 | 589 | 590 | 591 | 9563 | 593 |
| 6.—.G & 27.—.R | 9576 | 586 | 587 | 588 | 589 | 590 | 591 | 592 | 593 |
| 6.—.G & 169.L.K | 9549 | 586 | 9553 | 588 | 589 | 590 | 591 | 592 | 593 |
| 6.—.G & 171.A.D | 9549 | 586 | 9545 | 588 | 589 | 590 | 591 | 592 | 593 |
| 6.—.G & 304.M.T | 9549 | 586 | 587 | 9556 | 589 | 590 | 591 | 592 | 593 |
| 6.—.G & 398.Y.T | 9549 | 586 | 587 | 588 | 9558 | 590 | 591 | 592 | 593 |
| 6.—.G & 891.S.Q | 9549 | 586 | 587 | 588 | 589 | 590 | 591 | 9563 | 593 |
| 304.M.W & 27.—.R | 9543 | 586 | 587 | 9557 | 589 | 590 | 591 | 592 | 593 |
| 304.M.W & 169.L.K | 585 | 586 | 9553 | 9557 | 589 | 590 | 591 | 592 | 593 |
| 304.M.W & 171.A.D | 585 | 586 | 9545 | 9557 | 589 | 590 | 591 | 592 | 593 |
| 304.M.W & 398.Y.T | 585 | 586 | 587 | 9557 | 9558 | 590 | 591 | 592 | 593 |
| 304.M.W & 891.S.Q | 585 | 586 | 587 | 9557 | 589 | 590 | 591 | 9563 | 593 |
| 481.E.D & 27.—.R | 9543 | 586 | 587 | 588 | 9559 | 590 | 591 | 592 | 593 |
| 481.E.D & 169.L.K | 585 | 586 | 9553 | 588 | 9559 | 590 | 591 | 592 | 593 |
| 481.E.D & 171.A.D | 585 | 586 | 9545 | 588 | 9559 | 590 | 591 | 592 | 593 |
| 481.E.D & 304.M.T | 585 | 586 | 587 | 9556 | 9559 | 590 | 591 | 592 | 593 |
| 481.E.D & 398.Y.T | 585 | 586 | 587 | 588 | 9584 | 590 | 591 | 592 | 593 |
| 481.E.D & 891.S.Q | 585 | 586 | 587 | 588 | 9559 | 590 | 591 | 9563 | 593 |
| 698.S.R & 27.—.R | 9543 | 586 | 587 | 588 | 589 | 590 | 9564 | 592 | 593 |
| 698.S.R & 169.L.K | 585 | 586 | 9553 | 588 | 589 | 590 | 9564 | 592 | 593 |
| 698.S.R & 171.A.D | 585 | 586 | 9545 | 588 | 589 | 590 | 9564 | 592 | 593 |
| 698.S.R & 304.M.T | 585 | 586 | 587 | 9556 | 589 | 590 | 9564 | 592 | 593 |
| 698.S.R & 398.Y.T | 585 | 586 | 587 | 588 | 9558 | 590 | 9564 | 592 | 593 |
| 698.S.R & 891.S.Q | 585 | 586 | 587 | 588 | 589 | 590 | 9564 | 9563 | 593 |

*Positions of mutations are shown relative to a CasX 515 sequence with an N-terminal methionine residue (SEQ ID NO: 9590). Each mutation is indicated by its position, reference sequence, and alt sequence, separated by ‘.’ Insertions are indicated with a ‘—’ in the reference sequence (first position), and deletions with a ‘—’ in the alt sequence (second position). Multiple individual mutations are separated by “&”.

[0828] A subset of these 161 CasX variants were cloned using methods standard in the art, and are listed in Tables 74, 76, and 77, below. In addition, a CasX variant termed CasX variant 1001 was generated by combining mutations from CasX variant 812 and CasX variant 676 (27.-.R, 169.L.K, and 329.G.K mutations relative to CasX 515), which have been previously validated as a highly specific and highly active CasX variants, respectively (the PAM-altering 224.G.S mutation also present in CasX 676 was not included). CasX variant 969 was generated by combining 27.-.R, 171.A.D, and 224.G.T mutations relative to CasX variant 515. Finally, CasX variant 973 was generated by combining 35.R.P, 171.A.Y, and 304.M.T mutations relative to CasX variant 515. The amino acid sequences of CasX variants 969, 973, and 1001 are provided in Table 73, below.

TABLE 73
Amino acid sequences of CasX variants 969, 973, and 1001

| CasX | | |
|---|---|---|
| variant | | SEQ |
| no. | Amino acid sequence | ID NO |
| 969 | QEIKRINKIRRRLVKDSNTKKAGKTRGPMKTLLVRVMTPDLRERLENLRKKPENIPQPIS | 9607 |
| | NTSRANLNKLLTDYTEMKKAILHVYWEEFQKDPVGLMSRVAQPASKKIDQNKLKPEMDEK | |
| | GNLTTAGFACSQCGQPLFVYKLEQVSEKGKAYTNYFGRCNVAEHEKLILLDQLKPEKDSD | |
| | EAVTYSLGKFGQRALDFYSIHVTKESTHPVKPLAQIAGNRYASTPVGKALSDACMGTIAS | |
| | FLSKYQDIIIEHQKVVKGNQKRLESLRELAGKENLEYPSVTLPPQPHTKEGVDAYNEVIA | |
| | RVRMWVNLNLWQKLKLSRDDAKPLLRLKGFPSFPLVERQANEVDWWDMVCNVKKLINEKK | |
| | EDGKVFWQNLAGYKRQEALRPYLSSEEDRKKGKKFARYQLGDLLLHLEKKHGEDWGKVYD | |
| | EAWERIDKKVEGLSKHIKLEEERRSEDAQSKAALTDWLRAKASFVIEGLKEADKDEFCRC | |
| | ELKLQKWYGDLRGKPFAIEAENSILDISGFSKQYNCAFIWQKDGVKKLNLYLIINYFKGG | |
| | KLRFKKIKPEAFEANRFYTVINKKSGEIVPMEVNFNFDDPNLIILPLAFGKRQGREFIWN | |
| | DLLSLETGSLKLANGRVIEKTLYNRRTRQDEPALFVALTFERREVLDSSNIKPMNLIGVD | |
| | RGENIPAVIALTDPEGCPLSRFKDSLGNPTHILRIGESYKEKQRTIQAKKEVEQRRAGGY | |
| | SRKYASKAKNLADDMVRNTARDLLYYAVTQDAMLIFENLSRGFGRQGKRTFMAERQYTRM | |
| | EDWLTAKLAYEGLPSKTYLSKTLAQYTSKTCSNCGFTITSADYDRVLEKLKKTATGWMTT | |
| | INGKELKVEGQITYYNRYKRQNVVKDLSVELDRLSEESVNNDISSWTKGRSGEALSLLKK | |
| | RFSHRPVQEKFVCLNCGFETHADEQAALNIARSWLFLRSQEYKKYQTNKTTGNTDKRAFV | |
| | ETWQSFYRKKLKEVWKPAV | |
| 973 | QEIKRINKIRRRLVKDSNTKKAGKTGPMKTLLVPVMTPDLRERLENLRKKPENIPQPISN | 9608 |
| | TSRANLNKLLTDYTEMKKAILHVYWEEFQKDPVGLMSRVAQPASKKIDQNKLKPEMDEKG | |
| | NLTTAGFACSQCGQPLFVYKLEQVSEKGKAYTNYFGRCNVAEHEKLILLYQLKPEKDSDE | |
| | AVTYSLGKFGQRALDFYSIHVTKESTHPVKPLAQIAGNRYASGPVGKALSDACMGTIASF | |
| | LSKYQDIIIEHQKVVKGNQKRLESLRELAGKENLEYPSVTLPPQPHTKEGVDAYNEVIAR | |
| | VRTWVNLNLWQKLKLSRDDAKPLLRLKGFPSFPLVERQANEVDWWDMVCNVKKLINEKKE | |
| | DGKVFWQNLAGYKRQEALRPYLSSEEDRKKGKKFARYQLGDLLLHLEKKHGEDWGKVYDE | |
| | AWERIDKKVEGLSKHIKLEEERRSEDAQSKAALTDWLRAKASFVIEGLKEADKDEFCRCE | |
| | LKLQKWYGDLRGKPFAIEAENSILDISGFSKQYNCAFIWQKDGVKKLNLYLIINYFKGGK | |
| | LRFKKIKPEAFEANRFYTVINKKSGEIVPMEVNFNFDDPNLIILPLAFGKRQGREFIWND | |
| | LLSLETGSLKLANGRVIEKTLYNRRTRQDEPALFVALTFERREVLDSSNIKPMNLIGVDR | |
| | GENIPAVIALTDPEGCPLSRFKDSLGNPTHILRIGESYKEKQRTIQAKKEVEQRRAGGYS | |
| | RKYASKAKNLADDMVRNTARDLLYYAVTQDAMLIFENLSRGFGRQGKRTFMAERQYTRME | |
| | DWLTAKLAYEGLPSKTYLSKTLAQYTSKTCSNCGFTITSADYDRVLEKLKKTATGWMTTI | |
| | NGKELKVEGQITYYNRYKRQNVVKDLSVELDRLSEESVNNDISSWTKGRSGEALSLLKKR | |
| | FSHRPVQEKFVCLNCGFETHADEQAALNIARSWLFLRSQEYKKYQTNKTTGNTDKRAFVE | |
| | TWQSFYRKKLKEVWKPAV | |
| 1001 | QEIKRINKIRRRLVKDSNTKKAGKTRGPMKTLLVRVMTPDLRERLENLRKKPENIPQPIS | 9609 |
| | NTSRANLNKLLTDYTEMKKAILHVYWEEFQKDPVGLMSRVAQPASKKIDQNKLKPEMDEK | |
| | GNLTTAGFACSQCGQPLFVYKLEQVSEKGKAYTNYFGRCNVAEHEKLIKLAQLKPEKDSD | |
| | EAVTYSLGKFGQRALDFYSIHVTKESTHPVKPLAQIAGNRYASGPVGKALSDACMGTIAS | |
| | FLSKYQDIIIEHQKVVKGNQKRLESLRELAGKENLEYPSVTLPPQPHTKEGVDAYNEVIA | |
| | RVRMWVNLNLWQKLKLSRDDAKPLLRLKKFPSFPLVERQANEVDWWDMVCNVKKLINEKK | |
| | EDGKVFWQNLAGYKRQEALRPYLSSEEDRKKGKKFARYQLGDLLLHLEKKHGEDWGKVYD | |
| | EAWERIDKKVEGLSKHIKLEEERRSEDAQSKAALTDWLRAKASFVIEGLKEADKDEFCRC | |
| | ELKLQKWYGDLRGKPFAIEAENSILDISGFSKQYNCAFIWQKDGVKKLNLYLIINYFKGG | |
| | KLRFKKIKPEAFEANRFYTVINKKSGEIVPMEVNFNFDDPNLIILPLAFGKRQGREFIWN | |
| | DLLSLETGSLKLANGRVIEKTLYNRRTRQDEPALFVALTFERREVLDSSNIKPMNLIGVD | |
| | RGENIPAVIALTDPEGCPLSRFKDSLGNPTHILRIGESYKEKQRTIQAKKEVEQRRAGGY | |
| | SRKYASKAKNLADDMVRNTARDLLYYAVTQDAMLIFENLSRGFGRQGKRTFMAERQYTRM | |
| | EDWLTAKLAYEGLPSKTYLSKTLAQYTSKTCSNCGFTITSADYDRVLEKLKKTATGWMTT | |
| | INGKELKVEGQITYYNRYKRQNVVKDLSVELDRLSEESVNNDISSWTKGRSGEALSLLKK | |
| | RFSHRPVQEKFVCLNCGFETHADEQAALNIARSWLFLRSQEYKKYQTNKTTGNTDKRAFV | |
| | ETWQSFYRKKLKEVWKPAV | |

[0829] A multiplexed pooled PASS assay was performed and analyzed as described in Example 37. As noted in Example 37, CasX variants were expressed using a relatively weakly-expressing promoter to reduce CasX protein expression and thereby improve the sensitivity of the assay. Samples were tested in duplicate, except for CasX variant 1006, which was tested in quadruplicate. In Tables 74, 76, 77, below, the results for the CasX variant 1006 samples are reported in two separate rows, each the average of two samples. Streptococcus pyogenes Cas9 without a guide RNA served as a negative control. CasX variant 515, CasX variant 676, and CasX variant 812 were also included as controls.

### Results

[0830] Table 74 provides the level of on-target editing produced by various CasX variants with mutations relative to CasX variant 515, ranked from highest to lowest activity.

TABLE 74
Average on-targeting editing activity of CasX variants, ranked from highest to lowest

| Protein | Mutation(s) relative | | | SEM on-target |
|---|---|---|---|---|
| Designation | to CasX 515* | Amino acid | Average on-target | TTC PAM |
| (CasX variant | (Position.Reference. | sequence | TTC PAM editing | editing activity |
| no., or Cas9) | Alternative) | SEQ ID NO | activity (fraction) | (fraction) |
| 1018 | 9.K.G & 891.S.Q | 9417 | 3.01E−01 | 1.20E−01 |
| 1007 | 304.M.T & 826.V.M | 9499 | 2.76E−01 | 7.86E−02 |
| 1006 | 826.V.M & 891.S.Q | 9513 | 2.38E−01 | 4.11E−02 |
| 987 | 169.L.K & 304.M.T | 9458 | 2.32E−01 | 3.38E−02 |
| 1014 | 4.I.G & 891.S.Q | 9393 | 2.29E−01 | 3.45E−02 |
| 1143 | 4.I.G & 826.V.M | 9391 | 2.29E−01 | 3.44E−02 |
| 1019 | 27.-.R & 171.A.S | 9423 | 2.22E−01 | 2.52E−02 |
| 1029 | 5.K.G & 891.S.Q | 9519 | 2.16E−01 | 2.96E−02 |
| 1006 | 826.V.M & 891.S.Q | 9513 | 2.16E−01 | 3.44E−02 |
| 1015 | 5.-.G & 304.M.T | 9401 | 2.11E−01 | 3.20E−02 |
| 970 | 27.-.R & 891.S.Q | 9429 | 2.09E−01 | 2.61E−02 |
| 1028 | 5.K.G & 304.M.T | 9517 | 2.07E−01 | 3.10E−02 |
| 996 | 171.A.Y & 891.S.Q | 9483 | 2.05E−01 | 3.42E−02 |
| 969 | 27.-.R & 171.A.D & 224.G.T | 9607 | 2.04E−01 | 2.64E−02 |
| 984 | 64.R.Q & 891.S.Q | 9453 | 2.03E−01 | 9.13E−02 |
| 1041 | 698.S.R & 891.S.Q | 9542 | 2.01E−01 | 3.17E−02 |
| 1016 | 9.K.G & 171.A.D | 9409 | 1.98E−01 | 3.20E−02 |
| 1000 | 224.G.T & 891.S.Q | 9495 | 1.92E−01 | 2.51E−02 |
| 999 | 224.G.T & 304.M.T | 9491 | 1.92E−01 | 2.90E−02 |
| 986 | 169.L.K & 171.A.S | 9456 | 1.90E−01 | 2.76E−02 |
| 977 | 64.R.Q & 169.L.K | 9443 | 1.90E−01 | 3.12E−02 |
| 792 | 27.-.R & 169.L.K | 9419 | 1.89E−01 | 2.89E−02 |
| 993 | 171.A.D & 224.G.T | 9472 | 1.88E−01 | 2.70E−02 |
| 997 | 171.A.S & 304.M.T | 9485 | 1.87E−01 | 2.83E−02 |
| 1025 | 169.L.K & 891.S.Q | 9462 | 1.87E−01 | 2.99E−02 |
| 1001 | 27.-.R & 169.L.K & 329.G.K | 9609 | 1.85E−01 | 2.57E−02 |
| 1040 | 481.E.D & 891.S.Q | 9536 | 1.85E−01 | 3.00E−02 |
| 1004 | 304.M.T & 891.S.Q | 9501 | 1.85E−01 | 3.11E−02 |
| 676 | 27.-.R & 170.L.K & 224.G.S | 355 | 1.84E−01 | 2.28E−02 |
| 1031 | 6.-.G & 169.L.K | 9521 | 1.84E−01 | 3.02E−02 |
| 980 | 64.R.Q & 171.A.S | 9447 | 1.80E−01 | 3.06E−02 |
| 981 | 64.R.Q & 304.M.T | 9449 | 1.79E−01 | 2.44E−02 |
| 985 | 169.L.K & 171.A.Y | 9455 | 1.73E−01 | 3.57E−02 |
| 989 | 169.L.Q & 224.G.T | 9466 | 1.73E−01 | 3.20E−02 |
| 992 | 169.L.Q & 887.T.D | 9470 | 1.70E−01 | 3.40E−02 |
| 994 | 171.A.Y & 224.G.T | 9478 | 1.68E−01 | 3.21E−02 |
| 1005 | 826.V.M & 887.T.D | 9512 | 1.68E−01 | 3.17E−02 |
| 983 | 64.R.Q & 887.T.D | 9452 | 1.68E−01 | 1.70E−02 |
| 1026 | 169.L.Q & 826.V.M | 9469 | 1.65E−01 | 3.09E−02 |
| 1009 | 4.I.G & 171.A.D | 9385 | 1.65E−01 | 6.43E−02 |
| 982 | 64.R.Q & 398.Y.T | 9450 | 1.64E−01 | 2.73E−02 |
| 978 | 64.R.Q & 169.L.Q | 9444 | 1.63E−01 | 2.96E−02 |
| 515 | — | 197 | 1.63E−01 | 2.38E−02 |
| 1003 | 9.K.G & 27.-.R | 9509 | 1.61E−01 | 2.28E−02 |
| 1017 | 9.K.G & 224.G.T | 9412 | 1.56E−01 | 2.73E−02 |
| 1020 | 35.R.P & 171.A.D | 9433 | 1.55E−01 | 3.01E−02 |
| 998 | 171.A.S & 826.V.M | 9487 | 1.54E−01 | 2.92E−02 |
| 1010 | 4.I.G & 171.A.Y | 9386 | 1.54E−01 | 2.71E−02 |
| 1022 | 35.R.P & 891.S.Q | 9441 | 1.48E−01 | 2.79E−02 |
| 1038 | 224.G.T & 826.V.M | 9493 | 1.48E−01 | 3.11E−02 |
| 1027 | 5.K.G & 171.A.D | 9516 | 1.42E−01 | 2.32E−02 |
| 1012 | 4.I.G & 398.Y.T | 9390 | 1.40E−01 | 2.10E−02 |
| 971 | 35.R.P & 169.L.Q | 9432 | 1.39E−01 | 2.75E−02 |
| 1032 | 6.-.G & 171.A.D | 9522 | 1.39E−01 | 2.40E−02 |
| 1024 | 169.L.K & 398.Y.T | 9459 | 1.38E−01 | 2.87E−02 |
| 1023 | 64.R.Q & 224.G.T | 9448 | 1.37E−01 | 2.34E−02 |
| 1036 | 171.A.S & 887.T.D | 9488 | 1.37E−01 | 2.38E−02 |
| 988 | 169.L.Q & 171.A.Y | 9464 | 1.36E−01 | 3.36E−02 |
| 1034 | 171.A.Y & 826.V.M | 9481 | 1.36E−01 | 3.05E−02 |
| 1030 | 171.A.D & 398.Y.T | 9474 | 1.35E−01 | 2.55E−02 |
| 1039 | 304.M.W & 398.Y.T | 9529 | 1.29E−01 | 3.28E−02 |
| 1033 | 171.A.Y & 304.M.T | 9479 | 1.25E−01 | 2.29E−02 |
| 1021 | 35.R.P & 304.M.T | 9437 | 1.25E−01 | 1.77E−02 |
| 1011 | 4.I.G & 224.G.T | 9388 | 1.24E−01 | 2.13E−02 |
| 979 | 64.R.Q & 171.A.Y | 9446 | 1.24E−01 | 2.15E−02 |
| 1002 | 5.-.G & 35.R.P | 9496 | 1.20E−01 | 2.31E−02 |
| 1035 | 171.A.S & 398.Y.T | 9486 | 1.14E−01 | 2.07E−02 |
| 851 | 35.R.P & 171.A.Y | 9434 | 1.13E−01 | 2.31E−02 |
| 995 | 171.A.Y & 398.Y.T | 9480 | 1.13E−01 | 1.83E−02 |
| 973 | 35.R.P & 171.A.Y & 304.M.T | 9608 | 1.12E−01 | 1.96E−02 |
| 976 | 35.R.P & 887.T.D | 9440 | 9.62E−02 | 2.52E−02 |
| 974 | 35.R.P & 224.G.T | 9436 | 9.00E−02 | 1.52E−02 |
| 1037 | 224.G.T & 398.Y.T | 9492 | 8.30E−02 | 1.35E−02 |
| 812 | 329.G.K | 484 | 7.68E−02 | 1.69E−02 |
| 975 | 35.R.P & 398.Y.T | 9438 | 7.49E−02 | 1.51E−02 |
| 991 | 169.L.Q & 398.Y.T | 9468 | 4.87E−02 | 1.74E−02 |
| Cas9 | n/a | — | 0.00E+00 | 0.00E+00 |

*Positions of mutations are shown relative to a CasX 515 sequence with an N-terminal methionine residue (SEQ ID NO: 9590). Each mutation is indicated by its position, reference sequence, and alt sequence, separated by ‘.’ Insertions are indicated with a ‘-’ in the reference sequence (first position), and deletions with a ‘-’ in the alt sequence (second position). Multiple individual mutations are separated by “&”.

[0831] As shown in Table 74, 41 of the tested CasX variants produced higher levels of on-target editing than did CasX variant 515; the 41 CasX variants are bolded in Table 74. CasX variants 1018 had 9.K.G and 891.S.Q amino acid substitutions and produced the highest level of on-target editing in the assay. The CasX variant 676 control was more active than CasX 515, and CasX variant 812 was less active than CasX variant 515, which is consistent with previous results.

[0832] A large number of the tested CasX variants produced lower levels of on-target editing than CasX variant 515. This suggests that not all combinations of mutations, including combinations of mutations that were relatively active for on-target editing when introduced into CasX variant 515 as single mutations (see Example 37), are compatible for producing highly active CasX variants.

[0833] To understand the amino acid residues that may be causal for improving CasX activity, the identity of the mutations in the CasX variants with two or three mutations resulting in improved on-target editing activity relative to CasX variant 515 was examined (Table 75).

TABLE 75
Summary of mutations in CasX variants with greater
on-target editing activity than CasX variant 515

| | Number of | |
|---|---|---|
| Position of mutation | occurrences of | Identity of mutation(s) |
| relative to CasX 515 | mutations at | (Number of CasX |
| (SEQ ID NO: 9590) | position* | variants with mutation) |
| 891 | 13 | 891.S.Q |
| 169 | 12 | 169.L.K (8); 169.L.Q (4) |
| 171 | 11 | 171.A.S (4); 171.A.D (4); |
| | | 171.A.Y (3) |
| 304 | 8 | 304.M.T |
| 64 | 7 | 64.R.Q |
| 224 | 6 | 224.G.T |
| 27 | 5 | 27.-.R |
| 826 | 4 | 826.V.M |
| 4 | 3 | 4.I.G |
| 5 | 3 | 5.-.G (1); 5.K.G (2) |
| 887 | 3 | 887.T.D |
| 9 | 2 | 9.K.G |
| 6 | 1 | 6.-.G |
| 481 | 1 | 481.E.D |
| 698 | 1 | 698.S.R |

*Excluding CasX variant 676.

[0834] As shown in Table 75, certain positions were mutated in several members of the set of CasX variants with higher on-target editing activity than CasX variant 515. For example, the serine to glutamine substitution at position 891 (891.S.Q), in the TSL domain, was found in 13 members of the CasX variants with improved on-target editing activity relative to CasX variant 515. The TSL domain is a dynamic domain involved in coordinating the introduction of the target strand to the RuvC active site, and the substitution of serine for the longer glutamine may allow for additional hydrogen bonding interactions with the target strand and more efficient transfer to the nuclease domain.

[0835] One of two substitutions at position 169 (169.L.K or 169.L.Q), in the NTSB domain, were found in 12 members of the CasX variants with higher on-target editing activity than CasX variant 515. This position is proximal to the second and third nucleotides of the unwound non-target strand in structures of the non-target strand loading state, and the introduction of either a charged residue or one capable of multiple hydrogen-bonding interactions likely allows for the stabilization of the unwound state and thus more efficient unwinding. It should be noted that 169.L.K was more enriched than 169.L.Q among the CasX variants with improved on-target editing activity, which suggests that while a polar interaction increases enzymatic activity, a charge-charge interaction is more suitable for this position.

[0836] One of three substitutions at position 171 (171.A.S, 171.A.D, or 171.A.Y), also in the NTSB domain, were found in 11 members of the CasX variants with improved on-target editing activity. Residue 171 is solvent-exposed, so a polar residue is likely more favorable at this position. While the residue is not in a position that interacts with the non-target strand in published structures, the dynamic nature of the NTSB domain may allow these residues to make hydrogen-bonding interactions with the target DNA at some point in the unwinding process. A serine is present at this position in the wild-type CasX 2 (SEQ ID NO: 2) sequence and is an alanine in CasX variants containing the chimeric NTSB from CasX1, meaning that the 171.A.S mutation in particular represents a reversion to a wild-type sequence. Notably, 171.A.Y was also found in several of the variants performing worse than CasX variant 515, which suggests that a tyrosine at position 171 might create too much steric hindrance for proper hydrogen-bonding interactions with the target DNA.

[0837] While the 169.L.K and 27.-.R mutations found in CasX variant 676 were well-represented among the high activity variants, there were a number of orthogonal mutations with distinct mechanisms that may allow for increased activity without the loss of specificity seen in CasX variant 676. 891.S.Q in particular was found in a number of top-performing activity variants that also have a higher specificity ratio than CasX variant 515 (see below).

[0838] Table 76, below, provides the level of off-target editing produced by various CasX variants with two or three mutations relative to CasX variant 515, ranked from lowest to highest activity.

TABLE 76
Average off-targeting editing activity of CasX variants, ranked from lowest to highest

| Protein | Mutation relative to | | | SEM off-target |
|---|---|---|---|---|
| Designation | CasX 515* | Amino acid | Average off-target | TTC PAM |
| (CasX variant | (Position.Reference. | sequence | TTC PAM editing | editing activity |
| no., or Cas9) | Alternative) | SEQ ID NO | activity (fraction) | (fraction) |
| Cas9 | n/a | — | 0.00E+00 | 0.00E+00 |
| 812 | 329.G.K | 484 | 4.46E−03 | 3.30E−03 |
| 991 | 169.L.Q & 398.Y.T | 9468 | 4.71E−03 | 3.59E−03 |
| 975 | 35.R.P & 398.Y.T | 9438 | 6.63E−03 | 5.75E−03 |
| 976 | 35.R.P & 887.T.D | 9440 | 8.76E−03 | 6.93E−03 |
| 851 | 35.R.P & 171.A.Y | 9434 | 9.95E−03 | 6.91E−03 |
| 974 | 35.R.P & 224.G.T | 9436 | 9.95E−03 | 6.79E−03 |
| 971 | 35.R.P & 169.L.Q | 9432 | 1.15E−02 | 8.07E−03 |
| 1037 | 224.G.T & 398.Y.T | 9492 | 1.22E−02 | 8.00E−03 |
| 1039 | 304.M.W & 398.Y.T | 9529 | 1.24E−02 | 1.01E−02 |
| 988 | 169.L.Q & 171.A.Y | 9464 | 1.30E−02 | 8.38E−03 |
| 973 | 35.R.P & 171.A.Y & 304.M.T | 9608 | 1.37E−02 | 9.35E−03 |
| 995 | 171.A.Y & 398.Y.T | 9480 | 1.53E−02 | 9.56E−03 |
| 1002 | 5.-.G & 35.R.P | 9496 | 1.69E−02 | 1.03E−02 |
| 1009 | 4.I.G & 171.A.D | 9385 | 1.76E−02 | 1.08E−02 |
| 1011 | 4.I.G & 224.G.T | 9388 | 1.80E−02 | 1.12E−02 |
| 1035 | 171.A.S & 398.Y.T | 9486 | 1.86E−02 | 9.86E−03 |
| 989 | 169.L.Q & 224.G.T | 9466 | 1.91E−02 | 1.19E−02 |
| 1018 | 9.K.G & 891.S.Q | 9417 | 1.91E−02 | 1.43E−02 |
| 1033 | 171.A.Y & 304.M.T | 9479 | 1.93E−02 | 1.09E−02 |
| 994 | 171.A.Y & 224.G.T | 9478 | 1.95E−02 | 1.21E−02 |
| 1020 | 35.R.P & 171.A.D | 9433 | 1.98E−02 | 1.24E−02 |
| 1022 | 35.R.P & 891.S.Q | 9441 | 2.04E−02 | 1.10E−02 |
| 979 | 64.R.Q & 171.A.Y | 9446 | 2.09E−02 | 1.24E−02 |
| 1032 | 6.-.G & 171.A.D | 9522 | 2.20E−02 | 1.15E−02 |
| 1027 | 5.K.G & 171.A.D | 9516 | 2.28E−02 | 1.29E−02 |
| 1041 | 698.S.R & 891.S.Q | 9542 | 2.41E−02 | 1.32E−02 |
| 1012 | 4.I.G & 398.Y.T | 9390 | 2.50E−02 | 1.30E−02 |
| 1030 | 171.A.D & 398.Y.T | 9474 | 2.53E−02 | 1.31E−02 |
| 1024 | 169.L.K & 398.Y.T | 9459 | 2.54E−02 | 1.39E−02 |
| 982 | 64.R.Q & 398.Y.T | 9450 | 2.58E−02 | 1.58E−02 |
| 983 | 64.R.Q & 887.T.D | 9452 | 2.59E−02 | 1.06E−02 |
| 1040 | 481.E.D & 891.S.Q | 9536 | 2.63E−02 | 1.30E−02 |
| 1017 | 9.K.G & 224.G.T | 9412 | 2.67E−02 | 1.64E−02 |
| 1001 | 27.-.R & 169.L.K & 329.G.K | 9609 | 2.74E−02 | 1.31E−02 |
| 992 | 169.L.Q & 887.T.D | 9470 | 2.78E−02 | 1.47E−02 |
| 1036 | 171.A.S & 887.T.D | 9488 | 2.80E−02 | 1.47E−02 |
| 1003 | 9.K.G & 27.-.R | 9509 | 2.80E−02 | 1.40E−02 |
| 1005 | 826.V.M & 887.T.D | 9512 | 2.81E−02 | 1.41E−02 |
| 978 | 64.R.Q & 169.L.Q | 9444 | 2.83E−02 | 1.48E−02 |
| 1021 | 35.R.P & 304.M.T | 9437 | 2.84E−02 | 1.62E−02 |
| 985 | 169.L.K & 171.A.Y | 9455 | 3.00E−02 | 1.62E−02 |
| 977 | 64.R.Q & 169.L.K | 9443 | 3.03E−02 | 1.46E−02 |
| 1023 | 64.R.Q & 224.G.T | 9448 | 3.05E−02 | 1.81E−02 |
| 1034 | 171.A.Y & 826.V.M | 9481 | 3.07E−02 | 1.24E−02 |
| 1010 | 4.I.G & 171.A.Y | 9386 | 3.17E−02 | 1.59E−02 |
| 1026 | 169.L.Q & 826.V.M | 9469 | 3.18E−02 | 1.44E−02 |
| 1016 | 9.K.G & 171.A.D | 9409 | 3.30E−02 | 1.43E−02 |
| 1038 | 224.G.T & 826.V.M | 9493 | 3.30E−02 | 1.58E−02 |
| 1029 | 5.K.G & 891.S.Q | 9519 | 3.31E−02 | 1.77E−02 |
| 1031 | 6.-.G & 169.L.K | 9521 | 3.38E−02 | 1.65E−02 |
| 980 | 64.R.Q & 171.A.S | 9447 | 3.41E−02 | 1.59E−02 |
| 993 | 171.A.D & 224.G.T | 9472 | 3.43E−02 | 1.68E−02 |
| 1028 | 5.K.G & 304.M.T | 9517 | 3.65E−02 | 1.85E−02 |
| 998 | 171.A.S & 826.V.M | 9487 | 3.68E−02 | 1.63E−02 |
| 515 | — | 197 | 3.83E−02 | 1.46E−02 |
| 999 | 224.G.T & 304.M.T | 9491 | 3.91E−02 | 1.93E−02 |
| 1000 | 224.G.T & 891.S.Q | 9495 | 4.14E−02 | 2.07E−02 |
| 996 | 171.A.Y & 891.S.Q | 9483 | 4.25E−02 | 2.02E−02 |
| 981 | 64.R.Q & 304.M.T | 9449 | 4.30E−02 | 2.20E−02 |
| 1014 | 4.I.G & 891.S.Q | 9393 | 4.63E−02 | 2.06E−02 |
| 986 | 169.L.K & 171.A.S | 9456 | 4.63E−02 | 2.46E−02 |
| 1006 | 826.V.M & 891.S.Q | 9513 | 4.66E−02 | 2.16E−02 |
| 1025 | 169.L.K & 891.S.Q | 9462 | 4.73E−02 | 2.04E−02 |
| 997 | 171.A.S & 304.M.T | 9485 | 4.82E−02 | 2.22E−02 |
| 1015 | 5.-.G & 304.M.T | 9401 | 5.10E−02 | 2.19E−02 |
| 987 | 169.L.K & 304.M.T | 9458 | 5.72E−02 | 2.55E−02 |
| 1006 | 826.V.M & 891.S.Q | 9513 | 5.87E−02 | 2.71E−02 |
| 969 | 27.-.R & 171.A.D & 224.G.T | 9607 | 5.88E−02 | 2.17E−02 |
| 1004 | 304.M.T & 891.S.Q | 9501 | 6.11E−02 | 2.26E−02 |
| 1143 | 4.I.G & 826.V.M | 9391 | 6.15E−02 | 2.79E−02 |
| 676 | 27.-.R & 170.L.K & 224.G.S | 355 | 6.19E−02 | 2.14E−02 |
| 1019 | 27.-.R & 171.A.S | 9423 | 6.78E−02 | 1.45E−02 |
| 970 | 27.-.R & 891.S.Q | 9429 | 6.87E−02 | 2.22E−02 |
| 1007 | 304.M.T & 826.V.M | 9499 | 6.99E−02 | 8.52E−02 |
| 984 | 64.R.Q & 891.S.Q | 9453 | 7.16E−02 | 1.01E−01 |
| 792 | 27.-.R & 169.L.K | 9419 | 7.26E−02 | 2.39E−02 |

[0839] As shown in Table 76, the majority of the tested CasX variants with pairs of mutations relative to CasX variant 515 produced lower levels of off-target editing than did CasX variant 515; these samples are bolded in Table 76.

[0840] Table 77, below, provides the specificity ratio (i.e., the average level of on-targeting editing divided by the average level of off-target editing) of the tested CasX variants with two or three mutations relative to CasX 515, ranked from the highest to lowest ratio. CasX variants with higher specificity ratios than CasX 515 are bolded in Table 77.

TABLE 77
Specificity ratios of CasX variants, ranked from highest to lowest*

| | | | | SEM off- |
|---|---|---|---|---|
| Protein | Mutation relative to | Amino acid | Specificity ratio | target TTC |
| Designation | CasX 515* | sequence | (average on-target | PAM editing |
| (CasX variant | (Position.Reference. | (SEQ ID | activity/average | activity |
| no., or Cas9) | Alternative) | NO) | off-target activity) | (fraction) |
| 812 | 329.G.K | 484 | 17.22 | 0.52 |
| 1018 | 9.K.G & 891.S.Q | 9417 | 15.76 | 0.35 |
| 971 | 35.R.P & 169.L.Q | 9432 | 12.09 | 0.5 |
| 851 | 35.R.P & 171.A.Y | 9434 | 11.36 | 0.49 |
| 975 | 35.R.P & 398.Y.T | 9438 | 11.3 | 0.67 |
| 976 | 35.R.P & 887.T.D | 9440 | 10.98 | 0.53 |
| 988 | 169.L.Q & 171.A.Y | 9464 | 10.46 | 0.4 |
| 1039 | 304.M.W & 398.Y.T | 9529 | 10.4 | 0.56 |
| 991 | 169.L.Q & 398.Y.T | 9468 | 10.34 | 0.41 |
| 1009 | 4.I.G & 171.A.D | 9385 | 9.38 | 0.23 |
| 989 | 169.L.Q & 224.G.T | 9466 | 9.06 | 0.44 |
| 974 | 35.R.P & 224.G.T | 9436 | 9.05 | 0.51 |
| 994 | 171.A.Y & 224.G.T | 9478 | 8.62 | 0.43 |
| 1041 | 698.S.R & 891.S.Q | 9542 | 8.34 | 0.39 |
| 973 | 35.R.P & 171.A.Y & 304.M.T | 9608 | 8.18 | 0.51 |
| 1020 | 35.R.P & 171.A.D | 9433 | 7.83 | 0.43 |
| 995 | 171.A.Y & 398.Y.T | 9480 | 7.39 | 0.46 |
| 1022 | 35.R.P & 891.S.Q | 9441 | 7.25 | 0.35 |
| 1002 | 5.-.G & 35.R.P | 9496 | 7.1 | 0.41 |
| 1040 | 481.E.D & 891.S.Q | 9536 | 7.03 | 0.33 |
| 1011 | 4.I.G & 224.G.T | 9388 | 6.89 | 0.45 |
| 1037 | 224.G.T & 398.Y.T | 9492 | 6.8 | 0.49 |
| 1001 | 27.-.R & 169.L.K & 329.G.K | 9609 | 6.75 | 0.34 |
| 1029 | 5.K.G & 891.S.Q | 9519 | 6.53 | 0.4 |
| 983 | 64.R.Q & 887.T.D | 9452 | 6.49 | 0.38 |
| 1033 | 171.A.Y & 304.M.T | 9479 | 6.48 | 0.31 |
| 982 | 64.R.Q & 398.Y.T | 9450 | 6.36 | 0.45 |
| 1032 | 6.-.G & 171.A.D | 9522 | 6.32 | 0.35 |
| 977 | 64.R.Q & 169.L.K | 9443 | 6.27 | 0.32 |
| 1027 | 5.K.G & 171.A.D | 9516 | 6.23 | 0.4 |
| 1035 | 171.A.S & 398.Y.T | 9486 | 6.13 | 0.35 |
| 992 | 169.L.Q & 887.T.D | 9470 | 6.12 | 0.33 |
| 1016 | 9.K.G & 171.A.D | 9409 | 6 | 0.27 |
| 1005 | 826.V.M & 887.T.D | 9512 | 5.98 | 0.31 |
| 979 | 64.R.Q & 171.A.Y | 9446 | 5.93 | 0.42 |
| 1017 | 9.K.G & 224.G.T | 9412 | 5.84 | 0.44 |
| 985 | 169.L.K & 171.A.Y | 9455 | 5.77 | 0.34 |
| 978 | 64.R.Q & 169.L.Q | 9444 | 5.76 | 0.33 |
| 1003 | 9.K.G & 27.-.R | 9509 | 5.75 | 0.36 |
| 1028 | 5.K.G & 304.M.T | 9517 | 5.67 | 0.36 |
| 1012 | 4.I.G & 398.Y.T | 9390 | 5.6 | 0.37 |
| 993 | 171.A.D & 224.G.T | 9472 | 5.48 | 0.34 |
| 1031 | 6.-.G & 169.L.K | 9521 | 5.44 | 0.34 |
| 1024 | 169.L.K & 398.Y.T | 9459 | 5.43 | 0.32 |
| 1030 | 171.A.D & 398.Y.T | 9474 | 5.34 | 0.33 |
| 980 | 64.R.Q & 171.A.S | 9447 | 5.28 | 0.3 |
| 1026 | 169.L.Q & 826.V.M | 9469 | 5.19 | 0.27 |
| 1006 | 826.V.M & 891.S.Q | 9513 | 5.11 | 0.29 |
| 1014 | 4.I.G & 891.S.Q | 9393 | 4.95 | 0.29 |
| 999 | 224.G.T & 304.M.T | 9491 | 4.91 | 0.34 |
| 1036 | 171.A.S & 887.T.D | 9488 | 4.89 | 0.35 |
| 1010 | 4.I.G & 171.A.Y | 9386 | 4.86 | 0.33 |
| 996 | 171.A.Y & 891.S.Q | 9483 | 4.82 | 0.31 |
| 1000 | 224.G.T & 891.S.Q | 9495 | 4.64 | 0.37 |
| 1023 | 64.R.Q & 224.G.T | 9448 | 4.49 | 0.42 |
| 1038 | 224.G.T & 826.V.M | 9493 | 4.48 | 0.27 |
| 1034 | 171.A.Y & 826.V.M | 9481 | 4.43 | 0.43 |
| 1021 | 35.R.P & 304.M.T | 9437 | 4.4 | 0.18 |
| 515 | — | 197 | 4.26 | 0.24 |
| 998 | 171.A.S & 826.V.M | 9487 | 4.18 | 0.25 |
| 981 | 64.R.Q & 304.M.T | 9449 | 4.16 | 0.37 |
| 1015 | 5.-.G & 304.M.T | 9401 | 4.14 | 0.28 |
| 986 | 169.L.K & 171.A.S | 9456 | 4.1 | 0.39 |
| 987 | 169.L.K & 304.M.T | 9458 | 4.06 | 0.3 |
| 1025 | 169.L.K & 891.S.Q | 9462 | 3.95 | 0.27 |
| 1007 | 304.M.T & 826.V.M | 9499 | 3.95 | 0.93 |
| 997 | 171.A.S & 304.M.T | 9485 | 3.88 | 0.31 |
| 1143 | 4.I.G & 826.V.M | 9391 | 3.72 | 0.3 |
| 1006 | 826.V.M & 891.S.Q | 9513 | 3.68 | 0.3 |
| 969 | 27.-.R & 171.A.D & 224.G.T | 9607 | 3.47 | 0.24 |
| 1019 | 27.-.R & 171.A.S | 9423 | 3.27 | 0.1 |
| 970 | 27.-.R & 891.S.Q | 9429 | 3.04 | 0.2 |
| 1004 | 304.M.T & 891.S.Q | 9501 | 3.03 | 0.2 |
| 676 | 27.-.R & 170.L.K & 224.G.S | 355 | 2.97 | 0.22 |
| 984 | 64.R.Q & 891.S.Q | 9453 | 2.84 | 0.95 |
| 792 | 27.-.R & 169.L.K | 9419 | 2.6 | 0.18 |

*Specificity ratio and SEM values are shown rounded to the nearest hundredth.

[0841] As shown in Table 77, the majority of the tested CasX variants had higher on-target to off-target editing ratios than CasX 515. While the previously validated high-specificity variant CasX\812 had the highest specificity ratio, many CasX variants demonstrated high specificity ratios without as significant a loss in on-target activity as was observed for CasX variant 812.

[0842] The 35.R.P mutation was commonly observed in variants with very high specificity ratios. This residue is in the OBD and believed to be involved in binding the guide RNA. Mutation to a proline at this position may have complex effects on allosteric regulation. Notably, these variants also tended to have low activity, suggesting that apparent specificity may be in part the result of less efficient RNP formation due to the disruption of this guide-binding interaction. Overall, an inverse correlation was observed between specificity ratio and activity. This suggests that it is difficult to fully avoid trade-offs between activity and specificity. However, it is also evident that the strategy of combining activity and specificity mutants can compensate for this trade-off and result in variants with both characteristics improved.

[0843] Notably, some CasX variants produced both higher levels of on-target editing and lower levels of off-target editing than did CasX 515, namely CasX variants 977, 978, 980, 982, 983, 985, 989, 992, 993, 994, 1001, 1005, 1009, 1016, 1018, 1026, 1028, 1029, 1031, 1040, and 1041. An even greater number had higher on-target activity and a higher specificity ratio, specifically, CasX variants 977, 978, 980, 982, 983, 985, 989, 992, 993, 994, 996, 999, 1000, 1001, 1005, 1006, 1009, 1014, 1016, 1018, 1026, 1028, 1029, 1031, 1040, and 1041. Such CasX variants are therefore interpreted to be highly active and highly specific.

[0844] Taken together, the results described herein demonstrate that mutations to CasX 515 can be introduced into the sequence that result in CasX variants with improved gene editing activity and/or specificity.

### Example 39: Generation and Assessment of Guide RNA Scaffolds with Mutations in the Pseudoknot Stem

[0845] As described in Example 18, guide RNA scaffold 320 was designed with mutations to deplete the CpG content of the DNA encoding the pseudoknot stem and the extended stem regions of the scaffold. In the experiment described in Example 18, scaffold 320 produced a significant increase in editing potency relative to scaffold 235. This suggested that mutations to the pseudoknot stem have the potential to improve scaffold function. In the following example, a selection of scaffolds with mutations in the pseudoknot stem were designed and tested for their ability to promote genome editing.

### Materials and Methods

Design of Guide RNA Scaffolds with Mutations in the Pseudoknot Stem:

[0846] Guide RNA scaffolds with mutations in the pseudoknot stem were designed based on scaffold 316 (SEQ ID NO: 9588). The positions of the mutations, as well as full-length DNA and RNA sequences of the scaffolds are provided in Table 78, below. Scaffold 392 recapitulates the CG->GC mutation in the pseudoknot stem that was used to generate scaffold 320, as described in Example 18. Scaffolds 174, 235, and 316 were included in this experiment as controls.

TABLE 78
Mutations and DNA and RNA sequences of guide RNA scaffolds

| | | | DNA | | RNA |
|---|---|---|---|---|---|
| Scaffold | Position of | | SEQ | | SEQ |
| no. | mutation* | DNA sequence | ID NO | RNA sequence | ID NO |
| 174 | n/a | ACTGGCGCTTTTATCTGA | 3631 | ACUGGCGCUUUUAUCUGAUUA | 2238 |
| | | TTACTTTGAGAGCCATCA | | CUUUGAGAGCCAUCACCAGCG | |
| | | CCAGCGACTATGTCGTAG | | ACUAUGUCGUAGUGGGUAAAG | |
| | | TGGGTAAAGCTCCCTCTT | | CUCCCUCUUCGGAGGGAGCAU | |
| | | CGGAGGGAGCATCAAAG | | CAAAG | |
| 235 | n/a | ACTGGCGCTTCTATCTGA | 3638 | ACUGGCGCUUCUAUCUGAUUA | 2292 |
| | | TTACTCTGAGCGCCATCA | | CUCUGAGCGCCAUCACCAGCG | |
| | | CCAGCGACTATGTCGTAG | | ACUAUGUCGUAGUGGGUAAAG | |
| | | TGGGTAAAGCCGCTTACG | | CCGCUUACGGACUUCGGUCCG | |
| | | GACTTCGGTCCGTAAGAG | | UAAGAGGCAUCAGAG | |
| | | GCATCAGAG | | | |
| 316 | n/a | ACTGGCGCTTCTATCTGA | 9335 | ACUGGCGCUUCUAUCUGAUUA | 9588 |
| | | TTACTCTGAGCGCCATCA | | CUCUGAGCGCCAUCACCAGCG | |
| | | CCAGCGACTATGTCGTAG | | ACUAUGUCGUAGUGGGUAAAG | |
| | | TGGGTAAAGCTCCCTCTT | | CUCCCUCUUCGGAGGGAGCAU | |
| | | CGGAGGGAGCATCAGAG | | CAGAG | |
| 320 | 5.CG.GC; | ACTGGGCCTTCTATCTGA | 3751 | ACUGGGCCUUCUAUCUGAUUA | 2376 |
| | 28.CG.GC; 64. | TTACTCTGAGGCCCATCA | | CUCUGAGGCCCAUCACCAGCG | |
| | TCCCTCTTC | CCAGCGACTATGTCGTAG | | ACUAUGUCGUAGUGGGUAAAG | |
| | GGAGGGA. | TGGGTAAAGCCGCTTAGG | | CCGCUUAGGGACUUCGGUCCC | |
| | CGCTTAGGG | GACTTCGGTCCCTAAGAG | | UAAGAGGCAUCAGAG | |
| | ACTTCGGTC | GCATCAGAG | | | |
| | CCTAAGAG | | | | |
| 332 | 5.CG.GC; | ACTGGGCCTTCTATCTGA | 3763 | ACUGGGCCUUCUAUCUGAUUA | 2391 |
| | 28.CG.GC; | TTACTCTGAGGCCCATCA | | CUCUGAGGCCCAUCACCAGCG | |
| | 74.-.A | CCAGCGACTATGTCGTAG | | ACUAUGUCGUAGUGGGUAAAG | |
| | | TGGGTAAAGCTCCCTCTT | | CUCCCUCUUCAGGAGGGAGCA | |
| | | CAGGAGGGAGCATCAGAG | | UCAGAG | |
| 376 | 6.-.T | ACTGGCTGCTTCTATCTG | 9610 | ACUGGCUGCUUCUAUCUGAUU | 9627 |
| | | ATTACTCTGAGCGCCATC | | ACUCUGAGCGCCAUCACCAGC | |
| | | ACCAGCGACTATGTCGTA | | GACUAUGUCGUAGUGGGUAAA | |
| | | GTGGGTAAAGCTCCCTCT | | GCUCCCUCUUCGGAGGGAGCA | |
| | | TCGGAGGGAGCATCAGAG | | UCAGAG | |
| 377 | 6.-.G | ACTGGCGGCTTCTATCTG | 9611 | ACUGGCGGCUUCUAUCUGAUU | 9628 |
| | | ATTACTCTGAGCGCCATC | | ACUCUGAGCGCCAUCACCAGC | |
| | | ACCAGCGACTATGTCGTA | | GACUAUGUCGUAGUGGGUAAA | |
| | | GTGGGTAAAGCTCCCTCT | | GCUCCCUCUUCGGAGGGAGCA | |
| | | TCGGAGGGAGCATCAGAG | | UCAGAG | |
| 378 | 6.-.G; 26.A.T | ACTGGCGGCTTCTATCTG | 9612 | ACUGGCGGCUUCUAUCUGAUU | 9629 |
| | | ATTACTCTGTGCGCCATC | | ACUCUGUGCGCCAUCACCAGC | |
| | | ACCAGCGACTATGTCGTA | | GACUAUGUCGUAGUGGGUAAA | |
| | | GTGGGTAAAGCTCCCTCT | | GCUCCCUCUUCGGAGGGAGCA | |
| | | TCGGAGGGAGCATCAGAG | | UCAGAG | |
| 379 | 6.-.G; 27.-.G | ACTGGCGGCTTCTATCTG | 9613 | ACUGGCGGCUUCUAUCUGAUU | 9630 |
| | | ATTACTCTGAGGCGCCAT | | ACUCUGAGGCGCCAUCACCAG | |
| | | CACCAGCGACTATGTCGT | | CGACUAUGUCGUAGUGGGUAA | |
| | | AGTGGGTAAAGCTCCCTC | | AGCUCCCUCUUCGGAGGGAGC | |
| | | TTCGGAGGGAGCATCAGA | | AUCAGAG | |
| | | G | | | |
| 380 | 6.-.T; 28.-.C | ACTGGCTGCTTCTATCTG | 9614 | ACUGGCUGCUUCUAUCUGAUU | 9631 |
| | | ATTACTCTGAGCCGCCAT | | ACUCUGAGCCGCCAUCACCAG | |
| | | CACCAGCGACTATGTCGT | | CGACUAUGUCGUAGUGGGUAA | |
| | | AGTGGGTAAAGCTCCCTC | | AGCUCCCUCUUCGGAGGGAGC | |
| | | TTCGGAGGGAGCATCAGA | | AUCAGAG | |
| | | G | | | |
| 381 | 6.-.C; 27.-.G | ACTGGCCGCTTCTATCTG | 9615 | ACUGGCCGCUUCUAUCUGAUU | 9632 |
| | | ATTACTCTGAGGCGCCAT | | ACUCUGAGGCGCCAUCACCAG | |
| | | CACCAGCGACTATGTCGT | | CGACUAUGUCGUAGUGGGUAA | |
| | | AGTGGGTAAAGCTCCCTC | | AGCUCCCUCUUCGGAGGGAGC | |
| | | TTCGGAGGGAGCATCAGA | | AUCAGAG | |
| | | G | | | |
| 382 | 28.-.C | ACTGGCGCTTCTATCTGA | 9616 | ACUGGCGCUUCUAUCUGAUUA | 9633 |
| | | TTACTCTGAGCCGCCATC | | CUCUGAGCCGCCAUCACCAGC | |
| | | ACCAGCGACTATGTCGTA | | GACUAUGUCGUAGUGGGUAAA | |
| | | GTGGGTAAAGCTCCCTCT | | GCUCCCUCUUCGGAGGGAGCA | |
| | | TCGGAGGGAGCATCAGAG | | UCAGAG | |
| 383 | 28.-T | ACTGGCGCTTCTATCTGA | 9617 | ACUGGCGCUUCUAUCUGAUUA | 9634 |
| | | TTACTCTGAGTCGCCATC | | CUCUGAGUCGCCAUCACCAGC | |
| | | ACCAGCGACTATGTCGTA | | GACUAUGUCGUAGUGGGUAAA | |
| | | GTGGGTAAAGCTCCCTCT | | GCUCCCUCUUCGGAGGGAGCA | |
| | | TCGGAGGGAGCATCAGAG | | UCAGAG | |
| 384 | 6.-.G; 28.-.C | ACTGGCGGGTTCTATCTG | 9618 | ACUGGCGGGUUCUAUCUGAUU | 9635 |
| | | ATTACTCTGAGCCGCCAT | | ACUCUGAGCCGCCAUCACCAG | |
| | | CACCAGCGACTATGTCGT | | CGACUAUGUCGUAGUGGGUAA | |
| | | AGTGGGTAAAGCTCCCTC | | AGCUCCCUCUUCGGAGGGAGC | |
| | | TTCGGAGGGAGCATCAGA | | AUCAGAG | |
| | | G | | | |
| 385 | 6.-.C | ACTGGCCGCTTCTATCTG | 9619 | ACUGGCCGCUUCUAUCUGAUU | 9636 |
| | | ATTACTCTGAGCGCCATC | | ACUCUGAGCGCCAUCACCAGC | |
| | | ACCAGCGACTATGTCGTA | | GACUAUGUCGUAGUGGGUAAA | |
| | | GTGGGTAAAGCTCCCTCT | | GCUCCCUCUUCGGAGGGAGCA | |
| | | TCGGAGGGAGCATCAGAG | | UCAGAG | |
| 386 | 5.C.T; 6.-.G | ACTGGTGGCTTCTATCTG | 9620 | ACUGGUGGCUUCUAUCUGAUU | 9637 |
| | | ATTACTCTGAGCGCCATC | | ACUCUGAGCGCCAUCACCAGC | |
| | | ACCAGCGACTATGTCGTA | | GACUAUGUCGUAGUGGGUAAA | |
| | | GTGGGTAAAGCTCCCTCT | | GCUCCCUCUUCGGAGGGAGCA | |
| | | TCGGAGGGAGCATCAGAG | | UCAGAG | |
| 387 | 6.-.G | ACTGGCGGGTTCTATCTG | 9621 | ACUGGCGGGUUCUAUCUGAUU | 9638 |
| | | ATTACTCTGAGCGCCATC | | ACUCUGAGCGCCAUCACCAGC | |
| | | ACCAGCGACTATGTCGTA | | GACUAUGUCGUAGUGGGUAAA | |
| | | GTGGGTAAAGCTCCCTCT | | GCUCCCUCUUCGGAGGGAGCA | |
| | | TCGGAGGGAGCATCAGAG | | UCAGAG | |
| 388 | 6.-.G;28.-.C | ACTGGCGGCTTCTATCTG | 9622 | ACUGGCGGCUUCUAUCUGAUU | 9639 |
| | | ATTACTCTGGGCCGCCAT | | ACUCUGGGCCGCCAUCACCAG | |
| | | CACCAGCGACTATGTCGT | | CGACUAUGUCGUAGUGGGUAA | |
| | | AGTGGGTAAAGCTCCCTC | | AGCUCCCUCUUCGGAGGGAGC | |
| | | TTCGGAGGGAGCATCAGA | | AUCAGAG | |
| | | G | | | |
| 389 | 2.TGGC.CTG | ACCTGTAGGCTTCTATCT | 9623 | ACCUGUAGGCUUCUAUCUGAU | 9640 |
| | TAG; 26.- | GATTACTCTGCTACAGCG | | UACUCUGCUACAGCGCCAUCA | |
| | CTAC | CCATCACCAGCGACTATG | | CCAGCGACUAUGUCGUAGUGG | |
| | | TCGTAGTGGGTAAAGCTC | | GUAAAGCUCCCUCUUCGGAGG | |
| | | CCTCTTCGGAGGGAGCAT | | GAGCAUCAGAG | |
| | | CAGAG | | | |
| 390 | 2.TGGC.CAG | ACCAGCAAGCTTCTATCT | 9624 | ACCAGCAAGCUUCUAUCUGAU | 9641 |
| | CAA; 26.- | GATTACTCTGTTGCTGCG | | UACUCUGUUGCUGCGCCAUCA | |
| | .TTGC | CCATCACCAGCGACTATG | | CCAGCGACUAUGUCGUAGUGG | |
| | | TCGTAGTGGGTAAAGCTC | | GUAAAGCUCCCUCUUCGGAGG | |
| | | CCTCTTCGGAGGGAGCAT | | GAGCAUCAGAG | |
| | | CAGAG | | | |
| 391 | 2.TGGC.CGA | ACCGAGACGCTTCTATCT | 9625 | ACCGAGACGCUUCUAUCUGAU | 9642 |
| | GAC; 26.A.GG | GATTACTCTGGGCTCGCG | | UACUCUGGGCUCGCGCCAUCA | |
| | CTC | CCATCACCAGCGACTATG | | CCAGCGACUAUGUCGUAGUGG | |
| | | TCGTAGTGGGTAAAGCTC | | GUAAAGCUCCCUCUUCGGAGG | |
| | | CCTCTTCGGAGGGAGCAT | | GAGCAUCAGAG | |
| | | CAGAG | | | |
| 392 | 5.CG.GC;28.C | ACTGGGCCTTCTATCTGA | 9626 | ACUGGGCCUUCUAUCUGAUUA | 9643 |
| | G.GC | TTACTCTGAGGCCCATCA | | CUCUGAGGCCCAUCACCAGCG | |
| | | CCAGCGACTATGTCGTAG | | ACUAUGUCGUAGUGGGUAAAG | |
| | | TGGGTAAAGCCGCTTACG | | CCGCUUACGGACUUCGGUCCG | |
| | | GACTTCGGTCCGTAAGAG | | UAAGAGGCAUCAGAG | |
| | | GCATCAGAG | | | |

*positions are numbered relative to the 5′ end of scaffold 316, with “0” being the 5′ terminus. Each mutation is indicated by its position, reference sequence, and alt sequence, separated by ‘.’ (e.g., 1.C.A is nucleotide position 1, reference sequence nucleotide C, alternate sequence nucleotide A). Position indexing starts at 0 such that the first base in scaffold 316 is 0.A.
Insertions are indicated with a ‘—’ in the reference sequence, and deletions with a ′—’ in the alt sequence. Multiple individual mutations are semi-colon separated.

### Transfection and Assessment of B2M Editing:

[0847] HEK293T cells were lipofected with 100 ng of plasmid encoding CasX variant 515 and a gRNA made up of a scaffold listed in Table 78. The gRNAs had either a non-targeting spacer or a spacer targeting the B2M locus, as listed in Table 79. 24 hours post-transfection, cells were selected with 1 g/mL puromycin for 48 hours, and then allowed to recover for 24 hours. Then, cells were harvested for B2M protein expression analysis via immunostaining of the B2M-dependent HLA protein, followed by flow cytometry using the Attune™ NxT flow cytometer. Each construct was tested in duplicate, and the transfection and subsequent experiment was performed on two separate occasions.

TABLE 79
Sequences of B2M and non-targeting spacers used in this example

| Spacer ID | DNA sequence | SEQ ID NO |
|---|---|---|
| 7.9 | GTGTAGTACAAGAGATAGAA | 9644 |
| 7.19 | CCCCCACTGAAAAAGATGAG | 9645 |
| 7.43 | AGGCCAGAAAGAGAGAGTAG | 9646 |
| 7.119 | CGCTGGATAGCCTCCAGGCC | 9647 |
| 7.14 | TGAAGCTGACAGCATTCGGG | 9648 |
| Non-targeting | CGAGACGTAATTACGTCTCG | 9318 |

### Lentiviral Transduction and Assessment of B2M Editing:

[0848] In a separate experiment, HEK293T cells were transduced with lentiviral particles encoding CasX variant 515 and a gRNA made up of either scaffold 174, 235, 316, 382, or 392. The gRNAs had either a non-targeting spacer or spacer 7.9, 7.19, or 7.119 targeting the B2M locus, as provided in Table 79. Lentiviral particles were generated by transfecting Lenti-X HEK293T cells, seeded 24 hours prior, at a confluency of 70-90%. Plasmids containing the CasX and guide RNA expression cassettes are introduced to a second-generation lentiviral system containing the packaging and VSV-G envelope plasmids with polyethylenimine, in serum-free media. For particle production, media is changed 12 hours post-transfection, and viruses are harvested at 36-48 hours post-transfection. Viral supernatants were filtered using 0.45 μm membrane filters, diluted in media, and added to HEK293T target cells cultured at a relatively low multiplicity of infection (MOI) of either 0.1 or 0.05. Transduced cells were grown for three days in a 37PC incubator with 50 C02. Cells were harvested for B2M protein expression analysis via immunostaining of the B2M-dependent LA protein, followed by flow cytometry using the Attune™ NxT flow cytometer. The lentiviruses also expressed mScarlet, and the mean fluorescence intensity (MFI) of mScarlet was quantified to confirm that the cells contained similar amounts of transduced lentivirus.

### Results

[0849] Editing of the B2M locus was measured in HEK293T cells transfected with plasmids expressing CasX variant 515 and gRNAs made up of the scaffolds listed in Table 78. The results are provided in Table 80, below.

TABLE 80
Percentage of HEK293T cells with edited B2M locus following
transfection with plasmids expressing CasX 515 and gRNAs
with mutations to the scaffold pseudoknot stem

| | Percentage of HLA- HEK293T | |
|---|---|---|
| Scaffold | cells with edited B2M locus* | |
| no. | First transfection | Second transfection |

Non-targeting spacer

| | | | | |
|---|---|---|---|---|
| 174 | 24.3 | 22.5 | 4.2 | 5.2 |
| 235 | 1.7 | 1.4 | 3.5 | 4.3 |
| 316 | — | 4.1 | 3.1 | 3.9 |
| 316 | 1 | 3.8 | 3.6 | 4.5 |
| 320 | 1.4 | 1.4 | 2.5 | 3.1 |
| 332 | 1.6 | 1.6 | 2.5 | 3.6 |
| 376 | 3.2 | 4.9 | 4.3 | 5.4 |
| 377 | 0.6 | 5.6 | 5 | 6.3 |
| 378 | 0.8 | 4.8 | 4.3 | 6 |
| 379 | 1.3 | 5.6 | 5 | 6.7 |
| 380 | 1.3 | 4.8 | 4.7 | 5.1 |
| 381 | 1.3 | 5.1 | 4.6 | 7.3 |
| 381 | 6.9 | 5.9 | 4.3 | 7 |
| 382 | 1.2 | 4.5 | 3.8 | 6.4 |
| 383 | 1.2 | 3.7 | 3.1 | 5.1 |
| 384 | 1.6 | 5.3 | 2.4 | 5.3 |
| 385 | 1.4 | 1.2 | 3.3 | 3.5 |
| 386 | 1.5 | 1.2 | 2.3 | 2.7 |
| 387 | 1.5 | 1.1 | 3 | 3.7 |
| 388 | 2.7 | 1.7 | 5.5 | 6.3 |
| 389 | 1.6 | 1.2 | 2.4 | 3.1 |
| 390 | 1.3 | 1.3 | 2.4 | 3.1 |
| 391 | 1.4 | 1.3 | 2.6 | 3.4 |
| 392 | 1.6 | 1.4 | 3 | 4.2 |

Spacer 7.9

| | | | | |
|---|---|---|---|---|
| 174 | 68.5 | 62.1 | 85.4 | 80.6 |
| 235 | 73.1 | 68.3 | 91.8 | 88.9 |
| 316 | — | 85.5 | 82.7 | 84.7 |
| 316 | 72.6 | 92.2 | 91.4 | 92.2 |
| 320 | 75.4 | 70.4 | 92.6 | 91.2 |
| 332 | 70.5 | 63.5 | 85.2 | 84.4 |
| 376 | 67.8 | 90.6 | 89.9 | 90 |
| 377 | 71.3 | 90.9 | 90.4 | 90.3 |
| 378 | 75.5 | 90.8 | 91.2 | 92.2 |
| 379 | 68 | 87.9 | 87.6 | 87.4 |
| 380 | 65.2 | 90.5 | 90.6 | 90.8 |
| 381 | 67 | 88.7 | 88.7 | 89 |
| 381 | 61.6 | 86.9 | 88 | 88 |
| 382 | 71.9 | 89.1 | 90.5 | 90.6 |
| 383 | 64.7 | 91.6 | 91.1 | 91 |
| 384 | 62.5 | 79.7 | 82 | 83.1 |
| 385 | 68.4 | 62.5 | 83.2 | 81.1 |
| 386 | 72.5 | 63.1 | 90.7 | 91.1 |
| 387 | 74.5 | 69.4 | 94 | 92.9 |
| 388 | 67.8 | 65.1 | 89.9 | 90.1 |
| 389 | 32.2 | 28.9 | 54.1 | 53.8 |
| 390 | 34.5 | 30.9 | 57.8 | 57.7 |
| 391 | 25.9 | 25.7 | 55.2 | 55.4 |
| 392 | 77.1 | 71.5 | 93.5 | 91.6 |

Spacer 7.19

| | | | | |
|---|---|---|---|---|
| 174 | 58.6 | 47.5 | 81.4 | 81.7 |
| 235 | 62.5 | 54.2 | 90.3 | 89.8 |
| 316 | — | 82.6 | 78.8 | 83.5 |
| 316 | 63.3 | 82.9 | 86.4 | 86.9 |
| 320 | 67.4 | 60.3 | 91.7 | 92.1 |
| 332 | 1.8 | 1.5 | 4.8 | 7.1 |
| 376 | 52.5 | 80 | 78.8 | 80.2 |
| 377 | 56.6 | 83.4 | 84 | 83.4 |
| 378 | 57.1 | 83.8 | 82.9 | 84.2 |
| 379 | 49.2 | 72.4 | 75.8 | 76 |
| 380 | 45.6 | 73.6 | 74.4 | 76.1 |
| 381 | 49.2 | 70.7 | 74.7 | 76.2 |
| 381 | 43.5 | 73.5 | 75.5 | 78.3 |
| 382 | 59.7 | 81.9 | 84.7 | 86.6 |
| 383 | 50.4 | 78.7 | 78.9 | 80.6 |
| 384 | 45.7 | 78.9 | 76.6 | 77.5 |
| 385 | 54.3 | 48.9 | 72.7 | 71.6 |
| 386 | 56.3 | 47.6 | 76.5 | 77.7 |
| 387 | 64.5 | 59.1 | 86.9 | 89.7 |
| 388 | 48 | 45.3 | 75.5 | 77.6 |
| 389 | 3.1 | 2.6 | 8.9 | 12.9 |
| 390 | 18 | 15.4 | 36.4 | 38.9 |
| 391 | 14.7 | 12.8 | 38.5 | 40.3 |
| 392 | 64.3 | 58.4 | 87.6 | 87.8 |

Spacer 7.43

| | | | | |
|---|---|---|---|---|
| 174 | 50.6 | 43.9 | 76.2 | 75.4 |
| 235 | 58.7 | 52.5 | 80.4 | 80.2 |
| 316 | — | 68 | 67.1 | 70.5 |
| 316 | 52.2 | 78.2 | 77.7 | 78.4 |
| 320 | 59.6 | 53.2 | 83.9 | 82.1 |
| 332 | 49.3 | 40.5 | 69.9 | 67.6 |
| 376 | 56.6 | 80.2 | 81.6 | 81.3 |
| 377 | 64.7 | 81.2 | 84.1 | 83.2 |
| 378 | 56.5 | 76.8 | 79.6 | 78.8 |
| 379 | 59.5 | 77.1 | 79.2 | 78.9 |
| 380 | 58.3 | 77.1 | 78.9 | 78.1 |
| 381 | 50.9 | 71.4 | 74.2 | 70.1 |
| 381 | 47.5 | 66.6 | 70.7 | 65.5 |
| 382 | 57.1 | 75.3 | 80.7 | 79.8 |
| 383 | 52.9 | 72.5 | 75.3 | 73.4 |
| 384 | 46.6 | 71.6 | 74.6 | 70.7 |
| 385 | 56.7 | 46.9 | 70.9 | 73.4 |
| 386 | 62.5 | 48.2 | 80.5 | 82.2 |
| 387 | 56.8 | 49.3 | 81.8 | 82.6 |
| 388 | 53.5 | 48.9 | 75.1 | 77.2 |
| 389 | 4.5 | 4 | 13.6 | 18 |
| 390 | 15.1 | 11.7 | 29.5 | 34.5 |
| 391 | 16.2 | 13.4 | 33.6 | 38.7 |
| 392 | 53.8 | 51.8 | 82 | 82.1 |

Spacer 7.119

| | | | | |
|---|---|---|---|---|
| 174 | 36.2 | 32.2 | 64.6 | 63.6 |
| 235 | 60.9 | 55.5 | 89 | 87.3 |
| 316 | — | 66.5 | 68.5 | 70.6 |
| 316 | 56.4 | 73.7 | 79.5 | 83.3 |
| 320 | 54.6 | 46.8 | 85.3 | 83.9 |
| 332 | 51.7 | 46.1 | 74.8 | 78.2 |
| 376 | 45.8 | 66.9 | 71.8 | 75.1 |
| 377 | 49 | 69.4 | 76.3 | 79.2 |
| 378 | 45.7 | 67 | 75.1 | 78.1 |
| 379 | 35.2 | 49.9 | 59.3 | 61.8 |
| 380 | 37.9 | 56.2 | 66.2 | 67.3 |
| 381 | 31.9 | 50.2 | 52.4 | 56.8 |
| 381 | 28.9 | 46.2 | 50.2 | 52.5 |
| 382 | 49.8 | 67.8 | 71.3 | 76.3 |
| 383 | 44.2 | 60.9 | 65.5 | 69.6 |
| 384 | 36.8 | 59.3 | 64.9 | 66 |
| 385 | 39.1 | 32.8 | 62.8 | 62.7 |
| 386 | 40.9 | 33.8 | 72.7 | 74.5 |
| 387 | 7.8 | 6.2 | 24.1 | 31.4 |
| 388 | 35.8 | 30.6 | 62.2 | 64.4 |
| 389 | 4.9 | 3.9 | 15.3 | 20 |
| 390 | 4.3 | 3.9 | 11.9 | 17.1 |
| 391 | 3.8 | 3 | 9.3 | 12.9 |
| 392 | 58 | 50.2 | 85 | 83.3 |

Spacer 7.14

| | | | | |
|---|---|---|---|---|
| 174 | 47.5 | 43.7 | 74.1 | 76.4 |
| 235 | 31.4 | 29.6 | 58 | 57.2 |
| 316 | — | 44.8 | 41.6 | 40.3 |
| 316 | 31.8 | 52.7 | 53.2 | 55.6 |
| 320 | 36.4 | 34 | 59.9 | 62.3 |
| 332 | 14.8 | 12.4 | 25 | 25.4 |
| 376 | 34.1 | 55.5 | 56.1 | 56.9 |
| 377 | 24.6 | 45.1 | 42.7 | — |
| 378 | 26.9 | 45.1 | 43.5 | 47.5 |
| 379 | 36.1 | 54.8 | 56.2 | 59.3 |
| 380 | 46.6 | 67.4 | 70.2 | 72.3 |
| 381 | 50.8 | 72.1 | 73.4 | 74 |
| 381 | — | 39.3 | 35.2 | 39.4 |
| 382 | 42.2 | 65.6 | 66.4 | 67 |
| 383 | 37 | 64 | 64.9 | 64.9 |
| 384 | 18 | 38.4 | 35.1 | 38.1 |
| 385 | 18.1 | 16.1 | 29.6 | 24 |
| 386 | 36.2 | 31.6 | 53.1 | 53.8 |
| 387 | 33.3 | 28.2 | 48.1 | 51 |
| 388 | 31 | 25.5 | 49.3 | 55.4 |
| 389 | 20.6 | 17.6 | 45 | 45.8 |
| 390 | 8.4 | 7.9 | 19.3 | 22.6 |
| 391 | 52.8 | 52.9 | 80.9 | 78.9 |
| 392 | 42.3 | 42.6 | 66.7 | 67.2 |

*Data are shown rounded to the nearest tenth.

[0850] Many of the tested scaffolds produced levels of editing that were similar to scaffold 316 and higher than scaffold 174 (Table 80). Surprisingly, some scaffolds produced higher levels of editing than scaffold 316, but only with certain spacers. Specifically, scaffold 391 showed a relatively high level of editing with spacer 7.14, but not other spacers. Scaffold 392 produced overall high levels of editing with multiple spacers, and edited with spacer 7.14 to a greater extent than scaffold 316.

[0851] Scaffolds 174, 235, 316, 382, and 392 were also tested via lentiviral transduction in HEK293T cells at MOIs of 0.1 (FIG. 102) and 0.05 (FIG. 103). At these relatively low MOIs, the improvement in editing activity in scaffold 235 and scaffold 316 relative to scaffold 174 was pronounced, with both scaffold 235 and scaffold 316 producing over twice as many cells with edited B2M loci as scaffold 174. These results show that scaffold 235 and scaffold 316 are highly effective scaffolds for producing gene editing at low doses in cell culture, and are therefore also expected to be highly useful scaffolds for editing in vivo. In these assays, scaffold 392 produced similar levels of editing to scaffold 316 with the tested spacers.

[0852] Overall, the results described herein demonstrate that guide RNA scaffolds with mutations in the pseudoknot stem region can produce gene editing.

1. A recombinant adeno-associated virus (rAAV) transgene wherein
a. the transgene comprises:
i) a polynucleotide sequence encoding a CasX protein comprising a sequence selected from the group consisting of SEQ ID NOS: 137-512, 9382-9542, and 9607-9609, or a sequence having at least about 70% sequence identity thereto; and
ii) a polynucleotide sequence encoding a first guide RNA (gRNA) comprising a targeting sequence of 15 to 20 nucleotides complementary to a target nucleic acid of a cell;
b. the transgene has less than about 4700 nucleotides; and
c. the rAAV transgene is configured for incorporation into a rAAV capsid.

2. The rAAV transgene of claim 1, wherein the CasX protein comprises a sequence selected from the group consisting of SEQ ID NOS: 137-512, 9382-9542 and 9607-9609.

3. The rAAV of claim 1 or claim 2, wherein the wherein the CasX protein is a CasX variant selected from the group consisting of SEQ ID NOS: 9385, 9391, 9393, 9401, 9409, 9417, 9419, 9423, 9429, 9443, 9444, 9447, 9449, 9450, 9452, 9453, 9455, 9456, 9458, 9462, 9466, 9469, 9470, 9472, 9478, 9483, 9485, 9491, 9495, 9499, 9501, 9512, 9513, 9517, 9519, 9521, 9536, 9542, 9607, and 9609, wherein the encoded CasX variant exhibits improved editing of a target nucleic acid in an in vitro assay, compared to a CasX variant of SEQ ID NO: 197 and assayed under comparable conditions.

4. The rAAV of claim 1 or claim 2, wherein the wherein the CasX protein is a CasX variant selected from the group consisting of SEQ ID NOS: 9385, 9386, 9388, 9390, 9409, 9412, 9417, 9432, 9433, 9434, 9436, 9437, 9438, 9440, 9441, 9443, 9444, 9446, 9447, 9448, 9450, 9452, 9455, 9459, 9464, 9466, 9468, 9469, 9470, 9472, 9474, 9478, 9479, 9480, 9481, 9486, 9487, 9488, 9492, 9493, 9496, 9509, 9512, 9516, 9517, 9519, 9521, 9522, 9529, 9536, 9542, 9608, and 9609, wherein the encoded CasX variant exhibits improved editing specificity of a target nucleic acid in an in vitro assay, compared to a CasX variant of SEQ ID NO: 197 and assayed under comparable conditions.

5. The rAAV of claim 1 or claim 2, wherein the wherein the CasX protein is a CasX variant selected from the group consisting of SEQ ID NOS: 9385, 9386, 9388, 9390, 9393, 9409, 9412, 9417, 9432, 9433, 9434, 9436, 9437, 9438, 9440, 9441, 9443, 9444, 9446, 9447, 9448, 9450, 9452, 9455, 9459, 9464, 9466, 9468, 9469, 9470, 9472, 9474, 9478, 9479, 9480, 9481, 9483, 9486, 9488, 9491, 9492, 9493, 9495, 9496, 9509, 9512, 9513, 9516, 9517, 9519, 9521, 9522, 9529, 9536, 9542, 9608, and 9609, wherein the encoded CasX variant exhibits improved editing specificity ratio of a target nucleic acid in an in vitro assay, compared to a CasX variant of SEQ ID NO: 197 and assayed under comparable conditions.

6. The rAAV of claim 1 or claim 2, wherein the wherein the CasX protein is a CasX variant selected from the group consisting of SEQ ID NOS: 9385, 9409, 9417, 9443, 9444, 9447, 9450, 9452, 9455, 9466, 9469, 9470, 9472, 9478, 9512, 9513, 9517, 9519, 9521, 9536, 9542, and 9609, wherein the encoded CasX variant exhibits improved editing and improved specificity of a target nucleic acid in an in vitro assay, compared to a CasX variant of SEQ ID NO: 197 and assayed under comparable conditions.

7. The rAAV of claim 1 or claim 2, wherein the wherein the CasX protein is a CasX variant selected from the group consisting of SEQ ID NOS: 9385, 9393, 9409, 9417, 9443, 9444, 9447, 9450, 9452, 9455, 9466, 9469, 9470, 9472, 9478, 9483, 9491, 9495, 9512, 9513, 9517, 9519, 9521, 9536, 9542, and 9609, wherein the encoded CasX variant exhibits improved editing and improved specificity ratio of a target nucleic acid in an in vitro assay, compared to a CasX variant of SEQ ID NO: 197 and assayed under comparable conditions.

8. The rAAV transgene of claim 2, wherein the CasX protein comprises a sequence selected from the group consisting of SEQ ID NOS: 190 and 197.

9. The rAAV transgene of any one of claims 1-7, wherein the transgene further comprises one or more components selected from the group consisting of:
a. a first and a second rAAV inverted terminal repeat (ITR) sequence;
b. a first promoter sequence operably linked to the Type V CRISPR protein;
c. a sequence encoding a nuclear localization signal (NLS);
d. a 3′ UTR;
e. a poly(A) signal sequence;
f. a second promoter operably linked to the first gRNA; and
g. an accessory element.

10. The rAAV transgene of claim 9, wherein the first promoter is a pol II promoter selected from the group consisting of polyubiquitin C (UBC) promoter, cytomegalovirus (CMV) promoter, simian virus 40 (SV40) promoter, chicken beta-Actin promoter and rabbit beta-Globin splice acceptor site fusion (CAG), chicken β-actin promoter with cytomegalovirus enhancer (CB7), PGK promoter, Jens Tornoe (JeT) promoter, GUSB promoter, CBA hybrid (CBh) promoter, elongation factor-1 alpha (EF-1alpha) promoter, beta-actin promoter, Rous sarcoma virus (RSV) promoter, silencing-prone spleen focus forming virus (SFFV) promoter, CMVd1 promoter, truncated human CMV (tCMVd2) promoter, minimal CMV promoter, hepB promoter, chicken j-actin promoter, HSV TK promoter, Mini-TK promoter, minimal IL-2 promoter, GRP94 promoter, Super Core Promoter 1, Super Core Promoter 2, Super Core Promoter 3, adenovirus major late (AdML) promoter, MLC promoter, MCK promoter, GRK1 protein promoter, Rho promoter, CAR protein promoter, hSyn Promoter, Ula promoter, Ribosomal Protein Large subunit 30 (Rpl30) promoter, Ribosomal Protein Small subunit 18 (Rps18) promoter, CMV53 promoter, minimal SV40 promoter, CMV53 promoter, SFCp promoter, Mecp2 promoter, pJB42CAT5 promoter, MLP promoter, EFS promoter, rhodopsin promoter, MeP426 promoter, MecP2 promoter, Desmin promoter, MHCK promoter, MHCK7 promoter, beta-glucuronidase (GUSB) promoter, CK7 promoter, and CK8e promoter.

11. The rAAV transgene of claim 9 or claim 10, wherein the first promoter is a pol II promoter selected from the group consisting of U1A, UbC, and JeT.

12. The rAAV transgene of any one of claims 9-11, wherein the first promoter comprises a sequence selected from the group consisting of SEQ ID NOS: 3532-3562, 3714-3739, 3773-3778, and 9344-9350, or a sequence having at least about 70%, at least about 80%, at least about 85%, at least about 90%, at least about 95%, at least about 95%, at least about 96%, at least about 97%, at least about 98%, or at least about 99% identity thereto.

13. The polynucleotide of any one of claims 9-12, wherein the first promoter sequence has less than about 400 nucleotides, less than about 350 nucleotides, less than about 300 nucleotides, less than about 200 nucleotides, less than about 150 nucleotides, less than about 100 nucleotides, less than about 80 nucleotides, or less than about 40 nucleotides.

14. The rAAV transgene of any one of claims 9-13, wherein the second promoter is a pol III promoter selected from the group consisting of human U6 promoter, human U6 variant promoter, human U6 isoform variant promoter, mini U61 promoter, mini U62 promoter, mini U63 promoter, BiH1 (Bidrectional H1 promoter), BiU6 (Bidirectional U6 promoter), gorilla U6 promoter, rhesus U6 promoter, human 7sk promoter, and human HI promoter.

15. The rAAV transgene of claim 14, wherein the second promoter is a pol III promoter selected from the group consisting of human U6, human U6 variant, or human U6 isoform variant.

16. The rAAV transgene of claim 15, wherein the second promoter comprises a sequence selected from the group consisting of SEQ ID NOS: 3563, 3566-3582, 3599-3602, 3740-3746, 4025, 4029, 4032, and 4743 or a sequence having at least about 70%, at least about 80%, at least about 85%, at least about 90%, at least about 95%, at least about 95%, at least about 96%, at least about 97%, at least about 98%, or at least about 99% identity thereto.

17. The rAAV transgene of any one of claims 14-16, wherein the second promoter sequence has less than about 250 nucleotides, less than about 220 nucleotides, less than about 200 nucleotides, less than about 160 nucleotides, less than about 140 nucleotides, less than about 130 nucleotides, less than about 120 nucleotides, less than about 100 nucleotides, less than about 80 nucleotides, or less than about 70 nucleotides.

18. The rAAV transgene of any one of claims 9-17, wherein the poly(A) signal sequence is selected from the group consisting of SEQ ID NOS: 2401-3401, or a sequence having at least about 70%, at least about 80%, at least about 85%, at least about 90%, at least about 95%, at least about 95%, at least about 96%, at least about 97%, at least about 98%, or at least about 99% identity thereto.

19. The rAAV transgene of any one of claims 9-18, wherein the encoded NLS comprises a sequence selected from the group consisting of SEQ ID NOS: 3411-3486, 3939-3971, and 4065-4111.

20. The rAAV transgene of any one of claims 1-19, wherein the transgene comprises a polynucleotide sequence encoding a second gRNA with a linked targeting sequence of 15 to 20 nucleotides complementary to a different or overlapping region of a target nucleic acid of a cell, as compared to the targeting sequence of the first gRNA.

21. The rAAV transgene of any one of claims 1-20, wherein the first and/or the second gRNA each comprise:
a. a scaffold sequence selected from the group consisting of SEQ ID NOS: 2238-2400, 9257-9289 and 9588, or a sequence having at least about 70%, at least about 80%, at least about 85%, at least about 90%, at least about 91%, at least about 92%, at least about 93%, at least about 94%, at least about 95%, at least about 96%, at least about 97%, at least about 98%, or at least about 99% sequence identity thereto; or
b. a scaffold sequence selected from the group consisting of SEQ ID NOS: 2238-2400, 9257-9289 and 9588, further comprising at least 1, 2, 3, 4, or 5 mismatches thereto.

22. The rAAV transgene of claim 20 or claim 21, wherein the first and the second gRNA each comprise a scaffold sequence of SEQ ID NO: 2293 or SEQ ID NO: 9588.

23. The rAAV transgene of any one of claims 20-22, comprising a third promoter operably linked to the second gRNA.

24. The rAAV transgene of claim 23, wherein the third promoter is a pol III promoter selected from the group consisting of human U6, human U6 variant, human U6 isoform variant, mini U61, mini U62, mini U63, BiH1 (Bidirectional H1 promoter), BiU6 (Bidirectional U6 promoter), gorilla U6, rhesus U6, human 7sk, and human H1 promoters.

25. The rAAV transgene of claim 23, wherein the third promoter is a pol III promoter selected from the group consisting of human U6, human U6 variant, and human U6 isoform variant.

26. The rAAV transgene of claim any one of claims 23-25, wherein the third promoter comprises a sequence selected from the group consisting of SEQ ID NOS: 3563, 3566-3582, 3599-3602, 3740-3746, 4025, 4029, 4032, and 4743, or a sequence having at least about 70%, at least about 80%, at least about 85%, at least about 90%, at least about 95%, at least about 95%, at least about 96%, at least about 97%, at least about 98%, or at least about 99% identity thereto.

27. The rAAV transgene of any one of claims 23-26, wherein the third promoter sequence has less than about 250 nucleotides, less than about 220 nucleotides, less than about 200 nucleotides, less than about 160 nucleotides, less than about 140 nucleotides, less than about 130 nucleotides, less than about 120 nucleotides, less than about 100 nucleotides, less than about 80 nucleotides, or less than about 70 nucleotides.

28. The rAAV transgene of any one of claims 20-27, wherein:
a. the polynucleotide sequence encoding the first gRNA and the polynucleotide sequence encoding the second gRNA are 5′ of the polynucleotide sequence encoding the CasX protein;
b. the polynucleotide sequence encoding the first gRNA is 5′ of the polynucleotide sequence encoding the CasX protein and the polynucleotide sequence encoding the second gRNA is 3′ of the polynucleotide sequence encoding the CasX protein;
c. the polynucleotide sequence encoding the first gRNA is 3′ of the polynucleotide sequence encoding the CasX protein and the polynucleotide sequence encoding the second gRNA is 5′ of the polynucleotide sequence encoding the CasX protein; or
d. the polynucleotide sequence encoding the first gRNA and the polynucleotide sequence encoding the second gRNA are 3′ of the polynucleotide sequence encoding the CasX protein.

29. The rAAV transgene of any one of claims 20-28, wherein:
a. the polynucleotide sequence encoding the first gRNA and the polynucleotide sequence encoding the second gRNA are encoded in a forward orientation relative to the polynucleotide sequence encoding the CasX protein;
b. the polynucleotide sequence encoding the first gRNA is encoded in a forward orientation relative to the polynucleotide sequence encoding the CasX protein and the polynucleotide sequence encoding the second gRNA is encoded in a reverse orientation relative to the polynucleotide sequence encoding the CasX protein;
c. the polynucleotide sequence encoding the first gRNA is encoded in a reverse orientation relative to the polynucleotide sequence encoding the CasX protein and the polynucleotide sequence encoding the second gRNA is encoded in a forward orientation relative to the polynucleotide sequence encoding the CasX protein; or
d. the polynucleotide sequence encoding the first gRNA and the polynucleotide sequence encoding the second gRNA are encoded in a reverse orientation relative to the polynucleotide sequence encoding the CasX protein.

30. The rAAV transgene of any one of claims 20-29, wherein the transgene has less than about 4800, less than about 4750, less than about 4700, less than about 4650 nucleotides, or less than about 4600 nucleotides.

31. The rAAV transgene of any one of claims 20-30, wherein the rAAV transgene is configured for incorporation into an rAAV capsid.

32. The rAAV transgene of any one of claims 1-31, wherein one or more components of the transgene are optimized to reduce or deplete CpG motifs.

33. The rAAV transgene of claim 32, wherein the one or more components comprise less than about 10%, less than about 5%, or less than about 1% CpG dinucleotides.

34. The rAAV transgene of claim 32 or claim 33, wherein the CpG-depleted polynucleotide sequence encoding the CasX protein is selected from the group consisting of SEQ ID NOS: 9327-9333 and 9369-9380.

35. The rAAV transgene of claim 32 or claim 33, wherein the CpG-depleted polynucleotide sequence encodes a gRNA scaffold, and is selected from the group consisting of SEQ ID NOS: 3751-3772.

36. The rAAV transgene of claim 32 or claim 33, wherein the CpG-depleted polynucleotide sequence of the ITR is selected from the group consisting of SEQ ID NOS: 3749 and 3750.

37. The rAAV transgene of claim 32 or claim 33, wherein the CpG-depleted polynucleotide sequence of the promoter is selected from the group consisting of SEQ ID NOS: 3735-3746.

38. The rAAV transgene of claim 32 or claim 33, wherein the CpG-depleted polynucleotide sequence of the poly(A) signal is SEQ ID NO: 3748.

39. The rAAV transgene of any one of claims 1-38, wherein the transgene has the configuration of a construct depicted in any one of FIGS. 1, 25, 28, 38-40, 47 and 75.

40. A recombinant adeno-associated virus (rAAV) comprising:
a. an AAV capsid protein, and
b. the transgene of any one of claims 1-39.

41. The rAAV of claim 40, wherein the AAV capsid protein is derived from serotype AAV1, AAV2, AAV3, AAV4, AAV5, AAV6, AAV7, AAV8, AAV9, AAV10, AAV 11, AAV12, AAV 9.45, AAV 9.61, AAV 44.9, AAV-Rh74, AAVRh10, MyoAAV 1Al, MyoAAV 1A2, or MyoAAV 2A.

42. The rAAV of claim 41, wherein the AAV capsid protein and the 5′ and 3′ ITR are derived from the same serotype of AAV.

43. The rAAV of claim 41, wherein the AAV capsid protein and the 5′ and 3′ ITR are derived from different serotypes of AAV.

44. The rAAV of claim 43, wherein the 5′ and 3′ ITR are derived from AAV serotype 2.

45. The rAAV of any one of claims 40-44, wherein upon transduction of a cell with the rAAV, the CasX protein and the first and/or the second gRNA encoded in the rAAV transgene are expressed.

46. The rAAV of claim 45, wherein upon expression, the first and/or the second gRNA is capable of forming a ribonucleoprotein (RNP) complex with the CasX protein.

47. The rAAV of claim 46, wherein the RNP is capable of binding and modifying a target nucleic acid of the cell.

48. The rAAV of any one of claims 40-47, wherein inclusion of a poly(A) signal in the transgene enhances expression of the CasX protein and editing efficiency of a target nucleic acid in a cell transduced by the rAAV.

49. The rAAV of any one of claims 40-48, wherein inclusion of a posttranscriptional regulatory element (PTRE) accessory element in the transgene enhances editing efficiency of a target nucleic acid in a cell transduced by the rAAV.

50. The rAAV of claim 49, wherein the PTRE comprises a sequence selected from the group consisting of SEQ ID NOS: 3615-3617, or a sequence having at least about 70%, at least about 80%, at least about 85%, at least about 90%, at least about 95%, at least about 95%, at least about 96%, at least about 97%, at least about 98%, or at least about 99% identity thereto.

51. The rAAV of any one of claims 40-50, wherein components of the transgene modified for depletion of all or a portion of the CpG dinucleotides exhibit a lower potential for inducing an immune response in a cell transduced with the rAAV, compared to a rAAV wherein the components are not modified for depletion of the CpG dinucleotides.

52. The rAAV of claim 51, wherein the lower potential for inducing an immune response is exhibited in an in vitro mammalian cell assay designed to detect production of one or more markers of an inflammatory response selected from the group consisting of TLR9, interleukin-1 (IL-1), IL-6, IL-12, IL-18, tumor necrosis factor alpha (TNF-α), interferon gamma (IFNγ), and granulocyte-macrophage colony stimulating factor (GM-CSF).

53. The rAAV of claim 51 or claim 52, wherein the rAAV comprising the component sequences modified for depletion of all or a portion of the CpG dinucleotides elicits reduced production of the one or more inflammatory markers of at least about 10%, at least about 20%, at least about 30%, at least about 40%, at least about 50%, at least about 60%, at least about 80%, or at least about 90% less compared to the comparable rAAV that is not CpG depleted.

54. The rAAV of any one of claims 51-53, wherein the expressed CasX and the first and/or the second gRNA retain at least about 60%, at least about 70%, at least about 80%, or at least about 90% of the editing potential for a target nucleic acid compared to an rAAV wherein the transgene has not been optimized for depletion of CpG dinucleotides, when assayed in an in vitro assay under comparable conditions.

55. The rAAV of claim 40, wherein incorporation of a Pol II promoter selected from the group consisting of CK8e, MHCK7, and MHCK in the transgene of a rAAV used to transduce a muscle cell results in higher expression of the CasX protein in the muscle cell compared to incorporation of a UbC promoter.

56. The rAAV of claim 40, wherein incorporation of a muscle enhancer sequence selected from the group consisting of SEQ ID NOS: 3779-3809 in the transgene of a rAAV used to transduce a muscle cell results in higher expression of the CasX protein in the muscle cell compared to a rAAV not incorporating the muscle enhancer.

57. A method for modifying a target nucleic acid of a gene in a population of mammalian cells, comprising contacting a plurality of the cells with an effective amount of the rAAV of any one of claims 40-5656, wherein the target nucleic acid of the gene targeted by the first and/or the second gRNA is modified by the expressed CasX protein.

58. The method of claim 57, wherein the gene comprises one or more mutations.

59. The method of claim 57 or claim 58, wherein the modifying comprises introducing an insertion, deletion, substitution, duplication, or inversion of one or more nucleotides in the target nucleic acid of the cells of the population.

60. The method of any one of claims 57-59, wherein the gene is knocked down or knocked out.

61. The method of any one of claims 57-59, wherein the gene is modified such that a functional gene product can be expressed.

62. The method of any one of claims 57-61, wherein the rAAV comprises the first and the second gRNA, wherein the second gRNA comprises a targeting sequence complementary to a different target site in a gene targeted by the targeting sequence of the first gRNA, wherein the nucleotides between the target sites are excised by cleavage of the target sites by the CasX protein.

63. The method of any one of claims 57-61, wherein the rAAV comprises the first and the second gRNA, wherein the second gRNA comprises a targeting sequence complementary to a target site in a different gene targeted by the targeting sequence of the first gRNA, wherein the target nucleic acid at each target site is modified by the CasX protein.

64. A method of treating a disease in a subject caused by one or more mutations in a gene of the subject, comprising administering a therapeutically effective dose of the rAAV of any one of claims 40-56 to the subject.

65. The method of claim 62, wherein the rAAV is administered to the subject by a route of administration selected from subcutaneous, intradermal, intraneural, intranodal, intramedullary, intramuscular, intralumbar, intrathecal, subarachnoid, intraventricular, intracapsular, intravenous, intralymphatical, intraocular and intraperitoneal routes, and wherein the administration method is injection, transfusion, or implantation.

66. The method of claim 64 or claim 65, wherein the subject is selected from the group consisting of mouse, rat, pig, and non-human primate.

67. The method of claim 64 or claim 65, wherein the subject is a human.

68. A method of making a rAAV, comprising:
a. providing a population of packaging cells; and
b. transfecting the population of cells with:
i) a vector comprising the transgene of any one of claims 1-38;
ii) a vector comprising an Assembly-Activating Protein (AAP) gene; and
iii) a vector comprising rep and cap genomes.

69. The method of claim 68, wherein the packaging cell is selected from the group consisting of BHK cells, HEK293 cells, HEK293T cells, NSO cells, SP2/0 cells, YO myeloma cells, P3X63 mouse myeloma cells, PER cells, PER.C6 cells, hybridoma cells, NIH3T3 cells, COS cells, HeLa cells, and CHO cells.

70. The method of claim 68 or claim 69, the method further comprising recovering the rAAV.

71. The method of any one of claims 68-70, wherein the component sequences of the transgene are encompassed in a single recombinant adeno-associated virus particle.

72. A composition of a recombinant adeno-associated virus of any one of claims 40-56, for use in the manufacture of a medicament for the treatment of a disease in a human in need thereof.

73. A kit comprising the rAAV of any one of claim 40-56 and a suitable container.

74. The kit of claim 73, comprising a pharmaceutically acceptable carrier, diluent, buffer, or excipient.

The application's sequence listing, which the Patent Office published only in electronic form, follows.

SEQUENCE LISTING (9648 sequences)

SEQ ID NO: 1 - protein, 986 aa, unidentified
  REGION 1..986: note = Deltaproteobacteria sp.
MEKRINKIRKKLSADNATKPVSRSGPMKTLLVRVMTDDLKKRLEKRRKKPEVMPQVISNNAANNLRMLLDDYTKMKEAILQVYWQEFKDDHVGLMCKFAQPASKKIDQNKLKPEMDEKGNLTTAGFACSQCGQPLFVYKLEQVSEKGKAYTNYFGRCNVAEHEKLILLAQLKPEKDSDEAVTYSLGKFGQRALDFYSIHVTKESTHPVKPLAQIAGNRYASGPVGKALSDACMGTIASFLSKYQDIIIEHQKVVKGNQKRLESLRELAGKENLEYPSVTLPPQPHTKEGVDAYNEVIARVRMWVNLNLWQKLKLSRDDAKPLLRLKGFPSFPVVERRENEVDWWNTINEVKKLIDAKRDMGRVFWSGVTAEKRNTILEGYNYLPNENDHKKREGSLENPKKPAKRQFGDLLLYLEKKYAGDWGKVFDEAWERIDKKIAGLTSHIEREEARNAEDAQSKAVLTDWLRAKASFVLERLKEMDEKEFYACEIQLQKWYGDLRGNPFAVEAENRVVDISGFSIGSDGHSIQYRNLLAWKYLENGKREFYLLMNYGKKGRIRFTDGTDIKKSGKWQGLLYGGGKAKVIDLTFDPDDEQLIILPLAFGTRQGREFIWNDLLSLETGLIKLANGRVIEKTIYNKKIGRDEPALFVALTFERREVVDPSNIKPVNLIGVDRGENIPAVIALTDPEGCPLPEFKDSSGGPTDILRIGEGYKEKQRAIQAAKEVEQRRAGGYSRKFASKSRNLADDMVRNSARDLFYHAVTHDAVLVFENLSRGFGRQGKRTFMTERQYTKMEDWLTAKLAYEGLTSKTYLSKTLAQYTSKTCSNCGFTITTADYDGMLVRLKKTSDGWATTLNNKELKAEGQITYYNRYKRQTVEKELSAELDRLSEESGNNDISKWTKGRRDEALFLLKKRFSHRPVQEQFVCLDCGHEVHADEQAALNIARSWLFLNSNSTEFKSYKSGKQPFVGAWQAFYKRRLKEVWKPNA

SEQ ID NO: 2 - protein, 978 aa, unidentified
  REGION 1..978: note = Planctomycetes sp.
MQEIKRINKIRRRLVKDSNTKKAGKTGPMKTLLVRVMTPDLRERLENLRKKPENIPQPISNTSRANLNKLLTDYTEMKKAILHVYWEEFQKDPVGLMSRVAQPAPKNIDQRKLIPVKDGNERLTSSGFACSQCCQPLYVYKLEQVNDKGKPHTNYFGRCNVSEHERLILLSPHKPEANDELVTYSLGKFGQRALDFYSIHVTRESNHPVKPLEQIGGNSCASGPVGKALSDACMGAVASFLTKYQDIILEHQKVIKKNEKRLANLKDIASANGLAFPKITLPPQPHTKEGIEAYNNVVAQIVIWVNLNLWQKLKIGRDEAKPLQRLKGFPSFPLVERQANEVDWWDMVCNVKKLINEKKEDGKVFWQNLAGYKRQEALLPYLSSEEDRKKGKKFARYQFGDLLLHLEKKHGEDWGKVYDEAWERIDKKVEGLSKHIKLEEERRSEDAQSKAALTDWLRAKASFVIEGLKEADKDEFCRCELKLQKWYGDLRGKPFAIEAENSILDISGFSKQYNCAFIWQKDGVKKLNLYLIINYFKGGKLRFKKIKPEAFEANRFYTVINKKSGEIVPMEVNFNFDDPNLIILPLAFGKRQGREFIWNDLLSLETGSLKLANGRVIEKTLYNRRTRQDEPALFVALTFERREVLDSSNIKPMNLIGIDRGENIPAVIALTDPEGCPLSRFKDSLGNPTHILRIGESYKEKQRTIQAAKEVEQRRAGGYSRKYASKAKNLADDMVRNTARDLLYYAVTQDAMLIFENLSRGFGRQGKRTFMAERQYTRMEDWLTAKLAYEGLPSKTYLSKTLAQYTSKTCSNCGFTITSADYDRVLEKLKKTATGWMTTINGKELKVEGQITYYNRYKRQNVVKDLSVELDRLSEESVNNDISSWTKGRSGEALSLLKKRFSHRPVQEKFVCLNCGFETHADEQAALNIARSWLFLRSQEYKKYQTNKTTGNTDKRAFVETWQSFYRKKLKEVWKPAV

SEQ ID NO: 3 - protein, 855 aa, unidentified
  REGION 1..855: note = Candidatus Sungbacteria sp.
MDNANKPSTKSLVNTTRISDHFGVTPGQVTRVFSFGIIPTKRQYAIIERWFAAVEAARERLYGMLYAHFQENPPAYLKEKFSYETFFKGRPVLNGLRDIDPTIMTSAVFTALRHKAEGAMAAFHTNHRRLFEEARKKMREYAECLKANEALLRGAADIDWDKIVNALRTRLNTCLAPEYDAVIADFGALCAFRALIAETNALKGAYNHALNQMLPALVKVDEPEEAEESPRLRFFNGRINDLPKFPVAERETPPDTETIIRQLEDMARVIPDTAEILGYIHRIRHKAARRKPGSAVPLPQRVALYCAIRMERNPEEDPSTVAGHFLGEIDRVCEKRRQGLVRTPFDSQIRARYMDIISFRATLAHPDRWTEIQFLRSNAASRRVRAETISAPFEGFSWTSNRTNPAPQYGMALAKDANAPADAPELCICLSPSSAAFSVREKGGDLIYMRPTGGRRGKDNPGKEITWVPGSFDEYPASGVALKLRLYFGRSQARRMLTNKTWGLLSDNPRVFAANAELVGKKRNPQDRWKLFFHMVISGPPPVEYLDFSSDVRSRARTVIGINRGEVNPLAYAVVSVEDGQVLEEGLLGKKEYIDQLIETRRRISEYQSREQTPPRDLRQRVRHLQDTVLGSARAKIHSLIAFWKGILAIERLDDQFHGREQKIIPKKTYLANKTGFMNALSFSGAVRVDKKGNPWGGMIEIYPGGISRTCTQCGTVWLARRPKNPGHRDAMVVIPDIVDDAAATGFDNVDCDAGTVDYGELFTLSREWVRLTPRYSRVMRGTLGDLERAIRQGDDRKSRQMLELALEPQPQWGQFFCHRCGFNGQSDVLAATNLARRAISLIRRLPDTDTPPTP

SEQ ID NO: 4 - RNA, 108 nt, synthetic construct
  misc_feature 1..108: note = gRNA sequence
  source 1..108: mol_type = other RNA
acatctggcgcgtttattccattactttggagccagtcccagcgactatgtcgtatggacgaagcgcttatttatcggagagaaaccgataagtaaaacgcatcaaag

SEQ ID NO: 5 - RNA, 108 nt, synthetic construct
  misc_feature 1..108: note = gRNA sequence
  source 1..108: mol_type = other RNA
tactggcgcttttatctcattactttgagagccatcaccagcgactatgtcgtatgggtaaagcgcttatttatcggagagaaatccgataaataagaagcatcaaag

SEQ ID NO: 6 - RNA, 81 nt, synthetic construct
  misc_feature 1..81: note = gRNA sequence
  source 1..81: mol_type = other RNA
acatctggcgcgtttattccattactttggagccagtcccagcgactatgtcgtatggacgaagcgcttatttatcggaga

SEQ ID NO: 7 - RNA, 78 nt, synthetic construct
  misc_feature 1..78: note = gRNA sequence
  source 1..78: mol_type = other RNA
acatctggcgcgtttattccattactttggagccagtcccagcgactatgtcgtatggacgaagcgcttatttatcgg

SEQ ID NO: 8 - RNA, 80 nt, synthetic construct
  misc_feature 1..80: note = gRNA sequence
  source 1..80: mol_type = other RNA
tactggcgcttttatctcattactttgagagccatcaccagcgactatgtcgtatgggtaaagcgcttatttatcggaga

SEQ ID NO: 9 - RNA, 77 nt, synthetic construct
  misc_feature 1..77: note = gRNA sequence
  source 1..77: mol_type = other RNA
tactggcgcttttatctcattactttgagagccatcaccagcgactatgtcgtatgggtaaagcgcttatttatcgg

SEQ ID NO: 10 - RNA, 25 nt, synthetic construct
  misc_feature 1..25: note = gRNA sequence
  source 1..25: mol_type = other RNA
gtttacacactccctctcatagggt

SEQ ID NO: 11 - RNA, 25 nt, synthetic construct
  misc_feature 1..25: note = gRNA sequence
  source 1..25: mol_type = other RNA
gtttacacactccctctcatgaggt

SEQ ID NO: 12 - RNA, 25 nt, synthetic construct
  misc_feature 1..25: note = gRNA sequence
  source 1..25: mol_type = other RNA
ttttacataccccctctcatgggat

SEQ ID NO: 13 - RNA, 25 nt, synthetic construct
  misc_feature 1..25: note = gRNA sequence
  source 1..25: mol_type = other RNA
gtttacacactccctctcatggggg

SEQ ID NO: 14 - RNA, 20 nt, synthetic construct
  misc_feature 1..20: note = gRNA sequence
  source 1..20: mol_type = other RNA
ccagcgactatgtcgtatgg

SEQ ID NO: 15 - RNA, 39 nt, synthetic construct
  misc_feature 1..39: note = gRNA sequence
  source 1..39: mol_type = other RNA
gcgcttatttatcggagagaaatccgataaataagaagc

SEQ ID NO: 16 - RNA, 74 nt, synthetic construct
  misc_feature 1..74: note = gRNA sequence
  source 1..74: mol_type = other RNA
ggcgcttttatctcattactttgagagccatcaccagcgactatgtcgtatgggtaaagcgcttatttatcgga

SEQ ID NO: 17 - DNA, 130 bp, synthetic construct
  misc_feature 1..130: note = 5' ITR
  source 1..130: mol_type = other DNA
cctgcaggcagctgcgcgctcgctcgctcactgaggccgcccgggcgtcgggcgacctttggtcgcccggcctcagtgagcgagcgagcgcgcagagagggagtggccaactccatcactaggggttcct

SEQ ID NO: 18 - DNA, 141 bp, synthetic construct
  misc_feature 1..141: note = 3' ITR
  source 1..141: mol_type = other DNA
aggaacccctagtgatggagttggccactccctctctgcgcgctcgctcgctcactgaggccgggcgaccaaaggtcgcccgacgcccgggctttgcccgggcggcctcagtgagcgagcgagcgcgcagctgcctgcagg

SEQ ID NO: 19 - skipped

SEQ ID NO: 20 - protein, 25 aa, synthetic construct
  REGION 1..25: note = Linker
  VARIANT 6..10: note = grouped amino acid residues may be present or absent
  VARIANT 11..15: note = grouped amino acid residues may be present or absent
  VARIANT 16..20: note = grouped amino acid residues may be present or absent
  VARIANT 21..25: note = grouped amino acid residues may be present or absent
GSGGSGSGGSGSGGSGSGGSGSGGS

SEQ ID NO: 21 - protein, 30 aa, synthetic construct
  REGION 1..30: note = Linker
  VARIANT 7..12: note = grouped amino acid residues may be present or absent
  VARIANT 13..18: note = grouped amino acid residues may be present or absent
  VARIANT 19..24: note = grouped amino acid residues may be present or absent
  VARIANT 25..30: note = grouped amino acid residues may be present or absent
GGSGGSGGSGGSGGSGGSGGSGGSGGSGGS

SEQ ID NO: 22 - protein, 20 aa, synthetic construct
  REGION 1..20: note = Linker
  VARIANT 5..8: note = grouped amino acid residues may be present or absent
  VARIANT 9..12: note = grouped amino acid residues may be present or absent
  VARIANT 13..16: note = grouped amino acid residues may be present or absent
  VARIANT 17..20: note = grouped amino acid residues may be present or absent
GGGSGGGSGGGSGGGSGGGS

SEQ ID NO: 23 - protein, 4 aa, synthetic construct
  REGION 1..4: note = Linker
GGSG

SEQ ID NO: 24 - protein, 5 aa, synthetic construct
  REGION 1..5: note = Linker
GGSGG

SEQ ID NO: 25 - protein, 5 aa, synthetic construct
  REGION 1..5: note = Linker
GSGSG

SEQ ID NO: 26 - protein, 5 aa, synthetic construct
  REGION 1..5: note = Linker
  VARIANT 2..5: note = individual amino acid residues may be present or absent
GGGGG

SEQ ID NO: 27 - protein, 10 aa, synthetic construct
  REGION 1..10: note = Linker
  VARIANT 3..4: note = grouped amino acid residues may be present or absent
  VARIANT 5..6: note = grouped amino acid residues may be present or absent
  VARIANT 7..8: note = grouped amino acid residues may be present or absent
  VARIANT 9..10: note = grouped amino acid residues may be present or absent
GSGSGSGSGS

SEQ ID NO: 28 - protein, 5 aa, synthetic construct
  REGION 1..5: note = Linker
GSGGG

SEQ ID NO: 29 - protein, 4 aa, synthetic construct
  REGION 1..4: note = Linker
GPGP

SEQ ID NO: 30 - protein, 6 aa, synthetic construct
  REGION 1..6: note = Linker
PPAPPA

SEQ ID NO: 31 - protein, 7 aa, synthetic construct
  REGION 1..7: note = Linker
PPPGPPP

SEQ ID NO: 32 - protein, 23 aa, synthetic construct
  REGION 1..23: note = Linker
  VARIANT 1..4: note = grouped amino acid residues may be present or absent
  VARIANT 5..8: note = grouped amino acid residues may be present or absent
  VARIANT 9..12: note = grouped amino acid residues may be present or absent
  VARIANT 13..16: note = grouped amino acid residues may be present or absent
GGGSGGGSGGGSGGGSGGGSPPP

SEQ ID NO: 33 - protein, 17 aa, synthetic construct
  REGION 1..17: note = Linker
AEAAAKEAAAKEAAAKA

SEQ ID NO: 34 - protein, 12 aa, synthetic construct
  REGION 1..12: note = Linker
TPPKTKRKVEFE

SEQ ID NO: 35 - protein, 15 aa, synthetic construct
  REGION 1..15: note = Linker
  VARIANT 4..6: note = grouped amino acid residues may be present or absent
  VARIANT 7..9: note = grouped amino acid residues may be present or absent
  VARIANT 10..12: note = grouped amino acid residues may be present or absent
  VARIANT 13..15: note = grouped amino acid residues may be present or absent
GGSGGSGGSGGSGGS

SEQ ID NO: 36 - protein, 7 aa, synthetic construct
  REGION 1..7: note = Linker
GSGSGGG

SEQ ID NO: 37 - protein, 10 aa, synthetic construct
  REGION 1..10: note = Linker
  VARIANT 3..4: note = grouped amino acid residues may be present or absent
  VARIANT 5..6: note = grouped amino acid residues may be present or absent
  VARIANT 7..8: note = grouped amino acid residues may be present or absent
  VARIANT 9..10: note = grouped amino acid residues may be present or absent
GPGPGPGPGP

SEQ ID NO: 38 - protein, 7 aa, synthetic construct
  REGION 1..7: note = Linker
GGSGGGS

SEQ ID NO: 39 - protein, 6 aa, synthetic construct
  REGION 1..6: note = Linker
PPGPPP

SEQ ID NO: 40 - skipped

SEQ ID NO: 41 - protein, 12 aa, synthetic construct
  REGION 1..12: note = Linker
AEAAAKEAAAKA

SEQ ID NO: 42 - protein, 15 aa, synthetic construct
  REGION 1..15: note = Linker
SGETPGTSESATPES

SEQ ID NO: 43 - protein, 6 aa, synthetic construct
  REGION 1..6: note = Linker
GGGSPP

SEQ ID NO: 44 - protein, 22 aa, synthetic construct
  REGION 1..22: note = Linker
  VARIANT 7..10: note = grouped amino acid residues may be present or absent
  VARIANT 11..14: note = grouped amino acid residues may be present or absent
  VARIANT 15..18: note = grouped amino acid residues may be present or absent
  VARIANT 19..22: note = grouped amino acid residues may be present or absent
PPGGGSGGGSGGGSGGGSGGGS

SEQ ID NO: 45 - protein, 5 aa, synthetic construct
  REGION 1..5: note = Linker
GGGSG

SEQ ID NO: 46 - protein, 5 aa, synthetic construct
  REGION 1..5: note = Linker
GSSSG

SEQ ID NO: 47 - protein, 4 aa, synthetic construct
  REGION 1..4: note = Linker
PPPG

SEQ ID NO: 48 - DNA, 103 bp, synthetic construct
  misc_feature 1..103: note = promoter
  source 1..103: mol_type = other DNA
gagggcctatttcccatgattccttcatatttgcatatacgatagcttaccgtaacttgaaagtatttcgatttcttggctttatatctcttgtggaaaggac

SEQ ID NO: 49 - DNA, 103 bp, synthetic construct
  misc_feature 1..103: note = promoter
  source 1..103: mol_type = other DNA
gagggcctatttcccatgattccttcatatttgcatatacgatagcttaccgtaacttgaaagtatttcgatttcttggctttatatgtcttgtggaaaggac

SEQ ID NO: 50 - DNA, 103 bp, synthetic construct
  misc_feature 1..103: note = promoter
  source 1..103: mol_type = other DNA
gagggcctatttcccatgattccttcatatttgcatatacgatagcttaccgtaacttgaaagtatttcgatttcttggctttatatttcttgtggaaaggac

SEQ ID NO: 51 - DNA, 103 bp, synthetic construct
  misc_feature 1..103: note = promoter
  source 1..103: mol_type = other DNA
gagggcctatttcccatgattccttcatatttgcatatacgatagcttaccgtaacttgaaagtatttcgatttcttggctttatataacttgtggaaaggac

SEQ ID NO: 52 - DNA, 103 bp, synthetic construct
  misc_feature 1..103: note = promoter
  source 1..103: mol_type = other DNA
gagggcctatttcccatgattccttcatatttgcatatacgatagcttaccgtaacttgaaagtatttcgatttcttggctttatataccttgtggaaaggac

SEQ ID NO: 53 - DNA, 103 bp, synthetic construct
  misc_feature 1..103: note = promoter
  source 1..103: mol_type = other DNA
gagggcctatttcccatgattccttcatatttgcatatacgatagcttaccgtaacttgaaagtatttcgatttcttggctttatatagcttgtggaaaggac

SEQ ID NO: 54 - DNA, 103 bp, synthetic construct
  misc_feature 1..103: note = promoter
  source 1..103: mol_type = other DNA
gagggcctatttcccatgattccttcatatttgcatatacgatagcttaccgtaacttgaaagtatttcgatttcttggctttatatatattgtggaaaggac

SEQ ID NO: 55 - DNA, 103 bp, synthetic construct
  misc_feature 1..103: note = promoter
  source 1..103: mol_type = other DNA
gagggcctatttcccatgattccttcatatttgcatatacgatagcttaccgtaacttgaaagtatttcgatttcttggctttatatatgttgtggaaaggac

SEQ ID NO: 56 - DNA, 103 bp, synthetic construct
  misc_feature 1..103: note = promoter
  source 1..103: mol_type = other DNA
gagggcctatttcccatgattccttcatatttgcatatacgatagcttaccgtaacttgaaagtatttcgatttcttggctttatatattttgtggaaaggac

SEQ ID NO: 57 - DNA, 103 bp, synthetic construct
  misc_feature 1..103: note = promoter
  source 1..103: mol_type = other DNA
gagggcctatttcccatgattccttcatatttgcatatacgatagcttaccgtaacttgaaagtatttcgatttcttggctttatatatcatgtggaaaggac

SEQ ID NO: 58 - DNA, 103 bp, synthetic construct
  misc_feature 1..103: note = promoter
  source 1..103: mol_type = other DNA
gagggcctatttcccatgattccttcatatttgcatatacgatagcttaccgtaacttgaaagtatttcgatttcttggctttatatatcctgtggaaaggac

SEQ ID NO: 59 - DNA, 103 bp, synthetic construct
  misc_feature 1..103: note = promoter
  source 1..103: mol_type = other DNA
gagggcctatttcccatgattccttcatatttgcatatacgatagcttaccgtaacttgaaagtatttcgatttcttggctttatatatcgtgtggaaaggac

SEQ ID NO: 60 - DNA, 103 bp, synthetic construct
  misc_feature 1..103: note = promoter
  source 1..103: mol_type = other DNA
gagggcctatttcccatgattccttcatatttgcatatacgatagcttaccgtaacttgaaagtatttcgatttcttggctttatatatctagtggaaaggac

SEQ ID NO: 61 - DNA, 103 bp, synthetic construct
  misc_feature 1..103: note = promoter
  source 1..103: mol_type = other DNA
gagggcctatttcccatgattccttcatatttgcatatacgatagcttaccgtaacttgaaagtatttcgatttcttggctttatatatctcgtggaaaggac

SEQ ID NO: 62 - DNA, 103 bp, synthetic construct
  misc_feature 1..103: note = promoter
  source 1..103: mol_type = other DNA
gagggcctatttcccatgattccttcatatttgcatatacgatagcttaccgtaacttgaaagtatttcgatttcttggctttatatatctggtggaaaggac

SEQ ID NO: 63 - DNA, 103 bp, synthetic construct
  misc_feature 1..103: note = promoter
  source 1..103: mol_type = other DNA
gagggcctatttcccatgattccttcatatttgcatatacgatagcttaccgtaacttgaaagtatttcgatttcttggctttatatatcttatggaaaggac

SEQ ID NO: 64 - DNA, 103 bp, synthetic construct
  misc_feature 1..103: note = promoter
  source 1..103: mol_type = other DNA
gagggcctatttcccatgattccttcatatttgcatatacgatagcttaccgtaacttgaaagtatttcgatttcttggctttatatatcttctggaaaggac

SEQ ID NO: 65 - DNA, 103 bp, synthetic construct
  misc_feature 1..103: note = promoter
  source 1..103: mol_type = other DNA
gagggcctatttcccatgattccttcatatttgcatatacgatagcttaccgtaacttgaaagtatttcgatttcttggctttatatatcttttggaaaggac

SEQ ID NO: 66 - DNA, 103 bp, synthetic construct
  misc_feature 1..103: note = promoter
  source 1..103: mol_type = other DNA
gagggcctatttcccatgattccttcatatttgcatatacgatagcttaccgtaacttgaaagtatttcgatttcttggctttatatatcttgaggaaaggac

SEQ ID NO: 67 - DNA, 103 bp, synthetic construct
  misc_feature 1..103: note = promoter
  source 1..103: mol_type = other DNA
gagggcctatttcccatgattccttcatatttgcatatacgatagcttaccgtaacttgaaagtatttcgatttcttggctttatatatcttgcggaaaggac

SEQ ID NO: 68 - DNA, 103 bp, synthetic construct
  misc_feature 1..103: note = promoter
  source 1..103: mol_type = other DNA
gagggcctatttcccatgattccttcatatttgcatatacgatagcttaccgtaacttgaaagtatttcgatttcttggctttatatatcttggggaaaggac

SEQ ID NO: 69 - DNA, 103 bp, synthetic construct
  misc_feature 1..103: note = promoter
  source 1..103: mol_type = other DNA
gagggcctatttcccatgattccttcatatttgcatatacgatagcttaccgtaacttgaaagtatttcgatttcttggctttatatatcttgtagaaaggac

SEQ ID NO: 70 - DNA, 103 bp, synthetic construct
  misc_feature 1..103: note = promoter
  source 1..103: mol_type = other DNA
gagggcctatttcccatgattccttcatatttgcatatacgatagcttaccgtaacttgaaagtatttcgatttcttggctttatatatcttgtcgaaaggac

SEQ ID NO: 71 - DNA, 103 bp, synthetic construct
  misc_feature 1..103: note = promoter
  source 1..103: mol_type = other DNA
gagggcctatttcccatgattccttcatatttgcatatacgatagcttaccgtaacttgaaagtatttcgatttcttggctttatatatcttgttgaaaggac

SEQ ID NO: 72 - DNA, 103 bp, synthetic construct
  misc_feature 1..103: note = promoter
  source 1..103: mol_type = other DNA
gagggcctatttcccatgattccttcatatttgcatatacgatagcttaccgtaacttgaaagtatttcgatttcttggctttatatatcttgtgaaaaggac

SEQ ID NO: 73 - DNA, 103 bp, synthetic construct
  misc_feature 1..103: note = promoter
  source 1..103: mol_type = other DNA
gagggcctatttcccatgattccttcatatttgcatatacgatagcttaccgtaacttgaaagtatttcgatttcttggctttatatatcttgtgcaaaggac

SEQ ID NO: 74 - DNA, 103 bp, synthetic construct
  misc_feature 1..103: note = promoter
  source 1..103: mol_type = other DNA
gagggcctatttcccatgattccttcatatttgcatatacgatagcttaccgtaacttgaaagtatttcgatttcttggctttatatatcttgtgtaaaggac

SEQ ID NO: 75 - DNA, 103 bp, synthetic construct
  misc_feature 1..103: note = promoter
  source 1..103: mol_type = other DNA
gagggcctatttcccatgattccttcatatttgcatatacgatagcttaccgtaacttgaaagtatttcgatttcttggctttatatatcttgtggcaaggac

SEQ ID NO: 76 - DNA, 103 bp, synthetic construct
  misc_feature 1..103: note = promoter
  source 1..103: mol_type = other DNA
gagggcctatttcccatgattccttcatatttgcatatacgatagcttaccgtaacttgaaagtatttcgatttcttggctttatatatcttgtgggaaggac

SEQ ID NO: 77 - DNA, 103 bp, synthetic construct
  misc_feature 1..103: note = promoter
  source 1..103: mol_type = other DNA
gagggcctatttcccatgattccttcatatttgcatatacgatagcttaccgtaacttgaaagtatttcgatttcttggctttatatatcttgtggtaaggac

SEQ ID NO: 78 - DNA, 103 bp, synthetic construct
  misc_feature 1..103: note = promoter
  source 1..103: mol_type = other DNA
gagggcctatttcccatgattccttcatatttgcatatacgatagcttaccgtaacttgaaagtatttcgatttcttggctttatatatcttgtggacaggac

SEQ ID NO: 79 - DNA, 103 bp, synthetic construct
  misc_feature 1..103: note = promoter
  source 1..103: mol_type = other DNA
gagggcctatttcccatgattccttcatatttgcatatacgatagcttaccgtaacttgaaagtatttcgatttcttggctttatatatcttgtggagaggac

SEQ ID NO: 80 - DNA, 103 bp, synthetic construct
  misc_feature 1..103: note = promoter
  source 1..103: mol_type = other DNA
gagggcctatttcccatgattccttcatatttgcatatacgatagcttaccgtaacttgaaagtatttcgatttcttggctttatatatcttgtggataggac

SEQ ID NO: 81 - DNA, 103 bp, synthetic construct
  misc_feature 1..103: note = promoter
  source 1..103: mol_type = other DNA
gagggcctatttcccatgattccttcatatttgcatatacgatagcttaccgtaacttgaaagtatttcgatttcttggctttatatatcttgtggaacggac

SEQ ID NO: 82 - DNA, 103 bp, synthetic construct
  misc_feature 1..103: note = promoter
  source 1..103: mol_type = other DNA
gagggcctatttcccatgattccttcatatttgcatatacgatagcttaccgtaacttgaaagtatttcgatttcttggctttatatatcttgtggaagggac

SEQ ID NO: 83 - DNA, 103 bp, synthetic construct
  misc_feature 1..103: note = promoter
  source 1..103: mol_type = other DNA
gagggcctatttcccatgattccttcatatttgcatatacgatagcttaccgtaacttgaaagtatttcgatttcttggctttatatatcttgtggaatggac

SEQ ID NO: 84 - DNA, 103 bp, synthetic construct
  misc_feature 1..103: note = promoter
  source 1..103: mol_type = other DNA
gagggcctatttcccatgattccttcatatttgcatatacgatagcttaccgtaacttgaaagtatttcgatttcttggctttatatatcttgtggaaaagac

SEQ ID NO: 85 - DNA, 103 bp, synthetic construct
  misc_feature 1..103: note = promoter
  source 1..103: mol_type = other DNA
gagggcctatttcccatgattccttcatatttgcatatacgatagcttaccgtaacttgaaagtatttcgatttcttggctttatatatcttgtggaaacgac

SEQ ID NO: 86 - DNA, 103 bp, synthetic construct
  misc_feature 1..103: note = promoter
  source 1..103: mol_type = other DNA
gagggcctatttcccatgattccttcatatttgcatatacgatagcttaccgtaacttgaaagtatttcgatttcttggctttatatatcttgtggaaatgac

SEQ ID NO: 87 - DNA, 103 bp, synthetic construct
  misc_feature 1..103: note = promoter
  source 1..103: mol_type = other DNA
gagggcctatttcccatgattccttcatatttgcatatacgatagcttaccgtaacttgaaagtatttcgatttcttggctttatatatcttgtggaaagaac

SEQ ID NO: 88 - DNA, 103 bp, synthetic construct
  misc_feature 1..103: note = promoter
  source 1..103: mol_type = other DNA
gagggcctatttcccatgattccttcatatttgcatatacgatagcttaccgtaacttgaaagtatttcgatttcttggctttatatatcttgtggaaagcac

SEQ ID NO: 89 - DNA, 103 bp, synthetic construct
  misc_feature 1..103: note = promoter
  source 1..103: mol_type = other DNA
gagggcctatttcccatgattccttcatatttgcatatacgatagcttaccgtaacttgaaagtatttcgatttcttggctttatatatcttgtggaaagtac

SEQ ID NO: 90 - DNA, 103 bp, synthetic construct
  misc_feature 1..103: note = promoter
  source 1..103: mol_type = other DNA
gagggcctatttcccatgattccttcatatttgcatatacgatagcttaccgtaacttgaaagtatttcgatttcttggctttatatatcttgtggaaaggcc

SEQ ID NO: 91 - DNA, 103 bp, synthetic construct
  misc_feature 1..103: note = promoter
  source 1..103: mol_type = other DNA
gagggcctatttcccatgattccttcatatttgcatatacgatagcttaccgtaacttgaaagtatttcgatttcttggctttatatatcttgtggaaagggc

SEQ ID NO: 92 - DNA, 103 bp, synthetic construct
  misc_feature 1..103: note = promoter
  source 1..103: mol_type = other DNA
gagggcctatttcccatgattccttcatatttgcatatacgatagcttaccgtaacttgaaagtatttcgatttcttggctttatatatcttgtggaaaggtc

SEQ ID NO: 93 - DNA, 103 bp, synthetic construct
  misc_feature 1..103: note = promoter
  source 1..103: mol_type = other DNA
gagggcctatttcccatgattccttcatatttgcatatacgatagcttaccgtaacttgaaagtatttcgatttcttggctttatatatcttgtggaaaggaa

SEQ ID NO: 94 - DNA, 103 bp, synthetic construct
  misc_feature 1..103: note = promoter
  source 1..103: mol_type = other DNA
gagggcctatttcccatgattccttcatatttgcatatacgatagcttaccgtaacttgaaagtatttcgatttcttggctttatatatcttgtggaaaggag

SEQ ID NO: 95 - DNA, 103 bp, synthetic construct
  misc_feature 1..103: note = promoter
  source 1..103: mol_type = other DNA
gagggcctatttcccatgattccttcatatttgcatatacgatagcttaccgtaacttgaaagtatttcgatttcttggctttatatatcttgtggaaaggat

SEQ ID NO: 96 - DNA, 103 bp, synthetic construct
  misc_feature 1..103: note = promoter
  source 1..103: mol_type = other DNA
gagggcctatttcccatgattccttcatatttgcatatacatctgcttaccgtaactttaaagtatttcgatttcttgactttatatatcttgtggaaaggac

SEQ ID NO: 97 - DNA, 102 bp, synthetic construct
  misc_feature 1..102: note = promoter
  source 1..102: mol_type = other DNA
gagggcctatttcccatggttccttcatatttgcatagaggatacttaccgtaactgaaaagtctttcgttttctcaactttatatatcttccggaaaggac

SEQ ID NO: 98 - DNA, 102 bp, synthetic construct
  misc_feature 1..102: note = promoter
  source 1..102: mol_type = other DNA
gagggcctatttcccatgagtccttcatatttgcatatacgatacttgccgtaagtgtaaagtatttctatttcttgcctttatatatcttctggcaaggac

SEQ ID NO: 99 - DNA, 102 bp, synthetic construct
  misc_feature 1..102: note = promoter
  source 1..102: mol_type = other DNA
gagggcctatttcccatgagtccttcatatttgcatatacgatacttaccgtaagtgtaaagtatttctatttcttgcctttatataccttctggcaaggac

SEQ ID NO: 100 - DNA, 102 bp, synthetic construct
  misc_feature 1..102: note = promoter
  source 1..102: mol_type = other DNA
gagggcctatttcccatgaatgttttaaaattaactatcacatacttaccgtaagtttaaagtagtttgatttcttgcctttatatatcttctggcaaggac

SEQ ID NO: 101 - protein, 978 aa, synthetic construct
  REGION 1..978: note = CasX variant
MQEIKRINKIRRRLVKDSNTKKAGKTGPMKTLLVRVMTPDLRERLENLRKKPENIPQPISNTSRANLNKLLTDYTEMKKAILHVYWEEFQKDPVGLMSRVAQPASKKIDQNKLKPEMDEKGNLTTAGFACSQCGQPLFVYKLEQVSEKGKAYTNYFGRCNVAEHEKLILLAQLKPEKDSDEAVTYSLGKFGQRALDFYSIHVTRESNHPVKPLEQIGGNSCASGPVGKALSDACMGAVASFLTKYQDIILEHQKVIKKNEKRLANLKDIASANGLAFPKITLPPQPHTKEGIEAYNNVVAQIVIWVNLNLWQKLKIGRDEAKPLQRLKGFPSFPLVERQANEVDWWDMVCNVKKLINEKKEDGKVFWQNLAGYKRQEALRPYLSSEEDRKKGKKFARYQFGDLLLHLEKKHGEDWGKVYDEAWERIDKKVEGLSKHIKLEEERRSEDAQSKAALTDWLRAKASFVIEGLKEADKDEFCRCELKLQKWYGDLRGKPFAIEAENSILDISGFSKQYNCAFIWQKDGVKKLNLYLIINYFKGGKLRFKKIKPEAFEANRFYTVINKKSGEIVPMEVNFNFDDPNLIILPLAFGKRQGREFIWNDLLSLETGSLKLANGRVIEKTLYNRRTRQDEPALFVALTFERREVLDSSNIKPMNLIGIDRGENIPAVIALTDPEGCPLSRFKDSLGNPTHILRIGESYKEKQRTIQAKKEVEQRRAGGYSRKYASKAKNLADDMVRNTARDLLYYAVTQDAMLIFENLSRGFGRQGKRTFMAERQYTRMEDWLTAKLAYEGLSKTYLSKTLAQYTSKTCSNCGFTITSADYDRVLEKLKKTATGWMTTINGKELKVEGQITYYNRYKRQNVVKDLSVELDRLSEESVNNDISSWTKGRSGEALSLLKKRFSHRPVQEKFVCLNCGFETHADEQAALNIARSWLFLRSQEYKKYQTNKTTGNTDKRAFVETWQSFYRKKLKEVWKPAV

SEQ ID NO: 102 - protein, 977 aa, synthetic construct
  REGION 1..977: note = CasX variant
MQEIKRINKIRRRLVKDSNTKKAGKTGPMKTLLVRVMTPDLRERLENLRKKPENIPQPISNTSRANLNKLLTDYTEMKKAILHVYWEEFQKDPVGLMSRVAQPAPKNIDQRKLIPVKDGNERLTSSGFACSQCCQPLYVYKLEQVNDKGKPHTNYFGRCNVSEHERLILLSPHKPEANDELVTYSLGKFGQRALDFYSIHVTRESNHPVKPLEQIGGNSCASGPVGKALSDACMGAVASFLTKYQDIILEHQKVIKKNEKRLANLKDIASANGLAFPKITLPPQPHTKEGIEAYNNVVAQIVIWVNLNLWQKLKIGRDEAKPLQRLKGFPSFPLVERQANEVDWWDMVCNVKKLINEKKEDGKVFWQNLAGYKRQEALRPYLSSEEDRKKGKKFARYQFGDLLLHLEKKHGEDWGKVYDEAWERIDKKVEGLSKHIKLEEERRSEDAQSKAALTDWLRAKASFVIEGLKEADKDEFCRCELKLQKWYGDLRGKPFAIEAENSILDISGFSKQYNCAFIWQKDGVKKLNLYLIINYFKGGKLRFKKIKPEAFEANRFYTVINKKSGEIVPMEVNFNFDDPNLIILPLAFGKRQGREFIWNDLLSLETGSLKLANGRVIEKTLYNRRTRQDEPALFVALTFERREVLDSSNIKPMNLIGIDRGENIPAVIALTDPEGCPLSRFKDSLGNPTHILRIGESYKEKQRTIQAKKEVEQRRAGGYSRKYASKAKNLADDMVRNTARDLLYYAVTQDAMLIFENLSRGFGRQGKRTFMAERQYTRMEDWLTAKLAYEGLSKTYLSKTLAQYTSKTCSNCGFTITTADYDGMLVRLKKTSDGWATTLNNKELKAEGQITYYNRYKRQTVEKELSAELDRLSEESGNNDISKWTKGRRDEALFLLKKRFSHRPVQEQFVCLDCGHEVHADEQAALNIARSWLFLRSQEYKKYQTNKTTGNTDKRAFVETWQSFYRKKLKEVWKPAV

SEQ ID NO: 103 - protein, 985 aa, synthetic construct
  REGION 1..985: note = CasX variant
MEKRINKIRKKLSADNATKPVSRSGPMKTLLVRVMTDDLKKRLEKRRKKPEVMPQVISNNAANNLRMLLDDYTKMKEAILQVYWQEFKDDHVGLMCKFAQPAPKNIDQRKLIPVKDGNERLTSSGFACSQCCQPLYVYKLEQVNDKGKPHTNYFGRCNVSEHERLILLSPHKPEANDELVTYSLGKFGQRALDFYSIHVTKESTHPVKPLAQIAGNRYASGPVGKALSDACMGTIASFLSKYQDIIIEHQKVVKGNQKRLESLRELAGKENLEYPSVTLPPQPHTKEGVDAYNEVIARVRMWVNLNLWQKLKLSRDDAKPLLRLKGFPSFPVVERRENEVDWWNTINEVKKLIDAKRDMGRVFWSGVTAEKRNTILEGYNYLPNENDHKKREGSLENPKKPAKRQFGDLLLYLEKKYAGDWGKVFDEAWERIDKKIAGLTSHIEREEARNAEDAQSKAVLTDWLRAKASFVLERLKEMDEKEFYACEIQLQKWYGDLRGNPFAVEAENRVVDISGFSIGSDGHSIQYRNLLAWKYLENGKREFYLLMNYGKKGRIRFTDGTDIKKSGKWQGLLYGGGKAKVIDLTFDPDDEQLIILPLAFGTRQGREFIWNDLLSLETGLIKLANGRVIEKTIYNKKIGRDEPALFVALTFERREVVDPSNIKPVNLIGVDRGENIPAVIALTDPEGCPLPEFKDSSGGPTDILRIGEGYKEKQRAIQAAKEVEQRRAGGYSRKFASKSRNLADDMVRNSARDLFYHAVTHDAVLVFENLSRGFGRQGKRTFMTERQYTKMEDWLTAKLAYEGLTSKTYLSKTLAQYTSKTCSNCGFTITTADYDGMLVRLKKTSDGWATTLNNKELKAEGQITYYNRYKRQTVEKELSAELDRLSEESGNNDISKWTKGRRDEALFLLKKRFSHRPVQEQFVCLDCGHEVHADEQAALNIARSWLFLNSNSTEFKSYKSGKQPFVGAWQAFYKRRLKEVWKPNA

SEQ ID NO: 104 - protein, 986 aa, synthetic construct
  REGION 1..986: note = CasX variant
MEKRINKIRKKLSADNATKPVSRSGPMKTLLVRVMTDDLKKRLEKRRKKPEVMPQVISNNAANNLRMLLDDYTKMKEAILQVYWQEFKDDHVGLMCKFAQPASKKIDQNKLKPEMDEKGNLTTAGFACSQCGQPLFVYKLEQVSEKGKAYTNYFGRCNVAEHEKLILLAQLKPEKDSDEAVTYSLGKFGQRALDFYSIHVTKESTHPVKPLAQIAGNRYASGPVGKALSDACMGTIASFLSKYQDIIIEHQKVVKGNQKRLESLRELAGKENLEYPSVTLPPQPHTKEGVDAYNEVIARVRMWVNLNLWQKLKLSRDDAKPLLRLKGFPSFPVVERRENEVDWWNTINEVKKLIDAKRDMGRVFWSGVTAEKRNTILEGYNYLPNENDHKKREGSLENPKKPAKRQFGDLLLYLEKKYAGDWGKVFDEAWERIDKKIAGLTSHIEREEARNAEDAQSKAVLTDWLRAKASFVLERLKEMDEKEFYACEIQLQKWYGDLRGNPFAVEAENRVVDISGFSIGSDGHSIQYRNLLAWKYLENGKREFYLLMNYGKKGRIRFTDGTDIKKSGKWQGLLYGGGKAKVIDLTFDPDDEQLIILPLAFGTRQGREFIWNDLLSLETGLIKLANGRVIEKTIYNKKIGRDEPALFVALTFERREVVDPSNIKPVNLIGVDRGENIPAVIALTDPEGCPLPEFKDSSGGPTDILRIGEGYKEKQRAIQAAKEVEQRRAGGYSRKFASKSRNLADDMVRNSARDLFYHAVTHDAVLVFENLSRGFGRQGKRTFMTERQYTKMEDWLTAKLAYEGLTSKTYLSKTLAQYTSKTCSNCGFTITSADYDRVLEKLKKTATGWMTTINGKELKVEGQITYYNRYKRQNVVKDLSVELDRLSEESVNNDISSWTKGRSGEALSLLKKRFSHRPVQEKFVCLNCGFETHADEQAALNIARSWLFLNSNSTEFKSYKSGKQPFVGAWQAFYKRRLKEVWKPNA

SEQ ID NO: 105 - protein, 921 aa, synthetic construct
  REGION 1..921: note = CasX variant
MQEIKRINKIRRRLVKDSNTKKAGKTGPMKTLLVRVMTPDLRERLENLRKKPENIPQPISNTSRANLNKLLTDYTEMKKAILHVYWEEFQKDPVGLMSRVAQPAPKNIDQRKLIPVKDGNERLTSSGFACSQCCQPLYVYKLEQVNDKGKPHTNYFGRCNVSEHERLILLSPHKPEANDELVTYSLGKFGQRALDFYSIHVTRESNHPVKPLEQIGGNSCASGPVGKALSDACMGAVASFLTKYQDIILEHQKVIKKNEKRLANLKDIASANGLAFPKITLPPQPHTKEGIEAYNNVVAQIVIWVNLNLWQKLKIGRDEAKPLQRLKGFPSFPLVERQANEVDWWDMVCNVKKLINEKKEDGKVFWQNLAGYKRQEALRPYLSSEEDRKKGKKFARYQFGDLLLHLEKKHGEDWGKVYDEAWERIDKKVEGLSKHIKLEEERRSEDAQSKAALTDWLRAKASFVIEGLKEADKDEFCRCELKLQKWYGDLRGKPFAIEAENSILDISGFSKQYNCAFIWQKDGVKKLNLYLIINYFKGGKLRFKKIKPEAFEANRFYTVINKKSGEIVPMEVNFNFDDPNLIILPLAFGKRQGREFIWNDLLSLETGSLKLANGRVIEKTLYNRRTRQDEPALFVALTFERREVLDSSNIKPVNLIGVDRGENIPAVIALTDPEGCPLPEFKDSSGGPTDILRIGEGYKEKQRAIQAAKEVEQRRAGGYSRKFASKSRNLADDMVRNSARDLFYHAVTHDAVLVFENLSRGFGRQGKRTFMTERQYTKMEDWLTAKLAYEGLTSKTYLSKTLAQYTSKTCSNCGFTITSADYDRVLEKLKKTATGWMTTINGKELKVEGQITYYNRYKRQNVVKDLSVELDRLSEESVNNDISSWTKGRSGEALSLLKKRFSHRPVQEKFVCLNCGFETHA

SEQ ID NO: 106 - protein, 920 aa, synthetic construct
  REGION 1..920: note = CasX variant
MQEIKRINKIRRRLVKDSNTKKAGKTGPMKTLLVRVMTPDLRERLENLRKKPENIPQPISNTSRANLNKLLTDYTEMKKAILHVYWEEFQKDPVGLMSRVAQPAPKNIDQRKLIPVKDGNERLTSSGFACSQCCQPLYVYKLEQVNDKGKPHTNYFGRCNVSEHERLILLSPHKPEANDELVTYSLGKFGQRALDFYSIHVTRESNHPVKPLEQIGGNSCASGPVGKALSDACMGAVASFLTKYQDIILEHQKVIKKNEKRLANLKDIASANGLAFPKITLPPQPHTKEGIEAYNNVVAQIVIWVNLNLWQKLKIGRDEAKPLQRLKGFPSFPLVERQANEVDWWDMVCNVKKLINEKKEDGKVFWQNLAGYKRQEALRPYLSSEEDRKKGKKFARYQFGDLLLHLEKKHGEDWGKVYDEAWERIDKKVEGLSKHIKLEEERRSEDAQSKAALTDWLRAKASFVIEGLKEADKDEFCRCELKLQKWYGDLRGKPFAIEAENSILDISGFSKQYNCAFIWQKDGVKKLNLYLIINYFKGGKLRFKKIKPEAFEANRFYTVINKKSGEIVPMEVNFNFDDPNLIILPLAFGKRQGREFIWNDLLSLETGSLKLANGRVIEKTLYNRRTRQDEPALFVALTFERREVLDSSNIKPMNLIGIDRGENIPAVIALTDPEGCPLSRFKDSLGNPTHILRIGESYKEKQRTIQAKKEVEQRRAGGYSRKYASKAKNLADDMVRNTARDLLYYAVTQDAMLIFENLSRGFGRQGKRTFMAERQYTRMEDWLTAKLAYEGLSKTYLSKTLAQYTSKTCSNCGFTITSADYDRVLEKLKKTATGWMTTINGKELKVEGQITYYNRYKRQNVVKDLSVELDRLSEESVNNDISSWTKGRSGEALSLLKKRFSHRPVQEKFVCLNCGFETHA

SEQ ID NO: 107 - protein, 977 aa, synthetic construct
  REGION 1..977: note = CasX variant
MQEIKRINKIRRRLVKDSNTKKAGKTGPMKTLLVRVMTPDLRERLENLRKKPENIPQPISNNAANNLRMLLDDYTKMKEAILQVYWQEFKDDHVGLMCKFAQPAPKNIDQRKLIPVKDGNERLTSSGFACSQCCQPLYVYKLEQVNDKGKPHTNYFGRCNVSEHERLILLSPHKPEANDELVTYSLGKFGQRALDFYSIHVTKESTHPVKPLAQIAGNRYASGPVGKALSDACMGTIASFLSKYQDIIIEHQKVVKGNQKRLESLRELAGKENLEYPSVTLPPQPHTKEGVDAYNEVIARVRMWVNLNLWQKLKLSRDDAKPLLRLKGFPSFPLVERQANEVDWWDMVCNVKKLINEKKEDGKVFWQNLAGYKRQEALRPYLSSEEDRKKGKKFARYQFGDLLLHLEKKHGEDWGKVYDEAWERIDKKVEGLSKHIKLEEERRSEDAQSKAALTDWLRAKASFVIEGLKEADKDEFCRCELKLQKWYGDLRGKPFAIEAENSILDISGFSKQYNCAFIWQKDGVKKLNLYLIINYFKGGKLRFKKIKPEAFEANRFYTVINKKSGEIVPMEVNFNFDDPNLIILPLAFGKRQGREFIWNDLLSLETGSLKLANGRVIEKTLYNRRTRQDEPALFVALTFERREVLDSSNIKPMNLIGIDRGENIPAVIALTDPEGCPLSRFKDSLGNPTHILRIGESYKEKQRTIQAKKEVEQRRAGGYSRKYASKAKNLADDMVRNTARDLLYYAVTQDAMLIFENLSRGFGRQGKRTFMAERQYTRMEDWLTAKLAYEGLSKTYLSKTLAQYTSKTCSNCGFTITSADYDRVLEKLKKTATGWMTTINGKELKVEGQITYYNRYKRQNVVKDLSVELDRLSEESVNNDISSWTKGRSGEALSLLKKRFSHRPVQEKFVCLNCGFETHADEQAALNIARSWLFLRSQEYKKYQTNKTTGNTDKRAFVETWQSFYRKKLKEVWKPAV

SEQ ID NO: 108 - protein, 986 aa, synthetic construct
  REGION 1..986: note = CasX variant
MQEIKRINKIRRRLVKDSNTKKAGKTGPMKTLLVRVMTPDLRERLENLRKKPENIPQPISNTSRANLNKLLTDYTEMKKAILHVYWEEFQKDPVGLMSRVAQPAPKNIDQRKLIPVKDGNERLTSSGFACSQCCQPLYVYKLEQVNDKGKPHTNYFGRCNVSEHERLILLSPHKPEANDELVTYSLGKFGQRALDFYSIHVTRESNHPVKPLEQIGGNSCASGPVGKALSDACMGAVASFLTKYQDIILEHQKVIKKNEKRLANLKDIASANGLAFPKITLPPQPHTKEGIEAYNNVVAQIVIWVNLNLWQKLKIGRDEAKPLQRLKGFPSFPVVERRENEVDWWNTINEVKKLIDAKRDMGRVFWSGVTAEKRNTILEGYNYLPNENDHKKREGSLENPKKPAKRQFGDLLLYLEKKYAGDWGKVFDEAWERIDKKIAGLTSHIEREEARNAEDAQSKAVLTDWLRAKASFVLERLKEMDEKEFYACEIQLQKWYGDLRGNPFAVEAENSILDISGFSKQYNCAFIWQKDGVKKLNLYLIINYFKGGKLRFKKIKPEAFEANRFYTVINKKSGEIVPMEVNFNFDDPNLIILPLAFGKRQGREFIWNDLLSLETGSLKLANGRVIEKTLYNRRTRQDEPALFVALTFERREVLDSSNIKPMNLIGIDRGENIPAVIALTDPEGCPLSRFKDSLGNPTHILRIGESYKEKQRTIQAKKEVEQRRAGGYSRKYASKAKNLADDMVRNTARDLLYYAVTQDAMLIFENLSRGFGRQGKRTFMAERQYTRMEDWLTAKLAYEGLSKTYLSKTLAQYTSKTCSNCGFTITSADYDRVLEKLKKTATGWMTTINGKELKVEGQITYYNRYKRQNVVKDLSVELDRLSEESVNNDISSWTKGRSGEALSLLKKRFSHRPVQEKFVCLNCGFETHADEQAALNIARSWLFLRSQEYKKYQTNKTTGNTDKRAFVETWQSFYRKKLKEVWKPAV

SEQ ID NO: 109 - protein, 925 aa, synthetic construct
  REGION 1..925: note = CasX variant
MISNTSRANLNKLLTDYTEMKKAILHVYWEEFQKDPVGLMSRVAQPAPKNIDQRKLIPVKDGNERLTSSGFACSQCCQPLYVYKLEQVNDKGKPHTNYFGRCNVSEHERLILLSPHKPEANDELVTYSLGKFGQRALDFYSIHVTRESNHPVKPLEQIGGNSCASGPVGKALSDACMGAVASFLTKYQDIILEHQKVIKKNEKRLANLKDIASANGLAFPKITLPPQPHTKEGIEAYNNVVAQIVIWVNLNLWQKLKIGRDEAKPLQRLKGFPSFPLVERQANEVDWWDMVCNVKKLINEKKEDGKVFWQNLAGYKRQEALRPYLSSEEDRKKGKKFARYQFGDLLLHLEKKHGEDWGKVYDEAWERIDKKVEGLSKHIKLEEERRSEDAQSKAALTDWLRAKASFVIEGLKEADKDEFCRCELKLQKWYGDLRGKPFAIEAENRVVDISGFSIGSDGHSIQYRNLLAWKYLENGKREFYLLMNYGKKGRIRFTDGTDIKKSGKWQGLLYGGGKAKVIDLTFDPDDEQLIILPLAFGTRQGREFIWNDLLSLETGLIKLANGRVIEKTIYNKKIGRDEPALFVALTFERREVVDPSNIKPMNLIGIDRGENIPAVIALTDPEGCPLSRFKDSLGNPTHILRIGESYKEKQRTIQAKKEVEQRRAGGYSRKYASKAKNLADDMVRNTARDLLYYAVTQDAMLIFENLSRGFGRQGKRTFMAERQYTRMEDWLTAKLAYEGLSKTYLSKTLAQYTSKTCSNCGFTITSADYDRVLEKLKKTATGWMTTINGKELKVEGQITYYNRYKRQNVVKDLSVELDRLSEESVNNDISSWTKGRSGEALSLLKKRFSHRPVQEKFVCLNCGFETHADEQAALNIARSWLFLRSQEYKKYQTNKTTGNTDKRAFVETWQSFYRKKLKEVWKPAV

SEQ ID NO: 110 - protein, 975 aa, synthetic construct
  REGION 1..975: note = CasX variant
MEKRINKIRKKLSADNATKPVSRSGPMKTLLVRVMTDDLKKRLEKRRKKPEVMPQVISNTSRANLNKLLTDYTEMKKAILHVYWEEFQKDPVGLMSRVAQPAPKNIDQRKLIPVKDGNERLTSSGFACSQCCQPLYVYKLEQVNDKGKPHTNYFGRCNVSEHERLILLSPHKPEANDELVTYSLGKFGQRALDFYSIHVTRESNHPVKPLEQIGGNSCASGPVGKALSDACMGAVASFLTKYQDIILEHQKVIKKNEKRLANLKDIASANGLAFPKITLPPQPHTKEGIEAYNNVVAQIVIWVNLNLWQKLKIGRDEAKPLQRLKGFPSFPLVERQANEVDWWDMVCNVKKLINEKKEDGKVFWQNLAGYKRQEALRPYLSSEEDRKKGKKFARYQFGDLLLHLEKKHGEDWGKVYDEAWERIDKKVEGLSKHIKLEEERRSEDAQSKAALTDWLRAKASFVIEGLKEADKDEFCRCELKLQKWYGDLRGKPFAIEAENSILDISGFSKQYNCAFIWQKDGVKKLNLYLIINYFKGGKLRFKKIKPEAFEANRFYTVINKKSGEIVPMEVNFNFDDPNLIILPLAFGKRQGREFIWNDLLSLETGSLKLANGRVIEKTLYNRRTRQDEPALFVALTFERREVLDSSNIKPMNLIGIDRGENIPAVIALTDPEGCPLSRFKDSLGNPTHILRIGESYKEKQRTIQAKKEVEQRRAGGYSRKYASKAKNLADDMVRNTARDLLYYAVTQDAMLIFENLSRGFGRQGKRTFMAERQYTRMEDWLTAKLAYEGLSKTYLSKTLAQYTSKTCSNCGFTITSADYDRVLEKLKKTATGWMTTINGKELKVEGQITYYNRYKRQNVVKDLSVELDRLSEESVNNDISSWTKGRSGEALSLLKKRFSHRPVQEKFVCLNCGFETHADEQAALNIARSWLFLRSQEYKKYQTNKTTGNTDKRAFVETWQSFYRKKLKEVWKPAV

SEQ ID NO: 111 - protein, 982 aa, synthetic construct
  REGION 1..982: note = CasX variant
MQEIKRINKIRRRLVKDSNTKKAGKTGPMKTLLVRVMTPDLRERLENLRKKPENIPQPISNTSRANLNKLLTDYTEMKKAILHVYWEEFQKDPVGLMSRVAQPAPKNIDQRKLIPVKDGNERLTSSGFACSQCCQPLYVYKLEQVNDKGKPHTNYFGRCNVSEHERLILLSPHKPEANDELVTYSLGKFGQRALDFYSIHVTRESNHPVKPLEQIGGNSCASGPVGKALSDACMGAVASFLTKYQDIILEHQKVIKKNEKRLANLKDIASANGLAFPKITLPPQPHTKEGIEAYNNVVAQIVIWVNLNLWQKLKIGRDEAKPLQRLKGFPSFPLVERQANEVDWWDMVCNVKKLINEKKEDGKVFWQNLAGYKRQEALRPYLSSEEDRKKGKKFARYQFGDLLLHLEKKHGEDWGKVYDEAWERIDKKVEGLSKHIKLEEERRSEDAQSKAALTDWLRAKASFVIEGLKEADKDEFCRCELKLQKWYGDLRGKPFAIEAENRVVDISGFSIGSDGHSIQYRNLLAWKYLENGKREFYLLMNYGKKGRIRFTDGTDIKKSGKWQGLLYGGGKAKVIDLTFDPDDEQLIILPLAFGTRQGREFIWNDLLSLETGLIKLANGRVIEKTIYNKKIGRDEPALFVALTFERREVVDPSNIKPMNLIGIDRGENIPAVIALTDPEGCPLSRFKDSLGNPTHILRIGESYKEKQRTIQAKKEVEQRRAGGYSRKYASKAKNLADDMVRNTARDLLYYAVTQDAMLIFENLSRGFGRQGKRTFMAERQYTRMEDWLTAKLAYEGLSKTYLSKTLAQYTSKTCSNCGFTITSADYDRVLEKLKKTATGWMTTINGKELKVEGQITYYNRYKRQNVVKDLSVELDRLSEESVNNDISSWTKGRSGEALSLLKKRFSHRPVQEKFVCLNCGFETHADEQAALNIARSWLFLRSQEYKKYQTNKTTGNTDKRAFVETWQSFYRKKLKEVWKPAV

SEQ ID NO: 112 - protein, 977 aa, synthetic construct
  REGION 1..977: note = CasX variant
MQEIKRINKIRRRLVKDSNTKKAGKTGPMKTLLVRVMTPDLRERLENLRKKPENIPQPISNTSRANLNKLLTDYTEMKKAILHVYWEEFQKDPVGLMSRVAQPAPKNIDQRKLIPVKDGNERLTSSGFACSQCCQPLYVYKLEQVNDKGKPHTNYFGRCNVSEHERLILLSPHKPEANDELVTYSLGKFGQRALDFYSIHVTRESNHPVKPLEQIGGNSCASGPVGKALSDACMGAVASFLTKYQDIILEHQKVIKKNEKRLANLKDIASANGLAFPKITLPPQPHTKEGIEAYNNVVAQIVIWVNLNLWQKLKIGRDEAKPLQRLKGFPSFPLVERQANEVDWWDMVCNVKKLINEKKEDGKVFWQNLAGYKRQEALRPYLSSEEDRKKGKKFARYQFGDLLLHLEKKHGEDWGKVYDEAWERIDKKVEGLSKHIKLEEERRSEDAQSKAALTDWLRAKASFVIEGLKEADKDEFKRCELKLQKWYGDLRGKPFAIEAENSILDISGFSKQYNCAFIWQKDGVKKLNLYLIINYFKGGKLRFKKIKPEAFEANRFYTVINKKSGEIVPMEVNFNFDDPNLIILPLAFGKRQGREFIWNDLLSLETGSLKLANGRVIEKPLYNRRTRQDEPALFVALTFERREVLDSSNIKPMNLIGIDRGENIPAVIALTDPEGCPLSRFKDSLGNPTHILRIGESYKEKQRTIQAKKEVEQRRAGGYSRKYASKAKNLADDMVRNTARDLLYYAVTQDAMLIFENLSRGFGRQGKRTFMAERQYTRMEDWLTAKLAYEGLSKTYLSKTLAQYTSKTCSNCGFTITSADYDRVLEKLKKTATGWMTTINGKELKVEGQITYYNRYKRQNVVKDLSVELDRLSEESVNNDISSWTKGRSGEALSLLKKRFSHRPVQEKFVCLNCGFETHADEQAALNIARSWLFLRSQEYKKYQTNKTTGNTDKRAFVETWQSFYRKKLKEVWKPAV

SEQ ID NO: 113 - protein, 977 aa, synthetic construct
  REGION 1..977: note = CasX variant
MQEIKRINKIRRRLVKDSNTKKAGKTGPMKTLLVRVMTPDLRERLENLRKKPENIPQPISNTSRANLNKLLTDYTEMKKAILHVYWEEFQKDPVGLMSRVAQPAPKNIDQRKLIPVKDGNERLTSSGFACSQCCQPLYVYKLEQVNDKGKPHTNYFGRCNVSEHERLILLSPHKPEANDELVTYSLGKFGQRALDFYSIHVTRESNHPVKPLEQIGGNSCASGPVGKALSDACMGAVASFLTKYQDIILEHQKVIKKNEKRLANLKDIASANGLAFPKITLPPQPHTKEGIEAYNNVVAQIVIWVNLNLWQKLKIGRDEAKPLQRLKGFPSFPLVERQANEVDWWDMVCNVKKLINEKKEDGKVFWQNLAGYKRQEALLPYLSSEEDRKKGKKFARYQFGDLLLHLEKKHGEDWGKVYDEAWERIDKKVEGLSKHIKLEEERRSEDAQSKAALTDWLRAKASFVIEGLKEADKDEFCRCELKLQKWYGDLRGKPFAIEAENSILDISGFSKQYNCAFIWQKDGVKKLNLYLIINYFKGGKLRFKKIKPEAFEANRFYTVINKKSGEIVPMEVNFNFDDPNLIILPLAFGKRQGREFIWNDLLSLETGSLKLANGRVIEKTLYNRRTRQDEPALFVALTFERREVLDSSNIKPMNLIGIDRGENIPAVIALTDPEGCPLSRFKDSLGNPTHILRIGESYKEKQRTIQAAKEVEQRRAGGYSRKYASKAKNLADDMVRNTARDLLYYAVTQDAMLIFENLSRGFGRQGKRTFAAERQYTRMEDWLTAKLAYEGLPSKTYLSKTLAQYTSKTCSNCGFTITSADYDRVLEKLKKTATGWMTTINGKELKVEGQITYYNRYKRQNVVKDLSVELDRLSEESVNNDISSWTKGRSGEALSLLKKRFSHRPVQEKFVCLNCGFETHADEQAALNIARSWLFLRSQEYKKYQTNKTTGNTDKRAFVETWQSFYRKKLKEVWKPA

SEQ ID NO: 114 - protein, 977 aa, synthetic construct
  REGION 1..977: note = CasX variant
MQEIKRINKIRRRLVKDSNTKKAGKTGPMKTLLVRVMTPDLRERLENLRKKPENIPQPISNTSRANLNKLLTDYTEMKKAILHVYWEEFQKDPVGLMSRVAQPAPKNIDQRKLIPVKDGNERLTSSGFACSQCCQPLYVYKLEQVNDKGKPHTNYFGRCNVSEHERLILLSPHKPEANDELVTYSLGKFGQRALDFYSIHVTRESNHPVKPLEQIGGNSCASGPVGKALSDACMGAVASFLTKYQDIILEHQKVIKKNEKRLANLKDIASANGLAFPKITLPPQPHTKEGIEAYNNVVAQIVIWVNLNLWQKLKIGRDEAKPLQRLKGFPSFPLVERQANEVDWWDMVCNVKKLINEKKEDGKVFWQNLAGYKRQEALRPYLSSEEDRKKGKKFARYQFGDLLLHLEKKHGEDWGKVYDEAWERIDKKVEGLSKHIKLEEERRSEDAQSKAALTDWLRAKASFVIEGLKEADKDEFCRCELKLQKWYGDLRGKPFAIEAENSILDISGFSKQYNCAFIWQKDGVKKLNLYLIINYFKGGKLRFKKIKPEAFEANRFYTVINKKSGEIVPMEVNFNFDDPNLIILPLAFGKRQGREFIWNDLLSLETGSLKLANGRVIEKTLYNRRTRQDEPALFVALTFERREVLDSSNIKPMNLIGIDRGENIPAVIALTDPEGCPLSRFKDSLGNPTHILRIGESYKEKQRTIQAKKEVEQRRAGGYSRKYASKAKNLANDMVRNTARDLLYYAVTQDAMLIFENLSRGFGRQGKRTFMAERQYTRMEDWLTAKLAYEGLSKTYLSKTLAQYTSKTCSNCGFTITSADYDRVLEKLKKTATGWMTTINGKELKVEGQITYYNRYKRQNVVKDLSVELDRLSEESVNNDISSWTKGRSGEALSLLKKRFSHRPVQEKFVCLNCGFETHADEQAALNIARSWLFLRSQEYKKYQTNKTTGNTDKRAFVETWQSFYRKKLKEVWKPAV

SEQ ID NO: 115 - protein, 978 aa, synthetic construct
  REGION 1..978: note = CasX variant
MQEIKRINKIRRRLVKDSNTKKAGKTGPMKTLLVRVMTPDLRERLENLRKKPENIPQPISNTSRANLNKLLTDYTEMKKAILHVYWEEFQKDPVGLMSRVAQPAPKNIDQRKLIPVKDGNERLTSSGFACSQCCQPLYVYKLEQVNDKGKPHTNYFGRCNVSEHERLILLSPHKPEANDELVTYSLGKFGQRALDFYSIHVTRESNHPVKPLEQIGGNSCASGPVGKALSDACMGAVASFLTKYQDIILEHQKVIKKNEKRLANLKDIASANGLAFPKITLPPQPHTKEGIEAYNNVVAQIVIWVNLNLWQKLKIGRDEAKPLQRLKGFPSFPLVERQANEVDWWDMVCNVKKLINEKKEDGKVFWQNLAGYKRQEALLPYLSSEEDRKKGKKFARYQFGDLLLHLEKKHGEDWGKVYDEAWERIDKKVEGLSKHIKLEEERRSEDAQSKAALTDWLRAKASFVIEGLKEADKDEFCRCELKLQKWYGDLRGKPFAIEAENSILDISGFSKQYNCAFIWQKDGVKKLNLYLIINYFKGGKLRFKKIKPEAFEANRFYTVINKKSGEIVPMEVNFNFDDPNLIILPLAFGKRQGREFIWNDLLSLETGSLKLANGRVIEKTLYNRRTRQDEPALFVALTFERREVLDSSNIKPMNLIGIDRGENIPAVIALTDPEGCPLSRFKDSLGNPTHILRIGESYKEKQRTIQAAKEVEQRRAGGYSRKYASKAKNLADDMVRNTARDLLYYAVTQDAMLIFENLSRGFGRQGKRTFMAERQYTRMEDQLTAKLAYEGLPSKTYLSKTLAQYTSKTCSNCGFTITSADYDRVLEKLKKTATGWMTTINGKELKVEGQITYYNRYKRQNVVKDLSVELDRLSEESVNNDISSWTKGRSGEALSLLKKRFSHRPVQEKFVCLNCGFETHADEQAALNIARSWLFLRSQEYKKYQTNKTTGNTDKRAFVETWQSFYRKKLKEVWKPAV

SEQ ID NO: 116 - protein, 978 aa, synthetic construct
  REGION 1..978: note = CasX variant
MQEIKRINKIRRRLVKDSNTKKAGKTGPMKTLLVRVMTPDLRERLENLRKKPENIPQPISNTSRANLNKLLTDYTEMKKAILHVYWEEFQKDPVGLMSRVAQPAPKNIDQRKLIPVKDGNERLTSSGFACSQCCQPLYVYKLEQVNDKGKPHTNYFGRCNVSEHERLILLSPHKPEANDELVTYSLGKFGQRALDFYSIHVTRESNHPVKPLEQIGGNSCASGPVGKALSDACMGAVASFLTKYQDIILEHQKVIKKNEKRLANLKDIASANGLAFPKITLPPQPHTKEGIEAYNNVVAQIVIWVNLNLWQKLKIGRDEAKPLQRLKGFPSFPLVERQANEVDWWDMVCNVKKLINEKKEDGKVFWQNLAGYKRQEALLPYLSSEEDRKKGKKFARYQFGDLLLHLEKKHGEDWGKVYDEAWERIDKKVEGLSKHIKLEEERRSEDAQSKAALTDWLRAKASFVIEGLKEADKDEFCRCELKLQKWYGDLRGKPFAIEAENSILDISGFSKQYNCAFIWQKDGVKKLNLYLIINYFKGGKLRFKKIKPEAFEANRFYTVINKKSGEIVPMEVNFNFDDPNLIILPLAFGKRQGREFIWNDLLSLETGSLKLANGRVIEKTLYNRRTRQDEPALFVALTFERREVLDSSNIKPMNLIGIDRGENIPAVIALTDPEGCPLSRFKDSLGNPTHILRIGESYKEKQRTIQAAKEVEQRRAGGYSRKYASKAKNLADDMVRNTARDLLYYAVTQDAMLIFENLSRGFGRQGKRTFQAERQYTRMEDWLTAKLAYEGLPSKTYLSKTLAQYTSKTCSNCGFTITSADYDRVLEKLKKTATGWMTTINGKELKVEGQITYYNRYKRQNVVKDLSVELDRLSEESVNNDISSWTKGRSGEALSLLKKRFSHRPVQEKFVCLNCGFETHADEQAALNIARSWLFLRSQEYKKYQTNKTTGNTDKRAFVETWQSFYRKKLKEVWKPAV

SEQ ID NO: 117 - protein, 978 aa, synthetic construct
  REGION 1..978: note = CasX variant
MQEIKRINKIRRRLVKDSNTKKAGKTGPMKTLLVRVMTPDLRERLENLRKKPENIPQPISNTSRANLNKLLTDYTEMKKAILHVYWEEFQKDPVGLMSRVAQPAPKNIDQRKLIPVKDGNERLTSSGFACSQCCQPLYVYKLEQVNDKGKPHTNYFGRCNVSEHERLILLSPHKPEANDELVTYSLGKFGQRALDFYSIHVTRESNHPVKPLEQIGGNSCASGPVGKALSDACMGAVASFLTKYQDIILEHQKVIKKNEKRLANLKDIASANGLAFPKITLPPQPHTKEGIEAYNNVVAQIVIWVNLNLWQKLKIGRDEAKPLQRLKGFPSFPLVERQANEVDWWDMVCNVKKLINEKKEDGKVFWQNLAGYKRQEALLPYLSSEEDRKKGKKFARYQFGDLLLHLEKKHGEDWGKVYDEAWERIDKKVEGLSKHIKLEEERRSEDAQSKAALTDWLIAKASFVIEGLKEADKDEFCRCELKLQKWYGDLRGKPFAIEAENSILDISGFSKQYNCAFIWQKDGVKKLNLYLIINYFKGGKLRFKKIKPEAFEANRFYTVINKKSGEIVPMEVNFNFDDPNLIILPLAFGKRQGREFIWNDLLSLETGSLKLANGRVIEKTLYNRRTRQDEPALFVALTFERREVLDSSNIKPMNLIGIDRGENIPAVIALTDPEGCPLSRFKDSLGNPTHILRIGESYKEKQRTIQAAKEVEQRRAGGYSRKYASKAKNLADDMVRNTVRDLLYYAVTQDAMLIFENLSRGFGRQGKRTFMAERQYTRMEDWLTAKLAYEGLPSKTYLSKTLAQYTSKTCSNCGFTITSADYDRVLEKLKKTATGWMTTINGKELKVEGQITYYNRYKRQNVVKDLSVELDRLSEESVNNDISSWTKGRSGEALSLLKKRFSHRPVQEKFVCLNCGFETHADEQAALNIARSWLFLRSQEYKKYQTNKTTGNTDKRAFVETWQSFYRKKLKEVWKPAV

SEQ ID NO: 118 - protein, 977 aa, synthetic construct
  REGION 1..977: note = CasX variant
MQEIKRINKIRRRLVKDSNTKKAGKTGPMKTLLVRVMTPDLRERLENLRKKPENIPQPISNTSRANLNKLLTDYTEMKKAILHVYWEEFQKDPVGLMSRVAQPAPKNIDQRKLIPVKDGNERLTSSGFACSQCCQPLYVYKLEQVNDKGKPHTNYFGRCNVSEHERLILLSPHKPEANDELVTYSLGKFGQRALDFYSIHVTRESNHPVKPLEQIGGNSCASGPVGKALSDACMGAVASFLTKYQDIILEHQKVIKKNEKRLANLKDIASANGLAFPKITLPPQPHTKEGIEAYNNVVAQIVIWVNLNLWQKLKIGRDEAKPLQRLKGFPSFPLVERQANEVDWWDMVCNVKKLINEKKEDGKVFWQNLAGYKRQEALRPYLSSEEDRKKGKKFARYQFGDLLLHLEKKHGEDWGKVYDEAWERIDKKVEGLSKHIKLEEERRSEDAQSKAALTDWLRAKASFVIEGLKEADKDEFCRCELKLQKWYGDLRGKPFAIEAENSILDISGFSKQYNCAFIWQKDGVKKLNLYLIINYFKGGKLRFKKIKPEAFEANRFYTVINKKSGEIVPMEVNFNFDDPNLIILPLAFGKRQGREFIWNDLLSLETGSLKLANGRVIEKTLYNRRTRQDEPALFVALTFERREVLDSSNIKPMNLIGIDRGENIPAVIALTDPEGCPLSRFKDSLGNPTHILRIGESYKEKQRTIQAKKEVEQRRAGGYSRKYASKAKNLADDMVRNTARDLLYYAVTQDAMLIFENLSRGFGRQGKRTFNAERQYTRMEDWLTAKLAYEGLSKTYLSKTLAQYTSKTCSNCGFTITSADYDRVLEKLKKTATGWMTTINGKELKVEGQITYYNRYKRQNVVKDLSVELDRLSEESVNNDISSWTKGRSGEALSLLKKRFSHRPVQEKFVCLNCGFETHADEQAALNIARSWLFLRSQEYKKYQTNKTTGNTDKRAFVETWQSFYRKKLKEVWKPAV

SEQ ID NO: 119 - protein, 977 aa, synthetic construct
  REGION 1..977: note = CasX variant
MQEIKRINKIRRRLVKDSNTKKAGKTGPMKTLLVRVMTPDLRERLENLRKKPENIPQPISNTSRANLNKLLTDYTEMKKAILHVYWEEFQKDPVGLMSRVAQPAPKNIDQRKLIPVKDGNERLTSSGFACSQCCQPLYVYKLEQVNDKGKPHTNYFGRCNVSEHERLILLSPHKPEANDELVTYSLGKFGQRALDFYSIHVTRESNHPVKPLEQIGGNSCASGPVGKALSDACMGAVASFLTKYQDIILEHQKVIKKNEKRLANLKDIASANGLAFPKITLPPQPHTKEGIEAYNNVVAQIVIWVNLNLWQKLKIGRDEAKPLQRLKGFPSFPLVERQANEVDWWDMVCNVKKLINEKKEDGKVFWQNLAGYKRQEALRPYLSSEEDRKKGKKFARYQFGDLLLHLEKKHGEDWGKVYDEAWERIDKKVEGLSKHIKLEEERRSEDAQSKAALTDWLRAKASFVIEGLKEADKDEFCRCELKLQKWYGDLRGKPFAIEAENSILDISGFSKQYNCAFIWQKDGVKKLNLYLIINYFKGGKLRFKKIKPEAFEANRFYTVINKKSGEIVPMEVNFNFDDPNLIILPLAFGKRQGREFIWNDLLSLETGSLKLANGRVIEKTLYNRRTRQDEPALFVALTFERREVLDSSNIKPMNLIGIDRGENIPAVIALTDPEGCPLSRFKDSLGNPTHILRIGESYKEKQRTIQAKKEVEQRRAGGYSRKYASKAKNLADDMVRNTTRDLLYYAVTQDAMLIFENLSRGFGRQGKRTFMAERQYTRMEDWLTAKLAYEGLSKTYLSKTLAQYTSKTCSNCGFTITSADYDRVLEKLKKTATGWMTTINGKELKVEGQITYYNRYKRQNVVKDLSVELDRLSEESVNNDISSWTKGRSGEALSLLKKRFSHRPVQEKFVCLNCGFETHADEQAALNIARSWLFLRSQEYKKYQTNKTTGNTDKRAFVETWQSFYRKKLKEVWKPAV

SEQ ID NO: 120 - protein, 977 aa, synthetic construct
  REGION 1..977: note = CasX variant
MQEIKRINKIRRRLVKDSNTKKAGKTGPMKTLLVRVMTPDLRERLENLRKKPENIPQPISNTSRANLNKLLTDYTEMKKAILHVYWEEFQKDPVGLMSRVAQPAPKNIDQRKLIPVKDGNERLTSSGFACSQCCQPLYVYKLEQVNDKGKPHTNYFGRCNVSEHERLILLSPHKPEANDELVTYSLGKFGQRALDFYSIHVTRESNHPVKPLEQIGGNSCASGPVGKALSDACMGAVASFLTKYQDIILEHQKVIKKNEKRLANLKDIASANGLAFPKITLPPQPHTKEGIEAYNNVVAQIVIWVNLNLWQKLKIGRDEAKPLQRLKGFPSFPLVERQANEVDWWDMVCNVKKLINEKKEDGKVFWQNLAGYKRQEALRPYLSSEEDRKKGKKFARYQFGDLLLHLEKKHGEDWGKVYDEAWERIDKKVEGLSKHIKLEEERRSEDAQSKAALTDWLRAKASFVIEGLKEADKDEFKRCELKLQKWYGSLRGKPFAIEAENSILDISGFSKQYNCAFIWQKDGVKKLNLYLIINYFKGGKLRFKKIKPEAFEANRFYTVINKKSGEIVPMEVNFNFDDPNLIILPLAFGKRQGREFIWNDLLSLETGSLKLANGRVIEKTLYNRRTRQDEPALFVALTFERREVLDSSNIKPMNLIGIDRGENIPAVIALTDPEGCPLSRFKDSLGNPTHILRIGESYKEKQRTIQAKKEVEQRRAGGYSRKYASKAKNLADDMVRNTARDLLYYAVTQDAMLIFENLSRGFGRQGKRTFMAERQYTRMEDWLTAKLAYEGLSKTYLSKTLAQYTSKTCSNCGFTITSADYDRVLEKLKKTATGWMTTINGKELKVEGQITYYNRYKRQNVVKDLSVELDRLSEESVNNDISSWTKGRSGEALSLLKKRFSHRPVQEKFVCLNCGFETHADEQAALNIARSWLFLRSQEYKKYQTNKTTGNTDKRAFVETWQSFYRKKLKEVWKPAV

SEQ ID NO: 121 - protein, 977 aa, synthetic construct
  REGION 1..977: note = CasX variant
MQEIKRINKIRRRLVKDSNTKKAGKTGPMKTLLVRVMTPDLRERLENLRKKPENIPQPISNTSRANLNKLLTDYTEMKKAILHVYWEEFQKDPVGLMSRVAQPAPKNIDQRKLIPVKDGNERLTSSGFACSQCCQPLYVYKLEQVNDKGKPHTNYFGRCNVSEHERLILLSPHKPEANDELVTYSLGKFGQRALDFYSIHVTRESNHPVKPLEQIGGNSCASGPVGKALSDACMGAVASFLTKYQDIILEHQKVIKKNEKRLANLKDIASANGLAFPKITLPPQPHTKEGIEAYNNVVAQIVIWVNLNLWQKLKIGRDEAKPLQRLKGFPSFPLVERQANEVDWWDMVCNVKKLINEKKEDGKVFWQNLAGYKRQEALRPYLSSEEDRKKGKKFARYQFGDLLLHLEKKHGEDWGKVYDEAWERIDKKVEGLSKHIKLEEERRSEDAQSKAALTDWLRAKASFVIEGLKEADKDEFKRCELKLQKWYGDLRGKPFAIEAENSILDISGFSKQYNCAFIWQKDGVKKLNLYLIINYFKGGKLRFKKIKPEAFEANRFYTVINKKSGEIVPMEVNFNFDDPNLIILPLAFGKRQGREFIWNDLLSLETGSLKLANGRVIEKTLYNRRTRQDEPALFVALTFERREVLDSSNIKPMNLIGIDRGENIPAVIALTDPEGCPLSRFKDSLGNPTHILRIGESYKEKQRTIQAKKEVEQRRAGGYSRKYASKAKNLANDMVRNTARDLLYYAVTQDAMLIFENLSRGFGRQGKRTFMAERQYTRMEDWLTAKLAYEGLSKTYLSKTLAQYTSKTCSNCGFTITSADYDRVLEKLKKTATGWMTTINGKELKVEGQITYYNRYKRQNVVKDLSVELDRLSEESVNNDISSWTKGRSGEALSLLKKRFSHRPVQEKFVCLNCGFETHADEQAALNIARSWLFLRSQEYKKYQTNKTTGNTDKRAFVETWQSFYRKKLKEVWKPAV

SEQ ID NO: 122 - protein, 978 aa, synthetic construct
  REGION 1..978: note = CasX variant
MQEIKRINKIRRRLVKDSNTKKAGKTGPMKTLLVRVMTPDLRERLENLRKKPENIPQPISNTSRANLNKLLTDYTEMKKAILHVYWEEFQKDPVGLMSRVAQPAPKNIDQRKLIPVKDGNERLTSSGFACSQCCQPLYVYKLEQVNDKGKPHTNYFGRCNVSEHERLILLSPHKPEANDELVTYSLGKFGQRALDFYSIHVTRESNHPVKPLEQIGGNSCASGPVGKALSDACMGAVASFLTKYQDIILEHQKVIKKNEKRLANLKDIASANGLAFPKITLPPQPHTKEGIEAYNNVVAQIVIWVNLNLWQKLKIGRDEAKPLQRLKGFPSFPLVERQANEVDWWDMVCNVKKLINEKKEDGKVFWQNLAGYKRQEALLPYLSSEEDRKKGKKFARYQFGDLLLHLEKKHGEDWGKVYDEAWERIDKKVEGLSKHIKLEEERRSEDAQSKAALTDWLRAKASFVIEGLKEADKDEFCRCELKLQKWYGDLRGKPFAIEAENSILDISGFSKQYNCAFIWQKDGVKKLNLYLIINYFKGGKLRFKKIKPEAFEANRFYTVINKKSGEIVPMEVNFNFDDPNLIILPLAFGKRQGREFIWNDLLSLETGSLKLANGRVIEKTLYNRRTRQDEPALFVALTFERREVLDSSNIKPMNLIGIDRGENIPAVIALTDPEGCPLSRFKDSLGNPTHILRIGESYKEKQRTIQAAKEKEQRRAGGYSRKYASKAKNLADDMVRNTARDLLYYAVTQDAMLIFENLSRGFGRQGKRTFMAERQYTRMEDWLTAKLAYEGLPSKTYLSKTLAQYTSKTCSNCGFTITSADYDRVLEKLKKTATGWMTTINGKELKVEGQITYYNRYKRQNVVKDLSVELDRLSEESVNNDISSWTKGRSGEALSLLKKRFSHRPVQEKFVCLNCGFETHADEQAALNIARSWLFLRSQEYKKYQTNKTTGNTDKRAFVETWQSFYRKKLKEVWKPAV

SEQ ID NO: 123 - protein, 977 aa, synthetic construct
  REGION 1..977: note = CasX variant
MQEIKRINKIRRRLVKDSNTKKAGKTGPMKTLLVRVMTPDLRERLENLRKKPENIPQPISNTSRANLNKLLTDYTEMKKAILHVYWEEFQKDPVGLMSRVAQPAPKNIDQRKLIPVKDGNERLTSSGFACSQCCQPLYVYKLEQVNDKGKPHTNYFGRCNVSEHERLILLSPHKPEANDELVTYSLGKFGQRALDFYSIHVTRESNHPVKPLEQIGGNSCASGPVGKALSDACMGAVASFLTKYQDIILEHQKVIKKNEKRLANLKDIASANGLAFPKITLPPQPHTKEGIEAYNNVVAQIVIWVNLNLWQKLKIGRDEAKPLQRLKGFPSFPLVERQANEVDWWDMVCNVKKLINEKKEDGKVFWQNLAGYKRQEALRPYLSSEEDRKKGKKFARYQFGDLLLHLEKKHGEDWGKVYDEAWERIDKKVEGLSKHIKLEEERRSEDAQSKAALTDWLRAKASFVIEGLKEADKDEFKRCELKLQKWYGDLRGKPFAIEAENSILDISGFSKQYNCAFIWQKDGVKKLNLYLIINYFKGGKLRFKKIKPEAFEANRFYTVINKKSGEIVPMEVNFNFDDPNLIILPLAFGKRQGREFIWNDLLSLETGSLKLANGRVIEKTLYNRRTRQDEPALFVALTFERREVLDSSNIKPMNLIGIDRGENIPAVIALTDPEGCPLSRFKDSLGNPTHILRIGESYKEKQRTIQAKKEVEQRRAGGYSRKYASKAKNLADDMVRNTARDLLYYAVTQDAMLIFENLSRGFGRQGKRTFMAERQYTRMEDWLTAKLAYEGLSKTLLSKTLAQYTSKTCSNCGFTITSADYDRVLEKLKKTATGWMTTINGKELKVEGQITYYNRYKRQNVVKDLSVELDRLSEESVNNDISSWTKGRSGEALSLLKKRFSHRPVQEKFVCLNCGFETHADEQAALNIARSWLFLRSQEYKKYQTNKTTGNTDKRAFVETWQSFYRKKLKEVWKPAV

SEQ ID NO: 124 - protein, 977 aa, synthetic construct
  REGION 1..977: note = CasX variant
MQEIKRINKIRRRLVKDSNTKKAGKTGPMKTLLVRVMTPDLRERLENLRKKPENIPQPISNTSRANLNKLLTDYTEMKKAILHVYWEEFQKDPVGLMSRVAQPAPKNIDQRKLIPVKDGNERLTSSGFACSQCCQPLYVYKLEQVNDKGKPHTNYFGRCNVSEHERLILLSPHKPEANDELVTYSLGKFGQRALDFYSIHVTRESNHPVKPLEQIGGNSCASGPVGKALSDACMGAVASFLTKYQDIILEHQKVIKKNEKRLANLKDIASANGLAFPKITLPPQPHTKEGIEAYNNVVAQIVIWVNLNLWQKLKIGRDEAKPLQRLKGFPSFPLVERQANEVDWWDMVCNVKKLINEKKEDGKVFWQNLAGYKRQEALRPYLSSEEDRKKGKKFARYQFGDLLLHLEKKHGEDWGKVYDEAWERIDKKVEGLSKHIKLEEERRSEDAQSKAALTDWLRAKASFVIEGLKEADKDEFCRCELKLQKWYGDLRGKPFAIEAENSILDISGFSKQYNCAFIWQKDGVKKLNLYLIINYFKGGKLRFKKIKPEAFEANRFYTVINKKSGEIVPMEVNFNFDDPNLIILPLAFGKRQGREFIWNDLLSLETGSLKLANGRVIEKTLYNRRTRQDEPALFVALTFERREVLDSSNIKPMNLIGIDRGENIPAVIALTDPEGCPLSRFKDSLGNPTHILRIGESYKEKQRTIQAKKEVEQRRAGGYSRKYASKAKNLADDMVRNTARDLLYYAVTQDAMLIFENLSRGFGRQGKRTFMAERQYTRMEDWLTAKLAYEGLSKTYLSKTLAQYTSKTCSNCGFTITSADYDRVLEKLKKTATGWMTTINGKELKVEGQITYYNRYKRQNVVKDLSVELDRLSEESVNNDISSWTKGRSGEALSLLKKRFSHRPVQEKFVCLNCGFETHADEQAALNIARSWLFLRSQEYKKYQTNKTTGNTDKRAFVETWQSFYRKKLKEVWKPAV

SEQ ID NO: 125 - protein, 977 aa, synthetic construct
  REGION 1..977: note = CasX variant
MQEIKRINKIRRRLVKDSNTKKAGKTGPMKTLLVRVMTPDLRERLENLRKKPENIPQPISNTSRANLNKLLTDYTEMKKAILHVYWEEFQKDPVGLMSRVAQPAPKNIDQRKLIPVKDGNERLTSSGFACSQCCQPLYVYKLEQVNDKGKPHTNYFGRCNVSEHERLILLSPHKPEANDELVTYSLGKFGQRALDFYSIHVTRESNHPVKPLEQIGGNSCASGPVGKALSDACMGAVASFLTKYQDIILEHQKVIKKNEKRLANLKDIASANGLAFPKITLPPQPHTKEGIEAYNNVVAQIVIWVNLNLWQKLKIGRDEAKPLQRLKGFPSFPLVERQANEVDWWDMVCNVKKLINEKKEDGKVFWQNLAGYKRQEALRPYLSSEEDRKKGKKFARYQFGDLLLHLEKKHGEDWGKVYDEAWERIDKKVEGLSKHIKLEEERRSEDAQSKAALTDWLRAKASFVIEGLKEADKDEFKRCELKLQKWYGDLRGKPFAIEAENSILDISGFSKQYNCAFIWQKDGVKKLNLYLIINYFKGGKLRFKKIKPEAFEANRFYTVINKKSGEIVPMEVNFNFDDPNLIILPLAFGKRQGREFIWNDLLSLETGSLKLANGRVIEKTLYNRRTRQDEPALFVALTFERREVLDSSNIKPMNLIGIDRGENIPAVIALTDPEGCPLSRFKDSLGNPTHILRIGESYKEKQRTIQAKKEVEQRRAGGYSRKYASKAKNLADDMVRNTARDLLYYAVTQDAMLIFENLSRGFGRQGKRTFNAERQYTRMEDWLTAKLAYEGLSKTYLSKTLAQYTSKTCSNCGFTITSADYDRVLEKLKKTATGWMTTINGKELKVEGQITYYNRYKRQNVVKDLSVELDRLSEESVNNDISSWTKGRSGEALSLLKKRFSHRPVQEKFVCLNCGFETHADEQAALNIARSWLFLRSQEYKKYQTNKTTGNTDKRAFVETWQSFYRKKLKEVWKPAV

SEQ ID NO: 126 - protein, 977 aa, synthetic construct
  REGION 1..977: note = CasX variant
MQEIKRINKIRRRLVKDSNTKKAGKTGPMKTLLVRVMTPDLRERLENLRKKPENIPQPISNTSRANLNKLLTDYTEMKKAILHVYWEEFQKDPVGLMSRVAQPAPKNIDQRKLIPVKDGNERLTSSGFACSQCCQPLYVYKLEQVNDKGKPHTNYFGRCNVSEHERLILLSPHKPEANDELVTYSLGKFGQRALDFYSIHVTRESNHPVKPLEQIGGNSCASGPVGKALSDACMGAVASFLTKYQDIILEHQKVIKKNEKRLANLKDIASANGLAFPKITLPPQPHTKEGIEAYNNVVAQIVIWVNLNLWQKLKIGRDEAKPLQRLKGFPSFPLVERQANEVDWWDMVCNVKKLINEKKEDGKVFWQNLAGYKRQEALLPYLSSESDRKKGKKFARYQFGDLLLHLEKKHGEDWGKVYDEAWERIDKKVEGLSKHIKLEEERRSEDAQSKAALTDWLRAKASFVIEGLKEADKDEFCRCELKLQKWYGDLRGKPFAIEAENSILDISGFSKQYNCAFIWQKDGVKKLNLYLIINYFKGGKLRFKKIKPEAFEANRFYTVINKKSGEIVPMEVNFNFDDPNLIILPLAFGKRQGREFIWNDLLSLETGSLKLANGRVIEKTLYNRRTRQDEPALFVALTFERREVLDSSNIKPMNLIGIDRGENIPAVIALTDPEGCPLSRFKDSLGNPTHILRIGESYKEKQRTIQAKKEVEQRRAGGYSRKYASKAKNLADDMVRNTARDLLYYAVTQDAMLIFENLSRGFGRQGKRTFMAERQYTRMEDWLTAKLAYEGLSKTYLSKTLAQYTSKTCSNCGFTITSADYDRVLEKLKKTATGWMTTINGKELKVEGQITYYNRYKRQNVVKDLSVELDRLSEESVNNDISSWTKGRSGEALSLLKKRFSHRPVQEKFVCLNCGFETHADEQAALNIARSWLFLRSQEYKKYQTNKTTGNTDKRAFVETWQSFYRKKLKEVWKPAV

SEQ ID NO: 127 - protein, 977 aa, synthetic construct
  REGION 1..977: note = CasX variant
MQEIKRINKIRRRLVKDSNTKKAGKTGPMKTLLVRVMTPDLRERLENLRKKPENIPQPISNTSRANLNKLLTDYTEMKKAILHVYWEEFQKDPVGLMSRVAQPAPKNIDQRKLIPVKDGNERLTSSGFACSQCCQPLYVYKLEQVNDKGKPHTNYFGRCNVSEHERLILLSPHKPEANDELVTYSLGKFGQRALDFYSIHVTRESNHPVKPLEQIGGNSCASGPVGKALSDACMGAVASFLTKYQDIILEHQKVIKKNEKRLANLKDIASANGLAFPKITLPPQPHTKEGIEAYNNVVAQIVIWVNLNLWQKLKIGRDEAKPLQRLKGFPSFPLVERQANEVDWWDMVCNVKKLINEKKEDGKVFWQNLAGYKRQEALRPYLSSEEDRKKGKKFARYQFGDLLLHLEKKHGEDWGKVYDEAWERIDKKVEGLSKHIKLEEERRSEDAQSKAALTDWLRAKASFVIEGLKEADKDEFKRCELKLQKWYGDLRGKPFAIEAENSILDISGFSKQYNCAFIWQKDGVKKLNLYLIINYFKGGKLRFKKIKPEAFEANRFYTVINKKSGEIVPMEVNFNFDDPNLIILPLAFGKRQGREFIWNDLLSLETGSLKLANGRVIEKTLYNRRTRQDEPALFVALTFERREVLDSSNIKPMNLIGIDRGENIPAVIALTDPEGCPLSRFKDSLGNPTHILRIGESYKEKQRTIQAKKEVEQRRAGGYSRKYASKAKNLADDMVRNTARDLLYYAVTQDAMLIFENLSRGFGRQGKRTFMAERQYTRMEDWLTAKLAYEGLSKTYLSKTLAQYTSKTCSNCGFTITSADYDRVLEKLKKTATGWMTTINGKELKVEGQITYYNRYKRQNVVKDLSVELDRLSEESVNNDISSWTKGRSGEALSLLKKRFSHRPVQEKFVCLNCGFETHADEQAALNIARSWLFLRSQEYKKYQTNKTTGNTDKRAFVETWQSFYRKKLKEVWKPAV

SEQ ID NO: 128 - protein, 978 aa, synthetic construct
  REGION 1..978: note = CasX variant
MQEIKRINKIRRRLVKDSNTKKAGKTGPMKTLLVRVMTPDLRERLENLRKKPENIPQPISNTSRANLNKLLTDYTEMKKAILHVYWEEFQKDPVGLMSRVAQPAPKNIDQRKLIPVKDGNERLTSSGFACSQCCQPLYVYKLEQVNDKGKPHTNYFGRCNVSEHERLILLSPHKPEANDELVTYSLGKFGQRALDFYSIHVTRESNHPVKPLEQIGGNSCASGPVGKALSDACMGAVASFLTKYQDIILEHQKVIKKNEKRLANLKDIASANGLAFPKITLPPQPHTKEGIEAYNNVVAQIVIWVNLNLWQKLKIGRDEAKPLQRLKGFPSFPLVERQANEVDWWDMVCNVKKLINEKKEDGKVFWQNLAGYKRQEALLPYLSSEEDRKKGKKFARYQFGDLLLHLEKKHGEDWGKVYDEAWERIDKKVEGLSKHIKLEEERRSEDAQSKAALTDWLRAKASFVIEGLKEADKDEFCRCELKLQKWYGDLRGKPFAIEAENSILDISGFSKQYNCAFIWQKDGVKKLNLYLIINYFKGGKLRFKKIKPEAFEANRFYTVINKKSGEIVPMEVNFNFDDPNLIILPLAFGKRQGREFIWNDLLSLETGSLKLANGRVIEKTLYNRRTRQDEPALFVALTFERREVLDSSNIKPMNLIGIDRGENIPAVIALTDPEGCPLSRFKDSLGNPTHILRIGESYKEKQRTIQAAKEVEQRRAGGYSRKYASKAKNLADDMVRNTARDLLYYAVTQDAMLIFENLSRGFGRQGKRTFMAERQYTRMEDWLTAKLAYEGDPSKTYLSKTLAQYTSKTCSNCGFTITSADYDRVLEKLKKTATGWMTTINGKELKVEGQITYYNRYKRQNVVKDLSVELDRLSEESVNNDISSWTKGRSGEALSLLKKRFSHRPVQEKFVCLNCGFETHADEQAALNIARSWLFLRSQEYKKYQTNKTTGNTDKRAFVETWQSFYRKKLKEVWKPAV

SEQ ID NO: 129 - protein, 978 aa, synthetic construct
  REGION 1..978: note = CasX variant
MQEIKRINKIRRRLVKDSNTKKAGKTGPMKTLLVRVMTPDLRERLENLRKKPENIPQPISNTSRANLNKLLTDYTEMKKAILHVYWEEFQKDPVGLMSRVAQPAPKNIDQRKLIPVKDGNERLTSSGFACSQCCQPLYVYKLEQVNDKGKPHTNYFGRCNVSEHERLILLSPHKPEANDELVTYSLGKFGQRALDFYSIHVTRESNHPVKPLEQIGGNSCASGPVGKALSDACMGAVASFLTKYQDIILEHQKVIKKNEKRLANLKDIASANGLAFPKITLPPQPHTKEGIEAYNNVVAQIVIWVNLNLWQKLKIGRDEAKPLQRLKGFPSFPLVERQANEVDWWDMVCNVKKLINEKKEDGKVFWQNLAGYKRQEALLPYLSSEEDRKKGKKFARYQFGDLLLHLEKKHGEDWGKVYDEAWERIDKKVEGLSKHIKLEEERRSEDAQSKAALTDWLRAKASFVIEGLKEADKDEFCRCELKLQKWYGDLRGKPFAIEAENSILDISGFSKQYNCAFIWQKDGVKKLNLYLIINYFKGGKLRFKKIKPEAFEANRFYTVINKKSGEIVPMEVNFNFDDPNLIILPLAFGKRQGREFIWNDLLSLETGSLKLANGRVIEKTLYNRRTRQDEPALFVALTFERREVLDSSNIKPMNLIGIDRGENIPAVIALTDPEGCPLSRFKDSLGNPTHILRIGESYKEKQRTIQAAKEVEQRRAGGYSRKYASKAKNLADDMVRNTARDLLYYAVTQDAMLIFENLSRGFGRQGKRTFMAERQYTRMEDWLTAKLAYEFLPSKTYLSKTLAQYTSKTCSNCGFTITSADYDRVLEKLKKTATGWMTTINGKELKVEGQITYYNRYKRQNVVKDLSVELDRLSEESVNNDISSWTKGRSGEALSLLKKRFSHRPVQEKFVCLNCGFETHADEQAALNIARSWLFLRSQEYKKYQTNKTTGNTDKRAFVETWQSFYRKKLKEVWKPAV

SEQ ID NO: 130 - protein, 977 aa, synthetic construct
  REGION 1..977: note = CasX variant
MQEIKRINKIRRRLVKDSNTKKAGKTGPMKTLLVRVMTPDLRERLENLRKKPENIPQPISNTSRANLNKLLTDYTEMKKAILHVYWEEFQKDPVGLMSRVAQPAPKNIDQRKLIPVKDGNERLTSSGFACSQCCQPLYVYKLEQVNDKGKPHTNYFGRCNVSEHERLILLSPHKPEANDELVTYSLGKFGQRALDFYSIHVTRESNHPVKPLEQIGGNSCASGPVGKALSDACMGAVASFLTKYQDIILEHQKVIKKNEKRLANLKDIASANGLAFPKITLPPQPHTKEGIEAYNNVVAQIVIWVNLNLWQKLKIGRDEAKPLQRLKGFPSFPLVERQANEVDWWDMVCNVKKLINEKKEDGKVFWQNLAGYKRQEALLPYLSSEEDRKKGKKFARYQFGDLLLHLEKKHGEDWGKVYDEAWERIDKKVEGLSKHIKLEEERRSEDAQSKAALTDWLRAKASFVIEGLKEADKDEFCRCELKLQKWYGDLRGKPFAIEAENSILDISGFSKQYNCAFIWQKDGVKKLNLYLIINYFKGGKLRFKKIKPEAFEANRFYTVINKKSGEIVPMEVNFNFDDPNLIILPLAFGKRQGREFIWNDLLSLETGSLKLANGRVIEKTLYNRRTRQDEPALFVALTFERREVLDSSNIKPMNLIGIDRGENIPAVIALTDPEGCPLSRFKDSLGNPTHILRIGESYKEKQRTIQAKKEVEQRRAGGYSRKYASKAKNLADDMVRNTVRDLLYYAVTQDAMLIFENLSRGFGRQGKRTFMAERQYTRMEDWLTAKLAYEGLSKTYLSKTLAQYTSKTCSNCGFTITSADYDRVLEKLKKTATGWMTTINGKELKVEGQITYYNRYKRQNVVKDLSVELDRLSEESVNNDISSWTKGRSGEALSLLKKRFSHRPVQEKFVCLNCGFETHADEQAALNIARSWLFLRSQEYKKYQTNKTTGNTDKRAFVETWQSFYRKKLKEVWKPAV

SEQ ID NO: 131 - protein, 977 aa, synthetic construct
  REGION 1..977: note = CasX variant
MQEIKRINKIRRRLVKDSNTKKAGKTGPMKTLLVRVMTPDLRERLENLRKKPENIPQPISNTSRANLNKLLTDYTEMKKAILHVYWEEFQKDPVGLMSRVAQPAPKNIDQRKLIPVKDGNERLTSSGFACSQCCQPLYVYKLEQVNDKGKPHTNYFGRCNVSEHERLILLSPHKPEANDELVTYSLGKFGQRALDFYSIHVTRESNHPVKPLEQIGGNSCASGPVGKALSDACMGAVASFLTKYQDIILEHQKVIKKNEKRLANLKDIASANGLAFPKITLPPQPHTKEGIEAYNNVVAQIVIWVNLNLWQKLKIGRDEAKPLQRLKGFPSFPLVERQANEVDWWDMVCNVKKLINEKKEDGKVFWQNLAGYKRQEALRPYLSSEEDRKKGKKFARYQFGDLLLHLEKKHGEDWGKVYDEAWERIDKKVEGLSKHIKLEEERRSEDAQSKAALTDWLRAKASFVIEGLKEADKDEFCRCELKLQKWYGDLRGKPFAIEAENSILDISGFSKQYNCAFIWQKDGVKKLNLYLIINYFKGGKLRFKKIKPEAFEANRFYTVINKKSGEIVPMEVNFNFDDPNLIILPLAFGKRQGREFIWNDLLSLETGSLKLANGRVIEKTLYNRRTRQDEPALFVALTFERREVLDSSNIKPMNLIGIDRGENIPAVIALTDPEGCPLSRFKDSLGNPTHILRIGESYKEKQRTIQAKKEVEQRRAGGYSRKYASKAKNLADDMVRNTVRDLLYYAVTQDAMLIFENLSRGFGRQGKRTFMAERQYTRMEDWLTAKLAYEGLSKTYLSKTLAQYTSKTCSNCGFTITSADYDRVLEKLKKTATGWMTTINGKELKVEGQITYYNRYKRQNVVKDLSVELDRLSEESVNNDISSWTKGRSGEALSLLKKRFSHRPVQEKFVCLNCGFETHADEQAALNIARSWLFLRSQEYKKYQTNKTTGNTDKRAFVETWQSFYRKKLKEVWKPAV

SEQ ID NO: 132 - protein, 977 aa, synthetic construct
  REGION 1..977: note = CasX variant
MQEIKRINKIRRRLVKDSNTKKAGKTGPMKTLLVRVMTPDLRERLENLRKKPENIPQPISNTSRANLNKLLTDYTEMKKAILHVYWEEFQKDPVGLMSRVAQPAPKNIDQRKLIPVKDGNERLTSSGFACSQCCQPLYVYKLEQVNDKGKPHTNYFGRCNVSEHERLILLSPHKPEANDELVTYSLGKFGQRALDFYSIHVTRESNHPVKPLEQIGGNSCASGPVGKALSDACMGAVASFLTKYQDIILEHQKVIKKNEKRLANLKDIASANGLAFPKITLPPQPHTKEGIEAYNNVVAQIVIWVNLNLWQKLKIGRDEAKPLQRLKGFPSFPLVERQANEVDWWDMVCNVKKLINEKKEDGKVFWQNLAGYKRQEALLPYLSSEEDRKKGKKFARYQFGDLLLHLEKKHGEDWGKVYDEAWERIDKKVEGLSKHIKLEEERRSEDAQSKAALTDWLRAKASFVIEGLKEADKDEFKRCELKLQKWYGDLRGKPFAIEAENSILDISGFSKQYNCAFIWQKDGVKKLNLYLIINYFKGGKLRFKKIKPEAFEANRFYTVINKKSGEIVPMEVNFNFDDPNLIILPLAFGKRQGREFIWNDLLSLETGSLKLANGRVIEKTLYNRRTRQDEPALFVALTFERREVLDSSNIKPMNLIGIDRGENIPAVIALTDPEGCPLSRFKDSLGNPTHILRIGESYKEKQRTIQAKKEVEQRRAGGYSRKYASKAKNLADDMVRNTARDLLYYAVTQDAMLIFENLSRGFGRQGKRTFMAERQYTRMEDWLTAKLAYEGLSKTYLSKTLAQYTSKTCSNCGFTITSADYDRVLEKLKKTATGWMTTINGKELKVEGQITYYNRYKRQNVVKDLSVELDRLSEESVNNDISSWTKGRSGEALSLLKKRFSHRPVQEKFVCLNCGFETHADEQAALNIARSWLFLRSQEYKKYQTNKTTGNTDKRAFVETWQSFYRKKLKEVWKPAV

SEQ ID NO: 133 - protein, 978 aa, synthetic construct
  REGION 1..978: note = CasX variant
MQEIKRINKIRRRLVKDSNTKKAGKTGPMKTLLVRVMTPDLRERLENLRKKPENIPQPISNTSRANLNKLLTDYTEMKKAILHVYWEEFQKDPVGLMSRVAQPAPKNIDQRKLIPVKDGNERLTSSGFACSQCCQPLYVYKLEQVNDKGKPHTNYFGRCNVSEHERLILLSPHKPEANDELVTYSLGKFGQRALDFYSIHVTRESNHPVKPLEQIGGNSCASGPVGKALSDACMGAVASFLTKYQDIIIEHQKVIKKNEKRLANLKDIASANGLAFPKITLPPQPHTKEGIEAYNNVVAQIVIWVNLNLWQKLKIGRDEAKPLQRLKGFPSFPLVERQANEVDWWDMVCNVKKLINEKKEDGKVFWQNLAGYKRQEALLPYLSSEEDRKKGKKFARYQFGDLLLHLEKKHGEDWGKVYDEAWERIDKKVEGLSKHIKLEEERRSEDAQSKAALTDWLRAKASFVIEGLKEADKDEFCRCELKLQKWYGDLRGKPFAIEAENSILDISGFSKQYNCAFIWQKDGVKKLNLYLIINYFKGGKLRFKKIKPEAFEANRFYTVINKKSGEIVPMEVNFNFDDPNLIILPLAFGKRQGREFIWNDLLSLETGSLKLANGRVIEKTLYNRRTRQDEPALFVALTFERREVLDSSNIKPMNLIGIDRGENIPAVIALTDPEGCPLSRFKDSLGNPTHILRIGESYKEKQRTIQAAKEVEQRRAGGYSRKYASKAKNLADDMVRNTARDLLYYAVTQDAMLIFENLSRGFGRQGKRTFNAERQYTRMEDWLTAKLAYEGLPSKTYLSKTLAQYTSKTCSNCGFTITSADYDRVLEKLKKTATGWMTTINGKELKVEGQITYYNRYKRQNVVKDLSVELDRLSEESVNNDISSWTKGRSGEALSLLKKRFSHRPVQEKFVCLNCGFETHADEQAALNIARSWLFLRSQEYKKYQTNKTTGNTDKRAFVETWQSFYRKKLKEVWKPAV

SEQ ID NO: 134 - protein, 978 aa, synthetic construct
  REGION 1..978: note = CasX variant
MQEIKRINKIRRRLVKDSNTKKAGKTGPMKTLLVRVMTPDLRERLENLRKKPENIPQPISNTSRANLNKLLTDYTEMKKAILHVYWEEFQKDPVGLMSRVAQPAPKNIDQRKLIPVKDGNERLTSSGFACSQCCQPLYVYKLEQVNDKGKPHTNYFGRCNVSEHERLILLSPHKPEANDELVTYSLGKFGQRALDFYSIHVTRESNHPVKPLEQIGGNSCASGPVGKALSDACMGAVASFLTKYQDIILEHQKVIKKNEKRLANLKDIASANGLAFPKITLPPQPHTKEGIEAYNNVVAQIVIWVNLNLWQKLKIGRDEAKPLQRLKGFPSFPLVERQANEVDWWDMVCNVKKLINEKKEDGKVFWQNLAGYKRQEALLPYLSSEEDRKKGKKFARYQFGDLLLHLEKKHGEDWGKVYDEAWERIDKKVEGLSKHIKLEEERRSEDAQSKAALTDWLRAKASFVIEGLKEADKDEFCRCELKLQKWYGDLRGKPFAIEAENSILDISGFSKQYNCAFIWQKDGVKKLNLYLIINYFKGGKLRFKKIKPEAFEANRFYTVINKKSGEIVPMEVNFNFDDPNLIILPLAFGKRQGREFIWNDLLSLETGSLKLANGRVIEKTLYNRRTRQDEPALFVALTFERREVLDSSNIKPMNLIGIDRGENIPAVIALTDPEGCPLSRFKDSLGNPTHILRIGESYKEKQRTIQAAKEVEQRRAGGYSRKYASKAKNLADDMVRNTARDLLYYAKTQDAMLIFENLSRGFGRQGKRTFMAERQYTRMEDWLTAKLAYEGLPSKTYLSKTLAQYTSKTCSNCGFTITSADYDRVLEKLKKTATGWMTTINGKELKVEGQITYYNRYKRQNVVKDLSVELDRLSEESVNNDISSWTKGRSGEALSLLKKRFSHRPVQEKFVCLNCGFETHADEQAALNIARSWLFLRSQEYKKYQTNKTTGNTDKRAFVETWQSFYRKKLKEVWKPAV

SEQ ID NO: 135 - protein, 977 aa, synthetic construct
  REGION 1..977: note = CasX variant
MQEIKRINKIRRRLVKDSNTKKAGKTGPMKTLLVRVMTPDLRERLENLRKKPENIPQPISNTSRANLNKLLTDYTEMKKAILHVYWEEFQKDPVGLMSRVAQPAPKNIDQRKLIPVKDGNERLTSSGFACSQCCQPLYVYKLEQVNDKGKPHTNYFGRCNVSEHERLILLSPHKPEANDELVTYSLGKFGQRALDFYSIHVTRESNHPVKPLEQIGGNSCASGPVGKALSDACMGAVASFLTKYQDIILEHQKVIKKNEKRLANLKDIASANGLAFPKITLPPQPHTKEGIEAYNNVVAQIVIWVNLNLWQKLKIGRDEAKPLQRLKGFPSFPLVERQANEVDWWDMVCNVKKLINEKKEDGKVFWQNLAGYKRQEALRPYLSSEEDRKKGKKFARYQFGDLLLHLEKKHGEDWGKVYDEAWERIDKKVEGLSKHIKLEEERRSEDAQSKAALTDWLRAKASFVIEGLKEADKDEFKRCELKLQKWYGDLRGKPFAIEAENSILDISGFSKQYNCAFIWQKDGVKKLNLYLIINYFKGGKLRFKKIKPEAFEANRFYTVINKKSGEIVPMEVNFNFDDPNLIILPLAFGKRQGREFIWNDLLSLETGSLKLANGRVIEKTLYNRRTRQDEPALFVALTFERREVLDSSNIKPMNLIGIDRGENIPAVIALTDPEGCPLSRFKDSLGNPTHILRIGESYKEKQRTIQAKKEVEQRRAGGYSRKYASKAKNLADDMVRNTARDLLYYAVTQDAMLIFENLSRGFGRQGKRTFMAERQYTRNEDWLTAKLAYEGLSKTYLSKTLAQYTSKTCSNCGFTITSADYDRVLEKLKKTATGWMTTINGKELKVEGQITYYNRYKRQNVVKDLSVELDRLSEESVNNDISSWTKGRSGEALSLLKKRFSHRPVQEKFVCLNCGFETHADEQAALNIARSWLFLRSQEYKKYQTNKTTGNTDKRAFVETWQSFYRKKLKEVWKPAV

SEQ ID NO: 136 - protein, 978 aa, synthetic construct
  REGION 1..978: note = CasX variant
MQEIKRINKIRRRLVKDSNTKKAGKTGPMKTLLVRVMTPDLRERLENLRKKPENIPQPISNTSRANLNKLLTDYTEMKKAILHVYWEEFQKDPVGLMSRVAQPAPKNIDQRKLIPVKDGNERLTSSGFACSQCCQPLYVYKLEQVNDKGKPHTNYFGRCNVSEHERLILLSPHKPEANDELVTYSLGKFGQRALDFYSIHVTRESNHPVKPLEQIGGNSCASGPVGKALSDACMGAVASFLTKYQDIILEHQKVIKKNEKRLANLKDIASANGLAFPKITLPPQPHTKEGIEAYNNVVAQIVIWVNLNLWQKLKIGRDEAKPLQRLKGFPSFPLVERQANEVDWWDMVCNVKKLINEKKEDGKVFWQNLAGYKRQEALLPYLSSEEDRKKGKKFARYQFGDLLLHLEKKHGEDWGKVYDEAWERIDKKVEGLSKHIKLEEERRSEDAQSKAALTDWLRAKASFVIEGLKEADKDEFCRCELKLQKWYGDLRGKPFAIEAENSILDISGFSKQYNCAFIWQKDGVKKLNLYLIINYFKGGKLRFKKIKPEAFEANRFYTVINKKSGEIVPMEVNFNFDDPNLIILPLAFGKRQGREFIWNDLLSLETGSLKLANGRVIEKTLYNRRTRQDEPALFVALTFERREVLDSSNIKPMNLIGIDRGENIPAVIALTDPEGCPLSRFKDSLGNPTHILRIGESYKEKQRTIQAAKEVEQRRAGGYSRKYASKAKNLADDMVRNTARDLLYYAVTQDAMLIMENLSRGFGRQGKRTFMAERQYTRMEDWLTAKLAYEGLPSKTYLSKTLAQYTSKTCSNCGFTITSADYDRVLEKLKKTATGWMTTINGKELKVEGQITYYNRYKRQNVVKDLSVELDRLSEESVNNDISSWTKGRSGEALSLLKKRFSHRPVQEKFVCLNCGFETHADEQAALNIARSWLFLRSQEYKKYQTNKTTGNTDKRAFVETWQSFYRKKLKEVWKPAV

SEQ ID NO: 137 - protein, 977 aa, synthetic construct
  REGION 1..977: note = CasX variant
MQEIKRINKIRRRLVKDSNTKKAGKTGPMKTLLVRVMTPDLRERLENLRKKPENIPQPISNTSRANLNKLLTDYTEMKKAILHVYWEEFQKDPVGLMSRVAQPAPKNIDQRKLIPVKDGNERLTSSGFACSQCCQPLYVYKLEQVNDKGKPHTNYFGRCNVSEHERLILLSPHKPEANDELVTYSLGKFGQRALDFYSIHVTRESNHPVKPLEQIGGNSCASGPVGKALSDACMGAVASFLTKYQDIILEHQKVIKKNEKRLANLKDIASANGLAFPKITLPPQPHTKEGIEAYNNVVAQIVIWVNLNLWQKLKIGRDEAKPLQRLKGFPSFPLVERQANEVDWWDMVCNVKKLINEKKEDGKVFWQNLAGYKRQEALRPYLSSEEDRKKGKKFARYQFGDLLLHLEKKHGEDWGKVYDEAWERIDKKVEGLSKHIKLEEERRSEDAQSKAALTDWLRAKASFVIEGLKEADKDEFCRCELKLQKWYGDLRGKPFAIEAENSILDISGFSKQYNCAFIWQKDGVKKLNLYLIINYFKGGKLRFKKIKPEAFEANRFYTVINKKSGEIVPMEVNFNFDDPNLIILPLAFGKRQGREFIWNDLLSLETGSLKLANGRVIEKTLYNRRTRQDEPALFVALTFERREVLDSSNIKPMNLIGIDRGENIPAVIALTDPEGCPLSRFKDSLGNPTHILRIGESYKEKQRTIQAKKEVEQRRAGGYSRKYASKAKNLADDMVRNTARDLLYYAVTQDAMLIFENLSRGFGRQGKRTFMAERQYTRMEDWLTAKLAYEGLSKTYLSKTLAQYTSKTCSNCGFTITSADYDRVLEKLKKTATGWMTTINGKELKVEGQITYYNRRKRQNVVKDLSVELDRLSEESVNNDISSWTKGRSGEALSLLKKRFSHRPVQEKFVCLNCGFETHADEQAALNIARSWLFLRSQEYKKYQTNKTTGNTDKRAFVETWQSFYRKKLKEVWKPAV

SEQ ID NO: 138 - protein, 977 aa, synthetic construct
  REGION 1..977: note = CasX variant
MQEIKRINKIRRRLVKDSNTKKAGKTGPMKTLLVRVMTPDLRERLENLRKKPENIPQPISNTSRANLNKLLTDYTEMKKAILHVYWEEFQKDPVGLMSRVAQPAPKNIDQRKLIPVKDGNERLTSSGFACSQCCQPLYVYKLEQVNDKGKPHTNYFGRCNVSEHERLILLSPHKPEANDELVTYSLGKFGQRALDFYSIHVTRESNHPVKPLEQIGGNSCASGPVGKALSDACMGAVASFLTKYQDIILEHQKVIKKNEKRLANLKDIASANGLAFPKITLPPQPHTKEGIEAYNNVVAQIVIWVNLNLWQKLKIGRDEAKPLQRLKGFPSFPLVERQANEVDWWDMVCNVKKLINEKKEDGKVFWQNLAGYKRQEALRPYLSSEEDRKKGKKFARYQFGDLLLHLEKKHGEDWGKVYDEAWERIDKKVEGLSKHIKLEEERRSEDAQSKAALTDWLRAKASFVIEGLKEADKDEFCRCELKLQKWYGDLRGKPFAIEAENSILDISGFSKQYNCAFIWQKDGVKKLNLYLIINYFKGGKLRFKKIKPEAFEANRFYTVINKKSGEIVPMEVNFNFDDPNLIILPLAFGKRQGREFIWNDLLSLETGSLKLANGRVIEKTLYNRRTRQDEPALFVALTFERREVLDSSNIKPMNLIGVDRGENIPAVIALTDPEGCPLSRFKDSLGNPTHILRIGESYKEKQRTIQAKKEVEQRRAGGYSRKYASKAKNLADDMVRNTARDLLYYAVTQDAMLIFENLSRGFGRQGKRTFMAERQYTRMEDWLTAKLAYEGLSKTYLSKTLAQYTSKTCSNCGFTITSADYDRVLEKLKKTATGWMTTINGKELKVEGQITYYNRRKRQNVVKDLSVELDRLSEESVNNDISSWTKGRSGEALSLLKKRFSHRPVQEKFVCLNCGFETHADEQAALNIARSWLFLRSQEYKKYQTNKTTGNTDKRAFVETWQSFYRKKLKEVWKPAV

SEQ ID NO: 139 - protein, 977 aa, synthetic construct
  REGION 1..977: note = CasX variant
MQEIKRINKIRRRLVKDSNTKKAGKTGPMKTLLVRVMTPDLRERLENLRKKPENIPQPISNTSRANLNKLLTDYTEMKKAILHVYWEEFQKDPVGLMSRVAQPAPKNIDQRKLIPVKDGNERLTSSGFACSQCCQPLYVYKLEQVNDKGKPHTNYFGRCNVSEHERLILLSPHKPEANDELVTYSLGKFGQRALDFYSIHVTRESNHPVKPLEQIGGNSCASGPVGKALSDACMGAVASFLTKYQDIILEHQKVIKKNEKRLANLKDIASANGLAFPKITLPPQPHTKEGIEAYNNVVAQIVIWVNLNLWQKLKIGRDEAKPLQRLKGFPSFPLVERQANEVDWWDMVCNVKKLINEKKEDGKVFWQNLAGYKRQEALRPYLSSENDRKKGKKFARYQFGDLLLHLEKKHGEDWGKVYDEAWERIDKKVEGLSKHIKLEEERRSEDAQSKAALTDWLRAKASFVIEGLKEADKDEFCRCELKLQKWYGDLRGKPFAIEAENSILDISGFSKQYNCAFIWQKDGVKKLNLYLIINYFKGGKLRFKKIKPEAFEANRFYTVINKKSGEIVPMEVNFNFDDPNLIILPLAFGKRQGREFIWNDLLSLETGSLKLANGRVIEKTLYNRRTRQDEPALFVALTFERREVLDSSNIKPMNLIGVDRGENIPAVIALTDPEGCPLSRFKDSLGNPTHILRIGESYKEKQRTIQAKKEVEQRRAGGYSRKYASKAKNLADDMVRNTARDLLYYAVTQDAMLIFENLSRGFGRQGKRTFMAERQYTRMEDWLTAKLAYEGLSKTYLSKTLAQYTSKTCSNCGFTITSADYDRVLEKLKKTATGWMTTINGKELKVEGQITYYNRRKRQNVVKDLSVELDRLSEESVNNDISSWTKGRSGEALSLLKKRFSHRPVQEKFVCLNCGFETHADEQAALNIARSWLFLRSQEYKKYQTNKTTGNTDKRAFVETWQSFYRKKLKEVWKPAV

SEQ ID NO: 140 - protein, 977 aa, synthetic construct
  REGION 1..977: note = CasX variant
MQEIKRINKIRRRLVKDSNTKKAGKTGPMKTLLVRVMTPDLRERLENLRKKPENIPQPISNTSRANLNKLLTDYTEMKKAILHVYWEEFQKDPVGLMSRVAQPAPKNIDQRKLIPVKDGNERLTSSGFACSQCCQPLYVYKLEQVNDKGKPHTNYFGRCNVSEHERLILLSPHKPEANDELVTYSLGKFGQRALDFYSIHVTRESNHPVKPLEQIGGNSCASGPVGKALSDACMGAVASFLTKYQDIILEHQKVIKKNEKRLANLKDIASANGLAFPKITLPPQPHTKEGIEAYNNVVAQIVIWVNLNLWQKLKIGRDEAKPLQRLKGFPSFPLVERQANEVDWWDMVCNVKKLINEKKEDGKVFWQNLAGYKRQEALRPYLSSEEDRKKGKKFARYQFGDLLKHLEKKHGEDWGKVYDEAWERIDKKVEGLSKHIKLEEERRSEDAQSKAALTDWLRAKASFVIEGLKEADKDEFCRCELKLQKWYGDLRGKPFAIEAENSILDISGFSKQYNCAFIWQKDGVKKLNLYLIINYFKGGKLRFKKIKPEAFEANRFYTVINKKSGEIVPMEVNFNFDDPNLIILPLAFGKRQGREFIWNDLLSLETGSLKLANGRVIEKTLYNRRTRQDEPALFVALTFERREVLDSSNIKPMNLIGVDRGENIPAVIALTDPEGCPLSRFKDSLGNPTHILRIGESYKEKQRTIQAKKEVEQRRAGGYSRKYASKAKNLADDMVRNTARDLLYYAVTQDAMLIFENLSRGFGRQGKRTFMAERQYTRMEDWLTAKLAYEGLSKTYLSKTLAQYTSKTCSNCGFTITSADYDRVLEKLKKTATGWMTTINGKELKVEGQITYYNRRKRQNVVKDLSVELDRLSEESVNNDISSWTKGRSGEALSLLKKRFSHRPVQEKFVCLNCGFETHADEQAALNIARSWLFLRSQEYKKYQTNKTTGNTDKRAFVETWQSFYRKKLKEVWKPAV

SEQ ID NO: 141 - protein, 978 aa, synthetic construct
  REGION 1..978: note = CasX variant
MQEIKRINKIRRRLVKDSNTKKAGKTGPMKTLLVRVMTPDLRERLENLRKKPENIPQPISNTSRANLNKLLTDYTEMKKAILHVYWEEFQKDPVGLMSRVAQPAPKNIDQRKLIPVKDGNERLTSSGFACSQCCQPLYVYKLEQVNDKGKPHTNYFGRCNVSEHERLILLSPHKPEANDELVTYSLGKFGQVRALDFYSIHVTRESNHPVKPLEQIGGNSCASGPVGKALSDACMGAVASFLTKYQDIILEHQKVIKKNEKRLANLKDIASANGLAFPKITLPPQPHTKEGIEAYNNVVAQIVIWVNLNLWQKLKIGRDEAKPLQRLKGFPSFPLVERQANEVDWWDMVCNVKKLINEKKEDGKVFWQNLAGYKRQEALRPYLSSEEDRKKGKKFARYQFGDLLLHLEKKHGEDWGKVYDEAWERIDKKVEGLSKHIKLEEERRSEDAQSKAALTDWLRAKASFVIEGLKEADKDEFCRCELKLQKWYGDLRGKPFAIEAENSILDISGFSKQYNCAFIWQKDGVKKLNLYLIINYFKGGKLRFKKIKPEAFEANRFYTVINKKSGEIVPMEVNFNFDDPNLIILPLAFGKRQGREFIWNDLLSLETGSLKLANGRVIEKTLYNRRTRQDEPALFVALTFERREVLDSSNIKPMNLIGVDRGENIPAVIALTDPEGCPLSRFKDSLGNPTHILRIGESYKEKQRTIQAKKEVEQRRAGGYSRKYASKAKNLADDMVRNTARDLLYYAVTQDAMLIFENLSRGFGRQGKRTFMAERQYTRMEDWLTAKLAYEGLSKTYLSKTLAQYTSKTCSNCGFTITSADYDRVLEKLKKTATGWMTTINGKELKVEGQITYYNRRKRQNVVKDLSVELDRLSEESVNNDISSWTKGRSGEALSLLKKRFSHRPVQEKFVCLNCGFETHADEQAALNIARSWLFLRSQEYKKYQTNKTTGNTDKRAFVETWQSFYRKKLKEVWKPAV

SEQ ID NO: 142 - protein, 977 aa, synthetic construct
  REGION 1..977: note = CasX variant
MQEIKRINKIRRRLVKDSNTKKAGKTGPMKTLLVRVMTPDLRERLENLRKKPENIPQPISNTSRANLNKLLTDYTEMKKAILHVYWEEFQKDPVGLMSRVAQPAPKNIDQRKLIPVKDGNERLTSSGFACSQCCQPLYVYKLEQVNDKGKPHTNYFGRCNVSEHERLILLSPHKPEANDELVTYSLGKFGQRALDFYSIHVTRESNHPVKPLEQIGGNSCASGPVGKALSDACMGAVASFLTKYQDIILEHQKVIKKNEKRLANLKDIASANGLAFPKITLPPQPHTKEGIEAYNNVVAQIVIWVNLNLWQKLKIGRDEAKPLQRLKGFPSFPLVERQANEVDWWDMVCNVKKLINEKKEDGKVFWQNLAGYKRQEALRPYLSSENDRKKGKKFARYQFGDLLKHLEKKHGEDWGKVYDEAWERIDKKVEGLSKHIKLEEERRSEDAQSKAALTDWLRAKASFVIEGLKEADKDEFCRCELKLQKWYGDLRGKPFAIEAENSILDISGFSKQYNCAFIWQKDGVKKLNLYLIINYFKGGKLRFKKIKPEAFEANRFYTVINKKSGEIVPMEVNFNFDDPNLIILPLAFGKRQGREFIWNDLLSLETGSLKLANGRVIEKTLYNRRTRQDEPALFVALTFERREVLDSSNIKPMNLIGVDRGENIPAVIALTDPEGCPLSRFKDSLGNPTHILRIGESYKEKQRTIQAKKEVEQRRAGGYSRKYASKAKNLADDMVRNTARDLLYYAVTQDAMLIFENLSRGFGRQGKRTFMAERQYTRMEDWLTAKLAYEGLSKTYLSKTLAQYTSKTCSNCGFTITSADYDRVLEKLKKTATGWMTTINGKELKVEGQITYYNRRKRQNVVKDLSVELDRLSEESVNNDISSWTKGRSGEALSLLKKRFSHRPVQEKFVCLNCGFETHADEQAALNIARSWLFLRSQEYKKYQTNKTTGNTDKRAFVETWQSFYRKKLKEVWKPAV

SEQ ID NO: 143 - protein, 977 aa, synthetic construct
  REGION 1..977: note = CasX variant
MQEIKRINKIRRRLVKDSNTKKAGKTGPMKTLLVRVMTPDLRERLENLRKKPENIPQPISNTSRANLNKLLTDYTEMKKAILHVYWEEFQKDPVGLMSRVAQPAPKNIDQRKLIPVKDGNERLTSSGFACSQCCQPLYVYKLEQVNDKGKPHTNYFGRCNVSEHERLILLSPHKPEANDELVTYSLGKFGQRALDFYSIHVTRESNHPVKPLEQIGGNSCASGPVGKALSDACMGAVASFLTKYQDIILEHQKVIKKNEKRLANLKDIASANGLAFPKITLPPQPHTKEGIEAYNNVVAQIVIWVNLNLWQKLKIGRDEAKPLQRLKGFPSFPLVERQANEVDWWDMVCNVKKLINEKKEDGKVFWQNLAGYKRQEALRPYLSSEEDRKKGKKFARYQLGDLLLHLEKKHGEDWGKVYDEAWERIDKKVEGLSKHIKLEEERRSEDAQSKAALTDWLRAKASFVIEGLKEADKDEFCRCELKLQKWYGDLRGKPFAIEAENSILDISGFSKQYNCAFIWQKDGVKKLNLYLIINYFKGGKLRFKKIKPEAFEANRFYTVINKKSGEIVPMEVNFNFDDPNLIILPLAFGKRQGREFIWNDLLSLETGSLKLANGRVIEKTLYNRRTRQDEPALFVALTFERREVLDSSNIKPMNLIGVDRGENIPAVIALTDPEGCPLSRFKDSLGNPTHILRIGESYKEKQRTIQAKKEVEQRRAGGYSRKYASKAKNLADDMVRNTARDLLYYAVTQDAMLIFENLSRGFGRQGKRTFMAERQYTRMEDWLTAKLAYEGLSKTYLSKTLAQYTSKTCSNCGFTITSADYDRVLEKLKKTATGWMTTINGKELKVEGQITYYNRRKRQNVVKDLSVELDRLSEESVNNDISSWTKGRSGEALSLLKKRFSHRPVQEKFVCLNCGFETHADEQAALNIARSWLFLRSQEYKKYQTNKTTGNTDKRAFVETWQSFYRKKLKEVWKPAV

SEQ ID NO: 144 - protein, 977 aa, synthetic construct
  REGION 1..977: note = CasX variant
MQEIKRINKIRRRLVKDSNTKKAGKTGPMKTLLVRVMTPDLRERLENLRKKPENIPQPISNTSRANLNKLLTDYTEMKKAILHVYWEEFQKDPVGLMSRVAQPAPKNIDQRKLIPVKDGNERLTSSGFACSQCCQPLYVYKLEQVNDKGKPHTNYFGRCNVSEHERLILLSPHKPEANDELVTYSLGKFGQRALDFYSIHVTRESNHPVKPLEQIGGNSCASGPVGKALSDACMGAVASFLTKYQDIILEHQKVIKKNEKRLANLKDIASANGLAFPKITLPPQPHTKEGIEAYNNVVAQIVIWVNLNLWQKLKIGRDEAKPLQRLKGFPSFPLVERQANEVDWWDMVCNVKKLINEKKEDGKVFWQNLAGYKRQEALRPYLSSENDRKKGKKFARYQLGDLLLHLEKKHGEDWGKVYDEAWERIDKKVEGLSKHIKLEEERRSEDAQSKAALTDWLRAKASFVIEGLKEADKDEFCRCELKLQKWYGDLRGKPFAIEAENSILDISGFSKQYNCAFIWQKDGVKKLNLYLIINYFKGGKLRFKKIKPEAFEANRFYTVINKKSGEIVPMEVNFNFDDPNLIILPLAFGKRQGREFIWNDLLSLETGSLKLANGRVIEKTLYNRRTRQDEPALFVALTFERREVLDSSNIKPMNLIGVDRGENIPAVIALTDPEGCPLSRFKDSLGNPTHILRIGESYKEKQRTIQAKKEVEQRRAGGYSRKYASKAKNLADDMVRNTARDLLYYAVTQDAMLIFENLSRGFGRQGKRTFMAERQYTRMEDWLTAKLAYEGLSKTYLSKTLAQYTSKTCSNCGFTITSADYDRVLEKLKKTATGWMTTINGKELKVEGQITYYNRRKRQNVVKDLSVELDRLSEESVNNDISSWTKGRSGEALSLLKKRFSHRPVQEKFVCLNCGFETHADEQAALNIARSWLFLRSQEYKKYQTNKTTGNTDKRAFVETWQSFYRKKLKEVWKPAV

SEQ ID NO: 145 - protein, 977 aa, synthetic construct
  REGION 1..977: note = CasX variant
MQEIKRINKIRRRLVKDSNTKKAGKTGPMKTLLVRVMTPDLRERLENLRKKPENIPQPISNTSRANLNKLLTDYTEMKKAILHVYWEEFQKDPVGLMSRVAQPAPKNIDQRKLIPVKDGNERLTSSGFACSQCCQPLYVYKLEQVNDKGKPHTNYFGRCNVSEHERLILLSPHKPEANDELVTYSLGKFGQRALDFYSIHVTRESNHPVKPLEQIGGNSCASGPVGKALSDACMGAVASFLTKYQDIILEHQKVIKKNEKRLANLKDIASANGLAFPKITLPPQPHTKEGIEAYNNVVAQIVIWVNLNLWQKLKIGRDEAKPLQRLKGFPSFPLVERQANEVDWWDMVCNVKKLINEKKEDGKVFWQNLAGYKRQEALRPYLSSEEDRKKGKKFARYQLGDLLLHLEKKHGEDWGKVYDEAWERIDKKVEGLSKHIKLEEERRSEDAQSKAALTDWLRAKASFVIEGLKEADKDEFSRCELKLQKWYGDLRGKPFAIEAENSILDISGFSKQYNCAFIWQKDGVKKLNLYLIINYFKGGKLRFKKIKPEAFEANRFYTVINKKSGEIVPMEVNFNFDDPNLIILPLAFGKRQGREFIWNDLLSLETGSLKLANGRVIEKTLYNRRTRQDEPALFVALTFERREVLDSSNIKPMNLIGVDRGENIPAVIALTDPEGCPLSRFKDSLGNPTHILRIGESYKEKQRTIQAKKEVEQRRAGGYSRKYASKAKNLADDMVRNTARDLLYYAVTQDAMLIFENLSRGFGRQGKRTFMAERQYTRMEDWLTAKLAYEGLSKTYLSKTLAQYTSKTCSNCGFTITSADYDRVLEKLKKTATGWMTTINGKELKVEGQITYYNRRKRQNVVKDLSVELDRLSEESVNNDISSWTKGRSGEALSLLKKRFSHRPVQEKFVCLNCGFETHADEQAALNIARSWLFLRSQEYKKYQTNKTTGNTDKRAFVETWQSFYRKKLKEVWKPAV

SEQ ID NO: 146 - protein, 977 aa, synthetic construct
  REGION 1..977: note = CasX variant
MQEIKRINKIRRRLVKDSNTKKAGKTGPMKTLLVRVMTPDLRERLENLRKKPENIPQPISNTSRANLNKLLTDYTEMKKAILHVYWEEFQKDPVGLMSRVAQPAPKNIDQRKLIPVKDGNERLTSSGFACSQCCQPLYVYKLEQVNDKGKPHTNYFGRCNVSEHERLILLSPHKPEANDELVTYSLGKFGQRALDFYSIHVTRESNHPVKPLEQIGGNSCASGPVGKALSDACMGAVASFLTKYQDIILEHQKVIKKNEKRLANLKDIASANGLAFPKITLPPQPHTKEGIEAYNNVVAQIVIWVNLNLWQKLKIGRDEAKPLQRLKGFPSFPLVERQANEVDWWDMVCNVKKLINEKKEDGKVFWQNLAGYKRQEALRPYLSSEEDRKKGKKFARYQLGDLLKHLEKKHGEDWGKVYDEAWERIDKKVEGLSKHIKLEEERRSEDAQSKAALTDWLRAKASFVIEGLKEADKDEFCRCELKLQKWYGDLRGKPFAIEAENSILDISGFSKQYNCAFIWQKDGVKKLNLYLIINYFKGGKLRFKKIKPEAFEANRFYTVINKKSGEIVPMEVNFNFDDPNLIILPLAFGKRQGREFIWNDLLSLETGSLKLANGRVIEKTLYNRRTRQDEPALFVALTFERREVLDSSNIKPMNLIGVDRGENIPAVIALTDPEGCPLSRFKDSLGNPTHILRIGESYKEKQRTIQAKKEVEQRRAGGYSRKYASKAKNLADDMVRNTARDLLYYAVTQDAMLIFENLSRGFGRQGKRTFMAERQYTRMEDWLTAKLAYEGLSKTYLSKTLAQYTSKTCSNCGFTITSADYDRVLEKLKKTATGWMTTINGKELKVEGQITYYNRRKRQNVVKDLSVELDRLSEESVNNDISSWTKGRSGEALSLLKKRFSHRPVQEKFVCLNCGFETHADEQAALNIARSWLFLRSQEYKKYQTNKTTGNTDKRAFVETWQSFYRKKLKEVWKPAV

SEQ ID NO: 147 - protein, 977 aa, synthetic construct
  REGION 1..977: note = CasX variant
MQEIKRINKIRRRLVKDSNTKKAGKTGPMKTLLVRVMTPDLRERLENLRKKPENIPQPISNTSRANLNKLLTDYTEMKKAILHVYWEEFQKDPVGLMSRVAQPAPKNIDQRKLIPVKDGNERLTSSGFACSQCCQPLYVYKLEQVNDKGKPHTNYFGRCNVSEHERLILLSPHKPEANDELVTYSLGKFGQRALDFYSIHVTRESNHPVKPLEQIGGNSCASGPVGKALSDACMGAVASFLTKYQDIILEHQKVIKKNEKRLANLKDIASANGLAFPKITLPPQPHTKEGIEAYNNVVAQIVIWVNLNLWQKLKIGRDEAKPLQRLKGFPSFPLVERQANEVDWWDMVCNVKKLINEKKEDGKVFWQNLAGYKRQEALRPYLSSENDRKKGKKFARYQLGDLLKHLEKKHGEDWGKVYDEAWERIDKKVEGLSKHIKLEEERRSEDAQSKAALTDWLRAKASFVIEGLKEADKDEFSRCELKLQKWYGDLRGKPFAIEAENSILDISGFSKQYNCAFIWQKDGVKKLNLYLIINYFKGGKLRFKKIKPEAFEANRFYTVINKKSGEIVPMEVNFNFDDPNLIILPLAFGKRQGREFIWNDLLSLETGSLKLANGRVIEKTLYNRRTRQDEPALFVALTFERREVLDSSNIKPMNLIGVDRGENIPAVIALTDPEGCPLSRFKDSLGNPTHILRIGESYKEKQRTIQAKKEVEQRRAGGYSRKYASKAKNLADDMVRNTARDLLYYAVTQDAMLIFENLSRGFGRQGKRTFMAERQYTRMEDWLTAKLAYEGLSKTYLSKTLAQYTSKTCSNCGFTITSADYDRVLEKLKKTATGWMTTINGKELKVEGQITYYNRRKRQNVVKDLSVELDRLSEESVNNDISSWTKGRSGEALSLLKKRFSHRPVQEKFVCLNCGFETHADEQAALNIARSWLFLRSQEYKKYQTNKTTGNTDKRAFVETWQSFYRKKLKEVWKPAV

SEQ ID NO: 148 - protein, 977 aa, synthetic construct
  REGION 1..977: note = CasX variant
MQEIKRINKIRRRLVKDSNTKKAGKTGPMKTLLVRVMTPDLRERLENLRKKPENIPQPISNTSRANLNKLLTDYTEMKKAILHVYWEEFQKDPVGLMSRVAQPAPKNIDQRKLIPVKDGNERLTSSGFACSQCCQPLYVYKLEQVNDKGKPHTNYFGRCNVSEHERLILLSPHKPEANDELVTYSLGKFGQRALDFYSIHVTRESNHPVKPLEQIGGNSCASGPVGKALSDACMGAVASFLTKYQDIILEHQKVIKKNEKRLANLKDIASANGLAFPKITLPPQPHTKEGIEAYNNVVAQIVIWVNLNLWQKLKIGRDEAKPLQRLKGFPSFPLVERQANEVDWWDMVCNVKKLINEKKEDGKVFWQNLAGYKRQEALRPYLSSEEDRKKGKKFARYQLGDLLLHLEKKHGEDWGKVYDEAWERIDKKVEGLSKHIKLEEERRSEDAQSKAALTDWLRAKASFVIEGLKEADKDEFCRCELKLQKWYGDLRGKPFAIEAENSILDISGFSKQYNCAFIWQKDGVKKLNLYLIINYFKGGKLRFKKIKPEAFEANRFYTVINKKSGEIVPMEVNFNFDDPNLIILPLAFGKRQGREFIWNDLLSLETGSLKLANGRVIEKTLYNRRTRQDEPALFVALTFERREVLDSSNIKPMNLIGVDRGENIPAVIALTDPEGCPLSRFKDSLGNPTHILRIGESYKEKQRTIQAKKEVEQRRAGGYSRKYASKAKNLADDMVRNTARDLLYYAVTQDAMLIFENLSRGFGRQGKRTFMAERQYTRMEDWLTAKLAYEGLSKTLLSKTLAQYTSKTCSNCGFTITSADYDRVLEKLKKTATGWMTTINGKELKVEGQITYYNRRKRQNVVKDLSVELDRLSEESVNNDISSWTKGRSGEALSLLKKRFSHRPVQEKFVCLNCGFETHADEQAALNIARSWLFLRSQEYKKYQTNKTTGNTDKRAFVETWQSFYRKKLKEVWKPAV

SEQ ID NO: 149 - protein, 977 aa, synthetic construct
  REGION 1..977: note = CasX variant
MQEIKRINKIRRRLVKDSNTKKAGKTGPMKTLLVRVMTPDLRERLENLRKKPENIPQPISNTSRANLNKLLTDYTEMKKAILHVYWEEFQKDPVGLMSRVAQPAPKNIDQRKLIPVKDGNERLTSSGFACSQCCQPLYVYKLEQVNDKGKPHTNYFGRCNVSEHERLILLSPHKPEANDELVTYSLGKFGQRALDFYSIHVTRESNHPVKPLEQIGGNSCASGPVGKALSDACMGAVASFLTKYQDIILEHQKVIKKNEKRLANLKDIASANGLAFPKITLPPQPHTKEGIEAYNNVVAQIVIWVNLNLWQKLKIGRDEAKPLQRLKGFPSFPLVERQANEVDWWDMVCNVKKLINEKKEDGKVFWQNLAGYKRQEALRPYLSSENDRKKGKKFARYQLGDLLLHLEKKHGEDWGKVYDEAWERIDKKVEGLSKHIKLEEERRSEDAQSKAALTDWLRAKASFVIEGLKEADKDEFCRCELKLQKWYGDLRGKPFAIEAENSILDISGFSKQYNCAFIWQKDGVKKLNLYLIINYFKGGKLRFKKIKPEAFEANRFYTVINKKSGEIVPMEVNFNFDDPNLIILPLAFGKRQGREFIWNDLLSLETGSLKLANGRVIEKTLYNRRTRQDEPALFVALTFERREVLDSSNIKPMNLIGVDRGENIPAVIALTDPEGCPLSRFKDSLGNPTHILRIGESYKEKQRTIQAKKEVEQRRAGGYSRKYASKAKNLADDMVRNTARDLLYYAVTQDAMLIFENLSRGFGRQGKRTFMAERQYTRMEDWLTAKLAYEGLSKTLLSKTLAQYTSKTCSNCGFTITSADYDRVLEKLKKTATGWMTTINGKELKVEGQITYYNRRKRQNVVKDLSVELDRLSEESVNNDISSWTKGRSGEALSLLKKRFSHRPVQEKFVCLNCGFETHADEQAALNIARSWLFLRSQEYKKYQTNKTTGNTDKRAFVETWQSFYRKKLKEVWKPAV

SEQ ID NO: 150 - protein, 977 aa, synthetic construct
  REGION 1..977: note = CasX variant
MQEIKRINKIRRRLVKDSNTKKAGKTGPMKTLLVRVMTPDLRERLENLRKKPENIPQPISNTSRANLNKLLTDYTEMKKAILHVYWEEFQKDPVGLMSRVAQPAPKNIDQRKLIPVKDGNERLTSSGFACSQCCQPLYVYKLEQVNDKGKPHTNYFGRCNVSEHERLILLSPHKPEANDELVTYSLGKFGQRALDFYSIHVTRESNHPVKPLEQIGGNSCASGPVGKALSDACMGAVASFLTKYQDIILEHQKVIKKNEKRLANLKDIASANGLAFPKITLPPQPHTKEGIEAYNNVVAQIVIWVNLNLWQKLKIGRDEAKPLQRLKGFPSFPLVERQANEVDWWDMVCNVKKLINEKKEDGKVFWQNLAGYKRQEALRPYLSSENDRKKGKKFARYQLGDLLKHLEKKHGEDWGKVYDEAWERIDKKVEGLSKHIKLEEERRSEDAQSKAALTDWLRAKASFVIEGLKEADKDEFSRCELKLQKWYGDLRGKPFAIEAENSILDISGFSKQYNCAFIWQKDGVKKLNLYLIINYFKGGKLRFKKIKPEAFEANRFYTVINKKSGEIVPMEVNFNFDDPNLIILPLAFGKRQGREFIWNDLLSLETGSLKLANGRVIEKTLYNRRTRQDEPALFVALTFERREVLDSSNIKPMNLIGVDRGENIPAVIALTDPEGCPLSRFKDSLGNPTHILRIGESYKEKQRTIQAKKEVEQRRAGGYSRKYASKAKNLADDMVRNTARDLLYYAVTQDAMLIFENLSRGFGRQGKRTFMAERQYTRMEDWLTAKLAYEGLSKTLLSKTLAQYTSKTCSNCGFTITSADYDRVLEKLKKTATGWMTTINGKELKVEGQITYYNRRKRQNVVKDLSVELDRLSEESVNNDISSWTKGRSGEALSLLKKRFSHRPVQEKFVCLNCGFETHADEQAALNIARSWLFLRSQEYKKYQTNKTTGNTDKRAFVETWQSFYRKKLKEVWKPAV

SEQ ID NO: 151 - protein, 977 aa, synthetic construct
  REGION 1..977: note = CasX variant
MQEIKRINKIRRRLVKDSNTKKAGKTGPMKTLLVRVMTPDLRERLENLRKKPENIPQPISNTSRANLNKLLTDYTEMKKAILHVYWEEFQKDPVGLMSRVAQPAPKNIDQRKLIPVKDGNERLTSSGFACSQCCQPLYVYKLEQVNDKGKPHTNYFGRCNVSEHERLILLSPHKPEANDELVTYSLGKFGQRALDFYSIHVTRESNHPVKPLEQIGGNSCASGPVGKALSDACMGAVASFLTKYQDIILEHQKVIKKNEKRLANLKDIASANGLAFPKITLPPQPHTKEGIEAYNNVVAQIVIWVNLNLWQKLKIGRDEAKPLQRLKGFPSFPLVERQANEVDWWDMVCNVKKLINEKKEDGKVFWQNLAGYKRQEALRPYLSSEEDRKKGKKFARYQFGDLLLHLEKKHGEDWGKVYDEAWERIDKKVEGLSKHIKLEEERRSEDAQSKAALTDWLRAKASFVIEGLKEADKDEFCRCELKLQKWYGDLRGKPFAIEAENSILDISGFSKQYNCAFIWQKDGVKKLNLYLIINYFKGGKLRFKKIKPEAFEANRFYTVINKKSGEIVPMEVNFNFDDPNLIILPLAFGKRQGREFIWNDLLSLETGSLKLANGRVIEKTLYNRRTRQDEPALFVALTFERREVLDSSNIKPMNLIGVDRGENIPAVIALTDPEGCPLSRFKDSLGNPTHILRIGESYKEKQRTIQAKKEVEQRRAGGYSRKYASKAKNLADDMVRNTARDLLYYAVTQDAMLIFENLSRGFGRQGKRTFMAERQYTRMEDWLTAKLAYEGLSKTLLSKTLAQYTSKTCSNCGFTITSADYDRVLEKLKKTATGWMTTINGKELKVEGQITYYNRRKRQNVVKDLSVELDRLSEESVNNDISSWTKGRSGEALSLLKKRFSHRPVQEKFVCLNCGFETHADEQAALNIARSWLFLRSQEYKKYQTNKTTGNTDKRAFVETWQSFYRKKLKEVWKPAV

SEQ ID NO: 152 - protein, 977 aa, synthetic construct
  REGION 1..977: note = CasX variant
MQEIKRINKIRRRLVKDSNTKKAGKTGPMKTLLVRVMTPDLRERLENLRKKPENIPQPISNTSRANLNKLLTDYTEMKKAILHVYWEEFQKDPVGLMSRVAQPAPKNIDQRKLIPVKDGNERLTSSGFACSQCCQPLYVYKLEQVNDKGKPHTNYFGRCNVSEHERLILLSPHKPEANDELVTYSLGKFGQRALDFYSIHVTRESNHPVKPLEQIGGNSCASGPVGKALSDACMGAVASFLTKYQDIILEHQKVIKKNEKRLANLKDIASANGLAFPKITLPPQPHTKEGIEAYNNVVAQIVIWVNLNLWQKLKIGRDEAKPLQRLKGFPSFPLVERQANEVDWWDMVCNVKKLINEKKEDGKVFWQNLAGYKRQEALRPYLSSEEDRKKGKKFARYQFGDLLKHLEKKHGEDWGKVYDEAWERIDKKVEGLSKHIKLEEERRSEDAQSKAALTDWLRAKASFVIEGLKEADKDEFCRCELKLQKWYGDLRGKPFAIEAENSILDISGFSKQYNCAFIWQKDGVKKLNLYLIINYFKGGKLRFKKIKPEAFEANRFYTVINKKSGEIVPMEVNFNFDDPNLIILPLAFGKRQGREFIWNDLLSLETGSLKLANGRVIEKTLYNRRTRQDEPALFVALTFERREVLDSSNIKPMNLIGVDRGENIPAVIALTDPEGCPLSRFKDSLGNPTHILRIGESYKEKQRTIQAKKEVEQRRAGGYSRKYASKAKNLADDMVRNTARDLLYYAVTQDAMLIFENLSRGFGRQGKRTFMAERQYTRMEDWLTAKLAYEGLSKTLLSKTLAQYTSKTCSNCGFTITSADYDRVLEKLKKTATGWMTTINGKELKVEGQITYYNRRKRQNVVKDLSVELDRLSEESVNNDISSWTKGRSGEALSLLKKRFSHRPVQEKFVCLNCGFETHADEQAALNIARSWLFLRSQEYKKYQTNKTTGNTDKRAFVETWQSFYRKKLKEVWKPAV

SEQ ID NO: 153 - protein, 977 aa, synthetic construct
  REGION 1..977: note = CasX variant
MQEIKRINKIRRRLVKDSNTKKAGKTGPMKTLLVRVMTPDLRERLENLRKKPENIPQPISNTSRANLNKLLTDYTEMKKAILHVYWEEFQKDPVGLMSRVAQPAPKNIDQRKLIPVKDGNERLTSSGFACSQCCQPLYVYKLEQVNDKGKPHTNYFGRCNVSEHERLILLSPHKPEANDELVTYSLGKFGQRALDFYSIHVTRESNHPVKPLEQIGGNSCASGPVGKALSDACMGAVASFLTKYQDIILEHQKVIKKNEKRLANLKDIASANGLAFPKITLPPQPHTKEGIEAYNNVVAQIVIWVNLNLWQKLKIGRDEAKPLQRLKGFPSFPLVERQANEVDWWDMVCNVKKLINEKKEDGKVFWQNLAGYKRQEALRPYLSSENDRKKGKKFARYQFGDLLLHLEKKHGEDWGKVYDEAWERIDKKVEGLSKHIKLEEERRSEDAQSKAALTDWLRAKASFVIEGLKEADKDEFCRCELKLQKWYGDLRGKPFAIEAENSILDISGFSKQYNCAFIWQKDGVKKLNLYLIINYFKGGKLRFKKIKPEAFEANRFYTVINKKSGEIVPMEVNFNFDDPNLIILPLAFGKRQGREFIWNDLLSLETGSLKLANGRVIEKTLYNRRTRQDEPALFVALTFERREVLDSSNIKPMNLIGVDRGENIPAVIALTDPEGCPLSRFKDSLGNPTHILRIGESYKEKQRTIQAKKEVEQRRAGGYSRKYASKAKNLADDMVRNTARDLLYYAVTQDAMLIFENLSRGFGRQGKRTFMAERQYTRMEDWLTAKLAYEGLSKTLLSKTLAQYTSKTCSNCGFTITSADYDRVLEKLKKTATGWMTTINGKELKVEGQITYYNRRKRQNVVKDLSVELDRLSEESVNNDISSWTKGRSGEALSLLKKRFSHRPVQEKFVCLNCGFETHADEQAALNIARSWLFLRSQEYKKYQTNKTTGNTDKRAFVETWQSFYRKKLKEVWKPAV

SEQ ID NO: 154 - protein, 977 aa, synthetic construct
  REGION 1..977: note = CasX variant
MQEIKRINKIRRRLVKDSNTKKAGKTGPMKTLLVRVMTPDLRERLENLRKKPENIPQPISNTSRANLNKLLTDYTEMKKAILHVYWEEFQKDPVGLMSRVAQPAPKNIDQRKLIPVKDGNERLTSSGFACSQCCQPLYVYKLEQVNDKGKPHTNYFGRCNVSEHERLILLSPHKPEANDELVTYSLGKFGQRALDFYSIHVTRESNHPVKPLEQIGGNSCASGPVGKALSDACMGAVASFLTKYQDIILEHQKVIKKNEKRLANLKDIASANGLAFPKITLPPQPHTKEGIEAYNNVVAQIVIWVNLNLWQKLKIGRDEAKPLQRLKGFPSFPLVERQANEVDWWDMVCNVKKLINEKKEDGKVFWQNLAGYKRQEALRPYLSSENDRKKGKKFARYQFGDLLKHLEKKHGEDWGKVYDEAWERIDKKVEGLSKHIKLEEERRSEDAQSKAALTDWLRAKASFVIEGLKEADKDEFSRCELKLQKWYGDLRGKPFAIEAENSILDISGFSKQYNCAFIWQKDGVKKLNLYLIINYFKGGKLRFKKIKPEAFEANRFYTVINKKSGEIVPMEVNFNFDDPNLIILPLAFGKRQGREFIWNDLLSLETGSLKLANGRVIEKTLYNRRTRQDEPALFVALTFERREVLDSSNIKPMNLIGVDRGENIPAVIALTDPEGCPLSRFKDSLGNPTHILRIGESYKEKQRTIQAKKEVEQRRAGGYSRKYASKAKNLADDMVRNTARDLLYYAVTQDAMLIFENLSRGFGRQGKRTFMAERQYTRMEDWLTAKLAYEGLSKTLLSKTLAQYTSKTCSNCGFTITSADYDRVLEKLKKTATGWMTTINGKELKVEGQITYYNRRKRQNVVKDLSVELDRLSEESVNNDISSWTKGRSGEALSLLKKRFSHRPVQEKFVCLNCGFETHADEQAALNIARSWLFLRSQEYKKYQTNKTTGNTDKRAFVETWQSFYRKKLKEVWKPAV

SEQ ID NO: 155 - protein, 977 aa, synthetic construct
  REGION 1..977: note = CasX variant
MQEIKRINKIRRRLVKDSNTKKAGKTGPMKTLLVRVMTPDLRERLENLRKKPENIPQPISNTSRANLNKLLTDYTEMKKAILHVYWEEFQKDPVGLMSRVAQPAPKNIDQRKLIPVKDGNERLTSSGFACSQCCQPLYVYKLEQVNDKGKPHTNYFGRCNVSEHERLILLSPHKPEANDELVTYSLGKFGQRALDFYSIHVTRESNHPVKPLEQIGGNSCASGPVGKALSDACMGAVASFLTKYQDIILEHQKVIKKNEKRLANLKDIASANGLAFPKITLPPQPHTKEGIEAYNNVVAQIVIWVNLNLWQKLKIGRDEAKPLQRLKGFPSFPLVERQANEVDWWDMVCNVKKLINEKKEDGKVFWQNLAGYKRQEALRPYLSSENDRKKGKKFARYQFGDLLLHLEKKHGEDWGKVYDEAWERIDKKVEGLSKHIKLEEERRSEDAQSKAALTDWLRAKASFVIEGLKEADKDEFCRCELKLQKWYGDLRGKPFAIEAENSILDISGFSKQYNCAFIWQKDGVKKLNLYLIINYFKGGKLRFKKIKPEAFEANRFYTVINKKSGEIVPMEVNFNFDDPNLIILPLAFGKRQGREFIWNDLLSLETGSLKLANGRVIEKTLYNRRTRQDEPALFVALTFERREVLDSSNIKPMNLIGIDRGENIPAVIALTDPEGCPLSRFKDSLGNPTHILRIGESYKEKQRTIQAKKEVEQRRAGGYSRKYASKAKNLADDMVRNTARDLLYYAVTQDAMLIFENLSRGFGRQGKRTFMAERQYTRMEDWLTAKLAYEGLSKTYLSKTLAQYTSKTCSNCGFTITSADYDRVLEKLKKTATGWMTTINGKELKVEGQITYYNRRKRQNVVKDLSVELDRLSEESVNNDISSWTKGRSGEALSLLKKRFSHRPVQEKFVCLNCGFETHADEQAALNIARSWLFLRSQEYKKYQTNKTTGNTDKRAFVETWQSFYRKKLKEVWKPAV

SEQ ID NO: 156 - protein, 977 aa, synthetic construct
  REGION 1..977: note = CasX variant
MQEIKRINKIRRRLVKDSNTKKAGKTGPMKTLLVRVMTPDLRERLENLRKKPENIPQPISNTSRANLNKLLTDYTEMKKAILHVYWEEFQKDPVGLMSRVAQPAPKNIDQRKLIPVKDGNERLTSSGFACSQCCQPLYVYKLEQVNDKGKPHTNYFGRCNVSEHERLILLSPHKPEANDELVTYSLGKFGQRALDFYSIHVTRESNHPVKPLEQIGGNSCASGPVGKALSDACMGAVASFLTKYQDIILEHQKVIKKNEKRLANLKDIASANGLAFPKITLPPQPHTKEGIEAYNNVVAQIVIWVNLNLWQKLKIGRDEAKPLQRLKGFPSFPLVERQANEVDWWDMVCNVKKLINEKKEDGKVFWQNLAGYKRQEALRPYLSSENDRKKGKKFARYQFGDLLKHLEKKHGEDWGKVYDEAWERIDKKVEGLSKHIKLEEERRSEDAQSKAALTDWLRAKASFVIEGLKEADKDEFCRCELKLQKWYGDLRGKPFAIEAENSILDISGFSKQYNCAFIWQKDGVKKLNLYLIINYFKGGKLRFKKIKPEAFEANRFYTVINKKSGEIVPMEVNFNFDDPNLIILPLAFGKRQGREFIWNDLLSLETGSLKLANGRVIEKTLYNRRTRQDEPALFVALTFERREVLDSSNIKPMNLIGIDRGENIPAVIALTDPEGCPLSRFKDSLGNPTHILRIGESYKEKQRTIQAKKEVEQRRAGGYSRKYASKAKNLADDMVRNTARDLLYYAVTQDAMLIFENLSRGFGRQGKRTFMAERQYTRMEDWLTAKLAYEGLSKTYLSKTLAQYTSKTCSNCGFTITSADYDRVLEKLKKTATGWMTTINGKELKVEGQITYYNRRKRQNVVKDLSVELDRLSEESVNNDISSWTKGRSGEALSLLKKRFSHRPVQEKFVCLNCGFETHADEQAALNIARSWLFLRSQEYKKYQTNKTTGNTDKRAFVETWQSFYRKKLKEVWKPAV

SEQ ID NO: 157 - protein, 977 aa, synthetic construct
  REGION 1..977: note = CasX variant
MQEIKRINKIRRRLVKDSNTKKAGKTGPMKTLLVRVMTPDLRERLENLRKKPENIPQPISNTSRANLNKLLTDYTEMKKAILHVYWEEFQKDPVGLMSRVAQPAPKNIDQRKLIPVKDGNERLTSSGFACSQCCQPLYVYKLEQVNDKGKPHTNYFGRCNVSEHERLILLSPHKPEANDELVTYSLGKFGQRALDFYSIHVTRESNHPVKPLEQIGGNSCASGPVGKALSDACMGAVASFLTKYQDIILEHQKVIKKNEKRLANLKDIASANGLAFPKITLPPQPHTKEGIEAYNNVVAQIVIWVNLNLWQKLKIGRDEAKPLQRLKGFPSFPLVERQANEVDWWDMVCNVKKLINEKKEDGKVFWQNLAGYKRQEALRPYLSSPEDRKKGKKFARYQFGDLLLHLEKKHGEDWGKVYDEAWERIDKKVEGLSKHIKLEEERRSEDAQSKAALTDWLRAKASFVIEGLKEADKDEFCRCELKLQKWYGDLRGKPFAIEAENSILDISGFSKQYNCAFIWQKDGVKKLNLYLIINYFKGGKLRFKKIKPEAFEANRFYTVINKKSGEIVPMEVNFNFDDPNLIILPLAFGKRQGREFIWNDLLSLETGSLKLANGRVIEKTLYNRRTRQDEPALFVALTFERREVLDSSNIKPMNLIGIDRGENIPAVIALTDPEGCPLSRFKDSLGNPTHILRIGESYKEKQRTIQAKKEVEQRRAGGYSRKYASKAKNLANDMVRNTARDLLYYAVTQDAMLIFENLSRGFGRQGKRTFMAERQYTRMEDWLTAKLAYEGLSKTYLSKTLAQYTSKTCSNCGFTITSADYDRVLEKLKKTATGWMTTINGKELKVEGQITYYNRRKRQNVVKDLSVELDRLSEESVNNDISSWTKGRSGEALSLLKKRFSHRPVQEKFVCLNCGFETHADEQAALNIARSWLFLRSQEYKKYQTNKTTGNTDKRAFVETWQSFYRKKLKEVWKPAV

SEQ ID NO: 158 - protein, 977 aa, synthetic construct
  REGION 1..977: note = CasX variant
MQEIKRINKIRRRLVKDSNTKKAGKTGPMKTLLVRVMTPDLRERLENLRKKPENIPQPISNTSRANLNKLLTDYTEMKKAILHVYWEEFQKDPVGLMSRVAQPAPKNIDQRKLIPVKDGNERLTSSGFACSQCCQPLYVYKLEQVNDKGKPHTNYFGRCNVSEHERLILLSPHKPEANDELVTYSLGKFGQRALDFYSIHVTRESNHPVKPLEQIGGNSCASGPVGKALSDACMGAVASFLTKYQDIILEHQKVIKKNEKRLANLKDIASANGLAFPKITLPPQPHTKEGIEAYNNVVAQIVIWVNLNLWQKLKIGRDEAKPLQRLKGFPSFPLVERQANEVDWWDMVCNVKKLINEKKEDGKVFWQNLAGYKRQEALRPYLSSPEDRKKGKKFARYQFGDLLLHLEKKHGEDWGKVYDEAWERIDKKVEGLSKHIKLEEERRSEDAQSKAALTDWLRAKASFVIEGLKEADKDEFCRCELKLQKWYGDLRGKPFAIEAENSILDISGFSKQYNCAFIWQKDGVKKLNLYLIINYFKGGKLRFKKIKPEAFEANRFYTVINKKSGEIVPMEVNFNFDDPNLIILPLAFGKRQGREFIWNDLLSLETGSLKLANGRVIEKTLYNRRTRQDEPALFVALTFERREVLDSSNIKPMNLIGVDRGENIPAVIALTDPEGCPLSRFKDSLGNPTHILRIGESYKEKQRTIQAKKEVEQRRAGGYSRKYASKAKNLANDMVRNTARDLLYYAVTQDAMLIFENLSRGFGRQGKRTFMAERQYTRMEDWLTAKLAYEGLSKTYLSKTLAQYTSKTCSNCGFTITSADYDRVLEKLKKTATGWMTTINGKELKVEGQITYYNRRKRQNVVKDLSVELDRLSEESVNNDISSWTKGRSGEALSLLKKRFSHRPVQEKFVCLNCGFETHADEQAALNIARSWLFLRSQEYKKYQTNKTTGNTDKRAFVETWQSFYRKKLKEVWKPAV

SEQ ID NO: 159 - protein, 977 aa, synthetic construct
  REGION 1..977: note = CasX variant
MQEIKRINKIRRRLVKDSNTKKAGKTGPMKTLLVRVMTPDLRERLENLRKKPENIPQPISNTSRANLNKLLTDYTEMKKAILHVYWEEFQKDPVGLMSRVAQPAPKNIDQRKLIPVKDGNERLTSSGFACSQCCQPLYVYKLEQVNDKGKPHTNYFGRCNVSEHERLILLSPHKPEANDELVTYSLGKFGQRALDFYSIHVTRESNHPVKPLEQIGGNSCASGPVGKALSDACMGAVASFLTKYQDIILEHQKVIKKNEKRLANLKDIASANGLAFPKITLPPQPHTKEGIEAYNNVVAQIVIWVNLNLWQKLKIGRDEAKPLQRLKGFPSFPLVERQANEVDWWDMVCNVKKLINEKKEDGKVFWQNLAGYKRQEALRPYLSSPEDRKKGKKFARYQLGDLLLHLEKKHGEDWGKVYDEAWERIDKKVEGLSKHIKLEEERRSEDAQSKAALTDWLRAKASFVIEGLKEADKDEFCRCELKLQKWYGDLRGKPFAIEAENSILDISGFSKQYNCAFIWQKDGVKKLNLYLIINYFKGGKLRFKKIKPEAFEANRFYTVINKKSGEIVPMEVNFNFDDPNLIILPLAFGKRQGREFIWNDLLSLETGSLKLANGRVIEKTLYNRRTRQDEPALFVALTFERREVLDSSNIKPMNLIGVDRGENIPAVIALTDPEGCPLSRFKDSLGNPTHILRIGESYKEKQRTIQAKKEVEQRRAGGYSRKYASKAKNLANDMVRNTARDLLYYAVTQDAMLIFENLSRGFGRQGKRTFMAERQYTRMEDWLTAKLAYEGLSKTYLSKTLAQYTSKTCSNCGFTITSADYDRVLEKLKKTATGWMTTINGKELKVEGQITYYNRRKRQNVVKDLSVELDRLSEESVNNDISSWTKGRSGEALSLLKKRFSHRPVQEKFVCLNCGFETHADEQAALNIARSWLFLRSQEYKKYQTNKTTGNTDKRAFVETWQSFYRKKLKEVWKPAV

SEQ ID NO: 160 - protein, 977 aa, synthetic construct
  REGION 1..977: note = CasX variant
MQEIKRINKIRRRLVKDSNTKKAGKTGPMKTLLVRVMTPDLRERLENLRKKPENIPQPISNTSRANLNKLLTDYTEMKKAILHVYWEEFQKDPVGLMSRVAQPAPKNIDQRKLIPVKDGNERLTSSGFACSQCCQPLYVYKLEQVNDKGKPHTNYFGRCNVSEHERLILLSPHKPEANDELVTYSLGKFGQRALDFYSIHVTRESNHPVKPLEQIGGNSCASGPVGKALSDACMGAVASFLTKYQDIILEHQKVIKKNEKRLANLKDIASANGLAFPKITLPPQPHTKEGIEAYNNVVAQIVIWVNLNLWQKLKIGRDEAKPLQRLKGFPSFPLVERQANEVDWWDMVCNVKKLINEKKEDGKVFWQNLAGYKRQEALRPYLSSPNDRKKGKKFARYQFGDLLLHLEKKHGEDWGKVYDEAWERIDKKVEGLSKHIKLEEERRSEDAQSKAALTDWLRAKASFVIEGLKEADKDEFCRCELKLQKWYGDLRGKPFAIEAENSILDISGFSKQYNCAFIWQKDGVKKLNLYLIINYFKGGKLRFKKIKPEAFEANRFYTVINKKSGEIVPMEVNFNFDDPNLIILPLAFGKRQGREFIWNDLLSLETGSLKLANGRVIEKTLYNRRTRQDEPALFVALTFERREVLDSSNIKPMNLIGVDRGENIPAVIALTDPEGCPLSRFKDSLGNPTHILRIGESYKEKQRTIQAKKEVEQRRAGGYSRKYASKAKNLANDMVRNTARDLLYYAVTQDAMLIFENLSRGFGRQGKRTFMAERQYTRMEDWLTAKLAYEGLSKTYLSKTLAQYTSKTCSNCGFTITSADYDRVLEKLKKTATGWMTTINGKELKVEGQITYYNRRKRQNVVKDLSVELDRLSEESVNNDISSWTKGRSGEALSLLKKRFSHRPVQEKFVCLNCGFETHADEQAALNIARSWLFLRSQEYKKYQTNKTTGNTDKRAFVETWQSFYRKKLKEVWKPAV

SEQ ID NO: 161 - protein, 977 aa, synthetic construct
  REGION 1..977: note = CasX variant
MQEIKRINKIRRRLVKDSNTKKAGKTGPMKTLLVRVMTPDLRERLENLRKKPENIPQPISNTSRANLNKLLTDYTEMKKAILHVYWEEFQKDPVGLMSRVAQPAPKNIDQRKLIPVKDGNERLTSSGFACSQCCQPLYVYKLEQVNDKGKPHTNYFGRCNVSEHERLILLSPHKPEANDELVTYSLGKFGQRALDFYSIHVTRESNHPVKPLEQIGGNSCASGPVGKALSDACMGAVASFLTKYQDIILEHQKVIKKNEKRLANLKDIASANGLAFPKITLPPQPHTKEGIEAYNNVVAQIVIWVNLNLWQKLKIGRDEAKPLQRLKGFPSFPLVERQANEVDWWDMVCNVKKLINEKKEDGKVFWQNLAGYKRQEALRPYLSSPEDRKKGKKFARYQFGDLLKHLEKKHGEDWGKVYDEAWERIDKKVEGLSKHIKLEEERRSEDAQSKAALTDWLRAKASFVIEGLKEADKDEFCRCELKLQKWYGDLRGKPFAIEAENSILDISGFSKQYNCAFIWQKDGVKKLNLYLIINYFKGGKLRFKKIKPEAFEANRFYTVINKKSGEIVPMEVNFNFDDPNLIILPLAFGKRQGREFIWNDLLSLETGSLKLANGRVIEKTLYNRRTRQDEPALFVALTFERREVLDSSNIKPMNLIGVDRGENIPAVIALTDPEGCPLSRFKDSLGNPTHILRIGESYKEKQRTIQAKKEVEQRRAGGYSRKYASKAKNLANDMVRNTARDLLYYAVTQDAMLIFENLSRGFGRQGKRTFMAERQYTRMEDWLTAKLAYEGLSKTYLSKTLAQYTSKTCSNCGFTITSADYDRVLEKLKKTATGWMTTINGKELKVEGQITYYNRRKRQNVVKDLSVELDRLSEESVNNDISSWTKGRSGEALSLLKKRFSHRPVQEKFVCLNCGFETHADEQAALNIARSWLFLRSQEYKKYQTNKTTGNTDKRAFVETWQSFYRKKLKEVWKPAV

SEQ ID NO: 162 - protein, 977 aa, synthetic construct
  REGION 1..977: note = CasX variant
MQEIKRINKIRRRLVKDSNTKKAGKTGPMKTLLVRVMTPDLRERLENLRKKPENIPQPISNTSRANLNKLLTDYTEMKKAILHVYWEEFQKDPVGLMSRVAQPAPKNIDQRKLIPVKDGNERLTSSGFACSQCCQPLYVYKLEQVNDKGKPHTNYFGRCNVSEHERLILLSPHKPEANDELVTYSLGKFGQRALDFYSIHVTRESNHPVKPLEQIGGNSCASGPVGKALSDACMGAVASFLTKYQDIILEHKKVIKKNEKRLANLKDIASANGLAFPKITLPPQPHTKEGIEAYNNVVAQIVIWVNLNLWQKLKIGRDEAKPLQRLKGFPSFPLVERQANEVDWWDMVCNVKKLINEKKEDGKVFWQNLAGYKRQEALRPYLSSPEDRKKGKKFARYQFGDLLLHLEKKHGEDWGKVYDEAWERIDKKVEGLSKHIKLEEERRSEDAQSKAALTDWLRAKASFVIEGLKEADKDEFCRCELKLQKWYGDLRGKPFAIEAENSILDISGFSKQYNCAFIWQKDGVKKLNLYLIINYFKGGKLRFKKIKPEAFEANRFYTVINKKSGEIVPMEVNFNFDDPNLIILPLAFGKRQGREFIWNDLLSLETGSLKLANGRVIEKPLYNRRTRQDEPALFVALTFERREVLDSSNIKPMNLIGIDRGENIPAVIALTDPEGCPLSRFKDSLGNPTHILRIGESYKEKQRTIQAKKEVEQRRAGGYSRKYASKAKNLADDMVRNTARDLLYYAVTQDAMLIFENLSRGFGRQGKRTFMAERQYTRMEDWLTAKLAYEGLSKTYLSKTLAQYTSKTCSNCGFTITSADYDRVLEKLKKTATGWMTTINGKELKVEGQITYYNRRKRQNVVKDLSVELDRLSEESVNNDISSWTKGRSGEALSLLKKRFSHRPVQEKFVCLNCGFETHADEQAALNIARSWLFLRSQEYKKYQTNKTTGNTDKRAFVETWQSFYRKKLKEVWKPAV

SEQ ID NO: 163 - protein, 977 aa, synthetic construct
  REGION 1..977: note = CasX variant
MQEIKRINKIRRRLVKDSNTKKAGKTGPMKTLLVRVMTPDLRERLENLRKKPENIPQPISNTSRANLNKLLTDYTEMKKAILHVYWEEFQKDPVGLMSRVAQPAPKNIDQRKLIPVKDGNERLTSSGFACSQCCQPLYVYKLEQVNDKGKPHTNYFGRCNVSEHERLILLSPHKPEANDELVTYSLGKFGQRALDFYSIHVTRESNHPVKPLEQIGGNSCASGPVGKALSDACMGAVASFLTKYQDIILEHKKVIKKNEKRLANLKDIASANGLAFPKITLPPQPHTKEGIEAYNNVVAQIVIWVNLNLWQKLKIGRDEAKPLQRLKGFPSFPLVERQANEVDWWDMVCNVKKLINEKKEDGKVFWQNLAGYKRQEALRPYLSSPEDRKKGKKFARYQFGDLLLHLEKKHGEDWGKVYDEAWERIDKKVEGLSKHIKLEEERRSEDAQSKAALTDWLRAKASFVIEGLKEADKDEFCRCELKLQKWYGDLRGKPFAIEAENSILDISGFSKQYNCAFIWQKDGVKKLNLYLIINYFKGGKLRFKKIKPEAFEANRFYTVINKKSGEIVPMEVNFNFDDPNLIILPLAFGKRQGREFIWNDLLSLETGSLKLANGRVIEKPLYNRRTRQDEPALFVALTFERREVLDSSNIKPMNLIGVDRGENIPAVIALTDPEGCPLSRFKDSLGNPTHILRIGESYKEKQRTIQAKKEVEQRRAGGYSRKYASKAKNLADDMVRNTARDLLYYAVTQDAMLIFENLSRGFGRQGKRTFMAERQYTRMEDWLTAKLAYEGLSKTYLSKTLAQYTSKTCSNCGFTITSADYDRVLEKLKKTATGWMTTINGKELKVEGQITYYNRRKRQNVVKDLSVELDRLSEESVNNDISSWTKGRSGEALSLLKKRFSHRPVQEKFVCLNCGFETHADEQAALNIARSWLFLRSQEYKKYQTNKTTGNTDKRAFVETWQSFYRKKLKEVWKPAV

SEQ ID NO: 164 - protein, 977 aa, synthetic construct
  REGION 1..977: note = CasX variant
MQEIKRINKIRRRLVKDSNTKKAGKTGPMKTLLVRVMTPDLRERLENLRKKPENIPQPISNTSRANLNKLLTDYTEMKKAILHVYWEEFQKDPVGLMSRVAQPAPKNIDQRKLIPVKDGNERLTSSGFACSQCCQPLYVYKLEQVNDKGKPHTNYFGRCNVSEHERLILLSPHKPEANDELVTYSLGKFGQRALDFYSIHVTRESNHPVKPLEQIGGNSCASGPVGKALSDACMGAVASFLTKYQDIILEHKKVIKKNEKRLANLKDIASANGLAFPKITLPPQPHTKEGIEAYNNVVAQIVIWVNLNLWQKLKIGRDEAKPLQRLKGFPSFPLVERQANEVDWWDMVCNVKKLINEKKEDGKVFWQNLAGYKRQEALRPYLSSPNDRKKGKKFARYQFGDLLLHLEKKHGEDWGKVYDEAWERIDKKVEGLSKHIKLEEERRSEDAQSKAALTDWLRAKASFVIEGLKEADKDEFCRCELKLQKWYGDLRGKPFAIEAENSILDISGFSKQYNCAFIWQKDGVKKLNLYLIINYFKGGKLRFKKIKPEAFEANRFYTVINKKSGEIVPMEVNFNFDDPNLIILPLAFGKRQGREFIWNDLLSLETGSLKLANGRVIEKPLYNRRTRQDEPALFVALTFERREVLDSSNIKPMNLIGVDRGENIPAVIALTDPEGCPLSRFKDSLGNPTHILRIGESYKEKQRTIQAKKEVEQRRAGGYSRKYASKAKNLADDMVRNTARDLLYYAVTQDAMLIFENLSRGFGRQGKRTFMAERQYTRMEDWLTAKLAYEGLSKTYLSKTLAQYTSKTCSNCGFTITSADYDRVLEKLKKTATGWMTTINGKELKVEGQITYYNRRKRQNVVKDLSVELDRLSEESVNNDISSWTKGRSGEALSLLKKRFSHRPVQEKFVCLNCGFETHADEQAALNIARSWLFLRSQEYKKYQTNKTTGNTDKRAFVETWQSFYRKKLKEVWKPAV

SEQ ID NO: 165 - protein, 977 aa, synthetic construct
  REGION 1..977: note = CasX variant
MQEIKRINKIRRRLVKDSNTKKAGKTGPMKTLLVRVMTPDLRERLENLRKKPENIPQPISNTSRANLNKLLTDYTEMKKAILHVYWEEFQKDPVGLMSRVAQPAPKNIDQRKLIPVKDGNERLTSSGFACSQCCQPLYVYKLEQVNDKGKPHTNYFGRCNVSEHERLILLSPHKPEANDELVTYSLGKFGQRALDFYSIHVTRESNHPVKPLEQIGGNSCASGPVGKALSDACMGAVASFLTKYQDIILEHKKVIKKNEKRLANLKDIASANGLAFPKITLPPQPHTKEGIEAYNNVVAQIVIWVNLNLWQKLKIGRDEAKPLQRLKGFPSFPLVERQANEVDWWDMVCNVKKLINEKKEDGKVFWQNLAGYKRQEALRPYLSSPEDRKKGKKFARYQLGDLLLHLEKKHGEDWGKVYDEAWERIDKKVEGLSKHIKLEEERRSEDAQSKAALTDWLRAKASFVIEGLKEADKDEFCRCELKLQKWYGDLRGKPFAIEAENSILDISGFSKQYNCAFIWQKDGVKKLNLYLIINYFKGGKLRFKKIKPEAFEANRFYTVINKKSGEIVPMEVNFNFDDPNLIILPLAFGKRQGREFIWNDLLSLETGSLKLANGRVIEKPLYNRRTRQDEPALFVALTFERREVLDSSNIKPMNLIGVDRGENIPAVIALTDPEGCPLSRFKDSLGNPTHILRIGESYKEKQRTIQAKKEVEQRRAGGYSRKYASKAKNLADDMVRNTARDLLYYAVTQDAMLIFENLSRGFGRQGKRTFMAERQYTRMEDWLTAKLAYEGLSKTYLSKTLAQYTSKTCSNCGFTITSADYDRVLEKLKKTATGWMTTINGKELKVEGQITYYNRRKRQNVVKDLSVELDRLSEESVNNDISSWTKGRSGEALSLLKKRFSHRPVQEKFVCLNCGFETHADEQAALNIARSWLFLRSQEYKKYQTNKTTGNTDKRAFVETWQSFYRKKLKEVWKPAV

SEQ ID NO: 166 - protein, 977 aa, synthetic construct
  REGION 1..977: note = CasX variant
MQEIKRINKIRRRLVKDSNTKKAGKTGPMKTLLVRVMTPDLRERLENLRKKPENIPQPISNTSRANLNKLLTDYTEMKKAILHVYWEEFQKDPVGLMSRVAQPAPKNIDQRKLIPVKDGNERLTSSGFACSQCCQPLYVYKLEQVNDKGKPHTNYFGRCNVSEHERLILLSPHKPEANDELVTYSLGKFGQRALDFYSIHVTRESNHPVKPLEQIGGNSCASGPVGKALSDACMGAVASFLTKYQDIILEHKKVIKKNEKRLANLKDIASANGLAFPKITLPPQPHTKEGIEAYNNVVAQIVIWVNLNLWQKLKIGRDEAKPLQRLKGFPSFPLVERQANEVDWWDMVCNVKKLINEKKEDGKVFWQNLAGYKRQEALRPYLSSPEDRKKGKKFARYQFGDLLKHLEKKHGEDWGKVYDEAWERIDKKVEGLSKHIKLEEERRSEDAQSKAALTDWLRAKASFVIEGLKEADKDEFCRCELKLQKWYGDLRGKPFAIEAENSILDISGFSKQYNCAFIWQKDGVKKLNLYLIINYFKGGKLRFKKIKPEAFEANRFYTVINKKSGEIVPMEVNFNFDDPNLIILPLAFGKRQGREFIWNDLLSLETGSLKLANGRVIEKPLYNRRTRQDEPALFVALTFERREVLDSSNIKPMNLIGVDRGENIPAVIALTDPEGCPLSRFKDSLGNPTHILRIGESYKEKQRTIQAKKEVEQRRAGGYSRKYASKAKNLADDMVRNTARDLLYYAVTQDAMLIFENLSRGFGRQGKRTFMAERQYTRMEDWLTAKLAYEGLSKTYLSKTLAQYTSKTCSNCGFTITSADYDRVLEKLKKTATGWMTTINGKELKVEGQITYYNRRKRQNVVKDLSVELDRLSEESVNNDISSWTKGRSGEALSLLKKRFSHRPVQEKFVCLNCGFETHADEQAALNIARSWLFLRSQEYKKYQTNKTTGNTDKRAFVETWQSFYRKKLKEVWKPAV

SEQ ID NO: 167 - protein, 977 aa, synthetic construct
  REGION 1..977: note = CasX variant
MQEIKRINKIRRRLVKDSNTKKAGKTGPMKTLLVRVMTPDLRERLENLRKKPENIPQPISNTSRANLNKLLTDYTEMKKAILHVYWEEFQKDPVGLMSRVAQPAPKNIDQRKLIPVKDGNERLTSSGFACSQCCQPLYVYKLEQVNDKGKPHTNYFGRCNVSEHERLILLSPHKPEANDELVTYSLGKFGQRALDFYSIHVTRESNHPVKPLEQIGGNSCASGPVGKALSDACMGAVASFLTKYQDIILEHQKVIKKNEKRLANLKDIASANGLAFPKITLPPQPHTKEGIEAYNNVVAQIVIWVNLNLWQKLKIGRDEAKPLQRLKGFPSFPLVERQANEVDWWDMVCNVKKLINEKKEDGKVFWQNLAGYKRQEALRPYLSSENDRKKGKKFARYQFGDLLLHLEKKHGEDWGKVYDEAWERIDKKVEGLSKHIKLEEERRSEDAQSKAALTDWLRAKASFVIEGLKEADKDEFCRCELKLQKWYGDLRGKPFAIEAENSILDISGFSKQYNCAFIWQKDGVKKLNLYLIINYFKGGKLRFKKIKPEAFEANRFYTVINKKSGEIVPMEVNFNFDDPNLIILPLAFGKRQGREFIWNDLLSLETGSLKLANGRVIEKPLYNRRTRQDEPALFVALTFERREVLDSSNIKPMNLIGVDRGENIPAVIALTDPEGCPLSRFKDSLGNPTHILRIGESYKEKQRTIQAKKEVEQRRAGGYSRKYASKAKNLADDMVRNTARDLLYYAVTQDAMLIFENLSRGFGRQGKRTFMAERQYTRMEDWLTAKLAYEGLSKTYLSKTLAQYTSKTCSNCGFTITSADYDRVLEKLKKTATGWMTTINGKELKVEGQITYYNRRKRQNVVKDLSVELDRLSEESVNNDISSWTKGRSGEALSLLKKRFSHRPVQEKFVCLNCGFETHADEQAALNIARSWLFLRSQEYKKYQTNKTTGNTDKRAFVETWQSFYRKKLKEVWKPAV

SEQ ID NO: 168 - protein, 976 aa, synthetic construct
  REGION 1..976: note = CasX variant
QEIKRINKIRRRLVKDSNTKKAGKTGPMKTLLVRVMTPDLRERLENLRKKPENIPQPISNTSRANLNKLLTDYTEMKKAILHVYWEEFQKDPVGLMSRVAQPAPKNIDQRKLIPVKDGNERLTSSGFACSQCCQPLYVYKLEQVNDKGKPHTNYFGRCNVSEHERLILLSPHKPEANDELVTYSLGKFGQRALDFYSIHVTRESNHPVKPLEQIGGNSCASGPVGKALSDACMGAVASFLTKYQDIILEHQKVIKKNEKRLANLKDIASANGLAFPKITLPPQPHTKEGIEAYNNVVAQIVIWVNLNLWQKLKIGRDEAKPLQRLKGFPSFPLVERQANEVDWWDMVCNVKKLINEKKEDGKVFWQNLAGYKRQEALRPYLSSPEDRKKGKKFARYQFGDLLLHLEKKHGEDWGKVYDEAWERIDKKVEGLSKHIKLEEERRSEDAQSKAALTDWLRAKASFVIEGLKEADKDEFCRCELKLQKWYGDLRGKPFAIEAENSILDISGFSKQYNCAFIWQKDGVKKLNLYLIINYFKGGKLRFKKIKPEAFEANRFYTVINKKSGEIVPMEVNFNFDDPNLIILPLAFGKRQGREFIWNDLLSLETGSLKLANGRVIEKPLYNRRTRQDEPALFVALTFERREVLDSSNIKPMNLIGIDRGENIPAVIALTDPEGCPLSRFKDSLGNPTHILRIGESYKEKQRTIQAKKEVEQRRAGGYSRKYASKAKNLADDMVRNTARDLLYYAVTQDAMLIFENLSRGFGRQGKRTFMAERQYTRMEDWLTAKLAYEGLSKTYLSKTLAQYTSKTCSNCGFTITSADYDRVLEKLKKTATGWMTTINGKELKVEGQITYYNRYKRQNVVKDLSVELDRLSEESVNNDISSWTKGRSGEALSLLKKRFSHRPVQEKFVCLNCGFETHADEQAALNIARSWLFLRSQEYKKYQTNKTTGNTDKRAFVETWQSFYRKKLKEVWKPAV

SEQ ID NO: 169 - protein, 976 aa, synthetic construct
  REGION 1..976: note = CasX variant
QEIKRINKIRRRLVKDSNTKKAGKTGPMKTLLVRVMTPDLRERLENLRKKPENIPQPISNTSRANLNKLLTDYTEMKKAILHVYWEEFQKDPVGLMSRVAQPAPKNIDQRKLIPVKDGNERLTSSGFACSQCCQPLYVYKLEQVNDKGKPHTNYFGRCNVSEHERLILLSPHKPEANDELVTYSLGKFGQRALDFYSIHVTRESNHPVKPLEQIGGNSCASGPVGKALSDACMGAVASFLTKYQDIILEHQKVIKKNEKRLANLKDIASANGLAFPKITLPPQPHTKEGIEAYNNVVAQIVIWVNLNLWQKLKIGRDEAKPLQRLKGFPSFPLVERQANEVDWWDMVCNVKKLINEKKEDGKVFWQNLAGYKRQEALRPYLSSEEDRKKGKKFARYQFGDLLLHLEKKHGEDWGKVYDEAWERIDKKVEGLSKHIKLEEERRSEDAQSKAALTDWLRAKASFVIEGLKEADKDEFCRCELKLQKWYGDLRGKPFAIEAENSILDISGFSKQYNCAFIWQKDGVKKLNLYLIINYFKGGKLRFKKIKPEAFEANRFYTVINKKSGEIVPMEVNFNFDDPNLIILPLAFGKRQGREFIWNDLLSLETGSLKLANGRVIEKTLYNRRTRQDEPALFVALTFERREVLDSSNIKPMNLIGIDRGENIPAVIALTDPEGCPLSRFKDSLGNPTHILRIGESYKEKQRTIQAKKEVEQRRAGGYSRKYASKAKNLADDMVRNTARDLLYYAVTQDAMLIFENLSRGFGRQGKRTFMAERQYTRMEDWLTAKLAYEGLSKTYLSKTLAQYTSKTCSNCGFTITSADYDRVLEKLKKTATGWMTTINGKELKVEGQITYYNRYKRQNVVKDLSVELDRLSEESVNNDISSWTKGRSGEALSLLKKRFSHRPVQEKFVCLNCGFETHADEQAALNIARSWLFLRSQEYKKYQTNKTTGNTDKRAFVETWQSFYRKKLKEVWKPAV

SEQ ID NO: 170 - protein, 977 aa, synthetic construct; identical to SEQ ID NO: 124
  REGION 1..977: note = CasX variant

SEQ ID NO: 171 - protein, 977 aa, synthetic construct; identical to SEQ ID NO: 124
  REGION 1..977: note = CasX variant

SEQ ID NO: 172 - protein, 977 aa, synthetic construct; identical to SEQ ID NO: 124
  REGION 1..977: note = CasX variant

SEQ ID NO: 173 - protein, 977 aa, synthetic construct; identical to SEQ ID NO: 124
  REGION 1..977: note = CasX variant

SEQ ID NO: 174 - protein, 977 aa, synthetic construct; identical to SEQ ID NO: 124
  REGION 1..977: note = CasX variant

SEQ ID NO: 175 - protein, 978 aa, synthetic construct
  REGION 1..978: note = CasX variant
MQEIKRINKIRRRLVKDSNTKKAGKTGPMKTLLVRVMTPDLRERLENLRKKPENIPQPISNTSRANLNKLLTDYTEMKKAILHVYWEEFQKDPVGLMSRVAQPAPKNIDQRKLIPVKDGNERLTMSSGFACSQCCQPLYVYKLEQVNDKGKPHTNYFGRCNVSEHERLILLSPHKPEANDELVTYSLGKFGQRALDFYSIHVTRESNHPVKPLEQIGGNSCASGPVGKALSDACMGAVASFLTKYQDIILEHQKVIKKNEKRLANLKDIASANGLAFPKITLPPQPHTKEGIEAYNNVVAQIVIWVNLNLWQKLKIGRDEAKPLQRLKGFPSFPLVERQANEVDWWDMVCNVKKLINEKKEDGKVFWQNLAGYKRQEALRPYLSSEEDRKKGKKFARYQFGDLLLHLEKKHGEDWGKVYDEAWERIDKKVEGLSKHIKLEEERRSEDAQSKAALTDWLRAKASFVIEGLKEADKDEFCRCELKLQKWYGDLRGKPFAIEAENSILDISGFSKQYNCAFIWQKDGVKKLNLYLIINYFKGGKLRFKKIKPEAFEANRFYTVINKKSGEIVPMEVNFNFDDPNLIILPLAFGKRQGREFIWNDLLSLETGSLKLANGRVIEKTLYNRRTRQDEPALFVALTFERREVLDSSNIKPMNLIGIDRGENIPAVIALTDPEGCPLSRFKDSLGNPTHILRIGESYKEKQRTIQAKKEVEQRRAGGYSRKYASKAKNLADDMVRNTARDLLYYAVTQDAMLIFENLSRGFGRQGKRTFMAERQYTRMEDWLTAKLAYEGLSKTYLSKTLAQYTSKTCSNCGFTITSADYDRVLEKLKKTATGWMTTINGKELKVEGQITYYNRYKRQNVVKDLSVELDRLSEESVNNDISSWTKGRSGEALSLLKKRFSHRPVQEKFVCLNCGFETHADEQAALNIARSWLFLRSQEYKKYQTNKTTGNTDKRAFVETWQSFYRKKLKEVWKPAV

SEQ ID NO: 176 - protein, 977 aa, synthetic construct; identical to SEQ ID NO: 124
  REGION 1..977: note = CasX variant

SEQ ID NO: 177 - protein, 977 aa, synthetic construct; identical to SEQ ID NO: 124
  REGION 1..977: note = CasX variant

SEQ ID NO: 178 - protein, 977 aa, synthetic construct; identical to SEQ ID NO: 124
  REGION 1..977: note = CasX variant

SEQ ID NO: 179 - protein, 977 aa, synthetic construct; identical to SEQ ID NO: 124
  REGION 1..977: note = CasX variant

SEQ ID NO: 180 - protein, 977 aa, synthetic construct; identical to SEQ ID NO: 124
  REGION 1..977: note = CasX variant

SEQ ID NO: 181 - protein, 977 aa, synthetic construct; identical to SEQ ID NO: 124
  REGION 1..977: note = CasX variant

SEQ ID NO: 182 - protein, 977 aa, synthetic construct
  REGION 1..977: note = CasX variant
QEIKRINKIRRRLVKDSNTKKAGKTGPMKTLLVRVMTPDLRERLENLRKKPENIPQPISNTSRANLNKLLTDYTEMKKAILHVYWEEFQKDPVGLMSRVAQPASKKIDQNKLKPEMDEKGNLTTAGFACSQCGQPLFVYKLEQVSEKGKAYTNYFGRCNVAEHEKLILLAQLKPEKDSDEAVTYSLGKFGQRALDFYSIHVTRESNHPVKPLEQIGGNSCASGPVGKALSDACMGAVASFLTKYQDIILEHQKVIKKNEKRLANLKDIASANGLAFPKITLPPQPHTKEGIEAYNNVVAQIVIWVNLNLWQKLKIGRDEAKPLQRLKGFPSFPLVERQANEVDWWDMVCNVKKLINEKKEDGKVFWQNLAGYKRQEALRPYLSSEEDRKKGKKFARYQFGDLLLHLEKKHGEDWGKVYDEAWERIDKKVEGLSKHIKLEEERRSEDAQSKAALTDWLRAKASFVIEGLKEADKDEFCRCELKLQKWYGDLRGKPFAIEAENSILDISGFSKQYNCAFIWQKDGVKKLNLYLIINYFKGGKLRFKKIKPEAFEANRFYTVINKKSGEIVPMEVNFNFDDPNLIILPLAFGKRQGREFIWNDLLSLETGSLKLANGRVIEKTLYNRRTRQDEPALFVALTFERREVLDSSNIKPMNLIGIDRGENIPAVIALTDPEGCPLSRFKDSLGNPTHILRIGESYKEKQRTIQAKKEVEQRRAGGYSRKYASKAKNLADDMVRNTARDLLYYAVTQDAMLIFENLSRGFGRQGKRTFMAERQYTRMEDWLTAKLAYEGLSKTYLSKTLAQYTSKTCSNCGFTITSADYDRVLEKLKKTATGWMTTINGKELKVEGQITYYNRYKRQNVVKDLSVELDRLSEESVNNDISSWTKGRSGEALSLLKKRFSHRPVQEKFVCLNCGFETHADEQAALNIARSWLFLRSQEYKKYQTNKTTGNTDKRAFVETWQSFYRKKLKEVWKPAV

SEQ ID NO: 183 - protein, 976 aa, synthetic construct
  REGION 1..976: note = CasX variant
QEIKRINKIRRRLVKDSNTKKAGKTGPMKTLLVRVMTPDLRERLENLRKKPENIPQPISNTSRANLNKLLTDYTEMKKAILHVYWEEFQKDPVGLMSRVAQPAPKNIDQRKLIPVKDGNERLTSSGFACSQCCQPLYVYKLEQVNDKGKPHTNYFGRCNVSEHERLILLSPHKPEANDELVTYSLGKFGQRALDFYSIHVTKESTHPVKPLAQIAGNRYASGPVGKALSDACMGTIASFLSKYQDIIIEHQKVVKGNQKRLESLRELAGKENLEYPSVTLPPQPHTKEGVDAYNEVIARVRMWVNLNLWQKLKLSRDDAKPLLRLKGFPSFPLVERQANEVDWWDMVCNVKKLINEKKEDGKVFWQNLAGYKRQEALRPYLSSEEDRKKGKKFARYQFGDLLLHLEKKHGEDWGKVYDEAWERIDKKVEGLSKHIKLEEERRSEDAQSKAALTDWLRAKASFVIEGLKEADKDEFCRCELKLQKWYGDLRGKPFAIEAENSILDISGFSKQYNCAFIWQKDGVKKLNLYLIINYFKGGKLRFKKIKPEAFEANRFYTVINKKSGEIVPMEVNFNFDDPNLIILPLAFGKRQGREFIWNDLLSLETGSLKLANGRVIEKTLYNRRTRQDEPALFVALTFERREVLDSSNIKPMNLIGIDRGENIPAVIALTDPEGCPLSRFKDSLGNPTHILRIGESYKEKQRTIQAKKEVEQRRAGGYSRKYASKAKNLADDMVRNTARDLLYYAVTQDAMLIFENLSRGFGRQGKRTFMAERQYTRMEDWLTAKLAYEGLSKTYLSKTLAQYTSKTCSNCGFTITSADYDRVLEKLKKTATGWMTTINGKELKVEGQITYYNRYKRQNVVKDLSVELDRLSEESVNNDISSWTKGRSGEALSLLKKRFSHRPVQEKFVCLNCGFETHADEQAALNIARSWLFLRSQEYKKYQTNKTTGNTDKRAFVETWQSFYRKKLKEVWKPAV

SEQ ID NO: 184 - protein, 976 aa, synthetic construct
  REGION 1..976: note = CasX variant
QEIKRINKIRRRLVKDSNTKKAGKTGPMKTLLVRVMTPDLRERLENLRKKPENIPQPISNTSRANLNKLLTDYTEMKKAILHVYWEEFQKDPVGLMSRVAQPAPKNIDQRKLIPVKDGNERLTSSGFACSQCCQPLYVYKLEQVNDKGKPHTNYFGRCNVSEHERLILLSPHKPEANDELVTYSLGKFGQRALDFYSIHVTKESTHPVKPLAQIAGNRYASGPVGKALSDACMGTIASFLSKYQDIIIEHQKVVKGNQKRLESLRELAGKENLEYPSVTLPPQPHTKEGVDAYNEVIARVRMWVNLNLWQKLKLSRDDAKPLLRLKGFPSFPLVERQANEVDWWDMVCNVKKLINEKKEDGKVFWQNLAGYKRQEALRPYLSSEEDRKKGKKFARYQLGDLLLHLEKKHGEDWGKVYDEAWERIDKKVEGLSKHIKLEEERRSEDAQSKAALTDWLRAKASFVIEGLKEADKDEFCRCELKLQKWYGDLRGKPFAIEAENSILDISGFSKQYNCAFIWQKDGVKKLNLYLIINYFKGGKLRFKKIKPEAFEANRFYTVINKKSGEIVPMEVNFNFDDPNLIILPLAFGKRQGREFIWNDLLSLETGSLKLANGRVIEKTLYNRRTRQDEPALFVALTFERREVLDSSNIKPMNLIGVDRGENIPAVIALTDPEGCPLSRFKDSLGNPTHILRIGESYKEKQRTIQAKKEVEQRRAGGYSRKYASKAKNLADDMVRNTARDLLYYAVTQDAMLIFENLSRGFGRQGKRTFMAERQYTRMEDWLTAKLAYEGLSKTYLSKTLAQYTSKTCSNCGFTITSADYDRVLEKLKKTATGWMTTINGKELKVEGQITYYNRRKRQNVVKDLSVELDRLSEESVNNDISSWTKGRSGEALSLLKKRFSHRPVQEKFVCLNCGFETHADEQAALNIARSWLFLRSQEYKKYQTNKTTGNTDKRAFVETWQSFYRKKLKEVWKPAV

SEQ ID NO: 185 - protein, 976 aa, synthetic construct
  REGION 1..976: note = CasX variant
QEIKRINKIRRRLVKDSNTKKAGKTGPMKTLLVRVMTPDLRERLENLRKKPENIPQPISNTSRANLNKLLTDYTEMKKAILHVYWEEFQKDPVGLMSRVAQPAPKNIDQRKLIPVKDGNERLTSSGFACSQCCQPLYVYKLEQVNDKGKPHTNYFGRCNVSEHERLILLSPHKPEANDELVTYSLGKFGQRALDFYSIHVTKESTHPVKPLAQIAGNRYASGPVGKALSDACMGTIASFLSKYQDIIIEHQKVVKGNQKRLESLRELAGKENLEYPSVTLPPQPHTKEGVDAYNEVIARVRMWVNLNLWQKLKLSRDDAKPLLRLKGFPSFPLVERQANEVDWWDMVCNVKKLINEKKEDGKVFWQNLAGYKRQEALRPYLSSEEDRKKGKKFARYQLGDLLKHLEKKHGEDWGKVYDEAWERIDKKVEGLSKHIKLEEERRSEDAQSKAALTDWLRAKASFVIEGLKEADKDEFCRCELKLQKWYGDLRGKPFAIEAENSILDISGFSKQYNCAFIWQKDGVKKLNLYLIINYFKGGKLRFKKIKPEAFEANRFYTVINKKSGEIVPMEVNFNFDDPNLIILPLAFGKRQGREFIWNDLLSLETGSLKLANGRVIEKTLYNRRTRQDEPALFVALTFERREVLDSSNIKPMNLIGVDRGENIPAVIALTDPEGCPLSRFKDSLGNPTHILRIGESYKEKQRTIQAKKEVEQRRAGGYSRKYASKAKNLADDMVRNTARDLLYYAVTQDAMLIFENLSRGFGRQGKRTFMAERQYTRMEDWLTAKLAYEGLSKTYLSKTLAQYTSKTCSNCGFTITSADYDRVLEKLKKTATGWMTTINGKELKVEGQITYYNRRKRQNVVKDLSVELDRLSEESVNNDISSWTKGRSGEALSLLKKRFSHRPVQEKFVCLNCGFETHADEQAALNIARSWLFLRSQEYKKYQTNKTTGNTDKRAFVETWQSFYRKKLKEVWKPAV

SEQ ID NO: 186 - protein, 976 aa, synthetic construct
  REGION 1..976: note = CasX variant
QEIKRINKIRRRLVKDSNTKKAGKTGPMKTLLVRVMTPDLRERLENLRKKPENIPQPISNTSRANLNKLLTDYTEMKKAILHVYWEEFQKDPVGLMSRVAQPAPKNIDQRKLIPVKDGNERLTSSGFACSQCCQPLYVYKLEQVNDKGKPHTNYFGRCNVSEHERLILLSPHKPEANDELVTYSLGKFGQRALDFYSIHVTKESTHPVKPLAQIAGNRYASGPVGKALSDACMGTIASFLSKYQDIIIEHQKVVKGNQKRLESLRELAGKENLEYPSVTLPPQPHTKEGVDAYNEVIARVRMWVNLNLWQKLKLSRDDAKPLLRLKGFPSFPLVERQANEVDWWDMVCNVKKLINEKKEDGKVFWQNLAGYKRQEALRPYLSSEEDRKKGKKFARYQLGDLLLHLEKKHGEDWGKVYDEAWERIDKKVEGLSKHIKLEEERRSEDAQSKAALTDWLRAKASFVIEGLKEADKDEFCRCELKLQKWYGDLRGKPFAIEAENSILDISGFSKQYNCAFIWQKDGVKKLNLYLIINYFKGGKLRFKKIKPEAFEANRFYTVINKKSGEIVPMEVNFNFDDPNLIILPLAFGKRQGREFIWNDLLSLETGSLKLANGRVIEKTLYNRRTRQDEPALFVALTFERREVLDSSNIKPMNLIGVDRGENIPAVIALTDPEGCPLSRFKDSLGNPTHILRIGESYKEKQRTIQAKKEVEQRRAGGYSRKYASKAKNLADDMVRNTARDLLYYAVTQDAMLIFENLSRGFGRQGKRTFMAERQYTRMEDWLTAKLAYEGLSKTYLSKTLAQYTSKTCSNCGFTITSADYDRVLEKLKKTATGWMTTINGKELKVEGQITYYNRYKRQNVVKDLSVELDRLSEESVNNDISSWTKGRSGEALSLLKKRFSHRPVQEKFVCLNCGFETHADEQAALNIARSWLFLRSQEYKKYQTNKTTGNTDKRAFVETWQSFYRKKLKEVWKPAV

SEQ ID NO: 187 - protein, 977 aa, synthetic construct
  REGION 1..977: note = CasX variant
QEIKRINKIRRRLVKDSNTKKAGKTGPMKTLLVRVMTPDLRERLENLRKKPENIPQPISNTSRANLNKLLTDYTEMKKAILHVYWEEFQKDPVGLMSRVAQPASKKIDQNKLKPEMDEKGNLTTAGFACSQCGQPLFVYKLEQVSEKGKAYTNYFGRCNVAEHEKLILLAQLKPEKDSDEAVTYSLGKFGQRALDFYSIHVTKESTHPVKPLAQIAGNRYASGPVGKALSDACMGTIASFLSKYQDIIIEHQKVVKGNQKRLESLRELAGKENLEYPSVTLPPQPHTKEGVDAYNEVIARVRMWVNLNLWQKLKLSRDDAKPLLRLKGFPSFPLVERQANEVDWWDMVCNVKKLINEKKEDGKVFWQNLAGYKRQEALRPYLSSEEDRKKGKKFARYQFGDLLLHLEKKHGEDWGKVYDEAWERIDKKVEGLSKHIKLEEERRSEDAQSKAALTDWLRAKASFVIEGLKEADKDEFCRCELKLQKWYGDLRGKPFAIEAENSILDISGFSKQYNCAFIWQKDGVKKLNLYLIINYFKGGKLRFKKIKPEAFEANRFYTVINKKSGEIVPMEVNFNFDDPNLIILPLAFGKRQGREFIWNDLLSLETGSLKLANGRVIEKTLYNRRTRQDEPALFVALTFERREVLDSSNIKPMNLIGIDRGENIPAVIALTDPEGCPLSRFKDSLGNPTHILRIGESYKEKQRTIQAKKEVEQRRAGGYSRKYASKAKNLADDMVRNTARDLLYYAVTQDAMLIFENLSRGFGRQGKRTFMAERQYTRMEDWLTAKLAYEGLSKTYLSKTLAQYTSKTCSNCGFTITSADYDRVLEKLKKTATGWMTTINGKELKVEGQITYYNRYKRQNVVKDLSVELDRLSEESVNNDISSWTKGRSGEALSLLKKRFSHRPVQEKFVCLNCGFETHADEQAALNIARSWLFLRSQEYKKYQTNKTTGNTDKRAFVETWQSFYRKKLKEVWKPAV

SEQ ID NO: 188 - protein, 977 aa, synthetic construct
  REGION 1..977: note = CasX variant
QEIKRINKIRRRLVKDSNTKKAGKTGPMKTLLVRVMTPDLRERLENLRKKPENIPQPISNTSRANLNKLLTDYTEMKKAILHVYWEEFQKDPVGLMSRVAQPASKKIDQNKLKPEMDEKGNLTTAGFACSQCGQPLFVYKLEQVSEKGKAYTNYFGRCNVAEHEKLILLAQLKPEKDSDEAVTYSLGKFGQRALDFYSIHVTKESTHPVKPLAQIAGNRYASGPVGKALSDACMGTIASFLSKYQDIIIEHQKVVKGNQKRLESLRELAGKENLEYPSVTLPPQPHTKEGVDAYNEVIARVRMWVNLNLWQKLKLSRDDAKPLLRLKGFPSFPLVERQANEVDWWDMVCNVKKLINEKKEDGKVFWQNLAGYKRQEALRPYLSSEEDRKKGKKFARYQLGDLLLHLEKKHGEDWGKVYDEAWERIDKKVEGLSKHIKLEEERRSEDAQSKAALTDWLRAKASFVIEGLKEADKDEFCRCELKLQKWYGDLRGKPFAIEAENSILDISGFSKQYNCAFIWQKDGVKKLNLYLIINYFKGGKLRFKKIKPEAFEANRFYTVINKKSGEIVPMEVNFNFDDPNLIILPLAFGKRQGREFIWNDLLSLETGSLKLANGRVIEKTLYNRRTRQDEPALFVALTFERREVLDSSNIKPMNLIGVDRGENIPAVIALTDPEGCPLSRFKDSLGNPTHILRIGESYKEKQRTIQAKKEVEQRRAGGYSRKYASKAKNLADDMVRNTARDLLYYAVTQDAMLIFENLSRGFGRQGKRTFMAERQYTRMEDWLTAKLAYEGLSKTYLSKTLAQYTSKTCSNCGFTITSADYDRVLEKLKKTATGWMTTINGKELKVEGQITYYNRRKRQNVVKDLSVELDRLSEESVNNDISSWTKGRSGEALSLLKKRFSHRPVQEKFVCLNCGFETHADEQAALNIARSWLFLRSQEYKKYQTNKTTGNTDKRAFVETWQSFYRKKLKEVWKPAV

SEQ ID NO: 189 - protein, 977 aa, synthetic construct
  REGION 1..977: note = CasX variant
QEIKRINKIRRRLVKDSNTKKAGKTGPMKTLLVRVMTPDLRERLENLRKKPENIPQPISNTSRANLNKLLTDYTEMKKAILHVYWEEFQKDPVGLMSRVAQPASKKIDQNKLKPEMDEKGNLTTAGFACSQCGQPLFVYKLEQVSEKGKAYTNYFGRCNVAEHEKLILLAQLKPEKDSDEAVTYSLGKFGQRALDFYSIHVTKESTHPVKPLAQIAGNRYASGPVGKALSDACMGTIASFLSKYQDIIIEHQKVVKGNQKRLESLRELAGKENLEYPSVTLPPQPHTKEGVDAYNEVIARVRMWVNLNLWQKLKLSRDDAKPLLRLKGFPSFPLVERQANEVDWWDMVCNVKKLINEKKEDGKVFWQNLAGYKRQEALRPYLSSEEDRKKGKKFARYQLGDLLKHLEKKHGEDWGKVYDEAWERIDKKVEGLSKHIKLEEERRSEDAQSKAALTDWLRAKASFVIEGLKEADKDEFCRCELKLQKWYGDLRGKPFAIEAENSILDISGFSKQYNCAFIWQKDGVKKLNLYLIINYFKGGKLRFKKIKPEAFEANRFYTVINKKSGEIVPMEVNFNFDDPNLIILPLAFGKRQGREFIWNDLLSLETGSLKLANGRVIEKTLYNRRTRQDEPALFVALTFERREVLDSSNIKPMNLIGVDRGENIPAVIALTDPEGCPLSRFKDSLGNPTHILRIGESYKEKQRTIQAKKEVEQRRAGGYSRKYASKAKNLADDMVRNTARDLLYYAVTQDAMLIFENLSRGFGRQGKRTFMAERQYTRMEDWLTAKLAYEGLSKTYLSKTLAQYTSKTCSNCGFTITSADYDRVLEKLKKTATGWMTTINGKELKVEGQITYYNRRKRQNVVKDLSVELDRLSEESVNNDISSWTKGRSGEALSLLKKRFSHRPVQEKFVCLNCGFETHADEQAALNIARSWLFLRSQEYKKYQTNKTTGNTDKRAFVETWQSFYRKKLKEVWKPAV

SEQ ID NO: 190 - protein, 977 aa, synthetic construct
  REGION 1..977: note = CasX variant
QEIKRINKIRRRLVKDSNTKKAGKTGPMKTLLVRVMTPDLRERLENLRKKPENIPQPISNTSRANLNKLLTDYTEMKKAILHVYWEEFQKDPVGLMSRVAQPASKKIDQNKLKPEMDEKGNLTTAGFACSQCGQPLFVYKLEQVSEKGKAYTNYFGRCNVAEHEKLILLAQLKPEKDSDEAVTYSLGKFGQRALDFYSIHVTKESTHPVKPLAQIAGNRYASGPVGKALSDACMGTIASFLSKYQDIIIEHQKVVKGNQKRLESLRELAGKENLEYPSVTLPPQPHTKEGVDAYNEVIARVRMWVNLNLWQKLKLSRDDAKPLLRLKGFPSFPLVERQANEVDWWDMVCNVKKLINEKKEDGKVFWQNLAGYKRQEALRPYLSSEEDRKKGKKFARYQLGDLLLHLEKKHGEDWGKVYDEAWERIDKKVEGLSKHIKLEEERRSEDAQSKAALTDWLRAKASFVIEGLKEADKDEFCRCELKLQKWYGDLRGKPFAIEAENSILDISGFSKQYNCAFIWQKDGVKKLNLYLIINYFKGGKLRFKKIKPEAFEANRFYTVINKKSGEIVPMEVNFNFDDPNLIILPLAFGKRQGREFIWNDLLSLETGSLKLANGRVIEKTLYNRRTRQDEPALFVALTFERREVLDSSNIKPMNLIGVDRGENIPAVIALTDPEGCPLSRFKDSLGNPTHILRIGESYKEKQRTIQAKKEVEQRRAGGYSRKYASKAKNLADDMVRNTARDLLYYAVTQDAMLIFENLSRGFGRQGKRTFMAERQYTRMEDWLTAKLAYEGLSKTYLSKTLAQYTSKTCSNCGFTITSADYDRVLEKLKKTATGWMTTINGKELKVEGQITYYNRYKRQNVVKDLSVELDRLSEESVNNDISSWTKGRSGEALSLLKKRFSHRPVQEKFVCLNCGFETHADEQAALNIARSWLFLRSQEYKKYQTNKTTGNTDKRAFVETWQSFYRKKLKEVWKPAV

SEQ ID NO: 191 - protein, 977 aa, synthetic construct
  REGION 1..977: note = CasX variant
QEIKRINKIRRRLVKDSNTKKAGKTGPMKTLLVRVMTPDLRERLENLRKKPENIPQPISNTSRANLNKLLTDYTEMKKAILHVYWEEFQKDPVGLMSRVAQPASKKIDQNKLKPEMDEKGNLTTAGFACSQCGQPLFVYKLEQVSEKGKAYTNYFGRCNVAEHEKLILLAQLKPEKDSDEAVTYSLGKFGQRALDFYSIHVTRESNHPVKPLEQIGGNSCASGPVGKALSDACMGAVASFLTKYQDIILEHQKVIKKNEKRLANLKDIASANGLAFPKITLPPQPHTKEGIEAYNNVVAQIVIWVNLNLWQKLKIGRDEAKPLQRLKGFPSFPLVERQANEVDWWDMVCNVKKLINEKKEDGKVFWQNLAGYKRQEALRPYLSSEEDRKKGKKFARYQLGDLLLHLEKKHGEDWGKVYDEAWERIDKKVEGLSKHIKLEEERRSEDAQSKAALTDWLRAKASFVIEGLKEADKDEFCRCELKLQKWYGDLRGKPFAIEAENSILDISGFSKQYNCAFIWQKDGVKKLNLYLIINYFKGGKLRFKKIKPEAFEANRFYTVINKKSGEIVPMEVNFNFDDPNLIILPLAFGKRQGREFIWNDLLSLETGSLKLANGRVIEKTLYNRRTRQDEPALFVALTFERREVLDSSNIKPMNLIGVDRGENIPAVIALTDPEGCPLSRFKDSLGNPTHILRIGESYKEKQRTIQAKKEVEQRRAGGYSRKYASKAKNLADDMVRNTARDLLYYAVTQDAMLIFENLSRGFGRQGKRTFMAERQYTRMEDWLTAKLAYEGLSKTYLSKTLAQYTSKTCSNCGFTITSADYDRVLEKLKKTATGWMTTINGKELKVEGQITYYNRYKRQNVVKDLSVELDRLSEESVNNDISSWTKGRSGEALSLLKKRFSHRPVQEKFVCLNCGFETHADEQAALNIARSWLFLRSQEYKKYQTNKTTGNTDKRAFVETWQSFYRKKLKEVWKPAV

SEQ ID NO: 192 - protein, 978 aa, synthetic construct
  REGION 1..978: note = CasX variant
MQEIKRINKIRRRLVKDSNTKKAGKTGPMKTLLVRVMTPDLRERLENLRKKPENIPQPISNTSRANLNKLLTDYTEMKKAILHVYWEEFQKDPVGLMSRVAQPAPKNIDQRKLIPVKDGNERLTSSGFACSQCCQPLYVYKLEQVNDKGKPHTNYFGRCNVSEHERLILLSPHKPEANDELVTYSLGKFGQRALDFYSIHVTRESNHPVKPLEQIGGNSCASGPVGKALSDACMGAVASFLTKYQDIILEHQKVIKKNEKRLANLKDIASANGLAFPKITLPPQPHTKEGIEAYNNVVAQIVIWVNLNLWQKLKIGRDEAKPLQRLKGFPSFPLVERQANEVDWWDMVCNVKKLINEKKEDGKVFWQNLAGYKRQEALLPYLSSEEDRKKGKKFARYQFGDLLLHLEKKHGEDWGKVYDEAWERIDKKVEGLSKHIKLEEERRSEDAQSKAALTDWLRAKASFVIEGLKEADKDEFCRCELKLQKWYGDLRGKPFAIEAENSILDISGFSKQYNCAFIWQKDGVKKLNLYLIINYFKGGKLRFKKIKPEAFEANRFYTVINKKSGEIVPMEVNFNFDDPNLIILPLAFGKRQGREFIWNDLLSLETGSLKLANGRVIEKTLYNRRTRQDEPALFVALTFERREVLDSSNIKPMNLIGIDRGENIPAVIALTDPEGCPLSRFKDSLGNPTHILRIGESYKEKQRTIQAAKEVEQRRAGGYSRKYASKAKNLADDMVRNTARDLLYYAVTQDAMLIFENLSRGFGRQGKRTFMAERQYTRMEDWLTAKLAYEGLPSKTYLSKTLAQYTSKTCSNCGFTITSADYDRVLEKLKKTATGWMTTINGKELKVEGQITYYNRYKRQNVVKDLGVELDRLSEESVNNDISSWTKGRSGEALSLLKKRFSHRPVQEKFVCLNCGFETHADEQAALNIARSWLFLRSQEYKKYQTNKTTGNTDKRAFVETWQSFYRKKLKEVWKPAV

SEQ ID NO: 193 - protein, 986 aa, synthetic construct; identical to SEQ ID NO: 108
  REGION 1..986: note = CasX variant

SEQ ID NO: 194 - protein, 978 aa, synthetic construct
  REGION 1..978: note = CasX variant
MQEIKRINKIRRRLVKDSNTKKAGKTGPMKTLLVRVMTPDLRERLENLRKKPENIPQPISNTSRANLNKLLTDYTEMKKAILHVYWEEFQKDPVGLMSRVAQPAPKNIDQRKLIPVKDGNERLTSSGFACSQCCQPLYVYKLEQVNDKGKPHTNYFGRCNVSEHERLILLSPHKPEANDELVTYSLGKFGQRALDFYSIHVTRESNHPVKPLEQIGGNSCASGPVGKALSDACMGAVASFLTKYQDIILEHQKVIKKNEKRLANLKDIASANGLAFPKITLPPQPHTKEGIEAYNNVVAQIVIWVNLNLWQKLKIGRDEAKPLQRLKGFPSFPLVERQANEVDWWDMVCNVKKLINEKKEDGKVFWQNLAGYKRQEALRPYLSSEEDRKKGKKFARYQFGDLLLHLEKKHGEDWGKVYDEAWERIDKKVEGLSKHIKLEEERRSEDAQSKAALTDWLRAKASFVIEGLKEADKDEFCRCELKLQKWYGDLRGKPFAIEAENSILDISGFSKQYNCAFIWQKDGVKKLNLYLIINYFKGGKLRFKKIKPEAFEANRFYTVINKKSGEIVPMEVNFNFDDPNLIILPLAFGKRQGREFIWNDLLSLETGSLKLANGRVIEKTLYNRRTRQDEPALFVALTFERREVLDSSNIKPVNLIGVDRGENIPAVIALTDPEGCPLPEFKDSSGGPTDILRIGEGYKEKQRAIQAAKEVEQRRAGGYSRKFASKSRNLADDMVRNSARDLFYHAVTHDAVLVFENLSRGFGRQGKRTFMTERQYTKMEDWLTAKLAYEGLTSKTYLSKTLAQYTSKTCSNCGFTITSADYDRVLEKLKKTATGWMTTINGKELKVEGQITYYNRYKRQNVVKDLSVELDRLSEESVNNDISSWTKGRSGEALSLLKKRFSHRPVQEKFVCLNCGFETHADEQAALNIARSWLFLRSQEYKKYQTNKTTGNTDKRAFVETWQSFYRKKLKEVWKPAV

SEQ ID NO: 195 - protein, 972 aa, synthetic construct
  REGION 1..972: note = CasX variant
MQEIKRINKIRRRLVKDSNTKKAGKTGPMKTLLVRVMTPDLRERLENLRKKPENIPQPISNTSRANLNKLLTDYTEMKKAILHVYWEEFQKDPVGLMSRVAQPAPKNIDQRKLIPVKDGNERLTSSGFACSQCCQPLYVYKLEQVNDKGKPHTNYFGRCNVSEHERLILLSPHKPEANDELVTYSLGKFGQRALDFYSIHVTRESNHPVKPLEQIGGNSCASGPVGKALSDACMGAVASFLTKYQDIILEHQKVIKKNEKRLANLKDIASANGLAFPKITLPPQPHTKEGIEAYNNVVAQIVIWVNLNLWQKLKIGRDEAKPLQRLKGFPSFPLVERQANEVDWWDMVCNVKKLINEKKEDGKVFWQNLAGYKRQEALRPYLSSEEDRKKGKKFARYQFGDLLLHLEKKHGEDWGKVYDEAWERIDKKVEGLSKHIKLEEERRSEDAQSKAALTDWLRAKASFVIEGLKEADKDEFCRCELKLQKWYGDLRGKPFAIEAENSILDISGFSKQYNCAFIWQKDGVKKLNLYLIINYFKGGKLRFKKIKPEAFEANRFYTVINKKSGEIVPMEVNFNFDDPNLIILPLAFGKRQGREFIWNDLLSLETGSLKLANGRVIEKTLYNRRTRQDEPALFVALTFERREVLDSSNIKPMNLIGIDRGENIPAVIALTDPEGCPLSRFKDSLGNPTHILRIGESYKEKQRTIQAKKEVEQRRAGGYSRKYASKAKNLADDMVRNTARDLLYYAVTQDAMLIFENLSRGFGRQGKRTFMAERQYTRMEDWLTAKLAYEGLSKTYLSKTLAQYTSKTCSNCGFTITSADYDRVLEKLKKTATGWMTTINGKELKVEGQITYYNRYKRQNVVKDLSVELDRLSEESVNNDISSWTKGRSGEALSLLKKRFSHRPVQEKFVCLNCGFETHADEQAALNIARSWLFLNSNSTEFKSYKSGKQPFVGAWQAFYKRRLKEVWKPNA

SEQ ID NO: 196 - protein, 978 aa, synthetic construct
  REGION 1..978: note = CasX variant
QEIKRINKIRRRLVKDSNTKKAGKTGPMKTLLVRVMTPDLRERLENLRKKPENIPQPISNTSRANLNKLLTDYTEMKKAILHVYWEEFQKDPVGLMSRVAQPASKKIDQNKLKPEMDEKGNLTTAGFACSQCGQPLFVYKLEQVSEKGKAYTNYFGRCNVAEHEKLILLAQLKPEKDSDEAVTYSLGKFGQRALDFYSIHVTKESTHPVKPLAQIAGNRYASGPVGKALSDACMGTIASFLSKYQDIIIEHQKVVKGNQKRLESLRELAGKENLEYPSVTLPPQPHTKEGVDAYNEVIARVRMWVNLNLWQKLKLSRDDAKPLLRLKGFPSFPLVERQANEVDWWDMVCNVKKLINEKKEDGKVFWQNLAGYKRQEALRPYLSSEEDRKKGKKFARYQLGDLLLHLEKKHGEDWGKVYDEAWERIDKKVEGLSKHIKLEEERRSEDAQSKAALTDWLRAKASFVIEGLKEADKDEFCRCELKLQKWYGDLRGKPFAIEAENSILDISGFSKQYNCAFIWQKDGVKKLNLYLIINYFKGGKLRFKKIKPEAFEANRFYTVINKKSGEIVPMEVNFNFDDPNLIILPLAFGKRQGREFIWNDLLSLETGSLKLANGRVIEKTLYNRRTRQDEPALFVALTFERREVLDSSNIKPMNLIGVDRGENIPAVIALTDPEGCPLSRFKDSLGNPTHILRIGESYKEKQRTIQAKKEVEQRRAGGYSRKYASKAKNLADDMVRNTARDLLYYAVTQDAMLIFENLSRGFGRQGKRTFMAERQYTRMEDWLTAKLAYEGLSKTYLSKTLAQYTSKTCSNCGFTIHTSADYDRVLEKLKKTATGWMTTINGKELKVEGQITYYNRYKRQNVVKDLSVELDRLSEESVNNDISSWTKGRSGEALSLLKKRFSHRPVQEKFVCLNCGFETHADEQAALNIARSWLFLRSQEYKKYQTNKTTGNTDKRAFVETWQSFYRKKLKEVWKPAV

SEQ ID NO: 197 - protein, 978 aa, synthetic construct
  REGION 1..978: note = CasX variant
QEIKRINKIRRRLVKDSNTKKAGKTGPMKTLLVRVMTPDLRERLENLRKKPENIPQPISNTSRANLNKLLTDYTEMKKAILHVYWEEFQKDPVGLMSRVAQPASKKIDQNKLKPEMDEKGNLTTAGFACSQCGQPLFVYKLEQVSEKGKAYTNYFGRCNVAEHEKLILLAQLKPEKDSDEAVTYSLGKFGQRALDFYSIHVTKESTHPVKPLAQIAGNRYASGPVGKALSDACMGTIASFLSKYQDIIIEHQKVVKGNQKRLESLRELAGKENLEYPSVTLPPQPHTKEGVDAYNEVIARVRMWVNLNLWQKLKLSRDDAKPLLRLKGFPSFPLVERQANEVDWWDMVCNVKKLINEKKEDGKVFWQNLAGYKRQEALRPYLSSEEDRKKGKKFARYQLGDLLLHLEKKHGEDWGKVYDEAWERIDKKVEGLSKHIKLEEERRSEDAQSKAALTDWLRAKASFVIEGLKEADKDEFCRCELKLQKWYGDLRGKPFAIEAENSILDISGFSKQYNCAFIWQKDGVKKLNLYLIINYFKGGKLRFKKIKPEAFEANRFYTVINKKSGEIVPMEVNFNFDDPNLIILPLAFGKRQGREFIWNDLLSLETGSLKLANGRVIEKTLYNRRTRQDEPALFVALTFERREVLDSSNIKPMNLIGVDRGENIPAVIALTDPEGCPLSRFKDSLGNPTHILRIGESYKEKQRTIQAKKEVEQRRAGGYSRKYASKAKNLADDMVRNTARDLLYYAVTQDAMLIFENLSRGFGRQGKRTFMAERQYTRMEDWLTAKLAYEGLPSKTYLSKTLAQYTSKTCSNCGFTITSADYDRVLEKLKKTATGWMTTINGKELKVEGQITYYNRYKRQNVVKDLSVELDRLSEESVNNDISSWTKGRSGEALSLLKKRFSHRPVQEKFVCLNCGFETHADEQAALNIARSWLFLRSQEYKKYQTNKTTGNTDKRAFVETWQSFYRKKLKEVWKPAV

SEQ ID NO: 198 - protein, 977 aa, synthetic construct
  REGION 1..977: note = CasX variant
QEIKRINKIRRRLVKDSNTKKAGKTGPMKTLLVRVMTPDLRERLENLRKKPENIPQPISNTSRANLNKLLTDYTEMKKAILHVYWEEFQKDPVGLMSRVAQPASKKIDQNKLKPEMDEKGNLTTAGFACSQCGQPLFVYKLEQVSEKGKAYTNYFGRCNVAEHEKLILLAQLKPEKDSDEAVTYSLGKFGQRALDFYSIHVTKESTHPVKPLAQIAGNRYASGPVGKALSDACMGTIASFLSKYQDIIIEHQKVVKGNQKRLESLRELAGKENLEYPSVTLPPQPHTKEGVDAYNEVIARVRMWVNHNLWQKLKLSRDDAKPLLRLKGFPSFPLVERQANEVDWWDMVCNVKKLINEKKEDGKVFWQNLAGYKRQEALRPYLSSEEDRKKGKKFARYQLGDLLLHLEKKHGEDWGKVYDEAWERIDKKVEGLSKHIKLEEERRSEDAQSKAALTDWLRAKASFVIEGLKEADKDEFCRCELKLQKWYGDLRGKPFAIEAENSILDISGFSKQYNCAFIWQKDGVKKLNLYLIINYFKGGKLRFKKIKPEAFEANRFYTVINKKSGEIVPMEVNFNFDDPNLIILPLAFGKRQGREFIWNDLLSLETGSLKLANGRVIEKTLYNRRTRQDEPALFVALTFERREVLDSSNIKPMNLIGVDRGENIPAVIALTDPEGCPLSRFKDSLGNPTHILRIGESYKEKQRTIQAKKEVEQRRAGGYSRKYASKAKNLADDMVRNTARDLLYYAVTQDAMLIFENLSRGFGRQGKRTFMAERQYTRMEDWLTAKLAYEGLSKTYLSKTLAQYTSKTCSNCGFTITSADYDRVLEKLKKTATGWMTTINGKELKVEGQITYYNRYKRQNVVKDLSVELDRLSEESVNNDISSWTKGRSGEALSLLKKRFSHRPVQEKFVCLNCGFETHADEQAALNIARSWLFLRSQEYKKYQTNKTTGNTDKRAFVETWQSFYRKKLKEVWKPAV

SEQ ID NO: 199 - protein, 978 aa, synthetic construct
  REGION 1..978: note = CasX variant
QEIKRINKIRRRLVKDSNTKKAGKTGPMKTLLVRVMTPDLRERLENLRKKPENIPQPISNTSRANLNKLLTDYTEMKKAILHVYWEEFQKDPVGLMSRVAQPASKKIDQNKLKPEMDEKGNLTTAGFACSQCGQPLFVYKLEQVSEKGKAYTNYFGRCNVAEHEKLILLAQLKPEKDSDEAVTYSLGKFGQRALDFYSIHVTKESTHPVKPLAQIAGNRYASGAPVGKALSDACMGTIASFLSKYQDIIIEHQKVVKGNQKRLESLRELAGKENLEYPSVTLPPQPHTKEGVDAYNEVIARVRMWVNLNLWQKLKLSRDDAKPLLRLKGFPSFPLVERQANEVDWWDMVCNVKKLINEKKEDGKVFWQNLAGYKRQEALRPYLSSEEDRKKGKKFARYQLGDLLLHLEKKHGEDWGKVYDEAWERIDKKVEGLSKHIKLEEERRSEDAQSKAALTDWLRAKASFVIEGLKEADKDEFCRCELKLQKWYGDLRGKPFAIEAENSILDISGFSKQYNCAFIWQKDGVKKLNLYLIINYFKGGKLRFKKIKPEAFEANRFYTVINKKSGEIVPMEVNFNFDDPNLIILPLAFGKRQGREFIWNDLLSLETGSLKLANGRVIEKTLYNRRTRQDEPALFVALTFERREVLDSSNIKPMNLIGVDRGENIPAVIALTDPEGCPLSRFKDSLGNPTHILRIGESYKEKQRTIQAKKEVEQRRAGGYSRKYASKAKNLADDMVRNTARDLLYYAVTQDAMLIFENLSRGFGRQGKRTFMAERQYTRMEDWLTAKLAYEGLSKTYLSKTLAQYTSKTCSNCGFTITSADYDRVLEKLKKTATGWMTTINGKELKVEGQITYYNRYKRQNVVKDLSVELDRLSEESVNNDISSWTKGRSGEALSLLKKRFSHRPVQEKFVCLNCGFETHADEQAALNIARSWLFLRSQEYKKYQTNKTTGNTDKRAFVETWQSFYRKKLKEVWKPAV

SEQ ID NO: 200 - protein, 978 aa, synthetic construct
  REGION 1..978: note = CasX variant
RQEIKRINKIRRRLVKDSNTKKAGKTGPMKTLLVRVMTPDLRERLENLRKKPENIPQPISNTSRANLNKLLTDYTEMKKAILHVYWEEFQKDPVGLMSRVAQPASKKIDQNKLKPEMDEKGNLTTAGFACSQCGQPLFVYKLEQVSEKGKAYTNYFGRCNVAEHEKLILLAQLKPEKDSDEAVTYSLGKFGQRALDFYSIHVTKESTHPVKPLAQIAGNRYASGPVGKALSDACMGTIASFLSKYQDIIIEHQKVVKGNQKRLESLRELAGKENLEYPSVTLPPQPHTKEGVDAYNEVIARVRMWVNLNLWQKLKLSRDDAKPLLRLKGFPSFPLVERQANEVDWWDMVCNVKKLINEKKEDGKVFWQNLAGYKRQEALRPYLSSEEDRKKGKKFARYQLGDLLLHLEKKHGEDWGKVYDEAWERIDKKVEGLSKHIKLEEERRSEDAQSKAALTDWLRAKASFVIEGLKEADKDEFCRCELKLQKWYGDLRGKPFAIEAENSILDISGFSKQYNCAFIWQKDGVKKLNLYLIINYFKGGKLRFKKIKPEAFEANRFYTVINKKSGEIVPMEVNFNFDDPNLIILPLAFGKRQGREFIWNDLLSLETGSLKLANGRVIEKTLYNRRTRQDEPALFVALTFERREVLDSSNIKPMNLIGVDRGENIPAVIALTDPEGCPLSRFKDSLGNPTHILRIGESYKEKQRTIQAKKEVEQRRAGGYSRKYASKAKNLADDMVRNTARDLLYYAVTQDAMLIFENLSRGFGRQGKRTFMAERQYTRMEDWLTAKLAYEGLSKTYLSKTLAQYTSKTCSNCGFTITSADYDRVLEKLKKTATGWMTTINGKELKVEGQITYYNRYKRQNVVKDLSVELDRLSEESVNNDISSWTKGRSGEALSLLKKRFSHRPVQEKFVCLNCGFETHADEQAALNIARSWLFLRSQEYKKYQTNKTTGNTDKRAFVETWQSFYRKKLKEVWKPAV

SEQ ID NO: 201 - protein, 978 aa, synthetic construct
  REGION 1..978: note = CasX variant
QEIKRINKIRRRLVKDSNTKKAGKTGPMKTLLVRVMTPDLRERLENLRKKPENIPQPISNTSRANLNKLLTDYTEMKKAILHVYWEEFQKDPVGLMSRVAQPASKKIDQNKLKPEMDEKGNLTTAGFACSQCGQPLFVYKLEQVSEKGKAYTNYFGRCNVAEHEKLILLAQLKPEKDSDEAVTYSLGKFGQRALDFYSIHVTKESTHPVKPLAQIAGNRYASGPVGKALSDACMGTIASFLSKYQDIIIEHQKVVKGNQKRLESLRELAGKENLEYPSVTLPPQPHTKEGVDAYNEVIARVRMWVNLNLWQKLKLSRDDAKPLLRLKGFPSFPLVERQANEVDWWDMVCNVKKLINEKKEDGKVFWQNLAGYKRQEALRPYLSSEEDRKKGKKFARYQLGDLLLHLEKKHGEDWGKVYDEAWERIDKKVEGLSKHIKLEEERRSEDAQSKAALTDWLRAKASFVIEGLKEADKDEFCRCELKLQKWYGDLRGKPFAIEAENSILDISGFSKQYNCAFIWQKDGVKKLNLYLIINYFKGGKLRFKKIKPEAFEANRFYTVINKKSGEIVPMEVNFNFDDPNLIILPLAFGKRQGREFIWNDLLSLETGSLKLANGRVIEKTLYNRRTRQDEPALFVALTFERREVLDSSNIKPMNLIGVDRGENIPAVIALTDPEGCPLSRFKDSLGNPTHIQLRIGESYKEKQRTIQAKKEVEQRRAGGYSRKYASKAKNLADDMVRNTARDLLYYAVTQDAMLIFENLSRGFGRQGKRTFMAERQYTRMEDWLTAKLAYEGLSKTYLSKTLAQYTSKTCSNCGFTITSADYDRVLEKLKKTATGWMTTINGKELKVEGQITYYNRYKRQNVVKDLSVELDRLSEESVNNDISSWTKGRSGEALSLLKKRFSHRPVQEKFVCLNCGFETHADEQAALNIARSWLFLRSQEYKKYQTNKTTGNTDKRAFVETWQSFYRKKLKEVWKPAV

SEQ ID NO: 202 - protein, 977 aa, synthetic construct
  REGION 1..977: note = CasX variant
QEIKRINKIRRRLVKDSNTKKAGKTGPMKTLLVRVMTPDLRERLENLRKKPENIPQPISNTSRANLNKLLTDYTEMKKAILHVYWEEFQKDPVGLMSRVAQPASKKIDQNKLKPEMDEKGNLTTAGFACSQCGQPLFVYKLEQVSEKGKAYTNYFGRCNVAEHEKLILLAQLKPEKDSDEAVTYSLGKFGQRALDFYSIHVTKESTHPVKPLAQIAGNRYASGPVGKALSDACMGTIASFLSKYQDIIIEHQKVVKGNQKRLESLRELAGKENLEYPSVTLPPQPHTKEGVDAYNEVIARVRMWVNLNLWQKLKLSRDDAKPLLRLKGFPSFPLVERQANEVDWWDMVCNVKKLINEKKEDGKVFWQNLAGYKRQEALRPYLSSEEDRKKGKKFARYQLGDLLLHLEKKHGEDWGKVYDEAWERIDKKVEGLSKHIKLEEERRSEDAQSKAALTDWLRAKASFVIEGLKEADKDEFCRCELKLQKWYGDLRGKPFAIEAENSILDISGFSKQYNCAFIWQKDGVKKLNLYLIINYFKGGKLRFKKIKPEAFEANRFYTVINKKSGEIVPMEVNFNFDDPNLIILPLAFGKRQGREFIWNDLLSLETGSLKLANGRVIEKTLYNRRTRQDEPALFVALTFERREVLDSSNIKPMNLIGVDRGENIPAVIALTDPEGCPLSRFKDSLGNPTHILRIGESYKEKQRTTQAKKEVEQRRAGGYSRKYASKAKNLADDMVRNTARDLLYYAVTQDAMLIFENLSRGFGRQGKRTFMAERQYTRMEDWLTAKLAYEGLSKTYLSKTLAQYTSKTCSNCGFTITSADYDRVLEKLKKTATGWMTTINGKELKVEGQITYYNRYKRQNVVKDLSVELDRLSEESVNNDISSWTKGRSGEALSLLKKRFSHRPVQEKFVCLNCGFETHADEQAALNIARSWLFLRSQEYKKYQTNKTTGNTDKRAFVETWQSFYRKKLKEVWKPAV

SEQ ID NO: 203 - protein, 977 aa, synthetic construct
  REGION 1..977: note = CasX variant
QEIKRINKIRRRLVKDSNTKKAGKTGPMKTLLVRVMTPDLRERLENLRKKPENIPQPISNTSRANLNKLLTDYTEMKKAILHVYWEEFQKDPVGLMSRVAQPASKKIDQNKLKPEMDEKGNLTTAGFACSQCGQPLFVYKLEQVSEKGKAYTNYFGRCNVAEHEKLILLAQLKPEKDSDEAVTYSLGKFGQRALDFYSIHVTKESTHPVKPLAQIAGNRYASGPVGKALSDACMGTIASFLSKYQDIIIEHQKVVKGNQKRLESLRELAGKENLEYPSVTLPPQPHTKEGVDAYNEVIARVRMWVNLNLWQKLKLSRDDAKPLLRLKGFPSFPLVERQANEVDWWDMVCNVKKLINEKKEDGKVFWQNLAGYKRQEALRPYLSSEEDRKKGKKFARYQLGDLLLHLEKKHGEDWGKVYDEAWERIDKKVEGLSKHIKLEEERRSEDAQSKAALTDWLRAKASFVIEGLKEADKDEFCRCELKLQKWYGDLRGKPFAIEAENSILDISGFSKQYNCAFIWQKDGVKKLNLYLIINYFKGGKLRFKKIKPEAFEANRFYTVINKKSGEIVPMEVNFNFDDPNLIILPLAFGKRQGREFIWNDLLSLETGSLKLANGRVIEKTLYNRRTRQDEPALFVALTFERREVLDSSNIKPMNLIGVDRGENIPAVIALTDPEGCPLSRFKRSLGNPTHILRIGESYKEKQRTIQAKKEVEQRRAGGYSRKYASKAKNLADDMVRNTARDLLYYAVTQDAMLIFENLSRGFGRQGKRTFMAERQYTRMEDWLTAKLAYEGLSKTYLSKTLAQYTSKTCSNCGFTITSADYDRVLEKLKKTATGWMTTINGKELKVEGQITYYNRYKRQNVVKDLSVELDRLSEESVNNDISSWTKGRSGEALSLLKKRFSHRPVQEKFVCLNCGFETHADEQAALNIARSWLFLRSQEYKKYQTNKTTGNTDKRAFVETWQSFYRKKLKEVWKPAV

SEQ ID NO: 204 - protein, 977 aa, synthetic construct
  REGION 1..977: note = CasX variant
QEIKRINKIRRRLVKDSNTKKAGKTYPMKTLLVRVMTPDLRERLENLRKKPENIPQPISNTSRANLNKLLTDYTEMKKAILHVYWEEFQKDPVGLMSRVAQPASKKIDQNKLKPEMDEKGNLTTAGFACSQCGQPLFVYKLEQVSEKGKAYTNYFGRCNVAEHEKLILLAQLKPEKDSDEAVTYSLGKFGQRALDFYSIHVTKESTHPVKPLAQIAGNRYASGPVGKALSDACMGTIASFLSKYQDIIIEHQKVVKGNQKRLESLRELAGKENLEYPSVTLPPQPHTKEGVDAYNEVIARVRMWVNLNLWQKLKLSRDDAKPLLRLKGFPSFPLVERQANEVDWWDMVCNVKKLINEKKEDGKVFWQNLAGYKRQEALRPYLSSEEDRKKGKKFARYQLGDLLLHLEKKHGEDWGKVYDEAWERIDKKVEGLSKHIKLEEERRSEDAQSKAALTDWLRAKASFVIEGLKEADKDEFCRCELKLQKWYGDLRGKPFAIEAENSILDISGFSKQYNCAFIWQKDGVKKLNLYLIINYFKGGKLRFKKIKPEAFEANRFYTVINKKSGEIVPMEVNFNFDDPNLIILPLAFGKRQGREFIWNDLLSLETGSLKLANGRVIEKTLYNRRTRQDEPALFVALTFERREVLDSSNIKPMNLIGVDRGENIPAVIALTDPEGCPLSRFKDSLGNPTHILRIGESYKEKQRTIQAKKEVEQRRAGGYSRKYASKAKNLADDMVRNTARDLLYYAVTQDAMLIFENLSRGFGRQGKRTFMAERQYTRMEDWLTAKLAYEGLSKTYLSKTLAQYTSKTCSNCGFTITSADYDRVLEKLKKTATGWMTTINGKELKVEGQITYYNRYKRQNVVKDLSVELDRLSEESVNNDISSWTKGRSGEALSLLKKRFSHRPVQEKFVCLNCGFETHADEQAALNIARSWLFLRSQEYKKYQTNKTTGNTDKRAFVETWQSFYRKKLKEVWKPAV

SEQ ID NO: 205 - protein, 977 aa, synthetic construct
  REGION 1..977: note = CasX variant
QEIKRINKIRRRLVKDSNTKKAGKTGPMKTLLVRVMTPDLRERLENLRKKPENIPQPISNTSRANLNKLLTDYTEMKKAILHVYWEEFQKDPVGLMSRVAQPASKKIDQNKLKPEMDEKGNLTTAGFACSQCGQPLFVYKLEQVSEKGKAYTNYFGRCNVAEHEKLILLAQLKPEKDSDEAVTYSLGKFGQRALDFYSIHVTKESTHPVKPLAQIAGNRYASGPVGKALSDACMGTIASFLSKYQDIIIEHQKVVKGNQKRLESLRELAGKENLEYPSVTLPPQPHTKEGVDAYNEVIARVRMWVNLNLWQKLKLSRDDAKPLLRLKGFPSFPLVERQANEVDWWDMVCNVKKLINEKKEDGKVFWQNLAGYKRQEALRPYLSSEEDRKKGKKFARYQLGDLLLHLEKKHGEDWGKVYDEAWERIDKKVEGLSKHIKLEEERRSEDAQSKAALTDWLRAKASFVIEGLKEADKDEFCRCELKLQKWYGDLRGKPFAIEAENSILDISGFSKQYNCAFIWQKDGVKKLNLYLIINYFKGGKLRFKKIKPEAFEANRFYTVINKKSGEIVPMEVNFNFDDPNLIILPLAFGKRQGREFIWNDLLSLETGSLKLANGRVIEKTLYNRRTRQDEPALFVALTFERREVLDSSNIKPMNLIGVDRGENIPAVIALTDPEGCPLSRFKDSLGNPTHILRIGESYKEKQRTIQAKKEVEQRRAGGYSRKYASKAKNLADDMVRNTARDLLYYAVTQDAMLIFENLSRGFGRQGKRTFMAERQYTRMEDWLTAKLAYEGLSKTYLSKTLAQYTSKTCSNCGFTIHSADYDRVLEKLKKTATGWMTTINGKELKVEGQITYYNRYKRQNVVKDLSVELDRLSEESVNNDISSWTKGRSGEALSLLKKRFSHRPVQEKFVCLNCGFETHADEQAALNIARSWLFLRSQEYKKYQTNKTTGNTDKRAFVETWQSFYRKKLKEVWKPAV

SEQ ID NO: 206 - protein, 977 aa, synthetic construct
  REGION 1..977: note = CasX variant
QEIKRINKIRRRLVKDSNTKKAGKTGPMKTLLVRVMTPDLRERLENLRKKPENIPQPISNTSRANLNKLLTDYTEMKKAILHVYWEEFQKDPVGLMSRVAQPASKKIDQNKLKPEMDEKGNLTTAGFACSQCGQPLFVYKLEQVSEKGKAYTNYFGRCNVAEHEKLILLAQLKPEKDSDEAVTYSLGKFGQRALDFYSIHVTKESTHPVKPLAQIAGNRYASGPVGKALSDACMGTIASFLSKYQDIIIEHQKVVKGNQKRLESLRELAGKENLEYPSVTLPPQPHTKEGVDAYNEVIARVRMWVNLNLWQKLKLSRDDAKPLLRLKGFPSFPLVERQANEVDWWDMVCNVKKLINEKKEDGKVFWQNLAGYKRQEALRPYLSSEEDRKKGKKFARYQLGDLLLHLEKKHGEDWGKVYDEAWERIDKKVEGLSKHIKLEEERRSEDAQSKAALTDWLRAKASFVIEGLKEADKDEFCRCELKLQKWYGDLRGKPFAIEAENSILDISGFSKQYNCAFIWQKDGVKKLNLYLIINYFKGGKLRFKKIKPEAFEANRFYTVINKKSGEIVPMEVNFNFDDPNLIILPLAFGKRQGREFIWNDLLSLETGSLKLANGRVIEKTLYNRRTRQDEPALFVALTFERREVLDSSNIKPMNLIGVDRGENIPAVIALTDPEGCPLSRFKDSLGNPTHILRIGESYKEKQRTIQAKKEVEQRRAGGYSRKYASKAKNLADDMVRNTARDLLYYAATQDAMLIFENLSRGFGRQGKRTFMAERQYTRMEDWLTAKLAYEGLSKTYLSKTLAQYTSKTCSNCGFTITSADYDRVLEKLKKTATGWMTTINGKELKVEGQITYYNRYKRQNVVKDLSVELDRLSEESVNNDISSWTKGRSGEALSLLKKRFSHRPVQEKFVCLNCGFETHADEQAALNIARSWLFLRSQEYKKYQTNKTTGNTDKRAFVETWQSFYRKKLKEVWKPAV

SEQ ID NO: 207 - protein, 977 aa, synthetic construct
  REGION 1..977: note = CasX variant
QEIKRINKIRRRLVKDSNTKKAGKTGPMKTLLVRVMTPDLRERLENLRKKPENIPQPISNTSRANLNKLLTDYTEMKKAILHVYWEEFQKDPVGLMSRVAQPASKKIDQNKLKPEMDEKGNLTTAGFACSQCGQPLFVYKLEQVSEKGKAYTNYFGRCNVAEHEKLILLAQLKPEKDSDEAVTYSLGKFGQRALDFYSIHVTKESTHPVKPLAQIAGNRYASGPVGKALSDACMGTIASFLSKYQDIIIEHQKVVKGNQKRLESLRELAGKENLEYPSVTLPPQPHTKEGVDAYNEVIARVRMWVNLNLWQKLKLSRDDAKPLLRLKGFPSFPLVERQANEVDWWDMVCNVKKLINEKKEDGKVFWQNLAGYKRQEALRPYLSSEEDRKKGKKFARYQLGDLLLHLEKKHGEDWGKVYDEAWERIDKKVEGLSKHIKLEEERRSEDAQSKAALTDWLRAKASFVIEGLKEADKDEFCRCELKLQKWYGDLRGKPFAIEAENSILDISGFSKQYNCAFIWQKDGVKKLNLYLIINYFKGGKLRFKKIKPEAFEANRFYTVINKKSGEIVPMEVNFNFDDPNLIILPLAFGKRQGREFIWNDLLSLETGSLKLANGRVIEKTLYNRRTRQDEPALFVALTFERREVLDSSNIKPMNLIGVDRGENIPAVIALTDPEGCPLSRFKDSLGNPTHILRIGESYKEKQRTIQAAKEVEQRRAGGYSRKYASKAKNLADDMVRNTARDLLYYAVTQDAMLIFENLSRGFGRQGKRTFMAERQYTRMEDWLTAKLAYEGLSKTYLSKTLAQYTSKTCSNCGFTITSADYDRVLEKLKKTATGWMTTINGKELKVEGQITYYNRYKRQNVVKDLSVELDRLSEESVNNDISSWTKGRSGEALSLLKKRFSHRPVQEKFVCLNCGFETHADEQAALNIARSWLFLRSQEYKKYQTNKTTGNTDKRAFVETWQSFYRKKLKEVWKPAV

SEQ ID NO: 208 - protein, 978 aa, synthetic construct
  REGION 1..978: note = CasX variant
QEIKRINKIRRRLVKDSNTKKAGKTRGPMKTLLVRVMTPDLRERLENLRKKPENIPQPISNTSRANLNKLLTDYTEMKKAILHVYWEEFQKDPVGLMSRVAQPASKKIDQNKLKPEMDEKGNLTTAGFACSQCGQPLFVYKLEQVSEKGKAYTNYFGRCNVAEHEKLILLAQLKPEKDSDEAVTYSLGKFGQRALDFYSIHVTKESTHPVKPLAQIAGNRYASGPVGKALSDACMGTIASFLSKYQDIIIEHQKVVKGNQKRLESLRELAGKENLEYPSVTLPPQPHTKEGVDAYNEVIARVRMWVNLNLWQKLKLSRDDAKPLLRLKGFPSFPLVERQANEVDWWDMVCNVKKLINEKKEDGKVFWQNLAGYKRQEALRPYLSSEEDRKKGKKFARYQLGDLLLHLEKKHGEDWGKVYDEAWERIDKKVEGLSKHIKLEEERRSEDAQSKAALTDWLRAKASFVIEGLKEADKDEFCRCELKLQKWYGDLRGKPFAIEAENSILDISGFSKQYNCAFIWQKDGVKKLNLYLIINYFKGGKLRFKKIKPEAFEANRFYTVINKKSGEIVPMEVNFNFDDPNLIILPLAFGKRQGREFIWNDLLSLETGSLKLANGRVIEKTLYNRRTRQDEPALFVALTFERREVLDSSNIKPMNLIGVDRGENIPAVIALTDPEGCPLSRFKDSLGNPTHILRIGESYKEKQRTIQAKKEVEQRRAGGYSRKYASKAKNLADDMVRNTARDLLYYAVTQDAMLIFENLSRGFGRQGKRTFMAERQYTRMEDWLTAKLAYEGLSKTYLSKTLAQYTSKTCSNCGFTITSADYDRVLEKLKKTATGWMTTINGKELKVEGQITYYNRYKRQNVVKDLSVELDRLSEESVNNDISSWTKGRSGEALSLLKKRFSHRPVQEKFVCLNCGFETHADEQAALNIARSWLFLRSQEYKKYQTNKTTGNTDKRAFVETWQSFYRKKLKEVWKPAV

SEQ ID NO: 209 - protein, 978 aa, synthetic construct
  REGION 1..978: note = CasX variant
QEIKRINKIRRRLVKDSNTKKAGKTGPMKTLLVRVMTPDLRERLENLRKKPENIPQPISNTSRANLNKLLTDYTEMKKAILHVYWEEFQKDPVGLMSRVAQPASKKIDQNKLKPEMDEKGNLTTAGFACSQCGQPLFVYKLEQVSEKGKAYTNYFGRCNVAEHEKLILLAQLKPEKDSDEAVTYSLGKFGQRALDFYSIHVTKESTHPVKPLAQIAGNRYASYPVGKALSDACMGTIASFLSKYQDIIIEHQKVVKGNQKRLESLRELAGKENLEYPSVTLPPQPHTKEGVDAYNEVIARVRMWVNLNLWQKLKLSRDDAKPLLRLKGFPSFPLVERQANEVDWWDMVCNVKKLINEKKEDGKVFWQNLAGYKRQEALRPYLSSEEDRKKGKKFARYQLGDLLLHLEKKHGEDWGKVYDEAWERIDKKVEGLSKHIKLEEERRSEDAQSKAALTDWLRAKASFVIEGLKEADKDEFCRCELKLQKWYGDLRGKPFAIEAENSILDISGFSKQYNCAFIWQKDGVKKLNLYLIINYFKGGKLRFKKIKPEAFEANRFYTVINKKSGEIVPMEVNFNFDDPNLIILPLAFGKRQGREFIWNDLLSLETGSLKLANGRVIEKTLYNRRTRQDEPALFVALTFERREVLDSSNIKPMNLIGVDRGENIPAVIALTDPEGCPLSRFKDSLGNPTHILRIGESYKEKQRTIQAKKEVEQRRAGGYSRKYASKAKNLADDMVRNTARDLLYYAVTQDAMLIFENLSRGFGRQGKRTFMAERQYTRMEDWLTAKLAYEGLPSKTYLSKTLAQYTSKTCSNCGFTITSADYDRVLEKLKKTATGWMTTINGKELKVEGQITYYNRYKRQNVVKDLSVELDRLSEESVNNDISSWTKGRSGEALSLLKKRFSHRPVQEKFVCLNCGFETHADEQAALNIARSWLFLRSQEYKKYQTNKTTGNTDKRAFVETWQSFYRKKLKEVWKPAV

SEQ ID NO: 210 - protein, 978 aa, synthetic construct
  REGION 1..978: note = CasX variant
QEIKRINKIRRRLVKDSNTKKAGKTGPMKTLLVRVMTPDLRERLENLRKKPENIPQPISNTSRANLNKLLTDYTEMKKAILHVYWEEFQKDPVGLMSRVAQPASKKIDQNKLKPEMDEKGNLTTAGFACSQCGQPLFVYKLEQVSEKGKAYTNYFGRCNVAEHEKLILLAQLKPEKDSDEAVTYSLGKFGQRALDFYSIHVTKESTHPVKPLAQIAGNRYASNPVGKALSDACMGTIASFLSKYQDIIIEHQKVVKGNQKRLESLRELAGKENLEYPSVTLPPQPHTKEGVDAYNEVIARVRMWVNLNLWQKLKLSRDDAKPLLRLKGFPSFPLVERQANEVDWWDMVCNVKKLINEKKEDGKVFWQNLAGYKRQEALRPYLSSEEDRKKGKKFARYQLGDLLLHLEKKHGEDWGKVYDEAWERIDKKVEGLSKHIKLEEERRSEDAQSKAALTDWLRAKASFVIEGLKEADKDEFCRCELKLQKWYGDLRGKPFAIEAENSILDISGFSKQYNCAFIWQKDGVKKLNLYLIINYFKGGKLRFKKIKPEAFEANRFYTVINKKSGEIVPMEVNFNFDDPNLIILPLAFGKRQGREFIWNDLLSLETGSLKLANGRVIEKTLYNRRTRQDEPALFVALTFERREVLDSSNIKPMNLIGVDRGENIPAVIALTDPEGCPLSRFKDSLGNPTHILRIGESYKEKQRTIQAKKEVEQRRAGGYSRKYASKAKNLADDMVRNTARDLLYYAVTQDAMLIFENLSRGFGRQGKRTFMAERQYTRMEDWLTAKLAYEGLPSKTYLSKTLAQYTSKTCSNCGFTITSADYDRVLEKLKKTATGWMTTINGKELKVEGQITYYNRYKRQNVVKDLSVELDRLSEESVNNDISSWTKGRSGEALSLLKKRFSHRPVQEKFVCLNCGFETHADEQAALNIARSWLFLRSQEYKKYQTNKTTGNTDKRAFVETWQSFYRKKLKEVWKPAV

SEQ ID NO: 211 - protein, 979 aa, synthetic construct
  REGION 1..979: note = CasX variant
QEIKRINKIRRRLVKDSNTKKAGKTGPMKTLLVRVMTPDLRERLENLRKKPENIPQPISNTSRANLNKLLTDYTEMKKAILHVYWEEFQKDPVGLMSRVAQPASKKIDQNKLKPEMDEKGNLTTAGFACSQCGQPLFVYKLEQVSEKGKAYTNYFGRCNVAEHEKLILLAQLKPEKDSDEAVTYSLGKFGQRALDFYSIHVTKESTHPVKPLAQIAGNRYASGPVGKALSDACMGTIASFLSKYQDIIIEHQKVVKGNQKRLESLRELAGKENLEYPSVTLPPQPHTKEGVDAYNEVIARVRMWVNLNLWQKLKLSRDDAKPLLRLKGFPSFPLVERQANEVDWWDMVCNVKKLINEKKEDGKVFWQNLAGYKRQEALRPYLSSEEDRKKGKKFARYQLGDLLLHLEKKHGEDWGKVYDEAWERIDKKVEGLSKHIKLEEERRSEDAQSKAALTDWLRAKASFVIEGLKEADKDEFCRCELKLQKWYGDLRGKPFAIEAENSILDISGFSKQYNCAFIWQKDGVKKLNLYLIINYFKGWGKLRFKKIKPEAFEANRFYTVINKKSGEIVPMEVNFNFDDPNLIILPLAFGKRQGREFIWNDLLSLETGSLKLANGRVIEKTLYNRRTRQDEPALFVALTFERREVLDSSNIKPMNLIGVDRGENIPAVIALTDPEGCPLSRFKDSLGNPTHILRIGESYKEKQRTIQAKKEVEQRRAGGYSRKYASKAKNLADDMVRNTARDLLYYAVTQDAMLIFENLSRGFGRQGKRTFMAERQYTRMEDWLTAKLAYEGLPSKTYLSKTLAQYTSKTCSNCGFTITSADYDRVLEKLKKTATGWMTTINGKELKVEGQITYYNRYKRQNVVKDLSVELDRLSEESVNNDISSWTKGRSGEALSLLKKRFSHRPVQEKFVCLNCGFETHADEQAALNIARSWLFLRSQEYKKYQTNKTTGNTDKRAFVETWQSFYRKKLKEVWKPAV

SEQ ID NO: 212 - protein, 979 aa, synthetic construct
  REGION 1..979: note = CasX variant
QEIKRINKIRRRLVKDSNTKKAGKTGPMKTLLVRVMTPDLRERLENLRKKPENIPQPISNTSRANLNKLLTDYTEMKKAILHVYWEEFQKDPVGLMSRVAQPASKKIDQNKLKPEMDEKGNLTTAGFACSQCGQPLFVYKLEQVSEKGKAYTNYFGRCNVAEHEKLILLAQLKPEKDSDEAVTYSLGKFGQRALDFYSIHVTKESTHPVKPLAQIAGNRYASGPVGKALSDACMGTIASFLSKYQDIIIEHQKVVKGNQKRLESLRELAGKENLEYPSVTLPPQPHTKEGVDAYNEVIARVRMWVNLNLWQKLKLSRDDAKPLLRLKGFPSFPLVERQANEVDWWDMVCNVKKLINEKKEDGKVFWQNLAGYKRQEALRPYLSSEEDRKKGKKFARYQLGDLLLHLEKKHGEDWGKVYDEAWERIDKKVEGLSKHIKLEEERRSEDAQSKAALTDWLRAKASFVIEGLKEADKDEFCRCELKLQKWYGDLRGKPFAIEAENSILDISGFSKQYNCAFIWQKDGVKKLNLYLIINYFKGYGKLRFKKIKPEAFEANRFYTVINKKSGEIVPMEVNFNFDDPNLIILPLAFGKRQGREFIWNDLLSLETGSLKLANGRVIEKTLYNRRTRQDEPALFVALTFERREVLDSSNIKPMNLIGVDRGENIPAVIALTDPEGCPLSRFKDSLGNPTHILRIGESYKEKQRTIQAKKEVEQRRAGGYSRKYASKAKNLADDMVRNTARDLLYYAVTQDAMLIFENLSRGFGRQGKRTFMAERQYTRMEDWLTAKLAYEGLPSKTYLSKTLAQYTSKTCSNCGFTITSADYDRVLEKLKKTATGWMTTINGKELKVEGQITYYNRYKRQNVVKDLSVELDRLSEESVNNDISSWTKGRSGEALSLLKKRFSHRPVQEKFVCLNCGFETHADEQAALNIARSWLFLRSQEYKKYQTNKTTGNTDKRAFVETWQSFYRKKLKEVWKPAV

SEQ ID NO: 213 - protein, 979 aa, synthetic construct
  REGION 1..979: note = CasX variant
QEIKRINKIRRRLVKDSNTKKAGKTRGPMKTLLVRVMTPDLRERLENLRKKPENIPQPISNTSRANLNKLLTDYTEMKKAILHVYWEEFQKDPVGLMSRVAQPASKKIDQNKLKPEMDEKGNLTTAGFACSQCGQPLFVYKLEQVSEKGKAYTNYFGRCNVAEHEKLILLAQLKPEKDSDEAVTYSLGKFGQRALDFYSIHVTKESTHPVKPLAQIAGNRYASGPVGKALSDACMGTIASFLSKYQDIIIEHQKVVKGNQKRLESLRELAGKENLEYPSVTLPPQPHTKEGVDAYNEVIARVRMWVNLNLWQKLKLSRDDAKPLLRLKGFPSFPLVERQANEVDWWDMVCNVKKLINEKKEDGKVFWQNLAGYKRQEALRPYLSSEEDRKKGKKFARYQLGDLLLHLEKKHGEDWGKVYDEAWERIDKKVEGLSKHIKLEEERRSEDAQSKAALTDWLRAKASFVIEGLKEADKDEFCRCELKLQKWYGDLRGKPFAIEAENSILDISGFSKQYNCAFIWQKDGVKKLNLYLIINYFKGGKLRFKKIKPEAFEANRFYTVINKKSGEIVPMEVNFNFDDPNLIILPLAFGKRQGREFIWNDLLSLETGSLKLANGRVIEKTLYNRRTRQDEPALFVALTFERREVLDSSNIKPMNLIGVDRGENIPAVIALTDPEGCPLSRFKDSLGNPTHILRIGESYKEKQRTIQAKKEVEQRRAGGYSRKYASKAKNLADDMVRNTARDLLYYAVTQDAMLIFENLSRGFGRQGKRTFMAERQYTRMEDWLTAKLAYEGLPSKTYLSKTLAQYTSKTCSNCGFTITSADYDRVLEKLKKTATGWMTTINGKELKVEGQITYYNRYKRQNVVKDLSVELDRLSEESVNNDISSWTKGRSGEALSLLKKRFSHRPVQEKFVCLNCGFETHADEQAALNIARSWLFLRSQEYKKYQTNKTTGNTDKRAFVETWQSFYRKKLKEVWKPAV

SEQ ID NO: 214 - protein, 979 aa, synthetic construct
  REGION 1..979: note = CasX variant
QEIKRINKIRRRLVKDSNTKKAGKTRGPMKTLLVRVMTPDLRERLENLRKKPENIPQPISNTSRANLNKLLTDYTEMKKAILHVYWEEFQKDPVGLMSRVAQPASKKIDQNKLKPEMDEKGNLTTAGFACSQCGQPLFVYKLEQVSEKGKAYTNYFGRCNVAEHEKLILLAQLKPEKDSDEAVTYSLGKFGQRALDFYSIHVTKESTHPVKPLAQIAGNRYASYPVGKALSDACMGTIASFLSKYQDIIIEHQKVVKGNQKRLESLRELAGKENLEYPSVTLPPQPHTKEGVDAYNEVIARVRMWVNLNLWQKLKLSRDDAKPLLRLKGFPSFPLVERQANEVDWWDMVCNVKKLINEKKEDGKVFWQNLAGYKRQEALRPYLSSEEDRKKGKKFARYQLGDLLLHLEKKHGEDWGKVYDEAWERIDKKVEGLSKHIKLEEERRSEDAQSKAALTDWLRAKASFVIEGLKEADKDEFCRCELKLQKWYGDLRGKPFAIEAENSILDISGFSKQYNCAFIWQKDGVKKLNLYLIINYFKGGKLRFKKIKPEAFEANRFYTVINKKSGEIVPMEVNFNFDDPNLIILPLAFGKRQGREFIWNDLLSLETGSLKLANGRVIEKTLYNRRTRQDEPALFVALTFERREVLDSSNIKPMNLIGVDRGENIPAVIALTDPEGCPLSRFKDSLGNPTHILRIGESYKEKQRTIQAKKEVEQRRAGGYSRKYASKAKNLADDMVRNTARDLLYYAVTQDAMLIFENLSRGFGRQGKRTFMAERQYTRMEDWLTAKLAYEGLPSKTYLSKTLAQYTSKTCSNCGFTITSADYDRVLEKLKKTATGWMTTINGKELKVEGQITYYNRYKRQNVVKDLSVELDRLSEESVNNDISSWTKGRSGEALSLLKKRFSHRPVQEKFVCLNCGFETHADEQAALNIARSWLFLRSQEYKKYQTNKTTGNTDKRAFVETWQSFYRKKLKEVWKPAV

SEQ ID NO: 215 - protein, 978 aa, synthetic construct
  REGION 1..978: note = CasX variant
QEIKRINKIRRRLVKDSNTKKAGKTGPMKTLLVRVMTPDLRERLENLRKKPENIPQPISNTSRANLNKLLTDYTEMKKAILHVYWEEFQKDPVGLMSRVAQPASKKIDQNKLKPEMDEKGNLTTAGFACSQCGQPLFVYKLEQVSEKGKAYTNYFGRCNVAEHEKLILLAQLKPEKDSDEAVTYSLGKFGQRALDFYSIHVTKESTHPVKPLAQIAGNRYASHPVGKALSDACMGTIASFLSKYQDIIIEHQKVVKGNQKRLESLRELAGKENLEYPSVTLPPQPHTKEGVDAYNEVIARVRMWVNLNLWQKLKLSRDDAKPLLRLKGFPSFPLVERQANEVDWWDMVCNVKKLINEKKEDGKVFWQNLAGYKRQEALRPYLSSEEDRKKGKKFARYQLGDLLLHLEKKHGEDWGKVYDEAWERIDKKVEGLSKHIKLEEERRSEDAQSKAALTDWLRAKASFVIEGLKEADKDEFCRCELKLQKWYGDLRGKPFAIEAENSILDISGFSKQYNCAFIWQKDGVKKLNLYLIINYFKGGKLRFKKIKPEAFEANRFYTVINKKSGEIVPMEVNFNFDDPNLIILPLAFGKRQGREFIWNDLLSLETGSLKLANGRVIEKTLYNRRTRQDEPALFVALTFERREVLDSSNIKPMNLIGVDRGENIPAVIALTDPEGCPLSRFKDSLGNPTHILRIGESYKEKQRTIQAKKEVEQRRAGGYSRKYASKAKNLADDMVRNTARDLLYYAVTQDAMLIFENLSRGFGRQGKRTFMAERQYTRMEDWLTAKLAYEGLPSKTYLSKTLAQYTSKTCSNCGFTITSADYDRVLEKLKKTATGWMTTINGKELKVEGQITYYNRYKRQNVVKDLSVELDRLSEESVNNDISSWTKGRSGEALSLLKKRFSHRPVQEKFVCLNCGFETHADEQAALNIARSWLFLRSQEYKKYQTNKTTGNTDKRAFVETWQSFYRKKLKEVWKPAV

SEQ ID NO: 216 - protein, 978 aa, synthetic construct
  REGION 1..978: note = CasX variant
QEIKRINKIRRRLVKDSNTKKAGKTGPMKTLLVRVMTPDLRERLENLRKKPENIPQPISNTSRANLNKLLTDYTEMKKAILHVYWEEFQKDPVGLMSRVAQPASKKIDQNKLKPEMDEKGNLTTAGFACSQCGQPLFVYKLEQVSEKGKAYTNYFGRCNVAEHEKLILLAQLKPEKDSDEAVTYSLGKFGQRALDFYSIHVTKESTHPVKPLAQIAGNRYASSPVGKALSDACMGTIASFLSKYQDIIIEHQKVVKGNQKRLESLRELAGKENLEYPSVTLPPQPHTKEGVDAYNEVIARVRMWVNLNLWQKLKLSRDDAKPLLRLKGFPSFPLVERQANEVDWWDMVCNVKKLINEKKEDGKVFWQNLAGYKRQEALRPYLSSEEDRKKGKKFARYQLGDLLLHLEKKHGEDWGKVYDEAWERIDKKVEGLSKHIKLEEERRSEDAQSKAALTDWLRAKASFVIEGLKEADKDEFCRCELKLQKWYGDLRGKPFAIEAENSILDISGFSKQYNCAFIWQKDGVKKLNLYLIINYFKGGKLRFKKIKPEAFEANRFYTVINKKSGEIVPMEVNFNFDDPNLIILPLAFGKRQGREFIWNDLLSLETGSLKLANGRVIEKTLYNRRTRQDEPALFVALTFERREVLDSSNIKPMNLIGVDRGENIPAVIALTDPEGCPLSRFKDSLGNPTHILRIGESYKEKQRTIQAKKEVEQRRAGGYSRKYASKAKNLADDMVRNTARDLLYYAVTQDAMLIFENLSRGFGRQGKRTFMAERQYTRMEDWLTAKLAYEGLPSKTYLSKTLAQYTSKTCSNCGFTITSADYDRVLEKLKKTATGWMTTINGKELKVEGQITYYNRYKRQNVVKDLSVELDRLSEESVNNDISSWTKGRSGEALSLLKKRFSHRPVQEKFVCLNCGFETHADEQAALNIARSWLFLRSQEYKKYQTNKTTGNTDKRAFVETWQSFYRKKLKEVWKPAV

SEQ ID NO: 217 - protein, 978 aa, synthetic construct
  REGION 1..978: note = CasX variant
QEIKRINKIRRRLVKDSNTKKAGKTGPMKTLLVRVMTPDLRERLENLRKKPENIPQPISNTSRANLNKLLTDYTEMKKAILHVYWEEFQKDPVGLMSRVAQPASKKIDQNKLKPEMDEKGNLTTAGFACSQCGQPLFVYKLEQVSEKGKAYTNYFGRCNVAEHEKLILLAQLKPEKDSDEAVTYSLGKFGQRALDFYSIHVTKESTHPVKPLAQIAGNRYASTPVGKALSDACMGTIASFLSKYQDIIIEHQKVVKGNQKRLESLRELAGKENLEYPSVTLPPQPHTKEGVDAYNEVIARVRMWVNLNLWQKLKLSRDDAKPLLRLKGFPSFPLVERQANEVDWWDMVCNVKKLINEKKEDGKVFWQNLAGYKRQEALRPYLSSEEDRKKGKKFARYQLGDLLLHLEKKHGEDWGKVYDEAWERIDKKVEGLSKHIKLEEERRSEDAQSKAALTDWLRAKASFVIEGLKEADKDEFCRCELKLQKWYGDLRGKPFAIEAENSILDISGFSKQYNCAFIWQKDGVKKLNLYLIINYFKGGKLRFKKIKPEAFEANRFYTVINKKSGEIVPMEVNFNFDDPNLIILPLAFGKRQGREFIWNDLLSLETGSLKLANGRVIEKTLYNRRTRQDEPALFVALTFERREVLDSSNIKPMNLIGVDRGENIPAVIALTDPEGCPLSRFKDSLGNPTHILRIGESYKEKQRTIQAKKEVEQRRAGGYSRKYASKAKNLADDMVRNTARDLLYYAVTQDAMLIFENLSRGFGRQGKRTFMAERQYTRMEDWLTAKLAYEGLPSKTYLSKTLAQYTSKTCSNCGFTITSADYDRVLEKLKKTATGWMTTINGKELKVEGQITYYNRYKRQNVVKDLSVELDRLSEESVNNDISSWTKGRSGEALSLLKKRFSHRPVQEKFVCLNCGFETHADEQAALNIARSWLFLRSQEYKKYQTNKTTGNTDKRAFVETWQSFYRKKLKEVWKPAV

SEQ ID NO: 218 - protein, 978 aa, synthetic construct
  REGION 1..978: note = CasX variant
QEIKRINKIRRRLVKDSNTKKAGKTGPMKTLLVRVMTPDLRERLENLRKKPENIPQPISNTSRANLNKLLTDYTEMKKAILHVYWEEFQKDPVGLMSRVAQPASKKIDQNKLKPEMDEKGNLTTAGFACSQCGQPLFVYKLEQVSEKGKAYTNYFGRCNVAEHEKLILLAQLKPEKDSDEAVTYSLGKFGQRALDFYSIHVTKESTHPVKPLAQIAGNRYASAPVGKALSDACMGTIASFLSKYQDIIIEHQKVVKGNQKRLESLRELAGKENLEYPSVTLPPQPHTKEGVDAYNEVIARVRMWVNLNLWQKLKLSRDDAKPLLRLKGFPSFPLVERQANEVDWWDMVCNVKKLINEKKEDGKVFWQNLAGYKRQEALRPYLSSEEDRKKGKKFARYQLGDLLLHLEKKHGEDWGKVYDEAWERIDKKVEGLSKHIKLEEERRSEDAQSKAALTDWLRAKASFVIEGLKEADKDEFCRCELKLQKWYGDLRGKPFAIEAENSILDISGFSKQYNCAFIWQKDGVKKLNLYLIINYFKGGKLRFKKIKPEAFEANRFYTVINKKSGEIVPMEVNFNFDDPNLIILPLAFGKRQGREFIWNDLLSLETGSLKLANGRVIEKTLYNRRTRQDEPALFVALTFERREVLDSSNIKPMNLIGVDRGENIPAVIALTDPEGCPLSRFKDSLGNPTHILRIGESYKEKQRTIQAKKEVEQRRAGGYSRKYASKAKNLADDMVRNTARDLLYYAVTQDAMLIFENLSRGFGRQGKRTFMAERQYTRMEDWLTAKLAYEGLPSKTYLSKTLAQYTSKTCSNCGFTITSADYDRVLEKLKKTATGWMTTINGKELKVEGQITYYNRYKRQNVVKDLSVELDRLSEESVNNDISSWTKGRSGEALSLLKKRFSHRPVQEKFVCLNCGFETHADEQAALNIARSWLFLRSQEYKKYQTNKTTGNTDKRAFVETWQSFYRKKLKEVWKPAV

SEQ ID NO: 219 - protein, 978 aa, synthetic construct
  REGION 1..978: note = CasX variant
QEIKRINKIRRRLVKDSNTKKAGKTGPMKTLLVRVMTPDLRERLENLRKKPENIPQPISNTSRANLNKLLTDYTEMKKAILHVYWEEFQKDPVGLMSRVAQPASKKIDQNKLKPEMDEKGNLTTAGFACSQCGQPLFVYKLEQVSEKGKAYTNYFGRCNVAEHEKLILLAQLKPEKDSDEAVTYSLGKFGQRALDFYSIHVTKESTHPVKPLAQIAGNRYASVPVGKALSDACMGTIASFLSKYQDIIIEHQKVVKGNQKRLESLRELAGKENLEYPSVTLPPQPHTKEGVDAYNEVIARVRMWVNLNLWQKLKLSRDDAKPLLRLKGFPSFPLVERQANEVDWWDMVCNVKKLINEKKEDGKVFWQNLAGYKRQEALRPYLSSEEDRKKGKKFARYQLGDLLLHLEKKHGEDWGKVYDEAWERIDKKVEGLSKHIKLEEERRSEDAQSKAALTDWLRAKASFVIEGLKEADKDEFCRCELKLQKWYGDLRGKPFAIEAENSILDISGFSKQYNCAFIWQKDGVKKLNLYLIINYFKGGKLRFKKIKPEAFEANRFYTVINKKSGEIVPMEVNFNFDDPNLIILPLAFGKRQGREFIWNDLLSLETGSLKLANGRVIEKTLYNRRTRQDEPALFVALTFERREVLDSSNIKPMNLIGVDRGENIPAVIALTDPEGCPLSRFKDSLGNPTHILRIGESYKEKQRTIQAKKEVEQRRAGGYSRKYASKAKNLADDMVRNTARDLLYYAVTQDAMLIFENLSRGFGRQGKRTFMAERQYTRMEDWLTAKLAYEGLPSKTYLSKTLAQYTSKTCSNCGFTITSADYDRVLEKLKKTATGWMTTINGKELKVEGQITYYNRYKRQNVVKDLSVELDRLSEESVNNDISSWTKGRSGEALSLLKKRFSHRPVQEKFVCLNCGFETHADEQAALNIARSWLFLRSQEYKKYQTNKTTGNTDKRAFVETWQSFYRKKLKEVWKPAV

SEQ ID NO: 220 - protein, 978 aa, synthetic construct
  REGION 1..978: note = CasX variant
QEIKRINKIRRRLVKDSNTKKAGKTGPMKTLLVRVMTPDLRERLENLRKKPENIPQPISNTSRANLNKLLTDYTEMKKAILHVYWEEFQKDPVGLMSRVAQPASKKIDQNKLKPEMDEKGNLTTAGFACSQCGQPLFVYKLEQVSEKGKAYTNYFGRCNVAEHEKLILLAQLKPEKDSDEAVTYSLGKFGQRALDFYSIHVTKESTHPVKPLAQIAGNRYASGPVGKALSLACMGTIASFLSKYQDIIIEHQKVVKGNQKRLESLRELAGKENLEYPSVTLPPQPHTKEGVDAYNEVIARVRMWVNLNLWQKLKLSRDDAKPLLRLKGFPSFPLVERQANEVDWWDMVCNVKKLINEKKEDGKVFWQNLAGYKRQEALRPYLSSEEDRKKGKKFARYQLGDLLLHLEKKHGEDWGKVYDEAWERIDKKVEGLSKHIKLEEERRSEDAQSKAALTDWLRAKASFVIEGLKEADKDEFCRCELKLQKWYGDLRGKPFAIEAENSILDISGFSKQYNCAFIWQKDGVKKLNLYLIINYFKGGKLRFKKIKPEAFEANRFYTVINKKSGEIVPMEVNFNFDDPNLIILPLAFGKRQGREFIWNDLLSLETGSLKLANGRVIEKTLYNRRTRQDEPALFVALTFERREVLDSSNIKPMNLIGVDRGENIPAVIALTDPEGCPLSRFKDSLGNPTHILRIGESYKEKQRTIQAKKEVEQRRAGGYSRKYASKAKNLADDMVRNTARDLLYYAVTQDAMLIFENLSRGFGRQGKRTFMAERQYTRMEDWLTAKLAYEGLPSKTYLSKTLAQYTSKTCSNCGFTITSADYDRVLEKLKKTATGWMTTINGKELKVEGQITYYNRYKRQNVVKDLSVELDRLSEESVNNDISSWTKGRSGEALSLLKKRFSHRPVQEKFVCLNCGFETHADEQAALNIARSWLFLRSQEYKKYQTNKTTGNTDKRAFVETWQSFYRKKLKEVWKPAV

SEQ ID NO: 221 - protein, 978 aa, synthetic construct
  REGION 1..978: note = CasX variant
QEIKRINKIRRRLVKDSNTKKAGKTGPMKTLLVRVMTPDLRERLENLRKKPENIPQPISNTSRANLNKLLTDYTEMKKAILHVYWEEFQKDPVGLMSRVAQPASKKIDQNKLKPEMDEKGNLTTAGFACSQCGQPLFVYKLEQVSEKGKAYTNYFGRCNVAEHEKLILLAQLKPEKDSDEAVTYSLGKFGQRALDFYSIHVTKESTHPVKPLAQIAGNRYASGPVGKALSNACMGTIASFLSKYQDIIIEHQKVVKGNQKRLESLRELAGKENLEYPSVTLPPQPHTKEGVDAYNEVIARVRMWVNLNLWQKLKLSRDDAKPLLRLKGFPSFPLVERQANEVDWWDMVCNVKKLINEKKEDGKVFWQNLAGYKRQEALRPYLSSEEDRKKGKKFARYQLGDLLLHLEKKHGEDWGKVYDEAWERIDKKVEGLSKHIKLEEERRSEDAQSKAALTDWLRAKASFVIEGLKEADKDEFCRCELKLQKWYGDLRGKPFAIEAENSILDISGFSKQYNCAFIWQKDGVKKLNLYLIINYFKGGKLRFKKIKPEAFEANRFYTVINKKSGEIVPMEVNFNFDDPNLIILPLAFGKRQGREFIWNDLLSLETGSLKLANGRVIEKTLYNRRTRQDEPALFVALTFERREVLDSSNIKPMNLIGVDRGENIPAVIALTDPEGCPLSRFKDSLGNPTHILRIGESYKEKQRTIQAKKEVEQRRAGGYSRKYASKAKNLADDMVRNTARDLLYYAVTQDAMLIFENLSRGFGRQGKRTFMAERQYTRMEDWLTAKLAYEGLPSKTYLSKTLAQYTSKTCSNCGFTITSADYDRVLEKLKKTATGWMTTINGKELKVEGQITYYNRYKRQNVVKDLSVELDRLSEESVNNDISSWTKGRSGEALSLLKKRFSHRPVQEKFVCLNCGFETHADEQAALNIARSWLFLRSQEYKKYQTNKTTGNTDKRAFVETWQSFYRKKLKEVWKPAV

SEQ ID NO: 222 - protein, 978 aa, synthetic construct
  REGION 1..978: note = CasX variant
QEIKRINKIRRRLVKDSNTKKAGKTGPMKTLLVRVMTPDLRERLENLRKKPENIPQPISNTSRANLNKLLTDYTEMKKAILHVYWEEFQKDPVGLMSRVAQPASKKIDQNKLKPEMDEKGNLTTAGFACSQCGQPLFVYKLEQVSEKGKAYTNYFGRCNVAEHEKLILLAQLKPEKDSDEAVTYSLGKFGQRALDFYSIHVTKESTHPVKPLAQIAGNRYASGPVGKALSQACMGTIASFLSKYQDIIIEHQKVVKGNQKRLESLRELAGKENLEYPSVTLPPQPHTKEGVDAYNEVIARVRMWVNLNLWQKLKLSRDDAKPLLRLKGFPSFPLVERQANEVDWWDMVCNVKKLINEKKEDGKVFWQNLAGYKRQEALRPYLSSEEDRKKGKKFARYQLGDLLLHLEKKHGEDWGKVYDEAWERIDKKVEGLSKHIKLEEERRSEDAQSKAALTDWLRAKASFVIEGLKEADKDEFCRCELKLQKWYGDLRGKPFAIEAENSILDISGFSKQYNCAFIWQKDGVKKLNLYLIINYFKGGKLRFKKIKPEAFEANRFYTVINKKSGEIVPMEVNFNFDDPNLIILPLAFGKRQGREFIWNDLLSLETGSLKLANGRVIEKTLYNRRTRQDEPALFVALTFERREVLDSSNIKPMNLIGVDRGENIPAVIALTDPEGCPLSRFKDSLGNPTHILRIGESYKEKQRTIQAKKEVEQRRAGGYSRKYASKAKNLADDMVRNTARDLLYYAVTQDAMLIFENLSRGFGRQGKRTFMAERQYTRMEDWLTAKLAYEGLPSKTYLSKTLAQYTSKTCSNCGFTITSADYDRVLEKLKKTATGWMTTINGKELKVEGQITYYNRYKRQNVVKDLSVELDRLSEESVNNDISSWTKGRSGEALSLLKKRFSHRPVQEKFVCLNCGFETHADEQAALNIARSWLFLRSQEYKKYQTNKTTGNTDKRAFVETWQSFYRKKLKEVWKPAV

SEQ ID NO: 223 - protein, 978 aa, synthetic construct
  REGION 1..978: note = CasX variant
QEIKRINKIRRRLVKDSNTKKAGKTGPMKTLLVRVMTPDLRERLENLRKKPENIPQPISNTSRANLNKLLTDYTEMKKAILHVYWEEFQKDPVGLMSRVAQPASKKIDQNKLKPEMDEKGNLTTAGFACSQCGQPLFVYKLEQVSEKGKAYTNYFGRCNVAEHEKLILLAQLKPEKDSDEAVTYSLGKFGQRALDFYSIHVTKESTHPVKPLAQIAGNRYASGPVGKALSSACMGTIASFLSKYQDIIIEHQKVVKGNQKRLESLRELAGKENLEYPSVTLPPQPHTKEGVDAYNEVIARVRMWVNLNLWQKLKLSRDDAKPLLRLKGFPSFPLVERQANEVDWWDMVCNVKKLINEKKEDGKVFWQNLAGYKRQEALRPYLSSEEDRKKGKKFARYQLGDLLLHLEKKHGEDWGKVYDEAWERIDKKVEGLSKHIKLEEERRSEDAQSKAALTDWLRAKASFVIEGLKEADKDEFCRCELKLQKWYGDLRGKPFAIEAENSILDISGFSKQYNCAFIWQKDGVKKLNLYLIINYFKGGKLRFKKIKPEAFEANRFYTVINKKSGEIVPMEVNFNFDDPNLIILPLAFGKRQGREFIWNDLLSLETGSLKLANGRVIEKTLYNRRTRQDEPALFVALTFERREVLDSSNIKPMNLIGVDRGENIPAVIALTDPEGCPLSRFKDSLGNPTHILRIGESYKEKQRTIQAKKEVEQRRAGGYSRKYASKAKNLADDMVRNTARDLLYYAVTQDAMLIFENLSRGFGRQGKRTFMAERQYTRMEDWLTAKLAYEGLPSKTYLSKTLAQYTSKTCSNCGFTITSADYDRVLEKLKKTATGWMTTINGKELKVEGQITYYNRYKRQNVVKDLSVELDRLSEESVNNDISSWTKGRSGEALSLLKKRFSHRPVQEKFVCLNCGFETHADEQAALNIARSWLFLRSQEYKKYQTNKTTGNTDKRAFVETWQSFYRKKLKEVWKPAV

SEQ ID NO: 224 - protein, 978 aa, synthetic construct
  REGION 1..978: note = CasX variant
QEIKRINKIRRRLVKDSNTKKAGKTGPMKTLLVRVMTPDLRERLENLRKKPENIPQPISNTSRANLNKLLTDYTEMKKAILHVYWEEFQKDPVGLMSRVAQPASKKIDQNKLKPEMDEKGNLTTAGFACSQCGQPLFVYKLEQVSEKGKAYTNYFGRCNVAEHEKLILLAQLKPEKDSDEAVTYSLGKFGQRALDFYSIHVTKESTHPVKPLAQIAGNRYASGPVGKALSAACMGTIASFLSKYQDIIIEHQKVVKGNQKRLESLRELAGKENLEYPSVTLPPQPHTKEGVDAYNEVIARVRMWVNLNLWQKLKLSRDDAKPLLRLKGFPSFPLVERQANEVDWWDMVCNVKKLINEKKEDGKVFWQNLAGYKRQEALRPYLSSEEDRKKGKKFARYQLGDLLLHLEKKHGEDWGKVYDEAWERIDKKVEGLSKHIKLEEERRSEDAQSKAALTDWLRAKASFVIEGLKEADKDEFCRCELKLQKWYGDLRGKPFAIEAENSILDISGFSKQYNCAFIWQKDGVKKLNLYLIINYFKGGKLRFKKIKPEAFEANRFYTVINKKSGEIVPMEVNFNFDDPNLIILPLAFGKRQGREFIWNDLLSLETGSLKLANGRVIEKTLYNRRTRQDEPALFVALTFERREVLDSSNIKPMNLIGVDRGENIPAVIALTDPEGCPLSRFKDSLGNPTHILRIGESYKEKQRTIQAKKEVEQRRAGGYSRKYASKAKNLADDMVRNTARDLLYYAVTQDAMLIFENLSRGFGRQGKRTFMAERQYTRMEDWLTAKLAYEGLPSKTYLSKTLAQYTSKTCSNCGFTITSADYDRVLEKLKKTATGWMTTINGKELKVEGQITYYNRYKRQNVVKDLSVELDRLSEESVNNDISSWTKGRSGEALSLLKKRFSHRPVQEKFVCLNCGFETHADEQAALNIARSWLFLRSQEYKKYQTNKTTGNTDKRAFVETWQSFYRKKLKEVWKPAV

SEQ ID NO: 225 - protein, 978 aa, synthetic construct
  REGION 1..978: note = CasX variant
QEIKRINKIRRRLVKDSNTKKAGKTGPMKTLLVRVMTPDLRERLENLRKKPENIPQPISNTSRANLNKLLTDYTEMKKAILHVYWEEFQKDPVGLMSRVAQPASKKIDQNKLKPEMDEKGNLTTAGFACSQCGQPLFVYKLEQVSEKGKAYTNYFGRCNVAEHEKLILLAQLKPEKDSDEAVTYSLGKFGQRALDFYSIHVTKESTHPVKPLAQIAGNRYASGPVGKALSGACMGTIASFLSKYQDIIIEHQKVVKGNQKRLESLRELAGKENLEYPSVTLPPQPHTKEGVDAYNEVIARVRMWVNLNLWQKLKLSRDDAKPLLRLKGFPSFPLVERQANEVDWWDMVCNVKKLINEKKEDGKVFWQNLAGYKRQEALRPYLSSEEDRKKGKKFARYQLGDLLLHLEKKHGEDWGKVYDEAWERIDKKVEGLSKHIKLEEERRSEDAQSKAALTDWLRAKASFVIEGLKEADKDEFCRCELKLQKWYGDLRGKPFAIEAENSILDISGFSKQYNCAFIWQKDGVKKLNLYLIINYFKGGKLRFKKIKPEAFEANRFYTVINKKSGEIVPMEVNFNFDDPNLIILPLAFGKRQGREFIWNDLLSLETGSLKLANGRVIEKTLYNRRTRQDEPALFVALTFERREVLDSSNIKPMNLIGVDRGENIPAVIALTDPEGCPLSRFKDSLGNPTHILRIGESYKEKQRTIQAKKEVEQRRAGGYSRKYASKAKNLADDMVRNTARDLLYYAVTQDAMLIFENLSRGFGRQGKRTFMAERQYTRMEDWLTAKLAYEGLPSKTYLSKTLAQYTSKTCSNCGFTITSADYDRVLEKLKKTATGWMTTINGKELKVEGQITYYNRYKRQNVVKDLSVELDRLSEESVNNDISSWTKGRSGEALSLLKKRFSHRPVQEKFVCLNCGFETHADEQAALNIARSWLFLRSQEYKKYQTNKTTGNTDKRAFVETWQSFYRKKLKEVWKPAV

SEQ ID NO: 226 - protein, 978 aa, synthetic construct
  REGION 1..978: note = CasX variant
QEIKRINKIRRRLVKDSNTKKAGKTGPMKTLLVRVMTPDLRERLENLRKKPENIPQPISNTSRANLNKLLTDYTEMKKAILHVYWEEFQKDPVGLMSRVAQPASKKIDQNKLKPEMDEKGNLTTAGFACSQCGQPLFVYKLEQVSEKGKAYTNYFGRCNVAEHEKLILLAQLKPEKDSDEAVTYSLGKFGQRALDFYSIHVTKESTHPVKPLAQIAGNRYASGPVGKALSTACMGTIASFLSKYQDIIIEHQKVVKGNQKRLESLRELAGKENLEYPSVTLPPQPHTKEGVDAYNEVIARVRMWVNLNLWQKLKLSRDDAKPLLRLKGFPSFPLVERQANEVDWWDMVCNVKKLINEKKEDGKVFWQNLAGYKRQEALRPYLSSEEDRKKGKKFARYQLGDLLLHLEKKHGEDWGKVYDEAWERIDKKVEGLSKHIKLEEERRSEDAQSKAALTDWLRAKASFVIEGLKEADKDEFCRCELKLQKWYGDLRGKPFAIEAENSILDISGFSKQYNCAFIWQKDGVKKLNLYLIINYFKGGKLRFKKIKPEAFEANRFYTVINKKSGEIVPMEVNFNFDDPNLIILPLAFGKRQGREFIWNDLLSLETGSLKLANGRVIEKTLYNRRTRQDEPALFVALTFERREVLDSSNIKPMNLIGVDRGENIPAVIALTDPEGCPLSRFKDSLGNPTHILRIGESYKEKQRTIQAKKEVEQRRAGGYSRKYASKAKNLADDMVRNTARDLLYYAVTQDAMLIFENLSRGFGRQGKRTFMAERQYTRMEDWLTAKLAYEGLPSKTYLSKTLAQYTSKTCSNCGFTITSADYDRVLEKLKKTATGWMTTINGKELKVEGQITYYNRYKRQNVVKDLSVELDRLSEESVNNDISSWTKGRSGEALSLLKKRFSHRPVQEKFVCLNCGFETHADEQAALNIARSWLFLRSQEYKKYQTNKTTGNTDKRAFVETWQSFYRKKLKEVWKPAV

SEQ ID NO: 227 - protein, 978 aa, synthetic construct
  REGION 1..978: note = CasX variant
QEIKRINKIRRRLVKDSNTKKAGKRGPMKTLLVRVMTPDLRERLENLRKKPENIPQPISNTSRANLNKLLTDYTEMKKAILHVYWEEFQKDPVGLMSRVAQPASKKIDQNKLKPEMDEKGNLTTAGFACSQCGQPLFVYKLEQVSEKGKAYTNYFGRCNVAEHEKLILLAQLKPEKDSDEAVTYSLGKFGQRALDFYSIHVTKESTHPVKPLAQIAGNRYASGPVGKALSDACMGTIASFLSKYQDIIIEHQKVVKGNQKRLESLRELAGKENLEYPSVTLPPQPHTKEGVDAYNEVIARVRMWVNLNLWQKLKLSRDDAKPLLRLKGFPSFPLVERQANEVDWWDMVCNVKKLINEKKEDGKVFWQNLAGYKRQEALRPYLSSEEDRKKGKKFARYQLGDLLLHLEKKHGEDWGKVYDEAWERIDKKVEGLSKHIKLEEERRSEDAQSKAALTDWLRAKASFVIEGLKEADKDEFCRCELKLQKWYGDLRGKPFAIEAENSILDISGFSKQYNCAFIWQKDGVKKLNLYLIINYFKGGKLRFKKIKPEAFEANRFYTVINKKSGEIVPMEVNFNFDDPNLIILPLAFGKRQGREFIWNDLLSLETGSLKLANGRVIEKTLYNRRTRQDEPALFVALTFERREVLDSSNIKPMNLIGVDRGENIPAVIALTDPEGCPLSRFKDSLGNPTHILRIGESYKEKQRTIQAKKEVEQRRAGGYSRKYASKAKNLADDMVRNTARDLLYYAVTQDAMLIFENLSRGFGRQGKRTFMAERQYTRMEDWLTAKLAYEGLPSKTYLSKTLAQYTSKTCSNCGFTITSADYDRVLEKLKKTATGWMTTINGKELKVEGQITYYNRYKRQNVVKDLSVELDRLSEESVNNDISSWTKGRSGEALSLLKKRFSHRPVQEKFVCLNCGFETHADEQAALNIARSWLFLRSQEYKKYQTNKTTGNTDKRAFVETWQSFYRKKLKEVWKPAV

SEQ ID NO: 228 - protein, 978 aa, synthetic construct
  REGION 1..978: note = CasX variant
QEIKRINKIRRRLVKDSNTKKAGKTGPMKTLLVRVMTPDLRERLENLRKKPENIPQPISNTSRANLNKLLTDYTEMKKAILHVYWEEFQKDPVGLMSRVAQPASKKIDQNKLKPEMDEKGNLTTAGFACSQCGQPLFVYKLEQVSEKGKAYTNYFGRCNVAEHEKLILLAQLKPEKDSDEAVTYSLGKFGQRALDFYSIHVTKESTHPVKPLAQIAGNRYASGPVGKALSDACMGTIASFLSKYQDIIIEHQKVVKGNQKRLESLRELAGKENLEYPSVTLPPQPHTKEGVDAYNEVIARVRMWVNLNLWQKLKLSRDDAKPLLRLKGFPSFPLVERQANEVDWWDMVCNVKKLINEKKEDGKVFWQNLAGYKRQEALRPYLSSEEDRKKGKKFARYQLHDLLLHLEKKHGEDWGKVYDEAWERIDKKVEGLSKHIKLEEERRSEDAQSKAALTDWLRAKASFVIEGLKEADKDEFCRCELKLQKWYGDLRGKPFAIEAENSILDISGFSKQYNCAFIWQKDGVKKLNLYLIINYFKGGKLRFKKIKPEAFEANRFYTVINKKSGEIVPMEVNFNFDDPNLIILPLAFGKRQGREFIWNDLLSLETGSLKLANGRVIEKTLYNRRTRQDEPALFVALTFERREVLDSSNIKPMNLIGVDRGENIPAVIALTDPEGCPLSRFKDSLGNPTHILRIGESYKEKQRTIQAKKEVEQRRAGGYSRKYASKAKNLADDMVRNTARDLLYYAVTQDAMLIFENLSRGFGRQGKRTFMAERQYTRMEDWLTAKLAYEGLPSKTYLSKTLAQYTSKTCSNCGFTITSADYDRVLEKLKKTATGWMTTINGKELKVEGQITYYNRYKRQNVVKDLSVELDRLSEESVNNDISSWTKGRSGEALSLLKKRFSHRPVQEKFVCLNCGFETHADEQAALNIARSWLFLRSQEYKKYQTNKTTGNTDKRAFVETWQSFYRKKLKEVWKPAV

SEQ ID NO: 229 - protein, 979 aa, synthetic construct
  REGION 1..979: note = CasX variant
QEIKRINKIRRRLVKDSNTKKAGKTGPMKTLLVRVMTPDLRERLENLRKKPENIPQPISNTSRANLNKLLTDYTEMKKAILHVYWEEFQKDPVGLMSRVAQPASKKIDQNKLKPEMDEKEGNLTTAGFACSQCGQPLFVYKLEQVSEKGKAYTNYFGRCNVAEHEKLILLAQLKPEKDSDEAVTYSLGKFGQRALDFYSIHVTKESTHPVKPLAQIAGNRYASGPVGKALSDACMGTIASFLSKYQDIIIEHQKVVKGNQKRLESLRELAGKENLEYPSVTLPPQPHTKEGVDAYNEVIARVRMWVNLNLWQKLKLSRDDAKPLLRLKGFPSFPLVERQANEVDWWDMVCNVKKLINEKKEDGKVFWQNLAGYKRQEALRPYLSSEEDRKKGKKFARYQLGDLLLHLEKKHGEDWGKVYDEAWERIDKKVEGLSKHIKLEEERRSEDAQSKAALTDWLRAKASFVIEGLKEADKDEFCRCELKLQKWYGDLRGKPFAIEAENSILDISGFSKQYNCAFIWQKDGVKKLNLYLIINYFKGGKLRFKKIKPEAFEANRFYTVINKKSGEIVPMEVNFNFDDPNLIILPLAFGKRQGREFIWNDLLSLETGSLKLANGRVIEKTLYNRRTRQDEPALFVALTFERREVLDSSNIKPMNLIGVDRGENIPAVIALTDPEGCPLSRFKDSLGNPTHILRIGESYKEKQRTIQAKKEVEQRRAGGYSRKYASKAKNLADDMVRNTARDLLYYAVTQDAMLIFENLSRGFGRQGKRTFMAERQYTRMEDWLTAKLAYEGLPSKTYLSKTLAQYTSKTCSNCGFTITSADYDRVLEKLKKTATGWMTTINGKELKVEGQITYYNRYKRQNVVKDLSVELDRLSEESVNNDISSWTKGRSGEALSLLKKRFSHRPVQEKFVCLNCGFETHADEQAALNIARSWLFLRSQEYKKYQTNKTTGNTDKRAFVETWQSFYRKKLKEVWKPAV

SEQ ID NO: 230 - protein, 978 aa, synthetic construct
  REGION 1..978: note = CasX variant
QEIKRINKIRRRLVKDSNTKKAGKTGPMKTLLVRVMTPDLRERLENLRKKPENIPQPISNTSRANLNKLLTDYTEMKKAILHVYWEEFQKDPVGLMSRVAQPASKKIDQNKLKPEMDEKGNLTTAGFACSQCGQPLFVYKLEQVSEKGKAYTNYFGRCNVAEHEKLILLAQLKPEKDSDEAVTYSLGKFGQRALDFYSIHVTKESTHPVKPLAQIAGNRYASGPVGKALSDACMGTIASFLSKYQDIIIEHQKVVKGNQKRLESLRELAGKENLEYPSVTLPPQPHTKEGVDAYNEVIARVRMWVNINLWQKLKLSRDDAKPLLRLKGFPSFPLVERQANEVDWWDMVCNVKKLINEKKEDGKVFWQNLAGYKRQEALRPYLSSEEDRKKGKKFARYQLGDLLLHLEKKHGEDWGKVYDEAWERIDKKVEGLSKHIKLEEERRSEDAQSKAALTDWLRAKASFVIEGLKEADKDEFCRCELKLQKWYGDLRGKPFAIEAENSILDISGFSKQYNCAFIWQKDGVKKLNLYLIINYFKGGKLRFKKIKPEAFEANRFYTVINKKSGEIVPMEVNFNFDDPNLIILPLAFGKRQGREFIWNDLLSLETGSLKLANGRVIEKTLYNRRTRQDEPALFVALTFERREVLDSSNIKPMNLIGVDRGENIPAVIALTDPEGCPLSRFKDSLGNPTHILRIGESYKEKQRTIQAKKEVEQRRAGGYSRKYASKAKNLADDMVRNTARDLLYYAVTQDAMLIFENLSRGFGRQGKRTFMAERQYTRMEDWLTAKLAYEGLPSKTYLSKTLAQYTSKTCSNCGFTITSADYDRVLEKLKKTATGWMTTINGKELKVEGQITYYNRYKRQNVVKDLSVELDRLSEESVNNDISSWTKGRSGEALSLLKKRFSHRPVQEKFVCLNCGFETHADEQAALNIARSWLFLRSQEYKKYQTNKTTGNTDKRAFVETWQSFYRKKLKEVWKPAV

SEQ ID NO: 231 - protein, 979 aa, synthetic construct
  REGION 1..979: note = CasX variant
QEIKRINKIRRRLVKDSNTKKAGKTGPMKTLLVRVMTPDLRERLENLRKKPENIPQPISNTSRANLNKLLTDYTEMKKAILHVYWEEFQKDPVGLMSRVAQPASKKIDQNKLKPEMDEKGNLTTAGFACSQCGQPLFVYKLEQVSEKGKAYTNYFGRCNVAEHEKLILLAQLKPEKDSDEAVTYSLGKFGQRALDFYSIHVTKESTHPVKPLAQIAGNRYASGPVGKALSDACMGTIASFLSKYQDIIIEHQKVVKGNQKRLESLRELAGKENLEYPSVTLPPQPHTKEGVDAYNEVIARVRMWVNLNLWQKLKLSRDDAKPLLRLKGFPSFPLVERQANEVDWWDMVCNVKKLINEKKEDGKVFWQNLAGYKRQEALRPYLFSSEEDRKKGKKFARYQLGDLLLHLEKKHGEDWGKVYDEAWERIDKKVEGLSKHIKLEEERRSEDAQSKAALTDWLRAKASFVIEGLKEADKDEFCRCELKLQKWYGDLRGKPFAIEAENSILDISGFSKQYNCAFIWQKDGVKKLNLYLIINYFKGGKLRFKKIKPEAFEANRFYTVINKKSGEIVPMEVNFNFDDPNLIILPLAFGKRQGREFIWNDLLSLETGSLKLANGRVIEKTLYNRRTRQDEPALFVALTFERREVLDSSNIKPMNLIGVDRGENIPAVIALTDPEGCPLSRFKDSLGNPTHILRIGESYKEKQRTIQAKKEVEQRRAGGYSRKYASKAKNLADDMVRNTARDLLYYAVTQDAMLIFENLSRGFGRQGKRTFMAERQYTRMEDWLTAKLAYEGLPSKTYLSKTLAQYTSKTCSNCGFTITSADYDRVLEKLKKTATGWMTTINGKELKVEGQITYYNRYKRQNVVKDLSVELDRLSEESVNNDISSWTKGRSGEALSLLKKRFSHRPVQEKFVCLNCGFETHADEQAALNIARSWLFLRSQEYKKYQTNKTTGNTDKRAFVETWQSFYRKKLKEVWKPAV

SEQ ID NO: 232 - protein, 979 aa, synthetic construct
  REGION 1..979: note = CasX variant
QEIKRINKIRRRLVKDSNTKKAGKTGPMKTLLVRVMTPDLRERLENLRKKPENIPQPISNTSRANLNKLLTDYTEMKKAILHVYWEEFQKDPVGLMSRVAQPASKKIDQNKLKPEMDEKGNLTTAGFACSQCGQPLFVYKWLEQVSEKGKAYTNYFGRCNVAEHEKLILLAQLKPEKDSDEAVTYSLGKFGQRALDFYSIHVTKESTHPVKPLAQIAGNRYASGPVGKALSDACMGTIASFLSKYQDIIIEHQKVVKGNQKRLESLRELAGKENLEYPSVTLPPQPHTKEGVDAYNEVIARVRMWVNLNLWQKLKLSRDDAKPLLRLKGFPSFPLVERQANEVDWWDMVCNVKKLINEKKEDGKVFWQNLAGYKRQEALRPYLSSEEDRKKGKKFARYQLGDLLLHLEKKHGEDWGKVYDEAWERIDKKVEGLSKHIKLEEERRSEDAQSKAALTDWLRAKASFVIEGLKEADKDEFCRCELKLQKWYGDLRGKPFAIEAENSILDISGFSKQYNCAFIWQKDGVKKLNLYLIINYFKGGKLRFKKIKPEAFEANRFYTVINKKSGEIVPMEVNFNFDDPNLIILPLAFGKRQGREFIWNDLLSLETGSLKLANGRVIEKTLYNRRTRQDEPALFVALTFERREVLDSSNIKPMNLIGVDRGENIPAVIALTDPEGCPLSRFKDSLGNPTHILRIGESYKEKQRTIQAKKEVEQRRAGGYSRKYASKAKNLADDMVRNTARDLLYYAVTQDAMLIFENLSRGFGRQGKRTFMAERQYTRMEDWLTAKLAYEGLPSKTYLSKTLAQYTSKTCSNCGFTITSADYDRVLEKLKKTATGWMTTINGKELKVEGQITYYNRYKRQNVVKDLSVELDRLSEESVNNDISSWTKGRSGEALSLLKKRFSHRPVQEKFVCLNCGFETHADEQAALNIARSWLFLRSQEYKKYQTNKTTGNTDKRAFVETWQSFYRKKLKEVWKPAV

SEQ ID NO: 233 - protein, 978 aa, synthetic construct
  REGION 1..978: note = CasX variant
QEIKRINKIRRRLVKDSNTKKAGKTGPMKTLLVRVMTPDLRERLENLRKKPENIPQPISNTSRANLNKLLTDYTEMKKAILHVYWEEFQKDPVGLMSRVAQPASKKIDQNKLKPEMDEKGNLTTAGFACSQCGQPLFVYKLEQVSEKGKAYTNYFGRCNVAEHEKLILLAQLKPEKDSDEAVTYSLGKFGQRALDFYSIHVTKESTHPVKPLAQIAGNRYASGPVGKALSDACMGTIASFLSKYQDIIIEHQKVVKGNQKRLESLRELAGKENLEYPSVTLPPQPHTKEGVDAYNEVIARVRMWVNDNLWQKLKLSRDDAKPLLRLKGFPSFPLVERQANEVDWWDMVCNVKKLINEKKEDGKVFWQNLAGYKRQEALRPYLSSEEDRKKGKKFARYQLGDLLLHLEKKHGEDWGKVYDEAWERIDKKVEGLSKHIKLEEERRSEDAQSKAALTDWLRAKASFVIEGLKEADKDEFCRCELKLQKWYGDLRGKPFAIEAENSILDISGFSKQYNCAFIWQKDGVKKLNLYLIINYFKGGKLRFKKIKPEAFEANRFYTVINKKSGEIVPMEVNFNFDDPNLIILPLAFGKRQGREFIWNDLLSLETGSLKLANGRVIEKTLYNRRTRQDEPALFVALTFERREVLDSSNIKPMNLIGVDRGENIPAVIALTDPEGCPLSRFKDSLGNPTHILRIGESYKEKQRTIQAKKEVEQRRAGGYSRKYASKAKNLADDMVRNTARDLLYYAVTQDAMLIFENLSRGFGRQGKRTFMAERQYTRMEDWLTAKLAYEGLPSKTYLSKTLAQYTSKTCSNCGFTITSADYDRVLEKLKKTATGWMTTINGKELKVEGQITYYNRYKRQNVVKDLSVELDRLSEESVNNDISSWTKGRSGEALSLLKKRFSHRPVQEKFVCLNCGFETHADEQAALNIARSWLFLRSQEYKKYQTNKTTGNTDKRAFVETWQSFYRKKLKEVWKPAV

SEQ ID NO: 234 - protein, 978 aa, synthetic construct
  REGION 1..978: note = CasX variant
QEIKRINKIRRRLVKDSNTKKAGKTGPMKTLLVRVMTPDLRERLENLRKKPENIPQPISNTSRANLNKLLTDYTEMKKAILHVYWEEFQKDPVGLMSRVAQPASKKIDQNKLKPEMDEKGNLTTAGFACSQCGQPLFVYKLEQVSEKGKAYTNYFGRCNVAEHEKLILLAQLKPEKDSDEAVTYSLGKFGQRALDFYSIHVTKESTHPVKPLAQIAGNRYASGPVGKALSDACMGTIASFLSKYQDIIIEHQKVVKGNQKRLESLRELAGKENLEYPSVTLPPQPHTKEGVDAYNEVIARVRMWVNLNLWQKLKLSRDDAKPLLRLKGFPSFPLVERQANEVDWWDMVCNVKKLINEKKEDGKVFWQNLAGYKRQEALRPYLSSEEDRKKGKKFARYQLGDLLLHLEKKHGEDWGKVYDEAWERIDKKVEGLSKHIKLEEERRSEDAQSKAALTDWLRAKASFVIEGLKEADKDEFCRCELKLQKWYGDLRGKPFAIEAENSILDISGFSTQYNCAFIWQKDGVKKLNLYLIINYFKGGKLRFKKIKPEAFEANRFYTVINKKSGEIVPMEVNFNFDDPNLIILPLAFGKRQGREFIWNDLLSLETGSLKLANGRVIEKTLYNRRTRQDEPALFVALTFERREVLDSSNIKPMNLIGVDRGENIPAVIALTDPEGCPLSRFKDSLGNPTHILRIGESYKEKQRTIQAKKEVEQRRAGGYSRKYASKAKNLADDMVRNTARDLLYYAVTQDAMLIFENLSRGFGRQGKRTFMAERQYTRMEDWLTAKLAYEGLPSKTYLSKTLAQYTSKTCSNCGFTITSADYDRVLEKLKKTATGWMTTINGKELKVEGQITYYNRYKRQNVVKDLSVELDRLSEESVNNDISSWTKGRSGEALSLLKKRFSHRPVQEKFVCLNCGFETHADEQAALNIARSWLFLRSQEYKKYQTNKTTGNTDKRAFVETWQSFYRKKLKEVWKPAV

SEQ ID NO: 235 - protein, 978 aa, synthetic construct
  REGION 1..978: note = CasX variant
QEIKRINKIRRRLVKDSNTKKAGKTGPMKTLLVRVMTPDLRERLENLRKKPENIPQPISNTSRANLNKLLTDYTEMKKAILHVYWEEFQKDPVGLMSRVAQPASKKIDQNKLKPEMDEKGNLTTAGFACSQCGQPLFVYKLEQVSEKGKAYTNYFGRCNVAEHEKLILLDQLKPEKDSDEAVTYSLGKFGQRALDFYSIHVTKESTHPVKPLAQIAGNRYASGPVGKALSDACMGTIASFLSKYQDIIIEHQKVVKGNQKRLESLRELAGKENLEYPSVTLPPQPHTKEGVDAYNEVIARVRMWVNLNLWQKLKLSRDDAKPLLRLKGFPSFPLVERQANEVDWWDMVCNVKKLINEKKEDGKVFWQNLAGYKRQEALRPYLSSEEDRKKGKKFARYQLGDLLLHLEKKHGEDWGKVYDEAWERIDKKVEGLSKHIKLEEERRSEDAQSKAALTDWLRAKASFVIEGLKEADKDEFCRCELKLQKWYGDLRGKPFAIEAENSILDISGFSKQYNCAFIWQKDGVKKLNLYLIINYFKGGKLRFKKIKPEAFEANRFYTVINKKSGEIVPMEVNFNFDDPNLIILPLAFGKRQGREFIWNDLLSLETGSLKLANGRVIEKTLYNRRTRQDEPALFVALTFERREVLDSSNIKPMNLIGVDRGENIPAVIALTDPEGCPLSRFKDSLGNPTHILRIGESYKEKQRTIQAKKEVEQRRAGGYSRKYASKAKNLADDMVRNTARDLLYYAVTQDAMLIFENLSRGFGRQGKRTFMAERQYTRMEDWLTAKLAYEGLPSKTYLSKTLAQYTSKTCSNCGFTITSADYDRVLEKLKKTATGWMTTINGKELKVEGQITYYNRYKRQNVVKDLSVELDRLSEESVNNDISSWTKGRSGEALSLLKKRFSHRPVQEKFVCLNCGFETHADEQAALNIARSWLFLRSQEYKKYQTNKTTGNTDKRAFVETWQSFYRKKLKEVWKPAV

SEQ ID NO: 236 - protein, 978 aa, synthetic construct
  REGION 1..978: note = CasX variant
QEIKRINKIRRRLVKDSNTKKAGKTGPMKTLLVRVMTPDLRERLENLRKKPENIPQPISNTSRANLNKLLTDYTEMKKAILHVYWEEFQKDPVGLMSRVAQPASKKIDQNKLKPEMDEKGNLTTAGFACSQCGQPLFVYKLEQVSEKGKAYTNYFGRCNVAEHEKLIPLAQLKPEKDSDEAVTYSLGKFGQRALDFYSIHVTKESTHPVKPLAQIAGNRYASGPVGKALSDACMGTIASFLSKYQDIIIEHQKVVKGNQKRLESLRELAGKENLEYPSVTLPPQPHTKEGVDAYNEVIARVRMWVNLNLWQKLKLSRDDAKPLLRLKGFPSFPLVERQANEVDWWDMVCNVKKLINEKKEDGKVFWQNLAGYKRQEALRPYLSSEEDRKKGKKFARYQLGDLLLHLEKKHGEDWGKVYDEAWERIDKKVEGLSKHIKLEEERRSEDAQSKAALTDWLRAKASFVIEGLKEADKDEFCRCELKLQKWYGDLRGKPFAIEAENSILDISGFSKQYNCAFIWQKDGVKKLNLYLIINYFKGGKLRFKKIKPEAFEANRFYTVINKKSGEIVPMEVNFNFDDPNLIILPLAFGKRQGREFIWNDLLSLETGSLKLANGRVIEKTLYNRRTRQDEPALFVALTFERREVLDSSNIKPMNLIGVDRGENIPAVIALTDPEGCPLSRFKDSLGNPTHILRIGESYKEKQRTIQAKKEVEQRRAGGYSRKYASKAKNLADDMVRNTARDLLYYAVTQDAMLIFENLSRGFGRQGKRTFMAERQYTRMEDWLTAKLAYEGLPSKTYLSKTLAQYTSKTCSNCGFTITSADYDRVLEKLKKTATGWMTTINGKELKVEGQITYYNRYKRQNVVKDLSVELDRLSEESVNNDISSWTKGRSGEALSLLKKRFSHRPVQEKFVCLNCGFETHADEQAALNIARSWLFLRSQEYKKYQTNKTTGNTDKRAFVETWQSFYRKKLKEVWKPAV

SEQ ID NO: 237 - protein, 978 aa, synthetic construct
  REGION 1..978: note = CasX variant
QEIKRINKIRRRLVKDSNTKKAGKTGPMKTLLVRVMTPDLRERLENLRKKPENIPQPISNTSRANLNKLLTDYTEMKKAILHVYWEEFQKDPVGLMSRVAQPASKKIDQNKLKPEMDEKGNLTTAGFACSQCGQPLFVYKLEQVSEKGKAYTNYFGRCNVAEHEKLILLAQLKPEKDSDEAVTYSLGKFGQRALDFYSIHVTKESTHPVKPLAQIAGNRYASGPVGKALSDACMGTIASFLSKYQDIIIEHQKVVKGNQKRLESLRELAGKENLEYPSVTLPPQPHTKEGVDAYNEVIARVRMWVNLNLWQKLKLSRDDAKPLLRLKGFPSFPLVERQANEVDWWDMVCNVKKLINEKKEDGKVFWQNLAGYKRQEALRPYLSSEEDRKKGKKFARYQLGDLLLHLEKKHGEDWGKVYDEAWERIDKKVEGLSKHIKLEEERRSEDAQSKAALTDWLRAKASFVIEGLKEADKDEFCRCELKLQKWYGDLRGKPFAIEAENSILDISGFSKQYNCAFIWQKDGVKKLNLYLIINYFKGGKLRFKKIKPEAFEANRFYTVINKKSGEIVPMEVNFNFDDPNLIILPLAFGKRQGREFIWNDLLSLETGSLKLANGRVIEKTLYNRRTRQDEPALFVALTFERREVLDSSNIKPMNLIGVDRGENIPAVIALTDPEGCPLSRFKDSLGNPTHILRIGESYKEKQRTIQAKKEVEQRRAGGYSRKYASKAKNLADDMVRNTARDLLYYAVTQDAMLIFENLSRGFGRQGKRTFMAERQYTRMEDWLTAKKAYEGLPSKTYLSKTLAQYTSKTCSNCGFTITSADYDRVLEKLKKTATGWMTTINGKELKVEGQITYYNRYKRQNVVKDLSVELDRLSEESVNNDISSWTKGRSGEALSLLKKRFSHRPVQEKFVCLNCGFETHADEQAALNIARSWLFLRSQEYKKYQTNKTTGNTDKRAFVETWQSFYRKKLKEVWKPAV

SEQ ID NO: 238 - protein, 978 aa, synthetic construct
  REGION 1..978: note = CasX variant
QEIKRINKIRRRLVKDSNTKKAGKTGPMKTLLVRVMTPDLRERLENLRKKPENIPQPISNTSRANLNKLLTDYTEMKKAILHVYWEEFQKDPVGLMSRVAQPASKKIDQNKLKPEMDEKGNLTTAGFACSQCGQPLFVYKLEQVSEKGKAYTNYFGRCNVAEHEKLILLAQLKPEKDSDEAVTYSLGKFGQRALDFYSIHVTKESTHPVKPLAQIAGNRYASGPVGKALSDACMGTIASFLSKYQDIIIEHQKVVKGNQKRLESLRELAGKENLEYPSVTLPPQPHTKEGVDAYNEVIARVRMWVNLNLWQKLKLSRDDAKPLLRLKGFPSFPLVERQANEVDWWDMVCNVKKLINEKKEDGKVFWQNLAGYKRQEALRPYLSSEEDRKKGKKFARYQLGDLLLHLEKKHGEDWGKVYDEAWERIDKKVEGLSKHIKLEEERRSEDAQSKAALTDWLRAKASFVIEGLKEADKDEFCRCELKLQKWYGDLRGKPFAIEAENSILDISGFSKQYNCAFIWQKDGVKKLNLYLIINYFKGGKLRFKKIKPEAFEANRFYTVINKKSGEIVPMEVNFNFDDPNLIILPLAFGKRQGREFIWNDLLSLETGSLKLANGRVIEKTLYNRRTRQDEPALFVALTFERREVLDSSNIKPMNLIGVDRGENIPAVIALTDPEGCPLSRFKDSLGNPTHILRIGESYKEKQRTIQAKKEVEQRRAGGYSRKYASKAKNLADDMVRNTARDLLYYAVTQDAMLIFENLSRGFGRQGKRTFMAERQYTRMEDWLTAKLKYEGLPSKTYLSKTLAQYTSKTCSNCGFTITSADYDRVLEKLKKTATGWMTTINGKELKVEGQITYYNRYKRQNVVKDLSVELDRLSEESVNNDISSWTKGRSGEALSLLKKRFSHRPVQEKFVCLNCGFETHADEQAALNIARSWLFLRSQEYKKYQTNKTTGNTDKRAFVETWQSFYRKKLKEVWKPAV

SEQ ID NO: 239 - protein, 978 aa, synthetic construct
  REGION 1..978: note = CasX variant
QEGKRINKIRRRLVKDSNTKKAGKTGPMKTLLVRVMTPDLRERLENLRKKPENIPQPISNTSRANLNKLLTDYTEMKKAILHVYWEEFQKDPVGLMSRVAQPASKKIDQNKLKPEMDEKGNLTTAGFACSQCGQPLFVYKLEQVSEKGKAYTNYFGRCNVAEHEKLILLAQLKPEKDSDEAVTYSLGKFGQRALDFYSIHVTKESTHPVKPLAQIAGNRYASGPVGKALSDACMGTIASFLSKYQDIIIEHQKVVKGNQKRLESLRELAGKENLEYPSVTLPPQPHTKEGVDAYNEVIARVRMWVNLNLWQKLKLSRDDAKPLLRLKGFPSFPLVERQANEVDWWDMVCNVKKLINEKKEDGKVFWQNLAGYKRQEALRPYLSSEEDRKKGKKFARYQLGDLLLHLEKKHGEDWGKVYDEAWERIDKKVEGLSKHIKLEEERRSEDAQSKAALTDWLRAKASFVIEGLKEADKDEFCRCELKLQKWYGDLRGKPFAIEAENSILDISGFSKQYNCAFIWQKDGVKKLNLYLIINYFKGGKLRFKKIKPEAFEANRFYTVINKKSGEIVPMEVNFNFDDPNLIILPLAFGKRQGREFIWNDLLSLETGSLKLANGRVIEKTLYNRRTRQDEPALFVALTFERREVLDSSNIKPMNLIGVDRGENIPAVIALTDPEGCPLSRFKDSLGNPTHILRIGESYKEKQRTIQAKKEVEQRRAGGYSRKYASKAKNLADDMVRNTARDLLYYAVTQDAMLIFENLSRGFGRQGKRTFMAERQYTRMEDWLTAKLAYEGLPSKTYLSKTLAQYTSKTCSNCGFTITSADYDRVLEKLKKTATGWMTTINGKELKVEGQITYYNRYKRQNVVKDLSVELDRLSEESVNNDISSWTKGRSGEALSLLKKRFSHRPVQEKFVCLNCGFETHADEQAALNIARSWLFLRSQEYKKYQTNKTTGNTDKRAFVETWQSFYRKKLKEVWKPAV

SEQ ID NO: 240 - protein, 978 aa, synthetic construct
  REGION 1..978: note = CasX variant
QEEKRINKIRRRLVKDSNTKKAGKTGPMKTLLVRVMTPDLRERLENLRKKPENIPQPISNTSRANLNKLLTDYTEMKKAILHVYWEEFQKDPVGLMSRVAQPASKKIDQNKLKPEMDEKGNLTTAGFACSQCGQPLFVYKLEQVSEKGKAYTNYFGRCNVAEHEKLILLAQLKPEKDSDEAVTYSLGKFGQRALDFYSIHVTKESTHPVKPLAQIAGNRYASGPVGKALSDACMGTIASFLSKYQDIIIEHQKVVKGNQKRLESLRELAGKENLEYPSVTLPPQPHTKEGVDAYNEVIARVRMWVNLNLWQKLKLSRDDAKPLLRLKGFPSFPLVERQANEVDWWDMVCNVKKLINEKKEDGKVFWQNLAGYKRQEALRPYLSSEEDRKKGKKFARYQLGDLLLHLEKKHGEDWGKVYDEAWERIDKKVEGLSKHIKLEEERRSEDAQSKAALTDWLRAKASFVIEGLKEADKDEFCRCELKLQKWYGDLRGKPFAIEAENSILDISGFSKQYNCAFIWQKDGVKKLNLYLIINYFKGGKLRFKKIKPEAFEANRFYTVINKKSGEIVPMEVNFNFDDPNLIILPLAFGKRQGREFIWNDLLSLETGSLKLANGRVIEKTLYNRRTRQDEPALFVALTFERREVLDSSNIKPMNLIGVDRGENIPAVIALTDPEGCPLSRFKDSLGNPTHILRIGESYKEKQRTIQAKKEVEQRRAGGYSRKYASKAKNLADDMVRNTARDLLYYAVTQDAMLIFENLSRGFGRQGKRTFMAERQYTRMEDWLTAKLAYEGLPSKTYLSKTLAQYTSKTCSNCGFTITSADYDRVLEKLKKTATGWMTTINGKELKVEGQITYYNRYKRQNVVKDLSVELDRLSEESVNNDISSWTKGRSGEALSLLKKRFSHRPVQEKFVCLNCGFETHADEQAALNIARSWLFLRSQEYKKYQTNKTTGNTDKRAFVETWQSFYRKKLKEVWKPAV

SEQ ID NO: 241 - protein, 979 aa, synthetic construct
  REGION 1..979: note = CasX variant
QEIGKRINKIRRRLVKDSNTKKAGKTGPMKTLLVRVMTPDLRERLENLRKKPENIPQPISNTSRANLNKLLTDYTEMKKAILHVYWEEFQKDPVGLMSRVAQPASKKIDQNKLKPEMDEKGNLTTAGFACSQCGQPLFVYKLEQVSEKGKAYTNYFGRCNVAEHEKLILLAQLKPEKDSDEAVTYSLGKFGQRALDFYSIHVTKESTHPVKPLAQIAGNRYASGPVGKALSDACMGTIASFLSKYQDIIIEHQKVVKGNQKRLESLRELAGKENLEYPSVTLPPQPHTKEGVDAYNEVIARVRMWVNLNLWQKLKLSRDDAKPLLRLKGFPSFPLVERQANEVDWWDMVCNVKKLINEKKEDGKVFWQNLAGYKRQEALRPYLSSEEDRKKGKKFARYQLGDLLLHLEKKHGEDWGKVYDEAWERIDKKVEGLSKHIKLEEERRSEDAQSKAALTDWLRAKASFVIEGLKEADKDEFCRCELKLQKWYGDLRGKPFAIEAENSILDISGFSKQYNCAFIWQKDGVKKLNLYLIINYFKGGKLRFKKIKPEAFEANRFYTVINKKSGEIVPMEVNFNFDDPNLIILPLAFGKRQGREFIWNDLLSLETGSLKLANGRVIEKTLYNRRTRQDEPALFVALTFERREVLDSSNIKPMNLIGVDRGENIPAVIALTDPEGCPLSRFKDSLGNPTHILRIGESYKEKQRTIQAKKEVEQRRAGGYSRKYASKAKNLADDMVRNTARDLLYYAVTQDAMLIFENLSRGFGRQGKRTFMAERQYTRMEDWLTAKLAYEGLPSKTYLSKTLAQYTSKTCSNCGFTITSADYDRVLEKLKKTATGWMTTINGKELKVEGQITYYNRYKRQNVVKDLSVELDRLSEESVNNDISSWTKGRSGEALSLLKKRFSHRPVQEKFVCLNCGFETHADEQAALNIARSWLFLRSQEYKKYQTNKTTGNTDKRAFVETWQSFYRKKLKEVWKPAV

SEQ ID NO: 242 - protein, 978 aa, synthetic construct
  REGION 1..978: note = CasX variant
QEIGRINKIRRRLVKDSNTKKAGKTGPMKTLLVRVMTPDLRERLENLRKKPENIPQPISNTSRANLNKLLTDYTEMKKAILHVYWEEFQKDPVGLMSRVAQPASKKIDQNKLKPEMDEKGNLTTAGFACSQCGQPLFVYKLEQVSEKGKAYTNYFGRCNVAEHEKLILLAQLKPEKDSDEAVTYSLGKFGQRALDFYSIHVTKESTHPVKPLAQIAGNRYASGPVGKALSDACMGTIASFLSKYQDIIIEHQKVVKGNQKRLESLRELAGKENLEYPSVTLPPQPHTKEGVDAYNEVIARVRMWVNLNLWQKLKLSRDDAKPLLRLKGFPSFPLVERQANEVDWWDMVCNVKKLINEKKEDGKVFWQNLAGYKRQEALRPYLSSEEDRKKGKKFARYQLGDLLLHLEKKHGEDWGKVYDEAWERIDKKVEGLSKHIKLEEERRSEDAQSKAALTDWLRAKASFVIEGLKEADKDEFCRCELKLQKWYGDLRGKPFAIEAENSILDISGFSKQYNCAFIWQKDGVKKLNLYLIINYFKGGKLRFKKIKPEAFEANRFYTVINKKSGEIVPMEVNFNFDDPNLIILPLAFGKRQGREFIWNDLLSLETGSLKLANGRVIEKTLYNRRTRQDEPALFVALTFERREVLDSSNIKPMNLIGVDRGENIPAVIALTDPEGCPLSRFKDSLGNPTHILRIGESYKEKQRTIQAKKEVEQRRAGGYSRKYASKAKNLADDMVRNTARDLLYYAVTQDAMLIFENLSRGFGRQGKRTFMAERQYTRMEDWLTAKLAYEGLPSKTYLSKTLAQYTSKTCSNCGFTITSADYDRVLEKLKKTATGWMTTINGKELKVEGQITYYNRYKRQNVVKDLSVELDRLSEESVNNDISSWTKGRSGEALSLLKKRFSHRPVQEKFVCLNCGFETHADEQAALNIARSWLFLRSQEYKKYQTNKTTGNTDKRAFVETWQSFYRKKLKEVWKPAV

SEQ ID NO: 243 - protein, 978 aa, synthetic construct
  REGION 1..978: note = CasX variant
QEISRINKIRRRLVKDSNTKKAGKTGPMKTLLVRVMTPDLRERLENLRKKPENIPQPISNTSRANLNKLLTDYTEMKKAILHVYWEEFQKDPVGLMSRVAQPASKKIDQNKLKPEMDEKGNLTTAGFACSQCGQPLFVYKLEQVSEKGKAYTNYFGRCNVAEHEKLILLAQLKPEKDSDEAVTYSLGKFGQRALDFYSIHVTKESTHPVKPLAQIAGNRYASGPVGKALSDACMGTIASFLSKYQDIIIEHQKVVKGNQKRLESLRELAGKENLEYPSVTLPPQPHTKEGVDAYNEVIARVRMWVNLNLWQKLKLSRDDAKPLLRLKGFPSFPLVERQANEVDWWDMVCNVKKLINEKKEDGKVFWQNLAGYKRQEALRPYLSSEEDRKKGKKFARYQLGDLLLHLEKKHGEDWGKVYDEAWERIDKKVEGLSKHIKLEEERRSEDAQSKAALTDWLRAKASFVIEGLKEADKDEFCRCELKLQKWYGDLRGKPFAIEAENSILDISGFSKQYNCAFIWQKDGVKKLNLYLIINYFKGGKLRFKKIKPEAFEANRFYTVINKKSGEIVPMEVNFNFDDPNLIILPLAFGKRQGREFIWNDLLSLETGSLKLANGRVIEKTLYNRRTRQDEPALFVALTFERREVLDSSNIKPMNLIGVDRGENIPAVIALTDPEGCPLSRFKDSLGNPTHILRIGESYKEKQRTIQAKKEVEQRRAGGYSRKYASKAKNLADDMVRNTARDLLYYAVTQDAMLIFENLSRGFGRQGKRTFMAERQYTRMEDWLTAKLAYEGLPSKTYLSKTLAQYTSKTCSNCGFTITSADYDRVLEKLKKTATGWMTTINGKELKVEGQITYYNRYKRQNVVKDLSVELDRLSEESVNNDISSWTKGRSGEALSLLKKRFSHRPVQEKFVCLNCGFETHADEQAALNIARSWLFLRSQEYKKYQTNKTTGNTDKRAFVETWQSFYRKKLKEVWKPAV

SEQ ID NO: 244 - protein, 979 aa, synthetic construct
  REGION 1..979: note = CasX variant
QEIKGRINKIRRRLVKDSNTKKAGKTGPMKTLLVRVMTPDLRERLENLRKKPENIPQPISNTSRANLNKLLTDYTEMKKAILHVYWEEFQKDPVGLMSRVAQPASKKIDQNKLKPEMDEKGNLTTAGFACSQCGQPLFVYKLEQVSEKGKAYTNYFGRCNVAEHEKLILLAQLKPEKDSDEAVTYSLGKFGQRALDFYSIHVTKESTHPVKPLAQIAGNRYASGPVGKALSDACMGTIASFLSKYQDIIIEHQKVVKGNQKRLESLRELAGKENLEYPSVTLPPQPHTKEGVDAYNEVIARVRMWVNLNLWQKLKLSRDDAKPLLRLKGFPSFPLVERQANEVDWWDMVCNVKKLINEKKEDGKVFWQNLAGYKRQEALRPYLSSEEDRKKGKKFARYQLGDLLLHLEKKHGEDWGKVYDEAWERIDKKVEGLSKHIKLEEERRSEDAQSKAALTDWLRAKASFVIEGLKEADKDEFCRCELKLQKWYGDLRGKPFAIEAENSILDISGFSKQYNCAFIWQKDGVKKLNLYLIINYFKGGKLRFKKIKPEAFEANRFYTVINKKSGEIVPMEVNFNFDDPNLIILPLAFGKRQGREFIWNDLLSLETGSLKLANGRVIEKTLYNRRTRQDEPALFVALTFERREVLDSSNIKPMNLIGVDRGENIPAVIALTDPEGCPLSRFKDSLGNPTHILRIGESYKEKQRTIQAKKEVEQRRAGGYSRKYASKAKNLADDMVRNTARDLLYYAVTQDAMLIFENLSRGFGRQGKRTFMAERQYTRMEDWLTAKLAYEGLPSKTYLSKTLAQYTSKTCSNCGFTITSADYDRVLEKLKKTATGWMTTINGKELKVEGQITYYNRYKRQNVVKDLSVELDRLSEESVNNDISSWTKGRSGEALSLLKKRFSHRPVQEKFVCLNCGFETHADEQAALNIARSWLFLRSQEYKKYQTNKTTGNTDKRAFVETWQSFYRKKLKEVWKPAV

SEQ ID NO: 245 - protein, 978 aa, synthetic construct
  REGION 1..978: note = CasX variant
QEIKSINKIRRRLVKDSNTKKAGKTGPMKTLLVRVMTPDLRERLENLRKKPENIPQPISNTSRANLNKLLTDYTEMKKAILHVYWEEFQKDPVGLMSRVAQPASKKIDQNKLKPEMDEKGNLTTAGFACSQCGQPLFVYKLEQVSEKGKAYTNYFGRCNVAEHEKLILLAQLKPEKDSDEAVTYSLGKFGQRALDFYSIHVTKESTHPVKPLAQIAGNRYASGPVGKALSDACMGTIASFLSKYQDIIIEHQKVVKGNQKRLESLRELAGKENLEYPSVTLPPQPHTKEGVDAYNEVIARVRMWVNLNLWQKLKLSRDDAKPLLRLKGFPSFPLVERQANEVDWWDMVCNVKKLINEKKEDGKVFWQNLAGYKRQEALRPYLSSEEDRKKGKKFARYQLGDLLLHLEKKHGEDWGKVYDEAWERIDKKVEGLSKHIKLEEERRSEDAQSKAALTDWLRAKASFVIEGLKEADKDEFCRCELKLQKWYGDLRGKPFAIEAENSILDISGFSKQYNCAFIWQKDGVKKLNLYLIINYFKGGKLRFKKIKPEAFEANRFYTVINKKSGEIVPMEVNFNFDDPNLIILPLAFGKRQGREFIWNDLLSLETGSLKLANGRVIEKTLYNRRTRQDEPALFVALTFERREVLDSSNIKPMNLIGVDRGENIPAVIALTDPEGCPLSRFKDSLGNPTHILRIGESYKEKQRTIQAKKEVEQRRAGGYSRKYASKAKNLADDMVRNTARDLLYYAVTQDAMLIFENLSRGFGRQGKRTFMAERQYTRMEDWLTAKLAYEGLPSKTYLSKTLAQYTSKTCSNCGFTITSADYDRVLEKLKKTATGWMTTINGKELKVEGQITYYNRYKRQNVVKDLSVELDRLSEESVNNDISSWTKGRSGEALSLLKKRFSHRPVQEKFVCLNCGFETHADEQAALNIARSWLFLRSQEYKKYQTNKTTGNTDKRAFVETWQSFYRKKLKEVWKPAV

SEQ ID NO: 246 - protein, 978 aa, synthetic construct
  REGION 1..978: note = CasX variant
QEIKRANKIRRRLVKDSNTKKAGKTGPMKTLLVRVMTPDLRERLENLRKKPENIPQPISNTSRANLNKLLTDYTEMKKAILHVYWEEFQKDPVGLMSRVAQPASKKIDQNKLKPEMDEKGNLTTAGFACSQCGQPLFVYKLEQVSEKGKAYTNYFGRCNVAEHEKLILLAQLKPEKDSDEAVTYSLGKFGQRALDFYSIHVTKESTHPVKPLAQIAGNRYASGPVGKALSDACMGTIASFLSKYQDIIIEHQKVVKGNQKRLESLRELAGKENLEYPSVTLPPQPHTKEGVDAYNEVIARVRMWVNLNLWQKLKLSRDDAKPLLRLKGFPSFPLVERQANEVDWWDMVCNVKKLINEKKEDGKVFWQNLAGYKRQEALRPYLSSEEDRKKGKKFARYQLGDLLLHLEKKHGEDWGKVYDEAWERIDKKVEGLSKHIKLEEERRSEDAQSKAALTDWLRAKASFVIEGLKEADKDEFCRCELKLQKWYGDLRGKPFAIEAENSILDISGFSKQYNCAFIWQKDGVKKLNLYLIINYFKGGKLRFKKIKPEAFEANRFYTVINKKSGEIVPMEVNFNFDDPNLIILPLAFGKRQGREFIWNDLLSLETGSLKLANGRVIEKTLYNRRTRQDEPALFVALTFERREVLDSSNIKPMNLIGVDRGENIPAVIALTDPEGCPLSRFKDSLGNPTHILRIGESYKEKQRTIQAKKEVEQRRAGGYSRKYASKAKNLADDMVRNTARDLLYYAVTQDAMLIFENLSRGFGRQGKRTFMAERQYTRMEDWLTAKLAYEGLPSKTYLSKTLAQYTSKTCSNCGFTITSADYDRVLEKLKKTATGWMTTINGKELKVEGQITYYNRYKRQNVVKDLSVELDRLSEESVNNDISSWTKGRSGEALSLLKKRFSHRPVQEKFVCLNCGFETHADEQAALNIARSWLFLRSQEYKKYQTNKTTGNTDKRAFVETWQSFYRKKLKEVWKPAV

SEQ ID NO: 247 - protein, 979 aa, synthetic construct
  REGION 1..979: note = CasX variant
QEIKRGINKIRRRLVKDSNTKKAGKTGPMKTLLVRVMTPDLRERLENLRKKPENIPQPISNTSRANLNKLLTDYTEMKKAILHVYWEEFQKDPVGLMSRVAQPASKKIDQNKLKPEMDEKGNLTTAGFACSQCGQPLFVYKLEQVSEKGKAYTNYFGRCNVAEHEKLILLAQLKPEKDSDEAVTYSLGKFGQRALDFYSIHVTKESTHPVKPLAQIAGNRYASGPVGKALSDACMGTIASFLSKYQDIIIEHQKVVKGNQKRLESLRELAGKENLEYPSVTLPPQPHTKEGVDAYNEVIARVRMWVNLNLWQKLKLSRDDAKPLLRLKGFPSFPLVERQANEVDWWDMVCNVKKLINEKKEDGKVFWQNLAGYKRQEALRPYLSSEEDRKKGKKFARYQLGDLLLHLEKKHGEDWGKVYDEAWERIDKKVEGLSKHIKLEEERRSEDAQSKAALTDWLRAKASFVIEGLKEADKDEFCRCELKLQKWYGDLRGKPFAIEAENSILDISGFSKQYNCAFIWQKDGVKKLNLYLIINYFKGGKLRFKKIKPEAFEANRFYTVINKKSGEIVPMEVNFNFDDPNLIILPLAFGKRQGREFIWNDLLSLETGSLKLANGRVIEKTLYNRRTRQDEPALFVALTFERREVLDSSNIKPMNLIGVDRGENIPAVIALTDPEGCPLSRFKDSLGNPTHILRIGESYKEKQRTIQAKKEVEQRRAGGYSRKYASKAKNLADDMVRNTARDLLYYAVTQDAMLIFENLSRGFGRQGKRTFMAERQYTRMEDWLTAKLAYEGLPSKTYLSKTLAQYTSKTCSNCGFTITSADYDRVLEKLKKTATGWMTTINGKELKVEGQITYYNRYKRQNVVKDLSVELDRLSEESVNNDISSWTKGRSGEALSLLKKRFSHRPVQEKFVCLNCGFETHADEQAALNIARSWLFLRSQEYKKYQTNKTTGNTDKRAFVETWQSFYRKKLKEVWKPAV

SEQ ID NO: 248 - protein, 978 aa, synthetic construct
  REGION 1..978: note = CasX variant
QEIKRISKIRRRLVKDSNTKKAGKTGPMKTLLVRVMTPDLRERLENLRKKPENIPQPISNTSRANLNKLLTDYTEMKKAILHVYWEEFQKDPVGLMSRVAQPASKKIDQNKLKPEMDEKGNLTTAGFACSQCGQPLFVYKLEQVSEKGKAYTNYFGRCNVAEHEKLILLAQLKPEKDSDEAVTYSLGKFGQRALDFYSIHVTKESTHPVKPLAQIAGNRYASGPVGKALSDACMGTIASFLSKYQDIIIEHQKVVKGNQKRLESLRELAGKENLEYPSVTLPPQPHTKEGVDAYNEVIARVRMWVNLNLWQKLKLSRDDAKPLLRLKGFPSFPLVERQANEVDWWDMVCNVKKLINEKKEDGKVFWQNLAGYKRQEALRPYLSSEEDRKKGKKFARYQLGDLLLHLEKKHGEDWGKVYDEAWERIDKKVEGLSKHIKLEEERRSEDAQSKAALTDWLRAKASFVIEGLKEADKDEFCRCELKLQKWYGDLRGKPFAIEAENSILDISGFSKQYNCAFIWQKDGVKKLNLYLIINYFKGGKLRFKKIKPEAFEANRFYTVINKKSGEIVPMEVNFNFDDPNLIILPLAFGKRQGREFIWNDLLSLETGSLKLANGRVIEKTLYNRRTRQDEPALFVALTFERREVLDSSNIKPMNLIGVDRGENIPAVIALTDPEGCPLSRFKDSLGNPTHILRIGESYKEKQRTIQAKKEVEQRRAGGYSRKYASKAKNLADDMVRNTARDLLYYAVTQDAMLIFENLSRGFGRQGKRTFMAERQYTRMEDWLTAKLAYEGLPSKTYLSKTLAQYTSKTCSNCGFTITSADYDRVLEKLKKTATGWMTTINGKELKVEGQITYYNRYKRQNVVKDLSVELDRLSEESVNNDISSWTKGRSGEALSLLKKRFSHRPVQEKFVCLNCGFETHADEQAALNIARSWLFLRSQEYKKYQTNKTTGNTDKRAFVETWQSFYRKKLKEVWKPAV

SEQ ID NO: 249 - protein, 978 aa, synthetic construct
  REGION 1..978: note = CasX variant
QEIKRINGIRRRLVKDSNTKKAGKTGPMKTLLVRVMTPDLRERLENLRKKPENIPQPISNTSRANLNKLLTDYTEMKKAILHVYWEEFQKDPVGLMSRVAQPASKKIDQNKLKPEMDEKGNLTTAGFACSQCGQPLFVYKLEQVSEKGKAYTNYFGRCNVAEHEKLILLAQLKPEKDSDEAVTYSLGKFGQRALDFYSIHVTKESTHPVKPLAQIAGNRYASGPVGKALSDACMGTIASFLSKYQDIIIEHQKVVKGNQKRLESLRELAGKENLEYPSVTLPPQPHTKEGVDAYNEVIARVRMWVNLNLWQKLKLSRDDAKPLLRLKGFPSFPLVERQANEVDWWDMVCNVKKLINEKKEDGKVFWQNLAGYKRQEALRPYLSSEEDRKKGKKFARYQLGDLLLHLEKKHGEDWGKVYDEAWERIDKKVEGLSKHIKLEEERRSEDAQSKAALTDWLRAKASFVIEGLKEADKDEFCRCELKLQKWYGDLRGKPFAIEAENSILDISGFSKQYNCAFIWQKDGVKKLNLYLIINYFKGGKLRFKKIKPEAFEANRFYTVINKKSGEIVPMEVNFNFDDPNLIILPLAFGKRQGREFIWNDLLSLETGSLKLANGRVIEKTLYNRRTRQDEPALFVALTFERREVLDSSNIKPMNLIGVDRGENIPAVIALTDPEGCPLSRFKDSLGNPTHILRIGESYKEKQRTIQAKKEVEQRRAGGYSRKYASKAKNLADDMVRNTARDLLYYAVTQDAMLIFENLSRGFGRQGKRTFMAERQYTRMEDWLTAKLAYEGLPSKTYLSKTLAQYTSKTCSNCGFTITSADYDRVLEKLKKTATGWMTTINGKELKVEGQITYYNRYKRQNVVKDLSVELDRLSEESVNNDISSWTKGRSGEALSLLKKRFSHRPVQEKFVCLNCGFETHADEQAALNIARSWLFLRSQEYKKYQTNKTTGNTDKRAFVETWQSFYRKKLKEVWKPAV

SEQ ID NO: 250 - protein, 979 aa, synthetic construct
  REGION 1..979: note = CasX variant
QEIKRINKIRRRLVKFDSNTKKAGKTGPMKTLLVRVMTPDLRERLENLRKKPENIPQPISNTSRANLNKLLTDYTEMKKAILHVYWEEFQKDPVGLMSRVAQPASKKIDQNKLKPEMDEKGNLTTAGFACSQCGQPLFVYKLEQVSEKGKAYTNYFGRCNVAEHEKLILLAQLKPEKDSDEAVTYSLGKFGQRALDFYSIHVTKESTHPVKPLAQIAGNRYASGPVGKALSDACMGTIASFLSKYQDIIIEHQKVVKGNQKRLESLRELAGKENLEYPSVTLPPQPHTKEGVDAYNEVIARVRMWVNLNLWQKLKLSRDDAKPLLRLKGFPSFPLVERQANEVDWWDMVCNVKKLINEKKEDGKVFWQNLAGYKRQEALRPYLSSEEDRKKGKKFARYQLGDLLLHLEKKHGEDWGKVYDEAWERIDKKVEGLSKHIKLEEERRSEDAQSKAALTDWLRAKASFVIEGLKEADKDEFCRCELKLQKWYGDLRGKPFAIEAENSILDISGFSKQYNCAFIWQKDGVKKLNLYLIINYFKGGKLRFKKIKPEAFEANRFYTVINKKSGEIVPMEVNFNFDDPNLIILPLAFGKRQGREFIWNDLLSLETGSLKLANGRVIEKTLYNRRTRQDEPALFVALTFERREVLDSSNIKPMNLIGVDRGENIPAVIALTDPEGCPLSRFKDSLGNPTHILRIGESYKEKQRTIQAKKEVEQRRAGGYSRKYASKAKNLADDMVRNTARDLLYYAVTQDAMLIFENLSRGFGRQGKRTFMAERQYTRMEDWLTAKLAYEGLPSKTYLSKTLAQYTSKTCSNCGFTITSADYDRVLEKLKKTATGWMTTINGKELKVEGQITYYNRYKRQNVVKDLSVELDRLSEESVNNDISSWTKGRSGEALSLLKKRFSHRPVQEKFVCLNCGFETHADEQAALNIARSWLFLRSQEYKKYQTNKTTGNTDKRAFVETWQSFYRKKLKEVWKPAV

SEQ ID NO: 251 - protein, 979 aa, synthetic construct
  REGION 1..979: note = CasX variant
QEIKRINKIRRRLVKDSFNTKKAGKTGPMKTLLVRVMTPDLRERLENLRKKPENIPQPISNTSRANLNKLLTDYTEMKKAILHVYWEEFQKDPVGLMSRVAQPASKKIDQNKLKPEMDEKGNLTTAGFACSQCGQPLFVYKLEQVSEKGKAYTNYFGRCNVAEHEKLILLAQLKPEKDSDEAVTYSLGKFGQRALDFYSIHVTKESTHPVKPLAQIAGNRYASGPVGKALSDACMGTIASFLSKYQDIIIEHQKVVKGNQKRLESLRELAGKENLEYPSVTLPPQPHTKEGVDAYNEVIARVRMWVNLNLWQKLKLSRDDAKPLLRLKGFPSFPLVERQANEVDWWDMVCNVKKLINEKKEDGKVFWQNLAGYKRQEALRPYLSSEEDRKKGKKFARYQLGDLLLHLEKKHGEDWGKVYDEAWERIDKKVEGLSKHIKLEEERRSEDAQSKAALTDWLRAKASFVIEGLKEADKDEFCRCELKLQKWYGDLRGKPFAIEAENSILDISGFSKQYNCAFIWQKDGVKKLNLYLIINYFKGGKLRFKKIKPEAFEANRFYTVINKKSGEIVPMEVNFNFDDPNLIILPLAFGKRQGREFIWNDLLSLETGSLKLANGRVIEKTLYNRRTRQDEPALFVALTFERREVLDSSNIKPMNLIGVDRGENIPAVIALTDPEGCPLSRFKDSLGNPTHILRIGESYKEKQRTIQAKKEVEQRRAGGYSRKYASKAKNLADDMVRNTARDLLYYAVTQDAMLIFENLSRGFGRQGKRTFMAERQYTRMEDWLTAKLAYEGLPSKTYLSKTLAQYTSKTCSNCGFTITSADYDRVLEKLKKTATGWMTTINGKELKVEGQITYYNRYKRQNVVKDLSVELDRLSEESVNNDISSWTKGRSGEALSLLKKRFSHRPVQEKFVCLNCGFETHADEQAALNIARSWLFLRSQEYKKYQTNKTTGNTDKRAFVETWQSFYRKKLKEVWKPAV

SEQ ID NO: 252 - protein, 978 aa, synthetic construct
  REGION 1..978: note = CasX variant
QEIKRINKIRRRLVKDSNTKKAGKTGPMKTLLVPVMTPDLRERLENLRKKPENIPQPISNTSRANLNKLLTDYTEMKKAILHVYWEEFQKDPVGLMSRVAQPASKKIDQNKLKPEMDEKGNLTTAGFACSQCGQPLFVYKLEQVSEKGKAYTNYFGRCNVAEHEKLILLAQLKPEKDSDEAVTYSLGKFGQRALDFYSIHVTKESTHPVKPLAQIAGNRYASGPVGKALSDACMGTIASFLSKYQDIIIEHQKVVKGNQKRLESLRELAGKENLEYPSVTLPPQPHTKEGVDAYNEVIARVRMWVNLNLWQKLKLSRDDAKPLLRLKGFPSFPLVERQANEVDWWDMVCNVKKLINEKKEDGKVFWQNLAGYKRQEALRPYLSSEEDRKKGKKFARYQLGDLLLHLEKKHGEDWGKVYDEAWERIDKKVEGLSKHIKLEEERRSEDAQSKAALTDWLRAKASFVIEGLKEADKDEFCRCELKLQKWYGDLRGKPFAIEAENSILDISGFSKQYNCAFIWQKDGVKKLNLYLIINYFKGGKLRFKKIKPEAFEANRFYTVINKKSGEIVPMEVNFNFDDPNLIILPLAFGKRQGREFIWNDLLSLETGSLKLANGRVIEKTLYNRRTRQDEPALFVALTFERREVLDSSNIKPMNLIGVDRGENIPAVIALTDPEGCPLSRFKDSLGNPTHILRIGESYKEKQRTIQAKKEVEQRRAGGYSRKYASKAKNLADDMVRNTARDLLYYAVTQDAMLIFENLSRGFGRQGKRTFMAERQYTRMEDWLTAKLAYEGLPSKTYLSKTLAQYTSKTCSNCGFTITSADYDRVLEKLKKTATGWMTTINGKELKVEGQITYYNRYKRQNVVKDLSVELDRLSEESVNNDISSWTKGRSGEALSLLKKRFSHRPVQEKFVCLNCGFETHADEQAALNIARSWLFLRSQEYKKYQTNKTTGNTDKRAFVETWQSFYRKKLKEVWKPAV

SEQ ID NO: 253 - protein, 978 aa, synthetic construct
  REGION 1..978: note = CasX variant
QEIKRINKIRRRLVKDSNTKKAGKTGPMKTLLVRVMTPDLRERLENLRKKPPNIPQPISNTSRANLNKLLTDYTEMKKAILHVYWEEFQKDPVGLMSRVAQPASKKIDQNKLKPEMDEKGNLTTAGFACSQCGQPLFVYKLEQVSEKGKAYTNYFGRCNVAEHEKLILLAQLKPEKDSDEAVTYSLGKFGQRALDFYSIHVTKESTHPVKPLAQIAGNRYASGPVGKALSDACMGTIASFLSKYQDIIIEHQKVVKGNQKRLESLRELAGKENLEYPSVTLPPQPHTKEGVDAYNEVIARVRMWVNLNLWQKLKLSRDDAKPLLRLKGFPSFPLVERQANEVDWWDMVCNVKKLINEKKEDGKVFWQNLAGYKRQEALRPYLSSEEDRKKGKKFARYQLGDLLLHLEKKHGEDWGKVYDEAWERIDKKVEGLSKHIKLEEERRSEDAQSKAALTDWLRAKASFVIEGLKEADKDEFCRCELKLQKWYGDLRGKPFAIEAENSILDISGFSKQYNCAFIWQKDGVKKLNLYLIINYFKGGKLRFKKIKPEAFEANRFYTVINKKSGEIVPMEVNFNFDDPNLIILPLAFGKRQGREFIWNDLLSLETGSLKLANGRVIEKTLYNRRTRQDEPALFVALTFERREVLDSSNIKPMNLIGVDRGENIPAVIALTDPEGCPLSRFKDSLGNPTHILRIGESYKEKQRTIQAKKEVEQRRAGGYSRKYASKAKNLADDMVRNTARDLLYYAVTQDAMLIFENLSRGFGRQGKRTFMAERQYTRMEDWLTAKLAYEGLPSKTYLSKTLAQYTSKTCSNCGFTITSADYDRVLEKLKKTATGWMTTINGKELKVEGQITYYNRYKRQNVVKDLSVELDRLSEESVNNDISSWTKGRSGEALSLLKKRFSHRPVQEKFVCLNCGFETHADEQAALNIARSWLFLRSQEYKKYQTNKTTGNTDKRAFVETWQSFYRKKLKEVWKPAV

SEQ ID NO: 254 - protein, 979 aa, synthetic construct
  REGION 1..979: note = CasX variant
QEIKRINKIRRRLVKDSNTKKAGKTGPMKTLLVRVMTPDLRERLENLRKKPENIPPQPISNTSRANLNKLLTDYTEMKKAILHVYWEEFQKDPVGLMSRVAQPASKKIDQNKLKPEMDEKGNLTTAGFACSQCGQPLFVYKLEQVSEKGKAYTNYFGRCNVAEHEKLILLAQLKPEKDSDEAVTYSLGKFGQRALDFYSIHVTKESTHPVKPLAQIAGNRYASGPVGKALSDACMGTIASFLSKYQDIIIEHQKVVKGNQKRLESLRELAGKENLEYPSVTLPPQPHTKEGVDAYNEVIARVRMWVNLNLWQKLKLSRDDAKPLLRLKGFPSFPLVERQANEVDWWDMVCNVKKLINEKKEDGKVFWQNLAGYKRQEALRPYLSSEEDRKKGKKFARYQLGDLLLHLEKKHGEDWGKVYDEAWERIDKKVEGLSKHIKLEEERRSEDAQSKAALTDWLRAKASFVIEGLKEADKDEFCRCELKLQKWYGDLRGKPFAIEAENSILDISGFSKQYNCAFIWQKDGVKKLNLYLIINYFKGGKLRFKKIKPEAFEANRFYTVINKKSGEIVPMEVNFNFDDPNLIILPLAFGKRQGREFIWNDLLSLETGSLKLANGRVIEKTLYNRRTRQDEPALFVALTFERREVLDSSNIKPMNLIGVDRGENIPAVIALTDPEGCPLSRFKDSLGNPTHILRIGESYKEKQRTIQAKKEVEQRRAGGYSRKYASKAKNLADDMVRNTARDLLYYAVTQDAMLIFENLSRGFGRQGKRTFMAERQYTRMEDWLTAKLAYEGLPSKTYLSKTLAQYTSKTCSNCGFTITSADYDRVLEKLKKTATGWMTTINGKELKVEGQITYYNRYKRQNVVKDLSVELDRLSEESVNNDISSWTKGRSGEALSLLKKRFSHRPVQEKFVCLNCGFETHADEQAALNIARSWLFLRSQEYKKYQTNKTTGNTDKRAFVETWQSFYRKKLKEVWKPAV

SEQ ID NO: 255 - protein, 978 aa, synthetic construct
  REGION 1..978: note = CasX variant
QEIKRINKIRRRLVKDSNTKKAGKTGPMKTLLVRVMTPDLRERLENLRKKPENIPPPISNTSRANLNKLLTDYTEMKKAILHVYWEEFQKDPVGLMSRVAQPASKKIDQNKLKPEMDEKGNLTTAGFACSQCGQPLFVYKLEQVSEKGKAYTNYFGRCNVAEHEKLILLAQLKPEKDSDEAVTYSLGKFGQRALDFYSIHVTKESTHPVKPLAQIAGNRYASGPVGKALSDACMGTIASFLSKYQDIIIEHQKVVKGNQKRLESLRELAGKENLEYPSVTLPPQPHTKEGVDAYNEVIARVRMWVNLNLWQKLKLSRDDAKPLLRLKGFPSFPLVERQANEVDWWDMVCNVKKLINEKKEDGKVFWQNLAGYKRQEALRPYLSSEEDRKKGKKFARYQLGDLLLHLEKKHGEDWGKVYDEAWERIDKKVEGLSKHIKLEEERRSEDAQSKAALTDWLRAKASFVIEGLKEADKDEFCRCELKLQKWYGDLRGKPFAIEAENSILDISGFSKQYNCAFIWQKDGVKKLNLYLIINYFKGGKLRFKKIKPEAFEANRFYTVINKKSGEIVPMEVNFNFDDPNLIILPLAFGKRQGREFIWNDLLSLETGSLKLANGRVIEKTLYNRRTRQDEPALFVALTFERREVLDSSNIKPMNLIGVDRGENIPAVIALTDPEGCPLSRFKDSLGNPTHILRIGESYKEKQRTIQAKKEVEQRRAGGYSRKYASKAKNLADDMVRNTARDLLYYAVTQDAMLIFENLSRGFGRQGKRTFMAERQYTRMEDWLTAKLAYEGLPSKTYLSKTLAQYTSKTCSNCGFTITSADYDRVLEKLKKTATGWMTTINGKELKVEGQITYYNRYKRQNVVKDLSVELDRLSEESVNNDISSWTKGRSGEALSLLKKRFSHRPVQEKFVCLNCGFETHADEQAALNIARSWLFLRSQEYKKYQTNKTTGNTDKRAFVETWQSFYRKKLKEVWKPAV

SEQ ID NO: 256 - protein, 978 aa, synthetic construct
  REGION 1..978: note = CasX variant
QEIKRINKIRRRLVKDSNTKKAGKTGPMKTLLVRVMTPDLRERLENLRKKPENIPQPISNTSSANLNKLLTDYTEMKKAILHVYWEEFQKDPVGLMSRVAQPASKKIDQNKLKPEMDEKGNLTTAGFACSQCGQPLFVYKLEQVSEKGKAYTNYFGRCNVAEHEKLILLAQLKPEKDSDEAVTYSLGKFGQRALDFYSIHVTKESTHPVKPLAQIAGNRYASGPVGKALSDACMGTIASFLSKYQDIIIEHQKVVKGNQKRLESLRELAGKENLEYPSVTLPPQPHTKEGVDAYNEVIARVRMWVNLNLWQKLKLSRDDAKPLLRLKGFPSFPLVERQANEVDWWDMVCNVKKLINEKKEDGKVFWQNLAGYKRQEALRPYLSSEEDRKKGKKFARYQLGDLLLHLEKKHGEDWGKVYDEAWERIDKKVEGLSKHIKLEEERRSEDAQSKAALTDWLRAKASFVIEGLKEADKDEFCRCELKLQKWYGDLRGKPFAIEAENSILDISGFSKQYNCAFIWQKDGVKKLNLYLIINYFKGGKLRFKKIKPEAFEANRFYTVINKKSGEIVPMEVNFNFDDPNLIILPLAFGKRQGREFIWNDLLSLETGSLKLANGRVIEKTLYNRRTRQDEPALFVALTFERREVLDSSNIKPMNLIGVDRGENIPAVIALTDPEGCPLSRFKDSLGNPTHILRIGESYKEKQRTIQAKKEVEQRRAGGYSRKYASKAKNLADDMVRNTARDLLYYAVTQDAMLIFENLSRGFGRQGKRTFMAERQYTRMEDWLTAKLAYEGLPSKTYLSKTLAQYTSKTCSNCGFTITSADYDRVLEKLKKTATGWMTTINGKELKVEGQITYYNRYKRQNVVKDLSVELDRLSEESVNNDISSWTKGRSGEALSLLKKRFSHRPVQEKFVCLNCGFETHADEQAALNIARSWLFLRSQEYKKYQTNKTTGNTDKRAFVETWQSFYRKKLKEVWKPAV

SEQ ID NO: 257 - protein, 978 aa, synthetic construct
  REGION 1..978: note = CasX variant
QEIKRINKIRRRLVKDSNTKKAGKTGPMKTLLVRVMTPDLRERLENLRKKPENIPQPISNTSQANLNKLLTDYTEMKKAILHVYWEEFQKDPVGLMSRVAQPASKKIDQNKLKPEMDEKGNLTTAGFACSQCGQPLFVYKLEQVSEKGKAYTNYFGRCNVAEHEKLILLAQLKPEKDSDEAVTYSLGKFGQRALDFYSIHVTKESTHPVKPLAQIAGNRYASGPVGKALSDACMGTIASFLSKYQDIIIEHQKVVKGNQKRLESLRELAGKENLEYPSVTLPPQPHTKEGVDAYNEVIARVRMWVNLNLWQKLKLSRDDAKPLLRLKGFPSFPLVERQANEVDWWDMVCNVKKLINEKKEDGKVFWQNLAGYKRQEALRPYLSSEEDRKKGKKFARYQLGDLLLHLEKKHGEDWGKVYDEAWERIDKKVEGLSKHIKLEEERRSEDAQSKAALTDWLRAKASFVIEGLKEADKDEFCRCELKLQKWYGDLRGKPFAIEAENSILDISGFSKQYNCAFIWQKDGVKKLNLYLIINYFKGGKLRFKKIKPEAFEANRFYTVINKKSGEIVPMEVNFNFDDPNLIILPLAFGKRQGREFIWNDLLSLETGSLKLANGRVIEKTLYNRRTRQDEPALFVALTFERREVLDSSNIKPMNLIGVDRGENIPAVIALTDPEGCPLSRFKDSLGNPTHILRIGESYKEKQRTIQAKKEVEQRRAGGYSRKYASKAKNLADDMVRNTARDLLYYAVTQDAMLIFENLSRGFGRQGKRTFMAERQYTRMEDWLTAKLAYEGLPSKTYLSKTLAQYTSKTCSNCGFTITSADYDRVLEKLKKTATGWMTTINGKELKVEGQITYYNRYKRQNVVKDLSVELDRLSEESVNNDISSWTKGRSGEALSLLKKRFSHRPVQEKFVCLNCGFETHADEQAALNIARSWLFLRSQEYKKYQTNKTTGNTDKRAFVETWQSFYRKKLKEVWKPAV

SEQ ID NO: 258 - protein, 978 aa, synthetic construct
  REGION 1..978: note = CasX variant
QEIKRINKIRRRLVKDSNTKKAGKTGPMKTLLVRVMTPDLRERLENLRKKPENIPQPISNTSRANLNKLLTDYTEMKKAITHVYWEEFQKDPVGLMSRVAQPASKKIDQNKLKPEMDEKGNLTTAGFACSQCGQPLFVYKLEQVSEKGKAYTNYFGRCNVAEHEKLILLAQLKPEKDSDEAVTYSLGKFGQRALDFYSIHVTKESTHPVKPLAQIAGNRYASGPVGKALSDACMGTIASFLSKYQDIIIEHQKVVKGNQKRLESLRELAGKENLEYPSVTLPPQPHTKEGVDAYNEVIARVRMWVNLNLWQKLKLSRDDAKPLLRLKGFPSFPLVERQANEVDWWDMVCNVKKLINEKKEDGKVFWQNLAGYKRQEALRPYLSSEEDRKKGKKFARYQLGDLLLHLEKKHGEDWGKVYDEAWERIDKKVEGLSKHIKLEEERRSEDAQSKAALTDWLRAKASFVIEGLKEADKDEFCRCELKLQKWYGDLRGKPFAIEAENSILDISGFSKQYNCAFIWQKDGVKKLNLYLIINYFKGGKLRFKKIKPEAFEANRFYTVINKKSGEIVPMEVNFNFDDPNLIILPLAFGKRQGREFIWNDLLSLETGSLKLANGRVIEKTLYNRRTRQDEPALFVALTFERREVLDSSNIKPMNLIGVDRGENIPAVIALTDPEGCPLSRFKDSLGNPTHILRIGESYKEKQRTIQAKKEVEQRRAGGYSRKYASKAKNLADDMVRNTARDLLYYAVTQDAMLIFENLSRGFGRQGKRTFMAERQYTRMEDWLTAKLAYEGLPSKTYLSKTLAQYTSKTCSNCGFTITSADYDRVLEKLKKTATGWMTTINGKELKVEGQITYYNRYKRQNVVKDLSVELDRLSEESVNNDISSWTKGRSGEALSLLKKRFSHRPVQEKFVCLNCGFETHADEQAALNIARSWLFLRSQEYKKYQTNKTTGNTDKRAFVETWQSFYRKKLKEVWKPAV

SEQ ID NO: 259 - protein, 978 aa, synthetic construct
  REGION 1..978: note = CasX variant
QEIKRINKIRRRLVKDSNTKKAGKTGPMKTLLVRVMTPDLRERLENLRKKPENIPQPISNTSRANLNKLLTDYTEMKKAILHVYGEEFQKDPVGLMSRVAQPASKKIDQNKLKPEMDEKGNLTTAGFACSQCGQPLFVYKLEQVSEKGKAYTNYFGRCNVAEHEKLILLAQLKPEKDSDEAVTYSLGKFGQRALDFYSIHVTKESTHPVKPLAQIAGNRYASGPVGKALSDACMGTIASFLSKYQDIIIEHQKVVKGNQKRLESLRELAGKENLEYPSVTLPPQPHTKEGVDAYNEVIARVRMWVNLNLWQKLKLSRDDAKPLLRLKGFPSFPLVERQANEVDWWDMVCNVKKLINEKKEDGKVFWQNLAGYKRQEALRPYLSSEEDRKKGKKFARYQLGDLLLHLEKKHGEDWGKVYDEAWERIDKKVEGLSKHIKLEEERRSEDAQSKAALTDWLRAKASFVIEGLKEADKDEFCRCELKLQKWYGDLRGKPFAIEAENSILDISGFSKQYNCAFIWQKDGVKKLNLYLIINYFKGGKLRFKKIKPEAFEANRFYTVINKKSGEIVPMEVNFNFDDPNLIILPLAFGKRQGREFIWNDLLSLETGSLKLANGRVIEKTLYNRRTRQDEPALFVALTFERREVLDSSNIKPMNLIGVDRGENIPAVIALTDPEGCPLSRFKDSLGNPTHILRIGESYKEKQRTIQAKKEVEQRRAGGYSRKYASKAKNLADDMVRNTARDLLYYAVTQDAMLIFENLSRGFGRQGKRTFMAERQYTRMEDWLTAKLAYEGLPSKTYLSKTLAQYTSKTCSNCGFTITSADYDRVLEKLKKTATGWMTTINGKELKVEGQITYYNRYKRQNVVKDLSVELDRLSEESVNNDISSWTKGRSGEALSLLKKRFSHRPVQEKFVCLNCGFETHADEQAALNIARSWLFLRSQEYKKYQTNKTTGNTDKRAFVETWQSFYRKKLKEVWKPAV

SEQ ID NO: 260 - protein, 978 aa, synthetic construct
  REGION 1..978: note = CasX variant
QEIKRINKIRRRLVKDSNTKKAGKTGPMKTLLVRVMTPDLRERLENLRKKPENIPQPISNTSRANLNKLLTDYTEMKKAILHVYDEEFQKDPVGLMSRVAQPASKKIDQNKLKPEMDEKGNLTTAGFACSQCGQPLFVYKLEQVSEKGKAYTNYFGRCNVAEHEKLILLAQLKPEKDSDEAVTYSLGKFGQRALDFYSIHVTKESTHPVKPLAQIAGNRYASGPVGKALSDACMGTIASFLSKYQDIIIEHQKVVKGNQKRLESLRELAGKENLEYPSVTLPPQPHTKEGVDAYNEVIARVRMWVNLNLWQKLKLSRDDAKPLLRLKGFPSFPLVERQANEVDWWDMVCNVKKLINEKKEDGKVFWQNLAGYKRQEALRPYLSSEEDRKKGKKFARYQLGDLLLHLEKKHGEDWGKVYDEAWERIDKKVEGLSKHIKLEEERRSEDAQSKAALTDWLRAKASFVIEGLKEADKDEFCRCELKLQKWYGDLRGKPFAIEAENSILDISGFSKQYNCAFIWQKDGVKKLNLYLIINYFKGGKLRFKKIKPEAFEANRFYTVINKKSGEIVPMEVNFNFDDPNLIILPLAFGKRQGREFIWNDLLSLETGSLKLANGRVIEKTLYNRRTRQDEPALFVALTFERREVLDSSNIKPMNLIGVDRGENIPAVIALTDPEGCPLSRFKDSLGNPTHILRIGESYKEKQRTIQAKKEVEQRRAGGYSRKYASKAKNLADDMVRNTARDLLYYAVTQDAMLIFENLSRGFGRQGKRTFMAERQYTRMEDWLTAKLAYEGLPSKTYLSKTLAQYTSKTCSNCGFTITSADYDRVLEKLKKTATGWMTTINGKELKVEGQITYYNRYKRQNVVKDLSVELDRLSEESVNNDISSWTKGRSGEALSLLKKRFSHRPVQEKFVCLNCGFETHADEQAALNIARSWLFLRSQEYKKYQTNKTTGNTDKRAFVETWQSFYRKKLKEVWKPAV

SEQ ID NO: 261 - protein, 978 aa, synthetic construct
  REGION 1..978: note = CasX variant
QEIKRINKIRRRLVKDSNTKKAGKTGPMKTLLVRVMTPDLRERLENLRKKPENIPQPISNTSRANLNKLLTDYTEMKKAILHVYAEEFQKDPVGLMSRVAQPASKKIDQNKLKPEMDEKGNLTTAGFACSQCGQPLFVYKLEQVSEKGKAYTNYFGRCNVAEHEKLILLAQLKPEKDSDEAVTYSLGKFGQRALDFYSIHVTKESTHPVKPLAQIAGNRYASGPVGKALSDACMGTIASFLSKYQDIIIEHQKVVKGNQKRLESLRELAGKENLEYPSVTLPPQPHTKEGVDAYNEVIARVRMWVNLNLWQKLKLSRDDAKPLLRLKGFPSFPLVERQANEVDWWDMVCNVKKLINEKKEDGKVFWQNLAGYKRQEALRPYLSSEEDRKKGKKFARYQLGDLLLHLEKKHGEDWGKVYDEAWERIDKKVEGLSKHIKLEEERRSEDAQSKAALTDWLRAKASFVIEGLKEADKDEFCRCELKLQKWYGDLRGKPFAIEAENSILDISGFSKQYNCAFIWQKDGVKKLNLYLIINYFKGGKLRFKKIKPEAFEANRFYTVINKKSGEIVPMEVNFNFDDPNLIILPLAFGKRQGREFIWNDLLSLETGSLKLANGRVIEKTLYNRRTRQDEPALFVALTFERREVLDSSNIKPMNLIGVDRGENIPAVIALTDPEGCPLSRFKDSLGNPTHILRIGESYKEKQRTIQAKKEVEQRRAGGYSRKYASKAKNLADDMVRNTARDLLYYAVTQDAMLIFENLSRGFGRQGKRTFMAERQYTRMEDWLTAKLAYEGLPSKTYLSKTLAQYTSKTCSNCGFTITSADYDRVLEKLKKTATGWMTTINGKELKVEGQITYYNRYKRQNVVKDLSVELDRLSEESVNNDISSWTKGRSGEALSLLKKRFSHRPVQEKFVCLNCGFETHADEQAALNIARSWLFLRSQEYKKYQTNKTTGNTDKRAFVETWQSFYRKKLKEVWKPAV

SEQ ID NO: 262 - protein, 978 aa, synthetic construct
  REGION 1..978: note = CasX variant
QEIKRINKIRRRLVKDSNTKKAGKTGPMKTLLVRVMTPDLRERLENLRKKPENIPQPISNTSRANLNKLLTDYTEMKKAILHVYREEFQKDPVGLMSRVAQPASKKIDQNKLKPEMDEKGNLTTAGFACSQCGQPLFVYKLEQVSEKGKAYTNYFGRCNVAEHEKLILLAQLKPEKDSDEAVTYSLGKFGQRALDFYSIHVTKESTHPVKPLAQIAGNRYASGPVGKALSDACMGTIASFLSKYQDIIIEHQKVVKGNQKRLESLRELAGKENLEYPSVTLPPQPHTKEGVDAYNEVIARVRMWVNLNLWQKLKLSRDDAKPLLRLKGFPSFPLVERQANEVDWWDMVCNVKKLINEKKEDGKVFWQNLAGYKRQEALRPYLSSEEDRKKGKKFARYQLGDLLLHLEKKHGEDWGKVYDEAWERIDKKVEGLSKHIKLEEERRSEDAQSKAALTDWLRAKASFVIEGLKEADKDEFCRCELKLQKWYGDLRGKPFAIEAENSILDISGFSKQYNCAFIWQKDGVKKLNLYLIINYFKGGKLRFKKIKPEAFEANRFYTVINKKSGEIVPMEVNFNFDDPNLIILPLAFGKRQGREFIWNDLLSLETGSLKLANGRVIEKTLYNRRTRQDEPALFVALTFERREVLDSSNIKPMNLIGVDRGENIPAVIALTDPEGCPLSRFKDSLGNPTHILRIGESYKEKQRTIQAKKEVEQRRAGGYSRKYASKAKNLADDMVRNTARDLLYYAVTQDAMLIFENLSRGFGRQGKRTFMAERQYTRMEDWLTAKLAYEGLPSKTYLSKTLAQYTSKTCSNCGFTITSADYDRVLEKLKKTATGWMTTINGKELKVEGQITYYNRYKRQNVVKDLSVELDRLSEESVNNDISSWTKGRSGEALSLLKKRFSHRPVQEKFVCLNCGFETHADEQAALNIARSWLFLRSQEYKKYQTNKTTGNTDKRAFVETWQSFYRKKLKEVWKPAV

SEQ ID NO: 263 - protein, 978 aa, synthetic construct
  REGION 1..978: note = CasX variant
QEIKRINKIRRRLVKDSNTKKAGKTGPMKTLLVRVMTPDLRERLENLRKKPENIPQPISNTSRANLNKLLTDYTEMKKAILHVYWEEFQKDPVGLMSRVAQPASKKIDQNKLKPEMDEKGNLTTAGFACSQCGQPLFVYKLEQVSEKGKAYTNYFGRCNVAEHEKLIKLAQLKPEKDSDEAVTYSLGKFGQRALDFYSIHVTKESTHPVKPLAQIAGNRYASGPVGKALSDACMGTIASFLSKYQDIIIEHQKVVKGNQKRLESLRELAGKENLEYPSVTLPPQPHTKEGVDAYNEVIARVRMWVNLNLWQKLKLSRDDAKPLLRLKGFPSFPLVERQANEVDWWDMVCNVKKLINEKKEDGKVFWQNLAGYKRQEALRPYLSSEEDRKKGKKFARYQLGDLLLHLEKKHGEDWGKVYDEAWERIDKKVEGLSKHIKLEEERRSEDAQSKAALTDWLRAKASFVIEGLKEADKDEFCRCELKLQKWYGDLRGKPFAIEAENSILDISGFSKQYNCAFIWQKDGVKKLNLYLIINYFKGGKLRFKKIKPEAFEANRFYTVINKKSGEIVPMEVNFNFDDPNLIILPLAFGKRQGREFIWNDLLSLETGSLKLANGRVIEKTLYNRRTRQDEPALFVALTFERREVLDSSNIKPMNLIGVDRGENIPAVIALTDPEGCPLSRFKDSLGNPTHILRIGESYKEKQRTIQAKKEVEQRRAGGYSRKYASKAKNLADDMVRNTARDLLYYAVTQDAMLIFENLSRGFGRQGKRTFMAERQYTRMEDWLTAKLAYEGLPSKTYLSKTLAQYTSKTCSNCGFTITSADYDRVLEKLKKTATGWMTTINGKELKVEGQITYYNRYKRQNVVKDLSVELDRLSEESVNNDISSWTKGRSGEALSLLKKRFSHRPVQEKFVCLNCGFETHADEQAALNIARSWLFLRSQEYKKYQTNKTTGNTDKRAFVETWQSFYRKKLKEVWKPAV

SEQ ID NO: 264 - protein, 978 aa, synthetic construct
  REGION 1..978: note = CasX variant
QEIKRINKIRRRLVKDSNTKKAGKTGPMKTLLVRVMTPDLRERLENLRKKPENIPQPISNTSRANLNKLLTDYTEMKKAILHVYWEEFQKDPVGLMSRVAQPASKKIDQNKLKPEMDEKGNLTTAGFACSQCGQPLFVYKLEQVSEKGKAYTNYFGRCNVAEHEKLILLYQLKPEKDSDEAVTYSLGKFGQRALDFYSIHVTKESTHPVKPLAQIAGNRYASGPVGKALSDACMGTIASFLSKYQDIIIEHQKVVKGNQKRLESLRELAGKENLEYPSVTLPPQPHTKEGVDAYNEVIARVRMWVNLNLWQKLKLSRDDAKPLLRLKGFPSFPLVERQANEVDWWDMVCNVKKLINEKKEDGKVFWQNLAGYKRQEALRPYLSSEEDRKKGKKFARYQLGDLLLHLEKKHGEDWGKVYDEAWERIDKKVEGLSKHIKLEEERRSEDAQSKAALTDWLRAKASFVIEGLKEADKDEFCRCELKLQKWYGDLRGKPFAIEAENSILDISGFSKQYNCAFIWQKDGVKKLNLYLIINYFKGGKLRFKKIKPEAFEANRFYTVINKKSGEIVPMEVNFNFDDPNLIILPLAFGKRQGREFIWNDLLSLETGSLKLANGRVIEKTLYNRRTRQDEPALFVALTFERREVLDSSNIKPMNLIGVDRGENIPAVIALTDPEGCPLSRFKDSLGNPTHILRIGESYKEKQRTIQAKKEVEQRRAGGYSRKYASKAKNLADDMVRNTARDLLYYAVTQDAMLIFENLSRGFGRQGKRTFMAERQYTRMEDWLTAKLAYEGLPSKTYLSKTLAQYTSKTCSNCGFTITSADYDRVLEKLKKTATGWMTTINGKELKVEGQITYYNRYKRQNVVKDLSVELDRLSEESVNNDISSWTKGRSGEALSLLKKRFSHRPVQEKFVCLNCGFETHADEQAALNIARSWLFLRSQEYKKYQTNKTTGNTDKRAFVETWQSFYRKKLKEVWKPAV

SEQ ID NO: 265 - protein, 978 aa, synthetic construct
  REGION 1..978: note = CasX variant
QEIKRINKIRRRLVKDSNTKKAGKTGPMKTLLVRVMTPDLRERLENLRKKPENIPQPISNTSRANLNKLLTDYTEMKKAILHVYWEEFQKDPVGLMSRVAQPASKKIDQNKLKPEMDEKGNLTTAGFACSQCGQPLFVYKLEQVSEKGKAYTNYFGRCNVAEHEKLILLSQLKPEKDSDEAVTYSLGKFGQRALDFYSIHVTKESTHPVKPLAQIAGNRYASGPVGKALSDACMGTIASFLSKYQDIIIEHQKVVKGNQKRLESLRELAGKENLEYPSVTLPPQPHTKEGVDAYNEVIARVRMWVNLNLWQKLKLSRDDAKPLLRLKGFPSFPLVERQANEVDWWDMVCNVKKLINEKKEDGKVFWQNLAGYKRQEALRPYLSSEEDRKKGKKFARYQLGDLLLHLEKKHGEDWGKVYDEAWERIDKKVEGLSKHIKLEEERRSEDAQSKAALTDWLRAKASFVIEGLKEADKDEFCRCELKLQKWYGDLRGKPFAIEAENSILDISGFSKQYNCAFIWQKDGVKKLNLYLIINYFKGGKLRFKKIKPEAFEANRFYTVINKKSGEIVPMEVNFNFDDPNLIILPLAFGKRQGREFIWNDLLSLETGSLKLANGRVIEKTLYNRRTRQDEPALFVALTFERREVLDSSNIKPMNLIGVDRGENIPAVIALTDPEGCPLSRFKDSLGNPTHILRIGESYKEKQRTIQAKKEVEQRRAGGYSRKYASKAKNLADDMVRNTARDLLYYAVTQDAMLIFENLSRGFGRQGKRTFMAERQYTRMEDWLTAKLAYEGLPSKTYLSKTLAQYTSKTCSNCGFTITSADYDRVLEKLKKTATGWMTTINGKELKVEGQITYYNRYKRQNVVKDLSVELDRLSEESVNNDISSWTKGRSGEALSLLKKRFSHRPVQEKFVCLNCGFETHADEQAALNIARSWLFLRSQEYKKYQTNKTTGNTDKRAFVETWQSFYRKKLKEVWKPAV

SEQ ID NO: 266 - protein, 978 aa, synthetic construct
  REGION 1..978: note = CasX variant
QEIKRINKIRRRLVKDSNTKKAGKTGPMKTLLVRVMTPDLRERLENLRKKPENIPQPISNTSRANLNKLLTDYTEMKKAILHVYWEEFQKDPVGLMSRVAQPASKKIDQNKLKPEMDEKGNLTTAGFACSQCGQPLFVYKLEQVSEKGKAYTNYFGRCNVAEHEKLILLAQLKPPKDSDEAVTYSLGKFGQRALDFYSIHVTKESTHPVKPLAQIAGNRYASGPVGKALSDACMGTIASFLSKYQDIIIEHQKVVKGNQKRLESLRELAGKENLEYPSVTLPPQPHTKEGVDAYNEVIARVRMWVNLNLWQKLKLSRDDAKPLLRLKGFPSFPLVERQANEVDWWDMVCNVKKLINEKKEDGKVFWQNLAGYKRQEALRPYLSSEEDRKKGKKFARYQLGDLLLHLEKKHGEDWGKVYDEAWERIDKKVEGLSKHIKLEEERRSEDAQSKAALTDWLRAKASFVIEGLKEADKDEFCRCELKLQKWYGDLRGKPFAIEAENSILDISGFSKQYNCAFIWQKDGVKKLNLYLIINYFKGGKLRFKKIKPEAFEANRFYTVINKKSGEIVPMEVNFNFDDPNLIILPLAFGKRQGREFIWNDLLSLETGSLKLANGRVIEKTLYNRRTRQDEPALFVALTFERREVLDSSNIKPMNLIGVDRGENIPAVIALTDPEGCPLSRFKDSLGNPTHILRIGESYKEKQRTIQAKKEVEQRRAGGYSRKYASKAKNLADDMVRNTARDLLYYAVTQDAMLIFENLSRGFGRQGKRTFMAERQYTRMEDWLTAKLAYEGLPSKTYLSKTLAQYTSKTCSNCGFTITSADYDRVLEKLKKTATGWMTTINGKELKVEGQITYYNRYKRQNVVKDLSVELDRLSEESVNNDISSWTKGRSGEALSLLKKRFSHRPVQEKFVCLNCGFETHADEQAALNIARSWLFLRSQEYKKYQTNKTTGNTDKRAFVETWQSFYRKKLKEVWKPAV

SEQ ID NO: 267 - protein, 977 aa, synthetic construct
  REGION 1..977: note = CasX variant
QEIKRINKIRRRLVKDSNTKKAGKTGPMKTLLVRVMTPDLRERLENLRKKPENIPQPISNTSRANLNKLLTDYTEMKKAILHVYWEEFQKDPVGLMSRVAQPASKKIDQNKLKPEMDEKGNLTTAGFACSQCGQPLFVYKLEQVSEKGKAYTNYFGRCNVAEHEKLILLAQLKPEKDSDEAVTYSLGKFGQRALDFYSIHVTKESTHPVKPLAQIAGNRYASPVGKALSDACMGTIASFLSKYQDIIIEHQKVVKGNQKRLESLRELAGKENLEYPSVTLPPQPHTKEGVDAYNEVIARVRMWVNLNLWQKLKLSRDDAKPLLRLKGFPSFPLVERQANEVDWWDMVCNVKKLINEKKEDGKVFWQNLAGYKRQEALRPYLSSEEDRKKGKKFARYQLGDLLLHLEKKHGEDWGKVYDEAWERIDKKVEGLSKHIKLEEERRSEDAQSKAALTDWLRAKASFVIEGLKEADKDEFCRCELKLQKWYGDLRGKPFAIEAENSILDISGFSKQYNCAFIWQKDGVKKLNLYLIINYFKGGKLRFKKIKPEAFEANRFYTVINKKSGEIVPMEVNFNFDDPNLIILPLAFGKRQGREFIWNDLLSLETGSLKLANGRVIEKTLYNRRTRQDEPALFVALTFERREVLDSSNIKPMNLIGVDRGENIPAVIALTDPEGCPLSRFKDSLGNPTHILRIGESYKEKQRTIQAKKEVEQRRAGGYSRKYASKAKNLADDMVRNTARDLLYYAVTQDAMLIFENLSRGFGRQGKRTFMAERQYTRMEDWLTAKLAYEGLPSKTYLSKTLAQYTSKTCSNCGFTITSADYDRVLEKLKKTATGWMTTINGKELKVEGQITYYNRYKRQNVVKDLSVELDRLSEESVNNDISSWTKGRSGEALSLLKKRFSHRPVQEKFVCLNCGFETHADEQAALNIARSWLFLRSQEYKKYQTNKTTGNTDKRAFVETWQSFYRKKLKEVWKPAV

SEQ ID NO: 268 - protein, 978 aa, synthetic construct; identical to SEQ ID NO: 216
  REGION 1..978: note = CasX variant

SEQ ID NO: 269 - protein, 978 aa, synthetic construct
  REGION 1..978: note = CasX variant
QEIKRINKIRRRLVKDSNTKKAGKTGPMKTLLVRVMTPDLRERLENLRKKPENIPQPISNTSRANLNKLLTDYTEMKKAILHVYWEEFQKDPVGLMSRVAQPASKKIDQNKLKPEMDEKGNLTTAGFACSQCGQPLFVYKLEQVSEKGKAYTNYFGRCNVAEHEKLILLAQLKPEKDSDEAVTYSLGKFGQRALDFYSIHVTKESTHPVKPLAQIAGNRYASGPVGKALSDACMGTIASFLSKYQDIIIEHQKVVKGNQKRLESLRELAGKENLEYPSVTLPPQPHTGEGVDAYNEVIARVRMWVNLNLWQKLKLSRDDAKPLLRLKGFPSFPLVERQANEVDWWDMVCNVKKLINEKKEDGKVFWQNLAGYKRQEALRPYLSSEEDRKKGKKFARYQLGDLLLHLEKKHGEDWGKVYDEAWERIDKKVEGLSKHIKLEEERRSEDAQSKAALTDWLRAKASFVIEGLKEADKDEFCRCELKLQKWYGDLRGKPFAIEAENSILDISGFSKQYNCAFIWQKDGVKKLNLYLIINYFKGGKLRFKKIKPEAFEANRFYTVINKKSGEIVPMEVNFNFDDPNLIILPLAFGKRQGREFIWNDLLSLETGSLKLANGRVIEKTLYNRRTRQDEPALFVALTFERREVLDSSNIKPMNLIGVDRGENIPAVIALTDPEGCPLSRFKDSLGNPTHILRIGESYKEKQRTIQAKKEVEQRRAGGYSRKYASKAKNLADDMVRNTARDLLYYAVTQDAMLIFENLSRGFGRQGKRTFMAERQYTRMEDWLTAKLAYEGLPSKTYLSKTLAQYTSKTCSNCGFTITSADYDRVLEKLKKTATGWMTTINGKELKVEGQITYYNRYKRQNVVKDLSVELDRLSEESVNNDISSWTKGRSGEALSLLKKRFSHRPVQEKFVCLNCGFETHADEQAALNIARSWLFLRSQEYKKYQTNKTTGNTDKRAFVETWQSFYRKKLKEVWKPAV

SEQ ID NO: 270 - protein, 978 aa, synthetic construct
  REGION 1..978: note = CasX variant
QEIKRINKIRRRLVKDSNTKKAGKTGPMKTLLVRVMTPDLRERLENLRKKPENIPQPISNTSRANLNKLLTDYTEMKKAILHVYWEEFQKDPVGLMSRVAQPASKKIDQNKLKPEMDEKGNLTTAGFACSQCGQPLFVYKLEQVSEKGKAYTNYFGRCNVAEHEKLILLAQLKPEKDSDEAVTYSLGKFGQRALDFYSIHVTKESTHPVKPLAQIAGNRYASGPVGKALSDACMGTIASFLSKYQDIIIEHQKVVKGNQKRLESLRELAGKENLEYPSVTLPPQPHTSEGVDAYNEVIARVRMWVNLNLWQKLKLSRDDAKPLLRLKGFPSFPLVERQANEVDWWDMVCNVKKLINEKKEDGKVFWQNLAGYKRQEALRPYLSSEEDRKKGKKFARYQLGDLLLHLEKKHGEDWGKVYDEAWERIDKKVEGLSKHIKLEEERRSEDAQSKAALTDWLRAKASFVIEGLKEADKDEFCRCELKLQKWYGDLRGKPFAIEAENSILDISGFSKQYNCAFIWQKDGVKKLNLYLIINYFKGGKLRFKKIKPEAFEANRFYTVINKKSGEIVPMEVNFNFDDPNLIILPLAFGKRQGREFIWNDLLSLETGSLKLANGRVIEKTLYNRRTRQDEPALFVALTFERREVLDSSNIKPMNLIGVDRGENIPAVIALTDPEGCPLSRFKDSLGNPTHILRIGESYKEKQRTIQAKKEVEQRRAGGYSRKYASKAKNLADDMVRNTARDLLYYAVTQDAMLIFENLSRGFGRQGKRTFMAERQYTRMEDWLTAKLAYEGLPSKTYLSKTLAQYTSKTCSNCGFTITSADYDRVLEKLKKTATGWMTTINGKELKVEGQITYYNRYKRQNVVKDLSVELDRLSEESVNNDISSWTKGRSGEALSLLKKRFSHRPVQEKFVCLNCGFETHADEQAALNIARSWLFLRSQEYKKYQTNKTTGNTDKRAFVETWQSFYRKKLKEVWKPAV

SEQ ID NO: 271 - protein, 978 aa, synthetic construct
  REGION 1..978: note = CasX variant
QEIKRINKIRRRLVKDSNTKKAGKTGPMKTLLVRVMTPDLRERLENLRKKPENIPQPISNTSRANLNKLLTDYTEMKKAILHVYWEEFQKDPVGLMSRVAQPASKKIDQNKLKPEMDEKGNLTTAGFACSQCGQPLFVYKLEQVSEKGKAYTNYFGRCNVAEHEKLILLAQLKPEKDSDEAVTYSLGKFGQRALDFYSIHVTKESTHPVKPLAQIAGNRYASGPVGKALSDACMGTIASFLSKYQDIIIEHQKVVKGNQKRLESLRELAGKENLEYPSVTLPPQPHTKEGLDAYNEVIARVRMWVNLNLWQKLKLSRDDAKPLLRLKGFPSFPLVERQANEVDWWDMVCNVKKLINEKKEDGKVFWQNLAGYKRQEALRPYLSSEEDRKKGKKFARYQLGDLLLHLEKKHGEDWGKVYDEAWERIDKKVEGLSKHIKLEEERRSEDAQSKAALTDWLRAKASFVIEGLKEADKDEFCRCELKLQKWYGDLRGKPFAIEAENSILDISGFSKQYNCAFIWQKDGVKKLNLYLIINYFKGGKLRFKKIKPEAFEANRFYTVINKKSGEIVPMEVNFNFDDPNLIILPLAFGKRQGREFIWNDLLSLETGSLKLANGRVIEKTLYNRRTRQDEPALFVALTFERREVLDSSNIKPMNLIGVDRGENIPAVIALTDPEGCPLSRFKDSLGNPTHILRIGESYKEKQRTIQAKKEVEQRRAGGYSRKYASKAKNLADDMVRNTARDLLYYAVTQDAMLIFENLSRGFGRQGKRTFMAERQYTRMEDWLTAKLAYEGLPSKTYLSKTLAQYTSKTCSNCGFTITSADYDRVLEKLKKTATGWMTTINGKELKVEGQITYYNRYKRQNVVKDLSVELDRLSEESVNNDISSWTKGRSGEALSLLKKRFSHRPVQEKFVCLNCGFETHADEQAALNIARSWLFLRSQEYKKYQTNKTTGNTDKRAFVETWQSFYRKKLKEVWKPAV

SEQ ID NO: 272 - protein, 978 aa, synthetic construct
  REGION 1..978: note = CasX variant
QEIKRINKIRRRLVKDSNTKKAGKTGPMKTLLVRVMTPDLRERLENLRKKPENIPQPISNTSRANLNKLLTDYTEMKKAILHVYWEEFQKDPVGLMSRVAQPASKKIDQNKLKPEMDEKGNLTTAGFACSQCGQPLFVYKLEQVSEKGKAYTNYFGRCNVAEHEKLILLAQLKPEKDSDEAVTYSLGKFGQRALDFYSIHVTKESTHPVKPLAQIAGNRYASGPVGKALSDACMGTIASFLSKYQDIIIEHQKVVKGNQKRLESLRELAGKENLEYPSVTLPPQPHTKEGVDAYNEVIARVRTWVNLNLWQKLKLSRDDAKPLLRLKGFPSFPLVERQANEVDWWDMVCNVKKLINEKKEDGKVFWQNLAGYKRQEALRPYLSSEEDRKKGKKFARYQLGDLLLHLEKKHGEDWGKVYDEAWERIDKKVEGLSKHIKLEEERRSEDAQSKAALTDWLRAKASFVIEGLKEADKDEFCRCELKLQKWYGDLRGKPFAIEAENSILDISGFSKQYNCAFIWQKDGVKKLNLYLIINYFKGGKLRFKKIKPEAFEANRFYTVINKKSGEIVPMEVNFNFDDPNLIILPLAFGKRQGREFIWNDLLSLETGSLKLANGRVIEKTLYNRRTRQDEPALFVALTFERREVLDSSNIKPMNLIGVDRGENIPAVIALTDPEGCPLSRFKDSLGNPTHILRIGESYKEKQRTIQAKKEVEQRRAGGYSRKYASKAKNLADDMVRNTARDLLYYAVTQDAMLIFENLSRGFGRQGKRTFMAERQYTRMEDWLTAKLAYEGLPSKTYLSKTLAQYTSKTCSNCGFTITSADYDRVLEKLKKTATGWMTTINGKELKVEGQITYYNRYKRQNVVKDLSVELDRLSEESVNNDISSWTKGRSGEALSLLKKRFSHRPVQEKFVCLNCGFETHADEQAALNIARSWLFLRSQEYKKYQTNKTTGNTDKRAFVETWQSFYRKKLKEVWKPAV

SEQ ID NO: 273 - protein, 978 aa, synthetic construct
  REGION 1..978: note = CasX variant
QEIKRINKIRRRLVKDSNTKKAGKTGPMKTLLVRVMTPDLRERLENLRKKPENIPQPISNTSRANLNKLLTDYTEMKKAILHVYWEEFQKDPVGLMSRVAQPASKKIDQNKLKPEMDEKGNLTTAGFACSQCGQPLFVYKLEQVSEKGKAYTNYFGRCNVAEHEKLILLAQLKPEKDSDEAVTYSLGKFGQRALDFYSIHVTKESTHPVKPLAQIAGNRYASGPVGKALSDACMGTIASFLSKYQDIIIEHQKVVKGNQKRLESLRELAGKENLEYPSVTLPPQPHTKEGVDAYNEVIARVRWWVNLNLWQKLKLSRDDAKPLLRLKGFPSFPLVERQANEVDWWDMVCNVKKLINEKKEDGKVFWQNLAGYKRQEALRPYLSSEEDRKKGKKFARYQLGDLLLHLEKKHGEDWGKVYDEAWERIDKKVEGLSKHIKLEEERRSEDAQSKAALTDWLRAKASFVIEGLKEADKDEFCRCELKLQKWYGDLRGKPFAIEAENSILDISGFSKQYNCAFIWQKDGVKKLNLYLIINYFKGGKLRFKKIKPEAFEANRFYTVINKKSGEIVPMEVNFNFDDPNLIILPLAFGKRQGREFIWNDLLSLETGSLKLANGRVIEKTLYNRRTRQDEPALFVALTFERREVLDSSNIKPMNLIGVDRGENIPAVIALTDPEGCPLSRFKDSLGNPTHILRIGESYKEKQRTIQAKKEVEQRRAGGYSRKYASKAKNLADDMVRNTARDLLYYAVTQDAMLIFENLSRGFGRQGKRTFMAERQYTRMEDWLTAKLAYEGLPSKTYLSKTLAQYTSKTCSNCGFTITSADYDRVLEKLKKTATGWMTTINGKELKVEGQITYYNRYKRQNVVKDLSVELDRLSEESVNNDISSWTKGRSGEALSLLKKRFSHRPVQEKFVCLNCGFETHADEQAALNIARSWLFLRSQEYKKYQTNKTTGNTDKRAFVETWQSFYRKKLKEVWKPAV

SEQ ID NO: 274 - protein, 978 aa, synthetic construct
  REGION 1..978: note = CasX variant
QEIKRINKIRRRLVKDSNTKKAGKTGPMKTLLVRVMTPDLRERLENLRKKPENIPQPISNTSRANLNKLLTDYTEMKKAILHVYWEEFQKDPVGLMSRVAQPASKKIDQNKLKPEMDEKGNLTTAGFACSQCGQPLFVYKLEQVSEKGKAYTNYFGRCNVAEHEKLILLAQLKPEKDSDEAVTYSLGKFGQRALDFYSIHVTKESTHPVKPLAQIAGNRYASGPVGKALSDACMGTIASFLSKYQDIIIEHQKVVKGNQKRLESLRELAGKENLEYPSVTLPPQPHTKEGVDAYNEVIARVRMWVNLNLWQKLKLSRDDAKPLLRLKNFPSFPLVERQANEVDWWDMVCNVKKLINEKKEDGKVFWQNLAGYKRQEALRPYLSSEEDRKKGKKFARYQLGDLLLHLEKKHGEDWGKVYDEAWERIDKKVEGLSKHIKLEEERRSEDAQSKAALTDWLRAKASFVIEGLKEADKDEFCRCELKLQKWYGDLRGKPFAIEAENSILDISGFSKQYNCAFIWQKDGVKKLNLYLIINYFKGGKLRFKKIKPEAFEANRFYTVINKKSGEIVPMEVNFNFDDPNLIILPLAFGKRQGREFIWNDLLSLETGSLKLANGRVIEKTLYNRRTRQDEPALFVALTFERREVLDSSNIKPMNLIGVDRGENIPAVIALTDPEGCPLSRFKDSLGNPTHILRIGESYKEKQRTIQAKKEVEQRRAGGYSRKYASKAKNLADDMVRNTARDLLYYAVTQDAMLIFENLSRGFGRQGKRTFMAERQYTRMEDWLTAKLAYEGLPSKTYLSKTLAQYTSKTCSNCGFTITSADYDRVLEKLKKTATGWMTTINGKELKVEGQITYYNRYKRQNVVKDLSVELDRLSEESVNNDISSWTKGRSGEALSLLKKRFSHRPVQEKFVCLNCGFETHADEQAALNIARSWLFLRSQEYKKYQTNKTTGNTDKRAFVETWQSFYRKKLKEVWKPAV

SEQ ID NO: 275 - protein, 978 aa, synthetic construct
  REGION 1..978: note = CasX variant
QEIKRINKIRRRLVKDSNTKKAGKTGPMKTLLVRVMTPDLRERLENLRKKPENIPQPISNTSRANLNKLLTDYTEMKKAILHVYWEEFQKDPVGLMSRVAQPASKKIDQNKLKPEMDEKGNLTTAGFACSQCGQPLFVYKLEQVSEKGKAYTNYFGRCNVAEHEKLILLAQLKPEKDSDEAVTYSLGKFGQRALDFYSIHVTKESTHPVKPLAQIAGNRYASGPVGKALSDACMGTIASFLSKYQDIIIEHQKVVKGNQKRLESLRELAGKENLEYPSVTLPPQPHTKEGVDAYNEVIARVRMWVNLNLWQKLKLSRDDAKPLLRLKGFPQFPLVERQANEVDWWDMVCNVKKLINEKKEDGKVFWQNLAGYKRQEALRPYLSSEEDRKKGKKFARYQLGDLLLHLEKKHGEDWGKVYDEAWERIDKKVEGLSKHIKLEEERRSEDAQSKAALTDWLRAKASFVIEGLKEADKDEFCRCELKLQKWYGDLRGKPFAIEAENSILDISGFSKQYNCAFIWQKDGVKKLNLYLIINYFKGGKLRFKKIKPEAFEANRFYTVINKKSGEIVPMEVNFNFDDPNLIILPLAFGKRQGREFIWNDLLSLETGSLKLANGRVIEKTLYNRRTRQDEPALFVALTFERREVLDSSNIKPMNLIGVDRGENIPAVIALTDPEGCPLSRFKDSLGNPTHILRIGESYKEKQRTIQAKKEVEQRRAGGYSRKYASKAKNLADDMVRNTARDLLYYAVTQDAMLIFENLSRGFGRQGKRTFMAERQYTRMEDWLTAKLAYEGLPSKTYLSKTLAQYTSKTCSNCGFTITSADYDRVLEKLKKTATGWMTTINGKELKVEGQITYYNRYKRQNVVKDLSVELDRLSEESVNNDISSWTKGRSGEALSLLKKRFSHRPVQEKFVCLNCGFETHADEQAALNIARSWLFLRSQEYKKYQTNKTTGNTDKRAFVETWQSFYRKKLKEVWKPAV

SEQ ID NO: 276 - protein, 979 aa, synthetic construct
  REGION 1..979: note = CasX variant
QEIKRINKIRRRLVKDSNTKKAGKTGPMKTLLVRVMTPDLRERLENLRKKPENIPQPISNTSRANLNKLLTDYTEMKKAILHVYWEEFQKDPVGLMSRVAQPASKKIDQNKLKPEMDEKGNLTTAGFACSQCGQPLFVYKLEQVSEKGKAYTNYFGRCNVAEHEKLILLAQLKPEKDSDEAVTYSLGKFGQRALDFYSIHVTKESTHPVKPLAQIAGNRYASGPVGKALSDACMGTIASFLSKYQDIIIEHQKVVKGNQKRLESLRELAGKENLEYPSVTLPPQPHTKEGVDAYNEVIARVRMWVNLNLWQKLKLSRDDAKPLLRLKGFPSFPALVERQANEVDWWDMVCNVKKLINEKKEDGKVFWQNLAGYKRQEALRPYLSSEEDRKKGKKFARYQLGDLLLHLEKKHGEDWGKVYDEAWERIDKKVEGLSKHIKLEEERRSEDAQSKAALTDWLRAKASFVIEGLKEADKDEFCRCELKLQKWYGDLRGKPFAIEAENSILDISGFSKQYNCAFIWQKDGVKKLNLYLIINYFKGGKLRFKKIKPEAFEANRFYTVINKKSGEIVPMEVNFNFDDPNLIILPLAFGKRQGREFIWNDLLSLETGSLKLANGRVIEKTLYNRRTRQDEPALFVALTFERREVLDSSNIKPMNLIGVDRGENIPAVIALTDPEGCPLSRFKDSLGNPTHILRIGESYKEKQRTIQAKKEVEQRRAGGYSRKYASKAKNLADDMVRNTARDLLYYAVTQDAMLIFENLSRGFGRQGKRTFMAERQYTRMEDWLTAKLAYEGLPSKTYLSKTLAQYTSKTCSNCGFTITSADYDRVLEKLKKTATGWMTTINGKELKVEGQITYYNRYKRQNVVKDLSVELDRLSEESVNNDISSWTKGRSGEALSLLKKRFSHRPVQEKFVCLNCGFETHADEQAALNIARSWLFLRSQEYKKYQTNKTTGNTDKRAFVETWQSFYRKKLKEVWKPAV

SEQ ID NO: 277 - protein, 977 aa, synthetic construct
  REGION 1..977: note = CasX variant
QEIKRINKIRRRLVKDSNTKKAGKTGPMKTLLVRVMTPDLRERLENLRKKPENIPQPISNTSRANLNKLLTDYTEMKKAILHVYWEEFQKDPVGLMSRVAQPASKKIDQNKLKPEMDEKGNLTTAGFACSQCGQPLFVYKLEQVSEKGKAYTNYFGRCNVAEHEKLILLAQLKPEKDSDEAVTYSLGKFGQRALDFYSIHVTKESTHPVKPLAQIAGNRYASGPVGKALSDACMGTIASFLSKYQDIIIEHQKVVKGNQKRLESLRELAGKENLEYPSVTLPPQPHTKEGVDAYNEVIARVRMWVNLNLWQKLKLSRDDAKPLLRLKGFPSFPLERQANEVDWWDMVCNVKKLINEKKEDGKVFWQNLAGYKRQEALRPYLSSEEDRKKGKKFARYQLGDLLLHLEKKHGEDWGKVYDEAWERIDKKVEGLSKHIKLEEERRSEDAQSKAALTDWLRAKASFVIEGLKEADKDEFCRCELKLQKWYGDLRGKPFAIEAENSILDISGFSKQYNCAFIWQKDGVKKLNLYLIINYFKGGKLRFKKIKPEAFEANRFYTVINKKSGEIVPMEVNFNFDDPNLIILPLAFGKRQGREFIWNDLLSLETGSLKLANGRVIEKTLYNRRTRQDEPALFVALTFERREVLDSSNIKPMNLIGVDRGENIPAVIALTDPEGCPLSRFKDSLGNPTHILRIGESYKEKQRTIQAKKEVEQRRAGGYSRKYASKAKNLADDMVRNTARDLLYYAVTQDAMLIFENLSRGFGRQGKRTFMAERQYTRMEDWLTAKLAYEGLPSKTYLSKTLAQYTSKTCSNCGFTITSADYDRVLEKLKKTATGWMTTINGKELKVEGQITYYNRYKRQNVVKDLSVELDRLSEESVNNDISSWTKGRSGEALSLLKKRFSHRPVQEKFVCLNCGFETHADEQAALNIARSWLFLRSQEYKKYQTNKTTGNTDKRAFVETWQSFYRKKLKEVWKPAV

SEQ ID NO: 278 - protein, 978 aa, synthetic construct
  REGION 1..978: note = CasX variant
QEIKRINKIRRRLVKDSNTKKAGKTGPMKTLLVRVMTPDLRERLENLRKKPENIPQPISNTSRANLNKLLTDYTEMKKAILHVYWEEFQKDPVGLMSRVAQPASKKIDQNKLKPEMDEKGNLTTAGFACSQCGQPLFVYKLEQVSEKGKAYTNYFGRCNVAEHEKLILLAQLKPEKDSDEAVTYSLGKFGQRALDFYSIHVTKESTHPVKPLAQIAGNRYASGPVGKALSDACMGTIASFLSKYQDIIIEHQKVVKGNQKRLESLRELAGKENLEYPSVTLPPQPHTKEGVDAYNEVIARVRMWVNLNLWQKLKLSRDDAKPLLRLKGFPSFPLVPRQANEVDWWDMVCNVKKLINEKKEDGKVFWQNLAGYKRQEALRPYLSSEEDRKKGKKFARYQLGDLLLHLEKKHGEDWGKVYDEAWERIDKKVEGLSKHIKLEEERRSEDAQSKAALTDWLRAKASFVIEGLKEADKDEFCRCELKLQKWYGDLRGKPFAIEAENSILDISGFSKQYNCAFIWQKDGVKKLNLYLIINYFKGGKLRFKKIKPEAFEANRFYTVINKKSGEIVPMEVNFNFDDPNLIILPLAFGKRQGREFIWNDLLSLETGSLKLANGRVIEKTLYNRRTRQDEPALFVALTFERREVLDSSNIKPMNLIGVDRGENIPAVIALTDPEGCPLSRFKDSLGNPTHILRIGESYKEKQRTIQAKKEVEQRRAGGYSRKYASKAKNLADDMVRNTARDLLYYAVTQDAMLIFENLSRGFGRQGKRTFMAERQYTRMEDWLTAKLAYEGLPSKTYLSKTLAQYTSKTCSNCGFTITSADYDRVLEKLKKTATGWMTTINGKELKVEGQITYYNRYKRQNVVKDLSVELDRLSEESVNNDISSWTKGRSGEALSLLKKRFSHRPVQEKFVCLNCGFETHADEQAALNIARSWLFLRSQEYKKYQTNKTTGNTDKRAFVETWQSFYRKKLKEVWKPAV

SEQ ID NO: 279 - protein, 977 aa, synthetic construct
  REGION 1..977: note = CasX variant
QEIKRINKIRRRLVKDSNTKKAGKTGPMKTLLVRVMTPDLRERLENLRKKPENIPQPISNTSRANLNKLLTDYTEMKKAILHVYWEEFQKDPVGLMSRVAQPASKKIDQNKLKPEMDEKGNLTTAGFACSQCGQPLFVYKLEQVSEKGKAYTNYFGRCNVAEHEKLILLAQLKPEKDSDEAVTYSLGKFGQRALDFYSIHVTKESTHPVKPLAQIAGNRYASGPVGKALSDACMGTIASFLSKYQDIIIEHQKVVKGNQKRLESLRELAGKENLEYPSVTLPPQPHTKEGVDAYNEVIARVRMWVNLNLWQKLKLSRDDAKPLLRLKGFPSFPLVRQANEVDWWDMVCNVKKLINEKKEDGKVFWQNLAGYKRQEALRPYLSSEEDRKKGKKFARYQLGDLLLHLEKKHGEDWGKVYDEAWERIDKKVEGLSKHIKLEEERRSEDAQSKAALTDWLRAKASFVIEGLKEADKDEFCRCELKLQKWYGDLRGKPFAIEAENSILDISGFSKQYNCAFIWQKDGVKKLNLYLIINYFKGGKLRFKKIKPEAFEANRFYTVINKKSGEIVPMEVNFNFDDPNLIILPLAFGKRQGREFIWNDLLSLETGSLKLANGRVIEKTLYNRRTRQDEPALFVALTFERREVLDSSNIKPMNLIGVDRGENIPAVIALTDPEGCPLSRFKDSLGNPTHILRIGESYKEKQRTIQAKKEVEQRRAGGYSRKYASKAKNLADDMVRNTARDLLYYAVTQDAMLIFENLSRGFGRQGKRTFMAERQYTRMEDWLTAKLAYEGLPSKTYLSKTLAQYTSKTCSNCGFTITSADYDRVLEKLKKTATGWMTTINGKELKVEGQITYYNRYKRQNVVKDLSVELDRLSEESVNNDISSWTKGRSGEALSLLKKRFSHRPVQEKFVCLNCGFETHADEQAALNIARSWLFLRSQEYKKYQTNKTTGNTDKRAFVETWQSFYRKKLKEVWKPAV

SEQ ID NO: 280 - protein, 978 aa, synthetic construct
  REGION 1..978: note = CasX variant
QEIKRINKIRRRLVKDSNTKKAGKTGPMKTLLVRVMTPDLRERLENLRKKPENIPQPISNTSRANLNKLLTDYTEMKKAILHVYWEEFQKDPVGLMSRVAQPASKKIDQNKLKPEMDEKGNLTTAGFACSQCGQPLFVYKLEQVSEKGKAYTNYFGRCNVAEHEKLILLAQLKPEKDSDEAVTYSLGKFGQRALDFYSIHVTKESTHPVKPLAQIAGNRYASGPVGKALSDACMGTIASFLSKYQDIIIEHQKVVKGNQKRLESLRELAGKENLEYPSVTLPPQPHTKEGVDAYNEVIARVRMWVNLNLWQKLKLSRDDAKPLLRLKGFPSFPLVLRQANEVDWWDMVCNVKKLINEKKEDGKVFWQNLAGYKRQEALRPYLSSEEDRKKGKKFARYQLGDLLLHLEKKHGEDWGKVYDEAWERIDKKVEGLSKHIKLEEERRSEDAQSKAALTDWLRAKASFVIEGLKEADKDEFCRCELKLQKWYGDLRGKPFAIEAENSILDISGFSKQYNCAFIWQKDGVKKLNLYLIINYFKGGKLRFKKIKPEAFEANRFYTVINKKSGEIVPMEVNFNFDDPNLIILPLAFGKRQGREFIWNDLLSLETGSLKLANGRVIEKTLYNRRTRQDEPALFVALTFERREVLDSSNIKPMNLIGVDRGENIPAVIALTDPEGCPLSRFKDSLGNPTHILRIGESYKEKQRTIQAKKEVEQRRAGGYSRKYASKAKNLADDMVRNTARDLLYYAVTQDAMLIFENLSRGFGRQGKRTFMAERQYTRMEDWLTAKLAYEGLPSKTYLSKTLAQYTSKTCSNCGFTITSADYDRVLEKLKKTATGWMTTINGKELKVEGQITYYNRYKRQNVVKDLSVELDRLSEESVNNDISSWTKGRSGEALSLLKKRFSHRPVQEKFVCLNCGFETHADEQAALNIARSWLFLRSQEYKKYQTNKTTGNTDKRAFVETWQSFYRKKLKEVWKPAV

SEQ ID NO: 281 - protein, 978 aa, synthetic construct
  REGION 1..978: note = CasX variant
QEIKRINKIRRRLVKDSNTKKAGKTGPMKTLLVRVMTPDLRERLENLRKKPENIPQPISNTSRANLNKLLTDYTEMKKAILHVYWEEFQKDPVGLMSRVAQPASKKIDQNKLKPEMDEKGNLTTAGFACSQCGQPLFVYKLEQVSEKGKAYTNYFGRCNVAEHEKLILLAQLKPEKDSDEAVTYSLGKFGQRALDFYSIHVTKESTHPVKPLAQIAGNRYASGPVGKALSDACMGTIASFLSKYQDIIIEHQKVVKGNQKRLESLRELAGKENLEYPSVTLPPQPHTKEGVDAYNEVIARVRMWVNLNLWQKLKLSRDDAKPLLRLKGFPSFPLVRRQANEVDWWDMVCNVKKLINEKKEDGKVFWQNLAGYKRQEALRPYLSSEEDRKKGKKFARYQLGDLLLHLEKKHGEDWGKVYDEAWERIDKKVEGLSKHIKLEEERRSEDAQSKAALTDWLRAKASFVIEGLKEADKDEFCRCELKLQKWYGDLRGKPFAIEAENSILDISGFSKQYNCAFIWQKDGVKKLNLYLIINYFKGGKLRFKKIKPEAFEANRFYTVINKKSGEIVPMEVNFNFDDPNLIILPLAFGKRQGREFIWNDLLSLETGSLKLANGRVIEKTLYNRRTRQDEPALFVALTFERREVLDSSNIKPMNLIGVDRGENIPAVIALTDPEGCPLSRFKDSLGNPTHILRIGESYKEKQRTIQAKKEVEQRRAGGYSRKYASKAKNLADDMVRNTARDLLYYAVTQDAMLIFENLSRGFGRQGKRTFMAERQYTRMEDWLTAKLAYEGLPSKTYLSKTLAQYTSKTCSNCGFTITSADYDRVLEKLKKTATGWMTTINGKELKVEGQITYYNRYKRQNVVKDLSVELDRLSEESVNNDISSWTKGRSGEALSLLKKRFSHRPVQEKFVCLNCGFETHADEQAALNIARSWLFLRSQEYKKYQTNKTTGNTDKRAFVETWQSFYRKKLKEVWKPAV

SEQ ID NO: 282 - protein, 979 aa, synthetic construct
  REGION 1..979: note = CasX variant
QEIKRINKIRRRLVKDSNTKKAGKTGPMKTLLVRVMTPDLRERLENLRKKPENIPQPISNTSRANLNKLLTDYTEMKKAILHVYWEEFQKDPVGLMSRVAQPASKKIDQNKLKPEMDEKGNLTTAGFACSQCGQPLFVYKLEQVSEKGKAYTNYFGRCNVAEHEKLILLAQLKPEKDSDEAVTYSLGKFGQRALDFYSIHVTKESTHPVKPLAQIAGNRYASGPVGKALSDACMGTIASFLSKYQDIIIEHQKVVKGNQKRLESLRELAGKENLEYPSVTLPPQPHTKEGVDAYNEVIARVRMWVNLNLWQKLKLSRDDAKPLLRLKGFPSFPLVERQQANEVDWWDMVCNVKKLINEKKEDGKVFWQNLAGYKRQEALRPYLSSEEDRKKGKKFARYQLGDLLLHLEKKHGEDWGKVYDEAWERIDKKVEGLSKHIKLEEERRSEDAQSKAALTDWLRAKASFVIEGLKEADKDEFCRCELKLQKWYGDLRGKPFAIEAENSILDISGFSKQYNCAFIWQKDGVKKLNLYLIINYFKGGKLRFKKIKPEAFEANRFYTVINKKSGEIVPMEVNFNFDDPNLIILPLAFGKRQGREFIWNDLLSLETGSLKLANGRVIEKTLYNRRTRQDEPALFVALTFERREVLDSSNIKPMNLIGVDRGENIPAVIALTDPEGCPLSRFKDSLGNPTHILRIGESYKEKQRTIQAKKEVEQRRAGGYSRKYASKAKNLADDMVRNTARDLLYYAVTQDAMLIFENLSRGFGRQGKRTFMAERQYTRMEDWLTAKLAYEGLPSKTYLSKTLAQYTSKTCSNCGFTITSADYDRVLEKLKKTATGWMTTINGKELKVEGQITYYNRYKRQNVVKDLSVELDRLSEESVNNDISSWTKGRSGEALSLLKKRFSHRPVQEKFVCLNCGFETHADEQAALNIARSWLFLRSQEYKKYQTNKTTGNTDKRAFVETWQSFYRKKLKEVWKPAV

SEQ ID NO: 283 - protein, 979 aa, synthetic construct
  REGION 1..979: note = CasX variant
QEIKRINKIRRRLVKDSNTKKAGKTGPMKTLLVRVMTPDLRERLENLRKKPENIPQPISNTSRANLNKLLTDYTEMKKAILHVYWEEFQKDPVGLMSRVAQPASKKIDQNKLKPEMDEKGNLTTAGFACSQCGQPLFVYKLEQVSEKGKAYTNYFGRCNVAEHEKLILLAQLKPEKDSDEAVTYSLGKFGQRALDFYSIHVTKESTHPVKPLAQIAGNRYASGPVGKALSDACMGTIASFLSKYQDIIIEHQKVVKGNQKRLESLRELAGKENLEYPSVTLPPQPHTKEGVDAYNEVIARVRMWVNLNLWQKLKLSRDDAKPLLRLKGFPSFPLVERQANHEVDWWDMVCNVKKLINEKKEDGKVFWQNLAGYKRQEALRPYLSSEEDRKKGKKFARYQLGDLLLHLEKKHGEDWGKVYDEAWERIDKKVEGLSKHIKLEEERRSEDAQSKAALTDWLRAKASFVIEGLKEADKDEFCRCELKLQKWYGDLRGKPFAIEAENSILDISGFSKQYNCAFIWQKDGVKKLNLYLIINYFKGGKLRFKKIKPEAFEANRFYTVINKKSGEIVPMEVNFNFDDPNLIILPLAFGKRQGREFIWNDLLSLETGSLKLANGRVIEKTLYNRRTRQDEPALFVALTFERREVLDSSNIKPMNLIGVDRGENIPAVIALTDPEGCPLSRFKDSLGNPTHILRIGESYKEKQRTIQAKKEVEQRRAGGYSRKYASKAKNLADDMVRNTARDLLYYAVTQDAMLIFENLSRGFGRQGKRTFMAERQYTRMEDWLTAKLAYEGLPSKTYLSKTLAQYTSKTCSNCGFTITSADYDRVLEKLKKTATGWMTTINGKELKVEGQITYYNRYKRQNVVKDLSVELDRLSEESVNNDISSWTKGRSGEALSLLKKRFSHRPVQEKFVCLNCGFETHADEQAALNIARSWLFLRSQEYKKYQTNKTTGNTDKRAFVETWQSFYRKKLKEVWKPAV

SEQ ID NO: 284 - protein, 979 aa, synthetic construct
  REGION 1..979: note = CasX variant
QEIKRINKIRRRLVKDSNTKKAGKTGPMKTLLVRVMTPDLRERLENLRKKPENIPQPISNTSRANLNKLLTDYTEMKKAILHVYWEEFQKDPVGLMSRVAQPASKKIDQNKLKPEMDEKGNLTTAGFACSQCGQPLFVYKLEQVSEKGKAYTNYFGRCNVAEHEKLILLAQLKPEKDSDEAVTYSLGKFGQRALDFYSIHVTKESTHPVKPLAQIAGNRYASGPVGKALSDACMGTIASFLSKYQDIIIEHQKVVKGNQKRLESLRELAGKENLEYPSVTLPPQPHTKEGVDAYNEVIARVRMWVNLNLWQKLKLSRDDAKPLLRLKGFPSFPLVERQANAEVDWWDMVCNVKKLINEKKEDGKVFWQNLAGYKRQEALRPYLSSEEDRKKGKKFARYQLGDLLLHLEKKHGEDWGKVYDEAWERIDKKVEGLSKHIKLEEERRSEDAQSKAALTDWLRAKASFVIEGLKEADKDEFCRCELKLQKWYGDLRGKPFAIEAENSILDISGFSKQYNCAFIWQKDGVKKLNLYLIINYFKGGKLRFKKIKPEAFEANRFYTVINKKSGEIVPMEVNFNFDDPNLIILPLAFGKRQGREFIWNDLLSLETGSLKLANGRVIEKTLYNRRTRQDEPALFVALTFERREVLDSSNIKPMNLIGVDRGENIPAVIALTDPEGCPLSRFKDSLGNPTHILRIGESYKEKQRTIQAKKEVEQRRAGGYSRKYASKAKNLADDMVRNTARDLLYYAVTQDAMLIFENLSRGFGRQGKRTFMAERQYTRMEDWLTAKLAYEGLPSKTYLSKTLAQYTSKTCSNCGFTITSADYDRVLEKLKKTATGWMTTINGKELKVEGQITYYNRYKRQNVVKDLSVELDRLSEESVNNDISSWTKGRSGEALSLLKKRFSHRPVQEKFVCLNCGFETHADEQAALNIARSWLFLRSQEYKKYQTNKTTGNTDKRAFVETWQSFYRKKLKEVWKPAV

SEQ ID NO: 285 - protein, 979 aa, synthetic construct
  REGION 1..979: note = CasX variant
QEIKRINKIRRRLVKDSNTKKAGKTGPMKTLLVRVMTPDLRERLENLRKKPENIPQPISNTSRANLNKLLTDYTEMKKAILHVYWEEFQKDPVGLMSRVAQPASKKIDQNKLKPEMDEKGNLTTAGFACSQCGQPLFVYKLEQVSEKGKAYTNYFGRCNVAEHEKLILLAQLKPEKDSDEAVTYSLGKFGQRALDFYSIHVTKESTHPVKPLAQIAGNRYASGPVGKALSDACMGTIASFLSKYQDIIIEHQKVVKGNQKRLESLRELAGKENLEYPSVTLPPQPHTKEGVDAYNEVIARVRMWVNLNLWQKLKLSRDDAKPLLRLKGFPSFPLVERQANEVDDWWDMVCNVKKLINEKKEDGKVFWQNLAGYKRQEALRPYLSSEEDRKKGKKFARYQLGDLLLHLEKKHGEDWGKVYDEAWERIDKKVEGLSKHIKLEEERRSEDAQSKAALTDWLRAKASFVIEGLKEADKDEFCRCELKLQKWYGDLRGKPFAIEAENSILDISGFSKQYNCAFIWQKDGVKKLNLYLIINYFKGGKLRFKKIKPEAFEANRFYTVINKKSGEIVPMEVNFNFDDPNLIILPLAFGKRQGREFIWNDLLSLETGSLKLANGRVIEKTLYNRRTRQDEPALFVALTFERREVLDSSNIKPMNLIGVDRGENIPAVIALTDPEGCPLSRFKDSLGNPTHILRIGESYKEKQRTIQAKKEVEQRRAGGYSRKYASKAKNLADDMVRNTARDLLYYAVTQDAMLIFENLSRGFGRQGKRTFMAERQYTRMEDWLTAKLAYEGLPSKTYLSKTLAQYTSKTCSNCGFTITSADYDRVLEKLKKTATGWMTTINGKELKVEGQITYYNRYKRQNVVKDLSVELDRLSEESVNNDISSWTKGRSGEALSLLKKRFSHRPVQEKFVCLNCGFETHADEQAALNIARSWLFLRSQEYKKYQTNKTTGNTDKRAFVETWQSFYRKKLKEVWKPAV

SEQ ID NO: 286 - protein, 979 aa, synthetic construct
  REGION 1..979: note = CasX variant
QEIKRINKIRRRLVKDSNTKKAGKTGPMKTLLVRVMTPDLRERLENLRKKPENIPQPISNTSRANLNKLLTDYTEMKKAILHVYWEEFQKDPVGLMSRVAQPASKKIDQNKLKPEMDEKGNLTTAGFACSQCGQPLFVYKLEQVSEKGKAYTNYFGRCNVAEHEKLILLAQLKPEKDSDEAVTYSLGKFGQRALDFYSIHVTKESTHPVKPLAQIAGNRYASGPVGKALSDACMGTIASFLSKYQDIIIEHQKVVKGNQKRLESLRELAGKENLEYPSVTLPPQPHTKEGVDAYNEVIARVRMWVNLNLWQKLKLSRDDAKPLLRLKGFPSFPLVERQANEVDWWPDMVCNVKKLINEKKEDGKVFWQNLAGYKRQEALRPYLSSEEDRKKGKKFARYQLGDLLLHLEKKHGEDWGKVYDEAWERIDKKVEGLSKHIKLEEERRSEDAQSKAALTDWLRAKASFVIEGLKEADKDEFCRCELKLQKWYGDLRGKPFAIEAENSILDISGFSKQYNCAFIWQKDGVKKLNLYLIINYFKGGKLRFKKIKPEAFEANRFYTVINKKSGEIVPMEVNFNFDDPNLIILPLAFGKRQGREFIWNDLLSLETGSLKLANGRVIEKTLYNRRTRQDEPALFVALTFERREVLDSSNIKPMNLIGVDRGENIPAVIALTDPEGCPLSRFKDSLGNPTHILRIGESYKEKQRTIQAKKEVEQRRAGGYSRKYASKAKNLADDMVRNTARDLLYYAVTQDAMLIFENLSRGFGRQGKRTFMAERQYTRMEDWLTAKLAYEGLPSKTYLSKTLAQYTSKTCSNCGFTITSADYDRVLEKLKKTATGWMTTINGKELKVEGQITYYNRYKRQNVVKDLSVELDRLSEESVNNDISSWTKGRSGEALSLLKKRFSHRPVQEKFVCLNCGFETHADEQAALNIARSWLFLRSQEYKKYQTNKTTGNTDKRAFVETWQSFYRKKLKEVWKPAV

SEQ ID NO: 287 - protein, 978 aa, synthetic construct
  REGION 1..978: note = CasX variant
QEIKRINKIRRRLVKDSNTKKAGKTGPMKTLLVRVMTPDLRERLENLRKKPENIPQPISNTSRANLNKLLTDYTEMKKAILHVYWEEFQKDPVGLMSRVAQPASKKIDQNKLKPEMDEKGNLTTAGFACSQCGQPLFVYKLEQVSEKGKAYTNYFGRCNVAEHEKLILLAQLKPEKDSDEAVTYSLGKFGQRALDFYSIHVTKESTHPVKPLAQIAGNRYASGPVGKALSDACMGTIASFLSKYQDIIIEHQKVVKGNQKRLESLRELAGKENLEYPSVTLPPQPHTKEGVDAYNEVIARVRMWVNLNLWQKLKLSRDDAKPLLRLKGFPSFPLVERQANEVDWWDMVCNVKKLINEKKEDGKVFWQNLAGYKRQEALRPYLSSEEDRKKGKKFARTQLGDLLLHLEKKHGEDWGKVYDEAWERIDKKVEGLSKHIKLEEERRSEDAQSKAALTDWLRAKASFVIEGLKEADKDEFCRCELKLQKWYGDLRGKPFAIEAENSILDISGFSKQYNCAFIWQKDGVKKLNLYLIINYFKGGKLRFKKIKPEAFEANRFYTVINKKSGEIVPMEVNFNFDDPNLIILPLAFGKRQGREFIWNDLLSLETGSLKLANGRVIEKTLYNRRTRQDEPALFVALTFERREVLDSSNIKPMNLIGVDRGENIPAVIALTDPEGCPLSRFKDSLGNPTHILRIGESYKEKQRTIQAKKEVEQRRAGGYSRKYASKAKNLADDMVRNTARDLLYYAVTQDAMLIFENLSRGFGRQGKRTFMAERQYTRMEDWLTAKLAYEGLPSKTYLSKTLAQYTSKTCSNCGFTITSADYDRVLEKLKKTATGWMTTINGKELKVEGQITYYNRYKRQNVVKDLSVELDRLSEESVNNDISSWTKGRSGEALSLLKKRFSHRPVQEKFVCLNCGFETHADEQAALNIARSWLFLRSQEYKKYQTNKTTGNTDKRAFVETWQSFYRKKLKEVWKPAV

SEQ ID NO: 288 - protein, 978 aa, synthetic construct
  REGION 1..978: note = CasX variant
QEIKRINKIRRRLVKDSNTKKAGKTGPMKTLLVRVMTPDLRERLENLRKKPENIPQPISNTSRANLNKLLTDYTEMKKAILHVYWEEFQKDPVGLMSRVAQPASKKIDQNKLKPEMDEKGNLTTAGFACSQCGQPLFVYKLEQVSEKGKAYTNYFGRCNVAEHEKLILLAQLKPEKDSDEAVTYSLGKFGQRALDFYSIHVTKESTHPVKPLAQIAGNRYASGPVGKALSDACMGTIASFLSKYQDIIIEHQKVVKGNQKRLESLRELAGKENLEYPSVTLPPQPHTKEGVDAYNEVIARVRMWVNLNLWQKLKLSRDDAKPLLRLKGFPSFPLVERQANEVDWWDMVCNVKKLINEKKEDGKVFWQNLAGYKRQEALRPYLSSEEDRKKGKKFARYQLMDLLLHLEKKHGEDWGKVYDEAWERIDKKVEGLSKHIKLEEERRSEDAQSKAALTDWLRAKASFVIEGLKEADKDEFCRCELKLQKWYGDLRGKPFAIEAENSILDISGFSKQYNCAFIWQKDGVKKLNLYLIINYFKGGKLRFKKIKPEAFEANRFYTVINKKSGEIVPMEVNFNFDDPNLIILPLAFGKRQGREFIWNDLLSLETGSLKLANGRVIEKTLYNRRTRQDEPALFVALTFERREVLDSSNIKPMNLIGVDRGENIPAVIALTDPEGCPLSRFKDSLGNPTHILRIGESYKEKQRTIQAKKEVEQRRAGGYSRKYASKAKNLADDMVRNTARDLLYYAVTQDAMLIFENLSRGFGRQGKRTFMAERQYTRMEDWLTAKLAYEGLPSKTYLSKTLAQYTSKTCSNCGFTITSADYDRVLEKLKKTATGWMTTINGKELKVEGQITYYNRYKRQNVVKDLSVELDRLSEESVNNDISSWTKGRSGEALSLLKKRFSHRPVQEKFVCLNCGFETHADEQAALNIARSWLFLRSQEYKKYQTNKTTGNTDKRAFVETWQSFYRKKLKEVWKPAV

SEQ ID NO: 289 - protein, 978 aa, synthetic construct
  REGION 1..978: note = CasX variant
QEIKRINKIRRRLVKDSNTKKAGKTGPMKTLLVRVMTPDLRERLENLRKKPENIPQPISNTSRANLNKLLTDYTEMKKAILHVYWEEFQKDPVGLMSRVAQPASKKIDQNKLKPEMDEKGNLTTAGFACSQCGQPLFVYKLEQVSEKGKAYTNYFGRCNVAEHEKLILLAQLKPEKDSDEAVTYSLGKFGQRALDFYSIHVTKESTHPVKPLAQIAGNRYASGPVGKALSDACMGTIASFLSKYQDIIIEHQKVVKGNQKRLESLRELAGKENLEYPSVTLPPQPHTKEGVDAYNEVIARVRMWVNLNLWQKLKLSRDDAKPLLRLKGFPSFPLVERQANEVDWWDMVCNVKKLINEKKEDGKVFWQNLAGYKRQEALRPYLSSEEDRKKGKKFARYQLGDLLNHLEKKHGEDWGKVYDEAWERIDKKVEGLSKHIKLEEERRSEDAQSKAALTDWLRAKASFVIEGLKEADKDEFCRCELKLQKWYGDLRGKPFAIEAENSILDISGFSKQYNCAFIWQKDGVKKLNLYLIINYFKGGKLRFKKIKPEAFEANRFYTVINKKSGEIVPMEVNFNFDDPNLIILPLAFGKRQGREFIWNDLLSLETGSLKLANGRVIEKTLYNRRTRQDEPALFVALTFERREVLDSSNIKPMNLIGVDRGENIPAVIALTDPEGCPLSRFKDSLGNPTHILRIGESYKEKQRTIQAKKEVEQRRAGGYSRKYASKAKNLADDMVRNTARDLLYYAVTQDAMLIFENLSRGFGRQGKRTFMAERQYTRMEDWLTAKLAYEGLPSKTYLSKTLAQYTSKTCSNCGFTITSADYDRVLEKLKKTATGWMTTINGKELKVEGQITYYNRYKRQNVVKDLSVELDRLSEESVNNDISSWTKGRSGEALSLLKKRFSHRPVQEKFVCLNCGFETHADEQAALNIARSWLFLRSQEYKKYQTNKTTGNTDKRAFVETWQSFYRKKLKEVWKPAV

SEQ ID NO: 290 - protein, 978 aa, synthetic construct
  REGION 1..978: note = CasX variant
QEIKRINKIRRRLVKDSNTKKAGKTGPMKTLLVRVMTPDLRERLENLRKKPENIPQPISNTSRANLNKLLTDYTEMKKAILHVYWEEFQKDPVGLMSRVAQPASKKIDQNKLKPEMDEKGNLTTAGFACSQCGQPLFVYKLEQVSEKGKAYTNYFGRCNVAEHEKLILLAQLKPEKDSDEAVTYSLGKFGQRALDFYSIHVTKESTHPVKPLAQIAGNRYASGPVGKALSDACMGTIASFLSKYQDIIIEHQKVVKGNQKRLESLRELAGKENLEYPSVTLPPQPHTKEGVDAYNEVIARVRMWVNLNLWQKLKLSRDDAKPLLRLKGFPSFPLVERQANEVDWWDMVCNVKKLINEKKEDGKVFWQNLAGYKRQEALRPYLSSEEDRKKGKKFARYQLGDLLWHLEKKHGEDWGKVYDEAWERIDKKVEGLSKHIKLEEERRSEDAQSKAALTDWLRAKASFVIEGLKEADKDEFCRCELKLQKWYGDLRGKPFAIEAENSILDISGFSKQYNCAFIWQKDGVKKLNLYLIINYFKGGKLRFKKIKPEAFEANRFYTVINKKSGEIVPMEVNFNFDDPNLIILPLAFGKRQGREFIWNDLLSLETGSLKLANGRVIEKTLYNRRTRQDEPALFVALTFERREVLDSSNIKPMNLIGVDRGENIPAVIALTDPEGCPLSRFKDSLGNPTHILRIGESYKEKQRTIQAKKEVEQRRAGGYSRKYASKAKNLADDMVRNTARDLLYYAVTQDAMLIFENLSRGFGRQGKRTFMAERQYTRMEDWLTAKLAYEGLPSKTYLSKTLAQYTSKTCSNCGFTITSADYDRVLEKLKKTATGWMTTINGKELKVEGQITYYNRYKRQNVVKDLSVELDRLSEESVNNDISSWTKGRSGEALSLLKKRFSHRPVQEKFVCLNCGFETHADEQAALNIARSWLFLRSQEYKKYQTNKTTGNTDKRAFVETWQSFYRKKLKEVWKPAV

SEQ ID NO: 291 - protein, 978 aa, synthetic construct
  REGION 1..978: note = CasX variant
QEIKRINKIRRRLVKDSNTKKAGKTGPMKTLLVRVMTPDLRERLENLRKKPENIPQPISNTSRANLNKLLTDYTEMKKAILHVYWEEFQKDPVGLMSRVAQPASKKIDQNKLKPEMDEKGNLTTAGFACSQCGQPLFVYKLEQVSEKGKAYTNYFGRCNVAEHEKLILLAQLKPEKDSDEAVTYSLGKFGQRALDFYSIHVTKESTHPVKPLAQIAGNRYASGPVGKALSDACMGTIASFLSKYQDIIIEHQKVVKGNQKRLESLRELAGKENLEYPSVTLPPQPHTKEGVDAYNEVIARVRMWVNLNLWQKLKLSRDDAKPLLRLKGFPSFPLVERQANEVDWWDMVCNVKKLINEKKEDGKVFWQNLAGYKRQEALRPYLSSEEDRKKGKKFARYQLGDLLLHLYKKHGEDWGKVYDEAWERIDKKVEGLSKHIKLEEERRSEDAQSKAALTDWLRAKASFVIEGLKEADKDEFCRCELKLQKWYGDLRGKPFAIEAENSILDISGFSKQYNCAFIWQKDGVKKLNLYLIINYFKGGKLRFKKIKPEAFEANRFYTVINKKSGEIVPMEVNFNFDDPNLIILPLAFGKRQGREFIWNDLLSLETGSLKLANGRVIEKTLYNRRTRQDEPALFVALTFERREVLDSSNIKPMNLIGVDRGENIPAVIALTDPEGCPLSRFKDSLGNPTHILRIGESYKEKQRTIQAKKEVEQRRAGGYSRKYASKAKNLADDMVRNTARDLLYYAVTQDAMLIFENLSRGFGRQGKRTFMAERQYTRMEDWLTAKLAYEGLPSKTYLSKTLAQYTSKTCSNCGFTITSADYDRVLEKLKKTATGWMTTINGKELKVEGQITYYNRYKRQNVVKDLSVELDRLSEESVNNDISSWTKGRSGEALSLLKKRFSHRPVQEKFVCLNCGFETHADEQAALNIARSWLFLRSQEYKKYQTNKTTGNTDKRAFVETWQSFYRKKLKEVWKPAV

SEQ ID NO: 292 - protein, 978 aa, synthetic construct
  REGION 1..978: note = CasX variant
QEIKRINKIRRRLVKDSNTKKAGKTGPMKTLLVRVMTPDLRERLENLRKKPENIPQPISNTSRANLNKLLTDYTEMKKAILHVYWEEFQKDPVGLMSRVAQPASKKIDQNKLKPEMDEKGNLTTAGFACSQCGQPLFVYKLEQVSEKGKAYTNYFGRCNVAEHEKLILLAQLKPEKDSDEAVTYSLGKFGQRALDFYSIHVTKESTHPVKPLAQIAGNRYASGPVGKALSDACMGTIASFLSKYQDIIIEHQKVVKGNQKRLESLRELAGKENLEYPSVTLPPQPHTKEGVDAYNEVIARVRMWVNLNLWQKLKLSRDDAKPLLRLKGFPSFPLVERQANEVDWWDMVCNVKKLINEKKEDGKVFWQNLAGYKRQEALRPYLSSEEDRKKGKKFARYQLGDLLLHLEKKHPEDWGKVYDEAWERIDKKVEGLSKHIKLEEERRSEDAQSKAALTDWLRAKASFVIEGLKEADKDEFCRCELKLQKWYGDLRGKPFAIEAENSILDISGFSKQYNCAFIWQKDGVKKLNLYLIINYFKGGKLRFKKIKPEAFEANRFYTVINKKSGEIVPMEVNFNFDDPNLIILPLAFGKRQGREFIWNDLLSLETGSLKLANGRVIEKTLYNRRTRQDEPALFVALTFERREVLDSSNIKPMNLIGVDRGENIPAVIALTDPEGCPLSRFKDSLGNPTHILRIGESYKEKQRTIQAKKEVEQRRAGGYSRKYASKAKNLADDMVRNTARDLLYYAVTQDAMLIFENLSRGFGRQGKRTFMAERQYTRMEDWLTAKLAYEGLPSKTYLSKTLAQYTSKTCSNCGFTITSADYDRVLEKLKKTATGWMTTINGKELKVEGQITYYNRYKRQNVVKDLSVELDRLSEESVNNDISSWTKGRSGEALSLLKKRFSHRPVQEKFVCLNCGFETHADEQAALNIARSWLFLRSQEYKKYQTNKTTGNTDKRAFVETWQSFYRKKLKEVWKPAV

SEQ ID NO: 293 - protein, 979 aa, synthetic construct
  REGION 1..979: note = CasX variant
QEIKRINKIRRRLVKDSNTKKAGKTGPMKTLLVRVMTPDLRERLENLRKKPENIPQPISNTSRANLNKLLTDYTEMKKAILHVYWEEFQKDPVGLMSRVAQPASKKIDQNKLKPEMDEKGNLTTAGFACSQCGQPLFVYKLEQVSEKGKAYTNYFGRCNVAEHEKLILLAQLKPEKDSDEAVTYSLGKFGQRALDFYSIHVTKESTHPVKPLAQIAGNRYASGPVGKALSDACMGTIASFLSKYQDIIIEHQKVVKGNQKRLESLRELAGKENLEYPSVTLPPQPHTKEGVDAYNEVIARVRMWVNLNLWQKLKLSRDDAKPLLRLKGFPSFPLVERQANEVDWWDMVCNVKKLINEKKEDGKVFWQNLAGYKRQEALRPYLSSEEDRKKGKKFARYQLGDLLLHLEKKHEGEDWGKVYDEAWERIDKKVEGLSKHIKLEEERRSEDAQSKAALTDWLRAKASFVIEGLKEADKDEFCRCELKLQKWYGDLRGKPFAIEAENSILDISGFSKQYNCAFIWQKDGVKKLNLYLIINYFKGGKLRFKKIKPEAFEANRFYTVINKKSGEIVPMEVNFNFDDPNLIILPLAFGKRQGREFIWNDLLSLETGSLKLANGRVIEKTLYNRRTRQDEPALFVALTFERREVLDSSNIKPMNLIGVDRGENIPAVIALTDPEGCPLSRFKDSLGNPTHILRIGESYKEKQRTIQAKKEVEQRRAGGYSRKYASKAKNLADDMVRNTARDLLYYAVTQDAMLIFENLSRGFGRQGKRTFMAERQYTRMEDWLTAKLAYEGLPSKTYLSKTLAQYTSKTCSNCGFTITSADYDRVLEKLKKTATGWMTTINGKELKVEGQITYYNRYKRQNVVKDLSVELDRLSEESVNNDISSWTKGRSGEALSLLKKRFSHRPVQEKFVCLNCGFETHADEQAALNIARSWLFLRSQEYKKYQTNKTTGNTDKRAFVETWQSFYRKKLKEVWKPAV

SEQ ID NO: 294 - protein, 979 aa, synthetic construct
  REGION 1..979: note = CasX variant
QEIKRINKIRRRLVKDSNTKKAGKTGPMKTLLVRVMTPDLRERLENLRKKPENIPQPISNTSRANLNKLLTDYTEMKKAILHVYWEEFQKDPVGLMSRVAQPASKKIDQNKLKPEMDEKGNLTTAGFACSQCGQPLFVYKLEQVSEKGKAYTNYFGRCNVAEHEKLILLAQLKPEKDSDEAVTYSLGKFGQRALDFYSIHVTKESTHPVKPLAQIAGNRYASGPVGKALSDACMGTIASFLSKYQDIIIEHQKVVKGNQKRLESLRELAGKENLEYPSVTLPPQPHTKEGVDAYNEVIARVRMWVNLNLWQKLKLSRDDAKPLLRLKGFPSFPLVERQANEVDWWDMVCNVKKLINEKKEDGKVFWQNLAGYKRQEALRPYLSSEEDRKKGKKFARYQLGDLLLHLEKKHGERDWGKVYDEAWERIDKKVEGLSKHIKLEEERRSEDAQSKAALTDWLRAKASFVIEGLKEADKDEFCRCELKLQKWYGDLRGKPFAIEAENSILDISGFSKQYNCAFIWQKDGVKKLNLYLIINYFKGGKLRFKKIKPEAFEANRFYTVINKKSGEIVPMEVNFNFDDPNLIILPLAFGKRQGREFIWNDLLSLETGSLKLANGRVIEKTLYNRRTRQDEPALFVALTFERREVLDSSNIKPMNLIGVDRGENIPAVIALTDPEGCPLSRFKDSLGNPTHILRIGESYKEKQRTIQAKKEVEQRRAGGYSRKYASKAKNLADDMVRNTARDLLYYAVTQDAMLIFENLSRGFGRQGKRTFMAERQYTRMEDWLTAKLAYEGLPSKTYLSKTLAQYTSKTCSNCGFTITSADYDRVLEKLKKTATGWMTTINGKELKVEGQITYYNRYKRQNVVKDLSVELDRLSEESVNNDISSWTKGRSGEALSLLKKRFSHRPVQEKFVCLNCGFETHADEQAALNIARSWLFLRSQEYKKYQTNKTTGNTDKRAFVETWQSFYRKKLKEVWKPAV

SEQ ID NO: 295 - protein, 979 aa, synthetic construct
  REGION 1..979: note = CasX variant
QEIKRINKIRRRLVKDSNTKKAGKTGPMKTLLVRVMTPDLRERLENLRKKPENIPQPISNTSRANLNKLLTDYTEMKKAILHVYWEEFQKDPVGLMSRVAQPASKKIDQNKLKPEMDEKGNLTTAGFACSQCGQPLFVYKLEQVSEKGKAYTNYFGRCNVAEHEKLILLAQLKPEKDSDEAVTYSLGKFGQRALDFYSIHVTKESTHPVKPLAQIAGNRYASGPVGKALSDACMGTIASFLSKYQDIIIEHQKVVKGNQKRLESLRELAGKENLEYPSVTLPPQPHTKEGVDAYNEVIARVRMWVNLNLWQKLKLSRDDAKPLLRLKGFPSFPLVERQANEVDWWDMVCNVKKLINEKKEDGKVFWQNLAGYKRQEALRPYLSSEEDRKKGKKFARYQLGDLLLHLEKKHGEWDWGKVYDEAWERIDKKVEGLSKHIKLEEERRSEDAQSKAALTDWLRAKASFVIEGLKEADKDEFCRCELKLQKWYGDLRGKPFAIEAENSILDISGFSKQYNCAFIWQKDGVKKLNLYLIINYFKGGKLRFKKIKPEAFEANRFYTVINKKSGEIVPMEVNFNFDDPNLIILPLAFGKRQGREFIWNDLLSLETGSLKLANGRVIEKTLYNRRTRQDEPALFVALTFERREVLDSSNIKPMNLIGVDRGENIPAVIALTDPEGCPLSRFKDSLGNPTHILRIGESYKEKQRTIQAKKEVEQRRAGGYSRKYASKAKNLADDMVRNTARDLLYYAVTQDAMLIFENLSRGFGRQGKRTFMAERQYTRMEDWLTAKLAYEGLPSKTYLSKTLAQYTSKTCSNCGFTITSADYDRVLEKLKKTATGWMTTINGKELKVEGQITYYNRYKRQNVVKDLSVELDRLSEESVNNDISSWTKGRSGEALSLLKKRFSHRPVQEKFVCLNCGFETHADEQAALNIARSWLFLRSQEYKKYQTNKTTGNTDKRAFVETWQSFYRKKLKEVWKPAV

SEQ ID NO: 296 - protein, 979 aa, synthetic construct
  REGION 1..979: note = CasX variant
QEIKRINKIRRRLVKDSNTKKAGKTGPMKTLLVRVMTPDLRERLENLRKKPENIPQPISNTSRANLNKLLTDYTEMKKAILHVYWEEFQKDPVGLMSRVAQPASKKIDQNKLKPEMDEKGNLTTAGFACSQCGQPLFVYKLEQVSEKGKAYTNYFGRCNVAEHEKLILLAQLKPEKDSDEAVTYSLGKFGQRALDFYSIHVTKESTHPVKPLAQIAGNRYASGPVGKALSDACMGTIASFLSKYQDIIIEHQKVVKGNQKRLESLRELAGKENLEYPSVTLPPQPHTKEGVDAYNEVIARVRMWVNLNLWQKLKLSRDDAKPLLRLKGFPSFPLVERQANEVDWWDMVCNVKKLINEKKEDGKVFWQNLAGYKRQEALRPYLSSEEDRKKGKKFARYQLGDLLLHLEKKHGEYDWGKVYDEAWERIDKKVEGLSKHIKLEEERRSEDAQSKAALTDWLRAKASFVIEGLKEADKDEFCRCELKLQKWYGDLRGKPFAIEAENSILDISGFSKQYNCAFIWQKDGVKKLNLYLIINYFKGGKLRFKKIKPEAFEANRFYTVINKKSGEIVPMEVNFNFDDPNLIILPLAFGKRQGREFIWNDLLSLETGSLKLANGRVIEKTLYNRRTRQDEPALFVALTFERREVLDSSNIKPMNLIGVDRGENIPAVIALTDPEGCPLSRFKDSLGNPTHILRIGESYKEKQRTIQAKKEVEQRRAGGYSRKYASKAKNLADDMVRNTARDLLYYAVTQDAMLIFENLSRGFGRQGKRTFMAERQYTRMEDWLTAKLAYEGLPSKTYLSKTLAQYTSKTCSNCGFTITSADYDRVLEKLKKTATGWMTTINGKELKVEGQITYYNRYKRQNVVKDLSVELDRLSEESVNNDISSWTKGRSGEALSLLKKRFSHRPVQEKFVCLNCGFETHADEQAALNIARSWLFLRSQEYKKYQTNKTTGNTDKRAFVETWQSFYRKKLKEVWKPAV

SEQ ID NO: 297 - protein, 979 aa, synthetic construct
  REGION 1..979: note = CasX variant
QEIKRINKIRRRLVKDSNTKKAGKTGPMKTLLVRVMTPDLRERLENLRKKPENIPQPISNTSRANLNKLLTDYTEMKKAILHVYWEEFQKDPVGLMSRVAQPASKKIDQNKLKPEMDEKGNLTTAGFACSQCGQPLFVYKLEQVSEKGKAYTNYFGRCNVAEHEKLILLAQLKPEKDSDEAVTYSLGKFGQRALDFYSIHVTKESTHPVKPLAQIAGNRYASGPVGKALSDACMGTIASFLSKYQDIIIEHQKVVKGNQKRLESLRELAGKENLEYPSVTLPPQPHTKEGVDAYNEVIARVRMWVNLNLWQKLKLSRDDAKPLLRLKGFPSFPLVERQANEVDWWDMVCNVKKLINEKKEDGKVFWQNLAGYKRQEALRPYLSSEEDRKKGKKFARYQLGDLLLHLEKKHGEDYWGKVYDEAWERIDKKVEGLSKHIKLEEERRSEDAQSKAALTDWLRAKASFVIEGLKEADKDEFCRCELKLQKWYGDLRGKPFAIEAENSILDISGFSKQYNCAFIWQKDGVKKLNLYLIINYFKGGKLRFKKIKPEAFEANRFYTVINKKSGEIVPMEVNFNFDDPNLIILPLAFGKRQGREFIWNDLLSLETGSLKLANGRVIEKTLYNRRTRQDEPALFVALTFERREVLDSSNIKPMNLIGVDRGENIPAVIALTDPEGCPLSRFKDSLGNPTHILRIGESYKEKQRTIQAKKEVEQRRAGGYSRKYASKAKNLADDMVRNTARDLLYYAVTQDAMLIFENLSRGFGRQGKRTFMAERQYTRMEDWLTAKLAYEGLPSKTYLSKTLAQYTSKTCSNCGFTITSADYDRVLEKLKKTATGWMTTINGKELKVEGQITYYNRYKRQNVVKDLSVELDRLSEESVNNDISSWTKGRSGEALSLLKKRFSHRPVQEKFVCLNCGFETHADEQAALNIARSWLFLRSQEYKKYQTNKTTGNTDKRAFVETWQSFYRKKLKEVWKPAV

SEQ ID NO: 298 - protein, 978 aa, synthetic construct
  REGION 1..978: note = CasX variant
QEIKRINKIRRRLVKDSNTKKAGKTGPMKTLLVRVMTPDLRERLENLRKKPENIPQPISNTSRANLNKLLTDYTEMKKAILHVYWEEFQKDPVGLMSRVAQPASKKIDQNKLKPEMDEKGNLTTAGFACSQCGQPLFVYKLEQVSEKGKAYTNYFGRCNVAEHEKLILLAQLKPEKDSDEAVTYSLGKFGQRALDFYSIHVTKESTHPVKPLAQIAGNRYASGPVGKALSDACMGTIASFLSKYQDIIIEHQKVVKGNQKRLESLRELAGKENLEYPSVTLPPQPHTKEGVDAYNEVIARVRMWVNLNLWQKLKLSRDDAKPLLRLKGFPSFPLVERQANEVDWWDMVCNVKKLINEKKEDGKVFWQNLAGYKRQEALRPYLSSEEDRKKGKKFARYQLGDLLLHLEKKHGEDRGKVYDEAWERIDKKVEGLSKHIKLEEERRSEDAQSKAALTDWLRAKASFVIEGLKEADKDEFCRCELKLQKWYGDLRGKPFAIEAENSILDISGFSKQYNCAFIWQKDGVKKLNLYLIINYFKGGKLRFKKIKPEAFEANRFYTVINKKSGEIVPMEVNFNFDDPNLIILPLAFGKRQGREFIWNDLLSLETGSLKLANGRVIEKTLYNRRTRQDEPALFVALTFERREVLDSSNIKPMNLIGVDRGENIPAVIALTDPEGCPLSRFKDSLGNPTHILRIGESYKEKQRTIQAKKEVEQRRAGGYSRKYASKAKNLADDMVRNTARDLLYYAVTQDAMLIFENLSRGFGRQGKRTFMAERQYTRMEDWLTAKLAYEGLPSKTYLSKTLAQYTSKTCSNCGFTITSADYDRVLEKLKKTATGWMTTINGKELKVEGQITYYNRYKRQNVVKDLSVELDRLSEESVNNDISSWTKGRSGEALSLLKKRFSHRPVQEKFVCLNCGFETHADEQAALNIARSWLFLRSQEYKKYQTNKTTGNTDKRAFVETWQSFYRKKLKEVWKPAV

SEQ ID NO: 299 - protein, 978 aa, synthetic construct
  REGION 1..978: note = CasX variant
QEIKRINKIRRRLVKDSNTKKAGKTGPMKTLLVRVMTPDLRERLENLRKKPENIPQPISNTSRANLNKLLTDYTEMKKAILHVYWEEFQKDPVGLMSRVAQPASKKIDQNKLKPEMDEKGNLTTAGFACSQCGQPLFVYKLEQVSEKGKAYTNYFGRCNVAEHEKLILLAQLKPEKDSDEAVTYSLGKFGQRALDFYSIHVTKESTHPVKPLAQIAGNRYASGPVGKALSDACMGTIASFLSKYQDIIIEHQKVVKGNQKRLESLRELAGKENLEYPSVTLPPQPHTKEGVDAYNEVIARVRMWVNLNLWQKLKLSRDDAKPLLRLKGFPSFPLVERQANEVDWWDMVCNVKKLINEKKEDGKVFWQNLAGYKRQEALRPYLSSEEDRKKGKKFARYQLGDLLLHLEKKHGEDWGDVYDEAWERIDKKVEGLSKHIKLEEERRSEDAQSKAALTDWLRAKASFVIEGLKEADKDEFCRCELKLQKWYGDLRGKPFAIEAENSILDISGFSKQYNCAFIWQKDGVKKLNLYLIINYFKGGKLRFKKIKPEAFEANRFYTVINKKSGEIVPMEVNFNFDDPNLIILPLAFGKRQGREFIWNDLLSLETGSLKLANGRVIEKTLYNRRTRQDEPALFVALTFERREVLDSSNIKPMNLIGVDRGENIPAVIALTDPEGCPLSRFKDSLGNPTHILRIGESYKEKQRTIQAKKEVEQRRAGGYSRKYASKAKNLADDMVRNTARDLLYYAVTQDAMLIFENLSRGFGRQGKRTFMAERQYTRMEDWLTAKLAYEGLPSKTYLSKTLAQYTSKTCSNCGFTITSADYDRVLEKLKKTATGWMTTINGKELKVEGQITYYNRYKRQNVVKDLSVELDRLSEESVNNDISSWTKGRSGEALSLLKKRFSHRPVQEKFVCLNCGFETHADEQAALNIARSWLFLRSQEYKKYQTNKTTGNTDKRAFVETWQSFYRKKLKEVWKPAV

SEQ ID NO: 300 - protein, 978 aa, synthetic construct
  REGION 1..978: note = CasX variant
QEIKRINKIRRRLVKDSNTKKAGKTGPMKTLLVRVMTPDLRERLENLRKKPENIPQPISNTSRANLNKLLTDYTEMKKAILHVYWEEFQKDPVGLMSRVAQPASKKIDQNKLKPEMDEKGNLTTAGFACSQCGQPLFVYKLEQVSEKGKAYTNYFGRCNVAEHEKLILLAQLKPEKDSDEAVTYSLGKFGQRALDFYSIHVTKESTHPVKPLAQIAGNRYASGPVGKALSDACMGTIASFLSKYQDIIIEHQKVVKGNQKRLESLRELAGKENLEYPSVTLPPQPHTKEGVDAYNEVIARVRMWVNLNLWQKLKLSRDDAKPLLRLKGFPSFPLVERQANEVDWWDMVCNVKKLINEKKEDGKVFWQNLAGYKRQEALRPYLSSEEDRKKGKKFARYQLGDLLLHLEKKHGEDWGPVYDEAWERIDKKVEGLSKHIKLEEERRSEDAQSKAALTDWLRAKASFVIEGLKEADKDEFCRCELKLQKWYGDLRGKPFAIEAENSILDISGFSKQYNCAFIWQKDGVKKLNLYLIINYFKGGKLRFKKIKPEAFEANRFYTVINKKSGEIVPMEVNFNFDDPNLIILPLAFGKRQGREFIWNDLLSLETGSLKLANGRVIEKTLYNRRTRQDEPALFVALTFERREVLDSSNIKPMNLIGVDRGENIPAVIALTDPEGCPLSRFKDSLGNPTHILRIGESYKEKQRTIQAKKEVEQRRAGGYSRKYASKAKNLADDMVRNTARDLLYYAVTQDAMLIFENLSRGFGRQGKRTFMAERQYTRMEDWLTAKLAYEGLPSKTYLSKTLAQYTSKTCSNCGFTITSADYDRVLEKLKKTATGWMTTINGKELKVEGQITYYNRYKRQNVVKDLSVELDRLSEESVNNDISSWTKGRSGEALSLLKKRFSHRPVQEKFVCLNCGFETHADEQAALNIARSWLFLRSQEYKKYQTNKTTGNTDKRAFVETWQSFYRKKLKEVWKPAV

SEQ ID NO: 301 - protein, 978 aa, synthetic construct
  REGION 1..978: note = CasX variant
QEIKRINKIRRRLVKDSNTKKAGKTGPMKTLLVRVMTPDLRERLENLRKKPENIPQPISNTSRANLNKLLTDYTEMKKAILHVYWEEFQKDPVGLMSRVAQPASKKIDQNKLKPEMDEKGNLTTAGFACSQCGQPLFVYKLEQVSEKGKAYTNYFGRCNVAEHEKLILLAQLKPEKDSDEAVTYSLGKFGQRALDFYSIHVTKESTHPVKPLAQIAGNRYASGPVGKALSDACMGTIASFLSKYQDIIIEHQKVVKGNQKRLESLRELAGKENLEYPSVTLPPQPHTKEGVDAYNEVIARVRMWVNLNLWQKLKLSRDDAKPLLRLKGFPSFPLVERQANEVDWWDMVCNVKKLINEKKEDGKVFWQNLAGYKRQEALRPYLSSEEDRKKGKKFARYQLGDLLLHLEKKHGEDWGKLYDEAWERIDKKVEGLSKHIKLEEERRSEDAQSKAALTDWLRAKASFVIEGLKEADKDEFCRCELKLQKWYGDLRGKPFAIEAENSILDISGFSKQYNCAFIWQKDGVKKLNLYLIINYFKGGKLRFKKIKPEAFEANRFYTVINKKSGEIVPMEVNFNFDDPNLIILPLAFGKRQGREFIWNDLLSLETGSLKLANGRVIEKTLYNRRTRQDEPALFVALTFERREVLDSSNIKPMNLIGVDRGENIPAVIALTDPEGCPLSRFKDSLGNPTHILRIGESYKEKQRTIQAKKEVEQRRAGGYSRKYASKAKNLADDMVRNTARDLLYYAVTQDAMLIFENLSRGFGRQGKRTFMAERQYTRMEDWLTAKLAYEGLPSKTYLSKTLAQYTSKTCSNCGFTITSADYDRVLEKLKKTATGWMTTINGKELKVEGQITYYNRYKRQNVVKDLSVELDRLSEESVNNDISSWTKGRSGEALSLLKKRFSHRPVQEKFVCLNCGFETHADEQAALNIARSWLFLRSQEYKKYQTNKTTGNTDKRAFVETWQSFYRKKLKEVWKPAV

SEQ ID NO: 302 - protein, 978 aa, synthetic construct
  REGION 1..978: note = CasX variant
QEIKRINKIRRRLVKDSNTKKAGKTGPMKTLLVRVMTPDLRERLENLRKKPENIPQPISNTSRANLNKLLTDYTEMKKAILHVYWEEFQKDPVGLMSRVAQPASKKIDQNKLKPEMDEKGNLTTAGFACSQCGQPLFVYKLEQVSEKGKAYTNYFGRCNVAEHEKLILLAQLKPEKDSDEAVTYSLGKFGQRALDFYSIHVTKESTHPVKPLAQIAGNRYASGPVGKALSDACMGTIASFLSKYQDIIIEHQKVVKGNQKRLESLRELAGKENLEYPSVTLPPQPHTKEGVDAYNEVIARVRMWVNLNLWQKLKLSRDDAKPLLRLKGFPSFPLVERQANEVDWWDMVCNVKKLINEKKEDGKVFWQNLAGYKRQEALRPYLSSEEDRKKGKKFARYQLGDLLLHLEKKHGEDWGKVYGEAWERIDKKVEGLSKHIKLEEERRSEDAQSKAALTDWLRAKASFVIEGLKEADKDEFCRCELKLQKWYGDLRGKPFAIEAENSILDISGFSKQYNCAFIWQKDGVKKLNLYLIINYFKGGKLRFKKIKPEAFEANRFYTVINKKSGEIVPMEVNFNFDDPNLIILPLAFGKRQGREFIWNDLLSLETGSLKLANGRVIEKTLYNRRTRQDEPALFVALTFERREVLDSSNIKPMNLIGVDRGENIPAVIALTDPEGCPLSRFKDSLGNPTHILRIGESYKEKQRTIQAKKEVEQRRAGGYSRKYASKAKNLADDMVRNTARDLLYYAVTQDAMLIFENLSRGFGRQGKRTFMAERQYTRMEDWLTAKLAYEGLPSKTYLSKTLAQYTSKTCSNCGFTITSADYDRVLEKLKKTATGWMTTINGKELKVEGQITYYNRYKRQNVVKDLSVELDRLSEESVNNDISSWTKGRSGEALSLLKKRFSHRPVQEKFVCLNCGFETHADEQAALNIARSWLFLRSQEYKKYQTNKTTGNTDKRAFVETWQSFYRKKLKEVWKPAV

SEQ ID NO: 303 - protein, 978 aa, synthetic construct
  REGION 1..978: note = CasX variant
QEIKRINKIRRRLVKDSNTKKAGKTGPMKTLLVRVMTPDLRERLENLRKKPENIPQPISNTSRANLNKLLTDYTEMKKAILHVYWEEFQKDPVGLMSRVAQPASKKIDQNKLKPEMDEKGNLTTAGFACSQCGQPLFVYKLEQVSEKGKAYTNYFGRCNVAEHEKLILLAQLKPEKDSDEAVTYSLGKFGQRALDFYSIHVTKESTHPVKPLAQIAGNRYASGPVGKALSDACMGTIASFLSKYQDIIIEHQKVVKGNQKRLESLRELAGKENLEYPSVTLPPQPHTKEGVDAYNEVIARVRMWVNLNLWQKLKLSRDDAKPLLRLKGFPSFPLVERQANEVDWWDMVCNVKKLINEKKEDGKVFWQNLAGYKRQEALRPYLSSEEDRKKGKKFARYQLGDLLLHLEKKHGEDWGKVYDEAWERIDKKVEGLSKHQKLEEERRSEDAQSKAALTDWLRAKASFVIEGLKEADKDEFCRCELKLQKWYGDLRGKPFAIEAENSILDISGFSKQYNCAFIWQKDGVKKLNLYLIINYFKGGKLRFKKIKPEAFEANRFYTVINKKSGEIVPMEVNFNFDDPNLIILPLAFGKRQGREFIWNDLLSLETGSLKLANGRVIEKTLYNRRTRQDEPALFVALTFERREVLDSSNIKPMNLIGVDRGENIPAVIALTDPEGCPLSRFKDSLGNPTHILRIGESYKEKQRTIQAKKEVEQRRAGGYSRKYASKAKNLADDMVRNTARDLLYYAVTQDAMLIFENLSRGFGRQGKRTFMAERQYTRMEDWLTAKLAYEGLPSKTYLSKTLAQYTSKTCSNCGFTITSADYDRVLEKLKKTATGWMTTINGKELKVEGQITYYNRYKRQNVVKDLSVELDRLSEESVNNDISSWTKGRSGEALSLLKKRFSHRPVQEKFVCLNCGFETHADEQAALNIARSWLFLRSQEYKKYQTNKTTGNTDKRAFVETWQSFYRKKLKEVWKPAV

SEQ ID NO: 304 - protein, 978 aa, synthetic construct
  REGION 1..978: note = CasX variant
QEIKRINKIRRRLVKDSNTKKAGKTGPMKTLLVRVMTPDLRERLENLRKKPENIPQPISNTSRANLNKLLTDYTEMKKAILHVYWEEFQKDPVGLMSRVAQPASKKIDQNKLKPEMDEKGNLTTAGFACSQCGQPLFVYKLEQVSEKGKAYTNYFGRCNVAEHEKLILLAQLKPEKDSDEAVTYSLGKFGQRALDFYSIHVTKESTHPVKPLAQIAGNRYASGPVGKALSDACMGTIASFLSKYQDIIIEHQKVVKGNQKRLESLRELAGKENLEYPSVTLPPQPHTKEGVDAYNEVIARVRMWVNLNLWQKLKLSRDDAKPLLRLKGFPSFPLVERQANEVDWWDMVCNVKKLINEKKEDGKVFWQNLAGYKRQEALRPYLSSEEDRKKGKKFARYQLGDLLLHLEKKHGEDWGKVYDEAWERIDKKVEGLSKHIKLEEEDRSEDAQSKAALTDWLRAKASFVIEGLKEADKDEFCRCELKLQKWYGDLRGKPFAIEAENSILDISGFSKQYNCAFIWQKDGVKKLNLYLIINYFKGGKLRFKKIKPEAFEANRFYTVINKKSGEIVPMEVNFNFDDPNLIILPLAFGKRQGREFIWNDLLSLETGSLKLANGRVIEKTLYNRRTRQDEPALFVALTFERREVLDSSNIKPMNLIGVDRGENIPAVIALTDPEGCPLSRFKDSLGNPTHILRIGESYKEKQRTIQAKKEVEQRRAGGYSRKYASKAKNLADDMVRNTARDLLYYAVTQDAMLIFENLSRGFGRQGKRTFMAERQYTRMEDWLTAKLAYEGLPSKTYLSKTLAQYTSKTCSNCGFTITSADYDRVLEKLKKTATGWMTTINGKELKVEGQITYYNRYKRQNVVKDLSVELDRLSEESVNNDISSWTKGRSGEALSLLKKRFSHRPVQEKFVCLNCGFETHADEQAALNIARSWLFLRSQEYKKYQTNKTTGNTDKRAFVETWQSFYRKKLKEVWKPAV

SEQ ID NO: 305 - protein, 978 aa, synthetic construct
  REGION 1..978: note = CasX variant
QEIKRINKIRRRLVKDSNTKKAGKTGPMKTLLVRVMTPDLRERLENLRKKPENIPQPISNTSRANLNKLLTDYTEMKKAILHVYWEEFQKDPVGLMSRVAQPASKKIDQNKLKPEMDEKGNLTTAGFACSQCGQPLFVYKLEQVSEKGKAYTNYFGRCNVAEHEKLILLAQLKPEKDSDEAVTYSLGKFGQRALDFYSIHVTKESTHPVKPLAQIAGNRYASGPVGKALSDACMGTIASFLSKYQDIIIEHQKVVKGNQKRLESLRELAGKENLEYPSVTLPPQPHTKEGVDAYNEVIARVRMWVNLNLWQKLKLSRDDAKPLLRLKGFPSFPLVERQANEVDWWDMVCNVKKLINEKKEDGKVFWQNLAGYKRQEALRPYLSSEEDRKKGKKFARYQLGDLLLHLEKKHGEDWGKVYDEAWERIDKKVEGLSKHIKLEEERRSEDAQSKAATTDWLRAKASFVIEGLKEADKDEFCRCELKLQKWYGDLRGKPFAIEAENSILDISGFSKQYNCAFIWQKDGVKKLNLYLIINYFKGGKLRFKKIKPEAFEANRFYTVINKKSGEIVPMEVNFNFDDPNLIILPLAFGKRQGREFIWNDLLSLETGSLKLANGRVIEKTLYNRRTRQDEPALFVALTFERREVLDSSNIKPMNLIGVDRGENIPAVIALTDPEGCPLSRFKDSLGNPTHILRIGESYKEKQRTIQAKKEVEQRRAGGYSRKYASKAKNLADDMVRNTARDLLYYAVTQDAMLIFENLSRGFGRQGKRTFMAERQYTRMEDWLTAKLAYEGLPSKTYLSKTLAQYTSKTCSNCGFTITSADYDRVLEKLKKTATGWMTTINGKELKVEGQITYYNRYKRQNVVKDLSVELDRLSEESVNNDISSWTKGRSGEALSLLKKRFSHRPVQEKFVCLNCGFETHADEQAALNIARSWLFLRSQEYKKYQTNKTTGNTDKRAFVETWQSFYRKKLKEVWKPAV

SEQ ID NO: 306 - protein, 978 aa, synthetic construct
  REGION 1..978: note = CasX variant
QEIKRINKIRRRLVKDSNTKKAGKTGPMKTLLVRVMTPDLRERLENLRKKPENIPQPISNTSRANLNKLLTDYTEMKKAILHVYWEEFQKDPVGLMSRVAQPASKKIDQNKLKPEMDEKGNLTTAGFACSQCGQPLFVYKLEQVSEKGKAYTNYFGRCNVAEHEKLILLAQLKPEKDSDEAVTYSLGKFGQRALDFYSIHVTKESTHPVKPLAQIAGNRYASGPVGKALSDACMGTIASFLSKYQDIIIEHQKVVKGNQKRLESLRELAGKENLEYPSVTLPPQPHTKEGVDAYNEVIARVRMWVNLNLWQKLKLSRDDAKPLLRLKGFPSFPLVERQANEVDWWDMVCNVKKLINEKKEDGKVFWQNLAGYKRQEALRPYLSSEEDRKKGKKFARYQLGDLLLHLEKKHGEDWGKVYDEAWERIDKKVEGLSKHIKLEEERRSEDAQSKAALTDWLRAKTSFVIEGLKEADKDEFCRCELKLQKWYGDLRGKPFAIEAENSILDISGFSKQYNCAFIWQKDGVKKLNLYLIINYFKGGKLRFKKIKPEAFEANRFYTVINKKSGEIVPMEVNFNFDDPNLIILPLAFGKRQGREFIWNDLLSLETGSLKLANGRVIEKTLYNRRTRQDEPALFVALTFERREVLDSSNIKPMNLIGVDRGENIPAVIALTDPEGCPLSRFKDSLGNPTHILRIGESYKEKQRTIQAKKEVEQRRAGGYSRKYASKAKNLADDMVRNTARDLLYYAVTQDAMLIFENLSRGFGRQGKRTFMAERQYTRMEDWLTAKLAYEGLPSKTYLSKTLAQYTSKTCSNCGFTITSADYDRVLEKLKKTATGWMTTINGKELKVEGQITYYNRYKRQNVVKDLSVELDRLSEESVNNDISSWTKGRSGEALSLLKKRFSHRPVQEKFVCLNCGFETHADEQAALNIARSWLFLRSQEYKKYQTNKTTGNTDKRAFVETWQSFYRKKLKEVWKPAV

SEQ ID NO: 307 - protein, 978 aa, synthetic construct
  REGION 1..978: note = CasX variant
QEIKRINKIRRRLVKDSNTKKAGKTGPMKTLLVRVMTPDLRERLENLRKKPENIPQPISNTSRANLNKLLTDYTEMKKAILHVYWEEFQKDPVGLMSRVAQPASKKIDQNKLKPEMDEKGNLTTAGFACSQCGQPLFVYKLEQVSEKGKAYTNYFGRCNVAEHEKLILLAQLKPEKDSDEAVTYSLGKFGQRALDFYSIHVTKESTHPVKPLAQIAGNRYASGPVGKALSDACMGTIASFLSKYQDIIIEHQKVVKGNQKRLESLRELAGKENLEYPSVTLPPQPHTKEGVDAYNEVIARVRMWVNLNLWQKLKLSRDDAKPLLRLKGFPSFPLVERQANEVDWWDMVCNVKKLINEKKEDGKVFWQNLAGYKRQEALRPYLSSEEDRKKGKKFARYQLGDLLLHLEKKHGEDWGKVYDEAWERIDKKVEGLSKHIKLEEERRSEDAQSKAALTDWLRAKKSFVIEGLKEADKDEFCRCELKLQKWYGDLRGKPFAIEAENSILDISGFSKQYNCAFIWQKDGVKKLNLYLIINYFKGGKLRFKKIKPEAFEANRFYTVINKKSGEIVPMEVNFNFDDPNLIILPLAFGKRQGREFIWNDLLSLETGSLKLANGRVIEKTLYNRRTRQDEPALFVALTFERREVLDSSNIKPMNLIGVDRGENIPAVIALTDPEGCPLSRFKDSLGNPTHILRIGESYKEKQRTIQAKKEVEQRRAGGYSRKYASKAKNLADDMVRNTARDLLYYAVTQDAMLIFENLSRGFGRQGKRTFMAERQYTRMEDWLTAKLAYEGLPSKTYLSKTLAQYTSKTCSNCGFTITSADYDRVLEKLKKTATGWMTTINGKELKVEGQITYYNRYKRQNVVKDLSVELDRLSEESVNNDISSWTKGRSGEALSLLKKRFSHRPVQEKFVCLNCGFETHADEQAALNIARSWLFLRSQEYKKYQTNKTTGNTDKRAFVETWQSFYRKKLKEVWKPAV

SEQ ID NO: 308 - protein, 978 aa, synthetic construct
  REGION 1..978: note = CasX variant
QEIKRINKIRRRLVKDSNTKKAGKTGPMKTLLVRVMTPDLRERLENLRKKPENIPQPISNTSRANLNKLLTDYTEMKKAILHVYWEEFQKDPVGLMSRVAQPASKKIDQNKLKPEMDEKGNLTTAGFACSQCGQPLFVYKLEQVSEKGKAYTNYFGRCNVAEHEKLILLAQLKPEKDSDEAVTYSLGKFGQRALDFYSIHVTKESTHPVKPLAQIAGNRYASGPVGKALSDACMGTIASFLSKYQDIIIEHQKVVKGNQKRLESLRELAGKENLEYPSVTLPPQPHTKEGVDAYNEVIARVRMWVNLNLWQKLKLSRDDAKPLLRLKGFPSFPLVERQANEVDWWDMVCNVKKLINEKKEDGKVFWQNLAGYKRQEALRPYLSSEEDRKKGKKFARYQLGDLLLHLEKKHGEDWGKVYDEAWERIDKKVEGLSKHIKLEEERRSEDAQSKAALTDWLRAKASFVEEGLKEADKDEFCRCELKLQKWYGDLRGKPFAIEAENSILDISGFSKQYNCAFIWQKDGVKKLNLYLIINYFKGGKLRFKKIKPEAFEANRFYTVINKKSGEIVPMEVNFNFDDPNLIILPLAFGKRQGREFIWNDLLSLETGSLKLANGRVIEKTLYNRRTRQDEPALFVALTFERREVLDSSNIKPMNLIGVDRGENIPAVIALTDPEGCPLSRFKDSLGNPTHILRIGESYKEKQRTIQAKKEVEQRRAGGYSRKYASKAKNLADDMVRNTARDLLYYAVTQDAMLIFENLSRGFGRQGKRTFMAERQYTRMEDWLTAKLAYEGLPSKTYLSKTLAQYTSKTCSNCGFTITSADYDRVLEKLKKTATGWMTTINGKELKVEGQITYYNRYKRQNVVKDLSVELDRLSEESVNNDISSWTKGRSGEALSLLKKRFSHRPVQEKFVCLNCGFETHADEQAALNIARSWLFLRSQEYKKYQTNKTTGNTDKRAFVETWQSFYRKKLKEVWKPAV

SEQ ID NO: 309 - protein, 979 aa, synthetic construct
  REGION 1..979: note = CasX variant
QEIKRINKIRRRLVKDSNTKKAGKTGPMKTLLVRVMTPDLRERLENLRKKPENIPQPISNTSRANLNKLLTDYTEMKKAILHVYWEEFQKDPVGLMSRVAQPASKKIDQNKLKPEMDEKGNLTTAGFACSQCGQPLFVYKLEQVSEKGKAYTNYFGRCNVAEHEKLILLAQLKPEKDSDEAVTYSLGKFGQRALDFYSIHVTKESTHPVKPLAQIAGNRYASGPVGKALSDACMGTIASFLSKYQDIIIEHQKVVKGNQKRLESLRELAGKENLEYPSVTLPPQPHTKEGVDAYNEVIARVRMWVNLNLWQKLKLSRDDAKPLLRLKGFPSFPLVERQANEVDWWDMVCNVKKLINEKKEDGKVFWQNLAGYKRQEALRPYLSSEEDRKKGKKFARYQLGDLLLHLEKKHGEDWGKVYDEAWERIDKKVEGLSKHIKLEEERRSEDAQSKAALTDWLRAKASFVISEGLKEADKDEFCRCELKLQKWYGDLRGKPFAIEAENSILDISGFSKQYNCAFIWQKDGVKKLNLYLIINYFKGGKLRFKKIKPEAFEANRFYTVINKKSGEIVPMEVNFNFDDPNLIILPLAFGKRQGREFIWNDLLSLETGSLKLANGRVIEKTLYNRRTRQDEPALFVALTFERREVLDSSNIKPMNLIGVDRGENIPAVIALTDPEGCPLSRFKDSLGNPTHILRIGESYKEKQRTIQAKKEVEQRRAGGYSRKYASKAKNLADDMVRNTARDLLYYAVTQDAMLIFENLSRGFGRQGKRTFMAERQYTRMEDWLTAKLAYEGLPSKTYLSKTLAQYTSKTCSNCGFTITSADYDRVLEKLKKTATGWMTTINGKELKVEGQITYYNRYKRQNVVKDLSVELDRLSEESVNNDISSWTKGRSGEALSLLKKRFSHRPVQEKFVCLNCGFETHADEQAALNIARSWLFLRSQEYKKYQTNKTTGNTDKRAFVETWQSFYRKKLKEVWKPAV

SEQ ID NO: 310 - protein, 979 aa, synthetic construct
  REGION 1..979: note = CasX variant
QEIKRINKIRRRLVKDSNTKKAGKTGPMKTLLVRVMTPDLRERLENLRKKPENIPQPISNTSRANLNKLLTDYTEMKKAILHVYWEEFQKDPVGLMSRVAQPASKKIDQNKLKPEMDEKGNLTTAGFACSQCGQPLFVYKLEQVSEKGKAYTNYFGRCNVAEHEKLILLAQLKPEKDSDEAVTYSLGKFGQRALDFYSIHVTKESTHPVKPLAQIAGNRYASGPVGKALSDACMGTIASFLSKYQDIIIEHQKVVKGNQKRLESLRELAGKENLEYPSVTLPPQPHTKEGVDAYNEVIARVRMWVNLNLWQKLKLSRDDAKPLLRLKGFPSFPLVERQANEVDWWDMVCNVKKLINEKKEDGKVFWQNLAGYKRQEALRPYLSSEEDRKKGKKFARYQLGDLLLHLEKKHGEDWGKVYDEAWERIDKKVEGLSKHIKLEEERRSEDAQSKAALTDWLRAKASFVIERGLKEADKDEFCRCELKLQKWYGDLRGKPFAIEAENSILDISGFSKQYNCAFIWQKDGVKKLNLYLIINYFKGGKLRFKKIKPEAFEANRFYTVINKKSGEIVPMEVNFNFDDPNLIILPLAFGKRQGREFIWNDLLSLETGSLKLANGRVIEKTLYNRRTRQDEPALFVALTFERREVLDSSNIKPMNLIGVDRGENIPAVIALTDPEGCPLSRFKDSLGNPTHILRIGESYKEKQRTIQAKKEVEQRRAGGYSRKYASKAKNLADDMVRNTARDLLYYAVTQDAMLIFENLSRGFGRQGKRTFMAERQYTRMEDWLTAKLAYEGLPSKTYLSKTLAQYTSKTCSNCGFTITSADYDRVLEKLKKTATGWMTTINGKELKVEGQITYYNRYKRQNVVKDLSVELDRLSEESVNNDISSWTKGRSGEALSLLKKRFSHRPVQEKFVCLNCGFETHADEQAALNIARSWLFLRSQEYKKYQTNKTTGNTDKRAFVETWQSFYRKKLKEVWKPAV

SEQ ID NO: 311 - protein, 978 aa, synthetic construct
  REGION 1..978: note = CasX variant
QEIKRINKIRRRLVKDSNTKKAGKTGPMKTLLVRVMTPDLRERLENLRKKPENIPQPISNTSRANLNKLLTDYTEMKKAILHVYWEEFQKDPVGLMSRVAQPASKKIDQNKLKPEMDEKGNLTTAGFACSQCGQPLFVYKLEQVSEKGKAYTNYFGRCNVAEHEKLILLAQLKPEKDSDEAVTYSLGKFGQRALDFYSIHVTKESTHPVKPLAQIAGNRYASGPVGKALSDACMGTIASFLSKYQDIIIEHQKVVKGNQKRLESLRELAGKENLEYPSVTLPPQPHTKEGVDAYNEVIARVRMWVNLNLWQKLKLSRDDAKPLLRLKGFPSFPLVERQANEVDWWDMVCNVKKLINEKKEDGKVFWQNLAGYKRQEALRPYLSSEEDRKKGKKFARYQLGDLLLHLEKKHGEDWGKVYDEAWERIDKKVEGLSKHIKLEEERRSEDAQSKAALTDWLRAKASFVIEGKKEADKDEFCRCELKLQKWYGDLRGKPFAIEAENSILDISGFSKQYNCAFIWQKDGVKKLNLYLIINYFKGGKLRFKKIKPEAFEANRFYTVINKKSGEIVPMEVNFNFDDPNLIILPLAFGKRQGREFIWNDLLSLETGSLKLANGRVIEKTLYNRRTRQDEPALFVALTFERREVLDSSNIKPMNLIGVDRGENIPAVIALTDPEGCPLSRFKDSLGNPTHILRIGESYKEKQRTIQAKKEVEQRRAGGYSRKYASKAKNLADDMVRNTARDLLYYAVTQDAMLIFENLSRGFGRQGKRTFMAERQYTRMEDWLTAKLAYEGLPSKTYLSKTLAQYTSKTCSNCGFTITSADYDRVLEKLKKTATGWMTTINGKELKVEGQITYYNRYKRQNVVKDLSVELDRLSEESVNNDISSWTKGRSGEALSLLKKRFSHRPVQEKFVCLNCGFETHADEQAALNIARSWLFLRSQEYKKYQTNKTTGNTDKRAFVETWQSFYRKKLKEVWKPAV

SEQ ID NO: 312 - protein, 978 aa, synthetic construct
  REGION 1..978: note = CasX variant
QEIKRINKIRRRLVKDSNTKKAGKTGPMKTLLVRVMTPDLRERLENLRKKPENIPQPISNTSRANLNKLLTDYTEMKKAILHVYWEEFQKDPVGLMSRVAQPASKKIDQNKLKPEMDEKGNLTTAGFACSQCGQPLFVYKLEQVSEKGKAYTNYFGRCNVAEHEKLILLAQLKPEKDSDEAVTYSLGKFGQRALDFYSIHVTKESTHPVKPLAQIAGNRYASGPVGKALSDACMGTIASFLSKYQDIIIEHQKVVKGNQKRLESLRELAGKENLEYPSVTLPPQPHTKEGVDAYNEVIARVRMWVNLNLWQKLKLSRDDAKPLLRLKGFPSFPLVERQANEVDWWDMVCNVKKLINEKKEDGKVFWQNLAGYKRQEALRPYLSSEEDRKKGKKFARYQLGDLLLHLEKKHGEDWGKVYDEAWERIDKKVEGLSKHIKLEEERRSEDAQSKAALTDWLRAKASFVIEGSKEADKDEFCRCELKLQKWYGDLRGKPFAIEAENSILDISGFSKQYNCAFIWQKDGVKKLNLYLIINYFKGGKLRFKKIKPEAFEANRFYTVINKKSGEIVPMEVNFNFDDPNLIILPLAFGKRQGREFIWNDLLSLETGSLKLANGRVIEKTLYNRRTRQDEPALFVALTFERREVLDSSNIKPMNLIGVDRGENIPAVIALTDPEGCPLSRFKDSLGNPTHILRIGESYKEKQRTIQAKKEVEQRRAGGYSRKYASKAKNLADDMVRNTARDLLYYAVTQDAMLIFENLSRGFGRQGKRTFMAERQYTRMEDWLTAKLAYEGLPSKTYLSKTLAQYTSKTCSNCGFTITSADYDRVLEKLKKTATGWMTTINGKELKVEGQITYYNRYKRQNVVKDLSVELDRLSEESVNNDISSWTKGRSGEALSLLKKRFSHRPVQEKFVCLNCGFETHADEQAALNIARSWLFLRSQEYKKYQTNKTTGNTDKRAFVETWQSFYRKKLKEVWKPAV

SEQ ID NO: 313 - protein, 979 aa, synthetic construct
  REGION 1..979: note = CasX variant
QEIKRINKIRRRLVKDSNTKKAGKTGPMKTLLVRVMTPDLRERLENLRKKPENIPQPISNTSRANLNKLLTDYTEMKKAILHVYWEEFQKDPVGLMSRVAQPASKKIDQNKLKPEMDEKGNLTTAGFACSQCGQPLFVYKLEQVSEKGKAYTNYFGRCNVAEHEKLILLAQLKPEKDSDEAVTYSLGKFGQRALDFYSIHVTKESTHPVKPLAQIAGNRYASGPVGKALSDACMGTIASFLSKYQDIIIEHQKVVKGNQKRLESLRELAGKENLEYPSVTLPPQPHTKEGVDAYNEVIARVRMWVNLNLWQKLKLSRDDAKPLLRLKGFPSFPLVERQANEVDWWDMVCNVKKLINEKKEDGKVFWQNLAGYKRQEALRPYLSSEEDRKKGKKFARYQLGDLLLHLEKKHGEDWGKVYDEAWERIDKKVEGLSKHIKLEEERRSEDAQSKAALTDWLRAKASFVIEGLKEADDKDEFCRCELKLQKWYGDLRGKPFAIEAENSILDISGFSKQYNCAFIWQKDGVKKLNLYLIINYFKGGKLRFKKIKPEAFEANRFYTVINKKSGEIVPMEVNFNFDDPNLIILPLAFGKRQGREFIWNDLLSLETGSLKLANGRVIEKTLYNRRTRQDEPALFVALTFERREVLDSSNIKPMNLIGVDRGENIPAVIALTDPEGCPLSRFKDSLGNPTHILRIGESYKEKQRTIQAKKEVEQRRAGGYSRKYASKAKNLADDMVRNTARDLLYYAVTQDAMLIFENLSRGFGRQGKRTFMAERQYTRMEDWLTAKLAYEGLPSKTYLSKTLAQYTSKTCSNCGFTITSADYDRVLEKLKKTATGWMTTINGKELKVEGQITYYNRYKRQNVVKDLSVELDRLSEESVNNDISSWTKGRSGEALSLLKKRFSHRPVQEKFVCLNCGFETHADEQAALNIARSWLFLRSQEYKKYQTNKTTGNTDKRAFVETWQSFYRKKLKEVWKPAV

SEQ ID NO: 314 - protein, 979 aa, synthetic construct
  REGION 1..979: note = CasX variant
QEIKRINKIRRRLVKDSNTKKAGKTGPMKTLLVRVMTPDLRERLENLRKKPENIPQPISNTSRANLNKLLTDYTEMKKAILHVYWEEFQKDPVGLMSRVAQPASKKIDQNKLKPEMDEKGNLTTAGFACSQCGQPLFVYKLEQVSEKGKAYTNYFGRCNVAEHEKLILLAQLKPEKDSDEAVTYSLGKFGQRALDFYSIHVTKESTHPVKPLAQIAGNRYASGPVGKALSDACMGTIASFLSKYQDIIIEHQKVVKGNQKRLESLRELAGKENLEYPSVTLPPQPHTKEGVDAYNEVIARVRMWVNLNLWQKLKLSRDDAKPLLRLKGFPSFPLVERQANEVDWWDMVCNVKKLINEKKEDGKVFWQNLAGYKRQEALRPYLSSEEDRKKGKKFARYQLGDLLLHLEKKHGEDWGKVYDEAWERIDKKVEGLSKHIKLEEERRSEDAQSKAALTDWLRAKASFVIEGLKEADKDQEFCRCELKLQKWYGDLRGKPFAIEAENSILDISGFSKQYNCAFIWQKDGVKKLNLYLIINYFKGGKLRFKKIKPEAFEANRFYTVINKKSGEIVPMEVNFNFDDPNLIILPLAFGKRQGREFIWNDLLSLETGSLKLANGRVIEKTLYNRRTRQDEPALFVALTFERREVLDSSNIKPMNLIGVDRGENIPAVIALTDPEGCPLSRFKDSLGNPTHILRIGESYKEKQRTIQAKKEVEQRRAGGYSRKYASKAKNLADDMVRNTARDLLYYAVTQDAMLIFENLSRGFGRQGKRTFMAERQYTRMEDWLTAKLAYEGLPSKTYLSKTLAQYTSKTCSNCGFTITSADYDRVLEKLKKTATGWMTTINGKELKVEGQITYYNRYKRQNVVKDLSVELDRLSEESVNNDISSWTKGRSGEALSLLKKRFSHRPVQEKFVCLNCGFETHADEQAALNIARSWLFLRSQEYKKYQTNKTTGNTDKRAFVETWQSFYRKKLKEVWKPAV

SEQ ID NO: 315 - protein, 978 aa, synthetic construct
  REGION 1..978: note = CasX variant
QEIKRINKIRRRLVKDSNTKKAGKTGPMKTLLVRVMTPDLRERLENLRKKPENIPQPISNTSRANLNKLLTDYTEMKKAILHVYWEEFQKDPVGLMSRVAQPASKKIDQNKLKPEMDEKGNLTTAGFACSQCGQPLFVYKLEQVSEKGKAYTNYFGRCNVAEHEKLILLAQLKPEKDSDEAVTYSLGKFGQRALDFYSIHVTKESTHPVKPLAQIAGNRYASGPVGKALSDACMGTIASFLSKYQDIIIEHQKVVKGNQKRLESLRELAGKENLEYPSVTLPPQPHTKEGVDAYNEVIARVRMWVNLNLWQKLKLSRDDAKPLLRLKGFPSFPLVERQANEVDWWDMVCNVKKLINEKKEDGKVFWQNLAGYKRQEALRPYLSSEEDRKKGKKFARYQLGDLLLHLEKKHGEDWGKVYDEAWERIDKKVEGLSKHIKLEEERRSEDAQSKAALTDWLRAKASFVIEGLKEADKDEKCRCELKLQKWYGDLRGKPFAIEAENSILDISGFSKQYNCAFIWQKDGVKKLNLYLIINYFKGGKLRFKKIKPEAFEANRFYTVINKKSGEIVPMEVNFNFDDPNLIILPLAFGKRQGREFIWNDLLSLETGSLKLANGRVIEKTLYNRRTRQDEPALFVALTFERREVLDSSNIKPMNLIGVDRGENIPAVIALTDPEGCPLSRFKDSLGNPTHILRIGESYKEKQRTIQAKKEVEQRRAGGYSRKYASKAKNLADDMVRNTARDLLYYAVTQDAMLIFENLSRGFGRQGKRTFMAERQYTRMEDWLTAKLAYEGLPSKTYLSKTLAQYTSKTCSNCGFTITSADYDRVLEKLKKTATGWMTTINGKELKVEGQITYYNRYKRQNVVKDLSVELDRLSEESVNNDISSWTKGRSGEALSLLKKRFSHRPVQEKFVCLNCGFETHADEQAALNIARSWLFLRSQEYKKYQTNKTTGNTDKRAFVETWQSFYRKKLKEVWKPAV

SEQ ID NO: 316 - protein, 978 aa, synthetic construct
  REGION 1..978: note = CasX variant
QEIKRINKIRRRLVKDSNTKKAGKTGPMKTLLVRVMTPDLRERLENLRKKPENIPQPISNTSRANLNKLLTDYTEMKKAILHVYWEEFQKDPVGLMSRVAQPASKKIDQNKLKPEMDEKGNLTTAGFACSQCGQPLFVYKLEQVSEKGKAYTNYFGRCNVAEHEKLILLAQLKPEKDSDEAVTYSLGKFGQRALDFYSIHVTKESTHPVKPLAQIAGNRYASGPVGKALSDACMGTIASFLSKYQDIIIEHQKVVKGNQKRLESLRELAGKENLEYPSVTLPPQPHTKEGVDAYNEVIARVRMWVNLNLWQKLKLSRDDAKPLLRLKGFPSFPLVERQANEVDWWDMVCNVKKLINEKKEDGKVFWQNLAGYKRQEALRPYLSSEEDRKKGKKFARYQLGDLLLHLEKKHGEDWGKVYDEAWERIDKKVEGLSKHIKLEEERRSEDAQSKAALTDWLRAKASFVIEGLKEADKDEFCRDELKLQKWYGDLRGKPFAIEAENSILDISGFSKQYNCAFIWQKDGVKKLNLYLIINYFKGGKLRFKKIKPEAFEANRFYTVINKKSGEIVPMEVNFNFDDPNLIILPLAFGKRQGREFIWNDLLSLETGSLKLANGRVIEKTLYNRRTRQDEPALFVALTFERREVLDSSNIKPMNLIGVDRGENIPAVIALTDPEGCPLSRFKDSLGNPTHILRIGESYKEKQRTIQAKKEVEQRRAGGYSRKYASKAKNLADDMVRNTARDLLYYAVTQDAMLIFENLSRGFGRQGKRTFMAERQYTRMEDWLTAKLAYEGLPSKTYLSKTLAQYTSKTCSNCGFTITSADYDRVLEKLKKTATGWMTTINGKELKVEGQITYYNRYKRQNVVKDLSVELDRLSEESVNNDISSWTKGRSGEALSLLKKRFSHRPVQEKFVCLNCGFETHADEQAALNIARSWLFLRSQEYKKYQTNKTTGNTDKRAFVETWQSFYRKKLKEVWKPAV

SEQ ID NO: 317 - protein, 979 aa, synthetic construct
  REGION 1..979: note = CasX variant
QEIKRINKIRRRLVKDSNTKKAGKTGPMKTLLVRVMTPDLRERLENLRKKPENIPQPISNTSRANLNKLLTDYTEMKKAILHVYWEEFQKDPVGLMSRVAQPASKKIDQNKLKPEMDEKGNLTTAGFACSQCGQPLFVYKLEQVSEKGKAYTNYFGRCNVAEHEKLILLAQLKPEKDSDEAVTYSLGKFGQRALDFYSIHVTKESTHPVKPLAQIAGNRYASGPVGKALSDACMGTIASFLSKYQDIIIEHQKVVKGNQKRLESLRELAGKENLEYPSVTLPPQPHTKEGVDAYNEVIARVRMWVNLNLWQKLKLSRDDAKPLLRLKGFPSFPLVERQANEVDWWDMVCNVKKLINEKKEDGKVFWQNLAGYKRQEALRPYLSSEEDRKKGKKFARYQLGDLLLHLEKKHGEDWGKVYDEAWERIDKKVEGLSKHIKLEEERRSEDAQSKAALTDWLRAKASFVIEGLKEADKDEFCRCVELKLQKWYGDLRGKPFAIEAENSILDISGFSKQYNCAFIWQKDGVKKLNLYLIINYFKGGKLRFKKIKPEAFEANRFYTVINKKSGEIVPMEVNFNFDDPNLIILPLAFGKRQGREFIWNDLLSLETGSLKLANGRVIEKTLYNRRTRQDEPALFVALTFERREVLDSSNIKPMNLIGVDRGENIPAVIALTDPEGCPLSRFKDSLGNPTHILRIGESYKEKQRTIQAKKEVEQRRAGGYSRKYASKAKNLADDMVRNTARDLLYYAVTQDAMLIFENLSRGFGRQGKRTFMAERQYTRMEDWLTAKLAYEGLPSKTYLSKTLAQYTSKTCSNCGFTITSADYDRVLEKLKKTATGWMTTINGKELKVEGQITYYNRYKRQNVVKDLSVELDRLSEESVNNDISSWTKGRSGEALSLLKKRFSHRPVQEKFVCLNCGFETHADEQAALNIARSWLFLRSQEYKKYQTNKTTGNTDKRAFVETWQSFYRKKLKEVWKPAV

SEQ ID NO: 318 - protein, 978 aa, synthetic construct
  REGION 1..978: note = CasX variant
QEIKRINKIRRRLVKDSNTKKAGKTGPMKTLLVRVMTPDLRERLENLRKKPENIPQPISNTSRANLNKLLTDYTEMKKAILHVYWEEFQKDPVGLMSRVAQPASKKIDQNKLKPEMDEKGNLTTAGFACSQCGQPLFVYKLEQVSEKGKAYTNYFGRCNVAEHEKLILLAQLKPEKDSDEAVTYSLGKFGQRALDFYSIHVTKESTHPVKPLAQIAGNRYASGPVGKALSDACMGTIASFLSKYQDIIIEHQKVVKGNQKRLESLRELAGKENLEYPSVTLPPQPHTKEGVDAYNEVIARVRMWVNLNLWQKLKLSRDDAKPLLRLKGFPSFPLVERQANEVDWWDMVCNVKKLINEKKEDGKVFWQNLAGYKRQEALRPYLSSEEDRKKGKKFARYQLGDLLLHLEKKHGEDWGKVYDEAWERIDKKVEGLSKHIKLEEERRSEDAQSKAALTDWLRAKASFVIEGLKEADKDEFCRCDLKLQKWYGDLRGKPFAIEAENSILDISGFSKQYNCAFIWQKDGVKKLNLYLIINYFKGGKLRFKKIKPEAFEANRFYTVINKKSGEIVPMEVNFNFDDPNLIILPLAFGKRQGREFIWNDLLSLETGSLKLANGRVIEKTLYNRRTRQDEPALFVALTFERREVLDSSNIKPMNLIGVDRGENIPAVIALTDPEGCPLSRFKDSLGNPTHILRIGESYKEKQRTIQAKKEVEQRRAGGYSRKYASKAKNLADDMVRNTARDLLYYAVTQDAMLIFENLSRGFGRQGKRTFMAERQYTRMEDWLTAKLAYEGLPSKTYLSKTLAQYTSKTCSNCGFTITSADYDRVLEKLKKTATGWMTTINGKELKVEGQITYYNRYKRQNVVKDLSVELDRLSEESVNNDISSWTKGRSGEALSLLKKRFSHRPVQEKFVCLNCGFETHADEQAALNIARSWLFLRSQEYKKYQTNKTTGNTDKRAFVETWQSFYRKKLKEVWKPAV

SEQ ID NO: 319 - protein, 978 aa, synthetic construct
  REGION 1..978: note = CasX variant
QEIKRINKIRRRLVKDSNTKKAGKTGPMKTLLVRVMTPDLRERLENLRKKPENIPQPISNTSRANLNKLLTDYTEMKKAILHVYWEEFQKDPVGLMSRVAQPASKKIDQNKLKPEMDEKGNLTTAGFACSQCGQPLFVYKLEQVSEKGKAYTNYFGRCNVAEHEKLILLAQLKPEKDSDEAVTYSLGKFGQRALDFYSIHVTKESTHPVKPLAQIAGNRYASGPVGKALSDACMGTIASFLSKYQDIIIEHQKVVKGNQKRLESLRELAGKENLEYPSVTLPPQPHTKEGVDAYNEVIARVRMWVNLNLWQKLKLSRDDAKPLLRLKGFPSFPLVERQANEVDWWDMVCNVKKLINEKKEDGKVFWQNLAGYKRQEALRPYLSSEEDRKKGKKFARYQLGDLLLHLEKKHGEDWGKVYDEAWERIDKKVEGLSKHIKLEEERRSEDAQSKAALTDWLRAKASFVIEGLKEADKDEFCRCERKLQKWYGDLRGKPFAIEAENSILDISGFSKQYNCAFIWQKDGVKKLNLYLIINYFKGGKLRFKKIKPEAFEANRFYTVINKKSGEIVPMEVNFNFDDPNLIILPLAFGKRQGREFIWNDLLSLETGSLKLANGRVIEKTLYNRRTRQDEPALFVALTFERREVLDSSNIKPMNLIGVDRGENIPAVIALTDPEGCPLSRFKDSLGNPTHILRIGESYKEKQRTIQAKKEVEQRRAGGYSRKYASKAKNLADDMVRNTARDLLYYAVTQDAMLIFENLSRGFGRQGKRTFMAERQYTRMEDWLTAKLAYEGLPSKTYLSKTLAQYTSKTCSNCGFTITSADYDRVLEKLKKTATGWMTTINGKELKVEGQITYYNRYKRQNVVKDLSVELDRLSEESVNNDISSWTKGRSGEALSLLKKRFSHRPVQEKFVCLNCGFETHADEQAALNIARSWLFLRSQEYKKYQTNKTTGNTDKRAFVETWQSFYRKKLKEVWKPAV

SEQ ID NO: 320 - protein, 978 aa, synthetic construct
  REGION 1..978: note = CasX variant
QEIKRINKIRRRLVKDSNTKKAGKTGPMKTLLVRVMTPDLRERLENLRKKPENIPQPISNTSRANLNKLLTDYTEMKKAILHVYWEEFQKDPVGLMSRVAQPASKKIDQNKLKPEMDEKGNLTTAGFACSQCGQPLFVYKLEQVSEKGKAYTNYFGRCNVAEHEKLILLAQLKPEKDSDEAVTYSLGKFGQRALDFYSIHVTKESTHPVKPLAQIAGNRYASGPVGKALSDACMGTIASFLSKYQDIIIEHQKVVKGNQKRLESLRELAGKENLEYPSVTLPPQPHTKEGVDAYNEVIARVRMWVNLNLWQKLKLSRDDAKPLLRLKGFPSFPLVERQANEVDWWDMVCNVKKLINEKKEDGKVFWQNLAGYKRQEALRPYLSSEEDRKKGKKFARYQLGDLLLHLEKKHGEDWGKVYDEAWERIDKKVEGLSKHIKLEEERRSEDAQSKAALTDWLRAKASFVIEGLKEADKDEFCRCELKHQKWYGDLRGKPFAIEAENSILDISGFSKQYNCAFIWQKDGVKKLNLYLIINYFKGGKLRFKKIKPEAFEANRFYTVINKKSGEIVPMEVNFNFDDPNLIILPLAFGKRQGREFIWNDLLSLETGSLKLANGRVIEKTLYNRRTRQDEPALFVALTFERREVLDSSNIKPMNLIGVDRGENIPAVIALTDPEGCPLSRFKDSLGNPTHILRIGESYKEKQRTIQAKKEVEQRRAGGYSRKYASKAKNLADDMVRNTARDLLYYAVTQDAMLIFENLSRGFGRQGKRTFMAERQYTRMEDWLTAKLAYEGLPSKTYLSKTLAQYTSKTCSNCGFTITSADYDRVLEKLKKTATGWMTTINGKELKVEGQITYYNRYKRQNVVKDLSVELDRLSEESVNNDISSWTKGRSGEALSLLKKRFSHRPVQEKFVCLNCGFETHADEQAALNIARSWLFLRSQEYKKYQTNKTTGNTDKRAFVETWQSFYRKKLKEVWKPAV

SEQ ID NO: 321 - protein, 978 aa, synthetic construct
  REGION 1..978: note = CasX variant
QEIKRINKIRRRLVKDSNTKKAGKTGPMKTLLVRVMTPDLRERLENLRKKPENIPQPISNTSRANLNKLLTDYTEMKKAILHVYWEEFQKDPVGLMSRVAQPASKKIDQNKLKPEMDEKGNLTTAGFACSQCGQPLFVYKLEQVSEKGKAYTNYFGRCNVAEHEKLILLAQLKPEKDSDEAVTYSLGKFGQRALDFYSIHVTKESTHPVKPLAQIAGNRYASGPVGKALSDACMGTIASFLSKYQDIIIEHQKVVKGNQKRLESLRELAGKENLEYPSVTLPPQPHTKEGVDAYNEVIARVRMWVNLNLWQKLKLSRDDAKPLLRLKGFPSFPLVERQANEVDWWDMVCNVKKLINEKKEDGKVFWQNLAGYKRQEALRPYLSSEEDRKKGKKFARYQLGDLLLHLEKKHGEDWGKVYDEAWERIDKKVEGLSKHIKLEEERRSEDAQSKAALTDWLRAKASFVIEGLKEADKDEFCRCELKLQPWYGDLRGKPFAIEAENSILDISGFSKQYNCAFIWQKDGVKKLNLYLIINYFKGGKLRFKKIKPEAFEANRFYTVINKKSGEIVPMEVNFNFDDPNLIILPLAFGKRQGREFIWNDLLSLETGSLKLANGRVIEKTLYNRRTRQDEPALFVALTFERREVLDSSNIKPMNLIGVDRGENIPAVIALTDPEGCPLSRFKDSLGNPTHILRIGESYKEKQRTIQAKKEVEQRRAGGYSRKYASKAKNLADDMVRNTARDLLYYAVTQDAMLIFENLSRGFGRQGKRTFMAERQYTRMEDWLTAKLAYEGLPSKTYLSKTLAQYTSKTCSNCGFTITSADYDRVLEKLKKTATGWMTTINGKELKVEGQITYYNRYKRQNVVKDLSVELDRLSEESVNNDISSWTKGRSGEALSLLKKRFSHRPVQEKFVCLNCGFETHADEQAALNIARSWLFLRSQEYKKYQTNKTTGNTDKRAFVETWQSFYRKKLKEVWKPAV

SEQ ID NO: 322 - protein, 978 aa, synthetic construct; identical to SEQ ID NO: 234
  REGION 1..978: note = CasX variant

SEQ ID NO: 323 - protein, 978 aa, synthetic construct
  REGION 1..978: note = CasX variant
QEIKRINKIRRRLVKDSNTKKAGKTGPMKTLLVRVMTPDLRERLENLRKKPENIPQPISNTSRANLNKLLTDYTEMKKAILHVYWEEFQKDPVGLMSRVAQPASKKIDQNKLKPEMDEKGNLTTAGFACSQCGQPLFVYKLEQVSEKGKAYTNYFGRCNVAEHEKLILLAQLKPEKDSDEAVTYSLGKFGQRALDFYSIHVTKESTHPVKPLAQIAGNRYASGPVGKALSDACMGTIASFLSKYQDIIIEHQKVVKGNQKRLESLRELAGKENLEYPSVTLPPQPHTKEGVDAYNEVIARVRMWVNLNLWQKLKLSRDDAKPLLRLKGFPSFPLVERQANEVDWWDMVCNVKKLINEKKEDGKVFWQNLAGYKRQEALRPYLSSEEDRKKGKKFARYQLGDLLLHLEKKHGEDWGKVYDEAWERIDKKVEGLSKHIKLEEERRSEDAQSKAALTDWLRAKASFVIEGLKEADKDEFCRCELKLQKWYGDLRGKPFAIEAENSILDISGFSKQYNCAFIWQKDGVKKLNLYLIINYFKGGKLRFKKIKPEAFEANRFYTVINKKSGEIVPMEVNFNFDDPNLIILPLAFGKRFGREFIWNDLLSLETGSLKLANGRVIEKTLYNRRTRQDEPALFVALTFERREVLDSSNIKPMNLIGVDRGENIPAVIALTDPEGCPLSRFKDSLGNPTHILRIGESYKEKQRTIQAKKEVEQRRAGGYSRKYASKAKNLADDMVRNTARDLLYYAVTQDAMLIFENLSRGFGRQGKRTFMAERQYTRMEDWLTAKLAYEGLPSKTYLSKTLAQYTSKTCSNCGFTITSADYDRVLEKLKKTATGWMTTINGKELKVEGQITYYNRYKRQNVVKDLSVELDRLSEESVNNDISSWTKGRSGEALSLLKKRFSHRPVQEKFVCLNCGFETHADEQAALNIARSWLFLRSQEYKKYQTNKTTGNTDKRAFVETWQSFYRKKLKEVWKPAV

SEQ ID NO: 324 - protein, 978 aa, synthetic construct
  REGION 1..978: note = CasX variant
QEIKRINKIRRRLVKDSNTKKAGKTGPMKTLLVRVMTPDLRERLENLRKKPENIPQPISNTSRANLNKLLTDYTEMKKAILHVYWEEFQKDPVGLMSRVAQPASKKIDQNKLKPEMDEKGNLTTAGFACSQCGQPLFVYKLEQVSEKGKAYTNYFGRCNVAEHEKLILLAQLKPEKDSDEAVTYSLGKFGQRALDFYSIHVTKESTHPVKPLAQIAGNRYASGPVGKALSDACMGTIASFLSKYQDIIIEHQKVVKGNQKRLESLRELAGKENLEYPSVTLPPQPHTKEGVDAYNEVIARVRMWVNLNLWQKLKLSRDDAKPLLRLKGFPSFPLVERQANEVDWWDMVCNVKKLINEKKEDGKVFWQNLAGYKRQEALRPYLSSEEDRKKGKKFARYQLGDLLLHLEKKHGEDWGKVYDEAWERIDKKVEGLSKHIKLEEERRSEDAQSKAALTDWLRAKASFVIEGLKEADKDEFCRCELKLQKWYGDLRGKPFAIEAENSILDISGFSKQYNCAFIWQKDGVKKLNLYLIINYFKGGKLRFKKIKPEAFEANRFYTVINKKSGEIVPMEVNFNFDDPNLIILPLAFGKRVGREFIWNDLLSLETGSLKLANGRVIEKTLYNRRTRQDEPALFVALTFERREVLDSSNIKPMNLIGVDRGENIPAVIALTDPEGCPLSRFKDSLGNPTHILRIGESYKEKQRTIQAKKEVEQRRAGGYSRKYASKAKNLADDMVRNTARDLLYYAVTQDAMLIFENLSRGFGRQGKRTFMAERQYTRMEDWLTAKLAYEGLPSKTYLSKTLAQYTSKTCSNCGFTITSADYDRVLEKLKKTATGWMTTINGKELKVEGQITYYNRYKRQNVVKDLSVELDRLSEESVNNDISSWTKGRSGEALSLLKKRFSHRPVQEKFVCLNCGFETHADEQAALNIARSWLFLRSQEYKKYQTNKTTGNTDKRAFVETWQSFYRKKLKEVWKPAV

SEQ ID NO: 325 - protein, 979 aa, synthetic construct
  REGION 1..979: note = CasX variant
QEIKRINKIRRRLVKDSNTKKAGKTGPMKTLLVRVMTPDLRERLENLRKKPENIPQPISNTSRANLNKLLTDYTEMKKAILHVYWEEFQKDPVGLMSRVAQPASKKIDQNKLKPEMDEKGNLTTAGFACSQCGQPLFVYKLEQVSEKGKAYTNYFGRCNVAEHEKLILLAQLKPEKDSDEAVTYSLGKFGQRALDFYSIHVTKESTHPVKPLAQIAGNRYASGPVGKALSDACMGTIASFLSKYQDIIIEHQKVVKGNQKRLESLRELAGKENLEYPSVTLPPQPHTKEGVDAYNEVIARVRMWVNLNLWQKLKLSRDDAKPLLRLKGFPSFPLVERQANEVDWWDMVCNVKKLINEKKEDGKVFWQNLAGYKRQEALRPYLSSEEDRKKGKKFARYQLGDLLLHLEKKHGEDWGKVYDEAWERIDKKVEGLSKHIKLEEERRSEDAQSKAALTDWLRAKASFVIEGLKEADKDEFCRCELKLQKWYGDLRGKPFAIEAENSILDISGFSKQYNCAFIWQKDGVKKLNLYLIINYFKGGKLRFKKIKPEAFEANRFYTVINKKSGEIVPMEVNFNFDDPNLIILPLAFGKRQGREFIWNDLLSLETGSLKLANGRVIEKTLYNRRTRQDEPALFVALTFERREVLDSSNIIKPMNLIGVDRGENIPAVIALTDPEGCPLSRFKDSLGNPTHILRIGESYKEKQRTIQAKKEVEQRRAGGYSRKYASKAKNLADDMVRNTARDLLYYAVTQDAMLIFENLSRGFGRQGKRTFMAERQYTRMEDWLTAKLAYEGLPSKTYLSKTLAQYTSKTCSNCGFTITSADYDRVLEKLKKTATGWMTTINGKELKVEGQITYYNRYKRQNVVKDLSVELDRLSEESVNNDISSWTKGRSGEALSLLKKRFSHRPVQEKFVCLNCGFETHADEQAALNIARSWLFLRSQEYKKYQTNKTTGNTDKRAFVETWQSFYRKKLKEVWKPAV

SEQ ID NO: 326 - protein, 979 aa, synthetic construct
  REGION 1..979: note = CasX variant
QEIKRINKIRRRLVKDSNTKKAGKTGPMKTLLVRVMTPDLRERLENLRKKPENIPQPISNTSRANLNKLLTDYTEMKKAILHVYWEEFQKDPVGLMSRVAQPASKKIDQNKLKPEMDEKGNLTTAGFACSQCGQPLFVYKLEQVSEKGKAYTNYFGRCNVAEHEKLILLAQLKPEKDSDEAVTYSLGKFGQRALDFYSIHVTKESTHPVKPLAQIAGNRYASGPVGKALSDACMGTIASFLSKYQDIIIEHQKVVKGNQKRLESLRELAGKENLEYPSVTLPPQPHTKEGVDAYNEVIARVRMWVNLNLWQKLKLSRDDAKPLLRLKGFPSFPLVERQANEVDWWDMVCNVKKLINEKKEDGKVFWQNLAGYKRQEALRPYLSSEEDRKKGKKFARYQLGDLLLHLEKKHGEDWGKVYDEAWERIDKKVEGLSKHIKLEEERRSEDAQSKAALTDWLRAKASFVIEGLKEADKDEFCRCELKLQKWYGDLRGKPFAIEAENSILDISGFSKQYNCAFIWQKDGVKKLNLYLIINYFKGGKLRFKKIKPEAFEANRFYTVINKKSGEIVPMEVNFNFDDPNLIILPLAFGKRQGREFIWNDLLSLETGSLKLANGRVIEKTLYNRRTRQDEPALFVALTFERREVLDSSNIKTPMNLIGVDRGENIPAVIALTDPEGCPLSRFKDSLGNPTHILRIGESYKEKQRTIQAKKEVEQRRAGGYSRKYASKAKNLADDMVRNTARDLLYYAVTQDAMLIFENLSRGFGRQGKRTFMAERQYTRMEDWLTAKLAYEGLPSKTYLSKTLAQYTSKTCSNCGFTITSADYDRVLEKLKKTATGWMTTINGKELKVEGQITYYNRYKRQNVVKDLSVELDRLSEESVNNDISSWTKGRSGEALSLLKKRFSHRPVQEKFVCLNCGFETHADEQAALNIARSWLFLRSQEYKKYQTNKTTGNTDKRAFVETWQSFYRKKLKEVWKPAV

SEQ ID NO: 327 - protein, 979 aa, synthetic construct
  REGION 1..979: note = CasX variant
QEIKRINKIRRRLVKDSNTKKAGKTGPMKTLLVRVMTPDLRERLENLRKKPENIPQPISNTSRANLNKLLTDYTEMKKAILHVYWEEFQKDPVGLMSRVAQPASKKIDQNKLKPEMDEKGNLTTAGFACSQCGQPLFVYKLEQVSEKGKAYTNYFGRCNVAEHEKLILLAQLKPEKDSDEAVTYSLGKFGQRALDFYSIHVTKESTHPVKPLAQIAGNRYASGPVGKALSDACMGTIASFLSKYQDIIIEHQKVVKGNQKRLESLRELAGKENLEYPSVTLPPQPHTKEGVDAYNEVIARVRMWVNLNLWQKLKLSRDDAKPLLRLKGFPSFPLVERQANEVDWWDMVCNVKKLINEKKEDGKVFWQNLAGYKRQEALRPYLSSEEDRKKGKKFARYQLGDLLLHLEKKHGEDWGKVYDEAWERIDKKVEGLSKHIKLEEERRSEDAQSKAALTDWLRAKASFVIEGLKEADKDEFCRCELKLQKWYGDLRGKPFAIEAENSILDISGFSKQYNCAFIWQKDGVKKLNLYLIINYFKGGKLRFKKIKPEAFEANRFYTVINKKSGEIVPMEVNFNFDDPNLIILPLAFGKRQGREFIWNDLLSLETGSLKLANGRVIEKTLYNRRTRQDEPALFVALTFERREVLDSSNIKNPMNLIGVDRGENIPAVIALTDPEGCPLSRFKDSLGNPTHILRIGESYKEKQRTIQAKKEVEQRRAGGYSRKYASKAKNLADDMVRNTARDLLYYAVTQDAMLIFENLSRGFGRQGKRTFMAERQYTRMEDWLTAKLAYEGLPSKTYLSKTLAQYTSKTCSNCGFTITSADYDRVLEKLKKTATGWMTTINGKELKVEGQITYYNRYKRQNVVKDLSVELDRLSEESVNNDISSWTKGRSGEALSLLKKRFSHRPVQEKFVCLNCGFETHADEQAALNIARSWLFLRSQEYKKYQTNKTTGNTDKRAFVETWQSFYRKKLKEVWKPAV

SEQ ID NO: 328 - protein, 979 aa, synthetic construct
  REGION 1..979: note = CasX variant
QEIKRINKIRRRLVKDSNTKKAGKTGPMKTLLVRVMTPDLRERLENLRKKPENIPQPISNTSRANLNKLLTDYTEMKKAILHVYWEEFQKDPVGLMSRVAQPASKKIDQNKLKPEMDEKGNLTTAGFACSQCGQPLFVYKLEQVSEKGKAYTNYFGRCNVAEHEKLILLAQLKPEKDSDEAVTYSLGKFGQRALDFYSIHVTKESTHPVKPLAQIAGNRYASGPVGKALSDACMGTIASFLSKYQDIIIEHQKVVKGNQKRLESLRELAGKENLEYPSVTLPPQPHTKEGVDAYNEVIARVRMWVNLNLWQKLKLSRDDAKPLLRLKGFPSFPLVERQANEVDWWDMVCNVKKLINEKKEDGKVFWQNLAGYKRQEALRPYLSSEEDRKKGKKFARYQLGDLLLHLEKKHGEDWGKVYDEAWERIDKKVEGLSKHIKLEEERRSEDAQSKAALTDWLRAKASFVIEGLKEADKDEFCRCELKLQKWYGDLRGKPFAIEAENSILDISGFSKQYNCAFIWQKDGVKKLNLYLIINYFKGGKLRFKKIKPEAFEANRFYTVINKKSGEIVPMEVNFNFDDPNLIILPLAFGKRQGREFIWNDLLSLETGSLKLANGRVIEKTLYNRRTRQDEPALFVALTFERREVLDSSNIKPRMNLIGVDRGENIPAVIALTDPEGCPLSRFKDSLGNPTHILRIGESYKEKQRTIQAKKEVEQRRAGGYSRKYASKAKNLADDMVRNTARDLLYYAVTQDAMLIFENLSRGFGRQGKRTFMAERQYTRMEDWLTAKLAYEGLPSKTYLSKTLAQYTSKTCSNCGFTITSADYDRVLEKLKKTATGWMTTINGKELKVEGQITYYNRYKRQNVVKDLSVELDRLSEESVNNDISSWTKGRSGEALSLLKKRFSHRPVQEKFVCLNCGFETHADEQAALNIARSWLFLRSQEYKKYQTNKTTGNTDKRAFVETWQSFYRKKLKEVWKPAV

SEQ ID NO: 329 - protein, 979 aa, synthetic construct
  REGION 1..979: note = CasX variant
QEIKRINKIRRRLVKDSNTKKAGKTGPMKTLLVRVMTPDLRERLENLRKKPENIPQPISNTSRANLNKLLTDYTEMKKAILHVYWEEFQKDPVGLMSRVAQPASKKIDQNKLKPEMDEKGNLTTAGFACSQCGQPLFVYKLEQVSEKGKAYTNYFGRCNVAEHEKLILLAQLKPEKDSDEAVTYSLGKFGQRALDFYSIHVTKESTHPVKPLAQIAGNRYASGPVGKALSDACMGTIASFLSKYQDIIIEHQKVVKGNQKRLESLRELAGKENLEYPSVTLPPQPHTKEGVDAYNEVIARVRMWVNLNLWQKLKLSRDDAKPLLRLKGFPSFPLVERQANEVDWWDMVCNVKKLINEKKEDGKVFWQNLAGYKRQEALRPYLSSEEDRKKGKKFARYQLGDLLLHLEKKHGEDWGKVYDEAWERIDKKVEGLSKHIKLEEERRSEDAQSKAALTDWLRAKASFVIEGLKEADKDEFCRCELKLQKWYGDLRGKPFAIEAENSILDISGFSKQYNCAFIWQKDGVKKLNLYLIINYFKGGKLRFKKIKPEAFEANRFYTVINKKSGEIVPMEVNFNFDDPNLIILPLAFGKRQGREFIWNDLLSLETGSLKLANGRVIEKTLYNRRTRQDEPALFVALTFERREVLDSSNIKPMSNLIGVDRGENIPAVIALTDPEGCPLSRFKDSLGNPTHILRIGESYKEKQRTIQAKKEVEQRRAGGYSRKYASKAKNLADDMVRNTARDLLYYAVTQDAMLIFENLSRGFGRQGKRTFMAERQYTRMEDWLTAKLAYEGLPSKTYLSKTLAQYTSKTCSNCGFTITSADYDRVLEKLKKTATGWMTTINGKELKVEGQITYYNRYKRQNVVKDLSVELDRLSEESVNNDISSWTKGRSGEALSLLKKRFSHRPVQEKFVCLNCGFETHADEQAALNIARSWLFLRSQEYKKYQTNKTTGNTDKRAFVETWQSFYRKKLKEVWKPAV

SEQ ID NO: 330 - protein, 978 aa, synthetic construct
  REGION 1..978: note = CasX variant
QEIKRINKIRRRLVKDSNTKKAGKTGPMKTLLVRVMTPDLRERLENLRKKPENIPQPISNTSRANLNKLLTDYTEMKKAILHVYWEEFQKDPVGLMSRVAQPASKKIDQNKLKPEMDEKGNLTTAGFACSQCGQPLFVYKLEQVSEKGKAYTNYFGRCNVAEHEKLILLAQLKPEKDSDEAVTYSLGKFGQRALDFYSIHVTKESTHPVKPLAQIAGNRYASGPVGKALSDACMGTIASFLSKYQDIIIEHQKVVKGNQKRLESLRELAGKENLEYPSVTLPPQPHTKEGVDAYNEVIARVRMWVNLNLWQKLKLSRDDAKPLLRLKGFPSFPLVERQANEVDWWDMVCNVKKLINEKKEDGKVFWQNLAGYKRQEALRPYLSSEEDRKKGKKFARYQLGDLLLHLEKKHGEDWGKVYDEAWERIDKKVEGLSKHIKLEEERRSEDAQSKAALTDWLRAKASFVIEGLKEADKDEFCRCELKLQKWYGDLRGKPFAIEAENSILDISGFSKQYNCAFIWQKDGVKKLNLYLIINYFKGGKLRFKKIKPEAFEANRFYTVINKKSGEIVPMEVNFNFDDPNLIILPLAFGKRQGREFIWNDLLSLETGSLKLANGRVIEKTLYNRRTRQDEPALFVALTFERREVLDSSNIKPMNLIGVDRGENIPAVIALTDPEGCPLSRFKDSLGNPTHILRIWESYKEKQRTIQAKKEVEQRRAGGYSRKYASKAKNLADDMVRNTARDLLYYAVTQDAMLIFENLSRGFGRQGKRTFMAERQYTRMEDWLTAKLAYEGLPSKTYLSKTLAQYTSKTCSNCGFTITSADYDRVLEKLKKTATGWMTTINGKELKVEGQITYYNRYKRQNVVKDLSVELDRLSEESVNNDISSWTKGRSGEALSLLKKRFSHRPVQEKFVCLNCGFETHADEQAALNIARSWLFLRSQEYKKYQTNKTTGNTDKRAFVETWQSFYRKKLKEVWKPAV

SEQ ID NO: 331 - protein, 978 aa, synthetic construct
  REGION 1..978: note = CasX variant
QEIKRINKIRRRLVKDSNTKKAGKTGPMKTLLVRVMTPDLRERLENLRKKPENIPQPISNTSRANLNKLLTDYTEMKKAILHVYWEEFQKDPVGLMSRVAQPASKKIDQNKLKPEMDEKGNLTTAGFACSQCGQPLFVYKLEQVSEKGKAYTNYFGRCNVAEHEKLILLAQLKPEKDSDEAVTYSLGKFGQRALDFYSIHVTKESTHPVKPLAQIAGNRYASGPVGKALSDACMGTIASFLSKYQDIIIEHQKVVKGNQKRLESLRELAGKENLEYPSVTLPPQPHTKEGVDAYNEVIARVRMWVNLNLWQKLKLSRDDAKPLLRLKGFPSFPLVERQANEVDWWDMVCNVKKLINEKKEDGKVFWQNLAGYKRQEALRPYLSSEEDRKKGKKFARYQLGDLLLHLEKKHGEDWGKVYDEAWERIDKKVEGLSKHIKLEEERRSEDAQSKAALTDWLRAKASFVIEGLKEADKDEFCRCELKLQKWYGDLRGKPFAIEAENSILDISGFSKQYNCAFIWQKDGVKKLNLYLIINYFKGGKLRFKKIKPEAFEANRFYTVINKKSGEIVPMEVNFNFDDPNLIILPLAFGKRQGREFIWNDLLSLETGSLKLANGRVIEKTLYNRRTRQDEPALFVALTFERREVLDSSNIKPMNLIGVDRGENIPAVIALTDPEGCPLSRFKDSLGNPTHILRIRESYKEKQRTIQAKKEVEQRRAGGYSRKYASKAKNLADDMVRNTARDLLYYAVTQDAMLIFENLSRGFGRQGKRTFMAERQYTRMEDWLTAKLAYEGLPSKTYLSKTLAQYTSKTCSNCGFTITSADYDRVLEKLKKTATGWMTTINGKELKVEGQITYYNRYKRQNVVKDLSVELDRLSEESVNNDISSWTKGRSGEALSLLKKRFSHRPVQEKFVCLNCGFETHADEQAALNIARSWLFLRSQEYKKYQTNKTTGNTDKRAFVETWQSFYRKKLKEVWKPAV

SEQ ID NO: 332 - protein, 978 aa, synthetic construct
  REGION 1..978: note = CasX variant
QEIKRINKIRRRLVKDSNTKKAGKTGPMKTLLVRVMTPDLRERLENLRKKPENIPQPISNTSRANLNKLLTDYTEMKKAILHVYWEEFQKDPVGLMSRVAQPASKKIDQNKLKPEMDEKGNLTTAGFACSQCGQPLFVYKLEQVSEKGKAYTNYFGRCNVAEHEKLILLAQLKPEKDSDEAVTYSLGKFGQRALDFYSIHVTKESTHPVKPLAQIAGNRYASGPVGKALSDACMGTIASFLSKYQDIIIEHQKVVKGNQKRLESLRELAGKENLEYPSVTLPPQPHTKEGVDAYNEVIARVRMWVNLNLWQKLKLSRDDAKPLLRLKGFPSFPLVERQANEVDWWDMVCNVKKLINEKKEDGKVFWQNLAGYKRQEALRPYLSSEEDRKKGKKFARYQLGDLLLHLEKKHGEDWGKVYDEAWERIDKKVEGLSKHIKLEEERRSEDAQSKAALTDWLRAKASFVIEGLKEADKDEFCRCELKLQKWYGDLRGKPFAIEAENSILDISGFSKQYNCAFIWQKDGVKKLNLYLIINYFKGGKLRFKKIKPEAFEANRFYTVINKKSGEIVPMEVNFNFDDPNLIILPLAFGKRQGREFIWNDLLSLETGSLKLANGRVIEKTLYNRRTRQDEPALFVALTFERREVLDSSNIKPMNLIGVDRGENIPAVIALTDPEGCPLSRFKDSLGNPTHILRIGESYKEKQRTIQASKEVEQRRAGGYSRKYASKAKNLADDMVRNTARDLLYYAVTQDAMLIFENLSRGFGRQGKRTFMAERQYTRMEDWLTAKLAYEGLPSKTYLSKTLAQYTSKTCSNCGFTITSADYDRVLEKLKKTATGWMTTINGKELKVEGQITYYNRYKRQNVVKDLSVELDRLSEESVNNDISSWTKGRSGEALSLLKKRFSHRPVQEKFVCLNCGFETHADEQAALNIARSWLFLRSQEYKKYQTNKTTGNTDKRAFVETWQSFYRKKLKEVWKPAV

SEQ ID NO: 333 - protein, 978 aa, synthetic construct
  REGION 1..978: note = CasX variant
QEIKRINKIRRRLVKDSNTKKAGKTGPMKTLLVRVMTPDLRERLENLRKKPENIPQPISNTSRANLNKLLTDYTEMKKAILHVYWEEFQKDPVGLMSRVAQPASKKIDQNKLKPEMDEKGNLTTAGFACSQCGQPLFVYKLEQVSEKGKAYTNYFGRCNVAEHEKLILLAQLKPEKDSDEAVTYSLGKFGQRALDFYSIHVTKESTHPVKPLAQIAGNRYASGPVGKALSDACMGTIASFLSKYQDIIIEHQKVVKGNQKRLESLRELAGKENLEYPSVTLPPQPHTKEGVDAYNEVIARVRMWVNLNLWQKLKLSRDDAKPLLRLKGFPSFPLVERQANEVDWWDMVCNVKKLINEKKEDGKVFWQNLAGYKRQEALRPYLSSEEDRKKGKKFARYQLGDLLLHLEKKHGEDWGKVYDEAWERIDKKVEGLSKHIKLEEERRSEDAQSKAALTDWLRAKASFVIEGLKEADKDEFCRCELKLQKWYGDLRGKPFAIEAENSILDISGFSKQYNCAFIWQKDGVKKLNLYLIINYFKGGKLRFKKIKPEAFEANRFYTVINKKSGEIVPMEVNFNFDDPNLIILPLAFGKRQGREFIWNDLLSLETGSLKLANGRVIEKTLYNRRTRQDEPALFVALTFERREVLDSSNIKPMNLIGVDRGENIPAVIALTDPEGCPLSRFKDSLGNPTHILRIGESYKEKQRTIQAKKEVEQRRAGGYSRKYASKAKNLADDMVHNTARDLLYYAVTQDAMLIFENLSRGFGRQGKRTFMAERQYTRMEDWLTAKLAYEGLPSKTYLSKTLAQYTSKTCSNCGFTITSADYDRVLEKLKKTATGWMTTINGKELKVEGQITYYNRYKRQNVVKDLSVELDRLSEESVNNDISSWTKGRSGEALSLLKKRFSHRPVQEKFVCLNCGFETHADEQAALNIARSWLFLRSQEYKKYQTNKTTGNTDKRAFVETWQSFYRKKLKEVWKPAV

SEQ ID NO: 334 - protein, 978 aa, synthetic construct
  REGION 1..978: note = CasX variant
QEIKRINKIRRRLVKDSNTKKAGKTGPMKTLLVRVMTPDLRERLENLRKKPENIPQPISNTSRANLNKLLTDYTEMKKAILHVYWEEFQKDPVGLMSRVAQPASKKIDQNKLKPEMDEKGNLTTAGFACSQCGQPLFVYKLEQVSEKGKAYTNYFGRCNVAEHEKLILLAQLKPEKDSDEAVTYSLGKFGQRALDFYSIHVTKESTHPVKPLAQIAGNRYASGPVGKALSDACMGTIASFLSKYQDIIIEHQKVVKGNQKRLESLRELAGKENLEYPSVTLPPQPHTKEGVDAYNEVIARVRMWVNLNLWQKLKLSRDDAKPLLRLKGFPSFPLVERQANEVDWWDMVCNVKKLINEKKEDGKVFWQNLAGYKRQEALRPYLSSEEDRKKGKKFARYQLGDLLLHLEKKHGEDWGKVYDEAWERIDKKVEGLSKHIKLEEERRSEDAQSKAALTDWLRAKASFVIEGLKEADKDEFCRCELKLQKWYGDLRGKPFAIEAENSILDISGFSKQYNCAFIWQKDGVKKLNLYLIINYFKGGKLRFKKIKPEAFEANRFYTVINKKSGEIVPMEVNFNFDDPNLIILPLAFGKRQGREFIWNDLLSLETGSLKLANGRVIEKTLYNRRTRQDEPALFVALTFERREVLDSSNIKPMNLIGVDRGENIPAVIALTDPEGCPLSRFKDSLGNPTHILRIGESYKEKQRTIQAKKEVEQRRAGGYSRKYASKAKNLADDMVRNTARDLLYYAVTQDAMLIFENLSRGFGRQGKRTFSAERQYTRMEDWLTAKLAYEGLPSKTYLSKTLAQYTSKTCSNCGFTITSADYDRVLEKLKKTATGWMTTINGKELKVEGQITYYNRYKRQNVVKDLSVELDRLSEESVNNDISSWTKGRSGEALSLLKKRFSHRPVQEKFVCLNCGFETHADEQAALNIARSWLFLRSQEYKKYQTNKTTGNTDKRAFVETWQSFYRKKLKEVWKPAV

SEQ ID NO: 335 - protein, 978 aa, synthetic construct
  REGION 1..978: note = CasX variant
QEIKRINKIRRRLVKDSNTKKAGKTGPMKTLLVRVMTPDLRERLENLRKKPENIPQPISNTSRANLNKLLTDYTEMKKAILHVYWEEFQKDPVGLMSRVAQPASKKIDQNKLKPEMDEKGNLTTAGFACSQCGQPLFVYKLEQVSEKGKAYTNYFGRCNVAEHEKLILLAQLKPEKDSDEAVTYSLGKFGQRALDFYSIHVTKESTHPVKPLAQIAGNRYASGPVGKALSDACMGTIASFLSKYQDIIIEHQKVVKGNQKRLESLRELAGKENLEYPSVTLPPQPHTKEGVDAYNEVIARVRMWVNLNLWQKLKLSRDDAKPLLRLKGFPSFPLVERQANEVDWWDMVCNVKKLINEKKEDGKVFWQNLAGYKRQEALRPYLSSEEDRKKGKKFARYQLGDLLLHLEKKHGEDWGKVYDEAWERIDKKVEGLSKHIKLEEERRSEDAQSKAALTDWLRAKASFVIEGLKEADKDEFCRCELKLQKWYGDLRGKPFAIEAENSILDISGFSKQYNCAFIWQKDGVKKLNLYLIINYFKGGKLRFKKIKPEAFEANRFYTVINKKSGEIVPMEVNFNFDDPNLIILPLAFGKRQGREFIWNDLLSLETGSLKLANGRVIEKTLYNRRTRQDEPALFVALTFERREVLDSSNIKPMNLIGVDRGENIPAVIALTDPEGCPLSRFKDSLGNPTHILRIGESYKEKQRTIQAKKEVEQRRAGGYSRKYASKAKNLADDMVRNTARDLLYYAVTQDAMLIFENLSRGFGRQGKRTFAAERQYTRMEDWLTAKLAYEGLPSKTYLSKTLAQYTSKTCSNCGFTITSADYDRVLEKLKKTATGWMTTINGKELKVEGQITYYNRYKRQNVVKDLSVELDRLSEESVNNDISSWTKGRSGEALSLLKKRFSHRPVQEKFVCLNCGFETHADEQAALNIARSWLFLRSQEYKKYQTNKTTGNTDKRAFVETWQSFYRKKLKEVWKPAV

SEQ ID NO: 336 - protein, 978 aa, synthetic construct
  REGION 1..978: note = CasX variant
QEIKRINKIRRRLVKDSNTKKAGKTGPMKTLLVRVMTPDLRERLENLRKKPENIPQPISNTSRANLNKLLTDYTEMKKAILHVYWEEFQKDPVGLMSRVAQPASKKIDQNKLKPEMDEKGNLTTAGFACSQCGQPLFVYKLEQVSEKGKAYTNYFGRCNVAEHEKLILLAQLKPEKDSDEAVTYSLGKFGQRALDFYSIHVTKESTHPVKPLAQIAGNRYASGPVGKALSDACMGTIASFLSKYQDIIIEHQKVVKGNQKRLESLRELAGKENLEYPSVTLPPQPHTKEGVDAYNEVIARVRMWVNLNLWQKLKLSRDDAKPLLRLKGFPSFPLVERQANEVDWWDMVCNVKKLINEKKEDGKVFWQNLAGYKRQEALRPYLSSEEDRKKGKKFARYQLGDLLLHLEKKHGEDWGKVYDEAWERIDKKVEGLSKHIKLEEERRSEDAQSKAALTDWLRAKASFVIEGLKEADKDEFCRCELKLQKWYGDLRGKPFAIEAENSILDISGFSKQYNCAFIWQKDGVKKLNLYLIINYFKGGKLRFKKIKPEAFEANRFYTVINKKSGEIVPMEVNFNFDDPNLIILPLAFGKRQGREFIWNDLLSLETGSLKLANGRVIEKTLYNRRTRQDEPALFVALTFERREVLDSSNIKPMNLIGVDRGENIPAVIALTDPEGCPLSRFKDSLGNPTHILRIGESYKEKQRTIQAKKEVEQRRAGGYSRKYASKAKNLADDMVRNTARDLLYYAVTQDAMLIFENLSRGFGRQGKRTFMAERQYTRMEDWLTAKLAYEGLPSKTYLSKTLAQYTSKTCSNCGFTITSADYDRVLEKLKKTATGWMTTINGKELKVEGQITYYNRYKRQNVVKDLSVELDRLSEESVNNDISSWDKGRSGEALSLLKKRFSHRPVQEKFVCLNCGFETHADEQAALNIARSWLFLRSQEYKKYQTNKTTGNTDKRAFVETWQSFYRKKLKEVWKPAV

SEQ ID NO: 337 - protein, 979 aa, synthetic construct
  REGION 1..979: note = CasX variant
QEIKRINKIRRRLVKDSNTKKAGKTGPMKTLLVRVMTPDLRERLENLRKKPENIPQPISNTSRANLNKLLTDYTEMKKAILHVYWEEFQKDPVGLMSRVAQPASKKIDQNKLKPEMDEKGNLTTAGFACSQCGQPLFVYKLEQVSEKGKAYTNYFGRCNVAEHEKLILLAQLKPEKDSDEAVTYSLGKFGQRALDFYSIHVTKESTHPVKPLAQIAGNRYASGPVGKALSDACMGTIASFLSKYQDIIIEHQKVVKGNQKRLESLRELAGKENLEYPSVTLPPQPHTKEGVDAYNEVIARVRMWVNLNLWQKLKLSRDDAKPLLRLKGFPSFPLVERQANEVDWWDMVCNVKKLINEKKEDGKVFWQNLAGYKRQEALRPYLSSEEDRKKGKKFARYQLGDLLLHLEKKHGEDWGKVYDEAWERIDKKVEGLSKHIKLEEERRSEDAQSKAALTDWLRAKASFVIEGLKEADKDEFCRCELKLQKWYGDLRGKPFAIEAENSILDISGFSKQYNCAFIWQKDGVKKLNLYLIINYFKGGKLRFKKIKPEAFEANRFYTVINKKSGEIVPMEVNFNFDDPNLIILPLAFGKRQGREFIWNDLLSLETGSLKLANGRVIEKTLYNRRTRQDEPALFVALTFERREVLDSSNIKPMNLIGVDRGENIPAVIALTDPEGCPLSRFKDSLGNPTHILRIGESYKEKQRTIQAKKEVEQRRAGGYSRKYASKAKNLADDMVRNTARDLLYYAVTQDAMLIFENLSRGFGRQGKRTFMAERQYTRMEDWLTAKLAYEGLPSKTYLSKTLAQYTSKTCSNCGFTITSADYDRVLEKLKKTATGWMTTINGKELKVEGQITYYNRYKRQNVVKDLSVELDRLSEESVNNDISSWTKGRSGNEALSLLKKRFSHRPVQEKFVCLNCGFETHADEQAALNIARSWLFLRSQEYKKYQTNKTTGNTDKRAFVETWQSFYRKKLKEVWKPAV

SEQ ID NO: 338 - protein, 978 aa, synthetic construct
  REGION 1..978: note = CasX variant
QEIKRINKIRRRLVKDSNTKKAGKTGPMKTLLVRVMTPDLRERLENLRKKPENIPQPISNTSRANLNKLLTDYTEMKKAILHVYWEEFQKDPVGLMSRVAQPASKKIDQNKLKPEMDEKGNLTTAGFACSQCGQPLFVYKLEQVSEKGKAYTNYFGRCNVAEHEKLILLAQLKPEKDSDEAVTYSLGKFGQRALDFYSIHVTKESTHPVKPLAQIAGNRYASGPVGKALSDACMGTIASFLSKYQDIIIEHQKVVKGNQKRLESLRELAGKENLEYPSVTLPPQPHTKEGVDAYNEVIARVRMWVNLNLWQKLKLSRDDAKPLLRLKGFPSFPLVERQANEVDWWDMVCNVKKLINEKKEDGKVFWQNLAGYKRQEALRPYLSSEEDRKKGKKFARYQLGDLLLHLEKKHGEDWGKVYDEAWERIDKKVEGLSKHIKLEEERRSEDAQSKAALTDWLRAKASFVIEGLKEADKDEFCRCELKLQKWYGDLRGKPFAIEAENSILDISGFSKQYNCAFIWQKDGVKKLNLYLIINYFKGGKLRFKKIKPEAFEANRFYTVINKKSGEIVPMEVNFNFDDPNLIILPLAFGKRQGREFIWNDLLSLETGSLKLANGRVIEKTLYNRRTRQDEPALFVALTFERREVLDSSNIKPMNLIGVDRGENIPAVIALTDPEGCPLSRFKDSLGNPTHILRIGESYKEKQRTIQAKKEVEQRRAGGYSRKYASKAKNLADDMVRNTARDLLYYAVTQDAMLIFENLSRGFGRQGKRTFMAERQYTRMEDWLTAKLAYEGLPSKTYLSKTLAQYTSKTCSNCGFTITSADYDRVLEKLKKTATGWMTTINGKELKVEGQITYYNRYKRQNVVKDLSVELDRLSEESVNNDISSWTKGRSGEALSLLKKRFSHRPVQEKFVCLNCGFETHADEQAALNIARVWLFLRSQEYKKYQTNKTTGNTDKRAFVETWQSFYRKKLKEVWKPAV

SEQ ID NO: 339 - protein, 978 aa, synthetic construct
  REGION 1..978: note = CasX variant
QEIKRINKIRRRLVKDSNTKKAGKTGPMKTLLVRVMTPDLRERLENLRKKPENIPQPISNTSRANLNKLLTDYTEMKKAILHVYWEEFQKDPVGLMSRVAQPASKKIDQNKLKPEMDEKGNLTTAGFACSQCGQPLFVYKLEQVSEKGKAYTNYFGRCNVAEHEKLILLAQLKPEKDSDEAVTYSLGKFGQRALDFYSIHVTKESTHPVKPLAQIAGNRYASGPVGKALSDACMGTIASFLSKYQDIIIEHQKVVKGNQKRLESLRELAGKENLEYPSVTLPPQPHTKEGVDAYNEVIARVRMWVNLNLWQKLKLSRDDAKPLLRLKGFPSFPLVERQANEVDWWDMVCNVKKLINEKKEDGKVFWQNLAGYKRQEALRPYLSSEEDRKKGKKFARYQLGDLLLHLEKKHGEDWGKVYDEAWERIDKKVEGLSKHIKLEEERRSEDAQSKAALTDWLRAKASFVIEGLKEADKDEFCRCELKLQKWYGDLRGKPFAIEAENSILDISGFSKQYNCAFIWQKDGVKKLNLYLIINYFKGGKLRFKKIKPEAFEANRFYTVINKKSGEIVPMEVNFNFDDPNLIILPLAFGKRQGREFIWNDLLSLETGSLKLANGRVIEKTLYNRRTRQDEPALFVALTFERREVLDSSNIKPMNLIGVDRGENIPAVIALTDPEGCPLSRFKDSLGNPTHILRIGESYKEKQRTIQAKKEVEQRRAGGYSRKYASKAKNLADDMVRNTARDLLYYAVTQDAMLIFENLSRGFGRQGKRTFMAERQYTRMEDWLTAKLAYEGLPSKTYLSKTLAQYTSKTCSNCGFTITSADYDRVLEKLKKTATGWMTTINGKELKVEGQITYYNRYKRQNVVKDLSVELDRLSEESVNNDISSWTKGRSGEALSLLKKRFSHRPVQEKFVCLNCGFETHADEQAALNIARSWLFLRSQEYKKYQTNKTTINTDKRAFVETWQSFYRKKLKEVWKPAV

SEQ ID NO: 340 - protein, 977 aa, synthetic construct
  REGION 1..977: note = CasX variant
QEIKRINKIRRRLVKDSNTKKAGKTGPMKTLLVRVMTPDLRERLENLRKKPENIPQPISNTSRANLNKLLTDYTEMKKAILHVYWEEFQKDPVGLMSRVAQPASKKIDQNKLKPEMDEKGNLTTAGFACSQCGQPLFVYKLEQVSEKGKAYTNYFGRCNVAEHEKLILLAQLKPEKDSDEAVTYSLGKFGQRALDFYSIHVTKESTHPVKPLAQIAGNRYASGPVGKALSDACMGTIASFLSKYQDIIIEHQKVVKGNQKRLESLRELAGKENLEYPSVTLPPQPHTKEGVDAYNEVIARVRMWVNLNLWQKLKLSRDDAKPLLRLKGFPSFPLVERQANEVDWWDMVCNVKKLINEKKEDGKVFWQNLAGYKRQEALRPYLSSPEDRKKGKKFARYQFGDLLLHLEKKHGEDWGKVYDEAWERIDKKVEGLSKHIKLEEERRSEDAQSKAALTDWLRAKASFVIEGLKEADKDEFCRCELKLQKWYGDLRGKPFAIEAENSILDISGFSKQYNCAFIWQKDGVKKLNLYLIINYFKGGKLRFKKIKPEAFEANRFYTVINKKSGEIVPMEVNFNFDDPNLIILPLAFGKRQGREFIWNDLLSLETGSLKLANGRVIEKTLYNRRTRQDEPALFVALTFERREVLDSSNIKPMNLIGVDRGENIPAVIALTDPEGCPLSRFKDSLGNPTHILRIGESYKEKQRTIQAKKEVEQRRAGGYSRKYASKAKNLANDMVRNTARDLLYYAVTQDAMLIFENLSRGFGRQGKRTFMAERQYTRMEDWLTAKLAYEGLSKTYLSKTLAQYTSKTCSNCGFTITSADYDRVLEKLKKTATGWMTTINGKELKVEGQITYYNRRKRQNVVKDLSVELDRLSEESVNNDISSWTKGRSGEALSLLKKRFSHRPVQEKFVCLNCGFETHADEQAALNIARSWLFLRSQEYKKYQTNKTTGNTDKRAFVETWQSFYRKKLKEVWKPAV

SEQ ID NO: 341 - protein, 977 aa, synthetic construct
  REGION 1..977: note = CasX variant
QEIKRINKIRRRLVKDSNTKKAGKTGPMKTLLVRVMTPDLRERLENLRKKPENIPQPISNTSRANLNKLLTDYTEMKKAILHVYWEEFQKDPVGLMSRVAQPASKKIDQNKLKPEMDEKGNLTTAGFACSQCGQPLFVYKLEQVSEKGKAYTNYFGRCNVAEHEKLILLAQLKPEKDSDEAVTYSLGKFGQRALDFYSIHVTKESTHPVKPLAQIAGNRYASGPVGKALSDACMGTIASFLSKYQDIIIEHQKVVKGNQKRLESLRELAGKENLEYPSVTLPPQPHTKEGVDAYNEVIARVRMWVNLNLWQKLKLSRDDAKPLLRLKGFPSFPLVERQANEVDWWDMVCNVKKLINEKKEDGKVFWQNLAGYKRQEALRPYLSSEEDRKKGKKFARYQLGDLLLHLEKKHGEDWGKVYDEAWERIDKKVEGLSKHIKLEEERRSEDAQSKAALTDWLRAKASFVIEGLKEADKDEFSRCELKLQKWYGDLRGKPFAIEAENSILDISGFSKQYNCAFIWQKDGVKKLNLYLIINYFKGGKLRFKKIKPEAFEANRFYTVINKKSGEIVPMEVNFNFDDPNLIILPLAFGKRQGREFIWNDLLSLETGSLKLANGRVIEKTLYNRRTRQDEPALFVALTFERREVLDSSNIKPMNLIGVDRGENIPAVIALTDPEGCPLSRFKDSLGNPTHILRIGESYKEKQRTIQAKKEVEQRRAGGYSRKYASKAKNLADDMVRNTARDLLYYAVTQDAMLIFENLSRGFGRQGKRTFMAERQYTRMEDWLTAKLAYEGLSKTYLSKTLAQYTSKTCSNCGFTITSADYDRVLEKLKKTATGWMTTINGKELKVEGQITYYNRRKRQNVVKDLSVELDRLSEESVNNDISSWTKGRSGEALSLLKKRFSHRPVQEKFVCLNCGFETHADEQAALNIARSWLFLRSQEYKKYQTNKTTGNTDKRAFVETWQSFYRKKLKEVWKPAV

SEQ ID NO: 342 - protein, 977 aa, synthetic construct
  REGION 1..977: note = CasX variant
QEIKRINKIRRRLVKDSNTKKAGKTGPMKTLLVRVMTPDLRERLENLRKKPENIPQPISNTSRANLNKLLTDYTEMKKAILHVYWEEFQKDPVGLMSRVAQPASKKIDQNKLKPEMDEKGNLTTAGFACSQCGQPLFVYKLEQVSEKGKAYTNYFGRCNVAEHEKLILLAQLKPEKDSDEAVTYSLGKFGQRALDFYSIHVTKESTHPVKPLAQIAGNRYASGPVGKALSDACMGTIASFLSKYQDIIIEHQKVVKGNQKRLESLRELAGKENLEYPSVTLPPQPHTKEGVDAYNEVIARVRMWVNLNLWQKLKLSRDDAKPLLRLKGFPSFPLVERQANEVDWWDMVCNVKKLINEKKEDGKVFWQNLAGYKRQEALRPYLSSENDRKKGKKFARYQFGDLLKHLEKKHGEDWGKVYDEAWERIDKKVEGLSKHIKLEEERRSEDAQSKAALTDWLRAKASFVIEGLKEADKDEFSRCELKLQKWYGDLRGKPFAIEAENSILDISGFSKQYNCAFIWQKDGVKKLNLYLIINYFKGGKLRFKKIKPEAFEANRFYTVINKKSGEIVPMEVNFNFDDPNLIILPLAFGKRQGREFIWNDLLSLETGSLKLANGRVIEKTLYNRRTRQDEPALFVALTFERREVLDSSNIKPMNLIGVDRGENIPAVIALTDPEGCPLSRFKDSLGNPTHILRIGESYKEKQRTIQAKKEVEQRRAGGYSRKYASKAKNLADDMVRNTARDLLYYAVTQDAMLIFENLSRGFGRQGKRTFMAERQYTRMEDWLTAKLAYEGLSKTLLSKTLAQYTSKTCSNCGFTITSADYDRVLEKLKKTATGWMTTINGKELKVEGQITYYNRRKRQNVVKDLSVELDRLSEESVNNDISSWTKGRSGEALSLLKKRFSHRPVQEKFVCLNCGFETHADEQAALNIARSWLFLRSQEYKKYQTNKTTGNTDKRAFVETWQSFYRKKLKEVWKPAV

SEQ ID NO: 343 - protein, 977 aa, synthetic construct
  REGION 1..977: note = CasX variant
QEIKRINKIRRRLVKDSNTKKAGKTGPMKTLLVRVMTPDLRERLENLRKKPENIPQPISNTSRANLNKLLTDYTEMKKAILHVYWEEFQKDPVGLMSRVAQPASKKIDQNKLKPEMDEKGNLTTAGFACSQCGQPLFVYKLEQVSEKGKAYTNYFGRCNVAEHEKLILLAQLKPEKDSDEAVTYSLGKFGQRALDFYSIHVTKESTHPVKPLAQIAGNRYASGPVGKALSDACMGTIASFLSKYQDIIIEHQKVVKGNQKRLESLRELAGKENLEYPSVTLPPQPHTKEGVDAYNEVIARVRMWVNLNLWQKLKLSRDDAKPLLRLKGFPSFPLVERQANEVDWWDMVCNVKKLINEKKEDGKVFWQNLAGYKRQEALRPYLSSPEDRKKGKKFARYQLGDLLLHLEKKHGEDWGKVYDEAWERIDKKVEGLSKHIKLEEERRSEDAQSKAALTDWLRAKASFVIEGLKEADKDEFCRCELKLQKWYGDLRGKPFAIEAENSILDISGFSKQYNCAFIWQKDGVKKLNLYLIINYFKGGKLRFKKIKPEAFEANRFYTVINKKSGEIVPMEVNFNFDDPNLIILPLAFGKRQGREFIWNDLLSLETGSLKLANGRVIEKTLYNRRTRQDEPALFVALTFERREVLDSSNIKPMNLIGVDRGENIPAVIALTDPEGCPLSRFKDSLGNPTHILRIGESYKEKQRTIQAKKEVEQRRAGGYSRKYASKAKNLANDMVRNTARDLLYYAVTQDAMLIFENLSRGFGRQGKRTFMAERQYTRMEDWLTAKLAYEGLSKTYLSKTLAQYTSKTCSNCGFTITSADYDRVLEKLKKTATGWMTTINGKELKVEGQITYYNRRKRQNVVKDLSVELDRLSEESVNNDISSWTKGRSGEALSLLKKRFSHRPVQEKFVCLNCGFETHADEQAALNIARSWLFLRSQEYKKYQTNKTTGNTDKRAFVETWQSFYRKKLKEVWKPAV

SEQ ID NO: 344 - protein, 977 aa, synthetic construct
  REGION 1..977: note = CasX variant
QEIKRINKIRRRLVKDSNTKKAGKTGPMKTLLVRVMTPDLRERLENLRKKPENIPQPISNTSRANLNKLLTDYTEMKKAILHVYWEEFQKDPVGLMSRVAQPASKKIDQNKLKPEMDEKGNLTTAGFACSQCGQPLFVYKLEQVSEKGKAYTNYFGRCNVAEHEKLILLAQLKPEKDSDEAVTYSLGKFGQRALDFYSIHVTKESTHPVKPLAQIAGNRYASGPVGKALSDACMGTIASFLSKYQDIIIEHQKVVKGNQKRLESLRELAGKENLEYPSVTLPPQPHTKEGVDAYNEVIARVRMWVNLNLWQKLKLSRDDAKPLLRLKGFPSFPLVERQANEVDWWDMVCNVKKLINEKKEDGKVFWQNLAGYKRQEALRPYLSSPEDRKKGKKFARYQLGDLLLHLEKKHGEDWGKVYDEAWERIDKKVEGLSKHIKLEEERRSEDAQSKAALTDWLRAKASFVIEGLKEADKDEFCRCELKLQKWYGDLRGKPFAIEAENSILDISGFSKQYNCAFIWQKDGVKKLNLYLIINYFKGGKLRFKKIKPEAFEANRFYTVINKKSGEIVPMEVNFNFDDPNLIILPLAFGKRQGREFIWNDLLSLETGSLKLANGRVIEKPLYNRRTRQDEPALFVALTFERREVLDSSNIKPMNLIGVDRGENIPAVIALTDPEGCPLSRFKDSLGNPTHILRIGESYKEKQRTIQAKKEVEQRRAGGYSRKYASKAKNLADDMVRNTARDLLYYAVTQDAMLIFENLSRGFGRQGKRTFMAERQYTRMEDWLTAKLAYEGLSKTYLSKTLAQYTSKTCSNCGFTITSADYDRVLEKLKKTATGWMTTINGKELKVEGQITYYNRRKRQNVVKDLSVELDRLSEESVNNDISSWTKGRSGEALSLLKKRFSHRPVQEKFVCLNCGFETHADEQAALNIARSWLFLRSQEYKKYQTNKTTGNTDKRAFVETWQSFYRKKLKEVWKPAV

SEQ ID NO: 345 - protein, 978 aa, synthetic construct
  REGION 1..978: note = CasX variant
QEIKRINKIRRRLVKDSNTKKAGKTGPMKTLLVRVMTPDLRERLENLRKKPENIPQPISNTSRANLNKLLTDYTEMKKAILHVYWEEFQKDPVGLMSRVAQPASKKIDQNKLKPEMDEKGNLTTAGFACSQCGQPLFVYKLEQVSEKGKAYTNYFGRCNVAEHEKLILLAQLKPEKDSDEAVTYSLGKFGQRALDFYSIHVTKESTHPVKPLAQIAGNRYASGPVGKALSDACMGTIASFLSKYQDIIIEHQKVVKGNQKRLESLRELAGKENLEYPSVTLPPQPHTKEGVDAYNEVIARVRMWVNLNLWQKLKLSRDDAKPLLRLKGFPSFPLVERQANEVDWWDMVCNVKKLINEKKEDGKVFWQNLAGYKRQEALRPYLSSEEDRKKGKKFARYQLGDLLLHLEKKHGEDWGKVYDEAWERIDKKVEGLSKHIKLEEERRSEDAQSKAALTDWLRAKASFVIEGLKEADKDEFCRCELKLQKWYGDLRGKPFAIEAENSILDISGFSKQYNCAFIWQKDGVKKLNLYLIINYFKGGKLRFKKIKPEAFEANRFYTVINKKSGEIVPMEVNFNFDDPNLIILPLAFGKRQGREFIWNDLLSLETGSLKLANGRVIEKTLYNRRTRQDEPALFVALTFEDREVLDSSNIKPMNLIGVDRGENIPAVIALTDPEGCPLSRFKDSLGNPTHILRIGESYKEKQRTIQAKKEVEQRRAGGYSRKYASKAKNLADDMVRNTARDLLYYAVTQDAMLIFENLSRGFGRQGKRTFMAERQYTRMEDWLTAKLAYEGLPSKTYLSKTLAQYTSKTCSNCGFTITSADYDRVLEKLKKTATGWMTTINGKELKVEGQITYYNRYKRQNVVKDLSVELDRLSEESVNNDISSWTKGRSGEALSLLKKRFSHRPVQEKFVCLNCGFETHADEQAALNIARSWLFLRSQEYKKYQTNKTTGNTDKRAFVETWQSFYRKKLKEVWKPAV

SEQ ID NO: 346 - protein, 979 aa, synthetic construct
  REGION 1..979: note = CasX variant
QEIKRINKIRRRLVKDSNTKKAGKTGPMKTLLVRVMTPDLRERLENLRKKPENIPQPISNTSRANLNKLLTDYTEMKKAILHVYWEEFQKDPVGLMSRVAQPASKKIDQNKLKPEMDEKGNLTTAGFACSQCGQPLFVYKLEQVSEKGKAYTNYFGRCNVAEHEKLILLAQLKPEKDSDEAVTYSLGKFGQRALDFYSIHVTKESTHPVKPLAQIAGNRYASGPVGKALSDACMGTIASFLSKYQDIIIEHQKVVKGNQKRLESLRELAGKENLEYPSVTLPPQPHTKEGVDAYNEVIARVRMWVNLNLWQKLKLSRDDAKPLLRLKGFPSFPLVERQANEVDWWDMVCNVKKLINEKKEDGKVFWQNLAGYKRQEALRPYLSSEEDRKKGKKFARYQLGDLLLHLEKKHGEDWGKVYDEAWERIDKKVEGLSKHIKLEEERRSEDAQSKAALTDWLRAKASFVIEGLKEADKDEFCRCELKLQKWYGDLRGKHPFAIEAENSILDISGFSKQYNCAFIWQKDGVKKLNLYLIINYFKGGKLRFKKIKPEAFEANRFYTVINKKSGEIVPMEVNFNFDDPNLIILPLAFGKRQGREFIWNDLLSLETGSLKLANGRVIEKTLYNRRTRQDEPALFVALTFERREVLDSSNIKPMNLIGVDRGENIPAVIALTDPEGCPLSRFKDSLGNPTHILRIGESYKEKQRTIQAKKEVEQRRAGGYSRKYASKAKNLADDMVRNTARDLLYYAVTQDAMLIFENLSRGFGRQGKRTFMAERQYTRMEDWLTAKLAYEGLPSKTYLSKTLAQYTSKTCSNCGFTITSADYDRVLEKLKKTATGWMTTINGKELKVEGQITYYNRYKRQNVVKDLSVELDRLSEESVNNDISSWTKGRSGEALSLLKKRFSHRPVQEKFVCLNCGFETHADEQAALNIARSWLFLRSQEYKKYQTNKTTGNTDKRAFVETWQSFYRKKLKEVWKPAV

SEQ ID NO: 347 - protein, 979 aa, synthetic construct
  REGION 1..979: note = CasX variant
QEIKRINKIRRRLVKDSNTKKAGKTGPMKTLLVRVMTPDLRERLENLRKKPENIPQPISNTSRANLNKLLTDYTEMKKAILHVYWEEFQKDPVGLMSRVAQPASKKIDQNKLKPEMDEKGNLTTAGFACSQCGQPLFVYKLEQVSEKGKAYTNYFGRCNVAEHEKLILLAQLKPEKDSDEAVTYSLGKFGQRALDFYSIHVTKESTHPVKPLAQIAGNRYASGPVGKALSDACMGTIASFLSKYQDIIIEHQKVVKGNQKRLESLRELAGKENLEYPSVTLPPQPHTKEGVDAYNEVIARVRMWVNLNLWQKLKLSRDDAKPLLRLKGFPSFPLVERQANEVDWWDMVCNVKKLIINEKKEDGKVFWQNLAGYKRQEALRPYLSSEEDRKKGKKFARYQLGDLLLHLEKKHGEDWGKVYDEAWERIDKKVEGLSKHIKLEEERRSEDAQSKAALTDWLRAKASFVIEGLKEADKDEFCRCELKLQKWYGDLRGKPFAIEAENSILDISGFSKQYNCAFIWQKDGVKKLNLYLIINYFKGGKLRFKKIKPEAFEANRFYTVINKKSGEIVPMEVNFNFDDPNLIILPLAFGKRQGREFIWNDLLSLETGSLKLANGRVIEKTLYNRRTRQDEPALFVALTFERREVLDSSNIKPMNLIGVDRGENIPAVIALTDPEGCPLSRFKDSLGNPTHILRIGESYKEKQRTIQAKKEVEQRRAGGYSRKYASKAKNLADDMVRNTARDLLYYAVTQDAMLIFENLSRGFGRQGKRTFMAERQYTRMEDWLTAKLAYEGLPSKTYLSKTLAQYTSKTCSNCGFTITSADYDRVLEKLKKTATGWMTTINGKELKVEGQITYYNRYKRQNVVKDLSVELDRLSEESVNNDISSWTKGRSGEALSLLKKRFSHRPVQEKFVCLNCGFETHADEQAALNIARSWLFLRSQEYKKYQTNKTTGNTDKRAFVETWQSFYRKKLKEVWKPAV

SEQ ID NO: 348 - protein, 979 aa, synthetic construct
  REGION 1..979: note = CasX variant
QEIKRINKIRRRLVKDSNTKKAGKTRGPMKTLLVRVMTPDLRERLENLRKKPENIPQPISNTSRANLNKLLTDYTEMKKAILHVYWEEFQKDPVGLMSRVAQPASKKIDQNKLKPEMDEKGNLTTAGFACSQCGQPLFVYKLEQVSEKGKAYTNYFGRCNVAEHEKLILLAQLKPEKDSDEAVTYSLGKFGQRALDFYSIHVTKESTHPVKPLAQIAGNRYASSPVGKALSDACMGTIASFLSKYQDIIIEHQKVVKGNQKRLESLRELAGKENLEYPSVTLPPQPHTKEGVDAYNEVIARVRMWVNLNLWQKLKLSRDDAKPLLRLKGFPSFPLVERQANEVDWWDMVCNVKKLINEKKEDGKVFWQNLAGYKRQEALRPYLSSEEDRKKGKKFARYQLGDLLLHLEKKHGEDWGKVYDEAWERIDKKVEGLSKHIKLEEERRSEDAQSKAALTDWLRAKASFVIEGLKEADKDEFCRCELKLQKWYGDLRGKPFAIEAENSILDISGFSKQYNCAFIWQKDGVKKLNLYLIINYFKGGKLRFKKIKPEAFEANRFYTVINKKSGEIVPMEVNFNFDDPNLIILPLAFGKRQGREFIWNDLLSLETGSLKLANGRVIEKTLYNRRTRQDEPALFVALTFERREVLDSSNIKPMNLIGVDRGENIPAVIALTDPEGCPLSRFKDSLGNPTHILRIGESYKEKQRTIQAKKEVEQRRAGGYSRKYASKAKNLADDMVRNTARDLLYYAVTQDAMLIFENLSRGFGRQGKRTFMAERQYTRMEDWLTAKLAYEGLPSKTYLSKTLAQYTSKTCSNCGFTITSADYDRVLEKLKKTATGWMTTINGKELKVEGQITYYNRYKRQNVVKDLSVELDRLSEESVNNDISSWTKGRSGEALSLLKKRFSHRPVQEKFVCLNCGFETHADEQAALNIARSWLFLRSQEYKKYQTNKTTGNTDKRAFVETWQSFYRKKLKEVWKPAV

SEQ ID NO: 349 - protein, 979 aa, synthetic construct
  REGION 1..979: note = CasX variant
QEIKRINKIRRRLVKDSNTKKAGKTRGPMKTLLVRVMTPDLRERLENLRKKPENIPQPISNTSRANLNKLLTDYTEMKKAILHVYWEEFQKDPVGLMSRVAQPASKKIDQNKLKPEMDEKGNLTTAGFACSQCGQPLFVYKLEQVSEKGKAYTNYFGRCNVAEHEKLILLAQLKPEKDSDEAVTYSLGKFGQRALDFYSIHVTKESTHPVKPLAQIAGNRYASGPVGKALSGACMGTIASFLSKYQDIIIEHQKVVKGNQKRLESLRELAGKENLEYPSVTLPPQPHTKEGVDAYNEVIARVRMWVNLNLWQKLKLSRDDAKPLLRLKGFPSFPLVERQANEVDWWDMVCNVKKLINEKKEDGKVFWQNLAGYKRQEALRPYLSSEEDRKKGKKFARYQLGDLLLHLEKKHGEDWGKVYDEAWERIDKKVEGLSKHIKLEEERRSEDAQSKAALTDWLRAKASFVIEGLKEADKDEFCRCELKLQKWYGDLRGKPFAIEAENSILDISGFSKQYNCAFIWQKDGVKKLNLYLIINYFKGGKLRFKKIKPEAFEANRFYTVINKKSGEIVPMEVNFNFDDPNLIILPLAFGKRQGREFIWNDLLSLETGSLKLANGRVIEKTLYNRRTRQDEPALFVALTFERREVLDSSNIKPMNLIGVDRGENIPAVIALTDPEGCPLSRFKDSLGNPTHILRIGESYKEKQRTIQAKKEVEQRRAGGYSRKYASKAKNLADDMVRNTARDLLYYAVTQDAMLIFENLSRGFGRQGKRTFMAERQYTRMEDWLTAKLAYEGLPSKTYLSKTLAQYTSKTCSNCGFTITSADYDRVLEKLKKTATGWMTTINGKELKVEGQITYYNRYKRQNVVKDLSVELDRLSEESVNNDISSWTKGRSGEALSLLKKRFSHRPVQEKFVCLNCGFETHADEQAALNIARSWLFLRSQEYKKYQTNKTTGNTDKRAFVETWQSFYRKKLKEVWKPAV

SEQ ID NO: 350 - protein, 978 aa, synthetic construct
  REGION 1..978: note = CasX variant
QEIKRINKIRRRLVKDSNTKKAGKTGPMKTLLVRVMTPDLRERLENLRKKPENIPQPISNTSRANLNKLLTDYTEMKKAILHVYWEEFQKDPVGLMSRVAQPASKKIDQNKLKPEMDEKGNLTTAGFACSQCGQPLFVYKLEQVSEKGKAYTNYFGRCNVAEHEKLILLAQLKPEKDSDEAVTYSLGKFGQRALDFYSIHVTKESTHPVKPLAQIAGNRYASGPVGKALSDACMGTIASFLSKYQDIIIEHQKVVKGNQKRLESLRELAGKENLEYPSVTLPPQPHTKEGVDAYNEVIARVRMWVNLNLWQKLKLSRDDAKPLLRLKGFPSFPLVERQANEVDWWDMVCNVKKLINEKKEDGKVFWQNLAGYKRQEALRPYLSSPEDRKKGKKFARYQFGDLLLHLEKKHGEDWGKVYDEAWERIDKKVEGLSKHIKLEEERRSEDAQSKAALTDWLRAKASFVIEGLKEADKDEFCRCELKLQKWYGDLRGKPFAIEAENSILDISGFSKQYNCAFIWQKDGVKKLNLYLIINYFKGGKLRFKKIKPEAFEANRFYTVINKKSGEIVPMEVNFNFDDPNLIILPLAFGKRQGREFIWNDLLSLETGSLKLANGRVIEKTLYNRRTRQDEPALFVALTFERREVLDSSNIKPMNLIGVDRGENIPAVIALTDPEGCPLSRFKDSLGNPTHILRIGESYKEKQRTIQAKKEVEQRRAGGYSRKYASKAKNLANDMVRNTARDLLYYAVTQDAMLIFENLSRGFGRQGKRTFMAERQYTRMEDWLTAKLAYEGLPSKTYLSKTLAQYTSKTCSNCGFTITSADYDRVLEKLKKTATGWMTTINGKELKVEGQITYYNRRKRQNVVKDLSVELDRLSEESVNNDISSWTKGRSGEALSLLKKRFSHRPVQEKFVCLNCGFETHADEQAALNIARSWLFLRSQEYKKYQTNKTTGNTDKRAFVETWQSFYRKKLKEVWKPAV

SEQ ID NO: 351 - protein, 978 aa, synthetic construct
  REGION 1..978: note = CasX variant
QEIKRINKIRRRLVKDSNTKKAGKTGPMKTLLVRVMTPDLRERLENLRKKPENIPQPISNTSRANLNKLLTDYTEMKKAILHVYWEEFQKDPVGLMSRVAQPASKKIDQNKLKPEMDEKGNLTTAGFACSQCGQPLFVYKLEQVSEKGKAYTNYFGRCNVAEHEKLIKLAQLKPEKDSDEAVTYSLGKFGQRALDFYSIHVTKESTHPVKPLAQIAGNRYASSPVGKALSDACMGTIASFLSKYQDIIIEHQKVVKGNQKRLESLRELAGKENLEYPSVTLPPQPHTKEGVDAYNEVIARVRMWVNLNLWQKLKLSRDDAKPLLRLKGFPSFPLVERQANEVDWWDMVCNVKKLINEKKEDGKVFWQNLAGYKRQEALRPYLSSEEDRKKGKKFARYQLGDLLLHLEKKHGEDWGKVYDEAWERIDKKVEGLSKHIKLEEERRSEDAQSKAALTDWLRAKASFVIEGLKEADKDEFCRCELKLQKWYGDLRGKPFAIEAENSILDISGFSKQYNCAFIWQKDGVKKLNLYLIINYFKGGKLRFKKIKPEAFEANRFYTVINKKSGEIVPMEVNFNFDDPNLIILPLAFGKRQGREFIWNDLLSLETGSLKLANGRVIEKTLYNRRTRQDEPALFVALTFERREVLDSSNIKPMNLIGVDRGENIPAVIALTDPEGCPLSRFKDSLGNPTHILRIGESYKEKQRTIQAKKEVEQRRAGGYSRKYASKAKNLADDMVRNTARDLLYYAVTQDAMLIFENLSRGFGRQGKRTFMAERQYTRMEDWLTAKLAYEGLPSKTYLSKTLAQYTSKTCSNCGFTITSADYDRVLEKLKKTATGWMTTINGKELKVEGQITYYNRYKRQNVVKDLSVELDRLSEESVNNDISSWTKGRSGEALSLLKKRFSHRPVQEKFVCLNCGFETHADEQAALNIARSWLFLRSQEYKKYQTNKTTGNTDKRAFVETWQSFYRKKLKEVWKPAV

SEQ ID NO: 352 - protein, 978 aa, synthetic construct
  REGION 1..978: note = CasX variant
QEIKRINKIRRRLVKDSNTKKAGKTGPMKTLLVRVMTPDLRERLENLRKKPENIPQPISNTSRANLNKLLTDYTEMKKAILHVYWEEFQKDPVGLMSRVAQPASKKIDQNKLKPEMDEKGNLTTAGFACSQCGQPLFVYKLEQVSEKGKAYTNYFGRCNVAEHEKLILLAQLKPEKDSDEAVTYSLGKFGQRALDFYSIHVTKESTHPVKPLAQIAGNRYASSPVGKALSGACMGTIASFLSKYQDIIIEHQKVVKGNQKRLESLRELAGKENLEYPSVTLPPQPHTKEGVDAYNEVIARVRMWVNLNLWQKLKLSRDDAKPLLRLKGFPSFPLVERQANEVDWWDMVCNVKKLINEKKEDGKVFWQNLAGYKRQEALRPYLSSEEDRKKGKKFARYQLGDLLLHLEKKHGEDWGKVYDEAWERIDKKVEGLSKHIKLEEERRSEDAQSKAALTDWLRAKASFVIEGLKEADKDEFCRCELKLQKWYGDLRGKPFAIEAENSILDISGFSKQYNCAFIWQKDGVKKLNLYLIINYFKGGKLRFKKIKPEAFEANRFYTVINKKSGEIVPMEVNFNFDDPNLIILPLAFGKRQGREFIWNDLLSLETGSLKLANGRVIEKTLYNRRTRQDEPALFVALTFERREVLDSSNIKPMNLIGVDRGENIPAVIALTDPEGCPLSRFKDSLGNPTHILRIGESYKEKQRTIQAKKEVEQRRAGGYSRKYASKAKNLADDMVRNTARDLLYYAVTQDAMLIFENLSRGFGRQGKRTFMAERQYTRMEDWLTAKLAYEGLPSKTYLSKTLAQYTSKTCSNCGFTITSADYDRVLEKLKKTATGWMTTINGKELKVEGQITYYNRYKRQNVVKDLSVELDRLSEESVNNDISSWTKGRSGEALSLLKKRFSHRPVQEKFVCLNCGFETHADEQAALNIARSWLFLRSQEYKKYQTNKTTGNTDKRAFVETWQSFYRKKLKEVWKPAV

SEQ ID NO: 353 - protein, 978 aa, synthetic construct
  REGION 1..978: note = CasX variant
QEIKRINKIRRRLVKDSNTKKAGKTGPMKTLLVRVMTPDLRERLENLRKKPENIPQPISNTSRANLNKLLTDYTEMKKAILHVYWEEFQKDPVGLMSRVAQPASKKIDQNKLKPEMDEKGNLTTAGFACSQCGQPLFVYKLEQVSEKGKAYTNYFGRCNVAEHEKLIKLAQLKPEKDSDEAVTYSLGKFGQRALDFYSIHVTKESTHPVKPLAQIAGNRYASSPVGKALSGACMGTIASFLSKYQDIIIEHQKVVKGNQKRLESLRELAGKENLEYPSVTLPPQPHTKEGVDAYNEVIARVRMWVNLNLWQKLKLSRDDAKPLLRLKGFPSFPLVERQANEVDWWDMVCNVKKLINEKKEDGKVFWQNLAGYKRQEALRPYLSSEEDRKKGKKFARYQLGDLLLHLEKKHGEDWGKVYDEAWERIDKKVEGLSKHIKLEEERRSEDAQSKAALTDWLRAKASFVIEGLKEADKDEFCRCELKLQKWYGDLRGKPFAIEAENSILDISGFSKQYNCAFIWQKDGVKKLNLYLIINYFKGGKLRFKKIKPEAFEANRFYTVINKKSGEIVPMEVNFNFDDPNLIILPLAFGKRQGREFIWNDLLSLETGSLKLANGRVIEKTLYNRRTRQDEPALFVALTFERREVLDSSNIKPMNLIGVDRGENIPAVIALTDPEGCPLSRFKDSLGNPTHILRIGESYKEKQRTIQAKKEVEQRRAGGYSRKYASKAKNLADDMVRNTARDLLYYAVTQDAMLIFENLSRGFGRQGKRTFMAERQYTRMEDWLTAKLAYEGLPSKTYLSKTLAQYTSKTCSNCGFTITSADYDRVLEKLKKTATGWMTTINGKELKVEGQITYYNRYKRQNVVKDLSVELDRLSEESVNNDISSWTKGRSGEALSLLKKRFSHRPVQEKFVCLNCGFETHADEQAALNIARSWLFLRSQEYKKYQTNKTTGNTDKRAFVETWQSFYRKKLKEVWKPAV

SEQ ID NO: 354 - protein, 979 aa, synthetic construct
  REGION 1..979: note = CasX variant
QEIKRINKIRRRLVKDSNTKKAGKTRGPMKTLLVRVMTPDLRERLENLRKKPENIPQPISNTSRANLNKLLTDYTEMKKAILHVYWEEFQKDPVGLMSRVAQPASKKIDQNKLKPEMDEKGNLTTAGFACSQCGQPLFVYKLEQVSEKGKAYTNYFGRCNVAEHEKLIKLAQLKPEKDSDEAVTYSLGKFGQRALDFYSIHVTKESTHPVKPLAQIAGNRYASGPVGKALSDACMGTIASFLSKYQDIIIEHQKVVKGNQKRLESLRELAGKENLEYPSVTLPPQPHTKEGVDAYNEVIARVRMWVNLNLWQKLKLSRDDAKPLLRLKGFPSFPLVERQANEVDWWDMVCNVKKLINEKKEDGKVFWQNLAGYKRQEALRPYLSSEEDRKKGKKFARYQLGDLLLHLEKKHGEDWGKVYDEAWERIDKKVEGLSKHIKLEEERRSEDAQSKAALTDWLRAKASFVIEGLKEADKDEFCRCELKLQKWYGDLRGKPFAIEAENSILDISGFSKQYNCAFIWQKDGVKKLNLYLIINYFKGGKLRFKKIKPEAFEANRFYTVINKKSGEIVPMEVNFNFDDPNLIILPLAFGKRQGREFIWNDLLSLETGSLKLANGRVIEKTLYNRRTRQDEPALFVALTFERREVLDSSNIKPMNLIGVDRGENIPAVIALTDPEGCPLSRFKDSLGNPTHILRIGESYKEKQRTIQAKKEVEQRRAGGYSRKYASKAKNLADDMVRNTARDLLYYAVTQDAMLIFENLSRGFGRQGKRTFMAERQYTRMEDWLTAKLAYEGLPSKTYLSKTLAQYTSKTCSNCGFTITSADYDRVLEKLKKTATGWMTTINGKELKVEGQITYYNRYKRQNVVKDLSVELDRLSEESVNNDISSWTKGRSGEALSLLKKRFSHRPVQEKFVCLNCGFETHADEQAALNIARSWLFLRSQEYKKYQTNKTTGNTDKRAFVETWQSFYRKKLKEVWKPAV

SEQ ID NO: 355 - protein, 979 aa, synthetic construct
  REGION 1..979: note = CasX variant
QEIKRINKIRRRLVKDSNTKKAGKTRGPMKTLLVRVMTPDLRERLENLRKKPENIPQPISNTSRANLNKLLTDYTEMKKAILHVYWEEFQKDPVGLMSRVAQPASKKIDQNKLKPEMDEKGNLTTAGFACSQCGQPLFVYKLEQVSEKGKAYTNYFGRCNVAEHEKLIKLAQLKPEKDSDEAVTYSLGKFGQRALDFYSIHVTKESTHPVKPLAQIAGNRYASSPVGKALSDACMGTIASFLSKYQDIIIEHQKVVKGNQKRLESLRELAGKENLEYPSVTLPPQPHTKEGVDAYNEVIARVRMWVNLNLWQKLKLSRDDAKPLLRLKGFPSFPLVERQANEVDWWDMVCNVKKLINEKKEDGKVFWQNLAGYKRQEALRPYLSSEEDRKKGKKFARYQLGDLLLHLEKKHGEDWGKVYDEAWERIDKKVEGLSKHIKLEEERRSEDAQSKAALTDWLRAKASFVIEGLKEADKDEFCRCELKLQKWYGDLRGKPFAIEAENSILDISGFSKQYNCAFIWQKDGVKKLNLYLIINYFKGGKLRFKKIKPEAFEANRFYTVINKKSGEIVPMEVNFNFDDPNLIILPLAFGKRQGREFIWNDLLSLETGSLKLANGRVIEKTLYNRRTRQDEPALFVALTFERREVLDSSNIKPMNLIGVDRGENIPAVIALTDPEGCPLSRFKDSLGNPTHILRIGESYKEKQRTIQAKKEVEQRRAGGYSRKYASKAKNLADDMVRNTARDLLYYAVTQDAMLIFENLSRGFGRQGKRTFMAERQYTRMEDWLTAKLAYEGLPSKTYLSKTLAQYTSKTCSNCGFTITSADYDRVLEKLKKTATGWMTTINGKELKVEGQITYYNRYKRQNVVKDLSVELDRLSEESVNNDISSWTKGRSGEALSLLKKRFSHRPVQEKFVCLNCGFETHADEQAALNIARSWLFLRSQEYKKYQTNKTTGNTDKRAFVETWQSFYRKKLKEVWKPAV

SEQ ID NO: 356 - protein, 979 aa, synthetic construct
  REGION 1..979: note = CasX variant
QEIKRINKIRRRLVKDSNTKKAGKTRGPMKTLLVRVMTPDLRERLENLRKKPENIPQPISNTSRANLNKLLTDYTEMKKAILHVYWEEFQKDPVGLMSRVAQPASKKIDQNKLKPEMDEKGNLTTAGFACSQCGQPLFVYKLEQVSEKGKAYTNYFGRCNVAEHEKLIKLAQLKPEKDSDEAVTYSLGKFGQRALDFYSIHVTKESTHPVKPLAQIAGNRYASSPVGKALSGACMGTIASFLSKYQDIIIEHQKVVKGNQKRLESLRELAGKENLEYPSVTLPPQPHTKEGVDAYNEVIARVRMWVNLNLWQKLKLSRDDAKPLLRLKGFPSFPLVERQANEVDWWDMVCNVKKLINEKKEDGKVFWQNLAGYKRQEALRPYLSSEEDRKKGKKFARYQLGDLLLHLEKKHGEDWGKVYDEAWERIDKKVEGLSKHIKLEEERRSEDAQSKAALTDWLRAKASFVIEGLKEADKDEFCRCELKLQKWYGDLRGKPFAIEAENSILDISGFSKQYNCAFIWQKDGVKKLNLYLIINYFKGGKLRFKKIKPEAFEANRFYTVINKKSGEIVPMEVNFNFDDPNLIILPLAFGKRQGREFIWNDLLSLETGSLKLANGRVIEKTLYNRRTRQDEPALFVALTFERREVLDSSNIKPMNLIGVDRGENIPAVIALTDPEGCPLSRFKDSLGNPTHILRIGESYKEKQRTIQAKKEVEQRRAGGYSRKYASKAKNLADDMVRNTARDLLYYAVTQDAMLIFENLSRGFGRQGKRTFMAERQYTRMEDWLTAKLAYEGLPSKTYLSKTLAQYTSKTCSNCGFTITSADYDRVLEKLKKTATGWMTTINGKELKVEGQITYYNRYKRQNVVKDLSVELDRLSEESVNNDISSWTKGRSGEALSLLKKRFSHRPVQEKFVCLNCGFETHADEQAALNIARSWLFLRSQEYKKYQTNKTTGNTDKRAFVETWQSFYRKKLKEVWKPAV

SEQ ID NO: 357 - protein, 978 aa, synthetic construct
  REGION 1..978: note = CasX variant
QEIKRINKIRRRLVKDSNTKKAGKTGPMKTLLVRVMTPDLRERLENLRKKPENIPQPISNTSRANLNKLLTDYTEMKKAILHVYWEEFQKDPVGLMSRVAQPASKKIDQNKLKPEMDEKGNLTTAGFACSQCGQPLFVYKLEQVSEKGKAYTNYFGRCNVAEHEKLILLAQLKPEKDSDEAVTYSLGKFGQRALDFYSIHVTKESTHPVKPLAQIAGNRYASYPVGKALSGACMGTIASFLSKYQDIIIEHQKVVKGNQKRLESLRELAGKENLEYPSVTLPPQPHTKEGVDAYNEVIARVRMWVNLNLWQKLKLSRDDAKPLLRLKGFPSFPLVERQANEVDWWDMVCNVKKLINEKKEDGKVFWQNLAGYKRQEALRPYLSSEEDRKKGKKFARYQLGDLLLHLEKKHGEDWGKVYDEAWERIDKKVEGLSKHIKLEEERRSEDAQSKAALTDWLRAKASFVIEGLKEADKDEFCRCELKLQKWYGDLRGKPFAIEAENSILDISGFSKQYNCAFIWQKDGVKKLNLYLIINYFKGGKLRFKKIKPEAFEANRFYTVINKKSGEIVPMEVNFNFDDPNLIILPLAFGKRQGREFIWNDLLSLETGSLKLANGRVIEKTLYNRRTRQDEPALFVALTFERREVLDSSNIKPMNLIGVDRGENIPAVIALTDPEGCPLSRFKDSLGNPTHILRIGESYKEKQRTIQAKKEVEQRRAGGYSRKYASKAKNLADDMVRNTARDLLYYAVTQDAMLIFENLSRGFGRQGKRTFMAERQYTRMEDWLTAKLAYEGLPSKTYLSKTLAQYTSKTCSNCGFTITSADYDRVLEKLKKTATGWMTTINGKELKVEGQITYYNRYKRQNVVKDLSVELDRLSEESVNNDISSWTKGRSGEALSLLKKRFSHRPVQEKFVCLNCGFETHADEQAALNIARSWLFLRSQEYKKYQTNKTTGNTDKRAFVETWQSFYRKKLKEVWKPAV

SEQ ID NO: 358 - protein, 978 aa, synthetic construct
  REGION 1..978: note = CasX variant
QEIKRINKIRRRLVKDSNTKKAGKTGPMKTLLVRVMTPDLRERLENLRKKPENIPQPISNTSRANLNKLLTDYTEMKKAILHVYWEEFQKDPVGLMSRVAQPASKKIDQNKLKPEMDEKGNLTTAGFACSQCGQPLFVYKLEQVSEKGKAYTNYFGRCNVAEHEKLILLAQLKPEKDSDEAVTYSLGKFGQRALDFYSIHVTKESTHPVKPLAQIAGNRYASHPVGKALSGACMGTIASFLSKYQDIIIEHQKVVKGNQKRLESLRELAGKENLEYPSVTLPPQPHTKEGVDAYNEVIARVRMWVNLNLWQKLKLSRDDAKPLLRLKGFPSFPLVERQANEVDWWDMVCNVKKLINEKKEDGKVFWQNLAGYKRQEALRPYLSSEEDRKKGKKFARYQLGDLLLHLEKKHGEDWGKVYDEAWERIDKKVEGLSKHIKLEEERRSEDAQSKAALTDWLRAKASFVIEGLKEADKDEFCRCELKLQKWYGDLRGKPFAIEAENSILDISGFSKQYNCAFIWQKDGVKKLNLYLIINYFKGGKLRFKKIKPEAFEANRFYTVINKKSGEIVPMEVNFNFDDPNLIILPLAFGKRQGREFIWNDLLSLETGSLKLANGRVIEKTLYNRRTRQDEPALFVALTFERREVLDSSNIKPMNLIGVDRGENIPAVIALTDPEGCPLSRFKDSLGNPTHILRIGESYKEKQRTIQAKKEVEQRRAGGYSRKYASKAKNLADDMVRNTARDLLYYAVTQDAMLIFENLSRGFGRQGKRTFMAERQYTRMEDWLTAKLAYEGLPSKTYLSKTLAQYTSKTCSNCGFTITSADYDRVLEKLKKTATGWMTTINGKELKVEGQITYYNRYKRQNVVKDLSVELDRLSEESVNNDISSWTKGRSGEALSLLKKRFSHRPVQEKFVCLNCGFETHADEQAALNIARSWLFLRSQEYKKYQTNKTTGNTDKRAFVETWQSFYRKKLKEVWKPAV

SEQ ID NO: 359 - protein, 979 aa, synthetic construct
  REGION 1..979: note = CasX variant
QEIKRINKIRRRLVKDSNTKKAGKTRGPMKTLLVRVMTPDLRERLENLRKKPENIPQPISNTSRANLNKLLTDYTEMKKAILHVYWEEFQKDPVGLMSRVAQPASKKIDQNKLKPEMDEKGNLTTAGFACSQCGQPLFVYKLEQVSEKGKAYTNYFGRCNVAEHEKLILLAQLKPEKDSDEAVTYSLGKFGQRALDFYSIHVTKESTHPVKPLAQIAGNRYASYPVGKALSGACMGTIASFLSKYQDIIIEHQKVVKGNQKRLESLRELAGKENLEYPSVTLPPQPHTKEGVDAYNEVIARVRMWVNLNLWQKLKLSRDDAKPLLRLKGFPSFPLVERQANEVDWWDMVCNVKKLINEKKEDGKVFWQNLAGYKRQEALRPYLSSEEDRKKGKKFARYQLGDLLLHLEKKHGEDWGKVYDEAWERIDKKVEGLSKHIKLEEERRSEDAQSKAALTDWLRAKASFVIEGLKEADKDEFCRCELKLQKWYGDLRGKPFAIEAENSILDISGFSKQYNCAFIWQKDGVKKLNLYLIINYFKGGKLRFKKIKPEAFEANRFYTVINKKSGEIVPMEVNFNFDDPNLIILPLAFGKRQGREFIWNDLLSLETGSLKLANGRVIEKTLYNRRTRQDEPALFVALTFERREVLDSSNIKPMNLIGVDRGENIPAVIALTDPEGCPLSRFKDSLGNPTHILRIGESYKEKQRTIQAKKEVEQRRAGGYSRKYASKAKNLADDMVRNTARDLLYYAVTQDAMLIFENLSRGFGRQGKRTFMAERQYTRMEDWLTAKLAYEGLPSKTYLSKTLAQYTSKTCSNCGFTITSADYDRVLEKLKKTATGWMTTINGKELKVEGQITYYNRYKRQNVVKDLSVELDRLSEESVNNDISSWTKGRSGEALSLLKKRFSHRPVQEKFVCLNCGFETHADEQAALNIARSWLFLRSQEYKKYQTNKTTGNTDKRAFVETWQSFYRKKLKEVWKPAV

SEQ ID NO: 360 - protein, 979 aa, synthetic construct
  REGION 1..979: note = CasX variant
QEIKRINKIRRRLVKDSNTKKAGKTRGPMKTLLVRVMTPDLRERLENLRKKPENIPQPISNTSRANLNKLLTDYTEMKKAILHVYWEEFQKDPVGLMSRVAQPASKKIDQNKLKPEMDEKGNLTTAGFACSQCGQPLFVYKLEQVSEKGKAYTNYFGRCNVAEHEKLILLAQLKPEKDSDEAVTYSLGKFGQRALDFYSIHVTKESTHPVKPLAQIAGNRYASHPVGKALSGACMGTIASFLSKYQDIIIEHQKVVKGNQKRLESLRELAGKENLEYPSVTLPPQPHTKEGVDAYNEVIARVRMWVNLNLWQKLKLSRDDAKPLLRLKGFPSFPLVERQANEVDWWDMVCNVKKLINEKKEDGKVFWQNLAGYKRQEALRPYLSSEEDRKKGKKFARYQLGDLLLHLEKKHGEDWGKVYDEAWERIDKKVEGLSKHIKLEEERRSEDAQSKAALTDWLRAKASFVIEGLKEADKDEFCRCELKLQKWYGDLRGKPFAIEAENSILDISGFSKQYNCAFIWQKDGVKKLNLYLIINYFKGGKLRFKKIKPEAFEANRFYTVINKKSGEIVPMEVNFNFDDPNLIILPLAFGKRQGREFIWNDLLSLETGSLKLANGRVIEKTLYNRRTRQDEPALFVALTFERREVLDSSNIKPMNLIGVDRGENIPAVIALTDPEGCPLSRFKDSLGNPTHILRIGESYKEKQRTIQAKKEVEQRRAGGYSRKYASKAKNLADDMVRNTARDLLYYAVTQDAMLIFENLSRGFGRQGKRTFMAERQYTRMEDWLTAKLAYEGLPSKTYLSKTLAQYTSKTCSNCGFTITSADYDRVLEKLKKTATGWMTTINGKELKVEGQITYYNRYKRQNVVKDLSVELDRLSEESVNNDISSWTKGRSGEALSLLKKRFSHRPVQEKFVCLNCGFETHADEQAALNIARSWLFLRSQEYKKYQTNKTTGNTDKRAFVETWQSFYRKKLKEVWKPAV

SEQ ID NO: 361 - protein, 978 aa, synthetic construct
  REGION 1..978: note = CasX variant
QEIKRINKIRRRLVKDSNTKKAGKTGPMKTLLVRVMTPDLRERLENLRKKPENIPQPISNTSRANLNKLLTDYTEMKKAILHVYWEEFQKDPVGLMSRVAQPASKKIDQNKLKPEMDEKGNLTTAGFACSQCGQPLFVYKLEQVSEKGKAYTNYFGRCNVAEHEKLIKLAQLKPEKDSDEAVTYSLGKFGQRALDFYSIHVTKESTHPVKPLAQIAGNRYASGPVGKALSGACMGTIASFLSKYQDIIIEHQKVVKGNQKRLESLRELAGKENLEYPSVTLPPQPHTKEGVDAYNEVIARVRMWVNLNLWQKLKLSRDDAKPLLRLKGFPSFPLVERQANEVDWWDMVCNVKKLINEKKEDGKVFWQNLAGYKRQEALRPYLSSEEDRKKGKKFARYQLGDLLLHLEKKHGEDWGKVYDEAWERIDKKVEGLSKHIKLEEERRSEDAQSKAALTDWLRAKASFVIEGLKEADKDEFCRCELKLQKWYGDLRGKPFAIEAENSILDISGFSKQYNCAFIWQKDGVKKLNLYLIINYFKGGKLRFKKIKPEAFEANRFYTVINKKSGEIVPMEVNFNFDDPNLIILPLAFGKRQGREFIWNDLLSLETGSLKLANGRVIEKTLYNRRTRQDEPALFVALTFERREVLDSSNIKPMNLIGVDRGENIPAVIALTDPEGCPLSRFKDSLGNPTHILRIGESYKEKQRTIQAKKEVEQRRAGGYSRKYASKAKNLADDMVRNTARDLLYYAVTQDAMLIFENLSRGFGRQGKRTFMAERQYTRMEDWLTAKLAYEGLPSKTYLSKTLAQYTSKTCSNCGFTITSADYDRVLEKLKKTATGWMTTINGKELKVEGQITYYNRYKRQNVVKDLSVELDRLSEESVNNDISSWTKGRSGEALSLLKKRFSHRPVQEKFVCLNCGFETHADEQAALNIARSWLFLRSQEYKKYQTNKTTGNTDKRAFVETWQSFYRKKLKEVWKPAV

SEQ ID NO: 362 - protein, 978 aa, synthetic construct
  REGION 1..978: note = CasX variant
QEIKRINKIRRRLVKDSNTKKAGKTGPMKTLLVRVMTPDLRERLENLRKKPENIPQPISNTSRANLNKLLTDYTEMKKAILHVYWEEFQKDPVGLMSRVAQPASKKIDQNKLKPEMDEKGNLTTAGFACSQCGQPLFVYKLEQVSEKGKAYTNYFGRCNVAEHEKLIKLAQLKPEKDSDEAVTYSLGKFGQRALDFYSIHVTKESTHPVKPLAQIAGNRYASYPVGKALSGACMGTIASFLSKYQDIIIEHQKVVKGNQKRLESLRELAGKENLEYPSVTLPPQPHTKEGVDAYNEVIARVRMWVNLNLWQKLKLSRDDAKPLLRLKGFPSFPLVERQANEVDWWDMVCNVKKLINEKKEDGKVFWQNLAGYKRQEALRPYLSSEEDRKKGKKFARYQLGDLLLHLEKKHGEDWGKVYDEAWERIDKKVEGLSKHIKLEEERRSEDAQSKAALTDWLRAKASFVIEGLKEADKDEFCRCELKLQKWYGDLRGKPFAIEAENSILDISGFSKQYNCAFIWQKDGVKKLNLYLIINYFKGGKLRFKKIKPEAFEANRFYTVINKKSGEIVPMEVNFNFDDPNLIILPLAFGKRQGREFIWNDLLSLETGSLKLANGRVIEKTLYNRRTRQDEPALFVALTFERREVLDSSNIKPMNLIGVDRGENIPAVIALTDPEGCPLSRFKDSLGNPTHILRIGESYKEKQRTIQAKKEVEQRRAGGYSRKYASKAKNLADDMVRNTARDLLYYAVTQDAMLIFENLSRGFGRQGKRTFMAERQYTRMEDWLTAKLAYEGLPSKTYLSKTLAQYTSKTCSNCGFTITSADYDRVLEKLKKTATGWMTTINGKELKVEGQITYYNRYKRQNVVKDLSVELDRLSEESVNNDISSWTKGRSGEALSLLKKRFSHRPVQEKFVCLNCGFETHADEQAALNIARSWLFLRSQEYKKYQTNKTTGNTDKRAFVETWQSFYRKKLKEVWKPAV

SEQ ID NO: 363 - protein, 979 aa, synthetic construct
  REGION 1..979: note = CasX variant
QEIKRINKIRRRLVKDSNTKKAGKTRGPMKTLLVRVMTPDLRERLENLRKKPENIPQPISNTSRANLNKLLTDYTEMKKAILHVYWEEFQKDPVGLMSRVAQPASKKIDQNKLKPEMDEKGNLTTAGFACSQCGQPLFVYKLEQVSEKGKAYTNYFGRCNVAEHEKLIKLAQLKPEKDSDEAVTYSLGKFGQRALDFYSIHVTKESTHPVKPLAQIAGNRYASGPVGKALSGACMGTIASFLSKYQDIIIEHQKVVKGNQKRLESLRELAGKENLEYPSVTLPPQPHTKEGVDAYNEVIARVRMWVNLNLWQKLKLSRDDAKPLLRLKGFPSFPLVERQANEVDWWDMVCNVKKLINEKKEDGKVFWQNLAGYKRQEALRPYLSSEEDRKKGKKFARYQLGDLLLHLEKKHGEDWGKVYDEAWERIDKKVEGLSKHIKLEEERRSEDAQSKAALTDWLRAKASFVIEGLKEADKDEFCRCELKLQKWYGDLRGKPFAIEAENSILDISGFSKQYNCAFIWQKDGVKKLNLYLIINYFKGGKLRFKKIKPEAFEANRFYTVINKKSGEIVPMEVNFNFDDPNLIILPLAFGKRQGREFIWNDLLSLETGSLKLANGRVIEKTLYNRRTRQDEPALFVALTFERREVLDSSNIKPMNLIGVDRGENIPAVIALTDPEGCPLSRFKDSLGNPTHILRIGESYKEKQRTIQAKKEVEQRRAGGYSRKYASKAKNLADDMVRNTARDLLYYAVTQDAMLIFENLSRGFGRQGKRTFMAERQYTRMEDWLTAKLAYEGLPSKTYLSKTLAQYTSKTCSNCGFTITSADYDRVLEKLKKTATGWMTTINGKELKVEGQITYYNRYKRQNVVKDLSVELDRLSEESVNNDISSWTKGRSGEALSLLKKRFSHRPVQEKFVCLNCGFETHADEQAALNIARSWLFLRSQEYKKYQTNKTTGNTDKRAFVETWQSFYRKKLKEVWKPAV

SEQ ID NO: 364 - protein, 979 aa, synthetic construct
  REGION 1..979: note = CasX variant
QEIKRINKIRRRLVKDSNTKKAGKTRGPMKTLLVRVMTPDLRERLENLRKKPENIPQPISNTSRANLNKLLTDYTEMKKAILHVYWEEFQKDPVGLMSRVAQPASKKIDQNKLKPEMDEKGNLTTAGFACSQCGQPLFVYKLEQVSEKGKAYTNYFGRCNVAEHEKLIKLAQLKPEKDSDEAVTYSLGKFGQRALDFYSIHVTKESTHPVKPLAQIAGNRYASYPVGKALSGACMGTIASFLSKYQDIIIEHQKVVKGNQKRLESLRELAGKENLEYPSVTLPPQPHTKEGVDAYNEVIARVRMWVNLNLWQKLKLSRDDAKPLLRLKGFPSFPLVERQANEVDWWDMVCNVKKLINEKKEDGKVFWQNLAGYKRQEALRPYLSSEEDRKKGKKFARYQLGDLLLHLEKKHGEDWGKVYDEAWERIDKKVEGLSKHIKLEEERRSEDAQSKAALTDWLRAKASFVIEGLKEADKDEFCRCELKLQKWYGDLRGKPFAIEAENSILDISGFSKQYNCAFIWQKDGVKKLNLYLIINYFKGGKLRFKKIKPEAFEANRFYTVINKKSGEIVPMEVNFNFDDPNLIILPLAFGKRQGREFIWNDLLSLETGSLKLANGRVIEKTLYNRRTRQDEPALFVALTFERREVLDSSNIKPMNLIGVDRGENIPAVIALTDPEGCPLSRFKDSLGNPTHILRIGESYKEKQRTIQAKKEVEQRRAGGYSRKYASKAKNLADDMVRNTARDLLYYAVTQDAMLIFENLSRGFGRQGKRTFMAERQYTRMEDWLTAKLAYEGLPSKTYLSKTLAQYTSKTCSNCGFTITSADYDRVLEKLKKTATGWMTTINGKELKVEGQITYYNRYKRQNVVKDLSVELDRLSEESVNNDISSWTKGRSGEALSLLKKRFSHRPVQEKFVCLNCGFETHADEQAALNIARSWLFLRSQEYKKYQTNKTTGNTDKRAFVETWQSFYRKKLKEVWKPAV

SEQ ID NO: 365 - protein, 979 aa, synthetic construct
  REGION 1..979: note = CasX variant
QEIKRINKIRRRLVKDSNTKKAGKTRGPMKTLLVRVMTPDLRERLENLRKKPENIPQPISNTSRANLNKLLTDYTEMKKAILHVYWEEFQKDPVGLMSRVAQPASKKIDQNKLKPEMDEKGNLTTAGFACSQCGQPLFVYKLEQVSEKGKAYTNYFGRCNVAEHEKLIKLAQLKPEKDSDEAVTYSLGKFGQRALDFYSIHVTKESTHPVKPLAQIAGNRYASHPVGKALSGACMGTIASFLSKYQDIIIEHQKVVKGNQKRLESLRELAGKENLEYPSVTLPPQPHTKEGVDAYNEVIARVRMWVNLNLWQKLKLSRDDAKPLLRLKGFPSFPLVERQANEVDWWDMVCNVKKLINEKKEDGKVFWQNLAGYKRQEALRPYLSSEEDRKKGKKFARYQLGDLLLHLEKKHGEDWGKVYDEAWERIDKKVEGLSKHIKLEEERRSEDAQSKAALTDWLRAKASFVIEGLKEADKDEFCRCELKLQKWYGDLRGKPFAIEAENSILDISGFSKQYNCAFIWQKDGVKKLNLYLIINYFKGGKLRFKKIKPEAFEANRFYTVINKKSGEIVPMEVNFNFDDPNLIILPLAFGKRQGREFIWNDLLSLETGSLKLANGRVIEKTLYNRRTRQDEPALFVALTFERREVLDSSNIKPMNLIGVDRGENIPAVIALTDPEGCPLSRFKDSLGNPTHILRIGESYKEKQRTIQAKKEVEQRRAGGYSRKYASKAKNLADDMVRNTARDLLYYAVTQDAMLIFENLSRGFGRQGKRTFMAERQYTRMEDWLTAKLAYEGLPSKTYLSKTLAQYTSKTCSNCGFTITSADYDRVLEKLKKTATGWMTTINGKELKVEGQITYYNRYKRQNVVKDLSVELDRLSEESVNNDISSWTKGRSGEALSLLKKRFSHRPVQEKFVCLNCGFETHADEQAALNIARSWLFLRSQEYKKYQTNKTTGNTDKRAFVETWQSFYRKKLKEVWKPAV

SEQ ID NO: 366 - protein, 979 aa, synthetic construct; identical to SEQ ID NO: 214
  REGION 1..979: note = CasX variant

SEQ ID NO: 367 - protein, 979 aa, synthetic construct
  REGION 1..979: note = CasX variant
QEIKRINKIRRRLVKDSNTKKAGKTRGPMKTLLVRVMTPDLRERLENLRKKPENIPQPISNTSRANLNKLLTDYTEMKKAILHVYWEEFQKDPVGLMSRVAQPASKKIDQNKLKPEMDEKGNLTTAGFACSQCGQPLFVYKLEQVSEKGKAYTNYFGRCNVAEHEKLILLAQLKPEKDSDEAVTYSLGKFGQRALDFYSIHVTKESTHPVKPLAQIAGNRYASHPVGKALSDACMGTIASFLSKYQDIIIEHQKVVKGNQKRLESLRELAGKENLEYPSVTLPPQPHTKEGVDAYNEVIARVRMWVNLNLWQKLKLSRDDAKPLLRLKGFPSFPLVERQANEVDWWDMVCNVKKLINEKKEDGKVFWQNLAGYKRQEALRPYLSSEEDRKKGKKFARYQLGDLLLHLEKKHGEDWGKVYDEAWERIDKKVEGLSKHIKLEEERRSEDAQSKAALTDWLRAKASFVIEGLKEADKDEFCRCELKLQKWYGDLRGKPFAIEAENSILDISGFSKQYNCAFIWQKDGVKKLNLYLIINYFKGGKLRFKKIKPEAFEANRFYTVINKKSGEIVPMEVNFNFDDPNLIILPLAFGKRQGREFIWNDLLSLETGSLKLANGRVIEKTLYNRRTRQDEPALFVALTFERREVLDSSNIKPMNLIGVDRGENIPAVIALTDPEGCPLSRFKDSLGNPTHILRIGESYKEKQRTIQAKKEVEQRRAGGYSRKYASKAKNLADDMVRNTARDLLYYAVTQDAMLIFENLSRGFGRQGKRTFMAERQYTRMEDWLTAKLAYEGLPSKTYLSKTLAQYTSKTCSNCGFTITSADYDRVLEKLKKTATGWMTTINGKELKVEGQITYYNRYKRQNVVKDLSVELDRLSEESVNNDISSWTKGRSGEALSLLKKRFSHRPVQEKFVCLNCGFETHADEQAALNIARSWLFLRSQEYKKYQTNKTTGNTDKRAFVETWQSFYRKKLKEVWKPAV

SEQ ID NO: 368 - protein, 978 aa, synthetic construct; identical to SEQ ID NO: 263
  REGION 1..978: note = CasX variant

SEQ ID NO: 369 - protein, 978 aa, synthetic construct
  REGION 1..978: note = CasX variant
QEIKRINKIRRRLVKDSNTKKAGKTGPMKTLLVRVMTPDLRERLENLRKKPENIPQPISNTSRANLNKLLTDYTEMKKAILHVYWEEFQKDPVGLMSRVAQPASKKIDQNKLKPEMDEKGNLTTAGFACSQCGQPLFVYKLEQVSEKGKAYTNYFGRCNVAEHEKLIKLAQLKPEKDSDEAVTYSLGKFGQRALDFYSIHVTKESTHPVKPLAQIAGNRYASYPVGKALSDACMGTIASFLSKYQDIIIEHQKVVKGNQKRLESLRELAGKENLEYPSVTLPPQPHTKEGVDAYNEVIARVRMWVNLNLWQKLKLSRDDAKPLLRLKGFPSFPLVERQANEVDWWDMVCNVKKLINEKKEDGKVFWQNLAGYKRQEALRPYLSSEEDRKKGKKFARYQLGDLLLHLEKKHGEDWGKVYDEAWERIDKKVEGLSKHIKLEEERRSEDAQSKAALTDWLRAKASFVIEGLKEADKDEFCRCELKLQKWYGDLRGKPFAIEAENSILDISGFSKQYNCAFIWQKDGVKKLNLYLIINYFKGGKLRFKKIKPEAFEANRFYTVINKKSGEIVPMEVNFNFDDPNLIILPLAFGKRQGREFIWNDLLSLETGSLKLANGRVIEKTLYNRRTRQDEPALFVALTFERREVLDSSNIKPMNLIGVDRGENIPAVIALTDPEGCPLSRFKDSLGNPTHILRIGESYKEKQRTIQAKKEVEQRRAGGYSRKYASKAKNLADDMVRNTARDLLYYAVTQDAMLIFENLSRGFGRQGKRTFMAERQYTRMEDWLTAKLAYEGLPSKTYLSKTLAQYTSKTCSNCGFTITSADYDRVLEKLKKTATGWMTTINGKELKVEGQITYYNRYKRQNVVKDLSVELDRLSEESVNNDISSWTKGRSGEALSLLKKRFSHRPVQEKFVCLNCGFETHADEQAALNIARSWLFLRSQEYKKYQTNKTTGNTDKRAFVETWQSFYRKKLKEVWKPAV

SEQ ID NO: 370 - protein, 978 aa, synthetic construct
  REGION 1..978: note = CasX variant
QEIKRINKIRRRLVKDSNTKKAGKTGPMKTLLVRVMTPDLRERLENLRKKPENIPQPISNTSRANLNKLLTDYTEMKKAILHVYWEEFQKDPVGLMSRVAQPASKKIDQNKLKPEMDEKGNLTTAGFACSQCGQPLFVYKLEQVSEKGKAYTNYFGRCNVAEHEKLIKLAQLKPEKDSDEAVTYSLGKFGQRALDFYSIHVTKESTHPVKPLAQIAGNRYASHPVGKALSDACMGTIASFLSKYQDIIIEHQKVVKGNQKRLESLRELAGKENLEYPSVTLPPQPHTKEGVDAYNEVIARVRMWVNLNLWQKLKLSRDDAKPLLRLKGFPSFPLVERQANEVDWWDMVCNVKKLINEKKEDGKVFWQNLAGYKRQEALRPYLSSEEDRKKGKKFARYQLGDLLLHLEKKHGEDWGKVYDEAWERIDKKVEGLSKHIKLEEERRSEDAQSKAALTDWLRAKASFVIEGLKEADKDEFCRCELKLQKWYGDLRGKPFAIEAENSILDISGFSKQYNCAFIWQKDGVKKLNLYLIINYFKGGKLRFKKIKPEAFEANRFYTVINKKSGEIVPMEVNFNFDDPNLIILPLAFGKRQGREFIWNDLLSLETGSLKLANGRVIEKTLYNRRTRQDEPALFVALTFERREVLDSSNIKPMNLIGVDRGENIPAVIALTDPEGCPLSRFKDSLGNPTHILRIGESYKEKQRTIQAKKEVEQRRAGGYSRKYASKAKNLADDMVRNTARDLLYYAVTQDAMLIFENLSRGFGRQGKRTFMAERQYTRMEDWLTAKLAYEGLPSKTYLSKTLAQYTSKTCSNCGFTITSADYDRVLEKLKKTATGWMTTINGKELKVEGQITYYNRYKRQNVVKDLSVELDRLSEESVNNDISSWTKGRSGEALSLLKKRFSHRPVQEKFVCLNCGFETHADEQAALNIARSWLFLRSQEYKKYQTNKTTGNTDKRAFVETWQSFYRKKLKEVWKPAV

SEQ ID NO: 371 - protein, 979 aa, synthetic construct
  REGION 1..979: note = CasX variant
QEIKRINKIRRRLVKDSNTKKAGKTRGPMKTLLVRVMTPDLRERLENLRKKPENIPQPISNTSRANLNKLLTDYTEMKKAILHVYWEEFQKDPVGLMSRVAQPASKKIDQNKLKPEMDEKGNLTTAGFACSQCGQPLFVYKLEQVSEKGKAYTNYFGRCNVAEHEKLIKLAQLKPEKDSDEAVTYSLGKFGQRALDFYSIHVTKESTHPVKPLAQIAGNRYASYPVGKALSDACMGTIASFLSKYQDIIIEHQKVVKGNQKRLESLRELAGKENLEYPSVTLPPQPHTKEGVDAYNEVIARVRMWVNLNLWQKLKLSRDDAKPLLRLKGFPSFPLVERQANEVDWWDMVCNVKKLINEKKEDGKVFWQNLAGYKRQEALRPYLSSEEDRKKGKKFARYQLGDLLLHLEKKHGEDWGKVYDEAWERIDKKVEGLSKHIKLEEERRSEDAQSKAALTDWLRAKASFVIEGLKEADKDEFCRCELKLQKWYGDLRGKPFAIEAENSILDISGFSKQYNCAFIWQKDGVKKLNLYLIINYFKGGKLRFKKIKPEAFEANRFYTVINKKSGEIVPMEVNFNFDDPNLIILPLAFGKRQGREFIWNDLLSLETGSLKLANGRVIEKTLYNRRTRQDEPALFVALTFERREVLDSSNIKPMNLIGVDRGENIPAVIALTDPEGCPLSRFKDSLGNPTHILRIGESYKEKQRTIQAKKEVEQRRAGGYSRKYASKAKNLADDMVRNTARDLLYYAVTQDAMLIFENLSRGFGRQGKRTFMAERQYTRMEDWLTAKLAYEGLPSKTYLSKTLAQYTSKTCSNCGFTITSADYDRVLEKLKKTATGWMTTINGKELKVEGQITYYNRYKRQNVVKDLSVELDRLSEESVNNDISSWTKGRSGEALSLLKKRFSHRPVQEKFVCLNCGFETHADEQAALNIARSWLFLRSQEYKKYQTNKTTGNTDKRAFVETWQSFYRKKLKEVWKPAV

SEQ ID NO: 372 - protein, 979 aa, synthetic construct
  REGION 1..979: note = CasX variant
QEIKRINKIRRRLVKDSNTKKAGKTRGPMKTLLVRVMTPDLRERLENLRKKPENIPQPISNTSRANLNKLLTDYTEMKKAILHVYWEEFQKDPVGLMSRVAQPASKKIDQNKLKPEMDEKGNLTTAGFACSQCGQPLFVYKLEQVSEKGKAYTNYFGRCNVAEHEKLIKLAQLKPEKDSDEAVTYSLGKFGQRALDFYSIHVTKESTHPVKPLAQIAGNRYASHPVGKALSDACMGTIASFLSKYQDIIIEHQKVVKGNQKRLESLRELAGKENLEYPSVTLPPQPHTKEGVDAYNEVIARVRMWVNLNLWQKLKLSRDDAKPLLRLKGFPSFPLVERQANEVDWWDMVCNVKKLINEKKEDGKVFWQNLAGYKRQEALRPYLSSEEDRKKGKKFARYQLGDLLLHLEKKHGEDWGKVYDEAWERIDKKVEGLSKHIKLEEERRSEDAQSKAALTDWLRAKASFVIEGLKEADKDEFCRCELKLQKWYGDLRGKPFAIEAENSILDISGFSKQYNCAFIWQKDGVKKLNLYLIINYFKGGKLRFKKIKPEAFEANRFYTVINKKSGEIVPMEVNFNFDDPNLIILPLAFGKRQGREFIWNDLLSLETGSLKLANGRVIEKTLYNRRTRQDEPALFVALTFERREVLDSSNIKPMNLIGVDRGENIPAVIALTDPEGCPLSRFKDSLGNPTHILRIGESYKEKQRTIQAKKEVEQRRAGGYSRKYASKAKNLADDMVRNTARDLLYYAVTQDAMLIFENLSRGFGRQGKRTFMAERQYTRMEDWLTAKLAYEGLPSKTYLSKTLAQYTSKTCSNCGFTITSADYDRVLEKLKKTATGWMTTINGKELKVEGQITYYNRYKRQNVVKDLSVELDRLSEESVNNDISSWTKGRSGEALSLLKKRFSHRPVQEKFVCLNCGFETHADEQAALNIARSWLFLRSQEYKKYQTNKTTGNTDKRAFVETWQSFYRKKLKEVWKPAV

SEQ ID NO: 373 - protein, 978 aa, synthetic construct
  REGION 1..978: note = CasX variant
QEIKRINKIRRRLVKDSNTKKAGKTGPMKTLLVRVMTPDLRERLENLRKKPENIPQPISNTSRANLNKLLTDYTEMKKAILHVYWEEFQKDPVGLMSRVAQPASKKIDQNKLKPEMDEKGNLTTAGFACSQCGQPLFVYKLEQVSEKGKAYTNYFGRCNVAEHEKLIKLAQLKPEKDSDEAVTYSLGKFGQRALDFYSIHVTKESTHPVKPLAQIAGNRYASHPVGKALSGACMGTIASFLSKYQDIIIEHQKVVKGNQKRLESLRELAGKENLEYPSVTLPPQPHTKEGVDAYNEVIARVRMWVNLNLWQKLKLSRDDAKPLLRLKGFPSFPLVERQANEVDWWDMVCNVKKLINEKKEDGKVFWQNLAGYKRQEALRPYLSSEEDRKKGKKFARYQLGDLLLHLEKKHGEDWGKVYDEAWERIDKKVEGLSKHIKLEEERRSEDAQSKAALTDWLRAKASFVIEGLKEADKDEFCRCELKLQKWYGDLRGKPFAIEAENSILDISGFSKQYNCAFIWQKDGVKKLNLYLIINYFKGGKLRFKKIKPEAFEANRFYTVINKKSGEIVPMEVNFNFDDPNLIILPLAFGKRQGREFIWNDLLSLETGSLKLANGRVIEKTLYNRRTRQDEPALFVALTFERREVLDSSNIKPMNLIGVDRGENIPAVIALTDPEGCPLSRFKDSLGNPTHILRIGESYKEKQRTIQAKKEVEQRRAGGYSRKYASKAKNLADDMVRNTARDLLYYAVTQDAMLIFENLSRGFGRQGKRTFMAERQYTRMEDWLTAKLAYEGLPSKTYLSKTLAQYTSKTCSNCGFTITSADYDRVLEKLKKTATGWMTTINGKELKVEGQITYYNRYKRQNVVKDLSVELDRLSEESVNNDISSWTKGRSGEALSLLKKRFSHRPVQEKFVCLNCGFETHADEQAALNIARSWLFLRSQEYKKYQTNKTTGNTDKRAFVETWQSFYRKKLKEVWKPAV

SEQ ID NO: 374 - protein, 979 aa, synthetic construct
  REGION 1..979: note = CasX variant
QEIKRINKIRRRLVKDSNTKKAGKTGPMKTLLVRVMTPDLRERLENLRKKPENIPQPISNTSRANLNKLLTDYTEMKKAILHVYWEEFQKDPVGLMSRVAQPASKKIDQNKLKPEMDEKGNLTTAGFACSQCGQPLFVYKLEQVSEKGKAYTNYFGRCNVAEHEKLILLAQLKPEKDSDEAVTYSLGKFGQRALDFYSIHVTKESTHPVKPLAQIAGNRYASGPVGKALSDACMGTIASFLSKYQDIIIEHQKVVKGNQKRLESLRELAGKENLEYPSVTLPPQPHTKEGVDAYNEVIARVRMWVNLNLWQKLKLSRDDAKPLLRLKGFPSFPLVERQANEVDWWDMVCNVKKLINEKKEDGKVFWQNLAGYKRQEALRPYLSSEEDRKKGKKFARYQLGDLLLHLEKKHGEDWGKVYDEAWERIDKKVEGLSKHIKLEEERRSEDAQSKAALTDWLRAKASFVIEGLKEADKDEFCRCELKLQKWYGDLRGKPFAIEAENSILDISGFSKQYNCAFIWQKDGVKKLNLYLIINYFKGGKLRFKKIKPEAFEANRFYTVINKKSGEIVPMEVNFNFDDPNLIILPLAFGKRQGREFIWNDLLSLETGSLKLANGRVIEKTLYNARRTRQDEPALFVALTFERREVLDSSNIKPMNLIGVDRGENIPAVIALTDPEGCPLSRFKDSLGNPTHILRIGESYKEKQRTIQAKKEVEQRRAGGYSRKYASKAKNLADDMVRNTARDLLYYAVTQDAMLIFENLSRGFGRQGKRTFMAERQYTRMEDWLTAKLAYEGLPSKTYLSKTLAQYTSKTCSNCGFTITSADYDRVLEKLKKTATGWMTTINGKELKVEGQITYYNRYKRQNVVKDLSVELDRLSEESVNNDISSWTKGRSGEALSLLKKRFSHRPVQEKFVCLNCGFETHADEQAALNIARSWLFLRSQEYKKYQTNKTTGNTDKRAFVETWQSFYRKKLKEVWKPAV

SEQ ID NO: 375 - protein, 978 aa, synthetic construct
  REGION 1..978: note = CasX variant
QEIKRINKIRRRLVKDSNTKKAGKTGPMKTLLVRVMTPDLRERLENLRKKPENIPQPISNTSRANLNKLLTDYTEMKKAILHVYWEEFQVDPVGLMSRVAQPASKKIDQNKLKPEMDEKGNLTTAGFACSQCGQPLFVYKLEQVSEKGKAYTNYFGRCNVAEHEKLILLAQLKPEKDSDEAVTYSLGKFGQRALDFYSIHVTKESTHPVKPLAQIAGNRYASGPVGKALSDACMGTIASFLSKYQDIIIEHQKVVKGNQKRLESLRELAGKENLEYPSVTLPPQPHTKEGVDAYNEVIARVRMWVNLNLWQKLKLSRDDAKPLLRLKGFPSFPLVERQANEVDWWDMVCNVKKLINEKKEDGKVFWQNLAGYKRQEALRPYLSSEEDRKKGKKFARYQLGDLLLHLEKKHGEDWGKVYDEAWERIDKKVEGLSKHIKLEEERRSEDAQSKAALTDWLRAKASFVIEGLKEADKDEFCRCELKLQKWYGDLRGKPFAIEAENSILDISGFSKQYNCAFIWQKDGVKKLNLYLIINYFKGGKLRFKKIKPEAFEANRFYTVINKKSGEIVPMEVNFNFDDPNLIILPLAFGKRQGREFIWNDLLSLETGSLKLANGRVIEKTLYNRRTRQDEPALFVALTFERREVLDSSNIKPMNLIGVDRGENIPAVIALTDPEGCPLSRFKDSLGNPTHILRIGESYKEKQRTIQAKKEVEQRRAGGYSRKYASKAKNLADDMVRNTARDLLYYAVTQDAMLIFENLSRGFGRQGKRTFMAERQYTRMEDWLTAKLAYEGLPSKTYLSKTLAQYTSKTCSNCGFTITSADYDRVLEKLKKTATGWMTTINGKELKVEGQITYYNRYKRQNVVKDLSVELDRLSEESVNNDISSWTKGRSGEALSLLKKRFSHRPVQEKFVCLNCGFETHADEQAALNIARSWLFLRSQEYKKYQTNKTTGNTDKRAFVETWQSFYRKKLKEVWKPAV

SEQ ID NO: 376 - protein, 979 aa, synthetic construct
  REGION 1..979: note = CasX variant
QEIKRINKIRRRLVKDSNTKKAGKTGPMKTLLVRVMTPDLRERLENLRKKPENIPQPISNTSRANLNKLLTDYTEMKKAILHVYWEGEFQKDPVGLMSRVAQPASKKIDQNKLKPEMDEKGNLTTAGFACSQCGQPLFVYKLEQVSEKGKAYTNYFGRCNVAEHEKLILLAQLKPEKDSDEAVTYSLGKFGQRALDFYSIHVTKESTHPVKPLAQIAGNRYASGPVGKALSDACMGTIASFLSKYQDIIIEHQKVVKGNQKRLESLRELAGKENLEYPSVTLPPQPHTKEGVDAYNEVIARVRMWVNLNLWQKLKLSRDDAKPLLRLKGFPSFPLVERQANEVDWWDMVCNVKKLINEKKEDGKVFWQNLAGYKRQEALRPYLSSEEDRKKGKKFARYQLGDLLLHLEKKHGEDWGKVYDEAWERIDKKVEGLSKHIKLEEERRSEDAQSKAALTDWLRAKASFVIEGLKEADKDEFCRCELKLQKWYGDLRGKPFAIEAENSILDISGFSKQYNCAFIWQKDGVKKLNLYLIINYFKGGKLRFKKIKPEAFEANRFYTVINKKSGEIVPMEVNFNFDDPNLIILPLAFGKRQGREFIWNDLLSLETGSLKLANGRVIEKTLYNRRTRQDEPALFVALTFERREVLDSSNIKPMNLIGVDRGENIPAVIALTDPEGCPLSRFKDSLGNPTHILRIGESYKEKQRTIQAKKEVEQRRAGGYSRKYASKAKNLADDMVRNTARDLLYYAVTQDAMLIFENLSRGFGRQGKRTFMAERQYTRMEDWLTAKLAYEGLPSKTYLSKTLAQYTSKTCSNCGFTITSADYDRVLEKLKKTATGWMTTINGKELKVEGQITYYNRYKRQNVVKDLSVELDRLSEESVNNDISSWTKGRSGEALSLLKKRFSHRPVQEKFVCLNCGFETHADEQAALNIARSWLFLRSQEYKKYQTNKTTGNTDKRAFVETWQSFYRKKLKEVWKPAV

SEQ ID NO: 377 - protein, 978 aa, synthetic construct
  REGION 1..978: note = CasX variant
QEIKRINKIRRRLVKDSNTKKAGKTGPMKTLLVRVMTPDLRERLENLRKKPENIPQPISNTSRANLNKLLTDYTEMKKAILHVYWEEFQKDPVGLMSRVAQPASKKIDQNKLKPEMDEKGNLTTAGFACSQCGQPLFVYKLEQVSEKGKAYTNYFGRCNVAEHEKLILLAQLKPEKDSDEAVTYSLGKFGQRALDFYSIHVTKESTHPVKPLAQIAGNRYASGPVGKALSDACMGTIASFLSKYQDIIIEHQKVVKGNQKRLEHLRELAGKENLEYPSVTLPPQPHTKEGVDAYNEVIARVRMWVNLNLWQKLKLSRDDAKPLLRLKGFPSFPLVERQANEVDWWDMVCNVKKLINEKKEDGKVFWQNLAGYKRQEALRPYLSSEEDRKKGKKFARYQLGDLLLHLEKKHGEDWGKVYDEAWERIDKKVEGLSKHIKLEEERRSEDAQSKAALTDWLRAKASFVIEGLKEADKDEFCRCELKLQKWYGDLRGKPFAIEAENSILDISGFSKQYNCAFIWQKDGVKKLNLYLIINYFKGGKLRFKKIKPEAFEANRFYTVINKKSGEIVPMEVNFNFDDPNLIILPLAFGKRQGREFIWNDLLSLETGSLKLANGRVIEKTLYNRRTRQDEPALFVALTFERREVLDSSNIKPMNLIGVDRGENIPAVIALTDPEGCPLSRFKDSLGNPTHILRIGESYKEKQRTIQAKKEVEQRRAGGYSRKYASKAKNLADDMVRNTARDLLYYAVTQDAMLIFENLSRGFGRQGKRTFMAERQYTRMEDWLTAKLAYEGLPSKTYLSKTLAQYTSKTCSNCGFTITSADYDRVLEKLKKTATGWMTTINGKELKVEGQITYYNRYKRQNVVKDLSVELDRLSEESVNNDISSWTKGRSGEALSLLKKRFSHRPVQEKFVCLNCGFETHADEQAALNIARSWLFLRSQEYKKYQTNKTTGNTDKRAFVETWQSFYRKKLKEVWKPAV

SEQ ID NO: 378 - protein, 979 aa, synthetic construct
  REGION 1..979: note = CasX variant
QEIKRINKIRRRLVKDSNTKKAGKTGPMKTLLVRVMTPDLRERLENLRKKPENIPQPISNTSRANLNKLLTDYTEMKKAILHVYWEEFQKDPVGLMSRVAQPASKKIDQNKLKPEMDEKGNLTTAGFACSQCGQPLFVYKLEQVSEKGKAYTNYFGRCNVAEHEKLILLAQLKPEKDSDEAVTYSLGKFGQRALDFYSIHVTKESTHPVKPLAQICAGNRYASGPVGKALSDACMGTIASFLSKYQDIIIEHQKVVKGNQKRLESLRELAGKENLEYPSVTLPPQPHTKEGVDAYNEVIARVRMWVNLNLWQKLKLSRDDAKPLLRLKGFPSFPLVERQANEVDWWDMVCNVKKLINEKKEDGKVFWQNLAGYKRQEALRPYLSSEEDRKKGKKFARYQLGDLLLHLEKKHGEDWGKVYDEAWERIDKKVEGLSKHIKLEEERRSEDAQSKAALTDWLRAKASFVIEGLKEADKDEFCRCELKLQKWYGDLRGKPFAIEAENSILDISGFSKQYNCAFIWQKDGVKKLNLYLIINYFKGGKLRFKKIKPEAFEANRFYTVINKKSGEIVPMEVNFNFDDPNLIILPLAFGKRQGREFIWNDLLSLETGSLKLANGRVIEKTLYNRRTRQDEPALFVALTFERREVLDSSNIKPMNLIGVDRGENIPAVIALTDPEGCPLSRFKDSLGNPTHILRIGESYKEKQRTIQAKKEVEQRRAGGYSRKYASKAKNLADDMVRNTARDLLYYAVTQDAMLIFENLSRGFGRQGKRTFMAERQYTRMEDWLTAKLAYEGLPSKTYLSKTLAQYTSKTCSNCGFTITSADYDRVLEKLKKTATGWMTTINGKELKVEGQITYYNRYKRQNVVKDLSVELDRLSEESVNNDISSWTKGRSGEALSLLKKRFSHRPVQEKFVCLNCGFETHADEQAALNIARSWLFLRSQEYKKYQTNKTTGNTDKRAFVETWQSFYRKKLKEVWKPAV

SEQ ID NO: 379 - protein, 976 aa, synthetic construct
  REGION 1..976: note = CasX variant
QEIKRINKIRRRLVKDSNTKKAGKTGPMKTLLVRVMTPDLRERLENLRKKPENIPQPISNTSRANLNKLLTDYTEMKKAILHVYWEEFQKDPVGLMSRVAQPASKKIDQNKLKPEMDEKGNLTTAGFACSQCGQPLFVYKLEQVSEKGKAYTNYFGRCNVAEHEKLILLAQLKPEKDSDEAVTYSLGKFGQRALDFYSIHVTKESTHPVKPLAQIAGNRYASGPVGKALSDACMGTIASFLSKYQDIIIEHQKVVKGNQKRLESLRELAGKENLEYPSVTLPPQPHTKEGVDAYNEVIARVRMWVNLNLWQKLKLSRDDAKPLLRLKGFPSFPLVERQANEVDWWVCNVKKLINEKKEDGKVFWQNLAGYKRQEALRPYLSSEEDRKKGKKFARYQLGDLLLHLEKKHGEDWGKVYDEAWERIDKKVEGLSKHIKLEEERRSEDAQSKAALTDWLRAKASFVIEGLKEADKDEFCRCELKLQKWYGDLRGKPFAIEAENSILDISGFSKQYNCAFIWQKDGVKKLNLYLIINYFKGGKLRFKKIKPEAFEANRFYTVINKKSGEIVPMEVNFNFDDPNLIILPLAFGKRQGREFIWNDLLSLETGSLKLANGRVIEKTLYNRRTRQDEPALFVALTFERREVLDSSNIKPMNLIGVDRGENIPAVIALTDPEGCPLSRFKDSLGNPTHILRIGESYKEKQRTIQAKKEVEQRRAGGYSRKYASKAKNLADDMVRNTARDLLYYAVTQDAMLIFENLSRGFGRQGKRTFMAERQYTRMEDWLTAKLAYEGLPSKTYLSKTLAQYTSKTCSNCGFTITSADYDRVLEKLKKTATGWMTTINGKELKVEGQITYYNRYKRQNVVKDLSVELDRLSEESVNNDISSWTKGRSGEALSLLKKRFSHRPVQEKFVCLNCGFETHADEQAALNIARSWLFLRSQEYKKYQTNKTTGNTDKRAFVETWQSFYRKKLKEVWKPAV

SEQ ID NO: 380 - protein, 978 aa, synthetic construct
  REGION 1..978: note = CasX variant
QEIKRINKIRRRLVKDSNTKKAGKTGPMKTLLVRVMTPDLRERLENLRKKPENIPQPISNTSRANLNKLLTDYTEMKKAILHVYWEEFQKDPVGLMSRVAQPASKKIDQNKLKPEMDEKGNLTTAGFACSQCGQPLFVYKLEQVSEKGKAYTNYFGRCNVAEHEKLILLAQLKPEKDSDEAVTYSLGKFGQRALDFYSIHVTKESTHPVKPLAQIAGNRYASGPVGKALSDACMGTIASFLSKYQDIIIEHQKVVKGNQKRLESLRELAGKENLEYPSVTLPPQPHTKEGVDAYNEVIARVRMWVNLNLWQKLKLSRDDAKPLLRLKGFPSFPLVERQANEVDWWDMVCNVKKLINEKKEDGKVFWQNLAGYKRQEALRPYLSSEEDRKKGKKFARYQLGDLLLHLEKKHGEDWGKVYDEAWERIDKKVEGLSKHIKLEEERRSEDAQSKAALTDWLRAKASFVIEGLKEADKDEFCRCELKLQKWYGDLRGKPFAIEAENSILDISGFSKQYNCAFIWQKDGVKKLNLYLIINYFGGGKLRFKKIKPEAFEANRFYTVINKKSGEIVPMEVNFNFDDPNLIILPLAFGKRQGREFIWNDLLSLETGSLKLANGRVIEKTLYNRRTRQDEPALFVALTFERREVLDSSNIKPMNLIGVDRGENIPAVIALTDPEGCPLSRFKDSLGNPTHILRIGESYKEKQRTIQAKKEVEQRRAGGYSRKYASKAKNLADDMVRNTARDLLYYAVTQDAMLIFENLSRGFGRQGKRTFMAERQYTRMEDWLTAKLAYEGLPSKTYLSKTLAQYTSKTCSNCGFTITSADYDRVLEKLKKTATGWMTTINGKELKVEGQITYYNRYKRQNVVKDLSVELDRLSEESVNNDISSWTKGRSGEALSLLKKRFSHRPVQEKFVCLNCGFETHADEQAALNIARSWLFLRSQEYKKYQTNKTTGNTDKRAFVETWQSFYRKKLKEVWKPAV

SEQ ID NO: 381 - protein, 979 aa, synthetic construct
  REGION 1..979: note = CasX variant
QEIKRINKIRRRLVKDSNTKKAGKTGPMKTLLVRVMTPDLRERLENLRKKPENIPQPISNTSRANLNKLLTDYTEMKKAILHVYWEEFQKDPVGLMSRVAQPASKKIDQNKLKPEMDEKGNLTTAGFACSQCGQPLFVYKLEQVSEKGKAYTNYFGRCNVAEHEKLILLAQLKPEKDSDEAVTYSLGKFGQRALDFYSIHVTKESTHPVKPLAQIAGNRYASGPVGKALSDACMGTIASFLSKYQDIIIEHQKVVKGNQKRLESLRELAGKENLEYPSVTLPPQPHTKEGVDAYNEVIARVRMWVNLNLWQKLKLSRDDAKPLLRLKGFPSFPLVERQANEVDWWDMVCNVKKLINEKKEDGKVFWQNLAGYKRQEALRPYLSSEEDRKKGKKFARYQLGDLLLHLEKKHGEDWGKLVYDEAWERIDKKVEGLSKHIKLEEERRSEDAQSKAALTDWLRAKASFVIEGLKEADKDEFCRCELKLQKWYGDLRGKPFAIEAENSILDISGFSKQYNCAFIWQKDGVKKLNLYLIINYFKGGKLRFKKIKPEAFEANRFYTVINKKSGEIVPMEVNFNFDDPNLIILPLAFGKRQGREFIWNDLLSLETGSLKLANGRVIEKTLYNRRTRQDEPALFVALTFERREVLDSSNIKPMNLIGVDRGENIPAVIALTDPEGCPLSRFKDSLGNPTHILRIGESYKEKQRTIQAKKEVEQRRAGGYSRKYASKAKNLADDMVRNTARDLLYYAVTQDAMLIFENLSRGFGRQGKRTFMAERQYTRMEDWLTAKLAYEGLPSKTYLSKTLAQYTSKTCSNCGFTITSADYDRVLEKLKKTATGWMTTINGKELKVEGQITYYNRYKRQNVVKDLSVELDRLSEESVNNDISSWTKGRSGEALSLLKKRFSHRPVQEKFVCLNCGFETHADEQAALNIARSWLFLRSQEYKKYQTNKTTGNTDKRAFVETWQSFYRKKLKEVWKPAV

SEQ ID NO: 382 - protein, 979 aa, synthetic construct
  REGION 1..979: note = CasX variant
QEIKRINKIRRRLVKDSNTKKAGKTGPMKTLLVRVMTPDLRERLENLRKKPENIPQPISNTSRANLNKLLTDYTEMKKAILHVYWEEFQKDPVGLMSRVAQPASKKIDQNKLKPEMDEKGNLTTAGFACSQCGQPLFVYKLEQVSEKGKAYTNYFGRCNVAEHEKLILLAQLKPEKDSDEAVTYSLGKFGQRALDFYSIHVTKESTHPVKPLAQIAGNRYASGPVGKALSDACMGTIASFLSKYQDIIIEHQKVVKGNQKRLESLRELAGKENLEYPSVTLPPQPHTKEGVDAYNEVIARVRMWVNLNLWQKLKLSRDDAKPLLRLKGQFPSFPLVERQANEVDWWDMVCNVKKLINEKKEDGKVFWQNLAGYKRQEALRPYLSSEEDRKKGKKFARYQLGDLLLHLEKKHGEDWGKVYDEAWERIDKKVEGLSKHIKLEEERRSEDAQSKAALTDWLRAKASFVIEGLKEADKDEFCRCELKLQKWYGDLRGKPFAIEAENSILDISGFSKQYNCAFIWQKDGVKKLNLYLIINYFKGGKLRFKKIKPEAFEANRFYTVINKKSGEIVPMEVNFNFDDPNLIILPLAFGKRQGREFIWNDLLSLETGSLKLANGRVIEKTLYNRRTRQDEPALFVALTFERREVLDSSNIKPMNLIGVDRGENIPAVIALTDPEGCPLSRFKDSLGNPTHILRIGESYKEKQRTIQAKKEVEQRRAGGYSRKYASKAKNLADDMVRNTARDLLYYAVTQDAMLIFENLSRGFGRQGKRTFMAERQYTRMEDWLTAKLAYEGLPSKTYLSKTLAQYTSKTCSNCGFTITSADYDRVLEKLKKTATGWMTTINGKELKVEGQITYYNRYKRQNVVKDLSVELDRLSEESVNNDISSWTKGRSGEALSLLKKRFSHRPVQEKFVCLNCGFETHADEQAALNIARSWLFLRSQEYKKYQTNKTTGNTDKRAFVETWQSFYRKKLKEVWKPAV

SEQ ID NO: 383 - protein, 978 aa, synthetic construct
  REGION 1..978: note = CasX variant
QEIKRINKIRRRLVKDSNTKKAGKTGPMKTLLVRVMTPDLRERLENLRKKPENIPQPISNTSRANLNKLLTDYTEMKKAILHVYWEEFQKDPVGLMSRVAQPASKKIDQNKLKPEMDEKGNLTTAGFACSQCGQPLFVYKLEQVSEKGKAYTNYFGRCNVAEHEKLILLAQLKPEKDSDEAVTYSLGKFGQRALDFYSIHVTKESTHPVKPLAQIAGNRYASGPVGKALSDACMGTIASFLSKYQDIIIEHQKVVKGNQKRLESLRELAGKENLEYPSVTLPPQPHTKEGVDAYNEVIARVRMWVNLNLWQKLKLSRDDAKPLLRLKGFPSFPLVERQANEVSWWDMVCNVKKLINEKKEDGKVFWQNLAGYKRQEALRPYLSSEEDRKKGKKFARYQLGDLLLHLEKKHGEDWGKVYDEAWERIDKKVEGLSKHIKLEEERRSEDAQSKAALTDWLRAKASFVIEGLKEADKDEFCRCELKLQKWYGDLRGKPFAIEAENSILDISGFSKQYNCAFIWQKDGVKKLNLYLIINYFKGGKLRFKKIKPEAFEANRFYTVINKKSGEIVPMEVNFNFDDPNLIILPLAFGKRQGREFIWNDLLSLETGSLKLANGRVIEKTLYNRRTRQDEPALFVALTFERREVLDSSNIKPMNLIGVDRGENIPAVIALTDPEGCPLSRFKDSLGNPTHILRIGESYKEKQRTIQAKKEVEQRRAGGYSRKYASKAKNLADDMVRNTARDLLYYAVTQDAMLIFENLSRGFGRQGKRTFMAERQYTRMEDWLTAKLAYEGLPSKTYLSKTLAQYTSKTCSNCGFTITSADYDRVLEKLKKTATGWMTTINGKELKVEGQITYYNRYKRQNVVKDLSVELDRLSEESVNNDISSWTKGRSGEALSLLKKRFSHRPVQEKFVCLNCGFETHADEQAALNIARSWLFLRSQEYKKYQTNKTTGNTDKRAFVETWQSFYRKKLKEVWKPAV

SEQ ID NO: 384 - protein, 978 aa, synthetic construct
  REGION 1..978: note = CasX variant
QEIKRINKIRRRLVKDSNTKKAGKTGPMKTLLVRVMTPDLRERLENLRKKPENIPQPISNTSRANLNKLLTDYTEMKKAILHVYWEEFQKDPVGLMSRVAQPASKKIDQNKLKPEMDEKGNLTTAGFACSQCGQPLFVYKLEQVSEKGKAYTNYFGRCNVAEHEKLILLAQLKPEKDSDEAVTYSLGKFGQRALDFYSIHVTKESTHPVKPLAQIAGNRYASGPVGKALSDACMGTIASFLSKYQDIIIEHQKVVKGNQKRLESLRELAGKENLEYPSVTLPPQPHTKEGVDAYNEVIARVRMWVNLNLWQKLKLSRDDAKPLLRLKGFPSFPLVERQANEVDWWDMVCNVKKLINEKKEDGKVFWQNLAGYKRQEALRPYLSSEEDRKKGKKFARYQLGDLLLHLEKKHGEDWGKVYDEAWERIDKKVEGLSKHIKLEEERRSEDAQSKAALTDWLREKASFVIEGLKEADKDEFCRCELKLQKWYGDLRGKPFAIEAENSILDISGFSKQYNCAFIWQKDGVKKLNLYLIINYFKGGKLRFKKIKPEAFEANRFYTVINKKSGEIVPMEVNFNFDDPNLIILPLAFGKRQGREFIWNDLLSLETGSLKLANGRVIEKTLYNRRTRQDEPALFVALTFERREVLDSSNIKPMNLIGVDRGENIPAVIALTDPEGCPLSRFKDSLGNPTHILRIGESYKEKQRTIQAKKEVEQRRAGGYSRKYASKAKNLADDMVRNTARDLLYYAVTQDAMLIFENLSRGFGRQGKRTFMAERQYTRMEDWLTAKLAYEGLPSKTYLSKTLAQYTSKTCSNCGFTITSADYDRVLEKLKKTATGWMTTINGKELKVEGQITYYNRYKRQNVVKDLSVELDRLSEESVNNDISSWTKGRSGEALSLLKKRFSHRPVQEKFVCLNCGFETHADEQAALNIARSWLFLRSQEYKKYQTNKTTGNTDKRAFVETWQSFYRKKLKEVWKPAV

SEQ ID NO: 385 - protein, 978 aa, synthetic construct
  REGION 1..978: note = CasX variant
QEIKRINKIRRRLVKDSNTKKAGKTGPMKTLLVRVMTPDLRERLENLRKKPENIPQPISNTSRANLNKLLTDYTEMKKAILHVYWEEFQKDPVGLMSRVAQPASKKIDQNKLKPEMDEKGNLTTAGFACSQCGQPLFVYKLEQVSEKGKAYTNYFGRCNVAEHEKLILLAQLKPEKDSDEAVTYSLGKFGQRALDFYSIHVTKESTHPVKPLAQIAGNRYASGPVGKALSDACMGTIASFLSKYQDIIIEHQKVVKGNQKRLESLRELAGKENLEYPSVTLPPQPHTKEGVDAYNEVIARVRMWVNLNLWQKLKLSRDDAKPLLRLKGFPSFPLVERQANEVDWWDMVCNVKKLINEKKEDGKVFWQNLAGYKRQEALRPYLSSEEDRKKGKKFARYQLGDLLLHLEKKHGEDWGKVYDEAWERIDKKVEGLSKHIKLEEERRSEDAQSKAALTDWLRAKASFVIEGLKEADKDEFCRCELKLQKWYGDLRGKPFAIEAENSILDISGFSKQYNCAFIWQKDGVKKLNLYLIINYFKGGKLRFKKIKPEAFEANRFYTVINKKSGEIVPMEVNFNFDDPNLIILPLAFGKRQGREFIWNDLLSLETGSLKLANGRVIEKTTYNRRTRQDEPALFVALTFERREVLDSSNIKPMNLIGVDRGENIPAVIALTDPEGCPLSRFKDSLGNPTHILRIGESYKEKQRTIQAKKEVEQRRAGGYSRKYASKAKNLADDMVRNTARDLLYYAVTQDAMLIFENLSRGFGRQGKRTFMAERQYTRMEDWLTAKLAYEGLPSKTYLSKTLAQYTSKTCSNCGFTITSADYDRVLEKLKKTATGWMTTINGKELKVEGQITYYNRYKRQNVVKDLSVELDRLSEESVNNDISSWTKGRSGEALSLLKKRFSHRPVQEKFVCLNCGFETHADEQAALNIARSWLFLRSQEYKKYQTNKTTGNTDKRAFVETWQSFYRKKLKEVWKPAV

SEQ ID NO: 386 - protein, 978 aa, synthetic construct
  REGION 1..978: note = CasX variant
QEIKRINKIRRRLVKDSNTKKAGKTGPMKTLLVRVMTPDLRERLENLRKKPENIPQPISNTSRANLNKLLTDYTEMKKAILHVYWEEFQKDPVGLMSRVAQPASKKIDQNKLKPEMDEKGNLTTAGFACSQCGQPLFVYKLEQVSEKGKAYTNYFGRCNVAEHEKLILLAQLKPEKDSDEAVTYSLGKFGQRALDFYSIHVTKESTHPVKPLAQIAGNRYASGPVGKALSDACMGTIASFLSKYQDIIIEHQKVVKGNQKRLESLRELAGKENLEYPSVTLPPQPHTKEGVDAYNEVIARVRMWVNLNLWQKLKLSRDDAKPLLRLKGFPSFPLVERQANEVDWWDMVCNVKKLINEKKEDGKVFWQNLAGYKRQEANRPYLSSEEDRKKGKKFARYQLGDLLLHLEKKHGEDWGKVYDEAWERIDKKVEGLSKHIKLEEERRSEDAQSKAALTDWLRAKASFVIEGLKEADKDEFCRCELKLQKWYGDLRGKPFAIEAENSILDISGFSKQYNCAFIWQKDGVKKLNLYLIINYFKGGKLRFKKIKPEAFEANRFYTVINKKSGEIVPMEVNFNFDDPNLIILPLAFGKRQGREFIWNDLLSLETGSLKLANGRVIEKTLYNRRTRQDEPALFVALTFERREVLDSSNIKPMNLIGVDRGENIPAVIALTDPEGCPLSRFKDSLGNPTHILRIGESYKEKQRTIQAKKEVEQRRAGGYSRKYASKAKNLADDMVRNTARDLLYYAVTQDAMLIFENLSRGFGRQGKRTFMAERQYTRMEDWLTAKLAYEGLPSKTYLSKTLAQYTSKTCSNCGFTITSADYDRVLEKLKKTATGWMTTINGKELKVEGQITYYNRYKRQNVVKDLSVELDRLSEESVNNDISSWTKGRSGEALSLLKKRFSHRPVQEKFVCLNCGFETHADEQAALNIARSWLFLRSQEYKKYQTNKTTGNTDKRAFVETWQSFYRKKLKEVWKPAV

SEQ ID NO: 387 - protein, 978 aa, synthetic construct
  REGION 1..978: note = CasX variant
QEIKRINKIRRRLVKDSNTKKAGKTGPMKTLLVRVMTPDLRERLENLRKKPENIPQPISNTSRANLNKLLTDYTEMKKAILHVYWEEFQKDPVGLMSRVAQPASKKIDQNKLKPEMDEKGNLTTAGFACSQCGQPLFVYKLEQVSEKGKAYTNYFGRCNVAEHEKLILLAQLKPEKDSDEAVTYSLGKFGQRALDFYSIHVTKESTHPVKPLAQIAGNRYASGPVGKALSDACMGTIASFLSKYQDIIIEHQKVVKGNQKRLESLRELAGKENLEYPSVTLPPQPHTKEGVDAYNEVIARVRMWVNLNLWQKLKLSRDDAKPLLRLKGFPSFPLVERQANEVDWWDMVCNVKKLINEKKEDGKVFWQNLAGYKRQEALRPYLSSEEDRKKGKKFARYQLGDLLLHLEKKHGEDWGKVYDEAWERIDKKVEGLSKHIKLEELRRSEDAQSKAALTDWLRAKASFVIEGLKEADKDEFCRCELKLQKWYGDLRGKPFAIEAENSILDISGFSKQYNCAFIWQKDGVKKLNLYLIINYFKGGKLRFKKIKPEAFEANRFYTVINKKSGEIVPMEVNFNFDDPNLIILPLAFGKRQGREFIWNDLLSLETGSLKLANGRVIEKTLYNRRTRQDEPALFVALTFERREVLDSSNIKPMNLIGVDRGENIPAVIALTDPEGCPLSRFKDSLGNPTHILRIGESYKEKQRTIQAKKEVEQRRAGGYSRKYASKAKNLADDMVRNTARDLLYYAVTQDAMLIFENLSRGFGRQGKRTFMAERQYTRMEDWLTAKLAYEGLPSKTYLSKTLAQYTSKTCSNCGFTITSADYDRVLEKLKKTATGWMTTINGKELKVEGQITYYNRYKRQNVVKDLSVELDRLSEESVNNDISSWTKGRSGEALSLLKKRFSHRPVQEKFVCLNCGFETHADEQAALNIARSWLFLRSQEYKKYQTNKTTGNTDKRAFVETWQSFYRKKLKEVWKPAV

SEQ ID NO: 388 - protein, 976 aa, synthetic construct
  REGION 1..976: note = CasX variant
QEIKRINKIRRRLVKDSNTKKAGKTGPMKTLLVRVMTPDLRERLENLRKKPENIPQPISNTSRANLNKLLTDYTEMKKAILHVYWEEFQKDPVGLMSRVAQPASKKIDQNKLKPEMDEKGNLTTAGFACSQCGQPLFVYKLEQVSEKGKAYTNYFGRCNVAEHEKLILLAQLKPEKDSDEAVTYSLGKFGQRALDFYSIHVTKESTHPVKPLAQIAGNRYASGPVGKALSDACMGTIASFLSKYQDIIIEHQKVVKGNQKRLESLRELAGKENLEYPSVTLPPQPHTKEGVDAYNEVIARVRMWVNLNLWQKLKLSRDDAKPLLRLKGFPSFPLVERQANEVDWWDMVCNVKKLINEKKEDGKVFWQNLAGYKRQEALRPYLSSEEDRKKGKKFARYQLGDLLLHLEKKHGEDWGKVYDEAWERIDKKVEGLSKHIKLEEERRSEDAQSKAALTDWLRAKASFVIEGLKEADKDERCELKLQKWYGDLRGKPFAIEAENSILDISGFSKQYNCAFIWQKDGVKKLNLYLIINYFKGGKLRFKKIKPEAFEANRFYTVINKKSGEIVPMEVNFNFDDPNLIILPLAFGKRQGREFIWNDLLSLETGSLKLANGRVIEKTLYNRRTRQDEPALFVALTFERREVLDSSNIKPMNLIGVDRGENIPAVIALTDPEGCPLSRFKDSLGNPTHILRIGESYKEKQRTIQAKKEVEQRRAGGYSRKYASKAKNLADDMVRNTARDLLYYAVTQDAMLIFENLSRGFGRQGKRTFMAERQYTRMEDWLTAKLAYEGLPSKTYLSKTLAQYTSKTCSNCGFTITSADYDRVLEKLKKTATGWMTTINGKELKVEGQITYYNRYKRQNVVKDLSVELDRLSEESVNNDISSWTKGRSGEALSLLKKRFSHRPVQEKFVCLNCGFETHADEQAALNIARSWLFLRSQEYKKYQTNKTTGNTDKRAFVETWQSFYRKKLKEVWKPAV

SEQ ID NO: 389 - protein, 976 aa, synthetic construct
  REGION 1..976: note = CasX variant
QEIKRINKIRRRLVKDSNTKKAGKTGPMKTLLVRVMTPDLRERLENLRKKPENIPQPISNTSRANLNKLLTDYTEMKKAILHVYWEEFQKDPVGLMSRVAQPASKKIDQNKLKPEMDEKGNLTTAGFACSQCGQPLFVYKLEQVSEKGKAYTNYFGRCNVAEHEKLILLAQLKPEKDSDEAVTYSLGKFGQRALDFYSIHVTKESTHPVKPLAQIAGNRYASGPVGKALSDACMGTIASFLSKYQDIIIEHQKVVKGNQKRLESLRELAGKENLEYPSVTLPPQPHTKEGVDAYNEVIARVRMWVNLNLWQKLKLSRDDAKPLLRLKGFPSFPLVERQANEVDWWDMVCNVKKLINEKKEDGKVFWQNLAGYKRALRPYLSSEEDRKKGKKFARYQLGDLLLHLEKKHGEDWGKVYDEAWERIDKKVEGLSKHIKLEEERRSEDAQSKAALTDWLRAKASFVIEGLKEADKDEFCRCELKLQKWYGDLRGKPFAIEAENSILDISGFSKQYNCAFIWQKDGVKKLNLYLIINYFKGGKLRFKKIKPEAFEANRFYTVINKKSGEIVPMEVNFNFDDPNLIILPLAFGKRQGREFIWNDLLSLETGSLKLANGRVIEKTLYNRRTRQDEPALFVALTFERREVLDSSNIKPMNLIGVDRGENIPAVIALTDPEGCPLSRFKDSLGNPTHILRIGESYKEKQRTIQAKKEVEQRRAGGYSRKYASKAKNLADDMVRNTARDLLYYAVTQDAMLIFENLSRGFGRQGKRTFMAERQYTRMEDWLTAKLAYEGLPSKTYLSKTLAQYTSKTCSNCGFTITSADYDRVLEKLKKTATGWMTTINGKELKVEGQITYYNRYKRQNVVKDLSVELDRLSEESVNNDISSWTKGRSGEALSLLKKRFSHRPVQEKFVCLNCGFETHADEQAALNIARSWLFLRSQEYKKYQTNKTTGNTDKRAFVETWQSFYRKKLKEVWKPAV

SEQ ID NO: 390 - protein, 978 aa, synthetic construct
  REGION 1..978: note = CasX variant
QEIKRINKIRRRLVKDSNTKKAGKTGPMKTLLVRVMTPDLRERLENLRKKPENIPQPISNTSRANLNKLLTDYTEMKKAILHVYWEEFQKDPVGLMSRVAQPASKKIDQNKLKPEMDEKGNLTTAGFACSQCGQPLFVYKLEQVSEKGKAYTNYFGRCNVAEHEKLILLAQLKPEKDSDEAVTYSLGKFGQRALDFYSIHVTKESTHPVKPLAQIAGNRYASGPVGKALSDACMGTIASFLSKYQDIIIEHQKVVKGNQKRLESLRELAGKENLEYPSVTLPPQPHTKEGVDAYNEVIARVRMWVNLNLWQKLKLSRDDAKPLLRLKGFPSFPLVERQANEVDWWDMVCNVKKLINEKKEDGKVFWQNLAGYKRQEALRPYLSSEEDRQKGKKFARYQLGDLLLHLEKKHGEDWGKVYDEAWERIDKKVEGLSKHIKLEEERRSEDAQSKAALTDWLRAKASFVIEGLKEADKDEFCRCELKLQKWYGDLRGKPFAIEAENSILDISGFSKQYNCAFIWQKDGVKKLNLYLIINYFKGGKLRFKKIKPEAFEANRFYTVINKKSGEIVPMEVNFNFDDPNLIILPLAFGKRQGREFIWNDLLSLETGSLKLANGRVIEKTLYNRRTRQDEPALFVALTFERREVLDSSNIKPMNLIGVDRGENIPAVIALTDPEGCPLSRFKDSLGNPTHILRIGESYKEKQRTIQAKKEVEQRRAGGYSRKYASKAKNLADDMVRNTARDLLYYAVTQDAMLIFENLSRGFGRQGKRTFMAERQYTRMEDWLTAKLAYEGLPSKTYLSKTLAQYTSKTCSNCGFTITSADYDRVLEKLKKTATGWMTTINGKELKVEGQITYYNRYKRQNVVKDLSVELDRLSEESVNNDISSWTKGRSGEALSLLKKRFSHRPVQEKFVCLNCGFETHADEQAALNIARSWLFLRSQEYKKYQTNKTTGNTDKRAFVETWQSFYRKKLKEVWKPAV

SEQ ID NO: 391 - protein, 978 aa, synthetic construct
  REGION 1..978: note = CasX variant
QEIKRLNKIRRRLVKDSNTKKAGKTGPMKTLLVRVMTPDLRERLENLRKKPENIPQPISNTSRANLNKLLTDYTEMKKAILHVYWEEFQKDPVGLMSRVAQPASKKIDQNKLKPEMDEKGNLTTAGFACSQCGQPLFVYKLEQVSEKGKAYTNYFGRCNVAEHEKLILLAQLKPEKDSDEAVTYSLGKFGQRALDFYSIHVTKESTHPVKPLAQIAGNRYASGPVGKALSDACMGTIASFLSKYQDIIIEHQKVVKGNQKRLESLRELAGKENLEYPSVTLPPQPHTKEGVDAYNEVIARVRMWVNLNLWQKLKLSRDDAKPLLRLKGFPSFPLVERQANEVDWWDMVCNVKKLINEKKEDGKVFWQNLAGYKRQEALRPYLSSEEDRKKGKKFARYQLGDLLLHLEKKHGEDWGKVYDEAWERIDKKVEGLSKHIKLEEERRSEDAQSKAALTDWLRAKASFVIEGLKEADKDEFCRCELKLQKWYGDLRGKPFAIEAENSILDISGFSKQYNCAFIWQKDGVKKLNLYLIINYFKGGKLRFKKIKPEAFEANRFYTVINKKSGEIVPMEVNFNFDDPNLIILPLAFGKRQGREFIWNDLLSLETGSLKLANGRVIEKTLYNRRTRQDEPALFVALTFERREVLDSSNIKPMNLIGVDRGENIPAVIALTDPEGCPLSRFKDSLGNPTHILRIGESYKEKQRTIQAKKEVEQRRAGGYSRKYASKAKNLADDMVRNTARDLLYYAVTQDAMLIFENLSRGFGRQGKRTFMAERQYTRMEDWLTAKLAYEGLPSKTYLSKTLAQYTSKTCSNCGFTITSADYDRVLEKLKKTATGWMTTINGKELKVEGQITYYNRYKRQNVVKDLSVELDRLSEESVNNDISSWTKGRSGEALSLLKKRFSHRPVQEKFVCLNCGFETHADEQAALNIARSWLFLRSQEYKKYQTNKTTGNTDKRAFVETWQSFYRKKLKEVWKPAV

SEQ ID NO: 392 - protein, 978 aa, synthetic construct
  REGION 1..978: note = CasX variant
QEIKRINKIRRRLVKDSNTKKAGKTGPMKTLLVRVMTPDLRERLENLRKKPENIPQPISNTSRANLNKLLTDYTEMKKAILHVYWEEFQKDPVGLMSRVAQPASKKIDQNKLKPEMDEKGNLTTAGFACSQCGQPLFVYKLEQVSEKGKAYTNYFGRCNVAEHEKLILLAQLKPEKDSDEAVTYSLGKFGQRALDFYSIHVTKESTHPVKPLAQIAGNRYASGPVGKALSDACMGTIASFLSKYQDIIIEHQKVVKGNQKRLESLRELAGKENLEYPSVTLPPQPHTKEGVDAYNEVIARVRMWVNLNLWQKLKLSRDDAKPLLRLKGFPSFPLVERQANEVDWWDMVCNVKKLINEKKEDGKVFWQNLAGYKRQEALRPYLSSEEDRKKGKKFARYQLGDLLLHLEKKHGEDWGKVYDEAWERIDKKVEGLSKHIKLEEERRSEDAQSKAALTDWLDAKASFVIEGLKEADKDEFCRCELKLQKWYGDLRGKPFAIEAENSILDISGFSKQYNCAFIWQKDGVKKLNLYLIINYFKGGKLRFKKIKPEAFEANRFYTVINKKSGEIVPMEVNFNFDDPNLIILPLAFGKRQGREFIWNDLLSLETGSLKLANGRVIEKTLYNRRTRQDEPALFVALTFERREVLDSSNIKPMNLIGVDRGENIPAVIALTDPEGCPLSRFKDSLGNPTHILRIGESYKEKQRTIQAKKEVEQRRAGGYSRKYASKAKNLADDMVRNTARDLLYYAVTQDAMLIFENLSRGFGRQGKRTFMAERQYTRMEDWLTAKLAYEGLPSKTYLSKTLAQYTSKTCSNCGFTITSADYDRVLEKLKKTATGWMTTINGKELKVEGQITYYNRYKRQNVVKDLSVELDRLSEESVNNDISSWTKGRSGEALSLLKKRFSHRPVQEKFVCLNCGFETHADEQAALNIARSWLFLRSQEYKKYQTNKTTGNTDKRAFVETWQSFYRKKLKEVWKPAV

SEQ ID NO: 393 - protein, 976 aa, synthetic construct
  REGION 1..976: note = CasX variant
QEIKRINKIRRRLVKDSNTKKAGKTGPMKTLLVRVMTPDLRERLENLRKKPENIPQPISNTSRANLNKLLTDYTEMKKAILHVYWEEFQKDPVGLMSRVAQPASKKIDQNKLKPEMDEKGNLTTAGFACSQCGQPLFVYKLEQVSEKGKAYTNYFGRCNVAEHEKLILLAQLKPEKDSDEAVTYSLGKFGQRALDFYSIHVTKESTHPVKPLAQIAGNRYASGPVGKALSDACMGTIASFLSKYQDIIIEHQKVVKGNQKRLESLRELAGKENLEYPSVTLPPQPHTKEGVDAYNEVIARVRMWVNLNLWQKLKLSRDDAKPLLRLKGFPSFPLVERQANEVDWWDMVCNVKKLINEKKEDGKVFWQNLAGYKRQEALRPYLSSEEDRKKGKKFARYQLGDLLLHLEKKHGEDWGKVYDEAWERIDKKVEGLSKHIKLEEERRSEDAQSKAALTDWLRAKASFVIEGLKEADKDEFCRCELKLQKWYGDLRGKPFAIEAENSDISGFSKQYNCAFIWQKDGVKKLNLYLIINYFKGGKLRFKKIKPEAFEANRFYTVINKKSGEIVPMEVNFNFDDPNLIILPLAFGKRQGREFIWNDLLSLETGSLKLANGRVIEKTLYNRRTRQDEPALFVALTFERREVLDSSNIKPMNLIGVDRGENIPAVIALTDPEGCPLSRFKDSLGNPTHILRIGESYKEKQRTIQAKKEVEQRRAGGYSRKYASKAKNLADDMVRNTARDLLYYAVTQDAMLIFENLSRGFGRQGKRTFMAERQYTRMEDWLTAKLAYEGLPSKTYLSKTLAQYTSKTCSNCGFTITSADYDRVLEKLKKTATGWMTTINGKELKVEGQITYYNRYKRQNVVKDLSVELDRLSEESVNNDISSWTKGRSGEALSLLKKRFSHRPVQEKFVCLNCGFETHADEQAALNIARSWLFLRSQEYKKYQTNKTTGNTDKRAFVETWQSFYRKKLKEVWKPAV

SEQ ID NO: 394 - protein, 978 aa, synthetic construct
  REGION 1..978: note = CasX variant
QEIKRINKIRRRLVKDSNTKKAGKTGPMKTLLVRVMTPDLRERLENLRKKPENIPQPISNTSRANLNKLLTDYTEMKKAILHVYWEEFQKDPVGLMSRVAQPASKKIDQNKLKPEMDEKGNLTTAGFACSQCGQPLFVYKLEQVSEKGKAYTNYVGRCNVAEHEKLILLAQLKPEKDSDEAVTYSLGKFGQRALDFYSIHVTKESTHPVKPLAQIAGNRYASGPVGKALSDACMGTIASFLSKYQDIIIEHQKVVKGNQKRLESLRELAGKENLEYPSVTLPPQPHTKEGVDAYNEVIARVRMWVNLNLWQKLKLSRDDAKPLLRLKGFPSFPLVERQANEVDWWDMVCNVKKLINEKKEDGKVFWQNLAGYKRQEALRPYLSSEEDRKKGKKFARYQLGDLLLHLEKKHGEDWGKVYDEAWERIDKKVEGLSKHIKLEEERRSEDAQSKAALTDWLRAKASFVIEGLKEADKDEFCRCELKLQKWYGDLRGKPFAIEAENSILDISGFSKQYNCAFIWQKDGVKKLNLYLIINYFKGGKLRFKKIKPEAFEANRFYTVINKKSGEIVPMEVNFNFDDPNLIILPLAFGKRQGREFIWNDLLSLETGSLKLANGRVIEKTLYNRRTRQDEPALFVALTFERREVLDSSNIKPMNLIGVDRGENIPAVIALTDPEGCPLSRFKDSLGNPTHILRIGESYKEKQRTIQAKKEVEQRRAGGYSRKYASKAKNLADDMVRNTARDLLYYAVTQDAMLIFENLSRGFGRQGKRTFMAERQYTRMEDWLTAKLAYEGLPSKTYLSKTLAQYTSKTCSNCGFTITSADYDRVLEKLKKTATGWMTTINGKELKVEGQITYYNRYKRQNVVKDLSVELDRLSEESVNNDISSWTKGRSGEALSLLKKRFSHRPVQEKFVCLNCGFETHADEQAALNIARSWLFLRSQEYKKYQTNKTTGNTDKRAFVETWQSFYRKKLKEVWKPAV

SEQ ID NO: 395 - protein, 979 aa, synthetic construct
  REGION 1..979: note = CasX variant
QEIKRINKIRRRLVKDSNTKKAGKTGPMKTLLVRVMTPDLRERLENLRKKPENIPQPISNTSRANLNKLLTDYTEMKKAILHVYWEEFQKDPVGLMSRVAQPASKKIDQNKLKPEMDEKGNLTTAGFACSQCGQPLFVYKLEQVSEKGKAYTNYFGRCNVAEHEKLILLAQLKPEKDSDEAVTYSLGKFGQRALDFYSIHVTKESTHPVKPLAQIAGNRYASGPVGKALSDACMGTIASFLSKYQDIIIEHQKVVKGNQKRLESLRELAGKENLEYPSVTLPPQPHTKEGVDAYNEVIARVRMWVNLNLWQKLKLSRDDAKPLLRLKGFPSFPLVERQANEVDWWDMVCNVKKLINGEKKEDGKVFWQNLAGYKRQEALRPYLSSEEDRKKGKKFARYQLGDLLLHLEKKHGEDWGKVYDEAWERIDKKVEGLSKHIKLEEERRSEDAQSKAALTDWLRAKASFVIEGLKEADKDEFCRCELKLQKWYGDLRGKPFAIEAENSILDISGFSKQYNCAFIWQKDGVKKLNLYLIINYFKGGKLRFKKIKPEAFEANRFYTVINKKSGEIVPMEVNFNFDDPNLIILPLAFGKRQGREFIWNDLLSLETGSLKLANGRVIEKTLYNRRTRQDEPALFVALTFERREVLDSSNIKPMNLIGVDRGENIPAVIALTDPEGCPLSRFKDSLGNPTHILRIGESYKEKQRTIQAKKEVEQRRAGGYSRKYASKAKNLADDMVRNTARDLLYYAVTQDAMLIFENLSRGFGRQGKRTFMAERQYTRMEDWLTAKLAYEGLPSKTYLSKTLAQYTSKTCSNCGFTITSADYDRVLEKLKKTATGWMTTINGKELKVEGQITYYNRYKRQNVVKDLSVELDRLSEESVNNDISSWTKGRSGEALSLLKKRFSHRPVQEKFVCLNCGFETHADEQAALNIARSWLFLRSQEYKKYQTNKTTGNTDKRAFVETWQSFYRKKLKEVWKPAV

SEQ ID NO: 396 - protein, 978 aa, synthetic construct
  REGION 1..978: note = CasX variant
QEIKRINKIRRRLVKDSNTKKAGKTGPMKTLLVRVMTPDLRERLENLRKKPENIPQPISNTSRANLNKLLTDYTEMKKAILHVYWEEFQKDPVGLMSRVAQPASKKIDQNKLKPEMDEKGNLTTAGFACSQCGQPLFVYKLEQVSEKGKAYTNYFGRCNVAEHEKLILLAQLKPEKDSDEAVTYSLGKFGQRALDFYSIHVTKESTHPVKPLAQIAGNRFASGPVGKALSDACMGTIASFLSKYQDIIIEHQKVVKGNQKRLESLRELAGKENLEYPSVTLPPQPHTKEGVDAYNEVIARVRMWVNLNLWQKLKLSRDDAKPLLRLKGFPSFPLVERQANEVDWWDMVCNVKKLINEKKEDGKVFWQNLAGYKRQEALRPYLSSEEDRKKGKKFARYQLGDLLLHLEKKHGEDWGKVYDEAWERIDKKVEGLSKHIKLEEERRSEDAQSKAALTDWLRAKASFVIEGLKEADKDEFCRCELKLQKWYGDLRGKPFAIEAENSILDISGFSKQYNCAFIWQKDGVKKLNLYLIINYFKGGKLRFKKIKPEAFEANRFYTVINKKSGEIVPMEVNFNFDDPNLIILPLAFGKRQGREFIWNDLLSLETGSLKLANGRVIEKTLYNRRTRQDEPALFVALTFERREVLDSSNIKPMNLIGVDRGENIPAVIALTDPEGCPLSRFKDSLGNPTHILRIGESYKEKQRTIQAKKEVEQRRAGGYSRKYASKAKNLADDMVRNTARDLLYYAVTQDAMLIFENLSRGFGRQGKRTFMAERQYTRMEDWLTAKLAYEGLPSKTYLSKTLAQYTSKTCSNCGFTITSADYDRVLEKLKKTATGWMTTINGKELKVEGQITYYNRYKRQNVVKDLSVELDRLSEESVNNDISSWTKGRSGEALSLLKKRFSHRPVQEKFVCLNCGFETHADEQAALNIARSWLFLRSQEYKKYQTNKTTGNTDKRAFVETWQSFYRKKLKEVWKPAV

SEQ ID NO: 397 - protein, 978 aa, synthetic construct
  REGION 1..978: note = CasX variant
QEIKRINKIRRRLVKDSNTKKAGKTGPMKTLLVRVMTPDLRERLENLRKKPENIPQPISNTSRANLNKLLTDYTEMKKAILHVYWEEFQKDPVGLMSRVAQPASKKIDQNKLKPEMDEKGNLTTAGFACSQCGQPLFVYKLEQVSEKGKAYTNYFGRCNVAEHEKLILLAQLKPEKDSDEAVTYSLGKFGQRALDFYSIHVTKESTHPVKPLAQIAGNRYASGPVGKALSDACMGTIASFLSKYQDIIIEHQKVVKGNQKRLESLRELAGKENLEYPSVTLPPQPHTKEGVDAYNEVIARVRMWVNLNLWQKLKLSRDDAKPLLRLKGFPSFPLVERQANEVDWWDMVCNVKKLINEKKEDGKVFWQNLAGYKRQEALRPYLSSEEDRKKGKKFARYQLGDLLLHLEKKHGEDWGKVYDEAWERIDKKVEGLSKHIKLEEERRSEDAQSKAALTDWLRAKASFVIEGLKEADKDEFCRCELKLQKWYGDLRGKPFAIEAENSILDISGFSKQYNCAFIWQKDGVKKLNLYLIINYFKGGKLRFKKIKPEAFEANRFYTVINKKSGEIVPMEVNFNFDDPNLIILPLAFGKRQGREFIWNDLLSLETGSLKLANGRVIEKTLYNRRTRQDEPALFVALTFERREVLDSSNIKPMNLIGVDRGENIPAVIALTDPEGCPLSRFKDSLGNPTHILRIGESYKEKQRTIQAKKEVEQRRAGGYSRKYASKAKNLADDMVRNTARDLLYYAVTQDAMLIFENLSRGFGRQGKRTFMAERQYTRMEDWYTAKLAYEGLPSKTYLSKTLAQYTSKTCSNCGFTITSADYDRVLEKLKKTATGWMTTINGKELKVEGQITYYNRYKRQNVVKDLSVELDRLSEESVNNDISSWTKGRSGEALSLLKKRFSHRPVQEKFVCLNCGFETHADEQAALNIARSWLFLRSQEYKKYQTNKTTGNTDKRAFVETWQSFYRKKLKEVWKPAV

SEQ ID NO: 398 - protein, 979 aa, synthetic construct
  REGION 1..979: note = CasX variant
QEIKRINKIRRRLVKDSNTKKAGKTGPMKTLLVRVMTPDLRERLENLRKKPENIPQPISNTSRANLNKLLTDYTEMKKAILHVYWEEFQKDPVGLMSRVAQPASKKIDQNKLKPEMDEKGNLTTAGFACSQCGQPLFVYKLEQVSEKGKAYTNYFGRCNVAEHEKLILLAQLKPEKDSDEAVTYSLGKFGQRALDFYSIHVTKESTHPVKPLAQIAGNRYASGPVGKALSDACMGTIASFLSKYQDIIIEHQKVVKGNQKRLESLRELAGKENLEYPSVTLPPQPHTKEGVDAYNEVIARVRMWVNLNLWQKLKLSRDDAKPLLRLKGFPSFPLVERQANEVDWWDMVPCNVKKLINEKKEDGKVFWQNLAGYKRQEALRPYLSSEEDRKKGKKFARYQLGDLLLHLEKKHGEDWGKVYDEAWERIDKKVEGLSKHIKLEEERRSEDAQSKAALTDWLRAKASFVIEGLKEADKDEFCRCELKLQKWYGDLRGKPFAIEAENSILDISGFSKQYNCAFIWQKDGVKKLNLYLIINYFKGGKLRFKKIKPEAFEANRFYTVINKKSGEIVPMEVNFNFDDPNLIILPLAFGKRQGREFIWNDLLSLETGSLKLANGRVIEKTLYNRRTRQDEPALFVALTFERREVLDSSNIKPMNLIGVDRGENIPAVIALTDPEGCPLSRFKDSLGNPTHILRIGESYKEKQRTIQAKKEVEQRRAGGYSRKYASKAKNLADDMVRNTARDLLYYAVTQDAMLIFENLSRGFGRQGKRTFMAERQYTRMEDWLTAKLAYEGLPSKTYLSKTLAQYTSKTCSNCGFTITSADYDRVLEKLKKTATGWMTTINGKELKVEGQITYYNRYKRQNVVKDLSVELDRLSEESVNNDISSWTKGRSGEALSLLKKRFSHRPVQEKFVCLNCGFETHADEQAALNIARSWLFLRSQEYKKYQTNKTTGNTDKRAFVETWQSFYRKKLKEVWKPAV

SEQ ID NO: 399 - protein, 979 aa, synthetic construct
  REGION 1..979: note = CasX variant
QEIKRINKIRRRLVKDSNTKKAGKTGPMKTLLVRVMTPDLRERLENLRKKPENIPQPISNTSRANLNKLLTDYTEMKKAILHVYWEEFQKDPVGLMSRVAQPASKKIDQNKLKPEMDEKGNLTTAGFACSQCGQPLFVYKLEQVSEKGKAYTNYFGRCNVAEHEKLILLAQLKPEKDSDEAVTYSLGKFGQRALDFYSIHVTKESTHPVKPLAQTIAGNRYASGPVGKALSDACMGTIASFLSKYQDIIIEHQKVVKGNQKRLESLRELAGKENLEYPSVTLPPQPHTKEGVDAYNEVIARVRMWVNLNLWQKLKLSRDDAKPLLRLKGFPSFPLVERQANEVDWWDMVCNVKKLINEKKEDGKVFWQNLAGYKRQEALRPYLSSEEDRKKGKKFARYQLGDLLLHLEKKHGEDWGKVYDEAWERIDKKVEGLSKHIKLEEERRSEDAQSKAALTDWLRAKASFVIEGLKEADKDEFCRCELKLQKWYGDLRGKPFAIEAENSILDISGFSKQYNCAFIWQKDGVKKLNLYLIINYFKGGKLRFKKIKPEAFEANRFYTVINKKSGEIVPMEVNFNFDDPNLIILPLAFGKRQGREFIWNDLLSLETGSLKLANGRVIEKTLYNRRTRQDEPALFVALTFERREVLDSSNIKPMNLIGVDRGENIPAVIALTDPEGCPLSRFKDSLGNPTHILRIGESYKEKQRTIQAKKEVEQRRAGGYSRKYASKAKNLADDMVRNTARDLLYYAVTQDAMLIFENLSRGFGRQGKRTFMAERQYTRMEDWLTAKLAYEGLPSKTYLSKTLAQYTSKTCSNCGFTITSADYDRVLEKLKKTATGWMTTINGKELKVEGQITYYNRYKRQNVVKDLSVELDRLSEESVNNDISSWTKGRSGEALSLLKKRFSHRPVQEKFVCLNCGFETHADEQAALNIARSWLFLRSQEYKKYQTNKTTGNTDKRAFVETWQSFYRKKLKEVWKPAV

SEQ ID NO: 400 - protein, 978 aa, synthetic construct
  REGION 1..978: note = CasX variant
QEIKRINKIRRRLVKDSNTKKAGKTGPMKTLLVRVMTPDLRERLENLRKKPENIPQPISNTSRANLNKLLTDYTEMKKAILHVYWEEFQKDPVGLMSRVAQPASKKIDQNKLKPEMDEKGNLTTAGFACSQCGQPLFVYKLEQVSEKGKAYTNYFGRCNVAEHEKLILLAQLKPEKDSDEAVTYSLGKFGQRALDFYSIHVTKESTHPVKPLAQIAGNRYASGPVGKALSDACMGTIASFLSKYQDIIIEHQKVVKGNQKRLESLRELAGKENLEYPSVTLPPQPHTKEGVDAYNEVIARVRMWVNLNLWQKLKLSRDDAKPLLRLKGFPSFPLVERQANEVDWWDMVCNVKKLINEKKEDGKVFWQNLAGYKRQEALRPYLSSEEDRKKGKKFARYQLGDLLLHLEKKHGEDWGKVYDEAWERIDKKVEGLSKHIKLEEERRSEDAQSKAALTDWLRAKASFVIEGLKEADKDEFCRCELKLQKWYGDLRGKPFAIEAENSILDISGFSKQYNCAFIWQKDGVKKLNLYLIINYFKGGKLRFKKIKPEAFEANRFYTVINKKSGEIVPMEVNFNFDDPNLIILPLAFGKRQGREFIWNDLLSLETGSLKLANGRVIEKTLYNRRTRQDEPALFVALTFERREVLDSSNIKPMNLIGVDRGENIPAVIALTDPEGCPLSRFKDSLGNPTHILRIGESYKEKQRTIQAKKEVEQRRAGGYSRKYASKAKNLADDMVRNTARDLLYYAVTQDAMLIFENLSRGFGRQGKRTFMAERQYTRMEDWLTAKLAYEGLPSKTYLSKTLAQYTSKTCSNCGFTITSADYDRVLEKLKKTATGWMTTINGKELKVEGQITYYNRYKRQNVVKDLSVELDRLSEESVNNDISSWTKGRSGEALSLLKKRFSHRPCQEKFVCLNCGFETHADEQAALNIARSWLFLRSQEYKKYQTNKTTGNTDKRAFVETWQSFYRKKLKEVWKPAV

SEQ ID NO: 401 - protein, 979 aa, synthetic construct
  REGION 1..979: note = CasX variant
QEIKRINKIRRRLVKDSNTKKAGKTGPMKTLLVRVMTPDLRERLENLPRKKPENIPQPISNTSRANLNKLLTDYTEMKKAILHVYWEEFQKDPVGLMSRVAQPASKKIDQNKLKPEMDEKGNLTTAGFACSQCGQPLFVYKLEQVSEKGKAYTNYFGRCNVAEHEKLILLAQLKPEKDSDEAVTYSLGKFGQRALDFYSIHVTKESTHPVKPLAQIAGNRYASGPVGKALSDACMGTIASFLSKYQDIIIEHQKVVKGNQKRLESLRELAGKENLEYPSVTLPPQPHTKEGVDAYNEVIARVRMWVNLNLWQKLKLSRDDAKPLLRLKGFPSFPLVERQANEVDWWDMVCNVKKLINEKKEDGKVFWQNLAGYKRQEALRPYLSSEEDRKKGKKFARYQLGDLLLHLEKKHGEDWGKVYDEAWERIDKKVEGLSKHIKLEEERRSEDAQSKAALTDWLRAKASFVIEGLKEADKDEFCRCELKLQKWYGDLRGKPFAIEAENSILDISGFSKQYNCAFIWQKDGVKKLNLYLIINYFKGGKLRFKKIKPEAFEANRFYTVINKKSGEIVPMEVNFNFDDPNLIILPLAFGKRQGREFIWNDLLSLETGSLKLANGRVIEKTLYNRRTRQDEPALFVALTFERREVLDSSNIKPMNLIGVDRGENIPAVIALTDPEGCPLSRFKDSLGNPTHILRIGESYKEKQRTIQAKKEVEQRRAGGYSRKYASKAKNLADDMVRNTARDLLYYAVTQDAMLIFENLSRGFGRQGKRTFMAERQYTRMEDWLTAKLAYEGLPSKTYLSKTLAQYTSKTCSNCGFTITSADYDRVLEKLKKTATGWMTTINGKELKVEGQITYYNRYKRQNVVKDLSVELDRLSEESVNNDISSWTKGRSGEALSLLKKRFSHRPVQEKFVCLNCGFETHADEQAALNIARSWLFLRSQEYKKYQTNKTTGNTDKRAFVETWQSFYRKKLKEVWKPAV

SEQ ID NO: 402 - protein, 978 aa, synthetic construct
  REGION 1..978: note = CasX variant
QEIKRINKIRRRLVKDSNTKKAGKTGPMKTLLVRVMTPDLRERLENLRKKPENIPQPISNTSRANLNKLLTDYTEMKKAILHVYWEEFQKDPVGLMSRVAQPASKKIDQNKLKPEMDEKGNLTTAGFACSQCGQPLFVYKLEQVSEKGKAYTNYFGRCNVAEHEKLILLAQLKPEKDSDEAVTYSLGKFGQRALDFYSIHVTKESTHPVKPLAQIAGNRYASGPVGKALSDACMGTIASFLSKYQDIIIEHQKVVKGNQKRLESLRELAGKENLEYPSVTLPPQPHTKEGVDAYNEVIARVRMWVNLNLWQKLKLSRDDAKPLLRLKGFPSFPLVERQANEVDWWDMVCNVKKLINEKKEDGKVFWQNLAGYKRQEALRPYLSSEEDRKKGKKFARYQLGDLLLHLEKKHGEDWGKVYDEAWERIDKKVEGLSKHIKLEEERRSEDAQSKAALTDWLRAKASFVIEGLKEADKDEFCRCELKLQKWYGDLRGKPFAIEAENSILDISGFSKQYNCAFIWQKDGVKKLNLYLIINYFKGGKLRFKKIKPEAFEANRFYTVINKKSGEIVPMEVNFNFDDPNLIILPLAFGKRQGREFIWNDLLSLETGSLKLANGRVIEKTLYNRRTRQDEPALFVALTFERREVLDSSNIKPMNLIGVDRGENIPAVIALTDPEGCPLSRFKDSLGNPTHILRIGESYKEKQRTIQAKKEVEQRRAGGYSRKYASKAKNLADDMVRNTARDLLYYAVTQDAMLIFENLSRGFGRQGKRTFMAERQYTRMEDWLTAKLAYEGLPSKTYLSKTLAQYTSKTCSNCGFTITSADYDRVLEGLKKTATGWMTTINGKELKVEGQITYYNRYKRQNVVKDLSVELDRLSEESVNNDISSWTKGRSGEALSLLKKRFSHRPVQEKFVCLNCGFETHADEQAALNIARSWLFLRSQEYKKYQTNKTTGNTDKRAFVETWQSFYRKKLKEVWKPAV

SEQ ID NO: 403 - protein, 977 aa, synthetic construct
  REGION 1..977: note = CasX variant
QEIKRINKIRRRLVKDSNTKKAGKTGPMKTLLVRVMTPDLRERLENLRKKPENIPQPISNTSRANLNKLLTDYTEMKKAILHVYWEEFQKDPVGLMSRVAQPASKKIDQNKLKPEMDEKGNLTTAGFACSQCGQPLFVYKLEQVSEKGKAYTNYFGRCNVAEHEKLILLAQLKPEKDSDEAVTYSLGKFGQRALDFYSIHVTKESTHPVKPLAQIAGNRYASGPVGKALSDACMGTIASFLSKYQDIIIEHQKVVKGNQKRLESLRELAGKENLEYPSVTLPPQPHTKEGVDAYNEVIARVRMWVNLNLWQKLKLSRDDAKPLLRLKGFPSFPLVERQANEVDWWDMVCNVKKLINEKKEDGKVFWQNLAGYKRQEALRPYLSSEEDRKKGKKFARYQLGDLLLHLEKKHGEDWGKVYDEAWERIDKKVEGLSKHIKLEEERRSEDAQSKAALTDWLRAKASFVIEGLKEADKDEFCRCELKLQKWYGDLRGKPFAIEAENSILDISGFSKQYNCAFIWQKDGVKKLNLYLIINYFKGGKLRFKKIKPEAFEANRFYTVINKKSGEIVPMEVNFNFDDPNLIILPLAFGKRQGREFIWNDLLSLETGSLKLANGRVIEKTLYNRRTRQDEPALFVALTFERREVLDSSNIKPMNLIGVDRGENIPAVIALTDPEGCPLSRFKDSLGNPTHILRIGESYKEKQRTIQAKKEVEQRRAGGYSRKYASKAKNLADDMVRNTARDLLYYAVTQDAMLIFENLSRGFGRQGKRTFMAERQYTRMEDWLTAKLAYEGLPSKTYLSKTLAQTSKTCSNCGFTITSADYDRVLEKLKKTATGWMTTINGKELKVEGQITYYNRYKRQNVVKDLSVELDRLSEESVNNDISSWTKGRSGEALSLLKKRFSHRPVQEKFVCLNCGFETHADEQAALNIARSWLFLRSQEYKKYQTNKTTGNTDKRAFVETWQSFYRKKLKEVWKPAV

SEQ ID NO: 404 - protein, 979 aa, synthetic construct
  REGION 1..979: note = CasX variant
QEIKRINKIRRRLVKDSNTKKAGKTGPMKTLLVRVMTPDLRERLENLRKKPENIPQPISNTSRANLNKLLTDYTEMKKAILHVYWEEFQKDPVGLMSRVAQPASKKIDQNKLKPEMDEKGNLTTAGFACSQCGQPLFVYKLEQVSEKGKAYTNYFGRCNVAEHEKLILLAQLKPEKDSDEAVTYSLGKFGQRALDFYSIHVTKESTHPVKPLAQIAGNRYASGPVGKALSDACMGTIASFLSKYQDIIIEHQKVVKGNQKRLESLRELAGKENLEYPSVTLPPQPHTKEGVDAYNEVIARVRMWVNLNLWQKLKLSRDDAKPLLRLKGFPSFPLVERQANEVDWWDMVCNVKKLINEKKEDGKVFWQNLAGYKRQEALRPYLSSEEDRKKGKKFARYQLGDLLLHLEKKHGEDWGKVYDEAWERIDKKVEGLSKHIKLEEERRSEDAQSKAALTDWLRAKASFVIEGLKEADKDEFCRCELKLQKWYGDLRGKPFAIEAENSILDISGFSKQYNCAFIWQKDGVKKLNLYLIINYFKGGKLRFKKIKPEAFEANRFYTVINKKSGEIVPMEVNFNFDDPNLIILPLAFGKRQGREFIWNDLLSLETGSLKLANGRVIEKTLYNRRTRQDEPALFVALTFERREVLDSSNIKPMNLIGVDRGENIPAVIALTDPEGCPLSRFKDSLGNPTHILRIGESYKEKQRTIQAKKEVEQRRAGGYSRKYASKAKNLADDMVRNTARDLLYYAVTQDAMLIFENLSRGFGRQGKRTFMAERQYTRMEDWLTAKLAYEGLPSKTYLSKTLAQYTISKTCSNCGFTITSADYDRVLEKLKKTATGWMTTINGKELKVEGQITYYNRYKRQNVVKDLSVELDRLSEESVNNDISSWTKGRSGEALSLLKKRFSHRPVQEKFVCLNCGFETHADEQAALNIARSWLFLRSQEYKKYQTNKTTGNTDKRAFVETWQSFYRKKLKEVWKPAV

SEQ ID NO: 405 - protein, 978 aa, synthetic construct
  REGION 1..978: note = CasX variant
QEIKRINKIRRRLVKDSNTKKAGKTGPMKTLLVRVMTPDLRERLENLRKKPENIPQPISNTSRANLNKLLTDYTEMKKAILHVYWEEFQKDPVGLMSRVAQPASKKIDQNKLKPEMDEKGNLTTAGFACSQCGQPLFVYKLEQVSEKGKAYTNYFGRCNVAEHEKLILLAQLKPEKDSDEAVTYSLGKFGQRALDFYSIHVTKESTHPVKPLAQIAGNRYASGPVGKALSDACMGTIASFLSKYQDIIIEHQKVVKGNQKRLESLRELAGKENLEYPSVTLPPQPHTKEGVDAYNEVIARVRMWVNLNLWQKLKLSRDDAKPLLRLKGFPSFPLVERQANEVDWWDMVCNVKKLINEKKEDGKVFWQNLAGYKRQEALRPYLSSEEDRKKGKKFARYQLGDLLLHLEKKHGEDWGKVYDEAWERIDKKVEGLSKHIKLEEERRSEDAQSKAALTDWLRAKASFVIEGLKEADKDEFCRCELKLQKWYGDLRGKPFAIEAENSILDISGFSKQYNCAFIWQKDGVKKLNLYLIINYFKGGKLRFKKIKPEAFEANRFYTVINKKSGEIVPMEVNFNFDDPNLIILPLAFGKRQGREFIWNDLLSLETGSLKLANGRVIEKTLYNRRTRQDEPALFVALTFERREVLDSSNIKPMNLIGVDRGENIPAVIALTDPEGCPLSRFKDSLGNPTHILRIGESYKEKQRTIQAKKEVEQRRAGGYSRKYASKAKNLADDMVRNTARDLLYYAVTQDAMLIFENLSRGFGRQGKRTFMAERQYTRMEDWLTAKLAYEGLPSKTYLSKTLAQYTSKTKSNCGFTITSADYDRVLEKLKKTATGWMTTINGKELKVEGQITYYNRYKRQNVVKDLSVELDRLSEESVNNDISSWTKGRSGEALSLLKKRFSHRPVQEKFVCLNCGFETHADEQAALNIARSWLFLRSQEYKKYQTNKTTGNTDKRAFVETWQSFYRKKLKEVWKPAV

SEQ ID NO: 406 - protein, 978 aa, synthetic construct
  REGION 1..978: note = CasX variant
QEIKRINKIRRRLVKDSNTKKAGKTGPMKTLLVRVMTPDLRERLENLRKKPENIPQPISNTSRANLNKLLTDYTEMKKAILHVYWEEFQKDPVGLMSRVAQPASKKIDQNKLKPEMDEKGNLTTAGFACSQCGQPLFVYKLEQVSEKGKAYTNYFGRCNVAEHEKLILLAQLKPEKDSDEAVTYSLGKFGQRALDFYSIHVTKESTHPVKPLAQIAGNRYASGPVGKALSDACMGTIASFLSKYQDIIIEHQKVVKGNQKRLESLRELAGKENLEYPSVTLPPQPHTKEGVDAYNEVIARVRMWVNLNLWQKLKLSRDDAKPLLRLKGFPSFPLVERQANEVDWWDMVCNVKKLINEKKEDGKVFWQNLAGYKRQEALRPYLSSEEDRKKGKKFARYQLGDLLLHLEKKHGEDWGKVYDEAWERIDKKVEGLSKHIKLEEERRSEDAQSKAALTDWLRAKASFVIEGLKEADKDEFCRCELKLQKWYGDLRGKPFAIEAENSILDISGFSKQYNCAFIWQKDGVKKLNLYLIINYFKGGKLRFKKIKPEAFEANRFYTVINKKSGEIVPMEVNFNFDDPNLIILPLAFGKRQGREFIWNDLLSLETGSLKLANGRVIEKTLYNRRTRQDEPALFVALTFERREVLDSSNIKPMNLIGVDRGENIPAVIALTDPEGCPLSRFKDSLGNPTHILRIGESYKEKQRTIQAKKEVEQRRAGGYSRKYASKAKNLADDMVRNTARDLLYYAVTQDAMLIFENLSRGFGRQGKRTFMAERQYTRMEDWLTAKLAYEGLPSKTYLSKQLAQYTSKTCSNCGFTITSADYDRVLEKLKKTATGWMTTINGKELKVEGQITYYNRYKRQNVVKDLSVELDRLSEESVNNDISSWTKGRSGEALSLLKKRFSHRPVQEKFVCLNCGFETHADEQAALNIARSWLFLRSQEYKKYQTNKTTGNTDKRAFVETWQSFYRKKLKEVWKPAV

SEQ ID NO: 407 - protein, 978 aa, synthetic construct
  REGION 1..978: note = CasX variant
QEIKRINKIRRRLVKDSNTKKAGKTGPMKTLLVRVMTPDLRERLENLRKKPENIPQPISNTSRANLNKLLTDYTEMKKAILHVYWEEFQKDPVGLMSRVAQPASKKIDQNKLKPEMDEKGNLTTAGFACSQCGQPLFVYKLEQVSEKGKAYTNYFGRCNVAEHEKLILLAQLKPEKDSDEAVTYSLGKFGQRALDFYSIHVTKESTHPVKPLAQIAGNRYASGPVGKALSDACMGTIASFLSKYQDIIIEHQKVVKGNQKRLESLRELAGKENLEYPSVTLPPQPHTKEGVDAYNEVIARVRMWVNLNLWQKLKLSRDDAKPLLRLKGFPSFPLVERQANEVDWWDMVCNVKKLINEKKEDGKVFWQNLAGYKRQEALRPYLSSEEDRKKGKKFARYQLGDLLLHLEKKHGEDWGKVYDEAWERIDKKVEGLSKHIKLEEERRSEDAQSKAALTDWLRAKASFVIEGLKEADKDEFCRCELKLQKWYGDLRGKPFAIEAENSILDISGFSKQYNCAFIWQKDGVKKLNLYLIINYFKGGKLRFKKIKPEAFEANRFYTVINKKSGEIVPMEVNFNFDDPNLIILPLAFGKRQGREFIWNDLLSLETGSLKLANGRVIEKTLYNRRTRQDEPALFVALTFERREVLDSSNIKPMNLIGVDRGENIPAVIALTDPEGCPLSRFKDSLGNPTHILRIGESYKEKQRTIQAKKEVEQRRAGGYSRKYASKAKNLADDMVRNTARDLLYYAVTQDAMLIFENLSRGFGRQGKRTFMAERQYTRMEDWLTAKLAYEGLPSKTYLSKTLAQYYSKTCSNCGFTITSADYDRVLEKLKKTATGWMTTINGKELKVEGQITYYNRYKRQNVVKDLSVELDRLSEESVNNDISSWTKGRSGEALSLLKKRFSHRPVQEKFVCLNCGFETHADEQAALNIARSWLFLRSQEYKKYQTNKTTGNTDKRAFVETWQSFYRKKLKEVWKPAV

SEQ ID NO: 408 - protein, 978 aa, synthetic construct
  REGION 1..978: note = CasX variant
QEIKRINKIRRRLVKDSNTKKAGKTGPMKTLLVRVMTPDLRERLENLRKKPENIPQPISNTSRANLNKLLTDYTEMKKAILHVYWEEFQKDPVGLMSRVAQPASKKIDQNKLKPEMDEKGNLTTAGFACSQCGQPLFVYKLEQVSEKGKAYTNYFGRCNVAEHEKLILLAQLKPEKDSDEAVTYSLGKFGQRALDFYSIHVTKESTHPVKPLAQIAGNRYASGPVGKALSDACMGTIASFLSKYQDIIIEHQKVVKGNQKRLESLRELAGKENLEYPSVTLPPQPHTKEGVDAYNEVIARVRMWVNLNLWQKLKLSRDDAKPLLRLKGFPSFPLVERQANEVDWWDMVCNVKKLINEKKEDGKVFWQNLAGYKRQEALRPYLSSEEDRKKGKKFARYQLGDLLLHLEKKHGEDWGKVYDEAWERIDKKVEGLSKHIKLEEERRSEDAQSKAALTDWLRAKASFVIEGLKEADKDEFCRCELKLQKWYGDLRGKPFAIEAENSILDISGFSKQYNCAFIWQKDGVKKLNLYLIINYFKGGKLRFKKIKPEAFEANRFYTVINKKSGEIVPMEVNFNFDDPNLIILPLAFGKRQGREFIWNDLLSLETGSLKLANGRVIEKTLYNRRTRQDEPALFVALTFERREVLDSSNIKPMNLIGVDRGENIPAVIALTDPEGCPLSRFKDSLGNPTHILRIGESYKEKQRTIQAKKEVEQRRAGGYSRKYASKAKNLADDMVRNTARDLLYYAVTQDAMLIFENLSRGFGRQGKRTFMAERQYTRMEDWLTAKLAYEGLPSKTYLSKTLAKYTSKTCSNCGFTITSADYDRVLEKLKKTATGWMTTINGKELKVEGQITYYNRYKRQNVVKDLSVELDRLSEESVNNDISSWTKGRSGEALSLLKKRFSHRPVQEKFVCLNCGFETHADEQAALNIARSWLFLRSQEYKKYQTNKTTGNTDKRAFVETWQSFYRKKLKEVWKPAV

SEQ ID NO: 409 - protein, 978 aa, synthetic construct
  REGION 1..978: note = CasX variant
QEIKRINKIRRRLVKDSNTKKAGKTGPMKTLLVRVMTPDLRERLENLRKKPENIPQPISNTSRANLNKLLTDYTEMKKAILHVYWEEFQKDPVGLMSRVAQPASKKIDQNKLKPEMDEKGNLTTAGFACSQCGQPLFVYKLEQVSEKGKAYTNYFGRCNVAEHEKLILLAQLKPEKDSDEAVTYSLGKFGQRALDFYSIHVTKESTHPVKPLAQIAGNRYASGPVGKALSDACMGTIASFLSKYQDIIIEHQKVVKGNQKRLESLRELAGKENLEYPSVTLPPQPHTKEGVDAYNEVIARVRMWVNLNLWQKLKLSRDDAKPLLRLKGFPSFPLVERQANEVDWWDMVCNVKKLINEKKEDGKVFWQNLAGYKRQEALRPYLSSEEDRKKGKKFARYQLGDLLLHLEKKHGEDWGKVYDEAWERIDKKVEGLSKHIKLEEERRSEDAQSKAALTDWLRAKASFVIEGLKEADKDEFCRCELKLQKWYGDLRGKPFAIEAENSILDISGFSKQYNCAFIWQKDGVKKLNLYLIINYFKGGKLRFKKIKPEAFEANRFYTVINKKSGEIVPMEVNFNFDDPNLIILPLAFGKRQGREFIWNDLLSLETGSLKLANGRVIEKTLYNRRTRQDEPALFVALTFERREVLDSSNIKPMNLIGVDRGENIPAVIALTDPEGCPLSRFKDSLGNPTHILRIGESYKEKQRTIQAKKEVEQRRAGGYSRKYASKAKNLADDMVRNTARDLLYYAVTQDAMLIFENLSRGFGRQGKRTFMAERQYTRMEDWLTAKLAYEGLASKTYLSKTLAQYTSKTCSNCGFTITSADYDRVLEKLKKTATGWMTTINGKELKVEGQITYYNRYKRQNVVKDLSVELDRLSEESVNNDISSWTKGRSGEALSLLKKRFSHRPVQEKFVCLNCGFETHADEQAALNIARSWLFLRSQEYKKYQTNKTTGNTDKRAFVETWQSFYRKKLKEVWKPAV

SEQ ID NO: 410 - protein, 979 aa, synthetic construct
  REGION 1..979: note = CasX variant
QEIKRINKIRRRLVKDSNTKKAGKTGPMKTLLVRVMTPDLRERLENLRKKPENIPQPISNTSRANLNKLLTDYTEMKKAILHVYWEEFQKDPVGLMSRVAQPASKKIDQNKLKPEMDEKGNLTTAGFACSQCGQPLFVYKLEQVSEKGKAYTNYFGRCNVAEHEKLILLAQLKPEKDSDEAVTYSLGKFGQRALDFYSIHVTKESTHPVKPLAQIAGNRYASGPVGKALSDACMGTIASFLSKYQDIIIEHQKVVKGNQKRLESLRELAGKENLEYPSVTLPPQPHTKEGVDAYNEVIARVRMWVNLNLWQKLKLSRDDAKPLLRLKGFPSFPLVERQANEVDWWDMVCNVKKLINEKKEDGKVFWQNLAGYKRQEALRPYLSSEEDRKKGKKFARYQLGDLLLHLEKKHGEDWGKVYDEAWERIDKKVEGLSKHIKLEEERRSEDAQSKAALTDWLRAKASFVIEGLKEADKDEFCRCELKLQKWYGDLRGKPFAIEAENSILDISGFSKQYNCAFIWQKDGVKKLNLYLIINYFKGGKLRFKKIKPEAFEANRFYTVINKKSGEIVPMEVNFNFDDPNLIILPLAFGKRQGREFIWNDLLSLETGSLKLANGRVIEKTLYNRRTRQDEPALFVALTFERREVLDSSNIKPMNLIGVDRGENIPAVIALTDPEGCPLSRFKDSLGNPTHILRIGESYKEKQRTIQAKKEVEQRRAGGYSRKYASKAKNLADDMVRNTARDLLYYAVTQDAMLIFENLSRGFGRQGKRTFMAERQYTRMEDWLTAKLAYEGLPSKTYLSKTLLAQYTSKTCSNCGFTITSADYDRVLEKLKKTATGWMTTINGKELKVEGQITYYNRYKRQNVVKDLSVELDRLSEESVNNDISSWTKGRSGEALSLLKKRFSHRPVQEKFVCLNCGFETHADEQAALNIARSWLFLRSQEYKKYQTNKTTGNTDKRAFVETWQSFYRKKLKEVWKPAV

SEQ ID NO: 411 - protein, 977 aa, synthetic construct
  REGION 1..977: note = CasX variant
QEIKRINKIRRRLVKDSNTKKAGKTGPMKTLLVRVMTPDLRERLENLRKKPENIPQPISNTSRANLNKLLTDYTEMKKAILHVYWEEFQKDPVGLMSRVAQPASKKIDQNKLKPEMDEKGNLTTAGFACSQCGQPLFVYKLEQVSEKGKAYTNYFGRCNVAEHEKLILLAQLKPEKDSDEAVTYSLGKFGQRALDFYSIHVTKESTHPVKPLAQIAGNRYASGPVGKALSDACMGTIASFLSKYQDIIIEHQKVVKGNQKRLESLRELAGKENLEYPSVTLPPQPHTKEGVDAYNEVIARVRMWVNLNLWQKLKLSRDDAKPLLRLKGFPSFPLVERQANEVDWWDMVCNVKKLINEKKEDGKVFWQNLAGYKRQEALRPYLSSEEDRKKGKKFARYQLGDLLLHLEKKHGEDWGKVYDEAWERIDKKVEGLSKHIKLEEERRSEDAQSKAALTDWLRAKASFVIEGLKEADKDEFCRCELKLQKWYGDLRGKPFAIEAENSILDISGFSKQYNCAFIWQKDGVKKLNLYLIINYFKGGKLRFKKIKPEAFEANRFYTVINKKSGEIVPMEVNFNFDDPNLIILPLAFGKRQGREFIWNDLLSLETGSLKLANGRVIEKTLYNRRTRQDEPALFVALTFERREVLDSSNIKPMNLIGVDRGENIPAVIALTDPEGCPLSRFKDSLGNPTHILRIGESYKEKQRTIQAKKEVEQRRAGGYSRKYASKAKNLADDMVRNTARDLLYYAVTQDAMLIFENLSRGFGRQGKRTFMAERQYTRMEDWLTAKLAYEGLPSKTYLSKTAQYTSKTCSNCGFTITSADYDRVLEKLKKTATGWMTTINGKELKVEGQITYYNRYKRQNVVKDLSVELDRLSEESVNNDISSWTKGRSGEALSLLKKRFSHRPVQEKFVCLNCGFETHADEQAALNIARSWLFLRSQEYKKYQTNKTTGNTDKRAFVETWQSFYRKKLKEVWKPAV

SEQ ID NO: 412 - protein, 979 aa, synthetic construct
  REGION 1..979: note = CasX variant
QEIKRINKIRRRLVKDSNTKKAGKTGPMKTLLVRVMTPDLRERLENLRKKPENIPQPISNTSRANLNKLLTDYTEMKKAILHVYWEEFQKDPVGLMSRVAQPASKKIDQNKLKPEMDEKGNLTTAGFACSQCGQPLFVYKLEQVSEKGKAYTNYFGRCNVAEHEKLILLAQLKPEKDSDEAVTYSLGKFGQRALDFYSIHVTKESTHPVKPLAQIAGNRYASGPVGKALSDACMGTIASFLSKYQDIIIEHQKVVKGNQKRLESLRELAGKENLEYPSVTLPPQPHTKEGVDAYNEVIARVRMWVNLNLWQKLKLSRDDAKPLLRLKGFPSFPLVERQANEVDWWDMVCNVKKLINEKKEDGKVFWQNLAGYKRQEALRPYLSSEEDRKKGKKFARYQLGDLLLHLEKKHGEDWGKVYDEAWERIDKKVEGLSKHIKLEEERRSEDAQSKAALTDWLRAKASFVIEGLKEADKDEFCRCELKLQKWYGDLRGKPFAIEAENSILDISGFSKQYNCAFIWQKDGVKKLNLYLIINYFKGGKLRFKKIKPEAFEANRFYTVINKKSGEIVPMEVNFNFDDPNLIILPLAFGKRQGREFIWNDLLSLETGSLKLANGRVIEKTLYNRRTRQDEPALFVALTFERREVLDSSNIKPMNLIGVDRGENIPAVIALTDPEGCPLSRFKDSLGNPTHILRIGESYKEKQRTIQAKKEVEQRRAGGYSRKYASKAKNLADDMVRNTARDLLYYAVTQDAMLIFENLSRGFGRQGKRTFMAERQYTRMEDWLTAKLAYEGLPSKTYLSKTLAQYTSKTCSNCGFTWITSADYDRVLEKLKKTATGWMTTINGKELKVEGQITYYNRYKRQNVVKDLSVELDRLSEESVNNDISSWTKGRSGEALSLLKKRFSHRPVQEKFVCLNCGFETHADEQAALNIARSWLFLRSQEYKKYQTNKTTGNTDKRAFVETWQSFYRKKLKEVWKPAV

SEQ ID NO: 413 - protein, 979 aa, synthetic construct
  REGION 1..979: note = CasX variant
QEIKRINKIRRRLVKDSNTKKAGKTGPMKTLLVRVMTPDLRERLENLRKKPENIPQPISNTSRANLNKLLTDYTEMKKAILHVYWEEFQKDPVGLMSRVAQPASKKIDQNKLKPEMDEKGNLTTAGFACSQCGQPLFVYKLEQVSEKGKAYTNYFGRCNVAEHEKLILLAQLKPEKDSDEAVTYSLGKFGQRALDFYSIHVTKESTHPVKPLAQIAGNRYASGPVGKALSDACMGTIASFLSKYQDIIIEHQKVVKGNQKRLESLRELAGKENLEYPSVTLPPQPHTKEGVDAYNEVIARVRMWVNLNLWQKLKLSRDDAKPLLRLKGFPSFPLVERQANEVDWWDMVCNVKKLINEKKEDGKVFWQNLAGYKRQEALRPYLSSEEDRKKGKKFARYQLGDLLLHLEKKHGEDWGKVYDEAWERIDKKVEGLSKHIKLEEERRSEDAQSKAALTDWLRAKASFVIEGLKEADKDEFCRCELKLQKWYGDLRGKPFAIEAENSILDISGFSKQYNCAFIWQKDGVKKLNLYLIINYFKGGKLRFKKIKPEAFEANRFYTVINKKSGEIVPMEVNFNFDDPNLIILPLAFGKRQGREFIWNDLLSLETGSLKLANGRVIEKTLYNRRTRQDEPALFVALTFERREVLDSSNIKPMNLIGVDRGENIPAVIALTDPEGCPLSRFKDSLGNPTHILRIGESYKEKQRTIQAKKEVEQRRAGGYSRKYASKAKNLADDMVRNTARDLLYYAVTQDAMLIFENLSRGFGRQGKRTFMAERQYTRMEDWLTAKLAYEGLPSKTYLSKHTLAQYTSKTCSNCGFTITSADYDRVLEKLKKTATGWMTTINGKELKVEGQITYYNRYKRQNVVKDLSVELDRLSEESVNNDISSWTKGRSGEALSLLKKRFSHRPVQEKFVCLNCGFETHADEQAALNIARSWLFLRSQEYKKYQTNKTTGNTDKRAFVETWQSFYRKKLKEVWKPAV

SEQ ID NO: 414 - protein, 978 aa, synthetic construct
  REGION 1..978: note = CasX variant
QEIKRINKIRRRLVKDSNTKKAGKTGPMKTLLVRVMTPDLRERLENLRKKPENIPQPISNTSRANLNKLLTDYTEMKKAILHVYWEEFQKDPVGLMSRVAQPASKKIDQNKLKPEMDEKGNLTTAGFACSQCGQPLFVYKLEQVSEKGKAYTNYFGRCNVAEHEKLILLAQLKPEKDSDEAVTYSLGKFGQRALDFYSIHVTKESTHPVKPLAQIAGNRYASGPVGKALSDACMGTIASFLSKYQDIIIEHQKVVKGNQKRLESLRELAGKENLEYPSVTLPPQPHTKEGVDAYNEVIARVRMWVNLNLWQKLKLSRDDAKPLLRLKGFPSFPLVERQANEVDWWDMVCNVKKLINEKKEDGKVFWQNLAGYKRQEALRPYLSSEEDRKKGKKFARYQLGDLLLHLEKKHGEDWGKVYDEAWERIDKKVEGLSKHIKLEEERRSEDAQSKAALTDWLRAKASFVIEGLKEADKDEFCRCELKLQKWYGDLRGKPFAIEAENSILDISGFSKQYNCAFIWQKDGVKKLNLYLIINYFKGGKLRFKKIKPEAFEANRFYTVINKKSGEIVPMEVNFNFDDPNLIILPLAFGKRQGREFIWNDLLSLETGSLKLANGRVIEKTLYNRRTRQDEPALFVALTFERREVLDSSNIKPMNLIGVDRGENIPAVIALTDPEGCPLSRFKDSLGNPTHILRIGESYKEKQRTIQAKKEVEQRRAGGYSRKYASKAKNLADDMVRNTARDLLYYAVTQDAMLIFENLSRGFGRQGKRTFMAERQYTRMEDWLTAKLAYEGLPSKTYLSKTLAQYTSKPCSNCGFTITSADYDRVLEKLKKTATGWMTTINGKELKVEGQITYYNRYKRQNVVKDLSVELDRLSEESVNNDISSWTKGRSGEALSLLKKRFSHRPVQEKFVCLNCGFETHADEQAALNIARSWLFLRSQEYKKYQTNKTTGNTDKRAFVETWQSFYRKKLKEVWKPAV

SEQ ID NO: 415 - protein, 979 aa, synthetic construct
  REGION 1..979: note = CasX variant
QEIKRINKIRRRLVKDSNTKKAGKTGPMKTLLVRVMTPDLRERLENLRKKPENIPQPISNTSRANLNKLLTDYTEMKKAILHVYWEEFQKDPVGLMSRVAQPASKKIDQNKLKPEMDEKGNLTTAGFACSQCGQPLFVYKLEQVSEKGKAYTNYFGRCNVAEHEKLILLAQLKPEKDSDEAVTYSLGKFGQRALDFYSIHVTKESTHPVKPLAQIAGNRYASGPVGKALSDACMGTIASFLSKYQDIIIEHQKVVKGNQKRLESLRELAGKENLEYPSVTLPPQPHTKEGVDAYNEVIARVRMWVNLNLWQKLKLSRDDAKPLLRLKGFPSFPLVERQANEVDWWDMVCNVKKLINEKKEDGKVFWQNLAGYKRQEALRPYLSSEEDRKKGKKFARYQLGDLLLHLEKKHGEDWGKVYDEAWERIDKKVEGLSKHIKLEEERRSEDAQSKAALTDWLRAKASFVIEGLKEADKDEFCRCELKLQKWYGDLRGKPFAIEAENSILDISGFSKQYNCAFIWQKDGVKKLNLYLIINYFKGGKLRFKKIKPEAFEANRFYTVINKKSGEIVPMEVNFNFDDPNLIILPLAFGKRQGREFIWNDLLSLETGSLKLANGRVIEKTLYNRRTRQDEPALFVALTFERREVLDSSNIKPMNLIGVDRGENIPAVIALTDPEGCPLSRFKDSLGNPTHILRIGESYKEKQRTIQAKKEVEQRRAGGYSRKYASKAKNLADDMVRNTARDLLYYAVTQDAMLIFENLSRGFGRQGKRTFMAERQYTRMEDWLTAKLAYEGLPSKTYLSKTLAAQYTSKTCSNCGFTITSADYDRVLEKLKKTATGWMTTINGKELKVEGQITYYNRYKRQNVVKDLSVELDRLSEESVNNDISSWTKGRSGEALSLLKKRFSHRPVQEKFVCLNCGFETHADEQAALNIARSWLFLRSQEYKKYQTNKTTGNTDKRAFVETWQSFYRKKLKEVWKPAV

SEQ ID NO: 416 - protein, 979 aa, synthetic construct
  REGION 1..979: note = CasX variant
QEIKRINKIRRRLVKDSNTKKAGKTGPMKTLLVRVMTPDLRERLENLRKKPENIPQPISNTSRANLNKLLTDYTEMKKAILHVYWEEFQKDPVGLMSRVAQPASKKIDQNKLKPEMDEKGNLTTAGFACSQCGQPLFVYKLEQVSEKGKAYTNYFGRCNVAEHEKLILLAQLKPEKDSDEAVTYSLGKFGQRALDFYSIHVTKESTHPVKPLAQIAGNRYASGPVGKALSDACMGTIASFLSKYQDIIIEHQKVVKGNQKRLESLRELAGKENLEYPSVTLPPQPHTKEGVDAYNEVIARVRMWVNLNLWQKLKLSRDDAKPLLRLKGFPSFPLVERQANEVDWWDMVCNVKKLINEKKEDGKVFWQNLAGYKRQEALRPYLSSEEDRKKGKKFARYQLGDLLLHLEKKHGEDWGKVYDEAWERIDKKVEGLSKHIKLEEERRSEDAQSKAALTDWLRAKASFVIEGLKEADKDEFCRCELKLQKWYGDLRGKPFAIEAENSILDISGFSKQYNCAFIWQKDGVKKLNLYLIINYFKGGKLRFKKIKPEAFEANRFYTVINKKSGEIVPMEVNFNFDDPNLIILPLAFGKRQGREFIWNDLLSLETGSLKLANGRVIEKTLYNRRTRQDEPALFVALTFERREVLDSSNIKPMNLIGVDRGENIPAVIALTDPEGCPLSRFKDSLGNPTHILRIGESYKEKQRTIQAKKEVEQRRAGGYSRKYASKAKNLADDMVRNTARDLLYYAVTQDAMLIFENLSRGFGRQGKRTFMAERQYTRMEDWLTAKLAYEGLPSKTYLSKTLAQYTSKTCSNCGGFTITSADYDRVLEKLKKTATGWMTTINGKELKVEGQITYYNRYKRQNVVKDLSVELDRLSEESVNNDISSWTKGRSGEALSLLKKRFSHRPVQEKFVCLNCGFETHADEQAALNIARSWLFLRSQEYKKYQTNKTTGNTDKRAFVETWQSFYRKKLKEVWKPAV

SEQ ID NO: 417 - protein, 979 aa, synthetic construct
  REGION 1..979: note = CasX variant
QEIKRINKIRRRLVKDSNTKKAGKTGPMKTLLVRVMTPDLRERLENLRKKPENIPQPISNTSRANLNKLLTDYTEMKKAILHVYWEEFQKDPVGLMSRVAQPASKKIDQNKLKPEMDEKGNLTTAGFACSQCGQPLFVYKLEQVSEKGKAYTNYFGRCNVAEHEKLILLAQLKPEKDSDEAVTYSLGKFGQRALDFYSIHVTKESTHPVKPLAQIAGNRYASGPVGKALSDACMGTIASFLSKYQDIIIEHQKVVKGNQKRLESLRELAGKENLEYPSVTLPPQPHTKEGVDAYNEVIARVRMWVNLNLWQKLKLSRDDAKPLLRLKGFPSFPLVERQANEVDWWDMVCNVKKLINEKKEDGKVFWQNLAGYKRQEALRPYLSSEEDRKKGKKFARYQLGDLLLHLEKKHGEDWGKVYDEAWERIDKKVEGLSKHIKLEEERRSEDAQSKAALTDWLRAKASFVIEGLKEADKDEFCRCELKLQKWYGDLRGKPFAIEAENSILDISGFSKQYNCAFIWQKDGVKKLNLYLIINYFKGGKLRFKKIKPEAFEANRFYTVINKKSGEIVPMEVNFNFDDPNLIILPLAFGKRQGREFIWNDLLSLETGSLKLANGRVIEKTLYNRRTRQDEPALFVALTFERREVLDSSNIKPMNLIGVDRGENIPAVIALTDPEGCPLSRFKDSLGNPTHILRIGESYKEKQRTIQAKKEVEQRRAGGYSRKYASKAKNLADDMVRNTARDLLYYAVTQDAMLIFENLSRGFGRQGKRTFMAERQYTRMEDWLTAKLAYEGLPSKTYLSKTLFAQYTSKTCSNCGFTITSADYDRVLEKLKKTATGWMTTINGKELKVEGQITYYNRYKRQNVVKDLSVELDRLSEESVNNDISSWTKGRSGEALSLLKKRFSHRPVQEKFVCLNCGFETHADEQAALNIARSWLFLRSQEYKKYQTNKTTGNTDKRAFVETWQSFYRKKLKEVWKPAV

SEQ ID NO: 418 - protein, 979 aa, synthetic construct
  REGION 1..979: note = CasX variant
QEIKRINKIRRRLVKDSNTKKAGKTGPMKTLLVRVMTPDLRERLENLRKKPENIPQPISNTSRANLNKLLTDYTEMKKAILHVYWEEFQKDPVGLMSRVAQPASKKIDQNKLKPEMDEKGNLTTAGFACSQCGQPLFVYKLEQVSEKGKAYTNYFGRCNVAEHEKLILLAQLKPEKDSDEAVTYSLGKFGQRALDFYSIHVTKESTHPVKPLAQIAGNRYASGPVGKALSDACMGTIASFLSKYQDIIIEHQKVVKGNQKRLESLRELAGKENLEYPSVTLPPQPHTKEGVDAYNEVIARVRMWVNLNLWQKLKLSRDDAKPLLRLKGFPSFPLVERQANEVDWWDMVCNVKKLINEKKEDGKVFWQNLAGYKRQEALRPYLSSEEDRKKGKKFARYQLGDLLLHLEKKHGEDWGKVYDEAWERIDKKVEGLSKHIKLEEERRSEDAQSKAALTDWLRAKASFVIEGLKEADKDEFCRCELKLQKWYGDLRGKPFAIEAENSILDISGFSKQYNCAFIWQKDGVKKLNLYLIINYFKGGKLRFKKIKPEAFEANRFYTVINKKSGEIVPMEVNFNFDDPNLIILPLAFGKRQGREFIWNDLLSLETGSLKLANGRVIEKTLYNRRTRQDEPALFVALTFERREVLDSSNIKPMNLIGVDRGENIPAVIALTDPEGCPLSRFKDSLGNPTHILRIGESYKEKQRTIQAKKEVEQRRAGGYSRKYASKAKNLADDMVRNTARDLLYYAVTQDAMLIFENLSRGFGRQGKRTFMAERQYTRMEDWLTAKLAYEGLPSKTYLSKTLAQYTSKNTCSNCGFTITSADYDRVLEKLKKTATGWMTTINGKELKVEGQITYYNRYKRQNVVKDLSVELDRLSEESVNNDISSWTKGRSGEALSLLKKRFSHRPVQEKFVCLNCGFETHADEQAALNIARSWLFLRSQEYKKYQTNKTTGNTDKRAFVETWQSFYRKKLKEVWKPAV

SEQ ID NO: 419 - protein, 978 aa, synthetic construct
  REGION 1..978: note = CasX variant
QEIKRINKIRRRLVKDSNTKKAGKTGPMKTLLVRVMTPDLRERLENLRKKPENIPQPISNTSRANLNKLLTDYTEMKKAILHVYWEEFQKDPVGLMSRVAQPASKKIDQNKLKPEMDEKGNLTTAGFACSQCGQPLFVYKLEQVSEKGKAYTNYFGRCNVAEHEKLILLAQLKPEKDSDEAVTYSLGKFGQRALDFYSIHVTKESTHPVKPLAQIAGNRYASGPVGKALSDACMGTIASFLSKYQDIIIEHQKVVKGNQKRLESLRELAGKENLEYPSVTLPPQPHTKEGVDAYNEVIARVRMWVNLNLWQKLKLSRDDAKPLLRLKGFPSFPLVERQANEVDWWDMVCNVKKLINEKKEDGKVFWQNLAGYKRQEALRPYLSSEEDRKKGKKFARYQLGDLLLHLEKKHGEDWGKVYDEAWERIDKKVEGLSKHIKLEEERRSEDAQSKAALTDWLRAKASFVIEGLKEADKDEFCRCELKLQKWYGDLRGKPFAIEAENSILDISGFSKQYNCAFIWQKDGVKKLNLYLIINYFKGGKLRFKKIKPEAFEANRFYTVINKKSGEIVPMEVNFNFDDPNLIILPLAFGKRQGREFIWNDLLSLETGSLKLANGRVIEKTLYNRRTRQDEPALFVALTFERREVLDSSNIKPMNLIGVDRGENIPAVIALTDPEGCPLSRFKDSLGNPTHILRIGESYKEKQRTIQAKKEVEQRRAGGYSRKYASKAKNLADDMVRNTARDLLYYAVTQDAMLIFENLSRGFGRQGKRTFMAERQYTRMEDWLTAKLAYEGLPSKTYLSKTLAQYTSKTCSNCGPTITSADYDRVLEKLKKTATGWMTTINGKELKVEGQITYYNRYKRQNVVKDLSVELDRLSEESVNNDISSWTKGRSGEALSLLKKRFSHRPVQEKFVCLNCGFETHADEQAALNIARSWLFLRSQEYKKYQTNKTTGNTDKRAFVETWQSFYRKKLKEVWKPAV

SEQ ID NO: 420 - protein, 979 aa, synthetic construct
  REGION 1..979: note = CasX variant
QEIKRINKIRRRLVKDSNTKKAGKTGPMKTLLVRVMTPDLRERLENLRKKPENIPQPISNTSRANLNKLLTDYTEMKKAILHVYWEEFQKDPVGLMSRVAQPASKKIDQNKLKPEMDEKGNLTTAGFACSQCGQPLFVYKLEQVSEKGKAYTNYFGRCNVAEHEKLILLAQLKPEKDSDEAVTYSLGKFGQRALDFYSIHVTKESTHPVKPLAQIAGNRYASGPVGKALSDACMGTIASFLSKYQDIIIEHQKVVKGNQKRLESLRELAGKENLEYPSVTLPPQPHTKEGVDAYNEVIARVRMWVNLNLWQKLKLSRDDAKPLLRLKGFPSFPLVERQANEVDWWDMVCNVKKLINEKKEDGKVFWQNLAGYKRQEALRPYLSSEEDRKKGKKFARYQLGDLLLHLEKKHGEDWGKVYDEAWERIDKKVEGLSKHIKLEEERRSEDAQSKAALTDWLRAKASFVIEGLKEADKDEFCRCELKLQKWYGDLRGKPFAIEAENSILDISGFSKQYNCAFIWQKDGVKKLNLYLIINYFKGGKLRFKKIKPEAFEANRFYTVINKKSGEIVPMEVNFNFDDPNLIILPLAFGKRQGREFIWNDLLSLETGSLKLANGRVIEKTLYNRRTRQDEPALFVALTFERREVLDSSNIKPMNLIGVDRGENIPAVIALTDPEGCPLSRFKDSLGNPTHILRIGESYKEKQRTIQAKKEVEQRRAGGYSRKYASKAKNLADDMVRNTARDLLYYAVTQDAMLIFENLSRGFGRQGKRTFMAERQYTRMEDWLTAKLAYEGLPSKTYLSKTWLAQYTSKTCSNCGFTITSADYDRVLEKLKKTATGWMTTINGKELKVEGQITYYNRYKRQNVVKDLSVELDRLSEESVNNDISSWTKGRSGEALSLLKKRFSHRPVQEKFVCLNCGFETHADEQAALNIARSWLFLRSQEYKKYQTNKTTGNTDKRAFVETWQSFYRKKLKEVWKPAV

SEQ ID NO: 421 - protein, 978 aa, synthetic construct
  REGION 1..978: note = CasX variant
QEIKRINKIRRRLVKDSNTKKAGKTGPMKTLLVRVMTPDLRERLENLRKKPENIPQPISNTSRANLNKLLTDYTEMKKAILHVYWEEFQKDPVGLMSRVAQPASKKIDQNKLKPEMDEKGNLTTAGFACSQCGQPLFVYKLEQVSEKGKAYTNYFGRCNVAEHEKLILLAQLKPEKDSDEAVTYSLGKFGQRALDFYSIHVTKESTHPVKPLAQIAGNRYASGPVGKALSDACMGTIASFLSKYQDIIIEHQKVVKGNQKRLESLRELAGKENLEYPSVTLPPQPHTKEGVDAYNEVIARVRMWVNLNLWQKLKLSRDDAKPLLRLKGFPSFPLVERQANEVDWWDMVCNVKKLINEKKEDGKVFWQNLAGYKRQEALRPYLSSEEDRKKGKKFARYQLGDLLLHLEKKHGEDWGKVYDEAWERIDKKVEGLSKHIKLEEERRSEDAQSKAALTDWLRAKASFVIEGLKEADKDEFCRCELKLQKWYGDLRGKPFAIEAENSILDISGFSKQYNCAFIWQKDGVKKLNLYLIINYFKGGKLRFKKIKPEAFEANRFYTVINKKSGEIVPMEVNFNFDDPNLIILPLAFGKRQGREFIWNDLLSLETGSLKLANGRVIEKTLYNRRTRQDEPALFVALTFERREVLDSSNIKPMNLIGVDRGENIPAVIALTDPEGCPLSRFKDSLGNPTHILRIGESYKEKQRTIQAKKEVEQRRAGGYSRKYASKAKNLADDMVRNTARDLLYYAVTQDAMLIFENLSRGFGRQGKRTFMAERQYTRMEDWLTAKLAYEGLPSKTYLSKTLAQYTSKTMSNCGFTITSADYDRVLEKLKKTATGWMTTINGKELKVEGQITYYNRYKRQNVVKDLSVELDRLSEESVNNDISSWTKGRSGEALSLLKKRFSHRPVQEKFVCLNCGFETHADEQAALNIARSWLFLRSQEYKKYQTNKTTGNTDKRAFVETWQSFYRKKLKEVWKPAV

SEQ ID NO: 422 - protein, 977 aa, synthetic construct
  REGION 1..977: note = CasX variant
QEIKRINKIRRRLVKDSNTKKAGKTGPMKTLLVRVMTPDLRERLENLRKKPENIPQPISNTSRANLNKLLTDYTEMKKAILHVYWEEFQKDPVGLMSRVAQPASKKIDQNKLKPEMDEKGNLTTAGFACSQCGQPLFVYKLEQVSEKGKAYTNYFGRCNVAEHEKLILLAQLKPEKDSDEAVTYSLGKFGQRALDFYSIHVTKESTHPVKPLAQIAGNRYASGPVGKALSDACMGTIASFLSKYQDIIIEHQKVVKGNQKRLESLRELAGKENLEYPSVTLPPQPHTKEGVDAYNEVIARVRMWVNLNLWQKLKLSRDDAKPLLRLKGFPSFPLVERQANEVDWWDMVCNVKKLINEKKEDGKVFWQNLAGYKRQEALRPYLSSEEDRKKGKKFARYQLGDLLLHLEKKHGEDWGKVYDEAWERIDKKVEGLSKHIKLEEERRSEDAQSKAALTDWLRAKASFVIEGLKEADKDEFCRCELKLQKWYGDLRGKPFAIEAENSILDISGFSKQYNCAFIWQKDGVKKLNLYLIINYFKGGKLRFKKIKPEAFEANRFYTVINKKSGEIVPMEVNFNFDDPNLIILPLAFGKRQGREFIWNDLLSLETGSLKLANGRVIEKTLYNRRTRQDEPALFVALTFERREVLDSSNIKPMNLIGVDRGENIPAVIALTDPEGCPLSRFKDSLGNPTHILRIGESYKEKQRTIQAKKEVEQRRAGGYSRKYASKAKNLADDMVRNTARDLLYYAVTQDAMLIFENLSRGFGRQGKRTFMAERQYTRMEDWLTAKLAYEGLPSKTYLSKTLAQYTSKTCSCGFTITSADYDRVLEKLKKTATGWMTTINGKELKVEGQITYYNRYKRQNVVKDLSVELDRLSEESVNNDISSWTKGRSGEALSLLKKRFSHRPVQEKFVCLNCGFETHADEQAALNIARSWLFLRSQEYKKYQTNKTTGNTDKRAFVETWQSFYRKKLKEVWKPAV

SEQ ID NO: 423 - protein, 979 aa, synthetic construct
  REGION 1..979: note = CasX variant
QEIKRINKIRRRLVKDSNTKKAGKTGPMKTLLVRVMTPDLRERLENLRKKPENIPQPISNTSRANLNKLLTDYTEMKKAILHVYWEEFQKDPVGLMSRVAQPASKKIDQNKLKPEMDEKGNLTTAGFACSQCGQPLFVYKLEQVSEKGKAYTNYFGRCNVAEHEKLILLAQLKPEKDSDEAVTYSLGKFGQRALDFYSIHVTKESTHPVKPLAQIAGNRYASGPVGKALSDACMGTIASFLSKYQDIIIEHQKVVKGNQKRLESLRELAGKENLEYPSVTLPPQPHTKEGVDAYNEVIARVRMWVNLNLWQKLKLSRDDAKPLLRLKGFPSFPLVERQANEVDWWDMVCNVKKLINEKKEDGKVFWQNLAGYKRQEALRPYLSSEEDRKKGKKFARYQLGDLLLHLEKKHGEDWGKVYDEAWERIDKKVEGLSKHIKLEEERRSEDAQSKAALTDWLRAKASFVIEGLKEADKDEFCRCELKLQKWYGDLRGKPFAIEAENSILDISGFSKQYNCAFIWQKDGVKKLNLYLIINYFKGGKLRFKKIKPEAFEANRFYTVINKKSGEIVPMEVNFNFDDPNLIILPLAFGKRQGREFIWNDLLSLETGSLKLANGRVIEKTLYNRRTRQDEPALFVALTFERREVLDSSNIKPMNLIGVDRGENIPAVIALTDPEGCPLSRFKDSLGNPTHILRIGESYKEKQRTIQAKKEVEQRRAGGYSRKYASKAKNLADDMVRNTARDLLYYAVTQDAMLIFENLSRGFGRQGKRTFMAERQYTRMEDWLTAKLAYEGLPSKTYLSKTLAQYTSKTCSVNCGFTITSADYDRVLEKLKKTATGWMTTINGKELKVEGQITYYNRYKRQNVVKDLSVELDRLSEESVNNDISSWTKGRSGEALSLLKKRFSHRPVQEKFVCLNCGFETHADEQAALNIARSWLFLRSQEYKKYQTNKTTGNTDKRAFVETWQSFYRKKLKEVWKPAV

SEQ ID NO: 424 - protein, 978 aa, synthetic construct
  REGION 1..978: note = CasX variant
QEIKRINKIRRRLVKDSNTKKAGKTGPMKTLLVRVMTPDLRERLENLRKKPENIPQPISNTSRANLNKLLTDYTEMKKAILHVYWEEFQKDPVGLMSRVAQPASKKIDQNKLKPEMDEKGNLTTAGFACSQCGQPLFVYKLEQVSEKGKAYTNYFGRCNVAEHEKLILLAQLKPEKDSDEAVTYSLGKFGQRALDFYSIHVTKESTHPVKPLAQIAGNRYASGPVGKALSDACMGTIASFLSKYQDIIIEHQKVVKGNQKRLESLRELAGKENLEYPSVTLPPQPHTKEGVDAYNEVIARVRMWVNLNLWQKLKLSRDDAKPLLRLKGFPSFPLVERQANEVDWWDMVCNVKKLINEKKEDGKVFWQNLAGYKRQEALRPYLSSEEDRKKGKKFARYQLGDLLLHLEKKHGEDWGKVYDEAWERIDKKVEGLSKHIKLEEERRSEDAQSKAALTDWLRAKASFVIEGLKEADKDEFCRCELKLQKWYGDLRGKPFAIEAENSILDISGFSKQYNCAFIWQKDGVKKLNLYLIINYFKGGKLRFKKIKPEAFEANRFYTVINKKSGEIVPMEVNFNFDDPNLIILPLAFGKRQGREFIWNDLLSLETGSLKLANGRVIEKTLYNRRTRQDEPALFVALTFERREVLDSSNIKPMNLIGVDRGENIPAVIALTDPEGCPLSRFKDSLGNPTHILRIGESYKEKQRTIQAKKEVEQRRAGGYSRKYASKAKNLADDMVRNTARDLLYYAVTQDAMLIFENLSRGFGRQGKRTFMAERQYTRMEDWLTAKLAYEGLPSKTYLSKTLAQYTPKTCSNCGFTITSADYDRVLEKLKKTATGWMTTINGKELKVEGQITYYNRYKRQNVVKDLSVELDRLSEESVNNDISSWTKGRSGEALSLLKKRFSHRPVQEKFVCLNCGFETHADEQAALNIARSWLFLRSQEYKKYQTNKTTGNTDKRAFVETWQSFYRKKLKEVWKPAV

SEQ ID NO: 425 - protein, 979 aa, synthetic construct
  REGION 1..979: note = CasX variant
QEIKRINKIRRRLVKDSNTKKAGKTGPMKTLLVRVMTPDLRERLENLRKKPENIPQPISNTSRANLNKLLTDYTEMKKAILHVYWEEFQKDPVGLMSRVAQPASKKIDQNKLKPEMDEKGNLTTAGFACSQCGQPLFVYKLEQVSEKGKAYTNYFGRCNVAEHEKLILLAQLKPEKDSDEAVTYSLGKFGQRALDFYSIHVTKESTHPVKPLAQIAGNRYASGPVGKALSDACMGTIASFLSKYQDIIIEHQKVVKGNQKRLESLRELAGKENLEYPSVTLPPQPHTKEGVDAYNEVIARVRMWVNLNLWQKLKLSRDDAKPLLRLKGFPSFPLVERQANEVDWWDMVCNVKKLINEKKEDGKVFWQNLAGYKRQEALRPYLSSEEDRKKGKKFARYQLGDLLLHLEKKHGEDWGKVYDEAWERIDKKVEGLSKHIKLEEERRSEDAQSKAALTDWLRAKASFVIEGLKEADKDEFCRCELKLQKWYGDLRGKPFAIEAENSILDISGFSKQYNCAFIWQKDGVKKLNLYLIINYFKGGKLRFKKIKPEAFEANRFYTVINKKSGEIVPMEVNFNFDDPNLIILPLAFGKRQGREFIWNDLLSLETGSLKLANGRVIEKTLYNRRTRQDEPALFVALTFERREVLDSSNIKPMNLIGVDRGENIPAVIALTDPEGCPLSRFKDSLGNPTHILRIGESYKEKQRTIQAKKEVEQRRAGGYSRKYASKAKNLADDMVRNTARDLLYYAVTQDAMLIFENLSRGFGRQGKRTFMAERQYTRMEDWPLTAKLAYEGLPSKTYLSKTLAQYTSKTCSNCGFTITSADYDRVLEKLKKTATGWMTTINGKELKVEGQITYYNRYKRQNVVKDLSVELDRLSEESVNNDISSWTKGRSGEALSLLKKRFSHRPVQEKFVCLNCGFETHADEQAALNIARSWLFLRSQEYKKYQTNKTTGNTDKRAFVETWQSFYRKKLKEVWKPAV

SEQ ID NO: 426 - protein, 979 aa, synthetic construct
  REGION 1..979: note = CasX variant
QEIKRINKIRRRLVKDSNTKKAGKTGPMKTLLVRVMTPDLRERLENLRKKPENIPQPISNTSRANLNKLLTDYTEMKKAILHVYWEEFQKDPVGLMSRVAQPASKKIDQNKLKPEMDEKGNLTTAGFACSQCGQPLFVYKLEQVSEKGKAYTNYFGRCNVAEHEKLILLAQLKPEKDSDEAVTYSLGKFGQRALDFYSIHVTKESTHPVKPLAQIAGNRYASGPVGKALSDACMGTIASFLSKYQDIIIEHQKVVKGNQKRLESLRELAGKENLEYPSVTLPPQPHTKEGVDAYNEVIARVRMWVNLNLWQKLKLSRDDAKPLLRLKGFPSFPLVERQANEVDWWDMVCNVKKLINEKKEDGKVFWQNLAGYKRQEALRPYLSSEEDRKKGKKFARYQLGDLLLHLEKKHGEDWGKVYDEAWERIDKKVEGLSKHIKLEEERRSEDAQSKAALTDWLRAKASFVIEGLKEADKDEFCRCELKLQKWYGDLRGKPFAIEAENSILDISGFSKQYNCAFIWQKDGVKKLNLYLIINYFKGGKLRFKKIKPEAFEANRFYTVINKKSGEIVPMEVNFNFDDPNLIILPLAFGKRQGREFIWNDLLSLETGSLKLANGRVIEKTLYNRRTRQDEPALFVALTFERREVLDSSNIKPMNLIGVDRGENIPAVIALTDPEGCPLSRFKDSLGNPTHILRIGESYKEKQRTIQAKKEVEQRRAGGYSRKYASKAKNLADDMVRNTARDLLYYAVTQDAMLIFENLSRGFGRQGKRTFMAERQYTRMEDWLTAKLAYEGLPSKTYLSKTLAQYTSKTCMSNCGFTITSADYDRVLEKLKKTATGWMTTINGKELKVEGQITYYNRYKRQNVVKDLSVELDRLSEESVNNDISSWTKGRSGEALSLLKKRFSHRPVQEKFVCLNCGFETHADEQAALNIARSWLFLRSQEYKKYQTNKTTGNTDKRAFVETWQSFYRKKLKEVWKPAV

SEQ ID NO: 427 - protein, 979 aa, synthetic construct
  REGION 1..979: note = CasX variant
QEIKRINKIRRRLVKDSNTKKAGKTGPMKTLLVRVMTPDLRERLENLRKKPENIPQPISNTSRANLNKLLTDYTEMKKAILHVYWEEFQKDPVGLMSRVAQPASKKIDQNKLKPEMDEKGNLTTAGFACSQCGQPLFVYKLEQVSEKGKAYTNYFGRCNVAEHEKLILLAQLKPEKDSDEAVTYSLGKFGQRALDFYSIHVTKESTHPVKPLAQIAGNRYASGPVGKALSDACMGTIASFLSKYQDIIIEHQKVVKGNQKRLESLRELAGKENLEYPSVTLPPQPHTKEGVDAYNEVIARVRMWVNLNLWQKLKLSRDDAKPLLRLKGFPSFPLVERQANEVDWWDMVCNVKKLINEKKEDGKVFWQNLAGYKRQEALRPYLSSEEDRKKGKKFARYQLGDLLLHLEKKHGEDWGKVYDEAWERIDKKVEGLSKHIKLEEERRSEDAQSKAALTDWLRAKASFVIEGLKEADKDEFCRCELKLQKWYGDLRGKPFAIEAENSILDISGFSKQYNCAFIWQKDGVKKLNLYLIINYFKGGKLRFKKIKPEAFEANRFYTVINKKSGEIVPMEVNFNFDDPNLIILPLAFGKRQGREFIWNDLLSLETGSLKLANGRVIEKTLYNRRTRQDEPALFVALTFERREVLDSSNIKPMNLIGVDRGENIPAVIALTDPEGCPLSRFKDSLGNPTHILRIGESYKEKQRTIQAKKEVEQRRAGGYSRKYASKAKNLADDMVRNTARDLLYYAVTQDAMLIFENLSRGFGRQGKRTFMAERQYTRMEDWLTAKLARYEGLPSKTYLSKTLAQYTSKTCSNCGFTITSADYDRVLEKLKKTATGWMTTINGKELKVEGQITYYNRYKRQNVVKDLSVELDRLSEESVNNDISSWTKGRSGEALSLLKKRFSHRPVQEKFVCLNCGFETHADEQAALNIARSWLFLRSQEYKKYQTNKTTGNTDKRAFVETWQSFYRKKLKEVWKPAV

SEQ ID NO: 428 - protein, 978 aa, synthetic construct
  REGION 1..978: note = CasX variant
QEIKRINKIRRRLVKDSNTKKAGKTGPMKTLLVRVMTPDLRERLENLRKKPENIPQPISNTSRANLNKLLTDYTEMKKAILHVYWEEFQKDPVGLMSRVAQPASKKIDQNKLKPEMDEKGNLTTAGFACSQCGQPLFVYKLEQVSEKGKAYTNYFGRCNVAEHEKLILLAQLKPEKDSDEAVTYSLGKFGQRALDFYSIHVTKESTHPVKPLAQIAGNRYASGPVGKALSDACMGTIASFLSKYQDIIIEHQKVVKGNQKRLESLRELAGKENLEYPSVTLPPQPHTKEGVDAYNEVIARVRMWVNLNLWQKLKLSRDDAKPLLRLKGFPSFPLVERQANEVDWWDMVCNVKKLINEKKEDGKVFWQNLAGYKRQEALRPYLSSEEDRKKGKKFARYQLGDLLLHLEKKHGEDWGKVYDEAWERIDKKVEGLSKHIKLEEERRSEDAQSKAALTDWLRAKASFVIEGLKEADKDEFCRCELKLQKWYGDLRGKPFAIEAENSILDISGFSKQYNCAFIWQKDGVKKLNLYLIINYFKGGKLRFKKIKPEAFEANRFYTVINKKSGEIVPMEVNFNFDDPNLIILPLAFGKRQGREFIWNDLLSLETGSLKLANGRVIEKTLYNRRTRQDEPALFVALTFERREVLDSSNIKPMNLIGVDRGENIPAVIALTDPEGCPLSRFKDSLGNPTHILRIGESYKEKQRTIQAKKEVEQRRAGGYSRKYASKAKNLADDMVRNTARDLLYYAVTQDAMLIFENLSRGFGRQGKRTFMAERQYTRMEDWLTAKLAYEGLPSKTYLSKTLAQYFSKTCSNCGFTITSADYDRVLEKLKKTATGWMTTINGKELKVEGQITYYNRYKRQNVVKDLSVELDRLSEESVNNDISSWTKGRSGEALSLLKKRFSHRPVQEKFVCLNCGFETHADEQAALNIARSWLFLRSQEYKKYQTNKTTGNTDKRAFVETWQSFYRKKLKEVWKPAV

SEQ ID NO: 429 - protein, 977 aa, synthetic construct
  REGION 1..977: note = CasX variant
QEIKRINKIRRRLVKDSNTKKAGKTGPMKTLLVRVMTPDLRERLENLRKKPENIPQPISNTSRANLNKLLTDYTEMKKAILHVYWEEFQKDPVGLMSRVAQPASKKIDQNKLKPEMDEKGNLTTAGFACSQCGQPLFVYKLEQVSEKGKAYTNYFGRCNVAEHEKLILLAQLKPEKDSDEAVTYSLGKFGQRALDFYSIHVTKESTHPVKPLAQIAGNRYASGPVGKALSDACMGTIASFLSKYQDIIIEHQKVVKGNQKRLESLRELAGKENLEYPSVTLPPQPHTKEGVDAYNEVIARVRMWVNLNLWQKLKLSRDDAKPLLRLKGFPSFPLVERQANEVDWWDMVCNVKKLINEKKEDGKVFWQNLAGYKRQEALRPYLSSEEDRKKGKKFARYQLGDLLLHLEKKHGEDWGKVYDEAWERIDKKVEGLSKHIKLEEERRSEDAQSKAALTDWLRAKASFVIEGLKEADKDEFCRCELKLQKWYGDLRGKPFAIEAENSILDISGFSKQYNCAFIWQKDGVKKLNLYLIINYFKGGKLRFKKIKPEAFEANRFYTVINKKSGEIVPMEVNFNFDDPNLIILPLAFGKRQGREFIWNDLLSLETGSLKLANGRVIEKTLYNRRTRQDEPALFVALTFERREVLDSSNIKPMNLIGVDRGENIPAVIALTDPEGCPLSRFKDSLGNPTHILRIGESYKEKQRTIQAKKEVEQRRAGGYSRKYASKAKNLADDMVRNTARDLLYYAVTQDAMLIFENLSRGFGRQGKRTFMAERQYTRMEDWLTAKAYEGLPSKTYLSKTLAQYTSKTCSNCGFTITSADYDRVLEKLKKTATGWMTTINGKELKVEGQITYYNRYKRQNVVKDLSVELDRLSEESVNNDISSWTKGRSGEALSLLKKRFSHRPVQEKFVCLNCGFETHADEQAALNIARSWLFLRSQEYKKYQTNKTTGNTDKRAFVETWQSFYRKKLKEVWKPAV

SEQ ID NO: 430 - protein, 978 aa, synthetic construct
  REGION 1..978: note = CasX variant
QEIKRINKIRRRLVKDSNTKKAGKTGPMKTLLVRVMTPDLRERLENLRKKPENIPQPISNTSRANLNKLLTDYTEMKKAILHVYWEEFQKDPVGLMSRVAQPASKKIDQNKLKPEMDEKGNLTTAGFACSQCGQPLFVYKLEQVSEKGKAYTNYFGRCNVAEHEKLILLAQLKPEKDSDEAVTYSLGKFGQRALDFYSIHVTKESTHPVKPLAQIAGNRYASGPVGKALSDACMGTIASFLSKYQDIIIEHQKVVKGNQKRLESLRELAGKENLEYPSVTLPPQPHTKEGVDAYNEVIARVRMWVNLNLWQKLKLSRDDAKPLLRLKGFPSFPLVERQANEVDWWDMVCNVKKLINEKKEDGKVFWQNLAGYKRQEALRPYLSSEEDRKKGKKFARYQLGDLLLHLEKKHGEDWGKVYDEAWERIDKKVEGLSKHIKLEEERRSEDAQSKAALTDWLRAKASFVIEGLKEADKDEFCRCELKLQKWYGDLRGKPFAIEAENSILDISGFSKQYNCAFIWQKDGVKKLNLYLIINYFKGGKLRFKKIKPEAFEANRFYTVINKKSGEIVPMEVNFNFDDPNLIILPLAFGKRQGREFIWNDLLSLETGSLKLANGRVIEKTLYNRRTRQDEPALFVALTFERREVLDSSNIKPMNLIGVDRGENIPAVIALTDPEGCPLSRFKDSLGNPTHILRIGESYKEKQRTIQAKKEVEQRRAGGYSRKYASKAKNLADDMVRNTARDLLYYAVTQDAMLIFENLSRGFGRQGKRTFMAERQYTRMEDWLTAKLAYEGLPSQTYLSKTLAQYTSKTCSNCGFTITSADYDRVLEKLKKTATGWMTTINGKELKVEGQITYYNRYKRQNVVKDLSVELDRLSEESVNNDISSWTKGRSGEALSLLKKRFSHRPVQEKFVCLNCGFETHADEQAALNIARSWLFLRSQEYKKYQTNKTTGNTDKRAFVETWQSFYRKKLKEVWKPAV

SEQ ID NO: 431 - protein, 978 aa, synthetic construct
  REGION 1..978: note = CasX variant
QEIKRINKIRRRLVKDSNTKKAGKTGPMKTLLVRVMTPDLRERLENLRKKPENIPQPISNTSRANLNKLLTDYTEMKKAILHVYWEEFQKDPVGLMSRVAQPASKKIDQNKLKPEMDEKGNLTTAGFACSQCGQPLFVYKLEQVSEKGKAYTNYFGRCNVAEHEKLILLAQLKPEKDSDEAVTYSLGKFGQRALDFYSIHVTKESTHPVKPLAQIAGNRYASGPVGKALSDACMGTIASFLSKYQDIIIEHQKVVKGNQKRLESLRELAGKENLEYPSVTLPPQPHTKEGVDAYNEVIARVRMWVNLNLWQKLKLSRDDAKPLLRLKGFPSFPLVERQANEVDWWDMVCNVKKLINEKKEDGKVFWQNLAGYKRQEALRPYLSSEEDRKKGKKFARYQLGDLLLHLEKKHGEDWGKVYDEAWERIDKKVEGLSKHIKLEEERRSEDAQSKAALTDWLRAKASFVIEGLKEADKDEFCRCELKLQKWYGDLRGKPFAIEAENSILDISGFSKQYNCAFIWQKDGVKKLNLYLIINYFKGGKLRFKKIKPEAFEANRFYTVINKKSGEIVPMEVNFNFDDPNLIILPLAFGKRQGREFIWNDLLSLETGSLKLANGRVIEKTLYNRRTRQDEPALFVALTFERREVLDSSNIKPMNLIGVDRGENIPAVIALTDPEGCPLSRFKDSLGNPTHILRIGESYKEKQRTIQAKKEVEQRRAGGYSRKYASKAKNLADDMVRNTARDLLYYAVTQDAMLIFENLSRGFGRQGKRTFMAERQYTRMEDWLTAKLAYNGLPSKTYLSKTLAQYTSKTCSNCGFTITSADYDRVLEKLKKTATGWMTTINGKELKVEGQITYYNRYKRQNVVKDLSVELDRLSEESVNNDISSWTKGRSGEALSLLKKRFSHRPVQEKFVCLNCGFETHADEQAALNIARSWLFLRSQEYKKYQTNKTTGNTDKRAFVETWQSFYRKKLKEVWKPAV

SEQ ID NO: 432 - protein, 979 aa, synthetic construct
  REGION 1..979: note = CasX variant
QEIKRINKIRRRLVKDSNTKKAGKTGPMKTLLVRVMTPDLRERLENLRKKPENIPQPISNTSRANLNKLLTDYTEMKKAILHVYWEEFQKDPVGLMSRVAQPASKKIDQNKLKPEMDEKGNLTTAGFACSQCGQPLFVYKLEQVSEKGKAYTNYFGRCNVAEHEKLILLAQLKPEKDSDEAVTYSLGKFGQRALDFYSIHVTKESTHPVKPLAQIAGNRYASGPVGKALSDACMGTIASFLSKYQDIIIEHQKVVKGNQKRLESLRELAGKENLEYPSVTLPPQPHTKEGVDAYNEVIARVRMWVNLNLWQKLKLSRDDAKPLLRLKGFPSFPLVERQANEVDWWDMVCNVKKLINEKKEDGKVFWQNLAGYKRQEALRPYLSSEEDRKKGKKFARYQLGDLLLHLEKKHGEDWGKVYDEAWERIDKKVEGLSKHIKLEEERRSEDAQSKAALTDWLRAKASFVIEGLKEADKDEFCRCELKLQKWYGDLRGKPFAIEAENSILDISGFSKQYNCAFIWQKDGVKKLNLYLIINYFKGGKLRFKKIKPEAFEANRFYTVINKKSGEIVPMEVNFNFDDPNLIILPLAFGKRQGREFIWNDLLSLETGSLKLANGRVIEKTLYNRRTRQDEPALFVALTFERREVLDSSNIKPMNLIGVDRGENIPAVIALTDPEGCPLSRFKDSLGNPTHILRIGESYKEKQRTIQAKKEVEQRRAGGYSRKYASKAKNLADDMVRNTARDLLYYAVTQDAMLIFENLSRGFGRQGKRTFMAERQYTRMEDWLTAKLAYEGLPSKTYLHSKTLAQYTSKTCSNCGFTITSADYDRVLEKLKKTATGWMTTINGKELKVEGQITYYNRYKRQNVVKDLSVELDRLSEESVNNDISSWTKGRSGEALSLLKKRFSHRPVQEKFVCLNCGFETHADEQAALNIARSWLFLRSQEYKKYQTNKTTGNTDKRAFVETWQSFYRKKLKEVWKPAV

SEQ ID NO: 433 - protein, 978 aa, synthetic construct
  REGION 1..978: note = CasX variant
QEIKRINKIRRRLVKDSNTKKAGKTGPMKTLLVRVMTPDLRERLENLRKKPENIPQPISNTSRANLNKLLTDYTEMKKAILHVYWEEFQKDPVGLMSRVAQPASKKIDQNKLKPEMDEKGNLTTAGFACSQCGQPLFVYKLEQVSEKGKAYTNYFGRCNVAEHEKLILLAQLKPEKDSDEAVTYSLGKFGQRALDFYSIHVTKESTHPVKPLAQIAGNRYASGPVGKALSDACMGTIASFLSKYQDIIIEHQKVVKGNQKRLESLRELAGKENLEYPSVTLPPQPHTKEGVDAYNEVIARVRMWVNLNLWQKLKLSRDDAKPLLRLKGFPSFPLVERQANEVDWWDMVCNVKKLINEKKEDGKVFWQNLAGYKRQEALRPYLSSEEDRKKGKKFARYQLGDLLLHLEKKHGEDWGKVYDEAWERIDKKVEGLSKHIKLEEERRSEDAQSKAALTDWLRAKASFVIEGLKEADKDEFCRCELKLQKWYGDLRGKPFAIEAENSILDISGFSKQYNCAFIWQKDGVKKLNLYLIINYFKGGKLRFKKIKPEAFEANRFYTVINKKSGEIVPMEVNFNFDDPNLIILPLAFGKRQGREFIWNDLLSLETGSLKLANGRVIEKTLYNRRTRQDEPALFVALTFERREVLDSSNIKPMNLIGVDRGENIPAVIALTDPEGCPLSRFKDSLGNPTHILRIGESYKEKQRTIQAKKEVEQRRAGGYSRKYASKAKNLADDMVRNTARDLLYYAVTQDAMLIFENLSRGFGRQGKRTFMAERQYTRMEDWLTAKLAYEGLPSKVYLSKTLAQYTSKTCSNCGFTITSADYDRVLEKLKKTATGWMTTINGKELKVEGQITYYNRYKRQNVVKDLSVELDRLSEESVNNDISSWTKGRSGEALSLLKKRFSHRPVQEKFVCLNCGFETHADEQAALNIARSWLFLRSQEYKKYQTNKTTGNTDKRAFVETWQSFYRKKLKEVWKPAV

SEQ ID NO: 434 - protein, 979 aa, synthetic construct
  REGION 1..979: note = CasX variant
QEIKRINKIRRRLVKDSNTKKAGKTGPMKTLLVRVMTPDLRERLENLRKKPENIPQPISNTSRANLNKLLTDYTEMKKAILHVYWEEFQKDPVGLMSRVAQPASKKIDQNKLKPEMDEKGNLTTAGFACSQCGQPLFVYKLEQVSEKGKAYTNYFGRCNVAEHEKLILLAQLKPEKDSDEAVTYSLGKFGQRALDFYSIHVTKESTHPVKPLAQIAGNRYASGPVGKALSDACMGTIASFLSKYQDIIIEHQKVVKGNQKRLESLRELAGKENLEYPSVTLPPQPHTKEGVDAYNEVIARVRMWVNLNLWQKLKLSRDDAKPLLRLKGFPSFPLVERQANEVDWWDMVCNVKKLINEKKEDGKVFWQNLAGYKRQEALRPYLSSEEDRKKGKKFARYQLGDLLLHLEKKHGEDWGKVYDEAWERIDKKVEGLSKHIKLEEERRSEDAQSKAALTDWLRAKASFVIEGLKEADKDEFCRCELKLQKWYGDLRGKPFAIEAENSILDISGFSKQYNCAFIWQKDGVKKLNLYLIINYFKGGKLRFKKIKPEAFEANRFYTVINKKSGEIVPMEVNFNFDDPNLIILPLAFGKRQGREFIWNDLLSLETGSLKLANGRVIEKTLYNRRTRQDEPALFVALTFERREVLDSSNIKPMNLIGVDRGENIPAVIALTDPEGCPLSRFKDSLGNPTHILRIGESYKEKQRTIQAKKEVEQRRAGGYSRKYASKAKNLADDMVRNTARDLLYYAVTQDAMLIFENLSRGFGRQGKRTFMAERQYTRMEDWLTAKLQAYEGLPSKTYLSKTLAQYTSKTCSNCGFTITSADYDRVLEKLKKTATGWMTTINGKELKVEGQITYYNRYKRQNVVKDLSVELDRLSEESVNNDISSWTKGRSGEALSLLKKRFSHRPVQEKFVCLNCGFETHADEQAALNIARSWLFLRSQEYKKYQTNKTTGNTDKRAFVETWQSFYRKKLKEVWKPAV

SEQ ID NO: 435 - protein, 979 aa, synthetic construct
  REGION 1..979: note = CasX variant
QEIKRINKIRRRLVKDSNTKKAGKTGPMKTLLVRVMTPDLRERLENLRKKPENIPQPISNTSRANLNKLLTDYTEMKKAILHVYWEEFQKDPVGLMSRVAQPASKKIDQNKLKPEMDEKGNLTTAGFACSQCGQPLFVYKLEQVSEKGKAYTNYFGRCNVAEHEKLILLAQLKPEKDSDEAVTYSLGKFGQRALDFYSIHVTKESTHPVKPLAQIAGNRYASGPVGKALSDACMGTIASFLSKYQDIIIEHQKVVKGNQKRLESLRELAGKENLEYPSVTLPPQPHTKEGVDAYNEVIARVRMWVNLNLWQKLKLSRDDAKPLLRLKGFPSFPLVERQANEVDWWDMVCNVKKLINEKKEDGKVFWQNLAGYKRQEALRPYLSSEEDRKKGKKFARYQLGDLLLHLEKKHGEDWGKVYDEAWERIDKKVEGLSKHIKLEEERRSEDAQSKAALTDWLRAKASFVIEGLKEADKDEFCRCELKLQKWYGDLRGKPFAIEAENSILDISGFSKQYNCAFIWQKDGVKKLNLYLIINYFKGGKLRFKKIKPEAFEANRFYTVINKKSGEIVPMEVNFNFDDPNLIILPLAFGKRQGREFIWNDLLSLETGSLKLANGRVIEKTLYNRRTRQDEPALFVALTFERREVLDSSNIKPMNLIGVDRGENIPAVIALTDPEGCPLSRFKDSLGNPTHILRIGESYKEKQRTIQAKKEVEQRRAGGYSRKYASKAKNLADDMVRNTARDLLYYAVTQDAMLIFENLSRGFGRQGKRTFMAERQYTRMEDWLTAKLAYEGPLPSKTYLSKTLAQYTSKTCSNCGFTITSADYDRVLEKLKKTATGWMTTINGKELKVEGQITYYNRYKRQNVVKDLSVELDRLSEESVNNDISSWTKGRSGEALSLLKKRFSHRPVQEKFVCLNCGFETHADEQAALNIARSWLFLRSQEYKKYQTNKTTGNTDKRAFVETWQSFYRKKLKEVWKPAV

SEQ ID NO: 436 - protein, 979 aa, synthetic construct
  REGION 1..979: note = CasX variant
QEIKRINKIRRRLVKDSNTKKAGKTGPMKTLLVRVMTPDLRERLENLRKKPENIPQPISNTSRANLNKLLTDYTEMKKAILHVYWEEFQKDPVGLMSRVAQPASKKIDQNKLKPEMDEKGNLTTAGFACSQCGQPLFVYKLEQVSEKGKAYTNYFGRCNVAEHEKLILLAQLKPEKDSDEAVTYSLGKFGQRALDFYSIHVTKESTHPVKPLAQIAGNRYASGPVGKALSDACMGTIASFLSKYQDIIIEHQKVVKGNQKRLESLRELAGKENLEYPSVTLPPQPHTKEGVDAYNEVIARVRMWVNLNLWQKLKLSRDDAKPLLRLKGFPSFPLVERQANEVDWWDMVCNVKKLINEKKEDGKVFWQNLAGYKRQEALRPYLSSEEDRKKGKKFARYQLGDLLLHLEKKHGEDWGKVYDEAWERIDKKVEGLSKHIKLEEERRSEDAQSKAALTDWLRAKASFVIEGLKEADKDEFCRCELKLQKWYGDLRGKPFAIEAENSILDISGFSKQYNCAFIWQKDGVKKLNLYLIINYFKGGKLRFKKIKPEAFEANRFYTVINKKSGEIVPMEVNFNFDDPNLIILPLAFGKRQGREFIWNDLLSLETGSLKLANGRVIEKTLYNRRTRQDEPALFVALTFERREVLDSSNIKPMNLIGVDRGENIPAVIALTDPEGCPLSRFKDSLGNPTHILRIGESYKEKQRTIQAKKEVEQRRAGGYSRKYASKAKNLADDMVRNTARDLLYYAVTQDAMLIFENLSRGFGRQGKRTFMAERQYTRMEDWLTAKLAYEGLPSKTYLSKRTLAQYTSKTCSNCGFTITSADYDRVLEKLKKTATGWMTTINGKELKVEGQITYYNRYKRQNVVKDLSVELDRLSEESVNNDISSWTKGRSGEALSLLKKRFSHRPVQEKFVCLNCGFETHADEQAALNIARSWLFLRSQEYKKYQTNKTTGNTDKRAFVETWQSFYRKKLKEVWKPAV

SEQ ID NO: 437 - protein, 979 aa, synthetic construct
  REGION 1..979: note = CasX variant
QEIKRINKIRRRLVKDSNTKKAGKTGPMKTLLVRVMTPDLRERLENLRKKPENIPQPISNTSRANLNKLLTDYTEMKKAILHVYWEEFQKDPVGLMSRVAQPASKKIDQNKLKPEMDEKGNLTTAGFACSQCGQPLFVYKLEQVSEKGKAYTNYFGRCNVAEHEKLILLAQLKPEKDSDEAVTYSLGKFGQRALDFYSIHVTKESTHPVKPLAQIAGNRYASGPVGKALSDACMGTIASFLSKYQDIIIEHQKVVKGNQKRLESLRELAGKENLEYPSVTLPPQPHTKEGVDAYNEVIARVRMWVNLNLWQKLKLSRDDAKPLLRLKGFPSFPLVERQANEVDWWDMVCNVKKLINEKKEDGKVFWQNLAGYKRQEALRPYLSSEEDRKKGKKFARYQLGDLLLHLEKKHGEDWGKVYDEAWERIDKKVEGLSKHIKLEEERRSEDAQSKAALTDWLRAKASFVIEGLKEADKDEFCRCELKLQKWYGDLRGKPFAIEAENSILDISGFSKQYNCAFIWQKDGVKKLNLYLIINYFKGGKLRFKKIKPEAFEANRFYTVINKKSGEIVPMEVNFNFDDPNLIILPLAFGKRQGREFIWNDLLSLETGSLKLANGRVIEKTLYNRRTRQDEPALFVALTFERREVLDSSNIKPMNLIGVDRGENIPAVIALTDPEGCPLSRFKDSLGNPTHILRIGESYKEKQRTIQAKKEVEQRRAGGYSRKYASKAKNLADDMVRNTARDLLYYAVTQDAMLIFENLSRGFGRQGKRTFMAERQYTRMEDWLTAKLAYEGLPSKTYLSKTLAQYTSKTCSNCWGFTITSADYDRVLEKLKKTATGWMTTINGKELKVEGQITYYNRYKRQNVVKDLSVELDRLSEESVNNDISSWTKGRSGEALSLLKKRFSHRPVQEKFVCLNCGFETHADEQAALNIARSWLFLRSQEYKKYQTNKTTGNTDKRAFVETWQSFYRKKLKEVWKPAV

SEQ ID NO: 438 - protein, 979 aa, synthetic construct
  REGION 1..979: note = CasX variant
QEIKRINKIRRRLVKDSNTKKAGKTGPMKTLLVRVMTPDLRERLENLRKKPENIPQPISNTSRANLNKLLTDYTEMKKAILHVYWEEFQKDPVGLMSRVAQPASKKIDQNKLKPEMDEKGNLTTAGFACSQCGQPLFVYKLEQVSEKGKAYTNYFGRCNVAEHEKLILLAQLKPEKDSDEAVTYSLGKFGQRALDFYSIHVTKESTHPVKPLAQIAGNRYASGPVGKALSDACMGTIASFLSKYQDIIIEHQKVVKGNQKRLESLRELAGKENLEYPSVTLPPQPHTKEGVDAYNEVIARVRMWVNLNLWQKLKLSRDDAKPLLRLKGFPSFPLVERQANEVDWWDMVCNVKKLINEKKEDGKVFWQNLAGYKRQEALRPYLSSEEDRKKGKKFARYQLGDLLLHLEKKHGEDWGKVYDEAWERIDKKVEGLSKHIKLEEERRSEDAQSKAALTDWLRAKASFVIEGLKEADKDEFCRCELKLQKWYGDLRGKPFAIEAENSILDISGFSKQYNCAFIWQKDGVKKLNLYLIINYFKGGKLRFKKIKPEAFEANRFYTVINKKSGEIVPMEVNFNFDDPNLIILPLAFGKRQGREFIWNDLLSLETGSLKLANGRVIEKTLYNRRTRQDEPALFVALTFERREVLDSSNIKPMNLIGVDRGENIPAVIALTDPEGCPLSRFKDSLGNPTHILRIGESYKEKQRTIQAKKEVEQRRAGGYSRKYASKAKNLADDMVRNTARDLLYYAVTQDAMLIFENLSRGFGRQGKRTFMAERQYTRMEDWLTAKLANYEGLPSKTYLSKTLAQYTSKTCSNCGFTITSADYDRVLEKLKKTATGWMTTINGKELKVEGQITYYNRYKRQNVVKDLSVELDRLSEESVNNDISSWTKGRSGEALSLLKKRFSHRPVQEKFVCLNCGFETHADEQAALNIARSWLFLRSQEYKKYQTNKTTGNTDKRAFVETWQSFYRKKLKEVWKPAV

SEQ ID NO: 439 - protein, 978 aa, synthetic construct
  REGION 1..978: note = CasX variant
QEIKRINKIRRRLVKDSNTKKAGKTGPMKTLLVRVMTPDLRERLENLRKKPENIPQPISNTSRANLNKLLTDYTEMKKAILHVYWEEFQKDPVGLMSRVAQPASKKIDQNKLKPEMDEKGNLTTAGFACSQCGQPLFVYKLEQVSEKGKAYTNYFGRCNVAEHEKLILLAQLKPEKDSDEAVTYSLGKFGQRALDFYSIHVTKESTHPVKPLAQIAGNRYASGPVGKALSDACMGTIASFLSKYQDIIIEHQKVVKGNQKRLESLRELAGKENLEYPSVTLPPQPHTKEGVDAYNEVIARVRMWVNLNLWQKLKLSRDDAKPLLRLKGFPSFPLVERQANEVDWWDMVCNVKKLINEKKEDGKVFWQNLAGYKRQEALRPYLSSEEDRKKGKKFARYQLGDLLLHLEKKHGEDWGKVYDEAWERIDKKVEGLSKHIKLEEERRSEDAQSKAALTDWLRAKASFVIEGLKEADKDEFCRCELKLQKWYGDLRGKPFAIEAENSILDISGFSKQYNCAFIWQKDGVKKLNLYLIINYFKGGKLRFKKIKPEAFEANRFYTVINKKSGEIVPMEVNFNFDDPNLIILPLAFGKRQGREFIWNDLLSLETGSLKLANGRVIEKTLYNRRTRQDEPALFVALTFERREVLDSSNIKPMNLIGVDRGENIPAVIALTDPEGCPLSRFKDSLGNPTHILRIGESYKEKQRTIQAKKEVEQRRAGGYSRKYASKAKNLADDMVRNTARDLLYYAVTQDAMLIFENLSRGFGRQGKRTFMAERQYTRMEDWLTAKLAYEGLPSKTYLSKTLAQYTSKTCSNSGFTITSADYDRVLEKLKKTATGWMTTINGKELKVEGQITYYNRYKRQNVVKDLSVELDRLSEESVNNDISSWTKGRSGEALSLLKKRFSHRPVQEKFVCLNCGFETHADEQAALNIARSWLFLRSQEYKKYQTNKTTGNTDKRAFVETWQSFYRKKLKEVWKPAV

SEQ ID NO: 440 - protein, 978 aa, synthetic construct
  REGION 1..978: note = CasX variant
QEIKRINKIRRRLVKDSNTKKAGKTGPMKTLLVRVMTPDLRERLENLRKKPENIPQPISNTSRANLNKLLTDYTEMKKAILHVYWEEFQKDPVGLMSRVAQPASKKIDQNKLKPEMDEKGNLTTAGFACSQCGQPLFVYKLEQVSEKGKAYTNYFGRCNVAEHEKLILLAQLKPEKDSDEAVTYSLGKFGQRALDFYSIHVTKESTHPVKPLAQIAGNRYASGPVGKALSDACMGTIASFLSKYQDIIIEHQKVVKGNQKRLESLRELAGKENLEYPSVTLPPQPHTKEGVDAYNEVIARVRMWVNLNLWQKLKLSRDDAKPLLRLKGFPSFPLVERQANEVDWWDMVCNVKKLINEKKEDGKVFWQNLAGYKRQEALRPYLSSEEDRKKGKKFARYQLGDLLLHLEKKHGEDWGKVYDEAWERIDKKVEGLSKHIKLEEERRSEDAQSKAALTDWLRAKASFVIEGLKEADKDEFCRCELKLQKWYGDLRGKPFAIEAENSILDISGFSKQYNCAFIWQKDGVKKLNLYLIINYFKGGKLRFKKIKPEAFEANRFYTVINKKSGEIVPMEVNFNFDDPNLIILPLAFGKRQGREFIWNDLLSLETGSLKLANGRVIEKTLYNRRTRQDEPALFVALTFERREVLDSSNIKPMNLIGVDRGENIPAVIALTDPEGCPLSRFKDSLGNPTHILRIGESYKEKQRTIQAKKEVEQRRAGGYSRKYASKAKNLADDMVRNTARDLLYYAVTQDAMLIFENLSRGFGRQGKRTFMAERQYTRMEDWLTAKLAYEGLPSKTYLSKTLSQYTSKTCSNCGFTITSADYDRVLEKLKKTATGWMTTINGKELKVEGQITYYNRYKRQNVVKDLSVELDRLSEESVNNDISSWTKGRSGEALSLLKKRFSHRPVQEKFVCLNCGFETHADEQAALNIARSWLFLRSQEYKKYQTNKTTGNTDKRAFVETWQSFYRKKLKEVWKPAV

SEQ ID NO: 441 - protein, 979 aa, synthetic construct
  REGION 1..979: note = CasX variant
QEIKRINKIRRRLVKDSNTKKAGKTGPMKTLLVRVMTPDLRERLENLRKKPENIPQPISNTSRANLNKLLTDYTEMKKAILHVYWEEFQKDPVGLMSRVAQPASKKIDQNKLKPEMDEKGNLTTAGFACSQCGQPLFVYKLEQVSEKGKAYTNYFGRCNVAEHEKLILLAQLKPEKDSDEAVTYSLGKFGQRALDFYSIHVTKESTHPVKPLAQIAGNRYASGPVGKALSDACMGTIASFLSKYQDIIIEHQKVVKGNQKRLESLRELAGKENLEYPSVTLPPQPHTKEGVDAYNEVIARVRMWVNLNLWQKLKLSRDDAKPLLRLKGFPSFPLVERQANEVDWWDMVCNVKKLINEKKEDGKVFWQNLAGYKRQEALRPYLSSEEDRKKGKKFARYQLGDLLLHLEKKHGEDWGKVYDEAWERIDKKVEGLSKHIKLEEERRSEDAQSKAALTDWLRAKASFVIEGLKEADKDEFCRCELKLQKWYGDLRGKPFAIEAENSILDISGFSKQYNCAFIWQKDGVKKLNLYLIINYFKGGKLRFKKIKPEAFEANRFYTVINKKSGEIVPMEVNFNFDDPNLIILPLAFGKRQGREFIWNDLLSLETGSLKLANGRVIEKTLYNRRTRQDEPALFVALTFERREVLDSSNIKPMNLIGVDRGENIPAVIALTDPEGCPLSRFKDSLGNPTHILRIGESYKEKQRTIQAKKEVEQRRAGGYSRKYASKAKNLADDMVRNTARDLLYYAVTQDAMLIFENLSRGFGRQGKRTFMAERQYTRMEDWLTAKLAYEGLPSKTYRLSKTLAQYTSKTCSNCGFTITSADYDRVLEKLKKTATGWMTTINGKELKVEGQITYYNRYKRQNVVKDLSVELDRLSEESVNNDISSWTKGRSGEALSLLKKRFSHRPVQEKFVCLNCGFETHADEQAALNIARSWLFLRSQEYKKYQTNKTTGNTDKRAFVETWQSFYRKKLKEVWKPAV

SEQ ID NO: 442 - protein, 978 aa, synthetic construct
  REGION 1..978: note = CasX variant
QEIKRINKIRRRLVKDSNTKKAGKTGPMKTLLVRVMTPDLRERLENLRKKPENIPQPISNTSRANLNKLLTDYTEMKKAILHVYWEEFQKDPVGLMSRVAQPASKKIDQNKLKPEMDEKGNLTTAGFACSQCGQPLFVYKLEQVSEKGKAYTNYFGRCNVAEHEKLILLAQLKPEKDSDEAVTYSLGKFGQRALDFYSIHVTKESTHPVKPLAQIAGNRYASGPVGKALSDACMGTIASFLSKYQDIIIEHQKVVKGNQKRLESLRELAGKENLEYPSVTLPPQPHTKEGVDAYNEVIARVRMWVNLNLWQKLKLSRDDAKPLLRLKGFPSFPLVERQANEVDWWDMVCNVKKLINEKKEDGKVFWQNLAGYKRQEALRPYLSSEEDRKKGKKFARYQLGDLLLHLEKKHGEDWGKVYDEAWERIDKKVEGLSKHIKLEEERRSEDAQSKAALTDWLRAKASFVIEGLKEADKDEFCRCELKLQKWYGDLRGKPFAIEAENSILDISGFSKQYNCAFIWQKDGVKKLNLYLIINYFKGGKLRFKKIKPEAFEANRFYTVINKKSGEIVPMEVNFNFDDPNLIILPLAFGKRQGREFIWNDLLSLETGSLKLANGRVIEKTLYNRRTRQDEPALFVALTFERREVLDSSNIKPMNLIGVDRGENIPAVIALTDPEGCPLSRFKDSLGNPTHILRIGESYKEKQRTIQAKKEVEQRRAGGYSRKYASKAKNLADDMVRNTARDLLYYAVTQDAMLIFENLSRGFGRQGKRTFMAERQYTRMEDWLTAKRAYEGLPSKTYLSKTLAQYTSKTCSNCGFTITSADYDRVLEKLKKTATGWMTTINGKELKVEGQITYYNRYKRQNVVKDLSVELDRLSEESVNNDISSWTKGRSGEALSLLKKRFSHRPVQEKFVCLNCGFETHADEQAALNIARSWLFLRSQEYKKYQTNKTTGNTDKRAFVETWQSFYRKKLKEVWKPAV

SEQ ID NO: 443 - protein, 978 aa, synthetic construct
  REGION 1..978: note = CasX variant
QEIKRINKIRRRLVKDSNTKKAGKTGPMKTLLVRVMTPDLRERLENLRKKPENIPQPISNTSRANLNKLLTDYTEMKKAILHVYWEEFQKDPVGLMSRVAQPASKKIDQNKLKPEMDEKGNLTTAGFACSQCGQPLFVYKLEQVSEKGKAYTNYFGRCNVAEHEKLILLAQLKPEKDSDEAVTYSLGKFGQRALDFYSIHVTKESTHPVKPLAQIAGNRYASGPVGKALSDACMGTIASFLSKYQDIIIEHQKVVKGNQKRLESLRELAGKENLEYPSVTLPPQPHTKEGVDAYNEVIARVRMWVNLNLWQKLKLSRDDAKPLLRLKGFPSFPLVERQANEVDWWDMVCNVKKLINEKKEDGKVFWQNLAGYKRQEALRPYLSSEEDRKKGKKFARYQLGDLLLHLEKKHGEDWGKVYDEAWERIDKKVEGLSKHIKLEEERRSEDAQSKAALTDWLRAKASFVIEGLKEADKDEFCRCELKLQKWYGDLRGKPFAIEAENSILDISGFSKQYNCAFIWQKDGVKKLNLYLIINYFKGGKLRFKKIKPEAFEANRFYTVINKKSGEIVPMEVNFNFDDPNLIILPLAFGKRQGREFIWNDLLSLETGSLKLANGRVIEKTLYNRRTRQDEPALFVALTFERREVLDSSNIKPMNLIGVDRGENIPAVIALTDPEGCPLSRFKDSLGNPTHILRIGESYKEKQRTIQAKKEVEQRRAGGYSRKYASKAKNLADDMVRNTARDLLYYAVTQDAMLIFENLSRGFGRQGKRTFMAERQYTRMEDWLTAKDAYEGLPSKTYLSKTLAQYTSKTCSNCGFTITSADYDRVLEKLKKTATGWMTTINGKELKVEGQITYYNRYKRQNVVKDLSVELDRLSEESVNNDISSWTKGRSGEALSLLKKRFSHRPVQEKFVCLNCGFETHADEQAALNIARSWLFLRSQEYKKYQTNKTTGNTDKRAFVETWQSFYRKKLKEVWKPAV

SEQ ID NO: 444-449 - skipped (6 entries)

SEQ ID NO: 450 - protein, 978 aa, synthetic construct
  REGION 1..978: note = CasX variant
QEIKRINKIRRRLVKDSNTKKAGKTGPMKTLLVRVMTPDLRERLENLRKKPENIPQPISNTSRANLNKLLTDYTEMKKAILHVYWEEFQKDPVGLMSRVAQPASKKIDQNKLKPEMDEKGNLTTAGFACSQCGQPLFVYKLEQVSEKGKAYTNYFGRCNVAEHEKLIQLAQLKPEKDSDEAVTYSLGKFGQRALDFYSIHVTKESTHPVKPLAQIAGNRYASGPVGKALSDACMGTIASFLSKYQDIIIEHQKVVKGNQKRLESLRELAGKENLEYPSVTLPPQPHTKEGVDAYNEVIARVRMWVNLNLWQKLKLSRDDAKPLLRLKGFPSFPLVERQANEVDWWDMVCNVKKLINEKKEDGKVFWQNLAGYKRQEALRPYLSSEEDRKKGKKFARYQLGDLLLHLEKKHGEDWGKVYDEAWERIDKKVEGLSKHIKLEEERRSEDAQSKAALTDWLRAKASFVIEGLKEADKDEFCRCELKLQKWYGDLRGKPFAIEAENSILDISGFSKQYNCAFIWQKDGVKKLNLYLIINYFKGGKLRFKKIKPEAFEANRFYTVINKKSGEIVPMEVNFNFDDPNLIILPLAFGKRQGREFIWNDLLSLETGSLKLANGRVIEKTLYNRRTRQDEPALFVALTFERREVLDSSNIKPMNLIGVDRGENIPAVIALTDPEGCPLSRFKDSLGNPTHILRIGESYKEKQRTIQAKKEVEQRRAGGYSRKYASKAKNLADDMVRNTARDLLYYAVTQDAMLIFENLSRGFGRQGKRTFMAERQYTRMEDWLTAKLAYEGLPSKTYLSKTLAQYTSKTCSNCGFTITSADYDRVLEKLKKTATGWMTTINGKELKVEGQITYYNRYKRQNVVKDLSVELDRLSEESVNNDISSWTKGRSGEALSLLKKRFSHRPVQEKFVCLNCGFETHADEQAALNIARSWLFLRSQEYKKYQTNKTTGNTDKRAFVETWQSFYRKKLKEVWKPAV

SEQ ID NO: 451 - protein, 978 aa, synthetic construct
  REGION 1..978: note = CasX variant
QEIKRINKIRRRLVKDSNTKKAGKTGPMKTLLVRVMTPDLRERLENLRKKPENIPQPISNTSRANLNKLLTDYTEMKKAILHVYWEEFQKDPVGLMSRVAQPASKKIDQNKLKPEMDEKGNLTTAGFACSQCGQPLFVYKLEQVSEKGKAYTNYFGRCNVAEHEKLILLAQLKPEKDSDEAVTYSLGKFGQRALDFYSIHVTKESTHPVKPLAQIAGNRYMSGPVGKALSDACMGTIASFLSKYQDIIIEHQKVVKGNQKRLESLRELAGKENLEYPSVTLPPQPHTKEGVDAYNEVIARVRMWVNLNLWQKLKLSRDDAKPLLRLKGFPSFPLVERQANEVDWWDMVCNVKKLINEKKEDGKVFWQNLAGYKRQEALRPYLSSEEDRKKGKKFARYQLGDLLLHLEKKHGEDWGKVYDEAWERIDKKVEGLSKHIKLEEERRSEDAQSKAALTDWLRAKASFVIEGLKEADKDEFCRCELKLQKWYGDLRGKPFAIEAENSILDISGFSKQYNCAFIWQKDGVKKLNLYLIINYFKGGKLRFKKIKPEAFEANRFYTVINKKSGEIVPMEVNFNFDDPNLIILPLAFGKRQGREFIWNDLLSLETGSLKLANGRVIEKTLYNRRTRQDEPALFVALTFERREVLDSSNIKPMNLIGVDRGENIPAVIALTDPEGCPLSRFKDSLGNPTHILRIGESYKEKQRTIQAKKEVEQRRAGGYSRKYASKAKNLADDMVRNTARDLLYYAVTQDAMLIFENLSRGFGRQGKRTFMAERQYTRMEDWLTAKLAYEGLPSKTYLSKTLAQYTSKTCSNCGFTITSADYDRVLEKLKKTATGWMTTINGKELKVEGQITYYNRYKRQNVVKDLSVELDRLSEESVNNDISSWTKGRSGEALSLLKKRFSHRPVQEKFVCLNCGFETHADEQAALNIARSWLFLRSQEYKKYQTNKTTGNTDKRAFVETWQSFYRKKLKEVWKPAV

SEQ ID NO: 452 - protein, 978 aa, synthetic construct
  REGION 1..978: note = CasX variant
QEIKRINKIRRRLVKDSNTKKAGKTGPMKTLLVRVMTPDLRERLENLRKKPENIPQPISNTSRANLNKLLTDYTEMKKAILHVYWEEFQKDPVGLMSRVAQPASKKIDQNKLKPEMDEKGNLTTAGFACSQCGQPLFVYKLEQVSEKGKAYTNYFGRCNVAEHEKLILLAQLKPEKDSDEAVTYSLGKFGQRALDFYSIHVTKESTHPVKPLAQIAGNRYASGPVGKALSDACMGTIASFLSKYQDIIIEHQKVVKGNQKRLESLRELAGKENLEYPSVTLPPQPHTKEGVDAYNEVIARVRMWVNLNLWQKLKLSRDDAKPLLRLKGFPSFPLVERQANEVDWWDMVCNVKKLINEKKEDGKVFWQNLAIYKRQEALRPYLSSEEDRKKGKKFARYQLGDLLLHLEKKHGEDWGKVYDEAWERIDKKVEGLSKHIKLEEERRSEDAQSKAALTDWLRAKASFVIEGLKEADKDEFCRCELKLQKWYGDLRGKPFAIEAENSILDISGFSKQYNCAFIWQKDGVKKLNLYLIINYFKGGKLRFKKIKPEAFEANRFYTVINKKSGEIVPMEVNFNFDDPNLIILPLAFGKRQGREFIWNDLLSLETGSLKLANGRVIEKTLYNRRTRQDEPALFVALTFERREVLDSSNIKPMNLIGVDRGENIPAVIALTDPEGCPLSRFKDSLGNPTHILRIGESYKEKQRTIQAKKEVEQRRAGGYSRKYASKAKNLADDMVRNTARDLLYYAVTQDAMLIFENLSRGFGRQGKRTFMAERQYTRMEDWLTAKLAYEGLPSKTYLSKTLAQYTSKTCSNCGFTITSADYDRVLEKLKKTATGWMTTINGKELKVEGQITYYNRYKRQNVVKDLSVELDRLSEESVNNDISSWTKGRSGEALSLLKKRFSHRPVQEKFVCLNCGFETHADEQAALNIARSWLFLRSQEYKKYQTNKTTGNTDKRAFVETWQSFYRKKLKEVWKPAV

SEQ ID NO: 453 - protein, 979 aa, synthetic construct
  REGION 1..979: note = CasX variant
QEIKRINKIRRRLVKDSNTKKAGKTGPMKTLLVRVMTPDLRERLENLRKKPENIPQPISNTSRANLNKLLTDYTEMKKAILHVYWEEFQKDPVGLMSRVAQPASKKIDQNKLKPEMDEKGNLTTAGFACSQCGQPLFVYKLEQVSEKGKAYTNYFGRCNVAEHEKLILLAQLKPEKDSDEAVTYSLGKFGQRALDFYSIHVTKESTHPVKPLAQIAGNRYASGPVGKALSDACMGTIASFLSKYQDIIIEHQKVVKGNQKRLESLRELAGKENLEYPSVTLPPQPHTKEGVDAYNEVIARVRMWVNLNLWQKLKLSRDDAKPLLRLKGFPSFPLVERQANEVDWWDMVCNVKKLINEKKEDGKVFWQNLAGYKRQEALRPYLSSEEDVRKKGKKFARYQLGDLLLHLEKKHGEDWGKVYDEAWERIDKKVEGLSKHIKLEEERRSEDAQSKAALTDWLRAKASFVIEGLKEADKDEFCRCELKLQKWYGDLRGKPFAIEAENSILDISGFSKQYNCAFIWQKDGVKKLNLYLIINYFKGGKLRFKKIKPEAFEANRFYTVINKKSGEIVPMEVNFNFDDPNLIILPLAFGKRQGREFIWNDLLSLETGSLKLANGRVIEKTLYNRRTRQDEPALFVALTFERREVLDSSNIKPMNLIGVDRGENIPAVIALTDPEGCPLSRFKDSLGNPTHILRIGESYKEKQRTIQAKKEVEQRRAGGYSRKYASKAKNLADDMVRNTARDLLYYAVTQDAMLIFENLSRGFGRQGKRTFMAERQYTRMEDWLTAKLAYEGLPSKTYLSKTLAQYTSKTCSNCGFTITSADYDRVLEKLKKTATGWMTTINGKELKVEGQITYYNRYKRQNVVKDLSVELDRLSEESVNNDISSWTKGRSGEALSLLKKRFSHRPVQEKFVCLNCGFETHADEQAALNIARSWLFLRSQEYKKYQTNKTTGNTDKRAFVETWQSFYRKKLKEVWKPAV

SEQ ID NO: 454 - protein, 978 aa, synthetic construct
  REGION 1..978: note = CasX variant
QEIKRINKIRRRLVKDSNTKKAGKTGPMKTLLVRVMTPDLRERLENLRKKPENIPQPISNTSRANLNKLLTDYTEMKKAILHVYWEEFQKDPVGLMSRVAQPASKKIDQNKLKPEMDEKGNLTTAGFACSQCGQPLFVYKLEQVSEKGKAYTNYFGRCNVAEHEKLILLAQLKPEKDSDEAVTYSLGKFGQRALDFYSIHVTKESTHPVKPLAQIAGNRYASGPVGKALSDACMGTIASFLSKYQDIIIEHQKVVKGNQKRLESLRELAGKENLEYPSVTLPPQPHTKEGVDAYNEVIARVRMWVNLNLWQKLKLSRDDAKPLLRLKGFPSFPLVERQANEVDWWDMVCNVKKLINEKKEDGKVFWQNLAGYKRQEALRPYLSSEEDREKGKKFARYQLGDLLLHLEKKHGEDWGKVYDEAWERIDKKVEGLSKHIKLEEERRSEDAQSKAALTDWLRAKASFVIEGLKEADKDEFCRCELKLQKWYGDLRGKPFAIEAENSILDISGFSKQYNCAFIWQKDGVKKLNLYLIINYFKGGKLRFKKIKPEAFEANRFYTVINKKSGEIVPMEVNFNFDDPNLIILPLAFGKRQGREFIWNDLLSLETGSLKLANGRVIEKTLYNRRTRQDEPALFVALTFERREVLDSSNIKPMNLIGVDRGENIPAVIALTDPEGCPLSRFKDSLGNPTHILRIGESYKEKQRTIQAKKEVEQRRAGGYSRKYASKAKNLADDMVRNTARDLLYYAVTQDAMLIFENLSRGFGRQGKRTFMAERQYTRMEDWLTAKLAYEGLPSKTYLSKTLAQYTSKTCSNCGFTITSADYDRVLEKLKKTATGWMTTINGKELKVEGQITYYNRYKRQNVVKDLSVELDRLSEESVNNDISSWTKGRSGEALSLLKKRFSHRPVQEKFVCLNCGFETHADEQAALNIARSWLFLRSQEYKKYQTNKTTGNTDKRAFVETWQSFYRKKLKEVWKPAV

SEQ ID NO: 455 - protein, 979 aa, synthetic construct
  REGION 1..979: note = CasX variant
QEIKRINKIRRRLVKDSNTKKAGKTGPMKTLLVRVMTPDLRERLENLRKKPENIPQPISNTSRANLNKLLTDYTEMKKAILHVYWEEFQKDPVGLMSRVAQPASKKIDQNKLKPEMDEKGNLTTAGFACSQCGQPLFVYKLEQVSEKGKAYTNYFGRCNVAEHEKLILLAQLKPEKDSDEAVTYSLGKFGQRALDFYSIHVTKESTHPVKPLAQIAGNRYASGPVGKALSDACMGTIASFLSKYQDIIIEHQKVVKGNQKRLESLRELAGKENLEYPSVTLPPQPHTKEGVDAYNEVIARVRMWVNLNLWQKLKLSRDDAKPLLRLKGFPSFPLVERQANEVDWWDMVCNVKKLINEKKEDGKVFWQNLAGYKRQEALRPYLSSEEDRKKGKKFARYQLGDLLLHLEKKHGEDWGKVYDEAWERIDKKVEGLSKHIKLEEERRSEDAQSKAALTDWLRAKASFVIEGLKEADKDEMFCRCELKLQKWYGDLRGKPFAIEAENSILDISGFSKQYNCAFIWQKDGVKKLNLYLIINYFKGGKLRFKKIKPEAFEANRFYTVINKKSGEIVPMEVNFNFDDPNLIILPLAFGKRQGREFIWNDLLSLETGSLKLANGRVIEKTLYNRRTRQDEPALFVALTFERREVLDSSNIKPMNLIGVDRGENIPAVIALTDPEGCPLSRFKDSLGNPTHILRIGESYKEKQRTIQAKKEVEQRRAGGYSRKYASKAKNLADDMVRNTARDLLYYAVTQDAMLIFENLSRGFGRQGKRTFMAERQYTRMEDWLTAKLAYEGLPSKTYLSKTLAQYTSKTCSNCGFTITSADYDRVLEKLKKTATGWMTTINGKELKVEGQITYYNRYKRQNVVKDLSVELDRLSEESVNNDISSWTKGRSGEALSLLKKRFSHRPVQEKFVCLNCGFETHADEQAALNIARSWLFLRSQEYKKYQTNKTTGNTDKRAFVETWQSFYRKKLKEVWKPAV

SEQ ID NO: 456 - protein, 978 aa, synthetic construct
  REGION 1..978: note = CasX variant
QEIKRINKIRRRLVKDSNTKKAGKTGPMKTLLVRVMTPDLRERLENLRKKPENIPQPISNTSRANLNKLLTDYTEMKKAILHVYWEEFQKDPVGLMSRVAQPASKKIDQNKLKPEMDEKGNLTTAGFACSQCGQPLFVYKLEQVSEKGKAYTNYFGRCNVAEHEKLILLAQLKPEKDSDEAVTYSLGKFGQRALDFYSIHVTKESTHPVKPLAQIAGNRYASGPVGKALSDACMGTIASFLSKYQDIIIEHQKVVKGNQKRLESLRELAGKENLEYPSVTLPPQPHTKEGVDAYNEVIARVRMWVNLNLWQKLKLSRDDAKPLLRLKGFPSFPLVERQANEVDWWDMVCNVKKLINEKKEDGKVFWQNLAGYKRQEALRPYLSSEEDRKKGKKFARYQLGDLLLHLEKKHGEDWGKVYDEAWERIDKKVEGLSKHIKLEEERRSEDAQSKAALTDWLRAKASFVIEGLKEADKDEFCRCELKLQKWYGDLRGKPFAIEAENSILDISGFSKQYNCAFIWQKDGVKKQNLYLIINYFKGGKLRFKKIKPEAFEANRFYTVINKKSGEIVPMEVNFNFDDPNLIILPLAFGKRQGREFIWNDLLSLETGSLKLANGRVIEKTLYNRRTRQDEPALFVALTFERREVLDSSNIKPMNLIGVDRGENIPAVIALTDPEGCPLSRFKDSLGNPTHILRIGESYKEKQRTIQAKKEVEQRRAGGYSRKYASKAKNLADDMVRNTARDLLYYAVTQDAMLIFENLSRGFGRQGKRTFMAERQYTRMEDWLTAKLAYEGLPSKTYLSKTLAQYTSKTCSNCGFTITSADYDRVLEKLKKTATGWMTTINGKELKVEGQITYYNRYKRQNVVKDLSVELDRLSEESVNNDISSWTKGRSGEALSLLKKRFSHRPVQEKFVCLNCGFETHADEQAALNIARSWLFLRSQEYKKYQTNKTTGNTDKRAFVETWQSFYRKKLKEVWKPAV

SEQ ID NO: 457 - protein, 978 aa, synthetic construct
  REGION 1..978: note = CasX variant
QEIKRINKIRRRLVKDSNTKKAGKTGPMKTLLVRVMTPDLRERLENLRKKPENIPQPISNTSRANLNKLLTDYTEMKKAILHVYWEEFQKDPVGLMSRVAQPASKKIDQNKLKPEMDEKGNLTTAGFACSQCGQPLFVYKLEQVSEKGKAYTNYFGRCNVAEHEKLILLAQLKPEKDSDEAVTYSLGKFGQRALDFYSIHVTKESTHPVKPLAQIAGNRYASGPVGKALSDACMGTIASFLSKYQDIIIEHQKVVKGNQKRLESLRELAGKENLEYPSVTLPPQPHTKEGVDAYNEVIARVRMWVNLNLWQKLKLSRDDAKPLLRLKGFPSFPLVERQANEVDWWDMVCNVKKLINEKKEDGKVFWQNLAGYKRQEALRPYLSSEEDRKKGKKFARYQLGDLLLHLEKKHGEDWGKVYDEAWERIDKKVEGLSKHIKLEEERRSEDAQSKAALTDWLRAKASFVIEGLKEADKDEFCRCELKLQKWYGDLRGKPFAIEAENSILDISGFSKQYNCAFIWQKDGVKKLNLYLIINYFKGGKLRFKKIKPEAFEANRFYTVINKKSGEIVIMEVNFNFDDPNLIILPLAFGKRQGREFIWNDLLSLETGSLKLANGRVIEKTLYNRRTRQDEPALFVALTFERREVLDSSNIKPMNLIGVDRGENIPAVIALTDPEGCPLSRFKDSLGNPTHILRIGESYKEKQRTIQAKKEVEQRRAGGYSRKYASKAKNLADDMVRNTARDLLYYAVTQDAMLIFENLSRGFGRQGKRTFMAERQYTRMEDWLTAKLAYEGLPSKTYLSKTLAQYTSKTCSNCGFTITSADYDRVLEKLKKTATGWMTTINGKELKVEGQITYYNRYKRQNVVKDLSVELDRLSEESVNNDISSWTKGRSGEALSLLKKRFSHRPVQEKFVCLNCGFETHADEQAALNIARSWLFLRSQEYKKYQTNKTTGNTDKRAFVETWQSFYRKKLKEVWKPAV

SEQ ID NO: 458 - protein, 978 aa, synthetic construct
  REGION 1..978: note = CasX variant
QEIKRINKIRRRLVKDSNTKKAGKTGPMKTLLVRVMTPDLRERLENLRKKPENIPQPISNTSRANLNKLLTDYTEMKKAILHVYWEEFQKDPVGLMSRVAQPASKKIDQNKLKPEMDEKGNLTTAGFACSQCGQPLFVYKLEQVSEKGKAYTNYFGRCNVAEHEKLILLAQLKPEKDSDEAVTYSLGKFGQRALDFYSIHVTKESTHPVKPLAQIAGNRYASGPVGKALSDACMGTIASFLSKYQDIIIEHQKVVKGNQKRLESLRELAGKENLEYPSVTLPPQPHTKEGVDAYNEVIARVRMWVNLNLWQKLKLSRDDAKPLLRLKGFPSFPLVERQANEVDWWDMVCNVKKLINEKKEDGKVFWQNLAGYKRQEALRPYLSSEEDRKKGKKFARYQLGDLLLHLEKKHGEDWGKVYDEAWERIDKKVEGLSKHIKLEEERRSEDAQSKAALTDWLRAKASFVIEGLKEADKDEFCRCELKLQKWYGDLRGKPFAIEAENSILDISGFSKQYNCAFIWQKDGVKKLNLYLIINYFKGGKLRFKKIKPEAFEANRFYTVINKKSGEIVPMEVNFNFDDPNLIILPLAFGKRQGREFIWNDLLSLETGSLKLANGRVIEKTLYNRRTRQDEPALFVALTFERREVNDSSNIKPMNLIGVDRGENIPAVIALTDPEGCPLSRFKDSLGNPTHILRIGESYKEKQRTIQAKKEVEQRRAGGYSRKYASKAKNLADDMVRNTARDLLYYAVTQDAMLIFENLSRGFGRQGKRTFMAERQYTRMEDWLTAKLAYEGLPSKTYLSKTLAQYTSKTCSNCGFTITSADYDRVLEKLKKTATGWMTTINGKELKVEGQITYYNRYKRQNVVKDLSVELDRLSEESVNNDISSWTKGRSGEALSLLKKRFSHRPVQEKFVCLNCGFETHADEQAALNIARSWLFLRSQEYKKYQTNKTTGNTDKRAFVETWQSFYRKKLKEVWKPAV

SEQ ID NO: 459 - protein, 979 aa, synthetic construct
  REGION 1..979: note = CasX variant
QEIKRINKIRRRLVKDSNTKKAGKTGPMKTLLVRVMTPDLRERLENLRKKPENIPQPISNTSRANLNKLLTDYTEMKKAILHVYWEEFQKDPVGLMSRVAQPASKKIDQNKLKPEMDEKGNLTTAGFACSQCGQPLFVYKLEQVSEKGKAYTNYFGRCNVAEHEKLILLAQLKPEKDSDEAVTYSLGKFGQRALDFYSIHVTKESTHPVKPLAQIAGNRYASGPVGKALSDACMGTIASFLSKYQDIIIEHQKVVKGNQKRLESLRELAGKENLEYPSVTLPPQPHTKEGVDAYNEVIARVRMWVNLNLWQKLKLSRDDAKPLLRLKGFPSFPLVERQANEVDWWDMVCNVKKLINEKKEDGKVFWQNLAGYKRQEALRPYLSSEEDRKKGKKFARYQLGDLLLHLEKKHGEDWGKVYDEAWERIDKKVEGLSKHIKLEEERRSEDAQSKAALTDWLRAKASFVIEGLKEADKDEFCRCELKLQKWYGDLRGKPFAIEAENSILDISGFSKQYNCAFIWQKDGVKKLNLYLIINYFKGGKLRFKKIKPEAFEANRFYTVINKKSGEIVPMEVNFNFDDPNLIILPLAFGKRQGREFIWNDLLSLETGSLKLANGRVIEKTLYNRRTRQDEPALFVALTFERREVLDSSNIKPMNLIGVDRGENIPAVIALTDPEGCPLSRFKDSLGNPTHILRIGESYKEKQRTIQAKKEVEQRRAGGYSRKYASKAKNLADDMVRNTARDLLYYAVTQDAMLIFENLSRGFGRQGKRTFMAERQYTRMEDWLTAKLAYEGLPSGKTYLSKTLAQYTSKTCSNCGFTITSADYDRVLEKLKKTATGWMTTINGKELKVEGQITYYNRYKRQNVVKDLSVELDRLSEESVNNDISSWTKGRSGEALSLLKKRFSHRPVQEKFVCLNCGFETHADEQAALNIARSWLFLRSQEYKKYQTNKTTGNTDKRAFVETWQSFYRKKLKEVWKPAV

SEQ ID NO: 460 - protein, 978 aa, synthetic construct
  REGION 1..978: note = CasX variant
QEIKRINKIRRRLVKDSNTKKAGKTGPMKTLLVRVMTPDLRERLENLRKKPENIPQPISNTSRANLNKLLTDYTEMKKAILHVYWEEFQKDPVGLMSRVAQPASKKIDQNKLKPEMDEKGNLTTAGFACSQCGQPLFVYKLEQVSEKGKAYTNYFGRCNVAEHEKLILLAQLKPEKDSDEAVTYSLGKFGQRALDFYSIHVTKESTHPVKPLAQIAGNRYASGPVGKALSDACMGTIASFLSKYQDIIIEHQKVVKGNQKRLESLRELAGKENLEYPSVTLPPQPHTKEGVDAYNEVIARVRMWVNLNLWQKLKLSRDDAKPLLRLKGFPSFPLVERQANEVDWWDMVCNVKKLINEKKEDGKVFWQNLAGYKRQEALRPYLSSEEDRKKGKKFARYQLGDLLLHLEKKHGEDWGKVYDEAWERIDKKVEGLSKHIKLEEERRSEDAQSKAALTDWLRAKASFVIEGLKEADKDEFCRCELKLQKWYGDLRGKPFAIEAENSILDISGFSKQYNCAFIWQKDGVKKLNLYLIINYFKGGKLRFKKIKPEAFEANRFYTVINKKSGEIVPMEVNFNFDDPNLIILPLAFGKRQGREFIWNDLLSLETGSLKLANGRVIEKTLYNRRTRQDEPALFVALTFERREVLDSSNIKPMNLIGVDRGENIPAVIALTDPEGCPLSRFKDSLGNPTHILRIGESYKEKQRTIQAKKEVEQRRAGGYSRKYASKAKNLADDMVRNTARDLLYYAVTQDAMLIFENLSRGFGRQGKRTFMAERQYTRMEDWLTAKLAYEGLPSKTYLSKTLAQYTSKTCSNCGFTITSADYDRMLEKLKKTATGWMTTINGKELKVEGQITYYNRYKRQNVVKDLSVELDRLSEESVNNDISSWTKGRSGEALSLLKKRFSHRPVQEKFVCLNCGFETHADEQAALNIARSWLFLRSQEYKKYQTNKTTGNTDKRAFVETWQSFYRKKLKEVWKPAV

SEQ ID NO: 461 - protein, 978 aa, synthetic construct
  REGION 1..978: note = CasX variant
QEIKRINKIRRRLVKDSNTKKAGKTGPMKTLLVRVMTPDLRERLENLRKKPENIPQPISNTSRANLNKLLTDYTEMKKAILHVYWEEFQKDPVGLMSRVAQPASKKIDQNKLKPEMDEKGNLTTAGFACSQCGQPLFVYKLEQVSEKGKAYTNYFGRCNVAEHEKLILLAQLKPEKDSDEAVTYSLGKFGQRALDFYSIHVTKESTHPVKPLAQIAGNRYASGPVGKALSDACMGTIASFLSKYQDIIIEHQKVVKGNQKRLESLRELAGKENLEYPSVTLPPQPHTKEGVDAYNEVIARVRMWVNLNLWQKLKLSRDDAKPLLRLKGFPSFPLVERQANEVDWWDMVCNVKKLINEKKEDGKVFWQNLAGYKRQEALRPYLSSEEDRKKGKKFARYQLGDLLLHLEKKHGEDWGKVYDEAWERIDKKVEGLSKHIKLEEERRSEDAQSKAALTDWLRAKASFVIEGLKEADKDEFCRCELKLQKWYGDLRGKPFAIEAENSILDISGFSKQYNCAFIWQKDGVKKLNLYLIINYFKGGKLRFKKIKPEAFEANRFYTVINKKSGEIVPMEVNFNFDDPNLIILPLAFGKRQGREFIWNDLLSLETGSLKLANGRVIEKTLYNRRTRQDEPALFVALTFERREVLDSSNIKPMNLIGVDRGENIPAVIALTDPEGCPLSRFKDSLGNPTHILRIGESYKEKQRTIQAKKEVEQRRAGGYSRKYASKAKNLADDMVRNTARDLLYYAVTQDAMLIFENLSRGFGRQGKRTFMAERQYTRMEDWLTAKLAYEGLPSKTYLSKTLAQYTSKTCSNCGFTITSADYDRVLEKLKKTATGWMTTINGKELKVEGQITYYNRYKRQNVVKDLSVELDRLSEESVNNDISSWTKGRQGEALSLLKKRFSHRPVQEKFVCLNCGFETHADEQAALNIARSWLFLRSQEYKKYQTNKTTGNTDKRAFVETWQSFYRKKLKEVWKPAV

SEQ ID NO: 462 - protein, 915 aa, synthetic construct
  REGION 1..915: note = CasX variant
QEIKRINKIRRRLVKDSNTKKAGKTGPMKTLLVRVMTPDLRERLENLRKKPENIPQPISNTSRANLNKLLTDYTEMKKAILHVYWEEFQKDPVGLMSRVAQPASKKIDQNKLKPEMDEKGNLTTAGFACSQCGQPLFVYKLEQVSEKGKAYTNYFGRCNVAEHEKLILLAQLKPEKDSDEAVTYSLGKFGQRALDFYSIHVTKESTHPVKPLAQIAGNRYASGPVGKALSDACMGTIASFLSKYQDIIIEHQKVVKGNQKRLESLRELAGKENLEYPSVTLPPQPHTKEGVDAYNEVIARVRMWVNLNLWQKLKLSRDDAKPLLRLKGFPSFPLVERQANEVDWWDMVCNVKKLINEKKEDGKVFWQNLAGYKRQEALRPYLSSEEDRKKGKKFARYQLGDLLLHLEKKHGEDWGKVYDEAWERIDKKVEGLSKHIKLEEERRSEDAQSKAALTDWLRAKASFVIEGLKEADKDEFCRCELKLQKWYGDLRGKPFAIEAENSILDISGFSKQYNCAFIWQKDGVKKLNLYLIINYFKGGKLRFKKIKPEAFEANRFYTVINKKSGEIVPMEVNFNFDDPNLIILPLAFGKRQGREFIWNDLLSLETGSLKLANGRVIEKTLYNRRTRQDEPALFVALTFERREVLDSSNIKPMNLIGVDRGENIPAVIALTDPEGCPLSRFKDSLGNPTHILRIGESYKEKQRTIQAKKEVEQRRAGGYSRKYASKAKNLADDMVRNTARDLLYYAVTQDAMLIFENLSRGFGRQGKRTFMAERQYTRMEDWLTAKLAYEGLPSKTYLSKTLAQYTSKTCSNCGFTITSADYDRVLEKLKKTATGWMTTINGKELKVEGQITYYNRYKRQNVVKDLSVELDRLSEESVNNDISSWTKGRSGEALSLLKKRFSHRPVQEKFVCLNC

SEQ ID NO: 463 - protein, 979 aa, synthetic construct
  REGION 1..979: note = CasX variant
QEIKRINKIRRRLVKDSNTKKAGKTGPMKTLLVRVMTPDLRERLENLRKKPENIPQPISNTSRANLNKLLTDYTEMKKAILHVYWEEFQKDPVGLMSRVAQPASKKIDQNKLKPEMDEKGNLTTAGFACSQCGQPLFVYKLEQVSEKGKAYTNYFGRCNVAEHEKLILLAQLKPEKDSDEAVTYSLGKFGQRALDFYSIHVTKESTHPVKPLAQIAGNRYASGPVGKALSDACMGTIASFLSKYQDIIIEHQKVVKGNQKRLESLRELAGKENLEYPSVTLPPQPHTKEGVDAYNEVIARVRMWVNLNLWQKLKLSRDDAKPLLRLKGFPSFPLVERQANEVDWWDMVCNVKKLINEKKEDGKVFWQNLAGYKRQEALRPYLSSEEDRKKGKKFARYQLGDLLLHLEKKHGEDWGKVYDEAWERIDKKVEGLSKHIKLEEERRSEDAQSKAALTDWLRAKASFVIEGLKEADKDEFCRCELKLQKWYGDLRGKPFAIEAENSILDISGFSKQYNCAFIWQKDGVKKLNLYLIINYFKGGKLRFKKIKPEAFEANRFYTVINKKSGEIVPMEVNFNFDDPNLIILPLAFGKRQGREFIWNDLLSLETGSLKLANGRVIEKTLYNRRTRQDEPALFVALTFERREVLDSSNIKPMNLIGVDRGENIPAVIALTDPEGCPLSRFKDSLGNPTHILRIGESYKEKQRTIQAKKEVEQRRAGGYSRKYASKAKNLADDMVRNTARDLLYYAVTQDAMLIFENLSRGFGRQGKRTFMAERQYTRMEDWLTAKLAYEGLPSKTYLSKTLAQYTSKTCSNCGFTITSADYDRVLEKLKKTATGWMTTINGKELKVEGQITYYNRYKRQNVVKDLSVELDRLSEESVNNDISSWTKGRSGEALSLLKKRFSHRPVQEKFVCLNCGFETHADEQAALNIARSWLFLRSQEYKKYQTNKTSTGNTDKRAFVETWQSFYRKKLKEVWKPAV

SEQ ID NO: 464 - protein, 979 aa, synthetic construct
  REGION 1..979: note = CasX variant
QEIKRINKIRRRLVKDSNTKKAGKTGPMKTLLVRVMTPDLRERLENLRKKPENIPQPISNTSRANLNKLLTDYTEMKKAILHVYWEEFQKDPVGLMSRVAQPASKKIDQNKLKPEMDEKGNLTTAGFACSQCGQPLFVYKLEQVSEKGKAYTNYFGRCNVAEHEKLILLAQLKPEKDSDEAVTYSLGKFGQRALDFYSIHVTKESTHPVKPLAQIAGNRYASGPVGKALSDACMGTIASFLSKYQDIIIEHQKVVKGNQKRLESLRELAGKENLEYPSVTLPPQPHTKEGVDAYNEVIARVRMWVNLNLWQKLKLSRDDAKPLLRLKGFPSFPLVERQANEVDWWDMVCNVKKLINEKKEDGKVFWQNLAGYKRQEALRPYLSSEEDRKKGKKFARYQLGDLLLHLEKKHGEDWGKVYDEAWERIDKKVEGLSKHIKLEEERRSEDAQSKAALTDWLRAKASFVIEGLKEADKDEFCRCELKLQKWYGDLRGKPFAIEAENSILDISGFSKQYNCAFIWQKDGVKKLNLYLIINYFKGGKLRFKKIKPEAFEANRFYTVINKKSGEIVPMEVNFNFDDPNLIILPLAFGKRQGREFIWNDLLSLETGSLKLANGRVIEKTLYNRRTRQDEPALFVALTFERREVLDSSNIKPMNLIGVDRGENIPAVIALTDPEGCPLSRFKDSLGNPTHILRIGESYKEKQRTIQAKKEVEQRRAGGYSRKYASKAKNLADDMVRNTARDLLYYAVTQDAMLIFENLSRGFGRQGKRTFMAERQYTRMEDWLTAKLAYEGLPSKTYLSKTLAQYTSKTCSNCGFTITSADYDRVLEKLKKTATGWMTTINGKELKVEGQITYYNRYKRQNVVKDLSVELDRLSEESVNNDISSWTKGRSGEALSLLKKRFSHRPVQEKFVCLNCGFETHADEQAALNIARSWLFLRSQEYKKYQTNKTTGKNTDKRAFVETWQSFYRKKLKEVWKPAV

SEQ ID NO: 465 - protein, 979 aa, synthetic construct
  REGION 1..979: note = CasX variant
QEIKRINKIRRRLVKDSNTKKAGKTGPMKTLLVRVMTPDLRERLENLRKKPENIPQPISNTSRANLNKLLTDYTEMKKAILHVYWEEFQKDPVGLMSRVAGQPASKKIDQNKLKPEMDEKGNLTTAGFACSQCGQPLFVYKLEQVSEKGKAYTNYFGRCNVAEHEKLILLAQLKPEKDSDEAVTYSLGKFGQRALDFYSIHVTKESTHPVKPLAQIAGNRYASGPVGKALSDACMGTIASFLSKYQDIIIEHQKVVKGNQKRLESLRELAGKENLEYPSVTLPPQPHTKEGVDAYNEVIARVRMWVNLNLWQKLKLSRDDAKPLLRLKGFPSFPLVERQANEVDWWDMVCNVKKLINEKKEDGKVFWQNLAGYKRQEALRPYLSSEEDRKKGKKFARYQLGDLLLHLEKKHGEDWGKVYDEAWERIDKKVEGLSKHIKLEEERRSEDAQSKAALTDWLRAKASFVIEGLKEADKDEFCRCELKLQKWYGDLRGKPFAIEAENSILDISGFSKQYNCAFIWQKDGVKKLNLYLIINYFKGGKLRFKKIKPEAFEANRFYTVINKKSGEIVPMEVNFNFDDPNLIILPLAFGKRQGREFIWNDLLSLETGSLKLANGRVIEKTLYNRRTRQDEPALFVALTFERREVLDSSNIKPMNLIGVDRGENIPAVIALTDPEGCPLSRFKDSLGNPTHILRIGESYKEKQRTIQAKKEVEQRRAGGYSRKYASKAKNLADDMVRNTARDLLYYAVTQDAMLIFENLSRGFGRQGKRTFMAERQYTRMEDWLTAKLAYEGLPSKTYLSKTLAQYTSKTCSNCGFTITSADYDRVLEKLKKTATGWMTTINGKELKVEGQITYYNRYKRQNVVKDLSVELDRLSEESVNNDISSWTKGRSGEALSLLKKRFSHRPVQEKFVCLNCGFETHADEQAALNIARSWLFLRSQEYKKYQTNKTTGNTDKRAFVETWQSFYRKKLKEVWKPAV

SEQ ID NO: 466 - protein, 979 aa, synthetic construct
  REGION 1..979: note = CasX variant
QEIKRINKIRRRLVKDSNTKKAGKTGPMKTLLVRVMTPDLRERLENLRKKPENIPQPISNTSRANLNKLLTDYTEMKKAILHVYWEEFQKDPVGLMSRVAQPIASKKIDQNKLKPEMDEKGNLTTAGFACSQCGQPLFVYKLEQVSEKGKAYTNYFGRCNVAEHEKLILLAQLKPEKDSDEAVTYSLGKFGQRALDFYSIHVTKESTHPVKPLAQIAGNRYASGPVGKALSDACMGTIASFLSKYQDIIIEHQKVVKGNQKRLESLRELAGKENLEYPSVTLPPQPHTKEGVDAYNEVIARVRMWVNLNLWQKLKLSRDDAKPLLRLKGFPSFPLVERQANEVDWWDMVCNVKKLINEKKEDGKVFWQNLAGYKRQEALRPYLSSEEDRKKGKKFARYQLGDLLLHLEKKHGEDWGKVYDEAWERIDKKVEGLSKHIKLEEERRSEDAQSKAALTDWLRAKASFVIEGLKEADKDEFCRCELKLQKWYGDLRGKPFAIEAENSILDISGFSKQYNCAFIWQKDGVKKLNLYLIINYFKGGKLRFKKIKPEAFEANRFYTVINKKSGEIVPMEVNFNFDDPNLIILPLAFGKRQGREFIWNDLLSLETGSLKLANGRVIEKTLYNRRTRQDEPALFVALTFERREVLDSSNIKPMNLIGVDRGENIPAVIALTDPEGCPLSRFKDSLGNPTHILRIGESYKEKQRTIQAKKEVEQRRAGGYSRKYASKAKNLADDMVRNTARDLLYYAVTQDAMLIFENLSRGFGRQGKRTFMAERQYTRMEDWLTAKLAYEGLPSKTYLSKTLAQYTSKTCSNCGFTITSADYDRVLEKLKKTATGWMTTINGKELKVEGQITYYNRYKRQNVVKDLSVELDRLSEESVNNDISSWTKGRSGEALSLLKKRFSHRPVQEKFVCLNCGFETHADEQAALNIARSWLFLRSQEYKKYQTNKTTGNTDKRAFVETWQSFYRKKLKEVWKPAV

SEQ ID NO: 467 - protein, 979 aa, synthetic construct
  REGION 1..979: note = CasX variant
QEIKRINKIRRRLVKDSNTKKAGKTGPMKTLLVRVMTPDLRERLENLRKKPENIPQPISNTSRANLNKLLTDYTEMKKAILHVYWEEFQKDPVGLMSRVAQPALSKKIDQNKLKPEMDEKGNLTTAGFACSQCGQPLFVYKLEQVSEKGKAYTNYFGRCNVAEHEKLILLAQLKPEKDSDEAVTYSLGKFGQRALDFYSIHVTKESTHPVKPLAQIAGNRYASGPVGKALSDACMGTIASFLSKYQDIIIEHQKVVKGNQKRLESLRELAGKENLEYPSVTLPPQPHTKEGVDAYNEVIARVRMWVNLNLWQKLKLSRDDAKPLLRLKGFPSFPLVERQANEVDWWDMVCNVKKLINEKKEDGKVFWQNLAGYKRQEALRPYLSSEEDRKKGKKFARYQLGDLLLHLEKKHGEDWGKVYDEAWERIDKKVEGLSKHIKLEEERRSEDAQSKAALTDWLRAKASFVIEGLKEADKDEFCRCELKLQKWYGDLRGKPFAIEAENSILDISGFSKQYNCAFIWQKDGVKKLNLYLIINYFKGGKLRFKKIKPEAFEANRFYTVINKKSGEIVPMEVNFNFDDPNLIILPLAFGKRQGREFIWNDLLSLETGSLKLANGRVIEKTLYNRRTRQDEPALFVALTFERREVLDSSNIKPMNLIGVDRGENIPAVIALTDPEGCPLSRFKDSLGNPTHILRIGESYKEKQRTIQAKKEVEQRRAGGYSRKYASKAKNLADDMVRNTARDLLYYAVTQDAMLIFENLSRGFGRQGKRTFMAERQYTRMEDWLTAKLAYEGLPSKTYLSKTLAQYTSKTCSNCGFTITSADYDRVLEKLKKTATGWMTTINGKELKVEGQITYYNRYKRQNVVKDLSVELDRLSEESVNNDISSWTKGRSGEALSLLKKRFSHRPVQEKFVCLNCGFETHADEQAALNIARSWLFLRSQEYKKYQTNKTTGNTDKRAFVETWQSFYRKKLKEVWKPAV

SEQ ID NO: 468 - protein, 979 aa, synthetic construct
  REGION 1..979: note = CasX variant
QEIKRINKIRRRLVKDSNTKKAGKTGPMKTLLVRVMTPDLRERLENLRKKPENIPQPISNTSRANLNKLLTDYTEMKKAILHVYWEEFQKDPVGLMSRVAQPASKKIDQNKLKPEMDEKGNLTTAGFACSQCGQPLFVYKLEQVSEKGKAYTNYFGRCNVAEHEKLILLAQLKPEKDSDEAVTYSLGKFGQRALDFYSIHVTKESTHPVKPLAQIAGNRYASGPVGKALSDACMGTIASFLSKYQDIIIEHQKVVKGNQKRLESLRELAGKENLEYPSVTLPPQPHTKEGVDAYNEVIARVRMWVNLNLWQKLKLSRDDAKPLLRLKGFPSFPDLVERQANEVDWWDMVCNVKKLINEKKEDGKVFWQNLAGYKRQEALRPYLSSEEDRKKGKKFARYQLGDLLLHLEKKHGEDWGKVYDEAWERIDKKVEGLSKHIKLEEERRSEDAQSKAALTDWLRAKASFVIEGLKEADKDEFCRCELKLQKWYGDLRGKPFAIEAENSILDISGFSKQYNCAFIWQKDGVKKLNLYLIINYFKGGKLRFKKIKPEAFEANRFYTVINKKSGEIVPMEVNFNFDDPNLIILPLAFGKRQGREFIWNDLLSLETGSLKLANGRVIEKTLYNRRTRQDEPALFVALTFERREVLDSSNIKPMNLIGVDRGENIPAVIALTDPEGCPLSRFKDSLGNPTHILRIGESYKEKQRTIQAKKEVEQRRAGGYSRKYASKAKNLADDMVRNTARDLLYYAVTQDAMLIFENLSRGFGRQGKRTFMAERQYTRMEDWLTAKLAYEGLPSKTYLSKTLAQYTSKTCSNCGFTITSADYDRVLEKLKKTATGWMTTINGKELKVEGQITYYNRYKRQNVVKDLSVELDRLSEESVNNDISSWTKGRSGEALSLLKKRFSHRPVQEKFVCLNCGFETHADEQAALNIARSWLFLRSQEYKKYQTNKTTGNTDKRAFVETWQSFYRKKLKEVWKPAV

SEQ ID NO: 469 - protein, 979 aa, synthetic construct
  REGION 1..979: note = CasX variant
QEIKRINKIRRRLVKDSNTKKAGKTGPMKTLLVRVMTPDLRERLENLRKKPENIPQPISNTSRANLNKLLTDYTEMKKAILHVYWEEFQKDPVGLMSRVAQPASKKIDQNKLKPEMDEKGNLTTAGFACSQCGQPLFVYKLEQVSEKGKAYTNYFGRCNVAEHEKLILLAQLKPEKDSDEAVTYSLGKFGQRALDFYSIHVTKESTHPVKPLAQIAGNRYASGPVGKALSDACMGTIASFLSKYQDIIIEHQKVVKGNQKRLESLRELAGKENLEYPSVTLPPQPHTKEGVDAYNEVIARVRMWVNLNLWQKLKLSRDDAKPLLRLKGFPSFHPLVERQANEVDWWDMVCNVKKLINEKKEDGKVFWQNLAGYKRQEALRPYLSSEEDRKKGKKFARYQLGDLLLHLEKKHGEDWGKVYDEAWERIDKKVEGLSKHIKLEEERRSEDAQSKAALTDWLRAKASFVIEGLKEADKDEFCRCELKLQKWYGDLRGKPFAIEAENSILDISGFSKQYNCAFIWQKDGVKKLNLYLIINYFKGGKLRFKKIKPEAFEANRFYTVINKKSGEIVPMEVNFNFDDPNLIILPLAFGKRQGREFIWNDLLSLETGSLKLANGRVIEKTLYNRRTRQDEPALFVALTFERREVLDSSNIKPMNLIGVDRGENIPAVIALTDPEGCPLSRFKDSLGNPTHILRIGESYKEKQRTIQAKKEVEQRRAGGYSRKYASKAKNLADDMVRNTARDLLYYAVTQDAMLIFENLSRGFGRQGKRTFMAERQYTRMEDWLTAKLAYEGLPSKTYLSKTLAQYTSKTCSNCGFTITSADYDRVLEKLKKTATGWMTTINGKELKVEGQITYYNRYKRQNVVKDLSVELDRLSEESVNNDISSWTKGRSGEALSLLKKRFSHRPVQEKFVCLNCGFETHADEQAALNIARSWLFLRSQEYKKYQTNKTTGNTDKRAFVETWQSFYRKKLKEVWKPAV

SEQ ID NO: 470 - protein, 979 aa, synthetic construct
  REGION 1..979: note = CasX variant
QEIKRINKIRRRLVKDSNTKKAGKTGPMKTLLVRVMTPDLRERLENLRKKPENIPQPISNTSRANLNKLLTDYTEMKKAILHVYWEEFQKDPVGLMSRVAQPASKKIDQNKLKPEMDEKGNLTTAGFACSQCGQPLFVYKLEQVSEKGKAYTNYFGRCNVAEHEKLILLAQLKPEKDSDEAVTYSLGKFGQRALDFYSIHVTKESTHPVKPLAQIAGNRYASGPVGKALSDACMGTIASFLSKYQDIIIEHQKVVKGNQKRLESLRELAGKENLEYPSVTLPPQPHTKEGVDAYNEVIARVRMWVNLNLWQKLKLSRDDAKPLLRLKGFPSFPLVERQANEVDQWWDMVCNVKKLINEKKEDGKVFWQNLAGYKRQEALRPYLSSEEDRKKGKKFARYQLGDLLLHLEKKHGEDWGKVYDEAWERIDKKVEGLSKHIKLEEERRSEDAQSKAALTDWLRAKASFVIEGLKEADKDEFCRCELKLQKWYGDLRGKPFAIEAENSILDISGFSKQYNCAFIWQKDGVKKLNLYLIINYFKGGKLRFKKIKPEAFEANRFYTVINKKSGEIVPMEVNFNFDDPNLIILPLAFGKRQGREFIWNDLLSLETGSLKLANGRVIEKTLYNRRTRQDEPALFVALTFERREVLDSSNIKPMNLIGVDRGENIPAVIALTDPEGCPLSRFKDSLGNPTHILRIGESYKEKQRTIQAKKEVEQRRAGGYSRKYASKAKNLADDMVRNTARDLLYYAVTQDAMLIFENLSRGFGRQGKRTFMAERQYTRMEDWLTAKLAYEGLPSKTYLSKTLAQYTSKTCSNCGFTITSADYDRVLEKLKKTATGWMTTINGKELKVEGQITYYNRYKRQNVVKDLSVELDRLSEESVNNDISSWTKGRSGEALSLLKKRFSHRPVQEKFVCLNCGFETHADEQAALNIARSWLFLRSQEYKKYQTNKTTGNTDKRAFVETWQSFYRKKLKEVWKPAV

SEQ ID NO: 471 - protein, 978 aa, synthetic construct
  REGION 1..978: note = CasX variant
QEIKRINKIRRRLVKDSNTKKAGKTGPMKTLLVRVMTPDLRERLENLRKKPENIPQPISNTSRANLNKLLTDYTEMKKAILHVYWEEFQKDPVGLMSRVAQPASKKIDQNKLKPEMDEKGNLTTAGFACSQCGQPLFVYKLEQVSEKGKAYTNYFGRCNVAEHEKLILLAQLKPEKDSDEAVTYSLGKFGQRALDFYSIHVTKESTHPVKPLAQIAGNRYASGPVGKALSDACMGTIASFLSKYQDIIIEHQKVVKGNQKRLESLRELAGKENLEYPSVTLPPQPHTKEGVDAYNEVIARVRMWVNLNLWQKLKLSRDDAKPLLRLKGFPSFPLPERQANEVDWWDMVCNVKKLINEKKEDGKVFWQNLAGYKRQEALRPYLSSEEDRKKGKKFARYQLGDLLLHLEKKHGEDWGKVYDEAWERIDKKVEGLSKHIKLEEERRSEDAQSKAALTDWLRAKASFVIEGLKEADKDEFCRCELKLQKWYGDLRGKPFAIEAENSILDISGFSKQYNCAFIWQKDGVKKLNLYLIINYFKGGKLRFKKIKPEAFEANRFYTVINKKSGEIVPMEVNFNFDDPNLIILPLAFGKRQGREFIWNDLLSLETGSLKLANGRVIEKTLYNRRTRQDEPALFVALTFERREVLDSSNIKPMNLIGVDRGENIPAVIALTDPEGCPLSRFKDSLGNPTHILRIGESYKEKQRTIQAKKEVEQRRAGGYSRKYASKAKNLADDMVRNTARDLLYYAVTQDAMLIFENLSRGFGRQGKRTFMAERQYTRMEDWLTAKLAYEGLPSKTYLSKTLAQYTSKTCSNCGFTITSADYDRVLEKLKKTATGWMTTINGKELKVEGQITYYNRYKRQNVVKDLSVELDRLSEESVNNDISSWTKGRSGEALSLLKKRFSHRPVQEKFVCLNCGFETHADEQAALNIARSWLFLRSQEYKKYQTNKTTGNTDKRAFVETWQSFYRKKLKEVWKPAV

SEQ ID NO: 472 - protein, 978 aa, synthetic construct
  REGION 1..978: note = CasX variant
QEIKRINKIRRRLVKDSNTKKAGKTGPMKTLLVRVMTPDLRERLENLRKKPENIPQPISNTSRANLNKLLTDYTEMKKAILHVYWEEFQKDPVGLMSRVAQPASKKIDQNKLKPEMDEKGNLTTAGFACSQCGQPLFVYKLEQVSEKGKAYTNYFGRCNVAEHEKLIDLAQLKPEKDSDEAVTYSLGKFGQRALDFYSIHVTKESTHPVKPLAQIAGNRYASGPVGKALSDACMGTIASFLSKYQDIIIEHQKVVKGNQKRLESLRELAGKENLEYPSVTLPPQPHTKEGVDAYNEVIARVRMWVNLNLWQKLKLSRDDAKPLLRLKGFPSFPLVERQANEVDWWDMVCNVKKLINEKKEDGKVFWQNLAGYKRQEALRPYLSSEEDRKKGKKFARYQLGDLLLHLEKKHGEDWGKVYDEAWERIDKKVEGLSKHIKLEEERRSEDAQSKAALTDWLRAKASFVIEGLKEADKDEFCRCELKLQKWYGDLRGKPFAIEAENSILDISGFSKQYNCAFIWQKDGVKKLNLYLIINYFKGGKLRFKKIKPEAFEANRFYTVINKKSGEIVPMEVNFNFDDPNLIILPLAFGKRQGREFIWNDLLSLETGSLKLANGRVIEKTLYNRRTRQDEPALFVALTFERREVLDSSNIKPMNLIGVDRGENIPAVIALTDPEGCPLSRFKDSLGNPTHILRIGESYKEKQRTIQAKKEVEQRRAGGYSRKYASKAKNLADDMVRNTARDLLYYAVTQDAMLIFENLSRGFGRQGKRTFMAERQYTRMEDWLTAKLAYEGLPSKTYLSKTLAQYTSKTCSNCGFTITSADYDRVLEKLKKTATGWMTTINGKELKVEGQITYYNRYKRQNVVKDLSVELDRLSEESVNNDISSWTKGRSGEALSLLKKRFSHRPVQEKFVCLNCGFETHADEQAALNIARSWLFLRSQEYKKYQTNKTTGNTDKRAFVETWQSFYRKKLKEVWKPAV

SEQ ID NO: 473 - protein, 978 aa, synthetic construct
  REGION 1..978: note = CasX variant
QEIKRINKIRRRLVKDSNTKKAGKTGPMKTLLVRVMTPDLRERLENLRKKPENIPQPISNTSRANLNKLLTDYTEMKKAILHVYWEEFQKDPVGLMSRVAQPASKKIDQNKLKPEMDEKGNLTTAGFACSQCGQPLFVYKLEQVSEKGKAYTNYFGRCNVAEHEKLIELAQLKPEKDSDEAVTYSLGKFGQRALDFYSIHVTKESTHPVKPLAQIAGNRYASGPVGKALSDACMGTIASFLSKYQDIIIEHQKVVKGNQKRLESLRELAGKENLEYPSVTLPPQPHTKEGVDAYNEVIARVRMWVNLNLWQKLKLSRDDAKPLLRLKGFPSFPLVERQANEVDWWDMVCNVKKLINEKKEDGKVFWQNLAGYKRQEALRPYLSSEEDRKKGKKFARYQLGDLLLHLEKKHGEDWGKVYDEAWERIDKKVEGLSKHIKLEEERRSEDAQSKAALTDWLRAKASFVIEGLKEADKDEFCRCELKLQKWYGDLRGKPFAIEAENSILDISGFSKQYNCAFIWQKDGVKKLNLYLIINYFKGGKLRFKKIKPEAFEANRFYTVINKKSGEIVPMEVNFNFDDPNLIILPLAFGKRQGREFIWNDLLSLETGSLKLANGRVIEKTLYNRRTRQDEPALFVALTFERREVLDSSNIKPMNLIGVDRGENIPAVIALTDPEGCPLSRFKDSLGNPTHILRIGESYKEKQRTIQAKKEVEQRRAGGYSRKYASKAKNLADDMVRNTARDLLYYAVTQDAMLIFENLSRGFGRQGKRTFMAERQYTRMEDWLTAKLAYEGLPSKTYLSKTLAQYTSKTCSNCGFTITSADYDRVLEKLKKTATGWMTTINGKELKVEGQITYYNRYKRQNVVKDLSVELDRLSEESVNNDISSWTKGRSGEALSLLKKRFSHRPVQEKFVCLNCGFETHADEQAALNIARSWLFLRSQEYKKYQTNKTTGNTDKRAFVETWQSFYRKKLKEVWKPAV

SEQ ID NO: 474 - protein, 979 aa, synthetic construct
  REGION 1..979: note = CasX variant
QEIKRINKIRRRLVKDSNTKKAGKTPGPMKTLLVRVMTPDLRERLENLRKKPENIPQPISNTSRANLNKLLTDYTEMKKAILHVYWEEFQKDPVGLMSRVAQPASKKIDQNKLKPEMDEKGNLTTAGFACSQCGQPLFVYKLEQVSEKGKAYTNYFGRCNVAEHEKLILLAQLKPEKDSDEAVTYSLGKFGQRALDFYSIHVTKESTHPVKPLAQIAGNRYASGPVGKALSDACMGTIASFLSKYQDIIIEHQKVVKGNQKRLESLRELAGKENLEYPSVTLPPQPHTKEGVDAYNEVIARVRMWVNLNLWQKLKLSRDDAKPLLRLKGFPSFPLVERQANEVDWWDMVCNVKKLINEKKEDGKVFWQNLAGYKRQEALRPYLSSEEDRKKGKKFARYQLGDLLLHLEKKHGEDWGKVYDEAWERIDKKVEGLSKHIKLEEERRSEDAQSKAALTDWLRAKASFVIEGLKEADKDEFCRCELKLQKWYGDLRGKPFAIEAENSILDISGFSKQYNCAFIWQKDGVKKLNLYLIINYFKGGKLRFKKIKPEAFEANRFYTVINKKSGEIVPMEVNFNFDDPNLIILPLAFGKRQGREFIWNDLLSLETGSLKLANGRVIEKTLYNRRTRQDEPALFVALTFERREVLDSSNIKPMNLIGVDRGENIPAVIALTDPEGCPLSRFKDSLGNPTHILRIGESYKEKQRTIQAKKEVEQRRAGGYSRKYASKAKNLADDMVRNTARDLLYYAVTQDAMLIFENLSRGFGRQGKRTFMAERQYTRMEDWLTAKLAYEGLPSKTYLSKTLAQYTSKTCSNCGFTITSADYDRVLEKLKKTATGWMTTINGKELKVEGQITYYNRYKRQNVVKDLSVELDRLSEESVNNDISSWTKGRSGEALSLLKKRFSHRPVQEKFVCLNCGFETHADEQAALNIARSWLFLRSQEYKKYQTNKTTGNTDKRAFVETWQSFYRKKLKEVWKPAV

SEQ ID NO: 475 - protein, 978 aa, synthetic construct
  REGION 1..978: note = CasX variant
QEIKRINKIRRRLVKDSNTKKAGKTGPPKTLLVRVMTPDLRERLENLRKKPENIPQPISNTSRANLNKLLTDYTEMKKAILHVYWEEFQKDPVGLMSRVAQPASKKIDQNKLKPEMDEKGNLTTAGFACSQCGQPLFVYKLEQVSEKGKAYTNYFGRCNVAEHEKLILLAQLKPEKDSDEAVTYSLGKFGQRALDFYSIHVTKESTHPVKPLAQIAGNRYASGPVGKALSDACMGTIASFLSKYQDIIIEHQKVVKGNQKRLESLRELAGKENLEYPSVTLPPQPHTKEGVDAYNEVIARVRMWVNLNLWQKLKLSRDDAKPLLRLKGFPSFPLVERQANEVDWWDMVCNVKKLINEKKEDGKVFWQNLAGYKRQEALRPYLSSEEDRKKGKKFARYQLGDLLLHLEKKHGEDWGKVYDEAWERIDKKVEGLSKHIKLEEERRSEDAQSKAALTDWLRAKASFVIEGLKEADKDEFCRCELKLQKWYGDLRGKPFAIEAENSILDISGFSKQYNCAFIWQKDGVKKLNLYLIINYFKGGKLRFKKIKPEAFEANRFYTVINKKSGEIVPMEVNFNFDDPNLIILPLAFGKRQGREFIWNDLLSLETGSLKLANGRVIEKTLYNRRTRQDEPALFVALTFERREVLDSSNIKPMNLIGVDRGENIPAVIALTDPEGCPLSRFKDSLGNPTHILRIGESYKEKQRTIQAKKEVEQRRAGGYSRKYASKAKNLADDMVRNTARDLLYYAVTQDAMLIFENLSRGFGRQGKRTFMAERQYTRMEDWLTAKLAYEGLPSKTYLSKTLAQYTSKTCSNCGFTITSADYDRVLEKLKKTATGWMTTINGKELKVEGQITYYNRYKRQNVVKDLSVELDRLSEESVNNDISSWTKGRSGEALSLLKKRFSHRPVQEKFVCLNCGFETHADEQAALNIARSWLFLRSQEYKKYQTNKTTGNTDKRAFVETWQSFYRKKLKEVWKPAV

SEQ ID NO: 476 - protein, 977 aa, synthetic construct; identical to SEQ ID NO: 267
  REGION 1..977: note = CasX variant

SEQ ID NO: 477 - protein, 977 aa, synthetic construct
  REGION 1..977: note = CasX variant
QEIKRINKIRRRLVKDSNTKKAGKTGPMKTLLVRVMTPDLRERLENLRKKPENIPQPISNTSRANLNKLLTDYTEMKKAILHVYWEEFQKDPVGLMSRVAQPASKKIDQNKLKPEMDEKGNLTTAGFACQCGQPLFVYKLEQVSEKGKAYTNYFGRCNVAEHEKLILLAQLKPEKDSDEAVTYSLGKFGQRALDFYSIHVTKESTHPVKPLAQIAGNRYASGPVGKALSDACMGTIASFLSKYQDIIIEHQKVVKGNQKRLESLRELAGKENLEYPSVTLPPQPHTKEGVDAYNEVIARVRMWVNLNLWQKLKLSRDDAKPLLRLKGFPSFPLVERQANEVDWWDMVCNVKKLINEKKEDGKVFWQNLAGYKRQEALRPYLSSEEDRKKGKKFARYQLGDLLLHLEKKHGEDWGKVYDEAWERIDKKVEGLSKHIKLEEERRSEDAQSKAALTDWLRAKASFVIEGLKEADKDEFCRCELKLQKWYGDLRGKPFAIEAENSILDISGFSKQYNCAFIWQKDGVKKLNLYLIINYFKGGKLRFKKIKPEAFEANRFYTVINKKSGEIVPMEVNFNFDDPNLIILPLAFGKRQGREFIWNDLLSLETGSLKLANGRVIEKTLYNRRTRQDEPALFVALTFERREVLDSSNIKPMNLIGVDRGENIPAVIALTDPEGCPLSRFKDSLGNPTHILRIGESYKEKQRTIQAKKEVEQRRAGGYSRKYASKAKNLADDMVRNTARDLLYYAVTQDAMLIFENLSRGFGRQGKRTFMAERQYTRMEDWLTAKLAYEGLPSKTYLSKTLAQYTSKTCSNCGFTITSADYDRVLEKLKKTATGWMTTINGKELKVEGQITYYNRYKRQNVVKDLSVELDRLSEESVNNDISSWTKGRSGEALSLLKKRFSHRPVQEKFVCLNCGFETHADEQAALNIARSWLFLRSQEYKKYQTNKTTGNTDKRAFVETWQSFYRKKLKEVWKPAV

SEQ ID NO: 478 - protein, 978 aa, synthetic construct
  REGION 1..978: note = CasX variant
QEIKRINKIRRRLVKDSNTKKAGKTGPMKTLLVRVMTPDLRERLENLRKKPENIPQPISNTSRANLNKLLTDYTEMKKAILHVYWEEFQKDPVGLMSRVAQPASKKIDQNKLKPEMDEKGNLTTAGFACSQCGQPLFVYKLEQVSEKGKAYTNYFGRCNVAEHEKLILLAQLKPEKDSDEAVTYSLGKFGQRALDFYSIHVTKESTHPVKPLAQIAGNRYASGPVGKALSDACMGTIASFLSKYHDIIIEHQKVVKGNQKRLESLRELAGKENLEYPSVTLPPQPHTKEGVDAYNEVIARVRMWVNLNLWQKLKLSRDDAKPLLRLKGFPSFPLVERQANEVDWWDMVCNVKKLINEKKEDGKVFWQNLAGYKRQEALRPYLSSEEDRKKGKKFARYQLGDLLLHLEKKHGEDWGKVYDEAWERIDKKVEGLSKHIKLEEERRSEDAQSKAALTDWLRAKASFVIEGLKEADKDEFCRCELKLQKWYGDLRGKPFAIEAENSILDISGFSKQYNCAFIWQKDGVKKLNLYLIINYFKGGKLRFKKIKPEAFEANRFYTVINKKSGEIVPMEVNFNFDDPNLIILPLAFGKRQGREFIWNDLLSLETGSLKLANGRVIEKTLYNRRTRQDEPALFVALTFERREVLDSSNIKPMNLIGVDRGENIPAVIALTDPEGCPLSRFKDSLGNPTHILRIGESYKEKQRTIQAKKEVEQRRAGGYSRKYASKAKNLADDMVRNTARDLLYYAVTQDAMLIFENLSRGFGRQGKRTFMAERQYTRMEDWLTAKLAYEGLPSKTYLSKTLAQYTSKTCSNCGFTITSADYDRVLEKLKKTATGWMTTINGKELKVEGQITYYNRYKRQNVVKDLSVELDRLSEESVNNDISSWTKGRSGEALSLLKKRFSHRPVQEKFVCLNCGFETHADEQAALNIARSWLFLRSQEYKKYQTNKTTGNTDKRAFVETWQSFYRKKLKEVWKPAV

SEQ ID NO: 479 - protein, 978 aa, synthetic construct
  REGION 1..978: note = CasX variant
QEIKRINKIRRRLVKDSNTKKAGKTGPMKTLLVRVMTPDLRERLENLRKKPENIPQPISNTSRANLNKLLTDYTEMKKAILHVYWEEFQKDPVGLMSRVAQPASKKIDQNKLKPEMDEKGNLTTAGFACSQCGQPLFVYKLEQVSEKGKAYTNYFGRCNVAEHEKLILLAQLKPEKDSDEAVTYSLGKFGQRALDFYSIHVTKESTHPVKPLAQIAGNRYASGPVGKALSDACMGTIAHFLSKYQDIIIEHQKVVKGNQKRLESLRELAGKENLEYPSVTLPPQPHTKEGVDAYNEVIARVRMWVNLNLWQKLKLSRDDAKPLLRLKGFPSFPLVERQANEVDWWDMVCNVKKLINEKKEDGKVFWQNLAGYKRQEALRPYLSSEEDRKKGKKFARYQLGDLLLHLEKKHGEDWGKVYDEAWERIDKKVEGLSKHIKLEEERRSEDAQSKAALTDWLRAKASFVIEGLKEADKDEFCRCELKLQKWYGDLRGKPFAIEAENSILDISGFSKQYNCAFIWQKDGVKKLNLYLIINYFKGGKLRFKKIKPEAFEANRFYTVINKKSGEIVPMEVNFNFDDPNLIILPLAFGKRQGREFIWNDLLSLETGSLKLANGRVIEKTLYNRRTRQDEPALFVALTFERREVLDSSNIKPMNLIGVDRGENIPAVIALTDPEGCPLSRFKDSLGNPTHILRIGESYKEKQRTIQAKKEVEQRRAGGYSRKYASKAKNLADDMVRNTARDLLYYAVTQDAMLIFENLSRGFGRQGKRTFMAERQYTRMEDWLTAKLAYEGLPSKTYLSKTLAQYTSKTCSNCGFTITSADYDRVLEKLKKTATGWMTTINGKELKVEGQITYYNRYKRQNVVKDLSVELDRLSEESVNNDISSWTKGRSGEALSLLKKRFSHRPVQEKFVCLNCGFETHADEQAALNIARSWLFLRSQEYKKYQTNKTTGNTDKRAFVETWQSFYRKKLKEVWKPAV

SEQ ID NO: 480 - protein, 978 aa, synthetic construct
  REGION 1..978: note = CasX variant
QEIKRINKIRRRLVKDSNTKKAGKTGPMKTLLVRVMTPDLRERLENLRKKPENIPQPISNTSRANLNKLLTDYTEMKKAILHVYWEEFQKDPVGLMSRVAQPASKKIDQNKLKPEMDEKGNLTTAGFACSQCGQPLFVYKLEQVSEKGKAYTNYFGRCNVAEHEKLILLAQLKPEKDSDEAVTYSLGKFGQRALDFYSIHVTKESTHPVKPLAQIAGNRYASGPVGKALSDACMGTIATFLSKYQDIIIEHQKVVKGNQKRLESLRELAGKENLEYPSVTLPPQPHTKEGVDAYNEVIARVRMWVNLNLWQKLKLSRDDAKPLLRLKGFPSFPLVERQANEVDWWDMVCNVKKLINEKKEDGKVFWQNLAGYKRQEALRPYLSSEEDRKKGKKFARYQLGDLLLHLEKKHGEDWGKVYDEAWERIDKKVEGLSKHIKLEEERRSEDAQSKAALTDWLRAKASFVIEGLKEADKDEFCRCELKLQKWYGDLRGKPFAIEAENSILDISGFSKQYNCAFIWQKDGVKKLNLYLIINYFKGGKLRFKKIKPEAFEANRFYTVINKKSGEIVPMEVNFNFDDPNLIILPLAFGKRQGREFIWNDLLSLETGSLKLANGRVIEKTLYNRRTRQDEPALFVALTFERREVLDSSNIKPMNLIGVDRGENIPAVIALTDPEGCPLSRFKDSLGNPTHILRIGESYKEKQRTIQAKKEVEQRRAGGYSRKYASKAKNLADDMVRNTARDLLYYAVTQDAMLIFENLSRGFGRQGKRTFMAERQYTRMEDWLTAKLAYEGLPSKTYLSKTLAQYTSKTCSNCGFTITSADYDRVLEKLKKTATGWMTTINGKELKVEGQITYYNRYKRQNVVKDLSVELDRLSEESVNNDISSWTKGRSGEALSLLKKRFSHRPVQEKFVCLNCGFETHADEQAALNIARSWLFLRSQEYKKYQTNKTTGNTDKRAFVETWQSFYRKKLKEVWKPAV

SEQ ID NO: 481 - protein, 978 aa, synthetic construct
  REGION 1..978: note = CasX variant
QEIKRINKIRRRLVKDSNTKKAGKTGPMKTLLVRVMTPDLRERLENLRKKPENIPQPISNTSRANLNKLLTDYTEMKKAILHVYWEEFQKDPVGLMSRVAQPASKKIDQNKLKPEMDEKGNLTTAGFACSQCGQPLFVYKLEQVSEKGKAYTNYFGRCNVAEHEKLILLAQLKPEKDSDEAVTYSLGKFGQRALDFYSIHVTKESTHPVKPLAQIAGNRYASGPVGKALSDACMGTIASFLSKYQDIIIEHQKVVKGNQKRLESLRELAGKENLEYPSVTLPPQPHTDEGVDAYNEVIARVRMWVNLNLWQKLKLSRDDAKPLLRLKGFPSFPLVERQANEVDWWDMVCNVKKLINEKKEDGKVFWQNLAGYKRQEALRPYLSSEEDRKKGKKFARYQLGDLLLHLEKKHGEDWGKVYDEAWERIDKKVEGLSKHIKLEEERRSEDAQSKAALTDWLRAKASFVIEGLKEADKDEFCRCELKLQKWYGDLRGKPFAIEAENSILDISGFSKQYNCAFIWQKDGVKKLNLYLIINYFKGGKLRFKKIKPEAFEANRFYTVINKKSGEIVPMEVNFNFDDPNLIILPLAFGKRQGREFIWNDLLSLETGSLKLANGRVIEKTLYNRRTRQDEPALFVALTFERREVLDSSNIKPMNLIGVDRGENIPAVIALTDPEGCPLSRFKDSLGNPTHILRIGESYKEKQRTIQAKKEVEQRRAGGYSRKYASKAKNLADDMVRNTARDLLYYAVTQDAMLIFENLSRGFGRQGKRTFMAERQYTRMEDWLTAKLAYEGLPSKTYLSKTLAQYTSKTCSNCGFTITSADYDRVLEKLKKTATGWMTTINGKELKVEGQITYYNRYKRQNVVKDLSVELDRLSEESVNNDISSWTKGRSGEALSLLKKRFSHRPVQEKFVCLNCGFETHADEQAALNIARSWLFLRSQEYKKYQTNKTTGNTDKRAFVETWQSFYRKKLKEVWKPAV

SEQ ID NO: 482 - protein, 978 aa, synthetic construct
  REGION 1..978: note = CasX variant
QEIKRINKIRRRLVKDSNTKKAGKTGPMKTLLVRVMTPDLRERLENLRKKPENIPQPISNTSRANLNKLLTDYTEMKKAILHVYWEEFQKDPVGLMSRVAQPASKKIDQNKLKPEMDEKGNLTTAGFACSQCGQPLFVYKLEQVSEKGKAYTNYFGRCNVAEHEKLILLAQLKPEKDSDEAVTYSLGKFGQRALDFYSIHVTKESTHPVKPLAQIAGNRYASGPVGKALSDACMGTIASFLSKYQDIIIEHQKVVKGNQKRLESLRELAGKENLEYPSVTLPPQPHTEEGVDAYNEVIARVRMWVNLNLWQKLKLSRDDAKPLLRLKGFPSFPLVERQANEVDWWDMVCNVKKLINEKKEDGKVFWQNLAGYKRQEALRPYLSSEEDRKKGKKFARYQLGDLLLHLEKKHGEDWGKVYDEAWERIDKKVEGLSKHIKLEEERRSEDAQSKAALTDWLRAKASFVIEGLKEADKDEFCRCELKLQKWYGDLRGKPFAIEAENSILDISGFSKQYNCAFIWQKDGVKKLNLYLIINYFKGGKLRFKKIKPEAFEANRFYTVINKKSGEIVPMEVNFNFDDPNLIILPLAFGKRQGREFIWNDLLSLETGSLKLANGRVIEKTLYNRRTRQDEPALFVALTFERREVLDSSNIKPMNLIGVDRGENIPAVIALTDPEGCPLSRFKDSLGNPTHILRIGESYKEKQRTIQAKKEVEQRRAGGYSRKYASKAKNLADDMVRNTARDLLYYAVTQDAMLIFENLSRGFGRQGKRTFMAERQYTRMEDWLTAKLAYEGLPSKTYLSKTLAQYTSKTCSNCGFTITSADYDRVLEKLKKTATGWMTTINGKELKVEGQITYYNRYKRQNVVKDLSVELDRLSEESVNNDISSWTKGRSGEALSLLKKRFSHRPVQEKFVCLNCGFETHADEQAALNIARSWLFLRSQEYKKYQTNKTTGNTDKRAFVETWQSFYRKKLKEVWKPAV

SEQ ID NO: 483 - protein, 978 aa, synthetic construct
  REGION 1..978: note = CasX variant
QEIKRINKIRRRLVKDSNTKKAGKTGPMKTLLVRVMTPDLRERLENLRKKPENIPQPISNTSRANLNKLLTDYTEMKKAILHVYWEEFQKDPVGLMSRVAQPASKKIDQNKLKPEMDEKGNLTTAGFACSQCGQPLFVYKLEQVSEKGKAYTNYFGRCNVAEHEKLILLAQLKPEKDSDEAVTYSLGKFGQRALDFYSIHVTKESTHPVKPLAQIAGNRYASGPVGKALSDACMGTIASFLSKYQDIIIEHQKVVKGNQKRLESLRELAGKENLEYPSVTLPPQPHTKEGVDAYNEVIARVRMWVNLNLWQKLKLSRDDAKPLLRLKRFPSFPLVERQANEVDWWDMVCNVKKLINEKKEDGKVFWQNLAGYKRQEALRPYLSSEEDRKKGKKFARYQLGDLLLHLEKKHGEDWGKVYDEAWERIDKKVEGLSKHIKLEEERRSEDAQSKAALTDWLRAKASFVIEGLKEADKDEFCRCELKLQKWYGDLRGKPFAIEAENSILDISGFSKQYNCAFIWQKDGVKKLNLYLIINYFKGGKLRFKKIKPEAFEANRFYTVINKKSGEIVPMEVNFNFDDPNLIILPLAFGKRQGREFIWNDLLSLETGSLKLANGRVIEKTLYNRRTRQDEPALFVALTFERREVLDSSNIKPMNLIGVDRGENIPAVIALTDPEGCPLSRFKDSLGNPTHILRIGESYKEKQRTIQAKKEVEQRRAGGYSRKYASKAKNLADDMVRNTARDLLYYAVTQDAMLIFENLSRGFGRQGKRTFMAERQYTRMEDWLTAKLAYEGLPSKTYLSKTLAQYTSKTCSNCGFTITSADYDRVLEKLKKTATGWMTTINGKELKVEGQITYYNRYKRQNVVKDLSVELDRLSEESVNNDISSWTKGRSGEALSLLKKRFSHRPVQEKFVCLNCGFETHADEQAALNIARSWLFLRSQEYKKYQTNKTTGNTDKRAFVETWQSFYRKKLKEVWKPAV

SEQ ID NO: 484 - protein, 978 aa, synthetic construct
  REGION 1..978: note = CasX variant
QEIKRINKIRRRLVKDSNTKKAGKTGPMKTLLVRVMTPDLRERLENLRKKPENIPQPISNTSRANLNKLLTDYTEMKKAILHVYWEEFQKDPVGLMSRVAQPASKKIDQNKLKPEMDEKGNLTTAGFACSQCGQPLFVYKLEQVSEKGKAYTNYFGRCNVAEHEKLILLAQLKPEKDSDEAVTYSLGKFGQRALDFYSIHVTKESTHPVKPLAQIAGNRYASGPVGKALSDACMGTIASFLSKYQDIIIEHQKVVKGNQKRLESLRELAGKENLEYPSVTLPPQPHTKEGVDAYNEVIARVRMWVNLNLWQKLKLSRDDAKPLLRLKKFPSFPLVERQANEVDWWDMVCNVKKLINEKKEDGKVFWQNLAGYKRQEALRPYLSSEEDRKKGKKFARYQLGDLLLHLEKKHGEDWGKVYDEAWERIDKKVEGLSKHIKLEEERRSEDAQSKAALTDWLRAKASFVIEGLKEADKDEFCRCELKLQKWYGDLRGKPFAIEAENSILDISGFSKQYNCAFIWQKDGVKKLNLYLIINYFKGGKLRFKKIKPEAFEANRFYTVINKKSGEIVPMEVNFNFDDPNLIILPLAFGKRQGREFIWNDLLSLETGSLKLANGRVIEKTLYNRRTRQDEPALFVALTFERREVLDSSNIKPMNLIGVDRGENIPAVIALTDPEGCPLSRFKDSLGNPTHILRIGESYKEKQRTIQAKKEVEQRRAGGYSRKYASKAKNLADDMVRNTARDLLYYAVTQDAMLIFENLSRGFGRQGKRTFMAERQYTRMEDWLTAKLAYEGLPSKTYLSKTLAQYTSKTCSNCGFTITSADYDRVLEKLKKTATGWMTTINGKELKVEGQITYYNRYKRQNVVKDLSVELDRLSEESVNNDISSWTKGRSGEALSLLKKRFSHRPVQEKFVCLNCGFETHADEQAALNIARSWLFLRSQEYKKYQTNKTTGNTDKRAFVETWQSFYRKKLKEVWKPAV

SEQ ID NO: 485 - protein, 978 aa, synthetic construct
  REGION 1..978: note = CasX variant
QEIKRINKIRRRLVKDSNTKKAGKTGPMKTLLVRVMTPDLRERLENLRKKPENIPQPISNTSRANLNKLLTDYTEMKKAILHVYWEEFQKDPVGLMSRVAQPASKKIDQNKLKPEMDEKGNLTTAGFACSQCGQPLFVYKLEQVSEKGKAYTNYFGRCNVAEHEKLILLAQLKPEKDSDEAVTYSLGKFGQRALDFYSIHVTKESTHPVKPLAQIAGNRYASGPVGKALSDACMGTIASFLSKYQDIIIEHQKVVKGNQKRLESLRELAGKENLEYPSVTLPPQPHTKEGVDAYNEVIARVRMWVNKNLWQKLKLSRDDAKPLLRLKGFPSFPLVERQANEVDWWDMVCNVKKLINEKKEDGKVFWQNLAGYKRQEALRPYLSSEEDRKKGKKFARYQLGDLLLHLEKKHGEDWGKVYDEAWERIDKKVEGLSKHIKLEEERRSEDAQSKAALTDWLRAKASFVIEGLKEADKDEFCRCELKLQKWYGDLRGKPFAIEAENSILDISGFSKQYNCAFIWQKDGVKKLNLYLIINYFKGGKLRFKKIKPEAFEANRFYTVINKKSGEIVPMEVNFNFDDPNLIILPLAFGKRQGREFIWNDLLSLETGSLKLANGRVIEKTLYNRRTRQDEPALFVALTFERREVLDSSNIKPMNLIGVDRGENIPAVIALTDPEGCPLSRFKDSLGNPTHILRIGESYKEKQRTIQAKKEVEQRRAGGYSRKYASKAKNLADDMVRNTARDLLYYAVTQDAMLIFENLSRGFGRQGKRTFMAERQYTRMEDWLTAKLAYEGLPSKTYLSKTLAQYTSKTCSNCGFTITSADYDRVLEKLKKTATGWMTTINGKELKVEGQITYYNRYKRQNVVKDLSVELDRLSEESVNNDISSWTKGRSGEALSLLKKRFSHRPVQEKFVCLNCGFETHADEQAALNIARSWLFLRSQEYKKYQTNKTTGNTDKRAFVETWQSFYRKKLKEVWKPAV

SEQ ID NO: 486 - protein, 978 aa, synthetic construct
  REGION 1..978: note = CasX variant
QEIKRINKIRRRLVKDSNTKKAGKTGPMKTLLVRVMTPDLRERLENLRKKPENIPQPISNTSRANLNKLLTDYTEMKKAILHVYWEEFQKDPVGLMSRVAQPASKKIDQNKLKPEMDEKGNLTTAGFACSQCGQPLFVYKLEQVSEKGKAYTNYFGRCNVAEHEKLILLAQLKPEKDSDEAVTYSLGKFGQRALDFYSIHVTKESTHPVKPLAQIAGNRYASGPVGKALSDACMGTIASFLSKYQDIIIEHQKVVKGNQKRLESLRELAGKENLEYPSVTLPPQPHTKEGVDAYNEVIARVRRWVNLNLWQKLKLSRDDAKPLLRLKGFPSFPLVERQANEVDWWDMVCNVKKLINEKKEDGKVFWQNLAGYKRQEALRPYLSSEEDRKKGKKFARYQLGDLLLHLEKKHGEDWGKVYDEAWERIDKKVEGLSKHIKLEEERRSEDAQSKAALTDWLRAKASFVIEGLKEADKDEFCRCELKLQKWYGDLRGKPFAIEAENSILDISGFSKQYNCAFIWQKDGVKKLNLYLIINYFKGGKLRFKKIKPEAFEANRFYTVINKKSGEIVPMEVNFNFDDPNLIILPLAFGKRQGREFIWNDLLSLETGSLKLANGRVIEKTLYNRRTRQDEPALFVALTFERREVLDSSNIKPMNLIGVDRGENIPAVIALTDPEGCPLSRFKDSLGNPTHILRIGESYKEKQRTIQAKKEVEQRRAGGYSRKYASKAKNLADDMVRNTARDLLYYAVTQDAMLIFENLSRGFGRQGKRTFMAERQYTRMEDWLTAKLAYEGLPSKTYLSKTLAQYTSKTCSNCGFTITSADYDRVLEKLKKTATGWMTTINGKELKVEGQITYYNRYKRQNVVKDLSVELDRLSEESVNNDISSWTKGRSGEALSLLKKRFSHRPVQEKFVCLNCGFETHADEQAALNIARSWLFLRSQEYKKYQTNKTTGNTDKRAFVETWQSFYRKKLKEVWKPAV

SEQ ID NO: 487 - protein, 978 aa, synthetic construct
  REGION 1..978: note = CasX variant
QEIKRINKIRRRLVKDSNTKKAGKTGPMKTLLVRVMTPDLRERLENLRKKPENIPQPISNTSRANLNKLLTDYTEMKKAILHVYWEEFQKDPVGLMSRVAQPASKKIDQNKLKPEMDEKGNLTTAGFACSQCGQPLFVYKLEQVSEKGKAYTNYFGRCNVAEHEKLILLAQLKPEKDSDEAVTYSLGKFGQRALDFYSIHVTKESTHPVKPLAQIAGNRYASGPVGKALSDACMGTIASFLSKYQDIIIEHQKVVKGNQKRLESLRELAGKENLEYPSVTLPPQPHTKEGVDAYNEVIARVRKWVNLNLWQKLKLSRDDAKPLLRLKGFPSFPLVERQANEVDWWDMVCNVKKLINEKKEDGKVFWQNLAGYKRQEALRPYLSSEEDRKKGKKFARYQLGDLLLHLEKKHGEDWGKVYDEAWERIDKKVEGLSKHIKLEEERRSEDAQSKAALTDWLRAKASFVIEGLKEADKDEFCRCELKLQKWYGDLRGKPFAIEAENSILDISGFSKQYNCAFIWQKDGVKKLNLYLIINYFKGGKLRFKKIKPEAFEANRFYTVINKKSGEIVPMEVNFNFDDPNLIILPLAFGKRQGREFIWNDLLSLETGSLKLANGRVIEKTLYNRRTRQDEPALFVALTFERREVLDSSNIKPMNLIGVDRGENIPAVIALTDPEGCPLSRFKDSLGNPTHILRIGESYKEKQRTIQAKKEVEQRRAGGYSRKYASKAKNLADDMVRNTARDLLYYAVTQDAMLIFENLSRGFGRQGKRTFMAERQYTRMEDWLTAKLAYEGLPSKTYLSKTLAQYTSKTCSNCGFTITSADYDRVLEKLKKTATGWMTTINGKELKVEGQITYYNRYKRQNVVKDLSVELDRLSEESVNNDISSWTKGRSGEALSLLKKRFSHRPVQEKFVCLNCGFETHADEQAALNIARSWLFLRSQEYKKYQTNKTTGNTDKRAFVETWQSFYRKKLKEVWKPAV

SEQ ID NO: 488 - protein, 978 aa, synthetic construct
  REGION 1..978: note = CasX variant
QEIKRINKIRRRLVKDSNTKKAGKTGPMKTLLVRVMTPDLRERLENLRKKPENIPQPISNTSRANLNKLLTDYTEMKKAILHVYWEEFQKDPVGLMSRVAQPASKKIDQNKLKPEMDEKGNLTTAGFACSQCGQPLFVYKLEQVSEKGKAYTNYFGRCNVAEHEKLILLAQLKPEKDSDEAVTYSLGKFGQRALDFYSIHVTKESTHPVKPLAQIAGNRYASGPVGKALSDACMGTIASFLSKYQDIIIEHQKVVKGNQKRLESLRELAGKENLEYPSVTLPPQPHTKEGVDAYNEVIARVRMWVNLNLWQKLKLSRDDAKPLLRLKGFPSFPLVERQANEVDWWDMVCNVKKLINEKKEDGKVFWQNLAGYKRQEALRPYLSSEEDRKKGKKFARYQLGDLLLHLEKKHGEDWGKVYDEAWERIDKKVEGLSKHIKLEEERRSEDAQSKAALTDWLRAKASFVIEGLKEADKDEFRRCELKLQKWYGDLRGKPFAIEAENSILDISGFSKQYNCAFIWQKDGVKKLNLYLIINYFKGGKLRFKKIKPEAFEANRFYTVINKKSGEIVPMEVNFNFDDPNLIILPLAFGKRQGREFIWNDLLSLETGSLKLANGRVIEKTLYNRRTRQDEPALFVALTFERREVLDSSNIKPMNLIGVDRGENIPAVIALTDPEGCPLSRFKDSLGNPTHILRIGESYKEKQRTIQAKKEVEQRRAGGYSRKYASKAKNLADDMVRNTARDLLYYAVTQDAMLIFENLSRGFGRQGKRTFMAERQYTRMEDWLTAKLAYEGLPSKTYLSKTLAQYTSKTCSNCGFTITSADYDRVLEKLKKTATGWMTTINGKELKVEGQITYYNRYKRQNVVKDLSVELDRLSEESVNNDISSWTKGRSGEALSLLKKRFSHRPVQEKFVCLNCGFETHADEQAALNIARSWLFLRSQEYKKYQTNKTTGNTDKRAFVETWQSFYRKKLKEVWKPAV

SEQ ID NO: 489 - protein, 978 aa, synthetic construct
  REGION 1..978: note = CasX variant
QEIKRINKIRRRLVKDSNTKKAGKTGPMKTLLVRVMTPDLRERLENLRKKPENIPQPISNTSRANLNKLLTDYTEMKKAILHVYWEEFQKDPVGLMSRVAQPASKKIDQNKLKPEMDEKGNLTTAGFACSQCGQPLFVYKLEQVSEKGKAYTNYFGRCNVAEHEKLILLAQLKPEKDSDEAVTYSLGKFGQRALDFYSIHVTKESTHPVKPLAQIAGNRYASGPVGKALSDACMGTIASFLSKYQDIIIEHQKVVKGNQKRLESLRELAGKENLEYPSVTLPPQPHTKEGVDAYNEVIARVRMWVNLNLWQKLKLSRDDAKPLLRLKGFPSFPLVERQANEVDWWDMVCNVKKLINEKKEDGKVFWQNLAGYKRQEALRPYLSSEEDRKKGKKFARYQLGDLLLHLEKKHGEDWGKVYDEAWERIDKKVEGLSKHIKLEEERRSEDAQSKAALTDWLRAKASFVIEGLKEADKDEFKRCELKLQKWYGDLRGKPFAIEAENSILDISGFSKQYNCAFIWQKDGVKKLNLYLIINYFKGGKLRFKKIKPEAFEANRFYTVINKKSGEIVPMEVNFNFDDPNLIILPLAFGKRQGREFIWNDLLSLETGSLKLANGRVIEKTLYNRRTRQDEPALFVALTFERREVLDSSNIKPMNLIGVDRGENIPAVIALTDPEGCPLSRFKDSLGNPTHILRIGESYKEKQRTIQAKKEVEQRRAGGYSRKYASKAKNLADDMVRNTARDLLYYAVTQDAMLIFENLSRGFGRQGKRTFMAERQYTRMEDWLTAKLAYEGLPSKTYLSKTLAQYTSKTCSNCGFTITSADYDRVLEKLKKTATGWMTTINGKELKVEGQITYYNRYKRQNVVKDLSVELDRLSEESVNNDISSWTKGRSGEALSLLKKRFSHRPVQEKFVCLNCGFETHADEQAALNIARSWLFLRSQEYKKYQTNKTTGNTDKRAFVETWQSFYRKKLKEVWKPAV

SEQ ID NO: 490 - protein, 978 aa, synthetic construct
  REGION 1..978: note = CasX variant
QEIKRINKIRRRLVKDSNTKKAGKTGPMKTLLVRVMTPDLRERLENLRKKPENIPQPISNTSRANLNKLLTDYTEMKKAILHVYWEEFQKDPVGLMSRVAQPASKKIDQNKLKPEMDEKGNLTTAGFACSQCGQPLFVYKLEQVSEKGKAYTNYFGRCNVAEHEKLILLAQLKPEKDSDEAVTYSLGKFGQRALDFYSIHVTKESTHPVKPLAQIAGNRYASGPVGKALSDACMGTIASFLSKYQDIIIEHQKVVKGNQKRLESLRELAGKENLEYPSVTLPPQPHTKEGVDAYNEVIARVRMWVNLNLWQKLKLSRDDAKPLLRLKGFPSFPLVERQANEVDWWDMVCNVKKLINEKKEDGKVFWQNLAGYKRQEALRPYLSSEEDRKKGKKFARYQLGDLLLHLEKKHGEDWGKVYDEAWERIDKKVEGLSKHIKLEEERRSEDAQSKAALTDWLRAKASFVIEGLKEADKDEFCRCELKLQKWYGDLRGKPFAIEAENSILDISGFSKQYNCAFIWQKDGVKKLNLYLIINYFKGGKLRFKKIKPEAFEANRFYTVINKKSGEIVPMEVNFNFDDPNLIILPLAFGKRQGREFIWNDLLSLETGSLKLANGRVIEKTLYNRRTRQDEPALFVALTFERREVLDSSNIKPMNLIGVDRGENIPAVIALTDPEGCPLSRFKDSLGNPTHILRIGERYKEKQRTIQAKKEVEQRRAGGYSRKYASKAKNLADDMVRNTARDLLYYAVTQDAMLIFENLSRGFGRQGKRTFMAERQYTRMEDWLTAKLAYEGLPSKTYLSKTLAQYTSKTCSNCGFTITSADYDRVLEKLKKTATGWMTTINGKELKVEGQITYYNRYKRQNVVKDLSVELDRLSEESVNNDISSWTKGRSGEALSLLKKRFSHRPVQEKFVCLNCGFETHADEQAALNIARSWLFLRSQEYKKYQTNKTTGNTDKRAFVETWQSFYRKKLKEVWKPAV

SEQ ID NO: 491 - protein, 978 aa, synthetic construct
  REGION 1..978: note = CasX variant
QEIKRINKIRRRLVKDSNTKKAGKTGPMKTLLVRVMTPDLRERLENLRKKPENIPQPISNTSRANLNKLLTDYTEMKKAILHVYWEEFQKDPVGLMSRVAQPASKKIDQNKLKPEMDEKGNLTTAGFACSQCGQPLFVYKLEQVSEKGKAYTNYFGRCNVAEHEKLILLAQLKPEKDSDEAVTYSLGKFGQRALDFYSIHVTKESTHPVKPLAQIAGNRYASGPVGKALSDACMGTIASFLSKYQDIIIEHQKVVKGNQKRLESLRELAGKENLEYPSVTLPPQPHTKEGVDAYNEVIARVRMWVNLNLWQKLKLSRDDAKPLLRLKGFPSFPLVERQANEVDWWDMVCNVKKLINEKKEDGKVFWQNLAGYKRQEALRPYLSSEEDRKKGKKFARYQLGDLLLHLEKKHGEDWGKVYDEAWERIDKKVEGLSKHIKLEEERRSEDAQSKAALTDWLRAKASFVIEGLKEADKDEFCRCELKLQKWYGDLRGKPFAIEAENSILDISGFSKQYNCAFIWQKDGVKKLNLYLIINYFKGGKLRFKKIKPEAFEANRFYTVINKKSGEIVPMEVNFNFDDPNLIILPLAFGKRQGREFIWNDLLSLETGSLKLANGRVIEKTLYNRRTRQDEPALFVALTFERREVLDSSNIKPMNLIGVDRGENIPAVIALTDPEGCPLSRFKDSLGNPTHILRIGEKYKEKQRTIQAKKEVEQRRAGGYSRKYASKAKNLADDMVRNTARDLLYYAVTQDAMLIFENLSRGFGRQGKRTFMAERQYTRMEDWLTAKLAYEGLPSKTYLSKTLAQYTSKTCSNCGFTITSADYDRVLEKLKKTATGWMTTINGKELKVEGQITYYNRYKRQNVVKDLSVELDRLSEESVNNDISSWTKGRSGEALSLLKKRFSHRPVQEKFVCLNCGFETHADEQAALNIARSWLFLRSQEYKKYQTNKTTGNTDKRAFVETWQSFYRKKLKEVWKPAV

SEQ ID NO: 492 - protein, 977 aa, synthetic construct
  REGION 1..977: note = CasX variant
QEIKRINKIRRRLVKDSNTKKAGKTGPMKTLLVRVMTPDLRERLENLRKKPENIPQPISNTSRANLNKLLTDYTEMKKAILHVYWEEFQKDPVGLMSRVAQPASKKIDQNKLKPEMDEKGNLTTAGFACSQCGQPLFVYKLEQVSEKGKAYTNYFGRCNVAEHEKLILLAQLKPEKDSDEAVTYSLGKFGQRALDFYSIHVTKESTHPVKPLAQIAGNRYASGPVGKALSDACMGTIASFLSKYQDIIIEHQKVVKGNQKRLESLRELAGKENLEYPSVTLPPQPHTKEGVDAYNEVIARVRMWVNLNLWQKLKLSRDDAKPLLRLKGFPSFPLVERQANEVDWWDMVCNVKKLINEKKEDGKVFWQNLAGYKRQEALRPYLSSEEDRKKGKKFARYQLGDLLLHLEKKHGEDWGKVYDEAWERIDKKVEGLSKHIKLEEERRSEDAQSKAALTDWLRAKASFVIEGLKEADKDEFCRCELKLQKWYGDLRGKPFAIEAENILDISGFSKQYNCAFIWQKDGVKKLNLYLIINYFKGGKLRFKKIKPEAFEANRFYTVINKKSGEIVPMEVNFNFDDPNLIILPLAFGKRQGREFIWNDLLSLETGSLKLANGRVIEKTLYNRRTRQDEPALFVALTFERREVLDSSNIKPMNLIGVDRGENIPAVIALTDPEGCPLSRFKDSLGNPTHILRIGESYKEKQRTIQAKKEVEQRRAGGYSRKYASKAKNLADDMVRNTARDLLYYAVTQDAMLIFENLSRGFGRQGKRTFMAERQYTRMEDWLTAKLAYEGLPSKTYLSKTLAQYTSKTCSNCGFTITSADYDRVLEKLKKTATGWMTTINGKELKVEGQITYYNRYKRQNVVKDLSVELDRLSEESVNNDISSWTKGRSGEALSLLKKRFSHRPVQEKFVCLNCGFETHADEQAALNIARSWLFLRSQEYKKYQTNKTTGNTDKRAFVETWQSFYRKKLKEVWKPAV

SEQ ID NO: 493 - protein, 977 aa, synthetic construct
  REGION 1..977: note = CasX variant
QEIKRINKIRRRLVKDSNTKKAGKTGPMKTLLVRVMTPDLRERLENLRKKPENIPQPISNTSRANLNKLLTDYTEMKKAILHVYWEEFQKDPVGLMSRVAQPASKKIDQNKLKPEMDEKGNLTTAGFACSQCGQPLFVYKLEQVSEKGKAYTNYFGRCNVAEHEKLILLAQLKPEKDSDEAVTYSLGKFGQRALDFYSIHVTKESTHPVKPLAQIAGNRYASGPVGKALSDACMGTIASFLSKYQDIIIEHQKVVKGNQKRLESLRELAGKENLEYPSVTLPPQPHTKEGVDAYNEVIARVRMWVNLNLWQKLKLSRDDAKPLLRLKGFPSFPLVERQANEVDWWDMVCNVKKLINEKKEDGKVFWQNLAGYKRQEALRPYLSSEEDRKKGKKFARYQLGDLLLHLEKKHGEDWGKVYDEAWERIDKKVEGLSKHIKLEEERRSEDAQSKAALTDWLRAKASFVIEGLKEADKDEFCRCELKLQKWYGDLRGKPFAIEAENSIDISGFSKQYNCAFIWQKDGVKKLNLYLIINYFKGGKLRFKKIKPEAFEANRFYTVINKKSGEIVPMEVNFNFDDPNLIILPLAFGKRQGREFIWNDLLSLETGSLKLANGRVIEKTLYNRRTRQDEPALFVALTFERREVLDSSNIKPMNLIGVDRGENIPAVIALTDPEGCPLSRFKDSLGNPTHILRIGESYKEKQRTIQAKKEVEQRRAGGYSRKYASKAKNLADDMVRNTARDLLYYAVTQDAMLIFENLSRGFGRQGKRTFMAERQYTRMEDWLTAKLAYEGLPSKTYLSKTLAQYTSKTCSNCGFTITSADYDRVLEKLKKTATGWMTTINGKELKVEGQITYYNRYKRQNVVKDLSVELDRLSEESVNNDISSWTKGRSGEALSLLKKRFSHRPVQEKFVCLNCGFETHADEQAALNIARSWLFLRSQEYKKYQTNKTTGNTDKRAFVETWQSFYRKKLKEVWKPAV

SEQ ID NO: 494 - protein, 978 aa, synthetic construct
  REGION 1..978: note = CasX variant
QEIKRINKIRRRLVKDSNTKKAGKTGPMKTLLVRVMTPDLRERLENLRKKPENIPQPISNTSRANLNKLLTDYTEMKKAILHVYWEEFQKDPVGLMSRVAQPASKKIDQNKLKPEMDEKGNLTTAGFACSQCGQPLFVYKLEQVSEKGKAYTNYFGRCNVAEHEKLILLAQLKPEKDSDEAVTYSLGKFGQRALDFYSIHVTKESTHPVKPLAQIAGNRYASGPVGKALSDACMGTIASFLSKYQDIIIEHQKVVKGNQKRLESLRELAGKENLEYPSVTLPPQPHTKEGVDAYNEVIARVRMWVNLNLWQKLKLSRDDAKPLLRLKGFPSFPLVERQANEVDWWDMVCNVKKLINEKKEDGKVFWQNLAGYKRQEALRPYLSSEEDRKKGKKFARYQLGDLLLHLEKKHGEDWGKVYDEAWERIDKKVEGLSKHIKLEEERRSEDAQSKAALTDWLRAKASFVIEGLKEADKDEFCRCELKLQKWYGDLRGKPFAIEAENSRLDISGFSKQYNCAFIWQKDGVKKLNLYLIINYFKGGKLRFKKIKPEAFEANRFYTVINKKSGEIVPMEVNFNFDDPNLIILPLAFGKRQGREFIWNDLLSLETGSLKLANGRVIEKTLYNRRTRQDEPALFVALTFERREVLDSSNIKPMNLIGVDRGENIPAVIALTDPEGCPLSRFKDSLGNPTHILRIGESYKEKQRTIQAKKEVEQRRAGGYSRKYASKAKNLADDMVRNTARDLLYYAVTQDAMLIFENLSRGFGRQGKRTFMAERQYTRMEDWLTAKLAYEGLPSKTYLSKTLAQYTSKTCSNCGFTITSADYDRVLEKLKKTATGWMTTINGKELKVEGQITYYNRYKRQNVVKDLSVELDRLSEESVNNDISSWTKGRSGEALSLLKKRFSHRPVQEKFVCLNCGFETHADEQAALNIARSWLFLRSQEYKKYQTNKTTGNTDKRAFVETWQSFYRKKLKEVWKPAV

SEQ ID NO: 495 - protein, 978 aa, synthetic construct
  REGION 1..978: note = CasX variant
QEIKRINKIRRRLVKDSNTKKAGKTGPMKTLLVRVMTPDLRERLENLRKKPENIPQPISNTSRANLNKLLTDYTEMKKAILHVYWEEFQKDPVGLMSRVAQPASKKIDQNKLKPEMDEKGNLTTAGFACSQCGQPLFVYKLEQVSEKGKAYTNYFGRCNVAEHEKLILLAQLKPEKDSDEAVTYSLGKFGQRALDFYSIHVTKESTHPVKPLAQIAGNRYASGPVGKALSDACMGTIASFLSKYQDIIIEHQKVVKGNQKRLESLRELAGKENLEYPSVTLPPQPHTKEGVDAYNEVIARVRMWVNLNLWQKLKLSRDDAKPLLRLKGFPSFPLVERQANEVDWWDMVCNVKKLINEKKEDGKVFWQNLAGYKRQEALRPYLSSEEDRKKGKKFARYQLGDLLLHLEKKHGEDWGKVYDEAWERIDKKVEGLSKHIKLEEERRSEDAQSKAALTDWLRAKASFVIEGLKEADKDEFCRCELKLQKWYGDLRGKPFAIEAENSKLDISGFSKQYNCAFIWQKDGVKKLNLYLIINYFKGGKLRFKKIKPEAFEANRFYTVINKKSGEIVPMEVNFNFDDPNLIILPLAFGKRQGREFIWNDLLSLETGSLKLANGRVIEKTLYNRRTRQDEPALFVALTFERREVLDSSNIKPMNLIGVDRGENIPAVIALTDPEGCPLSRFKDSLGNPTHILRIGESYKEKQRTIQAKKEVEQRRAGGYSRKYASKAKNLADDMVRNTARDLLYYAVTQDAMLIFENLSRGFGRQGKRTFMAERQYTRMEDWLTAKLAYEGLPSKTYLSKTLAQYTSKTCSNCGFTITSADYDRVLEKLKKTATGWMTTINGKELKVEGQITYYNRYKRQNVVKDLSVELDRLSEESVNNDISSWTKGRSGEALSLLKKRFSHRPVQEKFVCLNCGFETHADEQAALNIARSWLFLRSQEYKKYQTNKTTGNTDKRAFVETWQSFYRKKLKEVWKPAV

SEQ ID NO: 496 - protein, 978 aa, synthetic construct
  REGION 1..978: note = CasX variant
QEIKRINKIRRRLVKDSNTKKAGKTGPMKTLLVRVMTPDLRERLENLRKKPENIPQPISNTSRANLNKLLTDYTEMKKAILHVYWEEFQKDPVGLMSRVAQPASKKIDQNKLKPEMDEKGNLTTAGFACSQCGQPLFVYKLEQVSEKGKAYTNYFGRCNVAEHEKLILLAQLKPEKDSDEAVTYSLGKFGQRALDFYSIHVTKESTHPVKPLAQIAGNRYASGPVGKALSDACMGTIASFLSKYQDIIIEHQKVVKGNQKRLESLRELAGKENLEYPSVTLPPQPHTKEGVDAYNEVIARVRMWVNLNLWQKLKLSRDDAKPLLRLKGFPSFPLVERQANEVDWWDMVCNVKKLINEKKEDGKVFWQNLAGYKRQEALRPYLSSEEDRKKGKKFARYQLGDLLLHLEKKHGEDWGKVYDEAWERIDKKVEGLSKHIKLEEERRSEDAQSKAALTDWLRAKASFVIEGLKEADKDEFCRCELKLQKWYGDLRGKPFAIEAENSILDISGFSKQYNCAFIWQKDGVKKLNLYLIINYFKGGKLRFKKIKPEAFEANRFYTVINKKSGEIVPMEVNFNFDDPNLIILPLAFGKRQGREFIWNDLLSLETGSLQLANGRVIEKTLYNRRTRQDEPALFVALTFERREVLDSSNIKPMNLIGVDRGENIPAVIALTDPEGCPLSRFKDSLGNPTHILRIGESYKEKQRTIQAKKEVEQRRAGGYSRKYASKAKNLADDMVRNTARDLLYYAVTQDAMLIFENLSRGFGRQGKRTFMAERQYTRMEDWLTAKLAYEGLPSKTYLSKTLAQYTSKTCSNCGFTITSADYDRVLEKLKKTATGWMTTINGKELKVEGQITYYNRYKRQNVVKDLSVELDRLSEESVNNDISSWTKGRSGEALSLLKKRFSHRPVQEKFVCLNCGFETHADEQAALNIARSWLFLRSQEYKKYQTNKTTGNTDKRAFVETWQSFYRKKLKEVWKPAV

SEQ ID NO: 497 - protein, 978 aa, synthetic construct
  REGION 1..978: note = CasX variant
QEIKRINKIRRRLVKDSNTKKAGKTGPMKTLLVRVMTPDLRERLENLRKKPENIPQPISNTSRANLNKLLTDYTEMKKAILHVYWEEFQKDPVGLMSRVAQPASKKIDQNKLKPEMDEKGNLTTAGFACSQCGQPLFVYKLEQVSEKGKAYTNYFGRCNVAEHEKLILLAQLKPEKDSDEAVTYSLGKFGQRALDFYSIHVTKESTHPVKPLAQIAGNRYASGPVGKALSDACMGTIASFLSKYQDIIIEHQKVVKGNQKRLESLRELAGKENLEYPSVTLPPQPHTKEGVDAYNEVIARVRMWVNLNLWQKLKLSRDDAKPLLRLKGFPSFPLVERQANEVDWWDMVCNVKKLINEKKEDGKVFWQNLAGYKRQEALRPYLSSEEDRKKGKKFARYQLGDLLLHLEKKHGEDWGKVYDEAWERIDKKVEGLSKHIKLEEERRSEDAQSKAALTDWLRAKASFVIEGLKEADKDEFCRCELKLQKWYGDLRGKPFAIEAENSILDISGFSKQYNCAFIWQKDGVKKLNLYLIINYFKGGKLRFKKIKPEAFEANRFYTVINKKSGEIVPMEVNFNFDDPNLIILPLAFGKRQGREFIWNDLLSLETGSLKLANGQVIEKTLYNRRTRQDEPALFVALTFERREVLDSSNIKPMNLIGVDRGENIPAVIALTDPEGCPLSRFKDSLGNPTHILRIGESYKEKQRTIQAKKEVEQRRAGGYSRKYASKAKNLADDMVRNTARDLLYYAVTQDAMLIFENLSRGFGRQGKRTFMAERQYTRMEDWLTAKLAYEGLPSKTYLSKTLAQYTSKTCSNCGFTITSADYDRVLEKLKKTATGWMTTINGKELKVEGQITYYNRYKRQNVVKDLSVELDRLSEESVNNDISSWTKGRSGEALSLLKKRFSHRPVQEKFVCLNCGFETHADEQAALNIARSWLFLRSQEYKKYQTNKTTGNTDKRAFVETWQSFYRKKLKEVWKPAV

SEQ ID NO: 498 - protein, 978 aa, synthetic construct
  REGION 1..978: note = CasX variant
QEIKRINKIRRRLVKDSNTKKAGKTGPMKTLLVRVMTPDLRERLENLRKKPENIPQPISNTSRANLNKLLTDYTEMKKAILHVYWEEFQKDPVGLMSRVAQPASKKIDQNKLKPEMDEKGNLTTAGFACSQCGQPLFVYKLEQVSEKGKATTNYFGRCNVAEHEKLILLAQLKPEKDSDEAVTYSLGKFGQRALDFYSIHVTKESTHPVKPLAQIAGNRYASGPVGKALSDACMGTIASFLSKYQDIIIEHQKVVKGNQKRLESLRELAGKENLEYPSVTLPPQPHTKEGVDAYNEVIARVRMWVNLNLWQKLKLSRDDAKPLLRLKGFPSFPLVERQANEVDWWDMVCNVKKLINEKKEDGKVFWQNLAGYKRQEALRPYLSSEEDRKKGKKFARYQLGDLLLHLEKKHGEDWGKVYDEAWERIDKKVEGLSKHIKLEEERRSEDAQSKAALTDWLRAKASFVIEGLKEADKDEFCRCELKLQKWYGDLRGKPFAIEAENSILDISGFSKQYNCAFIWQKDGVKKLNLYLIINYFKGGKLRFKKIKPEAFEANRFYTVINKKSGEIVPMEVNFNFDDPNLIILPLAFGKRQGREFIWNDLLSLETGSLKLANGRVIEKTLYNRRTRQDEPALFVALTFERREVLDSSNIKPMNLIGVDRGENIPAVIALTDPEGCPLSRFKDSLGNPTHILRIGESYKEKQRTIQAKKEVEQRRAGGYSRKYASKAKNLADDMVRNTARDLLYYAVTQDAMLIFENLSRGFGRQGKRTFMAERQYTRMEDWLTAKLAYEGLPSKTYLSKTLAQYTSKTCSNCGFTITSADYDRVLEKLKKTATGWMTTINGKELKVEGQITYYNRYKRQNVVKDLSVELDRLSEESVNNDISSWTKGRSGEALSLLKKRFSHRPVQEKFVCLNCGFETHADEQAALNIARSWLFLRSQEYKKYQTNKTTGNTDKRAFVETWQSFYRKKLKEVWKPAV

SEQ ID NO: 499 - protein, 978 aa, synthetic construct
  REGION 1..978: note = CasX variant
QEIKRINKIRRRLVKDSNTKKAGKTGPMKTLLVRVMTPDLRERLENLRKKPENIPQPISNTSRANLNKLLTDYTEMKKAILHVYWEEFQKDPVGLMSRVAQPASKKIDQNKLKPEMDEKGNLTTAGFACSQCGQPLFVYKLEQVSEKGKAYTNYFGRCNVAEHEKLILLAQLKPEKDSDEAVTYSLGQFGQRALDFYSIHVTKESTHPVKPLAQIAGNRYASGPVGKALSDACMGTIASFLSKYQDIIIEHQKVVKGNQKRLESLRELAGKENLEYPSVTLPPQPHTKEGVDAYNEVIARVRMWVNLNLWQKLKLSRDDAKPLLRLKGFPSFPLVERQANEVDWWDMVCNVKKLINEKKEDGKVFWQNLAGYKRQEALRPYLSSEEDRKKGKKFARYQLGDLLLHLEKKHGEDWGKVYDEAWERIDKKVEGLSKHIKLEEERRSEDAQSKAALTDWLRAKASFVIEGLKEADKDEFCRCELKLQKWYGDLRGKPFAIEAENSILDISGFSKQYNCAFIWQKDGVKKLNLYLIINYFKGGKLRFKKIKPEAFEANRFYTVINKKSGEIVPMEVNFNFDDPNLIILPLAFGKRQGREFIWNDLLSLETGSLKLANGRVIEKTLYNRRTRQDEPALFVALTFERREVLDSSNIKPMNLIGVDRGENIPAVIALTDPEGCPLSRFKDSLGNPTHILRIGESYKEKQRTIQAKKEVEQRRAGGYSRKYASKAKNLADDMVRNTARDLLYYAVTQDAMLIFENLSRGFGRQGKRTFMAERQYTRMEDWLTAKLAYEGLPSKTYLSKTLAQYTSKTCSNCGFTITSADYDRVLEKLKKTATGWMTTINGKELKVEGQITYYNRYKRQNVVKDLSVELDRLSEESVNNDISSWTKGRSGEALSLLKKRFSHRPVQEKFVCLNCGFETHADEQAALNIARSWLFLRSQEYKKYQTNKTTGNTDKRAFVETWQSFYRKKLKEVWKPAV

SEQ ID NO: 500 - protein, 978 aa, synthetic construct
  REGION 1..978: note = CasX variant
QEIKRINKIRRRLVKDSNTKKAGKTGPMKTLLVRVMTPDLRERLENLRKKPENIPQPISNTSRANLNKLLTDYTEMKKAILHVYWEEFQKDPVGLMSRVAQPASKKIDQNKLKPEMDEKGNLTTAGFACSQCGQPLFVYKLEQVSEKGKAYTNYFGRCNVAEHEKLILLAQLKPEKDSDEAVTYSLGKFQQRALDFYSIHVTKESTHPVKPLAQIAGNRYASGPVGKALSDACMGTIASFLSKYQDIIIEHQKVVKGNQKRLESLRELAGKENLEYPSVTLPPQPHTKEGVDAYNEVIARVRMWVNLNLWQKLKLSRDDAKPLLRLKGFPSFPLVERQANEVDWWDMVCNVKKLINEKKEDGKVFWQNLAGYKRQEALRPYLSSEEDRKKGKKFARYQLGDLLLHLEKKHGEDWGKVYDEAWERIDKKVEGLSKHIKLEEERRSEDAQSKAALTDWLRAKASFVIEGLKEADKDEFCRCELKLQKWYGDLRGKPFAIEAENSILDISGFSKQYNCAFIWQKDGVKKLNLYLIINYFKGGKLRFKKIKPEAFEANRFYTVINKKSGEIVPMEVNFNFDDPNLIILPLAFGKRQGREFIWNDLLSLETGSLKLANGRVIEKTLYNRRTRQDEPALFVALTFERREVLDSSNIKPMNLIGVDRGENIPAVIALTDPEGCPLSRFKDSLGNPTHILRIGESYKEKQRTIQAKKEVEQRRAGGYSRKYASKAKNLADDMVRNTARDLLYYAVTQDAMLIFENLSRGFGRQGKRTFMAERQYTRMEDWLTAKLAYEGLPSKTYLSKTLAQYTSKTCSNCGFTITSADYDRVLEKLKKTATGWMTTINGKELKVEGQITYYNRYKRQNVVKDLSVELDRLSEESVNNDISSWTKGRSGEALSLLKKRFSHRPVQEKFVCLNCGFETHADEQAALNIARSWLFLRSQEYKKYQTNKTTGNTDKRAFVETWQSFYRKKLKEVWKPAV

SEQ ID NO: 501 - protein, 978 aa, synthetic construct; identical to SEQ ID NO: 261
  REGION 1..978: note = CasX variant

SEQ ID NO: 502 - protein, 978 aa, synthetic construct
  REGION 1..978: note = CasX variant
QEIKPINKIRRRLVKDSNTKKAGKTGPMKTLLVRVMTPDLRERLENLRKKPENIPQPISNTSRANLNKLLTDYTEMKKAILHVYWEEFQKDPVGLMSRVAQPASKKIDQNKLKPEMDEKGNLTTAGFACSQCGQPLFVYKLEQVSEKGKAYTNYFGRCNVAEHEKLILLAQLKPEKDSDEAVTYSLGKFGQRALDFYSIHVTKESTHPVKPLAQIAGNRYASGPVGKALSDACMGTIASFLSKYQDIIIEHQKVVKGNQKRLESLRELAGKENLEYPSVTLPPQPHTKEGVDAYNEVIARVRMWVNLNLWQKLKLSRDDAKPLLRLKGFPSFPLVERQANEVDWWDMVCNVKKLINEKKEDGKVFWQNLAGYKRQEALRPYLSSEEDRKKGKKFARYQLGDLLLHLEKKHGEDWGKVYDEAWERIDKKVEGLSKHIKLEEERRSEDAQSKAALTDWLRAKASFVIEGLKEADKDEFCRCELKLQKWYGDLRGKPFAIEAENSILDISGFSKQYNCAFIWQKDGVKKLNLYLIINYFKGGKLRFKKIKPEAFEANRFYTVINKKSGEIVPMEVNFNFDDPNLIILPLAFGKRQGREFIWNDLLSLETGSLKLANGRVIEKTLYNRRTRQDEPALFVALTFERREVLDSSNIKPMNLIGVDRGENIPAVIALTDPEGCPLSRFKDSLGNPTHILRIGESYKEKQRTIQAKKEVEQRRAGGYSRKYASKAKNLADDMVRNTARDLLYYAVTQDAMLIFENLSRGFGRQGKRTFMAERQYTRMEDWLTAKLAYEGLPSKTYLSKTLAQYTSKTCSNCGFTITSADYDRVLEKLKKTATGWMTTINGKELKVEGQITYYNRYKRQNVVKDLSVELDRLSEESVNNDISSWTKGRSGEALSLLKKRFSHRPVQEKFVCLNCGFETHADEQAALNIARSWLFLRSQEYKKYQTNKTTGNTDKRAFVETWQSFYRKKLKEVWKPAV

SEQ ID NO: 503 - protein, 978 aa, synthetic construct
  REGION 1..978: note = CasX variant
QEIWRINKIRRRLVKDSNTKKAGKTGPMKTLLVRVMTPDLRERLENLRKKPENIPQPISNTSRANLNKLLTDYTEMKKAILHVYWEEFQKDPVGLMSRVAQPASKKIDQNKLKPEMDEKGNLTTAGFACSQCGQPLFVYKLEQVSEKGKAYTNYFGRCNVAEHEKLILLAQLKPEKDSDEAVTYSLGKFGQRALDFYSIHVTKESTHPVKPLAQIAGNRYASGPVGKALSDACMGTIASFLSKYQDIIIEHQKVVKGNQKRLESLRELAGKENLEYPSVTLPPQPHTKEGVDAYNEVIARVRMWVNLNLWQKLKLSRDDAKPLLRLKGFPSFPLVERQANEVDWWDMVCNVKKLINEKKEDGKVFWQNLAGYKRQEALRPYLSSEEDRKKGKKFARYQLGDLLLHLEKKHGEDWGKVYDEAWERIDKKVEGLSKHIKLEEERRSEDAQSKAALTDWLRAKASFVIEGLKEADKDEFCRCELKLQKWYGDLRGKPFAIEAENSILDISGFSKQYNCAFIWQKDGVKKLNLYLIINYFKGGKLRFKKIKPEAFEANRFYTVINKKSGEIVPMEVNFNFDDPNLIILPLAFGKRQGREFIWNDLLSLETGSLKLANGRVIEKTLYNRRTRQDEPALFVALTFERREVLDSSNIKPMNLIGVDRGENIPAVIALTDPEGCPLSRFKDSLGNPTHILRIGESYKEKQRTIQAKKEVEQRRAGGYSRKYASKAKNLADDMVRNTARDLLYYAVTQDAMLIFENLSRGFGRQGKRTFMAERQYTRMEDWLTAKLAYEGLPSKTYLSKTLAQYTSKTCSNCGFTITSADYDRVLEKLKKTATGWMTTINGKELKVEGQITYYNRYKRQNVVKDLSVELDRLSEESVNNDISSWTKGRSGEALSLLKKRFSHRPVQEKFVCLNCGFETHADEQAALNIARSWLFLRSQEYKKYQTNKTTGNTDKRAFVETWQSFYRKKLKEVWKPAV

SEQ ID NO: 504 - protein, 978 aa, synthetic construct; identical to SEQ ID NO: 255
  REGION 1..978: note = CasX variant

SEQ ID NO: 505 - protein, 979 aa, synthetic construct
  REGION 1..979: note = CasX variant
QEIKRINKIRRRLVKDSNTKKAGKTGPMKTLLVRVMTPDLRERLENLRKKPENIPQPISNTSRANLNKLLTDYTEMKKAILHVYWEEFQKDPVGLMSRVAQPASKKIDQNKLKPEMDEKGNLTTAGFACSQCGQPLFVYKLEQVSEKGKAYTNYFGRCNVAEHEKLILLAQLKPEKDSDEAVTYSLGKFGQRALDFYSIHVTKESTHPVKPLAQIAGNRYASGPVGKALSDACMGTIASFLSKYQDIIIEHQKVVKGNQKRLESLRELAGKENLEYPSVTLPPQPHTKEGVDAYNEVIARVRMWVNLNLWQKLKLSRDDAKPLLRLKGFPSFPLVERQANEVDWWDMVCNVKKLINEKKEDGKVFWQNLAGYKRQEALRPYLSSEEDRKKGKKFARYQLGDLLLHLEKKHGEDWGKVYDEAWERIDKKVEGLSKHIKLEEERRSEDAQSKAALTDWLRAKASFVIEGLKEADKDEFCRCELKLQKWYGDLRGKPFAIEAENSILDISGFSKQYNCAFIWQKDGVKKLNLYLIINYFKGGKLRFKKIKPEAFEANRFYTVINKKSGEIVPMEVNFNFDDPNLIILPLAFGKRQGREFIWNDLLSLETGSLKLANGRVIEKTLYNRRTRQDEPALFVALTFERAREVLDSSNIKPMNLIGVDRGENIPAVIALTDPEGCPLSRFKDSLGNPTHILRIGESYKEKQRTIQAKKEVEQRRAGGYSRKYASKAKNLADDMVRNTARDLLYYAVTQDAMLIFENLSRGFGRQGKRTFMAERQYTRMEDWLTAKLAYEGLPSKTYLSKTLAQYTSKTCSNCGFTITSADYDRVLEKLKKTATGWMTTINGKELKVEGQITYYNRYKRQNVVKDLSVELDRLSEESVNNDISSWTKGRSGEALSLLKKRFSHRPVQEKFVCLNCGFETHADEQAALNIARSWLFLRSQEYKKYQTNKTTGNTDKRAFVETWQSFYRKKLKEVWKPAV

SEQ ID NO: 506 - protein, 978 aa, synthetic construct
  REGION 1..978: note = CasX variant
QEIKRINKIRRRLVKDSNTKKAGKTGPMKTLLVRVMTPDLRERLENLRKKPENIPQPISNTSRANLNKLLTDYTEMKKAILHVYWEEFQKDPVGLMSRVAQPASKKIDQNKLKPEMDEKGNLTTAGFACSQCGQPLFVYKLEQVSEKGKAYTNYFGRCNVAEHEKLILLAQLKPEKDSDEAVTYSLGKFGQRALDFYSIHVTKESTHPVKPLAQIAGNRYASGPVGKALSDACMLTIASFLSKYQDIIIEHQKVVKGNQKRLESLRELAGKENLEYPSVTLPPQPHTKEGVDAYNEVIARVRMWVNLNLWQKLKLSRDDAKPLLRLKGFPSFPLVERQANEVDWWDMVCNVKKLINEKKEDGKVFWQNLAGYKRQEALRPYLSSEEDRKKGKKFARYQLGDLLLHLEKKHGEDWGKVYDEAWERIDKKVEGLSKHIKLEEERRSEDAQSKAALTDWLRAKASFVIEGLKEADKDEFCRCELKLQKWYGDLRGKPFAIEAENSILDISGFSKQYNCAFIWQKDGVKKLNLYLIINYFKGGKLRFKKIKPEAFEANRFYTVINKKSGEIVPMEVNFNFDDPNLIILPLAFGKRQGREFIWNDLLSLETGSLKLANGRVIEKTLYNRRTRQDEPALFVALTFERREVLDSSNIKPMNLIGVDRGENIPAVIALTDPEGCPLSRFKDSLGNPTHILRIGESYKEKQRTIQAKKEVEQRRAGGYSRKYASKAKNLADDMVRNTARDLLYYAVTQDAMLIFENLSRGFGRQGKRTFMAERQYTRMEDWLTAKLAYEGLPSKTYLSKTLAQYTSKTCSNCGFTITSADYDRVLEKLKKTATGWMTTINGKELKVEGQITYYNRYKRQNVVKDLSVELDRLSEESVNNDISSWTKGRSGEALSLLKKRFSHRPVQEKFVCLNCGFETHADEQAALNIARSWLFLRSQEYKKYQTNKTTGNTDKRAFVETWQSFYRKKLKEVWKPAV

SEQ ID NO: 507 - protein, 978 aa, synthetic construct
  REGION 1..978: note = CasX variant
QEIKRINKIRRRLVKDSNTKKAGKTGPMKTLLVRVMTPDLRERLENLRKKPENIPQPISNTSRANLNKLLTDYTEMKKAILHVYWEEFQKDPVGLMSRVAQPASKKIDQNKLKPEMDEKGNLTTAGFACSQCGQPLFVYKLEQVSEKGKAYTNYFGRCNVAEHEKLILLAQLKPEKDSDEAVTYSLGKFGQRALDFYSIHVTKESTHPVKPLAQIAGNRYASGPVGKALSDACMHTIASFLSKYQDIIIEHQKVVKGNQKRLESLRELAGKENLEYPSVTLPPQPHTKEGVDAYNEVIARVRMWVNLNLWQKLKLSRDDAKPLLRLKGFPSFPLVERQANEVDWWDMVCNVKKLINEKKEDGKVFWQNLAGYKRQEALRPYLSSEEDRKKGKKFARYQLGDLLLHLEKKHGEDWGKVYDEAWERIDKKVEGLSKHIKLEEERRSEDAQSKAALTDWLRAKASFVIEGLKEADKDEFCRCELKLQKWYGDLRGKPFAIEAENSILDISGFSKQYNCAFIWQKDGVKKLNLYLIINYFKGGKLRFKKIKPEAFEANRFYTVINKKSGEIVPMEVNFNFDDPNLIILPLAFGKRQGREFIWNDLLSLETGSLKLANGRVIEKTLYNRRTRQDEPALFVALTFERREVLDSSNIKPMNLIGVDRGENIPAVIALTDPEGCPLSRFKDSLGNPTHILRIGESYKEKQRTIQAKKEVEQRRAGGYSRKYASKAKNLADDMVRNTARDLLYYAVTQDAMLIFENLSRGFGRQGKRTFMAERQYTRMEDWLTAKLAYEGLPSKTYLSKTLAQYTSKTCSNCGFTITSADYDRVLEKLKKTATGWMTTINGKELKVEGQITYYNRYKRQNVVKDLSVELDRLSEESVNNDISSWTKGRSGEALSLLKKRFSHRPVQEKFVCLNCGFETHADEQAALNIARSWLFLRSQEYKKYQTNKTTGNTDKRAFVETWQSFYRKKLKEVWKPAV

SEQ ID NO: 508 - protein, 978 aa, synthetic construct
  REGION 1..978: note = CasX variant
QEIKRINKIRRRLVKDSNTKKAGKTGPMKTLLVRVMTPDLRERLENLRKKPENIPQPISNTSRANLNKLLTDYTEMKKAILHVYWEEFQKDPVGLMSRVAQPASKKIDQNKLKPEMDEKGNLTTAGFACSQCGQPLFVYKLEQVSEKGKAYTNYFGRCNVAEHEKLILLAQLKPEKDSDEAVTYSLGKFGQRALDFYSIHVTKESTHPVKPLAQIAGNRYASGPVGKALSDACMGTIASFLSKYQDIIIEHQKVVKGNQKRLESLRELAGKENLEYPSVTLPPQPHTKEGVDAYNEVIARVRMWVNLNLWQKLKLSRDDAKPLLRLKGFPSFPLVERQANEVDWWDMVCNVKKLINEKKEDGKVFWQNLAGYKRQEALRPYLSSEEDRKKGKKFARYQLGDLLLHLEKKHGEDWGKVYDEAWERIDKKVEGLSKHIKLEEERRSEDAQSKAALTDWLRAKASFVIEGLKEADKDEFCRCELKLQKWYGDLRGKPFAIEAENSILDISGFSKQYNCAFIWQKDGVKKLNLYLIINYFKGGKLRFKKIKPEAFEANRFYTVINKKSGEIVPMEVNFNFDDPNLIILPLAFGKRQGREFIWNDLLSLETGSLKLANGRVIEKTLYNRRTRQDEPALFVALTFERREVLDSSNIKPMNLIGVDRGENIPAVIALTDPEGCPLSRFKDSLGNPTHILRIGESYKEKQRTIQAKKEVEQRRAGGYSRKYASKAKNLADDMVRNTARDLLYYAVTQDAMLIFENLSRGFGRQGKRTFMAERQYTRMEDWLTAKLAYEGLPSKTYLSKTLAQYTSKTCSNCGFTITSADYDRVLEKLKKTATGWMTTINGKELKVEGQITYYNRYKRQNVVKDLSVELDRLSEESVNNDISSWTKGRSGEALSLLKKRFSHRPTQEKFVCLNCGFETHADEQAALNIARSWLFLRSQEYKKYQTNKTTGNTDKRAFVETWQSFYRKKLKEVWKPAV

SEQ ID NO: 509 - protein, 978 aa, synthetic construct
  REGION 1..978: note = CasX variant
QEIKRINKIRRRLVKDSNTKKAGKTGPMKTLLVRVMTPDLRERLENLRKKPENIPQPISNTSRANLNKLLTDYTEMKKAILHVYWEEFQKDPVGLMSRVAQPASKKIDQNKLKPEMDEKGNLTTAGFACSQCGQPLFVYKLEQVSEKGKAYTNYFGRCNVAEHEKLILLAQLKPEKDSDEAVTYSLGKFGQRALDFYSIHVTKESTHPVKPLAQIAGNRYASGPVGKALSDACMGTIASFLSKYQDIIIEHQKVVKGNQKRLESLRELAGKENLEYPSVTLPPQPHTKEGVDAYNEVIARVRMWVNLNLWQKLKLSRDDAKPLLRLKGFPSFPLVERQANEVDWWDMVCNVKKLINEKKEDGKVFWQNLAGYKRQEALRPYLSSEEDRKKGKKFARYQLGDLLLHLEKKHGEDWGKVYDEAWERIDKKVEGLSKHIKLEEERRSEDAQSKAALTDWLRAKASFVIEGLKEADKDEFCRCELKLQKWYGDLRGKPFAIEAENSILDISGFSKQYNCAFIWQKDGVKKLNLYLIINYFKGGKLEFKKIKPEAFEANRFYTVINKKSGEIVPMEVNFNFDDPNLIILPLAFGKRQGREFIWNDLLSLETGSLKLANGRVIEKTLYNRRTRQDEPALFVALTFERREVLDSSNIKPMNLIGVDRGENIPAVIALTDPEGCPLSRFKDSLGNPTHILRIGESYKEKQRTIQAKKEVEQRRAGGYSRKYASKAKNLADDMVRNTARDLLYYAVTQDAMLIFENLSRGFGRQGKRTFMAERQYTRMEDWLTAKLAYEGLPSKTYLSKTLAQYTSKTCSNCGFTITSADYDRVLEKLKKTATGWMTTINGKELKVEGQITYYNRYKRQNVVKDLSVELDRLSEESVNNDISSWTKGRSGEALSLLKKRFSHRPVQEKFVCLNCGFETHADEQAALNIARSWLFLRSQEYKKYQTNKTTGNTDKRAFVETWQSFYRKKLKEVWKPAV

SEQ ID NO: 510 - protein, 977 aa, synthetic construct
  REGION 1..977: note = CasX variant
QEIKRINKIRRRLVKDSNTKKAGKTGPMKTLLVRVMTPDLRERLENLRKKPENIPQPISNTSRANLNKLLTDYTEMKKAILHVYWEEFQKDPVGLMSRVAQPASKKIDQNKLKPEMDEKGNLTTAGFACSQCGQPLFVYKLEQVSEKGKAYTNYFGRCNVAEHEKLILLAQLKPEKDSDEAVTYSLGKFGQRALDFYSIHVTKESTHPVKPLAQIAGNRYASGPVGKALSDACMGTIASFLSKYQDIIIEHQKVVKGNQKRLESLRELAGKENLEYPSVTLPPQPHTKEGVDAYNEVIARVRMWVNLNLWQKLKLSRDDAKPLLRLKGFPSFPLVERQANEVDWWDMVCNVKKLINEKKEDGKVFWQNLAGYKRQEALRPYLSSEEDRKKGKKFARYQLGDLLLHLEKKHGEDWGKVYDEAWERIDKKVEGLSKHIKLEEERRSEDAQSKAALTDWLRAKASFVIEGLKEADKDEFCRCELKLQKWYGDLRGKPFAIEAENSILDISGFSKQYNCAFIWQKDGVKKLNLYLIINYFKGGKLRFKKIKPEAFEANRFYTVINKSGEIVPMEVNFNFDDPNLIILPLAFGKRQGREFIWNDLLSLETGSLKLANGRVIEKTLYNRRTRQDEPALFVALTFERREVLDSSNIKPMNLIGVDRGENIPAVIALTDPEGCPLSRFKDSLGNPTHILRIGESYKEKQRTIQAKKEVEQRRAGGYSRKYASKAKNLADDMVRNTARDLLYYAVTQDAMLIFENLSRGFGRQGKRTFMAERQYTRMEDWLTAKLAYEGLPSKTYLSKTLAQYTSKTCSNCGFTITSADYDRVLEKLKKTATGWMTTINGKELKVEGQITYYNRYKRQNVVKDLSVELDRLSEESVNNDISSWTKGRSGEALSLLKKRFSHRPVQEKFVCLNCGFETHADEQAALNIARSWLFLRSQEYKKYQTNKTTGNTDKRAFVETWQSFYRKKLKEVWKPAV

SEQ ID NO: 511 - protein, 979 aa, synthetic construct
  REGION 1..979: note = CasX variant
QEIKRINKIRRRLVKDSNTKKAGKTGPMKTLLVRVMTPDLRERLENLRKKPENIPQPISNTSRANLNKLLTDYTEMKKAILHVYWEEFQKDPVGLMSRVAQPASKKIDQNKLKPEMDEKGNLTTAGFACSQCGQPLFVYKLEQVSEKGKAYTNYFGRCNVAEHEKLILLAQLKPEKDSDEAVTYSLGKFGQRALDFYSIHVTKESTHPVKPLAQIAGNRYASGPVGKALSDACMGTIASFLSKYQDIIIEHQKVVKGNQKRLESLRELAGKENLEYPSVTLPPQPHTKEGVDAYNEVIARVRMWVNLNLWQKLKLSRDDAKPLLRLKGFPSFPLVERQANEVDWWDMVCNVKKLINEKKEDGKVFWQNLAGYKRQEALRPYLSSEEDRKKGKKFARYQLGDLLLHLEKKHGEDWGKVYDEAWERIDKKVEGLSKHIKLEEERRSEDAQSKAALTDWLRAKASFVIEGLKEADKDEFCRCELKLQKWYGDLRGKPFAIEAENSILDISGFSKQYNCAFIWQKDGVKKLNLYLIINYFKGGKLRFKKIKPEAFEANRFYTVINKKSGEIVPMEVNFNFDDPNLIILPLAFGKRQAGREFIWNDLLSLETGSLKLANGRVIEKTLYNRRTRQDEPALFVALTFERREVLDSSNIKPMNLIGVDRGENIPAVIALTDPEGCPLSRFKDSLGNPTHILRIGESYKEKQRTIQAKKEVEQRRAGGYSRKYASKAKNLADDMVRNTARDLLYYAVTQDAMLIFENLSRGFGRQGKRTFMAERQYTRMEDWLTAKLAYEGLPSKTYLSKTLAQYTSKTCSNCGFTITSADYDRVLEKLKKTATGWMTTINGKELKVEGQITYYNRYKRQNVVKDLSVELDRLSEESVNNDISSWTKGRSGEALSLLKKRFSHRPVQEKFVCLNCGFETHADEQAALNIARSWLFLRSQEYKKYQTNKTTGNTDKRAFVETWQSFYRKKLKEVWKPAV

SEQ ID NO: 512 - protein, 979 aa, synthetic construct
  REGION 1..979: note = CasX variant
QEIKRINKIRRRLVKDSNTKKAGKTGPMKTLLVRVMTPDLRERLENLRKKPENIPQPISNTSRANLNKLLTDYTEMKKAILHVYWEEFQKDPVGLMSRVAQPASKKIDQNKLKPEMDEKGNLTTAGFACSQCGQPLFVYKLEQVSEKGKAYTNYFGRCNVAEHEKLILLAQLKPEKDSDEAVTYSLGKFGQRALDFYSIHVTKESTHPVKPLAQIAGNRYASGPVGKALSDACMGTIASFLSKYQDIIIEHQKVVKGNQKRLESLRELAGKENLEYPSVTLPPQPHTKEGVDAYNEVIARVRMWVNLNLWQKLKLSRDDAKPLLRLKGFPSFPLVERQANEVDWWDMVCNVKKLINEKKEDGKVFWQNLAGYKRQEALRPYLSSEEDRKKGKKFARYQLGDLLLHLEKKHGEDWGKVYDEAWERIDKKVEGLSKHIKLEKEERRSEDAQSKAALTDWLRAKASFVIEGLKEADKDEFCRCELKLQKWYGDLRGKPFAIEAENSILDISGFSKQYNCAFIWQKDGVKKLNLYLIINYFKGGKLRFKKIKPEAFEANRFYTVINKKSGEIVPMEVNFNFDDPNLIILPLAFGKRQGREFIWNDLLSLETGSLKLANGRVIEKTLYNRRTRQDEPALFVALTFERREVLDSSNIKPMNLIGVDRGENIPAVIALTDPEGCPLSRFKDSLGNPTHILRIGESYKEKQRTIQAKKEVEQRRAGGYSRKYASKAKNLADDMVRNTARDLLYYAVTQDAMLIFENLSRGFGRQGKRTFMAERQYTRMEDWLTAKLAYEGLPSKTYLSKTLAQYTSKTCSNCGFTITSADYDRVLEKLKKTATGWMTTINGKELKVEGQITYYNRYKRQNVVKDLSVELDRLSEESVNNDISSWTKGRSGEALSLLKKRFSHRPVQEKFVCLNCGFETHADEQAALNIARSWLFLRSQEYKKYQTNKTTGNTDKRAFVETWQSFYRKKLKEVWKPAV

SEQ ID NO: 513 - DNA, 103 bp, synthetic construct
  misc_feature 1..103: note = promoter
  source 1..103: mol_type = other DNA
gagggcctatttcccatgattccttcatatttgcatatacgatagcttaccgtaacttgaaagtatttcaatttcttggctttatatatcttgtggaaaggac

SEQ ID NO: 514 - DNA, 103 bp, synthetic construct
  misc_feature 1..103: note = promoter
  source 1..103: mol_type = other DNA
gagggcctatttcccatgattccttcatatttgcatatacgatagcttaccgtaacttgaaagtatttccatttcttggctttatatatcttgtggaaaggac

SEQ ID NO: 515 - DNA, 103 bp, synthetic construct
  misc_feature 1..103: note = promoter
  source 1..103: mol_type = other DNA
gagggcctatttcccatgattccttcatatttgcatatacgatagcttaccgtaacttgaaagtatttctatttcttggctttatatatcttgtggaaaggac

SEQ ID NO: 516 - DNA, 103 bp, synthetic construct
  misc_feature 1..103: note = promoter
  source 1..103: mol_type = other DNA
gagggcctatttcccatgattccttcatatttgcatatacgatagcttaccgtaacttgaaagtatttcgctttcttggctttatatatcttgtggaaaggac

SEQ ID NO: 517 - DNA, 103 bp, synthetic construct
  misc_feature 1..103: note = promoter
  source 1..103: mol_type = other DNA
gagggcctatttcccatgattccttcatatttgcatatacgatagcttaccgtaacttgaaagtatttcggtttcttggctttatatatcttgtggaaaggac

SEQ ID NO: 518 - DNA, 103 bp, synthetic construct
  misc_feature 1..103: note = promoter
  source 1..103: mol_type = other DNA
gagggcctatttcccatgattccttcatatttgcatatacgatagcttaccgtaacttgaaagtatttcgttttcttggctttatatatcttgtggaaaggac

SEQ ID NO: 519 - DNA, 103 bp, synthetic construct
  misc_feature 1..103: note = promoter
  source 1..103: mol_type = other DNA
gagggcctatttcccatgattccttcatatttgcatatacgatagcttaccgtaacttgaaagtatttcgaattcttggctttatatatcttgtggaaaggac

SEQ ID NO: 520 - DNA, 103 bp, synthetic construct
  misc_feature 1..103: note = promoter
  source 1..103: mol_type = other DNA
gagggcctatttcccatgattccttcatatttgcatatacgatagcttaccgtaacttgaaagtatttcgacttcttggctttatatatcttgtggaaaggac

SEQ ID NO: 521 - DNA, 103 bp, synthetic construct
  misc_feature 1..103: note = promoter
  source 1..103: mol_type = other DNA
gagggcctatttcccatgattccttcatatttgcatatacgatagcttaccgtaacttgaaagtatttcgagttcttggctttatatatcttgtggaaaggac

SEQ ID NO: 522 - DNA, 103 bp, synthetic construct
  misc_feature 1..103: note = promoter
  source 1..103: mol_type = other DNA
gagggcctatttcccatgattccttcatatttgcatatacgatagcttaccgtaacttgaaagtatttcgatatcttggctttatatatcttgtggaaaggac

SEQ ID NO: 523 - DNA, 103 bp, synthetic construct
  misc_feature 1..103: note = promoter
  source 1..103: mol_type = other DNA
gagggcctatttcccatgattccttcatatttgcatatacgatagcttaccgtaacttgaaagtatttcgatctcttggctttatatatcttgtggaaaggac

SEQ ID NO: 524 - DNA, 103 bp, synthetic construct
  misc_feature 1..103: note = promoter
  source 1..103: mol_type = other DNA
gagggcctatttcccatgattccttcatatttgcatatacgatagcttaccgtaacttgaaagtatttcgatgtcttggctttatatatcttgtggaaaggac

SEQ ID NO: 525 - DNA, 103 bp, synthetic construct
  misc_feature 1..103: note = promoter
  source 1..103: mol_type = other DNA
gagggcctatttcccatgattccttcatatttgcatatacgatagcttaccgtaacttgaaagtatttcgattacttggctttatatatcttgtggaaaggac

SEQ ID NO: 526 - DNA, 103 bp, synthetic construct
  misc_feature 1..103: note = promoter
  source 1..103: mol_type = other DNA
gagggcctatttcccatgattccttcatatttgcatatacgatagcttaccgtaacttgaaagtatttcgattccttggctttatatatcttgtggaaaggac

SEQ ID NO: 527 - DNA, 103 bp, synthetic construct
  misc_feature 1..103: note = promoter
  source 1..103: mol_type = other DNA
gagggcctatttcccatgattccttcatatttgcatatacgatagcttaccgtaacttgaaagtatttcgattgcttggctttatatatcttgtggaaaggac

SEQ ID NO: 528 - DNA, 103 bp, synthetic construct
  misc_feature 1..103: note = promoter
  source 1..103: mol_type = other DNA
gagggcctatttcccatgattccttcatatttgcatatacgatagcttaccgtaacttgaaagtatttcgatttattggctttatatatcttgtggaaaggac

SEQ ID NO: 529 - DNA, 103 bp, synthetic construct
  misc_feature 1..103: note = promoter
  source 1..103: mol_type = other DNA
gagggcctatttcccatgattccttcatatttgcatatacgatagcttaccgtaacttgaaagtatttcgatttgttggctttatatatcttgtggaaaggac

SEQ ID NO: 530 - DNA, 103 bp, synthetic construct
  misc_feature 1..103: note = promoter
  source 1..103: mol_type = other DNA
gagggcctatttcccatgattccttcatatttgcatatacgatagcttaccgtaacttgaaagtatttcgattttttggctttatatatcttgtggaaaggac

SEQ ID NO: 531 - DNA, 103 bp, synthetic construct
  misc_feature 1..103: note = promoter
  source 1..103: mol_type = other DNA
gagggcctatttcccatgattccttcatatttgcatatacgatagcttaccgtaacttgaaagtatttcgatttcatggctttatatatcttgtggaaaggac

SEQ ID NO: 532 - DNA, 103 bp, synthetic construct
  misc_feature 1..103: note = promoter
  source 1..103: mol_type = other DNA
gagggcctatttcccatgattccttcatatttgcatatacgatagcttaccgtaacttgaaagtatttcgatttcctggctttatatatcttgtggaaaggac

SEQ ID NO: 533 - DNA, 103 bp, synthetic construct
  misc_feature 1..103: note = promoter
  source 1..103: mol_type = other DNA
gagggcctatttcccatgattccttcatatttgcatatacgatagcttaccgtaacttgaaagtatttcgatttcgtggctttatatatcttgtggaaaggac

SEQ ID NO: 534 - DNA, 103 bp, synthetic construct
  misc_feature 1..103: note = promoter
  source 1..103: mol_type = other DNA
gagggcctatttcccatgattccttcatatttgcatatacgatagcttaccgtaacttgaaagtatttcgatttctaggctttatatatcttgtggaaaggac

SEQ ID NO: 535 - DNA, 103 bp, synthetic construct
  misc_feature 1..103: note = promoter
  source 1..103: mol_type = other DNA
gagggcctatttcccatgattccttcatatttgcatatacgatagcttaccgtaacttgaaagtatttcgatttctcggctttatatatcttgtggaaaggac

SEQ ID NO: 536 - DNA, 103 bp, synthetic construct
  misc_feature 1..103: note = promoter
  source 1..103: mol_type = other DNA
gagggcctatttcccatgattccttcatatttgcatatacgatagcttaccgtaacttgaaagtatttcgatttctgggctttatatatcttgtggaaaggac

SEQ ID NO: 537 - DNA, 103 bp, synthetic construct
  misc_feature 1..103: note = promoter
  source 1..103: mol_type = other DNA
gagggcctatttcccatgattccttcatatttgcatatacgatagcttaccgtaacttgaaagtatttcgatttcttagctttatatatcttgtggaaaggac

SEQ ID NO: 538 - DNA, 103 bp, synthetic construct
  misc_feature 1..103: note = promoter
  source 1..103: mol_type = other DNA
gagggcctatttcccatgattccttcatatttgcatatacgatagcttaccgtaacttgaaagtatttcgatttcttcgctttatatatcttgtggaaaggac

SEQ ID NO: 539 - DNA, 103 bp, synthetic construct
  misc_feature 1..103: note = promoter
  source 1..103: mol_type = other DNA
gagggcctatttcccatgattccttcatatttgcatatacgatagcttaccgtaacttgaaagtatttcgatttctttgctttatatatcttgtggaaaggac

SEQ ID NO: 540 - DNA, 103 bp, synthetic construct
  misc_feature 1..103: note = promoter
  source 1..103: mol_type = other DNA
gagggcctatttcccatgattccttcatatttgcatatacgatagcttaccgtaacttgaaagtatttcgatttcttgactttatatatcttgtggaaaggac

SEQ ID NO: 541 - DNA, 103 bp, synthetic construct
  misc_feature 1..103: note = promoter
  source 1..103: mol_type = other DNA
gagggcctatttcccatgattccttcatatttgcatatacgatagcttaccgtaacttgaaagtatttcgatttcttgcctttatatatcttgtggaaaggac

SEQ ID NO: 542 - DNA, 103 bp, synthetic construct
  misc_feature 1..103: note = promoter
  source 1..103: mol_type = other DNA
gagggcctatttcccatgattccttcatatttgcatatacgatagcttaccgtaacttgaaagtatttcgatttcttgtctttatatatcttgtggaaaggac

SEQ ID NO: 543 - DNA, 103 bp, synthetic construct
  misc_feature 1..103: note = promoter
  source 1..103: mol_type = other DNA
gagggcctatttcccatgattccttcatatttgcatatacgatagcttaccgtaacttgaaagtatttcgatttcttggatttatatatcttgtggaaaggac

SEQ ID NO: 544 - DNA, 103 bp, synthetic construct
  misc_feature 1..103: note = promoter
  source 1..103: mol_type = other DNA
gagggcctatttcccatgattccttcatatttgcatatacgatagcttaccgtaacttgaaagtatttcgatttcttgggtttatatatcttgtggaaaggac

SEQ ID NO: 545 - DNA, 103 bp, synthetic construct
  misc_feature 1..103: note = promoter
  source 1..103: mol_type = other DNA
gagggcctatttcccatgattccttcatatttgcatatacgatagcttaccgtaacttgaaagtatttcgatttcttggttttatatatcttgtggaaaggac

SEQ ID NO: 546 - DNA, 103 bp, synthetic construct
  misc_feature 1..103: note = promoter
  source 1..103: mol_type = other DNA
gagggcctatttcccatgattccttcatatttgcatatacgatagcttaccgtaacttgaaagtatttcgatttcttggcattatatatcttgtggaaaggac

SEQ ID NO: 547 - DNA, 103 bp, synthetic construct
  misc_feature 1..103: note = promoter
  source 1..103: mol_type = other DNA
gagggcctatttcccatgattccttcatatttgcatatacgatagcttaccgtaacttgaaagtatttcgatttcttggccttatatatcttgtggaaaggac

SEQ ID NO: 548 - DNA, 103 bp, synthetic construct
  misc_feature 1..103: note = promoter
  source 1..103: mol_type = other DNA
gagggcctatttcccatgattccttcatatttgcatatacgatagcttaccgtaacttgaaagtatttcgatttcttggcgttatatatcttgtggaaaggac

SEQ ID NO: 549 - DNA, 103 bp, synthetic construct
  misc_feature 1..103: note = promoter
  source 1..103: mol_type = other DNA
gagggcctatttcccatgattccttcatatttgcatatacgatagcttaccgtaacttgaaagtatttcgatttcttggctatatatatcttgtggaaaggac

SEQ ID NO: 550 - DNA, 103 bp, synthetic construct
  misc_feature 1..103: note = promoter
  source 1..103: mol_type = other DNA
gagggcctatttcccatgattccttcatatttgcatatacgatagcttaccgtaacttgaaagtatttcgatttcttggctctatatatcttgtggaaaggac

SEQ ID NO: 551 - DNA, 103 bp, synthetic construct
  misc_feature 1..103: note = promoter
  source 1..103: mol_type = other DNA
gagggcctatttcccatgattccttcatatttgcatatacgatagcttaccgtaacttgaaagtatttcgatttcttggctgtatatatcttgtggaaaggac

SEQ ID NO: 552 - DNA, 103 bp, synthetic construct
  misc_feature 1..103: note = promoter
  source 1..103: mol_type = other DNA
gagggcctatttcccatgattccttcatatttgcatatacgatagcttaccgtaacttgaaagtatttcgatttcttggcttaatatatcttgtggaaaggac

SEQ ID NO: 553 - DNA, 103 bp, synthetic construct
  misc_feature 1..103: note = promoter
  source 1..103: mol_type = other DNA
gagggcctatttcccatgattccttcatatttgcatatacgatagcttaccgtaacttgaaagtatttcgatttcttggcttcatatatcttgtggaaaggac

SEQ ID NO: 554 - DNA, 103 bp, synthetic construct
  misc_feature 1..103: note = promoter
  source 1..103: mol_type = other DNA
gagggcctatttcccatgattccttcatatttgcatatacgatagcttaccgtaacttgaaagtatttcgatttcttggcttgatatatcttgtggaaaggac

SEQ ID NO: 555 - DNA, 103 bp, synthetic construct
  misc_feature 1..103: note = promoter
  source 1..103: mol_type = other DNA
gagggcctatttcccatgattccttcatatttgcatatacgatagcttaccgtaacttgaaagtatttcgatttcttggctttctatatcttgtggaaaggac

SEQ ID NO: 556 - DNA, 103 bp, synthetic construct
  misc_feature 1..103: note = promoter
  source 1..103: mol_type = other DNA
gagggcctatttcccatgattccttcatatttgcatatacgatagcttaccgtaacttgaaagtatttcgatttcttggctttgtatatcttgtggaaaggac

SEQ ID NO: 557 - DNA, 103 bp, synthetic construct
  misc_feature 1..103: note = promoter
  source 1..103: mol_type = other DNA
gagggcctatttcccatgattccttcatatttgcatatacgatagcttaccgtaacttgaaagtatttcgatttcttggctttttatatcttgtggaaaggac

SEQ ID NO: 558 - DNA, 103 bp, synthetic construct
  misc_feature 1..103: note = promoter
  source 1..103: mol_type = other DNA
gagggcctatttcccatgattccttcatatttgcatatacgatagcttaccgtaacttgaaagtatttcgatttcttggctttaaatatcttgtggaaaggac

SEQ ID NO: 559 - DNA, 103 bp, synthetic construct
  misc_feature 1..103: note = promoter
  source 1..103: mol_type = other DNA
gagggcctatttcccatgattccttcatatttgcatatacgatagcttaccgtaacttgaaagtatttcgatttcttggctttacatatcttgtggaaaggac

SEQ ID NO: 560 - DNA, 103 bp, synthetic construct
  misc_feature 1..103: note = promoter
  source 1..103: mol_type = other DNA
gagggcctatttcccatgattccttcatatttgcatatacgatagcttaccgtaacttgaaagtatttcgatttcttggctttagatatcttgtggaaaggac

SEQ ID NO: 561 - DNA, 103 bp, synthetic construct
  misc_feature 1..103: note = promoter
  source 1..103: mol_type = other DNA
gagggcctatttcccatgattccttcatatttgcatatacgatagcttaccgtaacttgaaagtatttcgatttcttggctttatctatcttgtggaaaggac

SEQ ID NO: 562 - DNA, 103 bp, synthetic construct
  misc_feature 1..103: note = promoter
  source 1..103: mol_type = other DNA
gagggcctatttcccatgattccttcatatttgcatatacgatagcttaccgtaacttgaaagtatttcgatttcttggctttatgtatcttgtggaaaggac

SEQ ID NO: 563 - DNA, 103 bp, synthetic construct
  misc_feature 1..103: note = promoter
  source 1..103: mol_type = other DNA
gagggcctatttcccatgattccttcatatttgcatatacgatagcttaccgtaacttgaaagtatttcgatttcttggctttatttatcttgtggaaaggac

SEQ ID NO: 564 - DNA, 103 bp, synthetic construct
  misc_feature 1..103: note = promoter
  source 1..103: mol_type = other DNA
gagggcctatttcccatgattccttcatatttgcatatacgatagcttaccgtaacttgaaagtatttcgatttcttggctttataaatcttgtggaaaggac

SEQ ID NO: 565 - DNA, 103 bp, synthetic construct
  misc_feature 1..103: note = promoter
  source 1..103: mol_type = other DNA
gagggcctatttcccatgattccttcatatttgcatatacgatagcttaccgtaacttgaaagtatttcgatttcttggctttatacatcttgtggaaaggac

SEQ ID NO: 566 - DNA, 103 bp, synthetic construct
  misc_feature 1..103: note = promoter
  source 1..103: mol_type = other DNA
gagggcctatttcccatgattccttcatatttgcatatacgatagcttaccgtaacttgaaagtatttcgatttcttggctttatagatcttgtggaaaggac

SEQ ID NO: 567 - protein, 54 aa, synthetic construct
  REGION 1..54: note = CasX OBD-I domain
EKRINKIRKKLSADNATKPVSRSGPMKTLLVRVMTDDLKKRLEKRRKKPEVMPQ

SEQ ID NO: 568 - protein, 44 aa, synthetic construct
  REGION 1..44: note = CasX helical I-I domain
VISNNAANNLRMLLDDYTKMKEAILQVYWQEFKDDHVGLMCKFA

SEQ ID NO: 569 - protein, 91 aa, synthetic construct
  REGION 1..91: note = CasX NTSB domain
QPASKKIDQNKLKPEMDEKGNLTTAGFACSQCGQPLFVYKLEQVSEKGKAYTNYFGRCNVAEHEKLILLAQLKPEKDSDEAVTYSLGKFGQ

SEQ ID NO: 570 - protein, 141 aa, synthetic construct
  REGION 1..141: note = CasX helical I-II domain
RALDFYSIHVTKESTHPVKPLAQIAGNRYASGPVGKALSDACMGTIASFLSKYQDIIIEHQKVVKGNQKRLESLRELAGKENLEYPSVTLPPQPHTKEGVDAYNEVIARVRMWVNLNLWQKLKLSRDDAKPLLRLKGFPSF

SEQ ID NO: 571 - protein, 177 aa, synthetic construct
  REGION 1..177: note = CasX helical II domain
PVVERRENEVDWWNTINEVKKLIDAKRDMGRVFWSGVTAEKRNTILEGYNYLPNENDHKKREGSLENPKKPAKRQFGDLLLYLEKKYAGDWGKVFDEAWERIDKKIAGLTSHIEREEARNAEDAQSKAVLTDWLRAKASFVLERLKEMDEKEFYACEIQLQKWYGDLRGNPFAVEAE

SEQ ID NO: 572 - protein, 151 aa, synthetic construct
  REGION 1..151: note = CasX OBD-II domain
NRVVDISGFSIGSDGHSIQYRNLLAWKYLENGKREFYLLMNYGKKGRIRFTDGTDIKKSGKWQGLLYGGGKAKVIDLTFDPDDEQLIILPLAFGTRQGREFIWNDLLSLETGLIKLANGRVIEKTIYNKKIGRDEPALFVALTFERREVVD

SEQ ID NO: 573 - protein, 164 aa, synthetic construct
  REGION 1..164: note = CasX RuvC-I domain
PSNIKPVNLIGVDRGENIPAVIALTDPEGCPLPEFKDSSGGPTDILRIGEGYKEKQRAIQAAKEVEQRRAGGYSRKFASKSRNLADDMVRNSARDLFYHAVTHDAVLVFENLSRGFGRQGKRTFMTERQYTKMEDWLTAKLAYEGLTSKTYLSKTLAQYTSKTC

SEQ ID NO: 574 - protein, 110 aa, synthetic construct
  REGION 1..110: note = CasX TSL domain
SNCGFTITTADYDGMLVRLKKTSDGWATTLNNKELKAEGQITYYNRYKRQTVEKELSAELDRLSEESGNNDISKWTKGRRDEALFLLKKRFSHRPVQEQFVCLDCGHEVH

SEQ ID NO: 575 - protein, 53 aa, synthetic construct
  REGION 1..53: note = CasX RuvC-II domain
ADEQAALNIARSWLFLNSNSTEFKSYKSGKQPFVGAWQAFYKRRLKEVWKPNA

SEQ ID NO: 576 - protein, 56 aa, synthetic construct
  REGION 1..56: note = CasX OBD-I domain
QEIKRINKIRRRLVKDSNTKKAGKTGPMKTLLVRVMTPDLRERLENLRKKPENIPQ

SEQ ID NO: 577 - protein, 44 aa, synthetic construct
  REGION 1..44: note = CasX helical I-I domain
PISNTSRANLNKLLTDYTEMKKAILHVYWEEFQKDPVGLMSRVA

SEQ ID NO: 578 - protein, 90 aa, synthetic construct
  REGION 1..90: note = CasX NTSB domain
QPAPKNIDQRKLIPVKDGNERLTSSGFACSQCCQPLYVYKLEQVNDKGKPHTNYFGRCNVSEHERLILLSPHKPEANDELVTYSLGKFGQ

SEQ ID NO: 579 - protein, 141 aa, synthetic construct
  REGION 1..141: note = CasX helical I-II domain
RALDFYSIHVTRESNHPVKPLEQIGGNSCASGPVGKALSDACMGAVASFLTKYQDIILEHQKVIKKNEKRLANLKDIASANGLAFPKITLPPQPHTKEGIEAYNNVVAQIVIWVNLNLWQKLKIGRDEAKPLQRLKGFPSF

SEQ ID NO: 580 - protein, 168 aa, synthetic construct
  REGION 1..168: note = CasX helical II domain
PLVERQANEVDWWDMVCNVKKLINEKKEDGKVFWQNLAGYKRQEALLPYLSSEEDRKKGKKFARYQFGDLLLHLEKKHGEDWGKVYDEAWERIDKKVEGLSKHIKLEEERRSEDAQSKAALTDWLRAKASFVIEGLKEADKDEFCRCELKLQKWYGDLRGKPFAIEAE

SEQ ID NO: 581 - protein, 146 aa, synthetic construct
  REGION 1..146: note = CasX OBD-II domain
NSILDISGFSKQYNCAFIWQKDGVKKLNLYLIINYFKGGKLRFKKIKPEAFEANRFYTVINKKSGEIVPMEVNFNFDDPNLIILPLAFGKRQGREFIWNDLLSLETGSLKLANGRVIEKTLYNRRTRQDEPALFVALTFERREVLD

SEQ ID NO: 582 - protein, 164 aa, synthetic construct
  REGION 1..164: note = CasX RuvC-I domain
SSNIKPMNLIGIDRGENIPAVIALTDPEGCPLSRFKDSLGNPTHILRIGESYKEKQRTIQAAKEVEQRRAGGYSRKYASKAKNLADDMVRNTARDLLYYAVTQDAMLIFENLSRGFGRQGKRTFMAERQYTRMEDWLTAKLAYEGLPSKTYLSKTLAQYTSKTC

SEQ ID NO: 583 - protein, 110 aa, synthetic construct
  REGION 1..110: note = CasX TSL domain
SNCGFTITSADYDRVLEKLKKTATGWMTTINGKELKVEGQITYYNRYKRQNVVKDLSVELDRLSEESVNNDISSWTKGRSGEALSLLKKRFSHRPVQEKFVCLNCGFETH

SEQ ID NO: 584 - protein, 58 aa, synthetic construct
  REGION 1..58: note = CasX RuvC-II domain
ADEQAALNIARSWLFLRSQEYKKYQTNKTTGNTDKRAFVETWQSFYRKKLKEVWKPAV

SEQ ID NO: 585 - protein, 56 aa, synthetic construct; identical to SEQ ID NO: 576
  REGION 1..56: note = CasX 515 OBD-I domain

SEQ ID NO: 586 - protein, 44 aa, synthetic construct; identical to SEQ ID NO: 577
  REGION 1..44: note = CasX 515 helical I-I domain

SEQ ID NO: 587 - protein, 91 aa, synthetic construct; identical to SEQ ID NO: 569
  REGION 1..91: note = CasX 515 NTSB domain

SEQ ID NO: 588 - protein, 141 aa, synthetic construct; identical to SEQ ID NO: 570
  REGION 1..141: note = CasX 515 helical I-II domain

SEQ ID NO: 589 - protein, 168 aa, synthetic construct
  REGION 1..168: note = CasX 515 helical II domain
PLVERQANEVDWWDMVCNVKKLINEKKEDGKVFWQNLAGYKRQEALRPYLSSEEDRKKGKKFARYQLGDLLLHLEKKHGEDWGKVYDEAWERIDKKVEGLSKHIKLEEERRSEDAQSKAALTDWLRAKASFVIEGLKEADKDEFCRCELKLQKWYGDLRGKPFAIEAE

SEQ ID NO: 590 - protein, 146 aa, synthetic construct; identical to SEQ ID NO: 581
  REGION 1..146: note = CasX 515 OBD-II domain

SEQ ID NO: 591 - protein, 164 aa, synthetic construct
  REGION 1..164: note = CasX 515 RuvC-I domain
SSNIKPMNLIGVDRGENIPAVIALTDPEGCPLSRFKDSLGNPTHILRIGESYKEKQRTIQAKKEVEQRRAGGYSRKYASKAKNLADDMVRNTARDLLYYAVTQDAMLIFENLSRGFGRQGKRTFMAERQYTRMEDWLTAKLAYEGLPSKTYLSKTLAQYTSKTC

SEQ ID NO: 592 - protein, 110 aa, synthetic construct; identical to SEQ ID NO: 583
  REGION 1..110: note = CasX 515 TSL domain

SEQ ID NO: 593 - protein, 58 aa, synthetic construct; identical to SEQ ID NO: 584
  REGION 1..58: note = CasX 515 RuvC-II domain

SEQ ID NO: 594 - DNA, 241 bp, synthetic construct
  misc_feature 1..241: note = Promoter
  source 1..241: mol_type = other DNA
gagggcctatttcccatgattccttcatatttgcatataagatgcaaggctgttagagagataattagaactaatttgactgtaaacacaaatatattagtacaaaatatgtgacatagaaagtgataatttcttgggtagtttgcagttttaaaattatgttttaaaatggactatcatctgcttaccgtaactttaaagtatttcgatttcttgactttatatatcttgtggaaaggac

SEQ ID NO: 595 - DNA, 241 bp, synthetic construct
  misc_feature 1..241: note = Promoter
  source 1..241: mol_type = other DNA
aagggcctatttcccatgattccttcatatttgcatataagatgcaaggctgttagagagataattagaactaatttgactgtaaacacaaatatattagtacaaaatatgtgacatagaaagtgataatttcttgggtagtttgcagttttaaaattatgttttaaaatggactatcatctgcttaccgtaactttaaagtatttcgatttcttgactttatatatcttgtggaaaggac

SEQ ID NO: 596 - DNA, 241 bp, synthetic construct
  misc_feature 1..241: note = Promoter
  source 1..241: mol_type = other DNA
cagggcctatttcccatgattccttcatatttgcatataagatgcaaggctgttagagagataattagaactaatttgactgtaaacacaaatatattagtacaaaatatgtgacatagaaagtgataatttcttgggtagtttgcagttttaaaattatgttttaaaatggactatcatctgcttaccgtaactttaaagtatttcgatttcttgactttatatatcttgtggaaaggac

SEQ ID NO: 597 - DNA, 241 bp, synthetic construct
  misc_feature 1..241: note = Promoter
  source 1..241: mol_type = other DNA
tagggcctatttcccatgattccttcatatttgcatataagatgcaaggctgttagagagataattagaactaatttgactgtaaacacaaatatattagtacaaaatatgtgacatagaaagtgataatttcttgggtagtttgcagttttaaaattatgttttaaaatggactatcatctgcttaccgtaactttaaagtatttcgatttcttgactttatatatcttgtggaaaggac

SEQ ID NO: 598 - DNA, 241 bp, synthetic construct
  misc_feature 1..241: note = Promoter
  source 1..241: mol_type = other DNA
gcgggcctatttcccatgattccttcatatttgcatataagatgcaaggctgttagagagataattagaactaatttgactgtaaacacaaatatattagtacaaaatatgtgacatagaaagtgataatttcttgggtagtttgcagttttaaaattatgttttaaaatggactatcatctgcttaccgtaactttaaagtatttcgatttcttgactttatatatcttgtggaaaggac

SEQ ID NO: 599 - DNA, 241 bp, synthetic construct
  misc_feature 1..241: note = Promoter
  source 1..241: mol_type = other DNA
gggggcctatttcccatgattccttcatatttgcatataagatgcaaggctgttagagagataattagaactaatttgactgtaaacacaaatatattagtacaaaatatgtgacatagaaagtgataatttcttgggtagtttgcagttttaaaattatgttttaaaatggactatcatctgcttaccgtaactttaaagtatttcgatttcttgactttatatatcttgtggaaaggac

SEQ ID NO: 600 - DNA, 241 bp, synthetic construct
  misc_feature 1..241: note = Promoter
  source 1..241: mol_type = other DNA
gtgggcctatttcccatgattccttcatatttgcatataagatgcaaggctgttagagagataattagaactaatttgactgtaaacacaaatatattagtacaaaatatgtgacatagaaagtgataatttcttgggtagtttgcagttttaaaattatgttttaaaatggactatcatctgcttaccgtaactttaaagtatttcgatttcttgactttatatatcttgtggaaaggac

SEQ ID NO: 601 - DNA, 241 bp, synthetic construct
  misc_feature 1..241: note = Promoter
  source 1..241: mol_type = other DNA
gaaggcctatttcccatgattccttcatatttgcatataagatgcaaggctgttagagagataattagaactaatttgactgtaaacacaaatatattagtacaaaatatgtgacatagaaagtgataatttcttgggtagtttgcagttttaaaattatgttttaaaatggactatcatctgcttaccgtaactttaaagtatttcgatttcttgactttatatatcttgtggaaaggac

SEQ ID NO: 602 - DNA, 241 bp, synthetic construct
  misc_feature 1..241: note = Promoter
  source 1..241: mol_type = other DNA
gacggcctatttcccatgattccttcatatttgcatataagatgcaaggctgttagagagataattagaactaatttgactgtaaacacaaatatattagtacaaaatatgtgacatagaaagtgataatttcttgggtagtttgcagttttaaaattatgttttaaaatggactatcatctgcttaccgtaactttaaagtatttcgatttcttgactttatatatcttgtggaaaggac

SEQ ID NO: 603 - DNA, 241 bp, synthetic construct
  misc_feature 1..241: note = Promoter
  source 1..241: mol_type = other DNA
gatggcctatttcccatgattccttcatatttgcatataagatgcaaggctgttagagagataattagaactaatttgactgtaaacacaaatatattagtacaaaatatgtgacatagaaagtgataatttcttgggtagtttgcagttttaaaattatgttttaaaatggactatcatctgcttaccgtaactttaaagtatttcgatttcttgactttatatatcttgtggaaaggac

SEQ ID NO: 604 - DNA, 241 bp, synthetic construct
  misc_feature 1..241: note = Promoter
  source 1..241: mol_type = other DNA
gagagcctatttcccatgattccttcatatttgcatataagatgcaaggctgttagagagataattagaactaatttgactgtaaacacaaatatattagtacaaaatatgtgacatagaaagtgataatttcttgggtagtttgcagttttaaaattatgttttaaaatggactatcatctgcttaccgtaactttaaagtatttcgatttcttgactttatatatcttgtggaaaggac

SEQ ID NO: 605 - DNA, 241 bp, synthetic construct
  misc_feature 1..241: note = Promoter
  source 1..241: mol_type = other DNA
gagcgcctatttcccatgattccttcatatttgcatataagatgcaaggctgttagagagataattagaactaatttgactgtaaacacaaatatattagtacaaaatatgtgacatagaaagtgataatttcttgggtagtttgcagttttaaaattatgttttaaaatggactatcatctgcttaccgtaactttaaagtatttcgatttcttgactttatatatcttgtggaaaggac

SEQ ID NO: 606 - DNA, 241 bp, synthetic construct
  misc_feature 1..241: note = Promoter
  source 1..241: mol_type = other DNA
gagtgcctatttcccatgattccttcatatttgcatataagatgcaaggctgttagagagataattagaactaatttgactgtaaacacaaatatattagtacaaaatatgtgacatagaaagtgataatttcttgggtagtttgcagttttaaaattatgttttaaaatggactatcatctgcttaccgtaactttaaagtatttcgatttcttgactttatatatcttgtggaaaggac

SEQ ID NO: 607 - DNA, 241 bp, synthetic construct
  misc_feature 1..241: note = Promoter
  source 1..241: mol_type = other DNA
gaggacctatttcccatgattccttcatatttgcatataagatgcaaggctgttagagagataattagaactaatttgactgtaaacacaaatatattagtacaaaatatgtgacatagaaagtgataatttcttgggtagtttgcagttttaaaattatgttttaaaatggactatcatctgcttaccgtaactttaaagtatttcgatttcttgactttatatatcttgtggaaaggac

SEQ ID NO: 608 - DNA, 241 bp, synthetic construct
  misc_feature 1..241: note = Promoter
  source 1..241: mol_type = other DNA
gaggccctatttcccatgattccttcatatttgcatataagatgcaaggctgttagagagataattagaactaatttgactgtaaacacaaatatattagtacaaaatatgtgacatagaaagtgataatttcttgggtagtttgcagttttaaaattatgttttaaaatggactatcatctgcttaccgtaactttaaagtatttcgatttcttgactttatatatcttgtggaaaggac

SEQ ID NO: 609 - DNA, 241 bp, synthetic construct
  misc_feature 1..241: note = Promoter
  source 1..241: mol_type = other DNA
gaggtcctatttcccatgattccttcatatttgcatataagatgcaaggctgttagagagataattagaactaatttgactgtaaacacaaatatattagtacaaaatatgtgacatagaaagtgataatttcttgggtagtttgcagttttaaaattatgttttaaaatggactatcatctgcttaccgtaactttaaagtatttcgatttcttgactttatatatcttgtggaaaggac

SEQ ID NO: 610 - DNA, 241 bp, synthetic construct
  misc_feature 1..241: note = Promoter
  source 1..241: mol_type = other DNA
gagggactatttcccatgattccttcatatttgcatataagatgcaaggctgttagagagataattagaactaatttgactgtaaacacaaatatattagtacaaaatatgtgacatagaaagtgataatttcttgggtagtttgcagttttaaaattatgttttaaaatggactatcatctgcttaccgtaactttaaagtatttcgatttcttgactttatatatcttgtggaaaggac

SEQ ID NO: 611 - DNA, 241 bp, synthetic construct
  misc_feature 1..241: note = Promoter
  source 1..241: mol_type = other DNA
gaggggctatttcccatgattccttcatatttgcatataagatgcaaggctgttagagagataattagaactaatttgactgtaaacacaaatatattagtacaaaatatgtgacatagaaagtgataatttcttgggtagtttgcagttttaaaattatgttttaaaatggactatcatctgcttaccgtaactttaaagtatttcgatttcttgactttatatatcttgtggaaaggac

SEQ ID NO: 612 - DNA, 241 bp, synthetic construct
  misc_feature 1..241: note = Promoter
  source 1..241: mol_type = other DNA
gagggtctatttcccatgattccttcatatttgcatataagatgcaaggctgttagagagataattagaactaatttgactgtaaacacaaatatattagtacaaaatatgtgacatagaaagtgataatttcttgggtagtttgcagttttaaaattatgttttaaaatggactatcatctgcttaccgtaactttaaagtatttcgatttcttgactttatatatcttgtggaaaggac

SEQ ID NO: 613 - DNA, 241 bp, synthetic construct
  misc_feature 1..241: note = Promoter
  source 1..241: mol_type = other DNA
gagggcatatttcccatgattccttcatatttgcatataagatgcaaggctgttagagagataattagaactaatttgactgtaaacacaaatatattagtacaaaatatgtgacatagaaagtgataatttcttgggtagtttgcagttttaaaattatgttttaaaatggactatcatctgcttaccgtaactttaaagtatttcgatttcttgactttatatatcttgtggaaaggac

SEQ ID NO: 614 - DNA, 241 bp, synthetic construct
  misc_feature 1..241: note = Promoter
  source 1..241: mol_type = other DNA
gagggcgtatttcccatgattccttcatatttgcatataagatgcaaggctgttagagagataattagaactaatttgactgtaaacacaaatatattagtacaaaatatgtgacatagaaagtgataatttcttgggtagtttgcagttttaaaattatgttttaaaatggactatcatctgcttaccgtaactttaaagtatttcgatttcttgactttatatatcttgtggaaaggac

SEQ ID NO: 615 - DNA, 241 bp, synthetic construct
  misc_feature 1..241: note = Promoter
  source 1..241: mol_type = other DNA
gagggcttatttcccatgattccttcatatttgcatataagatgcaaggctgttagagagataattagaactaatttgactgtaaacacaaatatattagtacaaaatatgtgacatagaaagtgataatttcttgggtagtttgcagttttaaaattatgttttaaaatggactatcatctgcttaccgtaactttaaagtatttcgatttcttgactttatatatcttgtggaaaggac

SEQ ID NO: 616 - DNA, 241 bp, synthetic construct
  misc_feature 1..241: note = Promoter
  source 1..241: mol_type = other DNA
gagggccaatttcccatgattccttcatatttgcatataagatgcaaggctgttagagagataattagaactaatttgactgtaaacacaaatatattagtacaaaatatgtgacatagaaagtgataatttcttgggtagtttgcagttttaaaattatgttttaaaatggactatcatctgcttaccgtaactttaaagtatttcgatttcttgactttatatatcttgtggaaaggac

SEQ ID NO: 617 - DNA, 241 bp, synthetic construct
  misc_feature 1..241: note = Promoter
  source 1..241: mol_type = other DNA
gagggcccatttcccatgattccttcatatttgcatataagatgcaaggctgttagagagataattagaactaatttgactgtaaacacaaatatattagtacaaaatatgtgacatagaaagtgataatttcttgggtagtttgcagttttaaaattatgttttaaaatggactatcatctgcttaccgtaactttaaagtatttcgatttcttgactttatatatcttgtggaaaggac

SEQ ID NO: 618 - DNA, 241 bp, synthetic construct
  misc_feature 1..241: note = Promoter
  source 1..241: mol_type = other DNA
gagggccgatttcccatgattccttcatatttgcatataagatgcaaggctgttagagagataattagaactaatttgactgtaaacacaaatatattagtacaaaatatgtgacatagaaagtgataatttcttgggtagtttgcagttttaaaattatgttttaaaatggactatcatctgcttaccgtaactttaaagtatttcgatttcttgactttatatatcttgtggaaaggac

SEQ ID NO: 619 - DNA, 241 bp, synthetic construct
  misc_feature 1..241: note = Promoter
  source 1..241: mol_type = other DNA
gagggcctctttcccatgattccttcatatttgcatataagatgcaaggctgttagagagataattagaactaatttgactgtaaacacaaatatattagtacaaaatatgtgacatagaaagtgataatttcttgggtagtttgcagttttaaaattatgttttaaaatggactatcatctgcttaccgtaactttaaagtatttcgatttcttgactttatatatcttgtggaaaggac

SEQ ID NO: 620 - DNA, 241 bp, synthetic construct
  misc_feature 1..241: note = Promoter
  source 1..241: mol_type = other DNA
gagggcctgtttcccatgattccttcatatttgcatataagatgcaaggctgttagagagataattagaactaatttgactgtaaacacaaatatattagtacaaaatatgtgacatagaaagtgataatttcttgggtagtttgcagttttaaaattatgttttaaaatggactatcatctgcttaccgtaactttaaagtatttcgatttcttgactttatatatcttgtggaaaggac

SEQ ID NO: 621 - DNA, 241 bp, synthetic construct
  misc_feature 1..241: note = Promoter
  source 1..241: mol_type = other DNA
gagggcctttttcccatgattccttcatatttgcatataagatgcaaggctgttagagagataattagaactaatttgactgtaaacacaaatatattagtacaaaatatgtgacatagaaagtgataatttcttgggtagtttgcagttttaaaattatgttttaaaatggactatcatctgcttaccgtaactttaaagtatttcgatttcttgactttatatatcttgtggaaaggac

SEQ ID NO: 622 - DNA, 241 bp, synthetic construct
  misc_feature 1..241: note = Promoter
  source 1..241: mol_type = other DNA
gagggcctaattcccatgattccttcatatttgcatataagatgcaaggctgttagagagataattagaactaatttgactgtaaacacaaatatattagtacaaaatatgtgacatagaaagtgataatttcttgggtagtttgcagttttaaaattatgttttaaaatggactatcatctgcttaccgtaactttaaagtatttcgatttcttgactttatatatcttgtggaaaggac

SEQ ID NO: 623 - DNA, 241 bp, synthetic construct
  misc_feature 1..241: note = Promoter
  source 1..241: mol_type = other DNA
gagggcctacttcccatgattccttcatatttgcatataagatgcaaggctgttagagagataattagaactaatttgactgtaaacacaaatatattagtacaaaatatgtgacatagaaagtgataatttcttgggtagtttgcagttttaaaattatgttttaaaatggactatcatctgcttaccgtaactttaaagtatttcgatttcttgactttatatatcttgtggaaaggac

SEQ ID NO: 624 - DNA, 241 bp, synthetic construct
  misc_feature 1..241: note = Promoter
  source 1..241: mol_type = other DNA
gagggcctagttcccatgattccttcatatttgcatataagatgcaaggctgttagagagataattagaactaatttgactgtaaacacaaatatattagtacaaaatatgtgacatagaaagtgataatttcttgggtagtttgcagttttaaaattatgttttaaaatggactatcatctgcttaccgtaactttaaagtatttcgatttcttgactttatatatcttgtggaaaggac

SEQ ID NO: 625 - DNA, 241 bp, synthetic construct
  misc_feature 1..241: note = Promoter
  source 1..241: mol_type = other DNA
gagggcctatatcccatgattccttcatatttgcatataagatgcaaggctgttagagagataattagaactaatttgactgtaaacacaaatatattagtacaaaatatgtgacatagaaagtgataatttcttgggtagtttgcagttttaaaattatgttttaaaatggactatcatctgcttaccgtaactttaaagtatttcgatttcttgactttatatatcttgtggaaaggac

SEQ ID NO: 626 - DNA, 241 bp, synthetic construct
  misc_feature 1..241: note = Promoter
  source 1..241: mol_type = other DNA
gagggcctatctcccatgattccttcatatttgcatataagatgcaaggctgttagagagataattagaactaatttgactgtaaacacaaatatattagtacaaaatatgtgacatagaaagtgataatttcttgggtagtttgcagttttaaaattatgttttaaaatggactatcatctgcttaccgtaactttaaagtatttcgatttcttgactttatatatcttgtggaaaggac

SEQ ID NO: 627 - DNA, 241 bp, synthetic construct
  misc_feature 1..241: note = Promoter
  source 1..241: mol_type = other DNA
gagggcctatgtcccatgattccttcatatttgcatataagatgcaaggctgttagagagataattagaactaatttgactgtaaacacaaatatattagtacaaaatatgtgacatagaaagtgataatttcttgggtagtttgcagttttaaaattatgttttaaaatggactatcatctgcttaccgtaactttaaagtatttcgatttcttgactttatatatcttgtggaaaggac

SEQ ID NO: 628 - DNA, 241 bp, synthetic construct
  misc_feature 1..241: note = Promoter
  source 1..241: mol_type = other DNA
gagggcctattacccatgattccttcatatttgcatataagatgcaaggctgttagagagataattagaactaatttgactgtaaacacaaatatattagtacaaaatatgtgacatagaaagtgataatttcttgggtagtttgcagttttaaaattatgttttaaaatggactatcatctgcttaccgtaactttaaagtatttcgatttcttgactttatatatcttgtggaaaggac

SEQ ID NO: 629 - DNA, 241 bp, synthetic construct
  misc_feature 1..241: note = Promoter
  source 1..241: mol_type = other DNA
gagggcctattccccatgattccttcatatttgcatataagatgcaaggctgttagagagataattagaactaatttgactgtaaacacaaatatattagtacaaaatatgtgacatagaaagtgataatttcttgggtagtttgcagttttaaaattatgttttaaaatggactatcatctgcttaccgtaactttaaagtatttcgatttcttgactttatatatcttgtggaaaggac

SEQ ID NO: 630 - DNA, 241 bp, synthetic construct
  misc_feature 1..241: note = Promoter
  source 1..241: mol_type = other DNA
gagggcctattgcccatgattccttcatatttgcatataagatgcaaggctgttagagagataattagaactaatttgactgtaaacacaaatatattagtacaaaatatgtgacatagaaagtgataatttcttgggtagtttgcagttttaaaattatgttttaaaatggactatcatctgcttaccgtaactttaaagtatttcgatttcttgactttatatatcttgtggaaaggac

SEQ ID NO: 631 - DNA, 241 bp, synthetic construct
  misc_feature 1..241: note = Promoter
  source 1..241: mol_type = other DNA
gagggcctatttaccatgattccttcatatttgcatataagatgcaaggctgttagagagataattagaactaatttgactgtaaacacaaatatattagtacaaaatatgtgacatagaaagtgataatttcttgggtagtttgcagttttaaaattatgttttaaaatggactatcatctgcttaccgtaactttaaagtatttcgatttcttgactttatatatcttgtggaaaggac

SEQ ID NO: 632 - DNA, 241 bp, synthetic construct
  misc_feature 1..241: note = Promoter
  source 1..241: mol_type = other DNA
gagggcctatttgccatgattccttcatatttgcatataagatgcaaggctgttagagagataattagaactaatttgactgtaaacacaaatatattagtacaaaatatgtgacatagaaagtgataatttcttgggtagtttgcagttttaaaattatgttttaaaatggactatcatctgcttaccgtaactttaaagtatttcgatttcttgactttatatatcttgtggaaaggac

SEQ ID NO: 633 - DNA, 241 bp, synthetic construct
  misc_feature 1..241: note = Promoter
  source 1..241: mol_type = other DNA
gagggcctattttccatgattccttcatatttgcatataagatgcaaggctgttagagagataattagaactaatttgactgtaaacacaaatatattagtacaaaatatgtgacatagaaagtgataatttcttgggtagtttgcagttttaaaattatgttttaaaatggactatcatctgcttaccgtaactttaaagtatttcgatttcttgactttatatatcttgtggaaaggac

SEQ ID NO: 634 - DNA, 241 bp, synthetic construct
  misc_feature 1..241: note = Promoter
  source 1..241: mol_type = other DNA
gagggcctatttcacatgattccttcatatttgcatataagatgcaaggctgttagagagataattagaactaatttgactgtaaacacaaatatattagtacaaaatatgtgacatagaaagtgataatttcttgggtagtttgcagttttaaaattatgttttaaaatggactatcatctgcttaccgtaactttaaagtatttcgatttcttgactttatatatcttgtggaaaggac

SEQ ID NO: 635 - DNA, 241 bp, synthetic construct
  misc_feature 1..241: note = Promoter
  source 1..241: mol_type = other DNA
gagggcctatttcgcatgattccttcatatttgcatataagatgcaaggctgttagagagataattagaactaatttgactgtaaacacaaatatattagtacaaaatatgtgacatagaaagtgataatttcttgggtagtttgcagttttaaaattatgttttaaaatggactatcatctgcttaccgtaactttaaagtatttcgatttcttgactttatatatcttgtggaaaggac

SEQ ID NO: 636 - DNA, 241 bp, synthetic construct
  misc_feature 1..241: note = Promoter
  source 1..241: mol_type = other DNA
gagggcctatttctcatgattccttcatatttgcatataagatgcaaggctgttagagagataattagaactaatttgactgtaaacacaaatatattagtacaaaatatgtgacatagaaagtgataatttcttgggtagtttgcagttttaaaattatgttttaaaatggactatcatctgcttaccgtaactttaaagtatttcgatttcttgactttatatatcttgtggaaaggac

SEQ ID NO: 637 - DNA, 241 bp, synthetic construct
  misc_feature 1..241: note = Promoter
  source 1..241: mol_type = other DNA
gagggcctatttccaatgattccttcatatttgcatataagatgcaaggctgttagagagataattagaactaatttgactgtaaacacaaatatattagtacaaaatatgtgacatagaaagtgataatttcttgggtagtttgcagttttaaaattatgttttaaaatggactatcatctgcttaccgtaactttaaagtatttcgatttcttgactttatatatcttgtggaaaggac

SEQ ID NO: 638 - DNA, 241 bp, synthetic construct
  misc_feature 1..241: note = Promoter
  source 1..241: mol_type = other DNA
gagggcctatttccgatgattccttcatatttgcatataagatgcaaggctgttagagagataattagaactaatttgactgtaaacacaaatatattagtacaaaatatgtgacatagaaagtgataatttcttgggtagtttgcagttttaaaattatgttttaaaatggactatcatctgcttaccgtaactttaaagtatttcgatttcttgactttatatatcttgtggaaaggac

SEQ ID NO: 639 - DNA, 241 bp, synthetic construct
  misc_feature 1..241: note = Promoter
  source 1..241: mol_type = other DNA
gagggcctatttcctatgattccttcatatttgcatataagatgcaaggctgttagagagataattagaactaatttgactgtaaacacaaatatattagtacaaaatatgtgacatagaaagtgataatttcttgggtagtttgcagttttaaaattatgttttaaaatggactatcatctgcttaccgtaactttaaagtatttcgatttcttgactttatatatcttgtggaaaggac

SEQ ID NO: 640 - DNA, 241 bp, synthetic construct
  misc_feature 1..241: note = Promoter
  source 1..241: mol_type = other DNA
gagggcctatttcccctgattccttcatatttgcatataagatgcaaggctgttagagagataattagaactaatttgactgtaaacacaaatatattagtacaaaatatgtgacatagaaagtgataatttcttgggtagtttgcagttttaaaattatgttttaaaatggactatcatctgcttaccgtaactttaaagtatttcgatttcttgactttatatatcttgtggaaaggac

SEQ ID NO: 641 - DNA, 241 bp, synthetic construct
  misc_feature 1..241: note = Promoter
  source 1..241: mol_type = other DNA
gagggcctatttcccgtgattccttcatatttgcatataagatgcaaggctgttagagagataattagaactaatttgactgtaaacacaaatatattagtacaaaatatgtgacatagaaagtgataatttcttgggtagtttgcagttttaaaattatgttttaaaatggactatcatctgcttaccgtaactttaaagtatttcgatttcttgactttatatatcttgtggaaaggac

SEQ ID NO: 642 - DNA, 241 bp, synthetic construct
  misc_feature 1..241: note = Promoter
  source 1..241: mol_type = other DNA
gagggcctatttcccttgattccttcatatttgcatataagatgcaaggctgttagagagataattagaactaatttgactgtaaacacaaatatattagtacaaaatatgtgacatagaaagtgataatttcttgggtagtttgcagttttaaaattatgttttaaaatggactatcatctgcttaccgtaactttaaagtatttcgatttcttgactttatatatcttgtggaaaggac

SEQ ID NO: 643 - DNA, 241 bp, synthetic construct
  misc_feature 1..241: note = Promoter
  source 1..241: mol_type = other DNA
gagggcctatttcccaagattccttcatatttgcatataagatgcaaggctgttagagagataattagaactaatttgactgtaaacacaaatatattagtacaaaatatgtgacatagaaagtgataatttcttgggtagtttgcagttttaaaattatgttttaaaatggactatcatctgcttaccgtaactttaaagtatttcgatttcttgactttatatatcttgtggaaaggac

SEQ ID NO: 644 - DNA, 241 bp, synthetic construct
  misc_feature 1..241: note = Promoter
  source 1..241: mol_type = other DNA
gagggcctatttcccacgattccttcatatttgcatataagatgcaaggctgttagagagataattagaactaatttgactgtaaacacaaatatattagtacaaaatatgtgacatagaaagtgataatttcttgggtagtttgcagttttaaaattatgttttaaaatggactatcatctgcttaccgtaactttaaagtatttcgatttcttgactttatatatcttgtggaaaggac

SEQ ID NO: 645 - DNA, 241 bp, synthetic construct
  misc_feature 1..241: note = Promoter
  source 1..241: mol_type = other DNA
gagggcctatttcccaggattccttcatatttgcatataagatgcaaggctgttagagagataattagaactaatttgactgtaaacacaaatatattagtacaaaatatgtgacatagaaagtgataatttcttgggtagtttgcagttttaaaattatgttttaaaatggactatcatctgcttaccgtaactttaaagtatttcgatttcttgactttatatatcttgtggaaaggac

SEQ ID NO: 646 - DNA, 241 bp, synthetic construct
  misc_feature 1..241: note = Promoter
  source 1..241: mol_type = other DNA
gagggcctatttcccataattccttcatatttgcatataagatgcaaggctgttagagagataattagaactaatttgactgtaaacacaaatatattagtacaaaatatgtgacatagaaagtgataatttcttgggtagtttgcagttttaaaattatgttttaaaatggactatcatctgcttaccgtaactttaaagtatttcgatttcttgactttatatatcttgtggaaaggac

SEQ ID NO: 647 - DNA, 241 bp, synthetic construct
  misc_feature 1..241: note = Promoter
  source 1..241: mol_type = other DNA
gagggcctatttcccatcattccttcatatttgcatataagatgcaaggctgttagagagataattagaactaatttgactgtaaacacaaatatattagtacaaaatatgtgacatagaaagtgataatttcttgggtagtttgcagttttaaaattatgttttaaaatggactatcatctgcttaccgtaactttaaagtatttcgatttcttgactttatatatcttgtggaaaggac

SEQ ID NO: 648 - DNA, 241 bp, synthetic construct
  misc_feature 1..241: note = Promoter
  source 1..241: mol_type = other DNA
gagggcctatttcccattattccttcatatttgcatataagatgcaaggctgttagagagataattagaactaatttgactgtaaacacaaatatattagtacaaaatatgtgacatagaaagtgataatttcttgggtagtttgcagttttaaaattatgttttaaaatggactatcatctgcttaccgtaactttaaagtatttcgatttcttgactttatatatcttgtggaaaggac

SEQ ID NO: 649 - DNA, 241 bp, synthetic construct
  misc_feature 1..241: note = Promoter
  source 1..241: mol_type = other DNA
gagggcctatttcccatgcttccttcatatttgcatataagatgcaaggctgttagagagataattagaactaatttgactgtaaacacaaatatattagtacaaaatatgtgacatagaaagtgataatttcttgggtagtttgcagttttaaaattatgttttaaaatggactatcatctgcttaccgtaactttaaagtatttcgatttcttgactttatatatcttgtggaaaggac

SEQ ID NO: 650 - DNA, 241 bp, synthetic construct
  misc_feature 1..241: note = Promoter
  source 1..241: mol_type = other DNA
gagggcctatttcccatggttccttcatatttgcatataagatgcaaggctgttagagagataattagaactaatttgactgtaaacacaaatatattagtacaaaatatgtgacatagaaagtgataatttcttgggtagtttgcagttttaaaattatgttttaaaatggactatcatctgcttaccgtaactttaaagtatttcgatttcttgactttatatatcttgtggaaaggac

SEQ ID NO: 651 - DNA, 241 bp, synthetic construct
  misc_feature 1..241: note = Promoter
  source 1..241: mol_type = other DNA
gagggcctatttcccatgtttccttcatatttgcatataagatgcaaggctgttagagagataattagaactaatttgactgtaaacacaaatatattagtacaaaatatgtgacatagaaagtgataatttcttgggtagtttgcagttttaaaattatgttttaaaatggactatcatctgcttaccgtaactttaaagtatttcgatttcttgactttatatatcttgtggaaaggac

SEQ ID NO: 652 - DNA, 241 bp, synthetic construct
  misc_feature 1..241: note = Promoter
  source 1..241: mol_type = other DNA
gagggcctatttcccatgaatccttcatatttgcatataagatgcaaggctgttagagagataattagaactaatttgactgtaaacacaaatatattagtacaaaatatgtgacatagaaagtgataatttcttgggtagtttgcagttttaaaattatgttttaaaatggactatcatctgcttaccgtaactttaaagtatttcgatttcttgactttatatatcttgtggaaaggac

SEQ ID NO: 653 - DNA, 241 bp, synthetic construct
  misc_feature 1..241: note = Promoter
  source 1..241: mol_type = other DNA
gagggcctatttcccatgactccttcatatttgcatataagatgcaaggctgttagagagataattagaactaatttgactgtaaacacaaatatattagtacaaaatatgtgacatagaaagtgataatttcttgggtagtttgcagttttaaaattatgttttaaaatggactatcatctgcttaccgtaactttaaagtatttcgatttcttgactttatatatcttgtggaaaggac

SEQ ID NO: 654 - DNA, 241 bp, synthetic construct
  misc_feature 1..241: note = Promoter
  source 1..241: mol_type = other DNA
gagggcctatttcccatgagtccttcatatttgcatataagatgcaaggctgttagagagataattagaactaatttgactgtaaacacaaatatattagtacaaaatatgtgacatagaaagtgataatttcttgggtagtttgcagttttaaaattatgttttaaaatggactatcatctgcttaccgtaactttaaagtatttcgatttcttgactttatatatcttgtggaaaggac

SEQ ID NO: 655 - DNA, 241 bp, synthetic construct
  misc_feature 1..241: note = Promoter
  source 1..241: mol_type = other DNA
gagggcctatttcccatgataccttcatatttgcatataagatgcaaggctgttagagagataattagaactaatttgactgtaaacacaaatatattagtacaaaatatgtgacatagaaagtgataatttcttgggtagtttgcagttttaaaattatgttttaaaatggactatcatctgcttaccgtaactttaaagtatttcgatttcttgactttatatatcttgtggaaaggac

SEQ ID NO: 656 - DNA, 241 bp, synthetic construct
  misc_feature 1..241: note = Promoter
  source 1..241: mol_type = other DNA
gagggcctatttcccatgatcccttcatatttgcatataagatgcaaggctgttagagagataattagaactaatttgactgtaaacacaaatatattagtacaaaatatgtgacatagaaagtgataatttcttgggtagtttgcagttttaaaattatgttttaaaatggactatcatctgcttaccgtaactttaaagtatttcgatttcttgactttatatatcttgtggaaaggac

SEQ ID NO: 657 - DNA, 241 bp, synthetic construct
  misc_feature 1..241: note = Promoter
  source 1..241: mol_type = other DNA
gagggcctatttcccatgatgccttcatatttgcatataagatgcaaggctgttagagagataattagaactaatttgactgtaaacacaaatatattagtacaaaatatgtgacatagaaagtgataatttcttgggtagtttgcagttttaaaattatgttttaaaatggactatcatctgcttaccgtaactttaaagtatttcgatttcttgactttatatatcttgtggaaaggac

SEQ ID NO: 658 - DNA, 241 bp, synthetic construct
  misc_feature 1..241: note = Promoter
  source 1..241: mol_type = other DNA
gagggcctatttcccatgattacttcatatttgcatataagatgcaaggctgttagagagataattagaactaatttgactgtaaacacaaatatattagtacaaaatatgtgacatagaaagtgataatttcttgggtagtttgcagttttaaaattatgttttaaaatggactatcatctgcttaccgtaactttaaagtatttcgatttcttgactttatatatcttgtggaaaggac

SEQ ID NO: 659 - DNA, 241 bp, synthetic construct
  misc_feature 1..241: note = Promoter
  source 1..241: mol_type = other DNA
gagggcctatttcccatgattgcttcatatttgcatataagatgcaaggctgttagagagataattagaactaatttgactgtaaacacaaatatattagtacaaaatatgtgacatagaaagtgataatttcttgggtagtttgcagttttaaaattatgttttaaaatggactatcatctgcttaccgtaactttaaagtatttcgatttcttgactttatatatcttgtggaaaggac

SEQ ID NO: 660 - DNA, 241 bp, synthetic construct
  misc_feature 1..241: note = Promoter
  source 1..241: mol_type = other DNA
gagggcctatttcccatgatttcttcatatttgcatataagatgcaaggctgttagagagataattagaactaatttgactgtaaacacaaatatattagtacaaaatatgtgacatagaaagtgataatttcttgggtagtttgcagttttaaaattatgttttaaaatggactatcatctgcttaccgtaactttaaagtatttcgatttcttgactttatatatcttgtggaaaggac

SEQ ID NO: 661 - DNA, 241 bp, synthetic construct
  misc_feature 1..241: note = Promoter
  source 1..241: mol_type = other DNA
gagggcctatttcccatgattcattcatatttgcatataagatgcaaggctgttagagagataattagaactaatttgactgtaaacacaaatatattagtacaaaatatgtgacatagaaagtgataatttcttgggtagtttgcagttttaaaattatgttttaaaatggactatcatctgcttaccgtaactttaaagtatttcgatttcttgactttatatatcttgtggaaaggac

SEQ ID NO: 662 - DNA, 241 bp, synthetic construct
  misc_feature 1..241: note = Promoter
  source 1..241: mol_type = other DNA
gagggcctatttcccatgattcgttcatatttgcatataagatgcaaggctgttagagagataattagaactaatttgactgtaaacacaaatatattagtacaaaatatgtgacatagaaagtgataatttcttgggtagtttgcagttttaaaattatgttttaaaatggactatcatctgcttaccgtaactttaaagtatttcgatttcttgactttatatatcttgtggaaaggac

SEQ ID NO: 663 - DNA, 241 bp, synthetic construct
  misc_feature 1..241: note = Promoter
  source 1..241: mol_type = other DNA
gagggcctatttcccatgattctttcatatttgcatataagatgcaaggctgttagagagataattagaactaatttgactgtaaacacaaatatattagtacaaaatatgtgacatagaaagtgataatttcttgggtagtttgcagttttaaaattatgttttaaaatggactatcatctgcttaccgtaactttaaagtatttcgatttcttgactttatatatcttgtggaaaggac

SEQ ID NO: 664 - DNA, 241 bp, synthetic construct
  misc_feature 1..241: note = Promoter
  source 1..241: mol_type = other DNA
gagggcctatttcccatgattccatcatatttgcatataagatgcaaggctgttagagagataattagaactaatttgactgtaaacacaaatatattagtacaaaatatgtgacatagaaagtgataatttcttgggtagtttgcagttttaaaattatgttttaaaatggactatcatctgcttaccgtaactttaaagtatttcgatttcttgactttatatatcttgtggaaaggac

SEQ ID NO: 665 - DNA, 241 bp, synthetic construct
  misc_feature 1..241: note = Promoter
  source 1..241: mol_type = other DNA
gagggcctatttcccatgattccctcatatttgcatataagatgcaaggctgttagagagataattagaactaatttgactgtaaacacaaatatattagtacaaaatatgtgacatagaaagtgataatttcttgggtagtttgcagttttaaaattatgttttaaaatggactatcatctgcttaccgtaactttaaagtatttcgatttcttgactttatatatcttgtggaaaggac

SEQ ID NO: 666 - DNA, 241 bp, synthetic construct
  misc_feature 1..241: note = Promoter
  source 1..241: mol_type = other DNA
gagggcctatttcccatgattccgtcatatttgcatataagatgcaaggctgttagagagataattagaactaatttgactgtaaacacaaatatattagtacaaaatatgtgacatagaaagtgataatttcttgggtagtttgcagttttaaaattatgttttaaaatggactatcatctgcttaccgtaactttaaagtatttcgatttcttgactttatatatcttgtggaaaggac

SEQ ID NO: 667 - DNA, 241 bp, synthetic construct
  misc_feature 1..241: note = Promoter
  source 1..241: mol_type = other DNA
gagggcctatttcccatgattcctacatatttgcatataagatgcaaggctgttagagagataattagaactaatttgactgtaaacacaaatatattagtacaaaatatgtgacatagaaagtgataatttcttgggtagtttgcagttttaaaattatgttttaaaatggactatcatctgcttaccgtaactttaaagtatttcgatttcttgactttatatatcttgtggaaaggac

SEQ ID NO: 668 - DNA, 241 bp, synthetic construct
  misc_feature 1..241: note = Promoter
  source 1..241: mol_type = other DNA
gagggcctatttcccatgattcctccatatttgcatataagatgcaaggctgttagagagataattagaactaatttgactgtaaacacaaatatattagtacaaaatatgtgacatagaaagtgataatttcttgggtagtttgcagttttaaaattatgttttaaaatggactatcatctgcttaccgtaactttaaagtatttcgatttcttgactttatatatcttgtggaaaggac

SEQ ID NO: 669 - DNA, 241 bp, synthetic construct
  misc_feature 1..241: note = Promoter
  source 1..241: mol_type = other DNA
gagggcctatttcccatgattcctgcatatttgcatataagatgcaaggctgttagagagataattagaactaatttgactgtaaacacaaatatattagtacaaaatatgtgacatagaaagtgataatttcttgggtagtttgcagttttaaaattatgttttaaaatggactatcatctgcttaccgtaactttaaagtatttcgatttcttgactttatatatcttgtggaaaggac

SEQ ID NO: 670 - DNA, 241 bp, synthetic construct
  misc_feature 1..241: note = Promoter
  source 1..241: mol_type = other DNA
gagggcctatttcccatgattccttaatatttgcatataagatgcaaggctgttagagagataattagaactaatttgactgtaaacacaaatatattagtacaaaatatgtgacatagaaagtgataatttcttgggtagtttgcagttttaaaattatgttttaaaatggactatcatctgcttaccgtaactttaaagtatttcgatttcttgactttatatatcttgtggaaaggac

SEQ ID NO: 671 - DNA, 241 bp, synthetic construct
  misc_feature 1..241: note = Promoter
  source 1..241: mol_type = other DNA
gagggcctatttcccatgattccttgatatttgcatataagatgcaaggctgttagagagataattagaactaatttgactgtaaacacaaatatattagtacaaaatatgtgacatagaaagtgataatttcttgggtagtttgcagttttaaaattatgttttaaaatggactatcatctgcttaccgtaactttaaagtatttcgatttcttgactttatatatcttgtggaaaggac

SEQ ID NO: 672 - DNA, 241 bp, synthetic construct
  misc_feature 1..241: note = Promoter
  source 1..241: mol_type = other DNA
gagggcctatttcccatgattcctttatatttgcatataagatgcaaggctgttagagagataattagaactaatttgactgtaaacacaaatatattagtacaaaatatgtgacatagaaagtgataatttcttgggtagtttgcagttttaaaattatgttttaaaatggactatcatctgcttaccgtaactttaaagtatttcgatttcttgactttatatatcttgtggaaaggac

SEQ ID NO: 673 - DNA, 241 bp, synthetic construct
  misc_feature 1..241: note = Promoter
  source 1..241: mol_type = other DNA
gagggcctatttcccatgattccttcctatttgcatataagatgcaaggctgttagagagataattagaactaatttgactgtaaacacaaatatattagtacaaaatatgtgacatagaaagtgataatttcttgggtagtttgcagttttaaaattatgttttaaaatggactatcatctgcttaccgtaactttaaagtatttcgatttcttgactttatatatcttgtggaaaggac

SEQ ID NO: 674 - DNA, 241 bp, synthetic construct
  misc_feature 1..241: note = Promoter
  source 1..241: mol_type = other DNA
gagggcctatttcccatgattccttcgtatttgcatataagatgcaaggctgttagagagataattagaactaatttgactgtaaacacaaatatattagtacaaaatatgtgacatagaaagtgataatttcttgggtagtttgcagttttaaaattatgttttaaaatggactatcatctgcttaccgtaactttaaagtatttcgatttcttgactttatatatcttgtggaaaggac

SEQ ID NO: 675 - DNA, 241 bp, synthetic construct
  misc_feature 1..241: note = Promoter
  source 1..241: mol_type = other DNA
gagggcctatttcccatgattccttcttatttgcatataagatgcaaggctgttagagagataattagaactaatttgactgtaaacacaaatatattagtacaaaatatgtgacatagaaagtgataatttcttgggtagtttgcagttttaaaattatgttttaaaatggactatcatctgcttaccgtaactttaaagtatttcgatttcttgactttatatatcttgtggaaaggac

SEQ ID NO: 676 - DNA, 241 bp, synthetic construct
  misc_feature 1..241: note = Promoter
  source 1..241: mol_type = other DNA
gagggcctatttcccatgattccttcaaatttgcatataagatgcaaggctgttagagagataattagaactaatttgactgtaaacacaaatatattagtacaaaatatgtgacatagaaagtgataatttcttgggtagtttgcagttttaaaattatgttttaaaatggactatcatctgcttaccgtaactttaaagtatttcgatttcttgactttatatatcttgtggaaaggac

SEQ ID NO: 677 - DNA, 241 bp, synthetic construct
  misc_feature 1..241: note = Promoter
  source 1..241: mol_type = other DNA
gagggcctatttcccatgattccttcacatttgcatataagatgcaaggctgttagagagataattagaactaatttgactgtaaacacaaatatattagtacaaaatatgtgacatagaaagtgataatttcttgggtagtttgcagttttaaaattatgttttaaaatggactatcatctgcttaccgtaactttaaagtatttcgatttcttgactttatatatcttgtggaaaggac

SEQ ID NO: 678 - DNA, 241 bp, synthetic construct
  misc_feature 1..241: note = Promoter
  source 1..241: mol_type = other DNA
gagggcctatttcccatgattccttcagatttgcatataagatgcaaggctgttagagagataattagaactaatttgactgtaaacacaaatatattagtacaaaatatgtgacatagaaagtgataatttcttgggtagtttgcagttttaaaattatgttttaaaatggactatcatctgcttaccgtaactttaaagtatttcgatttcttgactttatatatcttgtggaaaggac

SEQ ID NO: 679 - DNA, 241 bp, synthetic construct
  misc_feature 1..241: note = Promoter
  source 1..241: mol_type = other DNA
gagggcctatttcccatgattccttcatctttgcatataagatgcaaggctgttagagagataattagaactaatttgactgtaaacacaaatatattagtacaaaatatgtgacatagaaagtgataatttcttgggtagtttgcagttttaaaattatgttttaaaatggactatcatctgcttaccgtaactttaaagtatttcgatttcttgactttatatatcttgtggaaaggac

SEQ ID NO: 680 - DNA, 241 bp, synthetic construct
  misc_feature 1..241: note = Promoter
  source 1..241: mol_type = other DNA
gagggcctatttcccatgattccttcatgtttgcatataagatgcaaggctgttagagagataattagaactaatttgactgtaaacacaaatatattagtacaaaatatgtgacatagaaagtgataatttcttgggtagtttgcagttttaaaattatgttttaaaatggactatcatctgcttaccgtaactttaaagtatttcgatttcttgactttatatatcttgtggaaaggac

SEQ ID NO: 681 - DNA, 241 bp, synthetic construct
  misc_feature 1..241: note = Promoter
  source 1..241: mol_type = other DNA
gagggcctatttcccatgattccttcatttttgcatataagatgcaaggctgttagagagataattagaactaatttgactgtaaacacaaatatattagtacaaaatatgtgacatagaaagtgataatttcttgggtagtttgcagttttaaaattatgttttaaaatggactatcatctgcttaccgtaactttaaagtatttcgatttcttgactttatatatcttgtggaaaggac

SEQ ID NO: 682 - DNA, 241 bp, synthetic construct
  misc_feature 1..241: note = Promoter
  source 1..241: mol_type = other DNA
gagggcctatttcccatgattccttcataattgcatataagatgcaaggctgttagagagataattagaactaatttgactgtaaacacaaatatattagtacaaaatatgtgacatagaaagtgataatttcttgggtagtttgcagttttaaaattatgttttaaaatggactatcatctgcttaccgtaactttaaagtatttcgatttcttgactttatatatcttgtggaaaggac

SEQ ID NO: 683 - DNA, 241 bp, synthetic construct
  misc_feature 1..241: note = Promoter
  source 1..241: mol_type = other DNA
gagggcctatttcccatgattccttcatacttgcatataagatgcaaggctgttagagagataattagaactaatttgactgtaaacacaaatatattagtacaaaatatgtgacatagaaagtgataatttcttgggtagtttgcagttttaaaattatgttttaaaatggactatcatctgcttaccgtaactttaaagtatttcgatttcttgactttatatatcttgtggaaaggac

SEQ ID NO: 684 - DNA, 241 bp, synthetic construct
  misc_feature 1..241: note = Promoter
  source 1..241: mol_type = other DNA
gagggcctatttcccatgattccttcatagttgcatataagatgcaaggctgttagagagataattagaactaatttgactgtaaacacaaatatattagtacaaaatatgtgacatagaaagtgataatttcttgggtagtttgcagttttaaaattatgttttaaaatggactatcatctgcttaccgtaactttaaagtatttcgatttcttgactttatatatcttgtggaaaggac

SEQ ID NO: 685 - DNA, 241 bp, synthetic construct
  misc_feature 1..241: note = Promoter
  source 1..241: mol_type = other DNA
gagggcctatttcccatgattccttcatatatgcatataagatgcaaggctgttagagagataattagaactaatttgactgtaaacacaaatatattagtacaaaatatgtgacatagaaagtgataatttcttgggtagtttgcagttttaaaattatgttttaaaatggactatcatctgcttaccgtaactttaaagtatttcgatttcttgactttatatatcttgtggaaaggac

SEQ ID NO: 686 - DNA, 241 bp, synthetic construct
  misc_feature 1..241: note = Promoter
  source 1..241: mol_type = other DNA
gagggcctatttcccatgattccttcatatctgcatataagatgcaaggctgttagagagataattagaactaatttgactgtaaacacaaatatattagtacaaaatatgtgacatagaaagtgataatttcttgggtagtttgcagttttaaaattatgttttaaaatggactatcatctgcttaccgtaactttaaagtatttcgatttcttgactttatatatcttgtggaaaggac

SEQ ID NO: 687 - DNA, 241 bp, synthetic construct
  misc_feature 1..241: note = Promoter
  source 1..241: mol_type = other DNA
gagggcctatttcccatgattccttcatatgtgcatataagatgcaaggctgttagagagataattagaactaatttgactgtaaacacaaatatattagtacaaaatatgtgacatagaaagtgataatttcttgggtagtttgcagttttaaaattatgttttaaaatggactatcatctgcttaccgtaactttaaagtatttcgatttcttgactttatatatcttgtggaaaggac

SEQ ID NO: 688 - DNA, 241 bp, synthetic construct
  misc_feature 1..241: note = Promoter
  source 1..241: mol_type = other DNA
gagggcctatttcccatgattccttcatattagcatataagatgcaaggctgttagagagataattagaactaatttgactgtaaacacaaatatattagtacaaaatatgtgacatagaaagtgataatttcttgggtagtttgcagttttaaaattatgttttaaaatggactatcatctgcttaccgtaactttaaagtatttcgatttcttgactttatatatcttgtggaaaggac

SEQ ID NO: 689 - DNA, 241 bp, synthetic construct
  misc_feature 1..241: note = Promoter
  source 1..241: mol_type = other DNA
gagggcctatttcccatgattccttcatattcgcatataagatgcaaggctgttagagagataattagaactaatttgactgtaaacacaaatatattagtacaaaatatgtgacatagaaagtgataatttcttgggtagtttgcagttttaaaattatgttttaaaatggactatcatctgcttaccgtaactttaaagtatttcgatttcttgactttatatatcttgtggaaaggac

SEQ ID NO: 690 - DNA, 241 bp, synthetic construct
  misc_feature 1..241: note = Promoter
  source 1..241: mol_type = other DNA
gagggcctatttcccatgattccttcatattggcatataagatgcaaggctgttagagagataattagaactaatttgactgtaaacacaaatatattagtacaaaatatgtgacatagaaagtgataatttcttgggtagtttgcagttttaaaattatgttttaaaatggactatcatctgcttaccgtaactttaaagtatttcgatttcttgactttatatatcttgtggaaaggac

SEQ ID NO: 691 - DNA, 241 bp, synthetic construct
  misc_feature 1..241: note = Promoter
  source 1..241: mol_type = other DNA
gagggcctatttcccatgattccttcatatttacatataagatgcaaggctgttagagagataattagaactaatttgactgtaaacacaaatatattagtacaaaatatgtgacatagaaagtgataatttcttgggtagtttgcagttttaaaattatgttttaaaatggactatcatctgcttaccgtaactttaaagtatttcgatttcttgactttatatatcttgtggaaaggac

SEQ ID NO: 692 - DNA, 241 bp, synthetic construct
  misc_feature 1..241: note = Promoter
  source 1..241: mol_type = other DNA
gagggcctatttcccatgattccttcatatttccatataagatgcaaggctgttagagagataattagaactaatttgactgtaaacacaaatatattagtacaaaatatgtgacatagaaagtgataatttcttgggtagtttgcagttttaaaattatgttttaaaatggactatcatctgcttaccgtaactttaaagtatttcgatttcttgactttatatatcttgtggaaaggac

SEQ ID NO: 693 - DNA, 241 bp, synthetic construct
  misc_feature 1..241: note = Promoter
  source 1..241: mol_type = other DNA
gagggcctatttcccatgattccttcatattttcatataagatgcaaggctgttagagagataattagaactaatttgactgtaaacacaaatatattagtacaaaatatgtgacatagaaagtgataatttcttgggtagtttgcagttttaaaattatgttttaaaatggactatcatctgcttaccgtaactttaaagtatttcgatttcttgactttatatatcttgtggaaaggac

SEQ ID NO: 694 - DNA, 241 bp, synthetic construct
  misc_feature 1..241: note = Promoter
  source 1..241: mol_type = other DNA
gagggcctatttcccatgattccttcatatttgaatataagatgcaaggctgttagagagataattagaactaatttgactgtaaacacaaatatattagtacaaaatatgtgacatagaaagtgataatttcttgggtagtttgcagttttaaaattatgttttaaaatggactatcatctgcttaccgtaactttaaagtatttcgatttcttgactttatatatcttgtggaaaggac

SEQ ID NO: 695 - DNA, 241 bp, synthetic construct
  misc_feature 1..241: note = Promoter
  source 1..241: mol_type = other DNA
gagggcctatttcccatgattccttcatatttggatataagatgcaaggctgttagagagataattagaactaatttgactgtaaacacaaatatattagtacaaaatatgtgacatagaaagtgataatttcttgggtagtttgcagttttaaaattatgttttaaaatggactatcatctgcttaccgtaactttaaagtatttcgatttcttgactttatatatcttgtggaaaggac

SEQ ID NO: 696 - DNA, 241 bp, synthetic construct
  misc_feature 1..241: note = Promoter
  source 1..241: mol_type = other DNA
gagggcctatttcccatgattccttcatatttgtatataagatgcaaggctgttagagagataattagaactaatttgactgtaaacacaaatatattagtacaaaatatgtgacatagaaagtgataatttcttgggtagtttgcagttttaaaattatgttttaaaatggactatcatctgcttaccgtaactttaaagtatttcgatttcttgactttatatatcttgtggaaaggac

SEQ ID NO: 697 - DNA, 241 bp, synthetic construct
  misc_feature 1..241: note = Promoter
  source 1..241: mol_type = other DNA
gagggcctatttcccatgattccttcatatttgcctataagatgcaaggctgttagagagataattagaactaatttgactgtaaacacaaatatattagtacaaaatatgtgacatagaaagtgataatttcttgggtagtttgcagttttaaaattatgttttaaaatggactatcatctgcttaccgtaactttaaagtatttcgatttcttgactttatatatcttgtggaaaggac

SEQ ID NO: 698 - DNA, 241 bp, synthetic construct
  misc_feature 1..241: note = Promoter
  source 1..241: mol_type = other DNA
gagggcctatttcccatgattccttcatatttgcgtataagatgcaaggctgttagagagataattagaactaatttgactgtaaacacaaatatattagtacaaaatatgtgacatagaaagtgataatttcttgggtagtttgcagttttaaaattatgttttaaaatggactatcatctgcttaccgtaactttaaagtatttcgatttcttgactttatatatcttgtggaaaggac

SEQ ID NO: 699 - DNA, 241 bp, synthetic construct
  misc_feature 1..241: note = Promoter
  source 1..241: mol_type = other DNA
gagggcctatttcccatgattccttcatatttgcttataagatgcaaggctgttagagagataattagaactaatttgactgtaaacacaaatatattagtacaaaatatgtgacatagaaagtgataatttcttgggtagtttgcagttttaaaattatgttttaaaatggactatcatctgcttaccgtaactttaaagtatttcgatttcttgactttatatatcttgtggaaaggac

SEQ ID NO: 700 - DNA, 241 bp, synthetic construct
  misc_feature 1..241: note = Promoter
  source 1..241: mol_type = other DNA
gagggcctatttcccatgattccttcatatttgcaaataagatgcaaggctgttagagagataattagaactaatttgactgtaaacacaaatatattagtacaaaatatgtgacatagaaagtgataatttcttgggtagtttgcagttttaaaattatgttttaaaatggactatcatctgcttaccgtaactttaaagtatttcgatttcttgactttatatatcttgtggaaaggac

SEQ ID NO: 701 - DNA, 241 bp, synthetic construct
  misc_feature 1..241: note = Promoter
  source 1..241: mol_type = other DNA
gagggcctatttcccatgattccttcatatttgcacataagatgcaaggctgttagagagataattagaactaatttgactgtaaacacaaatatattagtacaaaatatgtgacatagaaagtgataatttcttgggtagtttgcagttttaaaattatgttttaaaatggactatcatctgcttaccgtaactttaaagtatttcgatttcttgactttatatatcttgtggaaaggac

SEQ ID NO: 702 - DNA, 241 bp, synthetic construct
  misc_feature 1..241: note = Promoter
  source 1..241: mol_type = other DNA
gagggcctatttcccatgattccttcatatttgcagataagatgcaaggctgttagagagataattagaactaatttgactgtaaacacaaatatattagtacaaaatatgtgacatagaaagtgataatttcttgggtagtttgcagttttaaaattatgttttaaaatggactatcatctgcttaccgtaactttaaagtatttcgatttcttgactttatatatcttgtggaaaggac

SEQ ID NO: 703 - DNA, 241 bp, synthetic construct
  misc_feature 1..241: note = Promoter
  source 1..241: mol_type = other DNA
gagggcctatttcccatgattccttcatatttgcatctaagatgcaaggctgttagagagataattagaactaatttgactgtaaacacaaatatattagtacaaaatatgtgacatagaaagtgataatttcttgggtagtttgcagttttaaaattatgttttaaaatggactatcatctgcttaccgtaactttaaagtatttcgatttcttgactttatatatcttgtggaaaggac

SEQ ID NO: 704 - DNA, 241 bp, synthetic construct
  misc_feature 1..241: note = Promoter
  source 1..241: mol_type = other DNA
gagggcctatttcccatgattccttcatatttgcatgtaagatgcaaggctgttagagagataattagaactaatttgactgtaaacacaaatatattagtacaaaatatgtgacatagaaagtgataatttcttgggtagtttgcagttttaaaattatgttttaaaatggactatcatctgcttaccgtaactttaaagtatttcgatttcttgactttatatatcttgtggaaaggac

SEQ ID NO: 705 - DNA, 241 bp, synthetic construct
  misc_feature 1..241: note = Promoter
  source 1..241: mol_type = other DNA
gagggcctatttcccatgattccttcatatttgcatttaagatgcaaggctgttagagagataattagaactaatttgactgtaaacacaaatatattagtacaaaatatgtgacatagaaagtgataatttcttgggtagtttgcagttttaaaattatgttttaaaatggactatcatctgcttaccgtaactttaaagtatttcgatttcttgactttatatatcttgtggaaaggac

SEQ ID NO: 706 - DNA, 241 bp, synthetic construct
  misc_feature 1..241: note = Promoter
  source 1..241: mol_type = other DNA
gagggcctatttcccatgattccttcatatttgcataaaagatgcaaggctgttagagagataattagaactaatttgactgtaaacacaaatatattagtacaaaatatgtgacatagaaagtgataatttcttgggtagtttgcagttttaaaattatgttttaaaatggactatcatctgcttaccgtaactttaaagtatttcgatttcttgactttatatatcttgtggaaaggac

SEQ ID NO: 707 - DNA, 241 bp, synthetic construct
  misc_feature 1..241: note = Promoter
  source 1..241: mol_type = other DNA
gagggcctatttcccatgattccttcatatttgcatacaagatgcaaggctgttagagagataattagaactaatttgactgtaaacacaaatatattagtacaaaatatgtgacatagaaagtgataatttcttgggtagtttgcagttttaaaattatgttttaaaatggactatcatctgcttaccgtaactttaaagtatttcgatttcttgactttatatatcttgtggaaaggac

SEQ ID NO: 708 - DNA, 241 bp, synthetic construct
  misc_feature 1..241: note = Promoter
  source 1..241: mol_type = other DNA
gagggcctatttcccatgattccttcatatttgcatagaagatgcaaggctgttagagagataattagaactaatttgactgtaaacacaaatatattagtacaaaatatgtgacatagaaagtgataatttcttgggtagtttgcagttttaaaattatgttttaaaatggactatcatctgcttaccgtaactttaaagtatttcgatttcttgactttatatatcttgtggaaaggac

SEQ ID NO: 709 - DNA, 241 bp, synthetic construct
  misc_feature 1..241: note = Promoter
  source 1..241: mol_type = other DNA
gagggcctatttcccatgattccttcatatttgcatatcagatgcaaggctgttagagagataattagaactaatttgactgtaaacacaaatatattagtacaaaatatgtgacatagaaagtgataatttcttgggtagtttgcagttttaaaattatgttttaaaatggactatcatctgcttaccgtaactttaaagtatttcgatttcttgactttatatatcttgtggaaaggac

SEQ ID NO: 710 - DNA, 241 bp, synthetic construct
  misc_feature 1..241: note = Promoter
  source 1..241: mol_type = other DNA
gagggcctatttcccatgattccttcatatttgcatatgagatgcaaggctgttagagagataattagaactaatttgactgtaaacacaaatatattagtacaaaatatgtgacatagaaagtgataatttcttgggtagtttgcagttttaaaattatgttttaaaatggactatcatctgcttaccgtaactttaaagtatttcgatttcttgactttatatatcttgtggaaaggac

SEQ ID NO: 711 - DNA, 241 bp, synthetic construct
  misc_feature 1..241: note = Promoter
  source 1..241: mol_type = other DNA
gagggcctatttcccatgattccttcatatttgcatattagatgcaaggctgttagagagataattagaactaatttgactgtaaacacaaatatattagtacaaaatatgtgacatagaaagtgataatttcttgggtagtttgcagttttaaaattatgttttaaaatggactatcatctgcttaccgtaactttaaagtatttcgatttcttgactttatatatcttgtggaaaggac

SEQ ID NO: 712 - DNA, 241 bp, synthetic construct
  misc_feature 1..241: note = Promoter
  source 1..241: mol_type = other DNA
gagggcctatttcccatgattccttcatatttgcatatacgatgcaaggctgttagagagataattagaactaatttgactgtaaacacaaatatattagtacaaaatatgtgacatagaaagtgataatttcttgggtagtttgcagttttaaaattatgttttaaaatggactatcatctgcttaccgtaactttaaagtatttcgatttcttgactttatatatcttgtggaaaggac

SEQ ID NO: 713 - DNA, 241 bp, synthetic construct
  misc_feature 1..241: note = Promoter
  source 1..241: mol_type = other DNA
gagggcctatttcccatgattccttcatatttgcatataggatgcaaggctgttagagagataattagaactaatttgactgtaaacacaaatatattagtacaaaatatgtgacatagaaagtgataatttcttgggtagtttgcagttttaaaattatgttttaaaatggactatcatctgcttaccgtaactttaaagtatttcgatttcttgactttatatatcttgtggaaaggac

SEQ ID NO: 714 - DNA, 241 bp, synthetic construct
  misc_feature 1..241: note = Promoter
  source 1..241: mol_type = other DNA
gagggcctatttcccatgattccttcatatttgcatatatgatgcaaggctgttagagagataattagaactaatttgactgtaaacacaaatatattagtacaaaatatgtgacatagaaagtgataatttcttgggtagtttgcagttttaaaattatgttttaaaatggactatcatctgcttaccgtaactttaaagtatttcgatttcttgactttatatatcttgtggaaaggac

SEQ ID NO: 715 - DNA, 241 bp, synthetic construct
  misc_feature 1..241: note = Promoter
  source 1..241: mol_type = other DNA
gagggcctatttcccatgattccttcatatttgcatataaaatgcaaggctgttagagagataattagaactaatttgactgtaaacacaaatatattagtacaaaatatgtgacatagaaagtgataatttcttgggtagtttgcagttttaaaattatgttttaaaatggactatcatctgcttaccgtaactttaaagtatttcgatttcttgactttatatatcttgtggaaaggac

SEQ ID NO: 716 - DNA, 241 bp, synthetic construct
  misc_feature 1..241: note = Promoter
  source 1..241: mol_type = other DNA
gagggcctatttcccatgattccttcatatttgcatataacatgcaaggctgttagagagataattagaactaatttgactgtaaacacaaatatattagtacaaaatatgtgacatagaaagtgataatttcttgggtagtttgcagttttaaaattatgttttaaaatggactatcatctgcttaccgtaactttaaagtatttcgatttcttgactttatatatcttgtggaaaggac

SEQ ID NO: 717 - DNA, 241 bp, synthetic construct
  misc_feature 1..241: note = Promoter
  source 1..241: mol_type = other DNA
gagggcctatttcccatgattccttcatatttgcatataatatgcaaggctgttagagagataattagaactaatttgactgtaaacacaaatatattagtacaaaatatgtgacatagaaagtgataatttcttgggtagtttgcagttttaaaattatgttttaaaatggactatcatctgcttaccgtaactttaaagtatttcgatttcttgactttatatatcttgtggaaaggac

SEQ ID NO: 718 - DNA, 241 bp, synthetic construct
  misc_feature 1..241: note = Promoter
  source 1..241: mol_type = other DNA
gagggcctatttcccatgattccttcatatttgcatataagctgcaaggctgttagagagataattagaactaatttgactgtaaacacaaatatattagtacaaaatatgtgacatagaaagtgataatttcttgggtagtttgcagttttaaaattatgttttaaaatggactatcatctgcttaccgtaactttaaagtatttcgatttcttgactttatatatcttgtggaaaggac

SEQ ID NO: 719 - DNA, 241 bp, synthetic construct
  misc_feature 1..241: note = Promoter
  source 1..241: mol_type = other DNA
gagggcctatttcccatgattccttcatatttgcatataaggtgcaaggctgttagagagataattagaactaatttgactgtaaacacaaatatattagtacaaaatatgtgacatagaaagtgataatttcttgggtagtttgcagttttaaaattatgttttaaaatggactatcatctgcttaccgtaactttaaagtatttcgatttcttgactttatatatcttgtggaaaggac

SEQ ID NO: 720 - DNA, 241 bp, synthetic construct
  misc_feature 1..241: note = Promoter
  source 1..241: mol_type = other DNA
gagggcctatttcccatgattccttcatatttgcatataagttgcaaggctgttagagagataattagaactaatttgactgtaaacacaaatatattagtacaaaatatgtgacatagaaagtgataatttcttgggtagtttgcagttttaaaattatgttttaaaatggactatcatctgcttaccgtaactttaaagtatttcgatttcttgactttatatatcttgtggaaaggac

SEQ ID NO: 721 - DNA, 241 bp, synthetic construct
  misc_feature 1..241: note = Promoter
  source 1..241: mol_type = other DNA
gagggcctatttcccatgattccttcatatttgcatataagaagcaaggctgttagagagataattagaactaatttgactgtaaacacaaatatattagtacaaaatatgtgacatagaaagtgataatttcttgggtagtttgcagttttaaaattatgttttaaaatggactatcatctgcttaccgtaactttaaagtatttcgatttcttgactttatatatcttgtggaaaggac

SEQ ID NO: 722 - DNA, 241 bp, synthetic construct
  misc_feature 1..241: note = Promoter
  source 1..241: mol_type = other DNA
gagggcctatttcccatgattccttcatatttgcatataagacgcaaggctgttagagagataattagaactaatttgactgtaaacacaaatatattagtacaaaatatgtgacatagaaagtgataatttcttgggtagtttgcagttttaaaattatgttttaaaatggactatcatctgcttaccgtaactttaaagtatttcgatttcttgactttatatatcttgtggaaaggac

SEQ ID NO: 723 - DNA, 241 bp, synthetic construct
  misc_feature 1..241: note = Promoter
  source 1..241: mol_type = other DNA
gagggcctatttcccatgattccttcatatttgcatataagaggcaaggctgttagagagataattagaactaatttgactgtaaacacaaatatattagtacaaaatatgtgacatagaaagtgataatttcttgggtagtttgcagttttaaaattatgttttaaaatggactatcatctgcttaccgtaactttaaagtatttcgatttcttgactttatatatcttgtggaaaggac

SEQ ID NO: 724 - DNA, 241 bp, synthetic construct
  misc_feature 1..241: note = Promoter
  source 1..241: mol_type = other DNA
gagggcctatttcccatgattccttcatatttgcatataagatacaaggctgttagagagataattagaactaatttgactgtaaacacaaatatattagtacaaaatatgtgacatagaaagtgataatttcttgggtagtttgcagttttaaaattatgttttaaaatggactatcatctgcttaccgtaactttaaagtatttcgatttcttgactttatatatcttgtggaaaggac

SEQ ID NO: 725 - DNA, 241 bp, synthetic construct
  misc_feature 1..241: note = Promoter
  source 1..241: mol_type = other DNA
gagggcctatttcccatgattccttcatatttgcatataagatccaaggctgttagagagataattagaactaatttgactgtaaacacaaatatattagtacaaaatatgtgacatagaaagtgataatttcttgggtagtttgcagttttaaaattatgttttaaaatggactatcatctgcttaccgtaactttaaagtatttcgatttcttgactttatatatcttgtggaaaggac

SEQ ID NO: 726 - DNA, 241 bp, synthetic construct
  misc_feature 1..241: note = Promoter
  source 1..241: mol_type = other DNA
gagggcctatttcccatgattccttcatatttgcatataagattcaaggctgttagagagataattagaactaatttgactgtaaacacaaatatattagtacaaaatatgtgacatagaaagtgataatttcttgggtagtttgcagttttaaaattatgttttaaaatggactatcatctgcttaccgtaactttaaagtatttcgatttcttgactttatatatcttgtggaaaggac

SEQ ID NO: 727 - DNA, 241 bp, synthetic construct
  misc_feature 1..241: note = Promoter
  source 1..241: mol_type = other DNA
gagggcctatttcccatgattccttcatatttgcatataagatgaaaggctgttagagagataattagaactaatttgactgtaaacacaaatatattagtacaaaatatgtgacatagaaagtgataatttcttgggtagtttgcagttttaaaattatgttttaaaatggactatcatctgcttaccgtaactttaaagtatttcgatttcttgactttatatatcttgtggaaaggac

SEQ ID NO: 728 - DNA, 241 bp, synthetic construct
  misc_feature 1..241: note = Promoter
  source 1..241: mol_type = other DNA
gagggcctatttcccatgattccttcatatttgcatataagatggaaggctgttagagagataattagaactaatttgactgtaaacacaaatatattagtacaaaatatgtgacatagaaagtgataatttcttgggtagtttgcagttttaaaattatgttttaaaatggactatcatctgcttaccgtaactttaaagtatttcgatttcttgactttatatatcttgtggaaaggac

SEQ ID NO: 729 - DNA, 241 bp, synthetic construct
  misc_feature 1..241: note = Promoter
  source 1..241: mol_type = other DNA
gagggcctatttcccatgattccttcatatttgcatataagatgtaaggctgttagagagataattagaactaatttgactgtaaacacaaatatattagtacaaaatatgtgacatagaaagtgataatttcttgggtagtttgcagttttaaaattatgttttaaaatggactatcatctgcttaccgtaactttaaagtatttcgatttcttgactttatatatcttgtggaaaggac

SEQ ID NO: 730 - DNA, 241 bp, synthetic construct
  misc_feature 1..241: note = Promoter
  source 1..241: mol_type = other DNA
gagggcctatttcccatgattccttcatatttgcatataagatgccaggctgttagagagataattagaactaatttgactgtaaacacaaatatattagtacaaaatatgtgacatagaaagtgataatttcttgggtagtttgcagttttaaaattatgttttaaaatggactatcatctgcttaccgtaactttaaagtatttcgatttcttgactttatatatcttgtggaaaggac

SEQ ID NO: 731 - DNA, 241 bp, synthetic construct
  misc_feature 1..241: note = Promoter
  source 1..241: mol_type = other DNA
gagggcctatttcccatgattccttcatatttgcatataagatgcgaggctgttagagagataattagaactaatttgactgtaaacacaaatatattagtacaaaatatgtgacatagaaagtgataatttcttgggtagtttgcagttttaaaattatgttttaaaatggactatcatctgcttaccgtaactttaaagtatttcgatttcttgactttatatatcttgtggaaaggac

SEQ ID NO: 732 - DNA, 241 bp, synthetic construct
  misc_feature 1..241: note = Promoter
  source 1..241: mol_type = other DNA
gagggcctatttcccatgattccttcatatttgcatataagatgctaggctgttagagagataattagaactaatttgactgtaaacacaaatatattagtacaaaatatgtgacatagaaagtgataatttcttgggtagtttgcagttttaaaattatgttttaaaatggactatcatctgcttaccgtaactttaaagtatttcgatttcttgactttatatatcttgtggaaaggac

SEQ ID NO: 733 - DNA, 241 bp, synthetic construct
  misc_feature 1..241: note = Promoter
  source 1..241: mol_type = other DNA
gagggcctatttcccatgattccttcatatttgcatataagatgcacggctgttagagagataattagaactaatttgactgtaaacacaaatatattagtacaaaatatgtgacatagaaagtgataatttcttgggtagtttgcagttttaaaattatgttttaaaatggactatcatctgcttaccgtaactttaaagtatttcgatttcttgactttatatatcttgtggaaaggac

SEQ ID NO: 734 - DNA, 241 bp, synthetic construct
  misc_feature 1..241: note = Promoter
  source 1..241: mol_type = other DNA
gagggcctatttcccatgattccttcatatttgcatataagatgcagggctgttagagagataattagaactaatttgactgtaaacacaaatatattagtacaaaatatgtgacatagaaagtgataatttcttgggtagtttgcagttttaaaattatgttttaaaatggactatcatctgcttaccgtaactttaaagtatttcgatttcttgactttatatatcttgtggaaaggac

SEQ ID NO: 735 - DNA, 241 bp, synthetic construct
  misc_feature 1..241: note = Promoter
  source 1..241: mol_type = other DNA
gagggcctatttcccatgattccttcatatttgcatataagatgcatggctgttagagagataattagaactaatttgactgtaaacacaaatatattagtacaaaatatgtgacatagaaagtgataatttcttgggtagtttgcagttttaaaattatgttttaaaatggactatcatctgcttaccgtaactttaaagtatttcgatttcttgactttatatatcttgtggaaaggac

SEQ ID NO: 736 - DNA, 241 bp, synthetic construct
  misc_feature 1..241: note = Promoter
  source 1..241: mol_type = other DNA
gagggcctatttcccatgattccttcatatttgcatataagatgcaaagctgttagagagataattagaactaatttgactgtaaacacaaatatattagtacaaaatatgtgacatagaaagtgataatttcttgggtagtttgcagttttaaaattatgttttaaaatggactatcatctgcttaccgtaactttaaagtatttcgatttcttgactttatatatcttgtggaaaggac

SEQ ID NO: 737 - DNA, 241 bp, synthetic construct
  misc_feature 1..241: note = Promoter
  source 1..241: mol_type = other DNA
gagggcctatttcccatgattccttcatatttgcatataagatgcaacgctgttagagagataattagaactaatttgactgtaaacacaaatatattagtacaaaatatgtgacatagaaagtgataatttcttgggtagtttgcagttttaaaattatgttttaaaatggactatcatctgcttaccgtaactttaaagtatttcgatttcttgactttatatatcttgtggaaaggac

SEQ ID NO: 738 - DNA, 241 bp, synthetic construct
  misc_feature 1..241: note = Promoter
  source 1..241: mol_type = other DNA
gagggcctatttcccatgattccttcatatttgcatataagatgcaatgctgttagagagataattagaactaatttgactgtaaacacaaatatattagtacaaaatatgtgacatagaaagtgataatttcttgggtagtttgcagttttaaaattatgttttaaaatggactatcatctgcttaccgtaactttaaagtatttcgatttcttgactttatatatcttgtggaaaggac

SEQ ID NO: 739 - DNA, 241 bp, synthetic construct
  misc_feature 1..241: note = Promoter
  source 1..241: mol_type = other DNA
gagggcctatttcccatgattccttcatatttgcatataagatgcaagactgttagagagataattagaactaatttgactgtaaacacaaatatattagtacaaaatatgtgacatagaaagtgataatttcttgggtagtttgcagttttaaaattatgttttaaaatggactatcatctgcttaccgtaactttaaagtatttcgatttcttgactttatatatcttgtggaaaggac

SEQ ID NO: 740 - DNA, 241 bp, synthetic construct
  misc_feature 1..241: note = Promoter
  source 1..241: mol_type = other DNA
gagggcctatttcccatgattccttcatatttgcatataagatgcaagcctgttagagagataattagaactaatttgactgtaaacacaaatatattagtacaaaatatgtgacatagaaagtgataatttcttgggtagtttgcagttttaaaattatgttttaaaatggactatcatctgcttaccgtaactttaaagtatttcgatttcttgactttatatatcttgtggaaaggac

SEQ ID NO: 741 - DNA, 241 bp, synthetic construct
  misc_feature 1..241: note = Promoter
  source 1..241: mol_type = other DNA
gagggcctatttcccatgattccttcatatttgcatataagatgcaagtctgttagagagataattagaactaatttgactgtaaacacaaatatattagtacaaaatatgtgacatagaaagtgataatttcttgggtagtttgcagttttaaaattatgttttaaaatggactatcatctgcttaccgtaactttaaagtatttcgatttcttgactttatatatcttgtggaaaggac

SEQ ID NO: 742 - DNA, 241 bp, synthetic construct
  misc_feature 1..241: note = Promoter
  source 1..241: mol_type = other DNA
gagggcctatttcccatgattccttcatatttgcatataagatgcaaggatgttagagagataattagaactaatttgactgtaaacacaaatatattagtacaaaatatgtgacatagaaagtgataatttcttgggtagtttgcagttttaaaattatgttttaaaatggactatcatctgcttaccgtaactttaaagtatttcgatttcttgactttatatatcttgtggaaaggac

SEQ ID NO: 743 - DNA, 241 bp, synthetic construct
  misc_feature 1..241: note = Promoter
  source 1..241: mol_type = other DNA
gagggcctatttcccatgattccttcatatttgcatataagatgcaagggtgttagagagataattagaactaatttgactgtaaacacaaatatattagtacaaaatatgtgacatagaaagtgataatttcttgggtagtttgcagttttaaaattatgttttaaaatggactatcatctgcttaccgtaactttaaagtatttcgatttcttgactttatatatcttgtggaaaggac

SEQ ID NO: 744 - DNA, 241 bp, synthetic construct
  misc_feature 1..241: note = Promoter
  source 1..241: mol_type = other DNA
gagggcctatttcccatgattccttcatatttgcatataagatgcaaggttgttagagagataattagaactaatttgactgtaaacacaaatatattagtacaaaatatgtgacatagaaagtgataatttcttgggtagtttgcagttttaaaattatgttttaaaatggactatcatctgcttaccgtaactttaaagtatttcgatttcttgactttatatatcttgtggaaaggac

SEQ ID NO: 745 - DNA, 241 bp, synthetic construct
  misc_feature 1..241: note = Promoter
  source 1..241: mol_type = other DNA
gagggcctatttcccatgattccttcatatttgcatataagatgcaaggcagttagagagataattagaactaatttgactgtaaacacaaatatattagtacaaaatatgtgacatagaaagtgataatttcttgggtagtttgcagttttaaaattatgttttaaaatggactatcatctgcttaccgtaactttaaagtatttcgatttcttgactttatatatcttgtggaaaggac

SEQ ID NO: 746 - DNA, 241 bp, synthetic construct
  misc_feature 1..241: note = Promoter
  source 1..241: mol_type = other DNA
gagggcctatttcccatgattccttcatatttgcatataagatgcaaggccgttagagagataattagaactaatttgactgtaaacacaaatatattagtacaaaatatgtgacatagaaagtgataatttcttgggtagtttgcagttttaaaattatgttttaaaatggactatcatctgcttaccgtaactttaaagtatttcgatttcttgactttatatatcttgtggaaaggac

SEQ ID NO: 747 - DNA, 241 bp, synthetic construct
  misc_feature 1..241: note = Promoter
  source 1..241: mol_type = other DNA
gagggcctatttcccatgattccttcatatttgcatataagatgcaaggcggttagagagataattagaactaatttgactgtaaacacaaatatattagtacaaaatatgtgacatagaaagtgataatttcttgggtagtttgcagttttaaaattatgttttaaaatggactatcatctgcttaccgtaactttaaagtatttcgatttcttgactttatatatcttgtggaaaggac

SEQ ID NO: 748 - DNA, 241 bp, synthetic construct
  misc_feature 1..241: note = Promoter
  source 1..241: mol_type = other DNA
gagggcctatttcccatgattccttcatatttgcatataagatgcaaggctattagagagataattagaactaatttgactgtaaacacaaatatattagtacaaaatatgtgacatagaaagtgataatttcttgggtagtttgcagttttaaaattatgttttaaaatggactatcatctgcttaccgtaactttaaagtatttcgatttcttgactttatatatcttgtggaaaggac

SEQ ID NO: 749 - DNA, 241 bp, synthetic construct
  misc_feature 1..241: note = Promoter
  source 1..241: mol_type = other DNA
gagggcctatttcccatgattccttcatatttgcatataagatgcaaggctcttagagagataattagaactaatttgactgtaaacacaaatatattagtacaaaatatgtgacatagaaagtgataatttcttgggtagtttgcagttttaaaattatgttttaaaatggactatcatctgcttaccgtaactttaaagtatttcgatttcttgactttatatatcttgtggaaaggac

SEQ ID NO: 750 - DNA, 241 bp, synthetic construct
  misc_feature 1..241: note = Promoter
  source 1..241: mol_type = other DNA
gagggcctatttcccatgattccttcatatttgcatataagatgcaaggcttttagagagataattagaactaatttgactgtaaacacaaatatattagtacaaaatatgtgacatagaaagtgataatttcttgggtagtttgcagttttaaaattatgttttaaaatggactatcatctgcttaccgtaactttaaagtatttcgatttcttgactttatatatcttgtggaaaggac

SEQ ID NO: 751 - DNA, 241 bp, synthetic construct
  misc_feature 1..241: note = Promoter
  source 1..241: mol_type = other DNA
gagggcctatttcccatgattccttcatatttgcatataagatgcaaggctgatagagagataattagaactaatttgactgtaaacacaaatatattagtacaaaatatgtgacatagaaagtgataatttcttgggtagtttgcagttttaaaattatgttttaaaatggactatcatctgcttaccgtaactttaaagtatttcgatttcttgactttatatatcttgtggaaaggac

SEQ ID NO: 752 - DNA, 241 bp, synthetic construct
  misc_feature 1..241: note = Promoter
  source 1..241: mol_type = other DNA
gagggcctatttcccatgattccttcatatttgcatataagatgcaaggctgctagagagataattagaactaatttgactgtaaacacaaatatattagtacaaaatatgtgacatagaaagtgataatttcttgggtagtttgcagttttaaaattatgttttaaaatggactatcatctgcttaccgtaactttaaagtatttcgatttcttgactttatatatcttgtggaaaggac

SEQ ID NO: 753 - DNA, 241 bp, synthetic construct
  misc_feature 1..241: note = Promoter
  source 1..241: mol_type = other DNA
gagggcctatttcccatgattccttcatatttgcatataagatgcaaggctggtagagagataattagaactaatttgactgtaaacacaaatatattagtacaaaatatgtgacatagaaagtgataatttcttgggtagtttgcagttttaaaattatgttttaaaatggactatcatctgcttaccgtaactttaaagtatttcgatttcttgactttatatatcttgtggaaaggac

SEQ ID NO: 754 - DNA, 241 bp, synthetic construct
  misc_feature 1..241: note = Promoter
  source 1..241: mol_type = other DNA
gagggcctatttcccatgattccttcatatttgcatataagatgcaaggctgtaagagagataattagaactaatttgactgtaaacacaaatatattagtacaaaatatgtgacatagaaagtgataatttcttgggtagtttgcagttttaaaattatgttttaaaatggactatcatctgcttaccgtaactttaaagtatttcgatttcttgactttatatatcttgtggaaaggac

SEQ ID NO: 755 - DNA, 241 bp, synthetic construct
  misc_feature 1..241: note = Promoter
  source 1..241: mol_type = other DNA
gagggcctatttcccatgattccttcatatttgcatataagatgcaaggctgtcagagagataattagaactaatttgactgtaaacacaaatatattagtacaaaatatgtgacatagaaagtgataatttcttgggtagtttgcagttttaaaattatgttttaaaatggactatcatctgcttaccgtaactttaaagtatttcgatttcttgactttatatatcttgtggaaaggac

SEQ ID NO: 756 - DNA, 241 bp, synthetic construct
  misc_feature 1..241: note = Promoter
  source 1..241: mol_type = other DNA
gagggcctatttcccatgattccttcatatttgcatataagatgcaaggctgtgagagagataattagaactaatttgactgtaaacacaaatatattagtacaaaatatgtgacatagaaagtgataatttcttgggtagtttgcagttttaaaattatgttttaaaatggactatcatctgcttaccgtaactttaaagtatttcgatttcttgactttatatatcttgtggaaaggac

SEQ ID NO: 757 - DNA, 241 bp, synthetic construct
  misc_feature 1..241: note = Promoter
  source 1..241: mol_type = other DNA
gagggcctatttcccatgattccttcatatttgcatataagatgcaaggctgttcgagagataattagaactaatttgactgtaaacacaaatatattagtacaaaatatgtgacatagaaagtgataatttcttgggtagtttgcagttttaaaattatgttttaaaatggactatcatctgcttaccgtaactttaaagtatttcgatttcttgactttatatatcttgtggaaaggac

SEQ ID NO: 758 - DNA, 241 bp, synthetic construct
  misc_feature 1..241: note = Promoter
  source 1..241: mol_type = other DNA
gagggcctatttcccatgattccttcatatttgcatataagatgcaaggctgttggagagataattagaactaatttgactgtaaacacaaatatattagtacaaaatatgtgacatagaaagtgataatttcttgggtagtttgcagttttaaaattatgttttaaaatggactatcatctgcttaccgtaactttaaagtatttcgatttcttgactttatatatcttgtggaaaggac

SEQ ID NO: 759 - DNA, 241 bp, synthetic construct
  misc_feature 1..241: note = Promoter
  source 1..241: mol_type = other DNA
gagggcctatttcccatgattccttcatatttgcatataagatgcaaggctgtttgagagataattagaactaatttgactgtaaacacaaatatattagtacaaaatatgtgacatagaaagtgataatttcttgggtagtttgcagttttaaaattatgttttaaaatggactatcatctgcttaccgtaactttaaagtatttcgatttcttgactttatatatcttgtggaaaggac

SEQ ID NO: 760 - DNA, 241 bp, synthetic construct
  misc_feature 1..241: note = Promoter
  source 1..241: mol_type = other DNA
gagggcctatttcccatgattccttcatatttgcatataagatgcaaggctgttaaagagataattagaactaatttgactgtaaacacaaatatattagtacaaaatatgtgacatagaaagtgataatttcttgggtagtttgcagttttaaaattatgttttaaaatggactatcatctgcttaccgtaactttaaagtatttcgatttcttgactttatatatcttgtggaaaggac

SEQ ID NO: 761 - DNA, 241 bp, synthetic construct
  misc_feature 1..241: note = Promoter
  source 1..241: mol_type = other DNA
gagggcctatttcccatgattccttcatatttgcatataagatgcaaggctgttacagagataattagaactaatttgactgtaaacacaaatatattagtacaaaatatgtgacatagaaagtgataatttcttgggtagtttgcagttttaaaattatgttttaaaatggactatcatctgcttaccgtaactttaaagtatttcgatttcttgactttatatatcttgtggaaaggac

SEQ ID NO: 762 - DNA, 241 bp, synthetic construct
  misc_feature 1..241: note = Promoter
  source 1..241: mol_type = other DNA
gagggcctatttcccatgattccttcatatttgcatataagatgcaaggctgttatagagataattagaactaatttgactgtaaacacaaatatattagtacaaaatatgtgacatagaaagtgataatttcttgggtagtttgcagttttaaaattatgttttaaaatggactatcatctgcttaccgtaactttaaagtatttcgatttcttgactttatatatcttgtggaaaggac

SEQ ID NO: 763 - DNA, 241 bp, synthetic construct
  misc_feature 1..241: note = Promoter
  source 1..241: mol_type = other DNA
gagggcctatttcccatgattccttcatatttgcatataagatgcaaggctgttagcgagataattagaactaatttgactgtaaacacaaatatattagtacaaaatatgtgacatagaaagtgataatttcttgggtagtttgcagttttaaaattatgttttaaaatggactatcatctgcttaccgtaactttaaagtatttcgatttcttgactttatatatcttgtggaaaggac

SEQ ID NO: 764 - DNA, 241 bp, synthetic construct
  misc_feature 1..241: note = Promoter
  source 1..241: mol_type = other DNA
gagggcctatttcccatgattccttcatatttgcatataagatgcaaggctgttagggagataattagaactaatttgactgtaaacacaaatatattagtacaaaatatgtgacatagaaagtgataatttcttgggtagtttgcagttttaaaattatgttttaaaatggactatcatctgcttaccgtaactttaaagtatttcgatttcttgactttatatatcttgtggaaaggac

SEQ ID NO: 765 - DNA, 241 bp, synthetic construct
  misc_feature 1..241: note = Promoter
  source 1..241: mol_type = other DNA
gagggcctatttcccatgattccttcatatttgcatataagatgcaaggctgttagtgagataattagaactaatttgactgtaaacacaaatatattagtacaaaatatgtgacatagaaagtgataatttcttgggtagtttgcagttttaaaattatgttttaaaatggactatcatctgcttaccgtaactttaaagtatttcgatttcttgactttatatatcttgtggaaaggac

SEQ ID NO: 766 - DNA, 241 bp, synthetic construct
  misc_feature 1..241: note = Promoter
  source 1..241: mol_type = other DNA
gagggcctatttcccatgattccttcatatttgcatataagatgcaaggctgttagaaagataattagaactaatttgactgtaaacacaaatatattagtacaaaatatgtgacatagaaagtgataatttcttgggtagtttgcagttttaaaattatgttttaaaatggactatcatctgcttaccgtaactttaaagtatttcgatttcttgactttatatatcttgtggaaaggac

SEQ ID NO: 767 - DNA, 241 bp, synthetic construct
  misc_feature 1..241: note = Promoter
  source 1..241: mol_type = other DNA
gagggcctatttcccatgattccttcatatttgcatataagatgcaaggctgttagacagataattagaactaatttgactgtaaacacaaatatattagtacaaaatatgtgacatagaaagtgataatttcttgggtagtttgcagttttaaaattatgttttaaaatggactatcatctgcttaccgtaactttaaagtatttcgatttcttgactttatatatcttgtggaaaggac

SEQ ID NO: 768 - DNA, 241 bp, synthetic construct
  misc_feature 1..241: note = Promoter
  source 1..241: mol_type = other DNA
gagggcctatttcccatgattccttcatatttgcatataagatgcaaggctgttagatagataattagaactaatttgactgtaaacacaaatatattagtacaaaatatgtgacatagaaagtgataatttcttgggtagtttgcagttttaaaattatgttttaaaatggactatcatctgcttaccgtaactttaaagtatttcgatttcttgactttatatatcttgtggaaaggac

SEQ ID NO: 769 - DNA, 241 bp, synthetic construct
  misc_feature 1..241: note = Promoter
  source 1..241: mol_type = other DNA
gagggcctatttcccatgattccttcatatttgcatataagatgcaaggctgttagagcgataattagaactaatttgactgtaaacacaaatatattagtacaaaatatgtgacatagaaagtgataatttcttgggtagtttgcagttttaaaattatgttttaaaatggactatcatctgcttaccgtaactttaaagtatttcgatttcttgactttatatatcttgtggaaaggac

SEQ ID NO: 770 - DNA, 241 bp, synthetic construct
  misc_feature 1..241: note = Promoter
  source 1..241: mol_type = other DNA
gagggcctatttcccatgattccttcatatttgcatataagatgcaaggctgttagagggataattagaactaatttgactgtaaacacaaatatattagtacaaaatatgtgacatagaaagtgataatttcttgggtagtttgcagttttaaaattatgttttaaaatggactatcatctgcttaccgtaactttaaagtatttcgatttcttgactttatatatcttgtggaaaggac

SEQ ID NO: 771 - DNA, 241 bp, synthetic construct
  misc_feature 1..241: note = Promoter
  source 1..241: mol_type = other DNA
gagggcctatttcccatgattccttcatatttgcatataagatgcaaggctgttagagtgataattagaactaatttgactgtaaacacaaatatattagtacaaaatatgtgacatagaaagtgataatttcttgggtagtttgcagttttaaaattatgttttaaaatggactatcatctgcttaccgtaactttaaagtatttcgatttcttgactttatatatcttgtggaaaggac

SEQ ID NO: 772 - DNA, 241 bp, synthetic construct
  misc_feature 1..241: note = Promoter
  source 1..241: mol_type = other DNA
gagggcctatttcccatgattccttcatatttgcatataagatgcaaggctgttagagaaataattagaactaatttgactgtaaacacaaatatattagtacaaaatatgtgacatagaaagtgataatttcttgggtagtttgcagttttaaaattatgttttaaaatggactatcatctgcttaccgtaactttaaagtatttcgatttcttgactttatatatcttgtggaaaggac

SEQ ID NO: 773 - DNA, 241 bp, synthetic construct
  misc_feature 1..241: note = Promoter
  source 1..241: mol_type = other DNA
gagggcctatttcccatgattccttcatatttgcatataagatgcaaggctgttagagacataattagaactaatttgactgtaaacacaaatatattagtacaaaatatgtgacatagaaagtgataatttcttgggtagtttgcagttttaaaattatgttttaaaatggactatcatctgcttaccgtaactttaaagtatttcgatttcttgactttatatatcttgtggaaaggac

SEQ ID NO: 774 - DNA, 241 bp, synthetic construct
  misc_feature 1..241: note = Promoter
  source 1..241: mol_type = other DNA
gagggcctatttcccatgattccttcatatttgcatataagatgcaaggctgttagagatataattagaactaatttgactgtaaacacaaatatattagtacaaaatatgtgacatagaaagtgataatttcttgggtagtttgcagttttaaaattatgttttaaaatggactatcatctgcttaccgtaactttaaagtatttcgatttcttgactttatatatcttgtggaaaggac

SEQ ID NO: 775 - DNA, 241 bp, synthetic construct
  misc_feature 1..241: note = Promoter
  source 1..241: mol_type = other DNA
gagggcctatttcccatgattccttcatatttgcatataagatgcaaggctgttagagagctaattagaactaatttgactgtaaacacaaatatattagtacaaaatatgtgacatagaaagtgataatttcttgggtagtttgcagttttaaaattatgttttaaaatggactatcatctgcttaccgtaactttaaagtatttcgatttcttgactttatatatcttgtggaaaggac

SEQ ID NO: 776 - DNA, 241 bp, synthetic construct
  misc_feature 1..241: note = Promoter
  source 1..241: mol_type = other DNA
gagggcctatttcccatgattccttcatatttgcatataagatgcaaggctgttagagaggtaattagaactaatttgactgtaaacacaaatatattagtacaaaatatgtgacatagaaagtgataatttcttgggtagtttgcagttttaaaattatgttttaaaatggactatcatctgcttaccgtaactttaaagtatttcgatttcttgactttatatatcttgtggaaaggac

SEQ ID NO: 777 - DNA, 241 bp, synthetic construct
  misc_feature 1..241: note = Promoter
  source 1..241: mol_type = other DNA
gagggcctatttcccatgattccttcatatttgcatataagatgcaaggctgttagagagttaattagaactaatttgactgtaaacacaaatatattagtacaaaatatgtgacatagaaagtgataatttcttgggtagtttgcagttttaaaattatgttttaaaatggactatcatctgcttaccgtaactttaaagtatttcgatttcttgactttatatatcttgtggaaaggac

SEQ ID NO: 778 - DNA, 241 bp, synthetic construct
  misc_feature 1..241: note = Promoter
  source 1..241: mol_type = other DNA
gagggcctatttcccatgattccttcatatttgcatataagatgcaaggctgttagagagaaaattagaactaatttgactgtaaacacaaatatattagtacaaaatatgtgacatagaaagtgataatttcttgggtagtttgcagttttaaaattatgttttaaaatggactatcatctgcttaccgtaactttaaagtatttcgatttcttgactttatatatcttgtggaaaggac

SEQ ID NO: 779 - DNA, 241 bp, synthetic construct
  misc_feature 1..241: note = Promoter
  source 1..241: mol_type = other DNA
gagggcctatttcccatgattccttcatatttgcatataagatgcaaggctgttagagagacaattagaactaatttgactgtaaacacaaatatattagtacaaaatatgtgacatagaaagtgataatttcttgggtagtttgcagttttaaaattatgttttaaaatggactatcatctgcttaccgtaactttaaagtatttcgatttcttgactttatatatcttgtggaaaggac

SEQ ID NO: 780 - DNA, 241 bp, synthetic construct
  misc_feature 1..241: note = Promoter
  source 1..241: mol_type = other DNA
gagggcctatttcccatgattccttcatatttgcatataagatgcaaggctgttagagagagaattagaactaatttgactgtaaacacaaatatattagtacaaaatatgtgacatagaaagtgataatttcttgggtagtttgcagttttaaaattatgttttaaaatggactatcatctgcttaccgtaactttaaagtatttcgatttcttgactttatatatcttgtggaaaggac

SEQ ID NO: 781 - DNA, 241 bp, synthetic construct
  misc_feature 1..241: note = Promoter
  source 1..241: mol_type = other DNA
gagggcctatttcccatgattccttcatatttgcatataagatgcaaggctgttagagagatcattagaactaatttgactgtaaacacaaatatattagtacaaaatatgtgacatagaaagtgataatttcttgggtagtttgcagttttaaaattatgttttaaaatggactatcatctgcttaccgtaactttaaagtatttcgatttcttgactttatatatcttgtggaaaggac

SEQ ID NO: 782 - DNA, 241 bp, synthetic construct
  misc_feature 1..241: note = Promoter
  source 1..241: mol_type = other DNA
gagggcctatttcccatgattccttcatatttgcatataagatgcaaggctgttagagagatgattagaactaatttgactgtaaacacaaatatattagtacaaaatatgtgacatagaaagtgataatttcttgggtagtttgcagttttaaaattatgttttaaaatggactatcatctgcttaccgtaactttaaagtatttcgatttcttgactttatatatcttgtggaaaggac

SEQ ID NO: 783 - DNA, 241 bp, synthetic construct
  misc_feature 1..241: note = Promoter
  source 1..241: mol_type = other DNA
gagggcctatttcccatgattccttcatatttgcatataagatgcaaggctgttagagagattattagaactaatttgactgtaaacacaaatatattagtacaaaatatgtgacatagaaagtgataatttcttgggtagtttgcagttttaaaattatgttttaaaatggactatcatctgcttaccgtaactttaaagtatttcgatttcttgactttatatatcttgtggaaaggac

SEQ ID NO: 784 - DNA, 241 bp, synthetic construct
  misc_feature 1..241: note = Promoter
  source 1..241: mol_type = other DNA
gagggcctatttcccatgattccttcatatttgcatataagatgcaaggctgttagagagatacttagaactaatttgactgtaaacacaaatatattagtacaaaatatgtgacatagaaagtgataatttcttgggtagtttgcagttttaaaattatgttttaaaatggactatcatctgcttaccgtaactttaaagtatttcgatttcttgactttatatatcttgtggaaaggac

SEQ ID NO: 785 - DNA, 241 bp, synthetic construct
  misc_feature 1..241: note = Promoter
  source 1..241: mol_type = other DNA
gagggcctatttcccatgattccttcatatttgcatataagatgcaaggctgttagagagatagttagaactaatttgactgtaaacacaaatatattagtacaaaatatgtgacatagaaagtgataatttcttgggtagtttgcagttttaaaattatgttttaaaatggactatcatctgcttaccgtaactttaaagtatttcgatttcttgactttatatatcttgtggaaaggac

SEQ ID NO: 786 - DNA, 241 bp, synthetic construct
  misc_feature 1..241: note = Promoter
  source 1..241: mol_type = other DNA
gagggcctatttcccatgattccttcatatttgcatataagatgcaaggctgttagagagatatttagaactaatttgactgtaaacacaaatatattagtacaaaatatgtgacatagaaagtgataatttcttgggtagtttgcagttttaaaattatgttttaaaatggactatcatctgcttaccgtaactttaaagtatttcgatttcttgactttatatatcttgtggaaaggac

SEQ ID NO: 787 - DNA, 241 bp, synthetic construct
  misc_feature 1..241: note = Promoter
  source 1..241: mol_type = other DNA
gagggcctatttcccatgattccttcatatttgcatataagatgcaaggctgttagagagataaatagaactaatttgactgtaaacacaaatatattagtacaaaatatgtgacatagaaagtgataatttcttgggtagtttgcagttttaaaattatgttttaaaatggactatcatctgcttaccgtaactttaaagtatttcgatttcttgactttatatatcttgtggaaaggac

SEQ ID NO: 788 - DNA, 241 bp, synthetic construct
  misc_feature 1..241: note = Promoter
  source 1..241: mol_type = other DNA
gagggcctatttcccatgattccttcatatttgcatataagatgcaaggctgttagagagataactagaactaatttgactgtaaacacaaatatattagtacaaaatatgtgacatagaaagtgataatttcttgggtagtttgcagttttaaaattatgttttaaaatggactatcatctgcttaccgtaactttaaagtatttcgatttcttgactttatatatcttgtggaaaggac

SEQ ID NO: 789 - DNA, 241 bp, synthetic construct
  misc_feature 1..241: note = Promoter
  source 1..241: mol_type = other DNA
gagggcctatttcccatgattccttcatatttgcatataagatgcaaggctgttagagagataagtagaactaatttgactgtaaacacaaatatattagtacaaaatatgtgacatagaaagtgataatttcttgggtagtttgcagttttaaaattatgttttaaaatggactatcatctgcttaccgtaactttaaagtatttcgatttcttgactttatatatcttgtggaaaggac

SEQ ID NO: 790 - DNA, 241 bp, synthetic construct
  misc_feature 1..241: note = Promoter
  source 1..241: mol_type = other DNA
gagggcctatttcccatgattccttcatatttgcatataagatgcaaggctgttagagagataataagaactaatttgactgtaaacacaaatatattagtacaaaatatgtgacatagaaagtgataatttcttgggtagtttgcagttttaaaattatgttttaaaatggactatcatctgcttaccgtaactttaaagtatttcgatttcttgactttatatatcttgtggaaaggac

SEQ ID NO: 791 - DNA, 241 bp, synthetic construct
  misc_feature 1..241: note = Promoter
  source 1..241: mol_type = other DNA
gagggcctatttcccatgattccttcatatttgcatataagatgcaaggctgttagagagataatcagaactaatttgactgtaaacacaaatatattagtacaaaatatgtgacatagaaagtgataatttcttgggtagtttgcagttttaaaattatgttttaaaatggactatcatctgcttaccgtaactttaaagtatttcgatttcttgactttatatatcttgtggaaaggac

SEQ ID NO: 792 - DNA, 241 bp, synthetic construct
  misc_feature 1..241: note = Promoter
  source 1..241: mol_type = other DNA
gagggcctatttcccatgattccttcatatttgcatataagatgcaaggctgttagagagataatgagaactaatttgactgtaaacacaaatatattagtacaaaatatgtgacatagaaagtgataatttcttgggtagtttgcagttttaaaattatgttttaaaatggactatcatctgcttaccgtaactttaaagtatttcgatttcttgactttatatatcttgtggaaaggac

SEQ ID NO: 793 - DNA, 241 bp, synthetic construct
  misc_feature 1..241: note = Promoter
  source 1..241: mol_type = other DNA
gagggcctatttcccatgattccttcatatttgcatataagatgcaaggctgttagagagataattcgaactaatttgactgtaaacacaaatatattagtacaaaatatgtgacatagaaagtgataatttcttgggtagtttgcagttttaaaattatgttttaaaatggactatcatctgcttaccgtaactttaaagtatttcgatttcttgactttatatatcttgtggaaaggac

SEQ ID NO: 794 - DNA, 241 bp, synthetic construct
  misc_feature 1..241: note = Promoter
  source 1..241: mol_type = other DNA
gagggcctatttcccatgattccttcatatttgcatataagatgcaaggctgttagagagataattggaactaatttgactgtaaacacaaatatattagtacaaaatatgtgacatagaaagtgataatttcttgggtagtttgcagttttaaaattatgttttaaaatggactatcatctgcttaccgtaactttaaagtatttcgatttcttgactttatatatcttgtggaaaggac

SEQ ID NO: 795 - DNA, 241 bp, synthetic construct
  misc_feature 1..241: note = Promoter
  source 1..241: mol_type = other DNA
gagggcctatttcccatgattccttcatatttgcatataagatgcaaggctgttagagagataatttgaactaatttgactgtaaacacaaatatattagtacaaaatatgtgacatagaaagtgataatttcttgggtagtttgcagttttaaaattatgttttaaaatggactatcatctgcttaccgtaactttaaagtatttcgatttcttgactttatatatcttgtggaaaggac

SEQ ID NO: 796 - DNA, 241 bp, synthetic construct
  misc_feature 1..241: note = Promoter
  source 1..241: mol_type = other DNA
gagggcctatttcccatgattccttcatatttgcatataagatgcaaggctgttagagagataattaaaactaatttgactgtaaacacaaatatattagtacaaaatatgtgacatagaaagtgataatttcttgggtagtttgcagttttaaaattatgttttaaaatggactatcatctgcttaccgtaactttaaagtatttcgatttcttgactttatatatcttgtggaaaggac

SEQ ID NO: 797 - DNA, 241 bp, synthetic construct
  misc_feature 1..241: note = Promoter
  source 1..241: mol_type = other DNA
gagggcctatttcccatgattccttcatatttgcatataagatgcaaggctgttagagagataattacaactaatttgactgtaaacacaaatatattagtacaaaatatgtgacatagaaagtgataatttcttgggtagtttgcagttttaaaattatgttttaaaatggactatcatctgcttaccgtaactttaaagtatttcgatttcttgactttatatatcttgtggaaaggac

SEQ ID NO: 798 - DNA, 241 bp, synthetic construct
  misc_feature 1..241: note = Promoter
  source 1..241: mol_type = other DNA
gagggcctatttcccatgattccttcatatttgcatataagatgcaaggctgttagagagataattataactaatttgactgtaaacacaaatatattagtacaaaatatgtgacatagaaagtgataatttcttgggtagtttgcagttttaaaattatgttttaaaatggactatcatctgcttaccgtaactttaaagtatttcgatttcttgactttatatatcttgtggaaaggac

SEQ ID NO: 799 - DNA, 241 bp, synthetic construct
  misc_feature 1..241: note = Promoter
  source 1..241: mol_type = other DNA
gagggcctatttcccatgattccttcatatttgcatataagatgcaaggctgttagagagataattagcactaatttgactgtaaacacaaatatattagtacaaaatatgtgacatagaaagtgataatttcttgggtagtttgcagttttaaaattatgttttaaaatggactatcatctgcttaccgtaactttaaagtatttcgatttcttgactttatatatcttgtggaaaggac

SEQ ID NO: 800 - DNA, 241 bp, synthetic construct
  misc_feature 1..241: note = Promoter
  source 1..241: mol_type = other DNA
gagggcctatttcccatgattccttcatatttgcatataagatgcaaggctgttagagagataattaggactaatttgactgtaaacacaaatatattagtacaaaatatgtgacatagaaagtgataatttcttgggtagtttgcagttttaaaattatgttttaaaatggactatcatctgcttaccgtaactttaaagtatttcgatttcttgactttatatatcttgtggaaaggac

SEQ ID NO: 801 - DNA, 241 bp, synthetic construct
  misc_feature 1..241: note = Promoter
  source 1..241: mol_type = other DNA
gagggcctatttcccatgattccttcatatttgcatataagatgcaaggctgttagagagataattagtactaatttgactgtaaacacaaatatattagtacaaaatatgtgacatagaaagtgataatttcttgggtagtttgcagttttaaaattatgttttaaaatggactatcatctgcttaccgtaactttaaagtatttcgatttcttgactttatatatcttgtggaaaggac

SEQ ID NO: 802 - DNA, 241 bp, synthetic construct
  misc_feature 1..241: note = Promoter
  source 1..241: mol_type = other DNA
gagggcctatttcccatgattccttcatatttgcatataagatgcaaggctgttagagagataattagacctaatttgactgtaaacacaaatatattagtacaaaatatgtgacatagaaagtgataatttcttgggtagtttgcagttttaaaattatgttttaaaatggactatcatctgcttaccgtaactttaaagtatttcgatttcttgactttatatatcttgtggaaaggac

SEQ ID NO: 803 - DNA, 241 bp, synthetic construct
  misc_feature 1..241: note = Promoter
  source 1..241: mol_type = other DNA
gagggcctatttcccatgattccttcatatttgcatataagatgcaaggctgttagagagataattagagctaatttgactgtaaacacaaatatattagtacaaaatatgtgacatagaaagtgataatttcttgggtagtttgcagttttaaaattatgttttaaaatggactatcatctgcttaccgtaactttaaagtatttcgatttcttgactttatatatcttgtggaaaggac

SEQ ID NO: 804 - DNA, 241 bp, synthetic construct
  misc_feature 1..241: note = Promoter
  source 1..241: mol_type = other DNA
gagggcctatttcccatgattccttcatatttgcatataagatgcaaggctgttagagagataattagatctaatttgactgtaaacacaaatatattagtacaaaatatgtgacatagaaagtgataatttcttgggtagtttgcagttttaaaattatgttttaaaatggactatcatctgcttaccgtaactttaaagtatttcgatttcttgactttatatatcttgtggaaaggac

SEQ ID NO: 805 - DNA, 241 bp, synthetic construct
  misc_feature 1..241: note = Promoter
  source 1..241: mol_type = other DNA
gagggcctatttcccatgattccttcatatttgcatataagatgcaaggctgttagagagataattagaaataatttgactgtaaacacaaatatattagtacaaaatatgtgacatagaaagtgataatttcttgggtagtttgcagttttaaaattatgttttaaaatggactatcatctgcttaccgtaactttaaagtatttcgatttcttgactttatatatcttgtggaaaggac

SEQ ID NO: 806 - DNA, 241 bp, synthetic construct
  misc_feature 1..241: note = Promoter
  source 1..241: mol_type = other DNA
gagggcctatttcccatgattccttcatatttgcatataagatgcaaggctgttagagagataattagaagtaatttgactgtaaacacaaatatattagtacaaaatatgtgacatagaaagtgataatttcttgggtagtttgcagttttaaaattatgttttaaaatggactatcatctgcttaccgtaactttaaagtatttcgatttcttgactttatatatcttgtggaaaggac

SEQ ID NO: 807 - DNA, 241 bp, synthetic construct
  misc_feature 1..241: note = Promoter
  source 1..241: mol_type = other DNA
gagggcctatttcccatgattccttcatatttgcatataagatgcaaggctgttagagagataattagaattaatttgactgtaaacacaaatatattagtacaaaatatgtgacatagaaagtgataatttcttgggtagtttgcagttttaaaattatgttttaaaatggactatcatctgcttaccgtaactttaaagtatttcgatttcttgactttatatatcttgtggaaaggac

SEQ ID NO: 808 - DNA, 241 bp, synthetic construct
  misc_feature 1..241: note = Promoter
  source 1..241: mol_type = other DNA
gagggcctatttcccatgattccttcatatttgcatataagatgcaaggctgttagagagataattagaacaaatttgactgtaaacacaaatatattagtacaaaatatgtgacatagaaagtgataatttcttgggtagtttgcagttttaaaattatgttttaaaatggactatcatctgcttaccgtaactttaaagtatttcgatttcttgactttatatatcttgtggaaaggac

SEQ ID NO: 809 - DNA, 241 bp, synthetic construct
  misc_feature 1..241: note = Promoter
  source 1..241: mol_type = other DNA
gagggcctatttcccatgattccttcatatttgcatataagatgcaaggctgttagagagataattagaaccaatttgactgtaaacacaaatatattagtacaaaatatgtgacatagaaagtgataatttcttgggtagtttgcagttttaaaattatgttttaaaatggactatcatctgcttaccgtaactttaaagtatttcgatttcttgactttatatatcttgtggaaaggac

SEQ ID NO: 810 - DNA, 241 bp, synthetic construct
  misc_feature 1..241: note = Promoter
  source 1..241: mol_type = other DNA
gagggcctatttcccatgattccttcatatttgcatataagatgcaaggctgttagagagataattagaacgaatttgactgtaaacacaaatatattagtacaaaatatgtgacatagaaagtgataatttcttgggtagtttgcagttttaaaattatgttttaaaatggactatcatctgcttaccgtaactttaaagtatttcgatttcttgactttatatatcttgtggaaaggac

SEQ ID NO: 811 - DNA, 241 bp, synthetic construct
  misc_feature 1..241: note = Promoter
  source 1..241: mol_type = other DNA
gagggcctatttcccatgattccttcatatttgcatataagatgcaaggctgttagagagataattagaactcatttgactgtaaacacaaatatattagtacaaaatatgtgacatagaaagtgataatttcttgggtagtttgcagttttaaaattatgttttaaaatggactatcatctgcttaccgtaactttaaagtatttcgatttcttgactttatatatcttgtggaaaggac

SEQ ID NO: 812 - DNA, 241 bp, synthetic construct
  misc_feature 1..241: note = Promoter
  source 1..241: mol_type = other DNA
gagggcctatttcccatgattccttcatatttgcatataagatgcaaggctgttagagagataattagaactgatttgactgtaaacacaaatatattagtacaaaatatgtgacatagaaagtgataatttcttgggtagtttgcagttttaaaattatgttttaaaatggactatcatctgcttaccgtaactttaaagtatttcgatttcttgactttatatatcttgtggaaaggac

SEQ ID NO: 813 - DNA, 241 bp, synthetic construct
  misc_feature 1..241: note = Promoter
  source 1..241: mol_type = other DNA
gagggcctatttcccatgattccttcatatttgcatataagatgcaaggctgttagagagataattagaacttatttgactgtaaacacaaatatattagtacaaaatatgtgacatagaaagtgataatttcttgggtagtttgcagttttaaaattatgttttaaaatggactatcatctgcttaccgtaactttaaagtatttcgatttcttgactttatatatcttgtggaaaggac

SEQ ID NO: 814 - DNA, 241 bp, synthetic construct
  misc_feature 1..241: note = Promoter
  source 1..241: mol_type = other DNA
gagggcctatttcccatgattccttcatatttgcatataagatgcaaggctgttagagagataattagaactactttgactgtaaacacaaatatattagtacaaaatatgtgacatagaaagtgataatttcttgggtagtttgcagttttaaaattatgttttaaaatggactatcatctgcttaccgtaactttaaagtatttcgatttcttgactttatatatcttgtggaaaggac

SEQ ID NO: 815 - DNA, 241 bp, synthetic construct
  misc_feature 1..241: note = Promoter
  source 1..241: mol_type = other DNA
gagggcctatttcccatgattccttcatatttgcatataagatgcaaggctgttagagagataattagaactagtttgactgtaaacacaaatatattagtacaaaatatgtgacatagaaagtgataatttcttgggtagtttgcagttttaaaattatgttttaaaatggactatcatctgcttaccgtaactttaaagtatttcgatttcttgactttatatatcttgtggaaaggac

SEQ ID NO: 816 - DNA, 241 bp, synthetic construct
  misc_feature 1..241: note = Promoter
  source 1..241: mol_type = other DNA
gagggcctatttcccatgattccttcatatttgcatataagatgcaaggctgttagagagataattagaactattttgactgtaaacacaaatatattagtacaaaatatgtgacatagaaagtgataatttcttgggtagtttgcagttttaaaattatgttttaaaatggactatcatctgcttaccgtaactttaaagtatttcgatttcttgactttatatatcttgtggaaaggac

SEQ ID NO: 817 - DNA, 241 bp, synthetic construct
  misc_feature 1..241: note = Promoter
  source 1..241: mol_type = other DNA
gagggcctatttcccatgattccttcatatttgcatataagatgcaaggctgttagagagataattagaactaaattgactgtaaacacaaatatattagtacaaaatatgtgacatagaaagtgataatttcttgggtagtttgcagttttaaaattatgttttaaaatggactatcatctgcttaccgtaactttaaagtatttcgatttcttgactttatatatcttgtggaaaggac

SEQ ID NO: 818 - DNA, 241 bp, synthetic construct
  misc_feature 1..241: note = Promoter
  source 1..241: mol_type = other DNA
gagggcctatttcccatgattccttcatatttgcatataagatgcaaggctgttagagagataattagaactaacttgactgtaaacacaaatatattagtacaaaatatgtgacatagaaagtgataatttcttgggtagtttgcagttttaaaattatgttttaaaatggactatcatctgcttaccgtaactttaaagtatttcgatttcttgactttatatatcttgtggaaaggac

SEQ ID NO: 819 - DNA, 241 bp, synthetic construct
  misc_feature 1..241: note = Promoter
  source 1..241: mol_type = other DNA
gagggcctatttcccatgattccttcatatttgcatataagatgcaaggctgttagagagataattagaactaagttgactgtaaacacaaatatattagtacaaaatatgtgacatagaaagtgataatttcttgggtagtttgcagttttaaaattatgttttaaaatggactatcatctgcttaccgtaactttaaagtatttcgatttcttgactttatatatcttgtggaaaggac

SEQ ID NO: 820 - DNA, 241 bp, synthetic construct
  misc_feature 1..241: note = Promoter
  source 1..241: mol_type = other DNA
gagggcctatttcccatgattccttcatatttgcatataagatgcaaggctgttagagagataattagaactaatatgactgtaaacacaaatatattagtacaaaatatgtgacatagaaagtgataatttcttgggtagtttgcagttttaaaattatgttttaaaatggactatcatctgcttaccgtaactttaaagtatttcgatttcttgactttatatatcttgtggaaaggac

SEQ ID NO: 821 - DNA, 241 bp, synthetic construct
  misc_feature 1..241: note = Promoter
  source 1..241: mol_type = other DNA
gagggcctatttcccatgattccttcatatttgcatataagatgcaaggctgttagagagataattagaactaatctgactgtaaacacaaatatattagtacaaaatatgtgacatagaaagtgataatttcttgggtagtttgcagttttaaaattatgttttaaaatggactatcatctgcttaccgtaactttaaagtatttcgatttcttgactttatatatcttgtggaaaggac

SEQ ID NO: 822 - DNA, 241 bp, synthetic construct
  misc_feature 1..241: note = Promoter
  source 1..241: mol_type = other DNA
gagggcctatttcccatgattccttcatatttgcatataagatgcaaggctgttagagagataattagaactaatgtgactgtaaacacaaatatattagtacaaaatatgtgacatagaaagtgataatttcttgggtagtttgcagttttaaaattatgttttaaaatggactatcatctgcttaccgtaactttaaagtatttcgatttcttgactttatatatcttgtggaaaggac

SEQ ID NO: 823 - DNA, 241 bp, synthetic construct
  misc_feature 1..241: note = Promoter
  source 1..241: mol_type = other DNA
gagggcctatttcccatgattccttcatatttgcatataagatgcaaggctgttagagagataattagaactaattagactgtaaacacaaatatattagtacaaaatatgtgacatagaaagtgataatttcttgggtagtttgcagttttaaaattatgttttaaaatggactatcatctgcttaccgtaactttaaagtatttcgatttcttgactttatatatcttgtggaaaggac

SEQ ID NO: 824 - DNA, 241 bp, synthetic construct
  misc_feature 1..241: note = Promoter
  source 1..241: mol_type = other DNA
gagggcctatttcccatgattccttcatatttgcatataagatgcaaggctgttagagagataattagaactaattcgactgtaaacacaaatatattagtacaaaatatgtgacatagaaagtgataatttcttgggtagtttgcagttttaaaattatgttttaaaatggactatcatctgcttaccgtaactttaaagtatttcgatttcttgactttatatatcttgtggaaaggac

SEQ ID NO: 825 - DNA, 241 bp, synthetic construct
  misc_feature 1..241: note = Promoter
  source 1..241: mol_type = other DNA
gagggcctatttcccatgattccttcatatttgcatataagatgcaaggctgttagagagataattagaactaattggactgtaaacacaaatatattagtacaaaatatgtgacatagaaagtgataatttcttgggtagtttgcagttttaaaattatgttttaaaatggactatcatctgcttaccgtaactttaaagtatttcgatttcttgactttatatatcttgtggaaaggac

SEQ ID NO: 826 - DNA, 241 bp, synthetic construct
  misc_feature 1..241: note = Promoter
  source 1..241: mol_type = other DNA
gagggcctatttcccatgattccttcatatttgcatataagatgcaaggctgttagagagataattagaactaatttaactgtaaacacaaatatattagtacaaaatatgtgacatagaaagtgataatttcttgggtagtttgcagttttaaaattatgttttaaaatggactatcatctgcttaccgtaactttaaagtatttcgatttcttgactttatatatcttgtggaaaggac

SEQ ID NO: 827 - DNA, 241 bp, synthetic construct
  misc_feature 1..241: note = Promoter
  source 1..241: mol_type = other DNA
gagggcctatttcccatgattccttcatatttgcatataagatgcaaggctgttagagagataattagaactaatttcactgtaaacacaaatatattagtacaaaatatgtgacatagaaagtgataatttcttgggtagtttgcagttttaaaattatgttttaaaatggactatcatctgcttaccgtaactttaaagtatttcgatttcttgactttatatatcttgtggaaaggac

SEQ ID NO: 828 - DNA, 241 bp, synthetic construct
  misc_feature 1..241: note = Promoter
  source 1..241: mol_type = other DNA
gagggcctatttcccatgattccttcatatttgcatataagatgcaaggctgttagagagataattagaactaattttactgtaaacacaaatatattagtacaaaatatgtgacatagaaagtgataatttcttgggtagtttgcagttttaaaattatgttttaaaatggactatcatctgcttaccgtaactttaaagtatttcgatttcttgactttatatatcttgtggaaaggac

SEQ ID NO: 829 - DNA, 241 bp, synthetic construct
  misc_feature 1..241: note = Promoter
  source 1..241: mol_type = other DNA
gagggcctatttcccatgattccttcatatttgcatataagatgcaaggctgttagagagataattagaactaatttgcctgtaaacacaaatatattagtacaaaatatgtgacatagaaagtgataatttcttgggtagtttgcagttttaaaattatgttttaaaatggactatcatctgcttaccgtaactttaaagtatttcgatttcttgactttatatatcttgtggaaaggac

SEQ ID NO: 830 - DNA, 241 bp, synthetic construct
  misc_feature 1..241: note = Promoter
  source 1..241: mol_type = other DNA
gagggcctatttcccatgattccttcatatttgcatataagatgcaaggctgttagagagataattagaactaatttggctgtaaacacaaatatattagtacaaaatatgtgacatagaaagtgataatttcttgggtagtttgcagttttaaaattatgttttaaaatggactatcatctgcttaccgtaactttaaagtatttcgatttcttgactttatatatcttgtggaaaggac

SEQ ID NO: 831 - DNA, 241 bp, synthetic construct
  misc_feature 1..241: note = Promoter
  source 1..241: mol_type = other DNA
gagggcctatttcccatgattccttcatatttgcatataagatgcaaggctgttagagagataattagaactaatttgtctgtaaacacaaatatattagtacaaaatatgtgacatagaaagtgataatttcttgggtagtttgcagttttaaaattatgttttaaaatggactatcatctgcttaccgtaactttaaagtatttcgatttcttgactttatatatcttgtggaaaggac

SEQ ID NO: 832 - DNA, 241 bp, synthetic construct
  misc_feature 1..241: note = Promoter
  source 1..241: mol_type = other DNA
gagggcctatttcccatgattccttcatatttgcatataagatgcaaggctgttagagagataattagaactaatttgaatgtaaacacaaatatattagtacaaaatatgtgacatagaaagtgataatttcttgggtagtttgcagttttaaaattatgttttaaaatggactatcatctgcttaccgtaactttaaagtatttcgatttcttgactttatatatcttgtggaaaggac

SEQ ID NO: 833 - DNA, 241 bp, synthetic construct
  misc_feature 1..241: note = Promoter
  source 1..241: mol_type = other DNA
gagggcctatttcccatgattccttcatatttgcatataagatgcaaggctgttagagagataattagaactaatttgagtgtaaacacaaatatattagtacaaaatatgtgacatagaaagtgataatttcttgggtagtttgcagttttaaaattatgttttaaaatggactatcatctgcttaccgtaactttaaagtatttcgatttcttgactttatatatcttgtggaaaggac

SEQ ID NO: 834 - DNA, 241 bp, synthetic construct
  misc_feature 1..241: note = Promoter
  source 1..241: mol_type = other DNA
gagggcctatttcccatgattccttcatatttgcatataagatgcaaggctgttagagagataattagaactaatttgattgtaaacacaaatatattagtacaaaatatgtgacatagaaagtgataatttcttgggtagtttgcagttttaaaattatgttttaaaatggactatcatctgcttaccgtaactttaaagtatttcgatttcttgactttatatatcttgtggaaaggac

SEQ ID NO: 835 - DNA, 241 bp, synthetic construct
  misc_feature 1..241: note = Promoter
  source 1..241: mol_type = other DNA
gagggcctatttcccatgattccttcatatttgcatataagatgcaaggctgttagagagataattagaactaatttgacagtaaacacaaatatattagtacaaaatatgtgacatagaaagtgataatttcttgggtagtttgcagttttaaaattatgttttaaaatggactatcatctgcttaccgtaactttaaagtatttcgatttcttgactttatatatcttgtggaaaggac

SEQ ID NO: 836 - DNA, 241 bp, synthetic construct
  misc_feature 1..241: note = Promoter
  source 1..241: mol_type = other DNA
gagggcctatttcccatgattccttcatatttgcatataagatgcaaggctgttagagagataattagaactaatttgaccgtaaacacaaatatattagtacaaaatatgtgacatagaaagtgataatttcttgggtagtttgcagttttaaaattatgttttaaaatggactatcatctgcttaccgtaactttaaagtatttcgatttcttgactttatatatcttgtggaaaggac

SEQ ID NO: 837 - DNA, 241 bp, synthetic construct
  misc_feature 1..241: note = Promoter
  source 1..241: mol_type = other DNA
gagggcctatttcccatgattccttcatatttgcatataagatgcaaggctgttagagagataattagaactaatttgacggtaaacacaaatatattagtacaaaatatgtgacatagaaagtgataatttcttgggtagtttgcagttttaaaattatgttttaaaatggactatcatctgcttaccgtaactttaaagtatttcgatttcttgactttatatatcttgtggaaaggac

SEQ ID NO: 838 - DNA, 241 bp, synthetic construct
  misc_feature 1..241: note = Promoter
  source 1..241: mol_type = other DNA
gagggcctatttcccatgattccttcatatttgcatataagatgcaaggctgttagagagataattagaactaatttgactataaacacaaatatattagtacaaaatatgtgacatagaaagtgataatttcttgggtagtttgcagttttaaaattatgttttaaaatggactatcatctgcttaccgtaactttaaagtatttcgatttcttgactttatatatcttgtggaaaggac

SEQ ID NO: 839 - DNA, 241 bp, synthetic construct
  misc_feature 1..241: note = Promoter
  source 1..241: mol_type = other DNA
gagggcctatttcccatgattccttcatatttgcatataagatgcaaggctgttagagagataattagaactaatttgactctaaacacaaatatattagtacaaaatatgtgacatagaaagtgataatttcttgggtagtttgcagttttaaaattatgttttaaaatggactatcatctgcttaccgtaactttaaagtatttcgatttcttgactttatatatcttgtggaaaggac

SEQ ID NO: 840 - DNA, 241 bp, synthetic construct
  misc_feature 1..241: note = Promoter
  source 1..241: mol_type = other DNA
gagggcctatttcccatgattccttcatatttgcatataagatgcaaggctgttagagagataattagaactaatttgactttaaacacaaatatattagtacaaaatatgtgacatagaaagtgataatttcttgggtagtttgcagttttaaaattatgttttaaaatggactatcatctgcttaccgtaactttaaagtatttcgatttcttgactttatatatcttgtggaaaggac

SEQ ID NO: 841 - DNA, 241 bp, synthetic construct
  misc_feature 1..241: note = Promoter
  source 1..241: mol_type = other DNA
gagggcctatttcccatgattccttcatatttgcatataagatgcaaggctgttagagagataattagaactaatttgactgaaaacacaaatatattagtacaaaatatgtgacatagaaagtgataatttcttgggtagtttgcagttttaaaattatgttttaaaatggactatcatctgcttaccgtaactttaaagtatttcgatttcttgactttatatatcttgtggaaaggac

SEQ ID NO: 842 - DNA, 241 bp, synthetic construct
  misc_feature 1..241: note = Promoter
  source 1..241: mol_type = other DNA
gagggcctatttcccatgattccttcatatttgcatataagatgcaaggctgttagagagataattagaactaatttgactgcaaacacaaatatattagtacaaaatatgtgacatagaaagtgataatttcttgggtagtttgcagttttaaaattatgttttaaaatggactatcatctgcttaccgtaactttaaagtatttcgatttcttgactttatatatcttgtggaaaggac

SEQ ID NO: 843 - DNA, 241 bp, synthetic construct
  misc_feature 1..241: note = Promoter
  source 1..241: mol_type = other DNA
gagggcctatttcccatgattccttcatatttgcatataagatgcaaggctgttagagagataattagaactaatttgactggaaacacaaatatattagtacaaaatatgtgacatagaaagtgataatttcttgggtagtttgcagttttaaaattatgttttaaaatggactatcatctgcttaccgtaactttaaagtatttcgatttcttgactttatatatcttgtggaaaggac

SEQ ID NO: 844 - DNA, 241 bp, synthetic construct
  misc_feature 1..241: note = Promoter
  source 1..241: mol_type = other DNA
gagggcctatttcccatgattccttcatatttgcatataagatgcaaggctgttagagagataattagaactaatttgactgtcaacacaaatatattagtacaaaatatgtgacatagaaagtgataatttcttgggtagtttgcagttttaaaattatgttttaaaatggactatcatctgcttaccgtaactttaaagtatttcgatttcttgactttatatatcttgtggaaaggac

SEQ ID NO: 845 - DNA, 241 bp, synthetic construct
  misc_feature 1..241: note = Promoter
  source 1..241: mol_type = other DNA
gagggcctatttcccatgattccttcatatttgcatataagatgcaaggctgttagagagataattagaactaatttgactgtgaacacaaatatattagtacaaaatatgtgacatagaaagtgataatttcttgggtagtttgcagttttaaaattatgttttaaaatggactatcatctgcttaccgtaactttaaagtatttcgatttcttgactttatatatcttgtggaaaggac

SEQ ID NO: 846 - DNA, 241 bp, synthetic construct
  misc_feature 1..241: note = Promoter
  source 1..241: mol_type = other DNA
gagggcctatttcccatgattccttcatatttgcatataagatgcaaggctgttagagagataattagaactaatttgactgttaacacaaatatattagtacaaaatatgtgacatagaaagtgataatttcttgggtagtttgcagttttaaaattatgttttaaaatggactatcatctgcttaccgtaactttaaagtatttcgatttcttgactttatatatcttgtggaaaggac

SEQ ID NO: 847 - DNA, 241 bp, synthetic construct
  misc_feature 1..241: note = Promoter
  source 1..241: mol_type = other DNA
gagggcctatttcccatgattccttcatatttgcatataagatgcaaggctgttagagagataattagaactaatttgactgtacacacaaatatattagtacaaaatatgtgacatagaaagtgataatttcttgggtagtttgcagttttaaaattatgttttaaaatggactatcatctgcttaccgtaactttaaagtatttcgatttcttgactttatatatcttgtggaaaggac

SEQ ID NO: 848 - DNA, 241 bp, synthetic construct
  misc_feature 1..241: note = Promoter
  source 1..241: mol_type = other DNA
gagggcctatttcccatgattccttcatatttgcatataagatgcaaggctgttagagagataattagaactaatttgactgtagacacaaatatattagtacaaaatatgtgacatagaaagtgataatttcttgggtagtttgcagttttaaaattatgttttaaaatggactatcatctgcttaccgtaactttaaagtatttcgatttcttgactttatatatcttgtggaaaggac

SEQ ID NO: 849 - DNA, 241 bp, synthetic construct
  misc_feature 1..241: note = Promoter
  source 1..241: mol_type = other DNA
gagggcctatttcccatgattccttcatatttgcatataagatgcaaggctgttagagagataattagaactaatttgactgtatacacaaatatattagtacaaaatatgtgacatagaaagtgataatttcttgggtagtttgcagttttaaaattatgttttaaaatggactatcatctgcttaccgtaactttaaagtatttcgatttcttgactttatatatcttgtggaaaggac

SEQ ID NO: 850 - DNA, 241 bp, synthetic construct
  misc_feature 1..241: note = Promoter
  source 1..241: mol_type = other DNA
gagggcctatttcccatgattccttcatatttgcatataagatgcaaggctgttagagagataattagaactaatttgactgtaaccacaaatatattagtacaaaatatgtgacatagaaagtgataatttcttgggtagtttgcagttttaaaattatgttttaaaatggactatcatctgcttaccgtaactttaaagtatttcgatttcttgactttatatatcttgtggaaaggac

SEQ ID NO: 851 - DNA, 241 bp, synthetic construct
  misc_feature 1..241: note = Promoter
  source 1..241: mol_type = other DNA
gagggcctatttcccatgattccttcatatttgcatataagatgcaaggctgttagagagataattagaactaatttgactgtaagcacaaatatattagtacaaaatatgtgacatagaaagtgataatttcttgggtagtttgcagttttaaaattatgttttaaaatggactatcatctgcttaccgtaactttaaagtatttcgatttcttgactttatatatcttgtggaaaggac

SEQ ID NO: 852 - DNA, 241 bp, synthetic construct
  misc_feature 1..241: note = Promoter
  source 1..241: mol_type = other DNA
gagggcctatttcccatgattccttcatatttgcatataagatgcaaggctgttagagagataattagaactaatttgactgtaatcacaaatatattagtacaaaatatgtgacatagaaagtgataatttcttgggtagtttgcagttttaaaattatgttttaaaatggactatcatctgcttaccgtaactttaaagtatttcgatttcttgactttatatatcttgtggaaaggac

SEQ ID NO: 853 - DNA, 241 bp, synthetic construct
  misc_feature 1..241: note = Promoter
  source 1..241: mol_type = other DNA
gagggcctatttcccatgattccttcatatttgcatataagatgcaaggctgttagagagataattagaactaatttgactgtaaaaacaaatatattagtacaaaatatgtgacatagaaagtgataatttcttgggtagtttgcagttttaaaattatgttttaaaatggactatcatctgcttaccgtaactttaaagtatttcgatttcttgactttatatatcttgtggaaaggac

SEQ ID NO: 854 - DNA, 241 bp, synthetic construct
  misc_feature 1..241: note = Promoter
  source 1..241: mol_type = other DNA
gagggcctatttcccatgattccttcatatttgcatataagatgcaaggctgttagagagataattagaactaatttgactgtaaagacaaatatattagtacaaaatatgtgacatagaaagtgataatttcttgggtagtttgcagttttaaaattatgttttaaaatggactatcatctgcttaccgtaactttaaagtatttcgatttcttgactttatatatcttgtggaaaggac

SEQ ID NO: 855 - DNA, 241 bp, synthetic construct
  misc_feature 1..241: note = Promoter
  source 1..241: mol_type = other DNA
gagggcctatttcccatgattccttcatatttgcatataagatgcaaggctgttagagagataattagaactaatttgactgtaaatacaaatatattagtacaaaatatgtgacatagaaagtgataatttcttgggtagtttgcagttttaaaattatgttttaaaatggactatcatctgcttaccgtaactttaaagtatttcgatttcttgactttatatatcttgtggaaaggac

SEQ ID NO: 856 - DNA, 241 bp, synthetic construct
  misc_feature 1..241: note = Promoter
  source 1..241: mol_type = other DNA
gagggcctatttcccatgattccttcatatttgcatataagatgcaaggctgttagagagataattagaactaatttgactgtaaacccaaatatattagtacaaaatatgtgacatagaaagtgataatttcttgggtagtttgcagttttaaaattatgttttaaaatggactatcatctgcttaccgtaactttaaagtatttcgatttcttgactttatatatcttgtggaaaggac

SEQ ID NO: 857 - DNA, 241 bp, synthetic construct
  misc_feature 1..241: note = Promoter
  source 1..241: mol_type = other DNA
gagggcctatttcccatgattccttcatatttgcatataagatgcaaggctgttagagagataattagaactaatttgactgtaaacgcaaatatattagtacaaaatatgtgacatagaaagtgataatttcttgggtagtttgcagttttaaaattatgttttaaaatggactatcatctgcttaccgtaactttaaagtatttcgatttcttgactttatatatcttgtggaaaggac

SEQ ID NO: 858 - DNA, 241 bp, synthetic construct
  misc_feature 1..241: note = Promoter
  source 1..241: mol_type = other DNA
gagggcctatttcccatgattccttcatatttgcatataagatgcaaggctgttagagagataattagaactaatttgactgtaaactcaaatatattagtacaaaatatgtgacatagaaagtgataatttcttgggtagtttgcagttttaaaattatgttttaaaatggactatcatctgcttaccgtaactttaaagtatttcgatttcttgactttatatatcttgtggaaaggac

SEQ ID NO: 859 - DNA, 241 bp, synthetic construct
  misc_feature 1..241: note = Promoter
  source 1..241: mol_type = other DNA
gagggcctatttcccatgattccttcatatttgcatataagatgcaaggctgttagagagataattagaactaatttgactgtaaacaaaaatatattagtacaaaatatgtgacatagaaagtgataatttcttgggtagtttgcagttttaaaattatgttttaaaatggactatcatctgcttaccgtaactttaaagtatttcgatttcttgactttatatatcttgtggaaaggac

SEQ ID NO: 860 - DNA, 241 bp, synthetic construct
  misc_feature 1..241: note = Promoter
  source 1..241: mol_type = other DNA
gagggcctatttcccatgattccttcatatttgcatataagatgcaaggctgttagagagataattagaactaatttgactgtaaacagaaatatattagtacaaaatatgtgacatagaaagtgataatttcttgggtagtttgcagttttaaaattatgttttaaaatggactatcatctgcttaccgtaactttaaagtatttcgatttcttgactttatatatcttgtggaaaggac

SEQ ID NO: 861 - DNA, 241 bp, synthetic construct
  misc_feature 1..241: note = Promoter
  source 1..241: mol_type = other DNA
gagggcctatttcccatgattccttcatatttgcatataagatgcaaggctgttagagagataattagaactaatttgactgtaaacataaatatattagtacaaaatatgtgacatagaaagtgataatttcttgggtagtttgcagttttaaaattatgttttaaaatggactatcatctgcttaccgtaactttaaagtatttcgatttcttgactttatatatcttgtggaaaggac

SEQ ID NO: 862 - DNA, 241 bp, synthetic construct
  misc_feature 1..241: note = Promoter
  source 1..241: mol_type = other DNA
gagggcctatttcccatgattccttcatatttgcatataagatgcaaggctgttagagagataattagaactaatttgactgtaaacaccaatatattagtacaaaatatgtgacatagaaagtgataatttcttgggtagtttgcagttttaaaattatgttttaaaatggactatcatctgcttaccgtaactttaaagtatttcgatttcttgactttatatatcttgtggaaaggac

SEQ ID NO: 863 - DNA, 241 bp, synthetic construct
  misc_feature 1..241: note = Promoter
  source 1..241: mol_type = other DNA
gagggcctatttcccatgattccttcatatttgcatataagatgcaaggctgttagagagataattagaactaatttgactgtaaacacgaatatattagtacaaaatatgtgacatagaaagtgataatttcttgggtagtttgcagttttaaaattatgttttaaaatggactatcatctgcttaccgtaactttaaagtatttcgatttcttgactttatatatcttgtggaaaggac

SEQ ID NO: 864 - DNA, 241 bp, synthetic construct
  misc_feature 1..241: note = Promoter
  source 1..241: mol_type = other DNA
gagggcctatttcccatgattccttcatatttgcatataagatgcaaggctgttagagagataattagaactaatttgactgtaaacactaatatattagtacaaaatatgtgacatagaaagtgataatttcttgggtagtttgcagttttaaaattatgttttaaaatggactatcatctgcttaccgtaactttaaagtatttcgatttcttgactttatatatcttgtggaaaggac

SEQ ID NO: 865 - DNA, 241 bp, synthetic construct
  misc_feature 1..241: note = Promoter
  source 1..241: mol_type = other DNA
gagggcctatttcccatgattccttcatatttgcatataagatgcaaggctgttagagagataattagaactaatttgactgtaaacacacatatattagtacaaaatatgtgacatagaaagtgataatttcttgggtagtttgcagttttaaaattatgttttaaaatggactatcatctgcttaccgtaactttaaagtatttcgatttcttgactttatatatcttgtggaaaggac

SEQ ID NO: 866 - DNA, 241 bp, synthetic construct
  misc_feature 1..241: note = Promoter
  source 1..241: mol_type = other DNA
gagggcctatttcccatgattccttcatatttgcatataagatgcaaggctgttagagagataattagaactaatttgactgtaaacacagatatattagtacaaaatatgtgacatagaaagtgataatttcttgggtagtttgcagttttaaaattatgttttaaaatggactatcatctgcttaccgtaactttaaagtatttcgatttcttgactttatatatcttgtggaaaggac

SEQ ID NO: 867 - DNA, 241 bp, synthetic construct
  misc_feature 1..241: note = Promoter
  source 1..241: mol_type = other DNA
gagggcctatttcccatgattccttcatatttgcatataagatgcaaggctgttagagagataattagaactaatttgactgtaaacacatatatattagtacaaaatatgtgacatagaaagtgataatttcttgggtagtttgcagttttaaaattatgttttaaaatggactatcatctgcttaccgtaactttaaagtatttcgatttcttgactttatatatcttgtggaaaggac

SEQ ID NO: 868 - DNA, 241 bp, synthetic construct
  misc_feature 1..241: note = Promoter
  source 1..241: mol_type = other DNA
gagggcctatttcccatgattccttcatatttgcatataagatgcaaggctgttagagagataattagaactaatttgactgtaaacacaactatattagtacaaaatatgtgacatagaaagtgataatttcttgggtagtttgcagttttaaaattatgttttaaaatggactatcatctgcttaccgtaactttaaagtatttcgatttcttgactttatatatcttgtggaaaggac

SEQ ID NO: 869 - DNA, 241 bp, synthetic construct
  misc_feature 1..241: note = Promoter
  source 1..241: mol_type = other DNA
gagggcctatttcccatgattccttcatatttgcatataagatgcaaggctgttagagagataattagaactaatttgactgtaaacacaagtatattagtacaaaatatgtgacatagaaagtgataatttcttgggtagtttgcagttttaaaattatgttttaaaatggactatcatctgcttaccgtaactttaaagtatttcgatttcttgactttatatatcttgtggaaaggac

SEQ ID NO: 870 - DNA, 241 bp, synthetic construct
  misc_feature 1..241: note = Promoter
  source 1..241: mol_type = other DNA
gagggcctatttcccatgattccttcatatttgcatataagatgcaaggctgttagagagataattagaactaatttgactgtaaacacaattatattagtacaaaatatgtgacatagaaagtgataatttcttgggtagtttgcagttttaaaattatgttttaaaatggactatcatctgcttaccgtaactttaaagtatttcgatttcttgactttatatatcttgtggaaaggac

SEQ ID NO: 871 - DNA, 241 bp, synthetic construct
  misc_feature 1..241: note = Promoter
  source 1..241: mol_type = other DNA
gagggcctatttcccatgattccttcatatttgcatataagatgcaaggctgttagagagataattagaactaatttgactgtaaacacaaaaatattagtacaaaatatgtgacatagaaagtgataatttcttgggtagtttgcagttttaaaattatgttttaaaatggactatcatctgcttaccgtaactttaaagtatttcgatttcttgactttatatatcttgtggaaaggac

SEQ ID NO: 872 - DNA, 241 bp, synthetic construct
  misc_feature 1..241: note = Promoter
  source 1..241: mol_type = other DNA
gagggcctatttcccatgattccttcatatttgcatataagatgcaaggctgttagagagataattagaactaatttgactgtaaacacaaacatattagtacaaaatatgtgacatagaaagtgataatttcttgggtagtttgcagttttaaaattatgttttaaaatggactatcatctgcttaccgtaactttaaagtatttcgatttcttgactttatatatcttgtggaaaggac

SEQ ID NO: 873 - DNA, 241 bp, synthetic construct
  misc_feature 1..241: note = Promoter
  source 1..241: mol_type = other DNA
gagggcctatttcccatgattccttcatatttgcatataagatgcaaggctgttagagagataattagaactaatttgactgtaaacacaaagatattagtacaaaatatgtgacatagaaagtgataatttcttgggtagtttgcagttttaaaattatgttttaaaatggactatcatctgcttaccgtaactttaaagtatttcgatttcttgactttatatatcttgtggaaaggac

SEQ ID NO: 874 - DNA, 241 bp, synthetic construct
  misc_feature 1..241: note = Promoter
  source 1..241: mol_type = other DNA
gagggcctatttcccatgattccttcatatttgcatataagatgcaaggctgttagagagataattagaactaatttgactgtaaacacaaatctattagtacaaaatatgtgacatagaaagtgataatttcttgggtagtttgcagttttaaaattatgttttaaaatggactatcatctgcttaccgtaactttaaagtatttcgatttcttgactttatatatcttgtggaaaggac

SEQ ID NO: 875 - DNA, 241 bp, synthetic construct
  misc_feature 1..241: note = Promoter
  source 1..241: mol_type = other DNA
gagggcctatttcccatgattccttcatatttgcatataagatgcaaggctgttagagagataattagaactaatttgactgtaaacacaaatgtattagtacaaaatatgtgacatagaaagtgataatttcttgggtagtttgcagttttaaaattatgttttaaaatggactatcatctgcttaccgtaactttaaagtatttcgatttcttgactttatatatcttgtggaaaggac

SEQ ID NO: 876 - DNA, 241 bp, synthetic construct
  misc_feature 1..241: note = Promoter
  source 1..241: mol_type = other DNA
gagggcctatttcccatgattccttcatatttgcatataagatgcaaggctgttagagagataattagaactaatttgactgtaaacacaaatttattagtacaaaatatgtgacatagaaagtgataatttcttgggtagtttgcagttttaaaattatgttttaaaatggactatcatctgcttaccgtaactttaaagtatttcgatttcttgactttatatatcttgtggaaaggac

SEQ ID NO: 877 - DNA, 241 bp, synthetic construct
  misc_feature 1..241: note = Promoter
  source 1..241: mol_type = other DNA
gagggcctatttcccatgattccttcatatttgcatataagatgcaaggctgttagagagataattagaactaatttgactgtaaacacaaataaattagtacaaaatatgtgacatagaaagtgataatttcttgggtagtttgcagttttaaaattatgttttaaaatggactatcatctgcttaccgtaactttaaagtatttcgatttcttgactttatatatcttgtggaaaggac

SEQ ID NO: 878 - DNA, 241 bp, synthetic construct
  misc_feature 1..241: note = Promoter
  source 1..241: mol_type = other DNA
gagggcctatttcccatgattccttcatatttgcatataagatgcaaggctgttagagagataattagaactaatttgactgtaaacacaaatacattagtacaaaatatgtgacatagaaagtgataatttcttgggtagtttgcagttttaaaattatgttttaaaatggactatcatctgcttaccgtaactttaaagtatttcgatttcttgactttatatatcttgtggaaaggac

SEQ ID NO: 879 - DNA, 241 bp, synthetic construct
  misc_feature 1..241: note = Promoter
  source 1..241: mol_type = other DNA
gagggcctatttcccatgattccttcatatttgcatataagatgcaaggctgttagagagataattagaactaatttgactgtaaacacaaatagattagtacaaaatatgtgacatagaaagtgataatttcttgggtagtttgcagttttaaaattatgttttaaaatggactatcatctgcttaccgtaactttaaagtatttcgatttcttgactttatatatcttgtggaaaggac

SEQ ID NO: 880 - DNA, 241 bp, synthetic construct
  misc_feature 1..241: note = Promoter
  source 1..241: mol_type = other DNA
gagggcctatttcccatgattccttcatatttgcatataagatgcaaggctgttagagagataattagaactaatttgactgtaaacacaaatatcttagtacaaaatatgtgacatagaaagtgataatttcttgggtagtttgcagttttaaaattatgttttaaaatggactatcatctgcttaccgtaactttaaagtatttcgatttcttgactttatatatcttgtggaaaggac

SEQ ID NO: 881 - DNA, 241 bp, synthetic construct
  misc_feature 1..241: note = Promoter
  source 1..241: mol_type = other DNA
gagggcctatttcccatgattccttcatatttgcatataagatgcaaggctgttagagagataattagaactaatttgactgtaaacacaaatatgttagtacaaaatatgtgacatagaaagtgataatttcttgggtagtttgcagttttaaaattatgttttaaaatggactatcatctgcttaccgtaactttaaagtatttcgatttcttgactttatatatcttgtggaaaggac

SEQ ID NO: 882 - DNA, 241 bp, synthetic construct
  misc_feature 1..241: note = Promoter
  source 1..241: mol_type = other DNA
gagggcctatttcccatgattccttcatatttgcatataagatgcaaggctgttagagagataattagaactaatttgactgtaaacacaaatattttagtacaaaatatgtgacatagaaagtgataatttcttgggtagtttgcagttttaaaattatgttttaaaatggactatcatctgcttaccgtaactttaaagtatttcgatttcttgactttatatatcttgtggaaaggac

SEQ ID NO: 883 - DNA, 241 bp, synthetic construct
  misc_feature 1..241: note = Promoter
  source 1..241: mol_type = other DNA
gagggcctatttcccatgattccttcatatttgcatataagatgcaaggctgttagagagataattagaactaatttgactgtaaacacaaatataatagtacaaaatatgtgacatagaaagtgataatttcttgggtagtttgcagttttaaaattatgttttaaaatggactatcatctgcttaccgtaactttaaagtatttcgatttcttgactttatatatcttgtggaaaggac

SEQ ID NO: 884 - DNA, 241 bp, synthetic construct
  misc_feature 1..241: note = Promoter
  source 1..241: mol_type = other DNA
gagggcctatttcccatgattccttcatatttgcatataagatgcaaggctgttagagagataattagaactaatttgactgtaaacacaaatatactagtacaaaatatgtgacatagaaagtgataatttcttgggtagtttgcagttttaaaattatgttttaaaatggactatcatctgcttaccgtaactttaaagtatttcgatttcttgactttatatatcttgtggaaaggac

SEQ ID NO: 885 - DNA, 241 bp, synthetic construct
  misc_feature 1..241: note = Promoter
  source 1..241: mol_type = other DNA
gagggcctatttcccatgattccttcatatttgcatataagatgcaaggctgttagagagataattagaactaatttgactgtaaacacaaatatagtagtacaaaatatgtgacatagaaagtgataatttcttgggtagtttgcagttttaaaattatgttttaaaatggactatcatctgcttaccgtaactttaaagtatttcgatttcttgactttatatatcttgtggaaaggac

SEQ ID NO: 886 - DNA, 241 bp, synthetic construct
  misc_feature 1..241: note = Promoter
  source 1..241: mol_type = other DNA
gagggcctatttcccatgattccttcatatttgcatataagatgcaaggctgttagagagataattagaactaatttgactgtaaacacaaatatataagtacaaaatatgtgacatagaaagtgataatttcttgggtagtttgcagttttaaaattatgttttaaaatggactatcatctgcttaccgtaactttaaagtatttcgatttcttgactttatatatcttgtggaaaggac

SEQ ID NO: 887 - DNA, 241 bp, synthetic construct
  misc_feature 1..241: note = Promoter
  source 1..241: mol_type = other DNA
gagggcctatttcccatgattccttcatatttgcatataagatgcaaggctgttagagagataattagaactaatttgactgtaaacacaaatatatcagtacaaaatatgtgacatagaaagtgataatttcttgggtagtttgcagttttaaaattatgttttaaaatggactatcatctgcttaccgtaactttaaagtatttcgatttcttgactttatatatcttgtggaaaggac

SEQ ID NO: 888 - DNA, 241 bp, synthetic construct
  misc_feature 1..241: note = Promoter
  source 1..241: mol_type = other DNA
gagggcctatttcccatgattccttcatatttgcatataagatgcaaggctgttagagagataattagaactaatttgactgtaaacacaaatatatgagtacaaaatatgtgacatagaaagtgataatttcttgggtagtttgcagttttaaaattatgttttaaaatggactatcatctgcttaccgtaactttaaagtatttcgatttcttgactttatatatcttgtggaaaggac

SEQ ID NO: 889 - DNA, 241 bp, synthetic construct
  misc_feature 1..241: note = Promoter
  source 1..241: mol_type = other DNA
gagggcctatttcccatgattccttcatatttgcatataagatgcaaggctgttagagagataattagaactaatttgactgtaaacacaaatatattcgtacaaaatatgtgacatagaaagtgataatttcttgggtagtttgcagttttaaaattatgttttaaaatggactatcatctgcttaccgtaactttaaagtatttcgatttcttgactttatatatcttgtggaaaggac

SEQ ID NO: 890 - DNA, 241 bp, synthetic construct
  misc_feature 1..241: note = Promoter
  source 1..241: mol_type = other DNA
gagggcctatttcccatgattccttcatatttgcatataagatgcaaggctgttagagagataattagaactaatttgactgtaaacacaaatatattggtacaaaatatgtgacatagaaagtgataatttcttgggtagtttgcagttttaaaattatgttttaaaatggactatcatctgcttaccgtaactttaaagtatttcgatttcttgactttatatatcttgtggaaaggac

SEQ ID NO: 891 - DNA, 241 bp, synthetic construct
  misc_feature 1..241: note = Promoter
  source 1..241: mol_type = other DNA
gagggcctatttcccatgattccttcatatttgcatataagatgcaaggctgttagagagataattagaactaatttgactgtaaacacaaatatatttgtacaaaatatgtgacatagaaagtgataatttcttgggtagtttgcagttttaaaattatgttttaaaatggactatcatctgcttaccgtaactttaaagtatttcgatttcttgactttatatatcttgtggaaaggac

SEQ ID NO: 892 - DNA, 241 bp, synthetic construct
  misc_feature 1..241: note = Promoter
  source 1..241: mol_type = other DNA
gagggcctatttcccatgattccttcatatttgcatataagatgcaaggctgttagagagataattagaactaatttgactgtaaacacaaatatattaatacaaaatatgtgacatagaaagtgataatttcttgggtagtttgcagttttaaaattatgttttaaaatggactatcatctgcttaccgtaactttaaagtatttcgatttcttgactttatatatcttgtggaaaggac

SEQ ID NO: 893 - DNA, 241 bp, synthetic construct
  misc_feature 1..241: note = Promoter
  source 1..241: mol_type = other DNA
gagggcctatttcccatgattccttcatatttgcatataagatgcaaggctgttagagagataattagaactaatttgactgtaaacacaaatatattactacaaaatatgtgacatagaaagtgataatttcttgggtagtttgcagttttaaaattatgttttaaaatggactatcatctgcttaccgtaactttaaagtatttcgatttcttgactttatatatcttgtggaaaggac

SEQ ID NO: 894 - DNA, 241 bp, synthetic construct
  misc_feature 1..241: note = Promoter
  source 1..241: mol_type = other DNA
gagggcctatttcccatgattccttcatatttgcatataagatgcaaggctgttagagagataattagaactaatttgactgtaaacacaaatatattattacaaaatatgtgacatagaaagtgataatttcttgggtagtttgcagttttaaaattatgttttaaaatggactatcatctgcttaccgtaactttaaagtatttcgatttcttgactttatatatcttgtggaaaggac

SEQ ID NO: 895 - DNA, 241 bp, synthetic construct
  misc_feature 1..241: note = Promoter
  source 1..241: mol_type = other DNA
gagggcctatttcccatgattccttcatatttgcatataagatgcaaggctgttagagagataattagaactaatttgactgtaaacacaaatatattagaacaaaatatgtgacatagaaagtgataatttcttgggtagtttgcagttttaaaattatgttttaaaatggactatcatctgcttaccgtaactttaaagtatttcgatttcttgactttatatatcttgtggaaaggac

SEQ ID NO: 896 - DNA, 241 bp, synthetic construct
  misc_feature 1..241: note = Promoter
  source 1..241: mol_type = other DNA
gagggcctatttcccatgattccttcatatttgcatataagatgcaaggctgttagagagataattagaactaatttgactgtaaacacaaatatattagcacaaaatatgtgacatagaaagtgataatttcttgggtagtttgcagttttaaaattatgttttaaaatggactatcatctgcttaccgtaactttaaagtatttcgatttcttgactttatatatcttgtggaaaggac

SEQ ID NO: 897 - DNA, 241 bp, synthetic construct
  misc_feature 1..241: note = Promoter
  source 1..241: mol_type = other DNA
gagggcctatttcccatgattccttcatatttgcatataagatgcaaggctgttagagagataattagaactaatttgactgtaaacacaaatatattaggacaaaatatgtgacatagaaagtgataatttcttgggtagtttgcagttttaaaattatgttttaaaatggactatcatctgcttaccgtaactttaaagtatttcgatttcttgactttatatatcttgtggaaaggac

SEQ ID NO: 898 - DNA, 241 bp, synthetic construct
  misc_feature 1..241: note = Promoter
  source 1..241: mol_type = other DNA
gagggcctatttcccatgattccttcatatttgcatataagatgcaaggctgttagagagataattagaactaatttgactgtaaacacaaatatattagtccaaaatatgtgacatagaaagtgataatttcttgggtagtttgcagttttaaaattatgttttaaaatggactatcatctgcttaccgtaactttaaagtatttcgatttcttgactttatatatcttgtggaaaggac

SEQ ID NO: 899 - DNA, 241 bp, synthetic construct
  misc_feature 1..241: note = Promoter
  source 1..241: mol_type = other DNA
gagggcctatttcccatgattccttcatatttgcatataagatgcaaggctgttagagagataattagaactaatttgactgtaaacacaaatatattagtgcaaaatatgtgacatagaaagtgataatttcttgggtagtttgcagttttaaaattatgttttaaaatggactatcatctgcttaccgtaactttaaagtatttcgatttcttgactttatatatcttgtggaaaggac

SEQ ID NO: 900 - DNA, 241 bp, synthetic construct
  misc_feature 1..241: note = Promoter
  source 1..241: mol_type = other DNA
gagggcctatttcccatgattccttcatatttgcatataagatgcaaggctgttagagagataattagaactaatttgactgtaaacacaaatatattagttcaaaatatgtgacatagaaagtgataatttcttgggtagtttgcagttttaaaattatgttttaaaatggactatcatctgcttaccgtaactttaaagtatttcgatttcttgactttatatatcttgtggaaaggac

SEQ ID NO: 901 - DNA, 241 bp, synthetic construct
  misc_feature 1..241: note = Promoter
  source 1..241: mol_type = other DNA
gagggcctatttcccatgattccttcatatttgcatataagatgcaaggctgttagagagataattagaactaatttgactgtaaacacaaatatattagtaaaaaatatgtgacatagaaagtgataatttcttgggtagtttgcagttttaaaattatgttttaaaatggactatcatctgcttaccgtaactttaaagtatttcgatttcttgactttatatatcttgtggaaaggac

SEQ ID NO: 902 - DNA, 241 bp, synthetic construct
  misc_feature 1..241: note = Promoter
  source 1..241: mol_type = other DNA
gagggcctatttcccatgattccttcatatttgcatataagatgcaaggctgttagagagataattagaactaatttgactgtaaacacaaatatattagtagaaaatatgtgacatagaaagtgataatttcttgggtagtttgcagttttaaaattatgttttaaaatggactatcatctgcttaccgtaactttaaagtatttcgatttcttgactttatatatcttgtggaaaggac

SEQ ID NO: 903 - DNA, 241 bp, synthetic construct
  misc_feature 1..241: note = Promoter
  source 1..241: mol_type = other DNA
gagggcctatttcccatgattccttcatatttgcatataagatgcaaggctgttagagagataattagaactaatttgactgtaaacacaaatatattagtataaaatatgtgacatagaaagtgataatttcttgggtagtttgcagttttaaaattatgttttaaaatggactatcatctgcttaccgtaactttaaagtatttcgatttcttgactttatatatcttgtggaaaggac

SEQ ID NO: 904 - DNA, 241 bp, synthetic construct
  misc_feature 1..241: note = Promoter
  source 1..241: mol_type = other DNA
gagggcctatttcccatgattccttcatatttgcatataagatgcaaggctgttagagagataattagaactaatttgactgtaaacacaaatatattagtaccaaatatgtgacatagaaagtgataatttcttgggtagtttgcagttttaaaattatgttttaaaatggactatcatctgcttaccgtaactttaaagtatttcgatttcttgactttatatatcttgtggaaaggac

SEQ ID NO: 905 - DNA, 241 bp, synthetic construct
  misc_feature 1..241: note = Promoter
  source 1..241: mol_type = other DNA
gagggcctatttcccatgattccttcatatttgcatataagatgcaaggctgttagagagataattagaactaatttgactgtaaacacaaatatattagtacgaaatatgtgacatagaaagtgataatttcttgggtagtttgcagttttaaaattatgttttaaaatggactatcatctgcttaccgtaactttaaagtatttcgatttcttgactttatatatcttgtggaaaggac

SEQ ID NO: 906 - DNA, 241 bp, synthetic construct
  misc_feature 1..241: note = Promoter
  source 1..241: mol_type = other DNA
gagggcctatttcccatgattccttcatatttgcatataagatgcaaggctgttagagagataattagaactaatttgactgtaaacacaaatatattagtactaaatatgtgacatagaaagtgataatttcttgggtagtttgcagttttaaaattatgttttaaaatggactatcatctgcttaccgtaactttaaagtatttcgatttcttgactttatatatcttgtggaaaggac

SEQ ID NO: 907 - DNA, 241 bp, synthetic construct
  misc_feature 1..241: note = Promoter
  source 1..241: mol_type = other DNA
gagggcctatttcccatgattccttcatatttgcatataagatgcaaggctgttagagagataattagaactaatttgactgtaaacacaaatatattagtacacaatatgtgacatagaaagtgataatttcttgggtagtttgcagttttaaaattatgttttaaaatggactatcatctgcttaccgtaactttaaagtatttcgatttcttgactttatatatcttgtggaaaggac

SEQ ID NO: 908 - DNA, 241 bp, synthetic construct
  misc_feature 1..241: note = Promoter
  source 1..241: mol_type = other DNA
gagggcctatttcccatgattccttcatatttgcatataagatgcaaggctgttagagagataattagaactaatttgactgtaaacacaaatatattagtacagaatatgtgacatagaaagtgataatttcttgggtagtttgcagttttaaaattatgttttaaaatggactatcatctgcttaccgtaactttaaagtatttcgatttcttgactttatatatcttgtggaaaggac

SEQ ID NO: 909 - DNA, 241 bp, synthetic construct
  misc_feature 1..241: note = Promoter
  source 1..241: mol_type = other DNA
gagggcctatttcccatgattccttcatatttgcatataagatgcaaggctgttagagagataattagaactaatttgactgtaaacacaaatatattagtacataatatgtgacatagaaagtgataatttcttgggtagtttgcagttttaaaattatgttttaaaatggactatcatctgcttaccgtaactttaaagtatttcgatttcttgactttatatatcttgtggaaaggac

SEQ ID NO: 910 - DNA, 241 bp, synthetic construct
  misc_feature 1..241: note = Promoter
  source 1..241: mol_type = other DNA
gagggcctatttcccatgattccttcatatttgcatataagatgcaaggctgttagagagataattagaactaatttgactgtaaacacaaatatattagtacaacatatgtgacatagaaagtgataatttcttgggtagtttgcagttttaaaattatgttttaaaatggactatcatctgcttaccgtaactttaaagtatttcgatttcttgactttatatatcttgtggaaaggac

SEQ ID NO: 911 - DNA, 241 bp, synthetic construct
  misc_feature 1..241: note = Promoter
  source 1..241: mol_type = other DNA
gagggcctatttcccatgattccttcatatttgcatataagatgcaaggctgttagagagataattagaactaatttgactgtaaacacaaatatattagtacaagatatgtgacatagaaagtgataatttcttgggtagtttgcagttttaaaattatgttttaaaatggactatcatctgcttaccgtaactttaaagtatttcgatttcttgactttatatatcttgtggaaaggac

SEQ ID NO: 912 - DNA, 241 bp, synthetic construct
  misc_feature 1..241: note = Promoter
  source 1..241: mol_type = other DNA
gagggcctatttcccatgattccttcatatttgcatataagatgcaaggctgttagagagataattagaactaatttgactgtaaacacaaatatattagtacaatatatgtgacatagaaagtgataatttcttgggtagtttgcagttttaaaattatgttttaaaatggactatcatctgcttaccgtaactttaaagtatttcgatttcttgactttatatatcttgtggaaaggac

SEQ ID NO: 913 - DNA, 241 bp, synthetic construct
  misc_feature 1..241: note = Promoter
  source 1..241: mol_type = other DNA
gagggcctatttcccatgattccttcatatttgcatataagatgcaaggctgttagagagataattagaactaatttgactgtaaacacaaatatattagtacaaactatgtgacatagaaagtgataatttcttgggtagtttgcagttttaaaattatgttttaaaatggactatcatctgcttaccgtaactttaaagtatttcgatttcttgactttatatatcttgtggaaaggac

SEQ ID NO: 914 - DNA, 241 bp, synthetic construct
  misc_feature 1..241: note = Promoter
  source 1..241: mol_type = other DNA
gagggcctatttcccatgattccttcatatttgcatataagatgcaaggctgttagagagataattagaactaatttgactgtaaacacaaatatattagtacaaagtatgtgacatagaaagtgataatttcttgggtagtttgcagttttaaaattatgttttaaaatggactatcatctgcttaccgtaactttaaagtatttcgatttcttgactttatatatcttgtggaaaggac

SEQ ID NO: 915 - DNA, 241 bp, synthetic construct
  misc_feature 1..241: note = Promoter
  source 1..241: mol_type = other DNA
gagggcctatttcccatgattccttcatatttgcatataagatgcaaggctgttagagagataattagaactaatttgactgtaaacacaaatatattagtacaaattatgtgacatagaaagtgataatttcttgggtagtttgcagttttaaaattatgttttaaaatggactatcatctgcttaccgtaactttaaagtatttcgatttcttgactttatatatcttgtggaaaggac

SEQ ID NO: 916 - DNA, 241 bp, synthetic construct
  misc_feature 1..241: note = Promoter
  source 1..241: mol_type = other DNA
gagggcctatttcccatgattccttcatatttgcatataagatgcaaggctgttagagagataattagaactaatttgactgtaaacacaaatatattagtacaaaaaatgtgacatagaaagtgataatttcttgggtagtttgcagttttaaaattatgttttaaaatggactatcatctgcttaccgtaactttaaagtatttcgatttcttgactttatatatcttgtggaaaggac

SEQ ID NO: 917 - DNA, 241 bp, synthetic construct
  misc_feature 1..241: note = Promoter
  source 1..241: mol_type = other DNA
gagggcctatttcccatgattccttcatatttgcatataagatgcaaggctgttagagagataattagaactaatttgactgtaaacacaaatatattagtacaaaacatgtgacatagaaagtgataatttcttgggtagtttgcagttttaaaattatgttttaaaatggactatcatctgcttaccgtaactttaaagtatttcgatttcttgactttatatatcttgtggaaaggac

SEQ ID NO: 918 - DNA, 241 bp, synthetic construct
  misc_feature 1..241: note = Promoter
  source 1..241: mol_type = other DNA
gagggcctatttcccatgattccttcatatttgcatataagatgcaaggctgttagagagataattagaactaatttgactgtaaacacaaatatattagtacaaaagatgtgacatagaaagtgataatttcttgggtagtttgcagttttaaaattatgttttaaaatggactatcatctgcttaccgtaactttaaagtatttcgatttcttgactttatatatcttgtggaaaggac

SEQ ID NO: 919 - DNA, 241 bp, synthetic construct
  misc_feature 1..241: note = Promoter
  source 1..241: mol_type = other DNA
gagggcctatttcccatgattccttcatatttgcatataagatgcaaggctgttagagagataattagaactaatttgactgtaaacacaaatatattagtacaaaatctgtgacatagaaagtgataatttcttgggtagtttgcagttttaaaattatgttttaaaatggactatcatctgcttaccgtaactttaaagtatttcgatttcttgactttatatatcttgtggaaaggac

SEQ ID NO: 920 - DNA, 241 bp, synthetic construct
  misc_feature 1..241: note = Promoter
  source 1..241: mol_type = other DNA
gagggcctatttcccatgattccttcatatttgcatataagatgcaaggctgttagagagataattagaactaatttgactgtaaacacaaatatattagtacaaaatgtgtgacatagaaagtgataatttcttgggtagtttgcagttttaaaattatgttttaaaatggactatcatctgcttaccgtaactttaaagtatttcgatttcttgactttatatatcttgtggaaaggac

SEQ ID NO: 921 - DNA, 241 bp, synthetic construct
  misc_feature 1..241: note = Promoter
  source 1..241: mol_type = other DNA
gagggcctatttcccatgattccttcatatttgcatataagatgcaaggctgttagagagataattagaactaatttgactgtaaacacaaatatattagtacaaaatttgtgacatagaaagtgataatttcttgggtagtttgcagttttaaaattatgttttaaaatggactatcatctgcttaccgtaactttaaagtatttcgatttcttgactttatatatcttgtggaaaggac

SEQ ID NO: 922 - DNA, 241 bp, synthetic construct
  misc_feature 1..241: note = Promoter
  source 1..241: mol_type = other DNA
gagggcctatttcccatgattccttcatatttgcatataagatgcaaggctgttagagagataattagaactaatttgactgtaaacacaaatatattagtacaaaataagtgacatagaaagtgataatttcttgggtagtttgcagttttaaaattatgttttaaaatggactatcatctgcttaccgtaactttaaagtatttcgatttcttgactttatatatcttgtggaaaggac

SEQ ID NO: 923 - DNA, 241 bp, synthetic construct
  misc_feature 1..241: note = Promoter
  source 1..241: mol_type = other DNA
gagggcctatttcccatgattccttcatatttgcatataagatgcaaggctgttagagagataattagaactaatttgactgtaaacacaaatatattagtacaaaatacgtgacatagaaagtgataatttcttgggtagtttgcagttttaaaattatgttttaaaatggactatcatctgcttaccgtaactttaaagtatttcgatttcttgactttatatatcttgtggaaaggac

SEQ ID NO: 924 - DNA, 241 bp, synthetic construct
  misc_feature 1..241: note = Promoter
  source 1..241: mol_type = other DNA
gagggcctatttcccatgattccttcatatttgcatataagatgcaaggctgttagagagataattagaactaatttgactgtaaacacaaatatattagtacaaaataggtgacatagaaagtgataatttcttgggtagtttgcagttttaaaattatgttttaaaatggactatcatctgcttaccgtaactttaaagtatttcgatttcttgactttatatatcttgtggaaaggac

SEQ ID NO: 925 - DNA, 241 bp, synthetic construct
  misc_feature 1..241: note = Promoter
  source 1..241: mol_type = other DNA
gagggcctatttcccatgattccttcatatttgcatataagatgcaaggctgttagagagataattagaactaatttgactgtaaacacaaatatattagtacaaaatatatgacatagaaagtgataatttcttgggtagtttgcagttttaaaattatgttttaaaatggactatcatctgcttaccgtaactttaaagtatttcgatttcttgactttatatatcttgtggaaaggac

SEQ ID NO: 926 - DNA, 241 bp, synthetic construct
  misc_feature 1..241: note = Promoter
  source 1..241: mol_type = other DNA
gagggcctatttcccatgattccttcatatttgcatataagatgcaaggctgttagagagataattagaactaatttgactgtaaacacaaatatattagtacaaaatatctgacatagaaagtgataatttcttgggtagtttgcagttttaaaattatgttttaaaatggactatcatctgcttaccgtaactttaaagtatttcgatttcttgactttatatatcttgtggaaaggac

SEQ ID NO: 927 - DNA, 241 bp, synthetic construct
  misc_feature 1..241: note = Promoter
  source 1..241: mol_type = other DNA
gagggcctatttcccatgattccttcatatttgcatataagatgcaaggctgttagagagataattagaactaatttgactgtaaacacaaatatattagtacaaaatatttgacatagaaagtgataatttcttgggtagtttgcagttttaaaattatgttttaaaatggactatcatctgcttaccgtaactttaaagtatttcgatttcttgactttatatatcttgtggaaaggac

SEQ ID NO: 928 - DNA, 241 bp, synthetic construct
  misc_feature 1..241: note = Promoter
  source 1..241: mol_type = other DNA
gagggcctatttcccatgattccttcatatttgcatataagatgcaaggctgttagagagataattagaactaatttgactgtaaacacaaatatattagtacaaaatatgagacatagaaagtgataatttcttgggtagtttgcagttttaaaattatgttttaaaatggactatcatctgcttaccgtaactttaaagtatttcgatttcttgactttatatatcttgtggaaaggac

SEQ ID NO: 929 - DNA, 241 bp, synthetic construct
  misc_feature 1..241: note = Promoter
  source 1..241: mol_type = other DNA
gagggcctatttcccatgattccttcatatttgcatataagatgcaaggctgttagagagataattagaactaatttgactgtaaacacaaatatattagtacaaaatatgcgacatagaaagtgataatttcttgggtagtttgcagttttaaaattatgttttaaaatggactatcatctgcttaccgtaactttaaagtatttcgatttcttgactttatatatcttgtggaaaggac

SEQ ID NO: 930 - DNA, 241 bp, synthetic construct
  misc_feature 1..241: note = Promoter
  source 1..241: mol_type = other DNA
gagggcctatttcccatgattccttcatatttgcatataagatgcaaggctgttagagagataattagaactaatttgactgtaaacacaaatatattagtacaaaatatgggacatagaaagtgataatttcttgggtagtttgcagttttaaaattatgttttaaaatggactatcatctgcttaccgtaactttaaagtatttcgatttcttgactttatatatcttgtggaaaggac

SEQ ID NO: 931 - DNA, 241 bp, synthetic construct
  misc_feature 1..241: note = Promoter
  source 1..241: mol_type = other DNA
gagggcctatttcccatgattccttcatatttgcatataagatgcaaggctgttagagagataattagaactaatttgactgtaaacacaaatatattagtacaaaatatgtaacatagaaagtgataatttcttgggtagtttgcagttttaaaattatgttttaaaatggactatcatctgcttaccgtaactttaaagtatttcgatttcttgactttatatatcttgtggaaaggac

SEQ ID NO: 932 - DNA, 241 bp, synthetic construct
  misc_feature 1..241: note = Promoter
  source 1..241: mol_type = other DNA
gagggcctatttcccatgattccttcatatttgcatataagatgcaaggctgttagagagataattagaactaatttgactgtaaacacaaatatattagtacaaaatatgtcacatagaaagtgataatttcttgggtagtttgcagttttaaaattatgttttaaaatggactatcatctgcttaccgtaactttaaagtatttcgatttcttgactttatatatcttgtggaaaggac

SEQ ID NO: 933 - DNA, 241 bp, synthetic construct
  misc_feature 1..241: note = Promoter
  source 1..241: mol_type = other DNA
gagggcctatttcccatgattccttcatatttgcatataagatgcaaggctgttagagagataattagaactaatttgactgtaaacacaaatatattagtacaaaatatgttacatagaaagtgataatttcttgggtagtttgcagttttaaaattatgttttaaaatggactatcatctgcttaccgtaactttaaagtatttcgatttcttgactttatatatcttgtggaaaggac

SEQ ID NO: 934 - DNA, 241 bp, synthetic construct
  misc_feature 1..241: note = Promoter
  source 1..241: mol_type = other DNA
gagggcctatttcccatgattccttcatatttgcatataagatgcaaggctgttagagagataattagaactaatttgactgtaaacacaaatatattagtacaaaatatgtgccatagaaagtgataatttcttgggtagtttgcagttttaaaattatgttttaaaatggactatcatctgcttaccgtaactttaaagtatttcgatttcttgactttatatatcttgtggaaaggac

SEQ ID NO: 935 - DNA, 241 bp, synthetic construct
  misc_feature 1..241: note = Promoter
  source 1..241: mol_type = other DNA
gagggcctatttcccatgattccttcatatttgcatataagatgcaaggctgttagagagataattagaactaatttgactgtaaacacaaatatattagtacaaaatatgtggcatagaaagtgataatttcttgggtagtttgcagttttaaaattatgttttaaaatggactatcatctgcttaccgtaactttaaagtatttcgatttcttgactttatatatcttgtggaaaggac

SEQ ID NO: 936 - DNA, 241 bp, synthetic construct
  misc_feature 1..241: note = Promoter
  source 1..241: mol_type = other DNA
gagggcctatttcccatgattccttcatatttgcatataagatgcaaggctgttagagagataattagaactaatttgactgtaaacacaaatatattagtacaaaatatgtgtcatagaaagtgataatttcttgggtagtttgcagttttaaaattatgttttaaaatggactatcatctgcttaccgtaactttaaagtatttcgatttcttgactttatatatcttgtggaaaggac

SEQ ID NO: 937 - DNA, 241 bp, synthetic construct
  misc_feature 1..241: note = Promoter
  source 1..241: mol_type = other DNA
gagggcctatttcccatgattccttcatatttgcatataagatgcaaggctgttagagagataattagaactaatttgactgtaaacacaaatatattagtacaaaatatgtgaaatagaaagtgataatttcttgggtagtttgcagttttaaaattatgttttaaaatggactatcatctgcttaccgtaactttaaagtatttcgatttcttgactttatatatcttgtggaaaggac

SEQ ID NO: 938 - DNA, 241 bp, synthetic construct
  misc_feature 1..241: note = Promoter
  source 1..241: mol_type = other DNA
gagggcctatttcccatgattccttcatatttgcatataagatgcaaggctgttagagagataattagaactaatttgactgtaaacacaaatatattagtacaaaatatgtgagatagaaagtgataatttcttgggtagtttgcagttttaaaattatgttttaaaatggactatcatctgcttaccgtaactttaaagtatttcgatttcttgactttatatatcttgtggaaaggac

SEQ ID NO: 939 - DNA, 241 bp, synthetic construct
  misc_feature 1..241: note = Promoter
  source 1..241: mol_type = other DNA
gagggcctatttcccatgattccttcatatttgcatataagatgcaaggctgttagagagataattagaactaatttgactgtaaacacaaatatattagtacaaaatatgtgatatagaaagtgataatttcttgggtagtttgcagttttaaaattatgttttaaaatggactatcatctgcttaccgtaactttaaagtatttcgatttcttgactttatatatcttgtggaaaggac

SEQ ID NO: 940 - DNA, 241 bp, synthetic construct
  misc_feature 1..241: note = Promoter
  source 1..241: mol_type = other DNA
gagggcctatttcccatgattccttcatatttgcatataagatgcaaggctgttagagagataattagaactaatttgactgtaaacacaaatatattagtacaaaatatgtgacctagaaagtgataatttcttgggtagtttgcagttttaaaattatgttttaaaatggactatcatctgcttaccgtaactttaaagtatttcgatttcttgactttatatatcttgtggaaaggac

SEQ ID NO: 941 - DNA, 241 bp, synthetic construct
  misc_feature 1..241: note = Promoter
  source 1..241: mol_type = other DNA
gagggcctatttcccatgattccttcatatttgcatataagatgcaaggctgttagagagataattagaactaatttgactgtaaacacaaatatattagtacaaaatatgtgacgtagaaagtgataatttcttgggtagtttgcagttttaaaattatgttttaaaatggactatcatctgcttaccgtaactttaaagtatttcgatttcttgactttatatatcttgtggaaaggac

SEQ ID NO: 942 - DNA, 241 bp, synthetic construct
  misc_feature 1..241: note = Promoter
  source 1..241: mol_type = other DNA
gagggcctatttcccatgattccttcatatttgcatataagatgcaaggctgttagagagataattagaactaatttgactgtaaacacaaatatattagtacaaaatatgtgacttagaaagtgataatttcttgggtagtttgcagttttaaaattatgttttaaaatggactatcatctgcttaccgtaactttaaagtatttcgatttcttgactttatatatcttgtggaaaggac

SEQ ID NO: 943 - DNA, 241 bp, synthetic construct
  misc_feature 1..241: note = Promoter
  source 1..241: mol_type = other DNA
gagggcctatttcccatgattccttcatatttgcatataagatgcaaggctgttagagagataattagaactaatttgactgtaaacacaaatatattagtacaaaatatgtgacaaagaaagtgataatttcttgggtagtttgcagttttaaaattatgttttaaaatggactatcatctgcttaccgtaactttaaagtatttcgatttcttgactttatatatcttgtggaaaggac

SEQ ID NO: 944 - DNA, 241 bp, synthetic construct
  misc_feature 1..241: note = Promoter
  source 1..241: mol_type = other DNA
gagggcctatttcccatgattccttcatatttgcatataagatgcaaggctgttagagagataattagaactaatttgactgtaaacacaaatatattagtacaaaatatgtgacacagaaagtgataatttcttgggtagtttgcagttttaaaattatgttttaaaatggactatcatctgcttaccgtaactttaaagtatttcgatttcttgactttatatatcttgtggaaaggac

SEQ ID NO: 945 - DNA, 241 bp, synthetic construct
  misc_feature 1..241: note = Promoter
  source 1..241: mol_type = other DNA
gagggcctatttcccatgattccttcatatttgcatataagatgcaaggctgttagagagataattagaactaatttgactgtaaacacaaatatattagtacaaaatatgtgacagagaaagtgataatttcttgggtagtttgcagttttaaaattatgttttaaaatggactatcatctgcttaccgtaactttaaagtatttcgatttcttgactttatatatcttgtggaaaggac

SEQ ID NO: 946 - DNA, 241 bp, synthetic construct
  misc_feature 1..241: note = Promoter
  source 1..241: mol_type = other DNA
gagggcctatttcccatgattccttcatatttgcatataagatgcaaggctgttagagagataattagaactaatttgactgtaaacacaaatatattagtacaaaatatgtgacatcgaaagtgataatttcttgggtagtttgcagttttaaaattatgttttaaaatggactatcatctgcttaccgtaactttaaagtatttcgatttcttgactttatatatcttgtggaaaggac

SEQ ID NO: 947 - DNA, 241 bp, synthetic construct
  misc_feature 1..241: note = Promoter
  source 1..241: mol_type = other DNA
gagggcctatttcccatgattccttcatatttgcatataagatgcaaggctgttagagagataattagaactaatttgactgtaaacacaaatatattagtacaaaatatgtgacatggaaagtgataatttcttgggtagtttgcagttttaaaattatgttttaaaatggactatcatctgcttaccgtaactttaaagtatttcgatttcttgactttatatatcttgtggaaaggac

SEQ ID NO: 948 - DNA, 241 bp, synthetic construct
  misc_feature 1..241: note = Promoter
  source 1..241: mol_type = other DNA
gagggcctatttcccatgattccttcatatttgcatataagatgcaaggctgttagagagataattagaactaatttgactgtaaacacaaatatattagtacaaaatatgtgacattgaaagtgataatttcttgggtagtttgcagttttaaaattatgttttaaaatggactatcatctgcttaccgtaactttaaagtatttcgatttcttgactttatatatcttgtggaaaggac

SEQ ID NO: 949 - DNA, 241 bp, synthetic construct
  misc_feature 1..241: note = Promoter
  source 1..241: mol_type = other DNA
gagggcctatttcccatgattccttcatatttgcatataagatgcaaggctgttagagagataattagaactaatttgactgtaaacacaaatatattagtacaaaatatgtgacataaaaagtgataatttcttgggtagtttgcagttttaaaattatgttttaaaatggactatcatctgcttaccgtaactttaaagtatttcgatttcttgactttatatatcttgtggaaaggac

SEQ ID NO: 950 - DNA, 241 bp, synthetic construct
  misc_feature 1..241: note = Promoter
  source 1..241: mol_type = other DNA
gagggcctatttcccatgattccttcatatttgcatataagatgcaaggctgttagagagataattagaactaatttgactgtaaacacaaatatattagtacaaaatatgtgacatacaaagtgataatttcttgggtagtttgcagttttaaaattatgttttaaaatggactatcatctgcttaccgtaactttaaagtatttcgatttcttgactttatatatcttgtggaaaggac

SEQ ID NO: 951 - DNA, 241 bp, synthetic construct
  misc_feature 1..241: note = Promoter
  source 1..241: mol_type = other DNA
gagggcctatttcccatgattccttcatatttgcatataagatgcaaggctgttagagagataattagaactaatttgactgtaaacacaaatatattagtacaaaatatgtgacatataaagtgataatttcttgggtagtttgcagttttaaaattatgttttaaaatggactatcatctgcttaccgtaactttaaagtatttcgatttcttgactttatatatcttgtggaaaggac

SEQ ID NO: 952 - DNA, 241 bp, synthetic construct
  misc_feature 1..241: note = Promoter
  source 1..241: mol_type = other DNA
gagggcctatttcccatgattccttcatatttgcatataagatgcaaggctgttagagagataattagaactaatttgactgtaaacacaaatatattagtacaaaatatgtgacatagcaagtgataatttcttgggtagtttgcagttttaaaattatgttttaaaatggactatcatctgcttaccgtaactttaaagtatttcgatttcttgactttatatatcttgtggaaaggac

SEQ ID NO: 953 - DNA, 241 bp, synthetic construct
  misc_feature 1..241: note = Promoter
  source 1..241: mol_type = other DNA
gagggcctatttcccatgattccttcatatttgcatataagatgcaaggctgttagagagataattagaactaatttgactgtaaacacaaatatattagtacaaaatatgtgacataggaagtgataatttcttgggtagtttgcagttttaaaattatgttttaaaatggactatcatctgcttaccgtaactttaaagtatttcgatttcttgactttatatatcttgtggaaaggac

SEQ ID NO: 954 - DNA, 241 bp, synthetic construct
  misc_feature 1..241: note = Promoter
  source 1..241: mol_type = other DNA
gagggcctatttcccatgattccttcatatttgcatataagatgcaaggctgttagagagataattagaactaatttgactgtaaacacaaatatattagtacaaaatatgtgacatagtaagtgataatttcttgggtagtttgcagttttaaaattatgttttaaaatggactatcatctgcttaccgtaactttaaagtatttcgatttcttgactttatatatcttgtggaaaggac

SEQ ID NO: 955 - DNA, 241 bp, synthetic construct
  misc_feature 1..241: note = Promoter
  source 1..241: mol_type = other DNA
gagggcctatttcccatgattccttcatatttgcatataagatgcaaggctgttagagagataattagaactaatttgactgtaaacacaaatatattagtacaaaatatgtgacatagacagtgataatttcttgggtagtttgcagttttaaaattatgttttaaaatggactatcatctgcttaccgtaactttaaagtatttcgatttcttgactttatatatcttgtggaaaggac

SEQ ID NO: 956 - DNA, 241 bp, synthetic construct
  misc_feature 1..241: note = Promoter
  source 1..241: mol_type = other DNA
gagggcctatttcccatgattccttcatatttgcatataagatgcaaggctgttagagagataattagaactaatttgactgtaaacacaaatatattagtacaaaatatgtgacatagagagtgataatttcttgggtagtttgcagttttaaaattatgttttaaaatggactatcatctgcttaccgtaactttaaagtatttcgatttcttgactttatatatcttgtggaaaggac

SEQ ID NO: 957 - DNA, 241 bp, synthetic construct
  misc_feature 1..241: note = Promoter
  source 1..241: mol_type = other DNA
gagggcctatttcccatgattccttcatatttgcatataagatgcaaggctgttagagagataattagaactaatttgactgtaaacacaaatatattagtacaaaatatgtgacatagatagtgataatttcttgggtagtttgcagttttaaaattatgttttaaaatggactatcatctgcttaccgtaactttaaagtatttcgatttcttgactttatatatcttgtggaaaggac

SEQ ID NO: 958 - DNA, 241 bp, synthetic construct
  misc_feature 1..241: note = Promoter
  source 1..241: mol_type = other DNA
gagggcctatttcccatgattccttcatatttgcatataagatgcaaggctgttagagagataattagaactaatttgactgtaaacacaaatatattagtacaaaatatgtgacatagaacgtgataatttcttgggtagtttgcagttttaaaattatgttttaaaatggactatcatctgcttaccgtaactttaaagtatttcgatttcttgactttatatatcttgtggaaaggac

SEQ ID NO: 959 - DNA, 241 bp, synthetic construct
  misc_feature 1..241: note = Promoter
  source 1..241: mol_type = other DNA
gagggcctatttcccatgattccttcatatttgcatataagatgcaaggctgttagagagataattagaactaatttgactgtaaacacaaatatattagtacaaaatatgtgacatagaaggtgataatttcttgggtagtttgcagttttaaaattatgttttaaaatggactatcatctgcttaccgtaactttaaagtatttcgatttcttgactttatatatcttgtggaaaggac

SEQ ID NO: 960 - DNA, 241 bp, synthetic construct
  misc_feature 1..241: note = Promoter
  source 1..241: mol_type = other DNA
gagggcctatttcccatgattccttcatatttgcatataagatgcaaggctgttagagagataattagaactaatttgactgtaaacacaaatatattagtacaaaatatgtgacatagaatgtgataatttcttgggtagtttgcagttttaaaattatgttttaaaatggactatcatctgcttaccgtaactttaaagtatttcgatttcttgactttatatatcttgtggaaaggac

SEQ ID NO: 961 - DNA, 241 bp, synthetic construct
  misc_feature 1..241: note = Promoter
  source 1..241: mol_type = other DNA
gagggcctatttcccatgattccttcatatttgcatataagatgcaaggctgttagagagataattagaactaatttgactgtaaacacaaatatattagtacaaaatatgtgacatagaaaatgataatttcttgggtagtttgcagttttaaaattatgttttaaaatggactatcatctgcttaccgtaactttaaagtatttcgatttcttgactttatatatcttgtggaaaggac

SEQ ID NO: 962 - DNA, 241 bp, synthetic construct
  misc_feature 1..241: note = Promoter
  source 1..241: mol_type = other DNA
gagggcctatttcccatgattccttcatatttgcatataagatgcaaggctgttagagagataattagaactaatttgactgtaaacacaaatatattagtacaaaatatgtgacatagaaactgataatttcttgggtagtttgcagttttaaaattatgttttaaaatggactatcatctgcttaccgtaactttaaagtatttcgatttcttgactttatatatcttgtggaaaggac

SEQ ID NO: 963 - DNA, 241 bp, synthetic construct
  misc_feature 1..241: note = Promoter
  source 1..241: mol_type = other DNA
gagggcctatttcccatgattccttcatatttgcatataagatgcaaggctgttagagagataattagaactaatttgactgtaaacacaaatatattagtacaaaatatgtgacatagaaattgataatttcttgggtagtttgcagttttaaaattatgttttaaaatggactatcatctgcttaccgtaactttaaagtatttcgatttcttgactttatatatcttgtggaaaggac

SEQ ID NO: 964 - DNA, 241 bp, synthetic construct
  misc_feature 1..241: note = Promoter
  source 1..241: mol_type = other DNA
gagggcctatttcccatgattccttcatatttgcatataagatgcaaggctgttagagagataattagaactaatttgactgtaaacacaaatatattagtacaaaatatgtgacatagaaagagataatttcttgggtagtttgcagttttaaaattatgttttaaaatggactatcatctgcttaccgtaactttaaagtatttcgatttcttgactttatatatcttgtggaaaggac

SEQ ID NO: 965 - DNA, 241 bp, synthetic construct
  misc_feature 1..241: note = Promoter
  source 1..241: mol_type = other DNA
gagggcctatttcccatgattccttcatatttgcatataagatgcaaggctgttagagagataattagaactaatttgactgtaaacacaaatatattagtacaaaatatgtgacatagaaagcgataatttcttgggtagtttgcagttttaaaattatgttttaaaatggactatcatctgcttaccgtaactttaaagtatttcgatttcttgactttatatatcttgtggaaaggac

SEQ ID NO: 966 - DNA, 241 bp, synthetic construct
  misc_feature 1..241: note = Promoter
  source 1..241: mol_type = other DNA
gagggcctatttcccatgattccttcatatttgcatataagatgcaaggctgttagagagataattagaactaatttgactgtaaacacaaatatattagtacaaaatatgtgacatagaaagggataatttcttgggtagtttgcagttttaaaattatgttttaaaatggactatcatctgcttaccgtaactttaaagtatttcgatttcttgactttatatatcttgtggaaaggac

SEQ ID NO: 967 - DNA, 241 bp, synthetic construct
  misc_feature 1..241: note = Promoter
  source 1..241: mol_type = other DNA
gagggcctatttcccatgattccttcatatttgcatataagatgcaaggctgttagagagataattagaactaatttgactgtaaacacaaatatattagtacaaaatatgtgacatagaaagtaataatttcttgggtagtttgcagttttaaaattatgttttaaaatggactatcatctgcttaccgtaactttaaagtatttcgatttcttgactttatatatcttgtggaaaggac

SEQ ID NO: 968 - DNA, 241 bp, synthetic construct
  misc_feature 1..241: note = Promoter
  source 1..241: mol_type = other DNA
gagggcctatttcccatgattccttcatatttgcatataagatgcaaggctgttagagagataattagaactaatttgactgtaaacacaaatatattagtacaaaatatgtgacatagaaagtcataatttcttgggtagtttgcagttttaaaattatgttttaaaatggactatcatctgcttaccgtaactttaaagtatttcgatttcttgactttatatatcttgtggaaaggac

SEQ ID NO: 969 - DNA, 241 bp, synthetic construct
  misc_feature 1..241: note = Promoter
  source 1..241: mol_type = other DNA
gagggcctatttcccatgattccttcatatttgcatataagatgcaaggctgttagagagataattagaactaatttgactgtaaacacaaatatattagtacaaaatatgtgacatagaaagttataatttcttgggtagtttgcagttttaaaattatgttttaaaatggactatcatctgcttaccgtaactttaaagtatttcgatttcttgactttatatatcttgtggaaaggac

SEQ ID NO: 970 - DNA, 241 bp, synthetic construct
  misc_feature 1..241: note = Promoter
  source 1..241: mol_type = other DNA
gagggcctatttcccatgattccttcatatttgcatataagatgcaaggctgttagagagataattagaactaatttgactgtaaacacaaatatattagtacaaaatatgtgacatagaaagtgctaatttcttgggtagtttgcagttttaaaattatgttttaaaatggactatcatctgcttaccgtaactttaaagtatttcgatttcttgactttatatatcttgtggaaaggac

SEQ ID NO: 971 - DNA, 241 bp, synthetic construct
  misc_feature 1..241: note = Promoter
  source 1..241: mol_type = other DNA
gagggcctatttcccatgattccttcatatttgcatataagatgcaaggctgttagagagataattagaactaatttgactgtaaacacaaatatattagtacaaaatatgtgacatagaaagtggtaatttcttgggtagtttgcagttttaaaattatgttttaaaatggactatcatctgcttaccgtaactttaaagtatttcgatttcttgactttatatatcttgtggaaaggac

SEQ ID NO: 972 - DNA, 241 bp, synthetic construct
  misc_feature 1..241: note = Promoter
  source 1..241: mol_type = other DNA
gagggcctatttcccatgattccttcatatttgcatataagatgcaaggctgttagagagataattagaactaatttgactgtaaacacaaatatattagtacaaaatatgtgacatagaaagtgttaatttcttgggtagtttgcagttttaaaattatgttttaaaatggactatcatctgcttaccgtaactttaaagtatttcgatttcttgactttatatatcttgtggaaaggac

SEQ ID NO: 973 - DNA, 241 bp, synthetic construct
  misc_feature 1..241: note = Promoter
  source 1..241: mol_type = other DNA
gagggcctatttcccatgattccttcatatttgcatataagatgcaaggctgttagagagataattagaactaatttgactgtaaacacaaatatattagtacaaaatatgtgacatagaaagtgaaaatttcttgggtagtttgcagttttaaaattatgttttaaaatggactatcatctgcttaccgtaactttaaagtatttcgatttcttgactttatatatcttgtggaaaggac

SEQ ID NO: 974 - DNA, 241 bp, synthetic construct
  misc_feature 1..241: note = Promoter
  source 1..241: mol_type = other DNA
gagggcctatttcccatgattccttcatatttgcatataagatgcaaggctgttagagagataattagaactaatttgactgtaaacacaaatatattagtacaaaatatgtgacatagaaagtgacaatttcttgggtagtttgcagttttaaaattatgttttaaaatggactatcatctgcttaccgtaactttaaagtatttcgatttcttgactttatatatcttgtggaaaggac

SEQ ID NO: 975 - DNA, 241 bp, synthetic construct
  misc_feature 1..241: note = Promoter
  source 1..241: mol_type = other DNA
gagggcctatttcccatgattccttcatatttgcatataagatgcaaggctgttagagagataattagaactaatttgactgtaaacacaaatatattagtacaaaatatgtgacatagaaagtgagaatttcttgggtagtttgcagttttaaaattatgttttaaaatggactatcatctgcttaccgtaactttaaagtatttcgatttcttgactttatatatcttgtggaaaggac

SEQ ID NO: 976 - DNA, 241 bp, synthetic construct
  misc_feature 1..241: note = Promoter
  source 1..241: mol_type = other DNA
gagggcctatttcccatgattccttcatatttgcatataagatgcaaggctgttagagagataattagaactaatttgactgtaaacacaaatatattagtacaaaatatgtgacatagaaagtgatcatttcttgggtagtttgcagttttaaaattatgttttaaaatggactatcatctgcttaccgtaactttaaagtatttcgatttcttgactttatatatcttgtggaaaggac

SEQ ID NO: 977 - DNA, 241 bp, synthetic construct
  misc_feature 1..241: note = Promoter
  source 1..241: mol_type = other DNA
gagggcctatttcccatgattccttcatatttgcatataagatgcaaggctgttagagagataattagaactaatttgactgtaaacacaaatatattagtacaaaatatgtgacatagaaagtgatgatttcttgggtagtttgcagttttaaaattatgttttaaaatggactatcatctgcttaccgtaactttaaagtatttcgatttcttgactttatatatcttgtggaaaggac

SEQ ID NO: 978 - DNA, 241 bp, synthetic construct
  misc_feature 1..241: note = Promoter
  source 1..241: mol_type = other DNA
gagggcctatttcccatgattccttcatatttgcatataagatgcaaggctgttagagagataattagaactaatttgactgtaaacacaaatatattagtacaaaatatgtgacatagaaagtgattatttcttgggtagtttgcagttttaaaattatgttttaaaatggactatcatctgcttaccgtaactttaaagtatttcgatttcttgactttatatatcttgtggaaaggac

SEQ ID NO: 979 - DNA, 241 bp, synthetic construct
  misc_feature 1..241: note = Promoter
  source 1..241: mol_type = other DNA
gagggcctatttcccatgattccttcatatttgcatataagatgcaaggctgttagagagataattagaactaatttgactgtaaacacaaatatattagtacaaaatatgtgacatagaaagtgatactttcttgggtagtttgcagttttaaaattatgttttaaaatggactatcatctgcttaccgtaactttaaagtatttcgatttcttgactttatatatcttgtggaaaggac

SEQ ID NO: 980 - DNA, 241 bp, synthetic construct
  misc_feature 1..241: note = Promoter
  source 1..241: mol_type = other DNA
gagggcctatttcccatgattccttcatatttgcatataagatgcaaggctgttagagagataattagaactaatttgactgtaaacacaaatatattagtacaaaatatgtgacatagaaagtgatagtttcttgggtagtttgcagttttaaaattatgttttaaaatggactatcatctgcttaccgtaactttaaagtatttcgatttcttgactttatatatcttgtggaaaggac

SEQ ID NO: 981 - DNA, 241 bp, synthetic construct
  misc_feature 1..241: note = Promoter
  source 1..241: mol_type = other DNA
gagggcctatttcccatgattccttcatatttgcatataagatgcaaggctgttagagagataattagaactaatttgactgtaaacacaaatatattagtacaaaatatgtgacatagaaagtgatattttcttgggtagtttgcagttttaaaattatgttttaaaatggactatcatctgcttaccgtaactttaaagtatttcgatttcttgactttatatatcttgtggaaaggac

SEQ ID NO: 982 - DNA, 241 bp, synthetic construct
  misc_feature 1..241: note = Promoter
  source 1..241: mol_type = other DNA
gagggcctatttcccatgattccttcatatttgcatataagatgcaaggctgttagagagataattagaactaatttgactgtaaacacaaatatattagtacaaaatatgtgacatagaaagtgataaattcttgggtagtttgcagttttaaaattatgttttaaaatggactatcatctgcttaccgtaactttaaagtatttcgatttcttgactttatatatcttgtggaaaggac

SEQ ID NO: 983 - DNA, 241 bp, synthetic construct
  misc_feature 1..241: note = Promoter
  source 1..241: mol_type = other DNA
gagggcctatttcccatgattccttcatatttgcatataagatgcaaggctgttagagagataattagaactaatttgactgtaaacacaaatatattagtacaaaatatgtgacatagaaagtgataacttcttgggtagtttgcagttttaaaattatgttttaaaatggactatcatctgcttaccgtaactttaaagtatttcgatttcttgactttatatatcttgtggaaaggac

SEQ ID NO: 984 - DNA, 241 bp, synthetic construct
  misc_feature 1..241: note = Promoter
  source 1..241: mol_type = other DNA
gagggcctatttcccatgattccttcatatttgcatataagatgcaaggctgttagagagataattagaactaatttgactgtaaacacaaatatattagtacaaaatatgtgacatagaaagtgataagttcttgggtagtttgcagttttaaaattatgttttaaaatggactatcatctgcttaccgtaactttaaagtatttcgatttcttgactttatatatcttgtggaaaggac

SEQ ID NO: 985 - DNA, 241 bp, synthetic construct
  misc_feature 1..241: note = Promoter
  source 1..241: mol_type = other DNA
gagggcctatttcccatgattccttcatatttgcatataagatgcaaggctgttagagagataattagaactaatttgactgtaaacacaaatatattagtacaaaatatgtgacatagaaagtgataatatcttgggtagtttgcagttttaaaattatgttttaaaatggactatcatctgcttaccgtaactttaaagtatttcgatttcttgactttatatatcttgtggaaaggac

SEQ ID NO: 986 - DNA, 241 bp, synthetic construct
  misc_feature 1..241: note = Promoter
  source 1..241: mol_type = other DNA
gagggcctatttcccatgattccttcatatttgcatataagatgcaaggctgttagagagataattagaactaatttgactgtaaacacaaatatattagtacaaaatatgtgacatagaaagtgataatctcttgggtagtttgcagttttaaaattatgttttaaaatggactatcatctgcttaccgtaactttaaagtatttcgatttcttgactttatatatcttgtggaaaggac

SEQ ID NO: 987 - DNA, 241 bp, synthetic construct
  misc_feature 1..241: note = Promoter
  source 1..241: mol_type = other DNA
gagggcctatttcccatgattccttcatatttgcatataagatgcaaggctgttagagagataattagaactaatttgactgtaaacacaaatatattagtacaaaatatgtgacatagaaagtgataatgtcttgggtagtttgcagttttaaaattatgttttaaaatggactatcatctgcttaccgtaactttaaagtatttcgatttcttgactttatatatcttgtggaaaggac

SEQ ID NO: 988 - DNA, 241 bp, synthetic construct
  misc_feature 1..241: note = Promoter
  source 1..241: mol_type = other DNA
gagggcctatttcccatgattccttcatatttgcatataagatgcaaggctgttagagagataattagaactaatttgactgtaaacacaaatatattagtacaaaatatgtgacatagaaagtgataattacttgggtagtttgcagttttaaaattatgttttaaaatggactatcatctgcttaccgtaactttaaagtatttcgatttcttgactttatatatcttgtggaaaggac

SEQ ID NO: 989 - DNA, 241 bp, synthetic construct
  misc_feature 1..241: note = Promoter
  source 1..241: mol_type = other DNA
gagggcctatttcccatgattccttcatatttgcatataagatgcaaggctgttagagagataattagaactaatttgactgtaaacacaaatatattagtacaaaatatgtgacatagaaagtgataattccttgggtagtttgcagttttaaaattatgttttaaaatggactatcatctgcttaccgtaactttaaagtatttcgatttcttgactttatatatcttgtggaaaggac

SEQ ID NO: 990 - DNA, 241 bp, synthetic construct
  misc_feature 1..241: note = Promoter
  source 1..241: mol_type = other DNA
gagggcctatttcccatgattccttcatatttgcatataagatgcaaggctgttagagagataattagaactaatttgactgtaaacacaaatatattagtacaaaatatgtgacatagaaagtgataattgcttgggtagtttgcagttttaaaattatgttttaaaatggactatcatctgcttaccgtaactttaaagtatttcgatttcttgactttatatatcttgtggaaaggac

SEQ ID NO: 991 - DNA, 241 bp, synthetic construct
  misc_feature 1..241: note = Promoter
  source 1..241: mol_type = other DNA
gagggcctatttcccatgattccttcatatttgcatataagatgcaaggctgttagagagataattagaactaatttgactgtaaacacaaatatattagtacaaaatatgtgacatagaaagtgataatttattgggtagtttgcagttttaaaattatgttttaaaatggactatcatctgcttaccgtaactttaaagtatttcgatttcttgactttatatatcttgtggaaaggac

SEQ ID NO: 992 - DNA, 241 bp, synthetic construct
  misc_feature 1..241: note = Promoter
  source 1..241: mol_type = other DNA
gagggcctatttcccatgattccttcatatttgcatataagatgcaaggctgttagagagataattagaactaatttgactgtaaacacaaatatattagtacaaaatatgtgacatagaaagtgataatttgttgggtagtttgcagttttaaaattatgttttaaaatggactatcatctgcttaccgtaactttaaagtatttcgatttcttgactttatatatcttgtggaaaggac

SEQ ID NO: 993 - DNA, 241 bp, synthetic construct
  misc_feature 1..241: note = Promoter
  source 1..241: mol_type = other DNA
gagggcctatttcccatgattccttcatatttgcatataagatgcaaggctgttagagagataattagaactaatttgactgtaaacacaaatatattagtacaaaatatgtgacatagaaagtgataattttttgggtagtttgcagttttaaaattatgttttaaaatggactatcatctgcttaccgtaactttaaagtatttcgatttcttgactttatatatcttgtggaaaggac

SEQ ID NO: 994 - DNA, 241 bp, synthetic construct
  misc_feature 1..241: note = Promoter
  source 1..241: mol_type = other DNA
gagggcctatttcccatgattccttcatatttgcatataagatgcaaggctgttagagagataattagaactaatttgactgtaaacacaaatatattagtacaaaatatgtgacatagaaagtgataatttcatgggtagtttgcagttttaaaattatgttttaaaatggactatcatctgcttaccgtaactttaaagtatttcgatttcttgactttatatatcttgtggaaaggac

SEQ ID NO: 995 - DNA, 241 bp, synthetic construct
  misc_feature 1..241: note = Promoter
  source 1..241: mol_type = other DNA
gagggcctatttcccatgattccttcatatttgcatataagatgcaaggctgttagagagataattagaactaatttgactgtaaacacaaatatattagtacaaaatatgtgacatagaaagtgataatttcctgggtagtttgcagttttaaaattatgttttaaaatggactatcatctgcttaccgtaactttaaagtatttcgatttcttgactttatatatcttgtggaaaggac

SEQ ID NO: 996 - DNA, 241 bp, synthetic construct
  misc_feature 1..241: note = Promoter
  source 1..241: mol_type = other DNA
gagggcctatttcccatgattccttcatatttgcatataagatgcaaggctgttagagagataattagaactaatttgactgtaaacacaaatatattagtacaaaatatgtgacatagaaagtgataatttcgtgggtagtttgcagttttaaaattatgttttaaaatggactatcatctgcttaccgtaactttaaagtatttcgatttcttgactttatatatcttgtggaaaggac

SEQ ID NO: 997 - DNA, 241 bp, synthetic construct
  misc_feature 1..241: note = Promoter
  source 1..241: mol_type = other DNA
gagggcctatttcccatgattccttcatatttgcatataagatgcaaggctgttagagagataattagaactaatttgactgtaaacacaaatatattagtacaaaatatgtgacatagaaagtgataatttctagggtagtttgcagttttaaaattatgttttaaaatggactatcatctgcttaccgtaactttaaagtatttcgatttcttgactttatatatcttgtggaaaggac

SEQ ID NO: 998 - DNA, 241 bp, synthetic construct
  misc_feature 1..241: note = Promoter
  source 1..241: mol_type = other DNA
gagggcctatttcccatgattccttcatatttgcatataagatgcaaggctgttagagagataattagaactaatttgactgtaaacacaaatatattagtacaaaatatgtgacatagaaagtgataatttctcgggtagtttgcagttttaaaattatgttttaaaatggactatcatctgcttaccgtaactttaaagtatttcgatttcttgactttatatatcttgtggaaaggac

SEQ ID NO: 999 - DNA, 241 bp, synthetic construct
  misc_feature 1..241: note = Promoter
  source 1..241: mol_type = other DNA
gagggcctatttcccatgattccttcatatttgcatataagatgcaaggctgttagagagataattagaactaatttgactgtaaacacaaatatattagtacaaaatatgtgacatagaaagtgataatttctggggtagtttgcagttttaaaattatgttttaaaatggactatcatctgcttaccgtaactttaaagtatttcgatttcttgactttatatatcttgtggaaaggac

SEQ ID NO: 1000 - DNA, 241 bp, synthetic construct
  misc_feature 1..241: note = Promoter
  source 1..241: mol_type = other DNA
gagggcctatttcccatgattccttcatatttgcatataagatgcaaggctgttagagagataattagaactaatttgactgtaaacacaaatatattagtacaaaatatgtgacatagaaagtgataatttcttaggtagtttgcagttttaaaattatgttttaaaatggactatcatctgcttaccgtaactttaaagtatttcgatttcttgactttatatatcttgtggaaaggac

SEQ ID NO: 1001 - DNA, 241 bp, synthetic construct
  misc_feature 1..241: note = Promoter
  source 1..241: mol_type = other DNA
gagggcctatttcccatgattccttcatatttgcatataagatgcaaggctgttagagagataattagaactaatttgactgtaaacacaaatatattagtacaaaatatgtgacatagaaagtgataatttcttcggtagtttgcagttttaaaattatgttttaaaatggactatcatctgcttaccgtaactttaaagtatttcgatttcttgactttatatatcttgtggaaaggac

SEQ ID NO: 1002 - DNA, 241 bp, synthetic construct
  misc_feature 1..241: note = Promoter
  source 1..241: mol_type = other DNA
gagggcctatttcccatgattccttcatatttgcatataagatgcaaggctgttagagagataattagaactaatttgactgtaaacacaaatatattagtacaaaatatgtgacatagaaagtgataatttctttggtagtttgcagttttaaaattatgttttaaaatggactatcatctgcttaccgtaactttaaagtatttcgatttcttgactttatatatcttgtggaaaggac

SEQ ID NO: 1003 - DNA, 241 bp, synthetic construct
  misc_feature 1..241: note = Promoter
  source 1..241: mol_type = other DNA
gagggcctatttcccatgattccttcatatttgcatataagatgcaaggctgttagagagataattagaactaatttgactgtaaacacaaatatattagtacaaaatatgtgacatagaaagtgataatttcttgagtagtttgcagttttaaaattatgttttaaaatggactatcatctgcttaccgtaactttaaagtatttcgatttcttgactttatatatcttgtggaaaggac

SEQ ID NO: 1004 - DNA, 241 bp, synthetic construct
  misc_feature 1..241: note = Promoter
  source 1..241: mol_type = other DNA
gagggcctatttcccatgattccttcatatttgcatataagatgcaaggctgttagagagataattagaactaatttgactgtaaacacaaatatattagtacaaaatatgtgacatagaaagtgataatttcttgcgtagtttgcagttttaaaattatgttttaaaatggactatcatctgcttaccgtaactttaaagtatttcgatttcttgactttatatatcttgtggaaaggac

SEQ ID NO: 1005 - DNA, 241 bp, synthetic construct
  misc_feature 1..241: note = Promoter
  source 1..241: mol_type = other DNA
gagggcctatttcccatgattccttcatatttgcatataagatgcaaggctgttagagagataattagaactaatttgactgtaaacacaaatatattagtacaaaatatgtgacatagaaagtgataatttcttgtgtagtttgcagttttaaaattatgttttaaaatggactatcatctgcttaccgtaactttaaagtatttcgatttcttgactttatatatcttgtggaaaggac

SEQ ID NO: 1006 - DNA, 241 bp, synthetic construct
  misc_feature 1..241: note = Promoter
  source 1..241: mol_type = other DNA
gagggcctatttcccatgattccttcatatttgcatataagatgcaaggctgttagagagataattagaactaatttgactgtaaacacaaatatattagtacaaaatatgtgacatagaaagtgataatttcttggatagtttgcagttttaaaattatgttttaaaatggactatcatctgcttaccgtaactttaaagtatttcgatttcttgactttatatatcttgtggaaaggac

SEQ ID NO: 1007 - DNA, 241 bp, synthetic construct
  misc_feature 1..241: note = Promoter
  source 1..241: mol_type = other DNA
gagggcctatttcccatgattccttcatatttgcatataagatgcaaggctgttagagagataattagaactaatttgactgtaaacacaaatatattagtacaaaatatgtgacatagaaagtgataatttcttggctagtttgcagttttaaaattatgttttaaaatggactatcatctgcttaccgtaactttaaagtatttcgatttcttgactttatatatcttgtggaaaggac

SEQ ID NO: 1008 - DNA, 241 bp, synthetic construct
  misc_feature 1..241: note = Promoter
  source 1..241: mol_type = other DNA
gagggcctatttcccatgattccttcatatttgcatataagatgcaaggctgttagagagataattagaactaatttgactgtaaacacaaatatattagtacaaaatatgtgacatagaaagtgataatttcttggttagtttgcagttttaaaattatgttttaaaatggactatcatctgcttaccgtaactttaaagtatttcgatttcttgactttatatatcttgtggaaaggac

SEQ ID NO: 1009 - DNA, 241 bp, synthetic construct
  misc_feature 1..241: note = Promoter
  source 1..241: mol_type = other DNA
gagggcctatttcccatgattccttcatatttgcatataagatgcaaggctgttagagagataattagaactaatttgactgtaaacacaaatatattagtacaaaatatgtgacatagaaagtgataatttcttgggaagtttgcagttttaaaattatgttttaaaatggactatcatctgcttaccgtaactttaaagtatttcgatttcttgactttatatatcttgtggaaaggac

SEQ ID NO: 1010 - DNA, 241 bp, synthetic construct
  misc_feature 1..241: note = Promoter
  source 1..241: mol_type = other DNA
gagggcctatttcccatgattccttcatatttgcatataagatgcaaggctgttagagagataattagaactaatttgactgtaaacacaaatatattagtacaaaatatgtgacatagaaagtgataatttcttgggcagtttgcagttttaaaattatgttttaaaatggactatcatctgcttaccgtaactttaaagtatttcgatttcttgactttatatatcttgtggaaaggac

SEQ ID NO: 1011 - DNA, 241 bp, synthetic construct
  misc_feature 1..241: note = Promoter
  source 1..241: mol_type = other DNA
gagggcctatttcccatgattccttcatatttgcatataagatgcaaggctgttagagagataattagaactaatttgactgtaaacacaaatatattagtacaaaatatgtgacatagaaagtgataatttcttggggagtttgcagttttaaaattatgttttaaaatggactatcatctgcttaccgtaactttaaagtatttcgatttcttgactttatatatcttgtggaaaggac

SEQ ID NO: 1012 - DNA, 241 bp, synthetic construct
  misc_feature 1..241: note = Promoter
  source 1..241: mol_type = other DNA
gagggcctatttcccatgattccttcatatttgcatataagatgcaaggctgttagagagataattagaactaatttgactgtaaacacaaatatattagtacaaaatatgtgacatagaaagtgataatttcttgggtcgtttgcagttttaaaattatgttttaaaatggactatcatctgcttaccgtaactttaaagtatttcgatttcttgactttatatatcttgtggaaaggac

SEQ ID NO: 1013 - DNA, 241 bp, synthetic construct
  misc_feature 1..241: note = Promoter
  source 1..241: mol_type = other DNA
gagggcctatttcccatgattccttcatatttgcatataagatgcaaggctgttagagagataattagaactaatttgactgtaaacacaaatatattagtacaaaatatgtgacatagaaagtgataatttcttgggtggtttgcagttttaaaattatgttttaaaatggactatcatctgcttaccgtaactttaaagtatttcgatttcttgactttatatatcttgtggaaaggac

SEQ ID NO: 1014 - DNA, 241 bp, synthetic construct
  misc_feature 1..241: note = Promoter
  source 1..241: mol_type = other DNA
gagggcctatttcccatgattccttcatatttgcatataagatgcaaggctgttagagagataattagaactaatttgactgtaaacacaaatatattagtacaaaatatgtgacatagaaagtgataatttcttgggttgtttgcagttttaaaattatgttttaaaatggactatcatctgcttaccgtaactttaaagtatttcgatttcttgactttatatatcttgtggaaaggac

SEQ ID NO: 1015 - DNA, 241 bp, synthetic construct
  misc_feature 1..241: note = Promoter
  source 1..241: mol_type = other DNA
gagggcctatttcccatgattccttcatatttgcatataagatgcaaggctgttagagagataattagaactaatttgactgtaaacacaaatatattagtacaaaatatgtgacatagaaagtgataatttcttgggtaatttgcagttttaaaattatgttttaaaatggactatcatctgcttaccgtaactttaaagtatttcgatttcttgactttatatatcttgtggaaaggac

SEQ ID NO: 1016 - DNA, 241 bp, synthetic construct
  misc_feature 1..241: note = Promoter
  source 1..241: mol_type = other DNA
gagggcctatttcccatgattccttcatatttgcatataagatgcaaggctgttagagagataattagaactaatttgactgtaaacacaaatatattagtacaaaatatgtgacatagaaagtgataatttcttgggtactttgcagttttaaaattatgttttaaaatggactatcatctgcttaccgtaactttaaagtatttcgatttcttgactttatatatcttgtggaaaggac

SEQ ID NO: 1017 - DNA, 241 bp, synthetic construct
  misc_feature 1..241: note = Promoter
  source 1..241: mol_type = other DNA
gagggcctatttcccatgattccttcatatttgcatataagatgcaaggctgttagagagataattagaactaatttgactgtaaacacaaatatattagtacaaaatatgtgacatagaaagtgataatttcttgggtattttgcagttttaaaattatgttttaaaatggactatcatctgcttaccgtaactttaaagtatttcgatttcttgactttatatatcttgtggaaaggac

SEQ ID NO: 1018 - DNA, 241 bp, synthetic construct
  misc_feature 1..241: note = Promoter
  source 1..241: mol_type = other DNA
gagggcctatttcccatgattccttcatatttgcatataagatgcaaggctgttagagagataattagaactaatttgactgtaaacacaaatatattagtacaaaatatgtgacatagaaagtgataatttcttgggtagattgcagttttaaaattatgttttaaaatggactatcatctgcttaccgtaactttaaagtatttcgatttcttgactttatatatcttgtggaaaggac

SEQ ID NO: 1019 - DNA, 241 bp, synthetic construct
  misc_feature 1..241: note = Promoter
  source 1..241: mol_type = other DNA
gagggcctatttcccatgattccttcatatttgcatataagatgcaaggctgttagagagataattagaactaatttgactgtaaacacaaatatattagtacaaaatatgtgacatagaaagtgataatttcttgggtagcttgcagttttaaaattatgttttaaaatggactatcatctgcttaccgtaactttaaagtatttcgatttcttgactttatatatcttgtggaaaggac

SEQ ID NO: 1020 - DNA, 241 bp, synthetic construct
  misc_feature 1..241: note = Promoter
  source 1..241: mol_type = other DNA
gagggcctatttcccatgattccttcatatttgcatataagatgcaaggctgttagagagataattagaactaatttgactgtaaacacaaatatattagtacaaaatatgtgacatagaaagtgataatttcttgggtaggttgcagttttaaaattatgttttaaaatggactatcatctgcttaccgtaactttaaagtatttcgatttcttgactttatatatcttgtggaaaggac

SEQ ID NO: 1021 - DNA, 241 bp, synthetic construct
  misc_feature 1..241: note = Promoter
  source 1..241: mol_type = other DNA
gagggcctatttcccatgattccttcatatttgcatataagatgcaaggctgttagagagataattagaactaatttgactgtaaacacaaatatattagtacaaaatatgtgacatagaaagtgataatttcttgggtagtatgcagttttaaaattatgttttaaaatggactatcatctgcttaccgtaactttaaagtatttcgatttcttgactttatatatcttgtggaaaggac

SEQ ID NO: 1022 - DNA, 241 bp, synthetic construct
  misc_feature 1..241: note = Promoter
  source 1..241: mol_type = other DNA
gagggcctatttcccatgattccttcatatttgcatataagatgcaaggctgttagagagataattagaactaatttgactgtaaacacaaatatattagtacaaaatatgtgacatagaaagtgataatttcttgggtagtctgcagttttaaaattatgttttaaaatggactatcatctgcttaccgtaactttaaagtatttcgatttcttgactttatatatcttgtggaaaggac

SEQ ID NO: 1023 - DNA, 241 bp, synthetic construct
  misc_feature 1..241: note = Promoter
  source 1..241: mol_type = other DNA
gagggcctatttcccatgattccttcatatttgcatataagatgcaaggctgttagagagataattagaactaatttgactgtaaacacaaatatattagtacaaaatatgtgacatagaaagtgataatttcttgggtagtgtgcagttttaaaattatgttttaaaatggactatcatctgcttaccgtaactttaaagtatttcgatttcttgactttatatatcttgtggaaaggac

SEQ ID NO: 1024 - DNA, 241 bp, synthetic construct
  misc_feature 1..241: note = Promoter
  source 1..241: mol_type = other DNA
gagggcctatttcccatgattccttcatatttgcatataagatgcaaggctgttagagagataattagaactaatttgactgtaaacacaaatatattagtacaaaatatgtgacatagaaagtgataatttcttgggtagttagcagttttaaaattatgttttaaaatggactatcatctgcttaccgtaactttaaagtatttcgatttcttgactttatatatcttgtggaaaggac

SEQ ID NO: 1025 - DNA, 241 bp, synthetic construct
  misc_feature 1..241: note = Promoter
  source 1..241: mol_type = other DNA
gagggcctatttcccatgattccttcatatttgcatataagatgcaaggctgttagagagataattagaactaatttgactgtaaacacaaatatattagtacaaaatatgtgacatagaaagtgataatttcttgggtagttcgcagttttaaaattatgttttaaaatggactatcatctgcttaccgtaactttaaagtatttcgatttcttgactttatatatcttgtggaaaggac

SEQ ID NO: 1026 - DNA, 241 bp, synthetic construct
  misc_feature 1..241: note = Promoter
  source 1..241: mol_type = other DNA
gagggcctatttcccatgattccttcatatttgcatataagatgcaaggctgttagagagataattagaactaatttgactgtaaacacaaatatattagtacaaaatatgtgacatagaaagtgataatttcttgggtagttggcagttttaaaattatgttttaaaatggactatcatctgcttaccgtaactttaaagtatttcgatttcttgactttatatatcttgtggaaaggac

SEQ ID NO: 1027 - DNA, 241 bp, synthetic construct
  misc_feature 1..241: note = Promoter
  source 1..241: mol_type = other DNA
gagggcctatttcccatgattccttcatatttgcatataagatgcaaggctgttagagagataattagaactaatttgactgtaaacacaaatatattagtacaaaatatgtgacatagaaagtgataatttcttgggtagtttacagttttaaaattatgttttaaaatggactatcatctgcttaccgtaactttaaagtatttcgatttcttgactttatatatcttgtggaaaggac

SEQ ID NO: 1028 - DNA, 241 bp, synthetic construct
  misc_feature 1..241: note = Promoter
  source 1..241: mol_type = other DNA
gagggcctatttcccatgattccttcatatttgcatataagatgcaaggctgttagagagataattagaactaatttgactgtaaacacaaatatattagtacaaaatatgtgacatagaaagtgataatttcttgggtagtttccagttttaaaattatgttttaaaatggactatcatctgcttaccgtaactttaaagtatttcgatttcttgactttatatatcttgtggaaaggac

SEQ ID NO: 1029 - DNA, 241 bp, synthetic construct
  misc_feature 1..241: note = Promoter
  source 1..241: mol_type = other DNA
gagggcctatttcccatgattccttcatatttgcatataagatgcaaggctgttagagagataattagaactaatttgactgtaaacacaaatatattagtacaaaatatgtgacatagaaagtgataatttcttgggtagttttcagttttaaaattatgttttaaaatggactatcatctgcttaccgtaactttaaagtatttcgatttcttgactttatatatcttgtggaaaggac

SEQ ID NO: 1030 - DNA, 241 bp, synthetic construct
  misc_feature 1..241: note = Promoter
  source 1..241: mol_type = other DNA
gagggcctatttcccatgattccttcatatttgcatataagatgcaaggctgttagagagataattagaactaatttgactgtaaacacaaatatattagtacaaaatatgtgacatagaaagtgataatttcttgggtagtttgaagttttaaaattatgttttaaaatggactatcatctgcttaccgtaactttaaagtatttcgatttcttgactttatatatcttgtggaaaggac

SEQ ID NO: 1031 - DNA, 241 bp, synthetic construct
  misc_feature 1..241: note = Promoter
  source 1..241: mol_type = other DNA
gagggcctatttcccatgattccttcatatttgcatataagatgcaaggctgttagagagataattagaactaatttgactgtaaacacaaatatattagtacaaaatatgtgacatagaaagtgataatttcttgggtagtttggagttttaaaattatgttttaaaatggactatcatctgcttaccgtaactttaaagtatttcgatttcttgactttatatatcttgtggaaaggac

SEQ ID NO: 1032 - DNA, 241 bp, synthetic construct
  misc_feature 1..241: note = Promoter
  source 1..241: mol_type = other DNA
gagggcctatttcccatgattccttcatatttgcatataagatgcaaggctgttagagagataattagaactaatttgactgtaaacacaaatatattagtacaaaatatgtgacatagaaagtgataatttcttgggtagtttgtagttttaaaattatgttttaaaatggactatcatctgcttaccgtaactttaaagtatttcgatttcttgactttatatatcttgtggaaaggac

SEQ ID NO: 1033 - DNA, 241 bp, synthetic construct
  misc_feature 1..241: note = Promoter
  source 1..241: mol_type = other DNA
gagggcctatttcccatgattccttcatatttgcatataagatgcaaggctgttagagagataattagaactaatttgactgtaaacacaaatatattagtacaaaatatgtgacatagaaagtgataatttcttgggtagtttgccgttttaaaattatgttttaaaatggactatcatctgcttaccgtaactttaaagtatttcgatttcttgactttatatatcttgtggaaaggac

SEQ ID NO: 1034 - DNA, 241 bp, synthetic construct
  misc_feature 1..241: note = Promoter
  source 1..241: mol_type = other DNA
gagggcctatttcccatgattccttcatatttgcatataagatgcaaggctgttagagagataattagaactaatttgactgtaaacacaaatatattagtacaaaatatgtgacatagaaagtgataatttcttgggtagtttgcggttttaaaattatgttttaaaatggactatcatctgcttaccgtaactttaaagtatttcgatttcttgactttatatatcttgtggaaaggac

SEQ ID NO: 1035 - DNA, 241 bp, synthetic construct
  misc_feature 1..241: note = Promoter
  source 1..241: mol_type = other DNA
gagggcctatttcccatgattccttcatatttgcatataagatgcaaggctgttagagagataattagaactaatttgactgtaaacacaaatatattagtacaaaatatgtgacatagaaagtgataatttcttgggtagtttgctgttttaaaattatgttttaaaatggactatcatctgcttaccgtaactttaaagtatttcgatttcttgactttatatatcttgtggaaaggac

SEQ ID NO: 1036 - DNA, 241 bp, synthetic construct
  misc_feature 1..241: note = Promoter
  source 1..241: mol_type = other DNA
gagggcctatttcccatgattccttcatatttgcatataagatgcaaggctgttagagagataattagaactaatttgactgtaaacacaaatatattagtacaaaatatgtgacatagaaagtgataatttcttgggtagtttgcaattttaaaattatgttttaaaatggactatcatctgcttaccgtaactttaaagtatttcgatttcttgactttatatatcttgtggaaaggac

SEQ ID NO: 1037 - DNA, 241 bp, synthetic construct
  misc_feature 1..241: note = Promoter
  source 1..241: mol_type = other DNA
gagggcctatttcccatgattccttcatatttgcatataagatgcaaggctgttagagagataattagaactaatttgactgtaaacacaaatatattagtacaaaatatgtgacatagaaagtgataatttcttgggtagtttgcacttttaaaattatgttttaaaatggactatcatctgcttaccgtaactttaaagtatttcgatttcttgactttatatatcttgtggaaaggac

SEQ ID NO: 1038 - DNA, 241 bp, synthetic construct
  misc_feature 1..241: note = Promoter
  source 1..241: mol_type = other DNA
gagggcctatttcccatgattccttcatatttgcatataagatgcaaggctgttagagagataattagaactaatttgactgtaaacacaaatatattagtacaaaatatgtgacatagaaagtgataatttcttgggtagtttgcatttttaaaattatgttttaaaatggactatcatctgcttaccgtaactttaaagtatttcgatttcttgactttatatatcttgtggaaaggac

SEQ ID NO: 1039 - DNA, 241 bp, synthetic construct
  misc_feature 1..241: note = Promoter
  source 1..241: mol_type = other DNA
gagggcctatttcccatgattccttcatatttgcatataagatgcaaggctgttagagagataattagaactaatttgactgtaaacacaaatatattagtacaaaatatgtgacatagaaagtgataatttcttgggtagtttgcagatttaaaattatgttttaaaatggactatcatctgcttaccgtaactttaaagtatttcgatttcttgactttatatatcttgtggaaaggac

SEQ ID NO: 1040 - DNA, 241 bp, synthetic construct
  misc_feature 1..241: note = Promoter
  source 1..241: mol_type = other DNA
gagggcctatttcccatgattccttcatatttgcatataagatgcaaggctgttagagagataattagaactaatttgactgtaaacacaaatatattagtacaaaatatgtgacatagaaagtgataatttcttgggtagtttgcagctttaaaattatgttttaaaatggactatcatctgcttaccgtaactttaaagtatttcgatttcttgactttatatatcttgtggaaaggac

SEQ ID NO: 1041 - DNA, 241 bp, synthetic construct
  misc_feature 1..241: note = Promoter
  source 1..241: mol_type = other DNA
gagggcctatttcccatgattccttcatatttgcatataagatgcaaggctgttagagagataattagaactaatttgactgtaaacacaaatatattagtacaaaatatgtgacatagaaagtgataatttcttgggtagtttgcaggtttaaaattatgttttaaaatggactatcatctgcttaccgtaactttaaagtatttcgatttcttgactttatatatcttgtggaaaggac

SEQ ID NO: 1042 - DNA, 241 bp, synthetic construct
  misc_feature 1..241: note = Promoter
  source 1..241: mol_type = other DNA
gagggcctatttcccatgattccttcatatttgcatataagatgcaaggctgttagagagataattagaactaatttgactgtaaacacaaatatattagtacaaaatatgtgacatagaaagtgataatttcttgggtagtttgcagtattaaaattatgttttaaaatggactatcatctgcttaccgtaactttaaagtatttcgatttcttgactttatatatcttgtggaaaggac

SEQ ID NO: 1043 - DNA, 241 bp, synthetic construct
  misc_feature 1..241: note = Promoter
  source 1..241: mol_type = other DNA
gagggcctatttcccatgattccttcatatttgcatataagatgcaaggctgttagagagataattagaactaatttgactgtaaacacaaatatattagtacaaaatatgtgacatagaaagtgataatttcttgggtagtttgcagtcttaaaattatgttttaaaatggactatcatctgcttaccgtaactttaaagtatttcgatttcttgactttatatatcttgtggaaaggac

SEQ ID NO: 1044 - DNA, 241 bp, synthetic construct
  misc_feature 1..241: note = Promoter
  source 1..241: mol_type = other DNA
gagggcctatttcccatgattccttcatatttgcatataagatgcaaggctgttagagagataattagaactaatttgactgtaaacacaaatatattagtacaaaatatgtgacatagaaagtgataatttcttgggtagtttgcagtgttaaaattatgttttaaaatggactatcatctgcttaccgtaactttaaagtatttcgatttcttgactttatatatcttgtggaaaggac

SEQ ID NO: 1045 - DNA, 241 bp, synthetic construct
  misc_feature 1..241: note = Promoter
  source 1..241: mol_type = other DNA
gagggcctatttcccatgattccttcatatttgcatataagatgcaaggctgttagagagataattagaactaatttgactgtaaacacaaatatattagtacaaaatatgtgacatagaaagtgataatttcttgggtagtttgcagttataaaattatgttttaaaatggactatcatctgcttaccgtaactttaaagtatttcgatttcttgactttatatatcttgtggaaaggac

SEQ ID NO: 1046 - DNA, 241 bp, synthetic construct
  misc_feature 1..241: note = Promoter
  source 1..241: mol_type = other DNA
gagggcctatttcccatgattccttcatatttgcatataagatgcaaggctgttagagagataattagaactaatttgactgtaaacacaaatatattagtacaaaatatgtgacatagaaagtgataatttcttgggtagtttgcagttctaaaattatgttttaaaatggactatcatctgcttaccgtaactttaaagtatttcgatttcttgactttatatatcttgtggaaaggac

SEQ ID NO: 1047 - DNA, 241 bp, synthetic construct
  misc_feature 1..241: note = Promoter
  source 1..241: mol_type = other DNA
gagggcctatttcccatgattccttcatatttgcatataagatgcaaggctgttagagagataattagaactaatttgactgtaaacacaaatatattagtacaaaatatgtgacatagaaagtgataatttcttgggtagtttgcagttgtaaaattatgttttaaaatggactatcatctgcttaccgtaactttaaagtatttcgatttcttgactttatatatcttgtggaaaggac

SEQ ID NO: 1048 - DNA, 241 bp, synthetic construct
  misc_feature 1..241: note = Promoter
  source 1..241: mol_type = other DNA
gagggcctatttcccatgattccttcatatttgcatataagatgcaaggctgttagagagataattagaactaatttgactgtaaacacaaatatattagtacaaaatatgtgacatagaaagtgataatttcttgggtagtttgcagtttaaaaattatgttttaaaatggactatcatctgcttaccgtaactttaaagtatttcgatttcttgactttatatatcttgtggaaaggac

SEQ ID NO: 1049 - DNA, 241 bp, synthetic construct
  misc_feature 1..241: note = Promoter
  source 1..241: mol_type = other DNA
gagggcctatttcccatgattccttcatatttgcatataagatgcaaggctgttagagagataattagaactaatttgactgtaaacacaaatatattagtacaaaatatgtgacatagaaagtgataatttcttgggtagtttgcagtttcaaaattatgttttaaaatggactatcatctgcttaccgtaactttaaagtatttcgatttcttgactttatatatcttgtggaaaggac

SEQ ID NO: 1050 - DNA, 241 bp, synthetic construct
  misc_feature 1..241: note = Promoter
  source 1..241: mol_type = other DNA
gagggcctatttcccatgattccttcatatttgcatataagatgcaaggctgttagagagataattagaactaatttgactgtaaacacaaatatattagtacaaaatatgtgacatagaaagtgataatttcttgggtagtttgcagtttgaaaattatgttttaaaatggactatcatctgcttaccgtaactttaaagtatttcgatttcttgactttatatatcttgtggaaaggac

SEQ ID NO: 1051 - DNA, 241 bp, synthetic construct
  misc_feature 1..241: note = Promoter
  source 1..241: mol_type = other DNA
gagggcctatttcccatgattccttcatatttgcatataagatgcaaggctgttagagagataattagaactaatttgactgtaaacacaaatatattagtacaaaatatgtgacatagaaagtgataatttcttgggtagtttgcagttttcaaattatgttttaaaatggactatcatctgcttaccgtaactttaaagtatttcgatttcttgactttatatatcttgtggaaaggac

SEQ ID NO: 1052 - DNA, 241 bp, synthetic construct
  misc_feature 1..241: note = Promoter
  source 1..241: mol_type = other DNA
gagggcctatttcccatgattccttcatatttgcatataagatgcaaggctgttagagagataattagaactaatttgactgtaaacacaaatatattagtacaaaatatgtgacatagaaagtgataatttcttgggtagtttgcagttttgaaattatgttttaaaatggactatcatctgcttaccgtaactttaaagtatttcgatttcttgactttatatatcttgtggaaaggac

SEQ ID NO: 1053 - DNA, 241 bp, synthetic construct
  misc_feature 1..241: note = Promoter
  source 1..241: mol_type = other DNA
gagggcctatttcccatgattccttcatatttgcatataagatgcaaggctgttagagagataattagaactaatttgactgtaaacacaaatatattagtacaaaatatgtgacatagaaagtgataatttcttgggtagtttgcagtttttaaattatgttttaaaatggactatcatctgcttaccgtaactttaaagtatttcgatttcttgactttatatatcttgtggaaaggac

SEQ ID NO: 1054 - DNA, 241 bp, synthetic construct
  misc_feature 1..241: note = Promoter
  source 1..241: mol_type = other DNA
gagggcctatttcccatgattccttcatatttgcatataagatgcaaggctgttagagagataattagaactaatttgactgtaaacacaaatatattagtacaaaatatgtgacatagaaagtgataatttcttgggtagtttgcagttttacaattatgttttaaaatggactatcatctgcttaccgtaactttaaagtatttcgatttcttgactttatatatcttgtggaaaggac

SEQ ID NO: 1055 - DNA, 241 bp, synthetic construct
  misc_feature 1..241: note = Promoter
  source 1..241: mol_type = other DNA
gagggcctatttcccatgattccttcatatttgcatataagatgcaaggctgttagagagataattagaactaatttgactgtaaacacaaatatattagtacaaaatatgtgacatagaaagtgataatttcttgggtagtttgcagttttagaattatgttttaaaatggactatcatctgcttaccgtaactttaaagtatttcgatttcttgactttatatatcttgtggaaaggac

SEQ ID NO: 1056 - DNA, 241 bp, synthetic construct
  misc_feature 1..241: note = Promoter
  source 1..241: mol_type = other DNA
gagggcctatttcccatgattccttcatatttgcatataagatgcaaggctgttagagagataattagaactaatttgactgtaaacacaaatatattagtacaaaatatgtgacatagaaagtgataatttcttgggtagtttgcagttttataattatgttttaaaatggactatcatctgcttaccgtaactttaaagtatttcgatttcttgactttatatatcttgtggaaaggac

SEQ ID NO: 1057 - DNA, 241 bp, synthetic construct
  misc_feature 1..241: note = Promoter
  source 1..241: mol_type = other DNA
gagggcctatttcccatgattccttcatatttgcatataagatgcaaggctgttagagagataattagaactaatttgactgtaaacacaaatatattagtacaaaatatgtgacatagaaagtgataatttcttgggtagtttgcagttttaacattatgttttaaaatggactatcatctgcttaccgtaactttaaagtatttcgatttcttgactttatatatcttgtggaaaggac

SEQ ID NO: 1058 - DNA, 241 bp, synthetic construct
  misc_feature 1..241: note = Promoter
  source 1..241: mol_type = other DNA
gagggcctatttcccatgattccttcatatttgcatataagatgcaaggctgttagagagataattagaactaatttgactgtaaacacaaatatattagtacaaaatatgtgacatagaaagtgataatttcttgggtagtttgcagttttaagattatgttttaaaatggactatcatctgcttaccgtaactttaaagtatttcgatttcttgactttatatatcttgtggaaaggac

SEQ ID NO: 1059 - DNA, 241 bp, synthetic construct
  misc_feature 1..241: note = Promoter
  source 1..241: mol_type = other DNA
gagggcctatttcccatgattccttcatatttgcatataagatgcaaggctgttagagagataattagaactaatttgactgtaaacacaaatatattagtacaaaatatgtgacatagaaagtgataatttcttgggtagtttgcagttttaatattatgttttaaaatggactatcatctgcttaccgtaactttaaagtatttcgatttcttgactttatatatcttgtggaaaggac

SEQ ID NO: 1060 - DNA, 241 bp, synthetic construct
  misc_feature 1..241: note = Promoter
  source 1..241: mol_type = other DNA
gagggcctatttcccatgattccttcatatttgcatataagatgcaaggctgttagagagataattagaactaatttgactgtaaacacaaatatattagtacaaaatatgtgacatagaaagtgataatttcttgggtagtttgcagttttaaacttatgttttaaaatggactatcatctgcttaccgtaactttaaagtatttcgatttcttgactttatatatcttgtggaaaggac

SEQ ID NO: 1061 - DNA, 241 bp, synthetic construct
  misc_feature 1..241: note = Promoter
  source 1..241: mol_type = other DNA
gagggcctatttcccatgattccttcatatttgcatataagatgcaaggctgttagagagataattagaactaatttgactgtaaacacaaatatattagtacaaaatatgtgacatagaaagtgataatttcttgggtagtttgcagttttaaagttatgttttaaaatggactatcatctgcttaccgtaactttaaagtatttcgatttcttgactttatatatcttgtggaaaggac

SEQ ID NO: 1062 - DNA, 241 bp, synthetic construct
  misc_feature 1..241: note = Promoter
  source 1..241: mol_type = other DNA
gagggcctatttcccatgattccttcatatttgcatataagatgcaaggctgttagagagataattagaactaatttgactgtaaacacaaatatattagtacaaaatatgtgacatagaaagtgataatttcttgggtagtttgcagttttaaatttatgttttaaaatggactatcatctgcttaccgtaactttaaagtatttcgatttcttgactttatatatcttgtggaaaggac

SEQ ID NO: 1063 - DNA, 241 bp, synthetic construct
  misc_feature 1..241: note = Promoter
  source 1..241: mol_type = other DNA
gagggcctatttcccatgattccttcatatttgcatataagatgcaaggctgttagagagataattagaactaatttgactgtaaacacaaatatattagtacaaaatatgtgacatagaaagtgataatttcttgggtagtttgcagttttaaaaatatgttttaaaatggactatcatctgcttaccgtaactttaaagtatttcgatttcttgactttatatatcttgtggaaaggac

SEQ ID NO: 1064 - DNA, 241 bp, synthetic construct
  misc_feature 1..241: note = Promoter
  source 1..241: mol_type = other DNA
gagggcctatttcccatgattccttcatatttgcatataagatgcaaggctgttagagagataattagaactaatttgactgtaaacacaaatatattagtacaaaatatgtgacatagaaagtgataatttcttgggtagtttgcagttttaaaactatgttttaaaatggactatcatctgcttaccgtaactttaaagtatttcgatttcttgactttatatatcttgtggaaaggac

SEQ ID NO: 1065 - DNA, 241 bp, synthetic construct
  misc_feature 1..241: note = Promoter
  source 1..241: mol_type = other DNA
gagggcctatttcccatgattccttcatatttgcatataagatgcaaggctgttagagagataattagaactaatttgactgtaaacacaaatatattagtacaaaatatgtgacatagaaagtgataatttcttgggtagtttgcagttttaaaagtatgttttaaaatggactatcatctgcttaccgtaactttaaagtatttcgatttcttgactttatatatcttgtggaaaggac

SEQ ID NO: 1066 - DNA, 241 bp, synthetic construct
  misc_feature 1..241: note = Promoter
  source 1..241: mol_type = other DNA
gagggcctatttcccatgattccttcatatttgcatataagatgcaaggctgttagagagataattagaactaatttgactgtaaacacaaatatattagtacaaaatatgtgacatagaaagtgataatttcttgggtagtttgcagttttaaaataatgttttaaaatggactatcatctgcttaccgtaactttaaagtatttcgatttcttgactttatatatcttgtggaaaggac

SEQ ID NO: 1067 - DNA, 241 bp, synthetic construct
  misc_feature 1..241: note = Promoter
  source 1..241: mol_type = other DNA
gagggcctatttcccatgattccttcatatttgcatataagatgcaaggctgttagagagataattagaactaatttgactgtaaacacaaatatattagtacaaaatatgtgacatagaaagtgataatttcttgggtagtttgcagttttaaaatcatgttttaaaatggactatcatctgcttaccgtaactttaaagtatttcgatttcttgactttatatatcttgtggaaaggac

SEQ ID NO: 1068 - DNA, 241 bp, synthetic construct
  misc_feature 1..241: note = Promoter
  source 1..241: mol_type = other DNA
gagggcctatttcccatgattccttcatatttgcatataagatgcaaggctgttagagagataattagaactaatttgactgtaaacacaaatatattagtacaaaatatgtgacatagaaagtgataatttcttgggtagtttgcagttttaaaatgatgttttaaaatggactatcatctgcttaccgtaactttaaagtatttcgatttcttgactttatatatcttgtggaaaggac

SEQ ID NO: 1069 - DNA, 241 bp, synthetic construct
  misc_feature 1..241: note = Promoter
  source 1..241: mol_type = other DNA
gagggcctatttcccatgattccttcatatttgcatataagatgcaaggctgttagagagataattagaactaatttgactgtaaacacaaatatattagtacaaaatatgtgacatagaaagtgataatttcttgggtagtttgcagttttaaaattctgttttaaaatggactatcatctgcttaccgtaactttaaagtatttcgatttcttgactttatatatcttgtggaaaggac

SEQ ID NO: 1070 - DNA, 241 bp, synthetic construct
  misc_feature 1..241: note = Promoter
  source 1..241: mol_type = other DNA
gagggcctatttcccatgattccttcatatttgcatataagatgcaaggctgttagagagataattagaactaatttgactgtaaacacaaatatattagtacaaaatatgtgacatagaaagtgataatttcttgggtagtttgcagttttaaaattgtgttttaaaatggactatcatctgcttaccgtaactttaaagtatttcgatttcttgactttatatatcttgtggaaaggac

SEQ ID NO: 1071 - DNA, 241 bp, synthetic construct
  misc_feature 1..241: note = Promoter
  source 1..241: mol_type = other DNA
gagggcctatttcccatgattccttcatatttgcatataagatgcaaggctgttagagagataattagaactaatttgactgtaaacacaaatatattagtacaaaatatgtgacatagaaagtgataatttcttgggtagtttgcagttttaaaattttgttttaaaatggactatcatctgcttaccgtaactttaaagtatttcgatttcttgactttatatatcttgtggaaaggac

SEQ ID NO: 1072 - DNA, 241 bp, synthetic construct
  misc_feature 1..241: note = Promoter
  source 1..241: mol_type = other DNA
gagggcctatttcccatgattccttcatatttgcatataagatgcaaggctgttagagagataattagaactaatttgactgtaaacacaaatatattagtacaaaatatgtgacatagaaagtgataatttcttgggtagtttgcagttttaaaattaagttttaaaatggactatcatctgcttaccgtaactttaaagtatttcgatttcttgactttatatatcttgtggaaaggac

SEQ ID NO: 1073 - DNA, 241 bp, synthetic construct
  misc_feature 1..241: note = Promoter
  source 1..241: mol_type = other DNA
gagggcctatttcccatgattccttcatatttgcatataagatgcaaggctgttagagagataattagaactaatttgactgtaaacacaaatatattagtacaaaatatgtgacatagaaagtgataatttcttgggtagtttgcagttttaaaattacgttttaaaatggactatcatctgcttaccgtaactttaaagtatttcgatttcttgactttatatatcttgtggaaaggac

SEQ ID NO: 1074 - DNA, 241 bp, synthetic construct
  misc_feature 1..241: note = Promoter
  source 1..241: mol_type = other DNA
gagggcctatttcccatgattccttcatatttgcatataagatgcaaggctgttagagagataattagaactaatttgactgtaaacacaaatatattagtacaaaatatgtgacatagaaagtgataatttcttgggtagtttgcagttttaaaattaggttttaaaatggactatcatctgcttaccgtaactttaaagtatttcgatttcttgactttatatatcttgtggaaaggac

SEQ ID NO: 1075 - DNA, 241 bp, synthetic construct
  misc_feature 1..241: note = Promoter
  source 1..241: mol_type = other DNA
gagggcctatttcccatgattccttcatatttgcatataagatgcaaggctgttagagagataattagaactaatttgactgtaaacacaaatatattagtacaaaatatgtgacatagaaagtgataatttcttgggtagtttgcagttttaaaattatattttaaaatggactatcatctgcttaccgtaactttaaagtatttcgatttcttgactttatatatcttgtggaaaggac

SEQ ID NO: 1076 - DNA, 241 bp, synthetic construct
  misc_feature 1..241: note = Promoter
  source 1..241: mol_type = other DNA
gagggcctatttcccatgattccttcatatttgcatataagatgcaaggctgttagagagataattagaactaatttgactgtaaacacaaatatattagtacaaaatatgtgacatagaaagtgataatttcttgggtagtttgcagttttaaaattatcttttaaaatggactatcatctgcttaccgtaactttaaagtatttcgatttcttgactttatatatcttgtggaaaggac

SEQ ID NO: 1077 - DNA, 241 bp, synthetic construct
  misc_feature 1..241: note = Promoter
  source 1..241: mol_type = other DNA
gagggcctatttcccatgattccttcatatttgcatataagatgcaaggctgttagagagataattagaactaatttgactgtaaacacaaatatattagtacaaaatatgtgacatagaaagtgataatttcttgggtagtttgcagttttaaaattattttttaaaatggactatcatctgcttaccgtaactttaaagtatttcgatttcttgactttatatatcttgtggaaaggac

SEQ ID NO: 1078 - DNA, 241 bp, synthetic construct
  misc_feature 1..241: note = Promoter
  source 1..241: mol_type = other DNA
gagggcctatttcccatgattccttcatatttgcatataagatgcaaggctgttagagagataattagaactaatttgactgtaaacacaaatatattagtacaaaatatgtgacatagaaagtgataatttcttgggtagtttgcagttttaaaattatgatttaaaatggactatcatctgcttaccgtaactttaaagtatttcgatttcttgactttatatatcttgtggaaaggac

SEQ ID NO: 1079 - DNA, 241 bp, synthetic construct
  misc_feature 1..241: note = Promoter
  source 1..241: mol_type = other DNA
gagggcctatttcccatgattccttcatatttgcatataagatgcaaggctgttagagagataattagaactaatttgactgtaaacacaaatatattagtacaaaatatgtgacatagaaagtgataatttcttgggtagtttgcagttttaaaattatgctttaaaatggactatcatctgcttaccgtaactttaaagtatttcgatttcttgactttatatatcttgtggaaaggac

SEQ ID NO: 1080 - DNA, 241 bp, synthetic construct
  misc_feature 1..241: note = Promoter
  source 1..241: mol_type = other DNA
gagggcctatttcccatgattccttcatatttgcatataagatgcaaggctgttagagagataattagaactaatttgactgtaaacacaaatatattagtacaaaatatgtgacatagaaagtgataatttcttgggtagtttgcagttttaaaattatggtttaaaatggactatcatctgcttaccgtaactttaaagtatttcgatttcttgactttatatatcttgtggaaaggac

SEQ ID NO: 1081 - DNA, 241 bp, synthetic construct
  misc_feature 1..241: note = Promoter
  source 1..241: mol_type = other DNA
gagggcctatttcccatgattccttcatatttgcatataagatgcaaggctgttagagagataattagaactaatttgactgtaaacacaaatatattagtacaaaatatgtgacatagaaagtgataatttcttgggtagtttgcagttttaaaattatgtattaaaatggactatcatctgcttaccgtaactttaaagtatttcgatttcttgactttatatatcttgtggaaaggac

SEQ ID NO: 1082 - DNA, 241 bp, synthetic construct
  misc_feature 1..241: note = Promoter
  source 1..241: mol_type = other DNA
gagggcctatttcccatgattccttcatatttgcatataagatgcaaggctgttagagagataattagaactaatttgactgtaaacacaaatatattagtacaaaatatgtgacatagaaagtgataatttcttgggtagtttgcagttttaaaattatgtcttaaaatggactatcatctgcttaccgtaactttaaagtatttcgatttcttgactttatatatcttgtggaaaggac

SEQ ID NO: 1083 - DNA, 241 bp, synthetic construct
  misc_feature 1..241: note = Promoter
  source 1..241: mol_type = other DNA
gagggcctatttcccatgattccttcatatttgcatataagatgcaaggctgttagagagataattagaactaatttgactgtaaacacaaatatattagtacaaaatatgtgacatagaaagtgataatttcttgggtagtttgcagttttaaaattatgtgttaaaatggactatcatctgcttaccgtaactttaaagtatttcgatttcttgactttatatatcttgtggaaaggac

SEQ ID NO: 1084 - DNA, 241 bp, synthetic construct
  misc_feature 1..241: note = Promoter
  source 1..241: mol_type = other DNA
gagggcctatttcccatgattccttcatatttgcatataagatgcaaggctgttagagagataattagaactaatttgactgtaaacacaaatatattagtacaaaatatgtgacatagaaagtgataatttcttgggtagtttgcagttttaaaattatgttataaaatggactatcatctgcttaccgtaactttaaagtatttcgatttcttgactttatatatcttgtggaaaggac

SEQ ID NO: 1085 - DNA, 241 bp, synthetic construct
  misc_feature 1..241: note = Promoter
  source 1..241: mol_type = other DNA
gagggcctatttcccatgattccttcatatttgcatataagatgcaaggctgttagagagataattagaactaatttgactgtaaacacaaatatattagtacaaaatatgtgacatagaaagtgataatttcttgggtagtttgcagttttaaaattatgttctaaaatggactatcatctgcttaccgtaactttaaagtatttcgatttcttgactttatatatcttgtggaaaggac

SEQ ID NO: 1086 - DNA, 241 bp, synthetic construct
  misc_feature 1..241: note = Promoter
  source 1..241: mol_type = other DNA
gagggcctatttcccatgattccttcatatttgcatataagatgcaaggctgttagagagataattagaactaatttgactgtaaacacaaatatattagtacaaaatatgtgacatagaaagtgataatttcttgggtagtttgcagttttaaaattatgttgtaaaatggactatcatctgcttaccgtaactttaaagtatttcgatttcttgactttatatatcttgtggaaaggac

SEQ ID NO: 1087 - DNA, 241 bp, synthetic construct
  misc_feature 1..241: note = Promoter
  source 1..241: mol_type = other DNA
gagggcctatttcccatgattccttcatatttgcatataagatgcaaggctgttagagagataattagaactaatttgactgtaaacacaaatatattagtacaaaatatgtgacatagaaagtgataatttcttgggtagtttgcagttttaaaattatgtttaaaaatggactatcatctgcttaccgtaactttaaagtatttcgatttcttgactttatatatcttgtggaaaggac

SEQ ID NO: 1088 - DNA, 241 bp, synthetic construct
  misc_feature 1..241: note = Promoter
  source 1..241: mol_type = other DNA
gagggcctatttcccatgattccttcatatttgcatataagatgcaaggctgttagagagataattagaactaatttgactgtaaacacaaatatattagtacaaaatatgtgacatagaaagtgataatttcttgggtagtttgcagttttaaaattatgtttcaaaatggactatcatctgcttaccgtaactttaaagtatttcgatttcttgactttatatatcttgtggaaaggac

SEQ ID NO: 1089 - DNA, 241 bp, synthetic construct
  misc_feature 1..241: note = Promoter
  source 1..241: mol_type = other DNA
gagggcctatttcccatgattccttcatatttgcatataagatgcaaggctgttagagagataattagaactaatttgactgtaaacacaaatatattagtacaaaatatgtgacatagaaagtgataatttcttgggtagtttgcagttttaaaattatgtttgaaaatggactatcatctgcttaccgtaactttaaagtatttcgatttcttgactttatatatcttgtggaaaggac

SEQ ID NO: 1090 - DNA, 241 bp, synthetic construct
  misc_feature 1..241: note = Promoter
  source 1..241: mol_type = other DNA
gagggcctatttcccatgattccttcatatttgcatataagatgcaaggctgttagagagataattagaactaatttgactgtaaacacaaatatattagtacaaaatatgtgacatagaaagtgataatttcttgggtagtttgcagttttaaaattatgttttcaaatggactatcatctgcttaccgtaactttaaagtatttcgatttcttgactttatatatcttgtggaaaggac

SEQ ID NO: 1091 - DNA, 241 bp, synthetic construct
  misc_feature 1..241: note = Promoter
  source 1..241: mol_type = other DNA
gagggcctatttcccatgattccttcatatttgcatataagatgcaaggctgttagagagataattagaactaatttgactgtaaacacaaatatattagtacaaaatatgtgacatagaaagtgataatttcttgggtagtttgcagttttaaaattatgttttgaaatggactatcatctgcttaccgtaactttaaagtatttcgatttcttgactttatatatcttgtggaaaggac

SEQ ID NO: 1092 - DNA, 241 bp, synthetic construct
  misc_feature 1..241: note = Promoter
  source 1..241: mol_type = other DNA
gagggcctatttcccatgattccttcatatttgcatataagatgcaaggctgttagagagataattagaactaatttgactgtaaacacaaatatattagtacaaaatatgtgacatagaaagtgataatttcttgggtagtttgcagttttaaaattatgtttttaaatggactatcatctgcttaccgtaactttaaagtatttcgatttcttgactttatatatcttgtggaaaggac

SEQ ID NO: 1093 - DNA, 241 bp, synthetic construct
  misc_feature 1..241: note = Promoter
  source 1..241: mol_type = other DNA
gagggcctatttcccatgattccttcatatttgcatataagatgcaaggctgttagagagataattagaactaatttgactgtaaacacaaatatattagtacaaaatatgtgacatagaaagtgataatttcttgggtagtttgcagttttaaaattatgttttacaatggactatcatctgcttaccgtaactttaaagtatttcgatttcttgactttatatatcttgtggaaaggac

SEQ ID NO: 1094 - DNA, 241 bp, synthetic construct
  misc_feature 1..241: note = Promoter
  source 1..241: mol_type = other DNA
gagggcctatttcccatgattccttcatatttgcatataagatgcaaggctgttagagagataattagaactaatttgactgtaaacacaaatatattagtacaaaatatgtgacatagaaagtgataatttcttgggtagtttgcagttttaaaattatgttttagaatggactatcatctgcttaccgtaactttaaagtatttcgatttcttgactttatatatcttgtggaaaggac

SEQ ID NO: 1095 - DNA, 241 bp, synthetic construct
  misc_feature 1..241: note = Promoter
  source 1..241: mol_type = other DNA
gagggcctatttcccatgattccttcatatttgcatataagatgcaaggctgttagagagataattagaactaatttgactgtaaacacaaatatattagtacaaaatatgtgacatagaaagtgataatttcttgggtagtttgcagttttaaaattatgttttataatggactatcatctgcttaccgtaactttaaagtatttcgatttcttgactttatatatcttgtggaaaggac

SEQ ID NO: 1096 - DNA, 241 bp, synthetic construct
  misc_feature 1..241: note = Promoter
  source 1..241: mol_type = other DNA
gagggcctatttcccatgattccttcatatttgcatataagatgcaaggctgttagagagataattagaactaatttgactgtaaacacaaatatattagtacaaaatatgtgacatagaaagtgataatttcttgggtagtttgcagttttaaaattatgttttaacatggactatcatctgcttaccgtaactttaaagtatttcgatttcttgactttatatatcttgtggaaaggac

SEQ ID NO: 1097 - DNA, 241 bp, synthetic construct
  misc_feature 1..241: note = Promoter
  source 1..241: mol_type = other DNA
gagggcctatttcccatgattccttcatatttgcatataagatgcaaggctgttagagagataattagaactaatttgactgtaaacacaaatatattagtacaaaatatgtgacatagaaagtgataatttcttgggtagtttgcagttttaaaattatgttttaagatggactatcatctgcttaccgtaactttaaagtatttcgatttcttgactttatatatcttgtggaaaggac

SEQ ID NO: 1098 - DNA, 241 bp, synthetic construct
  misc_feature 1..241: note = Promoter
  source 1..241: mol_type = other DNA
gagggcctatttcccatgattccttcatatttgcatataagatgcaaggctgttagagagataattagaactaatttgactgtaaacacaaatatattagtacaaaatatgtgacatagaaagtgataatttcttgggtagtttgcagttttaaaattatgttttaatatggactatcatctgcttaccgtaactttaaagtatttcgatttcttgactttatatatcttgtggaaaggac

SEQ ID NO: 1099 - DNA, 241 bp, synthetic construct
  misc_feature 1..241: note = Promoter
  source 1..241: mol_type = other DNA
gagggcctatttcccatgattccttcatatttgcatataagatgcaaggctgttagagagataattagaactaatttgactgtaaacacaaatatattagtacaaaatatgtgacatagaaagtgataatttcttgggtagtttgcagttttaaaattatgttttaaactggactatcatctgcttaccgtaactttaaagtatttcgatttcttgactttatatatcttgtggaaaggac

SEQ ID NO: 1100 - DNA, 241 bp, synthetic construct
  misc_feature 1..241: note = Promoter
  source 1..241: mol_type = other DNA
gagggcctatttcccatgattccttcatatttgcatataagatgcaaggctgttagagagataattagaactaatttgactgtaaacacaaatatattagtacaaaatatgtgacatagaaagtgataatttcttgggtagtttgcagttttaaaattatgttttaaagtggactatcatctgcttaccgtaactttaaagtatttcgatttcttgactttatatatcttgtggaaaggac

SEQ ID NO: 1101 - DNA, 241 bp, synthetic construct
  misc_feature 1..241: note = Promoter
  source 1..241: mol_type = other DNA
gagggcctatttcccatgattccttcatatttgcatataagatgcaaggctgttagagagataattagaactaatttgactgtaaacacaaatatattagtacaaaatatgtgacatagaaagtgataatttcttgggtagtttgcagttttaaaattatgttttaaattggactatcatctgcttaccgtaactttaaagtatttcgatttcttgactttatatatcttgtggaaaggac

SEQ ID NO: 1102 - DNA, 241 bp, synthetic construct
  misc_feature 1..241: note = Promoter
  source 1..241: mol_type = other DNA
gagggcctatttcccatgattccttcatatttgcatataagatgcaaggctgttagagagataattagaactaatttgactgtaaacacaaatatattagtacaaaatatgtgacatagaaagtgataatttcttgggtagtttgcagttttaaaattatgttttaaaaaggactatcatctgcttaccgtaactttaaagtatttcgatttcttgactttatatatcttgtggaaaggac

SEQ ID NO: 1103 - DNA, 241 bp, synthetic construct
  misc_feature 1..241: note = Promoter
  source 1..241: mol_type = other DNA
gagggcctatttcccatgattccttcatatttgcatataagatgcaaggctgttagagagataattagaactaatttgactgtaaacacaaatatattagtacaaaatatgtgacatagaaagtgataatttcttgggtagtttgcagttttaaaattatgttttaaaacggactatcatctgcttaccgtaactttaaagtatttcgatttcttgactttatatatcttgtggaaaggac

SEQ ID NO: 1104 - DNA, 241 bp, synthetic construct
  misc_feature 1..241: note = Promoter
  source 1..241: mol_type = other DNA
gagggcctatttcccatgattccttcatatttgcatataagatgcaaggctgttagagagataattagaactaatttgactgtaaacacaaatatattagtacaaaatatgtgacatagaaagtgataatttcttgggtagtttgcagttttaaaattatgttttaaaagggactatcatctgcttaccgtaactttaaagtatttcgatttcttgactttatatatcttgtggaaaggac

SEQ ID NO: 1105 - DNA, 241 bp, synthetic construct
  misc_feature 1..241: note = Promoter
  source 1..241: mol_type = other DNA
gagggcctatttcccatgattccttcatatttgcatataagatgcaaggctgttagagagataattagaactaatttgactgtaaacacaaatatattagtacaaaatatgtgacatagaaagtgataatttcttgggtagtttgcagttttaaaattatgttttaaaatagactatcatctgcttaccgtaactttaaagtatttcgatttcttgactttatatatcttgtggaaaggac

SEQ ID NO: 1106 - DNA, 241 bp, synthetic construct
  misc_feature 1..241: note = Promoter
  source 1..241: mol_type = other DNA
gagggcctatttcccatgattccttcatatttgcatataagatgcaaggctgttagagagataattagaactaatttgactgtaaacacaaatatattagtacaaaatatgtgacatagaaagtgataatttcttgggtagtttgcagttttaaaattatgttttaaaatcgactatcatctgcttaccgtaactttaaagtatttcgatttcttgactttatatatcttgtggaaaggac

SEQ ID NO: 1107 - DNA, 241 bp, synthetic construct
  misc_feature 1..241: note = Promoter
  source 1..241: mol_type = other DNA
gagggcctatttcccatgattccttcatatttgcatataagatgcaaggctgttagagagataattagaactaatttgactgtaaacacaaatatattagtacaaaatatgtgacatagaaagtgataatttcttgggtagtttgcagttttaaaattatgttttaaaattgactatcatctgcttaccgtaactttaaagtatttcgatttcttgactttatatatcttgtggaaaggac

SEQ ID NO: 1108 - DNA, 241 bp, synthetic construct
  misc_feature 1..241: note = Promoter
  source 1..241: mol_type = other DNA
gagggcctatttcccatgattccttcatatttgcatataagatgcaaggctgttagagagataattagaactaatttgactgtaaacacaaatatattagtacaaaatatgtgacatagaaagtgataatttcttgggtagtttgcagttttaaaattatgttttaaaatgaactatcatctgcttaccgtaactttaaagtatttcgatttcttgactttatatatcttgtggaaaggac

SEQ ID NO: 1109 - DNA, 241 bp, synthetic construct
  misc_feature 1..241: note = Promoter
  source 1..241: mol_type = other DNA
gagggcctatttcccatgattccttcatatttgcatataagatgcaaggctgttagagagataattagaactaatttgactgtaaacacaaatatattagtacaaaatatgtgacatagaaagtgataatttcttgggtagtttgcagttttaaaattatgttttaaaatgcactatcatctgcttaccgtaactttaaagtatttcgatttcttgactttatatatcttgtggaaaggac

SEQ ID NO: 1110 - DNA, 241 bp, synthetic construct
  misc_feature 1..241: note = Promoter
  source 1..241: mol_type = other DNA
gagggcctatttcccatgattccttcatatttgcatataagatgcaaggctgttagagagataattagaactaatttgactgtaaacacaaatatattagtacaaaatatgtgacatagaaagtgataatttcttgggtagtttgcagttttaaaattatgttttaaaatgtactatcatctgcttaccgtaactttaaagtatttcgatttcttgactttatatatcttgtggaaaggac

SEQ ID NO: 1111 - DNA, 241 bp, synthetic construct
  misc_feature 1..241: note = Promoter
  source 1..241: mol_type = other DNA
gagggcctatttcccatgattccttcatatttgcatataagatgcaaggctgttagagagataattagaactaatttgactgtaaacacaaatatattagtacaaaatatgtgacatagaaagtgataatttcttgggtagtttgcagttttaaaattatgttttaaaatggcctatcatctgcttaccgtaactttaaagtatttcgatttcttgactttatatatcttgtggaaaggac

SEQ ID NO: 1112 - DNA, 241 bp, synthetic construct
  misc_feature 1..241: note = Promoter
  source 1..241: mol_type = other DNA
gagggcctatttcccatgattccttcatatttgcatataagatgcaaggctgttagagagataattagaactaatttgactgtaaacacaaatatattagtacaaaatatgtgacatagaaagtgataatttcttgggtagtttgcagttttaaaattatgttttaaaatgggctatcatctgcttaccgtaactttaaagtatttcgatttcttgactttatatatcttgtggaaaggac

SEQ ID NO: 1113 - DNA, 241 bp, synthetic construct
  misc_feature 1..241: note = Promoter
  source 1..241: mol_type = other DNA
gagggcctatttcccatgattccttcatatttgcatataagatgcaaggctgttagagagataattagaactaatttgactgtaaacacaaatatattagtacaaaatatgtgacatagaaagtgataatttcttgggtagtttgcagttttaaaattatgttttaaaatggtctatcatctgcttaccgtaactttaaagtatttcgatttcttgactttatatatcttgtggaaaggac

SEQ ID NO: 1114 - DNA, 241 bp, synthetic construct
  misc_feature 1..241: note = Promoter
  source 1..241: mol_type = other DNA
gagggcctatttcccatgattccttcatatttgcatataagatgcaaggctgttagagagataattagaactaatttgactgtaaacacaaatatattagtacaaaatatgtgacatagaaagtgataatttcttgggtagtttgcagttttaaaattatgttttaaaatggaatatcatctgcttaccgtaactttaaagtatttcgatttcttgactttatatatcttgtggaaaggac

SEQ ID NO: 1115 - DNA, 241 bp, synthetic construct
  misc_feature 1..241: note = Promoter
  source 1..241: mol_type = other DNA
gagggcctatttcccatgattccttcatatttgcatataagatgcaaggctgttagagagataattagaactaatttgactgtaaacacaaatatattagtacaaaatatgtgacatagaaagtgataatttcttgggtagtttgcagttttaaaattatgttttaaaatggagtatcatctgcttaccgtaactttaaagtatttcgatttcttgactttatatatcttgtggaaaggac

SEQ ID NO: 1116 - DNA, 241 bp, synthetic construct
  misc_feature 1..241: note = Promoter
  source 1..241: mol_type = other DNA
gagggcctatttcccatgattccttcatatttgcatataagatgcaaggctgttagagagataattagaactaatttgactgtaaacacaaatatattagtacaaaatatgtgacatagaaagtgataatttcttgggtagtttgcagttttaaaattatgttttaaaatggattatcatctgcttaccgtaactttaaagtatttcgatttcttgactttatatatcttgtggaaaggac

SEQ ID NO: 1117 - DNA, 241 bp, synthetic construct
  misc_feature 1..241: note = Promoter
  source 1..241: mol_type = other DNA
gagggcctatttcccatgattccttcatatttgcatataagatgcaaggctgttagagagataattagaactaatttgactgtaaacacaaatatattagtacaaaatatgtgacatagaaagtgataatttcttgggtagtttgcagttttaaaattatgttttaaaatggacaatcatctgcttaccgtaactttaaagtatttcgatttcttgactttatatatcttgtggaaaggac

SEQ ID NO: 1118 - DNA, 241 bp, synthetic construct
  misc_feature 1..241: note = Promoter
  source 1..241: mol_type = other DNA
gagggcctatttcccatgattccttcatatttgcatataagatgcaaggctgttagagagataattagaactaatttgactgtaaacacaaatatattagtacaaaatatgtgacatagaaagtgataatttcttgggtagtttgcagttttaaaattatgttttaaaatggaccatcatctgcttaccgtaactttaaagtatttcgatttcttgactttatatatcttgtggaaaggac

SEQ ID NO: 1119 - DNA, 241 bp, synthetic construct
  misc_feature 1..241: note = Promoter
  source 1..241: mol_type = other DNA
gagggcctatttcccatgattccttcatatttgcatataagatgcaaggctgttagagagataattagaactaatttgactgtaaacacaaatatattagtacaaaatatgtgacatagaaagtgataatttcttgggtagtttgcagttttaaaattatgttttaaaatggacgatcatctgcttaccgtaactttaaagtatttcgatttcttgactttatatatcttgtggaaaggac

SEQ ID NO: 1120 - DNA, 241 bp, synthetic construct
  misc_feature 1..241: note = Promoter
  source 1..241: mol_type = other DNA
gagggcctatttcccatgattccttcatatttgcatataagatgcaaggctgttagagagataattagaactaatttgactgtaaacacaaatatattagtacaaaatatgtgacatagaaagtgataatttcttgggtagtttgcagttttaaaattatgttttaaaatggactctcatctgcttaccgtaactttaaagtatttcgatttcttgactttatatatcttgtggaaaggac

SEQ ID NO: 1121 - DNA, 241 bp, synthetic construct
  misc_feature 1..241: note = Promoter
  source 1..241: mol_type = other DNA
gagggcctatttcccatgattccttcatatttgcatataagatgcaaggctgttagagagataattagaactaatttgactgtaaacacaaatatattagtacaaaatatgtgacatagaaagtgataatttcttgggtagtttgcagttttaaaattatgttttaaaatggactgtcatctgcttaccgtaactttaaagtatttcgatttcttgactttatatatcttgtggaaaggac

SEQ ID NO: 1122 - DNA, 241 bp, synthetic construct
  misc_feature 1..241: note = Promoter
  source 1..241: mol_type = other DNA
gagggcctatttcccatgattccttcatatttgcatataagatgcaaggctgttagagagataattagaactaatttgactgtaaacacaaatatattagtacaaaatatgtgacatagaaagtgataatttcttgggtagtttgcagttttaaaattatgttttaaaatggactttcatctgcttaccgtaactttaaagtatttcgatttcttgactttatatatcttgtggaaaggac

SEQ ID NO: 1123 - DNA, 241 bp, synthetic construct
  misc_feature 1..241: note = Promoter
  source 1..241: mol_type = other DNA
gagggcctatttcccatgattccttcatatttgcatataagatgcaaggctgttagagagataattagaactaatttgactgtaaacacaaatatattagtacaaaatatgtgacatagaaagtgataatttcttgggtagtttgcagttttaaaattatgttttaaaatggactaacatctgcttaccgtaactttaaagtatttcgatttcttgactttatatatcttgtggaaaggac

SEQ ID NO: 1124 - DNA, 241 bp, synthetic construct
  misc_feature 1..241: note = Promoter
  source 1..241: mol_type = other DNA
gagggcctatttcccatgattccttcatatttgcatataagatgcaaggctgttagagagataattagaactaatttgactgtaaacacaaatatattagtacaaaatatgtgacatagaaagtgataatttcttgggtagtttgcagttttaaaattatgttttaaaatggactaccatctgcttaccgtaactttaaagtatttcgatttcttgactttatatatcttgtggaaaggac

SEQ ID NO: 1125 - DNA, 241 bp, synthetic construct
  misc_feature 1..241: note = Promoter
  source 1..241: mol_type = other DNA
gagggcctatttcccatgattccttcatatttgcatataagatgcaaggctgttagagagataattagaactaatttgactgtaaacacaaatatattagtacaaaatatgtgacatagaaagtgataatttcttgggtagtttgcagttttaaaattatgttttaaaatggactagcatctgcttaccgtaactttaaagtatttcgatttcttgactttatatatcttgtggaaaggac

SEQ ID NO: 1126 - DNA, 241 bp, synthetic construct
  misc_feature 1..241: note = Promoter
  source 1..241: mol_type = other DNA
gagggcctatttcccatgattccttcatatttgcatataagatgcaaggctgttagagagataattagaactaatttgactgtaaacacaaatatattagtacaaaatatgtgacatagaaagtgataatttcttgggtagtttgcagttttaaaattatgttttaaaatggactataatctgcttaccgtaactttaaagtatttcgatttcttgactttatatatcttgtggaaaggac

SEQ ID NO: 1127 - DNA, 241 bp, synthetic construct
  misc_feature 1..241: note = Promoter
  source 1..241: mol_type = other DNA
gagggcctatttcccatgattccttcatatttgcatataagatgcaaggctgttagagagataattagaactaatttgactgtaaacacaaatatattagtacaaaatatgtgacatagaaagtgataatttcttgggtagtttgcagttttaaaattatgttttaaaatggactatgatctgcttaccgtaactttaaagtatttcgatttcttgactttatatatcttgtggaaaggac

SEQ ID NO: 1128 - DNA, 241 bp, synthetic construct
  misc_feature 1..241: note = Promoter
  source 1..241: mol_type = other DNA
gagggcctatttcccatgattccttcatatttgcatataagatgcaaggctgttagagagataattagaactaatttgactgtaaacacaaatatattagtacaaaatatgtgacatagaaagtgataatttcttgggtagtttgcagttttaaaattatgttttaaaatggactattatctgcttaccgtaactttaaagtatttcgatttcttgactttatatatcttgtggaaaggac

SEQ ID NO: 1129 - DNA, 241 bp, synthetic construct
  misc_feature 1..241: note = Promoter
  source 1..241: mol_type = other DNA
gagggcctatttcccatgattccttcatatttgcatataagatgcaaggctgttagagagataattagaactaatttgactgtaaacacaaatatattagtacaaaatatgtgacatagaaagtgataatttcttgggtagtttgcagttttaaaattatgttttaaaatggactatcctctgcttaccgtaactttaaagtatttcgatttcttgactttatatatcttgtggaaaggac

SEQ ID NO: 1130 - DNA, 241 bp, synthetic construct
  misc_feature 1..241: note = Promoter
  source 1..241: mol_type = other DNA
gagggcctatttcccatgattccttcatatttgcatataagatgcaaggctgttagagagataattagaactaatttgactgtaaacacaaatatattagtacaaaatatgtgacatagaaagtgataatttcttgggtagtttgcagttttaaaattatgttttaaaatggactatcgtctgcttaccgtaactttaaagtatttcgatttcttgactttatatatcttgtggaaaggac

SEQ ID NO: 1131 - DNA, 241 bp, synthetic construct
  misc_feature 1..241: note = Promoter
  source 1..241: mol_type = other DNA
gagggcctatttcccatgattccttcatatttgcatataagatgcaaggctgttagagagataattagaactaatttgactgtaaacacaaatatattagtacaaaatatgtgacatagaaagtgataatttcttgggtagtttgcagttttaaaattatgttttaaaatggactatcttctgcttaccgtaactttaaagtatttcgatttcttgactttatatatcttgtggaaaggac

SEQ ID NO: 1132 - DNA, 241 bp, synthetic construct
  misc_feature 1..241: note = Promoter
  source 1..241: mol_type = other DNA
gagggcctatttcccatgattccttcatatttgcatataagatgcaaggctgttagagagataattagaactaatttgactgtaaacacaaatatattagtacaaaatatgtgacatagaaagtgataatttcttgggtagtttgcagttttaaaattatgttttaaaatggactatcaactgcttaccgtaactttaaagtatttcgatttcttgactttatatatcttgtggaaaggac

SEQ ID NO: 1133 - DNA, 241 bp, synthetic construct
  misc_feature 1..241: note = Promoter
  source 1..241: mol_type = other DNA
gagggcctatttcccatgattccttcatatttgcatataagatgcaaggctgttagagagataattagaactaatttgactgtaaacacaaatatattagtacaaaatatgtgacatagaaagtgataatttcttgggtagtttgcagttttaaaattatgttttaaaatggactatcacctgcttaccgtaactttaaagtatttcgatttcttgactttatatatcttgtggaaaggac

SEQ ID NO: 1134 - DNA, 241 bp, synthetic construct
  misc_feature 1..241: note = Promoter
  source 1..241: mol_type = other DNA
gagggcctatttcccatgattccttcatatttgcatataagatgcaaggctgttagagagataattagaactaatttgactgtaaacacaaatatattagtacaaaatatgtgacatagaaagtgataatttcttgggtagtttgcagttttaaaattatgttttaaaatggactatcagctgcttaccgtaactttaaagtatttcgatttcttgactttatatatcttgtggaaaggac

SEQ ID NO: 1135 - DNA, 241 bp, synthetic construct
  misc_feature 1..241: note = Promoter
  source 1..241: mol_type = other DNA
gagggcctatttcccatgattccttcatatttgcatataagatgcaaggctgttagagagataattagaactaatttgactgtaaacacaaatatattagtacaaaatatgtgacatagaaagtgataatttcttgggtagtttgcagttttaaaattatgttttaaaatggactatcatatgcttaccgtaactttaaagtatttcgatttcttgactttatatatcttgtggaaaggac

SEQ ID NO: 1136 - DNA, 241 bp, synthetic construct
  misc_feature 1..241: note = Promoter
  source 1..241: mol_type = other DNA
gagggcctatttcccatgattccttcatatttgcatataagatgcaaggctgttagagagataattagaactaatttgactgtaaacacaaatatattagtacaaaatatgtgacatagaaagtgataatttcttgggtagtttgcagttttaaaattatgttttaaaatggactatcatgtgcttaccgtaactttaaagtatttcgatttcttgactttatatatcttgtggaaaggac

SEQ ID NO: 1137 - DNA, 241 bp, synthetic construct
  misc_feature 1..241: note = Promoter
  source 1..241: mol_type = other DNA
gagggcctatttcccatgattccttcatatttgcatataagatgcaaggctgttagagagataattagaactaatttgactgtaaacacaaatatattagtacaaaatatgtgacatagaaagtgataatttcttgggtagtttgcagttttaaaattatgttttaaaatggactatcatttgcttaccgtaactttaaagtatttcgatttcttgactttatatatcttgtggaaaggac

SEQ ID NO: 1138 - DNA, 241 bp, synthetic construct
  misc_feature 1..241: note = Promoter
  source 1..241: mol_type = other DNA
gagggcctatttcccatgattccttcatatttgcatataagatgcaaggctgttagagagataattagaactaatttgactgtaaacacaaatatattagtacaaaatatgtgacatagaaagtgataatttcttgggtagtttgcagttttaaaattatgttttaaaatggactatcatcagcttaccgtaactttaaagtatttcgatttcttgactttatatatcttgtggaaaggac

SEQ ID NO: 1139 - DNA, 241 bp, synthetic construct
  misc_feature 1..241: note = Promoter
  source 1..241: mol_type = other DNA
gagggcctatttcccatgattccttcatatttgcatataagatgcaaggctgttagagagataattagaactaatttgactgtaaacacaaatatattagtacaaaatatgtgacatagaaagtgataatttcttgggtagtttgcagttttaaaattatgttttaaaatggactatcatccgcttaccgtaactttaaagtatttcgatttcttgactttatatatcttgtggaaaggac

SEQ ID NO: 1140 - DNA, 241 bp, synthetic construct
  misc_feature 1..241: note = Promoter
  source 1..241: mol_type = other DNA
gagggcctatttcccatgattccttcatatttgcatataagatgcaaggctgttagagagataattagaactaatttgactgtaaacacaaatatattagtacaaaatatgtgacatagaaagtgataatttcttgggtagtttgcagttttaaaattatgttttaaaatggactatcatcggcttaccgtaactttaaagtatttcgatttcttgactttatatatcttgtggaaaggac

SEQ ID NO: 1141 - DNA, 241 bp, synthetic construct
  misc_feature 1..241: note = Promoter
  source 1..241: mol_type = other DNA
gagggcctatttcccatgattccttcatatttgcatataagatgcaaggctgttagagagataattagaactaatttgactgtaaacacaaatatattagtacaaaatatgtgacatagaaagtgataatttcttgggtagtttgcagttttaaaattatgttttaaaatggactatcatctacttaccgtaactttaaagtatttcgatttcttgactttatatatcttgtggaaaggac

SEQ ID NO: 1142 - DNA, 241 bp, synthetic construct
  misc_feature 1..241: note = Promoter
  source 1..241: mol_type = other DNA
gagggcctatttcccatgattccttcatatttgcatataagatgcaaggctgttagagagataattagaactaatttgactgtaaacacaaatatattagtacaaaatatgtgacatagaaagtgataatttcttgggtagtttgcagttttaaaattatgttttaaaatggactatcatctccttaccgtaactttaaagtatttcgatttcttgactttatatatcttgtggaaaggac

SEQ ID NO: 1143 - DNA, 241 bp, synthetic construct
  misc_feature 1..241: note = Promoter
  source 1..241: mol_type = other DNA
gagggcctatttcccatgattccttcatatttgcatataagatgcaaggctgttagagagataattagaactaatttgactgtaaacacaaatatattagtacaaaatatgtgacatagaaagtgataatttcttgggtagtttgcagttttaaaattatgttttaaaatggactatcatcttcttaccgtaactttaaagtatttcgatttcttgactttatatatcttgtggaaaggac

SEQ ID NO: 1144 - DNA, 241 bp, synthetic construct
  misc_feature 1..241: note = Promoter
  source 1..241: mol_type = other DNA
gagggcctatttcccatgattccttcatatttgcatataagatgcaaggctgttagagagataattagaactaatttgactgtaaacacaaatatattagtacaaaatatgtgacatagaaagtgataatttcttgggtagtttgcagttttaaaattatgttttaaaatggactatcatctgattaccgtaactttaaagtatttcgatttcttgactttatatatcttgtggaaaggac

SEQ ID NO: 1145 - DNA, 241 bp, synthetic construct
  misc_feature 1..241: note = Promoter
  source 1..241: mol_type = other DNA
gagggcctatttcccatgattccttcatatttgcatataagatgcaaggctgttagagagataattagaactaatttgactgtaaacacaaatatattagtacaaaatatgtgacatagaaagtgataatttcttgggtagtttgcagttttaaaattatgttttaaaatggactatcatctggttaccgtaactttaaagtatttcgatttcttgactttatatatcttgtggaaaggac

SEQ ID NO: 1146 - DNA, 241 bp, synthetic construct
  misc_feature 1..241: note = Promoter
  source 1..241: mol_type = other DNA
gagggcctatttcccatgattccttcatatttgcatataagatgcaaggctgttagagagataattagaactaatttgactgtaaacacaaatatattagtacaaaatatgtgacatagaaagtgataatttcttgggtagtttgcagttttaaaattatgttttaaaatggactatcatctgtttaccgtaactttaaagtatttcgatttcttgactttatatatcttgtggaaaggac

SEQ ID NO: 1147 - DNA, 241 bp, synthetic construct
  misc_feature 1..241: note = Promoter
  source 1..241: mol_type = other DNA
gagggcctatttcccatgattccttcatatttgcatataagatgcaaggctgttagagagataattagaactaatttgactgtaaacacaaatatattagtacaaaatatgtgacatagaaagtgataatttcttgggtagtttgcagttttaaaattatgttttaaaatggactatcatctgcataccgtaactttaaagtatttcgatttcttgactttatatatcttgtggaaaggac

SEQ ID NO: 1148 - DNA, 241 bp, synthetic construct
  misc_feature 1..241: note = Promoter
  source 1..241: mol_type = other DNA
gagggcctatttcccatgattccttcatatttgcatataagatgcaaggctgttagagagataattagaactaatttgactgtaaacacaaatatattagtacaaaatatgtgacatagaaagtgataatttcttgggtagtttgcagttttaaaattatgttttaaaatggactatcatctgcctaccgtaactttaaagtatttcgatttcttgactttatatatcttgtggaaaggac

SEQ ID NO: 1149 - DNA, 241 bp, synthetic construct
  misc_feature 1..241: note = Promoter
  source 1..241: mol_type = other DNA
gagggcctatttcccatgattccttcatatttgcatataagatgcaaggctgttagagagataattagaactaatttgactgtaaacacaaatatattagtacaaaatatgtgacatagaaagtgataatttcttgggtagtttgcagttttaaaattatgttttaaaatggactatcatctgcgtaccgtaactttaaagtatttcgatttcttgactttatatatcttgtggaaaggac

SEQ ID NO: 1150 - DNA, 241 bp, synthetic construct
  misc_feature 1..241: note = Promoter
  source 1..241: mol_type = other DNA
gagggcctatttcccatgattccttcatatttgcatataagatgcaaggctgttagagagataattagaactaatttgactgtaaacacaaatatattagtacaaaatatgtgacatagaaagtgataatttcttgggtagtttgcagttttaaaattatgttttaaaatggactatcatctgctaaccgtaactttaaagtatttcgatttcttgactttatatatcttgtggaaaggac

SEQ ID NO: 1151 - DNA, 241 bp, synthetic construct
  misc_feature 1..241: note = Promoter
  source 1..241: mol_type = other DNA
gagggcctatttcccatgattccttcatatttgcatataagatgcaaggctgttagagagataattagaactaatttgactgtaaacacaaatatattagtacaaaatatgtgacatagaaagtgataatttcttgggtagtttgcagttttaaaattatgttttaaaatggactatcatctgctcaccgtaactttaaagtatttcgatttcttgactttatatatcttgtggaaaggac

SEQ ID NO: 1152 - DNA, 241 bp, synthetic construct
  misc_feature 1..241: note = Promoter
  source 1..241: mol_type = other DNA
gagggcctatttcccatgattccttcatatttgcatataagatgcaaggctgttagagagataattagaactaatttgactgtaaacacaaatatattagtacaaaatatgtgacatagaaagtgataatttcttgggtagtttgcagttttaaaattatgttttaaaatggactatcatctgctgaccgtaactttaaagtatttcgatttcttgactttatatatcttgtggaaaggac

SEQ ID NO: 1153 - DNA, 241 bp, synthetic construct
  misc_feature 1..241: note = Promoter
  source 1..241: mol_type = other DNA
gagggcctatttcccatgattccttcatatttgcatataagatgcaaggctgttagagagataattagaactaatttgactgtaaacacaaatatattagtacaaaatatgtgacatagaaagtgataatttcttgggtagtttgcagttttaaaattatgttttaaaatggactatcatctgcttcccgtaactttaaagtatttcgatttcttgactttatatatcttgtggaaaggac

SEQ ID NO: 1154 - DNA, 241 bp, synthetic construct
  misc_feature 1..241: note = Promoter
  source 1..241: mol_type = other DNA
gagggcctatttcccatgattccttcatatttgcatataagatgcaaggctgttagagagataattagaactaatttgactgtaaacacaaatatattagtacaaaatatgtgacatagaaagtgataatttcttgggtagtttgcagttttaaaattatgttttaaaatggactatcatctgcttgccgtaactttaaagtatttcgatttcttgactttatatatcttgtggaaaggac

SEQ ID NO: 1155 - DNA, 241 bp, synthetic construct
  misc_feature 1..241: note = Promoter
  source 1..241: mol_type = other DNA
gagggcctatttcccatgattccttcatatttgcatataagatgcaaggctgttagagagataattagaactaatttgactgtaaacacaaatatattagtacaaaatatgtgacatagaaagtgataatttcttgggtagtttgcagttttaaaattatgttttaaaatggactatcatctgctttccgtaactttaaagtatttcgatttcttgactttatatatcttgtggaaaggac

SEQ ID NO: 1156 - DNA, 241 bp, synthetic construct
  misc_feature 1..241: note = Promoter
  source 1..241: mol_type = other DNA
gagggcctatttcccatgattccttcatatttgcatataagatgcaaggctgttagagagataattagaactaatttgactgtaaacacaaatatattagtacaaaatatgtgacatagaaagtgataatttcttgggtagtttgcagttttaaaattatgttttaaaatggactatcatctgcttaacgtaactttaaagtatttcgatttcttgactttatatatcttgtggaaaggac

SEQ ID NO: 1157 - DNA, 241 bp, synthetic construct
  misc_feature 1..241: note = Promoter
  source 1..241: mol_type = other DNA
gagggcctatttcccatgattccttcatatttgcatataagatgcaaggctgttagagagataattagaactaatttgactgtaaacacaaatatattagtacaaaatatgtgacatagaaagtgataatttcttgggtagtttgcagttttaaaattatgttttaaaatggactatcatctgcttagcgtaactttaaagtatttcgatttcttgactttatatatcttgtggaaaggac

SEQ ID NO: 1158 - DNA, 241 bp, synthetic construct
  misc_feature 1..241: note = Promoter
  source 1..241: mol_type = other DNA
gagggcctatttcccatgattccttcatatttgcatataagatgcaaggctgttagagagataattagaactaatttgactgtaaacacaaatatattagtacaaaatatgtgacatagaaagtgataatttcttgggtagtttgcagttttaaaattatgttttaaaatggactatcatctgcttatcgtaactttaaagtatttcgatttcttgactttatatatcttgtggaaaggac

SEQ ID NO: 1159 - DNA, 241 bp, synthetic construct
  misc_feature 1..241: note = Promoter
  source 1..241: mol_type = other DNA
gagggcctatttcccatgattccttcatatttgcatataagatgcaaggctgttagagagataattagaactaatttgactgtaaacacaaatatattagtacaaaatatgtgacatagaaagtgataatttcttgggtagtttgcagttttaaaattatgttttaaaatggactatcatctgcttacagtaactttaaagtatttcgatttcttgactttatatatcttgtggaaaggac

SEQ ID NO: 1160 - DNA, 241 bp, synthetic construct
  misc_feature 1..241: note = Promoter
  source 1..241: mol_type = other DNA
gagggcctatttcccatgattccttcatatttgcatataagatgcaaggctgttagagagataattagaactaatttgactgtaaacacaaatatattagtacaaaatatgtgacatagaaagtgataatttcttgggtagtttgcagttttaaaattatgttttaaaatggactatcatctgcttacggtaactttaaagtatttcgatttcttgactttatatatcttgtggaaaggac

SEQ ID NO: 1161 - DNA, 241 bp, synthetic construct
  misc_feature 1..241: note = Promoter
  source 1..241: mol_type = other DNA
gagggcctatttcccatgattccttcatatttgcatataagatgcaaggctgttagagagataattagaactaatttgactgtaaacacaaatatattagtacaaaatatgtgacatagaaagtgataatttcttgggtagtttgcagttttaaaattatgttttaaaatggactatcatctgcttactgtaactttaaagtatttcgatttcttgactttatatatcttgtggaaaggac

SEQ ID NO: 1162 - DNA, 241 bp, synthetic construct
  misc_feature 1..241: note = Promoter
  source 1..241: mol_type = other DNA
gagggcctatttcccatgattccttcatatttgcatataagatgcaaggctgttagagagataattagaactaatttgactgtaaacacaaatatattagtacaaaatatgtgacatagaaagtgataatttcttgggtagtttgcagttttaaaattatgttttaaaatggactatcatctgcttaccataactttaaagtatttcgatttcttgactttatatatcttgtggaaaggac

SEQ ID NO: 1163 - DNA, 241 bp, synthetic construct
  misc_feature 1..241: note = Promoter
  source 1..241: mol_type = other DNA
gagggcctatttcccatgattccttcatatttgcatataagatgcaaggctgttagagagataattagaactaatttgactgtaaacacaaatatattagtacaaaatatgtgacatagaaagtgataatttcttgggtagtttgcagttttaaaattatgttttaaaatggactatcatctgcttaccctaactttaaagtatttcgatttcttgactttatatatcttgtggaaaggac

SEQ ID NO: 1164 - DNA, 241 bp, synthetic construct
  misc_feature 1..241: note = Promoter
  source 1..241: mol_type = other DNA
gagggcctatttcccatgattccttcatatttgcatataagatgcaaggctgttagagagataattagaactaatttgactgtaaacacaaatatattagtacaaaatatgtgacatagaaagtgataatttcttgggtagtttgcagttttaaaattatgttttaaaatggactatcatctgcttaccttaactttaaagtatttcgatttcttgactttatatatcttgtggaaaggac

SEQ ID NO: 1165 - DNA, 241 bp, synthetic construct
  misc_feature 1..241: note = Promoter
  source 1..241: mol_type = other DNA
gagggcctatttcccatgattccttcatatttgcatataagatgcaaggctgttagagagataattagaactaatttgactgtaaacacaaatatattagtacaaaatatgtgacatagaaagtgataatttcttgggtagtttgcagttttaaaattatgttttaaaatggactatcatctgcttaccgaaactttaaagtatttcgatttcttgactttatatatcttgtggaaaggac

SEQ ID NO: 1166 - DNA, 241 bp, synthetic construct
  misc_feature 1..241: note = Promoter
  source 1..241: mol_type = other DNA
gagggcctatttcccatgattccttcatatttgcatataagatgcaaggctgttagagagataattagaactaatttgactgtaaacacaaatatattagtacaaaatatgtgacatagaaagtgataatttcttgggtagtttgcagttttaaaattatgttttaaaatggactatcatctgcttaccgcaactttaaagtatttcgatttcttgactttatatatcttgtggaaaggac

SEQ ID NO: 1167 - DNA, 241 bp, synthetic construct
  misc_feature 1..241: note = Promoter
  source 1..241: mol_type = other DNA
gagggcctatttcccatgattccttcatatttgcatataagatgcaaggctgttagagagataattagaactaatttgactgtaaacacaaatatattagtacaaaatatgtgacatagaaagtgataatttcttgggtagtttgcagttttaaaattatgttttaaaatggactatcatctgcttaccggaactttaaagtatttcgatttcttgactttatatatcttgtggaaaggac

SEQ ID NO: 1168 - DNA, 241 bp, synthetic construct
  misc_feature 1..241: note = Promoter
  source 1..241: mol_type = other DNA
gagggcctatttcccatgattccttcatatttgcatataagatgcaaggctgttagagagataattagaactaatttgactgtaaacacaaatatattagtacaaaatatgtgacatagaaagtgataatttcttgggtagtttgcagttttaaaattatgttttaaaatggactatcatctgcttaccgtcactttaaagtatttcgatttcttgactttatatatcttgtggaaaggac

SEQ ID NO: 1169 - DNA, 241 bp, synthetic construct
  misc_feature 1..241: note = Promoter
  source 1..241: mol_type = other DNA
gagggcctatttcccatgattccttcatatttgcatataagatgcaaggctgttagagagataattagaactaatttgactgtaaacacaaatatattagtacaaaatatgtgacatagaaagtgataatttcttgggtagtttgcagttttaaaattatgttttaaaatggactatcatctgcttaccgtgactttaaagtatttcgatttcttgactttatatatcttgtggaaaggac

SEQ ID NO: 1170 - DNA, 241 bp, synthetic construct
  misc_feature 1..241: note = Promoter
  source 1..241: mol_type = other DNA
gagggcctatttcccatgattccttcatatttgcatataagatgcaaggctgttagagagataattagaactaatttgactgtaaacacaaatatattagtacaaaatatgtgacatagaaagtgataatttcttgggtagtttgcagttttaaaattatgttttaaaatggactatcatctgcttaccgttactttaaagtatttcgatttcttgactttatatatcttgtggaaaggac

SEQ ID NO: 1171 - DNA, 241 bp, synthetic construct
  misc_feature 1..241: note = Promoter
  source 1..241: mol_type = other DNA
gagggcctatttcccatgattccttcatatttgcatataagatgcaaggctgttagagagataattagaactaatttgactgtaaacacaaatatattagtacaaaatatgtgacatagaaagtgataatttcttgggtagtttgcagttttaaaattatgttttaaaatggactatcatctgcttaccgtacctttaaagtatttcgatttcttgactttatatatcttgtggaaaggac

SEQ ID NO: 1172 - DNA, 241 bp, synthetic construct
  misc_feature 1..241: note = Promoter
  source 1..241: mol_type = other DNA
gagggcctatttcccatgattccttcatatttgcatataagatgcaaggctgttagagagataattagaactaatttgactgtaaacacaaatatattagtacaaaatatgtgacatagaaagtgataatttcttgggtagtttgcagttttaaaattatgttttaaaatggactatcatctgcttaccgtagctttaaagtatttcgatttcttgactttatatatcttgtggaaaggac

SEQ ID NO: 1173 - DNA, 241 bp, synthetic construct
  misc_feature 1..241: note = Promoter
  source 1..241: mol_type = other DNA
gagggcctatttcccatgattccttcatatttgcatataagatgcaaggctgttagagagataattagaactaatttgactgtaaacacaaatatattagtacaaaatatgtgacatagaaagtgataatttcttgggtagtttgcagttttaaaattatgttttaaaatggactatcatctgcttaccgtatctttaaagtatttcgatttcttgactttatatatcttgtggaaaggac

SEQ ID NO: 1174 - DNA, 241 bp, synthetic construct
  misc_feature 1..241: note = Promoter
  source 1..241: mol_type = other DNA
gagggcctatttcccatgattccttcatatttgcatataagatgcaaggctgttagagagataattagaactaatttgactgtaaacacaaatatattagtacaaaatatgtgacatagaaagtgataatttcttgggtagtttgcagttttaaaattatgttttaaaatggactatcatctgcttaccgtaaatttaaagtatttcgatttcttgactttatatatcttgtggaaaggac

SEQ ID NO: 1175 - DNA, 241 bp, synthetic construct
  misc_feature 1..241: note = Promoter
  source 1..241: mol_type = other DNA
gagggcctatttcccatgattccttcatatttgcatataagatgcaaggctgttagagagataattagaactaatttgactgtaaacacaaatatattagtacaaaatatgtgacatagaaagtgataatttcttgggtagtttgcagttttaaaattatgttttaaaatggactatcatctgcttaccgtaagtttaaagtatttcgatttcttgactttatatatcttgtggaaaggac

SEQ ID NO: 1176 - DNA, 241 bp, synthetic construct
  misc_feature 1..241: note = Promoter
  source 1..241: mol_type = other DNA
gagggcctatttcccatgattccttcatatttgcatataagatgcaaggctgttagagagataattagaactaatttgactgtaaacacaaatatattagtacaaaatatgtgacatagaaagtgataatttcttgggtagtttgcagttttaaaattatgttttaaaatggactatcatctgcttaccgtaattttaaagtatttcgatttcttgactttatatatcttgtggaaaggac

SEQ ID NO: 1177 - DNA, 241 bp, synthetic construct
  misc_feature 1..241: note = Promoter
  source 1..241: mol_type = other DNA
gagggcctatttcccatgattccttcatatttgcatataagatgcaaggctgttagagagataattagaactaatttgactgtaaacacaaatatattagtacaaaatatgtgacatagaaagtgataatttcttgggtagtttgcagttttaaaattatgttttaaaatggactatcatctgcttaccgtaacattaaagtatttcgatttcttgactttatatatcttgtggaaaggac

SEQ ID NO: 1178 - DNA, 241 bp, synthetic construct
  misc_feature 1..241: note = Promoter
  source 1..241: mol_type = other DNA
gagggcctatttcccatgattccttcatatttgcatataagatgcaaggctgttagagagataattagaactaatttgactgtaaacacaaatatattagtacaaaatatgtgacatagaaagtgataatttcttgggtagtttgcagttttaaaattatgttttaaaatggactatcatctgcttaccgtaaccttaaagtatttcgatttcttgactttatatatcttgtggaaaggac

SEQ ID NO: 1179 - DNA, 241 bp, synthetic construct
  misc_feature 1..241: note = Promoter
  source 1..241: mol_type = other DNA
gagggcctatttcccatgattccttcatatttgcatataagatgcaaggctgttagagagataattagaactaatttgactgtaaacacaaatatattagtacaaaatatgtgacatagaaagtgataatttcttgggtagtttgcagttttaaaattatgttttaaaatggactatcatctgcttaccgtaacgttaaagtatttcgatttcttgactttatatatcttgtggaaaggac

SEQ ID NO: 1180 - DNA, 241 bp, synthetic construct
  misc_feature 1..241: note = Promoter
  source 1..241: mol_type = other DNA
gagggcctatttcccatgattccttcatatttgcatataagatgcaaggctgttagagagataattagaactaatttgactgtaaacacaaatatattagtacaaaatatgtgacatagaaagtgataatttcttgggtagtttgcagttttaaaattatgttttaaaatggactatcatctgcttaccgtaactataaagtatttcgatttcttgactttatatatcttgtggaaaggac

SEQ ID NO: 1181 - DNA, 241 bp, synthetic construct
  misc_feature 1..241: note = Promoter
  source 1..241: mol_type = other DNA
gagggcctatttcccatgattccttcatatttgcatataagatgcaaggctgttagagagataattagaactaatttgactgtaaacacaaatatattagtacaaaatatgtgacatagaaagtgataatttcttgggtagtttgcagttttaaaattatgttttaaaatggactatcatctgcttaccgtaactctaaagtatttcgatttcttgactttatatatcttgtggaaaggac

SEQ ID NO: 1182 - DNA, 241 bp, synthetic construct
  misc_feature 1..241: note = Promoter
  source 1..241: mol_type = other DNA
gagggcctatttcccatgattccttcatatttgcatataagatgcaaggctgttagagagataattagaactaatttgactgtaaacacaaatatattagtacaaaatatgtgacatagaaagtgataatttcttgggtagtttgcagttttaaaattatgttttaaaatggactatcatctgcttaccgtaactgtaaagtatttcgatttcttgactttatatatcttgtggaaaggac

SEQ ID NO: 1183 - DNA, 241 bp, synthetic construct
  misc_feature 1..241: note = Promoter
  source 1..241: mol_type = other DNA
gagggcctatttcccatgattccttcatatttgcatataagatgcaaggctgttagagagataattagaactaatttgactgtaaacacaaatatattagtacaaaatatgtgacatagaaagtgataatttcttgggtagtttgcagttttaaaattatgttttaaaatggactatcatctgcttaccgtaacttaaaagtatttcgatttcttgactttatatatcttgtggaaaggac

SEQ ID NO: 1184 - DNA, 241 bp, synthetic construct
  misc_feature 1..241: note = Promoter
  source 1..241: mol_type = other DNA
gagggcctatttcccatgattccttcatatttgcatataagatgcaaggctgttagagagataattagaactaatttgactgtaaacacaaatatattagtacaaaatatgtgacatagaaagtgataatttcttgggtagtttgcagttttaaaattatgttttaaaatggactatcatctgcttaccgtaacttcaaagtatttcgatttcttgactttatatatcttgtggaaaggac

SEQ ID NO: 1185 - DNA, 241 bp, synthetic construct
  misc_feature 1..241: note = Promoter
  source 1..241: mol_type = other DNA
gagggcctatttcccatgattccttcatatttgcatataagatgcaaggctgttagagagataattagaactaatttgactgtaaacacaaatatattagtacaaaatatgtgacatagaaagtgataatttcttgggtagtttgcagttttaaaattatgttttaaaatggactatcatctgcttaccgtaacttgaaagtatttcgatttcttgactttatatatcttgtggaaaggac

SEQ ID NO: 1186 - DNA, 241 bp, synthetic construct
  misc_feature 1..241: note = Promoter
  source 1..241: mol_type = other DNA
gagggcctatttcccatgattccttcatatttgcatataagatgcaaggctgttagagagataattagaactaatttgactgtaaacacaaatatattagtacaaaatatgtgacatagaaagtgataatttcttgggtagtttgcagttttaaaattatgttttaaaatggactatcatctgcttaccgtaactttcaagtatttcgatttcttgactttatatatcttgtggaaaggac

SEQ ID NO: 1187 - DNA, 241 bp, synthetic construct
  misc_feature 1..241: note = Promoter
  source 1..241: mol_type = other DNA
gagggcctatttcccatgattccttcatatttgcatataagatgcaaggctgttagagagataattagaactaatttgactgtaaacacaaatatattagtacaaaatatgtgacatagaaagtgataatttcttgggtagtttgcagttttaaaattatgttttaaaatggactatcatctgcttaccgtaactttgaagtatttcgatttcttgactttatatatcttgtggaaaggac

SEQ ID NO: 1188 - DNA, 241 bp, synthetic construct
  misc_feature 1..241: note = Promoter
  source 1..241: mol_type = other DNA
gagggcctatttcccatgattccttcatatttgcatataagatgcaaggctgttagagagataattagaactaatttgactgtaaacacaaatatattagtacaaaatatgtgacatagaaagtgataatttcttgggtagtttgcagttttaaaattatgttttaaaatggactatcatctgcttaccgtaacttttaagtatttcgatttcttgactttatatatcttgtggaaaggac

SEQ ID NO: 1189 - DNA, 241 bp, synthetic construct
  misc_feature 1..241: note = Promoter
  source 1..241: mol_type = other DNA
gagggcctatttcccatgattccttcatatttgcatataagatgcaaggctgttagagagataattagaactaatttgactgtaaacacaaatatattagtacaaaatatgtgacatagaaagtgataatttcttgggtagtttgcagttttaaaattatgttttaaaatggactatcatctgcttaccgtaactttacagtatttcgatttcttgactttatatatcttgtggaaaggac

SEQ ID NO: 1190 - DNA, 241 bp, synthetic construct
  misc_feature 1..241: note = Promoter
  source 1..241: mol_type = other DNA
gagggcctatttcccatgattccttcatatttgcatataagatgcaaggctgttagagagataattagaactaatttgactgtaaacacaaatatattagtacaaaatatgtgacatagaaagtgataatttcttgggtagtttgcagttttaaaattatgttttaaaatggactatcatctgcttaccgtaactttagagtatttcgatttcttgactttatatatcttgtggaaaggac

SEQ ID NO: 1191 - DNA, 241 bp, synthetic construct
  misc_feature 1..241: note = Promoter
  source 1..241: mol_type = other DNA
gagggcctatttcccatgattccttcatatttgcatataagatgcaaggctgttagagagataattagaactaatttgactgtaaacacaaatatattagtacaaaatatgtgacatagaaagtgataatttcttgggtagtttgcagttttaaaattatgttttaaaatggactatcatctgcttaccgtaactttatagtatttcgatttcttgactttatatatcttgtggaaaggac

SEQ ID NO: 1192 - DNA, 241 bp, synthetic construct
  misc_feature 1..241: note = Promoter
  source 1..241: mol_type = other DNA
gagggcctatttcccatgattccttcatatttgcatataagatgcaaggctgttagagagataattagaactaatttgactgtaaacacaaatatattagtacaaaatatgtgacatagaaagtgataatttcttgggtagtttgcagttttaaaattatgttttaaaatggactatcatctgcttaccgtaactttaacgtatttcgatttcttgactttatatatcttgtggaaaggac

SEQ ID NO: 1193 - DNA, 241 bp, synthetic construct
  misc_feature 1..241: note = Promoter
  source 1..241: mol_type = other DNA
gagggcctatttcccatgattccttcatatttgcatataagatgcaaggctgttagagagataattagaactaatttgactgtaaacacaaatatattagtacaaaatatgtgacatagaaagtgataatttcttgggtagtttgcagttttaaaattatgttttaaaatggactatcatctgcttaccgtaactttaaggtatttcgatttcttgactttatatatcttgtggaaaggac

SEQ ID NO: 1194 - DNA, 241 bp, synthetic construct
  misc_feature 1..241: note = Promoter
  source 1..241: mol_type = other DNA
gagggcctatttcccatgattccttcatatttgcatataagatgcaaggctgttagagagataattagaactaatttgactgtaaacacaaatatattagtacaaaatatgtgacatagaaagtgataatttcttgggtagtttgcagttttaaaattatgttttaaaatggactatcatctgcttaccgtaactttaatgtatttcgatttcttgactttatatatcttgtggaaaggac

SEQ ID NO: 1195 - DNA, 241 bp, synthetic construct
  misc_feature 1..241: note = Promoter
  source 1..241: mol_type = other DNA
gagggcctatttcccatgattccttcatatttgcatataagatgcaaggctgttagagagataattagaactaatttgactgtaaacacaaatatattagtacaaaatatgtgacatagaaagtgataatttcttgggtagtttgcagttttaaaattatgttttaaaatggactatcatctgcttaccgtaactttaaaatatttcgatttcttgactttatatatcttgtggaaaggac

SEQ ID NO: 1196 - DNA, 241 bp, synthetic construct
  misc_feature 1..241: note = Promoter
  source 1..241: mol_type = other DNA
gagggcctatttcccatgattccttcatatttgcatataagatgcaaggctgttagagagataattagaactaatttgactgtaaacacaaatatattagtacaaaatatgtgacatagaaagtgataatttcttgggtagtttgcagttttaaaattatgttttaaaatggactatcatctgcttaccgtaactttaaactatttcgatttcttgactttatatatcttgtggaaaggac

SEQ ID NO: 1197 - DNA, 241 bp, synthetic construct
  misc_feature 1..241: note = Promoter
  source 1..241: mol_type = other DNA
gagggcctatttcccatgattccttcatatttgcatataagatgcaaggctgttagagagataattagaactaatttgactgtaaacacaaatatattagtacaaaatatgtgacatagaaagtgataatttcttgggtagtttgcagttttaaaattatgttttaaaatggactatcatctgcttaccgtaactttaaattatttcgatttcttgactttatatatcttgtggaaaggac

SEQ ID NO: 1198 - DNA, 241 bp, synthetic construct
  misc_feature 1..241: note = Promoter
  source 1..241: mol_type = other DNA
gagggcctatttcccatgattccttcatatttgcatataagatgcaaggctgttagagagataattagaactaatttgactgtaaacacaaatatattagtacaaaatatgtgacatagaaagtgataatttcttgggtagtttgcagttttaaaattatgttttaaaatggactatcatctgcttaccgtaactttaaagaatttcgatttcttgactttatatatcttgtggaaaggac

SEQ ID NO: 1199 - DNA, 241 bp, synthetic construct
  misc_feature 1..241: note = Promoter
  source 1..241: mol_type = other DNA
gagggcctatttcccatgattccttcatatttgcatataagatgcaaggctgttagagagataattagaactaatttgactgtaaacacaaatatattagtacaaaatatgtgacatagaaagtgataatttcttgggtagtttgcagttttaaaattatgttttaaaatggactatcatctgcttaccgtaactttaaagcatttcgatttcttgactttatatatcttgtggaaaggac

SEQ ID NO: 1200 - DNA, 241 bp, synthetic construct
  misc_feature 1..241: note = Promoter
  source 1..241: mol_type = other DNA
gagggcctatttcccatgattccttcatatttgcatataagatgcaaggctgttagagagataattagaactaatttgactgtaaacacaaatatattagtacaaaatatgtgacatagaaagtgataatttcttgggtagtttgcagttttaaaattatgttttaaaatggactatcatctgcttaccgtaactttaaaggatttcgatttcttgactttatatatcttgtggaaaggac

SEQ ID NO: 1201 - DNA, 241 bp, synthetic construct
  misc_feature 1..241: note = Promoter
  source 1..241: mol_type = other DNA
gagggcctatttcccatgattccttcatatttgcatataagatgcaaggctgttagagagataattagaactaatttgactgtaaacacaaatatattagtacaaaatatgtgacatagaaagtgataatttcttgggtagtttgcagttttaaaattatgttttaaaatggactatcatctgcttaccgtaactttaaagtctttcgatttcttgactttatatatcttgtggaaaggac

SEQ ID NO: 1202 - DNA, 241 bp, synthetic construct
  misc_feature 1..241: note = Promoter
  source 1..241: mol_type = other DNA
gagggcctatttcccatgattccttcatatttgcatataagatgcaaggctgttagagagataattagaactaatttgactgtaaacacaaatatattagtacaaaatatgtgacatagaaagtgataatttcttgggtagtttgcagttttaaaattatgttttaaaatggactatcatctgcttaccgtaactttaaagtgtttcgatttcttgactttatatatcttgtggaaaggac

SEQ ID NO: 1203 - DNA, 241 bp, synthetic construct
  misc_feature 1..241: note = Promoter
  source 1..241: mol_type = other DNA
gagggcctatttcccatgattccttcatatttgcatataagatgcaaggctgttagagagataattagaactaatttgactgtaaacacaaatatattagtacaaaatatgtgacatagaaagtgataatttcttgggtagtttgcagttttaaaattatgttttaaaatggactatcatctgcttaccgtaactttaaagtttttcgatttcttgactttatatatcttgtggaaaggac

SEQ ID NO: 1204 - DNA, 241 bp, synthetic construct
  misc_feature 1..241: note = Promoter
  source 1..241: mol_type = other DNA
gagggcctatttcccatgattccttcatatttgcatataagatgcaaggctgttagagagataattagaactaatttgactgtaaacacaaatatattagtacaaaatatgtgacatagaaagtgataatttcttgggtagtttgcagttttaaaattatgttttaaaatggactatcatctgcttaccgtaactttaaagtaattcgatttcttgactttatatatcttgtggaaaggac

SEQ ID NO: 1205 - DNA, 241 bp, synthetic construct
  misc_feature 1..241: note = Promoter
  source 1..241: mol_type = other DNA
gagggcctatttcccatgattccttcatatttgcatataagatgcaaggctgttagagagataattagaactaatttgactgtaaacacaaatatattagtacaaaatatgtgacatagaaagtgataatttcttgggtagtttgcagttttaaaattatgttttaaaatggactatcatctgcttaccgtaactttaaagtacttcgatttcttgactttatatatcttgtggaaaggac

SEQ ID NO: 1206 - DNA, 241 bp, synthetic construct
  misc_feature 1..241: note = Promoter
  source 1..241: mol_type = other DNA
gagggcctatttcccatgattccttcatatttgcatataagatgcaaggctgttagagagataattagaactaatttgactgtaaacacaaatatattagtacaaaatatgtgacatagaaagtgataatttcttgggtagtttgcagttttaaaattatgttttaaaatggactatcatctgcttaccgtaactttaaagtagttcgatttcttgactttatatatcttgtggaaaggac

SEQ ID NO: 1207 - DNA, 241 bp, synthetic construct
  misc_feature 1..241: note = Promoter
  source 1..241: mol_type = other DNA
gagggcctatttcccatgattccttcatatttgcatataagatgcaaggctgttagagagataattagaactaatttgactgtaaacacaaatatattagtacaaaatatgtgacatagaaagtgataatttcttgggtagtttgcagttttaaaattatgttttaaaatggactatcatctgcttaccgtaactttaaagtatatcgatttcttgactttatatatcttgtggaaaggac

SEQ ID NO: 1208 - DNA, 241 bp, synthetic construct
  misc_feature 1..241: note = Promoter
  source 1..241: mol_type = other DNA
gagggcctatttcccatgattccttcatatttgcatataagatgcaaggctgttagagagataattagaactaatttgactgtaaacacaaatatattagtacaaaatatgtgacatagaaagtgataatttcttgggtagtttgcagttttaaaattatgttttaaaatggactatcatctgcttaccgtaactttaaagtatctcgatttcttgactttatatatcttgtggaaaggac

SEQ ID NO: 1209 - DNA, 241 bp, synthetic construct
  misc_feature 1..241: note = Promoter
  source 1..241: mol_type = other DNA
gagggcctatttcccatgattccttcatatttgcatataagatgcaaggctgttagagagataattagaactaatttgactgtaaacacaaatatattagtacaaaatatgtgacatagaaagtgataatttcttgggtagtttgcagttttaaaattatgttttaaaatggactatcatctgcttaccgtaactttaaagtatgtcgatttcttgactttatatatcttgtggaaaggac

SEQ ID NO: 1210 - DNA, 241 bp, synthetic construct
  misc_feature 1..241: note = Promoter
  source 1..241: mol_type = other DNA
gagggcctatttcccatgattccttcatatttgcatataagatgcaaggctgttagagagataattagaactaatttgactgtaaacacaaatatattagtacaaaatatgtgacatagaaagtgataatttcttgggtagtttgcagttttaaaattatgttttaaaatggactatcatctgcttaccgtaactttaaagtattacgatttcttgactttatatatcttgtggaaaggac

SEQ ID NO: 1211 - DNA, 241 bp, synthetic construct
  misc_feature 1..241: note = Promoter
  source 1..241: mol_type = other DNA
gagggcctatttcccatgattccttcatatttgcatataagatgcaaggctgttagagagataattagaactaatttgactgtaaacacaaatatattagtacaaaatatgtgacatagaaagtgataatttcttgggtagtttgcagttttaaaattatgttttaaaatggactatcatctgcttaccgtaactttaaagtattccgatttcttgactttatatatcttgtggaaaggac

SEQ ID NO: 1212 - DNA, 241 bp, synthetic construct
  misc_feature 1..241: note = Promoter
  source 1..241: mol_type = other DNA
gagggcctatttcccatgattccttcatatttgcatataagatgcaaggctgttagagagataattagaactaatttgactgtaaacacaaatatattagtacaaaatatgtgacatagaaagtgataatttcttgggtagtttgcagttttaaaattatgttttaaaatggactatcatctgcttaccgtaactttaaagtattgcgatttcttgactttatatatcttgtggaaaggac

SEQ ID NO: 1213 - DNA, 241 bp, synthetic construct
  misc_feature 1..241: note = Promoter
  source 1..241: mol_type = other DNA
gagggcctatttcccatgattccttcatatttgcatataagatgcaaggctgttagagagataattagaactaatttgactgtaaacacaaatatattagtacaaaatatgtgacatagaaagtgataatttcttgggtagtttgcagttttaaaattatgttttaaaatggactatcatctgcttaccgtaactttaaagtatttagatttcttgactttatatatcttgtggaaaggac

SEQ ID NO: 1214 - DNA, 241 bp, synthetic construct
  misc_feature 1..241: note = Promoter
  source 1..241: mol_type = other DNA
gagggcctatttcccatgattccttcatatttgcatataagatgcaaggctgttagagagataattagaactaatttgactgtaaacacaaatatattagtacaaaatatgtgacatagaaagtgataatttcttgggtagtttgcagttttaaaattatgttttaaaatggactatcatctgcttaccgtaactttaaagtatttggatttcttgactttatatatcttgtggaaaggac

SEQ ID NO: 1215 - DNA, 241 bp, synthetic construct
  misc_feature 1..241: note = Promoter
  source 1..241: mol_type = other DNA
gagggcctatttcccatgattccttcatatttgcatataagatgcaaggctgttagagagataattagaactaatttgactgtaaacacaaatatattagtacaaaatatgtgacatagaaagtgataatttcttgggtagtttgcagttttaaaattatgttttaaaatggactatcatctgcttaccgtaactttaaagtattttgatttcttgactttatatatcttgtggaaaggac

SEQ ID NO: 1216 - DNA, 241 bp, synthetic construct
  misc_feature 1..241: note = Promoter
  source 1..241: mol_type = other DNA
gagggcctatttcccatgattccttcatatttgcatataagatgcaaggctgttagagagataattagaactaatttgactgtaaacacaaatatattagtacaaaatatgtgacatagaaagtgataatttcttgggtagtttgcagttttaaaattatgttttaaaatggactatcatctgcttaccgtaactttaaagtatttcaatttcttgactttatatatcttgtggaaaggac

SEQ ID NO: 1217 - DNA, 241 bp, synthetic construct
  misc_feature 1..241: note = Promoter
  source 1..241: mol_type = other DNA
gagggcctatttcccatgattccttcatatttgcatataagatgcaaggctgttagagagataattagaactaatttgactgtaaacacaaatatattagtacaaaatatgtgacatagaaagtgataatttcttgggtagtttgcagttttaaaattatgttttaaaatggactatcatctgcttaccgtaactttaaagtatttccatttcttgactttatatatcttgtggaaaggac

SEQ ID NO: 1218 - DNA, 241 bp, synthetic construct
  misc_feature 1..241: note = Promoter
  source 1..241: mol_type = other DNA
gagggcctatttcccatgattccttcatatttgcatataagatgcaaggctgttagagagataattagaactaatttgactgtaaacacaaatatattagtacaaaatatgtgacatagaaagtgataatttcttgggtagtttgcagttttaaaattatgttttaaaatggactatcatctgcttaccgtaactttaaagtatttctatttcttgactttatatatcttgtggaaaggac

SEQ ID NO: 1219 - DNA, 241 bp, synthetic construct
  misc_feature 1..241: note = Promoter
  source 1..241: mol_type = other DNA
gagggcctatttcccatgattccttcatatttgcatataagatgcaaggctgttagagagataattagaactaatttgactgtaaacacaaatatattagtacaaaatatgtgacatagaaagtgataatttcttgggtagtttgcagttttaaaattatgttttaaaatggactatcatctgcttaccgtaactttaaagtatttcgctttcttgactttatatatcttgtggaaaggac

SEQ ID NO: 1220 - DNA, 241 bp, synthetic construct
  misc_feature 1..241: note = Promoter
  source 1..241: mol_type = other DNA
gagggcctatttcccatgattccttcatatttgcatataagatgcaaggctgttagagagataattagaactaatttgactgtaaacacaaatatattagtacaaaatatgtgacatagaaagtgataatttcttgggtagtttgcagttttaaaattatgttttaaaatggactatcatctgcttaccgtaactttaaagtatttcggtttcttgactttatatatcttgtggaaaggac

SEQ ID NO: 1221 - DNA, 241 bp, synthetic construct
  misc_feature 1..241: note = Promoter
  source 1..241: mol_type = other DNA
gagggcctatttcccatgattccttcatatttgcatataagatgcaaggctgttagagagataattagaactaatttgactgtaaacacaaatatattagtacaaaatatgtgacatagaaagtgataatttcttgggtagtttgcagttttaaaattatgttttaaaatggactatcatctgcttaccgtaactttaaagtatttcgttttcttgactttatatatcttgtggaaaggac

SEQ ID NO: 1222 - DNA, 241 bp, synthetic construct
  misc_feature 1..241: note = Promoter
  source 1..241: mol_type = other DNA
gagggcctatttcccatgattccttcatatttgcatataagatgcaaggctgttagagagataattagaactaatttgactgtaaacacaaatatattagtacaaaatatgtgacatagaaagtgataatttcttgggtagtttgcagttttaaaattatgttttaaaatggactatcatctgcttaccgtaactttaaagtatttcgaattcttgactttatatatcttgtggaaaggac

SEQ ID NO: 1223 - DNA, 241 bp, synthetic construct
  misc_feature 1..241: note = Promoter
  source 1..241: mol_type = other DNA
gagggcctatttcccatgattccttcatatttgcatataagatgcaaggctgttagagagataattagaactaatttgactgtaaacacaaatatattagtacaaaatatgtgacatagaaagtgataatttcttgggtagtttgcagttttaaaattatgttttaaaatggactatcatctgcttaccgtaactttaaagtatttcgacttcttgactttatatatcttgtggaaaggac

SEQ ID NO: 1224 - DNA, 241 bp, synthetic construct
  misc_feature 1..241: note = Promoter
  source 1..241: mol_type = other DNA
gagggcctatttcccatgattccttcatatttgcatataagatgcaaggctgttagagagataattagaactaatttgactgtaaacacaaatatattagtacaaaatatgtgacatagaaagtgataatttcttgggtagtttgcagttttaaaattatgttttaaaatggactatcatctgcttaccgtaactttaaagtatttcgagttcttgactttatatatcttgtggaaaggac

SEQ ID NO: 1225 - DNA, 241 bp, synthetic construct
  misc_feature 1..241: note = Promoter
  source 1..241: mol_type = other DNA
gagggcctatttcccatgattccttcatatttgcatataagatgcaaggctgttagagagataattagaactaatttgactgtaaacacaaatatattagtacaaaatatgtgacatagaaagtgataatttcttgggtagtttgcagttttaaaattatgttttaaaatggactatcatctgcttaccgtaactttaaagtatttcgatatcttgactttatatatcttgtggaaaggac

SEQ ID NO: 1226 - DNA, 241 bp, synthetic construct
  misc_feature 1..241: note = Promoter
  source 1..241: mol_type = other DNA
gagggcctatttcccatgattccttcatatttgcatataagatgcaaggctgttagagagataattagaactaatttgactgtaaacacaaatatattagtacaaaatatgtgacatagaaagtgataatttcttgggtagtttgcagttttaaaattatgttttaaaatggactatcatctgcttaccgtaactttaaagtatttcgatctcttgactttatatatcttgtggaaaggac

SEQ ID NO: 1227 - DNA, 241 bp, synthetic construct
  misc_feature 1..241: note = Promoter
  source 1..241: mol_type = other DNA
gagggcctatttcccatgattccttcatatttgcatataagatgcaaggctgttagagagataattagaactaatttgactgtaaacacaaatatattagtacaaaatatgtgacatagaaagtgataatttcttgggtagtttgcagttttaaaattatgttttaaaatggactatcatctgcttaccgtaactttaaagtatttcgatgtcttgactttatatatcttgtggaaaggac

SEQ ID NO: 1228 - DNA, 241 bp, synthetic construct
  misc_feature 1..241: note = Promoter
  source 1..241: mol_type = other DNA
gagggcctatttcccatgattccttcatatttgcatataagatgcaaggctgttagagagataattagaactaatttgactgtaaacacaaatatattagtacaaaatatgtgacatagaaagtgataatttcttgggtagtttgcagttttaaaattatgttttaaaatggactatcatctgcttaccgtaactttaaagtatttcgattacttgactttatatatcttgtggaaaggac

SEQ ID NO: 1229 - DNA, 241 bp, synthetic construct
  misc_feature 1..241: note = Promoter
  source 1..241: mol_type = other DNA
gagggcctatttcccatgattccttcatatttgcatataagatgcaaggctgttagagagataattagaactaatttgactgtaaacacaaatatattagtacaaaatatgtgacatagaaagtgataatttcttgggtagtttgcagttttaaaattatgttttaaaatggactatcatctgcttaccgtaactttaaagtatttcgattccttgactttatatatcttgtggaaaggac

SEQ ID NO: 1230 - DNA, 241 bp, synthetic construct
  misc_feature 1..241: note = Promoter
  source 1..241: mol_type = other DNA
gagggcctatttcccatgattccttcatatttgcatataagatgcaaggctgttagagagataattagaactaatttgactgtaaacacaaatatattagtacaaaatatgtgacatagaaagtgataatttcttgggtagtttgcagttttaaaattatgttttaaaatggactatcatctgcttaccgtaactttaaagtatttcgattgcttgactttatatatcttgtggaaaggac

SEQ ID NO: 1231 - DNA, 241 bp, synthetic construct
  misc_feature 1..241: note = Promoter
  source 1..241: mol_type = other DNA
gagggcctatttcccatgattccttcatatttgcatataagatgcaaggctgttagagagataattagaactaatttgactgtaaacacaaatatattagtacaaaatatgtgacatagaaagtgataatttcttgggtagtttgcagttttaaaattatgttttaaaatggactatcatctgcttaccgtaactttaaagtatttcgatttattgactttatatatcttgtggaaaggac

SEQ ID NO: 1232 - DNA, 241 bp, synthetic construct
  misc_feature 1..241: note = Promoter
  source 1..241: mol_type = other DNA
gagggcctatttcccatgattccttcatatttgcatataagatgcaaggctgttagagagataattagaactaatttgactgtaaacacaaatatattagtacaaaatatgtgacatagaaagtgataatttcttgggtagtttgcagttttaaaattatgttttaaaatggactatcatctgcttaccgtaactttaaagtatttcgatttgttgactttatatatcttgtggaaaggac

SEQ ID NO: 1233 - DNA, 241 bp, synthetic construct
  misc_feature 1..241: note = Promoter
  source 1..241: mol_type = other DNA
gagggcctatttcccatgattccttcatatttgcatataagatgcaaggctgttagagagataattagaactaatttgactgtaaacacaaatatattagtacaaaatatgtgacatagaaagtgataatttcttgggtagtttgcagttttaaaattatgttttaaaatggactatcatctgcttaccgtaactttaaagtatttcgattttttgactttatatatcttgtggaaaggac

SEQ ID NO: 1234 - DNA, 241 bp, synthetic construct
  misc_feature 1..241: note = Promoter
  source 1..241: mol_type = other DNA
gagggcctatttcccatgattccttcatatttgcatataagatgcaaggctgttagagagataattagaactaatttgactgtaaacacaaatatattagtacaaaatatgtgacatagaaagtgataatttcttgggtagtttgcagttttaaaattatgttttaaaatggactatcatctgcttaccgtaactttaaagtatttcgatttcatgactttatatatcttgtggaaaggac

SEQ ID NO: 1235 - DNA, 241 bp, synthetic construct
  misc_feature 1..241: note = Promoter
  source 1..241: mol_type = other DNA
gagggcctatttcccatgattccttcatatttgcatataagatgcaaggctgttagagagataattagaactaatttgactgtaaacacaaatatattagtacaaaatatgtgacatagaaagtgataatttcttgggtagtttgcagttttaaaattatgttttaaaatggactatcatctgcttaccgtaactttaaagtatttcgatttcctgactttatatatcttgtggaaaggac

SEQ ID NO: 1236 - DNA, 241 bp, synthetic construct
  misc_feature 1..241: note = Promoter
  source 1..241: mol_type = other DNA
gagggcctatttcccatgattccttcatatttgcatataagatgcaaggctgttagagagataattagaactaatttgactgtaaacacaaatatattagtacaaaatatgtgacatagaaagtgataatttcttgggtagtttgcagttttaaaattatgttttaaaatggactatcatctgcttaccgtaactttaaagtatttcgatttcgtgactttatatatcttgtggaaaggac

SEQ ID NO: 1237 - DNA, 241 bp, synthetic construct
  misc_feature 1..241: note = Promoter
  source 1..241: mol_type = other DNA
gagggcctatttcccatgattccttcatatttgcatataagatgcaaggctgttagagagataattagaactaatttgactgtaaacacaaatatattagtacaaaatatgtgacatagaaagtgataatttcttgggtagtttgcagttttaaaattatgttttaaaatggactatcatctgcttaccgtaactttaaagtatttcgatttctagactttatatatcttgtggaaaggac

SEQ ID NO: 1238 - DNA, 241 bp, synthetic construct
  misc_feature 1..241: note = Promoter
  source 1..241: mol_type = other DNA
gagggcctatttcccatgattccttcatatttgcatataagatgcaaggctgttagagagataattagaactaatttgactgtaaacacaaatatattagtacaaaatatgtgacatagaaagtgataatttcttgggtagtttgcagttttaaaattatgttttaaaatggactatcatctgcttaccgtaactttaaagtatttcgatttctcgactttatatatcttgtggaaaggac

SEQ ID NO: 1239 - DNA, 241 bp, synthetic construct
  misc_feature 1..241: note = Promoter
  source 1..241: mol_type = other DNA
gagggcctatttcccatgattccttcatatttgcatataagatgcaaggctgttagagagataattagaactaatttgactgtaaacacaaatatattagtacaaaatatgtgacatagaaagtgataatttcttgggtagtttgcagttttaaaattatgttttaaaatggactatcatctgcttaccgtaactttaaagtatttcgatttctggactttatatatcttgtggaaaggac

SEQ ID NO: 1240 - DNA, 241 bp, synthetic construct
  misc_feature 1..241: note = Promoter
  source 1..241: mol_type = other DNA
gagggcctatttcccatgattccttcatatttgcatataagatgcaaggctgttagagagataattagaactaatttgactgtaaacacaaatatattagtacaaaatatgtgacatagaaagtgataatttcttgggtagtttgcagttttaaaattatgttttaaaatggactatcatctgcttaccgtaactttaaagtatttcgatttcttaactttatatatcttgtggaaaggac

SEQ ID NO: 1241 - DNA, 241 bp, synthetic construct
  misc_feature 1..241: note = Promoter
  source 1..241: mol_type = other DNA
gagggcctatttcccatgattccttcatatttgcatataagatgcaaggctgttagagagataattagaactaatttgactgtaaacacaaatatattagtacaaaatatgtgacatagaaagtgataatttcttgggtagtttgcagttttaaaattatgttttaaaatggactatcatctgcttaccgtaactttaaagtatttcgatttcttcactttatatatcttgtggaaaggac

SEQ ID NO: 1242 - DNA, 241 bp, synthetic construct
  misc_feature 1..241: note = Promoter
  source 1..241: mol_type = other DNA
gagggcctatttcccatgattccttcatatttgcatataagatgcaaggctgttagagagataattagaactaatttgactgtaaacacaaatatattagtacaaaatatgtgacatagaaagtgataatttcttgggtagtttgcagttttaaaattatgttttaaaatggactatcatctgcttaccgtaactttaaagtatttcgatttctttactttatatatcttgtggaaaggac

SEQ ID NO: 1243 - DNA, 241 bp, synthetic construct
  misc_feature 1..241: note = Promoter
  source 1..241: mol_type = other DNA
gagggcctatttcccatgattccttcatatttgcatataagatgcaaggctgttagagagataattagaactaatttgactgtaaacacaaatatattagtacaaaatatgtgacatagaaagtgataatttcttgggtagtttgcagttttaaaattatgttttaaaatggactatcatctgcttaccgtaactttaaagtatttcgatttcttgcctttatatatcttgtggaaaggac

SEQ ID NO: 1244 - DNA, 241 bp, synthetic construct
  misc_feature 1..241: note = Promoter
  source 1..241: mol_type = other DNA
gagggcctatttcccatgattccttcatatttgcatataagatgcaaggctgttagagagataattagaactaatttgactgtaaacacaaatatattagtacaaaatatgtgacatagaaagtgataatttcttgggtagtttgcagttttaaaattatgttttaaaatggactatcatctgcttaccgtaactttaaagtatttcgatttcttggctttatatatcttgtggaaaggac

SEQ ID NO: 1245 - DNA, 241 bp, synthetic construct
  misc_feature 1..241: note = Promoter
  source 1..241: mol_type = other DNA
gagggcctatttcccatgattccttcatatttgcatataagatgcaaggctgttagagagataattagaactaatttgactgtaaacacaaatatattagtacaaaatatgtgacatagaaagtgataatttcttgggtagtttgcagttttaaaattatgttttaaaatggactatcatctgcttaccgtaactttaaagtatttcgatttcttgtctttatatatcttgtggaaaggac

SEQ ID NO: 1246 - DNA, 241 bp, synthetic construct
  misc_feature 1..241: note = Promoter
  source 1..241: mol_type = other DNA
gagggcctatttcccatgattccttcatatttgcatataagatgcaaggctgttagagagataattagaactaatttgactgtaaacacaaatatattagtacaaaatatgtgacatagaaagtgataatttcttgggtagtttgcagttttaaaattatgttttaaaatggactatcatctgcttaccgtaactttaaagtatttcgatttcttgaatttatatatcttgtggaaaggac

SEQ ID NO: 1247 - DNA, 241 bp, synthetic construct
  misc_feature 1..241: note = Promoter
  source 1..241: mol_type = other DNA
gagggcctatttcccatgattccttcatatttgcatataagatgcaaggctgttagagagataattagaactaatttgactgtaaacacaaatatattagtacaaaatatgtgacatagaaagtgataatttcttgggtagtttgcagttttaaaattatgttttaaaatggactatcatctgcttaccgtaactttaaagtatttcgatttcttgagtttatatatcttgtggaaaggac

SEQ ID NO: 1248 - DNA, 241 bp, synthetic construct
  misc_feature 1..241: note = Promoter
  source 1..241: mol_type = other DNA
gagggcctatttcccatgattccttcatatttgcatataagatgcaaggctgttagagagataattagaactaatttgactgtaaacacaaatatattagtacaaaatatgtgacatagaaagtgataatttcttgggtagtttgcagttttaaaattatgttttaaaatggactatcatctgcttaccgtaactttaaagtatttcgatttcttgattttatatatcttgtggaaaggac

SEQ ID NO: 1249 - DNA, 241 bp, synthetic construct
  misc_feature 1..241: note = Promoter
  source 1..241: mol_type = other DNA
gagggcctatttcccatgattccttcatatttgcatataagatgcaaggctgttagagagataattagaactaatttgactgtaaacacaaatatattagtacaaaatatgtgacatagaaagtgataatttcttgggtagtttgcagttttaaaattatgttttaaaatggactatcatctgcttaccgtaactttaaagtatttcgatttcttgacattatatatcttgtggaaaggac

SEQ ID NO: 1250 - DNA, 241 bp, synthetic construct
  misc_feature 1..241: note = Promoter
  source 1..241: mol_type = other DNA
gagggcctatttcccatgattccttcatatttgcatataagatgcaaggctgttagagagataattagaactaatttgactgtaaacacaaatatattagtacaaaatatgtgacatagaaagtgataatttcttgggtagtttgcagttttaaaattatgttttaaaatggactatcatctgcttaccgtaactttaaagtatttcgatttcttgaccttatatatcttgtggaaaggac

SEQ ID NO: 1251 - DNA, 241 bp, synthetic construct
  misc_feature 1..241: note = Promoter
  source 1..241: mol_type = other DNA
gagggcctatttcccatgattccttcatatttgcatataagatgcaaggctgttagagagataattagaactaatttgactgtaaacacaaatatattagtacaaaatatgtgacatagaaagtgataatttcttgggtagtttgcagttttaaaattatgttttaaaatggactatcatctgcttaccgtaactttaaagtatttcgatttcttgacgttatatatcttgtggaaaggac

SEQ ID NO: 1252 - DNA, 241 bp, synthetic construct
  misc_feature 1..241: note = Promoter
  source 1..241: mol_type = other DNA
gagggcctatttcccatgattccttcatatttgcatataagatgcaaggctgttagagagataattagaactaatttgactgtaaacacaaatatattagtacaaaatatgtgacatagaaagtgataatttcttgggtagtttgcagttttaaaattatgttttaaaatggactatcatctgcttaccgtaactttaaagtatttcgatttcttgactatatatatcttgtggaaaggac

SEQ ID NO: 1253 - DNA, 241 bp, synthetic construct
  misc_feature 1..241: note = Promoter
  source 1..241: mol_type = other DNA
gagggcctatttcccatgattccttcatatttgcatataagatgcaaggctgttagagagataattagaactaatttgactgtaaacacaaatatattagtacaaaatatgtgacatagaaagtgataatttcttgggtagtttgcagttttaaaattatgttttaaaatggactatcatctgcttaccgtaactttaaagtatttcgatttcttgactctatatatcttgtggaaaggac

SEQ ID NO: 1254 - DNA, 241 bp, synthetic construct
  misc_feature 1..241: note = Promoter
  source 1..241: mol_type = other DNA
gagggcctatttcccatgattccttcatatttgcatataagatgcaaggctgttagagagataattagaactaatttgactgtaaacacaaatatattagtacaaaatatgtgacatagaaagtgataatttcttgggtagtttgcagttttaaaattatgttttaaaatggactatcatctgcttaccgtaactttaaagtatttcgatttcttgactgtatatatcttgtggaaaggac

SEQ ID NO: 1255 - DNA, 241 bp, synthetic construct
  misc_feature 1..241: note = Promoter
  source 1..241: mol_type = other DNA
gagggcctatttcccatgattccttcatatttgcatataagatgcaaggctgttagagagataattagaactaatttgactgtaaacacaaatatattagtacaaaatatgtgacatagaaagtgataatttcttgggtagtttgcagttttaaaattatgttttaaaatggactatcatctgcttaccgtaactttaaagtatttcgatttcttgacttaatatatcttgtggaaaggac

SEQ ID NO: 1256 - DNA, 241 bp, synthetic construct
  misc_feature 1..241: note = Promoter
  source 1..241: mol_type = other DNA
gagggcctatttcccatgattccttcatatttgcatataagatgcaaggctgttagagagataattagaactaatttgactgtaaacacaaatatattagtacaaaatatgtgacatagaaagtgataatttcttgggtagtttgcagttttaaaattatgttttaaaatggactatcatctgcttaccgtaactttaaagtatttcgatttcttgacttcatatatcttgtggaaaggac

SEQ ID NO: 1257 - DNA, 241 bp, synthetic construct
  misc_feature 1..241: note = Promoter
  source 1..241: mol_type = other DNA
gagggcctatttcccatgattccttcatatttgcatataagatgcaaggctgttagagagataattagaactaatttgactgtaaacacaaatatattagtacaaaatatgtgacatagaaagtgataatttcttgggtagtttgcagttttaaaattatgttttaaaatggactatcatctgcttaccgtaactttaaagtatttcgatttcttgacttgatatatcttgtggaaaggac

SEQ ID NO: 1258 - DNA, 241 bp, synthetic construct
  misc_feature 1..241: note = Promoter
  source 1..241: mol_type = other DNA
gagggcctatttcccatgattccttcatatttgcatataagatgcaaggctgttagagagataattagaactaatttgactgtaaacacaaatatattagtacaaaatatgtgacatagaaagtgataatttcttgggtagtttgcagttttaaaattatgttttaaaatggactatcatctgcttaccgtaactttaaagtatttcgatttcttgactttctatatcttgtggaaaggac

SEQ ID NO: 1259 - DNA, 241 bp, synthetic construct
  misc_feature 1..241: note = Promoter
  source 1..241: mol_type = other DNA
gagggcctatttcccatgattccttcatatttgcatataagatgcaaggctgttagagagataattagaactaatttgactgtaaacacaaatatattagtacaaaatatgtgacatagaaagtgataatttcttgggtagtttgcagttttaaaattatgttttaaaatggactatcatctgcttaccgtaactttaaagtatttcgatttcttgactttgtatatcttgtggaaaggac

SEQ ID NO: 1260 - DNA, 241 bp, synthetic construct
  misc_feature 1..241: note = Promoter
  source 1..241: mol_type = other DNA
gagggcctatttcccatgattccttcatatttgcatataagatgcaaggctgttagagagataattagaactaatttgactgtaaacacaaatatattagtacaaaatatgtgacatagaaagtgataatttcttgggtagtttgcagttttaaaattatgttttaaaatggactatcatctgcttaccgtaactttaaagtatttcgatttcttgactttttatatcttgtggaaaggac

SEQ ID NO: 1261 - DNA, 241 bp, synthetic construct
  misc_feature 1..241: note = Promoter
  source 1..241: mol_type = other DNA
gagggcctatttcccatgattccttcatatttgcatataagatgcaaggctgttagagagataattagaactaatttgactgtaaacacaaatatattagtacaaaatatgtgacatagaaagtgataatttcttgggtagtttgcagttttaaaattatgttttaaaatggactatcatctgcttaccgtaactttaaagtatttcgatttcttgactttaaatatcttgtggaaaggac

SEQ ID NO: 1262 - DNA, 241 bp, synthetic construct
  misc_feature 1..241: note = Promoter
  source 1..241: mol_type = other DNA
gagggcctatttcccatgattccttcatatttgcatataagatgcaaggctgttagagagataattagaactaatttgactgtaaacacaaatatattagtacaaaatatgtgacatagaaagtgataatttcttgggtagtttgcagttttaaaattatgttttaaaatggactatcatctgcttaccgtaactttaaagtatttcgatttcttgactttacatatcttgtggaaaggac

SEQ ID NO: 1263 - DNA, 241 bp, synthetic construct
  misc_feature 1..241: note = Promoter
  source 1..241: mol_type = other DNA
gagggcctatttcccatgattccttcatatttgcatataagatgcaaggctgttagagagataattagaactaatttgactgtaaacacaaatatattagtacaaaatatgtgacatagaaagtgataatttcttgggtagtttgcagttttaaaattatgttttaaaatggactatcatctgcttaccgtaactttaaagtatttcgatttcttgactttagatatcttgtggaaaggac

SEQ ID NO: 1264 - DNA, 241 bp, synthetic construct
  misc_feature 1..241: note = Promoter
  source 1..241: mol_type = other DNA
gagggcctatttcccatgattccttcatatttgcatataagatgcaaggctgttagagagataattagaactaatttgactgtaaacacaaatatattagtacaaaatatgtgacatagaaagtgataatttcttgggtagtttgcagttttaaaattatgttttaaaatggactatcatctgcttaccgtaactttaaagtatttcgatttcttgactttatctatcttgtggaaaggac

SEQ ID NO: 1265 - DNA, 241 bp, synthetic construct
  misc_feature 1..241: note = Promoter
  source 1..241: mol_type = other DNA
gagggcctatttcccatgattccttcatatttgcatataagatgcaaggctgttagagagataattagaactaatttgactgtaaacacaaatatattagtacaaaatatgtgacatagaaagtgataatttcttgggtagtttgcagttttaaaattatgttttaaaatggactatcatctgcttaccgtaactttaaagtatttcgatttcttgactttatgtatcttgtggaaaggac

SEQ ID NO: 1266 - DNA, 241 bp, synthetic construct
  misc_feature 1..241: note = Promoter
  source 1..241: mol_type = other DNA
gagggcctatttcccatgattccttcatatttgcatataagatgcaaggctgttagagagataattagaactaatttgactgtaaacacaaatatattagtacaaaatatgtgacatagaaagtgataatttcttgggtagtttgcagttttaaaattatgttttaaaatggactatcatctgcttaccgtaactttaaagtatttcgatttcttgactttatttatcttgtggaaaggac

SEQ ID NO: 1267 - DNA, 241 bp, synthetic construct
  misc_feature 1..241: note = Promoter
  source 1..241: mol_type = other DNA
gagggcctatttcccatgattccttcatatttgcatataagatgcaaggctgttagagagataattagaactaatttgactgtaaacacaaatatattagtacaaaatatgtgacatagaaagtgataatttcttgggtagtttgcagttttaaaattatgttttaaaatggactatcatctgcttaccgtaactttaaagtatttcgatttcttgactttataaatcttgtggaaaggac

SEQ ID NO: 1268 - DNA, 241 bp, synthetic construct
  misc_feature 1..241: note = Promoter
  source 1..241: mol_type = other DNA
gagggcctatttcccatgattccttcatatttgcatataagatgcaaggctgttagagagataattagaactaatttgactgtaaacacaaatatattagtacaaaatatgtgacatagaaagtgataatttcttgggtagtttgcagttttaaaattatgttttaaaatggactatcatctgcttaccgtaactttaaagtatttcgatttcttgactttatacatcttgtggaaaggac

SEQ ID NO: 1269 - DNA, 241 bp, synthetic construct
  misc_feature 1..241: note = Promoter
  source 1..241: mol_type = other DNA
gagggcctatttcccatgattccttcatatttgcatataagatgcaaggctgttagagagataattagaactaatttgactgtaaacacaaatatattagtacaaaatatgtgacatagaaagtgataatttcttgggtagtttgcagttttaaaattatgttttaaaatggactatcatctgcttaccgtaactttaaagtatttcgatttcttgactttatagatcttgtggaaaggac

SEQ ID NO: 1270 - DNA, 241 bp, synthetic construct
  misc_feature 1..241: note = Promoter
  source 1..241: mol_type = other DNA
gagggcctatttcccatgattccttcatatttgcatataagatgcaaggctgttagagagataattagaactaatttgactgtaaacacaaatatattagtacaaaatatgtgacatagaaagtgataatttcttgggtagtttgcagttttaaaattatgttttaaaatggactatcatctgcttaccgtaactttaaagtatttcgatttcttgactttatatctcttgtggaaaggac

SEQ ID NO: 1271 - DNA, 241 bp, synthetic construct
  misc_feature 1..241: note = Promoter
  source 1..241: mol_type = other DNA
gagggcctatttcccatgattccttcatatttgcatataagatgcaaggctgttagagagataattagaactaatttgactgtaaacacaaatatattagtacaaaatatgtgacatagaaagtgataatttcttgggtagtttgcagttttaaaattatgttttaaaatggactatcatctgcttaccgtaactttaaagtatttcgatttcttgactttatatgtcttgtggaaaggac

SEQ ID NO: 1272 - DNA, 241 bp, synthetic construct
  misc_feature 1..241: note = Promoter
  source 1..241: mol_type = other DNA
gagggcctatttcccatgattccttcatatttgcatataagatgcaaggctgttagagagataattagaactaatttgactgtaaacacaaatatattagtacaaaatatgtgacatagaaagtgataatttcttgggtagtttgcagttttaaaattatgttttaaaatggactatcatctgcttaccgtaactttaaagtatttcgatttcttgactttatatttcttgtggaaaggac

SEQ ID NO: 1273 - DNA, 241 bp, synthetic construct
  misc_feature 1..241: note = Promoter
  source 1..241: mol_type = other DNA
gagggcctatttcccatgattccttcatatttgcatataagatgcaaggctgttagagagataattagaactaatttgactgtaaacacaaatatattagtacaaaatatgtgacatagaaagtgataatttcttgggtagtttgcagttttaaaattatgttttaaaatggactatcatctgcttaccgtaactttaaagtatttcgatttcttgactttatataacttgtggaaaggac

SEQ ID NO: 1274 - DNA, 241 bp, synthetic construct
  misc_feature 1..241: note = Promoter
  source 1..241: mol_type = other DNA
gagggcctatttcccatgattccttcatatttgcatataagatgcaaggctgttagagagataattagaactaatttgactgtaaacacaaatatattagtacaaaatatgtgacatagaaagtgataatttcttgggtagtttgcagttttaaaattatgttttaaaatggactatcatctgcttaccgtaactttaaagtatttcgatttcttgactttatataccttgtggaaaggac

SEQ ID NO: 1275 - DNA, 241 bp, synthetic construct
  misc_feature 1..241: note = Promoter
  source 1..241: mol_type = other DNA
gagggcctatttcccatgattccttcatatttgcatataagatgcaaggctgttagagagataattagaactaatttgactgtaaacacaaatatattagtacaaaatatgtgacatagaaagtgataatttcttgggtagtttgcagttttaaaattatgttttaaaatggactatcatctgcttaccgtaactttaaagtatttcgatttcttgactttatatagcttgtggaaaggac

SEQ ID NO: 1276 - DNA, 241 bp, synthetic construct
  misc_feature 1..241: note = Promoter
  source 1..241: mol_type = other DNA
gagggcctatttcccatgattccttcatatttgcatataagatgcaaggctgttagagagataattagaactaatttgactgtaaacacaaatatattagtacaaaatatgtgacatagaaagtgataatttcttgggtagtttgcagttttaaaattatgttttaaaatggactatcatctgcttaccgtaactttaaagtatttcgatttcttgactttatatatattgtggaaaggac

SEQ ID NO: 1277 - DNA, 241 bp, synthetic construct
  misc_feature 1..241: note = Promoter
  source 1..241: mol_type = other DNA
gagggcctatttcccatgattccttcatatttgcatataagatgcaaggctgttagagagataattagaactaatttgactgtaaacacaaatatattagtacaaaatatgtgacatagaaagtgataatttcttgggtagtttgcagttttaaaattatgttttaaaatggactatcatctgcttaccgtaactttaaagtatttcgatttcttgactttatatatgttgtggaaaggac

SEQ ID NO: 1278 - DNA, 241 bp, synthetic construct
  misc_feature 1..241: note = Promoter
  source 1..241: mol_type = other DNA
gagggcctatttcccatgattccttcatatttgcatataagatgcaaggctgttagagagataattagaactaatttgactgtaaacacaaatatattagtacaaaatatgtgacatagaaagtgataatttcttgggtagtttgcagttttaaaattatgttttaaaatggactatcatctgcttaccgtaactttaaagtatttcgatttcttgactttatatattttgtggaaaggac

SEQ ID NO: 1279 - DNA, 241 bp, synthetic construct
  misc_feature 1..241: note = Promoter
  source 1..241: mol_type = other DNA
gagggcctatttcccatgattccttcatatttgcatataagatgcaaggctgttagagagataattagaactaatttgactgtaaacacaaatatattagtacaaaatatgtgacatagaaagtgataatttcttgggtagtttgcagttttaaaattatgttttaaaatggactatcatctgcttaccgtaactttaaagtatttcgatttcttgactttatatatcatgtggaaaggac

SEQ ID NO: 1280 - DNA, 241 bp, synthetic construct
  misc_feature 1..241: note = Promoter
  source 1..241: mol_type = other DNA
gagggcctatttcccatgattccttcatatttgcatataagatgcaaggctgttagagagataattagaactaatttgactgtaaacacaaatatattagtacaaaatatgtgacatagaaagtgataatttcttgggtagtttgcagttttaaaattatgttttaaaatggactatcatctgcttaccgtaactttaaagtatttcgatttcttgactttatatatcctgtggaaaggac

SEQ ID NO: 1281 - DNA, 241 bp, synthetic construct
  misc_feature 1..241: note = Promoter
  source 1..241: mol_type = other DNA
gagggcctatttcccatgattccttcatatttgcatataagatgcaaggctgttagagagataattagaactaatttgactgtaaacacaaatatattagtacaaaatatgtgacatagaaagtgataatttcttgggtagtttgcagttttaaaattatgttttaaaatggactatcatctgcttaccgtaactttaaagtatttcgatttcttgactttatatatcgtgtggaaaggac

SEQ ID NO: 1282 - DNA, 241 bp, synthetic construct
  misc_feature 1..241: note = Promoter
  source 1..241: mol_type = other DNA
gagggcctatttcccatgattccttcatatttgcatataagatgcaaggctgttagagagataattagaactaatttgactgtaaacacaaatatattagtacaaaatatgtgacatagaaagtgataatttcttgggtagtttgcagttttaaaattatgttttaaaatggactatcatctgcttaccgtaactttaaagtatttcgatttcttgactttatatatctagtggaaaggac

SEQ ID NO: 1283 - DNA, 241 bp, synthetic construct
  misc_feature 1..241: note = Promoter
  source 1..241: mol_type = other DNA
gagggcctatttcccatgattccttcatatttgcatataagatgcaaggctgttagagagataattagaactaatttgactgtaaacacaaatatattagtacaaaatatgtgacatagaaagtgataatttcttgggtagtttgcagttttaaaattatgttttaaaatggactatcatctgcttaccgtaactttaaagtatttcgatttcttgactttatatatctcgtggaaaggac

SEQ ID NO: 1284 - DNA, 241 bp, synthetic construct
  misc_feature 1..241: note = Promoter
  source 1..241: mol_type = other DNA
gagggcctatttcccatgattccttcatatttgcatataagatgcaaggctgttagagagataattagaactaatttgactgtaaacacaaatatattagtacaaaatatgtgacatagaaagtgataatttcttgggtagtttgcagttttaaaattatgttttaaaatggactatcatctgcttaccgtaactttaaagtatttcgatttcttgactttatatatctggtggaaaggac

SEQ ID NO: 1285 - DNA, 241 bp, synthetic construct
  misc_feature 1..241: note = Promoter
  source 1..241: mol_type = other DNA
gagggcctatttcccatgattccttcatatttgcatataagatgcaaggctgttagagagataattagaactaatttgactgtaaacacaaatatattagtacaaaatatgtgacatagaaagtgataatttcttgggtagtttgcagttttaaaattatgttttaaaatggactatcatctgcttaccgtaactttaaagtatttcgatttcttgactttatatatcttatggaaaggac

SEQ ID NO: 1286 - DNA, 241 bp, synthetic construct
  misc_feature 1..241: note = Promoter
  source 1..241: mol_type = other DNA
gagggcctatttcccatgattccttcatatttgcatataagatgcaaggctgttagagagataattagaactaatttgactgtaaacacaaatatattagtacaaaatatgtgacatagaaagtgataatttcttgggtagtttgcagttttaaaattatgttttaaaatggactatcatctgcttaccgtaactttaaagtatttcgatttcttgactttatatatcttctggaaaggac

SEQ ID NO: 1287 - DNA, 241 bp, synthetic construct
  misc_feature 1..241: note = Promoter
  source 1..241: mol_type = other DNA
gagggcctatttcccatgattccttcatatttgcatataagatgcaaggctgttagagagataattagaactaatttgactgtaaacacaaatatattagtacaaaatatgtgacatagaaagtgataatttcttgggtagtttgcagttttaaaattatgttttaaaatggactatcatctgcttaccgtaactttaaagtatttcgatttcttgactttatatatcttttggaaaggac

SEQ ID NO: 1288 - DNA, 241 bp, synthetic construct
  misc_feature 1..241: note = Promoter
  source 1..241: mol_type = other DNA
gagggcctatttcccatgattccttcatatttgcatataagatgcaaggctgttagagagataattagaactaatttgactgtaaacacaaatatattagtacaaaatatgtgacatagaaagtgataatttcttgggtagtttgcagttttaaaattatgttttaaaatggactatcatctgcttaccgtaactttaaagtatttcgatttcttgactttatatatcttgaggaaaggac

SEQ ID NO: 1289 - DNA, 241 bp, synthetic construct
  misc_feature 1..241: note = Promoter
  source 1..241: mol_type = other DNA
gagggcctatttcccatgattccttcatatttgcatataagatgcaaggctgttagagagataattagaactaatttgactgtaaacacaaatatattagtacaaaatatgtgacatagaaagtgataatttcttgggtagtttgcagttttaaaattatgttttaaaatggactatcatctgcttaccgtaactttaaagtatttcgatttcttgactttatatatcttgcggaaaggac

SEQ ID NO: 1290 - DNA, 241 bp, synthetic construct
  misc_feature 1..241: note = Promoter
  source 1..241: mol_type = other DNA
gagggcctatttcccatgattccttcatatttgcatataagatgcaaggctgttagagagataattagaactaatttgactgtaaacacaaatatattagtacaaaatatgtgacatagaaagtgataatttcttgggtagtttgcagttttaaaattatgttttaaaatggactatcatctgcttaccgtaactttaaagtatttcgatttcttgactttatatatcttggggaaaggac

SEQ ID NO: 1291 - DNA, 241 bp, synthetic construct
  misc_feature 1..241: note = Promoter
  source 1..241: mol_type = other DNA
gagggcctatttcccatgattccttcatatttgcatataagatgcaaggctgttagagagataattagaactaatttgactgtaaacacaaatatattagtacaaaatatgtgacatagaaagtgataatttcttgggtagtttgcagttttaaaattatgttttaaaatggactatcatctgcttaccgtaactttaaagtatttcgatttcttgactttatatatcttgtagaaaggac

SEQ ID NO: 1292 - DNA, 241 bp, synthetic construct
  misc_feature 1..241: note = Promoter
  source 1..241: mol_type = other DNA
gagggcctatttcccatgattccttcatatttgcatataagatgcaaggctgttagagagataattagaactaatttgactgtaaacacaaatatattagtacaaaatatgtgacatagaaagtgataatttcttgggtagtttgcagttttaaaattatgttttaaaatggactatcatctgcttaccgtaactttaaagtatttcgatttcttgactttatatatcttgtcgaaaggac

SEQ ID NO: 1293 - DNA, 241 bp, synthetic construct
  misc_feature 1..241: note = Promoter
  source 1..241: mol_type = other DNA
gagggcctatttcccatgattccttcatatttgcatataagatgcaaggctgttagagagataattagaactaatttgactgtaaacacaaatatattagtacaaaatatgtgacatagaaagtgataatttcttgggtagtttgcagttttaaaattatgttttaaaatggactatcatctgcttaccgtaactttaaagtatttcgatttcttgactttatatatcttgttgaaaggac

SEQ ID NO: 1294 - DNA, 241 bp, synthetic construct
  misc_feature 1..241: note = Promoter
  source 1..241: mol_type = other DNA
gagggcctatttcccatgattccttcatatttgcatataagatgcaaggctgttagagagataattagaactaatttgactgtaaacacaaatatattagtacaaaatatgtgacatagaaagtgataatttcttgggtagtttgcagttttaaaattatgttttaaaatggactatcatctgcttaccgtaactttaaagtatttcgatttcttgactttatatatcttgtgaaaaggac

SEQ ID NO: 1295 - DNA, 241 bp, synthetic construct
  misc_feature 1..241: note = Promoter
  source 1..241: mol_type = other DNA
gagggcctatttcccatgattccttcatatttgcatataagatgcaaggctgttagagagataattagaactaatttgactgtaaacacaaatatattagtacaaaatatgtgacatagaaagtgataatttcttgggtagtttgcagttttaaaattatgttttaaaatggactatcatctgcttaccgtaactttaaagtatttcgatttcttgactttatatatcttgtgcaaaggac

SEQ ID NO: 1296 - DNA, 241 bp, synthetic construct
  misc_feature 1..241: note = Promoter
  source 1..241: mol_type = other DNA
gagggcctatttcccatgattccttcatatttgcatataagatgcaaggctgttagagagataattagaactaatttgactgtaaacacaaatatattagtacaaaatatgtgacatagaaagtgataatttcttgggtagtttgcagttttaaaattatgttttaaaatggactatcatctgcttaccgtaactttaaagtatttcgatttcttgactttatatatcttgtgtaaaggac

SEQ ID NO: 1297 - DNA, 241 bp, synthetic construct
  misc_feature 1..241: note = Promoter
  source 1..241: mol_type = other DNA
gagggcctatttcccatgattccttcatatttgcatataagatgcaaggctgttagagagataattagaactaatttgactgtaaacacaaatatattagtacaaaatatgtgacatagaaagtgataatttcttgggtagtttgcagttttaaaattatgttttaaaatggactatcatctgcttaccgtaactttaaagtatttcgatttcttgactttatatatcttgtggcaaggac

SEQ ID NO: 1298 - DNA, 241 bp, synthetic construct
  misc_feature 1..241: note = Promoter
  source 1..241: mol_type = other DNA
gagggcctatttcccatgattccttcatatttgcatataagatgcaaggctgttagagagataattagaactaatttgactgtaaacacaaatatattagtacaaaatatgtgacatagaaagtgataatttcttgggtagtttgcagttttaaaattatgttttaaaatggactatcatctgcttaccgtaactttaaagtatttcgatttcttgactttatatatcttgtgggaaggac

SEQ ID NO: 1299 - DNA, 241 bp, synthetic construct
  misc_feature 1..241: note = Promoter
  source 1..241: mol_type = other DNA
gagggcctatttcccatgattccttcatatttgcatataagatgcaaggctgttagagagataattagaactaatttgactgtaaacacaaatatattagtacaaaatatgtgacatagaaagtgataatttcttgggtagtttgcagttttaaaattatgttttaaaatggactatcatctgcttaccgtaactttaaagtatttcgatttcttgactttatatatcttgtggtaaggac

SEQ ID NO: 1300 - DNA, 241 bp, synthetic construct
  misc_feature 1..241: note = Promoter
  source 1..241: mol_type = other DNA
gagggcctatttcccatgattccttcatatttgcatataagatgcaaggctgttagagagataattagaactaatttgactgtaaacacaaatatattagtacaaaatatgtgacatagaaagtgataatttcttgggtagtttgcagttttaaaattatgttttaaaatggactatcatctgcttaccgtaactttaaagtatttcgatttcttgactttatatatcttgtggacaggac

SEQ ID NO: 1301 - DNA, 241 bp, synthetic construct
  misc_feature 1..241: note = Promoter
  source 1..241: mol_type = other DNA
gagggcctatttcccatgattccttcatatttgcatataagatgcaaggctgttagagagataattagaactaatttgactgtaaacacaaatatattagtacaaaatatgtgacatagaaagtgataatttcttgggtagtttgcagttttaaaattatgttttaaaatggactatcatctgcttaccgtaactttaaagtatttcgatttcttgactttatatatcttgtggagaggac

SEQ ID NO: 1302 - DNA, 241 bp, synthetic construct
  misc_feature 1..241: note = Promoter
  source 1..241: mol_type = other DNA
gagggcctatttcccatgattccttcatatttgcatataagatgcaaggctgttagagagataattagaactaatttgactgtaaacacaaatatattagtacaaaatatgtgacatagaaagtgataatttcttgggtagtttgcagttttaaaattatgttttaaaatggactatcatctgcttaccgtaactttaaagtatttcgatttcttgactttatatatcttgtggataggac

SEQ ID NO: 1303 - DNA, 241 bp, synthetic construct
  misc_feature 1..241: note = Promoter
  source 1..241: mol_type = other DNA
gagggcctatttcccatgattccttcatatttgcatataagatgcaaggctgttagagagataattagaactaatttgactgtaaacacaaatatattagtacaaaatatgtgacatagaaagtgataatttcttgggtagtttgcagttttaaaattatgttttaaaatggactatcatctgcttaccgtaactttaaagtatttcgatttcttgactttatatatcttgtggaacggac

SEQ ID NO: 1304 - DNA, 241 bp, synthetic construct
  misc_feature 1..241: note = Promoter
  source 1..241: mol_type = other DNA
gagggcctatttcccatgattccttcatatttgcatataagatgcaaggctgttagagagataattagaactaatttgactgtaaacacaaatatattagtacaaaatatgtgacatagaaagtgataatttcttgggtagtttgcagttttaaaattatgttttaaaatggactatcatctgcttaccgtaactttaaagtatttcgatttcttgactttatatatcttgtggaagggac

SEQ ID NO: 1305 - DNA, 241 bp, synthetic construct
  misc_feature 1..241: note = Promoter
  source 1..241: mol_type = other DNA
gagggcctatttcccatgattccttcatatttgcatataagatgcaaggctgttagagagataattagaactaatttgactgtaaacacaaatatattagtacaaaatatgtgacatagaaagtgataatttcttgggtagtttgcagttttaaaattatgttttaaaatggactatcatctgcttaccgtaactttaaagtatttcgatttcttgactttatatatcttgtggaatggac

SEQ ID NO: 1306 - DNA, 241 bp, synthetic construct
  misc_feature 1..241: note = Promoter
  source 1..241: mol_type = other DNA
gagggcctatttcccatgattccttcatatttgcatataagatgcaaggctgttagagagataattagaactaatttgactgtaaacacaaatatattagtacaaaatatgtgacatagaaagtgataatttcttgggtagtttgcagttttaaaattatgttttaaaatggactatcatctgcttaccgtaactttaaagtatttcgatttcttgactttatatatcttgtggaaaagac

SEQ ID NO: 1307 - DNA, 241 bp, synthetic construct
  misc_feature 1..241: note = Promoter
  source 1..241: mol_type = other DNA
gagggcctatttcccatgattccttcatatttgcatataagatgcaaggctgttagagagataattagaactaatttgactgtaaacacaaatatattagtacaaaatatgtgacatagaaagtgataatttcttgggtagtttgcagttttaaaattatgttttaaaatggactatcatctgcttaccgtaactttaaagtatttcgatttcttgactttatatatcttgtggaaacgac

SEQ ID NO: 1308 - DNA, 241 bp, synthetic construct
  misc_feature 1..241: note = Promoter
  source 1..241: mol_type = other DNA
gagggcctatttcccatgattccttcatatttgcatataagatgcaaggctgttagagagataattagaactaatttgactgtaaacacaaatatattagtacaaaatatgtgacatagaaagtgataatttcttgggtagtttgcagttttaaaattatgttttaaaatggactatcatctgcttaccgtaactttaaagtatttcgatttcttgactttatatatcttgtggaaatgac

SEQ ID NO: 1309 - DNA, 241 bp, synthetic construct
  misc_feature 1..241: note = Promoter
  source 1..241: mol_type = other DNA
gagggcctatttcccatgattccttcatatttgcatataagatgcaaggctgttagagagataattagaactaatttgactgtaaacacaaatatattagtacaaaatatgtgacatagaaagtgataatttcttgggtagtttgcagttttaaaattatgttttaaaatggactatcatctgcttaccgtaactttaaagtatttcgatttcttgactttatatatcttgtggaaagaac

SEQ ID NO: 1310 - DNA, 241 bp, synthetic construct
  misc_feature 1..241: note = Promoter
  source 1..241: mol_type = other DNA
gagggcctatttcccatgattccttcatatttgcatataagatgcaaggctgttagagagataattagaactaatttgactgtaaacacaaatatattagtacaaaatatgtgacatagaaagtgataatttcttgggtagtttgcagttttaaaattatgttttaaaatggactatcatctgcttaccgtaactttaaagtatttcgatttcttgactttatatatcttgtggaaagcac

SEQ ID NO: 1311 - DNA, 241 bp, synthetic construct
  misc_feature 1..241: note = Promoter
  source 1..241: mol_type = other DNA
gagggcctatttcccatgattccttcatatttgcatataagatgcaaggctgttagagagataattagaactaatttgactgtaaacacaaatatattagtacaaaatatgtgacatagaaagtgataatttcttgggtagtttgcagttttaaaattatgttttaaaatggactatcatctgcttaccgtaactttaaagtatttcgatttcttgactttatatatcttgtggaaagtac

SEQ ID NO: 1312 - DNA, 241 bp, synthetic construct
  misc_feature 1..241: note = Promoter
  source 1..241: mol_type = other DNA
gagggcctatttcccatgattccttcatatttgcatataagatgcaaggctgttagagagataattagaactaatttgactgtaaacacaaatatattagtacaaaatatgtgacatagaaagtgataatttcttgggtagtttgcagttttaaaattatgttttaaaatggactatcatctgcttaccgtaactttaaagtatttcgatttcttgactttatatatcttgtggaaaggcc

SEQ ID NO: 1313 - DNA, 241 bp, synthetic construct
  misc_feature 1..241: note = Promoter
  source 1..241: mol_type = other DNA
gagggcctatttcccatgattccttcatatttgcatataagatgcaaggctgttagagagataattagaactaatttgactgtaaacacaaatatattagtacaaaatatgtgacatagaaagtgataatttcttgggtagtttgcagttttaaaattatgttttaaaatggactatcatctgcttaccgtaactttaaagtatttcgatttcttgactttatatatcttgtggaaagggc

SEQ ID NO: 1314 - DNA, 241 bp, synthetic construct
  misc_feature 1..241: note = Promoter
  source 1..241: mol_type = other DNA
gagggcctatttcccatgattccttcatatttgcatataagatgcaaggctgttagagagataattagaactaatttgactgtaaacacaaatatattagtacaaaatatgtgacatagaaagtgataatttcttgggtagtttgcagttttaaaattatgttttaaaatggactatcatctgcttaccgtaactttaaagtatttcgatttcttgactttatatatcttgtggaaaggtc

SEQ ID NO: 1315 - DNA, 241 bp, synthetic construct
  misc_feature 1..241: note = Promoter
  source 1..241: mol_type = other DNA
gagggcctatttcccatgattccttcatatttgcatataagatgcaaggctgttagagagataattagaactaatttgactgtaaacacaaatatattagtacaaaatatgtgacatagaaagtgataatttcttgggtagtttgcagttttaaaattatgttttaaaatggactatcatctgcttaccgtaactttaaagtatttcgatttcttgactttatatatcttgtggaaaggaa

SEQ ID NO: 1316 - DNA, 241 bp, synthetic construct
  misc_feature 1..241: note = Promoter
  source 1..241: mol_type = other DNA
gagggcctatttcccatgattccttcatatttgcatataagatgcaaggctgttagagagataattagaactaatttgactgtaaacacaaatatattagtacaaaatatgtgacatagaaagtgataatttcttgggtagtttgcagttttaaaattatgttttaaaatggactatcatctgcttaccgtaactttaaagtatttcgatttcttgactttatatatcttgtggaaaggag

SEQ ID NO: 1317 - DNA, 241 bp, synthetic construct
  misc_feature 1..241: note = Promoter
  source 1..241: mol_type = other DNA
gagggcctatttcccatgattccttcatatttgcatataagatgcaaggctgttagagagataattagaactaatttgactgtaaacacaaatatattagtacaaaatatgtgacatagaaagtgataatttcttgggtagtttgcagttttaaaattatgttttaaaatggactatcatctgcttaccgtaactttaaagtatttcgatttcttgactttatatatcttgtggaaaggat

SEQ ID NO: 1318 - DNA, 240 bp, synthetic construct
  misc_feature 1..240: note = Promoter
  source 1..240: mol_type = other DNA
agggcctatttcccatgattccttcatatttgcatataagatgcaaggctgttagagagataattagaactaatttgactgtaaacacaaatatattagtacaaaatatgtgacatagaaagtgataatttcttgggtagtttgcagttttaaaattatgttttaaaatggactatcatctgcttaccgtaactttaaagtatttcgatttcttgactttatatatcttgtggaaaggac

SEQ ID NO: 1319 - DNA, 240 bp, synthetic construct
  misc_feature 1..240: note = Promoter
  source 1..240: mol_type = other DNA
ggggcctatttcccatgattccttcatatttgcatataagatgcaaggctgttagagagataattagaactaatttgactgtaaacacaaatatattagtacaaaatatgtgacatagaaagtgataatttcttgggtagtttgcagttttaaaattatgttttaaaatggactatcatctgcttaccgtaactttaaagtatttcgatttcttgactttatatatcttgtggaaaggac

SEQ ID NO: 1320 - DNA, 240 bp, synthetic construct
  misc_feature 1..240: note = Promoter
  source 1..240: mol_type = other DNA
gaggcctatttcccatgattccttcatatttgcatataagatgcaaggctgttagagagataattagaactaatttgactgtaaacacaaatatattagtacaaaatatgtgacatagaaagtgataatttcttgggtagtttgcagttttaaaattatgttttaaaatggactatcatctgcttaccgtaactttaaagtatttcgatttcttgactttatatatcttgtggaaaggac

SEQ ID NO: 1321 - DNA, 240 bp, synthetic construct; identical to SEQ ID NO: 1320
  misc_feature 1..240: note = Promoter
  source 1..240: mol_type = other DNA

SEQ ID NO: 1322 - DNA, 240 bp, synthetic construct; identical to SEQ ID NO: 1320
  misc_feature 1..240: note = Promoter
  source 1..240: mol_type = other DNA

SEQ ID NO: 1323 - DNA, 240 bp, synthetic construct
  misc_feature 1..240: note = Promoter
  source 1..240: mol_type = other DNA
gagggctatttcccatgattccttcatatttgcatataagatgcaaggctgttagagagataattagaactaatttgactgtaaacacaaatatattagtacaaaatatgtgacatagaaagtgataatttcttgggtagtttgcagttttaaaattatgttttaaaatggactatcatctgcttaccgtaactttaaagtatttcgatttcttgactttatatatcttgtggaaaggac

SEQ ID NO: 1324 - DNA, 240 bp, synthetic construct; identical to SEQ ID NO: 1323
  misc_feature 1..240: note = Promoter
  source 1..240: mol_type = other DNA

SEQ ID NO: 1325 - DNA, 240 bp, synthetic construct
  misc_feature 1..240: note = Promoter
  source 1..240: mol_type = other DNA
gagggccatttcccatgattccttcatatttgcatataagatgcaaggctgttagagagataattagaactaatttgactgtaaacacaaatatattagtacaaaatatgtgacatagaaagtgataatttcttgggtagtttgcagttttaaaattatgttttaaaatggactatcatctgcttaccgtaactttaaagtatttcgatttcttgactttatatatcttgtggaaaggac

SEQ ID NO: 1326 - DNA, 240 bp, synthetic construct
  misc_feature 1..240: note = Promoter
  source 1..240: mol_type = other DNA
gagggccttttcccatgattccttcatatttgcatataagatgcaaggctgttagagagataattagaactaatttgactgtaaacacaaatatattagtacaaaatatgtgacatagaaagtgataatttcttgggtagtttgcagttttaaaattatgttttaaaatggactatcatctgcttaccgtaactttaaagtatttcgatttcttgactttatatatcttgtggaaaggac

SEQ ID NO: 1327 - DNA, 240 bp, synthetic construct
  misc_feature 1..240: note = Promoter
  source 1..240: mol_type = other DNA
gagggcctattcccatgattccttcatatttgcatataagatgcaaggctgttagagagataattagaactaatttgactgtaaacacaaatatattagtacaaaatatgtgacatagaaagtgataatttcttgggtagtttgcagttttaaaattatgttttaaaatggactatcatctgcttaccgtaactttaaagtatttcgatttcttgactttatatatcttgtggaaaggac

SEQ ID NO: 1328 - DNA, 240 bp, synthetic construct; identical to SEQ ID NO: 1327
  misc_feature 1..240: note = Promoter
  source 1..240: mol_type = other DNA

SEQ ID NO: 1329 - DNA, 240 bp, synthetic construct; identical to SEQ ID NO: 1327
  misc_feature 1..240: note = Promoter
  source 1..240: mol_type = other DNA

SEQ ID NO: 1330 - DNA, 240 bp, synthetic construct
  misc_feature 1..240: note = Promoter
  source 1..240: mol_type = other DNA
gagggcctatttccatgattccttcatatttgcatataagatgcaaggctgttagagagataattagaactaatttgactgtaaacacaaatatattagtacaaaatatgtgacatagaaagtgataatttcttgggtagtttgcagttttaaaattatgttttaaaatggactatcatctgcttaccgtaactttaaagtatttcgatttcttgactttatatatcttgtggaaaggac

SEQ ID NO: 1331 - DNA, 240 bp, synthetic construct; identical to SEQ ID NO: 1330
  misc_feature 1..240: note = Promoter
  source 1..240: mol_type = other DNA

SEQ ID NO: 1332 - DNA, 240 bp, synthetic construct; identical to SEQ ID NO: 1330
  misc_feature 1..240: note = Promoter
  source 1..240: mol_type = other DNA

SEQ ID NO: 1333 - DNA, 240 bp, synthetic construct
  misc_feature 1..240: note = Promoter
  source 1..240: mol_type = other DNA
gagggcctatttccctgattccttcatatttgcatataagatgcaaggctgttagagagataattagaactaatttgactgtaaacacaaatatattagtacaaaatatgtgacatagaaagtgataatttcttgggtagtttgcagttttaaaattatgttttaaaatggactatcatctgcttaccgtaactttaaagtatttcgatttcttgactttatatatcttgtggaaaggac

SEQ ID NO: 1334 - DNA, 240 bp, synthetic construct
  misc_feature 1..240: note = Promoter
  source 1..240: mol_type = other DNA
gagggcctatttcccagattccttcatatttgcatataagatgcaaggctgttagagagataattagaactaatttgactgtaaacacaaatatattagtacaaaatatgtgacatagaaagtgataatttcttgggtagtttgcagttttaaaattatgttttaaaatggactatcatctgcttaccgtaactttaaagtatttcgatttcttgactttatatatcttgtggaaaggac

SEQ ID NO: 1335 - DNA, 240 bp, synthetic construct
  misc_feature 1..240: note = Promoter
  source 1..240: mol_type = other DNA
gagggcctatttcccatattccttcatatttgcatataagatgcaaggctgttagagagataattagaactaatttgactgtaaacacaaatatattagtacaaaatatgtgacatagaaagtgataatttcttgggtagtttgcagttttaaaattatgttttaaaatggactatcatctgcttaccgtaactttaaagtatttcgatttcttgactttatatatcttgtggaaaggac

SEQ ID NO: 1336 - DNA, 240 bp, synthetic construct
  misc_feature 1..240: note = Promoter
  source 1..240: mol_type = other DNA
gagggcctatttcccatgttccttcatatttgcatataagatgcaaggctgttagagagataattagaactaatttgactgtaaacacaaatatattagtacaaaatatgtgacatagaaagtgataatttcttgggtagtttgcagttttaaaattatgttttaaaatggactatcatctgcttaccgtaactttaaagtatttcgatttcttgactttatatatcttgtggaaaggac

SEQ ID NO: 1337 - DNA, 240 bp, synthetic construct
  misc_feature 1..240: note = Promoter
  source 1..240: mol_type = other DNA
gagggcctatttcccatgatccttcatatttgcatataagatgcaaggctgttagagagataattagaactaatttgactgtaaacacaaatatattagtacaaaatatgtgacatagaaagtgataatttcttgggtagtttgcagttttaaaattatgttttaaaatggactatcatctgcttaccgtaactttaaagtatttcgatttcttgactttatatatcttgtggaaaggac

SEQ ID NO: 1338 - DNA, 240 bp, synthetic construct; identical to SEQ ID NO: 1337
  misc_feature 1..240: note = Promoter
  source 1..240: mol_type = other DNA

SEQ ID NO: 1339 - DNA, 240 bp, synthetic construct
  misc_feature 1..240: note = Promoter
  source 1..240: mol_type = other DNA
gagggcctatttcccatgattcttcatatttgcatataagatgcaaggctgttagagagataattagaactaatttgactgtaaacacaaatatattagtacaaaatatgtgacatagaaagtgataatttcttgggtagtttgcagttttaaaattatgttttaaaatggactatcatctgcttaccgtaactttaaagtatttcgatttcttgactttatatatcttgtggaaaggac

SEQ ID NO: 1340 - DNA, 240 bp, synthetic construct; identical to SEQ ID NO: 1339
  misc_feature 1..240: note = Promoter
  source 1..240: mol_type = other DNA

SEQ ID NO: 1341 - DNA, 240 bp, synthetic construct
  misc_feature 1..240: note = Promoter
  source 1..240: mol_type = other DNA
gagggcctatttcccatgattcctcatatttgcatataagatgcaaggctgttagagagataattagaactaatttgactgtaaacacaaatatattagtacaaaatatgtgacatagaaagtgataatttcttgggtagtttgcagttttaaaattatgttttaaaatggactatcatctgcttaccgtaactttaaagtatttcgatttcttgactttatatatcttgtggaaaggac

SEQ ID NO: 1342 - DNA, 240 bp, synthetic construct; identical to SEQ ID NO: 1341
  misc_feature 1..240: note = Promoter
  source 1..240: mol_type = other DNA

SEQ ID NO: 1343 - DNA, 240 bp, synthetic construct
  misc_feature 1..240: note = Promoter
  source 1..240: mol_type = other DNA
gagggcctatttcccatgattccttatatttgcatataagatgcaaggctgttagagagataattagaactaatttgactgtaaacacaaatatattagtacaaaatatgtgacatagaaagtgataatttcttgggtagtttgcagttttaaaattatgttttaaaatggactatcatctgcttaccgtaactttaaagtatttcgatttcttgactttatatatcttgtggaaaggac

SEQ ID NO: 1344 - DNA, 240 bp, synthetic construct
  misc_feature 1..240: note = Promoter
  source 1..240: mol_type = other DNA
gagggcctatttcccatgattccttctatttgcatataagatgcaaggctgttagagagataattagaactaatttgactgtaaacacaaatatattagtacaaaatatgtgacatagaaagtgataatttcttgggtagtttgcagttttaaaattatgttttaaaatggactatcatctgcttaccgtaactttaaagtatttcgatttcttgactttatatatcttgtggaaaggac

SEQ ID NO: 1345 - DNA, 240 bp, synthetic construct
  misc_feature 1..240: note = Promoter
  source 1..240: mol_type = other DNA
gagggcctatttcccatgattccttcaatttgcatataagatgcaaggctgttagagagataattagaactaatttgactgtaaacacaaatatattagtacaaaatatgtgacatagaaagtgataatttcttgggtagtttgcagttttaaaattatgttttaaaatggactatcatctgcttaccgtaactttaaagtatttcgatttcttgactttatatatcttgtggaaaggac

SEQ ID NO: 1346 - DNA, 240 bp, synthetic construct
  misc_feature 1..240: note = Promoter
  source 1..240: mol_type = other DNA
gagggcctatttcccatgattccttcattttgcatataagatgcaaggctgttagagagataattagaactaatttgactgtaaacacaaatatattagtacaaaatatgtgacatagaaagtgataatttcttgggtagtttgcagttttaaaattatgttttaaaatggactatcatctgcttaccgtaactttaaagtatttcgatttcttgactttatatatcttgtggaaaggac

SEQ ID NO: 1347 - DNA, 240 bp, synthetic construct
  misc_feature 1..240: note = Promoter
  source 1..240: mol_type = other DNA
gagggcctatttcccatgattccttcatattgcatataagatgcaaggctgttagagagataattagaactaatttgactgtaaacacaaatatattagtacaaaatatgtgacatagaaagtgataatttcttgggtagtttgcagttttaaaattatgttttaaaatggactatcatctgcttaccgtaactttaaagtatttcgatttcttgactttatatatcttgtggaaaggac

SEQ ID NO: 1348 - DNA, 240 bp, synthetic construct; identical to SEQ ID NO: 1347
  misc_feature 1..240: note = Promoter
  source 1..240: mol_type = other DNA

SEQ ID NO: 1349 - DNA, 240 bp, synthetic construct; identical to SEQ ID NO: 1347
  misc_feature 1..240: note = Promoter
  source 1..240: mol_type = other DNA

SEQ ID NO: 1350 - DNA, 240 bp, synthetic construct
  misc_feature 1..240: note = Promoter
  source 1..240: mol_type = other DNA
gagggcctatttcccatgattccttcatatttcatataagatgcaaggctgttagagagataattagaactaatttgactgtaaacacaaatatattagtacaaaatatgtgacatagaaagtgataatttcttgggtagtttgcagttttaaaattatgttttaaaatggactatcatctgcttaccgtaactttaaagtatttcgatttcttgactttatatatcttgtggaaaggac

SEQ ID NO: 1351 - DNA, 240 bp, synthetic construct
  misc_feature 1..240: note = Promoter
  source 1..240: mol_type = other DNA
gagggcctatttcccatgattccttcatatttgatataagatgcaaggctgttagagagataattagaactaatttgactgtaaacacaaatatattagtacaaaatatgtgacatagaaagtgataatttcttgggtagtttgcagttttaaaattatgttttaaaatggactatcatctgcttaccgtaactttaaagtatttcgatttcttgactttatatatcttgtggaaaggac

SEQ ID NO: 1352 - DNA, 240 bp, synthetic construct
  misc_feature 1..240: note = Promoter
  source 1..240: mol_type = other DNA
gagggcctatttcccatgattccttcatatttgctataagatgcaaggctgttagagagataattagaactaatttgactgtaaacacaaatatattagtacaaaatatgtgacatagaaagtgataatttcttgggtagtttgcagttttaaaattatgttttaaaatggactatcatctgcttaccgtaactttaaagtatttcgatttcttgactttatatatcttgtggaaaggac

SEQ ID NO: 1353 - DNA, 240 bp, synthetic construct
  misc_feature 1..240: note = Promoter
  source 1..240: mol_type = other DNA
gagggcctatttcccatgattccttcatatttgcaataagatgcaaggctgttagagagataattagaactaatttgactgtaaacacaaatatattagtacaaaatatgtgacatagaaagtgataatttcttgggtagtttgcagttttaaaattatgttttaaaatggactatcatctgcttaccgtaactttaaagtatttcgatttcttgactttatatatcttgtggaaaggac

SEQ ID NO: 1354 - DNA, 240 bp, synthetic construct
  misc_feature 1..240: note = Promoter
  source 1..240: mol_type = other DNA
gagggcctatttcccatgattccttcatatttgcattaagatgcaaggctgttagagagataattagaactaatttgactgtaaacacaaatatattagtacaaaatatgtgacatagaaagtgataatttcttgggtagtttgcagttttaaaattatgttttaaaatggactatcatctgcttaccgtaactttaaagtatttcgatttcttgactttatatatcttgtggaaaggac

SEQ ID NO: 1355 - DNA, 240 bp, synthetic construct
  misc_feature 1..240: note = Promoter
  source 1..240: mol_type = other DNA
gagggcctatttcccatgattccttcatatttgcataaagatgcaaggctgttagagagataattagaactaatttgactgtaaacacaaatatattagtacaaaatatgtgacatagaaagtgataatttcttgggtagtttgcagttttaaaattatgttttaaaatggactatcatctgcttaccgtaactttaaagtatttcgatttcttgactttatatatcttgtggaaaggac

SEQ ID NO: 1356 - DNA, 240 bp, synthetic construct
  misc_feature 1..240: note = Promoter
  source 1..240: mol_type = other DNA
gagggcctatttcccatgattccttcatatttgcatatagatgcaaggctgttagagagataattagaactaatttgactgtaaacacaaatatattagtacaaaatatgtgacatagaaagtgataatttcttgggtagtttgcagttttaaaattatgttttaaaatggactatcatctgcttaccgtaactttaaagtatttcgatttcttgactttatatatcttgtggaaaggac

SEQ ID NO: 1357 - DNA, 240 bp, synthetic construct; identical to SEQ ID NO: 1356
  misc_feature 1..240: note = Promoter
  source 1..240: mol_type = other DNA

SEQ ID NO: 1358 - DNA, 240 bp, synthetic construct
  misc_feature 1..240: note = Promoter
  source 1..240: mol_type = other DNA
gagggcctatttcccatgattccttcatatttgcatataaatgcaaggctgttagagagataattagaactaatttgactgtaaacacaaatatattagtacaaaatatgtgacatagaaagtgataatttcttgggtagtttgcagttttaaaattatgttttaaaatggactatcatctgcttaccgtaactttaaagtatttcgatttcttgactttatatatcttgtggaaaggac

SEQ ID NO: 1359 - DNA, 240 bp, synthetic construct
  misc_feature 1..240: note = Promoter
  source 1..240: mol_type = other DNA
gagggcctatttcccatgattccttcatatttgcatataagtgcaaggctgttagagagataattagaactaatttgactgtaaacacaaatatattagtacaaaatatgtgacatagaaagtgataatttcttgggtagtttgcagttttaaaattatgttttaaaatggactatcatctgcttaccgtaactttaaagtatttcgatttcttgactttatatatcttgtggaaaggac

SEQ ID NO: 1360 - DNA, 240 bp, synthetic construct
  misc_feature 1..240: note = Promoter
  source 1..240: mol_type = other DNA
gagggcctatttcccatgattccttcatatttgcatataagagcaaggctgttagagagataattagaactaatttgactgtaaacacaaatatattagtacaaaatatgtgacatagaaagtgataatttcttgggtagtttgcagttttaaaattatgttttaaaatggactatcatctgcttaccgtaactttaaagtatttcgatttcttgactttatatatcttgtggaaaggac

SEQ ID NO: 1361 - DNA, 240 bp, synthetic construct
  misc_feature 1..240: note = Promoter
  source 1..240: mol_type = other DNA
gagggcctatttcccatgattccttcatatttgcatataagatcaaggctgttagagagataattagaactaatttgactgtaaacacaaatatattagtacaaaatatgtgacatagaaagtgataatttcttgggtagtttgcagttttaaaattatgttttaaaatggactatcatctgcttaccgtaactttaaagtatttcgatttcttgactttatatatcttgtggaaaggac

SEQ ID NO: 1362 - DNA, 240 bp, synthetic construct
  misc_feature 1..240: note = Promoter
  source 1..240: mol_type = other DNA
gagggcctatttcccatgattccttcatatttgcatataagatgaaggctgttagagagataattagaactaatttgactgtaaacacaaatatattagtacaaaatatgtgacatagaaagtgataatttcttgggtagtttgcagttttaaaattatgttttaaaatggactatcatctgcttaccgtaactttaaagtatttcgatttcttgactttatatatcttgtggaaaggac

SEQ ID NO: 1363 - DNA, 240 bp, synthetic construct
  misc_feature 1..240: note = Promoter
  source 1..240: mol_type = other DNA
gagggcctatttcccatgattccttcatatttgcatataagatgcaggctgttagagagataattagaactaatttgactgtaaacacaaatatattagtacaaaatatgtgacatagaaagtgataatttcttgggtagtttgcagttttaaaattatgttttaaaatggactatcatctgcttaccgtaactttaaagtatttcgatttcttgactttatatatcttgtggaaaggac

SEQ ID NO: 1364 - DNA, 240 bp, synthetic construct; identical to SEQ ID NO: 1363
  misc_feature 1..240: note = Promoter
  source 1..240: mol_type = other DNA

SEQ ID NO: 1365 - DNA, 240 bp, synthetic construct
  misc_feature 1..240: note = Promoter
  source 1..240: mol_type = other DNA
gagggcctatttcccatgattccttcatatttgcatataagatgcaagctgttagagagataattagaactaatttgactgtaaacacaaatatattagtacaaaatatgtgacatagaaagtgataatttcttgggtagtttgcagttttaaaattatgttttaaaatggactatcatctgcttaccgtaactttaaagtatttcgatttcttgactttatatatcttgtggaaaggac

SEQ ID NO: 1366 - DNA, 240 bp, synthetic construct; identical to SEQ ID NO: 1365
  misc_feature 1..240: note = Promoter
  source 1..240: mol_type = other DNA

SEQ ID NO: 1367 - DNA, 240 bp, synthetic construct
  misc_feature 1..240: note = Promoter
  source 1..240: mol_type = other DNA
gagggcctatttcccatgattccttcatatttgcatataagatgcaaggtgttagagagataattagaactaatttgactgtaaacacaaatatattagtacaaaatatgtgacatagaaagtgataatttcttgggtagtttgcagttttaaaattatgttttaaaatggactatcatctgcttaccgtaactttaaagtatttcgatttcttgactttatatatcttgtggaaaggac

SEQ ID NO: 1368 - DNA, 240 bp, synthetic construct
  misc_feature 1..240: note = Promoter
  source 1..240: mol_type = other DNA
gagggcctatttcccatgattccttcatatttgcatataagatgcaaggcgttagagagataattagaactaatttgactgtaaacacaaatatattagtacaaaatatgtgacatagaaagtgataatttcttgggtagtttgcagttttaaaattatgttttaaaatggactatcatctgcttaccgtaactttaaagtatttcgatttcttgactttatatatcttgtggaaaggac

SEQ ID NO: 1369 - DNA, 240 bp, synthetic construct
  misc_feature 1..240: note = Promoter
  source 1..240: mol_type = other DNA
gagggcctatttcccatgattccttcatatttgcatataagatgcaaggctttagagagataattagaactaatttgactgtaaacacaaatatattagtacaaaatatgtgacatagaaagtgataatttcttgggtagtttgcagttttaaaattatgttttaaaatggactatcatctgcttaccgtaactttaaagtatttcgatttcttgactttatatatcttgtggaaaggac

SEQ ID NO: 1370 - DNA, 240 bp, synthetic construct
  misc_feature 1..240: note = Promoter
  source 1..240: mol_type = other DNA
gagggcctatttcccatgattccttcatatttgcatataagatgcaaggctgtagagagataattagaactaatttgactgtaaacacaaatatattagtacaaaatatgtgacatagaaagtgataatttcttgggtagtttgcagttttaaaattatgttttaaaatggactatcatctgcttaccgtaactttaaagtatttcgatttcttgactttatatatcttgtggaaaggac

SEQ ID NO: 1371 - DNA, 240 bp, synthetic construct; identical to SEQ ID NO: 1370
  misc_feature 1..240: note = Promoter
  source 1..240: mol_type = other DNA

SEQ ID NO: 1372 - DNA, 240 bp, synthetic construct
  misc_feature 1..240: note = Promoter
  source 1..240: mol_type = other DNA
gagggcctatttcccatgattccttcatatttgcatataagatgcaaggctgttgagagataattagaactaatttgactgtaaacacaaatatattagtacaaaatatgtgacatagaaagtgataatttcttgggtagtttgcagttttaaaattatgttttaaaatggactatcatctgcttaccgtaactttaaagtatttcgatttcttgactttatatatcttgtggaaaggac

SEQ ID NO: 1373 - DNA, 240 bp, synthetic construct
  misc_feature 1..240: note = Promoter
  source 1..240: mol_type = other DNA
gagggcctatttcccatgattccttcatatttgcatataagatgcaaggctgttaagagataattagaactaatttgactgtaaacacaaatatattagtacaaaatatgtgacatagaaagtgataatttcttgggtagtttgcagttttaaaattatgttttaaaatggactatcatctgcttaccgtaactttaaagtatttcgatttcttgactttatatatcttgtggaaaggac

SEQ ID NO: 1374 - DNA, 240 bp, synthetic construct
  misc_feature 1..240: note = Promoter
  source 1..240: mol_type = other DNA
gagggcctatttcccatgattccttcatatttgcatataagatgcaaggctgttaggagataattagaactaatttgactgtaaacacaaatatattagtacaaaatatgtgacatagaaagtgataatttcttgggtagtttgcagttttaaaattatgttttaaaatggactatcatctgcttaccgtaactttaaagtatttcgatttcttgactttatatatcttgtggaaaggac

SEQ ID NO: 1375 - DNA, 240 bp, synthetic construct
  misc_feature 1..240: note = Promoter
  source 1..240: mol_type = other DNA
gagggcctatttcccatgattccttcatatttgcatataagatgcaaggctgttagaagataattagaactaatttgactgtaaacacaaatatattagtacaaaatatgtgacatagaaagtgataatttcttgggtagtttgcagttttaaaattatgttttaaaatggactatcatctgcttaccgtaactttaaagtatttcgatttcttgactttatatatcttgtggaaaggac

SEQ ID NO: 1376 - DNA, 240 bp, synthetic construct
  misc_feature 1..240: note = Promoter
  source 1..240: mol_type = other DNA
gagggcctatttcccatgattccttcatatttgcatataagatgcaaggctgttagaggataattagaactaatttgactgtaaacacaaatatattagtacaaaatatgtgacatagaaagtgataatttcttgggtagtttgcagttttaaaattatgttttaaaatggactatcatctgcttaccgtaactttaaagtatttcgatttcttgactttatatatcttgtggaaaggac

SEQ ID NO: 1377 - DNA, 240 bp, synthetic construct
  misc_feature 1..240: note = Promoter
  source 1..240: mol_type = other DNA
gagggcctatttcccatgattccttcatatttgcatataagatgcaaggctgttagagaataattagaactaatttgactgtaaacacaaatatattagtacaaaatatgtgacatagaaagtgataatttcttgggtagtttgcagttttaaaattatgttttaaaatggactatcatctgcttaccgtaactttaaagtatttcgatttcttgactttatatatcttgtggaaaggac

SEQ ID NO: 1378 - DNA, 240 bp, synthetic construct
  misc_feature 1..240: note = Promoter
  source 1..240: mol_type = other DNA
gagggcctatttcccatgattccttcatatttgcatataagatgcaaggctgttagagagtaattagaactaatttgactgtaaacacaaatatattagtacaaaatatgtgacatagaaagtgataatttcttgggtagtttgcagttttaaaattatgttttaaaatggactatcatctgcttaccgtaactttaaagtatttcgatttcttgactttatatatcttgtggaaaggac

SEQ ID NO: 1379 - DNA, 240 bp, synthetic construct
  misc_feature 1..240: note = Promoter
  source 1..240: mol_type = other DNA
gagggcctatttcccatgattccttcatatttgcatataagatgcaaggctgttagagagaaattagaactaatttgactgtaaacacaaatatattagtacaaaatatgtgacatagaaagtgataatttcttgggtagtttgcagttttaaaattatgttttaaaatggactatcatctgcttaccgtaactttaaagtatttcgatttcttgactttatatatcttgtggaaaggac

SEQ ID NO: 1380 - DNA, 240 bp, synthetic construct
  misc_feature 1..240: note = Promoter
  source 1..240: mol_type = other DNA
gagggcctatttcccatgattccttcatatttgcatataagatgcaaggctgttagagagatattagaactaatttgactgtaaacacaaatatattagtacaaaatatgtgacatagaaagtgataatttcttgggtagtttgcagttttaaaattatgttttaaaatggactatcatctgcttaccgtaactttaaagtatttcgatttcttgactttatatatcttgtggaaaggac

SEQ ID NO: 1381 - DNA, 240 bp, synthetic construct; identical to SEQ ID NO: 1380
  misc_feature 1..240: note = Promoter
  source 1..240: mol_type = other DNA

SEQ ID NO: 1382 - DNA, 240 bp, synthetic construct
  misc_feature 1..240: note = Promoter
  source 1..240: mol_type = other DNA
gagggcctatttcccatgattccttcatatttgcatataagatgcaaggctgttagagagataatagaactaatttgactgtaaacacaaatatattagtacaaaatatgtgacatagaaagtgataatttcttgggtagtttgcagttttaaaattatgttttaaaatggactatcatctgcttaccgtaactttaaagtatttcgatttcttgactttatatatcttgtggaaaggac

SEQ ID NO: 1383 - DNA, 240 bp, synthetic construct; identical to SEQ ID NO: 1382
  misc_feature 1..240: note = Promoter
  source 1..240: mol_type = other DNA

SEQ ID NO: 1384 - DNA, 240 bp, synthetic construct
  misc_feature 1..240: note = Promoter
  source 1..240: mol_type = other DNA
gagggcctatttcccatgattccttcatatttgcatataagatgcaaggctgttagagagataattgaactaatttgactgtaaacacaaatatattagtacaaaatatgtgacatagaaagtgataatttcttgggtagtttgcagttttaaaattatgttttaaaatggactatcatctgcttaccgtaactttaaagtatttcgatttcttgactttatatatcttgtggaaaggac

SEQ ID NO: 1385 - DNA, 240 bp, synthetic construct
  misc_feature 1..240: note = Promoter
  source 1..240: mol_type = other DNA
gagggcctatttcccatgattccttcatatttgcatataagatgcaaggctgttagagagataattaaactaatttgactgtaaacacaaatatattagtacaaaatatgtgacatagaaagtgataatttcttgggtagtttgcagttttaaaattatgttttaaaatggactatcatctgcttaccgtaactttaaagtatttcgatttcttgactttatatatcttgtggaaaggac

SEQ ID NO: 1386 - DNA, 240 bp, synthetic construct
  misc_feature 1..240: note = Promoter
  source 1..240: mol_type = other DNA
gagggcctatttcccatgattccttcatatttgcatataagatgcaaggctgttagagagataattagactaatttgactgtaaacacaaatatattagtacaaaatatgtgacatagaaagtgataatttcttgggtagtttgcagttttaaaattatgttttaaaatggactatcatctgcttaccgtaactttaaagtatttcgatttcttgactttatatatcttgtggaaaggac

SEQ ID NO: 1387 - DNA, 240 bp, synthetic construct; identical to SEQ ID NO: 1386
  misc_feature 1..240: note = Promoter
  source 1..240: mol_type = other DNA

SEQ ID NO: 1388 - DNA, 240 bp, synthetic construct
  misc_feature 1..240: note = Promoter
  source 1..240: mol_type = other DNA
gagggcctatttcccatgattccttcatatttgcatataagatgcaaggctgttagagagataattagaataatttgactgtaaacacaaatatattagtacaaaatatgtgacatagaaagtgataatttcttgggtagtttgcagttttaaaattatgttttaaaatggactatcatctgcttaccgtaactttaaagtatttcgatttcttgactttatatatcttgtggaaaggac

SEQ ID NO: 1389 - DNA, 240 bp, synthetic construct
  misc_feature 1..240: note = Promoter
  source 1..240: mol_type = other DNA
gagggcctatttcccatgattccttcatatttgcatataagatgcaaggctgttagagagataattagaacaatttgactgtaaacacaaatatattagtacaaaatatgtgacatagaaagtgataatttcttgggtagtttgcagttttaaaattatgttttaaaatggactatcatctgcttaccgtaactttaaagtatttcgatttcttgactttatatatcttgtggaaaggac

SEQ ID NO: 1390 - DNA, 240 bp, synthetic construct
  misc_feature 1..240: note = Promoter
  source 1..240: mol_type = other DNA
gagggcctatttcccatgattccttcatatttgcatataagatgcaaggctgttagagagataattagaactatttgactgtaaacacaaatatattagtacaaaatatgtgacatagaaagtgataatttcttgggtagtttgcagttttaaaattatgttttaaaatggactatcatctgcttaccgtaactttaaagtatttcgatttcttgactttatatatcttgtggaaaggac

SEQ ID NO: 1391 - DNA, 240 bp, synthetic construct; identical to SEQ ID NO: 1390
  misc_feature 1..240: note = Promoter
  source 1..240: mol_type = other DNA

SEQ ID NO: 1392 - DNA, 240 bp, synthetic construct
  misc_feature 1..240: note = Promoter
  source 1..240: mol_type = other DNA
gagggcctatttcccatgattccttcatatttgcatataagatgcaaggctgttagagagataattagaactaattgactgtaaacacaaatatattagtacaaaatatgtgacatagaaagtgataatttcttgggtagtttgcagttttaaaattatgttttaaaatggactatcatctgcttaccgtaactttaaagtatttcgatttcttgactttatatatcttgtggaaaggac

SEQ ID NO: 1393 - DNA, 240 bp, synthetic construct; identical to SEQ ID NO: 1392
  misc_feature 1..240: note = Promoter
  source 1..240: mol_type = other DNA

SEQ ID NO: 1394 - DNA, 240 bp, synthetic construct; identical to SEQ ID NO: 1392
  misc_feature 1..240: note = Promoter
  source 1..240: mol_type = other DNA

SEQ ID NO: 1395 - DNA, 240 bp, synthetic construct
  misc_feature 1..240: note = Promoter
  source 1..240: mol_type = other DNA
gagggcctatttcccatgattccttcatatttgcatataagatgcaaggctgttagagagataattagaactaatttactgtaaacacaaatatattagtacaaaatatgtgacatagaaagtgataatttcttgggtagtttgcagttttaaaattatgttttaaaatggactatcatctgcttaccgtaactttaaagtatttcgatttcttgactttatatatcttgtggaaaggac

SEQ ID NO: 1396 - DNA, 240 bp, synthetic construct
  misc_feature 1..240: note = Promoter
  source 1..240: mol_type = other DNA
gagggcctatttcccatgattccttcatatttgcatataagatgcaaggctgttagagagataattagaactaatttgctgtaaacacaaatatattagtacaaaatatgtgacatagaaagtgataatttcttgggtagtttgcagttttaaaattatgttttaaaatggactatcatctgcttaccgtaactttaaagtatttcgatttcttgactttatatatcttgtggaaaggac

SEQ ID NO: 1397 - DNA, 240 bp, synthetic construct
  misc_feature 1..240: note = Promoter
  source 1..240: mol_type = other DNA
gagggcctatttcccatgattccttcatatttgcatataagatgcaaggctgttagagagataattagaactaatttgatgtaaacacaaatatattagtacaaaatatgtgacatagaaagtgataatttcttgggtagtttgcagttttaaaattatgttttaaaatggactatcatctgcttaccgtaactttaaagtatttcgatttcttgactttatatatcttgtggaaaggac

SEQ ID NO: 1398 - DNA, 240 bp, synthetic construct
  misc_feature 1..240: note = Promoter
  source 1..240: mol_type = other DNA
gagggcctatttcccatgattccttcatatttgcatataagatgcaaggctgttagagagataattagaactaatttgacgtaaacacaaatatattagtacaaaatatgtgacatagaaagtgataatttcttgggtagtttgcagttttaaaattatgttttaaaatggactatcatctgcttaccgtaactttaaagtatttcgatttcttgactttatatatcttgtggaaaggac

SEQ ID NO: 1399 - DNA, 240 bp, synthetic construct
  misc_feature 1..240: note = Promoter
  source 1..240: mol_type = other DNA
gagggcctatttcccatgattccttcatatttgcatataagatgcaaggctgttagagagataattagaactaatttgacttaaacacaaatatattagtacaaaatatgtgacatagaaagtgataatttcttgggtagtttgcagttttaaaattatgttttaaaatggactatcatctgcttaccgtaactttaaagtatttcgatttcttgactttatatatcttgtggaaaggac

SEQ ID NO: 1400 - DNA, 240 bp, synthetic construct
  misc_feature 1..240: note = Promoter
  source 1..240: mol_type = other DNA
gagggcctatttcccatgattccttcatatttgcatataagatgcaaggctgttagagagataattagaactaatttgactgaaacacaaatatattagtacaaaatatgtgacatagaaagtgataatttcttgggtagtttgcagttttaaaattatgttttaaaatggactatcatctgcttaccgtaactttaaagtatttcgatttcttgactttatatatcttgtggaaaggac

SEQ ID NO: 1401 - DNA, 240 bp, synthetic construct
  misc_feature 1..240: note = Promoter
  source 1..240: mol_type = other DNA
gagggcctatttcccatgattccttcatatttgcatataagatgcaaggctgttagagagataattagaactaatttgactgtaacacaaatatattagtacaaaatatgtgacatagaaagtgataatttcttgggtagtttgcagttttaaaattatgttttaaaatggactatcatctgcttaccgtaactttaaagtatttcgatttcttgactttatatatcttgtggaaaggac

SEQ ID NO: 1402 - DNA, 240 bp, synthetic construct; identical to SEQ ID NO: 1401
  misc_feature 1..240: note = Promoter
  source 1..240: mol_type = other DNA

SEQ ID NO: 1403 - DNA, 240 bp, synthetic construct; identical to SEQ ID NO: 1401
  misc_feature 1..240: note = Promoter
  source 1..240: mol_type = other DNA

SEQ ID NO: 1404 - DNA, 240 bp, synthetic construct
  misc_feature 1..240: note = Promoter
  source 1..240: mol_type = other DNA
gagggcctatttcccatgattccttcatatttgcatataagatgcaaggctgttagagagataattagaactaatttgactgtaaaacaaatatattagtacaaaatatgtgacatagaaagtgataatttcttgggtagtttgcagttttaaaattatgttttaaaatggactatcatctgcttaccgtaactttaaagtatttcgatttcttgactttatatatcttgtggaaaggac

SEQ ID NO: 1405 - DNA, 240 bp, synthetic construct
  misc_feature 1..240: note = Promoter
  source 1..240: mol_type = other DNA
gagggcctatttcccatgattccttcatatttgcatataagatgcaaggctgttagagagataattagaactaatttgactgtaaaccaaatatattagtacaaaatatgtgacatagaaagtgataatttcttgggtagtttgcagttttaaaattatgttttaaaatggactatcatctgcttaccgtaactttaaagtatttcgatttcttgactttatatatcttgtggaaaggac

SEQ ID NO: 1406 - DNA, 240 bp, synthetic construct
  misc_feature 1..240: note = Promoter
  source 1..240: mol_type = other DNA
gagggcctatttcccatgattccttcatatttgcatataagatgcaaggctgttagagagataattagaactaatttgactgtaaacaaaatatattagtacaaaatatgtgacatagaaagtgataatttcttgggtagtttgcagttttaaaattatgttttaaaatggactatcatctgcttaccgtaactttaaagtatttcgatttcttgactttatatatcttgtggaaaggac

SEQ ID NO: 1407 - DNA, 240 bp, synthetic construct
  misc_feature 1..240: note = Promoter
  source 1..240: mol_type = other DNA
gagggcctatttcccatgattccttcatatttgcatataagatgcaaggctgttagagagataattagaactaatttgactgtaaacacaatatattagtacaaaatatgtgacatagaaagtgataatttcttgggtagtttgcagttttaaaattatgttttaaaatggactatcatctgcttaccgtaactttaaagtatttcgatttcttgactttatatatcttgtggaaaggac

SEQ ID NO: 1408 - DNA, 240 bp, synthetic construct; identical to SEQ ID NO: 1407
  misc_feature 1..240: note = Promoter
  source 1..240: mol_type = other DNA

SEQ ID NO: 1409 - DNA, 240 bp, synthetic construct; identical to SEQ ID NO: 1407
  misc_feature 1..240: note = Promoter
  source 1..240: mol_type = other DNA

SEQ ID NO: 1410 - DNA, 240 bp, synthetic construct
  misc_feature 1..240: note = Promoter
  source 1..240: mol_type = other DNA
gagggcctatttcccatgattccttcatatttgcatataagatgcaaggctgttagagagataattagaactaatttgactgtaaacacaaaatattagtacaaaatatgtgacatagaaagtgataatttcttgggtagtttgcagttttaaaattatgttttaaaatggactatcatctgcttaccgtaactttaaagtatttcgatttcttgactttatatatcttgtggaaaggac

SEQ ID NO: 1411 - DNA, 240 bp, synthetic construct
  misc_feature 1..240: note = Promoter
  source 1..240: mol_type = other DNA
gagggcctatttcccatgattccttcatatttgcatataagatgcaaggctgttagagagataattagaactaatttgactgtaaacacaaattattagtacaaaatatgtgacatagaaagtgataatttcttgggtagtttgcagttttaaaattatgttttaaaatggactatcatctgcttaccgtaactttaaagtatttcgatttcttgactttatatatcttgtggaaaggac

SEQ ID NO: 1412 - DNA, 240 bp, synthetic construct
  misc_feature 1..240: note = Promoter
  source 1..240: mol_type = other DNA
gagggcctatttcccatgattccttcatatttgcatataagatgcaaggctgttagagagataattagaactaatttgactgtaaacacaaataattagtacaaaatatgtgacatagaaagtgataatttcttgggtagtttgcagttttaaaattatgttttaaaatggactatcatctgcttaccgtaactttaaagtatttcgatttcttgactttatatatcttgtggaaaggac

SEQ ID NO: 1413 - DNA, 240 bp, synthetic construct
  misc_feature 1..240: note = Promoter
  source 1..240: mol_type = other DNA
gagggcctatttcccatgattccttcatatttgcatataagatgcaaggctgttagagagataattagaactaatttgactgtaaacacaaatatttagtacaaaatatgtgacatagaaagtgataatttcttgggtagtttgcagttttaaaattatgttttaaaatggactatcatctgcttaccgtaactttaaagtatttcgatttcttgactttatatatcttgtggaaaggac

SEQ ID NO: 1414 - DNA, 240 bp, synthetic construct
  misc_feature 1..240: note = Promoter
  source 1..240: mol_type = other DNA
gagggcctatttcccatgattccttcatatttgcatataagatgcaaggctgttagagagataattagaactaatttgactgtaaacacaaatatatagtacaaaatatgtgacatagaaagtgataatttcttgggtagtttgcagttttaaaattatgttttaaaatggactatcatctgcttaccgtaactttaaagtatttcgatttcttgactttatatatcttgtggaaaggac

SEQ ID NO: 1415 - DNA, 240 bp, synthetic construct; identical to SEQ ID NO: 1414
  misc_feature 1..240: note = Promoter
  source 1..240: mol_type = other DNA

SEQ ID NO: 1416 - DNA, 240 bp, synthetic construct
  misc_feature 1..240: note = Promoter
  source 1..240: mol_type = other DNA
gagggcctatttcccatgattccttcatatttgcatataagatgcaaggctgttagagagataattagaactaatttgactgtaaacacaaatatattgtacaaaatatgtgacatagaaagtgataatttcttgggtagtttgcagttttaaaattatgttttaaaatggactatcatctgcttaccgtaactttaaagtatttcgatttcttgactttatatatcttgtggaaaggac

SEQ ID NO: 1417 - DNA, 240 bp, synthetic construct
  misc_feature 1..240: note = Promoter
  source 1..240: mol_type = other DNA
gagggcctatttcccatgattccttcatatttgcatataagatgcaaggctgttagagagataattagaactaatttgactgtaaacacaaatatattatacaaaatatgtgacatagaaagtgataatttcttgggtagtttgcagttttaaaattatgttttaaaatggactatcatctgcttaccgtaactttaaagtatttcgatttcttgactttatatatcttgtggaaaggac

SEQ ID NO: 1418 - DNA, 240 bp, synthetic construct
  misc_feature 1..240: note = Promoter
  source 1..240: mol_type = other DNA
gagggcctatttcccatgattccttcatatttgcatataagatgcaaggctgttagagagataattagaactaatttgactgtaaacacaaatatattagacaaaatatgtgacatagaaagtgataatttcttgggtagtttgcagttttaaaattatgttttaaaatggactatcatctgcttaccgtaactttaaagtatttcgatttcttgactttatatatcttgtggaaaggac

SEQ ID NO: 1419 - DNA, 240 bp, synthetic construct
  misc_feature 1..240: note = Promoter
  source 1..240: mol_type = other DNA
gagggcctatttcccatgattccttcatatttgcatataagatgcaaggctgttagagagataattagaactaatttgactgtaaacacaaatatattagtcaaaatatgtgacatagaaagtgataatttcttgggtagtttgcagttttaaaattatgttttaaaatggactatcatctgcttaccgtaactttaaagtatttcgatttcttgactttatatatcttgtggaaaggac

SEQ ID NO: 1420 - DNA, 240 bp, synthetic construct
  misc_feature 1..240: note = Promoter
  source 1..240: mol_type = other DNA
gagggcctatttcccatgattccttcatatttgcatataagatgcaaggctgttagagagataattagaactaatttgactgtaaacacaaatatattagtaaaaatatgtgacatagaaagtgataatttcttgggtagtttgcagttttaaaattatgttttaaaatggactatcatctgcttaccgtaactttaaagtatttcgatttcttgactttatatatcttgtggaaaggac

SEQ ID NO: 1421 - DNA, 240 bp, synthetic construct
  misc_feature 1..240: note = Promoter
  source 1..240: mol_type = other DNA
gagggcctatttcccatgattccttcatatttgcatataagatgcaaggctgttagagagataattagaactaatttgactgtaaacacaaatatattagtacaaatatgtgacatagaaagtgataatttcttgggtagtttgcagttttaaaattatgttttaaaatggactatcatctgcttaccgtaactttaaagtatttcgatttcttgactttatatatcttgtggaaaggac

SEQ ID NO: 1422 - DNA, 240 bp, synthetic construct; identical to SEQ ID NO: 1421
  misc_feature 1..240: note = Promoter
  source 1..240: mol_type = other DNA

SEQ ID NO: 1423 - DNA, 240 bp, synthetic construct; identical to SEQ ID NO: 1421
  misc_feature 1..240: note = Promoter
  source 1..240: mol_type = other DNA

SEQ ID NO: 1424 - DNA, 240 bp, synthetic construct; identical to SEQ ID NO: 1421
  misc_feature 1..240: note = Promoter
  source 1..240: mol_type = other DNA

SEQ ID NO: 1425 - DNA, 240 bp, synthetic construct
  misc_feature 1..240: note = Promoter
  source 1..240: mol_type = other DNA
gagggcctatttcccatgattccttcatatttgcatataagatgcaaggctgttagagagataattagaactaatttgactgtaaacacaaatatattagtacaaaaatgtgacatagaaagtgataatttcttgggtagtttgcagttttaaaattatgttttaaaatggactatcatctgcttaccgtaactttaaagtatttcgatttcttgactttatatatcttgtggaaaggac

SEQ ID NO: 1426 - DNA, 240 bp, synthetic construct
  misc_feature 1..240: note = Promoter
  source 1..240: mol_type = other DNA
gagggcctatttcccatgattccttcatatttgcatataagatgcaaggctgttagagagataattagaactaatttgactgtaaacacaaatatattagtacaaaattgtgacatagaaagtgataatttcttgggtagtttgcagttttaaaattatgttttaaaatggactatcatctgcttaccgtaactttaaagtatttcgatttcttgactttatatatcttgtggaaaggac

SEQ ID NO: 1427 - DNA, 240 bp, synthetic construct
  misc_feature 1..240: note = Promoter
  source 1..240: mol_type = other DNA
gagggcctatttcccatgattccttcatatttgcatataagatgcaaggctgttagagagataattagaactaatttgactgtaaacacaaatatattagtacaaaatagtgacatagaaagtgataatttcttgggtagtttgcagttttaaaattatgttttaaaatggactatcatctgcttaccgtaactttaaagtatttcgatttcttgactttatatatcttgtggaaaggac

SEQ ID NO: 1428 - DNA, 240 bp, synthetic construct
  misc_feature 1..240: note = Promoter
  source 1..240: mol_type = other DNA
gagggcctatttcccatgattccttcatatttgcatataagatgcaaggctgttagagagataattagaactaatttgactgtaaacacaaatatattagtacaaaatattgacatagaaagtgataatttcttgggtagtttgcagttttaaaattatgttttaaaatggactatcatctgcttaccgtaactttaaagtatttcgatttcttgactttatatatcttgtggaaaggac

SEQ ID NO: 1429 - DNA, 240 bp, synthetic construct
  misc_feature 1..240: note = Promoter
  source 1..240: mol_type = other DNA
gagggcctatttcccatgattccttcatatttgcatataagatgcaaggctgttagagagataattagaactaatttgactgtaaacacaaatatattagtacaaaatatggacatagaaagtgataatttcttgggtagtttgcagttttaaaattatgttttaaaatggactatcatctgcttaccgtaactttaaagtatttcgatttcttgactttatatatcttgtggaaaggac

SEQ ID NO: 1430 - DNA, 240 bp, synthetic construct
  misc_feature 1..240: note = Promoter
  source 1..240: mol_type = other DNA
gagggcctatttcccatgattccttcatatttgcatataagatgcaaggctgttagagagataattagaactaatttgactgtaaacacaaatatattagtacaaaatatgtacatagaaagtgataatttcttgggtagtttgcagttttaaaattatgttttaaaatggactatcatctgcttaccgtaactttaaagtatttcgatttcttgactttatatatcttgtggaaaggac

SEQ ID NO: 1431 - DNA, 240 bp, synthetic construct
  misc_feature 1..240: note = Promoter
  source 1..240: mol_type = other DNA
gagggcctatttcccatgattccttcatatttgcatataagatgcaaggctgttagagagataattagaactaatttgactgtaaacacaaatatattagtacaaaatatgtgcatagaaagtgataatttcttgggtagtttgcagttttaaaattatgttttaaaatggactatcatctgcttaccgtaactttaaagtatttcgatttcttgactttatatatcttgtggaaaggac

SEQ ID NO: 1432 - DNA, 240 bp, synthetic construct
  misc_feature 1..240: note = Promoter
  source 1..240: mol_type = other DNA
gagggcctatttcccatgattccttcatatttgcatataagatgcaaggctgttagagagataattagaactaatttgactgtaaacacaaatatattagtacaaaatatgtgaatagaaagtgataatttcttgggtagtttgcagttttaaaattatgttttaaaatggactatcatctgcttaccgtaactttaaagtatttcgatttcttgactttatatatcttgtggaaaggac

SEQ ID NO: 1433 - DNA, 240 bp, synthetic construct
  misc_feature 1..240: note = Promoter
  source 1..240: mol_type = other DNA
gagggcctatttcccatgattccttcatatttgcatataagatgcaaggctgttagagagataattagaactaatttgactgtaaacacaaatatattagtacaaaatatgtgactagaaagtgataatttcttgggtagtttgcagttttaaaattatgttttaaaatggactatcatctgcttaccgtaactttaaagtatttcgatttcttgactttatatatcttgtggaaaggac

SEQ ID NO: 1434 - DNA, 240 bp, synthetic construct
  misc_feature 1..240: note = Promoter
  source 1..240: mol_type = other DNA
gagggcctatttcccatgattccttcatatttgcatataagatgcaaggctgttagagagataattagaactaatttgactgtaaacacaaatatattagtacaaaatatgtgacaagaaagtgataatttcttgggtagtttgcagttttaaaattatgttttaaaatggactatcatctgcttaccgtaactttaaagtatttcgatttcttgactttatatatcttgtggaaaggac

SEQ ID NO: 1435 - DNA, 240 bp, synthetic construct
  misc_feature 1..240: note = Promoter
  source 1..240: mol_type = other DNA
gagggcctatttcccatgattccttcatatttgcatataagatgcaaggctgttagagagataattagaactaatttgactgtaaacacaaatatattagtacaaaatatgtgacatgaaagtgataatttcttgggtagtttgcagttttaaaattatgttttaaaatggactatcatctgcttaccgtaactttaaagtatttcgatttcttgactttatatatcttgtggaaaggac

SEQ ID NO: 1436 - DNA, 240 bp, synthetic construct
  misc_feature 1..240: note = Promoter
  source 1..240: mol_type = other DNA
gagggcctatttcccatgattccttcatatttgcatataagatgcaaggctgttagagagataattagaactaatttgactgtaaacacaaatatattagtacaaaatatgtgacataaaagtgataatttcttgggtagtttgcagttttaaaattatgttttaaaatggactatcatctgcttaccgtaactttaaagtatttcgatttcttgactttatatatcttgtggaaaggac

SEQ ID NO: 1437 - DNA, 240 bp, synthetic construct
  misc_feature 1..240: note = Promoter
  source 1..240: mol_type = other DNA
gagggcctatttcccatgattccttcatatttgcatataagatgcaaggctgttagagagataattagaactaatttgactgtaaacacaaatatattagtacaaaatatgtgacatagaagtgataatttcttgggtagtttgcagttttaaaattatgttttaaaatggactatcatctgcttaccgtaactttaaagtatttcgatttcttgactttatatatcttgtggaaaggac

SEQ ID NO: 1438 - DNA, 240 bp, synthetic construct; identical to SEQ ID NO: 1437
  misc_feature 1..240: note = Promoter
  source 1..240: mol_type = other DNA

SEQ ID NO: 1439 - DNA, 240 bp, synthetic construct; identical to SEQ ID NO: 1437
  misc_feature 1..240: note = Promoter
  source 1..240: mol_type = other DNA

SEQ ID NO: 1440 - DNA, 240 bp, synthetic construct
  misc_feature 1..240: note = Promoter
  source 1..240: mol_type = other DNA
gagggcctatttcccatgattccttcatatttgcatataagatgcaaggctgttagagagataattagaactaatttgactgtaaacacaaatatattagtacaaaatatgtgacatagaaatgataatttcttgggtagtttgcagttttaaaattatgttttaaaatggactatcatctgcttaccgtaactttaaagtatttcgatttcttgactttatatatcttgtggaaaggac

SEQ ID NO: 1441 - DNA, 240 bp, synthetic construct
  misc_feature 1..240: note = Promoter
  source 1..240: mol_type = other DNA
gagggcctatttcccatgattccttcatatttgcatataagatgcaaggctgttagagagataattagaactaatttgactgtaaacacaaatatattagtacaaaatatgtgacatagaaaggataatttcttgggtagtttgcagttttaaaattatgttttaaaatggactatcatctgcttaccgtaactttaaagtatttcgatttcttgactttatatatcttgtggaaaggac

SEQ ID NO: 1442 - DNA, 240 bp, synthetic construct
  misc_feature 1..240: note = Promoter
  source 1..240: mol_type = other DNA
gagggcctatttcccatgattccttcatatttgcatataagatgcaaggctgttagagagataattagaactaatttgactgtaaacacaaatatattagtacaaaatatgtgacatagaaagtataatttcttgggtagtttgcagttttaaaattatgttttaaaatggactatcatctgcttaccgtaactttaaagtatttcgatttcttgactttatatatcttgtggaaaggac

SEQ ID NO: 1443 - DNA, 240 bp, synthetic construct
  misc_feature 1..240: note = Promoter
  source 1..240: mol_type = other DNA
gagggcctatttcccatgattccttcatatttgcatataagatgcaaggctgttagagagataattagaactaatttgactgtaaacacaaatatattagtacaaaatatgtgacatagaaagtgtaatttcttgggtagtttgcagttttaaaattatgttttaaaatggactatcatctgcttaccgtaactttaaagtatttcgatttcttgactttatatatcttgtggaaaggac

SEQ ID NO: 1444 - DNA, 240 bp, synthetic construct
  misc_feature 1..240: note = Promoter
  source 1..240: mol_type = other DNA
gagggcctatttcccatgattccttcatatttgcatataagatgcaaggctgttagagagataattagaactaatttgactgtaaacacaaatatattagtacaaaatatgtgacatagaaagtgaaatttcttgggtagtttgcagttttaaaattatgttttaaaatggactatcatctgcttaccgtaactttaaagtatttcgatttcttgactttatatatcttgtggaaaggac

SEQ ID NO: 1445 - DNA, 240 bp, synthetic construct
  misc_feature 1..240: note = Promoter
  source 1..240: mol_type = other DNA
gagggcctatttcccatgattccttcatatttgcatataagatgcaaggctgttagagagataattagaactaatttgactgtaaacacaaatatattagtacaaaatatgtgacatagaaagtgatatttcttgggtagtttgcagttttaaaattatgttttaaaatggactatcatctgcttaccgtaactttaaagtatttcgatttcttgactttatatatcttgtggaaaggac

SEQ ID NO: 1446 - DNA, 240 bp, synthetic construct; identical to SEQ ID NO: 1445
  misc_feature 1..240: note = Promoter
  source 1..240: mol_type = other DNA

SEQ ID NO: 1447 - DNA, 240 bp, synthetic construct
  misc_feature 1..240: note = Promoter
  source 1..240: mol_type = other DNA
gagggcctatttcccatgattccttcatatttgcatataagatgcaaggctgttagagagataattagaactaatttgactgtaaacacaaatatattagtacaaaatatgtgacatagaaagtgataattcttgggtagtttgcagttttaaaattatgttttaaaatggactatcatctgcttaccgtaactttaaagtatttcgatttcttgactttatatatcttgtggaaaggac

SEQ ID NO: 1448 - DNA, 240 bp, synthetic construct; identical to SEQ ID NO: 1447
  misc_feature 1..240: note = Promoter
  source 1..240: mol_type = other DNA

SEQ ID NO: 1449 - DNA, 240 bp, synthetic construct; identical to SEQ ID NO: 1447
  misc_feature 1..240: note = Promoter
  source 1..240: mol_type = other DNA

SEQ ID NO: 1450 - DNA, 240 bp, synthetic construct
  misc_feature 1..240: note = Promoter
  source 1..240: mol_type = other DNA
gagggcctatttcccatgattccttcatatttgcatataagatgcaaggctgttagagagataattagaactaatttgactgtaaacacaaatatattagtacaaaatatgtgacatagaaagtgataatttttgggtagtttgcagttttaaaattatgttttaaaatggactatcatctgcttaccgtaactttaaagtatttcgatttcttgactttatatatcttgtggaaaggac

SEQ ID NO: 1451 - DNA, 240 bp, synthetic construct
  misc_feature 1..240: note = Promoter
  source 1..240: mol_type = other DNA
gagggcctatttcccatgattccttcatatttgcatataagatgcaaggctgttagagagataattagaactaatttgactgtaaacacaaatatattagtacaaaatatgtgacatagaaagtgataatttctgggtagtttgcagttttaaaattatgttttaaaatggactatcatctgcttaccgtaactttaaagtatttcgatttcttgactttatatatcttgtggaaaggac

SEQ ID NO: 1452 - DNA, 240 bp, synthetic construct; identical to SEQ ID NO: 1451
  misc_feature 1..240: note = Promoter
  source 1..240: mol_type = other DNA

SEQ ID NO: 1453 - DNA, 240 bp, synthetic construct
  misc_feature 1..240: note = Promoter
  source 1..240: mol_type = other DNA
gagggcctatttcccatgattccttcatatttgcatataagatgcaaggctgttagagagataattagaactaatttgactgtaaacacaaatatattagtacaaaatatgtgacatagaaagtgataatttcttggtagtttgcagttttaaaattatgttttaaaatggactatcatctgcttaccgtaactttaaagtatttcgatttcttgactttatatatcttgtggaaaggac

SEQ ID NO: 1454 - DNA, 240 bp, synthetic construct; identical to SEQ ID NO: 1453
  misc_feature 1..240: note = Promoter
  source 1..240: mol_type = other DNA

SEQ ID NO: 1455 - DNA, 240 bp, synthetic construct; identical to SEQ ID NO: 1453
  misc_feature 1..240: note = Promoter
  source 1..240: mol_type = other DNA

SEQ ID NO: 1456 - DNA, 240 bp, synthetic construct
  misc_feature 1..240: note = Promoter
  source 1..240: mol_type = other DNA
gagggcctatttcccatgattccttcatatttgcatataagatgcaaggctgttagagagataattagaactaatttgactgtaaacacaaatatattagtacaaaatatgtgacatagaaagtgataatttcttgggagtttgcagttttaaaattatgttttaaaatggactatcatctgcttaccgtaactttaaagtatttcgatttcttgactttatatatcttgtggaaaggac

SEQ ID NO: 1457 - DNA, 240 bp, synthetic construct
  misc_feature 1..240: note = Promoter
  source 1..240: mol_type = other DNA
gagggcctatttcccatgattccttcatatttgcatataagatgcaaggctgttagagagataattagaactaatttgactgtaaacacaaatatattagtacaaaatatgtgacatagaaagtgataatttcttgggtgtttgcagttttaaaattatgttttaaaatggactatcatctgcttaccgtaactttaaagtatttcgatttcttgactttatatatcttgtggaaaggac

SEQ ID NO: 1458 - DNA, 240 bp, synthetic construct
  misc_feature 1..240: note = Promoter
  source 1..240: mol_type = other DNA
gagggcctatttcccatgattccttcatatttgcatataagatgcaaggctgttagagagataattagaactaatttgactgtaaacacaaatatattagtacaaaatatgtgacatagaaagtgataatttcttgggtatttgcagttttaaaattatgttttaaaatggactatcatctgcttaccgtaactttaaagtatttcgatttcttgactttatatatcttgtggaaaggac

SEQ ID NO: 1459 - DNA, 240 bp, synthetic construct
  misc_feature 1..240: note = Promoter
  source 1..240: mol_type = other DNA
gagggcctatttcccatgattccttcatatttgcatataagatgcaaggctgttagagagataattagaactaatttgactgtaaacacaaatatattagtacaaaatatgtgacatagaaagtgataatttcttgggtagttgcagttttaaaattatgttttaaaatggactatcatctgcttaccgtaactttaaagtatttcgatttcttgactttatatatcttgtggaaaggac

SEQ ID NO: 1460 - DNA, 240 bp, synthetic construct; identical to SEQ ID NO: 1459
  misc_feature 1..240: note = Promoter
  source 1..240: mol_type = other DNA

SEQ ID NO: 1461 - DNA, 240 bp, synthetic construct; identical to SEQ ID NO: 1459
  misc_feature 1..240: note = Promoter
  source 1..240: mol_type = other DNA

SEQ ID NO: 1462 - DNA, 240 bp, synthetic construct
  misc_feature 1..240: note = Promoter
  source 1..240: mol_type = other DNA
gagggcctatttcccatgattccttcatatttgcatataagatgcaaggctgttagagagataattagaactaatttgactgtaaacacaaatatattagtacaaaatatgtgacatagaaagtgataatttcttgggtagtttcagttttaaaattatgttttaaaatggactatcatctgcttaccgtaactttaaagtatttcgatttcttgactttatatatcttgtggaaaggac

SEQ ID NO: 1463 - DNA, 240 bp, synthetic construct
  misc_feature 1..240: note = Promoter
  source 1..240: mol_type = other DNA
gagggcctatttcccatgattccttcatatttgcatataagatgcaaggctgttagagagataattagaactaatttgactgtaaacacaaatatattagtacaaaatatgtgacatagaaagtgataatttcttgggtagtttgagttttaaaattatgttttaaaatggactatcatctgcttaccgtaactttaaagtatttcgatttcttgactttatatatcttgtggaaaggac

SEQ ID NO: 1464 - DNA, 240 bp, synthetic construct
  misc_feature 1..240: note = Promoter
  source 1..240: mol_type = other DNA
gagggcctatttcccatgattccttcatatttgcatataagatgcaaggctgttagagagataattagaactaatttgactgtaaacacaaatatattagtacaaaatatgtgacatagaaagtgataatttcttgggtagtttgcgttttaaaattatgttttaaaatggactatcatctgcttaccgtaactttaaagtatttcgatttcttgactttatatatcttgtggaaaggac

SEQ ID NO: 1465 - DNA, 240 bp, synthetic construct
  misc_feature 1..240: note = Promoter
  source 1..240: mol_type = other DNA
gagggcctatttcccatgattccttcatatttgcatataagatgcaaggctgttagagagataattagaactaatttgactgtaaacacaaatatattagtacaaaatatgtgacatagaaagtgataatttcttgggtagtttgcattttaaaattatgttttaaaatggactatcatctgcttaccgtaactttaaagtatttcgatttcttgactttatatatcttgtggaaaggac

SEQ ID NO: 1466 - DNA, 240 bp, synthetic construct
  misc_feature 1..240: note = Promoter
  source 1..240: mol_type = other DNA
gagggcctatttcccatgattccttcatatttgcatataagatgcaaggctgttagagagataattagaactaatttgactgtaaacacaaatatattagtacaaaatatgtgacatagaaagtgataatttcttgggtagtttgcagtttaaaattatgttttaaaatggactatcatctgcttaccgtaactttaaagtatttcgatttcttgactttatatatcttgtggaaaggac

SEQ ID NO: 1467 - DNA, 240 bp, synthetic construct; identical to SEQ ID NO: 1466
  misc_feature 1..240: note = Promoter
  source 1..240: mol_type = other DNA

SEQ ID NO: 1468 - DNA, 240 bp, synthetic construct; identical to SEQ ID NO: 1466
  misc_feature 1..240: note = Promoter
  source 1..240: mol_type = other DNA

SEQ ID NO: 1469 - DNA, 240 bp, synthetic construct; identical to SEQ ID NO: 1466
  misc_feature 1..240: note = Promoter
  source 1..240: mol_type = other DNA

SEQ ID NO: 1470 - DNA, 240 bp, synthetic construct
  misc_feature 1..240: note = Promoter
  source 1..240: mol_type = other DNA
gagggcctatttcccatgattccttcatatttgcatataagatgcaaggctgttagagagataattagaactaatttgactgtaaacacaaatatattagtacaaaatatgtgacatagaaagtgataatttcttgggtagtttgcagttttaaattatgttttaaaatggactatcatctgcttaccgtaactttaaagtatttcgatttcttgactttatatatcttgtggaaaggac

SEQ ID NO: 1471 - DNA, 240 bp, synthetic construct; identical to SEQ ID NO: 1470
  misc_feature 1..240: note = Promoter
  source 1..240: mol_type = other DNA

SEQ ID NO: 1472 - DNA, 240 bp, synthetic construct; identical to SEQ ID NO: 1470
  misc_feature 1..240: note = Promoter
  source 1..240: mol_type = other DNA

SEQ ID NO: 1473 - DNA, 240 bp, synthetic construct; identical to SEQ ID NO: 1470
  misc_feature 1..240: note = Promoter
  source 1..240: mol_type = other DNA

SEQ ID NO: 1474 - DNA, 240 bp, synthetic construct
  misc_feature 1..240: note = Promoter
  source 1..240: mol_type = other DNA
gagggcctatttcccatgattccttcatatttgcatataagatgcaaggctgttagagagataattagaactaatttgactgtaaacacaaatatattagtacaaaatatgtgacatagaaagtgataatttcttgggtagtttgcagttttaaaatatgttttaaaatggactatcatctgcttaccgtaactttaaagtatttcgatttcttgactttatatatcttgtggaaaggac

SEQ ID NO: 1475 - DNA, 240 bp, synthetic construct; identical to SEQ ID NO: 1474
  misc_feature 1..240: note = Promoter
  source 1..240: mol_type = other DNA

SEQ ID NO: 1476 - DNA, 240 bp, synthetic construct
  misc_feature 1..240: note = Promoter
  source 1..240: mol_type = other DNA
gagggcctatttcccatgattccttcatatttgcatataagatgcaaggctgttagagagataattagaactaatttgactgtaaacacaaatatattagtacaaaatatgtgacatagaaagtgataatttcttgggtagtttgcagttttaaaatttgttttaaaatggactatcatctgcttaccgtaactttaaagtatttcgatttcttgactttatatatcttgtggaaaggac

SEQ ID NO: 1477 - DNA, 240 bp, synthetic construct
  misc_feature 1..240: note = Promoter
  source 1..240: mol_type = other DNA
gagggcctatttcccatgattccttcatatttgcatataagatgcaaggctgttagagagataattagaactaatttgactgtaaacacaaatatattagtacaaaatatgtgacatagaaagtgataatttcttgggtagtttgcagttttaaaattagttttaaaatggactatcatctgcttaccgtaactttaaagtatttcgatttcttgactttatatatcttgtggaaaggac

SEQ ID NO: 1478 - DNA, 240 bp, synthetic construct
  misc_feature 1..240: note = Promoter
  source 1..240: mol_type = other DNA
gagggcctatttcccatgattccttcatatttgcatataagatgcaaggctgttagagagataattagaactaatttgactgtaaacacaaatatattagtacaaaatatgtgacatagaaagtgataatttcttgggtagtttgcagttttaaaattatttttaaaatggactatcatctgcttaccgtaactttaaagtatttcgatttcttgactttatatatcttgtggaaaggac

SEQ ID NO: 1479 - DNA, 240 bp, synthetic construct
  misc_feature 1..240: note = Promoter
  source 1..240: mol_type = other DNA
gagggcctatttcccatgattccttcatatttgcatataagatgcaaggctgttagagagataattagaactaatttgactgtaaacacaaatatattagtacaaaatatgtgacatagaaagtgataatttcttgggtagtttgcagttttaaaattatgtttaaaatggactatcatctgcttaccgtaactttaaagtatttcgatttcttgactttatatatcttgtggaaaggac

SEQ ID NO: 1480 - DNA, 240 bp, synthetic construct; identical to SEQ ID NO: 1479
  misc_feature 1..240: note = Promoter
  source 1..240: mol_type = other DNA

SEQ ID NO: 1481 - DNA, 240 bp, synthetic construct; identical to SEQ ID NO: 1479
  misc_feature 1..240: note = Promoter
  source 1..240: mol_type = other DNA

SEQ ID NO: 1482 - DNA, 240 bp, synthetic construct; identical to SEQ ID NO: 1479
  misc_feature 1..240: note = Promoter
  source 1..240: mol_type = other DNA

SEQ ID NO: 1483 - DNA, 240 bp, synthetic construct
  misc_feature 1..240: note = Promoter
  source 1..240: mol_type = other DNA
gagggcctatttcccatgattccttcatatttgcatataagatgcaaggctgttagagagataattagaactaatttgactgtaaacacaaatatattagtacaaaatatgtgacatagaaagtgataatttcttgggtagtttgcagttttaaaattatgttttaaatggactatcatctgcttaccgtaactttaaagtatttcgatttcttgactttatatatcttgtggaaaggac

SEQ ID NO: 1484 - DNA, 240 bp, synthetic construct; identical to SEQ ID NO: 1483
  misc_feature 1..240: note = Promoter
  source 1..240: mol_type = other DNA

SEQ ID NO: 1485 - DNA, 240 bp, synthetic construct; identical to SEQ ID NO: 1483
  misc_feature 1..240: note = Promoter
  source 1..240: mol_type = other DNA

SEQ ID NO: 1486 - DNA, 240 bp, synthetic construct; identical to SEQ ID NO: 1483
  misc_feature 1..240: note = Promoter
  source 1..240: mol_type = other DNA

SEQ ID NO: 1487 - DNA, 240 bp, synthetic construct
  misc_feature 1..240: note = Promoter
  source 1..240: mol_type = other DNA
gagggcctatttcccatgattccttcatatttgcatataagatgcaaggctgttagagagataattagaactaatttgactgtaaacacaaatatattagtacaaaatatgtgacatagaaagtgataatttcttgggtagtttgcagttttaaaattatgttttaaaaggactatcatctgcttaccgtaactttaaagtatttcgatttcttgactttatatatcttgtggaaaggac

SEQ ID NO: 1488 - DNA, 240 bp, synthetic construct
  misc_feature 1..240: note = Promoter
  source 1..240: mol_type = other DNA
gagggcctatttcccatgattccttcatatttgcatataagatgcaaggctgttagagagataattagaactaatttgactgtaaacacaaatatattagtacaaaatatgtgacatagaaagtgataatttcttgggtagtttgcagttttaaaattatgttttaaaatgactatcatctgcttaccgtaactttaaagtatttcgatttcttgactttatatatcttgtggaaaggac

SEQ ID NO: 1489 - DNA, 240 bp, synthetic construct; identical to SEQ ID NO: 1488
  misc_feature 1..240: note = Promoter
  source 1..240: mol_type = other DNA

SEQ ID NO: 1490 - DNA, 240 bp, synthetic construct
  misc_feature 1..240: note = Promoter
  source 1..240: mol_type = other DNA
gagggcctatttcccatgattccttcatatttgcatataagatgcaaggctgttagagagataattagaactaatttgactgtaaacacaaatatattagtacaaaatatgtgacatagaaagtgataatttcttgggtagtttgcagttttaaaattatgttttaaaatggctatcatctgcttaccgtaactttaaagtatttcgatttcttgactttatatatcttgtggaaaggac

SEQ ID NO: 1491 - DNA, 240 bp, synthetic construct
  misc_feature 1..240: note = Promoter
  source 1..240: mol_type = other DNA
gagggcctatttcccatgattccttcatatttgcatataagatgcaaggctgttagagagataattagaactaatttgactgtaaacacaaatatattagtacaaaatatgtgacatagaaagtgataatttcttgggtagtttgcagttttaaaattatgttttaaaatggatatcatctgcttaccgtaactttaaagtatttcgatttcttgactttatatatcttgtggaaaggac

SEQ ID NO: 1492 - DNA, 240 bp, synthetic construct
  misc_feature 1..240: note = Promoter
  source 1..240: mol_type = other DNA
gagggcctatttcccatgattccttcatatttgcatataagatgcaaggctgttagagagataattagaactaatttgactgtaaacacaaatatattagtacaaaatatgtgacatagaaagtgataatttcttgggtagtttgcagttttaaaattatgttttaaaatggacatcatctgcttaccgtaactttaaagtatttcgatttcttgactttatatatcttgtggaaaggac

SEQ ID NO: 1493 - DNA, 240 bp, synthetic construct
  misc_feature 1..240: note = Promoter
  source 1..240: mol_type = other DNA
gagggcctatttcccatgattccttcatatttgcatataagatgcaaggctgttagagagataattagaactaatttgactgtaaacacaaatatattagtacaaaatatgtgacatagaaagtgataatttcttgggtagtttgcagttttaaaattatgttttaaaatggacttcatctgcttaccgtaactttaaagtatttcgatttcttgactttatatatcttgtggaaaggac

SEQ ID NO: 1494 - DNA, 240 bp, synthetic construct
  misc_feature 1..240: note = Promoter
  source 1..240: mol_type = other DNA
gagggcctatttcccatgattccttcatatttgcatataagatgcaaggctgttagagagataattagaactaatttgactgtaaacacaaatatattagtacaaaatatgtgacatagaaagtgataatttcttgggtagtttgcagttttaaaattatgttttaaaatggactacatctgcttaccgtaactttaaagtatttcgatttcttgactttatatatcttgtggaaaggac

SEQ ID NO: 1495 - DNA, 240 bp, synthetic construct
  misc_feature 1..240: note = Promoter
  source 1..240: mol_type = other DNA
gagggcctatttcccatgattccttcatatttgcatataagatgcaaggctgttagagagataattagaactaatttgactgtaaacacaaatatattagtacaaaatatgtgacatagaaagtgataatttcttgggtagtttgcagttttaaaattatgttttaaaatggactatatctgcttaccgtaactttaaagtatttcgatttcttgactttatatatcttgtggaaaggac

SEQ ID NO: 1496 - DNA, 240 bp, synthetic construct
  misc_feature 1..240: note = Promoter
  source 1..240: mol_type = other DNA
gagggcctatttcccatgattccttcatatttgcatataagatgcaaggctgttagagagataattagaactaatttgactgtaaacacaaatatattagtacaaaatatgtgacatagaaagtgataatttcttgggtagtttgcagttttaaaattatgttttaaaatggactatctctgcttaccgtaactttaaagtatttcgatttcttgactttatatatcttgtggaaaggac

SEQ ID NO: 1497 - DNA, 240 bp, synthetic construct
  misc_feature 1..240: note = Promoter
  source 1..240: mol_type = other DNA
gagggcctatttcccatgattccttcatatttgcatataagatgcaaggctgttagagagataattagaactaatttgactgtaaacacaaatatattagtacaaaatatgtgacatagaaagtgataatttcttgggtagtttgcagttttaaaattatgttttaaaatggactatcactgcttaccgtaactttaaagtatttcgatttcttgactttatatatcttgtggaaaggac

SEQ ID NO: 1498 - DNA, 240 bp, synthetic construct
  misc_feature 1..240: note = Promoter
  source 1..240: mol_type = other DNA
gagggcctatttcccatgattccttcatatttgcatataagatgcaaggctgttagagagataattagaactaatttgactgtaaacacaaatatattagtacaaaatatgtgacatagaaagtgataatttcttgggtagtttgcagttttaaaattatgttttaaaatggactatcattgcttaccgtaactttaaagtatttcgatttcttgactttatatatcttgtggaaaggac

SEQ ID NO: 1499 - DNA, 240 bp, synthetic construct
  misc_feature 1..240: note = Promoter
  source 1..240: mol_type = other DNA
gagggcctatttcccatgattccttcatatttgcatataagatgcaaggctgttagagagataattagaactaatttgactgtaaacacaaatatattagtacaaaatatgtgacatagaaagtgataatttcttgggtagtttgcagttttaaaattatgttttaaaatggactatcatcgcttaccgtaactttaaagtatttcgatttcttgactttatatatcttgtggaaaggac

SEQ ID NO: 1500 - DNA, 240 bp, synthetic construct
  misc_feature 1..240: note = Promoter
  source 1..240: mol_type = other DNA
gagggcctatttcccatgattccttcatatttgcatataagatgcaaggctgttagagagataattagaactaatttgactgtaaacacaaatatattagtacaaaatatgtgacatagaaagtgataatttcttgggtagtttgcagttttaaaattatgttttaaaatggactatcatctcttaccgtaactttaaagtatttcgatttcttgactttatatatcttgtggaaaggac

SEQ ID NO: 1501 - DNA, 240 bp, synthetic construct
  misc_feature 1..240: note = Promoter
  source 1..240: mol_type = other DNA
gagggcctatttcccatgattccttcatatttgcatataagatgcaaggctgttagagagataattagaactaatttgactgtaaacacaaatatattagtacaaaatatgtgacatagaaagtgataatttcttgggtagtttgcagttttaaaattatgttttaaaatggactatcatctgttaccgtaactttaaagtatttcgatttcttgactttatatatcttgtggaaaggac

SEQ ID NO: 1502 - DNA, 240 bp, synthetic construct
  misc_feature 1..240: note = Promoter
  source 1..240: mol_type = other DNA
gagggcctatttcccatgattccttcatatttgcatataagatgcaaggctgttagagagataattagaactaatttgactgtaaacacaaatatattagtacaaaatatgtgacatagaaagtgataatttcttgggtagtttgcagttttaaaattatgttttaaaatggactatcatctgctaccgtaactttaaagtatttcgatttcttgactttatatatcttgtggaaaggac

SEQ ID NO: 1503 - DNA, 240 bp, synthetic construct; identical to SEQ ID NO: 1502
  misc_feature 1..240: note = Promoter
  source 1..240: mol_type = other DNA

SEQ ID NO: 1504 - DNA, 240 bp, synthetic construct
  misc_feature 1..240: note = Promoter
  source 1..240: mol_type = other DNA
gagggcctatttcccatgattccttcatatttgcatataagatgcaaggctgttagagagataattagaactaatttgactgtaaacacaaatatattagtacaaaatatgtgacatagaaagtgataatttcttgggtagtttgcagttttaaaattatgttttaaaatggactatcatctgcttccgtaactttaaagtatttcgatttcttgactttatatatcttgtggaaaggac

SEQ ID NO: 1505 - DNA, 240 bp, synthetic construct
  misc_feature 1..240: note = Promoter
  source 1..240: mol_type = other DNA
gagggcctatttcccatgattccttcatatttgcatataagatgcaaggctgttagagagataattagaactaatttgactgtaaacacaaatatattagtacaaaatatgtgacatagaaagtgataatttcttgggtagtttgcagttttaaaattatgttttaaaatggactatcatctgcttacgtaactttaaagtatttcgatttcttgactttatatatcttgtggaaaggac

SEQ ID NO: 1506 - DNA, 240 bp, synthetic construct; identical to SEQ ID NO: 1505
  misc_feature 1..240: note = Promoter
  source 1..240: mol_type = other DNA

SEQ ID NO: 1507 - DNA, 240 bp, synthetic construct
  misc_feature 1..240: note = Promoter
  source 1..240: mol_type = other DNA
gagggcctatttcccatgattccttcatatttgcatataagatgcaaggctgttagagagataattagaactaatttgactgtaaacacaaatatattagtacaaaatatgtgacatagaaagtgataatttcttgggtagtttgcagttttaaaattatgttttaaaatggactatcatctgcttacctaactttaaagtatttcgatttcttgactttatatatcttgtggaaaggac

SEQ ID NO: 1508 - DNA, 240 bp, synthetic construct
  misc_feature 1..240: note = Promoter
  source 1..240: mol_type = other DNA
gagggcctatttcccatgattccttcatatttgcatataagatgcaaggctgttagagagataattagaactaatttgactgtaaacacaaatatattagtacaaaatatgtgacatagaaagtgataatttcttgggtagtttgcagttttaaaattatgttttaaaatggactatcatctgcttaccgaactttaaagtatttcgatttcttgactttatatatcttgtggaaaggac

SEQ ID NO: 1509 - DNA, 240 bp, synthetic construct
  misc_feature 1..240: note = Promoter
  source 1..240: mol_type = other DNA
gagggcctatttcccatgattccttcatatttgcatataagatgcaaggctgttagagagataattagaactaatttgactgtaaacacaaatatattagtacaaaatatgtgacatagaaagtgataatttcttgggtagtttgcagttttaaaattatgttttaaaatggactatcatctgcttaccgtactttaaagtatttcgatttcttgactttatatatcttgtggaaaggac

SEQ ID NO: 1510 - DNA, 240 bp, synthetic construct; identical to SEQ ID NO: 1509
  misc_feature 1..240: note = Promoter
  source 1..240: mol_type = other DNA

SEQ ID NO: 1511 - DNA, 240 bp, synthetic construct
  misc_feature 1..240: note = Promoter
  source 1..240: mol_type = other DNA
gagggcctatttcccatgattccttcatatttgcatataagatgcaaggctgttagagagataattagaactaatttgactgtaaacacaaatatattagtacaaaatatgtgacatagaaagtgataatttcttgggtagtttgcagttttaaaattatgttttaaaatggactatcatctgcttaccgtaatttaaagtatttcgatttcttgactttatatatcttgtggaaaggac

SEQ ID NO: 1512 - DNA, 240 bp, synthetic construct
  misc_feature 1..240: note = Promoter
  source 1..240: mol_type = other DNA
gagggcctatttcccatgattccttcatatttgcatataagatgcaaggctgttagagagataattagaactaatttgactgtaaacacaaatatattagtacaaaatatgtgacatagaaagtgataatttcttgggtagtttgcagttttaaaattatgttttaaaatggactatcatctgcttaccgtaacttaaagtatttcgatttcttgactttatatatcttgtggaaaggac

SEQ ID NO: 1513 - DNA, 240 bp, synthetic construct; identical to SEQ ID NO: 1512
  misc_feature 1..240: note = Promoter
  source 1..240: mol_type = other DNA

SEQ ID NO: 1514 - DNA, 240 bp, synthetic construct; identical to SEQ ID NO: 1512
  misc_feature 1..240: note = Promoter
  source 1..240: mol_type = other DNA

SEQ ID NO: 1515 - DNA, 240 bp, synthetic construct
  misc_feature 1..240: note = Promoter
  source 1..240: mol_type = other DNA
gagggcctatttcccatgattccttcatatttgcatataagatgcaaggctgttagagagataattagaactaatttgactgtaaacacaaatatattagtacaaaatatgtgacatagaaagtgataatttcttgggtagtttgcagttttaaaattatgttttaaaatggactatcatctgcttaccgtaactttaagtatttcgatttcttgactttatatatcttgtggaaaggac

SEQ ID NO: 1516 - DNA, 240 bp, synthetic construct; identical to SEQ ID NO: 1515
  misc_feature 1..240: note = Promoter
  source 1..240: mol_type = other DNA

SEQ ID NO: 1517 - DNA, 240 bp, synthetic construct; identical to SEQ ID NO: 1515
  misc_feature 1..240: note = Promoter
  source 1..240: mol_type = other DNA

SEQ ID NO: 1518 - DNA, 240 bp, synthetic construct
  misc_feature 1..240: note = Promoter
  source 1..240: mol_type = other DNA
gagggcctatttcccatgattccttcatatttgcatataagatgcaaggctgttagagagataattagaactaatttgactgtaaacacaaatatattagtacaaaatatgtgacatagaaagtgataatttcttgggtagtttgcagttttaaaattatgttttaaaatggactatcatctgcttaccgtaactttaaatatttcgatttcttgactttatatatcttgtggaaaggac

SEQ ID NO: 1519 - DNA, 240 bp, synthetic construct
  misc_feature 1..240: note = Promoter
  source 1..240: mol_type = other DNA
gagggcctatttcccatgattccttcatatttgcatataagatgcaaggctgttagagagataattagaactaatttgactgtaaacacaaatatattagtacaaaatatgtgacatagaaagtgataatttcttgggtagtttgcagttttaaaattatgttttaaaatggactatcatctgcttaccgtaactttaaagatttcgatttcttgactttatatatcttgtggaaaggac

SEQ ID NO: 1520 - DNA, 240 bp, synthetic construct
  misc_feature 1..240: note = Promoter
  source 1..240: mol_type = other DNA
gagggcctatttcccatgattccttcatatttgcatataagatgcaaggctgttagagagataattagaactaatttgactgtaaacacaaatatattagtacaaaatatgtgacatagaaagtgataatttcttgggtagtttgcagttttaaaattatgttttaaaatggactatcatctgcttaccgtaactttaaagttttcgatttcttgactttatatatcttgtggaaaggac

SEQ ID NO: 1521 - DNA, 240 bp, synthetic construct
  misc_feature 1..240: note = Promoter
  source 1..240: mol_type = other DNA
gagggcctatttcccatgattccttcatatttgcatataagatgcaaggctgttagagagataattagaactaatttgactgtaaacacaaatatattagtacaaaatatgtgacatagaaagtgataatttcttgggtagtttgcagttttaaaattatgttttaaaatggactatcatctgcttaccgtaactttaaagtattcgatttcttgactttatatatcttgtggaaaggac

SEQ ID NO: 1522 - DNA, 240 bp, synthetic construct; identical to SEQ ID NO: 1521
  misc_feature 1..240: note = Promoter
  source 1..240: mol_type = other DNA

SEQ ID NO: 1523 - DNA, 240 bp, synthetic construct; identical to SEQ ID NO: 1521
  misc_feature 1..240: note = Promoter
  source 1..240: mol_type = other DNA

SEQ ID NO: 1524 - DNA, 240 bp, synthetic construct
  misc_feature 1..240: note = Promoter
  source 1..240: mol_type = other DNA
gagggcctatttcccatgattccttcatatttgcatataagatgcaaggctgttagagagataattagaactaatttgactgtaaacacaaatatattagtacaaaatatgtgacatagaaagtgataatttcttgggtagtttgcagttttaaaattatgttttaaaatggactatcatctgcttaccgtaactttaaagtatttgatttcttgactttatatatcttgtggaaaggac

SEQ ID NO: 1525 - DNA, 240 bp, synthetic construct
  misc_feature 1..240: note = Promoter
  source 1..240: mol_type = other DNA
gagggcctatttcccatgattccttcatatttgcatataagatgcaaggctgttagagagataattagaactaatttgactgtaaacacaaatatattagtacaaaatatgtgacatagaaagtgataatttcttgggtagtttgcagttttaaaattatgttttaaaatggactatcatctgcttaccgtaactttaaagtatttcatttcttgactttatatatcttgtggaaaggac

SEQ ID NO: 1526 - DNA, 240 bp, synthetic construct
  misc_feature 1..240: note = Promoter
  source 1..240: mol_type = other DNA
gagggcctatttcccatgattccttcatatttgcatataagatgcaaggctgttagagagataattagaactaatttgactgtaaacacaaatatattagtacaaaatatgtgacatagaaagtgataatttcttgggtagtttgcagttttaaaattatgttttaaaatggactatcatctgcttaccgtaactttaaagtatttcgtttcttgactttatatatcttgtggaaaggac

SEQ ID NO: 1527 - DNA, 240 bp, synthetic construct
  misc_feature 1..240: note = Promoter
  source 1..240: mol_type = other DNA
gagggcctatttcccatgattccttcatatttgcatataagatgcaaggctgttagagagataattagaactaatttgactgtaaacacaaatatattagtacaaaatatgtgacatagaaagtgataatttcttgggtagtttgcagttttaaaattatgttttaaaatggactatcatctgcttaccgtaactttaaagtatttcgattcttgactttatatatcttgtggaaaggac

SEQ ID NO: 1528 - DNA, 240 bp, synthetic construct; identical to SEQ ID NO: 1527
  misc_feature 1..240: note = Promoter
  source 1..240: mol_type = other DNA

SEQ ID NO: 1529 - DNA, 240 bp, synthetic construct; identical to SEQ ID NO: 1527
  misc_feature 1..240: note = Promoter
  source 1..240: mol_type = other DNA

SEQ ID NO: 1530 - DNA, 240 bp, synthetic construct
  misc_feature 1..240: note = Promoter
  source 1..240: mol_type = other DNA
gagggcctatttcccatgattccttcatatttgcatataagatgcaaggctgttagagagataattagaactaatttgactgtaaacacaaatatattagtacaaaatatgtgacatagaaagtgataatttcttgggtagtttgcagttttaaaattatgttttaaaatggactatcatctgcttaccgtaactttaaagtatttcgatttttgactttatatatcttgtggaaaggac

SEQ ID NO: 1531 - DNA, 240 bp, synthetic construct
  misc_feature 1..240: note = Promoter
  source 1..240: mol_type = other DNA
gagggcctatttcccatgattccttcatatttgcatataagatgcaaggctgttagagagataattagaactaatttgactgtaaacacaaatatattagtacaaaatatgtgacatagaaagtgataatttcttgggtagtttgcagttttaaaattatgttttaaaatggactatcatctgcttaccgtaactttaaagtatttcgatttctgactttatatatcttgtggaaaggac

SEQ ID NO: 1532 - DNA, 240 bp, synthetic construct; identical to SEQ ID NO: 1531
  misc_feature 1..240: note = Promoter
  source 1..240: mol_type = other DNA

SEQ ID NO: 1533 - DNA, 240 bp, synthetic construct
  misc_feature 1..240: note = Promoter
  source 1..240: mol_type = other DNA
gagggcctatttcccatgattccttcatatttgcatataagatgcaaggctgttagagagataattagaactaatttgactgtaaacacaaatatattagtacaaaatatgtgacatagaaagtgataatttcttgggtagtttgcagttttaaaattatgttttaaaatggactatcatctgcttaccgtaactttaaagtatttcgatttcttactttatatatcttgtggaaaggac

SEQ ID NO: 1534 - DNA, 240 bp, synthetic construct
  misc_feature 1..240: note = Promoter
  source 1..240: mol_type = other DNA
gagggcctatttcccatgattccttcatatttgcatataagatgcaaggctgttagagagataattagaactaatttgactgtaaacacaaatatattagtacaaaatatgtgacatagaaagtgataatttcttgggtagtttgcagttttaaaattatgttttaaaatggactatcatctgcttaccgtaactttaaagtatttcgatttcttgctttatatatcttgtggaaaggac

SEQ ID NO: 1535 - DNA, 240 bp, synthetic construct
  misc_feature 1..240: note = Promoter
  source 1..240: mol_type = other DNA
gagggcctatttcccatgattccttcatatttgcatataagatgcaaggctgttagagagataattagaactaatttgactgtaaacacaaatatattagtacaaaatatgtgacatagaaagtgataatttcttgggtagtttgcagttttaaaattatgttttaaaatggactatcatctgcttaccgtaactttaaagtatttcgatttcttgatttatatatcttgtggaaaggac

SEQ ID NO: 1536 - DNA, 240 bp, synthetic construct
  misc_feature 1..240: note = Promoter
  source 1..240: mol_type = other DNA
gagggcctatttcccatgattccttcatatttgcatataagatgcaaggctgttagagagataattagaactaatttgactgtaaacacaaatatattagtacaaaatatgtgacatagaaagtgataatttcttgggtagtttgcagttttaaaattatgttttaaaatggactatcatctgcttaccgtaactttaaagtatttcgatttcttgacttatatatcttgtggaaaggac

SEQ ID NO: 1537 - DNA, 240 bp, synthetic construct; identical to SEQ ID NO: 1536
  misc_feature 1..240: note = Promoter
  source 1..240: mol_type = other DNA

SEQ ID NO: 1538 - DNA, 240 bp, synthetic construct; identical to SEQ ID NO: 1536
  misc_feature 1..240: note = Promoter
  source 1..240: mol_type = other DNA

SEQ ID NO: 1539 - DNA, 240 bp, synthetic construct
  misc_feature 1..240: note = Promoter
  source 1..240: mol_type = other DNA
gagggcctatttcccatgattccttcatatttgcatataagatgcaaggctgttagagagataattagaactaatttgactgtaaacacaaatatattagtacaaaatatgtgacatagaaagtgataatttcttgggtagtttgcagttttaaaattatgttttaaaatggactatcatctgcttaccgtaactttaaagtatttcgatttcttgacttttatatcttgtggaaaggac

SEQ ID NO: 1540 - DNA, 240 bp, synthetic construct
  misc_feature 1..240: note = Promoter
  source 1..240: mol_type = other DNA
gagggcctatttcccatgattccttcatatttgcatataagatgcaaggctgttagagagataattagaactaatttgactgtaaacacaaatatattagtacaaaatatgtgacatagaaagtgataatttcttgggtagtttgcagttttaaaattatgttttaaaatggactatcatctgcttaccgtaactttaaagtatttcgatttcttgactttaatatcttgtggaaaggac

SEQ ID NO: 1541 - DNA, 240 bp, synthetic construct
  misc_feature 1..240: note = Promoter
  source 1..240: mol_type = other DNA
gagggcctatttcccatgattccttcatatttgcatataagatgcaaggctgttagagagataattagaactaatttgactgtaaacacaaatatattagtacaaaatatgtgacatagaaagtgataatttcttgggtagtttgcagttttaaaattatgttttaaaatggactatcatctgcttaccgtaactttaaagtatttcgatttcttgactttattatcttgtggaaaggac

SEQ ID NO: 1542 - DNA, 240 bp, synthetic construct
  misc_feature 1..240: note = Promoter
  source 1..240: mol_type = other DNA
gagggcctatttcccatgattccttcatatttgcatataagatgcaaggctgttagagagataattagaactaatttgactgtaaacacaaatatattagtacaaaatatgtgacatagaaagtgataatttcttgggtagtttgcagttttaaaattatgttttaaaatggactatcatctgcttaccgtaactttaaagtatttcgatttcttgactttataatcttgtggaaaggac

SEQ ID NO: 1543 - DNA, 240 bp, synthetic construct
  misc_feature 1..240: note = Promoter
  source 1..240: mol_type = other DNA
gagggcctatttcccatgattccttcatatttgcatataagatgcaaggctgttagagagataattagaactaatttgactgtaaacacaaatatattagtacaaaatatgtgacatagaaagtgataatttcttgggtagtttgcagttttaaaattatgttttaaaatggactatcatctgcttaccgtaactttaaagtatttcgatttcttgactttatattcttgtggaaaggac

SEQ ID NO: 1544 - DNA, 240 bp, synthetic construct
  misc_feature 1..240: note = Promoter
  source 1..240: mol_type = other DNA
gagggcctatttcccatgattccttcatatttgcatataagatgcaaggctgttagagagataattagaactaatttgactgtaaacacaaatatattagtacaaaatatgtgacatagaaagtgataatttcttgggtagtttgcagttttaaaattatgttttaaaatggactatcatctgcttaccgtaactttaaagtatttcgatttcttgactttatatacttgtggaaaggac

SEQ ID NO: 1545 - DNA, 240 bp, synthetic construct
  misc_feature 1..240: note = Promoter
  source 1..240: mol_type = other DNA
gagggcctatttcccatgattccttcatatttgcatataagatgcaaggctgttagagagataattagaactaatttgactgtaaacacaaatatattagtacaaaatatgtgacatagaaagtgataatttcttgggtagtttgcagttttaaaattatgttttaaaatggactatcatctgcttaccgtaactttaaagtatttcgatttcttgactttatatatttgtggaaaggac

SEQ ID NO: 1546 - DNA, 240 bp, synthetic construct
  misc_feature 1..240: note = Promoter
  source 1..240: mol_type = other DNA
gagggcctatttcccatgattccttcatatttgcatataagatgcaaggctgttagagagataattagaactaatttgactgtaaacacaaatatattagtacaaaatatgtgacatagaaagtgataatttcttgggtagtttgcagttttaaaattatgttttaaaatggactatcatctgcttaccgtaactttaaagtatttcgatttcttgactttatatatctgtggaaaggac

SEQ ID NO: 1547 - DNA, 240 bp, synthetic construct; identical to SEQ ID NO: 1546
  misc_feature 1..240: note = Promoter
  source 1..240: mol_type = other DNA

SEQ ID NO: 1548 - DNA, 240 bp, synthetic construct
  misc_feature 1..240: note = Promoter
  source 1..240: mol_type = other DNA
gagggcctatttcccatgattccttcatatttgcatataagatgcaaggctgttagagagataattagaactaatttgactgtaaacacaaatatattagtacaaaatatgtgacatagaaagtgataatttcttgggtagtttgcagttttaaaattatgttttaaaatggactatcatctgcttaccgtaactttaaagtatttcgatttcttgactttatatatctttggaaaggac

SEQ ID NO: 1549 - DNA, 240 bp, synthetic construct
  misc_feature 1..240: note = Promoter
  source 1..240: mol_type = other DNA
gagggcctatttcccatgattccttcatatttgcatataagatgcaaggctgttagagagataattagaactaatttgactgtaaacacaaatatattagtacaaaatatgtgacatagaaagtgataatttcttgggtagtttgcagttttaaaattatgttttaaaatggactatcatctgcttaccgtaactttaaagtatttcgatttcttgactttatatatcttgggaaaggac

SEQ ID NO: 1550 - DNA, 240 bp, synthetic construct
  misc_feature 1..240: note = Promoter
  source 1..240: mol_type = other DNA
gagggcctatttcccatgattccttcatatttgcatataagatgcaaggctgttagagagataattagaactaatttgactgtaaacacaaatatattagtacaaaatatgtgacatagaaagtgataatttcttgggtagtttgcagttttaaaattatgttttaaaatggactatcatctgcttaccgtaactttaaagtatttcgatttcttgactttatatatcttgtgaaaggac

SEQ ID NO: 1551 - DNA, 240 bp, synthetic construct; identical to SEQ ID NO: 1550
  misc_feature 1..240: note = Promoter
  source 1..240: mol_type = other DNA

SEQ ID NO: 1552 - DNA, 240 bp, synthetic construct
  misc_feature 1..240: note = Promoter
  source 1..240: mol_type = other DNA
gagggcctatttcccatgattccttcatatttgcatataagatgcaaggctgttagagagataattagaactaatttgactgtaaacacaaatatattagtacaaaatatgtgacatagaaagtgataatttcttgggtagtttgcagttttaaaattatgttttaaaatggactatcatctgcttaccgtaactttaaagtatttcgatttcttgactttatatatcttgtggaaggac

SEQ ID NO: 1553 - DNA, 240 bp, synthetic construct; identical to SEQ ID NO: 1552
  misc_feature 1..240: note = Promoter
  source 1..240: mol_type = other DNA

SEQ ID NO: 1554 - DNA, 240 bp, synthetic construct; identical to SEQ ID NO: 1552
  misc_feature 1..240: note = Promoter
  source 1..240: mol_type = other DNA

SEQ ID NO: 1555 - DNA, 240 bp, synthetic construct
  misc_feature 1..240: note = Promoter
  source 1..240: mol_type = other DNA
gagggcctatttcccatgattccttcatatttgcatataagatgcaaggctgttagagagataattagaactaatttgactgtaaacacaaatatattagtacaaaatatgtgacatagaaagtgataatttcttgggtagtttgcagttttaaaattatgttttaaaatggactatcatctgcttaccgtaactttaaagtatttcgatttcttgactttatatatcttgtggaaagac

SEQ ID NO: 1556 - DNA, 240 bp, synthetic construct; identical to SEQ ID NO: 1555
  misc_feature 1..240: note = Promoter
  source 1..240: mol_type = other DNA

SEQ ID NO: 1557 - DNA, 240 bp, synthetic construct
  misc_feature 1..240: note = Promoter
  source 1..240: mol_type = other DNA
gagggcctatttcccatgattccttcatatttgcatataagatgcaaggctgttagagagataattagaactaatttgactgtaaacacaaatatattagtacaaaatatgtgacatagaaagtgataatttcttgggtagtttgcagttttaaaattatgttttaaaatggactatcatctgcttaccgtaactttaaagtatttcgatttcttgactttatatatcttgtggaaaggc

SEQ ID NO: 1558 - DNA, 240 bp, synthetic construct
  misc_feature 1..240: note = Promoter
  source 1..240: mol_type = other DNA
gagggcctatttcccatgattccttcatatttgcatataagatgcaaggctgttagagagataattagaactaatttgactgtaaacacaaatatattagtacaaaatatgtgacatagaaagtgataatttcttgggtagtttgcagttttaaaattatgttttaaaatggactatcatctgcttaccgtaactttaaagtatttcgatttcttgactttatatatcttgtggaaagga

SEQ ID NO: 1559 - DNA, 239 bp, synthetic construct
  misc_feature 1..239: note = Promoter
  source 1..239: mol_type = other DNA
gggcctatttcccatgattccttcatatttgcatataagatgcaaggctgttagagagataattagaactaatttgactgtaaacacaaatatattagtacaaaatatgtgacatagaaagtgataatttcttgggtagtttgcagttttaaaattatgttttaaaatggactatcatctgcttaccgtaactttaaagtatttcgatttcttgactttatatatcttgtggaaaggac

SEQ ID NO: 1560 - DNA, 239 bp, synthetic construct; identical to SEQ ID NO: 1559
  misc_feature 1..239: note = Promoter
  source 1..239: mol_type = other DNA

SEQ ID NO: 1561 - DNA, 239 bp, synthetic construct
  misc_feature 1..239: note = Promoter
  source 1..239: mol_type = other DNA
gagcctatttcccatgattccttcatatttgcatataagatgcaaggctgttagagagataattagaactaatttgactgtaaacacaaatatattagtacaaaatatgtgacatagaaagtgataatttcttgggtagtttgcagttttaaaattatgttttaaaatggactatcatctgcttaccgtaactttaaagtatttcgatttcttgactttatatatcttgtggaaaggac

SEQ ID NO: 1562 - DNA, 239 bp, synthetic construct; identical to SEQ ID NO: 1561
  misc_feature 1..239: note = Promoter
  source 1..239: mol_type = other DNA

SEQ ID NO: 1563 - DNA, 239 bp, synthetic construct
  misc_feature 1..239: note = Promoter
  source 1..239: mol_type = other DNA
gaggctatttcccatgattccttcatatttgcatataagatgcaaggctgttagagagataattagaactaatttgactgtaaacacaaatatattagtacaaaatatgtgacatagaaagtgataatttcttgggtagtttgcagttttaaaattatgttttaaaatggactatcatctgcttaccgtaactttaaagtatttcgatttcttgactttatatatcttgtggaaaggac

SEQ ID NO: 1564 - DNA, 239 bp, synthetic construct
  misc_feature 1..239: note = Promoter
  source 1..239: mol_type = other DNA
gagggtatttcccatgattccttcatatttgcatataagatgcaaggctgttagagagataattagaactaatttgactgtaaacacaaatatattagtacaaaatatgtgacatagaaagtgataatttcttgggtagtttgcagttttaaaattatgttttaaaatggactatcatctgcttaccgtaactttaaagtatttcgatttcttgactttatatatcttgtggaaaggac

SEQ ID NO: 1565 - DNA, 239 bp, synthetic construct
  misc_feature 1..239: note = Promoter
  source 1..239: mol_type = other DNA
gagggcatttcccatgattccttcatatttgcatataagatgcaaggctgttagagagataattagaactaatttgactgtaaacacaaatatattagtacaaaatatgtgacatagaaagtgataatttcttgggtagtttgcagttttaaaattatgttttaaaatggactatcatctgcttaccgtaactttaaagtatttcgatttcttgactttatatatcttgtggaaaggac

SEQ ID NO: 1566 - DNA, 239 bp, synthetic construct
  misc_feature 1..239: note = Promoter
  source 1..239: mol_type = other DNA
gagggcctttcccatgattccttcatatttgcatataagatgcaaggctgttagagagataattagaactaatttgactgtaaacacaaatatattagtacaaaatatgtgacatagaaagtgataatttcttgggtagtttgcagttttaaaattatgttttaaaatggactatcatctgcttaccgtaactttaaagtatttcgatttcttgactttatatatcttgtggaaaggac

SEQ ID NO: 1567 - DNA, 239 bp, synthetic construct; identical to SEQ ID NO: 1566
  misc_feature 1..239: note = Promoter
  source 1..239: mol_type = other DNA

SEQ ID NO: 1568 - DNA, 239 bp, synthetic construct
  misc_feature 1..239: note = Promoter
  source 1..239: mol_type = other DNA
gagggcctatcccatgattccttcatatttgcatataagatgcaaggctgttagagagataattagaactaatttgactgtaaacacaaatatattagtacaaaatatgtgacatagaaagtgataatttcttgggtagtttgcagttttaaaattatgttttaaaatggactatcatctgcttaccgtaactttaaagtatttcgatttcttgactttatatatcttgtggaaaggac

SEQ ID NO: 1569 - DNA, 239 bp, synthetic construct; identical to SEQ ID NO: 1568
  misc_feature 1..239: note = Promoter
  source 1..239: mol_type = other DNA

SEQ ID NO: 1570 - DNA, 239 bp, synthetic construct
  misc_feature 1..239: note = Promoter
  source 1..239: mol_type = other DNA
gagggcctattccatgattccttcatatttgcatataagatgcaaggctgttagagagataattagaactaatttgactgtaaacacaaatatattagtacaaaatatgtgacatagaaagtgataatttcttgggtagtttgcagttttaaaattatgttttaaaatggactatcatctgcttaccgtaactttaaagtatttcgatttcttgactttatatatcttgtggaaaggac

SEQ ID NO: 1571 - DNA, 239 bp, synthetic construct
  misc_feature 1..239: note = Promoter
  source 1..239: mol_type = other DNA
gagggcctatttcatgattccttcatatttgcatataagatgcaaggctgttagagagataattagaactaatttgactgtaaacacaaatatattagtacaaaatatgtgacatagaaagtgataatttcttgggtagtttgcagttttaaaattatgttttaaaatggactatcatctgcttaccgtaactttaaagtatttcgatttcttgactttatatatcttgtggaaaggac

SEQ ID NO: 1572 - DNA, 239 bp, synthetic construct; identical to SEQ ID NO: 1571
  misc_feature 1..239: note = Promoter
  source 1..239: mol_type = other DNA

SEQ ID NO: 1573 - DNA, 239 bp, synthetic construct
  misc_feature 1..239: note = Promoter
  source 1..239: mol_type = other DNA
gagggcctatttcctgattccttcatatttgcatataagatgcaaggctgttagagagataattagaactaatttgactgtaaacacaaatatattagtacaaaatatgtgacatagaaagtgataatttcttgggtagtttgcagttttaaaattatgttttaaaatggactatcatctgcttaccgtaactttaaagtatttcgatttcttgactttatatatcttgtggaaaggac

SEQ ID NO: 1574 - DNA, 239 bp, synthetic construct
  misc_feature 1..239: note = Promoter
  source 1..239: mol_type = other DNA
gagggcctatttcccgattccttcatatttgcatataagatgcaaggctgttagagagataattagaactaatttgactgtaaacacaaatatattagtacaaaatatgtgacatagaaagtgataatttcttgggtagtttgcagttttaaaattatgttttaaaatggactatcatctgcttaccgtaactttaaagtatttcgatttcttgactttatatatcttgtggaaaggac

SEQ ID NO: 1575 - DNA, 239 bp, synthetic construct
  misc_feature 1..239: note = Promoter
  source 1..239: mol_type = other DNA
gagggcctatttcccaattccttcatatttgcatataagatgcaaggctgttagagagataattagaactaatttgactgtaaacacaaatatattagtacaaaatatgtgacatagaaagtgataatttcttgggtagtttgcagttttaaaattatgttttaaaatggactatcatctgcttaccgtaactttaaagtatttcgatttcttgactttatatatcttgtggaaaggac

SEQ ID NO: 1576 - DNA, 239 bp, synthetic construct
  misc_feature 1..239: note = Promoter
  source 1..239: mol_type = other DNA
gagggcctatttcccatttccttcatatttgcatataagatgcaaggctgttagagagataattagaactaatttgactgtaaacacaaatatattagtacaaaatatgtgacatagaaagtgataatttcttgggtagtttgcagttttaaaattatgttttaaaatggactatcatctgcttaccgtaactttaaagtatttcgatttcttgactttatatatcttgtggaaaggac

SEQ ID NO: 1577 - DNA, 239 bp, synthetic construct
  misc_feature 1..239: note = Promoter
  source 1..239: mol_type = other DNA
gagggcctatttcccatgtccttcatatttgcatataagatgcaaggctgttagagagataattagaactaatttgactgtaaacacaaatatattagtacaaaatatgtgacatagaaagtgataatttcttgggtagtttgcagttttaaaattatgttttaaaatggactatcatctgcttaccgtaactttaaagtatttcgatttcttgactttatatatcttgtggaaaggac

SEQ ID NO: 1578 - DNA, 239 bp, synthetic construct
  misc_feature 1..239: note = Promoter
  source 1..239: mol_type = other DNA
gagggcctatttcccatgaccttcatatttgcatataagatgcaaggctgttagagagataattagaactaatttgactgtaaacacaaatatattagtacaaaatatgtgacatagaaagtgataatttcttgggtagtttgcagttttaaaattatgttttaaaatggactatcatctgcttaccgtaactttaaagtatttcgatttcttgactttatatatcttgtggaaaggac

SEQ ID NO: 1579 - DNA, 239 bp, synthetic construct
  misc_feature 1..239: note = Promoter
  source 1..239: mol_type = other DNA
gagggcctatttcccatgatcttcatatttgcatataagatgcaaggctgttagagagataattagaactaatttgactgtaaacacaaatatattagtacaaaatatgtgacatagaaagtgataatttcttgggtagtttgcagttttaaaattatgttttaaaatggactatcatctgcttaccgtaactttaaagtatttcgatttcttgactttatatatcttgtggaaaggac

SEQ ID NO: 1580 - DNA, 239 bp, synthetic construct
  misc_feature 1..239: note = Promoter
  source 1..239: mol_type = other DNA
gagggcctatttcccatgattttcatatttgcatataagatgcaaggctgttagagagataattagaactaatttgactgtaaacacaaatatattagtacaaaatatgtgacatagaaagtgataatttcttgggtagtttgcagttttaaaattatgttttaaaatggactatcatctgcttaccgtaactttaaagtatttcgatttcttgactttatatatcttgtggaaaggac

SEQ ID NO: 1581 - DNA, 239 bp, synthetic construct
  misc_feature 1..239: note = Promoter
  source 1..239: mol_type = other DNA
gagggcctatttcccatgattctcatatttgcatataagatgcaaggctgttagagagataattagaactaatttgactgtaaacacaaatatattagtacaaaatatgtgacatagaaagtgataatttcttgggtagtttgcagttttaaaattatgttttaaaatggactatcatctgcttaccgtaactttaaagtatttcgatttcttgactttatatatcttgtggaaaggac

SEQ ID NO: 1582 - DNA, 239 bp, synthetic construct
  misc_feature 1..239: note = Promoter
  source 1..239: mol_type = other DNA
gagggcctatttcccatgattcccatatttgcatataagatgcaaggctgttagagagataattagaactaatttgactgtaaacacaaatatattagtacaaaatatgtgacatagaaagtgataatttcttgggtagtttgcagttttaaaattatgttttaaaatggactatcatctgcttaccgtaactttaaagtatttcgatttcttgactttatatatcttgtggaaaggac

SEQ ID NO: 1583 - DNA, 239 bp, synthetic construct
  misc_feature 1..239: note = Promoter
  source 1..239: mol_type = other DNA
gagggcctatttcccatgattcctatatttgcatataagatgcaaggctgttagagagataattagaactaatttgactgtaaacacaaatatattagtacaaaatatgtgacatagaaagtgataatttcttgggtagtttgcagttttaaaattatgttttaaaatggactatcatctgcttaccgtaactttaaagtatttcgatttcttgactttatatatcttgtggaaaggac

SEQ ID NO: 1584 - DNA, 239 bp, synthetic construct
  misc_feature 1..239: note = Promoter
  source 1..239: mol_type = other DNA
gagggcctatttcccatgattcctttatttgcatataagatgcaaggctgttagagagataattagaactaatttgactgtaaacacaaatatattagtacaaaatatgtgacatagaaagtgataatttcttgggtagtttgcagttttaaaattatgttttaaaatggactatcatctgcttaccgtaactttaaagtatttcgatttcttgactttatatatcttgtggaaaggac

SEQ ID NO: 1585 - DNA, 239 bp, synthetic construct
  misc_feature 1..239: note = Promoter
  source 1..239: mol_type = other DNA
gagggcctatttcccatgattccttcatttgcatataagatgcaaggctgttagagagataattagaactaatttgactgtaaacacaaatatattagtacaaaatatgtgacatagaaagtgataatttcttgggtagtttgcagttttaaaattatgttttaaaatggactatcatctgcttaccgtaactttaaagtatttcgatttcttgactttatatatcttgtggaaaggac

SEQ ID NO: 1586 - DNA, 239 bp, synthetic construct; identical to SEQ ID NO: 1585
  misc_feature 1..239: note = Promoter
  source 1..239: mol_type = other DNA

SEQ ID NO: 1587 - DNA, 239 bp, synthetic construct; identical to SEQ ID NO: 1585
  misc_feature 1..239: note = Promoter
  source 1..239: mol_type = other DNA

SEQ ID NO: 1588 - DNA, 239 bp, synthetic construct
  misc_feature 1..239: note = Promoter
  source 1..239: mol_type = other DNA
gagggcctatttcccatgattccttcatatgcatataagatgcaaggctgttagagagataattagaactaatttgactgtaaacacaaatatattagtacaaaatatgtgacatagaaagtgataatttcttgggtagtttgcagttttaaaattatgttttaaaatggactatcatctgcttaccgtaactttaaagtatttcgatttcttgactttatatatcttgtggaaaggac

SEQ ID NO: 1589 - DNA, 239 bp, synthetic construct; identical to SEQ ID NO: 1588
  misc_feature 1..239: note = Promoter
  source 1..239: mol_type = other DNA

SEQ ID NO: 1590 - DNA, 239 bp, synthetic construct
  misc_feature 1..239: note = Promoter
  source 1..239: mol_type = other DNA
gagggcctatttcccatgattccttcatattcatataagatgcaaggctgttagagagataattagaactaatttgactgtaaacacaaatatattagtacaaaatatgtgacatagaaagtgataatttcttgggtagtttgcagttttaaaattatgttttaaaatggactatcatctgcttaccgtaactttaaagtatttcgatttcttgactttatatatcttgtggaaaggac

SEQ ID NO: 1591 - DNA, 239 bp, synthetic construct
  misc_feature 1..239: note = Promoter
  source 1..239: mol_type = other DNA
gagggcctatttcccatgattccttcatatttatataagatgcaaggctgttagagagataattagaactaatttgactgtaaacacaaatatattagtacaaaatatgtgacatagaaagtgataatttcttgggtagtttgcagttttaaaattatgttttaaaatggactatcatctgcttaccgtaactttaaagtatttcgatttcttgactttatatatcttgtggaaaggac

SEQ ID NO: 1592 - DNA, 239 bp, synthetic construct
  misc_feature 1..239: note = Promoter
  source 1..239: mol_type = other DNA
gagggcctatttcccatgattccttcatatttgtataagatgcaaggctgttagagagataattagaactaatttgactgtaaacacaaatatattagtacaaaatatgtgacatagaaagtgataatttcttgggtagtttgcagttttaaaattatgttttaaaatggactatcatctgcttaccgtaactttaaagtatttcgatttcttgactttatatatcttgtggaaaggac

SEQ ID NO: 1593 - DNA, 239 bp, synthetic construct
  misc_feature 1..239: note = Promoter
  source 1..239: mol_type = other DNA
gagggcctatttcccatgattccttcatatttgcataagatgcaaggctgttagagagataattagaactaatttgactgtaaacacaaatatattagtacaaaatatgtgacatagaaagtgataatttcttgggtagtttgcagttttaaaattatgttttaaaatggactatcatctgcttaccgtaactttaaagtatttcgatttcttgactttatatatcttgtggaaaggac

SEQ ID NO: 1594 - DNA, 239 bp, synthetic construct; identical to SEQ ID NO: 1593
  misc_feature 1..239: note = Promoter
  source 1..239: mol_type = other DNA

SEQ ID NO: 1595 - DNA, 239 bp, synthetic construct; identical to SEQ ID NO: 1593
  misc_feature 1..239: note = Promoter
  source 1..239: mol_type = other DNA

SEQ ID NO: 1596 - DNA, 239 bp, synthetic construct; identical to SEQ ID NO: 1593
  misc_feature 1..239: note = Promoter
  source 1..239: mol_type = other DNA

SEQ ID NO: 1597 - DNA, 239 bp, synthetic construct
  misc_feature 1..239: note = Promoter
  source 1..239: mol_type = other DNA
gagggcctatttcccatgattccttcatatttgcatatgatgcaaggctgttagagagataattagaactaatttgactgtaaacacaaatatattagtacaaaatatgtgacatagaaagtgataatttcttgggtagtttgcagttttaaaattatgttttaaaatggactatcatctgcttaccgtaactttaaagtatttcgatttcttgactttatatatcttgtggaaaggac

SEQ ID NO: 1598 - DNA, 239 bp, synthetic construct
  misc_feature 1..239: note = Promoter
  source 1..239: mol_type = other DNA
gagggcctatttcccatgattccttcatatttgcatataatgcaaggctgttagagagataattagaactaatttgactgtaaacacaaatatattagtacaaaatatgtgacatagaaagtgataatttcttgggtagtttgcagttttaaaattatgttttaaaatggactatcatctgcttaccgtaactttaaagtatttcgatttcttgactttatatatcttgtggaaaggac

SEQ ID NO: 1599 - DNA, 239 bp, synthetic construct; identical to SEQ ID NO: 1598
  misc_feature 1..239: note = Promoter
  source 1..239: mol_type = other DNA

SEQ ID NO: 1600 - DNA, 239 bp, synthetic construct
  misc_feature 1..239: note = Promoter
  source 1..239: mol_type = other DNA
gagggcctatttcccatgattccttcatatttgcatataaggcaaggctgttagagagataattagaactaatttgactgtaaacacaaatatattagtacaaaatatgtgacatagaaagtgataatttcttgggtagtttgcagttttaaaattatgttttaaaatggactatcatctgcttaccgtaactttaaagtatttcgatttcttgactttatatatcttgtggaaaggac

SEQ ID NO: 1601 - DNA, 239 bp, synthetic construct
  misc_feature 1..239: note = Promoter
  source 1..239: mol_type = other DNA
gagggcctatttcccatgattccttcatatttgcatataagacaaggctgttagagagataattagaactaatttgactgtaaacacaaatatattagtacaaaatatgtgacatagaaagtgataatttcttgggtagtttgcagttttaaaattatgttttaaaatggactatcatctgcttaccgtaactttaaagtatttcgatttcttgactttatatatcttgtggaaaggac

SEQ ID NO: 1602 - DNA, 239 bp, synthetic construct
  misc_feature 1..239: note = Promoter
  source 1..239: mol_type = other DNA
gagggcctatttcccatgattccttcatatttgcatataagataaggctgttagagagataattagaactaatttgactgtaaacacaaatatattagtacaaaatatgtgacatagaaagtgataatttcttgggtagtttgcagttttaaaattatgttttaaaatggactatcatctgcttaccgtaactttaaagtatttcgatttcttgactttatatatcttgtggaaaggac

SEQ ID NO: 1603 - DNA, 239 bp, synthetic construct
  misc_feature 1..239: note = Promoter
  source 1..239: mol_type = other DNA
gagggcctatttcccatgattccttcatatttgcatataagatgaggctgttagagagataattagaactaatttgactgtaaacacaaatatattagtacaaaatatgtgacatagaaagtgataatttcttgggtagtttgcagttttaaaattatgttttaaaatggactatcatctgcttaccgtaactttaaagtatttcgatttcttgactttatatatcttgtggaaaggac

SEQ ID NO: 1604 - DNA, 239 bp, synthetic construct
  misc_feature 1..239: note = Promoter
  source 1..239: mol_type = other DNA
gagggcctatttcccatgattccttcatatttgcatataagatgcggctgttagagagataattagaactaatttgactgtaaacacaaatatattagtacaaaatatgtgacatagaaagtgataatttcttgggtagtttgcagttttaaaattatgttttaaaatggactatcatctgcttaccgtaactttaaagtatttcgatttcttgactttatatatcttgtggaaaggac

SEQ ID NO: 1605 - DNA, 239 bp, synthetic construct
  misc_feature 1..239: note = Promoter
  source 1..239: mol_type = other DNA
gagggcctatttcccatgattccttcatatttgcatataagatgcagctgttagagagataattagaactaatttgactgtaaacacaaatatattagtacaaaatatgtgacatagaaagtgataatttcttgggtagtttgcagttttaaaattatgttttaaaatggactatcatctgcttaccgtaactttaaagtatttcgatttcttgactttatatatcttgtggaaaggac

SEQ ID NO: 1606 - DNA, 239 bp, synthetic construct
  misc_feature 1..239: note = Promoter
  source 1..239: mol_type = other DNA
gagggcctatttcccatgattccttcatatttgcatataagatgcaactgttagagagataattagaactaatttgactgtaaacacaaatatattagtacaaaatatgtgacatagaaagtgataatttcttgggtagtttgcagttttaaaattatgttttaaaatggactatcatctgcttaccgtaactttaaagtatttcgatttcttgactttatatatcttgtggaaaggac

SEQ ID NO: 1607 - DNA, 239 bp, synthetic construct
  misc_feature 1..239: note = Promoter
  source 1..239: mol_type = other DNA
gagggcctatttcccatgattccttcatatttgcatataagatgcaagtgttagagagataattagaactaatttgactgtaaacacaaatatattagtacaaaatatgtgacatagaaagtgataatttcttgggtagtttgcagttttaaaattatgttttaaaatggactatcatctgcttaccgtaactttaaagtatttcgatttcttgactttatatatcttgtggaaaggac

SEQ ID NO: 1608 - DNA, 239 bp, synthetic construct
  misc_feature 1..239: note = Promoter
  source 1..239: mol_type = other DNA
gagggcctatttcccatgattccttcatatttgcatataagatgcaagggttagagagataattagaactaatttgactgtaaacacaaatatattagtacaaaatatgtgacatagaaagtgataatttcttgggtagtttgcagttttaaaattatgttttaaaatggactatcatctgcttaccgtaactttaaagtatttcgatttcttgactttatatatcttgtggaaaggac

SEQ ID NO: 1609 - DNA, 239 bp, synthetic construct
  misc_feature 1..239: note = Promoter
  source 1..239: mol_type = other DNA
gagggcctatttcccatgattccttcatatttgcatataagatgcaaggcttagagagataattagaactaatttgactgtaaacacaaatatattagtacaaaatatgtgacatagaaagtgataatttcttgggtagtttgcagttttaaaattatgttttaaaatggactatcatctgcttaccgtaactttaaagtatttcgatttcttgactttatatatcttgtggaaaggac

SEQ ID NO: 1610 - DNA, 239 bp, synthetic construct; identical to SEQ ID NO: 1609
  misc_feature 1..239: note = Promoter
  source 1..239: mol_type = other DNA

SEQ ID NO: 1611 - DNA, 239 bp, synthetic construct
  misc_feature 1..239: note = Promoter
  source 1..239: mol_type = other DNA
gagggcctatttcccatgattccttcatatttgcatataagatgcaaggctgagagagataattagaactaatttgactgtaaacacaaatatattagtacaaaatatgtgacatagaaagtgataatttcttgggtagtttgcagttttaaaattatgttttaaaatggactatcatctgcttaccgtaactttaaagtatttcgatttcttgactttatatatcttgtggaaaggac

SEQ ID NO: 1612 - DNA, 239 bp, synthetic construct
  misc_feature 1..239: note = Promoter
  source 1..239: mol_type = other DNA
gagggcctatttcccatgattccttcatatttgcatataagatgcaaggctgtgagagataattagaactaatttgactgtaaacacaaatatattagtacaaaatatgtgacatagaaagtgataatttcttgggtagtttgcagttttaaaattatgttttaaaatggactatcatctgcttaccgtaactttaaagtatttcgatttcttgactttatatatcttgtggaaaggac

SEQ ID NO: 1613 - DNA, 239 bp, synthetic construct
  misc_feature 1..239: note = Promoter
  source 1..239: mol_type = other DNA
gagggcctatttcccatgattccttcatatttgcatataagatgcaaggctgttagagataattagaactaatttgactgtaaacacaaatatattagtacaaaatatgtgacatagaaagtgataatttcttgggtagtttgcagttttaaaattatgttttaaaatggactatcatctgcttaccgtaactttaaagtatttcgatttcttgactttatatatcttgtggaaaggac

SEQ ID NO: 1614 - DNA, 239 bp, synthetic construct; identical to SEQ ID NO: 1613
  misc_feature 1..239: note = Promoter
  source 1..239: mol_type = other DNA

SEQ ID NO: 1615 - DNA, 239 bp, synthetic construct; identical to SEQ ID NO: 1613
  misc_feature 1..239: note = Promoter
  source 1..239: mol_type = other DNA

SEQ ID NO: 1616 - DNA, 239 bp, synthetic construct; identical to SEQ ID NO: 1613
  misc_feature 1..239: note = Promoter
  source 1..239: mol_type = other DNA

SEQ ID NO: 1617 - DNA, 239 bp, synthetic construct; identical to SEQ ID NO: 1613
  misc_feature 1..239: note = Promoter
  source 1..239: mol_type = other DNA

SEQ ID NO: 1618 - DNA, 239 bp, synthetic construct; identical to SEQ ID NO: 1613
  misc_feature 1..239: note = Promoter
  source 1..239: mol_type = other DNA

SEQ ID NO: 1619 - DNA, 239 bp, synthetic construct
  misc_feature 1..239: note = Promoter
  source 1..239: mol_type = other DNA
gagggcctatttcccatgattccttcatatttgcatataagatgcaaggctgttagagagaattagaactaatttgactgtaaacacaaatatattagtacaaaatatgtgacatagaaagtgataatttcttgggtagtttgcagttttaaaattatgttttaaaatggactatcatctgcttaccgtaactttaaagtatttcgatttcttgactttatatatcttgtggaaaggac

SEQ ID NO: 1620 - DNA, 239 bp, synthetic construct; identical to SEQ ID NO: 1619
  misc_feature 1..239: note = Promoter
  source 1..239: mol_type = other DNA

SEQ ID NO: 1621 - DNA, 239 bp, synthetic construct
  misc_feature 1..239: note = Promoter
  source 1..239: mol_type = other DNA
gagggcctatttcccatgattccttcatatttgcatataagatgcaaggctgttagagagatttagaactaatttgactgtaaacacaaatatattagtacaaaatatgtgacatagaaagtgataatttcttgggtagtttgcagttttaaaattatgttttaaaatggactatcatctgcttaccgtaactttaaagtatttcgatttcttgactttatatatcttgtggaaaggac

SEQ ID NO: 1622 - DNA, 239 bp, synthetic construct
  misc_feature 1..239: note = Promoter
  source 1..239: mol_type = other DNA
gagggcctatttcccatgattccttcatatttgcatataagatgcaaggctgttagagagatatagaactaatttgactgtaaacacaaatatattagtacaaaatatgtgacatagaaagtgataatttcttgggtagtttgcagttttaaaattatgttttaaaatggactatcatctgcttaccgtaactttaaagtatttcgatttcttgactttatatatcttgtggaaaggac

SEQ ID NO: 1623 - DNA, 239 bp, synthetic construct
  misc_feature 1..239: note = Promoter
  source 1..239: mol_type = other DNA
gagggcctatttcccatgattccttcatatttgcatataagatgcaaggctgttagagagataaagaactaatttgactgtaaacacaaatatattagtacaaaatatgtgacatagaaagtgataatttcttgggtagtttgcagttttaaaattatgttttaaaatggactatcatctgcttaccgtaactttaaagtatttcgatttcttgactttatatatcttgtggaaaggac

SEQ ID NO: 1624 - DNA, 239 bp, synthetic construct
  misc_feature 1..239: note = Promoter
  source 1..239: mol_type = other DNA
gagggcctatttcccatgattccttcatatttgcatataagatgcaaggctgttagagagataatgaactaatttgactgtaaacacaaatatattagtacaaaatatgtgacatagaaagtgataatttcttgggtagtttgcagttttaaaattatgttttaaaatggactatcatctgcttaccgtaactttaaagtatttcgatttcttgactttatatatcttgtggaaaggac

SEQ ID NO: 1625 - DNA, 239 bp, synthetic construct
  misc_feature 1..239: note = Promoter
  source 1..239: mol_type = other DNA
gagggcctatttcccatgattccttcatatttgcatataagatgcaaggctgttagagagataattaactaatttgactgtaaacacaaatatattagtacaaaatatgtgacatagaaagtgataatttcttgggtagtttgcagttttaaaattatgttttaaaatggactatcatctgcttaccgtaactttaaagtatttcgatttcttgactttatatatcttgtggaaaggac

SEQ ID NO: 1626 - DNA, 239 bp, synthetic construct; identical to SEQ ID NO: 1625
  misc_feature 1..239: note = Promoter
  source 1..239: mol_type = other DNA

SEQ ID NO: 1627 - DNA, 239 bp, synthetic construct
  misc_feature 1..239: note = Promoter
  source 1..239: mol_type = other DNA
gagggcctatttcccatgattccttcatatttgcatataagatgcaaggctgttagagagataattagctaatttgactgtaaacacaaatatattagtacaaaatatgtgacatagaaagtgataatttcttgggtagtttgcagttttaaaattatgttttaaaatggactatcatctgcttaccgtaactttaaagtatttcgatttcttgactttatatatcttgtggaaaggac

SEQ ID NO: 1628 - DNA, 239 bp, synthetic construct
  misc_feature 1..239: note = Promoter
  source 1..239: mol_type = other DNA
gagggcctatttcccatgattccttcatatttgcatataagatgcaaggctgttagagagataattagataatttgactgtaaacacaaatatattagtacaaaatatgtgacatagaaagtgataatttcttgggtagtttgcagttttaaaattatgttttaaaatggactatcatctgcttaccgtaactttaaagtatttcgatttcttgactttatatatcttgtggaaaggac

SEQ ID NO: 1629 - DNA, 239 bp, synthetic construct
  misc_feature 1..239: note = Promoter
  source 1..239: mol_type = other DNA
gagggcctatttcccatgattccttcatatttgcatataagatgcaaggctgttagagagataattagaaaatttgactgtaaacacaaatatattagtacaaaatatgtgacatagaaagtgataatttcttgggtagtttgcagttttaaaattatgttttaaaatggactatcatctgcttaccgtaactttaaagtatttcgatttcttgactttatatatcttgtggaaaggac

SEQ ID NO: 1630 - DNA, 239 bp, synthetic construct
  misc_feature 1..239: note = Promoter
  source 1..239: mol_type = other DNA
gagggcctatttcccatgattccttcatatttgcatataagatgcaaggctgttagagagataattagaacatttgactgtaaacacaaatatattagtacaaaatatgtgacatagaaagtgataatttcttgggtagtttgcagttttaaaattatgttttaaaatggactatcatctgcttaccgtaactttaaagtatttcgatttcttgactttatatatcttgtggaaaggac

SEQ ID NO: 1631 - DNA, 239 bp, synthetic construct
  misc_feature 1..239: note = Promoter
  source 1..239: mol_type = other DNA
gagggcctatttcccatgattccttcatatttgcatataagatgcaaggctgttagagagataattagaacttttgactgtaaacacaaatatattagtacaaaatatgtgacatagaaagtgataatttcttgggtagtttgcagttttaaaattatgttttaaaatggactatcatctgcttaccgtaactttaaagtatttcgatttcttgactttatatatcttgtggaaaggac

SEQ ID NO: 1632 - DNA, 239 bp, synthetic construct
  misc_feature 1..239: note = Promoter
  source 1..239: mol_type = other DNA
gagggcctatttcccatgattccttcatatttgcatataagatgcaaggctgttagagagataattagaactattgactgtaaacacaaatatattagtacaaaatatgtgacatagaaagtgataatttcttgggtagtttgcagttttaaaattatgttttaaaatggactatcatctgcttaccgtaactttaaagtatttcgatttcttgactttatatatcttgtggaaaggac

SEQ ID NO: 1633 - DNA, 239 bp, synthetic construct
  misc_feature 1..239: note = Promoter
  source 1..239: mol_type = other DNA
gagggcctatttcccatgattccttcatatttgcatataagatgcaaggctgttagagagataattagaactaatgactgtaaacacaaatatattagtacaaaatatgtgacatagaaagtgataatttcttgggtagtttgcagttttaaaattatgttttaaaatggactatcatctgcttaccgtaactttaaagtatttcgatttcttgactttatatatcttgtggaaaggac

SEQ ID NO: 1634 - DNA, 239 bp, synthetic construct; identical to SEQ ID NO: 1633
  misc_feature 1..239: note = Promoter
  source 1..239: mol_type = other DNA

SEQ ID NO: 1635 - DNA, 239 bp, synthetic construct
  misc_feature 1..239: note = Promoter
  source 1..239: mol_type = other DNA
gagggcctatttcccatgattccttcatatttgcatataagatgcaaggctgttagagagataattagaactaattactgtaaacacaaatatattagtacaaaatatgtgacatagaaagtgataatttcttgggtagtttgcagttttaaaattatgttttaaaatggactatcatctgcttaccgtaactttaaagtatttcgatttcttgactttatatatcttgtggaaaggac

SEQ ID NO: 1636 - DNA, 239 bp, synthetic construct
  misc_feature 1..239: note = Promoter
  source 1..239: mol_type = other DNA
gagggcctatttcccatgattccttcatatttgcatataagatgcaaggctgttagagagataattagaactaatttctgtaaacacaaatatattagtacaaaatatgtgacatagaaagtgataatttcttgggtagtttgcagttttaaaattatgttttaaaatggactatcatctgcttaccgtaactttaaagtatttcgatttcttgactttatatatcttgtggaaaggac

SEQ ID NO: 1637 - DNA, 239 bp, synthetic construct
  misc_feature 1..239: note = Promoter
  source 1..239: mol_type = other DNA
gagggcctatttcccatgattccttcatatttgcatataagatgcaaggctgttagagagataattagaactaatttgtgtaaacacaaatatattagtacaaaatatgtgacatagaaagtgataatttcttgggtagtttgcagttttaaaattatgttttaaaatggactatcatctgcttaccgtaactttaaagtatttcgatttcttgactttatatatcttgtggaaaggac

SEQ ID NO: 1638 - DNA, 239 bp, synthetic construct
  misc_feature 1..239: note = Promoter
  source 1..239: mol_type = other DNA
gagggcctatttcccatgattccttcatatttgcatataagatgcaaggctgttagagagataattagaactaatttgagtaaacacaaatatattagtacaaaatatgtgacatagaaagtgataatttcttgggtagtttgcagttttaaaattatgttttaaaatggactatcatctgcttaccgtaactttaaagtatttcgatttcttgactttatatatcttgtggaaaggac

SEQ ID NO: 1639 - DNA, 239 bp, synthetic construct
  misc_feature 1..239: note = Promoter
  source 1..239: mol_type = other DNA
gagggcctatttcccatgattccttcatatttgcatataagatgcaaggctgttagagagataattagaactaatttgactaaacacaaatatattagtacaaaatatgtgacatagaaagtgataatttcttgggtagtttgcagttttaaaattatgttttaaaatggactatcatctgcttaccgtaactttaaagtatttcgatttcttgactttatatatcttgtggaaaggac

SEQ ID NO: 1640 - DNA, 239 bp, synthetic construct; identical to SEQ ID NO: 1639
  misc_feature 1..239: note = Promoter
  source 1..239: mol_type = other DNA

SEQ ID NO: 1641 - DNA, 239 bp, synthetic construct
  misc_feature 1..239: note = Promoter
  source 1..239: mol_type = other DNA
gagggcctatttcccatgattccttcatatttgcatataagatgcaaggctgttagagagataattagaactaatttgactgaacacaaatatattagtacaaaatatgtgacatagaaagtgataatttcttgggtagtttgcagttttaaaattatgttttaaaatggactatcatctgcttaccgtaactttaaagtatttcgatttcttgactttatatatcttgtggaaaggac

SEQ ID NO: 1642 - DNA, 239 bp, synthetic construct
  misc_feature 1..239: note = Promoter
  source 1..239: mol_type = other DNA
gagggcctatttcccatgattccttcatatttgcatataagatgcaaggctgttagagagataattagaactaatttgactgtacacaaatatattagtacaaaatatgtgacatagaaagtgataatttcttgggtagtttgcagttttaaaattatgttttaaaatggactatcatctgcttaccgtaactttaaagtatttcgatttcttgactttatatatcttgtggaaaggac

SEQ ID NO: 1643 - DNA, 239 bp, synthetic construct; identical to SEQ ID NO: 1642
  misc_feature 1..239: note = Promoter
  source 1..239: mol_type = other DNA

SEQ ID NO: 1644 - DNA, 239 bp, synthetic construct
  misc_feature 1..239: note = Promoter
  source 1..239: mol_type = other DNA
gagggcctatttcccatgattccttcatatttgcatataagatgcaaggctgttagagagataattagaactaatttgactgtaaacaaatatattagtacaaaatatgtgacatagaaagtgataatttcttgggtagtttgcagttttaaaattatgttttaaaatggactatcatctgcttaccgtaactttaaagtatttcgatttcttgactttatatatcttgtggaaaggac

SEQ ID NO: 1645 - DNA, 239 bp, synthetic construct; identical to SEQ ID NO: 1644
  misc_feature 1..239: note = Promoter
  source 1..239: mol_type = other DNA

SEQ ID NO: 1646 - DNA, 239 bp, synthetic construct; identical to SEQ ID NO: 1644
  misc_feature 1..239: note = Promoter
  source 1..239: mol_type = other DNA

SEQ ID NO: 1647 - DNA, 239 bp, synthetic construct; identical to SEQ ID NO: 1644
  misc_feature 1..239: note = Promoter
  source 1..239: mol_type = other DNA

SEQ ID NO: 1648 - DNA, 239 bp, synthetic construct
  misc_feature 1..239: note = Promoter
  source 1..239: mol_type = other DNA
gagggcctatttcccatgattccttcatatttgcatataagatgcaaggctgttagagagataattagaactaatttgactgtaaacacatatattagtacaaaatatgtgacatagaaagtgataatttcttgggtagtttgcagttttaaaattatgttttaaaatggactatcatctgcttaccgtaactttaaagtatttcgatttcttgactttatatatcttgtggaaaggac

SEQ ID NO: 1649 - DNA, 239 bp, synthetic construct; identical to SEQ ID NO: 1648
  misc_feature 1..239: note = Promoter
  source 1..239: mol_type = other DNA

SEQ ID NO: 1650 - DNA, 239 bp, synthetic construct
  misc_feature 1..239: note = Promoter
  source 1..239: mol_type = other DNA
gagggcctatttcccatgattccttcatatttgcatataagatgcaaggctgttagagagataattagaactaatttgactgtaaacacaaatattagtacaaaatatgtgacatagaaagtgataatttcttgggtagtttgcagttttaaaattatgttttaaaatggactatcatctgcttaccgtaactttaaagtatttcgatttcttgactttatatatcttgtggaaaggac

SEQ ID NO: 1651 - DNA, 239 bp, synthetic construct; identical to SEQ ID NO: 1650
  misc_feature 1..239: note = Promoter
  source 1..239: mol_type = other DNA

SEQ ID NO: 1652 - DNA, 239 bp, synthetic construct; identical to SEQ ID NO: 1650
  misc_feature 1..239: note = Promoter
  source 1..239: mol_type = other DNA

SEQ ID NO: 1653 - DNA, 239 bp, synthetic construct; identical to SEQ ID NO: 1650
  misc_feature 1..239: note = Promoter
  source 1..239: mol_type = other DNA

SEQ ID NO: 1654 - DNA, 239 bp, synthetic construct; identical to SEQ ID NO: 1650
  misc_feature 1..239: note = Promoter
  source 1..239: mol_type = other DNA

SEQ ID NO: 1655 - DNA, 239 bp, synthetic construct
  misc_feature 1..239: note = Promoter
  source 1..239: mol_type = other DNA
gagggcctatttcccatgattccttcatatttgcatataagatgcaaggctgttagagagataattagaactaatttgactgtaaacacaaatataagtacaaaatatgtgacatagaaagtgataatttcttgggtagtttgcagttttaaaattatgttttaaaatggactatcatctgcttaccgtaactttaaagtatttcgatttcttgactttatatatcttgtggaaaggac

SEQ ID NO: 1656 - DNA, 239 bp, synthetic construct
  misc_feature 1..239: note = Promoter
  source 1..239: mol_type = other DNA
gagggcctatttcccatgattccttcatatttgcatataagatgcaaggctgttagagagataattagaactaatttgactgtaaacacaaatatatgtacaaaatatgtgacatagaaagtgataatttcttgggtagtttgcagttttaaaattatgttttaaaatggactatcatctgcttaccgtaactttaaagtatttcgatttcttgactttatatatcttgtggaaaggac

SEQ ID NO: 1657 - DNA, 239 bp, synthetic construct
  misc_feature 1..239: note = Promoter
  source 1..239: mol_type = other DNA
gagggcctatttcccatgattccttcatatttgcatataagatgcaaggctgttagagagataattagaactaatttgactgtaaacacaaatatatttacaaaatatgtgacatagaaagtgataatttcttgggtagtttgcagttttaaaattatgttttaaaatggactatcatctgcttaccgtaactttaaagtatttcgatttcttgactttatatatcttgtggaaaggac

SEQ ID NO: 1658 - DNA, 239 bp, synthetic construct
  misc_feature 1..239: note = Promoter
  source 1..239: mol_type = other DNA
gagggcctatttcccatgattccttcatatttgcatataagatgcaaggctgttagagagataattagaactaatttgactgtaaacacaaatatattaacaaaatatgtgacatagaaagtgataatttcttgggtagtttgcagttttaaaattatgttttaaaatggactatcatctgcttaccgtaactttaaagtatttcgatttcttgactttatatatcttgtggaaaggac

SEQ ID NO: 1659 - DNA, 239 bp, synthetic construct
  misc_feature 1..239: note = Promoter
  source 1..239: mol_type = other DNA
gagggcctatttcccatgattccttcatatttgcatataagatgcaaggctgttagagagataattagaactaatttgactgtaaacacaaatatattagcaaaatatgtgacatagaaagtgataatttcttgggtagtttgcagttttaaaattatgttttaaaatggactatcatctgcttaccgtaactttaaagtatttcgatttcttgactttatatatcttgtggaaaggac

SEQ ID NO: 1660 - DNA, 239 bp, synthetic construct
  misc_feature 1..239: note = Promoter
  source 1..239: mol_type = other DNA
gagggcctatttcccatgattccttcatatttgcatataagatgcaaggctgttagagagataattagaactaatttgactgtaaacacaaatatattagtaaaatatgtgacatagaaagtgataatttcttgggtagtttgcagttttaaaattatgttttaaaatggactatcatctgcttaccgtaactttaaagtatttcgatttcttgactttatatatcttgtggaaaggac

SEQ ID NO: 1661 - DNA, 239 bp, synthetic construct; identical to SEQ ID NO: 1660
  misc_feature 1..239: note = Promoter
  source 1..239: mol_type = other DNA

SEQ ID NO: 1662 - DNA, 239 bp, synthetic construct
  misc_feature 1..239: note = Promoter
  source 1..239: mol_type = other DNA
gagggcctatttcccatgattccttcatatttgcatataagatgcaaggctgttagagagataattagaactaatttgactgtaaacacaaatatattagtacaatatgtgacatagaaagtgataatttcttgggtagtttgcagttttaaaattatgttttaaaatggactatcatctgcttaccgtaactttaaagtatttcgatttcttgactttatatatcttgtggaaaggac

SEQ ID NO: 1663 - DNA, 239 bp, synthetic construct; identical to SEQ ID NO: 1662
  misc_feature 1..239: note = Promoter
  source 1..239: mol_type = other DNA

SEQ ID NO: 1664 - DNA, 239 bp, synthetic construct; identical to SEQ ID NO: 1662
  misc_feature 1..239: note = Promoter
  source 1..239: mol_type = other DNA

SEQ ID NO: 1665 - DNA, 239 bp, synthetic construct
  misc_feature 1..239: note = Promoter
  source 1..239: mol_type = other DNA
gagggcctatttcccatgattccttcatatttgcatataagatgcaaggctgttagagagataattagaactaatttgactgtaaacacaaatatattagtacaaaatgtgacatagaaagtgataatttcttgggtagtttgcagttttaaaattatgttttaaaatggactatcatctgcttaccgtaactttaaagtatttcgatttcttgactttatatatcttgtggaaaggac

SEQ ID NO: 1666 - DNA, 239 bp, synthetic construct; identical to SEQ ID NO: 1665
  misc_feature 1..239: note = Promoter
  source 1..239: mol_type = other DNA

SEQ ID NO: 1667 - DNA, 239 bp, synthetic construct; identical to SEQ ID NO: 1665
  misc_feature 1..239: note = Promoter
  source 1..239: mol_type = other DNA

SEQ ID NO: 1668 - DNA, 239 bp, synthetic construct
  misc_feature 1..239: note = Promoter
  source 1..239: mol_type = other DNA
gagggcctatttcccatgattccttcatatttgcatataagatgcaaggctgttagagagataattagaactaatttgactgtaaacacaaatatattagtacaaaatatgacatagaaagtgataatttcttgggtagtttgcagttttaaaattatgttttaaaatggactatcatctgcttaccgtaactttaaagtatttcgatttcttgactttatatatcttgtggaaaggac

SEQ ID NO: 1669 - DNA, 239 bp, synthetic construct; identical to SEQ ID NO: 1668
  misc_feature 1..239: note = Promoter
  source 1..239: mol_type = other DNA

SEQ ID NO: 1670 - DNA, 239 bp, synthetic construct; identical to SEQ ID NO: 1668
  misc_feature 1..239: note = Promoter
  source 1..239: mol_type = other DNA

SEQ ID NO: 1671 - DNA, 239 bp, synthetic construct
  misc_feature 1..239: note = Promoter
  source 1..239: mol_type = other DNA
gagggcctatttcccatgattccttcatatttgcatataagatgcaaggctgttagagagataattagaactaatttgactgtaaacacaaatatattagtacaaaatatgtcatagaaagtgataatttcttgggtagtttgcagttttaaaattatgttttaaaatggactatcatctgcttaccgtaactttaaagtatttcgatttcttgactttatatatcttgtggaaaggac

SEQ ID NO: 1672 - DNA, 239 bp, synthetic construct
  misc_feature 1..239: note = Promoter
  source 1..239: mol_type = other DNA
gagggcctatttcccatgattccttcatatttgcatataagatgcaaggctgttagagagataattagaactaatttgactgtaaacacaaatatattagtacaaaatatgtgatagaaagtgataatttcttgggtagtttgcagttttaaaattatgttttaaaatggactatcatctgcttaccgtaactttaaagtatttcgatttcttgactttatatatcttgtggaaaggac

SEQ ID NO: 1673 - DNA, 239 bp, synthetic construct; identical to SEQ ID NO: 1672
  misc_feature 1..239: note = Promoter
  source 1..239: mol_type = other DNA

SEQ ID NO: 1674 - DNA, 239 bp, synthetic construct
  misc_feature 1..239: note = Promoter
  source 1..239: mol_type = other DNA
gagggcctatttcccatgattccttcatatttgcatataagatgcaaggctgttagagagataattagaactaatttgactgtaaacacaaatatattagtacaaaatatgtgacagaaagtgataatttcttgggtagtttgcagttttaaaattatgttttaaaatggactatcatctgcttaccgtaactttaaagtatttcgatttcttgactttatatatcttgtggaaaggac

SEQ ID NO: 1675 - DNA, 239 bp, synthetic construct; identical to SEQ ID NO: 1674
  misc_feature 1..239: note = Promoter
  source 1..239: mol_type = other DNA

SEQ ID NO: 1676 - DNA, 239 bp, synthetic construct
  misc_feature 1..239: note = Promoter
  source 1..239: mol_type = other DNA
gagggcctatttcccatgattccttcatatttgcatataagatgcaaggctgttagagagataattagaactaatttgactgtaaacacaaatatattagtacaaaatatgtgacataaagtgataatttcttgggtagtttgcagttttaaaattatgttttaaaatggactatcatctgcttaccgtaactttaaagtatttcgatttcttgactttatatatcttgtggaaaggac

SEQ ID NO: 1677 - DNA, 239 bp, synthetic construct; identical to SEQ ID NO: 1676
  misc_feature 1..239: note = Promoter
  source 1..239: mol_type = other DNA

SEQ ID NO: 1678 - DNA, 239 bp, synthetic construct
  misc_feature 1..239: note = Promoter
  source 1..239: mol_type = other DNA
gagggcctatttcccatgattccttcatatttgcatataagatgcaaggctgttagagagataattagaactaatttgactgtaaacacaaatatattagtacaaaatatgtgacatagagtgataatttcttgggtagtttgcagttttaaaattatgttttaaaatggactatcatctgcttaccgtaactttaaagtatttcgatttcttgactttatatatcttgtggaaaggac

SEQ ID NO: 1679 - DNA, 239 bp, synthetic construct; identical to SEQ ID NO: 1678
  misc_feature 1..239: note = Promoter
  source 1..239: mol_type = other DNA

SEQ ID NO: 1680 - DNA, 239 bp, synthetic construct
  misc_feature 1..239: note = Promoter
  source 1..239: mol_type = other DNA
gagggcctatttcccatgattccttcatatttgcatataagatgcaaggctgttagagagataattagaactaatttgactgtaaacacaaatatattagtacaaaatatgtgacatagaatgataatttcttgggtagtttgcagttttaaaattatgttttaaaatggactatcatctgcttaccgtaactttaaagtatttcgatttcttgactttatatatcttgtggaaaggac

SEQ ID NO: 1681 - DNA, 239 bp, synthetic construct
  misc_feature 1..239: note = Promoter
  source 1..239: mol_type = other DNA
gagggcctatttcccatgattccttcatatttgcatataagatgcaaggctgttagagagataattagaactaatttgactgtaaacacaaatatattagtacaaaatatgtgacatagaaagataatttcttgggtagtttgcagttttaaaattatgttttaaaatggactatcatctgcttaccgtaactttaaagtatttcgatttcttgactttatatatcttgtggaaaggac

SEQ ID NO: 1682 - DNA, 239 bp, synthetic construct; identical to SEQ ID NO: 1681
  misc_feature 1..239: note = Promoter
  source 1..239: mol_type = other DNA

SEQ ID NO: 1683 - DNA, 239 bp, synthetic construct
  misc_feature 1..239: note = Promoter
  source 1..239: mol_type = other DNA
gagggcctatttcccatgattccttcatatttgcatataagatgcaaggctgttagagagataattagaactaatttgactgtaaacacaaatatattagtacaaaatatgtgacatagaaagttaatttcttgggtagtttgcagttttaaaattatgttttaaaatggactatcatctgcttaccgtaactttaaagtatttcgatttcttgactttatatatcttgtggaaaggac

SEQ ID NO: 1684 - DNA, 239 bp, synthetic construct
  misc_feature 1..239: note = Promoter
  source 1..239: mol_type = other DNA
gagggcctatttcccatgattccttcatatttgcatataagatgcaaggctgttagagagataattagaactaatttgactgtaaacacaaatatattagtacaaaatatgtgacatagaaagtgaatttcttgggtagtttgcagttttaaaattatgttttaaaatggactatcatctgcttaccgtaactttaaagtatttcgatttcttgactttatatatcttgtggaaaggac

SEQ ID NO: 1685 - DNA, 239 bp, synthetic construct; identical to SEQ ID NO: 1684
  misc_feature 1..239: note = Promoter
  source 1..239: mol_type = other DNA

SEQ ID NO: 1686 - DNA, 239 bp, synthetic construct
  misc_feature 1..239: note = Promoter
  source 1..239: mol_type = other DNA
gagggcctatttcccatgattccttcatatttgcatataagatgcaaggctgttagagagataattagaactaatttgactgtaaacacaaatatattagtacaaaatatgtgacatagaaagtgattttcttgggtagtttgcagttttaaaattatgttttaaaatggactatcatctgcttaccgtaactttaaagtatttcgatttcttgactttatatatcttgtggaaaggac

SEQ ID NO: 1687 - DNA, 239 bp, synthetic construct
  misc_feature 1..239: note = Promoter
  source 1..239: mol_type = other DNA
gagggcctatttcccatgattccttcatatttgcatataagatgcaaggctgttagagagataattagaactaatttgactgtaaacacaaatatattagtacaaaatatgtgacatagaaagtgatattcttgggtagtttgcagttttaaaattatgttttaaaatggactatcatctgcttaccgtaactttaaagtatttcgatttcttgactttatatatcttgtggaaaggac

SEQ ID NO: 1688 - DNA, 239 bp, synthetic construct
  misc_feature 1..239: note = Promoter
  source 1..239: mol_type = other DNA
gagggcctatttcccatgattccttcatatttgcatataagatgcaaggctgttagagagataattagaactaatttgactgtaaacacaaatatattagtacaaaatatgtgacatagaaagtgataatcttgggtagtttgcagttttaaaattatgttttaaaatggactatcatctgcttaccgtaactttaaagtatttcgatttcttgactttatatatcttgtggaaaggac

SEQ ID NO: 1689 - DNA, 239 bp, synthetic construct; identical to SEQ ID NO: 1688
  misc_feature 1..239: note = Promoter
  source 1..239: mol_type = other DNA

SEQ ID NO: 1690 - DNA, 239 bp, synthetic construct
  misc_feature 1..239: note = Promoter
  source 1..239: mol_type = other DNA
gagggcctatttcccatgattccttcatatttgcatataagatgcaaggctgttagagagataattagaactaatttgactgtaaacacaaatatattagtacaaaatatgtgacatagaaagtgataattttgggtagtttgcagttttaaaattatgttttaaaatggactatcatctgcttaccgtaactttaaagtatttcgatttcttgactttatatatcttgtggaaaggac

SEQ ID NO: 1691 - DNA, 239 bp, synthetic construct; identical to SEQ ID NO: 1690
  misc_feature 1..239: note = Promoter
  source 1..239: mol_type = other DNA

SEQ ID NO: 1692 - DNA, 239 bp, synthetic construct
  misc_feature 1..239: note = Promoter
  source 1..239: mol_type = other DNA
gagggcctatttcccatgattccttcatatttgcatataagatgcaaggctgttagagagataattagaactaatttgactgtaaacacaaatatattagtacaaaatatgtgacatagaaagtgataatttcgggtagtttgcagttttaaaattatgttttaaaatggactatcatctgcttaccgtaactttaaagtatttcgatttcttgactttatatatcttgtggaaaggac

SEQ ID NO: 1693 - DNA, 239 bp, synthetic construct
  misc_feature 1..239: note = Promoter
  source 1..239: mol_type = other DNA
gagggcctatttcccatgattccttcatatttgcatataagatgcaaggctgttagagagataattagaactaatttgactgtaaacacaaatatattagtacaaaatatgtgacatagaaagtgataatttctggtagtttgcagttttaaaattatgttttaaaatggactatcatctgcttaccgtaactttaaagtatttcgatttcttgactttatatatcttgtggaaaggac

SEQ ID NO: 1694 - DNA, 239 bp, synthetic construct
  misc_feature 1..239: note = Promoter
  source 1..239: mol_type = other DNA
gagggcctatttcccatgattccttcatatttgcatataagatgcaaggctgttagagagataattagaactaatttgactgtaaacacaaatatattagtacaaaatatgtgacatagaaagtgataatttcttgtagtttgcagttttaaaattatgttttaaaatggactatcatctgcttaccgtaactttaaagtatttcgatttcttgactttatatatcttgtggaaaggac

SEQ ID NO: 1695 - DNA, 239 bp, synthetic construct; identical to SEQ ID NO: 1694
  misc_feature 1..239: note = Promoter
  source 1..239: mol_type = other DNA

SEQ ID NO: 1696 - DNA, 239 bp, synthetic construct
  misc_feature 1..239: note = Promoter
  source 1..239: mol_type = other DNA
gagggcctatttcccatgattccttcatatttgcatataagatgcaaggctgttagagagataattagaactaatttgactgtaaacacaaatatattagtacaaaatatgtgacatagaaagtgataatttcttggagtttgcagttttaaaattatgttttaaaatggactatcatctgcttaccgtaactttaaagtatttcgatttcttgactttatatatcttgtggaaaggac

SEQ ID NO: 1697 - DNA, 239 bp, synthetic construct
  misc_feature 1..239: note = Promoter
  source 1..239: mol_type = other DNA
gagggcctatttcccatgattccttcatatttgcatataagatgcaaggctgttagagagataattagaactaatttgactgtaaacacaaatatattagtacaaaatatgtgacatagaaagtgataatttcttggggtttgcagttttaaaattatgttttaaaatggactatcatctgcttaccgtaactttaaagtatttcgatttcttgactttatatatcttgtggaaaggac

SEQ ID NO: 1698 - DNA, 239 bp, synthetic construct
  misc_feature 1..239: note = Promoter
  source 1..239: mol_type = other DNA
gagggcctatttcccatgattccttcatatttgcatataagatgcaaggctgttagagagataattagaactaatttgactgtaaacacaaatatattagtacaaaatatgtgacatagaaagtgataatttcttgggttttgcagttttaaaattatgttttaaaatggactatcatctgcttaccgtaactttaaagtatttcgatttcttgactttatatatcttgtggaaaggac

SEQ ID NO: 1699 - DNA, 239 bp, synthetic construct
  misc_feature 1..239: note = Promoter
  source 1..239: mol_type = other DNA
gagggcctatttcccatgattccttcatatttgcatataagatgcaaggctgttagagagataattagaactaatttgactgtaaacacaaatatattagtacaaaatatgtgacatagaaagtgataatttcttgggtattgcagttttaaaattatgttttaaaatggactatcatctgcttaccgtaactttaaagtatttcgatttcttgactttatatatcttgtggaaaggac

SEQ ID NO: 1700 - DNA, 239 bp, synthetic construct
  misc_feature 1..239: note = Promoter
  source 1..239: mol_type = other DNA
gagggcctatttcccatgattccttcatatttgcatataagatgcaaggctgttagagagataattagaactaatttgactgtaaacacaaatatattagtacaaaatatgtgacatagaaagtgataatttcttgggtagtgcagttttaaaattatgttttaaaatggactatcatctgcttaccgtaactttaaagtatttcgatttcttgactttatatatcttgtggaaaggac

SEQ ID NO: 1701 - DNA, 239 bp, synthetic construct; identical to SEQ ID NO: 1700
  misc_feature 1..239: note = Promoter
  source 1..239: mol_type = other DNA

SEQ ID NO: 1702 - DNA, 239 bp, synthetic construct
  misc_feature 1..239: note = Promoter
  source 1..239: mol_type = other DNA
gagggcctatttcccatgattccttcatatttgcatataagatgcaaggctgttagagagataattagaactaatttgactgtaaacacaaatatattagtacaaaatatgtgacatagaaagtgataatttcttgggtagttcagttttaaaattatgttttaaaatggactatcatctgcttaccgtaactttaaagtatttcgatttcttgactttatatatcttgtggaaaggac

SEQ ID NO: 1703 - DNA, 239 bp, synthetic construct
  misc_feature 1..239: note = Promoter
  source 1..239: mol_type = other DNA
gagggcctatttcccatgattccttcatatttgcatataagatgcaaggctgttagagagataattagaactaatttgactgtaaacacaaatatattagtacaaaatatgtgacatagaaagtgataatttcttgggtagtttagttttaaaattatgttttaaaatggactatcatctgcttaccgtaactttaaagtatttcgatttcttgactttatatatcttgtggaaaggac

SEQ ID NO: 1704 - DNA, 239 bp, synthetic construct
  misc_feature 1..239: note = Promoter
  source 1..239: mol_type = other DNA
gagggcctatttcccatgattccttcatatttgcatataagatgcaaggctgttagagagataattagaactaatttgactgtaaacacaaatatattagtacaaaatatgtgacatagaaagtgataatttcttgggtagtttggttttaaaattatgttttaaaatggactatcatctgcttaccgtaactttaaagtatttcgatttcttgactttatatatcttgtggaaaggac

SEQ ID NO: 1705 - DNA, 239 bp, synthetic construct
  misc_feature 1..239: note = Promoter
  source 1..239: mol_type = other DNA
gagggcctatttcccatgattccttcatatttgcatataagatgcaaggctgttagagagataattagaactaatttgactgtaaacacaaatatattagtacaaaatatgtgacatagaaagtgataatttcttgggtagtttgcttttaaaattatgttttaaaatggactatcatctgcttaccgtaactttaaagtatttcgatttcttgactttatatatcttgtggaaaggac

SEQ ID NO: 1706 - DNA, 239 bp, synthetic construct
  misc_feature 1..239: note = Promoter
  source 1..239: mol_type = other DNA
gagggcctatttcccatgattccttcatatttgcatataagatgcaaggctgttagagagataattagaactaatttgactgtaaacacaaatatattagtacaaaatatgtgacatagaaagtgataatttcttgggtagtttgcatttaaaattatgttttaaaatggactatcatctgcttaccgtaactttaaagtatttcgatttcttgactttatatatcttgtggaaaggac

SEQ ID NO: 1707 - DNA, 239 bp, synthetic construct
  misc_feature 1..239: note = Promoter
  source 1..239: mol_type = other DNA
gagggcctatttcccatgattccttcatatttgcatataagatgcaaggctgttagagagataattagaactaatttgactgtaaacacaaatatattagtacaaaatatgtgacatagaaagtgataatttcttgggtagtttgcagttaaaattatgttttaaaatggactatcatctgcttaccgtaactttaaagtatttcgatttcttgactttatatatcttgtggaaaggac

SEQ ID NO: 1708 - DNA, 239 bp, synthetic construct; identical to SEQ ID NO: 1707
  misc_feature 1..239: note = Promoter
  source 1..239: mol_type = other DNA

SEQ ID NO: 1709 - DNA, 239 bp, synthetic construct; identical to SEQ ID NO: 1707
  misc_feature 1..239: note = Promoter
  source 1..239: mol_type = other DNA

SEQ ID NO: 1710 - DNA, 239 bp, synthetic construct
  misc_feature 1..239: note = Promoter
  source 1..239: mol_type = other DNA
gagggcctatttcccatgattccttcatatttgcatataagatgcaaggctgttagagagataattagaactaatttgactgtaaacacaaatatattagtacaaaatatgtgacatagaaagtgataatttcttgggtagtttgcagtttaaattatgttttaaaatggactatcatctgcttaccgtaactttaaagtatttcgatttcttgactttatatatcttgtggaaaggac

SEQ ID NO: 1711 - DNA, 239 bp, synthetic construct
  misc_feature 1..239: note = Promoter
  source 1..239: mol_type = other DNA
gagggcctatttcccatgattccttcatatttgcatataagatgcaaggctgttagagagataattagaactaatttgactgtaaacacaaatatattagtacaaaatatgtgacatagaaagtgataatttcttgggtagtttgcagttttaattatgttttaaaatggactatcatctgcttaccgtaactttaaagtatttcgatttcttgactttatatatcttgtggaaaggac

SEQ ID NO: 1712 - DNA, 239 bp, synthetic construct; identical to SEQ ID NO: 1711
  misc_feature 1..239: note = Promoter
  source 1..239: mol_type = other DNA

SEQ ID NO: 1713 - DNA, 239 bp, synthetic construct; identical to SEQ ID NO: 1711
  misc_feature 1..239: note = Promoter
  source 1..239: mol_type = other DNA

SEQ ID NO: 1714 - DNA, 239 bp, synthetic construct
  misc_feature 1..239: note = Promoter
  source 1..239: mol_type = other DNA
gagggcctatttcccatgattccttcatatttgcatataagatgcaaggctgttagagagataattagaactaatttgactgtaaacacaaatatattagtacaaaatatgtgacatagaaagtgataatttcttgggtagtttgcagttttaaatatgttttaaaatggactatcatctgcttaccgtaactttaaagtatttcgatttcttgactttatatatcttgtggaaaggac

SEQ ID NO: 1715 - DNA, 239 bp, synthetic construct
  misc_feature 1..239: note = Promoter
  source 1..239: mol_type = other DNA
gagggcctatttcccatgattccttcatatttgcatataagatgcaaggctgttagagagataattagaactaatttgactgtaaacacaaatatattagtacaaaatatgtgacatagaaagtgataatttcttgggtagtttgcagttttaaaaatgttttaaaatggactatcatctgcttaccgtaactttaaagtatttcgatttcttgactttatatatcttgtggaaaggac

SEQ ID NO: 1716 - DNA, 239 bp, synthetic construct
  misc_feature 1..239: note = Promoter
  source 1..239: mol_type = other DNA
gagggcctatttcccatgattccttcatatttgcatataagatgcaaggctgttagagagataattagaactaatttgactgtaaacacaaatatattagtacaaaatatgtgacatagaaagtgataatttcttgggtagtttgcagttttaaaattgttttaaaatggactatcatctgcttaccgtaactttaaagtatttcgatttcttgactttatatatcttgtggaaaggac

SEQ ID NO: 1717 - DNA, 239 bp, synthetic construct; identical to SEQ ID NO: 1716
  misc_feature 1..239: note = Promoter
  source 1..239: mol_type = other DNA

SEQ ID NO: 1718 - DNA, 239 bp, synthetic construct
  misc_feature 1..239: note = Promoter
  source 1..239: mol_type = other DNA
gagggcctatttcccatgattccttcatatttgcatataagatgcaaggctgttagagagataattagaactaatttgactgtaaacacaaatatattagtacaaaatatgtgacatagaaagtgataatttcttgggtagtttgcagttttaaaattattttaaaatggactatcatctgcttaccgtaactttaaagtatttcgatttcttgactttatatatcttgtggaaaggac

SEQ ID NO: 1719 - DNA, 239 bp, synthetic construct; identical to SEQ ID NO: 1718
  misc_feature 1..239: note = Promoter
  source 1..239: mol_type = other DNA

SEQ ID NO: 1720 - DNA, 239 bp, synthetic construct
  misc_feature 1..239: note = Promoter
  source 1..239: mol_type = other DNA
gagggcctatttcccatgattccttcatatttgcatataagatgcaaggctgttagagagataattagaactaatttgactgtaaacacaaatatattagtacaaaatatgtgacatagaaagtgataatttcttgggtagtttgcagttttaaaattatgttaaaatggactatcatctgcttaccgtaactttaaagtatttcgatttcttgactttatatatcttgtggaaaggac

SEQ ID NO: 1721 - DNA, 239 bp, synthetic construct; identical to SEQ ID NO: 1720
  misc_feature 1..239: note = Promoter
  source 1..239: mol_type = other DNA

SEQ ID NO: 1722 - DNA, 239 bp, synthetic construct; identical to SEQ ID NO: 1720
  misc_feature 1..239: note = Promoter
  source 1..239: mol_type = other DNA

SEQ ID NO: 1723 - DNA, 239 bp, synthetic construct
  misc_feature 1..239: note = Promoter
  source 1..239: mol_type = other DNA
gagggcctatttcccatgattccttcatatttgcatataagatgcaaggctgttagagagataattagaactaatttgactgtaaacacaaatatattagtacaaaatatgtgacatagaaagtgataatttcttgggtagtttgcagttttaaaattatgtttaaatggactatcatctgcttaccgtaactttaaagtatttcgatttcttgactttatatatcttgtggaaaggac

SEQ ID NO: 1724 - DNA, 239 bp, synthetic construct
  misc_feature 1..239: note = Promoter
  source 1..239: mol_type = other DNA
gagggcctatttcccatgattccttcatatttgcatataagatgcaaggctgttagagagataattagaactaatttgactgtaaacacaaatatattagtacaaaatatgtgacatagaaagtgataatttcttgggtagtttgcagttttaaaattatgttttaatggactatcatctgcttaccgtaactttaaagtatttcgatttcttgactttatatatcttgtggaaaggac

SEQ ID NO: 1725 - DNA, 239 bp, synthetic construct; identical to SEQ ID NO: 1724
  misc_feature 1..239: note = Promoter
  source 1..239: mol_type = other DNA

SEQ ID NO: 1726 - DNA, 239 bp, synthetic construct; identical to SEQ ID NO: 1724
  misc_feature 1..239: note = Promoter
  source 1..239: mol_type = other DNA

SEQ ID NO: 1727 - DNA, 239 bp, synthetic construct
  misc_feature 1..239: note = Promoter
  source 1..239: mol_type = other DNA
gagggcctatttcccatgattccttcatatttgcatataagatgcaaggctgttagagagataattagaactaatttgactgtaaacacaaatatattagtacaaaatatgtgacatagaaagtgataatttcttgggtagtttgcagttttaaaattatgttttaaaggactatcatctgcttaccgtaactttaaagtatttcgatttcttgactttatatatcttgtggaaaggac

SEQ ID NO: 1728 - DNA, 239 bp, synthetic construct
  misc_feature 1..239: note = Promoter
  source 1..239: mol_type = other DNA
gagggcctatttcccatgattccttcatatttgcatataagatgcaaggctgttagagagataattagaactaatttgactgtaaacacaaatatattagtacaaaatatgtgacatagaaagtgataatttcttgggtagtttgcagttttaaaattatgttttaaaagactatcatctgcttaccgtaactttaaagtatttcgatttcttgactttatatatcttgtggaaaggac

SEQ ID NO: 1729 - DNA, 239 bp, synthetic construct
  misc_feature 1..239: note = Promoter
  source 1..239: mol_type = other DNA
gagggcctatttcccatgattccttcatatttgcatataagatgcaaggctgttagagagataattagaactaatttgactgtaaacacaaatatattagtacaaaatatgtgacatagaaagtgataatttcttgggtagtttgcagttttaaaattatgttttaaaatactatcatctgcttaccgtaactttaaagtatttcgatttcttgactttatatatcttgtggaaaggac

SEQ ID NO: 1730 - DNA, 239 bp, synthetic construct
  misc_feature 1..239: note = Promoter
  source 1..239: mol_type = other DNA
gagggcctatttcccatgattccttcatatttgcatataagatgcaaggctgttagagagataattagaactaatttgactgtaaacacaaatatattagtacaaaatatgtgacatagaaagtgataatttcttgggtagtttgcagttttaaaattatgttttaaaatgctatcatctgcttaccgtaactttaaagtatttcgatttcttgactttatatatcttgtggaaaggac

SEQ ID NO: 1731 - DNA, 239 bp, synthetic construct
  misc_feature 1..239: note = Promoter
  source 1..239: mol_type = other DNA
gagggcctatttcccatgattccttcatatttgcatataagatgcaaggctgttagagagataattagaactaatttgactgtaaacacaaatatattagtacaaaatatgtgacatagaaagtgataatttcttgggtagtttgcagttttaaaattatgttttaaaatggtatcatctgcttaccgtaactttaaagtatttcgatttcttgactttatatatcttgtggaaaggac

SEQ ID NO: 1732 - DNA, 239 bp, synthetic construct
  misc_feature 1..239: note = Promoter
  source 1..239: mol_type = other DNA
gagggcctatttcccatgattccttcatatttgcatataagatgcaaggctgttagagagataattagaactaatttgactgtaaacacaaatatattagtacaaaatatgtgacatagaaagtgataatttcttgggtagtttgcagttttaaaattatgttttaaaatggaatcatctgcttaccgtaactttaaagtatttcgatttcttgactttatatatcttgtggaaaggac

SEQ ID NO: 1733 - DNA, 239 bp, synthetic construct
  misc_feature 1..239: note = Promoter
  source 1..239: mol_type = other DNA
gagggcctatttcccatgattccttcatatttgcatataagatgcaaggctgttagagagataattagaactaatttgactgtaaacacaaatatattagtacaaaatatgtgacatagaaagtgataatttcttgggtagtttgcagttttaaaattatgttttaaaatggactcatctgcttaccgtaactttaaagtatttcgatttcttgactttatatatcttgtggaaaggac

SEQ ID NO: 1734 - DNA, 239 bp, synthetic construct; identical to SEQ ID NO: 1733
  misc_feature 1..239: note = Promoter
  source 1..239: mol_type = other DNA

SEQ ID NO: 1735 - DNA, 239 bp, synthetic construct
  misc_feature 1..239: note = Promoter
  source 1..239: mol_type = other DNA
gagggcctatttcccatgattccttcatatttgcatataagatgcaaggctgttagagagataattagaactaatttgactgtaaacacaaatatattagtacaaaatatgtgacatagaaagtgataatttcttgggtagtttgcagttttaaaattatgttttaaaatggactaatctgcttaccgtaactttaaagtatttcgatttcttgactttatatatcttgtggaaaggac

SEQ ID NO: 1736 - DNA, 239 bp, synthetic construct
  misc_feature 1..239: note = Promoter
  source 1..239: mol_type = other DNA
gagggcctatttcccatgattccttcatatttgcatataagatgcaaggctgttagagagataattagaactaatttgactgtaaacacaaatatattagtacaaaatatgtgacatagaaagtgataatttcttgggtagtttgcagttttaaaattatgttttaaaatggactattctgcttaccgtaactttaaagtatttcgatttcttgactttatatatcttgtggaaaggac

SEQ ID NO: 1737 - DNA, 239 bp, synthetic construct
  misc_feature 1..239: note = Promoter
  source 1..239: mol_type = other DNA
gagggcctatttcccatgattccttcatatttgcatataagatgcaaggctgttagagagataattagaactaatttgactgtaaacacaaatatattagtacaaaatatgtgacatagaaagtgataatttcttgggtagtttgcagttttaaaattatgttttaaaatggactatcctgcttaccgtaactttaaagtatttcgatttcttgactttatatatcttgtggaaaggac

SEQ ID NO: 1738 - DNA, 239 bp, synthetic construct
  misc_feature 1..239: note = Promoter
  source 1..239: mol_type = other DNA
gagggcctatttcccatgattccttcatatttgcatataagatgcaaggctgttagagagataattagaactaatttgactgtaaacacaaatatattagtacaaaatatgtgacatagaaagtgataatttcttgggtagtttgcagttttaaaattatgttttaaaatggactatcatgcttaccgtaactttaaagtatttcgatttcttgactttatatatcttgtggaaaggac

SEQ ID NO: 1739 - DNA, 239 bp, synthetic construct; identical to SEQ ID NO: 1738
  misc_feature 1..239: note = Promoter
  source 1..239: mol_type = other DNA

SEQ ID NO: 1740 - DNA, 239 bp, synthetic construct
  misc_feature 1..239: note = Promoter
  source 1..239: mol_type = other DNA
gagggcctatttcccatgattccttcatatttgcatataagatgcaaggctgttagagagataattagaactaatttgactgtaaacacaaatatattagtacaaaatatgtgacatagaaagtgataatttcttgggtagtttgcagttttaaaattatgttttaaaatggactatcatccttaccgtaactttaaagtatttcgatttcttgactttatatatcttgtggaaaggac

SEQ ID NO: 1741 - DNA, 239 bp, synthetic construct
  misc_feature 1..239: note = Promoter
  source 1..239: mol_type = other DNA
gagggcctatttcccatgattccttcatatttgcatataagatgcaaggctgttagagagataattagaactaatttgactgtaaacacaaatatattagtacaaaatatgtgacatagaaagtgataatttcttgggtagtttgcagttttaaaattatgttttaaaatggactatcatctttaccgtaactttaaagtatttcgatttcttgactttatatatcttgtggaaaggac

SEQ ID NO: 1742 - DNA, 239 bp, synthetic construct
  misc_feature 1..239: note = Promoter
  source 1..239: mol_type = other DNA
gagggcctatttcccatgattccttcatatttgcatataagatgcaaggctgttagagagataattagaactaatttgactgtaaacacaaatatattagtacaaaatatgtgacatagaaagtgataatttcttgggtagtttgcagttttaaaattatgttttaaaatggactatcatctgtaccgtaactttaaagtatttcgatttcttgactttatatatcttgtggaaaggac

SEQ ID NO: 1743 - DNA, 239 bp, synthetic construct
  misc_feature 1..239: note = Promoter
  source 1..239: mol_type = other DNA
gagggcctatttcccatgattccttcatatttgcatataagatgcaaggctgttagagagataattagaactaatttgactgtaaacacaaatatattagtacaaaatatgtgacatagaaagtgataatttcttgggtagtttgcagttttaaaattatgttttaaaatggactatcatctgcaccgtaactttaaagtatttcgatttcttgactttatatatcttgtggaaaggac

SEQ ID NO: 1744 - DNA, 239 bp, synthetic construct
  misc_feature 1..239: note = Promoter
  source 1..239: mol_type = other DNA
gagggcctatttcccatgattccttcatatttgcatataagatgcaaggctgttagagagataattagaactaatttgactgtaaacacaaatatattagtacaaaatatgtgacatagaaagtgataatttcttgggtagtttgcagttttaaaattatgttttaaaatggactatcatctgctccgtaactttaaagtatttcgatttcttgactttatatatcttgtggaaaggac

SEQ ID NO: 1745 - DNA, 239 bp, synthetic construct
  misc_feature 1..239: note = Promoter
  source 1..239: mol_type = other DNA
gagggcctatttcccatgattccttcatatttgcatataagatgcaaggctgttagagagataattagaactaatttgactgtaaacacaaatatattagtacaaaatatgtgacatagaaagtgataatttcttgggtagtttgcagttttaaaattatgttttaaaatggactatcatctgcttcgtaactttaaagtatttcgatttcttgactttatatatcttgtggaaaggac

SEQ ID NO: 1746 - DNA, 239 bp, synthetic construct
  misc_feature 1..239: note = Promoter
  source 1..239: mol_type = other DNA
gagggcctatttcccatgattccttcatatttgcatataagatgcaaggctgttagagagataattagaactaatttgactgtaaacacaaatatattagtacaaaatatgtgacatagaaagtgataatttcttgggtagtttgcagttttaaaattatgttttaaaatggactatcatctgcttagtaactttaaagtatttcgatttcttgactttatatatcttgtggaaaggac

SEQ ID NO: 1747 - DNA, 239 bp, synthetic construct
  misc_feature 1..239: note = Promoter
  source 1..239: mol_type = other DNA
gagggcctatttcccatgattccttcatatttgcatataagatgcaaggctgttagagagataattagaactaatttgactgtaaacacaaatatattagtacaaaatatgtgacatagaaagtgataatttcttgggtagtttgcagttttaaaattatgttttaaaatggactatcatctgcttactaactttaaagtatttcgatttcttgactttatatatcttgtggaaaggac

SEQ ID NO: 1748 - DNA, 239 bp, synthetic construct
  misc_feature 1..239: note = Promoter
  source 1..239: mol_type = other DNA
gagggcctatttcccatgattccttcatatttgcatataagatgcaaggctgttagagagataattagaactaatttgactgtaaacacaaatatattagtacaaaatatgtgacatagaaagtgataatttcttgggtagtttgcagttttaaaattatgttttaaaatggactatcatctgcttaccaactttaaagtatttcgatttcttgactttatatatcttgtggaaaggac

SEQ ID NO: 1749 - DNA, 239 bp, synthetic construct
  misc_feature 1..239: note = Promoter
  source 1..239: mol_type = other DNA
gagggcctatttcccatgattccttcatatttgcatataagatgcaaggctgttagagagataattagaactaatttgactgtaaacacaaatatattagtacaaaatatgtgacatagaaagtgataatttcttgggtagtttgcagttttaaaattatgttttaaaatggactatcatctgcttaccgactttaaagtatttcgatttcttgactttatatatcttgtggaaaggac

SEQ ID NO: 1750 - DNA, 239 bp, synthetic construct
  misc_feature 1..239: note = Promoter
  source 1..239: mol_type = other DNA
gagggcctatttcccatgattccttcatatttgcatataagatgcaaggctgttagagagataattagaactaatttgactgtaaacacaaatatattagtacaaaatatgtgacatagaaagtgataatttcttgggtagtttgcagttttaaaattatgttttaaaatggactatcatctgcttaccgtctttaaagtatttcgatttcttgactttatatatcttgtggaaaggac

SEQ ID NO: 1751 - DNA, 239 bp, synthetic construct
  misc_feature 1..239: note = Promoter
  source 1..239: mol_type = other DNA
gagggcctatttcccatgattccttcatatttgcatataagatgcaaggctgttagagagataattagaactaatttgactgtaaacacaaatatattagtacaaaatatgtgacatagaaagtgataatttcttgggtagtttgcagttttaaaattatgttttaaaatggactatcatctgcttaccgtatttaaagtatttcgatttcttgactttatatatcttgtggaaaggac

SEQ ID NO: 1752 - DNA, 239 bp, synthetic construct
  misc_feature 1..239: note = Promoter
  source 1..239: mol_type = other DNA
gagggcctatttcccatgattccttcatatttgcatataagatgcaaggctgttagagagataattagaactaatttgactgtaaacacaaatatattagtacaaaatatgtgacatagaaagtgataatttcttgggtagtttgcagttttaaaattatgttttaaaatggactatcatctgcttaccgtaattaaagtatttcgatttcttgactttatatatcttgtggaaaggac

SEQ ID NO: 1753 - DNA, 239 bp, synthetic construct
  misc_feature 1..239: note = Promoter
  source 1..239: mol_type = other DNA
gagggcctatttcccatgattccttcatatttgcatataagatgcaaggctgttagagagataattagaactaatttgactgtaaacacaaatatattagtacaaaatatgtgacatagaaagtgataatttcttgggtagtttgcagttttaaaattatgttttaaaatggactatcatctgcttaccgtaactaaagtatttcgatttcttgactttatatatcttgtggaaaggac

SEQ ID NO: 1754 - DNA, 239 bp, synthetic construct; identical to SEQ ID NO: 1753
  misc_feature 1..239: note = Promoter
  source 1..239: mol_type = other DNA

SEQ ID NO: 1755 - DNA, 239 bp, synthetic construct
  misc_feature 1..239: note = Promoter
  source 1..239: mol_type = other DNA
gagggcctatttcccatgattccttcatatttgcatataagatgcaaggctgttagagagataattagaactaatttgactgtaaacacaaatatattagtacaaaatatgtgacatagaaagtgataatttcttgggtagtttgcagttttaaaattatgttttaaaatggactatcatctgcttaccgtaacttaagtatttcgatttcttgactttatatatcttgtggaaaggac

SEQ ID NO: 1756 - DNA, 239 bp, synthetic construct
  misc_feature 1..239: note = Promoter
  source 1..239: mol_type = other DNA
gagggcctatttcccatgattccttcatatttgcatataagatgcaaggctgttagagagataattagaactaatttgactgtaaacacaaatatattagtacaaaatatgtgacatagaaagtgataatttcttgggtagtttgcagttttaaaattatgttttaaaatggactatcatctgcttaccgtaactttagtatttcgatttcttgactttatatatcttgtggaaaggac

SEQ ID NO: 1757 - DNA, 239 bp, synthetic construct; identical to SEQ ID NO: 1756
  misc_feature 1..239: note = Promoter
  source 1..239: mol_type = other DNA

SEQ ID NO: 1758 - DNA, 239 bp, synthetic construct
  misc_feature 1..239: note = Promoter
  source 1..239: mol_type = other DNA
gagggcctatttcccatgattccttcatatttgcatataagatgcaaggctgttagagagataattagaactaatttgactgtaaacacaaatatattagtacaaaatatgtgacatagaaagtgataatttcttgggtagtttgcagttttaaaattatgttttaaaatggactatcatctgcttaccgtaactttaatatttcgatttcttgactttatatatcttgtggaaaggac

SEQ ID NO: 1759 - DNA, 239 bp, synthetic construct
  misc_feature 1..239: note = Promoter
  source 1..239: mol_type = other DNA
gagggcctatttcccatgattccttcatatttgcatataagatgcaaggctgttagagagataattagaactaatttgactgtaaacacaaatatattagtacaaaatatgtgacatagaaagtgataatttcttgggtagtttgcagttttaaaattatgttttaaaatggactatcatctgcttaccgtaactttaaaatttcgatttcttgactttatatatcttgtggaaaggac

SEQ ID NO: 1760 - DNA, 239 bp, synthetic construct
  misc_feature 1..239: note = Promoter
  source 1..239: mol_type = other DNA
gagggcctatttcccatgattccttcatatttgcatataagatgcaaggctgttagagagataattagaactaatttgactgtaaacacaaatatattagtacaaaatatgtgacatagaaagtgataatttcttgggtagtttgcagttttaaaattatgttttaaaatggactatcatctgcttaccgtaactttaaagtttcgatttcttgactttatatatcttgtggaaaggac

SEQ ID NO: 1761 - DNA, 239 bp, synthetic construct; identical to SEQ ID NO: 1760
  misc_feature 1..239: note = Promoter
  source 1..239: mol_type = other DNA

SEQ ID NO: 1762 - DNA, 239 bp, synthetic construct
  misc_feature 1..239: note = Promoter
  source 1..239: mol_type = other DNA
gagggcctatttcccatgattccttcatatttgcatataagatgcaaggctgttagagagataattagaactaatttgactgtaaacacaaatatattagtacaaaatatgtgacatagaaagtgataatttcttgggtagtttgcagttttaaaattatgttttaaaatggactatcatctgcttaccgtaactttaaagtatcgatttcttgactttatatatcttgtggaaaggac

SEQ ID NO: 1763 - DNA, 239 bp, synthetic construct; identical to SEQ ID NO: 1762
  misc_feature 1..239: note = Promoter
  source 1..239: mol_type = other DNA

SEQ ID NO: 1764 - DNA, 239 bp, synthetic construct
  misc_feature 1..239: note = Promoter
  source 1..239: mol_type = other DNA
gagggcctatttcccatgattccttcatatttgcatataagatgcaaggctgttagagagataattagaactaatttgactgtaaacacaaatatattagtacaaaatatgtgacatagaaagtgataatttcttgggtagtttgcagttttaaaattatgttttaaaatggactatcatctgcttaccgtaactttaaagtattgatttcttgactttatatatcttgtggaaaggac

SEQ ID NO: 1765 - DNA, 239 bp, synthetic construct
  misc_feature 1..239: note = Promoter
  source 1..239: mol_type = other DNA
gagggcctatttcccatgattccttcatatttgcatataagatgcaaggctgttagagagataattagaactaatttgactgtaaacacaaatatattagtacaaaatatgtgacatagaaagtgataatttcttgggtagtttgcagttttaaaattatgttttaaaatggactatcatctgcttaccgtaactttaaagtatttatttcttgactttatatatcttgtggaaaggac

SEQ ID NO: 1766 - DNA, 239 bp, synthetic construct
  misc_feature 1..239: note = Promoter
  source 1..239: mol_type = other DNA
gagggcctatttcccatgattccttcatatttgcatataagatgcaaggctgttagagagataattagaactaatttgactgtaaacacaaatatattagtacaaaatatgtgacatagaaagtgataatttcttgggtagtttgcagttttaaaattatgttttaaaatggactatcatctgcttaccgtaactttaaagtatttctttcttgactttatatatcttgtggaaaggac

SEQ ID NO: 1767 - DNA, 239 bp, synthetic construct
  misc_feature 1..239: note = Promoter
  source 1..239: mol_type = other DNA
gagggcctatttcccatgattccttcatatttgcatataagatgcaaggctgttagagagataattagaactaatttgactgtaaacacaaatatattagtacaaaatatgtgacatagaaagtgataatttcttgggtagtttgcagttttaaaattatgttttaaaatggactatcatctgcttaccgtaactttaaagtatttcgttcttgactttatatatcttgtggaaaggac

SEQ ID NO: 1768 - DNA, 239 bp, synthetic construct
  misc_feature 1..239: note = Promoter
  source 1..239: mol_type = other DNA
gagggcctatttcccatgattccttcatatttgcatataagatgcaaggctgttagagagataattagaactaatttgactgtaaacacaaatatattagtacaaaatatgtgacatagaaagtgataatttcttgggtagtttgcagttttaaaattatgttttaaaatggactatcatctgcttaccgtaactttaaagtatttcgatcttgactttatatatcttgtggaaaggac

SEQ ID NO: 1769 - DNA, 239 bp, synthetic construct; identical to SEQ ID NO: 1768
  misc_feature 1..239: note = Promoter
  source 1..239: mol_type = other DNA

SEQ ID NO: 1770 - DNA, 239 bp, synthetic construct
  misc_feature 1..239: note = Promoter
  source 1..239: mol_type = other DNA
gagggcctatttcccatgattccttcatatttgcatataagatgcaaggctgttagagagataattagaactaatttgactgtaaacacaaatatattagtacaaaatatgtgacatagaaagtgataatttcttgggtagtttgcagttttaaaattatgttttaaaatggactatcatctgcttaccgtaactttaaagtatttcgattttgactttatatatcttgtggaaaggac

SEQ ID NO: 1771 - DNA, 239 bp, synthetic construct; identical to SEQ ID NO: 1770
  misc_feature 1..239: note = Promoter
  source 1..239: mol_type = other DNA

SEQ ID NO: 1772 - DNA, 239 bp, synthetic construct
  misc_feature 1..239: note = Promoter
  source 1..239: mol_type = other DNA
gagggcctatttcccatgattccttcatatttgcatataagatgcaaggctgttagagagataattagaactaatttgactgtaaacacaaatatattagtacaaaatatgtgacatagaaagtgataatttcttgggtagtttgcagttttaaaattatgttttaaaatggactatcatctgcttaccgtaactttaaagtatttcgatttcgactttatatatcttgtggaaaggac

SEQ ID NO: 1773 - DNA, 239 bp, synthetic construct
  misc_feature 1..239: note = Promoter
  source 1..239: mol_type = other DNA
gagggcctatttcccatgattccttcatatttgcatataagatgcaaggctgttagagagataattagaactaatttgactgtaaacacaaatatattagtacaaaatatgtgacatagaaagtgataatttcttgggtagtttgcagttttaaaattatgttttaaaatggactatcatctgcttaccgtaactttaaagtatttcgatttctactttatatatcttgtggaaaggac

SEQ ID NO: 1774 - DNA, 239 bp, synthetic construct
  misc_feature 1..239: note = Promoter
  source 1..239: mol_type = other DNA
gagggcctatttcccatgattccttcatatttgcatataagatgcaaggctgttagagagataattagaactaatttgactgtaaacacaaatatattagtacaaaatatgtgacatagaaagtgataatttcttgggtagtttgcagttttaaaattatgttttaaaatggactatcatctgcttaccgtaactttaaagtatttcgatttcttctttatatatcttgtggaaaggac

SEQ ID NO: 1775 - DNA, 239 bp, synthetic construct
  misc_feature 1..239: note = Promoter
  source 1..239: mol_type = other DNA
gagggcctatttcccatgattccttcatatttgcatataagatgcaaggctgttagagagataattagaactaatttgactgtaaacacaaatatattagtacaaaatatgtgacatagaaagtgataatttcttgggtagtttgcagttttaaaattatgttttaaaatggactatcatctgcttaccgtaactttaaagtatttcgatttcttgtttatatatcttgtggaaaggac

SEQ ID NO: 1776 - DNA, 239 bp, synthetic construct
  misc_feature 1..239: note = Promoter
  source 1..239: mol_type = other DNA
gagggcctatttcccatgattccttcatatttgcatataagatgcaaggctgttagagagataattagaactaatttgactgtaaacacaaatatattagtacaaaatatgtgacatagaaagtgataatttcttgggtagtttgcagttttaaaattatgttttaaaatggactatcatctgcttaccgtaactttaaagtatttcgatttcttgattatatatcttgtggaaaggac

SEQ ID NO: 1777 - DNA, 239 bp, synthetic construct
  misc_feature 1..239: note = Promoter
  source 1..239: mol_type = other DNA
gagggcctatttcccatgattccttcatatttgcatataagatgcaaggctgttagagagataattagaactaatttgactgtaaacacaaatatattagtacaaaatatgtgacatagaaagtgataatttcttgggtagtttgcagttttaaaattatgttttaaaatggactatcatctgcttaccgtaactttaaagtatttcgatttcttgactatatatcttgtggaaaggac

SEQ ID NO: 1778 - DNA, 239 bp, synthetic construct; identical to SEQ ID NO: 1777
  misc_feature 1..239: note = Promoter
  source 1..239: mol_type = other DNA

SEQ ID NO: 1779 - DNA, 239 bp, synthetic construct
  misc_feature 1..239: note = Promoter
  source 1..239: mol_type = other DNA
gagggcctatttcccatgattccttcatatttgcatataagatgcaaggctgttagagagataattagaactaatttgactgtaaacacaaatatattagtacaaaatatgtgacatagaaagtgataatttcttgggtagtttgcagttttaaaattatgttttaaaatggactatcatctgcttaccgtaactttaaagtatttcgatttcttgactttatatcttgtggaaaggac

SEQ ID NO: 1780 - DNA, 239 bp, synthetic construct; identical to SEQ ID NO: 1779
  misc_feature 1..239: note = Promoter
  source 1..239: mol_type = other DNA

SEQ ID NO: 1781 - DNA, 239 bp, synthetic construct; identical to SEQ ID NO: 1779
  misc_feature 1..239: note = Promoter
  source 1..239: mol_type = other DNA

SEQ ID NO: 1782 - DNA, 239 bp, synthetic construct; identical to SEQ ID NO: 1779
  misc_feature 1..239: note = Promoter
  source 1..239: mol_type = other DNA

SEQ ID NO: 1783 - DNA, 239 bp, synthetic construct; identical to SEQ ID NO: 1779
  misc_feature 1..239: note = Promoter
  source 1..239: mol_type = other DNA

SEQ ID NO: 1784 - DNA, 239 bp, synthetic construct; identical to SEQ ID NO: 1779
  misc_feature 1..239: note = Promoter
  source 1..239: mol_type = other DNA

SEQ ID NO: 1785 - DNA, 239 bp, synthetic construct
  misc_feature 1..239: note = Promoter
  source 1..239: mol_type = other DNA
gagggcctatttcccatgattccttcatatttgcatataagatgcaaggctgttagagagataattagaactaatttgactgtaaacacaaatatattagtacaaaatatgtgacatagaaagtgataatttcttgggtagtttgcagttttaaaattatgttttaaaatggactatcatctgcttaccgtaactttaaagtatttcgatttcttgactttatatattgtggaaaggac

SEQ ID NO: 1786 - DNA, 239 bp, synthetic construct; identical to SEQ ID NO: 1785
  misc_feature 1..239: note = Promoter
  source 1..239: mol_type = other DNA

SEQ ID NO: 1787 - DNA, 239 bp, synthetic construct
  misc_feature 1..239: note = Promoter
  source 1..239: mol_type = other DNA
gagggcctatttcccatgattccttcatatttgcatataagatgcaaggctgttagagagataattagaactaatttgactgtaaacacaaatatattagtacaaaatatgtgacatagaaagtgataatttcttgggtagtttgcagttttaaaattatgttttaaaatggactatcatctgcttaccgtaactttaaagtatttcgatttcttgactttatatatcgtggaaaggac

SEQ ID NO: 1788 - DNA, 239 bp, synthetic construct
  misc_feature 1..239: note = Promoter
  source 1..239: mol_type = other DNA
gagggcctatttcccatgattccttcatatttgcatataagatgcaaggctgttagagagataattagaactaatttgactgtaaacacaaatatattagtacaaaatatgtgacatagaaagtgataatttcttgggtagtttgcagttttaaaattatgttttaaaatggactatcatctgcttaccgtaactttaaagtatttcgatttcttgactttatatatcttggaaaggac

SEQ ID NO: 1789 - DNA, 239 bp, synthetic construct; identical to SEQ ID NO: 1788
  misc_feature 1..239: note = Promoter
  source 1..239: mol_type = other DNA

SEQ ID NO: 1790 - DNA, 239 bp, synthetic construct; identical to SEQ ID NO: 1788
  misc_feature 1..239: note = Promoter
  source 1..239: mol_type = other DNA

SEQ ID NO: 1791 - DNA, 239 bp, synthetic construct
  misc_feature 1..239: note = Promoter
  source 1..239: mol_type = other DNA
gagggcctatttcccatgattccttcatatttgcatataagatgcaaggctgttagagagataattagaactaatttgactgtaaacacaaatatattagtacaaaatatgtgacatagaaagtgataatttcttgggtagtttgcagttttaaaattatgttttaaaatggactatcatctgcttaccgtaactttaaagtatttcgatttcttgactttatatatcttgtaaaggac

SEQ ID NO: 1792 - DNA, 239 bp, synthetic construct
  misc_feature 1..239: note = Promoter
  source 1..239: mol_type = other DNA
gagggcctatttcccatgattccttcatatttgcatataagatgcaaggctgttagagagataattagaactaatttgactgtaaacacaaatatattagtacaaaatatgtgacatagaaagtgataatttcttgggtagtttgcagttttaaaattatgttttaaaatggactatcatctgcttaccgtaactttaaagtatttcgatttcttgactttatatatcttgtgaaggac

SEQ ID NO: 1793 - DNA, 239 bp, synthetic construct
  misc_feature 1..239: note = Promoter
  source 1..239: mol_type = other DNA
gagggcctatttcccatgattccttcatatttgcatataagatgcaaggctgttagagagataattagaactaatttgactgtaaacacaaatatattagtacaaaatatgtgacatagaaagtgataatttcttgggtagtttgcagttttaaaattatgttttaaaatggactatcatctgcttaccgtaactttaaagtatttcgatttcttgactttatatatcttgtggaggac

SEQ ID NO: 1794 - DNA, 239 bp, synthetic construct; identical to SEQ ID NO: 1793
  misc_feature 1..239: note = Promoter
  source 1..239: mol_type = other DNA

SEQ ID NO: 1795 - DNA, 239 bp, synthetic construct
  misc_feature 1..239: note = Promoter
  source 1..239: mol_type = other DNA
gagggcctatttcccatgattccttcatatttgcatataagatgcaaggctgttagagagataattagaactaatttgactgtaaacacaaatatattagtacaaaatatgtgacatagaaagtgataatttcttgggtagtttgcagttttaaaattatgttttaaaatggactatcatctgcttaccgtaactttaaagtatttcgatttcttgactttatatatcttgtggaagac

SEQ ID NO: 1796 - DNA, 239 bp, synthetic construct
  misc_feature 1..239: note = Promoter
  source 1..239: mol_type = other DNA
gagggcctatttcccatgattccttcatatttgcatataagatgcaaggctgttagagagataattagaactaatttgactgtaaacacaaatatattagtacaaaatatgtgacatagaaagtgataatttcttgggtagtttgcagttttaaaattatgttttaaaatggactatcatctgcttaccgtaactttaaagtatttcgatttcttgactttatatatcttgtggaaaac

SEQ ID NO: 1797 - DNA, 239 bp, synthetic construct
  misc_feature 1..239: note = Promoter
  source 1..239: mol_type = other DNA
gagggcctatttcccatgattccttcatatttgcatataagatgcaaggctgttagagagataattagaactaatttgactgtaaacacaaatatattagtacaaaatatgtgacatagaaagtgataatttcttgggtagtttgcagttttaaaattatgttttaaaatggactatcatctgcttaccgtaactttaaagtatttcgatttcttgactttatatatcttgtggaaagc

SEQ ID NO: 1798 - DNA, 239 bp, synthetic construct
  misc_feature 1..239: note = Promoter
  source 1..239: mol_type = other DNA
gagggcctatttcccatgattccttcatatttgcatataagatgcaaggctgttagagagataattagaactaatttgactgtaaacacaaatatattagtacaaaatatgtgacatagaaagtgataatttcttgggtagtttgcagttttaaaattatgttttaaaatggactatcatctgcttaccgtaactttaaagtatttcgatttcttgactttatatatcttgtggaaagg

SEQ ID NO: 1799 - DNA, 240 bp, synthetic construct; identical to SEQ ID NO: 1558
  misc_feature 1..240: note = Promoter
  source 1..240: mol_type = other DNA

SEQ ID NO: 1800 - DNA, 236 bp, synthetic construct
  misc_feature 1..236: note = Promoter
  source 1..236: mol_type = other DNA
cctatttcccatgattccttcatatttgcatataagatgcaaggctgttagagagataattagaactaatttgactgtaaacacaaatatattagtacaaaatatgtgacatagaaagtgataatttcttgggtagtttgcagttttaaaattatgttttaaaatggactatcatctgcttaccgtaactttaaagtatttcgatttcttgactttatatatcttgtggaaaggac

SEQ ID NO: 1801 - DNA, 236 bp, synthetic construct
  misc_feature 1..236: note = Promoter
  source 1..236: mol_type = other DNA
gctatttcccatgattccttcatatttgcatataagatgcaaggctgttagagagataattagaactaatttgactgtaaacacaaatatattagtacaaaatatgtgacatagaaagtgataatttcttgggtagtttgcagttttaaaattatgttttaaaatggactatcatctgcttaccgtaactttaaagtatttcgatttcttgactttatatatcttgtggaaaggac

SEQ ID NO: 1802 - DNA, 236 bp, synthetic construct
  misc_feature 1..236: note = Promoter
  source 1..236: mol_type = other DNA
gatatttcccatgattccttcatatttgcatataagatgcaaggctgttagagagataattagaactaatttgactgtaaacacaaatatattagtacaaaatatgtgacatagaaagtgataatttcttgggtagtttgcagttttaaaattatgttttaaaatggactatcatctgcttaccgtaactttaaagtatttcgatttcttgactttatatatcttgtggaaaggac

SEQ ID NO: 1803 - DNA, 236 bp, synthetic construct
  misc_feature 1..236: note = Promoter
  source 1..236: mol_type = other DNA
gagatttcccatgattccttcatatttgcatataagatgcaaggctgttagagagataattagaactaatttgactgtaaacacaaatatattagtacaaaatatgtgacatagaaagtgataatttcttgggtagtttgcagttttaaaattatgttttaaaatggactatcatctgcttaccgtaactttaaagtatttcgatttcttgactttatatatcttgtggaaaggac

SEQ ID NO: 1804 - DNA, 236 bp, synthetic construct
  misc_feature 1..236: note = Promoter
  source 1..236: mol_type = other DNA
gaggtttcccatgattccttcatatttgcatataagatgcaaggctgttagagagataattagaactaatttgactgtaaacacaaatatattagtacaaaatatgtgacatagaaagtgataatttcttgggtagtttgcagttttaaaattatgttttaaaatggactatcatctgcttaccgtaactttaaagtatttcgatttcttgactttatatatcttgtggaaaggac

SEQ ID NO: 1805 - DNA, 236 bp, synthetic construct
  misc_feature 1..236: note = Promoter
  source 1..236: mol_type = other DNA
gagggttcccatgattccttcatatttgcatataagatgcaaggctgttagagagataattagaactaatttgactgtaaacacaaatatattagtacaaaatatgtgacatagaaagtgataatttcttgggtagtttgcagttttaaaattatgttttaaaatggactatcatctgcttaccgtaactttaaagtatttcgatttcttgactttatatatcttgtggaaaggac

SEQ ID NO: 1806 - DNA, 236 bp, synthetic construct
  misc_feature 1..236: note = Promoter
  source 1..236: mol_type = other DNA
gagggctcccatgattccttcatatttgcatataagatgcaaggctgttagagagataattagaactaatttgactgtaaacacaaatatattagtacaaaatatgtgacatagaaagtgataatttcttgggtagtttgcagttttaaaattatgttttaaaatggactatcatctgcttaccgtaactttaaagtatttcgatttcttgactttatatatcttgtggaaaggac

SEQ ID NO: 1807 - DNA, 236 bp, synthetic construct
  misc_feature 1..236: note = Promoter
  source 1..236: mol_type = other DNA
gagggcccccatgattccttcatatttgcatataagatgcaaggctgttagagagataattagaactaatttgactgtaaacacaaatatattagtacaaaatatgtgacatagaaagtgataatttcttgggtagtttgcagttttaaaattatgttttaaaatggactatcatctgcttaccgtaactttaaagtatttcgatttcttgactttatatatcttgtggaaaggac

SEQ ID NO: 1808 - DNA, 236 bp, synthetic construct
  misc_feature 1..236: note = Promoter
  source 1..236: mol_type = other DNA
gagggcctccatgattccttcatatttgcatataagatgcaaggctgttagagagataattagaactaatttgactgtaaacacaaatatattagtacaaaatatgtgacatagaaagtgataatttcttgggtagtttgcagttttaaaattatgttttaaaatggactatcatctgcttaccgtaactttaaagtatttcgatttcttgactttatatatcttgtggaaaggac

SEQ ID NO: 1809 - DNA, 236 bp, synthetic construct
  misc_feature 1..236: note = Promoter
  source 1..236: mol_type = other DNA
gagggcctacatgattccttcatatttgcatataagatgcaaggctgttagagagataattagaactaatttgactgtaaacacaaatatattagtacaaaatatgtgacatagaaagtgataatttcttgggtagtttgcagttttaaaattatgttttaaaatggactatcatctgcttaccgtaactttaaagtatttcgatttcttgactttatatatcttgtggaaaggac

SEQ ID NO: 1810 - DNA, 236 bp, synthetic construct
  misc_feature 1..236: note = Promoter
  source 1..236: mol_type = other DNA
gagggcctatatgattccttcatatttgcatataagatgcaaggctgttagagagataattagaactaatttgactgtaaacacaaatatattagtacaaaatatgtgacatagaaagtgataatttcttgggtagtttgcagttttaaaattatgttttaaaatggactatcatctgcttaccgtaactttaaagtatttcgatttcttgactttatatatcttgtggaaaggac

SEQ ID NO: 1811 - DNA, 236 bp, synthetic construct
  misc_feature 1..236: note = Promoter
  source 1..236: mol_type = other DNA
gagggcctatttgattccttcatatttgcatataagatgcaaggctgttagagagataattagaactaatttgactgtaaacacaaatatattagtacaaaatatgtgacatagaaagtgataatttcttgggtagtttgcagttttaaaattatgttttaaaatggactatcatctgcttaccgtaactttaaagtatttcgatttcttgactttatatatcttgtggaaaggac

SEQ ID NO: 1812 - DNA, 236 bp, synthetic construct; identical to SEQ ID NO: 1811
  misc_feature 1..236: note = Promoter
  source 1..236: mol_type = other DNA

SEQ ID NO: 1813 - DNA, 236 bp, synthetic construct
  misc_feature 1..236: note = Promoter
  source 1..236: mol_type = other DNA
gagggcctatttcattccttcatatttgcatataagatgcaaggctgttagagagataattagaactaatttgactgtaaacacaaatatattagtacaaaatatgtgacatagaaagtgataatttcttgggtagtttgcagttttaaaattatgttttaaaatggactatcatctgcttaccgtaactttaaagtatttcgatttcttgactttatatatcttgtggaaaggac

SEQ ID NO: 1814 - DNA, 236 bp, synthetic construct
  misc_feature 1..236: note = Promoter
  source 1..236: mol_type = other DNA
gagggcctatttccttccttcatatttgcatataagatgcaaggctgttagagagataattagaactaatttgactgtaaacacaaatatattagtacaaaatatgtgacatagaaagtgataatttcttgggtagtttgcagttttaaaattatgttttaaaatggactatcatctgcttaccgtaactttaaagtatttcgatttcttgactttatatatcttgtggaaaggac

SEQ ID NO: 1815 - DNA, 236 bp, synthetic construct
  misc_feature 1..236: note = Promoter
  source 1..236: mol_type = other DNA
gagggcctatttccctccttcatatttgcatataagatgcaaggctgttagagagataattagaactaatttgactgtaaacacaaatatattagtacaaaatatgtgacatagaaagtgataatttcttgggtagtttgcagttttaaaattatgttttaaaatggactatcatctgcttaccgtaactttaaagtatttcgatttcttgactttatatatcttgtggaaaggac

SEQ ID NO: 1816 - DNA, 236 bp, synthetic construct
  misc_feature 1..236: note = Promoter
  source 1..236: mol_type = other DNA
gagggcctatttcccaccttcatatttgcatataagatgcaaggctgttagagagataattagaactaatttgactgtaaacacaaatatattagtacaaaatatgtgacatagaaagtgataatttcttgggtagtttgcagttttaaaattatgttttaaaatggactatcatctgcttaccgtaactttaaagtatttcgatttcttgactttatatatcttgtggaaaggac

SEQ ID NO: 1817 - DNA, 236 bp, synthetic construct
  misc_feature 1..236: note = Promoter
  source 1..236: mol_type = other DNA
gagggcctatttcccatcttcatatttgcatataagatgcaaggctgttagagagataattagaactaatttgactgtaaacacaaatatattagtacaaaatatgtgacatagaaagtgataatttcttgggtagtttgcagttttaaaattatgttttaaaatggactatcatctgcttaccgtaactttaaagtatttcgatttcttgactttatatatcttgtggaaaggac

SEQ ID NO: 1818 - DNA, 236 bp, synthetic construct
  misc_feature 1..236: note = Promoter
  source 1..236: mol_type = other DNA
gagggcctatttcccatgttcatatttgcatataagatgcaaggctgttagagagataattagaactaatttgactgtaaacacaaatatattagtacaaaatatgtgacatagaaagtgataatttcttgggtagtttgcagttttaaaattatgttttaaaatggactatcatctgcttaccgtaactttaaagtatttcgatttcttgactttatatatcttgtggaaaggac

SEQ ID NO: 1819 - DNA, 236 bp, synthetic construct
  misc_feature 1..236: note = Promoter
  source 1..236: mol_type = other DNA
gagggcctatttcccatgatcatatttgcatataagatgcaaggctgttagagagataattagaactaatttgactgtaaacacaaatatattagtacaaaatatgtgacatagaaagtgataatttcttgggtagtttgcagttttaaaattatgttttaaaatggactatcatctgcttaccgtaactttaaagtatttcgatttcttgactttatatatcttgtggaaaggac

SEQ ID NO: 1820 - DNA, 236 bp, synthetic construct; identical to SEQ ID NO: 1819
  misc_feature 1..236: note = Promoter
  source 1..236: mol_type = other DNA

SEQ ID NO: 1821 - DNA, 236 bp, synthetic construct
  misc_feature 1..236: note = Promoter
  source 1..236: mol_type = other DNA
gagggcctatttcccatgattatatttgcatataagatgcaaggctgttagagagataattagaactaatttgactgtaaacacaaatatattagtacaaaatatgtgacatagaaagtgataatttcttgggtagtttgcagttttaaaattatgttttaaaatggactatcatctgcttaccgtaactttaaagtatttcgatttcttgactttatatatcttgtggaaaggac

SEQ ID NO: 1822 - DNA, 236 bp, synthetic construct
  misc_feature 1..236: note = Promoter
  source 1..236: mol_type = other DNA
gagggcctatttcccatgattctatttgcatataagatgcaaggctgttagagagataattagaactaatttgactgtaaacacaaatatattagtacaaaatatgtgacatagaaagtgataatttcttgggtagtttgcagttttaaaattatgttttaaaatggactatcatctgcttaccgtaactttaaagtatttcgatttcttgactttatatatcttgtggaaaggac

SEQ ID NO: 1823 - DNA, 236 bp, synthetic construct
  misc_feature 1..236: note = Promoter
  source 1..236: mol_type = other DNA
gagggcctatttcccatgattccatttgcatataagatgcaaggctgttagagagataattagaactaatttgactgtaaacacaaatatattagtacaaaatatgtgacatagaaagtgataatttcttgggtagtttgcagttttaaaattatgttttaaaatggactatcatctgcttaccgtaactttaaagtatttcgatttcttgactttatatatcttgtggaaaggac

SEQ ID NO: 1824 - DNA, 236 bp, synthetic construct
  misc_feature 1..236: note = Promoter
  source 1..236: mol_type = other DNA
gagggcctatttcccatgattccttttgcatataagatgcaaggctgttagagagataattagaactaatttgactgtaaacacaaatatattagtacaaaatatgtgacatagaaagtgataatttcttgggtagtttgcagttttaaaattatgttttaaaatggactatcatctgcttaccgtaactttaaagtatttcgatttcttgactttatatatcttgtggaaaggac

SEQ ID NO: 1825 - DNA, 236 bp, synthetic construct; identical to SEQ ID NO: 1824
  misc_feature 1..236: note = Promoter
  source 1..236: mol_type = other DNA

SEQ ID NO: 1826 - DNA, 236 bp, synthetic construct
  misc_feature 1..236: note = Promoter
  source 1..236: mol_type = other DNA
gagggcctatttcccatgattccttctgcatataagatgcaaggctgttagagagataattagaactaatttgactgtaaacacaaatatattagtacaaaatatgtgacatagaaagtgataatttcttgggtagtttgcagttttaaaattatgttttaaaatggactatcatctgcttaccgtaactttaaagtatttcgatttcttgactttatatatcttgtggaaaggac

SEQ ID NO: 1827 - DNA, 236 bp, synthetic construct
  misc_feature 1..236: note = Promoter
  source 1..236: mol_type = other DNA
gagggcctatttcccatgattccttcagcatataagatgcaaggctgttagagagataattagaactaatttgactgtaaacacaaatatattagtacaaaatatgtgacatagaaagtgataatttcttgggtagtttgcagttttaaaattatgttttaaaatggactatcatctgcttaccgtaactttaaagtatttcgatttcttgactttatatatcttgtggaaaggac

SEQ ID NO: 1828 - DNA, 236 bp, synthetic construct
  misc_feature 1..236: note = Promoter
  source 1..236: mol_type = other DNA
gagggcctatttcccatgattccttcatcatataagatgcaaggctgttagagagataattagaactaatttgactgtaaacacaaatatattagtacaaaatatgtgacatagaaagtgataatttcttgggtagtttgcagttttaaaattatgttttaaaatggactatcatctgcttaccgtaactttaaagtatttcgatttcttgactttatatatcttgtggaaaggac

SEQ ID NO: 1829 - DNA, 236 bp, synthetic construct
  misc_feature 1..236: note = Promoter
  source 1..236: mol_type = other DNA
gagggcctatttcccatgattccttcataatataagatgcaaggctgttagagagataattagaactaatttgactgtaaacacaaatatattagtacaaaatatgtgacatagaaagtgataatttcttgggtagtttgcagttttaaaattatgttttaaaatggactatcatctgcttaccgtaactttaaagtatttcgatttcttgactttatatatcttgtggaaaggac

SEQ ID NO: 1830 - DNA, 236 bp, synthetic construct
  misc_feature 1..236: note = Promoter
  source 1..236: mol_type = other DNA
gagggcctatttcccatgattccttcatattataagatgcaaggctgttagagagataattagaactaatttgactgtaaacacaaatatattagtacaaaatatgtgacatagaaagtgataatttcttgggtagtttgcagttttaaaattatgttttaaaatggactatcatctgcttaccgtaactttaaagtatttcgatttcttgactttatatatcttgtggaaaggac

SEQ ID NO: 1831 - DNA, 236 bp, synthetic construct; identical to SEQ ID NO: 1830
  misc_feature 1..236: note = Promoter
  source 1..236: mol_type = other DNA

SEQ ID NO: 1832 - DNA, 236 bp, synthetic construct
  misc_feature 1..236: note = Promoter
  source 1..236: mol_type = other DNA
gagggcctatttcccatgattccttcatattttaagatgcaaggctgttagagagataattagaactaatttgactgtaaacacaaatatattagtacaaaatatgtgacatagaaagtgataatttcttgggtagtttgcagttttaaaattatgttttaaaatggactatcatctgcttaccgtaactttaaagtatttcgatttcttgactttatatatcttgtggaaaggac

SEQ ID NO: 1833 - DNA, 236 bp, synthetic construct
  misc_feature 1..236: note = Promoter
  source 1..236: mol_type = other DNA
gagggcctatttcccatgattccttcatatttgaagatgcaaggctgttagagagataattagaactaatttgactgtaaacacaaatatattagtacaaaatatgtgacatagaaagtgataatttcttgggtagtttgcagttttaaaattatgttttaaaatggactatcatctgcttaccgtaactttaaagtatttcgatttcttgactttatatatcttgtggaaaggac

SEQ ID NO: 1834 - DNA, 236 bp, synthetic construct
  misc_feature 1..236: note = Promoter
  source 1..236: mol_type = other DNA
gagggcctatttcccatgattccttcatatttgcagatgcaaggctgttagagagataattagaactaatttgactgtaaacacaaatatattagtacaaaatatgtgacatagaaagtgataatttcttgggtagtttgcagttttaaaattatgttttaaaatggactatcatctgcttaccgtaactttaaagtatttcgatttcttgactttatatatcttgtggaaaggac

SEQ ID NO: 1835 - DNA, 236 bp, synthetic construct; identical to SEQ ID NO: 1834
  misc_feature 1..236: note = Promoter
  source 1..236: mol_type = other DNA

SEQ ID NO: 1836 - DNA, 236 bp, synthetic construct
  misc_feature 1..236: note = Promoter
  source 1..236: mol_type = other DNA
gagggcctatttcccatgattccttcatatttgcatatgcaaggctgttagagagataattagaactaatttgactgtaaacacaaatatattagtacaaaatatgtgacatagaaagtgataatttcttgggtagtttgcagttttaaaattatgttttaaaatggactatcatctgcttaccgtaactttaaagtatttcgatttcttgactttatatatcttgtggaaaggac

SEQ ID NO: 1837 - DNA, 236 bp, synthetic construct; identical to SEQ ID NO: 1836
  misc_feature 1..236: note = Promoter
  source 1..236: mol_type = other DNA

SEQ ID NO: 1838 - DNA, 236 bp, synthetic construct; identical to SEQ ID NO: 1836
  misc_feature 1..236: note = Promoter
  source 1..236: mol_type = other DNA

SEQ ID NO: 1839 - DNA, 236 bp, synthetic construct
  misc_feature 1..236: note = Promoter
  source 1..236: mol_type = other DNA
gagggcctatttcccatgattccttcatatttgcatatacaaggctgttagagagataattagaactaatttgactgtaaacacaaatatattagtacaaaatatgtgacatagaaagtgataatttcttgggtagtttgcagttttaaaattatgttttaaaatggactatcatctgcttaccgtaactttaaagtatttcgatttcttgactttatatatcttgtggaaaggac

SEQ ID NO: 1840 - DNA, 236 bp, synthetic construct
  misc_feature 1..236: note = Promoter
  source 1..236: mol_type = other DNA
gagggcctatttcccatgattccttcatatttgcatataaaaggctgttagagagataattagaactaatttgactgtaaacacaaatatattagtacaaaatatgtgacatagaaagtgataatttcttgggtagtttgcagttttaaaattatgttttaaaatggactatcatctgcttaccgtaactttaaagtatttcgatttcttgactttatatatcttgtggaaaggac

SEQ ID NO: 1841 - DNA, 236 bp, synthetic construct
  misc_feature 1..236: note = Promoter
  source 1..236: mol_type = other DNA
gagggcctatttcccatgattccttcatatttgcatataagaggctgttagagagataattagaactaatttgactgtaaacacaaatatattagtacaaaatatgtgacatagaaagtgataatttcttgggtagtttgcagttttaaaattatgttttaaaatggactatcatctgcttaccgtaactttaaagtatttcgatttcttgactttatatatcttgtggaaaggac

SEQ ID NO: 1842 - DNA, 236 bp, synthetic construct; identical to SEQ ID NO: 1841
  misc_feature 1..236: note = Promoter
  source 1..236: mol_type = other DNA

SEQ ID NO: 1843 - DNA, 236 bp, synthetic construct
  misc_feature 1..236: note = Promoter
  source 1..236: mol_type = other DNA
gagggcctatttcccatgattccttcatatttgcatataagatgctgttagagagataattagaactaatttgactgtaaacacaaatatattagtacaaaatatgtgacatagaaagtgataatttcttgggtagtttgcagttttaaaattatgttttaaaatggactatcatctgcttaccgtaactttaaagtatttcgatttcttgactttatatatcttgtggaaaggac

SEQ ID NO: 1844 - DNA, 236 bp, synthetic construct; identical to SEQ ID NO: 1843
  misc_feature 1..236: note = Promoter
  source 1..236: mol_type = other DNA

SEQ ID NO: 1845 - DNA, 236 bp, synthetic construct; identical to SEQ ID NO: 1843
  misc_feature 1..236: note = Promoter
  source 1..236: mol_type = other DNA

SEQ ID NO: 1846 - DNA, 236 bp, synthetic construct
  misc_feature 1..236: note = Promoter
  source 1..236: mol_type = other DNA
gagggcctatttcccatgattccttcatatttgcatataagatgcagttagagagataattagaactaatttgactgtaaacacaaatatattagtacaaaatatgtgacatagaaagtgataatttcttgggtagtttgcagttttaaaattatgttttaaaatggactatcatctgcttaccgtaactttaaagtatttcgatttcttgactttatatatcttgtggaaaggac

SEQ ID NO: 1847 - DNA, 236 bp, synthetic construct
  misc_feature 1..236: note = Promoter
  source 1..236: mol_type = other DNA
gagggcctatttcccatgattccttcatatttgcatataagatgcaattagagagataattagaactaatttgactgtaaacacaaatatattagtacaaaatatgtgacatagaaagtgataatttcttgggtagtttgcagttttaaaattatgttttaaaatggactatcatctgcttaccgtaactttaaagtatttcgatttcttgactttatatatcttgtggaaaggac

SEQ ID NO: 1848 - DNA, 236 bp, synthetic construct
  misc_feature 1..236: note = Promoter
  source 1..236: mol_type = other DNA
gagggcctatttcccatgattccttcatatttgcatataagatgcaagtagagagataattagaactaatttgactgtaaacacaaatatattagtacaaaatatgtgacatagaaagtgataatttcttgggtagtttgcagttttaaaattatgttttaaaatggactatcatctgcttaccgtaactttaaagtatttcgatttcttgactttatatatcttgtggaaaggac

SEQ ID NO: 1849 - DNA, 236 bp, synthetic construct
  misc_feature 1..236: note = Promoter
  source 1..236: mol_type = other DNA
gagggcctatttcccatgattccttcatatttgcatataagatgcaaggagagagataattagaactaatttgactgtaaacacaaatatattagtacaaaatatgtgacatagaaagtgataatttcttgggtagtttgcagttttaaaattatgttttaaaatggactatcatctgcttaccgtaactttaaagtatttcgatttcttgactttatatatcttgtggaaaggac

SEQ ID NO: 1850 - DNA, 236 bp, synthetic construct
  misc_feature 1..236: note = Promoter
  source 1..236: mol_type = other DNA
gagggcctatttcccatgattccttcatatttgcatataagatgcaaggcgagagataattagaactaatttgactgtaaacacaaatatattagtacaaaatatgtgacatagaaagtgataatttcttgggtagtttgcagttttaaaattatgttttaaaatggactatcatctgcttaccgtaactttaaagtatttcgatttcttgactttatatatcttgtggaaaggac

SEQ ID NO: 1851 - DNA, 236 bp, synthetic construct
  misc_feature 1..236: note = Promoter
  source 1..236: mol_type = other DNA
gagggcctatttcccatgattccttcatatttgcatataagatgcaaggctagagataattagaactaatttgactgtaaacacaaatatattagtacaaaatatgtgacatagaaagtgataatttcttgggtagtttgcagttttaaaattatgttttaaaatggactatcatctgcttaccgtaactttaaagtatttcgatttcttgactttatatatcttgtggaaaggac

SEQ ID NO: 1852 - DNA, 236 bp, synthetic construct
  misc_feature 1..236: note = Promoter
  source 1..236: mol_type = other DNA
gagggcctatttcccatgattccttcatatttgcatataagatgcaaggctggagataattagaactaatttgactgtaaacacaaatatattagtacaaaatatgtgacatagaaagtgataatttcttgggtagtttgcagttttaaaattatgttttaaaatggactatcatctgcttaccgtaactttaaagtatttcgatttcttgactttatatatcttgtggaaaggac

SEQ ID NO: 1853 - DNA, 236 bp, synthetic construct
  misc_feature 1..236: note = Promoter
  source 1..236: mol_type = other DNA
gagggcctatttcccatgattccttcatatttgcatataagatgcaaggctgtagataattagaactaatttgactgtaaacacaaatatattagtacaaaatatgtgacatagaaagtgataatttcttgggtagtttgcagttttaaaattatgttttaaaatggactatcatctgcttaccgtaactttaaagtatttcgatttcttgactttatatatcttgtggaaaggac

SEQ ID NO: 1854 - DNA, 236 bp, synthetic construct
  misc_feature 1..236: note = Promoter
  source 1..236: mol_type = other DNA
gagggcctatttcccatgattccttcatatttgcatataagatgcaaggctgttgataattagaactaatttgactgtaaacacaaatatattagtacaaaatatgtgacatagaaagtgataatttcttgggtagtttgcagttttaaaattatgttttaaaatggactatcatctgcttaccgtaactttaaagtatttcgatttcttgactttatatatcttgtggaaaggac

SEQ ID NO: 1855 - DNA, 236 bp, synthetic construct
  misc_feature 1..236: note = Promoter
  source 1..236: mol_type = other DNA
gagggcctatttcccatgattccttcatatttgcatataagatgcaaggctgttaataattagaactaatttgactgtaaacacaaatatattagtacaaaatatgtgacatagaaagtgataatttcttgggtagtttgcagttttaaaattatgttttaaaatggactatcatctgcttaccgtaactttaaagtatttcgatttcttgactttatatatcttgtggaaaggac

SEQ ID NO: 1856 - DNA, 236 bp, synthetic construct
  misc_feature 1..236: note = Promoter
  source 1..236: mol_type = other DNA
gagggcctatttcccatgattccttcatatttgcatataagatgcaaggctgttagtaattagaactaatttgactgtaaacacaaatatattagtacaaaatatgtgacatagaaagtgataatttcttgggtagtttgcagttttaaaattatgttttaaaatggactatcatctgcttaccgtaactttaaagtatttcgatttcttgactttatatatcttgtggaaaggac

SEQ ID NO: 1857 - DNA, 236 bp, synthetic construct
  misc_feature 1..236: note = Promoter
  source 1..236: mol_type = other DNA
gagggcctatttcccatgattccttcatatttgcatataagatgcaaggctgttagaaattagaactaatttgactgtaaacacaaatatattagtacaaaatatgtgacatagaaagtgataatttcttgggtagtttgcagttttaaaattatgttttaaaatggactatcatctgcttaccgtaactttaaagtatttcgatttcttgactttatatatcttgtggaaaggac

SEQ ID NO: 1858 - DNA, 236 bp, synthetic construct
  misc_feature 1..236: note = Promoter
  source 1..236: mol_type = other DNA
gagggcctatttcccatgattccttcatatttgcatataagatgcaaggctgttagagattagaactaatttgactgtaaacacaaatatattagtacaaaatatgtgacatagaaagtgataatttcttgggtagtttgcagttttaaaattatgttttaaaatggactatcatctgcttaccgtaactttaaagtatttcgatttcttgactttatatatcttgtggaaaggac

SEQ ID NO: 1859 - DNA, 236 bp, synthetic construct; identical to SEQ ID NO: 1858
  misc_feature 1..236: note = Promoter
  source 1..236: mol_type = other DNA

SEQ ID NO: 1860 - DNA, 236 bp, synthetic construct
  misc_feature 1..236: note = Promoter
  source 1..236: mol_type = other DNA
gagggcctatttcccatgattccttcatatttgcatataagatgcaaggctgttagagagtagaactaatttgactgtaaacacaaatatattagtacaaaatatgtgacatagaaagtgataatttcttgggtagtttgcagttttaaaattatgttttaaaatggactatcatctgcttaccgtaactttaaagtatttcgatttcttgactttatatatcttgtggaaaggac

SEQ ID NO: 1861 - DNA, 236 bp, synthetic construct
  misc_feature 1..236: note = Promoter
  source 1..236: mol_type = other DNA
gagggcctatttcccatgattccttcatatttgcatataagatgcaaggctgttagagagaagaactaatttgactgtaaacacaaatatattagtacaaaatatgtgacatagaaagtgataatttcttgggtagtttgcagttttaaaattatgttttaaaatggactatcatctgcttaccgtaactttaaagtatttcgatttcttgactttatatatcttgtggaaaggac

SEQ ID NO: 1862 - DNA, 236 bp, synthetic construct
  misc_feature 1..236: note = Promoter
  source 1..236: mol_type = other DNA
gagggcctatttcccatgattccttcatatttgcatataagatgcaaggctgttagagagatgaactaatttgactgtaaacacaaatatattagtacaaaatatgtgacatagaaagtgataatttcttgggtagtttgcagttttaaaattatgttttaaaatggactatcatctgcttaccgtaactttaaagtatttcgatttcttgactttatatatcttgtggaaaggac

SEQ ID NO: 1863 - DNA, 236 bp, synthetic construct
  misc_feature 1..236: note = Promoter
  source 1..236: mol_type = other DNA
gagggcctatttcccatgattccttcatatttgcatataagatgcaaggctgttagagagataaactaatttgactgtaaacacaaatatattagtacaaaatatgtgacatagaaagtgataatttcttgggtagtttgcagttttaaaattatgttttaaaatggactatcatctgcttaccgtaactttaaagtatttcgatttcttgactttatatatcttgtggaaaggac

SEQ ID NO: 1864 - DNA, 236 bp, synthetic construct; identical to SEQ ID NO: 1863
  misc_feature 1..236: note = Promoter
  source 1..236: mol_type = other DNA

SEQ ID NO: 1865 - DNA, 236 bp, synthetic construct
  misc_feature 1..236: note = Promoter
  source 1..236: mol_type = other DNA
gagggcctatttcccatgattccttcatatttgcatataagatgcaaggctgttagagagataatctaatttgactgtaaacacaaatatattagtacaaaatatgtgacatagaaagtgataatttcttgggtagtttgcagttttaaaattatgttttaaaatggactatcatctgcttaccgtaactttaaagtatttcgatttcttgactttatatatcttgtggaaaggac

SEQ ID NO: 1866 - DNA, 236 bp, synthetic construct
  misc_feature 1..236: note = Promoter
  source 1..236: mol_type = other DNA
gagggcctatttcccatgattccttcatatttgcatataagatgcaaggctgttagagagataatttaatttgactgtaaacacaaatatattagtacaaaatatgtgacatagaaagtgataatttcttgggtagtttgcagttttaaaattatgttttaaaatggactatcatctgcttaccgtaactttaaagtatttcgatttcttgactttatatatcttgtggaaaggac

SEQ ID NO: 1867 - DNA, 236 bp, synthetic construct
  misc_feature 1..236: note = Promoter
  source 1..236: mol_type = other DNA
gagggcctatttcccatgattccttcatatttgcatataagatgcaaggctgttagagagataattaaatttgactgtaaacacaaatatattagtacaaaatatgtgacatagaaagtgataatttcttgggtagtttgcagttttaaaattatgttttaaaatggactatcatctgcttaccgtaactttaaagtatttcgatttcttgactttatatatcttgtggaaaggac

SEQ ID NO: 1868 - DNA, 236 bp, synthetic construct
  misc_feature 1..236: note = Promoter
  source 1..236: mol_type = other DNA
gagggcctatttcccatgattccttcatatttgcatataagatgcaaggctgttagagagataattagatttgactgtaaacacaaatatattagtacaaaatatgtgacatagaaagtgataatttcttgggtagtttgcagttttaaaattatgttttaaaatggactatcatctgcttaccgtaactttaaagtatttcgatttcttgactttatatatcttgtggaaaggac

SEQ ID NO: 1869 - DNA, 236 bp, synthetic construct; identical to SEQ ID NO: 1868
  misc_feature 1..236: note = Promoter
  source 1..236: mol_type = other DNA

SEQ ID NO: 1870 - DNA, 236 bp, synthetic construct
  misc_feature 1..236: note = Promoter
  source 1..236: mol_type = other DNA
gagggcctatttcccatgattccttcatatttgcatataagatgcaaggctgttagagagataattagaattgactgtaaacacaaatatattagtacaaaatatgtgacatagaaagtgataatttcttgggtagtttgcagttttaaaattatgttttaaaatggactatcatctgcttaccgtaactttaaagtatttcgatttcttgactttatatatcttgtggaaaggac

SEQ ID NO: 1871 - DNA, 236 bp, synthetic construct
  misc_feature 1..236: note = Promoter
  source 1..236: mol_type = other DNA
gagggcctatttcccatgattccttcatatttgcatataagatgcaaggctgttagagagataattagaactgactgtaaacacaaatatattagtacaaaatatgtgacatagaaagtgataatttcttgggtagtttgcagttttaaaattatgttttaaaatggactatcatctgcttaccgtaactttaaagtatttcgatttcttgactttatatatcttgtggaaaggac

SEQ ID NO: 1872 - DNA, 236 bp, synthetic construct; identical to SEQ ID NO: 1871
  misc_feature 1..236: note = Promoter
  source 1..236: mol_type = other DNA

SEQ ID NO: 1873 - DNA, 236 bp, synthetic construct
  misc_feature 1..236: note = Promoter
  source 1..236: mol_type = other DNA
gagggcctatttcccatgattccttcatatttgcatataagatgcaaggctgttagagagataattagaactaactgtaaacacaaatatattagtacaaaatatgtgacatagaaagtgataatttcttgggtagtttgcagttttaaaattatgttttaaaatggactatcatctgcttaccgtaactttaaagtatttcgatttcttgactttatatatcttgtggaaaggac

SEQ ID NO: 1874 - DNA, 236 bp, synthetic construct; identical to SEQ ID NO: 1873
  misc_feature 1..236: note = Promoter
  source 1..236: mol_type = other DNA

SEQ ID NO: 1875 - DNA, 236 bp, synthetic construct
  misc_feature 1..236: note = Promoter
  source 1..236: mol_type = other DNA
gagggcctatttcccatgattccttcatatttgcatataagatgcaaggctgttagagagataattagaactaattgtaaacacaaatatattagtacaaaatatgtgacatagaaagtgataatttcttgggtagtttgcagttttaaaattatgttttaaaatggactatcatctgcttaccgtaactttaaagtatttcgatttcttgactttatatatcttgtggaaaggac

SEQ ID NO: 1876 - DNA, 236 bp, synthetic construct; identical to SEQ ID NO: 1875
  misc_feature 1..236: note = Promoter
  source 1..236: mol_type = other DNA

SEQ ID NO: 1877 - DNA, 236 bp, synthetic construct
  misc_feature 1..236: note = Promoter
  source 1..236: mol_type = other DNA
gagggcctatttcccatgattccttcatatttgcatataagatgcaaggctgttagagagataattagaactaattttaaacacaaatatattagtacaaaatatgtgacatagaaagtgataatttcttgggtagtttgcagttttaaaattatgttttaaaatggactatcatctgcttaccgtaactttaaagtatttcgatttcttgactttatatatcttgtggaaaggac

SEQ ID NO: 1878 - DNA, 236 bp, synthetic construct
  misc_feature 1..236: note = Promoter
  source 1..236: mol_type = other DNA
gagggcctatttcccatgattccttcatatttgcatataagatgcaaggctgttagagagataattagaactaatttgaaacacaaatatattagtacaaaatatgtgacatagaaagtgataatttcttgggtagtttgcagttttaaaattatgttttaaaatggactatcatctgcttaccgtaactttaaagtatttcgatttcttgactttatatatcttgtggaaaggac

SEQ ID NO: 1879 - DNA, 236 bp, synthetic construct; identical to SEQ ID NO: 1878
  misc_feature 1..236: note = Promoter
  source 1..236: mol_type = other DNA

SEQ ID NO: 1880 - DNA, 236 bp, synthetic construct
  misc_feature 1..236: note = Promoter
  source 1..236: mol_type = other DNA
gagggcctatttcccatgattccttcatatttgcatataagatgcaaggctgttagagagataattagaactaatttgacacacaaatatattagtacaaaatatgtgacatagaaagtgataatttcttgggtagtttgcagttttaaaattatgttttaaaatggactatcatctgcttaccgtaactttaaagtatttcgatttcttgactttatatatcttgtggaaaggac

SEQ ID NO: 1881 - DNA, 236 bp, synthetic construct
  misc_feature 1..236: note = Promoter
  source 1..236: mol_type = other DNA
gagggcctatttcccatgattccttcatatttgcatataagatgcaaggctgttagagagataattagaactaatttgactcacaaatatattagtacaaaatatgtgacatagaaagtgataatttcttgggtagtttgcagttttaaaattatgttttaaaatggactatcatctgcttaccgtaactttaaagtatttcgatttcttgactttatatatcttgtggaaaggac

SEQ ID NO: 1882 - DNA, 236 bp, synthetic construct
  misc_feature 1..236: note = Promoter
  source 1..236: mol_type = other DNA
gagggcctatttcccatgattccttcatatttgcatataagatgcaaggctgttagagagataattagaactaatttgactgacaaatatattagtacaaaatatgtgacatagaaagtgataatttcttgggtagtttgcagttttaaaattatgttttaaaatggactatcatctgcttaccgtaactttaaagtatttcgatttcttgactttatatatcttgtggaaaggac

SEQ ID NO: 1883 - DNA, 236 bp, synthetic construct
  misc_feature 1..236: note = Promoter
  source 1..236: mol_type = other DNA
gagggcctatttcccatgattccttcatatttgcatataagatgcaaggctgttagagagataattagaactaatttgactgtcaaatatattagtacaaaatatgtgacatagaaagtgataatttcttgggtagtttgcagttttaaaattatgttttaaaatggactatcatctgcttaccgtaactttaaagtatttcgatttcttgactttatatatcttgtggaaaggac

SEQ ID NO: 1884 - DNA, 236 bp, synthetic construct
  misc_feature 1..236: note = Promoter
  source 1..236: mol_type = other DNA
gagggcctatttcccatgattccttcatatttgcatataagatgcaaggctgttagagagataattagaactaatttgactgtaaaatatattagtacaaaatatgtgacatagaaagtgataatttcttgggtagtttgcagttttaaaattatgttttaaaatggactatcatctgcttaccgtaactttaaagtatttcgatttcttgactttatatatcttgtggaaaggac

SEQ ID NO: 1885 - DNA, 236 bp, synthetic construct; identical to SEQ ID NO: 1884
  misc_feature 1..236: note = Promoter
  source 1..236: mol_type = other DNA

SEQ ID NO: 1886 - DNA, 236 bp, synthetic construct; identical to SEQ ID NO: 1884
  misc_feature 1..236: note = Promoter
  source 1..236: mol_type = other DNA

SEQ ID NO: 1887 - DNA, 236 bp, synthetic construct
  misc_feature 1..236: note = Promoter
  source 1..236: mol_type = other DNA
gagggcctatttcccatgattccttcatatttgcatataagatgcaaggctgttagagagataattagaactaatttgactgtaaactatattagtacaaaatatgtgacatagaaagtgataatttcttgggtagtttgcagttttaaaattatgttttaaaatggactatcatctgcttaccgtaactttaaagtatttcgatttcttgactttatatatcttgtggaaaggac

SEQ ID NO: 1888 - DNA, 236 bp, synthetic construct
  misc_feature 1..236: note = Promoter
  source 1..236: mol_type = other DNA
gagggcctatttcccatgattccttcatatttgcatataagatgcaaggctgttagagagataattagaactaatttgactgtaaacaatattagtacaaaatatgtgacatagaaagtgataatttcttgggtagtttgcagttttaaaattatgttttaaaatggactatcatctgcttaccgtaactttaaagtatttcgatttcttgactttatatatcttgtggaaaggac

SEQ ID NO: 1889 - DNA, 236 bp, synthetic construct
  misc_feature 1..236: note = Promoter
  source 1..236: mol_type = other DNA
gagggcctatttcccatgattccttcatatttgcatataagatgcaaggctgttagagagataattagaactaatttgactgtaaacactattagtacaaaatatgtgacatagaaagtgataatttcttgggtagtttgcagttttaaaattatgttttaaaatggactatcatctgcttaccgtaactttaaagtatttcgatttcttgactttatatatcttgtggaaaggac

SEQ ID NO: 1890 - DNA, 236 bp, synthetic construct
  misc_feature 1..236: note = Promoter
  source 1..236: mol_type = other DNA
gagggcctatttcccatgattccttcatatttgcatataagatgcaaggctgttagagagataattagaactaatttgactgtaaacacaattagtacaaaatatgtgacatagaaagtgataatttcttgggtagtttgcagttttaaaattatgttttaaaatggactatcatctgcttaccgtaactttaaagtatttcgatttcttgactttatatatcttgtggaaaggac

SEQ ID NO: 1891 - DNA, 236 bp, synthetic construct; identical to SEQ ID NO: 1890
  misc_feature 1..236: note = Promoter
  source 1..236: mol_type = other DNA

SEQ ID NO: 1892 - DNA, 236 bp, synthetic construct
  misc_feature 1..236: note = Promoter
  source 1..236: mol_type = other DNA
gagggcctatttcccatgattccttcatatttgcatataagatgcaaggctgttagagagataattagaactaatttgactgtaaacacaaatagtacaaaatatgtgacatagaaagtgataatttcttgggtagtttgcagttttaaaattatgttttaaaatggactatcatctgcttaccgtaactttaaagtatttcgatttcttgactttatatatcttgtggaaaggac

SEQ ID NO: 1893 - DNA, 236 bp, synthetic construct; identical to SEQ ID NO: 1892
  misc_feature 1..236: note = Promoter
  source 1..236: mol_type = other DNA

SEQ ID NO: 1894 - DNA, 236 bp, synthetic construct; identical to SEQ ID NO: 1892
  misc_feature 1..236: note = Promoter
  source 1..236: mol_type = other DNA

SEQ ID NO: 1895 - DNA, 236 bp, synthetic construct
  misc_feature 1..236: note = Promoter
  source 1..236: mol_type = other DNA
gagggcctatttcccatgattccttcatatttgcatataagatgcaaggctgttagagagataattagaactaatttgactgtaaacacaaatattacaaaatatgtgacatagaaagtgataatttcttgggtagtttgcagttttaaaattatgttttaaaatggactatcatctgcttaccgtaactttaaagtatttcgatttcttgactttatatatcttgtggaaaggac

SEQ ID NO: 1896 - DNA, 236 bp, synthetic construct
  misc_feature 1..236: note = Promoter
  source 1..236: mol_type = other DNA
gagggcctatttcccatgattccttcatatttgcatataagatgcaaggctgttagagagataattagaactaatttgactgtaaacacaaatataacaaaatatgtgacatagaaagtgataatttcttgggtagtttgcagttttaaaattatgttttaaaatggactatcatctgcttaccgtaactttaaagtatttcgatttcttgactttatatatcttgtggaaaggac

SEQ ID NO: 1897 - DNA, 236 bp, synthetic construct
  misc_feature 1..236: note = Promoter
  source 1..236: mol_type = other DNA
gagggcctatttcccatgattccttcatatttgcatataagatgcaaggctgttagagagataattagaactaatttgactgtaaacacaaatatatcaaaatatgtgacatagaaagtgataatttcttgggtagtttgcagttttaaaattatgttttaaaatggactatcatctgcttaccgtaactttaaagtatttcgatttcttgactttatatatcttgtggaaaggac

SEQ ID NO: 1898 - DNA, 236 bp, synthetic construct
  misc_feature 1..236: note = Promoter
  source 1..236: mol_type = other DNA
gagggcctatttcccatgattccttcatatttgcatataagatgcaaggctgttagagagataattagaactaatttgactgtaaacacaaatatattaaaatatgtgacatagaaagtgataatttcttgggtagtttgcagttttaaaattatgttttaaaatggactatcatctgcttaccgtaactttaaagtatttcgatttcttgactttatatatcttgtggaaaggac

SEQ ID NO: 1899 - DNA, 236 bp, synthetic construct; identical to SEQ ID NO: 1898
  misc_feature 1..236: note = Promoter
  source 1..236: mol_type = other DNA

SEQ ID NO: 1900 - DNA, 236 bp, synthetic construct
  misc_feature 1..236: note = Promoter
  source 1..236: mol_type = other DNA
gagggcctatttcccatgattccttcatatttgcatataagatgcaaggctgttagagagataattagaactaatttgactgtaaacacaaatatattagaatatgtgacatagaaagtgataatttcttgggtagtttgcagttttaaaattatgttttaaaatggactatcatctgcttaccgtaactttaaagtatttcgatttcttgactttatatatcttgtggaaaggac

SEQ ID NO: 1901 - DNA, 236 bp, synthetic construct
  misc_feature 1..236: note = Promoter
  source 1..236: mol_type = other DNA
gagggcctatttcccatgattccttcatatttgcatataagatgcaaggctgttagagagataattagaactaatttgactgtaaacacaaatatattagtatatgtgacatagaaagtgataatttcttgggtagtttgcagttttaaaattatgttttaaaatggactatcatctgcttaccgtaactttaaagtatttcgatttcttgactttatatatcttgtggaaaggac

SEQ ID NO: 1902 - DNA, 236 bp, synthetic construct; identical to SEQ ID NO: 1901
  misc_feature 1..236: note = Promoter
  source 1..236: mol_type = other DNA

SEQ ID NO: 1903 - DNA, 236 bp, synthetic construct
  misc_feature 1..236: note = Promoter
  source 1..236: mol_type = other DNA
gagggcctatttcccatgattccttcatatttgcatataagatgcaaggctgttagagagataattagaactaatttgactgtaaacacaaatatattagtacatgtgacatagaaagtgataatttcttgggtagtttgcagttttaaaattatgttttaaaatggactatcatctgcttaccgtaactttaaagtatttcgatttcttgactttatatatcttgtggaaaggac

SEQ ID NO: 1904 - DNA, 236 bp, synthetic construct; identical to SEQ ID NO: 1903
  misc_feature 1..236: note = Promoter
  source 1..236: mol_type = other DNA

SEQ ID NO: 1905 - DNA, 236 bp, synthetic construct
  misc_feature 1..236: note = Promoter
  source 1..236: mol_type = other DNA
gagggcctatttcccatgattccttcatatttgcatataagatgcaaggctgttagagagataattagaactaatttgactgtaaacacaaatatattagtacaagtgacatagaaagtgataatttcttgggtagtttgcagttttaaaattatgttttaaaatggactatcatctgcttaccgtaactttaaagtatttcgatttcttgactttatatatcttgtggaaaggac

SEQ ID NO: 1906 - DNA, 236 bp, synthetic construct
  misc_feature 1..236: note = Promoter
  source 1..236: mol_type = other DNA
gagggcctatttcccatgattccttcatatttgcatataagatgcaaggctgttagagagataattagaactaatttgactgtaaacacaaatatattagtacaaatgacatagaaagtgataatttcttgggtagtttgcagttttaaaattatgttttaaaatggactatcatctgcttaccgtaactttaaagtatttcgatttcttgactttatatatcttgtggaaaggac

SEQ ID NO: 1907 - DNA, 236 bp, synthetic construct
  misc_feature 1..236: note = Promoter
  source 1..236: mol_type = other DNA
gagggcctatttcccatgattccttcatatttgcatataagatgcaaggctgttagagagataattagaactaatttgactgtaaacacaaatatattagtacaaaagacatagaaagtgataatttcttgggtagtttgcagttttaaaattatgttttaaaatggactatcatctgcttaccgtaactttaaagtatttcgatttcttgactttatatatcttgtggaaaggac

SEQ ID NO: 1908 - DNA, 236 bp, synthetic construct
  misc_feature 1..236: note = Promoter
  source 1..236: mol_type = other DNA
gagggcctatttcccatgattccttcatatttgcatataagatgcaaggctgttagagagataattagaactaatttgactgtaaacacaaatatattagtacaaaatacatagaaagtgataatttcttgggtagtttgcagttttaaaattatgttttaaaatggactatcatctgcttaccgtaactttaaagtatttcgatttcttgactttatatatcttgtggaaaggac

SEQ ID NO: 1909 - DNA, 236 bp, synthetic construct; identical to SEQ ID NO: 1908
  misc_feature 1..236: note = Promoter
  source 1..236: mol_type = other DNA

SEQ ID NO: 1910 - DNA, 236 bp, synthetic construct
  misc_feature 1..236: note = Promoter
  source 1..236: mol_type = other DNA
gagggcctatttcccatgattccttcatatttgcatataagatgcaaggctgttagagagataattagaactaatttgactgtaaacacaaatatattagtacaaaatatatagaaagtgataatttcttgggtagtttgcagttttaaaattatgttttaaaatggactatcatctgcttaccgtaactttaaagtatttcgatttcttgactttatatatcttgtggaaaggac

SEQ ID NO: 1911 - DNA, 236 bp, synthetic construct
  misc_feature 1..236: note = Promoter
  source 1..236: mol_type = other DNA
gagggcctatttcccatgattccttcatatttgcatataagatgcaaggctgttagagagataattagaactaatttgactgtaaacacaaatatattagtacaaaatatgtagaaagtgataatttcttgggtagtttgcagttttaaaattatgttttaaaatggactatcatctgcttaccgtaactttaaagtatttcgatttcttgactttatatatcttgtggaaaggac

SEQ ID NO: 1912 - DNA, 236 bp, synthetic construct; identical to SEQ ID NO: 1911
  misc_feature 1..236: note = Promoter
  source 1..236: mol_type = other DNA

SEQ ID NO: 1913 - DNA, 236 bp, synthetic construct
  misc_feature 1..236: note = Promoter
  source 1..236: mol_type = other DNA
gagggcctatttcccatgattccttcatatttgcatataagatgcaaggctgttagagagataattagaactaatttgactgtaaacacaaatatattagtacaaaatatgtggaaagtgataatttcttgggtagtttgcagttttaaaattatgttttaaaatggactatcatctgcttaccgtaactttaaagtatttcgatttcttgactttatatatcttgtggaaaggac

SEQ ID NO: 1914 - DNA, 236 bp, synthetic construct
  misc_feature 1..236: note = Promoter
  source 1..236: mol_type = other DNA
gagggcctatttcccatgattccttcatatttgcatataagatgcaaggctgttagagagataattagaactaatttgactgtaaacacaaatatattagtacaaaatatgtgaaaagtgataatttcttgggtagtttgcagttttaaaattatgttttaaaatggactatcatctgcttaccgtaactttaaagtatttcgatttcttgactttatatatcttgtggaaaggac

SEQ ID NO: 1915 - DNA, 236 bp, synthetic construct
  misc_feature 1..236: note = Promoter
  source 1..236: mol_type = other DNA
gagggcctatttcccatgattccttcatatttgcatataagatgcaaggctgttagagagataattagaactaatttgactgtaaacacaaatatattagtacaaaatatgtgacaagtgataatttcttgggtagtttgcagttttaaaattatgttttaaaatggactatcatctgcttaccgtaactttaaagtatttcgatttcttgactttatatatcttgtggaaaggac

SEQ ID NO: 1916 - DNA, 236 bp, synthetic construct; identical to SEQ ID NO: 1915
  misc_feature 1..236: note = Promoter
  source 1..236: mol_type = other DNA

SEQ ID NO: 1917 - DNA, 236 bp, synthetic construct
  misc_feature 1..236: note = Promoter
  source 1..236: mol_type = other DNA
gagggcctatttcccatgattccttcatatttgcatataagatgcaaggctgttagagagataattagaactaatttgactgtaaacacaaatatattagtacaaaatatgtgacatgtgataatttcttgggtagtttgcagttttaaaattatgttttaaaatggactatcatctgcttaccgtaactttaaagtatttcgatttcttgactttatatatcttgtggaaaggac

SEQ ID NO: 1918 - DNA, 236 bp, synthetic construct
  misc_feature 1..236: note = Promoter
  source 1..236: mol_type = other DNA
gagggcctatttcccatgattccttcatatttgcatataagatgcaaggctgttagagagataattagaactaatttgactgtaaacacaaatatattagtacaaaatatgtgacatatgataatttcttgggtagtttgcagttttaaaattatgttttaaaatggactatcatctgcttaccgtaactttaaagtatttcgatttcttgactttatatatcttgtggaaaggac

SEQ ID NO: 1919 - DNA, 236 bp, synthetic construct
  misc_feature 1..236: note = Promoter
  source 1..236: mol_type = other DNA
gagggcctatttcccatgattccttcatatttgcatataagatgcaaggctgttagagagataattagaactaatttgactgtaaacacaaatatattagtacaaaatatgtgacataggataatttcttgggtagtttgcagttttaaaattatgttttaaaatggactatcatctgcttaccgtaactttaaagtatttcgatttcttgactttatatatcttgtggaaaggac

SEQ ID NO: 1920 - DNA, 236 bp, synthetic construct
  misc_feature 1..236: note = Promoter
  source 1..236: mol_type = other DNA
gagggcctatttcccatgattccttcatatttgcatataagatgcaaggctgttagagagataattagaactaatttgactgtaaacacaaatatattagtacaaaatatgtgacatagaataatttcttgggtagtttgcagttttaaaattatgttttaaaatggactatcatctgcttaccgtaactttaaagtatttcgatttcttgactttatatatcttgtggaaaggac

SEQ ID NO: 1921 - DNA, 236 bp, synthetic construct; identical to SEQ ID NO: 1920
  misc_feature 1..236: note = Promoter
  source 1..236: mol_type = other DNA

SEQ ID NO: 1922 - DNA, 236 bp, synthetic construct
  misc_feature 1..236: note = Promoter
  source 1..236: mol_type = other DNA
gagggcctatttcccatgattccttcatatttgcatataagatgcaaggctgttagagagataattagaactaatttgactgtaaacacaaatatattagtacaaaatatgtgacatagaaaaatttcttgggtagtttgcagttttaaaattatgttttaaaatggactatcatctgcttaccgtaactttaaagtatttcgatttcttgactttatatatcttgtggaaaggac

SEQ ID NO: 1923 - DNA, 236 bp, synthetic construct
  misc_feature 1..236: note = Promoter
  source 1..236: mol_type = other DNA
gagggcctatttcccatgattccttcatatttgcatataagatgcaaggctgttagagagataattagaactaatttgactgtaaacacaaatatattagtacaaaatatgtgacatagaaagatttcttgggtagtttgcagttttaaaattatgttttaaaatggactatcatctgcttaccgtaactttaaagtatttcgatttcttgactttatatatcttgtggaaaggac

SEQ ID NO: 1924 - DNA, 236 bp, synthetic construct
  misc_feature 1..236: note = Promoter
  source 1..236: mol_type = other DNA
gagggcctatttcccatgattccttcatatttgcatataagatgcaaggctgttagagagataattagaactaatttgactgtaaacacaaatatattagtacaaaatatgtgacatagaaagttttcttgggtagtttgcagttttaaaattatgttttaaaatggactatcatctgcttaccgtaactttaaagtatttcgatttcttgactttatatatcttgtggaaaggac

SEQ ID NO: 1925 - DNA, 236 bp, synthetic construct
  misc_feature 1..236: note = Promoter
  source 1..236: mol_type = other DNA
gagggcctatttcccatgattccttcatatttgcatataagatgcaaggctgttagagagataattagaactaatttgactgtaaacacaaatatattagtacaaaatatgtgacatagaaagtgttcttgggtagtttgcagttttaaaattatgttttaaaatggactatcatctgcttaccgtaactttaaagtatttcgatttcttgactttatatatcttgtggaaaggac

SEQ ID NO: 1926 - DNA, 236 bp, synthetic construct
  misc_feature 1..236: note = Promoter
  source 1..236: mol_type = other DNA
gagggcctatttcccatgattccttcatatttgcatataagatgcaaggctgttagagagataattagaactaatttgactgtaaacacaaatatattagtacaaaatatgtgacatagaaagtgatcttgggtagtttgcagttttaaaattatgttttaaaatggactatcatctgcttaccgtaactttaaagtatttcgatttcttgactttatatatcttgtggaaaggac

SEQ ID NO: 1927 - DNA, 236 bp, synthetic construct; identical to SEQ ID NO: 1926
  misc_feature 1..236: note = Promoter
  source 1..236: mol_type = other DNA

SEQ ID NO: 1928 - DNA, 236 bp, synthetic construct
  misc_feature 1..236: note = Promoter
  source 1..236: mol_type = other DNA
gagggcctatttcccatgattccttcatatttgcatataagatgcaaggctgttagagagataattagaactaatttgactgtaaacacaaatatattagtacaaaatatgtgacatagaaagtgatattgggtagtttgcagttttaaaattatgttttaaaatggactatcatctgcttaccgtaactttaaagtatttcgatttcttgactttatatatcttgtggaaaggac

SEQ ID NO: 1929 - DNA, 236 bp, synthetic construct
  misc_feature 1..236: note = Promoter
  source 1..236: mol_type = other DNA
gagggcctatttcccatgattccttcatatttgcatataagatgcaaggctgttagagagataattagaactaatttgactgtaaacacaaatatattagtacaaaatatgtgacatagaaagtgataatgggtagtttgcagttttaaaattatgttttaaaatggactatcatctgcttaccgtaactttaaagtatttcgatttcttgactttatatatcttgtggaaaggac

SEQ ID NO: 1930 - DNA, 236 bp, synthetic construct; identical to SEQ ID NO: 1929
  misc_feature 1..236: note = Promoter
  source 1..236: mol_type = other DNA

SEQ ID NO: 1931 - DNA, 236 bp, synthetic construct
  misc_feature 1..236: note = Promoter
  source 1..236: mol_type = other DNA
gagggcctatttcccatgattccttcatatttgcatataagatgcaaggctgttagagagataattagaactaatttgactgtaaacacaaatatattagtacaaaatatgtgacatagaaagtgataattggtagtttgcagttttaaaattatgttttaaaatggactatcatctgcttaccgtaactttaaagtatttcgatttcttgactttatatatcttgtggaaaggac

SEQ ID NO: 1932 - DNA, 236 bp, synthetic construct
  misc_feature 1..236: note = Promoter
  source 1..236: mol_type = other DNA
gagggcctatttcccatgattccttcatatttgcatataagatgcaaggctgttagagagataattagaactaatttgactgtaaacacaaatatattagtacaaaatatgtgacatagaaagtgataatttgtagtttgcagttttaaaattatgttttaaaatggactatcatctgcttaccgtaactttaaagtatttcgatttcttgactttatatatcttgtggaaaggac

SEQ ID NO: 1933 - DNA, 236 bp, synthetic construct
  misc_feature 1..236: note = Promoter
  source 1..236: mol_type = other DNA
gagggcctatttcccatgattccttcatatttgcatataagatgcaaggctgttagagagataattagaactaatttgactgtaaacacaaatatattagtacaaaatatgtgacatagaaagtgataatttctagtttgcagttttaaaattatgttttaaaatggactatcatctgcttaccgtaactttaaagtatttcgatttcttgactttatatatcttgtggaaaggac

SEQ ID NO: 1934 - DNA, 236 bp, synthetic construct; identical to SEQ ID NO: 1933
  misc_feature 1..236: note = Promoter
  source 1..236: mol_type = other DNA

SEQ ID NO: 1935 - DNA, 236 bp, synthetic construct
  misc_feature 1..236: note = Promoter
  source 1..236: mol_type = other DNA
gagggcctatttcccatgattccttcatatttgcatataagatgcaaggctgttagagagataattagaactaatttgactgtaaacacaaatatattagtacaaaatatgtgacatagaaagtgataatttcttgtttgcagttttaaaattatgttttaaaatggactatcatctgcttaccgtaactttaaagtatttcgatttcttgactttatatatcttgtggaaaggac

SEQ ID NO: 1936 - DNA, 236 bp, synthetic construct; identical to SEQ ID NO: 1935
  misc_feature 1..236: note = Promoter
  source 1..236: mol_type = other DNA

SEQ ID NO: 1937 - DNA, 236 bp, synthetic construct
  misc_feature 1..236: note = Promoter
  source 1..236: mol_type = other DNA
gagggcctatttcccatgattccttcatatttgcatataagatgcaaggctgttagagagataattagaactaatttgactgtaaacacaaatatattagtacaaaatatgtgacatagaaagtgataatttcttggttgcagttttaaaattatgttttaaaatggactatcatctgcttaccgtaactttaaagtatttcgatttcttgactttatatatcttgtggaaaggac

SEQ ID NO: 1938 - DNA, 236 bp, synthetic construct
  misc_feature 1..236: note = Promoter
  source 1..236: mol_type = other DNA
gagggcctatttcccatgattccttcatatttgcatataagatgcaaggctgttagagagataattagaactaatttgactgtaaacacaaatatattagtacaaaatatgtgacatagaaagtgataatttcttgggtgcagttttaaaattatgttttaaaatggactatcatctgcttaccgtaactttaaagtatttcgatttcttgactttatatatcttgtggaaaggac

SEQ ID NO: 1939 - DNA, 236 bp, synthetic construct; identical to SEQ ID NO: 1938
  misc_feature 1..236: note = Promoter
  source 1..236: mol_type = other DNA

SEQ ID NO: 1940 - DNA, 236 bp, synthetic construct
  misc_feature 1..236: note = Promoter
  source 1..236: mol_type = other DNA
gagggcctatttcccatgattccttcatatttgcatataagatgcaaggctgttagagagataattagaactaatttgactgtaaacacaaatatattagtacaaaatatgtgacatagaaagtgataatttcttgggtacagttttaaaattatgttttaaaatggactatcatctgcttaccgtaactttaaagtatttcgatttcttgactttatatatcttgtggaaaggac

SEQ ID NO: 1941 - DNA, 236 bp, synthetic construct
  misc_feature 1..236: note = Promoter
  source 1..236: mol_type = other DNA
gagggcctatttcccatgattccttcatatttgcatataagatgcaaggctgttagagagataattagaactaatttgactgtaaacacaaatatattagtacaaaatatgtgacatagaaagtgataatttcttgggtagagttttaaaattatgttttaaaatggactatcatctgcttaccgtaactttaaagtatttcgatttcttgactttatatatcttgtggaaaggac

SEQ ID NO: 1942 - DNA, 236 bp, synthetic construct
  misc_feature 1..236: note = Promoter
  source 1..236: mol_type = other DNA
gagggcctatttcccatgattccttcatatttgcatataagatgcaaggctgttagagagataattagaactaatttgactgtaaacacaaatatattagtacaaaatatgtgacatagaaagtgataatttcttgggtagtgttttaaaattatgttttaaaatggactatcatctgcttaccgtaactttaaagtatttcgatttcttgactttatatatcttgtggaaaggac

SEQ ID NO: 1943 - DNA, 236 bp, synthetic construct
  misc_feature 1..236: note = Promoter
  source 1..236: mol_type = other DNA
gagggcctatttcccatgattccttcatatttgcatataagatgcaaggctgttagagagataattagaactaatttgactgtaaacacaaatatattagtacaaaatatgtgacatagaaagtgataatttcttgggtagttttttaaaattatgttttaaaatggactatcatctgcttaccgtaactttaaagtatttcgatttcttgactttatatatcttgtggaaaggac

SEQ ID NO: 1944 - DNA, 236 bp, synthetic construct; identical to SEQ ID NO: 1943
  misc_feature 1..236: note = Promoter
  source 1..236: mol_type = other DNA

SEQ ID NO: 1945 - DNA, 236 bp, synthetic construct
  misc_feature 1..236: note = Promoter
  source 1..236: mol_type = other DNA
gagggcctatttcccatgattccttcatatttgcatataagatgcaaggctgttagagagataattagaactaatttgactgtaaacacaaatatattagtacaaaatatgtgacatagaaagtgataatttcttgggtagtttgttaaaattatgttttaaaatggactatcatctgcttaccgtaactttaaagtatttcgatttcttgactttatatatcttgtggaaaggac

SEQ ID NO: 1946 - DNA, 236 bp, synthetic construct
  misc_feature 1..236: note = Promoter
  source 1..236: mol_type = other DNA
gagggcctatttcccatgattccttcatatttgcatataagatgcaaggctgttagagagataattagaactaatttgactgtaaacacaaatatattagtacaaaatatgtgacatagaaagtgataatttcttgggtagtttgctaaaattatgttttaaaatggactatcatctgcttaccgtaactttaaagtatttcgatttcttgactttatatatcttgtggaaaggac

SEQ ID NO: 1947 - DNA, 236 bp, synthetic construct
  misc_feature 1..236: note = Promoter
  source 1..236: mol_type = other DNA
gagggcctatttcccatgattccttcatatttgcatataagatgcaaggctgttagagagataattagaactaatttgactgtaaacacaaatatattagtacaaaatatgtgacatagaaagtgataatttcttgggtagtttgcaaaaattatgttttaaaatggactatcatctgcttaccgtaactttaaagtatttcgatttcttgactttatatatcttgtggaaaggac

SEQ ID NO: 1948 - DNA, 236 bp, synthetic construct
  misc_feature 1..236: note = Promoter
  source 1..236: mol_type = other DNA
gagggcctatttcccatgattccttcatatttgcatataagatgcaaggctgttagagagataattagaactaatttgactgtaaacacaaatatattagtacaaaatatgtgacatagaaagtgataatttcttgggtagtttgcagaaattatgttttaaaatggactatcatctgcttaccgtaactttaaagtatttcgatttcttgactttatatatcttgtggaaaggac

SEQ ID NO: 1949 - DNA, 236 bp, synthetic construct
  misc_feature 1..236: note = Promoter
  source 1..236: mol_type = other DNA
gagggcctatttcccatgattccttcatatttgcatataagatgcaaggctgttagagagataattagaactaatttgactgtaaacacaaatatattagtacaaaatatgtgacatagaaagtgataatttcttgggtagtttgcagtaattatgttttaaaatggactatcatctgcttaccgtaactttaaagtatttcgatttcttgactttatatatcttgtggaaaggac

SEQ ID NO: 1950 - DNA, 236 bp, synthetic construct
  misc_feature 1..236: note = Promoter
  source 1..236: mol_type = other DNA
gagggcctatttcccatgattccttcatatttgcatataagatgcaaggctgttagagagataattagaactaatttgactgtaaacacaaatatattagtacaaaatatgtgacatagaaagtgataatttcttgggtagtttgcagttattatgttttaaaatggactatcatctgcttaccgtaactttaaagtatttcgatttcttgactttatatatcttgtggaaaggac

SEQ ID NO: 1951 - DNA, 236 bp, synthetic construct
  misc_feature 1..236: note = Promoter
  source 1..236: mol_type = other DNA
gagggcctatttcccatgattccttcatatttgcatataagatgcaaggctgttagagagataattagaactaatttgactgtaaacacaaatatattagtacaaaatatgtgacatagaaagtgataatttcttgggtagtttgcagtttttatgttttaaaatggactatcatctgcttaccgtaactttaaagtatttcgatttcttgactttatatatcttgtggaaaggac

SEQ ID NO: 1952 - DNA, 236 bp, synthetic construct; identical to SEQ ID NO: 1951
  misc_feature 1..236: note = Promoter
  source 1..236: mol_type = other DNA

SEQ ID NO: 1953 - DNA, 236 bp, synthetic construct
  misc_feature 1..236: note = Promoter
  source 1..236: mol_type = other DNA
gagggcctatttcccatgattccttcatatttgcatataagatgcaaggctgttagagagataattagaactaatttgactgtaaacacaaatatattagtacaaaatatgtgacatagaaagtgataatttcttgggtagtttgcagttttaatgttttaaaatggactatcatctgcttaccgtaactttaaagtatttcgatttcttgactttatatatcttgtggaaaggac

SEQ ID NO: 1954 - DNA, 236 bp, synthetic construct; identical to SEQ ID NO: 1953
  misc_feature 1..236: note = Promoter
  source 1..236: mol_type = other DNA

SEQ ID NO: 1955 - DNA, 236 bp, synthetic construct
  misc_feature 1..236: note = Promoter
  source 1..236: mol_type = other DNA
gagggcctatttcccatgattccttcatatttgcatataagatgcaaggctgttagagagataattagaactaatttgactgtaaacacaaatatattagtacaaaatatgtgacatagaaagtgataatttcttgggtagtttgcagttttaaagttttaaaatggactatcatctgcttaccgtaactttaaagtatttcgatttcttgactttatatatcttgtggaaaggac

SEQ ID NO: 1956 - DNA, 236 bp, synthetic construct
  misc_feature 1..236: note = Promoter
  source 1..236: mol_type = other DNA
gagggcctatttcccatgattccttcatatttgcatataagatgcaaggctgttagagagataattagaactaatttgactgtaaacacaaatatattagtacaaaatatgtgacatagaaagtgataatttcttgggtagtttgcagttttaaaattttaaaatggactatcatctgcttaccgtaactttaaagtatttcgatttcttgactttatatatcttgtggaaaggac

SEQ ID NO: 1957 - DNA, 236 bp, synthetic construct; identical to SEQ ID NO: 1956
  misc_feature 1..236: note = Promoter
  source 1..236: mol_type = other DNA

SEQ ID NO: 1958 - DNA, 236 bp, synthetic construct; identical to SEQ ID NO: 1956
  misc_feature 1..236: note = Promoter
  source 1..236: mol_type = other DNA

SEQ ID NO: 1959 - DNA, 236 bp, synthetic construct
  misc_feature 1..236: note = Promoter
  source 1..236: mol_type = other DNA
gagggcctatttcccatgattccttcatatttgcatataagatgcaaggctgttagagagataattagaactaatttgactgtaaacacaaatatattagtacaaaatatgtgacatagaaagtgataatttcttgggtagtttgcagttttaaaattataaaatggactatcatctgcttaccgtaactttaaagtatttcgatttcttgactttatatatcttgtggaaaggac

SEQ ID NO: 1960 - DNA, 236 bp, synthetic construct; identical to SEQ ID NO: 1959
  misc_feature 1..236: note = Promoter
  source 1..236: mol_type = other DNA

SEQ ID NO: 1961 - DNA, 236 bp, synthetic construct
  misc_feature 1..236: note = Promoter
  source 1..236: mol_type = other DNA
gagggcctatttcccatgattccttcatatttgcatataagatgcaaggctgttagagagataattagaactaatttgactgtaaacacaaatatattagtacaaaatatgtgacatagaaagtgataatttcttgggtagtttgcagttttaaaattatgaaatggactatcatctgcttaccgtaactttaaagtatttcgatttcttgactttatatatcttgtggaaaggac

SEQ ID NO: 1962 - DNA, 236 bp, synthetic construct
  misc_feature 1..236: note = Promoter
  source 1..236: mol_type = other DNA
gagggcctatttcccatgattccttcatatttgcatataagatgcaaggctgttagagagataattagaactaatttgactgtaaacacaaatatattagtacaaaatatgtgacatagaaagtgataatttcttgggtagtttgcagttttaaaattatgtaatggactatcatctgcttaccgtaactttaaagtatttcgatttcttgactttatatatcttgtggaaaggac

SEQ ID NO: 1963 - DNA, 236 bp, synthetic construct
  misc_feature 1..236: note = Promoter
  source 1..236: mol_type = other DNA
gagggcctatttcccatgattccttcatatttgcatataagatgcaaggctgttagagagataattagaactaatttgactgtaaacacaaatatattagtacaaaatatgtgacatagaaagtgataatttcttgggtagtttgcagttttaaaattatgttatggactatcatctgcttaccgtaactttaaagtatttcgatttcttgactttatatatcttgtggaaaggac

SEQ ID NO: 1964 - DNA, 236 bp, synthetic construct
  misc_feature 1..236: note = Promoter
  source 1..236: mol_type = other DNA
gagggcctatttcccatgattccttcatatttgcatataagatgcaaggctgttagagagataattagaactaatttgactgtaaacacaaatatattagtacaaaatatgtgacatagaaagtgataatttcttgggtagtttgcagttttaaaattatgttttggactatcatctgcttaccgtaactttaaagtatttcgatttcttgactttatatatcttgtggaaaggac

SEQ ID NO: 1965 - DNA, 236 bp, synthetic construct; identical to SEQ ID NO: 1964
  misc_feature 1..236: note = Promoter
  source 1..236: mol_type = other DNA

SEQ ID NO: 1966 - DNA, 236 bp, synthetic construct
  misc_feature 1..236: note = Promoter
  source 1..236: mol_type = other DNA
gagggcctatttcccatgattccttcatatttgcatataagatgcaaggctgttagagagataattagaactaatttgactgtaaacacaaatatattagtacaaaatatgtgacatagaaagtgataatttcttgggtagtttgcagttttaaaattatgttttagactatcatctgcttaccgtaactttaaagtatttcgatttcttgactttatatatcttgtggaaaggac

SEQ ID NO: 1967 - DNA, 236 bp, synthetic construct
  misc_feature 1..236: note = Promoter
  source 1..236: mol_type = other DNA
gagggcctatttcccatgattccttcatatttgcatataagatgcaaggctgttagagagataattagaactaatttgactgtaaacacaaatatattagtacaaaatatgtgacatagaaagtgataatttcttgggtagtttgcagttttaaaattatgttttaaactatcatctgcttaccgtaactttaaagtatttcgatttcttgactttatatatcttgtggaaaggac

SEQ ID NO: 1968 - DNA, 236 bp, synthetic construct; identical to SEQ ID NO: 1967
  misc_feature 1..236: note = Promoter
  source 1..236: mol_type = other DNA

SEQ ID NO: 1969 - DNA, 236 bp, synthetic construct
  misc_feature 1..236: note = Promoter
  source 1..236: mol_type = other DNA
gagggcctatttcccatgattccttcatatttgcatataagatgcaaggctgttagagagataattagaactaatttgactgtaaacacaaatatattagtacaaaatatgtgacatagaaagtgataatttcttgggtagtttgcagttttaaaattatgttttaaaatatcatctgcttaccgtaactttaaagtatttcgatttcttgactttatatatcttgtggaaaggac

SEQ ID NO: 1970 - DNA, 236 bp, synthetic construct; identical to SEQ ID NO: 1969
  misc_feature 1..236: note = Promoter
  source 1..236: mol_type = other DNA

SEQ ID NO: 1971 - DNA, 236 bp, synthetic construct
  misc_feature 1..236: note = Promoter
  source 1..236: mol_type = other DNA
gagggcctatttcccatgattccttcatatttgcatataagatgcaaggctgttagagagataattagaactaatttgactgtaaacacaaatatattagtacaaaatatgtgacatagaaagtgataatttcttgggtagtttgcagttttaaaattatgttttaaaatgtcatctgcttaccgtaactttaaagtatttcgatttcttgactttatatatcttgtggaaaggac

SEQ ID NO: 1972 - DNA, 236 bp, synthetic construct
  misc_feature 1..236: note = Promoter
  source 1..236: mol_type = other DNA
gagggcctatttcccatgattccttcatatttgcatataagatgcaaggctgttagagagataattagaactaatttgactgtaaacacaaatatattagtacaaaatatgtgacatagaaagtgataatttcttgggtagtttgcagttttaaaattatgttttaaaatggcatctgcttaccgtaactttaaagtatttcgatttcttgactttatatatcttgtggaaaggac

SEQ ID NO: 1973 - DNA, 236 bp, synthetic construct
  misc_feature 1..236: note = Promoter
  source 1..236: mol_type = other DNA
gagggcctatttcccatgattccttcatatttgcatataagatgcaaggctgttagagagataattagaactaatttgactgtaaacacaaatatattagtacaaaatatgtgacatagaaagtgataatttcttgggtagtttgcagttttaaaattatgttttaaaatggaatctgcttaccgtaactttaaagtatttcgatttcttgactttatatatcttgtggaaaggac

SEQ ID NO: 1974 - DNA, 236 bp, synthetic construct
  misc_feature 1..236: note = Promoter
  source 1..236: mol_type = other DNA
gagggcctatttcccatgattccttcatatttgcatataagatgcaaggctgttagagagataattagaactaatttgactgtaaacacaaatatattagtacaaaatatgtgacatagaaagtgataatttcttgggtagtttgcagttttaaaattatgttttaaaatggactctgcttaccgtaactttaaagtatttcgatttcttgactttatatatcttgtggaaaggac

SEQ ID NO: 1975 - DNA, 236 bp, synthetic construct; identical to SEQ ID NO: 1974
  misc_feature 1..236: note = Promoter
  source 1..236: mol_type = other DNA

SEQ ID NO: 1976 - DNA, 236 bp, synthetic construct
  misc_feature 1..236: note = Promoter
  source 1..236: mol_type = other DNA
gagggcctatttcccatgattccttcatatttgcatataagatgcaaggctgttagagagataattagaactaatttgactgtaaacacaaatatattagtacaaaatatgtgacatagaaagtgataatttcttgggtagtttgcagttttaaaattatgttttaaaatggactatgcttaccgtaactttaaagtatttcgatttcttgactttatatatcttgtggaaaggac

SEQ ID NO: 1977 - DNA, 236 bp, synthetic construct; identical to SEQ ID NO: 1976
  misc_feature 1..236: note = Promoter
  source 1..236: mol_type = other DNA

SEQ ID NO: 1978 - DNA, 236 bp, synthetic construct
  misc_feature 1..236: note = Promoter
  source 1..236: mol_type = other DNA
gagggcctatttcccatgattccttcatatttgcatataagatgcaaggctgttagagagataattagaactaatttgactgtaaacacaaatatattagtacaaaatatgtgacatagaaagtgataatttcttgggtagtttgcagttttaaaattatgttttaaaatggactatccttaccgtaactttaaagtatttcgatttcttgactttatatatcttgtggaaaggac

SEQ ID NO: 1979 - DNA, 236 bp, synthetic construct
  misc_feature 1..236: note = Promoter
  source 1..236: mol_type = other DNA
gagggcctatttcccatgattccttcatatttgcatataagatgcaaggctgttagagagataattagaactaatttgactgtaaacacaaatatattagtacaaaatatgtgacatagaaagtgataatttcttgggtagtttgcagttttaaaattatgttttaaaatggactatcattaccgtaactttaaagtatttcgatttcttgactttatatatcttgtggaaaggac

SEQ ID NO: 1980 - DNA, 236 bp, synthetic construct; identical to SEQ ID NO: 1979
  misc_feature 1..236: note = Promoter
  source 1..236: mol_type = other DNA

SEQ ID NO: 1981 - DNA, 236 bp, synthetic construct
  misc_feature 1..236: note = Promoter
  source 1..236: mol_type = other DNA
gagggcctatttcccatgattccttcatatttgcatataagatgcaaggctgttagagagataattagaactaatttgactgtaaacacaaatatattagtacaaaatatgtgacatagaaagtgataatttcttgggtagtttgcagttttaaaattatgttttaaaatggactatcatcaccgtaactttaaagtatttcgatttcttgactttatatatcttgtggaaaggac

SEQ ID NO: 1982 - DNA, 236 bp, synthetic construct
  misc_feature 1..236: note = Promoter
  source 1..236: mol_type = other DNA
gagggcctatttcccatgattccttcatatttgcatataagatgcaaggctgttagagagataattagaactaatttgactgtaaacacaaatatattagtacaaaatatgtgacatagaaagtgataatttcttgggtagtttgcagttttaaaattatgttttaaaatggactatcatctccgtaactttaaagtatttcgatttcttgactttatatatcttgtggaaaggac

SEQ ID NO: 1983 - DNA, 236 bp, synthetic construct
  misc_feature 1..236: note = Promoter
  source 1..236: mol_type = other DNA
gagggcctatttcccatgattccttcatatttgcatataagatgcaaggctgttagagagataattagaactaatttgactgtaaacacaaatatattagtacaaaatatgtgacatagaaagtgataatttcttgggtagtttgcagttttaaaattatgttttaaaatggactatcatctgcgtaactttaaagtatttcgatttcttgactttatatatcttgtggaaaggac

SEQ ID NO: 1984 - DNA, 236 bp, synthetic construct; identical to SEQ ID NO: 1983
  misc_feature 1..236: note = Promoter
  source 1..236: mol_type = other DNA

SEQ ID NO: 1985 - DNA, 236 bp, synthetic construct
  misc_feature 1..236: note = Promoter
  source 1..236: mol_type = other DNA
gagggcctatttcccatgattccttcatatttgcatataagatgcaaggctgttagagagataattagaactaatttgactgtaaacacaaatatattagtacaaaatatgtgacatagaaagtgataatttcttgggtagtttgcagttttaaaattatgttttaaaatggactatcatctgcttaactttaaagtatttcgatttcttgactttatatatcttgtggaaaggac

SEQ ID NO: 1986 - DNA, 236 bp, synthetic construct; identical to SEQ ID NO: 1985
  misc_feature 1..236: note = Promoter
  source 1..236: mol_type = other DNA

SEQ ID NO: 1987 - DNA, 236 bp, synthetic construct; identical to SEQ ID NO: 1985
  misc_feature 1..236: note = Promoter
  source 1..236: mol_type = other DNA

SEQ ID NO: 1988 - DNA, 236 bp, synthetic construct
  misc_feature 1..236: note = Promoter
  source 1..236: mol_type = other DNA
gagggcctatttcccatgattccttcatatttgcatataagatgcaaggctgttagagagataattagaactaatttgactgtaaacacaaatatattagtacaaaatatgtgacatagaaagtgataatttcttgggtagtttgcagttttaaaattatgttttaaaatggactatcatctgcttacctttaaagtatttcgatttcttgactttatatatcttgtggaaaggac

SEQ ID NO: 1989 - DNA, 236 bp, synthetic construct; identical to SEQ ID NO: 1988
  misc_feature 1..236: note = Promoter
  source 1..236: mol_type = other DNA

SEQ ID NO: 1990 - DNA, 236 bp, synthetic construct
  misc_feature 1..236: note = Promoter
  source 1..236: mol_type = other DNA
gagggcctatttcccatgattccttcatatttgcatataagatgcaaggctgttagagagataattagaactaatttgactgtaaacacaaatatattagtacaaaatatgtgacatagaaagtgataatttcttgggtagtttgcagttttaaaattatgttttaaaatggactatcatctgcttaccgttaaagtatttcgatttcttgactttatatatcttgtggaaaggac

SEQ ID NO: 1991 - DNA, 236 bp, synthetic construct; identical to SEQ ID NO: 1990
  misc_feature 1..236: note = Promoter
  source 1..236: mol_type = other DNA

SEQ ID NO: 1992 - DNA, 236 bp, synthetic construct
  misc_feature 1..236: note = Promoter
  source 1..236: mol_type = other DNA
gagggcctatttcccatgattccttcatatttgcatataagatgcaaggctgttagagagataattagaactaatttgactgtaaacacaaatatattagtacaaaatatgtgacatagaaagtgataatttcttgggtagtttgcagttttaaaattatgttttaaaatggactatcatctgcttaccgtaaaagtatttcgatttcttgactttatatatcttgtggaaaggac

SEQ ID NO: 1993 - DNA, 236 bp, synthetic construct; identical to SEQ ID NO: 1992
  misc_feature 1..236: note = Promoter
  source 1..236: mol_type = other DNA

SEQ ID NO: 1994 - DNA, 236 bp, synthetic construct
  misc_feature 1..236: note = Promoter
  source 1..236: mol_type = other DNA
gagggcctatttcccatgattccttcatatttgcatataagatgcaaggctgttagagagataattagaactaatttgactgtaaacacaaatatattagtacaaaatatgtgacatagaaagtgataatttcttgggtagtttgcagttttaaaattatgttttaaaatggactatcatctgcttaccgtaacagtatttcgatttcttgactttatatatcttgtggaaaggac

SEQ ID NO: 1995 - DNA, 236 bp, synthetic construct
  misc_feature 1..236: note = Promoter
  source 1..236: mol_type = other DNA
gagggcctatttcccatgattccttcatatttgcatataagatgcaaggctgttagagagataattagaactaatttgactgtaaacacaaatatattagtacaaaatatgtgacatagaaagtgataatttcttgggtagtttgcagttttaaaattatgttttaaaatggactatcatctgcttaccgtaactgtatttcgatttcttgactttatatatcttgtggaaaggac

SEQ ID NO: 1996 - DNA, 236 bp, synthetic construct
  misc_feature 1..236: note = Promoter
  source 1..236: mol_type = other DNA
gagggcctatttcccatgattccttcatatttgcatataagatgcaaggctgttagagagataattagaactaatttgactgtaaacacaaatatattagtacaaaatatgtgacatagaaagtgataatttcttgggtagtttgcagttttaaaattatgttttaaaatggactatcatctgcttaccgtaactttatttcgatttcttgactttatatatcttgtggaaaggac

SEQ ID NO: 1997 - DNA, 236 bp, synthetic construct; identical to SEQ ID NO: 1996
  misc_feature 1..236: note = Promoter
  source 1..236: mol_type = other DNA

SEQ ID NO: 1998 - DNA, 236 bp, synthetic construct; identical to SEQ ID NO: 1996
  misc_feature 1..236: note = Promoter
  source 1..236: mol_type = other DNA

SEQ ID NO: 1999 - DNA, 236 bp, synthetic construct
  misc_feature 1..236: note = Promoter
  source 1..236: mol_type = other DNA
gagggcctatttcccatgattccttcatatttgcatataagatgcaaggctgttagagagataattagaactaatttgactgtaaacacaaatatattagtacaaaatatgtgacatagaaagtgataatttcttgggtagtttgcagttttaaaattatgttttaaaatggactatcatctgcttaccgtaactttaattcgatttcttgactttatatatcttgtggaaaggac

SEQ ID NO: 2000 - DNA, 236 bp, synthetic construct
  misc_feature 1..236: note = Promoter
  source 1..236: mol_type = other DNA
gagggcctatttcccatgattccttcatatttgcatataagatgcaaggctgttagagagataattagaactaatttgactgtaaacacaaatatattagtacaaaatatgtgacatagaaagtgataatttcttgggtagtttgcagttttaaaattatgttttaaaatggactatcatctgcttaccgtaactttaaatcgatttcttgactttatatatcttgtggaaaggac

SEQ ID NO: 2001 - DNA, 236 bp, synthetic construct
  misc_feature 1..236: note = Promoter
  source 1..236: mol_type = other DNA
gagggcctatttcccatgattccttcatatttgcatataagatgcaaggctgttagagagataattagaactaatttgactgtaaacacaaatatattagtacaaaatatgtgacatagaaagtgataatttcttgggtagtttgcagttttaaaattatgttttaaaatggactatcatctgcttaccgtaactttaaagcgatttcttgactttatatatcttgtggaaaggac

SEQ ID NO: 2002 - DNA, 236 bp, synthetic construct
  misc_feature 1..236: note = Promoter
  source 1..236: mol_type = other DNA
gagggcctatttcccatgattccttcatatttgcatataagatgcaaggctgttagagagataattagaactaatttgactgtaaacacaaatatattagtacaaaatatgtgacatagaaagtgataatttcttgggtagtttgcagttttaaaattatgttttaaaatggactatcatctgcttaccgtaactttaaagtgatttcttgactttatatatcttgtggaaaggac

SEQ ID NO: 2003 - DNA, 236 bp, synthetic construct
  misc_feature 1..236: note = Promoter
  source 1..236: mol_type = other DNA
gagggcctatttcccatgattccttcatatttgcatataagatgcaaggctgttagagagataattagaactaatttgactgtaaacacaaatatattagtacaaaatatgtgacatagaaagtgataatttcttgggtagtttgcagttttaaaattatgttttaaaatggactatcatctgcttaccgtaactttaaagtaatttcttgactttatatatcttgtggaaaggac

SEQ ID NO: 2004 - DNA, 236 bp, synthetic construct
  misc_feature 1..236: note = Promoter
  source 1..236: mol_type = other DNA
gagggcctatttcccatgattccttcatatttgcatataagatgcaaggctgttagagagataattagaactaatttgactgtaaacacaaatatattagtacaaaatatgtgacatagaaagtgataatttcttgggtagtttgcagttttaaaattatgttttaaaatggactatcatctgcttaccgtaactttaaagtattttcttgactttatatatcttgtggaaaggac

SEQ ID NO: 2005 - DNA, 236 bp, synthetic construct; identical to SEQ ID NO: 2004
  misc_feature 1..236: note = Promoter
  source 1..236: mol_type = other DNA

SEQ ID NO: 2006 - DNA, 236 bp, synthetic construct; identical to SEQ ID NO: 2004
  misc_feature 1..236: note = Promoter
  source 1..236: mol_type = other DNA

SEQ ID NO: 2007 - DNA, 236 bp, synthetic construct
  misc_feature 1..236: note = Promoter
  source 1..236: mol_type = other DNA
gagggcctatttcccatgattccttcatatttgcatataagatgcaaggctgttagagagataattagaactaatttgactgtaaacacaaatatattagtacaaaatatgtgacatagaaagtgataatttcttgggtagtttgcagttttaaaattatgttttaaaatggactatcatctgcttaccgtaactttaaagtatttccttgactttatatatcttgtggaaaggac

SEQ ID NO: 2008 - DNA, 236 bp, synthetic construct
  misc_feature 1..236: note = Promoter
  source 1..236: mol_type = other DNA
gagggcctatttcccatgattccttcatatttgcatataagatgcaaggctgttagagagataattagaactaatttgactgtaaacacaaatatattagtacaaaatatgtgacatagaaagtgataatttcttgggtagtttgcagttttaaaattatgttttaaaatggactatcatctgcttaccgtaactttaaagtatttcgttgactttatatatcttgtggaaaggac

SEQ ID NO: 2009 - DNA, 236 bp, synthetic construct
  misc_feature 1..236: note = Promoter
  source 1..236: mol_type = other DNA
gagggcctatttcccatgattccttcatatttgcatataagatgcaaggctgttagagagataattagaactaatttgactgtaaacacaaatatattagtacaaaatatgtgacatagaaagtgataatttcttgggtagtttgcagttttaaaattatgttttaaaatggactatcatctgcttaccgtaactttaaagtatttcgatgactttatatatcttgtggaaaggac

SEQ ID NO: 2010 - DNA, 236 bp, synthetic construct; identical to SEQ ID NO: 2009
  misc_feature 1..236: note = Promoter
  source 1..236: mol_type = other DNA

SEQ ID NO: 2011 - DNA, 236 bp, synthetic construct
  misc_feature 1..236: note = Promoter
  source 1..236: mol_type = other DNA
gagggcctatttcccatgattccttcatatttgcatataagatgcaaggctgttagagagataattagaactaatttgactgtaaacacaaatatattagtacaaaatatgtgacatagaaagtgataatttcttgggtagtttgcagttttaaaattatgttttaaaatggactatcatctgcttaccgtaactttaaagtatttcgattactttatatatcttgtggaaaggac

SEQ ID NO: 2012 - DNA, 236 bp, synthetic construct
  misc_feature 1..236: note = Promoter
  source 1..236: mol_type = other DNA
gagggcctatttcccatgattccttcatatttgcatataagatgcaaggctgttagagagataattagaactaatttgactgtaaacacaaatatattagtacaaaatatgtgacatagaaagtgataatttcttgggtagtttgcagttttaaaattatgttttaaaatggactatcatctgcttaccgtaactttaaagtatttcgatttctttatatatcttgtggaaaggac

SEQ ID NO: 2013 - DNA, 236 bp, synthetic construct; identical to SEQ ID NO: 2012
  misc_feature 1..236: note = Promoter
  source 1..236: mol_type = other DNA

SEQ ID NO: 2014 - DNA, 236 bp, synthetic construct; identical to SEQ ID NO: 2012
  misc_feature 1..236: note = Promoter
  source 1..236: mol_type = other DNA

SEQ ID NO: 2015 - DNA, 236 bp, synthetic construct; identical to SEQ ID NO: 2012
  misc_feature 1..236: note = Promoter
  source 1..236: mol_type = other DNA

SEQ ID NO: 2016 - DNA, 236 bp, synthetic construct
  misc_feature 1..236: note = Promoter
  source 1..236: mol_type = other DNA
gagggcctatttcccatgattccttcatatttgcatataagatgcaaggctgttagagagataattagaactaatttgactgtaaacacaaatatattagtacaaaatatgtgacatagaaagtgataatttcttgggtagtttgcagttttaaaattatgttttaaaatggactatcatctgcttaccgtaactttaaagtatttcgatttcttgatatatcttgtggaaaggac

SEQ ID NO: 2017 - DNA, 236 bp, synthetic construct; identical to SEQ ID NO: 2016
  misc_feature 1..236: note = Promoter
  source 1..236: mol_type = other DNA

SEQ ID NO: 2018 - DNA, 236 bp, synthetic construct
  misc_feature 1..236: note = Promoter
  source 1..236: mol_type = other DNA
gagggcctatttcccatgattccttcatatttgcatataagatgcaaggctgttagagagataattagaactaatttgactgtaaacacaaatatattagtacaaaatatgtgacatagaaagtgataatttcttgggtagtttgcagttttaaaattatgttttaaaatggactatcatctgcttaccgtaactttaaagtatttcgatttcttgacatatcttgtggaaaggac

SEQ ID NO: 2019 - DNA, 236 bp, synthetic construct
  misc_feature 1..236: note = Promoter
  source 1..236: mol_type = other DNA
gagggcctatttcccatgattccttcatatttgcatataagatgcaaggctgttagagagataattagaactaatttgactgtaaacacaaatatattagtacaaaatatgtgacatagaaagtgataatttcttgggtagtttgcagttttaaaattatgttttaaaatggactatcatctgcttaccgtaactttaaagtatttcgatttcttgacttatcttgtggaaaggac

SEQ ID NO: 2020 - DNA, 236 bp, synthetic construct; identical to SEQ ID NO: 2019
  misc_feature 1..236: note = Promoter
  source 1..236: mol_type = other DNA

SEQ ID NO: 2021 - DNA, 236 bp, synthetic construct
  misc_feature 1..236: note = Promoter
  source 1..236: mol_type = other DNA
gagggcctatttcccatgattccttcatatttgcatataagatgcaaggctgttagagagataattagaactaatttgactgtaaacacaaatatattagtacaaaatatgtgacatagaaagtgataatttcttgggtagtttgcagttttaaaattatgttttaaaatggactatcatctgcttaccgtaactttaaagtatttcgatttcttgacttttcttgtggaaaggac

SEQ ID NO: 2022 - DNA, 236 bp, synthetic construct
  misc_feature 1..236: note = Promoter
  source 1..236: mol_type = other DNA
gagggcctatttcccatgattccttcatatttgcatataagatgcaaggctgttagagagataattagaactaatttgactgtaaacacaaatatattagtacaaaatatgtgacatagaaagtgataatttcttgggtagtttgcagttttaaaattatgttttaaaatggactatcatctgcttaccgtaactttaaagtatttcgatttcttgactttacttgtggaaaggac

SEQ ID NO: 2023 - DNA, 236 bp, synthetic construct
  misc_feature 1..236: note = Promoter
  source 1..236: mol_type = other DNA
gagggcctatttcccatgattccttcatatttgcatataagatgcaaggctgttagagagataattagaactaatttgactgtaaacacaaatatattagtacaaaatatgtgacatagaaagtgataatttcttgggtagtttgcagttttaaaattatgttttaaaatggactatcatctgcttaccgtaactttaaagtatttcgatttcttgactttatttgtggaaaggac

SEQ ID NO: 2024 - DNA, 236 bp, synthetic construct
  misc_feature 1..236: note = Promoter
  source 1..236: mol_type = other DNA
gagggcctatttcccatgattccttcatatttgcatataagatgcaaggctgttagagagataattagaactaatttgactgtaaacacaaatatattagtacaaaatatgtgacatagaaagtgataatttcttgggtagtttgcagttttaaaattatgttttaaaatggactatcatctgcttaccgtaactttaaagtatttcgatttcttgactttatatgtggaaaggac

SEQ ID NO: 2025 - DNA, 236 bp, synthetic construct; identical to SEQ ID NO: 2024
  misc_feature 1..236: note = Promoter
  source 1..236: mol_type = other DNA

SEQ ID NO: 2026 - DNA, 236 bp, synthetic construct
  misc_feature 1..236: note = Promoter
  source 1..236: mol_type = other DNA
gagggcctatttcccatgattccttcatatttgcatataagatgcaaggctgttagagagataattagaactaatttgactgtaaacacaaatatattagtacaaaatatgtgacatagaaagtgataatttcttgggtagtttgcagttttaaaattatgttttaaaatggactatcatctgcttaccgtaactttaaagtatttcgatttcttgactttatatatggaaaggac

SEQ ID NO: 2027 - DNA, 236 bp, synthetic construct; identical to SEQ ID NO: 2026
  misc_feature 1..236: note = Promoter
  source 1..236: mol_type = other DNA

SEQ ID NO: 2028 - DNA, 236 bp, synthetic construct
  misc_feature 1..236: note = Promoter
  source 1..236: mol_type = other DNA
gagggcctatttcccatgattccttcatatttgcatataagatgcaaggctgttagagagataattagaactaatttgactgtaaacacaaatatattagtacaaaatatgtgacatagaaagtgataatttcttgggtagtttgcagttttaaaattatgttttaaaatggactatcatctgcttaccgtaactttaaagtatttcgatttcttgactttatatatcgaaaggac

SEQ ID NO: 2029 - DNA, 236 bp, synthetic construct
  misc_feature 1..236: note = Promoter
  source 1..236: mol_type = other DNA
gagggcctatttcccatgattccttcatatttgcatataagatgcaaggctgttagagagataattagaactaatttgactgtaaacacaaatatattagtacaaaatatgtgacatagaaagtgataatttcttgggtagtttgcagttttaaaattatgttttaaaatggactatcatctgcttaccgtaactttaaagtatttcgatttcttgactttatatatctaaaggac

SEQ ID NO: 2030 - DNA, 236 bp, synthetic construct
  misc_feature 1..236: note = Promoter
  source 1..236: mol_type = other DNA
gagggcctatttcccatgattccttcatatttgcatataagatgcaaggctgttagagagataattagaactaatttgactgtaaacacaaatatattagtacaaaatatgtgacatagaaagtgataatttcttgggtagtttgcagttttaaaattatgttttaaaatggactatcatctgcttaccgtaactttaaagtatttcgatttcttgactttatatatcttaaggac

SEQ ID NO: 2031 - DNA, 236 bp, synthetic construct
  misc_feature 1..236: note = Promoter
  source 1..236: mol_type = other DNA
gagggcctatttcccatgattccttcatatttgcatataagatgcaaggctgttagagagataattagaactaatttgactgtaaacacaaatatattagtacaaaatatgtgacatagaaagtgataatttcttgggtagtttgcagttttaaaattatgttttaaaatggactatcatctgcttaccgtaactttaaagtatttcgatttcttgactttatatatcttgaggac

SEQ ID NO: 2032 - DNA, 236 bp, synthetic construct
  misc_feature 1..236: note = Promoter
  source 1..236: mol_type = other DNA
gagggcctatttcccatgattccttcatatttgcatataagatgcaaggctgttagagagataattagaactaatttgactgtaaacacaaatatattagtacaaaatatgtgacatagaaagtgataatttcttgggtagtttgcagttttaaaattatgttttaaaatggactatcatctgcttaccgtaactttaaagtatttcgatttcttgactttatatatcttgtggac

SEQ ID NO: 2033 - DNA, 236 bp, synthetic construct; identical to SEQ ID NO: 2032
  misc_feature 1..236: note = Promoter
  source 1..236: mol_type = other DNA

SEQ ID NO: 2034 - DNA, 236 bp, synthetic construct; identical to SEQ ID NO: 2032
  misc_feature 1..236: note = Promoter
  source 1..236: mol_type = other DNA

SEQ ID NO: 2035 - DNA, 236 bp, synthetic construct; identical to SEQ ID NO: 2032
  misc_feature 1..236: note = Promoter
  source 1..236: mol_type = other DNA

SEQ ID NO: 2036 - DNA, 236 bp, synthetic construct
  misc_feature 1..236: note = Promoter
  source 1..236: mol_type = other DNA
gagggcctatttcccatgattccttcatatttgcatataagatgcaaggctgttagagagataattagaactaatttgactgtaaacacaaatatattagtacaaaatatgtgacatagaaagtgataatttcttgggtagtttgcagttttaaaattatgttttaaaatggactatcatctgcttaccgtaactttaaagtatttcgatttcttgactttatatatcttgtggaa

SEQ ID NO: 2037 - DNA, 237 bp, synthetic construct
  misc_feature 1..237: note = Promoter
  source 1..237: mol_type = other DNA
gagggcctatttcccatgattccttcatatttgcatataagatgcaaggctgttagagagataattagaactaatttgactgtaaacacaaatatattagtacaaaatatgtgacatagaaagtgataatttcttgggtagtttgcagttttaaaattatgttttaaaatggactatcatctgcttaccgtaactttaaagtatttcgatttcttgactttatatatcttgtggaaa

SEQ ID NO: 2038 - DNA, 238 bp, synthetic construct
  misc_feature 1..238: note = Promoter
  source 1..238: mol_type = other DNA
gagggcctatttcccatgattccttcatatttgcatataagatgcaaggctgttagagagataattagaactaatttgactgtaaacacaaatatattagtacaaaatatgtgacatagaaagtgataatttcttgggtagtttgcagttttaaaattatgttttaaaatggactatcatctgcttaccgtaactttaaagtatttcgatttcttgactttatatatcttgtggaaag

SEQ ID NO: 2039 - DNA, 239 bp, synthetic construct; identical to SEQ ID NO: 1798
  misc_feature 1..239: note = Promoter
  source 1..239: mol_type = other DNA

SEQ ID NO: 2040 - DNA, 240 bp, synthetic construct; identical to SEQ ID NO: 1558
  misc_feature 1..240: note = Promoter
  source 1..240: mol_type = other DNA

SEQ ID NO: 2041 - DNA, 231 bp, synthetic construct
  misc_feature 1..231: note = Promoter
  source 1..231: mol_type = other DNA
ttcccatgattccttcatatttgcatataagatgcaaggctgttagagagataattagaactaatttgactgtaaacacaaatatattagtacaaaatatgtgacatagaaagtgataatttcttgggtagtttgcagttttaaaattatgttttaaaatggactatcatctgcttaccgtaactttaaagtatttcgatttcttgactttatatatcttgtggaaaggac

SEQ ID NO: 2042 - DNA, 231 bp, synthetic construct
  misc_feature 1..231: note = Promoter
  source 1..231: mol_type = other DNA
gtcccatgattccttcatatttgcatataagatgcaaggctgttagagagataattagaactaatttgactgtaaacacaaatatattagtacaaaatatgtgacatagaaagtgataatttcttgggtagtttgcagttttaaaattatgttttaaaatggactatcatctgcttaccgtaactttaaagtatttcgatttcttgactttatatatcttgtggaaaggac

SEQ ID NO: 2043 - DNA, 231 bp, synthetic construct
  misc_feature 1..231: note = Promoter
  source 1..231: mol_type = other DNA
gacccatgattccttcatatttgcatataagatgcaaggctgttagagagataattagaactaatttgactgtaaacacaaatatattagtacaaaatatgtgacatagaaagtgataatttcttgggtagtttgcagttttaaaattatgttttaaaatggactatcatctgcttaccgtaactttaaagtatttcgatttcttgactttatatatcttgtggaaaggac

SEQ ID NO: 2044 - DNA, 231 bp, synthetic construct
  misc_feature 1..231: note = Promoter
  source 1..231: mol_type = other DNA
gagccatgattccttcatatttgcatataagatgcaaggctgttagagagataattagaactaatttgactgtaaacacaaatatattagtacaaaatatgtgacatagaaagtgataatttcttgggtagtttgcagttttaaaattatgttttaaaatggactatcatctgcttaccgtaactttaaagtatttcgatttcttgactttatatatcttgtggaaaggac

SEQ ID NO: 2045 - DNA, 231 bp, synthetic construct
  misc_feature 1..231: note = Promoter
  source 1..231: mol_type = other DNA
gaggcatgattccttcatatttgcatataagatgcaaggctgttagagagataattagaactaatttgactgtaaacacaaatatattagtacaaaatatgtgacatagaaagtgataatttcttgggtagtttgcagttttaaaattatgttttaaaatggactatcatctgcttaccgtaactttaaagtatttcgatttcttgactttatatatcttgtggaaaggac

SEQ ID NO: 2046 - DNA, 231 bp, synthetic construct
  misc_feature 1..231: note = Promoter
  source 1..231: mol_type = other DNA
gagggatgattccttcatatttgcatataagatgcaaggctgttagagagataattagaactaatttgactgtaaacacaaatatattagtacaaaatatgtgacatagaaagtgataatttcttgggtagtttgcagttttaaaattatgttttaaaatggactatcatctgcttaccgtaactttaaagtatttcgatttcttgactttatatatcttgtggaaaggac

SEQ ID NO: 2047 - DNA, 231 bp, synthetic construct
  misc_feature 1..231: note = Promoter
  source 1..231: mol_type = other DNA
gagggctgattccttcatatttgcatataagatgcaaggctgttagagagataattagaactaatttgactgtaaacacaaatatattagtacaaaatatgtgacatagaaagtgataatttcttgggtagtttgcagttttaaaattatgttttaaaatggactatcatctgcttaccgtaactttaaagtatttcgatttcttgactttatatatcttgtggaaaggac

SEQ ID NO: 2048 - DNA, 231 bp, synthetic construct
  misc_feature 1..231: note = Promoter
  source 1..231: mol_type = other DNA
gagggccgattccttcatatttgcatataagatgcaaggctgttagagagataattagaactaatttgactgtaaacacaaatatattagtacaaaatatgtgacatagaaagtgataatttcttgggtagtttgcagttttaaaattatgttttaaaatggactatcatctgcttaccgtaactttaaagtatttcgatttcttgactttatatatcttgtggaaaggac

SEQ ID NO: 2049 - DNA, 231 bp, synthetic construct
  misc_feature 1..231: note = Promoter
  source 1..231: mol_type = other DNA
gagggcctattccttcatatttgcatataagatgcaaggctgttagagagataattagaactaatttgactgtaaacacaaatatattagtacaaaatatgtgacatagaaagtgataatttcttgggtagtttgcagttttaaaattatgttttaaaatggactatcatctgcttaccgtaactttaaagtatttcgatttcttgactttatatatcttgtggaaaggac

SEQ ID NO: 2050 - DNA, 231 bp, synthetic construct; identical to SEQ ID NO: 2049
  misc_feature 1..231: note = Promoter
  source 1..231: mol_type = other DNA

SEQ ID NO: 2051 - DNA, 231 bp, synthetic construct; identical to SEQ ID NO: 2049
  misc_feature 1..231: note = Promoter
  source 1..231: mol_type = other DNA

SEQ ID NO: 2052 - DNA, 231 bp, synthetic construct; identical to SEQ ID NO: 2049
  misc_feature 1..231: note = Promoter
  source 1..231: mol_type = other DNA

SEQ ID NO: 2053 - DNA, 231 bp, synthetic construct
  misc_feature 1..231: note = Promoter
  source 1..231: mol_type = other DNA
gagggcctatttcttcatatttgcatataagatgcaaggctgttagagagataattagaactaatttgactgtaaacacaaatatattagtacaaaatatgtgacatagaaagtgataatttcttgggtagtttgcagttttaaaattatgttttaaaatggactatcatctgcttaccgtaactttaaagtatttcgatttcttgactttatatatcttgtggaaaggac

SEQ ID NO: 2054 - DNA, 231 bp, synthetic construct; identical to SEQ ID NO: 2053
  misc_feature 1..231: note = Promoter
  source 1..231: mol_type = other DNA

SEQ ID NO: 2055 - DNA, 231 bp, synthetic construct
  misc_feature 1..231: note = Promoter
  source 1..231: mol_type = other DNA
gagggcctatttcctcatatttgcatataagatgcaaggctgttagagagataattagaactaatttgactgtaaacacaaatatattagtacaaaatatgtgacatagaaagtgataatttcttgggtagtttgcagttttaaaattatgttttaaaatggactatcatctgcttaccgtaactttaaagtatttcgatttcttgactttatatatcttgtggaaaggac

SEQ ID NO: 2056 - DNA, 231 bp, synthetic construct
  misc_feature 1..231: note = Promoter
  source 1..231: mol_type = other DNA
gagggcctatttccccatatttgcatataagatgcaaggctgttagagagataattagaactaatttgactgtaaacacaaatatattagtacaaaatatgtgacatagaaagtgataatttcttgggtagtttgcagttttaaaattatgttttaaaatggactatcatctgcttaccgtaactttaaagtatttcgatttcttgactttatatatcttgtggaaaggac

SEQ ID NO: 2057 - DNA, 231 bp, synthetic construct
  misc_feature 1..231: note = Promoter
  source 1..231: mol_type = other DNA
gagggcctatttcccaatatttgcatataagatgcaaggctgttagagagataattagaactaatttgactgtaaacacaaatatattagtacaaaatatgtgacatagaaagtgataatttcttgggtagtttgcagttttaaaattatgttttaaaatggactatcatctgcttaccgtaactttaaagtatttcgatttcttgactttatatatcttgtggaaaggac

SEQ ID NO: 2058 - DNA, 231 bp, synthetic construct
  misc_feature 1..231: note = Promoter
  source 1..231: mol_type = other DNA
gagggcctatttcccattatttgcatataagatgcaaggctgttagagagataattagaactaatttgactgtaaacacaaatatattagtacaaaatatgtgacatagaaagtgataatttcttgggtagtttgcagttttaaaattatgttttaaaatggactatcatctgcttaccgtaactttaaagtatttcgatttcttgactttatatatcttgtggaaaggac

SEQ ID NO: 2059 - DNA, 231 bp, synthetic construct
  misc_feature 1..231: note = Promoter
  source 1..231: mol_type = other DNA
gagggcctatttcccatgatttgcatataagatgcaaggctgttagagagataattagaactaatttgactgtaaacacaaatatattagtacaaaatatgtgacatagaaagtgataatttcttgggtagtttgcagttttaaaattatgttttaaaatggactatcatctgcttaccgtaactttaaagtatttcgatttcttgactttatatatcttgtggaaaggac

SEQ ID NO: 2060 - DNA, 231 bp, synthetic construct; identical to SEQ ID NO: 2059
  misc_feature 1..231: note = Promoter
  source 1..231: mol_type = other DNA

SEQ ID NO: 2061 - DNA, 231 bp, synthetic construct; identical to SEQ ID NO: 2059
  misc_feature 1..231: note = Promoter
  source 1..231: mol_type = other DNA

SEQ ID NO: 2062 - DNA, 231 bp, synthetic construct; identical to SEQ ID NO: 2059
  misc_feature 1..231: note = Promoter
  source 1..231: mol_type = other DNA

SEQ ID NO: 2063 - DNA, 231 bp, synthetic construct
  misc_feature 1..231: note = Promoter
  source 1..231: mol_type = other DNA
gagggcctatttcccatgattcgcatataagatgcaaggctgttagagagataattagaactaatttgactgtaaacacaaatatattagtacaaaatatgtgacatagaaagtgataatttcttgggtagtttgcagttttaaaattatgttttaaaatggactatcatctgcttaccgtaactttaaagtatttcgatttcttgactttatatatcttgtggaaaggac

SEQ ID NO: 2064 - DNA, 231 bp, synthetic construct
  misc_feature 1..231: note = Promoter
  source 1..231: mol_type = other DNA
gagggcctatttcccatgattcccatataagatgcaaggctgttagagagataattagaactaatttgactgtaaacacaaatatattagtacaaaatatgtgacatagaaagtgataatttcttgggtagtttgcagttttaaaattatgttttaaaatggactatcatctgcttaccgtaactttaaagtatttcgatttcttgactttatatatcttgtggaaaggac

SEQ ID NO: 2065 - DNA, 231 bp, synthetic construct
  misc_feature 1..231: note = Promoter
  source 1..231: mol_type = other DNA
gagggcctatttcccatgattcctatataagatgcaaggctgttagagagataattagaactaatttgactgtaaacacaaatatattagtacaaaatatgtgacatagaaagtgataatttcttgggtagtttgcagttttaaaattatgttttaaaatggactatcatctgcttaccgtaactttaaagtatttcgatttcttgactttatatatcttgtggaaaggac

SEQ ID NO: 2066 - DNA, 231 bp, synthetic construct
  misc_feature 1..231: note = Promoter
  source 1..231: mol_type = other DNA
gagggcctatttcccatgattcctttataagatgcaaggctgttagagagataattagaactaatttgactgtaaacacaaatatattagtacaaaatatgtgacatagaaagtgataatttcttgggtagtttgcagttttaaaattatgttttaaaatggactatcatctgcttaccgtaactttaaagtatttcgatttcttgactttatatatcttgtggaaaggac

SEQ ID NO: 2067 - DNA, 231 bp, synthetic construct
  misc_feature 1..231: note = Promoter
  source 1..231: mol_type = other DNA
gagggcctatttcccatgattccttcataagatgcaaggctgttagagagataattagaactaatttgactgtaaacacaaatatattagtacaaaatatgtgacatagaaagtgataatttcttgggtagtttgcagttttaaaattatgttttaaaatggactatcatctgcttaccgtaactttaaagtatttcgatttcttgactttatatatcttgtggaaaggac

SEQ ID NO: 2068 - DNA, 231 bp, synthetic construct; identical to SEQ ID NO: 2067
  misc_feature 1..231: note = Promoter
  source 1..231: mol_type = other DNA

SEQ ID NO: 2069 - DNA, 231 bp, synthetic construct; identical to SEQ ID NO: 2067
  misc_feature 1..231: note = Promoter
  source 1..231: mol_type = other DNA

SEQ ID NO: 2070 - DNA, 231 bp, synthetic construct; identical to SEQ ID NO: 2067
  misc_feature 1..231: note = Promoter
  source 1..231: mol_type = other DNA

SEQ ID NO: 2071 - DNA, 231 bp, synthetic construct
  misc_feature 1..231: note = Promoter
  source 1..231: mol_type = other DNA
gagggcctatttcccatgattccttcatatgatgcaaggctgttagagagataattagaactaatttgactgtaaacacaaatatattagtacaaaatatgtgacatagaaagtgataatttcttgggtagtttgcagttttaaaattatgttttaaaatggactatcatctgcttaccgtaactttaaagtatttcgatttcttgactttatatatcttgtggaaaggac

SEQ ID NO: 2072 - DNA, 231 bp, synthetic construct
  misc_feature 1..231: note = Promoter
  source 1..231: mol_type = other DNA
gagggcctatttcccatgattccttcatattatgcaaggctgttagagagataattagaactaatttgactgtaaacacaaatatattagtacaaaatatgtgacatagaaagtgataatttcttgggtagtttgcagttttaaaattatgttttaaaatggactatcatctgcttaccgtaactttaaagtatttcgatttcttgactttatatatcttgtggaaaggac

SEQ ID NO: 2073 - DNA, 231 bp, synthetic construct
  misc_feature 1..231: note = Promoter
  source 1..231: mol_type = other DNA
gagggcctatttcccatgattccttcatattttgcaaggctgttagagagataattagaactaatttgactgtaaacacaaatatattagtacaaaatatgtgacatagaaagtgataatttcttgggtagtttgcagttttaaaattatgttttaaaatggactatcatctgcttaccgtaactttaaagtatttcgatttcttgactttatatatcttgtggaaaggac

SEQ ID NO: 2074 - DNA, 231 bp, synthetic construct
  misc_feature 1..231: note = Promoter
  source 1..231: mol_type = other DNA
gagggcctatttcccatgattccttcatatttggcaaggctgttagagagataattagaactaatttgactgtaaacacaaatatattagtacaaaatatgtgacatagaaagtgataatttcttgggtagtttgcagttttaaaattatgttttaaaatggactatcatctgcttaccgtaactttaaagtatttcgatttcttgactttatatatcttgtggaaaggac

SEQ ID NO: 2075 - DNA, 231 bp, synthetic construct
  misc_feature 1..231: note = Promoter
  source 1..231: mol_type = other DNA
gagggcctatttcccatgattccttcatatttgccaaggctgttagagagataattagaactaatttgactgtaaacacaaatatattagtacaaaatatgtgacatagaaagtgataatttcttgggtagtttgcagttttaaaattatgttttaaaatggactatcatctgcttaccgtaactttaaagtatttcgatttcttgactttatatatcttgtggaaaggac

SEQ ID NO: 2076 - DNA, 231 bp, synthetic construct
  misc_feature 1..231: note = Promoter
  source 1..231: mol_type = other DNA
gagggcctatttcccatgattccttcatatttgcaaaggctgttagagagataattagaactaatttgactgtaaacacaaatatattagtacaaaatatgtgacatagaaagtgataatttcttgggtagtttgcagttttaaaattatgttttaaaatggactatcatctgcttaccgtaactttaaagtatttcgatttcttgactttatatatcttgtggaaaggac

SEQ ID NO: 2077 - DNA, 231 bp, synthetic construct
  misc_feature 1..231: note = Promoter
  source 1..231: mol_type = other DNA
gagggcctatttcccatgattccttcatatttgcataggctgttagagagataattagaactaatttgactgtaaacacaaatatattagtacaaaatatgtgacatagaaagtgataatttcttgggtagtttgcagttttaaaattatgttttaaaatggactatcatctgcttaccgtaactttaaagtatttcgatttcttgactttatatatcttgtggaaaggac

SEQ ID NO: 2078 - DNA, 231 bp, synthetic construct; identical to SEQ ID NO: 2077
  misc_feature 1..231: note = Promoter
  source 1..231: mol_type = other DNA

SEQ ID NO: 2079 - DNA, 231 bp, synthetic construct
  misc_feature 1..231: note = Promoter
  source 1..231: mol_type = other DNA
gagggcctatttcccatgattccttcatatttgcatatgctgttagagagataattagaactaatttgactgtaaacacaaatatattagtacaaaatatgtgacatagaaagtgataatttcttgggtagtttgcagttttaaaattatgttttaaaatggactatcatctgcttaccgtaactttaaagtatttcgatttcttgactttatatatcttgtggaaaggac

SEQ ID NO: 2080 - DNA, 231 bp, synthetic construct
  misc_feature 1..231: note = Promoter
  source 1..231: mol_type = other DNA
gagggcctatttcccatgattccttcatatttgcatatactgttagagagataattagaactaatttgactgtaaacacaaatatattagtacaaaatatgtgacatagaaagtgataatttcttgggtagtttgcagttttaaaattatgttttaaaatggactatcatctgcttaccgtaactttaaagtatttcgatttcttgactttatatatcttgtggaaaggac

SEQ ID NO: 2081 - DNA, 231 bp, synthetic construct
  misc_feature 1..231: note = Promoter
  source 1..231: mol_type = other DNA
gagggcctatttcccatgattccttcatatttgcatataatgttagagagataattagaactaatttgactgtaaacacaaatatattagtacaaaatatgtgacatagaaagtgataatttcttgggtagtttgcagttttaaaattatgttttaaaatggactatcatctgcttaccgtaactttaaagtatttcgatttcttgactttatatatcttgtggaaaggac

SEQ ID NO: 2082 - DNA, 231 bp, synthetic construct
  misc_feature 1..231: note = Promoter
  source 1..231: mol_type = other DNA
gagggcctatttcccatgattccttcatatttgcatataaggttagagagataattagaactaatttgactgtaaacacaaatatattagtacaaaatatgtgacatagaaagtgataatttcttgggtagtttgcagttttaaaattatgttttaaaatggactatcatctgcttaccgtaactttaaagtatttcgatttcttgactttatatatcttgtggaaaggac

SEQ ID NO: 2083 - DNA, 231 bp, synthetic construct
  misc_feature 1..231: note = Promoter
  source 1..231: mol_type = other DNA
gagggcctatttcccatgattccttcatatttgcatataagattagagagataattagaactaatttgactgtaaacacaaatatattagtacaaaatatgtgacatagaaagtgataatttcttgggtagtttgcagttttaaaattatgttttaaaatggactatcatctgcttaccgtaactttaaagtatttcgatttcttgactttatatatcttgtggaaaggac

SEQ ID NO: 2084 - DNA, 231 bp, synthetic construct; identical to SEQ ID NO: 2083
  misc_feature 1..231: note = Promoter
  source 1..231: mol_type = other DNA

SEQ ID NO: 2085 - DNA, 231 bp, synthetic construct
  misc_feature 1..231: note = Promoter
  source 1..231: mol_type = other DNA
gagggcctatttcccatgattccttcatatttgcatataagatgagagagataattagaactaatttgactgtaaacacaaatatattagtacaaaatatgtgacatagaaagtgataatttcttgggtagtttgcagttttaaaattatgttttaaaatggactatcatctgcttaccgtaactttaaagtatttcgatttcttgactttatatatcttgtggaaaggac

SEQ ID NO: 2086 - DNA, 231 bp, synthetic construct
  misc_feature 1..231: note = Promoter
  source 1..231: mol_type = other DNA
gagggcctatttcccatgattccttcatatttgcatataagatgcgagagataattagaactaatttgactgtaaacacaaatatattagtacaaaatatgtgacatagaaagtgataatttcttgggtagtttgcagttttaaaattatgttttaaaatggactatcatctgcttaccgtaactttaaagtatttcgatttcttgactttatatatcttgtggaaaggac

SEQ ID NO: 2087 - DNA, 231 bp, synthetic construct
  misc_feature 1..231: note = Promoter
  source 1..231: mol_type = other DNA
gagggcctatttcccatgattccttcatatttgcatataagatgcaagagataattagaactaatttgactgtaaacacaaatatattagtacaaaatatgtgacatagaaagtgataatttcttgggtagtttgcagttttaaaattatgttttaaaatggactatcatctgcttaccgtaactttaaagtatttcgatttcttgactttatatatcttgtggaaaggac

SEQ ID NO: 2088 - DNA, 231 bp, synthetic construct; identical to SEQ ID NO: 2087
  misc_feature 1..231: note = Promoter
  source 1..231: mol_type = other DNA

SEQ ID NO: 2089 - DNA, 231 bp, synthetic construct; identical to SEQ ID NO: 2087
  misc_feature 1..231: note = Promoter
  source 1..231: mol_type = other DNA

SEQ ID NO: 2090 - DNA, 231 bp, synthetic construct
  misc_feature 1..231: note = Promoter
  source 1..231: mol_type = other DNA
gagggcctatttcccatgattccttcatatttgcatataagatgcaagggataattagaactaatttgactgtaaacacaaatatattagtacaaaatatgtgacatagaaagtgataatttcttgggtagtttgcagttttaaaattatgttttaaaatggactatcatctgcttaccgtaactttaaagtatttcgatttcttgactttatatatcttgtggaaaggac

SEQ ID NO: 2091 - DNA, 231 bp, synthetic construct
  misc_feature 1..231: note = Promoter
  source 1..231: mol_type = other DNA
gagggcctatttcccatgattccttcatatttgcatataagatgcaaggcataattagaactaatttgactgtaaacacaaatatattagtacaaaatatgtgacatagaaagtgataatttcttgggtagtttgcagttttaaaattatgttttaaaatggactatcatctgcttaccgtaactttaaagtatttcgatttcttgactttatatatcttgtggaaaggac

SEQ ID NO: 2092 - DNA, 231 bp, synthetic construct
  misc_feature 1..231: note = Promoter
  source 1..231: mol_type = other DNA
gagggcctatttcccatgattccttcatatttgcatataagatgcaaggcttaattagaactaatttgactgtaaacacaaatatattagtacaaaatatgtgacatagaaagtgataatttcttgggtagtttgcagttttaaaattatgttttaaaatggactatcatctgcttaccgtaactttaaagtatttcgatttcttgactttatatatcttgtggaaaggac

SEQ ID NO: 2093 - DNA, 231 bp, synthetic construct
  misc_feature 1..231: note = Promoter
  source 1..231: mol_type = other DNA
gagggcctatttcccatgattccttcatatttgcatataagatgcaaggctgaattagaactaatttgactgtaaacacaaatatattagtacaaaatatgtgacatagaaagtgataatttcttgggtagtttgcagttttaaaattatgttttaaaatggactatcatctgcttaccgtaactttaaagtatttcgatttcttgactttatatatcttgtggaaaggac

SEQ ID NO: 2094 - DNA, 231 bp, synthetic construct
  misc_feature 1..231: note = Promoter
  source 1..231: mol_type = other DNA
gagggcctatttcccatgattccttcatatttgcatataagatgcaaggctgtattagaactaatttgactgtaaacacaaatatattagtacaaaatatgtgacatagaaagtgataatttcttgggtagtttgcagttttaaaattatgttttaaaatggactatcatctgcttaccgtaactttaaagtatttcgatttcttgactttatatatcttgtggaaaggac

SEQ ID NO: 2095 - DNA, 231 bp, synthetic construct
  misc_feature 1..231: note = Promoter
  source 1..231: mol_type = other DNA
gagggcctatttcccatgattccttcatatttgcatataagatgcaaggctgttttagaactaatttgactgtaaacacaaatatattagtacaaaatatgtgacatagaaagtgataatttcttgggtagtttgcagttttaaaattatgttttaaaatggactatcatctgcttaccgtaactttaaagtatttcgatttcttgactttatatatcttgtggaaaggac

SEQ ID NO: 2096 - DNA, 231 bp, synthetic construct
  misc_feature 1..231: note = Promoter
  source 1..231: mol_type = other DNA
gagggcctatttcccatgattccttcatatttgcatataagatgcaaggctgttatagaactaatttgactgtaaacacaaatatattagtacaaaatatgtgacatagaaagtgataatttcttgggtagtttgcagttttaaaattatgttttaaaatggactatcatctgcttaccgtaactttaaagtatttcgatttcttgactttatatatcttgtggaaaggac

SEQ ID NO: 2097 - DNA, 231 bp, synthetic construct
  misc_feature 1..231: note = Promoter
  source 1..231: mol_type = other DNA
gagggcctatttcccatgattccttcatatttgcatataagatgcaaggctgttagagaactaatttgactgtaaacacaaatatattagtacaaaatatgtgacatagaaagtgataatttcttgggtagtttgcagttttaaaattatgttttaaaatggactatcatctgcttaccgtaactttaaagtatttcgatttcttgactttatatatcttgtggaaaggac

SEQ ID NO: 2098 - DNA, 231 bp, synthetic construct; identical to SEQ ID NO: 2097
  misc_feature 1..231: note = Promoter
  source 1..231: mol_type = other DNA

SEQ ID NO: 2099 - DNA, 231 bp, synthetic construct; identical to SEQ ID NO: 2097
  misc_feature 1..231: note = Promoter
  source 1..231: mol_type = other DNA

SEQ ID NO: 2100 - DNA, 231 bp, synthetic construct; identical to SEQ ID NO: 2097
  misc_feature 1..231: note = Promoter
  source 1..231: mol_type = other DNA

SEQ ID NO: 2101 - RNA, 108 nt, synthetic construct
  misc_feature 1..108: note = gNA Variant Scaffold
  source 1..108: mol_type = other RNA
tactggcgcttttatctcattactttgagagccatcaccagcgactatgtcgtatgggtaaagcgcaggtgggacgacctctcggtcgtcctatctgaagcatcaaag

SEQ ID NO: 2102 - RNA, 99 nt, synthetic construct
  misc_feature 1..99: note = gNA Variant Scaffold
  source 1..99: mol_type = other RNA
tactggcgcttttatctcattactttgagagccatcaccagcgactatgtcgtatgggtaaagcgctgctcgacgcgtcctcgagcagaagcatcaaag

SEQ ID NO: 2103 - RNA, 97 nt, synthetic construct
  misc_feature 1..97: note = gNA Variant Scaffold
  source 1..97: mol_type = other RNA
tactggcgcttttatctcattactttgagagccatcaccagcgactatgtcgtatgggtaaagcgctgctcgctccgttcgagcagaagcatcaaag

SEQ ID NO: 2104 - RNA, 91 nt, synthetic construct
  misc_feature 1..91: note = gNA Variant Scaffold
  source 1..91: mol_type = other RNA
gtactggcgcttttatctcattactttgagagccatcaccagcgactatgtcgtatgggtaaagcgccctcttcggagggaagcatcaaag

SEQ ID NO: 2105 - RNA, 99 nt, synthetic construct
  misc_feature 1..99: note = gNA Variant Scaffold
  source 1..99: mol_type = other RNA
tactggcgcttttatctcattactttgagagccatcaccagcgactatgtcgtatgggtaaagcgcaggagtttctatggaaaccctgaagcatcaaag

SEQ ID NO: 2106 - RNA, 99 nt, synthetic construct
  misc_feature 1..99: note = gNA Variant Scaffold
  source 1..99: mol_type = other RNA
gtactggcgcctttatctcattactttgagagccatcaccagcgactatgtcgtatgggtaaagcgcttacggacttcggtccgtaagaagcatcaaag

SEQ ID NO: 2107 - RNA, 90 nt, synthetic construct
  misc_feature 1..90: note = gNA Variant Scaffold
  source 1..90: mol_type = other RNA
tactggcgcttttatctcattactttgagagccatcaccagcgactatgtcgtatgggtaaagcgctgcgcttgcgcagaagcatcaaag

SEQ ID NO: 2108 - RNA, 108 nt, synthetic construct
  misc_feature 1..108: note = gNA Variant Scaffold
  source 1..108: mol_type = other RNA
tactggcgcttttatctgattactttgagagccatcaccagcgactatgtcgtatgggtaaagcgcttatttatcggagagaaatccgataaataagaagcatcaaag

SEQ ID NO: 2109 - RNA, 108 nt, synthetic construct
  misc_feature 1..108: note = gNA Variant Scaffold
  source 1..108: mol_type = other RNA
tactggcgcttttatcgcattactttgagagccatcaccagcgactatgtcgtatgggtaaagcgcttatttatcggagagaaatccgataaataagaagcatcaaag

SEQ ID NO: 2110 - RNA, 110 nt, synthetic construct
  misc_feature 1..110: note = gNA Variant Scaffold
  source 1..110: mol_type = other RNA
tactggcgcttttatctcattactttgagagccatcaccagcgactatgtcgtatgggtaaagcgcttatttatcggagacttcggtccgataaataagaagcatcaaag

SEQ ID NO: 2111 - RNA, 97 nt, synthetic construct
  misc_feature 1..97: note = gNA Variant Scaffold
  source 1..97: mol_type = other RNA
tactggcgcttttatctcattactttgagagccatcaccagcgactatgtcgtatgggtaaagcgcacatgaggattacccatgtgaagcatcaaag

SEQ ID NO: 2112 - RNA, 106 nt, synthetic construct
  misc_feature 1..106: note = gNA Variant Scaffold
  source 1..106: mol_type = other RNA
gctggcgcttttatctcattactttgagagccatcaccagcgactatgtcgtatgggtaaagcgcttatttatcgtgagaaatccgataaataagaagcatcaaag

SEQ ID NO: 2113 - RNA, 96 nt, synthetic construct
  misc_feature 1..96: note = gNA Variant Scaffold
  source 1..96: mol_type = other RNA
tactggcgcttttatctcattactttgagagccatcaccagcgactatgtcgtatgggtaaagcgctgcatgtctaagacagcagaagcatcaaag

SEQ ID NO: 2114 - RNA, 90 nt, synthetic construct
  misc_feature 1..90: note = gNA Variant Scaffold
  source 1..90: mol_type = other RNA
tactggcgcttttatctcattactttgagagccatcaccagcgactatgtcgtatgggtaaagcgcagggcttcggccgaagcatcaaag

SEQ ID NO: 2115 - RNA, 98 nt, synthetic construct
  misc_feature 1..98: note = gNA Variant Scaffold
  source 1..98: mol_type = other RNA
tactggcgcttttatctcattactttgagagccatcaccagcgactatgtcgtatgggtaaagcgcaatccattgcactccggattgaagcatcaaag

SEQ ID NO: 2116 - RNA, 108 nt, synthetic construct
  misc_feature 1..108: note = gNA Variant Scaffold
  source 1..108: mol_type = other RNA
tactggcgcttttctcgcattactttgagagccatcaccagcgactatgtcgtatgggtaaagcgcttatttatcggagagaaatccgataaataagaagcatcaaag

SEQ ID NO: 2117 - RNA, 108 nt, synthetic construct
  misc_feature 1..108: note = gNA Variant Scaffold
  source 1..108: mol_type = other RNA
tactggcgcttttatctcattactttgagagccatcaccagcgactatgtcgtatgggtaaagcgcttatttatcggacttcggtccgataaataagaagcatcaaag

SEQ ID NO: 2118 - RNA, 100 nt, synthetic construct
  misc_feature 1..100: note = gNA Variant Scaffold
  source 1..100: mol_type = other RNA
tactggcgcttttatctcattactttgagagccatcaccagcgactatgtcgtatgggtaaagcgctgctcgtttgcggctacgagcagaagcatcaaag

SEQ ID NO: 2119 - RNA, 100 nt, synthetic construct
  misc_feature 1..100: note = gNA Variant Scaffold
  source 1..100: mol_type = other RNA
tactggcgcttttatctcattactttgagagccatcaccagcgactatgtcgtatgggtaaagcgcttatttatcgagagataaataagaagcatcaaag

SEQ ID NO: 2120 - RNA, 107 nt, synthetic construct
  misc_feature 1..107: note = gNA Variant Scaffold
  source 1..107: mol_type = other RNA
tacggcgcttttatctcattactttgagagccatcaccagcgactatgtcgtatgggtaaagcgcttatttatcggagagaaatccgataaataagaagcatcaaag

SEQ ID NO: 2121 - RNA, 99 nt, synthetic construct
  misc_feature 1..99: note = gNA Variant Scaffold
  source 1..99: mol_type = other RNA
tactggcgccttttatctcattactttgagagccatcaccagcgactatgtcgtatgggtaaagcgcttacggacttcggtccgtaagaagcatcaaag

SEQ ID NO: 2122 - RNA, 108 nt, synthetic construct
  misc_feature 1..108: note = gNA Variant Scaffold
  source 1..108: mol_type = other RNA
tactggcgcttttatctcattactttgagagccatcaccagcgactatgtcgtatcggtaaagcgcttatttatcggagagaaatccgataaataagaagcatcaaag

SEQ ID NO: 2123 - RNA, 108 nt, synthetic construct
  misc_feature 1..108: note = gNA Variant Scaffold
  source 1..108: mol_type = other RNA
tactggcgcctttatctcattactttgagagccatcaccagcgactatgtcgtatgggtaaagcgcttatttatcggacttcggtccgataaataagaagcatcaaag

SEQ ID NO: 2124 - RNA, 105 nt, synthetic construct
  misc_feature 1..105: note = gNA Variant Scaffold
  source 1..105: mol_type = other RNA
tactggcgcttttatctcattactttgagagccatcaccagcgactatgtcgtatgggtaaagcgcttatttatcgagaaatccgataaataagaagcatcaaag

SEQ ID NO: 2125 - RNA, 103 nt, synthetic construct
  misc_feature 1..103: note = gNA Variant Scaffold
  source 1..103: mol_type = other RNA
gcgcttttatctcattactttgagagccatcaccagcgactatgtcgtatgggtaaagcgcttatttatcggagagaaatccgataaataagaagcatcaaag

SEQ ID NO: 2126 - RNA, 103 nt, synthetic construct
  misc_feature 1..103: note = gNA Variant Scaffold
  source 1..103: mol_type = other RNA
tactggcgcttttatctcattactttgagagccatcaccagcgactatgtcgtatgggtaaagcgcttatttatcggagagagataaataagaagcatcaaag

SEQ ID NO: 2127 - RNA, 108 nt, synthetic construct
  misc_feature 1..108: note = gNA Variant Scaffold
  source 1..108: mol_type = other RNA
tactggcgcttttatctcattactttggagagccatcaccagcgactatgtcgtatgggtaaagcgcttatttatcggagagtatccgataaataagaagcatcaaag

SEQ ID NO: 2128 - RNA, 109 nt, synthetic construct
  misc_feature 1..109: note = gNA Variant Scaffold
  source 1..109: mol_type = other RNA
tactggcgcttttatctcattactttgagagccatcaccagcgactatgttcgtatgggtaaagcgcttatttatcggagagaaatccgataaataagaagcatcaaag

SEQ ID NO: 2129 - RNA, 105 nt, synthetic construct
  misc_feature 1..105: note = gNA Variant Scaffold
  source 1..105: mol_type = other RNA
agcgcttttatctcattactttgagagccatcaccagcgactatgtcgtatgggtaaagcgcttatttatcggagagaaatgccgataaataagaagcatcaaag

SEQ ID NO: 2130 - RNA, 109 nt, synthetic construct
  misc_feature 1..109: note = gNA Variant Scaffold
  source 1..109: mol_type = other RNA
tactggcgcttttatctcattactttgagagccatcaccagcgactatgtcgtatgggtaaagcgcttatttatcggagagaaatccgataaaataagaagcatcaaag

SEQ ID NO: 2131 - RNA, 109 nt, synthetic construct
  misc_feature 1..109: note = gNA Variant Scaffold
  source 1..109: mol_type = other RNA
tactggcgcttttatctcattactttgagagccatcaccagcgactatgtcgtatgggtaaagcgcttattgtatcggagagaaatccgataaataagaagcatcaaag

SEQ ID NO: 2132 - RNA, 102 nt, synthetic construct
  misc_feature 1..102: note = gNA Variant Scaffold
  source 1..102: mol_type = other RNA
gcgcttttatctcattactttgagagccatcaccagcgactatgtcgtatgggtaaagcgcttatttatcggacttcggtccgataaataagcgcatcaaag

SEQ ID NO: 2133 - RNA, 108 nt, synthetic construct
  misc_feature 1..108: note = gNA Variant Scaffold
  source 1..108: mol_type = other RNA
tactggcgcttttctctcattactttgagagccatcaccagcgactatgtcgtatgggtaaagcgcttatttatcggagagaaatccgataaataagaagcatcaaag

SEQ ID NO: 2134 - RNA, 106 nt, synthetic construct
  misc_feature 1..106: note = gNA Variant Scaffold
  source 1..106: mol_type = other RNA
gtggcgcttttatctcattactttgagagccatcaccagcgactatgtcgtatgggtaaagcgcttatttatcggagagaaatccgataaataagaagcatcaaag

SEQ ID NO: 2135 - RNA, 110 nt, synthetic construct
  misc_feature 1..110: note = gNA Variant Scaffold
  source 1..110: mol_type = other RNA
tactggcgcttttatctcattactttgagagccatcaccagcgaccttatgtcgtatgggtaaagcgcttatttatcggagagaaatccgataaataagaagcatcaaag

SEQ ID NO: 2136 - RNA, 107 nt, synthetic construct
  misc_feature 1..107: note = gNA Variant Scaffold
  source 1..107: mol_type = other RNA
gatggcgcttttatctcattactttgagagccatcaccagcgactatgtcgtatgggtaaagcgcttatttatcggacttcggtccgataaataagaagcatcaaag

SEQ ID NO: 2137 - RNA, 106 nt, synthetic construct
  misc_feature 1..106: note = gNA Variant Scaffold
  source 1..106: mol_type = other RNA
tactggcgcttttatctcattactttgagagccatcaccagcgactatgtcgtatgggtaaagcgcttatttatcggagagaaatccgataaaagaagcatcaaag

SEQ ID NO: 2138 - RNA, 109 nt, synthetic construct
  misc_feature 1..109: note = gNA Variant Scaffold
  source 1..109: mol_type = other RNA
tactggcgcttttatctcattactttgagagccatcaccagcgatctatgtcgtatgggtaaagcgcttatttatcggagagaaatccgataaataagaagcatcaaag

SEQ ID NO: 2139 - RNA, 106 nt, synthetic construct
  misc_feature 1..106: note = gNA Variant Scaffold
  source 1..106: mol_type = other RNA
tactggcgcttttatctcattactttgagagccatcaccagcgactatgtcgtatgggtaaaggcttatttatcggagagaaatccgataaaaagaagcatcaaag

SEQ ID NO: 2140 - RNA, 107 nt, synthetic construct
  misc_feature 1..107: note = gNA Variant Scaffold
  source 1..107: mol_type = other RNA
tactggcgcttttatctcattactttgagagccatcaccagcgactatgtcgtatgggtaaagcgcttatttatcggagagaaatccgataaaaagaagcatcaaag

SEQ ID NO: 2141 - RNA, 107 nt, synthetic construct
  misc_feature 1..107: note = gNA Variant Scaffold
  source 1..107: mol_type = other RNA
tactggcgctttatctcattactttgagagccatcaccagcgactatgtcgtatgggtaaagcgcttatttatcggacttcggtccgataaataagaagcatcaaag

SEQ ID NO: 2142 - RNA, 98 nt, synthetic construct
  misc_feature 1..98: note = gNA Variant Scaffold
  source 1..98: mol_type = other RNA
cggcgcttttctcgcattactttgagagccatcaccagcgactatgtcgtatgggtaaagcgcttattgtatcgagagataaataagaagcatcaaag

SEQ ID NO: 2143 - RNA, 107 nt, synthetic construct
  misc_feature 1..107: note = gNA Variant Scaffold
  source 1..107: mol_type = other RNA
cactggcgcttttatctcattactttgagagccatcaccagcgactatgtcgtatgggtaaagcgcttattttcggagagaaatccgataaataagaagcatcaaag

SEQ ID NO: 2144 - RNA, 106 nt, synthetic construct
  misc_feature 1..106: note = gNA Variant Scaffold
  source 1..106: mol_type = other RNA
tactggcgctttatctcattactttgagagccatcaccagcgacttcggtcgtatgggtaaagcgcttatgtatcggcttcggccgatacataagaagcatcaaag

SEQ ID NO: 2145 - RNA, 107 nt, synthetic construct
  misc_feature 1..107: note = gNA Variant Scaffold
  source 1..107: mol_type = other RNA
tactggcgcttttatctcattactttgagagccatcaccagcgacttcggtcgtatgggtaaagcgcttatgtatcggcttcggccgatacataagaagcatcaaag

SEQ ID NO: 2146 - RNA, 109 nt, synthetic construct
  misc_feature 1..109: note = gNA Variant Scaffold
  source 1..109: mol_type = other RNA
tactggcgcttttatctcattactttgagagccatcaccagcgactatgtcgtatgggtgaaagcgcttatttatcggagagaaatccgataaataagaagcatcaaag

SEQ ID NO: 2147 - RNA, 64 nt, synthetic construct
  misc_feature 1..64: note = gNA Variant Scaffold
  source 1..64: mol_type = other RNA
tactggcgcttttatctcattactttgagagccatcaccagcgacttcggtcgtatgggtaaag

SEQ ID NO: 2148 - RNA, 62 nt, synthetic construct
  misc_feature 1..62: note = gNA Variant Scaffold
  source 1..62: mol_type = other RNA
gatgggcttttatctcattactttgagagccatcaccagcgacttcggtcgtatgggtaaag

SEQ ID NO: 2149 - RNA, 105 nt, synthetic construct
  misc_feature 1..105: note = gNA Variant Scaffold
  source 1..105: mol_type = other RNA
gatgggcttttatctcattactttgagagccatcaccagcgacttcggtcgtatgggtaaagcgcttatttatcggcttcggccgataaataagaagcatcaaag

SEQ ID NO: 2150 - RNA, 156 nt, synthetic construct
  misc_feature 1..156: note = gNA Variant Scaffold
  source 1..156: mol_type = other RNA
tactggcgcttttatctcattactttgagagccatcaccagcgactatgtcgtatgggtaaagcgctacactgggatcgctgaattagagatcggcgtcctttcattctatatactttggagttttaaaatgtctctaagtacagaagcatcaaag

SEQ ID NO: 2151 - RNA, 103 nt, synthetic construct
  misc_feature 1..103: note = gNA Variant Scaffold
  source 1..103: mol_type = other RNA
ggcgcttttatctcattactttgagagccatcaccagcgacttcggtcgtatgggtaaagcgcttatttatcggcttcggccgataaataagaagcatcaaag

SEQ ID NO: 2152 - RNA, 106 nt, synthetic construct
  misc_feature 1..106: note = gNA Variant Scaffold
  source 1..106: mol_type = other RNA
gctggcgcttttatctcattactttgagagccatcaccagcgacttcggtcgtatgggtaaagcgcttatttatcggcttcggccgataaataagaagcatcaaag

SEQ ID NO: 2153 - RNA, 109 nt, synthetic construct
  misc_feature 1..109: note = gNA Variant Scaffold
  source 1..109: mol_type = other RNA
tactggcgcttttatctcattactttgagagccatcaccagcgacttcggtcgtatgggtaaagcgcttatttatcggagagaaatccgataaataagaagcatcaaag

SEQ ID NO: 2154 - RNA, 112 nt, synthetic construct
  misc_feature 1..112: note = gNA Variant Scaffold
  source 1..112: mol_type = other RNA
tactggcgcttttatctcattactttgagagccatgctccaccagcgactatgtcgtatgggtaaagcgcttatttatcggagagaaatccgataaataagaagcatcaaag

SEQ ID NO: 2155 - RNA, 97 nt, synthetic construct
  misc_feature 1..97: note = gNA Variant Scaffold
  source 1..97: mol_type = other RNA
tactggcgcttttatctcattactttgagagccatcaccagcgactatgtcgtatgggtaaagcggggttagggttagggttagggaagcatcaaag

SEQ ID NO: 2156 - RNA, 96 nt, synthetic construct
  misc_feature 1..96: note = gNA Variant Scaffold
  source 1..96: mol_type = other RNA
tactggcgcttttatctcattactttgagagccatcaccagcgactatgtcgtatgggtaaagcggagggagggagggagagggaaagcatcaaag

SEQ ID NO: 2157 - RNA, 101 nt, synthetic construct
  misc_feature 1..101: note = gNA Variant Scaffold
  source 1..101: mol_type = other RNA
tactggcgcttttatctcattactttgagagccatcaccagcgactatgtcgtatgggtaaagcgttgggttagggttagggttagggaaaagcatcaaag

SEQ ID NO: 2158 - RNA, 91 nt, synthetic construct
  misc_feature 1..91: note = gNA Variant Scaffold
  source 1..91: mol_type = other RNA
tactggcgcttttatctcattactttgagagccatcaccagcgactatgtcgtatgggtaaagcgcagggcttcggccggaagcatcaaag

SEQ ID NO: 2159 - RNA, 103 nt, synthetic construct
  misc_feature 1..103: note = gNA Variant Scaffold
  source 1..103: mol_type = other RNA
tactggcgcttttatctcattactttgagagccatcaccagcgactatgtcgtatgggtaaagcgcctgctcagtacgagaggaaccgcaggaagcatcaaag

SEQ ID NO: 2160 - RNA, 90 nt, synthetic construct
  misc_feature 1..90: note = gNA Variant Scaffold
  source 1..90: mol_type = other RNA
tactggcgcttttatctgattactttgagagccatcaccagcgactatgtcgtatgggtaaagcgccctcttcggagggaagcatcaaag

SEQ ID NO: 2161 - RNA, 98 nt, synthetic construct
  misc_feature 1..98: note = gNA Variant Scaffold
  source 1..98: mol_type = other RNA
tactggcgcctttatctgattactttgagagccatcaccagcgactatgtcgtatgggtaaagcgcttacggacttcggtccgtaagaagcatcaaag

SEQ ID NO: 2162 - RNA, 98 nt, synthetic construct
  misc_feature 1..98: note = gNA Variant Scaffold
  source 1..98: mol_type = other RNA
tactggcgcttttatctgattactttgagagccatcaccagcgactatgtcgtatgggtaaagcgcggacgacctctcggtcgtccgaagcatcaaag

SEQ ID NO: 2163 - RNA, 108 nt, synthetic construct
  misc_feature 1..108: note = gNA Variant Scaffold
  source 1..108: mol_type = other RNA
tactggcgcttttatctgattactttgagagccatcaccagcgactatgtcgtatgggtaaagcgcaggtgggacgacctctcggtcgtcctatctgaagcatcaaag

SEQ ID NO: 2164 - RNA, 99 nt, synthetic construct
  misc_feature 1..99: note = gNA Variant Scaffold
  source 1..99: mol_type = other RNA
tactggcgcctttatctgcattactttgagagccatcaccagcgactatgtcgtatgggtaaagcgcttacggacttcggtccgtaagaagcatcaaag

SEQ ID NO: 2165 - RNA, 97 nt, synthetic construct
  misc_feature 1..97: note = gNA Variant Scaffold
  source 1..97: mol_type = other RNA
gctggcgcttttatctgattactttgagagccatcaccagcgactatgtcgtatgggtaaagcgcttacggacttcggtccgtaagaagcatcaaag

SEQ ID NO: 2166 - RNA, 108 nt, synthetic construct
  misc_feature 1..108: note = gNA Variant Scaffold
  source 1..108: mol_type = other RNA
tactggcgcctttatctgattactttgagagccatcaccagcgactatgtcgtatgggtaaagcgcaggtgggacgacctctcggtcgtcctatctgaagcatcaaag

SEQ ID NO: 2167 - RNA, 98 nt, synthetic construct
  misc_feature 1..98: note = gNA Variant Scaffold
  source 1..98: mol_type = other RNA
tactggcgcctttatctgattactttgagagccatcaccagcgactatgtcgtatgggtaaagcgcggacgacctctcggtcgtccgaagcatcaaag

SEQ ID NO: 2168 - RNA, 90 nt, synthetic construct
  misc_feature 1..90: note = gNA Variant Scaffold
  source 1..90: mol_type = other RNA
tactggcgcctttatctcattactttgagagccatcaccagcgactatgtcgtatgggtaaagcgccctcttcggagggaagcatcaaag

SEQ ID NO: 2169 - RNA, 98 nt, synthetic construct
  misc_feature 1..98: note = gNA Variant Scaffold
  source 1..98: mol_type = other RNA
tactggcgcttttatctcattactttgagagccatcaccagcgactatgtcgtatgggtaaagcgcttacggacttcggtccgtaagaagcatcaaag

SEQ ID NO: 2170 - RNA, 99 nt, synthetic construct
  misc_feature 1..99: note = gNA Variant Scaffold
  source 1..99: mol_type = other RNA
tactggcgcctttatcatcattactttgagagccatcaccagcgactatgtcgtatgggtaaagcgcttacggacttcggtccgtaagaagcatcaaag

SEQ ID NO: 2171 - RNA, 194 nt, synthetic construct
  misc_feature 1..194: note = gNA Variant Scaffold
  source 1..194: mol_type = other RNA
tactggcgcttttatctcattactttgagagccatcaccagcgactatgtcgtatgggtaaagcgcttatttatcggagagaaatccgataaataagaagcatcaaagggccggcatggtcccagcctcctcgctggcgccggctgggcaacattccgaggggaccgtcccctcggtaatggcgaatgggaccc

SEQ ID NO: 2172 - RNA, 108 nt, synthetic construct
  misc_feature 1..108: note = gNA Variant Scaffold
  source 1..108: mol_type = other RNA
tactggcgcctttatctcattactttgagagccatcaccagcgactatgtcgtatgggtaaagcgcaggtgggacgacctctcggtcgtcctatctgaagcatcaaag

SEQ ID NO: 2173 - RNA, 106 nt, synthetic construct
  misc_feature 1..106: note = gNA Variant Scaffold
  source 1..106: mol_type = other RNA
tactggcgcttttatctcattactttgagagccatcaccagcgactatgtcgtatgggtaaagcgcttatttatcggagaaatccgataaataagaagcatcaaag

SEQ ID NO: 2174 - RNA, 98 nt, synthetic construct
  misc_feature 1..98: note = gNA Variant Scaffold
  source 1..98: mol_type = other RNA
tactggcgcctttatctcattactttgagagccatcaccagcgactatgtcgtatgggtaaagcgcggacgacctctcggtcgtccgaagcatcaaag

SEQ ID NO: 2175 - RNA, 92 nt, synthetic construct
  misc_feature 1..92: note = gNA Variant Scaffold
  source 1..92: mol_type = other RNA
tactggcgcttttatctcattactttgagagccatcaccagcgactatgtcgtatgggtaaagcgccggacttcggtccggaagcatcaaag

SEQ ID NO: 2176 - RNA, 108 nt, synthetic construct
  misc_feature 1..108: note = gNA Variant Scaffold
  source 1..108: mol_type = other RNA
tactggcgcttttatcggattactttgagagccatcaccagcgactatgtcgtatgggtaaagcgcttatttatcggagagaaatccgataaataagaagcatcaaag

SEQ ID NO: 2177 - RNA, 98 nt, synthetic construct
  misc_feature 1..98: note = gNA Variant Scaffold
  source 1..98: mol_type = other RNA
tactggcgcttttatctcattactttgagagccatcaccagcgactatgtcgtatgggtaaagcgcggacgacctctcggtcgtccgaagcatcaaag

SEQ ID NO: 2178 - RNA, 89 nt, synthetic construct
  misc_feature 1..89: note = gNA Variant Scaffold
  source 1..89: mol_type = other RNA
gctggcgcttttatctgattactttgagagccatcaccagcgactatgtcgtatgggtaaagcgccctcttcggagggaagcatcaaag

SEQ ID NO: 2179 - RNA, 88 nt, synthetic construct
  misc_feature 1..88: note = gNA Variant Scaffold
  source 1..88: mol_type = other RNA
gctggcgcctttatctgattactttgagagccatcaccagcgactatgtcgtatgggtaaagctccctcttcggagggagcatcaaag

SEQ ID NO: 2180 - RNA, 197 nt, synthetic construct
  misc_feature 1..197: note = gNA Variant Scaffold
  source 1..197: mol_type = other RNA
tactggcgcttttatctcattactttgagagccatcaccagcgactatgtcgtatgggtaaagcgcttatttatcggagagaaatccgataaataagaagcatcaaaggggtcggcatggcatctccacctcctcgcggtccgacctgggcatccgaaggaggacgcacgtccactcggatggctaagggagagcca

SEQ ID NO: 2181 - RNA, 88 nt, synthetic construct
  misc_feature 1..88: note = gNA Variant Scaffold
  source 1..88: mol_type = other RNA
gctggcgcctttatctgattactttgagagccatcaccagcgactatgtcgtatgggtaaagcgccctcttcggagggcgcatcaaag

SEQ ID NO: 2182 - RNA, 186 nt, synthetic construct
  misc_feature 1..186: note = gNA Variant Scaffold
  source 1..186: mol_type = other RNA
tactggcgcttttatctcattactttgagagccatcaccagcgactatgtcgtatgggtaaagcgcttatttatcggagagaaatccgataaataagaagcatcaaagttttggccggcatggtcccagcctcctcgctggcgccggctgggcaacatgcttcggcatggcgaatgggaccccggg

SEQ ID NO: 2183 - RNA, 97 nt, synthetic construct
  misc_feature 1..97: note = gNA Variant Scaffold
  source 1..97: mol_type = other RNA
gatggcgcctttatctcattactttgagagccatcaccagcgactatgtcgtatgggtaaagcgcttacggacttcggtccgtaagaagcatcaaag

SEQ ID NO: 2184 - RNA, 89 nt, synthetic construct
  misc_feature 1..89: note = gNA Variant Scaffold
  source 1..89: mol_type = other RNA
gctggcgcttttatctcattactttgagagccatcaccagcgactatgtcgtatgggtaaagcgccctcttcggagggaagcatcaaag

SEQ ID NO: 2185 - RNA, 96 nt, synthetic construct
  misc_feature 1..96: note = gNA Variant Scaffold
  source 1..96: mol_type = other RNA
gctggcgcctttatctgattactttgagagccatcaccagcgactatgtcgtatgggtaaagctcttacggacttcggtccgtaagagcatcaaag

SEQ ID NO: 2186 - RNA, 96 nt, synthetic construct
  misc_feature 1..96: note = gNA Variant Scaffold
  source 1..96: mol_type = other RNA
gctggcgcctttatctgattactttgagagccatcaccagcgactatgtcgtatgggtaaagctcggacgacctctcggtcgtccgagcatcaaag

SEQ ID NO: 2187 - RNA, 160 nt, synthetic construct
  misc_feature 1..160: note = gNA Variant Scaffold
  source 1..160: mol_type = other RNA
tactggcgcttttatctcattactttgagagccatcaccagcgactatgtcgtatgggtaaagcgcttatttatcggagagaaatccgataaataagaagcatcaaagcctgtcaccggatgtgctttccggtctgatgagtccgtgaggacgaaacagg

SEQ ID NO: 2188 - RNA, 97 nt, synthetic construct
  misc_feature 1..97: note = gNA Variant Scaffold
  source 1..97: mol_type = other RNA
gctggcgcttttatctgattactttgagagccatcaccagcgactatgtcgtatgggtaaagcgcggacgacctctcggtcgtccgaagcatcaaag

SEQ ID NO: 2189 - RNA, 97 nt, synthetic construct
  misc_feature 1..97: note = gNA Variant Scaffold
  source 1..97: mol_type = other RNA
gctggcgcctttatctgattactttgagagccatcaccagcgactatgtcgtatgggtaaagcgcggacgacctctcggtcgtccgaagcatcaaag

SEQ ID NO: 2190 - RNA, 106 nt, synthetic construct
  misc_feature 1..106: note = gNA Variant Scaffold
  source 1..106: mol_type = other RNA
gctggcgcctttatctgattactttgagagccatcaccagcgactatgtcgtatgggtaaagctcaggtgggacgacctctcggtcgtcctatctgagcatcaaag

SEQ ID NO: 2191 - RNA, 177 nt, synthetic construct
  misc_feature 1..177: note = gNA Variant Scaffold
  source 1..177: mol_type = other RNA
tactggcgcttttatctcattactttgagagccatcaccagcgactatgtcgtatgggtaaagcgcttatttatcggagagaaatccgataaataagaagcatcaaaggatggccggcatggtcccagcctcctcgctggcgccggctgggcaacaccttcgggtggcgaatgggac

SEQ ID NO: 2192 - RNA, 107 nt, synthetic construct
  misc_feature 1..107: note = gNA Variant Scaffold
  source 1..107: mol_type = other RNA
gctggcgcttttatctgattactttgagagccatcaccagcgactatgtcgtatgggtaaagcgcaggtgggacgacctctcggtcgtcctatctgaagcatcaaag

SEQ ID NO: 2193 - RNA, 109 nt, synthetic construct
  misc_feature 1..109: note = gNA Variant Scaffold
  source 1..109: mol_type = other RNA
tactggcgcttttatctcattactttgagagccatcaccagcgactatgtcgtactgggtaaagcgcttatttatcggagagaaatccgataaataagaagcatcaaag

SEQ ID NO: 2194 - RNA, 107 nt, synthetic construct
  misc_feature 1..107: note = gNA Variant Scaffold
  source 1..107: mol_type = other RNA
tactggcgcttttatctcattactttgagagccatcaccagcgactatgtcgtatgggtaaagcgcttatttatcgtgagaaatccgataaataagaagcatcaaag

SEQ ID NO: 2195 - RNA, 109 nt, synthetic construct
  misc_feature 1..109: note = gNA Variant Scaffold
  source 1..109: mol_type = other RNA
gtactggcgcttttatctcattactttgagagccatcaccagcgactatgtcgtatgggtaaagcgcttatttatcggagagaaatccgataaataagaagcatcaaag

SEQ ID NO: 2196 - RNA, 97 nt, synthetic construct
  misc_feature 1..97: note = gNA Variant Scaffold
  source 1..97: mol_type = other RNA
gctggcgcttttatctcattactttgagagccatcaccagcgactatgtcgtatgggtaaagcgcggacgacctctcggtcgtccgaagcatcaaag

SEQ ID NO: 2197 - RNA, 97 nt, synthetic construct
  misc_feature 1..97: note = gNA Variant Scaffold
  source 1..97: mol_type = other RNA
gctggcgcctttatctgattactttgagagccatcaccagcgactatgtcgtatgggtaaagcgcttacggacttcggtccgtaagaagcatcaaag

SEQ ID NO: 2198 - RNA, 107 nt, synthetic construct
  misc_feature 1..107: note = gNA Variant Scaffold
  source 1..107: mol_type = other RNA
gctggcgcttttatctcattactttgagagccatcaccagcgactatgtcgtatgggtaaagcgcttatttatcggagagaaatccgataaataagaagcatcaaag

SEQ ID NO: 2199 - RNA, 97 nt, synthetic construct
  misc_feature 1..97: note = gNA Variant Scaffold
  source 1..97: mol_type = other RNA
gctggcgcctttatctcattactttgagagccatcaccagcgactatgtcgtatgggtaaagcgcttacggacttcggtccgtaagaagcatcaaag

SEQ ID NO: 2200 - RNA, 89 nt, synthetic construct
  misc_feature 1..89: note = gNA Variant Scaffold
  source 1..89: mol_type = other RNA
gctggcgcctttatctgattactttgagagccatcaccagcgactatgtcgtatgggtaaagcgccctcttcggagggaagcatcaaag

SEQ ID NO: 2201 - RNA, 107 nt, synthetic construct
  misc_feature 1..107: note = gNA Variant Scaffold
  source 1..107: mol_type = other RNA
gctggcgcttttatctcattactttgagagccatcaccagcgactatgtcgtatgggtaaagcgcaggtgggacgacctctcggtcgtcctatctgaagcatcaaag

SEQ ID NO: 2202 - RNA, 107 nt, synthetic construct
  misc_feature 1..107: note = gNA Variant Scaffold
  source 1..107: mol_type = other RNA
gctggcgcctttatctcattactttgagagccatcaccagcgactatgtcgtatgggtaaagcgcaggtgggacgacctctcggtcgtcctatctgaagcatcaaag

SEQ ID NO: 2203 - RNA, 107 nt, synthetic construct
  misc_feature 1..107: note = gNA Variant Scaffold
  source 1..107: mol_type = other RNA
gctggcgcctttatctgattactttgagagccatcaccagcgactatgtcgtatgggtaaagcgcaggtgggacgacctctcggtcgtcctatctgaagcatcaaag

SEQ ID NO: 2204 - RNA, 98 nt, synthetic construct
  misc_feature 1..98: note = gNA Variant Scaffold
  source 1..98: mol_type = other RNA
tactggcgcttttatctgattactttgagagccatcaccagcgactatgtcgtatgggtaaagcgcttacggacttcggtccgtaagaagcatcaaag

SEQ ID NO: 2205 - RNA, 89 nt, synthetic construct
  misc_feature 1..89: note = gNA Variant Scaffold
  source 1..89: mol_type = other RNA
gctggcgcctttatctcattactttgagagccatcaccagcgactatgtcgtatgggtaaagcgccctcttcggagggaagcatcaaag

SEQ ID NO: 2206 - RNA, 97 nt, synthetic construct
  misc_feature 1..97: note = gNA Variant Scaffold
  source 1..97: mol_type = other RNA
gctggcgcttttatctcattactttgagagccatcaccagcgactatgtcgtatgggtaaagcgcttacggacttcggtccgtaagaagcatcaaag

SEQ ID NO: 2207 - RNA, 97 nt, synthetic construct
  misc_feature 1..97: note = gNA Variant Scaffold
  source 1..97: mol_type = other RNA
gctggcgcctttatctcattactttgagagccatcaccagcgactatgtcgtatgggtaaagcgcggacgacctctcggtcgtccgaagcatcaaag

SEQ ID NO: 2208 - RNA, 177 nt, synthetic construct
  misc_feature 1..177: note = gNA Variant Scaffold
  source 1..177: mol_type = other RNA
gatggccggcatggtcccagcctcctcgctggcgccggctgggcaacaccttcgggtggcgaatgggactactggcgcttttatctcattactttgagagccatcaccagcgactatgtcgtatgggtaaagcgcttatttatcggagagaaatccgataaataagaagcatcaaag

SEQ ID NO: 2209 - RNA, 194 nt, synthetic construct
  misc_feature 1..194: note = gNA Variant Scaffold
  source 1..194: mol_type = other RNA
ggccggcatggtcccagcctcctcgctggcgccggctgggcaacattccgaggggaccgtcccctcggtaatggcgaatgggaccctactggcgcttttatctcattactttgagagccatcaccagcgactatgtcgtatgggtaaagcgcttatttatcggagagaaatccgataaataagaagcatcaaag

SEQ ID NO: 2210 - RNA, 96 nt, synthetic construct
  misc_feature 1..96: note = gNA Variant Scaffold
  source 1..96: mol_type = other RNA
gctggcgcctttatctgattactttgagagccatcaccagcgactatgtcgtatgggtaaagcgcttacggacttcggtccgtaagcgcatcaaag

SEQ ID NO: 2211 - RNA, 172 nt, synthetic construct
  misc_feature 1..172: note = gNA Variant Scaffold
  source 1..172: mol_type = other RNA
cgtggttagggccacgttaaatagttgcttaagccctaagcgttgatcttcggatcaggtgcaatactggcgcttttatctcattactttgagagccatcaccagcgactatgtcgtatgggtaaagcgcttatttatcggagagaaatccgataaataagaagcatcaaag

SEQ ID NO: 2212 - RNA, 197 nt, synthetic construct
  misc_feature 1..197: note = gNA Variant Scaffold
  source 1..197: mol_type = other RNA
gggtcggcatggcatctccacctcctcgcggtccgacctgggcatccgaaggaggacgcacgtccactcggatggctaagggagagccatactggcgcttttatctcattactttgagagccatcaccagcgactatgtcgtatgggtaaagcgcttatttatcggagagaaatccgataaataagaagcatcaaag

SEQ ID NO: 2213 - RNA, 171 nt, synthetic construct
  misc_feature 1..171: note = gNA Variant Scaffold
  source 1..171: mol_type = other RNA
tactggcgcttttatctcattactttgagagccatcaccagcgactatgtcgtatgggtaaagcgcttatttatcggagagaaatccgataaataagaagcatcaaagccagtactgatgagtccgtgaggacgaaacgagtaagctcgtctactggcgcttttatctcat

SEQ ID NO: 2214 - RNA, 99 nt, synthetic construct
  misc_feature 1..99: note = gNA Variant Scaffold
  source 1..99: mol_type = other RNA
tactggcgcctttatctcattactttagagagccatcaccagcgactatgtcgtatgggtaaagcgcttacggacttcggtccgtaagaagcatcaaag

SEQ ID NO: 2215 - RNA, 157 nt, synthetic construct
  misc_feature 1..157: note = gNA Variant Scaffold
  source 1..157: mol_type = other RNA
cgactactgatgagtccgtgaggacgaaacgagtaagctcgtctagtcgtactggcgcttttatctcattactttgagagccatcaccagcgactatgtcgtatgggtaaagcgcttatttatcggagagaaatccgataaataagaagcatcaaag

SEQ ID NO: 2216 - RNA, 106 nt, synthetic construct
  misc_feature 1..106: note = gNA Variant Scaffold
  source 1..106: mol_type = other RNA
gctggcgcctttatctgattactttgagagccatcaccagcgactatgtcgtatgggtaaagcgcaggtgggacgacctctcggtcgtcctatctgcgcatcaaag

SEQ ID NO: 2217 - RNA, 97 nt, synthetic construct
  misc_feature 1..97: note = gNA Variant Scaffold
  source 1..97: mol_type = other RNA
tactggcgcctttatctcattactttagagccatcaccagcgactatgtcgtatgggtaaagcgcttacggacttcggtccgtaagaagcatcaaag

SEQ ID NO: 2218 - RNA, 186 nt, synthetic construct
  misc_feature 1..186: note = gNA Variant Scaffold
  source 1..186: mol_type = other RNA
tactggcgcttttatctcattactttgagagccatcaccagcgactatgtcgtatgggtaaagcgcttatttatcggagagaaatccgataaataagaagcatcaaagcattcctcagaaaatgacaaacctgtggggcgtaagtagatcttcggatctatgatcgtgcagacgttaaaatcaggt

SEQ ID NO: 2219 - RNA, 171 nt, synthetic construct
  misc_feature 1..171: note = gNA Variant Scaffold
  source 1..171: mol_type = other RNA
tactggcgcttttatctcattactttgagagccatcaccagcgactatgtcgtatgggtaaagcgcttatttatcggagagaaatccgataaataagaagcatcaaagcgactactgatgagtccgtgaggacgaaacgagtaagctcgtctagtcgcgtgtagcgaagca

SEQ ID NO: 2220 - RNA, 186 nt, synthetic construct
  misc_feature 1..186: note = gNA Variant Scaffold
  source 1..186: mol_type = other RNA
cattcctcagaaaatgacaaacctgtggggcgtaagtagatcttcggatctatgatcgtgcagacgttaaaatcaggttactggcgcttttatctcattactttgagagccatcaccagcgactatgtcgtatgggtaaagcgcttatttatcggagagaaatccgataaataagaagcatcaaag

SEQ ID NO: 2221 - RNA, 186 nt, synthetic construct
  misc_feature 1..186: note = gNA Variant Scaffold
  source 1..186: mol_type = other RNA
ttttggccggcatggtcccagcctcctcgctggcgccggctgggcaacatgcttcggcatggcgaatgggaccccgggtactggcgcttttatctcattactttgagagccatcaccagcgactatgtcgtatgggtaaagcgcttatttatcggagagaaatccgataaataagaagcatcaaag

SEQ ID NO: 2222 - RNA, 171 nt, synthetic construct
  misc_feature 1..171: note = gNA Variant Scaffold
  source 1..171: mol_type = other RNA
cgactactgatgagtccgtgaggacgaaacgagtaagctcgtctagtcgcgtgtagcgaagcatactggcgcttttatctcattactttgagagccatcaccagcgactatgtcgtatgggtaaagcgcttatttatcggagagaaatccgataaataagaagcatcaaag

SEQ ID NO: 2223 - RNA, 168 nt, synthetic construct
  misc_feature 1..168: note = gNA Variant Scaffold
  source 1..168: mol_type = other RNA
tactggcgcttttatctcattactttgagagccatcaccagcgactatgtcgtatgggtaaagcgcttatttatcggagagaaatccgataaataagaagcatcaaaggggagccccgctgatgaggtcggggagaccgaaagggacttcggtccctacggggctccc

SEQ ID NO: 2224 - RNA, 144 nt, synthetic construct
  misc_feature 1..144: note = gNA Variant Scaffold
  source 1..144: mol_type = other RNA
ccacccccaccaccacccccacccccaccaccaccctactggcgcttttatctcattactttgagagccatcaccagcgactatgtcgtatgggtaaagcgcttatttatcggagagaaatccgataaataagaagcatcaaag

SEQ ID NO: 2225 - RNA, 157 nt, synthetic construct
  misc_feature 1..157: note = gNA Variant Scaffold
  source 1..157: mol_type = other RNA
tactggcgcttttatctcattactttgagagccatcaccagcgactatgtcgtatgggtaaagcgcttatttatcggagagaaatccgataaataagaagcatcaaagcgactactgatgagtccgtgaggacgaaacgagtaagctcgtctagtcg

SEQ ID NO: 2226 - RNA, 172 nt, synthetic construct
  misc_feature 1..172: note = gNA Variant Scaffold
  source 1..172: mol_type = other RNA
tactggcgcttttatctcattactttgagagccatcaccagcgactatgtcgtatgggtaaagcgcttatttatcggagagaaatccgataaataagaagcatcaaagcgtggttagggccacgttaaatagttgcttaagccctaagcgttgatcttcggatcaggtgcaa

SEQ ID NO: 2227 - RNA, 184 nt, synthetic construct
  misc_feature 1..184: note = gNA Variant Scaffold
  source 1..184: mol_type = other RNA
tactggcgcttttatctcattactttgagagccatcaccagcgactatgtcgtatgggtaaagcgcttatttatcggagagaaatccgataaataagaagcatcaaagggcaataaagcggttacaagcccgcaaaaatagcagagtaatgtcgcgatagcgcggcattaatgcagctttattg

SEQ ID NO: 2228 - RNA, 122 nt, synthetic construct
  misc_feature 1..122: note = gNA Variant Scaffold
  source 1..122: mol_type = other RNA
tactggcgcttttatctcattactattatctcattactttgagagccatcaccagcgactatgtcgtatgggtaaagcgcttatttatcggagagaaatccgataaataagaagcatcaaag

SEQ ID NO: 2229 - RNA, 184 nt, synthetic construct
  misc_feature 1..184: note = gNA Variant Scaffold
  source 1..184: mol_type = other RNA
ggcaataaagcggttacaagcccgcaaaaatagcagagtaatgtcgcgatagcgcggcattaatgcagctttattgtactggcgcttttatctcattactttgagagccatcaccagcgactatgtcgtatgggtaaagcgcttatttatcggagagaaatccgataaataagaagcatcaaag

SEQ ID NO: 2230 - RNA, 185 nt, synthetic construct
  misc_feature 1..185: note = gNA Variant Scaffold
  source 1..185: mol_type = other RNA
tactggcgcttttatctcattactttgagagccatcaccagcgactatgtcgtatgggtaaagcgcttatttatcggagagaaatccgataaataagaagcatcaaagacccgcaaggccgacggcatccgccgccgctggtgcaagtccagccgccccttcgggggcgggcgctcatgggtaac

SEQ ID NO: 2231 - RNA, 63 nt, synthetic construct
  misc_feature 1..63: note = gNA Variant Scaffold
  source 1..63: mol_type = other RNA
tactggcgcttttatctcattactttgagagccatcaccagcgactatgtcgtatgggtaaag

SEQ ID NO: 2232 - RNA, 168 nt, synthetic construct
  misc_feature 1..168: note = gNA Variant Scaffold
  source 1..168: mol_type = other RNA
gggagccccgctgatgaggtcggggagaccgaaagggacttcggtccctacggggctccctactggcgcttttatctcattactttgagagccatcaccagcgactatgtcgtatgggtaaagcgcttatttatcggagagaaatccgataaataagaagcatcaaag

SEQ ID NO: 2233 - RNA, 171 nt, synthetic construct
  misc_feature 1..171: note = gNA Variant Scaffold
  source 1..171: mol_type = other RNA
ccagtactgatgagtccgtgaggacgaaacgagtaagctcgtctactggcgcttttatctcattactggcgcttttatctcattactttgagagccatcaccagcgactatgtcgtatgggtaaagcgcttatttatcggagagaaatccgataaataagaagcatcaaag

SEQ ID NO: 2234 - RNA, 185 nt, synthetic construct
  misc_feature 1..185: note = gNA Variant Scaffold
  source 1..185: mol_type = other RNA
acccgcaaggccgacggcatccgccgccgctggtgcaagtccagccgccccttcgggggcgggcgctcatgggtaactactggcgcttttatctcattactttgagagccatcaccagcgactatgtcgtatgggtaaagcgcttatttatcggagagaaatccgataaataagaagcatcaaag

SEQ ID NO: 2235 - RNA, 160 nt, synthetic construct
  misc_feature 1..160: note = gNA Variant Scaffold
  source 1..160: mol_type = other RNA
cctgtcaccggatgtgctttccggtctgatgagtccgtgaggacgaaacaggtactggcgcttttatctcattactttgagagccatcaccagcgactatgtcgtatgggtaaagcgcttatttatcggagagaaatccgataaataagaagcatcaaag

SEQ ID NO: 2236 - RNA, 100 nt, synthetic construct
  misc_feature 1..100: note = gNA Variant Scaffold
  source 1..100: mol_type = other RNA
gtactggcgcctttatctcattactttgagagccatcaccagcgactatgtcgtagtgggtaaagcgcttacggacttcggtccgtaagaagcatcaaag

SEQ ID NO: 2237 - RNA, 91 nt, synthetic construct
  misc_feature 1..91: note = gNA Variant Scaffold
  source 1..91: mol_type = other RNA
gtactggcgcttttatctgattactttgagagccatcaccagcgactatgtcgtagtgggtaaagctccctcttcggagggagcatcaaag

SEQ ID NO: 2238 - RNA, 89 nt, synthetic construct
  misc_feature 1..89: note = gNA Variant Scaffold
  source 1..89: mol_type = other RNA
actggcgcttttatctgattactttgagagccatcaccagcgactatgtcgtagtgggtaaagctccctcttcggagggagcatcaaag

SEQ ID NO: 2239 - RNA, 89 nt, synthetic construct; identical to SEQ ID NO: 2238
  misc_feature 1..89: note = gNA Variant Scaffold
  source 1..89: mol_type = other RNA

SEQ ID NO: 2240 - RNA, 89 nt, synthetic construct; identical to SEQ ID NO: 2238
  misc_feature 1..89: note = gNA Variant Scaffold
  source 1..89: mol_type = other RNA

SEQ ID NO: 2241 - RNA, 89 nt, synthetic construct; identical to SEQ ID NO: 2238
  misc_feature 1..89: note = gNA Variant Scaffold
  source 1..89: mol_type = other RNA

SEQ ID NO: 2242 - RNA, 89 nt, synthetic construct; identical to SEQ ID NO: 2238
  misc_feature 1..89: note = gNA Variant Scaffold
  source 1..89: mol_type = other RNA

SEQ ID NO: 2243 - RNA, 89 nt, synthetic construct; identical to SEQ ID NO: 2238
  misc_feature 1..89: note = gNA Variant Scaffold
  source 1..89: mol_type = other RNA

SEQ ID NO: 2244 - RNA, 89 nt, synthetic construct; identical to SEQ ID NO: 2238
  misc_feature 1..89: note = gNA Variant Scaffold
  source 1..89: mol_type = other RNA

SEQ ID NO: 2245 - RNA, 89 nt, synthetic construct; identical to SEQ ID NO: 2238
  misc_feature 1..89: note = gNA Variant Scaffold
  source 1..89: mol_type = other RNA

SEQ ID NO: 2246 - RNA, 89 nt, synthetic construct; identical to SEQ ID NO: 2238
  misc_feature 1..89: note = gNA Variant Scaffold
  source 1..89: mol_type = other RNA

SEQ ID NO: 2247 - RNA, 89 nt, synthetic construct; identical to SEQ ID NO: 2238
  misc_feature 1..89: note = gNA Variant Scaffold
  source 1..89: mol_type = other RNA

SEQ ID NO: 2248 - RNA, 89 nt, synthetic construct; identical to SEQ ID NO: 2238
  misc_feature 1..89: note = gNA Variant Scaffold
  source 1..89: mol_type = other RNA

SEQ ID NO: 2249 - RNA, 89 nt, synthetic construct; identical to SEQ ID NO: 2238
  misc_feature 1..89: note = gNA Variant Scaffold
  source 1..89: mol_type = other RNA

SEQ ID NO: 2250 - RNA, 89 nt, synthetic construct; identical to SEQ ID NO: 2238
  misc_feature 1..89: note = gNA Variant Scaffold
  source 1..89: mol_type = other RNA

SEQ ID NO: 2251 - RNA, 89 nt, synthetic construct; identical to SEQ ID NO: 2238
  misc_feature 1..89: note = gNA Variant Scaffold
  source 1..89: mol_type = other RNA

SEQ ID NO: 2252 - RNA, 89 nt, synthetic construct; identical to SEQ ID NO: 2238
  misc_feature 1..89: note = gNA Variant Scaffold
  source 1..89: mol_type = other RNA

SEQ ID NO: 2253 - RNA, 89 nt, synthetic construct; identical to SEQ ID NO: 2238
  misc_feature 1..89: note = gNA Variant Scaffold
  source 1..89: mol_type = other RNA

SEQ ID NO: 2254 - RNA, 89 nt, synthetic construct; identical to SEQ ID NO: 2238
  misc_feature 1..89: note = gNA Variant Scaffold
  source 1..89: mol_type = other RNA

SEQ ID NO: 2255 - RNA, 89 nt, synthetic construct; identical to SEQ ID NO: 2238
  misc_feature 1..89: note = gNA Variant Scaffold
  source 1..89: mol_type = other RNA

SEQ ID NO: 2256 - RNA, 89 nt, synthetic construct; identical to SEQ ID NO: 2238
  misc_feature 1..89: note = gNA Variant Scaffold
  source 1..89: mol_type = other RNA

SEQ ID NO: 2257 - RNA, 89 nt, synthetic construct; identical to SEQ ID NO: 2238
  misc_feature 1..89: note = gNA Variant Scaffold
  source 1..89: mol_type = other RNA

SEQ ID NO: 2258 - RNA, 89 nt, synthetic construct; identical to SEQ ID NO: 2238
  misc_feature 1..89: note = gNA Variant Scaffold
  source 1..89: mol_type = other RNA

SEQ ID NO: 2259 - RNA, 89 nt, synthetic construct; identical to SEQ ID NO: 2238
  misc_feature 1..89: note = gNA Variant Scaffold
  source 1..89: mol_type = other RNA

SEQ ID NO: 2260 - RNA, 89 nt, synthetic construct; identical to SEQ ID NO: 2238
  misc_feature 1..89: note = gNA Variant Scaffold
  source 1..89: mol_type = other RNA

SEQ ID NO: 2261 - RNA, 89 nt, synthetic construct; identical to SEQ ID NO: 2238
  misc_feature 1..89: note = gNA Variant Scaffold
  source 1..89: mol_type = other RNA

SEQ ID NO: 2262 - RNA, 89 nt, synthetic construct; identical to SEQ ID NO: 2238
  misc_feature 1..89: note = gNA Variant Scaffold
  source 1..89: mol_type = other RNA

SEQ ID NO: 2263 - RNA, 89 nt, synthetic construct; identical to SEQ ID NO: 2238
  misc_feature 1..89: note = gNA Variant Scaffold
  source 1..89: mol_type = other RNA

SEQ ID NO: 2264 - RNA, 89 nt, synthetic construct; identical to SEQ ID NO: 2238
  misc_feature 1..89: note = gNA Variant Scaffold
  source 1..89: mol_type = other RNA

SEQ ID NO: 2265 - RNA, 89 nt, synthetic construct; identical to SEQ ID NO: 2238
  misc_feature 1..89: note = gNA Variant Scaffold
  source 1..89: mol_type = other RNA

SEQ ID NO: 2266 - RNA, 89 nt, synthetic construct; identical to SEQ ID NO: 2238
  misc_feature 1..89: note = gNA Variant Scaffold
  source 1..89: mol_type = other RNA

SEQ ID NO: 2267 - RNA, 89 nt, synthetic construct; identical to SEQ ID NO: 2238
  misc_feature 1..89: note = gNA Variant Scaffold
  source 1..89: mol_type = other RNA

SEQ ID NO: 2268 - RNA, 89 nt, synthetic construct; identical to SEQ ID NO: 2238
  misc_feature 1..89: note = gNA Variant Scaffold
  source 1..89: mol_type = other RNA

SEQ ID NO: 2269 - RNA, 89 nt, synthetic construct; identical to SEQ ID NO: 2238
  misc_feature 1..89: note = gNA Variant Scaffold
  source 1..89: mol_type = other RNA

SEQ ID NO: 2270 - RNA, 89 nt, synthetic construct; identical to SEQ ID NO: 2238
  misc_feature 1..89: note = gNA Variant Scaffold
  source 1..89: mol_type = other RNA

SEQ ID NO: 2271 - RNA, 89 nt, synthetic construct; identical to SEQ ID NO: 2238
  misc_feature 1..89: note = gNA Variant Scaffold
  source 1..89: mol_type = other RNA

SEQ ID NO: 2272 - RNA, 89 nt, synthetic construct; identical to SEQ ID NO: 2238
  misc_feature 1..89: note = gNA Variant Scaffold
  source 1..89: mol_type = other RNA

SEQ ID NO: 2273 - RNA, 89 nt, synthetic construct; identical to SEQ ID NO: 2238
  misc_feature 1..89: note = gNA Variant Scaffold
  source 1..89: mol_type = other RNA

SEQ ID NO: 2274 - RNA, 89 nt, synthetic construct; identical to SEQ ID NO: 2238
  misc_feature 1..89: note = gNA Variant Scaffold
  source 1..89: mol_type = other RNA

SEQ ID NO: 2275 - RNA, 89 nt, synthetic construct; identical to SEQ ID NO: 2238
  misc_feature 1..89: note = gNA Variant Scaffold
  source 1..89: mol_type = other RNA

SEQ ID NO: 2276 - RNA, 89 nt, synthetic construct; identical to SEQ ID NO: 2238
  misc_feature 1..89: note = gNA Variant Scaffold
  source 1..89: mol_type = other RNA

SEQ ID NO: 2277 - RNA, 89 nt, synthetic construct; identical to SEQ ID NO: 2238
  misc_feature 1..89: note = gNA Variant Scaffold
  source 1..89: mol_type = other RNA

SEQ ID NO: 2278 - RNA, 89 nt, synthetic construct; identical to SEQ ID NO: 2238
  misc_feature 1..89: note = gNA Variant Scaffold
  source 1..89: mol_type = other RNA

SEQ ID NO: 2279 - RNA, 89 nt, synthetic construct; identical to SEQ ID NO: 2238
  misc_feature 1..89: note = gNA Variant Scaffold
  source 1..89: mol_type = other RNA

SEQ ID NO: 2280 - RNA, 89 nt, synthetic construct; identical to SEQ ID NO: 2238
  misc_feature 1..89: note = gNA Variant Scaffold
  source 1..89: mol_type = other RNA

SEQ ID NO: 2281 - RNA, 89 nt, synthetic construct; identical to SEQ ID NO: 2238
  misc_feature 1..89: note = gNA Variant Scaffold
  source 1..89: mol_type = other RNA

SEQ ID NO: 2282 - RNA, 89 nt, synthetic construct; identical to SEQ ID NO: 2238
  misc_feature 1..89: note = gNA Variant Scaffold
  source 1..89: mol_type = other RNA

SEQ ID NO: 2283 - RNA, 89 nt, synthetic construct; identical to SEQ ID NO: 2238
  misc_feature 1..89: note = gNA Variant Scaffold
  source 1..89: mol_type = other RNA

SEQ ID NO: 2284 - RNA, 89 nt, synthetic construct; identical to SEQ ID NO: 2238
  misc_feature 1..89: note = gNA Variant Scaffold
  source 1..89: mol_type = other RNA

SEQ ID NO: 2285 - RNA, 89 nt, synthetic construct; identical to SEQ ID NO: 2238
  misc_feature 1..89: note = gNA Variant Scaffold
  source 1..89: mol_type = other RNA

SEQ ID NO: 2286 - RNA, 97 nt, synthetic construct
  misc_feature 1..97: note = gNA Variant Scaffold
  source 1..97: mol_type = other RNA
actggcacttttatctgattactttgagagccatcaccagcgactatgtcgtatgggtaaagcgcttacggacttcggtccgtaagaagcatcaaag

SEQ ID NO: 2287 - RNA, 97 nt, synthetic construct
  misc_feature 1..97: note = gNA Variant Scaffold
  source 1..97: mol_type = other RNA
actggcacttctatctgattactctgagagccatcaccagcgactatgtcgtatgggtaaagcgcttacggacttcggtccgtaagaagcatcagag

SEQ ID NO: 2288 - RNA, 98 nt, synthetic construct
  misc_feature 1..98: note = gNA Variant Scaffold
  source 1..98: mol_type = other RNA
actggcgcttctatctgattactctgagagccatcaccagcgactatgtcgtatgggtaaagccgcttacggacttcggtccgtaagaggcatcagag

SEQ ID NO: 2289 - RNA, 98 nt, synthetic construct
  misc_feature 1..98: note = gNA Variant Scaffold
  source 1..98: mol_type = other RNA
actggcacttctatctgattactctgagcgccatcaccagcgactatgtcgtatgggtaaagccgcttacggacttcggtccgtaagaggcatcagag

SEQ ID NO: 2290 - RNA, 98 nt, synthetic construct
  misc_feature 1..98: note = gNA Variant Scaffold
  source 1..98: mol_type = other RNA
actggcgcttctatctgattactctgagcgccatcaccagcgactatgtcgtatgggtaaagccgcttacggacttcggtccgtaagaggcatcagag

SEQ ID NO: 2291 - RNA, 98 nt, synthetic construct
  misc_feature 1..98: note = gNA Variant Scaffold
  source 1..98: mol_type = other RNA
actggcgcttctatctgattactctgagcgccatcaccagcgactatgtcgtatgggtaaagcgccttacggacttcggtccgtaaggagcatcagag

SEQ ID NO: 2292 - RNA, 99 nt, synthetic construct
  misc_feature 1..99: note = gNA Variant Scaffold
  source 1..99: mol_type = other RNA
actggcgcttctatctgattactctgagcgccatcaccagcgactatgtcgtagtgggtaaagccgcttacggacttcggtccgtaagaggcatcagag

SEQ ID NO: 2293 - RNA, 98 nt, synthetic construct
  misc_feature 1..98: note = gNA Variant Scaffold
  source 1..98: mol_type = other RNA
acgggactttctatctgattactctgaagtccctcaccagcgactatgtcgtatgggtaaagccgcttacggacttcggtccgtaagaggcatcagag

SEQ ID NO: 2294 - RNA, 98 nt, synthetic construct
  misc_feature 1..98: note = gNA Variant Scaffold
  source 1..98: mol_type = other RNA
acctgtagttctatctgattactctgactacagtcaccagcgactatgtcgtatgggtaaagccgcttacggacttcggtccgtaagaggcatcagag

SEQ ID NO: 2295 - RNA, 113 nt, synthetic construct
  misc_feature 1..113: note = gNA Variant Scaffold
  source 1..113: mol_type = other RNA
actggcgcttttatctgattactttgagagccatcaccagcgactatgtcgtagtgggtaaagctgcacggtgggcgcagcttcggctgacggtacaccgtgcagcatcaaag

SEQ ID NO: 2296 - RNA, 143 nt, synthetic construct
  misc_feature 1..143: note = gNA Variant Scaffold
  source 1..143: mol_type = other RNA
actggcgcttttatctgattactttgagagccatcaccagcgactatgtcgtagtgggtaaagctgcacggtgggcgcagcttcggctgacggtacaccggtgggcgcagcttcggctgacggtacaccgtgcagcatcaaag

SEQ ID NO: 2297 - RNA, 173 nt, synthetic construct
  misc_feature 1..173: note = gNA Variant Scaffold
  source 1..173: mol_type = other RNA
actggcgcttttatctgattactttgagagccatcaccagcgactatgtcgtagtgggtaaagctgcacggtgggcgcagcttcggctgacggtacaccggtgggcgcagcttcggctgacggtacaccggtgggcgcagcttcggctgacggtacaccgtgcagcatcaaag

SEQ ID NO: 2298 - RNA, 203 nt, synthetic construct
  misc_feature 1..203: note = gNA Variant Scaffold
  source 1..203: mol_type = other RNA
actggcgcttttatctgattactttgagagccatcaccagcgactatgtcgtagtgggtaaagctgcacggtgggcgcagcttcggctgacggtacaccggtgggcgcagcttcggctgacggtacaccggtgggcgcagcttcggctgacggtacaccggtgggcgcagcttcggctgacggtacaccgtgcagcatcaaag

SEQ ID NO: 2299 - RNA, 233 nt, synthetic construct
  misc_feature 1..233: note = gNA Variant Scaffold
  source 1..233: mol_type = other RNA
actggcgcttttatctgattactttgagagccatcaccagcgactatgtcgtagtgggtaaagctgcacggtgggcgcagcttcggctgacggtacaccggtgggcgcagcttcggctgacggtacaccggtgggcgcagcttcggctgacggtacaccggtgggcgcagcttcggctgacggtacaccggtgggcgcagcttcggctgacggtacaccgtgcagcatcaaag

SEQ ID NO: 2300 - RNA, 97 nt, synthetic construct
  misc_feature 1..97: note = gNA Variant Scaffold
  source 1..97: mol_type = other RNA
actggcgcttttatctgattactttgagagccatcaccagcgactatgtcgtagtgggtaaagctgcacctagcggaggctaggtgcagcatcaaag

SEQ ID NO: 2301 - RNA, 118 nt, synthetic construct
  misc_feature 1..118: note = gNA Variant Scaffold
  source 1..118: mol_type = other RNA
actggcgcttttatctgattactttgagagccatcaccagcgactatgtcgtagtgggtaaagctgcacctcggcttgctgaagcgcgcacggcaagaggcgaggtgcagcatcaaag

SEQ ID NO: 2302 - RNA, 192 nt, synthetic construct
  misc_feature 1..192: note = gNA Variant Scaffold
  source 1..192: mol_type = other RNA
actggcgcttttatctgattactttgagagccatcaccagcgactatgtcgtagtgggtaaagctgcacctctctcgacgcaggactcggcttgctgaagcgcgcacggcaagaggcgaggggcggcgactggtgagtacgccaaaaattttgactagcggaggctagaaggagagaggtgcagcatcaaag

SEQ ID NO: 2303 - RNA, 156 nt, synthetic construct
  misc_feature 1..156: note = gNA Variant Scaffold
  source 1..156: mol_type = other RNA
actggcgcttttatctgattactttgagagccatcaccagcgactatgtcgtagtgggtaaagctgcacggtgcccgtctgttgtgtcgagagacgccaaaaattttgactagcggaggctagaaggagagagatgggtgccgtgcagcatcaaag

SEQ ID NO: 2304 - RNA, 96 nt, synthetic construct
  misc_feature 1..96: note = gNA Variant Scaffold
  source 1..96: mol_type = other RNA
actggcgcttttatctgattactttgagagccatcaccagcgactatgtcgtagtgggtaaagctgcacatggagaggagatgtgcagcatcaaag

SEQ ID NO: 2305 - RNA, 91 nt, synthetic construct
  misc_feature 1..91: note = gNA Variant Scaffold
  source 1..91: mol_type = other RNA
actggcgcttttatctgattactttgagagccatcaccagcgactatgtcgtagtgggtaaagctgcacatggagatgtgcagcatcaaag

SEQ ID NO: 2306 - RNA, 106 nt, synthetic construct
  misc_feature 1..106: note = gNA Variant Scaffold
  source 1..106: mol_type = other RNA
actggcgcttttatctgattactttgagagccatcaccagcgactatgtcgtagtgggtaaagcttgggcgcagcgtcaatgacgctgacggtacaagcatcaaag

SEQ ID NO: 2307 - RNA, 145 nt, synthetic construct
  misc_feature 1..145: note = gNA Variant Scaffold
  source 1..145: mol_type = other RNA
actggcgcttttatctgattactttgagagccatcaccagcgactatgtcgtagtgggtaaagctgcactatgggcgcagcgtcaatgacgctgacggtacaggccacatgaggatcacccatgtggtatagtgcagcatcaaag

SEQ ID NO: 2308 - RNA, 155 nt, synthetic construct
  misc_feature 1..155: note = gNA Variant Scaffold
  source 1..155: mol_type = other RNA
actggcgcttttatctgattactttgagagccatcaccagcgactatgtcgtagtgggtaaagctgcactatgggcgcagctcatgaggatcacccatgagctgacggtacaggccacatgaggatcacccatgtggtatagtgcagcatcaaag

SEQ ID NO: 2309 - RNA, 151 nt, synthetic construct
  misc_feature 1..151: note = gNA Variant Scaffold
  source 1..151: mol_type = other RNA
actggcgcttttatctgattactttgagagccatcaccagcgactatgtcgtagtgggtaaagctgcactatgggcgcagcgtcaatgacgctgacggtacaggccacatggcagtcgtaacgacgcgggtggtatagtgcagcatcaaag

SEQ ID NO: 2310 - RNA, 172 nt, synthetic construct
  misc_feature 1..172: note = gNA Variant Scaffold
  source 1..172: mol_type = other RNA
actggcgcttttatctgattactttgagagccatcaccagcgactatgtcgtagtgggtaaagctgcactatgggcgcagcaaacatggcagtcctaaggacgcgggttttgctgacggtacaggccacatggcagtcgtaacgacgcgggtggtatagtgcagcatcaaag

SEQ ID NO: 2311 - RNA, 159 nt, synthetic construct
  misc_feature 1..159: note = gNA Variant Scaffold
  source 1..159: mol_type = other RNA
actggcgcttttatctgattactttgagagccatcaccagcgactatgtcgtagtgggtaaagctgcactatgggcgcagacatggcagtcgtaacgacgcgggtctgacggtacaggccacatgaggatcacccatgtggtatagtgcagcatcaaag

SEQ ID NO: 2312 - RNA, 108 nt, synthetic construct
  misc_feature 1..108: note = gNA Variant Scaffold
  source 1..108: mol_type = other RNA
actggcgcttttatctgattactttgagagccatcaccagcgactatgtcgtagtgggtaaagctgcactaaggagtttatatggaaacccttagtgcagcatcaaag

SEQ ID NO: 2313 - RNA, 242 nt, synthetic construct
  misc_feature 1..242: note = gNA Variant Scaffold
  source 1..242: mol_type = other RNA
actggcgcttttatctgattactttgagagccatcaccagcgactatgtcgtagtgggtaaagctcaggaagcactatgggcgcagcgtcaatgacgctgacggtacaggccagacaattattgtctggtatagtgcagcagcagaacaatttgctgagggctattgaggcgcaacagcatctgttgcaactcacagtctggggcatcaagcagctccaggcaagaatcctgagcatcaaag

SEQ ID NO: 2314 - RNA, 98 nt, synthetic construct
  misc_feature 1..98: note = gNA Variant Scaffold
  source 1..98: mol_type = other RNA
actggcgcttttatctgattactttgagagccatcaccagcgactatgtcgtagtgggtaaagctgcacgccctgaagaagggcgtgcagcatcaaag

SEQ ID NO: 2315 - RNA, 111 nt, synthetic construct
  misc_feature 1..111: note = gNA Variant Scaffold
  source 1..111: mol_type = other RNA
actggcgcttttatctgattactttgagagccatcaccagcgactatgtcgtagtgggtaaagctgcacggctcgtgtagctcattagctccgagccgtgcagcatcaaag

SEQ ID NO: 2316 - RNA, 113 nt, synthetic construct
  misc_feature 1..113: note = gNA Variant Scaffold
  source 1..113: mol_type = other RNA
actggcgcttttatctgattactttgagagccatcaccagcgactatgtcgtagtgggtaaagctgcacccgtgtgcatccgcagtgtcggatccacgggtgcagcatcaaag

SEQ ID NO: 2317 - RNA, 112 nt, synthetic construct
  misc_feature 1..112: note = gNA Variant Scaffold
  source 1..112: mol_type = other RNA
actggcgcttttatctgattactttgagagccatcaccagcgactatgtcgtagtgggtaaagctgcacggaatccattgcactccggatttcactaggtgcagcatcaaag

SEQ ID NO: 2318 - RNA, 103 nt, synthetic construct
  misc_feature 1..103: note = gNA Variant Scaffold
  source 1..103: mol_type = other RNA
actggcgcttttatctgattactttgagagccatcaccagcgactatgtcgtagtgggtaaagctgcacatgcatgtctaagacagcatgtgcagcatcaaag

SEQ ID NO: 2319 - RNA, 106 nt, synthetic construct
  misc_feature 1..106: note = gNA Variant Scaffold
  source 1..106: mol_type = other RNA
actggcgcttttatctgattactttgagagccatcaccagcgactatgtcgtagtgggtaaagctgcacaaaacataaggaaaacctatgttgtgcagcatcaaag

SEQ ID NO: 2320 - RNA, 153 nt, synthetic construct
  misc_feature 1..153: note = gNA Variant Scaffold
  source 1..153: mol_type = other RNA
actggcgcttctatctgattactctgagcgccatcaccagcgactatgtcgtagtgggtaaagccgcttacggactatgggcgcagcgtcaatgacgctgacggtacaggccagacaattattgtctggtatagtccgtaagaggcatcagag

SEQ ID NO: 2321 - RNA, 147 nt, synthetic construct
  misc_feature 1..147: note = gNA Variant Scaffold
  source 1..147: mol_type = other RNA
actggcgcttctatctgattactctgagcgccatcaccagcgactatgtcgtagtgggtaaagccgcttacgggtgggcgcagcgtcaatgacgctgacggtacaggccagacaattattgtctggtacccgtaagaggcatcagag

SEQ ID NO: 2322 - RNA, 153 nt, synthetic construct
  misc_feature 1..153: note = gNA Variant Scaffold
  source 1..153: mol_type = other RNA
actggcgcttctatctgattactctgagcgccatcaccagcgactatgtcgtagtgggtaaagccgcttacggtatgggcgcagcgtcaatgacgctgacggtacaggccacatgaggatcacccatgtggtataccgtaagaggcatcagag

SEQ ID NO: 2323 - RNA, 143 nt, synthetic construct
  misc_feature 1..143: note = gNA Variant Scaffold
  source 1..143: mol_type = other RNA
actggcgcttttatctgattactttgagagccatcaccagcgactatgtcgtagtgggtaaagctccctatgggcgcagcgtcaatgacgctgacggtacaggccacatgaggatcacccatgtggtatagggagcatcaaag

SEQ ID NO: 2324 - RNA, 163 nt, synthetic construct
  misc_feature 1..163: note = gNA Variant Scaffold
  source 1..163: mol_type = other RNA
actggcgcttctatctgattactctgagcgccatcaccagcgactatgtcgtagtgggtaaagccgcttacggtatgggcgcagctcatgaggatcacccatgagctgacggtacaggccacatgaggatcacccatgtggtataccgtaagaggcatcagag

SEQ ID NO: 2325 - RNA, 153 nt, synthetic construct
  misc_feature 1..153: note = gNA Variant Scaffold
  source 1..153: mol_type = other RNA
actggcgcttttatctgattactttgagagccatcaccagcgactatgtcgtagtgggtaaagctccctatgggcgcagctcatgaggatcacccatgagctgacggtacaggccacatgaggatcacccatgtggtatagggagcatcaaag

SEQ ID NO: 2326 - RNA, 159 nt, synthetic construct
  misc_feature 1..159: note = gNA Variant Scaffold
  source 1..159: mol_type = other RNA
actggcgcttctatctgattactctgagcgccatcaccagcgactatgtcgtagtgggtaaagccgcttacggtatgggcgcagcgtcaatgacgctgacggtacaggccacatggcagtcgtaacgacgcgggtggtataccgtaagaggcatcagag

SEQ ID NO: 2327 - RNA, 149 nt, synthetic construct
  misc_feature 1..149: note = gNA Variant Scaffold
  source 1..149: mol_type = other RNA
actggcgcttttatctgattactttgagagccatcaccagcgactatgtcgtagtgggtaaagctccctatgggcgcagcgtcaatgacgctgacggtacaggccacatggcagtcgtaacgacgcgggtggtatagggagcatcaaag

SEQ ID NO: 2328 - RNA, 180 nt, synthetic construct
  misc_feature 1..180: note = gNA Variant Scaffold
  source 1..180: mol_type = other RNA
actggcgcttctatctgattactctgagcgccatcaccagcgactatgtcgtagtgggtaaagccgcttacggtatgggcgcagcaaacatggcagtcctaaggacgcgggttttgctgacggtacaggccacatggcagtcgtaacgacgcgggtggtataccgtaagaggcatcagag

SEQ ID NO: 2329 - RNA, 170 nt, synthetic construct
  misc_feature 1..170: note = gNA Variant Scaffold
  source 1..170: mol_type = other RNA
actggcgcttttatctgattactttgagagccatcaccagcgactatgtcgtagtgggtaaagctccctatgggcgcagcaaacatggcagtcctaaggacgcgggttttgctgacggtacaggccacatggcagtcgtaacgacgcgggtggtatagggagcatcaaag

SEQ ID NO: 2330 - RNA, 167 nt, synthetic construct
  misc_feature 1..167: note = gNA Variant Scaffold
  source 1..167: mol_type = other RNA
actggcgcttctatctgattactctgagcgccatcaccagcgactatgtcgtagtgggtaaagccgcttacggtatgggcgcagacatggcagtcgtaacgacgcgggtctgacggtacaggccacatgaggatcacccatgtggtataccgtaagaggcatcagag

SEQ ID NO: 2331 - RNA, 157 nt, synthetic construct
  misc_feature 1..157: note = gNA Variant Scaffold
  source 1..157: mol_type = other RNA
actggcgcttttatctgattactttgagagccatcaccagcgactatgtcgtagtgggtaaagctccctatgggcgcagacatggcagtcgtaacgacgcgggtctgacggtacaggccacatgaggatcacccatgtggtatagggagcatcaaag

SEQ ID NO: 2332 - RNA, 155 nt, synthetic construct
  misc_feature 1..155: note = gNA Variant Scaffold
  source 1..155: mol_type = other RNA
actggcgcttttatctgattactttgagagccatcaccagcgactatgtcgtagtgggtaaagctgcactatgggcgcagcacctgaggatcacccaggtgctgacggtacaggccacctgaggatcacccaggtggtatagtgcagcatcaaag

SEQ ID NO: 2333 - RNA, 155 nt, synthetic construct
  misc_feature 1..155: note = gNA Variant Scaffold
  source 1..155: mol_type = other RNA
actggcgcttttatctgattactttgagagccatcaccagcgactatgtcgtagtgggtaaagctgcactatgggcgcagcgcatgaggatcacccatgcgctgacggtacaggccgcatgaggatcacccatgcggtatagtgcagcatcaaag

SEQ ID NO: 2334 - RNA, 155 nt, synthetic construct
  misc_feature 1..155: note = gNA Variant Scaffold
  source 1..155: mol_type = other RNA
actggcgcttttatctgattactttgagagccatcaccagcgactatgtcgtagtgggtaaagctgcactatgggcgcagcgcctgaggatcacccaggcgctgacggtacaggccgcctgaggatcacccaggcggtatagtgcagcatcaaag

SEQ ID NO: 2335 - RNA, 155 nt, synthetic construct
  misc_feature 1..155: note = gNA Variant Scaffold
  source 1..155: mol_type = other RNA
actggcgcttttatctgattactttgagagccatcaccagcgactatgtcgtagtgggtaaagctgcactatgggcgcagcgcctgagcatcagccaggcgctgacggtacaggccgcctgagcatcagccaggcggtatagtgcagcatcaaag

SEQ ID NO: 2336 - RNA, 155 nt, synthetic construct
  misc_feature 1..155: note = gNA Variant Scaffold
  source 1..155: mol_type = other RNA
actggcgcttttatctgattactttgagagccatcaccagcgactatgtcgtagtgggtaaagctgcactatgggcgcagcacatgagcatcagccatgtgctgacggtacaggccacatgagcatcagccatgtggtatagtgcagcatcaaag

SEQ ID NO: 2337 - RNA, 155 nt, synthetic construct
  misc_feature 1..155: note = gNA Variant Scaffold
  source 1..155: mol_type = other RNA
actggcgcttttatctgattactttgagagccatcaccagcgactatgtcgtagtgggtaaagctgcactatgggcgcagcacatgagtatcaaccatgtgctgacggtacaggccacatgagtatcaaccatgtggtatagtgcagcatcaaag

SEQ ID NO: 2338 - RNA, 155 nt, synthetic construct
  misc_feature 1..155: note = gNA Variant Scaffold
  source 1..155: mol_type = other RNA
actggcgcttttatctgattactttgagagccatcaccagcgactatgtcgtagtgggtaaagctgcactatgggcgcagcacatgagaatcagccatgtgctgacggtacaggccacatgagaatcagccatgtggtatagtgcagcatcaaag

SEQ ID NO: 2339 - RNA, 155 nt, synthetic construct
  misc_feature 1..155: note = gNA Variant Scaffold
  source 1..155: mol_type = other RNA
actggcgcttttatctgattactttgagagccatcaccagcgactatgtcgtagtgggtaaagctgcactatgggcgcagcccttgaggatcacccatgtgctgacggtacaggccccttgaggatcacccatgtggtatagtgcagcatcaaag

SEQ ID NO: 2340 - RNA, 155 nt, synthetic construct
  misc_feature 1..155: note = gNA Variant Scaffold
  source 1..155: mol_type = other RNA
actggcgcttttatctgattactttgagagccatcaccagcgactatgtcgtagtgggtaaagctgcactatgggcgcagcacttgaggatcacccatgtgctgacggtacaggccacttgaggatcacccatgtggtatagtgcagcatcaaag

SEQ ID NO: 2341 - RNA, 155 nt, synthetic construct
  misc_feature 1..155: note = gNA Variant Scaffold
  source 1..155: mol_type = other RNA
actggcgcttttatctgattactttgagagccatcaccagcgactatgtcgtagtgggtaaagctgcactatgggcgcagcacctgaggatcacccatgtgctgacggtacaggccacctgaggatcacccatgtggtatagtgcagcatcaaag

SEQ ID NO: 2342 - RNA, 155 nt, synthetic construct
  misc_feature 1..155: note = gNA Variant Scaffold
  source 1..155: mol_type = other RNA
actggcgcttttatctgattactttgagagccatcaccagcgactatgtcgtagtgggtaaagctgcactatgggcgcagcacatgaggatcacctatgtgctgacggtacaggccacatgaggatcacctatgtggtatagtgcagcatcaaag

SEQ ID NO: 2343 - RNA, 155 nt, synthetic construct
  misc_feature 1..155: note = gNA Variant Scaffold
  source 1..155: mol_type = other RNA
actggcgcttttatctgattactttgagagccatcaccagcgactatgtcgtagtgggtaaagctgcactatgggcgcagcacattaggatcaccaatgtgctgacggtacaggccacattaggatcaccaatgtggtatagtgcagcatcaaag

SEQ ID NO: 2344 - RNA, 155 nt, synthetic construct
  misc_feature 1..155: note = gNA Variant Scaffold
  source 1..155: mol_type = other RNA
actggcgcttttatctgattactttgagagccatcaccagcgactatgtcgtagtgggtaaagctgcactatgggcgcagcacattaggatcaccgatgtgctgacggtacaggccacattaggatcaccgatgtggtatagtgcagcatcaaag

SEQ ID NO: 2345 - RNA, 155 nt, synthetic construct
  misc_feature 1..155: note = gNA Variant Scaffold
  source 1..155: mol_type = other RNA
actggcgcttttatctgattactttgagagccatcaccagcgactatgtcgtagtgggtaaagctgcactatgggcgcagcacattaggatcacctatgtgctgacggtacaggccacattaggatcacctatgtggtatagtgcagcatcaaag

SEQ ID NO: 2346 - RNA, 155 nt, synthetic construct
  misc_feature 1..155: note = gNA Variant Scaffold
  source 1..155: mol_type = other RNA
actggcgcttttatctgattactttgagagccatcaccagcgactatgtcgtagtgggtaaagctgcactatgggcgcagcacatgaggattacccatgtgctgacggtacaggccacatgaggattacccatgtggtatagtgcagcatcaaag

SEQ ID NO: 2347 - RNA, 155 nt, synthetic construct
  misc_feature 1..155: note = gNA Variant Scaffold
  source 1..155: mol_type = other RNA
actggcgcttttatctgattactttgagagccatcaccagcgactatgtcgtagtgggtaaagctgcactatgggcgcagcacatgaggataacccatgtgctgacggtacaggccacatgaggataacccatgtggtatagtgcagcatcaaag

SEQ ID NO: 2348 - RNA, 155 nt, synthetic construct
  misc_feature 1..155: note = gNA Variant Scaffold
  source 1..155: mol_type = other RNA
actggcgcttttatctgattactttgagagccatcaccagcgactatgtcgtagtgggtaaagctgcactatgggcgcagcacatgaggatgacccatgtgctgacggtacaggccacatgaggatgacccatgtggtatagtgcagcatcaaag

SEQ ID NO: 2349 - RNA, 155 nt, synthetic construct
  misc_feature 1..155: note = gNA Variant Scaffold
  source 1..155: mol_type = other RNA
actggcgcttttatctgattactttgagagccatcaccagcgactatgtcgtagtgggtaaagctgcactatgggcgcagcacatgaggaccacccatgtgctgacggtacaggccacatgaggaccacccatgtggtatagtgcagcatcaaag

SEQ ID NO: 2350 - RNA, 155 nt, synthetic construct
  misc_feature 1..155: note = gNA Variant Scaffold
  source 1..155: mol_type = other RNA
actggcgcttttatctgattactttgagagccatcaccagcgactatgtcgtagtgggtaaagctgcactatgggcgcagcagatgaggatcacccatgggctgacggtacaggccagatgaggatcacccatggggtatagtgcagcatcaaag

SEQ ID NO: 2351 - RNA, 155 nt, synthetic construct
  misc_feature 1..155: note = gNA Variant Scaffold
  source 1..155: mol_type = other RNA
actggcgcttttatctgattactttgagagccatcaccagcgactatgtcgtagtgggtaaagctgcactatgggcgcagcacatggggatcacccatgtgctgacggtacaggccacatggggatcacccatgtggtatagtgcagcatcaaag

SEQ ID NO: 2352 - RNA, 155 nt, synthetic construct
  misc_feature 1..155: note = gNA Variant Scaffold
  source 1..155: mol_type = other RNA
actggcgcttttatctgattactttgagagccatcaccagcgactatgtcgtagtgggtaaagctgcactatgggcgcagcacatgaggatcacccatgtgctgacggtacaggccacatgaggatcacccatgtggtatagtgcagcatcaaag

SEQ ID NO: 2353 - RNA, 96 nt, synthetic construct
  misc_feature 1..96: note = gNA Variant Scaffold
  source 1..96: mol_type = other RNA
actggcgcttttatctgattactttgagagccatcaccagcgactatgtcgtagtgggtaaagctcacctgaggatcacccaggtgagcatcaaag

SEQ ID NO: 2354 - RNA, 96 nt, synthetic construct
  misc_feature 1..96: note = gNA Variant Scaffold
  source 1..96: mol_type = other RNA
actggcgcttttatctgattactttgagagccatcaccagcgactatgtcgtagtgggtaaagctcgcatgaggatcacccatgcgagcatcaaag

SEQ ID NO: 2355 - RNA, 96 nt, synthetic construct
  misc_feature 1..96: note = gNA Variant Scaffold
  source 1..96: mol_type = other RNA
actggcgcttttatctgattactttgagagccatcaccagcgactatgtcgtagtgggtaaagctcgcctgaggatcacccaggcgagcatcaaag

SEQ ID NO: 2356 - RNA, 96 nt, synthetic construct
  misc_feature 1..96: note = gNA Variant Scaffold
  source 1..96: mol_type = other RNA
actggcgcttttatctgattactttgagagccatcaccagcgactatgtcgtagtgggtaaagctcgcctgagcatcagccaggcgagcatcaaag

SEQ ID NO: 2357 - RNA, 96 nt, synthetic construct
  misc_feature 1..96: note = gNA Variant Scaffold
  source 1..96: mol_type = other RNA
actggcgcttttatctgattactttgagagccatcaccagcgactatgtcgtagtgggtaaagctcacatgagcatcagccatgtgagcatcaaag

SEQ ID NO: 2358 - RNA, 96 nt, synthetic construct
  misc_feature 1..96: note = gNA Variant Scaffold
  source 1..96: mol_type = other RNA
actggcgcttttatctgattactttgagagccatcaccagcgactatgtcgtagtgggtaaagctcacatgagtatcaaccatgtgagcatcaaag

SEQ ID NO: 2359 - RNA, 96 nt, synthetic construct
  misc_feature 1..96: note = gNA Variant Scaffold
  source 1..96: mol_type = other RNA
actggcgcttttatctgattactttgagagccatcaccagcgactatgtcgtagtgggtaaagctcacatgagaatcagccatgtgagcatcaaag

SEQ ID NO: 2360 - RNA, 96 nt, synthetic construct
  misc_feature 1..96: note = gNA Variant Scaffold
  source 1..96: mol_type = other RNA
actggcgcttttatctgattactttgagagccatcaccagcgactatgtcgtagtgggtaaagctcccttgaggatcacccatgtgagcatcaaag

SEQ ID NO: 2361 - RNA, 96 nt, synthetic construct
  misc_feature 1..96: note = gNA Variant Scaffold
  source 1..96: mol_type = other RNA
actggcgcttttatctgattactttgagagccatcaccagcgactatgtcgtagtgggtaaagctcacttgaggatcacccatgtgagcatcaaag

SEQ ID NO: 2362 - RNA, 96 nt, synthetic construct
  misc_feature 1..96: note = gNA Variant Scaffold
  source 1..96: mol_type = other RNA
actggcgcttttatctgattactttgagagccatcaccagcgactatgtcgtagtgggtaaagctcacctgaggatcacccatgtgagcatcaaag

SEQ ID NO: 2363 - RNA, 96 nt, synthetic construct
  misc_feature 1..96: note = gNA Variant Scaffold
  source 1..96: mol_type = other RNA
actggcgcttttatctgattactttgagagccatcaccagcgactatgtcgtagtgggtaaagctcacatgaggatcacctatgtgagcatcaaag

SEQ ID NO: 2364 - RNA, 96 nt, synthetic construct
  misc_feature 1..96: note = gNA Variant Scaffold
  source 1..96: mol_type = other RNA
actggcgcttttatctgattactttgagagccatcaccagcgactatgtcgtagtgggtaaagctcacattaggatcaccaatgtgagcatcaaag

SEQ ID NO: 2365 - RNA, 96 nt, synthetic construct
  misc_feature 1..96: note = gNA Variant Scaffold
  source 1..96: mol_type = other RNA
actggcgcttttatctgattactttgagagccatcaccagcgactatgtcgtagtgggtaaagctcacattaggatcaccgatgtgagcatcaaag

SEQ ID NO: 2366 - RNA, 96 nt, synthetic construct
  misc_feature 1..96: note = gNA Variant Scaffold
  source 1..96: mol_type = other RNA
actggcgcttttatctgattactttgagagccatcaccagcgactatgtcgtagtgggtaaagctcacattaggatcacctatgtgagcatcaaag

SEQ ID NO: 2367 - RNA, 96 nt, synthetic construct
  misc_feature 1..96: note = gNA Variant Scaffold
  source 1..96: mol_type = other RNA
actggcgcttttatctgattactttgagagccatcaccagcgactatgtcgtagtgggtaaagctcacatgaggattacccatgtgagcatcaaag

SEQ ID NO: 2368 - RNA, 96 nt, synthetic construct
  misc_feature 1..96: note = gNA Variant Scaffold
  source 1..96: mol_type = other RNA
actggcgcttttatctgattactttgagagccatcaccagcgactatgtcgtagtgggtaaagctcacatgaggataacccatgtgagcatcaaag

SEQ ID NO: 2369 - RNA, 96 nt, synthetic construct
  misc_feature 1..96: note = gNA Variant Scaffold
  source 1..96: mol_type = other RNA
actggcgcttttatctgattactttgagagccatcaccagcgactatgtcgtagtgggtaaagctcacatgaggatgacccatgtgagcatcaaag

SEQ ID NO: 2370 - RNA, 96 nt, synthetic construct
  misc_feature 1..96: note = gNA Variant Scaffold
  source 1..96: mol_type = other RNA
actggcgcttttatctgattactttgagagccatcaccagcgactatgtcgtagtgggtaaagctcacatgaggaccacccatgtgagcatcaaag

SEQ ID NO: 2371 - RNA, 96 nt, synthetic construct
  misc_feature 1..96: note = gNA Variant Scaffold
  source 1..96: mol_type = other RNA
actggcgcttttatctgattactttgagagccatcaccagcgactatgtcgtagtgggtaaagctcagatgaggatcacccatgggagcatcaaag

SEQ ID NO: 2372 - RNA, 96 nt, synthetic construct
  misc_feature 1..96: note = gNA Variant Scaffold
  source 1..96: mol_type = other RNA
actggcgcttttatctgattactttgagagccatcaccagcgactatgtcgtagtgggtaaagctcacatggggatcacccatgtgagcatcaaag

SEQ ID NO: 2373 - RNA, 96 nt, synthetic construct
  misc_feature 1..96: note = gNA Variant Scaffold
  source 1..96: mol_type = other RNA
actggcgcttctatctgattactctgagcgccatcaccagcgactatgtcgtagtgggtaaagctcacatgaggatcacccatgtgagcatcagag

SEQ ID NO: 2374 - RNA, 145 nt, synthetic construct
  misc_feature 1..145: note = gNA Variant Scaffold
  source 1..145: mol_type = other RNA
actggcgcttctatctgattactctgagcgccatcaccagcgactatgtcgtagtgggtaaagctgcactatgggcgcagcgtcaatgacgctgacggtacaggccacatgaggatcacccatgtggtatagtgcagcatcagag

SEQ ID NO: 2375 - RNA, 155 nt, synthetic construct
  misc_feature 1..155: note = gNA Variant Scaffold
  source 1..155: mol_type = other RNA
actggcgcttctatctgattactctgagcgccatcaccagcgactatgtcgtagtgggtaaagctgcactatgggcgcagctcatgaggatcacccatgagctgacggtacaggccacatgaggatcacccatgtggtatagtgcagcatcagag

SEQ ID NO: 2376 - RNA, 99 nt, synthetic construct
  misc_feature 1..99: note = gNA Variant Scaffold
  source 1..99: mol_type = other RNA
actgggccttctatctgattactctgaggcccatcaccagcgactatgtcgtagtgggtaaagccgcttagggacttcggtccctaagaggcatcagag

SEQ ID NO: 2377 - RNA, 141 nt, synthetic construct
  misc_feature 1..141: note = gNA Variant Scaffold
  source 1..141: mol_type = other RNA
actggcgcttttatctgattactttgagagccatcaccagcgactatgtcgtagtgggtaaagctgcactatgggcgcagcgtcaatgacgctgacggtacaggccagacaattattgtctggtatagtgcagcatcaaag

SEQ ID NO: 2378 - RNA, 97 nt, synthetic construct
  misc_feature 1..97: note = gNA Variant Scaffold
  source 1..97: mol_type = other RNA
actgggccttctatctgattactctgaggcccatcaccagcgactatgtcgtagtgggtaaagcccttagggacttcggtccctaagggcatcagag

SEQ ID NO: 2379 - RNA, 97 nt, synthetic construct; identical to SEQ ID NO: 2286
  misc_feature 1..97: note = gNA Variant Scaffold
  source 1..97: mol_type = other RNA

SEQ ID NO: 2380 - RNA, 97 nt, synthetic construct; identical to SEQ ID NO: 2286
  misc_feature 1..97: note = gNA Variant Scaffold
  source 1..97: mol_type = other RNA

SEQ ID NO: 2381 - DNA, 99 bp, synthetic construct
  misc_feature 1..99: note = gNA Variant Scaffold
  source 1..99: mol_type = other DNA
  misc_feature 1..65: note = RNA fragment
  misc_feature 66: note = DNA fragment
  misc_feature 67..99: note = RNA fragment
actgggccttctatctgattactctgaggcccatcaccagcgactatgtcgtagtgggtaaagcctcttagggacttcggtccctaagaggcatcagag

SEQ ID NO: 2382 - RNA, 89 nt, synthetic construct
  misc_feature 1..89: note = gNA Variant Scaffold
  source 1..89: mol_type = other RNA
actgggccttctatctgattactctgaggcccatcaccagcgactatgtcgtagtgggtaaagctccctcttcggagggagcatcagag

SEQ ID NO: 2383 - DNA, 97 bp, synthetic construct
  misc_feature 1..97: note = gNA Variant Scaffold
  source 1..97: mol_type = other DNA
  misc_feature 1..75: note = RNA fragment
  misc_feature 76..77: note = DNA fragment
  misc_feature 78..97: note = RNA fragment
actgggccttctatctgattactctgaggcccatcaccagcgactatgtcgtagtgggtaaagcccttagggaccttggtccctaagggcatcagag

SEQ ID NO: 2384 - DNA, 99 bp, synthetic construct
  misc_feature 1..99: note = gNA Variant Scaffold
  source 1..99: mol_type = other DNA
  misc_feature 1..65: note = RNA fragment
  misc_feature 66: note = DNA fragment
  misc_feature 67..76: note = RNA fragment
  misc_feature 77..78: note = DNA fragment
  misc_feature 79..99: note = RNA fragment
actgggccttctatctgattactctgaggcccatcaccagcgactatgtcgtagtgggtaaagcctcttagggaccttggtccctaagaggcatcagag

SEQ ID NO: 2385 - DNA, 89 bp, synthetic construct
  misc_feature 1..89: note = gNA Variant Scaffold
  source 1..89: mol_type = other DNA
  misc_feature 1..71: note = RNA fragment
  misc_feature 72..73: note = DNA fragment
  misc_feature 74..89: note = RNA fragment
actgggccttctatctgattactctgaggcccatcaccagcgactatgtcgtagtgggtaaagctccctccttggagggagcatcagag

SEQ ID NO: 2386 - RNA, 97 nt, synthetic construct
  misc_feature 1..97: note = gNA Variant Scaffold
  source 1..97: mol_type = other RNA
actgggccttctatctgattactctgaggcccatcaccagcgactatgtcgtagtgggtaaagcccttagggaggaaactccctaagggcatcagag

SEQ ID NO: 2387 - DNA, 99 bp, synthetic construct
  misc_feature 1..99: note = gNA Variant Scaffold
  source 1..99: mol_type = other DNA
  misc_feature 1..65: note = RNA fragment
  misc_feature 66: note = DNA fragment
  misc_feature 67..99: note = RNA fragment
actgggccttctatctgattactctgaggcccatcaccagcgactatgtcgtagtgggtaaagcctcttagggaggaaactccctaagaggcatcagag

SEQ ID NO: 2388 - RNA, 89 nt, synthetic construct
  misc_feature 1..89: note = gNA Variant Scaffold
  source 1..89: mol_type = other RNA
actgggccttctatctgattactctgaggcccatcaccagcgactatgtcgtagtgggtaaagctccctggaaacagggagcatcagag

SEQ ID NO: 2389 - RNA, 98 nt, synthetic construct
  misc_feature 1..98: note = gNA Variant Scaffold
  source 1..98: mol_type = other RNA
actgggccttctatctgattactctgaggcccatcaccagcgactatgtcgtagtgggtaaagcccttagggacttcaggtccctaagggcatcagag

SEQ ID NO: 2390 - DNA, 100 bp, synthetic construct
  misc_feature 1..100: note = gNA Variant Scaffold
  source 1..100: mol_type = other DNA
  misc_feature 1..65: note = RNA fragment
  misc_feature 66: note = DNA fragment
  misc_feature 67..100: note = RNA fragment
actgggccttctatctgattactctgaggcccatcaccagcgactatgtcgtagtgggtaaagcctcttagggacttcaggtccctaagaggcatcagag

SEQ ID NO: 2391 - RNA, 90 nt, synthetic construct
  misc_feature 1..90: note = gNA Variant Scaffold
  source 1..90: mol_type = other RNA
actgggccttctatctgattactctgaggcccatcaccagcgactatgtcgtagtgggtaaagctccctcttcaggagggagcatcagag

SEQ ID NO: 2392 - DNA, 97 bp, synthetic construct
  misc_feature 1..97: note = gNA Variant Scaffold
  source 1..97: mol_type = other DNA
  misc_feature 1..75: note = RNA fragment
  misc_feature 76..77: note = DNA fragment
  misc_feature 78..97: note = RNA fragment
actgggccttctatctgattactctgaggcccatcaccaggcactatgtgctagtgggtaaagcccttagggaccttggtccctaagggcatcagag

SEQ ID NO: 2393 - DNA, 99 bp, synthetic construct
  misc_feature 1..99: note = gNA Variant Scaffold
  source 1..99: mol_type = other DNA
  misc_feature 1..65: note = RNA fragment
  misc_feature 66: note = DNA fragment
  misc_feature 67..76: note = RNA fragment
  misc_feature 77..78: note = DNA fragment
  misc_feature 79..99: note = RNA fragment
actgggccttctatctgattactctgaggcccatcaccaggcactatgtgctagtgggtaaagcctcttagggaccttggtccctaagaggcatcagag

SEQ ID NO: 2394 - DNA, 89 bp, synthetic construct
  misc_feature 1..89: note = gNA Variant Scaffold
  source 1..89: mol_type = other DNA
  misc_feature 1..71: note = RNA fragment
  misc_feature 72..73: note = DNA fragment
  misc_feature 74..89: note = RNA fragment
actgggccttctatctgattactctgaggcccatcaccaggcactatgtgctagtgggtaaagctccctccttggagggagcatcagag

SEQ ID NO: 2395 - RNA, 97 nt, synthetic construct
  misc_feature 1..97: note = gNA Variant Scaffold
  source 1..97: mol_type = other RNA
actgggccttctatctgattactctgaggcccatcaccaggcactatgtgctagtgggtaaagcccttagggaggaaactccctaagggcatcagag

SEQ ID NO: 2396 - DNA, 99 bp, synthetic construct
  misc_feature 1..99: note = gNA Variant Scaffold
  source 1..99: mol_type = other DNA
  misc_feature 1..65: note = RNA fragment
  misc_feature 66: note = DNA fragment
  misc_feature 67..99: note = RNA fragment
actgggccttctatctgattactctgaggcccatcaccaggcactatgtgctagtgggtaaagcctcttagggaggaaactccctaagaggcatcagag

SEQ ID NO: 2397 - RNA, 89 nt, synthetic construct
  misc_feature 1..89: note = gNA Variant Scaffold
  source 1..89: mol_type = other RNA
actgggccttctatctgattactctgaggcccatcaccaggcactatgtgctagtgggtaaagctccctggaaacagggagcatcagag

SEQ ID NO: 2398 - RNA, 98 nt, synthetic construct
  misc_feature 1..98: note = gNA Variant Scaffold
  source 1..98: mol_type = other RNA
actgggccttctatctgattactctgaggcccatcaccaggcactatgtgctagtgggtaaagcccttagggacttcaggtccctaagggcatcagag

SEQ ID NO: 2399 - DNA, 100 bp, synthetic construct
  misc_feature 1..100: note = gNA Variant Scaffold
  source 1..100: mol_type = other DNA
  misc_feature 1..65: note = RNA fragment
  misc_feature 66: note = DNA fragment
  misc_feature 67..99: note = RNA fragment
actgggccttctatctgattactctgaggcccatcaccaggcactatgtgctagtgggtaaagcctcttagggacttcaggtccctaagaggcatcagag

SEQ ID NO: 2400 - RNA, 90 nt, synthetic construct
  misc_feature 1..90: note = gNA Variant Scaffold
  source 1..90: mol_type = other RNA
actgggccttctatctgattactctgaggcccatcaccaggcactatgtgctagtgggtaaagctccctcttcaggagggagcatcagag

SEQ ID NO: 2401 - DNA, 200 bp, synthetic construct
  misc_feature 1..200: note = Poly A sequence
  source 1..200: mol_type = other DNA
gacgggaggctgtgtccgtgggtgtgcagtgcccagcacgggacccggctgcaggggaccttcaataaacacttgtccagtgacctgagtggatgcatgctgggtgctgggggaggacggggcacccggggctgggctttggggcaccgtgctcatgcctggccgtggtcccctccacagggggcaaagcggagggcagc

SEQ ID NO: 2402 - DNA, 200 bp, synthetic construct
  misc_feature 1..200: note = Poly A sequence
  source 1..200: mol_type = other DNA
gggcgcccaggggggctggcgaggagctgccgccggatcccggggaccctcctactgatgcccgtggtcaccacaataaagagccctccaccctccccactgccttcgagtgctgcctggatgtttcactgggggtggaagccaggctgccgaggtcggcgggagatgggtgggggcagaagggtgctgttcacagggga

SEQ ID NO: 2403 - DNA, 200 bp, synthetic construct
  misc_feature 1..200: note = Poly A sequence
  source 1..200: mol_type = other DNA
gtctggcgccgcccttcccgcccgttgctgctgtgatccgtagtaataaattctcagaggactcagcctttcctgcgggtctggagctccatttgccgggtgtgaggtctctcaggattgaggctgctgccagtcccaggtgttgcagaagacccgggcagcagggtggcagattggccgtccctctctctagctggctc

SEQ ID NO: 2404 - DNA, 200 bp, synthetic construct
  misc_feature 1..200: note = Poly A sequence
  source 1..200: mol_type = other DNA
ggccccgtgtccacaggaggccacctcggtgtgaatggaaggaaacgctgcctctgcttgcgtgactctgctccccgattctccagagccccgtggttgctggcttgaataaaatgctcagtggcggctatggagggcactgctccttgggccccacgccagcagcaaggccctccccatgcacccgcacactcatgggc

SEQ ID NO: 2405 - DNA, 200 bp, synthetic construct
  misc_feature 1..200: note = Poly A sequence
  source 1..200: mol_type = other DNA
tgctgccccgcatgcacgcggggggctggccgcacacgtgagagcacaggcctggagtcacaccccttgtacacatggacccccccacagacacggaccctgcggcacacacagcgcacagggcacacgcgctggcagccaggcacacgaagacaccaggtgcacagctgtcatcggccccacacgggggcgcacaaaca

SEQ ID NO: 2406 - DNA, 200 bp, synthetic construct
  misc_feature 1..200: note = Poly A sequence
  source 1..200: mol_type = other DNA
atttcatttatctggaaaattttgtatgagttcttgaataaaacttgggaaccaaaatggtggtttatccttgtatctctgcagtgtggattgaacagaaaattggaaatcatagtcaaagggcttcccttggttcgccactcatttatttgtaacttgacttctttttttttctgcttaaaaatttcaattctcgtggt

SEQ ID NO: 2407 - DNA, 200 bp, synthetic construct
  misc_feature 1..200: note = Poly A sequence
  source 1..200: mol_type = other DNA
ccattctggccaccagagcccacttggccccacccctcaataaaccgtgtggctttggactctcgtatttcagcctgacagtctgttcccgtgtcctggagttggggaagtgctgccttcccacccacgccttcaggagagagtagtgccctgcccggtcctatgtgggcctcagctcagctggcagcttcccctcctgt

SEQ ID NO: 2408 - DNA, 200 bp, synthetic construct
  misc_feature 1..200: note = Poly A sequence
  source 1..200: mol_type = other DNA
acgcccacctccaggcagacccatcactggaagtgggatttgaaatgcagccaagaagaggagtccgtcggcaacgcccgcccggaacaagaaataaataaataaataatcagggttgtcttggctgataaacggtccccacctcgaagaagacttctcccccctctgcgctccctcctcctccctctccgggcagatcc

SEQ ID NO: 2409 - DNA, 200 bp, synthetic construct
  misc_feature 1..200: note = Poly A sequence
  source 1..200: mol_type = other DNA
tcctggaagacacgtggcgcctgtggaccggaagcaccaaatgctggtgctgcttttgtacatacatatttttaaaccattaaaattcttcctgaagaaagctgattcctgacttttattttgttgccgccacagctctggcaggttgccatcctgttcaggcaaccatcttcagctgtctgtgggcaggtgagtgtgct

SEQ ID NO: 2410 - DNA, 200 bp, synthetic construct
  misc_feature 1..200: note = Poly A sequence
  source 1..200: mol_type = other DNA
ttgttctcatagaataaaaaacagaactgaacttagccttcccagggaaggaaccatgccccacacatccagggagtgatgacagaggggacagcttgaagagctctgaaggacaataaaacccactcctcagtcctagctgctgctttcagtctctcctagcggctgcccctctgccccagccagtgaggccaggaagg

SEQ ID NO: 2411 - DNA, 200 bp, synthetic construct
  misc_feature 1..200: note = Poly A sequence
  source 1..200: mol_type = other DNA
ttgttgctgggagcggcggcagcgagtccctgcaacagcaataaacttccttctcctcgggccacctggatccttgatttgtgcagcttctgttgcttccctcctctctggtgctgcccctttccacactatggagccaaagagagtccccactcagccagtttcccccaccctgcattagacaggtggggaaacagagg

SEQ ID NO: 2412 - DNA, 200 bp, synthetic construct
  misc_feature 1..200: note = Poly A sequence
  source 1..200: mol_type = other DNA
gctggcggcccttctgactgtttatttaaggatggatggcaccctggaaccgggaagggtggcctgttccctagagagaataaattggattattttctaatgctgcctataggtccctgtggggtgggtggggagctggcagctacaactgatgccacagaaaggctgtaccacccaggaaccagccttcctgggaaggt

SEQ ID NO: 2413 - DNA, 200 bp, synthetic construct
  misc_feature 1..200: note = Poly A sequence
  source 1..200: mol_type = other DNA
aaaaataaagctggttcccagagctggtgtccatccctcatctcagctgcaaggttgctggtctgggactggagctccttacctgcgctggcccagagtgagtttcccgtggtcacgtgggcactgcaggctcgggcccctgggctcctcctcatgctccatttcttggcagggagatgccagggagagagggtctccca

SEQ ID NO: 2414 - DNA, 200 bp, synthetic construct
  misc_feature 1..200: note = Poly A sequence
  source 1..200: mol_type = other DNA
caaataaagtcatgatattttcctggctctgctgtgcctgtcttgtacctggcaccatagaccctcccacctgcccaggaggaaatgcacatacccccgggtgcccagctggcagcccctgcacgtgtctgcccctggaaccccctggggggctggtttttcaggctggtttttcagcctgacaaccccctggaaccccc

SEQ ID NO: 2415 - DNA, 200 bp, synthetic construct
  misc_feature 1..200: note = Poly A sequence
  source 1..200: mol_type = other DNA
ctgtgggctgcttcacatccaccccggctccccctgccagcaacgctcactctacccccaacaccaccccttgcccaaccaatgcacacagtagggcttggtgaatgctgctgagtgaatgagtaaataaactcttcaaggccaagggacagtggtctaattcaactctgtgtcccagcacctggcacaccagaagtgcc

SEQ ID NO: 2416 - DNA, 200 bp, synthetic construct
  misc_feature 1..200: note = Poly A sequence
  source 1..200: mol_type = other DNA
ttcccgtttctatccaaaagagcaataaaaagttttcagtgaaatgtgcaattctgttgtgtgttctgtgaaaggatcctggccatattcaagtccttggacctcaagccacttaaagcttcgatgggagtagctggtaacaaccccgtcatcctctgattggatgccagtatttcctggcagatccaagtccaagcttc

SEQ ID NO: 2417 - DNA, 200 bp, synthetic construct
  misc_feature 1..200: note = Poly A sequence
  source 1..200: mol_type = other DNA
agcacccgccccctcaacccgctgctccgccaggctcttgggtgggccatctcgccaggcacgtaggaaaggcctgggaccagctgggccagggagggggcggtgccgacccgccccttggtaactcgagccccggctggcgggcctggctgctgggtctttgtcttctaggttcctctttctcccaagaagggctaagt

SEQ ID NO: 2418 - DNA, 200 bp, synthetic construct
  misc_feature 1..200: note = Poly A sequence
  source 1..200: mol_type = other DNA
cacaccagccccaggacctggggcgactggaggaagccaggcgagtggggcccaggactggttccagtgagagaaaccaaccacaggcacccaagcactaccagacaaagcgtattaaacagaacacttttgaacctttgtcctggcaattttggaggtgtatggtgggaggggtatcctgggaagagccccctaggtct

SEQ ID NO: 2419 - DNA, 200 bp, synthetic construct
  misc_feature 1..200: note = Poly A sequence
  source 1..200: mol_type = other DNA
tgcacaccgtgtgccatagaatggcacatgtcattgcccacttctgtgtagacatggttctggtttaactaatatttgtctgtgtgctactaacagattataataaattgtcatcagtgaactgtgtttgatgccttcttctatctggaagagatagacagacaccaatggactgctaaaatggattagaggcgtccctg

SEQ ID NO: 2420 - DNA, 200 bp, synthetic construct
  misc_feature 1..200: note = Poly A sequence
  source 1..200: mol_type = other DNA
cgtcccacgcaggcccacactgcccctctcattctcttcaaactgtgactttttacagactcgggcgggtgttctgcggccccccaggtgctatgggggaggggggcgttgaatggaattaaaccagaaagaaagcaagcggctccgtgtcctgcttcccctccttgcgcctttcctcccggtctccgcggagtcagccc

SEQ ID NO: 2421 - DNA, 200 bp, synthetic construct
  misc_feature 1..200: note = Poly A sequence
  source 1..200: mol_type = other DNA
gtagagagctgtgagccccagccccacctgactccagcacacctggcgagtagtagctgtcaataaatctatggtaaacagacaagaggttagtaagtattcttttattgtgacaaaccctctcccaggcttagtcagctactcctttctctggccagagaatcccataaggaaatagcccccacagccagggctgctct

SEQ ID NO: 2422 - DNA, 200 bp, synthetic construct
  misc_feature 1..200: note = Poly A sequence
  source 1..200: mol_type = other DNA
aaaagcaatggcaagtgctctccaataaagtagggggagaaagcaaacccaaaaacccgcttctaaaatggtgatatatattttacgctttaagtttacttatcctaaaacttacctacatctaccccagccttactactactctttccttttagagatcttcatggaatcaaagggcctcattcagacttccttttttt

SEQ ID NO: 2423 - DNA, 200 bp, synthetic construct
  misc_feature 1..200: note = Poly A sequence
  source 1..200: mol_type = other DNA
agttagtccttgaccactagtttgatgccatctccattttgggtgacctgtttcaccagcaggcctgttactctccatgactaactgtgtaagtgcttaaaatggaataaattgcttttctacataaccccatgctgatgggttttatttagtataaaacatccatcaaacaccagtctctggcttctagaagagtcctt

SEQ ID NO: 2424 - DNA, 200 bp, synthetic construct
  misc_feature 1..200: note = Poly A sequence
  source 1..200: mol_type = other DNA
ttgatgccatctccattttgggtgacctgtttcaccagcaggcctgttactctccatgactaactgtgtaagtgcttaaaatggaataaattgcttttctacataaccccatgctgatgggttttatttagtataaaacatccatcaaacaccagtctctggcttctagaagagtccttcagatgacagttgttgtccat

SEQ ID NO: 2425 - DNA, 200 bp, synthetic construct
  misc_feature 1..200: note = Poly A sequence
  source 1..200: mol_type = other DNA
caatatgcacattgcttaacagtgaagtcaataatcctgtgttaagttttgtataagtatcctaaaagataatttcctaatgtggatttgtgttttcagtgattaaatgttttaataatttttccctttttgttgaggaatttaataattatgattgttataaataattatgtataattataatctagggtagaaaattt

SEQ ID NO: 2426 - DNA, 200 bp, synthetic construct
  misc_feature 1..200: note = Poly A sequence
  source 1..200: mol_type = other DNA
cttggaggactgcaggaggagggcagggttgggtgggcaatggaaggagggaggagagaaatgaatggaataaatgcagaggatctcaggccggctgttctctgccccactgtatgtagccagcagggagagggttcttgaacaccctcctgtctatggaggagcaaagatggggaacactattcctccgaactccatgt

SEQ ID NO: 2427 - DNA, 200 bp, synthetic construct
  misc_feature 1..200: note = Poly A sequence
  source 1..200: mol_type = other DNA
tgtttaaaaggtttttattaaattatacaaaaacaggcagttagaaattgtgttttcttcctgccccattgacatttctaaggccctaatgcatttgttctgaggtttgacagttgaagcccttcaccagtgctagggaaataaagcctcctcaaccttaaggatttcagtgataagagtctgaaagtctagcacttcag

SEQ ID NO: 2428 - DNA, 200 bp, synthetic construct
  misc_feature 1..200: note = Poly A sequence
  source 1..200: mol_type = other DNA
gataataaaaacttgtctgtgatatggtgcctctttgagtggcagttgcttgatcattgtatagctggtgtggaagggcttctgcccccttcctcgaggacaggggtgtccagaatctgcgtctgagatctctctgcatagaggtgagtccaacactgctcctgccgtgaaagatgtcccaggatccatggcaggacggt

SEQ ID NO: 2429 - DNA, 200 bp, synthetic construct
  misc_feature 1..200: note = Poly A sequence
  source 1..200: mol_type = other DNA
cagagcagctgctgatgtctggaggctgattttcctgttctctgttctccactggaaaggttgtttacgacaaacctccttgtcaaagtgtgtaaaaataaaggattgctccatcctatttgttctattttctcttggatcatgactttcttttcttttctttttttgtttttgagtcagagtcttgctctgttggccag

SEQ ID NO: 2430 - DNA, 200 bp, synthetic construct
  misc_feature 1..200: note = Poly A sequence
  source 1..200: mol_type = other DNA
actttgtgtgtttgctgcccacctcccttttattttttaaatgcattaaaaactgtgctagtctcctttgcatggacttcaagctgcatgaaatgcaataaatctcattttagataatttagagtctgggtttctgtgtctgggggcattcatggggccactttgcttggaaaggttcatttgccctcagtttgtgtgtc

SEQ ID NO: 2431 - DNA, 200 bp, synthetic construct
  misc_feature 1..200: note = Poly A sequence
  source 1..200: mol_type = other DNA
gggcccgcacaccacccacgtgcctccagacagcgagtgacatcccatctcctcctctgcattaaagatgacctgctgaacattgtcatatgtctctgtaatggggtggtgggacacatagtgtctaacacttcagtttctctgctgcttccctcccattgagaagccagtgccagggttgctgtgaagatgggagagct

SEQ ID NO: 2432 - DNA, 200 bp, synthetic construct
  misc_feature 1..200: note = Poly A sequence
  source 1..200: mol_type = other DNA
ggccattgctccatctcacctctgctccagaaataaatgcctgacacctccccacaacctgcaatctgtcgggcactcttctcgttcaactccctgtagccctttgggactttgcggtcccctaagtagaaaattcctatgggcctgtctcctgggggcctctgtctgctggtggtctgcttaccacagaatcctaaggg

SEQ ID NO: 2433 - DNA, 200 bp, synthetic construct
  misc_feature 1..200: note = Poly A sequence
  source 1..200: mol_type = other DNA
tccttgttttgtcttcacccatgtaataaaggtgtttattgttttgttcccacatttatgttgcctgaatatatgactgttttctctgctttatttccttgccctgcaaaactgatctgggtgggtggctgcaaccccttgccttaacctctgcctcctactgtcctgagccaggctcaccacactgtaaagtccctgtt

SEQ ID NO: 2434 - DNA, 200 bp, synthetic construct
  misc_feature 1..200: note = Poly A sequence
  source 1..200: mol_type = other DNA
tgtatacctttaccctcaagtaccactaacacagatgattgatcgtttccaggacaataaaagtttcggagttgaactattgtgtagttttgtttgtgaaagattgtgcccatatcctcagttcttcttagcctctgctccttccctgggaaccctctctatatcctcttcacaagtcatgggggttaggtatcagtgaa

SEQ ID NO: 2435 - DNA, 200 bp, synthetic construct
  misc_feature 1..200: note = Poly A sequence
  source 1..200: mol_type = other DNA
accacagcttcttggcctcccttccagctctgcagctaatgaggtcctgccacaacggaaagagggagttaataaagccattggagcatccatattgcttgcttgtcttatttgcctggtcaggcctgagatggaggctgtttccctcagggatgacagacctcgggctgctggatgtgacctgcccttgaagcccaaat

SEQ ID NO: 2436 - DNA, 200 bp, synthetic construct
  misc_feature 1..200: note = Poly A sequence
  source 1..200: mol_type = other DNA
gttggtcattgattaaaaaaggagaagccctctggggatgtcttgtgattgtgattttgtgtgtcaggggggtgctggagggaagtggtggagagaatacttgtgttggatggtgagttttccttactgtcctccacagagtttatcttccatttggggccatttggccaccaggggatgcctgagtctcaaactccaag

SEQ ID NO: 2437 - DNA, 200 bp, synthetic construct
  misc_feature 1..200: note = Poly A sequence
  source 1..200: mol_type = other DNA
ataaactgcagtcacgttggcctgaagcaatgtgtattttaaaatgtgtttgtttgtattttatggagttagttatactactgccttagggcttccattgaagttttgcactggcatcatagcatttgatttactttttatcctttgttgagtctaataaacccagggttactgtaggagctggcaaaggaaaattagca

SEQ ID NO: 2438 - DNA, 200 bp, synthetic construct
  misc_feature 1..200: note = Poly A sequence
  source 1..200: mol_type = other DNA
actgaatattggtgtggacatggggggtgggtgggagtagaaaattttgtgtatatcagggcagtatttttttatgaactataaatgattgtctttaataaatatgtgataaaatccaatttttattattttataaagacctgaacatgtgaactcttctcaattactttgtagaacactaacattctatgtgaagtatt

SEQ ID NO: 2439 - DNA, 200 bp, synthetic construct
  misc_feature 1..200: note = Poly A sequence
  source 1..200: mol_type = other DNA
tgataacaaaatgctcttgcatgattttttaacaatatatttaaacaggaagttgtcactgatatactttattaaaaggatttttatcaatttgtttcagtttttatttacattcttttcaatatttggggtaaaggaattctgtttttatcaatcagcagtactggccaccatgggggaaattagaaaggtttggcttc

SEQ ID NO: 2440 - DNA, 200 bp, synthetic construct
  misc_feature 1..200: note = Poly A sequence
  source 1..200: mol_type = other DNA
cagggcttgcaggtgctgatgccagaagcttctgtgccattgcattaaagacttgtcatttgatccatgttcaagacccttgaggtattgtttcatcatttctgtattgtctttcaataaagaaaacaaacatgtgcaaccagaattagagtcttcatttcaaaataccgctattatttagtttcagtttccatacagtc

SEQ ID NO: 2441 - DNA, 200 bp, synthetic construct
  misc_feature 1..200: note = Poly A sequence
  source 1..200: mol_type = other DNA
aaagcttcctgaaggggtgttttggggacttcttccctctatttatttttatgtcaggtgaactggcatgctgaacatatatatatataggctcatttatagacttttatttccctgctattaaaacttttgaattttagcaatgagatctatttcagtttttgtaccatgtatgtaccaaattttgtactgaatatgaa

SEQ ID NO: 2442 - DNA, 200 bp, synthetic construct
  misc_feature 1..200: note = Poly A sequence
  source 1..200: mol_type = other DNA
aagttccatttcctaaataaaaactaataaaatatagtactttccattatgattcatttaatacctttataaaaaatttttctgtaaaaatttactgcttgaaaaataaatgtagcttttctcatttatcaatttctataatgatacactatagaacaggtttttttggttttaaagttatctaatggtaaataatgccc

SEQ ID NO: 2443 - DNA, 200 bp, synthetic construct
  misc_feature 1..200: note = Poly A sequence
  source 1..200: mol_type = other DNA
cccagcaattttctatgattttttcagatatagataataaacttatgaacagcaactatttctgtgttaagctcttattcttatgaaccttataggaaataccctgaaatattttggaaaagcaaaggagttgacaggtttttttctccaagaaaacaagtgtaactaactttttaagaaaaaaagttgttatttcttgg

SEQ ID NO: 2444 - DNA, 200 bp, synthetic construct
  misc_feature 1..200: note = Poly A sequence
  source 1..200: mol_type = other DNA
tgttgacagatccctgaactaattatagtgaaacatactgcggcccacttccattaaatagatttgtgcaagatgaagtctgaagtgtctgttatccatagattacaaattgccacttgaccacttttttttttttttttttttttgagtcagagtctcgctctgtcgcccaggctggagtgcaatggcacgatctcggg

SEQ ID NO: 2445 - DNA, 200 bp, synthetic construct
  misc_feature 1..200: note = Poly A sequence
  source 1..200: mol_type = other DNA
tgtcccctcacactgcagccaccaatggaggctactcccgaaagaaagatggtggcttcttctccacctagtgttgacagatccctgaactaattatagtgaaacatactgcggcccacttccattaaatagatttgtgcaagatgaagtctgaagtgtctgttatccatagattacaaattgccacttgaccacttttt

SEQ ID NO: 2446 - DNA, 200 bp, synthetic construct
  misc_feature 1..200: note = Poly A sequence
  source 1..200: mol_type = other DNA
ctcttcagaggagctggacccagcatggatggtggaaccacagtacctcttacactccctgtggctccaacttcaggaaataaatttcccattgcgagggacccagctctgtttctgctgcttccatcaaagccaaaaggacctacactaaagaaatgcagggtgggggtggggaaccctgagcacttttttacaattgg

SEQ ID NO: 2447 - DNA, 200 bp, synthetic construct
  misc_feature 1..200: note = Poly A sequence
  source 1..200: mol_type = other DNA
gcccctctggtgtcagaaaccagggaaaacccttgtcttttcttctaagtgacatgttggaagccttctcatcccggggcaaagcaggcatcaaaaccagaataggccaatctcttttccattaaataaactgtaaacacaagaacccaccgagttctctgagattcttttcttgaattgaactctgcaactcagttgtc

SEQ ID NO: 2448 - DNA, 200 bp, synthetic construct
  misc_feature 1..200: note = Poly A sequence
  source 1..200: mol_type = other DNA
tggcaacttaactgaagaagggatgtccgctatatccaaaattacagctattggcaaataaacgagatggataaaggtgtgtgtctgtatttgctttgactagaaactgaaagataagaagaaagctctgtggggtggtggaaagagcaccagaacagttctagaaatgtggtgtcccccaggttctttattccaccccc

SEQ ID NO: 2449 - DNA, 200 bp, synthetic construct
  misc_feature 1..200: note = Poly A sequence
  source 1..200: mol_type = other DNA
aatgacatggatttaaatcaattgtttaaaaaaaaaaaaacgaaaaaaaaaaaaaaaacacaaaaaacccagaaaacttttaagtgttgctggaatatcctgcctacagtgggcacctccttgaagaagctgatagcttttacacagtattagattgaaataatggacagaaacacattcttgtcaagaaagggggagag

SEQ ID NO: 2450 - DNA, 200 bp, synthetic construct
  misc_feature 1..200: note = Poly A sequence
  source 1..200: mol_type = other DNA
tgggtttgtgctcagccttttaaagctgcaggcagcaccacttgagatttccagaggacccagaccttcgttcattctaaagagtctgatagaattaaaaacaaagtgccttatcttgcactggagttcaagtgctcttttgttagttattcactgattgtacttgtggatggttgagcacaaaaaaccacctctacatt

SEQ ID NO: 2451 - DNA, 200 bp, synthetic construct
  misc_feature 1..200: note = Poly A sequence
  source 1..200: mol_type = other DNA
tccagaagaagcatcttcctcagaagatctggggggatggaaagcaaaataaaggaggtgcctggatgcattatttgcagtgggataagtcgcagagtcttcaactaaacccccctctctatcccctgcagcccaggatacacctgaaagaatttggcatatttagatccattgctgtagtctcccctcatcaaatcttg

SEQ ID NO: 2452 - DNA, 200 bp, synthetic construct
  misc_feature 1..200: note = Poly A sequence
  source 1..200: mol_type = other DNA
gatccaggtggacgaaaccatcttcctgctggagtcttacattgagtgcaccatgaagagtcagtgatccagaagaagcatcttcctcagaagatctggggggatggaaagcaaaataaaggaggtgcctggatgcattatttgcagtgggataagtcgcagagtcttcaactaaacccccctctctatcccctgcagcc

SEQ ID NO: 2453 - DNA, 200 bp, synthetic construct
  misc_feature 1..200: note = Poly A sequence
  source 1..200: mol_type = other DNA
tgcagacaaacaaaccaagaccaaaggctctttttagagccacccaagttttcaaaaaaagagctaatgcgctatttcgtgatcagcccttcatttgacactttggtggctcttaaaagagcctttggggtgaatgagtatggtgtcaagcctcttaattacttgttcttgccaggcttgtgactctccgttttcttggg

SEQ ID NO: 2454 - DNA, 200 bp, synthetic construct
  misc_feature 1..200: note = Poly A sequence
  source 1..200: mol_type = other DNA
tggaagaaggctgctatgactctttggatgggagtctggcaagaggaaattggaagataaaataaataataagtgaaataatctggttaccatctactccttcatgagtctgttctaaagtcacaactaaagagagcgccaggatttagaggcagcaagcgtagattggaaggggaggtgggtgacaattgaattagagg

SEQ ID NO: 2455 - DNA, 200 bp, synthetic construct
  misc_feature 1..200: note = Poly A sequence
  source 1..200: mol_type = other DNA
acccttttcccattcattcacaaataaattacaatgggtgctgagaacttaactttccttaagtctggttccttgttggatctcaggatttcagatctgttcattctcattccaactactccttgcctgcaaggtacacagctctccacactccttttttttttttttttttttttgaggcagagtctcgctctatcgcc

SEQ ID NO: 2456 - DNA, 200 bp, synthetic construct
  misc_feature 1..200: note = Poly A sequence
  source 1..200: mol_type = other DNA
cgctgggagcactggacacttaaatcctcatctgtcctcctttcctgtaaataaaagcccttctatccattttgcctgcctccttccttgggctttggggtgagaatcttggcgctaacccccaagggttactgccagttcaccaggggattatttatactctggggatcagcaggcagggaggttcaggttactaggag

SEQ ID NO: 2457 - DNA, 200 bp, synthetic construct
  misc_feature 1..200: note = Poly A sequence
  source 1..200: mol_type = other DNA
cactgcatttccctttaccaactagcgctgggagcactggacacttaaatcctcatctgtcctcctttcctgtaaataaaagcccttctatccattttgcctgcctccttccttgggctttggggtgagaatcttggcgctaacccccaagggttactgccagttcaccaggggattatttatactctggggatcagcag

SEQ ID NO: 2458 - DNA, 200 bp, synthetic construct
  misc_feature 1..200: note = Poly A sequence
  source 1..200: mol_type = other DNA
actggagggaaagggtagctgagtctgcttaggggactgcatgggaagcacggaatatagggttagatgtgtgttatctgtaaccattacagcctaaataaagcttggcaactttttttccttttttgcttcaaatattgatggttttgagtgtgagagaggggaggagtccctggcctgaaggagaaccttccttgttg

SEQ ID NO: 2459 - DNA, 200 bp, synthetic construct
  misc_feature 1..200: note = Poly A sequence
  source 1..200: mol_type = other DNA
gtcatctggaggcatgagagccctactgccatcagtgtgggtttccaagctgccttgggctctgtctactgtcgcaaaagcttttaaagatattcattaaacacggaccttcctgctctctctgctttatttcactcaagaggaggaagccatccttcaggggagggctgctgtgccccactttgacgtgtgaggcagcc

SEQ ID NO: 2460 - DNA, 200 bp, synthetic construct
  misc_feature 1..200: note = Poly A sequence
  source 1..200: mol_type = other DNA
acatggaatcaggggcccgggatgtgattcaggacactttccatcctaggaataaagggtagtgcaatcatcaagtgttcacggtttcttgggggggtgggtaatagggttgactggagtgggatatacaccttaacagagctaaattcactgaaaagatcacagggacctgaactacggaggaaagtacctaaggattt

SEQ ID NO: 2461 - DNA, 200 bp, synthetic construct
  misc_feature 1..200: note = Poly A sequence
  source 1..200: mol_type = other DNA
ctgagttactgggcccagaggctgggcccctggacatgtacctgcagaataataaagtcatcaatacctcatgcctctctcttatgcttttgtggaatgaggttcctcggtgtggagggagggttggaaaacccaaaggaagaaaaagaaatctatgttatcccaccctacctctcacaagcctttcctgctttacccct

SEQ ID NO: 2462 - DNA, 200 bp, synthetic construct
  misc_feature 1..200: note = Poly A sequence
  source 1..200: mol_type = other DNA
aaataaatagggaagatggagtcaccctctgggggtcctctctgagtcaaatccagtggtgggtaattgtacaataaattttttttggtcaaatttacccttgcgtcctggcttccgaatgatttctgttcctccttggcttagtgggacaccagccattggaagatttgctcacggtcaacctctgaaaatgactcatt

SEQ ID NO: 2463 - DNA, 200 bp, synthetic construct
  misc_feature 1..200: note = Poly A sequence
  source 1..200: mol_type = other DNA
ccagggctgccctccaccctcaccctccaccctttgctgctgacctcggctgctcctctcacagaccctctttggccccctgccctcctctccctcccagatggacccttccatgggaggaaataaagtttccatcgcaggtgctgggagtctggttttgaagctgtcttgtctaccttggcctggggagaggggagcac

SEQ ID NO: 2464 - DNA, 200 bp, synthetic construct
  misc_feature 1..200: note = Poly A sequence
  source 1..200: mol_type = other DNA
aaactcctctgatgtggttggggggtctgccagctggggccctccctgtcgccagtgggcacttttttttttccaccctggctccttcagacacgtgcttgatgctgagcaagttcaataaagattcttggaagttttgaggctgatggtttgagagtctctgggggcgtgggttggggactgagggatatgttgtgggg

SEQ ID NO: 2465 - DNA, 200 bp, synthetic construct
  misc_feature 1..200: note = Poly A sequence
  source 1..200: mol_type = other DNA
agcagaactcttgacttcctgccatggatctcttgggcccaggactgttgatgcctttgagttttgtattcaataaactttttttgtctgttgataatattttaattgctcagtgatgttccataacccggctggctcagctggagtgctgggagatgagggcctcctggatcctgctcccttctgggctctgactctcc

SEQ ID NO: 2466 - DNA, 200 bp, synthetic construct
  misc_feature 1..200: note = Poly A sequence
  source 1..200: mol_type = other DNA
agccgcctggctgagatggggtgggcagggcagagctgatcagggccgagcagaaccgcactcttcccaaataaagcttcctccttgaaacacaaatgtttcttacttacaccccatcctgatttcttttcttgagtccagagagtgggaaagctctctcttgacctgaggatggatctgaaaattatgagccccttgag

SEQ ID NO: 2467 - DNA, 200 bp, synthetic construct
  misc_feature 1..200: note = Poly A sequence
  source 1..200: mol_type = other DNA
tattactgtaccaactgggcctcctctagcaggcccctgaaggcagtggaataaaatgaaatcttcgccctttaagaactcctgaccttaatgtggtagtagtatcttgtccttgaggggatttccttcccctcacccctaagactttcacaacctggtgactggaaagaaccaccacaaatcttcatttcctccagaaa

SEQ ID NO: 2468 - DNA, 200 bp, synthetic construct
  misc_feature 1..200: note = Poly A sequence
  source 1..200: mol_type = other DNA
ctcccaccctaggagggagggaaggacaccgtcctagggtataacctggcaataaaccgtgcctctcactgtgcctgttgctctagctgtgtcttcctgctccagaggatgggagaagcagaagtgggtcaaatgctgccagctctgactggctgtgctcactctaaggggcccaggggcagggcagaacaggctggaaa

SEQ ID NO: 2469 - DNA, 200 bp, synthetic construct
  misc_feature 1..200: note = Poly A sequence
  source 1..200: mol_type = other DNA
gaggcgtcctgctcgctcttccgcaccgtccttcccggttaataaaatgccctgtacgcttcacgtgggtcggggactggggtgagccgcgcactgcctcgcctgcagtcgggaaagcctgcccgcccgacctctccgagccaggccgcgcacaggaggcagggaggccgcgaagctactagggaggggtccggacctgg

SEQ ID NO: 2470 - DNA, 200 bp, synthetic construct
  misc_feature 1..200: note = Poly A sequence
  source 1..200: mol_type = other DNA
cagcctaaccccattcctgtgcggacagcccttcctcccatttcccattaaagagccagtttattttctaacttcgtttagtttgagtatggaaaacgggtattggggattctatgtactaacggtcgagaagtgaatgtgaaagaaccaccttcttgaggccatctcagcctttatctttgcatcttgctggtgttccc

SEQ ID NO: 2471 - DNA, 200 bp, synthetic construct
  misc_feature 1..200: note = Poly A sequence
  source 1..200: mol_type = other DNA
ccctgaatgttcaataaagttgattctttgtagctctgtgagttgtgatatgttgtgggtgtcatctaccagtatccagcttagatgtacagaatgttaagacatttgggcaccttctgttttcagaccttgggaatagtgaggctttccttcctcccacattaatttttaccagttatctgttgaatactgtcagtgcc

SEQ ID NO: 2472 - DNA, 200 bp, synthetic construct
  misc_feature 1..200: note = Poly A sequence
  source 1..200: mol_type = other DNA
ctagagattgcaagggcggggagaggaggctctcaataaataatcgtgtaaccttcttgtggttctgttcttgctcggcccagccagagtctggctctttccagaatgtgcagggtggggtgctgggaggactcgctgcacggaaccaggacccaggggccaaaagcttaggatatatcaaaccctctaggtgggtgaca

SEQ ID NO: 2473 - DNA, 200 bp, synthetic construct
  misc_feature 1..200: note = Poly A sequence
  source 1..200: mol_type = other DNA
ggcattggtggaagctggggtcagaaaagagaaatgaccatttggaggggcggggcctcctagaagaaccttcttagacaatggggggaggatgggactttgttttttccaagaataaacttcaactcctgtcatgtgtcttggctactttcttggatgggaggaatcagagaagataggaagaagcaggcatcgcttct

SEQ ID NO: 2474 - DNA, 200 bp, synthetic construct
  misc_feature 1..200: note = Poly A sequence
  source 1..200: mol_type = other DNA
acattaaagtgacgattcccactcccctcctctcagcctccctgatgaagagttgacaatctcaccgcccgcccttccctgccccgggctcctcccgctcgacccccacttcctttcttgtgcttcgtgtcctgttgacggttacatttgtgtataattattatattattattattattattatattttttttaatttgg

SEQ ID NO: 2475 - DNA, 200 bp, synthetic construct
  misc_feature 1..200: note = Poly A sequence
  source 1..200: mol_type = other DNA
gattctcatcccttacagctgactcttccaggcaatttccatagatctgcagtcctgcctctgccacagtctctctgttgtccccacatctacccaacttcctgtactgttgcccttctgatgttaataaaagcagctgttactcccacatctgttgttaacccttatttcattttctgtagagccggcctttaagttct

SEQ ID NO: 2476 - DNA, 200 bp, synthetic construct
  misc_feature 1..200: note = Poly A sequence
  source 1..200: mol_type = other DNA
tctcttcccacctgtcaacctgaattaaagtctacactgcctttgtgaagcgggtggtttcttattttgtctggggagaagaaggagaatggagagagagtcatttttatgtcagactttcttgccagtgtctgcttctatagctggcttgggaagaaggtgaatgatgaataaataccctcagggtacacagatgttct

SEQ ID NO: 2477 - DNA, 200 bp, synthetic construct
  misc_feature 1..200: note = Poly A sequence
  source 1..200: mol_type = other DNA
ggggagccttcgtggccctcaggatgccttcgggggacagattctgcccagtctctgggcatccataattgctgctaacctagacatttcatagttacagattaaatctacttgactttaaggaacagcttggctttcttgtgggaatgtggctgctacagggtactgaaggtggagtaaaataggatggggggaacccg

SEQ ID NO: 2478 - DNA, 200 bp, synthetic construct
  misc_feature 1..200: note = Poly A sequence
  source 1..200: mol_type = other DNA
gagttttgtgggagggaacccagacctctcctcccaaccatgagatcccaaggatggagaacaacttacccagtagctagaatgttaatggcagaagagaaaacaataaatcatattgactcaaggcttggtgtttctgtgaattcctttcctgtaggggtgaagcactataggaaatttcgaaagcatgtgtattgctt

SEQ ID NO: 2479 - DNA, 200 bp, synthetic construct
  misc_feature 1..200: note = Poly A sequence
  source 1..200: mol_type = other DNA
tagtgccaagacacatcactaagcctcgttttgttttgctttgttgcaaacctataaagcgttatcaccagagctatctgcttcacttcaaatgcttattaaatttcaatctgagtctcaagatttgtctctgaaatttttggggggagggggaagggcagtaaataagtggacatacctttatttgcaaggaaaggata

SEQ ID NO: 2480 - DNA, 200 bp, synthetic construct
  misc_feature 1..200: note = Poly A sequence
  source 1..200: mol_type = other DNA
ggaccaaggcctttgcatttttttctaccctgactcccacttctaatttctctttattgttattattattattttctctgctattgtaatatttttttgttaattaaatgttttggtcagaatcttagctgtagcctgaagttttctcccacttgggggtggaaattgttttgagtcacggaacagcatatgatgtgtgg

SEQ ID NO: 2481 - DNA, 200 bp, synthetic construct
  misc_feature 1..200: note = Poly A sequence
  source 1..200: mol_type = other DNA
ccccaactctcattcatgaaaataaaaattgctggagcttggcttggtctggctgttctatcacctataggcataagaatgcggggcagcaaagaggcaaagtgtgcctgggatgcagaaagcaggagcagatgcgagtcaaagtcctttattagaaaatatatcaaaatcccagccccctgagccaggaccagaagagg

SEQ ID NO: 2482 - DNA, 200 bp, synthetic construct
  misc_feature 1..200: note = Poly A sequence
  source 1..200: mol_type = other DNA
gaggcaggcaacaccaggagcagaaatgaaagaggcaagaaagaagtgctatgtggcgagaaaaaaagttttaatgtattggagaagttttaaaaaacccagaaaaacgctttttttttttaataaagaagaaatttaaaatcatcccccagtgcacttttgttcagcaccgatatgtctggccaggtgttggatcccgc

SEQ ID NO: 2483 - DNA, 200 bp, synthetic construct
  misc_feature 1..200: note = Poly A sequence
  source 1..200: mol_type = other DNA
gaattataggggtttaaaaactctcattcattttaaatgacttacctttatttccagttacattttttttctaaatataataaaaacttacctggcatcagcctcatacctaaaactcctgactcttaccactcatttccgtttgagtctgtatctgaaatcagtagcctagtcctactagatgagaaaggagccacaag

SEQ ID NO: 2484 - DNA, 200 bp, synthetic construct
  misc_feature 1..200: note = Poly A sequence
  source 1..200: mol_type = other DNA
aattgaacattcaaaaacccctggaagagtctctttaagacctcaaaccatttagaatgggcaatgtattttacgctgtgttaaatgttaacagttttccactatttctctttcttttctattagtgaataaaattttatacaagaagcttttataatgtaactccttgctaccagtaagtaagataatggctattactt

SEQ ID NO: 2485 - DNA, 200 bp, synthetic construct
  misc_feature 1..200: note = Poly A sequence
  source 1..200: mol_type = other DNA
ttaacattcactgagtatccaaaatgaaataaacagaaggaccaaaaatttgagtgtttgatttctgttttgctattattttttctgaaattttgatgttgtttgtttagttttgtttatccaaattgtaagtgagctatgttaccagtcttttactcactaggtgaaactgagaaggtatcctcgtgcatttgatgaga

SEQ ID NO: 2486 - DNA, 200 bp, synthetic construct
  misc_feature 1..200: note = Poly A sequence
  source 1..200: mol_type = other DNA
atcttgcaaataaatcgaacgctgagtgctaatgtgagtcctgggcctttctgcctcctgatgtacacccatcgccatcatagcaagagtgcttctggaccttgtacttattcttaaagactaccagtatggagttcataggacaatgtggtacacctggtattacagcctttgcctttcgagtctatccactggattaa

SEQ ID NO: 2487 - DNA, 200 bp, synthetic construct
  misc_feature 1..200: note = Poly A sequence
  source 1..200: mol_type = other DNA
aagaatttcatctctgttccctaactgtgcttgtattttttaaaaaataaagccccaattcagaattgctggattattagtacttgaacactagtttaatcctaaatacatatattaaaagaacatcaataaaatgaaaaagctaacaaatgtttgtgtgtttctgaaatggcacattgatcgttattttcctttctttt

SEQ ID NO: 2488 - DNA, 200 bp, synthetic construct
  misc_feature 1..200: note = Poly A sequence
  source 1..200: mol_type = other DNA
gggcgcaggtgcggggcagtgaacttcagaccccaaaggagtcagagcatgcggggcgggggcggggggcggggacgtagggctaagggagggggcgctggagcttccaacccgaggcaataaaagaaatgttgcgtaactcactgacgtgtggtctgcggctcatttttgcaagcagctctgatgaggctgttcccctt

SEQ ID NO: 2489 - DNA, 200 bp, synthetic construct
  misc_feature 1..200: note = Poly A sequence
  source 1..200: mol_type = other DNA
cagactcttttgtctcacgtggtggatccggtggaaatccaagctctgggctggtaatttttatgagcattttcagcttttgcaaatacaaaatataattctttacaaaaataaatttttattctaatctaaatctgacttccctcttgtttcctccacttagctaaaatgtactaatttttgaagtcgggagtattcta

SEQ ID NO: 2490 - DNA, 200 bp, synthetic construct
  misc_feature 1..200: note = Poly A sequence
  source 1..200: mol_type = other DNA
ggacagagatatgcccagagatgcatatgtgtatatttttatgatcttacaaacctgcaaatggaaaaaatgcaagcccattggtggatgtttttgttagagtagactttttttaaacaagacaaaacatttttatatgattataaaagaattcttcaagggctaattacctaaccagcttgtattggccatctggaata

SEQ ID NO: 2491 - DNA, 200 bp, synthetic construct
  misc_feature 1..200: note = Poly A sequence
  source 1..200: mol_type = other DNA
aaatgcagcattcaattcagaaccagtgcctcaattattcttttaacatggaagtaaaatccagaagcttagaaaagaagcccaaaaatacagcaacaagcatgtttcacattaacaattttagaatatttttatattccgtaggaacaacaaacttacaaatctgctgagtgcgttaggttattggattggatgattgt

SEQ ID NO: 2492 - DNA, 200 bp, synthetic construct
  misc_feature 1..200: note = Poly A sequence
  source 1..200: mol_type = other DNA
tgtccatatcaaaccattttaatttttgactctaatcagacttacatgtttcaagacattcacatgtagtcaacaccctttataaaatatttgtgtgttcagccagactgggcaggtgcagtctatttcatttgtacatgaaaacttcaacacagaggggaatcttgcagctgctttttattctaagtacatgagtcctg

SEQ ID NO: 2493 - DNA, 200 bp, synthetic construct
  misc_feature 1..200: note = Poly A sequence
  source 1..200: mol_type = other DNA
agaaaggttttgtggtagcaaatgcatgatttctctgtgaccaaaattaagcatgaaaaaaatgtttccattgccatatttgattcactagtggaagatagtgttctgcttataattaaactgaatgtagagtatctctgtatgttaattgcaattactggttggggggtgcattttaaaagatgaaacatgcagcttcc

SEQ ID NO: 2494 - DNA, 200 bp, synthetic construct
  misc_feature 1..200: note = Poly A sequence
  source 1..200: mol_type = other DNA
gttttagagaaatcaagaatttttaaaaacaagaatatcaacatttggttttgtgtataagtggtgtttgtattaaaatactttttcaatgaactgtataaactatgttttattaaactacaatatatcagtaagtgttgcaaccctttgtttttgacgtacagtaacctcttattactgggaaatataaggaagttttt

SEQ ID NO: 2495 - DNA, 200 bp, synthetic construct
  misc_feature 1..200: note = Poly A sequence
  source 1..200: mol_type = other DNA
cttgcataaacttgtcatgtcatacagtttgtgaaaggacaccttgtaaagaagccttgaaactaataaaatgagttatacttacatagattcatagggtcctgtttggtaatattcaaatgtgtaagactctttgtaactatggcacagatatactaagtgcaggaaatattcaaaattaggaatagccaaacagacat

SEQ ID NO: 2496 - DNA, 200 bp, synthetic construct
  misc_feature 1..200: note = Poly A sequence
  source 1..200: mol_type = other DNA
atattctgggagatgatgttcaccttcattttccaaaatgaatatcttaaaaatcttatgcagaaatttgcattttgtacctcaatatttctacgtcatgtgccttagtaaaaaaaaataataaataaataaaagatgagtgttgtgctatactgtttaaacaaatactgtgctgggggaaaaaggatttgggtatgttg

SEQ ID NO: 2497 - DNA, 200 bp, synthetic construct
  misc_feature 1..200: note = Poly A sequence
  source 1..200: mol_type = other DNA
caaagttatattgtgatactcaaattcacagcagagtagttttgagtaacagtaattaaatccttctaaatatttgaactaagtatattctagatttatttaatgggaaatacctttagataatattttctaaatttatgtaatactttaaacattcgtagcttgaatatgtgaggaactattcatggtcattcgcatgc

SEQ ID NO: 2498 - DNA, 200 bp, synthetic construct
  misc_feature 1..200: note = Poly A sequence
  source 1..200: mol_type = other DNA
ccatcagacgaacacaagagaggctcaaacaagaaattcactgtgtacactctctaagacattctccaaattgattttatctctttaaataaaaactttaaataaaagtattagaaatgttttctctgcgtagaaattaggaagcttggagtgaactttgctgtgcttctgatttcaggcttttggcaagagttctgtct

SEQ ID NO: 2499 - DNA, 200 bp, synthetic construct
  misc_feature 1..200: note = Poly A sequence
  source 1..200: mol_type = other DNA
tttctgttcctgtttttttttttttatttaattttgcaaataaaaatttattttgaatcctttttcctcatatgcatttactccctcctctagtattgtggctatctggtactgggggatttttggtgtgtgtgtgtgtttgtgtgtgtgtttgtttgttttttctttttttgcacagaaaaatctctcttgatgactaa

SEQ ID NO: 2500 - DNA, 200 bp, synthetic construct
  misc_feature 1..200: note = Poly A sequence
  source 1..200: mol_type = other DNA
caaagctggtatttccccgcatgtcttattcttgcccttcccccaaccagtttgttaatcaaacaataaaaacatgttttttttttttttttttttttgcctttcctgtgtgctgttttgttggggcgggggtaaggaaggctgcaacctggatttggaaaccccttgtggatgcgaggatgaagggggtgcatggggtg

SEQ ID NO: 2501 - DNA, 200 bp, synthetic construct
  misc_feature 1..200: note = Poly A sequence
  source 1..200: mol_type = other DNA
ggggccctaacacttgcacctgccttgctcaagagcagccccaagggttcaggggtgtttctgtctccaccaccttcacagcagtacctgattccctaccgtgaaaactcttactaaataaaaccgtcttccctgagagaggacagttctgctttcctagcagtgggaggcctgtgcttggttggggtcactgatgccaa

SEQ ID NO: 2502 - DNA, 200 bp, synthetic construct
  misc_feature 1..200: note = Poly A sequence
  source 1..200: mol_type = other DNA
tactatctttctaatgaatttgtgattaaatatataatagttgttgaaaatgagtaactttgcgttctccccctaggttgttcttagatgcctggcttatgtgttgacaaagtaaagttttctgttctgagcaaagttatgattataaaaagcaagaaagaacaatcaagagtccttatgtagctatttgaacagaaagc

SEQ ID NO: 2503 - DNA, 200 bp, synthetic construct
  misc_feature 1..200: note = Poly A sequence
  source 1..200: mol_type = other DNA
ggctggcccctagtgagtgggctcgagggagggttgcctgggaaccccaggaattgaccctgagttttaaattcgaaaataaagtggggctgggacacacgacctcctgagcctccgtgtgtggcgctggatggggaagggagggaaggcccagcacagacagctcctgccttcagtgaaaggggccttgagattcgtcc

SEQ ID NO: 2504 - DNA, 200 bp, synthetic construct
  misc_feature 1..200: note = Poly A sequence
  source 1..200: mol_type = other DNA
gccaacttctgtataccttcacccatttcatgaaaataaaatcaaaagggaaatcaaaaataaagaaaacgctaaagaaaaaacaatagcccacattgcctctctttgggaaaagctatgacttcagcttttggtaccttccgctgactttgccaggcctgtcaagatgatccttctgccttagactgagtggtcacata

SEQ ID NO: 2505 - DNA, 200 bp, synthetic construct
  misc_feature 1..200: note = Poly A sequence
  source 1..200: mol_type = other DNA
aacactttcctgctcctctctgtctctagcacacaactgtgaatgtcctgtggaattatgccttcagttcttttccaaatcattcctagccaaagctctgactcgttacctatgtgttttttaataaatctgaaataggctactggtaacttcttgcgttggcctccgatcaatactcgactgataccatttgttaggtt

SEQ ID NO: 2506 - DNA, 200 bp, synthetic construct
  misc_feature 1..200: note = Poly A sequence
  source 1..200: mol_type = other DNA
ggaggcttcgtgggcttttgggtcctctaactaggactccctcattcctagaaatttaaccttaatgaaatccctaataaaactcagtgctgtgttatttgtgcctcatttccccaggaatagtcactgccttgaggaacctcatccttttccctttttttctgcttgatgtctgctgtcttccctgttttctttttctg

SEQ ID NO: 2507 - DNA, 200 bp, synthetic construct
  misc_feature 1..200: note = Poly A sequence
  source 1..200: mol_type = other DNA
cttgggcccttccctgctatcctttttctcctttggaggtgcccaacctcctccacccccttcccctactctaggggagagagctgctagtgagatgactgttttataaagaaatggaaaaaagtgaaataaaaaatatgttgaatcagattttttaaaaggggtatttgtttttttataacaggtattgaaacaagtta

SEQ ID NO: 2508 - DNA, 200 bp, synthetic construct
  misc_feature 1..200: note = Poly A sequence
  source 1..200: mol_type = other DNA
ccgcctgccaatcggagcacagctggactgtgtggctggggcctgacactgagctgtagggaaactgaactgtgaggacctctggtgagaggccagtgccctgccccaccctggagcttcaaataaagagctttttaccccctcttgcctggtgctgccctgttgaagataggggattcgaggttggggaggaaaggtca

SEQ ID NO: 2509 - DNA, 200 bp, synthetic construct
  misc_feature 1..200: note = Poly A sequence
  source 1..200: mol_type = other DNA
tcctgatttttgctccagaatatctttgagaatgacaacttaattaaaagatacttaggcactttttttttttttttgagtctgagtttcgctcttgtcatcctggctggagtgtgatggtgcgatcttgactcactgcaacctctgcctctcgggttccagcaattctcctgcctcagcctcccgagtagctgagatta

SEQ ID NO: 2510 - DNA, 200 bp, synthetic construct
  misc_feature 1..200: note = Poly A sequence
  source 1..200: mol_type = other DNA
gggggcaggagtcagcaataaagctatgtctgatattttccttcactaatatgaataatagcatgcttttattttaccaaggttcaggttgcatgggatcatcttctctgactgatttgacatcaacagccaaacggtgggggtctccttaacgcccccctacagaaatgaaaatgcatttcctgtctcaggatgctgaa

SEQ ID NO: 2511 - DNA, 200 bp, synthetic construct
  misc_feature 1..200: note = Poly A sequence
  source 1..200: mol_type = other DNA
atgataactgagcactttagggaacaacctgccttatctactatttaacaataactagaaaatatgcttctgtgtgctgaaagtagtatgtgttatcaataaaattgatagtattcatagaaatacaaaaatatccaagattgatgaaatttgtattgtgaatgtaaacactctggtttgtattgaacataaacagttaa

SEQ ID NO: 2512 - DNA, 200 bp, synthetic construct
  misc_feature 1..200: note = Poly A sequence
  source 1..200: mol_type = other DNA
agactactgttatttgaccaatgaattgacttctaataaaatctagtggtgatgcattacatgcctgtttcttttgtccaaaacctcgattgtttcaagtgaatctgttggatgaagtgactaaaatccaaaatttggagttggtcaaaagaaccaccaatggctgttaaattttgctgcatatttgaccttaagaatgt

SEQ ID NO: 2513 - DNA, 200 bp, synthetic construct
  misc_feature 1..200: note = Poly A sequence
  source 1..200: mol_type = other DNA
aacgtggtgcagctattgcggtaataaaatctttaatgcactcggtttgagggtgagctgttagtttgacattctctactttctgggttcgcatttcagaaatgatttgggggattggagccaagtttgccacaggtgatgcctggaacttctcacccacttacctctgccaccatctctctctttccaggcactttagg

SEQ ID NO: 2514 - DNA, 200 bp, synthetic construct
  misc_feature 1..200: note = Poly A sequence
  source 1..200: mol_type = other DNA
ctaacaggtccaaccctaagtgagtcatgtttctccaggatgccaaaggaaatgctacctcgtggctacacatattatgaataaatgaggaagggcctgaaagtgacacacaggcctgcatgtcactgtgtcggtgtgtttcattacaagacgatggaaataaataccacgtcaattggctctcattttacgaactaaag

SEQ ID NO: 2515 - DNA, 200 bp, synthetic construct
  misc_feature 1..200: note = Poly A sequence
  source 1..200: mol_type = other DNA
atttctgaactgccaatcaaatgtctcattttggtaagcttttacaaatttgttaaaacaacggtgttgtattacgatgttttctaggctagtaatgccagagtgagtcagtcacttgtcagatgtgatgtggataattaagcacagaggcagccttcctcatgtgccagggcacttagggtagggcttgggggacggga

SEQ ID NO: 2516 - DNA, 200 bp, synthetic construct
  misc_feature 1..200: note = Poly A sequence
  source 1..200: mol_type = other DNA
tgatcaagaacaggtactacccctttttttcatttcaaacttgaaactgtgaataaggtaagaaaactattttgaataaataaactatttatttaaaatgtctttgtatttttccaatttccattcttcacattgagttttgatttgaactcagtctaaaattaataaactttacaaagcaaagctcaaaacattaaaag

SEQ ID NO: 2517 - DNA, 200 bp, synthetic construct
  misc_feature 1..200: note = Poly A sequence
  source 1..200: mol_type = other DNA
ggacccgcggggtgggggcgaatctatttttgcagaatccgggggcggccccgggtgggcgcgagtcgctttgtatcatcaataaattatttaacgggtccccgtcggagccgtcgctccggagcctgcgccgcgtgtttcttccgactcgaacccggagcgaggcggcccctccccggccccggcttcgcccctgcgcc

SEQ ID NO: 2518 - DNA, 200 bp, synthetic construct
  misc_feature 1..200: note = Poly A sequence
  source 1..200: mol_type = other DNA
tcccggctgcggccagtctcccctctccaggccgaggcccctccgccctgacccctcctgctgccttcccacccccgttcttgggtatgttcaataaaaggattgttttcctagagtccgggctgtgtaggagtgcgggtctggagtcggggagggagtggcgccctgcagtgctggggctgcaaaggtcagggcagggt

SEQ ID NO: 2519 - DNA, 200 bp, synthetic construct
  misc_feature 1..200: note = Poly A sequence
  source 1..200: mol_type = other DNA
aacccagtctaatgagaactccagaaagctggagcagcccacctagagctggccgcggccgcccagtctaataaaaagaactccagaacacgtactggcatcttggctggtggggaattgggtccaggctgaacacgggtgaggcccagggagggaggggacctccacggcctccctgcacaccaactcacttctgtctt

SEQ ID NO: 2520 - DNA, 200 bp, synthetic construct
  misc_feature 1..200: note = Poly A sequence
  source 1..200: mol_type = other DNA
tgcaccacatgcctctgtctccccgctgagcccaggcacttgcccaggccgccctgcaggaccactgcaataaacgccttctcctgccactgtgtgtccggctggagcctggaggggatgcagaaatagggcccgggcccgctcaccagggtcccctgacaaggacgggggaggggctcctctccagactcagccaggcc

SEQ ID NO: 2521 - DNA, 200 bp, synthetic construct
  misc_feature 1..200: note = Poly A sequence
  source 1..200: mol_type = other DNA
ccactcgctgcccctacgcctgccccggtgcccggctcccagcagaacatactagggagatgcacccagagcctgccagggagggctggcctcaccaccaccgtcaataaaggatttgaatccccatggctggtctggtctggctctccccagcctcttgggccatgctctgggcccccgcatcggtggcctgcagtgtg

SEQ ID NO: 2522 - DNA, 200 bp, synthetic construct
  misc_feature 1..200: note = Poly A sequence
  source 1..200: mol_type = other DNA
cgctgcccagacacagactggcaataaactcctactaaatccctccgacctcttccggcctggtttctgcaggctcacgcatggtctgcctgcgtccttcagtgagggatggggcctcgggctggagggcttcctcaaggagggcgcctacagctgggcaaagctctggggaggacagaaccacccaaattggttcactg

SEQ ID NO: 2523 - DNA, 200 bp, synthetic construct
  misc_feature 1..200: note = Poly A sequence
  source 1..200: mol_type = other DNA
gatcctggactgtttcctgataaccataagaagaccctatttccctagattctattttctgaacttgggaacacaatgcctacttcaagggtatggcttctgcctaataaagaatgttcagctcaacttcctgattaatttcacttatttcatttttttgtccaggtgtgtaagaaggttcctgaggctctacagatagg

SEQ ID NO: 2524 - DNA, 200 bp, synthetic construct
  misc_feature 1..200: note = Poly A sequence
  source 1..200: mol_type = other DNA
gttctcttccagtttgcaggtgttcctgtgaccctgacaccctccttctgcacatggggactgggcttggccttgagagaaagccttctgtttaataaagtacattttcttcagtaatcaaaaattgcaattttatcttctccatcttttactcttgtgttaaaaggaaaaagtgttcatgggctgagggatggagagaa

SEQ ID NO: 2525 - DNA, 200 bp, synthetic construct
  misc_feature 1..200: note = Poly A sequence
  source 1..200: mol_type = other DNA
cccgtctaccaaaataaagttgtagtgattccatgaaagatttctgagatatgggggtagagtagggtgtgtgcacaccaagaaggcagaatgtgacacactaggagaaaggtacagtgtgcataactgagaaaagaggaggtatattcacaccgaaggtagaagagggcatgtgcctggcagccgggaaggggaaagtg

SEQ ID NO: 2526 - DNA, 200 bp, synthetic construct
  misc_feature 1..200: note = Poly A sequence
  source 1..200: mol_type = other DNA
gccacccaacctaaatgtacttatctgtccccatgtccccacaccagcctgttttcataataaactttattgtgacaggcggggctgatccctcccatgttgggagtcaccatgtggcaagtgacaaagctctgagcccgcccctcttggggccacagtggtagggatgggggaaggggatggaccccatggctggggta

SEQ ID NO: 2527 - DNA, 200 bp, synthetic construct
  misc_feature 1..200: note = Poly A sequence
  source 1..200: mol_type = other DNA
gccacatggagggagtttcattaaatgctaactactttttccttgtggtgtgagtgtaggttcttcagtggcacctctacatcctgtgtgcattgggagcccaggttctagtacttagggtatgaagacatggggtcctctcctgacttccctcaaatatatggtaaacgtaagaccaacacagacgttggccagttaaa

SEQ ID NO: 2528 - DNA, 200 bp, synthetic construct
  misc_feature 1..200: note = Poly A sequence
  source 1..200: mol_type = other DNA
catttaaagtctgaagtccaccagaacttggaagaaagctgttaactcaacatctatttcatctttttagctcccttcctttttctctgctcaataaatattttaaaagcatatttgaaataaagggagatactttttaaatgaaaacactttttttgggacacagatattaaaggattgaagtttatcagaaccaggaa

SEQ ID NO: 2529 - DNA, 200 bp, synthetic construct
  misc_feature 1..200: note = Poly A sequence
  source 1..200: mol_type = other DNA
gtctgaagtccaccagaacttggaagaaagctgttaactcaacatctatttcatctttttagctcccttcctttttctctgctcaataaatattttaaaagcatatttgaaataaagggagatactttttaaatgaaaacactttttttgggacacagatattaaaggattgaagtttatcagaaccaggaagaaaacaa

SEQ ID NO: 2530 - DNA, 200 bp, synthetic construct
  misc_feature 1..200: note = Poly A sequence
  source 1..200: mol_type = other DNA
cctgccagagcccaagtgccatcccacattcggaccctgcccatacccctgcctgggttttctaactgtaaatcacttgtaaataaatagatttgattatttcctactagaggccctaagtctggtgggcaggggctggcggtggatggtgggttcagtagaaccagcctggctctgacatcaggcagaagctgtgtgag

SEQ ID NO: 2531 - DNA, 200 bp, synthetic construct
  misc_feature 1..200: note = Poly A sequence
  source 1..200: mol_type = other DNA
aacctgaattggaattacttctgtacaagaaataaactttatttttctcactgacagttgaaattgacttattggaaatattaactaaagcccatattagaccataattgtctggtgttaacatttttctgtcctagacttgtctcactttttttgactttggaatctgaggtttcaccactgtcacccctctttttatg

SEQ ID NO: 2532 - DNA, 200 bp, synthetic construct
  misc_feature 1..200: note = Poly A sequence
  source 1..200: mol_type = other DNA
gtggaagattttattaaaatcctacgtgaagttgataaggcgcttgctgatgacttggaaaaaaacttcccaagtttgaaggttcagacttaaaacctgaattggaattacttctgtacaagaaataaactttatttttctcactgacagttgaaattgacttattggaaatattaactaaagcccatattagaccataa

SEQ ID NO: 2533 - DNA, 200 bp, synthetic construct
  misc_feature 1..200: note = Poly A sequence
  source 1..200: mol_type = other DNA
taagcatttattcttttgacttgattattgtctccttttcatgtgaatttattactcccgttgaaaccgtgtacttaccaataaactatttgctattcagttttagttgtttttaattgttaaatgtaaagaatattcaacacacattctgccaagttctgttagttcaaaatatatggataaaaatgtaacccaaaaaa

SEQ ID NO: 2534 - DNA, 200 bp, synthetic construct
  misc_feature 1..200: note = Poly A sequence
  source 1..200: mol_type = other DNA
tttttaatatctgtatataagttgtgtattttaagaataaattatgtatcctaaatatccaatcacatttgtaagcgtggaagctctaaatttgaaactgtacttaataaaaatttttttgtataacttcgtgtgtcagaagctattagtcatatggtgtattgctgttaagtacttgagttgatttataattactgtgc

SEQ ID NO: 2535 - DNA, 200 bp, synthetic construct
  misc_feature 1..200: note = Poly A sequence
  source 1..200: mol_type = other DNA
tcacagaggcattttgtgtgtgtgtgcttattttaattttgttcttattctagcaacattagaataaaagataaacctactataattccctttgtggaaatttacatgtgtgcactcatttatcagagttacctgttattagggatatagagcaacaaggccaaggagattgccgcccttacagaattctctctcgccat

SEQ ID NO: 2536 - DNA, 200 bp, synthetic construct
  misc_feature 1..200: note = Poly A sequence
  source 1..200: mol_type = other DNA
cagacctcccggaaggagggtgtggggaggggtggggcagggagcccctcttccctaataaaactgactccggcagcgtcccagcgtgcggcctctccgtgcctaccggccaggccccacacacagccctggtcgccaccagcgttcctcccaggacacccttgactgcgctctcctgtgacgatgccactgcagcccgc

SEQ ID NO: 2537 - DNA, 200 bp, synthetic construct
  misc_feature 1..200: note = Poly A sequence
  source 1..200: mol_type = other DNA
gggccactcatattctgggctcctggaaccaatcccgtgaaagaattatttttgtgtttctaaaactatggttcccaataaaagtgactctcagcgagcctcaatgctcccagtgctattcatgggcagctctctgggctcaggaagagccagtaatactactggataaagaagacttaagaatccaccacctggtgcac

SEQ ID NO: 2538 - DNA, 200 bp, synthetic construct
  misc_feature 1..200: note = Poly A sequence
  source 1..200: mol_type = other DNA
ggcacacaggccagccccagtctcacggctgaagtgcgcaataaaagatggtttagggtccctgccgctgcttgtctgccttccctgggctctggctggaggagtgggggcgtgtgtgggaggcaccttccccaggtgctgacgcctggaaacccggagtcagccgtgggccccataccactggtcaggatgaggctttc

SEQ ID NO: 2539 - DNA, 200 bp, synthetic construct
  misc_feature 1..200: note = Poly A sequence
  source 1..200: mol_type = other DNA
tccagggaacgcatgtggatcctagacagcgccttatctatgattgagtgtccgtgtaaataaattcctacttagacttaccactttgtgtgtgcttgtaatgtggagaagtgatgctttgggggggacacaggcaggcaggggtgtttccctgctctcttagagaggcactactaaaccagggagtctttgatgggttt

SEQ ID NO: 2540 - DNA, 200 bp, synthetic construct
  misc_feature 1..200: note = Poly A sequence
  source 1..200: mol_type = other DNA
ggtccctgtcagtatacaccctggggtgtaccccaccccttcccactttaataaacgtgctccctgttgggtgtcatctgtgaagactgccaggcctaggctctctgtagagagtcttcaagatcccggagtggtagcgctgtctcctggtgaaggagtatttgtcacactggaatgtgactgtgtgtgtatgtatgtgt

SEQ ID NO: 2541 - DNA, 200 bp, synthetic construct
  misc_feature 1..200: note = Poly A sequence
  source 1..200: mol_type = other DNA
tgggcccaataaacaatcatttcaaacctactgaaaccaggtgtggagaagttatttgtgacgactagaacagaactatttcttatgtgagaaacttcctccaagtcagctctgtccttccaaaactgtgacgttgattacaaatacttcatatatgccacaccctgcacagaggccaatgtcccccaaggctcaactcg

SEQ ID NO: 2542 - DNA, 200 bp, synthetic construct
  misc_feature 1..200: note = Poly A sequence
  source 1..200: mol_type = other DNA
tttgtcaatcctaggggacaggagccaggctactgtctgtacccccactccatcccccaggggaacacccctgcccagctactttcctaatgaaataaagagcattgaagcagagaagtgtgacatcactatcagggtggctggaaaaaggaggggtgagctggggcggtgggtgcaggggtggaggagctagggccaga

SEQ ID NO: 2543 - DNA, 200 bp, synthetic construct
  misc_feature 1..200: note = Poly A sequence
  source 1..200: mol_type = other DNA
gtaacaaccagatggcttcactgaaacctgcttttgtaaattacttttttttactgttgctggaagtgtcccacctgctgctcataataaatgcagatgtatagcagtcctgtctggggcccattctgcaggggtggtgggtgctgggacctacattgcttccccaatctcttccctttcccatttctcatctgcctttc

SEQ ID NO: 2544 - DNA, 200 bp, synthetic construct
  misc_feature 1..200: note = Poly A sequence
  source 1..200: mol_type = other DNA
atttagaagctgaagatccccaactgctccagcctctgccgctgccatgctttgagtccacgcccaccagccttgctctcttcaataaaccacaagcatctcacttttgtgccccctgcgtggttttggtctccttgttatggtggggggtctgcccctgtcagggtaaggtgagccaggacaaaaggaaagcagccgag

SEQ ID NO: 2545 - DNA, 200 bp, synthetic construct
  misc_feature 1..200: note = Poly A sequence
  source 1..200: mol_type = other DNA
agacatggcccctgaagggcaataaagctgctagtttattaatacagtctcccgtttcctttcatttccatctggtcataatcccccttcccctcccccagaacttcctgcagctgctcccgtctgaccccgaacatgggtctctccctgttgctctccaccccaccagcttctccttcctacagttcgcacagctcgag

SEQ ID NO: 2546 - DNA, 200 bp, synthetic construct
  misc_feature 1..200: note = Poly A sequence
  source 1..200: mol_type = other DNA
ccccttcatctttgataaagcactgacatctccttcctaataaatagaccctgagttctgtacatgcctgactccttcctgaatggctgggagggacaaaactaaggcagaggaagaggctaaaacggaacagtagaccctcttcctcatctttagtttccaacaaagacacttgtttgtaatctctgggtctgattaac

SEQ ID NO: 2547 - DNA, 200 bp, synthetic construct
  misc_feature 1..200: note = Poly A sequence
  source 1..200: mol_type = other DNA
gggcctttgtcccattgtccctctgtgaccccttcatctttgataaagcactgacatctccttcctaataaatagaccctgagttctgtacatgcctgactccttcctgaatggctgggagggacaaaactaaggcagaggaagaggctaaaacggaacagtagaccctcttcctcatctttagtttccaacaaagacac

SEQ ID NO: 2548 - DNA, 200 bp, synthetic construct
  misc_feature 1..200: note = Poly A sequence
  source 1..200: mol_type = other DNA
agaaaaggggcagactcctcacattccagcactttcccacctgactcctctcccctcgtttttccttcaataaactattttgtgtcagcttcttccttgactctgaaatgggttcagggccatttgaacaccctgtgtcccccatgcatctctcactttccgccattagaggggaggtcttcttgtccaggggaaggcct

SEQ ID NO: 2549 - DNA, 200 bp, synthetic construct
  misc_feature 1..200: note = Poly A sequence
  source 1..200: mol_type = other DNA
cgcccctgtgcccactttgtaaataaactgctgaacacccaccatgaccctgagccttttgtgatgggagaaaggaatgaggggtagcttggggtgggggctgcctgagctggggcgacgggatatctgatgtcacaaaagccgggcctggaggcaggcaggctggcgtgggtggcacggagtccagggccacgcggggc

SEQ ID NO: 2550 - DNA, 200 bp, synthetic construct
  misc_feature 1..200: note = Poly A sequence
  source 1..200: mol_type = other DNA
acccgccttcgggaccccgctcccagctctgagaggtcgccaaagcctgcagcctggcctgggcctggccaccccttctttccctccgcgccccgcccccgaggagcctaataaagatctcgttgtggcagctcctactgtctgagctctgactggggggaaggaaggcggcccaggtgttggatggagcccctggccag

SEQ ID NO: 2551 - DNA, 200 bp, synthetic construct
  misc_feature 1..200: note = Poly A sequence
  source 1..200: mol_type = other DNA
aatattaatttataaaaaagaaattttaaaaagtaacaagaaagaactcgtttgaaaccatgtttcatcatcctgtagctacatctggtcttccttgtgtgctgggggactgcagataggtcaggggtatcagcctcagccactcagacaaggaaagggggcaccacatgagctcagggacccccacccccatccctggc

SEQ ID NO: 2552 - DNA, 200 bp, synthetic construct
  misc_feature 1..200: note = Poly A sequence
  source 1..200: mol_type = other DNA
aataataaacgactttattcttggattccgttggcatctgctatttctgtaacagagaggagcaatgggccctgagtgtgtaaggcaggacaagtgacttgggaaaaaaaaaaaaaaaaacccgcccagcctgtgtccccctctgcaagcaggggataagaactgtgcctccctttctttgctggctccagagaggctcc

SEQ ID NO: 2553 - DNA, 200 bp, synthetic construct
  misc_feature 1..200: note = Poly A sequence
  source 1..200: mol_type = other DNA
gggctcacctggatggggcctgcagtgcgttcccgctttgcttccttccctggacggcccgctccccgaaacgcgcgcaataaagtgattcgcagagctcgtgtccggctccctccttaaggcccgacgcccccggccccggcctcgccaaggggcagcgccccgccctccgggtagtggcggcggcgactggggagccc

SEQ ID NO: 2554 - DNA, 200 bp, synthetic construct
  misc_feature 1..200: note = Poly A sequence
  source 1..200: mol_type = other DNA
cagactggggaggggcagggggagaggcccccatcagggaccagactgttccaaaaaaaaaacaaaaaacaaaaacaaacaaaaaaacacttaaaagcccaaggagtaagcctgtgtgtgtttgtgggccctgagagtctcagagtcctcagctccagcataccccaccaccttctcctttcccgactgtggagccttgg

SEQ ID NO: 2555 - DNA, 200 bp, synthetic construct
  misc_feature 1..200: note = Poly A sequence
  source 1..200: mol_type = other DNA
gccctgggccagattacttcctccacccctccctatctcacctgcccagccctgtgctggggccctgcaattggaatgttggccagatttctgcaataaacacttgtggtttgcggccatctccttggttatgaatggctgtttcgctgagcgccaggcattctggcatcatcacagactgggtgagaatggtgagggcg

SEQ ID NO: 2556 - DNA, 200 bp, synthetic construct
  misc_feature 1..200: note = Poly A sequence
  source 1..200: mol_type = other DNA
tggacatgaggggcatgagaataaagctgaactgcagcctcctgagtcttgctctgtctgttggccgcactgggtacctcagggcaccaggacacatgccgccccagtcctgctggttggtgggggtctgtgggcagagggcccctgcctggacagggcagcacaggcctttctccagggtcttggccagtccggccggc

SEQ ID NO: 2557 - DNA, 200 bp, synthetic construct
  misc_feature 1..200: note = Poly A sequence
  source 1..200: mol_type = other DNA
ggagggggaagcaaaaggctgcctcgggtgttttaataaagttgttgtttatttccacctgccagctccttcatggggcgaggggtcggaggctggagtcccgggaggaaagcaagtcaagacaaatgcttgacccacggggactccaggcctggcctgcagccactctggtggacttggctttgggtctggggtcttag

SEQ ID NO: 2558 - DNA, 200 bp, synthetic construct
  misc_feature 1..200: note = Poly A sequence
  source 1..200: mol_type = other DNA
ggcctggggagtcggaacagggctaaggagggggaagcaaaaggctgcctcgggtgttttaataaagttgttgtttatttccacctgccagctccttcatggggcgaggggtcggaggctggagtcccgggaggaaagcaagtcaagacaaatgcttgacccacggggactccaggcctggcctgcagccactctggtgg

SEQ ID NO: 2559 - DNA, 200 bp, synthetic construct
  misc_feature 1..200: note = Poly A sequence
  source 1..200: mol_type = other DNA
acgggttaccctggtcattaataaagctgtgactggtcagccctgttgcttgtttctgagggatagctattgtcccaccagaccccagattcctgggcccacaagccactgctcagcttctccctgatcagtgctgacccagccagtcctaggggagagaagtgcaccaagggttcccagtgtttatccaaaggaggaag

SEQ ID NO: 2560 - DNA, 200 bp, synthetic construct
  misc_feature 1..200: note = Poly A sequence
  source 1..200: mol_type = other DNA
gtcttttgtaattctggctttctctaataaaaaagccacttagttcagtcatcgcattgtttcatctttacttgcaaggcctcagggagaggtgtgcttctcgggttggtggtatgtcccctaggagaacagtgaggcagaaaaggcagaagcctttggtatggggggaagaaatggtaaactacaagagaaatttcctg

SEQ ID NO: 2561 - DNA, 200 bp, synthetic construct
  misc_feature 1..200: note = Poly A sequence
  source 1..200: mol_type = other DNA
ccgtggcggtggcccttcccggctgcggagagcccgccccacagatgtatttattgtacaaaccatgtgagcccggccggcccagccaggccatctcacgtgtacataatcagagccacaataaattctatttcacaccccttgtgccgggctcagtctagcccctgggaggcggctggggtctggcgccgccctgcgca

SEQ ID NO: 2562 - DNA, 200 bp, synthetic construct
  misc_feature 1..200: note = Poly A sequence
  source 1..200: mol_type = other DNA
gaaccagagcttgaaattcaaagctgcgatcccttcacagcagtaaaccagctctttggaaccgattccatcaccccaataaaggagctcttcacagcacctgtgagtctgggcgccttagagcccctaagccagcatgggccctttccccctccccaccaagaactttgcatggctctggcatatagaaacaatttatt

SEQ ID NO: 2563 - DNA, 200 bp, synthetic construct
  misc_feature 1..200: note = Poly A sequence
  source 1..200: mol_type = other DNA
cccacctggccccctcagctctgtcctgttaggccaactgcctccttgccagccccacccccaggtttttgcccatcctcccaatctcaatacagcctgaataaaccaagacaagacctctggcttgtgagcagactcttctggtggatgggctgagcacagacaccattccctgagatatgtctcagttcccaaggagc

SEQ ID NO: 2564 - DNA, 200 bp, synthetic construct
  misc_feature 1..200: note = Poly A sequence
  source 1..200: mol_type = other DNA
ggtgcctcccaacgctccgcccacgctgacaataaagttgctctgagtttggagtctggtcctcgctccggggagcaagtggggggcgtgcagatgtgcctgtgtctgtctctgagcacctggtgtccgtgtacaaggatggatgtgtacagtggctccttgggaactgagtcatatctcagggaatggtgtctgtgctc

SEQ ID NO: 2565 - DNA, 200 bp, synthetic construct
  misc_feature 1..200: note = Poly A sequence
  source 1..200: mol_type = other DNA
gccttctgccccccagaccatagccccttttagttggttttagttgctctggggggaggagagaaggtagagctgttcttaaatttattaaaaaaaaaaataaaagggaatctcagtgtctgttccaggctctgcgcaggacgtcatggttgccatcccatccacccacctgccttccccacatgaaactgggagctggg

SEQ ID NO: 2566 - DNA, 200 bp, synthetic construct
  misc_feature 1..200: note = Poly A sequence
  source 1..200: mol_type = other DNA
aagtccccgagggcgaaggccattgggtttggggccatggtggagggcacttcaggtccgtgggccgtatctgtcacaataaatggccagtgctgcttcttgcattggtttcttccaagtgcttcgcttctgcccccatcccccactcccacttctggcagctcccagctccccagcccaagctgagaggtcaccctgcc

SEQ ID NO: 2567 - DNA, 200 bp, synthetic construct
  misc_feature 1..200: note = Poly A sequence
  source 1..200: mol_type = other DNA
ccgggtccccttccgcaagcgcccaccgatccggaggctgcgggcagccgttatcccgtggtttaataaagctgccgcgcgctcaccaagtcctcttccgcgtctgcttccgcgtcgggcccgggcggggcggggcggggcgtggagccgcgccgcggcctgacgtcacccacacctccctgggactgcgtcactggtgc

SEQ ID NO: 2568 - DNA, 200 bp, synthetic construct
  misc_feature 1..200: note = Poly A sequence
  source 1..200: mol_type = other DNA
ggcaggcccctccaacaggtgctcacagccaccgaggcaggggctgcagccacccactgggagtcttgtttttatttataataaaattgttggggacacctcagtgctagtctctggtgttgtctggctaggtcccccgagtcgggaggacaggacacgggccgctggtggcacacggacaagggtggggctaccagggc

SEQ ID NO: 2569 - DNA, 200 bp, synthetic construct
  misc_feature 1..200: note = Poly A sequence
  source 1..200: mol_type = other DNA
ggttggggggactctgagcgggaggcagagtttgccttcctttctccaggaccaataaaatttctaagagagctactatgagcactgtgtttcctgggacggggcttaggggttctcagcctcgaggtcggtgggagggcagagcagaggactagaaaacagctcctccagcacagtcagtggcttcctggagccctcag

SEQ ID NO: 2570 - DNA, 200 bp, synthetic construct
  misc_feature 1..200: note = Poly A sequence
  source 1..200: mol_type = other DNA
ccaccaccctggcctgctgtcctgcgtctatccatgtggaatgctggacaataaagcgagtgctgcccaccctccagctgccgctgctgtgactgtgctctttaccctttacccagcacacgatcctcaagggtgggaggggagaacagggtccagtctggcccatggccagagaaaggacagggtctcatctggcttga

SEQ ID NO: 2571 - DNA, 200 bp, synthetic construct
  misc_feature 1..200: note = Poly A sequence
  source 1..200: mol_type = other DNA
gccccaccggcccgcagcccctgctgcccaataaaaccactccgaccccacggcctcttgtcttgactctggtggtccagggtggggccgttcccggcctgcctgaggcctgtggtgcctccaactggactaggtcgccacctagtctttatgctctctggagtcctgctgccccagccctgccttcctgtagactccag

SEQ ID NO: 2572 - DNA, 200 bp, synthetic construct
  misc_feature 1..200: note = Poly A sequence
  source 1..200: mol_type = other DNA
ttaccgagttaatacttacaaaaggataaaaataaactcctgcttcccaaggagtccaggtttctgtgttctggtttaaagccgtgcatgcctgttgtagatagtttaactggagcagcatgtctgtaagcaccaggcccccgagccagagaaaacaggaactcggggagaatgacaagcatggccctcccagggctgga

SEQ ID NO: 2573 - DNA, 200 bp, synthetic construct
  misc_feature 1..200: note = Poly A sequence
  source 1..200: mol_type = other DNA
ctccttttaccttctgatacctggaaatccctgccctgttcagccccacagctcccaactatttggttcctgctccatggtcgggcctctgacagccactttgaataaaccagacaccgcacatgtgtcttgagaattatttggatatgaatgggaacgtgactgttttgttttccaattcccattgattgaaaccagtg

SEQ ID NO: 2574 - DNA, 200 bp, synthetic construct
  misc_feature 1..200: note = Poly A sequence
  source 1..200: mol_type = other DNA
ccgggacagggtcttgcaagcagcctcctgggcagtcgtaagggttgcggcgtgatgtcttcaataaattaagttttatttggattgagtaaaacttcaataaattacaagtttttcaaagaaaaaggacaaccaaaaaaattagggaaagagaatccctctgtcccattccccaggcagcccctccactcctctaacag

SEQ ID NO: 2575 - DNA, 200 bp, synthetic construct
  misc_feature 1..200: note = Poly A sequence
  source 1..200: mol_type = other DNA
cagttgcagatatgagctgtataattgttgttattatatattaataaataagaagttgcattaccctcagccctgccttctgggttcatatccagtctcctgcatgctctcctagcaactccacaaggcagacctggttatccccattttacaggggtggaaaccaagatccagaagggatagagaatggtcccagtcct

SEQ ID NO: 2576 - DNA, 200 bp, synthetic construct
  misc_feature 1..200: note = Poly A sequence
  source 1..200: mol_type = other DNA
caaagacctaacagttgcagatatgagctgtataattgttgttattatatattaataaataagaagttgcattaccctcagccctgccttctgggttcatatccagtctcctgcatgctctcctagcaactccacaaggcagacctggttatccccattttacaggggtggaaaccaagatccagaagggatagagaatg

SEQ ID NO: 2577 - DNA, 200 bp, synthetic construct
  misc_feature 1..200: note = Poly A sequence
  source 1..200: mol_type = other DNA
cccagaccctggagctgaaggtcacggccagtccagacaaagtgaccaagacataacaaagacctaacagttgcagatatgagctgtataattgttgttattatatattaataaataagaagttgcattaccctcagccctgccttctgggttcatatccagtctcctgcatgctctcctagcaactccacaaggcagac

SEQ ID NO: 2578 - DNA, 200 bp, synthetic construct
  misc_feature 1..200: note = Poly A sequence
  source 1..200: mol_type = other DNA
cactcaccccttgacacaccaatgaaggagctgacagtgagagtgctcccctcccaggggcagtgaagacacatatttaatctgcatgaaacatgtacagtagtcttgctggaatctaataaaaatggtccctctggctcagcaatgtttctctctgtctctgttgggcaggggtgcatacatgtgtataggtgggcctg

SEQ ID NO: 2579 - DNA, 200 bp, synthetic construct
  misc_feature 1..200: note = Poly A sequence
  source 1..200: mol_type = other DNA
ataaaggaactgcttagatatgtgccaagcaattatttcatgggaaattaaccagaacttgaagaaagttgccagtggcatcagccatttgtttcagtagaactgttcagagcaccattcttccacacttggtcttgcccagcctagcaaccggattgtcaccatggtgagaagccactggccctccataagcactgaaa

SEQ ID NO: 2580 - DNA, 200 bp, synthetic construct
  misc_feature 1..200: note = Poly A sequence
  source 1..200: mol_type = other DNA
tttaaacaaatatgtaaacaaaaataaaatggtaaaaacagtttatgtctaatgttatgtctaatgttatgcataaacatagacttgtaatttatcacgaggtataattctgggacctacaacaaaaggctacacagggcaacaaaaggctgaatctaagtaaaagctacccacttaaacaagtttaacttcacgagttt

SEQ ID NO: 2581 - DNA, 200 bp, synthetic construct
  misc_feature 1..200: note = Poly A sequence
  source 1..200: mol_type = other DNA
cttttaaagttgtttggttttcaaggcactgataatggatatgtatgaagtccatgctgtctgttaaataaaatgccattctgcagaattaaccatcccaccagagcaatattgccctttgtagaattgttctagttaatgatcccaatctctgcctaacattggaaatttcatagagtataatctaacattggaaattt

SEQ ID NO: 2582 - DNA, 200 bp, synthetic construct
  misc_feature 1..200: note = Poly A sequence
  source 1..200: mol_type = other DNA
taccccagatttaaaaaaagaacataaaaaataaagtaccacacatattgcactttttgccgaacgaaatttttacctcacgttcatctcaccaaagtctcttcagaggagcctggtttacagggtgatgaagctgatgatgatacagtagtgtacacactgctaacgtgaatcagactggaaagcaagtcagtacttca

SEQ ID NO: 2583 - DNA, 200 bp, synthetic construct
  misc_feature 1..200: note = Poly A sequence
  source 1..200: mol_type = other DNA
atgccctttcttgaattgcattttttaaaacaagaaagtttccccaccagtgaatgaaagtcttgtgactagtgctgaagcttattaatgctaagggcaggcccaaattatcaagctaataaaatatcattcagcaacagataactgtcttgtgtttgaatattccacacacttttaaataaatatacagataccacaga

SEQ ID NO: 2584 - DNA, 200 bp, synthetic construct
  misc_feature 1..200: note = Poly A sequence
  source 1..200: mol_type = other DNA
gcctgtgacctcaattaaagcaattcctttgacctgtccagttgactttagtccttgtttctaactgccaagtcatgtgctgagtagaggctcagtggttggggcccaatggttcatctaggacgggactagagaggtcagtctacaagcaatccattgaccacttacttggtgctgcacacaaatgttggtgctatggg

SEQ ID NO: 2585 - DNA, 200 bp, synthetic construct
  misc_feature 1..200: note = Poly A sequence
  source 1..200: mol_type = other DNA
ggcgcccgccgccgccccccttcccggtgctcagaataaacgtttccaaagtgggaagcagcttctttcttttgggagaatagaggggggtgcggggacatccgggggagcccgggtggggcctttggccctggagcagggacttcctgccggatctcaacaactccgtgcccagactggacgtcttagggccaagatcg

SEQ ID NO: 2586 - DNA, 200 bp, synthetic construct
  misc_feature 1..200: note = Poly A sequence
  source 1..200: mol_type = other DNA
cccaagaagcaacagccagctaatgctttattaaaattaccctcactagccttctgtgtgtgtctgtggaggtggggtctctaaggatggggttaagggtggaggtggagatcaactccaaggttggagatggaatgccttcagcttacagatgctcctgaggcaatggggcaggtgcctgccgtgcagcaaagggagtc

SEQ ID NO: 2587 - DNA, 200 bp, synthetic construct
  misc_feature 1..200: note = Poly A sequence
  source 1..200: mol_type = other DNA
catgctctctaccaactaccatgaggctaaaagcaaagtcaacaaacccctattataccttccaccaaattctttatcattgtctttcttaggaaacagacatactcattcatttgatttaataaagttttatttttccaaatgtacagctggttggacctgtaaaaaaaaattaaaagaatcagaaccataaagctttg

SEQ ID NO: 2588 - DNA, 200 bp, synthetic construct
  misc_feature 1..200: note = Poly A sequence
  source 1..200: mol_type = other DNA
ttgctgctattaaaaagccgtgtgccttctaccaattgtggcctcttctttactgcctggtgcttccaagaaagggcactgttcttggtctttctggttaaactaccaaccatgatctattgcaagtggttcttgggcactaggttcagaggcagtggaggctggaagggcccatgaacaagatattggcatgggggttg

SEQ ID NO: 2589 - DNA, 200 bp, synthetic construct
  misc_feature 1..200: note = Poly A sequence
  source 1..200: mol_type = other DNA
cttctcccgatccctgagggcggtgagggggaatatcaataattaaagtctgtgggtaccatactgtctccttcttctttctgctggtatggcgaattcctctaggcggctcagagtattaacagtaagagaaggaatgggcttgaagtccgagaaaaggtaggcaggaagtttggtcgggtcaaaggggtgggtttcaa

SEQ ID NO: 2590 - DNA, 200 bp, synthetic construct
  misc_feature 1..200: note = Poly A sequence
  source 1..200: mol_type = other DNA
ttaactcaggcagaagagcacagatgtgtgggattgggggaggagtggggacaagattttttatctccaagtgaattttctaaaaatgtattttataccggcttattcctagtattgaataaactagcgggctcactcagtgtggacagcgtggcctgggaggcagacagatggtgggggacagtgggtgggtagaacct

SEQ ID NO: 2591 - DNA, 200 bp, synthetic construct
  misc_feature 1..200: note = Poly A sequence
  source 1..200: mol_type = other DNA
gcctcctgagcagctcttggttttggcgtcttttgggtcggcccatgtggtttgagcacccagccaggcggtctctttagaggatcctgtacacagttccactattaaaacatttcaggttgaattctgcagtattttcttccttgatttacaaaatgagaaatgtagtcacttagaacttgagcatgatttttgttaaa

SEQ ID NO: 2592 - DNA, 200 bp, synthetic construct
  misc_feature 1..200: note = Poly A sequence
  source 1..200: mol_type = other DNA
ggctgctgcagctgcatgggtgcctgctgctgcctgccttggcctgatggccaggccagagtgctgccagtcctctgcatgttctgctcttgtgcccttctgagcccacaataaaggctgagctcttatcttgcaaaaggctgctggtgcactgtgtcgtagggctgagatggcaacggtgggcaggggctgagttctga

SEQ ID NO: 2593 - DNA, 200 bp, synthetic construct
  misc_feature 1..200: note = Poly A sequence
  source 1..200: mol_type = other DNA
agttggccctcccttgtgccactgccaggggaggaaaggccttgatgttccagacaataataaatgcgcctgtgacttagccttggtgtcagtctcttgcggacctgacaacccccatctctccttccctgattccctctgcctttccaggccccatccccctgaacagctcctccctatggtcctggctgggcctaacc

SEQ ID NO: 2594 - DNA, 200 bp, synthetic construct
  misc_feature 1..200: note = Poly A sequence
  source 1..200: mol_type = other DNA
agaccacaaggctgaaaagtgctttgctggagtcctgttctcagagctccacagaagacacgtgtttttgtatctttaaagacttgatgaataaacactttttctggtcaatgtctttccctgtttcctgttcattcaataaatatcattgtacatttccatatgattcccaatagaataccaagattaaacttaaagga

SEQ ID NO: 2595 - DNA, 200 bp, synthetic construct
  misc_feature 1..200: note = Poly A sequence
  source 1..200: mol_type = other DNA
gttctcattctttcaattgttatgcaccagagattaaaaagctttaactataaaaacagaagctatttacatatttgttttcactcaactttccaagggaaatgttttattttgtaaaatgcattcatttgtttactgtagtttttgtgggttttattttacttgctttttatgttttaggaaaagcgttcactttgaac

SEQ ID NO: 2596 - DNA, 200 bp, synthetic construct
  misc_feature 1..200: note = Poly A sequence
  source 1..200: mol_type = other DNA
cacctcccgattgaaggagaaaaactttttgcctgagtcataaaacctttttttaataataaaatattgtgcaatatattcaaagaaaagaaaacacaaataagcagaaaacatacttattttaaaaaagaaaaaaaaggataaaaaaacccaaactgaaattctatatacgttgtgtctgttacaaatgtcgtagaaga

SEQ ID NO: 2597 - DNA, 200 bp, synthetic construct
  misc_feature 1..200: note = Poly A sequence
  source 1..200: mol_type = other DNA
aatcttgccccagcacagtaataaaaatcaagatttgttagtaacaatcttgaagagctaattttaataaaaataagaaaaattaatactatcatgttaatactattattgtcatcccaagaaaaaagatattttaaaaatttatttgaaaagttcattataagggctttattcatgcctgatttgtttacatgaggact

SEQ ID NO: 2598 - DNA, 200 bp, synthetic construct
  misc_feature 1..200: note = Poly A sequence
  source 1..200: mol_type = other DNA
agtcatcacattaaacattgtaatactagttttttaaaagtccagcttttagtacaggagaactgaaatcattccatgttgatataaagtagggaaaaaaattgtactttttggaaaatagcacttttcacttctgtgtgtttttaaaattaatgttatagaagactcatgatttctatttttgagttaaagctagaaaa

SEQ ID NO: 2599 - DNA, 200 bp, synthetic construct
  misc_feature 1..200: note = Poly A sequence
  source 1..200: mol_type = other DNA
atataattgaagcagcccagatgatcttccacaacctgtgatctaaggaaaaaaatctttcaactcctagagatttttttttttttttgagaaatgtagggatgttgctattaaaaatttccatggagtttatgagctctttatatcttttccatattggacagagcagttctctttgaggacactaggaacactgtggt

SEQ ID NO: 2600 - DNA, 200 bp, synthetic construct
  misc_feature 1..200: note = Poly A sequence
  source 1..200: mol_type = other DNA
taaataataaattttaaaaaacttatttgcattcttcatctgatattttctgagtctgcctttgaaagtgggaatgaggtaaagggctgaggaaaaaagcattgtgaattgcatcttgcctggcatgggggtggttgtaggccctggatcacctcttcccctggcctcctcttgctgtcctaactgactttaaggacctg

SEQ ID NO: 2601 - DNA, 200 bp, synthetic construct
  misc_feature 1..200: note = Poly A sequence
  source 1..200: mol_type = other DNA
agtttttgcagaaatggggcagagggacaccctttgggcgtggcttcctggtgatgggaagggtcttgtgttttaatgccaataaatgtgccagctgggcagaatgttggtcttttcttggattaagcaagggactggtgatgagatggggggtgtggtcgagagtgtgggccccgactcagagcctgatgcgcaggggt

SEQ ID NO: 2602 - DNA, 200 bp, synthetic construct
  misc_feature 1..200: note = Poly A sequence
  source 1..200: mol_type = other DNA
ctaataaaaccttccatctcatactgacccagtccttgacttattcttgccctacaccattccagaaacttgtgaaaagtgaaacaactatttatgtgtaagaccctgtgctagatatattttcttcacagtaacttctcagccttgcttcccaaatcatttgaaaccatagtttctaggattaaataacgtgaccaaat

SEQ ID NO: 2603 - DNA, 200 bp, synthetic construct
  misc_feature 1..200: note = Poly A sequence
  source 1..200: mol_type = other DNA
gaataaataagttttccttttgttttccactcagttaccagtctgtcttttccagggagttgcagtggggtacagtaggggaaaaaagcatggactttgggttaaggccctgttctgtcactttttagccacttgtgaatttggtcacgttatttaatcctagaaactatggtttcaaatgatttgggaagcaaggctga

SEQ ID NO: 2604 - DNA, 200 bp, synthetic construct
  misc_feature 1..200: note = Poly A sequence
  source 1..200: mol_type = other DNA
aggagccgactccacctcccatagttctcccgcgtctggttggccccgtgtgttccttttcctatacctccccaggcagcctggggaacgtggttggctcagggtttgacagagaaaagacaaataaatactgtattaataagatgtttcttgagtctcctgtgtatatttcttttccacagttggctgagtgccttcgt

SEQ ID NO: 2605 - DNA, 200 bp, synthetic construct
  misc_feature 1..200: note = Poly A sequence
  source 1..200: mol_type = other DNA
ccctgttccctcccccaaccctatccctcctacctcacccgcagggggaaggagggaggctgacaagccttgaataaaacacaagcctccgtttctctgtggtgtgtttcagagagctactagctccagtgtcgggggtgggagtggaaggttcaaaggtggtttccctgagggacaggtaccttttggggagagggtgg

SEQ ID NO: 2606 - DNA, 200 bp, synthetic construct
  misc_feature 1..200: note = Poly A sequence
  source 1..200: mol_type = other DNA
gggtctggtctcctcagcctcctcatctgggggagtggaatagtatcctccaggtttttcaattaaacggattattttttcagaccgaaaagagatggtctgagtttgtcttagagtgatgcttgattccttcctttccttactgatgttccctgtcctctgggaccttaatgcatgtgtacttcgaggtctattttggg

SEQ ID NO: 2607 - DNA, 200 bp, synthetic construct
  misc_feature 1..200: note = Poly A sequence
  source 1..200: mol_type = other DNA
gtactctcatatgatgctgtgattttcctggagttgacagaaacacctatatttcccccagtcttccctgggagtctactattaactgaaataaatactcagagcctgatgctggtttttctgttgcttcttgggagaatctacgtcatttaaggagtgaaggtataaaagaaggaagtgtaccacttacttagcagatc

SEQ ID NO: 2608 - DNA, 200 bp, synthetic construct
  misc_feature 1..200: note = Poly A sequence
  source 1..200: mol_type = other DNA
attaaaataaatttggatttgctcataatgatgtgctttgtatgctgctcttgtttgatggaggtggggagaatgtcagttgaagtggtattggaactgttcctccacagtgccatgctctaccttcccaaaacgaggaatgtcttgacttgcagaagacacaaatcttagaatctttgatgatatagtaatctgctgga

SEQ ID NO: 2609 - DNA, 200 bp, synthetic construct
  misc_feature 1..200: note = Poly A sequence
  source 1..200: mol_type = other DNA
tccagtggggtccggacactgggccccgcaggcgaaagcacgttccagccaccaggaggccacctattgtttcaaaataaagactgggttcctctcttggtttcagactgctatttttttcatggttgggggagcagcgggagtcggggagggtgctaggaggagagggcgggaaaagagggctctctcctcttccaatc

SEQ ID NO: 2610 - DNA, 200 bp, synthetic construct
  misc_feature 1..200: note = Poly A sequence
  source 1..200: mol_type = other DNA
ggggtctttgtcctctgtactgtctctctccttgcccctaacccaaaaagcttcatttttctgtgtaggctgcacaagagccttgattgaagatatattctttctgaacagtatttaaggtttccaataaaatgtacacccctcagaatttgtctgattctcttggttctgacaacatagtcaacactgaagggttatgt

SEQ ID NO: 2611 - DNA, 200 bp, synthetic construct
  misc_feature 1..200: note = Poly A sequence
  source 1..200: mol_type = other DNA
agacagagctcctcaaaccattgtggatatcttctgccttcaaccacagatcaaatacttcaagagccatttaataaatatggcagaactatatatgtgtcttaaacctcaaagtaaattttccttgagaaataatttatgttgaaaagatttcctggccaagtgcagtggctcacacccgtaatcccagcactttggga

SEQ ID NO: 2612 - DNA, 200 bp, synthetic construct
  misc_feature 1..200: note = Poly A sequence
  source 1..200: mol_type = other DNA
atttacaaaaagatttctgaagacagagctcctcaaaccattgtggatatcttctgccttcaaccacagatcaaatacttcaagagccatttaataaatatggcagaactatatatgtgtcttaaacctcaaagtaaattttccttgagaaataatttatgttgaaaagatttcctggccaagtgcagtggctcacaccc

SEQ ID NO: 2613 - DNA, 200 bp, synthetic construct
  misc_feature 1..200: note = Poly A sequence
  source 1..200: mol_type = other DNA
gggaaaccccctgaagcccctaaaggcaagaagaaaaagtaaaagaccttggctcatagaaagtcactttaatagatagggacagtaataaataaatgtacaatctctatatacaagctgagtcctttccttttgtctactccaagccttccccctgcgtatgtgggattgagggtcacatcattggcactagtgagagg

SEQ ID NO: 2614 - DNA, 200 bp, synthetic construct
  misc_feature 1..200: note = Poly A sequence
  source 1..200: mol_type = other DNA
agaccttggctcatagaaagtcactttaatagatagggacagtaataaataaatgtacaatctctatatacaagctgagtcctttccttttgtctactccaagccttccccctgcgtatgtgggattgagggtcacatcattggcactagtgagagggtagtcagtagccacttctgggaaaggtgggtagtgtggccca

SEQ ID NO: 2615 - DNA, 200 bp, synthetic construct
  misc_feature 1..200: note = Poly A sequence
  source 1..200: mol_type = other DNA
gtaatggagagtgatggaaacaaagtgtacttaatgcacagcttattaaaaaaatcaaaattgttatcttaatagatatattttttcaaaaactataagggcagttttgtgctattgatattttttcttcttttgcttaaacagaagccctggccatccatgtattttgcaattgactagatcaagaactgtttatagct

SEQ ID NO: 2616 - DNA, 200 bp, synthetic construct
  misc_feature 1..200: note = Poly A sequence
  source 1..200: mol_type = other DNA
ttaaaagtatctcagctcaactgaagaacaacaaaaaaaatttaatgagaaaaaaggattaaagtaattggaagcagtatatagaaactgtttcattaagtaataaagtttgaaacaatgattaaatactgttacaatctttatttgtatcatatgtaattttgagagctttaaaatcttactattctttatgatacctc

SEQ ID NO: 2617 - DNA, 200 bp, synthetic construct
  misc_feature 1..200: note = Poly A sequence
  source 1..200: mol_type = other DNA
gtcatttatatacaaaagaaattctcaaatgttaaaataaaggaatagtttattgcttaatataacttatcatcactttgcttctttactgaatcttctacactcttgcctgatacctaaatttaatgtttgtttttaactcaaaaaatgtactgtagtatggaaaatggatagcagtagaataaagtcttaagattatt

SEQ ID NO: 2618 - DNA, 200 bp, synthetic construct
  misc_feature 1..200: note = Poly A sequence
  source 1..200: mol_type = other DNA
ggtctaccttctgcttccctggaaaggatgaatttacatcatttgacaagcctattttcaagttatttgttgtttgtttgcttgtttttgtttttgcagctaaaataaaaatttcaaatacaattttagttcttacaagataatgtcttaattttgtaccaattcaggtagaagtagaggcctaccttgaattaagggtt

SEQ ID NO: 2619 - DNA, 200 bp, synthetic construct
  misc_feature 1..200: note = Poly A sequence
  source 1..200: mol_type = other DNA
aagttctctaccattgaatcagtgaactagaaagatctgatttggcctgggaccagtgttcaagttggtttggtctttattaaaaatcacaatattccgaaaacaaaaaaacctaggagataaatgtagaggtattgacttttcgtatcttttatcttcacactgaaacaagagctatcctatttgattattaaagtgag

SEQ ID NO: 2620 - DNA, 200 bp, synthetic construct
  misc_feature 1..200: note = Poly A sequence
  source 1..200: mol_type = other DNA
ttccaatggctcctttctgacctgctttcatgttttaatgtttgtttaatttaataggaaacctcattttaaatataacactcaaaaaaatgtaaatcatattgtagtattcaatagttaataaaaactcgagaaatgtgttgtttctgatgtgaaatttccaaaggaactttaattattgcaagttcaagcaatgaact

SEQ ID NO: 2621 - DNA, 200 bp, synthetic construct
  misc_feature 1..200: note = Poly A sequence
  source 1..200: mol_type = other DNA
ccaattaaatcagtatgttcagtttctgaagcagttcttcctgcttcgtcttttgctacctttgtcttttggagggaaagcaatggatgggatatgttaaaagaaacattaattacattggcagttttcatttatacattgttgacataattttactcttaatacacacttgtatttattttaacgtctgaagttgaata

SEQ ID NO: 2622 - DNA, 200 bp, synthetic construct
  misc_feature 1..200: note = Poly A sequence
  source 1..200: mol_type = other DNA
aacatgcaaaatatggagcttttcatgtaattactcttttactgtttaccattcactataattcacaattaaaattgtgtgactaaacaatgtctttcgtgcctttttgcccttcactttgttgttttccaactgcaaaatagatgcttccaaacatggtgattgaagtagacttgtattggggtagctgcctggtttac

SEQ ID NO: 2623 - DNA, 200 bp, synthetic construct
  misc_feature 1..200: note = Poly A sequence
  source 1..200: mol_type = other DNA
agacaatgaagaacagttgaaacatgcaaaatatggagcttttcatgtaattactcttttactgtttaccattcactataattcacaattaaaattgtgtgactaaacaatgtctttcgtgcctttttgcccttcactttgttgttttccaactgcaaaatagatgcttccaaacatggtgattgaagtagacttgtatt

SEQ ID NO: 2624 - DNA, 200 bp, synthetic construct
  misc_feature 1..200: note = Poly A sequence
  source 1..200: mol_type = other DNA
gagtcttccgaacacttgctatctcttgctgctgctgtttcatggaaggagatattaaacatttgtttaatttttatttaagtgttatacctatttcagcaaataaaatatttcattgcttatattaatccttattttttcaatttcaatatgatcacttacagtttccatcataatttttttttgcaacatagccattt

SEQ ID NO: 2625 - DNA, 200 bp, synthetic construct
  misc_feature 1..200: note = Poly A sequence
  source 1..200: mol_type = other DNA
agccaggcctgtcttgatgatttttggttttttttcattgtcctgttgaaatcaagtaattaaacatttaagagccacaaaattgtatcacttttataatattttgcagtaaaatataataccatcttctctgttaatacataattgctccaagcttcctgtaaactataagaatatatttagtttacagtatatggatt

SEQ ID NO: 2626 - DNA, 200 bp, synthetic construct
  misc_feature 1..200: note = Poly A sequence
  source 1..200: mol_type = other DNA
gtgcatgcatggggccacctttgcaacataaccgaaagaataaatgttttgttctgtagcctcgtgcctgtcacacacattactaagggctttgggtactggggccacctctgggctggggccgaggagcgagaagtaaaagcgggaacagggagtgggaaccatgtgagtccatcaaggcccctggaaacctctgagct

SEQ ID NO: 2627 - DNA, 200 bp, synthetic construct
  misc_feature 1..200: note = Poly A sequence
  source 1..200: mol_type = other DNA
gacagcttcagactttgtttttttaacaatttgaaaaattattctttaatgtataaagtaattttatgtaaattaataaatcataatttcatttccacattgattaaagctgctgtatagatttagggtgcaggacttaataatagtatagttattgtttgtttttaagaaaagctcagttctagagtcatactattact

SEQ ID NO: 2628 - DNA, 200 bp, synthetic construct
  misc_feature 1..200: note = Poly A sequence
  source 1..200: mol_type = other DNA
gctctccacccagcccgctcctgacccttatcttcccagagtccaggccaggaaggcccgagatggagagcactaaattcacggctttcatgtttttatttaataaattaaaaagtatttgaagccacattgaagggaacgctctacgaataaatctctttacccagggctgtgggctgtgtgtgtccagctcacagatg

SEQ ID NO: 2629 - DNA, 200 bp, synthetic construct
  misc_feature 1..200: note = Poly A sequence
  source 1..200: mol_type = other DNA
atatcacctctcaaaagcatcacctctatctgcctcatctcacactgtactctccaataaagcaccttgttgaaagacctcatgtttggatattgttttattctctgtctataaactaggtctctgcctactcttttatttttatgtatttattttttctaggtggagtcttgctctgtggcccaggctggagtgcagtg

SEQ ID NO: 2630 - DNA, 200 bp, synthetic construct
  misc_feature 1..200: note = Poly A sequence
  source 1..200: mol_type = other DNA
agaggacatccctgctgggctgctgtgcagagtataagattttggacttgttcatgtcccctctctccctataaatgatgtatttgtgacaccctatcttgtcaataaacagcattctgattagtttgtcttattttgttgctagtaactacgtatttgttttattccccttttcttcccttttggtagcaaaggacacc

SEQ ID NO: 2631 - DNA, 200 bp, synthetic construct
  misc_feature 1..200: note = Poly A sequence
  source 1..200: mol_type = other DNA
gggtgggttgggcaacagcctgagagtggactcagtgttgattctctatcgtgatgcgaaattgatgcctgctgctctacagaaaatgccaacttggttttttaactcctctcaccctgttagctctgattaaaaacactgcaacccagctaacttgtccagcatatgttgaatgggagccaaagtgtagcaaatgctgc

SEQ ID NO: 2632 - DNA, 200 bp, synthetic construct
  misc_feature 1..200: note = Poly A sequence
  source 1..200: mol_type = other DNA
gaagccttggaagatcgtttggaaaggattaatcgagaactgggttcagttcgcatgacgctaaagaaattccatgttttgcgcacctctgcaaatctttgagatttgtagccattaaattttgagtcatttttgtttgcactaatgtataattatgcagtcagaaaaggcaaactattttgtactgtttataagccttc

SEQ ID NO: 2633 - DNA, 200 bp, synthetic construct
  misc_feature 1..200: note = Poly A sequence
  source 1..200: mol_type = other DNA
gtttccccttttaaggtttcaacaaatttcattgcactttcctttcaataaagttgttgcattcccaattggtgttttttttttttttttttttaagtttattttgcattagactgggtgaagggggtcaaggttttcggtctacaaatgttcctgtggtaacggtgaaatgtcagtgaagggggtggccttaatatagt

SEQ ID NO: 2634 - DNA, 200 bp, synthetic construct
  misc_feature 1..200: note = Poly A sequence
  source 1..200: mol_type = other DNA
aaggcagtcgctgccttcaggtggtgctgccccagaaacttaaaatttagtcgaggcagtttcaattgttactgtggaccgaattaggatcacaataaacgataatgcaggttcttcaatggtgactttaatctctcagaacaattgctgttgctttgaaagacatgcatagccagatgttttttaaattttcgtgtgtg

SEQ ID NO: 2635 - DNA, 200 bp, synthetic construct
  misc_feature 1..200: note = Poly A sequence
  source 1..200: mol_type = other DNA
ttacagacggtgacataacacaggaaggaaccctgtcacattcctctttttgtattttcgtagtagatttaaaagttataatctcttcccctccccccaaactggagctgtccctggcctggttttcaaaataaagtgtgcgatcttcattattgtttccttagggagggcgtccctagagctcagtcttctgccaacct

SEQ ID NO: 2636 - DNA, 200 bp, synthetic construct
  misc_feature 1..200: note = Poly A sequence
  source 1..200: mol_type = other DNA
cgatcctcatgtgatcatgaagtaacagtaactgactttttatgttaaaaaatgtacatttactgtggattctgtttaatttattgtgtatgtgtggggaaaagattagattctaaaataaaagtttaccctgtggcatcttcatttttatattctttgaaatgcaatgatagctctcatttataattcactaccctgtc

SEQ ID NO: 2637 - DNA, 200 bp, synthetic construct
  misc_feature 1..200: note = Poly A sequence
  source 1..200: mol_type = other DNA
gttgtttgcagtcttcagttgtgttcttatgcttcagtgtcacatttcatttcatttgaaactaaaattttaagtaaagctgaaataaacttcttgtcattgtctgccttttgataattttaaagaaataactttccataagtaaaaaattatatatctctttggatataaatgatttttaaaagatgtttatttaaaaa

SEQ ID NO: 2638 - DNA, 200 bp, synthetic construct
  misc_feature 1..200: note = Poly A sequence
  source 1..200: mol_type = other DNA
cagccaccacattttcaaaacagatttgtaaaaattgtatttgttaacactgtgcacaaacgttttatactaaataaatatcaaactacattcttctgaaagatgtttctattatttcttaggtcacttccatatatattatgtatagtgaaaccatttttaaaaagcaatgacttaggcaaaccaaccctagtttgtta

SEQ ID NO: 2639 - DNA, 200 bp, synthetic construct
  misc_feature 1..200: note = Poly A sequence
  source 1..200: mol_type = other DNA
atactaacttattattatttatgattatataaatgaaatggacctatatcaagaggcagactgaagcttggaaatcattatgaatatttgtaaattacagctttaagaacacattacacataaatatatgttttgtaattaatcgaagtcacatttcctgacctaagaatttattttaggtttcctgtaaagtacaatcc

SEQ ID NO: 2640 - DNA, 200 bp, synthetic construct
  misc_feature 1..200: note = Poly A sequence
  source 1..200: mol_type = other DNA
ttcagagtctgcttcaatcagcagatgaagaagccattgctgaacttttggatgaacaccttaaatcagcaaaataaatactaacttattattatttatgattatataaatgaaatggacctatatcaagaggcagactgaagcttggaaatcattatgaatatttgtaaattacagctttaagaacacattacacataa

SEQ ID NO: 2641 - DNA, 200 bp, synthetic construct
  misc_feature 1..200: note = Poly A sequence
  source 1..200: mol_type = other DNA
taaattaatttgctctcatcgtattgtgtatattcacctaatgcccattgtgtattgatattgcattcttgaattttgaacactgaatatctttttgaaagattatacttctttacctctttgtgctttagaaattattttccttcaagtgttcaagtctaatgaagaatgaagataacattttatcacttctgtcctta

SEQ ID NO: 2642 - DNA, 200 bp, synthetic construct
  misc_feature 1..200: note = Poly A sequence
  source 1..200: mol_type = other DNA
ttgtcaataatggaaacaccaaaaactgtattatttgcaactaaattttctctgccatacactaactcaaaaattttgatattttcattaacttgatgattaaactttatgtgagttaaactttgccttaacctgtgttttatgttatttttgctccaggttaaaggtgcaatgctttcctcctcttttcttgtgaagga

SEQ ID NO: 2643 - DNA, 200 bp, synthetic construct
  misc_feature 1..200: note = Poly A sequence
  source 1..200: mol_type = other DNA
gggccttaatgtcacccaccagaaaactaactccaaataaacgcttaccctttcctttaggtttctttgttttgtttttgagcaaaagagatcggtagtgttgtgtgtaggccattcttctggagagccacaagcaggaagagcagcgctgtgttgcagaatggagtttccatggatttctaccagaccactgaaggagt

SEQ ID NO: 2644 - DNA, 200 bp, synthetic construct
  misc_feature 1..200: note = Poly A sequence
  source 1..200: mol_type = other DNA
ataggaaacaagactttaaattttaaaaaaggaagttttatagtgaatgggtataaaaacaaatttgtggcatttttagtctaatgcatgttttcatccactatccagtactgattattaaaatgacatgtatttatcagagaattcactgacgtgtggcttaatacatgtaaatctagacctctgacatcatggtgttt

SEQ ID NO: 2645 - DNA, 200 bp, synthetic construct
  misc_feature 1..200: note = Poly A sequence
  source 1..200: mol_type = other DNA
ggatggagcacagccatgaacctgctcacgacaagacgcacccatgcttctcagggtcaaggctttatgttaaagcttcctgtcggggctgctaggtcagcattaaagtaaggcaaccaacagtgtcccactggcgtctgtttgttagtaactgagcctaaacactcactgcgttctgtggctacagactcaccgtcgat

SEQ ID NO: 2646 - DNA, 200 bp, synthetic construct
  misc_feature 1..200: note = Poly A sequence
  source 1..200: mol_type = other DNA
atcccactcaaggcctggtttgtctctcgattgccgccttgccctggcttctcccgccctgttgaggtgggaaggtgaagtgtctgtctggaacaccagcttccgcccttcccagctaggctggggattcctccagggaatattctagtctgtgggggcaggatggaggctccagggatgatactgtgccatgactgcca

SEQ ID NO: 2647 - DNA, 200 bp, synthetic construct
  misc_feature 1..200: note = Poly A sequence
  source 1..200: mol_type = other DNA
aacagagtcccgccttaagagtctggatcgcacacctttgcaacagatgtgttctgattctctgaacctacaaaatagttatacatagtggaataaagaaggtaaaccatctgttatgtctttttttttcttttccaataaacttttattttggactaatttttgatttacagaaaaatggcagagatagtacagagagc

SEQ ID NO: 2648 - DNA, 200 bp, synthetic construct
  misc_feature 1..200: note = Poly A sequence
  source 1..200: mol_type = other DNA
tgttgatattaaataaaccagagatctgatcttcaagcaagaaaataagcagtgttgtacttgtgaattttgtgatattttatgtaataaaaactgtacaggtctaccactggcttcttcgggctttatttctccaagaacatatttcttctgacattagtagatctccatttccaggacagaaattactcattgctctg

SEQ ID NO: 2649 - DNA, 200 bp, synthetic construct
  misc_feature 1..200: note = Poly A sequence
  source 1..200: mol_type = other DNA
gaggatgtgtaacaagtattttcttctatcgtgcctgccagggctgaagctgcctggtatccaggaggggaatgctggtatccccatatgtctgtgtttgtttgagatttttaataataaataataaatttttgaagaatggaagtggattttgtgattcttaaaaagtgtagaagctgggcacggtggcatgtgtctgc

SEQ ID NO: 2650 - DNA, 200 bp, synthetic construct
  misc_feature 1..200: note = Poly A sequence
  source 1..200: mol_type = other DNA
ggtggaaagggctaccctggggctctgaccacactgtagtatgtgtggagggtgccctcccgactcccacaacttctgctataacaataaactgtagaggaatctgagtaccgttattattctttgtctaggtgtgcctgcatcatgctcctcttcctatcttctccctgtccacgactcatattctcttctcaaagtga

SEQ ID NO: 2651 - DNA, 200 bp, synthetic construct
  misc_feature 1..200: note = Poly A sequence
  source 1..200: mol_type = other DNA
gaggagcttcatctcagcctgctagccccctgaccctgcatgtttaacaccagggagcttggaaaacaataaacatctgtgtgtgcagcagccaaaatctctgtctgtgagggacagatgagcctactagtgtagagagagggagaagaggcagcacaggagggtgggttctccaccacacacccttcgctctgcttagc

SEQ ID NO: 2652 - DNA, 200 bp, synthetic construct
  misc_feature 1..200: note = Poly A sequence
  source 1..200: mol_type = other DNA
aagcacttccttacagagctaagaatccatagccatggctctgtaagctaaacctgaagagtgatatttgtacaatagctttcttctttatttaaataaacatttgtattgtagttgggattctgaagtccattctggctctgctacttaacagtgtataatcttgtgcaactcatctctcagtattatatgtgaaatgg

SEQ ID NO: 2653 - DNA, 200 bp, synthetic construct
  misc_feature 1..200: note = Poly A sequence
  source 1..200: mol_type = other DNA
cccaaaggggcttcactgaagagcccacttccaagtcaataaaaagcaactcctgcctcccttcctcaccctgtctctggatttcttttctatcacctagatgcttcatccagccagaagatagccttcacgttccccatctgtcttcagagaaaaagagctgggacaccaagaacaagctgttagatcactgcctggga

SEQ ID NO: 2654 - DNA, 200 bp, synthetic construct
  misc_feature 1..200: note = Poly A sequence
  source 1..200: mol_type = other DNA
aagcaactcctgcctcccttcctcaccctgtctctggatttcttttctatcacctagatgcttcatccagccagaagatagccttcacgttccccatctgtcttcagagaaaaagagctgggacaccaagaacaagctgttagatcactgcctgggaggcttggcttagtactctcatctctggttccattccagttcag

SEQ ID NO: 2655 - DNA, 200 bp, synthetic construct
  misc_feature 1..200: note = Poly A sequence
  source 1..200: mol_type = other DNA
aatctacagccaagaataactctggcttccgccatgccccatgtctcagaaataggtggccatggggcttcacaaaataatgagatgctctgtgcagtctgagaaagcaaatttgcctcttttcttaacacagtctctactggggaagcagaacactggtgggataaaaacttatctagaaggggagaaactccctccac

SEQ ID NO: 2656 - DNA, 200 bp, synthetic construct
  misc_feature 1..200: note = Poly A sequence
  source 1..200: mol_type = other DNA
aaaagtgtgtattaggaggagagagaggaaaaaaagaggaaagaaggaaaaaaaaaagaattaaaaaaaaaaaaaagaaaaacagaagatgaccttgatggaaaaaaaatattttttaaaaaaaagatatactgtggaaggggggagaatcccataactaactgctgaggagggacctgctttggggagtaggggaaggc

SEQ ID NO: 2657 - DNA, 200 bp, synthetic construct
  misc_feature 1..200: note = Poly A sequence
  source 1..200: mol_type = other DNA
ctttgccacatcttgatctgctcagccctggaggtgccagcaaagccccatgctggagcctgtgtaacagctccttgggaggaagcagaataaagcaattttccttgaagccgagatcctgactccagactcttcttcactgccctgaggacccggggatggggtctggactaggggaggtggaaatgcaggggagtggg

SEQ ID NO: 2658 - DNA, 200 bp, synthetic construct
  misc_feature 1..200: note = Poly A sequence
  source 1..200: mol_type = other DNA
agaaataaaaaccatcgggcctggctgtggctcctctcatcatttggttgggtccttgaaagggtgggaagagggtctggtagtcactagggttccccagccattccttgctctcatcaaccttgaatgtccttccttatgcttgacctccatccctccagctgtcctttcagtctcctagtttttgcagacttcaggct

SEQ ID NO: 2659 - DNA, 200 bp, synthetic construct
  misc_feature 1..200: note = Poly A sequence
  source 1..200: mol_type = other DNA
gccagggccagcggggcccggttccaataaagagtcttgggctgatgggcagtggtataactatatttattgtgcctgagaggcaaggtgagggaaaaatctcaacagaagcaagtttggggaaaatctggagtccccagtaaaaagcaggaaggtctctgctgtactcatcacagaatgggagagagggctctcaatag

SEQ ID NO: 2660 - DNA, 200 bp, synthetic construct
  misc_feature 1..200: note = Poly A sequence
  source 1..200: mol_type = other DNA
agccctctctcccattctgtgatgagtacagcagagtccttcctgctttttactggggactccagattttccccaaacttgcttctgttgagatttttccctcaccttgcctctcaggcacaataaatatagttataccactgcccatcagcccaagtctctttattggaaccgggccccgctggccctggctcaggcat

SEQ ID NO: 2661 - DNA, 200 bp, synthetic construct
  misc_feature 1..200: note = Poly A sequence
  source 1..200: mol_type = other DNA
acccgggactagaaggaaaataaatgatctatatgttgtgtggattcccttctggcgtgtgtcattcattcaaaaagcatttattgagtggcacctatgtccagcctgaagatgaatgtggtgggaaggggtgggtgtcacaaagacaaagatgacttagatgcccactgtaatcttgactgtgagaaagaggggattca

SEQ ID NO: 2662 - DNA, 200 bp, synthetic construct
  misc_feature 1..200: note = Poly A sequence
  source 1..200: mol_type = other DNA
agctgacagaagaggtacccttgggacagagtatcccccgcaggcggaagtagctgagggcaagggtcccgatgagggtcccatggcctgctccctcaggaacagctccagcaccaataaagaggcatcttaccacccaggcttcttggtggtccttcttcctggtgccaccatctaggggcaccagggaaagagcgggg

SEQ ID NO: 2663 - DNA, 200 bp, synthetic construct
  misc_feature 1..200: note = Poly A sequence
  source 1..200: mol_type = other DNA
tgagggcaagggtcccgatgagggtcccatggcctgctccctcaggaacagctccagcaccaataaagaggcatcttaccacccaggcttcttggtggtccttcttcctggtgccaccatctaggggcaccagggaaagagcggggtgaacagagctttgctgaaaagggccccctgcaacctagtgcctgaccctccct

SEQ ID NO: 2664 - DNA, 200 bp, synthetic construct
  misc_feature 1..200: note = Poly A sequence
  source 1..200: mol_type = other DNA
aatggctgagggagggggctaagagaggagcaaagcaggaggtcttgggctaaaaatcttttttaccaaaaataaatctaagtctgatttagtttcatcaactagggtcaaagacattcttttctcaaggcaatcttatagcagggaacactgctggagtaagagatagatttctgcccagagcctgtaaccaataatct

SEQ ID NO: 2665 - DNA, 200 bp, synthetic construct
  misc_feature 1..200: note = Poly A sequence
  source 1..200: mol_type = other DNA
gaggccctgccccctacccttgccctttaacttattgggactgaataaagaatggagaggccctctcaggctaccaagctgttgtcgctgctatcactacaccaccaccttcatcacttttattttttgaaaagaaagggaagagtcatggggtgttgccagctccttctttctgcgccatcctattgtttcctctcaga

SEQ ID NO: 2666 - DNA, 200 bp, synthetic construct
  misc_feature 1..200: note = Poly A sequence
  source 1..200: mol_type = other DNA
gattgcactcgccttctaagaacctcaataaagagtctctggggtgtctggagcccattgatgtctgaagctgctgatatagctggggatcaccttctcattgcccttcagtgggaattcttcttcttcccaggccaattttagtgcgagtgtgtgtgtgaatgtgtgtgcacatgcctgcacacatgcatgcatgtgag

SEQ ID NO: 2667 - DNA, 200 bp, synthetic construct
  misc_feature 1..200: note = Poly A sequence
  source 1..200: mol_type = other DNA
cagcaggcatgagtctaaccttcctctgggcctgaccatctctgggacagaggcaagaatccccaaggggtgggcagtcggggttgcaggactgtaataaatggatctctggtgtaaatatgactgaagtcttatttattcactgaaccatcttcaatatgcaacaacactgctccaggcagccgtctgctgtcagttct

SEQ ID NO: 2668 - DNA, 200 bp, synthetic construct
  misc_feature 1..200: note = Poly A sequence
  source 1..200: mol_type = other DNA
tctctgaaagactagactgtcttatattatgagatacttgaatgctgcatgtaaagcctttaaagcaaaatcctcagaaatggtctaaataaaacacttgatatgcctagagaacacagcaaatgttttggttactggaattttggttgcaatagtttagaagcaataggaccaaatattgcttgttaggaggtggggta

SEQ ID NO: 2669 - DNA, 200 bp, synthetic construct
  misc_feature 1..200: note = Poly A sequence
  source 1..200: mol_type = other DNA
tatagattgatgctaaaagttgttttccctcctgcccatgctctcccagatgaagggcttttattttgtgtatacttggtatccaagaaaatagttcaactatactagtttcagaagtgtattttcagtgtttaaccccaggtaaatgttttatatagaggatctgtgcaaaaatgtttgtaatttttttatatttcctg

SEQ ID NO: 2670 - DNA, 200 bp, synthetic construct
  misc_feature 1..200: note = Poly A sequence
  source 1..200: mol_type = other DNA
ggatttgacacgataagcctcatctgatggaagagaggaataaataattcacctatatgtgtttgaggttgtgacagacttataaaatctttttaaaaaataaagctataatttatattaagttctgtggtttttctcttattacagtgttttacttgaacacattttaaataccattttgattacaacatttactgtta

SEQ ID NO: 2671 - DNA, 200 bp, synthetic construct
  misc_feature 1..200: note = Poly A sequence
  source 1..200: mol_type = other DNA
ggaagagaggaataaataattcacctatatgtgtttgaggttgtgacagacttataaaatctttttaaaaaataaagctataatttatattaagttctgtggtttttctcttattacagtgttttacttgaacacattttaaataccattttgattacaacatttactgttaatatccaagtctattatttcttctcata

SEQ ID NO: 2672 - DNA, 200 bp, synthetic construct
  misc_feature 1..200: note = Poly A sequence
  source 1..200: mol_type = other DNA
cttggttaagcacctctcctttgcccttcaccctgactcctgtcactgtctccatccccaaataaagctgaaatatttttttaagttagctgccgagaaaacattttgcatgaaggataaagttctgttaaaatacatccttaaaaaaagtttttcctatgcattgcctatgctttaaatcaacaaactcttcatttcta

SEQ ID NO: 2673 - DNA, 200 bp, synthetic construct
  misc_feature 1..200: note = Poly A sequence
  source 1..200: mol_type = other DNA
cttcattaataaatacctcaaatggccagtaactcaatattacttttcttccttttttaaaatgtatgtataagatttctctattggttttctgtgctgcaataataagttaccagaaacctagcggcctaatgtgccacacatttattatttatcccacagttttgtggatcaggagtgtaggcacagcttagttgggt

SEQ ID NO: 2674 - DNA, 200 bp, synthetic construct
  misc_feature 1..200: note = Poly A sequence
  source 1..200: mol_type = other DNA
ctgcctctcgctcctcaacccctcccctccatccctggccccctccctggatgacattaaagaagggttgagctggtccctgcctgcatgtgactgtaaatccctcccatgttttctctgagtctccctttgcctgctgaggctgtatgtgggctccaggtaacagtgctgtcttcgggccccctgaactgtgttcatgg

SEQ ID NO: 2675 - DNA, 200 bp, synthetic construct
  misc_feature 1..200: note = Poly A sequence
  source 1..200: mol_type = other DNA
ccatggtgggaggccaggagttatcttatctcatcctggaccaaacagataggccagaaccagcctgcatcctggggctgctatgtggttcagttaatcagtgtgccaagattctaataaagttgaccttgggttctgtgaacactaaggagcaatccttacaagggaggaacagcttctagccactcattcacaattgt

SEQ ID NO: 2676 - DNA, 200 bp, synthetic construct
  misc_feature 1..200: note = Poly A sequence
  source 1..200: mol_type = other DNA
aggagaattcctgcttgccacagaccccgaacatggcttggggttgaacatgttccatcttcctgagatggaagtcacaggcacatttcagtttagtctctccctgtcaccacctccctagacagcccgaatgagcaaaactgcaagttctagaagtcctgtgccccatttcctccctgcccattcaaatgctgggatgc

SEQ ID NO: 2677 - DNA, 200 bp, synthetic construct
  misc_feature 1..200: note = Poly A sequence
  source 1..200: mol_type = other DNA
ccagtgattatgatgtaaattaagtagcaattaaagtgttttcctgaacactgatggaaatgtatagaataatatttaggcaataacgtctgcatcttctaaatcatgaaattaaagtctgaggacgagagcacgcctgggagcgaaagctggccttttttctacgaatgcactacattaaagatgtgcaacctatgcgc

SEQ ID NO: 2678 - DNA, 200 bp, synthetic construct
  misc_feature 1..200: note = Poly A sequence
  source 1..200: mol_type = other DNA
ccagatttacttggagtacatgtgaaagaaaacgtcagtctgcctgtaaatttcagcaagccgtgttagatggggagcgtggaacgtcactgtacacttgtataagtaccgtttacttcatggcatgaataaatggatctgtgagatgcactgctacctggtactgctttcagtgtgttccccctcagcccctccggcgt

SEQ ID NO: 2679 - DNA, 200 bp, synthetic construct
  misc_feature 1..200: note = Poly A sequence
  source 1..200: mol_type = other DNA
gactccagggttctagacagaggccagtcttggccactcaccccacaccccgcggaccccaataaaggcttgcatagctccagcttctgcctgctggttctgagctctgtgaccagggccttggagaggactggggaaggggcgggaagcagtgaccctgacctgagatggccctcgggacacggcgagctctcctgtag

SEQ ID NO: 2680 - DNA, 200 bp, synthetic construct
  misc_feature 1..200: note = Poly A sequence
  source 1..200: mol_type = other DNA
gaaaggtgtaattaaaggttaatctgtgattgttatgaagtgaatttgaatatcatcagaatgtgtctgaaaaaacattgtcctcaaataatgttctttaaaggcaatctttttaaagatttcactaatttggaccaagaaattacttttcttgtatttaaacaaacaatggtagctcactaaaatgacctcagcacatg

SEQ ID NO: 2681 - DNA, 200 bp, synthetic construct
  misc_feature 1..200: note = Poly A sequence
  source 1..200: mol_type = other DNA
atactgttgatccatctcagtcactttttcccctgcaatgcgtcttgtgaaattgtgtagagtgtttgtgagctttttgttccctcattctgcattaataatagctaataataaatgcatagagcaattaaactgtgaggtactgttgtatatatttttttgcctgttgattttgatgagatcttaagttactgtggatg

SEQ ID NO: 2682 - DNA, 200 bp, synthetic construct
  misc_feature 1..200: note = Poly A sequence
  source 1..200: mol_type = other DNA
gctgcctgcctgacaaggtcagcatcatttgctctcctgaatttatgaggtttatttatttttctctttcctactcctattaaagaacctcgtcccagtgtttcctgcttaagcctggtctctattctacaggtagaaaatgggggcagggtagtggagtgcccctgaaatgaaacgggctggggaaaaaaaaatctctt

SEQ ID NO: 2683 - DNA, 200 bp, synthetic construct
  misc_feature 1..200: note = Poly A sequence
  source 1..200: mol_type = other DNA
ccccagctccagccatccacccctcagcccttttcttcaacgtcaccaataaattttttttttttttaagattttacctctatcccatacataggtataaggtgctgggctctgccgcagagcgctccacccaggcctggcgcccctcccaggaagtgggcagacccccagggaaacgctccgcagggtgagagtcccag

SEQ ID NO: 2684 - DNA, 200 bp, synthetic construct
  misc_feature 1..200: note = Poly A sequence
  source 1..200: mol_type = other DNA
tcagtggaatagggctggttactttgggctgtccaactcataagtttggctgcattttgaaaaaagctgatctaaataaaggcatgtgtatggctggtccccttgtgttttgttgtctcacatttagatatcagccatgcatgactgaatggcttccaatcatatactcacctatcacctacaagagaacaatgaaaaac

SEQ ID NO: 2685 - DNA, 200 bp, synthetic construct
  misc_feature 1..200: note = Poly A sequence
  source 1..200: mol_type = other DNA
gagtcataatattatacaaattcagagtgttattaaagaggtattgaaatattttaccagtctcactggattctcttctcaatttttggggaactatggaataatgaaaagaggatgcgcaaatcaaattccattctttcagtatcctaaatggatttcactggaggctttcaaggtatcattcttctctggggtctttt

SEQ ID NO: 2686 - DNA, 200 bp, synthetic construct
  misc_feature 1..200: note = Poly A sequence
  source 1..200: mol_type = other DNA
agtatgaaatatgaaaacattttatatattttattgtacagttataaatatgtaaacatgagttattttgattgaaatgaatcgatttgcttttgtgtaattttaattgtaataaaacaatttaaaagcaagtctctatgtttaagaaatctacttttccggccaggcgcggtggctcatgcctgtaatcccagcacttc

SEQ ID NO: 2687 - DNA, 200 bp, synthetic construct
  misc_feature 1..200: note = Poly A sequence
  source 1..200: mol_type = other DNA
aatggatgttctcaggttgtatttatttcggacaaataaactagagaattgtgtaaaaactgtgcctcctgcctcctctctctccccctctcacttgtgcatgtgcacacacgtgtttgtttaggccacagtggctgagatcacacccttctgtgaggtggtcttagtatcactggtcgtttgaaaagctgagttatctg

SEQ ID NO: 2688 - DNA, 200 bp, synthetic construct
  misc_feature 1..200: note = Poly A sequence
  source 1..200: mol_type = other DNA
aagaaagatttagatggcttcttgccagtttgagcctaatctgattcttacagttttaccttcttgaaccaatgtaaaagtttttttaatgttaaatgattaaattctcagtgaggctatcttccttttccccagtaacattcctgaatttactgttatcttattgtagtacttgcatgacatggattcctgatatctga

SEQ ID NO: 2689 - DNA, 200 bp, synthetic construct
  misc_feature 1..200: note = Poly A sequence
  source 1..200: mol_type = other DNA
ccgttagcactgactgccagtatctgttttatcttgctggtgctgaacattctttgtgcaactccatggtctttctgggccttactgtgctggtataattaaaataaaatatattttgttctattggtaggtttttttttaaaattagatgaatatgttagtctttttcaatatcagtttgaatcttattttctgtatgt

SEQ ID NO: 2690 - DNA, 200 bp, synthetic construct
  misc_feature 1..200: note = Poly A sequence
  source 1..200: mol_type = other DNA
gggccggggagggggccgggggcggtgggcacatagagctataaataaatatatatatatatatatatatatatatatttaaacaaatgaagtcataataaaatttaaaaatgctaaggatctggccccacaggccccaaagctttcacagagctcctcttagacatgaagatgcccattggcctcctaggtcccaggag

SEQ ID NO: 2691 - DNA, 200 bp, synthetic construct
  misc_feature 1..200: note = Poly A sequence
  source 1..200: mol_type = other DNA
ccccagagcaggcctccttccctgtgtgctggggagtctcatcaccgccccctaaaaatgacgttattaaatgttgtagctctgtgagcattttcctctttcctggagcagggcagcctgggggccctgcttcctcctcctagacctcactctgggcctgggcctgggtcttctgctgcagccttacagcctcccgcctg

SEQ ID NO: 2692 - DNA, 200 bp, synthetic construct
  misc_feature 1..200: note = Poly A sequence
  source 1..200: mol_type = other DNA
gtgacagtttcctgaggagaggggtgtatccaggcttacctcccagcaggagtggtaccatatggtgtttatgtactactctatagaactcttggcttgcacttctacagctctgtacatttataagaataaatgcaatcacactagttgagctgtgtctgtgttgcagtggattttaaaggccttggccaggcacaatg

SEQ ID NO: 2693 - DNA, 200 bp, synthetic construct
  misc_feature 1..200: note = Poly A sequence
  source 1..200: mol_type = other DNA
gtccctggggctggggttttgtttgtagaaggctctggggactcctaatttctgcttccccagcctaaagcagggatcagtcttttcttgtggaataaatccttggatcgggaaccctgctgctcagtccccttagggcccatcctcacgcttggggtgggggtgggaagtctggggtgggatggcttcccaggtatttg

SEQ ID NO: 2694 - DNA, 200 bp, synthetic construct
  misc_feature 1..200: note = Poly A sequence
  source 1..200: mol_type = other DNA
tagctaactaactggtagaccagagtattacatcatcttattttggttttataccaataaaacatagcgtggaactcattcaggtaatgttttgcatttcattgcttttggatgaacaaaggaagtaaactaatcctttataaatgaaaacccagaatagttggtatgtcagctagtcattcctgtcatattcccagtag

SEQ ID NO: 2695 - DNA, 200 bp, synthetic construct
  misc_feature 1..200: note = Poly A sequence
  source 1..200: mol_type = other DNA
taactaactggtagaccagagtattacatcatcttattttggttttataccaataaaacatagcgtggaactcattcaggtaatgttttgcatttcattgcttttggatgaacaaaggaagtaaactaatcctttataaatgaaaacccagaatagttggtatgtcagctagtcattcctgtcatattcccagtagaatg

SEQ ID NO: 2696 - DNA, 200 bp, synthetic construct
  misc_feature 1..200: note = Poly A sequence
  source 1..200: mol_type = other DNA
ataaacaactttgatgatgtaacttgaccttccagagttacagaaattttgtccctatttaatgaataaattgtatgtatttttctctatatgccatttttgtcttcagttttggagtctggctggaaattcagccaaagggtaaaagctcaacacaggatccaggcaattaattatgggatgatgaccaggaaggcggt

SEQ ID NO: 2697 - DNA, 200 bp, synthetic construct
  misc_feature 1..200: note = Poly A sequence
  source 1..200: mol_type = other DNA
ctacctactactggtggattcttttccttatagtgaatttaaaagtatcatcaagggtttaatattgggaaaatttctttttgccacattatctctgtttattcactttcaataaagttgatccatataaatattttaaagaggatgttagagaacatgttttccaagtgtgtttttaattggttctggttcaaggcaag

SEQ ID NO: 2698 - DNA, 200 bp, synthetic construct
  misc_feature 1..200: note = Poly A sequence
  source 1..200: mol_type = other DNA
caagatggcaaaccaagtatgctcagataagcttttttcataattcaggaataaagtagtccatagaaatgtttctgtttcatatcatttggggcgagtcaggcaaaagtatttgatttgactttatagttttccacagcacaatgagcaaaagacaaacctcgtgggaagatgacactggggcagcccttcctattatt

SEQ ID NO: 2699 - DNA, 200 bp, synthetic construct
  misc_feature 1..200: note = Poly A sequence
  source 1..200: mol_type = other DNA
gctcaaatctctgttactccattactgtgatttctggctgggtcaccagaaatatcgctgatgcagacacagattatgttcctgctgtatttcctgcttccctgttgaattggtgaataaaaccttgctctttacatacaatgcctggtcctctcctttcacccgtcttttaggggatgggaggaaaagggggctggagg

SEQ ID NO: 2700 - DNA, 200 bp, synthetic construct
  misc_feature 1..200: note = Poly A sequence
  source 1..200: mol_type = other DNA
caaagggcctgcccagacaagattttttaattgtttaaaaaccgaataaatgttttatttctagaaaactgtgccttagccagagctcctctaggtgatcaacccatgtctggagctagctcttcctccaggacacgagagctgggggcctgagtacgtagcgccaggcccggtgtggatgctggggagaatcatcagtg

SEQ ID NO: 2701 - DNA, 200 bp, synthetic construct
  misc_feature 1..200: note = Poly A sequence
  source 1..200: mol_type = other DNA
ctggagcctcggtggccatgcttcttgccccttgggcctccccccagcccctcctccccttcctgcacccgtacccccgtggtctttgaataaagtctgagtgggcggcagcctgtgtgtgcctgagttttttccctcagcaaacgtgccaggcatgggcgtggacagcagctgggacacacatggctagaacctctctg

SEQ ID NO: 2702 - DNA, 200 bp, synthetic construct
  misc_feature 1..200: note = Poly A sequence
  source 1..200: mol_type = other DNA
tgcccccgtgtcacccccgccatcactgctggacaggagccacccccttgggtaccagagggagctgtgcattgtgaataaagagtgagcttggttctggactctgtgtgcctggtccctcagcaaggctggcctgatgcagctctgcccagctgggggctccagggcaggaaggtggagcacgttcctgctctagccct

SEQ ID NO: 2703 - DNA, 200 bp, synthetic construct
  misc_feature 1..200: note = Poly A sequence
  source 1..200: mol_type = other DNA
cactggcctggggacagctgctgctctgatgacctcttcagccaggagctgtatcgagggggaggcgcctggtccagccctggacagattgatttccagctgaataaattggcctagataccctcttacttcctcctactgaggagagggccacccctccctcacacgcacctctcctcgccagctgcctgctcgctgct

SEQ ID NO: 2704 - DNA, 200 bp, synthetic construct
  misc_feature 1..200: note = Poly A sequence
  source 1..200: mol_type = other DNA
attctccacagtggcttccgactcaggctccaatggaccaaataaaagcgttttgttttgtaatcacgcctcctcctcctgctgttgccccgcgcagggccctgtggaagggcggggaggttgcaggtctgaggggtaggccctgcccaggcatcccgggcaggcggacgggtgggggcccctggagatggccgtggtgg

SEQ ID NO: 2705 - DNA, 200 bp, synthetic construct
  misc_feature 1..200: note = Poly A sequence
  source 1..200: mol_type = other DNA
gccggaccttgtggacgacagccccacccagtctgtgctctcagccgctggccgaagggcccagcctgctcagaataaagcatgtcctgctgccggcttgctggtgtctgccccacctcctcctaggagcaccttgtgaggttgggtgggagtcggggtctcctgtggggtcaagggcttgggacgtcctgatccttgct

SEQ ID NO: 2706 - DNA, 200 bp, synthetic construct
  misc_feature 1..200: note = Poly A sequence
  source 1..200: mol_type = other DNA
taaacttcactgtgtgttttctatctcggatcccagtctctgaagacaacttgctttgattcaacctagaatgtgttgtttgtctttatgtgggctggaaacgccacccctcctttcattcctgggtcactgttctgaggtctcaggcgtgtgcatatggcctctggaaggtccactctgggctgctgtggcctgggagc

SEQ ID NO: 2707 - DNA, 200 bp, synthetic construct
  misc_feature 1..200: note = Poly A sequence
  source 1..200: mol_type = other DNA
cggggcatctgctgggcttgcccgggcggccgcgtgcagaaccccgcctggtcttgtgcccgagtcgggcggaggctggaacttgagtcctcaataaaggaagtagagccgctgtcggcactgcgtgtcaccccatagcgcggcgggctcgccgtaggcccgcggggcagctggcgggcgggggctttcggcggggttgt

SEQ ID NO: 2708 - DNA, 200 bp, synthetic construct
  misc_feature 1..200: note = Poly A sequence
  source 1..200: mol_type = other DNA
gcggcaccctggggatgctcagcaccttgattgacacccgctcgcctggccagagcgggctgcgtgcacatgctgggcagagaggaatatttaagaaataaagcttggacccagatttttccacaaacctcgaggttggagggtggaggcgctgtccccagggatgtggtaaccatatcagcgaactccactgggcactg

SEQ ID NO: 2709 - DNA, 200 bp, synthetic construct
  misc_feature 1..200: note = Poly A sequence
  source 1..200: mol_type = other DNA
taaataaaagcagacccccggcctgcctgcctctgtgcctgcggccctcacaactgtcaccggtgcatccctgctgccctctccaggcatttgcctgctctctttcatcttttctttttcaaaggaaggaggccgggcgtgggtggctcacgcctgtaatcccagcactttgggaggctgaggtgggtggatcacctgag

SEQ ID NO: 2710 - DNA, 200 bp, synthetic construct
  misc_feature 1..200: note = Poly A sequence
  source 1..200: mol_type = other DNA
gggtggtcagccagagctcatgggacagctagccaggcatggttggataggggcagggcactcattaaagtgcatcacagccagagcctgttgtgtctcagttgggtggtccccaggacactgcctgtggggacctgccctgcccctcttaggtttggagcagaagtggaggtgcccacagcaggtacccactggccccc

SEQ ID NO: 2711 - DNA, 200 bp, synthetic construct
  misc_feature 1..200: note = Poly A sequence
  source 1..200: mol_type = other DNA
agcgtcccccgcccgcccgtggcgcctccgcgcctgacccaggaggagtggccgcgcgcttccaggagccgctcatagaccccgcctgccgtccggtcaataaaatccgcctgactcctgcgcccccgcatgcgaccccttcgtctgcttgtgtactttgccgtctagctcagggcgcagacaggcgcgcccacgccctg

SEQ ID NO: 2712 - DNA, 200 bp, synthetic construct
  misc_feature 1..200: note = Poly A sequence
  source 1..200: mol_type = other DNA
tggccgcatggctctggccgaggtgccgctgtggccaccgtctgtgaagtggctttacgcttcaggaagccacgcctgttgaataaagctttggtgtgtttgcagatgggatctggctgatgtctgtccctgagggggcagagagcctgggaatcgcatacaaggatgtgttcgtacacacccgtgctcgcgtgtctgga

SEQ ID NO: 2713 - DNA, 200 bp, synthetic construct
  misc_feature 1..200: note = Poly A sequence
  source 1..200: mol_type = other DNA
gccggggccctccctcctgcactggccttggacggtattgcctgtcagtgaaataaataaagtcctgaccccagtgcacagacatagaggcacagattgcagtcagacagctcttttattgactttgtctgcttggtgcgggggttgggggggtgtcgaggctctagaagcggccatgcccacagaagtggtacacagaa

SEQ ID NO: 2714 - DNA, 200 bp, synthetic construct
  misc_feature 1..200: note = Poly A sequence
  source 1..200: mol_type = other DNA
gcccccgacctggcccagcctggcccgtccccaatccagtgggctggccaggccacctgcaccagggaggacagctgctggcagggactaataaacccttccacctggccatggtggtggtgttctctatggaccgaggccctgaaacgcgggcagggaggggcagagaacacactagcttgggggtgggcaccagcctc

SEQ ID NO: 2715 - DNA, 200 bp, synthetic construct
  misc_feature 1..200: note = Poly A sequence
  source 1..200: mol_type = other DNA
agattgagtgtctttaatctgcagaataaaaaaaaagaaattgaaaaccagttacccaaattaataggtggggcttaagcatctgctcggctaagtggcttcaaagagtgtaattggagttaagcaaaggcattcattgttaaccttgtaagtacacgtttgggggacgattttgtttacagatgcttgtaatcgaagat

SEQ ID NO: 2716 - DNA, 200 bp, synthetic construct
  misc_feature 1..200: note = Poly A sequence
  source 1..200: mol_type = other DNA
tcacggagggaagtggctgcccccttaacacacctttaataaacagtctacagacccagttcctgcatttctcatttttatttgacagaaaaagttgctcttgctgtacagattttaaaaaaccaaaatgcctttaagaaacatgaaaagttggggggaggggttcacaacctcatgggggacagtagggaccaactaat

SEQ ID NO: 2717 - DNA, 200 bp, synthetic construct
  misc_feature 1..200: note = Poly A sequence
  source 1..200: mol_type = other DNA
cctacctgagcccatgcagcctggggccactgccaagtcaggccctggttctcttctgtcttgtttggtaataaacacattccagttgatgccttgcagggcattcttcaaaagcagtggcttcatggacagctcattctctcttgtgcagacagcctgtctgtgcccctggctcacacccacatctgttctgcaccata

SEQ ID NO: 2718 - DNA, 200 bp, synthetic construct
  misc_feature 1..200: note = Poly A sequence
  source 1..200: mol_type = other DNA
gtggggtatggggccatccgagctgaggccatctgggtggtggtggctgatggtactggagtaactgagtcgggacgctgaatctgaatccaccaataaataaaggttctgcagaatcagtgcatccaggattggtccttggatctggggtacaaccaaagccttccctgctccttggagtcaaagtccccagtgctgca

SEQ ID NO: 2719 - DNA, 200 bp, synthetic construct
  misc_feature 1..200: note = Poly A sequence
  source 1..200: mol_type = other DNA
ctctgacgacacccccagccagctcagggttttagagtgtttttcattttctttttttttttttttttacaataaagtttcaggcttttttaccatgctctttctttctatgaatgggggccaaatcggtggagtgatttatatattactctgtccgatcttgatacataaatacccagccccatccctgccctagaaaa

SEQ ID NO: 2720 - DNA, 200 bp, synthetic construct
  misc_feature 1..200: note = Poly A sequence
  source 1..200: mol_type = other DNA
cagcccctccccacaccagttgaactgcaggaagagaggacccatcctgccacaggacccagaaaaaaagcccaacacacactcgggttaagaaatacctttaaatttaggtaaataaagctcaaggaggtggggctgtcatctgtggtgtcagtccttctggccccctggctgtcagtgtcgctccagggccttgacaa

SEQ ID NO: 2721 - DNA, 200 bp, synthetic construct
  misc_feature 1..200: note = Poly A sequence
  source 1..200: mol_type = other DNA
ctgctcggctccccccgcccaccccgccgcctctaatttatagcttggtaataaatttcttttctgcatttctcgtttgcatgtgtccagattccagaaggcaggttgctcctcctgccggttgcagggctgtgggtgctggagatggggaggcagcagcctttaacagcccagaagggccgggctgggtaaggttggcg

SEQ ID NO: 2722 - DNA, 200 bp, synthetic construct
  misc_feature 1..200: note = Poly A sequence
  source 1..200: mol_type = other DNA
cctgcccgcctcgcggccccttgtggggatcgggggcaccagaggggcagaggcaccaacatctgaataaagccattgttctcccagatggcttccaggagaagaggactctgcttccaggacttgggttggggtggtagttgtgtaccaacacaacagtaagtggttggggagggtccggggctgtaccaacacagcag

SEQ ID NO: 2723 - DNA, 200 bp, synthetic construct
  misc_feature 1..200: note = Poly A sequence
  source 1..200: mol_type = other DNA
ccaccggcggatcccggggctgctgggcttcctgagtccccagcggctctcaacacacacctatgtaccagagcatctattaaatgtgagccttgctttttatgaaaagctgtgctttgaaaacaaaaggcattttgtaaatgacttctttgagctatccacaaataaaaaggctgggtgtcactctgttacccaggctg

SEQ ID NO: 2724 - DNA, 200 bp, synthetic construct
  misc_feature 1..200: note = Poly A sequence
  source 1..200: mol_type = other DNA
ctttttaaatgatatgaagaaatcagaggtgaaaattgtacattgggaatatatttatgcaaattttattgaaatttattgtaaataaagattttctcagtggtctagaaaatcagcttgaatgtcattcagcatttattgaagaaggatgacatcccttccacttattgcacaaacttggtagctttgagtcaaataca

SEQ ID NO: 2725 - DNA, 200 bp, synthetic construct
  misc_feature 1..200: note = Poly A sequence
  source 1..200: mol_type = other DNA
tgtagaaagacatttacatataagtctgtttaatttcaaaggagtttgtgaaaaaaaatccatggtgaaaatgaaacaatgacatggttaatctggaacttacgttcttataccaataaaaggtacctcaatacatgttctttcaatttctgttttgtttttttttttttaatttaatgtattaaagcattttgcagtgg

SEQ ID NO: 2726 - DNA, 200 bp, synthetic construct
  misc_feature 1..200: note = Poly A sequence
  source 1..200: mol_type = other DNA
ggatgtaatacatatatttacaaataaaatgcctcatggactctggtgcttccacttggtcgttttgagcctttacagcagtgtagccacagcttctgcggcagcatgcagttgcttcgtttatcggtgaatgcgattccctgaagtgactaatacagccaagggaaaaagttcttatgaaaccagtatgcctaagaaac

SEQ ID NO: 2727 - DNA, 200 bp, synthetic construct
  misc_feature 1..200: note = Poly A sequence
  source 1..200: mol_type = other DNA
gtgtgtccagttttgcctgtctataaaagatgatagtaatttaccaagtgacatttgcagagaaacaggtgtacagttatcgttgtacttttgtacaatgtgaattttgttaataaattataaggtttgtttttttttttttaaactctgcagtgttgatttttctctgggttgttttttctgccatgagtccaacaggt

SEQ ID NO: 2728 - DNA, 200 bp, synthetic construct
  misc_feature 1..200: note = Poly A sequence
  source 1..200: mol_type = other DNA
ggtacattataaaacacacattaatgcatttaataaatatatattatctatcaaaagtgagccttagctcttcatcagttaataaaaagcacctgctgagaactcctgtaagctggtatcatcattgcatcattggattataaaagccacaatgctccctttcaacttggggtttggcctgaggcgttcaactcagcctt

SEQ ID NO: 2729 - DNA, 200 bp, synthetic construct
  misc_feature 1..200: note = Poly A sequence
  source 1..200: mol_type = other DNA
gccgcctggcagactcgccatcccccaacgacacagggcaggacagcagaggacgtgctgggattaaacacattccccctctactcgactcctgggttttacttctccagaccctctcccctctccaaacagggcaagttgaggagctggagcggggaggtggccgtatttggccccagtgggcgatcactctttcagct

SEQ ID NO: 2730 - DNA, 200 bp, synthetic construct
  misc_feature 1..200: note = Poly A sequence
  source 1..200: mol_type = other DNA
gaggggttcctggagtcactgcagagggagtgtgcgaatcaagcctgaccaagaggctccagaataaagtatgatttgtgttcaatgcagagtctctattccaagccaagagaaaccctgagctgaaagagtgatcgcccactggggccaaatacggccacctccccgctccagctcctcaacttgccctgtttggagag

SEQ ID NO: 2731 - DNA, 200 bp, synthetic construct
  misc_feature 1..200: note = Poly A sequence
  source 1..200: mol_type = other DNA
tgtgaatcaacttcttgggccttggctctgagttggaaaaggttttagaaaaagtgaagagctggaatgtgggggaaaataaaaagcttttttgcccagtggcgtgtatggtgtttattgggggttggattgaggtggggattttagggtaggcaggcttagaagttttgggggactctttcctgttgactctctagttt

SEQ ID NO: 2732 - DNA, 200 bp, synthetic construct
  misc_feature 1..200: note = Poly A sequence
  source 1..200: mol_type = other DNA
ccgcctcctcggggctccaggctggcttgcccgcgctctttcttccctcgtgacagtggtgtgtggtgtcgtctgtgaatgctaagtccatcaccctttccggcacactgccaaataaacagctatttaagggggagtcggccgtccgtgtcttgtggtgtctaatgcaggggagggcctggggaggtagcagagcccag

SEQ ID NO: 2733 - DNA, 200 bp, synthetic construct
  misc_feature 1..200: note = Poly A sequence
  source 1..200: mol_type = other DNA
gtccagaagcctcgaggtctcctgtttctcttcctgaaaaataaatatttgcctttcgatcacatcgttgtgctgagggtgaggagtagaggggtgggtcctgaagatatgaagatggcagcttaggagggaacaggccagccctgaggctggagcctggggccctcaggagcctgacccactggttccactgcattcct

SEQ ID NO: 2734 - DNA, 200 bp, synthetic construct
  misc_feature 1..200: note = Poly A sequence
  source 1..200: mol_type = other DNA
gcctgctgggggcccagtttggtgggcccttctttcctggactttgtggaggaggcaccaagtgtctcaggcagcgaggaaattggaggccatttttcagtcaatttccctttcccaataaaagcctttagttgtgtactggggccttggctgtgctgatggccagaagccaggggccttctccacagtccctttggact

SEQ ID NO: 2735 - DNA, 200 bp, synthetic construct
  misc_feature 1..200: note = Poly A sequence
  source 1..200: mol_type = other DNA
ggcacccgcgggcctccgctgcccgacgcttctgttcggcccgacctccaccccggctcccaataaaatttaactgatctttgtttcttatgggcggcgccttcagagtgtctgcgcgagggcctcaggtgggagcgccccacaaatgaatggatgcggcctggaggcctgcgggggtcggccccacaatctacgcccgc

SEQ ID NO: 2736 - DNA, 200 bp, synthetic construct
  misc_feature 1..200: note = Poly A sequence
  source 1..200: mol_type = other DNA
cagcctggcccctgctgtcggacctgagcctcctggctcccagcctgtaaatatgtatagacctgttttgtcatttttttaataaagtcagttctggtggccctggactttggaggggaaggggaggccaagagcggatgttcttcatttcacttcacacatgcacggcaagttgtgctcaaacattttaatcatttctg

SEQ ID NO: 2737 - DNA, 200 bp, synthetic construct
  misc_feature 1..200: note = Poly A sequence
  source 1..200: mol_type = other DNA
tcagggacccagcccctcctctctgagaaactctgaccttcatgtccttaggctgtgctcctgccactctaccctgacacctcaataaagaccagtgctggttttgttggacttcctggcttctctttcatggtctgtcctgacatgtggaggcactcggtccctttccttccgccctccttcttagatatgctcttgga

SEQ ID NO: 2738 - DNA, 200 bp, synthetic construct
  misc_feature 1..200: note = Poly A sequence
  source 1..200: mol_type = other DNA
aaggcacccctccgtgtggagcacgtggagatagtgccaggtggctcagtgccacctatgcctgtggtgaagtgtggctggtgtccccttcccctgctgaccttggaggaatgacaataaatcccatgaacagcatgagccaaggactggtctcttcttaaaggggggaaggatgtggagcagtgggggagcctattcca

SEQ ID NO: 2739 - DNA, 200 bp, synthetic construct
  misc_feature 1..200: note = Poly A sequence
  source 1..200: mol_type = other DNA
ctggggtttctggttttgtttctgttgtgttttgttttggtttctgtattatgtatttttgtcaacgccaataaatttctttgatttgtatttcttttcaacattcttttattttctttttttttttctttgaaattttgtttacatttttatttgtgtaatgggaaataccgtcactagctcttgggccagggaatgag

SEQ ID NO: 2740 - DNA, 200 bp, synthetic construct
  misc_feature 1..200: note = Poly A sequence
  source 1..200: mol_type = other DNA
tttctccgtccctacacagggagctcctccccaagggtagatcggaccgttcatgctgcctataggcattatgtccctcaaaaaaaaactcctttgcctgcatcctgtgtacaacatgacatttttaaccaatccaatctaaaaatgtgccagaatccacctgtggcccgaatcgtgtttggttcctctttctactccac

SEQ ID NO: 2741 - DNA, 200 bp, synthetic construct
  misc_feature 1..200: note = Poly A sequence
  source 1..200: mol_type = other DNA
tccaggcctggtgtcacatgacaccagcatgcattgcaggattattagtgtattttgagtctgtaaaaataataaatatgtttgaagtagtttcccattgtgtagttagtttccttatcaatcatgataggtatccaggaccccagagggagtcaggttaagttatggcagccaggagtcctgtgttctggcgctgccac

SEQ ID NO: 2742 - DNA, 200 bp, synthetic construct
  misc_feature 1..200: note = Poly A sequence
  source 1..200: mol_type = other DNA
ctctggaaaggaggctgactcccaggctgccggacggtgccacctcaggtcccctggccagacagaggacttatggtggcaccagccatctccccaggagttcagcctaactagaaataaacctaatgctcccttagagtcacacgcaattgtctctgtctgtgtgtgttgcacagcctgggagagggtcagggccacag

SEQ ID NO: 2743 - DNA, 200 bp, synthetic construct
  misc_feature 1..200: note = Poly A sequence
  source 1..200: mol_type = other DNA
agtaagcaagcaccttaagtagtgtgttaatgattgaaactgtaattgccttcgggttgtgctttagtctgtaaaattctaaaggagagctgctaaattgttttcttaataaacatttttctcatttgtaataatgtagtcttgttctttgtggggaggggaaaggagtcagtcattttcctagaaaatgaatcctatcc

SEQ ID NO: 2744 - DNA, 200 bp, synthetic construct
  misc_feature 1..200: note = Poly A sequence
  source 1..200: mol_type = other DNA
cccctcagcctgcatactggtatcctggtcccagctcctgccagggctgttaccgttgttttcttgaatcactcacaatgagaaactaacattttgctttttgtaataaagttaatttatattcagttcccagcatgccttggtgtctttcatcttggtggagtcatttggagtttgagggggggatggtggtagtaagt

SEQ ID NO: 2745 - DNA, 200 bp, synthetic construct
  misc_feature 1..200: note = Poly A sequence
  source 1..200: mol_type = other DNA
gcctggcctttgacccctcagcctgcatactggtatcctggtcccagctcctgccagggctgttaccgttgttttcttgaatcactcacaatgagaaactaacattttgctttttgtaataaagttaatttatattcagttcccagcatgccttggtgtctttcatcttggtggagtcatttggagtttgagggggggat

SEQ ID NO: 2746 - DNA, 200 bp, synthetic construct
  misc_feature 1..200: note = Poly A sequence
  source 1..200: mol_type = other DNA
acctgggatgctgctggagctgaatcggatgccaccaaggctcggtccagcccagtaccgctggaagtgaataaactccggagggtcggacgggacctgggctctctccacgattctggctgtttgcccaggaacttagggtgggtacctctgagtcccagggacctgggcaggcccaagcccaccacgagcatcatcca

SEQ ID NO: 2747 - DNA, 200 bp, synthetic construct
  misc_feature 1..200: note = Poly A sequence
  source 1..200: mol_type = other DNA
accacggctgccggacgcctgagtctgtgtgtgttggggaaggtgggatggaataaaagtgcccacgagggttgagggaattcttgcagagtgacacgcttaaagtatcctggctcccgtcctggtacacgggctgcgccccgcctatgcaggcatctgccctctgtgcagactgcgttcccgaggccgcgggctacgcc

SEQ ID NO: 2748 - DNA, 200 bp, synthetic construct
  misc_feature 1..200: note = Poly A sequence
  source 1..200: mol_type = other DNA
ctggccaacgtcagggtcggggctagggtaggggcaaggaaactcgaataaaggatgggaccaaccccaaggctgtggttatttcaaacgtggccgtcaaaggagggagggttcatggagggggtgggagtgtcaccaagccaagaaaccacacatactcttatcccagggcctgggctaccctatcataggaggcacat

SEQ ID NO: 2749 - DNA, 200 bp, synthetic construct
  misc_feature 1..200: note = Poly A sequence
  source 1..200: mol_type = other DNA
gacgtcacgcaggacagataccgctccacactctgcttcctttgagttttttaataaaataatctcatgcggcaggagaggagaggatcagggattggggccgccgcctctttggtctgtggctggggagggtgggctccgctcagggctggagggctctgtgggctgtgggggcagaggctcggttccaaggccagatc

SEQ ID NO: 2750 - DNA, 200 bp, synthetic construct
  misc_feature 1..200: note = Poly A sequence
  source 1..200: mol_type = other DNA
tggatgcacagccagggtctgagccaactccgatgtgagtcgtcacgcaggacagataccgctccacactctgcttcctttgagttttttaataaaataatctcatgcggcaggagaggagaggatcagggattggggccgccgcctctttggtctgtggctggggagggtgggctccgctcagggctggagggctctgt

SEQ ID NO: 2751 - DNA, 200 bp, synthetic construct
  misc_feature 1..200: note = Poly A sequence
  source 1..200: mol_type = other DNA
cctctcctctcctgccgcatgagattattttattaaaaaactcaaaggaagcagagtgtggagcggtatctgtcctgcgtgacgactcacatcggagttggctcagaccctggctgtgcatccatcagaaagtgcaaggcccaggccatgagctggggaggaagcctggaaagaaaccaccgctgcaggtcaatggagcc

SEQ ID NO: 2752 - DNA, 200 bp, synthetic construct
  misc_feature 1..200: note = Poly A sequence
  source 1..200: mol_type = other DNA
agtcaggatgaagccccatgccactccacactgctgggacatggcagggacttcacagtgggggtttttagctggctcacagggctccctcagcctggggaacattaaaggttttctacaaatacagtcatggtccttgtgtgtcccagttccagcctcctccctggtctcaccagcttgccttctgctctggactaagg

SEQ ID NO: 2753 - DNA, 200 bp, synthetic construct
  misc_feature 1..200: note = Poly A sequence
  source 1..200: mol_type = other DNA
tggccaggcttcaacactttccctgtccccacctggggactcttgcccccacatatttctccaggtctcctccccacccccccagcatcaataaagtgtcataaacagaatattctgcattttggtgcatgtcctggggccagccaggcagggactgattcccccccacaactccccagcacagtctggagaatggcatg

SEQ ID NO: 2754 - DNA, 200 bp, synthetic construct
  misc_feature 1..200: note = Poly A sequence
  source 1..200: mol_type = other DNA
gctgaggcttagagcttggaacaagggggaataaacccagaaaatacagttaaacagatggctgtgtcattcttgagtggaatggggtgggcaggcagccagcagggctctgtagctaaggcgtccctgcaggggccattacctaccatagctctagtgtctggcctaagagatgcccttcacccataacctcaggcacc

SEQ ID NO: 2755 - DNA, 200 bp, synthetic construct
  misc_feature 1..200: note = Poly A sequence
  source 1..200: mol_type = other DNA
cccagacagtgaagccactaaccctggagctagtggaggaaactgtgcaggctatggaggtggagtaagctgaggcttagagcttggaacaagggggaataaacccagaaaatacagttaaacagatggctgtgtcattcttgagtggaatggggtgggcaggcagccagcagggctctgtagctaaggcgtccctgcag

SEQ ID NO: 2756 - DNA, 200 bp, synthetic construct
  misc_feature 1..200: note = Poly A sequence
  source 1..200: mol_type = other DNA
cacagtcggtccccgcagaggtcactgtggcaaagcctcacaaagccccctctcctagttcattcacaagcatatgctgagaataaacatgttacacatggagccaggtgcacatgtccttccttctccctagcgggattgggggcaggtgggctcttggtcagtgagggatcttgtggtctagccacagctgctcaagg

SEQ ID NO: 2757 - DNA, 200 bp, synthetic construct
  misc_feature 1..200: note = Poly A sequence
  source 1..200: mol_type = other DNA
tgacccagttagtcctgccagatgtcactgtagcaagccacagacaccccacaaagttcccctgttgtgcaggcacaaatatttcctgaaataaatgttttggacatagaaacagacctgagtttccttctctgcaatggggactggtggcatcgactcccagtgctggtggttggtgggggatccttcatttcagccac

SEQ ID NO: 2758 - DNA, 200 bp, synthetic construct
  misc_feature 1..200: note = Poly A sequence
  source 1..200: mol_type = other DNA
acagggcactgtctgtgtccttccttgaactgtctaccctgttgcttttcacaaatcatggtaataaaacaagttattcttgaggactagtcattataaatgttttcttccaaaataatggacagtcatttcccttcattgaatgaaaatgaatggaaattccaaatgaggtatttgtattggggataatgtgctcagta

SEQ ID NO: 2759 - DNA, 200 bp, synthetic construct
  misc_feature 1..200: note = Poly A sequence
  source 1..200: mol_type = other DNA
cctttctgcacactccagacaaacttcccagacaagctcctttgtgcctctacgtggagagggtgtggaaagttatcacattaaaagatggaggatttgctctgttttttttctttctgtccatttgctgcgtgtacccactctagtaggcattggctaaatgttgtattttggcgattcatcaacctttgcagaatatg

SEQ ID NO: 2760 - DNA, 200 bp, synthetic construct
  misc_feature 1..200: note = Poly A sequence
  source 1..200: mol_type = other DNA
gcccgcagctcctgccacccctgccttaagatttcccattaaatgcatctgtttagaagccctgactgcactgcctgtgtctgtgtggcccaggggaggtgggcttgaagttgtccttgtcacccacaaaggggcagcactaccgttccctttccaggctgcagttaatgttggcaacccagccttctcaggaagctgag

SEQ ID NO: 2761 - DNA, 200 bp, synthetic construct
  misc_feature 1..200: note = Poly A sequence
  source 1..200: mol_type = other DNA
ctcccccgcgctcgcgacgaggaggatcccgagccgccggtggctgcccctgacgccctctaggccagcaggacccgcccgttcccgaccttccctcgagtcccgccaagaaataaaggcgatgatttccgaccatgctcgcgttctccgcggagtctgtgctacaccgtggagcggggcggggcgtgctgggatctcga

SEQ ID NO: 2762 - DNA, 200 bp, synthetic construct
  misc_feature 1..200: note = Poly A sequence
  source 1..200: mol_type = other DNA
ccagcaggacccgcccgttcccgaccttccctcgagtcccgccaagaaataaaggcgatgatttccgaccatgctcgcgttctccgcggagtctgtgctacaccgtggagcggggcggggcgtgctgggatctcgaggcggggcctctgccggacccctcccaccagtcgagccccgggcgccgtacagaggctgggtaa

SEQ ID NO: 2763 - DNA, 200 bp, synthetic construct
  misc_feature 1..200: note = Poly A sequence
  source 1..200: mol_type = other DNA
caatggaagccctcaaagaagtcggaatgtcatagtcttgaaatgaaagggaaactgggaaactgggtttctcattaaagttgtttcccactctgtattctctgtgaaattcattgattgaatagtactttgtagtgagaaggctggagaatagcaacagcctcatggagaatgttaattgagttcctactatgcaccag

SEQ ID NO: 2764 - DNA, 200 bp, synthetic construct
  misc_feature 1..200: note = Poly A sequence
  source 1..200: mol_type = other DNA
agatgctggcctgcgcctgcacctgcgcctggctctgtcaccgccatgcaactccatgcctatttactggaaacctgttatgccaaacagttgtaccactgctaataaatgaccagtttacctgaaaccctttgtgatcagttctttaatgatacctaaatgaaagctaattaaaacaataggtttctcccaagggtctg

SEQ ID NO: 2765 - DNA, 200 bp, synthetic construct
  misc_feature 1..200: note = Poly A sequence
  source 1..200: mol_type = other DNA
cctcgccccggacctgccctcccgccaggtgcacccacctgcaataaatgcagcgaagccgggagcgcgtgagcctctgcctggggccggtgggcggggctggggtagcgatggttcccgaggcctgggcaggcaccccgtttcctgccagccgggccgcattccagtttcattaacatcagcatcgccttccttctcag

SEQ ID NO: 2766 - DNA, 200 bp, synthetic construct
  misc_feature 1..200: note = Poly A sequence
  source 1..200: mol_type = other DNA
ttattgctgtcttttttttaaaaaaaaaagtttaaataaaatgtctcagagcatctctagcagcctcgactggcttttgtgctccacggtgtggaatcgccagctgctgtctgtgttggaggtcggctgtgtcctccccaggcagctcacgctgggggtacagcctgggcctgagcctcactcagccacggagggtccca

SEQ ID NO: 2767 - DNA, 200 bp, synthetic construct
  misc_feature 1..200: note = Poly A sequence
  source 1..200: mol_type = other DNA
caagcacctttgcatggcactcgctactccctgcgataggcgactcgggaacagccgcctcaccctgtgagaagccgaggccccttctccagtgctctcggggaggttgcaccaggcccaccccaccctgtgagaaactgcagcccccttctccagtgctttcggggagggtgcaccaggcccgccccaccttgtgagaa

SEQ ID NO: 2768 - DNA, 200 bp, synthetic construct
  misc_feature 1..200: note = Poly A sequence
  source 1..200: mol_type = other DNA
cggaagacatgatgcagagcaagcctctgtgattcctgcccagcacctgtgaggcctgacgtgtcagttcccaataaatgctcttctgatttgtttcccgtacaggcaaggaggcttgggtagtgcagatttgtgtatttcaatctttgaaagctctgatgtaatttagaaatgaaatccaatcatgagtccaggtagag

SEQ ID NO: 2769 - DNA, 200 bp, synthetic construct
  misc_feature 1..200: note = Poly A sequence
  source 1..200: mol_type = other DNA
gcaatggcagcagataaaagtgacgagtggtttgccaaacacaataaacccaaagcttcaggttaacggaagacatgatgcagagcaagcctctgtgattcctgcccagcacctgtgaggcctgacgtgtcagttcccaataaatgctcttctgatttgtttcccgtacaggcaaggaggcttgggtagtgcagatttgt

SEQ ID NO: 2770 - DNA, 200 bp, synthetic construct
  misc_feature 1..200: note = Poly A sequence
  source 1..200: mol_type = other DNA
aatataataataaattttgtataaataggagttcaggggctggtttgttttttttttcccccccaaactcaaattctggatttaggtctaacaggaggctggactggagcggttcacagcaagatgctgggctcggctgtgaaggggggagtatgaggcccccttcctattcagggctttggggtagatagcccctggac

SEQ ID NO: 2771 - DNA, 200 bp, synthetic construct
  misc_feature 1..200: note = Poly A sequence
  source 1..200: mol_type = other DNA
atcccagtttaatattccaataccctagaagaaaacccgagggacagcagattccacaggacacgaaggctgcccctgtaaggtttcaatgcatacaataaaagagctttatccctaacttctgttacttcgttcctcctcctattttgagctatgcgaaatatcatatgaagagaaacagctcttgaggaatttggtgg

SEQ ID NO: 2772 - DNA, 200 bp, synthetic construct
  misc_feature 1..200: note = Poly A sequence
  source 1..200: mol_type = other DNA
aggagcagtttggcttccggaaggaagaggaggcaacactcggacctggttcttgtacaacaagaaaacatcgctggggccccgctgaggctggagtgggggtggaggctggtctttggaggatgccacccccaccccatcctcttgtcaggccctcggggtaccccagagcttggtgggtgagtattccacctgcttac

SEQ ID NO: 2773 - DNA, 200 bp, synthetic construct
  misc_feature 1..200: note = Poly A sequence
  source 1..200: mol_type = other DNA
ccatcttctgcaccccactctttgtttccaataaagttatgtccttagatagcgactgctgcttctgccttttgccacacctgggtccccagccagaagctcaagtgtctgctgggcttttcagggtgtccatagtattccccagatgtctccatagctgtcctctttttgacgatccagagaggaacaactgacattgg

SEQ ID NO: 2774 - DNA, 200 bp, synthetic construct
  misc_feature 1..200: note = Poly A sequence
  source 1..200: mol_type = other DNA
tgctgataccctagtagtccccagctcccaaacactgaaaggaaaacgtgaaaacactcaaggcctagggggaggacaggttggtaaaacatgaaaaggtaaataaaattacttgtttgaaaccactgagtcatggatcttttgattacacgctcataattgggccattaaactgggaacgaagagaaagatttttttgt

SEQ ID NO: 2775 - DNA, 200 bp, synthetic construct
  misc_feature 1..200: note = Poly A sequence
  source 1..200: mol_type = other DNA
acggcgccgccgccgccgctctctcccgggccaggaggctagtcccacctcttgctattaaagcttctctgagttgactttggtctcgcctgtttatttcatttatttatttattaatttatttatttgagtcggagtatcgctctgtcccccaggctggagtgcagtggctcactcggctcactgcaagctctgcctcc

SEQ ID NO: 2776 - DNA, 200 bp, synthetic construct
  misc_feature 1..200: note = Poly A sequence
  source 1..200: mol_type = other DNA
tcctgggattctagtatgcaataagagatgccctgtactgatgcaaaatttaataaagtttgtcacagagaatctttgtactttggggttcttttttttttgacttcaagtccgaatttgtctggcccattcctatttgtaaaaaccattgcactgaactcagagcaagttggagaggagatgaaaggagtttatgaatg

SEQ ID NO: 2777 - DNA, 200 bp, synthetic construct
  misc_feature 1..200: note = Poly A sequence
  source 1..200: mol_type = other DNA
gccacttctggcttcagcccccaccaggggaaggaaggagggcacattaactccctccaccagcctgctgacagacactaactttgtatccgttcaataagcatttcataaataaaggtgtagaaaaggttcatgcgtcttccttggaggaactaactgctcgttccagcctcccgttcctgcccacacggggcaccagt

SEQ ID NO: 2778 - DNA, 200 bp, synthetic construct
  misc_feature 1..200: note = Poly A sequence
  source 1..200: mol_type = other DNA
aagctggaggctccaggactccactggacagacccaggtcttccagacctgcttcctgaaataaacactggtgccaaccaagacagctgtgtgcttctttgtgggagctaggggatgctggtttctgggctgagctggggaaaacaggaggtggcgagatgggggcggggaggggaggcaaatagatatgtaacctgcta

SEQ ID NO: 2779 - DNA, 200 bp, synthetic construct
  misc_feature 1..200: note = Poly A sequence
  source 1..200: mol_type = other DNA
attttaggatggcaatcatgtcttgatgtcctgatttgttctagtatcaataaactgtatacttgctttgaattcatgttagcaataaatgatgttaaaaaaactggcatgtgtctaaacaatagagtgctattaaaatgcccatgaacctttagtttgcctgtaatacatggatatttttaagatataaagaagtcttc

SEQ ID NO: 2780 - DNA, 200 bp, synthetic construct
  misc_feature 1..200: note = Poly A sequence
  source 1..200: mol_type = other DNA
tgctgtctgctaatagtagggctagttccaattctcattaaaccacattgtaaacagtagttacagtagtacagagctctcatttcaggctggcggggcctctagccagcctgctgcaacctcttggctggcattccaagcctgctcagggggctgattttggggcgagtttcttctcttatgctggtgtggtgtttgcc

SEQ ID NO: 2781 - DNA, 200 bp, synthetic construct
  misc_feature 1..200: note = Poly A sequence
  source 1..200: mol_type = other DNA
ccatcagattatatcttcaacaccacaccccccaccccatcgtgggtgagggtatcccctgtgtgtcccaggccaataaaatctacctgccactgcccctggctgctgctgtttgtgttgcctcccacccaactgtctggaataggtcaaggttgcttggagggtggggggatggctggcaggtccacagcaagtcaaag

SEQ ID NO: 2782 - DNA, 200 bp, synthetic construct
  misc_feature 1..200: note = Poly A sequence
  source 1..200: mol_type = other DNA
tggaaaaaaataaaaaggagagaggaggtgatctgtggtggtgctggggtgccagggcccacacagcacctagaagctgtggctgtgaagagaatgctctccctagccacagggccctgagccctgaggaccctcattaaccttttgccccacaggcctgtccctgtcctcagcctttcctaggcccttctgggttccaa

SEQ ID NO: 2783 - DNA, 200 bp, synthetic construct
  misc_feature 1..200: note = Poly A sequence
  source 1..200: mol_type = other DNA
gacgctgttcctaccagtggaaagtgcctctgtgggcgagcgggacgtggggggccctgctcgcccctcgccagggggactgactgtgtgccctgggcctgaagccccccttctggaagacctccctgttggttcctcctctacgcccacccgcctgcccccgcacaagttgccccattccagcctcgctattctccaca

SEQ ID NO: 2784 - DNA, 200 bp, synthetic construct
  misc_feature 1..200: note = Poly A sequence
  source 1..200: mol_type = other DNA
aaaatatataaatgccacggtcctgctctggtcaataaaggatcctttgttgatacgtaagtggtggtcttccttaaggggcttcaaattagtggatatgcttagctcagaccttccagccagtctcttgagtctaaagggttcagctttccatccctggctcaggcactgccaacaccttgtcttcacccaaacaaatc

SEQ ID NO: 2785 - DNA, 200 bp, synthetic construct
  misc_feature 1..200: note = Poly A sequence
  source 1..200: mol_type = other DNA
cggaagggagtggagatggggctggttcctgctgcagtgaggggaacagatgggacaataaagactggagtctcagttgaataatacaaaactgtttaatactaccaaaaatataattgtatgttgtgcggctctccctggctatcatgggaggactgcaggctgcctctgaactgtagtccaacaggagaaagggttga

SEQ ID NO: 2786 - DNA, 200 bp, synthetic construct
  misc_feature 1..200: note = Poly A sequence
  source 1..200: mol_type = other DNA
tggcctttgggcacaaggtcagaggctggatgtggaccaggccctgaacagaagccatgagatctggactcacagctgcccccagagcccaggcaatggcactgacgcttcccattaaagctccacctaagaaccccctttgaaagttactgattattcatttattcaacaaatattcactgtgcactagcaatgtacca

SEQ ID NO: 2787 - DNA, 200 bp, synthetic construct
  misc_feature 1..200: note = Poly A sequence
  source 1..200: mol_type = other DNA
gctccacctaagaaccccctttgaaagttactgattattcatttattcaacaaatattcactgtgcactagcaatgtaccaggcactgtgccaagtattgagttgtcttaatgagcaaaaacactctggttcctaccctcttggtgcccacagtcccatagggaagcagacatccatcaaaggctaactaataagtggat

SEQ ID NO: 2788 - DNA, 200 bp, synthetic construct
  misc_feature 1..200: note = Poly A sequence
  source 1..200: mol_type = other DNA
ccacgatggcgcttacctttcagacttcattaaacttatgaccgaatgggcctgtgtctgtgtgtagctgggatgccggtgcaggatagcacaccccatccctagaggaaagggctcatctgaagtcgggagcaccctcaaccctcctctcccaaccaagatgtccaggggtgccaaaggttctctcaagttcaggggta

SEQ ID NO: 2789 - DNA, 200 bp, synthetic construct
  misc_feature 1..200: note = Poly A sequence
  source 1..200: mol_type = other DNA
gagcgcgcttcccgactctcctctccccattctgtgccctactattttcaacaaaacaaaacaaacaagcaaaaaacacaaaaacctcagagtccaaaacaccaaacaaacaaaaaaacaaaaaaccttcctttccctgggtctggctgtgaatgcgcgcggcaagttactggggcgctggcggcagggctggcgccgcg

SEQ ID NO: 2790 - DNA, 200 bp, synthetic construct
  misc_feature 1..200: note = Poly A sequence
  source 1..200: mol_type = other DNA
agtaatcttatatacaagctttgattaaaacttgaaacaaagagcctgtgttttgtgtgtggtgatttaggacactccctagttttcagtggatcagtctcttacctctgatttgttggtctaaaatttttctgaaatcaggactgatgagattttttttatagtgggcagcagcatttgaggatatatcagaagctgga

SEQ ID NO: 2791 - DNA, 200 bp, synthetic construct
  misc_feature 1..200: note = Poly A sequence
  source 1..200: mol_type = other DNA
gaagatgcaggaataaagtaatcttatatacaagctttgattaaaacttgaaacaaagagcctgtgttttgtgtgtggtgatttaggacactccctagttttcagtggatcagtctcttacctctgatttgttggtctaaaatttttctgaaatcaggactgatgagattttttttatagtgggcagcagcatttgagga

SEQ ID NO: 2792 - DNA, 200 bp, synthetic construct
  misc_feature 1..200: note = Poly A sequence
  source 1..200: mol_type = other DNA
aactggacaaagaccgcaaaaagatcctcgaacggaaagccaaatctcgccaagtaggaaaggaaaagggcaaatacaaggaagaaaccattgagaagatgcaggaataaagtaatcttatatacaagctttgattaaaacttgaaacaaagagcctgtgttttgtgtgtggtgatttaggacactccctagttttcagt

SEQ ID NO: 2793 - DNA, 200 bp, synthetic construct
  misc_feature 1..200: note = Poly A sequence
  source 1..200: mol_type = other DNA
tggcagtaaagagtccaccagcagtgacacctgccaatgacagatgcaagcccaacacccttttggtacgcaaaacctgctctcaataaattcccccaaagctctgacctcttgtgcattgcttcagtaaagacttaaagctccggccgggcgcggtggctcacgcctgtaatcccagcactttgggaggccacggcggg

SEQ ID NO: 2794 - DNA, 200 bp, synthetic construct
  misc_feature 1..200: note = Poly A sequence
  source 1..200: mol_type = other DNA
tcatgtcctgatgccatggaatgactgaagacaggcacaaaatgtgacatctttggtcatttccctctgtaattattgtgtattctaccctgttgcaaaggaaataaagcatagggtagtttgcaaacaatatccttagactggtcttgtcttttctctttcctgaagccatgtcaaagtttgaatagtcaccagagttg

SEQ ID NO: 2795 - DNA, 200 bp, synthetic construct
  misc_feature 1..200: note = Poly A sequence
  source 1..200: mol_type = other DNA
gccagcccttctggagcaggacagaagatatgcaaaatgtatattttcttgattcctgaccattgatacttaatgtccatgtgactctttttcacatgcaataaactttgctttgtttcaatctggggccgctttgctgtatttgttttcctcttccccatgcagaaatggttcctagtttgatggtttgtatgctcgga

SEQ ID NO: 2796 - DNA, 200 bp, synthetic construct
  misc_feature 1..200: note = Poly A sequence
  source 1..200: mol_type = other DNA
ctaatttattttaacttgatagaaaatgagctttgtgtttgtccctcctaaacaaaaaaataaaaatcctctgtctcattgtttagtattcagcttgcataacaaaatgtatttatagtttcagtgtgtgatggttgataaaatactcagaaatgttattttggatcatgtatccattgtaagttagaaacaaaccaggg

SEQ ID NO: 2797 - DNA, 200 bp, synthetic construct
  misc_feature 1..200: note = Poly A sequence
  source 1..200: mol_type = other DNA
ggaccccaccgggtgtggttttgatacccctaagttaaggctgagccagagcactgtctcagcatttgaaccgaatgctaatatagtcacttattaaaggattatgctgatggaaatgtaccaacctcctgtctcggaaagccttttgtttgcatccaaaccttaattttctattatttactaggcgtctgggttatggg

SEQ ID NO: 2798 - DNA, 200 bp, synthetic construct
  misc_feature 1..200: note = Poly A sequence
  source 1..200: mol_type = other DNA
gagtcagagcccacatggccgggccctctgtagctccctcctcccatctccttcccccagcccaataaaggtcccttagccccgagtttaaaattattgttctgactggggtagacacatccctgtctgggtaaaggagaggaagctggactgtcagaatgggttggtgagggggacagagaagggacagagaagggcct

SEQ ID NO: 2799 - DNA, 200 bp, synthetic construct
  misc_feature 1..200: note = Poly A sequence
  source 1..200: mol_type = other DNA
gaaactgaaagccagaatctgcttcacctctttttacctgcaatacccccttaccccaataccaagaccaactggcatagagccaactgagataaatgctatttaaataaagtgtatttaatgaatttctccaagcttacggaatcttactttttgggtgagagggggcggatgatgaagtcagggaagaagcagcttgg

SEQ ID NO: 2800 - DNA, 200 bp, synthetic construct
  misc_feature 1..200: note = Poly A sequence
  source 1..200: mol_type = other DNA
tgggcggccaaggggagaaaaggagccgcttctgcctcccttgccaaaactccgtttctaattaaattatttttagtagactctggagttgagcttgtgcatctgccgcacagagtctcccacccggaccctcgtcctaggccatggaggtggtgtttgaggcagcccgcccccgctggccaacctgtccctggacatgg

SEQ ID NO: 2801 - DNA, 200 bp, synthetic construct
  misc_feature 1..200: note = Poly A sequence
  source 1..200: mol_type = other DNA
atggacggaaccatgcacagcaggctgggaaatgtggtttggttcctgacctaggcttgggaagacaagccagcgaataaaggatggttgaacgtgaatatggctctcagctctcagtgtgtctgcaggtgccatgtcagagccagagcacctccgttttccctcacctcacctgtccgcttgggctgggtttccagtgg

SEQ ID NO: 2802 - DNA, 200 bp, synthetic construct
  misc_feature 1..200: note = Poly A sequence
  source 1..200: mol_type = other DNA
tgattgaattcaaaatcaacccttctagaagatgaaatttagtacactttacatctgactactattgtgtagcctgagccattctgaatttctacacaataaatgcagtttatgtcttttgggtcttaatagtctcaaaaatatttcatcaaggtataaagaacacaataaatacttttacagtaaaggaataatattta

SEQ ID NO: 2803 - DNA, 200 bp, synthetic construct
  misc_feature 1..200: note = Poly A sequence
  source 1..200: mol_type = other DNA
gagaaggacaaaatcaccaccaggacactgaaggcccgaatggactaaccctgttcccagagcccacttttttttctttttttgaaataaaatagcctgtctttcactcctgcttttgtctttgatgctttcctgcagatctctgccctagctgggcagctacagccagccactcaagtgtgtgtggcctggccctcggc

SEQ ID NO: 2804 - DNA, 200 bp, synthetic construct
  misc_feature 1..200: note = Poly A sequence
  source 1..200: mol_type = other DNA
cctgttcccagagcccacttttttttctttttttgaaataaaatagcctgtctttcactcctgcttttgtctttgatgctttcctgcagatctctgccctagctgggcagctacagccagccactcaagtgtgtgtggcctggccctcggcttgctttctggctcgtgctctactccatcagtgcgtgccagtggggaca

SEQ ID NO: 2805 - DNA, 200 bp, synthetic construct
  misc_feature 1..200: note = Poly A sequence
  source 1..200: mol_type = other DNA
cagcatcttttcccttcatagccatcgacctgaatttctaagacaaatgtttagatgaactcttagtgttattttacgttaaaaaaattaatttgtgtctccacgtgtgctgtttcttccctgagattagaggatggagccagttctaccctcagcttctcttccctctggagagaaggtgagaggagaaagggcttctc

SEQ ID NO: 2806 - DNA, 200 bp, synthetic construct
  misc_feature 1..200: note = Poly A sequence
  source 1..200: mol_type = other DNA
ggctgtacctggtgccctgtggcccccacccacctggattccctgttctttgaagtggcacctaataaagaaataataccctgccgctgcggtcagtgctgtgtgtggctctcctgggaagcagcaagggcccagagatctgagtgtccgggtaggggagtcattcaccctaggctttttttccagaagcttccttgagg

SEQ ID NO: 2807 - DNA, 200 bp, synthetic construct
  misc_feature 1..200: note = Poly A sequence
  source 1..200: mol_type = other DNA
ggcagcaggctctggggcttctgctgtcctttggagggtgtcttctgggtagagggatgggaaggaagggacccttacccccggctcttctcctgacctgccaataaaaatttatggtccaagggaggaaggacgtttggtttattatttcagcccatggagagaataggtcgttcggtttgttatttgagcccatggag

SEQ ID NO: 2808 - DNA, 200 bp, synthetic construct
  misc_feature 1..200: note = Poly A sequence
  source 1..200: mol_type = other DNA
aatcctagaaccaagcttcagagcctagccacctcccaccccactccagccctgtcccctgaaaaactgatcaaaaataaactagtttccagtggatcaatggactgtgtcagtgttgtagggcagaggagggggactcatctgggggtgaagttgtggcagggagaagagctgagtgcctcttaggggcagggaccctg

SEQ ID NO: 2809 - DNA, 200 bp, synthetic construct
  misc_feature 1..200: note = Poly A sequence
  source 1..200: mol_type = other DNA
cctcttcatttagctaataaaaagtctaagcaataagaattaattctttttttaaaaaaatgcagtgtttaaactttgaagagtactggaaaatgttcaacttaagagagccaatggctggatgaatgagggagtaggagggatggaagaaagcaattatatccgacagtgcataaataagaaaaaaaagtcacacagta

SEQ ID NO: 2810 - DNA, 200 bp, synthetic construct
  misc_feature 1..200: note = Poly A sequence
  source 1..200: mol_type = other DNA
gtcgttcttcgggccctgtcctggcccaggcctctgccctctgcccacccagcgtcagcccccagaaaaaaggcaataaagacgagtctccattcgtgtgactggtctctgttcctgtgcggtcgcgtcctgcccatccggggtggcaaagcgtcttgcggaggacagctgggcctggaagcccggctgtcgggcaccag

SEQ ID NO: 2811 - DNA, 200 bp, synthetic construct
  misc_feature 1..200: note = Poly A sequence
  source 1..200: mol_type = other DNA
cttttttccttagggggaggtttgccttaaaggcttttaattttgttttgtttgcaaacatgttttaaattaaattcgggtaatattaaacagtacatgtttacaataccaaaaaagaaaaaatccacaaaagccactttattttaaaatatcatgtgacagatactttccagagctacaacatgccatctatagttgcc

SEQ ID NO: 2812 - DNA, 200 bp, synthetic construct
  misc_feature 1..200: note = Poly A sequence
  source 1..200: mol_type = other DNA
gggcttagggcactcacctcctgtttccacaggaatcttttggtcaataaaatagattgactcagaatggttgcgctaccacttgtatttatatgactaattcgtactgtatactccattgtgcttgtgtggttactttccgtttataaatagataattttctaatttagttcatgcactgtaatgtttagaaggtggtg

SEQ ID NO: 2813 - DNA, 200 bp, synthetic construct
  misc_feature 1..200: note = Poly A sequence
  source 1..200: mol_type = other DNA
cgccccggcccccatccctctgggcttcaccattgtgattttgtttattttttctattaaaaacaaaaagtcacacattcaacaaggtgtgccgtgtgggtctctcagccttgcccctcctgctcctctacgctgcctcaggcccccagccctgtggcttccacctcagctctagaagcctgctccctctgcagggggtg

SEQ ID NO: 2814 - DNA, 200 bp, synthetic construct
  misc_feature 1..200: note = Poly A sequence
  source 1..200: mol_type = other DNA
tgctgtgtacacaatgtacagcgattacgtcaagaggatggcacaggatgctggagagaagtaggactcctataggagccggggctgtccaactcccctaactcaatccctggtacattcctaataaagcagttttgaggaaaatcaacagactctttttcactgggggagaacagagtaagggactggtggtagctggg

SEQ ID NO: 2815 - DNA, 200 bp, synthetic construct
  misc_feature 1..200: note = Poly A sequence
  source 1..200: mol_type = other DNA
actcctataggagccggggctgtccaactcccctaactcaatccctggtacattcctaataaagcagttttgaggaaaatcaacagactctttttcactgggggagaacagagtaagggactggtggtagctggggagaggacttggagtaaatggctggaaatcaaagtgctctggccccctactccagggcaaggaag

SEQ ID NO: 2816 - DNA, 200 bp, synthetic construct
  misc_feature 1..200: note = Poly A sequence
  source 1..200: mol_type = other DNA
ctagacagaaccaataaagcctccagtgctggccgtcggcttagacttttgtgcaaatgcccctgggccagggagccctcctggctgctgtgtcctcgtctgttttttagggatgccaccccattttttagctgccccagctccacctgcccccagagggcaatgccacccttgtcctggccacccatctctcacctgcc

SEQ ID NO: 2817 - DNA, 200 bp, synthetic construct
  misc_feature 1..200: note = Poly A sequence
  source 1..200: mol_type = other DNA
ctcagtgccgccaggaaaagagaaagagaatccattattggtgaaaatccattttaagctgtcagcccccacaatcccagagaaatgactagacagaaccaataaagcctccagtgctggccgtcggcttagacttttgtgcaaatgcccctgggccagggagccctcctggctgctgtgtcctcgtctgttttttaggg

SEQ ID NO: 2818 - DNA, 200 bp, synthetic construct
  misc_feature 1..200: note = Poly A sequence
  source 1..200: mol_type = other DNA
ctgcatgtggaagggcacacagcagcaggcagggaggaggcggaggtggcaaataaacctgggcaattttgtttatacaaaaaatagaaaaaaagttccaagtttttctttcttccctcattcttttatttttgaaaagtgccttcacgttgcatttttattggaggaaaacctcgctcgttcagtaagcataatctgat

SEQ ID NO: 2819 - DNA, 200 bp, synthetic construct
  misc_feature 1..200: note = Poly A sequence
  source 1..200: mol_type = other DNA
agtgtgtggagtaaggacattcagaataaatatctgctgctctgctcaccaattgctgctggcagcctctcccgtcctcactggctctgtttccctttgtgctttctgggaggccccataggcagccagtgcctgccggcctgccctttggactcttggcattttgctgttttctcaaattctctggaagaaagagggaa

SEQ ID NO: 2820 - DNA, 200 bp, synthetic construct
  misc_feature 1..200: note = Poly A sequence
  source 1..200: mol_type = other DNA
tgacctgatggtcctggctgatgagctcagccccataaagaatgtcgaggaggctttgcgcctctgcaggtgactctcgggcccaagcaaccttctggaaaacgggttaataaataaatcaataaagaaccttcaagtttctactacttccgtgtgcctctgtgtcttgcatgatggatcttggctaggtcagctcctga

SEQ ID NO: 2821 - DNA, 200 bp, synthetic construct
  misc_feature 1..200: note = Poly A sequence
  source 1..200: mol_type = other DNA
aggtggacacaacagcagtctccttcagcacggcgtggtgtgtccctggacacagctcttcattccattgacttagaggcaacaggattgatcattcttttatagagcatatttgccaataaagcttttggaagccggacactgtctccttgtgcttatttgatactgagctgaaagaagtgacttggttctctggctat

SEQ ID NO: 2822 - DNA, 200 bp, synthetic construct
  misc_feature 1..200: note = Poly A sequence
  source 1..200: mol_type = other DNA
aatattaacccagcctccttataataaaatcacaaagttatatctgttcccccttgtcccagtggagggtcaataaatcacatgatggctttggcaacaacccttcctagaactgtgtacaagtctgagaaaaagcaaagctccaagactatgtgcctgagcaataattattgaaacctagcaaaggcccaatggagaag

SEQ ID NO: 2823 - DNA, 200 bp, synthetic construct
  misc_feature 1..200: note = Poly A sequence
  source 1..200: mol_type = other DNA
gtggactttgatatgacaacaacccctccatcacaagtgtttgaagcctgtcagattctaacaacaaaagctgaatttcttcacccaacttaaatgttcttgagatgaaaataaaacctattcccatgttctatggttggcagttgtcatcttgggcttaaaaacagtactgttggttaaatggtcttggtggttcaagt

SEQ ID NO: 2824 - DNA, 200 bp, synthetic construct
  misc_feature 1..200: note = Poly A sequence
  source 1..200: mol_type = other DNA
tggacagcctttgtgtgtatctctccaataaagctctgtgggccaagtcctctaggactccagtctgttaatgagggctgtgctgttcaaggaccaggtccaggcaccaccaatagacaaaaggatttatttggaaatttccaaacctgccagatgtggcactcgccaagccctaggcccaccctcctcaccaagctcca

SEQ ID NO: 2825 - DNA, 200 bp, synthetic construct
  misc_feature 1..200: note = Poly A sequence
  source 1..200: mol_type = other DNA
gtgcccgcgtggcatcctgtgaccgacccctccccagtgcctctcctggccctggaaggtgccactccagtgcccatcagccttgtcctaataaaattaagttgtatcatttcatctgactaggtgtcattctataatattatggggtggaaggtggtggtatggagcaaggggtaggtggaaagaagacctggagggcc

SEQ ID NO: 2826 - DNA, 200 bp, synthetic construct
  misc_feature 1..200: note = Poly A sequence
  source 1..200: mol_type = other DNA
atttttatatttgtataataaatattcttctctcctaatttggttgtcttatgttcacttagatttatttctagcccctttgcacttataaagtggacatttgtggtgcttgctttcattcagtgtttatattttttatgtctttcattgtatcaggaatatgttcagctacaagaaacaaaaatctactatactggatt

SEQ ID NO: 2827 - DNA, 200 bp, synthetic construct
  misc_feature 1..200: note = Poly A sequence
  source 1..200: mol_type = other DNA
ggtggttttcagattccacacaaaatgtcacacttgtttcttgttcatccaaggaacctaattgaaatttaaaaataaagctactgaatttattgccgcacccattgcagtgttagcttcatggtagcttacttttagttatgtcatttggttaagaaatgcaaatatttggaacgtcatcattctatggctgtgaagtt

SEQ ID NO: 2828 - DNA, 200 bp, synthetic construct
  misc_feature 1..200: note = Poly A sequence
  source 1..200: mol_type = other DNA
gaccttcaaataggagtgattgaaataaataactacttgcatgttatgctttcatttgggtggaatacttcattggaataaactactgatcttgtgctgtgtcaaagtaacagactagaaccttctttcaagtacctgaattgaaatgaaactcattttgaataataaaaactctagaaactctttatcttctcatctta

SEQ ID NO: 2829 - DNA, 200 bp, synthetic construct
  misc_feature 1..200: note = Poly A sequence
  source 1..200: mol_type = other DNA
ccagacacactgattggaactgtattatattaaaatactaaaaatcctaagtgtctttcgtctttgcggatgggaaagggaaaaatgctacctcgtagtggcttctgatgggaacaggacgcgggttctgttgctgccttcctgtgtctttttttttttttttttttctttctttgagtcggagtcttgctctgtggctc

SEQ ID NO: 2830 - DNA, 200 bp, synthetic construct
  misc_feature 1..200: note = Poly A sequence
  source 1..200: mol_type = other DNA
aattgagtccaggaggaagctctggcccttgtattacacattctggacattaaaaataataattatacagttctgggtgtgcttcttctctgtggttgagataattaagcctctcttctgagctggcctcactggcagcggggtttttgtttaaatggaaaggtgagcctcgacaggtttgttgggctggttgtctgacg

SEQ ID NO: 2831 - DNA, 200 bp, synthetic construct
  misc_feature 1..200: note = Poly A sequence
  source 1..200: mol_type = other DNA
aactgcttcaatgtggtatctttgtatggcaatgtatatagatttttttaaaagaataaatgttgttttgcaaatgtaggttcttagagtccacccagggaattttttatctgtctagtctgaacctgaggtggtaagagattaaaaaatgcttgttttatgttcttttttttttgagtcggagtcttgcactgttgcct

SEQ ID NO: 2832 - DNA, 200 bp, synthetic construct
  misc_feature 1..200: note = Poly A sequence
  source 1..200: mol_type = other DNA
gggggcaaggtccgtcctctgtgggcccaaacctatttgtaaccaaagagctgggagcagcacaaggacccagcctttgttctgcacttaataaatggttttgctactgctaggccctgccttgcccattcttctggggcctgagaggtgctcccctagggtaggggagcggttctgacatcccccattctctgacaccc

SEQ ID NO: 2833 - DNA, 200 bp, synthetic construct
  misc_feature 1..200: note = Poly A sequence
  source 1..200: mol_type = other DNA
ggcacccccaggacagcacacggtgagggtgcggggcctgcaggccagtcccacggctctgtgcccggtgccatcttccatatccgggtgctcaataaacttgtgcctccaatgtggtacctgcctcctctagaggtgggtgtatgcttgggtgtcagagaatgggggatgtcagaaccgctcccctaccctaggggagc

SEQ ID NO: 2834 - DNA, 200 bp, synthetic construct
  misc_feature 1..200: note = Poly A sequence
  source 1..200: mol_type = other DNA
tgtctggcatgtagtagatgctcaataaacacttgttgaatgaatgactccttttccatcctctctacccaaggattcccagaaccgctctcatttgtaagctggctgagtgggcaggcaggagaggggccggagcccctcgtcccaggattcctgttgagagggagccctggcctgggagaagggggctggaacagggt

SEQ ID NO: 2835 - DNA, 200 bp, synthetic construct
  misc_feature 1..200: note = Poly A sequence
  source 1..200: mol_type = other DNA
agcacttagcgggcgcgctgggatgtcacagagttggagtcattgttgggggaccgtggggagagctttgcctgttaataaaacgcacaaaccatttcacacacagtgacagcgctgtttcgcgtttctcattgtcttgagattctgggaggaagcctctggggcttcacagaggggctccctaggggtaagtgcaggac

SEQ ID NO: 2836 - DNA, 200 bp, synthetic construct
  misc_feature 1..200: note = Poly A sequence
  source 1..200: mol_type = other DNA
aaccttccaccgtttccttctcggaccatgaagggcaaaaacaaaaaaacaaaaaaaatcacaaaacaaaaaaaacaaaaaaagatgttaagatccaagcaacaaaaaaaaaaccaaccaaaccaagaggcatccaaccaagtccaagtcccgcgtcctggccacacgcccgcaccgagggagcacgccggcaggggcgc

SEQ ID NO: 2837 - DNA, 200 bp, synthetic construct
  misc_feature 1..200: note = Poly A sequence
  source 1..200: mol_type = other DNA
gccgcgcccagaccagcctgtcgcgcattaaaaccgtgtctctcccgcagctgtgggtgggccccggggcgccgcttgggggtcctgcagctggaggtggaggaggcccacaattctccccaaaccagagagagcccagaacttcccagtgcccagggactcccgtctgggaggtggtcttgtggatgggccgggtgacc

SEQ ID NO: 2838 - DNA, 200 bp, synthetic construct
  misc_feature 1..200: note = Poly A sequence
  source 1..200: mol_type = other DNA
cagcaagaggtgagagctgccagcctgaggtgcccactccgccagccacaggaccacctcctctgccagcaggaataaagacttgtgcatccctcaacgccttcctgtcatgcttcctccagaaaagggcccccgtcgtctgccctggctcagctggaccgcagtgtccaggcctgagagcctggtggaccatggtgtgg

SEQ ID NO: 2839 - DNA, 200 bp, synthetic construct
  misc_feature 1..200: note = Poly A sequence
  source 1..200: mol_type = other DNA
agctgccagcctgaggtgcccactccgccagccacaggaccacctcctctgccagcaggaataaagacttgtgcatccctcaacgccttcctgtcatgcttcctccagaaaagggcccccgtcgtctgccctggctcagctggaccgcagtgtccaggcctgagagcctggtggaccatggtgtgggcccctgaggagcc

SEQ ID NO: 2840 - DNA, 200 bp, synthetic construct
  misc_feature 1..200: note = Poly A sequence
  source 1..200: mol_type = other DNA
ctgaaggcctccctgagcacagggcccattaaaaccaggttcctccctggggcgtctgcttggccttagcgttgtttatctgtcctacttgggaaatgcagtatcaagtgcctgtgccagagcctggcctgcccgtgtcaccacccacagccatctgcacaccagtggtgttggggacagtgtggccttcctcagagcct

SEQ ID NO: 2841 - DNA, 200 bp, synthetic construct
  misc_feature 1..200: note = Poly A sequence
  source 1..200: mol_type = other DNA
ctgcatgtgtgacactgattctttggaaataaagagtggaagctgcaggtgacacgtgaagggttatttatggttatgatgaccctgtcctgcaacgagggactggcagccactactgaggaggagggtcccatctctctcctgtcggctttcaccgaggtcacagccagacgtggggcaaaggtgttccctgtcctacc

SEQ ID NO: 2842 - DNA, 200 bp, synthetic construct
  misc_feature 1..200: note = Poly A sequence
  source 1..200: mol_type = other DNA
cttcttttttttttctttttattaaaactgtgatagattttgttaccaagcagcatttgataagaggtccactggttttggtaaacaataaacatttttataacaattgttgtacagtcggctggtgctctgagaacaatagaacacatattggctcaaaccagagtttggggaggttgggttgagataatgacctaaac

SEQ ID NO: 2843 - DNA, 200 bp, synthetic construct
  misc_feature 1..200: note = Poly A sequence
  source 1..200: mol_type = other DNA
ttatattgaactgtaaatatgtcactagagaaataaaatatggacttccaatctacgtaaacttatttgtttattctgctctgtgtacatcctcatgctaaccgtagcaacttgcagctctaagtattatgtcataatgacagaggaccattttaaagtcttctatctatggctgtgaagacatcattatataatctagt

SEQ ID NO: 2844 - DNA, 200 bp, synthetic construct
  misc_feature 1..200: note = Poly A sequence
  source 1..200: mol_type = other DNA
atcacttgctgtttttttatataaaaatgtgtacaaagttaatttattgcattaataaagctctttaaactataaaatgttataaagtgtatctacaacctcaactgtcactaaaaatatggtatagaacttgtgggatggcttactcctaaaaggagagtcagacagtgcattgattggcctttacagagtgtcagtga

SEQ ID NO: 2845 - DNA, 200 bp, synthetic construct
  misc_feature 1..200: note = Poly A sequence
  source 1..200: mol_type = other DNA
ccagaaatgacgctgtctgggtcaacatttcagggaggagtctgccaccagtgtaatgtatcaataaacttcatgcaagcatacaattttgtattgcttttttttgtaatttaggaggactacaaccaaccaaccaaacacaaaaggcctatcaatcatctatcttttcagacttataaagcaatagcattttccaactc

SEQ ID NO: 2846 - DNA, 200 bp, synthetic construct
  misc_feature 1..200: note = Poly A sequence
  source 1..200: mol_type = other DNA
aatgcatacaagtcagggtgtttggctaatctacaaataagtcttaaacctatgtttttaaatttttttcccttggtttctacttatcttttaaaaaaaaaaatgaaaaaacactcatgagataactgcatttcacccaacaaaagcagggtataaggcgatattggtgatgaaagtcttaggaaaaatgcataattttg

SEQ ID NO: 2847 - DNA, 200 bp, synthetic construct
  misc_feature 1..200: note = Poly A sequence
  source 1..200: mol_type = other DNA
actcctgtggattcacatcaaataccagttcagttttgtcattgttctagtaaattagttccatttgtaaaagggttactctcatactccttatgtacagaaatcacatgaaaaataaaggttccataatgcatagttgttttctgtcatttgtgttattctttaaaaccaagatcaaattgagaaattggtaagcaaat

SEQ ID NO: 2848 - DNA, 200 bp, synthetic construct
  misc_feature 1..200: note = Poly A sequence
  source 1..200: mol_type = other DNA
atgagaagcagttcctgggaccagattgaaatgaattctgttgaaaaagagaaaaactaatatatttgagatgttccattttctgtataaaagggaacagtgtggagatgtttttgtcttgtccaaataaaagattcaccagtaaagatggttttcttttgtggactctgatttgaatctgctcaatctctctgccaatt

SEQ ID NO: 2849 - DNA, 200 bp, synthetic construct
  misc_feature 1..200: note = Poly A sequence
  source 1..200: mol_type = other DNA
cagtaggtggcaaattattgttgttatttagttgtttatttttgactggctttgttcttggtgttgaaaattaaaataaagcaaatctgcagagtgctgtgcaatgcctttcatctcacattagaaattatgatttatgggtcatttttaagttaatgtttgaaggattcagttatattttaaaaacaaaaataacagtg

SEQ ID NO: 2850 - DNA, 200 bp, synthetic construct
  misc_feature 1..200: note = Poly A sequence
  source 1..200: mol_type = other DNA
accaccagaataaacttgccgagtttacctcactagggccggacccgtggctccttagacgacagactacctcacggaggttttgtgctggtccccgactcctctggttgtttcgttttggctttttctccctccccatgtctgttctgggttttcacgtgcttcagagaagaggggctgccccaccgccactcacgtca

SEQ ID NO: 2851 - DNA, 200 bp, synthetic construct
  misc_feature 1..200: note = Poly A sequence
  source 1..200: mol_type = other DNA
caccccgtgagccttgtcagtgtgtaaataaagctcttttgccacccccaggagccactgtcttcaggaagggtgcacgccctgcgggtctcgggcaatcacacgcggccaggcttggcgccaatgctgtcgtttattgcgcggaatgggggtgtgggggttaatggggcgtggggggccacggtgggggcactgctgcc

SEQ ID NO: 2852 - DNA, 200 bp, synthetic construct
  misc_feature 1..200: note = Poly A sequence
  source 1..200: mol_type = other DNA
gcggcagccgggccgtttgggctcaagacacacacacagcgcagtgagccgctgtcaacagacagtttattctatatacaaacacaattttgtacactgcaattaaatagaatggaatgagcgctcctccgcattcctccccgagtgactggtttggccgccggcccactccatccccgagtgggactggaccacggccc

SEQ ID NO: 2853 - DNA, 200 bp, synthetic construct
  misc_feature 1..200: note = Poly A sequence
  source 1..200: mol_type = other DNA
cagacaaattagcctgctggatctttctgcgtaggggcttggggggcccttttgccaggggcccctccatgtcagggccagttgccgtcagctgccaggctgggggtgccatggaggtggcgtgttgttgccccctcttcctccaggctcggggggctgtgctggctgcagtgctggggtgcagtgagatctgggcccgt

SEQ ID NO: 2854 - DNA, 200 bp, synthetic construct
  misc_feature 1..200: note = Poly A sequence
  source 1..200: mol_type = other DNA
tgcagccatgtctctgcagctggtgctgaccccatgccacctctagacccgtgcgtactggtgcagccagtgtgggggtgggtggcggagcagggctcaagccagcctcggttccccatctgcgaccatgcttgggttctccagccttgctcccaagtaaggaacccatcttcagctgcctgggatgaggccctgcctgt

SEQ ID NO: 2855 - DNA, 200 bp, synthetic construct
  misc_feature 1..200: note = Poly A sequence
  source 1..200: mol_type = other DNA
ggctcagctaataaaggcgcacatgactccagtcctttgcgcagcttgttcttcctggcgtcccgagctctgggaggggcctgggcctgcttcaggttcgtggtgtgaggaggttcaggttggacgttcgggggtgtgtggtagtgttgtgtggatggtctcttggtgtcgaagactgacagctgtgcgggccctgcccc

SEQ ID NO: 2856 - DNA, 200 bp, synthetic construct
  misc_feature 1..200: note = Poly A sequence
  source 1..200: mol_type = other DNA
ccctgcgccgcgcggactcctgccccgagggtccggacgcgccccagctcgcgccccttcccatatttattcggaccccaagcatcgccccaataaagaccagcaagcaaccggctggggtgtccgtgcgtgttagggggcccgtgggacctcccttgccgactctcctcgcgcacggcccgggtccgccctgtagcgct

SEQ ID NO: 2857 - DNA, 200 bp, synthetic construct
  misc_feature 1..200: note = Poly A sequence
  source 1..200: mol_type = other DNA
gccggccccgcgccggagtccaggggccccttctggacgccccgcgactctggcgaaataaagcgagtgctgcggccgcagagtcacctgctcctttacgcctggacccggcaccaagtccggggcctgaaagacggtggtggggcgcttcaggcaggggagagtcagcgagcgctacagggcggacccgggccgtgcgc

SEQ ID NO: 2858 - DNA, 200 bp, synthetic construct
  misc_feature 1..200: note = Poly A sequence
  source 1..200: mol_type = other DNA
ttcggacacaccagggaccagcgggctagtcccagggcatggcccagcggccagattctttttcccaggattaaaactctgaccccaggacccatgtgtctggcttggcttgggggattaggggacgaggggtccgtcagatgtctgcctacggatggccccatttactcccagtgaccctcagctcagtgaaatctacc

SEQ ID NO: 2859 - DNA, 200 bp, synthetic construct
  misc_feature 1..200: note = Poly A sequence
  source 1..200: mol_type = other DNA
gatctagggcagggaggggggtgcaatgaggaatgtttctggtctgaaaagaataaagtgggtttgaaagcggattctcagcctcgctgctgttgggccacccgcctctgactggggttgggggacacccatccccatcaagcctaaggccaatccccgtttctgcgggcgggagagcgaggggtggtgagggctggggg

SEQ ID NO: 2860 - DNA, 200 bp, synthetic construct
  misc_feature 1..200: note = Poly A sequence
  source 1..200: mol_type = other DNA
cgagtcagcaggggccgcctgccccggccagaacgggcagggctgccactgacctgaagactccggactgggaccccactccgagggcagctcccggccttgccggcccaataaaggacttcagaagtgttccctgacccgtgtgctggccccagggagcacagggttggcctggtggtgcccagagcaccgaggcctgg

SEQ ID NO: 2861 - DNA, 200 bp, synthetic construct
  misc_feature 1..200: note = Poly A sequence
  source 1..200: mol_type = other DNA
agcacatttgacctttcagctccatgtccacgtgggggccttggggatggggagggggctggagatgcacgcctggcccctcaccccatcatcccgcggactggcaaggcagcgcccccggcctcacagtgaggcctcttagcaggggagccccggaatcacaggacaccctaaactccttgagtcccagccctggaaca

SEQ ID NO: 2862 - DNA, 200 bp, synthetic construct
  misc_feature 1..200: note = Poly A sequence
  source 1..200: mol_type = other DNA
ccccagctttctacagacaccagatttgtgaataaagttggggaatggacagcctaactgggacattgcagtggctgcttgctggggccgggatttgcaggggaacccaggatggcactggcccatagggagctccaggtgtggctggctggacacatggtcaaagtcacaaggccgggagagtggtgtcctttattgca

SEQ ID NO: 2863 - DNA, 200 bp, synthetic construct
  misc_feature 1..200: note = Poly A sequence
  source 1..200: mol_type = other DNA
aactgaaaacaaaatgagaacaacaaaaaaaattgtatggcagtttttactttttatcgctcgtttttaacttcacaaataaatgataacaaaacctccccgtctgcgggtgctgtctgtctccccccctttccttccctccctgtagttttgaagcggatgtttgttctttatagatgttgtttaaaaagcctgataat

SEQ ID NO: 2864 - DNA, 200 bp, synthetic construct
  misc_feature 1..200: note = Poly A sequence
  source 1..200: mol_type = other DNA
acctgcctctctgaggataaagcaattcattttctcccaccctcggccctcttgtttttaaaataaacttttaaaaaggaaaaaaaaaagtcactcttgctatttcttttttttagttagaggtggaacattccttggaccaggtgttgtattgcaggaccccttcccccagcagccaagccccctcttctctccctccc

SEQ ID NO: 2865 - DNA, 200 bp, synthetic construct
  misc_feature 1..200: note = Poly A sequence
  source 1..200: mol_type = other DNA
ggtgcagcctgagtcaagaaacgtggactccagtctggccccttgtgggtcgtcctggctccagggcgaaatggtgaacatgtcacacaacaaggaataaagagatggtttttgctgaacgtgtctggatacttgggcctaggagtggaactgggtgcatgagatccctggacccagtaggggagctggggaccttgggc

SEQ ID NO: 2866 - DNA, 200 bp, synthetic construct
  misc_feature 1..200: note = Poly A sequence
  source 1..200: mol_type = other DNA
gtttgcttttaaggatcggctccctgtcgcgcccgaggagggcctggacctttcgtgtcggacccttgggggcggggagtctgggtggggagggtgttgaataaaagggaaaataaatgtgtcgttttcatttttagcgggaggagcagtccttgcgttaagcggtgtgaggccctttaaggcgcggccacactcagcat

SEQ ID NO: 2867 - DNA, 200 bp, synthetic construct
  misc_feature 1..200: note = Poly A sequence
  source 1..200: mol_type = other DNA
gggcctgaggcatcctgggtctcactcggcccccaaaaactgataaaagaataaaacacttaaatgaataacaaggaactgagtatatgtatatttcatcaggggaggggctaggactcccacttggaggcctcaggagttctgctgggcgtcgcgaaggagcttctcctcccgccgcttccgtaacctctctttgaatt

SEQ ID NO: 2868 - DNA, 200 bp, synthetic construct
  misc_feature 1..200: note = Poly A sequence
  source 1..200: mol_type = other DNA
ctgaaggcactggacaagaagctggaggacattgccctgccctgacccctggccccgccccctacccctccctttccagagaaataaactcttcccgtcgctctgccagccagtgcctacctcaccttcttatcaagggagtccctgggagttgtgctgagccaggcctgtgccccaggccccaccaacccctattatcc

SEQ ID NO: 2869 - DNA, 200 bp, synthetic construct
  misc_feature 1..200: note = Poly A sequence
  source 1..200: mol_type = other DNA
ccctggccccgccccctacccctccctttccagagaaataaactcttcccgtcgctctgccagccagtgcctacctcaccttcttatcaagggagtccctgggagttgtgctgagccaggcctgtgccccaggccccaccaacccctattatcctctcagaaggagaattagcctctccctgcccctgagggcatctcaa

SEQ ID NO: 2870 - DNA, 200 bp, synthetic construct
  misc_feature 1..200: note = Poly A sequence
  source 1..200: mol_type = other DNA
ggggaccagggcttgtgtgggtcgagagcgccctcatggtgctggtgctgttgtgtgtaggtcccctggggacacaagcaggcgccaatggtatctgggcggagctcacagagttcttggaataaaagcaacctcagaacactttgttctttgttcttgtttgttttctttcttttttttctctttctttagttcacaga

SEQ ID NO: 2871 - DNA, 200 bp, synthetic construct
  misc_feature 1..200: note = Poly A sequence
  source 1..200: mol_type = other DNA
ctggaacttgccggtgcctggggtgcctttcccccagccagggtccaaagaagcttggctggggcagaaataaaccatattggtcggacacagtctctgagccttccttgacgtgacccctgactggttcatgttggactaagagaacagtcttccaccttcgtgaagtcccaaaggcaactctcagttgtgtgttgtgg

SEQ ID NO: 2872 - DNA, 200 bp, synthetic construct
  misc_feature 1..200: note = Poly A sequence
  source 1..200: mol_type = other DNA
tgagaatcctcatcttcctgccccgctttcctctcccatcctcatcccccacactgggatagatgcttgtttgtaaaaactcaccttaataaagacttagatgttgctttgttgttgtctctgtatgacagctgtctagtgatgggtggatcagtcgctgtttggtcatcactgcaccatcagcatgcagctgctaaaat

SEQ ID NO: 2873 - DNA, 200 bp, synthetic construct
  misc_feature 1..200: note = Poly A sequence
  source 1..200: mol_type = other DNA
tgctggaggcagactcgagggccgaattgtttctagttaggccacgctcctctgttcagtcgcaaaggtgaacactcatgcggcccagccatgggccctctgagcaactgtgcagcaccctttcacccccaattaaacccagaaccactgctctgctctcctgtgtctcatttctcctcagggaagcatagtggggaaga

SEQ ID NO: 2874 - DNA, 200 bp, synthetic construct
  misc_feature 1..200: note = Poly A sequence
  source 1..200: mol_type = other DNA
catgggccctgcatgctaataaatgcttcttcagaaatggctgctgtcttttttttttcccccatgagaagcagggggaggggcaggcaagggtagagccaagagcctcagtttccccattcatgaagcatgatggtttggagtgtcagccattttatcctgtaagcctctcctataatgatgcccatttattgagcacc

SEQ ID NO: 2875 - DNA, 200 bp, synthetic construct
  misc_feature 1..200: note = Poly A sequence
  source 1..200: mol_type = other DNA
cagccgggactgctctccctgaagacccctccagagagaaaataaactagcccagaccctcctctagccccgactgttagtcttgctgcttcctgtgcctaggaatccccctgccctcctagtttacccctcattgttgggggggaggggtgtagagtccccaggggtcattcgggatgtgtgggcttggaatcagggga

SEQ ID NO: 2876 - DNA, 200 bp, synthetic construct
  misc_feature 1..200: note = Poly A sequence
  source 1..200: mol_type = other DNA
gattaaagagcgagaaaggagatgcccttcccctaggcctgaatgatttggggtgccaggcccctctctgtctccagcctacttgatcccttcctaagcgaggcagggaacgagggatgcccctgggcccagcagcctcgcacagcccctgctcccacaggatggggtgaggcttgggggtctggggtctctgggcatct

SEQ ID NO: 2877 - DNA, 200 bp, synthetic construct
  misc_feature 1..200: note = Poly A sequence
  source 1..200: mol_type = other DNA
tcgagcagagccggtaaccaccacgtgccagagccgcccacccggagccgcccgcatgcagcttcacctcccctttccaggcgccactgttgagaagctagagattgtatgagaataaacttgttattatggaagcctggctcccaccccatctatttcttggtcatcttggcctttcacggacaccctgggcccggcct

SEQ ID NO: 2878 - DNA, 200 bp, synthetic construct
  misc_feature 1..200: note = Poly A sequence
  source 1..200: mol_type = other DNA
ggggtgcaccccccaccctatggaccagtcaaataaaagccttcaggcccctcaaccagagtcccctcttactgctccgacgcgagagtggggagagagtgaagggcagtgtggtggtccccaaccccggaaagaaacacacagagcccgagtccgactggggcaggcgggctttattccgggtgctggagagctgtggg

SEQ ID NO: 2879 - DNA, 200 bp, synthetic construct
  misc_feature 1..200: note = Poly A sequence
  source 1..200: mol_type = other DNA
cccgagctcggggcgggcggagcccgcgtggccgaagctggaaaccaaacctaataaagttttcccatcccacctccgggtttctctgttactgtgccgcgcgggcggggcggggtgggcagaggggcggggtgcgcatgcgcgcgggccgggccgtcgggcaccgcggtgggaccacaactcccattaggccacggagc

SEQ ID NO: 2880 - DNA, 200 bp, synthetic construct
  misc_feature 1..200: note = Poly A sequence
  source 1..200: mol_type = other DNA
ggtccagagagcggggccacgtgtcacccacgtctgcgcttggtcacccgtcctccccaccctgtgtgtgtttatgtcatagttacattaaattccattcattgaatactccacagccttcctctgatgcagcgtggtcccaactcctcctgcgtgaccacagggcttgcctggttttgtcgccgaccttccctgtggcc

SEQ ID NO: 2881 - DNA, 200 bp, synthetic construct
  misc_feature 1..200: note = Poly A sequence
  source 1..200: mol_type = other DNA
gacccccgcccaccttgtctgtcttccgtctgtcccctgcccccatctagcagtgcctttcaggctggccaatgagatgggagggtttttggaggtccctgaagagccacagacagacagtgcatgagcaggggaagaaccacctcagggccagatgcgggggctcacgcctggaatcccagcactttgggagtccaagg

SEQ ID NO: 2882 - DNA, 200 bp, synthetic construct
  misc_feature 1..200: note = Poly A sequence
  source 1..200: mol_type = other DNA
agcccctcctccaggaaggccttccaggacttcctcctctgggtcctctagctctgaccctacagggactccagatctcaacctgttccctggaagtagggcctgctctccatcccagtgaaataaacatgtattagacacctactgagtataattacttaacacttctgatttcactcagttgtcacacacacaaaaag

SEQ ID NO: 2883 - DNA, 200 bp, synthetic construct
  misc_feature 1..200: note = Poly A sequence
  source 1..200: mol_type = other DNA
tctgaccctacagggactccagatctcaacctgttccctggaagtagggcctgctctccatcccagtgaaataaacatgtattagacacctactgagtataattacttaacacttctgatttcactcagttgtcacacacacaaaaagttgttttttgtttttgtttttgtttgagtctgtgtctcactctgtcgcccag

SEQ ID NO: 2884 - DNA, 200 bp, synthetic construct
  misc_feature 1..200: note = Poly A sequence
  source 1..200: mol_type = other DNA
gggtcacctgttgtcgggaggggagccactccttctcccccaactcccagccctgcctgtggcccgttgaaatgttggtggcacttaataaatattagtaaatccttcaaagactccagaagcgtgatttctgcttttaaaggtaccacatggtttctgggcatgctggctcacgcctgtaatcccaacactttgggagg

SEQ ID NO: 2885 - DNA, 200 bp, synthetic construct
  misc_feature 1..200: note = Poly A sequence
  source 1..200: mol_type = other DNA
gaccctggctccctgcagtggggacttcgtgggaggcactcatggctctctgggtctaatgaataaagtcctccacagcctagatcttgggtgatgtgttctgggttaatggaagtggcttgggtatagtgggggaatctggaacatcccagagggaagagaactctgaagttaccaaccatgcagtatgcatctggggt

SEQ ID NO: 2886 - DNA, 200 bp, synthetic construct
  misc_feature 1..200: note = Poly A sequence
  source 1..200: mol_type = other DNA
ggccccggtcacacagtttctcggctcttcctccccgctgccccccacgaccctaccttgaaggcccccacaaataaaggcgctgccactcagccctccttccacctggggttcttggggcctgtgacctgactctgcctccctctacttccccgactcttgagcgcccagcttcagtcccatcccctctgcccatggtc

SEQ ID NO: 2887 - DNA, 200 bp, synthetic construct
  misc_feature 1..200: note = Poly A sequence
  source 1..200: mol_type = other DNA
gtggttctttccttgaagggcagcctcctgcccaggccccgtggccctggagcctcaataaagtgtccctttcattgactggagcagcaattggtgtcctcatggctgatctgtccagggaggtggctgaagagtgggcatctcccttagggactctactcagcactccattctgtgccacctgtggggtcttctgtcct

SEQ ID NO: 2888 - DNA, 200 bp, synthetic construct
  misc_feature 1..200: note = Poly A sequence
  source 1..200: mol_type = other DNA
tggagcagcaattggtgtcctcatggctgatctgtccagggaggtggctgaagagtgggcatctcccttagggactctactcagcactccattctgtgccacctgtggggtcttctgtcctagattctgtcacatcggcattggtccctgccctatgcccctgactctggatttgtcatctgtaaaactggagtaaaaac

SEQ ID NO: 2889 - DNA, 200 bp, synthetic construct
  misc_feature 1..200: note = Poly A sequence
  source 1..200: mol_type = other DNA
ggaccagggtgaggacccgccggatgacagccaccctcaccgcggctggatgggggctctgcacccagccccaaggggtggccgtcctgagggggaagtgagaagggctcagagaggacaaaataaagtgtgtgtgcagggagtggcggctgtggtttttgctgcatggagtcagtagggacgggcctctgagggagggt

SEQ ID NO: 2890 - DNA, 200 bp, synthetic construct
  misc_feature 1..200: note = Poly A sequence
  source 1..200: mol_type = other DNA
ggccgcctgccggggactcagacactcagggaacaaaatggtcagccagagctggggaaacccagaactgacttcaaaggcagcttctggacaggtggtgggaggggacccttcccaagaggaaccaataaaccttctgtgcagaatgagggactttgctgtgcttcccggagggcttcctggaggagtcagcccctaga

SEQ ID NO: 2891 - DNA, 200 bp, synthetic construct
  misc_feature 1..200: note = Poly A sequence
  source 1..200: mol_type = other DNA
gtgttctggaaatacatactttctgaatgaccaaccgtccctggactgtggaatgttccggcctgcatttctgcccaccccttccgttgtcacgagtgccgtgccgtgtaataaagtcccagtgctcatccaccacagatgcctggtcctgttgcaggaagcccctcctgttagcagcgggatgcaagatgctgtctcgg

SEQ ID NO: 2892 - DNA, 200 bp, synthetic construct
  misc_feature 1..200: note = Poly A sequence
  source 1..200: mol_type = other DNA
cgccacccgcggccacaccgcagggaccctcgccaataaacagccctcccaccaccgccgcctcgcctccgcctcctttgtgcaccgggcccgctgcgggggtgggcacactcgaagagggacttcacacggtccctgggtgatccaaggcggggagcatgagaagggcggtggagtgggacttcccgctggcctagaaa

SEQ ID NO: 2893 - DNA, 200 bp, synthetic construct
  misc_feature 1..200: note = Poly A sequence
  source 1..200: mol_type = other DNA
ctacaagtgctcacagactagaacttaacggaacaagtctaggacagaagttaagatctgattatttactttgtttattgtctatatgccttttaaaaaaataaacttgttatgcaaaataaaacatttgggtaagttgttttagtatcatagccaagtggccagatctgtgttttgaatttttccccttcctaccaaaa

SEQ ID NO: 2894 - DNA, 200 bp, synthetic construct
  misc_feature 1..200: note = Poly A sequence
  source 1..200: mol_type = other DNA
actcccctggcacctgacatctcccacgctccacctgcgcgcccaccgccccctccgccgccccttccccagccctgcccccgcagactccccctgccgccaagacttccaataaaacgtgcgttcctctcgacagcactttgtcggtctcggtccctcagcgcgaaacgccagcgccactgggccccagcagggggcgc

SEQ ID NO: 2895 - DNA, 200 bp, synthetic construct
  misc_feature 1..200: note = Poly A sequence
  source 1..200: mol_type = other DNA
ctgacgttttctacgtagcttttgtatttttttttttaatttgaaggaacactgatgaagccctgccatacccctcccgagtctaataaaacgtataatcacaagctctggagagaaccatttgttcggccgcgcggggcgggggaccggggctgctcccgtatgcgtctgtaaagcgccgcgtcccgggggcaccggag

SEQ ID NO: 2896 - DNA, 200 bp, synthetic construct
  misc_feature 1..200: note = Poly A sequence
  source 1..200: mol_type = other DNA
ccatgacctccactggaagagggggctagcgtgagcgctgattctcaacctaccataactctttcctgcctcaggaactccaataaaacattttccatccaacagctcctgtatctgcgactctgtcctcctactgggctttacaaaggaattaagatggaatgagccccaaggctgataggtagaaatcttgacttcca

SEQ ID NO: 2897 - DNA, 200 bp, synthetic construct
  misc_feature 1..200: note = Poly A sequence
  source 1..200: mol_type = other DNA
actggcatccggccttgctgggagaataatgtcgccgttgtcacatcagctgacatgacctggaggggttgggggtgggggacaggtttctgaaatccctgaagggggttgtactgggatttgtgaataaacttgatacactatgctgtctcattgtggtcccctgggctccctaaggagggatggacagggaggcagga

SEQ ID NO: 2898 - DNA, 200 bp, synthetic construct
  misc_feature 1..200: note = Poly A sequence
  source 1..200: mol_type = other DNA
gtctgtggccaggcacccgctcccacctggccgggcgctggctcctccctcagttctctttggaaaacccccagctgtccacccatcccctgccccaaaaccagtttcaataaatttacgttcatttccacccctggctgggcatggaagcacgctgtggggagcagggcttggcttccccacagctggaaatggcgggg

SEQ ID NO: 2899 - DNA, 200 bp, synthetic construct
  misc_feature 1..200: note = Poly A sequence
  source 1..200: mol_type = other DNA
aattcccggtcaaacctcttcgcgcgtgctcctctgcagcattcttcccgctgatactgactacagcagctagggagcctaagtgtgcagctccacatgttggaatttggcctccccacctcggagtcccaggcgtctgggccttcatctctttcctctcacatgatccagaggcctggatccttgctcgctaaaagact

SEQ ID NO: 2900 - DNA, 200 bp, synthetic construct
  misc_feature 1..200: note = Poly A sequence
  source 1..200: mol_type = other DNA
ctggctgcatctccctttcctctgtcctccatccttctcccaggatggtgaagggggacctggtacccagtgatccccaccccaggatcctaaatcatgacttacctgctaataaaaactcattggaaaagtgagtctatgcgtgtgaacgggccaggcagtggcaagaagctgggctggaatcagtgccctgaccaggg

SEQ ID NO: 2901 - DNA, 200 bp, synthetic construct
  misc_feature 1..200: note = Poly A sequence
  source 1..200: mol_type = other DNA
cacccaataaagaactttgctgactactaagcccagtatacaattagcactgaagtacttcttgaagtacaatcctaattgggcaaagacccaacagatagcctcactgctcttcgccctagaagggcctattccaacatacacacagggccacatgtgggagggctgaccccaggtgcctctgggccaccagaatcccc

SEQ ID NO: 2902 - DNA, 200 bp, synthetic construct
  misc_feature 1..200: note = Poly A sequence
  source 1..200: mol_type = other DNA
gctcccgggctccataatgtaatctgttcagcatggagtccttcttctaccgcccctgtcttaataaagctgcgtgtttcacttcggcatcaacttgcttttgctgtggtttggcatttccctccacccacacatgtgacgaaaaggggaaacaagactgggtcctggccacaacttcagctgaggaacttggcacggcc

SEQ ID NO: 2903 - DNA, 200 bp, synthetic construct
  misc_feature 1..200: note = Poly A sequence
  source 1..200: mol_type = other DNA
acggtgtgccagcgtcctccccacgaggcaaataaacacagaaaactcacgcatggaatctggtgtttattacactcgggggagagaggaggtcactcggtccagcggtggccgcagtgtggggctgtgcacacgtagtaaaggcgcatggcgtcctggcagaaatgatgcatggttaggaaggatttggacccagcagc

SEQ ID NO: 2904 - DNA, 200 bp, synthetic construct
  misc_feature 1..200: note = Poly A sequence
  source 1..200: mol_type = other DNA
gaccaagaagcctggggggcctgagagtcttgaacaagtgtcaataaacgctggcctctgtgtgtgtctgtgtttgtgtccacccctccccaccaagcccatcctcccaccagccagggatctctgccctgtggactgcccactgcccccagccctcggtgcctcatgctggaccagggatactcctaggatgttgctac

SEQ ID NO: 2905 - DNA, 200 bp, synthetic construct
  misc_feature 1..200: note = Poly A sequence
  source 1..200: mol_type = other DNA
tgtcccacctgccccagcccccagttactgtcacgcctctcttatgaggcccatcttgaagatgcaacctgtcacccagcccaggcctctctttctgttttgcttgatgtttacttctcgttcagactcaaataaagccttttttcaggaccagcagtgggctctcttaaaagctcgagttcagaaggtttgtaccagca

SEQ ID NO: 2906 - DNA, 200 bp, synthetic construct
  misc_feature 1..200: note = Poly A sequence
  source 1..200: mol_type = other DNA
gtgtagtcggctcaacaccctccaccttcccctccatgccaataaaataaccaatccagatgccagcagcctgtcaatcactcgccaaggcagtgggtagggtgcagcagggcaggatcgccattaaagcacatcttggaaacaatcgtgaagctggaccagagcagcagtaactgaggttccattcacccagcacccag

SEQ ID NO: 2907 - DNA, 200 bp, synthetic construct
  misc_feature 1..200: note = Poly A sequence
  source 1..200: mol_type = other DNA
acacccccagctggccctccacccccacctcaagtgccttattctcacagcaagccccttagtccccaagcccctccccctaaggcagctgggggagaggtgacctagtactggaaaataaatctgtgctacgccccccagcatcactgtgttggcctgctgaaattttggaggagtggacatccaggaattgtttcccc

SEQ ID NO: 2908 - DNA, 200 bp, synthetic construct
  misc_feature 1..200: note = Poly A sequence
  source 1..200: mol_type = other DNA
ttcaggtgtttaataaagatgtgttgactcagccctactgtctcctccctggcttcctgcctctgccccttgcccaccagagggagctcaggagcaggcctctgctctgggttggcccccgcaccgtacccccagcccccaccacaccacaccccatggcggggtttccgcctcctttttcccctgcttcgacttcctcc

SEQ ID NO: 2909 - DNA, 200 bp, synthetic construct
  misc_feature 1..200: note = Poly A sequence
  source 1..200: mol_type = other DNA
ccgcaccccatcccaccagccccggccttgctttgtctggcctcacgtgtctcagattttctaagaaccaaaaaaaaaaaaggaaaaaaaacacaaaacaacaaaaaccaaaaaaaaaaaaaatcacaaaaacaaaaaaactataaaaaagaaagaattaaaaactttcagagaattactatttactttattaacttacg

SEQ ID NO: 2910 - DNA, 200 bp, synthetic construct
  misc_feature 1..200: note = Poly A sequence
  source 1..200: mol_type = other DNA
tctattcctggggccataactcatgggaaaacagaattatcccctaggactcctttctaagcccctaataaaatgtctgagggtgtctcatgagtgtgtgtctccatctgctccccggctactcttcccttccttggttcagtcatgcacttcatctatccttcatccatccagtcatctgaccatccatcctcctgtca

SEQ ID NO: 2911 - DNA, 200 bp, synthetic construct
  misc_feature 1..200: note = Poly A sequence
  source 1..200: mol_type = other DNA
tctctgggctggggactgaattcctgatgtctgagtcctcaaggtgactggggacttggaacccctaggacctgaacaaccaagactttaaataaattttaaaatgcaaaaactcggagatcctcagtttggactcagtttctgcctcttctgggctctagccgacggttcctgcagtacgaggcttgggccagcagggg

SEQ ID NO: 2912 - DNA, 200 bp, synthetic construct
  misc_feature 1..200: note = Poly A sequence
  source 1..200: mol_type = other DNA
gtcccagggcattcagggctggttcagacaccattattgtgagcagcaaagcacttttctagtggtctgtttgtgagcctttcacttgtttgttccccacccccaaacctttgctgttaataaagtcaacttctctttacttcccctcccagcccctatgatgtcattcagcccagcacatacctcccgcaacccccagg

SEQ ID NO: 2913 - DNA, 200 bp, synthetic construct
  misc_feature 1..200: note = Poly A sequence
  source 1..200: mol_type = other DNA
gcccatcgtgactcaaaactcacttgtataataaacagtttttgagggattttaaagtttcaagaactgtgtgtggccttatgtgttggtattggatgtttaaccagacagaaatcagtaaacatcctggacctattgccagtctggattttgaccctccccagaagtggtcgcgctgggcttggtgtgggtgagtggaa

SEQ ID NO: 2914 - DNA, 200 bp, synthetic construct
  misc_feature 1..200: note = Poly A sequence
  source 1..200: mol_type = other DNA
ctgaccctcgtcgctgcgagtccaaaaagtttggaggccctggtgcccgcgctcgctaccagaaatcctaccgataagcccatcgtgactcaaaactcacttgtataataaacagtttttgagggattttaaagtttcaagaactgtgtgtggccttatgtgttggtattggatgtttaaccagacagaaatcagtaaac

SEQ ID NO: 2915 - DNA, 200 bp, synthetic construct
  misc_feature 1..200: note = Poly A sequence
  source 1..200: mol_type = other DNA
ctctgggcctcctcaaactcagtgcctgggtccagggccccagtgcttccagaccaagacttgggccaccacttgtccaataaagtacatcccagacgccacacctgctgtgtcccgagagtctccagatgggggcatcagggtgaggtccgggactcttgggtcatcgtcccacagtggctgatcggctgccaagcaca

SEQ ID NO: 2916 - DNA, 200 bp, synthetic construct
  misc_feature 1..200: note = Poly A sequence
  source 1..200: mol_type = other DNA
agttcagcgctgtcaggattgcgagagatgtgtgttgatactgttgcacgtgtgtttttctattaaaagactcatccgactcccatgtctgctgctcattcctccccttgacctgctgacacagggagcacgcacccttggtcaattttgcggggttgggtaaattctcactcggtcacagagcgcatgctccgtttcta

SEQ ID NO: 2917 - DNA, 200 bp, synthetic construct
  misc_feature 1..200: note = Poly A sequence
  source 1..200: mol_type = other DNA
ccttcccttccctccaccacaccactcaggggctggggcttctctcgcacccccagcacctctgtcccaaaacctcattcccttttttctttacccaggattggtttcttcaataaatagataagatcgaatccatttaatttcttcttagaagtttaactcctttggagaatgtgggccttgaataggatcctctgggt

SEQ ID NO: 2918 - DNA, 200 bp, synthetic construct
  misc_feature 1..200: note = Poly A sequence
  source 1..200: mol_type = other DNA
cactctgtccccatctgggagggtggcattctgggacatgaggagcaaaggaagggggcaataaatgttgagccaagagcttcaaattactctagagaaaccgactgtgtgactcttcctctctctgcctctgtctgagtattttggtgtgtctgcctgcctctgtgtaagatttgcttgttatgcattcattcatttgt

SEQ ID NO: 2919 - DNA, 200 bp, synthetic construct
  misc_feature 1..200: note = Poly A sequence
  source 1..200: mol_type = other DNA
gcacaagaatagccgcccagtgactgccaagtgagtgaaccagcctgcttggagcctgcctctttcccaaactgctcattatcctgttaccccacccagcccacgtgtccaaatacactccagatgcaaaataaaaagctctacgacattggctctgaatgttctgtttattggggtgttgtcatgggtaggaggctcag

SEQ ID NO: 2920 - DNA, 200 bp, synthetic construct
  misc_feature 1..200: note = Poly A sequence
  source 1..200: mol_type = other DNA
ccatctagctgcacccgacaagcacccagactctttcacataacaaataaaatagcagagttccctttctgcattgtcctgtggtccatgagagagcaggggtgaggaaggtgtgaggaaggccaagcatgtccagggaggtggggacccaggaagaggagcctggcaaagtgacagtgtcctgcccagcaactggggga

SEQ ID NO: 2921 - DNA, 200 bp, synthetic construct
  misc_feature 1..200: note = Poly A sequence
  source 1..200: mol_type = other DNA
acaaaccatgctgggttaataaattgcctcattcgtaatcctggtctgggtctcttttttgagtctcttgctctgtcgcccaggctggagtgcagtggcgccatctcagctcactgcaatctccgccttctgggttcaaatgattctcctgcctcagcctcccaaagtgctgggattacaagtgtgagccactgtgcctg

SEQ ID NO: 2922 - DNA, 200 bp, synthetic construct
  misc_feature 1..200: note = Poly A sequence
  source 1..200: mol_type = other DNA
gcatcctgctgccttcccacaacattaaactctccttcctcagtgtgctgtttcctgctttatggtcgaacctgtctgggtatctgggtaccaccattagtccttatcctgatctgtgaccctgcagttctgcaaggtgttttttgtgtgagtcagggtctctctccgtcacccaggctagagtacagtggtgagtccac

SEQ ID NO: 2923 - DNA, 200 bp, synthetic construct
  misc_feature 1..200: note = Poly A sequence
  source 1..200: mol_type = other DNA
gagaggctgaggctagggctggggacagatatcttgtactcccagtgacctcaataaagtacttttcatggtcctcttgattttcagtgagttgctgactcagaagagcagcttttcttagctctgagttctaggtccaagatggaggggaaggtactgttgcttgttaccttcatagggcctgaggagccagcatggtg

SEQ ID NO: 2924 - DNA, 200 bp, synthetic construct
  misc_feature 1..200: note = Poly A sequence
  source 1..200: mol_type = other DNA
ggaagttccctgtcttccccgtccttttccaccagtctcgcctctggccttctctggccactcctgggagggactgcctcaccacccctgtcccgctgccagaaatacacccacaataaaaacctgaaaaccaactccgcctacatccattttgtcccagggtaggaatctgggtggagagagaggattggtgagagagg

SEQ ID NO: 2925 - DNA, 200 bp, synthetic construct
  misc_feature 1..200: note = Poly A sequence
  source 1..200: mol_type = other DNA
tctcacttctgtcagatgctcccatccactattaatgcactaggtgggaggagagggcggcaatgacactgcacctctcctttcccaccgcattccctggagctccctaaataaaactttttttaacgtgagtctgacttctacctattttctgggggaaccaattgggtttctgggccgaaaggggtggggttctggtc

SEQ ID NO: 2926 - DNA, 200 bp, synthetic construct
  misc_feature 1..200: note = Poly A sequence
  source 1..200: mol_type = other DNA
cgccgaagcctgcagccatgcgaccccacgccaccccgtgcctcctgcctccgcgcagcctgcagcgggagtccctgtccccgccccagccgtcctcctggggtggaccctagtttaataaagattcaccaagtttcacgcatctgctggcctccccctgtgatttcctctaagccccagcctcagtttctctttctgcc

SEQ ID NO: 2927 - DNA, 200 bp, synthetic construct
  misc_feature 1..200: note = Poly A sequence
  source 1..200: mol_type = other DNA
tcatgaggacctgaagggtgacatcccaggaggggcctctgaaatttcccacaccccagcgcctgtgctgaggactccctccatgtggccccaggtgccaccaataaaaatcctacagaaaattctctcctgagtgcttctttactctggggaaggggctgcgggagagggtaggggcttccagagagggcagggtctgc

SEQ ID NO: 2928 - DNA, 200 bp, synthetic construct
  misc_feature 1..200: note = Poly A sequence
  source 1..200: mol_type = other DNA
gacctgaagggtgacatcccaggaggggcctctgaaatttcccacaccccagcgcctgtgctgaggactccctccatgtggccccaggtgccaccaataaaaatcctacagaaaattctctcctgagtgcttctttactctggggaaggggctgcgggagagggtaggggcttccagagagggcagggtctgcaggagag

SEQ ID NO: 2929 - DNA, 200 bp, synthetic construct
  misc_feature 1..200: note = Poly A sequence
  source 1..200: mol_type = other DNA
agccagaccccccatcagtggacaaggggagagtcccctactcccctgatcccccaggttcagactgagctcccccttcccagtagctcttgcatcctcctcccaactctagcctgaattcttttcaataaaaaatacaattcaagttgcttctcatggatggcactgcttttctgaggactcaagggccaagatggagg

SEQ ID NO: 2930 - DNA, 200 bp, synthetic construct
  misc_feature 1..200: note = Poly A sequence
  source 1..200: mol_type = other DNA
cagaagagtggggggtggggaggacaagggggtgggtaaggggctcaagctgtgatgctgctggttttatctctagtgaaataaagtcaaaagttatttaattcccgtcacctgtctcagtgtcatctgtgtggttggtgcagggctctcccaccccagggcccatgggccagcagagccagctgggagggcgcttgggt

SEQ ID NO: 2931 - DNA, 200 bp, synthetic construct
  misc_feature 1..200: note = Poly A sequence
  source 1..200: mol_type = other DNA
gtgccttcacacagcactggtttaatgtttataaacaaaatagagaaactttccttataaataaaagtagtttgcacagaaattgactttcttctcttttgattctgttttgactcaatacatgctcatcattgtggttatgatttttggcaaggcagtctgaaagtagccctttcttcttcttcttctttttttttttt

SEQ ID NO: 2932 - DNA, 200 bp, synthetic construct
  misc_feature 1..200: note = Poly A sequence
  source 1..200: mol_type = other DNA
tgaccccagctgccaaggaaacccccagtgtaataataaatcgtcctcccaggccaggctcctgctggctgcgctggtgcagtctctggggagggattctgggggtgtcaccttctggtggcccaggtgggcaccttcagctttctttagttcctcagtttcccgggggcagactacacaggctgctgctgctgctgctt

SEQ ID NO: 2933 - DNA, 200 bp, synthetic construct
  misc_feature 1..200: note = Poly A sequence
  source 1..200: mol_type = other DNA
aagtaccctgatgaccccagctgccaaggaaacccccagtgtaataataaatcgtcctcccaggccaggctcctgctggctgcgctggtgcagtctctggggagggattctgggggtgtcaccttctggtggcccaggtgggcaccttcagctttctttagttcctcagtttcccgggggcagactacacaggctgctgc

SEQ ID NO: 2934 - DNA, 200 bp, synthetic construct
  misc_feature 1..200: note = Poly A sequence
  source 1..200: mol_type = other DNA
gcgacacggccgtggggcctggcaggcgctggacagcgcccgaggactgggacattaaacctgacctcccctcctccagatgcagagtattggttcgtgttccttgggaagggcggcgaggagcggactaactggagaggcaggagggcgggtggagggagaggggggtgaggacccgggggagtcagaaatggacagag

SEQ ID NO: 2935 - DNA, 200 bp, synthetic construct
  misc_feature 1..200: note = Poly A sequence
  source 1..200: mol_type = other DNA
cgccccgcctcgctcggctgcccccgccccttcccggcccccctcgccgcgcgtcctccaaaaaataaaaccttaaccgcgggctctgccttgatcttccttccttccgcctccagggacccaggctgcgcacgcttgacctctcctgaacctaacatggtccccaccgccagctgctcagccctcagaatgcccatctc

SEQ ID NO: 2936 - DNA, 200 bp, synthetic construct
  misc_feature 1..200: note = Poly A sequence
  source 1..200: mol_type = other DNA
aaacacgtcgattctgtccaggttccttgatgcgctgtggcagggcaggcagcggggcgtggagaatcctcaccacaccaaggcttccagaggccggggtccccgactcagagtcccgcccagaggcaaaggtgctgcaggaacccagcgctgggcatctcacttcccggggtgggggcctgactccccagtctgaggga

SEQ ID NO: 2937 - DNA, 200 bp, synthetic construct
  misc_feature 1..200: note = Poly A sequence
  source 1..200: mol_type = other DNA
ccctggatcctactctcttattaaaaagatttttgctgacagtgctctgtgtgtgttattgggggatgggttggagaattggttcctgcgggtgagaatgcatttggtttggggacagggacgtcatgccagtgaagaccagccctcttcctgcccccactgccccggaagctccctgcctccttcccaacagccaggtg

SEQ ID NO: 2938 - DNA, 200 bp, synthetic construct
  misc_feature 1..200: note = Poly A sequence
  source 1..200: mol_type = other DNA
tggatggtgtcccccatggtcgctgagtctccccttcgaggattgcacccgcccgtcctaagcctccccacaaggcgaggggagttacccctaaaacaaagctattaaagggacagaatacttcctgttttctcagtggtctgattctaggcgcggtggggaaacatttgggtattaaagaacagacttcttccggaaac

SEQ ID NO: 2939 - DNA, 200 bp, synthetic construct
  misc_feature 1..200: note = Poly A sequence
  source 1..200: mol_type = other DNA
agatttatcttgttgtctaagcatctgactcactccccgggacgggactgattctagcctttggttccccgagaggagaggtctggggatgggctccggcctgagggaggaagggcagaaaaccgggacccttgggtcctggaggggaccaactgactgcgatgtaattccagaatcaaggaatggggcagggccaaccc

SEQ ID NO: 2940 - DNA, 200 bp, synthetic construct
  misc_feature 1..200: note = Poly A sequence
  source 1..200: mol_type = other DNA
gccagaggctgtttactatgacatctcctctttatttattaggttatttatcttatttatttttttatttttcttacttgagataataaagagttccagaggaggataagaatgagcatgtgtgagtgtctgagggaagacatggcagctgttttgtctcccttggcccggacaatcccctctacacctcccctcacgtg

SEQ ID NO: 2941 - DNA, 200 bp, synthetic construct
  misc_feature 1..200: note = Poly A sequence
  source 1..200: mol_type = other DNA
aagctggctgttgaataactcaataaaataccatacccttgccagcttctgtgcctcctcatttggaggaagggccccgacatgccttcttttgcaccaccttaataaccaacactgaccgggcaaggtggctcacgcctgtaatcccaacactttggcaggctgaagctggtgcatcacctgaagtcaggagatcgaga

SEQ ID NO: 2942 - DNA, 200 bp, synthetic construct
  misc_feature 1..200: note = Poly A sequence
  source 1..200: mol_type = other DNA
ggtggggaccggggagcacctgcctgtagcccccatcagaccctgccccaagcaccatatggaaataaagttctttcttacatctaacaacaccatctcctttcactatttatccccaaccgcctgccaaccaggccatggcaaaggcccccagtcccagctctgagcatgagagctggctgtgctagctcttgcctaag

SEQ ID NO: 2943 - DNA, 200 bp, synthetic construct
  misc_feature 1..200: note = Poly A sequence
  source 1..200: mol_type = other DNA
gcgcgctgcccgtccccatcttaataaagaccatgccctgcgctccggactgcgcctagttcctgcgcgacctgcgtgtgcgttgggttgggggcgcggggcttgaaatggggggtagaaaagagtcaggactctgtgtcggccactctggcatctctctcctcagtccccactctattttctttcctcaattccgtttc

SEQ ID NO: 2944 - DNA, 200 bp, synthetic construct
  misc_feature 1..200: note = Poly A sequence
  source 1..200: mol_type = other DNA
tcagggtgtctccttgtgcttctgagatgtggagaagaggctgctggcttccctaaaagttgaaataaaagatttttgcctttgttctgtctctgactggggatatgtgggtgttgggagggaagagggacattgggctgtgcccctccagtcctatagaggtcactgccccagctcaggcctcatccttccccctggat

SEQ ID NO: 2945 - DNA, 200 bp, synthetic construct
  misc_feature 1..200: note = Poly A sequence
  source 1..200: mol_type = other DNA
caattaatggtggccatgccgcttctgccggtgccttcttgatcagggtgtctccttgtgcttctgagatgtggagaagaggctgctggcttccctaaaagttgaaataaaagatttttgcctttgttctgtctctgactggggatatgtgggtgttgggagggaagagggacattgggctgtgcccctccagtcctata

SEQ ID NO: 2946 - DNA, 200 bp, synthetic construct
  misc_feature 1..200: note = Poly A sequence
  source 1..200: mol_type = other DNA
cccaataaagactgttaattcctcatgcgttgcctgcccttcctccattgttgccctggaatgtacgggacccaggggcagcagcagtccaggtgccacaggcagccctgggacataggaagctgggagcaaggaaagggtcttagtcactgcctcccgaagttgcttgaaagcactcggagaattgtgcaggtgtcatt

SEQ ID NO: 2947 - DNA, 200 bp, synthetic construct
  misc_feature 1..200: note = Poly A sequence
  source 1..200: mol_type = other DNA
gctggacatcggcccgctccccacaatgaaataaagttattttctcattcccaggccagacttgggatcttccgcgcctttaccagagcattggtgggggtgggggtgtgcctcggggaattgggcagagctgctgtcagagaggctgcctgcccatgtctgtgggtgaggacagtggagcctgaactgagatgcctgcc

SEQ ID NO: 2948 - DNA, 200 bp, synthetic construct
  misc_feature 1..200: note = Poly A sequence
  source 1..200: mol_type = other DNA
gtgtgtgcgggagtccaaataaaccggcttgggtgcgcaacgacgtggcgccttcattcgcggcgtgggcgccccggggacagggcaggcgaggatgcagggccgtgcaaacagtgctcctacagcgcacgctggagtttgaaagagcgggctaagcatattgaatgtggtctcacattaagaacaaaatctggccaggc

SEQ ID NO: 2949 - DNA, 200 bp, synthetic construct
  misc_feature 1..200: note = Poly A sequence
  source 1..200: mol_type = other DNA
actggttcctgctatgatcacttgtgcgtgtctggtgttgggtgccctctgacccaatatggttgttattcccgctcagggtctcagtttacccatctgtgcagctatatacaactcaggtgctcaatgcatgaagaccaagcactgcagggggcagctgacacctcctcacttctgcccagggacctggtgggtgatgg

SEQ ID NO: 2950 - DNA, 200 bp, synthetic construct
  misc_feature 1..200: note = Poly A sequence
  source 1..200: mol_type = other DNA
gccctcgctcctcatggtgtgcctccaacccccctgttccccaccacctcaaccaataaactggttcctgctatgatcacttgtgcgtgtctggtgttgggtgccctctgacccaatatggttgttattcccgctcagggtctcagtttacccatctgtgcagctatatacaactcaggtgctcaatgcatgaagaccaa

SEQ ID NO: 2951 - DNA, 200 bp, synthetic construct
  misc_feature 1..200: note = Poly A sequence
  source 1..200: mol_type = other DNA
acctcatgtccctgccctcttcgtgtgcttttccaagtcttcctattccactcagggctgtggggtggtggttgccctacctgtttttgccaaaaataaattgtttaaaacttttcttattaaaaacgttacaaagtattcaattgtctgttcttacacttgggaactaaagttttaaggagaggagatttggttcagag

SEQ ID NO: 2952 - DNA, 200 bp, synthetic construct
  misc_feature 1..200: note = Poly A sequence
  source 1..200: mol_type = other DNA
tccttccagcaggcagctggcctctccaaggaataagggtgaaattgccacagctggctgacacaggacaggggcaactggtttggcaaccccacatccaggccaataaagatgtgtgagctgggtgtgtggtgtctgctatgctcttgggcagggcaggggtagaagaggtaaggaccagggtggaggaggacagaagc

SEQ ID NO: 2953 - DNA, 200 bp, synthetic construct
  misc_feature 1..200: note = Poly A sequence
  source 1..200: mol_type = other DNA
acaggacaggggcaactggtttggcaaccccacatccaggccaataaagatgtgtgagctgggtgtgtggtgtctgctatgctcttgggcagggcaggggtagaagaggtaaggaccagggtggaggaggacagaagctcccatccattcccaggcccagccagggattcccagttgcagtcacagcttcaaccacagcc

SEQ ID NO: 2954 - DNA, 200 bp, synthetic construct
  misc_feature 1..200: note = Poly A sequence
  source 1..200: mol_type = other DNA
atggcctctcatgctagcatgaattctgtctgctttttgggaccagagtcctagtgaattgcacacacaccatgcactccctctatgcccaatgtgatttatttattttaattaattaattaactttattattctttttgagtcagattctcactctgtcgtccaggctgaagtgcgtgtgatctcggctcactgcaacc

SEQ ID NO: 2955 - DNA, 200 bp, synthetic construct
  misc_feature 1..200: note = Poly A sequence
  source 1..200: mol_type = other DNA
tccccaacacccaataaagttcctttttaacacacgccccggctcccgtcactgacatccctcaggactgggcaggaggaaaccccagggggcatctctgtccttgttctcacttcagcagacatccctggggccctgggtgaatgacgctggggcctccgtggtgagtcacaggcagtctggtgcaacctgattcgtgg

SEQ ID NO: 2956 - DNA, 200 bp, synthetic construct
  misc_feature 1..200: note = Poly A sequence
  source 1..200: mol_type = other DNA
tgacacgcttctgagcaggggcccctggggacttcaactgcccagcaacatggaggatggtgtcctgaggcctccaaggacggtccccacccctctacgtttccccaataaagccttttaaaaacctgcctgccttctctgctcactgcccgatgccttgcagccccctagctctaaggtggcccagcaggctggacagc

SEQ ID NO: 2957 - DNA, 200 bp, synthetic construct
  misc_feature 1..200: note = Poly A sequence
  source 1..200: mol_type = other DNA
gccccgcccagctcccctccacaataaacgctgtttctccttgagcttggccggcattttgctggaaggagggtggtccccacgggggaggggctccaggcctgccagtttcttacatggaggaggctttaaggacattttcaggtaacaaaaggtggggccctaccgaggggagtccagctgggacctggcatgagcac

SEQ ID NO: 2958 - DNA, 200 bp, synthetic construct
  misc_feature 1..200: note = Poly A sequence
  source 1..200: mol_type = other DNA
cttgcaagcatcccatggggcgggggcgggaccagggagaattaataaagttctggacttttgctatatggtgctttgtggtctctgggggacactgtctggtttcataagccctggccttggctgggaccctcctgaggcccgcaccgcccctcatcctcagcaaaagcccccggactcccacctgtgctgcctggttc

SEQ ID NO: 2959 - DNA, 200 bp, synthetic construct
  misc_feature 1..200: note = Poly A sequence
  source 1..200: mol_type = other DNA
ttctaggataagcactagatctcccttaataaactcacaactctctggttccttgcctgtctctgttttggccctgtggggagggctggatggggatccgggattgttcctgctggcagactaggtggggatgtgcagaaaccaagttctcatggtcactttggccatcaccactgcctaaagtgatccctcgttttctg

SEQ ID NO: 2960 - DNA, 200 bp, synthetic construct
  misc_feature 1..200: note = Poly A sequence
  source 1..200: mol_type = other DNA
gacccacgagcggggtgagagaagtgtgcaatagtctggaataaatataaatgaaggaggggccatgtctgtccatttgaagtcctcatgctggttgagtctggaagaaggactcagcagtttccctatctcataggagtagaaacagagctcaaataaggccaggcacagtggctcacacctgtaatcccatcactttg

SEQ ID NO: 2961 - DNA, 200 bp, synthetic construct
  misc_feature 1..200: note = Poly A sequence
  source 1..200: mol_type = other DNA
ctccactcttgttggcctgggaacttcttggaactttaactcctgccagcccttctaagacccacgagcggggtgagagaagtgtgcaatagtctggaataaatataaatgaaggaggggccatgtctgtccatttgaagtcctcatgctggttgagtctggaagaaggactcagcagtttccctatctcataggagtag

SEQ ID NO: 2962 - DNA, 200 bp, synthetic construct
  misc_feature 1..200: note = Poly A sequence
  source 1..200: mol_type = other DNA
aagttgagaaatgtaccggcttccatcctgtcaccatgacttcctcacatggtctgcttagcccttctctgctccttattcccagtgttccatttgaaccagtgatccatgtcctgaaaaatgctcaatctcagctaacattccatgtttcagaagcattcaggcactgccaggcttgcagtctcccagatgttgcatcc

SEQ ID NO: 2963 - DNA, 200 bp, synthetic construct
  misc_feature 1..200: note = Poly A sequence
  source 1..200: mol_type = other DNA
gcccctcccagagatggcaataaaactgactctcaacatctatctctgttaacttatttcctagagtcccattatttggttcattcaacatttacttgagtcttttgtgtgccaggccctgtggatccagtccctgcccatgaggagcctctgtattgatgcgggggacaatgaggacaaaggcagctgtaattcggggt

SEQ ID NO: 2964 - DNA, 200 bp, synthetic construct
  misc_feature 1..200: note = Poly A sequence
  source 1..200: mol_type = other DNA
ctgcagcctgcctggggcagaataaaggaacggctttttttagcgctgcggctccgcgtgcttttctgcgggtcgtggggacgcaggcacggggttgcatagaggctcagggaagacataaggacatgaactcatagggaacgtggagtcagggagtcacagacatggagtcacaagtctccatggattgggatgggaac

SEQ ID NO: 2965 - DNA, 200 bp, synthetic construct
  misc_feature 1..200: note = Poly A sequence
  source 1..200: mol_type = other DNA
gcccgtccgtgatgatgggaacatgcccgacgtgcccagccacccccaggaccctcagggccccagcctggagtggctgaagaaactgtgagcacctccactgacagaggcggcccctcccacggctcccaataaaaatgtgaaaaccaacccccgaacgtgagcatgtgtgtgatcagaggtgggaacaagtagacggt

SEQ ID NO: 2966 - DNA, 200 bp, synthetic construct
  misc_feature 1..200: note = Poly A sequence
  source 1..200: mol_type = other DNA
gatgggaacatgcccgacgtgcccagccacccccaggaccctcagggccccagcctggagtggctgaagaaactgtgagcacctccactgacagaggcggcccctcccacggctcccaataaaaatgtgaaaaccaacccccgaacgtgagcatgtgtgtgatcagaggtgggaacaagtagacggtggccggggtgagt

SEQ ID NO: 2967 - DNA, 200 bp, synthetic construct
  misc_feature 1..200: note = Poly A sequence
  source 1..200: mol_type = other DNA
cacctccactgacagaggcggcccctcccacggctcccaataaaaatgtgaaaaccaacccccgaacgtgagcatgtgtgtgatcagaggtgggaacaagtagacggtggccggggtgagtgtggggtcagtttattgggcatgcgtcagtcagaggctgggctggccagggtcgggtagggcagcagtttgtctggacc

SEQ ID NO: 2968 - DNA, 200 bp, synthetic construct
  misc_feature 1..200: note = Poly A sequence
  source 1..200: mol_type = other DNA
cgcatgcccaataaactgaccccacactcaccccggccaccgtctacttgttcccacctctgatcacacacatgctcacgttcgggggttggttttcacatttttattgggagccgtgggaggggccgcctctgtcagtggaggtgctcacagtttcttcagccactccaggctggggccctgagggtcctgggggtggc

SEQ ID NO: 2969 - DNA, 200 bp, synthetic construct
  misc_feature 1..200: note = Poly A sequence
  source 1..200: mol_type = other DNA
attaaggttgaggaagactttggctttgaagcagatgaggccctggattccagttgggtttctcggggtccagacaaactgctgccctacccgaccctggccagcccagcctctgactgacgcatgcccaataaactgaccccacactcaccccggccaccgtctacttgttcccacctctgatcacacacatgctcacg

SEQ ID NO: 2970 - DNA, 200 bp, synthetic construct
  misc_feature 1..200: note = Poly A sequence
  source 1..200: mol_type = other DNA
tccacctgtccctcctgggctgctggattgtctcgttttcctgccaaataaacaggatcagcgctttacaattggtgtgtgggggtctctcatccttgactctttcccctgctctaaacatgcagccttccctgggaggctcactcacttgggagtgcctaccagctagtggtccctggcctctcagtactattctacag

SEQ ID NO: 2971 - DNA, 200 bp, synthetic construct
  misc_feature 1..200: note = Poly A sequence
  source 1..200: mol_type = other DNA
ggatgccgccccggacagtggcacctgggaagcctgggagtgtttgtcccatcggtagcttgaaataaacgctcccctcagacacccgctgggttctctgatgttattatggttgagatgcagctggtctctcctggttaattgacttcttattaccaacaagttacttgaaagagtgtcaccaataatcattaaagtac

SEQ ID NO: 2972 - DNA, 200 bp, synthetic construct
  misc_feature 1..200: note = Poly A sequence
  source 1..200: mol_type = other DNA
gagaggcagtgattcccctcccgccccgcacagagtccccgactcactgccagccggggcggggcagggtgccgcaggctgggcttgctaataaagacccgagtctccccgcctgtgttttgttttcctggggggagggaagggggcaaagtcatggtcctagcccccgcctgggagcgtggagtcttaagtcttgcgtc

SEQ ID NO: 2973 - DNA, 200 bp, synthetic construct
  misc_feature 1..200: note = Poly A sequence
  source 1..200: mol_type = other DNA
ccctgtctgcctctgttccctttgtgtgtgttcagggagctctcctggctctgccacctcatttgtctttatttttttctcttttaagatgtaagatgctaattaataaaagctgaatcatttcataccagctcttcatagttgtgtgagttattatgtgactgggtagaatctttatttcttgtgggaactctttccca

SEQ ID NO: 2974 - DNA, 200 bp, synthetic construct
  misc_feature 1..200: note = Poly A sequence
  source 1..200: mol_type = other DNA
tttcccagctgctgcccaataaacctgtctgccctttggggcagtcccagccacctgtgctgttgtctgtcttcggtggggggatgtgggtggcatagccctggtggccttgggagctgctcaccttcctgacctgttggcctgtggggacctggaagtattgctgactcagaaccatggcaccccagggctagcaggtg

SEQ ID NO: 2975 - DNA, 200 bp, synthetic construct
  misc_feature 1..200: note = Poly A sequence
  source 1..200: mol_type = other DNA
gtgcccctgccactccgagataaccagtggatgcccaggatcttttaccacaacccctctgtaataaaagagatttgacactagtctccaggcccatgtgacttttggcctgatgtgggaccagactggggtccctgggaggatgggcatcactaaggcaagaggcacttggtactaagctaagggtgggggtttggggc

SEQ ID NO: 2976 - DNA, 200 bp, synthetic construct
  misc_feature 1..200: note = Poly A sequence
  source 1..200: mol_type = other DNA
agcgtatactattttcttctttgagaattacaaaaaaattatttctacactgacaggatttactagttaagcaatgtttaatataaattttaaaaaacttctgttctacaaaatttccattccgtatgtaaaagattttgtttttctatataaaaagagctgactgacatatctttaaatactttgtactaactttatca

SEQ ID NO: 2977 - DNA, 200 bp, synthetic construct
  misc_feature 1..200: note = Poly A sequence
  source 1..200: mol_type = other DNA
atgaggttttttgcattccaaggaaatggcatatggattaactgtaagaaatgaaataagtaatttattgtaagacaacatcaagccatggaaacttggcagaagattcaaagcagcttaaacagcacttttaaattaactcctaagcgttacatggttgtgactatggaaactccagttaagacaggatcttatcagag

SEQ ID NO: 2978 - DNA, 200 bp, synthetic construct
  misc_feature 1..200: note = Poly A sequence
  source 1..200: mol_type = other DNA
caaaaatgactaaataaaaagtatatattcacagtactctgtttcagttatgtttttcaaaattccaaattcacggatgcgcagctgtcttcattatcagtggcgtcctgtgtgggccagaggatttcagtaggaggggtgtctgtgccagaaagcttgatgcctgtgaggttctgcttgtattcaggggtacaagtgtc

SEQ ID NO: 2979 - DNA, 200 bp, synthetic construct
  misc_feature 1..200: note = Poly A sequence
  source 1..200: mol_type = other DNA
actgtgcctgtatatgaactttgaaaaaatacttgactctacttttgttacctaaaataaaatgcattcgtttctctgggggagcctgtttacttttaatgtcaaatggcctttatttcaacagcctgaatactgctaaattgctaattaatttgtccattattctagaactaactactagatcaactgcccattatttt

SEQ ID NO: 2980 - DNA, 200 bp, synthetic construct
  misc_feature 1..200: note = Poly A sequence
  source 1..200: mol_type = other DNA
atgtcccaagcagcctcttgccagcagtgcagagcctggttgtcacccattaaaggataggtctccccggagtgcacagctccacctgggagcctggcgcgtcatcattggcctgacagcagagagaattgagaagcatttctcccctgccccaccccggggctgacatttctaagcaagataggaagggagcactttct

SEQ ID NO: 2981 - DNA, 200 bp, synthetic construct
  misc_feature 1..200: note = Poly A sequence
  source 1..200: mol_type = other DNA
gggccacctgtggccctgctccttagcagaaaaagcatctggagttgaatgctgttcccagaagcaacatgtgtatctgccgattgttctccatggttccaacaaattgcaaataaaactgtatggaaacgatgagcaagctgccgcttttttaaccttttttttctttcttgtactgagtggtgaacatattttcttat

SEQ ID NO: 2982 - DNA, 200 bp, synthetic construct
  misc_feature 1..200: note = Poly A sequence
  source 1..200: mol_type = other DNA
ttcagagcatgagtcttttagttcagagcagagcctgatgcctgagatcctgggtcgtgaccagcctggcttgcttggaataaaatctttagccatgaccatgctacccatctctcctctggatcccagggacactcggccacagcaggaaatgccccctgaaggtcacacagcattgtgtcctgagggcctgcggaaag

SEQ ID NO: 2983 - DNA, 200 bp, synthetic construct
  misc_feature 1..200: note = Poly A sequence
  source 1..200: mol_type = other DNA
acttttagttcagagcagagcctgatgcctgagatcctgggtcgtgaccagcctggcttgcttggaataaaatctttagccatgaccatgctacccatctctcctctggatcccagggacactcggccacagcaggaaatgccccctgaaggtcacacagcattgtgtcctgagggcctgcggaaagctctgtcccaggg

SEQ ID NO: 2984 - DNA, 200 bp, synthetic construct
  misc_feature 1..200: note = Poly A sequence
  source 1..200: mol_type = other DNA
aagagtaccatttggggtctcagttcactctttccttgtttattaaatatcaacttttcctgcctaatgggctgaggttcattttcccattcctcaaggtaagggtagactacctaggaacttattgcatctttaggccagctggcttagtgctacccatctgaacccccagattactacccaagtcttccttttgcccc

SEQ ID NO: 2985 - DNA, 200 bp, synthetic construct
  misc_feature 1..200: note = Poly A sequence
  source 1..200: mol_type = other DNA
cgggggaaacacagggttaataaatgccatactccctaccctcagcaactctgctgcctttgtttctcttttagcatctccaccacttaagttaggagtccagacttcacaaccccttttatcacctgctactcagacctttgtgaagacctgctcaagtaactagctccatgccagtacattgggactaacctgaagac

SEQ ID NO: 2986 - DNA, 200 bp, synthetic construct
  misc_feature 1..200: note = Poly A sequence
  source 1..200: mol_type = other DNA
ttggtagagctgaggaagagttagggcctctccctcattaaagttttataaataattgagtccactgtattctttgatcaaagtcattcccaacaccacacagtgccttttccccaaaaggaatcataatcaagtagaagaaaagagaagttactttattacaatttgttatctcatcccgaggtcagggccccttgctt

SEQ ID NO: 2987 - DNA, 200 bp, synthetic construct
  misc_feature 1..200: note = Poly A sequence
  source 1..200: mol_type = other DNA
acctcccacagcccagtgtgccaggacgtgctgaaattcatcagtcagtggtgtggagggctccccagcaccagcttttcctttcagtagttggtagagctgaggaagagttagggcctctccctcattaaagttttataaataattgagtccactgtattctttgatcaaagtcattcccaacaccacacagtgccttt

SEQ ID NO: 2988 - DNA, 200 bp, synthetic construct
  misc_feature 1..200: note = Poly A sequence
  source 1..200: mol_type = other DNA
gatggatctgaaatgggcaattattatttatcttatttttttgatggactattctcctggttactttcccccttagagttccagatgtacatggtatattttgaagtagaaataaaagaattacttatttttctaaggttttattatcttgtacttttttaatcacagagaattttccagtaactaggtttgtgatgaac

SEQ ID NO: 2989 - DNA, 200 bp, synthetic construct
  misc_feature 1..200: note = Poly A sequence
  source 1..200: mol_type = other DNA
tctgctggaagcagattctggaaaaggtgctttcacctgctggtaaaagatacatctgtatatctgaaatgcaagatattgatttttaaaataaatttgttttatgacttaacattcttggttttgtgatgttttcaattttatatgctttctgaagtatattaaatttttaaaactccctatttcgttaggtctaatta

SEQ ID NO: 2990 - DNA, 200 bp, synthetic construct
  misc_feature 1..200: note = Poly A sequence
  source 1..200: mol_type = other DNA
atttcagcttggacattttacccttcagtcggcccaagaaatcaaaataaaggaaacacatttcatatactgcaggtaacaaaagtcaaagtattttatcttttcacagcaagaacagtccatgttgtatataatacaaccaacattatagaacttttagggttgtgactggctttggtgcaaatgtgtgctcaagctaa

SEQ ID NO: 2991 - DNA, 200 bp, synthetic construct
  misc_feature 1..200: note = Poly A sequence
  source 1..200: mol_type = other DNA
cagttcatctcctcacggactccactctctttttttttcatgcttgctgtacaatgagaactcaaataaaaataaaccaaagtttacaatcaactgtagaagtagtttagtgtaactggcttcacagatggctgccacagagtgtgaagattgtttgttagttttaagcattcttttaatggctcctaagacatgcagat

SEQ ID NO: 2992 - DNA, 200 bp, synthetic construct
  misc_feature 1..200: note = Poly A sequence
  source 1..200: mol_type = other DNA
tgtgatgttaaattaaagttgaaatgtagtaattgaagcttttagttgtaaggaaagcaacttaatctgttatttgaaatgacttcatacactacccctataagtttgccaataaaaccatcacctgcttacacctttttgaactttatattcattgtcttacaattagtttaaaataaatgacatgattcaattcagtc

SEQ ID NO: 2993 - DNA, 200 bp, synthetic construct
  misc_feature 1..200: note = Poly A sequence
  source 1..200: mol_type = other DNA
agtgatcttggcaccaagctctactttgaggtttagtacgttctcatgtttagaaaactgtattttgtctattccttggaggggtctggccacaaaacatgattgattgcttgaggtgactgtcctgcttgcttatctgggatagtcccagcataattaccagttctctctcaaaagtgtcctggtctgagcaataaatt

SEQ ID NO: 2994 - DNA, 200 bp, synthetic construct
  misc_feature 1..200: note = Poly A sequence
  source 1..200: mol_type = other DNA
agaccttgtacagaatgtgttaaatttcttgtacaaaattgtttatttgccttttctttgtttgtaacttatctgtaaaaggtttctccctactgtcaaaaaaatatgcatgtatagtaattaggacttcattcctccatgttttcttcccttatcttactgtcattgtcctaaaaccttattttagaaaattgatcaag

SEQ ID NO: 2995 - DNA, 200 bp, synthetic construct
  misc_feature 1..200: note = Poly A sequence
  source 1..200: mol_type = other DNA
ttctatatcttaaccagctgagggagcttgtacaacaccttatgtatgctggttgggaaaaactgattttaacgtaactaacttataaataaatctagagtaagaagatctcagaaataaatcacacttttgttatgatgacatttagatttgtctttgaaatatttatactattgcttccttttccccatatggtcatt

SEQ ID NO: 2996 - DNA, 200 bp, synthetic construct
  misc_feature 1..200: note = Poly A sequence
  source 1..200: mol_type = other DNA
aattacattaaaaatgtaaataactcaacgtgttgtttgtttgaaggtagaaatgcactactactggccaaaaagtatctaagttgttttaccatgtgttcatatgcatttgcacaaactgtcaaagtgctcagaaataggaaaccttatttaaggatgcctccaactagaaatccttgaatggaaagactggcaatatg

SEQ ID NO: 2997 - DNA, 200 bp, synthetic construct
  misc_feature 1..200: note = Poly A sequence
  source 1..200: mol_type = other DNA
aattaagaacaatttaacaaaatggaagttcaaattgtcttaaaaataaattatttagtccttacactgagccttttagtttcgaacacttttgtaaatccaaatatcttaaacactttaggtaaaggacagtagggaaggcagctactcatactgattagtttaatacaaattcctggatgttttcccttggaaagagg

SEQ ID NO: 2998 - DNA, 200 bp, synthetic construct
  misc_feature 1..200: note = Poly A sequence
  source 1..200: mol_type = other DNA
aatccaaattcatgctgttttttttctctgcaactcgttagcagaggaaaacagcatgtgggtatttgtcgaccaaaatgatgccaatttgtaaattaaaatgtcacctagtggccctttttcttatgtgtttttttgtataagaaattttctgtgaaatatccttccattgtttaagcttttgttttggtcatctttat

SEQ ID NO: 2999 - DNA, 200 bp, synthetic construct
  misc_feature 1..200: note = Poly A sequence
  source 1..200: mol_type = other DNA
aataatctggattttctttgggcataacagtcagacttgttgataatatatatcaagtttttattattaatatgctgaggaacttgaagattaataaaatatgctcttcagagaatgatatataaatattgcatgtttgctttacctcatatgagttatttataacctcttgaatcatcttctgtacacgtggattttat

SEQ ID NO: 3000 - DNA, 200 bp, synthetic construct
  misc_feature 1..200: note = Poly A sequence
  source 1..200: mol_type = other DNA
aattgaagtgttgaaggatgattttttttcccctcatcttggtcagagagtggattttgtattttgtatttaacttgcattcaaaaaacaggatctcagttctcctttcttgtaaagtaagaaaatcttatttatgatatatgcagttaacttaccttgcctcaacagaagaaaggttaaatattacatttttttctttt

SEQ ID NO: 3001 - DNA, 200 bp, synthetic construct
  misc_feature 1..200: note = Poly A sequence
  source 1..200: mol_type = other DNA
aagtatttgccagtggccatcagggctgagggcaagaatatattttttataaggaattgggaattttagtcttttaagcaaagtttacgaatgaagaaatgaaggatggccacaagcgtaaggcatatgtcacttgcctctggacactggttattttatgtttcagtccctaaaaaatgaaatggaaaaaagtggtgcta

SEQ ID NO: 3002 - DNA, 200 bp, synthetic construct
  misc_feature 1..200: note = Poly A sequence
  source 1..200: mol_type = other DNA
gggctggtcccggctccaccccctccaagctcagtggacactgggtctgaaaggaaggagtcttttgcttcctttctcctttttacaaaaacaaacatagaagaaaataaatgcactttatccactccccaattggactgcattatcaaacacatgtgctatgtacatcctcagtgcacctgccagcagatatcctggag

SEQ ID NO: 3003 - DNA, 200 bp, synthetic construct
  misc_feature 1..200: note = Poly A sequence
  source 1..200: mol_type = other DNA
atattttgaatataatgtaaatattaatgtgtaagcttatattgtgtcattgttctgttttataataaaattcttgagaaccttcctttgcatcgatgacagatatttgagggttccatagtgtgaaaagacaaacccctaaccatttgcaaagcccttccggttttcactggtatgaagcaggacctggctcctcccca

SEQ ID NO: 3004 - DNA, 200 bp, synthetic construct
  misc_feature 1..200: note = Poly A sequence
  source 1..200: mol_type = other DNA
gcagtcaccaaaaaatttatatattttgctcatatacatttccatattataattatagaagatgtataatctatttagatgttaattaaaggaaacaaacaactgaagcttttgaagggtcattagtaatgtttcaggttcctttattttggccaaaggggtcttgtctttagacagttctgtcctgctacagagagaga

SEQ ID NO: 3005 - DNA, 200 bp, synthetic construct
  misc_feature 1..200: note = Poly A sequence
  source 1..200: mol_type = other DNA
ccgtagcacagctaatgaagaactcagcccccaaagtgtggtcacgctcctctaagcctgctgcctccctctgatccctgagcctctggcagtagtaactggtccctccctctgctagccagaaataaacacctgagttgccttaggaactagtctgatgtctcttgtcagtttcttccaagggtgtccaccctctcact

SEQ ID NO: 3006 - DNA, 200 bp, synthetic construct
  misc_feature 1..200: note = Poly A sequence
  source 1..200: mol_type = other DNA
gcccttaacccggactctgcgccccgtcccatgcccgctcttgagtatcttccccaccctattaaattacatccggtgcttcggcttgtacagaactgggggagtgggatgttgtgggcagaccagtctccggtatacacgtattttgcccctgtcggagcttgcgtcgatgcctggggcttggaaaccaccgcaaaaaa

SEQ ID NO: 3007 - DNA, 200 bp, synthetic construct
  misc_feature 1..200: note = Poly A sequence
  source 1..200: mol_type = other DNA
tactggtcgctgacagcgccaaagagtccaacaagatgattttagcgtggactaggacacttaacctaagaagagtttcacttaatcattcaaatcactatctgaagggtcacggagcgcaaaataaagtttaaaaccctgctaccacaatgtttctggaacaagactagatcagagaggtgtctggatgaacctgaatt

SEQ ID NO: 3008 - DNA, 200 bp, synthetic construct
  misc_feature 1..200: note = Poly A sequence
  source 1..200: mol_type = other DNA
gggccaagcccccaccccatcccactccccttccctccccagatatttatgtgaaatgaactgcagctttattttttgaaataaaaacttttaaaaagcacctctcttctgccttattcttcctgcctcacactcatgctgtgtcctgccttcttcaaaaatcctctgagtttcattgtgaagaagggcctgtcctctat

SEQ ID NO: 3009 - DNA, 200 bp, synthetic construct
  misc_feature 1..200: note = Poly A sequence
  source 1..200: mol_type = other DNA
gggtgggcgtcttcctgccccatgctcccctgccccccaccacctgcctgcttgcttctctggctgcctggtcagtgcagaggtgccccctgcagatgttcaataaaggagtcaagtgctttcccagctcttttcctgcaccacctgccctgggctgattctcactgtcacccacctattcacctgggttcatccccatg

SEQ ID NO: 3010 - DNA, 200 bp, synthetic construct
  misc_feature 1..200: note = Poly A sequence
  source 1..200: mol_type = other DNA
agggggccagatgttgggtgcagatgtagaagcagccagtcacagacccattctatgcaatggacatttatttgaaaaaaattctcaaaagttttttttttttttttgggggggcggggttctaaagctgtttttaactccgagattacaacttagaggaaccaaggaaataaagcaaataagatttaacaacccaagat

SEQ ID NO: 3011 - DNA, 200 bp, synthetic construct
  misc_feature 1..200: note = Poly A sequence
  source 1..200: mol_type = other DNA
gaggttggggctgagtgctggccctctgcgtcttccttattaaccttgaatcctcattaaaggtttctttacccaccctgaggctgtattgatcacagacctggccaggggctctgcatcctccatcaggtctctacttctgttggggaaggtgatcctaaatcgcagaaggcaccaggctgcggttttcctccctgctg

SEQ ID NO: 3012 - DNA, 200 bp, synthetic construct
  misc_feature 1..200: note = Poly A sequence
  source 1..200: mol_type = other DNA
ggtttctttacccaccctgaggctgtattgatcacagacctggccaggggctctgcatcctccatcaggtctctacttctgttggggaaggtgatcctaaatcgcagaaggcaccaggctgcggttttcctccctgctggcccatctggactcatggcagtggtaaagaactggattactgcaatagccagggcttgggc

SEQ ID NO: 3013 - DNA, 200 bp, synthetic construct
  misc_feature 1..200: note = Poly A sequence
  source 1..200: mol_type = other DNA
cctctctggccttgtgcagccagttcctgtgctgccctgcacctaggagagtctcagcccctcacagcttgggatgttaccttgccttttgtttgttttgagggaagtttaatctttaaactctttggaaataaataattatagctttcatttgttgagcacatgttatatgccaatgtgatagaacctttacatacata

SEQ ID NO: 3014 - DNA, 200 bp, synthetic construct
  misc_feature 1..200: note = Poly A sequence
  source 1..200: mol_type = other DNA
gtaaagaccattaaaaaaaaaacagaggaaggtatttctaattccttgggctacaaaagtgtttacttttcagatatatcagtggtatatgtgaccttcaccttgccagtgggggctatgatgagtcaccttaaggagcgtgtgaggtggtcatgaggatgggcataatgaccctgcagggcctagtcaaggatgggtca

SEQ ID NO: 3015 - DNA, 200 bp, synthetic construct
  misc_feature 1..200: note = Poly A sequence
  source 1..200: mol_type = other DNA
ctgttgtaggtaactctaattgagcccgaaaccagaataaaaactcttacattggaaacatttcaaaaccattggattgttggattatttgttaccatttttctctgaacacattttagcaatgacatatgaaagtattcagttgtgtttactaacttcaaaaatgaaatcgctccatcaaatttcgtttttctagtcgg

SEQ ID NO: 3016 - DNA, 200 bp, synthetic construct
  misc_feature 1..200: note = Poly A sequence
  source 1..200: mol_type = other DNA
tgggtggtagcctaatttgtattatgtctactttaagtgaatattggattttttttaaaagatcacttttataatgtatgaatttaacaataaacttttatatttctactaatttatggatccatcattcagttgtgggaacaatcctaaatatttttgtaaatatattactcagcagatttacaatgtttctttcaagt

SEQ ID NO: 3017 - DNA, 200 bp, synthetic construct
  misc_feature 1..200: note = Poly A sequence
  source 1..200: mol_type = other DNA
ataaatggaatgaaataattcaaacacaaactccgtacgtcttctcttatggaagtggctgtgtctttttgagggactctgttctttgcctcagttgtctaccaaaggtgccacatttatagtggctttgtagtaaaggactaaagtcttacattctgttttttttttccctaaaaatcagtgacaacagtagatgtgcc

SEQ ID NO: 3018 - DNA, 200 bp, synthetic construct
  misc_feature 1..200: note = Poly A sequence
  source 1..200: mol_type = other DNA
cagtggcagcctctagccctcagcttcccacggaatcagatggatcctccacgattacgtgaataaaatgatggaaccaaaaatcactgtcactttacaacttaggttttactcttttctttctacagaccatatttttaaagaaatgtttatacaataatttaaatattttttaaaaccataaaataaatttttataag

SEQ ID NO: 3019 - DNA, 200 bp, synthetic construct
  misc_feature 1..200: note = Poly A sequence
  source 1..200: mol_type = other DNA
aatttggatatagacagtccttaaaaatcacactgtaaatatgaatctgctcactttaaacctgtttttttttcatttattgtttatgtaaatgtttgttaaaaataaatcccatggaatatttccatgtaacttagttgttataaatatttcaacaaaatatacaaccccataaggtccctatatagcaggctgattgg

SEQ ID NO: 3020 - DNA, 200 bp, synthetic construct
  misc_feature 1..200: note = Poly A sequence
  source 1..200: mol_type = other DNA
gactcctctgacggcaggaaaactggacatgaatgactgcccccacgcccctcccctgcagagtggccagatggagtcctgagccctggacatgggcccggctttcctggatatcaggacttccaataaataaagactctgtatactgggctttgattcctgccatccgtacctgagagggtcctaggagagctggctgg

SEQ ID NO: 3021 - DNA, 200 bp, synthetic construct
  misc_feature 1..200: note = Poly A sequence
  source 1..200: mol_type = other DNA
aaagcaaaaagatctgggatatgtgttggaaaactgctttcccttatgttcactgtgccataatgctgctcgcaggaaatggcattttacaaaaaaaaaatgaagaactcaaaaaaactttgaaaacttcagcactgttgcactttatgttttaaaaaatgtcactctttcaaaatctataactcatgtatttgaagact

SEQ ID NO: 3022 - DNA, 200 bp, synthetic construct
  misc_feature 1..200: note = Poly A sequence
  source 1..200: mol_type = other DNA
gaccctccctgcagggctgggcttttgcatggcaatggatgggacattaaagggacatgtaacaagcacaccggcctgctgttctgtccttccatccctcttttgggctcttctggagggaagtaacatttactgagcacctgttgtatgtcacatgccttatgaatagaatcttaactcctagagcaactctgtggggt

SEQ ID NO: 3023 - DNA, 200 bp, synthetic construct
  misc_feature 1..200: note = Poly A sequence
  source 1..200: mol_type = other DNA
gggagggtgtggtgggttctcccctgccacccccgggatggctgcttccaagttgtttgcaattaaaggttctgtataaaaccaagccctctgtgtgtcgtgcagcttagctctgcctacaggagccggtgggaccctagagcctgcatggacagcggtggggtgccagcctgccctgctgctggtgtggggttgggtgc

SEQ ID NO: 3024 - DNA, 200 bp, synthetic construct
  misc_feature 1..200: note = Poly A sequence
  source 1..200: mol_type = other DNA
agtgttttctagaacaacttaagcaaattatactgaaagctgctgtggttatttcagtattattcgatttttaattattgaaagtatgtcaccattgaccacatgtaactaacaataaataatataccttacagaaaatctgatataatttttcagagtctgtggcactaaggagtccacagggctgcctaggtgctttg

SEQ ID NO: 3025 - DNA, 200 bp, synthetic construct
  misc_feature 1..200: note = Poly A sequence
  source 1..200: mol_type = other DNA
ttcatataagacagatggatgatctgtgaacataagtgtttattaaaaatggcaattaaatataaattacttttgtgggggaatgcctaataaatacattgactatatataaaatgaatatatacatacacatgtatgcctgtatatatatattcattctccagtgttgctgaattaaaattctgctggactttttaaca

SEQ ID NO: 3026 - DNA, 200 bp, synthetic construct
  misc_feature 1..200: note = Poly A sequence
  source 1..200: mol_type = other DNA
tttttatttaaaatgaatgttatcgtgtgttacatttggacctattttaataaagtggcctgtctcaattaaaaaataggtacaaatgtcctaaggtgggaacatgcctggcatgtttgagaataacaaaggatccagtgtggctggagcagaacaagtggggagtggggtgggagtgtataagagaaaagataagagat

SEQ ID NO: 3027 - DNA, 200 bp, synthetic construct
  misc_feature 1..200: note = Poly A sequence
  source 1..200: mol_type = other DNA
atgtcagcaattgaaaagtgtatcacttaagattaggttcagcagcataaaactaaaaccccaaataccagaggcttaaaaaaaaaaaagagagagaatttttttttcctctcacatgaaagaattccagaggtaagtatttcagggttgctgtgttagtctaccaacctcagcacttggcattcaacccatgatccaag

SEQ ID NO: 3028 - DNA, 200 bp, synthetic construct
  misc_feature 1..200: note = Poly A sequence
  source 1..200: mol_type = other DNA
aagccccgcaaacaaaagtcgtttaaaacctatttaaaatgaataaaaaattggtttactaaactactggtctccagcaccattttctgttttctgttgtttggatgcaggttcttctttgtctgtttcttctcttgctcttttcacaggtcctataacgtaacaattaatttttgttaaattcaacgtaagtactgctc

SEQ ID NO: 3029 - DNA, 200 bp, synthetic construct
  misc_feature 1..200: note = Poly A sequence
  source 1..200: mol_type = other DNA
tcctgaaaaggggagtgtaactagtggatttgggaaaggttcttaagtagatcctgagtctatttgcatgcttctgtctaaatgataattaaaaggaaatttcatggattaaaccatgggtttaatgcagcaaggaaacttacaatgtccctttatatataacatgcatcttgttttggatttgtgtcattttttaatat

SEQ ID NO: 3030 - DNA, 200 bp, synthetic construct
  misc_feature 1..200: note = Poly A sequence
  source 1..200: mol_type = other DNA
ctgggaatgtagagctagccaacatatcacattctgaatgaataaataactatgcacaattatgtttcttatagctatgtgtggtttctgggtcaactgaaaacctaccatttgcttttctattcatctttataatggactttcagaagtgcattagacaaggcccctaaccactttgggatcctttctgttttgctgca

SEQ ID NO: 3031 - DNA, 200 bp, synthetic construct
  misc_feature 1..200: note = Poly A sequence
  source 1..200: mol_type = other DNA
atgaaaaatgaatacaccgtgttggtgttttaggtgcagttgtgccacaaaccttccctaaattatctaggtttgctttgatgaattaaattaaaatgagaaaagcaaaaagaaattaacctgtctgggtatcatattccctatctataaagtagcaattataacagtagtgtctatttcttaagttgtcatgaaaatta

SEQ ID NO: 3032 - DNA, 200 bp, synthetic construct
  misc_feature 1..200: note = Poly A sequence
  source 1..200: mol_type = other DNA
gctgtaggatgacaacactttgactgtggaggtgctagtttgaataaatgtgacaaaagcaaaaactggtgtgaaaaagtacaaataactatctggatttaaaaatgtgtctacgataatgtcactattataagaacaactaggatgaaatgcattttaagtacttctatgttaacagcaatttctgtttagtcttagat

SEQ ID NO: 3033 - DNA, 200 bp, synthetic construct
  misc_feature 1..200: note = Poly A sequence
  source 1..200: mol_type = other DNA
gataatacctggaagcatcatagtggtttcttaactctccaaaataagatttcttctctgtagcctacttgtctggtttatcccttacagaatattagtaagatttaatcaattaaaatatatatatatgccaatctgcttttgtcattcttaaaaaaaaaaaagtgtctcaagccatatcagatttggtttagaataca

SEQ ID NO: 3034 - DNA, 200 bp, synthetic construct
  misc_feature 1..200: note = Poly A sequence
  source 1..200: mol_type = other DNA
atccatcctggatcatggcatttaaataaaagattgaaagattacctttggctcttgagtatgttacataggagggtggtgtatatattcctttcattttgggggaaggaattaaatgaatatgtgattcctaaataccccaaatttggtttggcattgttgttagaaaattgcagtgcaggccaggtgtggtggttcat

SEQ ID NO: 3035 - DNA, 200 bp, synthetic construct
  misc_feature 1..200: note = Poly A sequence
  source 1..200: mol_type = other DNA
gtgaaaatcaaccttttcatattaggagtcatgcatttgtaaaaattaataaagatgacaagtcagttgtcaatggaattgagctatctgctaagacaaaaaatgttacctcagttcactattaaaattaattttaggagtggaagaaatgttgttactgccatttaaaaatatgctgagaaaattccagaagggttatt

SEQ ID NO: 3036 - DNA, 200 bp, synthetic construct
  misc_feature 1..200: note = Poly A sequence
  source 1..200: mol_type = other DNA
aatatgtcctcttttgttgtttcttaatttggaaactaataaaatattttctgtgtgttcctggcactgatttgcttgtgtctttctttactttgccctacttctatcttattttatttacacacacgaggcaaatggcaaccaagatgtgtaatacatagataacaaaggaagttctcacaacagaatgacgtcttcat

SEQ ID NO: 3037 - DNA, 200 bp, synthetic construct
  misc_feature 1..200: note = Poly A sequence
  source 1..200: mol_type = other DNA
aatagcttaacactaccaatttcccattttggaacctaataaatatttagtctgcattgctggcaattgctgacttctgtcattctttcattgtgcaaatcagttcacctttaaatgctccttgtcaaaagttaagaagtgaatggggtgggggacggggtctattggagaagagcttcaaggtagagtgagtttgaaca

SEQ ID NO: 3038 - DNA, 200 bp, synthetic construct
  misc_feature 1..200: note = Poly A sequence
  source 1..200: mol_type = other DNA
tatttctcatttagcattgaaataataatatttaggcatgagctcttggcaggagtgggctctgagcagttgttatattcattctttataaaccataaaataaataatctcatccccaaactgtagtaattgttacaattttctatttaaaaaatgaatagtacatgcagaaattgacctgatttccatttgcaacagga

SEQ ID NO: 3039 - DNA, 200 bp, synthetic construct
  misc_feature 1..200: note = Poly A sequence
  source 1..200: mol_type = other DNA
tttaccacacactgttttttggcttgcttatgtgtaggtgaacagtcacgcctgaaactttgaggataactttttaaaaaaataaaacagtatctcttaatcactggatccatagtttttggtagttgtgttttatgttaaagatgcaggctctttgaactgacacatgacacataacacataaatgaggaattccagag

SEQ ID NO: 3040 - DNA, 200 bp, synthetic construct
  misc_feature 1..200: note = Poly A sequence
  source 1..200: mol_type = other DNA
ggaagggcctctgctgactcctaccagagcatccgtccagctcagccatccagcctgtctctaccgggccccacttctctggatcagagtccctgcctctgtttgaccccgcactgactgaataaagctcctctggccgtttatgattatctcattccatatctcagggcgaggcaggaggaaatggctcaacacaccaa

SEQ ID NO: 3041 - DNA, 200 bp, synthetic construct
  misc_feature 1..200: note = Poly A sequence
  source 1..200: mol_type = other DNA
gctccacggccccagacaccttccctgaggacactcaataaaggttcctgaatcttcctgcccctcttgcctccttggtgtcttgctttgtgatctccatcctcatctttctgaaggtccctccctgccaagctgaccctccccacaggctccagcatccttggctacgaagtgtaagctggctgaggttgtgtgtgggt

SEQ ID NO: 3042 - DNA, 200 bp, synthetic construct
  misc_feature 1..200: note = Poly A sequence
  source 1..200: mol_type = other DNA
ggatcttggcagttgataaaacgtacaagtggtgtgtttctctctcctctctaacctcaaacaggaaagccgtgtcaagaatgctcatctgacttatgggtagaggcccgctgcagtaccccatcccacaaagccacagtgatcctcgcacagtccacatttttatttccccaaaagatgtttttcggaaaggtcccttt

SEQ ID NO: 3043 - DNA, 200 bp, synthetic construct
  misc_feature 1..200: note = Poly A sequence
  source 1..200: mol_type = other DNA
gccctcttggaaagacttctctgccatccctttgcacctgagaggggaagttctcagctgagctgaagctggattattaaagtggattgtcactcagactctccgtgctacgcttatttggagtctagaggagtgggagttgagcctggcttgaacctttggaaccagaaaagttggggagcaggtggaggaggccacac

SEQ ID NO: 3044 - DNA, 200 bp, synthetic construct
  misc_feature 1..200: note = Poly A sequence
  source 1..200: mol_type = other DNA
agattggtctctgtggtgtgattctcttcccaggtgtccctttctcctcccctagtgtccttaagtcctcctccacagggaacatctatttgggctttgatgtttaataaagtagaaagcactgtctggctgtgtgggtagagtccatcctttccctgcatattaggccagcttgtgccatataccagtgtggtgtctgt

SEQ ID NO: 3045 - DNA, 200 bp, synthetic construct
  misc_feature 1..200: note = Poly A sequence
  source 1..200: mol_type = other DNA
gacttatccattttttaatgtattaaatacacccagccagttatgcagctactttttctttactgtatctcatgttttcttttttcaatgctaattatagctctctacatcacggtaatcatgcctatgcctacataagaatggctgagctaacaatacacattctggaaacataacactctacattacaaagtttgtta

SEQ ID NO: 3046 - DNA, 200 bp, synthetic construct
  misc_feature 1..200: note = Poly A sequence
  source 1..200: mol_type = other DNA
gcgaataaaggggccgcgcccggccgcggcgcgactcggctgcactcctcacgcgcctgtatgtccgcgcgtgcgtgtccgcgcatgcaggtgtgccagagcgtgagcgcgcgcaggcgagcgctcagggcgggggtgcgcgcggggccgagggtgggtgccgtgcacgcgcgcgggtccggaggcgcgcccgaattccc

SEQ ID NO: 3047 - DNA, 200 bp, synthetic construct
  misc_feature 1..200: note = Poly A sequence
  source 1..200: mol_type = other DNA
gatgtcggctcaggatgccggaaaatgacctgtagttaccagtgcaacgagcaaagccccacagtttagtcctttggagttatgctgcgtatgaaaggatgagtcttcttccgagaaataaagcttgtttgttctcccctgggtcatgagttggttgatttgttggggaggctgagttgatgacatgacacaagctgcca

SEQ ID NO: 3048 - DNA, 200 bp, synthetic construct
  misc_feature 1..200: note = Poly A sequence
  source 1..200: mol_type = other DNA
ggggtggcgcgcggccaggagcacgcatggtattgacttaaaaggttcattttgtgtgtgtgcacattgtgtgttttgtgtactcctgtgggactcccatggttgtaaataaaggtttctctttttttttcctagtcttttgagttattatactgtgagcacctcttgacccttcagagattgtgtttgcttttgaatat

SEQ ID NO: 3049 - DNA, 200 bp, synthetic construct
  misc_feature 1..200: note = Poly A sequence
  source 1..200: mol_type = other DNA
atggtgtccagcctggtgcccgcccaccccgccaggctgcactcggtcgggcctccacaggcatggagtccccgcaaaaacctggcccctgcaggagtcaggcctggtctcacgctcaataaactccggactgaagatgcacaaccagcgttgtgggttgtctttcaaggacagctgcgctcaggccccacttactttat

SEQ ID NO: 3050 - DNA, 200 bp, synthetic construct
  misc_feature 1..200: note = Poly A sequence
  source 1..200: mol_type = other DNA
cattccagcctctgtctcctgctctaggatccccgactcattaaagcaaagaggcttattctggtgtcagttttctctctacagcccccttcccactttccctccattcaacagtgtctggaagggcaccacaatttcactgcactcgcatttctatggtagaaatgcaaataagataggggccaggaacaagggagggt

SEQ ID NO: 3051 - DNA, 200 bp, synthetic construct
  misc_feature 1..200: note = Poly A sequence
  source 1..200: mol_type = other DNA
actcatcttggccctcctcagctccctgcctgtttcccgtaaggctgtacatagtccttttatctccttgtggcctatgaaactggtttataataaactcttaagagaacattataattgcacctatggatctttatttttagaaaaatctttgatatattgggtgcttaatagagtcaagaagggttgccttggaaaaa

SEQ ID NO: 3052 - DNA, 200 bp, synthetic construct
  misc_feature 1..200: note = Poly A sequence
  source 1..200: mol_type = other DNA
gccctgtccatacccatgtaaggtgttcaataaagaacatgaaccaactcttgtgaatttgtttttattggggaacacggcacagggtgggaaatgtcaccttgggctatggtatgccccacctcccagagaatgtccatttgcattctaatcttcctgggatgctttatggaactttttcttcttcttggagctgctct

SEQ ID NO: 3053 - DNA, 200 bp, synthetic construct
  misc_feature 1..200: note = Poly A sequence
  source 1..200: mol_type = other DNA
atgcaaatggacattctctgggaggtggggcataccatagcccaaggtgacatttcccaccctgtgccgtgttccccaataaaaacaaattcacaagagttggttcatgttctttattgaacaccttacatgggtatggacagggcctatgggtggggcaaggcagcaatgacagcctcagtgaagtcatggcaagtagc

SEQ ID NO: 3054 - DNA, 200 bp, synthetic construct
  misc_feature 1..200: note = Poly A sequence
  source 1..200: mol_type = other DNA
tctggctggccccacgcagcgggcccagccgccccccaggtggcctcacattctgctctgctaagtttggagaaaacagaacaataaaccagatgcaggtggtgcccgcccggcctctcacctgcctccttggtgtgagtttgcttttcttagcagttcagcagctctaggggaggctccaaaccctgcccccggggagc

SEQ ID NO: 3055 - DNA, 200 bp, synthetic construct
  misc_feature 1..200: note = Poly A sequence
  source 1..200: mol_type = other DNA
tacctgcggtttaagagccctagggcaggctggacctgtcaagacgggaaggggaagagtagagagggagggacaaagtgaggaaaaggtgctcattaaagctaccgggcaccttagctcatcttcgtgttgtctctgtgccccaggtcctccccccgggggcgggcctcggcccagccctcagttcctattctgcacac

SEQ ID NO: 3056 - DNA, 200 bp, synthetic construct
  misc_feature 1..200: note = Poly A sequence
  source 1..200: mol_type = other DNA
actggatcttgggctgggactggatgtgccaatggcccttcagggcctgcctggcacctcaggtactgggctagggtgtctgctatgcctggtattgttcttgtccattgctgtcaccaataaaggcatggaagaacagagtgacaaattcctgtgtgcagtgggtatcccaaaccatgatcttaagattgggggaggtt

SEQ ID NO: 3057 - DNA, 200 bp, synthetic construct
  misc_feature 1..200: note = Poly A sequence
  source 1..200: mol_type = other DNA
acttgatggctccgaacaccctcgaagcgcgccactcgcttcccccatagccaccccagaaatggtgaaaataaaataaagcaggtttttctcctctaccttgactcgtgtctaagtgccagaaatgggacggggagggggcattgtgggactggaagatcgcgcgcgttggacctgtggcttgttgcgctcagagctgg

SEQ ID NO: 3058 - DNA, 200 bp, synthetic construct
  misc_feature 1..200: note = Poly A sequence
  source 1..200: mol_type = other DNA
gccccgcgctcgccccaccggcgcgctcttcgcgcccgcccctgcagcacggacaataaacctccgccaatgcacggcctcgcgtctgtctcagtctctggcgggaagagggaaagggagagaggtgggagcgcggacccccgccaccacgcccaccggccagtccccggacctgaggtcgtgggcagatccaccccaga

SEQ ID NO: 3059 - DNA, 200 bp, synthetic construct
  misc_feature 1..200: note = Poly A sequence
  source 1..200: mol_type = other DNA
cccttttgagaattgctctgaattttgttctcaggcattatacagttagtaattaaactttaaatgccattactacttgttttttcatatcccaagaataagaacatgtctatgtacccgtttctaggaaggaggagtatatgccttttgtctatttctgacacagatgcatttggtctgtcaaaactgcaaccatgggg

SEQ ID NO: 3060 - DNA, 200 bp, synthetic construct
  misc_feature 1..200: note = Poly A sequence
  source 1..200: mol_type = other DNA
tatttattcagtgttaatgtcgtccagaattttcatcagaaatggatagctttaacatctaaaattattatattttgaagcaagaagcactctaagctatttactaataggcttttcatataattaggaaaacctaatatcacatctatagtaaccatttcagtttcatattgtttctgttctcataaggatactgctga

SEQ ID NO: 3061 - DNA, 200 bp, synthetic construct
  misc_feature 1..200: note = Poly A sequence
  source 1..200: mol_type = other DNA
gacttggatggcagccatcagggaaggctgggtcccagctgggagtatgggtgtgagctctatagaccatccctctctgcaatcaataaacacttgcctgtgatgcctgccgtctggagtctctttgtcccggcacaggagtcattttgcccctggcaggcttggggactggatggctgagccacacctgggtcatgttc

SEQ ID NO: 3062 - DNA, 200 bp, synthetic construct
  misc_feature 1..200: note = Poly A sequence
  source 1..200: mol_type = other DNA
cgcttggcccggaccccgcccaataaagagtgcgtggcaaccctggcgcctgcgaaccctgtcggaggcgtctgggcgcggagtcggggtgggcaaagctcagcctaggagccgcagaggggtgaacggggcgtgatgaaggcagagccatcgccacggtctggagccagggctgtcttttgctttctccttccttgtgc

SEQ ID NO: 3063 - DNA, 200 bp, synthetic construct
  misc_feature 1..200: note = Poly A sequence
  source 1..200: mol_type = other DNA
catgctgatttttggagtagaattgagttctgctgaaggatactggatcagtgctttcgggggctctgttgggagagctctggctgccgttgcatctaagtatggaggggctgacttcccaatgcaccctcttttcttggagaagtcttgatcaagatcgtaatagcagctcctgtttatggagtgcctaccacgtacaa

SEQ ID NO: 3064 - DNA, 200 bp, synthetic construct
  misc_feature 1..200: note = Poly A sequence
  source 1..200: mol_type = other DNA
gtaagagcacaggggtccttatttaggacaaataaaggatggtggattgggcgctgtgctttctgaatgaccaccatgggagctgtgggacttggaggaagggggcctggagggctgagctgtgggtccacagaggtgtttgggggacagcaatgggggcacagtctcccttgatgcttgagggctgggctgagtgaatg

SEQ ID NO: 3065 - DNA, 200 bp, synthetic construct
  misc_feature 1..200: note = Poly A sequence
  source 1..200: mol_type = other DNA
ggcaccttggccctgcgcatcatggactctctcagcttccctcccaggatcagtttctacacaactctgtgtggcttttggacaaattaaagctagttttggtatccccgggccagttttctttgtagttaagcttcgcctgctgaccctccctgccccctccccacagcagctacttcaggactcccccagggaaggca

SEQ ID NO: 3066 - DNA, 200 bp, synthetic construct
  misc_feature 1..200: note = Poly A sequence
  source 1..200: mol_type = other DNA
ccactgaatttctaagactgttgaactccagtttgggaactataacacagcagaacagtttgataggtgatcactgtaaaaataaaaacaaatcactcccaagagcttactgtttaatcaccagaatagaagaaacacattataacccatttgatagaagactttgggctatctagtgaaatgggctcccagacacaatc

SEQ ID NO: 3067 - DNA, 200 bp, synthetic construct
  misc_feature 1..200: note = Poly A sequence
  source 1..200: mol_type = other DNA
aatagttcagagttcatagtcatattcatagacacagaatcaagcttttaacatatacatccacctctatatgttaaataaaacatcagattatcaacactgtcattacgtagaaactttggttagccaagcagtgcattgtcagttacgtcatctctaaaaatgacctgtgtctgttctctggggattgctgggtcaca

SEQ ID NO: 3068 - DNA, 200 bp, synthetic construct
  misc_feature 1..200: note = Poly A sequence
  source 1..200: mol_type = other DNA
actgccagctgaggaaggagcacacgcctcatcaatgcatggaagaacgtgcaatgcatcagaataaaagacatgcaaagtaaactaccctgggctacctctttttttaacctggcagattgataaatatcaaaaggcttaaaatactctgctggcaaaggtagggcaaaatgggcactttcataacattggtgagaatg

SEQ ID NO: 3069 - DNA, 200 bp, synthetic construct
  misc_feature 1..200: note = Poly A sequence
  source 1..200: mol_type = other DNA
ccagaggtaccagcttcgcctggggcttcaagaacctcccatctatccccattcctgagtcaggagttacagtcccttttggccctcacatccaataaagagtctgataccactggagtggctggcttttaattcccctgggccagacctgcagccttgccttcatcccttaactccaggactccaggggcagagtccct

SEQ ID NO: 3070 - DNA, 200 bp, synthetic construct
  misc_feature 1..200: note = Poly A sequence
  source 1..200: mol_type = other DNA
agacccacagtgcaccagagcacagctgcatcctggagccccagacctgtggctggctggtccgaagttggccacattgctgccagccaagaccagaaataaacagccgatgctgacatcttgatcactggaaggtctccttgcccctacagcctatgagagtcacttcgtttagaatcactgcaggtcagcaggtcgga

SEQ ID NO: 3071 - DNA, 200 bp, synthetic construct
  misc_feature 1..200: note = Poly A sequence
  source 1..200: mol_type = other DNA
ccacgcgccgtcctccgaggaactgggcgcttgcagtgcgttgcacaccctcacctcccacccactgattattaataaagtcttttcttttacctgccaatgcttagtttctttgcccaaagggagtttcggctggacaggtgctagcgtggggagctgctgtagggtcccagagtcagttagttatttgacctaacaac

SEQ ID NO: 3072 - DNA, 200 bp, synthetic construct
  misc_feature 1..200: note = Poly A sequence
  source 1..200: mol_type = other DNA
agatgattttctaatatttatccactaataaagaagagtgtaaatgcacatatggaattaaagaagcaaacctatttatgttttaaaggcagcagccaccagtgtttttcctggctcaaaacatgccaagccccaggccttctgctcctgctctttcccagggggagccacaggccggacctcccaagacagctgagcct

SEQ ID NO: 3073 - DNA, 200 bp, synthetic construct
  misc_feature 1..200: note = Poly A sequence
  source 1..200: mol_type = other DNA
tgagcggttgccatggccggtctccgtggggcagggttgggccgcatgtggaagggctctgagctgtgtcctccttcattaaaagtttttatgtctcgtgtcagaacaggcagcctgctggttttctctggggcccttctctggctcctgcttctgctgccccagtctggcctgtcctggcctgtcccatgccgtcctgg

SEQ ID NO: 3074 - DNA, 200 bp, synthetic construct
  misc_feature 1..200: note = Poly A sequence
  source 1..200: mol_type = other DNA
taactttctaaaatttaaatatgtataataaaataaatgttttaaatataatgtttgtgtgtgcttatacagattaaccctttctccccaagattgatagtgatctttactttttcttttctctaaagtatgaaacacttcatgttgcttaagtaaaaactgtacaaaaacaggtcactcccttcctgctccatggatgc

SEQ ID NO: 3075 - DNA, 200 bp, synthetic construct
  misc_feature 1..200: note = Poly A sequence
  source 1..200: mol_type = other DNA
ctgaagatcaaagtaaagcaacagaggaatgtacatctacctaataactttctaaaatttaaatatgtataataaaataaatgttttaaatataatgtttgtgtgtgcttatacagattaaccctttctccccaagattgatagtgatctttactttttcttttctctaaagtatgaaacacttcatgttgcttaagtaa

SEQ ID NO: 3076 - DNA, 200 bp, synthetic construct
  misc_feature 1..200: note = Poly A sequence
  source 1..200: mol_type = other DNA
cgtgtctatgtcaaaagttcttatatatttcttttataagctgaaagaaggtctatttttatgtttttaggtctatgaatggaacgttgtaaatgcttgtcaaacaataaaaataacgaaaagtgtctgggcggttctatgcctttttggatgggaggatgagtatgaattgttggcgggagagcggccgtgggagaaga

SEQ ID NO: 3077 - DNA, 200 bp, synthetic construct
  misc_feature 1..200: note = Poly A sequence
  source 1..200: mol_type = other DNA
aagtgttggttttctgccatcagtgaaaattcttaaacttggagcaacaataaaaagcttccagaacagatcatattatgttcactgtcttttaaactggaatgtagaaggctttatttttatgtccttttttggtatcccctgagtataaaggccaaaaagcccttttggcctagagaatttggtttgagtagattatg

SEQ ID NO: 3078 - DNA, 200 bp, synthetic construct
  misc_feature 1..200: note = Poly A sequence
  source 1..200: mol_type = other DNA
cgtctgcttcggagcttgctgcttaataaatgttggtggaatgaatgaatgaattgatgctgtggtttgattatttctgttctttttttttttgagtcggagtctcgctcttgttgcccaggctggagtgcagtggcatgatctcagctcactgcaacctctgccacctgggttcaagctgttctcctgcctcagcctcc

SEQ ID NO: 3079 - DNA, 200 bp, synthetic construct
  misc_feature 1..200: note = Poly A sequence
  source 1..200: mol_type = other DNA
tccacatggtcttcgtccttgacgtcgttttacaagaaaacaatggggctggttttgcttccccgtgcatgatttactcttagagatgattcagaggtcacttcatttttattaaacagtgaacttgtctggctttggcactctctgccattctgtgcaggctgcagtggctcccctgcccagcctgctctccctaaccc

SEQ ID NO: 3080 - DNA, 200 bp, synthetic construct
  misc_feature 1..200: note = Poly A sequence
  source 1..200: mol_type = other DNA
aagttcatatctggagcctgatgtcttaacgaataaaggtcccatgctccacccgaggacagttcttcgtgcctgagtctttctgaggttgtgctttatttctgctgcgtcgtgggagagggcgggagggtgtcaggggagagtctgcccaggcctcaagggcaggaaaagactccctaaggagctgcagtgcatgcaag

SEQ ID NO: 3081 - DNA, 200 bp, synthetic construct
  misc_feature 1..200: note = Poly A sequence
  source 1..200: mol_type = other DNA
ggccctcggtgtgaagatgaaccttccaccgtcttcactgcatcctggagtgcaaaaataaaatccactcaagagtcacaaggcccgctgtgcataatcggtttcacttttacctttttttttttttttttttttttgagtcagggtctcactctgtcacccaggctggagtgcagtggcacattctcggctcactgcaa

SEQ ID NO: 3082 - DNA, 200 bp, synthetic construct
  misc_feature 1..200: note = Poly A sequence
  source 1..200: mol_type = other DNA
gccatgccatttttaccttatgtctgctagaaagtgttgtagttgattgaccaaaccagttcataaggggaattttttttaaaaaacaacaaaaaaaaaaacatacaaagatgggtttctgaataaaatttgtagtgataacagtattcttggtgtaacttatttcttgtggaagttctttaaatttctttttctttata

SEQ ID NO: 3083 - DNA, 200 bp, synthetic construct
  misc_feature 1..200: note = Poly A sequence
  source 1..200: mol_type = other DNA
taaaatgtcatggctctttcctgcgacaattctatttgaggaaaagatttgtttttcccttttcccaaggaagctcgtgggacagcatgggcactactcttcatgtgcggtgacaccagcccccagatgccttgaattaagtgtcctcacctttatgcatgactgcaaagccagctggagcattttctatggagcctccg

SEQ ID NO: 3084 - DNA, 200 bp, synthetic construct
  misc_feature 1..200: note = Poly A sequence
  source 1..200: mol_type = other DNA
agctggaggcagattcgtcgctttctctggagaaggacagtcattgcgtaaaaagggaagaaagccctaagtgaggactgttggctgattggaaaataataaaagaatcatttgcaacatcttggcttttagttactggcactgacagggacgagcctcatcagagaatactctgttacttaagatttatttagagttac

SEQ ID NO: 3085 - DNA, 200 bp, synthetic construct
  misc_feature 1..200: note = Poly A sequence
  source 1..200: mol_type = other DNA
atttgattcttccagaatgaccttcttatttatgtaactggctttcatttagattgtaagttatggacatgatttgagatgtagaagccattttttattaaataaaatgcttattttaggctccgtccccattgtggctctggtctcgaggccagtgcttgagtgtgctctgagccttctgtgggtcttgggccccagga

SEQ ID NO: 3086 - DNA, 200 bp, synthetic construct
  misc_feature 1..200: note = Poly A sequence
  source 1..200: mol_type = other DNA
tcgtcttattttattttcttttcctctctttcctttcctttttttaaaaaattttaccctgcccctctttttcggtttgtttttattctttcatttttacaagggacgttatataaagaactgaactcaacattcaggttgttttttttttttgtttctaagtttttgccctattgaagatgacttcagaaaatccattc

SEQ ID NO: 3087 - DNA, 200 bp, synthetic construct
  misc_feature 1..200: note = Poly A sequence
  source 1..200: mol_type = other DNA
ggggctgctggactgaccgaggggctgcccagcaagactgcagcctcttcctccctcagatcccaccagacccaccaggtgccataataaagcggattctagacggagggcctgctgtctggctcagctgggggctggagcccctctgagtactaagcttgctgccccagacagtggctgcagctcctagagggctcagt

SEQ ID NO: 3088 - DNA, 200 bp, synthetic construct
  misc_feature 1..200: note = Poly A sequence
  source 1..200: mol_type = other DNA
gcccttcattcacctctgtgagtgaataaatgtgctaagtctctttatctcgggtccgaatggcactttctgttcctggagcacagtcacatcttttcttgctctcctgccagaggggaaatgcgaggcccagaagcaccgggtctgggtggcacaggctgaacccagtgcggggaatgggtgggaggtggccttggagt

SEQ ID NO: 3089 - DNA, 200 bp, synthetic construct
  misc_feature 1..200: note = Poly A sequence
  source 1..200: mol_type = other DNA
taaggggatggattgcacactgtagtgagtcatccatcctgaccccacctcatcagccagggagctccctgaagacaggccatcgagagaggcacacaacaggctgtggtctaaaataaacttttaattgcacatttgtgtcttgggttatctgtggggtgagaaacctcctcacttccaatcccagctatctgggtaca

SEQ ID NO: 3090 - DNA, 200 bp, synthetic construct
  misc_feature 1..200: note = Poly A sequence
  source 1..200: mol_type = other DNA
gggatggattgcacactgtagtgagtcatccatcctgaccccacctcatcagccagggagctccctgaagacaggccatcgagagaggcacacaacaggctgtggtctaaaataaacttttaattgcacatttgtgtcttgggttatctgtggggtgagaaacctcctcacttccaatcccagctatctgggtacaatct

SEQ ID NO: 3091 - DNA, 200 bp, synthetic construct
  misc_feature 1..200: note = Poly A sequence
  source 1..200: mol_type = other DNA
gagtcatccatcctgaccccacctcatcagccagggagctccctgaagacaggccatcgagagaggcacacaacaggctgtggtctaaaataaacttttaattgcacatttgtgtcttgggttatctgtggggtgagaaacctcctcacttccaatcccagctatctgggtacaatctggtgttgtggtctggctgtcgg

SEQ ID NO: 3092 - DNA, 200 bp, synthetic construct
  misc_feature 1..200: note = Poly A sequence
  source 1..200: mol_type = other DNA
aggcacccagacttcaaggacccagacccaccctggggggctgcaagggcaagaagaggaggctccagggttggggcgagggccgacctgtccacccttccctggaatctgctcaataaagcctggggttggtcccccacccgccacgttcctcggcatcacttcctgagggagccaggcctggggcgggacctgtggga

SEQ ID NO: 3093 - DNA, 200 bp, synthetic construct
  misc_feature 1..200: note = Poly A sequence
  source 1..200: mol_type = other DNA
actgtggcaggtccagaaccagtcagagtcttgcccctaagagggatgtactgtaaataaacagtatttttagatcaccttcaaaagggtaacttctttactcaggagctactccacatcaggccaggtcatgagggaaggatgtaaaatgggacaatgccacgtagggcaggaatctttataccaagtcctcatgtggg

SEQ ID NO: 3094 - DNA, 200 bp, synthetic construct
  misc_feature 1..200: note = Poly A sequence
  source 1..200: mol_type = other DNA
ctgtggcccagggctgaggctggatgggaggtggctggcagcccacccactgtaataaagccccagccattggcccacagcaatctttgcctcacagtatgactgagccaaggaaagaacccttccttccctgtcctgggcaggggccactgagtccccagccatgtagttcagtcagtcagcagagtcctggcactatg

SEQ ID NO: 3095 - DNA, 200 bp, synthetic construct
  misc_feature 1..200: note = Poly A sequence
  source 1..200: mol_type = other DNA
gtgttcgcaccaggaacgcaggtgctgggctgtcggggaggcctcaggccacctccaggaacagaacacagttttaagtttgattttttttatttcaaaatgctttgcaattaaatgaattactgttcagaagtctcccacttttcatacaaaaatactgtgctactgatacagttgaaaaaattcaatgatgtctctcc

SEQ ID NO: 3096 - DNA, 200 bp, synthetic construct
  misc_feature 1..200: note = Poly A sequence
  source 1..200: mol_type = other DNA
accagtgatgtggagctggagtttgtccttccaccgagtctacgagggcctttgatgcttagtggaatgtgtgtctaacttgctctctgacatttagcagatgaaataaaatatatatctgtttagtctttccctcatcgtctgcctgcattaacgatttacagtcgtttcttcaaagattcctgacagagtggggatga

SEQ ID NO: 3097 - DNA, 200 bp, synthetic construct
  misc_feature 1..200: note = Poly A sequence
  source 1..200: mol_type = other DNA
cgagctggagcagatcgtgctgcacaaccggagaagacagaattacctctgctcttttaatatataatgatggctttaaataaaattaggagaaaatgtcgaagcagcagctccttccactcttggcctgggtggccctagttccactgtacactttggccactgcgtcactgccggttccagggcagccgggagcccca

SEQ ID NO: 3098 - DNA, 200 bp, synthetic construct
  misc_feature 1..200: note = Poly A sequence
  source 1..200: mol_type = other DNA
atcagccagcccatggcccccaataaaggcagctgcctctgctccctctgaaccagcctcgtgtgtgtgcttgtgcgtgtgtgtgtatgtgtgtgcatgtgtttgtgtgtgtgagaggggtcccccacctccaggcctgcccccttccttcacttccattcgctttgtccacgggtacctcctcagttccaatgacgtct

SEQ ID NO: 3099 - DNA, 200 bp, synthetic construct
  misc_feature 1..200: note = Poly A sequence
  source 1..200: mol_type = other DNA
ccctgccgcctggactccgcctgtgtccgtctgtctcactcccgttctccgaaggcgggacgccaccgggccagggatggggcaatgccacgagctctctgaggggcgttgagtggagcgacttgtccccgctccacagcggagcaccagcccagtggacacccctgggtgtgaatatgaacagcacagcccgcccccag

SEQ ID NO: 3100 - DNA, 200 bp, synthetic construct
  misc_feature 1..200: note = Poly A sequence
  source 1..200: mol_type = other DNA
tgccaggaacagattttgcagttggtggggtctcaataaaagttattttccactgacatcttgcctctttcttcaggagagaggctgggactggggaggcagatgggggcccttgaggtgccttgtgctccccaaggccactgccctcctttctgtagcttcgctgggtttgccttctggcctcccactctgtcccccac

SEQ ID NO: 3101 - DNA, 200 bp, synthetic construct
  misc_feature 1..200: note = Poly A sequence
  source 1..200: mol_type = other DNA
tgaggatagtcaggagcgtcaatgtgcttgtacatagagtgctgtagctgtgtgttccaataaattattttgtagggaaagtacttgtgcgtttgaattcctttcctggcaaagtaaccgagtgaagcgccacccacccaccccaagctggtcttaacatttcctgtgagatctgggggaggaggcagtccaaggctgaa

SEQ ID NO: 3102 - DNA, 200 bp, synthetic construct
  misc_feature 1..200: note = Poly A sequence
  source 1..200: mol_type = other DNA
cttagaactttcaactctgacctcgtgaccttttttggaacagcagcagcactaacttgaccttttcgttttttttttcaacttgcaataaatacatttttaaaaggaaaaaagaaaacggagagaaaaaaaggtgggtcattgacagactgtctgagcacatagttgcctcccttataacttcagttttttcgtttgga

SEQ ID NO: 3103 - DNA, 200 bp, synthetic construct
  misc_feature 1..200: note = Poly A sequence
  source 1..200: mol_type = other DNA
gtcccacctggaccttatcaaaactactcactccacctgggcccctgctgaagccctattttgaaatttcccttttgtagagcttttttcctttcctaagccctgtaaataaacgaaggcacttctttggaaggttatggagtctgtttgactagtgctaaaggaaacaattcatgcggatgtataaaactcgctctttt

SEQ ID NO: 3104 - DNA, 200 bp, synthetic construct
  misc_feature 1..200: note = Poly A sequence
  source 1..200: mol_type = other DNA
cgacacccctacaggagaagctctgggactggggcagcagcaaggcgcccatgccacacaccgactctcgaggaaacgcggttcagcgattctttgactgcggaccctgtgggaaaccccgtcaataaatgttaaagacacactccgaggcagcgtggatgtggtttgctttcactcaacagtatggcccgcgtggcctt

SEQ ID NO: 3105 - DNA, 200 bp, synthetic construct
  misc_feature 1..200: note = Poly A sequence
  source 1..200: mol_type = other DNA
gctgctgccgcccggccacggcccaccctggtcaggctgcctccttaatcgagaaaactacctggtgatgcaatcttttttttttttaatttaatttaattttaaaataaatgctgcattggtaaagctggcagttgaaaccagttggacggcccagcttgcgactcttctgcctgagtgggcctctcaggtcactcgtg

SEQ ID NO: 3106 - DNA, 200 bp, synthetic construct
  misc_feature 1..200: note = Poly A sequence
  source 1..200: mol_type = other DNA
tggggagcaccgaggcaggggtgggggaatgtgtactgaggagccgtgtgtctgctcctggctggcccggcctaataaagcagtgttgccatctcatcttccccctaaaaacccttttatgtacacctgcgcagagaagagggctgcctggcctccctgggccgctggtacagatcacacacacacacagattaaacgca

SEQ ID NO: 3107 - DNA, 200 bp, synthetic construct
  misc_feature 1..200: note = Poly A sequence
  source 1..200: mol_type = other DNA
gccactgcagtctgggccccatcattaaacgggctgcgtttaatctgtgtgtgtgtgtgatctgtaccagcggcccagggaggccaggcagccctcttctctgcgcaggtgtacataaaagggtttttagggggaagatgagatggcaacactgctttattaggccgggccagccaggagcagacacacggctcctcagt

SEQ ID NO: 3108 - DNA, 200 bp, synthetic construct
  misc_feature 1..200: note = Poly A sequence
  source 1..200: mol_type = other DNA
gccccactggcccaccacagctgccatgccaccctctgcccgtatgaagaggtcactgggggatggagctggcacccacatgaatagctgtatgcactgtacttgtttcttaataaacttatttttaagcacagcccgaggacctcttctctcctgtgccatgatccacccagctgcatatcaaaccttgtgaacaaaac

SEQ ID NO: 3109 - DNA, 200 bp, synthetic construct
  misc_feature 1..200: note = Poly A sequence
  source 1..200: mol_type = other DNA
taaaggcagacgctgtttttctacccatgtggcccacacgcgactccgtttcagtggcggggctggcaaacgtcattccctagccccgcggccctttaaagcccggacaggtgcagctcggtgccgcctctggttggctggcgtggggtgacgtaatggcacatggcccgtcgccattggctgggcggcaagctccgccc

SEQ ID NO: 3110 - DNA, 200 bp, synthetic construct
  misc_feature 1..200: note = Poly A sequence
  source 1..200: mol_type = other DNA
tcgcccacaagccttactcacctctctctaagtttagaagcgctcatctggcttttcgcttgcttctgcagcaactcccacgactgttgtacaagctcaggaggcgaataaatgttcaaactgtatgctgatgttccaaatgggaatttatttcaaagaggaaaagttaatattttactttaaaaaaatcaaaataatac

SEQ ID NO: 3111 - DNA, 200 bp, synthetic construct
  misc_feature 1..200: note = Poly A sequence
  source 1..200: mol_type = other DNA
ttttgcttgcttttatatatgttatgtgtagatgaataaagtgtttgatcctttttgacagaacagtgtttgttactttgacccattgcttgaattcaaagataccctggtttgcataatacttggttttttaaatgtatgcatcagacatttatccagttgggacccaaatatattagagggcttagcatcagaagaaa

SEQ ID NO: 3112 - DNA, 200 bp, synthetic construct
  misc_feature 1..200: note = Poly A sequence
  source 1..200: mol_type = other DNA
ggccacttccaggtgggcagcagaggcaggccccagtgtgaccaccactgcgacccctgagcccacaagggcagagcagcattctgagagtcgcacaggagtccaagccagaccaataaacagaacacttttccttccatgtggtctgaatgttggcaccagcccgggcaggggcatctcatttgggcagtactgctgtg

SEQ ID NO: 3113 - DNA, 200 bp, synthetic construct
  misc_feature 1..200: note = Poly A sequence
  source 1..200: mol_type = other DNA
gcagctcatgtgcacgttttctgtttaaataaatgtaaaaactgccatctggcatcttccttccttgattttaagtcttcagcttcttggccaacttagtttgccacagagattgttcttttgcttaagcccctttggaatctcccatttggaggggatttgtaaaggacactcagtccttgaacaggggaatgtggcct

SEQ ID NO: 3114 - DNA, 200 bp, synthetic construct
  misc_feature 1..200: note = Poly A sequence
  source 1..200: mol_type = other DNA
ataaagacgccagttggtggtcttgagttttctctttcttgcaagatgaaattttattttccacagcaaaattactctactgttaaaattgtgcaaaataaaataaacatttaaaatgacattttacagtaaaggaattgattaaaaacagaaaaagttagaaaaagtaacagaaaaagttattctgccacaaaactact

SEQ ID NO: 3115 - DNA, 200 bp, synthetic construct
  misc_feature 1..200: note = Poly A sequence
  source 1..200: mol_type = other DNA
acatataatttgtaattaaatactgatttttaaatgctatatgtgaagaaattatgcatttatgtattgatacccagatatactttatgttagggtttctccaccttggcactattaatatttgggtaagataattctttgttgggaaaagggggattgtactgtacattgttgggtgtttaacaccatcctgattgctt

SEQ ID NO: 3116 - DNA, 200 bp, synthetic construct
  misc_feature 1..200: note = Poly A sequence
  source 1..200: mol_type = other DNA
tggcaatcataaaaagtaataaaggttctttttgacctgttgacaaatgtatttaagcctttggatttaaagcctgttgaggctggagttaggaggcagattgatagtaggattataataaacattaaataatcagttcctttttttttttttttttttttgagatggagtctcgttctgttgctcaggccggactgcag

SEQ ID NO: 3117 - DNA, 200 bp, synthetic construct
  misc_feature 1..200: note = Poly A sequence
  source 1..200: mol_type = other DNA
gagggagcgggtagagggatgggctctgctcagctattcttgggccagatggggcctgaccgatagaataaaagacttttctacaacagcttggctgttccctgacccttcttcccacagtcccctggctccacgtccatagtggctgaggagctggaggctctaggcctcaggcaggggagggttcccacccatagggt

SEQ ID NO: 3118 - DNA, 200 bp, synthetic construct
  misc_feature 1..200: note = Poly A sequence
  source 1..200: mol_type = other DNA
ctctgtgtgccctccctcacttgtgggccccccttgcctccgtgcccaggttgctgtgggtgcagctgtcacagccctgagagtcagggtggagatgaggtgctcaattaaacattactgttttccatgcctccttcttccccggcctcagaggccccacgtttcctgggcctgctctgttgggagtccacaggtgaacc

SEQ ID NO: 3119 - DNA, 200 bp, synthetic construct
  misc_feature 1..200: note = Poly A sequence
  source 1..200: mol_type = other DNA
ccctgcttctgctggggctgtgtacagagtgcaaatgtttatttaaaataaagttctatttatcccttgtgaccactgctgtccactaggggctcctctctcagggcctccatacactgggccacggttccccaaagaggaaggaggaaggtaggtagagaagagagtgagatgcttattgctggggaacgggctggctg

SEQ ID NO: 3120 - DNA, 200 bp, synthetic construct
  misc_feature 1..200: note = Poly A sequence
  source 1..200: mol_type = other DNA
gtgtgccctaccctggctcaggcttctgggctctgagaaataaactatgagagcaatttcctcaggcttcagtctcacttgttttgcctcctctctctcaccacaactgagcccttagctcagggagtccacgtgtgagtgtgagtgtgtgtgagtgtgacacagaggtggcgagggcagtgttccatccaggaggacac

SEQ ID NO: 3121 - DNA, 200 bp, synthetic construct
  misc_feature 1..200: note = Poly A sequence
  source 1..200: mol_type = other DNA
gccctgagtgtccagccacatggtggcaccagcaccactcctttccttaccacatcaactgattaaagcagtgaccagcaggaactgcccagagaactggctggccttgtttcctgagtctgatctgtttggcggagtgggaggggtggagcaggacccggaccctgagtggctgggatccttcttcctgtccctggctg

SEQ ID NO: 3122 - DNA, 200 bp, synthetic construct
  misc_feature 1..200: note = Poly A sequence
  source 1..200: mol_type = other DNA
ccaagaaggaaaatctgacgaataaagacccccgctgccccatagcactgagtggtcaattggctcctacccttcttggcagcacagacctctgcccacacccagggacctggggaggagggcacagtgtttgtccctcactttccctagcaggatggtcaactatctgagcccagtaaaagtagggaaaacacagagaa

SEQ ID NO: 3123 - DNA, 200 bp, synthetic construct
  misc_feature 1..200: note = Poly A sequence
  source 1..200: mol_type = other DNA
ccgaacatgtgcctctctttgcctgacagcctgaggtcctgggccaggtctgctctttccaggcctgtctggaccgtgtgtcccttttcagcttttagagtcagctgacttggtgtccaggacgggcgggcaggtggggcataggctggctcacactgctccattgcccccaccaactgacctttcctccctaaggatcc

SEQ ID NO: 3124 - DNA, 200 bp, synthetic construct
  misc_feature 1..200: note = Poly A sequence
  source 1..200: mol_type = other DNA
ggccacagaggctccaatacctgggaatgttcacaaagtcatcaactggaaaaaaagcaaaaacccacggccaaaataaattggtactgtttgttacaaagttctgtcttgtcatggggagtcgggcatattcttggcagcactccactcaccttcagctcctgcaccgacatcaggaacccacggccaccacctcctcc

SEQ ID NO: 3125 - DNA, 200 bp, synthetic construct
  misc_feature 1..200: note = Poly A sequence
  source 1..200: mol_type = other DNA
ggtgctccatactggcctggctatgctgggtctccctccactgagccacatttaaggccacagaggctccaatacctgggaatgttcacaaagtcatcaactggaaaaaaagcaaaaacccacggccaaaataaattggtactgtttgttacaaagttctgtcttgtcatggggagtcgggcatattcttggcagcactc

SEQ ID NO: 3126 - DNA, 200 bp, synthetic construct
  misc_feature 1..200: note = Poly A sequence
  source 1..200: mol_type = other DNA
gctggaagcactgaacctacctcatcctcctggagggtgtggctaccctcgccaccccaaattccatgtcaataaagaacagctaaattctcctagagtctgtgtgttatctctgcacttctagcatctgaaggccctgaagacatgctggtggtggtggtatgattgggggatggagatgtgccttttgcacattttgt

SEQ ID NO: 3127 - DNA, 200 bp, synthetic construct
  misc_feature 1..200: note = Poly A sequence
  source 1..200: mol_type = other DNA
cccctgcccaaggcctaccccagttcctagcactgccccacatgcatgtctgcctatgcactgaagagctcttggcccggcagggcccccaataaaccagtgtgaacccccactgtgttgtctggactctgatttggggcgggcgggggagtctccaggggaacctcgaggttgcccccagcagaacccatgcaccgcta

SEQ ID NO: 3128 - DNA, 200 bp, synthetic construct
  misc_feature 1..200: note = Poly A sequence
  source 1..200: mol_type = other DNA
cctgccctccagcctgggacaataaaagccttttttctagactgtcctggctccatacccctgaggcactaagaggcagccccagccctgtgaggcactgcccagggagtcaaatcttctgaagagctttttttctctgtgtgaaggtccctgtcatgcccatgtcacacccgtgtgcattagtgcactgttttctatcg

SEQ ID NO: 3129 - DNA, 200 bp, synthetic construct
  misc_feature 1..200: note = Poly A sequence
  source 1..200: mol_type = other DNA
caaggcagccaccctgtcacctagctcaatggagccccggatcccaagccctgcattgtaagcccacagtaggcactcaataaatgcttgttaaaggaaggcattgcagagaggatggacgatagaaaacagtgcactaatgcacacgggtgtgacatgggcatgacagggaccttcacacagagaaaaaaagctcttca

SEQ ID NO: 3130 - DNA, 200 bp, synthetic construct
  misc_feature 1..200: note = Poly A sequence
  source 1..200: mol_type = other DNA
tgggaatgtgtgcgggctcagccttcctggacacactaggtgtgggaagccataggagcctccagatgggggctggcctctcttgcccagccagcgggcagggactgtgggttggtgaatgcattaaagtgctttggggaagacacttgtcaagctctgtcacttgtcccttcgcccatccaccctcactcacatacaga

SEQ ID NO: 3131 - DNA, 200 bp, synthetic construct
  misc_feature 1..200: note = Poly A sequence
  source 1..200: mol_type = other DNA
aaaggagtcaagttccatgggatacaacctccctcttgttttgtttgtctctccttttcttttgttactgttcttgctgctagaacttttttaaataaactttttttcaatgtgattatctttttgttatttttttttcccagagatgggtgggagtggggctactggtaggagagagagagtgctccctgtctctacta

SEQ ID NO: 3132 - DNA, 200 bp, synthetic construct
  misc_feature 1..200: note = Poly A sequence
  source 1..200: mol_type = other DNA
ccagggcctgtgctgcagtcggggacaaggagcttccgtctggcaaggccggggcacaatttgcactcccctcagctagacgcacagactcagcaataaacctttgcatcaggctccagctgtcctttcttggtggaggacttaattatcacaagtcatgggcatttattaagtgcccagtgctgggttgggcatgaagt

SEQ ID NO: 3133 - DNA, 200 bp, synthetic construct
  misc_feature 1..200: note = Poly A sequence
  source 1..200: mol_type = other DNA
ggctggtagtgactggatggacacattgctgtgggtagtccctcctactaggaggcttgtcatactgtctagaggttgactcttagttctgtaaataaagacatccatttcaaacagcctttattgagtgctgtttctgggccagccgtgggagtcccagcagtgaatgaaatagccacgagccgtgggctagatcgcca

SEQ ID NO: 3134 - DNA, 200 bp, synthetic construct
  misc_feature 1..200: note = Poly A sequence
  source 1..200: mol_type = other DNA
agtggtcttttccagatagtctctgacaagcttcaggtcagagcaatggatggcagatacctggcatttgatataccagctctgaggaatgggcagggcttgtctgaggcctcatgtggagcaggactctgagcctcttttctagactgagcagagtctgtgattgattagcaatgtgtgccgtaggaaggaaagttggg

SEQ ID NO: 3135 - DNA, 200 bp, synthetic construct
  misc_feature 1..200: note = Poly A sequence
  source 1..200: mol_type = other DNA
cactcttatcctccttatttaagtccttcccaggctatgccccaccctctttgtattaaaagcctcctcttttgggccttgtttcttgtagcttcttggtgggggtgggggtgcatgagggactgggtgggaggcggcctggggagggacaggactccagcagtctcctagctctgcccctctgctagcctgagggctgt

SEQ ID NO: 3136 - DNA, 200 bp, synthetic construct
  misc_feature 1..200: note = Poly A sequence
  source 1..200: mol_type = other DNA
ccctggaactcctaaacctttgcccctggggcttccatcccaaccagtgccaaggacctcctcttcccccttccaaataataaagtctatggacagggctgtctctgaagtactaacacaaggacactcgtggagcaagaattttccttttcctggggacatgttaccatctccatttcacagatgaggaaactgagcct

SEQ ID NO: 3137 - DNA, 200 bp, synthetic construct
  misc_feature 1..200: note = Poly A sequence
  source 1..200: mol_type = other DNA
catgacctcaattatttcacttaaccccaggccattatcatatccagatggtcttcagagttgtctttatatgtgaattaagttatattaaattttaatctatagtaaaaacatagtcctggaaataaattcttgcttaaatggtggttctttctgctattggctactggataacattcttcattggctagacacagtgg

SEQ ID NO: 3138 - DNA, 200 bp, synthetic construct
  misc_feature 1..200: note = Poly A sequence
  source 1..200: mol_type = other DNA
gggcacctttattgtctgggacaggccctcagcccctcctgccccatccacccagacaagcaataaaagtggtctcctccctgtgcatgcttctgctttcagccccagcctcgtcacttgactgtgaggatcctctgggtgtcagggaagtcctcctccagcagtgagtcctagaagagcagggttggtggtggagggtg

SEQ ID NO: 3139 - DNA, 200 bp, synthetic construct
  misc_feature 1..200: note = Poly A sequence
  source 1..200: mol_type = other DNA
gaggctggggctgaaagcagaagcatgcacagggaggagtccacttttattgcttgtctgggtggatggggcaggaggggctgagggcctgtcccagacaataaaggtgccctcagcggatgtgggccatgtcaccaaggaagggggtcttcatgcagccggtgcagagctggtccatccagaggggtgcctcgtgctgc

SEQ ID NO: 3140 - DNA, 200 bp, synthetic construct
  misc_feature 1..200: note = Poly A sequence
  source 1..200: mol_type = other DNA
ccctctggccagcacgcctgtcctcccccggggccaaggcagaggaggaggacgacatcctgacctgctgctgaggctgtacctccttgactaagctggttccttgtgtcaaagcacctcatgccttccattaaagagaggccgtgtccaccctgagctggctgattttggggagggaggatggcagggaggcagcccaa

SEQ ID NO: 3141 - DNA, 200 bp, synthetic construct
  misc_feature 1..200: note = Poly A sequence
  source 1..200: mol_type = other DNA
ttctgatggaaggagctgtgcccaccctgtacacttggcttccccctgcaactgcagggccgcttctggggcctggaccaccatggggaggaagagtcccactcattacaaataaagaaaggtggtgtgagcctgggaagtgggtgtctccagttccatgtggccaaatcctagggcctcaacctcgcatcctgaacctt

SEQ ID NO: 3142 - DNA, 200 bp, synthetic construct
  misc_feature 1..200: note = Poly A sequence
  source 1..200: mol_type = other DNA
agccatgtaactaacaaaggatttgctttagagataattatttggaatttttatagcttacttcacaatgtgcccaggtcagctgtataaaataaatactgcattgttgtttctttccatttatttttttcttaaacacataggccttctagaatcgggtccacttatgttaaaataatgtcacttgaattattcattaa

SEQ ID NO: 3143 - DNA, 200 bp, synthetic construct
  misc_feature 1..200: note = Poly A sequence
  source 1..200: mol_type = other DNA
ctaggaggttaccaccattgtgatcaagataaatgtggagtattaaagttatgtgttgattgtgtggttcatttttgtatttatttcatttaaaatcatgtgacgcagaatagttttgcaatgtgtatatagttgcaggcaaaaaaaaaaccacctcactgcaaaacttattgttaattttagtcaccaatggtataaag

SEQ ID NO: 3144 - DNA, 200 bp, synthetic construct
  misc_feature 1..200: note = Poly A sequence
  source 1..200: mol_type = other DNA
acaaattacaaatgaactttcttgcacttgcttgtcgccaaataaaagagaggcccattgattcctcccccaccccaacacttttcttttaaagcttttctccctccttgttcttgtttttctttcttcctttccttttctctgagagttttaatactttcaaggactttaaaaaaataatcatgtttgaattgttttct

SEQ ID NO: 3145 - DNA, 200 bp, synthetic construct
  misc_feature 1..200: note = Poly A sequence
  source 1..200: mol_type = other DNA
acagtcccgagcagccagctgcacaggaaaaaccaccagttacttgagtgtcactcagcaacactggtcacgtttggaaagaatattaaaaagagaaaaaaatcctgttcattttagtgttcaatttttttattattattgttgttcttatttaaccttgtaaaatatctataaatacaaaccaatttcattgtattctc

SEQ ID NO: 3146 - DNA, 200 bp, synthetic construct
  misc_feature 1..200: note = Poly A sequence
  source 1..200: mol_type = other DNA
ataggaaagaaaaacttatccaggaaggaaaattggatcgaacatttcacctctcatattaagtctggcaatgatgactatatgtattcctgcctaaataaatcatctattaatcattaagtagtagtttctctttcttagtattaccttgattcaatgttaaaaactattaacaccctaacaacacagaagcagacgca

SEQ ID NO: 3147 - DNA, 200 bp, synthetic construct
  misc_feature 1..200: note = Poly A sequence
  source 1..200: mol_type = other DNA
gaaatatttagctataaataaaaatttatacagcatgtataatttattttgtattaacaataaaaattcctaagactgagggaaatatgtcttaacttttgatgataaaagaaattaaatttgattcagaaatttcagttgatgttatgtatttgttttttagacagtttatttatataaatttatttattgttttttag

SEQ ID NO: 3148 - DNA, 200 bp, synthetic construct
  misc_feature 1..200: note = Poly A sequence
  source 1..200: mol_type = other DNA
tcctgcctcagaaaaagcttttccattacactgtgaatgatacctgttttgttgtttctgaatttccacatgttctgaagacaaattttttatagccgcttatggccattttgtacaattttgaaataaaattaaaccatttatttggtggtatggtttattttcgtggagcctgtactaaaaaaggtggatactcacat

SEQ ID NO: 3149 - DNA, 200 bp, synthetic construct
  misc_feature 1..200: note = Poly A sequence
  source 1..200: mol_type = other DNA
atttcaataatcagagaagtgtaaaataaaacagattatattgtacttgaccctttatgtctttaaagatagttaatgcaaccctgaggcttggggtctataaataacaaaagcatctggcatttctctagtgcagtgtttctcaaagtggccttcagcctagaaacgtcagtgtcaccaggaaacttgttagaagtgca

SEQ ID NO: 3150 - DNA, 200 bp, synthetic construct
  misc_feature 1..200: note = Poly A sequence
  source 1..200: mol_type = other DNA
gtgcaccctgaagaccacaaattaaataaatatcatgactggctttgggaaaatcatgaaaaattaagtctatcttaaactctgcagctttcaagctcatctgttatgcatagctttgcacttcaaaaaagcttaattaagtacaaccaaccacctttccagccatagagattttaattagcccaactagaagcctagtg

SEQ ID NO: 3151 - DNA, 200 bp, synthetic construct
  misc_feature 1..200: note = Poly A sequence
  source 1..200: mol_type = other DNA
cagcatcctggggacggcctgcaccctctgcccgccttggggtctgctgggctgtgaaggagaataaagagttaaactgtcagaatgtgtttcttgcccagatgaagtttgtgttttgtggggggggccttgtgtaaccacggaattcctatttatggcatttcatgccttgtaaatagcaccaggagatgaggaagaga

SEQ ID NO: 3152 - DNA, 200 bp, synthetic construct
  misc_feature 1..200: note = Poly A sequence
  source 1..200: mol_type = other DNA
caaatcaaaggaaaagaaaccaagaactgaattactgtctgcccattcacatcccattcctgccttttgcaatcatgaaacctgggaatccaaatagttggataacttagaataactaagtttattaaattctagaaagatctcttttgtgccttactgtaaaattatttacttttttaaacattttaagttgtattttt

SEQ ID NO: 3153 - DNA, 200 bp, synthetic construct
  misc_feature 1..200: note = Poly A sequence
  source 1..200: mol_type = other DNA
aaacaaatcaaatcatttttactgtgtaaattgtattcttaacattttgtattttgtaggattgatcttattttgagtcaagggttgtaaaatgtatttgctctcagaattcatccccttcttagtattaggtcattcttcatctgtataatttttattaactttgagattcttatacagaaaatagttgcaagggtaag

SEQ ID NO: 3154 - DNA, 200 bp, synthetic construct
  misc_feature 1..200: note = Poly A sequence
  source 1..200: mol_type = other DNA
agacaagagaaagcctacgtttcaatatgtgatgctcatgtgtgtttgtagtgtgagctcttgtttttgaaatgattgcttcagtctttgcctttgtttgcactgtgtgttcagtgaaaactagagaaacacaataagcaaatcacatgaaggctgagatgattgagatgaaagttaacatagtgtgaatgaaagtctgg

SEQ ID NO: 3155 - DNA, 200 bp, synthetic construct
  misc_feature 1..200: note = Poly A sequence
  source 1..200: mol_type = other DNA
gccttttattgtttgttggaatcgatatgtacaaagtgtaaataaatgtttcttttcattatccttgcttgagcccatcaaaaatatgaattcaaagaactaaaatgatatgaaatggggtcataatttgaaagtaaggaaaacattaaagcatagcaaagagataaacaagaggtagcgtatgggtgaatggcagggtt

SEQ ID NO: 3156 - DNA, 200 bp, synthetic construct
  misc_feature 1..200: note = Poly A sequence
  source 1..200: mol_type = other DNA
tagccatgcatttgatttgtttagttttgattgttttaacagttagtaatggtgctgggtaataagcataagaccaatctcttgctgttaaatcagttctgtccttggcaactttcttctgatatctgaatgttcatgaaggtcctagctttatattgtccctcttttaggaataaaattttgattttcaacaatgtgag

SEQ ID NO: 3157 - DNA, 200 bp, synthetic construct
  misc_feature 1..200: note = Poly A sequence
  source 1..200: mol_type = other DNA
gcaaaggctccccttacagggctttgcttattaataaaataaatgaagtatacatgagaaataccaagaaattggcttttagtttatcagtgaataaaaaatattatactcttgaacttttgtctcatttttttgagtatgctgtttatatgattttgatttccctctgataactatcaacagtatttaaatagcttata

SEQ ID NO: 3158 - DNA, 200 bp, synthetic construct
  misc_feature 1..200: note = Poly A sequence
  source 1..200: mol_type = other DNA
ccaactttgtacatcttggccatgtcactggtcattgtgtgaaataaagataatctggataatgactattagtccaatgctaagaaacatgatctttgctcattaaagagctaaaatgtttattgctgttttgtctttcttttttctaaaaaaagaaaaaaaagaaaaaaaggaaaagaagaacaaagaaacatgactgt

SEQ ID NO: 3159 - DNA, 200 bp, synthetic construct
  misc_feature 1..200: note = Poly A sequence
  source 1..200: mol_type = other DNA
gatgtctgaactattaaatttaccattttgtttttcttgaatagtctgtgtacaggagtaaatatgttaagtggtttataaagaaattctgtttttagtcaagtgactttactaatcagttgttctaagtgtgaatatggcatgctaattagctaatttggtagaagctaatttgcttctaaaaatcaggtataaagttc

SEQ ID NO: 3160 - DNA, 200 bp, synthetic construct
  misc_feature 1..200: note = Poly A sequence
  source 1..200: mol_type = other DNA
tgacatgaatggggccatattcttcctggggcccaaatgctggctggccttgtggtccaaataggcatcatcaataaaacagttggcatgcatcccactgctgactataatgcctctccttaaatgcttctagggaccagcaatacagtgctcgccacagtgggcagtcacacaaagctacccatctgccagatcaccaa

SEQ ID NO: 3161 - DNA, 200 bp, synthetic construct
  misc_feature 1..200: note = Poly A sequence
  source 1..200: mol_type = other DNA
cgtgaatatatctggatggggggttttgtaaataatgaagttgtaataaaaataaaatgaccaaaagcacctttaaagtgaatatacaatttatttaacattcaaacttcattaagacatgtgcaatatggcaattttactggggattaaaccctacctaggattgcttgctggggcttagcaacagggtccagttcaca

SEQ ID NO: 3162 - DNA, 200 bp, synthetic construct
  misc_feature 1..200: note = Poly A sequence
  source 1..200: mol_type = other DNA
cagatggtgctgatgaacatttgcaactcatcagcctttgtgcaactgtgatgcagcagttatctcagaattgttaacgtgaatatatctggatggggggttttgtaaataatgaagttgtaataaaaataaaatgaccaaaagcacctttaaagtgaatatacaatttatttaacattcaaacttcattaagacatgtg

SEQ ID NO: 3163 - DNA, 200 bp, synthetic construct
  misc_feature 1..200: note = Poly A sequence
  source 1..200: mol_type = other DNA
aatttaccaaagagatattgatattgaaggaatttgggaggaggaaaagaaacctggggtgaatacttattttcagtgcatcattactgttccagattcctatgatggatggcagactctttaataaattgcttactgatattatcttatcattgagccaatgaaatttttttcccctgctagcatagatgtactgtggc

SEQ ID NO: 3164 - DNA, 200 bp, synthetic construct
  misc_feature 1..200: note = Poly A sequence
  source 1..200: mol_type = other DNA
atgaatctttgaaaagctggtaaaagacatgaccatgaagaaatctgaactttttaatattgttaaatatcttgacaaaataaagatgttagtagtttgacaactgaatctgttgtgttttaggccttatatttttaatgttttgattttgttacactatgttctgtttctttctttccttccttctttctttccttcct

SEQ ID NO: 3165 - DNA, 200 bp, synthetic construct
  misc_feature 1..200: note = Poly A sequence
  source 1..200: mol_type = other DNA
tgctgtacccctcaaggatttaaactaacgaaaaatcaataaataaatgtggatttgtgctcttgtatttttaagtggattaaaaaacttactaccttaaattgatttgctacatgcttaaaatgatagaggttgctcagcatttttggagtacaagggggtcagagagtcatgtgatgaaaattacagggcgagtacag

SEQ ID NO: 3166 - DNA, 200 bp, synthetic construct
  misc_feature 1..200: note = Poly A sequence
  source 1..200: mol_type = other DNA
ctaacgaaaaatcaataaataaatgtggatttgtgctcttgtatttttaagtggattaaaaaacttactaccttaaattgatttgctacatgcttaaaatgatagaggttgctcagcatttttggagtacaagggggtcagagagtcatgtgatgaaaattacagggcgagtacagagatttagaagggaacgggtttta

SEQ ID NO: 3167 - DNA, 200 bp, synthetic construct
  misc_feature 1..200: note = Poly A sequence
  source 1..200: mol_type = other DNA
gtgaccctgcgacccactctttggaccagcagcggatgaataaagcttcctgtgttgtgtgatactccggctcctcatttgctgtcgctggttgtggaattcctaggttgaagttctgtccacctcccagttcacgtgaggtggaagacagggagggggtttcaaaagaatccacattaccattcacagacccagaatgc

SEQ ID NO: 3168 - DNA, 200 bp, synthetic construct
  misc_feature 1..200: note = Poly A sequence
  source 1..200: mol_type = other DNA
acccagccgggtcaataaacctggacgcttggaccctgcctgcgagtctgccggggcgggagggcgcgtcggtggctgctgggccttgcgcacggggagtcgctcggtggcaggctgggtgggggctcccgggccctctggggtcctctagcgaggcccccctcgccgtgcactccggagtcgccgtgctgggccccagg

SEQ ID NO: 3169 - DNA, 200 bp, synthetic construct
  misc_feature 1..200: note = Poly A sequence
  source 1..200: mol_type = other DNA
gaccacgctgctccgtgtgaataaatgcccagtggcacgcctgtgtcctgtctctctgttctggccaccagagcccctgcgtcgcccccggcagtcctgggttgggcccctctctgggcttgggtttccccagctgttccagctgggcgagccctcttggctgctgtcccataccagtgcccgtgcggagaggtggacac

SEQ ID NO: 3170 - DNA, 200 bp, synthetic construct
  misc_feature 1..200: note = Poly A sequence
  source 1..200: mol_type = other DNA
aaattactgaaaactgaatctttattacgtgtcctcttttatttattagaagactgtgtataataaacactactaaatttttaaaatttgaggtcaatggaacatttaatttgatgaattgaactattatattaatttgtcttttttctcatgtagtacattcagaataccagtgctttttatgacttgagcatgtgttt

SEQ ID NO: 3171 - DNA, 200 bp, synthetic construct
  misc_feature 1..200: note = Poly A sequence
  source 1..200: mol_type = other DNA
caccccggtgcggaccacagagcagaccctggcgccaggaaggagcatgtgttagcgactcgtcccacctggaattgtaataaatacatctaaataaaacatgccttgggagtgtacagacctttctgcactaatacctgagttgtcttttcactaaagctggattgaagaaaaagccccaagagtacccctgaggcccc

SEQ ID NO: 3172 - DNA, 200 bp, synthetic construct
  misc_feature 1..200: note = Poly A sequence
  source 1..200: mol_type = other DNA
gacagcatccaagggagtgggttttgtgcaagggctgggggtctcctgcctctcctggtgtcgccggtggctcattttctggcaaatggaggcacgaacgcaggggccaaatagcaataaatgggttttgttttttttttgcaataacttattgaagtcagcagggcatccttccctagtatgcttcctggggcgtgtct

SEQ ID NO: 3173 - DNA, 200 bp, synthetic construct
  misc_feature 1..200: note = Poly A sequence
  source 1..200: mol_type = other DNA
cccggccccagcacccgccaggatgtggagtccgaggcccatctccgcatcccgggctcctggctcttgattttgtctgccacagacatcccacaaagccgctgccattttattaaagtgttttgatccactttgcactggaatgagaggatctgtgtaaggcactttccagggaaggctggggactgacccttgttgcc

SEQ ID NO: 3174 - DNA, 200 bp, synthetic construct
  misc_feature 1..200: note = Poly A sequence
  source 1..200: mol_type = other DNA
ttttttcactgtactttctgtatcatgtaaaaactacacttaggatatgagaaaattttaaattatatgcatcacatcagaagaacatattattggcaaataataaaattatcaactgttttcaaactgtgcaaagtgttctatttagcagtctgccttgtgtctgctacttgaccctgaaattcaattgagtctaccca

SEQ ID NO: 3175 - DNA, 200 bp, synthetic construct
  misc_feature 1..200: note = Poly A sequence
  source 1..200: mol_type = other DNA
gatgcagatgtttcttcctgaaaacttctttttttacaaagaaaattagatgtacatgtataattcagtgtgctttgtctttctccagattaatatcggttacactgctgatgtttgtaaattaaacagatatttacttcattaacagcttggtggtgttcttagaaattgcacaataggccactccttaagaatttttt

SEQ ID NO: 3176 - DNA, 200 bp, synthetic construct
  misc_feature 1..200: note = Poly A sequence
  source 1..200: mol_type = other DNA
ctagcttgccattattgtgtgtgtaattatggccaaaaggacataggagatggactaagatgtcttggaccacctttgtgtaacaaagaaataaacagtaaattttattttttcatattctgcttcatcttctcttagtgatatagtcactatgatagactttattttttctgagctttctctttaatgctatgtgcaga

SEQ ID NO: 3177 - DNA, 200 bp, synthetic construct
  misc_feature 1..200: note = Poly A sequence
  source 1..200: mol_type = other DNA
tcttaaacactgaatatcacactcttcttatgactcttgttagcgattcaaggacataaatcttcattcttttctggcacagactacttaaatgggtctgttttcactttgctcatttttcttcaataaatctttttggcaagcaactgatttactgtgtgtaggtgtgtttgatattctactacagacttctcaaatta

SEQ ID NO: 3178 - DNA, 200 bp, synthetic construct
  misc_feature 1..200: note = Poly A sequence
  source 1..200: mol_type = other DNA
tgataccctcaaatctaattggatgtgctttcgcctttgcatgtaagtacggtagtaagaaacctttgagatctttctgacttttcaaaattagagaaagcaaatgggatggatagattttttttttcttttcaaggggggcaggaaggtaatggtttgagtagcctttgtttaaaaaaaagactaaatatatttaaaag

SEQ ID NO: 3179 - DNA, 200 bp, synthetic construct
  misc_feature 1..200: note = Poly A sequence
  source 1..200: mol_type = other DNA
aaataaaatatactagtcctgacactgaatttttcaagtatactaagagtaaagcaactcaagttataggaaaggaagcagataccttgcaaagcaactagtgggtgcttgagagtcactgggacactgtcagtgctagatttagcacagtattttgatctcgctaggtagaacactgctaataataatagctaataata

SEQ ID NO: 3180 - DNA, 200 bp, synthetic construct
  misc_feature 1..200: note = Poly A sequence
  source 1..200: mol_type = other DNA
agctatctgatgagaattttcatatatgaattatttattgtacatgtgtgttattaaagataacttatactttataaatgaaaaaatacatttcagttatacattaagaactacgaataatgtttgaatatacctcttcccactaacaattcattctttggaatacttacacattatttctctgctaaacagactatagt

SEQ ID NO: 3181 - DNA, 200 bp, synthetic construct
  misc_feature 1..200: note = Poly A sequence
  source 1..200: mol_type = other DNA
gtttatgccagttacatacaaggatcctgcatatctcaaggaccctaaagtttgtaacatcagatatcgggaataaattctatcacgttaccactaataaacttattttacagtaagtggttgtatgatgccaatactgactcaaaccaacctttggatagaaaagtgtttgaggagtgaggtaaagaatgacacttccc

SEQ ID NO: 3182 - DNA, 200 bp, synthetic construct
  misc_feature 1..200: note = Poly A sequence
  source 1..200: mol_type = other DNA
tgctaccttaaagtcagaataacctgcattatagctggaataaactttaaattactgttccttttttgattttcttatccggctgctcccctatcagacctcatcttttttaattttattttttgtttacctccctccattcattcacatgctcatctgagaagacttaagttcttccagctttggacaataactgcttt

SEQ ID NO: 3183 - DNA, 200 bp, synthetic construct
  misc_feature 1..200: note = Poly A sequence
  source 1..200: mol_type = other DNA
taaaactcctttcagacatataagtttaataaataacttttttgttgactttcaagtaaagtgattttttttaatttaacataaagtcttcagaaagcctttctatgaaagaattttaacctataatgtaaaggatgtattctgagagaacaaagcagaatgaaacttgagtcacttactaaatatagtggatataaaat

SEQ ID NO: 3184 - DNA, 200 bp, synthetic construct
  misc_feature 1..200: note = Poly A sequence
  source 1..200: mol_type = other DNA
aaaattcatcctgtataataattttacatatcatttcataaagtattttaatagaaaaatcacttgtatgcttatattttcagtaattattgtatggtgctcttgtcttctttgtttgtgacccatgcttgaaaacttgaaggaagttagatatgaatggcaaaagttaggcagtatttataaggtacctgttttatgtt

SEQ ID NO: 3185 - DNA, 200 bp, synthetic construct
  misc_feature 1..200: note = Poly A sequence
  source 1..200: mol_type = other DNA
agagcagttttccaatgaaaactgtgtaaatagagcatcaacaagtacaaaattcttgtcttaattagtgggggtatataaaaattccttgtaatggtcaaatattttttaaaattgacattaataaagcatattttaaaagattctaaataaaagggtagcattattatagaaatactgctgcagatttgctttctgga

SEQ ID NO: 3186 - DNA, 200 bp, synthetic construct
  misc_feature 1..200: note = Poly A sequence
  source 1..200: mol_type = other DNA
gttcagacttcaaatagtggcaaataaaaagtgctatttgtgatggtttgcttctgaacattctttttttaaaaataatctgacagcttggtggattagacagtaaatttgacagctggtaaacttttctgacccagacaaattggatataaacatactactatgcacctttactgtgaagctgaaatggggcggagaag

SEQ ID NO: 3187 - DNA, 200 bp, synthetic construct
  misc_feature 1..200: note = Poly A sequence
  source 1..200: mol_type = other DNA
atcacagcggaaaataaaaagaaagtcgcgttgttatatttctaaaccaacctaacaagaattaagcagagttgggggaagtgggaggggtgacaagcattatagtgattcttgcacaaacagctttaatttttccctttttcatactttaacaattgaactgttaagggtggttttaatgtaaacatagtttctataat

SEQ ID NO: 3188 - DNA, 200 bp, synthetic construct
  misc_feature 1..200: note = Poly A sequence
  source 1..200: mol_type = other DNA
aataattggatttttaaacaatgtgaataaagaggcttgtgttttgattactagtgtaaactggttattgagatagattatgacattggtggatattttggcacttttatatgaaaataaattttttaatgaaatctgggtgctctgttttttttaactcttcataaatcagtggtaaaaacaaagcatccatatgtcag

SEQ ID NO: 3189 - DNA, 200 bp, synthetic construct
  misc_feature 1..200: note = Poly A sequence
  source 1..200: mol_type = other DNA
aaagcacctgtcaaatggctttgaagaagtgatgccaccatctctagccataataaagaaacagaatcacctagtattggatgtatttcaataataaatagagtggtgtcttttccataattgtgttaaagaacatttcttttccattcaatttgtttattaaactcctatgccaggcattgttgaaaatacaaaattaa

SEQ ID NO: 3190 - DNA, 200 bp, synthetic construct
  misc_feature 1..200: note = Poly A sequence
  source 1..200: mol_type = other DNA
aaaggccatccacattttaaagggttatttgtcttttatataattcgtttgctttcagaaaatgttttagggtaaatgcataagactatgcaataatttttaatcattagtattaatggtgtattaaaagttgttgtactttgtctgtgaccttaattttctgcactgagttaccaaatatttccaaccaggtagtcttc

SEQ ID NO: 3191 - DNA, 200 bp, synthetic construct
  misc_feature 1..200: note = Poly A sequence
  source 1..200: mol_type = other DNA
gagtctgctgggattgagcaatcatctcctgcccaagtttcctccttgccctgaggaccagtgaaagacagatcataggagagtcccttttgctgctacttcattcgttctgacctaataataaaagttagaaccatatgagttttcagatgtcgtttttgaatagtgttgaaaggttatgttttcacaaggtaagtcct

SEQ ID NO: 3192 - DNA, 200 bp, synthetic construct
  misc_feature 1..200: note = Poly A sequence
  source 1..200: mol_type = other DNA
tctaggaatcagcttgcaacagagcacaaaaaacaccaaaaaaatttcaaacaagaaaaaaaaaaaaaaaaggaaaagaaaaaaattgaactgtaagctttaatgattactttagatttgttttattttccctcctgcagtgaattaattggatatatatcagctgacactgatagattgatatttctgatcgttatttt

SEQ ID NO: 3193 - DNA, 200 bp, synthetic construct
  misc_feature 1..200: note = Poly A sequence
  source 1..200: mol_type = other DNA
acacatttttataaaaatgagtgcttaaactaagttgtattccttttttctttctctttttttaagtgctgtggttaaaatttgaaagcatttagtgtggtatgccatttggcttagatacctctaaataagactcttcaaaacagagccctgagatggtcctttttgacccatctacttcatatgcttgtcacattaaa

SEQ ID NO: 3194 - DNA, 200 bp, synthetic construct
  misc_feature 1..200: note = Poly A sequence
  source 1..200: mol_type = other DNA
acagaaaactttgcttatttcttttgcagcaataagcatgcataataagtcacagccaaatgcttccatttgtaatcaagttatacataattataaccgagggctggcgttttggaatgcaatttgcacagggattggaacatgatttatagttaaaagcctaatatgcagaaatgaattaagatcattttgttgttcat

SEQ ID NO: 3195 - DNA, 200 bp, synthetic construct
  misc_feature 1..200: note = Poly A sequence
  source 1..200: mol_type = other DNA
ttgcactagactgcttgtaactaaccaagatgattgttgctgcttctaaatttttttcaaggacaacttgagtggagtcatttttgtaatttttaaataaacttaaatttgagatatgcattttttttctccaaaaagtctattagctcagattctggcttgatttgggatcttgttttattatcaaatttcagcattca

SEQ ID NO: 3196 - DNA, 200 bp, synthetic construct
  misc_feature 1..200: note = Poly A sequence
  source 1..200: mol_type = other DNA
ttggcactgactatatctctgcttgactgtgaataaagtcagctgtgcagtatttatagtccatgtataataaatacatctcttaatctcctaataaattggacctttaaactacagatacattttgtggtgtctattttaaatgttttttgatgtctcaaattgagcatgtttcaatttcctatatagagagaagattt

SEQ ID NO: 3197 - DNA, 200 bp, synthetic construct
  misc_feature 1..200: note = Poly A sequence
  source 1..200: mol_type = other DNA
atcgtatcggttcctgttcagatgacatggggaagatgatggttcagccactggtactacgagaatgtttgtattacccacatttgaaatgatttgctatgatttttatgaagattaaaaatatatacacagttcctggtatgttgaggttgtctttattattcttactcagaaaggaaaatttgtaaatatgtttgtgt

SEQ ID NO: 3198 - DNA, 200 bp, synthetic construct
  misc_feature 1..200: note = Poly A sequence
  source 1..200: mol_type = other DNA
taaccgtttcctttcatttactgtggcttcttaatcttttcacaaataaaatcaatttgcatgactgtacctgtttctctcttgtaaccttagtgggcagatctgcaccagcaaagtgaagcagagttacatggcagccttgtagataatgcaaggattacgtgatcaatgtcaccagagtcatttgtgcgtcaagtgac

SEQ ID NO: 3199 - DNA, 200 bp, synthetic construct
  misc_feature 1..200: note = Poly A sequence
  source 1..200: mol_type = other DNA
tgcattatggtcaaatcttttcatgtatatggatgtgactattttaacaaataaaagaagtgaaaagttatttaccttgtattttctgaatgtacaatagtttcctattctattaatcttgagttcatttttagtatgcacaagaaatgtgagattatgtactgtagaaacctaacttcttttagacttaaatccttcat

SEQ ID NO: 3200 - DNA, 200 bp, synthetic construct
  misc_feature 1..200: note = Poly A sequence
  source 1..200: mol_type = other DNA
aaggtcatgctgttacaggtgtagtttgtgtgcataaataatacttccgaattaaattatttaatatttgactgatttcaataactgtgaaaaataaaaaaggtgttgtattgcttgtgagaacttgaactgtttactagttaattgaagaaaaagtgtaacactaaggtgaacttgcttcccttttcactaattttgct

SEQ ID NO: 3201 - DNA, 200 bp, synthetic construct
  misc_feature 1..200: note = Poly A sequence
  source 1..200: mol_type = other DNA
gtaaaaggtcatgctgttacaggtgtagtttgtgtgcataaataatacttccgaattaaattatttaatatttgactgatttcaataactgtgaaaaataaaaaaggtgttgtattgcttgtgagaacttgaactgtttactagttaattgaagaaaaagtgtaacactaaggtgaacttgcttcccttttcactaattt

SEQ ID NO: 3202 - DNA, 200 bp, synthetic construct
  misc_feature 1..200: note = Poly A sequence
  source 1..200: mol_type = other DNA
ctatggactctagttcagttttatatgcaatggatcactattttatttaattttttttaaataaaaaatacaatagcattggctatattctgactttcctgctacagcatcaacaagggtaaccaaccttccaggttagattccagccattagtgcttcagaccatggagaggggcaaagtgcccatggtccaggcactg

SEQ ID NO: 3203 - DNA, 200 bp, synthetic construct
  misc_feature 1..200: note = Poly A sequence
  source 1..200: mol_type = other DNA
aaatggaggggaaaaaggccacagcaatctgtactacaatcaactttattttgaaatcatgtaaaataagatattagactgttttttgaataaaatatttttattgattgaacctttgaccctctatcttattacatttagaggcctggcatctttcttgtgagtcaagcttaaggacacaaaagaaacacaactttgtg

SEQ ID NO: 3204 - DNA, 200 bp, synthetic construct
  misc_feature 1..200: note = Poly A sequence
  source 1..200: mol_type = other DNA
tagcccgacagttctgaactggaacatgggcattgggttctaaaggactaacataaaatctgtgaattaaaaaagctcaatgcattgtcttgtggaggatgaatagatgtgatcactgagtcagccacttggtttttggctctttcagagaggtctcaggttctttccatgcagactcctcagatctgaacacagtttag

SEQ ID NO: 3205 - DNA, 200 bp, synthetic construct
  misc_feature 1..200: note = Poly A sequence
  source 1..200: mol_type = other DNA
gagcattttaagaggtgcagcctctggaagtggatcaaactagaactcatatgccatactagatatgtttgtcaataaacttatgacgtgaatgcttaatgcctcttttttgaaatagggaatgtaataattggccatttgcctactttattatttgggtaacattccagtattactctctgtgatttagcttatttaat

SEQ ID NO: 3206 - DNA, 200 bp, synthetic construct
  misc_feature 1..200: note = Poly A sequence
  source 1..200: mol_type = other DNA
aataagtgtgtggtcccaagttggaaatattcatgcttcttccttaccctgcgattttgcctgtgtctgaagtggttgttttgtcatgaattcttatgcttataatatcctttgtggcaccttttctttttctccctaaactgtacatgtgaaggggatgagctcaagcaggaagttcaacttccagaattgatcatagg

SEQ ID NO: 3207 - DNA, 200 bp, synthetic construct
  misc_feature 1..200: note = Poly A sequence
  source 1..200: mol_type = other DNA
tgtgaggacttctgcatcttacagtcagcacagaacacactgagtcttgaatcaagtcagcaacagagcaaaataaaggttagataagtccttgtgtagcaaatttcgagcataagaaataaaatctaattaattcttagggtactcatctgacttgaactctgttggtttactgtgttagtaaactgtgctttctatta

SEQ ID NO: 3208 - DNA, 200 bp, synthetic construct
  misc_feature 1..200: note = Poly A sequence
  source 1..200: mol_type = other DNA
aataaatttgtgactaaacaaagactttcatattaaatgggttcaattgaactcatttcttattttccaagtgtcaatgtgaaaagaaaataaatgctagcactactgactagtcagtatatctccactttaaatgctaaatactttcttgaaataaaatcgcacctcccggccaggcatgatggataatgcctgtaatt

SEQ ID NO: 3209 - DNA, 200 bp, synthetic construct
  misc_feature 1..200: note = Poly A sequence
  source 1..200: mol_type = other DNA
gagaagaaagagccatggagatagtagcagacaggctgcccaaggtatgaagcagatgagggaccagcactcagtctaacatgtaaacatcatacgtaataaaggttgtgtttcaaaccttacctggatatattatttaattaacaaattaatctacctatctattcatcattttctttttttttcctttttctttttct

SEQ ID NO: 3210 - DNA, 200 bp, synthetic construct
  misc_feature 1..200: note = Poly A sequence
  source 1..200: mol_type = other DNA
caacgcatccggatgacggttccctgtctctgaaagacctttctctggaagaggagtctgcattgtagtgtctcaaagacacaataaacttcctatggtctgcactgttgtgatattacatttttgtgagtagaatcctgtgtgaccactaatattcaagttcatgaagcgcccctcctcagcatgagtcttgaagtttt

SEQ ID NO: 3211 - DNA, 200 bp, synthetic construct
  misc_feature 1..200: note = Poly A sequence
  source 1..200: mol_type = other DNA
tgggcatggggcacccatgtgccgagagccttgcagaccatgacaggtccctattaaacacaggctttctgagttgtcctctccagagttgctgtgattatggcatttccccaccttttagagttgggcctggacaggtgctcatgaagtgtgattccccagagccaactccccgtcccccaccacaggacatgcagacc

SEQ ID NO: 3212 - DNA, 200 bp, synthetic construct
  misc_feature 1..200: note = Poly A sequence
  source 1..200: mol_type = other DNA
aatggccgccgctttcctgttctctggctgtaatccccagcctctgccttctctgctctgggagtccccagcctctagcccctgctacttccctccctcttggatagtggtaggggtccacaaggtgggggcttgtagcctaggggaggagctgggtctttgttgtctggtaggcaccaccgcttcctttgggtatttaa

SEQ ID NO: 3213 - DNA, 200 bp, synthetic construct
  misc_feature 1..200: note = Poly A sequence
  source 1..200: mol_type = other DNA
taaagaaattattggataacctctacaaataaagataggggaactctgaaagagaaagtccttttgatttccatttgactgctttctatgagcccacgcctcatcttcccctgtgcacatgtttacctgatacagcagtgctgcgtgttgtacatacttggaacaacaaactagaaatactgtacttctgtaccaacatt

SEQ ID NO: 3214 - DNA, 200 bp, synthetic construct
  misc_feature 1..200: note = Poly A sequence
  source 1..200: mol_type = other DNA
gaaccaaggttttgaaatcccatcaggtcaccgcgaggcctgactggccttattgttgaataaatgtatctgaatatcccctgttgtttccatttgctttttcctcaaaggtatgtttgattataccagggtcaggggactttggtaagactgagaatagaccaagttttaaaaacatcaggaatcctgtaatttcagac

SEQ ID NO: 3215 - DNA, 200 bp, synthetic construct
  misc_feature 1..200: note = Poly A sequence
  source 1..200: mol_type = other DNA
gatgctgatcctcccgctggcttccagacagacctgggacttggcagtcatgccgggtgatggtgttcctgcggagtccctcagttgtcctattccttcctagcttccctgcaataaaatcaagctgcttttgttggagatgttgtcttgcctggtcttggtgttgcttgctcacatgtaggtggttatgcttacttggg

SEQ ID NO: 3216 - DNA, 200 bp, synthetic construct
  misc_feature 1..200: note = Poly A sequence
  source 1..200: mol_type = other DNA
tctccaccatcggaggcgtgacctatgagcgcgtgagcaagagtctggcctaagcagccaggcccggcccagggagctacaaacccaccaataaaactgatataaggacagacgctgctcgctccagaacctctttgtttttcttttctggtgtcttgggatggcctctggctgggtgagggtgggaaagcccccaaggg

SEQ ID NO: 3217 - DNA, 200 bp, synthetic construct
  misc_feature 1..200: note = Poly A sequence
  source 1..200: mol_type = other DNA
cagccaggcccggcccagggagctacaaacccaccaataaaactgatataaggacagacgctgctcgctccagaacctctttgtttttcttttctggtgtcttgggatggcctctggctgggtgagggtgggaaagcccccaagggtggccacatgggcaacacattgcccctgagatccatgtgggattcatgtcatgg

SEQ ID NO: 3218 - DNA, 200 bp, synthetic construct
  misc_feature 1..200: note = Poly A sequence
  source 1..200: mol_type = other DNA
tttcttagtgcttcagagtttgtgtgtatttgtattaataaagcattctttaacagattcttcctagtattgtggttgcttttccatggaggttacttaaaataacatgaaagctagctgaggtgtttaacaaagagtctataatgtgacaatagagatttgtctgatgtctaaaaacttaaatctttttggtttaacag

SEQ ID NO: 3219 - DNA, 200 bp, synthetic construct
  misc_feature 1..200: note = Poly A sequence
  source 1..200: mol_type = other DNA
ccttcataggtttgaacactgtgtgtttttaccaaagtggccattggcactgtttgcttttttacaatcatgtggacacaagcataagtaaagaaaatttgtcaaccaggcaaaatgtggttctttaacagctagaattctaaaaagaaaaaaatcacttccacaaatatgcttatatcttgctgagcattaaaccaaaa

SEQ ID NO: 3220 - DNA, 200 bp, synthetic construct
  misc_feature 1..200: note = Poly A sequence
  source 1..200: mol_type = other DNA
acccagctcaggctcgcctgccatctccccaaggctgcgttgtgtttgctattattttctgtgtgttttctttgtgagtgttttgttttgttgtttttctattaaactgcataaagaaacggcacctatctgtatggtgatgccaggctaggttttgctgcagtaacaatcaacccccaaatcccagtggcctaaaccgg

SEQ ID NO: 3221 - DNA, 200 bp, synthetic construct
  misc_feature 1..200: note = Poly A sequence
  source 1..200: mol_type = other DNA
taaagcaaatatattttacttctctgatgattttgtatttttctgctctcagccaaaccctggggctgccccggtgaaaaccacctctaccggggctgagaggccatcccgcctgtcagcaagtgctacgttcacttgctcttctaggcacggcctctggcctcatcccgatggctctctgcccatttcccgcacagcag

SEQ ID NO: 3222 - DNA, 200 bp, synthetic construct
  misc_feature 1..200: note = Poly A sequence
  source 1..200: mol_type = other DNA
ccggccagccaggccgcccactggtagcgcgggccaaataaactgtgacctgggcgcggctggctcctcctccacttgcgcggtggggggagttgtaaataaggaaactggtctttgcaagacggttacctggtggagccgggattttgagtctagaggctgccaggcccctgtgccctacaccctgctctcccatggac

SEQ ID NO: 3223 - DNA, 200 bp, synthetic construct
  misc_feature 1..200: note = Poly A sequence
  source 1..200: mol_type = other DNA
accaaggcccccgggccgacggagccgggaaagaagagccggagcctccagctgccccggggaggggcgctcgcttccgcatcctagtctctatcattaaagttctagtgaccgagtcccgggctgcgttctctgggtccgcgggggtggcgcaccgcgggctacggagcctggaggggcccagcccgagtccgggcagc

SEQ ID NO: 3224 - DNA, 200 bp, synthetic construct
  misc_feature 1..200: note = Poly A sequence
  source 1..200: mol_type = other DNA
tctgggactggcaggttattaatcgagatacacttgttaggagggacagggttcccctaaggcacttttaaagatactctgtaagaaccattaacaataaacttactgtcaatcatttctctctatgcaaacgtcattggttaaagtgctgatgccatttaattagattgtttacaaatttaacaggatggctacaaaga

SEQ ID NO: 3225 - DNA, 200 bp, synthetic construct
  misc_feature 1..200: note = Poly A sequence
  source 1..200: mol_type = other DNA
gccgagtctggagcatctacacctgaggacaagacgctgcccacccgcgagggctgaaaaccccgccgcggggaggaccgtccatccccttcccccggcccctctcaataaacgtggttaagagcagctcgagcctggtattttctcatccaaatgctgatccctgtgggggaccgagagtgccaagtcccagattttgt

SEQ ID NO: 3226 - DNA, 200 bp, synthetic construct
  misc_feature 1..200: note = Poly A sequence
  source 1..200: mol_type = other DNA
aagtttatggcagagctttacaaataaaaaaaaaactggcttttctgacttttaggtttttttttcttatatgcaaaaaagctccattctatctacattgcttacacattaagtttgcactagcgaactggatgcaaggtatggactaagtaaacaaggctttgaaggggagctgtccgtctaagttctcaggattgggg

SEQ ID NO: 3227 - DNA, 200 bp, synthetic construct
  misc_feature 1..200: note = Poly A sequence
  source 1..200: mol_type = other DNA
ccattggcacacgctagaagtttatggcagagctttacaaataaaaaaaaaactggcttttctgacttttaggtttttttttcttatatgcaaaaaagctccattctatctacattgcttacacattaagtttgcactagcgaactggatgcaaggtatggactaagtaaacaaggctttgaaggggagctgtccgtcta

SEQ ID NO: 3228 - DNA, 200 bp, synthetic construct
  misc_feature 1..200: note = Poly A sequence
  source 1..200: mol_type = other DNA
actctgtttgctggctacacggacaacctggtgcgagtgtggcaggtgaccattggcacacgctagaagtttatggcagagctttacaaataaaaaaaaaactggcttttctgacttttaggtttttttttcttatatgcaaaaaagctccattctatctacattgcttacacattaagtttgcactagcgaactggatg

SEQ ID NO: 3229 - DNA, 200 bp, synthetic construct
  misc_feature 1..200: note = Poly A sequence
  source 1..200: mol_type = other DNA
ggacagggcagtcttggtgtgcagcccctctcctctctgtcccctgacactccacagtgtgcctgcaacccaagtggccttatccgtgcagtggtggcagttcagaaataaagggcccatttgtgggatgccgcattcactccgtgtgtttgtgtgtctgcacgggagatgtttcctaggatctgaaattgctgctctgg

SEQ ID NO: 3230 - DNA, 200 bp, synthetic construct
  misc_feature 1..200: note = Poly A sequence
  source 1..200: mol_type = other DNA
tgagtggcagaagtgagaatttgtaaacttatgtacaatgtacgtgtaaataaatggattgaatttcagtttgtcatcaggccgcgctcccgttttgtttttaaggggttaatcttttgagcttccttctcagcagtgtgtgggccaaaaggctcatactgacccacctggtgaaggagaggcaaagtgggcagtatata

SEQ ID NO: 3231 - DNA, 200 bp, synthetic construct
  misc_feature 1..200: note = Poly A sequence
  source 1..200: mol_type = other DNA
gtcaccacttcactcaggctgcagccctcttggggctccaggatttgctgaaagagaaaaagatatggtttgtgaactggggcatcaatcatcttttgataaatggatcagttttaggactttcagaaaataaaagatcgctcttgaaaagctgttgacatagcatttgtcttttatttggggaaaggaggaaggtcttt

SEQ ID NO: 3232 - DNA, 200 bp, synthetic construct
  misc_feature 1..200: note = Poly A sequence
  source 1..200: mol_type = other DNA
ggtctatatttacgtgcctaacagtagctctgggattttatcgcctgtggatctaataaagtgtctatttaaagtgatttctactgttttgccttaagaataccagattgttggctgggtgcggtggctcacacctgtaattccagcactttgggaggctgaggcaggtggattacctgaggtcaggagttcgagtccag

SEQ ID NO: 3233 - DNA, 200 bp, synthetic construct
  misc_feature 1..200: note = Poly A sequence
  source 1..200: mol_type = other DNA
aggtcacattggtgttgtactcaattttaacaacagctggtgccctgctttcagatactggattgtactttgtgctggggttatctgaagtcagatctgcctaaggacttctttaattttggaattttcctcctttctctttcgttacagaagccccaccctgcctcacccacccttttttaaataaataaatagctaga

SEQ ID NO: 3234 - DNA, 200 bp, synthetic construct
  misc_feature 1..200: note = Poly A sequence
  source 1..200: mol_type = other DNA
gagaaggacgtaaacagaacctgacaccagctccttttccttctatacattatttaatacctattaaataaaattatttttggaataaagcttgtgggaacatttgggatctagagaaagtgatatgtgaaattctatctcatatagtcagttaaactttattatttacaagttaaattacacagcagctttacacagca

SEQ ID NO: 3235 - DNA, 200 bp, synthetic construct
  misc_feature 1..200: note = Poly A sequence
  source 1..200: mol_type = other DNA
agcgcgggacttggacacggacctcggcgggcgggactgggcggggcggggcatcagaactcaggtgttttttatttacgcgtcagggcttttcttgtttaataaagttatgatagctagcagtgcggtcccgggcgcctccccgtggggtttgccttcgcggcggactcgctcctctggtctacagcctttggaccggt

SEQ ID NO: 3236 - DNA, 200 bp, synthetic construct
  misc_feature 1..200: note = Poly A sequence
  source 1..200: mol_type = other DNA
ctctttgctctatggcccttcctcatcaggggaccgtttcccccctcttccttcacagtatttaagaaataaaagtcggatttttctggctgctttctctctacattgtctccattaggtagtgtgtcccttaatcttgtgtgaacttttttaaattaatacttccttggaacactgttgtgttctactcagcacgctaa

SEQ ID NO: 3237 - DNA, 200 bp, synthetic construct
  misc_feature 1..200: note = Poly A sequence
  source 1..200: mol_type = other DNA
agtccttccagtgtcctccccagcctcctgagtctccggtgggctgccatgccctctttgtttccttatctccctcagacgcagagtttttagtttctctagaaattttgtttcatattaggaataaagtttattttgaagaaagatattgtttctttagtctcaaaacaagagtctaggaaagatccaaaacacagagc

SEQ ID NO: 3238 - DNA, 200 bp, synthetic construct
  misc_feature 1..200: note = Poly A sequence
  source 1..200: mol_type = other DNA
gggtttcctgctggacaggggcgtgggattgaattaaaacagctgcgacaacacctgtgttccagatccttttggggcaagggagtggggaacaggcactggccatgttgttacactgagatcaaacctgacagccgtttttaaaggtttaaccccaatcccaagtgctgaaaaaccagaggctgagggagatgtgtaag

SEQ ID NO: 3239 - DNA, 200 bp, synthetic construct
  misc_feature 1..200: note = Poly A sequence
  source 1..200: mol_type = other DNA
taatgctttagagggaggcagtcatatctctgtgtgcagataataaaagcatatttctaagaggttctctcgctgtcttcttagctgagtcatccctgtccagcaactcaagcacacaacagtgctttgctgttttatcatcatgtttttacatggggcattcactgggtgtagaggctggccgcaaatacgatgtcccg

SEQ ID NO: 3240 - DNA, 200 bp, synthetic construct
  misc_feature 1..200: note = Poly A sequence
  source 1..200: mol_type = other DNA
ccttccccagacttctctttcttattttgtaataaactctctagggccaaaacctggtatggtcattgggaaatgagtgctcagggagatggagcttaggggaggtgggtgcttccctcctagatgtcagcatacactctttcttcttttgtcccaggtctaaaacatctttcctagagaaaacaaaagggactaaacta

SEQ ID NO: 3241 - DNA, 200 bp, synthetic construct
  misc_feature 1..200: note = Poly A sequence
  source 1..200: mol_type = other DNA
cccatggtggggggaggggaggggaggggagggaatgaggcagctctaggatctatactgtagctaataaaatgtaaaaacacctggctctgtttcctgaccaggcacttctgtcatatccccacagccccttccaccttaacacacaccacctgtattaccccctcaggttcaaactcttgcacttggaatctctttgt

SEQ ID NO: 3242 - DNA, 200 bp, synthetic construct
  misc_feature 1..200: note = Poly A sequence
  source 1..200: mol_type = other DNA
agatccccgcgatacttcaacgccttctgacttccaggtgatgactgggcccccaataaatcccgtctttgggtctctctgccttttgcctgttttttgtcatgtatgcaaatttgttgggagaatataagtgcttctagtccctgtattctctacatctttcagaatgactcagagctgctagatttgtttatttctct

SEQ ID NO: 3243 - DNA, 200 bp, synthetic construct
  misc_feature 1..200: note = Poly A sequence
  source 1..200: mol_type = other DNA
tgagccctgttcctgctcatcatgaagatccccgcgatacttcaacgccttctgacttccaggtgatgactgggcccccaataaatcccgtctttgggtctctctgccttttgcctgttttttgtcatgtatgcaaatttgttgggagaatataagtgcttctagtccctgtattctctacatctttcagaatgactcag

SEQ ID NO: 3244 - DNA, 200 bp, synthetic construct
  misc_feature 1..200: note = Poly A sequence
  source 1..200: mol_type = other DNA
ctctatcacagtcctgccatgatgagccctgttcctgctcatcatgaagatccccgcgatacttcaacgccttctgacttccaggtgatgactgggcccccaataaatcccgtctttgggtctctctgccttttgcctgttttttgtcatgtatgcaaatttgttgggagaatataagtgcttctagtccctgtattctc

SEQ ID NO: 3245 - DNA, 200 bp, synthetic construct
  misc_feature 1..200: note = Poly A sequence
  source 1..200: mol_type = other DNA
gctcaggccttacctcgtgcacatacctaggtgtggagtcttgtacattgccatcgtcaataaaactgccccagtttccccttgaccttacggtttgggaatctcctctagctttcccagaaaggaagcccttgctgctctaaagaaagtttcagcctgagaagggatggtgattgagctatctgctgtgactgctgctc

SEQ ID NO: 3246 - DNA, 200 bp, synthetic construct
  misc_feature 1..200: note = Poly A sequence
  source 1..200: mol_type = other DNA
attaaggagagccaataaatgagtataggagagaaacttgaagtttcttgaagctcgaatgtctgttggtggccttccagggctgggtggagatttcattcagcataacctctgctccagagtgtggtacagcatgggcttatctctcaaaacacatccccacttctatgtttgggggactagctcccctcttctcttgc

SEQ ID NO: 3247 - DNA, 200 bp, synthetic construct
  misc_feature 1..200: note = Poly A sequence
  source 1..200: mol_type = other DNA
gggagtggggaggtggtaagaacacctgacaacttctgaatattggacattttaaacacttacaaataaatccaagactgtcatatttagctggatagttttgggcatcatgaaagtctcattttcttccacaggggtaagaaaatgaatttggatgagaaaaagacaagagattttgctccttgaggcccaggaccata

SEQ ID NO: 3248 - DNA, 200 bp, synthetic construct
  misc_feature 1..200: note = Poly A sequence
  source 1..200: mol_type = other DNA
acttgctgcctcgacacgtgggctcccctcttcctcttgaccctgcaccctcctagggcattgtatctgtctttccactctggattcagccttctttttctggactctggactttctctaataataaatagttcttctttatgttggtcatcctgttgtttttggaagggagttttccctgagtggctacaaggtttcct

SEQ ID NO: 3249 - DNA, 200 bp, synthetic construct
  misc_feature 1..200: note = Poly A sequence
  source 1..200: mol_type = other DNA
ccctagacttggggtcaggggaaggtagagctggagcttttacagaaataaaacccaagagtttgattatatgacgtgtgtgtttggcgactgctagagatttgagtggggaggtgggagggttttccttgctggtggagaaggagcccttggcactgaggctgtcgcatgatatgccaagggtcttgttagggtgagga

SEQ ID NO: 3250 - DNA, 200 bp, synthetic construct
  misc_feature 1..200: note = Poly A sequence
  source 1..200: mol_type = other DNA
ggggcagatgcaggaaacacctagagcagccccagagtcacggggctgagggggcgggagctgcccctgtcatagggagggggattcccagcgtctgtagtgcttcctgtttgctgaataaaggtctctttctcacacacatctctgggagcaggctgacagcttcaccaggggccagccaagttgccactgccctggcc

SEQ ID NO: 3251 - DNA, 200 bp, synthetic construct
  misc_feature 1..200: note = Poly A sequence
  source 1..200: mol_type = other DNA
cttcagtcatcccagcaatcgcttggttcagtttcattcagctctctatggaccagtaatctgataaataaccgagctcttctttggggatcaatatttattgacttgtagtaactgccaccaataaagcagtctttaccatgctttgtctgattttatcactttatgccaataatttcaacttttggtcagccttgtaa

SEQ ID NO: 3252 - DNA, 200 bp, synthetic construct
  misc_feature 1..200: note = Poly A sequence
  source 1..200: mol_type = other DNA
ctgattagctacttttgattatatccaaagcttgtggggtttaaatttagtgtacaaatgtatcataattattttaaactaatttatttgtatataaattattaataaaatgaaatattttgtaattattctggtatttggccttttctttatccctacactagaattgaatgttggaatctaaaacaggtgccatctac

SEQ ID NO: 3253 - DNA, 200 bp, synthetic construct
  misc_feature 1..200: note = Poly A sequence
  source 1..200: mol_type = other DNA
agtcttcagttgaaattccactacaaaagacatcattccagactaaataaatttactcaaaaaccatgtattgattccccagccttgtgcagggtactattgggctataagaattttcatggaaaaccaaaatattaaaaagcacattccagattatattgagccaagtctgagaagaaaaaatagtgagaggtagcaaa

SEQ ID NO: 3254 - DNA, 200 bp, synthetic construct
  misc_feature 1..200: note = Poly A sequence
  source 1..200: mol_type = other DNA
aacattccgaagaattccatagtggaccacttggaaataaaccattggacagatttcagtaatgtcttcagtggaacacaaatgaaaatgaatagcttgtttctgtcaagcatattggaaagtgattttatttttgcaaaataagtttttctttaatatgattctagtacataattgattaaaatctcttgattataaat

SEQ ID NO: 3255 - DNA, 200 bp, synthetic construct
  misc_feature 1..200: note = Poly A sequence
  source 1..200: mol_type = other DNA
tgaaggagagcagggtccaaatggaagtcagaactctagctacagccaatcttaaaacattccgaagaattccatagtggaccacttggaaataaaccattggacagatttcagtaatgtcttcagtggaacacaaatgaaaatgaatagcttgtttctgtcaagcatattggaaagtgattttatttttgcaaaataag

SEQ ID NO: 3256 - DNA, 200 bp, synthetic construct
  misc_feature 1..200: note = Poly A sequence
  source 1..200: mol_type = other DNA
ataaaaatgcagtttagtgattgttgacgttcttatttggtgagtgcctgtgagcccaaatttttttctagccatccctttcaaacatttttccagattagattatacattccatgatacaagctttaaaaaataaacacaccattttggccagtaattgatataaaaatatcagcacttggatttgtctgtagtcagta

SEQ ID NO: 3257 - DNA, 200 bp, synthetic construct
  misc_feature 1..200: note = Poly A sequence
  source 1..200: mol_type = other DNA
tggattgctttttagcaatagagctgctttctagtggtaaaggaaggggtcacctgaaaaataggacatttttattaaaataaagttctcttagcgtttgtggaatctgccgagccattttgtggaaattgggatccatatctggagtcacttcccaaggcctgcctcacctccaccccctgcccaccttgatccatgct

SEQ ID NO: 3258 - DNA, 200 bp, synthetic construct
  misc_feature 1..200: note = Poly A sequence
  source 1..200: mol_type = other DNA
ttttcatatcaatattttctgtgataatttattactttgtatctgatcagctgtttgtggatttaattaaaaagtacttgataaattgtaatttgaaagccgtggcagacactgtaggttgcctcatctacacccaatccctccccatcttcctttcctgtctctgtcatagagtctgtgaaagggtggtactcaatttc

SEQ ID NO: 3259 - DNA, 200 bp, synthetic construct
  misc_feature 1..200: note = Poly A sequence
  source 1..200: mol_type = other DNA
gcttggccctttagtggctctgcctttttccttgtagaggcgatgggagccaggggtcagtgtgactgtcacactacagaccttaaggctcctacacatcttctcctgtccccatacacgcccccacctcccacctgtaggcggtgtgaacgctgtttgtggcagaaacattttaattgtaaacagcaaggctctctgcc

SEQ ID NO: 3260 - DNA, 200 bp, synthetic construct
  misc_feature 1..200: note = Poly A sequence
  source 1..200: mol_type = other DNA
accattaagtcttttgtcaaggtctgactaggtcaagggtaatggaccagtatcatctggtgatctggtaaacaaataaaagtggtggcacctttagatgatgacaacagttgagctctttacttttagtaagaccgacagaaatgtagtcagtaaagcacatgtagtgataggctatcagttatgtctgatacataaga

SEQ ID NO: 3261 - DNA, 200 bp, synthetic construct
  misc_feature 1..200: note = Poly A sequence
  source 1..200: mol_type = other DNA
cttttgaatgagtagaaaaaaaaattgttttgaattattgctttattaaaaaataaacattggtattttttgagtgctttttttcttccaaattgtggaattttatatctgaaattaaaatatagagcttaacctctttataatattatttaaaacaaacaaaaaaagaaagtgattcatccaaagtaaaagctagaact

SEQ ID NO: 3262 - DNA, 200 bp, synthetic construct
  misc_feature 1..200: note = Poly A sequence
  source 1..200: mol_type = other DNA
gaaataaatctttggctcacattcctcatgtctggctttttatttggggcagtaaaataaggtccctgttagcaaagtaaaatgtaatcatcgcaaagtgattgctacagattaactggaaacttgctctcaaagtcttctccccagccaatgactgcatcatggggcaattcaaacctggacagccttagcaaagatag

SEQ ID NO: 3263 - DNA, 200 bp, synthetic construct
  misc_feature 1..200: note = Poly A sequence
  source 1..200: mol_type = other DNA
tgcccaagttttggaaatattctgttttaaaaagcaagagaaattcacaaactgcagctttctaaaaaacaactccaaagtgaagtctgtttattttgctgtttcccctccatgcctgtgaattggatgttgtggtccctgtagagtgagtgcatgtggcgtacacggggagaaaggagctctcccacgcctgagtggct

SEQ ID NO: 3264 - DNA, 200 bp, synthetic construct
  misc_feature 1..200: note = Poly A sequence
  source 1..200: mol_type = other DNA
tctgtgtgctcttatcaccaatcagttcagacctggttgattttgtactttggaactgtaccttggatggttttgtttattaaaagagaaacctgaagtactcattttgctataacttgtcttctctaagcaggacagatataggaagtagaatttcttttaattttcttcatttttcccacccttttctatttttctga

SEQ ID NO: 3265 - DNA, 200 bp, synthetic construct
  misc_feature 1..200: note = Poly A sequence
  source 1..200: mol_type = other DNA
tagaggtgctgtttccttttgggatgggcccgtgcctggtaggccaggctgttctgggttcctcccagctccaagcctggccctgtctccaggaggcacctgcactggttgagttctctgggccccgtgttcaggcactgtctctgtcttctgatgaagcagctgtgtcctccagtccctgatgctgacgtccccagacc

SEQ ID NO: 3266 - DNA, 200 bp, synthetic construct
  misc_feature 1..200: note = Poly A sequence
  source 1..200: mol_type = other DNA
ttgccgtaactgattttaaagggtttagattttaagaatggtgctctttcatgcctattatcagtaaggggacttgtattagagtcagagtctttttatttaggccagttgtcaagtgtcaataaaagcatcatgtaatttatggttttcattttatttaaaattcagcaaaatcatacgccatctaccgtgatgactgc

SEQ ID NO: 3267 - DNA, 200 bp, synthetic construct
  misc_feature 1..200: note = Poly A sequence
  source 1..200: mol_type = other DNA
atgttaccaccttaagagaacccttcaagtgtggagctttctagtaggtgtccttcatagctcagaaacatacctcagaacaagccattcatgacttacctgtaatgggaaaataaatcattctatcagatcagcagttttgatgtttgagtgattttgatatgcttcacagagtcaaatgctgccaaaataaacatcga

SEQ ID NO: 3268 - DNA, 200 bp, synthetic construct
  misc_feature 1..200: note = Poly A sequence
  source 1..200: mol_type = other DNA
gagatgggacatcattcagtcactagttggatggcacaaggctcttcacagacgcatctgtagcagagtggaacttgtactaacttatgatagaatgtatcagaataaatgtttttaacagtgttatgcttgagtcttttttgaattgaacatgctaggattatcaggtaaaaattaagccttttggtactttctcaaaa

SEQ ID NO: 3269 - DNA, 200 bp, synthetic construct
  misc_feature 1..200: note = Poly A sequence
  source 1..200: mol_type = other DNA
cattgatatgaaccatggacaagtatattctgctgccacaaagactgtaaagtgcttcatttcaacagctgaggcaagccaagtgatcattaataaagcttttcttggttccttcagtggtgttggtagtaaaatggtaggtaaaagttaggctgcaagttcaataaatcatgagatttcccatcgttacacccttgtgt

SEQ ID NO: 3270 - DNA, 200 bp, synthetic construct
  misc_feature 1..200: note = Poly A sequence
  source 1..200: mol_type = other DNA
actaccttcccaaaagagaacatcagaggttttcattgctgaaaagaaaatcgtaaaaacagaaaatgtcataggaataaaaaaattatcttttcatatctgcaagatttttttcatcaataaaaattatccttgaaacaagtgagcttttgtttttggggggagatgtttactacaaaattaacatgagtacatgagta

SEQ ID NO: 3271 - DNA, 200 bp, synthetic construct
  misc_feature 1..200: note = Poly A sequence
  source 1..200: mol_type = other DNA
ggggtgggcttgggcaataaaggcacctcccccaacagcctggagtccagcgcagccgtgcatgccaggctcacaccgccatcagctgtggggactccagaaccaggggtgcagccacccaccctcccccactccatacgtgtgtcaccaggggcaggagcctagtacccacacctagtcatcaggacactgagccaggg

SEQ ID NO: 3272 - DNA, 200 bp, synthetic construct
  misc_feature 1..200: note = Poly A sequence
  source 1..200: mol_type = other DNA
ggggcagggccaggcccacgggggggcacctcaataaactctgttgcaaaattggaattgctgtggtgtcttgtctgtgacagatgggttggggaccagccaagggggatcccagggtctcagtgcgcacatcaccatgatcatggccaccatctacctcctgggagctggcccctcgccagctcaccttgattcactcc

SEQ ID NO: 3273 - DNA, 200 bp, synthetic construct
  misc_feature 1..200: note = Poly A sequence
  source 1..200: mol_type = other DNA
cgctgccctgcacctccgcagacctgctgtgatgacttgccattaaaagcattgtccaaaatcccctgttgtgtggactttgagcacactttacacaagaatctagaaaatcagatcgcgattaagagtcagagaatcttggattaaccgcatgggagatgttcttccttttgaagtttcattggagcattttcaatgat

SEQ ID NO: 3274 - DNA, 200 bp, synthetic construct
  misc_feature 1..200: note = Poly A sequence
  source 1..200: mol_type = other DNA
tgtatccccatctgcctctcctggtctggcctagcctatggtctcactccctcttccctaatgggctggagagatgttgtgtgagtgatgtgcatgtgtgtgcctgcatgtgagcccaggactgcctctgggaaggaaatcactttccgtcagcatcttctatgggccagatatcaaacatctcagacaatttactcata

SEQ ID NO: 3275 - DNA, 200 bp, synthetic construct
  misc_feature 1..200: note = Poly A sequence
  source 1..200: mol_type = other DNA
gccttagcccggatgcccacccctgctgccgccactggctgtgcctcccccgccacctgtgtgttcttttgatacatttatcttctgtttttctcaaataaagttcaaagcaaccacctgtcactggcccaggccctggtgtttgtggaaggaagcctcaggcacctgccatttgctggctttcaggagtcatctttgct

SEQ ID NO: 3276 - DNA, 200 bp, synthetic construct
  misc_feature 1..200: note = Poly A sequence
  source 1..200: mol_type = other DNA
attactgtttacacacatttttgttcaatattgatatattttatcaccaacatttcaagtttgtatttgttaataaaatgattattcaaggatcttgatgtttctctttgtatatatgtgatgagtttgaaatatttgtatttccttgcagattttattcaaagcaaaaaaactttttaaaatgaatctctagcactttc

SEQ ID NO: 3277 - DNA, 200 bp, synthetic construct
  misc_feature 1..200: note = Poly A sequence
  source 1..200: mol_type = other DNA
atactatagagtctttttgaaataaagtcagcttataattttttagctgaatatatctttatacatatgtaaagccaatattttagaataagtattttagtataaatattttagtaaaatactataaaaataaaaggacatataatttatttttatggaaaacatcaacatgtaatatcagaagagttgtcatcagtttc

SEQ ID NO: 3278 - DNA, 200 bp, synthetic construct
  misc_feature 1..200: note = Poly A sequence
  source 1..200: mol_type = other DNA
gtggtctttatgctgtaatgtgaaagcaaatatttcttcgtgttggatggggactgtgggtagataggggaacaatgagagtcaactcaggctaacttgggtgtgaaaaaaataaaagtcctaaatctaaaccattgctgtagtcatttatgttcatgcagtctcttcataagaggtaactagaactgttttgctgtatc

SEQ ID NO: 3279 - DNA, 200 bp, synthetic construct
  misc_feature 1..200: note = Poly A sequence
  source 1..200: mol_type = other DNA
agaggacacactctgcacccccccaccccacgaccttggcccgagcccctccgtgaggaacacaatctcaatcgttgctgaatcctttcatatcctaataggaattaacctccaaataaaacatgactggtacgtgtgctgattgcctgcctgtctgccgtagccattatcccatgttccaggggctcctgtggcacaag

SEQ ID NO: 3280 - DNA, 200 bp, synthetic construct
  misc_feature 1..200: note = Poly A sequence
  source 1..200: mol_type = other DNA
gttattctaaggatttctactttggtcttcaagaaagctgtgccccagaacaccagagatttcaacttagtcaataaaaccttgaaataaagatgggcttaatctaatgtactgcatgagtagttggtgattttgtacattcattgagctctcccagagtctgtgtagagtgttgtgcattatgtagtataaaggaggtg

SEQ ID NO: 3281 - DNA, 200 bp, synthetic construct
  misc_feature 1..200: note = Poly A sequence
  source 1..200: mol_type = other DNA
accccaaagatccctggagggctagttcgtatttttgtgttaaactatttgttagaataaagtaattttgctaataaatgggactcttcttggaggcctaaaatggggttaaaagctctctagggggttatccacttagcctcaggttggaagctgcctggaagtcgggtttgggggcctttttggaacttggtagagtc

SEQ ID NO: 3282 - DNA, 200 bp, synthetic construct
  misc_feature 1..200: note = Poly A sequence
  source 1..200: mol_type = other DNA
ggggaaccccagacccttagagagtcctgacctcactcttacctggggtcccatatcagccccttcattccatgtattccagttgtaaaacaagtatcaaaatattgggaaataaatatcagatagttctgagtcagtatggagtgtgtttgtggacggcgggaggggatgagaggagtttgggtgggtcagggagagtc

SEQ ID NO: 3283 - DNA, 200 bp, synthetic construct
  misc_feature 1..200: note = Poly A sequence
  source 1..200: mol_type = other DNA
acgcaggccagccccggcccctagccctcaggccttctttcttatccaaataaatgtttcttaatgaggaatgggtcagatctccatgcttatggtattggggtccatcttgaggatttcttttcattaattaattaactcaacacatatttactatacagaataatcgtttaagaatgtggccaggggtggctgctcac

SEQ ID NO: 3284 - DNA, 200 bp, synthetic construct
  misc_feature 1..200: note = Poly A sequence
  source 1..200: mol_type = other DNA
ccgtcccccgttcctcagtcctgtatcatccatacttgtactaccttgtcctatgaagctctgagaattttttgtacgatcagccttactgctaataaaagcacttccacagggctcctgactctcgtgtgttacataactcctccatccttccagagtaactcctgaggtgttgctcagccctgccacttttattattg

SEQ ID NO: 3285 - DNA, 200 bp, synthetic construct
  misc_feature 1..200: note = Poly A sequence
  source 1..200: mol_type = other DNA
gggatcacaagtctccccgacattcaggggcagcaaacactgttgtggggtgtgacagggagctcttgcagccagaggctgcaggaaaaaggcttcccttgtcctacggttggggacaaagcaagaataaataatgctaatgaggtctgagtttgtgcggtaaatgctccagcgagggagaaaacgaaacattcctatct

SEQ ID NO: 3286 - DNA, 200 bp, synthetic construct
  misc_feature 1..200: note = Poly A sequence
  source 1..200: mol_type = other DNA
ccgcggcgccgcccgggtgggacacgccaagctcttcagtgaagacacgatgttattaaaagcctgttttagggactgcacccggctctcctgtcgtcctttctcccacggggaaggcggggactgcggggcagccactctcagagtcccccgtccatcagggacccccgtccagcccagtgtggcctgacacctgccag

SEQ ID NO: 3287 - DNA, 200 bp, synthetic construct
  misc_feature 1..200: note = Poly A sequence
  source 1..200: mol_type = other DNA
ctcacaccatcgcaaaggaccagggacacagctaactaacttattcagctttgggccgatgggggtgggggggggtctttcagtgaatatttttattaaactctactgtggacaagaagcctgtggaaaggtgtttcgagttatgcaggaagaagtgttcctgctttgactgacaggcaggcccaggagttgaggcttct

SEQ ID NO: 3288 - DNA, 200 bp, synthetic construct
  misc_feature 1..200: note = Poly A sequence
  source 1..200: mol_type = other DNA
caatctttgttgtgtgtgcatttttataataaaactgaaaatactgtaaacattttcattcttaaaattatactcatggtaataatttgaaagtatgctgcttccaacataatttctcagagaacaaagactgaccattaatacaaaacaaccttcagaggggtagtctttttatcctttgaaagtatgatacagtattt

SEQ ID NO: 3289 - DNA, 200 bp, synthetic construct
  misc_feature 1..200: note = Poly A sequence
  source 1..200: mol_type = other DNA
gcagtaccttgtccacagattagaaaacgtacacaagtgtttgcttcctggctccctgtgcatttttgtcttagttcagactcatatatggatttcaaatctttgtaataaaaattatttgtatttttaagtttttattagcttaaagaaataatttgcaatatttgtacatgtacacaaatcctgaggttcttaatttt

SEQ ID NO: 3290 - DNA, 200 bp, synthetic construct
  misc_feature 1..200: note = Poly A sequence
  source 1..200: mol_type = other DNA
aatgtcattggtatatggtggctgtttaccaataaaaggaaaaaattcattaaccggttgcttccaaaattagaagttttaagttgcatgaaaccattaatagccttgaaagctttgataagttttcagtaataataacctatttaatcagatgatgatgtgtttgaaaatagtgttcaatatcagcaaatttgtacaca

SEQ ID NO: 3291 - DNA, 200 bp, synthetic construct
  misc_feature 1..200: note = Poly A sequence
  source 1..200: mol_type = other DNA
cagaggagaataaaaaatggctgaggtgaacaaggtaaaacaactacattttaaaaactgacttaatgctcttcaaaataaaacatcacctatttaatgtttttaatcacattttgtatggagttaaataaagtacagtgcttttgtatatattttggtgtacttgttactttcactgattgttgatgaatccctttttt

SEQ ID NO: 3292 - DNA, 200 bp, synthetic construct
  misc_feature 1..200: note = Poly A sequence
  source 1..200: mol_type = other DNA
tatcacacagctttgcagaaggaaggaagaccttgatcgacattgttttttatttttttaaccttgtccttgtaattacattcattgtttgttttggccaaataaaaatgcttgtatttctttaaaaagtaagcctgaatgtagagtaaaaggggaaatgccaagattttggggtttttttgtttcctttttttgtttgt

SEQ ID NO: 3293 - DNA, 200 bp, synthetic construct
  misc_feature 1..200: note = Poly A sequence
  source 1..200: mol_type = other DNA
agcacgactgagggcaggaggctccatccttctccccaaggtctgtggctcctcccgaaacccaagttatgcatccccatccccatgccctcatcccgacctcttagaaaataaatacaagtttgaacaggcttcgctgcctctcgtgttggctaccacccctatgggctcagcactgacaaggggacgagaggctgctt

SEQ ID NO: 3294 - DNA, 200 bp, synthetic construct
  misc_feature 1..200: note = Poly A sequence
  source 1..200: mol_type = other DNA
agccaggtgagaatttcaaggattatcgacttcatattgcacattaaagttacaaattaaagtggcttggtcaagaatgagaatggagttgtggatcttttttttgggggggggtggggtggtggagaggtggtgggaggggggcgggggacaaatctcactctgtcacccaggcttgagttccgtggtgtgatctcggc

SEQ ID NO: 3295 - DNA, 200 bp, synthetic construct
  misc_feature 1..200: note = Poly A sequence
  source 1..200: mol_type = other DNA
cttggttaccaaagatgccacagcacagaaatatcgaccaacacctccctggtcacatccatggaatcagagcaagatttcctttctgcttctgttccaaaaataaaagctggcacttggcttccgcttgtctcttaatgacttgttcctgctatgttctatgcctggaagtcattaactgtacgggagaaaaataccct

SEQ ID NO: 3296 - DNA, 200 bp, synthetic construct
  misc_feature 1..200: note = Poly A sequence
  source 1..200: mol_type = other DNA
ggaagccctgtctgtttgccacacccaggtgatttcctctaaagaaacttggctggaatttctgctgtggtctataaaataaacttcttaacatgcttctccatgttctgttgtatctccaaaatctgctcctgaagaaccccagattacctgaaatttctagaacatttgtctttcaaagaacctttactgaggagatt

SEQ ID NO: 3297 - DNA, 200 bp, synthetic construct
  misc_feature 1..200: note = Poly A sequence
  source 1..200: mol_type = other DNA
agatgcgtggtgcctccaggaccgctgcgggtggtaaccagtggaagaccccagcccccagggagaggaacccgttctatccccagccatgataataaagctgctctcccagctgcctctcagctccttgtgttgcacgacttcctccttagcgtagctcagaggcggccagagagggcagggggacaggacccttcctc

SEQ ID NO: 3298 - DNA, 200 bp, synthetic construct
  misc_feature 1..200: note = Poly A sequence
  source 1..200: mol_type = other DNA
atcctggacatgcctagcctgcacgtagcttttccgtcttcaccccaaataaagtcctaatgcatcagcctcagctgtttctcttacagggcagagtctagccaagccaaggtcagcccaacttaggcattggaagtcttctgccagccatcatccagctggacgtggcttctgaaatgtggagctgggcccttgaaccc

SEQ ID NO: 3299 - DNA, 200 bp, synthetic construct
  misc_feature 1..200: note = Poly A sequence
  source 1..200: mol_type = other DNA
ggggttgatgtggggttcaggatggcccccccatggggggtggatgatttgcactttggttccctgtgttttgatttctcattaaagttcctttccttccccgttgtgaatctcagttttgggacggggagcagagctgagtcccccgcctcttccattcatgccccgccccccatacaaagacaaaaggccacagatag

SEQ ID NO: 3300 - DNA, 200 bp, synthetic construct
  misc_feature 1..200: note = Poly A sequence
  source 1..200: mol_type = other DNA
ccgcctgggggccctaacctcattacctttcctttgtctgcctcagccccaggaagggcaaggcaagatggtggacagatagagaattgttgctgtattttttaaatatgaaaatgttattaaacatgtcttctgccaaactgtttttaggtctagggaaaattgagtaaggagaagaatccaagggaagggaatgggga

SEQ ID NO: 3301 - DNA, 200 bp, synthetic construct
  misc_feature 1..200: note = Poly A sequence
  source 1..200: mol_type = other DNA
gagcccaaaaataagcagcacgacggaactttcagccgtgtcccgggccccagcattttgccccgggctccagcatcactcctctgccaccttggggtgtggggctggattaaaagtcattcatctgacagcagccgtgtggtcattggaaactggggaggggagggggagagaaggggaagggaagaaggtggggaggc

SEQ ID NO: 3302 - DNA, 200 bp, synthetic construct
  misc_feature 1..200: note = Poly A sequence
  source 1..200: mol_type = other DNA
aggaaaacaaatcactttcattaataaagggttaaaagtctcctagtcattcaacatagtgtcacaagagtgtaagtttggaacatcgtggaattacgtgaaatgcaattaaaaaaatatgaccagacgtgagtgcctttattttcccttcaatgaaaattcttgatactttgttactcatctgctactgaatctctgag

SEQ ID NO: 3303 - DNA, 200 bp, synthetic construct
  misc_feature 1..200: note = Poly A sequence
  source 1..200: mol_type = other DNA
gctgggagtgaccagaagaaatgacgcagaagtgaaatgaactttttataagcattcttttaataaaggaaaattgcttttgaagtatacctcctttgggccaaaatgaatcttgtgtctcaattggaagaggtaaagaagtagggggttagggtgcatgggttggaacgtgagtcaggtcgaaccacaaagcctgcctg

SEQ ID NO: 3304 - DNA, 200 bp, synthetic construct
  misc_feature 1..200: note = Poly A sequence
  source 1..200: mol_type = other DNA
atgtcttcagaggctcatctaactctgtccttacatactcaatgcatatatgaaaacaatactaaataaacatctgatctgtataaaaatgtaaattagtttgacactgcttttttgataggtgtggtcatttctccccatggtagtttaaaacatcagaaactgaattctggacagatttaagccttgacacactgtgt

SEQ ID NO: 3305 - DNA, 200 bp, synthetic construct
  misc_feature 1..200: note = Poly A sequence
  source 1..200: mol_type = other DNA
acctaaataaacacatagattcacctgtaaaactttattttatataataaagtattccaccttaaattaaacaatttattttattttagcagttctgcaaatagaaaacaggaaaaaaacttttataaattaaatatatgtatgtaaaaatgtgttatgtgccatatgtagcaattttttacagtatttcaaaacgagaa

SEQ ID NO: 3306 - DNA, 200 bp, synthetic construct
  misc_feature 1..200: note = Poly A sequence
  source 1..200: mol_type = other DNA
gcctgtatcctccctggcagacacaacccaataggagtcttaatttatttcttaacctttgctatgtaagggtctttggtgtttttaaatgattgtttcttcttcatgcttttgcttgcaatgtagtcaataaaacctcatgtactattattggatgatgatgatcttattttcttagcaagtatgtttagtttaaattt

SEQ ID NO: 3307 - DNA, 200 bp, synthetic construct
  misc_feature 1..200: note = Poly A sequence
  source 1..200: mol_type = other DNA
ggtctttggtgtttttaaatgattgtttcttcttcatgcttttgcttgcaatgtagtcaataaaacctcatgtactattattggatgatgatgatcttattttcttagcaagtatgtttagtttaaattttcatattgtgttcatgatcatactttactatgggttttgtagagagaaatatgagatgatagcagatctt

SEQ ID NO: 3308 - DNA, 200 bp, synthetic construct
  misc_feature 1..200: note = Poly A sequence
  source 1..200: mol_type = other DNA
attctatcgtgatgcagagaagaaagaacggagtgaagccatttatgcctacggcagcagaaagagatgaaatcttgagagcagtgggaaatatgccctattgaatgtttgcattaaaagtgtttatataacttagaagcagatgaatatttctaataaatgattgctgtaatatttaagactgtacacccctcacccag

SEQ ID NO: 3309 - DNA, 200 bp, synthetic construct
  misc_feature 1..200: note = Poly A sequence
  source 1..200: mol_type = other DNA
tttcagattaaagaaagctttgttttattttgctttcagagaatggtatgttttcttaactataggttattttatagagaatataaaagtataaaacattaaaaataaccctagatatactttaaaataatgttatatttatgctaaaatatgtaaattacactatacaaccatatgataggttatttctctaaccttgt

SEQ ID NO: 3310 - DNA, 200 bp, synthetic construct
  misc_feature 1..200: note = Poly A sequence
  source 1..200: mol_type = other DNA
gtgtctaccatgattatttttctaagctggttggttaataaacagtacctgctctcaaattgaaatatattgttgtatttgtgatttgttgttgttgttgttagcctgcctctgtcttcccttaactactgtggcaagtgtggtgtgtgataaaattaagccaaatcaacagcccatttcgtgcaaaatcagggtcgagt

SEQ ID NO: 3311 - DNA, 200 bp, synthetic construct
  misc_feature 1..200: note = Poly A sequence
  source 1..200: mol_type = other DNA
ataaaataaattataataaactgttaactcttttcagtatttaatacctgtagttcagttagtaactttttcatatatagcatgttgcctgtatgcagttgaactatataaagttcattgcaaagcagattatcttgtttttttgcatagcaatcaaagttgaaatttgtttgctacatcaacaaattaaggacattttc

SEQ ID NO: 3312 - DNA, 200 bp, synthetic construct
  misc_feature 1..200: note = Poly A sequence
  source 1..200: mol_type = other DNA
atgaactttgcttagtggattgactcctttgctgaagtcagttattcatcaagaatgcaattagactaattgtgaataaatgattgaatgaagatataataaataaaagctataattatagataactcttattagaattttctttagcaatattcccaccccccaccccttgttttgctcttaatgtttttttcctttgg

SEQ ID NO: 3313 - DNA, 200 bp, synthetic construct
  misc_feature 1..200: note = Poly A sequence
  source 1..200: mol_type = other DNA
tatactggtgatgcatctaattctccacaaagaccaataaattgaatgttttatacaattttatttttaaaaatcttgttaatgtacaggcattggcacattttaaaaacaaactacataaacagatctttcctataacctaggaaagtggaatgtcagaagtcaacaaaatgtgataaacttaaagtgctaaaacagaa

SEQ ID NO: 3314 - DNA, 200 bp, synthetic construct
  misc_feature 1..200: note = Poly A sequence
  source 1..200: mol_type = other DNA
tgactgtttttcaagaagaaatgtgtttcataaaaggatatttatatctctgttgctttgactttttttatataaaatccgtgagtattaaagctttattgaaggttctttgggtaaatattagtctccctccatgacactgcagtattttttttaattaatacaagtaaaaagtttgaattttgctacatagttcaatt

SEQ ID NO: 3315 - DNA, 200 bp, synthetic construct
  misc_feature 1..200: note = Poly A sequence
  source 1..200: mol_type = other DNA
ctacacatttccattttcatcataaatgacttgaaatccacaatgactaaattgtagaactttatactcactttgctatgttaagcctcaaagtgaagtccaactggaaacagaaaaataattaaaggaaacttatgctgaccaaaaatgaaggctttaaaaaatattgcataccagtcatttcaacatcctacctagtg

SEQ ID NO: 3316 - DNA, 200 bp, synthetic construct
  misc_feature 1..200: note = Poly A sequence
  source 1..200: mol_type = other DNA
cagttaaatttttttaacttttattttttaaacaatgggctaaaaataaacagtattaaaaggttaagtttatataatacatatgtacacaattagtggtgttttcttttcagacaaaatactgaaacaaatattagtttaaaaacaaactatacagaagacttcataccgtaacaataaatgtatagtttcttcaaagg

SEQ ID NO: 3317 - DNA, 200 bp, synthetic construct
  misc_feature 1..200: note = Poly A sequence
  source 1..200: mol_type = other DNA
actccaacttagtgtctctatttatgagatcactgaacttttcaaaataaagcttttgcatagaataatgaagatctttgttttttgttttcattaaagagccattctggcactttaatgataaaatcccattgtatttaaaacatttcatgtatttctttagaacaacataaaattaaaatttaacatctgcagtgttc

SEQ ID NO: 3318 - DNA, 200 bp, synthetic construct
  misc_feature 1..200: note = Poly A sequence
  source 1..200: mol_type = other DNA
accttttcacctacaaaatttcacctgcaaaccttaaacctgcaaaattttcctttaataaaatttgcttgttttaaaaacattgtatctatttcagtatttttctctatttttgtttcaatacaatttcctgaaggttggattagagaggatgaggcagatgtggtggcaagacttttcagtaaagagttacacatcct

SEQ ID NO: 3319 - DNA, 200 bp, synthetic construct
  misc_feature 1..200: note = Poly A sequence
  source 1..200: mol_type = other DNA
gtgactctgacatcattagaagcatgccagaacagactggtgaaaagtaaaccttttcacctacaaaatttcacctgcaaaccttaaacctgcaaaattttcctttaataaaatttgcttgttttaaaaacattgtatctatttcagtatttttctctatttttgtttcaatacaatttcctgaaggttggattagagag

SEQ ID NO: 3320 - DNA, 200 bp, synthetic construct
  misc_feature 1..200: note = Poly A sequence
  source 1..200: mol_type = other DNA
tgcgtgcttgtatcccagcagggcatagataatacgttattattgtctgccaagttctacatgtggagaatctgcttctgctttaaaatatcatgtgaaactccctggaaacaagaataaaaaattatgtattatgcagatgatgaaatgtttacatcattccagtaatgtcattgattttcatctttccctgtccttgc

SEQ ID NO: 3321 - DNA, 200 bp, synthetic construct
  misc_feature 1..200: note = Poly A sequence
  source 1..200: mol_type = other DNA
aatttcttcaggttgaattacctagaagtttgtcactgacttgtgttcctgaactatgacacatgaatatgtgggctaagaaatagttcctcttgataaataaacaattaacaaatactttggacagtaagtctttctcagttcttaatgataatgcagggcacttactagcataagaattggtttgggatttaactgtt

SEQ ID NO: 3322 - DNA, 200 bp, synthetic construct
  misc_feature 1..200: note = Poly A sequence
  source 1..200: mol_type = other DNA
aagagagagtcctcatctttcatgcttgcaagtgaaatatgttacagaacatgcacttgccctaataaaaaatcagtgaaatggtctctggtatgactgacgttcttctaagaattactgtgatgccaagtgactgtgccactgtcattgttttatcaatcgtgcatgtaaagaaaatgacaggacatgtagtcagtcag

SEQ ID NO: 3323 - DNA, 200 bp, synthetic construct
  misc_feature 1..200: note = Poly A sequence
  source 1..200: mol_type = other DNA
gttcacaagaaatgcgccggtggggaatgaactgtttcattaataaaacctaatttgtcttgatccattccactctataataaaacaaaagattttgtaggcaactcggaatatagctcttttgaaagtactcgacacctttagataagaattaaaaccaacctatgtaactgacataatcttgatcttttaatttgtaa

SEQ ID NO: 3324 - DNA, 200 bp, synthetic construct
  misc_feature 1..200: note = Poly A sequence
  source 1..200: mol_type = other DNA
cagcccttgagctccccaaaaacctcacccgaggctgcccactatggtcatctttttctctaaaatagccacttaccttcaataaagtatctacatgcggtgaagcattgttgactctaatgtgtgaatccaaggcaattcgttggtaacaccaactatatcttaataatctttctaaggtttgaatcccaggctgctgt

SEQ ID NO: 3325 - DNA, 200 bp, synthetic construct
  misc_feature 1..200: note = Poly A sequence
  source 1..200: mol_type = other DNA
caccatgggaaagctgcaacctttctgttttatttaaagaaagcccaacattaaagggttttcattgcaagcgtgctggggagggccttgtttctgagctaccaccaccaccatccatgcaggggcggaggtgggaccagggaagctggggcacattcccaagatgggtgtctggcatggggggctatccaggtttgttg

SEQ ID NO: 3326 - DNA, 200 bp, synthetic construct
  misc_feature 1..200: note = Poly A sequence
  source 1..200: mol_type = other DNA
cgacgagccgtgttgaaacttcttttgtatgtgtgtgtgtttttttcactattaaagcagtactggggaattttgtacaataaaatgtgtgcaagtgcttgtacatcactagaaaaagtccccaggccggccgggcacggtggctcacacctgtaatcccagcactttgggaggctgaggcgggcggatcacaaggtcag

SEQ ID NO: 3327 - DNA, 200 bp, synthetic construct
  misc_feature 1..200: note = Poly A sequence
  source 1..200: mol_type = other DNA
gtgtgtgtacgtgcgcgcgtgcgtgaggccctgccacgattaaagactgagtccggccctctggctccgtcctggtcatttcctgctcgtacctggcctgtctccctccctgtctcagccccatctctgccctgctgttcccacacagtcatcctggctgctgccaccctctgtggccatgtcaccttgcccccagcaga

SEQ ID NO: 3328 - DNA, 200 bp, synthetic construct
  misc_feature 1..200: note = Poly A sequence
  source 1..200: mol_type = other DNA
agcctgagtgtgtgtacgtgcgcgcgtgcgtgaggccctgccacgattaaagactgagtccggccctctggctccgtcctggtcatttcctgctcgtacctggcctgtctccctccctgtctcagccccatctctgccctgctgttcccacacagtcatcctggctgctgccaccctctgtggccatgtcaccttgcccc

SEQ ID NO: 3329 - DNA, 200 bp, synthetic construct
  misc_feature 1..200: note = Poly A sequence
  source 1..200: mol_type = other DNA
gtgcagagtgtcgatatcgcagctttcaacaagatctgaagcctgagtgtgtgtacgtgcgcgcgtgcgtgaggccctgccacgattaaagactgagtccggccctctggctccgtcctggtcatttcctgctcgtacctggcctgtctccctccctgtctcagccccatctctgccctgctgttcccacacagtcatcc

SEQ ID NO: 3330 - DNA, 200 bp, synthetic construct
  misc_feature 1..200: note = Poly A sequence
  source 1..200: mol_type = other DNA
ggatcccgcaataaagatgccttaagtctcccggttctggggacgcagctacggcgcctagttcgtgctccgagtcgtgtctgtgcgcgccagccgcgcgcccctcatctgtgcttgccttaggaggacactgagtctcggagctgcaggcgcactgcccggtggtccgtgagcccctccagggcggtactgaacgtcac

SEQ ID NO: 3331 - DNA, 200 bp, synthetic construct
  misc_feature 1..200: note = Poly A sequence
  source 1..200: mol_type = other DNA
cacccagccacccatgtccagaataaaaccctcctctgcccacacacccctcactgtacgttatcacctaacagcacttcagagccatgtgaaggctggcagagcctggtctggtgctggctcctggggatgattagggaccctcgcccacacatgaacggcctatctctgtgtagcctgattcaaaccctgaagagaac

SEQ ID NO: 3332 - DNA, 200 bp, synthetic construct
  misc_feature 1..200: note = Poly A sequence
  source 1..200: mol_type = other DNA
atctgcctgtccgggctgggacagagtctccccaaggaccccattctgcctccttctggggaaataaatgagtgtctgtttcagcagctatttgagctcctggcccgctgtccgtgtagggccccagggcatgggggtgagaagcctctgtctgcagggcttggcattcctcacacctcctccctggcaagggctgctgt

SEQ ID NO: 3333 - DNA, 200 bp, synthetic construct
  misc_feature 1..200: note = Poly A sequence
  source 1..200: mol_type = other DNA
ctctgagggcctcccccacctcgggactgtgttctcggtaacctcccagccccactctggggcagatcaaatgtgagtcccactcactggccttcctttcaataaagctgcctcagcttccacacggatcattttagggggcaggggaggccctctggtgcctaggtcttccactgttgcgcactcctaggacctcagag

SEQ ID NO: 3334 - DNA, 200 bp, synthetic construct
  misc_feature 1..200: note = Poly A sequence
  source 1..200: mol_type = other DNA
ctgcactgcattgggggatgtcgggtagagctggggttgtcagaggctagggcagtgactgaggacctgggcaaaacctgccacagggtgtgggaacgaggaggctccaaaatgcagaataaaaaatgctcactttgtttttatgggccctcttggccaatgaggcaacccccacaagctggggacaagcacatcacata

SEQ ID NO: 3335 - DNA, 200 bp, synthetic construct
  misc_feature 1..200: note = Poly A sequence
  source 1..200: mol_type = other DNA
tgctgagggcctcaataaagtttgtgtttatgccacctggctgtgcccacccccatggtttcaaagggaggggtccctgctgggaggatttctgtgggatccccctggttggtactgggagggagttagactactgaagtagaccaccagtgagtggtagaagcttgaagggaaagtccacaactagaaacggggtgcag

SEQ ID NO: 3336 - DNA, 200 bp, synthetic construct
  misc_feature 1..200: note = Poly A sequence
  source 1..200: mol_type = other DNA
aacttcaataaagatcctgtgataaaacagagctatgttcaaaggatcctgttatgtttttaaagggctgagcttggcagaaaacatgtagagtatagctttgtaccttggtatttttccccttttccaggttaaagagggagaagtggaggagtcacatacagtggtttctagtacctgtgggatcgttagacagcatg

SEQ ID NO: 3337 - DNA, 200 bp, synthetic construct
  misc_feature 1..200: note = Poly A sequence
  source 1..200: mol_type = other DNA
ttctgcagagcctgagctgctgctgtggtgtggcccactggagcaaactgctggcacctattctgggttgcttgtgaacttctactcatttcctaaattaaaacatgcagctttttcacaaatttattctattattgagtggccacaatgtagagtggctcaaagtacttcaggattaggaatttgggtttgtcatagat

SEQ ID NO: 3338 - DNA, 200 bp, synthetic construct
  misc_feature 1..200: note = Poly A sequence
  source 1..200: mol_type = other DNA
cccacaggagcacctcaagccatgaagtgtcagctggagaacagtggtgggcatggagaggatatgacatgaaataaaagatccagcccaactgagtgaagtggtcagtgtctctggggacactggttgcagaggggataggaggtggatcttgcattgtcgcctctactctgaatttgatgtccagcttctctccgtcc

SEQ ID NO: 3339 - DNA, 200 bp, synthetic construct
  misc_feature 1..200: note = Poly A sequence
  source 1..200: mol_type = other DNA
gcagagattatttgtgatcccatccattccccaataaagcaaggcttgtccgacagcagtacccccacttcctgggggcctcctgtggttgggcttccctcctgggttcttacaggagctccagggctatgtcttagcccaaggtgtagaggtgaggcacctcaagtctttcatgccctgggaactggggtgccccaggg

SEQ ID NO: 3340 - DNA, 200 bp, synthetic construct
  misc_feature 1..200: note = Poly A sequence
  source 1..200: mol_type = other DNA
agcctgggcttgctgtgccaagggggcagagcaataaataaactcttcaaccccaaagcctgcctcctgtgtccttacccagcaggatctggaagtgaagggccagtcactcaggcctctatcaaaccccttcaactgagatgcaatttttctcaaagtcacccttccctgggcccttccaaccccatcatctcagtaca

SEQ ID NO: 3341 - DNA, 200 bp, synthetic construct
  misc_feature 1..200: note = Poly A sequence
  source 1..200: mol_type = other DNA
gccgtgtataatattttttttaacattttcattgcagtattgaccatcatccttggttgtgtatcgtgtaacacaaataatgatattaaaagcatcaaacaagccagcctcagctccctccctggggtgtgggcaaggggcagatgggctgggaagcagacagaactggtcctctgggcacacatgttactccacctcca

SEQ ID NO: 3342 - DNA, 200 bp, synthetic construct
  misc_feature 1..200: note = Poly A sequence
  source 1..200: mol_type = other DNA
tggagctgggcttggccagggagtctgggaacaaggaagcagattttcctgattctggctctagcttccctgccaagattttggtttttatttttttatttgaactttagtcgtgtaataaactcaccagtggcaaaccagaaactgtcctctttgattggggaatgaagttgggaaagtcactagcattttccttggat

SEQ ID NO: 3343 - DNA, 200 bp, synthetic construct
  misc_feature 1..200: note = Poly A sequence
  source 1..200: mol_type = other DNA
acctgccaactgattaaaggacaccagactctggatgcttggatggaaagggaaaaatggaccctgtgatgctaataaaactgttctcccttaattatgctctcctgtctttaatataaaattttataccacaaaggggaaagaaaactgattcagggctatgatgccccttgactggtctgagtgaaagacactgagga

SEQ ID NO: 3344 - DNA, 200 bp, synthetic construct
  misc_feature 1..200: note = Poly A sequence
  source 1..200: mol_type = other DNA
caggtcaacggcccaagggcctcctgccctgtcctgccttggacacttccctgagaagccccttccactctcccacccaccctcttcaaatgtttactatatagagtattcaaataaactgctgcttaatcttggcctgagtcatagagtttgggttaaaagcattcacttatattcgttcaacagacattcactggata

SEQ ID NO: 3345 - DNA, 200 bp, synthetic construct
  misc_feature 1..200: note = Poly A sequence
  source 1..200: mol_type = other DNA
attacttcttgtgaagagtctgaaactttgtttttattttaatatatcgtaggaaaacattaaagagcagatgcatggccatttttctttgatgttctccagagttttacattacacttgtctgtcttataattgatattttaggatgtttgggtgtttgttacaggcagaattggatagatacagccctacaaatgtat

SEQ ID NO: 3346 - DNA, 200 bp, synthetic construct
  misc_feature 1..200: note = Poly A sequence
  source 1..200: mol_type = other DNA
cctccgccccaccatgaataaacactttcttatacagactccttccctgtccatctacctgcctacctactttccgtccatccctccctcccttcatccctccacccctgctctgtgccgggcactgtagctttaccagcgaacaggacacagcatggtccctgcccacgtggagccctcttcccatgaggaaggcaagc

SEQ ID NO: 3347 - DNA, 200 bp, synthetic construct
  misc_feature 1..200: note = Poly A sequence
  source 1..200: mol_type = other DNA
agaggccatagtacctcctgtttgaagttgtttattcacatctatcttatttgaagaaaaagactgatgtaatagatctttgtcattaaagctgaacttttaaagaagtttacgaaccttctttctttgcactgatatatgaaaataatgtttgggcgttcctattgatgtgtaggctggcttcccggactagcacacga

SEQ ID NO: 3348 - DNA, 200 bp, synthetic construct
  misc_feature 1..200: note = Poly A sequence
  source 1..200: mol_type = other DNA
attagaaggggaagaaacaaacaagtgccatgttcattgggggttgaagtggtggtgttctttgaaaaaccaagtgggaaaaagtaaagattaatctgtagcatgcatcattccttggctgaaataaaaagaaaaagccttaaattttgttccttattagctttattttactttatgtttttaaagtatctgggctgagt

SEQ ID NO: 3349 - DNA, 200 bp, synthetic construct
  misc_feature 1..200: note = Poly A sequence
  source 1..200: mol_type = other DNA
gaagaactttcagccaataaagcttgtgcttcccccaccgagctcacgctgtctctttgttccaagtgtggttcctatttattgaggaagaaagagctgtctggccaaaggaaatctattttttcccttcatgttttctctctgaaagttggcttgagagttgttgtcagaaaggtgcaggtgctccacaaacgggtggt

SEQ ID NO: 3350 - DNA, 200 bp, synthetic construct
  misc_feature 1..200: note = Poly A sequence
  source 1..200: mol_type = other DNA
cttaggcctgggggagcccatccaggaacatgcagtcccagcagaccaggctcctgagaagaactttcagccaataaagcttgtgcttcccccaccgagctcacgctgtctctttgttccaagtgtggttcctatttattgaggaagaaagagctgtctggccaaaggaaatctattttttcccttcatgttttctctct

SEQ ID NO: 3351 - DNA, 200 bp, synthetic construct
  misc_feature 1..200: note = Poly A sequence
  source 1..200: mol_type = other DNA
aaaacccacatttttattacctgtcagttactttcagaatagttaagtaaaacattagctgttttatacctccaaaatatcttctgcattatatatctgtttttctcctactttggtaggtgaagaaactaatgcaaataattcttatgtgcactaaaccttgctatattgcctctcagagctcttgggaatgactttca

SEQ ID NO: 3352 - DNA, 200 bp, synthetic construct
  misc_feature 1..200: note = Poly A sequence
  source 1..200: mol_type = other DNA
gcacaaaggaaaacatttcaataaaggatcatttgacaactggtggattttctggtgtggcgtcttccttgagggagctagctcctttgtggggtggtcagtggggtcagggtggcagaacctgtggagaagtaacaagcaccttgtggtgggtaacaaaactgccctgtatgggctgggctgagctcagaaaggaagcc

SEQ ID NO: 3353 - DNA, 200 bp, synthetic construct
  misc_feature 1..200: note = Poly A sequence
  source 1..200: mol_type = other DNA
gtgccgccagctgccgcaccagcccgaacaccattgagggagctgggagtccctccccacagtgccacccatgcagctgctccccaggccaccccgctgatggagccccaccttgtctgctaaataaacatgtgccctcaggcctctgagtctacactgtttgacccctgggccttcgaggaaggggaggggcgggaggc

SEQ ID NO: 3354 - DNA, 200 bp, synthetic construct
  misc_feature 1..200: note = Poly A sequence
  source 1..200: mol_type = other DNA
tagagggacctccctgtccctggcctgcctgggtccagatctgctaatgctttttaggagtctgcctggaaactttgacatggttcatgtttttactcaaaatccaataaaacaaggtagtttggctgtgcagttcccaccagtacttctgtctgggtggataggggaaggggggcaccccagccaactctcagccagca

SEQ ID NO: 3355 - DNA, 200 bp, synthetic construct
  misc_feature 1..200: note = Poly A sequence
  source 1..200: mol_type = other DNA
ggtggagcccagtgagtctgtgggtgtgtgcaggccggggagtattaaaggtggtgatttttggagtcaagtctggtggcgtccgtcccaagtgacctgcagagcccctggtttcactgctgcttcactgatgtcctcggccccttagaactttcaggtgtgccgggcacccgcctggatgaggccaggctgcagggcgg

SEQ ID NO: 3356 - DNA, 200 bp, synthetic construct
  misc_feature 1..200: note = Poly A sequence
  source 1..200: mol_type = other DNA
ctcaagccaagtccagcggccgcagtcttcacctctccacactcactttttatctggtgtttttacttctgcctgcgtttgctctctagccaataaaccgtccttgtgtgcgagtcacctgggctcctgtcagggcctggccctgagggtggtaaagggaaaggtagactcaccctctgccccactcttccacagagtga

SEQ ID NO: 3357 - DNA, 200 bp, synthetic construct
  misc_feature 1..200: note = Poly A sequence
  source 1..200: mol_type = other DNA
acactcgcgaacccaaggccaggggcacacatgggccaggcaatgaggagcgtccttccttgccccacaaataaaggcacatcccaggtggctgggacctgccagtaggtgtcacaccacaagcctttctgggtacctggttgctggtctctgggggttcctggaaggaaggggatggagtcacagccaggatgaggctg

SEQ ID NO: 3358 - DNA, 200 bp, synthetic construct
  misc_feature 1..200: note = Poly A sequence
  source 1..200: mol_type = other DNA
ctgttcagaccgacgttgccatcaaaacacatacacccagaaagaaacaacagaaaccaaaactcacaaggcgcatgattacttgttttatatttcatgttgggttttccctcccactattaaacagtctgtttccgtacagaacgtatgtgggttttttcagatcacagccaagaagattgccccgtttctgtggctct

SEQ ID NO: 3359 - DNA, 200 bp, synthetic construct
  misc_feature 1..200: note = Poly A sequence
  source 1..200: mol_type = other DNA
tacttgttttatatttcatgttgggttttccctcccactattaaacagtctgtttccgtacagaacgtatgtgggttttttcagatcacagccaagaagattgccccgtttctgtggctctgagaagccagcagagcctccatcagccagaacactgtgtcttcaaggatggcatcagaagtcaccagcgtcgggtgttg

SEQ ID NO: 3360 - DNA, 200 bp, synthetic construct
  misc_feature 1..200: note = Poly A sequence
  source 1..200: mol_type = other DNA
tgggttcagagccaggagcgctgccccagggaaagagttaatcccctgcccccagccccccagcctcggcacagctcccctaaaaagccaataaagcctgctggatacagtctcgtacgtcctgaaggtgaggtggccggaagttggcctcgtgtaggggtctggggacacaggacaggtgaagaccacagtgatgataa

SEQ ID NO: 3361 - DNA, 200 bp, synthetic construct
  misc_feature 1..200: note = Poly A sequence
  source 1..200: mol_type = other DNA
gtcccatgagccttggtatcaagaggccacaagagtgggaccccaggggctcccctcccatcttgagctcttcctgaataaagcctcatacccctgtcggtgtctttctttgctcccaaggctaagctgcaggatctgcctggcaattgcaggcttgctttttcatgcccagctcatcttatctttggccagaggcggcc

SEQ ID NO: 3362 - DNA, 200 bp, synthetic construct
  misc_feature 1..200: note = Poly A sequence
  source 1..200: mol_type = other DNA
cagcccccgggtctgcacctccagagcccaccctaccaccagacacagagcctggaccacctggacctaccctccagccatgacccttccctgctcccacccacctgactccaaataaagtccttctcccccagctctgggcaggcctatctgtggggacagaggggcttgcacccgctccctgggaggtctgctgggag

SEQ ID NO: 3363 - DNA, 200 bp, synthetic construct
  misc_feature 1..200: note = Poly A sequence
  source 1..200: mol_type = other DNA
ctcctgcgctccccggcactgtgggacttcggccttccagaaggaggttttggccctgggcctctctggacgtggcctgttttctatcaataaacagacattacttccagatgctggggcctgtggccctcgtggcctttctttttctggagttagaacgattgctctgaatccctggtgctgctgggtgggacatagga

SEQ ID NO: 3364 - DNA, 200 bp, synthetic construct
  misc_feature 1..200: note = Poly A sequence
  source 1..200: mol_type = other DNA
ctggtcaccccaggccagcgtctgttgaaggatgaagcagctcctgtccggcccagccctgcctcacagctgtgcgagctctgccctcctcagctctcaaacctgaataaatgcaccaagcccagagccccagagtgtgaccactatgaccttgggttgggcaaagagtcaggagcaaggcgaccgctgaccctgcaggg

SEQ ID NO: 3365 - DNA, 200 bp, synthetic construct
  misc_feature 1..200: note = Poly A sequence
  source 1..200: mol_type = other DNA
cgccccaccccgcgtctgtcgcccaataaaggcatctttgtcgggagtgagggtgtcctgacatctgaagggccagaggtctcgggatcacttcccatccccaaaccccagggtgggacgctcagcccgatagcccagaaccacaggggcaggagcgccgggggtcgggccggtcccatcctccacgctaagaaggcgca

SEQ ID NO: 3366 - DNA, 200 bp, synthetic construct
  misc_feature 1..200: note = Poly A sequence
  source 1..200: mol_type = other DNA
gcacaggactggaggggtctcaaggctcctcatggagtgggggcttcactcaagcagctggcggcagagggaaggggctgaataaacgcctggaggcctggccatgtatgtcccgtccttcctgtctgtggggcccacacgcaggctgtgggagcgggaccctcggagtcacggctggggacgcggcgcaccccacacag

SEQ ID NO: 3367 - DNA, 200 bp, synthetic construct
  misc_feature 1..200: note = Poly A sequence
  source 1..200: mol_type = other DNA
agggctgagggcagctgggggaggggaattaaagcgtatttagtggctgtgcactgtcctccctgcaggccctcctgagggcagctgggggaggggaattaaagcttgtttagtggttgtgcaccgtcctccctgcaggccctcacacccctcacggctgcatcatggggggtgcacgcgcatatgggtctcatcaaagc

SEQ ID NO: 3368 - DNA, 200 bp, synthetic construct
  misc_feature 1..200: note = Poly A sequence
  source 1..200: mol_type = other DNA
gggcagttgctgagcagaccgccccaccctccccggctgggagggctctggagggccctggagggggggtccccgcggcagctgacctccggtcacctgcttccccttctgtgcaaataaaccaggctgttatctggggtggcggtcctcactcccctagacaggggccgcctgcgcaggtgggggaagcagcccgatgc

SEQ ID NO: 3369 - DNA, 200 bp, synthetic construct
  misc_feature 1..200: note = Poly A sequence
  source 1..200: mol_type = other DNA
aaatgctttaatggtggtgtctgtacagcatggatgtggacagggaaaacagcaagtgcacacagtgggacaggccacaggacaggctgggagtgaataaagagttcacactgcttccctgctttccccagtgactgaaggctctaggccacctcctcctcagcctcctcctcgaactcgccctcctcctcggctgtggc

SEQ ID NO: 3370 - DNA, 200 bp, synthetic construct
  misc_feature 1..200: note = Poly A sequence
  source 1..200: mol_type = other DNA
gccgggcttggaacgatgtacgataccctcatagtgaccattaaacctgatcctccaccgcggccgccgcgtgggtctgtcctctcagtgctttccaggggccttcctgtgcccagcttctgggcccactcctgtgaggtcactgctgcagggccttcctgcctggacagagttggagctaggccactagaccaccccac

SEQ ID NO: 3371 - DNA, 200 bp, synthetic construct
  misc_feature 1..200: note = Poly A sequence
  source 1..200: mol_type = other DNA
tgggcgggggaggggcggcctgccctcatctcatttctattaaacgcctttgccagctatacggtgtttgttttttggcctcaggtcatggcaaagtgtgcagcatgacagatttcagtgcaggcacctaagccgagttctcatgcagactcggcgctgtgaacctctttggaggtcatcttccgagtccgaaggttctg

SEQ ID NO: 3372 - DNA, 200 bp, synthetic construct
  misc_feature 1..200: note = Poly A sequence
  source 1..200: mol_type = other DNA
gcactgtttcagatggaaaaatataaactatttttttctgagcgatacattaaactattttccccagattgaattgcactcatgatgtaatgggaacttcaagtgggtaatcacactttttccttcacttaacgaaggatactatgcactgttcacttttgacttgtgttgtaccttgcagtttatagcagatcattttg

SEQ ID NO: 3373 - DNA, 200 bp, synthetic construct
  misc_feature 1..200: note = Poly A sequence
  source 1..200: mol_type = other DNA
agatcagaagatgagaggggaatgaatacttcagatgctttcaggagtgacacaagaacacaatgatttttgcttataatcactttacttagcaaattctgtaactaaaaaagtaccattagcagacaataaaatgcattaaaaatcattcatgtctttgtgttgaatgaaacttaaattttcctatcatttgagatgat

SEQ ID NO: 3374 - DNA, 200 bp, synthetic construct
  misc_feature 1..200: note = Poly A sequence
  source 1..200: mol_type = other DNA
ctgaattgagaaatacttcttcaagttatgatgcttgaaagttctcaataaagttcacggtttcattaccacattgtgttgcagtagtaatttcttggagaatataaaaatccacatcaaagtccaaagatatttagcgttagcgttagacactgatgccaaaagacaagcagttattctctgtctttccaaaggaagaa

SEQ ID NO: 3375 - DNA, 200 bp, synthetic construct
  misc_feature 1..200: note = Poly A sequence
  source 1..200: mol_type = other DNA
aaatacttcttcaagttatgatgcttgaaagttctcaataaagttcacggtttcattaccacattgtgttgcagtagtaatttcttggagaatataaaaatccacatcaaagtccaaagatatttagcgttagcgttagacactgatgccaaaagacaagcagttattctctgtctttccaaaggaagaaatgggagatt

SEQ ID NO: 3376 - DNA, 200 bp, synthetic construct
  misc_feature 1..200: note = Poly A sequence
  source 1..200: mol_type = other DNA
gactgggtcccagagccttgaagggaacctcacaggcttagccagggcaaaaatgtgtcacagctgaggaatatctgctgttgtcatcaacaagtgctattaaaggatgtaaatccatgagtatgtttctgactcctctcagtttctgtcgctttgggttgtaggtgtctgtaagacatccaggggaagctatccccaga

SEQ ID NO: 3377 - DNA, 200 bp, synthetic construct
  misc_feature 1..200: note = Poly A sequence
  source 1..200: mol_type = other DNA
taatcgggttgggacttaactttaaggtgttttcaatgtgattttagtatttacagtaataaataaaatttatacaaagtttcagagaactaccaactctctagttaattttgatgaagatgttttcattaatagtctggtttagtattaatttaaccttgaaataagaaattggtcctgatttgccaccttcatttttc

SEQ ID NO: 3378 - DNA, 200 bp, synthetic construct
  misc_feature 1..200: note = Poly A sequence
  source 1..200: mol_type = other DNA
ccatgccagttttggtcaattctctatgatttacttctctcattttgccacatttactttagtagatataatttcattaaaaacaaaaaagaaacaaggtttatattaaatggaaatccataaaccacaattaatcctattttgtcatgttagttttacagaacatcatgttacattgccgacgtactgttactatttaa

SEQ ID NO: 3379 - DNA, 200 bp, synthetic construct
  misc_feature 1..200: note = Poly A sequence
  source 1..200: mol_type = other DNA
ccagttgctaagtggggctcaagaagcaccgccttccccaccccctgcctgccattctgacctcttctcagagcacctaattaaaggggctgaaagtctgactcgctagtgttgattgtgttgtgaaggggatatgggatgggggtgtcaaaagctttaaaagggctgctgcaaccttccctgggtgttctggctgtata

SEQ ID NO: 3380 - DNA, 200 bp, synthetic construct
  misc_feature 1..200: note = Poly A sequence
  source 1..200: mol_type = other DNA
tcctgcccggagtggaagctgaagcctgcacagtgtccaccctgttcccactcccatctttcttccggacaatgaaataaagagttaccacccagcagacactgtttctgtgtagtgcctgggaacaaacccatgttgctgatgacctggtgtgagcaccctgggaccagtggggatgagggatgccaaatgttgggttt

SEQ ID NO: 3381 - DNA, 200 bp, synthetic construct
  misc_feature 1..200: note = Poly A sequence
  source 1..200: mol_type = other DNA
ttcaggatgtctatctctctctcccttctcctccatcaagctcacaggtggttaggagtcaaagagaaaaatgctgcatactcccaccttctaacctaggtaataaagttctgcactcaaaatcaagtccacatgttgtaacaggacacaaagtattatgaaggtactgcctttcccaccccaccctggagctctgagca

SEQ ID NO: 3382 - DNA, 200 bp, synthetic construct
  misc_feature 1..200: note = Poly A sequence
  source 1..200: mol_type = other DNA
agggagaaggcagagaaaacacacgctcctctgcccttcctttccctggggtactactctccagcttgggaggaagcccagtagccattttgtaactgcctaccagtcgccctctgtgcctaataaagtctctttttctcacagagtgtaggcagtgttgtgtgctagggggcctggcatggggaagaaatgtgaaggct

SEQ ID NO: 3383 - DNA, 200 bp, synthetic construct
  misc_feature 1..200: note = Poly A sequence
  source 1..200: mol_type = other DNA
ggaaaaatctgtttgctgttcctgctttattgtttgctttctgtgtgctgtcatattttggtatcagagttacattaaatttgcaaaatgaattggagttttttctgtcttttaatgtgcttaggtagttgtggagtggcatcttgggttcgtagaagagctggagatcagcatagctctttggagaatgtgggtctcca

SEQ ID NO: 3384 - DNA, 200 bp, synthetic construct
  misc_feature 1..200: note = Poly A sequence
  source 1..200: mol_type = other DNA
gaagccagctgcctaggattcacaccccacctgcgcttcacttgggtccaggcctactcctgtcttctgctttgttgtgtgcctctagctgaattgagcctaaaaataaagcacaaaccacagcatgtgaagccttttattggacagggaacagacaagtgcattctgactccctcagacaagtggcagatctatgaggt

SEQ ID NO: 3385 - DNA, 200 bp, synthetic construct
  misc_feature 1..200: note = Poly A sequence
  source 1..200: mol_type = other DNA
ctcttttctgccctttctttgcagctactggtgagatagtcccaagaaacagggaagagcctaggggagaggtgccctgacggcactttggtgccagcattgaggaaaacaatggacaaaataaaaagcccatcttctgataactgcgtgtgcaccaactactctgttttgaaggctctgggatgcatgtctctccttct

SEQ ID NO: 3386 - DNA, 200 bp, synthetic construct
  misc_feature 1..200: note = Poly A sequence
  source 1..200: mol_type = other DNA
tgccaagtgtccctaaagatggaggaataaagccaccaattctgttgtaaataaaaataaagttacttacaaagagtcgggccaactagaggtgttcttcattgagatctaatgatgtgtagtatggtctgatgtccctttagcaattctgaggcccatggcggggttgtgagtggctagctgggaaggagctggatggg

SEQ ID NO: 3387 - DNA, 200 bp, synthetic construct
  misc_feature 1..200: note = Poly A sequence
  source 1..200: mol_type = other DNA
gtcacataagacattttctttttttgttgttttggactacatatttgcactgaagcagaattgttttattaaaaaaatcatacattcccattttctataatccttcttttagataagatttatttaaaaggggatttgagttttacatctttcatagtctatttaatgtggcatctgtatttatccccaaattattttct

SEQ ID NO: 3388 - DNA, 200 bp, synthetic construct
  misc_feature 1..200: note = Poly A sequence
  source 1..200: mol_type = other DNA
agactttccatatcaagagtcatggtattgactcaacagtttccagtcatggccaaatgttcaatatgagtctcaataaactgaatttttcttgcgaatgttgaatacgtcttatttttaaatattgttgtatttaaataggcttttgagtactcaaagcctcagctagtagtacattttctggattctattaacagttt

SEQ ID NO: 3389 - DNA, 200 bp, synthetic construct
  misc_feature 1..200: note = Poly A sequence
  source 1..200: mol_type = other DNA
aagcgtacaggatgtaatgccagtggtggaaatcattaaagacactttgagtagattcatttgattgtgtgtttatactaaatgaattatttttttaagagggaggggattccaagtcacatacaaaaaatccagatacttaccaagtttcttatttatactttaagtaattgattacatatggctaaaatatacttact

SEQ ID NO: 3390 - DNA, 200 bp, synthetic construct
  misc_feature 1..200: note = Poly A sequence
  source 1..200: mol_type = other DNA
gaagcattttcctgattgatgaaaaaaataactcagttatggccatctacccctgctagaaggttacagtgtattatgtagcatgcaatgtgttatgtagtgcttaataaaaataaaatgaaaaaaatgcatttcttttttttaaatatgttacacaaaatcaagcaatctacccaatgtagtctttatcacttaaaaaa

SEQ ID NO: 3391 - DNA, 200 bp, synthetic construct
  misc_feature 1..200: note = Poly A sequence
  source 1..200: mol_type = other DNA
acttacaggatgtcttaggattgtttttctcatcaggatacattaaaaatacaatacagcacgtcaaaccacagaatatttattgagtaataaacttgtggcacacaatccagctgtatttttttgcattcattcattttccattctgcaacctccatcacattagcagagtaaccagtaagttgttttctattttctaa

SEQ ID NO: 3392 - DNA, 200 bp, synthetic construct
  misc_feature 1..200: note = Poly A sequence
  source 1..200: mol_type = other DNA
ttgctggaggagtgacagccaggagccctgacttcacttcctttggtccagttttactctgatacagggtggattccaaaactggctcagtacattgcatgtagttaagccacattttaaaaataaaggcattttttaatctatttacctggagtatatgttgcattgtcccccagtgggatcatttcgttcaagtcaga

SEQ ID NO: 3393 - DNA, 200 bp, synthetic construct
  misc_feature 1..200: note = Poly A sequence
  source 1..200: mol_type = other DNA
accaaacgatataaatacaagataaattatcactggagttttttctttcccttttttctgtgcctgcataatgctgacacctgcttgtttccatacaaattgatatcaaaataaaatttgtatagattatcacatggctttttgtcttgctttcctccaagacattcctgattgtgatgagcagaacaggcagtttgccc

SEQ ID NO: 3394 - DNA, 200 bp, synthetic construct
  misc_feature 1..200: note = Poly A sequence
  source 1..200: mol_type = other DNA
gtgaacatcacctttttatagcattaaattcattttttaaaatgataaatgctggagggggccatctgatttgaataaagttgaaagaacatgttaaagtcagtcttaaggagtcacgtttgagtatgtaaattttgatctttctaatatgttggtttgtatattcagttttaactgtatgaatctgatttgcaaatgag

SEQ ID NO: 3395 - DNA, 200 bp, synthetic construct
  misc_feature 1..200: note = Poly A sequence
  source 1..200: mol_type = other DNA
gctggccctaggaccttcttggtttgctccttggattccccttcccactccagcaccccagccagcctggtacgcagatcccagaataaagcaccttctccctagacttggcgtgggcctccctcactccaggcaccgatgttcagtccacactttattaagaaaggaatacacacactttctccgagagccctcacggg

SEQ ID NO: 3396 - DNA, 200 bp, synthetic construct
  misc_feature 1..200: note = Poly A sequence
  source 1..200: mol_type = other DNA
ggcggcaccccagccctgcccttgcttccttcaataaacatcacaggacctgggactgcacaggacctggggctgctggcttgcgttattgtgccttcccccgactgggagagctgggggcccagcgtcctcttgtctgcctggccagcagaggcaccaggcaggaaaggggtgggctttggtctagaactcccgtccct

SEQ ID NO: 3397 - DNA, 200 bp, synthetic construct
  misc_feature 1..200: note = Poly A sequence
  source 1..200: mol_type = other DNA
agcctgccccatcccctcctcaccccacgagctttcacaataaattcgctccgtggcactggggaactttgtgtgtgagcgcgcgcacatttagagggtgtgtttctccaggtcctctggtggggatgtgagccttggccttttgacccagagcatcctgccaggcccgagtacaaggaaagagctttggaggtgggact

SEQ ID NO: 3398 - DNA, 200 bp, synthetic construct
  misc_feature 1..200: note = Poly A sequence
  source 1..200: mol_type = other DNA
aggctgagtccgctccacctgcggctgtgcgcgcgtctgtgggctcgcgggaggggggctgtcgcgccgagggaggggccggctccagctccggggcagcgcccgccccgcccccaggcccgccccgcgctgaccggctccgcgcattggcccgccccgtgcgctggcctgtcccgcgcattggccaagcggccgggagg

SEQ ID NO: 3399 - DNA, 200 bp, synthetic construct
  misc_feature 1..200: note = Poly A sequence
  source 1..200: mol_type = other DNA
ctttacacggagcggattgcaaagcaaaccaacaagaataaaggcagctgttgtctcttctccttatgggtagggctctgacaaagcttcccgattaactgaaataaaaaatatttttttttctttcagtaaacttagagtttcgtggcttcagggtgggagtagttggagcattggggatgtttttcttaccgacaagc

SEQ ID NO: 3400 - DNA, 200 bp, synthetic construct
  misc_feature 1..200: note = Poly A sequence
  source 1..200: mol_type = other DNA
ggcttccaatgtgctgcccccctcttaatactcaccaataaattctacttcctgtccacctatgtctttgtatctacattcttgacggggaaggaacttcctctgggaacctttgggtcattgccctttcacttcagaaacaggttgacaactcagccctgctcatgaggcagcaaaccctgcaaagggctgggactggt

SEQ ID NO: 3401 - DNA, 208 bp, synthetic construct
  misc_feature 1..208: note = Poly A sequence
  source 1..208: mol_type = other DNA
ctgtgccttctagttgccagccatctgttgtttgcccctcccccgtgccttccttgaccctggaaggtgccactcccactgtcctttcctaataaaatgaggaaattgcatcgcattgtctgagtaggtgtcattctattctggggggtggggtggggcaggacagcaagggggaggattgggaagagaatagcaggcatgctgggga

SEQ ID NO: 3402 - DNA, 623 bp, synthetic construct
  misc_feature 1..623: note = Poly A sequence
  source 1..623: mol_type = other DNA
gggtggcatccctgtgacccctccccagtgcctctcctggccctggaagttgccactccagtgcccaccagccttgtcctaataaaattaagttgcatcattttgtctgactaggtgtccttctataatattatggggtggaggggggtggtatggagcaaggggcaagttgggaagacaacctgtagggcctgcggggtctattgggaaccaagctggagtgcagtggcacaatcttggctcactgcaatctccgcctcctgggttcaagcgattctcctgcctcagcctcccgagttgttgggattccaggcatgcatgaccaggctcagctaatttttgtttttttggtagagacggggtttcaccatattggccaggctggtctccaactcctaatctcaggtgatctacccaccttggcctcccaaattgctgggattacaggcgtgaaccactgctcccttccctgtccttctgattttaaaataactataccagcaggaggacgtccagacacagcataggctacctggccatgcccaaccggtgggacatttgagttgcttgcttggcactgtcctctcatgcgttgggtccactcagtagatgcctgttgaatt

SEQ ID NO: 3403 - DNA, 477 bp, synthetic construct
  misc_feature 1..477: note = Poly A sequence
  source 1..477: mol_type = other DNA
gggtggcatccctgtgacccctccccagtgcctctcctggccctggaagttgccactccagtgcccaccagccttgtcctaataaaattaagttgcatcattttgtctgactaggtgtccttctataatattatggggtggaggggggtggtatggagcaaggggcaagttgggaagacaacctgtagggcctgcggggtctattgggaaccaagctggagtgcagtggcacaatcttggctcactgcaatctccgcctcctgggttcaagcgattctcctgcctcagcctcccgagttgttgggattccaggcatgcatgaccaggctcagctaatttttgtttttttggtagagacggggtttcaccatattggccaggctggtctccaactcctaatctcaggtgatctacccaccttggcctcccaaattgctgggattacaggcgtgaaccactgctcccttccctgtcctt

SEQ ID NO: 3404 - DNA, 49 bp, synthetic construct
  misc_feature 1..49: note = Poly A sequence
  source 1..49: mol_type = other DNA
cggcaataaaaagacagaataaaacgcacgggtgttgggtcgtttgttc

SEQ ID NO: 3405 - DNA, 49 bp, synthetic construct
  misc_feature 1..49: note = Poly A sequence
  source 1..49: mol_type = other DNA
aataaaagatctttattttcattagatctgtgtgttggttttttgtgtg

SEQ ID NO: 3406 - DNA, 122 bp, synthetic construct
  misc_feature 1..122: note = Poly A sequence
  source 1..122: mol_type = other DNA
aacttgtttattgcagcttataatggttacaaataaagcaatagcatcacaaatttcacaaataaagcatttttttcactgcattctagttgtggtttgtccaaactcatcaatgtatctta

SEQ ID NO: 3407 - DNA, 82 bp, synthetic construct
  misc_feature 1..82: note = Poly A sequence
  source 1..82: mol_type = other DNA
aacttgtttattgcagcttataatggttacaaataaagcaatagcatcacaaatttcacaaataaagcatttttttcactgc

SEQ ID NO: 3408 - DNA, 395 bp, synthetic construct
  misc_feature 1..395: note = Poly A sequence
  source 1..395: mol_type = other DNA
gctcgctttcttgctgtccaatttctattaaaggttcctttgttccctaagtccaactactaaactgggggatattatgaagggccttgagcatctggattctgcctaataaaaaacatttattttcattgcaatgatgtatttaaattatttctgaatattttactaaaaagggaatgtgggaggtcagtgcatttaaaacataaagaaatgaagagctagttcaaaccttgggaaaatacactatatcttaaactccatgaaagaaggtgaggctgcaaacagctaatgcacattggcaacagcccctgatgcctatgccttattcatccctcagaaaaggattcaagtagaggcttgatttggaggttaaagttttgctatgctgtatttta

SEQ ID NO: 3409 - DNA, 56 bp, synthetic construct
  misc_feature 1..56: note = Poly A sequence
  source 1..56: mol_type = other DNA
aataaaggaaatttattttcattgcaatagtgtgttggaattttttgtgtctctca

SEQ ID NO: 3410 - DNA, 181 bp, synthetic construct
  misc_feature 1..181: note = Poly A sequence
  source 1..181: mol_type = other DNA
tatttgtgaaatttgtgatgctattgctttatttgtaaccatctagctttatttgtgaaatttgtgatgctattgctttatttgtaaccattataagctgcaataaacaagttaacaacaacaattgcattcattttatgtttcaggttcagggggagatgtgggaggttttttaaagcgg

SEQ ID NO: 3411 - protein, 9 aa, synthetic construct
  REGION 1..9: note = NLS 5'
PKKKRKVSR

SEQ ID NO: 3412 - protein, 39 aa, synthetic construct
  REGION 1..39: note = NLS 5'
PKKKRKVGGSPKKKRKVGGSPKKKRKVGGSPKKKRKVSR

SEQ ID NO: 3413 - protein, 59 aa, synthetic construct
  REGION 1..59: note = NLS 5'
PKKKRKVGGSPKKKRKVGGSPKKKRKVGGSPKKKRKVGGSPKKKRKVGGSPKKKRKVSR

SEQ ID NO: 3414 - protein, 11 aa, synthetic construct
  REGION 1..11: note = NLS 5'
PAAKRVKLDSR

SEQ ID NO: 3415 - protein, 23 aa, synthetic construct
  REGION 1..23: note = NLS 5'
PAAKRVKLDGGSPAAKRVKLDSR

SEQ ID NO: 3416 - protein, 47 aa, synthetic construct
  REGION 1..47: note = NLS 5'
PAAKRVKLDGGSPAAKRVKLDGGSPAAKRVKLDGGSPAAKRVKLDSR

SEQ ID NO: 3417 - protein, 48 aa, synthetic construct
  REGION 1..48: note = NLS 5'
PAAKRVKLDGGSPAAKRVKLDGGSPAAKRVKLDGGSPAAKRVKLDGGS

SEQ ID NO: 3418 - protein, 18 aa, synthetic construct
  REGION 1..18: note = NLS 5'
KRPAATKKAGQAKKKKSR

SEQ ID NO: 3419 - protein, 37 aa, synthetic construct
  REGION 1..37: note = NLS 5'
KRPAATKKAGQAKKKKGGSKRPAATKKAGQAKKKKSR

SEQ ID NO: 3420 - protein, 21 aa, synthetic construct
  REGION 1..21: note = NLS 5'
PAAKRVKLDGGSPKKKRKVSR

SEQ ID NO: 3421 - protein, 21 aa, synthetic construct
  REGION 1..21: note = NLS 5'
PAAKKKKLDGGSPKKKRKVSR

SEQ ID NO: 3422 - protein, 11 aa, synthetic construct
  REGION 1..11: note = NLS 5'
PAAKKKKLDSR

SEQ ID NO: 3423 - protein, 35 aa, synthetic construct
  REGION 1..35: note = NLS 5'
PAAKKKKLDGGSPAAKKKKLDGGSPAAKKKKLDSR

SEQ ID NO: 3424 - protein, 47 aa, synthetic construct
  REGION 1..47: note = NLS 5'
PAAKKKKLDGGSPAAKKKKLDGGSPAAKKKKLDGGSPAAKKKKLDSR

SEQ ID NO: 3425 - protein, 13 aa, synthetic construct
  REGION 1..13: note = NLS 5'
PAKRARRGYKCSR

SEQ ID NO: 3426 - protein, 26 aa, synthetic construct
  REGION 1..26: note = NLS 5'
PAKRARRGYKCGSPAKRARRGYKCSR

SEQ ID NO: 3427 - protein, 9 aa, synthetic construct
  REGION 1..9: note = NLS 5'
PRRKREESR

SEQ ID NO: 3428 - protein, 9 aa, synthetic construct
  REGION 1..9: note = NLS 5'
PYRGRKESR

SEQ ID NO: 3429 - protein, 10 aa, synthetic construct
  REGION 1..10: note = NLS 5'
PLRKRPRRSR

SEQ ID NO: 3430 - protein, 20 aa, synthetic construct
  REGION 1..20: note = NLS 5'
PLRKRPRRGSPLRKRPRRSR

SEQ ID NO: 3431 - protein, 32 aa, synthetic construct
  REGION 1..32: note = NLS 5'
PAAKRVKLDGGKRTADGSEFESPKKKRKVGGS

SEQ ID NO: 3432 - protein, 34 aa, synthetic construct
  REGION 1..34: note = NLS 5'
PAAKRVKLDGGKRTADGSEFESPKKKRKVPPPPG

SEQ ID NO: 3433 - protein, 39 aa, synthetic construct
  REGION 1..39: note = NLS 5'
PAAKRVKLDGGKRTADGSEFESPKKKRKVGIHGVPAAPG

SEQ ID NO: 3434 - protein, 39 aa, synthetic construct
  REGION 1..39: note = NLS 5'
PAAKRVKLDGGKRTADGSEFESPKKKRKVGGGSGGGSPG

SEQ ID NO: 3435 - protein, 40 aa, synthetic construct
  REGION 1..40: note = NLS 5'
PAAKRVKLDGGKRTADGSEFESPKKKRKVPGGGSGGGSPG

SEQ ID NO: 3436 - protein, 48 aa, synthetic construct
  REGION 1..48: note = NLS 5'
PAAKRVKLDGGKRTADGSEFESPKKKRKVAEAAAKEAAAKEAAAKAPG

SEQ ID NO: 3437 - protein, 31 aa, synthetic construct
  REGION 1..31: note = NLS 5'
PAAKRVKLDGGKRTADGSEFESPKKKRKVPG

SEQ ID NO: 3438 - protein, 22 aa, synthetic construct
  REGION 1..22: note = NLS 5'
PAAKRVKLDGGSPKKKRKVGGS

SEQ ID NO: 3439 - protein, 21 aa, synthetic construct
  REGION 1..21: note = NLS 5'
PAAKRVKLDPPPPKKKRKVPG

SEQ ID NO: 3440 - protein, 11 aa, synthetic construct
  REGION 1..11: note = NLS 5'
PAAKRVKLDPG

SEQ ID NO: 3441 - protein, 21 aa, synthetic construct
  REGION 1..21: note = NLS 5'
PAAKRVKLDGGGSGGGSGGGS

SEQ ID NO: 3442 - protein, 12 aa, synthetic construct
  REGION 1..12: note = NLS 5'
PAAKRVKLDPPP

SEQ ID NO: 3443 - protein, 24 aa, synthetic construct
  REGION 1..24: note = NLS 5'
PAAKRVKLDGGGSGGGSGGGSPPP

SEQ ID NO: 3444 - protein, 10 aa, synthetic construct
  REGION 1..10: note = NLS 5'
PKKKRKVPPP

SEQ ID NO: 3445 - protein, 10 aa, synthetic construct
  REGION 1..10: note = NLS 5'
PKKKRKVGGS

SEQ ID NO: 3446 - protein, 9 aa, synthetic construct
  REGION 1..9: note = NLS 3'
GSPKKKRKV

SEQ ID NO: 3447 - protein, 39 aa, synthetic construct
  REGION 1..39: note = NLS 3'
GSPKKKRKVGGSPKKKRKVGGSPKKKRKVGGSPKKKRKV

SEQ ID NO: 3448 - protein, 59 aa, synthetic construct
  REGION 1..59: note = NLS 3'
GSPKKKRKVGGSPKKKRKVGGSPKKKRKVGGSPKKKRKVGGSPKKKRKVGGSPKKKRKV

SEQ ID NO: 3449 - protein, 11 aa, synthetic construct
  REGION 1..11: note = NLS 3'
GSPAAKRVKLD

SEQ ID NO: 3450 - protein, 23 aa, synthetic construct
  REGION 1..23: note = NLS 3'
GSPAAKRVKLDGGSPAAKRVKLD

SEQ ID NO: 3451 - protein, 47 aa, synthetic construct
  REGION 1..47: note = NLS 3'
GSPAAKRVKLDGGSPAAKRVKLDGGSPAAKRVKLDGGSPAAKRVKLD

SEQ ID NO: 3452 - protein, 71 aa, synthetic construct
  REGION 1..71: note = NLS 3'
GSPAAKRVKLDGGSPAAKRVKLDGGSPAAKRVKLDGGSPAAKRVKLDGGSPAAKRVKLDGGSPAAKRVKLD

SEQ ID NO: 3453 - protein, 18 aa, synthetic construct
  REGION 1..18: note = NLS 3'
GSKRPAATKKAGQAKKKK

SEQ ID NO: 3454 - protein, 35 aa, synthetic construct
  REGION 1..35: note = NLS 3'
KRPAATKKAGQAKKKKGGSKRPAATKKAGQAKKKK

SEQ ID NO: 3455 - protein, 41 aa, synthetic construct
  REGION 1..41: note = NLS 3'
GSPAAKRVKLGGSPAAKRVKLGGSPKKKRKVGGSPKKKRKV

SEQ ID NO: 3456 - protein, 15 aa, synthetic construct
  REGION 1..15: note = NLS 3'
GSKLGPRKATGRWGS

SEQ ID NO: 3457 - protein, 19 aa, synthetic construct
  REGION 1..19: note = NLS 3'
GSKRKGSPERGERKRHWGS

SEQ ID NO: 3458 - protein, 31 aa, synthetic construct
  REGION 1..31: note = NLS 3'
GSPKKKRKVGSGSKRPAATKKAGQAKKKKLE

SEQ ID NO: 3459 - protein, 30 aa, synthetic construct
  REGION 1..30: note = NLS 3'
GPKRTADSQHSTPPKTKRKVEFEPKKKRKV

SEQ ID NO: 3460 - protein, 36 aa, synthetic construct
  REGION 1..36: note = NLS 3'
GGGSGGGSKRTADSQHSTPPKTKRKVEFEPKKKRKV

SEQ ID NO: 3461 - protein, 45 aa, synthetic construct
  REGION 1..45: note = NLS 3'
AEAAAKEAAAKEAAAKAKRTADSQHSTPPKTKRKVEFEPKKKRKV

SEQ ID NO: 3462 - protein, 40 aa, synthetic construct
  REGION 1..40: note = NLS 3'
GPPKKKRKVGGSKRTADSQHSTPPKTKRKVEFEPKKKRKV

SEQ ID NO: 3463 - protein, 28 aa, synthetic construct
  REGION 1..28: note = NLS 3'
GPAEAAAKEAAAKEAAAKAPAAKRVKLD

SEQ ID NO: 3464 - protein, 23 aa, synthetic construct
  REGION 1..23: note = NLS 3'
GPGGGSGGGSGGGSPAAKRVKLD

SEQ ID NO: 3465 - protein, 21 aa, synthetic construct
  REGION 1..21: note = NLS 3'
GPPKKKRKVPPPPAAKRVKLD

SEQ ID NO: 3466 - protein, 11 aa, synthetic construct
  REGION 1..11: note = NLS 3'
GPPAAKRVKLD

SEQ ID NO: 3467 - protein, 9 aa, synthetic construct
  REGION 1..9: note = NLS 3'
GSPKKKRKV

SEQ ID NO: 3468 - protein, 11 aa, synthetic construct
  REGION 1..11: note = NLS 3'
GSPAAKRVKLD

SEQ ID NO: 3469 - protein, 19 aa, synthetic construct
  REGION 1..19: note = NLS 3'
VGSKRPAATKKAGQAKKKK

SEQ ID NO: 3470 - protein, 44 aa, synthetic construct
  REGION 1..44: note = NLS 3'
TGGGPGGGAAAGSGSPKKKRKVGSGSKRPAATKKAGQAKKKKLE

SEQ ID NO: 3471 - protein, 44 aa, synthetic construct; identical to SEQ ID NO: 3470
  REGION 1..44: note = NLS 3'

SEQ ID NO: 3472 - protein, 26 aa, synthetic construct
  REGION 1..26: note = NLS 3'
TGGGPGGGAAAGSGSPKKKRKVGSGS

SEQ ID NO: 3473 - protein, 13 aa, synthetic construct
  REGION 1..13: note = NLS 3'
PPPPKKKRKVPPP

SEQ ID NO: 3474 - protein, 13 aa, synthetic construct
  REGION 1..13: note = NLS 3'
GGSPKKKRKVPPP

SEQ ID NO: 3475 - protein, 10 aa, synthetic construct
  REGION 1..10: note = NLS 3'
PPPPKKKRKV

SEQ ID NO: 3476 - protein, 10 aa, synthetic construct
  REGION 1..10: note = NLS 3'
GGSPKKKRKV

SEQ ID NO: 3477 - protein, 19 aa, synthetic construct
  REGION 1..19: note = NLS 3'
GGSPKKKRKVGGSGGSGGS

SEQ ID NO: 3478 - protein, 20 aa, synthetic construct
  REGION 1..20: note = NLS 3'
GGSPKKKRKVGGSPKKKRKV

SEQ ID NO: 3479 - protein, 26 aa, synthetic construct
  REGION 1..26: note = NLS 3'
GGSGGSGGSPKKKRKVGGSPKKKRKV

SEQ ID NO: 3480 - protein, 22 aa, synthetic construct
  REGION 1..22: note = NLS 3'
VGGGSGGGSGGGSPAAKRVKLD

SEQ ID NO: 3481 - protein, 13 aa, synthetic construct
  REGION 1..13: note = NLS 3'
VPPPPAAKRVKLD

SEQ ID NO: 3482 - protein, 25 aa, synthetic construct
  REGION 1..25: note = NLS 3'
VPPPGGGSGGGSGGGSPAAKRVKLD

SEQ ID NO: 3483 - protein, 22 aa, synthetic construct
  REGION 1..22: note = NLS 3'
VGGGSGGGSGGGSPAAKRVKLD

SEQ ID NO: 3484 - protein, 13 aa, synthetic construct
  REGION 1..13: note = NLS 3'
VPPPPAAKRVKLD

SEQ ID NO: 3485 - protein, 25 aa, synthetic construct
  REGION 1..25: note = NLS 3'
VPPPGGGSGGGSGGGSPAAKRVKLD

SEQ ID NO: 3486 - protein, 12 aa, synthetic construct
  REGION 1..12: note = NLS 3'
VGSPAAKRVKLD

SEQ ID NO: 3487 - DNA, 54 bp, synthetic construct
  misc_feature 1..54: note = casX intron sequence
  source 1..54: mol_type = other DNA
gtggcccaggcaggcagacccaccaggggtccctgaaggccagcccttgagaag

SEQ ID NO: 3488 - DNA, 67 bp, synthetic construct
  misc_feature 1..67: note = casX intron sequence
  source 1..67: mol_type = other DNA
gtcatacaactttcctgaagttgtatgacctctctgagccttagtctcctcgtttgtaaaatgagag

SEQ ID NO: 3489 - DNA, 62 bp, synthetic construct
  misc_feature 1..62: note = casX intron sequence
  source 1..62: mol_type = other DNA
gtaagagcatagtgcacaggactgctggtggccaggaggcccagccctggatcttcctccag

SEQ ID NO: 3490 - DNA, 49 bp, synthetic construct
  misc_feature 1..49: note = casX intron sequence
  source 1..49: mol_type = other DNA
gtatgagacaccacacctgcccatttttgtttggttttttaatgggcag

SEQ ID NO: 3491 - DNA, 59 bp, synthetic construct
  misc_feature 1..59: note = casX intron sequence
  source 1..59: mol_type = other DNA
gtacaaatatatatcaaattcatagatatctattggtacctcatataagtaccatagag

SEQ ID NO: 3492 - DNA, 67 bp, synthetic construct
  misc_feature 1..67: note = casX intron sequence
  source 1..67: mol_type = other DNA
gttccggagccccggcgcgggcgggttctggggtgtagacgctgctggccagcccgccccagccgag

SEQ ID NO: 3493 - DNA, 66 bp, synthetic construct
  misc_feature 1..66: note = casX intron sequence
  source 1..66: mol_type = other DNA
gtgtttgacggcatcccaccgccctacgacaagaaaaagcggatggtggttcctgctgccctcaag

SEQ ID NO: 3494 - DNA, 86 bp, synthetic construct
  misc_feature 1..86: note = casX intron sequence
  source 1..86: mol_type = other DNA
gtcgccaggtagggctgggggccgagggaccggctcgggggcgggggggaagtgtgcctgaccggtctctgtcctcagcgagggag

SEQ ID NO: 3495 - DNA, 67 bp, synthetic construct
  misc_feature 1..67: note = casX intron sequence
  source 1..67: mol_type = other DNA
gtgggtcccagccccgcccgctgcccggccgccccgcaggtcccccgtgacaccggctcctcctcag

SEQ ID NO: 3496 - DNA, 70 bp, synthetic construct
  misc_feature 1..70: note = casX intron sequence
  source 1..70: mol_type = other DNA
gtaagtgcagaggctggcagagggcagcccatgcccccacctgccacctcacaagcctctcctcccacag

SEQ ID NO: 3497 - DNA, 476 bp, synthetic construct
  misc_feature 1..476: note = casX intron sequence
  source 1..476: mol_type = other DNA
gtgagtctatgggacccttgatgttttctttccccttcttttctatggttaagttcatgtcataggaaggggagaagtaacagggtacacatattgaccaaatcagggtaattttgcatttgtaattttaaaaaatgctttcttcttttaatatacttttttgtttatcttatttctaatactttccctaatctctttctttcagggcaataatgatacaatgtatcatgcctctttgcaccattctaaagaataacagtgataatttctgggttaaggcaatagcaatatttctgcatataaatatttctgcatataaattgtaactgatgtaagaggtttcatattgctaatagcagctacaatccagctaccattctgcttttattttatggttgggataaggctggattattctgagtccaagctaggcccttttgctaatcatgttcatacctcttatcttcctcccacag

SEQ ID NO: 3498 - DNA, 69 bp, synthetic construct
  misc_feature 1..69: note = casX intron sequence
  source 1..69: mol_type = other DNA
gtaagtggagactagggggctggggttgcaccctcccagtctgactcctcactgccgccgcctcctcag

SEQ ID NO: 3499 - DNA, 69 bp, synthetic construct
  misc_feature 1..69: note = casX intron sequence
  source 1..69: mol_type = other DNA
gtgagctggcgcccccagggcggctccgggcccaggcccgtccagggcataaccccctgtctcccctag

SEQ ID NO: 3500 - DNA, 70 bp, synthetic construct
  misc_feature 1..70: note = casX intron sequence
  source 1..70: mol_type = other DNA
gtaggcgcctggggcgggcaggagggtacacgggcgtaaactgagtctcaccgctttcctctccctgcag

SEQ ID NO: 3501 - DNA, 70 bp, synthetic construct
  misc_feature 1..70: note = casX intron sequence
  source 1..70: mol_type = other DNA
gtgagttgggactaggggttgggtctgggtccagacccggcccagccatcacacacctgccctccctcag

SEQ ID NO: 3502 - DNA, 108 bp, synthetic construct
  misc_feature 1..108: note = casX intron sequence
  source 1..108: mol_type = other DNA
gtacgatggcacctccggcaaagagagccaggagaggtaagggtgtgttagtaaagtggggggaggggaaagatttaataacttaactaagtatgtgtttttttatag

SEQ ID NO: 3503 - DNA, 69 bp, synthetic construct
  misc_feature 1..69: note = casX intron sequence
  source 1..69: mol_type = other DNA
gtgagctgcgcgcgcgcggcggggggcgggcgcccggaccccgctgaggctgcgcccctgtccccgcag

SEQ ID NO: 3504 - DNA, 206 bp, synthetic construct
  misc_feature 1..206: note = casX intron sequence
  source 1..206: mol_type = other DNA
gttcgagcttttggagtacgtcgtctttaggttggggggaggggttttatgcgatggagtttccccacactgagtgggtggagactgaagttaggccagcttggcacttgatgtaattctccttggaatttgccctttttgagtttggatcttggttcattctcaagcctcagacagtggttcaaagtttttttcttccatttcag

SEQ ID NO: 3505 - DNA, 70 bp, synthetic construct
  misc_feature 1..70: note = casX intron sequence
  source 1..70: mol_type = other DNA
gtgtgtgctgggcagggttgggggctgggggccagggcatgccaggctctgattgccaccccctttttag

SEQ ID NO: 3506 - DNA, 68 bp, synthetic construct
  misc_feature 1..68: note = casX intron sequence
  source 1..68: mol_type = other DNA
gtaaggcaggctccctggggcggcaggtgggttgcatggagccaggctgaccctccatgtccccccag

SEQ ID NO: 3507 - DNA, 299 bp, synthetic construct
  misc_feature 1..299: note = casX intron sequence
  source 1..299: mol_type = other DNA
gtttgtttccttttttaaaatacattgagtatgcttgccttttagatatagaaatatctgatgctgtctacttcactaaattttgattacatgatttgacagcaatattgaagagtctaacagccagcacgcaggttggtaagtactgtgggaacatcacagattttggctccatgccctaaagagaaattggctttcagattatttggattaaaaacaaagactttcttaagagatgtaaaattttcatgatgttttcttttttgctaaaactaaagaattattcttttacatttcag

SEQ ID NO: 3508 - DNA, 226 bp, synthetic construct
  misc_feature 1..226: note = casX intron sequence
  source 1..226: mol_type = other DNA
gtcgctgcgacgctgccttcgccccgtgccccgctccgccgccgcctcgcgccgcccgccccggctctgactgaccgcgttactcccacaggtgagcgggcgggacggcccttctcctccgggctgtaattagctgagcaagaggtaagggtttaagggatggttggttggtggggtattaatgtttaattacctggagcacctgcctgaaatcactttttttcag

SEQ ID NO: 3509 - DNA, 71 bp, synthetic construct
  misc_feature 1..71: note = casX intron sequence
  source 1..71: mol_type = other DNA
gtaagagtcagagctggcagggacgtacagtggccacgactggggtactgagctgcagttcacctggcaga

SEQ ID NO: 3510 - DNA, 69 bp, synthetic construct
  misc_feature 1..69: note = casX intron sequence
  source 1..69: mol_type = other DNA
gtgggtagggtttgggggagagcgtgggctggggttcagggacaccctctcaccactgccctcccacag

SEQ ID NO: 3511 - DNA, 87 bp, synthetic construct
  misc_feature 1..87: note = casX intron sequence
  source 1..87: mol_type = other DNA
gtaagtatacaattggatgtgctaaattgaacaaaataggttcttgtgctattttacttaggtttctctttttttccccacacatag

SEQ ID NO: 3512 - DNA, 84 bp, synthetic construct
  misc_feature 1..84: note = casX intron sequence
  source 1..84: mol_type = other DNA
aggtaagggtttaagggatggttggttggtggggtattaatgtttaattacctggagcacctgcctgaaatcactttttttcag

SEQ ID NO: 3513 - DNA, 82 bp, synthetic construct
  misc_feature 1..82: note = casX intron sequence
  source 1..82: mol_type = other DNA
gtaagggtttaagggatggttggttggtggggtattaatgtttaattacctgttttacaggcctgaaatcacttggttttag

SEQ ID NO: 3514 - DNA, 66 bp, synthetic construct
  misc_feature 1..66: note = casX intron sequence
  source 1..66: mol_type = other DNA
gtgagccaggccgtgggagggcgcccccgagactgccacctgctcaccacccccctctgctcgtag

SEQ ID NO: 3515 - DNA, 65 bp, synthetic construct
  misc_feature 1..65: note = casX intron sequence
  source 1..65: mol_type = other DNA
gtgagtgggcgccccggcggggtgggcagtgggcgggcccgagctgaccgcacccctccccacag

SEQ ID NO: 3516 - DNA, 66 bp, synthetic construct
  misc_feature 1..66: note = casX intron sequence
  source 1..66: mol_type = other DNA
gtgcgtgagcggggactggcggggggtgcccccacgggaccgcgctgaacccggccccccacacag

SEQ ID NO: 3517 - DNA, 106 bp, synthetic construct
  misc_feature 1..106: note = casX intron sequence
  source 1..106: mol_type = other DNA
gtaggatggcgcctcctgcaaaaagagcaagaggtaagggtagttttaagggggtggtgggcatacatataaaactaactgcaaataatttttttatatattacag

SEQ ID NO: 3518 - DNA, 69 bp, synthetic construct
  misc_feature 1..69: note = casX intron sequence
  source 1..69: mol_type = other DNA
gtaggccctggcctgcagggactgtgggtgccccctgtccagtaccctcaccatgaccctgttgcccag

SEQ ID NO: 3519 - DNA, 68 bp, synthetic construct
  misc_feature 1..68: note = casX intron sequence
  source 1..68: mol_type = other DNA
gtgagtcagggtggggctggccccctgcttcgtgcccatccgcgctctgactctctgcccacctgcag

SEQ ID NO: 3520 - DNA, 68 bp, synthetic construct
  misc_feature 1..68: note = casX intron sequence
  source 1..68: mol_type = other DNA
gtactacggcctgggtagggaatggtgggtgggggcgggggaccccttaccaaggccaccctctgcag

SEQ ID NO: 3521 - DNA, 97 bp, synthetic construct
  misc_feature 1..97: note = casX intron sequence
  source 1..97: mol_type = other DNA
gtaagtttagtctttttgtcttttatttcaggtcccggatccggtggtggtgcaaatcaaagaactgctcctcagtggatgttgcctttacttctag

SEQ ID NO: 3522 - DNA, 140 bp, synthetic construct
  misc_feature 1..140: note = casX intron sequence
  source 1..140: mol_type = other DNA
gtaagtcactgactgtctatgcctgggaaagggtgggcaggagatggggcagtgcaggaaaagtggcactatgaaccctgcagccctaggaatgcatctagacaattgtactaaccttcttctctttcctctcctgacag

SEQ ID NO: 3523 - DNA, 133 bp, synthetic construct
  misc_feature 1..133: note = casX intron sequence
  source 1..133: mol_type = other DNA
gtaagtatcaaggttacaagacaggtttaaggagaccaatagaaactgggcttgtcgagacagaggagactcttgcgtttctgataggcacctattggtcttactgacatccactttgcctttctctccacag

SEQ ID NO: 3524 - DNA, 190 bp, synthetic construct
  misc_feature 1..190: note = casX intron sequence
  source 1..190: mol_type = other DNA
gtaaatttctagtttttctccttcattttcttggttaggacccttttctctttttatttttttgagctttgatctttctttaaactgatctattttttaattgattggttatggtgtaaatattacatagctttaactgataatctgattactttatttcgtgtgtctatgatgatgatgatagttacag

SEQ ID NO: 3525 - DNA, 271 bp, synthetic construct
  misc_feature 1..271: note = casX intron sequence
  source 1..271: mol_type = other DNA
gtaagtaccgcctatagagtctataggcccacccccttggcttcttatgcatgctatactgtttttggcttggggtctatacacccccgcttcctcatgttataggtgatggtatagcttagcctataggtgtgggttattgaccattattgaccactccaacggtggagggcagtgtagtctgagcagtactcgttgctgccgcgcgcgccaccagacataatagctgacagactaacagactgttcctttccatgggtcttttctgcag

SEQ ID NO: 3526 - DNA, 96 bp, synthetic construct
  misc_feature 1..96: note = casX intron sequence
  source 1..96: mol_type = other DNA
gtaagtaccgcctatagactctataggcacacccctttggctcttatgcatgctgacagactaacagactgttcctttcctgggtcttttctgcag

SEQ ID NO: 3527 - DNA, 110 bp, synthetic construct
  misc_feature 1..110: note = casX intron sequence
  source 1..110: mol_type = other DNA
gtaagtaccgcctatagactctataggcacacccctttggctcttatgcatgaattaatacgactcactatagggagacagactgttcctttcctgggtcttttctgcag

SEQ ID NO: 3528 - DNA, 270 bp, synthetic construct
  misc_feature 1..270: note = casX intron sequence
  source 1..270: mol_type = other DNA
gtaagtaccgcctatagactctataggcacacccctttggctcttatgcatgctatactgtttttggcttggggcctatacacccccgcttccttatgctataggtgatggtatagcttagcctataggtgtgggttattgaccattattgaccactccaacggtggagggcagtgtagtctgagcagtactcgttgctgccgcgcgcgccaccagacataatagctgacagactaacagactgttcctttccatgggtcttttctgcag

SEQ ID NO: 3529 - DNA, 116 bp, synthetic construct
  misc_feature 1..116: note = casX intron sequence
  source 1..116: mol_type = other DNA
gtaagtactttgctacatccatactccatccttcccatcccttattcctttgaacctttcagttcgagctttcccacttcatcgcagcttgactaacagctaccccgcttgagcag

SEQ ID NO: 3530 - DNA, 67 bp, synthetic construct
  misc_feature 1..67: note = casX intron sequence
  source 1..67: mol_type = other DNA
gtaggttcaaccactgatgcctaggcacaccgaaacgactaaccctaattcttatcctttacttcag

SEQ ID NO: 3531 - DNA, 66 bp, synthetic construct
  misc_feature 1..66: note = casX intron sequence
  source 1..66: mol_type = other DNA
gtaaatataaaatttttaagtgtataatgtgttaaactactgattctaattgtttgtgtattttag

SEQ ID NO: 3532 - DNA, 584 bp, synthetic construct
  misc_feature 1..584: note = Promoter variant sequence
  source 1..584: mol_type = other DNA
gacattgattattgactagttattaatagtaatcaattacggggtcattagttcatagcccatatatggagttccgcgttacataacttacggtaaatggcccgcctggctgaccgcccaacgacccccgcccattgacgtcaataatgacgtatgttcccatagtaacgccaatagggactttccattgacgtcaatgggtggagtatttacggtaaactgcccacttggcagtacatcaagtgtatcatatgccaagtacgccccctattgacgtcaatgacggtaaatggcccgcctggcattatgcccagtacatgaccttatgggactttcctacttggcagtacatctacgtattagtcatcgctattaccatggtgatgcggttttggcagtacatcaatgggcgtggatagcggtttgactcacggggatttccaagtctccaccccattgacgtcaatgggagtttgttttggcaccaaaatcaacgggactttccaaaatgtcgtaacaactccgccccattgacgcaaatgggcggtaggcgtgtacggtgggaggtctatataagcagagct

SEQ ID NO: 3533 - DNA, 400 bp, synthetic construct
  misc_feature 1..400: note = Promoter variant sequence
  source 1..400: mol_type = other DNA
ggcctccgcgccgggttttggcgcctcccgcgggcgcccccctcctcacggcgagcgctgccacgtcagacgaagggcgcagcgagcgtcctgatccttccgcccggacgctcaggacagcggcccgctgctcataagactcggccttagaaccccagtatcagcagaaggacattttaggacgggacttgggtgactctagggcactggttttctttccagagagcggaacaggcgaggaaaagtagtcccttctcggcgattctgcggagggatctccgtggggcggtgaacgccgatgattatataaggacgcgccgggtgtggcacagctagttccgtcgcagccgggatttgggtcgcggttcttgtttgtggatcgctgtgatcgtcacttggt

SEQ ID NO: 3534 - DNA, 234 bp, synthetic construct
  misc_feature 1..234: note = Promoter variant sequence
  source 1..234: mol_type = other DNA
tggctccggtgcccgtcagtgggcagagcgcacatcgcccacagtccccgagaagttggggggaggggtcggcaattgaaccggtgcctagagaaggtggcgcggggtaaactgggaaagtgatgtcgtgtactggctccgcctttttcccgagggtgggggagaaccgtatataagtgcagtagtcgccgtgaacgttctttttcgcaacgggtttgccgccagaacacaggt

SEQ ID NO: 3535 - DNA, 335 bp, synthetic construct
  misc_feature 1..335: note = Promoter variant sequence
  source 1..335: mol_type = other DNA
cgttacataacttacggtaaatggcccgcctggctgaccgcccaacgacccccgcccattgacgtcaataatgacgtatgttcccatagtaacgccaatagggactttccattgacgtcaatgggtggagtatttacggtaaactgcccacttggcagtacatcaagtgtatcatatgccaagtacgccccctattgacgtcaatgacggtaaatggcccgcctggcattatgcccagtacatgaccttatgggactttcctacttggcagtacatctacgtattagtcatcgctattaccatgagagggtatataatggaagctcgacttccag

SEQ ID NO: 3536 - DNA, 100 bp, synthetic construct
  misc_feature 1..100: note = Promoter variant sequence
  source 1..100: mol_type = other DNA
ccaaaatcaacgggactttccaaaatgtcgtaataaccccgccccgttgacgcaaatgggcggtaggcgtgtacggtgggaggtctatataagcagagct

SEQ ID NO: 3537 - DNA, 52 bp, synthetic construct
  misc_feature 1..52: note = Promoter variant sequence
  source 1..52: mol_type = other DNA
gacgcaaatgggcggtaggcgtgtacggtgggaggtctatataagcagagct

SEQ ID NO: 3538 - DNA, 39 bp, synthetic construct
  misc_feature 1..39: note = Promoter variant sequence
  source 1..39: mol_type = other DNA
ggtaggcgtgtacggtgggaggtctatataagcagagct

SEQ ID NO: 3539 - DNA, 146 bp, synthetic construct
  misc_feature 1..146: note = Promoter variant sequence
  source 1..146: mol_type = other DNA
atgacacaaaccccgcccagcgtcttgtcattggcgaattcgaacacgcagatgcagtcggggcggcgcggtcccaggtccacttcgcatattaaggtgacgcgtgtggcctcgaacaccgagcgaccctgcagcgacccgcttaa

SEQ ID NO: 3540 - DNA, 63 bp, synthetic construct
  misc_feature 1..63: note = Promoter variant sequence
  source 1..63: mol_type = other DNA
ttcgcatattaaggtgacgcgtgtggcctcgaacaccgagcgaccctgcagcgacccgcttaa

SEQ ID NO: 3541 - DNA, 114 bp, synthetic construct
  misc_feature 1..114: note = Promoter variant sequence
  source 1..114: mol_type = other DNA
cattttgacacccccataatatttttccagaattaacagtataaattgcatctcttgttcaagagttccctatcactctctttaatcactactcacagtaacctcaactcctgc

SEQ ID NO: 3542 - DNA, 703 bp, synthetic construct
  misc_feature 1..703: note = Promoter variant sequence
  source 1..703: mol_type = other DNA
actagtttcatcaccaccgccacccccccgcccccccgccatctgaaagggttctaggggatttgcaacctctctcgtgtgtttcttctttccgagaagcgccgccacacgagaaagctggccgcgaaagtcgtgctggaatcacttccaacgaaaccccaggcatagatgggaaagggtgaagaacacgttgccatggctaccgtttccccggtcacggaataaacgctctctaggatccggaagtagttccgccgcgacctctctaaaaggatggatgtgttctctgcttacattcattggacgttttcccttagaggccaaggccgcccaggcaaaggggcggtcccacgcgtgaggggcccgcggagccatttgattggagaaaagctgcaaaccctgaccaatcggaaggagccacgcttcgggcatcggtcaccgcacctggacagctccgattggtggacttccgccccccctcacgaatcctcattgggtgccgtgggtgcgtggtgcggcgcgattggtgggttcatgtttcccgtcccccgcccgcgagaagtgggggtgaaaagcggcccgacctgcttggggtgtagtgggcggaccgcgcggctggaggtgtgaggatccgaacccaggggtggggggtggaggcggctcctgcgatcgaaggggacttgagactcaccggccgcacgtc

SEQ ID NO: 3543 - DNA, 81 bp, synthetic construct
  misc_feature 1..81: note = Promoter variant sequence
  source 1..81: mol_type = other DNA
gtacttatataagggggtgggggcgcgttcgtcctcagtcgcgatcgaacactcgagccgagcagacgtgcctacggaccg

SEQ ID NO: 3544 - DNA, 81 bp, synthetic construct
  misc_feature 1..81: note = Promoter variant sequence
  source 1..81: mol_type = other DNA
aggtctatataagcagagctcgtttagtgaaccgtcagatcgcctggagacgtcgagccgagtggttgtgcctccatagaa

SEQ ID NO: 3545 - DNA, 81 bp, synthetic construct
  misc_feature 1..81: note = Promoter variant sequence
  source 1..81: mol_type = other DNA
aggtctatataagcagagctcgtttagtgaaccgtcagtccgcctggagacctgcagccgagtggtcgtgcctccatagaa

SEQ ID NO: 3546 - DNA, 229 bp, synthetic construct
  misc_feature 1..229: note = Promoter variant sequence
  source 1..229: mol_type = other DNA
agctgaatggggtccgcctcttttccctgcctaaacagacaggaactcctgccaattgagggcgtcaccgctaaggctccgccccagcctgggctccacaaccaatgaagggtaatctcgacaaagagcaaggggtggggcgcgggcgcgcaggtgcagcagcacacaggctggtcgggagggcggggcgcgacgtctgccgtgcggggtcccggcatcggttgcgcgc

SEQ ID NO: 3547 - DNA, 68 bp, synthetic construct
  misc_feature 1..68: note = Promoter variant sequence
  source 1..68: mol_type = other DNA
ggtaggcgtgtacggtgggaggcctatataagcagagctcgtttagtgaaccgtcagatcgcctggag

SEQ ID NO: 3548 - DNA, 65 bp, synthetic construct
  misc_feature 1..65: note = Promoter variant sequence
  source 1..65: mol_type = other DNA
aggtctatataagcagagctctctggctaactagagaacccactgcttaactggcttatcgaaat

SEQ ID NO: 3549 - DNA, 39 bp, synthetic construct; identical to SEQ ID NO: 3538
  misc_feature 1..39: note = Promoter variant sequence
  source 1..39: mol_type = other DNA

SEQ ID NO: 3550 - DNA, 81 bp, synthetic construct
  misc_feature 1..81: note = Promoter variant sequence
  source 1..81: mol_type = other DNA
ggggctataaaagggggtgggggcgcgttcgtcctcactctcttccgcatcgctgtctgcgagggccagctgttggggtga

SEQ ID NO: 3551 - DNA, 107 bp, synthetic construct
  misc_feature 1..107: note = Promoter variant sequence
  source 1..107: mol_type = other DNA
gggggaggagattaggttaaaggtctttgtattaggaggctgtaggcataaattggtctgttcaccagcaccatgcaactttttcacctctgcctaatcatctcatg

SEQ ID NO: 3552 - DNA, 227 bp, synthetic construct
  misc_feature 1..227: note = Promoter variant sequence
  source 1..227: mol_type = other DNA
tgtagtcttatgcaatactcttgtagtcttgcaacatggtaacgatgagttagcaacatgccttacaaggagagaaaaagcaccgtgcatgccgattggtggaagtaaggtggtacgatcgtgccttattaggaaggcaacagacgggtctgacatggattggacgaaccactgaattgccgcattgcagagatattgtatttaagtgcctagctcgatacataaac

SEQ ID NO: 3553 - DNA, 448 bp, synthetic construct
  misc_feature 1..448: note = Promoter variant sequence
  source 1..448: mol_type = other DNA
agtgcaagtgggttttaggaccaggatgaggcggggtgggggtgcctacctgacgaccgaccccgacccactggacaagcacccaacccccattccccaaattgcgcatcccctatcagagagggggaggggaaacaggatgcggcgaggcgcgtgcgcactgccagcttcagcaccgcggacagtgccttcgcccccgcctggcggcgcgcgccaccgccgcctcagcactgaaggcgcgctgacgtcactcgccggtcccccgcaaactccccttcccggccaccttggtcgcgtccgcgccgccgccggcccagccggaccgcaccacgcgaggcgcgagataggggggcacgggcgcgaccatctgcgctgcggcgccggcgactcagcgctgcctcagtctgcggtgggcagcggaggagtcgtgtcgtgcctgagagcgcag

SEQ ID NO: 3554 - DNA, 330 bp, synthetic construct
  misc_feature 1..330: note = Promoter variant sequence
  source 1..330: mol_type = other DNA
gtgtgtcagttagggtgtggaaagtccccaggctccccagcaggcagaagtatgcaaagcatgcatctcaattagtcagcaaccaggtgtggaaagtccccaggctccccagcaggcagaagtatgcaaagcatgcatctcaattagtcagcaaccatagtcccgcccctaactccgcccatcccgcccctaactccgcccagttccgcccattctccgccccatggctgactaattttttttatttatgcagaggccgaggccgcctcggcctctgagctattccagaagtagtgaggaggcttttttggaggcctaggcttttgcaaa

SEQ ID NO: 3555 - DNA, 511 bp, synthetic construct
  misc_feature 1..511: note = Promoter variant sequence
  source 1..511: mol_type = other DNA
ggggttggggttgcgccttttccaaggcagccctgggtttgcgcagggacgcggctgctctgggcgtggttccgggaaacgcagcggcgccgaccctgggtctcgcacattcttcacgtccgttcgcagcgtcacccggatcttcgccgctacccttgtgggccccccggcgacgcttcctgctccgcccctaagtcgggaaggttccttgcggttcgcggcgtgccggacgtgacaaacggaagccgcacgtctcactagtaccctcgcagacggacagcgccagggagcaatggcagcgcgccgaccgcgatgggctgtggccaatagcggctgctcagcagggcgcgccgagagcagcggccgggaaggggcggtgcgggaggcggggtgtggggcggtagtgtgggccctgttcctgcccgcgcggtgttccgcattctgcaagcctccggagcgcacgtcggcagtcggctccctcgttgaccgaatcaccgacctctctccccag

SEQ ID NO: 3556 - DNA, 164 bp, synthetic construct
  misc_feature 1..164: note = Promoter variant sequence
  source 1..164: mol_type = other DNA
gggcggagttagggcggagccaatcagcgtgcgccgttccgaaagttgccttttatggctgggcggagaatgggcggtgaacgccgatgattatataaggacgcgccgggtgtggcacagctagttccgtcgcagccgggatttgggtcgcggttcttgtttgt

SEQ ID NO: 3557 - DNA, 326 bp, synthetic construct
  misc_feature 1..326: note = Promoter variant sequence
  source 1..326: mol_type = other DNA
gggcggagttagggcggagccaatcagcgtgcgccgttccgaaagttgccttttatggctgggcggagaatgggcggtgaacgccgatgattatataaggacgcgccgggtgtggcacagctagttccgtcgcagccgggatttgggtcgcggttcttgtttgtggatccctgtgatcgtcacttggtaagtcactgactgtctatgcctgggaaagggtgggcaggagatggggcagtgcaggaaaagtggcactatgaaccctgcagccctaggaatgcatctagacaattgtactaaccttcttctctttcctctcctgacag

SEQ ID NO: 3558 - DNA, 325 bp, synthetic construct
  misc_feature 1..325: note = Promoter variant sequence
  source 1..325: mol_type = other DNA
ccccgcagccattctagctagcggtaccaatagcaaccggcagctgccctccgcttttgctccgccccttctgcttgcgatctgtttccgcttccggtcccgcagttccggctctgccgtgaagagctttgcattgtgggaagtctttcctttctcgttccccggccatcttagcggctgctgttggtgagtgggctcctaccgaccgaggtttaggcagcgcggggagctttgcgggttgccatttgtaactccggatcctaaaattcctgtcctgttctctgtctcttctaggttgggggccgtcccgctcctaaggcaggaa

SEQ ID NO: 3559 - DNA, 243 bp, synthetic construct
  misc_feature 1..243: note = Promoter variant sequence
  source 1..243: mol_type = other DNA
agccccggaaccttcgctgttctcttacctatgaaccttacgaactgtaaagaaaggcgcaccggaagttgtggtacccaagccatactctcataaatccagccaggtcgcgctgaaacagtttccggaagcacttctcctagatcgcaccgcctcttcctcctggaagctatataatgatatcgcgtcacttccgctctctcttccacaggaggcctacacgccgccgcttgtgctgcagcc

SEQ ID NO: 3560 - DNA, 493 bp, synthetic construct
  misc_feature 1..493: note = Promoter variant sequence
  source 1..493: mol_type = other DNA
ccacgttctgcttcactctccccatctcccccccctccccacccccaattttgtatttatttattttttaattattttgtgcagcgatgggggcggggggggggggggggcgcgcgccaggcggggcggggcggggcgaggggcggggcggggcgaggcggagaggtgcggcggcagccaatcagagcggcgcgctccgaaagtttccttttatggcgaggcggcggcggcggcggccctataaaaagcgaagcgcgcggcgggcgggagcgggatcagccaccgcggtggcggcctagagtcgacgaggaactgaaaaaccagaaagttaactggtaagtttagtctttttgtcttttatttcaggtcccggatccggtggtggtgcaaatcaaagaactgctcctcagtggatgttgcctttacttctaggcctgtacggaagtgttacttctgctctaaaagctgcggaattgtacccgcggccgatcca

SEQ ID NO: 3561 - DNA, 565 bp, synthetic construct
  misc_feature 1..565: note = Promoter variant sequence
  source 1..565: mol_type = other DNA
cgttacataacttacggtaaatggcccgcctggctgaccgcccaacgacccccgcccattgacgtcaatagtaacgccaatagggactttccattgacgtcaatgggtggagtatttacggtaaactgcccacttggcagtacatcaagtgtatcatatgccaagtacgccccctattgacgtcaatgacggtaaatggcccgcctggcattgtgcccagtacatgaccttatgggactttcctacttggcagtacatctacgtattagtcatcgctattaccatggtcgaggtgagccccacgttctgcttcactctccccatctcccccccctccccacccccaattttgtatttatttattttttaattattttgtgcagcgatgggggcggggggggggggggggcgcgcgccaggcggggcggggcggggcgaggggcggggcggggcgaggcggagaggtgcggcggcagccaatcagagcggcgcgctccgaaagtttccttttatggcgaggcggcggcggcggcggccctataaaaagcgaagcgcgcggcgggcg

SEQ ID NO: 3562 - DNA, 204 bp, synthetic construct
  misc_feature 1..204: note = Promoter variant sequence
  source 1..204: mol_type = other DNA
gtgatgcggttttggcagtacatcaatgggcgtggatagcggtttgactcacggggatttccaagtctccaccccattgacgtcaatgggagtttgttttggcaccaaaatcaacgggactttccaaaatgtcgtaacaactccgccccattgacgcaaatgggcggtaggcgtgtacggtgggaggtctatataagcagagct

SEQ ID NO: 3563 - DNA, 241 bp, synthetic construct
  misc_feature 1..241: note = Pol III promoter
  source 1..241: mol_type = other DNA
gagggcctatttcccatgattccttcatatttgcatatacgatacaaggctgttagagagataattggaattaatttgactgtaaacacaaagatattagtacaaaatacgtgacgtagaaagtaataatttcttgggtagtttgcagttttaaaattatgttttaaaatggactatcatatgcttaccgtaacttgaaagtatttcgatttcttggctttatatatcttgtggaaaggac

SEQ ID NO: 3564 - DNA, 215 bp, synthetic construct
  misc_feature 1..215: note = Pol III promoter
  source 1..215: mol_type = other DNA
gaacgctgacgtcatcaacccgctccaaggaatcgcgggcccagtgtcactaggcgggaacacccagcgcgcgtgcgccctggcaggaagatggctgtgagggacaggggagtggcgccctgcaatatttgcatgtcgctatgtgttctgggaaatcaccataaacgtgaaatgtctttggatttgggaatcttataagttctgtatgagaccac

SEQ ID NO: 3565 - DNA, 267 bp, synthetic construct
  misc_feature 1..267: note = Pol III promoter
  source 1..267: mol_type = other DNA
ggacagcaagactctcgaggcgttctgcagtatttagcatgccccacccatctgcaaggcattctggatagtgtcaaaacagccggaaatcaagtccgtttatctcaaactttagcattttgggaataaatgatatttgctatgctggttaaattagattttagttaaatttcctgctgaagctctagtacgataagcaacttgacctaagtgtaaagttgagacttccttcaggtttatatagcttgtgcgccgcttgggtacctc

SEQ ID NO: 3566 - DNA, 103 bp, synthetic construct
  misc_feature 1..103: note = Pol III promoter
  source 1..103: mol_type = other DNA
gagggcctatttcccatgattccttcatatttgcatatacgatagcttaccgtaacttgaaagtatttcgatttcttggctttatatatcttgtggaaaggac

SEQ ID NO: 3567 - DNA, 38 bp, synthetic construct
  misc_feature 1..38: note = Pol III promoter
  source 1..38: mol_type = other DNA
tttcgatttcttggctttatatatcttgtggaaaggac

SEQ ID NO: 3568 - DNA, 67 bp, synthetic construct
  misc_feature 1..67: note = Pol III promoter
  source 1..67: mol_type = other DNA
atacgatagcttaccgtaacttgaaagtatttcgatttcttggctttatatatcttgtggaaaggac

SEQ ID NO: 3569 - DNA, 79 bp, synthetic construct
  misc_feature 1..79: note = Pol III promoter
  source 1..79: mol_type = other DNA
gagggcctatttcccatgattccttcatatttgcattttcgatttcttggctttatatatcttgtggaaaggacgaaac

SEQ ID NO: 3570 - DNA, 111 bp, synthetic construct
  misc_feature 1..111: note = Pol III promoter
  source 1..111: mol_type = other DNA
gagggcctatttcccatgattccttcatatttgcatatttgcatatacgatagcttaccgtaacttgaaagtatttcgatttcttggctttatatatcttgtggaaaggac

SEQ ID NO: 3571 - DNA, 127 bp, synthetic construct
  misc_feature 1..127: note = Pol III promoter
  source 1..127: mol_type = other DNA
gagggcctatttcccatgattccttcatatttgcatatttgcatatttgcatatttgcatatacgatagcttaccgtaacttgaaagtatttcgatttcttggctttatatatcttgtggaaaggac

SEQ ID NO: 3572 - DNA, 123 bp, synthetic construct
  misc_feature 1..123: note = Pol III promoter
  source 1..123: mol_type = other DNA
gagggcctatttcccatgattccttcatatttcccatgattccttcatatttgcatatacgatagcttaccgtaacttgaaagtatttcgatttcttggctttatatatcttgtggaaaggac

SEQ ID NO: 3573 - DNA, 143 bp, synthetic construct
  misc_feature 1..143: note = Pol III promoter
  source 1..143: mol_type = other DNA
gagggcctatttcccatgattccttcatatttcccatgattccttcatatttcccatgattccttcatatttgcatatacgatagcttaccgtaacttgaaagtatttcgatttcttggctttatatatcttgtggaaaggac

SEQ ID NO: 3574 - DNA, 131 bp, synthetic construct
  misc_feature 1..131: note = Pol III promoter
  source 1..131: mol_type = other DNA
gagggcctatttcccatgattccttcatatttgcatatttcccatgattccttcatatttgcatatacgatagcttaccgtaacttgaaagtatttcgatttcttggctttatatatcttgtggaaaggac

SEQ ID NO: 3575 - DNA, 159 bp, synthetic construct
  misc_feature 1..159: note = Pol III promoter
  source 1..159: mol_type = other DNA
gagggcctatttcccatgattccttcatatttgcatatttcccatgattccttcatatttgcatatttcccatgattccttcatatttgcatatacgatagcttaccgtaacttgaaagtatttcgatttcttggctttatatatcttgtggaaaggac

SEQ ID NO: 3576 - DNA, 103 bp, synthetic construct
  misc_feature 1..103: note = Pol III promoter
  source 1..103: mol_type = other DNA
gagggcctatttcccatgattccttcatatgcaaatatacgatagcttaccgtaacttgaaagtatttcgatttcttggctttatatatcttgtggaaaggac

SEQ ID NO: 3577 - DNA, 111 bp, synthetic construct
  misc_feature 1..111: note = Pol III promoter
  source 1..111: mol_type = other DNA
gagggcctatttcccatgattccttcatatgcaaatatgcaaatatacgatagcttaccgtaacttgaaagtatttcgatttcttggctttatatatcttgtggaaaggac

SEQ ID NO: 3578 - DNA, 127 bp, synthetic construct
  misc_feature 1..127: note = Pol III promoter
  source 1..127: mol_type = other DNA
gagggcctatttcccatgattccttcatatgcaaatatgcaaatatgcaaatatgcaaatatacgatagcttaccgtaacttgaaagtatttcgatttcttggctttatatatcttgtggaaaggac

SEQ ID NO: 3579 - DNA, 103 bp, synthetic construct
  misc_feature 1..103: note = Pol III promoter
  source 1..103: mol_type = other DNA
gagggcctatgcaaatatgaaggaatcatgggaaatatacgatagcttaccgtaacttgaaagtatttcgatttcttggctttatatatcttgtggaaaggac

SEQ ID NO: 3580 - DNA, 131 bp, synthetic construct
  misc_feature 1..131: note = Pol III promoter
  source 1..131: mol_type = other DNA
gagggcctatgcaaatatgaaggaatcatgggaaatatgcaaatatgaaggaatcatgggaaatatacgatagcttaccgtaacttgaaagtatttcgatttcttggctttatatatcttgtggaaaggac

SEQ ID NO: 3581 - DNA, 159 bp, synthetic construct
  misc_feature 1..159: note = Pol III promoter
  source 1..159: mol_type = other DNA
gagggcctatgcaaatatgaaggaatcatgggaaatatgcaaatatgaaggaatcatgggaaatatgcaaatatgaaggaatcatgggaaatatacgatagcttaccgtaacttgaaagtatttcgatttcttggctttatatatcttgtggaaaggac

SEQ ID NO: 3582 - DNA, 128 bp, synthetic construct
  misc_feature 1..128: note = Pol III promoter
  source 1..128: mol_type = other DNA
gagggcctatttcccatgattccttcatatttgcatatacgtttgactgtaaatacgtgacgtagaatagcttaccgtaacttgaaagtatttcgatttcttggctttatatatcttgtggaaaggac

SEQ ID NO: 3583 - DNA, 91 bp, synthetic construct
  misc_feature 1..91: note = Pol III promoter
  source 1..91: mol_type = other DNA
atatttgcatgtcgctatgtgttctgggaaatcaccataaacgtgaaatgtctttggatttgggaatcttataagttctgtatgagaccac

SEQ ID NO: 3584 - DNA, 92 bp, synthetic construct
  misc_feature 1..92: note = Pol III promoter
  source 1..92: mol_type = other DNA
atatttagcatgtcgctatgtgttctgggaaatcaccataaacgtgaaatgtctttggatttgggaatcttataagttctgtatgagaccac

SEQ ID NO: 3585 - DNA, 92 bp, synthetic construct
  misc_feature 1..92: note = Pol III promoter
  source 1..92: mol_type = other DNA
atatttgcatgtctgcaaggcattctggatagtcaccataaacgtgaaatgtctttggatttgggaatcttataagttctgtatgagaccac

SEQ ID NO: 3586 - DNA, 91 bp, synthetic construct
  misc_feature 1..91: note = Pol III promoter
  source 1..91: mol_type = other DNA
atatttgcatgtcgctatgtgttctgggaaattgacctaagtgtaaagtgtctttggatttgggaatcttataagttctgtatgagaccac

SEQ ID NO: 3587 - DNA, 91 bp, synthetic construct
  misc_feature 1..91: note = Pol III promoter
  source 1..91: mol_type = other DNA
atatttagcattctgcaaggcattctggatagtgacctaagtgtaaagtgtctttggatttgggaatcttatatattctgtatgagaccac

SEQ ID NO: 3588 - DNA, 92 bp, synthetic construct
  misc_feature 1..92: note = Pol III promoter
  source 1..92: mol_type = other DNA
atatttagcattctgcaaggcattctggatagtcaccataaacgtgaaatgtctttggatttgggaatcttataagttctgtatgagaccac

SEQ ID NO: 3589 - DNA, 91 bp, synthetic construct
  misc_feature 1..91: note = Pol III promoter
  source 1..91: mol_type = other DNA
atatttgcatgtcgctatgtgttctgggaaacttgacctaagtgtaaagttgagatttccttcaggttttataagttctgtatgagaccac

SEQ ID NO: 3590 - DNA, 91 bp, synthetic construct
  misc_feature 1..91: note = Pol III promoter
  source 1..91: mol_type = other DNA
atatttgcatgtcgctatgtgttctgggaaatcaccataaacgtgaaatttgagatttccttcaggttttataagttctgtatgagaccac

SEQ ID NO: 3591 - DNA, 91 bp, synthetic construct
  misc_feature 1..91: note = Pol III promoter
  source 1..91: mol_type = other DNA
atatttgcatgtcgctatgtgttctgggaaacttgacctaagtgtaaagttgagatttccttcaggtttatatagttctgtatgagaccac

SEQ ID NO: 3592 - DNA, 92 bp, synthetic construct
  misc_feature 1..92: note = Pol III promoter
  source 1..92: mol_type = other DNA
atatttagcatgtcgctatgtgttctgggaaacttgacctaagtgtaaagttgagatttccttcaggtttatatagttctgtatgagaccac

SEQ ID NO: 3593 - DNA, 91 bp, synthetic construct
  misc_feature 1..91: note = Pol III promoter
  source 1..91: mol_type = other DNA
atatttgcatgatttcccatgattccttcattcaccataaacgtgaaatgtctttggatttgggaatcttataagttctgtatgagaccac

SEQ ID NO: 3594 - DNA, 94 bp, synthetic construct
  misc_feature 1..94: note = Pol III promoter
  source 1..94: mol_type = other DNA
atatttgcatgtcgctatgtgttctgggaaatcttaccgtaacttgaaagtagtctttggatttgggaatcttataagttctgtatgagaccac

SEQ ID NO: 3595 - DNA, 92 bp, synthetic construct
  misc_feature 1..92: note = Pol III promoter
  source 1..92: mol_type = other DNA
atatttgcatatttcccatgattccttcatcttaccgtaacttgaaagtagtctttggatttgggaatcttatatattctgtatgagaccac

SEQ ID NO: 3596 - DNA, 90 bp, synthetic construct
  misc_feature 1..90: note = Pol III promoter
  source 1..90: mol_type = other DNA
atatttgcatatttcccatgattccttcattcaccataaacgtgaaatgtctttggatttgggaatcttataagttctgtatgagaccac

SEQ ID NO: 3597 - DNA, 94 bp, synthetic construct
  misc_feature 1..94: note = Pol III promoter
  source 1..94: mol_type = other DNA
atatttgcatgtcgctatgtgttctgggaaactcttaccgtaacttgaaagtatgagatttccttcaggttttataagttctgtatgagaccac

SEQ ID NO: 3598 - DNA, 94 bp, synthetic construct
  misc_feature 1..94: note = Pol III promoter
  source 1..94: mol_type = other DNA
atatttgcatgtcgctatgtgttctgggaaactcttaccgtaacttgaaagtatgagatttccttcaggtttatatagttctgtatgagaccac

SEQ ID NO: 3599 - DNA, 249 bp, synthetic construct
  misc_feature 1..249: note = Pol III promoter
  source 1..249: mol_type = other DNA
gccacctcttttgcatattggcacccacaatccaccgcggctatgaggccagtataaggcggtaaaattacgataagatatgggattttacgtgatcgaagacatcaaagtaagcgtaagcacgaaagttgttctgcaacataccactgtaggaaattatgctaaatatgaaaccgaccataagttatcctaaccaaaagatgatttgattgaagggcttaaaataggtgtgacagtaacccttgagtc

SEQ ID NO: 3600 - DNA, 249 bp, synthetic construct
  misc_feature 1..249: note = Pol III promoter
  source 1..249: mol_type = other DNA
tcccttacccagggtgccccgggcgctcatttgcatgtcccacccaacaggtaaacctgacagatcggtcgcggccaggtacggcctggcggtcagagcaccaaacttacgagccttgtgatgagttccgttacatgaaattctcctaaaggctccaagatggacaggaaagcgctcgattcggttaccgtaaggaaaacaaatgagaaactcccgtgccttataagacctggggacggacttatttgc

SEQ ID NO: 3601 - DNA, 249 bp, synthetic construct
  misc_feature 1..249: note = Pol III promoter
  source 1..249: mol_type = other DNA
cccttacccagggtgccccgggcgctcatttgcatgtcccacccaacaggtaaacctgacaggtcatcgcggccaggtacgacctggcggtcagagcaccaaacatacgagccttgtgatgagttccgttgcatgaaattctcccaaaggctccaagatggacaggaaagggcgcggttcggtcaccgtaagtagaataggtgaaagactcccgtgccttataaggcctgtgggtgacttcttctcaac

SEQ ID NO: 3602 - DNA, 249 bp, synthetic construct
  misc_feature 1..249: note = Pol III promoter
  source 1..249: mol_type = other DNA
caggctctgccccgcctccggggctatttgcatacgaccatttccagtaattcccagcagccaccgtagctatatttggtagaacaacgagcactttctcaactccagtcaataactacgttagttgcattacacattgggctaatataaatagaggttaaatctctaggtcatttaagagaagtcggcctatgtgtacagacatttgttccaggggctttaaatagctggtggtggaactcaatattc

SEQ ID NO: 3603 - DNA, 304 bp, synthetic construct
  misc_feature 1..304: note = Pol III promoter
  source 1..304: mol_type = other DNA
cgccggccccctcgcacagacttgtgggagaagctcggctactcccctgccccggttaatttgcatataatatttcctagtaactatagaggcttaatgtgcgataaaagacagataatctgttctttttaatactagctacattttacatgataggcttggatttctataagagatacaaatactaaattattattttaaaaaacagcacaaaaggaaactcaccctaactgtaaagtaattgtgtgttttgagactataaatatcccttggagaaaagccttgtttgtcttcgagaagacct

SEQ ID NO: 3604 - DNA, 314 bp, synthetic construct
  misc_feature 1..314: note = Pol III promoter
  source 1..314: mol_type = other DNA
gatccgacgcgccatctctaggcccgcgccggccccctcgcacggacttgtgggagaagctcggctactcccctgccccggttaatttgcatataatatttcctagtaactatagaggcttaatgtgcgataaaagacagataatctgttctttttaatactagctacattttacatgataggcttggatttctataacttcgtatagcatacattatacgaagttataaacagcacaaaaggaaactcaccctaactgtaaagtaattgtgtgttttgagactataagtatcccttggagaaccaccttgttg

SEQ ID NO: 3605 - DNA, 241 bp, synthetic construct; identical to SEQ ID NO: 594
  misc_feature 1..241: note = Pol III promoter
  source 1..241: mol_type = other DNA

SEQ ID NO: 3606 - DNA, 229 bp, synthetic construct
  misc_feature 1..229: note = Pol III promoter
  source 1..229: mol_type = other DNA
gagggcctatttcccatggttccttcatatttgcatagaggatgcaagactgtcagagggacgattgcaattaacttggccataaacacaaacctattggcacaaactatgtgatatagaaagttatgattgttcaagaagtttgtaatttaaaaaaaggaccactatgtacttaccgtaactgaaaagtctttcgttttctcaactttatatatcttccggaaaggac

SEQ ID NO: 3607 - DNA, 240 bp, synthetic construct
  misc_feature 1..240: note = Pol III promoter
  source 1..240: mol_type = other DNA
gagggcctatttcccatgagtccttcatatttgcatatacgatgcaagaatgttagagagataattagaattaatttgattataaacataaagatattagtacaaaatattgatgcagaaagtaataatttattgggtagtttgtaattttaaaattatgttttaaaatggaccatgacatacttgccgtaagtgtaaagtatttctatttcttgcctttatatatcttctggcaaggac

SEQ ID NO: 3608 - DNA, 240 bp, synthetic construct
  misc_feature 1..240: note = Pol III promoter
  source 1..240: mol_type = other DNA
gagggcctatttcccatgagtccttcatatttgcatatacgatgcaagaatgttagagagataattagaattaatttggctgtaaacataaagatattagtacaaaatattgatgcagaaagtaataatttattgggtagtttgtaattttaaaattatgttttaaaatggactatgacatacttaccgtaagtgtaaagtatttctatttcttgcctttatataccttctggcaaggac

SEQ ID NO: 3609 - DNA, 240 bp, synthetic construct
  misc_feature 1..240: note = Pol III promoter
  source 1..240: mol_type = other DNA
gagggcctatttcccatgagtccttcatatttgcatataccatgcaaaaatattagagagataattagaattaatttggctgtaaacacaaaggtattagtacaagatattgatgcagaaagtaataatttctcgggtagtttataatttttaaattatgttttaaaattaactatcacatacttaccgtaagtttaaagtagtttgatttcttgcctttatatatcttctggcaaggac

SEQ ID NO: 3610 - DNA, 103 bp, synthetic construct; identical to SEQ ID NO: 96
  misc_feature 1..103: note = Pol III promoter
  source 1..103: mol_type = other DNA

SEQ ID NO: 3611 - DNA, 102 bp, synthetic construct; identical to SEQ ID NO: 97
  misc_feature 1..102: note = Pol III promoter
  source 1..102: mol_type = other DNA

SEQ ID NO: 3612 - DNA, 102 bp, synthetic construct; identical to SEQ ID NO: 98
  misc_feature 1..102: note = Pol III promoter
  source 1..102: mol_type = other DNA

SEQ ID NO: 3613 - DNA, 102 bp, synthetic construct; identical to SEQ ID NO: 99
  misc_feature 1..102: note = Pol III promoter
  source 1..102: mol_type = other DNA

SEQ ID NO: 3614 - DNA, 102 bp, synthetic construct; identical to SEQ ID NO: 100
  misc_feature 1..102: note = Pol III promoter
  source 1..102: mol_type = other DNA

SEQ ID NO: 3615 - DNA, 592 bp, synthetic construct
  misc_feature 1..592: note = Post-transcription element
  source 1..592: mol_type = other DNA
aatcaacctctggattacaaaatttgtgaaagattgactggtattcttaactatgttgctccttttacgctatgtggatacgctgctttaatgcctttgtatcatgctattgcttcccgtatggctttcattttctcctccttgtataaatcctggttgctgtctctttatgaggagttgtggcccgttgtcaggcaacgtggcgtggtgtgcactgtgtttgctgacgcaacccccactggttggggcattgccaccacctgtcagctcctttccgggactttcgctttccccctccctattgccacggcggaactcatcgccgcctgccttgcccgctgctggacaggggctcggctgttgggcactgacaattccgtggtgttgtcggggaagctgacgtcctttccatggctgctcgcctgtgttgccacctggattctgcgcgggacgtccttctgctacgtcccttcggccctcaatccagcggaccttccttcccgcggcctgctgccggctctgcggcctcttccgcgtcttcgccttcgccctcagacgagtcggatctccctttgggccgcctccccgcctg

SEQ ID NO: 3616 - DNA, 593 bp, synthetic construct
  misc_feature 1..593: note = Post-transcription element
  source 1..593: mol_type = other DNA
atcgataatcaacctctggattacaaaatttgtgaaagattgactggtattcttaactatgttgctccttttacgctatgtggatacgctgctttaatgcctttgtatcatgctattgcttcccgtatggctttcattttctcctccttgtataaatcctggttgctgtctctttatgaggagttgtggcccgttgtcaggcaacgtggcgtggtgtgcactgtgtttgctgacgcaacccccactggttggggcattgccaccacctgtcagctcctttccgggactttcgctttccccctccctattgccacggcggaactcatcgccgcctgccttgcccgctgctggacaggggctcggctgttgggcactgacaattccgtggtgttgtcggggaaatcatcgtcctttccttggctgctcgcctgtgttgccacctggattctgcgcgggacgtccttctgctacgtcccttcggccctcaatccagcggaccttccttcccgcggcctgctgccggctctgcggcctcttccgcgtcttcgccttcgccctcagacgagtcggatctccctttgggccgcctcccc

SEQ ID NO: 3617 - DNA, 247 bp, synthetic construct
  misc_feature 1..247: note = Post-transcription element
  source 1..247: mol_type = other DNA
gataatcaacctctggattacaaaatttgtgaaagattgactggtattcttaactatgttgctccttttacgctatgtggatacgctgctttaatgcctttgtatcatgctattgcttcccgtatggctttcattttctcctccttgtataaatcctggttagttcttgccacggcggaactcatcgccgcctgccttgcccgctgctggacaggggctcggctgttgggcactgacaattccgtgg

SEQ ID NO: 3618 - DNA, 584 bp, synthetic construct; identical to SEQ ID NO: 3532
  misc_feature 1..584: note = Enhancer element
  source 1..584: mol_type = other DNA

SEQ ID NO: 3619 - DNA, 204 bp, synthetic construct; identical to SEQ ID NO: 3562
  misc_feature 1..204: note = Enhancer element
  source 1..204: mol_type = other DNA

SEQ ID NO: 3620 - DNA, 414 bp, synthetic construct
  misc_feature 1..414: note = Enhancer element
  source 1..414: mol_type = other DNA
aagatgcgtcaattaatttgcgtcaatttgcgctcaatttgcgtcaatcttgctgtcatttgcgtcaatttgcgtcaatatgcgtcaatatatgcgtcaattcgaattcgcactaatgatgactaatggtggctaatggtgactaatggtgacaatgcgtgactaatggtgataatgagtgcatatggtgactaatggtgactaatggtggtgatgcggttttggcagtacatcaatgggcgtggatagcggtttgactcacggggatttccaagtctccaccccattgacgtcaatgggagtttgttttggcaccaaaatcaacgggactttccaaaatgtcgtaacaactccgccccattgacgcaaatgggcggtaggcgtgtacggtgggaggtctatataagcagagct

SEQ ID NO: 3621 - DNA, 314 bp, synthetic construct
  misc_feature 1..314: note = Enhancer element
  source 1..314: mol_type = other DNA
tgggacagaaaacgagaaaccagggttgtcagcggggcccgcgccggccgccccttggcccgcgggataccccgggcgcccagtgcccaggccgggcaggcggcactcacgtgatgcggttttggcagtacatcaatgggcgtggatagcggtttgactcacggggatttccaagtctccaccccattgacgtcaatgggagtttgttttggcaccaaaatcaacgggactttccaaaatgtcgtaacaactccgccccattgacgcaaatgggcggtaggcgtgtacggtgggaggtctatataagcagagct

SEQ ID NO: 3622 - DNA, 324 bp, synthetic construct
  misc_feature 1..324: note = Enhancer element
  source 1..324: mol_type = other DNA
cggaagcgagggtgtcgctcgcccccgggcccgggtccgccccgctccgaggcctgctcggaagaaagacctcggtgcgcagttctcgtcgcgctcccacacctggtccgcccagtcggagtgatgcggttttggcagtacatcaatgggcgtggatagcggtttgactcacggggatttccaagtctccaccccattgacgtcaatgggagtttgttttggcaccaaaatcaacgggactttccaaaatgtcgtaacaactccgccccattgacgcaaatgggcggtaggcgtgtacggtgggaggtctatataagcagagct

SEQ ID NO: 3623 - DNA, 304 bp, synthetic construct
  misc_feature 1..304: note = Enhancer element
  source 1..304: mol_type = other DNA
gtgatgcggttttggcagtacatcaatgggcgtggataggcgggccgggagcgagggaggcggcgccgggggacgcgccgggctcggcctggcgaccgttgcccgctcgcgtccatccatccattcattcgggcggcagcggtttgactcacggggatttccaagtctccaccccattgacgtcaatgggagtttgttttggcaccaaaatcaacgggactttccaaaatgtcgtaacaactccgccccattgacgcaaatgggcggtaggcgtgtacggtgggaggtctatataagcagagct

SEQ ID NO: 3624 - DNA, 304 bp, synthetic construct
  misc_feature 1..304: note = Enhancer element
  source 1..304: mol_type = other DNA
aggcgggccgggagcgagggaggcggcgccgggggacgcgccgggctcggcctggcgaccgttgcccgctcgcgtccatccatccattcattcgggcggcgtgatgcggttttggcagtacatcaatgggcgtggatagcggtttgactcacggggatttccaagtctccaccccattgacgtcaatgggagtttgttttggcaccaaaatcaacgggactttccaaaatgtcgtaacaactccgccccattgacgcaaatgggcggtaggcgtgtacggtgggaggtctatataagcagagct

SEQ ID NO: 3625 - DNA, 274 bp, synthetic construct
  misc_feature 1..274: note = Enhancer element
  source 1..274: mol_type = other DNA
ccttcccctccagtgctcctcggagcccttccctatacttcctccaagctccaccctcgatcagccctgcgtgatgcggttttggcagtacatcaatgggcgtggatagcggtttgactcacggggatttccaagtctccaccccattgacgtcaatgggagtttgttttggcaccaaaatcaacgggactttccaaaatgtcgtaacaactccgccccattgacgcaaatgggcggtaggcgtgtacggtgggaggtctatataagcagagct

SEQ ID NO: 3626 - DNA, 354 bp, synthetic construct
  misc_feature 1..354: note = Enhancer element
  source 1..354: mol_type = other DNA
agaggtggtggggctgagccgaggtggggccgtggccagggggagggggtgctaggccggaaggggctgcagccgagggtggccctgattttgtggccggccaggagcgaaggggtccctttctgtcccctgagcaccgtcgcctcctttgtgatgcggttttggcagtacatcaatgggcgtggatagcggtttgactcacggggatttccaagtctccaccccattgacgtcaatgggagtttgttttggcaccaaaatcaacgggactttccaaaatgtcgtaacaactccgccccattgacgcaaatgggcggtaggcgtgtacggtgggaggtctatataagcagagct

SEQ ID NO: 3627 - DNA, 20 bp, synthetic construct
  misc_feature 1..20: note = Spacer sequence
  source 1..20: mol_type = other DNA
aaggggctccgcaccacgcc

SEQ ID NO: 3628 - DNA, 20 bp, synthetic construct
  misc_feature 1..20: note = Spacer sequence
  source 1..20: mol_type = other DNA
aagtggctccgcaccacgcc

SEQ ID NO: 3629 - DNA, 20 bp, synthetic construct
  misc_feature 1..20: note = Spacer sequence
  source 1..20: mol_type = other DNA
aaggggctgcgtaccacacc

SEQ ID NO: 3630 - DNA, 18 bp, synthetic construct
  misc_feature 1..18: note = Spacer sequence
  source 1..18: mol_type = other DNA
gggtcttcgagaagaccc

SEQ ID NO: 3631 - DNA, 89 bp, synthetic construct
  misc_feature 1..89: note = sgRNA guide sequence
  source 1..89: mol_type = other DNA
actggcgcttttatctgattactttgagagccatcaccagcgactatgtcgtagtgggtaaagctccctcttcggagggagcatcaaag

SEQ ID NO: 3632 - DNA, 97 bp, synthetic construct
  misc_feature 1..97: note = sgRNA guide sequence
  source 1..97: mol_type = other DNA
actggcacttttatctgattactttgagagccatcaccagcgactatgtcgtatgggtaaagcgcttacggacttcggtccgtaagaagcatcaaag

SEQ ID NO: 3633 - DNA, 96 bp, synthetic construct
  misc_feature 1..96: note = sgRNA guide sequence
  source 1..96: mol_type = other DNA
actggcacttctatctgattactctgagagccatcaccagcgactatgtcgtatgggtaaagcgcttacggacttcggtccgtaagaagcatcaga

SEQ ID NO: 3634 - DNA, 98 bp, synthetic construct
  misc_feature 1..98: note = sgRNA guide sequence
  source 1..98: mol_type = other DNA
actggcgcttctatctgattactctgagagccatcaccagcgactatgtcgtatgggtaaagccgcttacggacttcggtccgtaagaggcatcagag

SEQ ID NO: 3635 - DNA, 98 bp, synthetic construct
  misc_feature 1..98: note = sgRNA guide sequence
  source 1..98: mol_type = other DNA
actggcacttctatctgattactctgagcgccatcaccagcgactatgtcgtatgggtaaagccgcttacggacttcggtccgtaagaggcatcagag

SEQ ID NO: 3636 - DNA, 98 bp, synthetic construct
  misc_feature 1..98: note = sgRNA guide sequence
  source 1..98: mol_type = other DNA
actggcgcttctatctgattactctgagcgccatcaccagcgactatgtcgtatgggtaaagccgcttacggacttcggtccgtaagaggcatcagag

SEQ ID NO: 3637 - DNA, 98 bp, synthetic construct
  misc_feature 1..98: note = sgRNA guide sequence
  source 1..98: mol_type = other DNA
actggcgcttctatctgattactctgagcgccatcaccagcgactatgtcgtatgggtaaagcgccttacggacttcggtccgtaaggagcatcagag

SEQ ID NO: 3638 - DNA, 99 bp, synthetic construct
  misc_feature 1..99: note = sgRNA guide sequence
  source 1..99: mol_type = other DNA
actggcgcttctatctgattactctgagcgccatcaccagcgactatgtcgtagtgggtaaagccgcttacggacttcggtccgtaagaggcatcagag

SEQ ID NO: 3639 - DNA, 98 bp, synthetic construct
  misc_feature 1..98: note = sgRNA guide sequence
  source 1..98: mol_type = other DNA
acgggactttctatctgattactctgaagtccctcaccagcgactatgtcgtatgggtaaagccgcttacggacttcggtccgtaagaggcatcagag

SEQ ID NO: 3640 - DNA, 98 bp, synthetic construct
  misc_feature 1..98: note = sgRNA guide sequence
  source 1..98: mol_type = other DNA
acctgtagttctatctgattactctgactacagtcaccagcgactatgtcgtatgggtaaagccgcttacggacttcggtccgtaagaggcatcagag

SEQ ID NO: 3641 - DNA, 89 bp, synthetic construct; identical to SEQ ID NO: 3631
  misc_feature 1..89: note = sgRNA guide sequence
  source 1..89: mol_type = other DNA

SEQ ID NO: 3642 - DNA, 99 bp, synthetic construct; identical to SEQ ID NO: 3638
  misc_feature 1..99: note = sgRNA guide sequence
  source 1..99: mol_type = other DNA

SEQ ID NO: 3643 - DNA, 109 bp, synthetic construct
  misc_feature 1..109: note = SgRNA guide with spacer sequence
  source 1..109: mol_type = other DNA
actggcgcttttatctgattactttgagagccatcaccagcgactatgtcgtagtgggtaaagctccctcttcggagggagcatcaaagaaggggctccgcaccacgcc

SEQ ID NO: 3644 - DNA, 117 bp, synthetic construct
  misc_feature 1..117: note = SgRNA guide with spacer sequence
  source 1..117: mol_type = other DNA
actggcacttttatctgattactttgagagccatcaccagcgactatgtcgtatgggtaaagcgcttacggacttcggtccgtaagaagcatcaaagaaggggctccgcaccacgcc

SEQ ID NO: 3645 - DNA, 116 bp, synthetic construct
  misc_feature 1..116: note = SgRNA guide with spacer sequence
  source 1..116: mol_type = other DNA
actggcacttctatctgattactctgagagccatcaccagcgactatgtcgtatgggtaaagcgcttacggacttcggtccgtaagaagcatcagaaaggggctccgcaccacgcc

SEQ ID NO: 3646 - DNA, 118 bp, synthetic construct
  misc_feature 1..118: note = SgRNA guide with spacer sequence
  source 1..118: mol_type = other DNA
actggcgcttctatctgattactctgagagccatcaccagcgactatgtcgtatgggtaaagccgcttacggacttcggtccgtaagaggcatcagagaaggggctccgcaccacgcc

SEQ ID NO: 3647 - DNA, 118 bp, synthetic construct
  misc_feature 1..118: note = SgRNA guide with spacer sequence
  source 1..118: mol_type = other DNA
actggcacttctatctgattactctgagcgccatcaccagcgactatgtcgtatgggtaaagccgcttacggacttcggtccgtaagaggcatcagagaaggggctccgcaccacgcc

SEQ ID NO: 3648 - DNA, 118 bp, synthetic construct
  misc_feature 1..118: note = SgRNA guide with spacer sequence
  source 1..118: mol_type = other DNA
actggcgcttctatctgattactctgagcgccatcaccagcgactatgtcgtatgggtaaagccgcttacggacttcggtccgtaagaggcatcagagaaggggctccgcaccacgcc

SEQ ID NO: 3649 - DNA, 118 bp, synthetic construct
  misc_feature 1..118: note = SgRNA guide with spacer sequence
  source 1..118: mol_type = other DNA
actggcgcttctatctgattactctgagcgccatcaccagcgactatgtcgtatgggtaaagcgccttacggacttcggtccgtaaggagcatcagagaaggggctccgcaccacgcc

SEQ ID NO: 3650 - DNA, 119 bp, synthetic construct
  misc_feature 1..119: note = SgRNA guide with spacer sequence
  source 1..119: mol_type = other DNA
actggcgcttctatctgattactctgagcgccatcaccagcgactatgtcgtagtgggtaaagccgcttacggacttcggtccgtaagaggcatcagagaaggggctccgcaccacgcc

SEQ ID NO: 3651 - DNA, 118 bp, synthetic construct
  misc_feature 1..118: note = SgRNA guide with spacer sequence
  source 1..118: mol_type = other DNA
acgggactttctatctgattactctgaagtccctcaccagcgactatgtcgtatgggtaaagccgcttacggacttcggtccgtaagaggcatcagagaaggggctccgcaccacgcc

SEQ ID NO: 3652 - DNA, 118 bp, synthetic construct
  misc_feature 1..118: note = SgRNA guide with spacer sequence
  source 1..118: mol_type = other DNA
acctgtagttctatctgattactctgactacagtcaccagcgactatgtcgtatgggtaaagccgcttacggacttcggtccgtaagaggcatcagagaaggggctccgcaccacgcc

SEQ ID NO: 3653 - DNA, 109 bp, synthetic construct; identical to SEQ ID NO: 3643
  misc_feature 1..109: note = SgRNA guide with spacer sequence
  source 1..109: mol_type = other DNA

SEQ ID NO: 3654 - DNA, 119 bp, synthetic construct
  misc_feature 1..119: note = SgRNA guide with spacer sequence
  source 1..119: mol_type = other DNA
actggcgcttctatctgattactctgagcgccatcaccagcgactatgtcgtagtgggtaaagccgcttacggacttcggtccgtaagaggcatcagagaagtggctccgcaccacgcc

SEQ ID NO: 3655 - DNA, 109 bp, synthetic construct
  misc_feature 1..109: note = SgRNA guide with spacer sequence
  source 1..109: mol_type = other DNA
actggcgcttttatctgattactttgagagccatcaccagcgactatgtcgtagtgggtaaagctccctcttcggagggagcatcaaagaaggggctgcgtaccacacc

SEQ ID NO: 3656 - DNA, 119 bp, synthetic construct
  misc_feature 1..119: note = SgRNA guide with spacer sequence
  source 1..119: mol_type = other DNA
actggcgcttctatctgattactctgagcgccatcaccagcgactatgtcgtagtgggtaaagccgcttacggacttcggtccgtaagaggcatcagagaaggggctgcgtaccacacc

SEQ ID NO: 3657 - DNA, 117 bp, synthetic construct
  misc_feature 1..117: note = SgRNA guide with spacer sequence
  source 1..117: mol_type = other DNA
actggcgcttctatctgattactctgagcgccatcaccagcgactatgtcgtagtgggtaaagccgcttacggacttcggtccgtaagaggcatcagaggggtcttcgagaagaccc

SEQ ID NO: 3658 - DNA, 20 bp, synthetic construct
  misc_feature 1..20: note = Spacer sequence
  source 1..20: mol_type = other DNA
aaggggctccgcaccacgcc

SEQ ID NO: 3659 - DNA, 19 bp, synthetic construct
  misc_feature 1..19: note = Spacer sequence
  source 1..19: mol_type = other DNA
aaggggctccgcaccacgc

SEQ ID NO: 3660 - DNA, 18 bp, synthetic construct
  misc_feature 1..18: note = Spacer sequence
  source 1..18: mol_type = other DNA
aaggggctccgcaccacg

SEQ ID NO: 3661 - DNA, 20 bp, synthetic construct
  misc_feature 1..20: note = Spacer sequence
  source 1..20: mol_type = other DNA
aagtggctccgcaccacgcc

SEQ ID NO: 3662 - DNA, 19 bp, synthetic construct
  misc_feature 1..19: note = Spacer sequence
  source 1..19: mol_type = other DNA
aagtggctccgcaccacgc

SEQ ID NO: 3663 - DNA, 18 bp, synthetic construct
  misc_feature 1..18: note = Spacer sequence
  source 1..18: mol_type = other DNA
aagtggctccgcaccacg

SEQ ID NO: 3664 - DNA, 20 bp, synthetic construct
  misc_feature 1..20: note = Spacer sequence
  source 1..20: mol_type = other DNA
aaggggctgcgtaccacacc

SEQ ID NO: 3665 - DNA, 19 bp, synthetic construct
  misc_feature 1..19: note = Spacer sequence
  source 1..19: mol_type = other DNA
aaggggctgcgtaccacac

SEQ ID NO: 3666 - DNA, 18 bp, synthetic construct
  misc_feature 1..18: note = Spacer sequence
  source 1..18: mol_type = other DNA
aaggggctgcgtaccaca

SEQ ID NO: 3667 - DNA, 20 bp, synthetic construct
  misc_feature 1..20: note = Spacer sequence
  source 1..20: mol_type = other DNA
aagtggctgcgtaccacacc

SEQ ID NO: 3668 - DNA, 19 bp, synthetic construct
  misc_feature 1..19: note = Spacer sequence
  source 1..19: mol_type = other DNA
aagtggctgcgtaccacac

SEQ ID NO: 3669 - DNA, 89 bp, synthetic construct; identical to SEQ ID NO: 3631
  misc_feature 1..89: note = Spacer sequence
  source 1..89: mol_type = other DNA

SEQ ID NO: 3670 - DNA, 99 bp, synthetic construct; identical to SEQ ID NO: 3638
  misc_feature 1..99: note = sgRNA guide sequence
  source 1..99: mol_type = other DNA

SEQ ID NO: 3671 - DNA, 109 bp, synthetic construct; identical to SEQ ID NO: 3643
  misc_feature 1..109: note = sgRNA guide sequence
  source 1..109: mol_type = other DNA

SEQ ID NO: 3672 - DNA, 108 bp, synthetic construct
  misc_feature 1..108: note = SgRNA guide with spacer sequence
  source 1..108: mol_type = other DNA
actggcgcttttatctgattactttgagagccatcaccagcgactatgtcgtagtgggtaaagctccctcttcggagggagcatcaaagaaggggctccgcaccacgc

SEQ ID NO: 3673 - DNA, 107 bp, synthetic construct
  misc_feature 1..107: note = SgRNA guide with spacer sequence
  source 1..107: mol_type = other DNA
actggcgcttttatctgattactttgagagccatcaccagcgactatgtcgtagtgggtaaagctccctcttcggagggagcatcaaagaaggggctccgcaccacg

SEQ ID NO: 3674 - DNA, 109 bp, synthetic construct
  misc_feature 1..109: note = SgRNA guide with spacer sequence
  source 1..109: mol_type = other DNA
actggcgcttttatctgattactttgagagccatcaccagcgactatgtcgtagtgggtaaagctccctcttcggagggagcatcaaagaagtggctccgcaccacgcc

SEQ ID NO: 3675 - DNA, 108 bp, synthetic construct
  misc_feature 1..108: note = SgRNA guide with spacer sequence
  source 1..108: mol_type = other DNA
actggcgcttttatctgattactttgagagccatcaccagcgactatgtcgtagtgggtaaagctccctcttcggagggagcatcaaagaagtggctccgcaccacgc

SEQ ID NO: 3676 - DNA, 107 bp, synthetic construct
  misc_feature 1..107: note = SgRNA guide with spacer sequence
  source 1..107: mol_type = other DNA
actggcgcttttatctgattactttgagagccatcaccagcgactatgtcgtagtgggtaaagctccctcttcggagggagcatcaaagaagtggctccgcaccacg

SEQ ID NO: 3677 - DNA, 119 bp, synthetic construct; identical to SEQ ID NO: 3656
  misc_feature 1..119: note = SgRNA guide with spacer sequence
  source 1..119: mol_type = other DNA

SEQ ID NO: 3678 - DNA, 118 bp, synthetic construct
  misc_feature 1..118: note = SgRNA guide with spacer sequence
  source 1..118: mol_type = other DNA
actggcgcttctatctgattactctgagcgccatcaccagcgactatgtcgtagtgggtaaagccgcttacggacttcggtccgtaagaggcatcagagaaggggctgcgtaccacac

SEQ ID NO: 3679 - DNA, 117 bp, synthetic construct
  misc_feature 1..117: note = SgRNA guide with spacer sequence
  source 1..117: mol_type = other DNA
actggcgcttctatctgattactctgagcgccatcaccagcgactatgtcgtagtgggtaaagccgcttacggacttcggtccgtaagaggcatcagagaaggggctgcgtaccaca

SEQ ID NO: 3680 - DNA, 119 bp, synthetic construct
  misc_feature 1..119: note = SgRNA guide with spacer sequence
  source 1..119: mol_type = other DNA
actggcgcttctatctgattactctgagcgccatcaccagcgactatgtcgtagtgggtaaagccgcttacggacttcggtccgtaagaggcatcagagaagtggctgcgtaccacacc

SEQ ID NO: 3681 - DNA, 118 bp, synthetic construct
  misc_feature 1..118: note = SgRNA guide with spacer sequence
  source 1..118: mol_type = other DNA
actggcgcttctatctgattactctgagcgccatcaccagcgactatgtcgtagtgggtaaagccgcttacggacttcggtccgtaagaggcatcagagaagtggctgcgtaccacac

SEQ ID NO: 3682 - DNA, 117 bp, synthetic construct
  misc_feature 1..117: note = SgRNA guide with spacer sequence
  source 1..117: mol_type = other DNA
actggcgcttctatctgattactctgagcgccatcaccagcgactatgtcgtagtgggtaaagccgcttacggacttcggtccgtaagaggcatcagagaagtggctgcgtaccaca

SEQ ID NO: 3683 - DNA, 130 bp, synthetic construct; identical to SEQ ID NO: 17
  misc_feature 1..130: note = 5' ITR
  source 1..130: mol_type = other DNA

SEQ ID NO: 3684 - DNA, 23 bp, synthetic construct
  misc_feature 1..23: note = buffer seq
  source 1..23: mol_type = other DNA
gcggcctctagactcgaggcgtt

SEQ ID NO: 3685 - DNA, 380 bp, synthetic construct
  misc_feature 1..380: note = enhancer
  source 1..380: mol_type = other DNA
gacattgattattgactagttattaatagtaatcaattacggggtcattagttcatagcccatatatggagttccgcgttacataacttacggtaaatggcccgcctggctgaccgcccaacgacccccgcccattgacgtcaataatgacgtatgttcccatagtaacgccaatagggactttccattgacgtcaatgggtggagtatttacggtaaactgcccacttggcagtacatcaagtgtatcatatgccaagtacgccccctattgacgtcaatgacggtaaatggcccgcctggcattatgcccagtacatgaccttatgggactttcctacttggcagtacatctacgtattagtcatcgctattaccatg

SEQ ID NO: 3686 - DNA, 15 bp, synthetic construct
  misc_feature 1..15: note = buffer seq
  source 1..15: mol_type = other DNA
ctctggctaactacc

SEQ ID NO: 3687 - DNA, 12 bp, synthetic construct
  misc_feature 1..12: note = kozac
  source 1..12: mol_type = other DNA
ggtgccaccatg

SEQ ID NO: 3688 - skipped

SEQ ID NO: 3689 - DNA, 21 bp, synthetic construct
  misc_feature 1..21: note = 5' NLS
  source 1..21: mol_type = other DNA
ccaaagaagaagcggaaggtc

SEQ ID NO: 3690-3691 - skipped (2 entries)

SEQ ID NO: 3692 - DNA, 21 bp, synthetic construct
  misc_feature 1..21: note = 3' NLS
  source 1..21: mol_type = other DNA
ccaaaaaagaagagaaaggta

SEQ ID NO: 3693 - DNA, 27 bp, synthetic construct
  misc_feature 1..27: note = tag
  source 1..27: mol_type = other DNA
tacccatatgatgtccctgactacgct

SEQ ID NO: 3694 - skipped

SEQ ID NO: 3695 - DNA, 30 bp, synthetic construct
  misc_feature 1..30: note = buffer seq
  source 1..30: mol_type = other DNA
gaattcctagagctcgctgatcagcctcga

SEQ ID NO: 3696 - DNA, 208 bp, synthetic construct; identical to SEQ ID NO: 3401
  misc_feature 1..208: note = Poly(A)
  source 1..208: mol_type = other DNA

SEQ ID NO: 3697 - skipped

SEQ ID NO: 3698 - DNA, 241 bp, synthetic construct; identical to SEQ ID NO: 3563
  misc_feature 1..241: note = Pol III promoter
  source 1..241: mol_type = other DNA

SEQ ID NO: 3699 - skipped

SEQ ID NO: 3700 - DNA, 17 bp, synthetic construct
  misc_feature 1..17: note = buffer
  source 1..17: mol_type = other DNA
ttttttttggcggccgc

SEQ ID NO: 3701 - DNA, 141 bp, synthetic construct; identical to SEQ ID NO: 18
  misc_feature 1..141: note = 3' ITR
  source 1..141: mol_type = other DNA

SEQ ID NO: 3702 - DNA, 2931 bp, synthetic construct
  misc_feature 1..2931: note = CasX variant
  source 1..2931: mol_type = other DNA
atgcaagagatcaagagaatcaacaagatcagaaggagactggtcaaggacagcaacacaaagaaggccggcaagacaggccccatgaaaaccctgctcgtcagagtgatgacccctgacctgagagagcggctggaaaacctgagaaagaagcccgagaacatccctcagcctatcagcaacaccagcagggccaacctgaacaagctgctgaccgactacaccgagatgaagaaagccatcctgcacgtgtactgggaagagttccagaaagaccccgtgggcctgatgagcagagttgctcagcccgctcctaagaacatcgaccagagaaagctgatccccgtgaaggacggcaacgagagactgacctctagcggctttgcctgcagccagtgttgccagcctctgtacgtgtacaagctggaacaagtgaacgacaagggcaagccccacaccaactacttcggcagatgcaacgtgtccgagcacgagaggctgatcctgctgtctcctcacaagcccgaggccaacgatgagctggtcacatacagcctgggcaagttcggacagagagccctggacttctacagcatccacgtgaccagggagagcaatcaccctgtgaagcccctggaacagatcggcggcaatagctgtgcctctggacctgtgggaaaagccctgagcgacgcctgtatgggagccgtggcatccttcctgaccaagtaccaggacatcatcctggaacaccagaaagtgatcaagaagaacgagaaaagactggccaacctcaaggatatcgccagcgctaacggcctggcctttcctaagatcaccctgcctccacagcctcacaccaaagagggcatcgaggcctacaacaacgtggtggcccagatcgtgatttgggtcaacctgaatctgtggcagaagctgaagatcggcagggacgaagccaagccactgcagagactgaagggcttccctagcttccctctggtggaaagacaggccaatgaagtggattggtgggacatggtctgcaacgtgaagaagctgatcaacgagaagaaagaggatggcaaggttttctggcagaacctggccggctacaagagacaagaagccctgaggccttacctgagcagcgaagaggaccggaagaagggcaagaagttcgccagataccagctgggcgacctgctgaagcacctggaaaagaagcacggcgaggactggggcaaagtgtacgatgaggcctgggagagaatcgacaagaaggtggaaggcctgagcaagcacattaagctggaagaggaaagaaggagcgaggacgcccaatctaaagccgctctgaccgattggctgagagccaaggccagctttgtgatcgagggcctgaaagaggccgacaaggacgagttctgcagatgcgagctgaagctgcagaagtggtacggcgatctgagaggcaagcccttcgccattgaggccgagaacagcatcctggacatcagcggcttcagcaagcagtacaactgcgccttcatttggcagaaagacggcgtcaagaaactgaacctgtacctgatcatcaattacttcaaaggcggcaagctgcggttcaagaagatcaaacccgaggccttcgaggctaacagattctacaccgtgatcaacaaaaagtccggcgagatcgtgcccatggaagtgaacttcaacttcgacgaccccaacctgattatcctgcctctggccttcggcaagagacagggcagagagttcatctggaacgatctgctgagcctggaaaccggctctctgaagctggccaatggcagagtgatcgagaaaaccctgtacaacaggagaaccagacaggacgagcctgctctgtttgtggccctgaccttcgagagaagagaggtgctggacagcagcaacatcaagcccatgaacctgatcggcgtggaccggggcgagaatatccctgctgtgatcgccctgacagaccctgaaggatgcccactgagcagattcaaggactccctgggcaaccctacacacatcctgagaatcggcgagagctacaaagagaagcagaggacaatccaggccaagaaagaggtggaacagagaagagccggcggatactctaggaagtacgccagcaaggccaagaatctggccgacgacatggtccgaaacaccgccagagatctgctgtactacgccgtgacacaggacgccatgctgatcttcgagaatctgagcagaggcttcggccggcagggcaagagaacctttatggccgagaggcagtacaccagaatggaagattggctcacagctaaactggcctacgagggactgagcaagacctacctgtccaaaacactggcccagtatacctccaagacctgcagcaattgcggcttcaccatcaccagcgccgactacgacagagtgctggaaaagctcaagaaaaccgccaccggctggatgaccaccatcaacggcaaagagctgaaggttgagggccagatcacctactacaacaggaggaagaggcagaacgtcgtgaaggatctgagcgtggaactggacagactgagcgaagagagcgtgaacaacgacatcagcagctggacaaagggcagatcaggcgaggctctgagcctgctgaagaagaggtttagccacagacctgtgcaagagaagttcgtgtgcctgaactgcggcttcgagacacacgccgatgaacaggctgccctgaacattgccagaagctggctgttcctgagaagccaagagtacaagaagtaccagaccaacaagaccaccggcaacaccgacaagagggcctttgtggaaacctggcagagcttctacagaaaaaagctgaaagaagtctggaagcccgccgtg

SEQ ID NO: 3703 - DNA, 2931 bp, synthetic construct
  misc_feature 1..2931: note = CasX variant
  source 1..2931: mol_type = other DNA
caagagatcaagagaatcaacaagatcagaaggagactggtcaaggacagcaacacaaagaaggccggcaagacaggccccatgaaaaccctgctcgtcagagtgatgacccctgacctgagagagcggctggaaaacctgagaaagaagcccgagaacatccctcagcctatcagcaacaccagcagggccaacctgaacaagctgctgaccgactacaccgagatgaagaaagccatcctgcacgtgtactgggaagagttccagaaagaccccgtgggcctgatgagcagagttgctcagcctgccagcaagaagatcgaccagaacaagctgaagcccgagatggacgagaagggcaatctgaccacagccggctttgcctgctctcagtgtggccagcctctgttcgtgtacaagctggaacaggtgtccgagaaaggcaaggcctacaccaactacttcggcagatgtaacgtggccgagcacgagaagctgattctgctggcccagctgaaacctgagaaggactctgatgaggccgtgacctacagcctgggcaagtttggacagagagccctggacttctacagcatccacgtgaccaaagaaagcacacaccccgtgaagcccctggctcagatcgccggcaatagatacgcctctggacctgtgggcaaagccctgtccgatgcctgcatgggaacaatcgccagcttcctgagcaagtaccaggacatcatcatcgagcaccagaaggtggtcaagggcaaccagaagagactggaaagcctgagggagctggccggcaaagagaacctggaataccccagcgtgaccctgcctcctcagcctcacacaaaagaaggcgtggacgcctacaacgaagtgatcgccagagtgagaatgtgggtcaacctgaacctgtggcagaagctgaaactgtccagggacgacgccaagcctctgctgagactgaagggcttccctagcttccctctggtggaaagacaggccaatgaagtggattggtgggacatggtctgcaacgtgaagaagctgatcaacgagaagaaagaggatggcaaggttttctggcagaacctggccggctacaagagacaagaagccctgaggccttacctgagcagcgaagaggaccggaagaagggcaagaagttcgccagataccagctgggcgacctgctgctgcacctggaaaagaagcacggcgaggactggggcaaagtgtacgatgaggcctgggagagaatcgacaagaaggtggaaggcctgagcaagcacattaagctggaagaggaaagaaggagcgaggacgcccaatctaaagccgctctgaccgattggctgagagccaaggccagctttgtgatcgagggcctgaaagaggccgacaaggacgagttctgcagatgcgagctgaagctgcagaagtggtacggcgatctgagaggcaagcccttcgccattgaggccgagaacagcatcctggacatcagcggcttcagcaagcagtacaactgcgccttcatttggcagaaagacggcgtcaagaaactgaacctgtacctgatcatcaattacttcaaaggcggcaagctgcggttcaagaagatcaaacccgaggccttcgaggctaacagattctacaccgtgatcaacaaaaagtccggcgagatcgtgcccatggaagtgaacttcaacttcgacgaccccaacctgattatcctgcctctggccttcggcaagagacagggcagagagttcatctggaacgatctgctgagcctggaaaccggctctctgaagctggccaatggcagagtgatcgagaaaaccctgtacaacaggagaaccagacaggacgagcctgctctgtttgtggccctgaccttcgagagaagagaggtgctggacagcagcaacatcaagcccatgaacctgatcggcgtggaccggggcgagaatatccctgctgtgatcgccctgacagaccctgaaggatgcccactgagcagattcaaggactccctgggcaaccctacacacatcctgagaatcggcgagagctacaaagagaagcagaggacaatccaggccaagaaagaggtggaacagcgcagagccggcggatactctaggaagtacgccagcaaggccaagaatctggccgacgacatggtccgaaacaccgccagagatctgctgtactacgccgtgacacaggacgccatgctgatcttcgagaatctgagcagaggcttcggccggcagggcaagagaacctttatggccgagaggcagtacaccagaatggaagattggctcacagctaaactggcctacgagggactgagcaagacctacctgtccaaaacactggcccagtatacctccaagacctgcagcaattgcggcttcaccatcaccagcgccgactacgacagagtgctggaaaagctcaagaaaaccgccaccggctggatgaccaccatcaacggcaaagagctgaaggttgagggccagatcacctactacaacaggtacaagaggcagaacgtcgtgaaggatctgagcgtggaactggacagactgagcgaagagagcgtgaacaacgacatcagcagctggacaaagggcagatcaggcgaggctctgagcctgctgaagaagaggtttagccacagacctgtgcaagagaagttcgtgtgcctgaactgcggcttcgagacacacgccgatgaacaggctgccctgaacattgccagaagctggctgttcctgagaagccaagagtacaagaagtaccagaccaacaagaccaccggcaacaccgacaagagggcctttgtggaaacctggcagagcttctacagaaaaaagctgaaagaagtctggaagcccgccgtg

SEQ ID NO: 3704 - DNA, 2934 bp, synthetic construct
  misc_feature 1..2934: note = CasX variant
  source 1..2934: mol_type = other DNA
caagagatcaagagaatcaacaagatcagaaggagactggtcaaggacagcaacacaaagaaggccggcaagacacggggccccatgaaaaccctgctcgtcagagtgatgacccctgacctgagagagcggctggaaaacctgagaaagaagcccgagaacatccctcagcctatcagcaacaccagcagggccaacctgaacaagctgctgaccgactacaccgagatgaagaaagccatcctgcacgtgtactgggaagagttccagaaagaccccgtgggcctgatgagcagagttgctcagcctgccagcaagaagatcgaccagaacaagctgaagcccgagatggacgagaagggcaatctgaccacagccggctttgcctgctctcagtgtggccagcctctgttcgtgtacaagctggaacaggtgtccgagaaaggcaaggcctacaccaactacttcggcagatgtaacgtggccgagcacgagaagctgattctgctggcccagctgaaacctgagaaggactctgatgaggccgtgacctacagcctgggcaagtttggacagagagccctggacttctacagcatccacgtgaccaaagaaagcacacaccccgtgaagcccctggctcagatcgccggcaatagatacgcctctggacctgtgggcaaagccctgtccgatgcctgcatgggaacaatcgccagcttcctgagcaagtaccaggacatcatcatcgagcaccagaaggtggtcaagggcaaccagaagagactggaaagcctgagggagctggccggcaaagagaacctggaataccccagcgtgaccctgcctcctcagcctcacacaaaagaaggcgtggacgcctacaacgaagtgatcgccagagtgagaatgtgggtcaacctgaacctgtggcagaagctgaaactgtccagggacgacgccaagcctctgctgagactgaagggcttccctagcttccctctggtggaaagacaggccaatgaagtggattggtgggacatggtctgcaacgtgaagaagctgatcaacgagaagaaagaggatggcaaggttttctggcagaacctggccggctacaagagacaagaagccctgaggccttacctgagcagcgaagaggaccggaagaagggcaagaagttcgccagataccagctgggcgacctgctgctgcacctggaaaagaagcacggcgaggactggggcaaagtgtacgatgaggcctgggagagaatcgacaagaaggtggaaggcctgagcaagcacattaagctggaagaggaaagaaggagcgaggacgcccaatctaaagccgctctgaccgattggctgagagccaaggccagctttgtgatcgagggcctgaaagaggccgacaaggacgagttctgcagatgcgagctgaagctgcagaagtggtacggcgatctgagaggcaagcccttcgccattgaggccgagaacagcatcctggacatcagcggcttcagcaagcagtacaactgcgccttcatttggcagaaagacggcgtcaagaaactgaacctgtacctgatcatcaattacttcaaaggcggcaagctgcggttcaagaagatcaaacccgaggccttcgaggctaacagattctacaccgtgatcaacaaaaagtccggcgagatcgtgcccatggaagtgaacttcaacttcgacgaccccaacctgattatcctgcctctggccttcggcaagagacagggcagagagttcatctggaacgatctgctgagcctggaaaccggctctctgaagctggccaatggcagagtgatcgagaaaaccctgtacaacaggagaaccagacaggacgagcctgctctgtttgtggccctgaccttcgagagaagagaggtgctggacagcagcaacatcaagcccatgaacctgatcggcgtggaccggggcgagaatatccctgctgtgatcgccctgacagaccctgaaggatgcccactgagcagattcaaggactccctgggcaaccctacacacatcctgagaatcggcgagagctacaaagagaagcagaggacaatccaggccaagaaagaggtggaacagagaagagccggcggatactctaggaagtacgccagcaaggccaagaatctggccgacgacatggtccgaaacaccgccagagatctgctgtactacgccgtgacacaggacgccatgctgatcttcgagaatctgagcagaggcttcggccggcagggcaagagaacctttatggccgagaggcagtacaccagaatggaagattggctcacagctaaactggcctacgagggactgagcaagacctacctgtccaaaacactggcccagtatacctccaagacctgcagcaattgcggcttcaccatcaccagcgccgactacgacagagtgctggaaaagctcaagaaaaccgccaccggctggatgaccaccatcaacggcaaagagctgaaggttgagggccagatcacctactacaacaggtacaagaggcagaacgtcgtgaaggatctgagcgtggaactggacagactgagcgaagagagcgtgaacaacgacatcagcagctggacaaagggcagatcaggcgaggctctgagcctgctgaagaagaggtttagccacagacctgtgcaagagaagttcgtgtgcctgaactgcggcttcgagacacacgccgatgaacaggctgccctgaacattgccagaagctggctgttcctgagaagccaagagtacaagaagtaccagaccaacaagaccaccggcaacaccgacaagagggcctttgtggaaacctggcagagcttctacagaaaaaagctgaaagaagtctggaagcccgccgtg

SEQ ID NO: 3705 - DNA, 2934 bp, synthetic construct
  misc_feature 1..2934: note = CasX variant
  source 1..2934: mol_type = other DNA
caagagatcaagagaatcaacaagatcagaaggagactggtcaaggacagcaacacaaagaaggccggcaagacaggccccatgaaaaccctgctcgtcagagtgatgacccctgacctgagagagcggctggaaaacctgagaaagaagcccgagaacatccctcagcctatcagcaacaccagcagggccaacctgaacaagctgctgaccgactacaccgagatgaagaaagccatcctgcacgtgtactgggaagagttccagaaagaccccgtgggcctgatgagcagagttgctcagcctgccagcaagaagatcgaccagaacaagctgaagcccgagatggacgagaagggcaatctgaccacagccggctttgcctgctctcagtgtggccagcctctgttcgtgtacaagctggaacaggtgtccgagaaaggcaaggcctacaccaactacttcggcagatgtaacgtggccgagcacgagaagctgattctgctggcccagctgaaacctgagaaggactctgatgaggccgtgacctacagcctgggcaagtttggacagagagccctggacttctacagcatccacgtgaccaaagaaagcacacaccccgtgaagcccctggctcagatcgccggcaatagatacgcctcttcccctgtgggcaaagccctgtccgatgcctgcatgggaacaatcgccagcttcctgagcaagtaccaggacatcatcatcgagcaccagaaggtggtcaagggcaaccagaagagactggaaagcctgagggagctggccggcaaagagaacctggaataccccagcgtgaccctgcctcctcagcctcacacaaaagaaggcgtggacgcctacaacgaagtgatcgccagagtgagaatgtgggtcaacctgaacctgtggcagaagctgaaactgtccagggacgacgccaagcctctgctgagactgaagggcttccctagcttccctctggtggaaagacaggccaatgaagtggattggtgggacatggtctgcaacgtgaagaagctgatcaacgagaagaaagaggatggcaaggttttctggcagaacctggccggctacaagagacaagaagccctgaggccttacctgagcagcgaagaggaccggaagaagggcaagaagttcgccagataccagctgggcgacctgctgctgcacctggaaaagaagcacggcgaggactggggcaaagtgtacgatgaggcctgggagagaatcgacaagaaggtggaaggcctgagcaagcacattaagctggaagaggaaagaaggagcgaggacgcccaatctaaagccgctctgaccgattggctgagagccaaggccagctttgtgatcgagggcctgaaagaggccgacaaggacgagttctgcagatgcgagctgaagctgcagaagtggtacggcgatctgagaggcaagcccttcgccattgaggccgagaacagcatcctggacatcagcggcttcagcaagcagtacaactgcgccttcatttggcagaaagacggcgtcaagaaactgaacctgtacctgatcatcaattacttcaaaggcggcaagctgcggttcaagaagatcaaacccgaggccttcgaggctaacagattctacaccgtgatcaacaaaaagtccggcgagatcgtgcccatggaagtgaacttcaacttcgacgaccccaacctgattatcctgcctctggccttcggcaagagacagggcagagagttcatctggaacgatctgctgagcctggaaaccggctctctgaagctggccaatggcagagtgatcgagaaaaccctgtacaacaggagaaccagacaggacgagcctgctctgtttgtggccctgaccttcgagagaagagaggtgctggacagcagcaacatcaagcccatgaacctgatcggcgtggaccggggcgagaatatccctgctgtgatcgccctgacagaccctgaaggatgcccactgagcagattcaaggactccctgggcaaccctacacacatcctgagaatcggcgagagctacaaagagaagcagaggacaatccaggccaagaaagaggtggaacagagaagagccggcggatactctaggaagtacgccagcaaggccaagaatctggccgacgacatggtccgaaacaccgccagagatctgctgtactacgccgtgacacaggacgccatgctgatcttcgagaatctgagcagaggcttcggccggcagggcaagagaacctttatggccgagaggcagtacaccagaatggaagattggctcacagctaaactggcctacgagggactgcccagcaagacctacctgtccaaaacactggcccagtatacctccaagacctgcagcaattgcggcttcaccatcaccagcgccgactacgacagagtgctggaaaagctcaagaaaaccgccaccggctggatgaccaccatcaacggcaaagagctgaaggttgagggccagatcacctactacaacaggtacaagaggcagaacgtcgtgaaggatctgagcgtggaactggacagactgagcgaagagagcgtgaacaacgacatcagcagctggacaaagggcagatcaggcgaggctctgagcctgctgaagaagaggtttagccacagacctgtgcaagagaagttcgtgtgcctgaactgcggcttcgagacacacgccgatgaacaggctgccctgaacattgccagaagctggctgttcctgagaagccaagagtacaagaagtaccagaccaacaagaccaccggcaacaccgacaagagggcctttgtggaaacctggcagagcttctacagaaaaaagctgaaagaagtctggaagcccgccgtg

SEQ ID NO: 3706 - DNA, 2934 bp, synthetic construct
  misc_feature 1..2934: note = CasX variant
  source 1..2934: mol_type = other DNA
caagagatcaagagaatcaacaagatcagaaggagactggtcaaggacagcaacacaaagaaggccggcaagacaggccccatgaaaaccctgctcgtcagagtgatgacccctgacctgagagagcggctggaaaacctgagaaagaagcccgagaacatccctcagcctatcagcaacaccagcagggccaacctgaacaagctgctgaccgactacaccgagatgaagaaagccatcctgcacgtgtactgggaagagttccagaaagaccccgtgggcctgatgagcagagttgctcagcctgccagcaagaagatcgaccagaacaagctgaagcccgagatggacgagaagggcaatctgaccacagccggctttgcctgctctcagtgtggccagcctctgttcgtgtacaagctggaacaggtgtccgagaaaggcaaggcctacaccaactacttcggcagatgtaacgtggccgagcacgagaagctgattctgctggcccagctgaaacctgagaaggactctgatgaggccgtgacctacagcctgggcaagtttggacagagagccctggacttctacagcatccacgtgaccaaagaaagcacacaccccgtgaagcccctggctcagatcgccggcaatagatacgcctctacccctgtgggcaaagccctgtccgatgcctgcatgggaacaatcgccagcttcctgagcaagtaccaggacatcatcatcgagcaccagaaggtggtcaagggcaaccagaagagactggaaagcctgagggagctggccggcaaagagaacctggaataccccagcgtgaccctgcctcctcagcctcacacaaaagaaggcgtggacgcctacaacgaagtgatcgccagagtgagaatgtgggtcaacctgaacctgtggcagaagctgaaactgtccagggacgacgccaagcctctgctgagactgaagggcttccctagcttccctctggtggaaagacaggccaatgaagtggattggtgggacatggtctgcaacgtgaagaagctgatcaacgagaagaaagaggatggcaaggttttctggcagaacctggccggctacaagagacaagaagccctgaggccttacctgagcagcgaagaggaccggaagaagggcaagaagttcgccagataccagctgggcgacctgctgctgcacctggaaaagaagcacggcgaggactggggcaaagtgtacgatgaggcctgggagagaatcgacaagaaggtggaaggcctgagcaagcacattaagctggaagaggaaagaaggagcgaggacgcccaatctaaagccgctctgaccgattggctgagagccaaggccagctttgtgatcgagggcctgaaagaggccgacaaggacgagttctgcagatgcgagctgaagctgcagaagtggtacggcgatctgagaggcaagcccttcgccattgaggccgagaacagcatcctggacatcagcggcttcagcaagcagtacaactgcgccttcatttggcagaaagacggcgtcaagaaactgaacctgtacctgatcatcaattacttcaaaggcggcaagctgcggttcaagaagatcaaacccgaggccttcgaggctaacagattctacaccgtgatcaacaaaaagtccggcgagatcgtgcccatggaagtgaacttcaacttcgacgaccccaacctgattatcctgcctctggccttcggcaagagacagggcagagagttcatctggaacgatctgctgagcctggaaaccggctctctgaagctggccaatggcagagtgatcgagaaaaccctgtacaacaggagaaccagacaggacgagcctgctctgtttgtggccctgaccttcgagagaagagaggtgctggacagcagcaacatcaagcccatgaacctgatcggcgtggaccggggcgagaatatccctgctgtgatcgccctgacagaccctgaaggatgcccactgagcagattcaaggactccctgggcaaccctacacacatcctgagaatcggcgagagctacaaagagaagcagaggacaatccaggccaagaaagaggtggaacagagaagagccggcggatactctaggaagtacgccagcaaggccaagaatctggccgacgacatggtccgaaacaccgccagagatctgctgtactacgccgtgacacaggacgccatgctgatcttcgagaatctgagcagaggcttcggccggcagggcaagagaacctttatggccgagaggcagtacaccagaatggaagattggctcacagctaaactggcctacgagggactgcccagcaagacctacctgtccaaaacactggcccagtatacctccaagacctgcagcaattgcggcttcaccatcaccagcgccgactacgacagagtgctggaaaagctcaagaaaaccgccaccggctggatgaccaccatcaacggcaaagagctgaaggttgagggccagatcacctactacaacaggtacaagaggcagaacgtcgtgaaggatctgagcgtggaactggacagactgagcgaagagagcgtgaacaacgacatcagcagctggacaaagggcagatcaggcgaggctctgagcctgctgaagaagaggtttagccacagacctgtgcaagagaagttcgtgtgcctgaactgcggcttcgagacacacgccgatgaacaggctgccctgaacattgccagaagctggctgttcctgagaagccaagagtacaagaagtaccagaccaacaagaccaccggcaacaccgacaagagggcctttgtggaaacctggcagagcttctacagaaaaaagctgaaagaagtctggaagcccgccgtg

SEQ ID NO: 3707 - DNA, 2934 bp, synthetic construct
  misc_feature 1..2934: note = CasX variant
  source 1..2934: mol_type = other DNA
caagagatcaagagaatcaacaagatcagaaggagactggtcaaggacagcaacacaaagaaggccggcaagacaggccccatgaaaaccctgctcgtcagagtgatgacccctgacctgagagagcggctggaaaacctgagaaagaagcccgagaacatccctcagcctatcagcaacaccagcagggccaacctgaacaagctgctgaccgactacaccgagatgaagaaagccatcctgcacgtgtactgggaagagttccagaaagaccccgtgggcctgatgagcagagttgctcagcctgccagcaagaagatcgaccagaacaagctgaagcccgagatggacgagaagggcaatctgaccacagccggctttgcctgctctcagtgtggccagcctctgttcgtgtacaagctggaacaggtgtccgagaaaggcaaggcctacaccaactacttcggcagatgtaacgtggccgagcacgagaagctgattctgctggcccagctgaaacctgagaaggactctgatgaggccgtgacctacagcctgggcaagtttggacagagagccctggacttctacagcatccacgtgaccaaagaaagcacacaccccgtgaagcccctggctcagatcgccggcaatagatacgcctctgcccctgtgggcaaagccctgtccgatgcctgcatgggaacaatcgccagcttcctgagcaagtaccaggacatcatcatcgagcaccagaaggtggtcaagggcaaccagaagagactggaaagcctgagggagctggccggcaaagagaacctggaataccccagcgtgaccctgcctcctcagcctcacacaaaagaaggcgtggacgcctacaacgaagtgatcgccagagtgagaatgtgggtcaacctgaacctgtggcagaagctgaaactgtccagggacgacgccaagcctctgctgagactgaagggcttccctagcttccctctggtggaaagacaggccaatgaagtggattggtgggacatggtctgcaacgtgaagaagctgatcaacgagaagaaagaggatggcaaggttttctggcagaacctggccggctacaagagacaagaagccctgaggccttacctgagcagcgaagaggaccggaagaagggcaagaagttcgccagataccagctgggcgacctgctgctgcacctggaaaagaagcacggcgaggactggggcaaagtgtacgatgaggcctgggagagaatcgacaagaaggtggaaggcctgagcaagcacattaagctggaagaggaaagaaggagcgaggacgcccaatctaaagccgctctgaccgattggctgagagccaaggccagctttgtgatcgagggcctgaaagaggccgacaaggacgagttctgcagatgcgagctgaagctgcagaagtggtacggcgatctgagaggcaagcccttcgccattgaggccgagaacagcatcctggacatcagcggcttcagcaagcagtacaactgcgccttcatttggcagaaagacggcgtcaagaaactgaacctgtacctgatcatcaattacttcaaaggcggcaagctgcggttcaagaagatcaaacccgaggccttcgaggctaacagattctacaccgtgatcaacaaaaagtccggcgagatcgtgcccatggaagtgaacttcaacttcgacgaccccaacctgattatcctgcctctggccttcggcaagagacagggcagagagttcatctggaacgatctgctgagcctggaaaccggctctctgaagctggccaatggcagagtgatcgagaaaaccctgtacaacaggagaaccagacaggacgagcctgctctgtttgtggccctgaccttcgagagaagagaggtgctggacagcagcaacatcaagcccatgaacctgatcggcgtggaccggggcgagaatatccctgctgtgatcgccctgacagaccctgaaggatgcccactgagcagattcaaggactccctgggcaaccctacacacatcctgagaatcggcgagagctacaaagagaagcagaggacaatccaggccaagaaagaggtggaacagagaagagccggcggatactctaggaagtacgccagcaaggccaagaatctggccgacgacatggtccgaaacaccgccagagatctgctgtactacgccgtgacacaggacgccatgctgatcttcgagaatctgagcagaggcttcggccggcagggcaagagaacctttatggccgagaggcagtacaccagaatggaagattggctcacagctaaactggcctacgagggactgcccagcaagacctacctgtccaaaacactggcccagtatacctccaagacctgcagcaattgcggcttcaccatcaccagcgccgactacgacagagtgctggaaaagctcaagaaaaccgccaccggctggatgaccaccatcaacggcaaagagctgaaggttgagggccagatcacctactacaacaggtacaagaggcagaacgtcgtgaaggatctgagcgtggaactggacagactgagcgaagagagcgtgaacaacgacatcagcagctggacaaagggcagatcaggcgaggctctgagcctgctgaagaagaggtttagccacagacctgtgcaagagaagttcgtgtgcctgaactgcggcttcgagacacacgccgatgaacaggctgccctgaacattgccagaagctggctgttcctgagaagccaagagtacaagaagtaccagaccaacaagaccaccggcaacaccgacaagagggcctttgtggaaacctggcagagcttctacagaaaaaagctgaaagaagtctggaagcccgccgtg

SEQ ID NO: 3708 - DNA, 2934 bp, synthetic construct
  misc_feature 1..2934: note = CasX variant
  source 1..2934: mol_type = other DNA
caagagatcaagagaatcaacaagatcagaaggagactggtcaaggacagcaacacaaagaaggccggcaagacaggccccatgaaaaccctgctcgtcagagtgatgacccctgacctgagagagcggctggaaaacctgagaaagaagcccgagaacatccctcagcctatcagcaacaccagcagggccaacctgaacaagctgctgaccgactacaccgagatgaagaaagccatcctgcacgtgtactgggaagagttccagaaagaccccgtgggcctgatgagcagagttgctcagcctgccagcaagaagatcgaccagaacaagctgaagcccgagatggacgagaagggcaatctgaccacagccggctttgcctgctctcagtgtggccagcctctgttcgtgtacaagctggaacaggtgtccgagaaaggcaaggcctacaccaactacttcggcagatgtaacgtggccgagcacgagaagctgattaagctggcccagctgaaacctgagaaggactctgatgaggccgtgacctacagcctgggcaagtttggacagagagccctggacttctacagcatccacgtgaccaaagaaagcacacaccccgtgaagcccctggctcagatcgccggcaatagatacgcctctggacctgtgggcaaagccctgtccgatgcctgcatgggaacaatcgccagcttcctgagcaagtaccaggacatcatcatcgagcaccagaaggtggtcaagggcaaccagaagagactggaaagcctgagggagctggccggcaaagagaacctggaataccccagcgtgaccctgcctcctcagcctcacacaaaagaaggcgtggacgcctacaacgaagtgatcgccagagtgagaatgtgggtcaacctgaacctgtggcagaagctgaaactgtccagggacgacgccaagcctctgctgagactgaagggcttccctagcttccctctggtggaaagacaggccaatgaagtggattggtgggacatggtctgcaacgtgaagaagctgatcaacgagaagaaagaggatggcaaggttttctggcagaacctggccggctacaagagacaagaagccctgaggccttacctgagcagcgaagaggaccggaagaagggcaagaagttcgccagataccagctgggcgacctgctgctgcacctggaaaagaagcacggcgaggactggggcaaagtgtacgatgaggcctgggagagaatcgacaagaaggtggaaggcctgagcaagcacattaagctggaagaggaaagaaggagcgaggacgcccaatctaaagccgctctgaccgattggctgagagccaaggccagctttgtgatcgagggcctgaaagaggccgacaaggacgagttctgcagatgcgagctgaagctgcagaagtggtacggcgatctgagaggcaagcccttcgccattgaggccgagaacagcatcctggacatcagcggcttcagcaagcagtacaactgcgccttcatttggcagaaagacggcgtcaagaaactgaacctgtacctgatcatcaattacttcaaaggcggcaagctgcggttcaagaagatcaaacccgaggccttcgaggctaacagattctacaccgtgatcaacaaaaagtccggcgagatcgtgcccatggaagtgaacttcaacttcgacgaccccaacctgattatcctgcctctggccttcggcaagagacagggcagagagttcatctggaacgatctgctgagcctggaaaccggctctctgaagctggccaatggcagagtgatcgagaaaaccctgtacaacaggagaaccagacaggacgagcctgctctgtttgtggccctgaccttcgagagaagagaggtgctggacagcagcaacatcaagcccatgaacctgatcggcgtggaccggggcgagaatatccctgctgtgatcgccctgacagaccctgaaggatgcccactgagcagattcaaggactccctgggcaaccctacacacatcctgagaatcggcgagagctacaaagagaagcagaggacaatccaggccaagaaagaggtggaacagagaagagccggcggatactctaggaagtacgccagcaaggccaagaatctggccgacgacatggtccgaaacaccgccagagatctgctgtactacgccgtgacacaggacgccatgctgatcttcgagaatctgagcagaggcttcggccggcagggcaagagaacctttatggccgagaggcagtacaccagaatggaagattggctcacagctaaactggcctacgagggactgcccagcaagacctacctgtccaaaacactggcccagtatacctccaagacctgcagcaattgcggcttcaccatcaccagcgccgactacgacagagtgctggaaaagctcaagaaaaccgccaccggctggatgaccaccatcaacggcaaagagctgaaggttgagggccagatcacctactacaacaggtacaagaggcagaacgtcgtgaaggatctgagcgtggaactggacagactgagcgaagagagcgtgaacaacgacatcagcagctggacaaagggcagatcaggcgaggctctgagcctgctgaagaagaggtttagccacagacctgtgcaagagaagttcgtgtgcctgaactgcggcttcgagacacacgccgatgaacaggctgccctgaacattgccagaagctggctgttcctgagaagccaagagtacaagaagtaccagaccaacaagaccaccggcaacaccgacaagagggcctttgtggaaacctggcagagcttctacagaaaaaagctgaaagaagtctggaagcccgccgtg

SEQ ID NO: 3709 - DNA, 2937 bp, synthetic construct
  misc_feature 1..2937: note = CasX variant
  source 1..2937: mol_type = other DNA
caagagatcaagagaatcaacaagatcagaaggagactggtcaaggacagcaacacaaagaaggccggcaagacacggggccccatgaaaaccctgctcgtcagagtgatgacccctgacctgagagagcggctggaaaacctgagaaagaagcccgagaacatccctcagcctatcagcaacaccagcagggccaacctgaacaagctgctgaccgactacaccgagatgaagaaagccatcctgcacgtgtactgggaagagttccagaaagaccccgtgggcctgatgagcagagttgctcagcctgccagcaagaagatcgaccagaacaagctgaagcccgagatggacgagaagggcaatctgaccacagccggctttgcctgctctcagtgtggccagcctctgttcgtgtacaagctggaacaggtgtccgagaaaggcaaggcctacaccaactacttcggcagatgtaacgtggccgagcacgagaagctgattctgctggcccagctgaaacctgagaaggactctgatgaggccgtgacctacagcctgggcaagtttggacagagagccctggacttctacagcatccacgtgaccaaagaaagcacacaccccgtgaagcccctggctcagatcgccggcaatagatacgcctcttcccctgtgggcaaagccctgtccgatgcctgcatgggaacaatcgccagcttcctgagcaagtaccaggacatcatcatcgagcaccagaaggtggtcaagggcaaccagaagagactggaaagcctgagggagctggccggcaaagagaacctggaataccccagcgtgaccctgcctcctcagcctcacacaaaagaaggcgtggacgcctacaacgaagtgatcgccagagtgagaatgtgggtcaacctgaacctgtggcagaagctgaaactgtccagggacgacgccaagcctctgctgagactgaagggcttccctagcttccctctggtggaaagacaggccaatgaagtggattggtgggacatggtctgcaacgtgaagaagctgatcaacgagaagaaagaggatggcaaggttttctggcagaacctggccggctacaagagacaagaagccctgaggccttacctgagcagcgaagaggaccggaagaagggcaagaagttcgccagataccagctgggcgacctgctgctgcacctggaaaagaagcacggcgaggactggggcaaagtgtacgatgaggcctgggagagaatcgacaagaaggtggaaggcctgagcaagcacattaagctggaagaggaaagaaggagcgaggacgcccaatctaaagccgctctgaccgattggctgagagccaaggccagctttgtgatcgagggcctgaaagaggccgacaaggacgagttctgcagatgcgagctgaagctgcagaagtggtacggcgatctgagaggcaagcccttcgccattgaggccgagaacagcatcctggacatcagcggcttcagcaagcagtacaactgcgccttcatttggcagaaagacggcgtcaagaaactgaacctgtacctgatcatcaattacttcaaaggcggcaagctgcggttcaagaagatcaaacccgaggccttcgaggctaacagattctacaccgtgatcaacaaaaagtccggcgagatcgtgcccatggaagtgaacttcaacttcgacgaccccaacctgattatcctgcctctggccttcggcaagagacagggcagagagttcatctggaacgatctgctgagcctggaaaccggctctctgaagctggccaatggcagagtgatcgagaaaaccctgtacaacaggagaaccagacaggacgagcctgctctgtttgtggccctgaccttcgagagaagagaggtgctggacagcagcaacatcaagcccatgaacctgatcggcgtggaccggggcgagaatatccctgctgtgatcgccctgacagaccctgaaggatgcccactgagcagattcaaggactccctgggcaaccctacacacatcctgagaatcggcgagagctacaaagagaagcagaggacaatccaggccaagaaagaggtggaacagagaagagccggcggatactctaggaagtacgccagcaaggccaagaatctggccgacgacatggtccgaaacaccgccagagatctgctgtactacgccgtgacacaggacgccatgctgatcttcgagaatctgagcagaggcttcggccggcagggcaagagaacctttatggccgagaggcagtacaccagaatggaagattggctcacagctaaactggcctacgagggactgcccagcaagacctacctgtccaaaacactggcccagtatacctccaagacctgcagcaattgcggcttcaccatcaccagcgccgactacgacagagtgctggaaaagctcaagaaaaccgccaccggctggatgaccaccatcaacggcaaagagctgaaggttgagggccagatcacctactacaacaggtacaagaggcagaacgtcgtgaaggatctgagcgtggaactggacagactgagcgaagagagcgtgaacaacgacatcagcagctggacaaagggcagatcaggcgaggctctgagcctgctgaagaagaggtttagccacagacctgtgcaagagaagttcgtgtgcctgaactgcggcttcgagacacacgccgatgaacaggctgccctgaacattgccagaagctggctgttcctgagaagccaagagtacaagaagtaccagaccaacaagaccaccggcaacaccgacaagagggcctttgtggaaacctggcagagcttctacagaaaaaagctgaaagaagtctggaagcccgccgtg

SEQ ID NO: 3710 - DNA, 2934 bp, synthetic construct
  misc_feature 1..2934: note = CasX variant
  source 1..2934: mol_type = other DNA
caagagatcaagagaatcaacaagatcagaaggagactggtcaaggacagcaacacaaagaaggccggcaagacaggccccatgaaaaccctgctcgtcagagtgatgacccctgacctgagagagcggctggaaaacctgagaaagaagcccgagaacatccctcagcctatcagcaacaccagcagggccaacctgaacaagctgctgaccgactacaccgagatgaagaaagccatcctgcacgtgtactgggaagagttccagaaagaccccgtgggcctgatgagcagagttgctcagcctgccagcaagaagatcgaccagaacaagctgaagcccgagatggacgagaagggcaatctgaccacagccggctttgcctgctctcagtgtggccagcctctgttcgtgtacaagctggaacaggtgtccgagaaaggcaaggcctacaccaactacttcggcagatgtaacgtggccgagcacgagaagctgattaagctggcccagctgaaacctgagaaggactctgatgaggccgtgacctacagcctgggcaagtttggacagagagccctggacttctacagcatccacgtgaccaaagaaagcacacaccccgtgaagcccctggctcagatcgccggcaatagatacgcctcttcccctgtgggcaaagccctgtccgatgcctgcatgggaacaatcgccagcttcctgagcaagtaccaggacatcatcatcgagcaccagaaggtggtcaagggcaaccagaagagactggaaagcctgagggagctggccggcaaagagaacctggaataccccagcgtgaccctgcctcctcagcctcacacaaaagaaggcgtggacgcctacaacgaagtgatcgccagagtgagaatgtgggtcaacctgaacctgtggcagaagctgaaactgtccagggacgacgccaagcctctgctgagactgaagggcttccctagcttccctctggtggaaagacaggccaatgaagtggattggtgggacatggtctgcaacgtgaagaagctgatcaacgagaagaaagaggatggcaaggttttctggcagaacctggccggctacaagagacaagaagccctgaggccttacctgagcagcgaagaggaccggaagaagggcaagaagttcgccagataccagctgggcgacctgctgctgcacctggaaaagaagcacggcgaggactggggcaaagtgtacgatgaggcctgggagagaatcgacaagaaggtggaaggcctgagcaagcacattaagctggaagaggaaagaaggagcgaggacgcccaatctaaagccgctctgaccgattggctgagagccaaggccagctttgtgatcgagggcctgaaagaggccgacaaggacgagttctgcagatgcgagctgaagctgcagaagtggtacggcgatctgagaggcaagcccttcgccattgaggccgagaacagcatcctggacatcagcggcttcagcaagcagtacaactgcgccttcatttggcagaaagacggcgtcaagaaactgaacctgtacctgatcatcaattacttcaaaggcggcaagctgcggttcaagaagatcaaacccgaggccttcgaggctaacagattctacaccgtgatcaacaaaaagtccggcgagatcgtgcccatggaagtgaacttcaacttcgacgaccccaacctgattatcctgcctctggccttcggcaagagacagggcagagagttcatctggaacgatctgctgagcctggaaaccggctctctgaagctggccaatggcagagtgatcgagaaaaccctgtacaacaggagaaccagacaggacgagcctgctctgtttgtggccctgaccttcgagagaagagaggtgctggacagcagcaacatcaagcccatgaacctgatcggcgtggaccggggcgagaatatccctgctgtgatcgccctgacagaccctgaaggatgcccactgagcagattcaaggactccctgggcaaccctacacacatcctgagaatcggcgagagctacaaagagaagcagaggacaatccaggccaagaaagaggtggaacagagaagagccggcggatactctaggaagtacgccagcaaggccaagaatctggccgacgacatggtccgaaacaccgccagagatctgctgtactacgccgtgacacaggacgccatgctgatcttcgagaatctgagcagaggcttcggccggcagggcaagagaacctttatggccgagaggcagtacaccagaatggaagattggctcacagctaaactggcctacgagggactgcccagcaagacctacctgtccaaaacactggcccagtatacctccaagacctgcagcaattgcggcttcaccatcaccagcgccgactacgacagagtgctggaaaagctcaagaaaaccgccaccggctggatgaccaccatcaacggcaaagagctgaaggttgagggccagatcacctactacaacaggtacaagaggcagaacgtcgtgaaggatctgagcgtggaactggacagactgagcgaagagagcgtgaacaacgacatcagcagctggacaaagggcagatcaggcgaggctctgagcctgctgaagaagaggtttagccacagacctgtgcaagagaagttcgtgtgcctgaactgcggcttcgagacacacgccgatgaacaggctgccctgaacattgccagaagctggctgttcctgagaagccaagagtacaagaagtaccagaccaacaagaccaccggcaacaccgacaagagggcctttgtggaaacctggcagagcttctacagaaaaaagctgaaagaagtctggaagcccgccgtg

SEQ ID NO: 3711 - DNA, 2937 bp, synthetic construct
  misc_feature 1..2937: note = CasX variant
  source 1..2937: mol_type = other DNA
caagagatcaagagaatcaacaagatcagaaggagactggtcaaggacagcaacacaaagaaggccggcaagacacggggccccatgaaaaccctgctcgtcagagtgatgacccctgacctgagagagcggctggaaaacctgagaaagaagcccgagaacatccctcagcctatcagcaacaccagcagggccaacctgaacaagctgctgaccgactacaccgagatgaagaaagccatcctgcacgtgtactgggaagagttccagaaagaccccgtgggcctgatgagcagagttgctcagcctgccagcaagaagatcgaccagaacaagctgaagcccgagatggacgagaagggcaatctgaccacagccggctttgcctgctctcagtgtggccagcctctgttcgtgtacaagctggaacaggtgtccgagaaaggcaaggcctacaccaactacttcggcagatgtaacgtggccgagcacgagaagctgattctgctggcccagctgaaacctgagaaggactctgatgaggccgtgacctacagcctgggcaagtttggacagagagccctggacttctacagcatccacgtgaccaaagaaagcacacaccccgtgaagcccctggctcagatcgccggcaatagatacgcctctggacctgtgggcaaagccctgtccggcgcctgcatgggaacaatcgccagcttcctgagcaagtaccaggacatcatcatcgagcaccagaaggtggtcaagggcaaccagaagagactggaaagcctgagggagctggccggcaaagagaacctggaataccccagcgtgaccctgcctcctcagcctcacacaaaagaaggcgtggacgcctacaacgaagtgatcgccagagtgagaatgtgggtcaacctgaacctgtggcagaagctgaaactgtccagggacgacgccaagcctctgctgagactgaagggcttccctagcttccctctggtggaaagacaggccaatgaagtggattggtgggacatggtctgcaacgtgaagaagctgatcaacgagaagaaagaggatggcaaggttttctggcagaacctggccggctacaagagacaagaagccctgaggccttacctgagcagcgaagaggaccggaagaagggcaagaagttcgccagataccagctgggcgacctgctgctgcacctggaaaagaagcacggcgaggactggggcaaagtgtacgatgaggcctgggagagaatcgacaagaaggtggaaggcctgagcaagcacattaagctggaagaggaaagaaggagcgaggacgcccaatctaaagccgctctgaccgattggctgagagccaaggccagctttgtgatcgagggcctgaaagaggccgacaaggacgagttctgcagatgcgagctgaagctgcagaagtggtacggcgatctgagaggcaagcccttcgccattgaggccgagaacagcatcctggacatcagcggcttcagcaagcagtacaactgcgccttcatttggcagaaagacggcgtcaagaaactgaacctgtacctgatcatcaattacttcaaaggcggcaagctgcggttcaagaagatcaaacccgaggccttcgaggctaacagattctacaccgtgatcaacaaaaagtccggcgagatcgtgcccatggaagtgaacttcaacttcgacgaccccaacctgattatcctgcctctggccttcggcaagagacagggcagagagttcatctggaacgatctgctgagcctggaaaccggctctctgaagctggccaatggcagagtgatcgagaaaaccctgtacaacaggagaaccagacaggacgagcctgctctgtttgtggccctgaccttcgagagaagagaggtgctggacagcagcaacatcaagcccatgaacctgatcggcgtggaccggggcgagaatatccctgctgtgatcgccctgacagaccctgaaggatgcccactgagcagattcaaggactccctgggcaaccctacacacatcctgagaatcggcgagagctacaaagagaagcagaggacaatccaggccaagaaagaggtggaacagagaagagccggcggatactctaggaagtacgccagcaaggccaagaatctggccgacgacatggtccgaaacaccgccagagatctgctgtactacgccgtgacacaggacgccatgctgatcttcgagaatctgagcagaggcttcggccggcagggcaagagaacctttatggccgagaggcagtacaccagaatggaagattggctcacagctaaactggcctacgagggactgcccagcaagacctacctgtccaaaacactggcccagtatacctccaagacctgcagcaattgcggcttcaccatcaccagcgccgactacgacagagtgctggaaaagctcaagaaaaccgccaccggctggatgaccaccatcaacggcaaagagctgaaggttgagggccagatcacctactacaacaggtacaagaggcagaacgtcgtgaaggatctgagcgtggaactggacagactgagcgaagagagcgtgaacaacgacatcagcagctggacaaagggcagatcaggcgaggctctgagcctgctgaagaagaggtttagccacagacctgtgcaagagaagttcgtgtgcctgaactgcggcttcgagacacacgccgatgaacaggctgccctgaacattgccagaagctggctgttcctgagaagccaagagtacaagaagtaccagaccaacaagaccaccggcaacaccgacaagagggcctttgtggaaacctggcagagcttctacagaaaaaagctgaaagaagtctggaagcccgccgtg

SEQ ID NO: 3712 - DNA, 2937 bp, synthetic construct
  misc_feature 1..2937: note = CasX variant
  source 1..2937: mol_type = other DNA
caagagatcaagagaatcaacaagatcagaaggagactggtcaaggacagcaacacaaagaaggccggcaagacacggggccccatgaaaaccctgctcgtcagagtgatgacccctgacctgagagagcggctggaaaacctgagaaagaagcccgagaacatccctcagcctatcagcaacaccagcagggccaacctgaacaagctgctgaccgactacaccgagatgaagaaagccatcctgcacgtgtactgggaagagttccagaaagaccccgtgggcctgatgagcagagttgctcagcctgccagcaagaagatcgaccagaacaagctgaagcccgagatggacgagaagggcaatctgaccacagccggctttgcctgctctcagtgtggccagcctctgttcgtgtacaagctggaacaggtgtccgagaaaggcaaggcctacaccaactacttcggcagatgtaacgtggccgagcacgagaagctgattctgctggcccagctgaaacctgagaaggactctgatgaggccgtgacctacagcctgggcaagtttggacagagagccctggacttctacagcatccacgtgaccaaagaaagcacacaccccgtgaagcccctggctcagatcgccggcaatagatacgcctcttcccctgtgggcaaagccctgtccggcgcctgcatgggaacaatcgccagcttcctgagcaagtaccaggacatcatcatcgagcaccagaaggtggtcaagggcaaccagaagagactggaaagcctgagggagctggccggcaaagagaacctggaataccccagcgtgaccctgcctcctcagcctcacacaaaagaaggcgtggacgcctacaacgaagtgatcgccagagtgagaatgtgggtcaacctgaacctgtggcagaagctgaaactgtccagggacgacgccaagcctctgctgagactgaagggcttccctagcttccctctggtggaaagacaggccaatgaagtggattggtgggacatggtctgcaacgtgaagaagctgatcaacgagaagaaagaggatggcaaggttttctggcagaacctggccggctacaagagacaagaagccctgaggccttacctgagcagcgaagaggaccggaagaagggcaagaagttcgccagataccagctgggcgacctgctgctgcacctggaaaagaagcacggcgaggactggggcaaagtgtacgatgaggcctgggagagaatcgacaagaaggtggaaggcctgagcaagcacattaagctggaagaggaaagaaggagcgaggacgcccaatctaaagccgctctgaccgattggctgagagccaaggccagctttgtgatcgagggcctgaaagaggccgacaaggacgagttctgcagatgcgagctgaagctgcagaagtggtacggcgatctgagaggcaagcccttcgccattgaggccgagaacagcatcctggacatcagcggcttcagcaagcagtacaactgcgccttcatttggcagaaagacggcgtcaagaaactgaacctgtacctgatcatcaattacttcaaaggcggcaagctgcggttcaagaagatcaaacccgaggccttcgaggctaacagattctacaccgtgatcaacaaaaagtccggcgagatcgtgcccatggaagtgaacttcaacttcgacgaccccaacctgattatcctgcctctggccttcggcaagagacagggcagagagttcatctggaacgatctgctgagcctggaaaccggctctctgaagctggccaatggcagagtgatcgagaaaaccctgtacaacaggagaaccagacaggacgagcctgctctgtttgtggccctgaccttcgagagaagagaggtgctggacagcagcaacatcaagcccatgaacctgatcggcgtggaccggggcgagaatatccctgctgtgatcgccctgacagaccctgaaggatgcccactgagcagattcaaggactccctgggcaaccctacacacatcctgagaatcggcgagagctacaaagagaagcagaggacaatccaggccaagaaagaggtggaacagagaagagccggcggatactctaggaagtacgccagcaaggccaagaatctggccgacgacatggtccgaaacaccgccagagatctgctgtactacgccgtgacacaggacgccatgctgatcttcgagaatctgagcagaggcttcggccggcagggcaagagaacctttatggccgagaggcagtacaccagaatggaagattggctcacagctaaactggcctacgagggactgcccagcaagacctacctgtccaaaacactggcccagtatacctccaagacctgcagcaattgcggcttcaccatcaccagcgccgactacgacagagtgctggaaaagctcaagaaaaccgccaccggctggatgaccaccatcaacggcaaagagctgaaggttgagggccagatcacctactacaacaggtacaagaggcagaacgtcgtgaaggatctgagcgtggaactggacagactgagcgaagagagcgtgaacaacgacatcagcagctggacaaagggcagatcaggcgaggctctgagcctgctgaagaagaggtttagccacagacctgtgcaagagaagttcgtgtgcctgaactgcggcttcgagacacacgccgatgaacaggctgccctgaacattgccagaagctggctgttcctgagaagccaagagtacaagaagtaccagaccaacaagaccaccggcaacaccgacaagagggcctttgtggaaacctggcagagcttctacagaaaaaagctgaaagaagtctggaagcccgccgtg

SEQ ID NO: 3713 - DNA, 2937 bp, synthetic construct
  misc_feature 1..2937: note = CasX variant
  source 1..2937: mol_type = other DNA
caagagatcaagagaatcaacaagatcagaaggagactggtcaaggacagcaacacaaagaaggccggcaagacacggggccccatgaaaaccctgctcgtcagagtgatgacccctgacctgagagagcggctggaaaacctgagaaagaagcccgagaacatccctcagcctatcagcaacaccagcagggccaacctgaacaagctgctgaccgactacaccgagatgaagaaagccatcctgcacgtgtactgggaagagttccagaaagaccccgtgggcctgatgagcagagttgctcagcctgccagcaagaagatcgaccagaacaagctgaagcccgagatggacgagaagggcaatctgaccacagccggctttgcctgctctcagtgtggccagcctctgttcgtgtacaagctggaacaggtgtccgagaaaggcaaggcctacaccaactacttcggcagatgtaacgtggccgagcacgagaagctgattaagctggcccagctgaaacctgagaaggactctgatgaggccgtgacctacagcctgggcaagtttggacagagagccctggacttctacagcatccacgtgaccaaagaaagcacacaccccgtgaagcccctggctcagatcgccggcaatagatacgcctcttcccctgtgggcaaagccctgtccgatgcctgcatgggaacaatcgccagcttcctgagcaagtaccaggacatcatcatcgagcaccagaaggtggtcaagggcaaccagaagagactggaaagcctgagggagctggccggcaaagagaacctggaataccccagcgtgaccctgcctcctcagcctcacacaaaagaaggcgtggacgcctacaacgaagtgatcgccagagtgagaatgtgggtcaacctgaacctgtggcagaagctgaaactgtccagggacgacgccaagcctctgctgagactgaagggcttccctagcttccctctggtggaaagacaggccaatgaagtggattggtgggacatggtctgcaacgtgaagaagctgatcaacgagaagaaagaggatggcaaggttttctggcagaacctggccggctacaagagacaagaagccctgaggccttacctgagcagcgaagaggaccggaagaagggcaagaagttcgccagataccagctgggcgacctgctgctgcacctggaaaagaagcacggcgaggactggggcaaagtgtacgatgaggcctgggagagaatcgacaagaaggtggaaggcctgagcaagcacattaagctggaagaggaaagaaggagcgaggacgcccaatctaaagccgctctgaccgattggctgagagccaaggccagctttgtgatcgagggcctgaaagaggccgacaaggacgagttctgcagatgcgagctgaagctgcagaagtggtacggcgatctgagaggcaagcccttcgccattgaggccgagaacagcatcctggacatcagcggcttcagcaagcagtacaactgcgccttcatttggcagaaagacggcgtcaagaaactgaacctgtacctgatcatcaattacttcaaaggcggcaagctgcggttcaagaagatcaaacccgaggccttcgaggctaacagattctacaccgtgatcaacaaaaagtccggcgagatcgtgcccatggaagtgaacttcaacttcgacgaccccaacctgattatcctgcctctggccttcggcaagagacagggcagagagttcatctggaacgatctgctgagcctggaaaccggctctctgaagctggccaatggcagagtgatcgagaaaaccctgtacaacaggagaaccagacaggacgagcctgctctgtttgtggccctgaccttcgagagaagagaggtgctggacagcagcaacatcaagcccatgaacctgatcggcgtggaccggggcgagaatatccctgctgtgatcgccctgacagaccctgaaggatgcccactgagcagattcaaggactccctgggcaaccctacacacatcctgagaatcggcgagagctacaaagagaagcagaggacaatccaggccaagaaagaggtggaacagagaagagccggcggatactctaggaagtacgccagcaaggccaagaatctggccgacgacatggtccgaaacaccgccagagatctgctgtactacgccgtgacacaggacgccatgctgatcttcgagaatctgagcagaggcttcggccggcagggcaagagaacctttatggccgagaggcagtacaccagaatggaagattggctcacagctaaactggcctacgagggactgcccagcaagacctacctgtccaaaacactggcccagtatacctccaagacctgcagcaattgcggcttcaccatcaccagcgccgactacgacagagtgctggaaaagctcaagaaaaccgccaccggctggatgaccaccatcaacggcaaagagctgaaggttgagggccagatcacctactacaacaggtacaagaggcagaacgtcgtgaaggatctgagcgtggaactggacagactgagcgaagagagcgtgaacaacgacatcagcagctggacaaagggcagatcaggcgaggctctgagcctgctgaagaagaggtttagccacagacctgtgcaagagaagttcgtgtgcctgaactgcggcttcgagacacacgccgatgaacaggctgccctgaacattgccagaagctggctgttcctgagaagccaagagtacaagaagtaccagaccaacaagaccaccggcaacaccgacaagagggcctttgtggaaacctggcagagcttctacagaaaaaagctgaaagaagtctggaagcccgccgtg

SEQ ID NO: 3714 - DNA, 825 bp, synthetic construct
  misc_feature 1..825: note = RHO promoter
  source 1..825: mol_type = other DNA
agatcttccccacctagccacctggcaaactgctccttctctcaaaggcccaaacatggcctcccagactgcaacccccaggcagtcaggccctgtctccacaacctcacagccaccctggacggaatctgcttcttcccacatttgagtcctcctcagcccctgagctcctctgggcagggctgtttctttccatctttgtattcccaggggcctgcaaataaatgtttaatgaacgaacaagagagtgaattccaattccatgcaacaaggattgggctcctgggccctaggctatgtgtctggcaccagaaacggaagctgcaggttgcagcccctgccctcatggagctcctcctgtcagaggagtgtggggactggatgactccagaggtaacttgtgggggaacgaacaggtaaggggctgtgtgacgagatgagagactgggagaataaaccagaaagtctctagctgtccagaggacatagcacagaggcccatggtccctatttcaaacccaggccaccagactgagctgggaccttgggacagacaagtcatgcagaagttaggggaccttctcctcccttttcctggatcctgagtacctctcctccctgacctcaggcttcctcctagtgtcaccttggcccctcttagaagccaattaggccctcagtttctgcagcggggattaatatgattatgaacacccccaatctcccagatgctgattcagccaggagcttaggagggggaggtcactttataagggtctgggggggtcagaacccagagtcatcccctgaattctgcagatatcc

SEQ ID NO: 3715 - DNA, 805 bp, synthetic construct
  misc_feature 1..805: note = RHO535-CAG promoter
  source 1..805: mol_type = other DNA
cctcatggagctcctcctgtcagaggagtgtggggactggatgactccagaggtaacttgtgggggaacgaacaggtaaggggctgtgtgacgagatgagagactgggagaataaaccagaaagtctctagctgtccagaggacatagcacagaggcccatggtccctatttcaaacccaggccaccagactgagctgggaccttgggacagacaagtcatgcagaagttaggggaccttctcctcccttttcctggatcctgagtacctctcctccctgacctcaggcttcctcctagtgtcaccttggcccctcttagaagccaattaggccctcagtttctgcagcggggattaatatgattatgaacacccccaatctcccagatgctgattcagccaggagcttaggagggggaggtcactttataagggtctgggggggtcagaacccagagtcatccagctggagccctgagtggctgagctcaggccttcgcagcattcttgggtgggagcagccacgggtcagccacaaccacgttctgcttcactctccccatctccccccccctccccacccccaattttgtatttatttattttttaattattttgtgcagcgatgggggcggggggggggggggggcgcgcgccaggcggggcggggcggggcgaggggcggggcggggcgaggcggagaggtgcggcggcagccaatcagagcggcgcgctccgaaagtttccttttatggcgaggcggcggcggcggcggccctataaaaagcgaagcgcgcggcgggcg

SEQ ID NO: 3716 - DNA, 1022 bp, synthetic construct
  misc_feature 1..1022: note = RHO-intron promoter
  source 1..1022: mol_type = other DNA
agatcttccccacctagccacctggcaaactgctccttctctcaaaggcccaaacatggcctcccagactgcaacccccaggcagtcaggccctgtctccacaacctcacagccaccctggacggaatctgcttcttcccacatttgagtcctcctcagcccctgagctcctctgggcagggctgtttctttccatctttgtattcccaggggcctgcaaataaatgtttaatgaacgaacaagagagtgaattccaattccatgcaacaaggattgggctcctgggccctaggctatgtgtctggcaccagaaacggaagctgcaggttgcagcccctgccctcatggagctcctcctgtcagaggagtgtggggactggatgactccagaggtaacttgtgggggaacgaacaggtaaggggctgtgtgacgagatgagagactgggagaataaaccagaaagtctctagctgtccagaggacatagcacagaggcccatggtccctatttcaaacccaggccaccagactgagctgggaccttgggacagacaagtcatgcagaagttaggggaccttctcctcccttttcctggatcctgagtacctctcctccctgacctcaggcttcctcctagtgtcaccttggcccctcttagaagccaattaggccctcagtttctgcagcggggattaatatgattatgaacacccccaatctcccagatgctgattcagccaggagcttaggagggggaggtcactttataagggtctgggggggtcagaacccagagtcatcccctgaattctgcagatatccatcacactgcgaggaactgaaaaaccagaaagttaactggtaagtttagtctttttgtcttttatttcaggtcccggatccggtggtggtgcaaatcaaagaactgctcctcagtggatgttgcctttacttctaggcctgtacggaagtgttacttctgctctaaaagctgcggaattgtacccgcggccgatcca

SEQ ID NO: 3717 - DNA, 292 bp, synthetic construct
  misc_feature 1..292: note = GRK promoter
  source 1..292: mol_type = other DNA
gggccccagaagcctggtggttgtttgtccttctcaggggaaaagtgaggcggccccttggaggaaggggccgggcagaatgatctaatcggattccaagcagctcaggggattgtctttttctagcaccttcttgccactcctaagcgtcctccgtgaccccggctgggatttcgcctggtgctgtgtcagccccggtctcccaggggcttcccagtggtccccaggaaccctcgacagggcccggtctctctcgtccagcaagggcagggacgggccacaggccaagggc

SEQ ID NO: 3718 - DNA, 510 bp, synthetic construct
  misc_feature 1..510: note = GRK-SV40 promoter
  source 1..510: mol_type = other DNA
gctagcaagatccaagctcagatctcgatcgagttgggccccagaagcctggtggttgtttgtccttctcaggggaaaagtgaggcggccccttggaggaaggggccgggcagaatgatctaatcggattccaagcagctcaggggattgtctttttctagcaccttcttgccactcctaagcgtcctccgtgaccccggctgggatttagcctggtgctgtgtcagccccggtctcccaggggcttcccagtggtccccaggaaccctcgacagggcccggtctctctcgtccagcaagggcagggacgggccacaggccaagggccctcgatcgaggaactgaaaaaccagaaagttaactggtaagtttagtctttttgtcttttatttcaggtcccggatccggtggtggtgcaaatcaaagaactgctcctcagtggatgttgcctttacttctaggcctgtacggaagtgttacttctgctctaaaagctgcggaattgtaccc

SEQ ID NO: 3719 - DNA, 560 bp, synthetic construct
  misc_feature 1..560: note = GRK-CAG promoter
  source 1..560: mol_type = other DNA
gggccccagaagcctggtggttgtttgtccttctcaggggaaaagtgaggcggccccttggaggaaggggccgggcagaatgatctaatcggattccaagcagctcaggggattgtctttttctagcaccttcttgccactcctaagcgtcctccgtgaccccggctgggatttcgcctggtgctgtgtcagccccggtctcccaggggcttcccagtggtccccaggaaccctcgacagggcccggtctctctcgtccagcaagggcagggacgggccacaggccaagggcaccacgttctgcttcactctccccatctccccccccctccccacccccaattttgtatttatttattttttaattattttgtgcagcgatgggggcggggggggggggggggcgcgcgccaggcggggcggggcggggcgaggggcggggcggggcgaggcggagaggtgcggcggcagccaatcagagcggcgcgctccgaaagtttccttttatggcgaggcggcggcggcggcggccctataaaaagcgaagcgcgcggcgggcg

SEQ ID NO: 3720 - DNA, 400 bp, synthetic construct; identical to SEQ ID NO: 3533
  misc_feature 1..400: note = promoter variant
  source 1..400: mol_type = other DNA

SEQ ID NO: 3721 - DNA, 164 bp, synthetic construct; identical to SEQ ID NO: 3556
  misc_feature 1..164: note = promoter variant
  source 1..164: mol_type = other DNA

SEQ ID NO: 3722 - DNA, 252 bp, synthetic construct
  misc_feature 1..252: note = promoter variant
  source 1..252: mol_type = other DNA
aatggaggcggtactatgtagatgagaattcaggagcaaactgggaaaagcaactgcttccaaatatttgtgatttttacagtgtagttttggaaaaactcttagcctaccaattcttctaagtgttttaaaatgtgggagccagtacacatgaagttatagagtgttttaatgaggcttaaatatttaccgtaactatgaaatgctacgcatatcatgctgttcaggctccgtggccacgcaactcatact

SEQ ID NO: 3723 - DNA, 229 bp, synthetic construct; identical to SEQ ID NO: 3546
  misc_feature 1..229: note = promoter variant
  source 1..229: mol_type = other DNA

SEQ ID NO: 3724 - DNA, 38 bp, synthetic construct
  misc_feature 1..38: note = promoter variant
  source 1..38: mol_type = other DNA
gtaggcgtgtacggtgggaggtctatataagcagagct

SEQ ID NO: 3725 - DNA, 354 bp, synthetic construct
  misc_feature 1..354: note = promoter variant
  source 1..354: mol_type = other DNA
ggatcctactgacgaggggcttgtccaaacaagcccgggcatgcctaaacatgccctgatgcaatcctgacgtcgtgaagcaatgattatgcaatttgagcatgtccagactagccctgacggatgacgcttgacgcaattcctgaggcaagtctgagcttgttcaaacttgtcttgaagaaattatgacggactgacgtatggtgcaatattggggcaatgcttgacgttcgcggtaggcgtgtacggtgggaggtctatataagcagagctcgtttagtgaaccgtcagatcgcctggagacgccatccacgctgttttgacctccatagaagtcaccgggaccgatccagc

SEQ ID NO: 3726 - DNA, 197 bp, synthetic construct
  misc_feature 1..197: note = promoter variant
  source 1..197: mol_type = other DNA
tgcatctcaattagtcagcaaccatagtcccgcccctaactccgcccatcccgcccctaactccgcccagttccgcccattctccgccccatggctgactaattttttttatttatgcagaggccgaggccgcctcggcctctgagctattccagaagtagtgaggaggcttttttggaggcctaggcttttgcaaa

SEQ ID NO: 3727 - DNA, 178 bp, synthetic construct
  misc_feature 1..178: note = promoter variant
  source 1..178: mol_type = other DNA
ctgacaaattcagtataaaagcttggggctggggccgagcactggggactttgagggtggccaggccagcgtaggaggccagcgtaggatcctgctgggagcggggaactgagggaagcgacgccgagaaagcaggcgtaccacggagggagagaaaagctccggaagcccagcagcg

SEQ ID NO: 3728 - DNA, 41 bp, synthetic construct
  misc_feature 1..41: note = promoter variant
  source 1..41: mol_type = other DNA
ggggggctataaaagggggtgggggcgttcgtcctcactct

SEQ ID NO: 3729 - DNA, 204 bp, synthetic construct; identical to SEQ ID NO: 3562
  misc_feature 1..204: note = promoter variant
  source 1..204: mol_type = other DNA

SEQ ID NO: 3730 - DNA, 234 bp, synthetic construct; identical to SEQ ID NO: 3534
  misc_feature 1..234: note = promoter variant
  source 1..234: mol_type = other DNA

SEQ ID NO: 3731 - DNA, 212 bp, synthetic construct
  misc_feature 1..212: note = promoter variant
  source 1..212: mol_type = other DNA
gggcagagcgcacatcgcccacagtccccgagaagttggggggaggggtcggcaattgatccggtgcctagagaaggtggcgcggggtaaactgggaaagtgatgtcgtgtactggctccgcctttttcccgagggtgggggagaaccgtatataagtgcagtagtcgccgtgaacgttctttttcgcaacgggtttgccgccagaacacag

SEQ ID NO: 3732 - DNA, 325 bp, synthetic construct; identical to SEQ ID NO: 3558
  misc_feature 1..325: note = promoter variant
  source 1..325: mol_type = other DNA

SEQ ID NO: 3733 - DNA, 243 bp, synthetic construct; identical to SEQ ID NO: 3559
  misc_feature 1..243: note = promoter variant
  source 1..243: mol_type = other DNA

SEQ ID NO: 3734 - DNA, 223 bp, synthetic construct
  misc_feature 1..223: note = promoter variant
  source 1..223: mol_type = other DNA
acagcgctgaccgcggaggtccaaccggaagaatgtccggattggacattcggaagagggcccgccttccctggggaatctctgcgcacgcgcagaacgcttcgaccaatgaaaacacaggaagccgtccgcgcaaccgcgttgcgtcacttctgccgcccctgtttcaagggataagaaaccctgcgacaaaacctcctccttttccaagcggctgccgaag

SEQ ID NO: 3735 - DNA, 400 bp, synthetic construct
  misc_feature 1..400: note = CpG depleted AAV elements
  source 1..400: mol_type = other DNA
accaagtgacgatcacagctatccacaaacaagaactgcgacccaaatcccggctgcgacggaactagctgtgccacacccggcgcgtccttatataatcatcggcgttcaccgccccaaggagatccctccgcagaatcgccgagaagggactacttttcctcgcctgttccgctctctggaaagaaaaccagtgccctagagtcacccaagtcccgtcctaaaatgtccttctgctgatactggggttctaaggctgagtcttatgagcagcgggctgctgtcctgagcgtccaggcggaaggatcaggaggctcgctgcgcccttcgtctgacgtggcagcgctcgccgtgaggaggggggcgcccgcgggaggcgccaaaacccggtgcggaggcc

SEQ ID NO: 3736 - DNA, 400 bp, synthetic construct
  misc_feature 1..400: note = CpG depleted AAV elements
  source 1..400: mol_type = other DNA
accaagtgatgatcacagctatccacaaacaagaactgagacccaaatcccagctgccacggaactagctgtgccacacccggtgtctccttatataatcataggaattcaccgccccaaggagatccctccgcagaattgccgagaagggactacttttcctagcctgttccactctctggaaagaaaaccagtgccctagagtcacccaagtcccttcctaaaatgtccttctgctgatactggggttctaaggctgagtcttatgagcagagggctgctgtcctgagggtccaggcggaaggatcaggaggctcactgagcccttcgtctgacgtggcagatctggccgtgaggaggggggaacccgcgggaggcaccaaaacccggtggggaggcc

SEQ ID NO: 3737 - DNA, 400 bp, synthetic construct
  misc_feature 1..400: note = CpG depleted AAV elements
  source 1..400: mol_type = other DNA
accaagtgatgatcacagctatccacaaacaagaactgagacccaaatcccagctgccatggaactagctgtgccacacctggtgtctccttatataatcataggaattcactgccccaaggagatccctctgcagaattgctgagaagggactacttttcctagcctgttccactctctggaaagaaaaccagtgccctagagtcacccaagtcccttcctaaaatgtccttctgctgatactggggttctaaggctgagtcttatgagcagagggctgctgtcctgagggtccaggtggaaggatcaggaggctcactgagccctttgtctgatgtggcagatctggctgtgaggaggggggaacctgtgggaggcaccaaaacctggtggggaggcc

SEQ ID NO: 3738 - DNA, 252 bp, synthetic construct
  misc_feature 1..252: note = CpG depleted AAV elements
  source 1..252: mol_type = other DNA
aatggaggcggtactatgtagatgagaattcaggagcaaactgggaaaagcaactgcttccaaatatttgtgatttttacagtgtagttttggaaaaactcttagcctaccaattcttctaagtgttttaaaatgtgggagccagtacacatgaagttatagagtgttttaatgaggcttaaatatttaccgtaactatgaaatgctacacatatcatgctgttcaggctctgtggccatgcaactcatact

SEQ ID NO: 3739 - DNA, 252 bp, synthetic construct
  misc_feature 1..252: note = CpG depleted AAV elements
  source 1..252: mol_type = other DNA
aatggaggtggtactatgtagatgagaattcaggagcaaactgggaaaagcaactgcttccaaatatttgtgatttttacagtgtagttttggaaaaactcttagcctaccaattcttctaagtgttttaaaatgtgggagccagtacacatgaagttatagagtgttttaatgaggcttaaatatttactgtaactatgaaatgctacacatatcatgctgttcaggctctgtggccatgcaactcatact

SEQ ID NO: 3740 - DNA, 241 bp, synthetic construct
  misc_feature 1..241: note = CpG depleted AAV elements
  source 1..241: mol_type = other DNA
gagggcctatttcccatgattccttcatatttgcatatacgatacaaggctgttagagagataattggaattaatttgactgtaaacacaaagatattagtacaaaatatttgatgtagaaagtaataatttcttgggtagtttgcagttttaaaattatgttttaaaatggactatcatatgcttaccgtaacttgaaagtatttctatttcttggctttatatatcttgtggaaaggac

SEQ ID NO: 3741 - DNA, 241 bp, synthetic construct
  misc_feature 1..241: note = CpG depleted AAV elements
  source 1..241: mol_type = other DNA
gagggcctatttcccatgattccttcatatttgcatatacaatacaaggctgttagagagataattggaattaatttgactgtaaacacaaagatattagtacaaaatatttgatgtagaaagtaataatttcttgggtagtttgcagttttaaaattatgttttaaaatggactatcatatgcttaccataacttgaaagtatttctatttcttggctttatatatcttgtggaaaggac

SEQ ID NO: 3742 - DNA, 249 bp, synthetic construct
  misc_feature 1..249: note = CpG depleted AAV elements
  source 1..249: mol_type = other DNA
gccacctcttttgcatattggcacccacaatccaccgcggctatgaggccagtataagggggtaaaattatgataagatatgggattttacgtgatggaagacatcaaagtaagtgtaagcagaaaagttgttctgcaacataccactgtaggaaattatgctaaatatgaaactgaccataagttatcctaaccaaaagatgatttgattgaagggcttaaaataggtgtgacagtaacccttgagtc

SEQ ID NO: 3743 - DNA, 249 bp, synthetic construct
  misc_feature 1..249: note = CpG depleted AAV elements
  source 1..249: mol_type = other DNA
gccacctcttttgcatattggcacccacaatccacctgggctatgaggccagtataagggggtaaaattatgataagatatgggattttacttgatggaagacatcaaagtaagtgtaagcagaaaagttgttctgcaacataccactgtaggaaattatgctaaatatgaaactgaccataagttatcctaaccaaaagatgatttgattgaagggcttaaaataggtgtgacagtaacccttgagtc

SEQ ID NO: 3744 - DNA, 249 bp, synthetic construct
  misc_feature 1..249: note = CpG depleted AAV elements
  source 1..249: mol_type = other DNA
tcccttacccagggtgccccaggagctcatttgcatgtcccacccaacaggtaaacctgacagatcagtggccaccaggtatggcctggccatcagagcaccaaacttatgagccttgtgatgagttctattacatgaaattctcctaaaggctccaagatggacaggaaagggctaaattaggttaccctaaggaaaacaaatgagaaactctggtgccttataagacctggggatagacttatttgc

SEQ ID NO: 3745 - DNA, 249 bp, synthetic construct
  misc_feature 1..249: note = CpG depleted AAV elements
  source 1..249: mol_type = other DNA
cccttacccagggtgcccagggctctcatttgcatgtcccacccaacaggtaaacctgacaggtcatgctggccaggtacaacctggaggtcagagcaccaaacatacaagccttgtgatgagttccattgcatgaaattctcccaaaggctccaagatggacaggaaagggtgcagttaagtcaccctaagtagaataggtgaaagactctgatgccttataaggcctgtgggtgacttcttctcaac

SEQ ID NO: 3746 - DNA, 244 bp, synthetic construct
  misc_feature 1..244: note = CpG depleted AAV elements
  source 1..244: mol_type = other DNA
caggctctgccccccaggctatttgcatataaccatttccagtaattcccagcagccactgtagctatatttggtagaacaacaagcactttctcaactccagtcaataactacattagttgcattacacattgggctaatataaatagaggttaaatctctaggtcatttaagagaagttggcctatgtgtacagacatttgttccaggggctttaaatagctggtggtggaactcaatattc

SEQ ID NO: 3747 - DNA, 3006 bp, synthetic construct
  misc_feature 1..3006: note = CpG depleted AAV elements
  source 1..3006: mol_type = other DNA
atggctccagctgccaagagagtgaagctggactctagacaagagatcaagaggatcaacaagattagaagaaggctggtcaaggacagcaacaccaagaaggcaggcaagacaggccccatgaagaccctgcttgtcagagtgatgacccctgacctgagagagagactggaaaacctgagaaagaagcctgagaacatccctcagcctatctccaacaccagcagagccaacctgaacaagctgctgacagactacacagagatgaagaaagccatcctgcatgtgtactgggaagagttccagaaagaccctgtgggcctgatgagcagagtggcccagcctgccagcaagaagattgaccagaacaaactgaagccagagatggatgagaagggcaacctgaccacagctggctttgcctgctctcagtgtggccagcctctgtttgtgtacaagctggaacaagtgtctgagaaaggcaaggcctacaccaactactttggcagatgcaatgtggctgagcatgagaagctgatcctgctggcccagctgaagcctgaaaaggactctgatgaggctgtgacctacagcctgggcaagtttggacagagagccctggacttctacagcatccatgtgaccaaagaaagcacacaccctgtgaagcccctggctcagattgctggcaacagatatgcctctggacctgtgggcaaagccctgtctgatgcctgcatgggaaccattgccagctttctgagcaagtaccaggacatcatcattgagcaccagaaagtggtcaaggggaaccagaagaggctggaatctctgagagagctggctggcaaagagaacctggaatacccctctgtgaccctgcctcctcagcctcacaccaaagagggtgttgatgcctacaatgaagtgattgccagagtcaggatgtgggtcaacctgaatctgtggcagaagctgaagctgagcagggatgatgccaagcctctgctgagactgaagggcttccctagcttcccactggtggaaaggcaggctaatgaagtggattggtgggacatggtctgcaatgtgaagaaactgatcaatgagaagaaagaggatggcaaggttttctggcagaacctggctggctacaagaggcaagaagccctgaggccttacctgtcctctgaggaagataggaagaaggggaagaagtttgccagataccagctgggagatctgctgctgcacctggaaaagaaacatggggaagattggggcaaagtgtatgatgaggcctgggagagaattgacaagaaggtggaaggcctgagcaagcacattaagctggaagaggaaagaagatctgaggatgcccagagcaaggctgccctgactgattggctgagagccaaggccagctttgtgattgagggcctgaaagaggctgacaaggatgagttctgtagatgtgaactgaagctgcaaaagtggtatggggacctgaggggcaagccctttgccattgaggcagagaacagcatcctggacatcagtggcttcagcaagcagtacaactgtgccttcatttggcagaaggatggggttaagaagctcaacctgtacctgatcatcaactacttcaaaggtggcaagctgaggttcaagaagatcaagccagaggcctttgaggccaacaggttctacacagtgatcaacaaaaagtctggggagattgtgcccatggaagtgaacttcaactttgatgatcccaacctcatcatcctgccactggcctttggcaagagacagggcagagaattcatctggaatgacctgctgagcctggaaacaggcagcctgaaactggccaatggcagagtgattgagaaaaccctgtacaacagaaggaccagacaggatgagcctgcactgtttgtggccctgacctttgagagaagggaagtgctggatagcagcaacatcaagcccatgaacctgattggagtggacagaggggagaatatccctgctgtcattgccctgacagaccctgagggctgtcccctgagcagattcaaggactccctgggcaaccccacacacattctgagaattggggagagctacaaagagaagcagagaaccatccaggccaagaaagaagtggaacagaggagagctggaggctactctaggaagtatgccagcaaagccaagaatctggctgatgacatggtcagaaacacagccagggacctgctgtactatgctgtgacccaggatgccatgctgatctttgagaatctgagcagaggatttgggagacaaggcaagaggaccttcatggctgaaagacagtacaccaggatggaagattggctgactgccaaactggcctatgagggactgagcaagacctacctgtccaagacactggcccagtatacctccaagacctgcagcaattgtggcttcaccatcacctctgcagactatgacagagtgctggaaaagctcaagaaaacagccacaggctggatgaccaccatcaatgggaaagagctgaaggttgagggccagatcacctactacaacagatacaaaaggcagaatgtggttaaggacctgtctgtggaactggacagactgtctgaggaatctgtgaacaatgacatcagcagctggaccaagggcagatctggggaagctctgagcctgctgaagaagagattcagccacagacctgtgcaagagaagtttgtgtgtctgaactgtggctttgagacacatgctgatgaacaggctgctctgaacattgccagaagctggctgttcctgagaagccaagagtacaagaagtaccagaccaacaagaccacaggcaacactgacaagagggcctttgtggaaacctggcagagcttctacagaaagaaactcaaagaagtctggaagcctgctgtgggcagccctgcagctaaaagggtcaagctggactga

SEQ ID NO: 3748 - DNA, 208 bp, synthetic construct
  misc_feature 1..208: note = CpG depleted AAV elements
  source 1..208: mol_type = other DNA
ctgtgccttctagttgccagccatctgttgtttgcccctccccagtgccttccttgaccctggaaggtgccactcccactgtcctttcctaataaaatgaggaaattgcatcacattgtctgagtaggtgtcattctattctggggggtggggtggggcaggacagcaagggggaggattgggaagagaatagcaggcatgctgggga

SEQ ID NO: 3749 - DNA, 129 bp, synthetic construct
  misc_feature 1..129: note = CpG depleted AAV elements
  source 1..129: mol_type = other DNA
tgctcactcactcactcactgaggcctgcagagcaaagctctgcagtctggggacctttggtccccaggcctcagtgagtgagtgagtgagcagagagggagtggccaactccatcactaggggttcct

SEQ ID NO: 3750 - DNA, 131 bp, synthetic construct
  misc_feature 1..131: note = CpG depleted AAV elements
  source 1..131: mol_type = other DNA
aggaacccctagtgatggagttggccactccctctctgctcactcactcactcactgaggcctggggaccaaaggtccccagactgcagagctttgctctgcaggcctcagtgagtgagtgagtgagcaga

SEQ ID NO: 3751 - DNA, 99 bp, synthetic construct
  misc_feature 1..99: note = Scaffold 320
  source 1..99: mol_type = other DNA
actgggccttctatctgattactctgaggcccatcaccagcgactatgtcgtagtgggtaaagccgcttagggacttcggtccctaagaggcatcagag

SEQ ID NO: 3752 - DNA, 97 bp, synthetic construct
  misc_feature 1..97: note = Scaffold 321
  source 1..97: mol_type = other DNA
actgggccttctatctgattactctgaggcccatcaccagcgactatgtcgtagtgggtaaagcccttagggacttcggtccctaagggcatcagag

SEQ ID NO: 3753 - DNA, 99 bp, synthetic construct; identical to SEQ ID NO: 2381
  misc_feature 1..99: note = Scaffold 322
  source 1..99: mol_type = other DNA

SEQ ID NO: 3754 - DNA, 89 bp, synthetic construct
  misc_feature 1..89: note = Scaffold 323
  source 1..89: mol_type = other DNA
actgggccttctatctgattactctgaggcccatcaccagcgactatgtcgtagtgggtaaagctccctcttcggagggagcatcagag

SEQ ID NO: 3755 - DNA, 97 bp, synthetic construct; identical to SEQ ID NO: 2383
  misc_feature 1..97: note = Scaffold 324
  source 1..97: mol_type = other DNA

SEQ ID NO: 3756 - DNA, 99 bp, synthetic construct; identical to SEQ ID NO: 2384
  misc_feature 1..99: note = Scaffold 325
  source 1..99: mol_type = other DNA

SEQ ID NO: 3757 - DNA, 89 bp, synthetic construct; identical to SEQ ID NO: 2385
  misc_feature 1..89: note = Scaffold 326
  source 1..89: mol_type = other DNA

SEQ ID NO: 3758 - DNA, 97 bp, synthetic construct
  misc_feature 1..97: note = Scaffold 327
  source 1..97: mol_type = other DNA
actgggccttctatctgattactctgaggcccatcaccagcgactatgtcgtagtgggtaaagcccttagggaggaaactccctaagggcatcagag

SEQ ID NO: 3759 - DNA, 99 bp, synthetic construct; identical to SEQ ID NO: 2387
  misc_feature 1..99: note = Scaffold 328
  source 1..99: mol_type = other DNA

SEQ ID NO: 3760 - DNA, 89 bp, synthetic construct
  misc_feature 1..89: note = Scaffold 329
  source 1..89: mol_type = other DNA
actgggccttctatctgattactctgaggcccatcaccagcgactatgtcgtagtgggtaaagctccctggaaacagggagcatcagag

SEQ ID NO: 3761 - DNA, 98 bp, synthetic construct
  misc_feature 1..98: note = Scaffold 330
  source 1..98: mol_type = other DNA
actgggccttctatctgattactctgaggcccatcaccagcgactatgtcgtagtgggtaaagcccttagggacttcaggtccctaagggcatcagag

SEQ ID NO: 3762 - DNA, 100 bp, synthetic construct; identical to SEQ ID NO: 2390
  misc_feature 1..100: note = Scaffold 331
  source 1..100: mol_type = other DNA

SEQ ID NO: 3763 - DNA, 90 bp, synthetic construct
  misc_feature 1..90: note = Scaffold 332
  source 1..90: mol_type = other DNA
actgggccttctatctgattactctgaggcccatcaccagcgactatgtcgtagtgggtaaagctccctcttcaggagggagcatcagag

SEQ ID NO: 3764 - DNA, 97 bp, synthetic construct; identical to SEQ ID NO: 2392
  misc_feature 1..97: note = Scaffold 333
  source 1..97: mol_type = other DNA

SEQ ID NO: 3765 - DNA, 99 bp, synthetic construct; identical to SEQ ID NO: 2393
  misc_feature 1..99: note = Scaffold 334
  source 1..99: mol_type = other DNA

SEQ ID NO: 3766 - DNA, 89 bp, synthetic construct; identical to SEQ ID NO: 2394
  misc_feature 1..89: note = Scaffold 335
  source 1..89: mol_type = other DNA

SEQ ID NO: 3767 - DNA, 97 bp, synthetic construct
  misc_feature 1..97: note = Scaffold 336
  source 1..97: mol_type = other DNA
actgggccttctatctgattactctgaggcccatcaccaggcactatgtgctagtgggtaaagcccttagggaggaaactccctaagggcatcagag

SEQ ID NO: 3768 - DNA, 99 bp, synthetic construct; identical to SEQ ID NO: 2396
  misc_feature 1..99: note = Scaffold 337
  source 1..99: mol_type = other DNA

SEQ ID NO: 3769 - DNA, 89 bp, synthetic construct
  misc_feature 1..89: note = Scaffold 338
  source 1..89: mol_type = other DNA
actgggccttctatctgattactctgaggcccatcaccaggcactatgtgctagtgggtaaagctccctggaaacagggagcatcagag

SEQ ID NO: 3770 - DNA, 98 bp, synthetic construct
  misc_feature 1..98: note = Scaffold 339
  source 1..98: mol_type = other DNA
actgggccttctatctgattactctgaggcccatcaccaggcactatgtgctagtgggtaaagcccttagggacttcaggtccctaagggcatcagag

SEQ ID NO: 3771 - DNA, 100 bp, synthetic construct; identical to SEQ ID NO: 2399
  misc_feature 1..100: note = Scaffold 340
  source 1..100: mol_type = other DNA

SEQ ID NO: 3772 - DNA, 90 bp, synthetic construct
  misc_feature 1..90: note = Scaffold 341
  source 1..90: mol_type = other DNA
actgggccttctatctgattactctgaggcccatcaccaggcactatgtgctagtgggtaaagctccctcttcaggagggagcatcagag

SEQ ID NO: 3773 - DNA, 579 bp, synthetic construct
  misc_feature 1..579: note = Promoter variant
  source 1..579: mol_type = other DNA
tggttgctgactaattgagatgcatgctttgcatacttctgcctgctggggagcctggggactttccacaccgggagttatttttagagcgatatggcgacggcccttggcagtacatcaattggaaagtcccgttagtgctattggctggccagccaatagctggttgctgactaattgagatgcatgctttgcatacttctgcctgctggggagcctggggactttccacaccgtgaggaatggtgccaggcatatcgggtttgatgtactgccaagccagccaatagccgctctaaaaataactcccccgtcgccatatttgggtgtccgctctaaaaataactcccggccgtcgccatatgggcccctccctggggacagccccttggaaagtcccgttagtgccaggcgggccatttaccgtgggagttatttttagagcgtagggaaacctgaagccccccattgacgtcaatgggcaggttttttatatagtccggcttcaggtttccctacaaggcctggggacaacccgatatgcctggcaggttttttatatagtccaccaagtcagca

SEQ ID NO: 3774 - DNA, 724 bp, synthetic construct
  misc_feature 1..724: note = Promoter variant
  source 1..724: mol_type = other DNA
cacccatgcctcctcaggtaccccctgccccccacagctcctctcctgtgccttgtttcccagccatgcgttctcctctataaatacccgctctggtatttggggttggcagctgttgctgccagggagatggttgggttgacatgcggctcctgacaaaacacaaacccctggtgtgtgtgggcgtgggtggtgtgagtagggggatgaatcagggagggggcgggggacccagggggcaggagccacacaaagtctgtgcgggggtgggagcgcacatagcaattggaaactgaaagcttatcagaccctttctggaaatcagcccactgtttataaacttgaggccccaccctcgagataaccagggctgaaagaggcccgcctgggggctgcagacatgcttgctgcctgccctggcgaaggattggcaggcttgcccgtcacaggacccccgctggctgactcaggggcgcaggcctcttgcgggggagctggcctccccgcccccacggccacgggccgccctttcctggcaggacagcgggatcttgcagctgtcaggggaggggaggcgggggctgatgtcaggagggatacaaatagtgccgacggctgggggccctgtctcccctcgccgcatccactctccggccggccgcctgcccgccgcctcctccgtgcgcccgccagcctcgcccgcgccgtcaccctctggctaact

SEQ ID NO: 3775 - DNA, 450 bp, synthetic construct
  misc_feature 1..450: note = Promoter variant
  source 1..450: mol_type = other DNA
ctagactagcatgctgcccatgtaaggaggggacacccgagatgcctggttataattaacccagacatgtggctgccccccacctgctgcctctaaaaataaccctgcatgccatgttcccggcgaagggcccgccagctagactcagcacttagtttaggaaccagtgagcaagtcagcgcccatacaaggccatggggctgggcaagctgcacgcctgggtccggggtcccgggcaacgagctgaaagcaaggcctggccccccccaaccagctgtccccttggggcagggcacggtgctcatctgctctcaggggcccctccctggggacagcccctcctggctagtcacaccctgtaggctcctctatataacccaggggcacaggggctgccctcattctaccaccacctccacagcacagacagacactcaggagccagccagc

SEQ ID NO: 3776 - DNA, 742 bp, synthetic construct
  misc_feature 1..742: note = Promoter variant
  source 1..742: mol_type = other DNA
tcgagcgttacccttcagattaaaaataactgaggtaagggcctgggtaggggaggtggtgtgagacgctcctgtctctcctctatctgcccatcggccctttggggaggaggaatgtgcccaaggactaaaaaaaggccatggagccagaggggcgagggcaacagacctttcatgggcaaaccttggggccctgctgtctagcatgccccactacgggtctaggctgcccatgtaaggaggcaaggcctggggacacccgagatgcctggttataattaacccagacatgtggctgcccccccccccccaacacctgctgcctctaaaaataaccctgtccctggtggatcccctgcatgcgaagatcttcgaacaaggctgtgggggactgagggcaggctgtaacaggcttgggggccagggcttatacgtgcctgggactcccaaagtattactgttccatgttcccggcgaagggccagctgtcccccgccagctagactcagcacttagtttaggaaccagtgagcaagtcagcccttggggcagcccatacaaggccatggggctgggcaagctgcacgcctgggtccggggtgggcacggtgcccgggcaacgagctgaaagctcatctgctctcaggggcccctccctggggacagcccctcctggctagtcacaccctgtaggctcctctatataacccaggggcacaggggctgcccctctggctaacta

SEQ ID NO: 3777 - DNA, 776 bp, synthetic construct
  misc_feature 1..776: note = Promoter variant
  source 1..776: mol_type = other DNA
ggcgttctagaagctgcatgtctaagctagacccttcagattaaaaataactgaggtaagggcctgggtaggggaggtggtgtgagacgctcctgtctctcctctatctgcccatcggccctttggggaggaggaatgtgcccaaggactaaaaaaaggccatggagccagaggggcgagggcaacagacctttcatgggcaaaccttggggccctgctgtctagcatgccccactacgggtctaggctgcccatgtaaggaggcaaggcctggggacacccgagatgcctggttataattaacccagacatgtggctgcccccccccccccaacacctgctgcctctaaaaataaccctgtccctggtggatcccctgcatgcgaagatcttcgaacaaggctgtgggggactgagggcaggctgtaacaggcttgggggccagggcttatacgtgcctgggactcccaaagtattactgttccatgttcccggcgaagggccagctgtcccccgccagctagactcagcacttagtttaggaaccagtgagcaagtcagcccttggggcagcccatacaaggccatggggctgggcaagctgcacgcctgggtccggggtgggcacggtgcccgggcaacgagctgaaagctcatctgctctcaggggcccctccctggggacagcccctcctggctagtcacaccctgtaggctcctctatataacccaggggcacaggggctgccctcattctaccaccacctccacagcac

SEQ ID NO: 3778 - DNA, 358 bp, synthetic construct
  misc_feature 1..358: note = Promoter variant
  source 1..358: mol_type = other DNA
caccgcggtggcggccgtccgccctcggcaccatcctcacgacacccaaatatggcgacgggtgaggaatggtggggagttatttttagagcggtgaggaaggtgggcaggcagcaggtgttggcgctctaaaaataactcccgggagttatttttagagcggaggaatggtggacacccaaatatggcgacggttcctcacccgtcgccatatttgggtgtccgccctcggccggggccgcattcctgggggccgggcggtgctcccgcccgcctcgataaaaggctccggggccggcggcggcccacgagctacccggaggagcgggaggcgccaagctctagaactagtggatct

SEQ ID NO: 3779 - DNA, 495 bp, synthetic construct
  misc_feature 1..495: note = Enhancer variant
  source 1..495: mol_type = other DNA
ctcactccccgcccaggcagcaaggagcccacaccctcatgcccctcagcttcagcccccacctccaggaggccctacccacgctcatgaccttgctattctgggccttgtgtcctgtagggagatggacaggagacagctgggcttccaggccacccaggcggggggctagccgagggaagcctgctggctctcctgcttgctctaatttctggggctccccaaaccttggcctcaggagactggggataggaccggccttgaaagtgggggaagctttggagagccgggtgctgggttcttagtgagatggccagtgaaggctgtggtgccccgaggtaagcagggcctgatcccctcctaatcttccagcagcaactggtgctctgaggctccccctcccccagccctgccagccttcagggacctgccttccaaagatgggcaggggagggggacgaggacacccacccactcctcagaccagcatgtctt

SEQ ID NO: 3780 - DNA, 344 bp, synthetic construct
  misc_feature 1..344: note = Enhancer variant
  source 1..344: mol_type = other DNA
ccctccagatgggtttcctggaatctagatttcccaggttccaaaggacacccgagtctcatgcctggaactcagtgagactaattcacctctcctctgccctaatcttcatctccagccagaagccaacagatcccaggggactggagccacaggggctgcacctgtttaccgggtatttttaggatggttgatgaacacataatacccaccctatagtcagagaaagacaatgcctgctatgttaatcctgtggctattatagtctgtcatctcatgggttggggcaggacactgaccctctcagaggccagagagaggcctcgcaagcaggaggttaggga

SEQ ID NO: 3781 - DNA, 429 bp, synthetic construct
  misc_feature 1..429: note = Enhancer variant
  source 1..429: mol_type = other DNA
atggagacaatccatgaattcctgagatgcttggctggtattagattttatgggcagctgcttattcttagggctctgcttctccaaagacactgaggaagtccaaaggaacaccagctggcgaagagccacctccaggcccatctgtccatcatcagcctccaggaatgccagtgtccagagggcaccaggtctgcgtctgtctccctgggatgtgccttgtccttggtgggcatttggcagtgatcatgcctccctgtctccctcagagatccaactgtccccattgtggggccctaccttccaaggccggtttacacctcctgccaagctccggggcctgcccccagcctgcctcactgacaaatgccagaccaaggggtcccacgtcaggcaagaggcctcagcctgtgctctgacacccctcag

SEQ ID NO: 3782 - DNA, 434 bp, synthetic construct
  misc_feature 1..434: note = Enhancer variant
  source 1..434: mol_type = other DNA
ttctgagtcctctaaggtccctcactcccaactcagccccatgtcctgtcaattcccactcagtgtctgatctccttctcctcacctttcccatctcccgtttgacccagcttcctgagctctcctcccattcccctttttggagtcctcctcctctcccagaacccagtaataagtgggctcctccctggcctggacccccgtggtaaccctataaggcgaggcagctgctgtctgaggcagggaggggctggtgtgggaggctaagggcagctgctaagtttagggtggctccttctctcttcttagagacaacaggtggctggggcctcagtgcccagaaaagaaaatgtcttagaggtatcggcatgggcctggaggaggggggacagggcagggggaggcatcttcctcaggacatcgggtcctagagg

SEQ ID NO: 3783 - DNA, 171 bp, synthetic construct
  misc_feature 1..171: note = Enhancer variant
  source 1..171: mol_type = other DNA
ctctaaggtccctcactcccaactcagccccatgtcctgtcaattcccactcagtgtctgatctccttctcctcacctttcccatctcccgtttgacccaagcttcctgagctctcctcccattcccctttttggagtcctcctcctctcccagaacccagtaataagtgg

SEQ ID NO: 3784 - DNA, 51 bp, synthetic construct
  misc_feature 1..51: note = Enhancer variant
  source 1..51: mol_type = other DNA
tggcctggacccccgtggtaaccctataaggcgaggcagctgctgtctgag

SEQ ID NO: 3785 - DNA, 60 bp, synthetic construct
  misc_feature 1..60: note = Enhancer variant
  source 1..60: mol_type = other DNA
gcagggaggggctggtgtgggaggctaagggcagctgctaagtttagggtggctccttct

SEQ ID NO: 3786 - DNA, 41 bp, synthetic construct
  misc_feature 1..41: note = Enhancer variant
  source 1..41: mol_type = other DNA
aggaggggggacagggcagggggaggcatcttcctcaggac

SEQ ID NO: 3787 - DNA, 120 bp, synthetic construct
  misc_feature 1..120: note = Enhancer variant
  source 1..120: mol_type = other DNA
gcagggaggggctggtgtgggaggctaagggcagctgctaagtttagggtggctccttctctcttcttagagacaacaggtggctggggcctcagtgcccagaaaagaaaatgtcttaga

SEQ ID NO: 3788 - DNA, 474 bp, synthetic construct
  misc_feature 1..474: note = Enhancer variant
  source 1..474: mol_type = other DNA
gactaggaataaatcacatatcctcaatccctggacaacttgtttacttctagtgttagttttttcttaaaaaaaaaattgaaatcattctgaggctggaatactttggacatgcccagcagttcctggcagttcccacagaagcattacctcatgactggagtgggtaaagcatactgtgggctatggataagactgacattaaccacaagcatgtttggcagcagactggtgctttacaagctccatgttcagcaggagctgcaaagtgttcctccaaaccaatatttgtcattcttggattctatttaggaggtcctgttactcacatgtttcaatatcagcagaagccagtttccctgtggtaccgaagtggatcctgatgaatttacccttgtaagtaaaaaaaatgatgttatacccaaagcttgaagtacgtagtggggatgccactgaaataattcagacatgctt

SEQ ID NO: 3789 - DNA, 519 bp, synthetic construct
  misc_feature 1..519: note = Enhancer variant
  source 1..519: mol_type = other DNA
gtgctcatagctccaccttttgttcctaatatggtctttccagctccctccaccccatcattgttctcctgggggaacacagggtgagacgctttgatgaactgacatcaccagcaaaaaaaatatctagcaacagctgaggctgattttagacaatggaaagtgggggagggaagaggttctccctgaccctgaaactttccactcattctgggcagctctatggatgttttaaaagaagaggaagaggggagggaagaacattgaaatagagaagtgtactttggcaattctaggttggcagtttgcatccagggggtcctggttgcctttcagcttcccgtttcactctcccccagactgtgttgaatgctggtcaaactccgttagttgagttttagcttttgattcctggtattcaaggagcttgggcacagggaagaggggaggtcactcatgatccttaacaattctcccagatccccagatcaaattgctgtgctattctgggagtctccg

SEQ ID NO: 3790 - DNA, 372 bp, synthetic construct
  misc_feature 1..372: note = Enhancer variant
  source 1..372: mol_type = other DNA
atcgtgtgtcagaggtttgtgtcagcttcccagcaagggaaccagaaaggaaaaggaaccggttcctcatgcttcctaggggaatgcatgcatatctgaagagaagggaatcttatataaggctgtttagctaagggcagccaccagccaggtgagccttacagaagcacagggctgggtgtctgcagttccctagcagattaacctgggtcacagtgactcagagctccagcatgcgagttccaggtgtggaactgagcaagtacagatctgcttttgctccacttgggagtatttttccttcttagtgagcatgggcagcctcctggccagggaagtctggcactgtctgggcctgacagggaaaccctg

SEQ ID NO: 3791 - DNA, 256 bp, synthetic construct
  misc_feature 1..256: note = Enhancer variant
  source 1..256: mol_type = other DNA
ccacagcagttgggggcatttatgggccttcctataaacttctgagagggtaactttatcctgcttctttcagccaagtatcctcctccagcagctggtcacaaagctggttaatctcccagagtgctcagcttaaaacccgtgactcacagcacagccagtgtgggggagggggtggctgcctccaatacgtggcgcccagagtcagctgttctggggccttctctggtttctccaactgagtcctgaggtttgg

SEQ ID NO: 3792 - DNA, 206 bp, synthetic construct
  misc_feature 1..206: note = Enhancer variant
  source 1..206: mol_type = other DNA
ctttactccttttagacttctagttcacagggtccctctggaagtcacgagttcttgatggacttaatttcagaaattaaactcactttctgattacaactccctctccttgtaattcccatgtgctcactccctcttcaagctgagggagactcctagacccctgattcctgaattttttctttcttttttgttttttctttttt

SEQ ID NO: 3793 - DNA, 255 bp, synthetic construct
  misc_feature 1..255: note = Enhancer variant
  source 1..255: mol_type = other DNA
tattattaattgttttttgcttttggttttctccagcaactttactctgatgtctaggtataattttctttatatttttctgggcttttattgaacctgtgctttaagtcttttgtcagttttagaccatttcttgaccattatgtcctaaaacattgcttctgtcccattcttcctcacttgtccttatgggacacaaattatacattttttggaccattatattttttaacatcatttttttgtttgttttcc

SEQ ID NO: 3794 - DNA, 277 bp, synthetic construct
  misc_feature 1..277: note = Enhancer variant
  source 1..277: mol_type = other DNA
gtaaaaaacaggggccctggagagggactgtgggcaatgcccccgagtccccggggcctgggaagaacagaggctgccaagtgcagggggtggtggggaggggaagaccctggagtaacaatccctgctgtgtccacttggttcccacggactcaagccaagccaaagcactgcccggaccagtcctggtgctggcctcagactcctcctttctttctcagaaccccattcccctcggcttccaaccaattcagggcccccagagtccaggccccta

SEQ ID NO: 3795 - DNA, 660 bp, synthetic construct
  misc_feature 1..660: note = Enhancer variant
  source 1..660: mol_type = other DNA
ggctctgtgagctaaatcgggcagcagctgtcaccaccagggggtgtgggacagctgtccccctccccccgcacctgccctgcgcctgcctcttgaccacagcccctccctctccctttctgcagcctgggggtgtggagaggccactggcatctgtgcggggcgccccagccccctcagctctgggacaggcctggccgggtgccctggggcaagcggtagccctctgagtcctgaggcgctcccctgggaagagcagtcccagcgggtgggggcacaggcgctctgcactgtgaggggcagacagtaagtgcttagttgatgcaatgacctggtctgtcctgcccgctctcacctgccagaatatgggggttggggcaggagggagtgggagcaggaggaggtcagctggcccctctccccccacccccagcgcccccagctcctcctcccggggctcctcactccggaccttatttggccatagcccaggacgcacctgggggccacagccccgcctgccactcaggcccaagaatagcaacactcaggcccccgccagtctgtctgggacctgcgatgggacaggcgacaggcacagggtggcagggaggggcccaggggcactgagagaaggggagagacacagacagaggggag

SEQ ID NO: 3796 - DNA, 221 bp, synthetic construct
  misc_feature 1..221: note = Enhancer variant
  source 1..221: mol_type = other DNA
tgacggggctggcaacgccccccacagcggcacaggcggataaaccctctggggagggagttcagtcccagcgggaggggcccttcccacccgggagctcgccccaaaccgggtggagagggggtggggggggggtgcagatcgcggcgcctccctgccctctggccctgctgagactccaccgcccaccccacctcccggtagcagaaggggcagaagca

SEQ ID NO: 3797 - DNA, 310 bp, synthetic construct
  misc_feature 1..310: note = Enhancer variant
  source 1..310: mol_type = other DNA
caggtgaggcttgttaaagcagacttaaataagatccagggccttataacataataccaaaaacgttcaggataccacaaaaaaaaaaatcactcataccaaaaccagaaaaatttcaacttgagtaagaaaagagaatcaacagatgccaaacccaggatgacacagatgttagaattatctgaaaagaattttaagtagctatcataaaattacctcagtgagtaattatgaacatgcttgtaataaatgaaaaatatattttggaactgatgaatacaataaccaaaataaaaacttaatggatgta

SEQ ID NO: 3798 - DNA, 218 bp, synthetic construct
  misc_feature 1..218: note = Enhancer variant
  source 1..218: mol_type = other DNA
tggaagctttcctaacagatgggtttttatagctgctacagcctggcctctatgttagtctttcacctcagggactttctacagctcattactcacccttattcatggcagtctaaggattctggttttatttattttttttggtggggttgggggtgaggggagagataaatctgtttttgattgatcacagtttcatgtaggccaattgcctcttg

SEQ ID NO: 3799 - DNA, 353 bp, synthetic construct
  misc_feature 1..353: note = Enhancer variant
  source 1..353: mol_type = other DNA
ctgagttgggtggggatttggagaagttttatgtccagctggagaattgtatatgcaccaatcagcactctgtgtctagctcagggttcgtggatacaccaatcagcactctgtatctagcctggtggggacttgcagaacttttatttctagctaggggattgtaaatgcaccaatcagcactctgtgtctagctcagggattgtaaatgcaccaatcagcactctgtcaaaacaggccaatcagctctctgtaaaatggaccaatcagctctctgtaaaatggaccaatcagcagcatgtgggtggggccagataaaggaataaaagcaggctgcccaagccagcagaggc

SEQ ID NO: 3800 - DNA, 50 bp, synthetic construct
  misc_feature 1..50: note = Enhancer variant
  source 1..50: mol_type = other DNA
gactgctctgtaggttttggtttacccacccctcctctgtagtaattcac

SEQ ID NO: 3801 - DNA, 395 bp, synthetic construct
  misc_feature 1..395: note = Enhancer variant
  source 1..395: mol_type = other DNA
gcaggttgtgtctgttgacgcaggcagcctgcttttattctcttatctggccccacccacatcctgctgattggtccattttacagagagccgattggtctgttttacagagcgctgattggtccgttttgacagggtgctgattggtgtgtttacaatccctgagctcaagacaaaagttctccacctccccactagattagctagatacagagtgctgactggtgtatttacaaaccctgagctagacacagagtgctgattggtgcatttacaaaccttgagctagatacagagtgtccattggtgtattcacaatcccttagctagacataaagattctccaagttcccaccagactcaggagcccagctagcttcacccagtggatcccg

SEQ ID NO: 3802 - DNA, 382 bp, synthetic construct
  misc_feature 1..382: note = Enhancer variant
  source 1..382: mol_type = other DNA
agctgaagggttttgtcccagcctctgtggccttctatagctggaggagctgggtctgggctctagggggggtgggggttgttctccaccctcgggctggcccccagccgctgagccacaccggttcccccatgccggatgccgcaggggtgaagactctgctctctggggtgggaggctctctgcgatcctggagcgtctgtaggccaacgagagggacagagtgtggcccaaagggttgggcagggtctgtcaggagcccggtcagtgtcaggggaggggcagtgtctggcaccgctggctgccatgctccacccccgcgccacggccttggtgcctgctgctctccctgaccctttcctaaacccaaacagagcatctg

SEQ ID NO: 3803 - DNA, 135 bp, synthetic construct
  misc_feature 1..135: note = Enhancer variant
  source 1..135: mol_type = other DNA
tcaaaaaggacaatgccgggaacaagcagcttcatcagagcagtgagaggcaactggggcggaagcagctgcgtattggagaggaggacgacagcaagattcatcttgcttgggaaacaggctattaatatccca

SEQ ID NO: 3804 - DNA, 326 bp, synthetic construct
  misc_feature 1..326: note = Enhancer variant
  source 1..326: mol_type = other DNA
tgacaacctagggtggggacaagggctctgatgaggggatgagggcacgtgggcagctgtgggggtccgaggaggggatacgcagtctgtggccttgcttaaggaggagcagagacagctgggctccagaattcaagcacttgaccaaccatcatgctgccctcaaaccatgtctcctgtcccagaaacaggtgagggagcagtgaggcctgctcgacagctgggcccgggactctgctccgaaacatgcctgttgctttcttctctctggctacagtttatttcatcctcactcaaggaagccctggtctccgggagaaaggcca

SEQ ID NO: 3805 - DNA, 273 bp, synthetic construct
  misc_feature 1..273: note = Enhancer variant
  source 1..273: mol_type = other DNA
gtctcggagaacttggctggcggtggaacagctgttgcctccactgatcccagagtcagctgtcttcccaatgaggaagccacccttgcagacttaggaacaccaagctgctgctgccagtgccacctaccccagtaaatctggggcctgtgtccagccgtcccccttgagttgaaatccagctcaaatgcatttgattggtggaattgaagttattatcacttatgcatgctggcagaactttcattacccgcatgatttacttacacccta

SEQ ID NO: 3806 - DNA, 148 bp, synthetic construct
  misc_feature 1..148: note = Enhancer variant
  source 1..148: mol_type = other DNA
tgatcaggccacggcggcttctgctggccctgagaacgccctgcctggggctgggtcgggtctgtttggcagcattgcccagattgcaactcatgtgtccttgaacaaagtcaatgtgtttttcctctccagagcccagcaactattt

SEQ ID NO: 3807 - DNA, 80 bp, synthetic construct
  misc_feature 1..80: note = Enhancer variant
  source 1..80: mol_type = other DNA
ggaaaacgctcaaggcgctggtgggccgggactggggggcacggagcccccttgtgccacccagagagcaggacctgcag

SEQ ID NO: 3808 - DNA, 437 bp, synthetic construct
  misc_feature 1..437: note = Enhancer variant
  source 1..437: mol_type = other DNA
aaccggcccctggtgctccaggcaggagtggagcagtccccctctgctgggcctgtggggagtggtggggggaggaagcagccagtaaacagccacaggcctcgcggcacctgctgtcccctccgcacagccgctgacctccctcgcacagggcgccctgctcctcctggccacccgcctgtccggaggctgatggctgggcacacgtgtggccacagctgtgggggccatcaacaccgcctggctgcagggccggtggccagtccctggtgacaaccaaagaaggtgaatgtggcagggtgttcctgtggtgggggtgttcccggctgggggggggggcgttcctgggggggcattcctggggggggcgttcctggtgggggcagcccttccagaccaggctgcccttgggccagcgtgggttgggcatgcccaga

SEQ ID NO: 3809 - DNA, 297 bp, synthetic construct
  misc_feature 1..297: note = Enhancer variant
  source 1..297: mol_type = other DNA
tggtctggtgactgccctgaatgaccagtagcctccttgactcccaaccgactcggaatgcaggaggtcccccaccaactgcccacgtgaccgttggactttgaatcagattcaccttcaactgaccaaaccgggctgctgggcagtgcagattctttcaatgaaaaagcggcctgctgggctggggcttgggcagcgtagggagtgaagccggcaagctgccagggtctcagtgcctcctcttgatcacagcagctgccccagcagtctggactcaggcctggctgagaagaggca

SEQ ID NO: 3810 - protein, 736 aa, synthetic construct
  REGION 1..736: note = AAV serotype
MAADGYLPDWLEDNLSEGIREWWDLKPGAPKPKANQQKQDDGRGLVLPGYKYLGPFNGLDKGEPVNAADAAALEHDKAYDQQLKAGDNPYLRYNHADAEFQERLQEDTSFGGNLGRAVFQAKKRVLEPFGLVEEGAKTAPGKKRPVEQSPQEPDSSSGIGKTGQQPAKKRLNFGQTGDSESVPDPQPLGEPPATPAAVGPTTMASGGGAPMADNNEGADGVGNASGNWHCDSTWLGDRVITTSTRTWALPTYNNHLYKQISSASTGASNDNHYFGYSTPWGYFDFNRFHCHFSPRDWQRLINNNWGFRPKRLNFKLFNIQVKEVTTNDGVTTIANNLTSTVQVFSDSEYQLPYVLGSAHQGCLPPFPADVFMIPQYGYLTLNNGSQAVGRSSFYCLEYFPSQMLRTGNNFTFSYTFEDVPFHSSYAHSQSLDRLMNPLIDQYLYYLNRTQNQSGSAQNKDLLFSRGSPAGMSVQPKNWLPGPCYRQQRVSKTKTDNNNSNFTWTGASKYNLNGRESIINPGTAMASHKDDKDKFFPMSGVMIFGKESAGASNTALDNVMITDEEEIKATNPVATERFGTVAVNLQSSSTDPATGDVHVMGALPGMVWQDRDVYLQGPIWAKIPHTDGHFHPSPLMGGFGLKHPPPQILIKNTPVPANPPAEFSATKFASFITQYSTGQVSVEIEWELQKENSKRWNPEVQYTSNYAKSANVDFTVDNNGLYTEPRPIGTRYLTRPL

SEQ ID NO: 3811 - protein, 738 aa, synthetic construct
  REGION 1..738: note = AAV serotype
MAADGYLPDWLEDNLSEGIREWWDLKPGAPKPKANQQKQDNGRGLVLPGYKYLGPFNGLDKGEPVNAADAAALEHDKAYDQQLQAGDNPYLRYNHADAEFQERLQEDTSFGGNLGRAVFQAKKRVLEPLGLVESPVKTAPGKKRPVEPSPQRSPDSSTGIGKKGQQPAKKRLNFGQTGDSESVPDPQPIGEPPAGPSGLGSGTMAAGGGAPMADNNEGADGVGSSSGNWHCDSTWLGDRVITTSTRTWALPTYNNHLYKQISNGTSGGSTNDNTYFGYSTPWGYFDFNRFHCHFSPRDWQRLINNNWGFRPKRLNFKLFNIQVKEVTQNEGTKTIANNLTSTIQVFTDSEYQLPYVLGSAHQGCLPPFPADVFMIPQYGYLTLNNGSQAVGRSSFYCLEYFPSQMLRTGNNFEFSYNFEDVPFHSSYAHSQSLDRLMNPLIDQYLYYLSRTQSTGGTAGTQQLLFSQAGPNNMSAQAKNWLPGPCYRQQRVSTTLSQNNNSNFAWTGATKYHLNGRDSLVNPGVAMATHKDDEERFFPSSGVLMFGKQGAGKDNVDYSSVMLTSEEEIKTTNPVATEQYGVVADNLQQQNAAPIVGAVNSQGALPGMVWQNRDVYLQGPIWAKIPHTDGNFHPSPLMGGFGLKHPPPQILIKNTPVPADPPTTFNQAKLASFITQYSTGQVSVEIEWELQKENSKRWNPEIQYTSNYYKSTNVDFAVNTEGTYSEPRPIGTRYLTRNL

SEQ ID NO: 3812 - protein, 738 aa, synthetic construct
  REGION 1..738: note = AAV serotype
MAADGYLPDWLEDNLSEGIREWWDLKPGAPKPKANQQKQDNGRGLVLPGYKYLGPFNGLDKGEPVNAADAAALEHDKAYDQQLQAGDNPYLRYNHADAEFQERLQEDTSFGGNLGRAVFQAKKRVLEPLGLVESPVKTAPGKKRPVEPSPQRSPDSSTGIGKKGQQPAKKRLNFGQTGDSESVPDPQPIGEPPAAPSGVGPNTMAAGGGAPMADNNEGADGVGSSSGNWHCDSTWLGDRVITTSTRTWALPTYNNHLYKQISNGTSGGSTNDNTYFGYSTPWGYFDFNRFHCHFSPRDWQRLINNNWGFRPKRLNFKLFNIQVKEVTQNEGTKTIANNLTSTIQVFTDSEYQLPYVLGSAHQGCLPPFPADVFMIPQYGYLTLNNGSQAVGRSSFYCLEYFPSQMLRTGNNFEFSYNFEDVPFHSSYAHSQSLDRLMNPLIDQYLYYLSRTQSTGGTAGTQQLLFSQAGPNNMSAQAKNWLPGPCYRQQRVSTTLSQNNNSNFAWTGATKYHLNGRDSLVNPGVAMATHKDDEERFFPSSGVLMFGKQGAGKDNVDYSSVMLTSEEEIKTTNPVATEQYGVVADNLQQQNAAPIVGAVNSQGALPGMVWQNRDVYLQGPIWAKIPHTDGNFHPSPLMGGFGLKHPPPQILIKNTPVPADPPTTFNQAKLASFITQYSTGQVSVEIEWELQKENSKRWNPEIQYTSNYYKSTNVDFAVNTEGTYSEPRPIGTRYLTRNL

SEQ ID NO: 3813 - protein, 736 aa, synthetic construct
  REGION 1..736: note = AAV serotype
MAADGYLPDWLEDNLSEGIREWWALKPGAPQPKANQQHQDNARGLVLPGYKYLGPGNGLDKGEPVNAADAAALEHDKAYDQQLKAGDNPYLKYNHADAEFQERLKEDTSFGGNLGRAVFQAKKRLLEPLGLVEEAAKTAPGKKRPVEQSPQEPDSSAGIGKSGAQPAKKRLNFGQTGDTESVPDPQPIGEPPAAPSGVGSLTMASGGGAPVADNNEGADGVGSSSGNWHCDSQWLGDRVITTSTRTWALPTYNNHLYKQISNSTSGGSSNDNAYFGYSTPWGYFDFNRFHCHFSPRDWQRLINNNWGFRPKRLNFKLFNIQVKEVTDNNGVKTIANNLTSTVQVFTDSDYQLPYVLGSAHEGCLPPFPADVFMIPQYGYLTLNDGSQAVGRSSFYCLEYFPSQMLRTGNNFQFSYEFENVPFHSSYAHSQSLDRLMNPLIDQYLYYLSKTINGSGQNQQTLKFSVAGPSNMAVQGRNYIPGPSYRQQRVSTTVTQNNNSEFAWPGASSWALNGRNSLMNPGPAMASHKEGEDRFFPLSGSLIFGKQGTGRDNVDADKVMITNEEEIKTTNPVATESYGQVATNHQSAQAQAQTGWVQNQGILPGMVWQDRDVYLQGPIWAKIPHTDGNFHPSPLMGGFGMKHPPPQILIKNTPVPADPPTAFNKDKLNSFITQYSTGQVSVEIEWELQKENSKRWNPEIQYTSNYYKSNNVEFAVNTEGVYSEPRPIGTRYLTRNL

SEQ ID NO: 3814 - protein, 742 aa, synthetic construct
  REGION 1..742: note = AAV serotype
MAADGYLPDWLEDNLSEGIREWWALKPGAPQPKANQQHQDNARGLVLPGYKYLGPGNGLDKGEPVNAADAAALEHDKAYDQQLKAGDNPYLKYNHADAEFQERLKEDTSFGGNLGRAVFQAKKRLLEPLGLVEEAAKTAPGKKRPVEQSPQEPDSSAGIGKSGAQPAKKRLNFGQTGDTESVPDPQPIGEPPAAPSGVGSLTMASGGGAPVADNNEGADGVGSSSGNWHCDSQWLGDRVITTSTRTWALPTYNNHLYKQISNSTSGGSSNDNAYFGYSTPWGYFDFNRFHCHFSPRDWQRLINNNWGFRPKRLNFKLFNIQVKEVTDNNGVKTIANNLTSTVQVFTDSDYQLPYVLGSAHEGCLPPFPADVFMIPQYGYLTLNDGSQAVGRSSFYCLEYFPSQMLRTGNNFQFSYEFENVPFHSSYAHSQSLDRLMNPLIDQYLYYLSKTINGSGQNQQTLKFSVAGPSNMAVQGRNYIPGPSYRQQRVSTTVTQNNNSEFAWPGASSWALNGRNSLMNPGPAMASHKEGEDRFFPLSGSLIFGKQGTGRDNVDADKVMITNEEEIKTTNPVATESYGQVATNHQSAQRGDLTTPQAQTGWVQNQGILPGMVWQDRDVYLQGPIWAKIPHTDGNFHPSPLMGGFGMKHPPPQILIKNTPVPADPPTAFNKDKLNSFITQYSTGQVSVEIEWELQKENSKRWNPEIQYTSNYYKSNNVEFAVNTEGVYSEPRPIGTRYLTRNL

SEQ ID NO: 3815 - protein, 742 aa, synthetic construct
  REGION 1..742: note = AAV serotype
MAADGYLPDWLEDNLSEGIREWWALKPGAPQPKANQQHQDNARGLVLPGYKYLGPGNGLDKGEPVNAADAAALEHDKAYDQQLKAGDNPYLKYNHADAEFQERLKEDTSFGGNLGRAVFQAKKRLLEPLGLVEEAAKTAPGKKRPVEQSPQEPDSSAGIGKSGAQPAKKRLNFGQTGDTESVPDPQPIGEPPAAPSGVGSLTMASGGGAPVADNNEGADGVGSSSGNWHCDSQWLGDRVITTSTRTWALPTYNNHLYKQISNSTSGGSSNDNAYFGYSTPWGYFDFNRFHCHFSPRDWQRLINNNWGFRPKRLNFKLFNIQVKEVTDNNGVKTIANNLTSTVQVFTDSDYQLPYVLGSAHEGCLPPFPADVFMIPQYGYLTLNDGSQAVGRSSFYCLEYFPSQMLRTGNNFQFSYEFENVPFHSSYAHSQSLDRLMNPLIDQYLYYLSKTINGSGQNQQTLKFSVAGPSNMAVQGRNYIPGPSYRQQRVSTTVTQNNNSEFAWPGASSWALNGRNSLMNPGPAMASHKEGEDRFFPLSGSLIFGKQGTGRDNVDADKVMITNEEEIKTTNPVATESYGQVATNHQSAQRGDLSTPQAQTGWVQNQGILPGMVWQDRDVYLQGPIWAKIPHTDGNFHPSPLMGGFGMKHPPPQILIKNTPVPADPPTAFNKDKLNSFITQYSTGQVSVEIEWELQKENSKRWNPEIQYTSNYYKSNNVEFAVNTEGVYSEPRPIGTRYLTRNL

SEQ ID NO: 3816 - protein, 745 aa, synthetic construct
  REGION 1..745: note = AAV serotype
MAADGYLPDWLEDNLSEGIREWWALKPGAPQPKANQQHQDNARGLVLPGYKYLGPGNGLDKGEPVNAADAAALEHDKAYDQQLKAGDNPYLKYNHADAEFQERLKEDTSFGGNLGRAVFQAKKRLLEPLGLVEEAAKTAPGKKRPVEQSPQEPDSSAGIGKSGAQPAKKRLNFGQTGDTESVPDPQPIGEPPAAPSGVGSLTMASGGGAPVADNNEGADGVGSSSGNWHCDSQWLGDRVITTSTRTWALPTYNNHLYKQISNSTSGGSSNDNAYFGYSTPWGYFDFNRFHCHFSPRDWQRLINNNWGFRPKRLNFKLFNIQVKEVTDNNGVKTIANNLTSTVQVFTDSDYQLPYVLGSAHEGCLPPFPADVFMIPQYGYLTLNDGSQAVGRSSFYCLEYFPSQMLRTGNNFQFSYEFENVPFHSSYAHSQSLDRLMNPLIDQYLYYLSKTINGSGQNQQTLKFSVAGPSNMAVQGRNYIPGPSYRQQRVSTTVTQNNNSEFAWPGASSWALNGRNSLMNPGPAMASHKEGEDRFFPLSGSLIFGKQGTGRDNVDADKVMITNEEEIKTTNPVATESYGQVATNHQSAQGPGRGDQTTLQAQTGWVQNQGILPGMVWQDRDVYLQGPIWAKIPHTDGNFHPSPLMGGFGMKHPPPQILIKNTPVPADPPTAFNKDKLNSFITQYSTGQVSVEIEWELQKENSKRWNPEIQYTSNYYKSNNVEFAVNTEGVYSEPRPIGTRYLTRNL

SEQ ID NO: 3817 - DNA, 130 bp, synthetic construct; identical to SEQ ID NO: 17
  misc_feature 1..130: note = 5' ITR
  source 1..130: mol_type = other DNA

SEQ ID NO: 3818 - DNA, 414 bp, synthetic construct; identical to SEQ ID NO: 3620
  misc_feature 1..414: note = Enhancer + core promoter
  source 1..414: mol_type = other DNA

SEQ ID NO: 3819 - DNA, 314 bp, synthetic construct; identical to SEQ ID NO: 3621
  misc_feature 1..314: note = Enhancer + core promoter
  source 1..314: mol_type = other DNA

SEQ ID NO: 3820 - DNA, 324 bp, synthetic construct; identical to SEQ ID NO: 3622
  misc_feature 1..324: note = Enhancer + core promoter
  source 1..324: mol_type = other DNA

SEQ ID NO: 3821 - DNA, 304 bp, synthetic construct; identical to SEQ ID NO: 3624
  misc_feature 1..304: note = Enhancer + core promoter
  source 1..304: mol_type = other DNA

SEQ ID NO: 3822 - DNA, 364 bp, synthetic construct
  misc_feature 1..364: note = Enhancer + core promoter
  source 1..364: mol_type = other DNA
gccggggtaccgagctggggggcgggagctgtcccggggacaggcctgggtgaggctgccgggacgcagggcccggctggggctacggccgaggccacacctggggctgtctcgggctgtccaccctgggggcggtgggctgccatcccccaatctgtcagtgatgcggttttggcagtacatcaatgggcgtggatagcggtttgactcacggggatttccaagtctccaccccattgacgtcaatgggagtttgttttggcaccaaaatcaacgggactttccaaaatgtcgtaacaactccgccccattgacgcaaatgggcggtaggcgtgtacggtgggaggtctatataagcagagct

SEQ ID NO: 3823 - DNA, 274 bp, synthetic construct; identical to SEQ ID NO: 3625
  misc_feature 1..274: note = Enhancer + core promoter
  source 1..274: mol_type = other DNA

SEQ ID NO: 3824 - DNA, 354 bp, synthetic construct; identical to SEQ ID NO: 3626
  misc_feature 1..354: note = Enhancer + core promoter
  source 1..354: mol_type = other DNA

SEQ ID NO: 3825 - DNA, 495 bp, synthetic construct; identical to SEQ ID NO: 3779
  misc_feature 1..495: note = Muscle Enhancer 1
  source 1..495: mol_type = other DNA

SEQ ID NO: 3826 - DNA, 344 bp, synthetic construct; identical to SEQ ID NO: 3780
  misc_feature 1..344: note = Muscle Enhancer 2
  source 1..344: mol_type = other DNA

SEQ ID NO: 3827 - DNA, 429 bp, synthetic construct; identical to SEQ ID NO: 3781
  misc_feature 1..429: note = Muscle Enhancer 3
  source 1..429: mol_type = other DNA

SEQ ID NO: 3828 - DNA, 434 bp, synthetic construct; identical to SEQ ID NO: 3782
  misc_feature 1..434: note = Muscle Enhancer 4
  source 1..434: mol_type = other DNA

SEQ ID NO: 3829 - DNA, 171 bp, synthetic construct; identical to SEQ ID NO: 3783
  misc_feature 1..171: note = Muscle Enhancer 5
  source 1..171: mol_type = other DNA

SEQ ID NO: 3830 - DNA, 51 bp, synthetic construct; identical to SEQ ID NO: 3784
  misc_feature 1..51: note = Muscle Enhancer 6
  source 1..51: mol_type = other DNA

SEQ ID NO: 3831 - DNA, 60 bp, synthetic construct; identical to SEQ ID NO: 3785
  misc_feature 1..60: note = Muscle Enhancer 7
  source 1..60: mol_type = other DNA

SEQ ID NO: 3832 - DNA, 41 bp, synthetic construct; identical to SEQ ID NO: 3786
  misc_feature 1..41: note = Muscle Enhancer 8
  source 1..41: mol_type = other DNA

SEQ ID NO: 3833 - DNA, 120 bp, synthetic construct; identical to SEQ ID NO: 3787
  misc_feature 1..120: note = Muscle Enhancer 9
  source 1..120: mol_type = other DNA

SEQ ID NO: 3834 - DNA, 474 bp, synthetic construct; identical to SEQ ID NO: 3788
  misc_feature 1..474: note = Muscle Enhancer 10
  source 1..474: mol_type = other DNA

SEQ ID NO: 3835 - DNA, 519 bp, synthetic construct; identical to SEQ ID NO: 3789
  misc_feature 1..519: note = Muscle Enhancer 11
  source 1..519: mol_type = other DNA

SEQ ID NO: 3836 - DNA, 372 bp, synthetic construct; identical to SEQ ID NO: 3790
  misc_feature 1..372: note = Muscle Enhancer 12
  source 1..372: mol_type = other DNA

SEQ ID NO: 3837 - DNA, 256 bp, synthetic construct; identical to SEQ ID NO: 3791
  misc_feature 1..256: note = MyoD Enhancer
  source 1..256: mol_type = other DNA

SEQ ID NO: 3838 - DNA, 206 bp, synthetic construct; identical to SEQ ID NO: 3792
  misc_feature 1..206: note = Cardiac Muscle Enhancer 1
  source 1..206: mol_type = other DNA

SEQ ID NO: 3839 - DNA, 255 bp, synthetic construct; identical to SEQ ID NO: 3793
  misc_feature 1..255: note = Cardiac Muscle Enhancer 2
  source 1..255: mol_type = other DNA

SEQ ID NO: 3840 - DNA, 277 bp, synthetic construct; identical to SEQ ID NO: 3794
  misc_feature 1..277: note = Cardiac Muscle Enhancer 3
  source 1..277: mol_type = other DNA

SEQ ID NO: 3841 - DNA, 660 bp, synthetic construct; identical to SEQ ID NO: 3795
  misc_feature 1..660: note = Cardiac Muscle Enhancer 4
  source 1..660: mol_type = other DNA

SEQ ID NO: 3842 - DNA, 221 bp, synthetic construct; identical to SEQ ID NO: 3796
  misc_feature 1..221: note = Myoblast Muscle Enhancer 1
  source 1..221: mol_type = other DNA

SEQ ID NO: 3843 - DNA, 310 bp, synthetic construct; identical to SEQ ID NO: 3797
  misc_feature 1..310: note = Myoblast Muscle Enhancer 2
  source 1..310: mol_type = other DNA

SEQ ID NO: 3844 - DNA, 218 bp, synthetic construct; identical to SEQ ID NO: 3798
  misc_feature 1..218: note = Myoblast Muscle Enhancer 3
  source 1..218: mol_type = other DNA

SEQ ID NO: 3845 - DNA, 353 bp, synthetic construct; identical to SEQ ID NO: 3799
  misc_feature 1..353: note = Myoblast Muscle Enhancer 4
  source 1..353: mol_type = other DNA

SEQ ID NO: 3846 - DNA, 50 bp, synthetic construct; identical to SEQ ID NO: 3800
  misc_feature 1..50: note = Myoblast Muscle Enhancer 5
  source 1..50: mol_type = other DNA

SEQ ID NO: 3847 - DNA, 395 bp, synthetic construct; identical to SEQ ID NO: 3801
  misc_feature 1..395: note = Skeletal Muscle Enhancer 1
  source 1..395: mol_type = other DNA

SEQ ID NO: 3848 - DNA, 382 bp, synthetic construct; identical to SEQ ID NO: 3802
  misc_feature 1..382: note = Skeletal Muscle Enhancer 2
  source 1..382: mol_type = other DNA

SEQ ID NO: 3849 - DNA, 135 bp, synthetic construct; identical to SEQ ID NO: 3803
  misc_feature 1..135: note = Skeletal Muscle Enhancer 3
  source 1..135: mol_type = other DNA

SEQ ID NO: 3850 - DNA, 326 bp, synthetic construct; identical to SEQ ID NO: 3804
  misc_feature 1..326: note = Skeletal Muscle Enhancer 4
  source 1..326: mol_type = other DNA

SEQ ID NO: 3851 - DNA, 273 bp, synthetic construct; identical to SEQ ID NO: 3805
  misc_feature 1..273: note = Skeletal Muscle Enhancer 5
  source 1..273: mol_type = other DNA

SEQ ID NO: 3852 - DNA, 148 bp, synthetic construct; identical to SEQ ID NO: 3806
  misc_feature 1..148: note = Skeletal Muscle Enhancer 6
  source 1..148: mol_type = other DNA

SEQ ID NO: 3853 - DNA, 80 bp, synthetic construct; identical to SEQ ID NO: 3807
  misc_feature 1..80: note = Skeletal Muscle Enhancer 7
  source 1..80: mol_type = other DNA

SEQ ID NO: 3854 - DNA, 437 bp, synthetic construct; identical to SEQ ID NO: 3808
  misc_feature 1..437: note = Skeletal Muscle Enhancer 8
  source 1..437: mol_type = other DNA

SEQ ID NO: 3855 - DNA, 297 bp, synthetic construct; identical to SEQ ID NO: 3809
  misc_feature 1..297: note = Skeletal Muscle Enhancer 9
  source 1..297: mol_type = other DNA

SEQ ID NO: 3856 - DNA, 584 bp, synthetic construct; identical to SEQ ID NO: 3532
  misc_feature 1..584: note = Protein promoter
  source 1..584: mol_type = other DNA

SEQ ID NO: 3857 - DNA, 400 bp, synthetic construct; identical to SEQ ID NO: 3533
  misc_feature 1..400: note = Protein promoter
  source 1..400: mol_type = other DNA

SEQ ID NO: 3858 - DNA, 234 bp, synthetic construct; identical to SEQ ID NO: 3534
  misc_feature 1..234: note = Promoter variant sequence
  source 1..234: mol_type = other DNA

SEQ ID NO: 3859 - DNA, 335 bp, synthetic construct; identical to SEQ ID NO: 3535
  misc_feature 1..335: note = Protein promoter
  source 1..335: mol_type = other DNA

SEQ ID NO: 3860 - DNA, 100 bp, synthetic construct; identical to SEQ ID NO: 3536
  misc_feature 1..100: note = Promoter variant sequence
  source 1..100: mol_type = other DNA

SEQ ID NO: 3861 - DNA, 52 bp, synthetic construct; identical to SEQ ID NO: 3537
  misc_feature 1..52: note = Promoter variant sequence
  source 1..52: mol_type = other DNA

SEQ ID NO: 3862 - DNA, 39 bp, synthetic construct; identical to SEQ ID NO: 3538
  misc_feature 1..39: note = Promoter variant sequence
  source 1..39: mol_type = other DNA

SEQ ID NO: 3863 - DNA, 146 bp, synthetic construct; identical to SEQ ID NO: 3539
  misc_feature 1..146: note = Promoter variant sequence
  source 1..146: mol_type = other DNA

SEQ ID NO: 3864 - DNA, 63 bp, synthetic construct; identical to SEQ ID NO: 3540
  misc_feature 1..63: note = Promoter variant sequence
  source 1..63: mol_type = other DNA

SEQ ID NO: 3865 - DNA, 114 bp, synthetic construct; identical to SEQ ID NO: 3541
  misc_feature 1..114: note = Promoter variant sequence
  source 1..114: mol_type = other DNA

SEQ ID NO: 3866 - DNA, 703 bp, synthetic construct; identical to SEQ ID NO: 3542
  misc_feature 1..703: note = Protein promoter
  source 1..703: mol_type = other DNA

SEQ ID NO: 3867 - DNA, 81 bp, synthetic construct; identical to SEQ ID NO: 3543
  misc_feature 1..81: note = Promoter variant sequence
  source 1..81: mol_type = other DNA

SEQ ID NO: 3868 - DNA, 81 bp, synthetic construct; identical to SEQ ID NO: 3544
  misc_feature 1..81: note = Promoter variant sequence
  source 1..81: mol_type = other DNA

SEQ ID NO: 3869 - DNA, 81 bp, synthetic construct; identical to SEQ ID NO: 3545
  misc_feature 1..81: note = Promoter variant sequence
  source 1..81: mol_type = other DNA

SEQ ID NO: 3870 - DNA, 229 bp, synthetic construct; identical to SEQ ID NO: 3546
  misc_feature 1..229: note = Promoter variant sequence
  source 1..229: mol_type = other DNA

SEQ ID NO: 3871 - DNA, 68 bp, synthetic construct; identical to SEQ ID NO: 3547
  misc_feature 1..68: note = Promoter variant sequence
  source 1..68: mol_type = other DNA

SEQ ID NO: 3872 - DNA, 65 bp, synthetic construct; identical to SEQ ID NO: 3548
  misc_feature 1..65: note = Promoter variant sequence
  source 1..65: mol_type = other DNA

SEQ ID NO: 3873 - DNA, 39 bp, synthetic construct; identical to SEQ ID NO: 3538
  misc_feature 1..39: note = Promoter variant sequence
  source 1..39: mol_type = other DNA

SEQ ID NO: 3874 - DNA, 81 bp, synthetic construct; identical to SEQ ID NO: 3550
  misc_feature 1..81: note = Promoter variant sequence
  source 1..81: mol_type = other DNA

SEQ ID NO: 3875 - DNA, 107 bp, synthetic construct; identical to SEQ ID NO: 3551
  misc_feature 1..107: note = Promoter variant sequence
  source 1..107: mol_type = other DNA

SEQ ID NO: 3876 - DNA, 227 bp, synthetic construct; identical to SEQ ID NO: 3552
  misc_feature 1..227: note = Promoter variant sequence
  source 1..227: mol_type = other DNA

SEQ ID NO: 3877 - DNA, 448 bp, synthetic construct; identical to SEQ ID NO: 3553
  misc_feature 1..448: note = Protein promoter
  source 1..448: mol_type = other DNA

SEQ ID NO: 3878 - DNA, 330 bp, synthetic construct; identical to SEQ ID NO: 3554
  misc_feature 1..330: note = Protein promoter
  source 1..330: mol_type = other DNA

SEQ ID NO: 3879 - DNA, 511 bp, synthetic construct; identical to SEQ ID NO: 3555
  misc_feature 1..511: note = Protein promoter
  source 1..511: mol_type = other DNA

SEQ ID NO: 3880 - DNA, 164 bp, synthetic construct; identical to SEQ ID NO: 3556
  misc_feature 1..164: note = Promoter variant sequence
  source 1..164: mol_type = other DNA

SEQ ID NO: 3881 - DNA, 325 bp, synthetic construct; identical to SEQ ID NO: 3558
  misc_feature 1..325: note = Protein promoter
  source 1..325: mol_type = other DNA

SEQ ID NO: 3882 - DNA, 325 bp, synthetic construct; identical to SEQ ID NO: 3558
  misc_feature 1..325: note = Protein promoter
  source 1..325: mol_type = other DNA

SEQ ID NO: 3883 - DNA, 243 bp, synthetic construct; identical to SEQ ID NO: 3559
  misc_feature 1..243: note = Promoter variant sequence
  source 1..243: mol_type = other DNA

SEQ ID NO: 3884 - DNA, 493 bp, synthetic construct; identical to SEQ ID NO: 3560
  misc_feature 1..493: note = Protein promoter
  source 1..493: mol_type = other DNA

SEQ ID NO: 3885 - DNA, 565 bp, synthetic construct; identical to SEQ ID NO: 3561
  misc_feature 1..565: note = Protein promoter
  source 1..565: mol_type = other DNA

SEQ ID NO: 3886 - DNA, 252 bp, synthetic construct; identical to SEQ ID NO: 3722
  misc_feature 1..252: note = U1a
  source 1..252: mol_type = other DNA

SEQ ID NO: 3887 - DNA, 252 bp, synthetic construct; identical to SEQ ID NO: 3738
  misc_feature 1..252: note = U1a promoter
  source 1..252: mol_type = other DNA

SEQ ID NO: 3888 - DNA, 252 bp, synthetic construct; identical to SEQ ID NO: 3739
  misc_feature 1..252: note = U1a promoter
  source 1..252: mol_type = other DNA

SEQ ID NO: 3889 - DNA, 191 bp, synthetic construct
  misc_feature 1..191: note = UbC promoter
  source 1..191: mol_type = other DNA
caagtcccgtcctaaaatgtccttctgctgatactggggttctaaggctgagtcttatgagcagcgggctgctgtcctgagcgtccaggcggaaggatcaggaggctcgctgcgcccttcgtctgacgtggcagcgctcgccgtgaggaggggggcgcccgcgggaggcgccaaaacccggtgcggaggcc

SEQ ID NO: 3890 - DNA, 191 bp, synthetic construct
  misc_feature 1..191: note = UbC promoter
  source 1..191: mol_type = other DNA
caagtcccttcctaaaatgtccttctgctgatactggggttctaaggctgagtcttatgagcagagggctgctgtcctgagggtccaggcggaaggatcaggaggctcactgagcccttcgtctgacgtggcagatctggccgtgaggaggggggaacccgcgggaggcaccaaaacccggtggggaggcc

SEQ ID NO: 3891 - DNA, 400 bp, synthetic construct; identical to SEQ ID NO: 3737
  misc_feature 1..400: note = UbC promoter
  source 1..400: mol_type = other DNA

SEQ ID NO: 3892 - DNA, 354 bp, synthetic construct; identical to SEQ ID NO: 3725
  misc_feature 1..354: note = SFCp
  source 1..354: mol_type = other DNA

SEQ ID NO: 3893 - DNA, 197 bp, synthetic construct; identical to SEQ ID NO: 3726
  misc_feature 1..197: note = miniSV40
  source 1..197: mol_type = other DNA

SEQ ID NO: 3894 - DNA, 178 bp, synthetic construct; identical to SEQ ID NO: 3727
  misc_feature 1..178: note = pJB42CAT5
  source 1..178: mol_type = other DNA

SEQ ID NO: 3895 - DNA, 41 bp, synthetic construct; identical to SEQ ID NO: 3728
  misc_feature 1..41: note = MLP
  source 1..41: mol_type = other DNA

SEQ ID NO: 3896 - DNA, 212 bp, synthetic construct; identical to SEQ ID NO: 3731
  misc_feature 1..212: note = miniEF1
  source 1..212: mol_type = other DNA

SEQ ID NO: 3897 - DNA, 155 bp, synthetic construct
  misc_feature 1..155: note = hRPL13
  source 1..155: mol_type = other DNA
ccctggggaatctctgcgcacgcgcagaacgcttcgaccaatgaaaacacaggaagccgtccgcgcaaccgcgttgcgtcacttctgccgcccctgtttcaagggataagaaaccctgcgacaaaacctcctccttttccaagcggctgccgaag

SEQ ID NO: 3898 - DNA, 450 bp, synthetic construct; identical to SEQ ID NO: 3775
  misc_feature 1..450: note = CK8e promoter
  source 1..450: mol_type = other DNA

SEQ ID NO: 3899 - DNA, 776 bp, synthetic construct; identical to SEQ ID NO: 3777
  misc_feature 1..776: note = MHCK7
  source 1..776: mol_type = other DNA

SEQ ID NO: 3900 - DNA, 724 bp, synthetic construct; identical to SEQ ID NO: 3774
  misc_feature 1..724: note = Desmin promoter
  source 1..724: mol_type = other DNA

SEQ ID NO: 3901 - DNA, 742 bp, synthetic construct; identical to SEQ ID NO: 3776
  misc_feature 1..742: note = MHCK promoter
  source 1..742: mol_type = other DNA

SEQ ID NO: 3902 - DNA, 579 bp, synthetic construct; identical to SEQ ID NO: 3773
  misc_feature 1..579: note = SP-301
  source 1..579: mol_type = other DNA

SEQ ID NO: 3903 - DNA, 358 bp, synthetic construct; identical to SEQ ID NO: 3778
  misc_feature 1..358: note = SpC5-12
  source 1..358: mol_type = other DNA

SEQ ID NO: 3904 - protein, 11 aa, synthetic construct
  REGION 1..11: note = 5' NLS aa sequence
MAPKKKRKVSR

SEQ ID NO: 3905 - protein, 41 aa, synthetic construct
  REGION 1..41: note = 5' NLS aa sequence
MAPKKKRKVGGSPKKKRKVGGSPKKKRKVGGSPKKKRKVSR

SEQ ID NO: 3906 - protein, 9 aa, synthetic construct
  REGION 1..9: note = NLS 5'
PAAKRVKLD

SEQ ID NO: 3907 - protein, 23 aa, synthetic construct
  REGION 1..23: note = NLS 5'
PAAKRVKLDGGSPAAKRVKLDSR

SEQ ID NO: 3908 - protein, 47 aa, synthetic construct; identical to SEQ ID NO: 3416
  REGION 1..47: note = NLS 5'

SEQ ID NO: 3909 - protein, 71 aa, synthetic construct
  REGION 1..71: note = NLS 5'
PAAKRVKLDGGSPAAKRVKLDGGSPAAKRVKLDGGSPAAKRVKLDGGSPAAKRVKLDGGSPAAKRVKLDSR

SEQ ID NO: 3910 - protein, 18 aa, synthetic construct
  REGION 1..18: note = NLS 5'
KRPAATKKAGQAKKKKSR

SEQ ID NO: 3911 - protein, 37 aa, synthetic construct; identical to SEQ ID NO: 3419
  REGION 1..37: note = NLS 5'

SEQ ID NO: 3912 - protein, 21 aa, synthetic construct
  REGION 1..21: note = NLS 5'
PAAKRVKLDGGSPKKKRKVSR

SEQ ID NO: 3913 - protein, 21 aa, synthetic construct
  REGION 1..21: note = NLS 5'
PAAKKKKLDGGSPKKKRKVSR

SEQ ID NO: 3914 - protein, 11 aa, synthetic construct
  REGION 1..11: note = NLS 5'
PAAKKKKLDSR

SEQ ID NO: 3915 - protein, 35 aa, synthetic construct; identical to SEQ ID NO: 3423
  REGION 1..35: note = NLS 5'

SEQ ID NO: 3916 - protein, 47 aa, synthetic construct; identical to SEQ ID NO: 3424
  REGION 1..47: note = NLS 5'

SEQ ID NO: 3917 - protein, 13 aa, synthetic construct
  REGION 1..13: note = NLS 5'
PAKRARRGYKCSR

SEQ ID NO: 3918 - protein, 26 aa, synthetic construct
  REGION 1..26: note = NLS 5'
PAKRARRGYKCGSPAKRARRGYKCSR

SEQ ID NO: 3919 - protein, 9 aa, synthetic construct
  REGION 1..9: note = NLS 5'
PRRKREESR

SEQ ID NO: 3920 - protein, 9 aa, synthetic construct
  REGION 1..9: note = NLS 5'
PYRGRKESR

SEQ ID NO: 3921 - protein, 10 aa, synthetic construct
  REGION 1..10: note = 5' NLS aa sequence
PLRKRPRRSR

SEQ ID NO: 3922 - protein, 20 aa, synthetic construct
  REGION 1..20: note = 5' NLS aa sequence
PLRKRPRRGSPLRKRPRRSR

SEQ ID NO: 3923 - protein, 32 aa, synthetic construct; identical to SEQ ID NO: 3431
  REGION 1..32: note = 5' NLS aa sequence

SEQ ID NO: 3924 - protein, 34 aa, synthetic construct; identical to SEQ ID NO: 3432
  REGION 1..34: note = 5' NLS aa sequence

SEQ ID NO: 3925 - protein, 39 aa, synthetic construct; identical to SEQ ID NO: 3433
  REGION 1..39: note = 5' NLS aa sequence

SEQ ID NO: 3926 - protein, 39 aa, synthetic construct; identical to SEQ ID NO: 3434
  REGION 1..39: note = 5' NLS aa sequence

SEQ ID NO: 3927 - protein, 40 aa, synthetic construct; identical to SEQ ID NO: 3435
  REGION 1..40: note = 5' NLS aa sequence

SEQ ID NO: 3928 - protein, 48 aa, synthetic construct; identical to SEQ ID NO: 3436
  REGION 1..48: note = 5' NLS aa sequence

SEQ ID NO: 3929 - protein, 31 aa, synthetic construct; identical to SEQ ID NO: 3437
  REGION 1..31: note = 5' NLS aa sequence

SEQ ID NO: 3930 - protein, 22 aa, synthetic construct
  REGION 1..22: note = 5' NLS aa sequence
PAAKRVKLDGGSPKKKRKVGGS

SEQ ID NO: 3931 - protein, 21 aa, synthetic construct
  REGION 1..21: note = 5' NLS aa sequence
PAAKRVKLDPPPPKKKRKVPG

SEQ ID NO: 3932 - protein, 11 aa, synthetic construct
  REGION 1..11: note = 5' NLS aa sequence
PAAKRVKLDPG

SEQ ID NO: 3933 - protein, 21 aa, synthetic construct
  REGION 1..21: note = 5' NLS aa sequence
PAAKRVKLDGGGSGGGSGGGS

SEQ ID NO: 3934 - protein, 12 aa, synthetic construct
  REGION 1..12: note = 5' NLS aa sequence
PAAKRVKLDPPP

SEQ ID NO: 3935 - protein, 24 aa, synthetic construct
  REGION 1..24: note = 5' NLS aa sequence
PAAKRVKLDGGGSGGGSGGGSPPP

SEQ ID NO: 3936 - protein, 10 aa, synthetic construct
  REGION 1..10: note = 5' NLS aa sequence
PKKKRKVPPP

SEQ ID NO: 3937 - protein, 10 aa, synthetic construct
  REGION 1..10: note = 5' NLS aa sequence
PKKKRKVGGS

SEQ ID NO: 3938 - DNA, 3006 bp, synthetic construct; identical to SEQ ID NO: 3747
  misc_feature 1..3006: note = CasX
  source 1..3006: mol_type = other DNA

SEQ ID NO: 3939 - protein, 11 aa, synthetic construct
  REGION 1..11: note = NLS 3'
GSPAAKRVKLD

SEQ ID NO: 3940 - protein, 7 aa, synthetic construct
  REGION 1..7: note = NLS 3'
PKKKRKV

SEQ ID NO: 3941 - protein, 39 aa, synthetic construct; identical to SEQ ID NO: 3447
  REGION 1..39: note = NLS 3'

SEQ ID NO: 3942 - protein, 59 aa, synthetic construct; identical to SEQ ID NO: 3448
  REGION 1..59: note = NLS 3'

SEQ ID NO: 3943 - protein, 23 aa, synthetic construct
  REGION 1..23: note = NLS 3'
GSPAAKRVKLDGGSPAAKRVKLD

SEQ ID NO: 3944 - protein, 47 aa, synthetic construct; identical to SEQ ID NO: 3451
  REGION 1..47: note = NLS 3'

SEQ ID NO: 3945 - protein, 71 aa, synthetic construct; identical to SEQ ID NO: 3452
  REGION 1..71: note = NLS 3'

SEQ ID NO: 3946 - protein, 18 aa, synthetic construct
  REGION 1..18: note = NLS 3'
GSKRPAATKKAGQAKKKK

SEQ ID NO: 3947 - protein, 35 aa, synthetic construct; identical to SEQ ID NO: 3454
  REGION 1..35: note = NLS 3'

SEQ ID NO: 3948 - protein, 41 aa, synthetic construct; identical to SEQ ID NO: 3455
  REGION 1..41: note = NLS 3'

SEQ ID NO: 3949 - protein, 15 aa, synthetic construct
  REGION 1..15: note = NLS 3'
GSKLGPRKATGRWGS

SEQ ID NO: 3950 - protein, 19 aa, synthetic construct
  REGION 1..19: note = NLS 3'
GSKRKGSPERGERKRHWGS

SEQ ID NO: 3951 - protein, 31 aa, synthetic construct; identical to SEQ ID NO: 3458
  REGION 1..31: note = NLS 3'

SEQ ID NO: 3952 - protein, 30 aa, synthetic construct; identical to SEQ ID NO: 3459
  REGION 1..30: note = NLS 3'

SEQ ID NO: 3953 - protein, 36 aa, synthetic construct; identical to SEQ ID NO: 3460
  REGION 1..36: note = NLS 3'

SEQ ID NO: 3954 - protein, 45 aa, synthetic construct; identical to SEQ ID NO: 3461
  REGION 1..45: note = NLS 3'

SEQ ID NO: 3955 - protein, 40 aa, synthetic construct; identical to SEQ ID NO: 3462
  REGION 1..40: note = NLS 3'

SEQ ID NO: 3956 - protein, 28 aa, synthetic construct
  REGION 1..28: note = NLS 3'
GPAEAAAKEAAAKEAAAKAPAAKRVKLD

SEQ ID NO: 3957 - protein, 23 aa, synthetic construct
  REGION 1..23: note = NLS 3'
GPGGGSGGGSGGGSPAAKRVKLD

SEQ ID NO: 3958 - protein, 21 aa, synthetic construct
  REGION 1..21: note = NLS 3'
GPPKKKRKVPPPPAAKRVKLD

SEQ ID NO: 3959 - protein, 11 aa, synthetic construct
  REGION 1..11: note = NLS 3'
GPPAAKRVKLD

SEQ ID NO: 3960 - protein, 44 aa, synthetic construct; identical to SEQ ID NO: 3470
  REGION 1..44: note = NLS 3'

SEQ ID NO: 3961 - protein, 26 aa, synthetic construct
  REGION 1..26: note = NLS 3'
TGGGPGGGAAAGSGSPKKKRKVGSGS

SEQ ID NO: 3962 - protein, 13 aa, synthetic construct
  REGION 1..13: note = NLS 3'
PPPPKKKRKVPPP

SEQ ID NO: 3963 - protein, 13 aa, synthetic construct
  REGION 1..13: note = NLS 3'
GGSPKKKRKVPPP

SEQ ID NO: 3964 - protein, 10 aa, synthetic construct
  REGION 1..10: note = NLS 3'
PPPPKKKRKV

SEQ ID NO: 3965 - protein, 10 aa, synthetic construct
  REGION 1..10: note = NLS 3'
GGSPKKKRKV

SEQ ID NO: 3966 - protein, 19 aa, synthetic construct
  REGION 1..19: note = NLS 3'
GGSPKKKRKVGGSGGSGGS

SEQ ID NO: 3967 - protein, 20 aa, synthetic construct
  REGION 1..20: note = NLS 3'
GGSPKKKRKVGGSPKKKRKV

SEQ ID NO: 3968 - protein, 26 aa, synthetic construct
  REGION 1..26: note = NLS 3'
GGSGGSGGSPKKKRKVGGSPKKKRKV

SEQ ID NO: 3969 - protein, 24 aa, synthetic construct
  REGION 1..24: note = 3' NLS aa sequence
PPPGGGSGGGSGGGSPAAKRVKLD

SEQ ID NO: 3970 - protein, 12 aa, synthetic construct
  REGION 1..12: note = 3' NLS aa sequence
PPPPAAKRVKLD

SEQ ID NO: 3971 - protein, 24 aa, synthetic construct
  REGION 1..24: note = 3' NLS aa sequence
PPPGGGSGGGSGGGSPAAKRVKLD

SEQ ID NO: 3972 - DNA, 592 bp, synthetic construct; identical to SEQ ID NO: 3615
  misc_feature 1..592: note = PTRE
  source 1..592: mol_type = other DNA

SEQ ID NO: 3973 - DNA, 593 bp, synthetic construct; identical to SEQ ID NO: 3616
  misc_feature 1..593: note = PTRE
  source 1..593: mol_type = other DNA

SEQ ID NO: 3974 - DNA, 247 bp, synthetic construct; identical to SEQ ID NO: 3617
  misc_feature 1..247: note = PTRE
  source 1..247: mol_type = other DNA

SEQ ID NO: 3975 - DNA, 208 bp, synthetic construct; identical to SEQ ID NO: 3401
  misc_feature 1..208: note = Poly A sequence
  source 1..208: mol_type = other DNA

SEQ ID NO: 3976 - DNA, 623 bp, synthetic construct; identical to SEQ ID NO: 3402
  misc_feature 1..623: note = Poly A signal
  source 1..623: mol_type = other DNA

SEQ ID NO: 3977 - DNA, 477 bp, synthetic construct; identical to SEQ ID NO: 3403
  misc_feature 1..477: note = Poly A signal
  source 1..477: mol_type = other DNA

SEQ ID NO: 3978 - DNA, 49 bp, synthetic construct; identical to SEQ ID NO: 3404
  misc_feature 1..49: note = Poly A sequence
  source 1..49: mol_type = other DNA

SEQ ID NO: 3979 - DNA, 49 bp, synthetic construct; identical to SEQ ID NO: 3405
  misc_feature 1..49: note = Poly A sequence
  source 1..49: mol_type = other DNA

SEQ ID NO: 3980 - DNA, 122 bp, synthetic construct; identical to SEQ ID NO: 3406
  misc_feature 1..122: note = Poly A sequence
  source 1..122: mol_type = other DNA

SEQ ID NO: 3981 - DNA, 82 bp, synthetic construct; identical to SEQ ID NO: 3407
  misc_feature 1..82: note = Poly A sequence
  source 1..82: mol_type = other DNA

SEQ ID NO: 3982 - DNA, 395 bp, synthetic construct; identical to SEQ ID NO: 3408
  misc_feature 1..395: note = Poly A signal
  source 1..395: mol_type = other DNA

SEQ ID NO: 3983 - DNA, 56 bp, synthetic construct; identical to SEQ ID NO: 3409
  misc_feature 1..56: note = Poly A sequence
  source 1..56: mol_type = other DNA

SEQ ID NO: 3984 - DNA, 181 bp, synthetic construct; identical to SEQ ID NO: 3410
  misc_feature 1..181: note = Poly A sequence
  source 1..181: mol_type = other DNA

SEQ ID NO: 3985 - DNA, 208 bp, synthetic construct; identical to SEQ ID NO: 3748
  misc_feature 1..208: note = Poly A sequence
  source 1..208: mol_type = other DNA

SEQ ID NO: 3986 - DNA, 241 bp, synthetic construct; identical to SEQ ID NO: 3563
  misc_feature 1..241: note = Pol III promoter
  source 1..241: mol_type = other DNA

SEQ ID NO: 3987 - DNA, 241 bp, synthetic construct
  misc_feature 1..241: note = Pol III promoter
  source 1..241: mol_type = other DNA
gtcctttccacaagatatataaagccaagaaatcgaaatactttcaagttacggtaagcatatgatagtccattttaaaacataattttaaaactgcaaactacccaagaaattattactttctacgtcacgtattttgtactaatatctttgtgtttacagtcaaattaattccaattatctctctaacagccttgtatcgtatatgcaaatatgaaggaatcatgggaaataggccctc

SEQ ID NO: 3988 - DNA, 215 bp, synthetic construct; identical to SEQ ID NO: 3564
  misc_feature 1..215: note = Pol III promoter
  source 1..215: mol_type = other DNA

SEQ ID NO: 3989 - DNA, 267 bp, synthetic construct; identical to SEQ ID NO: 3565
  misc_feature 1..267: note = Pol III promoter
  source 1..267: mol_type = other DNA

SEQ ID NO: 3990 - DNA, 103 bp, synthetic construct; identical to SEQ ID NO: 3566
  misc_feature 1..103: note = Pol III promoter
  source 1..103: mol_type = other DNA

SEQ ID NO: 3991 - DNA, 38 bp, synthetic construct; identical to SEQ ID NO: 3567
  misc_feature 1..38: note = Pol III promoter
  source 1..38: mol_type = other DNA

SEQ ID NO: 3992 - DNA, 67 bp, synthetic construct; identical to SEQ ID NO: 3568
  misc_feature 1..67: note = Pol III promoter
  source 1..67: mol_type = other DNA

SEQ ID NO: 3993 - DNA, 79 bp, synthetic construct; identical to SEQ ID NO: 3569
  misc_feature 1..79: note = Pol III promoter
  source 1..79: mol_type = other DNA

SEQ ID NO: 3994 - DNA, 111 bp, synthetic construct; identical to SEQ ID NO: 3570
  misc_feature 1..111: note = Pol III promoter
  source 1..111: mol_type = other DNA

SEQ ID NO: 3995 - DNA, 127 bp, synthetic construct; identical to SEQ ID NO: 3571
  misc_feature 1..127: note = Pol III promoter
  source 1..127: mol_type = other DNA

SEQ ID NO: 3996 - DNA, 123 bp, synthetic construct; identical to SEQ ID NO: 3572
  misc_feature 1..123: note = Pol III promoter
  source 1..123: mol_type = other DNA

SEQ ID NO: 3997 - DNA, 143 bp, synthetic construct; identical to SEQ ID NO: 3573
  misc_feature 1..143: note = Pol III promoter
  source 1..143: mol_type = other DNA

SEQ ID NO: 3998 - DNA, 131 bp, synthetic construct; identical to SEQ ID NO: 3574
  misc_feature 1..131: note = Pol III promoter
  source 1..131: mol_type = other DNA

SEQ ID NO: 3999 - DNA, 159 bp, synthetic construct; identical to SEQ ID NO: 3575
  misc_feature 1..159: note = Pol III promoter
  source 1..159: mol_type = other DNA

SEQ ID NO: 4000 - DNA, 103 bp, synthetic construct; identical to SEQ ID NO: 3576
  misc_feature 1..103: note = Pol III promoter
  source 1..103: mol_type = other DNA

SEQ ID NO: 4001 - DNA, 111 bp, synthetic construct; identical to SEQ ID NO: 3577
  misc_feature 1..111: note = Pol III promoter
  source 1..111: mol_type = other DNA

SEQ ID NO: 4002 - DNA, 127 bp, synthetic construct; identical to SEQ ID NO: 3578
  misc_feature 1..127: note = Pol III promoter
  source 1..127: mol_type = other DNA

SEQ ID NO: 4003 - DNA, 103 bp, synthetic construct; identical to SEQ ID NO: 3579
  misc_feature 1..103: note = Pol III promoter
  source 1..103: mol_type = other DNA

SEQ ID NO: 4004 - DNA, 131 bp, synthetic construct; identical to SEQ ID NO: 3580
  misc_feature 1..131: note = Pol III promoter
  source 1..131: mol_type = other DNA

SEQ ID NO: 4005 - DNA, 159 bp, synthetic construct; identical to SEQ ID NO: 3581
  misc_feature 1..159: note = Pol III promoter
  source 1..159: mol_type = other DNA

SEQ ID NO: 4006 - DNA, 128 bp, synthetic construct; identical to SEQ ID NO: 3582
  misc_feature 1..128: note = Pol III promoter
  source 1..128: mol_type = other DNA

SEQ ID NO: 4007 - DNA, 91 bp, synthetic construct; identical to SEQ ID NO: 3583
  misc_feature 1..91: note = Pol III promoter
  source 1..91: mol_type = other DNA

SEQ ID NO: 4008 - DNA, 92 bp, synthetic construct; identical to SEQ ID NO: 3584
  misc_feature 1..92: note = Pol III promoter
  source 1..92: mol_type = other DNA

SEQ ID NO: 4009 - DNA, 92 bp, synthetic construct; identical to SEQ ID NO: 3585
  misc_feature 1..92: note = Pol III promoter
  source 1..92: mol_type = other DNA

SEQ ID NO: 4010 - DNA, 91 bp, synthetic construct; identical to SEQ ID NO: 3586
  misc_feature 1..91: note = Pol III promoter
  source 1..91: mol_type = other DNA

SEQ ID NO: 4011 - DNA, 91 bp, synthetic construct; identical to SEQ ID NO: 3587
  misc_feature 1..91: note = Pol III promoter
  source 1..91: mol_type = other DNA

SEQ ID NO: 4012 - DNA, 92 bp, synthetic construct; identical to SEQ ID NO: 3588
  misc_feature 1..92: note = Pol III promoter
  source 1..92: mol_type = other DNA

SEQ ID NO: 4013 - DNA, 91 bp, synthetic construct; identical to SEQ ID NO: 3589
  misc_feature 1..91: note = Pol III promoter
  source 1..91: mol_type = other DNA

SEQ ID NO: 4014 - DNA, 91 bp, synthetic construct; identical to SEQ ID NO: 3590
  misc_feature 1..91: note = Pol III promoter
  source 1..91: mol_type = other DNA

SEQ ID NO: 4015 - DNA, 91 bp, synthetic construct; identical to SEQ ID NO: 3591
  misc_feature 1..91: note = Pol III promoter
  source 1..91: mol_type = other DNA

SEQ ID NO: 4016 - DNA, 92 bp, synthetic construct; identical to SEQ ID NO: 3592
  misc_feature 1..92: note = Pol III promoter
  source 1..92: mol_type = other DNA

SEQ ID NO: 4017 - DNA, 91 bp, synthetic construct; identical to SEQ ID NO: 3593
  misc_feature 1..91: note = Pol III promoter
  source 1..91: mol_type = other DNA

SEQ ID NO: 4018 - DNA, 94 bp, synthetic construct; identical to SEQ ID NO: 3594
  misc_feature 1..94: note = Pol III promoter
  source 1..94: mol_type = other DNA

SEQ ID NO: 4019 - DNA, 92 bp, synthetic construct; identical to SEQ ID NO: 3595
  misc_feature 1..92: note = Pol III promoter
  source 1..92: mol_type = other DNA

SEQ ID NO: 4020 - DNA, 90 bp, synthetic construct; identical to SEQ ID NO: 3596
  misc_feature 1..90: note = Pol III promoter
  source 1..90: mol_type = other DNA

SEQ ID NO: 4021 - DNA, 94 bp, synthetic construct; identical to SEQ ID NO: 3597
  misc_feature 1..94: note = Pol III promoter
  source 1..94: mol_type = other DNA

SEQ ID NO: 4022 - DNA, 94 bp, synthetic construct; identical to SEQ ID NO: 3598
  misc_feature 1..94: note = Pol III promoter
  source 1..94: mol_type = other DNA

SEQ ID NO: 4023 - DNA, 249 bp, synthetic construct; identical to SEQ ID NO: 3599
  misc_feature 1..249: note = Pol III promoter
  source 1..249: mol_type = other DNA

SEQ ID NO: 4024 - DNA, 249 bp, synthetic construct; identical to SEQ ID NO: 3600
  misc_feature 1..249: note = Pol III promoter
  source 1..249: mol_type = other DNA

SEQ ID NO: 4025 - DNA, 249 bp, synthetic construct; identical to SEQ ID NO: 3601
  misc_feature 1..249: note = Pol III promoter
  source 1..249: mol_type = other DNA

SEQ ID NO: 4026 - DNA, 179 bp, synthetic construct
  misc_feature 1..179: note = Pol III promoter
  source 1..179: mol_type = other DNA
tatatttggtagaacaacgagcactttctcaactccagtcaataactacgttagttgcattacacattgggctaatataaatagaggttaaatctctaggtcatttaagagaagtcggcctatgtgtacagacatttgttccaggggctttaaatagctggtggtggaactcaatattc

SEQ ID NO: 4027 - DNA, 241 bp, synthetic construct; identical to SEQ ID NO: 3740
  misc_feature 1..241: note = Pol III promoter
  source 1..241: mol_type = other DNA

SEQ ID NO: 4028 - DNA, 241 bp, synthetic construct; identical to SEQ ID NO: 3741
  misc_feature 1..241: note = Pol III promoter
  source 1..241: mol_type = other DNA

SEQ ID NO: 4029 - DNA, 179 bp, synthetic construct
  misc_feature 1..179: note = Pol III promoter
  source 1..179: mol_type = other DNA
tgataagatatgggattttacgtgatggaagacatcaaagtaagtgtaagcagaaaagttgttctgcaacataccactgtaggaaattatgctaaatatgaaactgaccataagttatcctaaccaaaagatgatttgattgaagggcttaaaataggtgtgacagtaacccttgagtc

SEQ ID NO: 4030 - DNA, 179 bp, synthetic construct
  misc_feature 1..179: note = Pol III promoter
  source 1..179: mol_type = other DNA
tgataagatatgggattttacttgatggaagacatcaaagtaagtgtaagcagaaaagttgttctgcaacataccactgtaggaaattatgctaaatatgaaactgaccataagttatcctaaccaaaagatgatttgattgaagggcttaaaataggtgtgacagtaacccttgagtc

SEQ ID NO: 4031 - DNA, 179 bp, synthetic construct
  misc_feature 1..179: note = Pol III promoter
  source 1..179: mol_type = other DNA
gccaccaggtatggcctggccatcagagcaccaaacttatgagccttgtgatgagttctattacatgaaattctcctaaaggctccaagatggacaggaaagggctaaattaggttaccctaaggaaaacaaatgagaaactctggtgccttataagacctggggatagacttatttgc

SEQ ID NO: 4032 - DNA, 249 bp, synthetic construct; identical to SEQ ID NO: 3745
  misc_feature 1..249: note = Pol III promoter
  source 1..249: mol_type = other DNA

SEQ ID NO: 4033 - DNA, 244 bp, synthetic construct; identical to SEQ ID NO: 3746
  misc_feature 1..244: note = Pol III promoter
  source 1..244: mol_type = other DNA

SEQ ID NO: 4034 - DNA, 304 bp, synthetic construct; identical to SEQ ID NO: 3603
  misc_feature 1..304: note = Pol III promoter
  source 1..304: mol_type = other DNA

SEQ ID NO: 4035 - DNA, 314 bp, synthetic construct; identical to SEQ ID NO: 3604
  misc_feature 1..314: note = Pol III promoter
  source 1..314: mol_type = other DNA

SEQ ID NO: 4036 - DNA, 241 bp, synthetic construct; identical to SEQ ID NO: 594
  misc_feature 1..241: note = Pol III promoter
  source 1..241: mol_type = other DNA

SEQ ID NO: 4037 - DNA, 229 bp, synthetic construct; identical to SEQ ID NO: 3606
  misc_feature 1..229: note = Pol III promoter
  source 1..229: mol_type = other DNA

SEQ ID NO: 4038 - DNA, 240 bp, synthetic construct; identical to SEQ ID NO: 3607
  misc_feature 1..240: note = Pol III promoter
  source 1..240: mol_type = other DNA

SEQ ID NO: 4039 - DNA, 240 bp, synthetic construct; identical to SEQ ID NO: 3608
  misc_feature 1..240: note = Pol III promoter
  source 1..240: mol_type = other DNA

SEQ ID NO: 4040 - DNA, 240 bp, synthetic construct; identical to SEQ ID NO: 3609
  misc_feature 1..240: note = Pol III promoter
  source 1..240: mol_type = other DNA

SEQ ID NO: 4041 - DNA, 103 bp, synthetic construct; identical to SEQ ID NO: 96
  misc_feature 1..103: note = Pol III promoter
  source 1..103: mol_type = other DNA

SEQ ID NO: 4042 - DNA, 102 bp, synthetic construct; identical to SEQ ID NO: 97
  misc_feature 1..102: note = Pol III promoter
  source 1..102: mol_type = other DNA

SEQ ID NO: 4043 - DNA, 102 bp, synthetic construct; identical to SEQ ID NO: 98
  misc_feature 1..102: note = Pol III promoter
  source 1..102: mol_type = other DNA

SEQ ID NO: 4044 - DNA, 102 bp, synthetic construct; identical to SEQ ID NO: 99
  misc_feature 1..102: note = Pol III promoter
  source 1..102: mol_type = other DNA

SEQ ID NO: 4045 - DNA, 102 bp, synthetic construct; identical to SEQ ID NO: 100
  misc_feature 1..102: note = Pol III promoter
  source 1..102: mol_type = other DNA

SEQ ID NO: 4046 - DNA, 141 bp, synthetic construct; identical to SEQ ID NO: 18
  misc_feature 1..141: note = 3' ITR
  source 1..141: mol_type = other DNA

SEQ ID NO: 4047 - DNA, 131 bp, synthetic construct; identical to SEQ ID NO: 3750
  misc_feature 1..131: note = 3' ITR
  source 1..131: mol_type = other DNA

SEQ ID NO: 4048 - DNA, 584 bp, synthetic construct; identical to SEQ ID NO: 3532
  misc_feature 1..584: note = Enhancer + core promoter
  source 1..584: mol_type = other DNA

SEQ ID NO: 4049 - DNA, 20 bp, synthetic construct
  misc_feature 1..20: note = tdTomato target sequence
  source 1..20: mol_type = other DNA
ctgcattctagttgtggttt

SEQ ID NO: 4050 - DNA, 29 bp, synthetic construct
  misc_feature 1..29: note = CMV primer
  source 1..29: mol_type = other DNA
catctacgtattagtcatcgctattacca

SEQ ID NO: 4051 - DNA, 21 bp, synthetic construct
  misc_feature 1..21: note = CMV primer
  source 1..21: mol_type = other DNA
gaaatccccgtgagtcaaacc

SEQ ID NO: 4052 - DNA, 17 bp, synthetic construct
  misc_feature 1..17: note = CMV probe
  source 1..17: mol_type = other DNA
tcaatgggcgtggatag

SEQ ID NO: 4053 - DNA, 21 bp, synthetic construct
  misc_feature 1..21: note = AAV2 ITR primer
  source 1..21: mol_type = other DNA
ggaacccctagtgatggagtt

SEQ ID NO: 4054 - DNA, 16 bp, synthetic construct
  misc_feature 1..16: note = AAV2 ITR primer
  source 1..16: mol_type = other DNA
cggcctcagtgagcga

SEQ ID NO: 4055 - DNA, 21 bp, synthetic construct
  misc_feature 1..21: note = AAV2 ITR probe
  source 1..21: mol_type = other DNA
cactccctctctgcgcgctcg

SEQ ID NO: 4056 - DNA, 20 bp, synthetic construct
  misc_feature 1..20: note = Spacer sequence
  source 1..20: mol_type = other DNA
tatagcatacattatacgaa

SEQ ID NO: 4057 - DNA, 18 bp, synthetic construct
  misc_feature 1..18: note = Spacer sequence
  source 1..18: mol_type = other DNA
gggtcttcgagaagaccc

SEQ ID NO: 4058 - DNA, 20 bp, synthetic construct
  misc_feature 1..20: note = E6 primer sequence
  source 1..20: mol_type = other DNA
tgtggtcggggtagcggctg

SEQ ID NO: 4059 - RNA, 20 nt, synthetic construct
  misc_feature 1..20: note = spacer sequence
  source 1..20: mol_type = other RNA
ggccgagatgtctcgctccg

SEQ ID NO: 4060 - RNA, 20 nt, synthetic construct
  misc_feature 1..20: note = spacer sequence
  source 1..20: mol_type = other RNA
ttctcggcgctgcaccacgt

SEQ ID NO: 4061 - RNA, 20 nt, synthetic construct
  misc_feature 1..20: note = spacer sequence
  source 1..20: mol_type = other RNA
caagaggagaagcagtttgg

SEQ ID NO: 4062 - RNA, 20 nt, synthetic construct
  misc_feature 1..20: note = spacer sequence
  source 1..20: mol_type = other RNA
ggggcctgtgccatctctcg

SEQ ID NO: 4063 - RNA, 20 nt, synthetic construct
  misc_feature 1..20: note = spacer sequence
  source 1..20: mol_type = other RNA
aggggtcttcgagaagaccc

SEQ ID NO: 4064 - RNA, 46 nt, synthetic construct
  misc_feature 1..46: note = spacer sequence
  misc_difference 37..39: note = n is a, c, g, or u
  source 1..46: mol_type = other RNA
actggcgcttttatctgattactttgagagccatcannnatcaaag

SEQ ID NO: 4065 - protein, 11 aa, synthetic construct
  REGION 1..11: note = NLS 5'
RQRRNELKRSP

SEQ ID NO: 4066 - protein, 38 aa, synthetic construct
  REGION 1..38: note = NLS 5'
NQSSNFGPMKGGNFGGRSSGPYGGGGQYFAKPRNQGGY

SEQ ID NO: 4067 - protein, 42 aa, synthetic construct
  REGION 1..42: note = NLS 5'
RMRIZFKNKGKDTAELRRRRVEVSVELRKAKKDEQILKRRNV

SEQ ID NO: 4068 - protein, 8 aa, synthetic construct
  REGION 1..8: note = NLS 5'
VSRKRPRP

SEQ ID NO: 4069 - protein, 8 aa, synthetic construct
  REGION 1..8: note = NLS 5'
PPKKARED

SEQ ID NO: 4070 - protein, 8 aa, synthetic construct
  REGION 1..8: note = NLS 5'
PQPKKKPL

SEQ ID NO: 4071 - protein, 12 aa, synthetic construct
  REGION 1..12: note = NLS 5'
SALIKKKKKMAP

SEQ ID NO: 4072 - protein, 5 aa, synthetic construct
  REGION 1..5: note = NLS 5'
DRLRR

SEQ ID NO: 4073 - protein, 7 aa, synthetic construct
  REGION 1..7: note = NLS 5'
PKQKKRK

SEQ ID NO: 4074 - protein, 10 aa, synthetic construct
  REGION 1..10: note = NLS 5'
RKLKKKIKKL

SEQ ID NO: 4075 - protein, 10 aa, synthetic construct
  REGION 1..10: note = NLS 5'
REKKKFLKRR

SEQ ID NO: 4076 - protein, 20 aa, synthetic construct
  REGION 1..20: note = NLS 5'
KRKGDEVDGVDEVAKKKSKK

SEQ ID NO: 4077 - protein, 17 aa, synthetic construct
  REGION 1..17: note = NLS 5'
RKCLQAGMNLEARKTKK

SEQ ID NO: 4078 - protein, 8 aa, synthetic construct
  REGION 1..8: note = NLS 5'
PRPRKIPR

SEQ ID NO: 4079 - protein, 9 aa, synthetic construct
  REGION 1..9: note = NLS 5'
PPRKKRTVV

SEQ ID NO: 4080 - protein, 12 aa, synthetic construct
  REGION 1..12: note = NLS 5'
NLSKKKKRKREK

SEQ ID NO: 4081 - protein, 10 aa, synthetic construct
  REGION 1..10: note = NLS 5'
RRPSRPFRKP

SEQ ID NO: 4082 - protein, 8 aa, synthetic construct
  REGION 1..8: note = NLS 5'
KRPRSPSS

SEQ ID NO: 4083 - protein, 19 aa, synthetic construct
  REGION 1..19: note = NLS 5'
KRGINDRNFWRGENERKTR

SEQ ID NO: 4084 - protein, 11 aa, synthetic construct
  REGION 1..11: note = NLS 5'
PRPPKMARYDN

SEQ ID NO: 4085 - protein, 8 aa, synthetic construct
  REGION 1..8: note = NLS 5'
KRSFSKAF

SEQ ID NO: 4086 - protein, 9 aa, synthetic construct
  REGION 1..9: note = NLS 5'
KLKIKRPVK

SEQ ID NO: 4087 - protein, 19 aa, synthetic construct
  REGION 1..19: note = NLS 5'
PKKKRKVPPPPAAKRVKLD

SEQ ID NO: 4088 - protein, 17 aa, synthetic construct
  REGION 1..17: note = NLS 5'
PKTRRRPRRSQRKRPPT

SEQ ID NO: 4089 - protein, 25 aa, synthetic construct
  REGION 1..25: note = NLS 5'
MSRRRKANPTKLSENAKKLAKEVEN

SEQ ID NO: 4090 - protein, 16 aa, synthetic construct
  REGION 1..16: note = NLS 5'
KTRRRPRRSQRKRPPT

SEQ ID NO: 4091 - protein, 13 aa, synthetic construct
  REGION 1..13: note = NLS 5'
RRKKRRPRRKKRR

SEQ ID NO: 4092 - protein, 14 aa, synthetic construct
  REGION 1..14: note = NLS 5'
PKKKSRKPKKKSRK

SEQ ID NO: 4093 - protein, 17 aa, synthetic construct
  REGION 1..17: note = NLS 5'
HKKKHPDASVNFSEFSK

SEQ ID NO: 4094 - protein, 18 aa, synthetic construct
  REGION 1..18: note = NLS 5'
QRPGPYDRPQRPGPYDRP

SEQ ID NO: 4095 - protein, 16 aa, synthetic construct
  REGION 1..16: note = NLS 5'
LSPSLSPLLSPSLSPL

SEQ ID NO: 4096 - protein, 18 aa, synthetic construct
  REGION 1..18: note = NLS 5'
RGKGGKGLGKGGAKRHRK

SEQ ID NO: 4097 - protein, 14 aa, synthetic construct
  REGION 1..14: note = NLS 5'
PKRGRGRPKRGRGR

SEQ ID NO: 4098 - protein, 19 aa, synthetic construct
  REGION 1..19: note = NLS 5'
PKKKRKVPPPPAAKRVKLD

SEQ ID NO: 4099 - protein, 17 aa, synthetic construct
  REGION 1..17: note = NLS 5'
PKKKRKVPPPPKKKRKV

SEQ ID NO: 4100 - protein, 11 aa, synthetic construct
  REGION 1..11: note = NLS 5'
KLGPRKATGRW

SEQ ID NO: 4101 - protein, 7 aa, synthetic construct
  REGION 1..7: note = NLS 5'
PRRKREE

SEQ ID NO: 4102 - protein, 7 aa, synthetic construct
  REGION 1..7: note = NLS 5'
PYRGRKE

SEQ ID NO: 4103 - protein, 8 aa, synthetic construct
  REGION 1..8: note = NLS 5'
PLRKRPRR

SEQ ID NO: 4104 - protein, 18 aa, synthetic construct
  REGION 1..18: note = NLS 5'
PLRKRPRRGSPLRKRPRR

SEQ ID NO: 4105 - protein, 29 aa, synthetic construct
  REGION 1..29: note = NLS 5'
PAAKRVKLDGGKRTADGSEFESPKKKRKV

SEQ ID NO: 4106 - protein, 37 aa, synthetic construct
  REGION 1..37: note = NLS 5'
PAAKRVKLDGGKRTADGSEFESPKKKRKVGIHGVPAA

SEQ ID NO: 4107 - protein, 46 aa, synthetic construct
  REGION 1..46: note = NLS 5'
PAAKRVKLDGGKRTADGSEFESPKKKRKVAEAAAKEAAAKEAAAKA

SEQ ID NO: 4108 - protein, 31 aa, synthetic construct; identical to SEQ ID NO: 3437
  REGION 1..31: note = NLS 5'

SEQ ID NO: 4109 - protein, 15 aa, synthetic construct
  REGION 1..15: note = NLS 5'
KRKGSPERGERKRHW

SEQ ID NO: 4110 - protein, 28 aa, synthetic construct
  REGION 1..28: note = NLS 5'
KRTADSQHSTPPKTKRKVEFEPKKKRKV

SEQ ID NO: 4111 - protein, 38 aa, synthetic construct
  REGION 1..38: note = NLS 5'
PKKKRKVGGSKRTADSQHSTPPKTKRKVEFEPKKKRKV

SEQ ID NO: 4112 - protein, 17 aa, synthetic construct
  REGION 1..17: note = linker
AEAAAKEAAAKEAAAKA

SEQ ID NO: 4113 - protein, 12 aa, synthetic construct
  REGION 1..12: note = linker
TPPKTKRKVEFE

SEQ ID NO: 4114 - protein, 11 aa, synthetic construct
  REGION 1..11: note = protein transduction domain
YGRKKRRQRRR

SEQ ID NO: 4115 - protein, 8 aa, synthetic construct
  REGION 1..8: note = protein transduction domain
RKKRRQRR

SEQ ID NO: 4116 - protein, 11 aa, synthetic construct
  REGION 1..11: note = protein transduction domain
YARAAARQARA

SEQ ID NO: 4117 - protein, 11 aa, synthetic construct
  REGION 1..11: note = protein transduction domain
THRLPRRRRRR

SEQ ID NO: 4118 - protein, 11 aa, synthetic construct
  REGION 1..11: note = protein transduction domain
GGRRARRRRRR

SEQ ID NO: 4119 - protein, 50 aa, synthetic construct
  REGION 1..50: note = protein transduction domain
RRRRRRRRRRRRRRRRRRRRRRRRRRRRRRRRRRRRRRRRRRRRRRRRRR

SEQ ID NO: 4120 - protein, 12 aa, synthetic construct
  REGION 1..12: note = protein transduction domain
RRQRRTSKLMKR

SEQ ID NO: 4121 - protein, 27 aa, synthetic construct
  REGION 1..27: note = protein transduction domain
GWTLNSAGYLLGKINLKALAALAKKIL

SEQ ID NO: 4122 - protein, 33 aa, synthetic construct
  REGION 1..33: note = protein transduction domain
KALAWEAKLAKALAKALAKHLAKALAKALKCEA

SEQ ID NO: 4123 - protein, 16 aa, synthetic construct
  REGION 1..16: note = protein transduction domain
RQIKIWFQNRRMKWKK

SEQ ID NO: 4124 - DNA, 18 bp, synthetic construct
  misc_feature 1..18: note = Spacer sequence
  source 1..18: mol_type = other DNA
aagtggctgcgtaccaca

SEQ ID NO: 4125 - RNA, 19 nt, synthetic construct
  misc_feature 1..19: note = triplex loop
  source 1..19: mol_type = other RNA
ctttatctcattactttga

SEQ ID NO: 4126 - DNA, 31 bp, synthetic construct
  misc_feature 1..31: note = pseudoknot and triplex loop
  source 1..31: mol_type = other DNA
  misc_feature 1..27: note = RNA fragment
  misc_feature 28..31: note = DNA fragment
aaaacgctttatctcattactttgacgtttt

SEQ ID NO: 4127 - DNA, 20 bp, synthetic construct
  misc_feature 1..20: note = TTC PAM spacer
  source 1..20: mol_type = other DNA
agagcgtgatattaccctgt

SEQ ID NO: 4128 - DNA, 20 bp, synthetic construct
  misc_feature 1..20: note = TTC PAM spacer
  source 1..20: mol_type = other DNA
ccctttgacgttggagtcca

SEQ ID NO: 4129 - DNA, 20 bp, synthetic construct
  misc_feature 1..20: note = TTC PAM spacer
  source 1..20: mol_type = other DNA
tccccgatatgcaccaccgg

SEQ ID NO: 4130 - DNA, 20 bp, synthetic construct
  misc_feature 1..20: note = Spacer sequence
  source 1..20: mol_type = other DNA
aagtggctgcgtaccacacc

SEQ ID NO: 4131 - DNA, 20 bp, synthetic construct
  misc_feature 1..20: note = Spacer sequence
  source 1..20: mol_type = other DNA
gtacatccacaaacagacga

SEQ ID NO: 4132 - DNA, 20 bp, synthetic construct
  misc_feature 1..20: note = Spacer sequence
  source 1..20: mol_type = other DNA
ccgatatgcaccaccgggta

SEQ ID NO: 4133 - DNA, 231 bp, synthetic construct
  misc_feature 1..231: note = promoter
  source 1..231: mol_type = other DNA
gagggcctatttcccatgattccttcatatttgcatataagatgcaaggctgttagagagctaatttgactgtaaacacaaatatattagtacaaaatatgtgacatagaaagtgataatttcttgggtagtttgcagttttaaaattatgttttaaaatggactatcatctgcttaccgtaactttaaagtatttcgatttcttgactttatatatcttgtggaaaggac

SEQ ID NO: 4134 - DNA, 231 bp, synthetic construct
  misc_feature 1..231: note = promoter
  source 1..231: mol_type = other DNA
gagggcctatttcccatgattccttcatatttgcatataagatgcaaggctgttagagagataatttgactgtaaacacaaatatattagtacaaaatatgtgacatagaaagtgataatttcttgggtagtttgcagttttaaaattatgttttaaaatggactatcatctgcttaccgtaactttaaagtatttcgatttcttgactttatatatcttgtggaaaggac

SEQ ID NO: 4135 - DNA, 231 bp, synthetic construct; identical to SEQ ID NO: 4134
  misc_feature 1..231: note = promoter
  source 1..231: mol_type = other DNA

SEQ ID NO: 4136 - DNA, 231 bp, synthetic construct; identical to SEQ ID NO: 4134
  misc_feature 1..231: note = promoter
  source 1..231: mol_type = other DNA

SEQ ID NO: 4137 - DNA, 231 bp, synthetic construct; identical to SEQ ID NO: 4134
  misc_feature 1..231: note = promoter
  source 1..231: mol_type = other DNA

SEQ ID NO: 4138 - DNA, 231 bp, synthetic construct; identical to SEQ ID NO: 4134
  misc_feature 1..231: note = promoter
  source 1..231: mol_type = other DNA

SEQ ID NO: 4139 - DNA, 231 bp, synthetic construct; identical to SEQ ID NO: 4134
  misc_feature 1..231: note = promoter
  source 1..231: mol_type = other DNA

SEQ ID NO: 4140 - DNA, 231 bp, synthetic construct
  misc_feature 1..231: note = promoter
  source 1..231: mol_type = other DNA
gagggcctatttcccatgattccttcatatttgcatataagatgcaaggctgttagagagataattagactgtaaacacaaatatattagtacaaaatatgtgacatagaaagtgataatttcttgggtagtttgcagttttaaaattatgttttaaaatggactatcatctgcttaccgtaactttaaagtatttcgatttcttgactttatatatcttgtggaaaggac

SEQ ID NO: 4141 - DNA, 231 bp, synthetic construct; identical to SEQ ID NO: 4140
  misc_feature 1..231: note = promoter
  source 1..231: mol_type = other DNA

SEQ ID NO: 4142 - DNA, 231 bp, synthetic construct; identical to SEQ ID NO: 4140
  misc_feature 1..231: note = promoter
  source 1..231: mol_type = other DNA

SEQ ID NO: 4143 - DNA, 231 bp, synthetic construct
  misc_feature 1..231: note = promoter
  source 1..231: mol_type = other DNA
gagggcctatttcccatgattccttcatatttgcatataagatgcaaggctgttagagagataattagaatgtaaacacaaatatattagtacaaaatatgtgacatagaaagtgataatttcttgggtagtttgcagttttaaaattatgttttaaaatggactatcatctgcttaccgtaactttaaagtatttcgatttcttgactttatatatcttgtggaaaggac

SEQ ID NO: 4144 - DNA, 231 bp, synthetic construct
  misc_feature 1..231: note = promoter
  source 1..231: mol_type = other DNA
gagggcctatttcccatgattccttcatatttgcatataagatgcaaggctgttagagagataattagaacgtaaacacaaatatattagtacaaaatatgtgacatagaaagtgataatttcttgggtagtttgcagttttaaaattatgttttaaaatggactatcatctgcttaccgtaactttaaagtatttcgatttcttgactttatatatcttgtggaaaggac

SEQ ID NO: 4145 - DNA, 231 bp, synthetic construct
  misc_feature 1..231: note = promoter
  source 1..231: mol_type = other DNA
gagggcctatttcccatgattccttcatatttgcatataagatgcaaggctgttagagagataattagaacttaaacacaaatatattagtacaaaatatgtgacatagaaagtgataatttcttgggtagtttgcagttttaaaattatgttttaaaatggactatcatctgcttaccgtaactttaaagtatttcgatttcttgactttatatatcttgtggaaaggac

SEQ ID NO: 4146 - DNA, 231 bp, synthetic construct
  misc_feature 1..231: note = promoter
  source 1..231: mol_type = other DNA
gagggcctatttcccatgattccttcatatttgcatataagatgcaaggctgttagagagataattagaactaaaacacaaatatattagtacaaaatatgtgacatagaaagtgataatttcttgggtagtttgcagttttaaaattatgttttaaaatggactatcatctgcttaccgtaactttaaagtatttcgatttcttgactttatatatcttgtggaaaggac

SEQ ID NO: 4147 - DNA, 231 bp, synthetic construct; identical to SEQ ID NO: 4146
  misc_feature 1..231: note = promoter
  source 1..231: mol_type = other DNA

SEQ ID NO: 4148 - DNA, 231 bp, synthetic construct
  misc_feature 1..231: note = promoter
  source 1..231: mol_type = other DNA
gagggcctatttcccatgattccttcatatttgcatataagatgcaaggctgttagagagataattagaactaatacacaaatatattagtacaaaatatgtgacatagaaagtgataatttcttgggtagtttgcagttttaaaattatgttttaaaatggactatcatctgcttaccgtaactttaaagtatttcgatttcttgactttatatatcttgtggaaaggac

SEQ ID NO: 4149 - DNA, 231 bp, synthetic construct
  misc_feature 1..231: note = promoter
  source 1..231: mol_type = other DNA
gagggcctatttcccatgattccttcatatttgcatataagatgcaaggctgttagagagataattagaactaattcacaaatatattagtacaaaatatgtgacatagaaagtgataatttcttgggtagtttgcagttttaaaattatgttttaaaatggactatcatctgcttaccgtaactttaaagtatttcgatttcttgactttatatatcttgtggaaaggac

SEQ ID NO: 4150 - DNA, 231 bp, synthetic construct
  misc_feature 1..231: note = promoter
  source 1..231: mol_type = other DNA
gagggcctatttcccatgattccttcatatttgcatataagatgcaaggctgttagagagataattagaactaatttacaaatatattagtacaaaatatgtgacatagaaagtgataatttcttgggtagtttgcagttttaaaattatgttttaaaatggactatcatctgcttaccgtaactttaaagtatttcgatttcttgactttatatatcttgtggaaaggac

SEQ ID NO: 4151 - DNA, 231 bp, synthetic construct
  misc_feature 1..231: note = promoter
  source 1..231: mol_type = other DNA
gagggcctatttcccatgattccttcatatttgcatataagatgcaaggctgttagagagataattagaactaatttgcaaatatattagtacaaaatatgtgacatagaaagtgataatttcttgggtagtttgcagttttaaaattatgttttaaaatggactatcatctgcttaccgtaactttaaagtatttcgatttcttgactttatatatcttgtggaaaggac

SEQ ID NO: 4152 - DNA, 231 bp, synthetic construct
  misc_feature 1..231: note = promoter
  source 1..231: mol_type = other DNA
gagggcctatttcccatgattccttcatatttgcatataagatgcaaggctgttagagagataattagaactaatttgaaaatatattagtacaaaatatgtgacatagaaagtgataatttcttgggtagtttgcagttttaaaattatgttttaaaatggactatcatctgcttaccgtaactttaaagtatttcgatttcttgactttatatatcttgtggaaaggac

SEQ ID NO: 4153 - DNA, 231 bp, synthetic construct
  misc_feature 1..231: note = promoter
  source 1..231: mol_type = other DNA
gagggcctatttcccatgattccttcatatttgcatataagatgcaaggctgttagagagataattagaactaatttgacaatatattagtacaaaatatgtgacatagaaagtgataatttcttgggtagtttgcagttttaaaattatgttttaaaatggactatcatctgcttaccgtaactttaaagtatttcgatttcttgactttatatatcttgtggaaaggac

SEQ ID NO: 4154 - DNA, 231 bp, synthetic construct
  misc_feature 1..231: note = promoter
  source 1..231: mol_type = other DNA
gagggcctatttcccatgattccttcatatttgcatataagatgcaaggctgttagagagataattagaactaatttgactatatattagtacaaaatatgtgacatagaaagtgataatttcttgggtagtttgcagttttaaaattatgttttaaaatggactatcatctgcttaccgtaactttaaagtatttcgatttcttgactttatatatcttgtggaaaggac

SEQ ID NO: 4155 - DNA, 231 bp, synthetic construct
  misc_feature 1..231: note = promoter
  source 1..231: mol_type = other DNA
gagggcctatttcccatgattccttcatatttgcatataagatgcaaggctgttagagagataattagaactaatttgactgtatattagtacaaaatatgtgacatagaaagtgataatttcttgggtagtttgcagttttaaaattatgttttaaaatggactatcatctgcttaccgtaactttaaagtatttcgatttcttgactttatatatcttgtggaaaggac

SEQ ID NO: 4156 - DNA, 231 bp, synthetic construct; identical to SEQ ID NO: 4155
  misc_feature 1..231: note = promoter
  source 1..231: mol_type = other DNA

SEQ ID NO: 4157 - DNA, 231 bp, synthetic construct; identical to SEQ ID NO: 4155
  misc_feature 1..231: note = promoter
  source 1..231: mol_type = other DNA

SEQ ID NO: 4158 - DNA, 231 bp, synthetic construct
  misc_feature 1..231: note = promoter
  source 1..231: mol_type = other DNA
gagggcctatttcccatgattccttcatatttgcatataagatgcaaggctgttagagagataattagaactaatttgactgtaaattagtacaaaatatgtgacatagaaagtgataatttcttgggtagtttgcagttttaaaattatgttttaaaatggactatcatctgcttaccgtaactttaaagtatttcgatttcttgactttatatatcttgtggaaaggac

SEQ ID NO: 4159 - DNA, 231 bp, synthetic construct; identical to SEQ ID NO: 4158
  misc_feature 1..231: note = promoter
  source 1..231: mol_type = other DNA

SEQ ID NO: 4160 - DNA, 231 bp, synthetic construct
  misc_feature 1..231: note = promoter
  source 1..231: mol_type = other DNA
gagggcctatttcccatgattccttcatatttgcatataagatgcaaggctgttagagagataattagaactaatttgactgtaaactagtacaaaatatgtgacatagaaagtgataatttcttgggtagtttgcagttttaaaattatgttttaaaatggactatcatctgcttaccgtaactttaaagtatttcgatttcttgactttatatatcttgtggaaaggac

SEQ ID NO: 4161 - DNA, 231 bp, synthetic construct
  misc_feature 1..231: note = promoter
  source 1..231: mol_type = other DNA
gagggcctatttcccatgattccttcatatttgcatataagatgcaaggctgttagagagataattagaactaatttgactgtaaacaagtacaaaatatgtgacatagaaagtgataatttcttgggtagtttgcagttttaaaattatgttttaaaatggactatcatctgcttaccgtaactttaaagtatttcgatttcttgactttatatatcttgtggaaaggac

SEQ ID NO: 4162 - DNA, 231 bp, synthetic construct
  misc_feature 1..231: note = promoter
  source 1..231: mol_type = other DNA
gagggcctatttcccatgattccttcatatttgcatataagatgcaaggctgttagagagataattagaactaatttgactgtaaacacgtacaaaatatgtgacatagaaagtgataatttcttgggtagtttgcagttttaaaattatgttttaaaatggactatcatctgcttaccgtaactttaaagtatttcgatttcttgactttatatatcttgtggaaaggac

SEQ ID NO: 4163 - DNA, 231 bp, synthetic construct
  misc_feature 1..231: note = promoter
  source 1..231: mol_type = other DNA
gagggcctatttcccatgattccttcatatttgcatataagatgcaaggctgttagagagataattagaactaatttgactgtaaacacatacaaaatatgtgacatagaaagtgataatttcttgggtagtttgcagttttaaaattatgttttaaaatggactatcatctgcttaccgtaactttaaagtatttcgatttcttgactttatatatcttgtggaaaggac

SEQ ID NO: 4164 - DNA, 231 bp, synthetic construct
  misc_feature 1..231: note = promoter
  source 1..231: mol_type = other DNA
gagggcctatttcccatgattccttcatatttgcatataagatgcaaggctgttagagagataattagaactaatttgactgtaaacacaaacaaaatatgtgacatagaaagtgataatttcttgggtagtttgcagttttaaaattatgttttaaaatggactatcatctgcttaccgtaactttaaagtatttcgatttcttgactttatatatcttgtggaaaggac

SEQ ID NO: 4165 - DNA, 231 bp, synthetic construct; identical to SEQ ID NO: 4164
  misc_feature 1..231: note = promoter
  source 1..231: mol_type = other DNA

SEQ ID NO: 4166 - DNA, 231 bp, synthetic construct
  misc_feature 1..231: note = promoter
  source 1..231: mol_type = other DNA
gagggcctatttcccatgattccttcatatttgcatataagatgcaaggctgttagagagataattagaactaatttgactgtaaacacaaataaaatatgtgacatagaaagtgataatttcttgggtagtttgcagttttaaaattatgttttaaaatggactatcatctgcttaccgtaactttaaagtatttcgatttcttgactttatatatcttgtggaaaggac

SEQ ID NO: 4167 - DNA, 231 bp, synthetic construct; identical to SEQ ID NO: 4166
  misc_feature 1..231: note = promoter
  source 1..231: mol_type = other DNA

SEQ ID NO: 4168 - DNA, 231 bp, synthetic construct
  misc_feature 1..231: note = promoter
  source 1..231: mol_type = other DNA
gagggcctatttcccatgattccttcatatttgcatataagatgcaaggctgttagagagataattagaactaatttgactgtaaacacaaatataatatgtgacatagaaagtgataatttcttgggtagtttgcagttttaaaattatgttttaaaatggactatcatctgcttaccgtaactttaaagtatttcgatttcttgactttatatatcttgtggaaaggac

SEQ ID NO: 4169 - DNA, 231 bp, synthetic construct; identical to SEQ ID NO: 4168
  misc_feature 1..231: note = promoter
  source 1..231: mol_type = other DNA

SEQ ID NO: 4170 - DNA, 231 bp, synthetic construct
  misc_feature 1..231: note = promoter
  source 1..231: mol_type = other DNA
gagggcctatttcccatgattccttcatatttgcatataagatgcaaggctgttagagagataattagaactaatttgactgtaaacacaaatatattatgtgacatagaaagtgataatttcttgggtagtttgcagttttaaaattatgttttaaaatggactatcatctgcttaccgtaactttaaagtatttcgatttcttgactttatatatcttgtggaaaggac

SEQ ID NO: 4171 - DNA, 231 bp, synthetic construct; identical to SEQ ID NO: 4170
  misc_feature 1..231: note = promoter
  source 1..231: mol_type = other DNA

SEQ ID NO: 4172 - DNA, 231 bp, synthetic construct; identical to SEQ ID NO: 4170
  misc_feature 1..231: note = promoter
  source 1..231: mol_type = other DNA

SEQ ID NO: 4173 - DNA, 231 bp, synthetic construct
  misc_feature 1..231: note = promoter
  source 1..231: mol_type = other DNA
gagggcctatttcccatgattccttcatatttgcatataagatgcaaggctgttagagagataattagaactaatttgactgtaaacacaaatatattaggtgacatagaaagtgataatttcttgggtagtttgcagttttaaaattatgttttaaaatggactatcatctgcttaccgtaactttaaagtatttcgatttcttgactttatatatcttgtggaaaggac

SEQ ID NO: 4174 - DNA, 231 bp, synthetic construct
  misc_feature 1..231: note = promoter
  source 1..231: mol_type = other DNA
gagggcctatttcccatgattccttcatatttgcatataagatgcaaggctgttagagagataattagaactaatttgactgtaaacacaaatatattagttgacatagaaagtgataatttcttgggtagtttgcagttttaaaattatgttttaaaatggactatcatctgcttaccgtaactttaaagtatttcgatttcttgactttatatatcttgtggaaaggac

SEQ ID NO: 4175 - DNA, 231 bp, synthetic construct
  misc_feature 1..231: note = promoter
  source 1..231: mol_type = other DNA
gagggcctatttcccatgattccttcatatttgcatataagatgcaaggctgttagagagataattagaactaatttgactgtaaacacaaatatattagtagacatagaaagtgataatttcttgggtagtttgcagttttaaaattatgttttaaaatggactatcatctgcttaccgtaactttaaagtatttcgatttcttgactttatatatcttgtggaaaggac

SEQ ID NO: 4176 - DNA, 231 bp, synthetic construct
  misc_feature 1..231: note = promoter
  source 1..231: mol_type = other DNA
gagggcctatttcccatgattccttcatatttgcatataagatgcaaggctgttagagagataattagaactaatttgactgtaaacacaaatatattagtacacatagaaagtgataatttcttgggtagtttgcagttttaaaattatgttttaaaatggactatcatctgcttaccgtaactttaaagtatttcgatttcttgactttatatatcttgtggaaaggac

SEQ ID NO: 4177 - DNA, 231 bp, synthetic construct; identical to SEQ ID NO: 4176
  misc_feature 1..231: note = promoter
  source 1..231: mol_type = other DNA

SEQ ID NO: 4178 - DNA, 231 bp, synthetic construct
  misc_feature 1..231: note = promoter
  source 1..231: mol_type = other DNA
gagggcctatttcccatgattccttcatatttgcatataagatgcaaggctgttagagagataattagaactaatttgactgtaaacacaaatatattagtacaaatagaaagtgataatttcttgggtagtttgcagttttaaaattatgttttaaaatggactatcatctgcttaccgtaactttaaagtatttcgatttcttgactttatatatcttgtggaaaggac

SEQ ID NO: 4179 - DNA, 231 bp, synthetic construct; identical to SEQ ID NO: 4178
  misc_feature 1..231: note = promoter
  source 1..231: mol_type = other DNA

SEQ ID NO: 4180 - DNA, 231 bp, synthetic construct
  misc_feature 1..231: note = promoter
  source 1..231: mol_type = other DNA
gagggcctatttcccatgattccttcatatttgcatataagatgcaaggctgttagagagataattagaactaatttgactgtaaacacaaatatattagtacaaaaagaaagtgataatttcttgggtagtttgcagttttaaaattatgttttaaaatggactatcatctgcttaccgtaactttaaagtatttcgatttcttgactttatatatcttgtggaaaggac

SEQ ID NO: 4181 - DNA, 231 bp, synthetic construct
  misc_feature 1..231: note = promoter
  source 1..231: mol_type = other DNA
gagggcctatttcccatgattccttcatatttgcatataagatgcaaggctgttagagagataattagaactaatttgactgtaaacacaaatatattagtacaaaatgaaagtgataatttcttgggtagtttgcagttttaaaattatgttttaaaatggactatcatctgcttaccgtaactttaaagtatttcgatttcttgactttatatatcttgtggaaaggac

SEQ ID NO: 4182 - DNA, 231 bp, synthetic construct
  misc_feature 1..231: note = promoter
  source 1..231: mol_type = other DNA
gagggcctatttcccatgattccttcatatttgcatataagatgcaaggctgttagagagataattagaactaatttgactgtaaacacaaatatattagtacaaaataaaagtgataatttcttgggtagtttgcagttttaaaattatgttttaaaatggactatcatctgcttaccgtaactttaaagtatttcgatttcttgactttatatatcttgtggaaaggac

SEQ ID NO: 4183 - DNA, 231 bp, synthetic construct
  misc_feature 1..231: note = promoter
  source 1..231: mol_type = other DNA
gagggcctatttcccatgattccttcatatttgcatataagatgcaaggctgttagagagataattagaactaatttgactgtaaacacaaatatattagtacaaaatataagtgataatttcttgggtagtttgcagttttaaaattatgttttaaaatggactatcatctgcttaccgtaactttaaagtatttcgatttcttgactttatatatcttgtggaaaggac

SEQ ID NO: 4184 - DNA, 231 bp, synthetic construct
  misc_feature 1..231: note = promoter
  source 1..231: mol_type = other DNA
gagggcctatttcccatgattccttcatatttgcatataagatgcaaggctgttagagagataattagaactaatttgactgtaaacacaaatatattagtacaaaatatgagtgataatttcttgggtagtttgcagttttaaaattatgttttaaaatggactatcatctgcttaccgtaactttaaagtatttcgatttcttgactttatatatcttgtggaaaggac

SEQ ID NO: 4185 - DNA, 231 bp, synthetic construct
  misc_feature 1..231: note = promoter
  source 1..231: mol_type = other DNA
gagggcctatttcccatgattccttcatatttgcatataagatgcaaggctgttagagagataattagaactaatttgactgtaaacacaaatatattagtacaaaatatgtgtgataatttcttgggtagtttgcagttttaaaattatgttttaaaatggactatcatctgcttaccgtaactttaaagtatttcgatttcttgactttatatatcttgtggaaaggac

SEQ ID NO: 4186 - DNA, 231 bp, synthetic construct; identical to SEQ ID NO: 4185
  misc_feature 1..231: note = promoter
  source 1..231: mol_type = other DNA

SEQ ID NO: 4187 - DNA, 231 bp, synthetic construct
  misc_feature 1..231: note = promoter
  source 1..231: mol_type = other DNA
gagggcctatttcccatgattccttcatatttgcatataagatgcaaggctgttagagagataattagaactaatttgactgtaaacacaaatatattagtacaaaatatgtgagataatttcttgggtagtttgcagttttaaaattatgttttaaaatggactatcatctgcttaccgtaactttaaagtatttcgatttcttgactttatatatcttgtggaaaggac

SEQ ID NO: 4188 - DNA, 231 bp, synthetic construct
  misc_feature 1..231: note = promoter
  source 1..231: mol_type = other DNA
gagggcctatttcccatgattccttcatatttgcatataagatgcaaggctgttagagagataattagaactaatttgactgtaaacacaaatatattagtacaaaatatgtgacataatttcttgggtagtttgcagttttaaaattatgttttaaaatggactatcatctgcttaccgtaactttaaagtatttcgatttcttgactttatatatcttgtggaaaggac

SEQ ID NO: 4189 - DNA, 231 bp, synthetic construct; identical to SEQ ID NO: 4188
  misc_feature 1..231: note = promoter
  source 1..231: mol_type = other DNA

SEQ ID NO: 4190 - DNA, 231 bp, synthetic construct; identical to SEQ ID NO: 4188
  misc_feature 1..231: note = promoter
  source 1..231: mol_type = other DNA

SEQ ID NO: 4191 - DNA, 231 bp, synthetic construct; identical to SEQ ID NO: 4188
  misc_feature 1..231: note = promoter
  source 1..231: mol_type = other DNA

SEQ ID NO: 4192 - DNA, 231 bp, synthetic construct
  misc_feature 1..231: note = promoter
  source 1..231: mol_type = other DNA
gagggcctatttcccatgattccttcatatttgcatataagatgcaaggctgttagagagataattagaactaatttgactgtaaacacaaatatattagtacaaaatatgtgacatagtttcttgggtagtttgcagttttaaaattatgttttaaaatggactatcatctgcttaccgtaactttaaagtatttcgatttcttgactttatatatcttgtggaaaggac

SEQ ID NO: 4193 - DNA, 231 bp, synthetic construct
  misc_feature 1..231: note = promoter
  source 1..231: mol_type = other DNA
gagggcctatttcccatgattccttcatatttgcatataagatgcaaggctgttagagagataattagaactaatttgactgtaaacacaaatatattagtacaaaatatgtgacatagattcttgggtagtttgcagttttaaaattatgttttaaaatggactatcatctgcttaccgtaactttaaagtatttcgatttcttgactttatatatcttgtggaaaggac

SEQ ID NO: 4194 - DNA, 231 bp, synthetic construct
  misc_feature 1..231: note = promoter
  source 1..231: mol_type = other DNA
gagggcctatttcccatgattccttcatatttgcatataagatgcaaggctgttagagagataattagaactaatttgactgtaaacacaaatatattagtacaaaatatgtgacatagaatcttgggtagtttgcagttttaaaattatgttttaaaatggactatcatctgcttaccgtaactttaaagtatttcgatttcttgactttatatatcttgtggaaaggac

SEQ ID NO: 4195 - DNA, 231 bp, synthetic construct
  misc_feature 1..231: note = promoter
  source 1..231: mol_type = other DNA
gagggcctatttcccatgattccttcatatttgcatataagatgcaaggctgttagagagataattagaactaatttgactgtaaacacaaatatattagtacaaaatatgtgacatagaaacttgggtagtttgcagttttaaaattatgttttaaaatggactatcatctgcttaccgtaactttaaagtatttcgatttcttgactttatatatcttgtggaaaggac

SEQ ID NO: 4196 - DNA, 231 bp, synthetic construct
  misc_feature 1..231: note = promoter
  source 1..231: mol_type = other DNA
gagggcctatttcccatgattccttcatatttgcatataagatgcaaggctgttagagagataattagaactaatttgactgtaaacacaaatatattagtacaaaatatgtgacatagaaagttgggtagtttgcagttttaaaattatgttttaaaatggactatcatctgcttaccgtaactttaaagtatttcgatttcttgactttatatatcttgtggaaaggac

SEQ ID NO: 4197 - DNA, 231 bp, synthetic construct; identical to SEQ ID NO: 4196
  misc_feature 1..231: note = promoter
  source 1..231: mol_type = other DNA

SEQ ID NO: 4198 - DNA, 231 bp, synthetic construct
  misc_feature 1..231: note = promoter
  source 1..231: mol_type = other DNA
gagggcctatttcccatgattccttcatatttgcatataagatgcaaggctgttagagagataattagaactaatttgactgtaaacacaaatatattagtacaaaatatgtgacatagaaagtggggtagtttgcagttttaaaattatgttttaaaatggactatcatctgcttaccgtaactttaaagtatttcgatttcttgactttatatatcttgtggaaaggac

SEQ ID NO: 4199 - DNA, 231 bp, synthetic construct
  misc_feature 1..231: note = promoter
  source 1..231: mol_type = other DNA
gagggcctatttcccatgattccttcatatttgcatataagatgcaaggctgttagagagataattagaactaatttgactgtaaacacaaatatattagtacaaaatatgtgacatagaaagtgaggtagtttgcagttttaaaattatgttttaaaatggactatcatctgcttaccgtaactttaaagtatttcgatttcttgactttatatatcttgtggaaaggac

SEQ ID NO: 4200 - DNA, 231 bp, synthetic construct
  misc_feature 1..231: note = promoter
  source 1..231: mol_type = other DNA
gagggcctatttcccatgattccttcatatttgcatataagatgcaaggctgttagagagataattagaactaatttgactgtaaacacaaatatattagtacaaaatatgtgacatagaaagtgatgtagtttgcagttttaaaattatgttttaaaatggactatcatctgcttaccgtaactttaaagtatttcgatttcttgactttatatatcttgtggaaaggac

SEQ ID NO: 4201 - DNA, 231 bp, synthetic construct
  misc_feature 1..231: note = promoter
  source 1..231: mol_type = other DNA
gagggcctatttcccatgattccttcatatttgcatataagatgcaaggctgttagagagataattagaactaatttgactgtaaacacaaatatattagtacaaaatatgtgacatagaaagtgatatagtttgcagttttaaaattatgttttaaaatggactatcatctgcttaccgtaactttaaagtatttcgatttcttgactttatatatcttgtggaaaggac

SEQ ID NO: 4202 - DNA, 231 bp, synthetic construct
  misc_feature 1..231: note = promoter
  source 1..231: mol_type = other DNA
gagggcctatttcccatgattccttcatatttgcatataagatgcaaggctgttagagagataattagaactaatttgactgtaaacacaaatatattagtacaaaatatgtgacatagaaagtgataaagtttgcagttttaaaattatgttttaaaatggactatcatctgcttaccgtaactttaaagtatttcgatttcttgactttatatatcttgtggaaaggac

SEQ ID NO: 4203 - DNA, 231 bp, synthetic construct
  misc_feature 1..231: note = promoter
  source 1..231: mol_type = other DNA
gagggcctatttcccatgattccttcatatttgcatataagatgcaaggctgttagagagataattagaactaatttgactgtaaacacaaatatattagtacaaaatatgtgacatagaaagtgataatgtttgcagttttaaaattatgttttaaaatggactatcatctgcttaccgtaactttaaagtatttcgatttcttgactttatatatcttgtggaaaggac

SEQ ID NO: 4204 - DNA, 231 bp, synthetic construct
  misc_feature 1..231: note = promoter
  source 1..231: mol_type = other DNA
gagggcctatttcccatgattccttcatatttgcatataagatgcaaggctgttagagagataattagaactaatttgactgtaaacacaaatatattagtacaaaatatgtgacatagaaagtgataatttttgcagttttaaaattatgttttaaaatggactatcatctgcttaccgtaactttaaagtatttcgatttcttgactttatatatcttgtggaaaggac

SEQ ID NO: 4205 - DNA, 231 bp, synthetic construct; identical to SEQ ID NO: 4204
  misc_feature 1..231: note = promoter
  source 1..231: mol_type = other DNA

SEQ ID NO: 4206 - DNA, 231 bp, synthetic construct
  misc_feature 1..231: note = promoter
  source 1..231: mol_type = other DNA
gagggcctatttcccatgattccttcatatttgcatataagatgcaaggctgttagagagataattagaactaatttgactgtaaacacaaatatattagtacaaaatatgtgacatagaaagtgataatttctgcagttttaaaattatgttttaaaatggactatcatctgcttaccgtaactttaaagtatttcgatttcttgactttatatatcttgtggaaaggac

SEQ ID NO: 4207 - DNA, 231 bp, synthetic construct; identical to SEQ ID NO: 4206
  misc_feature 1..231: note = promoter
  source 1..231: mol_type = other DNA

SEQ ID NO: 4208 - DNA, 231 bp, synthetic construct
  misc_feature 1..231: note = promoter
  source 1..231: mol_type = other DNA
gagggcctatttcccatgattccttcatatttgcatataagatgcaaggctgttagagagataattagaactaatttgactgtaaacacaaatatattagtacaaaatatgtgacatagaaagtgataatttcttcagttttaaaattatgttttaaaatggactatcatctgcttaccgtaactttaaagtatttcgatttcttgactttatatatcttgtggaaaggac

SEQ ID NO: 4209 - DNA, 231 bp, synthetic construct
  misc_feature 1..231: note = promoter
  source 1..231: mol_type = other DNA
gagggcctatttcccatgattccttcatatttgcatataagatgcaaggctgttagagagataattagaactaatttgactgtaaacacaaatatattagtacaaaatatgtgacatagaaagtgataatttcttgagttttaaaattatgttttaaaatggactatcatctgcttaccgtaactttaaagtatttcgatttcttgactttatatatcttgtggaaaggac

SEQ ID NO: 4210 - DNA, 231 bp, synthetic construct
  misc_feature 1..231: note = promoter
  source 1..231: mol_type = other DNA
gagggcctatttcccatgattccttcatatttgcatataagatgcaaggctgttagagagataattagaactaatttgactgtaaacacaaatatattagtacaaaatatgtgacatagaaagtgataatttcttgggttttaaaattatgttttaaaatggactatcatctgcttaccgtaactttaaagtatttcgatttcttgactttatatatcttgtggaaaggac

SEQ ID NO: 4211 - DNA, 231 bp, synthetic construct; identical to SEQ ID NO: 4210
  misc_feature 1..231: note = promoter
  source 1..231: mol_type = other DNA

SEQ ID NO: 4212 - DNA, 231 bp, synthetic construct; identical to SEQ ID NO: 4210
  misc_feature 1..231: note = promoter
  source 1..231: mol_type = other DNA

SEQ ID NO: 4213 - DNA, 231 bp, synthetic construct
  misc_feature 1..231: note = promoter
  source 1..231: mol_type = other DNA
gagggcctatttcccatgattccttcatatttgcatataagatgcaaggctgttagagagataattagaactaatttgactgtaaacacaaatatattagtacaaaatatgtgacatagaaagtgataatttcttgggtattaaaattatgttttaaaatggactatcatctgcttaccgtaactttaaagtatttcgatttcttgactttatatatcttgtggaaaggac

SEQ ID NO: 4214 - DNA, 231 bp, synthetic construct
  misc_feature 1..231: note = promoter
  source 1..231: mol_type = other DNA
gagggcctatttcccatgattccttcatatttgcatataagatgcaaggctgttagagagataattagaactaatttgactgtaaacacaaatatattagtacaaaatatgtgacatagaaagtgataatttcttgggtagtaaaattatgttttaaaatggactatcatctgcttaccgtaactttaaagtatttcgatttcttgactttatatatcttgtggaaaggac

SEQ ID NO: 4215 - DNA, 231 bp, synthetic construct; identical to SEQ ID NO: 4214
  misc_feature 1..231: note = promoter
  source 1..231: mol_type = other DNA

SEQ ID NO: 4216 - DNA, 231 bp, synthetic construct
  misc_feature 1..231: note = promoter
  source 1..231: mol_type = other DNA
gagggcctatttcccatgattccttcatatttgcatataagatgcaaggctgttagagagataattagaactaatttgactgtaaacacaaatatattagtacaaaatatgtgacatagaaagtgataatttcttgggtagttaaattatgttttaaaatggactatcatctgcttaccgtaactttaaagtatttcgatttcttgactttatatatcttgtggaaaggac

SEQ ID NO: 4217 - DNA, 231 bp, synthetic construct
  misc_feature 1..231: note = promoter
  source 1..231: mol_type = other DNA
gagggcctatttcccatgattccttcatatttgcatataagatgcaaggctgttagagagataattagaactaatttgactgtaaacacaaatatattagtacaaaatatgtgacatagaaagtgataatttcttgggtagtttaattatgttttaaaatggactatcatctgcttaccgtaactttaaagtatttcgatttcttgactttatatatcttgtggaaaggac

SEQ ID NO: 4218 - DNA, 231 bp, synthetic construct
  misc_feature 1..231: note = promoter
  source 1..231: mol_type = other DNA
gagggcctatttcccatgattccttcatatttgcatataagatgcaaggctgttagagagataattagaactaatttgactgtaaacacaaatatattagtacaaaatatgtgacatagaaagtgataatttcttgggtagtttgattatgttttaaaatggactatcatctgcttaccgtaactttaaagtatttcgatttcttgactttatatatcttgtggaaaggac

SEQ ID NO: 4219 - DNA, 231 bp, synthetic construct
  misc_feature 1..231: note = promoter
  source 1..231: mol_type = other DNA
gagggcctatttcccatgattccttcatatttgcatataagatgcaaggctgttagagagataattagaactaatttgactgtaaacacaaatatattagtacaaaatatgtgacatagaaagtgataatttcttgggtagtttgcttatgttttaaaatggactatcatctgcttaccgtaactttaaagtatttcgatttcttgactttatatatcttgtggaaaggac

SEQ ID NO: 4220 - DNA, 231 bp, synthetic construct
  misc_feature 1..231: note = promoter
  source 1..231: mol_type = other DNA
gagggcctatttcccatgattccttcatatttgcatataagatgcaaggctgttagagagataattagaactaatttgactgtaaacacaaatatattagtacaaaatatgtgacatagaaagtgataatttcttgggtagtttgcatatgttttaaaatggactatcatctgcttaccgtaactttaaagtatttcgatttcttgactttatatatcttgtggaaaggac

SEQ ID NO: 4221 - DNA, 231 bp, synthetic construct
  misc_feature 1..231: note = promoter
  source 1..231: mol_type = other DNA
gagggcctatttcccatgattccttcatatttgcatataagatgcaaggctgttagagagataattagaactaatttgactgtaaacacaaatatattagtacaaaatatgtgacatagaaagtgataatttcttgggtagtttgcagatgttttaaaatggactatcatctgcttaccgtaactttaaagtatttcgatttcttgactttatatatcttgtggaaaggac

SEQ ID NO: 4222 - DNA, 231 bp, synthetic construct
  misc_feature 1..231: note = promoter
  source 1..231: mol_type = other DNA
gagggcctatttcccatgattccttcatatttgcatataagatgcaaggctgttagagagataattagaactaatttgactgtaaacacaaatatattagtacaaaatatgtgacatagaaagtgataatttcttgggtagtttgcagttgttttaaaatggactatcatctgcttaccgtaactttaaagtatttcgatttcttgactttatatatcttgtggaaaggac

SEQ ID NO: 4223 - DNA, 231 bp, synthetic construct; identical to SEQ ID NO: 4222
  misc_feature 1..231: note = promoter
  source 1..231: mol_type = other DNA

SEQ ID NO: 4224 - DNA, 231 bp, synthetic construct
  misc_feature 1..231: note = promoter
  source 1..231: mol_type = other DNA
gagggcctatttcccatgattccttcatatttgcatataagatgcaaggctgttagagagataattagaactaatttgactgtaaacacaaatatattagtacaaaatatgtgacatagaaagtgataatttcttgggtagtttgcagtttttttaaaatggactatcatctgcttaccgtaactttaaagtatttcgatttcttgactttatatatcttgtggaaaggac

SEQ ID NO: 4225 - DNA, 231 bp, synthetic construct; identical to SEQ ID NO: 4224
  misc_feature 1..231: note = promoter
  source 1..231: mol_type = other DNA

SEQ ID NO: 4226 - DNA, 231 bp, synthetic construct
  misc_feature 1..231: note = promoter
  source 1..231: mol_type = other DNA
gagggcctatttcccatgattccttcatatttgcatataagatgcaaggctgttagagagataattagaactaatttgactgtaaacacaaatatattagtacaaaatatgtgacatagaaagtgataatttcttgggtagtttgcagttttattaaaatggactatcatctgcttaccgtaactttaaagtatttcgatttcttgactttatatatcttgtggaaaggac

SEQ ID NO: 4227 - DNA, 231 bp, synthetic construct
  misc_feature 1..231: note = promoter
  source 1..231: mol_type = other DNA
gagggcctatttcccatgattccttcatatttgcatataagatgcaaggctgttagagagataattagaactaatttgactgtaaacacaaatatattagtacaaaatatgtgacatagaaagtgataatttcttgggtagtttgcagttttaataaaatggactatcatctgcttaccgtaactttaaagtatttcgatttcttgactttatatatcttgtggaaaggac

SEQ ID NO: 4228 - DNA, 231 bp, synthetic construct
  misc_feature 1..231: note = promoter
  source 1..231: mol_type = other DNA
gagggcctatttcccatgattccttcatatttgcatataagatgcaaggctgttagagagataattagaactaatttgactgtaaacacaaatatattagtacaaaatatgtgacatagaaagtgataatttcttgggtagtttgcagttttaaaaaaatggactatcatctgcttaccgtaactttaaagtatttcgatttcttgactttatatatcttgtggaaaggac

SEQ ID NO: 4229 - DNA, 231 bp, synthetic construct; identical to SEQ ID NO: 4228
  misc_feature 1..231: note = promoter
  source 1..231: mol_type = other DNA

SEQ ID NO: 4230 - DNA, 231 bp, synthetic construct
  misc_feature 1..231: note = promoter
  source 1..231: mol_type = other DNA
gagggcctatttcccatgattccttcatatttgcatataagatgcaaggctgttagagagataattagaactaatttgactgtaaacacaaatatattagtacaaaatatgtgacatagaaagtgataatttcttgggtagtttgcagttttaaaataatggactatcatctgcttaccgtaactttaaagtatttcgatttcttgactttatatatcttgtggaaaggac

SEQ ID NO: 4231 - DNA, 231 bp, synthetic construct
  misc_feature 1..231: note = promoter
  source 1..231: mol_type = other DNA
gagggcctatttcccatgattccttcatatttgcatataagatgcaaggctgttagagagataattagaactaatttgactgtaaacacaaatatattagtacaaaatatgtgacatagaaagtgataatttcttgggtagtttgcagttttaaaattatggactatcatctgcttaccgtaactttaaagtatttcgatttcttgactttatatatcttgtggaaaggac

SEQ ID NO: 4232 - DNA, 231 bp, synthetic construct; identical to SEQ ID NO: 4231
  misc_feature 1..231: note = promoter
  source 1..231: mol_type = other DNA

SEQ ID NO: 4233 - DNA, 231 bp, synthetic construct; identical to SEQ ID NO: 4231
  misc_feature 1..231: note = promoter
  source 1..231: mol_type = other DNA

SEQ ID NO: 4234 - DNA, 231 bp, synthetic construct; identical to SEQ ID NO: 4231
  misc_feature 1..231: note = promoter
  source 1..231: mol_type = other DNA

SEQ ID NO: 4235 - DNA, 231 bp, synthetic construct
  misc_feature 1..231: note = promoter
  source 1..231: mol_type = other DNA
gagggcctatttcccatgattccttcatatttgcatataagatgcaaggctgttagagagataattagaactaatttgactgtaaacacaaatatattagtacaaaatatgtgacatagaaagtgataatttcttgggtagtttgcagttttaaaattatgtactatcatctgcttaccgtaactttaaagtatttcgatttcttgactttatatatcttgtggaaaggac

SEQ ID NO: 4236 - DNA, 231 bp, synthetic construct
  misc_feature 1..231: note = promoter
  source 1..231: mol_type = other DNA
gagggcctatttcccatgattccttcatatttgcatataagatgcaaggctgttagagagataattagaactaatttgactgtaaacacaaatatattagtacaaaatatgtgacatagaaagtgataatttcttgggtagtttgcagttttaaaattatgttctatcatctgcttaccgtaactttaaagtatttcgatttcttgactttatatatcttgtggaaaggac

SEQ ID NO: 4237 - DNA, 231 bp, synthetic construct
  misc_feature 1..231: note = promoter
  source 1..231: mol_type = other DNA
gagggcctatttcccatgattccttcatatttgcatataagatgcaaggctgttagagagataattagaactaatttgactgtaaacacaaatatattagtacaaaatatgtgacatagaaagtgataatttcttgggtagtttgcagttttaaaattatgttttatcatctgcttaccgtaactttaaagtatttcgatttcttgactttatatatcttgtggaaaggac

SEQ ID NO: 4238 - DNA, 231 bp, synthetic construct; identical to SEQ ID NO: 4237
  misc_feature 1..231: note = promoter
  source 1..231: mol_type = other DNA

SEQ ID NO: 4239 - DNA, 231 bp, synthetic construct; identical to SEQ ID NO: 4237
  misc_feature 1..231: note = promoter
  source 1..231: mol_type = other DNA

SEQ ID NO: 4240 - DNA, 231 bp, synthetic construct
  misc_feature 1..231: note = promoter
  source 1..231: mol_type = other DNA
gagggcctatttcccatgattccttcatatttgcatataagatgcaaggctgttagagagataattagaactaatttgactgtaaacacaaatatattagtacaaaatatgtgacatagaaagtgataatttcttgggtagtttgcagttttaaaattatgttttaacatctgcttaccgtaactttaaagtatttcgatttcttgactttatatatcttgtggaaaggac

SEQ ID NO: 4241 - DNA, 231 bp, synthetic construct
  misc_feature 1..231: note = promoter
  source 1..231: mol_type = other DNA
gagggcctatttcccatgattccttcatatttgcatataagatgcaaggctgttagagagataattagaactaatttgactgtaaacacaaatatattagtacaaaatatgtgacatagaaagtgataatttcttgggtagtttgcagttttaaaattatgttttaaaatctgcttaccgtaactttaaagtatttcgatttcttgactttatatatcttgtggaaaggac

SEQ ID NO: 4242 - DNA, 231 bp, synthetic construct; identical to SEQ ID NO: 4241
  misc_feature 1..231: note = promoter
  source 1..231: mol_type = other DNA

SEQ ID NO: 4243 - DNA, 231 bp, synthetic construct; identical to SEQ ID NO: 4241
  misc_feature 1..231: note = promoter
  source 1..231: mol_type = other DNA

SEQ ID NO: 4244 - DNA, 231 bp, synthetic construct
  misc_feature 1..231: note = promoter
  source 1..231: mol_type = other DNA
gagggcctatttcccatgattccttcatatttgcatataagatgcaaggctgttagagagataattagaactaatttgactgtaaacacaaatatattagtacaaaatatgtgacatagaaagtgataatttcttgggtagtttgcagttttaaaattatgttttaaaatgtgcttaccgtaactttaaagtatttcgatttcttgactttatatatcttgtggaaaggac

SEQ ID NO: 4245 - DNA, 231 bp, synthetic construct
  misc_feature 1..231: note = promoter
  source 1..231: mol_type = other DNA
gagggcctatttcccatgattccttcatatttgcatataagatgcaaggctgttagagagataattagaactaatttgactgtaaacacaaatatattagtacaaaatatgtgacatagaaagtgataatttcttgggtagtttgcagttttaaaattatgttttaaaatgggcttaccgtaactttaaagtatttcgatttcttgactttatatatcttgtggaaaggac

SEQ ID NO: 4246 - DNA, 231 bp, synthetic construct
  misc_feature 1..231: note = promoter
  source 1..231: mol_type = other DNA
gagggcctatttcccatgattccttcatatttgcatataagatgcaaggctgttagagagataattagaactaatttgactgtaaacacaaatatattagtacaaaatatgtgacatagaaagtgataatttcttgggtagtttgcagttttaaaattatgttttaaaatggacttaccgtaactttaaagtatttcgatttcttgactttatatatcttgtggaaaggac

SEQ ID NO: 4247 - DNA, 231 bp, synthetic construct; identical to SEQ ID NO: 4246
  misc_feature 1..231: note = promoter
  source 1..231: mol_type = other DNA

SEQ ID NO: 4248 - DNA, 231 bp, synthetic construct; identical to SEQ ID NO: 4246
  misc_feature 1..231: note = promoter
  source 1..231: mol_type = other DNA

SEQ ID NO: 4249 - DNA, 231 bp, synthetic construct
  misc_feature 1..231: note = promoter
  source 1..231: mol_type = other DNA
gagggcctatttcccatgattccttcatatttgcatataagatgcaaggctgttagagagataattagaactaatttgactgtaaacacaaatatattagtacaaaatatgtgacatagaaagtgataatttcttgggtagtttgcagttttaaaattatgttttaaaatggactaaccgtaactttaaagtatttcgatttcttgactttatatatcttgtggaaaggac

SEQ ID NO: 4250 - DNA, 231 bp, synthetic construct
  misc_feature 1..231: note = promoter
  source 1..231: mol_type = other DNA
gagggcctatttcccatgattccttcatatttgcatataagatgcaaggctgttagagagataattagaactaatttgactgtaaacacaaatatattagtacaaaatatgtgacatagaaagtgataatttcttgggtagtttgcagttttaaaattatgttttaaaatggactatccgtaactttaaagtatttcgatttcttgactttatatatcttgtggaaaggac

SEQ ID NO: 4251 - DNA, 231 bp, synthetic construct; identical to SEQ ID NO: 4250
  misc_feature 1..231: note = promoter
  source 1..231: mol_type = other DNA

SEQ ID NO: 4252 - DNA, 231 bp, synthetic construct
  misc_feature 1..231: note = promoter
  source 1..231: mol_type = other DNA
gagggcctatttcccatgattccttcatatttgcatataagatgcaaggctgttagagagataattagaactaatttgactgtaaacacaaatatattagtacaaaatatgtgacatagaaagtgataatttcttgggtagtttgcagttttaaaattatgttttaaaatggactatcagtaactttaaagtatttcgatttcttgactttatatatcttgtggaaaggac

SEQ ID NO: 4253 - DNA, 231 bp, synthetic construct
  misc_feature 1..231: note = promoter
  source 1..231: mol_type = other DNA
gagggcctatttcccatgattccttcatatttgcatataagatgcaaggctgttagagagataattagaactaatttgactgtaaacacaaatatattagtacaaaatatgtgacatagaaagtgataatttcttgggtagtttgcagttttaaaattatgttttaaaatggactatcattaactttaaagtatttcgatttcttgactttatatatcttgtggaaaggac

SEQ ID NO: 4254 - DNA, 231 bp, synthetic construct
  misc_feature 1..231: note = promoter
  source 1..231: mol_type = other DNA
gagggcctatttcccatgattccttcatatttgcatataagatgcaaggctgttagagagataattagaactaatttgactgtaaacacaaatatattagtacaaaatatgtgacatagaaagtgataatttcttgggtagtttgcagttttaaaattatgttttaaaatggactatcatcaactttaaagtatttcgatttcttgactttatatatcttgtggaaaggac

SEQ ID NO: 4255 - DNA, 231 bp, synthetic construct
  misc_feature 1..231: note = promoter
  source 1..231: mol_type = other DNA
gagggcctatttcccatgattccttcatatttgcatataagatgcaaggctgttagagagataattagaactaatttgactgtaaacacaaatatattagtacaaaatatgtgacatagaaagtgataatttcttgggtagtttgcagttttaaaattatgttttaaaatggactatcatctactttaaagtatttcgatttcttgactttatatatcttgtggaaaggac

SEQ ID NO: 4256 - DNA, 231 bp, synthetic construct
  misc_feature 1..231: note = promoter
  source 1..231: mol_type = other DNA
gagggcctatttcccatgattccttcatatttgcatataagatgcaaggctgttagagagataattagaactaatttgactgtaaacacaaatatattagtacaaaatatgtgacatagaaagtgataatttcttgggtagtttgcagttttaaaattatgttttaaaatggactatcatctgctttaaagtatttcgatttcttgactttatatatcttgtggaaaggac

SEQ ID NO: 4257 - DNA, 231 bp, synthetic construct; identical to SEQ ID NO: 4256
  misc_feature 1..231: note = promoter
  source 1..231: mol_type = other DNA

SEQ ID NO: 4258 - DNA, 231 bp, synthetic construct; identical to SEQ ID NO: 4256
  misc_feature 1..231: note = promoter
  source 1..231: mol_type = other DNA

SEQ ID NO: 4259 - DNA, 231 bp, synthetic construct; identical to SEQ ID NO: 4256
  misc_feature 1..231: note = promoter
  source 1..231: mol_type = other DNA

SEQ ID NO: 4260 - DNA, 231 bp, synthetic construct
  misc_feature 1..231: note = promoter
  source 1..231: mol_type = other DNA
gagggcctatttcccatgattccttcatatttgcatataagatgcaaggctgttagagagataattagaactaatttgactgtaaacacaaatatattagtacaaaatatgtgacatagaaagtgataatttcttgggtagtttgcagttttaaaattatgttttaaaatggactatcatctgcttaaaagtatttcgatttcttgactttatatatcttgtggaaaggac

SEQ ID NO: 4261 - DNA, 231 bp, synthetic construct
  misc_feature 1..231: note = promoter
  source 1..231: mol_type = other DNA
gagggcctatttcccatgattccttcatatttgcatataagatgcaaggctgttagagagataattagaactaatttgactgtaaacacaaatatattagtacaaaatatgtgacatagaaagtgataatttcttgggtagtttgcagttttaaaattatgttttaaaatggactatcatctgcttacaagtatttcgatttcttgactttatatatcttgtggaaaggac

SEQ ID NO: 4262 - DNA, 231 bp, synthetic construct
  misc_feature 1..231: note = promoter
  source 1..231: mol_type = other DNA
gagggcctatttcccatgattccttcatatttgcatataagatgcaaggctgttagagagataattagaactaatttgactgtaaacacaaatatattagtacaaaatatgtgacatagaaagtgataatttcttgggtagtttgcagttttaaaattatgttttaaaatggactatcatctgcttaccagtatttcgatttcttgactttatatatcttgtggaaaggac

SEQ ID NO: 4263 - DNA, 231 bp, synthetic construct
  misc_feature 1..231: note = promoter
  source 1..231: mol_type = other DNA
gagggcctatttcccatgattccttcatatttgcatataagatgcaaggctgttagagagataattagaactaatttgactgtaaacacaaatatattagtacaaaatatgtgacatagaaagtgataatttcttgggtagtttgcagttttaaaattatgttttaaaatggactatcatctgcttaccggtatttcgatttcttgactttatatatcttgtggaaaggac

SEQ ID NO: 4264 - DNA, 231 bp, synthetic construct
  misc_feature 1..231: note = promoter
  source 1..231: mol_type = other DNA
gagggcctatttcccatgattccttcatatttgcatataagatgcaaggctgttagagagataattagaactaatttgactgtaaacacaaatatattagtacaaaatatgtgacatagaaagtgataatttcttgggtagtttgcagttttaaaattatgttttaaaatggactatcatctgcttaccgttatttcgatttcttgactttatatatcttgtggaaaggac

SEQ ID NO: 4265 - DNA, 231 bp, synthetic construct
  misc_feature 1..231: note = promoter
  source 1..231: mol_type = other DNA
gagggcctatttcccatgattccttcatatttgcatataagatgcaaggctgttagagagataattagaactaatttgactgtaaacacaaatatattagtacaaaatatgtgacatagaaagtgataatttcttgggtagtttgcagttttaaaattatgttttaaaatggactatcatctgcttaccgtaatttcgatttcttgactttatatatcttgtggaaaggac

SEQ ID NO: 4266 - DNA, 231 bp, synthetic construct; identical to SEQ ID NO: 4265
  misc_feature 1..231: note = promoter
  source 1..231: mol_type = other DNA

SEQ ID NO: 4267 - DNA, 231 bp, synthetic construct
  misc_feature 1..231: note = promoter
  source 1..231: mol_type = other DNA
gagggcctatttcccatgattccttcatatttgcatataagatgcaaggctgttagagagataattagaactaatttgactgtaaacacaaatatattagtacaaaatatgtgacatagaaagtgataatttcttgggtagtttgcagttttaaaattatgttttaaaatggactatcatctgcttaccgtaacttcgatttcttgactttatatatcttgtggaaaggac

SEQ ID NO: 4268 - DNA, 231 bp, synthetic construct; identical to SEQ ID NO: 4267
  misc_feature 1..231: note = promoter
  source 1..231: mol_type = other DNA

SEQ ID NO: 4269 - DNA, 231 bp, synthetic construct; identical to SEQ ID NO: 4267
  misc_feature 1..231: note = promoter
  source 1..231: mol_type = other DNA

SEQ ID NO: 4270 - DNA, 231 bp, synthetic construct
  misc_feature 1..231: note = promoter
  source 1..231: mol_type = other DNA
gagggcctatttcccatgattccttcatatttgcatataagatgcaaggctgttagagagataattagaactaatttgactgtaaacacaaatatattagtacaaaatatgtgacatagaaagtgataatttcttgggtagtttgcagttttaaaattatgttttaaaatggactatcatctgcttaccgtaactttgatttcttgactttatatatcttgtggaaaggac

SEQ ID NO: 4271 - DNA, 231 bp, synthetic construct
  misc_feature 1..231: note = promoter
  source 1..231: mol_type = other DNA
gagggcctatttcccatgattccttcatatttgcatataagatgcaaggctgttagagagataattagaactaatttgactgtaaacacaaatatattagtacaaaatatgtgacatagaaagtgataatttcttgggtagtttgcagttttaaaattatgttttaaaatggactatcatctgcttaccgtaactttaatttcttgactttatatatcttgtggaaaggac

SEQ ID NO: 4272 - DNA, 231 bp, synthetic construct; identical to SEQ ID NO: 4271
  misc_feature 1..231: note = promoter
  source 1..231: mol_type = other DNA

SEQ ID NO: 4273 - DNA, 231 bp, synthetic construct
  misc_feature 1..231: note = promoter
  source 1..231: mol_type = other DNA
gagggcctatttcccatgattccttcatatttgcatataagatgcaaggctgttagagagataattagaactaatttgactgtaaacacaaatatattagtacaaaatatgtgacatagaaagtgataatttcttgggtagtttgcagttttaaaattatgttttaaaatggactatcatctgcttaccgtaactttaaattcttgactttatatatcttgtggaaaggac

SEQ ID NO: 4274 - DNA, 231 bp, synthetic construct
  misc_feature 1..231: note = promoter
  source 1..231: mol_type = other DNA
gagggcctatttcccatgattccttcatatttgcatataagatgcaaggctgttagagagataattagaactaatttgactgtaaacacaaatatattagtacaaaatatgtgacatagaaagtgataatttcttgggtagtttgcagttttaaaattatgttttaaaatggactatcatctgcttaccgtaactttaaagtcttgactttatatatcttgtggaaaggac

SEQ ID NO: 4275 - DNA, 231 bp, synthetic construct; identical to SEQ ID NO: 4274
  misc_feature 1..231: note = promoter
  source 1..231: mol_type = other DNA

SEQ ID NO: 4276 - DNA, 231 bp, synthetic construct
  misc_feature 1..231: note = promoter
  source 1..231: mol_type = other DNA
gagggcctatttcccatgattccttcatatttgcatataagatgcaaggctgttagagagataattagaactaatttgactgtaaacacaaatatattagtacaaaatatgtgacatagaaagtgataatttcttgggtagtttgcagttttaaaattatgttttaaaatggactatcatctgcttaccgtaactttaaagtattgactttatatatcttgtggaaaggac

SEQ ID NO: 4277 - DNA, 231 bp, synthetic construct; identical to SEQ ID NO: 4276
  misc_feature 1..231: note = promoter
  source 1..231: mol_type = other DNA

SEQ ID NO: 4278 - DNA, 231 bp, synthetic construct; identical to SEQ ID NO: 4276
  misc_feature 1..231: note = promoter
  source 1..231: mol_type = other DNA

SEQ ID NO: 4279 - DNA, 231 bp, synthetic construct
  misc_feature 1..231: note = promoter
  source 1..231: mol_type = other DNA
gagggcctatttcccatgattccttcatatttgcatataagatgcaaggctgttagagagataattagaactaatttgactgtaaacacaaatatattagtacaaaatatgtgacatagaaagtgataatttcttgggtagtttgcagttttaaaattatgttttaaaatggactatcatctgcttaccgtaactttaaagtatttactttatatatcttgtggaaaggac

SEQ ID NO: 4280 - DNA, 231 bp, synthetic construct
  misc_feature 1..231: note = promoter
  source 1..231: mol_type = other DNA
gagggcctatttcccatgattccttcatatttgcatataagatgcaaggctgttagagagataattagaactaatttgactgtaaacacaaatatattagtacaaaatatgtgacatagaaagtgataatttcttgggtagtttgcagttttaaaattatgttttaaaatggactatcatctgcttaccgtaactttaaagtatttcctttatatatcttgtggaaaggac

SEQ ID NO: 4281 - DNA, 231 bp, synthetic construct
  misc_feature 1..231: note = promoter
  source 1..231: mol_type = other DNA
gagggcctatttcccatgattccttcatatttgcatataagatgcaaggctgttagagagataattagaactaatttgactgtaaacacaaatatattagtacaaaatatgtgacatagaaagtgataatttcttgggtagtttgcagttttaaaattatgttttaaaatggactatcatctgcttaccgtaactttaaagtatttcgtttatatatcttgtggaaaggac

SEQ ID NO: 4282 - DNA, 231 bp, synthetic construct
  misc_feature 1..231: note = promoter
  source 1..231: mol_type = other DNA
gagggcctatttcccatgattccttcatatttgcatataagatgcaaggctgttagagagataattagaactaatttgactgtaaacacaaatatattagtacaaaatatgtgacatagaaagtgataatttcttgggtagtttgcagttttaaaattatgttttaaaatggactatcatctgcttaccgtaactttaaagtatttcgattatatatcttgtggaaaggac

SEQ ID NO: 4283 - DNA, 231 bp, synthetic construct; identical to SEQ ID NO: 4282
  misc_feature 1..231: note = promoter
  source 1..231: mol_type = other DNA

SEQ ID NO: 4284 - DNA, 231 bp, synthetic construct; identical to SEQ ID NO: 4282
  misc_feature 1..231: note = promoter
  source 1..231: mol_type = other DNA

SEQ ID NO: 4285 - DNA, 231 bp, synthetic construct
  misc_feature 1..231: note = promoter
  source 1..231: mol_type = other DNA
gagggcctatttcccatgattccttcatatttgcatataagatgcaaggctgttagagagataattagaactaatttgactgtaaacacaaatatattagtacaaaatatgtgacatagaaagtgataatttcttgggtagtttgcagttttaaaattatgttttaaaatggactatcatctgcttaccgtaactttaaagtatttcgattttatatcttgtggaaaggac

SEQ ID NO: 4286 - DNA, 231 bp, synthetic construct
  misc_feature 1..231: note = promoter
  source 1..231: mol_type = other DNA
gagggcctatttcccatgattccttcatatttgcatataagatgcaaggctgttagagagataattagaactaatttgactgtaaacacaaatatattagtacaaaatatgtgacatagaaagtgataatttcttgggtagtttgcagttttaaaattatgttttaaaatggactatcatctgcttaccgtaactttaaagtatttcgatttcatatcttgtggaaaggac

SEQ ID NO: 4287 - DNA, 231 bp, synthetic construct
  misc_feature 1..231: note = promoter
  source 1..231: mol_type = other DNA
gagggcctatttcccatgattccttcatatttgcatataagatgcaaggctgttagagagataattagaactaatttgactgtaaacacaaatatattagtacaaaatatgtgacatagaaagtgataatttcttgggtagtttgcagttttaaaattatgttttaaaatggactatcatctgcttaccgtaactttaaagtatttcgatttcttatcttgtggaaaggac

SEQ ID NO: 4288 - DNA, 231 bp, synthetic construct; identical to SEQ ID NO: 4287
  misc_feature 1..231: note = promoter
  source 1..231: mol_type = other DNA

SEQ ID NO: 4289 - DNA, 231 bp, synthetic construct
  misc_feature 1..231: note = promoter
  source 1..231: mol_type = other DNA
gagggcctatttcccatgattccttcatatttgcatataagatgcaaggctgttagagagataattagaactaatttgactgtaaacacaaatatattagtacaaaatatgtgacatagaaagtgataatttcttgggtagtttgcagttttaaaattatgttttaaaatggactatcatctgcttaccgtaactttaaagtatttcgatttcttgtcttgtggaaaggac

SEQ ID NO: 4290 - DNA, 231 bp, synthetic construct
  misc_feature 1..231: note = promoter
  source 1..231: mol_type = other DNA
gagggcctatttcccatgattccttcatatttgcatataagatgcaaggctgttagagagataattagaactaatttgactgtaaacacaaatatattagtacaaaatatgtgacatagaaagtgataatttcttgggtagtttgcagttttaaaattatgttttaaaatggactatcatctgcttaccgtaactttaaagtatttcgatttcttgacttgtggaaaggac

SEQ ID NO: 4291 - DNA, 231 bp, synthetic construct; identical to SEQ ID NO: 4290
  misc_feature 1..231: note = promoter
  source 1..231: mol_type = other DNA

SEQ ID NO: 4292 - DNA, 231 bp, synthetic construct; identical to SEQ ID NO: 4290
  misc_feature 1..231: note = promoter
  source 1..231: mol_type = other DNA

SEQ ID NO: 4293 - DNA, 231 bp, synthetic construct; identical to SEQ ID NO: 4290
  misc_feature 1..231: note = promoter
  source 1..231: mol_type = other DNA

SEQ ID NO: 4294 - DNA, 231 bp, synthetic construct
  misc_feature 1..231: note = promoter
  source 1..231: mol_type = other DNA
gagggcctatttcccatgattccttcatatttgcatataagatgcaaggctgttagagagataattagaactaatttgactgtaaacacaaatatattagtacaaaatatgtgacatagaaagtgataatttcttgggtagtttgcagttttaaaattatgttttaaaatggactatcatctgcttaccgtaactttaaagtatttcgatttcttgacttttggaaaggac

SEQ ID NO: 4295 - DNA, 231 bp, synthetic construct
  misc_feature 1..231: note = promoter
  source 1..231: mol_type = other DNA
gagggcctatttcccatgattccttcatatttgcatataagatgcaaggctgttagagagataattagaactaatttgactgtaaacacaaatatattagtacaaaatatgtgacatagaaagtgataatttcttgggtagtttgcagttttaaaattatgttttaaaatggactatcatctgcttaccgtaactttaaagtatttcgatttcttgactttaggaaaggac

SEQ ID NO: 4296 - DNA, 231 bp, synthetic construct
  misc_feature 1..231: note = promoter
  source 1..231: mol_type = other DNA
gagggcctatttcccatgattccttcatatttgcatataagatgcaaggctgttagagagataattagaactaatttgactgtaaacacaaatatattagtacaaaatatgtgacatagaaagtgataatttcttgggtagtttgcagttttaaaattatgttttaaaatggactatcatctgcttaccgtaactttaaagtatttcgatttcttgactttatgaaaggac

SEQ ID NO: 4297 - DNA, 231 bp, synthetic construct
  misc_feature 1..231: note = promoter
  source 1..231: mol_type = other DNA
gagggcctatttcccatgattccttcatatttgcatataagatgcaaggctgttagagagataattagaactaatttgactgtaaacacaaatatattagtacaaaatatgtgacatagaaagtgataatttcttgggtagtttgcagttttaaaattatgttttaaaatggactatcatctgcttaccgtaactttaaagtatttcgatttcttgactttataaaaggac

SEQ ID NO: 4298 - DNA, 231 bp, synthetic construct
  misc_feature 1..231: note = promoter
  source 1..231: mol_type = other DNA
gagggcctatttcccatgattccttcatatttgcatataagatgcaaggctgttagagagataattagaactaatttgactgtaaacacaaatatattagtacaaaatatgtgacatagaaagtgataatttcttgggtagtttgcagttttaaaattatgttttaaaatggactatcatctgcttaccgtaactttaaagtatttcgatttcttgactttatataaggac

SEQ ID NO: 4299 - DNA, 231 bp, synthetic construct; identical to SEQ ID NO: 4298
  misc_feature 1..231: note = promoter
  source 1..231: mol_type = other DNA

SEQ ID NO: 4300 - DNA, 231 bp, synthetic construct
  misc_feature 1..231: note = promoter
  source 1..231: mol_type = other DNA
gagggcctatttcccatgattccttcatatttgcatataagatgcaaggctgttagagagataattagaactaatttgactgtaaacacaaatatattagtacaaaatatgtgacatagaaagtgataatttcttgggtagtttgcagttttaaaattatgttttaaaatggactatcatctgcttaccgtaactttaaagtatttcgatttcttgactttatatatggac

SEQ ID NO: 4301 - DNA, 231 bp, synthetic construct
  misc_feature 1..231: note = promoter
  source 1..231: mol_type = other DNA
gagggcctatttcccatgattccttcatatttgcatataagatgcaaggctgttagagagataattagaactaatttgactgtaaacacaaatatattagtacaaaatatgtgacatagaaagtgataatttcttgggtagtttgcagttttaaaattatgttttaaaatggactatcatctgcttaccgtaactttaaagtatttcgatttcttgactttatatatcgac

SEQ ID NO: 4302 - DNA, 231 bp, synthetic construct
  misc_feature 1..231: note = promoter
  source 1..231: mol_type = other DNA
gagggcctatttcccatgattccttcatatttgcatataagatgcaaggctgttagagagataattagaactaatttgactgtaaacacaaatatattagtacaaaatatgtgacatagaaagtgataatttcttgggtagtttgcagttttaaaattatgttttaaaatggactatcatctgcttaccgtaactttaaagtatttcgatttcttgactttatatatctac

SEQ ID NO: 4303 - DNA, 231 bp, synthetic construct
  misc_feature 1..231: note = promoter
  source 1..231: mol_type = other DNA
gagggcctatttcccatgattccttcatatttgcatataagatgcaaggctgttagagagataattagaactaatttgactgtaaacacaaatatattagtacaaaatatgtgacatagaaagtgataatttcttgggtagtttgcagttttaaaattatgttttaaaatggactatcatctgcttaccgtaactttaaagtatttcgatttcttgactttatatatcttc

SEQ ID NO: 4304 - DNA, 231 bp, synthetic construct
  misc_feature 1..231: note = promoter
  source 1..231: mol_type = other DNA
gagggcctatttcccatgattccttcatatttgcatataagatgcaaggctgttagagagataattagaactaatttgactgtaaacacaaatatattagtacaaaatatgtgacatagaaagtgataatttcttgggtagtttgcagttttaaaattatgttttaaaatggactatcatctgcttaccgtaactttaaagtatttcgatttcttgactttatatatcttg

SEQ ID NO: 4305 - DNA, 232 bp, synthetic construct
  misc_feature 1..232: note = promoter
  source 1..232: mol_type = other DNA
gagggcctatttcccatgattccttcatatttgcatataagatgcaaggctgttagagagataattagaactaatttgactgtaaacacaaatatattagtacaaaatatgtgacatagaaagtgataatttcttgggtagtttgcagttttaaaattatgttttaaaatggactatcatctgcttaccgtaactttaaagtatttcgatttcttgactttatatatcttgt

SEQ ID NO: 4306 - DNA, 233 bp, synthetic construct
  misc_feature 1..233: note = promoter
  source 1..233: mol_type = other DNA
gagggcctatttcccatgattccttcatatttgcatataagatgcaaggctgttagagagataattagaactaatttgactgtaaacacaaatatattagtacaaaatatgtgacatagaaagtgataatttcttgggtagtttgcagttttaaaattatgttttaaaatggactatcatctgcttaccgtaactttaaagtatttcgatttcttgactttatatatcttgtg

SEQ ID NO: 4307 - DNA, 234 bp, synthetic construct
  misc_feature 1..234: note = promoter
  source 1..234: mol_type = other DNA
gagggcctatttcccatgattccttcatatttgcatataagatgcaaggctgttagagagataattagaactaatttgactgtaaacacaaatatattagtacaaaatatgtgacatagaaagtgataatttcttgggtagtttgcagttttaaaattatgttttaaaatggactatcatctgcttaccgtaactttaaagtatttcgatttcttgactttatatatcttgtgg

SEQ ID NO: 4308 - DNA, 235 bp, synthetic construct
  misc_feature 1..235: note = promoter
  source 1..235: mol_type = other DNA
gagggcctatttcccatgattccttcatatttgcatataagatgcaaggctgttagagagataattagaactaatttgactgtaaacacaaatatattagtacaaaatatgtgacatagaaagtgataatttcttgggtagtttgcagttttaaaattatgttttaaaatggactatcatctgcttaccgtaactttaaagtatttcgatttcttgactttatatatcttgtgga

SEQ ID NO: 4309 - DNA, 236 bp, synthetic construct; identical to SEQ ID NO: 2036
  misc_feature 1..236: note = promoter
  source 1..236: mol_type = other DNA

SEQ ID NO: 4310 - DNA, 237 bp, synthetic construct; identical to SEQ ID NO: 2037
  misc_feature 1..237: note = promoter
  source 1..237: mol_type = other DNA

SEQ ID NO: 4311 - DNA, 238 bp, synthetic construct; identical to SEQ ID NO: 2038
  misc_feature 1..238: note = promoter
  source 1..238: mol_type = other DNA

SEQ ID NO: 4312 - DNA, 239 bp, synthetic construct; identical to SEQ ID NO: 1798
  misc_feature 1..239: note = promoter
  source 1..239: mol_type = other DNA

SEQ ID NO: 4313 - DNA, 240 bp, synthetic construct; identical to SEQ ID NO: 1558
  misc_feature 1..240: note = promoter
  source 1..240: mol_type = other DNA

SEQ ID NO: 4314 - DNA, 241 bp, synthetic construct; identical to SEQ ID NO: 3563
  misc_feature 1..241: note = promoter
  source 1..241: mol_type = other DNA

SEQ ID NO: 4315 - DNA, 241 bp, synthetic construct
  misc_feature 1..241: note = promoter
  source 1..241: mol_type = other DNA
aagggcctatttcccatgattccttcatatttgcatatacgatacaaggctgttagagagataattggaattaatttgactgtaaacacaaagatattagtacaaaatacgtgacgtagaaagtaataatttcttgggtagtttgcagttttaaaattatgttttaaaatggactatcatatgcttaccgtaacttgaaagtatttcgatttcttggctttatatatcttgtggaaaggac

SEQ ID NO: 4316 - DNA, 241 bp, synthetic construct
  misc_feature 1..241: note = promoter
  source 1..241: mol_type = other DNA
cagggcctatttcccatgattccttcatatttgcatatacgatacaaggctgttagagagataattggaattaatttgactgtaaacacaaagatattagtacaaaatacgtgacgtagaaagtaataatttcttgggtagtttgcagttttaaaattatgttttaaaatggactatcatatgcttaccgtaacttgaaagtatttcgatttcttggctttatatatcttgtggaaaggac

SEQ ID NO: 4317 - DNA, 241 bp, synthetic construct
  misc_feature 1..241: note = promoter
  source 1..241: mol_type = other DNA
tagggcctatttcccatgattccttcatatttgcatatacgatacaaggctgttagagagataattggaattaatttgactgtaaacacaaagatattagtacaaaatacgtgacgtagaaagtaataatttcttgggtagtttgcagttttaaaattatgttttaaaatggactatcatatgcttaccgtaacttgaaagtatttcgatttcttggctttatatatcttgtggaaaggac

SEQ ID NO: 4318 - DNA, 241 bp, synthetic construct
  misc_feature 1..241: note = promoter
  source 1..241: mol_type = other DNA
gcgggcctatttcccatgattccttcatatttgcatatacgatacaaggctgttagagagataattggaattaatttgactgtaaacacaaagatattagtacaaaatacgtgacgtagaaagtaataatttcttgggtagtttgcagttttaaaattatgttttaaaatggactatcatatgcttaccgtaacttgaaagtatttcgatttcttggctttatatatcttgtggaaaggac

SEQ ID NO: 4319 - DNA, 241 bp, synthetic construct
  misc_feature 1..241: note = promoter
  source 1..241: mol_type = other DNA
gggggcctatttcccatgattccttcatatttgcatatacgatacaaggctgttagagagataattggaattaatttgactgtaaacacaaagatattagtacaaaatacgtgacgtagaaagtaataatttcttgggtagtttgcagttttaaaattatgttttaaaatggactatcatatgcttaccgtaacttgaaagtatttcgatttcttggctttatatatcttgtggaaaggac

SEQ ID NO: 4320 - DNA, 241 bp, synthetic construct
  misc_feature 1..241: note = promoter
  source 1..241: mol_type = other DNA
gtgggcctatttcccatgattccttcatatttgcatatacgatacaaggctgttagagagataattggaattaatttgactgtaaacacaaagatattagtacaaaatacgtgacgtagaaagtaataatttcttgggtagtttgcagttttaaaattatgttttaaaatggactatcatatgcttaccgtaacttgaaagtatttcgatttcttggctttatatatcttgtggaaaggac

SEQ ID NO: 4321 - DNA, 241 bp, synthetic construct
  misc_feature 1..241: note = promoter
  source 1..241: mol_type = other DNA
gaaggcctatttcccatgattccttcatatttgcatatacgatacaaggctgttagagagataattggaattaatttgactgtaaacacaaagatattagtacaaaatacgtgacgtagaaagtaataatttcttgggtagtttgcagttttaaaattatgttttaaaatggactatcatatgcttaccgtaacttgaaagtatttcgatttcttggctttatatatcttgtggaaaggac

SEQ ID NO: 4322 - DNA, 241 bp, synthetic construct
  misc_feature 1..241: note = promoter
  source 1..241: mol_type = other DNA
gacggcctatttcccatgattccttcatatttgcatatacgatacaaggctgttagagagataattggaattaatttgactgtaaacacaaagatattagtacaaaatacgtgacgtagaaagtaataatttcttgggtagtttgcagttttaaaattatgttttaaaatggactatcatatgcttaccgtaacttgaaagtatttcgatttcttggctttatatatcttgtggaaaggac

SEQ ID NO: 4323 - DNA, 241 bp, synthetic construct
  misc_feature 1..241: note = promoter
  source 1..241: mol_type = other DNA
gatggcctatttcccatgattccttcatatttgcatatacgatacaaggctgttagagagataattggaattaatttgactgtaaacacaaagatattagtacaaaatacgtgacgtagaaagtaataatttcttgggtagtttgcagttttaaaattatgttttaaaatggactatcatatgcttaccgtaacttgaaagtatttcgatttcttggctttatatatcttgtggaaaggac

SEQ ID NO: 4324 - DNA, 241 bp, synthetic construct
  misc_feature 1..241: note = promoter
  source 1..241: mol_type = other DNA
gagagcctatttcccatgattccttcatatttgcatatacgatacaaggctgttagagagataattggaattaatttgactgtaaacacaaagatattagtacaaaatacgtgacgtagaaagtaataatttcttgggtagtttgcagttttaaaattatgttttaaaatggactatcatatgcttaccgtaacttgaaagtatttcgatttcttggctttatatatcttgtggaaaggac

SEQ ID NO: 4325 - DNA, 241 bp, synthetic construct
  misc_feature 1..241: note = promoter
  source 1..241: mol_type = other DNA
gagcgcctatttcccatgattccttcatatttgcatatacgatacaaggctgttagagagataattggaattaatttgactgtaaacacaaagatattagtacaaaatacgtgacgtagaaagtaataatttcttgggtagtttgcagttttaaaattatgttttaaaatggactatcatatgcttaccgtaacttgaaagtatttcgatttcttggctttatatatcttgtggaaaggac

SEQ ID NO: 4326 - DNA, 241 bp, synthetic construct
  misc_feature 1..241: note = promoter
  source 1..241: mol_type = other DNA
gagtgcctatttcccatgattccttcatatttgcatatacgatacaaggctgttagagagataattggaattaatttgactgtaaacacaaagatattagtacaaaatacgtgacgtagaaagtaataatttcttgggtagtttgcagttttaaaattatgttttaaaatggactatcatatgcttaccgtaacttgaaagtatttcgatttcttggctttatatatcttgtggaaaggac

SEQ ID NO: 4327 - DNA, 241 bp, synthetic construct
  misc_feature 1..241: note = promoter
  source 1..241: mol_type = other DNA
gaggacctatttcccatgattccttcatatttgcatatacgatacaaggctgttagagagataattggaattaatttgactgtaaacacaaagatattagtacaaaatacgtgacgtagaaagtaataatttcttgggtagtttgcagttttaaaattatgttttaaaatggactatcatatgcttaccgtaacttgaaagtatttcgatttcttggctttatatatcttgtggaaaggac

SEQ ID NO: 4328 - DNA, 241 bp, synthetic construct
  misc_feature 1..241: note = promoter
  source 1..241: mol_type = other DNA
gaggccctatttcccatgattccttcatatttgcatatacgatacaaggctgttagagagataattggaattaatttgactgtaaacacaaagatattagtacaaaatacgtgacgtagaaagtaataatttcttgggtagtttgcagttttaaaattatgttttaaaatggactatcatatgcttaccgtaacttgaaagtatttcgatttcttggctttatatatcttgtggaaaggac

SEQ ID NO: 4329 - DNA, 241 bp, synthetic construct
  misc_feature 1..241: note = promoter
  source 1..241: mol_type = other DNA
gaggtcctatttcccatgattccttcatatttgcatatacgatacaaggctgttagagagataattggaattaatttgactgtaaacacaaagatattagtacaaaatacgtgacgtagaaagtaataatttcttgggtagtttgcagttttaaaattatgttttaaaatggactatcatatgcttaccgtaacttgaaagtatttcgatttcttggctttatatatcttgtggaaaggac

SEQ ID NO: 4330 - DNA, 241 bp, synthetic construct
  misc_feature 1..241: note = promoter
  source 1..241: mol_type = other DNA
gagggactatttcccatgattccttcatatttgcatatacgatacaaggctgttagagagataattggaattaatttgactgtaaacacaaagatattagtacaaaatacgtgacgtagaaagtaataatttcttgggtagtttgcagttttaaaattatgttttaaaatggactatcatatgcttaccgtaacttgaaagtatttcgatttcttggctttatatatcttgtggaaaggac

SEQ ID NO: 4331 - DNA, 241 bp, synthetic construct
  misc_feature 1..241: note = promoter
  source 1..241: mol_type = other DNA
gaggggctatttcccatgattccttcatatttgcatatacgatacaaggctgttagagagataattggaattaatttgactgtaaacacaaagatattagtacaaaatacgtgacgtagaaagtaataatttcttgggtagtttgcagttttaaaattatgttttaaaatggactatcatatgcttaccgtaacttgaaagtatttcgatttcttggctttatatatcttgtggaaaggac

SEQ ID NO: 4332 - DNA, 241 bp, synthetic construct
  misc_feature 1..241: note = promoter
  source 1..241: mol_type = other DNA
gagggtctatttcccatgattccttcatatttgcatatacgatacaaggctgttagagagataattggaattaatttgactgtaaacacaaagatattagtacaaaatacgtgacgtagaaagtaataatttcttgggtagtttgcagttttaaaattatgttttaaaatggactatcatatgcttaccgtaacttgaaagtatttcgatttcttggctttatatatcttgtggaaaggac

SEQ ID NO: 4333 - DNA, 241 bp, synthetic construct
  misc_feature 1..241: note = promoter
  source 1..241: mol_type = other DNA
gagggcatatttcccatgattccttcatatttgcatatacgatacaaggctgttagagagataattggaattaatttgactgtaaacacaaagatattagtacaaaatacgtgacgtagaaagtaataatttcttgggtagtttgcagttttaaaattatgttttaaaatggactatcatatgcttaccgtaacttgaaagtatttcgatttcttggctttatatatcttgtggaaaggac

SEQ ID NO: 4334 - DNA, 241 bp, synthetic construct
  misc_feature 1..241: note = promoter
  source 1..241: mol_type = other DNA
gagggcgtatttcccatgattccttcatatttgcatatacgatacaaggctgttagagagataattggaattaatttgactgtaaacacaaagatattagtacaaaatacgtgacgtagaaagtaataatttcttgggtagtttgcagttttaaaattatgttttaaaatggactatcatatgcttaccgtaacttgaaagtatttcgatttcttggctttatatatcttgtggaaaggac

SEQ ID NO: 4335 - DNA, 241 bp, synthetic construct
  misc_feature 1..241: note = promoter
  source 1..241: mol_type = other DNA
gagggcttatttcccatgattccttcatatttgcatatacgatacaaggctgttagagagataattggaattaatttgactgtaaacacaaagatattagtacaaaatacgtgacgtagaaagtaataatttcttgggtagtttgcagttttaaaattatgttttaaaatggactatcatatgcttaccgtaacttgaaagtatttcgatttcttggctttatatatcttgtggaaaggac

SEQ ID NO: 4336 - DNA, 241 bp, synthetic construct
  misc_feature 1..241: note = promoter
  source 1..241: mol_type = other DNA
gagggccaatttcccatgattccttcatatttgcatatacgatacaaggctgttagagagataattggaattaatttgactgtaaacacaaagatattagtacaaaatacgtgacgtagaaagtaataatttcttgggtagtttgcagttttaaaattatgttttaaaatggactatcatatgcttaccgtaacttgaaagtatttcgatttcttggctttatatatcttgtggaaaggac

SEQ ID NO: 4337 - DNA, 241 bp, synthetic construct
  misc_feature 1..241: note = promoter
  source 1..241: mol_type = other DNA
gagggcccatttcccatgattccttcatatttgcatatacgatacaaggctgttagagagataattggaattaatttgactgtaaacacaaagatattagtacaaaatacgtgacgtagaaagtaataatttcttgggtagtttgcagttttaaaattatgttttaaaatggactatcatatgcttaccgtaacttgaaagtatttcgatttcttggctttatatatcttgtggaaaggac

SEQ ID NO: 4338 - DNA, 241 bp, synthetic construct
  misc_feature 1..241: note = promoter
  source 1..241: mol_type = other DNA
gagggccgatttcccatgattccttcatatttgcatatacgatacaaggctgttagagagataattggaattaatttgactgtaaacacaaagatattagtacaaaatacgtgacgtagaaagtaataatttcttgggtagtttgcagttttaaaattatgttttaaaatggactatcatatgcttaccgtaacttgaaagtatttcgatttcttggctttatatatcttgtggaaaggac

SEQ ID NO: 4339 - DNA, 241 bp, synthetic construct
  misc_feature 1..241: note = promoter
  source 1..241: mol_type = other DNA
gagggcctctttcccatgattccttcatatttgcatatacgatacaaggctgttagagagataattggaattaatttgactgtaaacacaaagatattagtacaaaatacgtgacgtagaaagtaataatttcttgggtagtttgcagttttaaaattatgttttaaaatggactatcatatgcttaccgtaacttgaaagtatttcgatttcttggctttatatatcttgtggaaaggac

SEQ ID NO: 4340 - DNA, 241 bp, synthetic construct
  misc_feature 1..241: note = promoter
  source 1..241: mol_type = other DNA
gagggcctgtttcccatgattccttcatatttgcatatacgatacaaggctgttagagagataattggaattaatttgactgtaaacacaaagatattagtacaaaatacgtgacgtagaaagtaataatttcttgggtagtttgcagttttaaaattatgttttaaaatggactatcatatgcttaccgtaacttgaaagtatttcgatttcttggctttatatatcttgtggaaaggac

SEQ ID NO: 4341 - DNA, 241 bp, synthetic construct
  misc_feature 1..241: note = promoter
  source 1..241: mol_type = other DNA
gagggcctttttcccatgattccttcatatttgcatatacgatacaaggctgttagagagataattggaattaatttgactgtaaacacaaagatattagtacaaaatacgtgacgtagaaagtaataatttcttgggtagtttgcagttttaaaattatgttttaaaatggactatcatatgcttaccgtaacttgaaagtatttcgatttcttggctttatatatcttgtggaaaggac

SEQ ID NO: 4342 - DNA, 241 bp, synthetic construct
  misc_feature 1..241: note = promoter
  source 1..241: mol_type = other DNA
gagggcctaattcccatgattccttcatatttgcatatacgatacaaggctgttagagagataattggaattaatttgactgtaaacacaaagatattagtacaaaatacgtgacgtagaaagtaataatttcttgggtagtttgcagttttaaaattatgttttaaaatggactatcatatgcttaccgtaacttgaaagtatttcgatttcttggctttatatatcttgtggaaaggac

SEQ ID NO: 4343 - DNA, 241 bp, synthetic construct
  misc_feature 1..241: note = promoter
  source 1..241: mol_type = other DNA
gagggcctacttcccatgattccttcatatttgcatatacgatacaaggctgttagagagataattggaattaatttgactgtaaacacaaagatattagtacaaaatacgtgacgtagaaagtaataatttcttgggtagtttgcagttttaaaattatgttttaaaatggactatcatatgcttaccgtaacttgaaagtatttcgatttcttggctttatatatcttgtggaaaggac

SEQ ID NO: 4344 - DNA, 241 bp, synthetic construct
  misc_feature 1..241: note = promoter
  source 1..241: mol_type = other DNA
gagggcctagttcccatgattccttcatatttgcatatacgatacaaggctgttagagagataattggaattaatttgactgtaaacacaaagatattagtacaaaatacgtgacgtagaaagtaataatttcttgggtagtttgcagttttaaaattatgttttaaaatggactatcatatgcttaccgtaacttgaaagtatttcgatttcttggctttatatatcttgtggaaaggac

SEQ ID NO: 4345 - DNA, 241 bp, synthetic construct
  misc_feature 1..241: note = promoter
  source 1..241: mol_type = other DNA
gagggcctatatcccatgattccttcatatttgcatatacgatacaaggctgttagagagataattggaattaatttgactgtaaacacaaagatattagtacaaaatacgtgacgtagaaagtaataatttcttgggtagtttgcagttttaaaattatgttttaaaatggactatcatatgcttaccgtaacttgaaagtatttcgatttcttggctttatatatcttgtggaaaggac

SEQ ID NO: 4346 - DNA, 241 bp, synthetic construct
  misc_feature 1..241: note = promoter
  source 1..241: mol_type = other DNA
gagggcctatctcccatgattccttcatatttgcatatacgatacaaggctgttagagagataattggaattaatttgactgtaaacacaaagatattagtacaaaatacgtgacgtagaaagtaataatttcttgggtagtttgcagttttaaaattatgttttaaaatggactatcatatgcttaccgtaacttgaaagtatttcgatttcttggctttatatatcttgtggaaaggac

SEQ ID NO: 4347 - DNA, 241 bp, synthetic construct
  misc_feature 1..241: note = promoter
  source 1..241: mol_type = other DNA
gagggcctatgtcccatgattccttcatatttgcatatacgatacaaggctgttagagagataattggaattaatttgactgtaaacacaaagatattagtacaaaatacgtgacgtagaaagtaataatttcttgggtagtttgcagttttaaaattatgttttaaaatggactatcatatgcttaccgtaacttgaaagtatttcgatttcttggctttatatatcttgtggaaaggac

SEQ ID NO: 4348 - DNA, 241 bp, synthetic construct
  misc_feature 1..241: note = promoter
  source 1..241: mol_type = other DNA
gagggcctattacccatgattccttcatatttgcatatacgatacaaggctgttagagagataattggaattaatttgactgtaaacacaaagatattagtacaaaatacgtgacgtagaaagtaataatttcttgggtagtttgcagttttaaaattatgttttaaaatggactatcatatgcttaccgtaacttgaaagtatttcgatttcttggctttatatatcttgtggaaaggac

SEQ ID NO: 4349 - DNA, 241 bp, synthetic construct
  misc_feature 1..241: note = promoter
  source 1..241: mol_type = other DNA
gagggcctattccccatgattccttcatatttgcatatacgatacaaggctgttagagagataattggaattaatttgactgtaaacacaaagatattagtacaaaatacgtgacgtagaaagtaataatttcttgggtagtttgcagttttaaaattatgttttaaaatggactatcatatgcttaccgtaacttgaaagtatttcgatttcttggctttatatatcttgtggaaaggac

SEQ ID NO: 4350 - DNA, 241 bp, synthetic construct
  misc_feature 1..241: note = promoter
  source 1..241: mol_type = other DNA
gagggcctattgcccatgattccttcatatttgcatatacgatacaaggctgttagagagataattggaattaatttgactgtaaacacaaagatattagtacaaaatacgtgacgtagaaagtaataatttcttgggtagtttgcagttttaaaattatgttttaaaatggactatcatatgcttaccgtaacttgaaagtatttcgatttcttggctttatatatcttgtggaaaggac

SEQ ID NO: 4351 - DNA, 241 bp, synthetic construct
  misc_feature 1..241: note = promoter
  source 1..241: mol_type = other DNA
gagggcctatttaccatgattccttcatatttgcatatacgatacaaggctgttagagagataattggaattaatttgactgtaaacacaaagatattagtacaaaatacgtgacgtagaaagtaataatttcttgggtagtttgcagttttaaaattatgttttaaaatggactatcatatgcttaccgtaacttgaaagtatttcgatttcttggctttatatatcttgtggaaaggac

SEQ ID NO: 4352 - DNA, 241 bp, synthetic construct
  misc_feature 1..241: note = promoter
  source 1..241: mol_type = other DNA
gagggcctatttgccatgattccttcatatttgcatatacgatacaaggctgttagagagataattggaattaatttgactgtaaacacaaagatattagtacaaaatacgtgacgtagaaagtaataatttcttgggtagtttgcagttttaaaattatgttttaaaatggactatcatatgcttaccgtaacttgaaagtatttcgatttcttggctttatatatcttgtggaaaggac

SEQ ID NO: 4353 - DNA, 241 bp, synthetic construct
  misc_feature 1..241: note = promoter
  source 1..241: mol_type = other DNA
gagggcctattttccatgattccttcatatttgcatatacgatacaaggctgttagagagataattggaattaatttgactgtaaacacaaagatattagtacaaaatacgtgacgtagaaagtaataatttcttgggtagtttgcagttttaaaattatgttttaaaatggactatcatatgcttaccgtaacttgaaagtatttcgatttcttggctttatatatcttgtggaaaggac

SEQ ID NO: 4354 - DNA, 241 bp, synthetic construct
  misc_feature 1..241: note = promoter
  source 1..241: mol_type = other DNA
gagggcctatttcacatgattccttcatatttgcatatacgatacaaggctgttagagagataattggaattaatttgactgtaaacacaaagatattagtacaaaatacgtgacgtagaaagtaataatttcttgggtagtttgcagttttaaaattatgttttaaaatggactatcatatgcttaccgtaacttgaaagtatttcgatttcttggctttatatatcttgtggaaaggac

SEQ ID NO: 4355 - DNA, 241 bp, synthetic construct
  misc_feature 1..241: note = promoter
  source 1..241: mol_type = other DNA
gagggcctatttcgcatgattccttcatatttgcatatacgatacaaggctgttagagagataattggaattaatttgactgtaaacacaaagatattagtacaaaatacgtgacgtagaaagtaataatttcttgggtagtttgcagttttaaaattatgttttaaaatggactatcatatgcttaccgtaacttgaaagtatttcgatttcttggctttatatatcttgtggaaaggac

SEQ ID NO: 4356 - DNA, 241 bp, synthetic construct
  misc_feature 1..241: note = promoter
  source 1..241: mol_type = other DNA
gagggcctatttctcatgattccttcatatttgcatatacgatacaaggctgttagagagataattggaattaatttgactgtaaacacaaagatattagtacaaaatacgtgacgtagaaagtaataatttcttgggtagtttgcagttttaaaattatgttttaaaatggactatcatatgcttaccgtaacttgaaagtatttcgatttcttggctttatatatcttgtggaaaggac

SEQ ID NO: 4357 - DNA, 241 bp, synthetic construct
  misc_feature 1..241: note = promoter
  source 1..241: mol_type = other DNA
gagggcctatttccaatgattccttcatatttgcatatacgatacaaggctgttagagagataattggaattaatttgactgtaaacacaaagatattagtacaaaatacgtgacgtagaaagtaataatttcttgggtagtttgcagttttaaaattatgttttaaaatggactatcatatgcttaccgtaacttgaaagtatttcgatttcttggctttatatatcttgtggaaaggac

SEQ ID NO: 4358 - DNA, 241 bp, synthetic construct
  misc_feature 1..241: note = promoter
  source 1..241: mol_type = other DNA
gagggcctatttccgatgattccttcatatttgcatatacgatacaaggctgttagagagataattggaattaatttgactgtaaacacaaagatattagtacaaaatacgtgacgtagaaagtaataatttcttgggtagtttgcagttttaaaattatgttttaaaatggactatcatatgcttaccgtaacttgaaagtatttcgatttcttggctttatatatcttgtggaaaggac

SEQ ID NO: 4359 - DNA, 241 bp, synthetic construct
  misc_feature 1..241: note = promoter
  source 1..241: mol_type = other DNA
gagggcctatttcctatgattccttcatatttgcatatacgatacaaggctgttagagagataattggaattaatttgactgtaaacacaaagatattagtacaaaatacgtgacgtagaaagtaataatttcttgggtagtttgcagttttaaaattatgttttaaaatggactatcatatgcttaccgtaacttgaaagtatttcgatttcttggctttatatatcttgtggaaaggac

SEQ ID NO: 4360 - DNA, 241 bp, synthetic construct
  misc_feature 1..241: note = promoter
  source 1..241: mol_type = other DNA
gagggcctatttcccctgattccttcatatttgcatatacgatacaaggctgttagagagataattggaattaatttgactgtaaacacaaagatattagtacaaaatacgtgacgtagaaagtaataatttcttgggtagtttgcagttttaaaattatgttttaaaatggactatcatatgcttaccgtaacttgaaagtatttcgatttcttggctttatatatcttgtggaaaggac

SEQ ID NO: 4361 - DNA, 241 bp, synthetic construct
  misc_feature 1..241: note = promoter
  source 1..241: mol_type = other DNA
gagggcctatttcccgtgattccttcatatttgcatatacgatacaaggctgttagagagataattggaattaatttgactgtaaacacaaagatattagtacaaaatacgtgacgtagaaagtaataatttcttgggtagtttgcagttttaaaattatgttttaaaatggactatcatatgcttaccgtaacttgaaagtatttcgatttcttggctttatatatcttgtggaaaggac

SEQ ID NO: 4362 - DNA, 241 bp, synthetic construct
  misc_feature 1..241: note = promoter
  source 1..241: mol_type = other DNA
gagggcctatttcccttgattccttcatatttgcatatacgatacaaggctgttagagagataattggaattaatttgactgtaaacacaaagatattagtacaaaatacgtgacgtagaaagtaataatttcttgggtagtttgcagttttaaaattatgttttaaaatggactatcatatgcttaccgtaacttgaaagtatttcgatttcttggctttatatatcttgtggaaaggac

SEQ ID NO: 4363 - DNA, 241 bp, synthetic construct
  misc_feature 1..241: note = promoter
  source 1..241: mol_type = other DNA
gagggcctatttcccaagattccttcatatttgcatatacgatacaaggctgttagagagataattggaattaatttgactgtaaacacaaagatattagtacaaaatacgtgacgtagaaagtaataatttcttgggtagtttgcagttttaaaattatgttttaaaatggactatcatatgcttaccgtaacttgaaagtatttcgatttcttggctttatatatcttgtggaaaggac

SEQ ID NO: 4364 - DNA, 241 bp, synthetic construct
  misc_feature 1..241: note = promoter
  source 1..241: mol_type = other DNA
gagggcctatttcccacgattccttcatatttgcatatacgatacaaggctgttagagagataattggaattaatttgactgtaaacacaaagatattagtacaaaatacgtgacgtagaaagtaataatttcttgggtagtttgcagttttaaaattatgttttaaaatggactatcatatgcttaccgtaacttgaaagtatttcgatttcttggctttatatatcttgtggaaaggac

SEQ ID NO: 4365 - DNA, 241 bp, synthetic construct
  misc_feature 1..241: note = promoter
  source 1..241: mol_type = other DNA
gagggcctatttcccaggattccttcatatttgcatatacgatacaaggctgttagagagataattggaattaatttgactgtaaacacaaagatattagtacaaaatacgtgacgtagaaagtaataatttcttgggtagtttgcagttttaaaattatgttttaaaatggactatcatatgcttaccgtaacttgaaagtatttcgatttcttggctttatatatcttgtggaaaggac

SEQ ID NO: 4366 - DNA, 241 bp, synthetic construct
  misc_feature 1..241: note = promoter
  source 1..241: mol_type = other DNA
gagggcctatttcccataattccttcatatttgcatatacgatacaaggctgttagagagataattggaattaatttgactgtaaacacaaagatattagtacaaaatacgtgacgtagaaagtaataatttcttgggtagtttgcagttttaaaattatgttttaaaatggactatcatatgcttaccgtaacttgaaagtatttcgatttcttggctttatatatcttgtggaaaggac

SEQ ID NO: 4367 - DNA, 241 bp, synthetic construct
  misc_feature 1..241: note = promoter
  source 1..241: mol_type = other DNA
gagggcctatttcccatcattccttcatatttgcatatacgatacaaggctgttagagagataattggaattaatttgactgtaaacacaaagatattagtacaaaatacgtgacgtagaaagtaataatttcttgggtagtttgcagttttaaaattatgttttaaaatggactatcatatgcttaccgtaacttgaaagtatttcgatttcttggctttatatatcttgtggaaaggac

SEQ ID NO: 4368 - DNA, 241 bp, synthetic construct
  misc_feature 1..241: note = promoter
  source 1..241: mol_type = other DNA
gagggcctatttcccattattccttcatatttgcatatacgatacaaggctgttagagagataattggaattaatttgactgtaaacacaaagatattagtacaaaatacgtgacgtagaaagtaataatttcttgggtagtttgcagttttaaaattatgttttaaaatggactatcatatgcttaccgtaacttgaaagtatttcgatttcttggctttatatatcttgtggaaaggac

SEQ ID NO: 4369 - DNA, 241 bp, synthetic construct
  misc_feature 1..241: note = promoter
  source 1..241: mol_type = other DNA
gagggcctatttcccatgcttccttcatatttgcatatacgatacaaggctgttagagagataattggaattaatttgactgtaaacacaaagatattagtacaaaatacgtgacgtagaaagtaataatttcttgggtagtttgcagttttaaaattatgttttaaaatggactatcatatgcttaccgtaacttgaaagtatttcgatttcttggctttatatatcttgtggaaaggac

SEQ ID NO: 4370 - DNA, 241 bp, synthetic construct
  misc_feature 1..241: note = promoter
  source 1..241: mol_type = other DNA
gagggcctatttcccatggttccttcatatttgcatatacgatacaaggctgttagagagataattggaattaatttgactgtaaacacaaagatattagtacaaaatacgtgacgtagaaagtaataatttcttgggtagtttgcagttttaaaattatgttttaaaatggactatcatatgcttaccgtaacttgaaagtatttcgatttcttggctttatatatcttgtggaaaggac

SEQ ID NO: 4371 - DNA, 241 bp, synthetic construct
  misc_feature 1..241: note = promoter
  source 1..241: mol_type = other DNA
gagggcctatttcccatgtttccttcatatttgcatatacgatacaaggctgttagagagataattggaattaatttgactgtaaacacaaagatattagtacaaaatacgtgacgtagaaagtaataatttcttgggtagtttgcagttttaaaattatgttttaaaatggactatcatatgcttaccgtaacttgaaagtatttcgatttcttggctttatatatcttgtggaaaggac

SEQ ID NO: 4372 - DNA, 241 bp, synthetic construct
  misc_feature 1..241: note = promoter
  source 1..241: mol_type = other DNA
gagggcctatttcccatgaatccttcatatttgcatatacgatacaaggctgttagagagataattggaattaatttgactgtaaacacaaagatattagtacaaaatacgtgacgtagaaagtaataatttcttgggtagtttgcagttttaaaattatgttttaaaatggactatcatatgcttaccgtaacttgaaagtatttcgatttcttggctttatatatcttgtggaaaggac

SEQ ID NO: 4373 - DNA, 241 bp, synthetic construct
  misc_feature 1..241: note = promoter
  source 1..241: mol_type = other DNA
gagggcctatttcccatgactccttcatatttgcatatacgatacaaggctgttagagagataattggaattaatttgactgtaaacacaaagatattagtacaaaatacgtgacgtagaaagtaataatttcttgggtagtttgcagttttaaaattatgttttaaaatggactatcatatgcttaccgtaacttgaaagtatttcgatttcttggctttatatatcttgtggaaaggac

SEQ ID NO: 4374 - DNA, 241 bp, synthetic construct
  misc_feature 1..241: note = promoter
  source 1..241: mol_type = other DNA
gagggcctatttcccatgagtccttcatatttgcatatacgatacaaggctgttagagagataattggaattaatttgactgtaaacacaaagatattagtacaaaatacgtgacgtagaaagtaataatttcttgggtagtttgcagttttaaaattatgttttaaaatggactatcatatgcttaccgtaacttgaaagtatttcgatttcttggctttatatatcttgtggaaaggac

SEQ ID NO: 4375 - DNA, 241 bp, synthetic construct
  misc_feature 1..241: note = promoter
  source 1..241: mol_type = other DNA
gagggcctatttcccatgataccttcatatttgcatatacgatacaaggctgttagagagataattggaattaatttgactgtaaacacaaagatattagtacaaaatacgtgacgtagaaagtaataatttcttgggtagtttgcagttttaaaattatgttttaaaatggactatcatatgcttaccgtaacttgaaagtatttcgatttcttggctttatatatcttgtggaaaggac

SEQ ID NO: 4376 - DNA, 241 bp, synthetic construct
  misc_feature 1..241: note = promoter
  source 1..241: mol_type = other DNA
gagggcctatttcccatgatcccttcatatttgcatatacgatacaaggctgttagagagataattggaattaatttgactgtaaacacaaagatattagtacaaaatacgtgacgtagaaagtaataatttcttgggtagtttgcagttttaaaattatgttttaaaatggactatcatatgcttaccgtaacttgaaagtatttcgatttcttggctttatatatcttgtggaaaggac

SEQ ID NO: 4377 - DNA, 241 bp, synthetic construct
  misc_feature 1..241: note = promoter
  source 1..241: mol_type = other DNA
gagggcctatttcccatgatgccttcatatttgcatatacgatacaaggctgttagagagataattggaattaatttgactgtaaacacaaagatattagtacaaaatacgtgacgtagaaagtaataatttcttgggtagtttgcagttttaaaattatgttttaaaatggactatcatatgcttaccgtaacttgaaagtatttcgatttcttggctttatatatcttgtggaaaggac

SEQ ID NO: 4378 - DNA, 241 bp, synthetic construct
  misc_feature 1..241: note = promoter
  source 1..241: mol_type = other DNA
gagggcctatttcccatgattacttcatatttgcatatacgatacaaggctgttagagagataattggaattaatttgactgtaaacacaaagatattagtacaaaatacgtgacgtagaaagtaataatttcttgggtagtttgcagttttaaaattatgttttaaaatggactatcatatgcttaccgtaacttgaaagtatttcgatttcttggctttatatatcttgtggaaaggac

SEQ ID NO: 4379 - DNA, 241 bp, synthetic construct
  misc_feature 1..241: note = promoter
  source 1..241: mol_type = other DNA
gagggcctatttcccatgattgcttcatatttgcatatacgatacaaggctgttagagagataattggaattaatttgactgtaaacacaaagatattagtacaaaatacgtgacgtagaaagtaataatttcttgggtagtttgcagttttaaaattatgttttaaaatggactatcatatgcttaccgtaacttgaaagtatttcgatttcttggctttatatatcttgtggaaaggac

SEQ ID NO: 4380 - DNA, 241 bp, synthetic construct
  misc_feature 1..241: note = promoter
  source 1..241: mol_type = other DNA
gagggcctatttcccatgatttcttcatatttgcatatacgatacaaggctgttagagagataattggaattaatttgactgtaaacacaaagatattagtacaaaatacgtgacgtagaaagtaataatttcttgggtagtttgcagttttaaaattatgttttaaaatggactatcatatgcttaccgtaacttgaaagtatttcgatttcttggctttatatatcttgtggaaaggac

SEQ ID NO: 4381 - DNA, 241 bp, synthetic construct
  misc_feature 1..241: note = promoter
  source 1..241: mol_type = other DNA
gagggcctatttcccatgattcattcatatttgcatatacgatacaaggctgttagagagataattggaattaatttgactgtaaacacaaagatattagtacaaaatacgtgacgtagaaagtaataatttcttgggtagtttgcagttttaaaattatgttttaaaatggactatcatatgcttaccgtaacttgaaagtatttcgatttcttggctttatatatcttgtggaaaggac

SEQ ID NO: 4382 - DNA, 241 bp, synthetic construct
  misc_feature 1..241: note = promoter
  source 1..241: mol_type = other DNA
gagggcctatttcccatgattcgttcatatttgcatatacgatacaaggctgttagagagataattggaattaatttgactgtaaacacaaagatattagtacaaaatacgtgacgtagaaagtaataatttcttgggtagtttgcagttttaaaattatgttttaaaatggactatcatatgcttaccgtaacttgaaagtatttcgatttcttggctttatatatcttgtggaaaggac

SEQ ID NO: 4383 - DNA, 241 bp, synthetic construct
  misc_feature 1..241: note = promoter
  source 1..241: mol_type = other DNA
gagggcctatttcccatgattctttcatatttgcatatacgatacaaggctgttagagagataattggaattaatttgactgtaaacacaaagatattagtacaaaatacgtgacgtagaaagtaataatttcttgggtagtttgcagttttaaaattatgttttaaaatggactatcatatgcttaccgtaacttgaaagtatttcgatttcttggctttatatatcttgtggaaaggac

SEQ ID NO: 4384 - DNA, 241 bp, synthetic construct
  misc_feature 1..241: note = promoter
  source 1..241: mol_type = other DNA
gagggcctatttcccatgattccatcatatttgcatatacgatacaaggctgttagagagataattggaattaatttgactgtaaacacaaagatattagtacaaaatacgtgacgtagaaagtaataatttcttgggtagtttgcagttttaaaattatgttttaaaatggactatcatatgcttaccgtaacttgaaagtatttcgatttcttggctttatatatcttgtggaaaggac

SEQ ID NO: 4385 - DNA, 241 bp, synthetic construct
  misc_feature 1..241: note = promoter
  source 1..241: mol_type = other DNA
gagggcctatttcccatgattccctcatatttgcatatacgatacaaggctgttagagagataattggaattaatttgactgtaaacacaaagatattagtacaaaatacgtgacgtagaaagtaataatttcttgggtagtttgcagttttaaaattatgttttaaaatggactatcatatgcttaccgtaacttgaaagtatttcgatttcttggctttatatatcttgtggaaaggac

SEQ ID NO: 4386 - DNA, 241 bp, synthetic construct
  misc_feature 1..241: note = promoter
  source 1..241: mol_type = other DNA
gagggcctatttcccatgattccgtcatatttgcatatacgatacaaggctgttagagagataattggaattaatttgactgtaaacacaaagatattagtacaaaatacgtgacgtagaaagtaataatttcttgggtagtttgcagttttaaaattatgttttaaaatggactatcatatgcttaccgtaacttgaaagtatttcgatttcttggctttatatatcttgtggaaaggac

SEQ ID NO: 4387 - DNA, 241 bp, synthetic construct
  misc_feature 1..241: note = promoter
  source 1..241: mol_type = other DNA
gagggcctatttcccatgattcctacatatttgcatatacgatacaaggctgttagagagataattggaattaatttgactgtaaacacaaagatattagtacaaaatacgtgacgtagaaagtaataatttcttgggtagtttgcagttttaaaattatgttttaaaatggactatcatatgcttaccgtaacttgaaagtatttcgatttcttggctttatatatcttgtggaaaggac

SEQ ID NO: 4388 - DNA, 241 bp, synthetic construct
  misc_feature 1..241: note = promoter
  source 1..241: mol_type = other DNA
gagggcctatttcccatgattcctccatatttgcatatacgatacaaggctgttagagagataattggaattaatttgactgtaaacacaaagatattagtacaaaatacgtgacgtagaaagtaataatttcttgggtagtttgcagttttaaaattatgttttaaaatggactatcatatgcttaccgtaacttgaaagtatttcgatttcttggctttatatatcttgtggaaaggac

SEQ ID NO: 4389 - DNA, 241 bp, synthetic construct
  misc_feature 1..241: note = promoter
  source 1..241: mol_type = other DNA
gagggcctatttcccatgattcctgcatatttgcatatacgatacaaggctgttagagagataattggaattaatttgactgtaaacacaaagatattagtacaaaatacgtgacgtagaaagtaataatttcttgggtagtttgcagttttaaaattatgttttaaaatggactatcatatgcttaccgtaacttgaaagtatttcgatttcttggctttatatatcttgtggaaaggac

SEQ ID NO: 4390 - DNA, 241 bp, synthetic construct
  misc_feature 1..241: note = promoter
  source 1..241: mol_type = other DNA
gagggcctatttcccatgattccttaatatttgcatatacgatacaaggctgttagagagataattggaattaatttgactgtaaacacaaagatattagtacaaaatacgtgacgtagaaagtaataatttcttgggtagtttgcagttttaaaattatgttttaaaatggactatcatatgcttaccgtaacttgaaagtatttcgatttcttggctttatatatcttgtggaaaggac

SEQ ID NO: 4391 - DNA, 241 bp, synthetic construct
  misc_feature 1..241: note = promoter
  source 1..241: mol_type = other DNA
gagggcctatttcccatgattccttgatatttgcatatacgatacaaggctgttagagagataattggaattaatttgactgtaaacacaaagatattagtacaaaatacgtgacgtagaaagtaataatttcttgggtagtttgcagttttaaaattatgttttaaaatggactatcatatgcttaccgtaacttgaaagtatttcgatttcttggctttatatatcttgtggaaaggac

SEQ ID NO: 4392 - DNA, 241 bp, synthetic construct
  misc_feature 1..241: note = promoter
  source 1..241: mol_type = other DNA
gagggcctatttcccatgattcctttatatttgcatatacgatacaaggctgttagagagataattggaattaatttgactgtaaacacaaagatattagtacaaaatacgtgacgtagaaagtaataatttcttgggtagtttgcagttttaaaattatgttttaaaatggactatcatatgcttaccgtaacttgaaagtatttcgatttcttggctttatatatcttgtggaaaggac

SEQ ID NO: 4393 - DNA, 241 bp, synthetic construct
  misc_feature 1..241: note = promoter
  source 1..241: mol_type = other DNA
gagggcctatttcccatgattccttcctatttgcatatacgatacaaggctgttagagagataattggaattaatttgactgtaaacacaaagatattagtacaaaatacgtgacgtagaaagtaataatttcttgggtagtttgcagttttaaaattatgttttaaaatggactatcatatgcttaccgtaacttgaaagtatttcgatttcttggctttatatatcttgtggaaaggac

SEQ ID NO: 4394 - DNA, 241 bp, synthetic construct
  misc_feature 1..241: note = promoter
  source 1..241: mol_type = other DNA
gagggcctatttcccatgattccttcgtatttgcatatacgatacaaggctgttagagagataattggaattaatttgactgtaaacacaaagatattagtacaaaatacgtgacgtagaaagtaataatttcttgggtagtttgcagttttaaaattatgttttaaaatggactatcatatgcttaccgtaacttgaaagtatttcgatttcttggctttatatatcttgtggaaaggac

SEQ ID NO: 4395 - DNA, 241 bp, synthetic construct
  misc_feature 1..241: note = promoter
  source 1..241: mol_type = other DNA
gagggcctatttcccatgattccttcttatttgcatatacgatacaaggctgttagagagataattggaattaatttgactgtaaacacaaagatattagtacaaaatacgtgacgtagaaagtaataatttcttgggtagtttgcagttttaaaattatgttttaaaatggactatcatatgcttaccgtaacttgaaagtatttcgatttcttggctttatatatcttgtggaaaggac

SEQ ID NO: 4396 - DNA, 241 bp, synthetic construct
  misc_feature 1..241: note = promoter
  source 1..241: mol_type = other DNA
gagggcctatttcccatgattccttcaaatttgcatatacgatacaaggctgttagagagataattggaattaatttgactgtaaacacaaagatattagtacaaaatacgtgacgtagaaagtaataatttcttgggtagtttgcagttttaaaattatgttttaaaatggactatcatatgcttaccgtaacttgaaagtatttcgatttcttggctttatatatcttgtggaaaggac

SEQ ID NO: 4397 - DNA, 241 bp, synthetic construct
  misc_feature 1..241: note = promoter
  source 1..241: mol_type = other DNA
gagggcctatttcccatgattccttcacatttgcatatacgatacaaggctgttagagagataattggaattaatttgactgtaaacacaaagatattagtacaaaatacgtgacgtagaaagtaataatttcttgggtagtttgcagttttaaaattatgttttaaaatggactatcatatgcttaccgtaacttgaaagtatttcgatttcttggctttatatatcttgtggaaaggac

SEQ ID NO: 4398 - DNA, 241 bp, synthetic construct
  misc_feature 1..241: note = promoter
  source 1..241: mol_type = other DNA
gagggcctatttcccatgattccttcagatttgcatatacgatacaaggctgttagagagataattggaattaatttgactgtaaacacaaagatattagtacaaaatacgtgacgtagaaagtaataatttcttgggtagtttgcagttttaaaattatgttttaaaatggactatcatatgcttaccgtaacttgaaagtatttcgatttcttggctttatatatcttgtggaaaggac

SEQ ID NO: 4399 - DNA, 241 bp, synthetic construct
  misc_feature 1..241: note = promoter
  source 1..241: mol_type = other DNA
gagggcctatttcccatgattccttcatctttgcatatacgatacaaggctgttagagagataattggaattaatttgactgtaaacacaaagatattagtacaaaatacgtgacgtagaaagtaataatttcttgggtagtttgcagttttaaaattatgttttaaaatggactatcatatgcttaccgtaacttgaaagtatttcgatttcttggctttatatatcttgtggaaaggac

SEQ ID NO: 4400 - DNA, 241 bp, synthetic construct
  misc_feature 1..241: note = promoter
  source 1..241: mol_type = other DNA
gagggcctatttcccatgattccttcatgtttgcatatacgatacaaggctgttagagagataattggaattaatttgactgtaaacacaaagatattagtacaaaatacgtgacgtagaaagtaataatttcttgggtagtttgcagttttaaaattatgttttaaaatggactatcatatgcttaccgtaacttgaaagtatttcgatttcttggctttatatatcttgtggaaaggac

SEQ ID NO: 4401 - DNA, 241 bp, synthetic construct
  misc_feature 1..241: note = promoter
  source 1..241: mol_type = other DNA
gagggcctatttcccatgattccttcatttttgcatatacgatacaaggctgttagagagataattggaattaatttgactgtaaacacaaagatattagtacaaaatacgtgacgtagaaagtaataatttcttgggtagtttgcagttttaaaattatgttttaaaatggactatcatatgcttaccgtaacttgaaagtatttcgatttcttggctttatatatcttgtggaaaggac

SEQ ID NO: 4402 - DNA, 241 bp, synthetic construct
  misc_feature 1..241: note = promoter
  source 1..241: mol_type = other DNA
gagggcctatttcccatgattccttcataattgcatatacgatacaaggctgttagagagataattggaattaatttgactgtaaacacaaagatattagtacaaaatacgtgacgtagaaagtaataatttcttgggtagtttgcagttttaaaattatgttttaaaatggactatcatatgcttaccgtaacttgaaagtatttcgatttcttggctttatatatcttgtggaaaggac

SEQ ID NO: 4403 - DNA, 241 bp, synthetic construct
  misc_feature 1..241: note = promoter
  source 1..241: mol_type = other DNA
gagggcctatttcccatgattccttcatacttgcatatacgatacaaggctgttagagagataattggaattaatttgactgtaaacacaaagatattagtacaaaatacgtgacgtagaaagtaataatttcttgggtagtttgcagttttaaaattatgttttaaaatggactatcatatgcttaccgtaacttgaaagtatttcgatttcttggctttatatatcttgtggaaaggac

SEQ ID NO: 4404 - DNA, 241 bp, synthetic construct
  misc_feature 1..241: note = promoter
  source 1..241: mol_type = other DNA
gagggcctatttcccatgattccttcatagttgcatatacgatacaaggctgttagagagataattggaattaatttgactgtaaacacaaagatattagtacaaaatacgtgacgtagaaagtaataatttcttgggtagtttgcagttttaaaattatgttttaaaatggactatcatatgcttaccgtaacttgaaagtatttcgatttcttggctttatatatcttgtggaaaggac

SEQ ID NO: 4405 - DNA, 241 bp, synthetic construct
  misc_feature 1..241: note = promoter
  source 1..241: mol_type = other DNA
gagggcctatttcccatgattccttcatatatgcatatacgatacaaggctgttagagagataattggaattaatttgactgtaaacacaaagatattagtacaaaatacgtgacgtagaaagtaataatttcttgggtagtttgcagttttaaaattatgttttaaaatggactatcatatgcttaccgtaacttgaaagtatttcgatttcttggctttatatatcttgtggaaaggac

SEQ ID NO: 4406 - DNA, 241 bp, synthetic construct
  misc_feature 1..241: note = promoter
  source 1..241: mol_type = other DNA
gagggcctatttcccatgattccttcatatctgcatatacgatacaaggctgttagagagataattggaattaatttgactgtaaacacaaagatattagtacaaaatacgtgacgtagaaagtaataatttcttgggtagtttgcagttttaaaattatgttttaaaatggactatcatatgcttaccgtaacttgaaagtatttcgatttcttggctttatatatcttgtggaaaggac

SEQ ID NO: 4407 - DNA, 241 bp, synthetic construct
  misc_feature 1..241: note = promoter
  source 1..241: mol_type = other DNA
gagggcctatttcccatgattccttcatatgtgcatatacgatacaaggctgttagagagataattggaattaatttgactgtaaacacaaagatattagtacaaaatacgtgacgtagaaagtaataatttcttgggtagtttgcagttttaaaattatgttttaaaatggactatcatatgcttaccgtaacttgaaagtatttcgatttcttggctttatatatcttgtggaaaggac

SEQ ID NO: 4408 - DNA, 241 bp, synthetic construct
  misc_feature 1..241: note = promoter
  source 1..241: mol_type = other DNA
gagggcctatttcccatgattccttcatattagcatatacgatacaaggctgttagagagataattggaattaatttgactgtaaacacaaagatattagtacaaaatacgtgacgtagaaagtaataatttcttgggtagtttgcagttttaaaattatgttttaaaatggactatcatatgcttaccgtaacttgaaagtatttcgatttcttggctttatatatcttgtggaaaggac

SEQ ID NO: 4409 - DNA, 241 bp, synthetic construct
  misc_feature 1..241: note = promoter
  source 1..241: mol_type = other DNA
gagggcctatttcccatgattccttcatattcgcatatacgatacaaggctgttagagagataattggaattaatttgactgtaaacacaaagatattagtacaaaatacgtgacgtagaaagtaataatttcttgggtagtttgcagttttaaaattatgttttaaaatggactatcatatgcttaccgtaacttgaaagtatttcgatttcttggctttatatatcttgtggaaaggac

SEQ ID NO: 4410 - DNA, 241 bp, synthetic construct
  misc_feature 1..241: note = promoter
  source 1..241: mol_type = other DNA
gagggcctatttcccatgattccttcatattggcatatacgatacaaggctgttagagagataattggaattaatttgactgtaaacacaaagatattagtacaaaatacgtgacgtagaaagtaataatttcttgggtagtttgcagttttaaaattatgttttaaaatggactatcatatgcttaccgtaacttgaaagtatttcgatttcttggctttatatatcttgtggaaaggac

SEQ ID NO: 4411 - DNA, 241 bp, synthetic construct
  misc_feature 1..241: note = promoter
  source 1..241: mol_type = other DNA
gagggcctatttcccatgattccttcatatttacatatacgatacaaggctgttagagagataattggaattaatttgactgtaaacacaaagatattagtacaaaatacgtgacgtagaaagtaataatttcttgggtagtttgcagttttaaaattatgttttaaaatggactatcatatgcttaccgtaacttgaaagtatttcgatttcttggctttatatatcttgtggaaaggac

SEQ ID NO: 4412 - DNA, 241 bp, synthetic construct
  misc_feature 1..241: note = promoter
  source 1..241: mol_type = other DNA
gagggcctatttcccatgattccttcatatttccatatacgatacaaggctgttagagagataattggaattaatttgactgtaaacacaaagatattagtacaaaatacgtgacgtagaaagtaataatttcttgggtagtttgcagttttaaaattatgttttaaaatggactatcatatgcttaccgtaacttgaaagtatttcgatttcttggctttatatatcttgtggaaaggac

SEQ ID NO: 4413 - DNA, 241 bp, synthetic construct
  misc_feature 1..241: note = promoter
  source 1..241: mol_type = other DNA
gagggcctatttcccatgattccttcatattttcatatacgatacaaggctgttagagagataattggaattaatttgactgtaaacacaaagatattagtacaaaatacgtgacgtagaaagtaataatttcttgggtagtttgcagttttaaaattatgttttaaaatggactatcatatgcttaccgtaacttgaaagtatttcgatttcttggctttatatatcttgtggaaaggac

SEQ ID NO: 4414 - DNA, 241 bp, synthetic construct
  misc_feature 1..241: note = promoter
  source 1..241: mol_type = other DNA
gagggcctatttcccatgattccttcatatttgaatatacgatacaaggctgttagagagataattggaattaatttgactgtaaacacaaagatattagtacaaaatacgtgacgtagaaagtaataatttcttgggtagtttgcagttttaaaattatgttttaaaatggactatcatatgcttaccgtaacttgaaagtatttcgatttcttggctttatatatcttgtggaaaggac

SEQ ID NO: 4415 - DNA, 241 bp, synthetic construct
  misc_feature 1..241: note = promoter
  source 1..241: mol_type = other DNA
gagggcctatttcccatgattccttcatatttggatatacgatacaaggctgttagagagataattggaattaatttgactgtaaacacaaagatattagtacaaaatacgtgacgtagaaagtaataatttcttgggtagtttgcagttttaaaattatgttttaaaatggactatcatatgcttaccgtaacttgaaagtatttcgatttcttggctttatatatcttgtggaaaggac

SEQ ID NO: 4416 - DNA, 241 bp, synthetic construct
  misc_feature 1..241: note = promoter
  source 1..241: mol_type = other DNA
gagggcctatttcccatgattccttcatatttgtatatacgatacaaggctgttagagagataattggaattaatttgactgtaaacacaaagatattagtacaaaatacgtgacgtagaaagtaataatttcttgggtagtttgcagttttaaaattatgttttaaaatggactatcatatgcttaccgtaacttgaaagtatttcgatttcttggctttatatatcttgtggaaaggac

SEQ ID NO: 4417 - DNA, 241 bp, synthetic construct
  misc_feature 1..241: note = promoter
  source 1..241: mol_type = other DNA
gagggcctatttcccatgattccttcatatttgcctatacgatacaaggctgttagagagataattggaattaatttgactgtaaacacaaagatattagtacaaaatacgtgacgtagaaagtaataatttcttgggtagtttgcagttttaaaattatgttttaaaatggactatcatatgcttaccgtaacttgaaagtatttcgatttcttggctttatatatcttgtggaaaggac

SEQ ID NO: 4418 - DNA, 241 bp, synthetic construct
  misc_feature 1..241: note = promoter
  source 1..241: mol_type = other DNA
gagggcctatttcccatgattccttcatatttgcgtatacgatacaaggctgttagagagataattggaattaatttgactgtaaacacaaagatattagtacaaaatacgtgacgtagaaagtaataatttcttgggtagtttgcagttttaaaattatgttttaaaatggactatcatatgcttaccgtaacttgaaagtatttcgatttcttggctttatatatcttgtggaaaggac

SEQ ID NO: 4419 - DNA, 241 bp, synthetic construct
  misc_feature 1..241: note = promoter
  source 1..241: mol_type = other DNA
gagggcctatttcccatgattccttcatatttgcttatacgatacaaggctgttagagagataattggaattaatttgactgtaaacacaaagatattagtacaaaatacgtgacgtagaaagtaataatttcttgggtagtttgcagttttaaaattatgttttaaaatggactatcatatgcttaccgtaacttgaaagtatttcgatttcttggctttatatatcttgtggaaaggac

SEQ ID NO: 4420 - DNA, 241 bp, synthetic construct
  misc_feature 1..241: note = promoter
  source 1..241: mol_type = other DNA
gagggcctatttcccatgattccttcatatttgcaaatacgatacaaggctgttagagagataattggaattaatttgactgtaaacacaaagatattagtacaaaatacgtgacgtagaaagtaataatttcttgggtagtttgcagttttaaaattatgttttaaaatggactatcatatgcttaccgtaacttgaaagtatttcgatttcttggctttatatatcttgtggaaaggac

SEQ ID NO: 4421 - DNA, 241 bp, synthetic construct
  misc_feature 1..241: note = promoter
  source 1..241: mol_type = other DNA
gagggcctatttcccatgattccttcatatttgcacatacgatacaaggctgttagagagataattggaattaatttgactgtaaacacaaagatattagtacaaaatacgtgacgtagaaagtaataatttcttgggtagtttgcagttttaaaattatgttttaaaatggactatcatatgcttaccgtaacttgaaagtatttcgatttcttggctttatatatcttgtggaaaggac

SEQ ID NO: 4422 - DNA, 241 bp, synthetic construct
  misc_feature 1..241: note = promoter
  source 1..241: mol_type = other DNA
gagggcctatttcccatgattccttcatatttgcagatacgatacaaggctgttagagagataattggaattaatttgactgtaaacacaaagatattagtacaaaatacgtgacgtagaaagtaataatttcttgggtagtttgcagttttaaaattatgttttaaaatggactatcatatgcttaccgtaacttgaaagtatttcgatttcttggctttatatatcttgtggaaaggac

SEQ ID NO: 4423 - DNA, 241 bp, synthetic construct
  misc_feature 1..241: note = promoter
  source 1..241: mol_type = other DNA
gagggcctatttcccatgattccttcatatttgcatctacgatacaaggctgttagagagataattggaattaatttgactgtaaacacaaagatattagtacaaaatacgtgacgtagaaagtaataatttcttgggtagtttgcagttttaaaattatgttttaaaatggactatcatatgcttaccgtaacttgaaagtatttcgatttcttggctttatatatcttgtggaaaggac

SEQ ID NO: 4424 - DNA, 241 bp, synthetic construct
  misc_feature 1..241: note = promoter
  source 1..241: mol_type = other DNA
gagggcctatttcccatgattccttcatatttgcatgtacgatacaaggctgttagagagataattggaattaatttgactgtaaacacaaagatattagtacaaaatacgtgacgtagaaagtaataatttcttgggtagtttgcagttttaaaattatgttttaaaatggactatcatatgcttaccgtaacttgaaagtatttcgatttcttggctttatatatcttgtggaaaggac

SEQ ID NO: 4425 - DNA, 241 bp, synthetic construct
  misc_feature 1..241: note = promoter
  source 1..241: mol_type = other DNA
gagggcctatttcccatgattccttcatatttgcatttacgatacaaggctgttagagagataattggaattaatttgactgtaaacacaaagatattagtacaaaatacgtgacgtagaaagtaataatttcttgggtagtttgcagttttaaaattatgttttaaaatggactatcatatgcttaccgtaacttgaaagtatttcgatttcttggctttatatatcttgtggaaaggac

SEQ ID NO: 4426 - DNA, 241 bp, synthetic construct
  misc_feature 1..241: note = promoter
  source 1..241: mol_type = other DNA
gagggcctatttcccatgattccttcatatttgcataaacgatacaaggctgttagagagataattggaattaatttgactgtaaacacaaagatattagtacaaaatacgtgacgtagaaagtaataatttcttgggtagtttgcagttttaaaattatgttttaaaatggactatcatatgcttaccgtaacttgaaagtatttcgatttcttggctttatatatcttgtggaaaggac

SEQ ID NO: 4427 - DNA, 241 bp, synthetic construct
  misc_feature 1..241: note = promoter
  source 1..241: mol_type = other DNA
gagggcctatttcccatgattccttcatatttgcatacacgatacaaggctgttagagagataattggaattaatttgactgtaaacacaaagatattagtacaaaatacgtgacgtagaaagtaataatttcttgggtagtttgcagttttaaaattatgttttaaaatggactatcatatgcttaccgtaacttgaaagtatttcgatttcttggctttatatatcttgtggaaaggac

SEQ ID NO: 4428 - DNA, 241 bp, synthetic construct
  misc_feature 1..241: note = promoter
  source 1..241: mol_type = other DNA
gagggcctatttcccatgattccttcatatttgcatagacgatacaaggctgttagagagataattggaattaatttgactgtaaacacaaagatattagtacaaaatacgtgacgtagaaagtaataatttcttgggtagtttgcagttttaaaattatgttttaaaatggactatcatatgcttaccgtaacttgaaagtatttcgatttcttggctttatatatcttgtggaaaggac

SEQ ID NO: 4429 - DNA, 241 bp, synthetic construct
  misc_feature 1..241: note = promoter
  source 1..241: mol_type = other DNA
gagggcctatttcccatgattccttcatatttgcatatccgatacaaggctgttagagagataattggaattaatttgactgtaaacacaaagatattagtacaaaatacgtgacgtagaaagtaataatttcttgggtagtttgcagttttaaaattatgttttaaaatggactatcatatgcttaccgtaacttgaaagtatttcgatttcttggctttatatatcttgtggaaaggac

SEQ ID NO: 4430 - DNA, 241 bp, synthetic construct
  misc_feature 1..241: note = promoter
  source 1..241: mol_type = other DNA
gagggcctatttcccatgattccttcatatttgcatatgcgatacaaggctgttagagagataattggaattaatttgactgtaaacacaaagatattagtacaaaatacgtgacgtagaaagtaataatttcttgggtagtttgcagttttaaaattatgttttaaaatggactatcatatgcttaccgtaacttgaaagtatttcgatttcttggctttatatatcttgtggaaaggac

SEQ ID NO: 4431 - DNA, 241 bp, synthetic construct
  misc_feature 1..241: note = promoter
  source 1..241: mol_type = other DNA
gagggcctatttcccatgattccttcatatttgcatattcgatacaaggctgttagagagataattggaattaatttgactgtaaacacaaagatattagtacaaaatacgtgacgtagaaagtaataatttcttgggtagtttgcagttttaaaattatgttttaaaatggactatcatatgcttaccgtaacttgaaagtatttcgatttcttggctttatatatcttgtggaaaggac

SEQ ID NO: 4432 - DNA, 241 bp, synthetic construct
  misc_feature 1..241: note = promoter
  source 1..241: mol_type = other DNA
gagggcctatttcccatgattccttcatatttgcatataagatacaaggctgttagagagataattggaattaatttgactgtaaacacaaagatattagtacaaaatacgtgacgtagaaagtaataatttcttgggtagtttgcagttttaaaattatgttttaaaatggactatcatatgcttaccgtaacttgaaagtatttcgatttcttggctttatatatcttgtggaaaggac

SEQ ID NO: 4433 - DNA, 241 bp, synthetic construct
  misc_feature 1..241: note = promoter
  source 1..241: mol_type = other DNA
gagggcctatttcccatgattccttcatatttgcatataggatacaaggctgttagagagataattggaattaatttgactgtaaacacaaagatattagtacaaaatacgtgacgtagaaagtaataatttcttgggtagtttgcagttttaaaattatgttttaaaatggactatcatatgcttaccgtaacttgaaagtatttcgatttcttggctttatatatcttgtggaaaggac

SEQ ID NO: 4434 - DNA, 241 bp, synthetic construct
  misc_feature 1..241: note = promoter
  source 1..241: mol_type = other DNA
gagggcctatttcccatgattccttcatatttgcatatatgatacaaggctgttagagagataattggaattaatttgactgtaaacacaaagatattagtacaaaatacgtgacgtagaaagtaataatttcttgggtagtttgcagttttaaaattatgttttaaaatggactatcatatgcttaccgtaacttgaaagtatttcgatttcttggctttatatatcttgtggaaaggac

SEQ ID NO: 4435 - DNA, 241 bp, synthetic construct
  misc_feature 1..241: note = promoter
  source 1..241: mol_type = other DNA
gagggcctatttcccatgattccttcatatttgcatatacaatacaaggctgttagagagataattggaattaatttgactgtaaacacaaagatattagtacaaaatacgtgacgtagaaagtaataatttcttgggtagtttgcagttttaaaattatgttttaaaatggactatcatatgcttaccgtaacttgaaagtatttcgatttcttggctttatatatcttgtggaaaggac

SEQ ID NO: 4436 - DNA, 241 bp, synthetic construct
  misc_feature 1..241: note = promoter
  source 1..241: mol_type = other DNA
gagggcctatttcccatgattccttcatatttgcatataccatacaaggctgttagagagataattggaattaatttgactgtaaacacaaagatattagtacaaaatacgtgacgtagaaagtaataatttcttgggtagtttgcagttttaaaattatgttttaaaatggactatcatatgcttaccgtaacttgaaagtatttcgatttcttggctttatatatcttgtggaaaggac

SEQ ID NO: 4437 - DNA, 241 bp, synthetic construct
  misc_feature 1..241: note = promoter
  source 1..241: mol_type = other DNA
gagggcctatttcccatgattccttcatatttgcatatactatacaaggctgttagagagataattggaattaatttgactgtaaacacaaagatattagtacaaaatacgtgacgtagaaagtaataatttcttgggtagtttgcagttttaaaattatgttttaaaatggactatcatatgcttaccgtaacttgaaagtatttcgatttcttggctttatatatcttgtggaaaggac

SEQ ID NO: 4438 - DNA, 241 bp, synthetic construct
  misc_feature 1..241: note = promoter
  source 1..241: mol_type = other DNA
gagggcctatttcccatgattccttcatatttgcatatacgctacaaggctgttagagagataattggaattaatttgactgtaaacacaaagatattagtacaaaatacgtgacgtagaaagtaataatttcttgggtagtttgcagttttaaaattatgttttaaaatggactatcatatgcttaccgtaacttgaaagtatttcgatttcttggctttatatatcttgtggaaaggac

SEQ ID NO: 4439 - DNA, 241 bp, synthetic construct
  misc_feature 1..241: note = promoter
  source 1..241: mol_type = other DNA
gagggcctatttcccatgattccttcatatttgcatatacggtacaaggctgttagagagataattggaattaatttgactgtaaacacaaagatattagtacaaaatacgtgacgtagaaagtaataatttcttgggtagtttgcagttttaaaattatgttttaaaatggactatcatatgcttaccgtaacttgaaagtatttcgatttcttggctttatatatcttgtggaaaggac

SEQ ID NO: 4440 - DNA, 241 bp, synthetic construct
  misc_feature 1..241: note = promoter
  source 1..241: mol_type = other DNA
gagggcctatttcccatgattccttcatatttgcatatacgttacaaggctgttagagagataattggaattaatttgactgtaaacacaaagatattagtacaaaatacgtgacgtagaaagtaataatttcttgggtagtttgcagttttaaaattatgttttaaaatggactatcatatgcttaccgtaacttgaaagtatttcgatttcttggctttatatatcttgtggaaaggac

SEQ ID NO: 4441 - DNA, 241 bp, synthetic construct
  misc_feature 1..241: note = promoter
  source 1..241: mol_type = other DNA
gagggcctatttcccatgattccttcatatttgcatatacgaaacaaggctgttagagagataattggaattaatttgactgtaaacacaaagatattagtacaaaatacgtgacgtagaaagtaataatttcttgggtagtttgcagttttaaaattatgttttaaaatggactatcatatgcttaccgtaacttgaaagtatttcgatttcttggctttatatatcttgtggaaaggac

SEQ ID NO: 4442 - DNA, 241 bp, synthetic construct
  misc_feature 1..241: note = promoter
  source 1..241: mol_type = other DNA
gagggcctatttcccatgattccttcatatttgcatatacgacacaaggctgttagagagataattggaattaatttgactgtaaacacaaagatattagtacaaaatacgtgacgtagaaagtaataatttcttgggtagtttgcagttttaaaattatgttttaaaatggactatcatatgcttaccgtaacttgaaagtatttcgatttcttggctttatatatcttgtggaaaggac

SEQ ID NO: 4443 - DNA, 241 bp, synthetic construct
  misc_feature 1..241: note = promoter
  source 1..241: mol_type = other DNA
gagggcctatttcccatgattccttcatatttgcatatacgagacaaggctgttagagagataattggaattaatttgactgtaaacacaaagatattagtacaaaatacgtgacgtagaaagtaataatttcttgggtagtttgcagttttaaaattatgttttaaaatggactatcatatgcttaccgtaacttgaaagtatttcgatttcttggctttatatatcttgtggaaaggac

SEQ ID NO: 4444 - DNA, 241 bp, synthetic construct
  misc_feature 1..241: note = promoter
  source 1..241: mol_type = other DNA
gagggcctatttcccatgattccttcatatttgcatatacgatccaaggctgttagagagataattggaattaatttgactgtaaacacaaagatattagtacaaaatacgtgacgtagaaagtaataatttcttgggtagtttgcagttttaaaattatgttttaaaatggactatcatatgcttaccgtaacttgaaagtatttcgatttcttggctttatatatcttgtggaaaggac

SEQ ID NO: 4445 - DNA, 241 bp, synthetic construct
  misc_feature 1..241: note = promoter
  source 1..241: mol_type = other DNA
gagggcctatttcccatgattccttcatatttgcatatacgatgcaaggctgttagagagataattggaattaatttgactgtaaacacaaagatattagtacaaaatacgtgacgtagaaagtaataatttcttgggtagtttgcagttttaaaattatgttttaaaatggactatcatatgcttaccgtaacttgaaagtatttcgatttcttggctttatatatcttgtggaaaggac

SEQ ID NO: 4446 - DNA, 241 bp, synthetic construct
  misc_feature 1..241: note = promoter
  source 1..241: mol_type = other DNA
gagggcctatttcccatgattccttcatatttgcatatacgattcaaggctgttagagagataattggaattaatttgactgtaaacacaaagatattagtacaaaatacgtgacgtagaaagtaataatttcttgggtagtttgcagttttaaaattatgttttaaaatggactatcatatgcttaccgtaacttgaaagtatttcgatttcttggctttatatatcttgtggaaaggac

SEQ ID NO: 4447 - DNA, 241 bp, synthetic construct
  misc_feature 1..241: note = promoter
  source 1..241: mol_type = other DNA
gagggcctatttcccatgattccttcatatttgcatatacgataaaaggctgttagagagataattggaattaatttgactgtaaacacaaagatattagtacaaaatacgtgacgtagaaagtaataatttcttgggtagtttgcagttttaaaattatgttttaaaatggactatcatatgcttaccgtaacttgaaagtatttcgatttcttggctttatatatcttgtggaaaggac

SEQ ID NO: 4448 - DNA, 241 bp, synthetic construct
  misc_feature 1..241: note = promoter
  source 1..241: mol_type = other DNA
gagggcctatttcccatgattccttcatatttgcatatacgatagaaggctgttagagagataattggaattaatttgactgtaaacacaaagatattagtacaaaatacgtgacgtagaaagtaataatttcttgggtagtttgcagttttaaaattatgttttaaaatggactatcatatgcttaccgtaacttgaaagtatttcgatttcttggctttatatatcttgtggaaaggac

SEQ ID NO: 4449 - DNA, 241 bp, synthetic construct
  misc_feature 1..241: note = promoter
  source 1..241: mol_type = other DNA
gagggcctatttcccatgattccttcatatttgcatatacgatataaggctgttagagagataattggaattaatttgactgtaaacacaaagatattagtacaaaatacgtgacgtagaaagtaataatttcttgggtagtttgcagttttaaaattatgttttaaaatggactatcatatgcttaccgtaacttgaaagtatttcgatttcttggctttatatatcttgtggaaaggac

SEQ ID NO: 4450 - DNA, 241 bp, synthetic construct
  misc_feature 1..241: note = promoter
  source 1..241: mol_type = other DNA
gagggcctatttcccatgattccttcatatttgcatatacgataccaggctgttagagagataattggaattaatttgactgtaaacacaaagatattagtacaaaatacgtgacgtagaaagtaataatttcttgggtagtttgcagttttaaaattatgttttaaaatggactatcatatgcttaccgtaacttgaaagtatttcgatttcttggctttatatatcttgtggaaaggac

SEQ ID NO: 4451 - DNA, 241 bp, synthetic construct
  misc_feature 1..241: note = promoter
  source 1..241: mol_type = other DNA
gagggcctatttcccatgattccttcatatttgcatatacgatacgaggctgttagagagataattggaattaatttgactgtaaacacaaagatattagtacaaaatacgtgacgtagaaagtaataatttcttgggtagtttgcagttttaaaattatgttttaaaatggactatcatatgcttaccgtaacttgaaagtatttcgatttcttggctttatatatcttgtggaaaggac

SEQ ID NO: 4452 - DNA, 241 bp, synthetic construct
  misc_feature 1..241: note = promoter
  source 1..241: mol_type = other DNA
gagggcctatttcccatgattccttcatatttgcatatacgatactaggctgttagagagataattggaattaatttgactgtaaacacaaagatattagtacaaaatacgtgacgtagaaagtaataatttcttgggtagtttgcagttttaaaattatgttttaaaatggactatcatatgcttaccgtaacttgaaagtatttcgatttcttggctttatatatcttgtggaaaggac

SEQ ID NO: 4453 - DNA, 241 bp, synthetic construct
  misc_feature 1..241: note = promoter
  source 1..241: mol_type = other DNA
gagggcctatttcccatgattccttcatatttgcatatacgatacacggctgttagagagataattggaattaatttgactgtaaacacaaagatattagtacaaaatacgtgacgtagaaagtaataatttcttgggtagtttgcagttttaaaattatgttttaaaatggactatcatatgcttaccgtaacttgaaagtatttcgatttcttggctttatatatcttgtggaaaggac

SEQ ID NO: 4454 - DNA, 241 bp, synthetic construct
  misc_feature 1..241: note = promoter
  source 1..241: mol_type = other DNA
gagggcctatttcccatgattccttcatatttgcatatacgatacagggctgttagagagataattggaattaatttgactgtaaacacaaagatattagtacaaaatacgtgacgtagaaagtaataatttcttgggtagtttgcagttttaaaattatgttttaaaatggactatcatatgcttaccgtaacttgaaagtatttcgatttcttggctttatatatcttgtggaaaggac

SEQ ID NO: 4455 - DNA, 241 bp, synthetic construct
  misc_feature 1..241: note = promoter
  source 1..241: mol_type = other DNA
gagggcctatttcccatgattccttcatatttgcatatacgatacatggctgttagagagataattggaattaatttgactgtaaacacaaagatattagtacaaaatacgtgacgtagaaagtaataatttcttgggtagtttgcagttttaaaattatgttttaaaatggactatcatatgcttaccgtaacttgaaagtatttcgatttcttggctttatatatcttgtggaaaggac

SEQ ID NO: 4456 - DNA, 241 bp, synthetic construct
  misc_feature 1..241: note = promoter
  source 1..241: mol_type = other DNA
gagggcctatttcccatgattccttcatatttgcatatacgatacaaagctgttagagagataattggaattaatttgactgtaaacacaaagatattagtacaaaatacgtgacgtagaaagtaataatttcttgggtagtttgcagttttaaaattatgttttaaaatggactatcatatgcttaccgtaacttgaaagtatttcgatttcttggctttatatatcttgtggaaaggac

SEQ ID NO: 4457 - DNA, 241 bp, synthetic construct
  misc_feature 1..241: note = promoter
  source 1..241: mol_type = other DNA
gagggcctatttcccatgattccttcatatttgcatatacgatacaacgctgttagagagataattggaattaatttgactgtaaacacaaagatattagtacaaaatacgtgacgtagaaagtaataatttcttgggtagtttgcagttttaaaattatgttttaaaatggactatcatatgcttaccgtaacttgaaagtatttcgatttcttggctttatatatcttgtggaaaggac

SEQ ID NO: 4458 - DNA, 241 bp, synthetic construct
  misc_feature 1..241: note = promoter
  source 1..241: mol_type = other DNA
gagggcctatttcccatgattccttcatatttgcatatacgatacaatgctgttagagagataattggaattaatttgactgtaaacacaaagatattagtacaaaatacgtgacgtagaaagtaataatttcttgggtagtttgcagttttaaaattatgttttaaaatggactatcatatgcttaccgtaacttgaaagtatttcgatttcttggctttatatatcttgtggaaaggac

SEQ ID NO: 4459 - DNA, 241 bp, synthetic construct
  misc_feature 1..241: note = promoter
  source 1..241: mol_type = other DNA
gagggcctatttcccatgattccttcatatttgcatatacgatacaagactgttagagagataattggaattaatttgactgtaaacacaaagatattagtacaaaatacgtgacgtagaaagtaataatttcttgggtagtttgcagttttaaaattatgttttaaaatggactatcatatgcttaccgtaacttgaaagtatttcgatttcttggctttatatatcttgtggaaaggac

SEQ ID NO: 4460 - DNA, 241 bp, synthetic construct
  misc_feature 1..241: note = promoter
  source 1..241: mol_type = other DNA
gagggcctatttcccatgattccttcatatttgcatatacgatacaagcctgttagagagataattggaattaatttgactgtaaacacaaagatattagtacaaaatacgtgacgtagaaagtaataatttcttgggtagtttgcagttttaaaattatgttttaaaatggactatcatatgcttaccgtaacttgaaagtatttcgatttcttggctttatatatcttgtggaaaggac

SEQ ID NO: 4461 - DNA, 241 bp, synthetic construct
  misc_feature 1..241: note = promoter
  source 1..241: mol_type = other DNA
gagggcctatttcccatgattccttcatatttgcatatacgatacaagtctgttagagagataattggaattaatttgactgtaaacacaaagatattagtacaaaatacgtgacgtagaaagtaataatttcttgggtagtttgcagttttaaaattatgttttaaaatggactatcatatgcttaccgtaacttgaaagtatttcgatttcttggctttatatatcttgtggaaaggac

SEQ ID NO: 4462 - DNA, 241 bp, synthetic construct
  misc_feature 1..241: note = promoter
  source 1..241: mol_type = other DNA
gagggcctatttcccatgattccttcatatttgcatatacgatacaaggatgttagagagataattggaattaatttgactgtaaacacaaagatattagtacaaaatacgtgacgtagaaagtaataatttcttgggtagtttgcagttttaaaattatgttttaaaatggactatcatatgcttaccgtaacttgaaagtatttcgatttcttggctttatatatcttgtggaaaggac

SEQ ID NO: 4463 - DNA, 241 bp, synthetic construct
  misc_feature 1..241: note = promoter
  source 1..241: mol_type = other DNA
gagggcctatttcccatgattccttcatatttgcatatacgatacaagggtgttagagagataattggaattaatttgactgtaaacacaaagatattagtacaaaatacgtgacgtagaaagtaataatttcttgggtagtttgcagttttaaaattatgttttaaaatggactatcatatgcttaccgtaacttgaaagtatttcgatttcttggctttatatatcttgtggaaaggac

SEQ ID NO: 4464 - DNA, 241 bp, synthetic construct
  misc_feature 1..241: note = promoter
  source 1..241: mol_type = other DNA
gagggcctatttcccatgattccttcatatttgcatatacgatacaaggttgttagagagataattggaattaatttgactgtaaacacaaagatattagtacaaaatacgtgacgtagaaagtaataatttcttgggtagtttgcagttttaaaattatgttttaaaatggactatcatatgcttaccgtaacttgaaagtatttcgatttcttggctttatatatcttgtggaaaggac

SEQ ID NO: 4465 - DNA, 241 bp, synthetic construct
  misc_feature 1..241: note = promoter
  source 1..241: mol_type = other DNA
gagggcctatttcccatgattccttcatatttgcatatacgatacaaggcagttagagagataattggaattaatttgactgtaaacacaaagatattagtacaaaatacgtgacgtagaaagtaataatttcttgggtagtttgcagttttaaaattatgttttaaaatggactatcatatgcttaccgtaacttgaaagtatttcgatttcttggctttatatatcttgtggaaaggac

SEQ ID NO: 4466 - DNA, 241 bp, synthetic construct
  misc_feature 1..241: note = promoter
  source 1..241: mol_type = other DNA
gagggcctatttcccatgattccttcatatttgcatatacgatacaaggccgttagagagataattggaattaatttgactgtaaacacaaagatattagtacaaaatacgtgacgtagaaagtaataatttcttgggtagtttgcagttttaaaattatgttttaaaatggactatcatatgcttaccgtaacttgaaagtatttcgatttcttggctttatatatcttgtggaaaggac

SEQ ID NO: 4467 - DNA, 241 bp, synthetic construct
  misc_feature 1..241: note = promoter
  source 1..241: mol_type = other DNA
gagggcctatttcccatgattccttcatatttgcatatacgatacaaggcggttagagagataattggaattaatttgactgtaaacacaaagatattagtacaaaatacgtgacgtagaaagtaataatttcttgggtagtttgcagttttaaaattatgttttaaaatggactatcatatgcttaccgtaacttgaaagtatttcgatttcttggctttatatatcttgtggaaaggac

SEQ ID NO: 4468 - DNA, 241 bp, synthetic construct
  misc_feature 1..241: note = promoter
  source 1..241: mol_type = other DNA
gagggcctatttcccatgattccttcatatttgcatatacgatacaaggctattagagagataattggaattaatttgactgtaaacacaaagatattagtacaaaatacgtgacgtagaaagtaataatttcttgggtagtttgcagttttaaaattatgttttaaaatggactatcatatgcttaccgtaacttgaaagtatttcgatttcttggctttatatatcttgtggaaaggac

SEQ ID NO: 4469 - DNA, 241 bp, synthetic construct
  misc_feature 1..241: note = promoter
  source 1..241: mol_type = other DNA
gagggcctatttcccatgattccttcatatttgcatatacgatacaaggctcttagagagataattggaattaatttgactgtaaacacaaagatattagtacaaaatacgtgacgtagaaagtaataatttcttgggtagtttgcagttttaaaattatgttttaaaatggactatcatatgcttaccgtaacttgaaagtatttcgatttcttggctttatatatcttgtggaaaggac

SEQ ID NO: 4470 - DNA, 241 bp, synthetic construct
  misc_feature 1..241: note = promoter
  source 1..241: mol_type = other DNA
gagggcctatttcccatgattccttcatatttgcatatacgatacaaggcttttagagagataattggaattaatttgactgtaaacacaaagatattagtacaaaatacgtgacgtagaaagtaataatttcttgggtagtttgcagttttaaaattatgttttaaaatggactatcatatgcttaccgtaacttgaaagtatttcgatttcttggctttatatatcttgtggaaaggac

SEQ ID NO: 4471 - DNA, 241 bp, synthetic construct
  misc_feature 1..241: note = promoter
  source 1..241: mol_type = other DNA
gagggcctatttcccatgattccttcatatttgcatatacgatacaaggctgatagagagataattggaattaatttgactgtaaacacaaagatattagtacaaaatacgtgacgtagaaagtaataatttcttgggtagtttgcagttttaaaattatgttttaaaatggactatcatatgcttaccgtaacttgaaagtatttcgatttcttggctttatatatcttgtggaaaggac

SEQ ID NO: 4472 - DNA, 241 bp, synthetic construct
  misc_feature 1..241: note = promoter
  source 1..241: mol_type = other DNA
gagggcctatttcccatgattccttcatatttgcatatacgatacaaggctgctagagagataattggaattaatttgactgtaaacacaaagatattagtacaaaatacgtgacgtagaaagtaataatttcttgggtagtttgcagttttaaaattatgttttaaaatggactatcatatgcttaccgtaacttgaaagtatttcgatttcttggctttatatatcttgtggaaaggac

SEQ ID NO: 4473 - DNA, 241 bp, synthetic construct
  misc_feature 1..241: note = promoter
  source 1..241: mol_type = other DNA
gagggcctatttcccatgattccttcatatttgcatatacgatacaaggctggtagagagataattggaattaatttgactgtaaacacaaagatattagtacaaaatacgtgacgtagaaagtaataatttcttgggtagtttgcagttttaaaattatgttttaaaatggactatcatatgcttaccgtaacttgaaagtatttcgatttcttggctttatatatcttgtggaaaggac

SEQ ID NO: 4474 - DNA, 241 bp, synthetic construct
  misc_feature 1..241: note = promoter
  source 1..241: mol_type = other DNA
gagggcctatttcccatgattccttcatatttgcatatacgatacaaggctgtaagagagataattggaattaatttgactgtaaacacaaagatattagtacaaaatacgtgacgtagaaagtaataatttcttgggtagtttgcagttttaaaattatgttttaaaatggactatcatatgcttaccgtaacttgaaagtatttcgatttcttggctttatatatcttgtggaaaggac

SEQ ID NO: 4475 - DNA, 241 bp, synthetic construct
  misc_feature 1..241: note = promoter
  source 1..241: mol_type = other DNA
gagggcctatttcccatgattccttcatatttgcatatacgatacaaggctgtcagagagataattggaattaatttgactgtaaacacaaagatattagtacaaaatacgtgacgtagaaagtaataatttcttgggtagtttgcagttttaaaattatgttttaaaatggactatcatatgcttaccgtaacttgaaagtatttcgatttcttggctttatatatcttgtggaaaggac

SEQ ID NO: 4476 - DNA, 241 bp, synthetic construct
  misc_feature 1..241: note = promoter
  source 1..241: mol_type = other DNA
gagggcctatttcccatgattccttcatatttgcatatacgatacaaggctgtgagagagataattggaattaatttgactgtaaacacaaagatattagtacaaaatacgtgacgtagaaagtaataatttcttgggtagtttgcagttttaaaattatgttttaaaatggactatcatatgcttaccgtaacttgaaagtatttcgatttcttggctttatatatcttgtggaaaggac

SEQ ID NO: 4477 - DNA, 241 bp, synthetic construct
  misc_feature 1..241: note = promoter
  source 1..241: mol_type = other DNA
gagggcctatttcccatgattccttcatatttgcatatacgatacaaggctgttcgagagataattggaattaatttgactgtaaacacaaagatattagtacaaaatacgtgacgtagaaagtaataatttcttgggtagtttgcagttttaaaattatgttttaaaatggactatcatatgcttaccgtaacttgaaagtatttcgatttcttggctttatatatcttgtggaaaggac

SEQ ID NO: 4478 - DNA, 241 bp, synthetic construct
  misc_feature 1..241: note = promoter
  source 1..241: mol_type = other DNA
gagggcctatttcccatgattccttcatatttgcatatacgatacaaggctgttggagagataattggaattaatttgactgtaaacacaaagatattagtacaaaatacgtgacgtagaaagtaataatttcttgggtagtttgcagttttaaaattatgttttaaaatggactatcatatgcttaccgtaacttgaaagtatttcgatttcttggctttatatatcttgtggaaaggac

SEQ ID NO: 4479 - DNA, 241 bp, synthetic construct
  misc_feature 1..241: note = promoter
  source 1..241: mol_type = other DNA
gagggcctatttcccatgattccttcatatttgcatatacgatacaaggctgtttgagagataattggaattaatttgactgtaaacacaaagatattagtacaaaatacgtgacgtagaaagtaataatttcttgggtagtttgcagttttaaaattatgttttaaaatggactatcatatgcttaccgtaacttgaaagtatttcgatttcttggctttatatatcttgtggaaaggac

SEQ ID NO: 4480 - DNA, 241 bp, synthetic construct
  misc_feature 1..241: note = promoter
  source 1..241: mol_type = other DNA
gagggcctatttcccatgattccttcatatttgcatatacgatacaaggctgttaaagagataattggaattaatttgactgtaaacacaaagatattagtacaaaatacgtgacgtagaaagtaataatttcttgggtagtttgcagttttaaaattatgttttaaaatggactatcatatgcttaccgtaacttgaaagtatttcgatttcttggctttatatatcttgtggaaaggac

SEQ ID NO: 4481 - DNA, 241 bp, synthetic construct
  misc_feature 1..241: note = promoter
  source 1..241: mol_type = other DNA
gagggcctatttcccatgattccttcatatttgcatatacgatacaaggctgttacagagataattggaattaatttgactgtaaacacaaagatattagtacaaaatacgtgacgtagaaagtaataatttcttgggtagtttgcagttttaaaattatgttttaaaatggactatcatatgcttaccgtaacttgaaagtatttcgatttcttggctttatatatcttgtggaaaggac

SEQ ID NO: 4482 - DNA, 241 bp, synthetic construct
  misc_feature 1..241: note = promoter
  source 1..241: mol_type = other DNA
gagggcctatttcccatgattccttcatatttgcatatacgatacaaggctgttatagagataattggaattaatttgactgtaaacacaaagatattagtacaaaatacgtgacgtagaaagtaataatttcttgggtagtttgcagttttaaaattatgttttaaaatggactatcatatgcttaccgtaacttgaaagtatttcgatttcttggctttatatatcttgtggaaaggac

SEQ ID NO: 4483 - DNA, 241 bp, synthetic construct
  misc_feature 1..241: note = promoter
  source 1..241: mol_type = other DNA
gagggcctatttcccatgattccttcatatttgcatatacgatacaaggctgttagcgagataattggaattaatttgactgtaaacacaaagatattagtacaaaatacgtgacgtagaaagtaataatttcttgggtagtttgcagttttaaaattatgttttaaaatggactatcatatgcttaccgtaacttgaaagtatttcgatttcttggctttatatatcttgtggaaaggac

SEQ ID NO: 4484 - DNA, 241 bp, synthetic construct
  misc_feature 1..241: note = promoter
  source 1..241: mol_type = other DNA
gagggcctatttcccatgattccttcatatttgcatatacgatacaaggctgttagggagataattggaattaatttgactgtaaacacaaagatattagtacaaaatacgtgacgtagaaagtaataatttcttgggtagtttgcagttttaaaattatgttttaaaatggactatcatatgcttaccgtaacttgaaagtatttcgatttcttggctttatatatcttgtggaaaggac

SEQ ID NO: 4485 - DNA, 241 bp, synthetic construct
  misc_feature 1..241: note = promoter
  source 1..241: mol_type = other DNA
gagggcctatttcccatgattccttcatatttgcatatacgatacaaggctgttagtgagataattggaattaatttgactgtaaacacaaagatattagtacaaaatacgtgacgtagaaagtaataatttcttgggtagtttgcagttttaaaattatgttttaaaatggactatcatatgcttaccgtaacttgaaagtatttcgatttcttggctttatatatcttgtggaaaggac

SEQ ID NO: 4486 - DNA, 241 bp, synthetic construct
  misc_feature 1..241: note = promoter
  source 1..241: mol_type = other DNA
gagggcctatttcccatgattccttcatatttgcatatacgatacaaggctgttagaaagataattggaattaatttgactgtaaacacaaagatattagtacaaaatacgtgacgtagaaagtaataatttcttgggtagtttgcagttttaaaattatgttttaaaatggactatcatatgcttaccgtaacttgaaagtatttcgatttcttggctttatatatcttgtggaaaggac

SEQ ID NO: 4487 - DNA, 241 bp, synthetic construct
  misc_feature 1..241: note = promoter
  source 1..241: mol_type = other DNA
gagggcctatttcccatgattccttcatatttgcatatacgatacaaggctgttagacagataattggaattaatttgactgtaaacacaaagatattagtacaaaatacgtgacgtagaaagtaataatttcttgggtagtttgcagttttaaaattatgttttaaaatggactatcatatgcttaccgtaacttgaaagtatttcgatttcttggctttatatatcttgtggaaaggac

SEQ ID NO: 4488 - DNA, 241 bp, synthetic construct
  misc_feature 1..241: note = promoter
  source 1..241: mol_type = other DNA
gagggcctatttcccatgattccttcatatttgcatatacgatacaaggctgttagatagataattggaattaatttgactgtaaacacaaagatattagtacaaaatacgtgacgtagaaagtaataatttcttgggtagtttgcagttttaaaattatgttttaaaatggactatcatatgcttaccgtaacttgaaagtatttcgatttcttggctttatatatcttgtggaaaggac

SEQ ID NO: 4489 - DNA, 241 bp, synthetic construct
  misc_feature 1..241: note = promoter
  source 1..241: mol_type = other DNA
gagggcctatttcccatgattccttcatatttgcatatacgatacaaggctgttagagcgataattggaattaatttgactgtaaacacaaagatattagtacaaaatacgtgacgtagaaagtaataatttcttgggtagtttgcagttttaaaattatgttttaaaatggactatcatatgcttaccgtaacttgaaagtatttcgatttcttggctttatatatcttgtggaaaggac

SEQ ID NO: 4490 - DNA, 241 bp, synthetic construct
  misc_feature 1..241: note = promoter
  source 1..241: mol_type = other DNA
gagggcctatttcccatgattccttcatatttgcatatacgatacaaggctgttagagggataattggaattaatttgactgtaaacacaaagatattagtacaaaatacgtgacgtagaaagtaataatttcttgggtagtttgcagttttaaaattatgttttaaaatggactatcatatgcttaccgtaacttgaaagtatttcgatttcttggctttatatatcttgtggaaaggac

SEQ ID NO: 4491 - DNA, 241 bp, synthetic construct
  misc_feature 1..241: note = promoter
  source 1..241: mol_type = other DNA
gagggcctatttcccatgattccttcatatttgcatatacgatacaaggctgttagagtgataattggaattaatttgactgtaaacacaaagatattagtacaaaatacgtgacgtagaaagtaataatttcttgggtagtttgcagttttaaaattatgttttaaaatggactatcatatgcttaccgtaacttgaaagtatttcgatttcttggctttatatatcttgtggaaaggac

SEQ ID NO: 4492 - DNA, 241 bp, synthetic construct
  misc_feature 1..241: note = promoter
  source 1..241: mol_type = other DNA
gagggcctatttcccatgattccttcatatttgcatatacgatacaaggctgttagagaaataattggaattaatttgactgtaaacacaaagatattagtacaaaatacgtgacgtagaaagtaataatttcttgggtagtttgcagttttaaaattatgttttaaaatggactatcatatgcttaccgtaacttgaaagtatttcgatttcttggctttatatatcttgtggaaaggac

SEQ ID NO: 4493 - DNA, 241 bp, synthetic construct
  misc_feature 1..241: note = promoter
  source 1..241: mol_type = other DNA
gagggcctatttcccatgattccttcatatttgcatatacgatacaaggctgttagagacataattggaattaatttgactgtaaacacaaagatattagtacaaaatacgtgacgtagaaagtaataatttcttgggtagtttgcagttttaaaattatgttttaaaatggactatcatatgcttaccgtaacttgaaagtatttcgatttcttggctttatatatcttgtggaaaggac

SEQ ID NO: 4494 - DNA, 241 bp, synthetic construct
  misc_feature 1..241: note = promoter
  source 1..241: mol_type = other DNA
gagggcctatttcccatgattccttcatatttgcatatacgatacaaggctgttagagatataattggaattaatttgactgtaaacacaaagatattagtacaaaatacgtgacgtagaaagtaataatttcttgggtagtttgcagttttaaaattatgttttaaaatggactatcatatgcttaccgtaacttgaaagtatttcgatttcttggctttatatatcttgtggaaaggac

SEQ ID NO: 4495 - DNA, 241 bp, synthetic construct
  misc_feature 1..241: note = promoter
  source 1..241: mol_type = other DNA
gagggcctatttcccatgattccttcatatttgcatatacgatacaaggctgttagagagctaattggaattaatttgactgtaaacacaaagatattagtacaaaatacgtgacgtagaaagtaataatttcttgggtagtttgcagttttaaaattatgttttaaaatggactatcatatgcttaccgtaacttgaaagtatttcgatttcttggctttatatatcttgtggaaaggac

SEQ ID NO: 4496 - DNA, 241 bp, synthetic construct
  misc_feature 1..241: note = promoter
  source 1..241: mol_type = other DNA
gagggcctatttcccatgattccttcatatttgcatatacgatacaaggctgttagagaggtaattggaattaatttgactgtaaacacaaagatattagtacaaaatacgtgacgtagaaagtaataatttcttgggtagtttgcagttttaaaattatgttttaaaatggactatcatatgcttaccgtaacttgaaagtatttcgatttcttggctttatatatcttgtggaaaggac

SEQ ID NO: 4497 - DNA, 241 bp, synthetic construct
  misc_feature 1..241: note = promoter
  source 1..241: mol_type = other DNA
gagggcctatttcccatgattccttcatatttgcatatacgatacaaggctgttagagagttaattggaattaatttgactgtaaacacaaagatattagtacaaaatacgtgacgtagaaagtaataatttcttgggtagtttgcagttttaaaattatgttttaaaatggactatcatatgcttaccgtaacttgaaagtatttcgatttcttggctttatatatcttgtggaaaggac

SEQ ID NO: 4498 - DNA, 241 bp, synthetic construct
  misc_feature 1..241: note = promoter
  source 1..241: mol_type = other DNA
gagggcctatttcccatgattccttcatatttgcatatacgatacaaggctgttagagagaaaattggaattaatttgactgtaaacacaaagatattagtacaaaatacgtgacgtagaaagtaataatttcttgggtagtttgcagttttaaaattatgttttaaaatggactatcatatgcttaccgtaacttgaaagtatttcgatttcttggctttatatatcttgtggaaaggac

SEQ ID NO: 4499 - DNA, 241 bp, synthetic construct
  misc_feature 1..241: note = promoter
  source 1..241: mol_type = other DNA
gagggcctatttcccatgattccttcatatttgcatatacgatacaaggctgttagagagacaattggaattaatttgactgtaaacacaaagatattagtacaaaatacgtgacgtagaaagtaataatttcttgggtagtttgcagttttaaaattatgttttaaaatggactatcatatgcttaccgtaacttgaaagtatttcgatttcttggctttatatatcttgtggaaaggac

SEQ ID NO: 4500 - DNA, 241 bp, synthetic construct
  misc_feature 1..241: note = promoter
  source 1..241: mol_type = other DNA
gagggcctatttcccatgattccttcatatttgcatatacgatacaaggctgttagagagagaattggaattaatttgactgtaaacacaaagatattagtacaaaatacgtgacgtagaaagtaataatttcttgggtagtttgcagttttaaaattatgttttaaaatggactatcatatgcttaccgtaacttgaaagtatttcgatttcttggctttatatatcttgtggaaaggac

SEQ ID NO: 4501 - DNA, 241 bp, synthetic construct
  misc_feature 1..241: note = promoter
  source 1..241: mol_type = other DNA
gagggcctatttcccatgattccttcatatttgcatatacgatacaaggctgttagagagatcattggaattaatttgactgtaaacacaaagatattagtacaaaatacgtgacgtagaaagtaataatttcttgggtagtttgcagttttaaaattatgttttaaaatggactatcatatgcttaccgtaacttgaaagtatttcgatttcttggctttatatatcttgtggaaaggac

SEQ ID NO: 4502 - DNA, 241 bp, synthetic construct
  misc_feature 1..241: note = promoter
  source 1..241: mol_type = other DNA
gagggcctatttcccatgattccttcatatttgcatatacgatacaaggctgttagagagatgattggaattaatttgactgtaaacacaaagatattagtacaaaatacgtgacgtagaaagtaataatttcttgggtagtttgcagttttaaaattatgttttaaaatggactatcatatgcttaccgtaacttgaaagtatttcgatttcttggctttatatatcttgtggaaaggac

SEQ ID NO: 4503 - DNA, 241 bp, synthetic construct
  misc_feature 1..241: note = promoter
  source 1..241: mol_type = other DNA
gagggcctatttcccatgattccttcatatttgcatatacgatacaaggctgttagagagattattggaattaatttgactgtaaacacaaagatattagtacaaaatacgtgacgtagaaagtaataatttcttgggtagtttgcagttttaaaattatgttttaaaatggactatcatatgcttaccgtaacttgaaagtatttcgatttcttggctttatatatcttgtggaaaggac

SEQ ID NO: 4504 - DNA, 241 bp, synthetic construct
  misc_feature 1..241: note = promoter
  source 1..241: mol_type = other DNA
gagggcctatttcccatgattccttcatatttgcatatacgatacaaggctgttagagagatacttggaattaatttgactgtaaacacaaagatattagtacaaaatacgtgacgtagaaagtaataatttcttgggtagtttgcagttttaaaattatgttttaaaatggactatcatatgcttaccgtaacttgaaagtatttcgatttcttggctttatatatcttgtggaaaggac

SEQ ID NO: 4505 - DNA, 241 bp, synthetic construct
  misc_feature 1..241: note = promoter
  source 1..241: mol_type = other DNA
gagggcctatttcccatgattccttcatatttgcatatacgatacaaggctgttagagagatagttggaattaatttgactgtaaacacaaagatattagtacaaaatacgtgacgtagaaagtaataatttcttgggtagtttgcagttttaaaattatgttttaaaatggactatcatatgcttaccgtaacttgaaagtatttcgatttcttggctttatatatcttgtggaaaggac

SEQ ID NO: 4506 - DNA, 241 bp, synthetic construct
  misc_feature 1..241: note = promoter
  source 1..241: mol_type = other DNA
gagggcctatttcccatgattccttcatatttgcatatacgatacaaggctgttagagagatatttggaattaatttgactgtaaacacaaagatattagtacaaaatacgtgacgtagaaagtaataatttcttgggtagtttgcagttttaaaattatgttttaaaatggactatcatatgcttaccgtaacttgaaagtatttcgatttcttggctttatatatcttgtggaaaggac

SEQ ID NO: 4507 - DNA, 241 bp, synthetic construct
  misc_feature 1..241: note = promoter
  source 1..241: mol_type = other DNA
gagggcctatttcccatgattccttcatatttgcatatacgatacaaggctgttagagagataaatggaattaatttgactgtaaacacaaagatattagtacaaaatacgtgacgtagaaagtaataatttcttgggtagtttgcagttttaaaattatgttttaaaatggactatcatatgcttaccgtaacttgaaagtatttcgatttcttggctttatatatcttgtggaaaggac

SEQ ID NO: 4508 - DNA, 241 bp, synthetic construct
  misc_feature 1..241: note = promoter
  source 1..241: mol_type = other DNA
gagggcctatttcccatgattccttcatatttgcatatacgatacaaggctgttagagagataactggaattaatttgactgtaaacacaaagatattagtacaaaatacgtgacgtagaaagtaataatttcttgggtagtttgcagttttaaaattatgttttaaaatggactatcatatgcttaccgtaacttgaaagtatttcgatttcttggctttatatatcttgtggaaaggac

SEQ ID NO: 4509 - DNA, 241 bp, synthetic construct
  misc_feature 1..241: note = promoter
  source 1..241: mol_type = other DNA
gagggcctatttcccatgattccttcatatttgcatatacgatacaaggctgttagagagataagtggaattaatttgactgtaaacacaaagatattagtacaaaatacgtgacgtagaaagtaataatttcttgggtagtttgcagttttaaaattatgttttaaaatggactatcatatgcttaccgtaacttgaaagtatttcgatttcttggctttatatatcttgtggaaaggac

SEQ ID NO: 4510 - DNA, 241 bp, synthetic construct
  misc_feature 1..241: note = promoter
  source 1..241: mol_type = other DNA
gagggcctatttcccatgattccttcatatttgcatatacgatacaaggctgttagagagataataggaattaatttgactgtaaacacaaagatattagtacaaaatacgtgacgtagaaagtaataatttcttgggtagtttgcagttttaaaattatgttttaaaatggactatcatatgcttaccgtaacttgaaagtatttcgatttcttggctttatatatcttgtggaaaggac

SEQ ID NO: 4511 - DNA, 241 bp, synthetic construct
  misc_feature 1..241: note = promoter
  source 1..241: mol_type = other DNA
gagggcctatttcccatgattccttcatatttgcatatacgatacaaggctgttagagagataatcggaattaatttgactgtaaacacaaagatattagtacaaaatacgtgacgtagaaagtaataatttcttgggtagtttgcagttttaaaattatgttttaaaatggactatcatatgcttaccgtaacttgaaagtatttcgatttcttggctttatatatcttgtggaaaggac

SEQ ID NO: 4512 - DNA, 241 bp, synthetic construct
  misc_feature 1..241: note = promoter
  source 1..241: mol_type = other DNA
gagggcctatttcccatgattccttcatatttgcatatacgatacaaggctgttagagagataatgggaattaatttgactgtaaacacaaagatattagtacaaaatacgtgacgtagaaagtaataatttcttgggtagtttgcagttttaaaattatgttttaaaatggactatcatatgcttaccgtaacttgaaagtatttcgatttcttggctttatatatcttgtggaaaggac

SEQ ID NO: 4513 - DNA, 241 bp, synthetic construct
  misc_feature 1..241: note = promoter
  source 1..241: mol_type = other DNA
gagggcctatttcccatgattccttcatatttgcatatacgatacaaggctgttagagagataattagaattaatttgactgtaaacacaaagatattagtacaaaatacgtgacgtagaaagtaataatttcttgggtagtttgcagttttaaaattatgttttaaaatggactatcatatgcttaccgtaacttgaaagtatttcgatttcttggctttatatatcttgtggaaaggac

SEQ ID NO: 4514 - DNA, 241 bp, synthetic construct
  misc_feature 1..241: note = promoter
  source 1..241: mol_type = other DNA
gagggcctatttcccatgattccttcatatttgcatatacgatacaaggctgttagagagataattcgaattaatttgactgtaaacacaaagatattagtacaaaatacgtgacgtagaaagtaataatttcttgggtagtttgcagttttaaaattatgttttaaaatggactatcatatgcttaccgtaacttgaaagtatttcgatttcttggctttatatatcttgtggaaaggac

SEQ ID NO: 4515 - DNA, 241 bp, synthetic construct
  misc_feature 1..241: note = promoter
  source 1..241: mol_type = other DNA
gagggcctatttcccatgattccttcatatttgcatatacgatacaaggctgttagagagataatttgaattaatttgactgtaaacacaaagatattagtacaaaatacgtgacgtagaaagtaataatttcttgggtagtttgcagttttaaaattatgttttaaaatggactatcatatgcttaccgtaacttgaaagtatttcgatttcttggctttatatatcttgtggaaaggac

SEQ ID NO: 4516 - DNA, 241 bp, synthetic construct
  misc_feature 1..241: note = promoter
  source 1..241: mol_type = other DNA
gagggcctatttcccatgattccttcatatttgcatatacgatacaaggctgttagagagataattgaaattaatttgactgtaaacacaaagatattagtacaaaatacgtgacgtagaaagtaataatttcttgggtagtttgcagttttaaaattatgttttaaaatggactatcatatgcttaccgtaacttgaaagtatttcgatttcttggctttatatatcttgtggaaaggac

SEQ ID NO: 4517 - DNA, 241 bp, synthetic construct
  misc_feature 1..241: note = promoter
  source 1..241: mol_type = other DNA
gagggcctatttcccatgattccttcatatttgcatatacgatacaaggctgttagagagataattgcaattaatttgactgtaaacacaaagatattagtacaaaatacgtgacgtagaaagtaataatttcttgggtagtttgcagttttaaaattatgttttaaaatggactatcatatgcttaccgtaacttgaaagtatttcgatttcttggctttatatatcttgtggaaaggac

SEQ ID NO: 4518 - DNA, 241 bp, synthetic construct
  misc_feature 1..241: note = promoter
  source 1..241: mol_type = other DNA
gagggcctatttcccatgattccttcatatttgcatatacgatacaaggctgttagagagataattgtaattaatttgactgtaaacacaaagatattagtacaaaatacgtgacgtagaaagtaataatttcttgggtagtttgcagttttaaaattatgttttaaaatggactatcatatgcttaccgtaacttgaaagtatttcgatttcttggctttatatatcttgtggaaaggac

SEQ ID NO: 4519 - DNA, 241 bp, synthetic construct
  misc_feature 1..241: note = promoter
  source 1..241: mol_type = other DNA
gagggcctatttcccatgattccttcatatttgcatatacgatacaaggctgttagagagataattggcattaatttgactgtaaacacaaagatattagtacaaaatacgtgacgtagaaagtaataatttcttgggtagtttgcagttttaaaattatgttttaaaatggactatcatatgcttaccgtaacttgaaagtatttcgatttcttggctttatatatcttgtggaaaggac

SEQ ID NO: 4520 - DNA, 241 bp, synthetic construct
  misc_feature 1..241: note = promoter
  source 1..241: mol_type = other DNA
gagggcctatttcccatgattccttcatatttgcatatacgatacaaggctgttagagagataattgggattaatttgactgtaaacacaaagatattagtacaaaatacgtgacgtagaaagtaataatttcttgggtagtttgcagttttaaaattatgttttaaaatggactatcatatgcttaccgtaacttgaaagtatttcgatttcttggctttatatatcttgtggaaaggac

SEQ ID NO: 4521 - DNA, 241 bp, synthetic construct
  misc_feature 1..241: note = promoter
  source 1..241: mol_type = other DNA
gagggcctatttcccatgattccttcatatttgcatatacgatacaaggctgttagagagataattggtattaatttgactgtaaacacaaagatattagtacaaaatacgtgacgtagaaagtaataatttcttgggtagtttgcagttttaaaattatgttttaaaatggactatcatatgcttaccgtaacttgaaagtatttcgatttcttggctttatatatcttgtggaaaggac

SEQ ID NO: 4522 - DNA, 241 bp, synthetic construct
  misc_feature 1..241: note = promoter
  source 1..241: mol_type = other DNA
gagggcctatttcccatgattccttcatatttgcatatacgatacaaggctgttagagagataattggacttaatttgactgtaaacacaaagatattagtacaaaatacgtgacgtagaaagtaataatttcttgggtagtttgcagttttaaaattatgttttaaaatggactatcatatgcttaccgtaacttgaaagtatttcgatttcttggctttatatatcttgtggaaaggac

SEQ ID NO: 4523 - DNA, 241 bp, synthetic construct
  misc_feature 1..241: note = promoter
  source 1..241: mol_type = other DNA
gagggcctatttcccatgattccttcatatttgcatatacgatacaaggctgttagagagataattggagttaatttgactgtaaacacaaagatattagtacaaaatacgtgacgtagaaagtaataatttcttgggtagtttgcagttttaaaattatgttttaaaatggactatcatatgcttaccgtaacttgaaagtatttcgatttcttggctttatatatcttgtggaaaggac

SEQ ID NO: 4524 - DNA, 241 bp, synthetic construct
  misc_feature 1..241: note = promoter
  source 1..241: mol_type = other DNA
gagggcctatttcccatgattccttcatatttgcatatacgatacaaggctgttagagagataattggatttaatttgactgtaaacacaaagatattagtacaaaatacgtgacgtagaaagtaataatttcttgggtagtttgcagttttaaaattatgttttaaaatggactatcatatgcttaccgtaacttgaaagtatttcgatttcttggctttatatatcttgtggaaaggac

SEQ ID NO: 4525 - DNA, 241 bp, synthetic construct
  misc_feature 1..241: note = promoter
  source 1..241: mol_type = other DNA
gagggcctatttcccatgattccttcatatttgcatatacgatacaaggctgttagagagataattggaaataatttgactgtaaacacaaagatattagtacaaaatacgtgacgtagaaagtaataatttcttgggtagtttgcagttttaaaattatgttttaaaatggactatcatatgcttaccgtaacttgaaagtatttcgatttcttggctttatatatcttgtggaaaggac

SEQ ID NO: 4526 - DNA, 241 bp, synthetic construct
  misc_feature 1..241: note = promoter
  source 1..241: mol_type = other DNA
gagggcctatttcccatgattccttcatatttgcatatacgatacaaggctgttagagagataattggaactaatttgactgtaaacacaaagatattagtacaaaatacgtgacgtagaaagtaataatttcttgggtagtttgcagttttaaaattatgttttaaaatggactatcatatgcttaccgtaacttgaaagtatttcgatttcttggctttatatatcttgtggaaaggac

SEQ ID NO: 4527 - DNA, 241 bp, synthetic construct
  misc_feature 1..241: note = promoter
  source 1..241: mol_type = other DNA
gagggcctatttcccatgattccttcatatttgcatatacgatacaaggctgttagagagataattggaagtaatttgactgtaaacacaaagatattagtacaaaatacgtgacgtagaaagtaataatttcttgggtagtttgcagttttaaaattatgttttaaaatggactatcatatgcttaccgtaacttgaaagtatttcgatttcttggctttatatatcttgtggaaaggac

SEQ ID NO: 4528 - DNA, 241 bp, synthetic construct
  misc_feature 1..241: note = promoter
  source 1..241: mol_type = other DNA
gagggcctatttcccatgattccttcatatttgcatatacgatacaaggctgttagagagataattggaataaatttgactgtaaacacaaagatattagtacaaaatacgtgacgtagaaagtaataatttcttgggtagtttgcagttttaaaattatgttttaaaatggactatcatatgcttaccgtaacttgaaagtatttcgatttcttggctttatatatcttgtggaaaggac

SEQ ID NO: 4529 - DNA, 241 bp, synthetic construct
  misc_feature 1..241: note = promoter
  source 1..241: mol_type = other DNA
gagggcctatttcccatgattccttcatatttgcatatacgatacaaggctgttagagagataattggaatcaatttgactgtaaacacaaagatattagtacaaaatacgtgacgtagaaagtaataatttcttgggtagtttgcagttttaaaattatgttttaaaatggactatcatatgcttaccgtaacttgaaagtatttcgatttcttggctttatatatcttgtggaaaggac

SEQ ID NO: 4530 - DNA, 241 bp, synthetic construct
  misc_feature 1..241: note = promoter
  source 1..241: mol_type = other DNA
gagggcctatttcccatgattccttcatatttgcatatacgatacaaggctgttagagagataattggaatgaatttgactgtaaacacaaagatattagtacaaaatacgtgacgtagaaagtaataatttcttgggtagtttgcagttttaaaattatgttttaaaatggactatcatatgcttaccgtaacttgaaagtatttcgatttcttggctttatatatcttgtggaaaggac

SEQ ID NO: 4531 - DNA, 241 bp, synthetic construct
  misc_feature 1..241: note = promoter
  source 1..241: mol_type = other DNA
gagggcctatttcccatgattccttcatatttgcatatacgatacaaggctgttagagagataattggaattcatttgactgtaaacacaaagatattagtacaaaatacgtgacgtagaaagtaataatttcttgggtagtttgcagttttaaaattatgttttaaaatggactatcatatgcttaccgtaacttgaaagtatttcgatttcttggctttatatatcttgtggaaaggac

SEQ ID NO: 4532 - DNA, 241 bp, synthetic construct
  misc_feature 1..241: note = promoter
  source 1..241: mol_type = other DNA
gagggcctatttcccatgattccttcatatttgcatatacgatacaaggctgttagagagataattggaattgatttgactgtaaacacaaagatattagtacaaaatacgtgacgtagaaagtaataatttcttgggtagtttgcagttttaaaattatgttttaaaatggactatcatatgcttaccgtaacttgaaagtatttcgatttcttggctttatatatcttgtggaaaggac

SEQ ID NO: 4533 - DNA, 241 bp, synthetic construct
  misc_feature 1..241: note = promoter
  source 1..241: mol_type = other DNA
gagggcctatttcccatgattccttcatatttgcatatacgatacaaggctgttagagagataattggaatttatttgactgtaaacacaaagatattagtacaaaatacgtgacgtagaaagtaataatttcttgggtagtttgcagttttaaaattatgttttaaaatggactatcatatgcttaccgtaacttgaaagtatttcgatttcttggctttatatatcttgtggaaaggac

SEQ ID NO: 4534 - DNA, 241 bp, synthetic construct
  misc_feature 1..241: note = promoter
  source 1..241: mol_type = other DNA
gagggcctatttcccatgattccttcatatttgcatatacgatacaaggctgttagagagataattggaattactttgactgtaaacacaaagatattagtacaaaatacgtgacgtagaaagtaataatttcttgggtagtttgcagttttaaaattatgttttaaaatggactatcatatgcttaccgtaacttgaaagtatttcgatttcttggctttatatatcttgtggaaaggac

SEQ ID NO: 4535 - DNA, 241 bp, synthetic construct
  misc_feature 1..241: note = promoter
  source 1..241: mol_type = other DNA
gagggcctatttcccatgattccttcatatttgcatatacgatacaaggctgttagagagataattggaattagtttgactgtaaacacaaagatattagtacaaaatacgtgacgtagaaagtaataatttcttgggtagtttgcagttttaaaattatgttttaaaatggactatcatatgcttaccgtaacttgaaagtatttcgatttcttggctttatatatcttgtggaaaggac

SEQ ID NO: 4536 - DNA, 241 bp, synthetic construct
  misc_feature 1..241: note = promoter
  source 1..241: mol_type = other DNA
gagggcctatttcccatgattccttcatatttgcatatacgatacaaggctgttagagagataattggaattattttgactgtaaacacaaagatattagtacaaaatacgtgacgtagaaagtaataatttcttgggtagtttgcagttttaaaattatgttttaaaatggactatcatatgcttaccgtaacttgaaagtatttcgatttcttggctttatatatcttgtggaaaggac

SEQ ID NO: 4537 - DNA, 241 bp, synthetic construct
  misc_feature 1..241: note = promoter
  source 1..241: mol_type = other DNA
gagggcctatttcccatgattccttcatatttgcatatacgatacaaggctgttagagagataattggaattaaattgactgtaaacacaaagatattagtacaaaatacgtgacgtagaaagtaataatttcttgggtagtttgcagttttaaaattatgttttaaaatggactatcatatgcttaccgtaacttgaaagtatttcgatttcttggctttatatatcttgtggaaaggac

SEQ ID NO: 4538 - DNA, 241 bp, synthetic construct
  misc_feature 1..241: note = promoter
  source 1..241: mol_type = other DNA
gagggcctatttcccatgattccttcatatttgcatatacgatacaaggctgttagagagataattggaattaacttgactgtaaacacaaagatattagtacaaaatacgtgacgtagaaagtaataatttcttgggtagtttgcagttttaaaattatgttttaaaatggactatcatatgcttaccgtaacttgaaagtatttcgatttcttggctttatatatcttgtggaaaggac

SEQ ID NO: 4539 - DNA, 241 bp, synthetic construct
  misc_feature 1..241: note = promoter
  source 1..241: mol_type = other DNA
gagggcctatttcccatgattccttcatatttgcatatacgatacaaggctgttagagagataattggaattaagttgactgtaaacacaaagatattagtacaaaatacgtgacgtagaaagtaataatttcttgggtagtttgcagttttaaaattatgttttaaaatggactatcatatgcttaccgtaacttgaaagtatttcgatttcttggctttatatatcttgtggaaaggac

SEQ ID NO: 4540 - DNA, 241 bp, synthetic construct
  misc_feature 1..241: note = promoter
  source 1..241: mol_type = other DNA
gagggcctatttcccatgattccttcatatttgcatatacgatacaaggctgttagagagataattggaattaatatgactgtaaacacaaagatattagtacaaaatacgtgacgtagaaagtaataatttcttgggtagtttgcagttttaaaattatgttttaaaatggactatcatatgcttaccgtaacttgaaagtatttcgatttcttggctttatatatcttgtggaaaggac

SEQ ID NO: 4541 - DNA, 241 bp, synthetic construct
  misc_feature 1..241: note = promoter
  source 1..241: mol_type = other DNA
gagggcctatttcccatgattccttcatatttgcatatacgatacaaggctgttagagagataattggaattaatctgactgtaaacacaaagatattagtacaaaatacgtgacgtagaaagtaataatttcttgggtagtttgcagttttaaaattatgttttaaaatggactatcatatgcttaccgtaacttgaaagtatttcgatttcttggctttatatatcttgtggaaaggac

SEQ ID NO: 4542 - DNA, 241 bp, synthetic construct
  misc_feature 1..241: note = promoter
  source 1..241: mol_type = other DNA
gagggcctatttcccatgattccttcatatttgcatatacgatacaaggctgttagagagataattggaattaatgtgactgtaaacacaaagatattagtacaaaatacgtgacgtagaaagtaataatttcttgggtagtttgcagttttaaaattatgttttaaaatggactatcatatgcttaccgtaacttgaaagtatttcgatttcttggctttatatatcttgtggaaaggac

SEQ ID NO: 4543 - DNA, 241 bp, synthetic construct
  misc_feature 1..241: note = promoter
  source 1..241: mol_type = other DNA
gagggcctatttcccatgattccttcatatttgcatatacgatacaaggctgttagagagataattggaattaattagactgtaaacacaaagatattagtacaaaatacgtgacgtagaaagtaataatttcttgggtagtttgcagttttaaaattatgttttaaaatggactatcatatgcttaccgtaacttgaaagtatttcgatttcttggctttatatatcttgtggaaaggac

SEQ ID NO: 4544 - DNA, 241 bp, synthetic construct
  misc_feature 1..241: note = promoter
  source 1..241: mol_type = other DNA
gagggcctatttcccatgattccttcatatttgcatatacgatacaaggctgttagagagataattggaattaattcgactgtaaacacaaagatattagtacaaaatacgtgacgtagaaagtaataatttcttgggtagtttgcagttttaaaattatgttttaaaatggactatcatatgcttaccgtaacttgaaagtatttcgatttcttggctttatatatcttgtggaaaggac

SEQ ID NO: 4545 - DNA, 241 bp, synthetic construct
  misc_feature 1..241: note = promoter
  source 1..241: mol_type = other DNA
gagggcctatttcccatgattccttcatatttgcatatacgatacaaggctgttagagagataattggaattaattggactgtaaacacaaagatattagtacaaaatacgtgacgtagaaagtaataatttcttgggtagtttgcagttttaaaattatgttttaaaatggactatcatatgcttaccgtaacttgaaagtatttcgatttcttggctttatatatcttgtggaaaggac

SEQ ID NO: 4546 - DNA, 241 bp, synthetic construct
  misc_feature 1..241: note = promoter
  source 1..241: mol_type = other DNA
gagggcctatttcccatgattccttcatatttgcatatacgatacaaggctgttagagagataattggaattaatttaactgtaaacacaaagatattagtacaaaatacgtgacgtagaaagtaataatttcttgggtagtttgcagttttaaaattatgttttaaaatggactatcatatgcttaccgtaacttgaaagtatttcgatttcttggctttatatatcttgtggaaaggac

SEQ ID NO: 4547 - DNA, 241 bp, synthetic construct
  misc_feature 1..241: note = promoter
  source 1..241: mol_type = other DNA
gagggcctatttcccatgattccttcatatttgcatatacgatacaaggctgttagagagataattggaattaatttcactgtaaacacaaagatattagtacaaaatacgtgacgtagaaagtaataatttcttgggtagtttgcagttttaaaattatgttttaaaatggactatcatatgcttaccgtaacttgaaagtatttcgatttcttggctttatatatcttgtggaaaggac

SEQ ID NO: 4548 - DNA, 241 bp, synthetic construct
  misc_feature 1..241: note = promoter
  source 1..241: mol_type = other DNA
gagggcctatttcccatgattccttcatatttgcatatacgatacaaggctgttagagagataattggaattaattttactgtaaacacaaagatattagtacaaaatacgtgacgtagaaagtaataatttcttgggtagtttgcagttttaaaattatgttttaaaatggactatcatatgcttaccgtaacttgaaagtatttcgatttcttggctttatatatcttgtggaaaggac

SEQ ID NO: 4549 - DNA, 241 bp, synthetic construct
  misc_feature 1..241: note = promoter
  source 1..241: mol_type = other DNA
gagggcctatttcccatgattccttcatatttgcatatacgatacaaggctgttagagagataattggaattaatttgcctgtaaacacaaagatattagtacaaaatacgtgacgtagaaagtaataatttcttgggtagtttgcagttttaaaattatgttttaaaatggactatcatatgcttaccgtaacttgaaagtatttcgatttcttggctttatatatcttgtggaaaggac

SEQ ID NO: 4550 - DNA, 241 bp, synthetic construct
  misc_feature 1..241: note = promoter
  source 1..241: mol_type = other DNA
gagggcctatttcccatgattccttcatatttgcatatacgatacaaggctgttagagagataattggaattaatttggctgtaaacacaaagatattagtacaaaatacgtgacgtagaaagtaataatttcttgggtagtttgcagttttaaaattatgttttaaaatggactatcatatgcttaccgtaacttgaaagtatttcgatttcttggctttatatatcttgtggaaaggac

SEQ ID NO: 4551 - DNA, 241 bp, synthetic construct
  misc_feature 1..241: note = promoter
  source 1..241: mol_type = other DNA
gagggcctatttcccatgattccttcatatttgcatatacgatacaaggctgttagagagataattggaattaatttgtctgtaaacacaaagatattagtacaaaatacgtgacgtagaaagtaataatttcttgggtagtttgcagttttaaaattatgttttaaaatggactatcatatgcttaccgtaacttgaaagtatttcgatttcttggctttatatatcttgtggaaaggac

SEQ ID NO: 4552 - DNA, 241 bp, synthetic construct
  misc_feature 1..241: note = promoter
  source 1..241: mol_type = other DNA
gagggcctatttcccatgattccttcatatttgcatatacgatacaaggctgttagagagataattggaattaatttgaatgtaaacacaaagatattagtacaaaatacgtgacgtagaaagtaataatttcttgggtagtttgcagttttaaaattatgttttaaaatggactatcatatgcttaccgtaacttgaaagtatttcgatttcttggctttatatatcttgtggaaaggac

SEQ ID NO: 4553 - DNA, 241 bp, synthetic construct
  misc_feature 1..241: note = promoter
  source 1..241: mol_type = other DNA
gagggcctatttcccatgattccttcatatttgcatatacgatacaaggctgttagagagataattggaattaatttgagtgtaaacacaaagatattagtacaaaatacgtgacgtagaaagtaataatttcttgggtagtttgcagttttaaaattatgttttaaaatggactatcatatgcttaccgtaacttgaaagtatttcgatttcttggctttatatatcttgtggaaaggac

SEQ ID NO: 4554 - DNA, 241 bp, synthetic construct
  misc_feature 1..241: note = promoter
  source 1..241: mol_type = other DNA
gagggcctatttcccatgattccttcatatttgcatatacgatacaaggctgttagagagataattggaattaatttgattgtaaacacaaagatattagtacaaaatacgtgacgtagaaagtaataatttcttgggtagtttgcagttttaaaattatgttttaaaatggactatcatatgcttaccgtaacttgaaagtatttcgatttcttggctttatatatcttgtggaaaggac

SEQ ID NO: 4555 - DNA, 241 bp, synthetic construct
  misc_feature 1..241: note = promoter
  source 1..241: mol_type = other DNA
gagggcctatttcccatgattccttcatatttgcatatacgatacaaggctgttagagagataattggaattaatttgacagtaaacacaaagatattagtacaaaatacgtgacgtagaaagtaataatttcttgggtagtttgcagttttaaaattatgttttaaaatggactatcatatgcttaccgtaacttgaaagtatttcgatttcttggctttatatatcttgtggaaaggac

SEQ ID NO: 4556 - DNA, 241 bp, synthetic construct
  misc_feature 1..241: note = promoter
  source 1..241: mol_type = other DNA
gagggcctatttcccatgattccttcatatttgcatatacgatacaaggctgttagagagataattggaattaatttgaccgtaaacacaaagatattagtacaaaatacgtgacgtagaaagtaataatttcttgggtagtttgcagttttaaaattatgttttaaaatggactatcatatgcttaccgtaacttgaaagtatttcgatttcttggctttatatatcttgtggaaaggac

SEQ ID NO: 4557 - DNA, 241 bp, synthetic construct
  misc_feature 1..241: note = promoter
  source 1..241: mol_type = other DNA
gagggcctatttcccatgattccttcatatttgcatatacgatacaaggctgttagagagataattggaattaatttgacggtaaacacaaagatattagtacaaaatacgtgacgtagaaagtaataatttcttgggtagtttgcagttttaaaattatgttttaaaatggactatcatatgcttaccgtaacttgaaagtatttcgatttcttggctttatatatcttgtggaaaggac

SEQ ID NO: 4558 - DNA, 241 bp, synthetic construct
  misc_feature 1..241: note = promoter
  source 1..241: mol_type = other DNA
gagggcctatttcccatgattccttcatatttgcatatacgatacaaggctgttagagagataattggaattaatttgactataaacacaaagatattagtacaaaatacgtgacgtagaaagtaataatttcttgggtagtttgcagttttaaaattatgttttaaaatggactatcatatgcttaccgtaacttgaaagtatttcgatttcttggctttatatatcttgtggaaaggac

SEQ ID NO: 4559 - DNA, 241 bp, synthetic construct
  misc_feature 1..241: note = promoter
  source 1..241: mol_type = other DNA
gagggcctatttcccatgattccttcatatttgcatatacgatacaaggctgttagagagataattggaattaatttgactctaaacacaaagatattagtacaaaatacgtgacgtagaaagtaataatttcttgggtagtttgcagttttaaaattatgttttaaaatggactatcatatgcttaccgtaacttgaaagtatttcgatttcttggctttatatatcttgtggaaaggac

SEQ ID NO: 4560 - DNA, 241 bp, synthetic construct
  misc_feature 1..241: note = promoter
  source 1..241: mol_type = other DNA
gagggcctatttcccatgattccttcatatttgcatatacgatacaaggctgttagagagataattggaattaatttgactttaaacacaaagatattagtacaaaatacgtgacgtagaaagtaataatttcttgggtagtttgcagttttaaaattatgttttaaaatggactatcatatgcttaccgtaacttgaaagtatttcgatttcttggctttatatatcttgtggaaaggac

SEQ ID NO: 4561 - DNA, 241 bp, synthetic construct
  misc_feature 1..241: note = promoter
  source 1..241: mol_type = other DNA
gagggcctatttcccatgattccttcatatttgcatatacgatacaaggctgttagagagataattggaattaatttgactgaaaacacaaagatattagtacaaaatacgtgacgtagaaagtaataatttcttgggtagtttgcagttttaaaattatgttttaaaatggactatcatatgcttaccgtaacttgaaagtatttcgatttcttggctttatatatcttgtggaaaggac

SEQ ID NO: 4562 - DNA, 241 bp, synthetic construct
  misc_feature 1..241: note = promoter
  source 1..241: mol_type = other DNA
gagggcctatttcccatgattccttcatatttgcatatacgatacaaggctgttagagagataattggaattaatttgactgcaaacacaaagatattagtacaaaatacgtgacgtagaaagtaataatttcttgggtagtttgcagttttaaaattatgttttaaaatggactatcatatgcttaccgtaacttgaaagtatttcgatttcttggctttatatatcttgtggaaaggac

SEQ ID NO: 4563 - DNA, 241 bp, synthetic construct
  misc_feature 1..241: note = promoter
  source 1..241: mol_type = other DNA
gagggcctatttcccatgattccttcatatttgcatatacgatacaaggctgttagagagataattggaattaatttgactggaaacacaaagatattagtacaaaatacgtgacgtagaaagtaataatttcttgggtagtttgcagttttaaaattatgttttaaaatggactatcatatgcttaccgtaacttgaaagtatttcgatttcttggctttatatatcttgtggaaaggac

SEQ ID NO: 4564 - DNA, 241 bp, synthetic construct
  misc_feature 1..241: note = promoter
  source 1..241: mol_type = other DNA
gagggcctatttcccatgattccttcatatttgcatatacgatacaaggctgttagagagataattggaattaatttgactgtcaacacaaagatattagtacaaaatacgtgacgtagaaagtaataatttcttgggtagtttgcagttttaaaattatgttttaaaatggactatcatatgcttaccgtaacttgaaagtatttcgatttcttggctttatatatcttgtggaaaggac

SEQ ID NO: 4565 - DNA, 241 bp, synthetic construct
  misc_feature 1..241: note = promoter
  source 1..241: mol_type = other DNA
gagggcctatttcccatgattccttcatatttgcatatacgatacaaggctgttagagagataattggaattaatttgactgtgaacacaaagatattagtacaaaatacgtgacgtagaaagtaataatttcttgggtagtttgcagttttaaaattatgttttaaaatggactatcatatgcttaccgtaacttgaaagtatttcgatttcttggctttatatatcttgtggaaaggac

SEQ ID NO: 4566 - DNA, 241 bp, synthetic construct
  misc_feature 1..241: note = promoter
  source 1..241: mol_type = other DNA
gagggcctatttcccatgattccttcatatttgcatatacgatacaaggctgttagagagataattggaattaatttgactgttaacacaaagatattagtacaaaatacgtgacgtagaaagtaataatttcttgggtagtttgcagttttaaaattatgttttaaaatggactatcatatgcttaccgtaacttgaaagtatttcgatttcttggctttatatatcttgtggaaaggac

SEQ ID NO: 4567 - DNA, 241 bp, synthetic construct
  misc_feature 1..241: note = promoter
  source 1..241: mol_type = other DNA
gagggcctatttcccatgattccttcatatttgcatatacgatacaaggctgttagagagataattggaattaatttgactgtacacacaaagatattagtacaaaatacgtgacgtagaaagtaataatttcttgggtagtttgcagttttaaaattatgttttaaaatggactatcatatgcttaccgtaacttgaaagtatttcgatttcttggctttatatatcttgtggaaaggac

SEQ ID NO: 4568 - DNA, 241 bp, synthetic construct
  misc_feature 1..241: note = promoter
  source 1..241: mol_type = other DNA
gagggcctatttcccatgattccttcatatttgcatatacgatacaaggctgttagagagataattggaattaatttgactgtagacacaaagatattagtacaaaatacgtgacgtagaaagtaataatttcttgggtagtttgcagttttaaaattatgttttaaaatggactatcatatgcttaccgtaacttgaaagtatttcgatttcttggctttatatatcttgtggaaaggac

SEQ ID NO: 4569 - DNA, 241 bp, synthetic construct
  misc_feature 1..241: note = promoter
  source 1..241: mol_type = other DNA
gagggcctatttcccatgattccttcatatttgcatatacgatacaaggctgttagagagataattggaattaatttgactgtatacacaaagatattagtacaaaatacgtgacgtagaaagtaataatttcttgggtagtttgcagttttaaaattatgttttaaaatggactatcatatgcttaccgtaacttgaaagtatttcgatttcttggctttatatatcttgtggaaaggac

SEQ ID NO: 4570 - DNA, 241 bp, synthetic construct
  misc_feature 1..241: note = promoter
  source 1..241: mol_type = other DNA
gagggcctatttcccatgattccttcatatttgcatatacgatacaaggctgttagagagataattggaattaatttgactgtaaccacaaagatattagtacaaaatacgtgacgtagaaagtaataatttcttgggtagtttgcagttttaaaattatgttttaaaatggactatcatatgcttaccgtaacttgaaagtatttcgatttcttggctttatatatcttgtggaaaggac

SEQ ID NO: 4571 - DNA, 241 bp, synthetic construct
  misc_feature 1..241: note = promoter
  source 1..241: mol_type = other DNA
gagggcctatttcccatgattccttcatatttgcatatacgatacaaggctgttagagagataattggaattaatttgactgtaagcacaaagatattagtacaaaatacgtgacgtagaaagtaataatttcttgggtagtttgcagttttaaaattatgttttaaaatggactatcatatgcttaccgtaacttgaaagtatttcgatttcttggctttatatatcttgtggaaaggac

SEQ ID NO: 4572 - DNA, 241 bp, synthetic construct
  misc_feature 1..241: note = promoter
  source 1..241: mol_type = other DNA
gagggcctatttcccatgattccttcatatttgcatatacgatacaaggctgttagagagataattggaattaatttgactgtaatcacaaagatattagtacaaaatacgtgacgtagaaagtaataatttcttgggtagtttgcagttttaaaattatgttttaaaatggactatcatatgcttaccgtaacttgaaagtatttcgatttcttggctttatatatcttgtggaaaggac

SEQ ID NO: 4573 - DNA, 241 bp, synthetic construct
  misc_feature 1..241: note = promoter
  source 1..241: mol_type = other DNA
gagggcctatttcccatgattccttcatatttgcatatacgatacaaggctgttagagagataattggaattaatttgactgtaaaaacaaagatattagtacaaaatacgtgacgtagaaagtaataatttcttgggtagtttgcagttttaaaattatgttttaaaatggactatcatatgcttaccgtaacttgaaagtatttcgatttcttggctttatatatcttgtggaaaggac

SEQ ID NO: 4574 - DNA, 241 bp, synthetic construct
  misc_feature 1..241: note = promoter
  source 1..241: mol_type = other DNA
gagggcctatttcccatgattccttcatatttgcatatacgatacaaggctgttagagagataattggaattaatttgactgtaaagacaaagatattagtacaaaatacgtgacgtagaaagtaataatttcttgggtagtttgcagttttaaaattatgttttaaaatggactatcatatgcttaccgtaacttgaaagtatttcgatttcttggctttatatatcttgtggaaaggac

SEQ ID NO: 4575 - DNA, 241 bp, synthetic construct
  misc_feature 1..241: note = promoter
  source 1..241: mol_type = other DNA
gagggcctatttcccatgattccttcatatttgcatatacgatacaaggctgttagagagataattggaattaatttgactgtaaatacaaagatattagtacaaaatacgtgacgtagaaagtaataatttcttgggtagtttgcagttttaaaattatgttttaaaatggactatcatatgcttaccgtaacttgaaagtatttcgatttcttggctttatatatcttgtggaaaggac

SEQ ID NO: 4576 - DNA, 241 bp, synthetic construct
  misc_feature 1..241: note = promoter
  source 1..241: mol_type = other DNA
gagggcctatttcccatgattccttcatatttgcatatacgatacaaggctgttagagagataattggaattaatttgactgtaaacccaaagatattagtacaaaatacgtgacgtagaaagtaataatttcttgggtagtttgcagttttaaaattatgttttaaaatggactatcatatgcttaccgtaacttgaaagtatttcgatttcttggctttatatatcttgtggaaaggac

SEQ ID NO: 4577 - DNA, 241 bp, synthetic construct
  misc_feature 1..241: note = promoter
  source 1..241: mol_type = other DNA
gagggcctatttcccatgattccttcatatttgcatatacgatacaaggctgttagagagataattggaattaatttgactgtaaacgcaaagatattagtacaaaatacgtgacgtagaaagtaataatttcttgggtagtttgcagttttaaaattatgttttaaaatggactatcatatgcttaccgtaacttgaaagtatttcgatttcttggctttatatatcttgtggaaaggac

SEQ ID NO: 4578 - DNA, 241 bp, synthetic construct
  misc_feature 1..241: note = promoter
  source 1..241: mol_type = other DNA
gagggcctatttcccatgattccttcatatttgcatatacgatacaaggctgttagagagataattggaattaatttgactgtaaactcaaagatattagtacaaaatacgtgacgtagaaagtaataatttcttgggtagtttgcagttttaaaattatgttttaaaatggactatcatatgcttaccgtaacttgaaagtatttcgatttcttggctttatatatcttgtggaaaggac

SEQ ID NO: 4579 - DNA, 241 bp, synthetic construct
  misc_feature 1..241: note = promoter
  source 1..241: mol_type = other DNA
gagggcctatttcccatgattccttcatatttgcatatacgatacaaggctgttagagagataattggaattaatttgactgtaaacaaaaagatattagtacaaaatacgtgacgtagaaagtaataatttcttgggtagtttgcagttttaaaattatgttttaaaatggactatcatatgcttaccgtaacttgaaagtatttcgatttcttggctttatatatcttgtggaaaggac

SEQ ID NO: 4580 - DNA, 241 bp, synthetic construct
  misc_feature 1..241: note = promoter
  source 1..241: mol_type = other DNA
gagggcctatttcccatgattccttcatatttgcatatacgatacaaggctgttagagagataattggaattaatttgactgtaaacagaaagatattagtacaaaatacgtgacgtagaaagtaataatttcttgggtagtttgcagttttaaaattatgttttaaaatggactatcatatgcttaccgtaacttgaaagtatttcgatttcttggctttatatatcttgtggaaaggac

SEQ ID NO: 4581 - DNA, 241 bp, synthetic construct
  misc_feature 1..241: note = promoter
  source 1..241: mol_type = other DNA
gagggcctatttcccatgattccttcatatttgcatatacgatacaaggctgttagagagataattggaattaatttgactgtaaacataaagatattagtacaaaatacgtgacgtagaaagtaataatttcttgggtagtttgcagttttaaaattatgttttaaaatggactatcatatgcttaccgtaacttgaaagtatttcgatttcttggctttatatatcttgtggaaaggac

SEQ ID NO: 4582 - DNA, 241 bp, synthetic construct
  misc_feature 1..241: note = promoter
  source 1..241: mol_type = other DNA
gagggcctatttcccatgattccttcatatttgcatatacgatacaaggctgttagagagataattggaattaatttgactgtaaacaccaagatattagtacaaaatacgtgacgtagaaagtaataatttcttgggtagtttgcagttttaaaattatgttttaaaatggactatcatatgcttaccgtaacttgaaagtatttcgatttcttggctttatatatcttgtggaaaggac

SEQ ID NO: 4583 - DNA, 241 bp, synthetic construct
  misc_feature 1..241: note = promoter
  source 1..241: mol_type = other DNA
gagggcctatttcccatgattccttcatatttgcatatacgatacaaggctgttagagagataattggaattaatttgactgtaaacacgaagatattagtacaaaatacgtgacgtagaaagtaataatttcttgggtagtttgcagttttaaaattatgttttaaaatggactatcatatgcttaccgtaacttgaaagtatttcgatttcttggctttatatatcttgtggaaaggac

SEQ ID NO: 4584 - DNA, 241 bp, synthetic construct
  misc_feature 1..241: note = promoter
  source 1..241: mol_type = other DNA
gagggcctatttcccatgattccttcatatttgcatatacgatacaaggctgttagagagataattggaattaatttgactgtaaacactaagatattagtacaaaatacgtgacgtagaaagtaataatttcttgggtagtttgcagttttaaaattatgttttaaaatggactatcatatgcttaccgtaacttgaaagtatttcgatttcttggctttatatatcttgtggaaaggac

SEQ ID NO: 4585 - DNA, 241 bp, synthetic construct
  misc_feature 1..241: note = promoter
  source 1..241: mol_type = other DNA
gagggcctatttcccatgattccttcatatttgcatatacgatacaaggctgttagagagataattggaattaatttgactgtaaacacacagatattagtacaaaatacgtgacgtagaaagtaataatttcttgggtagtttgcagttttaaaattatgttttaaaatggactatcatatgcttaccgtaacttgaaagtatttcgatttcttggctttatatatcttgtggaaaggac

SEQ ID NO: 4586 - DNA, 241 bp, synthetic construct
  misc_feature 1..241: note = promoter
  source 1..241: mol_type = other DNA
gagggcctatttcccatgattccttcatatttgcatatacgatacaaggctgttagagagataattggaattaatttgactgtaaacacagagatattagtacaaaatacgtgacgtagaaagtaataatttcttgggtagtttgcagttttaaaattatgttttaaaatggactatcatatgcttaccgtaacttgaaagtatttcgatttcttggctttatatatcttgtggaaaggac

SEQ ID NO: 4587 - DNA, 241 bp, synthetic construct
  misc_feature 1..241: note = promoter
  source 1..241: mol_type = other DNA
gagggcctatttcccatgattccttcatatttgcatatacgatacaaggctgttagagagataattggaattaatttgactgtaaacacatagatattagtacaaaatacgtgacgtagaaagtaataatttcttgggtagtttgcagttttaaaattatgttttaaaatggactatcatatgcttaccgtaacttgaaagtatttcgatttcttggctttatatatcttgtggaaaggac

SEQ ID NO: 4588 - DNA, 241 bp, synthetic construct
  misc_feature 1..241: note = promoter
  source 1..241: mol_type = other DNA
gagggcctatttcccatgattccttcatatttgcatatacgatacaaggctgttagagagataattggaattaatttgactgtaaacacaacgatattagtacaaaatacgtgacgtagaaagtaataatttcttgggtagtttgcagttttaaaattatgttttaaaatggactatcatatgcttaccgtaacttgaaagtatttcgatttcttggctttatatatcttgtggaaaggac

SEQ ID NO: 4589 - DNA, 241 bp, synthetic construct
  misc_feature 1..241: note = promoter
  source 1..241: mol_type = other DNA
gagggcctatttcccatgattccttcatatttgcatatacgatacaaggctgttagagagataattggaattaatttgactgtaaacacaaggatattagtacaaaatacgtgacgtagaaagtaataatttcttgggtagtttgcagttttaaaattatgttttaaaatggactatcatatgcttaccgtaacttgaaagtatttcgatttcttggctttatatatcttgtggaaaggac

SEQ ID NO: 4590 - DNA, 241 bp, synthetic construct
  misc_feature 1..241: note = promoter
  source 1..241: mol_type = other DNA
gagggcctatttcccatgattccttcatatttgcatatacgatacaaggctgttagagagataattggaattaatttgactgtaaacacaatgatattagtacaaaatacgtgacgtagaaagtaataatttcttgggtagtttgcagttttaaaattatgttttaaaatggactatcatatgcttaccgtaacttgaaagtatttcgatttcttggctttatatatcttgtggaaaggac

SEQ ID NO: 4591 - DNA, 241 bp, synthetic construct
  misc_feature 1..241: note = promoter
  source 1..241: mol_type = other DNA
gagggcctatttcccatgattccttcatatttgcatatacgatacaaggctgttagagagataattggaattaatttgactgtaaacacaaaaatattagtacaaaatacgtgacgtagaaagtaataatttcttgggtagtttgcagttttaaaattatgttttaaaatggactatcatatgcttaccgtaacttgaaagtatttcgatttcttggctttatatatcttgtggaaaggac

SEQ ID NO: 4592 - DNA, 241 bp, synthetic construct
  misc_feature 1..241: note = promoter
  source 1..241: mol_type = other DNA
gagggcctatttcccatgattccttcatatttgcatatacgatacaaggctgttagagagataattggaattaatttgactgtaaacacaaacatattagtacaaaatacgtgacgtagaaagtaataatttcttgggtagtttgcagttttaaaattatgttttaaaatggactatcatatgcttaccgtaacttgaaagtatttcgatttcttggctttatatatcttgtggaaaggac

SEQ ID NO: 4593 - DNA, 241 bp, synthetic construct
  misc_feature 1..241: note = promoter
  source 1..241: mol_type = other DNA
gagggcctatttcccatgattccttcatatttgcatatacgatacaaggctgttagagagataattggaattaatttgactgtaaacacaaatatattagtacaaaatacgtgacgtagaaagtaataatttcttgggtagtttgcagttttaaaattatgttttaaaatggactatcatatgcttaccgtaacttgaaagtatttcgatttcttggctttatatatcttgtggaaaggac

SEQ ID NO: 4594 - DNA, 241 bp, synthetic construct
  misc_feature 1..241: note = promoter
  source 1..241: mol_type = other DNA
gagggcctatttcccatgattccttcatatttgcatatacgatacaaggctgttagagagataattggaattaatttgactgtaaacacaaagctattagtacaaaatacgtgacgtagaaagtaataatttcttgggtagtttgcagttttaaaattatgttttaaaatggactatcatatgcttaccgtaacttgaaagtatttcgatttcttggctttatatatcttgtggaaaggac

SEQ ID NO: 4595 - DNA, 241 bp, synthetic construct
  misc_feature 1..241: note = promoter
  source 1..241: mol_type = other DNA
gagggcctatttcccatgattccttcatatttgcatatacgatacaaggctgttagagagataattggaattaatttgactgtaaacacaaaggtattagtacaaaatacgtgacgtagaaagtaataatttcttgggtagtttgcagttttaaaattatgttttaaaatggactatcatatgcttaccgtaacttgaaagtatttcgatttcttggctttatatatcttgtggaaaggac

SEQ ID NO: 4596 - DNA, 241 bp, synthetic construct
  misc_feature 1..241: note = promoter
  source 1..241: mol_type = other DNA
gagggcctatttcccatgattccttcatatttgcatatacgatacaaggctgttagagagataattggaattaatttgactgtaaacacaaagttattagtacaaaatacgtgacgtagaaagtaataatttcttgggtagtttgcagttttaaaattatgttttaaaatggactatcatatgcttaccgtaacttgaaagtatttcgatttcttggctttatatatcttgtggaaaggac

SEQ ID NO: 4597 - DNA, 241 bp, synthetic construct
  misc_feature 1..241: note = promoter
  source 1..241: mol_type = other DNA
gagggcctatttcccatgattccttcatatttgcatatacgatacaaggctgttagagagataattggaattaatttgactgtaaacacaaagaaattagtacaaaatacgtgacgtagaaagtaataatttcttgggtagtttgcagttttaaaattatgttttaaaatggactatcatatgcttaccgtaacttgaaagtatttcgatttcttggctttatatatcttgtggaaaggac

SEQ ID NO: 4598 - DNA, 241 bp, synthetic construct
  misc_feature 1..241: note = promoter
  source 1..241: mol_type = other DNA
gagggcctatttcccatgattccttcatatttgcatatacgatacaaggctgttagagagataattggaattaatttgactgtaaacacaaagacattagtacaaaatacgtgacgtagaaagtaataatttcttgggtagtttgcagttttaaaattatgttttaaaatggactatcatatgcttaccgtaacttgaaagtatttcgatttcttggctttatatatcttgtggaaaggac

SEQ ID NO: 4599 - DNA, 241 bp, synthetic construct
  misc_feature 1..241: note = promoter
  source 1..241: mol_type = other DNA
gagggcctatttcccatgattccttcatatttgcatatacgatacaaggctgttagagagataattggaattaatttgactgtaaacacaaagagattagtacaaaatacgtgacgtagaaagtaataatttcttgggtagtttgcagttttaaaattatgttttaaaatggactatcatatgcttaccgtaacttgaaagtatttcgatttcttggctttatatatcttgtggaaaggac

SEQ ID NO: 4600 - DNA, 241 bp, synthetic construct
  misc_feature 1..241: note = promoter
  source 1..241: mol_type = other DNA
gagggcctatttcccatgattccttcatatttgcatatacgatacaaggctgttagagagataattggaattaatttgactgtaaacacaaagatcttagtacaaaatacgtgacgtagaaagtaataatttcttgggtagtttgcagttttaaaattatgttttaaaatggactatcatatgcttaccgtaacttgaaagtatttcgatttcttggctttatatatcttgtggaaaggac

SEQ ID NO: 4601 - DNA, 241 bp, synthetic construct
  misc_feature 1..241: note = promoter
  source 1..241: mol_type = other DNA
gagggcctatttcccatgattccttcatatttgcatatacgatacaaggctgttagagagataattggaattaatttgactgtaaacacaaagatgttagtacaaaatacgtgacgtagaaagtaataatttcttgggtagtttgcagttttaaaattatgttttaaaatggactatcatatgcttaccgtaacttgaaagtatttcgatttcttggctttatatatcttgtggaaaggac

SEQ ID NO: 4602 - DNA, 241 bp, synthetic construct
  misc_feature 1..241: note = promoter
  source 1..241: mol_type = other DNA
gagggcctatttcccatgattccttcatatttgcatatacgatacaaggctgttagagagataattggaattaatttgactgtaaacacaaagattttagtacaaaatacgtgacgtagaaagtaataatttcttgggtagtttgcagttttaaaattatgttttaaaatggactatcatatgcttaccgtaacttgaaagtatttcgatttcttggctttatatatcttgtggaaaggac

SEQ ID NO: 4603 - DNA, 241 bp, synthetic construct
  misc_feature 1..241: note = promoter
  source 1..241: mol_type = other DNA
gagggcctatttcccatgattccttcatatttgcatatacgatacaaggctgttagagagataattggaattaatttgactgtaaacacaaagataatagtacaaaatacgtgacgtagaaagtaataatttcttgggtagtttgcagttttaaaattatgttttaaaatggactatcatatgcttaccgtaacttgaaagtatttcgatttcttggctttatatatcttgtggaaaggac

SEQ ID NO: 4604 - DNA, 241 bp, synthetic construct
  misc_feature 1..241: note = promoter
  source 1..241: mol_type = other DNA
gagggcctatttcccatgattccttcatatttgcatatacgatacaaggctgttagagagataattggaattaatttgactgtaaacacaaagatactagtacaaaatacgtgacgtagaaagtaataatttcttgggtagtttgcagttttaaaattatgttttaaaatggactatcatatgcttaccgtaacttgaaagtatttcgatttcttggctttatatatcttgtggaaaggac

SEQ ID NO: 4605 - DNA, 241 bp, synthetic construct
  misc_feature 1..241: note = promoter
  source 1..241: mol_type = other DNA
gagggcctatttcccatgattccttcatatttgcatatacgatacaaggctgttagagagataattggaattaatttgactgtaaacacaaagatagtagtacaaaatacgtgacgtagaaagtaataatttcttgggtagtttgcagttttaaaattatgttttaaaatggactatcatatgcttaccgtaacttgaaagtatttcgatttcttggctttatatatcttgtggaaaggac

SEQ ID NO: 4606 - DNA, 241 bp, synthetic construct
  misc_feature 1..241: note = promoter
  source 1..241: mol_type = other DNA
gagggcctatttcccatgattccttcatatttgcatatacgatacaaggctgttagagagataattggaattaatttgactgtaaacacaaagatataagtacaaaatacgtgacgtagaaagtaataatttcttgggtagtttgcagttttaaaattatgttttaaaatggactatcatatgcttaccgtaacttgaaagtatttcgatttcttggctttatatatcttgtggaaaggac

SEQ ID NO: 4607 - DNA, 241 bp, synthetic construct
  misc_feature 1..241: note = promoter
  source 1..241: mol_type = other DNA
gagggcctatttcccatgattccttcatatttgcatatacgatacaaggctgttagagagataattggaattaatttgactgtaaacacaaagatatcagtacaaaatacgtgacgtagaaagtaataatttcttgggtagtttgcagttttaaaattatgttttaaaatggactatcatatgcttaccgtaacttgaaagtatttcgatttcttggctttatatatcttgtggaaaggac

SEQ ID NO: 4608 - DNA, 241 bp, synthetic construct
  misc_feature 1..241: note = promoter
  source 1..241: mol_type = other DNA
gagggcctatttcccatgattccttcatatttgcatatacgatacaaggctgttagagagataattggaattaatttgactgtaaacacaaagatatgagtacaaaatacgtgacgtagaaagtaataatttcttgggtagtttgcagttttaaaattatgttttaaaatggactatcatatgcttaccgtaacttgaaagtatttcgatttcttggctttatatatcttgtggaaaggac

SEQ ID NO: 4609 - DNA, 241 bp, synthetic construct
  misc_feature 1..241: note = promoter
  source 1..241: mol_type = other DNA
gagggcctatttcccatgattccttcatatttgcatatacgatacaaggctgttagagagataattggaattaatttgactgtaaacacaaagatattcgtacaaaatacgtgacgtagaaagtaataatttcttgggtagtttgcagttttaaaattatgttttaaaatggactatcatatgcttaccgtaacttgaaagtatttcgatttcttggctttatatatcttgtggaaaggac

SEQ ID NO: 4610 - DNA, 241 bp, synthetic construct
  misc_feature 1..241: note = promoter
  source 1..241: mol_type = other DNA
gagggcctatttcccatgattccttcatatttgcatatacgatacaaggctgttagagagataattggaattaatttgactgtaaacacaaagatattggtacaaaatacgtgacgtagaaagtaataatttcttgggtagtttgcagttttaaaattatgttttaaaatggactatcatatgcttaccgtaacttgaaagtatttcgatttcttggctttatatatcttgtggaaaggac

SEQ ID NO: 4611 - DNA, 241 bp, synthetic construct
  misc_feature 1..241: note = promoter
  source 1..241: mol_type = other DNA
gagggcctatttcccatgattccttcatatttgcatatacgatacaaggctgttagagagataattggaattaatttgactgtaaacacaaagatatttgtacaaaatacgtgacgtagaaagtaataatttcttgggtagtttgcagttttaaaattatgttttaaaatggactatcatatgcttaccgtaacttgaaagtatttcgatttcttggctttatatatcttgtggaaaggac

SEQ ID NO: 4612 - DNA, 241 bp, synthetic construct
  misc_feature 1..241: note = promoter
  source 1..241: mol_type = other DNA
gagggcctatttcccatgattccttcatatttgcatatacgatacaaggctgttagagagataattggaattaatttgactgtaaacacaaagatattaatacaaaatacgtgacgtagaaagtaataatttcttgggtagtttgcagttttaaaattatgttttaaaatggactatcatatgcttaccgtaacttgaaagtatttcgatttcttggctttatatatcttgtggaaaggac

SEQ ID NO: 4613 - DNA, 241 bp, synthetic construct
  misc_feature 1..241: note = promoter
  source 1..241: mol_type = other DNA
gagggcctatttcccatgattccttcatatttgcatatacgatacaaggctgttagagagataattggaattaatttgactgtaaacacaaagatattactacaaaatacgtgacgtagaaagtaataatttcttgggtagtttgcagttttaaaattatgttttaaaatggactatcatatgcttaccgtaacttgaaagtatttcgatttcttggctttatatatcttgtggaaaggac

SEQ ID NO: 4614 - DNA, 241 bp, synthetic construct
  misc_feature 1..241: note = promoter
  source 1..241: mol_type = other DNA
gagggcctatttcccatgattccttcatatttgcatatacgatacaaggctgttagagagataattggaattaatttgactgtaaacacaaagatattattacaaaatacgtgacgtagaaagtaataatttcttgggtagtttgcagttttaaaattatgttttaaaatggactatcatatgcttaccgtaacttgaaagtatttcgatttcttggctttatatatcttgtggaaaggac

SEQ ID NO: 4615 - DNA, 241 bp, synthetic construct
  misc_feature 1..241: note = promoter
  source 1..241: mol_type = other DNA
gagggcctatttcccatgattccttcatatttgcatatacgatacaaggctgttagagagataattggaattaatttgactgtaaacacaaagatattagaacaaaatacgtgacgtagaaagtaataatttcttgggtagtttgcagttttaaaattatgttttaaaatggactatcatatgcttaccgtaacttgaaagtatttcgatttcttggctttatatatcttgtggaaaggac

SEQ ID NO: 4616 - DNA, 241 bp, synthetic construct
  misc_feature 1..241: note = promoter
  source 1..241: mol_type = other DNA
gagggcctatttcccatgattccttcatatttgcatatacgatacaaggctgttagagagataattggaattaatttgactgtaaacacaaagatattagcacaaaatacgtgacgtagaaagtaataatttcttgggtagtttgcagttttaaaattatgttttaaaatggactatcatatgcttaccgtaacttgaaagtatttcgatttcttggctttatatatcttgtggaaaggac

SEQ ID NO: 4617 - DNA, 241 bp, synthetic construct
  misc_feature 1..241: note = promoter
  source 1..241: mol_type = other DNA
gagggcctatttcccatgattccttcatatttgcatatacgatacaaggctgttagagagataattggaattaatttgactgtaaacacaaagatattaggacaaaatacgtgacgtagaaagtaataatttcttgggtagtttgcagttttaaaattatgttttaaaatggactatcatatgcttaccgtaacttgaaagtatttcgatttcttggctttatatatcttgtggaaaggac

SEQ ID NO: 4618 - DNA, 241 bp, synthetic construct
  misc_feature 1..241: note = promoter
  source 1..241: mol_type = other DNA
gagggcctatttcccatgattccttcatatttgcatatacgatacaaggctgttagagagataattggaattaatttgactgtaaacacaaagatattagtccaaaatacgtgacgtagaaagtaataatttcttgggtagtttgcagttttaaaattatgttttaaaatggactatcatatgcttaccgtaacttgaaagtatttcgatttcttggctttatatatcttgtggaaaggac

SEQ ID NO: 4619 - DNA, 241 bp, synthetic construct
  misc_feature 1..241: note = promoter
  source 1..241: mol_type = other DNA
gagggcctatttcccatgattccttcatatttgcatatacgatacaaggctgttagagagataattggaattaatttgactgtaaacacaaagatattagtgcaaaatacgtgacgtagaaagtaataatttcttgggtagtttgcagttttaaaattatgttttaaaatggactatcatatgcttaccgtaacttgaaagtatttcgatttcttggctttatatatcttgtggaaaggac

SEQ ID NO: 4620 - DNA, 241 bp, synthetic construct
  misc_feature 1..241: note = promoter
  source 1..241: mol_type = other DNA
gagggcctatttcccatgattccttcatatttgcatatacgatacaaggctgttagagagataattggaattaatttgactgtaaacacaaagatattagttcaaaatacgtgacgtagaaagtaataatttcttgggtagtttgcagttttaaaattatgttttaaaatggactatcatatgcttaccgtaacttgaaagtatttcgatttcttggctttatatatcttgtggaaaggac

SEQ ID NO: 4621 - DNA, 241 bp, synthetic construct
  misc_feature 1..241: note = promoter
  source 1..241: mol_type = other DNA
gagggcctatttcccatgattccttcatatttgcatatacgatacaaggctgttagagagataattggaattaatttgactgtaaacacaaagatattagtaaaaaatacgtgacgtagaaagtaataatttcttgggtagtttgcagttttaaaattatgttttaaaatggactatcatatgcttaccgtaacttgaaagtatttcgatttcttggctttatatatcttgtggaaaggac

SEQ ID NO: 4622 - DNA, 241 bp, synthetic construct
  misc_feature 1..241: note = promoter
  source 1..241: mol_type = other DNA
gagggcctatttcccatgattccttcatatttgcatatacgatacaaggctgttagagagataattggaattaatttgactgtaaacacaaagatattagtagaaaatacgtgacgtagaaagtaataatttcttgggtagtttgcagttttaaaattatgttttaaaatggactatcatatgcttaccgtaacttgaaagtatttcgatttcttggctttatatatcttgtggaaaggac

SEQ ID NO: 4623 - DNA, 241 bp, synthetic construct
  misc_feature 1..241: note = promoter
  source 1..241: mol_type = other DNA
gagggcctatttcccatgattccttcatatttgcatatacgatacaaggctgttagagagataattggaattaatttgactgtaaacacaaagatattagtataaaatacgtgacgtagaaagtaataatttcttgggtagtttgcagttttaaaattatgttttaaaatggactatcatatgcttaccgtaacttgaaagtatttcgatttcttggctttatatatcttgtggaaaggac

SEQ ID NO: 4624 - DNA, 241 bp, synthetic construct
  misc_feature 1..241: note = promoter
  source 1..241: mol_type = other DNA
gagggcctatttcccatgattccttcatatttgcatatacgatacaaggctgttagagagataattggaattaatttgactgtaaacacaaagatattagtaccaaatacgtgacgtagaaagtaataatttcttgggtagtttgcagttttaaaattatgttttaaaatggactatcatatgcttaccgtaacttgaaagtatttcgatttcttggctttatatatcttgtggaaaggac

SEQ ID NO: 4625 - DNA, 241 bp, synthetic construct
  misc_feature 1..241: note = promoter
  source 1..241: mol_type = other DNA
gagggcctatttcccatgattccttcatatttgcatatacgatacaaggctgttagagagataattggaattaatttgactgtaaacacaaagatattagtacgaaatacgtgacgtagaaagtaataatttcttgggtagtttgcagttttaaaattatgttttaaaatggactatcatatgcttaccgtaacttgaaagtatttcgatttcttggctttatatatcttgtggaaaggac

SEQ ID NO: 4626 - DNA, 241 bp, synthetic construct
  misc_feature 1..241: note = promoter
  source 1..241: mol_type = other DNA
gagggcctatttcccatgattccttcatatttgcatatacgatacaaggctgttagagagataattggaattaatttgactgtaaacacaaagatattagtactaaatacgtgacgtagaaagtaataatttcttgggtagtttgcagttttaaaattatgttttaaaatggactatcatatgcttaccgtaacttgaaagtatttcgatttcttggctttatatatcttgtggaaaggac

SEQ ID NO: 4627 - DNA, 241 bp, synthetic construct
  misc_feature 1..241: note = promoter
  source 1..241: mol_type = other DNA
gagggcctatttcccatgattccttcatatttgcatatacgatacaaggctgttagagagataattggaattaatttgactgtaaacacaaagatattagtacacaatacgtgacgtagaaagtaataatttcttgggtagtttgcagttttaaaattatgttttaaaatggactatcatatgcttaccgtaacttgaaagtatttcgatttcttggctttatatatcttgtggaaaggac

SEQ ID NO: 4628 - DNA, 241 bp, synthetic construct
  misc_feature 1..241: note = promoter
  source 1..241: mol_type = other DNA
gagggcctatttcccatgattccttcatatttgcatatacgatacaaggctgttagagagataattggaattaatttgactgtaaacacaaagatattagtacagaatacgtgacgtagaaagtaataatttcttgggtagtttgcagttttaaaattatgttttaaaatggactatcatatgcttaccgtaacttgaaagtatttcgatttcttggctttatatatcttgtggaaaggac

SEQ ID NO: 4629 - DNA, 241 bp, synthetic construct
  misc_feature 1..241: note = promoter
  source 1..241: mol_type = other DNA
gagggcctatttcccatgattccttcatatttgcatatacgatacaaggctgttagagagataattggaattaatttgactgtaaacacaaagatattagtacataatacgtgacgtagaaagtaataatttcttgggtagtttgcagttttaaaattatgttttaaaatggactatcatatgcttaccgtaacttgaaagtatttcgatttcttggctttatatatcttgtggaaaggac

SEQ ID NO: 4630 - DNA, 241 bp, synthetic construct
  misc_feature 1..241: note = promoter
  source 1..241: mol_type = other DNA
gagggcctatttcccatgattccttcatatttgcatatacgatacaaggctgttagagagataattggaattaatttgactgtaaacacaaagatattagtacaacatacgtgacgtagaaagtaataatttcttgggtagtttgcagttttaaaattatgttttaaaatggactatcatatgcttaccgtaacttgaaagtatttcgatttcttggctttatatatcttgtggaaaggac

SEQ ID NO: 4631 - DNA, 241 bp, synthetic construct
  misc_feature 1..241: note = promoter
  source 1..241: mol_type = other DNA
gagggcctatttcccatgattccttcatatttgcatatacgatacaaggctgttagagagataattggaattaatttgactgtaaacacaaagatattagtacaagatacgtgacgtagaaagtaataatttcttgggtagtttgcagttttaaaattatgttttaaaatggactatcatatgcttaccgtaacttgaaagtatttcgatttcttggctttatatatcttgtggaaaggac

SEQ ID NO: 4632 - DNA, 241 bp, synthetic construct
  misc_feature 1..241: note = promoter
  source 1..241: mol_type = other DNA
gagggcctatttcccatgattccttcatatttgcatatacgatacaaggctgttagagagataattggaattaatttgactgtaaacacaaagatattagtacaatatacgtgacgtagaaagtaataatttcttgggtagtttgcagttttaaaattatgttttaaaatggactatcatatgcttaccgtaacttgaaagtatttcgatttcttggctttatatatcttgtggaaaggac

SEQ ID NO: 4633 - DNA, 241 bp, synthetic construct
  misc_feature 1..241: note = promoter
  source 1..241: mol_type = other DNA
gagggcctatttcccatgattccttcatatttgcatatacgatacaaggctgttagagagataattggaattaatttgactgtaaacacaaagatattagtacaaactacgtgacgtagaaagtaataatttcttgggtagtttgcagttttaaaattatgttttaaaatggactatcatatgcttaccgtaacttgaaagtatttcgatttcttggctttatatatcttgtggaaaggac

SEQ ID NO: 4634 - DNA, 241 bp, synthetic construct
  misc_feature 1..241: note = promoter
  source 1..241: mol_type = other DNA
gagggcctatttcccatgattccttcatatttgcatatacgatacaaggctgttagagagataattggaattaatttgactgtaaacacaaagatattagtacaaagtacgtgacgtagaaagtaataatttcttgggtagtttgcagttttaaaattatgttttaaaatggactatcatatgcttaccgtaacttgaaagtatttcgatttcttggctttatatatcttgtggaaaggac

SEQ ID NO: 4635 - DNA, 241 bp, synthetic construct
  misc_feature 1..241: note = promoter
  source 1..241: mol_type = other DNA
gagggcctatttcccatgattccttcatatttgcatatacgatacaaggctgttagagagataattggaattaatttgactgtaaacacaaagatattagtacaaattacgtgacgtagaaagtaataatttcttgggtagtttgcagttttaaaattatgttttaaaatggactatcatatgcttaccgtaacttgaaagtatttcgatttcttggctttatatatcttgtggaaaggac

SEQ ID NO: 4636 - DNA, 241 bp, synthetic construct
  misc_feature 1..241: note = promoter
  source 1..241: mol_type = other DNA
gagggcctatttcccatgattccttcatatttgcatatacgatacaaggctgttagagagataattggaattaatttgactgtaaacacaaagatattagtacaaaaaacgtgacgtagaaagtaataatttcttgggtagtttgcagttttaaaattatgttttaaaatggactatcatatgcttaccgtaacttgaaagtatttcgatttcttggctttatatatcttgtggaaaggac

SEQ ID NO: 4637 - DNA, 241 bp, synthetic construct
  misc_feature 1..241: note = promoter
  source 1..241: mol_type = other DNA
gagggcctatttcccatgattccttcatatttgcatatacgatacaaggctgttagagagataattggaattaatttgactgtaaacacaaagatattagtacaaaacacgtgacgtagaaagtaataatttcttgggtagtttgcagttttaaaattatgttttaaaatggactatcatatgcttaccgtaacttgaaagtatttcgatttcttggctttatatatcttgtggaaaggac

SEQ ID NO: 4638 - DNA, 241 bp, synthetic construct
  misc_feature 1..241: note = promoter
  source 1..241: mol_type = other DNA
gagggcctatttcccatgattccttcatatttgcatatacgatacaaggctgttagagagataattggaattaatttgactgtaaacacaaagatattagtacaaaagacgtgacgtagaaagtaataatttcttgggtagtttgcagttttaaaattatgttttaaaatggactatcatatgcttaccgtaacttgaaagtatttcgatttcttggctttatatatcttgtggaaaggac

SEQ ID NO: 4639 - DNA, 241 bp, synthetic construct
  misc_feature 1..241: note = promoter
  source 1..241: mol_type = other DNA
gagggcctatttcccatgattccttcatatttgcatatacgatacaaggctgttagagagataattggaattaatttgactgtaaacacaaagatattagtacaaaatccgtgacgtagaaagtaataatttcttgggtagtttgcagttttaaaattatgttttaaaatggactatcatatgcttaccgtaacttgaaagtatttcgatttcttggctttatatatcttgtggaaaggac

SEQ ID NO: 4640 - DNA, 241 bp, synthetic construct
  misc_feature 1..241: note = promoter
  source 1..241: mol_type = other DNA
gagggcctatttcccatgattccttcatatttgcatatacgatacaaggctgttagagagataattggaattaatttgactgtaaacacaaagatattagtacaaaatgcgtgacgtagaaagtaataatttcttgggtagtttgcagttttaaaattatgttttaaaatggactatcatatgcttaccgtaacttgaaagtatttcgatttcttggctttatatatcttgtggaaaggac

SEQ ID NO: 4641 - DNA, 241 bp, synthetic construct
  misc_feature 1..241: note = promoter
  source 1..241: mol_type = other DNA
gagggcctatttcccatgattccttcatatttgcatatacgatacaaggctgttagagagataattggaattaatttgactgtaaacacaaagatattagtacaaaattcgtgacgtagaaagtaataatttcttgggtagtttgcagttttaaaattatgttttaaaatggactatcatatgcttaccgtaacttgaaagtatttcgatttcttggctttatatatcttgtggaaaggac

SEQ ID NO: 4642 - DNA, 241 bp, synthetic construct
  misc_feature 1..241: note = promoter
  source 1..241: mol_type = other DNA
gagggcctatttcccatgattccttcatatttgcatatacgatacaaggctgttagagagataattggaattaatttgactgtaaacacaaagatattagtacaaaataagtgacgtagaaagtaataatttcttgggtagtttgcagttttaaaattatgttttaaaatggactatcatatgcttaccgtaacttgaaagtatttcgatttcttggctttatatatcttgtggaaaggac

SEQ ID NO: 4643 - DNA, 241 bp, synthetic construct
  misc_feature 1..241: note = promoter
  source 1..241: mol_type = other DNA
gagggcctatttcccatgattccttcatatttgcatatacgatacaaggctgttagagagataattggaattaatttgactgtaaacacaaagatattagtacaaaataggtgacgtagaaagtaataatttcttgggtagtttgcagttttaaaattatgttttaaaatggactatcatatgcttaccgtaacttgaaagtatttcgatttcttggctttatatatcttgtggaaaggac

SEQ ID NO: 4644 - DNA, 241 bp, synthetic construct
  misc_feature 1..241: note = promoter
  source 1..241: mol_type = other DNA
gagggcctatttcccatgattccttcatatttgcatatacgatacaaggctgttagagagataattggaattaatttgactgtaaacacaaagatattagtacaaaatatgtgacgtagaaagtaataatttcttgggtagtttgcagttttaaaattatgttttaaaatggactatcatatgcttaccgtaacttgaaagtatttcgatttcttggctttatatatcttgtggaaaggac

SEQ ID NO: 4645 - DNA, 241 bp, synthetic construct
  misc_feature 1..241: note = promoter
  source 1..241: mol_type = other DNA
gagggcctatttcccatgattccttcatatttgcatatacgatacaaggctgttagagagataattggaattaatttgactgtaaacacaaagatattagtacaaaatacatgacgtagaaagtaataatttcttgggtagtttgcagttttaaaattatgttttaaaatggactatcatatgcttaccgtaacttgaaagtatttcgatttcttggctttatatatcttgtggaaaggac

SEQ ID NO: 4646 - DNA, 241 bp, synthetic construct
  misc_feature 1..241: note = promoter
  source 1..241: mol_type = other DNA
gagggcctatttcccatgattccttcatatttgcatatacgatacaaggctgttagagagataattggaattaatttgactgtaaacacaaagatattagtacaaaatacctgacgtagaaagtaataatttcttgggtagtttgcagttttaaaattatgttttaaaatggactatcatatgcttaccgtaacttgaaagtatttcgatttcttggctttatatatcttgtggaaaggac

SEQ ID NO: 4647 - DNA, 241 bp, synthetic construct
  misc_feature 1..241: note = promoter
  source 1..241: mol_type = other DNA
gagggcctatttcccatgattccttcatatttgcatatacgatacaaggctgttagagagataattggaattaatttgactgtaaacacaaagatattagtacaaaatacttgacgtagaaagtaataatttcttgggtagtttgcagttttaaaattatgttttaaaatggactatcatatgcttaccgtaacttgaaagtatttcgatttcttggctttatatatcttgtggaaaggac

SEQ ID NO: 4648 - DNA, 241 bp, synthetic construct
  misc_feature 1..241: note = promoter
  source 1..241: mol_type = other DNA
gagggcctatttcccatgattccttcatatttgcatatacgatacaaggctgttagagagataattggaattaatttgactgtaaacacaaagatattagtacaaaatacgagacgtagaaagtaataatttcttgggtagtttgcagttttaaaattatgttttaaaatggactatcatatgcttaccgtaacttgaaagtatttcgatttcttggctttatatatcttgtggaaaggac

SEQ ID NO: 4649 - DNA, 241 bp, synthetic construct
  misc_feature 1..241: note = promoter
  source 1..241: mol_type = other DNA
gagggcctatttcccatgattccttcatatttgcatatacgatacaaggctgttagagagataattggaattaatttgactgtaaacacaaagatattagtacaaaatacgcgacgtagaaagtaataatttcttgggtagtttgcagttttaaaattatgttttaaaatggactatcatatgcttaccgtaacttgaaagtatttcgatttcttggctttatatatcttgtggaaaggac

SEQ ID NO: 4650 - DNA, 241 bp, synthetic construct
  misc_feature 1..241: note = promoter
  source 1..241: mol_type = other DNA
gagggcctatttcccatgattccttcatatttgcatatacgatacaaggctgttagagagataattggaattaatttgactgtaaacacaaagatattagtacaaaatacgggacgtagaaagtaataatttcttgggtagtttgcagttttaaaattatgttttaaaatggactatcatatgcttaccgtaacttgaaagtatttcgatttcttggctttatatatcttgtggaaaggac

SEQ ID NO: 4651 - DNA, 241 bp, synthetic construct
  misc_feature 1..241: note = promoter
  source 1..241: mol_type = other DNA
gagggcctatttcccatgattccttcatatttgcatatacgatacaaggctgttagagagataattggaattaatttgactgtaaacacaaagatattagtacaaaatacgtaacgtagaaagtaataatttcttgggtagtttgcagttttaaaattatgttttaaaatggactatcatatgcttaccgtaacttgaaagtatttcgatttcttggctttatatatcttgtggaaaggac

SEQ ID NO: 4652 - DNA, 241 bp, synthetic construct
  misc_feature 1..241: note = promoter
  source 1..241: mol_type = other DNA
gagggcctatttcccatgattccttcatatttgcatatacgatacaaggctgttagagagataattggaattaatttgactgtaaacacaaagatattagtacaaaatacgtcacgtagaaagtaataatttcttgggtagtttgcagttttaaaattatgttttaaaatggactatcatatgcttaccgtaacttgaaagtatttcgatttcttggctttatatatcttgtggaaaggac

SEQ ID NO: 4653 - DNA, 241 bp, synthetic construct
  misc_feature 1..241: note = promoter
  source 1..241: mol_type = other DNA
gagggcctatttcccatgattccttcatatttgcatatacgatacaaggctgttagagagataattggaattaatttgactgtaaacacaaagatattagtacaaaatacgttacgtagaaagtaataatttcttgggtagtttgcagttttaaaattatgttttaaaatggactatcatatgcttaccgtaacttgaaagtatttcgatttcttggctttatatatcttgtggaaaggac

SEQ ID NO: 4654 - DNA, 241 bp, synthetic construct
  misc_feature 1..241: note = promoter
  source 1..241: mol_type = other DNA
gagggcctatttcccatgattccttcatatttgcatatacgatacaaggctgttagagagataattggaattaatttgactgtaaacacaaagatattagtacaaaatacgtgccgtagaaagtaataatttcttgggtagtttgcagttttaaaattatgttttaaaatggactatcatatgcttaccgtaacttgaaagtatttcgatttcttggctttatatatcttgtggaaaggac

SEQ ID NO: 4655 - DNA, 241 bp, synthetic construct
  misc_feature 1..241: note = promoter
  source 1..241: mol_type = other DNA
gagggcctatttcccatgattccttcatatttgcatatacgatacaaggctgttagagagataattggaattaatttgactgtaaacacaaagatattagtacaaaatacgtggcgtagaaagtaataatttcttgggtagtttgcagttttaaaattatgttttaaaatggactatcatatgcttaccgtaacttgaaagtatttcgatttcttggctttatatatcttgtggaaaggac

SEQ ID NO: 4656 - DNA, 241 bp, synthetic construct
  misc_feature 1..241: note = promoter
  source 1..241: mol_type = other DNA
gagggcctatttcccatgattccttcatatttgcatatacgatacaaggctgttagagagataattggaattaatttgactgtaaacacaaagatattagtacaaaatacgtgtcgtagaaagtaataatttcttgggtagtttgcagttttaaaattatgttttaaaatggactatcatatgcttaccgtaacttgaaagtatttcgatttcttggctttatatatcttgtggaaaggac

SEQ ID NO: 4657 - DNA, 241 bp, synthetic construct
  misc_feature 1..241: note = promoter
  source 1..241: mol_type = other DNA
gagggcctatttcccatgattccttcatatttgcatatacgatacaaggctgttagagagataattggaattaatttgactgtaaacacaaagatattagtacaaaatacgtgaagtagaaagtaataatttcttgggtagtttgcagttttaaaattatgttttaaaatggactatcatatgcttaccgtaacttgaaagtatttcgatttcttggctttatatatcttgtggaaaggac

SEQ ID NO: 4658 - DNA, 241 bp, synthetic construct
  misc_feature 1..241: note = promoter
  source 1..241: mol_type = other DNA
gagggcctatttcccatgattccttcatatttgcatatacgatacaaggctgttagagagataattggaattaatttgactgtaaacacaaagatattagtacaaaatacgtgaggtagaaagtaataatttcttgggtagtttgcagttttaaaattatgttttaaaatggactatcatatgcttaccgtaacttgaaagtatttcgatttcttggctttatatatcttgtggaaaggac

SEQ ID NO: 4659 - DNA, 241 bp, synthetic construct
  misc_feature 1..241: note = promoter
  source 1..241: mol_type = other DNA
gagggcctatttcccatgattccttcatatttgcatatacgatacaaggctgttagagagataattggaattaatttgactgtaaacacaaagatattagtacaaaatacgtgatgtagaaagtaataatttcttgggtagtttgcagttttaaaattatgttttaaaatggactatcatatgcttaccgtaacttgaaagtatttcgatttcttggctttatatatcttgtggaaaggac

SEQ ID NO: 4660 - DNA, 241 bp, synthetic construct
  misc_feature 1..241: note = promoter
  source 1..241: mol_type = other DNA
gagggcctatttcccatgattccttcatatttgcatatacgatacaaggctgttagagagataattggaattaatttgactgtaaacacaaagatattagtacaaaatacgtgacatagaaagtaataatttcttgggtagtttgcagttttaaaattatgttttaaaatggactatcatatgcttaccgtaacttgaaagtatttcgatttcttggctttatatatcttgtggaaaggac

SEQ ID NO: 4661 - DNA, 241 bp, synthetic construct
  misc_feature 1..241: note = promoter
  source 1..241: mol_type = other DNA
gagggcctatttcccatgattccttcatatttgcatatacgatacaaggctgttagagagataattggaattaatttgactgtaaacacaaagatattagtacaaaatacgtgacctagaaagtaataatttcttgggtagtttgcagttttaaaattatgttttaaaatggactatcatatgcttaccgtaacttgaaagtatttcgatttcttggctttatatatcttgtggaaaggac

SEQ ID NO: 4662 - DNA, 241 bp, synthetic construct
  misc_feature 1..241: note = promoter
  source 1..241: mol_type = other DNA
gagggcctatttcccatgattccttcatatttgcatatacgatacaaggctgttagagagataattggaattaatttgactgtaaacacaaagatattagtacaaaatacgtgacttagaaagtaataatttcttgggtagtttgcagttttaaaattatgttttaaaatggactatcatatgcttaccgtaacttgaaagtatttcgatttcttggctttatatatcttgtggaaaggac

SEQ ID NO: 4663 - DNA, 241 bp, synthetic construct
  misc_feature 1..241: note = promoter
  source 1..241: mol_type = other DNA
gagggcctatttcccatgattccttcatatttgcatatacgatacaaggctgttagagagataattggaattaatttgactgtaaacacaaagatattagtacaaaatacgtgacgaagaaagtaataatttcttgggtagtttgcagttttaaaattatgttttaaaatggactatcatatgcttaccgtaacttgaaagtatttcgatttcttggctttatatatcttgtggaaaggac

SEQ ID NO: 4664 - DNA, 241 bp, synthetic construct
  misc_feature 1..241: note = promoter
  source 1..241: mol_type = other DNA
gagggcctatttcccatgattccttcatatttgcatatacgatacaaggctgttagagagataattggaattaatttgactgtaaacacaaagatattagtacaaaatacgtgacgcagaaagtaataatttcttgggtagtttgcagttttaaaattatgttttaaaatggactatcatatgcttaccgtaacttgaaagtatttcgatttcttggctttatatatcttgtggaaaggac

SEQ ID NO: 4665 - DNA, 241 bp, synthetic construct
  misc_feature 1..241: note = promoter
  source 1..241: mol_type = other DNA
gagggcctatttcccatgattccttcatatttgcatatacgatacaaggctgttagagagataattggaattaatttgactgtaaacacaaagatattagtacaaaatacgtgacggagaaagtaataatttcttgggtagtttgcagttttaaaattatgttttaaaatggactatcatatgcttaccgtaacttgaaagtatttcgatttcttggctttatatatcttgtggaaaggac

SEQ ID NO: 4666 - DNA, 241 bp, synthetic construct
  misc_feature 1..241: note = promoter
  source 1..241: mol_type = other DNA
gagggcctatttcccatgattccttcatatttgcatatacgatacaaggctgttagagagataattggaattaatttgactgtaaacacaaagatattagtacaaaatacgtgacgtcgaaagtaataatttcttgggtagtttgcagttttaaaattatgttttaaaatggactatcatatgcttaccgtaacttgaaagtatttcgatttcttggctttatatatcttgtggaaaggac

SEQ ID NO: 4667 - DNA, 241 bp, synthetic construct
  misc_feature 1..241: note = promoter
  source 1..241: mol_type = other DNA
gagggcctatttcccatgattccttcatatttgcatatacgatacaaggctgttagagagataattggaattaatttgactgtaaacacaaagatattagtacaaaatacgtgacgtggaaagtaataatttcttgggtagtttgcagttttaaaattatgttttaaaatggactatcatatgcttaccgtaacttgaaagtatttcgatttcttggctttatatatcttgtggaaaggac

SEQ ID NO: 4668 - DNA, 241 bp, synthetic construct
  misc_feature 1..241: note = promoter
  source 1..241: mol_type = other DNA
gagggcctatttcccatgattccttcatatttgcatatacgatacaaggctgttagagagataattggaattaatttgactgtaaacacaaagatattagtacaaaatacgtgacgttgaaagtaataatttcttgggtagtttgcagttttaaaattatgttttaaaatggactatcatatgcttaccgtaacttgaaagtatttcgatttcttggctttatatatcttgtggaaaggac

SEQ ID NO: 4669 - DNA, 241 bp, synthetic construct
  misc_feature 1..241: note = promoter
  source 1..241: mol_type = other DNA
gagggcctatttcccatgattccttcatatttgcatatacgatacaaggctgttagagagataattggaattaatttgactgtaaacacaaagatattagtacaaaatacgtgacgtaaaaagtaataatttcttgggtagtttgcagttttaaaattatgttttaaaatggactatcatatgcttaccgtaacttgaaagtatttcgatttcttggctttatatatcttgtggaaaggac

SEQ ID NO: 4670 - DNA, 241 bp, synthetic construct
  misc_feature 1..241: note = promoter
  source 1..241: mol_type = other DNA
gagggcctatttcccatgattccttcatatttgcatatacgatacaaggctgttagagagataattggaattaatttgactgtaaacacaaagatattagtacaaaatacgtgacgtacaaagtaataatttcttgggtagtttgcagttttaaaattatgttttaaaatggactatcatatgcttaccgtaacttgaaagtatttcgatttcttggctttatatatcttgtggaaaggac

SEQ ID NO: 4671 - DNA, 241 bp, synthetic construct
  misc_feature 1..241: note = promoter
  source 1..241: mol_type = other DNA
gagggcctatttcccatgattccttcatatttgcatatacgatacaaggctgttagagagataattggaattaatttgactgtaaacacaaagatattagtacaaaatacgtgacgtataaagtaataatttcttgggtagtttgcagttttaaaattatgttttaaaatggactatcatatgcttaccgtaacttgaaagtatttcgatttcttggctttatatatcttgtggaaaggac

SEQ ID NO: 4672 - DNA, 241 bp, synthetic construct
  misc_feature 1..241: note = promoter
  source 1..241: mol_type = other DNA
gagggcctatttcccatgattccttcatatttgcatatacgatacaaggctgttagagagataattggaattaatttgactgtaaacacaaagatattagtacaaaatacgtgacgtagcaagtaataatttcttgggtagtttgcagttttaaaattatgttttaaaatggactatcatatgcttaccgtaacttgaaagtatttcgatttcttggctttatatatcttgtggaaaggac

SEQ ID NO: 4673 - DNA, 241 bp, synthetic construct
  misc_feature 1..241: note = promoter
  source 1..241: mol_type = other DNA
gagggcctatttcccatgattccttcatatttgcatatacgatacaaggctgttagagagataattggaattaatttgactgtaaacacaaagatattagtacaaaatacgtgacgtaggaagtaataatttcttgggtagtttgcagttttaaaattatgttttaaaatggactatcatatgcttaccgtaacttgaaagtatttcgatttcttggctttatatatcttgtggaaaggac

SEQ ID NO: 4674 - DNA, 241 bp, synthetic construct
  misc_feature 1..241: note = promoter
  source 1..241: mol_type = other DNA
gagggcctatttcccatgattccttcatatttgcatatacgatacaaggctgttagagagataattggaattaatttgactgtaaacacaaagatattagtacaaaatacgtgacgtagtaagtaataatttcttgggtagtttgcagttttaaaattatgttttaaaatggactatcatatgcttaccgtaacttgaaagtatttcgatttcttggctttatatatcttgtggaaaggac

SEQ ID NO: 4675 - DNA, 241 bp, synthetic construct
  misc_feature 1..241: note = promoter
  source 1..241: mol_type = other DNA
gagggcctatttcccatgattccttcatatttgcatatacgatacaaggctgttagagagataattggaattaatttgactgtaaacacaaagatattagtacaaaatacgtgacgtagacagtaataatttcttgggtagtttgcagttttaaaattatgttttaaaatggactatcatatgcttaccgtaacttgaaagtatttcgatttcttggctttatatatcttgtggaaaggac

SEQ ID NO: 4676 - DNA, 241 bp, synthetic construct
  misc_feature 1..241: note = promoter
  source 1..241: mol_type = other DNA
gagggcctatttcccatgattccttcatatttgcatatacgatacaaggctgttagagagataattggaattaatttgactgtaaacacaaagatattagtacaaaatacgtgacgtagagagtaataatttcttgggtagtttgcagttttaaaattatgttttaaaatggactatcatatgcttaccgtaacttgaaagtatttcgatttcttggctttatatatcttgtggaaaggac

SEQ ID NO: 4677 - DNA, 241 bp, synthetic construct
  misc_feature 1..241: note = promoter
  source 1..241: mol_type = other DNA
gagggcctatttcccatgattccttcatatttgcatatacgatacaaggctgttagagagataattggaattaatttgactgtaaacacaaagatattagtacaaaatacgtgacgtagatagtaataatttcttgggtagtttgcagttttaaaattatgttttaaaatggactatcatatgcttaccgtaacttgaaagtatttcgatttcttggctttatatatcttgtggaaaggac

SEQ ID NO: 4678 - DNA, 241 bp, synthetic construct
  misc_feature 1..241: note = promoter
  source 1..241: mol_type = other DNA
gagggcctatttcccatgattccttcatatttgcatatacgatacaaggctgttagagagataattggaattaatttgactgtaaacacaaagatattagtacaaaatacgtgacgtagaacgtaataatttcttgggtagtttgcagttttaaaattatgttttaaaatggactatcatatgcttaccgtaacttgaaagtatttcgatttcttggctttatatatcttgtggaaaggac

SEQ ID NO: 4679 - DNA, 241 bp, synthetic construct
  misc_feature 1..241: note = promoter
  source 1..241: mol_type = other DNA
gagggcctatttcccatgattccttcatatttgcatatacgatacaaggctgttagagagataattggaattaatttgactgtaaacacaaagatattagtacaaaatacgtgacgtagaaggtaataatttcttgggtagtttgcagttttaaaattatgttttaaaatggactatcatatgcttaccgtaacttgaaagtatttcgatttcttggctttatatatcttgtggaaaggac

SEQ ID NO: 4680 - DNA, 241 bp, synthetic construct
  misc_feature 1..241: note = promoter
  source 1..241: mol_type = other DNA
gagggcctatttcccatgattccttcatatttgcatatacgatacaaggctgttagagagataattggaattaatttgactgtaaacacaaagatattagtacaaaatacgtgacgtagaatgtaataatttcttgggtagtttgcagttttaaaattatgttttaaaatggactatcatatgcttaccgtaacttgaaagtatttcgatttcttggctttatatatcttgtggaaaggac

SEQ ID NO: 4681 - DNA, 241 bp, synthetic construct
  misc_feature 1..241: note = promoter
  source 1..241: mol_type = other DNA
gagggcctatttcccatgattccttcatatttgcatatacgatacaaggctgttagagagataattggaattaatttgactgtaaacacaaagatattagtacaaaatacgtgacgtagaaaataataatttcttgggtagtttgcagttttaaaattatgttttaaaatggactatcatatgcttaccgtaacttgaaagtatttcgatttcttggctttatatatcttgtggaaaggac

SEQ ID NO: 4682 - DNA, 241 bp, synthetic construct
  misc_feature 1..241: note = promoter
  source 1..241: mol_type = other DNA
gagggcctatttcccatgattccttcatatttgcatatacgatacaaggctgttagagagataattggaattaatttgactgtaaacacaaagatattagtacaaaatacgtgacgtagaaactaataatttcttgggtagtttgcagttttaaaattatgttttaaaatggactatcatatgcttaccgtaacttgaaagtatttcgatttcttggctttatatatcttgtggaaaggac

SEQ ID NO: 4683 - DNA, 241 bp, synthetic construct
  misc_feature 1..241: note = promoter
  source 1..241: mol_type = other DNA
gagggcctatttcccatgattccttcatatttgcatatacgatacaaggctgttagagagataattggaattaatttgactgtaaacacaaagatattagtacaaaatacgtgacgtagaaattaataatttcttgggtagtttgcagttttaaaattatgttttaaaatggactatcatatgcttaccgtaacttgaaagtatttcgatttcttggctttatatatcttgtggaaaggac

SEQ ID NO: 4684 - DNA, 241 bp, synthetic construct
  misc_feature 1..241: note = promoter
  source 1..241: mol_type = other DNA
gagggcctatttcccatgattccttcatatttgcatatacgatacaaggctgttagagagataattggaattaatttgactgtaaacacaaagatattagtacaaaatacgtgacgtagaaagaaataatttcttgggtagtttgcagttttaaaattatgttttaaaatggactatcatatgcttaccgtaacttgaaagtatttcgatttcttggctttatatatcttgtggaaaggac

SEQ ID NO: 4685 - DNA, 241 bp, synthetic construct
  misc_feature 1..241: note = promoter
  source 1..241: mol_type = other DNA
gagggcctatttcccatgattccttcatatttgcatatacgatacaaggctgttagagagataattggaattaatttgactgtaaacacaaagatattagtacaaaatacgtgacgtagaaagcaataatttcttgggtagtttgcagttttaaaattatgttttaaaatggactatcatatgcttaccgtaacttgaaagtatttcgatttcttggctttatatatcttgtggaaaggac

SEQ ID NO: 4686 - DNA, 241 bp, synthetic construct
  misc_feature 1..241: note = promoter
  source 1..241: mol_type = other DNA
gagggcctatttcccatgattccttcatatttgcatatacgatacaaggctgttagagagataattggaattaatttgactgtaaacacaaagatattagtacaaaatacgtgacgtagaaaggaataatttcttgggtagtttgcagttttaaaattatgttttaaaatggactatcatatgcttaccgtaacttgaaagtatttcgatttcttggctttatatatcttgtggaaaggac

SEQ ID NO: 4687 - DNA, 241 bp, synthetic construct
  misc_feature 1..241: note = promoter
  source 1..241: mol_type = other DNA
gagggcctatttcccatgattccttcatatttgcatatacgatacaaggctgttagagagataattggaattaatttgactgtaaacacaaagatattagtacaaaatacgtgacgtagaaagtcataatttcttgggtagtttgcagttttaaaattatgttttaaaatggactatcatatgcttaccgtaacttgaaagtatttcgatttcttggctttatatatcttgtggaaaggac

SEQ ID NO: 4688 - DNA, 241 bp, synthetic construct
  misc_feature 1..241: note = promoter
  source 1..241: mol_type = other DNA
gagggcctatttcccatgattccttcatatttgcatatacgatacaaggctgttagagagataattggaattaatttgactgtaaacacaaagatattagtacaaaatacgtgacgtagaaagtgataatttcttgggtagtttgcagttttaaaattatgttttaaaatggactatcatatgcttaccgtaacttgaaagtatttcgatttcttggctttatatatcttgtggaaaggac

SEQ ID NO: 4689 - DNA, 241 bp, synthetic construct
  misc_feature 1..241: note = promoter
  source 1..241: mol_type = other DNA
gagggcctatttcccatgattccttcatatttgcatatacgatacaaggctgttagagagataattggaattaatttgactgtaaacacaaagatattagtacaaaatacgtgacgtagaaagttataatttcttgggtagtttgcagttttaaaattatgttttaaaatggactatcatatgcttaccgtaacttgaaagtatttcgatttcttggctttatatatcttgtggaaaggac

SEQ ID NO: 4690 - DNA, 241 bp, synthetic construct
  misc_feature 1..241: note = promoter
  source 1..241: mol_type = other DNA
gagggcctatttcccatgattccttcatatttgcatatacgatacaaggctgttagagagataattggaattaatttgactgtaaacacaaagatattagtacaaaatacgtgacgtagaaagtactaatttcttgggtagtttgcagttttaaaattatgttttaaaatggactatcatatgcttaccgtaacttgaaagtatttcgatttcttggctttatatatcttgtggaaaggac

SEQ ID NO: 4691 - DNA, 241 bp, synthetic construct
  misc_feature 1..241: note = promoter
  source 1..241: mol_type = other DNA
gagggcctatttcccatgattccttcatatttgcatatacgatacaaggctgttagagagataattggaattaatttgactgtaaacacaaagatattagtacaaaatacgtgacgtagaaagtagtaatttcttgggtagtttgcagttttaaaattatgttttaaaatggactatcatatgcttaccgtaacttgaaagtatttcgatttcttggctttatatatcttgtggaaaggac

SEQ ID NO: 4692 - DNA, 241 bp, synthetic construct
  misc_feature 1..241: note = promoter
  source 1..241: mol_type = other DNA
gagggcctatttcccatgattccttcatatttgcatatacgatacaaggctgttagagagataattggaattaatttgactgtaaacacaaagatattagtacaaaatacgtgacgtagaaagtattaatttcttgggtagtttgcagttttaaaattatgttttaaaatggactatcatatgcttaccgtaacttgaaagtatttcgatttcttggctttatatatcttgtggaaaggac

SEQ ID NO: 4693 - DNA, 241 bp, synthetic construct
  misc_feature 1..241: note = promoter
  source 1..241: mol_type = other DNA
gagggcctatttcccatgattccttcatatttgcatatacgatacaaggctgttagagagataattggaattaatttgactgtaaacacaaagatattagtacaaaatacgtgacgtagaaagtaaaaatttcttgggtagtttgcagttttaaaattatgttttaaaatggactatcatatgcttaccgtaacttgaaagtatttcgatttcttggctttatatatcttgtggaaaggac

SEQ ID NO: 4694 - DNA, 241 bp, synthetic construct
  misc_feature 1..241: note = promoter
  source 1..241: mol_type = other DNA
gagggcctatttcccatgattccttcatatttgcatatacgatacaaggctgttagagagataattggaattaatttgactgtaaacacaaagatattagtacaaaatacgtgacgtagaaagtaacaatttcttgggtagtttgcagttttaaaattatgttttaaaatggactatcatatgcttaccgtaacttgaaagtatttcgatttcttggctttatatatcttgtggaaaggac

SEQ ID NO: 4695 - DNA, 241 bp, synthetic construct
  misc_feature 1..241: note = promoter
  source 1..241: mol_type = other DNA
gagggcctatttcccatgattccttcatatttgcatatacgatacaaggctgttagagagataattggaattaatttgactgtaaacacaaagatattagtacaaaatacgtgacgtagaaagtaagaatttcttgggtagtttgcagttttaaaattatgttttaaaatggactatcatatgcttaccgtaacttgaaagtatttcgatttcttggctttatatatcttgtggaaaggac

SEQ ID NO: 4696 - DNA, 241 bp, synthetic construct
  misc_feature 1..241: note = promoter
  source 1..241: mol_type = other DNA
gagggcctatttcccatgattccttcatatttgcatatacgatacaaggctgttagagagataattggaattaatttgactgtaaacacaaagatattagtacaaaatacgtgacgtagaaagtaatcatttcttgggtagtttgcagttttaaaattatgttttaaaatggactatcatatgcttaccgtaacttgaaagtatttcgatttcttggctttatatatcttgtggaaaggac

SEQ ID NO: 4697 - DNA, 241 bp, synthetic construct
  misc_feature 1..241: note = promoter
  source 1..241: mol_type = other DNA
gagggcctatttcccatgattccttcatatttgcatatacgatacaaggctgttagagagataattggaattaatttgactgtaaacacaaagatattagtacaaaatacgtgacgtagaaagtaatgatttcttgggtagtttgcagttttaaaattatgttttaaaatggactatcatatgcttaccgtaacttgaaagtatttcgatttcttggctttatatatcttgtggaaaggac

SEQ ID NO: 4698 - DNA, 241 bp, synthetic construct
  misc_feature 1..241: note = promoter
  source 1..241: mol_type = other DNA
gagggcctatttcccatgattccttcatatttgcatatacgatacaaggctgttagagagataattggaattaatttgactgtaaacacaaagatattagtacaaaatacgtgacgtagaaagtaattatttcttgggtagtttgcagttttaaaattatgttttaaaatggactatcatatgcttaccgtaacttgaaagtatttcgatttcttggctttatatatcttgtggaaaggac

SEQ ID NO: 4699 - DNA, 241 bp, synthetic construct
  misc_feature 1..241: note = promoter
  source 1..241: mol_type = other DNA
gagggcctatttcccatgattccttcatatttgcatatacgatacaaggctgttagagagataattggaattaatttgactgtaaacacaaagatattagtacaaaatacgtgacgtagaaagtaatactttcttgggtagtttgcagttttaaaattatgttttaaaatggactatcatatgcttaccgtaacttgaaagtatttcgatttcttggctttatatatcttgtggaaaggac

SEQ ID NO: 4700 - DNA, 241 bp, synthetic construct
  misc_feature 1..241: note = promoter
  source 1..241: mol_type = other DNA
gagggcctatttcccatgattccttcatatttgcatatacgatacaaggctgttagagagataattggaattaatttgactgtaaacacaaagatattagtacaaaatacgtgacgtagaaagtaatagtttcttgggtagtttgcagttttaaaattatgttttaaaatggactatcatatgcttaccgtaacttgaaagtatttcgatttcttggctttatatatcttgtggaaaggac

SEQ ID NO: 4701 - DNA, 241 bp, synthetic construct
  misc_feature 1..241: note = promoter
  source 1..241: mol_type = other DNA
gagggcctatttcccatgattccttcatatttgcatatacgatacaaggctgttagagagataattggaattaatttgactgtaaacacaaagatattagtacaaaatacgtgacgtagaaagtaatattttcttgggtagtttgcagttttaaaattatgttttaaaatggactatcatatgcttaccgtaacttgaaagtatttcgatttcttggctttatatatcttgtggaaaggac

SEQ ID NO: 4702 - DNA, 241 bp, synthetic construct
  misc_feature 1..241: note = promoter
  source 1..241: mol_type = other DNA
gagggcctatttcccatgattccttcatatttgcatatacgatacaaggctgttagagagataattggaattaatttgactgtaaacacaaagatattagtacaaaatacgtgacgtagaaagtaataaattcttgggtagtttgcagttttaaaattatgttttaaaatggactatcatatgcttaccgtaacttgaaagtatttcgatttcttggctttatatatcttgtggaaaggac

SEQ ID NO: 4703 - DNA, 241 bp, synthetic construct
  misc_feature 1..241: note = promoter
  source 1..241: mol_type = other DNA
gagggcctatttcccatgattccttcatatttgcatatacgatacaaggctgttagagagataattggaattaatttgactgtaaacacaaagatattagtacaaaatacgtgacgtagaaagtaataacttcttgggtagtttgcagttttaaaattatgttttaaaatggactatcatatgcttaccgtaacttgaaagtatttcgatttcttggctttatatatcttgtggaaaggac

SEQ ID NO: 4704 - DNA, 241 bp, synthetic construct
  misc_feature 1..241: note = promoter
  source 1..241: mol_type = other DNA
gagggcctatttcccatgattccttcatatttgcatatacgatacaaggctgttagagagataattggaattaatttgactgtaaacacaaagatattagtacaaaatacgtgacgtagaaagtaataagttcttgggtagtttgcagttttaaaattatgttttaaaatggactatcatatgcttaccgtaacttgaaagtatttcgatttcttggctttatatatcttgtggaaaggac

SEQ ID NO: 4705 - DNA, 241 bp, synthetic construct
  misc_feature 1..241: note = promoter
  source 1..241: mol_type = other DNA
gagggcctatttcccatgattccttcatatttgcatatacgatacaaggctgttagagagataattggaattaatttgactgtaaacacaaagatattagtacaaaatacgtgacgtagaaagtaataatatcttgggtagtttgcagttttaaaattatgttttaaaatggactatcatatgcttaccgtaacttgaaagtatttcgatttcttggctttatatatcttgtggaaaggac

SEQ ID NO: 4706 - DNA, 241 bp, synthetic construct
  misc_feature 1..241: note = promoter
  source 1..241: mol_type = other DNA
gagggcctatttcccatgattccttcatatttgcatatacgatacaaggctgttagagagataattggaattaatttgactgtaaacacaaagatattagtacaaaatacgtgacgtagaaagtaataatctcttgggtagtttgcagttttaaaattatgttttaaaatggactatcatatgcttaccgtaacttgaaagtatttcgatttcttggctttatatatcttgtggaaaggac

SEQ ID NO: 4707 - DNA, 241 bp, synthetic construct
  misc_feature 1..241: note = promoter
  source 1..241: mol_type = other DNA
gagggcctatttcccatgattccttcatatttgcatatacgatacaaggctgttagagagataattggaattaatttgactgtaaacacaaagatattagtacaaaatacgtgacgtagaaagtaataatgtcttgggtagtttgcagttttaaaattatgttttaaaatggactatcatatgcttaccgtaacttgaaagtatttcgatttcttggctttatatatcttgtggaaaggac

SEQ ID NO: 4708 - DNA, 241 bp, synthetic construct
  misc_feature 1..241: note = promoter
  source 1..241: mol_type = other DNA
gagggcctatttcccatgattccttcatatttgcatatacgatacaaggctgttagagagataattggaattaatttgactgtaaacacaaagatattagtacaaaatacgtgacgtagaaagtaataattacttgggtagtttgcagttttaaaattatgttttaaaatggactatcatatgcttaccgtaacttgaaagtatttcgatttcttggctttatatatcttgtggaaaggac

SEQ ID NO: 4709 - DNA, 241 bp, synthetic construct
  misc_feature 1..241: note = promoter
  source 1..241: mol_type = other DNA
gagggcctatttcccatgattccttcatatttgcatatacgatacaaggctgttagagagataattggaattaatttgactgtaaacacaaagatattagtacaaaatacgtgacgtagaaagtaataattccttgggtagtttgcagttttaaaattatgttttaaaatggactatcatatgcttaccgtaacttgaaagtatttcgatttcttggctttatatatcttgtggaaaggac

SEQ ID NO: 4710 - DNA, 241 bp, synthetic construct
  misc_feature 1..241: note = promoter
  source 1..241: mol_type = other DNA
gagggcctatttcccatgattccttcatatttgcatatacgatacaaggctgttagagagataattggaattaatttgactgtaaacacaaagatattagtacaaaatacgtgacgtagaaagtaataattgcttgggtagtttgcagttttaaaattatgttttaaaatggactatcatatgcttaccgtaacttgaaagtatttcgatttcttggctttatatatcttgtggaaaggac

SEQ ID NO: 4711 - DNA, 241 bp, synthetic construct
  misc_feature 1..241: note = promoter
  source 1..241: mol_type = other DNA
gagggcctatttcccatgattccttcatatttgcatatacgatacaaggctgttagagagataattggaattaatttgactgtaaacacaaagatattagtacaaaatacgtgacgtagaaagtaataatttattgggtagtttgcagttttaaaattatgttttaaaatggactatcatatgcttaccgtaacttgaaagtatttcgatttcttggctttatatatcttgtggaaaggac

SEQ ID NO: 4712 - DNA, 241 bp, synthetic construct
  misc_feature 1..241: note = promoter
  source 1..241: mol_type = other DNA
gagggcctatttcccatgattccttcatatttgcatatacgatacaaggctgttagagagataattggaattaatttgactgtaaacacaaagatattagtacaaaatacgtgacgtagaaagtaataatttgttgggtagtttgcagttttaaaattatgttttaaaatggactatcatatgcttaccgtaacttgaaagtatttcgatttcttggctttatatatcttgtggaaaggac

SEQ ID NO: 4713 - DNA, 241 bp, synthetic construct
  misc_feature 1..241: note = promoter
  source 1..241: mol_type = other DNA
gagggcctatttcccatgattccttcatatttgcatatacgatacaaggctgttagagagataattggaattaatttgactgtaaacacaaagatattagtacaaaatacgtgacgtagaaagtaataattttttgggtagtttgcagttttaaaattatgttttaaaatggactatcatatgcttaccgtaacttgaaagtatttcgatttcttggctttatatatcttgtggaaaggac

SEQ ID NO: 4714 - DNA, 241 bp, synthetic construct
  misc_feature 1..241: note = promoter
  source 1..241: mol_type = other DNA
gagggcctatttcccatgattccttcatatttgcatatacgatacaaggctgttagagagataattggaattaatttgactgtaaacacaaagatattagtacaaaatacgtgacgtagaaagtaataatttcatgggtagtttgcagttttaaaattatgttttaaaatggactatcatatgcttaccgtaacttgaaagtatttcgatttcttggctttatatatcttgtggaaaggac

SEQ ID NO: 4715 - DNA, 241 bp, synthetic construct
  misc_feature 1..241: note = promoter
  source 1..241: mol_type = other DNA
gagggcctatttcccatgattccttcatatttgcatatacgatacaaggctgttagagagataattggaattaatttgactgtaaacacaaagatattagtacaaaatacgtgacgtagaaagtaataatttcctgggtagtttgcagttttaaaattatgttttaaaatggactatcatatgcttaccgtaacttgaaagtatttcgatttcttggctttatatatcttgtggaaaggac

SEQ ID NO: 4716 - DNA, 241 bp, synthetic construct
  misc_feature 1..241: note = promoter
  source 1..241: mol_type = other DNA
gagggcctatttcccatgattccttcatatttgcatatacgatacaaggctgttagagagataattggaattaatttgactgtaaacacaaagatattagtacaaaatacgtgacgtagaaagtaataatttcgtgggtagtttgcagttttaaaattatgttttaaaatggactatcatatgcttaccgtaacttgaaagtatttcgatttcttggctttatatatcttgtggaaaggac

SEQ ID NO: 4717 - DNA, 241 bp, synthetic construct
  misc_feature 1..241: note = promoter
  source 1..241: mol_type = other DNA
gagggcctatttcccatgattccttcatatttgcatatacgatacaaggctgttagagagataattggaattaatttgactgtaaacacaaagatattagtacaaaatacgtgacgtagaaagtaataatttctagggtagtttgcagttttaaaattatgttttaaaatggactatcatatgcttaccgtaacttgaaagtatttcgatttcttggctttatatatcttgtggaaaggac

SEQ ID NO: 4718 - DNA, 241 bp, synthetic construct
  misc_feature 1..241: note = promoter
  source 1..241: mol_type = other DNA
gagggcctatttcccatgattccttcatatttgcatatacgatacaaggctgttagagagataattggaattaatttgactgtaaacacaaagatattagtacaaaatacgtgacgtagaaagtaataatttctcgggtagtttgcagttttaaaattatgttttaaaatggactatcatatgcttaccgtaacttgaaagtatttcgatttcttggctttatatatcttgtggaaaggac

SEQ ID NO: 4719 - DNA, 241 bp, synthetic construct
  misc_feature 1..241: note = promoter
  source 1..241: mol_type = other DNA
gagggcctatttcccatgattccttcatatttgcatatacgatacaaggctgttagagagataattggaattaatttgactgtaaacacaaagatattagtacaaaatacgtgacgtagaaagtaataatttctggggtagtttgcagttttaaaattatgttttaaaatggactatcatatgcttaccgtaacttgaaagtatttcgatttcttggctttatatatcttgtggaaaggac

SEQ ID NO: 4720 - DNA, 241 bp, synthetic construct
  misc_feature 1..241: note = promoter
  source 1..241: mol_type = other DNA
gagggcctatttcccatgattccttcatatttgcatatacgatacaaggctgttagagagataattggaattaatttgactgtaaacacaaagatattagtacaaaatacgtgacgtagaaagtaataatttcttaggtagtttgcagttttaaaattatgttttaaaatggactatcatatgcttaccgtaacttgaaagtatttcgatttcttggctttatatatcttgtggaaaggac

SEQ ID NO: 4721 - DNA, 241 bp, synthetic construct
  misc_feature 1..241: note = promoter
  source 1..241: mol_type = other DNA
gagggcctatttcccatgattccttcatatttgcatatacgatacaaggctgttagagagataattggaattaatttgactgtaaacacaaagatattagtacaaaatacgtgacgtagaaagtaataatttcttcggtagtttgcagttttaaaattatgttttaaaatggactatcatatgcttaccgtaacttgaaagtatttcgatttcttggctttatatatcttgtggaaaggac

SEQ ID NO: 4722 - DNA, 241 bp, synthetic construct
  misc_feature 1..241: note = promoter
  source 1..241: mol_type = other DNA
gagggcctatttcccatgattccttcatatttgcatatacgatacaaggctgttagagagataattggaattaatttgactgtaaacacaaagatattagtacaaaatacgtgacgtagaaagtaataatttctttggtagtttgcagttttaaaattatgttttaaaatggactatcatatgcttaccgtaacttgaaagtatttcgatttcttggctttatatatcttgtggaaaggac

SEQ ID NO: 4723 - DNA, 241 bp, synthetic construct
  misc_feature 1..241: note = promoter
  source 1..241: mol_type = other DNA
gagggcctatttcccatgattccttcatatttgcatatacgatacaaggctgttagagagataattggaattaatttgactgtaaacacaaagatattagtacaaaatacgtgacgtagaaagtaataatttcttgagtagtttgcagttttaaaattatgttttaaaatggactatcatatgcttaccgtaacttgaaagtatttcgatttcttggctttatatatcttgtggaaaggac

SEQ ID NO: 4724 - DNA, 241 bp, synthetic construct
  misc_feature 1..241: note = promoter
  source 1..241: mol_type = other DNA
gagggcctatttcccatgattccttcatatttgcatatacgatacaaggctgttagagagataattggaattaatttgactgtaaacacaaagatattagtacaaaatacgtgacgtagaaagtaataatttcttgcgtagtttgcagttttaaaattatgttttaaaatggactatcatatgcttaccgtaacttgaaagtatttcgatttcttggctttatatatcttgtggaaaggac

SEQ ID NO: 4725 - DNA, 241 bp, synthetic construct
  misc_feature 1..241: note = promoter
  source 1..241: mol_type = other DNA
gagggcctatttcccatgattccttcatatttgcatatacgatacaaggctgttagagagataattggaattaatttgactgtaaacacaaagatattagtacaaaatacgtgacgtagaaagtaataatttcttgtgtagtttgcagttttaaaattatgttttaaaatggactatcatatgcttaccgtaacttgaaagtatttcgatttcttggctttatatatcttgtggaaaggac

SEQ ID NO: 4726 - DNA, 241 bp, synthetic construct
  misc_feature 1..241: note = promoter
  source 1..241: mol_type = other DNA
gagggcctatttcccatgattccttcatatttgcatatacgatacaaggctgttagagagataattggaattaatttgactgtaaacacaaagatattagtacaaaatacgtgacgtagaaagtaataatttcttggatagtttgcagttttaaaattatgttttaaaatggactatcatatgcttaccgtaacttgaaagtatttcgatttcttggctttatatatcttgtggaaaggac

SEQ ID NO: 4727 - DNA, 241 bp, synthetic construct
  misc_feature 1..241: note = promoter
  source 1..241: mol_type = other DNA
gagggcctatttcccatgattccttcatatttgcatatacgatacaaggctgttagagagataattggaattaatttgactgtaaacacaaagatattagtacaaaatacgtgacgtagaaagtaataatttcttggctagtttgcagttttaaaattatgttttaaaatggactatcatatgcttaccgtaacttgaaagtatttcgatttcttggctttatatatcttgtggaaaggac

SEQ ID NO: 4728 - DNA, 241 bp, synthetic construct
  misc_feature 1..241: note = promoter
  source 1..241: mol_type = other DNA
gagggcctatttcccatgattccttcatatttgcatatacgatacaaggctgttagagagataattggaattaatttgactgtaaacacaaagatattagtacaaaatacgtgacgtagaaagtaataatttcttggttagtttgcagttttaaaattatgttttaaaatggactatcatatgcttaccgtaacttgaaagtatttcgatttcttggctttatatatcttgtggaaaggac

SEQ ID NO: 4729 - DNA, 241 bp, synthetic construct
  misc_feature 1..241: note = promoter
  source 1..241: mol_type = other DNA
gagggcctatttcccatgattccttcatatttgcatatacgatacaaggctgttagagagataattggaattaatttgactgtaaacacaaagatattagtacaaaatacgtgacgtagaaagtaataatttcttgggaagtttgcagttttaaaattatgttttaaaatggactatcatatgcttaccgtaacttgaaagtatttcgatttcttggctttatatatcttgtggaaaggac

SEQ ID NO: 4730 - DNA, 241 bp, synthetic construct
  misc_feature 1..241: note = promoter
  source 1..241: mol_type = other DNA
gagggcctatttcccatgattccttcatatttgcatatacgatacaaggctgttagagagataattggaattaatttgactgtaaacacaaagatattagtacaaaatacgtgacgtagaaagtaataatttcttgggcagtttgcagttttaaaattatgttttaaaatggactatcatatgcttaccgtaacttgaaagtatttcgatttcttggctttatatatcttgtggaaaggac

SEQ ID NO: 4731 - DNA, 241 bp, synthetic construct
  misc_feature 1..241: note = promoter
  source 1..241: mol_type = other DNA
gagggcctatttcccatgattccttcatatttgcatatacgatacaaggctgttagagagataattggaattaatttgactgtaaacacaaagatattagtacaaaatacgtgacgtagaaagtaataatttcttggggagtttgcagttttaaaattatgttttaaaatggactatcatatgcttaccgtaacttgaaagtatttcgatttcttggctttatatatcttgtggaaaggac

SEQ ID NO: 4732 - DNA, 241 bp, synthetic construct
  misc_feature 1..241: note = promoter
  source 1..241: mol_type = other DNA
gagggcctatttcccatgattccttcatatttgcatatacgatacaaggctgttagagagataattggaattaatttgactgtaaacacaaagatattagtacaaaatacgtgacgtagaaagtaataatttcttgggtcgtttgcagttttaaaattatgttttaaaatggactatcatatgcttaccgtaacttgaaagtatttcgatttcttggctttatatatcttgtggaaaggac

SEQ ID NO: 4733 - DNA, 241 bp, synthetic construct
  misc_feature 1..241: note = promoter
  source 1..241: mol_type = other DNA
gagggcctatttcccatgattccttcatatttgcatatacgatacaaggctgttagagagataattggaattaatttgactgtaaacacaaagatattagtacaaaatacgtgacgtagaaagtaataatttcttgggtggtttgcagttttaaaattatgttttaaaatggactatcatatgcttaccgtaacttgaaagtatttcgatttcttggctttatatatcttgtggaaaggac

SEQ ID NO: 4734 - DNA, 241 bp, synthetic construct
  misc_feature 1..241: note = promoter
  source 1..241: mol_type = other DNA
gagggcctatttcccatgattccttcatatttgcatatacgatacaaggctgttagagagataattggaattaatttgactgtaaacacaaagatattagtacaaaatacgtgacgtagaaagtaataatttcttgggttgtttgcagttttaaaattatgttttaaaatggactatcatatgcttaccgtaacttgaaagtatttcgatttcttggctttatatatcttgtggaaaggac

SEQ ID NO: 4735 - DNA, 241 bp, synthetic construct
  misc_feature 1..241: note = promoter
  source 1..241: mol_type = other DNA
gagggcctatttcccatgattccttcatatttgcatatacgatacaaggctgttagagagataattggaattaatttgactgtaaacacaaagatattagtacaaaatacgtgacgtagaaagtaataatttcttgggtaatttgcagttttaaaattatgttttaaaatggactatcatatgcttaccgtaacttgaaagtatttcgatttcttggctttatatatcttgtggaaaggac

SEQ ID NO: 4736 - DNA, 241 bp, synthetic construct
  misc_feature 1..241: note = promoter
  source 1..241: mol_type = other DNA
gagggcctatttcccatgattccttcatatttgcatatacgatacaaggctgttagagagataattggaattaatttgactgtaaacacaaagatattagtacaaaatacgtgacgtagaaagtaataatttcttgggtactttgcagttttaaaattatgttttaaaatggactatcatatgcttaccgtaacttgaaagtatttcgatttcttggctttatatatcttgtggaaaggac

SEQ ID NO: 4737 - DNA, 241 bp, synthetic construct
  misc_feature 1..241: note = promoter
  source 1..241: mol_type = other DNA
gagggcctatttcccatgattccttcatatttgcatatacgatacaaggctgttagagagataattggaattaatttgactgtaaacacaaagatattagtacaaaatacgtgacgtagaaagtaataatttcttgggtattttgcagttttaaaattatgttttaaaatggactatcatatgcttaccgtaacttgaaagtatttcgatttcttggctttatatatcttgtggaaaggac

SEQ ID NO: 4738 - DNA, 241 bp, synthetic construct
  misc_feature 1..241: note = promoter
  source 1..241: mol_type = other DNA
gagggcctatttcccatgattccttcatatttgcatatacgatacaaggctgttagagagataattggaattaatttgactgtaaacacaaagatattagtacaaaatacgtgacgtagaaagtaataatttcttgggtagattgcagttttaaaattatgttttaaaatggactatcatatgcttaccgtaacttgaaagtatttcgatttcttggctttatatatcttgtggaaaggac

SEQ ID NO: 4739 - DNA, 241 bp, synthetic construct
  misc_feature 1..241: note = promoter
  source 1..241: mol_type = other DNA
gagggcctatttcccatgattccttcatatttgcatatacgatacaaggctgttagagagataattggaattaatttgactgtaaacacaaagatattagtacaaaatacgtgacgtagaaagtaataatttcttgggtagcttgcagttttaaaattatgttttaaaatggactatcatatgcttaccgtaacttgaaagtatttcgatttcttggctttatatatcttgtggaaaggac

SEQ ID NO: 4740 - DNA, 241 bp, synthetic construct
  misc_feature 1..241: note = promoter
  source 1..241: mol_type = other DNA
gagggcctatttcccatgattccttcatatttgcatatacgatacaaggctgttagagagataattggaattaatttgactgtaaacacaaagatattagtacaaaatacgtgacgtagaaagtaataatttcttgggtaggttgcagttttaaaattatgttttaaaatggactatcatatgcttaccgtaacttgaaagtatttcgatttcttggctttatatatcttgtggaaaggac

SEQ ID NO: 4741 - DNA, 241 bp, synthetic construct
  misc_feature 1..241: note = promoter
  source 1..241: mol_type = other DNA
gagggcctatttcccatgattccttcatatttgcatatacgatacaaggctgttagagagataattggaattaatttgactgtaaacacaaagatattagtacaaaatacgtgacgtagaaagtaataatttcttgggtagtatgcagttttaaaattatgttttaaaatggactatcatatgcttaccgtaacttgaaagtatttcgatttcttggctttatatatcttgtggaaaggac

SEQ ID NO: 4742 - DNA, 241 bp, synthetic construct
  misc_feature 1..241: note = promoter
  source 1..241: mol_type = other DNA
gagggcctatttcccatgattccttcatatttgcatatacgatacaaggctgttagagagataattggaattaatttgactgtaaacacaaagatattagtacaaaatacgtgacgtagaaagtaataatttcttgggtagtctgcagttttaaaattatgttttaaaatggactatcatatgcttaccgtaacttgaaagtatttcgatttcttggctttatatatcttgtggaaaggac

SEQ ID NO: 4743 - DNA, 241 bp, synthetic construct
  misc_feature 1..241: note = promoter
  source 1..241: mol_type = other DNA
gagggcctatttcccatgattccttcatatttgcatatacgatacaaggctgttagagagataattggaattaatttgactgtaaacacaaagatattagtacaaaatacgtgacgtagaaagtaataatttcttgggtagtgtgcagttttaaaattatgttttaaaatggactatcatatgcttaccgtaacttgaaagtatttcgatttcttggctttatatatcttgtggaaaggac

SEQ ID NO: 4744 - DNA, 241 bp, synthetic construct
  misc_feature 1..241: note = promoter
  source 1..241: mol_type = other DNA
gagggcctatttcccatgattccttcatatttgcatatacgatacaaggctgttagagagataattggaattaatttgactgtaaacacaaagatattagtacaaaatacgtgacgtagaaagtaataatttcttgggtagttagcagttttaaaattatgttttaaaatggactatcatatgcttaccgtaacttgaaagtatttcgatttcttggctttatatatcttgtggaaaggac

SEQ ID NO: 4745 - DNA, 241 bp, synthetic construct
  misc_feature 1..241: note = promoter
  source 1..241: mol_type = other DNA
gagggcctatttcccatgattccttcatatttgcatatacgatacaaggctgttagagagataattggaattaatttgactgtaaacacaaagatattagtacaaaatacgtgacgtagaaagtaataatttcttgggtagttcgcagttttaaaattatgttttaaaatggactatcatatgcttaccgtaacttgaaagtatttcgatttcttggctttatatatcttgtggaaaggac

SEQ ID NO: 4746 - DNA, 241 bp, synthetic construct
  misc_feature 1..241: note = promoter
  source 1..241: mol_type = other DNA
gagggcctatttcccatgattccttcatatttgcatatacgatacaaggctgttagagagataattggaattaatttgactgtaaacacaaagatattagtacaaaatacgtgacgtagaaagtaataatttcttgggtagttggcagttttaaaattatgttttaaaatggactatcatatgcttaccgtaacttgaaagtatttcgatttcttggctttatatatcttgtggaaaggac

SEQ ID NO: 4747 - DNA, 241 bp, synthetic construct
  misc_feature 1..241: note = promoter
  source 1..241: mol_type = other DNA
gagggcctatttcccatgattccttcatatttgcatatacgatacaaggctgttagagagataattggaattaatttgactgtaaacacaaagatattagtacaaaatacgtgacgtagaaagtaataatttcttgggtagtttacagttttaaaattatgttttaaaatggactatcatatgcttaccgtaacttgaaagtatttcgatttcttggctttatatatcttgtggaaaggac

SEQ ID NO: 4748 - DNA, 241 bp, synthetic construct
  misc_feature 1..241: note = promoter
  source 1..241: mol_type = other DNA
gagggcctatttcccatgattccttcatatttgcatatacgatacaaggctgttagagagataattggaattaatttgactgtaaacacaaagatattagtacaaaatacgtgacgtagaaagtaataatttcttgggtagtttccagttttaaaattatgttttaaaatggactatcatatgcttaccgtaacttgaaagtatttcgatttcttggctttatatatcttgtggaaaggac

SEQ ID NO: 4749 - DNA, 241 bp, synthetic construct
  misc_feature 1..241: note = promoter
  source 1..241: mol_type = other DNA
gagggcctatttcccatgattccttcatatttgcatatacgatacaaggctgttagagagataattggaattaatttgactgtaaacacaaagatattagtacaaaatacgtgacgtagaaagtaataatttcttgggtagttttcagttttaaaattatgttttaaaatggactatcatatgcttaccgtaacttgaaagtatttcgatttcttggctttatatatcttgtggaaaggac

SEQ ID NO: 4750 - DNA, 241 bp, synthetic construct
  misc_feature 1..241: note = promoter
  source 1..241: mol_type = other DNA
gagggcctatttcccatgattccttcatatttgcatatacgatacaaggctgttagagagataattggaattaatttgactgtaaacacaaagatattagtacaaaatacgtgacgtagaaagtaataatttcttgggtagtttgaagttttaaaattatgttttaaaatggactatcatatgcttaccgtaacttgaaagtatttcgatttcttggctttatatatcttgtggaaaggac

SEQ ID NO: 4751 - DNA, 241 bp, synthetic construct
  misc_feature 1..241: note = promoter
  source 1..241: mol_type = other DNA
gagggcctatttcccatgattccttcatatttgcatatacgatacaaggctgttagagagataattggaattaatttgactgtaaacacaaagatattagtacaaaatacgtgacgtagaaagtaataatttcttgggtagtttggagttttaaaattatgttttaaaatggactatcatatgcttaccgtaacttgaaagtatttcgatttcttggctttatatatcttgtggaaaggac

SEQ ID NO: 4752 - DNA, 241 bp, synthetic construct
  misc_feature 1..241: note = promoter
  source 1..241: mol_type = other DNA
gagggcctatttcccatgattccttcatatttgcatatacgatacaaggctgttagagagataattggaattaatttgactgtaaacacaaagatattagtacaaaatacgtgacgtagaaagtaataatttcttgggtagtttgtagttttaaaattatgttttaaaatggactatcatatgcttaccgtaacttgaaagtatttcgatttcttggctttatatatcttgtggaaaggac

SEQ ID NO: 4753 - DNA, 241 bp, synthetic construct
  misc_feature 1..241: note = promoter
  source 1..241: mol_type = other DNA
gagggcctatttcccatgattccttcatatttgcatatacgatacaaggctgttagagagataattggaattaatttgactgtaaacacaaagatattagtacaaaatacgtgacgtagaaagtaataatttcttgggtagtttgccgttttaaaattatgttttaaaatggactatcatatgcttaccgtaacttgaaagtatttcgatttcttggctttatatatcttgtggaaaggac

SEQ ID NO: 4754 - DNA, 241 bp, synthetic construct
  misc_feature 1..241: note = promoter
  source 1..241: mol_type = other DNA
gagggcctatttcccatgattccttcatatttgcatatacgatacaaggctgttagagagataattggaattaatttgactgtaaacacaaagatattagtacaaaatacgtgacgtagaaagtaataatttcttgggtagtttgcggttttaaaattatgttttaaaatggactatcatatgcttaccgtaacttgaaagtatttcgatttcttggctttatatatcttgtggaaaggac

SEQ ID NO: 4755 - DNA, 241 bp, synthetic construct
  misc_feature 1..241: note = promoter
  source 1..241: mol_type = other DNA
gagggcctatttcccatgattccttcatatttgcatatacgatacaaggctgttagagagataattggaattaatttgactgtaaacacaaagatattagtacaaaatacgtgacgtagaaagtaataatttcttgggtagtttgctgttttaaaattatgttttaaaatggactatcatatgcttaccgtaacttgaaagtatttcgatttcttggctttatatatcttgtggaaaggac

SEQ ID NO: 4756 - DNA, 241 bp, synthetic construct
  misc_feature 1..241: note = promoter
  source 1..241: mol_type = other DNA
gagggcctatttcccatgattccttcatatttgcatatacgatacaaggctgttagagagataattggaattaatttgactgtaaacacaaagatattagtacaaaatacgtgacgtagaaagtaataatttcttgggtagtttgcaattttaaaattatgttttaaaatggactatcatatgcttaccgtaacttgaaagtatttcgatttcttggctttatatatcttgtggaaaggac

SEQ ID NO: 4757 - DNA, 241 bp, synthetic construct
  misc_feature 1..241: note = promoter
  source 1..241: mol_type = other DNA
gagggcctatttcccatgattccttcatatttgcatatacgatacaaggctgttagagagataattggaattaatttgactgtaaacacaaagatattagtacaaaatacgtgacgtagaaagtaataatttcttgggtagtttgcacttttaaaattatgttttaaaatggactatcatatgcttaccgtaacttgaaagtatttcgatttcttggctttatatatcttgtggaaaggac

SEQ ID NO: 4758 - DNA, 241 bp, synthetic construct
  misc_feature 1..241: note = promoter
  source 1..241: mol_type = other DNA
gagggcctatttcccatgattccttcatatttgcatatacgatacaaggctgttagagagataattggaattaatttgactgtaaacacaaagatattagtacaaaatacgtgacgtagaaagtaataatttcttgggtagtttgcatttttaaaattatgttttaaaatggactatcatatgcttaccgtaacttgaaagtatttcgatttcttggctttatatatcttgtggaaaggac

SEQ ID NO: 4759 - DNA, 241 bp, synthetic construct
  misc_feature 1..241: note = promoter
  source 1..241: mol_type = other DNA
gagggcctatttcccatgattccttcatatttgcatatacgatacaaggctgttagagagataattggaattaatttgactgtaaacacaaagatattagtacaaaatacgtgacgtagaaagtaataatttcttgggtagtttgcagatttaaaattatgttttaaaatggactatcatatgcttaccgtaacttgaaagtatttcgatttcttggctttatatatcttgtggaaaggac

SEQ ID NO: 4760 - DNA, 241 bp, synthetic construct
  misc_feature 1..241: note = promoter
  source 1..241: mol_type = other DNA
gagggcctatttcccatgattccttcatatttgcatatacgatacaaggctgttagagagataattggaattaatttgactgtaaacacaaagatattagtacaaaatacgtgacgtagaaagtaataatttcttgggtagtttgcagctttaaaattatgttttaaaatggactatcatatgcttaccgtaacttgaaagtatttcgatttcttggctttatatatcttgtggaaaggac

SEQ ID NO: 4761 - DNA, 241 bp, synthetic construct
  misc_feature 1..241: note = promoter
  source 1..241: mol_type = other DNA
gagggcctatttcccatgattccttcatatttgcatatacgatacaaggctgttagagagataattggaattaatttgactgtaaacacaaagatattagtacaaaatacgtgacgtagaaagtaataatttcttgggtagtttgcaggtttaaaattatgttttaaaatggactatcatatgcttaccgtaacttgaaagtatttcgatttcttggctttatatatcttgtggaaaggac

SEQ ID NO: 4762 - DNA, 241 bp, synthetic construct
  misc_feature 1..241: note = promoter
  source 1..241: mol_type = other DNA
gagggcctatttcccatgattccttcatatttgcatatacgatacaaggctgttagagagataattggaattaatttgactgtaaacacaaagatattagtacaaaatacgtgacgtagaaagtaataatttcttgggtagtttgcagtattaaaattatgttttaaaatggactatcatatgcttaccgtaacttgaaagtatttcgatttcttggctttatatatcttgtggaaaggac

SEQ ID NO: 4763 - DNA, 241 bp, synthetic construct
  misc_feature 1..241: note = promoter
  source 1..241: mol_type = other DNA
gagggcctatttcccatgattccttcatatttgcatatacgatacaaggctgttagagagataattggaattaatttgactgtaaacacaaagatattagtacaaaatacgtgacgtagaaagtaataatttcttgggtagtttgcagtcttaaaattatgttttaaaatggactatcatatgcttaccgtaacttgaaagtatttcgatttcttggctttatatatcttgtggaaaggac

SEQ ID NO: 4764 - DNA, 241 bp, synthetic construct
  misc_feature 1..241: note = promoter
  source 1..241: mol_type = other DNA
gagggcctatttcccatgattccttcatatttgcatatacgatacaaggctgttagagagataattggaattaatttgactgtaaacacaaagatattagtacaaaatacgtgacgtagaaagtaataatttcttgggtagtttgcagtgttaaaattatgttttaaaatggactatcatatgcttaccgtaacttgaaagtatttcgatttcttggctttatatatcttgtggaaaggac

SEQ ID NO: 4765 - DNA, 241 bp, synthetic construct
  misc_feature 1..241: note = promoter
  source 1..241: mol_type = other DNA
gagggcctatttcccatgattccttcatatttgcatatacgatacaaggctgttagagagataattggaattaatttgactgtaaacacaaagatattagtacaaaatacgtgacgtagaaagtaataatttcttgggtagtttgcagttataaaattatgttttaaaatggactatcatatgcttaccgtaacttgaaagtatttcgatttcttggctttatatatcttgtggaaaggac

SEQ ID NO: 4766 - DNA, 241 bp, synthetic construct
  misc_feature 1..241: note = promoter
  source 1..241: mol_type = other DNA
gagggcctatttcccatgattccttcatatttgcatatacgatacaaggctgttagagagataattggaattaatttgactgtaaacacaaagatattagtacaaaatacgtgacgtagaaagtaataatttcttgggtagtttgcagttctaaaattatgttttaaaatggactatcatatgcttaccgtaacttgaaagtatttcgatttcttggctttatatatcttgtggaaaggac

SEQ ID NO: 4767 - DNA, 241 bp, synthetic construct
  misc_feature 1..241: note = promoter
  source 1..241: mol_type = other DNA
gagggcctatttcccatgattccttcatatttgcatatacgatacaaggctgttagagagataattggaattaatttgactgtaaacacaaagatattagtacaaaatacgtgacgtagaaagtaataatttcttgggtagtttgcagttgtaaaattatgttttaaaatggactatcatatgcttaccgtaacttgaaagtatttcgatttcttggctttatatatcttgtggaaaggac

SEQ ID NO: 4768 - DNA, 241 bp, synthetic construct
  misc_feature 1..241: note = promoter
  source 1..241: mol_type = other DNA
gagggcctatttcccatgattccttcatatttgcatatacgatacaaggctgttagagagataattggaattaatttgactgtaaacacaaagatattagtacaaaatacgtgacgtagaaagtaataatttcttgggtagtttgcagtttaaaaattatgttttaaaatggactatcatatgcttaccgtaacttgaaagtatttcgatttcttggctttatatatcttgtggaaaggac

SEQ ID NO: 4769 - DNA, 241 bp, synthetic construct
  misc_feature 1..241: note = promoter
  source 1..241: mol_type = other DNA
gagggcctatttcccatgattccttcatatttgcatatacgatacaaggctgttagagagataattggaattaatttgactgtaaacacaaagatattagtacaaaatacgtgacgtagaaagtaataatttcttgggtagtttgcagtttcaaaattatgttttaaaatggactatcatatgcttaccgtaacttgaaagtatttcgatttcttggctttatatatcttgtggaaaggac

SEQ ID NO: 4770 - DNA, 241 bp, synthetic construct
  misc_feature 1..241: note = promoter
  source 1..241: mol_type = other DNA
gagggcctatttcccatgattccttcatatttgcatatacgatacaaggctgttagagagataattggaattaatttgactgtaaacacaaagatattagtacaaaatacgtgacgtagaaagtaataatttcttgggtagtttgcagtttgaaaattatgttttaaaatggactatcatatgcttaccgtaacttgaaagtatttcgatttcttggctttatatatcttgtggaaaggac

SEQ ID NO: 4771 - DNA, 241 bp, synthetic construct
  misc_feature 1..241: note = promoter
  source 1..241: mol_type = other DNA
gagggcctatttcccatgattccttcatatttgcatatacgatacaaggctgttagagagataattggaattaatttgactgtaaacacaaagatattagtacaaaatacgtgacgtagaaagtaataatttcttgggtagtttgcagttttcaaattatgttttaaaatggactatcatatgcttaccgtaacttgaaagtatttcgatttcttggctttatatatcttgtggaaaggac

SEQ ID NO: 4772 - DNA, 241 bp, synthetic construct
  misc_feature 1..241: note = promoter
  source 1..241: mol_type = other DNA
gagggcctatttcccatgattccttcatatttgcatatacgatacaaggctgttagagagataattggaattaatttgactgtaaacacaaagatattagtacaaaatacgtgacgtagaaagtaataatttcttgggtagtttgcagttttgaaattatgttttaaaatggactatcatatgcttaccgtaacttgaaagtatttcgatttcttggctttatatatcttgtggaaaggac

SEQ ID NO: 4773 - DNA, 241 bp, synthetic construct
  misc_feature 1..241: note = promoter
  source 1..241: mol_type = other DNA
gagggcctatttcccatgattccttcatatttgcatatacgatacaaggctgttagagagataattggaattaatttgactgtaaacacaaagatattagtacaaaatacgtgacgtagaaagtaataatttcttgggtagtttgcagtttttaaattatgttttaaaatggactatcatatgcttaccgtaacttgaaagtatttcgatttcttggctttatatatcttgtggaaaggac

SEQ ID NO: 4774 - DNA, 241 bp, synthetic construct
  misc_feature 1..241: note = promoter
  source 1..241: mol_type = other DNA
gagggcctatttcccatgattccttcatatttgcatatacgatacaaggctgttagagagataattggaattaatttgactgtaaacacaaagatattagtacaaaatacgtgacgtagaaagtaataatttcttgggtagtttgcagttttacaattatgttttaaaatggactatcatatgcttaccgtaacttgaaagtatttcgatttcttggctttatatatcttgtggaaaggac

SEQ ID NO: 4775 - DNA, 241 bp, synthetic construct
  misc_feature 1..241: note = promoter
  source 1..241: mol_type = other DNA
gagggcctatttcccatgattccttcatatttgcatatacgatacaaggctgttagagagataattggaattaatttgactgtaaacacaaagatattagtacaaaatacgtgacgtagaaagtaataatttcttgggtagtttgcagttttagaattatgttttaaaatggactatcatatgcttaccgtaacttgaaagtatttcgatttcttggctttatatatcttgtggaaaggac

SEQ ID NO: 4776 - DNA, 241 bp, synthetic construct
  misc_feature 1..241: note = promoter
  source 1..241: mol_type = other DNA
gagggcctatttcccatgattccttcatatttgcatatacgatacaaggctgttagagagataattggaattaatttgactgtaaacacaaagatattagtacaaaatacgtgacgtagaaagtaataatttcttgggtagtttgcagttttataattatgttttaaaatggactatcatatgcttaccgtaacttgaaagtatttcgatttcttggctttatatatcttgtggaaaggac

SEQ ID NO: 4777 - DNA, 241 bp, synthetic construct
  misc_feature 1..241: note = promoter
  source 1..241: mol_type = other DNA
gagggcctatttcccatgattccttcatatttgcatatacgatacaaggctgttagagagataattggaattaatttgactgtaaacacaaagatattagtacaaaatacgtgacgtagaaagtaataatttcttgggtagtttgcagttttaacattatgttttaaaatggactatcatatgcttaccgtaacttgaaagtatttcgatttcttggctttatatatcttgtggaaaggac

SEQ ID NO: 4778 - DNA, 241 bp, synthetic construct
  misc_feature 1..241: note = promoter
  source 1..241: mol_type = other DNA
gagggcctatttcccatgattccttcatatttgcatatacgatacaaggctgttagagagataattggaattaatttgactgtaaacacaaagatattagtacaaaatacgtgacgtagaaagtaataatttcttgggtagtttgcagttttaagattatgttttaaaatggactatcatatgcttaccgtaacttgaaagtatttcgatttcttggctttatatatcttgtggaaaggac

SEQ ID NO: 4779 - DNA, 241 bp, synthetic construct
  misc_feature 1..241: note = promoter
  source 1..241: mol_type = other DNA
gagggcctatttcccatgattccttcatatttgcatatacgatacaaggctgttagagagataattggaattaatttgactgtaaacacaaagatattagtacaaaatacgtgacgtagaaagtaataatttcttgggtagtttgcagttttaatattatgttttaaaatggactatcatatgcttaccgtaacttgaaagtatttcgatttcttggctttatatatcttgtggaaaggac

SEQ ID NO: 4780 - DNA, 241 bp, synthetic construct
  misc_feature 1..241: note = promoter
  source 1..241: mol_type = other DNA
gagggcctatttcccatgattccttcatatttgcatatacgatacaaggctgttagagagataattggaattaatttgactgtaaacacaaagatattagtacaaaatacgtgacgtagaaagtaataatttcttgggtagtttgcagttttaaacttatgttttaaaatggactatcatatgcttaccgtaacttgaaagtatttcgatttcttggctttatatatcttgtggaaaggac

SEQ ID NO: 4781 - DNA, 241 bp, synthetic construct
  misc_feature 1..241: note = promoter
  source 1..241: mol_type = other DNA
gagggcctatttcccatgattccttcatatttgcatatacgatacaaggctgttagagagataattggaattaatttgactgtaaacacaaagatattagtacaaaatacgtgacgtagaaagtaataatttcttgggtagtttgcagttttaaagttatgttttaaaatggactatcatatgcttaccgtaacttgaaagtatttcgatttcttggctttatatatcttgtggaaaggac

SEQ ID NO: 4782 - DNA, 241 bp, synthetic construct
  misc_feature 1..241: note = promoter
  source 1..241: mol_type = other DNA
gagggcctatttcccatgattccttcatatttgcatatacgatacaaggctgttagagagataattggaattaatttgactgtaaacacaaagatattagtacaaaatacgtgacgtagaaagtaataatttcttgggtagtttgcagttttaaatttatgttttaaaatggactatcatatgcttaccgtaacttgaaagtatttcgatttcttggctttatatatcttgtggaaaggac

SEQ ID NO: 4783 - DNA, 241 bp, synthetic construct
  misc_feature 1..241: note = promoter
  source 1..241: mol_type = other DNA
gagggcctatttcccatgattccttcatatttgcatatacgatacaaggctgttagagagataattggaattaatttgactgtaaacacaaagatattagtacaaaatacgtgacgtagaaagtaataatttcttgggtagtttgcagttttaaaaatatgttttaaaatggactatcatatgcttaccgtaacttgaaagtatttcgatttcttggctttatatatcttgtggaaaggac

SEQ ID NO: 4784 - DNA, 241 bp, synthetic construct
  misc_feature 1..241: note = promoter
  source 1..241: mol_type = other DNA
gagggcctatttcccatgattccttcatatttgcatatacgatacaaggctgttagagagataattggaattaatttgactgtaaacacaaagatattagtacaaaatacgtgacgtagaaagtaataatttcttgggtagtttgcagttttaaaactatgttttaaaatggactatcatatgcttaccgtaacttgaaagtatttcgatttcttggctttatatatcttgtggaaaggac

SEQ ID NO: 4785 - DNA, 241 bp, synthetic construct
  misc_feature 1..241: note = promoter
  source 1..241: mol_type = other DNA
gagggcctatttcccatgattccttcatatttgcatatacgatacaaggctgttagagagataattggaattaatttgactgtaaacacaaagatattagtacaaaatacgtgacgtagaaagtaataatttcttgggtagtttgcagttttaaaagtatgttttaaaatggactatcatatgcttaccgtaacttgaaagtatttcgatttcttggctttatatatcttgtggaaaggac

SEQ ID NO: 4786 - DNA, 241 bp, synthetic construct
  misc_feature 1..241: note = promoter
  source 1..241: mol_type = other DNA
gagggcctatttcccatgattccttcatatttgcatatacgatacaaggctgttagagagataattggaattaatttgactgtaaacacaaagatattagtacaaaatacgtgacgtagaaagtaataatttcttgggtagtttgcagttttaaaataatgttttaaaatggactatcatatgcttaccgtaacttgaaagtatttcgatttcttggctttatatatcttgtggaaaggac

SEQ ID NO: 4787 - DNA, 241 bp, synthetic construct
  misc_feature 1..241: note = promoter
  source 1..241: mol_type = other DNA
gagggcctatttcccatgattccttcatatttgcatatacgatacaaggctgttagagagataattggaattaatttgactgtaaacacaaagatattagtacaaaatacgtgacgtagaaagtaataatttcttgggtagtttgcagttttaaaatcatgttttaaaatggactatcatatgcttaccgtaacttgaaagtatttcgatttcttggctttatatatcttgtggaaaggac

SEQ ID NO: 4788 - DNA, 241 bp, synthetic construct
  misc_feature 1..241: note = promoter
  source 1..241: mol_type = other DNA
gagggcctatttcccatgattccttcatatttgcatatacgatacaaggctgttagagagataattggaattaatttgactgtaaacacaaagatattagtacaaaatacgtgacgtagaaagtaataatttcttgggtagtttgcagttttaaaatgatgttttaaaatggactatcatatgcttaccgtaacttgaaagtatttcgatttcttggctttatatatcttgtggaaaggac

SEQ ID NO: 4789 - DNA, 241 bp, synthetic construct
  misc_feature 1..241: note = promoter
  source 1..241: mol_type = other DNA
gagggcctatttcccatgattccttcatatttgcatatacgatacaaggctgttagagagataattggaattaatttgactgtaaacacaaagatattagtacaaaatacgtgacgtagaaagtaataatttcttgggtagtttgcagttttaaaattctgttttaaaatggactatcatatgcttaccgtaacttgaaagtatttcgatttcttggctttatatatcttgtggaaaggac

SEQ ID NO: 4790 - DNA, 241 bp, synthetic construct
  misc_feature 1..241: note = promoter
  source 1..241: mol_type = other DNA
gagggcctatttcccatgattccttcatatttgcatatacgatacaaggctgttagagagataattggaattaatttgactgtaaacacaaagatattagtacaaaatacgtgacgtagaaagtaataatttcttgggtagtttgcagttttaaaattgtgttttaaaatggactatcatatgcttaccgtaacttgaaagtatttcgatttcttggctttatatatcttgtggaaaggac

SEQ ID NO: 4791 - DNA, 241 bp, synthetic construct
  misc_feature 1..241: note = promoter
  source 1..241: mol_type = other DNA
gagggcctatttcccatgattccttcatatttgcatatacgatacaaggctgttagagagataattggaattaatttgactgtaaacacaaagatattagtacaaaatacgtgacgtagaaagtaataatttcttgggtagtttgcagttttaaaattttgttttaaaatggactatcatatgcttaccgtaacttgaaagtatttcgatttcttggctttatatatcttgtggaaaggac

SEQ ID NO: 4792 - DNA, 241 bp, synthetic construct
  misc_feature 1..241: note = promoter
  source 1..241: mol_type = other DNA
gagggcctatttcccatgattccttcatatttgcatatacgatacaaggctgttagagagataattggaattaatttgactgtaaacacaaagatattagtacaaaatacgtgacgtagaaagtaataatttcttgggtagtttgcagttttaaaattaagttttaaaatggactatcatatgcttaccgtaacttgaaagtatttcgatttcttggctttatatatcttgtggaaaggac

SEQ ID NO: 4793 - DNA, 241 bp, synthetic construct
  misc_feature 1..241: note = promoter
  source 1..241: mol_type = other DNA
gagggcctatttcccatgattccttcatatttgcatatacgatacaaggctgttagagagataattggaattaatttgactgtaaacacaaagatattagtacaaaatacgtgacgtagaaagtaataatttcttgggtagtttgcagttttaaaattacgttttaaaatggactatcatatgcttaccgtaacttgaaagtatttcgatttcttggctttatatatcttgtggaaaggac

SEQ ID NO: 4794 - DNA, 241 bp, synthetic construct
  misc_feature 1..241: note = promoter
  source 1..241: mol_type = other DNA
gagggcctatttcccatgattccttcatatttgcatatacgatacaaggctgttagagagataattggaattaatttgactgtaaacacaaagatattagtacaaaatacgtgacgtagaaagtaataatttcttgggtagtttgcagttttaaaattaggttttaaaatggactatcatatgcttaccgtaacttgaaagtatttcgatttcttggctttatatatcttgtggaaaggac

SEQ ID NO: 4795 - DNA, 241 bp, synthetic construct
  misc_feature 1..241: note = promoter
  source 1..241: mol_type = other DNA
gagggcctatttcccatgattccttcatatttgcatatacgatacaaggctgttagagagataattggaattaatttgactgtaaacacaaagatattagtacaaaatacgtgacgtagaaagtaataatttcttgggtagtttgcagttttaaaattatattttaaaatggactatcatatgcttaccgtaacttgaaagtatttcgatttcttggctttatatatcttgtggaaaggac

SEQ ID NO: 4796 - DNA, 241 bp, synthetic construct
  misc_feature 1..241: note = promoter
  source 1..241: mol_type = other DNA
gagggcctatttcccatgattccttcatatttgcatatacgatacaaggctgttagagagataattggaattaatttgactgtaaacacaaagatattagtacaaaatacgtgacgtagaaagtaataatttcttgggtagtttgcagttttaaaattatcttttaaaatggactatcatatgcttaccgtaacttgaaagtatttcgatttcttggctttatatatcttgtggaaaggac

SEQ ID NO: 4797 - DNA, 241 bp, synthetic construct
  misc_feature 1..241: note = promoter
  source 1..241: mol_type = other DNA
gagggcctatttcccatgattccttcatatttgcatatacgatacaaggctgttagagagataattggaattaatttgactgtaaacacaaagatattagtacaaaatacgtgacgtagaaagtaataatttcttgggtagtttgcagttttaaaattattttttaaaatggactatcatatgcttaccgtaacttgaaagtatttcgatttcttggctttatatatcttgtggaaaggac

SEQ ID NO: 4798 - DNA, 241 bp, synthetic construct
  misc_feature 1..241: note = promoter
  source 1..241: mol_type = other DNA
gagggcctatttcccatgattccttcatatttgcatatacgatacaaggctgttagagagataattggaattaatttgactgtaaacacaaagatattagtacaaaatacgtgacgtagaaagtaataatttcttgggtagtttgcagttttaaaattatgatttaaaatggactatcatatgcttaccgtaacttgaaagtatttcgatttcttggctttatatatcttgtggaaaggac

SEQ ID NO: 4799 - DNA, 241 bp, synthetic construct
  misc_feature 1..241: note = promoter
  source 1..241: mol_type = other DNA
gagggcctatttcccatgattccttcatatttgcatatacgatacaaggctgttagagagataattggaattaatttgactgtaaacacaaagatattagtacaaaatacgtgacgtagaaagtaataatttcttgggtagtttgcagttttaaaattatgctttaaaatggactatcatatgcttaccgtaacttgaaagtatttcgatttcttggctttatatatcttgtggaaaggac

SEQ ID NO: 4800 - DNA, 241 bp, synthetic construct
  misc_feature 1..241: note = promoter
  source 1..241: mol_type = other DNA
gagggcctatttcccatgattccttcatatttgcatatacgatacaaggctgttagagagataattggaattaatttgactgtaaacacaaagatattagtacaaaatacgtgacgtagaaagtaataatttcttgggtagtttgcagttttaaaattatggtttaaaatggactatcatatgcttaccgtaacttgaaagtatttcgatttcttggctttatatatcttgtggaaaggac

SEQ ID NO: 4801 - DNA, 241 bp, synthetic construct
  misc_feature 1..241: note = promoter
  source 1..241: mol_type = other DNA
gagggcctatttcccatgattccttcatatttgcatatacgatacaaggctgttagagagataattggaattaatttgactgtaaacacaaagatattagtacaaaatacgtgacgtagaaagtaataatttcttgggtagtttgcagttttaaaattatgtattaaaatggactatcatatgcttaccgtaacttgaaagtatttcgatttcttggctttatatatcttgtggaaaggac

SEQ ID NO: 4802 - DNA, 241 bp, synthetic construct
  misc_feature 1..241: note = promoter
  source 1..241: mol_type = other DNA
gagggcctatttcccatgattccttcatatttgcatatacgatacaaggctgttagagagataattggaattaatttgactgtaaacacaaagatattagtacaaaatacgtgacgtagaaagtaataatttcttgggtagtttgcagttttaaaattatgtcttaaaatggactatcatatgcttaccgtaacttgaaagtatttcgatttcttggctttatatatcttgtggaaaggac

SEQ ID NO: 4803 - DNA, 241 bp, synthetic construct
  misc_feature 1..241: note = promoter
  source 1..241: mol_type = other DNA
gagggcctatttcccatgattccttcatatttgcatatacgatacaaggctgttagagagataattggaattaatttgactgtaaacacaaagatattagtacaaaatacgtgacgtagaaagtaataatttcttgggtagtttgcagttttaaaattatgtgttaaaatggactatcatatgcttaccgtaacttgaaagtatttcgatttcttggctttatatatcttgtggaaaggac

SEQ ID NO: 4804 - DNA, 241 bp, synthetic construct
  misc_feature 1..241: note = promoter
  source 1..241: mol_type = other DNA
gagggcctatttcccatgattccttcatatttgcatatacgatacaaggctgttagagagataattggaattaatttgactgtaaacacaaagatattagtacaaaatacgtgacgtagaaagtaataatttcttgggtagtttgcagttttaaaattatgttataaaatggactatcatatgcttaccgtaacttgaaagtatttcgatttcttggctttatatatcttgtggaaaggac

SEQ ID NO: 4805 - DNA, 241 bp, synthetic construct
  misc_feature 1..241: note = promoter
  source 1..241: mol_type = other DNA
gagggcctatttcccatgattccttcatatttgcatatacgatacaaggctgttagagagataattggaattaatttgactgtaaacacaaagatattagtacaaaatacgtgacgtagaaagtaataatttcttgggtagtttgcagttttaaaattatgttctaaaatggactatcatatgcttaccgtaacttgaaagtatttcgatttcttggctttatatatcttgtggaaaggac

SEQ ID NO: 4806 - DNA, 241 bp, synthetic construct
  misc_feature 1..241: note = promoter
  source 1..241: mol_type = other DNA
gagggcctatttcccatgattccttcatatttgcatatacgatacaaggctgttagagagataattggaattaatttgactgtaaacacaaagatattagtacaaaatacgtgacgtagaaagtaataatttcttgggtagtttgcagttttaaaattatgttgtaaaatggactatcatatgcttaccgtaacttgaaagtatttcgatttcttggctttatatatcttgtggaaaggac

SEQ ID NO: 4807 - DNA, 241 bp, synthetic construct
  misc_feature 1..241: note = promoter
  source 1..241: mol_type = other DNA
gagggcctatttcccatgattccttcatatttgcatatacgatacaaggctgttagagagataattggaattaatttgactgtaaacacaaagatattagtacaaaatacgtgacgtagaaagtaataatttcttgggtagtttgcagttttaaaattatgtttaaaaatggactatcatatgcttaccgtaacttgaaagtatttcgatttcttggctttatatatcttgtggaaaggac

SEQ ID NO: 4808 - DNA, 241 bp, synthetic construct
  misc_feature 1..241: note = promoter
  source 1..241: mol_type = other DNA
gagggcctatttcccatgattccttcatatttgcatatacgatacaaggctgttagagagataattggaattaatttgactgtaaacacaaagatattagtacaaaatacgtgacgtagaaagtaataatttcttgggtagtttgcagttttaaaattatgtttcaaaatggactatcatatgcttaccgtaacttgaaagtatttcgatttcttggctttatatatcttgtggaaaggac

SEQ ID NO: 4809 - DNA, 241 bp, synthetic construct
  misc_feature 1..241: note = promoter
  source 1..241: mol_type = other DNA
gagggcctatttcccatgattccttcatatttgcatatacgatacaaggctgttagagagataattggaattaatttgactgtaaacacaaagatattagtacaaaatacgtgacgtagaaagtaataatttcttgggtagtttgcagttttaaaattatgtttgaaaatggactatcatatgcttaccgtaacttgaaagtatttcgatttcttggctttatatatcttgtggaaaggac

SEQ ID NO: 4810 - DNA, 241 bp, synthetic construct
  misc_feature 1..241: note = promoter
  source 1..241: mol_type = other DNA
gagggcctatttcccatgattccttcatatttgcatatacgatacaaggctgttagagagataattggaattaatttgactgtaaacacaaagatattagtacaaaatacgtgacgtagaaagtaataatttcttgggtagtttgcagttttaaaattatgttttcaaatggactatcatatgcttaccgtaacttgaaagtatttcgatttcttggctttatatatcttgtggaaaggac

SEQ ID NO: 4811 - DNA, 241 bp, synthetic construct
  misc_feature 1..241: note = promoter
  source 1..241: mol_type = other DNA
gagggcctatttcccatgattccttcatatttgcatatacgatacaaggctgttagagagataattggaattaatttgactgtaaacacaaagatattagtacaaaatacgtgacgtagaaagtaataatttcttgggtagtttgcagttttaaaattatgttttgaaatggactatcatatgcttaccgtaacttgaaagtatttcgatttcttggctttatatatcttgtggaaaggac

SEQ ID NO: 4812 - DNA, 241 bp, synthetic construct
  misc_feature 1..241: note = promoter
  source 1..241: mol_type = other DNA
gagggcctatttcccatgattccttcatatttgcatatacgatacaaggctgttagagagataattggaattaatttgactgtaaacacaaagatattagtacaaaatacgtgacgtagaaagtaataatttcttgggtagtttgcagttttaaaattatgtttttaaatggactatcatatgcttaccgtaacttgaaagtatttcgatttcttggctttatatatcttgtggaaaggac

SEQ ID NO: 4813 - DNA, 241 bp, synthetic construct
  misc_feature 1..241: note = promoter
  source 1..241: mol_type = other DNA
gagggcctatttcccatgattccttcatatttgcatatacgatacaaggctgttagagagataattggaattaatttgactgtaaacacaaagatattagtacaaaatacgtgacgtagaaagtaataatttcttgggtagtttgcagttttaaaattatgttttacaatggactatcatatgcttaccgtaacttgaaagtatttcgatttcttggctttatatatcttgtggaaaggac

SEQ ID NO: 4814 - DNA, 241 bp, synthetic construct
  misc_feature 1..241: note = promoter
  source 1..241: mol_type = other DNA
gagggcctatttcccatgattccttcatatttgcatatacgatacaaggctgttagagagataattggaattaatttgactgtaaacacaaagatattagtacaaaatacgtgacgtagaaagtaataatttcttgggtagtttgcagttttaaaattatgttttagaatggactatcatatgcttaccgtaacttgaaagtatttcgatttcttggctttatatatcttgtggaaaggac

SEQ ID NO: 4815 - DNA, 241 bp, synthetic construct
  misc_feature 1..241: note = promoter
  source 1..241: mol_type = other DNA
gagggcctatttcccatgattccttcatatttgcatatacgatacaaggctgttagagagataattggaattaatttgactgtaaacacaaagatattagtacaaaatacgtgacgtagaaagtaataatttcttgggtagtttgcagttttaaaattatgttttataatggactatcatatgcttaccgtaacttgaaagtatttcgatttcttggctttatatatcttgtggaaaggac

SEQ ID NO: 4816 - DNA, 241 bp, synthetic construct
  misc_feature 1..241: note = promoter
  source 1..241: mol_type = other DNA
gagggcctatttcccatgattccttcatatttgcatatacgatacaaggctgttagagagataattggaattaatttgactgtaaacacaaagatattagtacaaaatacgtgacgtagaaagtaataatttcttgggtagtttgcagttttaaaattatgttttaacatggactatcatatgcttaccgtaacttgaaagtatttcgatttcttggctttatatatcttgtggaaaggac

SEQ ID NO: 4817 - DNA, 241 bp, synthetic construct
  misc_feature 1..241: note = promoter
  source 1..241: mol_type = other DNA
gagggcctatttcccatgattccttcatatttgcatatacgatacaaggctgttagagagataattggaattaatttgactgtaaacacaaagatattagtacaaaatacgtgacgtagaaagtaataatttcttgggtagtttgcagttttaaaattatgttttaagatggactatcatatgcttaccgtaacttgaaagtatttcgatttcttggctttatatatcttgtggaaaggac

SEQ ID NO: 4818 - DNA, 241 bp, synthetic construct
  misc_feature 1..241: note = promoter
  source 1..241: mol_type = other DNA
gagggcctatttcccatgattccttcatatttgcatatacgatacaaggctgttagagagataattggaattaatttgactgtaaacacaaagatattagtacaaaatacgtgacgtagaaagtaataatttcttgggtagtttgcagttttaaaattatgttttaatatggactatcatatgcttaccgtaacttgaaagtatttcgatttcttggctttatatatcttgtggaaaggac

SEQ ID NO: 4819 - DNA, 241 bp, synthetic construct
  misc_feature 1..241: note = promoter
  source 1..241: mol_type = other DNA
gagggcctatttcccatgattccttcatatttgcatatacgatacaaggctgttagagagataattggaattaatttgactgtaaacacaaagatattagtacaaaatacgtgacgtagaaagtaataatttcttgggtagtttgcagttttaaaattatgttttaaactggactatcatatgcttaccgtaacttgaaagtatttcgatttcttggctttatatatcttgtggaaaggac

SEQ ID NO: 4820 - DNA, 241 bp, synthetic construct
  misc_feature 1..241: note = promoter
  source 1..241: mol_type = other DNA
gagggcctatttcccatgattccttcatatttgcatatacgatacaaggctgttagagagataattggaattaatttgactgtaaacacaaagatattagtacaaaatacgtgacgtagaaagtaataatttcttgggtagtttgcagttttaaaattatgttttaaagtggactatcatatgcttaccgtaacttgaaagtatttcgatttcttggctttatatatcttgtggaaaggac

SEQ ID NO: 4821 - DNA, 241 bp, synthetic construct
  misc_feature 1..241: note = promoter
  source 1..241: mol_type = other DNA
gagggcctatttcccatgattccttcatatttgcatatacgatacaaggctgttagagagataattggaattaatttgactgtaaacacaaagatattagtacaaaatacgtgacgtagaaagtaataatttcttgggtagtttgcagttttaaaattatgttttaaattggactatcatatgcttaccgtaacttgaaagtatttcgatttcttggctttatatatcttgtggaaaggac

SEQ ID NO: 4822 - DNA, 241 bp, synthetic construct
  misc_feature 1..241: note = promoter
  source 1..241: mol_type = other DNA
gagggcctatttcccatgattccttcatatttgcatatacgatacaaggctgttagagagataattggaattaatttgactgtaaacacaaagatattagtacaaaatacgtgacgtagaaagtaataatttcttgggtagtttgcagttttaaaattatgttttaaaaaggactatcatatgcttaccgtaacttgaaagtatttcgatttcttggctttatatatcttgtggaaaggac

SEQ ID NO: 4823 - DNA, 241 bp, synthetic construct
  misc_feature 1..241: note = promoter
  source 1..241: mol_type = other DNA
gagggcctatttcccatgattccttcatatttgcatatacgatacaaggctgttagagagataattggaattaatttgactgtaaacacaaagatattagtacaaaatacgtgacgtagaaagtaataatttcttgggtagtttgcagttttaaaattatgttttaaaacggactatcatatgcttaccgtaacttgaaagtatttcgatttcttggctttatatatcttgtggaaaggac

SEQ ID NO: 4824 - DNA, 241 bp, synthetic construct
  misc_feature 1..241: note = promoter
  source 1..241: mol_type = other DNA
gagggcctatttcccatgattccttcatatttgcatatacgatacaaggctgttagagagataattggaattaatttgactgtaaacacaaagatattagtacaaaatacgtgacgtagaaagtaataatttcttgggtagtttgcagttttaaaattatgttttaaaagggactatcatatgcttaccgtaacttgaaagtatttcgatttcttggctttatatatcttgtggaaaggac

SEQ ID NO: 4825 - DNA, 241 bp, synthetic construct
  misc_feature 1..241: note = promoter
  source 1..241: mol_type = other DNA
gagggcctatttcccatgattccttcatatttgcatatacgatacaaggctgttagagagataattggaattaatttgactgtaaacacaaagatattagtacaaaatacgtgacgtagaaagtaataatttcttgggtagtttgcagttttaaaattatgttttaaaatagactatcatatgcttaccgtaacttgaaagtatttcgatttcttggctttatatatcttgtggaaaggac

SEQ ID NO: 4826 - DNA, 241 bp, synthetic construct
  misc_feature 1..241: note = promoter
  source 1..241: mol_type = other DNA
gagggcctatttcccatgattccttcatatttgcatatacgatacaaggctgttagagagataattggaattaatttgactgtaaacacaaagatattagtacaaaatacgtgacgtagaaagtaataatttcttgggtagtttgcagttttaaaattatgttttaaaatcgactatcatatgcttaccgtaacttgaaagtatttcgatttcttggctttatatatcttgtggaaaggac

SEQ ID NO: 4827 - DNA, 241 bp, synthetic construct
  misc_feature 1..241: note = promoter
  source 1..241: mol_type = other DNA
gagggcctatttcccatgattccttcatatttgcatatacgatacaaggctgttagagagataattggaattaatttgactgtaaacacaaagatattagtacaaaatacgtgacgtagaaagtaataatttcttgggtagtttgcagttttaaaattatgttttaaaattgactatcatatgcttaccgtaacttgaaagtatttcgatttcttggctttatatatcttgtggaaaggac

SEQ ID NO: 4828 - DNA, 241 bp, synthetic construct
  misc_feature 1..241: note = promoter
  source 1..241: mol_type = other DNA
gagggcctatttcccatgattccttcatatttgcatatacgatacaaggctgttagagagataattggaattaatttgactgtaaacacaaagatattagtacaaaatacgtgacgtagaaagtaataatttcttgggtagtttgcagttttaaaattatgttttaaaatgaactatcatatgcttaccgtaacttgaaagtatttcgatttcttggctttatatatcttgtggaaaggac

SEQ ID NO: 4829 - DNA, 241 bp, synthetic construct
  misc_feature 1..241: note = promoter
  source 1..241: mol_type = other DNA
gagggcctatttcccatgattccttcatatttgcatatacgatacaaggctgttagagagataattggaattaatttgactgtaaacacaaagatattagtacaaaatacgtgacgtagaaagtaataatttcttgggtagtttgcagttttaaaattatgttttaaaatgcactatcatatgcttaccgtaacttgaaagtatttcgatttcttggctttatatatcttgtggaaaggac

SEQ ID NO: 4830 - DNA, 241 bp, synthetic construct
  misc_feature 1..241: note = promoter
  source 1..241: mol_type = other DNA
gagggcctatttcccatgattccttcatatttgcatatacgatacaaggctgttagagagataattggaattaatttgactgtaaacacaaagatattagtacaaaatacgtgacgtagaaagtaataatttcttgggtagtttgcagttttaaaattatgttttaaaatgtactatcatatgcttaccgtaacttgaaagtatttcgatttcttggctttatatatcttgtggaaaggac

SEQ ID NO: 4831 - DNA, 241 bp, synthetic construct
  misc_feature 1..241: note = promoter
  source 1..241: mol_type = other DNA
gagggcctatttcccatgattccttcatatttgcatatacgatacaaggctgttagagagataattggaattaatttgactgtaaacacaaagatattagtacaaaatacgtgacgtagaaagtaataatttcttgggtagtttgcagttttaaaattatgttttaaaatggcctatcatatgcttaccgtaacttgaaagtatttcgatttcttggctttatatatcttgtggaaaggac

SEQ ID NO: 4832 - DNA, 241 bp, synthetic construct
  misc_feature 1..241: note = promoter
  source 1..241: mol_type = other DNA
gagggcctatttcccatgattccttcatatttgcatatacgatacaaggctgttagagagataattggaattaatttgactgtaaacacaaagatattagtacaaaatacgtgacgtagaaagtaataatttcttgggtagtttgcagttttaaaattatgttttaaaatgggctatcatatgcttaccgtaacttgaaagtatttcgatttcttggctttatatatcttgtggaaaggac

SEQ ID NO: 4833 - DNA, 241 bp, synthetic construct
  misc_feature 1..241: note = promoter
  source 1..241: mol_type = other DNA
gagggcctatttcccatgattccttcatatttgcatatacgatacaaggctgttagagagataattggaattaatttgactgtaaacacaaagatattagtacaaaatacgtgacgtagaaagtaataatttcttgggtagtttgcagttttaaaattatgttttaaaatggtctatcatatgcttaccgtaacttgaaagtatttcgatttcttggctttatatatcttgtggaaaggac

SEQ ID NO: 4834 - DNA, 241 bp, synthetic construct
  misc_feature 1..241: note = promoter
  source 1..241: mol_type = other DNA
gagggcctatttcccatgattccttcatatttgcatatacgatacaaggctgttagagagataattggaattaatttgactgtaaacacaaagatattagtacaaaatacgtgacgtagaaagtaataatttcttgggtagtttgcagttttaaaattatgttttaaaatggaatatcatatgcttaccgtaacttgaaagtatttcgatttcttggctttatatatcttgtggaaaggac

SEQ ID NO: 4835 - DNA, 241 bp, synthetic construct
  misc_feature 1..241: note = promoter
  source 1..241: mol_type = other DNA
gagggcctatttcccatgattccttcatatttgcatatacgatacaaggctgttagagagataattggaattaatttgactgtaaacacaaagatattagtacaaaatacgtgacgtagaaagtaataatttcttgggtagtttgcagttttaaaattatgttttaaaatggagtatcatatgcttaccgtaacttgaaagtatttcgatttcttggctttatatatcttgtggaaaggac

SEQ ID NO: 4836 - DNA, 241 bp, synthetic construct
  misc_feature 1..241: note = promoter
  source 1..241: mol_type = other DNA
gagggcctatttcccatgattccttcatatttgcatatacgatacaaggctgttagagagataattggaattaatttgactgtaaacacaaagatattagtacaaaatacgtgacgtagaaagtaataatttcttgggtagtttgcagttttaaaattatgttttaaaatggattatcatatgcttaccgtaacttgaaagtatttcgatttcttggctttatatatcttgtggaaaggac

SEQ ID NO: 4837 - DNA, 241 bp, synthetic construct
  misc_feature 1..241: note = promoter
  source 1..241: mol_type = other DNA
gagggcctatttcccatgattccttcatatttgcatatacgatacaaggctgttagagagataattggaattaatttgactgtaaacacaaagatattagtacaaaatacgtgacgtagaaagtaataatttcttgggtagtttgcagttttaaaattatgttttaaaatggacaatcatatgcttaccgtaacttgaaagtatttcgatttcttggctttatatatcttgtggaaaggac

SEQ ID NO: 4838 - DNA, 241 bp, synthetic construct
  misc_feature 1..241: note = promoter
  source 1..241: mol_type = other DNA
gagggcctatttcccatgattccttcatatttgcatatacgatacaaggctgttagagagataattggaattaatttgactgtaaacacaaagatattagtacaaaatacgtgacgtagaaagtaataatttcttgggtagtttgcagttttaaaattatgttttaaaatggaccatcatatgcttaccgtaacttgaaagtatttcgatttcttggctttatatatcttgtggaaaggac

SEQ ID NO: 4839 - DNA, 241 bp, synthetic construct
  misc_feature 1..241: note = promoter
  source 1..241: mol_type = other DNA
gagggcctatttcccatgattccttcatatttgcatatacgatacaaggctgttagagagataattggaattaatttgactgtaaacacaaagatattagtacaaaatacgtgacgtagaaagtaataatttcttgggtagtttgcagttttaaaattatgttttaaaatggacgatcatatgcttaccgtaacttgaaagtatttcgatttcttggctttatatatcttgtggaaaggac

SEQ ID NO: 4840 - DNA, 241 bp, synthetic construct
  misc_feature 1..241: note = promoter
  source 1..241: mol_type = other DNA
gagggcctatttcccatgattccttcatatttgcatatacgatacaaggctgttagagagataattggaattaatttgactgtaaacacaaagatattagtacaaaatacgtgacgtagaaagtaataatttcttgggtagtttgcagttttaaaattatgttttaaaatggactctcatatgcttaccgtaacttgaaagtatttcgatttcttggctttatatatcttgtggaaaggac

SEQ ID NO: 4841 - DNA, 241 bp, synthetic construct
  misc_feature 1..241: note = promoter
  source 1..241: mol_type = other DNA
gagggcctatttcccatgattccttcatatttgcatatacgatacaaggctgttagagagataattggaattaatttgactgtaaacacaaagatattagtacaaaatacgtgacgtagaaagtaataatttcttgggtagtttgcagttttaaaattatgttttaaaatggactgtcatatgcttaccgtaacttgaaagtatttcgatttcttggctttatatatcttgtggaaaggac

SEQ ID NO: 4842 - DNA, 241 bp, synthetic construct
  misc_feature 1..241: note = promoter
  source 1..241: mol_type = other DNA
gagggcctatttcccatgattccttcatatttgcatatacgatacaaggctgttagagagataattggaattaatttgactgtaaacacaaagatattagtacaaaatacgtgacgtagaaagtaataatttcttgggtagtttgcagttttaaaattatgttttaaaatggactttcatatgcttaccgtaacttgaaagtatttcgatttcttggctttatatatcttgtggaaaggac

SEQ ID NO: 4843 - DNA, 241 bp, synthetic construct
  misc_feature 1..241: note = promoter
  source 1..241: mol_type = other DNA
gagggcctatttcccatgattccttcatatttgcatatacgatacaaggctgttagagagataattggaattaatttgactgtaaacacaaagatattagtacaaaatacgtgacgtagaaagtaataatttcttgggtagtttgcagttttaaaattatgttttaaaatggactaacatatgcttaccgtaacttgaaagtatttcgatttcttggctttatatatcttgtggaaaggac

SEQ ID NO: 4844 - DNA, 241 bp, synthetic construct
  misc_feature 1..241: note = promoter
  source 1..241: mol_type = other DNA
gagggcctatttcccatgattccttcatatttgcatatacgatacaaggctgttagagagataattggaattaatttgactgtaaacacaaagatattagtacaaaatacgtgacgtagaaagtaataatttcttgggtagtttgcagttttaaaattatgttttaaaatggactaccatatgcttaccgtaacttgaaagtatttcgatttcttggctttatatatcttgtggaaaggac

SEQ ID NO: 4845 - DNA, 241 bp, synthetic construct
  misc_feature 1..241: note = promoter
  source 1..241: mol_type = other DNA
gagggcctatttcccatgattccttcatatttgcatatacgatacaaggctgttagagagataattggaattaatttgactgtaaacacaaagatattagtacaaaatacgtgacgtagaaagtaataatttcttgggtagtttgcagttttaaaattatgttttaaaatggactagcatatgcttaccgtaacttgaaagtatttcgatttcttggctttatatatcttgtggaaaggac

SEQ ID NO: 4846 - DNA, 241 bp, synthetic construct
  misc_feature 1..241: note = promoter
  source 1..241: mol_type = other DNA
gagggcctatttcccatgattccttcatatttgcatatacgatacaaggctgttagagagataattggaattaatttgactgtaaacacaaagatattagtacaaaatacgtgacgtagaaagtaataatttcttgggtagtttgcagttttaaaattatgttttaaaatggactataatatgcttaccgtaacttgaaagtatttcgatttcttggctttatatatcttgtggaaaggac

SEQ ID NO: 4847 - DNA, 241 bp, synthetic construct
  misc_feature 1..241: note = promoter
  source 1..241: mol_type = other DNA
gagggcctatttcccatgattccttcatatttgcatatacgatacaaggctgttagagagataattggaattaatttgactgtaaacacaaagatattagtacaaaatacgtgacgtagaaagtaataatttcttgggtagtttgcagttttaaaattatgttttaaaatggactatgatatgcttaccgtaacttgaaagtatttcgatttcttggctttatatatcttgtggaaaggac

SEQ ID NO: 4848 - DNA, 241 bp, synthetic construct
  misc_feature 1..241: note = promoter
  source 1..241: mol_type = other DNA
gagggcctatttcccatgattccttcatatttgcatatacgatacaaggctgttagagagataattggaattaatttgactgtaaacacaaagatattagtacaaaatacgtgacgtagaaagtaataatttcttgggtagtttgcagttttaaaattatgttttaaaatggactattatatgcttaccgtaacttgaaagtatttcgatttcttggctttatatatcttgtggaaaggac

SEQ ID NO: 4849 - DNA, 241 bp, synthetic construct
  misc_feature 1..241: note = promoter
  source 1..241: mol_type = other DNA
gagggcctatttcccatgattccttcatatttgcatatacgatacaaggctgttagagagataattggaattaatttgactgtaaacacaaagatattagtacaaaatacgtgacgtagaaagtaataatttcttgggtagtttgcagttttaaaattatgttttaaaatggactatcctatgcttaccgtaacttgaaagtatttcgatttcttggctttatatatcttgtggaaaggac

SEQ ID NO: 4850 - DNA, 241 bp, synthetic construct
  misc_feature 1..241: note = promoter
  source 1..241: mol_type = other DNA
gagggcctatttcccatgattccttcatatttgcatatacgatacaaggctgttagagagataattggaattaatttgactgtaaacacaaagatattagtacaaaatacgtgacgtagaaagtaataatttcttgggtagtttgcagttttaaaattatgttttaaaatggactatcgtatgcttaccgtaacttgaaagtatttcgatttcttggctttatatatcttgtggaaaggac

SEQ ID NO: 4851 - DNA, 241 bp, synthetic construct
  misc_feature 1..241: note = promoter
  source 1..241: mol_type = other DNA
gagggcctatttcccatgattccttcatatttgcatatacgatacaaggctgttagagagataattggaattaatttgactgtaaacacaaagatattagtacaaaatacgtgacgtagaaagtaataatttcttgggtagtttgcagttttaaaattatgttttaaaatggactatcttatgcttaccgtaacttgaaagtatttcgatttcttggctttatatatcttgtggaaaggac

SEQ ID NO: 4852 - DNA, 241 bp, synthetic construct
  misc_feature 1..241: note = promoter
  source 1..241: mol_type = other DNA
gagggcctatttcccatgattccttcatatttgcatatacgatacaaggctgttagagagataattggaattaatttgactgtaaacacaaagatattagtacaaaatacgtgacgtagaaagtaataatttcttgggtagtttgcagttttaaaattatgttttaaaatggactatcaaatgcttaccgtaacttgaaagtatttcgatttcttggctttatatatcttgtggaaaggac

SEQ ID NO: 4853 - DNA, 241 bp, synthetic construct
  misc_feature 1..241: note = promoter
  source 1..241: mol_type = other DNA
gagggcctatttcccatgattccttcatatttgcatatacgatacaaggctgttagagagataattggaattaatttgactgtaaacacaaagatattagtacaaaatacgtgacgtagaaagtaataatttcttgggtagtttgcagttttaaaattatgttttaaaatggactatcacatgcttaccgtaacttgaaagtatttcgatttcttggctttatatatcttgtggaaaggac

SEQ ID NO: 4854 - DNA, 241 bp, synthetic construct
  misc_feature 1..241: note = promoter
  source 1..241: mol_type = other DNA
gagggcctatttcccatgattccttcatatttgcatatacgatacaaggctgttagagagataattggaattaatttgactgtaaacacaaagatattagtacaaaatacgtgacgtagaaagtaataatttcttgggtagtttgcagttttaaaattatgttttaaaatggactatcagatgcttaccgtaacttgaaagtatttcgatttcttggctttatatatcttgtggaaaggac

SEQ ID NO: 4855 - DNA, 241 bp, synthetic construct
  misc_feature 1..241: note = promoter
  source 1..241: mol_type = other DNA
gagggcctatttcccatgattccttcatatttgcatatacgatacaaggctgttagagagataattggaattaatttgactgtaaacacaaagatattagtacaaaatacgtgacgtagaaagtaataatttcttgggtagtttgcagttttaaaattatgttttaaaatggactatcatctgcttaccgtaacttgaaagtatttcgatttcttggctttatatatcttgtggaaaggac

SEQ ID NO: 4856 - DNA, 241 bp, synthetic construct
  misc_feature 1..241: note = promoter
  source 1..241: mol_type = other DNA
gagggcctatttcccatgattccttcatatttgcatatacgatacaaggctgttagagagataattggaattaatttgactgtaaacacaaagatattagtacaaaatacgtgacgtagaaagtaataatttcttgggtagtttgcagttttaaaattatgttttaaaatggactatcatgtgcttaccgtaacttgaaagtatttcgatttcttggctttatatatcttgtggaaaggac

SEQ ID NO: 4857 - DNA, 241 bp, synthetic construct
  misc_feature 1..241: note = promoter
  source 1..241: mol_type = other DNA
gagggcctatttcccatgattccttcatatttgcatatacgatacaaggctgttagagagataattggaattaatttgactgtaaacacaaagatattagtacaaaatacgtgacgtagaaagtaataatttcttgggtagtttgcagttttaaaattatgttttaaaatggactatcatttgcttaccgtaacttgaaagtatttcgatttcttggctttatatatcttgtggaaaggac

SEQ ID NO: 4858 - DNA, 241 bp, synthetic construct
  misc_feature 1..241: note = promoter
  source 1..241: mol_type = other DNA
gagggcctatttcccatgattccttcatatttgcatatacgatacaaggctgttagagagataattggaattaatttgactgtaaacacaaagatattagtacaaaatacgtgacgtagaaagtaataatttcttgggtagtttgcagttttaaaattatgttttaaaatggactatcataagcttaccgtaacttgaaagtatttcgatttcttggctttatatatcttgtggaaaggac

SEQ ID NO: 4859 - DNA, 241 bp, synthetic construct
  misc_feature 1..241: note = promoter
  source 1..241: mol_type = other DNA
gagggcctatttcccatgattccttcatatttgcatatacgatacaaggctgttagagagataattggaattaatttgactgtaaacacaaagatattagtacaaaatacgtgacgtagaaagtaataatttcttgggtagtttgcagttttaaaattatgttttaaaatggactatcatacgcttaccgtaacttgaaagtatttcgatttcttggctttatatatcttgtggaaaggac

SEQ ID NO: 4860 - DNA, 241 bp, synthetic construct
  misc_feature 1..241: note = promoter
  source 1..241: mol_type = other DNA
gagggcctatttcccatgattccttcatatttgcatatacgatacaaggctgttagagagataattggaattaatttgactgtaaacacaaagatattagtacaaaatacgtgacgtagaaagtaataatttcttgggtagtttgcagttttaaaattatgttttaaaatggactatcataggcttaccgtaacttgaaagtatttcgatttcttggctttatatatcttgtggaaaggac

SEQ ID NO: 4861 - DNA, 241 bp, synthetic construct
  misc_feature 1..241: note = promoter
  source 1..241: mol_type = other DNA
gagggcctatttcccatgattccttcatatttgcatatacgatacaaggctgttagagagataattggaattaatttgactgtaaacacaaagatattagtacaaaatacgtgacgtagaaagtaataatttcttgggtagtttgcagttttaaaattatgttttaaaatggactatcatatacttaccgtaacttgaaagtatttcgatttcttggctttatatatcttgtggaaaggac

SEQ ID NO: 4862 - DNA, 241 bp, synthetic construct
  misc_feature 1..241: note = promoter
  source 1..241: mol_type = other DNA
gagggcctatttcccatgattccttcatatttgcatatacgatacaaggctgttagagagataattggaattaatttgactgtaaacacaaagatattagtacaaaatacgtgacgtagaaagtaataatttcttgggtagtttgcagttttaaaattatgttttaaaatggactatcatatccttaccgtaacttgaaagtatttcgatttcttggctttatatatcttgtggaaaggac

SEQ ID NO: 4863 - DNA, 241 bp, synthetic construct
  misc_feature 1..241: note = promoter
  source 1..241: mol_type = other DNA
gagggcctatttcccatgattccttcatatttgcatatacgatacaaggctgttagagagataattggaattaatttgactgtaaacacaaagatattagtacaaaatacgtgacgtagaaagtaataatttcttgggtagtttgcagttttaaaattatgttttaaaatggactatcatattcttaccgtaacttgaaagtatttcgatttcttggctttatatatcttgtggaaaggac

SEQ ID NO: 4864 - DNA, 241 bp, synthetic construct
  misc_feature 1..241: note = promoter
  source 1..241: mol_type = other DNA
gagggcctatttcccatgattccttcatatttgcatatacgatacaaggctgttagagagataattggaattaatttgactgtaaacacaaagatattagtacaaaatacgtgacgtagaaagtaataatttcttgggtagtttgcagttttaaaattatgttttaaaatggactatcatatgattaccgtaacttgaaagtatttcgatttcttggctttatatatcttgtggaaaggac

SEQ ID NO: 4865 - DNA, 241 bp, synthetic construct
  misc_feature 1..241: note = promoter
  source 1..241: mol_type = other DNA
gagggcctatttcccatgattccttcatatttgcatatacgatacaaggctgttagagagataattggaattaatttgactgtaaacacaaagatattagtacaaaatacgtgacgtagaaagtaataatttcttgggtagtttgcagttttaaaattatgttttaaaatggactatcatatggttaccgtaacttgaaagtatttcgatttcttggctttatatatcttgtggaaaggac

SEQ ID NO: 4866 - DNA, 241 bp, synthetic construct
  misc_feature 1..241: note = promoter
  source 1..241: mol_type = other DNA
gagggcctatttcccatgattccttcatatttgcatatacgatacaaggctgttagagagataattggaattaatttgactgtaaacacaaagatattagtacaaaatacgtgacgtagaaagtaataatttcttgggtagtttgcagttttaaaattatgttttaaaatggactatcatatgtttaccgtaacttgaaagtatttcgatttcttggctttatatatcttgtggaaaggac

SEQ ID NO: 4867 - DNA, 241 bp, synthetic construct
  misc_feature 1..241: note = promoter
  source 1..241: mol_type = other DNA
gagggcctatttcccatgattccttcatatttgcatatacgatacaaggctgttagagagataattggaattaatttgactgtaaacacaaagatattagtacaaaatacgtgacgtagaaagtaataatttcttgggtagtttgcagttttaaaattatgttttaaaatggactatcatatgcataccgtaacttgaaagtatttcgatttcttggctttatatatcttgtggaaaggac

SEQ ID NO: 4868 - DNA, 241 bp, synthetic construct
  misc_feature 1..241: note = promoter
  source 1..241: mol_type = other DNA
gagggcctatttcccatgattccttcatatttgcatatacgatacaaggctgttagagagataattggaattaatttgactgtaaacacaaagatattagtacaaaatacgtgacgtagaaagtaataatttcttgggtagtttgcagttttaaaattatgttttaaaatggactatcatatgcctaccgtaacttgaaagtatttcgatttcttggctttatatatcttgtggaaaggac

SEQ ID NO: 4869 - DNA, 241 bp, synthetic construct
  misc_feature 1..241: note = promoter
  source 1..241: mol_type = other DNA
gagggcctatttcccatgattccttcatatttgcatatacgatacaaggctgttagagagataattggaattaatttgactgtaaacacaaagatattagtacaaaatacgtgacgtagaaagtaataatttcttgggtagtttgcagttttaaaattatgttttaaaatggactatcatatgcgtaccgtaacttgaaagtatttcgatttcttggctttatatatcttgtggaaaggac

SEQ ID NO: 4870 - DNA, 241 bp, synthetic construct
  misc_feature 1..241: note = promoter
  source 1..241: mol_type = other DNA
gagggcctatttcccatgattccttcatatttgcatatacgatacaaggctgttagagagataattggaattaatttgactgtaaacacaaagatattagtacaaaatacgtgacgtagaaagtaataatttcttgggtagtttgcagttttaaaattatgttttaaaatggactatcatatgctaaccgtaacttgaaagtatttcgatttcttggctttatatatcttgtggaaaggac

SEQ ID NO: 4871 - DNA, 241 bp, synthetic construct
  misc_feature 1..241: note = promoter
  source 1..241: mol_type = other DNA
gagggcctatttcccatgattccttcatatttgcatatacgatacaaggctgttagagagataattggaattaatttgactgtaaacacaaagatattagtacaaaatacgtgacgtagaaagtaataatttcttgggtagtttgcagttttaaaattatgttttaaaatggactatcatatgctcaccgtaacttgaaagtatttcgatttcttggctttatatatcttgtggaaaggac

SEQ ID NO: 4872 - DNA, 241 bp, synthetic construct
  misc_feature 1..241: note = promoter
  source 1..241: mol_type = other DNA
gagggcctatttcccatgattccttcatatttgcatatacgatacaaggctgttagagagataattggaattaatttgactgtaaacacaaagatattagtacaaaatacgtgacgtagaaagtaataatttcttgggtagtttgcagttttaaaattatgttttaaaatggactatcatatgctgaccgtaacttgaaagtatttcgatttcttggctttatatatcttgtggaaaggac

SEQ ID NO: 4873 - DNA, 241 bp, synthetic construct
  misc_feature 1..241: note = promoter
  source 1..241: mol_type = other DNA
gagggcctatttcccatgattccttcatatttgcatatacgatacaaggctgttagagagataattggaattaatttgactgtaaacacaaagatattagtacaaaatacgtgacgtagaaagtaataatttcttgggtagtttgcagttttaaaattatgttttaaaatggactatcatatgcttcccgtaacttgaaagtatttcgatttcttggctttatatatcttgtggaaaggac

SEQ ID NO: 4874 - DNA, 241 bp, synthetic construct
  misc_feature 1..241: note = promoter
  source 1..241: mol_type = other DNA
gagggcctatttcccatgattccttcatatttgcatatacgatacaaggctgttagagagataattggaattaatttgactgtaaacacaaagatattagtacaaaatacgtgacgtagaaagtaataatttcttgggtagtttgcagttttaaaattatgttttaaaatggactatcatatgcttgccgtaacttgaaagtatttcgatttcttggctttatatatcttgtggaaaggac

SEQ ID NO: 4875 - DNA, 241 bp, synthetic construct
  misc_feature 1..241: note = promoter
  source 1..241: mol_type = other DNA
gagggcctatttcccatgattccttcatatttgcatatacgatacaaggctgttagagagataattggaattaatttgactgtaaacacaaagatattagtacaaaatacgtgacgtagaaagtaataatttcttgggtagtttgcagttttaaaattatgttttaaaatggactatcatatgctttccgtaacttgaaagtatttcgatttcttggctttatatatcttgtggaaaggac

SEQ ID NO: 4876 - DNA, 241 bp, synthetic construct
  misc_feature 1..241: note = promoter
  source 1..241: mol_type = other DNA
gagggcctatttcccatgattccttcatatttgcatatacgatacaaggctgttagagagataattggaattaatttgactgtaaacacaaagatattagtacaaaatacgtgacgtagaaagtaataatttcttgggtagtttgcagttttaaaattatgttttaaaatggactatcatatgcttaacgtaacttgaaagtatttcgatttcttggctttatatatcttgtggaaaggac

SEQ ID NO: 4877 - DNA, 241 bp, synthetic construct
  misc_feature 1..241: note = promoter
  source 1..241: mol_type = other DNA
gagggcctatttcccatgattccttcatatttgcatatacgatacaaggctgttagagagataattggaattaatttgactgtaaacacaaagatattagtacaaaatacgtgacgtagaaagtaataatttcttgggtagtttgcagttttaaaattatgttttaaaatggactatcatatgcttagcgtaacttgaaagtatttcgatttcttggctttatatatcttgtggaaaggac

SEQ ID NO: 4878 - DNA, 241 bp, synthetic construct
  misc_feature 1..241: note = promoter
  source 1..241: mol_type = other DNA
gagggcctatttcccatgattccttcatatttgcatatacgatacaaggctgttagagagataattggaattaatttgactgtaaacacaaagatattagtacaaaatacgtgacgtagaaagtaataatttcttgggtagtttgcagttttaaaattatgttttaaaatggactatcatatgcttatcgtaacttgaaagtatttcgatttcttggctttatatatcttgtggaaaggac

SEQ ID NO: 4879 - DNA, 241 bp, synthetic construct
  misc_feature 1..241: note = promoter
  source 1..241: mol_type = other DNA
gagggcctatttcccatgattccttcatatttgcatatacgatacaaggctgttagagagataattggaattaatttgactgtaaacacaaagatattagtacaaaatacgtgacgtagaaagtaataatttcttgggtagtttgcagttttaaaattatgttttaaaatggactatcatatgcttacagtaacttgaaagtatttcgatttcttggctttatatatcttgtggaaaggac

SEQ ID NO: 4880 - DNA, 241 bp, synthetic construct
  misc_feature 1..241: note = promoter
  source 1..241: mol_type = other DNA
gagggcctatttcccatgattccttcatatttgcatatacgatacaaggctgttagagagataattggaattaatttgactgtaaacacaaagatattagtacaaaatacgtgacgtagaaagtaataatttcttgggtagtttgcagttttaaaattatgttttaaaatggactatcatatgcttacggtaacttgaaagtatttcgatttcttggctttatatatcttgtggaaaggac

SEQ ID NO: 4881 - DNA, 241 bp, synthetic construct
  misc_feature 1..241: note = promoter
  source 1..241: mol_type = other DNA
gagggcctatttcccatgattccttcatatttgcatatacgatacaaggctgttagagagataattggaattaatttgactgtaaacacaaagatattagtacaaaatacgtgacgtagaaagtaataatttcttgggtagtttgcagttttaaaattatgttttaaaatggactatcatatgcttactgtaacttgaaagtatttcgatttcttggctttatatatcttgtggaaaggac

SEQ ID NO: 4882 - DNA, 241 bp, synthetic construct
  misc_feature 1..241: note = promoter
  source 1..241: mol_type = other DNA
gagggcctatttcccatgattccttcatatttgcatatacgatacaaggctgttagagagataattggaattaatttgactgtaaacacaaagatattagtacaaaatacgtgacgtagaaagtaataatttcttgggtagtttgcagttttaaaattatgttttaaaatggactatcatatgcttaccataacttgaaagtatttcgatttcttggctttatatatcttgtggaaaggac

SEQ ID NO: 4883 - DNA, 241 bp, synthetic construct
  misc_feature 1..241: note = promoter
  source 1..241: mol_type = other DNA
gagggcctatttcccatgattccttcatatttgcatatacgatacaaggctgttagagagataattggaattaatttgactgtaaacacaaagatattagtacaaaatacgtgacgtagaaagtaataatttcttgggtagtttgcagttttaaaattatgttttaaaatggactatcatatgcttaccctaacttgaaagtatttcgatttcttggctttatatatcttgtggaaaggac

SEQ ID NO: 4884 - DNA, 241 bp, synthetic construct
  misc_feature 1..241: note = promoter
  source 1..241: mol_type = other DNA
gagggcctatttcccatgattccttcatatttgcatatacgatacaaggctgttagagagataattggaattaatttgactgtaaacacaaagatattagtacaaaatacgtgacgtagaaagtaataatttcttgggtagtttgcagttttaaaattatgttttaaaatggactatcatatgcttaccttaacttgaaagtatttcgatttcttggctttatatatcttgtggaaaggac

SEQ ID NO: 4885 - DNA, 241 bp, synthetic construct
  misc_feature 1..241: note = promoter
  source 1..241: mol_type = other DNA
gagggcctatttcccatgattccttcatatttgcatatacgatacaaggctgttagagagataattggaattaatttgactgtaaacacaaagatattagtacaaaatacgtgacgtagaaagtaataatttcttgggtagtttgcagttttaaaattatgttttaaaatggactatcatatgcttaccgaaacttgaaagtatttcgatttcttggctttatatatcttgtggaaaggac

SEQ ID NO: 4886 - DNA, 241 bp, synthetic construct
  misc_feature 1..241: note = promoter
  source 1..241: mol_type = other DNA
gagggcctatttcccatgattccttcatatttgcatatacgatacaaggctgttagagagataattggaattaatttgactgtaaacacaaagatattagtacaaaatacgtgacgtagaaagtaataatttcttgggtagtttgcagttttaaaattatgttttaaaatggactatcatatgcttaccgcaacttgaaagtatttcgatttcttggctttatatatcttgtggaaaggac

SEQ ID NO: 4887 - DNA, 241 bp, synthetic construct
  misc_feature 1..241: note = promoter
  source 1..241: mol_type = other DNA
gagggcctatttcccatgattccttcatatttgcatatacgatacaaggctgttagagagataattggaattaatttgactgtaaacacaaagatattagtacaaaatacgtgacgtagaaagtaataatttcttgggtagtttgcagttttaaaattatgttttaaaatggactatcatatgcttaccggaacttgaaagtatttcgatttcttggctttatatatcttgtggaaaggac

SEQ ID NO: 4888 - DNA, 241 bp, synthetic construct
  misc_feature 1..241: note = promoter
  source 1..241: mol_type = other DNA
gagggcctatttcccatgattccttcatatttgcatatacgatacaaggctgttagagagataattggaattaatttgactgtaaacacaaagatattagtacaaaatacgtgacgtagaaagtaataatttcttgggtagtttgcagttttaaaattatgttttaaaatggactatcatatgcttaccgtcacttgaaagtatttcgatttcttggctttatatatcttgtggaaaggac

SEQ ID NO: 4889 - DNA, 241 bp, synthetic construct
  misc_feature 1..241: note = promoter
  source 1..241: mol_type = other DNA
gagggcctatttcccatgattccttcatatttgcatatacgatacaaggctgttagagagataattggaattaatttgactgtaaacacaaagatattagtacaaaatacgtgacgtagaaagtaataatttcttgggtagtttgcagttttaaaattatgttttaaaatggactatcatatgcttaccgtgacttgaaagtatttcgatttcttggctttatatatcttgtggaaaggac

SEQ ID NO: 4890 - DNA, 241 bp, synthetic construct
  misc_feature 1..241: note = promoter
  source 1..241: mol_type = other DNA
gagggcctatttcccatgattccttcatatttgcatatacgatacaaggctgttagagagataattggaattaatttgactgtaaacacaaagatattagtacaaaatacgtgacgtagaaagtaataatttcttgggtagtttgcagttttaaaattatgttttaaaatggactatcatatgcttaccgttacttgaaagtatttcgatttcttggctttatatatcttgtggaaaggac

SEQ ID NO: 4891 - DNA, 241 bp, synthetic construct
  misc_feature 1..241: note = promoter
  source 1..241: mol_type = other DNA
gagggcctatttcccatgattccttcatatttgcatatacgatacaaggctgttagagagataattggaattaatttgactgtaaacacaaagatattagtacaaaatacgtgacgtagaaagtaataatttcttgggtagtttgcagttttaaaattatgttttaaaatggactatcatatgcttaccgtaccttgaaagtatttcgatttcttggctttatatatcttgtggaaaggac

SEQ ID NO: 4892 - DNA, 241 bp, synthetic construct
  misc_feature 1..241: note = promoter
  source 1..241: mol_type = other DNA
gagggcctatttcccatgattccttcatatttgcatatacgatacaaggctgttagagagataattggaattaatttgactgtaaacacaaagatattagtacaaaatacgtgacgtagaaagtaataatttcttgggtagtttgcagttttaaaattatgttttaaaatggactatcatatgcttaccgtagcttgaaagtatttcgatttcttggctttatatatcttgtggaaaggac

SEQ ID NO: 4893 - DNA, 241 bp, synthetic construct
  misc_feature 1..241: note = promoter
  source 1..241: mol_type = other DNA
gagggcctatttcccatgattccttcatatttgcatatacgatacaaggctgttagagagataattggaattaatttgactgtaaacacaaagatattagtacaaaatacgtgacgtagaaagtaataatttcttgggtagtttgcagttttaaaattatgttttaaaatggactatcatatgcttaccgtatcttgaaagtatttcgatttcttggctttatatatcttgtggaaaggac

SEQ ID NO: 4894 - DNA, 241 bp, synthetic construct
  misc_feature 1..241: note = promoter
  source 1..241: mol_type = other DNA
gagggcctatttcccatgattccttcatatttgcatatacgatacaaggctgttagagagataattggaattaatttgactgtaaacacaaagatattagtacaaaatacgtgacgtagaaagtaataatttcttgggtagtttgcagttttaaaattatgttttaaaatggactatcatatgcttaccgtaaattgaaagtatttcgatttcttggctttatatatcttgtggaaaggac

SEQ ID NO: 4895 - DNA, 241 bp, synthetic construct
  misc_feature 1..241: note = promoter
  source 1..241: mol_type = other DNA
gagggcctatttcccatgattccttcatatttgcatatacgatacaaggctgttagagagataattggaattaatttgactgtaaacacaaagatattagtacaaaatacgtgacgtagaaagtaataatttcttgggtagtttgcagttttaaaattatgttttaaaatggactatcatatgcttaccgtaagttgaaagtatttcgatttcttggctttatatatcttgtggaaaggac

SEQ ID NO: 4896 - DNA, 241 bp, synthetic construct
  misc_feature 1..241: note = promoter
  source 1..241: mol_type = other DNA
gagggcctatttcccatgattccttcatatttgcatatacgatacaaggctgttagagagataattggaattaatttgactgtaaacacaaagatattagtacaaaatacgtgacgtagaaagtaataatttcttgggtagtttgcagttttaaaattatgttttaaaatggactatcatatgcttaccgtaatttgaaagtatttcgatttcttggctttatatatcttgtggaaaggac

SEQ ID NO: 4897 - DNA, 241 bp, synthetic construct
  misc_feature 1..241: note = promoter
  source 1..241: mol_type = other DNA
gagggcctatttcccatgattccttcatatttgcatatacgatacaaggctgttagagagataattggaattaatttgactgtaaacacaaagatattagtacaaaatacgtgacgtagaaagtaataatttcttgggtagtttgcagttttaaaattatgttttaaaatggactatcatatgcttaccgtaacatgaaagtatttcgatttcttggctttatatatcttgtggaaaggac

SEQ ID NO: 4898 - DNA, 241 bp, synthetic construct
  misc_feature 1..241: note = promoter
  source 1..241: mol_type = other DNA
gagggcctatttcccatgattccttcatatttgcatatacgatacaaggctgttagagagataattggaattaatttgactgtaaacacaaagatattagtacaaaatacgtgacgtagaaagtaataatttcttgggtagtttgcagttttaaaattatgttttaaaatggactatcatatgcttaccgtaacctgaaagtatttcgatttcttggctttatatatcttgtggaaaggac

SEQ ID NO: 4899 - DNA, 241 bp, synthetic construct
  misc_feature 1..241: note = promoter
  source 1..241: mol_type = other DNA
gagggcctatttcccatgattccttcatatttgcatatacgatacaaggctgttagagagataattggaattaatttgactgtaaacacaaagatattagtacaaaatacgtgacgtagaaagtaataatttcttgggtagtttgcagttttaaaattatgttttaaaatggactatcatatgcttaccgtaacgtgaaagtatttcgatttcttggctttatatatcttgtggaaaggac

SEQ ID NO: 4900 - DNA, 241 bp, synthetic construct
  misc_feature 1..241: note = promoter
  source 1..241: mol_type = other DNA
gagggcctatttcccatgattccttcatatttgcatatacgatacaaggctgttagagagataattggaattaatttgactgtaaacacaaagatattagtacaaaatacgtgacgtagaaagtaataatttcttgggtagtttgcagttttaaaattatgttttaaaatggactatcatatgcttaccgtaactagaaagtatttcgatttcttggctttatatatcttgtggaaaggac

SEQ ID NO: 4901 - DNA, 241 bp, synthetic construct
  misc_feature 1..241: note = promoter
  source 1..241: mol_type = other DNA
gagggcctatttcccatgattccttcatatttgcatatacgatacaaggctgttagagagataattggaattaatttgactgtaaacacaaagatattagtacaaaatacgtgacgtagaaagtaataatttcttgggtagtttgcagttttaaaattatgttttaaaatggactatcatatgcttaccgtaactcgaaagtatttcgatttcttggctttatatatcttgtggaaaggac

SEQ ID NO: 4902 - DNA, 241 bp, synthetic construct
  misc_feature 1..241: note = promoter
  source 1..241: mol_type = other DNA
gagggcctatttcccatgattccttcatatttgcatatacgatacaaggctgttagagagataattggaattaatttgactgtaaacacaaagatattagtacaaaatacgtgacgtagaaagtaataatttcttgggtagtttgcagttttaaaattatgttttaaaatggactatcatatgcttaccgtaactggaaagtatttcgatttcttggctttatatatcttgtggaaaggac

SEQ ID NO: 4903 - DNA, 241 bp, synthetic construct
  misc_feature 1..241: note = promoter
  source 1..241: mol_type = other DNA
gagggcctatttcccatgattccttcatatttgcatatacgatacaaggctgttagagagataattggaattaatttgactgtaaacacaaagatattagtacaaaatacgtgacgtagaaagtaataatttcttgggtagtttgcagttttaaaattatgttttaaaatggactatcatatgcttaccgtaacttaaaagtatttcgatttcttggctttatatatcttgtggaaaggac

SEQ ID NO: 4904 - DNA, 241 bp, synthetic construct
  misc_feature 1..241: note = promoter
  source 1..241: mol_type = other DNA
gagggcctatttcccatgattccttcatatttgcatatacgatacaaggctgttagagagataattggaattaatttgactgtaaacacaaagatattagtacaaaatacgtgacgtagaaagtaataatttcttgggtagtttgcagttttaaaattatgttttaaaatggactatcatatgcttaccgtaacttcaaagtatttcgatttcttggctttatatatcttgtggaaaggac

SEQ ID NO: 4905 - DNA, 241 bp, synthetic construct
  misc_feature 1..241: note = promoter
  source 1..241: mol_type = other DNA
gagggcctatttcccatgattccttcatatttgcatatacgatacaaggctgttagagagataattggaattaatttgactgtaaacacaaagatattagtacaaaatacgtgacgtagaaagtaataatttcttgggtagtttgcagttttaaaattatgttttaaaatggactatcatatgcttaccgtaactttaaagtatttcgatttcttggctttatatatcttgtggaaaggac

SEQ ID NO: 4906 - DNA, 241 bp, synthetic construct
  misc_feature 1..241: note = promoter
  source 1..241: mol_type = other DNA
gagggcctatttcccatgattccttcatatttgcatatacgatacaaggctgttagagagataattggaattaatttgactgtaaacacaaagatattagtacaaaatacgtgacgtagaaagtaataatttcttgggtagtttgcagttttaaaattatgttttaaaatggactatcatatgcttaccgtaacttgcaagtatttcgatttcttggctttatatatcttgtggaaaggac

SEQ ID NO: 4907 - DNA, 241 bp, synthetic construct
  misc_feature 1..241: note = promoter
  source 1..241: mol_type = other DNA
gagggcctatttcccatgattccttcatatttgcatatacgatacaaggctgttagagagataattggaattaatttgactgtaaacacaaagatattagtacaaaatacgtgacgtagaaagtaataatttcttgggtagtttgcagttttaaaattatgttttaaaatggactatcatatgcttaccgtaacttggaagtatttcgatttcttggctttatatatcttgtggaaaggac

SEQ ID NO: 4908 - DNA, 241 bp, synthetic construct
  misc_feature 1..241: note = promoter
  source 1..241: mol_type = other DNA
gagggcctatttcccatgattccttcatatttgcatatacgatacaaggctgttagagagataattggaattaatttgactgtaaacacaaagatattagtacaaaatacgtgacgtagaaagtaataatttcttgggtagtttgcagttttaaaattatgttttaaaatggactatcatatgcttaccgtaacttgtaagtatttcgatttcttggctttatatatcttgtggaaaggac

SEQ ID NO: 4909 - DNA, 241 bp, synthetic construct
  misc_feature 1..241: note = promoter
  source 1..241: mol_type = other DNA
gagggcctatttcccatgattccttcatatttgcatatacgatacaaggctgttagagagataattggaattaatttgactgtaaacacaaagatattagtacaaaatacgtgacgtagaaagtaataatttcttgggtagtttgcagttttaaaattatgttttaaaatggactatcatatgcttaccgtaacttgacagtatttcgatttcttggctttatatatcttgtggaaaggac

SEQ ID NO: 4910 - DNA, 241 bp, synthetic construct
  misc_feature 1..241: note = promoter
  source 1..241: mol_type = other DNA
gagggcctatttcccatgattccttcatatttgcatatacgatacaaggctgttagagagataattggaattaatttgactgtaaacacaaagatattagtacaaaatacgtgacgtagaaagtaataatttcttgggtagtttgcagttttaaaattatgttttaaaatggactatcatatgcttaccgtaacttgagagtatttcgatttcttggctttatatatcttgtggaaaggac

SEQ ID NO: 4911 - DNA, 241 bp, synthetic construct
  misc_feature 1..241: note = promoter
  source 1..241: mol_type = other DNA
gagggcctatttcccatgattccttcatatttgcatatacgatacaaggctgttagagagataattggaattaatttgactgtaaacacaaagatattagtacaaaatacgtgacgtagaaagtaataatttcttgggtagtttgcagttttaaaattatgttttaaaatggactatcatatgcttaccgtaacttgatagtatttcgatttcttggctttatatatcttgtggaaaggac

SEQ ID NO: 4912 - DNA, 241 bp, synthetic construct
  misc_feature 1..241: note = promoter
  source 1..241: mol_type = other DNA
gagggcctatttcccatgattccttcatatttgcatatacgatacaaggctgttagagagataattggaattaatttgactgtaaacacaaagatattagtacaaaatacgtgacgtagaaagtaataatttcttgggtagtttgcagttttaaaattatgttttaaaatggactatcatatgcttaccgtaacttgaacgtatttcgatttcttggctttatatatcttgtggaaaggac

SEQ ID NO: 4913 - DNA, 241 bp, synthetic construct
  misc_feature 1..241: note = promoter
  source 1..241: mol_type = other DNA
gagggcctatttcccatgattccttcatatttgcatatacgatacaaggctgttagagagataattggaattaatttgactgtaaacacaaagatattagtacaaaatacgtgacgtagaaagtaataatttcttgggtagtttgcagttttaaaattatgttttaaaatggactatcatatgcttaccgtaacttgaaggtatttcgatttcttggctttatatatcttgtggaaaggac

SEQ ID NO: 4914 - DNA, 241 bp, synthetic construct
  misc_feature 1..241: note = promoter
  source 1..241: mol_type = other DNA
gagggcctatttcccatgattccttcatatttgcatatacgatacaaggctgttagagagataattggaattaatttgactgtaaacacaaagatattagtacaaaatacgtgacgtagaaagtaataatttcttgggtagtttgcagttttaaaattatgttttaaaatggactatcatatgcttaccgtaacttgaatgtatttcgatttcttggctttatatatcttgtggaaaggac

SEQ ID NO: 4915 - DNA, 241 bp, synthetic construct
  misc_feature 1..241: note = promoter
  source 1..241: mol_type = other DNA
gagggcctatttcccatgattccttcatatttgcatatacgatacaaggctgttagagagataattggaattaatttgactgtaaacacaaagatattagtacaaaatacgtgacgtagaaagtaataatttcttgggtagtttgcagttttaaaattatgttttaaaatggactatcatatgcttaccgtaacttgaaaatatttcgatttcttggctttatatatcttgtggaaaggac

SEQ ID NO: 4916 - DNA, 241 bp, synthetic construct
  misc_feature 1..241: note = promoter
  source 1..241: mol_type = other DNA
gagggcctatttcccatgattccttcatatttgcatatacgatacaaggctgttagagagataattggaattaatttgactgtaaacacaaagatattagtacaaaatacgtgacgtagaaagtaataatttcttgggtagtttgcagttttaaaattatgttttaaaatggactatcatatgcttaccgtaacttgaaactatttcgatttcttggctttatatatcttgtggaaaggac

SEQ ID NO: 4917 - DNA, 241 bp, synthetic construct
  misc_feature 1..241: note = promoter
  source 1..241: mol_type = other DNA
gagggcctatttcccatgattccttcatatttgcatatacgatacaaggctgttagagagataattggaattaatttgactgtaaacacaaagatattagtacaaaatacgtgacgtagaaagtaataatttcttgggtagtttgcagttttaaaattatgttttaaaatggactatcatatgcttaccgtaacttgaaattatttcgatttcttggctttatatatcttgtggaaaggac

SEQ ID NO: 4918 - DNA, 241 bp, synthetic construct
  misc_feature 1..241: note = promoter
  source 1..241: mol_type = other DNA
gagggcctatttcccatgattccttcatatttgcatatacgatacaaggctgttagagagataattggaattaatttgactgtaaacacaaagatattagtacaaaatacgtgacgtagaaagtaataatttcttgggtagtttgcagttttaaaattatgttttaaaatggactatcatatgcttaccgtaacttgaaagaatttcgatttcttggctttatatatcttgtggaaaggac

SEQ ID NO: 4919 - DNA, 241 bp, synthetic construct
  misc_feature 1..241: note = promoter
  source 1..241: mol_type = other DNA
gagggcctatttcccatgattccttcatatttgcatatacgatacaaggctgttagagagataattggaattaatttgactgtaaacacaaagatattagtacaaaatacgtgacgtagaaagtaataatttcttgggtagtttgcagttttaaaattatgttttaaaatggactatcatatgcttaccgtaacttgaaagcatttcgatttcttggctttatatatcttgtggaaaggac

SEQ ID NO: 4920 - DNA, 241 bp, synthetic construct
  misc_feature 1..241: note = promoter
  source 1..241: mol_type = other DNA
gagggcctatttcccatgattccttcatatttgcatatacgatacaaggctgttagagagataattggaattaatttgactgtaaacacaaagatattagtacaaaatacgtgacgtagaaagtaataatttcttgggtagtttgcagttttaaaattatgttttaaaatggactatcatatgcttaccgtaacttgaaaggatttcgatttcttggctttatatatcttgtggaaaggac

SEQ ID NO: 4921 - DNA, 241 bp, synthetic construct
  misc_feature 1..241: note = promoter
  source 1..241: mol_type = other DNA
gagggcctatttcccatgattccttcatatttgcatatacgatacaaggctgttagagagataattggaattaatttgactgtaaacacaaagatattagtacaaaatacgtgacgtagaaagtaataatttcttgggtagtttgcagttttaaaattatgttttaaaatggactatcatatgcttaccgtaacttgaaagtctttcgatttcttggctttatatatcttgtggaaaggac

SEQ ID NO: 4922 - DNA, 241 bp, synthetic construct
  misc_feature 1..241: note = promoter
  source 1..241: mol_type = other DNA
gagggcctatttcccatgattccttcatatttgcatatacgatacaaggctgttagagagataattggaattaatttgactgtaaacacaaagatattagtacaaaatacgtgacgtagaaagtaataatttcttgggtagtttgcagttttaaaattatgttttaaaatggactatcatatgcttaccgtaacttgaaagtgtttcgatttcttggctttatatatcttgtggaaaggac

SEQ ID NO: 4923 - DNA, 241 bp, synthetic construct
  misc_feature 1..241: note = promoter
  source 1..241: mol_type = other DNA
gagggcctatttcccatgattccttcatatttgcatatacgatacaaggctgttagagagataattggaattaatttgactgtaaacacaaagatattagtacaaaatacgtgacgtagaaagtaataatttcttgggtagtttgcagttttaaaattatgttttaaaatggactatcatatgcttaccgtaacttgaaagtttttcgatttcttggctttatatatcttgtggaaaggac

SEQ ID NO: 4924 - DNA, 241 bp, synthetic construct
  misc_feature 1..241: note = promoter
  source 1..241: mol_type = other DNA
gagggcctatttcccatgattccttcatatttgcatatacgatacaaggctgttagagagataattggaattaatttgactgtaaacacaaagatattagtacaaaatacgtgacgtagaaagtaataatttcttgggtagtttgcagttttaaaattatgttttaaaatggactatcatatgcttaccgtaacttgaaagtaattcgatttcttggctttatatatcttgtggaaaggac

SEQ ID NO: 4925 - DNA, 241 bp, synthetic construct
  misc_feature 1..241: note = promoter
  source 1..241: mol_type = other DNA
gagggcctatttcccatgattccttcatatttgcatatacgatacaaggctgttagagagataattggaattaatttgactgtaaacacaaagatattagtacaaaatacgtgacgtagaaagtaataatttcttgggtagtttgcagttttaaaattatgttttaaaatggactatcatatgcttaccgtaacttgaaagtacttcgatttcttggctttatatatcttgtggaaaggac

SEQ ID NO: 4926 - DNA, 241 bp, synthetic construct
  misc_feature 1..241: note = promoter
  source 1..241: mol_type = other DNA
gagggcctatttcccatgattccttcatatttgcatatacgatacaaggctgttagagagataattggaattaatttgactgtaaacacaaagatattagtacaaaatacgtgacgtagaaagtaataatttcttgggtagtttgcagttttaaaattatgttttaaaatggactatcatatgcttaccgtaacttgaaagtagttcgatttcttggctttatatatcttgtggaaaggac

SEQ ID NO: 4927 - DNA, 241 bp, synthetic construct
  misc_feature 1..241: note = promoter
  source 1..241: mol_type = other DNA
gagggcctatttcccatgattccttcatatttgcatatacgatacaaggctgttagagagataattggaattaatttgactgtaaacacaaagatattagtacaaaatacgtgacgtagaaagtaataatttcttgggtagtttgcagttttaaaattatgttttaaaatggactatcatatgcttaccgtaacttgaaagtatatcgatttcttggctttatatatcttgtggaaaggac

SEQ ID NO: 4928 - DNA, 241 bp, synthetic construct
  misc_feature 1..241: note = promoter
  source 1..241: mol_type = other DNA
gagggcctatttcccatgattccttcatatttgcatatacgatacaaggctgttagagagataattggaattaatttgactgtaaacacaaagatattagtacaaaatacgtgacgtagaaagtaataatttcttgggtagtttgcagttttaaaattatgttttaaaatggactatcatatgcttaccgtaacttgaaagtatctcgatttcttggctttatatatcttgtggaaaggac

SEQ ID NO: 4929 - DNA, 241 bp, synthetic construct
  misc_feature 1..241: note = promoter
  source 1..241: mol_type = other DNA
gagggcctatttcccatgattccttcatatttgcatatacgatacaaggctgttagagagataattggaattaatttgactgtaaacacaaagatattagtacaaaatacgtgacgtagaaagtaataatttcttgggtagtttgcagttttaaaattatgttttaaaatggactatcatatgcttaccgtaacttgaaagtatgtcgatttcttggctttatatatcttgtggaaaggac

SEQ ID NO: 4930 - DNA, 241 bp, synthetic construct
  misc_feature 1..241: note = promoter
  source 1..241: mol_type = other DNA
gagggcctatttcccatgattccttcatatttgcatatacgatacaaggctgttagagagataattggaattaatttgactgtaaacacaaagatattagtacaaaatacgtgacgtagaaagtaataatttcttgggtagtttgcagttttaaaattatgttttaaaatggactatcatatgcttaccgtaacttgaaagtattacgatttcttggctttatatatcttgtggaaaggac

SEQ ID NO: 4931 - DNA, 241 bp, synthetic construct
  misc_feature 1..241: note = promoter
  source 1..241: mol_type = other DNA
gagggcctatttcccatgattccttcatatttgcatatacgatacaaggctgttagagagataattggaattaatttgactgtaaacacaaagatattagtacaaaatacgtgacgtagaaagtaataatttcttgggtagtttgcagttttaaaattatgttttaaaatggactatcatatgcttaccgtaacttgaaagtattccgatttcttggctttatatatcttgtggaaaggac

SEQ ID NO: 4932 - DNA, 241 bp, synthetic construct
  misc_feature 1..241: note = promoter
  source 1..241: mol_type = other DNA
gagggcctatttcccatgattccttcatatttgcatatacgatacaaggctgttagagagataattggaattaatttgactgtaaacacaaagatattagtacaaaatacgtgacgtagaaagtaataatttcttgggtagtttgcagttttaaaattatgttttaaaatggactatcatatgcttaccgtaacttgaaagtattgcgatttcttggctttatatatcttgtggaaaggac

SEQ ID NO: 4933 - DNA, 241 bp, synthetic construct
  misc_feature 1..241: note = promoter
  source 1..241: mol_type = other DNA
gagggcctatttcccatgattccttcatatttgcatatacgatacaaggctgttagagagataattggaattaatttgactgtaaacacaaagatattagtacaaaatacgtgacgtagaaagtaataatttcttgggtagtttgcagttttaaaattatgttttaaaatggactatcatatgcttaccgtaacttgaaagtatttagatttcttggctttatatatcttgtggaaaggac

SEQ ID NO: 4934 - DNA, 241 bp, synthetic construct
  misc_feature 1..241: note = promoter
  source 1..241: mol_type = other DNA
gagggcctatttcccatgattccttcatatttgcatatacgatacaaggctgttagagagataattggaattaatttgactgtaaacacaaagatattagtacaaaatacgtgacgtagaaagtaataatttcttgggtagtttgcagttttaaaattatgttttaaaatggactatcatatgcttaccgtaacttgaaagtatttggatttcttggctttatatatcttgtggaaaggac

SEQ ID NO: 4935 - DNA, 241 bp, synthetic construct
  misc_feature 1..241: note = promoter
  source 1..241: mol_type = other DNA
gagggcctatttcccatgattccttcatatttgcatatacgatacaaggctgttagagagataattggaattaatttgactgtaaacacaaagatattagtacaaaatacgtgacgtagaaagtaataatttcttgggtagtttgcagttttaaaattatgttttaaaatggactatcatatgcttaccgtaacttgaaagtattttgatttcttggctttatatatcttgtggaaaggac

SEQ ID NO: 4936 - DNA, 241 bp, synthetic construct
  misc_feature 1..241: note = promoter
  source 1..241: mol_type = other DNA
gagggcctatttcccatgattccttcatatttgcatatacgatacaaggctgttagagagataattggaattaatttgactgtaaacacaaagatattagtacaaaatacgtgacgtagaaagtaataatttcttgggtagtttgcagttttaaaattatgttttaaaatggactatcatatgcttaccgtaacttgaaagtatttcaatttcttggctttatatatcttgtggaaaggac

SEQ ID NO: 4937 - DNA, 241 bp, synthetic construct
  misc_feature 1..241: note = promoter
  source 1..241: mol_type = other DNA
gagggcctatttcccatgattccttcatatttgcatatacgatacaaggctgttagagagataattggaattaatttgactgtaaacacaaagatattagtacaaaatacgtgacgtagaaagtaataatttcttgggtagtttgcagttttaaaattatgttttaaaatggactatcatatgcttaccgtaacttgaaagtatttccatttcttggctttatatatcttgtggaaaggac

SEQ ID NO: 4938 - DNA, 241 bp, synthetic construct
  misc_feature 1..241: note = promoter
  source 1..241: mol_type = other DNA
gagggcctatttcccatgattccttcatatttgcatatacgatacaaggctgttagagagataattggaattaatttgactgtaaacacaaagatattagtacaaaatacgtgacgtagaaagtaataatttcttgggtagtttgcagttttaaaattatgttttaaaatggactatcatatgcttaccgtaacttgaaagtatttctatttcttggctttatatatcttgtggaaaggac

SEQ ID NO: 4939 - DNA, 241 bp, synthetic construct
  misc_feature 1..241: note = promoter
  source 1..241: mol_type = other DNA
gagggcctatttcccatgattccttcatatttgcatatacgatacaaggctgttagagagataattggaattaatttgactgtaaacacaaagatattagtacaaaatacgtgacgtagaaagtaataatttcttgggtagtttgcagttttaaaattatgttttaaaatggactatcatatgcttaccgtaacttgaaagtatttcgctttcttggctttatatatcttgtggaaaggac

SEQ ID NO: 4940 - DNA, 241 bp, synthetic construct
  misc_feature 1..241: note = promoter
  source 1..241: mol_type = other DNA
gagggcctatttcccatgattccttcatatttgcatatacgatacaaggctgttagagagataattggaattaatttgactgtaaacacaaagatattagtacaaaatacgtgacgtagaaagtaataatttcttgggtagtttgcagttttaaaattatgttttaaaatggactatcatatgcttaccgtaacttgaaagtatttcggtttcttggctttatatatcttgtggaaaggac

SEQ ID NO: 4941 - DNA, 241 bp, synthetic construct
  misc_feature 1..241: note = promoter
  source 1..241: mol_type = other DNA
gagggcctatttcccatgattccttcatatttgcatatacgatacaaggctgttagagagataattggaattaatttgactgtaaacacaaagatattagtacaaaatacgtgacgtagaaagtaataatttcttgggtagtttgcagttttaaaattatgttttaaaatggactatcatatgcttaccgtaacttgaaagtatttcgttttcttggctttatatatcttgtggaaaggac

SEQ ID NO: 4942 - DNA, 241 bp, synthetic construct
  misc_feature 1..241: note = promoter
  source 1..241: mol_type = other DNA
gagggcctatttcccatgattccttcatatttgcatatacgatacaaggctgttagagagataattggaattaatttgactgtaaacacaaagatattagtacaaaatacgtgacgtagaaagtaataatttcttgggtagtttgcagttttaaaattatgttttaaaatggactatcatatgcttaccgtaacttgaaagtatttcgaattcttggctttatatatcttgtggaaaggac

SEQ ID NO: 4943 - DNA, 241 bp, synthetic construct
  misc_feature 1..241: note = promoter
  source 1..241: mol_type = other DNA
gagggcctatttcccatgattccttcatatttgcatatacgatacaaggctgttagagagataattggaattaatttgactgtaaacacaaagatattagtacaaaatacgtgacgtagaaagtaataatttcttgggtagtttgcagttttaaaattatgttttaaaatggactatcatatgcttaccgtaacttgaaagtatttcgacttcttggctttatatatcttgtggaaaggac

SEQ ID NO: 4944 - DNA, 241 bp, synthetic construct
  misc_feature 1..241: note = promoter
  source 1..241: mol_type = other DNA
gagggcctatttcccatgattccttcatatttgcatatacgatacaaggctgttagagagataattggaattaatttgactgtaaacacaaagatattagtacaaaatacgtgacgtagaaagtaataatttcttgggtagtttgcagttttaaaattatgttttaaaatggactatcatatgcttaccgtaacttgaaagtatttcgagttcttggctttatatatcttgtggaaaggac

SEQ ID NO: 4945 - DNA, 241 bp, synthetic construct
  misc_feature 1..241: note = promoter
  source 1..241: mol_type = other DNA
gagggcctatttcccatgattccttcatatttgcatatacgatacaaggctgttagagagataattggaattaatttgactgtaaacacaaagatattagtacaaaatacgtgacgtagaaagtaataatttcttgggtagtttgcagttttaaaattatgttttaaaatggactatcatatgcttaccgtaacttgaaagtatttcgatatcttggctttatatatcttgtggaaaggac

SEQ ID NO: 4946 - DNA, 241 bp, synthetic construct
  misc_feature 1..241: note = promoter
  source 1..241: mol_type = other DNA
gagggcctatttcccatgattccttcatatttgcatatacgatacaaggctgttagagagataattggaattaatttgactgtaaacacaaagatattagtacaaaatacgtgacgtagaaagtaataatttcttgggtagtttgcagttttaaaattatgttttaaaatggactatcatatgcttaccgtaacttgaaagtatttcgatctcttggctttatatatcttgtggaaaggac

SEQ ID NO: 4947 - DNA, 241 bp, synthetic construct
  misc_feature 1..241: note = promoter
  source 1..241: mol_type = other DNA
gagggcctatttcccatgattccttcatatttgcatatacgatacaaggctgttagagagataattggaattaatttgactgtaaacacaaagatattagtacaaaatacgtgacgtagaaagtaataatttcttgggtagtttgcagttttaaaattatgttttaaaatggactatcatatgcttaccgtaacttgaaagtatttcgatgtcttggctttatatatcttgtggaaaggac

SEQ ID NO: 4948 - DNA, 241 bp, synthetic construct
  misc_feature 1..241: note = promoter
  source 1..241: mol_type = other DNA
gagggcctatttcccatgattccttcatatttgcatatacgatacaaggctgttagagagataattggaattaatttgactgtaaacacaaagatattagtacaaaatacgtgacgtagaaagtaataatttcttgggtagtttgcagttttaaaattatgttttaaaatggactatcatatgcttaccgtaacttgaaagtatttcgattacttggctttatatatcttgtggaaaggac

SEQ ID NO: 4949 - DNA, 241 bp, synthetic construct
  misc_feature 1..241: note = promoter
  source 1..241: mol_type = other DNA
gagggcctatttcccatgattccttcatatttgcatatacgatacaaggctgttagagagataattggaattaatttgactgtaaacacaaagatattagtacaaaatacgtgacgtagaaagtaataatttcttgggtagtttgcagttttaaaattatgttttaaaatggactatcatatgcttaccgtaacttgaaagtatttcgattccttggctttatatatcttgtggaaaggac

SEQ ID NO: 4950 - DNA, 241 bp, synthetic construct
  misc_feature 1..241: note = promoter
  source 1..241: mol_type = other DNA
gagggcctatttcccatgattccttcatatttgcatatacgatacaaggctgttagagagataattggaattaatttgactgtaaacacaaagatattagtacaaaatacgtgacgtagaaagtaataatttcttgggtagtttgcagttttaaaattatgttttaaaatggactatcatatgcttaccgtaacttgaaagtatttcgattgcttggctttatatatcttgtggaaaggac

SEQ ID NO: 4951 - DNA, 241 bp, synthetic construct
  misc_feature 1..241: note = promoter
  source 1..241: mol_type = other DNA
gagggcctatttcccatgattccttcatatttgcatatacgatacaaggctgttagagagataattggaattaatttgactgtaaacacaaagatattagtacaaaatacgtgacgtagaaagtaataatttcttgggtagtttgcagttttaaaattatgttttaaaatggactatcatatgcttaccgtaacttgaaagtatttcgatttattggctttatatatcttgtggaaaggac

SEQ ID NO: 4952 - DNA, 241 bp, synthetic construct
  misc_feature 1..241: note = promoter
  source 1..241: mol_type = other DNA
gagggcctatttcccatgattccttcatatttgcatatacgatacaaggctgttagagagataattggaattaatttgactgtaaacacaaagatattagtacaaaatacgtgacgtagaaagtaataatttcttgggtagtttgcagttttaaaattatgttttaaaatggactatcatatgcttaccgtaacttgaaagtatttcgatttgttggctttatatatcttgtggaaaggac

SEQ ID NO: 4953 - DNA, 241 bp, synthetic construct
  misc_feature 1..241: note = promoter
  source 1..241: mol_type = other DNA
gagggcctatttcccatgattccttcatatttgcatatacgatacaaggctgttagagagataattggaattaatttgactgtaaacacaaagatattagtacaaaatacgtgacgtagaaagtaataatttcttgggtagtttgcagttttaaaattatgttttaaaatggactatcatatgcttaccgtaacttgaaagtatttcgattttttggctttatatatcttgtggaaaggac

SEQ ID NO: 4954 - DNA, 241 bp, synthetic construct
  misc_feature 1..241: note = promoter
  source 1..241: mol_type = other DNA
gagggcctatttcccatgattccttcatatttgcatatacgatacaaggctgttagagagataattggaattaatttgactgtaaacacaaagatattagtacaaaatacgtgacgtagaaagtaataatttcttgggtagtttgcagttttaaaattatgttttaaaatggactatcatatgcttaccgtaacttgaaagtatttcgatttcatggctttatatatcttgtggaaaggac

SEQ ID NO: 4955 - DNA, 241 bp, synthetic construct
  misc_feature 1..241: note = promoter
  source 1..241: mol_type = other DNA
gagggcctatttcccatgattccttcatatttgcatatacgatacaaggctgttagagagataattggaattaatttgactgtaaacacaaagatattagtacaaaatacgtgacgtagaaagtaataatttcttgggtagtttgcagttttaaaattatgttttaaaatggactatcatatgcttaccgtaacttgaaagtatttcgatttcctggctttatatatcttgtggaaaggac

SEQ ID NO: 4956 - DNA, 241 bp, synthetic construct
  misc_feature 1..241: note = promoter
  source 1..241: mol_type = other DNA
gagggcctatttcccatgattccttcatatttgcatatacgatacaaggctgttagagagataattggaattaatttgactgtaaacacaaagatattagtacaaaatacgtgacgtagaaagtaataatttcttgggtagtttgcagttttaaaattatgttttaaaatggactatcatatgcttaccgtaacttgaaagtatttcgatttcgtggctttatatatcttgtggaaaggac

SEQ ID NO: 4957 - DNA, 241 bp, synthetic construct
  misc_feature 1..241: note = promoter
  source 1..241: mol_type = other DNA
gagggcctatttcccatgattccttcatatttgcatatacgatacaaggctgttagagagataattggaattaatttgactgtaaacacaaagatattagtacaaaatacgtgacgtagaaagtaataatttcttgggtagtttgcagttttaaaattatgttttaaaatggactatcatatgcttaccgtaacttgaaagtatttcgatttctaggctttatatatcttgtggaaaggac

SEQ ID NO: 4958 - DNA, 241 bp, synthetic construct
  misc_feature 1..241: note = promoter
  source 1..241: mol_type = other DNA
gagggcctatttcccatgattccttcatatttgcatatacgatacaaggctgttagagagataattggaattaatttgactgtaaacacaaagatattagtacaaaatacgtgacgtagaaagtaataatttcttgggtagtttgcagttttaaaattatgttttaaaatggactatcatatgcttaccgtaacttgaaagtatttcgatttctcggctttatatatcttgtggaaaggac

SEQ ID NO: 4959 - DNA, 241 bp, synthetic construct
  misc_feature 1..241: note = promoter
  source 1..241: mol_type = other DNA
gagggcctatttcccatgattccttcatatttgcatatacgatacaaggctgttagagagataattggaattaatttgactgtaaacacaaagatattagtacaaaatacgtgacgtagaaagtaataatttcttgggtagtttgcagttttaaaattatgttttaaaatggactatcatatgcttaccgtaacttgaaagtatttcgatttctgggctttatatatcttgtggaaaggac

SEQ ID NO: 4960 - DNA, 241 bp, synthetic construct
  misc_feature 1..241: note = promoter
  source 1..241: mol_type = other DNA
gagggcctatttcccatgattccttcatatttgcatatacgatacaaggctgttagagagataattggaattaatttgactgtaaacacaaagatattagtacaaaatacgtgacgtagaaagtaataatttcttgggtagtttgcagttttaaaattatgttttaaaatggactatcatatgcttaccgtaacttgaaagtatttcgatttcttagctttatatatcttgtggaaaggac

SEQ ID NO: 4961 - DNA, 241 bp, synthetic construct
  misc_feature 1..241: note = promoter
  source 1..241: mol_type = other DNA
gagggcctatttcccatgattccttcatatttgcatatacgatacaaggctgttagagagataattggaattaatttgactgtaaacacaaagatattagtacaaaatacgtgacgtagaaagtaataatttcttgggtagtttgcagttttaaaattatgttttaaaatggactatcatatgcttaccgtaacttgaaagtatttcgatttcttcgctttatatatcttgtggaaaggac

SEQ ID NO: 4962 - DNA, 241 bp, synthetic construct
  misc_feature 1..241: note = promoter
  source 1..241: mol_type = other DNA
gagggcctatttcccatgattccttcatatttgcatatacgatacaaggctgttagagagataattggaattaatttgactgtaaacacaaagatattagtacaaaatacgtgacgtagaaagtaataatttcttgggtagtttgcagttttaaaattatgttttaaaatggactatcatatgcttaccgtaacttgaaagtatttcgatttctttgctttatatatcttgtggaaaggac

SEQ ID NO: 4963 - DNA, 241 bp, synthetic construct
  misc_feature 1..241: note = promoter
  source 1..241: mol_type = other DNA
gagggcctatttcccatgattccttcatatttgcatatacgatacaaggctgttagagagataattggaattaatttgactgtaaacacaaagatattagtacaaaatacgtgacgtagaaagtaataatttcttgggtagtttgcagttttaaaattatgttttaaaatggactatcatatgcttaccgtaacttgaaagtatttcgatttcttgactttatatatcttgtggaaaggac

SEQ ID NO: 4964 - DNA, 241 bp, synthetic construct
  misc_feature 1..241: note = promoter
  source 1..241: mol_type = other DNA
gagggcctatttcccatgattccttcatatttgcatatacgatacaaggctgttagagagataattggaattaatttgactgtaaacacaaagatattagtacaaaatacgtgacgtagaaagtaataatttcttgggtagtttgcagttttaaaattatgttttaaaatggactatcatatgcttaccgtaacttgaaagtatttcgatttcttgcctttatatatcttgtggaaaggac

SEQ ID NO: 4965 - DNA, 241 bp, synthetic construct
  misc_feature 1..241: note = promoter
  source 1..241: mol_type = other DNA
gagggcctatttcccatgattccttcatatttgcatatacgatacaaggctgttagagagataattggaattaatttgactgtaaacacaaagatattagtacaaaatacgtgacgtagaaagtaataatttcttgggtagtttgcagttttaaaattatgttttaaaatggactatcatatgcttaccgtaacttgaaagtatttcgatttcttgtctttatatatcttgtggaaaggac

SEQ ID NO: 4966 - DNA, 241 bp, synthetic construct
  misc_feature 1..241: note = promoter
  source 1..241: mol_type = other DNA
gagggcctatttcccatgattccttcatatttgcatatacgatacaaggctgttagagagataattggaattaatttgactgtaaacacaaagatattagtacaaaatacgtgacgtagaaagtaataatttcttgggtagtttgcagttttaaaattatgttttaaaatggactatcatatgcttaccgtaacttgaaagtatttcgatttcttggatttatatatcttgtggaaaggac

SEQ ID NO: 4967 - DNA, 241 bp, synthetic construct
  misc_feature 1..241: note = promoter
  source 1..241: mol_type = other DNA
gagggcctatttcccatgattccttcatatttgcatatacgatacaaggctgttagagagataattggaattaatttgactgtaaacacaaagatattagtacaaaatacgtgacgtagaaagtaataatttcttgggtagtttgcagttttaaaattatgttttaaaatggactatcatatgcttaccgtaacttgaaagtatttcgatttcttgggtttatatatcttgtggaaaggac

SEQ ID NO: 4968 - DNA, 241 bp, synthetic construct
  misc_feature 1..241: note = promoter
  source 1..241: mol_type = other DNA
gagggcctatttcccatgattccttcatatttgcatatacgatacaaggctgttagagagataattggaattaatttgactgtaaacacaaagatattagtacaaaatacgtgacgtagaaagtaataatttcttgggtagtttgcagttttaaaattatgttttaaaatggactatcatatgcttaccgtaacttgaaagtatttcgatttcttggttttatatatcttgtggaaaggac

SEQ ID NO: 4969 - DNA, 241 bp, synthetic construct
  misc_feature 1..241: note = promoter
  source 1..241: mol_type = other DNA
gagggcctatttcccatgattccttcatatttgcatatacgatacaaggctgttagagagataattggaattaatttgactgtaaacacaaagatattagtacaaaatacgtgacgtagaaagtaataatttcttgggtagtttgcagttttaaaattatgttttaaaatggactatcatatgcttaccgtaacttgaaagtatttcgatttcttggcattatatatcttgtggaaaggac

SEQ ID NO: 4970 - DNA, 241 bp, synthetic construct
  misc_feature 1..241: note = promoter
  source 1..241: mol_type = other DNA
gagggcctatttcccatgattccttcatatttgcatatacgatacaaggctgttagagagataattggaattaatttgactgtaaacacaaagatattagtacaaaatacgtgacgtagaaagtaataatttcttgggtagtttgcagttttaaaattatgttttaaaatggactatcatatgcttaccgtaacttgaaagtatttcgatttcttggccttatatatcttgtggaaaggac

SEQ ID NO: 4971 - DNA, 241 bp, synthetic construct
  misc_feature 1..241: note = promoter
  source 1..241: mol_type = other DNA
gagggcctatttcccatgattccttcatatttgcatatacgatacaaggctgttagagagataattggaattaatttgactgtaaacacaaagatattagtacaaaatacgtgacgtagaaagtaataatttcttgggtagtttgcagttttaaaattatgttttaaaatggactatcatatgcttaccgtaacttgaaagtatttcgatttcttggcgttatatatcttgtggaaaggac

SEQ ID NO: 4972 - DNA, 241 bp, synthetic construct
  misc_feature 1..241: note = promoter
  source 1..241: mol_type = other DNA
gagggcctatttcccatgattccttcatatttgcatatacgatacaaggctgttagagagataattggaattaatttgactgtaaacacaaagatattagtacaaaatacgtgacgtagaaagtaataatttcttgggtagtttgcagttttaaaattatgttttaaaatggactatcatatgcttaccgtaacttgaaagtatttcgatttcttggctatatatatcttgtggaaaggac

SEQ ID NO: 4973 - DNA, 241 bp, synthetic construct
  misc_feature 1..241: note = promoter
  source 1..241: mol_type = other DNA
gagggcctatttcccatgattccttcatatttgcatatacgatacaaggctgttagagagataattggaattaatttgactgtaaacacaaagatattagtacaaaatacgtgacgtagaaagtaataatttcttgggtagtttgcagttttaaaattatgttttaaaatggactatcatatgcttaccgtaacttgaaagtatttcgatttcttggctctatatatcttgtggaaaggac

SEQ ID NO: 4974 - DNA, 241 bp, synthetic construct
  misc_feature 1..241: note = promoter
  source 1..241: mol_type = other DNA
gagggcctatttcccatgattccttcatatttgcatatacgatacaaggctgttagagagataattggaattaatttgactgtaaacacaaagatattagtacaaaatacgtgacgtagaaagtaataatttcttgggtagtttgcagttttaaaattatgttttaaaatggactatcatatgcttaccgtaacttgaaagtatttcgatttcttggctgtatatatcttgtggaaaggac

SEQ ID NO: 4975 - DNA, 241 bp, synthetic construct
  misc_feature 1..241: note = promoter
  source 1..241: mol_type = other DNA
gagggcctatttcccatgattccttcatatttgcatatacgatacaaggctgttagagagataattggaattaatttgactgtaaacacaaagatattagtacaaaatacgtgacgtagaaagtaataatttcttgggtagtttgcagttttaaaattatgttttaaaatggactatcatatgcttaccgtaacttgaaagtatttcgatttcttggcttaatatatcttgtggaaaggac

SEQ ID NO: 4976 - DNA, 241 bp, synthetic construct
  misc_feature 1..241: note = promoter
  source 1..241: mol_type = other DNA
gagggcctatttcccatgattccttcatatttgcatatacgatacaaggctgttagagagataattggaattaatttgactgtaaacacaaagatattagtacaaaatacgtgacgtagaaagtaataatttcttgggtagtttgcagttttaaaattatgttttaaaatggactatcatatgcttaccgtaacttgaaagtatttcgatttcttggcttcatatatcttgtggaaaggac

SEQ ID NO: 4977 - DNA, 241 bp, synthetic construct
  misc_feature 1..241: note = promoter
  source 1..241: mol_type = other DNA
gagggcctatttcccatgattccttcatatttgcatatacgatacaaggctgttagagagataattggaattaatttgactgtaaacacaaagatattagtacaaaatacgtgacgtagaaagtaataatttcttgggtagtttgcagttttaaaattatgttttaaaatggactatcatatgcttaccgtaacttgaaagtatttcgatttcttggcttgatatatcttgtggaaaggac

SEQ ID NO: 4978 - DNA, 241 bp, synthetic construct
  misc_feature 1..241: note = promoter
  source 1..241: mol_type = other DNA
gagggcctatttcccatgattccttcatatttgcatatacgatacaaggctgttagagagataattggaattaatttgactgtaaacacaaagatattagtacaaaatacgtgacgtagaaagtaataatttcttgggtagtttgcagttttaaaattatgttttaaaatggactatcatatgcttaccgtaacttgaaagtatttcgatttcttggctttctatatcttgtggaaaggac

SEQ ID NO: 4979 - DNA, 241 bp, synthetic construct
  misc_feature 1..241: note = promoter
  source 1..241: mol_type = other DNA
gagggcctatttcccatgattccttcatatttgcatatacgatacaaggctgttagagagataattggaattaatttgactgtaaacacaaagatattagtacaaaatacgtgacgtagaaagtaataatttcttgggtagtttgcagttttaaaattatgttttaaaatggactatcatatgcttaccgtaacttgaaagtatttcgatttcttggctttgtatatcttgtggaaaggac

SEQ ID NO: 4980 - DNA, 241 bp, synthetic construct
  misc_feature 1..241: note = promoter
  source 1..241: mol_type = other DNA
gagggcctatttcccatgattccttcatatttgcatatacgatacaaggctgttagagagataattggaattaatttgactgtaaacacaaagatattagtacaaaatacgtgacgtagaaagtaataatttcttgggtagtttgcagttttaaaattatgttttaaaatggactatcatatgcttaccgtaacttgaaagtatttcgatttcttggctttttatatcttgtggaaaggac

SEQ ID NO: 4981 - DNA, 241 bp, synthetic construct
  misc_feature 1..241: note = promoter
  source 1..241: mol_type = other DNA
gagggcctatttcccatgattccttcatatttgcatatacgatacaaggctgttagagagataattggaattaatttgactgtaaacacaaagatattagtacaaaatacgtgacgtagaaagtaataatttcttgggtagtttgcagttttaaaattatgttttaaaatggactatcatatgcttaccgtaacttgaaagtatttcgatttcttggctttaaatatcttgtggaaaggac

SEQ ID NO: 4982 - DNA, 241 bp, synthetic construct
  misc_feature 1..241: note = promoter
  source 1..241: mol_type = other DNA
gagggcctatttcccatgattccttcatatttgcatatacgatacaaggctgttagagagataattggaattaatttgactgtaaacacaaagatattagtacaaaatacgtgacgtagaaagtaataatttcttgggtagtttgcagttttaaaattatgttttaaaatggactatcatatgcttaccgtaacttgaaagtatttcgatttcttggctttacatatcttgtggaaaggac

SEQ ID NO: 4983 - DNA, 241 bp, synthetic construct
  misc_feature 1..241: note = promoter
  source 1..241: mol_type = other DNA
gagggcctatttcccatgattccttcatatttgcatatacgatacaaggctgttagagagataattggaattaatttgactgtaaacacaaagatattagtacaaaatacgtgacgtagaaagtaataatttcttgggtagtttgcagttttaaaattatgttttaaaatggactatcatatgcttaccgtaacttgaaagtatttcgatttcttggctttagatatcttgtggaaaggac

SEQ ID NO: 4984 - DNA, 241 bp, synthetic construct
  misc_feature 1..241: note = promoter
  source 1..241: mol_type = other DNA
gagggcctatttcccatgattccttcatatttgcatatacgatacaaggctgttagagagataattggaattaatttgactgtaaacacaaagatattagtacaaaatacgtgacgtagaaagtaataatttcttgggtagtttgcagttttaaaattatgttttaaaatggactatcatatgcttaccgtaacttgaaagtatttcgatttcttggctttatctatcttgtggaaaggac

SEQ ID NO: 4985 - DNA, 241 bp, synthetic construct
  misc_feature 1..241: note = promoter
  source 1..241: mol_type = other DNA
gagggcctatttcccatgattccttcatatttgcatatacgatacaaggctgttagagagataattggaattaatttgactgtaaacacaaagatattagtacaaaatacgtgacgtagaaagtaataatttcttgggtagtttgcagttttaaaattatgttttaaaatggactatcatatgcttaccgtaacttgaaagtatttcgatttcttggctttatgtatcttgtggaaaggac

SEQ ID NO: 4986 - DNA, 241 bp, synthetic construct
  misc_feature 1..241: note = promoter
  source 1..241: mol_type = other DNA
gagggcctatttcccatgattccttcatatttgcatatacgatacaaggctgttagagagataattggaattaatttgactgtaaacacaaagatattagtacaaaatacgtgacgtagaaagtaataatttcttgggtagtttgcagttttaaaattatgttttaaaatggactatcatatgcttaccgtaacttgaaagtatttcgatttcttggctttatttatcttgtggaaaggac

SEQ ID NO: 4987 - DNA, 241 bp, synthetic construct
  misc_feature 1..241: note = promoter
  source 1..241: mol_type = other DNA
gagggcctatttcccatgattccttcatatttgcatatacgatacaaggctgttagagagataattggaattaatttgactgtaaacacaaagatattagtacaaaatacgtgacgtagaaagtaataatttcttgggtagtttgcagttttaaaattatgttttaaaatggactatcatatgcttaccgtaacttgaaagtatttcgatttcttggctttataaatcttgtggaaaggac

SEQ ID NO: 4988 - DNA, 241 bp, synthetic construct
  misc_feature 1..241: note = promoter
  source 1..241: mol_type = other DNA
gagggcctatttcccatgattccttcatatttgcatatacgatacaaggctgttagagagataattggaattaatttgactgtaaacacaaagatattagtacaaaatacgtgacgtagaaagtaataatttcttgggtagtttgcagttttaaaattatgttttaaaatggactatcatatgcttaccgtaacttgaaagtatttcgatttcttggctttatacatcttgtggaaaggac

SEQ ID NO: 4989 - DNA, 241 bp, synthetic construct
  misc_feature 1..241: note = promoter
  source 1..241: mol_type = other DNA
gagggcctatttcccatgattccttcatatttgcatatacgatacaaggctgttagagagataattggaattaatttgactgtaaacacaaagatattagtacaaaatacgtgacgtagaaagtaataatttcttgggtagtttgcagttttaaaattatgttttaaaatggactatcatatgcttaccgtaacttgaaagtatttcgatttcttggctttatagatcttgtggaaaggac

SEQ ID NO: 4990 - DNA, 241 bp, synthetic construct
  misc_feature 1..241: note = promoter
  source 1..241: mol_type = other DNA
gagggcctatttcccatgattccttcatatttgcatatacgatacaaggctgttagagagataattggaattaatttgactgtaaacacaaagatattagtacaaaatacgtgacgtagaaagtaataatttcttgggtagtttgcagttttaaaattatgttttaaaatggactatcatatgcttaccgtaacttgaaagtatttcgatttcttggctttatatctcttgtggaaaggac

SEQ ID NO: 4991 - DNA, 241 bp, synthetic construct
  misc_feature 1..241: note = promoter
  source 1..241: mol_type = other DNA
gagggcctatttcccatgattccttcatatttgcatatacgatacaaggctgttagagagataattggaattaatttgactgtaaacacaaagatattagtacaaaatacgtgacgtagaaagtaataatttcttgggtagtttgcagttttaaaattatgttttaaaatggactatcatatgcttaccgtaacttgaaagtatttcgatttcttggctttatatgtcttgtggaaaggac

SEQ ID NO: 4992 - DNA, 241 bp, synthetic construct
  misc_feature 1..241: note = promoter
  source 1..241: mol_type = other DNA
gagggcctatttcccatgattccttcatatttgcatatacgatacaaggctgttagagagataattggaattaatttgactgtaaacacaaagatattagtacaaaatacgtgacgtagaaagtaataatttcttgggtagtttgcagttttaaaattatgttttaaaatggactatcatatgcttaccgtaacttgaaagtatttcgatttcttggctttatatttcttgtggaaaggac

SEQ ID NO: 4993 - DNA, 241 bp, synthetic construct
  misc_feature 1..241: note = promoter
  source 1..241: mol_type = other DNA
gagggcctatttcccatgattccttcatatttgcatatacgatacaaggctgttagagagataattggaattaatttgactgtaaacacaaagatattagtacaaaatacgtgacgtagaaagtaataatttcttgggtagtttgcagttttaaaattatgttttaaaatggactatcatatgcttaccgtaacttgaaagtatttcgatttcttggctttatataacttgtggaaaggac

SEQ ID NO: 4994 - DNA, 241 bp, synthetic construct
  misc_feature 1..241: note = promoter
  source 1..241: mol_type = other DNA
gagggcctatttcccatgattccttcatatttgcatatacgatacaaggctgttagagagataattggaattaatttgactgtaaacacaaagatattagtacaaaatacgtgacgtagaaagtaataatttcttgggtagtttgcagttttaaaattatgttttaaaatggactatcatatgcttaccgtaacttgaaagtatttcgatttcttggctttatataccttgtggaaaggac

SEQ ID NO: 4995 - DNA, 241 bp, synthetic construct
  misc_feature 1..241: note = promoter
  source 1..241: mol_type = other DNA
gagggcctatttcccatgattccttcatatttgcatatacgatacaaggctgttagagagataattggaattaatttgactgtaaacacaaagatattagtacaaaatacgtgacgtagaaagtaataatttcttgggtagtttgcagttttaaaattatgttttaaaatggactatcatatgcttaccgtaacttgaaagtatttcgatttcttggctttatatagcttgtggaaaggac

SEQ ID NO: 4996 - DNA, 241 bp, synthetic construct
  misc_feature 1..241: note = promoter
  source 1..241: mol_type = other DNA
gagggcctatttcccatgattccttcatatttgcatatacgatacaaggctgttagagagataattggaattaatttgactgtaaacacaaagatattagtacaaaatacgtgacgtagaaagtaataatttcttgggtagtttgcagttttaaaattatgttttaaaatggactatcatatgcttaccgtaacttgaaagtatttcgatttcttggctttatatatattgtggaaaggac

SEQ ID NO: 4997 - DNA, 241 bp, synthetic construct
  misc_feature 1..241: note = promoter
  source 1..241: mol_type = other DNA
gagggcctatttcccatgattccttcatatttgcatatacgatacaaggctgttagagagataattggaattaatttgactgtaaacacaaagatattagtacaaaatacgtgacgtagaaagtaataatttcttgggtagtttgcagttttaaaattatgttttaaaatggactatcatatgcttaccgtaacttgaaagtatttcgatttcttggctttatatatgttgtggaaaggac

SEQ ID NO: 4998 - DNA, 241 bp, synthetic construct
  misc_feature 1..241: note = promoter
  source 1..241: mol_type = other DNA
gagggcctatttcccatgattccttcatatttgcatatacgatacaaggctgttagagagataattggaattaatttgactgtaaacacaaagatattagtacaaaatacgtgacgtagaaagtaataatttcttgggtagtttgcagttttaaaattatgttttaaaatggactatcatatgcttaccgtaacttgaaagtatttcgatttcttggctttatatattttgtggaaaggac

SEQ ID NO: 4999 - DNA, 241 bp, synthetic construct
  misc_feature 1..241: note = promoter
  source 1..241: mol_type = other DNA
gagggcctatttcccatgattccttcatatttgcatatacgatacaaggctgttagagagataattggaattaatttgactgtaaacacaaagatattagtacaaaatacgtgacgtagaaagtaataatttcttgggtagtttgcagttttaaaattatgttttaaaatggactatcatatgcttaccgtaacttgaaagtatttcgatttcttggctttatatatcatgtggaaaggac

SEQ ID NO: 5000 - DNA, 241 bp, synthetic construct
  misc_feature 1..241: note = promoter
  source 1..241: mol_type = other DNA
gagggcctatttcccatgattccttcatatttgcatatacgatacaaggctgttagagagataattggaattaatttgactgtaaacacaaagatattagtacaaaatacgtgacgtagaaagtaataatttcttgggtagtttgcagttttaaaattatgttttaaaatggactatcatatgcttaccgtaacttgaaagtatttcgatttcttggctttatatatcctgtggaaaggac

SEQ ID NO: 5001 - DNA, 241 bp, synthetic construct
  misc_feature 1..241: note = promoter
  source 1..241: mol_type = other DNA
gagggcctatttcccatgattccttcatatttgcatatacgatacaaggctgttagagagataattggaattaatttgactgtaaacacaaagatattagtacaaaatacgtgacgtagaaagtaataatttcttgggtagtttgcagttttaaaattatgttttaaaatggactatcatatgcttaccgtaacttgaaagtatttcgatttcttggctttatatatcgtgtggaaaggac

SEQ ID NO: 5002 - DNA, 241 bp, synthetic construct
  misc_feature 1..241: note = promoter
  source 1..241: mol_type = other DNA
gagggcctatttcccatgattccttcatatttgcatatacgatacaaggctgttagagagataattggaattaatttgactgtaaacacaaagatattagtacaaaatacgtgacgtagaaagtaataatttcttgggtagtttgcagttttaaaattatgttttaaaatggactatcatatgcttaccgtaacttgaaagtatttcgatttcttggctttatatatctagtggaaaggac

SEQ ID NO: 5003 - DNA, 241 bp, synthetic construct
  misc_feature 1..241: note = promoter
  source 1..241: mol_type = other DNA
gagggcctatttcccatgattccttcatatttgcatatacgatacaaggctgttagagagataattggaattaatttgactgtaaacacaaagatattagtacaaaatacgtgacgtagaaagtaataatttcttgggtagtttgcagttttaaaattatgttttaaaatggactatcatatgcttaccgtaacttgaaagtatttcgatttcttggctttatatatctcgtggaaaggac

SEQ ID NO: 5004 - DNA, 241 bp, synthetic construct
  misc_feature 1..241: note = promoter
  source 1..241: mol_type = other DNA
gagggcctatttcccatgattccttcatatttgcatatacgatacaaggctgttagagagataattggaattaatttgactgtaaacacaaagatattagtacaaaatacgtgacgtagaaagtaataatttcttgggtagtttgcagttttaaaattatgttttaaaatggactatcatatgcttaccgtaacttgaaagtatttcgatttcttggctttatatatctggtggaaaggac

SEQ ID NO: 5005 - DNA, 241 bp, synthetic construct
  misc_feature 1..241: note = promoter
  source 1..241: mol_type = other DNA
gagggcctatttcccatgattccttcatatttgcatatacgatacaaggctgttagagagataattggaattaatttgactgtaaacacaaagatattagtacaaaatacgtgacgtagaaagtaataatttcttgggtagtttgcagttttaaaattatgttttaaaatggactatcatatgcttaccgtaacttgaaagtatttcgatttcttggctttatatatcttatggaaaggac

SEQ ID NO: 5006 - DNA, 241 bp, synthetic construct
  misc_feature 1..241: note = promoter
  source 1..241: mol_type = other DNA
gagggcctatttcccatgattccttcatatttgcatatacgatacaaggctgttagagagataattggaattaatttgactgtaaacacaaagatattagtacaaaatacgtgacgtagaaagtaataatttcttgggtagtttgcagttttaaaattatgttttaaaatggactatcatatgcttaccgtaacttgaaagtatttcgatttcttggctttatatatcttctggaaaggac

SEQ ID NO: 5007 - DNA, 241 bp, synthetic construct
  misc_feature 1..241: note = promoter
  source 1..241: mol_type = other DNA
gagggcctatttcccatgattccttcatatttgcatatacgatacaaggctgttagagagataattggaattaatttgactgtaaacacaaagatattagtacaaaatacgtgacgtagaaagtaataatttcttgggtagtttgcagttttaaaattatgttttaaaatggactatcatatgcttaccgtaacttgaaagtatttcgatttcttggctttatatatcttttggaaaggac

SEQ ID NO: 5008 - DNA, 241 bp, synthetic construct
  misc_feature 1..241: note = promoter
  source 1..241: mol_type = other DNA
gagggcctatttcccatgattccttcatatttgcatatacgatacaaggctgttagagagataattggaattaatttgactgtaaacacaaagatattagtacaaaatacgtgacgtagaaagtaataatttcttgggtagtttgcagttttaaaattatgttttaaaatggactatcatatgcttaccgtaacttgaaagtatttcgatttcttggctttatatatcttgaggaaaggac

SEQ ID NO: 5009 - DNA, 241 bp, synthetic construct
  misc_feature 1..241: note = promoter
  source 1..241: mol_type = other DNA
gagggcctatttcccatgattccttcatatttgcatatacgatacaaggctgttagagagataattggaattaatttgactgtaaacacaaagatattagtacaaaatacgtgacgtagaaagtaataatttcttgggtagtttgcagttttaaaattatgttttaaaatggactatcatatgcttaccgtaacttgaaagtatttcgatttcttggctttatatatcttgcggaaaggac

SEQ ID NO: 5010 - DNA, 241 bp, synthetic construct
  misc_feature 1..241: note = promoter
  source 1..241: mol_type = other DNA
gagggcctatttcccatgattccttcatatttgcatatacgatacaaggctgttagagagataattggaattaatttgactgtaaacacaaagatattagtacaaaatacgtgacgtagaaagtaataatttcttgggtagtttgcagttttaaaattatgttttaaaatggactatcatatgcttaccgtaacttgaaagtatttcgatttcttggctttatatatcttggggaaaggac

SEQ ID NO: 5011 - DNA, 241 bp, synthetic construct
  misc_feature 1..241: note = promoter
  source 1..241: mol_type = other DNA
gagggcctatttcccatgattccttcatatttgcatatacgatacaaggctgttagagagataattggaattaatttgactgtaaacacaaagatattagtacaaaatacgtgacgtagaaagtaataatttcttgggtagtttgcagttttaaaattatgttttaaaatggactatcatatgcttaccgtaacttgaaagtatttcgatttcttggctttatatatcttgtagaaaggac

SEQ ID NO: 5012 - DNA, 241 bp, synthetic construct
  misc_feature 1..241: note = promoter
  source 1..241: mol_type = other DNA
gagggcctatttcccatgattccttcatatttgcatatacgatacaaggctgttagagagataattggaattaatttgactgtaaacacaaagatattagtacaaaatacgtgacgtagaaagtaataatttcttgggtagtttgcagttttaaaattatgttttaaaatggactatcatatgcttaccgtaacttgaaagtatttcgatttcttggctttatatatcttgtcgaaaggac

SEQ ID NO: 5013 - DNA, 241 bp, synthetic construct
  misc_feature 1..241: note = promoter
  source 1..241: mol_type = other DNA
gagggcctatttcccatgattccttcatatttgcatatacgatacaaggctgttagagagataattggaattaatttgactgtaaacacaaagatattagtacaaaatacgtgacgtagaaagtaataatttcttgggtagtttgcagttttaaaattatgttttaaaatggactatcatatgcttaccgtaacttgaaagtatttcgatttcttggctttatatatcttgttgaaaggac

SEQ ID NO: 5014 - DNA, 241 bp, synthetic construct
  misc_feature 1..241: note = promoter
  source 1..241: mol_type = other DNA
gagggcctatttcccatgattccttcatatttgcatatacgatacaaggctgttagagagataattggaattaatttgactgtaaacacaaagatattagtacaaaatacgtgacgtagaaagtaataatttcttgggtagtttgcagttttaaaattatgttttaaaatggactatcatatgcttaccgtaacttgaaagtatttcgatttcttggctttatatatcttgtgaaaaggac

SEQ ID NO: 5015 - DNA, 241 bp, synthetic construct
  misc_feature 1..241: note = promoter
  source 1..241: mol_type = other DNA
gagggcctatttcccatgattccttcatatttgcatatacgatacaaggctgttagagagataattggaattaatttgactgtaaacacaaagatattagtacaaaatacgtgacgtagaaagtaataatttcttgggtagtttgcagttttaaaattatgttttaaaatggactatcatatgcttaccgtaacttgaaagtatttcgatttcttggctttatatatcttgtgcaaaggac

SEQ ID NO: 5016 - DNA, 241 bp, synthetic construct
  misc_feature 1..241: note = promoter
  source 1..241: mol_type = other DNA
gagggcctatttcccatgattccttcatatttgcatatacgatacaaggctgttagagagataattggaattaatttgactgtaaacacaaagatattagtacaaaatacgtgacgtagaaagtaataatttcttgggtagtttgcagttttaaaattatgttttaaaatggactatcatatgcttaccgtaacttgaaagtatttcgatttcttggctttatatatcttgtgtaaaggac

SEQ ID NO: 5017 - DNA, 241 bp, synthetic construct
  misc_feature 1..241: note = promoter
  source 1..241: mol_type = other DNA
gagggcctatttcccatgattccttcatatttgcatatacgatacaaggctgttagagagataattggaattaatttgactgtaaacacaaagatattagtacaaaatacgtgacgtagaaagtaataatttcttgggtagtttgcagttttaaaattatgttttaaaatggactatcatatgcttaccgtaacttgaaagtatttcgatttcttggctttatatatcttgtggcaaggac

SEQ ID NO: 5018 - DNA, 241 bp, synthetic construct
  misc_feature 1..241: note = promoter
  source 1..241: mol_type = other DNA
gagggcctatttcccatgattccttcatatttgcatatacgatacaaggctgttagagagataattggaattaatttgactgtaaacacaaagatattagtacaaaatacgtgacgtagaaagtaataatttcttgggtagtttgcagttttaaaattatgttttaaaatggactatcatatgcttaccgtaacttgaaagtatttcgatttcttggctttatatatcttgtgggaaggac

SEQ ID NO: 5019 - DNA, 241 bp, synthetic construct
  misc_feature 1..241: note = promoter
  source 1..241: mol_type = other DNA
gagggcctatttcccatgattccttcatatttgcatatacgatacaaggctgttagagagataattggaattaatttgactgtaaacacaaagatattagtacaaaatacgtgacgtagaaagtaataatttcttgggtagtttgcagttttaaaattatgttttaaaatggactatcatatgcttaccgtaacttgaaagtatttcgatttcttggctttatatatcttgtggtaaggac

SEQ ID NO: 5020 - DNA, 241 bp, synthetic construct
  misc_feature 1..241: note = promoter
  source 1..241: mol_type = other DNA
gagggcctatttcccatgattccttcatatttgcatatacgatacaaggctgttagagagataattggaattaatttgactgtaaacacaaagatattagtacaaaatacgtgacgtagaaagtaataatttcttgggtagtttgcagttttaaaattatgttttaaaatggactatcatatgcttaccgtaacttgaaagtatttcgatttcttggctttatatatcttgtggacaggac

SEQ ID NO: 5021 - DNA, 241 bp, synthetic construct
  misc_feature 1..241: note = promoter
  source 1..241: mol_type = other DNA
gagggcctatttcccatgattccttcatatttgcatatacgatacaaggctgttagagagataattggaattaatttgactgtaaacacaaagatattagtacaaaatacgtgacgtagaaagtaataatttcttgggtagtttgcagttttaaaattatgttttaaaatggactatcatatgcttaccgtaacttgaaagtatttcgatttcttggctttatatatcttgtggagaggac

SEQ ID NO: 5022 - DNA, 241 bp, synthetic construct
  misc_feature 1..241: note = promoter
  source 1..241: mol_type = other DNA
gagggcctatttcccatgattccttcatatttgcatatacgatacaaggctgttagagagataattggaattaatttgactgtaaacacaaagatattagtacaaaatacgtgacgtagaaagtaataatttcttgggtagtttgcagttttaaaattatgttttaaaatggactatcatatgcttaccgtaacttgaaagtatttcgatttcttggctttatatatcttgtggataggac

SEQ ID NO: 5023 - DNA, 241 bp, synthetic construct
  misc_feature 1..241: note = promoter
  source 1..241: mol_type = other DNA
gagggcctatttcccatgattccttcatatttgcatatacgatacaaggctgttagagagataattggaattaatttgactgtaaacacaaagatattagtacaaaatacgtgacgtagaaagtaataatttcttgggtagtttgcagttttaaaattatgttttaaaatggactatcatatgcttaccgtaacttgaaagtatttcgatttcttggctttatatatcttgtggaacggac

SEQ ID NO: 5024 - DNA, 241 bp, synthetic construct
  misc_feature 1..241: note = promoter
  source 1..241: mol_type = other DNA
gagggcctatttcccatgattccttcatatttgcatatacgatacaaggctgttagagagataattggaattaatttgactgtaaacacaaagatattagtacaaaatacgtgacgtagaaagtaataatttcttgggtagtttgcagttttaaaattatgttttaaaatggactatcatatgcttaccgtaacttgaaagtatttcgatttcttggctttatatatcttgtggaagggac

SEQ ID NO: 5025 - DNA, 241 bp, synthetic construct
  misc_feature 1..241: note = promoter
  source 1..241: mol_type = other DNA
gagggcctatttcccatgattccttcatatttgcatatacgatacaaggctgttagagagataattggaattaatttgactgtaaacacaaagatattagtacaaaatacgtgacgtagaaagtaataatttcttgggtagtttgcagttttaaaattatgttttaaaatggactatcatatgcttaccgtaacttgaaagtatttcgatttcttggctttatatatcttgtggaatggac

SEQ ID NO: 5026 - DNA, 241 bp, synthetic construct
  misc_feature 1..241: note = promoter
  source 1..241: mol_type = other DNA
gagggcctatttcccatgattccttcatatttgcatatacgatacaaggctgttagagagataattggaattaatttgactgtaaacacaaagatattagtacaaaatacgtgacgtagaaagtaataatttcttgggtagtttgcagttttaaaattatgttttaaaatggactatcatatgcttaccgtaacttgaaagtatttcgatttcttggctttatatatcttgtggaaaagac

SEQ ID NO: 5027 - DNA, 241 bp, synthetic construct
  misc_feature 1..241: note = promoter
  source 1..241: mol_type = other DNA
gagggcctatttcccatgattccttcatatttgcatatacgatacaaggctgttagagagataattggaattaatttgactgtaaacacaaagatattagtacaaaatacgtgacgtagaaagtaataatttcttgggtagtttgcagttttaaaattatgttttaaaatggactatcatatgcttaccgtaacttgaaagtatttcgatttcttggctttatatatcttgtggaaacgac

SEQ ID NO: 5028 - DNA, 241 bp, synthetic construct
  misc_feature 1..241: note = promoter
  source 1..241: mol_type = other DNA
gagggcctatttcccatgattccttcatatttgcatatacgatacaaggctgttagagagataattggaattaatttgactgtaaacacaaagatattagtacaaaatacgtgacgtagaaagtaataatttcttgggtagtttgcagttttaaaattatgttttaaaatggactatcatatgcttaccgtaacttgaaagtatttcgatttcttggctttatatatcttgtggaaatgac

SEQ ID NO: 5029 - DNA, 241 bp, synthetic construct
  misc_feature 1..241: note = promoter
  source 1..241: mol_type = other DNA
gagggcctatttcccatgattccttcatatttgcatatacgatacaaggctgttagagagataattggaattaatttgactgtaaacacaaagatattagtacaaaatacgtgacgtagaaagtaataatttcttgggtagtttgcagttttaaaattatgttttaaaatggactatcatatgcttaccgtaacttgaaagtatttcgatttcttggctttatatatcttgtggaaagaac

SEQ ID NO: 5030 - DNA, 241 bp, synthetic construct
  misc_feature 1..241: note = promoter
  source 1..241: mol_type = other DNA
gagggcctatttcccatgattccttcatatttgcatatacgatacaaggctgttagagagataattggaattaatttgactgtaaacacaaagatattagtacaaaatacgtgacgtagaaagtaataatttcttgggtagtttgcagttttaaaattatgttttaaaatggactatcatatgcttaccgtaacttgaaagtatttcgatttcttggctttatatatcttgtggaaagcac

SEQ ID NO: 5031 - DNA, 241 bp, synthetic construct
  misc_feature 1..241: note = promoter
  source 1..241: mol_type = other DNA
gagggcctatttcccatgattccttcatatttgcatatacgatacaaggctgttagagagataattggaattaatttgactgtaaacacaaagatattagtacaaaatacgtgacgtagaaagtaataatttcttgggtagtttgcagttttaaaattatgttttaaaatggactatcatatgcttaccgtaacttgaaagtatttcgatttcttggctttatatatcttgtggaaagtac

SEQ ID NO: 5032 - DNA, 241 bp, synthetic construct
  misc_feature 1..241: note = promoter
  source 1..241: mol_type = other DNA
gagggcctatttcccatgattccttcatatttgcatatacgatacaaggctgttagagagataattggaattaatttgactgtaaacacaaagatattagtacaaaatacgtgacgtagaaagtaataatttcttgggtagtttgcagttttaaaattatgttttaaaatggactatcatatgcttaccgtaacttgaaagtatttcgatttcttggctttatatatcttgtggaaaggcc

SEQ ID NO: 5033 - DNA, 241 bp, synthetic construct
  misc_feature 1..241: note = promoter
  source 1..241: mol_type = other DNA
gagggcctatttcccatgattccttcatatttgcatatacgatacaaggctgttagagagataattggaattaatttgactgtaaacacaaagatattagtacaaaatacgtgacgtagaaagtaataatttcttgggtagtttgcagttttaaaattatgttttaaaatggactatcatatgcttaccgtaacttgaaagtatttcgatttcttggctttatatatcttgtggaaagggc

SEQ ID NO: 5034 - DNA, 241 bp, synthetic construct
  misc_feature 1..241: note = promoter
  source 1..241: mol_type = other DNA
gagggcctatttcccatgattccttcatatttgcatatacgatacaaggctgttagagagataattggaattaatttgactgtaaacacaaagatattagtacaaaatacgtgacgtagaaagtaataatttcttgggtagtttgcagttttaaaattatgttttaaaatggactatcatatgcttaccgtaacttgaaagtatttcgatttcttggctttatatatcttgtggaaaggtc

SEQ ID NO: 5035 - DNA, 241 bp, synthetic construct
  misc_feature 1..241: note = promoter
  source 1..241: mol_type = other DNA
gagggcctatttcccatgattccttcatatttgcatatacgatacaaggctgttagagagataattggaattaatttgactgtaaacacaaagatattagtacaaaatacgtgacgtagaaagtaataatttcttgggtagtttgcagttttaaaattatgttttaaaatggactatcatatgcttaccgtaacttgaaagtatttcgatttcttggctttatatatcttgtggaaaggaa

SEQ ID NO: 5036 - DNA, 241 bp, synthetic construct
  misc_feature 1..241: note = promoter
  source 1..241: mol_type = other DNA
gagggcctatttcccatgattccttcatatttgcatatacgatacaaggctgttagagagataattggaattaatttgactgtaaacacaaagatattagtacaaaatacgtgacgtagaaagtaataatttcttgggtagtttgcagttttaaaattatgttttaaaatggactatcatatgcttaccgtaacttgaaagtatttcgatttcttggctttatatatcttgtggaaaggag

SEQ ID NO: 5037 - DNA, 241 bp, synthetic construct
  misc_feature 1..241: note = promoter
  source 1..241: mol_type = other DNA
gagggcctatttcccatgattccttcatatttgcatatacgatacaaggctgttagagagataattggaattaatttgactgtaaacacaaagatattagtacaaaatacgtgacgtagaaagtaataatttcttgggtagtttgcagttttaaaattatgttttaaaatggactatcatatgcttaccgtaacttgaaagtatttcgatttcttggctttatatatcttgtggaaaggat

SEQ ID NO: 5038 - DNA, 240 bp, synthetic construct
  misc_feature 1..240: note = promoter
  source 1..240: mol_type = other DNA
agggcctatttcccatgattccttcatatttgcatatacgatacaaggctgttagagagataattggaattaatttgactgtaaacacaaagatattagtacaaaatacgtgacgtagaaagtaataatttcttgggtagtttgcagttttaaaattatgttttaaaatggactatcatatgcttaccgtaacttgaaagtatttcgatttcttggctttatatatcttgtggaaaggac

SEQ ID NO: 5039 - DNA, 240 bp, synthetic construct
  misc_feature 1..240: note = promoter
  source 1..240: mol_type = other DNA
ggggcctatttcccatgattccttcatatttgcatatacgatacaaggctgttagagagataattggaattaatttgactgtaaacacaaagatattagtacaaaatacgtgacgtagaaagtaataatttcttgggtagtttgcagttttaaaattatgttttaaaatggactatcatatgcttaccgtaacttgaaagtatttcgatttcttggctttatatatcttgtggaaaggac

SEQ ID NO: 5040 - DNA, 240 bp, synthetic construct
  misc_feature 1..240: note = promoter
  source 1..240: mol_type = other DNA
gaggcctatttcccatgattccttcatatttgcatatacgatacaaggctgttagagagataattggaattaatttgactgtaaacacaaagatattagtacaaaatacgtgacgtagaaagtaataatttcttgggtagtttgcagttttaaaattatgttttaaaatggactatcatatgcttaccgtaacttgaaagtatttcgatttcttggctttatatatcttgtggaaaggac

SEQ ID NO: 5041 - DNA, 240 bp, synthetic construct; identical to SEQ ID NO: 5040
  misc_feature 1..240: note = promoter
  source 1..240: mol_type = other DNA

SEQ ID NO: 5042 - DNA, 240 bp, synthetic construct; identical to SEQ ID NO: 5040
  misc_feature 1..240: note = promoter
  source 1..240: mol_type = other DNA

SEQ ID NO: 5043 - DNA, 240 bp, synthetic construct
  misc_feature 1..240: note = promoter
  source 1..240: mol_type = other DNA
gagggctatttcccatgattccttcatatttgcatatacgatacaaggctgttagagagataattggaattaatttgactgtaaacacaaagatattagtacaaaatacgtgacgtagaaagtaataatttcttgggtagtttgcagttttaaaattatgttttaaaatggactatcatatgcttaccgtaacttgaaagtatttcgatttcttggctttatatatcttgtggaaaggac

SEQ ID NO: 5044 - DNA, 240 bp, synthetic construct; identical to SEQ ID NO: 5043
  misc_feature 1..240: note = promoter
  source 1..240: mol_type = other DNA

SEQ ID NO: 5045 - DNA, 240 bp, synthetic construct
  misc_feature 1..240: note = promoter
  source 1..240: mol_type = other DNA
gagggccatttcccatgattccttcatatttgcatatacgatacaaggctgttagagagataattggaattaatttgactgtaaacacaaagatattagtacaaaatacgtgacgtagaaagtaataatttcttgggtagtttgcagttttaaaattatgttttaaaatggactatcatatgcttaccgtaacttgaaagtatttcgatttcttggctttatatatcttgtggaaaggac

SEQ ID NO: 5046 - DNA, 240 bp, synthetic construct
  misc_feature 1..240: note = promoter
  source 1..240: mol_type = other DNA
gagggccttttcccatgattccttcatatttgcatatacgatacaaggctgttagagagataattggaattaatttgactgtaaacacaaagatattagtacaaaatacgtgacgtagaaagtaataatttcttgggtagtttgcagttttaaaattatgttttaaaatggactatcatatgcttaccgtaacttgaaagtatttcgatttcttggctttatatatcttgtggaaaggac

SEQ ID NO: 5047 - DNA, 240 bp, synthetic construct
  misc_feature 1..240: note = promoter
  source 1..240: mol_type = other DNA
gagggcctattcccatgattccttcatatttgcatatacgatacaaggctgttagagagataattggaattaatttgactgtaaacacaaagatattagtacaaaatacgtgacgtagaaagtaataatttcttgggtagtttgcagttttaaaattatgttttaaaatggactatcatatgcttaccgtaacttgaaagtatttcgatttcttggctttatatatcttgtggaaaggac

SEQ ID NO: 5048 - DNA, 240 bp, synthetic construct; identical to SEQ ID NO: 5047
  misc_feature 1..240: note = promoter
  source 1..240: mol_type = other DNA

SEQ ID NO: 5049 - DNA, 240 bp, synthetic construct; identical to SEQ ID NO: 5047
  misc_feature 1..240: note = promoter
  source 1..240: mol_type = other DNA

SEQ ID NO: 5050 - DNA, 240 bp, synthetic construct
  misc_feature 1..240: note = promoter
  source 1..240: mol_type = other DNA
gagggcctatttccatgattccttcatatttgcatatacgatacaaggctgttagagagataattggaattaatttgactgtaaacacaaagatattagtacaaaatacgtgacgtagaaagtaataatttcttgggtagtttgcagttttaaaattatgttttaaaatggactatcatatgcttaccgtaacttgaaagtatttcgatttcttggctttatatatcttgtggaaaggac

SEQ ID NO: 5051 - DNA, 240 bp, synthetic construct; identical to SEQ ID NO: 5050
  misc_feature 1..240: note = promoter
  source 1..240: mol_type = other DNA

SEQ ID NO: 5052 - DNA, 240 bp, synthetic construct; identical to SEQ ID NO: 5050
  misc_feature 1..240: note = promoter
  source 1..240: mol_type = other DNA

SEQ ID NO: 5053 - DNA, 240 bp, synthetic construct
  misc_feature 1..240: note = promoter
  source 1..240: mol_type = other DNA
gagggcctatttccctgattccttcatatttgcatatacgatacaaggctgttagagagataattggaattaatttgactgtaaacacaaagatattagtacaaaatacgtgacgtagaaagtaataatttcttgggtagtttgcagttttaaaattatgttttaaaatggactatcatatgcttaccgtaacttgaaagtatttcgatttcttggctttatatatcttgtggaaaggac

SEQ ID NO: 5054 - DNA, 240 bp, synthetic construct
  misc_feature 1..240: note = promoter
  source 1..240: mol_type = other DNA
gagggcctatttcccagattccttcatatttgcatatacgatacaaggctgttagagagataattggaattaatttgactgtaaacacaaagatattagtacaaaatacgtgacgtagaaagtaataatttcttgggtagtttgcagttttaaaattatgttttaaaatggactatcatatgcttaccgtaacttgaaagtatttcgatttcttggctttatatatcttgtggaaaggac

SEQ ID NO: 5055 - DNA, 240 bp, synthetic construct
  misc_feature 1..240: note = promoter
  source 1..240: mol_type = other DNA
gagggcctatttcccatattccttcatatttgcatatacgatacaaggctgttagagagataattggaattaatttgactgtaaacacaaagatattagtacaaaatacgtgacgtagaaagtaataatttcttgggtagtttgcagttttaaaattatgttttaaaatggactatcatatgcttaccgtaacttgaaagtatttcgatttcttggctttatatatcttgtggaaaggac

SEQ ID NO: 5056 - DNA, 240 bp, synthetic construct
  misc_feature 1..240: note = promoter
  source 1..240: mol_type = other DNA
gagggcctatttcccatgttccttcatatttgcatatacgatacaaggctgttagagagataattggaattaatttgactgtaaacacaaagatattagtacaaaatacgtgacgtagaaagtaataatttcttgggtagtttgcagttttaaaattatgttttaaaatggactatcatatgcttaccgtaacttgaaagtatttcgatttcttggctttatatatcttgtggaaaggac

SEQ ID NO: 5057 - DNA, 240 bp, synthetic construct
  misc_feature 1..240: note = promoter
  source 1..240: mol_type = other DNA
gagggcctatttcccatgatccttcatatttgcatatacgatacaaggctgttagagagataattggaattaatttgactgtaaacacaaagatattagtacaaaatacgtgacgtagaaagtaataatttcttgggtagtttgcagttttaaaattatgttttaaaatggactatcatatgcttaccgtaacttgaaagtatttcgatttcttggctttatatatcttgtggaaaggac

SEQ ID NO: 5058 - DNA, 240 bp, synthetic construct; identical to SEQ ID NO: 5057
  misc_feature 1..240: note = promoter
  source 1..240: mol_type = other DNA

SEQ ID NO: 5059 - DNA, 240 bp, synthetic construct
  misc_feature 1..240: note = promoter
  source 1..240: mol_type = other DNA
gagggcctatttcccatgattcttcatatttgcatatacgatacaaggctgttagagagataattggaattaatttgactgtaaacacaaagatattagtacaaaatacgtgacgtagaaagtaataatttcttgggtagtttgcagttttaaaattatgttttaaaatggactatcatatgcttaccgtaacttgaaagtatttcgatttcttggctttatatatcttgtggaaaggac

SEQ ID NO: 5060 - DNA, 240 bp, synthetic construct; identical to SEQ ID NO: 5059
  misc_feature 1..240: note = promoter
  source 1..240: mol_type = other DNA

SEQ ID NO: 5061 - DNA, 240 bp, synthetic construct
  misc_feature 1..240: note = promoter
  source 1..240: mol_type = other DNA
gagggcctatttcccatgattcctcatatttgcatatacgatacaaggctgttagagagataattggaattaatttgactgtaaacacaaagatattagtacaaaatacgtgacgtagaaagtaataatttcttgggtagtttgcagttttaaaattatgttttaaaatggactatcatatgcttaccgtaacttgaaagtatttcgatttcttggctttatatatcttgtggaaaggac

SEQ ID NO: 5062 - DNA, 240 bp, synthetic construct; identical to SEQ ID NO: 5061
  misc_feature 1..240: note = promoter
  source 1..240: mol_type = other DNA

SEQ ID NO: 5063 - DNA, 240 bp, synthetic construct
  misc_feature 1..240: note = promoter
  source 1..240: mol_type = other DNA
gagggcctatttcccatgattccttatatttgcatatacgatacaaggctgttagagagataattggaattaatttgactgtaaacacaaagatattagtacaaaatacgtgacgtagaaagtaataatttcttgggtagtttgcagttttaaaattatgttttaaaatggactatcatatgcttaccgtaacttgaaagtatttcgatttcttggctttatatatcttgtggaaaggac

SEQ ID NO: 5064 - DNA, 240 bp, synthetic construct
  misc_feature 1..240: note = promoter
  source 1..240: mol_type = other DNA
gagggcctatttcccatgattccttctatttgcatatacgatacaaggctgttagagagataattggaattaatttgactgtaaacacaaagatattagtacaaaatacgtgacgtagaaagtaataatttcttgggtagtttgcagttttaaaattatgttttaaaatggactatcatatgcttaccgtaacttgaaagtatttcgatttcttggctttatatatcttgtggaaaggac

SEQ ID NO: 5065 - DNA, 240 bp, synthetic construct
  misc_feature 1..240: note = promoter
  source 1..240: mol_type = other DNA
gagggcctatttcccatgattccttcaatttgcatatacgatacaaggctgttagagagataattggaattaatttgactgtaaacacaaagatattagtacaaaatacgtgacgtagaaagtaataatttcttgggtagtttgcagttttaaaattatgttttaaaatggactatcatatgcttaccgtaacttgaaagtatttcgatttcttggctttatatatcttgtggaaaggac

SEQ ID NO: 5066 - DNA, 240 bp, synthetic construct
  misc_feature 1..240: note = promoter
  source 1..240: mol_type = other DNA
gagggcctatttcccatgattccttcattttgcatatacgatacaaggctgttagagagataattggaattaatttgactgtaaacacaaagatattagtacaaaatacgtgacgtagaaagtaataatttcttgggtagtttgcagttttaaaattatgttttaaaatggactatcatatgcttaccgtaacttgaaagtatttcgatttcttggctttatatatcttgtggaaaggac

SEQ ID NO: 5067 - DNA, 240 bp, synthetic construct
  misc_feature 1..240: note = promoter
  source 1..240: mol_type = other DNA
gagggcctatttcccatgattccttcatattgcatatacgatacaaggctgttagagagataattggaattaatttgactgtaaacacaaagatattagtacaaaatacgtgacgtagaaagtaataatttcttgggtagtttgcagttttaaaattatgttttaaaatggactatcatatgcttaccgtaacttgaaagtatttcgatttcttggctttatatatcttgtggaaaggac

SEQ ID NO: 5068 - DNA, 240 bp, synthetic construct; identical to SEQ ID NO: 5067
  misc_feature 1..240: note = promoter
  source 1..240: mol_type = other DNA

SEQ ID NO: 5069 - DNA, 240 bp, synthetic construct; identical to SEQ ID NO: 5067
  misc_feature 1..240: note = promoter
  source 1..240: mol_type = other DNA

SEQ ID NO: 5070 - DNA, 240 bp, synthetic construct
  misc_feature 1..240: note = promoter
  source 1..240: mol_type = other DNA
gagggcctatttcccatgattccttcatatttcatatacgatacaaggctgttagagagataattggaattaatttgactgtaaacacaaagatattagtacaaaatacgtgacgtagaaagtaataatttcttgggtagtttgcagttttaaaattatgttttaaaatggactatcatatgcttaccgtaacttgaaagtatttcgatttcttggctttatatatcttgtggaaaggac

SEQ ID NO: 5071 - DNA, 240 bp, synthetic construct
  misc_feature 1..240: note = promoter
  source 1..240: mol_type = other DNA
gagggcctatttcccatgattccttcatatttgatatacgatacaaggctgttagagagataattggaattaatttgactgtaaacacaaagatattagtacaaaatacgtgacgtagaaagtaataatttcttgggtagtttgcagttttaaaattatgttttaaaatggactatcatatgcttaccgtaacttgaaagtatttcgatttcttggctttatatatcttgtggaaaggac

SEQ ID NO: 5072 - DNA, 240 bp, synthetic construct
  misc_feature 1..240: note = promoter
  source 1..240: mol_type = other DNA
gagggcctatttcccatgattccttcatatttgctatacgatacaaggctgttagagagataattggaattaatttgactgtaaacacaaagatattagtacaaaatacgtgacgtagaaagtaataatttcttgggtagtttgcagttttaaaattatgttttaaaatggactatcatatgcttaccgtaacttgaaagtatttcgatttcttggctttatatatcttgtggaaaggac

SEQ ID NO: 5073 - DNA, 240 bp, synthetic construct
  misc_feature 1..240: note = promoter
  source 1..240: mol_type = other DNA
gagggcctatttcccatgattccttcatatttgcaatacgatacaaggctgttagagagataattggaattaatttgactgtaaacacaaagatattagtacaaaatacgtgacgtagaaagtaataatttcttgggtagtttgcagttttaaaattatgttttaaaatggactatcatatgcttaccgtaacttgaaagtatttcgatttcttggctttatatatcttgtggaaaggac

SEQ ID NO: 5074 - DNA, 240 bp, synthetic construct
  misc_feature 1..240: note = promoter
  source 1..240: mol_type = other DNA
gagggcctatttcccatgattccttcatatttgcattacgatacaaggctgttagagagataattggaattaatttgactgtaaacacaaagatattagtacaaaatacgtgacgtagaaagtaataatttcttgggtagtttgcagttttaaaattatgttttaaaatggactatcatatgcttaccgtaacttgaaagtatttcgatttcttggctttatatatcttgtggaaaggac

SEQ ID NO: 5075 - DNA, 240 bp, synthetic construct
  misc_feature 1..240: note = promoter
  source 1..240: mol_type = other DNA
gagggcctatttcccatgattccttcatatttgcataacgatacaaggctgttagagagataattggaattaatttgactgtaaacacaaagatattagtacaaaatacgtgacgtagaaagtaataatttcttgggtagtttgcagttttaaaattatgttttaaaatggactatcatatgcttaccgtaacttgaaagtatttcgatttcttggctttatatatcttgtggaaaggac

SEQ ID NO: 5076 - DNA, 240 bp, synthetic construct
  misc_feature 1..240: note = promoter
  source 1..240: mol_type = other DNA
gagggcctatttcccatgattccttcatatttgcatatcgatacaaggctgttagagagataattggaattaatttgactgtaaacacaaagatattagtacaaaatacgtgacgtagaaagtaataatttcttgggtagtttgcagttttaaaattatgttttaaaatggactatcatatgcttaccgtaacttgaaagtatttcgatttcttggctttatatatcttgtggaaaggac

SEQ ID NO: 5077 - DNA, 240 bp, synthetic construct
  misc_feature 1..240: note = promoter
  source 1..240: mol_type = other DNA
gagggcctatttcccatgattccttcatatttgcatatagatacaaggctgttagagagataattggaattaatttgactgtaaacacaaagatattagtacaaaatacgtgacgtagaaagtaataatttcttgggtagtttgcagttttaaaattatgttttaaaatggactatcatatgcttaccgtaacttgaaagtatttcgatttcttggctttatatatcttgtggaaaggac

SEQ ID NO: 5078 - DNA, 240 bp, synthetic construct
  misc_feature 1..240: note = promoter
  source 1..240: mol_type = other DNA
gagggcctatttcccatgattccttcatatttgcatatacatacaaggctgttagagagataattggaattaatttgactgtaaacacaaagatattagtacaaaatacgtgacgtagaaagtaataatttcttgggtagtttgcagttttaaaattatgttttaaaatggactatcatatgcttaccgtaacttgaaagtatttcgatttcttggctttatatatcttgtggaaaggac

SEQ ID NO: 5079 - DNA, 240 bp, synthetic construct
  misc_feature 1..240: note = promoter
  source 1..240: mol_type = other DNA
gagggcctatttcccatgattccttcatatttgcatatacgtacaaggctgttagagagataattggaattaatttgactgtaaacacaaagatattagtacaaaatacgtgacgtagaaagtaataatttcttgggtagtttgcagttttaaaattatgttttaaaatggactatcatatgcttaccgtaacttgaaagtatttcgatttcttggctttatatatcttgtggaaaggac

SEQ ID NO: 5080 - DNA, 240 bp, synthetic construct
  misc_feature 1..240: note = promoter
  source 1..240: mol_type = other DNA
gagggcctatttcccatgattccttcatatttgcatatacgaacaaggctgttagagagataattggaattaatttgactgtaaacacaaagatattagtacaaaatacgtgacgtagaaagtaataatttcttgggtagtttgcagttttaaaattatgttttaaaatggactatcatatgcttaccgtaacttgaaagtatttcgatttcttggctttatatatcttgtggaaaggac

SEQ ID NO: 5081 - DNA, 240 bp, synthetic construct
  misc_feature 1..240: note = promoter
  source 1..240: mol_type = other DNA
gagggcctatttcccatgattccttcatatttgcatatacgatcaaggctgttagagagataattggaattaatttgactgtaaacacaaagatattagtacaaaatacgtgacgtagaaagtaataatttcttgggtagtttgcagttttaaaattatgttttaaaatggactatcatatgcttaccgtaacttgaaagtatttcgatttcttggctttatatatcttgtggaaaggac

SEQ ID NO: 5082 - DNA, 240 bp, synthetic construct
  misc_feature 1..240: note = promoter
  source 1..240: mol_type = other DNA
gagggcctatttcccatgattccttcatatttgcatatacgataaaggctgttagagagataattggaattaatttgactgtaaacacaaagatattagtacaaaatacgtgacgtagaaagtaataatttcttgggtagtttgcagttttaaaattatgttttaaaatggactatcatatgcttaccgtaacttgaaagtatttcgatttcttggctttatatatcttgtggaaaggac

SEQ ID NO: 5083 - DNA, 240 bp, synthetic construct
  misc_feature 1..240: note = promoter
  source 1..240: mol_type = other DNA
gagggcctatttcccatgattccttcatatttgcatatacgatacaggctgttagagagataattggaattaatttgactgtaaacacaaagatattagtacaaaatacgtgacgtagaaagtaataatttcttgggtagtttgcagttttaaaattatgttttaaaatggactatcatatgcttaccgtaacttgaaagtatttcgatttcttggctttatatatcttgtggaaaggac

SEQ ID NO: 5084 - DNA, 240 bp, synthetic construct; identical to SEQ ID NO: 5083
  misc_feature 1..240: note = promoter
  source 1..240: mol_type = other DNA

SEQ ID NO: 5085 - DNA, 240 bp, synthetic construct
  misc_feature 1..240: note = promoter
  source 1..240: mol_type = other DNA
gagggcctatttcccatgattccttcatatttgcatatacgatacaagctgttagagagataattggaattaatttgactgtaaacacaaagatattagtacaaaatacgtgacgtagaaagtaataatttcttgggtagtttgcagttttaaaattatgttttaaaatggactatcatatgcttaccgtaacttgaaagtatttcgatttcttggctttatatatcttgtggaaaggac

SEQ ID NO: 5086 - DNA, 240 bp, synthetic construct; identical to SEQ ID NO: 5085
  misc_feature 1..240: note = promoter
  source 1..240: mol_type = other DNA

SEQ ID NO: 5087 - DNA, 240 bp, synthetic construct
  misc_feature 1..240: note = promoter
  source 1..240: mol_type = other DNA
gagggcctatttcccatgattccttcatatttgcatatacgatacaaggtgttagagagataattggaattaatttgactgtaaacacaaagatattagtacaaaatacgtgacgtagaaagtaataatttcttgggtagtttgcagttttaaaattatgttttaaaatggactatcatatgcttaccgtaacttgaaagtatttcgatttcttggctttatatatcttgtggaaaggac

SEQ ID NO: 5088 - DNA, 240 bp, synthetic construct
  misc_feature 1..240: note = promoter
  source 1..240: mol_type = other DNA
gagggcctatttcccatgattccttcatatttgcatatacgatacaaggcgttagagagataattggaattaatttgactgtaaacacaaagatattagtacaaaatacgtgacgtagaaagtaataatttcttgggtagtttgcagttttaaaattatgttttaaaatggactatcatatgcttaccgtaacttgaaagtatttcgatttcttggctttatatatcttgtggaaaggac

SEQ ID NO: 5089 - DNA, 240 bp, synthetic construct
  misc_feature 1..240: note = promoter
  source 1..240: mol_type = other DNA
gagggcctatttcccatgattccttcatatttgcatatacgatacaaggctttagagagataattggaattaatttgactgtaaacacaaagatattagtacaaaatacgtgacgtagaaagtaataatttcttgggtagtttgcagttttaaaattatgttttaaaatggactatcatatgcttaccgtaacttgaaagtatttcgatttcttggctttatatatcttgtggaaaggac

SEQ ID NO: 5090 - DNA, 240 bp, synthetic construct
  misc_feature 1..240: note = promoter
  source 1..240: mol_type = other DNA
gagggcctatttcccatgattccttcatatttgcatatacgatacaaggctgtagagagataattggaattaatttgactgtaaacacaaagatattagtacaaaatacgtgacgtagaaagtaataatttcttgggtagtttgcagttttaaaattatgttttaaaatggactatcatatgcttaccgtaacttgaaagtatttcgatttcttggctttatatatcttgtggaaaggac

SEQ ID NO: 5091 - DNA, 240 bp, synthetic construct; identical to SEQ ID NO: 5090
  misc_feature 1..240: note = promoter
  source 1..240: mol_type = other DNA

SEQ ID NO: 5092 - DNA, 240 bp, synthetic construct
  misc_feature 1..240: note = promoter
  source 1..240: mol_type = other DNA
gagggcctatttcccatgattccttcatatttgcatatacgatacaaggctgttgagagataattggaattaatttgactgtaaacacaaagatattagtacaaaatacgtgacgtagaaagtaataatttcttgggtagtttgcagttttaaaattatgttttaaaatggactatcatatgcttaccgtaacttgaaagtatttcgatttcttggctttatatatcttgtggaaaggac

SEQ ID NO: 5093 - DNA, 240 bp, synthetic construct
  misc_feature 1..240: note = promoter
  source 1..240: mol_type = other DNA
gagggcctatttcccatgattccttcatatttgcatatacgatacaaggctgttaagagataattggaattaatttgactgtaaacacaaagatattagtacaaaatacgtgacgtagaaagtaataatttcttgggtagtttgcagttttaaaattatgttttaaaatggactatcatatgcttaccgtaacttgaaagtatttcgatttcttggctttatatatcttgtggaaaggac

SEQ ID NO: 5094 - DNA, 240 bp, synthetic construct
  misc_feature 1..240: note = promoter
  source 1..240: mol_type = other DNA
gagggcctatttcccatgattccttcatatttgcatatacgatacaaggctgttaggagataattggaattaatttgactgtaaacacaaagatattagtacaaaatacgtgacgtagaaagtaataatttcttgggtagtttgcagttttaaaattatgttttaaaatggactatcatatgcttaccgtaacttgaaagtatttcgatttcttggctttatatatcttgtggaaaggac

SEQ ID NO: 5095 - DNA, 240 bp, synthetic construct
  misc_feature 1..240: note = promoter
  source 1..240: mol_type = other DNA
gagggcctatttcccatgattccttcatatttgcatatacgatacaaggctgttagaagataattggaattaatttgactgtaaacacaaagatattagtacaaaatacgtgacgtagaaagtaataatttcttgggtagtttgcagttttaaaattatgttttaaaatggactatcatatgcttaccgtaacttgaaagtatttcgatttcttggctttatatatcttgtggaaaggac

SEQ ID NO: 5096 - DNA, 240 bp, synthetic construct
  misc_feature 1..240: note = promoter
  source 1..240: mol_type = other DNA
gagggcctatttcccatgattccttcatatttgcatatacgatacaaggctgttagaggataattggaattaatttgactgtaaacacaaagatattagtacaaaatacgtgacgtagaaagtaataatttcttgggtagtttgcagttttaaaattatgttttaaaatggactatcatatgcttaccgtaacttgaaagtatttcgatttcttggctttatatatcttgtggaaaggac

SEQ ID NO: 5097 - DNA, 240 bp, synthetic construct
  misc_feature 1..240: note = promoter
  source 1..240: mol_type = other DNA
gagggcctatttcccatgattccttcatatttgcatatacgatacaaggctgttagagaataattggaattaatttgactgtaaacacaaagatattagtacaaaatacgtgacgtagaaagtaataatttcttgggtagtttgcagttttaaaattatgttttaaaatggactatcatatgcttaccgtaacttgaaagtatttcgatttcttggctttatatatcttgtggaaaggac

SEQ ID NO: 5098 - DNA, 240 bp, synthetic construct
  misc_feature 1..240: note = promoter
  source 1..240: mol_type = other DNA
gagggcctatttcccatgattccttcatatttgcatatacgatacaaggctgttagagagtaattggaattaatttgactgtaaacacaaagatattagtacaaaatacgtgacgtagaaagtaataatttcttgggtagtttgcagttttaaaattatgttttaaaatggactatcatatgcttaccgtaacttgaaagtatttcgatttcttggctttatatatcttgtggaaaggac

SEQ ID NO: 5099 - DNA, 240 bp, synthetic construct
  misc_feature 1..240: note = promoter
  source 1..240: mol_type = other DNA
gagggcctatttcccatgattccttcatatttgcatatacgatacaaggctgttagagagaaattggaattaatttgactgtaaacacaaagatattagtacaaaatacgtgacgtagaaagtaataatttcttgggtagtttgcagttttaaaattatgttttaaaatggactatcatatgcttaccgtaacttgaaagtatttcgatttcttggctttatatatcttgtggaaaggac

SEQ ID NO: 5100 - DNA, 240 bp, synthetic construct
  misc_feature 1..240: note = promoter
  source 1..240: mol_type = other DNA
gagggcctatttcccatgattccttcatatttgcatatacgatacaaggctgttagagagatattggaattaatttgactgtaaacacaaagatattagtacaaaatacgtgacgtagaaagtaataatttcttgggtagtttgcagttttaaaattatgttttaaaatggactatcatatgcttaccgtaacttgaaagtatttcgatttcttggctttatatatcttgtggaaaggac

SEQ ID NO: 5101 - DNA, 240 bp, synthetic construct; identical to SEQ ID NO: 5100
  misc_feature 1..240: note = promoter
  source 1..240: mol_type = other DNA

SEQ ID NO: 5102 - DNA, 240 bp, synthetic construct
  misc_feature 1..240: note = promoter
  source 1..240: mol_type = other DNA
gagggcctatttcccatgattccttcatatttgcatatacgatacaaggctgttagagagataatggaattaatttgactgtaaacacaaagatattagtacaaaatacgtgacgtagaaagtaataatttcttgggtagtttgcagttttaaaattatgttttaaaatggactatcatatgcttaccgtaacttgaaagtatttcgatttcttggctttatatatcttgtggaaaggac

SEQ ID NO: 5103 - DNA, 240 bp, synthetic construct; identical to SEQ ID NO: 5102
  misc_feature 1..240: note = promoter
  source 1..240: mol_type = other DNA

SEQ ID NO: 5104 - DNA, 240 bp, synthetic construct
  misc_feature 1..240: note = promoter
  source 1..240: mol_type = other DNA
gagggcctatttcccatgattccttcatatttgcatatacgatacaaggctgttagagagataattgaattaatttgactgtaaacacaaagatattagtacaaaatacgtgacgtagaaagtaataatttcttgggtagtttgcagttttaaaattatgttttaaaatggactatcatatgcttaccgtaacttgaaagtatttcgatttcttggctttatatatcttgtggaaaggac

SEQ ID NO: 5105 - DNA, 240 bp, synthetic construct; identical to SEQ ID NO: 5104
  misc_feature 1..240: note = promoter
  source 1..240: mol_type = other DNA

SEQ ID NO: 5106 - DNA, 240 bp, synthetic construct
  misc_feature 1..240: note = promoter
  source 1..240: mol_type = other DNA
gagggcctatttcccatgattccttcatatttgcatatacgatacaaggctgttagagagataattggattaatttgactgtaaacacaaagatattagtacaaaatacgtgacgtagaaagtaataatttcttgggtagtttgcagttttaaaattatgttttaaaatggactatcatatgcttaccgtaacttgaaagtatttcgatttcttggctttatatatcttgtggaaaggac

SEQ ID NO: 5107 - DNA, 240 bp, synthetic construct; identical to SEQ ID NO: 5106
  misc_feature 1..240: note = promoter
  source 1..240: mol_type = other DNA

SEQ ID NO: 5108 - DNA, 240 bp, synthetic construct
  misc_feature 1..240: note = promoter
  source 1..240: mol_type = other DNA
gagggcctatttcccatgattccttcatatttgcatatacgatacaaggctgttagagagataattggaataatttgactgtaaacacaaagatattagtacaaaatacgtgacgtagaaagtaataatttcttgggtagtttgcagttttaaaattatgttttaaaatggactatcatatgcttaccgtaacttgaaagtatttcgatttcttggctttatatatcttgtggaaaggac

SEQ ID NO: 5109 - DNA, 240 bp, synthetic construct; identical to SEQ ID NO: 5108
  misc_feature 1..240: note = promoter
  source 1..240: mol_type = other DNA

SEQ ID NO: 5110 - DNA, 240 bp, synthetic construct
  misc_feature 1..240: note = promoter
  source 1..240: mol_type = other DNA
gagggcctatttcccatgattccttcatatttgcatatacgatacaaggctgttagagagataattggaattatttgactgtaaacacaaagatattagtacaaaatacgtgacgtagaaagtaataatttcttgggtagtttgcagttttaaaattatgttttaaaatggactatcatatgcttaccgtaacttgaaagtatttcgatttcttggctttatatatcttgtggaaaggac

SEQ ID NO: 5111 - DNA, 240 bp, synthetic construct; identical to SEQ ID NO: 5110
  misc_feature 1..240: note = promoter
  source 1..240: mol_type = other DNA

SEQ ID NO: 5112 - DNA, 240 bp, synthetic construct
  misc_feature 1..240: note = promoter
  source 1..240: mol_type = other DNA
gagggcctatttcccatgattccttcatatttgcatatacgatacaaggctgttagagagataattggaattaattgactgtaaacacaaagatattagtacaaaatacgtgacgtagaaagtaataatttcttgggtagtttgcagttttaaaattatgttttaaaatggactatcatatgcttaccgtaacttgaaagtatttcgatttcttggctttatatatcttgtggaaaggac

SEQ ID NO: 5113 - DNA, 240 bp, synthetic construct; identical to SEQ ID NO: 5112
  misc_feature 1..240: note = promoter
  source 1..240: mol_type = other DNA

SEQ ID NO: 5114 - DNA, 240 bp, synthetic construct; identical to SEQ ID NO: 5112
  misc_feature 1..240: note = promoter
  source 1..240: mol_type = other DNA

SEQ ID NO: 5115 - DNA, 240 bp, synthetic construct
  misc_feature 1..240: note = promoter
  source 1..240: mol_type = other DNA
gagggcctatttcccatgattccttcatatttgcatatacgatacaaggctgttagagagataattggaattaatttactgtaaacacaaagatattagtacaaaatacgtgacgtagaaagtaataatttcttgggtagtttgcagttttaaaattatgttttaaaatggactatcatatgcttaccgtaacttgaaagtatttcgatttcttggctttatatatcttgtggaaaggac

SEQ ID NO: 5116 - DNA, 240 bp, synthetic construct
  misc_feature 1..240: note = promoter
  source 1..240: mol_type = other DNA
gagggcctatttcccatgattccttcatatttgcatatacgatacaaggctgttagagagataattggaattaatttgctgtaaacacaaagatattagtacaaaatacgtgacgtagaaagtaataatttcttgggtagtttgcagttttaaaattatgttttaaaatggactatcatatgcttaccgtaacttgaaagtatttcgatttcttggctttatatatcttgtggaaaggac

SEQ ID NO: 5117 - DNA, 240 bp, synthetic construct
  misc_feature 1..240: note = promoter
  source 1..240: mol_type = other DNA
gagggcctatttcccatgattccttcatatttgcatatacgatacaaggctgttagagagataattggaattaatttgatgtaaacacaaagatattagtacaaaatacgtgacgtagaaagtaataatttcttgggtagtttgcagttttaaaattatgttttaaaatggactatcatatgcttaccgtaacttgaaagtatttcgatttcttggctttatatatcttgtggaaaggac

SEQ ID NO: 5118 - DNA, 240 bp, synthetic construct
  misc_feature 1..240: note = promoter
  source 1..240: mol_type = other DNA
gagggcctatttcccatgattccttcatatttgcatatacgatacaaggctgttagagagataattggaattaatttgacgtaaacacaaagatattagtacaaaatacgtgacgtagaaagtaataatttcttgggtagtttgcagttttaaaattatgttttaaaatggactatcatatgcttaccgtaacttgaaagtatttcgatttcttggctttatatatcttgtggaaaggac

SEQ ID NO: 5119 - DNA, 240 bp, synthetic construct
  misc_feature 1..240: note = promoter
  source 1..240: mol_type = other DNA
gagggcctatttcccatgattccttcatatttgcatatacgatacaaggctgttagagagataattggaattaatttgacttaaacacaaagatattagtacaaaatacgtgacgtagaaagtaataatttcttgggtagtttgcagttttaaaattatgttttaaaatggactatcatatgcttaccgtaacttgaaagtatttcgatttcttggctttatatatcttgtggaaaggac

SEQ ID NO: 5120 - DNA, 240 bp, synthetic construct
  misc_feature 1..240: note = promoter
  source 1..240: mol_type = other DNA
gagggcctatttcccatgattccttcatatttgcatatacgatacaaggctgttagagagataattggaattaatttgactgaaacacaaagatattagtacaaaatacgtgacgtagaaagtaataatttcttgggtagtttgcagttttaaaattatgttttaaaatggactatcatatgcttaccgtaacttgaaagtatttcgatttcttggctttatatatcttgtggaaaggac

SEQ ID NO: 5121 - DNA, 240 bp, synthetic construct
  misc_feature 1..240: note = promoter
  source 1..240: mol_type = other DNA
gagggcctatttcccatgattccttcatatttgcatatacgatacaaggctgttagagagataattggaattaatttgactgtaacacaaagatattagtacaaaatacgtgacgtagaaagtaataatttcttgggtagtttgcagttttaaaattatgttttaaaatggactatcatatgcttaccgtaacttgaaagtatttcgatttcttggctttatatatcttgtggaaaggac

SEQ ID NO: 5122 - DNA, 240 bp, synthetic construct; identical to SEQ ID NO: 5121
  misc_feature 1..240: note = promoter
  source 1..240: mol_type = other DNA

SEQ ID NO: 5123 - DNA, 240 bp, synthetic construct; identical to SEQ ID NO: 5121
  misc_feature 1..240: note = promoter
  source 1..240: mol_type = other DNA

SEQ ID NO: 5124 - DNA, 240 bp, synthetic construct
  misc_feature 1..240: note = promoter
  source 1..240: mol_type = other DNA
gagggcctatttcccatgattccttcatatttgcatatacgatacaaggctgttagagagataattggaattaatttgactgtaaaacaaagatattagtacaaaatacgtgacgtagaaagtaataatttcttgggtagtttgcagttttaaaattatgttttaaaatggactatcatatgcttaccgtaacttgaaagtatttcgatttcttggctttatatatcttgtggaaaggac

SEQ ID NO: 5125 - DNA, 240 bp, synthetic construct
  misc_feature 1..240: note = promoter
  source 1..240: mol_type = other DNA
gagggcctatttcccatgattccttcatatttgcatatacgatacaaggctgttagagagataattggaattaatttgactgtaaaccaaagatattagtacaaaatacgtgacgtagaaagtaataatttcttgggtagtttgcagttttaaaattatgttttaaaatggactatcatatgcttaccgtaacttgaaagtatttcgatttcttggctttatatatcttgtggaaaggac

SEQ ID NO: 5126 - DNA, 240 bp, synthetic construct
  misc_feature 1..240: note = promoter
  source 1..240: mol_type = other DNA
gagggcctatttcccatgattccttcatatttgcatatacgatacaaggctgttagagagataattggaattaatttgactgtaaacaaaagatattagtacaaaatacgtgacgtagaaagtaataatttcttgggtagtttgcagttttaaaattatgttttaaaatggactatcatatgcttaccgtaacttgaaagtatttcgatttcttggctttatatatcttgtggaaaggac

SEQ ID NO: 5127 - DNA, 240 bp, synthetic construct
  misc_feature 1..240: note = promoter
  source 1..240: mol_type = other DNA
gagggcctatttcccatgattccttcatatttgcatatacgatacaaggctgttagagagataattggaattaatttgactgtaaacacaagatattagtacaaaatacgtgacgtagaaagtaataatttcttgggtagtttgcagttttaaaattatgttttaaaatggactatcatatgcttaccgtaacttgaaagtatttcgatttcttggctttatatatcttgtggaaaggac

SEQ ID NO: 5128 - DNA, 240 bp, synthetic construct; identical to SEQ ID NO: 5127
  misc_feature 1..240: note = promoter
  source 1..240: mol_type = other DNA

SEQ ID NO: 5129 - DNA, 240 bp, synthetic construct; identical to SEQ ID NO: 5127
  misc_feature 1..240: note = promoter
  source 1..240: mol_type = other DNA

SEQ ID NO: 5130 - DNA, 240 bp, synthetic construct
  misc_feature 1..240: note = promoter
  source 1..240: mol_type = other DNA
gagggcctatttcccatgattccttcatatttgcatatacgatacaaggctgttagagagataattggaattaatttgactgtaaacacaaaatattagtacaaaatacgtgacgtagaaagtaataatttcttgggtagtttgcagttttaaaattatgttttaaaatggactatcatatgcttaccgtaacttgaaagtatttcgatttcttggctttatatatcttgtggaaaggac

SEQ ID NO: 5131 - DNA, 240 bp, synthetic construct
  misc_feature 1..240: note = promoter
  source 1..240: mol_type = other DNA
gagggcctatttcccatgattccttcatatttgcatatacgatacaaggctgttagagagataattggaattaatttgactgtaaacacaaagtattagtacaaaatacgtgacgtagaaagtaataatttcttgggtagtttgcagttttaaaattatgttttaaaatggactatcatatgcttaccgtaacttgaaagtatttcgatttcttggctttatatatcttgtggaaaggac

SEQ ID NO: 5132 - DNA, 240 bp, synthetic construct
  misc_feature 1..240: note = promoter
  source 1..240: mol_type = other DNA
gagggcctatttcccatgattccttcatatttgcatatacgatacaaggctgttagagagataattggaattaatttgactgtaaacacaaagaattagtacaaaatacgtgacgtagaaagtaataatttcttgggtagtttgcagttttaaaattatgttttaaaatggactatcatatgcttaccgtaacttgaaagtatttcgatttcttggctttatatatcttgtggaaaggac

SEQ ID NO: 5133 - DNA, 240 bp, synthetic construct
  misc_feature 1..240: note = promoter
  source 1..240: mol_type = other DNA
gagggcctatttcccatgattccttcatatttgcatatacgatacaaggctgttagagagataattggaattaatttgactgtaaacacaaagatttagtacaaaatacgtgacgtagaaagtaataatttcttgggtagtttgcagttttaaaattatgttttaaaatggactatcatatgcttaccgtaacttgaaagtatttcgatttcttggctttatatatcttgtggaaaggac

SEQ ID NO: 5134 - DNA, 240 bp, synthetic construct
  misc_feature 1..240: note = promoter
  source 1..240: mol_type = other DNA
gagggcctatttcccatgattccttcatatttgcatatacgatacaaggctgttagagagataattggaattaatttgactgtaaacacaaagatatagtacaaaatacgtgacgtagaaagtaataatttcttgggtagtttgcagttttaaaattatgttttaaaatggactatcatatgcttaccgtaacttgaaagtatttcgatttcttggctttatatatcttgtggaaaggac

SEQ ID NO: 5135 - DNA, 240 bp, synthetic construct; identical to SEQ ID NO: 5134
  misc_feature 1..240: note = promoter
  source 1..240: mol_type = other DNA

SEQ ID NO: 5136 - DNA, 240 bp, synthetic construct
  misc_feature 1..240: note = promoter
  source 1..240: mol_type = other DNA
gagggcctatttcccatgattccttcatatttgcatatacgatacaaggctgttagagagataattggaattaatttgactgtaaacacaaagatattgtacaaaatacgtgacgtagaaagtaataatttcttgggtagtttgcagttttaaaattatgttttaaaatggactatcatatgcttaccgtaacttgaaagtatttcgatttcttggctttatatatcttgtggaaaggac

SEQ ID NO: 5137 - DNA, 240 bp, synthetic construct
  misc_feature 1..240: note = promoter
  source 1..240: mol_type = other DNA
gagggcctatttcccatgattccttcatatttgcatatacgatacaaggctgttagagagataattggaattaatttgactgtaaacacaaagatattatacaaaatacgtgacgtagaaagtaataatttcttgggtagtttgcagttttaaaattatgttttaaaatggactatcatatgcttaccgtaacttgaaagtatttcgatttcttggctttatatatcttgtggaaaggac

SEQ ID NO: 5138 - DNA, 240 bp, synthetic construct
  misc_feature 1..240: note = promoter
  source 1..240: mol_type = other DNA
gagggcctatttcccatgattccttcatatttgcatatacgatacaaggctgttagagagataattggaattaatttgactgtaaacacaaagatattagacaaaatacgtgacgtagaaagtaataatttcttgggtagtttgcagttttaaaattatgttttaaaatggactatcatatgcttaccgtaacttgaaagtatttcgatttcttggctttatatatcttgtggaaaggac

SEQ ID NO: 5139 - DNA, 240 bp, synthetic construct
  misc_feature 1..240: note = promoter
  source 1..240: mol_type = other DNA
gagggcctatttcccatgattccttcatatttgcatatacgatacaaggctgttagagagataattggaattaatttgactgtaaacacaaagatattagtcaaaatacgtgacgtagaaagtaataatttcttgggtagtttgcagttttaaaattatgttttaaaatggactatcatatgcttaccgtaacttgaaagtatttcgatttcttggctttatatatcttgtggaaaggac

SEQ ID NO: 5140 - DNA, 240 bp, synthetic construct
  misc_feature 1..240: note = promoter
  source 1..240: mol_type = other DNA
gagggcctatttcccatgattccttcatatttgcatatacgatacaaggctgttagagagataattggaattaatttgactgtaaacacaaagatattagtaaaaatacgtgacgtagaaagtaataatttcttgggtagtttgcagttttaaaattatgttttaaaatggactatcatatgcttaccgtaacttgaaagtatttcgatttcttggctttatatatcttgtggaaaggac

SEQ ID NO: 5141 - DNA, 240 bp, synthetic construct
  misc_feature 1..240: note = promoter
  source 1..240: mol_type = other DNA
gagggcctatttcccatgattccttcatatttgcatatacgatacaaggctgttagagagataattggaattaatttgactgtaaacacaaagatattagtacaaatacgtgacgtagaaagtaataatttcttgggtagtttgcagttttaaaattatgttttaaaatggactatcatatgcttaccgtaacttgaaagtatttcgatttcttggctttatatatcttgtggaaaggac

SEQ ID NO: 5142 - DNA, 240 bp, synthetic construct; identical to SEQ ID NO: 5141
  misc_feature 1..240: note = promoter
  source 1..240: mol_type = other DNA

SEQ ID NO: 5143 - DNA, 240 bp, synthetic construct; identical to SEQ ID NO: 5141
  misc_feature 1..240: note = promoter
  source 1..240: mol_type = other DNA

SEQ ID NO: 5144 - DNA, 240 bp, synthetic construct; identical to SEQ ID NO: 5141
  misc_feature 1..240: note = promoter
  source 1..240: mol_type = other DNA

SEQ ID NO: 5145 - DNA, 240 bp, synthetic construct
  misc_feature 1..240: note = promoter
  source 1..240: mol_type = other DNA
gagggcctatttcccatgattccttcatatttgcatatacgatacaaggctgttagagagataattggaattaatttgactgtaaacacaaagatattagtacaaaaacgtgacgtagaaagtaataatttcttgggtagtttgcagttttaaaattatgttttaaaatggactatcatatgcttaccgtaacttgaaagtatttcgatttcttggctttatatatcttgtggaaaggac

SEQ ID NO: 5146 - DNA, 240 bp, synthetic construct
  misc_feature 1..240: note = promoter
  source 1..240: mol_type = other DNA
gagggcctatttcccatgattccttcatatttgcatatacgatacaaggctgttagagagataattggaattaatttgactgtaaacacaaagatattagtacaaaatcgtgacgtagaaagtaataatttcttgggtagtttgcagttttaaaattatgttttaaaatggactatcatatgcttaccgtaacttgaaagtatttcgatttcttggctttatatatcttgtggaaaggac

SEQ ID NO: 5147 - DNA, 240 bp, synthetic construct
  misc_feature 1..240: note = promoter
  source 1..240: mol_type = other DNA
gagggcctatttcccatgattccttcatatttgcatatacgatacaaggctgttagagagataattggaattaatttgactgtaaacacaaagatattagtacaaaatagtgacgtagaaagtaataatttcttgggtagtttgcagttttaaaattatgttttaaaatggactatcatatgcttaccgtaacttgaaagtatttcgatttcttggctttatatatcttgtggaaaggac

SEQ ID NO: 5148 - DNA, 240 bp, synthetic construct
  misc_feature 1..240: note = promoter
  source 1..240: mol_type = other DNA
gagggcctatttcccatgattccttcatatttgcatatacgatacaaggctgttagagagataattggaattaatttgactgtaaacacaaagatattagtacaaaatactgacgtagaaagtaataatttcttgggtagtttgcagttttaaaattatgttttaaaatggactatcatatgcttaccgtaacttgaaagtatttcgatttcttggctttatatatcttgtggaaaggac

SEQ ID NO: 5149 - DNA, 240 bp, synthetic construct
  misc_feature 1..240: note = promoter
  source 1..240: mol_type = other DNA
gagggcctatttcccatgattccttcatatttgcatatacgatacaaggctgttagagagataattggaattaatttgactgtaaacacaaagatattagtacaaaatacggacgtagaaagtaataatttcttgggtagtttgcagttttaaaattatgttttaaaatggactatcatatgcttaccgtaacttgaaagtatttcgatttcttggctttatatatcttgtggaaaggac

SEQ ID NO: 5150 - DNA, 240 bp, synthetic construct
  misc_feature 1..240: note = promoter
  source 1..240: mol_type = other DNA
gagggcctatttcccatgattccttcatatttgcatatacgatacaaggctgttagagagataattggaattaatttgactgtaaacacaaagatattagtacaaaatacgtacgtagaaagtaataatttcttgggtagtttgcagttttaaaattatgttttaaaatggactatcatatgcttaccgtaacttgaaagtatttcgatttcttggctttatatatcttgtggaaaggac

SEQ ID NO: 5151 - DNA, 240 bp, synthetic construct
  misc_feature 1..240: note = promoter
  source 1..240: mol_type = other DNA
gagggcctatttcccatgattccttcatatttgcatatacgatacaaggctgttagagagataattggaattaatttgactgtaaacacaaagatattagtacaaaatacgtgcgtagaaagtaataatttcttgggtagtttgcagttttaaaattatgttttaaaatggactatcatatgcttaccgtaacttgaaagtatttcgatttcttggctttatatatcttgtggaaaggac

SEQ ID NO: 5152 - DNA, 240 bp, synthetic construct
  misc_feature 1..240: note = promoter
  source 1..240: mol_type = other DNA
gagggcctatttcccatgattccttcatatttgcatatacgatacaaggctgttagagagataattggaattaatttgactgtaaacacaaagatattagtacaaaatacgtgagtagaaagtaataatttcttgggtagtttgcagttttaaaattatgttttaaaatggactatcatatgcttaccgtaacttgaaagtatttcgatttcttggctttatatatcttgtggaaaggac

SEQ ID NO: 5153 - DNA, 240 bp, synthetic construct
  misc_feature 1..240: note = promoter
  source 1..240: mol_type = other DNA
gagggcctatttcccatgattccttcatatttgcatatacgatacaaggctgttagagagataattggaattaatttgactgtaaacacaaagatattagtacaaaatacgtgactagaaagtaataatttcttgggtagtttgcagttttaaaattatgttttaaaatggactatcatatgcttaccgtaacttgaaagtatttcgatttcttggctttatatatcttgtggaaaggac

SEQ ID NO: 5154 - DNA, 240 bp, synthetic construct
  misc_feature 1..240: note = promoter
  source 1..240: mol_type = other DNA
gagggcctatttcccatgattccttcatatttgcatatacgatacaaggctgttagagagataattggaattaatttgactgtaaacacaaagatattagtacaaaatacgtgacgagaaagtaataatttcttgggtagtttgcagttttaaaattatgttttaaaatggactatcatatgcttaccgtaacttgaaagtatttcgatttcttggctttatatatcttgtggaaaggac

SEQ ID NO: 5155 - DNA, 240 bp, synthetic construct
  misc_feature 1..240: note = promoter
  source 1..240: mol_type = other DNA
gagggcctatttcccatgattccttcatatttgcatatacgatacaaggctgttagagagataattggaattaatttgactgtaaacacaaagatattagtacaaaatacgtgacgtgaaagtaataatttcttgggtagtttgcagttttaaaattatgttttaaaatggactatcatatgcttaccgtaacttgaaagtatttcgatttcttggctttatatatcttgtggaaaggac

SEQ ID NO: 5156 - DNA, 240 bp, synthetic construct
  misc_feature 1..240: note = promoter
  source 1..240: mol_type = other DNA
gagggcctatttcccatgattccttcatatttgcatatacgatacaaggctgttagagagataattggaattaatttgactgtaaacacaaagatattagtacaaaatacgtgacgtaaaagtaataatttcttgggtagtttgcagttttaaaattatgttttaaaatggactatcatatgcttaccgtaacttgaaagtatttcgatttcttggctttatatatcttgtggaaaggac

SEQ ID NO: 5157 - DNA, 240 bp, synthetic construct
  misc_feature 1..240: note = promoter
  source 1..240: mol_type = other DNA
gagggcctatttcccatgattccttcatatttgcatatacgatacaaggctgttagagagataattggaattaatttgactgtaaacacaaagatattagtacaaaatacgtgacgtagaagtaataatttcttgggtagtttgcagttttaaaattatgttttaaaatggactatcatatgcttaccgtaacttgaaagtatttcgatttcttggctttatatatcttgtggaaaggac

SEQ ID NO: 5158 - DNA, 240 bp, synthetic construct; identical to SEQ ID NO: 5157
  misc_feature 1..240: note = promoter
  source 1..240: mol_type = other DNA

SEQ ID NO: 5159 - DNA, 240 bp, synthetic construct; identical to SEQ ID NO: 5157
  misc_feature 1..240: note = promoter
  source 1..240: mol_type = other DNA

SEQ ID NO: 5160 - DNA, 240 bp, synthetic construct
  misc_feature 1..240: note = promoter
  source 1..240: mol_type = other DNA
gagggcctatttcccatgattccttcatatttgcatatacgatacaaggctgttagagagataattggaattaatttgactgtaaacacaaagatattagtacaaaatacgtgacgtagaaataataatttcttgggtagtttgcagttttaaaattatgttttaaaatggactatcatatgcttaccgtaacttgaaagtatttcgatttcttggctttatatatcttgtggaaaggac

SEQ ID NO: 5161 - DNA, 240 bp, synthetic construct
  misc_feature 1..240: note = promoter
  source 1..240: mol_type = other DNA
gagggcctatttcccatgattccttcatatttgcatatacgatacaaggctgttagagagataattggaattaatttgactgtaaacacaaagatattagtacaaaatacgtgacgtagaaagaataatttcttgggtagtttgcagttttaaaattatgttttaaaatggactatcatatgcttaccgtaacttgaaagtatttcgatttcttggctttatatatcttgtggaaaggac

SEQ ID NO: 5162 - DNA, 240 bp, synthetic construct
  misc_feature 1..240: note = promoter
  source 1..240: mol_type = other DNA
gagggcctatttcccatgattccttcatatttgcatatacgatacaaggctgttagagagataattggaattaatttgactgtaaacacaaagatattagtacaaaatacgtgacgtagaaagtataatttcttgggtagtttgcagttttaaaattatgttttaaaatggactatcatatgcttaccgtaacttgaaagtatttcgatttcttggctttatatatcttgtggaaaggac

SEQ ID NO: 5163 - DNA, 240 bp, synthetic construct; identical to SEQ ID NO: 5162
  misc_feature 1..240: note = promoter
  source 1..240: mol_type = other DNA

SEQ ID NO: 5164 - DNA, 240 bp, synthetic construct
  misc_feature 1..240: note = promoter
  source 1..240: mol_type = other DNA
gagggcctatttcccatgattccttcatatttgcatatacgatacaaggctgttagagagataattggaattaatttgactgtaaacacaaagatattagtacaaaatacgtgacgtagaaagtaaaatttcttgggtagtttgcagttttaaaattatgttttaaaatggactatcatatgcttaccgtaacttgaaagtatttcgatttcttggctttatatatcttgtggaaaggac

SEQ ID NO: 5165 - DNA, 240 bp, synthetic construct
  misc_feature 1..240: note = promoter
  source 1..240: mol_type = other DNA
gagggcctatttcccatgattccttcatatttgcatatacgatacaaggctgttagagagataattggaattaatttgactgtaaacacaaagatattagtacaaaatacgtgacgtagaaagtaatatttcttgggtagtttgcagttttaaaattatgttttaaaatggactatcatatgcttaccgtaacttgaaagtatttcgatttcttggctttatatatcttgtggaaaggac

SEQ ID NO: 5166 - DNA, 240 bp, synthetic construct; identical to SEQ ID NO: 5165
  misc_feature 1..240: note = promoter
  source 1..240: mol_type = other DNA

SEQ ID NO: 5167 - DNA, 240 bp, synthetic construct
  misc_feature 1..240: note = promoter
  source 1..240: mol_type = other DNA
gagggcctatttcccatgattccttcatatttgcatatacgatacaaggctgttagagagataattggaattaatttgactgtaaacacaaagatattagtacaaaatacgtgacgtagaaagtaataattcttgggtagtttgcagttttaaaattatgttttaaaatggactatcatatgcttaccgtaacttgaaagtatttcgatttcttggctttatatatcttgtggaaaggac

SEQ ID NO: 5168 - DNA, 240 bp, synthetic construct; identical to SEQ ID NO: 5167
  misc_feature 1..240: note = promoter
  source 1..240: mol_type = other DNA

SEQ ID NO: 5169 - DNA, 240 bp, synthetic construct; identical to SEQ ID NO: 5167
  misc_feature 1..240: note = promoter
  source 1..240: mol_type = other DNA

SEQ ID NO: 5170 - DNA, 240 bp, synthetic construct
  misc_feature 1..240: note = promoter
  source 1..240: mol_type = other DNA
gagggcctatttcccatgattccttcatatttgcatatacgatacaaggctgttagagagataattggaattaatttgactgtaaacacaaagatattagtacaaaatacgtgacgtagaaagtaataatttttgggtagtttgcagttttaaaattatgttttaaaatggactatcatatgcttaccgtaacttgaaagtatttcgatttcttggctttatatatcttgtggaaaggac

SEQ ID NO: 5171 - DNA, 240 bp, synthetic construct
  misc_feature 1..240: note = promoter
  source 1..240: mol_type = other DNA
gagggcctatttcccatgattccttcatatttgcatatacgatacaaggctgttagagagataattggaattaatttgactgtaaacacaaagatattagtacaaaatacgtgacgtagaaagtaataatttctgggtagtttgcagttttaaaattatgttttaaaatggactatcatatgcttaccgtaacttgaaagtatttcgatttcttggctttatatatcttgtggaaaggac

SEQ ID NO: 5172 - DNA, 240 bp, synthetic construct; identical to SEQ ID NO: 5171
  misc_feature 1..240: note = promoter
  source 1..240: mol_type = other DNA

SEQ ID NO: 5173 - DNA, 240 bp, synthetic construct
  misc_feature 1..240: note = promoter
  source 1..240: mol_type = other DNA
gagggcctatttcccatgattccttcatatttgcatatacgatacaaggctgttagagagataattggaattaatttgactgtaaacacaaagatattagtacaaaatacgtgacgtagaaagtaataatttcttggtagtttgcagttttaaaattatgttttaaaatggactatcatatgcttaccgtaacttgaaagtatttcgatttcttggctttatatatcttgtggaaaggac

SEQ ID NO: 5174 - DNA, 240 bp, synthetic construct; identical to SEQ ID NO: 5173
  misc_feature 1..240: note = promoter
  source 1..240: mol_type = other DNA

SEQ ID NO: 5175 - DNA, 240 bp, synthetic construct; identical to SEQ ID NO: 5173
  misc_feature 1..240: note = promoter
  source 1..240: mol_type = other DNA

SEQ ID NO: 5176 - DNA, 240 bp, synthetic construct
  misc_feature 1..240: note = promoter
  source 1..240: mol_type = other DNA
gagggcctatttcccatgattccttcatatttgcatatacgatacaaggctgttagagagataattggaattaatttgactgtaaacacaaagatattagtacaaaatacgtgacgtagaaagtaataatttcttgggagtttgcagttttaaaattatgttttaaaatggactatcatatgcttaccgtaacttgaaagtatttcgatttcttggctttatatatcttgtggaaaggac

SEQ ID NO: 5177 - DNA, 240 bp, synthetic construct
  misc_feature 1..240: note = promoter
  source 1..240: mol_type = other DNA
gagggcctatttcccatgattccttcatatttgcatatacgatacaaggctgttagagagataattggaattaatttgactgtaaacacaaagatattagtacaaaatacgtgacgtagaaagtaataatttcttgggtgtttgcagttttaaaattatgttttaaaatggactatcatatgcttaccgtaacttgaaagtatttcgatttcttggctttatatatcttgtggaaaggac

SEQ ID NO: 5178 - DNA, 240 bp, synthetic construct
  misc_feature 1..240: note = promoter
  source 1..240: mol_type = other DNA
gagggcctatttcccatgattccttcatatttgcatatacgatacaaggctgttagagagataattggaattaatttgactgtaaacacaaagatattagtacaaaatacgtgacgtagaaagtaataatttcttgggtatttgcagttttaaaattatgttttaaaatggactatcatatgcttaccgtaacttgaaagtatttcgatttcttggctttatatatcttgtggaaaggac

SEQ ID NO: 5179 - DNA, 240 bp, synthetic construct
  misc_feature 1..240: note = promoter
  source 1..240: mol_type = other DNA
gagggcctatttcccatgattccttcatatttgcatatacgatacaaggctgttagagagataattggaattaatttgactgtaaacacaaagatattagtacaaaatacgtgacgtagaaagtaataatttcttgggtagttgcagttttaaaattatgttttaaaatggactatcatatgcttaccgtaacttgaaagtatttcgatttcttggctttatatatcttgtggaaaggac

SEQ ID NO: 5180 - DNA, 240 bp, synthetic construct; identical to SEQ ID NO: 5179
  misc_feature 1..240: note = promoter
  source 1..240: mol_type = other DNA

SEQ ID NO: 5181 - DNA, 240 bp, synthetic construct; identical to SEQ ID NO: 5179
  misc_feature 1..240: note = promoter
  source 1..240: mol_type = other DNA

SEQ ID NO: 5182 - DNA, 240 bp, synthetic construct
  misc_feature 1..240: note = promoter
  source 1..240: mol_type = other DNA
gagggcctatttcccatgattccttcatatttgcatatacgatacaaggctgttagagagataattggaattaatttgactgtaaacacaaagatattagtacaaaatacgtgacgtagaaagtaataatttcttgggtagtttcagttttaaaattatgttttaaaatggactatcatatgcttaccgtaacttgaaagtatttcgatttcttggctttatatatcttgtggaaaggac

SEQ ID NO: 5183 - DNA, 240 bp, synthetic construct
  misc_feature 1..240: note = promoter
  source 1..240: mol_type = other DNA
gagggcctatttcccatgattccttcatatttgcatatacgatacaaggctgttagagagataattggaattaatttgactgtaaacacaaagatattagtacaaaatacgtgacgtagaaagtaataatttcttgggtagtttgagttttaaaattatgttttaaaatggactatcatatgcttaccgtaacttgaaagtatttcgatttcttggctttatatatcttgtggaaaggac

SEQ ID NO: 5184 - DNA, 240 bp, synthetic construct
  misc_feature 1..240: note = promoter
  source 1..240: mol_type = other DNA
gagggcctatttcccatgattccttcatatttgcatatacgatacaaggctgttagagagataattggaattaatttgactgtaaacacaaagatattagtacaaaatacgtgacgtagaaagtaataatttcttgggtagtttgcgttttaaaattatgttttaaaatggactatcatatgcttaccgtaacttgaaagtatttcgatttcttggctttatatatcttgtggaaaggac

SEQ ID NO: 5185 - DNA, 240 bp, synthetic construct
  misc_feature 1..240: note = promoter
  source 1..240: mol_type = other DNA
gagggcctatttcccatgattccttcatatttgcatatacgatacaaggctgttagagagataattggaattaatttgactgtaaacacaaagatattagtacaaaatacgtgacgtagaaagtaataatttcttgggtagtttgcattttaaaattatgttttaaaatggactatcatatgcttaccgtaacttgaaagtatttcgatttcttggctttatatatcttgtggaaaggac

SEQ ID NO: 5186 - DNA, 240 bp, synthetic construct
  misc_feature 1..240: note = promoter
  source 1..240: mol_type = other DNA
gagggcctatttcccatgattccttcatatttgcatatacgatacaaggctgttagagagataattggaattaatttgactgtaaacacaaagatattagtacaaaatacgtgacgtagaaagtaataatttcttgggtagtttgcagtttaaaattatgttttaaaatggactatcatatgcttaccgtaacttgaaagtatttcgatttcttggctttatatatcttgtggaaaggac

SEQ ID NO: 5187 - DNA, 240 bp, synthetic construct; identical to SEQ ID NO: 5186
  misc_feature 1..240: note = promoter
  source 1..240: mol_type = other DNA

SEQ ID NO: 5188 - DNA, 240 bp, synthetic construct; identical to SEQ ID NO: 5186
  misc_feature 1..240: note = promoter
  source 1..240: mol_type = other DNA

SEQ ID NO: 5189 - DNA, 240 bp, synthetic construct; identical to SEQ ID NO: 5186
  misc_feature 1..240: note = promoter
  source 1..240: mol_type = other DNA

SEQ ID NO: 5190 - DNA, 240 bp, synthetic construct
  misc_feature 1..240: note = promoter
  source 1..240: mol_type = other DNA
gagggcctatttcccatgattccttcatatttgcatatacgatacaaggctgttagagagataattggaattaatttgactgtaaacacaaagatattagtacaaaatacgtgacgtagaaagtaataatttcttgggtagtttgcagttttaaattatgttttaaaatggactatcatatgcttaccgtaacttgaaagtatttcgatttcttggctttatatatcttgtggaaaggac

SEQ ID NO: 5191 - DNA, 240 bp, synthetic construct; identical to SEQ ID NO: 5190
  misc_feature 1..240: note = promoter
  source 1..240: mol_type = other DNA

SEQ ID NO: 5192 - DNA, 240 bp, synthetic construct; identical to SEQ ID NO: 5190
  misc_feature 1..240: note = promoter
  source 1..240: mol_type = other DNA

SEQ ID NO: 5193 - DNA, 240 bp, synthetic construct; identical to SEQ ID NO: 5190
  misc_feature 1..240: note = promoter
  source 1..240: mol_type = other DNA

SEQ ID NO: 5194 - DNA, 240 bp, synthetic construct
  misc_feature 1..240: note = promoter
  source 1..240: mol_type = other DNA
gagggcctatttcccatgattccttcatatttgcatatacgatacaaggctgttagagagataattggaattaatttgactgtaaacacaaagatattagtacaaaatacgtgacgtagaaagtaataatttcttgggtagtttgcagttttaaaatatgttttaaaatggactatcatatgcttaccgtaacttgaaagtatttcgatttcttggctttatatatcttgtggaaaggac

SEQ ID NO: 5195 - DNA, 240 bp, synthetic construct; identical to SEQ ID NO: 5194
  misc_feature 1..240: note = promoter
  source 1..240: mol_type = other DNA

SEQ ID NO: 5196 - DNA, 240 bp, synthetic construct
  misc_feature 1..240: note = promoter
  source 1..240: mol_type = other DNA
gagggcctatttcccatgattccttcatatttgcatatacgatacaaggctgttagagagataattggaattaatttgactgtaaacacaaagatattagtacaaaatacgtgacgtagaaagtaataatttcttgggtagtttgcagttttaaaatttgttttaaaatggactatcatatgcttaccgtaacttgaaagtatttcgatttcttggctttatatatcttgtggaaaggac

SEQ ID NO: 5197 - DNA, 240 bp, synthetic construct
  misc_feature 1..240: note = promoter
  source 1..240: mol_type = other DNA
gagggcctatttcccatgattccttcatatttgcatatacgatacaaggctgttagagagataattggaattaatttgactgtaaacacaaagatattagtacaaaatacgtgacgtagaaagtaataatttcttgggtagtttgcagttttaaaattagttttaaaatggactatcatatgcttaccgtaacttgaaagtatttcgatttcttggctttatatatcttgtggaaaggac

SEQ ID NO: 5198 - DNA, 240 bp, synthetic construct
  misc_feature 1..240: note = promoter
  source 1..240: mol_type = other DNA
gagggcctatttcccatgattccttcatatttgcatatacgatacaaggctgttagagagataattggaattaatttgactgtaaacacaaagatattagtacaaaatacgtgacgtagaaagtaataatttcttgggtagtttgcagttttaaaattatttttaaaatggactatcatatgcttaccgtaacttgaaagtatttcgatttcttggctttatatatcttgtggaaaggac

SEQ ID NO: 5199 - DNA, 240 bp, synthetic construct
  misc_feature 1..240: note = promoter
  source 1..240: mol_type = other DNA
gagggcctatttcccatgattccttcatatttgcatatacgatacaaggctgttagagagataattggaattaatttgactgtaaacacaaagatattagtacaaaatacgtgacgtagaaagtaataatttcttgggtagtttgcagttttaaaattatgtttaaaatggactatcatatgcttaccgtaacttgaaagtatttcgatttcttggctttatatatcttgtggaaaggac

SEQ ID NO: 5200 - DNA, 240 bp, synthetic construct; identical to SEQ ID NO: 5199
  misc_feature 1..240: note = promoter
  source 1..240: mol_type = other DNA

SEQ ID NO: 5201 - DNA, 240 bp, synthetic construct; identical to SEQ ID NO: 5199
  misc_feature 1..240: note = promoter
  source 1..240: mol_type = other DNA

SEQ ID NO: 5202 - DNA, 240 bp, synthetic construct; identical to SEQ ID NO: 5199
  misc_feature 1..240: note = promoter
  source 1..240: mol_type = other DNA

SEQ ID NO: 5203 - DNA, 240 bp, synthetic construct
  misc_feature 1..240: note = promoter
  source 1..240: mol_type = other DNA
gagggcctatttcccatgattccttcatatttgcatatacgatacaaggctgttagagagataattggaattaatttgactgtaaacacaaagatattagtacaaaatacgtgacgtagaaagtaataatttcttgggtagtttgcagttttaaaattatgttttaaatggactatcatatgcttaccgtaacttgaaagtatttcgatttcttggctttatatatcttgtggaaaggac

SEQ ID NO: 5204 - DNA, 240 bp, synthetic construct; identical to SEQ ID NO: 5203
  misc_feature 1..240: note = promoter
  source 1..240: mol_type = other DNA

SEQ ID NO: 5205 - DNA, 240 bp, synthetic construct; identical to SEQ ID NO: 5203
  misc_feature 1..240: note = promoter
  source 1..240: mol_type = other DNA

SEQ ID NO: 5206 - DNA, 240 bp, synthetic construct; identical to SEQ ID NO: 5203
  misc_feature 1..240: note = promoter
  source 1..240: mol_type = other DNA

SEQ ID NO: 5207 - DNA, 240 bp, synthetic construct
  misc_feature 1..240: note = promoter
  source 1..240: mol_type = other DNA
gagggcctatttcccatgattccttcatatttgcatatacgatacaaggctgttagagagataattggaattaatttgactgtaaacacaaagatattagtacaaaatacgtgacgtagaaagtaataatttcttgggtagtttgcagttttaaaattatgttttaaaaggactatcatatgcttaccgtaacttgaaagtatttcgatttcttggctttatatatcttgtggaaaggac

SEQ ID NO: 5208 - DNA, 240 bp, synthetic construct
  misc_feature 1..240: note = promoter
  source 1..240: mol_type = other DNA
gagggcctatttcccatgattccttcatatttgcatatacgatacaaggctgttagagagataattggaattaatttgactgtaaacacaaagatattagtacaaaatacgtgacgtagaaagtaataatttcttgggtagtttgcagttttaaaattatgttttaaaatgactatcatatgcttaccgtaacttgaaagtatttcgatttcttggctttatatatcttgtggaaaggac

SEQ ID NO: 5209 - DNA, 240 bp, synthetic construct; identical to SEQ ID NO: 5208
  misc_feature 1..240: note = promoter
  source 1..240: mol_type = other DNA

SEQ ID NO: 5210 - DNA, 240 bp, synthetic construct
  misc_feature 1..240: note = promoter
  source 1..240: mol_type = other DNA
gagggcctatttcccatgattccttcatatttgcatatacgatacaaggctgttagagagataattggaattaatttgactgtaaacacaaagatattagtacaaaatacgtgacgtagaaagtaataatttcttgggtagtttgcagttttaaaattatgttttaaaatggctatcatatgcttaccgtaacttgaaagtatttcgatttcttggctttatatatcttgtggaaaggac

SEQ ID NO: 5211 - DNA, 240 bp, synthetic construct
  misc_feature 1..240: note = promoter
  source 1..240: mol_type = other DNA
gagggcctatttcccatgattccttcatatttgcatatacgatacaaggctgttagagagataattggaattaatttgactgtaaacacaaagatattagtacaaaatacgtgacgtagaaagtaataatttcttgggtagtttgcagttttaaaattatgttttaaaatggatatcatatgcttaccgtaacttgaaagtatttcgatttcttggctttatatatcttgtggaaaggac

SEQ ID NO: 5212 - DNA, 240 bp, synthetic construct
  misc_feature 1..240: note = promoter
  source 1..240: mol_type = other DNA
gagggcctatttcccatgattccttcatatttgcatatacgatacaaggctgttagagagataattggaattaatttgactgtaaacacaaagatattagtacaaaatacgtgacgtagaaagtaataatttcttgggtagtttgcagttttaaaattatgttttaaaatggacatcatatgcttaccgtaacttgaaagtatttcgatttcttggctttatatatcttgtggaaaggac

SEQ ID NO: 5213 - DNA, 240 bp, synthetic construct
  misc_feature 1..240: note = promoter
  source 1..240: mol_type = other DNA
gagggcctatttcccatgattccttcatatttgcatatacgatacaaggctgttagagagataattggaattaatttgactgtaaacacaaagatattagtacaaaatacgtgacgtagaaagtaataatttcttgggtagtttgcagttttaaaattatgttttaaaatggacttcatatgcttaccgtaacttgaaagtatttcgatttcttggctttatatatcttgtggaaaggac

SEQ ID NO: 5214 - DNA, 240 bp, synthetic construct
  misc_feature 1..240: note = promoter
  source 1..240: mol_type = other DNA
gagggcctatttcccatgattccttcatatttgcatatacgatacaaggctgttagagagataattggaattaatttgactgtaaacacaaagatattagtacaaaatacgtgacgtagaaagtaataatttcttgggtagtttgcagttttaaaattatgttttaaaatggactacatatgcttaccgtaacttgaaagtatttcgatttcttggctttatatatcttgtggaaaggac

SEQ ID NO: 5215 - DNA, 240 bp, synthetic construct
  misc_feature 1..240: note = promoter
  source 1..240: mol_type = other DNA
gagggcctatttcccatgattccttcatatttgcatatacgatacaaggctgttagagagataattggaattaatttgactgtaaacacaaagatattagtacaaaatacgtgacgtagaaagtaataatttcttgggtagtttgcagttttaaaattatgttttaaaatggactatatatgcttaccgtaacttgaaagtatttcgatttcttggctttatatatcttgtggaaaggac

SEQ ID NO: 5216 - DNA, 240 bp, synthetic construct
  misc_feature 1..240: note = promoter
  source 1..240: mol_type = other DNA
gagggcctatttcccatgattccttcatatttgcatatacgatacaaggctgttagagagataattggaattaatttgactgtaaacacaaagatattagtacaaaatacgtgacgtagaaagtaataatttcttgggtagtttgcagttttaaaattatgttttaaaatggactatctatgcttaccgtaacttgaaagtatttcgatttcttggctttatatatcttgtggaaaggac

SEQ ID NO: 5217 - DNA, 240 bp, synthetic construct
  misc_feature 1..240: note = promoter
  source 1..240: mol_type = other DNA
gagggcctatttcccatgattccttcatatttgcatatacgatacaaggctgttagagagataattggaattaatttgactgtaaacacaaagatattagtacaaaatacgtgacgtagaaagtaataatttcttgggtagtttgcagttttaaaattatgttttaaaatggactatcaatgcttaccgtaacttgaaagtatttcgatttcttggctttatatatcttgtggaaaggac

SEQ ID NO: 5218 - DNA, 240 bp, synthetic construct
  misc_feature 1..240: note = promoter
  source 1..240: mol_type = other DNA
gagggcctatttcccatgattccttcatatttgcatatacgatacaaggctgttagagagataattggaattaatttgactgtaaacacaaagatattagtacaaaatacgtgacgtagaaagtaataatttcttgggtagtttgcagttttaaaattatgttttaaaatggactatcattgcttaccgtaacttgaaagtatttcgatttcttggctttatatatcttgtggaaaggac

SEQ ID NO: 5219 - DNA, 240 bp, synthetic construct
  misc_feature 1..240: note = promoter
  source 1..240: mol_type = other DNA
gagggcctatttcccatgattccttcatatttgcatatacgatacaaggctgttagagagataattggaattaatttgactgtaaacacaaagatattagtacaaaatacgtgacgtagaaagtaataatttcttgggtagtttgcagttttaaaattatgttttaaaatggactatcatagcttaccgtaacttgaaagtatttcgatttcttggctttatatatcttgtggaaaggac

SEQ ID NO: 5220 - DNA, 240 bp, synthetic construct
  misc_feature 1..240: note = promoter
  source 1..240: mol_type = other DNA
gagggcctatttcccatgattccttcatatttgcatatacgatacaaggctgttagagagataattggaattaatttgactgtaaacacaaagatattagtacaaaatacgtgacgtagaaagtaataatttcttgggtagtttgcagttttaaaattatgttttaaaatggactatcatatcttaccgtaacttgaaagtatttcgatttcttggctttatatatcttgtggaaaggac

SEQ ID NO: 5221 - DNA, 240 bp, synthetic construct
  misc_feature 1..240: note = promoter
  source 1..240: mol_type = other DNA
gagggcctatttcccatgattccttcatatttgcatatacgatacaaggctgttagagagataattggaattaatttgactgtaaacacaaagatattagtacaaaatacgtgacgtagaaagtaataatttcttgggtagtttgcagttttaaaattatgttttaaaatggactatcatatgttaccgtaacttgaaagtatttcgatttcttggctttatatatcttgtggaaaggac

SEQ ID NO: 5222 - DNA, 240 bp, synthetic construct
  misc_feature 1..240: note = promoter
  source 1..240: mol_type = other DNA
gagggcctatttcccatgattccttcatatttgcatatacgatacaaggctgttagagagataattggaattaatttgactgtaaacacaaagatattagtacaaaatacgtgacgtagaaagtaataatttcttgggtagtttgcagttttaaaattatgttttaaaatggactatcatatgctaccgtaacttgaaagtatttcgatttcttggctttatatatcttgtggaaaggac

SEQ ID NO: 5223 - DNA, 240 bp, synthetic construct; identical to SEQ ID NO: 5222
  misc_feature 1..240: note = promoter
  source 1..240: mol_type = other DNA

SEQ ID NO: 5224 - DNA, 240 bp, synthetic construct
  misc_feature 1..240: note = promoter
  source 1..240: mol_type = other DNA
gagggcctatttcccatgattccttcatatttgcatatacgatacaaggctgttagagagataattggaattaatttgactgtaaacacaaagatattagtacaaaatacgtgacgtagaaagtaataatttcttgggtagtttgcagttttaaaattatgttttaaaatggactatcatatgcttccgtaacttgaaagtatttcgatttcttggctttatatatcttgtggaaaggac

SEQ ID NO: 5225 - DNA, 240 bp, synthetic construct
  misc_feature 1..240: note = promoter
  source 1..240: mol_type = other DNA
gagggcctatttcccatgattccttcatatttgcatatacgatacaaggctgttagagagataattggaattaatttgactgtaaacacaaagatattagtacaaaatacgtgacgtagaaagtaataatttcttgggtagtttgcagttttaaaattatgttttaaaatggactatcatatgcttacgtaacttgaaagtatttcgatttcttggctttatatatcttgtggaaaggac

SEQ ID NO: 5226 - DNA, 240 bp, synthetic construct; identical to SEQ ID NO: 5225
  misc_feature 1..240: note = promoter
  source 1..240: mol_type = other DNA

SEQ ID NO: 5227 - DNA, 240 bp, synthetic construct
  misc_feature 1..240: note = promoter
  source 1..240: mol_type = other DNA
gagggcctatttcccatgattccttcatatttgcatatacgatacaaggctgttagagagataattggaattaatttgactgtaaacacaaagatattagtacaaaatacgtgacgtagaaagtaataatttcttgggtagtttgcagttttaaaattatgttttaaaatggactatcatatgcttacctaacttgaaagtatttcgatttcttggctttatatatcttgtggaaaggac

SEQ ID NO: 5228 - DNA, 240 bp, synthetic construct
  misc_feature 1..240: note = promoter
  source 1..240: mol_type = other DNA
gagggcctatttcccatgattccttcatatttgcatatacgatacaaggctgttagagagataattggaattaatttgactgtaaacacaaagatattagtacaaaatacgtgacgtagaaagtaataatttcttgggtagtttgcagttttaaaattatgttttaaaatggactatcatatgcttaccgaacttgaaagtatttcgatttcttggctttatatatcttgtggaaaggac

SEQ ID NO: 5229 - DNA, 240 bp, synthetic construct
  misc_feature 1..240: note = promoter
  source 1..240: mol_type = other DNA
gagggcctatttcccatgattccttcatatttgcatatacgatacaaggctgttagagagataattggaattaatttgactgtaaacacaaagatattagtacaaaatacgtgacgtagaaagtaataatttcttgggtagtttgcagttttaaaattatgttttaaaatggactatcatatgcttaccgtacttgaaagtatttcgatttcttggctttatatatcttgtggaaaggac

SEQ ID NO: 5230 - DNA, 240 bp, synthetic construct; identical to SEQ ID NO: 5229
  misc_feature 1..240: note = promoter
  source 1..240: mol_type = other DNA

SEQ ID NO: 5231 - DNA, 240 bp, synthetic construct
  misc_feature 1..240: note = promoter
  source 1..240: mol_type = other DNA
gagggcctatttcccatgattccttcatatttgcatatacgatacaaggctgttagagagataattggaattaatttgactgtaaacacaaagatattagtacaaaatacgtgacgtagaaagtaataatttcttgggtagtttgcagttttaaaattatgttttaaaatggactatcatatgcttaccgtaattgaaagtatttcgatttcttggctttatatatcttgtggaaaggac

SEQ ID NO: 5232 - DNA, 240 bp, synthetic construct
  misc_feature 1..240: note = promoter
  source 1..240: mol_type = other DNA
gagggcctatttcccatgattccttcatatttgcatatacgatacaaggctgttagagagataattggaattaatttgactgtaaacacaaagatattagtacaaaatacgtgacgtagaaagtaataatttcttgggtagtttgcagttttaaaattatgttttaaaatggactatcatatgcttaccgtaactgaaagtatttcgatttcttggctttatatatcttgtggaaaggac

SEQ ID NO: 5233 - DNA, 240 bp, synthetic construct; identical to SEQ ID NO: 5232
  misc_feature 1..240: note = promoter
  source 1..240: mol_type = other DNA

SEQ ID NO: 5234 - DNA, 240 bp, synthetic construct
  misc_feature 1..240: note = promoter
  source 1..240: mol_type = other DNA
gagggcctatttcccatgattccttcatatttgcatatacgatacaaggctgttagagagataattggaattaatttgactgtaaacacaaagatattagtacaaaatacgtgacgtagaaagtaataatttcttgggtagtttgcagttttaaaattatgttttaaaatggactatcatatgcttaccgtaacttaaagtatttcgatttcttggctttatatatcttgtggaaaggac

SEQ ID NO: 5235 - DNA, 240 bp, synthetic construct
  misc_feature 1..240: note = promoter
  source 1..240: mol_type = other DNA
gagggcctatttcccatgattccttcatatttgcatatacgatacaaggctgttagagagataattggaattaatttgactgtaaacacaaagatattagtacaaaatacgtgacgtagaaagtaataatttcttgggtagtttgcagttttaaaattatgttttaaaatggactatcatatgcttaccgtaacttgaagtatttcgatttcttggctttatatatcttgtggaaaggac

SEQ ID NO: 5236 - DNA, 240 bp, synthetic construct; identical to SEQ ID NO: 5235
  misc_feature 1..240: note = promoter
  source 1..240: mol_type = other DNA

SEQ ID NO: 5237 - DNA, 240 bp, synthetic construct; identical to SEQ ID NO: 5235
  misc_feature 1..240: note = promoter
  source 1..240: mol_type = other DNA

SEQ ID NO: 5238 - DNA, 240 bp, synthetic construct
  misc_feature 1..240: note = promoter
  source 1..240: mol_type = other DNA
gagggcctatttcccatgattccttcatatttgcatatacgatacaaggctgttagagagataattggaattaatttgactgtaaacacaaagatattagtacaaaatacgtgacgtagaaagtaataatttcttgggtagtttgcagttttaaaattatgttttaaaatggactatcatatgcttaccgtaacttgaaatatttcgatttcttggctttatatatcttgtggaaaggac

SEQ ID NO: 5239 - DNA, 240 bp, synthetic construct
  misc_feature 1..240: note = promoter
  source 1..240: mol_type = other DNA
gagggcctatttcccatgattccttcatatttgcatatacgatacaaggctgttagagagataattggaattaatttgactgtaaacacaaagatattagtacaaaatacgtgacgtagaaagtaataatttcttgggtagtttgcagttttaaaattatgttttaaaatggactatcatatgcttaccgtaacttgaaagatttcgatttcttggctttatatatcttgtggaaaggac

SEQ ID NO: 5240 - DNA, 240 bp, synthetic construct
  misc_feature 1..240: note = promoter
  source 1..240: mol_type = other DNA
gagggcctatttcccatgattccttcatatttgcatatacgatacaaggctgttagagagataattggaattaatttgactgtaaacacaaagatattagtacaaaatacgtgacgtagaaagtaataatttcttgggtagtttgcagttttaaaattatgttttaaaatggactatcatatgcttaccgtaacttgaaagttttcgatttcttggctttatatatcttgtggaaaggac

SEQ ID NO: 5241 - DNA, 240 bp, synthetic construct
  misc_feature 1..240: note = promoter
  source 1..240: mol_type = other DNA
gagggcctatttcccatgattccttcatatttgcatatacgatacaaggctgttagagagataattggaattaatttgactgtaaacacaaagatattagtacaaaatacgtgacgtagaaagtaataatttcttgggtagtttgcagttttaaaattatgttttaaaatggactatcatatgcttaccgtaacttgaaagtattcgatttcttggctttatatatcttgtggaaaggac

SEQ ID NO: 5242 - DNA, 240 bp, synthetic construct; identical to SEQ ID NO: 5241
  misc_feature 1..240: note = promoter
  source 1..240: mol_type = other DNA

SEQ ID NO: 5243 - DNA, 240 bp, synthetic construct; identical to SEQ ID NO: 5241
  misc_feature 1..240: note = promoter
  source 1..240: mol_type = other DNA

SEQ ID NO: 5244 - DNA, 240 bp, synthetic construct
  misc_feature 1..240: note = promoter
  source 1..240: mol_type = other DNA
gagggcctatttcccatgattccttcatatttgcatatacgatacaaggctgttagagagataattggaattaatttgactgtaaacacaaagatattagtacaaaatacgtgacgtagaaagtaataatttcttgggtagtttgcagttttaaaattatgttttaaaatggactatcatatgcttaccgtaacttgaaagtatttgatttcttggctttatatatcttgtggaaaggac

SEQ ID NO: 5245 - DNA, 240 bp, synthetic construct
  misc_feature 1..240: note = promoter
  source 1..240: mol_type = other DNA
gagggcctatttcccatgattccttcatatttgcatatacgatacaaggctgttagagagataattggaattaatttgactgtaaacacaaagatattagtacaaaatacgtgacgtagaaagtaataatttcttgggtagtttgcagttttaaaattatgttttaaaatggactatcatatgcttaccgtaacttgaaagtatttcatttcttggctttatatatcttgtggaaaggac

SEQ ID NO: 5246 - DNA, 240 bp, synthetic construct
  misc_feature 1..240: note = promoter
  source 1..240: mol_type = other DNA
gagggcctatttcccatgattccttcatatttgcatatacgatacaaggctgttagagagataattggaattaatttgactgtaaacacaaagatattagtacaaaatacgtgacgtagaaagtaataatttcttgggtagtttgcagttttaaaattatgttttaaaatggactatcatatgcttaccgtaacttgaaagtatttcgtttcttggctttatatatcttgtggaaaggac

SEQ ID NO: 5247 - DNA, 240 bp, synthetic construct
  misc_feature 1..240: note = promoter
  source 1..240: mol_type = other DNA
gagggcctatttcccatgattccttcatatttgcatatacgatacaaggctgttagagagataattggaattaatttgactgtaaacacaaagatattagtacaaaatacgtgacgtagaaagtaataatttcttgggtagtttgcagttttaaaattatgttttaaaatggactatcatatgcttaccgtaacttgaaagtatttcgattcttggctttatatatcttgtggaaaggac

SEQ ID NO: 5248 - DNA, 240 bp, synthetic construct; identical to SEQ ID NO: 5247
  misc_feature 1..240: note = promoter
  source 1..240: mol_type = other DNA

SEQ ID NO: 5249 - DNA, 240 bp, synthetic construct; identical to SEQ ID NO: 5247
  misc_feature 1..240: note = promoter
  source 1..240: mol_type = other DNA

SEQ ID NO: 5250 - DNA, 240 bp, synthetic construct
  misc_feature 1..240: note = promoter
  source 1..240: mol_type = other DNA
gagggcctatttcccatgattccttcatatttgcatatacgatacaaggctgttagagagataattggaattaatttgactgtaaacacaaagatattagtacaaaatacgtgacgtagaaagtaataatttcttgggtagtttgcagttttaaaattatgttttaaaatggactatcatatgcttaccgtaacttgaaagtatttcgatttttggctttatatatcttgtggaaaggac

SEQ ID NO: 5251 - DNA, 240 bp, synthetic construct
  misc_feature 1..240: note = promoter
  source 1..240: mol_type = other DNA
gagggcctatttcccatgattccttcatatttgcatatacgatacaaggctgttagagagataattggaattaatttgactgtaaacacaaagatattagtacaaaatacgtgacgtagaaagtaataatttcttgggtagtttgcagttttaaaattatgttttaaaatggactatcatatgcttaccgtaacttgaaagtatttcgatttctggctttatatatcttgtggaaaggac

SEQ ID NO: 5252 - DNA, 240 bp, synthetic construct; identical to SEQ ID NO: 5251
  misc_feature 1..240: note = promoter
  source 1..240: mol_type = other DNA

SEQ ID NO: 5253 - DNA, 240 bp, synthetic construct
  misc_feature 1..240: note = promoter
  source 1..240: mol_type = other DNA
gagggcctatttcccatgattccttcatatttgcatatacgatacaaggctgttagagagataattggaattaatttgactgtaaacacaaagatattagtacaaaatacgtgacgtagaaagtaataatttcttgggtagtttgcagttttaaaattatgttttaaaatggactatcatatgcttaccgtaacttgaaagtatttcgatttcttgctttatatatcttgtggaaaggac

SEQ ID NO: 5254 - DNA, 240 bp, synthetic construct; identical to SEQ ID NO: 5253
  misc_feature 1..240: note = promoter
  source 1..240: mol_type = other DNA

SEQ ID NO: 5255 - DNA, 240 bp, synthetic construct
  misc_feature 1..240: note = promoter
  source 1..240: mol_type = other DNA
gagggcctatttcccatgattccttcatatttgcatatacgatacaaggctgttagagagataattggaattaatttgactgtaaacacaaagatattagtacaaaatacgtgacgtagaaagtaataatttcttgggtagtttgcagttttaaaattatgttttaaaatggactatcatatgcttaccgtaacttgaaagtatttcgatttcttggtttatatatcttgtggaaaggac

SEQ ID NO: 5256 - DNA, 240 bp, synthetic construct
  misc_feature 1..240: note = promoter
  source 1..240: mol_type = other DNA
gagggcctatttcccatgattccttcatatttgcatatacgatacaaggctgttagagagataattggaattaatttgactgtaaacacaaagatattagtacaaaatacgtgacgtagaaagtaataatttcttgggtagtttgcagttttaaaattatgttttaaaatggactatcatatgcttaccgtaacttgaaagtatttcgatttcttggcttatatatcttgtggaaaggac

SEQ ID NO: 5257 - DNA, 240 bp, synthetic construct; identical to SEQ ID NO: 5256
  misc_feature 1..240: note = promoter
  source 1..240: mol_type = other DNA

SEQ ID NO: 5258 - DNA, 240 bp, synthetic construct; identical to SEQ ID NO: 5256
  misc_feature 1..240: note = promoter
  source 1..240: mol_type = other DNA

SEQ ID NO: 5259 - DNA, 240 bp, synthetic construct
  misc_feature 1..240: note = promoter
  source 1..240: mol_type = other DNA
gagggcctatttcccatgattccttcatatttgcatatacgatacaaggctgttagagagataattggaattaatttgactgtaaacacaaagatattagtacaaaatacgtgacgtagaaagtaataatttcttgggtagtttgcagttttaaaattatgttttaaaatggactatcatatgcttaccgtaacttgaaagtatttcgatttcttggcttttatatcttgtggaaaggac

SEQ ID NO: 5260 - DNA, 240 bp, synthetic construct
  misc_feature 1..240: note = promoter
  source 1..240: mol_type = other DNA
gagggcctatttcccatgattccttcatatttgcatatacgatacaaggctgttagagagataattggaattaatttgactgtaaacacaaagatattagtacaaaatacgtgacgtagaaagtaataatttcttgggtagtttgcagttttaaaattatgttttaaaatggactatcatatgcttaccgtaacttgaaagtatttcgatttcttggctttaatatcttgtggaaaggac

SEQ ID NO: 5261 - DNA, 240 bp, synthetic construct
  misc_feature 1..240: note = promoter
  source 1..240: mol_type = other DNA
gagggcctatttcccatgattccttcatatttgcatatacgatacaaggctgttagagagataattggaattaatttgactgtaaacacaaagatattagtacaaaatacgtgacgtagaaagtaataatttcttgggtagtttgcagttttaaaattatgttttaaaatggactatcatatgcttaccgtaacttgaaagtatttcgatttcttggctttattatcttgtggaaaggac

SEQ ID NO: 5262 - DNA, 240 bp, synthetic construct
  misc_feature 1..240: note = promoter
  source 1..240: mol_type = other DNA
gagggcctatttcccatgattccttcatatttgcatatacgatacaaggctgttagagagataattggaattaatttgactgtaaacacaaagatattagtacaaaatacgtgacgtagaaagtaataatttcttgggtagtttgcagttttaaaattatgttttaaaatggactatcatatgcttaccgtaacttgaaagtatttcgatttcttggctttataatcttgtggaaaggac

SEQ ID NO: 5263 - DNA, 240 bp, synthetic construct
  misc_feature 1..240: note = promoter
  source 1..240: mol_type = other DNA
gagggcctatttcccatgattccttcatatttgcatatacgatacaaggctgttagagagataattggaattaatttgactgtaaacacaaagatattagtacaaaatacgtgacgtagaaagtaataatttcttgggtagtttgcagttttaaaattatgttttaaaatggactatcatatgcttaccgtaacttgaaagtatttcgatttcttggctttatattcttgtggaaaggac

SEQ ID NO: 5264 - DNA, 240 bp, synthetic construct
  misc_feature 1..240: note = promoter
  source 1..240: mol_type = other DNA
gagggcctatttcccatgattccttcatatttgcatatacgatacaaggctgttagagagataattggaattaatttgactgtaaacacaaagatattagtacaaaatacgtgacgtagaaagtaataatttcttgggtagtttgcagttttaaaattatgttttaaaatggactatcatatgcttaccgtaacttgaaagtatttcgatttcttggctttatatacttgtggaaaggac

SEQ ID NO: 5265 - DNA, 240 bp, synthetic construct
  misc_feature 1..240: note = promoter
  source 1..240: mol_type = other DNA
gagggcctatttcccatgattccttcatatttgcatatacgatacaaggctgttagagagataattggaattaatttgactgtaaacacaaagatattagtacaaaatacgtgacgtagaaagtaataatttcttgggtagtttgcagttttaaaattatgttttaaaatggactatcatatgcttaccgtaacttgaaagtatttcgatttcttggctttatatatttgtggaaaggac

SEQ ID NO: 5266 - DNA, 240 bp, synthetic construct
  misc_feature 1..240: note = promoter
  source 1..240: mol_type = other DNA
gagggcctatttcccatgattccttcatatttgcatatacgatacaaggctgttagagagataattggaattaatttgactgtaaacacaaagatattagtacaaaatacgtgacgtagaaagtaataatttcttgggtagtttgcagttttaaaattatgttttaaaatggactatcatatgcttaccgtaacttgaaagtatttcgatttcttggctttatatatctgtggaaaggac

SEQ ID NO: 5267 - DNA, 240 bp, synthetic construct; identical to SEQ ID NO: 5266
  misc_feature 1..240: note = promoter
  source 1..240: mol_type = other DNA

SEQ ID NO: 5268 - DNA, 240 bp, synthetic construct
  misc_feature 1..240: note = promoter
  source 1..240: mol_type = other DNA
gagggcctatttcccatgattccttcatatttgcatatacgatacaaggctgttagagagataattggaattaatttgactgtaaacacaaagatattagtacaaaatacgtgacgtagaaagtaataatttcttgggtagtttgcagttttaaaattatgttttaaaatggactatcatatgcttaccgtaacttgaaagtatttcgatttcttggctttatatatctttggaaaggac

SEQ ID NO: 5269 - DNA, 240 bp, synthetic construct
  misc_feature 1..240: note = promoter
  source 1..240: mol_type = other DNA
gagggcctatttcccatgattccttcatatttgcatatacgatacaaggctgttagagagataattggaattaatttgactgtaaacacaaagatattagtacaaaatacgtgacgtagaaagtaataatttcttgggtagtttgcagttttaaaattatgttttaaaatggactatcatatgcttaccgtaacttgaaagtatttcgatttcttggctttatatatcttgggaaaggac

SEQ ID NO: 5270 - DNA, 240 bp, synthetic construct
  misc_feature 1..240: note = promoter
  source 1..240: mol_type = other DNA
gagggcctatttcccatgattccttcatatttgcatatacgatacaaggctgttagagagataattggaattaatttgactgtaaacacaaagatattagtacaaaatacgtgacgtagaaagtaataatttcttgggtagtttgcagttttaaaattatgttttaaaatggactatcatatgcttaccgtaacttgaaagtatttcgatttcttggctttatatatcttgtgaaaggac

SEQ ID NO: 5271 - DNA, 240 bp, synthetic construct; identical to SEQ ID NO: 5270
  misc_feature 1..240: note = promoter
  source 1..240: mol_type = other DNA

SEQ ID NO: 5272 - DNA, 240 bp, synthetic construct
  misc_feature 1..240: note = promoter
  source 1..240: mol_type = other DNA
gagggcctatttcccatgattccttcatatttgcatatacgatacaaggctgttagagagataattggaattaatttgactgtaaacacaaagatattagtacaaaatacgtgacgtagaaagtaataatttcttgggtagtttgcagttttaaaattatgttttaaaatggactatcatatgcttaccgtaacttgaaagtatttcgatttcttggctttatatatcttgtggaaggac

SEQ ID NO: 5273 - DNA, 240 bp, synthetic construct; identical to SEQ ID NO: 5272
  misc_feature 1..240: note = promoter
  source 1..240: mol_type = other DNA

SEQ ID NO: 5274 - DNA, 240 bp, synthetic construct; identical to SEQ ID NO: 5272
  misc_feature 1..240: note = promoter
  source 1..240: mol_type = other DNA

SEQ ID NO: 5275 - DNA, 240 bp, synthetic construct
  misc_feature 1..240: note = promoter
  source 1..240: mol_type = other DNA
gagggcctatttcccatgattccttcatatttgcatatacgatacaaggctgttagagagataattggaattaatttgactgtaaacacaaagatattagtacaaaatacgtgacgtagaaagtaataatttcttgggtagtttgcagttttaaaattatgttttaaaatggactatcatatgcttaccgtaacttgaaagtatttcgatttcttggctttatatatcttgtggaaagac

SEQ ID NO: 5276 - DNA, 240 bp, synthetic construct; identical to SEQ ID NO: 5275
  misc_feature 1..240: note = promoter
  source 1..240: mol_type = other DNA

SEQ ID NO: 5277 - DNA, 240 bp, synthetic construct
  misc_feature 1..240: note = promoter
  source 1..240: mol_type = other DNA
gagggcctatttcccatgattccttcatatttgcatatacgatacaaggctgttagagagataattggaattaatttgactgtaaacacaaagatattagtacaaaatacgtgacgtagaaagtaataatttcttgggtagtttgcagttttaaaattatgttttaaaatggactatcatatgcttaccgtaacttgaaagtatttcgatttcttggctttatatatcttgtggaaaggc

SEQ ID NO: 5278 - DNA, 240 bp, synthetic construct
  misc_feature 1..240: note = promoter
  source 1..240: mol_type = other DNA
gagggcctatttcccatgattccttcatatttgcatatacgatacaaggctgttagagagataattggaattaatttgactgtaaacacaaagatattagtacaaaatacgtgacgtagaaagtaataatttcttgggtagtttgcagttttaaaattatgttttaaaatggactatcatatgcttaccgtaacttgaaagtatttcgatttcttggctttatatatcttgtggaaagga

SEQ ID NO: 5279 - DNA, 239 bp, synthetic construct
  misc_feature 1..239: note = promoter
  source 1..239: mol_type = other DNA
gggcctatttcccatgattccttcatatttgcatatacgatacaaggctgttagagagataattggaattaatttgactgtaaacacaaagatattagtacaaaatacgtgacgtagaaagtaataatttcttgggtagtttgcagttttaaaattatgttttaaaatggactatcatatgcttaccgtaacttgaaagtatttcgatttcttggctttatatatcttgtggaaaggac

SEQ ID NO: 5280 - DNA, 239 bp, synthetic construct; identical to SEQ ID NO: 5279
  misc_feature 1..239: note = promoter
  source 1..239: mol_type = other DNA

SEQ ID NO: 5281 - DNA, 239 bp, synthetic construct
  misc_feature 1..239: note = promoter
  source 1..239: mol_type = other DNA
gagcctatttcccatgattccttcatatttgcatatacgatacaaggctgttagagagataattggaattaatttgactgtaaacacaaagatattagtacaaaatacgtgacgtagaaagtaataatttcttgggtagtttgcagttttaaaattatgttttaaaatggactatcatatgcttaccgtaacttgaaagtatttcgatttcttggctttatatatcttgtggaaaggac

SEQ ID NO: 5282 - DNA, 239 bp, synthetic construct; identical to SEQ ID NO: 5281
  misc_feature 1..239: note = promoter
  source 1..239: mol_type = other DNA

SEQ ID NO: 5283 - DNA, 239 bp, synthetic construct
  misc_feature 1..239: note = promoter
  source 1..239: mol_type = other DNA
gaggctatttcccatgattccttcatatttgcatatacgatacaaggctgttagagagataattggaattaatttgactgtaaacacaaagatattagtacaaaatacgtgacgtagaaagtaataatttcttgggtagtttgcagttttaaaattatgttttaaaatggactatcatatgcttaccgtaacttgaaagtatttcgatttcttggctttatatatcttgtggaaaggac

SEQ ID NO: 5284 - DNA, 239 bp, synthetic construct
  misc_feature 1..239: note = promoter
  source 1..239: mol_type = other DNA
gagggtatttcccatgattccttcatatttgcatatacgatacaaggctgttagagagataattggaattaatttgactgtaaacacaaagatattagtacaaaatacgtgacgtagaaagtaataatttcttgggtagtttgcagttttaaaattatgttttaaaatggactatcatatgcttaccgtaacttgaaagtatttcgatttcttggctttatatatcttgtggaaaggac

SEQ ID NO: 5285 - DNA, 239 bp, synthetic construct
  misc_feature 1..239: note = promoter
  source 1..239: mol_type = other DNA
gagggcatttcccatgattccttcatatttgcatatacgatacaaggctgttagagagataattggaattaatttgactgtaaacacaaagatattagtacaaaatacgtgacgtagaaagtaataatttcttgggtagtttgcagttttaaaattatgttttaaaatggactatcatatgcttaccgtaacttgaaagtatttcgatttcttggctttatatatcttgtggaaaggac

SEQ ID NO: 5286 - DNA, 239 bp, synthetic construct
  misc_feature 1..239: note = promoter
  source 1..239: mol_type = other DNA
gagggcctttcccatgattccttcatatttgcatatacgatacaaggctgttagagagataattggaattaatttgactgtaaacacaaagatattagtacaaaatacgtgacgtagaaagtaataatttcttgggtagtttgcagttttaaaattatgttttaaaatggactatcatatgcttaccgtaacttgaaagtatttcgatttcttggctttatatatcttgtggaaaggac

SEQ ID NO: 5287 - DNA, 239 bp, synthetic construct; identical to SEQ ID NO: 5286
  misc_feature 1..239: note = promoter
  source 1..239: mol_type = other DNA

SEQ ID NO: 5288 - DNA, 239 bp, synthetic construct
  misc_feature 1..239: note = promoter
  source 1..239: mol_type = other DNA
gagggcctatcccatgattccttcatatttgcatatacgatacaaggctgttagagagataattggaattaatttgactgtaaacacaaagatattagtacaaaatacgtgacgtagaaagtaataatttcttgggtagtttgcagttttaaaattatgttttaaaatggactatcatatgcttaccgtaacttgaaagtatttcgatttcttggctttatatatcttgtggaaaggac

SEQ ID NO: 5289 - DNA, 239 bp, synthetic construct; identical to SEQ ID NO: 5288
  misc_feature 1..239: note = promoter
  source 1..239: mol_type = other DNA

SEQ ID NO: 5290 - DNA, 239 bp, synthetic construct
  misc_feature 1..239: note = promoter
  source 1..239: mol_type = other DNA
gagggcctattccatgattccttcatatttgcatatacgatacaaggctgttagagagataattggaattaatttgactgtaaacacaaagatattagtacaaaatacgtgacgtagaaagtaataatttcttgggtagtttgcagttttaaaattatgttttaaaatggactatcatatgcttaccgtaacttgaaagtatttcgatttcttggctttatatatcttgtggaaaggac

SEQ ID NO: 5291 - DNA, 239 bp, synthetic construct
  misc_feature 1..239: note = promoter
  source 1..239: mol_type = other DNA
gagggcctatttcatgattccttcatatttgcatatacgatacaaggctgttagagagataattggaattaatttgactgtaaacacaaagatattagtacaaaatacgtgacgtagaaagtaataatttcttgggtagtttgcagttttaaaattatgttttaaaatggactatcatatgcttaccgtaacttgaaagtatttcgatttcttggctttatatatcttgtggaaaggac

SEQ ID NO: 5292 - DNA, 239 bp, synthetic construct; identical to SEQ ID NO: 5291
  misc_feature 1..239: note = promoter
  source 1..239: mol_type = other DNA

SEQ ID NO: 5293 - DNA, 239 bp, synthetic construct
  misc_feature 1..239: note = promoter
  source 1..239: mol_type = other DNA
gagggcctatttcctgattccttcatatttgcatatacgatacaaggctgttagagagataattggaattaatttgactgtaaacacaaagatattagtacaaaatacgtgacgtagaaagtaataatttcttgggtagtttgcagttttaaaattatgttttaaaatggactatcatatgcttaccgtaacttgaaagtatttcgatttcttggctttatatatcttgtggaaaggac

SEQ ID NO: 5294 - DNA, 239 bp, synthetic construct
  misc_feature 1..239: note = promoter
  source 1..239: mol_type = other DNA
gagggcctatttcccgattccttcatatttgcatatacgatacaaggctgttagagagataattggaattaatttgactgtaaacacaaagatattagtacaaaatacgtgacgtagaaagtaataatttcttgggtagtttgcagttttaaaattatgttttaaaatggactatcatatgcttaccgtaacttgaaagtatttcgatttcttggctttatatatcttgtggaaaggac

SEQ ID NO: 5295 - DNA, 239 bp, synthetic construct
  misc_feature 1..239: note = promoter
  source 1..239: mol_type = other DNA
gagggcctatttcccaattccttcatatttgcatatacgatacaaggctgttagagagataattggaattaatttgactgtaaacacaaagatattagtacaaaatacgtgacgtagaaagtaataatttcttgggtagtttgcagttttaaaattatgttttaaaatggactatcatatgcttaccgtaacttgaaagtatttcgatttcttggctttatatatcttgtggaaaggac

SEQ ID NO: 5296 - DNA, 239 bp, synthetic construct
  misc_feature 1..239: note = promoter
  source 1..239: mol_type = other DNA
gagggcctatttcccatttccttcatatttgcatatacgatacaaggctgttagagagataattggaattaatttgactgtaaacacaaagatattagtacaaaatacgtgacgtagaaagtaataatttcttgggtagtttgcagttttaaaattatgttttaaaatggactatcatatgcttaccgtaacttgaaagtatttcgatttcttggctttatatatcttgtggaaaggac

SEQ ID NO: 5297 - DNA, 239 bp, synthetic construct
  misc_feature 1..239: note = promoter
  source 1..239: mol_type = other DNA
gagggcctatttcccatgtccttcatatttgcatatacgatacaaggctgttagagagataattggaattaatttgactgtaaacacaaagatattagtacaaaatacgtgacgtagaaagtaataatttcttgggtagtttgcagttttaaaattatgttttaaaatggactatcatatgcttaccgtaacttgaaagtatttcgatttcttggctttatatatcttgtggaaaggac

SEQ ID NO: 5298 - DNA, 239 bp, synthetic construct
  misc_feature 1..239: note = promoter
  source 1..239: mol_type = other DNA
gagggcctatttcccatgaccttcatatttgcatatacgatacaaggctgttagagagataattggaattaatttgactgtaaacacaaagatattagtacaaaatacgtgacgtagaaagtaataatttcttgggtagtttgcagttttaaaattatgttttaaaatggactatcatatgcttaccgtaacttgaaagtatttcgatttcttggctttatatatcttgtggaaaggac

SEQ ID NO: 5299 - DNA, 239 bp, synthetic construct
  misc_feature 1..239: note = promoter
  source 1..239: mol_type = other DNA
gagggcctatttcccatgatcttcatatttgcatatacgatacaaggctgttagagagataattggaattaatttgactgtaaacacaaagatattagtacaaaatacgtgacgtagaaagtaataatttcttgggtagtttgcagttttaaaattatgttttaaaatggactatcatatgcttaccgtaacttgaaagtatttcgatttcttggctttatatatcttgtggaaaggac

SEQ ID NO: 5300 - DNA, 239 bp, synthetic construct
  misc_feature 1..239: note = promoter
  source 1..239: mol_type = other DNA
gagggcctatttcccatgattttcatatttgcatatacgatacaaggctgttagagagataattggaattaatttgactgtaaacacaaagatattagtacaaaatacgtgacgtagaaagtaataatttcttgggtagtttgcagttttaaaattatgttttaaaatggactatcatatgcttaccgtaacttgaaagtatttcgatttcttggctttatatatcttgtggaaaggac

SEQ ID NO: 5301 - DNA, 239 bp, synthetic construct
  misc_feature 1..239: note = promoter
  source 1..239: mol_type = other DNA
gagggcctatttcccatgattctcatatttgcatatacgatacaaggctgttagagagataattggaattaatttgactgtaaacacaaagatattagtacaaaatacgtgacgtagaaagtaataatttcttgggtagtttgcagttttaaaattatgttttaaaatggactatcatatgcttaccgtaacttgaaagtatttcgatttcttggctttatatatcttgtggaaaggac

SEQ ID NO: 5302 - DNA, 239 bp, synthetic construct
  misc_feature 1..239: note = promoter
  source 1..239: mol_type = other DNA
gagggcctatttcccatgattcccatatttgcatatacgatacaaggctgttagagagataattggaattaatttgactgtaaacacaaagatattagtacaaaatacgtgacgtagaaagtaataatttcttgggtagtttgcagttttaaaattatgttttaaaatggactatcatatgcttaccgtaacttgaaagtatttcgatttcttggctttatatatcttgtggaaaggac

SEQ ID NO: 5303 - DNA, 239 bp, synthetic construct
  misc_feature 1..239: note = promoter
  source 1..239: mol_type = other DNA
gagggcctatttcccatgattcctatatttgcatatacgatacaaggctgttagagagataattggaattaatttgactgtaaacacaaagatattagtacaaaatacgtgacgtagaaagtaataatttcttgggtagtttgcagttttaaaattatgttttaaaatggactatcatatgcttaccgtaacttgaaagtatttcgatttcttggctttatatatcttgtggaaaggac

SEQ ID NO: 5304 - DNA, 239 bp, synthetic construct
  misc_feature 1..239: note = promoter
  source 1..239: mol_type = other DNA
gagggcctatttcccatgattcctttatttgcatatacgatacaaggctgttagagagataattggaattaatttgactgtaaacacaaagatattagtacaaaatacgtgacgtagaaagtaataatttcttgggtagtttgcagttttaaaattatgttttaaaatggactatcatatgcttaccgtaacttgaaagtatttcgatttcttggctttatatatcttgtggaaaggac

SEQ ID NO: 5305 - DNA, 239 bp, synthetic construct
  misc_feature 1..239: note = promoter
  source 1..239: mol_type = other DNA
gagggcctatttcccatgattccttcatttgcatatacgatacaaggctgttagagagataattggaattaatttgactgtaaacacaaagatattagtacaaaatacgtgacgtagaaagtaataatttcttgggtagtttgcagttttaaaattatgttttaaaatggactatcatatgcttaccgtaacttgaaagtatttcgatttcttggctttatatatcttgtggaaaggac

SEQ ID NO: 5306 - DNA, 239 bp, synthetic construct; identical to SEQ ID NO: 5305
  misc_feature 1..239: note = promoter
  source 1..239: mol_type = other DNA

SEQ ID NO: 5307 - DNA, 239 bp, synthetic construct; identical to SEQ ID NO: 5305
  misc_feature 1..239: note = promoter
  source 1..239: mol_type = other DNA

SEQ ID NO: 5308 - DNA, 239 bp, synthetic construct
  misc_feature 1..239: note = promoter
  source 1..239: mol_type = other DNA
gagggcctatttcccatgattccttcatatgcatatacgatacaaggctgttagagagataattggaattaatttgactgtaaacacaaagatattagtacaaaatacgtgacgtagaaagtaataatttcttgggtagtttgcagttttaaaattatgttttaaaatggactatcatatgcttaccgtaacttgaaagtatttcgatttcttggctttatatatcttgtggaaaggac

SEQ ID NO: 5309 - DNA, 239 bp, synthetic construct; identical to SEQ ID NO: 5308
  misc_feature 1..239: note = promoter
  source 1..239: mol_type = other DNA

SEQ ID NO: 5310 - DNA, 239 bp, synthetic construct
  misc_feature 1..239: note = promoter
  source 1..239: mol_type = other DNA
gagggcctatttcccatgattccttcatattcatatacgatacaaggctgttagagagataattggaattaatttgactgtaaacacaaagatattagtacaaaatacgtgacgtagaaagtaataatttcttgggtagtttgcagttttaaaattatgttttaaaatggactatcatatgcttaccgtaacttgaaagtatttcgatttcttggctttatatatcttgtggaaaggac

SEQ ID NO: 5311 - DNA, 239 bp, synthetic construct
  misc_feature 1..239: note = promoter
  source 1..239: mol_type = other DNA
gagggcctatttcccatgattccttcatatttatatacgatacaaggctgttagagagataattggaattaatttgactgtaaacacaaagatattagtacaaaatacgtgacgtagaaagtaataatttcttgggtagtttgcagttttaaaattatgttttaaaatggactatcatatgcttaccgtaacttgaaagtatttcgatttcttggctttatatatcttgtggaaaggac

SEQ ID NO: 5312 - DNA, 239 bp, synthetic construct
  misc_feature 1..239: note = promoter
  source 1..239: mol_type = other DNA
gagggcctatttcccatgattccttcatatttgtatacgatacaaggctgttagagagataattggaattaatttgactgtaaacacaaagatattagtacaaaatacgtgacgtagaaagtaataatttcttgggtagtttgcagttttaaaattatgttttaaaatggactatcatatgcttaccgtaacttgaaagtatttcgatttcttggctttatatatcttgtggaaaggac

SEQ ID NO: 5313 - DNA, 239 bp, synthetic construct
  misc_feature 1..239: note = promoter
  source 1..239: mol_type = other DNA
gagggcctatttcccatgattccttcatatttgcatacgatacaaggctgttagagagataattggaattaatttgactgtaaacacaaagatattagtacaaaatacgtgacgtagaaagtaataatttcttgggtagtttgcagttttaaaattatgttttaaaatggactatcatatgcttaccgtaacttgaaagtatttcgatttcttggctttatatatcttgtggaaaggac

SEQ ID NO: 5314 - DNA, 239 bp, synthetic construct; identical to SEQ ID NO: 5313
  misc_feature 1..239: note = promoter
  source 1..239: mol_type = other DNA

SEQ ID NO: 5315 - DNA, 239 bp, synthetic construct; identical to SEQ ID NO: 5313
  misc_feature 1..239: note = promoter
  source 1..239: mol_type = other DNA

SEQ ID NO: 5316 - DNA, 239 bp, synthetic construct; identical to SEQ ID NO: 5313
  misc_feature 1..239: note = promoter
  source 1..239: mol_type = other DNA

SEQ ID NO: 5317 - DNA, 239 bp, synthetic construct
  misc_feature 1..239: note = promoter
  source 1..239: mol_type = other DNA
gagggcctatttcccatgattccttcatatttgcatatgatacaaggctgttagagagataattggaattaatttgactgtaaacacaaagatattagtacaaaatacgtgacgtagaaagtaataatttcttgggtagtttgcagttttaaaattatgttttaaaatggactatcatatgcttaccgtaacttgaaagtatttcgatttcttggctttatatatcttgtggaaaggac

SEQ ID NO: 5318 - DNA, 239 bp, synthetic construct
  misc_feature 1..239: note = promoter
  source 1..239: mol_type = other DNA
gagggcctatttcccatgattccttcatatttgcatataatacaaggctgttagagagataattggaattaatttgactgtaaacacaaagatattagtacaaaatacgtgacgtagaaagtaataatttcttgggtagtttgcagttttaaaattatgttttaaaatggactatcatatgcttaccgtaacttgaaagtatttcgatttcttggctttatatatcttgtggaaaggac

SEQ ID NO: 5319 - DNA, 239 bp, synthetic construct
  misc_feature 1..239: note = promoter
  source 1..239: mol_type = other DNA
gagggcctatttcccatgattccttcatatttgcatatactacaaggctgttagagagataattggaattaatttgactgtaaacacaaagatattagtacaaaatacgtgacgtagaaagtaataatttcttgggtagtttgcagttttaaaattatgttttaaaatggactatcatatgcttaccgtaacttgaaagtatttcgatttcttggctttatatatcttgtggaaaggac

SEQ ID NO: 5320 - DNA, 239 bp, synthetic construct
  misc_feature 1..239: note = promoter
  source 1..239: mol_type = other DNA
gagggcctatttcccatgattccttcatatttgcatatacgacaaggctgttagagagataattggaattaatttgactgtaaacacaaagatattagtacaaaatacgtgacgtagaaagtaataatttcttgggtagtttgcagttttaaaattatgttttaaaatggactatcatatgcttaccgtaacttgaaagtatttcgatttcttggctttatatatcttgtggaaaggac

SEQ ID NO: 5321 - DNA, 239 bp, synthetic construct; identical to SEQ ID NO: 5320
  misc_feature 1..239: note = promoter
  source 1..239: mol_type = other DNA

SEQ ID NO: 5322 - DNA, 239 bp, synthetic construct
  misc_feature 1..239: note = promoter
  source 1..239: mol_type = other DNA
gagggcctatttcccatgattccttcatatttgcatatacgataaggctgttagagagataattggaattaatttgactgtaaacacaaagatattagtacaaaatacgtgacgtagaaagtaataatttcttgggtagtttgcagttttaaaattatgttttaaaatggactatcatatgcttaccgtaacttgaaagtatttcgatttcttggctttatatatcttgtggaaaggac

SEQ ID NO: 5323 - DNA, 239 bp, synthetic construct; identical to SEQ ID NO: 5322
  misc_feature 1..239: note = promoter
  source 1..239: mol_type = other DNA

SEQ ID NO: 5324 - DNA, 239 bp, synthetic construct
  misc_feature 1..239: note = promoter
  source 1..239: mol_type = other DNA
gagggcctatttcccatgattccttcatatttgcatatacgatacggctgttagagagataattggaattaatttgactgtaaacacaaagatattagtacaaaatacgtgacgtagaaagtaataatttcttgggtagtttgcagttttaaaattatgttttaaaatggactatcatatgcttaccgtaacttgaaagtatttcgatttcttggctttatatatcttgtggaaaggac

SEQ ID NO: 5325 - DNA, 239 bp, synthetic construct
  misc_feature 1..239: note = promoter
  source 1..239: mol_type = other DNA
gagggcctatttcccatgattccttcatatttgcatatacgatacagctgttagagagataattggaattaatttgactgtaaacacaaagatattagtacaaaatacgtgacgtagaaagtaataatttcttgggtagtttgcagttttaaaattatgttttaaaatggactatcatatgcttaccgtaacttgaaagtatttcgatttcttggctttatatatcttgtggaaaggac

SEQ ID NO: 5326 - DNA, 239 bp, synthetic construct
  misc_feature 1..239: note = promoter
  source 1..239: mol_type = other DNA
gagggcctatttcccatgattccttcatatttgcatatacgatacaactgttagagagataattggaattaatttgactgtaaacacaaagatattagtacaaaatacgtgacgtagaaagtaataatttcttgggtagtttgcagttttaaaattatgttttaaaatggactatcatatgcttaccgtaacttgaaagtatttcgatttcttggctttatatatcttgtggaaaggac

SEQ ID NO: 5327 - DNA, 239 bp, synthetic construct
  misc_feature 1..239: note = promoter
  source 1..239: mol_type = other DNA
gagggcctatttcccatgattccttcatatttgcatatacgatacaagtgttagagagataattggaattaatttgactgtaaacacaaagatattagtacaaaatacgtgacgtagaaagtaataatttcttgggtagtttgcagttttaaaattatgttttaaaatggactatcatatgcttaccgtaacttgaaagtatttcgatttcttggctttatatatcttgtggaaaggac

SEQ ID NO: 5328 - DNA, 239 bp, synthetic construct
  misc_feature 1..239: note = promoter
  source 1..239: mol_type = other DNA
gagggcctatttcccatgattccttcatatttgcatatacgatacaagggttagagagataattggaattaatttgactgtaaacacaaagatattagtacaaaatacgtgacgtagaaagtaataatttcttgggtagtttgcagttttaaaattatgttttaaaatggactatcatatgcttaccgtaacttgaaagtatttcgatttcttggctttatatatcttgtggaaaggac

SEQ ID NO: 5329 - DNA, 239 bp, synthetic construct
  misc_feature 1..239: note = promoter
  source 1..239: mol_type = other DNA
gagggcctatttcccatgattccttcatatttgcatatacgatacaaggcttagagagataattggaattaatttgactgtaaacacaaagatattagtacaaaatacgtgacgtagaaagtaataatttcttgggtagtttgcagttttaaaattatgttttaaaatggactatcatatgcttaccgtaacttgaaagtatttcgatttcttggctttatatatcttgtggaaaggac

SEQ ID NO: 5330 - DNA, 239 bp, synthetic construct; identical to SEQ ID NO: 5329
  misc_feature 1..239: note = promoter
  source 1..239: mol_type = other DNA

SEQ ID NO: 5331 - DNA, 239 bp, synthetic construct
  misc_feature 1..239: note = promoter
  source 1..239: mol_type = other DNA
gagggcctatttcccatgattccttcatatttgcatatacgatacaaggctgagagagataattggaattaatttgactgtaaacacaaagatattagtacaaaatacgtgacgtagaaagtaataatttcttgggtagtttgcagttttaaaattatgttttaaaatggactatcatatgcttaccgtaacttgaaagtatttcgatttcttggctttatatatcttgtggaaaggac

SEQ ID NO: 5332 - DNA, 239 bp, synthetic construct
  misc_feature 1..239: note = promoter
  source 1..239: mol_type = other DNA
gagggcctatttcccatgattccttcatatttgcatatacgatacaaggctgtgagagataattggaattaatttgactgtaaacacaaagatattagtacaaaatacgtgacgtagaaagtaataatttcttgggtagtttgcagttttaaaattatgttttaaaatggactatcatatgcttaccgtaacttgaaagtatttcgatttcttggctttatatatcttgtggaaaggac

SEQ ID NO: 5333 - DNA, 239 bp, synthetic construct
  misc_feature 1..239: note = promoter
  source 1..239: mol_type = other DNA
gagggcctatttcccatgattccttcatatttgcatatacgatacaaggctgttagagataattggaattaatttgactgtaaacacaaagatattagtacaaaatacgtgacgtagaaagtaataatttcttgggtagtttgcagttttaaaattatgttttaaaatggactatcatatgcttaccgtaacttgaaagtatttcgatttcttggctttatatatcttgtggaaaggac

SEQ ID NO: 5334 - DNA, 239 bp, synthetic construct; identical to SEQ ID NO: 5333
  misc_feature 1..239: note = promoter
  source 1..239: mol_type = other DNA

SEQ ID NO: 5335 - DNA, 239 bp, synthetic construct; identical to SEQ ID NO: 5333
  misc_feature 1..239: note = promoter
  source 1..239: mol_type = other DNA

SEQ ID NO: 5336 - DNA, 239 bp, synthetic construct; identical to SEQ ID NO: 5333
  misc_feature 1..239: note = promoter
  source 1..239: mol_type = other DNA

SEQ ID NO: 5337 - DNA, 239 bp, synthetic construct; identical to SEQ ID NO: 5333
  misc_feature 1..239: note = promoter
  source 1..239: mol_type = other DNA

SEQ ID NO: 5338 - DNA, 239 bp, synthetic construct; identical to SEQ ID NO: 5333
  misc_feature 1..239: note = promoter
  source 1..239: mol_type = other DNA

SEQ ID NO: 5339 - DNA, 239 bp, synthetic construct
  misc_feature 1..239: note = promoter
  source 1..239: mol_type = other DNA
gagggcctatttcccatgattccttcatatttgcatatacgatacaaggctgttagagagaattggaattaatttgactgtaaacacaaagatattagtacaaaatacgtgacgtagaaagtaataatttcttgggtagtttgcagttttaaaattatgttttaaaatggactatcatatgcttaccgtaacttgaaagtatttcgatttcttggctttatatatcttgtggaaaggac

SEQ ID NO: 5340 - DNA, 239 bp, synthetic construct; identical to SEQ ID NO: 5339
  misc_feature 1..239: note = promoter
  source 1..239: mol_type = other DNA

SEQ ID NO: 5341 - DNA, 239 bp, synthetic construct
  misc_feature 1..239: note = promoter
  source 1..239: mol_type = other DNA
gagggcctatttcccatgattccttcatatttgcatatacgatacaaggctgttagagagatttggaattaatttgactgtaaacacaaagatattagtacaaaatacgtgacgtagaaagtaataatttcttgggtagtttgcagttttaaaattatgttttaaaatggactatcatatgcttaccgtaacttgaaagtatttcgatttcttggctttatatatcttgtggaaaggac

SEQ ID NO: 5342 - DNA, 239 bp, synthetic construct
  misc_feature 1..239: note = promoter
  source 1..239: mol_type = other DNA
gagggcctatttcccatgattccttcatatttgcatatacgatacaaggctgttagagagatatggaattaatttgactgtaaacacaaagatattagtacaaaatacgtgacgtagaaagtaataatttcttgggtagtttgcagttttaaaattatgttttaaaatggactatcatatgcttaccgtaacttgaaagtatttcgatttcttggctttatatatcttgtggaaaggac

SEQ ID NO: 5343 - DNA, 239 bp, synthetic construct
  misc_feature 1..239: note = promoter
  source 1..239: mol_type = other DNA
gagggcctatttcccatgattccttcatatttgcatatacgatacaaggctgttagagagataaggaattaatttgactgtaaacacaaagatattagtacaaaatacgtgacgtagaaagtaataatttcttgggtagtttgcagttttaaaattatgttttaaaatggactatcatatgcttaccgtaacttgaaagtatttcgatttcttggctttatatatcttgtggaaaggac

SEQ ID NO: 5344 - DNA, 239 bp, synthetic construct
  misc_feature 1..239: note = promoter
  source 1..239: mol_type = other DNA
gagggcctatttcccatgattccttcatatttgcatatacgatacaaggctgttagagagataatgaattaatttgactgtaaacacaaagatattagtacaaaatacgtgacgtagaaagtaataatttcttgggtagtttgcagttttaaaattatgttttaaaatggactatcatatgcttaccgtaacttgaaagtatttcgatttcttggctttatatatcttgtggaaaggac

SEQ ID NO: 5345 - DNA, 239 bp, synthetic construct
  misc_feature 1..239: note = promoter
  source 1..239: mol_type = other DNA
gagggcctatttcccatgattccttcatatttgcatatacgatacaaggctgttagagagataattaattaatttgactgtaaacacaaagatattagtacaaaatacgtgacgtagaaagtaataatttcttgggtagtttgcagttttaaaattatgttttaaaatggactatcatatgcttaccgtaacttgaaagtatttcgatttcttggctttatatatcttgtggaaaggac

SEQ ID NO: 5346 - DNA, 239 bp, synthetic construct
  misc_feature 1..239: note = promoter
  source 1..239: mol_type = other DNA
gagggcctatttcccatgattccttcatatttgcatatacgatacaaggctgttagagagataattgattaatttgactgtaaacacaaagatattagtacaaaatacgtgacgtagaaagtaataatttcttgggtagtttgcagttttaaaattatgttttaaaatggactatcatatgcttaccgtaacttgaaagtatttcgatttcttggctttatatatcttgtggaaaggac

SEQ ID NO: 5347 - DNA, 239 bp, synthetic construct
  misc_feature 1..239: note = promoter
  source 1..239: mol_type = other DNA
gagggcctatttcccatgattccttcatatttgcatatacgatacaaggctgttagagagataattggttaatttgactgtaaacacaaagatattagtacaaaatacgtgacgtagaaagtaataatttcttgggtagtttgcagttttaaaattatgttttaaaatggactatcatatgcttaccgtaacttgaaagtatttcgatttcttggctttatatatcttgtggaaaggac

SEQ ID NO: 5348 - DNA, 239 bp, synthetic construct
  misc_feature 1..239: note = promoter
  source 1..239: mol_type = other DNA
gagggcctatttcccatgattccttcatatttgcatatacgatacaaggctgttagagagataattggataatttgactgtaaacacaaagatattagtacaaaatacgtgacgtagaaagtaataatttcttgggtagtttgcagttttaaaattatgttttaaaatggactatcatatgcttaccgtaacttgaaagtatttcgatttcttggctttatatatcttgtggaaaggac

SEQ ID NO: 5349 - DNA, 239 bp, synthetic construct
  misc_feature 1..239: note = promoter
  source 1..239: mol_type = other DNA
gagggcctatttcccatgattccttcatatttgcatatacgatacaaggctgttagagagataattggaaaatttgactgtaaacacaaagatattagtacaaaatacgtgacgtagaaagtaataatttcttgggtagtttgcagttttaaaattatgttttaaaatggactatcatatgcttaccgtaacttgaaagtatttcgatttcttggctttatatatcttgtggaaaggac

SEQ ID NO: 5350 - DNA, 239 bp, synthetic construct
  misc_feature 1..239: note = promoter
  source 1..239: mol_type = other DNA
gagggcctatttcccatgattccttcatatttgcatatacgatacaaggctgttagagagataattggaatatttgactgtaaacacaaagatattagtacaaaatacgtgacgtagaaagtaataatttcttgggtagtttgcagttttaaaattatgttttaaaatggactatcatatgcttaccgtaacttgaaagtatttcgatttcttggctttatatatcttgtggaaaggac

SEQ ID NO: 5351 - DNA, 239 bp, synthetic construct
  misc_feature 1..239: note = promoter
  source 1..239: mol_type = other DNA
gagggcctatttcccatgattccttcatatttgcatatacgatacaaggctgttagagagataattggaatttttgactgtaaacacaaagatattagtacaaaatacgtgacgtagaaagtaataatttcttgggtagtttgcagttttaaaattatgttttaaaatggactatcatatgcttaccgtaacttgaaagtatttcgatttcttggctttatatatcttgtggaaaggac

SEQ ID NO: 5352 - DNA, 239 bp, synthetic construct
  misc_feature 1..239: note = promoter
  source 1..239: mol_type = other DNA
gagggcctatttcccatgattccttcatatttgcatatacgatacaaggctgttagagagataattggaattattgactgtaaacacaaagatattagtacaaaatacgtgacgtagaaagtaataatttcttgggtagtttgcagttttaaaattatgttttaaaatggactatcatatgcttaccgtaacttgaaagtatttcgatttcttggctttatatatcttgtggaaaggac

SEQ ID NO: 5353 - DNA, 239 bp, synthetic construct
  misc_feature 1..239: note = promoter
  source 1..239: mol_type = other DNA
gagggcctatttcccatgattccttcatatttgcatatacgatacaaggctgttagagagataattggaattaatgactgtaaacacaaagatattagtacaaaatacgtgacgtagaaagtaataatttcttgggtagtttgcagttttaaaattatgttttaaaatggactatcatatgcttaccgtaacttgaaagtatttcgatttcttggctttatatatcttgtggaaaggac

SEQ ID NO: 5354 - DNA, 239 bp, synthetic construct; identical to SEQ ID NO: 5353
  misc_feature 1..239: note = promoter
  source 1..239: mol_type = other DNA

SEQ ID NO: 5355 - DNA, 239 bp, synthetic construct
  misc_feature 1..239: note = promoter
  source 1..239: mol_type = other DNA
gagggcctatttcccatgattccttcatatttgcatatacgatacaaggctgttagagagataattggaattaattactgtaaacacaaagatattagtacaaaatacgtgacgtagaaagtaataatttcttgggtagtttgcagttttaaaattatgttttaaaatggactatcatatgcttaccgtaacttgaaagtatttcgatttcttggctttatatatcttgtggaaaggac

SEQ ID NO: 5356 - DNA, 239 bp, synthetic construct
  misc_feature 1..239: note = promoter
  source 1..239: mol_type = other DNA
gagggcctatttcccatgattccttcatatttgcatatacgatacaaggctgttagagagataattggaattaatttctgtaaacacaaagatattagtacaaaatacgtgacgtagaaagtaataatttcttgggtagtttgcagttttaaaattatgttttaaaatggactatcatatgcttaccgtaacttgaaagtatttcgatttcttggctttatatatcttgtggaaaggac

SEQ ID NO: 5357 - DNA, 239 bp, synthetic construct
  misc_feature 1..239: note = promoter
  source 1..239: mol_type = other DNA
gagggcctatttcccatgattccttcatatttgcatatacgatacaaggctgttagagagataattggaattaatttgtgtaaacacaaagatattagtacaaaatacgtgacgtagaaagtaataatttcttgggtagtttgcagttttaaaattatgttttaaaatggactatcatatgcttaccgtaacttgaaagtatttcgatttcttggctttatatatcttgtggaaaggac

SEQ ID NO: 5358 - DNA, 239 bp, synthetic construct
  misc_feature 1..239: note = promoter
  source 1..239: mol_type = other DNA
gagggcctatttcccatgattccttcatatttgcatatacgatacaaggctgttagagagataattggaattaatttgagtaaacacaaagatattagtacaaaatacgtgacgtagaaagtaataatttcttgggtagtttgcagttttaaaattatgttttaaaatggactatcatatgcttaccgtaacttgaaagtatttcgatttcttggctttatatatcttgtggaaaggac

SEQ ID NO: 5359 - DNA, 239 bp, synthetic construct
  misc_feature 1..239: note = promoter
  source 1..239: mol_type = other DNA
gagggcctatttcccatgattccttcatatttgcatatacgatacaaggctgttagagagataattggaattaatttgactaaacacaaagatattagtacaaaatacgtgacgtagaaagtaataatttcttgggtagtttgcagttttaaaattatgttttaaaatggactatcatatgcttaccgtaacttgaaagtatttcgatttcttggctttatatatcttgtggaaaggac

SEQ ID NO: 5360 - DNA, 239 bp, synthetic construct; identical to SEQ ID NO: 5359
  misc_feature 1..239: note = promoter
  source 1..239: mol_type = other DNA

SEQ ID NO: 5361 - DNA, 239 bp, synthetic construct
  misc_feature 1..239: note = promoter
  source 1..239: mol_type = other DNA
gagggcctatttcccatgattccttcatatttgcatatacgatacaaggctgttagagagataattggaattaatttgactgaacacaaagatattagtacaaaatacgtgacgtagaaagtaataatttcttgggtagtttgcagttttaaaattatgttttaaaatggactatcatatgcttaccgtaacttgaaagtatttcgatttcttggctttatatatcttgtggaaaggac

SEQ ID NO: 5362 - DNA, 239 bp, synthetic construct
  misc_feature 1..239: note = promoter
  source 1..239: mol_type = other DNA
gagggcctatttcccatgattccttcatatttgcatatacgatacaaggctgttagagagataattggaattaatttgactgtacacaaagatattagtacaaaatacgtgacgtagaaagtaataatttcttgggtagtttgcagttttaaaattatgttttaaaatggactatcatatgcttaccgtaacttgaaagtatttcgatttcttggctttatatatcttgtggaaaggac

SEQ ID NO: 5363 - DNA, 239 bp, synthetic construct; identical to SEQ ID NO: 5362
  misc_feature 1..239: note = promoter
  source 1..239: mol_type = other DNA

SEQ ID NO: 5364 - DNA, 239 bp, synthetic construct
  misc_feature 1..239: note = promoter
  source 1..239: mol_type = other DNA
gagggcctatttcccatgattccttcatatttgcatatacgatacaaggctgttagagagataattggaattaatttgactgtaaacaaagatattagtacaaaatacgtgacgtagaaagtaataatttcttgggtagtttgcagttttaaaattatgttttaaaatggactatcatatgcttaccgtaacttgaaagtatttcgatttcttggctttatatatcttgtggaaaggac

SEQ ID NO: 5365 - DNA, 239 bp, synthetic construct; identical to SEQ ID NO: 5364
  misc_feature 1..239: note = promoter
  source 1..239: mol_type = other DNA

SEQ ID NO: 5366 - DNA, 239 bp, synthetic construct; identical to SEQ ID NO: 5364
  misc_feature 1..239: note = promoter
  source 1..239: mol_type = other DNA

SEQ ID NO: 5367 - DNA, 239 bp, synthetic construct; identical to SEQ ID NO: 5364
  misc_feature 1..239: note = promoter
  source 1..239: mol_type = other DNA

SEQ ID NO: 5368 - DNA, 239 bp, synthetic construct
  misc_feature 1..239: note = promoter
  source 1..239: mol_type = other DNA
gagggcctatttcccatgattccttcatatttgcatatacgatacaaggctgttagagagataattggaattaatttgactgtaaacacagatattagtacaaaatacgtgacgtagaaagtaataatttcttgggtagtttgcagttttaaaattatgttttaaaatggactatcatatgcttaccgtaacttgaaagtatttcgatttcttggctttatatatcttgtggaaaggac

SEQ ID NO: 5369 - DNA, 239 bp, synthetic construct; identical to SEQ ID NO: 5368
  misc_feature 1..239: note = promoter
  source 1..239: mol_type = other DNA

SEQ ID NO: 5370 - DNA, 239 bp, synthetic construct
  misc_feature 1..239: note = promoter
  source 1..239: mol_type = other DNA
gagggcctatttcccatgattccttcatatttgcatatacgatacaaggctgttagagagataattggaattaatttgactgtaaacacaaatattagtacaaaatacgtgacgtagaaagtaataatttcttgggtagtttgcagttttaaaattatgttttaaaatggactatcatatgcttaccgtaacttgaaagtatttcgatttcttggctttatatatcttgtggaaaggac

SEQ ID NO: 5371 - DNA, 239 bp, synthetic construct; identical to SEQ ID NO: 5370
  misc_feature 1..239: note = promoter
  source 1..239: mol_type = other DNA

SEQ ID NO: 5372 - DNA, 239 bp, synthetic construct
  misc_feature 1..239: note = promoter
  source 1..239: mol_type = other DNA
gagggcctatttcccatgattccttcatatttgcatatacgatacaaggctgttagagagataattggaattaatttgactgtaaacacaaagattagtacaaaatacgtgacgtagaaagtaataatttcttgggtagtttgcagttttaaaattatgttttaaaatggactatcatatgcttaccgtaacttgaaagtatttcgatttcttggctttatatatcttgtggaaaggac

SEQ ID NO: 5373 - DNA, 239 bp, synthetic construct; identical to SEQ ID NO: 5372
  misc_feature 1..239: note = promoter
  source 1..239: mol_type = other DNA

SEQ ID NO: 5374 - DNA, 239 bp, synthetic construct; identical to SEQ ID NO: 5372
  misc_feature 1..239: note = promoter
  source 1..239: mol_type = other DNA

SEQ ID NO: 5375 - DNA, 239 bp, synthetic construct
  misc_feature 1..239: note = promoter
  source 1..239: mol_type = other DNA
gagggcctatttcccatgattccttcatatttgcatatacgatacaaggctgttagagagataattggaattaatttgactgtaaacacaaagataagtacaaaatacgtgacgtagaaagtaataatttcttgggtagtttgcagttttaaaattatgttttaaaatggactatcatatgcttaccgtaacttgaaagtatttcgatttcttggctttatatatcttgtggaaaggac

SEQ ID NO: 5376 - DNA, 239 bp, synthetic construct
  misc_feature 1..239: note = promoter
  source 1..239: mol_type = other DNA
gagggcctatttcccatgattccttcatatttgcatatacgatacaaggctgttagagagataattggaattaatttgactgtaaacacaaagatatgtacaaaatacgtgacgtagaaagtaataatttcttgggtagtttgcagttttaaaattatgttttaaaatggactatcatatgcttaccgtaacttgaaagtatttcgatttcttggctttatatatcttgtggaaaggac

SEQ ID NO: 5377 - DNA, 239 bp, synthetic construct
  misc_feature 1..239: note = promoter
  source 1..239: mol_type = other DNA
gagggcctatttcccatgattccttcatatttgcatatacgatacaaggctgttagagagataattggaattaatttgactgtaaacacaaagatatttacaaaatacgtgacgtagaaagtaataatttcttgggtagtttgcagttttaaaattatgttttaaaatggactatcatatgcttaccgtaacttgaaagtatttcgatttcttggctttatatatcttgtggaaaggac

SEQ ID NO: 5378 - DNA, 239 bp, synthetic construct
  misc_feature 1..239: note = promoter
  source 1..239: mol_type = other DNA
gagggcctatttcccatgattccttcatatttgcatatacgatacaaggctgttagagagataattggaattaatttgactgtaaacacaaagatattaacaaaatacgtgacgtagaaagtaataatttcttgggtagtttgcagttttaaaattatgttttaaaatggactatcatatgcttaccgtaacttgaaagtatttcgatttcttggctttatatatcttgtggaaaggac

SEQ ID NO: 5379 - DNA, 239 bp, synthetic construct
  misc_feature 1..239: note = promoter
  source 1..239: mol_type = other DNA
gagggcctatttcccatgattccttcatatttgcatatacgatacaaggctgttagagagataattggaattaatttgactgtaaacacaaagatattagcaaaatacgtgacgtagaaagtaataatttcttgggtagtttgcagttttaaaattatgttttaaaatggactatcatatgcttaccgtaacttgaaagtatttcgatttcttggctttatatatcttgtggaaaggac

SEQ ID NO: 5380 - DNA, 239 bp, synthetic construct
  misc_feature 1..239: note = promoter
  source 1..239: mol_type = other DNA
gagggcctatttcccatgattccttcatatttgcatatacgatacaaggctgttagagagataattggaattaatttgactgtaaacacaaagatattagtaaaatacgtgacgtagaaagtaataatttcttgggtagtttgcagttttaaaattatgttttaaaatggactatcatatgcttaccgtaacttgaaagtatttcgatttcttggctttatatatcttgtggaaaggac

SEQ ID NO: 5381 - DNA, 239 bp, synthetic construct; identical to SEQ ID NO: 5380
  misc_feature 1..239: note = promoter
  source 1..239: mol_type = other DNA

SEQ ID NO: 5382 - DNA, 239 bp, synthetic construct
  misc_feature 1..239: note = promoter
  source 1..239: mol_type = other DNA
gagggcctatttcccatgattccttcatatttgcatatacgatacaaggctgttagagagataattggaattaatttgactgtaaacacaaagatattagtacaatacgtgacgtagaaagtaataatttcttgggtagtttgcagttttaaaattatgttttaaaatggactatcatatgcttaccgtaacttgaaagtatttcgatttcttggctttatatatcttgtggaaaggac

SEQ ID NO: 5383 - DNA, 239 bp, synthetic construct; identical to SEQ ID NO: 5382
  misc_feature 1..239: note = promoter
  source 1..239: mol_type = other DNA

SEQ ID NO: 5384 - DNA, 239 bp, synthetic construct; identical to SEQ ID NO: 5382
  misc_feature 1..239: note = promoter
  source 1..239: mol_type = other DNA

SEQ ID NO: 5385 - DNA, 239 bp, synthetic construct
  misc_feature 1..239: note = promoter
  source 1..239: mol_type = other DNA
gagggcctatttcccatgattccttcatatttgcatatacgatacaaggctgttagagagataattggaattaatttgactgtaaacacaaagatattagtacaaaacgtgacgtagaaagtaataatttcttgggtagtttgcagttttaaaattatgttttaaaatggactatcatatgcttaccgtaacttgaaagtatttcgatttcttggctttatatatcttgtggaaaggac

SEQ ID NO: 5386 - DNA, 239 bp, synthetic construct; identical to SEQ ID NO: 5385
  misc_feature 1..239: note = promoter
  source 1..239: mol_type = other DNA

SEQ ID NO: 5387 - DNA, 239 bp, synthetic construct
  misc_feature 1..239: note = promoter
  source 1..239: mol_type = other DNA
gagggcctatttcccatgattccttcatatttgcatatacgatacaaggctgttagagagataattggaattaatttgactgtaaacacaaagatattagtacaaaatgtgacgtagaaagtaataatttcttgggtagtttgcagttttaaaattatgttttaaaatggactatcatatgcttaccgtaacttgaaagtatttcgatttcttggctttatatatcttgtggaaaggac

SEQ ID NO: 5388 - DNA, 239 bp, synthetic construct
  misc_feature 1..239: note = promoter
  source 1..239: mol_type = other DNA
gagggcctatttcccatgattccttcatatttgcatatacgatacaaggctgttagagagataattggaattaatttgactgtaaacacaaagatattagtacaaaatatgacgtagaaagtaataatttcttgggtagtttgcagttttaaaattatgttttaaaatggactatcatatgcttaccgtaacttgaaagtatttcgatttcttggctttatatatcttgtggaaaggac

SEQ ID NO: 5389 - DNA, 239 bp, synthetic construct
  misc_feature 1..239: note = promoter
  source 1..239: mol_type = other DNA
gagggcctatttcccatgattccttcatatttgcatatacgatacaaggctgttagagagataattggaattaatttgactgtaaacacaaagatattagtacaaaatacgacgtagaaagtaataatttcttgggtagtttgcagttttaaaattatgttttaaaatggactatcatatgcttaccgtaacttgaaagtatttcgatttcttggctttatatatcttgtggaaaggac

SEQ ID NO: 5390 - DNA, 239 bp, synthetic construct; identical to SEQ ID NO: 5389
  misc_feature 1..239: note = promoter
  source 1..239: mol_type = other DNA

SEQ ID NO: 5391 - DNA, 239 bp, synthetic construct
  misc_feature 1..239: note = promoter
  source 1..239: mol_type = other DNA
gagggcctatttcccatgattccttcatatttgcatatacgatacaaggctgttagagagataattggaattaatttgactgtaaacacaaagatattagtacaaaatacgtcgtagaaagtaataatttcttgggtagtttgcagttttaaaattatgttttaaaatggactatcatatgcttaccgtaacttgaaagtatttcgatttcttggctttatatatcttgtggaaaggac

SEQ ID NO: 5392 - DNA, 239 bp, synthetic construct
  misc_feature 1..239: note = promoter
  source 1..239: mol_type = other DNA
gagggcctatttcccatgattccttcatatttgcatatacgatacaaggctgttagagagataattggaattaatttgactgtaaacacaaagatattagtacaaaatacgtggtagaaagtaataatttcttgggtagtttgcagttttaaaattatgttttaaaatggactatcatatgcttaccgtaacttgaaagtatttcgatttcttggctttatatatcttgtggaaaggac

SEQ ID NO: 5393 - DNA, 239 bp, synthetic construct
  misc_feature 1..239: note = promoter
  source 1..239: mol_type = other DNA
gagggcctatttcccatgattccttcatatttgcatatacgatacaaggctgttagagagataattggaattaatttgactgtaaacacaaagatattagtacaaaatacgtgatagaaagtaataatttcttgggtagtttgcagttttaaaattatgttttaaaatggactatcatatgcttaccgtaacttgaaagtatttcgatttcttggctttatatatcttgtggaaaggac

SEQ ID NO: 5394 - DNA, 239 bp, synthetic construct
  misc_feature 1..239: note = promoter
  source 1..239: mol_type = other DNA
gagggcctatttcccatgattccttcatatttgcatatacgatacaaggctgttagagagataattggaattaatttgactgtaaacacaaagatattagtacaaaatacgtgacagaaagtaataatttcttgggtagtttgcagttttaaaattatgttttaaaatggactatcatatgcttaccgtaacttgaaagtatttcgatttcttggctttatatatcttgtggaaaggac

SEQ ID NO: 5395 - DNA, 239 bp, synthetic construct
  misc_feature 1..239: note = promoter
  source 1..239: mol_type = other DNA
gagggcctatttcccatgattccttcatatttgcatatacgatacaaggctgttagagagataattggaattaatttgactgtaaacacaaagatattagtacaaaatacgtgacggaaagtaataatttcttgggtagtttgcagttttaaaattatgttttaaaatggactatcatatgcttaccgtaacttgaaagtatttcgatttcttggctttatatatcttgtggaaaggac

SEQ ID NO: 5396 - DNA, 239 bp, synthetic construct
  misc_feature 1..239: note = promoter
  source 1..239: mol_type = other DNA
gagggcctatttcccatgattccttcatatttgcatatacgatacaaggctgttagagagataattggaattaatttgactgtaaacacaaagatattagtacaaaatacgtgacgtaaagtaataatttcttgggtagtttgcagttttaaaattatgttttaaaatggactatcatatgcttaccgtaacttgaaagtatttcgatttcttggctttatatatcttgtggaaaggac

SEQ ID NO: 5397 - DNA, 239 bp, synthetic construct; identical to SEQ ID NO: 5396
  misc_feature 1..239: note = promoter
  source 1..239: mol_type = other DNA

SEQ ID NO: 5398 - DNA, 239 bp, synthetic construct
  misc_feature 1..239: note = promoter
  source 1..239: mol_type = other DNA
gagggcctatttcccatgattccttcatatttgcatatacgatacaaggctgttagagagataattggaattaatttgactgtaaacacaaagatattagtacaaaatacgtgacgtagagtaataatttcttgggtagtttgcagttttaaaattatgttttaaaatggactatcatatgcttaccgtaacttgaaagtatttcgatttcttggctttatatatcttgtggaaaggac

SEQ ID NO: 5399 - DNA, 239 bp, synthetic construct; identical to SEQ ID NO: 5398
  misc_feature 1..239: note = promoter
  source 1..239: mol_type = other DNA

SEQ ID NO: 5400 - DNA, 239 bp, synthetic construct
  misc_feature 1..239: note = promoter
  source 1..239: mol_type = other DNA
gagggcctatttcccatgattccttcatatttgcatatacgatacaaggctgttagagagataattggaattaatttgactgtaaacacaaagatattagtacaaaatacgtgacgtagaataataatttcttgggtagtttgcagttttaaaattatgttttaaaatggactatcatatgcttaccgtaacttgaaagtatttcgatttcttggctttatatatcttgtggaaaggac

SEQ ID NO: 5401 - DNA, 239 bp, synthetic construct
  misc_feature 1..239: note = promoter
  source 1..239: mol_type = other DNA
gagggcctatttcccatgattccttcatatttgcatatacgatacaaggctgttagagagataattggaattaatttgactgtaaacacaaagatattagtacaaaatacgtgacgtagaaaaataatttcttgggtagtttgcagttttaaaattatgttttaaaatggactatcatatgcttaccgtaacttgaaagtatttcgatttcttggctttatatatcttgtggaaaggac

SEQ ID NO: 5402 - DNA, 239 bp, synthetic construct
  misc_feature 1..239: note = promoter
  source 1..239: mol_type = other DNA
gagggcctatttcccatgattccttcatatttgcatatacgatacaaggctgttagagagataattggaattaatttgactgtaaacacaaagatattagtacaaaatacgtgacgtagaaagataatttcttgggtagtttgcagttttaaaattatgttttaaaatggactatcatatgcttaccgtaacttgaaagtatttcgatttcttggctttatatatcttgtggaaaggac

SEQ ID NO: 5403 - DNA, 239 bp, synthetic construct
  misc_feature 1..239: note = promoter
  source 1..239: mol_type = other DNA
gagggcctatttcccatgattccttcatatttgcatatacgatacaaggctgttagagagataattggaattaatttgactgtaaacacaaagatattagtacaaaatacgtgacgtagaaagttaatttcttgggtagtttgcagttttaaaattatgttttaaaatggactatcatatgcttaccgtaacttgaaagtatttcgatttcttggctttatatatcttgtggaaaggac

SEQ ID NO: 5404 - DNA, 239 bp, synthetic construct
  misc_feature 1..239: note = promoter
  source 1..239: mol_type = other DNA
gagggcctatttcccatgattccttcatatttgcatatacgatacaaggctgttagagagataattggaattaatttgactgtaaacacaaagatattagtacaaaatacgtgacgtagaaagtaaatttcttgggtagtttgcagttttaaaattatgttttaaaatggactatcatatgcttaccgtaacttgaaagtatttcgatttcttggctttatatatcttgtggaaaggac

SEQ ID NO: 5405 - DNA, 239 bp, synthetic construct; identical to SEQ ID NO: 5404
  misc_feature 1..239: note = promoter
  source 1..239: mol_type = other DNA

SEQ ID NO: 5406 - DNA, 239 bp, synthetic construct
  misc_feature 1..239: note = promoter
  source 1..239: mol_type = other DNA
gagggcctatttcccatgattccttcatatttgcatatacgatacaaggctgttagagagataattggaattaatttgactgtaaacacaaagatattagtacaaaatacgtgacgtagaaagtaattttcttgggtagtttgcagttttaaaattatgttttaaaatggactatcatatgcttaccgtaacttgaaagtatttcgatttcttggctttatatatcttgtggaaaggac

SEQ ID NO: 5407 - DNA, 239 bp, synthetic construct
  misc_feature 1..239: note = promoter
  source 1..239: mol_type = other DNA
gagggcctatttcccatgattccttcatatttgcatatacgatacaaggctgttagagagataattggaattaatttgactgtaaacacaaagatattagtacaaaatacgtgacgtagaaagtaatattcttgggtagtttgcagttttaaaattatgttttaaaatggactatcatatgcttaccgtaacttgaaagtatttcgatttcttggctttatatatcttgtggaaaggac

SEQ ID NO: 5408 - DNA, 239 bp, synthetic construct
  misc_feature 1..239: note = promoter
  source 1..239: mol_type = other DNA
gagggcctatttcccatgattccttcatatttgcatatacgatacaaggctgttagagagataattggaattaatttgactgtaaacacaaagatattagtacaaaatacgtgacgtagaaagtaataatcttgggtagtttgcagttttaaaattatgttttaaaatggactatcatatgcttaccgtaacttgaaagtatttcgatttcttggctttatatatcttgtggaaaggac

SEQ ID NO: 5409 - DNA, 239 bp, synthetic construct; identical to SEQ ID NO: 5408
  misc_feature 1..239: note = promoter
  source 1..239: mol_type = other DNA

SEQ ID NO: 5410 - DNA, 239 bp, synthetic construct
  misc_feature 1..239: note = promoter
  source 1..239: mol_type = other DNA
gagggcctatttcccatgattccttcatatttgcatatacgatacaaggctgttagagagataattggaattaatttgactgtaaacacaaagatattagtacaaaatacgtgacgtagaaagtaataattttgggtagtttgcagttttaaaattatgttttaaaatggactatcatatgcttaccgtaacttgaaagtatttcgatttcttggctttatatatcttgtggaaaggac

SEQ ID NO: 5411 - DNA, 239 bp, synthetic construct; identical to SEQ ID NO: 5410
  misc_feature 1..239: note = promoter
  source 1..239: mol_type = other DNA

SEQ ID NO: 5412 - DNA, 239 bp, synthetic construct
  misc_feature 1..239: note = promoter
  source 1..239: mol_type = other DNA
gagggcctatttcccatgattccttcatatttgcatatacgatacaaggctgttagagagataattggaattaatttgactgtaaacacaaagatattagtacaaaatacgtgacgtagaaagtaataatttcgggtagtttgcagttttaaaattatgttttaaaatggactatcatatgcttaccgtaacttgaaagtatttcgatttcttggctttatatatcttgtggaaaggac

SEQ ID NO: 5413 - DNA, 239 bp, synthetic construct
  misc_feature 1..239: note = promoter
  source 1..239: mol_type = other DNA
gagggcctatttcccatgattccttcatatttgcatatacgatacaaggctgttagagagataattggaattaatttgactgtaaacacaaagatattagtacaaaatacgtgacgtagaaagtaataatttctggtagtttgcagttttaaaattatgttttaaaatggactatcatatgcttaccgtaacttgaaagtatttcgatttcttggctttatatatcttgtggaaaggac

SEQ ID NO: 5414 - DNA, 239 bp, synthetic construct
  misc_feature 1..239: note = promoter
  source 1..239: mol_type = other DNA
gagggcctatttcccatgattccttcatatttgcatatacgatacaaggctgttagagagataattggaattaatttgactgtaaacacaaagatattagtacaaaatacgtgacgtagaaagtaataatttcttgtagtttgcagttttaaaattatgttttaaaatggactatcatatgcttaccgtaacttgaaagtatttcgatttcttggctttatatatcttgtggaaaggac

SEQ ID NO: 5415 - DNA, 239 bp, synthetic construct; identical to SEQ ID NO: 5414
  misc_feature 1..239: note = promoter
  source 1..239: mol_type = other DNA

SEQ ID NO: 5416 - DNA, 239 bp, synthetic construct
  misc_feature 1..239: note = promoter
  source 1..239: mol_type = other DNA
gagggcctatttcccatgattccttcatatttgcatatacgatacaaggctgttagagagataattggaattaatttgactgtaaacacaaagatattagtacaaaatacgtgacgtagaaagtaataatttcttggagtttgcagttttaaaattatgttttaaaatggactatcatatgcttaccgtaacttgaaagtatttcgatttcttggctttatatatcttgtggaaaggac

SEQ ID NO: 5417 - DNA, 239 bp, synthetic construct
  misc_feature 1..239: note = promoter
  source 1..239: mol_type = other DNA
gagggcctatttcccatgattccttcatatttgcatatacgatacaaggctgttagagagataattggaattaatttgactgtaaacacaaagatattagtacaaaatacgtgacgtagaaagtaataatttcttggggtttgcagttttaaaattatgttttaaaatggactatcatatgcttaccgtaacttgaaagtatttcgatttcttggctttatatatcttgtggaaaggac

SEQ ID NO: 5418 - DNA, 239 bp, synthetic construct
  misc_feature 1..239: note = promoter
  source 1..239: mol_type = other DNA
gagggcctatttcccatgattccttcatatttgcatatacgatacaaggctgttagagagataattggaattaatttgactgtaaacacaaagatattagtacaaaatacgtgacgtagaaagtaataatttcttgggttttgcagttttaaaattatgttttaaaatggactatcatatgcttaccgtaacttgaaagtatttcgatttcttggctttatatatcttgtggaaaggac

SEQ ID NO: 5419 - DNA, 239 bp, synthetic construct
  misc_feature 1..239: note = promoter
  source 1..239: mol_type = other DNA
gagggcctatttcccatgattccttcatatttgcatatacgatacaaggctgttagagagataattggaattaatttgactgtaaacacaaagatattagtacaaaatacgtgacgtagaaagtaataatttcttgggtattgcagttttaaaattatgttttaaaatggactatcatatgcttaccgtaacttgaaagtatttcgatttcttggctttatatatcttgtggaaaggac

SEQ ID NO: 5420 - DNA, 239 bp, synthetic construct
  misc_feature 1..239: note = promoter
  source 1..239: mol_type = other DNA
gagggcctatttcccatgattccttcatatttgcatatacgatacaaggctgttagagagataattggaattaatttgactgtaaacacaaagatattagtacaaaatacgtgacgtagaaagtaataatttcttgggtagtgcagttttaaaattatgttttaaaatggactatcatatgcttaccgtaacttgaaagtatttcgatttcttggctttatatatcttgtggaaaggac

SEQ ID NO: 5421 - DNA, 239 bp, synthetic construct; identical to SEQ ID NO: 5420
  misc_feature 1..239: note = promoter
  source 1..239: mol_type = other DNA

SEQ ID NO: 5422 - DNA, 239 bp, synthetic construct
  misc_feature 1..239: note = promoter
  source 1..239: mol_type = other DNA
gagggcctatttcccatgattccttcatatttgcatatacgatacaaggctgttagagagataattggaattaatttgactgtaaacacaaagatattagtacaaaatacgtgacgtagaaagtaataatttcttgggtagttcagttttaaaattatgttttaaaatggactatcatatgcttaccgtaacttgaaagtatttcgatttcttggctttatatatcttgtggaaaggac

SEQ ID NO: 5423 - DNA, 239 bp, synthetic construct
  misc_feature 1..239: note = promoter
  source 1..239: mol_type = other DNA
gagggcctatttcccatgattccttcatatttgcatatacgatacaaggctgttagagagataattggaattaatttgactgtaaacacaaagatattagtacaaaatacgtgacgtagaaagtaataatttcttgggtagtttagttttaaaattatgttttaaaatggactatcatatgcttaccgtaacttgaaagtatttcgatttcttggctttatatatcttgtggaaaggac

SEQ ID NO: 5424 - DNA, 239 bp, synthetic construct
  misc_feature 1..239: note = promoter
  source 1..239: mol_type = other DNA
gagggcctatttcccatgattccttcatatttgcatatacgatacaaggctgttagagagataattggaattaatttgactgtaaacacaaagatattagtacaaaatacgtgacgtagaaagtaataatttcttgggtagtttggttttaaaattatgttttaaaatggactatcatatgcttaccgtaacttgaaagtatttcgatttcttggctttatatatcttgtggaaaggac

SEQ ID NO: 5425 - DNA, 239 bp, synthetic construct
  misc_feature 1..239: note = promoter
  source 1..239: mol_type = other DNA
gagggcctatttcccatgattccttcatatttgcatatacgatacaaggctgttagagagataattggaattaatttgactgtaaacacaaagatattagtacaaaatacgtgacgtagaaagtaataatttcttgggtagtttgcttttaaaattatgttttaaaatggactatcatatgcttaccgtaacttgaaagtatttcgatttcttggctttatatatcttgtggaaaggac

SEQ ID NO: 5426 - DNA, 239 bp, synthetic construct
  misc_feature 1..239: note = promoter
  source 1..239: mol_type = other DNA
gagggcctatttcccatgattccttcatatttgcatatacgatacaaggctgttagagagataattggaattaatttgactgtaaacacaaagatattagtacaaaatacgtgacgtagaaagtaataatttcttgggtagtttgcatttaaaattatgttttaaaatggactatcatatgcttaccgtaacttgaaagtatttcgatttcttggctttatatatcttgtggaaaggac

SEQ ID NO: 5427 - DNA, 239 bp, synthetic construct
  misc_feature 1..239: note = promoter
  source 1..239: mol_type = other DNA
gagggcctatttcccatgattccttcatatttgcatatacgatacaaggctgttagagagataattggaattaatttgactgtaaacacaaagatattagtacaaaatacgtgacgtagaaagtaataatttcttgggtagtttgcagttaaaattatgttttaaaatggactatcatatgcttaccgtaacttgaaagtatttcgatttcttggctttatatatcttgtggaaaggac

SEQ ID NO: 5428 - DNA, 239 bp, synthetic construct; identical to SEQ ID NO: 5427
  misc_feature 1..239: note = promoter
  source 1..239: mol_type = other DNA

SEQ ID NO: 5429 - DNA, 239 bp, synthetic construct; identical to SEQ ID NO: 5427
  misc_feature 1..239: note = promoter
  source 1..239: mol_type = other DNA

SEQ ID NO: 5430 - DNA, 239 bp, synthetic construct
  misc_feature 1..239: note = promoter
  source 1..239: mol_type = other DNA
gagggcctatttcccatgattccttcatatttgcatatacgatacaaggctgttagagagataattggaattaatttgactgtaaacacaaagatattagtacaaaatacgtgacgtagaaagtaataatttcttgggtagtttgcagtttaaattatgttttaaaatggactatcatatgcttaccgtaacttgaaagtatttcgatttcttggctttatatatcttgtggaaaggac

SEQ ID NO: 5431 - DNA, 239 bp, synthetic construct
  misc_feature 1..239: note = promoter
  source 1..239: mol_type = other DNA
gagggcctatttcccatgattccttcatatttgcatatacgatacaaggctgttagagagataattggaattaatttgactgtaaacacaaagatattagtacaaaatacgtgacgtagaaagtaataatttcttgggtagtttgcagttttaattatgttttaaaatggactatcatatgcttaccgtaacttgaaagtatttcgatttcttggctttatatatcttgtggaaaggac

SEQ ID NO: 5432 - DNA, 239 bp, synthetic construct; identical to SEQ ID NO: 5431
  misc_feature 1..239: note = promoter
  source 1..239: mol_type = other DNA

SEQ ID NO: 5433 - DNA, 239 bp, synthetic construct; identical to SEQ ID NO: 5431
  misc_feature 1..239: note = promoter
  source 1..239: mol_type = other DNA

SEQ ID NO: 5434 - DNA, 239 bp, synthetic construct
  misc_feature 1..239: note = promoter
  source 1..239: mol_type = other DNA
gagggcctatttcccatgattccttcatatttgcatatacgatacaaggctgttagagagataattggaattaatttgactgtaaacacaaagatattagtacaaaatacgtgacgtagaaagtaataatttcttgggtagtttgcagttttaaatatgttttaaaatggactatcatatgcttaccgtaacttgaaagtatttcgatttcttggctttatatatcttgtggaaaggac

SEQ ID NO: 5435 - DNA, 239 bp, synthetic construct
  misc_feature 1..239: note = promoter
  source 1..239: mol_type = other DNA
gagggcctatttcccatgattccttcatatttgcatatacgatacaaggctgttagagagataattggaattaatttgactgtaaacacaaagatattagtacaaaatacgtgacgtagaaagtaataatttcttgggtagtttgcagttttaaaaatgttttaaaatggactatcatatgcttaccgtaacttgaaagtatttcgatttcttggctttatatatcttgtggaaaggac

SEQ ID NO: 5436 - DNA, 239 bp, synthetic construct
  misc_feature 1..239: note = promoter
  source 1..239: mol_type = other DNA
gagggcctatttcccatgattccttcatatttgcatatacgatacaaggctgttagagagataattggaattaatttgactgtaaacacaaagatattagtacaaaatacgtgacgtagaaagtaataatttcttgggtagtttgcagttttaaaattgttttaaaatggactatcatatgcttaccgtaacttgaaagtatttcgatttcttggctttatatatcttgtggaaaggac

SEQ ID NO: 5437 - DNA, 239 bp, synthetic construct; identical to SEQ ID NO: 5436
  misc_feature 1..239: note = promoter
  source 1..239: mol_type = other DNA

SEQ ID NO: 5438 - DNA, 239 bp, synthetic construct
  misc_feature 1..239: note = promoter
  source 1..239: mol_type = other DNA
gagggcctatttcccatgattccttcatatttgcatatacgatacaaggctgttagagagataattggaattaatttgactgtaaacacaaagatattagtacaaaatacgtgacgtagaaagtaataatttcttgggtagtttgcagttttaaaattattttaaaatggactatcatatgcttaccgtaacttgaaagtatttcgatttcttggctttatatatcttgtggaaaggac

SEQ ID NO: 5439 - DNA, 239 bp, synthetic construct; identical to SEQ ID NO: 5438
  misc_feature 1..239: note = promoter
  source 1..239: mol_type = other DNA

SEQ ID NO: 5440 - DNA, 239 bp, synthetic construct
  misc_feature 1..239: note = promoter
  source 1..239: mol_type = other DNA
gagggcctatttcccatgattccttcatatttgcatatacgatacaaggctgttagagagataattggaattaatttgactgtaaacacaaagatattagtacaaaatacgtgacgtagaaagtaataatttcttgggtagtttgcagttttaaaattatgttaaaatggactatcatatgcttaccgtaacttgaaagtatttcgatttcttggctttatatatcttgtggaaaggac

SEQ ID NO: 5441 - DNA, 239 bp, synthetic construct; identical to SEQ ID NO: 5440
  misc_feature 1..239: note = promoter
  source 1..239: mol_type = other DNA

SEQ ID NO: 5442 - DNA, 239 bp, synthetic construct; identical to SEQ ID NO: 5440
  misc_feature 1..239: note = promoter
  source 1..239: mol_type = other DNA

SEQ ID NO: 5443 - DNA, 239 bp, synthetic construct
  misc_feature 1..239: note = promoter
  source 1..239: mol_type = other DNA
gagggcctatttcccatgattccttcatatttgcatatacgatacaaggctgttagagagataattggaattaatttgactgtaaacacaaagatattagtacaaaatacgtgacgtagaaagtaataatttcttgggtagtttgcagttttaaaattatgtttaaatggactatcatatgcttaccgtaacttgaaagtatttcgatttcttggctttatatatcttgtggaaaggac

SEQ ID NO: 5444 - DNA, 239 bp, synthetic construct
  misc_feature 1..239: note = promoter
  source 1..239: mol_type = other DNA
gagggcctatttcccatgattccttcatatttgcatatacgatacaaggctgttagagagataattggaattaatttgactgtaaacacaaagatattagtacaaaatacgtgacgtagaaagtaataatttcttgggtagtttgcagttttaaaattatgttttaatggactatcatatgcttaccgtaacttgaaagtatttcgatttcttggctttatatatcttgtggaaaggac

SEQ ID NO: 5445 - DNA, 239 bp, synthetic construct; identical to SEQ ID NO: 5444
  misc_feature 1..239: note = promoter
  source 1..239: mol_type = other DNA

SEQ ID NO: 5446 - DNA, 239 bp, synthetic construct; identical to SEQ ID NO: 5444
  misc_feature 1..239: note = promoter
  source 1..239: mol_type = other DNA

SEQ ID NO: 5447 - DNA, 239 bp, synthetic construct
  misc_feature 1..239: note = promoter
  source 1..239: mol_type = other DNA
gagggcctatttcccatgattccttcatatttgcatatacgatacaaggctgttagagagataattggaattaatttgactgtaaacacaaagatattagtacaaaatacgtgacgtagaaagtaataatttcttgggtagtttgcagttttaaaattatgttttaaaggactatcatatgcttaccgtaacttgaaagtatttcgatttcttggctttatatatcttgtggaaaggac

SEQ ID NO: 5448 - DNA, 239 bp, synthetic construct
  misc_feature 1..239: note = promoter
  source 1..239: mol_type = other DNA
gagggcctatttcccatgattccttcatatttgcatatacgatacaaggctgttagagagataattggaattaatttgactgtaaacacaaagatattagtacaaaatacgtgacgtagaaagtaataatttcttgggtagtttgcagttttaaaattatgttttaaaagactatcatatgcttaccgtaacttgaaagtatttcgatttcttggctttatatatcttgtggaaaggac

SEQ ID NO: 5449 - DNA, 239 bp, synthetic construct
  misc_feature 1..239: note = promoter
  source 1..239: mol_type = other DNA
gagggcctatttcccatgattccttcatatttgcatatacgatacaaggctgttagagagataattggaattaatttgactgtaaacacaaagatattagtacaaaatacgtgacgtagaaagtaataatttcttgggtagtttgcagttttaaaattatgttttaaaatactatcatatgcttaccgtaacttgaaagtatttcgatttcttggctttatatatcttgtggaaaggac

SEQ ID NO: 5450 - DNA, 239 bp, synthetic construct
  misc_feature 1..239: note = promoter
  source 1..239: mol_type = other DNA
gagggcctatttcccatgattccttcatatttgcatatacgatacaaggctgttagagagataattggaattaatttgactgtaaacacaaagatattagtacaaaatacgtgacgtagaaagtaataatttcttgggtagtttgcagttttaaaattatgttttaaaatgctatcatatgcttaccgtaacttgaaagtatttcgatttcttggctttatatatcttgtggaaaggac

SEQ ID NO: 5451 - DNA, 239 bp, synthetic construct
  misc_feature 1..239: note = promoter
  source 1..239: mol_type = other DNA
gagggcctatttcccatgattccttcatatttgcatatacgatacaaggctgttagagagataattggaattaatttgactgtaaacacaaagatattagtacaaaatacgtgacgtagaaagtaataatttcttgggtagtttgcagttttaaaattatgttttaaaatggtatcatatgcttaccgtaacttgaaagtatttcgatttcttggctttatatatcttgtggaaaggac

SEQ ID NO: 5452 - DNA, 239 bp, synthetic construct
  misc_feature 1..239: note = promoter
  source 1..239: mol_type = other DNA
gagggcctatttcccatgattccttcatatttgcatatacgatacaaggctgttagagagataattggaattaatttgactgtaaacacaaagatattagtacaaaatacgtgacgtagaaagtaataatttcttgggtagtttgcagttttaaaattatgttttaaaatggaatcatatgcttaccgtaacttgaaagtatttcgatttcttggctttatatatcttgtggaaaggac

SEQ ID NO: 5453 - DNA, 239 bp, synthetic construct
  misc_feature 1..239: note = promoter
  source 1..239: mol_type = other DNA
gagggcctatttcccatgattccttcatatttgcatatacgatacaaggctgttagagagataattggaattaatttgactgtaaacacaaagatattagtacaaaatacgtgacgtagaaagtaataatttcttgggtagtttgcagttttaaaattatgttttaaaatggactcatatgcttaccgtaacttgaaagtatttcgatttcttggctttatatatcttgtggaaaggac

SEQ ID NO: 5454 - DNA, 239 bp, synthetic construct; identical to SEQ ID NO: 5453
  misc_feature 1..239: note = promoter
  source 1..239: mol_type = other DNA

SEQ ID NO: 5455 - DNA, 239 bp, synthetic construct
  misc_feature 1..239: note = promoter
  source 1..239: mol_type = other DNA
gagggcctatttcccatgattccttcatatttgcatatacgatacaaggctgttagagagataattggaattaatttgactgtaaacacaaagatattagtacaaaatacgtgacgtagaaagtaataatttcttgggtagtttgcagttttaaaattatgttttaaaatggactaatatgcttaccgtaacttgaaagtatttcgatttcttggctttatatatcttgtggaaaggac

SEQ ID NO: 5456 - DNA, 239 bp, synthetic construct
  misc_feature 1..239: note = promoter
  source 1..239: mol_type = other DNA
gagggcctatttcccatgattccttcatatttgcatatacgatacaaggctgttagagagataattggaattaatttgactgtaaacacaaagatattagtacaaaatacgtgacgtagaaagtaataatttcttgggtagtttgcagttttaaaattatgttttaaaatggactattatgcttaccgtaacttgaaagtatttcgatttcttggctttatatatcttgtggaaaggac

SEQ ID NO: 5457 - DNA, 239 bp, synthetic construct
  misc_feature 1..239: note = promoter
  source 1..239: mol_type = other DNA
gagggcctatttcccatgattccttcatatttgcatatacgatacaaggctgttagagagataattggaattaatttgactgtaaacacaaagatattagtacaaaatacgtgacgtagaaagtaataatttcttgggtagtttgcagttttaaaattatgttttaaaatggactatcatgcttaccgtaacttgaaagtatttcgatttcttggctttatatatcttgtggaaaggac

SEQ ID NO: 5458 - DNA, 239 bp, synthetic construct; identical to SEQ ID NO: 5457
  misc_feature 1..239: note = promoter
  source 1..239: mol_type = other DNA

SEQ ID NO: 5459 - DNA, 239 bp, synthetic construct; identical to SEQ ID NO: 5457
  misc_feature 1..239: note = promoter
  source 1..239: mol_type = other DNA

SEQ ID NO: 5460 - DNA, 239 bp, synthetic construct
  misc_feature 1..239: note = promoter
  source 1..239: mol_type = other DNA
gagggcctatttcccatgattccttcatatttgcatatacgatacaaggctgttagagagataattggaattaatttgactgtaaacacaaagatattagtacaaaatacgtgacgtagaaagtaataatttcttgggtagtttgcagttttaaaattatgttttaaaatggactatcatacttaccgtaacttgaaagtatttcgatttcttggctttatatatcttgtggaaaggac

SEQ ID NO: 5461 - DNA, 239 bp, synthetic construct
  misc_feature 1..239: note = promoter
  source 1..239: mol_type = other DNA
gagggcctatttcccatgattccttcatatttgcatatacgatacaaggctgttagagagataattggaattaatttgactgtaaacacaaagatattagtacaaaatacgtgacgtagaaagtaataatttcttgggtagtttgcagttttaaaattatgttttaaaatggactatcatatttaccgtaacttgaaagtatttcgatttcttggctttatatatcttgtggaaaggac

SEQ ID NO: 5462 - DNA, 239 bp, synthetic construct
  misc_feature 1..239: note = promoter
  source 1..239: mol_type = other DNA
gagggcctatttcccatgattccttcatatttgcatatacgatacaaggctgttagagagataattggaattaatttgactgtaaacacaaagatattagtacaaaatacgtgacgtagaaagtaataatttcttgggtagtttgcagttttaaaattatgttttaaaatggactatcatatgtaccgtaacttgaaagtatttcgatttcttggctttatatatcttgtggaaaggac

SEQ ID NO: 5463 - DNA, 239 bp, synthetic construct
  misc_feature 1..239: note = promoter
  source 1..239: mol_type = other DNA
gagggcctatttcccatgattccttcatatttgcatatacgatacaaggctgttagagagataattggaattaatttgactgtaaacacaaagatattagtacaaaatacgtgacgtagaaagtaataatttcttgggtagtttgcagttttaaaattatgttttaaaatggactatcatatgcaccgtaacttgaaagtatttcgatttcttggctttatatatcttgtggaaaggac

SEQ ID NO: 5464 - DNA, 239 bp, synthetic construct
  misc_feature 1..239: note = promoter
  source 1..239: mol_type = other DNA
gagggcctatttcccatgattccttcatatttgcatatacgatacaaggctgttagagagataattggaattaatttgactgtaaacacaaagatattagtacaaaatacgtgacgtagaaagtaataatttcttgggtagtttgcagttttaaaattatgttttaaaatggactatcatatgctccgtaacttgaaagtatttcgatttcttggctttatatatcttgtggaaaggac

SEQ ID NO: 5465 - DNA, 239 bp, synthetic construct
  misc_feature 1..239: note = promoter
  source 1..239: mol_type = other DNA
gagggcctatttcccatgattccttcatatttgcatatacgatacaaggctgttagagagataattggaattaatttgactgtaaacacaaagatattagtacaaaatacgtgacgtagaaagtaataatttcttgggtagtttgcagttttaaaattatgttttaaaatggactatcatatgcttcgtaacttgaaagtatttcgatttcttggctttatatatcttgtggaaaggac

SEQ ID NO: 5466 - DNA, 239 bp, synthetic construct
  misc_feature 1..239: note = promoter
  source 1..239: mol_type = other DNA
gagggcctatttcccatgattccttcatatttgcatatacgatacaaggctgttagagagataattggaattaatttgactgtaaacacaaagatattagtacaaaatacgtgacgtagaaagtaataatttcttgggtagtttgcagttttaaaattatgttttaaaatggactatcatatgcttagtaacttgaaagtatttcgatttcttggctttatatatcttgtggaaaggac

SEQ ID NO: 5467 - DNA, 239 bp, synthetic construct
  misc_feature 1..239: note = promoter
  source 1..239: mol_type = other DNA
gagggcctatttcccatgattccttcatatttgcatatacgatacaaggctgttagagagataattggaattaatttgactgtaaacacaaagatattagtacaaaatacgtgacgtagaaagtaataatttcttgggtagtttgcagttttaaaattatgttttaaaatggactatcatatgcttactaacttgaaagtatttcgatttcttggctttatatatcttgtggaaaggac

SEQ ID NO: 5468 - DNA, 239 bp, synthetic construct
  misc_feature 1..239: note = promoter
  source 1..239: mol_type = other DNA
gagggcctatttcccatgattccttcatatttgcatatacgatacaaggctgttagagagataattggaattaatttgactgtaaacacaaagatattagtacaaaatacgtgacgtagaaagtaataatttcttgggtagtttgcagttttaaaattatgttttaaaatggactatcatatgcttaccaacttgaaagtatttcgatttcttggctttatatatcttgtggaaaggac

SEQ ID NO: 5469 - DNA, 239 bp, synthetic construct
  misc_feature 1..239: note = promoter
  source 1..239: mol_type = other DNA
gagggcctatttcccatgattccttcatatttgcatatacgatacaaggctgttagagagataattggaattaatttgactgtaaacacaaagatattagtacaaaatacgtgacgtagaaagtaataatttcttgggtagtttgcagttttaaaattatgttttaaaatggactatcatatgcttaccgacttgaaagtatttcgatttcttggctttatatatcttgtggaaaggac

SEQ ID NO: 5470 - DNA, 239 bp, synthetic construct
  misc_feature 1..239: note = promoter
  source 1..239: mol_type = other DNA
gagggcctatttcccatgattccttcatatttgcatatacgatacaaggctgttagagagataattggaattaatttgactgtaaacacaaagatattagtacaaaatacgtgacgtagaaagtaataatttcttgggtagtttgcagttttaaaattatgttttaaaatggactatcatatgcttaccgtcttgaaagtatttcgatttcttggctttatatatcttgtggaaaggac

SEQ ID NO: 5471 - DNA, 239 bp, synthetic construct
  misc_feature 1..239: note = promoter
  source 1..239: mol_type = other DNA
gagggcctatttcccatgattccttcatatttgcatatacgatacaaggctgttagagagataattggaattaatttgactgtaaacacaaagatattagtacaaaatacgtgacgtagaaagtaataatttcttgggtagtttgcagttttaaaattatgttttaaaatggactatcatatgcttaccgtattgaaagtatttcgatttcttggctttatatatcttgtggaaaggac

SEQ ID NO: 5472 - DNA, 239 bp, synthetic construct
  misc_feature 1..239: note = promoter
  source 1..239: mol_type = other DNA
gagggcctatttcccatgattccttcatatttgcatatacgatacaaggctgttagagagataattggaattaatttgactgtaaacacaaagatattagtacaaaatacgtgacgtagaaagtaataatttcttgggtagtttgcagttttaaaattatgttttaaaatggactatcatatgcttaccgtaatgaaagtatttcgatttcttggctttatatatcttgtggaaaggac

SEQ ID NO: 5473 - DNA, 239 bp, synthetic construct
  misc_feature 1..239: note = promoter
  source 1..239: mol_type = other DNA
gagggcctatttcccatgattccttcatatttgcatatacgatacaaggctgttagagagataattggaattaatttgactgtaaacacaaagatattagtacaaaatacgtgacgtagaaagtaataatttcttgggtagtttgcagttttaaaattatgttttaaaatggactatcatatgcttaccgtaacgaaagtatttcgatttcttggctttatatatcttgtggaaaggac

SEQ ID NO: 5474 - DNA, 239 bp, synthetic construct
  misc_feature 1..239: note = promoter
  source 1..239: mol_type = other DNA
gagggcctatttcccatgattccttcatatttgcatatacgatacaaggctgttagagagataattggaattaatttgactgtaaacacaaagatattagtacaaaatacgtgacgtagaaagtaataatttcttgggtagtttgcagttttaaaattatgttttaaaatggactatcatatgcttaccgtaactaaagtatttcgatttcttggctttatatatcttgtggaaaggac

SEQ ID NO: 5475 - DNA, 239 bp, synthetic construct
  misc_feature 1..239: note = promoter
  source 1..239: mol_type = other DNA
gagggcctatttcccatgattccttcatatttgcatatacgatacaaggctgttagagagataattggaattaatttgactgtaaacacaaagatattagtacaaaatacgtgacgtagaaagtaataatttcttgggtagtttgcagttttaaaattatgttttaaaatggactatcatatgcttaccgtaacttaagtatttcgatttcttggctttatatatcttgtggaaaggac

SEQ ID NO: 5476 - DNA, 239 bp, synthetic construct
  misc_feature 1..239: note = promoter
  source 1..239: mol_type = other DNA
gagggcctatttcccatgattccttcatatttgcatatacgatacaaggctgttagagagataattggaattaatttgactgtaaacacaaagatattagtacaaaatacgtgacgtagaaagtaataatttcttgggtagtttgcagttttaaaattatgttttaaaatggactatcatatgcttaccgtaacttgagtatttcgatttcttggctttatatatcttgtggaaaggac

SEQ ID NO: 5477 - DNA, 239 bp, synthetic construct; identical to SEQ ID NO: 5476
  misc_feature 1..239: note = promoter
  source 1..239: mol_type = other DNA

SEQ ID NO: 5478 - DNA, 239 bp, synthetic construct
  misc_feature 1..239: note = promoter
  source 1..239: mol_type = other DNA
gagggcctatttcccatgattccttcatatttgcatatacgatacaaggctgttagagagataattggaattaatttgactgtaaacacaaagatattagtacaaaatacgtgacgtagaaagtaataatttcttgggtagtttgcagttttaaaattatgttttaaaatggactatcatatgcttaccgtaacttgaatatttcgatttcttggctttatatatcttgtggaaaggac

SEQ ID NO: 5479 - DNA, 239 bp, synthetic construct
  misc_feature 1..239: note = promoter
  source 1..239: mol_type = other DNA
gagggcctatttcccatgattccttcatatttgcatatacgatacaaggctgttagagagataattggaattaatttgactgtaaacacaaagatattagtacaaaatacgtgacgtagaaagtaataatttcttgggtagtttgcagttttaaaattatgttttaaaatggactatcatatgcttaccgtaacttgaaaatttcgatttcttggctttatatatcttgtggaaaggac

SEQ ID NO: 5480 - DNA, 239 bp, synthetic construct
  misc_feature 1..239: note = promoter
  source 1..239: mol_type = other DNA
gagggcctatttcccatgattccttcatatttgcatatacgatacaaggctgttagagagataattggaattaatttgactgtaaacacaaagatattagtacaaaatacgtgacgtagaaagtaataatttcttgggtagtttgcagttttaaaattatgttttaaaatggactatcatatgcttaccgtaacttgaaagtttcgatttcttggctttatatatcttgtggaaaggac

SEQ ID NO: 5481 - DNA, 239 bp, synthetic construct; identical to SEQ ID NO: 5480
  misc_feature 1..239: note = promoter
  source 1..239: mol_type = other DNA

SEQ ID NO: 5482 - DNA, 239 bp, synthetic construct
  misc_feature 1..239: note = promoter
  source 1..239: mol_type = other DNA
gagggcctatttcccatgattccttcatatttgcatatacgatacaaggctgttagagagataattggaattaatttgactgtaaacacaaagatattagtacaaaatacgtgacgtagaaagtaataatttcttgggtagtttgcagttttaaaattatgttttaaaatggactatcatatgcttaccgtaacttgaaagtatcgatttcttggctttatatatcttgtggaaaggac

SEQ ID NO: 5483 - DNA, 239 bp, synthetic construct; identical to SEQ ID NO: 5482
  misc_feature 1..239: note = promoter
  source 1..239: mol_type = other DNA

SEQ ID NO: 5484 - DNA, 239 bp, synthetic construct
  misc_feature 1..239: note = promoter
  source 1..239: mol_type = other DNA
gagggcctatttcccatgattccttcatatttgcatatacgatacaaggctgttagagagataattggaattaatttgactgtaaacacaaagatattagtacaaaatacgtgacgtagaaagtaataatttcttgggtagtttgcagttttaaaattatgttttaaaatggactatcatatgcttaccgtaacttgaaagtattgatttcttggctttatatatcttgtggaaaggac

SEQ ID NO: 5485 - DNA, 239 bp, synthetic construct
  misc_feature 1..239: note = promoter
  source 1..239: mol_type = other DNA
gagggcctatttcccatgattccttcatatttgcatatacgatacaaggctgttagagagataattggaattaatttgactgtaaacacaaagatattagtacaaaatacgtgacgtagaaagtaataatttcttgggtagtttgcagttttaaaattatgttttaaaatggactatcatatgcttaccgtaacttgaaagtatttatttcttggctttatatatcttgtggaaaggac

SEQ ID NO: 5486 - DNA, 239 bp, synthetic construct
  misc_feature 1..239: note = promoter
  source 1..239: mol_type = other DNA
gagggcctatttcccatgattccttcatatttgcatatacgatacaaggctgttagagagataattggaattaatttgactgtaaacacaaagatattagtacaaaatacgtgacgtagaaagtaataatttcttgggtagtttgcagttttaaaattatgttttaaaatggactatcatatgcttaccgtaacttgaaagtatttctttcttggctttatatatcttgtggaaaggac

SEQ ID NO: 5487 - DNA, 239 bp, synthetic construct
  misc_feature 1..239: note = promoter
  source 1..239: mol_type = other DNA
gagggcctatttcccatgattccttcatatttgcatatacgatacaaggctgttagagagataattggaattaatttgactgtaaacacaaagatattagtacaaaatacgtgacgtagaaagtaataatttcttgggtagtttgcagttttaaaattatgttttaaaatggactatcatatgcttaccgtaacttgaaagtatttcgttcttggctttatatatcttgtggaaaggac

SEQ ID NO: 5488 - DNA, 239 bp, synthetic construct
  misc_feature 1..239: note = promoter
  source 1..239: mol_type = other DNA
gagggcctatttcccatgattccttcatatttgcatatacgatacaaggctgttagagagataattggaattaatttgactgtaaacacaaagatattagtacaaaatacgtgacgtagaaagtaataatttcttgggtagtttgcagttttaaaattatgttttaaaatggactatcatatgcttaccgtaacttgaaagtatttcgatcttggctttatatatcttgtggaaaggac

SEQ ID NO: 5489 - DNA, 239 bp, synthetic construct; identical to SEQ ID NO: 5488
  misc_feature 1..239: note = promoter
  source 1..239: mol_type = other DNA

SEQ ID NO: 5490 - DNA, 239 bp, synthetic construct
  misc_feature 1..239: note = promoter
  source 1..239: mol_type = other DNA
gagggcctatttcccatgattccttcatatttgcatatacgatacaaggctgttagagagataattggaattaatttgactgtaaacacaaagatattagtacaaaatacgtgacgtagaaagtaataatttcttgggtagtttgcagttttaaaattatgttttaaaatggactatcatatgcttaccgtaacttgaaagtatttcgattttggctttatatatcttgtggaaaggac

SEQ ID NO: 5491 - DNA, 239 bp, synthetic construct; identical to SEQ ID NO: 5490
  misc_feature 1..239: note = promoter
  source 1..239: mol_type = other DNA

SEQ ID NO: 5492 - DNA, 239 bp, synthetic construct
  misc_feature 1..239: note = promoter
  source 1..239: mol_type = other DNA
gagggcctatttcccatgattccttcatatttgcatatacgatacaaggctgttagagagataattggaattaatttgactgtaaacacaaagatattagtacaaaatacgtgacgtagaaagtaataatttcttgggtagtttgcagttttaaaattatgttttaaaatggactatcatatgcttaccgtaacttgaaagtatttcgatttcggctttatatatcttgtggaaaggac

SEQ ID NO: 5493 - DNA, 239 bp, synthetic construct
  misc_feature 1..239: note = promoter
  source 1..239: mol_type = other DNA
gagggcctatttcccatgattccttcatatttgcatatacgatacaaggctgttagagagataattggaattaatttgactgtaaacacaaagatattagtacaaaatacgtgacgtagaaagtaataatttcttgggtagtttgcagttttaaaattatgttttaaaatggactatcatatgcttaccgtaacttgaaagtatttcgatttctgctttatatatcttgtggaaaggac

SEQ ID NO: 5494 - DNA, 239 bp, synthetic construct
  misc_feature 1..239: note = promoter
  source 1..239: mol_type = other DNA
gagggcctatttcccatgattccttcatatttgcatatacgatacaaggctgttagagagataattggaattaatttgactgtaaacacaaagatattagtacaaaatacgtgacgtagaaagtaataatttcttgggtagtttgcagttttaaaattatgttttaaaatggactatcatatgcttaccgtaacttgaaagtatttcgatttcttctttatatatcttgtggaaaggac

SEQ ID NO: 5495 - DNA, 239 bp, synthetic construct
  misc_feature 1..239: note = promoter
  source 1..239: mol_type = other DNA
gagggcctatttcccatgattccttcatatttgcatatacgatacaaggctgttagagagataattggaattaatttgactgtaaacacaaagatattagtacaaaatacgtgacgtagaaagtaataatttcttgggtagtttgcagttttaaaattatgttttaaaatggactatcatatgcttaccgtaacttgaaagtatttcgatttcttgtttatatatcttgtggaaaggac

SEQ ID NO: 5496 - DNA, 239 bp, synthetic construct
  misc_feature 1..239: note = promoter
  source 1..239: mol_type = other DNA
gagggcctatttcccatgattccttcatatttgcatatacgatacaaggctgttagagagataattggaattaatttgactgtaaacacaaagatattagtacaaaatacgtgacgtagaaagtaataatttcttgggtagtttgcagttttaaaattatgttttaaaatggactatcatatgcttaccgtaacttgaaagtatttcgatttcttggttatatatcttgtggaaaggac

SEQ ID NO: 5497 - DNA, 239 bp, synthetic construct
  misc_feature 1..239: note = promoter
  source 1..239: mol_type = other DNA
gagggcctatttcccatgattccttcatatttgcatatacgatacaaggctgttagagagataattggaattaatttgactgtaaacacaaagatattagtacaaaatacgtgacgtagaaagtaataatttcttgggtagtttgcagttttaaaattatgttttaaaatggactatcatatgcttaccgtaacttgaaagtatttcgatttcttggctatatatcttgtggaaaggac

SEQ ID NO: 5498 - DNA, 239 bp, synthetic construct; identical to SEQ ID NO: 5497
  misc_feature 1..239: note = promoter
  source 1..239: mol_type = other DNA

SEQ ID NO: 5499 - DNA, 239 bp, synthetic construct
  misc_feature 1..239: note = promoter
  source 1..239: mol_type = other DNA
gagggcctatttcccatgattccttcatatttgcatatacgatacaaggctgttagagagataattggaattaatttgactgtaaacacaaagatattagtacaaaatacgtgacgtagaaagtaataatttcttgggtagtttgcagttttaaaattatgttttaaaatggactatcatatgcttaccgtaacttgaaagtatttcgatttcttggctttatatcttgtggaaaggac

SEQ ID NO: 5500 - DNA, 239 bp, synthetic construct; identical to SEQ ID NO: 5499
  misc_feature 1..239: note = promoter
  source 1..239: mol_type = other DNA

SEQ ID NO: 5501 - DNA, 239 bp, synthetic construct; identical to SEQ ID NO: 5499
  misc_feature 1..239: note = promoter
  source 1..239: mol_type = other DNA

SEQ ID NO: 5502 - DNA, 239 bp, synthetic construct; identical to SEQ ID NO: 5499
  misc_feature 1..239: note = promoter
  source 1..239: mol_type = other DNA

SEQ ID NO: 5503 - DNA, 239 bp, synthetic construct; identical to SEQ ID NO: 5499
  misc_feature 1..239: note = promoter
  source 1..239: mol_type = other DNA

SEQ ID NO: 5504 - DNA, 239 bp, synthetic construct; identical to SEQ ID NO: 5499
  misc_feature 1..239: note = promoter
  source 1..239: mol_type = other DNA

SEQ ID NO: 5505 - DNA, 239 bp, synthetic construct
  misc_feature 1..239: note = promoter
  source 1..239: mol_type = other DNA
gagggcctatttcccatgattccttcatatttgcatatacgatacaaggctgttagagagataattggaattaatttgactgtaaacacaaagatattagtacaaaatacgtgacgtagaaagtaataatttcttgggtagtttgcagttttaaaattatgttttaaaatggactatcatatgcttaccgtaacttgaaagtatttcgatttcttggctttatatattgtggaaaggac

SEQ ID NO: 5506 - DNA, 239 bp, synthetic construct; identical to SEQ ID NO: 5505
  misc_feature 1..239: note = promoter
  source 1..239: mol_type = other DNA

SEQ ID NO: 5507 - DNA, 239 bp, synthetic construct
  misc_feature 1..239: note = promoter
  source 1..239: mol_type = other DNA
gagggcctatttcccatgattccttcatatttgcatatacgatacaaggctgttagagagataattggaattaatttgactgtaaacacaaagatattagtacaaaatacgtgacgtagaaagtaataatttcttgggtagtttgcagttttaaaattatgttttaaaatggactatcatatgcttaccgtaacttgaaagtatttcgatttcttggctttatatatcgtggaaaggac

SEQ ID NO: 5508 - DNA, 239 bp, synthetic construct
  misc_feature 1..239: note = promoter
  source 1..239: mol_type = other DNA
gagggcctatttcccatgattccttcatatttgcatatacgatacaaggctgttagagagataattggaattaatttgactgtaaacacaaagatattagtacaaaatacgtgacgtagaaagtaataatttcttgggtagtttgcagttttaaaattatgttttaaaatggactatcatatgcttaccgtaacttgaaagtatttcgatttcttggctttatatatcttggaaaggac

SEQ ID NO: 5509 - DNA, 239 bp, synthetic construct; identical to SEQ ID NO: 5508
  misc_feature 1..239: note = promoter
  source 1..239: mol_type = other DNA

SEQ ID NO: 5510 - DNA, 239 bp, synthetic construct; identical to SEQ ID NO: 5508
  misc_feature 1..239: note = promoter
  source 1..239: mol_type = other DNA

SEQ ID NO: 5511 - DNA, 239 bp, synthetic construct
  misc_feature 1..239: note = promoter
  source 1..239: mol_type = other DNA
gagggcctatttcccatgattccttcatatttgcatatacgatacaaggctgttagagagataattggaattaatttgactgtaaacacaaagatattagtacaaaatacgtgacgtagaaagtaataatttcttgggtagtttgcagttttaaaattatgttttaaaatggactatcatatgcttaccgtaacttgaaagtatttcgatttcttggctttatatatcttgtaaaggac

SEQ ID NO: 5512 - DNA, 239 bp, synthetic construct
  misc_feature 1..239: note = promoter
  source 1..239: mol_type = other DNA
gagggcctatttcccatgattccttcatatttgcatatacgatacaaggctgttagagagataattggaattaatttgactgtaaacacaaagatattagtacaaaatacgtgacgtagaaagtaataatttcttgggtagtttgcagttttaaaattatgttttaaaatggactatcatatgcttaccgtaacttgaaagtatttcgatttcttggctttatatatcttgtgaaggac

SEQ ID NO: 5513 - DNA, 239 bp, synthetic construct
  misc_feature 1..239: note = promoter
  source 1..239: mol_type = other DNA
gagggcctatttcccatgattccttcatatttgcatatacgatacaaggctgttagagagataattggaattaatttgactgtaaacacaaagatattagtacaaaatacgtgacgtagaaagtaataatttcttgggtagtttgcagttttaaaattatgttttaaaatggactatcatatgcttaccgtaacttgaaagtatttcgatttcttggctttatatatcttgtggaggac

SEQ ID NO: 5514 - DNA, 239 bp, synthetic construct; identical to SEQ ID NO: 5513
  misc_feature 1..239: note = promoter
  source 1..239: mol_type = other DNA

SEQ ID NO: 5515 - DNA, 239 bp, synthetic construct
  misc_feature 1..239: note = promoter
  source 1..239: mol_type = other DNA
gagggcctatttcccatgattccttcatatttgcatatacgatacaaggctgttagagagataattggaattaatttgactgtaaacacaaagatattagtacaaaatacgtgacgtagaaagtaataatttcttgggtagtttgcagttttaaaattatgttttaaaatggactatcatatgcttaccgtaacttgaaagtatttcgatttcttggctttatatatcttgtggaagac

SEQ ID NO: 5516 - DNA, 239 bp, synthetic construct
  misc_feature 1..239: note = promoter
  source 1..239: mol_type = other DNA
gagggcctatttcccatgattccttcatatttgcatatacgatacaaggctgttagagagataattggaattaatttgactgtaaacacaaagatattagtacaaaatacgtgacgtagaaagtaataatttcttgggtagtttgcagttttaaaattatgttttaaaatggactatcatatgcttaccgtaacttgaaagtatttcgatttcttggctttatatatcttgtggaaaac

SEQ ID NO: 5517 - DNA, 239 bp, synthetic construct
  misc_feature 1..239: note = promoter
  source 1..239: mol_type = other DNA
gagggcctatttcccatgattccttcatatttgcatatacgatacaaggctgttagagagataattggaattaatttgactgtaaacacaaagatattagtacaaaatacgtgacgtagaaagtaataatttcttgggtagtttgcagttttaaaattatgttttaaaatggactatcatatgcttaccgtaacttgaaagtatttcgatttcttggctttatatatcttgtggaaagc

SEQ ID NO: 5518 - DNA, 239 bp, synthetic construct
  misc_feature 1..239: note = promoter
  source 1..239: mol_type = other DNA
gagggcctatttcccatgattccttcatatttgcatatacgatacaaggctgttagagagataattggaattaatttgactgtaaacacaaagatattagtacaaaatacgtgacgtagaaagtaataatttcttgggtagtttgcagttttaaaattatgttttaaaatggactatcatatgcttaccgtaacttgaaagtatttcgatttcttggctttatatatcttgtggaaagg

SEQ ID NO: 5519 - DNA, 240 bp, synthetic construct; identical to SEQ ID NO: 5278
  misc_feature 1..240: note = promoter
  source 1..240: mol_type = other DNA

SEQ ID NO: 5520 - DNA, 236 bp, synthetic construct
  misc_feature 1..236: note = promoter
  source 1..236: mol_type = other DNA
cctatttcccatgattccttcatatttgcatatacgatacaaggctgttagagagataattggaattaatttgactgtaaacacaaagatattagtacaaaatacgtgacgtagaaagtaataatttcttgggtagtttgcagttttaaaattatgttttaaaatggactatcatatgcttaccgtaacttgaaagtatttcgatttcttggctttatatatcttgtggaaaggac

SEQ ID NO: 5521 - DNA, 236 bp, synthetic construct
  misc_feature 1..236: note = promoter
  source 1..236: mol_type = other DNA
gctatttcccatgattccttcatatttgcatatacgatacaaggctgttagagagataattggaattaatttgactgtaaacacaaagatattagtacaaaatacgtgacgtagaaagtaataatttcttgggtagtttgcagttttaaaattatgttttaaaatggactatcatatgcttaccgtaacttgaaagtatttcgatttcttggctttatatatcttgtggaaaggac

SEQ ID NO: 5522 - DNA, 236 bp, synthetic construct
  misc_feature 1..236: note = promoter
  source 1..236: mol_type = other DNA
gatatttcccatgattccttcatatttgcatatacgatacaaggctgttagagagataattggaattaatttgactgtaaacacaaagatattagtacaaaatacgtgacgtagaaagtaataatttcttgggtagtttgcagttttaaaattatgttttaaaatggactatcatatgcttaccgtaacttgaaagtatttcgatttcttggctttatatatcttgtggaaaggac

SEQ ID NO: 5523 - DNA, 236 bp, synthetic construct
  misc_feature 1..236: note = promoter
  source 1..236: mol_type = other DNA
gagatttcccatgattccttcatatttgcatatacgatacaaggctgttagagagataattggaattaatttgactgtaaacacaaagatattagtacaaaatacgtgacgtagaaagtaataatttcttgggtagtttgcagttttaaaattatgttttaaaatggactatcatatgcttaccgtaacttgaaagtatttcgatttcttggctttatatatcttgtggaaaggac

SEQ ID NO: 5524 - DNA, 236 bp, synthetic construct
  misc_feature 1..236: note = promoter
  source 1..236: mol_type = other DNA
gaggtttcccatgattccttcatatttgcatatacgatacaaggctgttagagagataattggaattaatttgactgtaaacacaaagatattagtacaaaatacgtgacgtagaaagtaataatttcttgggtagtttgcagttttaaaattatgttttaaaatggactatcatatgcttaccgtaacttgaaagtatttcgatttcttggctttatatatcttgtggaaaggac

SEQ ID NO: 5525 - DNA, 236 bp, synthetic construct
  misc_feature 1..236: note = promoter
  source 1..236: mol_type = other DNA
gagggttcccatgattccttcatatttgcatatacgatacaaggctgttagagagataattggaattaatttgactgtaaacacaaagatattagtacaaaatacgtgacgtagaaagtaataatttcttgggtagtttgcagttttaaaattatgttttaaaatggactatcatatgcttaccgtaacttgaaagtatttcgatttcttggctttatatatcttgtggaaaggac

SEQ ID NO: 5526 - DNA, 236 bp, synthetic construct
  misc_feature 1..236: note = promoter
  source 1..236: mol_type = other DNA
gagggctcccatgattccttcatatttgcatatacgatacaaggctgttagagagataattggaattaatttgactgtaaacacaaagatattagtacaaaatacgtgacgtagaaagtaataatttcttgggtagtttgcagttttaaaattatgttttaaaatggactatcatatgcttaccgtaacttgaaagtatttcgatttcttggctttatatatcttgtggaaaggac

SEQ ID NO: 5527 - DNA, 236 bp, synthetic construct
  misc_feature 1..236: note = promoter
  source 1..236: mol_type = other DNA
gagggcccccatgattccttcatatttgcatatacgatacaaggctgttagagagataattggaattaatttgactgtaaacacaaagatattagtacaaaatacgtgacgtagaaagtaataatttcttgggtagtttgcagttttaaaattatgttttaaaatggactatcatatgcttaccgtaacttgaaagtatttcgatttcttggctttatatatcttgtggaaaggac

SEQ ID NO: 5528 - DNA, 236 bp, synthetic construct
  misc_feature 1..236: note = promoter
  source 1..236: mol_type = other DNA
gagggcctccatgattccttcatatttgcatatacgatacaaggctgttagagagataattggaattaatttgactgtaaacacaaagatattagtacaaaatacgtgacgtagaaagtaataatttcttgggtagtttgcagttttaaaattatgttttaaaatggactatcatatgcttaccgtaacttgaaagtatttcgatttcttggctttatatatcttgtggaaaggac

SEQ ID NO: 5529 - DNA, 236 bp, synthetic construct
  misc_feature 1..236: note = promoter
  source 1..236: mol_type = other DNA
gagggcctacatgattccttcatatttgcatatacgatacaaggctgttagagagataattggaattaatttgactgtaaacacaaagatattagtacaaaatacgtgacgtagaaagtaataatttcttgggtagtttgcagttttaaaattatgttttaaaatggactatcatatgcttaccgtaacttgaaagtatttcgatttcttggctttatatatcttgtggaaaggac

SEQ ID NO: 5530 - DNA, 236 bp, synthetic construct
  misc_feature 1..236: note = promoter
  source 1..236: mol_type = other DNA
gagggcctatatgattccttcatatttgcatatacgatacaaggctgttagagagataattggaattaatttgactgtaaacacaaagatattagtacaaaatacgtgacgtagaaagtaataatttcttgggtagtttgcagttttaaaattatgttttaaaatggactatcatatgcttaccgtaacttgaaagtatttcgatttcttggctttatatatcttgtggaaaggac

SEQ ID NO: 5531 - DNA, 236 bp, synthetic construct
  misc_feature 1..236: note = promoter
  source 1..236: mol_type = other DNA
gagggcctatttgattccttcatatttgcatatacgatacaaggctgttagagagataattggaattaatttgactgtaaacacaaagatattagtacaaaatacgtgacgtagaaagtaataatttcttgggtagtttgcagttttaaaattatgttttaaaatggactatcatatgcttaccgtaacttgaaagtatttcgatttcttggctttatatatcttgtggaaaggac

SEQ ID NO: 5532 - DNA, 236 bp, synthetic construct; identical to SEQ ID NO: 5531
  misc_feature 1..236: note = promoter
  source 1..236: mol_type = other DNA

SEQ ID NO: 5533 - DNA, 236 bp, synthetic construct
  misc_feature 1..236: note = promoter
  source 1..236: mol_type = other DNA
gagggcctatttcattccttcatatttgcatatacgatacaaggctgttagagagataattggaattaatttgactgtaaacacaaagatattagtacaaaatacgtgacgtagaaagtaataatttcttgggtagtttgcagttttaaaattatgttttaaaatggactatcatatgcttaccgtaacttgaaagtatttcgatttcttggctttatatatcttgtggaaaggac

SEQ ID NO: 5534 - DNA, 236 bp, synthetic construct
  misc_feature 1..236: note = promoter
  source 1..236: mol_type = other DNA
gagggcctatttccttccttcatatttgcatatacgatacaaggctgttagagagataattggaattaatttgactgtaaacacaaagatattagtacaaaatacgtgacgtagaaagtaataatttcttgggtagtttgcagttttaaaattatgttttaaaatggactatcatatgcttaccgtaacttgaaagtatttcgatttcttggctttatatatcttgtggaaaggac

SEQ ID NO: 5535 - DNA, 236 bp, synthetic construct
  misc_feature 1..236: note = promoter
  source 1..236: mol_type = other DNA
gagggcctatttccctccttcatatttgcatatacgatacaaggctgttagagagataattggaattaatttgactgtaaacacaaagatattagtacaaaatacgtgacgtagaaagtaataatttcttgggtagtttgcagttttaaaattatgttttaaaatggactatcatatgcttaccgtaacttgaaagtatttcgatttcttggctttatatatcttgtggaaaggac

SEQ ID NO: 5536 - DNA, 236 bp, synthetic construct
  misc_feature 1..236: note = promoter
  source 1..236: mol_type = other DNA
gagggcctatttcccaccttcatatttgcatatacgatacaaggctgttagagagataattggaattaatttgactgtaaacacaaagatattagtacaaaatacgtgacgtagaaagtaataatttcttgggtagtttgcagttttaaaattatgttttaaaatggactatcatatgcttaccgtaacttgaaagtatttcgatttcttggctttatatatcttgtggaaaggac

SEQ ID NO: 5537 - DNA, 236 bp, synthetic construct
  misc_feature 1..236: note = promoter
  source 1..236: mol_type = other DNA
gagggcctatttcccatcttcatatttgcatatacgatacaaggctgttagagagataattggaattaatttgactgtaaacacaaagatattagtacaaaatacgtgacgtagaaagtaataatttcttgggtagtttgcagttttaaaattatgttttaaaatggactatcatatgcttaccgtaacttgaaagtatttcgatttcttggctttatatatcttgtggaaaggac

SEQ ID NO: 5538 - DNA, 236 bp, synthetic construct
  misc_feature 1..236: note = promoter
  source 1..236: mol_type = other DNA
gagggcctatttcccatgttcatatttgcatatacgatacaaggctgttagagagataattggaattaatttgactgtaaacacaaagatattagtacaaaatacgtgacgtagaaagtaataatttcttgggtagtttgcagttttaaaattatgttttaaaatggactatcatatgcttaccgtaacttgaaagtatttcgatttcttggctttatatatcttgtggaaaggac

SEQ ID NO: 5539 - DNA, 236 bp, synthetic construct
  misc_feature 1..236: note = promoter
  source 1..236: mol_type = other DNA
gagggcctatttcccatgatcatatttgcatatacgatacaaggctgttagagagataattggaattaatttgactgtaaacacaaagatattagtacaaaatacgtgacgtagaaagtaataatttcttgggtagtttgcagttttaaaattatgttttaaaatggactatcatatgcttaccgtaacttgaaagtatttcgatttcttggctttatatatcttgtggaaaggac

SEQ ID NO: 5540 - DNA, 236 bp, synthetic construct; identical to SEQ ID NO: 5539
  misc_feature 1..236: note = promoter
  source 1..236: mol_type = other DNA

SEQ ID NO: 5541 - DNA, 236 bp, synthetic construct
  misc_feature 1..236: note = promoter
  source 1..236: mol_type = other DNA
gagggcctatttcccatgattatatttgcatatacgatacaaggctgttagagagataattggaattaatttgactgtaaacacaaagatattagtacaaaatacgtgacgtagaaagtaataatttcttgggtagtttgcagttttaaaattatgttttaaaatggactatcatatgcttaccgtaacttgaaagtatttcgatttcttggctttatatatcttgtggaaaggac

SEQ ID NO: 5542 - DNA, 236 bp, synthetic construct
  misc_feature 1..236: note = promoter
  source 1..236: mol_type = other DNA
gagggcctatttcccatgattctatttgcatatacgatacaaggctgttagagagataattggaattaatttgactgtaaacacaaagatattagtacaaaatacgtgacgtagaaagtaataatttcttgggtagtttgcagttttaaaattatgttttaaaatggactatcatatgcttaccgtaacttgaaagtatttcgatttcttggctttatatatcttgtggaaaggac

SEQ ID NO: 5543 - DNA, 236 bp, synthetic construct
  misc_feature 1..236: note = promoter
  source 1..236: mol_type = other DNA
gagggcctatttcccatgattccatttgcatatacgatacaaggctgttagagagataattggaattaatttgactgtaaacacaaagatattagtacaaaatacgtgacgtagaaagtaataatttcttgggtagtttgcagttttaaaattatgttttaaaatggactatcatatgcttaccgtaacttgaaagtatttcgatttcttggctttatatatcttgtggaaaggac

SEQ ID NO: 5544 - DNA, 236 bp, synthetic construct
  misc_feature 1..236: note = promoter
  source 1..236: mol_type = other DNA
gagggcctatttcccatgattccttttgcatatacgatacaaggctgttagagagataattggaattaatttgactgtaaacacaaagatattagtacaaaatacgtgacgtagaaagtaataatttcttgggtagtttgcagttttaaaattatgttttaaaatggactatcatatgcttaccgtaacttgaaagtatttcgatttcttggctttatatatcttgtggaaaggac

SEQ ID NO: 5545 - DNA, 236 bp, synthetic construct; identical to SEQ ID NO: 5544
  misc_feature 1..236: note = promoter
  source 1..236: mol_type = other DNA

SEQ ID NO: 5546 - DNA, 236 bp, synthetic construct
  misc_feature 1..236: note = promoter
  source 1..236: mol_type = other DNA
gagggcctatttcccatgattccttctgcatatacgatacaaggctgttagagagataattggaattaatttgactgtaaacacaaagatattagtacaaaatacgtgacgtagaaagtaataatttcttgggtagtttgcagttttaaaattatgttttaaaatggactatcatatgcttaccgtaacttgaaagtatttcgatttcttggctttatatatcttgtggaaaggac

SEQ ID NO: 5547 - DNA, 236 bp, synthetic construct
  misc_feature 1..236: note = promoter
  source 1..236: mol_type = other DNA
gagggcctatttcccatgattccttcagcatatacgatacaaggctgttagagagataattggaattaatttgactgtaaacacaaagatattagtacaaaatacgtgacgtagaaagtaataatttcttgggtagtttgcagttttaaaattatgttttaaaatggactatcatatgcttaccgtaacttgaaagtatttcgatttcttggctttatatatcttgtggaaaggac

SEQ ID NO: 5548 - DNA, 236 bp, synthetic construct
  misc_feature 1..236: note = promoter
  source 1..236: mol_type = other DNA
gagggcctatttcccatgattccttcatcatatacgatacaaggctgttagagagataattggaattaatttgactgtaaacacaaagatattagtacaaaatacgtgacgtagaaagtaataatttcttgggtagtttgcagttttaaaattatgttttaaaatggactatcatatgcttaccgtaacttgaaagtatttcgatttcttggctttatatatcttgtggaaaggac

SEQ ID NO: 5549 - DNA, 236 bp, synthetic construct
  misc_feature 1..236: note = promoter
  source 1..236: mol_type = other DNA
gagggcctatttcccatgattccttcataatatacgatacaaggctgttagagagataattggaattaatttgactgtaaacacaaagatattagtacaaaatacgtgacgtagaaagtaataatttcttgggtagtttgcagttttaaaattatgttttaaaatggactatcatatgcttaccgtaacttgaaagtatttcgatttcttggctttatatatcttgtggaaaggac

SEQ ID NO: 5550 - DNA, 236 bp, synthetic construct
  misc_feature 1..236: note = promoter
  source 1..236: mol_type = other DNA
gagggcctatttcccatgattccttcatattatacgatacaaggctgttagagagataattggaattaatttgactgtaaacacaaagatattagtacaaaatacgtgacgtagaaagtaataatttcttgggtagtttgcagttttaaaattatgttttaaaatggactatcatatgcttaccgtaacttgaaagtatttcgatttcttggctttatatatcttgtggaaaggac

SEQ ID NO: 5551 - DNA, 236 bp, synthetic construct; identical to SEQ ID NO: 5550
  misc_feature 1..236: note = promoter
  source 1..236: mol_type = other DNA

SEQ ID NO: 5552 - DNA, 236 bp, synthetic construct
  misc_feature 1..236: note = promoter
  source 1..236: mol_type = other DNA
gagggcctatttcccatgattccttcatattttacgatacaaggctgttagagagataattggaattaatttgactgtaaacacaaagatattagtacaaaatacgtgacgtagaaagtaataatttcttgggtagtttgcagttttaaaattatgttttaaaatggactatcatatgcttaccgtaacttgaaagtatttcgatttcttggctttatatatcttgtggaaaggac

SEQ ID NO: 5553 - DNA, 236 bp, synthetic construct
  misc_feature 1..236: note = promoter
  source 1..236: mol_type = other DNA
gagggcctatttcccatgattccttcatatttgacgatacaaggctgttagagagataattggaattaatttgactgtaaacacaaagatattagtacaaaatacgtgacgtagaaagtaataatttcttgggtagtttgcagttttaaaattatgttttaaaatggactatcatatgcttaccgtaacttgaaagtatttcgatttcttggctttatatatcttgtggaaaggac

SEQ ID NO: 5554 - DNA, 236 bp, synthetic construct
  misc_feature 1..236: note = promoter
  source 1..236: mol_type = other DNA
gagggcctatttcccatgattccttcatatttgccgatacaaggctgttagagagataattggaattaatttgactgtaaacacaaagatattagtacaaaatacgtgacgtagaaagtaataatttcttgggtagtttgcagttttaaaattatgttttaaaatggactatcatatgcttaccgtaacttgaaagtatttcgatttcttggctttatatatcttgtggaaaggac

SEQ ID NO: 5555 - DNA, 236 bp, synthetic construct
  misc_feature 1..236: note = promoter
  source 1..236: mol_type = other DNA
gagggcctatttcccatgattccttcatatttgcagatacaaggctgttagagagataattggaattaatttgactgtaaacacaaagatattagtacaaaatacgtgacgtagaaagtaataatttcttgggtagtttgcagttttaaaattatgttttaaaatggactatcatatgcttaccgtaacttgaaagtatttcgatttcttggctttatatatcttgtggaaaggac

SEQ ID NO: 5556 - DNA, 236 bp, synthetic construct
  misc_feature 1..236: note = promoter
  source 1..236: mol_type = other DNA
gagggcctatttcccatgattccttcatatttgcatatacaaggctgttagagagataattggaattaatttgactgtaaacacaaagatattagtacaaaatacgtgacgtagaaagtaataatttcttgggtagtttgcagttttaaaattatgttttaaaatggactatcatatgcttaccgtaacttgaaagtatttcgatttcttggctttatatatcttgtggaaaggac

SEQ ID NO: 5557 - DNA, 236 bp, synthetic construct; identical to SEQ ID NO: 5556
  misc_feature 1..236: note = promoter
  source 1..236: mol_type = other DNA

SEQ ID NO: 5558 - DNA, 236 bp, synthetic construct; identical to SEQ ID NO: 5556
  misc_feature 1..236: note = promoter
  source 1..236: mol_type = other DNA

SEQ ID NO: 5559 - DNA, 236 bp, synthetic construct; identical to SEQ ID NO: 5556
  misc_feature 1..236: note = promoter
  source 1..236: mol_type = other DNA

SEQ ID NO: 5560 - DNA, 236 bp, synthetic construct; identical to SEQ ID NO: 5556
  misc_feature 1..236: note = promoter
  source 1..236: mol_type = other DNA

SEQ ID NO: 5561 - DNA, 236 bp, synthetic construct
  misc_feature 1..236: note = promoter
  source 1..236: mol_type = other DNA
gagggcctatttcccatgattccttcatatttgcatatacgaggctgttagagagataattggaattaatttgactgtaaacacaaagatattagtacaaaatacgtgacgtagaaagtaataatttcttgggtagtttgcagttttaaaattatgttttaaaatggactatcatatgcttaccgtaacttgaaagtatttcgatttcttggctttatatatcttgtggaaaggac

SEQ ID NO: 5562 - DNA, 236 bp, synthetic construct; identical to SEQ ID NO: 5561
  misc_feature 1..236: note = promoter
  source 1..236: mol_type = other DNA

SEQ ID NO: 5563 - DNA, 236 bp, synthetic construct
  misc_feature 1..236: note = promoter
  source 1..236: mol_type = other DNA
gagggcctatttcccatgattccttcatatttgcatatacgatgctgttagagagataattggaattaatttgactgtaaacacaaagatattagtacaaaatacgtgacgtagaaagtaataatttcttgggtagtttgcagttttaaaattatgttttaaaatggactatcatatgcttaccgtaacttgaaagtatttcgatttcttggctttatatatcttgtggaaaggac

SEQ ID NO: 5564 - DNA, 236 bp, synthetic construct
  misc_feature 1..236: note = promoter
  source 1..236: mol_type = other DNA
gagggcctatttcccatgattccttcatatttgcatatacgatactgttagagagataattggaattaatttgactgtaaacacaaagatattagtacaaaatacgtgacgtagaaagtaataatttcttgggtagtttgcagttttaaaattatgttttaaaatggactatcatatgcttaccgtaacttgaaagtatttcgatttcttggctttatatatcttgtggaaaggac

SEQ ID NO: 5565 - DNA, 236 bp, synthetic construct; identical to SEQ ID NO: 5564
  misc_feature 1..236: note = promoter
  source 1..236: mol_type = other DNA

SEQ ID NO: 5566 - DNA, 236 bp, synthetic construct
  misc_feature 1..236: note = promoter
  source 1..236: mol_type = other DNA
gagggcctatttcccatgattccttcatatttgcatatacgatacagttagagagataattggaattaatttgactgtaaacacaaagatattagtacaaaatacgtgacgtagaaagtaataatttcttgggtagtttgcagttttaaaattatgttttaaaatggactatcatatgcttaccgtaacttgaaagtatttcgatttcttggctttatatatcttgtggaaaggac

SEQ ID NO: 5567 - DNA, 236 bp, synthetic construct
  misc_feature 1..236: note = promoter
  source 1..236: mol_type = other DNA
gagggcctatttcccatgattccttcatatttgcatatacgatacaattagagagataattggaattaatttgactgtaaacacaaagatattagtacaaaatacgtgacgtagaaagtaataatttcttgggtagtttgcagttttaaaattatgttttaaaatggactatcatatgcttaccgtaacttgaaagtatttcgatttcttggctttatatatcttgtggaaaggac

SEQ ID NO: 5568 - DNA, 236 bp, synthetic construct
  misc_feature 1..236: note = promoter
  source 1..236: mol_type = other DNA
gagggcctatttcccatgattccttcatatttgcatatacgatacaagtagagagataattggaattaatttgactgtaaacacaaagatattagtacaaaatacgtgacgtagaaagtaataatttcttgggtagtttgcagttttaaaattatgttttaaaatggactatcatatgcttaccgtaacttgaaagtatttcgatttcttggctttatatatcttgtggaaaggac

SEQ ID NO: 5569 - DNA, 236 bp, synthetic construct
  misc_feature 1..236: note = promoter
  source 1..236: mol_type = other DNA
gagggcctatttcccatgattccttcatatttgcatatacgatacaaggagagagataattggaattaatttgactgtaaacacaaagatattagtacaaaatacgtgacgtagaaagtaataatttcttgggtagtttgcagttttaaaattatgttttaaaatggactatcatatgcttaccgtaacttgaaagtatttcgatttcttggctttatatatcttgtggaaaggac

SEQ ID NO: 5570 - DNA, 236 bp, synthetic construct
  misc_feature 1..236: note = promoter
  source 1..236: mol_type = other DNA
gagggcctatttcccatgattccttcatatttgcatatacgatacaaggcgagagataattggaattaatttgactgtaaacacaaagatattagtacaaaatacgtgacgtagaaagtaataatttcttgggtagtttgcagttttaaaattatgttttaaaatggactatcatatgcttaccgtaacttgaaagtatttcgatttcttggctttatatatcttgtggaaaggac

SEQ ID NO: 5571 - DNA, 236 bp, synthetic construct
  misc_feature 1..236: note = promoter
  source 1..236: mol_type = other DNA
gagggcctatttcccatgattccttcatatttgcatatacgatacaaggctagagataattggaattaatttgactgtaaacacaaagatattagtacaaaatacgtgacgtagaaagtaataatttcttgggtagtttgcagttttaaaattatgttttaaaatggactatcatatgcttaccgtaacttgaaagtatttcgatttcttggctttatatatcttgtggaaaggac

SEQ ID NO: 5572 - DNA, 236 bp, synthetic construct
  misc_feature 1..236: note = promoter
  source 1..236: mol_type = other DNA
gagggcctatttcccatgattccttcatatttgcatatacgatacaaggctggagataattggaattaatttgactgtaaacacaaagatattagtacaaaatacgtgacgtagaaagtaataatttcttgggtagtttgcagttttaaaattatgttttaaaatggactatcatatgcttaccgtaacttgaaagtatttcgatttcttggctttatatatcttgtggaaaggac

SEQ ID NO: 5573 - DNA, 236 bp, synthetic construct
  misc_feature 1..236: note = promoter
  source 1..236: mol_type = other DNA
gagggcctatttcccatgattccttcatatttgcatatacgatacaaggctgtagataattggaattaatttgactgtaaacacaaagatattagtacaaaatacgtgacgtagaaagtaataatttcttgggtagtttgcagttttaaaattatgttttaaaatggactatcatatgcttaccgtaacttgaaagtatttcgatttcttggctttatatatcttgtggaaaggac

SEQ ID NO: 5574 - DNA, 236 bp, synthetic construct
  misc_feature 1..236: note = promoter
  source 1..236: mol_type = other DNA
gagggcctatttcccatgattccttcatatttgcatatacgatacaaggctgttgataattggaattaatttgactgtaaacacaaagatattagtacaaaatacgtgacgtagaaagtaataatttcttgggtagtttgcagttttaaaattatgttttaaaatggactatcatatgcttaccgtaacttgaaagtatttcgatttcttggctttatatatcttgtggaaaggac

SEQ ID NO: 5575 - DNA, 236 bp, synthetic construct
  misc_feature 1..236: note = promoter
  source 1..236: mol_type = other DNA
gagggcctatttcccatgattccttcatatttgcatatacgatacaaggctgttaataattggaattaatttgactgtaaacacaaagatattagtacaaaatacgtgacgtagaaagtaataatttcttgggtagtttgcagttttaaaattatgttttaaaatggactatcatatgcttaccgtaacttgaaagtatttcgatttcttggctttatatatcttgtggaaaggac

SEQ ID NO: 5576 - DNA, 236 bp, synthetic construct
  misc_feature 1..236: note = promoter
  source 1..236: mol_type = other DNA
gagggcctatttcccatgattccttcatatttgcatatacgatacaaggctgttagtaattggaattaatttgactgtaaacacaaagatattagtacaaaatacgtgacgtagaaagtaataatttcttgggtagtttgcagttttaaaattatgttttaaaatggactatcatatgcttaccgtaacttgaaagtatttcgatttcttggctttatatatcttgtggaaaggac

SEQ ID NO: 5577 - DNA, 236 bp, synthetic construct
  misc_feature 1..236: note = promoter
  source 1..236: mol_type = other DNA
gagggcctatttcccatgattccttcatatttgcatatacgatacaaggctgttagaaattggaattaatttgactgtaaacacaaagatattagtacaaaatacgtgacgtagaaagtaataatttcttgggtagtttgcagttttaaaattatgttttaaaatggactatcatatgcttaccgtaacttgaaagtatttcgatttcttggctttatatatcttgtggaaaggac

SEQ ID NO: 5578 - DNA, 236 bp, synthetic construct
  misc_feature 1..236: note = promoter
  source 1..236: mol_type = other DNA
gagggcctatttcccatgattccttcatatttgcatatacgatacaaggctgttagagattggaattaatttgactgtaaacacaaagatattagtacaaaatacgtgacgtagaaagtaataatttcttgggtagtttgcagttttaaaattatgttttaaaatggactatcatatgcttaccgtaacttgaaagtatttcgatttcttggctttatatatcttgtggaaaggac

SEQ ID NO: 5579 - DNA, 236 bp, synthetic construct; identical to SEQ ID NO: 5578
  misc_feature 1..236: note = promoter
  source 1..236: mol_type = other DNA

SEQ ID NO: 5580 - DNA, 236 bp, synthetic construct
  misc_feature 1..236: note = promoter
  source 1..236: mol_type = other DNA
gagggcctatttcccatgattccttcatatttgcatatacgatacaaggctgttagagagtggaattaatttgactgtaaacacaaagatattagtacaaaatacgtgacgtagaaagtaataatttcttgggtagtttgcagttttaaaattatgttttaaaatggactatcatatgcttaccgtaacttgaaagtatttcgatttcttggctttatatatcttgtggaaaggac

SEQ ID NO: 5581 - DNA, 236 bp, synthetic construct
  misc_feature 1..236: note = promoter
  source 1..236: mol_type = other DNA
gagggcctatttcccatgattccttcatatttgcatatacgatacaaggctgttagagagaggaattaatttgactgtaaacacaaagatattagtacaaaatacgtgacgtagaaagtaataatttcttgggtagtttgcagttttaaaattatgttttaaaatggactatcatatgcttaccgtaacttgaaagtatttcgatttcttggctttatatatcttgtggaaaggac

SEQ ID NO: 5582 - DNA, 236 bp, synthetic construct
  misc_feature 1..236: note = promoter
  source 1..236: mol_type = other DNA
gagggcctatttcccatgattccttcatatttgcatatacgatacaaggctgttagagagatgaattaatttgactgtaaacacaaagatattagtacaaaatacgtgacgtagaaagtaataatttcttgggtagtttgcagttttaaaattatgttttaaaatggactatcatatgcttaccgtaacttgaaagtatttcgatttcttggctttatatatcttgtggaaaggac

SEQ ID NO: 5583 - DNA, 236 bp, synthetic construct
  misc_feature 1..236: note = promoter
  source 1..236: mol_type = other DNA
gagggcctatttcccatgattccttcatatttgcatatacgatacaaggctgttagagagataaattaatttgactgtaaacacaaagatattagtacaaaatacgtgacgtagaaagtaataatttcttgggtagtttgcagttttaaaattatgttttaaaatggactatcatatgcttaccgtaacttgaaagtatttcgatttcttggctttatatatcttgtggaaaggac

SEQ ID NO: 5584 - DNA, 236 bp, synthetic construct; identical to SEQ ID NO: 5583
  misc_feature 1..236: note = promoter
  source 1..236: mol_type = other DNA

SEQ ID NO: 5585 - DNA, 236 bp, synthetic construct
  misc_feature 1..236: note = promoter
  source 1..236: mol_type = other DNA
gagggcctatttcccatgattccttcatatttgcatatacgatacaaggctgttagagagataatttaatttgactgtaaacacaaagatattagtacaaaatacgtgacgtagaaagtaataatttcttgggtagtttgcagttttaaaattatgttttaaaatggactatcatatgcttaccgtaacttgaaagtatttcgatttcttggctttatatatcttgtggaaaggac

SEQ ID NO: 5586 - DNA, 236 bp, synthetic construct; identical to SEQ ID NO: 5585
  misc_feature 1..236: note = promoter
  source 1..236: mol_type = other DNA

SEQ ID NO: 5587 - DNA, 236 bp, synthetic construct
  misc_feature 1..236: note = promoter
  source 1..236: mol_type = other DNA
gagggcctatttcccatgattccttcatatttgcatatacgatacaaggctgttagagagataattgaatttgactgtaaacacaaagatattagtacaaaatacgtgacgtagaaagtaataatttcttgggtagtttgcagttttaaaattatgttttaaaatggactatcatatgcttaccgtaacttgaaagtatttcgatttcttggctttatatatcttgtggaaaggac

SEQ ID NO: 5588 - DNA, 236 bp, synthetic construct
  misc_feature 1..236: note = promoter
  source 1..236: mol_type = other DNA
gagggcctatttcccatgattccttcatatttgcatatacgatacaaggctgttagagagataattggatttgactgtaaacacaaagatattagtacaaaatacgtgacgtagaaagtaataatttcttgggtagtttgcagttttaaaattatgttttaaaatggactatcatatgcttaccgtaacttgaaagtatttcgatttcttggctttatatatcttgtggaaaggac

SEQ ID NO: 5589 - DNA, 236 bp, synthetic construct; identical to SEQ ID NO: 5588
  misc_feature 1..236: note = promoter
  source 1..236: mol_type = other DNA

SEQ ID NO: 5590 - DNA, 236 bp, synthetic construct
  misc_feature 1..236: note = promoter
  source 1..236: mol_type = other DNA
gagggcctatttcccatgattccttcatatttgcatatacgatacaaggctgttagagagataattggaattgactgtaaacacaaagatattagtacaaaatacgtgacgtagaaagtaataatttcttgggtagtttgcagttttaaaattatgttttaaaatggactatcatatgcttaccgtaacttgaaagtatttcgatttcttggctttatatatcttgtggaaaggac

SEQ ID NO: 5591 - DNA, 236 bp, synthetic construct; identical to SEQ ID NO: 5590
  misc_feature 1..236: note = promoter
  source 1..236: mol_type = other DNA

SEQ ID NO: 5592 - DNA, 236 bp, synthetic construct; identical to SEQ ID NO: 5590
  misc_feature 1..236: note = promoter
  source 1..236: mol_type = other DNA

SEQ ID NO: 5593 - DNA, 236 bp, synthetic construct
  misc_feature 1..236: note = promoter
  source 1..236: mol_type = other DNA
gagggcctatttcccatgattccttcatatttgcatatacgatacaaggctgttagagagataattggaattaactgtaaacacaaagatattagtacaaaatacgtgacgtagaaagtaataatttcttgggtagtttgcagttttaaaattatgttttaaaatggactatcatatgcttaccgtaacttgaaagtatttcgatttcttggctttatatatcttgtggaaaggac

SEQ ID NO: 5594 - DNA, 236 bp, synthetic construct; identical to SEQ ID NO: 5593
  misc_feature 1..236: note = promoter
  source 1..236: mol_type = other DNA

SEQ ID NO: 5595 - DNA, 236 bp, synthetic construct
  misc_feature 1..236: note = promoter
  source 1..236: mol_type = other DNA
gagggcctatttcccatgattccttcatatttgcatatacgatacaaggctgttagagagataattggaattaattgtaaacacaaagatattagtacaaaatacgtgacgtagaaagtaataatttcttgggtagtttgcagttttaaaattatgttttaaaatggactatcatatgcttaccgtaacttgaaagtatttcgatttcttggctttatatatcttgtggaaaggac

SEQ ID NO: 5596 - DNA, 236 bp, synthetic construct; identical to SEQ ID NO: 5595
  misc_feature 1..236: note = promoter
  source 1..236: mol_type = other DNA

SEQ ID NO: 5597 - DNA, 236 bp, synthetic construct
  misc_feature 1..236: note = promoter
  source 1..236: mol_type = other DNA
gagggcctatttcccatgattccttcatatttgcatatacgatacaaggctgttagagagataattggaattaattttaaacacaaagatattagtacaaaatacgtgacgtagaaagtaataatttcttgggtagtttgcagttttaaaattatgttttaaaatggactatcatatgcttaccgtaacttgaaagtatttcgatttcttggctttatatatcttgtggaaaggac

SEQ ID NO: 5598 - DNA, 236 bp, synthetic construct
  misc_feature 1..236: note = promoter
  source 1..236: mol_type = other DNA
gagggcctatttcccatgattccttcatatttgcatatacgatacaaggctgttagagagataattggaattaatttgaaacacaaagatattagtacaaaatacgtgacgtagaaagtaataatttcttgggtagtttgcagttttaaaattatgttttaaaatggactatcatatgcttaccgtaacttgaaagtatttcgatttcttggctttatatatcttgtggaaaggac

SEQ ID NO: 5599 - DNA, 236 bp, synthetic construct; identical to SEQ ID NO: 5598
  misc_feature 1..236: note = promoter
  source 1..236: mol_type = other DNA

SEQ ID NO: 5600 - DNA, 236 bp, synthetic construct
  misc_feature 1..236: note = promoter
  source 1..236: mol_type = other DNA
gagggcctatttcccatgattccttcatatttgcatatacgatacaaggctgttagagagataattggaattaatttgacacacaaagatattagtacaaaatacgtgacgtagaaagtaataatttcttgggtagtttgcagttttaaaattatgttttaaaatggactatcatatgcttaccgtaacttgaaagtatttcgatttcttggctttatatatcttgtggaaaggac

SEQ ID NO: 5601 - DNA, 236 bp, synthetic construct
  misc_feature 1..236: note = promoter
  source 1..236: mol_type = other DNA
gagggcctatttcccatgattccttcatatttgcatatacgatacaaggctgttagagagataattggaattaatttgactcacaaagatattagtacaaaatacgtgacgtagaaagtaataatttcttgggtagtttgcagttttaaaattatgttttaaaatggactatcatatgcttaccgtaacttgaaagtatttcgatttcttggctttatatatcttgtggaaaggac

SEQ ID NO: 5602 - DNA, 236 bp, synthetic construct
  misc_feature 1..236: note = promoter
  source 1..236: mol_type = other DNA
gagggcctatttcccatgattccttcatatttgcatatacgatacaaggctgttagagagataattggaattaatttgactgacaaagatattagtacaaaatacgtgacgtagaaagtaataatttcttgggtagtttgcagttttaaaattatgttttaaaatggactatcatatgcttaccgtaacttgaaagtatttcgatttcttggctttatatatcttgtggaaaggac

SEQ ID NO: 5603 - DNA, 236 bp, synthetic construct
  misc_feature 1..236: note = promoter
  source 1..236: mol_type = other DNA
gagggcctatttcccatgattccttcatatttgcatatacgatacaaggctgttagagagataattggaattaatttgactgtcaaagatattagtacaaaatacgtgacgtagaaagtaataatttcttgggtagtttgcagttttaaaattatgttttaaaatggactatcatatgcttaccgtaacttgaaagtatttcgatttcttggctttatatatcttgtggaaaggac

SEQ ID NO: 5604 - DNA, 236 bp, synthetic construct
  misc_feature 1..236: note = promoter
  source 1..236: mol_type = other DNA
gagggcctatttcccatgattccttcatatttgcatatacgatacaaggctgttagagagataattggaattaatttgactgtaaaagatattagtacaaaatacgtgacgtagaaagtaataatttcttgggtagtttgcagttttaaaattatgttttaaaatggactatcatatgcttaccgtaacttgaaagtatttcgatttcttggctttatatatcttgtggaaaggac

SEQ ID NO: 5605 - DNA, 236 bp, synthetic construct; identical to SEQ ID NO: 5604
  misc_feature 1..236: note = promoter
  source 1..236: mol_type = other DNA

SEQ ID NO: 5606 - DNA, 236 bp, synthetic construct; identical to SEQ ID NO: 5604
  misc_feature 1..236: note = promoter
  source 1..236: mol_type = other DNA

SEQ ID NO: 5607 - DNA, 236 bp, synthetic construct
  misc_feature 1..236: note = promoter
  source 1..236: mol_type = other DNA
gagggcctatttcccatgattccttcatatttgcatatacgatacaaggctgttagagagataattggaattaatttgactgtaaacgatattagtacaaaatacgtgacgtagaaagtaataatttcttgggtagtttgcagttttaaaattatgttttaaaatggactatcatatgcttaccgtaacttgaaagtatttcgatttcttggctttatatatcttgtggaaaggac

SEQ ID NO: 5608 - DNA, 236 bp, synthetic construct
  misc_feature 1..236: note = promoter
  source 1..236: mol_type = other DNA
gagggcctatttcccatgattccttcatatttgcatatacgatacaaggctgttagagagataattggaattaatttgactgtaaacaatattagtacaaaatacgtgacgtagaaagtaataatttcttgggtagtttgcagttttaaaattatgttttaaaatggactatcatatgcttaccgtaacttgaaagtatttcgatttcttggctttatatatcttgtggaaaggac

SEQ ID NO: 5609 - DNA, 236 bp, synthetic construct
  misc_feature 1..236: note = promoter
  source 1..236: mol_type = other DNA
gagggcctatttcccatgattccttcatatttgcatatacgatacaaggctgttagagagataattggaattaatttgactgtaaacactattagtacaaaatacgtgacgtagaaagtaataatttcttgggtagtttgcagttttaaaattatgttttaaaatggactatcatatgcttaccgtaacttgaaagtatttcgatttcttggctttatatatcttgtggaaaggac

SEQ ID NO: 5610 - DNA, 236 bp, synthetic construct
  misc_feature 1..236: note = promoter
  source 1..236: mol_type = other DNA
gagggcctatttcccatgattccttcatatttgcatatacgatacaaggctgttagagagataattggaattaatttgactgtaaacacaattagtacaaaatacgtgacgtagaaagtaataatttcttgggtagtttgcagttttaaaattatgttttaaaatggactatcatatgcttaccgtaacttgaaagtatttcgatttcttggctttatatatcttgtggaaaggac

SEQ ID NO: 5611 - DNA, 236 bp, synthetic construct; identical to SEQ ID NO: 5610
  misc_feature 1..236: note = promoter
  source 1..236: mol_type = other DNA

SEQ ID NO: 5612 - DNA, 236 bp, synthetic construct
  misc_feature 1..236: note = promoter
  source 1..236: mol_type = other DNA
gagggcctatttcccatgattccttcatatttgcatatacgatacaaggctgttagagagataattggaattaatttgactgtaaacacaaatagtacaaaatacgtgacgtagaaagtaataatttcttgggtagtttgcagttttaaaattatgttttaaaatggactatcatatgcttaccgtaacttgaaagtatttcgatttcttggctttatatatcttgtggaaaggac

SEQ ID NO: 5613 - DNA, 236 bp, synthetic construct
  misc_feature 1..236: note = promoter
  source 1..236: mol_type = other DNA
gagggcctatttcccatgattccttcatatttgcatatacgatacaaggctgttagagagataattggaattaatttgactgtaaacacaaagagtacaaaatacgtgacgtagaaagtaataatttcttgggtagtttgcagttttaaaattatgttttaaaatggactatcatatgcttaccgtaacttgaaagtatttcgatttcttggctttatatatcttgtggaaaggac

SEQ ID NO: 5614 - DNA, 236 bp, synthetic construct; identical to SEQ ID NO: 5613
  misc_feature 1..236: note = promoter
  source 1..236: mol_type = other DNA

SEQ ID NO: 5615 - DNA, 236 bp, synthetic construct
  misc_feature 1..236: note = promoter
  source 1..236: mol_type = other DNA
gagggcctatttcccatgattccttcatatttgcatatacgatacaaggctgttagagagataattggaattaatttgactgtaaacacaaagattacaaaatacgtgacgtagaaagtaataatttcttgggtagtttgcagttttaaaattatgttttaaaatggactatcatatgcttaccgtaacttgaaagtatttcgatttcttggctttatatatcttgtggaaaggac

SEQ ID NO: 5616 - DNA, 236 bp, synthetic construct
  misc_feature 1..236: note = promoter
  source 1..236: mol_type = other DNA
gagggcctatttcccatgattccttcatatttgcatatacgatacaaggctgttagagagataattggaattaatttgactgtaaacacaaagataacaaaatacgtgacgtagaaagtaataatttcttgggtagtttgcagttttaaaattatgttttaaaatggactatcatatgcttaccgtaacttgaaagtatttcgatttcttggctttatatatcttgtggaaaggac

SEQ ID NO: 5617 - DNA, 236 bp, synthetic construct
  misc_feature 1..236: note = promoter
  source 1..236: mol_type = other DNA
gagggcctatttcccatgattccttcatatttgcatatacgatacaaggctgttagagagataattggaattaatttgactgtaaacacaaagatatcaaaatacgtgacgtagaaagtaataatttcttgggtagtttgcagttttaaaattatgttttaaaatggactatcatatgcttaccgtaacttgaaagtatttcgatttcttggctttatatatcttgtggaaaggac

SEQ ID NO: 5618 - DNA, 236 bp, synthetic construct
  misc_feature 1..236: note = promoter
  source 1..236: mol_type = other DNA
gagggcctatttcccatgattccttcatatttgcatatacgatacaaggctgttagagagataattggaattaatttgactgtaaacacaaagatattaaaatacgtgacgtagaaagtaataatttcttgggtagtttgcagttttaaaattatgttttaaaatggactatcatatgcttaccgtaacttgaaagtatttcgatttcttggctttatatatcttgtggaaaggac

SEQ ID NO: 5619 - DNA, 236 bp, synthetic construct; identical to SEQ ID NO: 5618
  misc_feature 1..236: note = promoter
  source 1..236: mol_type = other DNA

SEQ ID NO: 5620 - DNA, 236 bp, synthetic construct
  misc_feature 1..236: note = promoter
  source 1..236: mol_type = other DNA
gagggcctatttcccatgattccttcatatttgcatatacgatacaaggctgttagagagataattggaattaatttgactgtaaacacaaagatattagaatacgtgacgtagaaagtaataatttcttgggtagtttgcagttttaaaattatgttttaaaatggactatcatatgcttaccgtaacttgaaagtatttcgatttcttggctttatatatcttgtggaaaggac

SEQ ID NO: 5621 - DNA, 236 bp, synthetic construct
  misc_feature 1..236: note = promoter
  source 1..236: mol_type = other DNA
gagggcctatttcccatgattccttcatatttgcatatacgatacaaggctgttagagagataattggaattaatttgactgtaaacacaaagatattagtatacgtgacgtagaaagtaataatttcttgggtagtttgcagttttaaaattatgttttaaaatggactatcatatgcttaccgtaacttgaaagtatttcgatttcttggctttatatatcttgtggaaaggac

SEQ ID NO: 5622 - DNA, 236 bp, synthetic construct; identical to SEQ ID NO: 5621
  misc_feature 1..236: note = promoter
  source 1..236: mol_type = other DNA

SEQ ID NO: 5623 - DNA, 236 bp, synthetic construct
  misc_feature 1..236: note = promoter
  source 1..236: mol_type = other DNA
gagggcctatttcccatgattccttcatatttgcatatacgatacaaggctgttagagagataattggaattaatttgactgtaaacacaaagatattagtacacgtgacgtagaaagtaataatttcttgggtagtttgcagttttaaaattatgttttaaaatggactatcatatgcttaccgtaacttgaaagtatttcgatttcttggctttatatatcttgtggaaaggac

SEQ ID NO: 5624 - DNA, 236 bp, synthetic construct; identical to SEQ ID NO: 5623
  misc_feature 1..236: note = promoter
  source 1..236: mol_type = other DNA

SEQ ID NO: 5625 - DNA, 236 bp, synthetic construct
  misc_feature 1..236: note = promoter
  source 1..236: mol_type = other DNA
gagggcctatttcccatgattccttcatatttgcatatacgatacaaggctgttagagagataattggaattaatttgactgtaaacacaaagatattagtacaagtgacgtagaaagtaataatttcttgggtagtttgcagttttaaaattatgttttaaaatggactatcatatgcttaccgtaacttgaaagtatttcgatttcttggctttatatatcttgtggaaaggac

SEQ ID NO: 5626 - DNA, 236 bp, synthetic construct
  misc_feature 1..236: note = promoter
  source 1..236: mol_type = other DNA
gagggcctatttcccatgattccttcatatttgcatatacgatacaaggctgttagagagataattggaattaatttgactgtaaacacaaagatattagtacaaatgacgtagaaagtaataatttcttgggtagtttgcagttttaaaattatgttttaaaatggactatcatatgcttaccgtaacttgaaagtatttcgatttcttggctttatatatcttgtggaaaggac

SEQ ID NO: 5627 - DNA, 236 bp, synthetic construct
  misc_feature 1..236: note = promoter
  source 1..236: mol_type = other DNA
gagggcctatttcccatgattccttcatatttgcatatacgatacaaggctgttagagagataattggaattaatttgactgtaaacacaaagatattagtacaaaagacgtagaaagtaataatttcttgggtagtttgcagttttaaaattatgttttaaaatggactatcatatgcttaccgtaacttgaaagtatttcgatttcttggctttatatatcttgtggaaaggac

SEQ ID NO: 5628 - DNA, 236 bp, synthetic construct
  misc_feature 1..236: note = promoter
  source 1..236: mol_type = other DNA
gagggcctatttcccatgattccttcatatttgcatatacgatacaaggctgttagagagataattggaattaatttgactgtaaacacaaagatattagtacaaaatacgtagaaagtaataatttcttgggtagtttgcagttttaaaattatgttttaaaatggactatcatatgcttaccgtaacttgaaagtatttcgatttcttggctttatatatcttgtggaaaggac

SEQ ID NO: 5629 - DNA, 236 bp, synthetic construct; identical to SEQ ID NO: 5628
  misc_feature 1..236: note = promoter
  source 1..236: mol_type = other DNA

SEQ ID NO: 5630 - DNA, 236 bp, synthetic construct; identical to SEQ ID NO: 5628
  misc_feature 1..236: note = promoter
  source 1..236: mol_type = other DNA

SEQ ID NO: 5631 - DNA, 236 bp, synthetic construct; identical to SEQ ID NO: 5628
  misc_feature 1..236: note = promoter
  source 1..236: mol_type = other DNA

SEQ ID NO: 5632 - DNA, 236 bp, synthetic construct; identical to SEQ ID NO: 5628
  misc_feature 1..236: note = promoter
  source 1..236: mol_type = other DNA

SEQ ID NO: 5633 - DNA, 236 bp, synthetic construct
  misc_feature 1..236: note = promoter
  source 1..236: mol_type = other DNA
gagggcctatttcccatgattccttcatatttgcatatacgatacaaggctgttagagagataattggaattaatttgactgtaaacacaaagatattagtacaaaatacgtggaaagtaataatttcttgggtagtttgcagttttaaaattatgttttaaaatggactatcatatgcttaccgtaacttgaaagtatttcgatttcttggctttatatatcttgtggaaaggac

SEQ ID NO: 5634 - DNA, 236 bp, synthetic construct
  misc_feature 1..236: note = promoter
  source 1..236: mol_type = other DNA
gagggcctatttcccatgattccttcatatttgcatatacgatacaaggctgttagagagataattggaattaatttgactgtaaacacaaagatattagtacaaaatacgtgaaaagtaataatttcttgggtagtttgcagttttaaaattatgttttaaaatggactatcatatgcttaccgtaacttgaaagtatttcgatttcttggctttatatatcttgtggaaaggac

SEQ ID NO: 5635 - DNA, 236 bp, synthetic construct
  misc_feature 1..236: note = promoter
  source 1..236: mol_type = other DNA
gagggcctatttcccatgattccttcatatttgcatatacgatacaaggctgttagagagataattggaattaatttgactgtaaacacaaagatattagtacaaaatacgtgacaagtaataatttcttgggtagtttgcagttttaaaattatgttttaaaatggactatcatatgcttaccgtaacttgaaagtatttcgatttcttggctttatatatcttgtggaaaggac

SEQ ID NO: 5636 - DNA, 236 bp, synthetic construct
  misc_feature 1..236: note = promoter
  source 1..236: mol_type = other DNA
gagggcctatttcccatgattccttcatatttgcatatacgatacaaggctgttagagagataattggaattaatttgactgtaaacacaaagatattagtacaaaatacgtgacgagtaataatttcttgggtagtttgcagttttaaaattatgttttaaaatggactatcatatgcttaccgtaacttgaaagtatttcgatttcttggctttatatatcttgtggaaaggac

SEQ ID NO: 5637 - DNA, 236 bp, synthetic construct
  misc_feature 1..236: note = promoter
  source 1..236: mol_type = other DNA
gagggcctatttcccatgattccttcatatttgcatatacgatacaaggctgttagagagataattggaattaatttgactgtaaacacaaagatattagtacaaaatacgtgacgtgtaataatttcttgggtagtttgcagttttaaaattatgttttaaaatggactatcatatgcttaccgtaacttgaaagtatttcgatttcttggctttatatatcttgtggaaaggac

SEQ ID NO: 5638 - DNA, 236 bp, synthetic construct
  misc_feature 1..236: note = promoter
  source 1..236: mol_type = other DNA
gagggcctatttcccatgattccttcatatttgcatatacgatacaaggctgttagagagataattggaattaatttgactgtaaacacaaagatattagtacaaaatacgtgacgtataataatttcttgggtagtttgcagttttaaaattatgttttaaaatggactatcatatgcttaccgtaacttgaaagtatttcgatttcttggctttatatatcttgtggaaaggac

SEQ ID NO: 5639 - DNA, 236 bp, synthetic construct
  misc_feature 1..236: note = promoter
  source 1..236: mol_type = other DNA
gagggcctatttcccatgattccttcatatttgcatatacgatacaaggctgttagagagataattggaattaatttgactgtaaacacaaagatattagtacaaaatacgtgacgtagaataatttcttgggtagtttgcagttttaaaattatgttttaaaatggactatcatatgcttaccgtaacttgaaagtatttcgatttcttggctttatatatcttgtggaaaggac

SEQ ID NO: 5640 - DNA, 236 bp, synthetic construct; identical to SEQ ID NO: 5639
  misc_feature 1..236: note = promoter
  source 1..236: mol_type = other DNA

SEQ ID NO: 5641 - DNA, 236 bp, synthetic construct; identical to SEQ ID NO: 5639
  misc_feature 1..236: note = promoter
  source 1..236: mol_type = other DNA

SEQ ID NO: 5642 - DNA, 236 bp, synthetic construct
  misc_feature 1..236: note = promoter
  source 1..236: mol_type = other DNA
gagggcctatttcccatgattccttcatatttgcatatacgatacaaggctgttagagagataattggaattaatttgactgtaaacacaaagatattagtacaaaatacgtgacgtagaaaaatttcttgggtagtttgcagttttaaaattatgttttaaaatggactatcatatgcttaccgtaacttgaaagtatttcgatttcttggctttatatatcttgtggaaaggac

SEQ ID NO: 5643 - DNA, 236 bp, synthetic construct
  misc_feature 1..236: note = promoter
  source 1..236: mol_type = other DNA
gagggcctatttcccatgattccttcatatttgcatatacgatacaaggctgttagagagataattggaattaatttgactgtaaacacaaagatattagtacaaaatacgtgacgtagaaagatttcttgggtagtttgcagttttaaaattatgttttaaaatggactatcatatgcttaccgtaacttgaaagtatttcgatttcttggctttatatatcttgtggaaaggac

SEQ ID NO: 5644 - DNA, 236 bp, synthetic construct
  misc_feature 1..236: note = promoter
  source 1..236: mol_type = other DNA
gagggcctatttcccatgattccttcatatttgcatatacgatacaaggctgttagagagataattggaattaatttgactgtaaacacaaagatattagtacaaaatacgtgacgtagaaagttttcttgggtagtttgcagttttaaaattatgttttaaaatggactatcatatgcttaccgtaacttgaaagtatttcgatttcttggctttatatatcttgtggaaaggac

SEQ ID NO: 5645 - DNA, 236 bp, synthetic construct
  misc_feature 1..236: note = promoter
  source 1..236: mol_type = other DNA
gagggcctatttcccatgattccttcatatttgcatatacgatacaaggctgttagagagataattggaattaatttgactgtaaacacaaagatattagtacaaaatacgtgacgtagaaagtattcttgggtagtttgcagttttaaaattatgttttaaaatggactatcatatgcttaccgtaacttgaaagtatttcgatttcttggctttatatatcttgtggaaaggac

SEQ ID NO: 5646 - DNA, 236 bp, synthetic construct
  misc_feature 1..236: note = promoter
  source 1..236: mol_type = other DNA
gagggcctatttcccatgattccttcatatttgcatatacgatacaaggctgttagagagataattggaattaatttgactgtaaacacaaagatattagtacaaaatacgtgacgtagaaagtaatcttgggtagtttgcagttttaaaattatgttttaaaatggactatcatatgcttaccgtaacttgaaagtatttcgatttcttggctttatatatcttgtggaaaggac

SEQ ID NO: 5647 - DNA, 236 bp, synthetic construct; identical to SEQ ID NO: 5646
  misc_feature 1..236: note = promoter
  source 1..236: mol_type = other DNA

SEQ ID NO: 5648 - DNA, 236 bp, synthetic construct
  misc_feature 1..236: note = promoter
  source 1..236: mol_type = other DNA
gagggcctatttcccatgattccttcatatttgcatatacgatacaaggctgttagagagataattggaattaatttgactgtaaacacaaagatattagtacaaaatacgtgacgtagaaagtaatattgggtagtttgcagttttaaaattatgttttaaaatggactatcatatgcttaccgtaacttgaaagtatttcgatttcttggctttatatatcttgtggaaaggac

SEQ ID NO: 5649 - DNA, 236 bp, synthetic construct
  misc_feature 1..236: note = promoter
  source 1..236: mol_type = other DNA
gagggcctatttcccatgattccttcatatttgcatatacgatacaaggctgttagagagataattggaattaatttgactgtaaacacaaagatattagtacaaaatacgtgacgtagaaagtaataatgggtagtttgcagttttaaaattatgttttaaaatggactatcatatgcttaccgtaacttgaaagtatttcgatttcttggctttatatatcttgtggaaaggac

SEQ ID NO: 5650 - DNA, 236 bp, synthetic construct; identical to SEQ ID NO: 5649
  misc_feature 1..236: note = promoter
  source 1..236: mol_type = other DNA

SEQ ID NO: 5651 - DNA, 236 bp, synthetic construct
  misc_feature 1..236: note = promoter
  source 1..236: mol_type = other DNA
gagggcctatttcccatgattccttcatatttgcatatacgatacaaggctgttagagagataattggaattaatttgactgtaaacacaaagatattagtacaaaatacgtgacgtagaaagtaataattggtagtttgcagttttaaaattatgttttaaaatggactatcatatgcttaccgtaacttgaaagtatttcgatttcttggctttatatatcttgtggaaaggac

SEQ ID NO: 5652 - DNA, 236 bp, synthetic construct
  misc_feature 1..236: note = promoter
  source 1..236: mol_type = other DNA
gagggcctatttcccatgattccttcatatttgcatatacgatacaaggctgttagagagataattggaattaatttgactgtaaacacaaagatattagtacaaaatacgtgacgtagaaagtaataatttgtagtttgcagttttaaaattatgttttaaaatggactatcatatgcttaccgtaacttgaaagtatttcgatttcttggctttatatatcttgtggaaaggac

SEQ ID NO: 5653 - DNA, 236 bp, synthetic construct
  misc_feature 1..236: note = promoter
  source 1..236: mol_type = other DNA
gagggcctatttcccatgattccttcatatttgcatatacgatacaaggctgttagagagataattggaattaatttgactgtaaacacaaagatattagtacaaaatacgtgacgtagaaagtaataatttctagtttgcagttttaaaattatgttttaaaatggactatcatatgcttaccgtaacttgaaagtatttcgatttcttggctttatatatcttgtggaaaggac

SEQ ID NO: 5654 - DNA, 236 bp, synthetic construct; identical to SEQ ID NO: 5653
  misc_feature 1..236: note = promoter
  source 1..236: mol_type = other DNA

SEQ ID NO: 5655 - DNA, 236 bp, synthetic construct
  misc_feature 1..236: note = promoter
  source 1..236: mol_type = other DNA
gagggcctatttcccatgattccttcatatttgcatatacgatacaaggctgttagagagataattggaattaatttgactgtaaacacaaagatattagtacaaaatacgtgacgtagaaagtaataatttcttgtttgcagttttaaaattatgttttaaaatggactatcatatgcttaccgtaacttgaaagtatttcgatttcttggctttatatatcttgtggaaaggac

SEQ ID NO: 5656 - DNA, 236 bp, synthetic construct; identical to SEQ ID NO: 5655
  misc_feature 1..236: note = promoter
  source 1..236: mol_type = other DNA

SEQ ID NO: 5657 - DNA, 236 bp, synthetic construct
  misc_feature 1..236: note = promoter
  source 1..236: mol_type = other DNA
gagggcctatttcccatgattccttcatatttgcatatacgatacaaggctgttagagagataattggaattaatttgactgtaaacacaaagatattagtacaaaatacgtgacgtagaaagtaataatttcttggttgcagttttaaaattatgttttaaaatggactatcatatgcttaccgtaacttgaaagtatttcgatttcttggctttatatatcttgtggaaaggac

SEQ ID NO: 5658 - DNA, 236 bp, synthetic construct
  misc_feature 1..236: note = promoter
  source 1..236: mol_type = other DNA
gagggcctatttcccatgattccttcatatttgcatatacgatacaaggctgttagagagataattggaattaatttgactgtaaacacaaagatattagtacaaaatacgtgacgtagaaagtaataatttcttgggtgcagttttaaaattatgttttaaaatggactatcatatgcttaccgtaacttgaaagtatttcgatttcttggctttatatatcttgtggaaaggac

SEQ ID NO: 5659 - DNA, 236 bp, synthetic construct; identical to SEQ ID NO: 5658
  misc_feature 1..236: note = promoter
  source 1..236: mol_type = other DNA

SEQ ID NO: 5660 - DNA, 236 bp, synthetic construct
  misc_feature 1..236: note = promoter
  source 1..236: mol_type = other DNA
gagggcctatttcccatgattccttcatatttgcatatacgatacaaggctgttagagagataattggaattaatttgactgtaaacacaaagatattagtacaaaatacgtgacgtagaaagtaataatttcttgggtacagttttaaaattatgttttaaaatggactatcatatgcttaccgtaacttgaaagtatttcgatttcttggctttatatatcttgtggaaaggac

SEQ ID NO: 5661 - DNA, 236 bp, synthetic construct
  misc_feature 1..236: note = promoter
  source 1..236: mol_type = other DNA
gagggcctatttcccatgattccttcatatttgcatatacgatacaaggctgttagagagataattggaattaatttgactgtaaacacaaagatattagtacaaaatacgtgacgtagaaagtaataatttcttgggtagagttttaaaattatgttttaaaatggactatcatatgcttaccgtaacttgaaagtatttcgatttcttggctttatatatcttgtggaaaggac

SEQ ID NO: 5662 - DNA, 236 bp, synthetic construct
  misc_feature 1..236: note = promoter
  source 1..236: mol_type = other DNA
gagggcctatttcccatgattccttcatatttgcatatacgatacaaggctgttagagagataattggaattaatttgactgtaaacacaaagatattagtacaaaatacgtgacgtagaaagtaataatttcttgggtagtgttttaaaattatgttttaaaatggactatcatatgcttaccgtaacttgaaagtatttcgatttcttggctttatatatcttgtggaaaggac

SEQ ID NO: 5663 - DNA, 236 bp, synthetic construct
  misc_feature 1..236: note = promoter
  source 1..236: mol_type = other DNA
gagggcctatttcccatgattccttcatatttgcatatacgatacaaggctgttagagagataattggaattaatttgactgtaaacacaaagatattagtacaaaatacgtgacgtagaaagtaataatttcttgggtagttttttaaaattatgttttaaaatggactatcatatgcttaccgtaacttgaaagtatttcgatttcttggctttatatatcttgtggaaaggac

SEQ ID NO: 5664 - DNA, 236 bp, synthetic construct; identical to SEQ ID NO: 5663
  misc_feature 1..236: note = promoter
  source 1..236: mol_type = other DNA

SEQ ID NO: 5665 - DNA, 236 bp, synthetic construct
  misc_feature 1..236: note = promoter
  source 1..236: mol_type = other DNA
gagggcctatttcccatgattccttcatatttgcatatacgatacaaggctgttagagagataattggaattaatttgactgtaaacacaaagatattagtacaaaatacgtgacgtagaaagtaataatttcttgggtagtttgttaaaattatgttttaaaatggactatcatatgcttaccgtaacttgaaagtatttcgatttcttggctttatatatcttgtggaaaggac

SEQ ID NO: 5666 - DNA, 236 bp, synthetic construct
  misc_feature 1..236: note = promoter
  source 1..236: mol_type = other DNA
gagggcctatttcccatgattccttcatatttgcatatacgatacaaggctgttagagagataattggaattaatttgactgtaaacacaaagatattagtacaaaatacgtgacgtagaaagtaataatttcttgggtagtttgctaaaattatgttttaaaatggactatcatatgcttaccgtaacttgaaagtatttcgatttcttggctttatatatcttgtggaaaggac

SEQ ID NO: 5667 - DNA, 236 bp, synthetic construct
  misc_feature 1..236: note = promoter
  source 1..236: mol_type = other DNA
gagggcctatttcccatgattccttcatatttgcatatacgatacaaggctgttagagagataattggaattaatttgactgtaaacacaaagatattagtacaaaatacgtgacgtagaaagtaataatttcttgggtagtttgcaaaaattatgttttaaaatggactatcatatgcttaccgtaacttgaaagtatttcgatttcttggctttatatatcttgtggaaaggac

SEQ ID NO: 5668 - DNA, 236 bp, synthetic construct
  misc_feature 1..236: note = promoter
  source 1..236: mol_type = other DNA
gagggcctatttcccatgattccttcatatttgcatatacgatacaaggctgttagagagataattggaattaatttgactgtaaacacaaagatattagtacaaaatacgtgacgtagaaagtaataatttcttgggtagtttgcagaaattatgttttaaaatggactatcatatgcttaccgtaacttgaaagtatttcgatttcttggctttatatatcttgtggaaaggac

SEQ ID NO: 5669 - DNA, 236 bp, synthetic construct
  misc_feature 1..236: note = promoter
  source 1..236: mol_type = other DNA
gagggcctatttcccatgattccttcatatttgcatatacgatacaaggctgttagagagataattggaattaatttgactgtaaacacaaagatattagtacaaaatacgtgacgtagaaagtaataatttcttgggtagtttgcagtaattatgttttaaaatggactatcatatgcttaccgtaacttgaaagtatttcgatttcttggctttatatatcttgtggaaaggac

SEQ ID NO: 5670 - DNA, 236 bp, synthetic construct
  misc_feature 1..236: note = promoter
  source 1..236: mol_type = other DNA
gagggcctatttcccatgattccttcatatttgcatatacgatacaaggctgttagagagataattggaattaatttgactgtaaacacaaagatattagtacaaaatacgtgacgtagaaagtaataatttcttgggtagtttgcagttattatgttttaaaatggactatcatatgcttaccgtaacttgaaagtatttcgatttcttggctttatatatcttgtggaaaggac

SEQ ID NO: 5671 - DNA, 236 bp, synthetic construct
  misc_feature 1..236: note = promoter
  source 1..236: mol_type = other DNA
gagggcctatttcccatgattccttcatatttgcatatacgatacaaggctgttagagagataattggaattaatttgactgtaaacacaaagatattagtacaaaatacgtgacgtagaaagtaataatttcttgggtagtttgcagtttttatgttttaaaatggactatcatatgcttaccgtaacttgaaagtatttcgatttcttggctttatatatcttgtggaaaggac

SEQ ID NO: 5672 - DNA, 236 bp, synthetic construct; identical to SEQ ID NO: 5671
  misc_feature 1..236: note = promoter
  source 1..236: mol_type = other DNA

SEQ ID NO: 5673 - DNA, 236 bp, synthetic construct
  misc_feature 1..236: note = promoter
  source 1..236: mol_type = other DNA
gagggcctatttcccatgattccttcatatttgcatatacgatacaaggctgttagagagataattggaattaatttgactgtaaacacaaagatattagtacaaaatacgtgacgtagaaagtaataatttcttgggtagtttgcagttttaatgttttaaaatggactatcatatgcttaccgtaacttgaaagtatttcgatttcttggctttatatatcttgtggaaaggac

SEQ ID NO: 5674 - DNA, 236 bp, synthetic construct; identical to SEQ ID NO: 5673
  misc_feature 1..236: note = promoter
  source 1..236: mol_type = other DNA

SEQ ID NO: 5675 - DNA, 236 bp, synthetic construct
  misc_feature 1..236: note = promoter
  source 1..236: mol_type = other DNA
gagggcctatttcccatgattccttcatatttgcatatacgatacaaggctgttagagagataattggaattaatttgactgtaaacacaaagatattagtacaaaatacgtgacgtagaaagtaataatttcttgggtagtttgcagttttaaagttttaaaatggactatcatatgcttaccgtaacttgaaagtatttcgatttcttggctttatatatcttgtggaaaggac

SEQ ID NO: 5676 - DNA, 236 bp, synthetic construct
  misc_feature 1..236: note = promoter
  source 1..236: mol_type = other DNA
gagggcctatttcccatgattccttcatatttgcatatacgatacaaggctgttagagagataattggaattaatttgactgtaaacacaaagatattagtacaaaatacgtgacgtagaaagtaataatttcttgggtagtttgcagttttaaaattttaaaatggactatcatatgcttaccgtaacttgaaagtatttcgatttcttggctttatatatcttgtggaaaggac

SEQ ID NO: 5677 - DNA, 236 bp, synthetic construct; identical to SEQ ID NO: 5676
  misc_feature 1..236: note = promoter
  source 1..236: mol_type = other DNA

SEQ ID NO: 5678 - DNA, 236 bp, synthetic construct; identical to SEQ ID NO: 5676
  misc_feature 1..236: note = promoter
  source 1..236: mol_type = other DNA

SEQ ID NO: 5679 - DNA, 236 bp, synthetic construct
  misc_feature 1..236: note = promoter
  source 1..236: mol_type = other DNA
gagggcctatttcccatgattccttcatatttgcatatacgatacaaggctgttagagagataattggaattaatttgactgtaaacacaaagatattagtacaaaatacgtgacgtagaaagtaataatttcttgggtagtttgcagttttaaaattataaaatggactatcatatgcttaccgtaacttgaaagtatttcgatttcttggctttatatatcttgtggaaaggac

SEQ ID NO: 5680 - DNA, 236 bp, synthetic construct; identical to SEQ ID NO: 5679
  misc_feature 1..236: note = promoter
  source 1..236: mol_type = other DNA

SEQ ID NO: 5681 - DNA, 236 bp, synthetic construct
  misc_feature 1..236: note = promoter
  source 1..236: mol_type = other DNA
gagggcctatttcccatgattccttcatatttgcatatacgatacaaggctgttagagagataattggaattaatttgactgtaaacacaaagatattagtacaaaatacgtgacgtagaaagtaataatttcttgggtagtttgcagttttaaaattatgaaatggactatcatatgcttaccgtaacttgaaagtatttcgatttcttggctttatatatcttgtggaaaggac

SEQ ID NO: 5682 - DNA, 236 bp, synthetic construct
  misc_feature 1..236: note = promoter
  source 1..236: mol_type = other DNA
gagggcctatttcccatgattccttcatatttgcatatacgatacaaggctgttagagagataattggaattaatttgactgtaaacacaaagatattagtacaaaatacgtgacgtagaaagtaataatttcttgggtagtttgcagttttaaaattatgtaatggactatcatatgcttaccgtaacttgaaagtatttcgatttcttggctttatatatcttgtggaaaggac

SEQ ID NO: 5683 - DNA, 236 bp, synthetic construct
  misc_feature 1..236: note = promoter
  source 1..236: mol_type = other DNA
gagggcctatttcccatgattccttcatatttgcatatacgatacaaggctgttagagagataattggaattaatttgactgtaaacacaaagatattagtacaaaatacgtgacgtagaaagtaataatttcttgggtagtttgcagttttaaaattatgttatggactatcatatgcttaccgtaacttgaaagtatttcgatttcttggctttatatatcttgtggaaaggac

SEQ ID NO: 5684 - DNA, 236 bp, synthetic construct
  misc_feature 1..236: note = promoter
  source 1..236: mol_type = other DNA
gagggcctatttcccatgattccttcatatttgcatatacgatacaaggctgttagagagataattggaattaatttgactgtaaacacaaagatattagtacaaaatacgtgacgtagaaagtaataatttcttgggtagtttgcagttttaaaattatgttttggactatcatatgcttaccgtaacttgaaagtatttcgatttcttggctttatatatcttgtggaaaggac

SEQ ID NO: 5685 - DNA, 236 bp, synthetic construct; identical to SEQ ID NO: 5684
  misc_feature 1..236: note = promoter
  source 1..236: mol_type = other DNA

SEQ ID NO: 5686 - DNA, 236 bp, synthetic construct
  misc_feature 1..236: note = promoter
  source 1..236: mol_type = other DNA
gagggcctatttcccatgattccttcatatttgcatatacgatacaaggctgttagagagataattggaattaatttgactgtaaacacaaagatattagtacaaaatacgtgacgtagaaagtaataatttcttgggtagtttgcagttttaaaattatgttttagactatcatatgcttaccgtaacttgaaagtatttcgatttcttggctttatatatcttgtggaaaggac

SEQ ID NO: 5687 - DNA, 236 bp, synthetic construct
  misc_feature 1..236: note = promoter
  source 1..236: mol_type = other DNA
gagggcctatttcccatgattccttcatatttgcatatacgatacaaggctgttagagagataattggaattaatttgactgtaaacacaaagatattagtacaaaatacgtgacgtagaaagtaataatttcttgggtagtttgcagttttaaaattatgttttaaactatcatatgcttaccgtaacttgaaagtatttcgatttcttggctttatatatcttgtggaaaggac

SEQ ID NO: 5688 - DNA, 236 bp, synthetic construct; identical to SEQ ID NO: 5687
  misc_feature 1..236: note = promoter
  source 1..236: mol_type = other DNA

SEQ ID NO: 5689 - DNA, 236 bp, synthetic construct
  misc_feature 1..236: note = promoter
  source 1..236: mol_type = other DNA
gagggcctatttcccatgattccttcatatttgcatatacgatacaaggctgttagagagataattggaattaatttgactgtaaacacaaagatattagtacaaaatacgtgacgtagaaagtaataatttcttgggtagtttgcagttttaaaattatgttttaaaatatcatatgcttaccgtaacttgaaagtatttcgatttcttggctttatatatcttgtggaaaggac

SEQ ID NO: 5690 - DNA, 236 bp, synthetic construct; identical to SEQ ID NO: 5689
  misc_feature 1..236: note = promoter
  source 1..236: mol_type = other DNA

SEQ ID NO: 5691 - DNA, 236 bp, synthetic construct
  misc_feature 1..236: note = promoter
  source 1..236: mol_type = other DNA
gagggcctatttcccatgattccttcatatttgcatatacgatacaaggctgttagagagataattggaattaatttgactgtaaacacaaagatattagtacaaaatacgtgacgtagaaagtaataatttcttgggtagtttgcagttttaaaattatgttttaaaatgtcatatgcttaccgtaacttgaaagtatttcgatttcttggctttatatatcttgtggaaaggac

SEQ ID NO: 5692 - DNA, 236 bp, synthetic construct
  misc_feature 1..236: note = promoter
  source 1..236: mol_type = other DNA
gagggcctatttcccatgattccttcatatttgcatatacgatacaaggctgttagagagataattggaattaatttgactgtaaacacaaagatattagtacaaaatacgtgacgtagaaagtaataatttcttgggtagtttgcagttttaaaattatgttttaaaatggcatatgcttaccgtaacttgaaagtatttcgatttcttggctttatatatcttgtggaaaggac

SEQ ID NO: 5693 - DNA, 236 bp, synthetic construct
  misc_feature 1..236: note = promoter
  source 1..236: mol_type = other DNA
gagggcctatttcccatgattccttcatatttgcatatacgatacaaggctgttagagagataattggaattaatttgactgtaaacacaaagatattagtacaaaatacgtgacgtagaaagtaataatttcttgggtagtttgcagttttaaaattatgttttaaaatggaatatgcttaccgtaacttgaaagtatttcgatttcttggctttatatatcttgtggaaaggac

SEQ ID NO: 5694 - DNA, 236 bp, synthetic construct
  misc_feature 1..236: note = promoter
  source 1..236: mol_type = other DNA
gagggcctatttcccatgattccttcatatttgcatatacgatacaaggctgttagagagataattggaattaatttgactgtaaacacaaagatattagtacaaaatacgtgacgtagaaagtaataatttcttgggtagtttgcagttttaaaattatgttttaaaatggactatgcttaccgtaacttgaaagtatttcgatttcttggctttatatatcttgtggaaaggac

SEQ ID NO: 5695 - DNA, 236 bp, synthetic construct; identical to SEQ ID NO: 5694
  misc_feature 1..236: note = promoter
  source 1..236: mol_type = other DNA

SEQ ID NO: 5696 - DNA, 236 bp, synthetic construct; identical to SEQ ID NO: 5694
  misc_feature 1..236: note = promoter
  source 1..236: mol_type = other DNA

SEQ ID NO: 5697 - DNA, 236 bp, synthetic construct; identical to SEQ ID NO: 5694
  misc_feature 1..236: note = promoter
  source 1..236: mol_type = other DNA

SEQ ID NO: 5698 - DNA, 236 bp, synthetic construct
  misc_feature 1..236: note = promoter
  source 1..236: mol_type = other DNA
gagggcctatttcccatgattccttcatatttgcatatacgatacaaggctgttagagagataattggaattaatttgactgtaaacacaaagatattagtacaaaatacgtgacgtagaaagtaataatttcttgggtagtttgcagttttaaaattatgttttaaaatggactatccttaccgtaacttgaaagtatttcgatttcttggctttatatatcttgtggaaaggac

SEQ ID NO: 5699 - DNA, 236 bp, synthetic construct
  misc_feature 1..236: note = promoter
  source 1..236: mol_type = other DNA
gagggcctatttcccatgattccttcatatttgcatatacgatacaaggctgttagagagataattggaattaatttgactgtaaacacaaagatattagtacaaaatacgtgacgtagaaagtaataatttcttgggtagtttgcagttttaaaattatgttttaaaatggactatcattaccgtaacttgaaagtatttcgatttcttggctttatatatcttgtggaaaggac

SEQ ID NO: 5700 - DNA, 236 bp, synthetic construct; identical to SEQ ID NO: 5699
  misc_feature 1..236: note = promoter
  source 1..236: mol_type = other DNA

SEQ ID NO: 5701 - DNA, 236 bp, synthetic construct
  misc_feature 1..236: note = promoter
  source 1..236: mol_type = other DNA
gagggcctatttcccatgattccttcatatttgcatatacgatacaaggctgttagagagataattggaattaatttgactgtaaacacaaagatattagtacaaaatacgtgacgtagaaagtaataatttcttgggtagtttgcagttttaaaattatgttttaaaatggactatcataaccgtaacttgaaagtatttcgatttcttggctttatatatcttgtggaaaggac

SEQ ID NO: 5702 - DNA, 236 bp, synthetic construct
  misc_feature 1..236: note = promoter
  source 1..236: mol_type = other DNA
gagggcctatttcccatgattccttcatatttgcatatacgatacaaggctgttagagagataattggaattaatttgactgtaaacacaaagatattagtacaaaatacgtgacgtagaaagtaataatttcttgggtagtttgcagttttaaaattatgttttaaaatggactatcatatccgtaacttgaaagtatttcgatttcttggctttatatatcttgtggaaaggac

SEQ ID NO: 5703 - DNA, 236 bp, synthetic construct
  misc_feature 1..236: note = promoter
  source 1..236: mol_type = other DNA
gagggcctatttcccatgattccttcatatttgcatatacgatacaaggctgttagagagataattggaattaatttgactgtaaacacaaagatattagtacaaaatacgtgacgtagaaagtaataatttcttgggtagtttgcagttttaaaattatgttttaaaatggactatcatatgcgtaacttgaaagtatttcgatttcttggctttatatatcttgtggaaaggac

SEQ ID NO: 5704 - DNA, 236 bp, synthetic construct; identical to SEQ ID NO: 5703
  misc_feature 1..236: note = promoter
  source 1..236: mol_type = other DNA

SEQ ID NO: 5705 - DNA, 236 bp, synthetic construct
  misc_feature 1..236: note = promoter
  source 1..236: mol_type = other DNA
gagggcctatttcccatgattccttcatatttgcatatacgatacaaggctgttagagagataattggaattaatttgactgtaaacacaaagatattagtacaaaatacgtgacgtagaaagtaataatttcttgggtagtttgcagttttaaaattatgttttaaaatggactatcatatgcttaacttgaaagtatttcgatttcttggctttatatatcttgtggaaaggac

SEQ ID NO: 5706 - DNA, 236 bp, synthetic construct; identical to SEQ ID NO: 5705
  misc_feature 1..236: note = promoter
  source 1..236: mol_type = other DNA

SEQ ID NO: 5707 - DNA, 236 bp, synthetic construct; identical to SEQ ID NO: 5705
  misc_feature 1..236: note = promoter
  source 1..236: mol_type = other DNA

SEQ ID NO: 5708 - DNA, 236 bp, synthetic construct
  misc_feature 1..236: note = promoter
  source 1..236: mol_type = other DNA
gagggcctatttcccatgattccttcatatttgcatatacgatacaaggctgttagagagataattggaattaatttgactgtaaacacaaagatattagtacaaaatacgtgacgtagaaagtaataatttcttgggtagtttgcagttttaaaattatgttttaaaatggactatcatatgcttaccttgaaagtatttcgatttcttggctttatatatcttgtggaaaggac

SEQ ID NO: 5709 - DNA, 236 bp, synthetic construct; identical to SEQ ID NO: 5708
  misc_feature 1..236: note = promoter
  source 1..236: mol_type = other DNA

SEQ ID NO: 5710 - DNA, 236 bp, synthetic construct
  misc_feature 1..236: note = promoter
  source 1..236: mol_type = other DNA
gagggcctatttcccatgattccttcatatttgcatatacgatacaaggctgttagagagataattggaattaatttgactgtaaacacaaagatattagtacaaaatacgtgacgtagaaagtaataatttcttgggtagtttgcagttttaaaattatgttttaaaatggactatcatatgcttaccgtgaaagtatttcgatttcttggctttatatatcttgtggaaaggac

SEQ ID NO: 5711 - DNA, 236 bp, synthetic construct; identical to SEQ ID NO: 5710
  misc_feature 1..236: note = promoter
  source 1..236: mol_type = other DNA

SEQ ID NO: 5712 - DNA, 236 bp, synthetic construct
  misc_feature 1..236: note = promoter
  source 1..236: mol_type = other DNA
gagggcctatttcccatgattccttcatatttgcatatacgatacaaggctgttagagagataattggaattaatttgactgtaaacacaaagatattagtacaaaatacgtgacgtagaaagtaataatttcttgggtagtttgcagttttaaaattatgttttaaaatggactatcatatgcttaccgtaaaagtatttcgatttcttggctttatatatcttgtggaaaggac

SEQ ID NO: 5713 - DNA, 236 bp, synthetic construct; identical to SEQ ID NO: 5712
  misc_feature 1..236: note = promoter
  source 1..236: mol_type = other DNA

SEQ ID NO: 5714 - DNA, 236 bp, synthetic construct
  misc_feature 1..236: note = promoter
  source 1..236: mol_type = other DNA
gagggcctatttcccatgattccttcatatttgcatatacgatacaaggctgttagagagataattggaattaatttgactgtaaacacaaagatattagtacaaaatacgtgacgtagaaagtaataatttcttgggtagtttgcagttttaaaattatgttttaaaatggactatcatatgcttaccgtaacagtatttcgatttcttggctttatatatcttgtggaaaggac

SEQ ID NO: 5715 - DNA, 236 bp, synthetic construct
  misc_feature 1..236: note = promoter
  source 1..236: mol_type = other DNA
gagggcctatttcccatgattccttcatatttgcatatacgatacaaggctgttagagagataattggaattaatttgactgtaaacacaaagatattagtacaaaatacgtgacgtagaaagtaataatttcttgggtagtttgcagttttaaaattatgttttaaaatggactatcatatgcttaccgtaactgtatttcgatttcttggctttatatatcttgtggaaaggac

SEQ ID NO: 5716 - DNA, 236 bp, synthetic construct
  misc_feature 1..236: note = promoter
  source 1..236: mol_type = other DNA
gagggcctatttcccatgattccttcatatttgcatatacgatacaaggctgttagagagataattggaattaatttgactgtaaacacaaagatattagtacaaaatacgtgacgtagaaagtaataatttcttgggtagtttgcagttttaaaattatgttttaaaatggactatcatatgcttaccgtaactttatttcgatttcttggctttatatatcttgtggaaaggac

SEQ ID NO: 5717 - DNA, 236 bp, synthetic construct
  misc_feature 1..236: note = promoter
  source 1..236: mol_type = other DNA
gagggcctatttcccatgattccttcatatttgcatatacgatacaaggctgttagagagataattggaattaatttgactgtaaacacaaagatattagtacaaaatacgtgacgtagaaagtaataatttcttgggtagtttgcagttttaaaattatgttttaaaatggactatcatatgcttaccgtaacttgatttcgatttcttggctttatatatcttgtggaaaggac

SEQ ID NO: 5718 - DNA, 236 bp, synthetic construct; identical to SEQ ID NO: 5717
  misc_feature 1..236: note = promoter
  source 1..236: mol_type = other DNA

SEQ ID NO: 5719 - DNA, 236 bp, synthetic construct
  misc_feature 1..236: note = promoter
  source 1..236: mol_type = other DNA
gagggcctatttcccatgattccttcatatttgcatatacgatacaaggctgttagagagataattggaattaatttgactgtaaacacaaagatattagtacaaaatacgtgacgtagaaagtaataatttcttgggtagtttgcagttttaaaattatgttttaaaatggactatcatatgcttaccgtaacttgaattcgatttcttggctttatatatcttgtggaaaggac

SEQ ID NO: 5720 - DNA, 236 bp, synthetic construct
  misc_feature 1..236: note = promoter
  source 1..236: mol_type = other DNA
gagggcctatttcccatgattccttcatatttgcatatacgatacaaggctgttagagagataattggaattaatttgactgtaaacacaaagatattagtacaaaatacgtgacgtagaaagtaataatttcttgggtagtttgcagttttaaaattatgttttaaaatggactatcatatgcttaccgtaacttgaaatcgatttcttggctttatatatcttgtggaaaggac

SEQ ID NO: 5721 - DNA, 236 bp, synthetic construct
  misc_feature 1..236: note = promoter
  source 1..236: mol_type = other DNA
gagggcctatttcccatgattccttcatatttgcatatacgatacaaggctgttagagagataattggaattaatttgactgtaaacacaaagatattagtacaaaatacgtgacgtagaaagtaataatttcttgggtagtttgcagttttaaaattatgttttaaaatggactatcatatgcttaccgtaacttgaaagcgatttcttggctttatatatcttgtggaaaggac

SEQ ID NO: 5722 - DNA, 236 bp, synthetic construct
  misc_feature 1..236: note = promoter
  source 1..236: mol_type = other DNA
gagggcctatttcccatgattccttcatatttgcatatacgatacaaggctgttagagagataattggaattaatttgactgtaaacacaaagatattagtacaaaatacgtgacgtagaaagtaataatttcttgggtagtttgcagttttaaaattatgttttaaaatggactatcatatgcttaccgtaacttgaaagtgatttcttggctttatatatcttgtggaaaggac

SEQ ID NO: 5723 - DNA, 236 bp, synthetic construct
  misc_feature 1..236: note = promoter
  source 1..236: mol_type = other DNA
gagggcctatttcccatgattccttcatatttgcatatacgatacaaggctgttagagagataattggaattaatttgactgtaaacacaaagatattagtacaaaatacgtgacgtagaaagtaataatttcttgggtagtttgcagttttaaaattatgttttaaaatggactatcatatgcttaccgtaacttgaaagtaatttcttggctttatatatcttgtggaaaggac

SEQ ID NO: 5724 - DNA, 236 bp, synthetic construct
  misc_feature 1..236: note = promoter
  source 1..236: mol_type = other DNA
gagggcctatttcccatgattccttcatatttgcatatacgatacaaggctgttagagagataattggaattaatttgactgtaaacacaaagatattagtacaaaatacgtgacgtagaaagtaataatttcttgggtagtttgcagttttaaaattatgttttaaaatggactatcatatgcttaccgtaacttgaaagtattttcttggctttatatatcttgtggaaaggac

SEQ ID NO: 5725 - DNA, 236 bp, synthetic construct; identical to SEQ ID NO: 5724
  misc_feature 1..236: note = promoter
  source 1..236: mol_type = other DNA

SEQ ID NO: 5726 - DNA, 236 bp, synthetic construct; identical to SEQ ID NO: 5724
  misc_feature 1..236: note = promoter
  source 1..236: mol_type = other DNA

SEQ ID NO: 5727 - DNA, 236 bp, synthetic construct
  misc_feature 1..236: note = promoter
  source 1..236: mol_type = other DNA
gagggcctatttcccatgattccttcatatttgcatatacgatacaaggctgttagagagataattggaattaatttgactgtaaacacaaagatattagtacaaaatacgtgacgtagaaagtaataatttcttgggtagtttgcagttttaaaattatgttttaaaatggactatcatatgcttaccgtaacttgaaagtatttccttggctttatatatcttgtggaaaggac

SEQ ID NO: 5728 - DNA, 236 bp, synthetic construct
  misc_feature 1..236: note = promoter
  source 1..236: mol_type = other DNA
gagggcctatttcccatgattccttcatatttgcatatacgatacaaggctgttagagagataattggaattaatttgactgtaaacacaaagatattagtacaaaatacgtgacgtagaaagtaataatttcttgggtagtttgcagttttaaaattatgttttaaaatggactatcatatgcttaccgtaacttgaaagtatttcgttggctttatatatcttgtggaaaggac

SEQ ID NO: 5729 - DNA, 236 bp, synthetic construct
  misc_feature 1..236: note = promoter
  source 1..236: mol_type = other DNA
gagggcctatttcccatgattccttcatatttgcatatacgatacaaggctgttagagagataattggaattaatttgactgtaaacacaaagatattagtacaaaatacgtgacgtagaaagtaataatttcttgggtagtttgcagttttaaaattatgttttaaaatggactatcatatgcttaccgtaacttgaaagtatttcgatggctttatatatcttgtggaaaggac

SEQ ID NO: 5730 - DNA, 236 bp, synthetic construct; identical to SEQ ID NO: 5729
  misc_feature 1..236: note = promoter
  source 1..236: mol_type = other DNA

SEQ ID NO: 5731 - DNA, 236 bp, synthetic construct
  misc_feature 1..236: note = promoter
  source 1..236: mol_type = other DNA
gagggcctatttcccatgattccttcatatttgcatatacgatacaaggctgttagagagataattggaattaatttgactgtaaacacaaagatattagtacaaaatacgtgacgtagaaagtaataatttcttgggtagtttgcagttttaaaattatgttttaaaatggactatcatatgcttaccgtaacttgaaagtatttcgattgctttatatatcttgtggaaaggac

SEQ ID NO: 5732 - DNA, 236 bp, synthetic construct
  misc_feature 1..236: note = promoter
  source 1..236: mol_type = other DNA
gagggcctatttcccatgattccttcatatttgcatatacgatacaaggctgttagagagataattggaattaatttgactgtaaacacaaagatattagtacaaaatacgtgacgtagaaagtaataatttcttgggtagtttgcagttttaaaattatgttttaaaatggactatcatatgcttaccgtaacttgaaagtatttcgatttctttatatatcttgtggaaaggac

SEQ ID NO: 5733 - DNA, 236 bp, synthetic construct; identical to SEQ ID NO: 5732
  misc_feature 1..236: note = promoter
  source 1..236: mol_type = other DNA

SEQ ID NO: 5734 - DNA, 236 bp, synthetic construct; identical to SEQ ID NO: 5732
  misc_feature 1..236: note = promoter
  source 1..236: mol_type = other DNA

SEQ ID NO: 5735 - DNA, 236 bp, synthetic construct; identical to SEQ ID NO: 5732
  misc_feature 1..236: note = promoter
  source 1..236: mol_type = other DNA

SEQ ID NO: 5736 - DNA, 236 bp, synthetic construct
  misc_feature 1..236: note = promoter
  source 1..236: mol_type = other DNA
gagggcctatttcccatgattccttcatatttgcatatacgatacaaggctgttagagagataattggaattaatttgactgtaaacacaaagatattagtacaaaatacgtgacgtagaaagtaataatttcttgggtagtttgcagttttaaaattatgttttaaaatggactatcatatgcttaccgtaacttgaaagtatttcgatttcttgatatatcttgtggaaaggac

SEQ ID NO: 5737 - DNA, 236 bp, synthetic construct
  misc_feature 1..236: note = promoter
  source 1..236: mol_type = other DNA
gagggcctatttcccatgattccttcatatttgcatatacgatacaaggctgttagagagataattggaattaatttgactgtaaacacaaagatattagtacaaaatacgtgacgtagaaagtaataatttcttgggtagtttgcagttttaaaattatgttttaaaatggactatcatatgcttaccgtaacttgaaagtatttcgatttcttggtatatcttgtggaaaggac

SEQ ID NO: 5738 - DNA, 236 bp, synthetic construct
  misc_feature 1..236: note = promoter
  source 1..236: mol_type = other DNA
gagggcctatttcccatgattccttcatatttgcatatacgatacaaggctgttagagagataattggaattaatttgactgtaaacacaaagatattagtacaaaatacgtgacgtagaaagtaataatttcttgggtagtttgcagttttaaaattatgttttaaaatggactatcatatgcttaccgtaacttgaaagtatttcgatttcttggcatatcttgtggaaaggac

SEQ ID NO: 5739 - DNA, 236 bp, synthetic construct
  misc_feature 1..236: note = promoter
  source 1..236: mol_type = other DNA
gagggcctatttcccatgattccttcatatttgcatatacgatacaaggctgttagagagataattggaattaatttgactgtaaacacaaagatattagtacaaaatacgtgacgtagaaagtaataatttcttgggtagtttgcagttttaaaattatgttttaaaatggactatcatatgcttaccgtaacttgaaagtatttcgatttcttggcttatcttgtggaaaggac

SEQ ID NO: 5740 - DNA, 236 bp, synthetic construct; identical to SEQ ID NO: 5739
  misc_feature 1..236: note = promoter
  source 1..236: mol_type = other DNA

SEQ ID NO: 5741 - DNA, 236 bp, synthetic construct
  misc_feature 1..236: note = promoter
  source 1..236: mol_type = other DNA
gagggcctatttcccatgattccttcatatttgcatatacgatacaaggctgttagagagataattggaattaatttgactgtaaacacaaagatattagtacaaaatacgtgacgtagaaagtaataatttcttgggtagtttgcagttttaaaattatgttttaaaatggactatcatatgcttaccgtaacttgaaagtatttcgatttcttggcttttcttgtggaaaggac

SEQ ID NO: 5742 - DNA, 236 bp, synthetic construct
  misc_feature 1..236: note = promoter
  source 1..236: mol_type = other DNA
gagggcctatttcccatgattccttcatatttgcatatacgatacaaggctgttagagagataattggaattaatttgactgtaaacacaaagatattagtacaaaatacgtgacgtagaaagtaataatttcttgggtagtttgcagttttaaaattatgttttaaaatggactatcatatgcttaccgtaacttgaaagtatttcgatttcttggctttacttgtggaaaggac

SEQ ID NO: 5743 - DNA, 236 bp, synthetic construct
  misc_feature 1..236: note = promoter
  source 1..236: mol_type = other DNA
gagggcctatttcccatgattccttcatatttgcatatacgatacaaggctgttagagagataattggaattaatttgactgtaaacacaaagatattagtacaaaatacgtgacgtagaaagtaataatttcttgggtagtttgcagttttaaaattatgttttaaaatggactatcatatgcttaccgtaacttgaaagtatttcgatttcttggctttatttgtggaaaggac

SEQ ID NO: 5744 - DNA, 236 bp, synthetic construct
  misc_feature 1..236: note = promoter
  source 1..236: mol_type = other DNA
gagggcctatttcccatgattccttcatatttgcatatacgatacaaggctgttagagagataattggaattaatttgactgtaaacacaaagatattagtacaaaatacgtgacgtagaaagtaataatttcttgggtagtttgcagttttaaaattatgttttaaaatggactatcatatgcttaccgtaacttgaaagtatttcgatttcttggctttatatgtggaaaggac

SEQ ID NO: 5745 - DNA, 236 bp, synthetic construct; identical to SEQ ID NO: 5744
  misc_feature 1..236: note = promoter
  source 1..236: mol_type = other DNA

SEQ ID NO: 5746 - DNA, 236 bp, synthetic construct
  misc_feature 1..236: note = promoter
  source 1..236: mol_type = other DNA
gagggcctatttcccatgattccttcatatttgcatatacgatacaaggctgttagagagataattggaattaatttgactgtaaacacaaagatattagtacaaaatacgtgacgtagaaagtaataatttcttgggtagtttgcagttttaaaattatgttttaaaatggactatcatatgcttaccgtaacttgaaagtatttcgatttcttggctttatatatggaaaggac

SEQ ID NO: 5747 - DNA, 236 bp, synthetic construct; identical to SEQ ID NO: 5746
  misc_feature 1..236: note = promoter
  source 1..236: mol_type = other DNA

SEQ ID NO: 5748 - DNA, 236 bp, synthetic construct
  misc_feature 1..236: note = promoter
  source 1..236: mol_type = other DNA
gagggcctatttcccatgattccttcatatttgcatatacgatacaaggctgttagagagataattggaattaatttgactgtaaacacaaagatattagtacaaaatacgtgacgtagaaagtaataatttcttgggtagtttgcagttttaaaattatgttttaaaatggactatcatatgcttaccgtaacttgaaagtatttcgatttcttggctttatatatcgaaaggac

SEQ ID NO: 5749 - DNA, 236 bp, synthetic construct
  misc_feature 1..236: note = promoter
  source 1..236: mol_type = other DNA
gagggcctatttcccatgattccttcatatttgcatatacgatacaaggctgttagagagataattggaattaatttgactgtaaacacaaagatattagtacaaaatacgtgacgtagaaagtaataatttcttgggtagtttgcagttttaaaattatgttttaaaatggactatcatatgcttaccgtaacttgaaagtatttcgatttcttggctttatatatctaaaggac

SEQ ID NO: 5750 - DNA, 236 bp, synthetic construct
  misc_feature 1..236: note = promoter
  source 1..236: mol_type = other DNA
gagggcctatttcccatgattccttcatatttgcatatacgatacaaggctgttagagagataattggaattaatttgactgtaaacacaaagatattagtacaaaatacgtgacgtagaaagtaataatttcttgggtagtttgcagttttaaaattatgttttaaaatggactatcatatgcttaccgtaacttgaaagtatttcgatttcttggctttatatatcttaaggac

SEQ ID NO: 5751 - DNA, 236 bp, synthetic construct
  misc_feature 1..236: note = promoter
  source 1..236: mol_type = other DNA
gagggcctatttcccatgattccttcatatttgcatatacgatacaaggctgttagagagataattggaattaatttgactgtaaacacaaagatattagtacaaaatacgtgacgtagaaagtaataatttcttgggtagtttgcagttttaaaattatgttttaaaatggactatcatatgcttaccgtaacttgaaagtatttcgatttcttggctttatatatcttgaggac

SEQ ID NO: 5752 - DNA, 236 bp, synthetic construct
  misc_feature 1..236: note = promoter
  source 1..236: mol_type = other DNA
gagggcctatttcccatgattccttcatatttgcatatacgatacaaggctgttagagagataattggaattaatttgactgtaaacacaaagatattagtacaaaatacgtgacgtagaaagtaataatttcttgggtagtttgcagttttaaaattatgttttaaaatggactatcatatgcttaccgtaacttgaaagtatttcgatttcttggctttatatatcttgtggac

SEQ ID NO: 5753 - DNA, 236 bp, synthetic construct; identical to SEQ ID NO: 5752
  misc_feature 1..236: note = promoter
  source 1..236: mol_type = other DNA

SEQ ID NO: 5754 - DNA, 236 bp, synthetic construct; identical to SEQ ID NO: 5752
  misc_feature 1..236: note = promoter
  source 1..236: mol_type = other DNA

SEQ ID NO: 5755 - DNA, 236 bp, synthetic construct; identical to SEQ ID NO: 5752
  misc_feature 1..236: note = promoter
  source 1..236: mol_type = other DNA

SEQ ID NO: 5756 - DNA, 236 bp, synthetic construct
  misc_feature 1..236: note = promoter
  source 1..236: mol_type = other DNA
gagggcctatttcccatgattccttcatatttgcatatacgatacaaggctgttagagagataattggaattaatttgactgtaaacacaaagatattagtacaaaatacgtgacgtagaaagtaataatttcttgggtagtttgcagttttaaaattatgttttaaaatggactatcatatgcttaccgtaacttgaaagtatttcgatttcttggctttatatatcttgtggaa

SEQ ID NO: 5757 - DNA, 237 bp, synthetic construct
  misc_feature 1..237: note = promoter
  source 1..237: mol_type = other DNA
gagggcctatttcccatgattccttcatatttgcatatacgatacaaggctgttagagagataattggaattaatttgactgtaaacacaaagatattagtacaaaatacgtgacgtagaaagtaataatttcttgggtagtttgcagttttaaaattatgttttaaaatggactatcatatgcttaccgtaacttgaaagtatttcgatttcttggctttatatatcttgtggaaa

SEQ ID NO: 5758 - DNA, 238 bp, synthetic construct
  misc_feature 1..238: note = promoter
  source 1..238: mol_type = other DNA
gagggcctatttcccatgattccttcatatttgcatatacgatacaaggctgttagagagataattggaattaatttgactgtaaacacaaagatattagtacaaaatacgtgacgtagaaagtaataatttcttgggtagtttgcagttttaaaattatgttttaaaatggactatcatatgcttaccgtaacttgaaagtatttcgatttcttggctttatatatcttgtggaaag

SEQ ID NO: 5759 - DNA, 239 bp, synthetic construct; identical to SEQ ID NO: 5518
  misc_feature 1..239: note = promoter
  source 1..239: mol_type = other DNA

SEQ ID NO: 5760 - DNA, 240 bp, synthetic construct; identical to SEQ ID NO: 5278
  misc_feature 1..240: note = promoter
  source 1..240: mol_type = other DNA

SEQ ID NO: 5761 - DNA, 231 bp, synthetic construct
  misc_feature 1..231: note = promoter
  source 1..231: mol_type = other DNA
ttcccatgattccttcatatttgcatatacgatacaaggctgttagagagataattggaattaatttgactgtaaacacaaagatattagtacaaaatacgtgacgtagaaagtaataatttcttgggtagtttgcagttttaaaattatgttttaaaatggactatcatatgcttaccgtaacttgaaagtatttcgatttcttggctttatatatcttgtggaaaggac

SEQ ID NO: 5762 - DNA, 231 bp, synthetic construct
  misc_feature 1..231: note = promoter
  source 1..231: mol_type = other DNA
gtcccatgattccttcatatttgcatatacgatacaaggctgttagagagataattggaattaatttgactgtaaacacaaagatattagtacaaaatacgtgacgtagaaagtaataatttcttgggtagtttgcagttttaaaattatgttttaaaatggactatcatatgcttaccgtaacttgaaagtatttcgatttcttggctttatatatcttgtggaaaggac

SEQ ID NO: 5763 - DNA, 231 bp, synthetic construct
  misc_feature 1..231: note = promoter
  source 1..231: mol_type = other DNA
gacccatgattccttcatatttgcatatacgatacaaggctgttagagagataattggaattaatttgactgtaaacacaaagatattagtacaaaatacgtgacgtagaaagtaataatttcttgggtagtttgcagttttaaaattatgttttaaaatggactatcatatgcttaccgtaacttgaaagtatttcgatttcttggctttatatatcttgtggaaaggac

SEQ ID NO: 5764 - DNA, 231 bp, synthetic construct
  misc_feature 1..231: note = promoter
  source 1..231: mol_type = other DNA
gagccatgattccttcatatttgcatatacgatacaaggctgttagagagataattggaattaatttgactgtaaacacaaagatattagtacaaaatacgtgacgtagaaagtaataatttcttgggtagtttgcagttttaaaattatgttttaaaatggactatcatatgcttaccgtaacttgaaagtatttcgatttcttggctttatatatcttgtggaaaggac

SEQ ID NO: 5765 - DNA, 231 bp, synthetic construct
  misc_feature 1..231: note = promoter
  source 1..231: mol_type = other DNA
gaggcatgattccttcatatttgcatatacgatacaaggctgttagagagataattggaattaatttgactgtaaacacaaagatattagtacaaaatacgtgacgtagaaagtaataatttcttgggtagtttgcagttttaaaattatgttttaaaatggactatcatatgcttaccgtaacttgaaagtatttcgatttcttggctttatatatcttgtggaaaggac

SEQ ID NO: 5766 - DNA, 231 bp, synthetic construct
  misc_feature 1..231: note = promoter
  source 1..231: mol_type = other DNA
gagggatgattccttcatatttgcatatacgatacaaggctgttagagagataattggaattaatttgactgtaaacacaaagatattagtacaaaatacgtgacgtagaaagtaataatttcttgggtagtttgcagttttaaaattatgttttaaaatggactatcatatgcttaccgtaacttgaaagtatttcgatttcttggctttatatatcttgtggaaaggac

SEQ ID NO: 5767 - DNA, 231 bp, synthetic construct
  misc_feature 1..231: note = promoter
  source 1..231: mol_type = other DNA
gagggctgattccttcatatttgcatatacgatacaaggctgttagagagataattggaattaatttgactgtaaacacaaagatattagtacaaaatacgtgacgtagaaagtaataatttcttgggtagtttgcagttttaaaattatgttttaaaatggactatcatatgcttaccgtaacttgaaagtatttcgatttcttggctttatatatcttgtggaaaggac

SEQ ID NO: 5768 - DNA, 231 bp, synthetic construct
  misc_feature 1..231: note = promoter
  source 1..231: mol_type = other DNA
gagggccgattccttcatatttgcatatacgatacaaggctgttagagagataattggaattaatttgactgtaaacacaaagatattagtacaaaatacgtgacgtagaaagtaataatttcttgggtagtttgcagttttaaaattatgttttaaaatggactatcatatgcttaccgtaacttgaaagtatttcgatttcttggctttatatatcttgtggaaaggac

SEQ ID NO: 5769 - DNA, 231 bp, synthetic construct
  misc_feature 1..231: note = promoter
  source 1..231: mol_type = other DNA
gagggcctattccttcatatttgcatatacgatacaaggctgttagagagataattggaattaatttgactgtaaacacaaagatattagtacaaaatacgtgacgtagaaagtaataatttcttgggtagtttgcagttttaaaattatgttttaaaatggactatcatatgcttaccgtaacttgaaagtatttcgatttcttggctttatatatcttgtggaaaggac

SEQ ID NO: 5770 - DNA, 231 bp, synthetic construct; identical to SEQ ID NO: 5769
  misc_feature 1..231: note = promoter
  source 1..231: mol_type = other DNA

SEQ ID NO: 5771 - DNA, 231 bp, synthetic construct; identical to SEQ ID NO: 5769
  misc_feature 1..231: note = promoter
  source 1..231: mol_type = other DNA

SEQ ID NO: 5772 - DNA, 231 bp, synthetic construct; identical to SEQ ID NO: 5769
  misc_feature 1..231: note = promoter
  source 1..231: mol_type = other DNA

SEQ ID NO: 5773 - DNA, 231 bp, synthetic construct
  misc_feature 1..231: note = promoter
  source 1..231: mol_type = other DNA
gagggcctatttcttcatatttgcatatacgatacaaggctgttagagagataattggaattaatttgactgtaaacacaaagatattagtacaaaatacgtgacgtagaaagtaataatttcttgggtagtttgcagttttaaaattatgttttaaaatggactatcatatgcttaccgtaacttgaaagtatttcgatttcttggctttatatatcttgtggaaaggac

SEQ ID NO: 5774 - DNA, 231 bp, synthetic construct; identical to SEQ ID NO: 5773
  misc_feature 1..231: note = promoter
  source 1..231: mol_type = other DNA

SEQ ID NO: 5775 - DNA, 231 bp, synthetic construct
  misc_feature 1..231: note = promoter
  source 1..231: mol_type = other DNA
gagggcctatttcctcatatttgcatatacgatacaaggctgttagagagataattggaattaatttgactgtaaacacaaagatattagtacaaaatacgtgacgtagaaagtaataatttcttgggtagtttgcagttttaaaattatgttttaaaatggactatcatatgcttaccgtaacttgaaagtatttcgatttcttggctttatatatcttgtggaaaggac

SEQ ID NO: 5776 - DNA, 231 bp, synthetic construct
  misc_feature 1..231: note = promoter
  source 1..231: mol_type = other DNA
gagggcctatttccccatatttgcatatacgatacaaggctgttagagagataattggaattaatttgactgtaaacacaaagatattagtacaaaatacgtgacgtagaaagtaataatttcttgggtagtttgcagttttaaaattatgttttaaaatggactatcatatgcttaccgtaacttgaaagtatttcgatttcttggctttatatatcttgtggaaaggac

SEQ ID NO: 5777 - DNA, 231 bp, synthetic construct
  misc_feature 1..231: note = promoter
  source 1..231: mol_type = other DNA
gagggcctatttcccaatatttgcatatacgatacaaggctgttagagagataattggaattaatttgactgtaaacacaaagatattagtacaaaatacgtgacgtagaaagtaataatttcttgggtagtttgcagttttaaaattatgttttaaaatggactatcatatgcttaccgtaacttgaaagtatttcgatttcttggctttatatatcttgtggaaaggac

SEQ ID NO: 5778 - DNA, 231 bp, synthetic construct
  misc_feature 1..231: note = promoter
  source 1..231: mol_type = other DNA
gagggcctatttcccattatttgcatatacgatacaaggctgttagagagataattggaattaatttgactgtaaacacaaagatattagtacaaaatacgtgacgtagaaagtaataatttcttgggtagtttgcagttttaaaattatgttttaaaatggactatcatatgcttaccgtaacttgaaagtatttcgatttcttggctttatatatcttgtggaaaggac

SEQ ID NO: 5779 - DNA, 231 bp, synthetic construct
  misc_feature 1..231: note = promoter
  source 1..231: mol_type = other DNA
gagggcctatttcccatgatttgcatatacgatacaaggctgttagagagataattggaattaatttgactgtaaacacaaagatattagtacaaaatacgtgacgtagaaagtaataatttcttgggtagtttgcagttttaaaattatgttttaaaatggactatcatatgcttaccgtaacttgaaagtatttcgatttcttggctttatatatcttgtggaaaggac

SEQ ID NO: 5780 - DNA, 231 bp, synthetic construct; identical to SEQ ID NO: 5779
  misc_feature 1..231: note = promoter
  source 1..231: mol_type = other DNA

SEQ ID NO: 5781 - DNA, 231 bp, synthetic construct; identical to SEQ ID NO: 5779
  misc_feature 1..231: note = promoter
  source 1..231: mol_type = other DNA

SEQ ID NO: 5782 - DNA, 231 bp, synthetic construct; identical to SEQ ID NO: 5779
  misc_feature 1..231: note = promoter
  source 1..231: mol_type = other DNA

SEQ ID NO: 5783 - DNA, 231 bp, synthetic construct
  misc_feature 1..231: note = promoter
  source 1..231: mol_type = other DNA
gagggcctatttcccatgattcgcatatacgatacaaggctgttagagagataattggaattaatttgactgtaaacacaaagatattagtacaaaatacgtgacgtagaaagtaataatttcttgggtagtttgcagttttaaaattatgttttaaaatggactatcatatgcttaccgtaacttgaaagtatttcgatttcttggctttatatatcttgtggaaaggac

SEQ ID NO: 5784 - DNA, 231 bp, synthetic construct
  misc_feature 1..231: note = promoter
  source 1..231: mol_type = other DNA
gagggcctatttcccatgattcccatatacgatacaaggctgttagagagataattggaattaatttgactgtaaacacaaagatattagtacaaaatacgtgacgtagaaagtaataatttcttgggtagtttgcagttttaaaattatgttttaaaatggactatcatatgcttaccgtaacttgaaagtatttcgatttcttggctttatatatcttgtggaaaggac

SEQ ID NO: 5785 - DNA, 231 bp, synthetic construct
  misc_feature 1..231: note = promoter
  source 1..231: mol_type = other DNA
gagggcctatttcccatgattcctatatacgatacaaggctgttagagagataattggaattaatttgactgtaaacacaaagatattagtacaaaatacgtgacgtagaaagtaataatttcttgggtagtttgcagttttaaaattatgttttaaaatggactatcatatgcttaccgtaacttgaaagtatttcgatttcttggctttatatatcttgtggaaaggac

SEQ ID NO: 5786 - DNA, 231 bp, synthetic construct
  misc_feature 1..231: note = promoter
  source 1..231: mol_type = other DNA
gagggcctatttcccatgattcctttatacgatacaaggctgttagagagataattggaattaatttgactgtaaacacaaagatattagtacaaaatacgtgacgtagaaagtaataatttcttgggtagtttgcagttttaaaattatgttttaaaatggactatcatatgcttaccgtaacttgaaagtatttcgatttcttggctttatatatcttgtggaaaggac

SEQ ID NO: 5787 - DNA, 231 bp, synthetic construct
  misc_feature 1..231: note = promoter
  source 1..231: mol_type = other DNA
gagggcctatttcccatgattccttcatacgatacaaggctgttagagagataattggaattaatttgactgtaaacacaaagatattagtacaaaatacgtgacgtagaaagtaataatttcttgggtagtttgcagttttaaaattatgttttaaaatggactatcatatgcttaccgtaacttgaaagtatttcgatttcttggctttatatatcttgtggaaaggac

SEQ ID NO: 5788 - DNA, 231 bp, synthetic construct; identical to SEQ ID NO: 5787
  misc_feature 1..231: note = promoter
  source 1..231: mol_type = other DNA

SEQ ID NO: 5789 - DNA, 231 bp, synthetic construct; identical to SEQ ID NO: 5787
  misc_feature 1..231: note = promoter
  source 1..231: mol_type = other DNA

SEQ ID NO: 5790 - DNA, 231 bp, synthetic construct; identical to SEQ ID NO: 5787
  misc_feature 1..231: note = promoter
  source 1..231: mol_type = other DNA

SEQ ID NO: 5791 - DNA, 231 bp, synthetic construct
  misc_feature 1..231: note = promoter
  source 1..231: mol_type = other DNA
gagggcctatttcccatgattccttcatatgatacaaggctgttagagagataattggaattaatttgactgtaaacacaaagatattagtacaaaatacgtgacgtagaaagtaataatttcttgggtagtttgcagttttaaaattatgttttaaaatggactatcatatgcttaccgtaacttgaaagtatttcgatttcttggctttatatatcttgtggaaaggac

SEQ ID NO: 5792 - DNA, 231 bp, synthetic construct
  misc_feature 1..231: note = promoter
  source 1..231: mol_type = other DNA
gagggcctatttcccatgattccttcatattatacaaggctgttagagagataattggaattaatttgactgtaaacacaaagatattagtacaaaatacgtgacgtagaaagtaataatttcttgggtagtttgcagttttaaaattatgttttaaaatggactatcatatgcttaccgtaacttgaaagtatttcgatttcttggctttatatatcttgtggaaaggac

SEQ ID NO: 5793 - DNA, 231 bp, synthetic construct
  misc_feature 1..231: note = promoter
  source 1..231: mol_type = other DNA
gagggcctatttcccatgattccttcatattttacaaggctgttagagagataattggaattaatttgactgtaaacacaaagatattagtacaaaatacgtgacgtagaaagtaataatttcttgggtagtttgcagttttaaaattatgttttaaaatggactatcatatgcttaccgtaacttgaaagtatttcgatttcttggctttatatatcttgtggaaaggac

SEQ ID NO: 5794 - DNA, 231 bp, synthetic construct
  misc_feature 1..231: note = promoter
  source 1..231: mol_type = other DNA
gagggcctatttcccatgattccttcatatttgacaaggctgttagagagataattggaattaatttgactgtaaacacaaagatattagtacaaaatacgtgacgtagaaagtaataatttcttgggtagtttgcagttttaaaattatgttttaaaatggactatcatatgcttaccgtaacttgaaagtatttcgatttcttggctttatatatcttgtggaaaggac

SEQ ID NO: 5795 - DNA, 231 bp, synthetic construct
  misc_feature 1..231: note = promoter
  source 1..231: mol_type = other DNA
gagggcctatttcccatgattccttcatatttgccaaggctgttagagagataattggaattaatttgactgtaaacacaaagatattagtacaaaatacgtgacgtagaaagtaataatttcttgggtagtttgcagttttaaaattatgttttaaaatggactatcatatgcttaccgtaacttgaaagtatttcgatttcttggctttatatatcttgtggaaaggac

SEQ ID NO: 5796 - DNA, 231 bp, synthetic construct
  misc_feature 1..231: note = promoter
  source 1..231: mol_type = other DNA
gagggcctatttcccatgattccttcatatttgcaaaggctgttagagagataattggaattaatttgactgtaaacacaaagatattagtacaaaatacgtgacgtagaaagtaataatttcttgggtagtttgcagttttaaaattatgttttaaaatggactatcatatgcttaccgtaacttgaaagtatttcgatttcttggctttatatatcttgtggaaaggac

SEQ ID NO: 5797 - DNA, 231 bp, synthetic construct
  misc_feature 1..231: note = promoter
  source 1..231: mol_type = other DNA
gagggcctatttcccatgattccttcatatttgcataggctgttagagagataattggaattaatttgactgtaaacacaaagatattagtacaaaatacgtgacgtagaaagtaataatttcttgggtagtttgcagttttaaaattatgttttaaaatggactatcatatgcttaccgtaacttgaaagtatttcgatttcttggctttatatatcttgtggaaaggac

SEQ ID NO: 5798 - DNA, 231 bp, synthetic construct; identical to SEQ ID NO: 5797
  misc_feature 1..231: note = promoter
  source 1..231: mol_type = other DNA

SEQ ID NO: 5799 - DNA, 231 bp, synthetic construct
  misc_feature 1..231: note = promoter
  source 1..231: mol_type = other DNA
gagggcctatttcccatgattccttcatatttgcatatgctgttagagagataattggaattaatttgactgtaaacacaaagatattagtacaaaatacgtgacgtagaaagtaataatttcttgggtagtttgcagttttaaaattatgttttaaaatggactatcatatgcttaccgtaacttgaaagtatttcgatttcttggctttatatatcttgtggaaaggac

SEQ ID NO: 5800 - DNA, 231 bp, synthetic construct
  misc_feature 1..231: note = promoter
  source 1..231: mol_type = other DNA
gagggcctatttcccatgattccttcatatttgcatatactgttagagagataattggaattaatttgactgtaaacacaaagatattagtacaaaatacgtgacgtagaaagtaataatttcttgggtagtttgcagttttaaaattatgttttaaaatggactatcatatgcttaccgtaacttgaaagtatttcgatttcttggctttatatatcttgtggaaaggac

SEQ ID NO: 5801 - DNA, 231 bp, synthetic construct; identical to SEQ ID NO: 5800
  misc_feature 1..231: note = promoter
  source 1..231: mol_type = other DNA

SEQ ID NO: 5802 - DNA, 231 bp, synthetic construct
  misc_feature 1..231: note = promoter
  source 1..231: mol_type = other DNA
gagggcctatttcccatgattccttcatatttgcatatacggttagagagataattggaattaatttgactgtaaacacaaagatattagtacaaaatacgtgacgtagaaagtaataatttcttgggtagtttgcagttttaaaattatgttttaaaatggactatcatatgcttaccgtaacttgaaagtatttcgatttcttggctttatatatcttgtggaaaggac

SEQ ID NO: 5803 - DNA, 231 bp, synthetic construct
  misc_feature 1..231: note = promoter
  source 1..231: mol_type = other DNA
gagggcctatttcccatgattccttcatatttgcatatacgattagagagataattggaattaatttgactgtaaacacaaagatattagtacaaaatacgtgacgtagaaagtaataatttcttgggtagtttgcagttttaaaattatgttttaaaatggactatcatatgcttaccgtaacttgaaagtatttcgatttcttggctttatatatcttgtggaaaggac

SEQ ID NO: 5804 - DNA, 231 bp, synthetic construct; identical to SEQ ID NO: 5803
  misc_feature 1..231: note = promoter
  source 1..231: mol_type = other DNA

SEQ ID NO: 5805 - DNA, 231 bp, synthetic construct
  misc_feature 1..231: note = promoter
  source 1..231: mol_type = other DNA
gagggcctatttcccatgattccttcatatttgcatatacgataagagagataattggaattaatttgactgtaaacacaaagatattagtacaaaatacgtgacgtagaaagtaataatttcttgggtagtttgcagttttaaaattatgttttaaaatggactatcatatgcttaccgtaacttgaaagtatttcgatttcttggctttatatatcttgtggaaaggac

SEQ ID NO: 5806 - DNA, 231 bp, synthetic construct
  misc_feature 1..231: note = promoter
  source 1..231: mol_type = other DNA
gagggcctatttcccatgattccttcatatttgcatatacgatacgagagataattggaattaatttgactgtaaacacaaagatattagtacaaaatacgtgacgtagaaagtaataatttcttgggtagtttgcagttttaaaattatgttttaaaatggactatcatatgcttaccgtaacttgaaagtatttcgatttcttggctttatatatcttgtggaaaggac

SEQ ID NO: 5807 - DNA, 231 bp, synthetic construct
  misc_feature 1..231: note = promoter
  source 1..231: mol_type = other DNA
gagggcctatttcccatgattccttcatatttgcatatacgatacaagagataattggaattaatttgactgtaaacacaaagatattagtacaaaatacgtgacgtagaaagtaataatttcttgggtagtttgcagttttaaaattatgttttaaaatggactatcatatgcttaccgtaacttgaaagtatttcgatttcttggctttatatatcttgtggaaaggac

SEQ ID NO: 5808 - DNA, 231 bp, synthetic construct; identical to SEQ ID NO: 5807
  misc_feature 1..231: note = promoter
  source 1..231: mol_type = other DNA

SEQ ID NO: 5809 - DNA, 231 bp, synthetic construct; identical to SEQ ID NO: 5807
  misc_feature 1..231: note = promoter
  source 1..231: mol_type = other DNA

SEQ ID NO: 5810 - DNA, 231 bp, synthetic construct
  misc_feature 1..231: note = promoter
  source 1..231: mol_type = other DNA
gagggcctatttcccatgattccttcatatttgcatatacgatacaagggataattggaattaatttgactgtaaacacaaagatattagtacaaaatacgtgacgtagaaagtaataatttcttgggtagtttgcagttttaaaattatgttttaaaatggactatcatatgcttaccgtaacttgaaagtatttcgatttcttggctttatatatcttgtggaaaggac

SEQ ID NO: 5811 - DNA, 231 bp, synthetic construct
  misc_feature 1..231: note = promoter
  source 1..231: mol_type = other DNA
gagggcctatttcccatgattccttcatatttgcatatacgatacaaggcataattggaattaatttgactgtaaacacaaagatattagtacaaaatacgtgacgtagaaagtaataatttcttgggtagtttgcagttttaaaattatgttttaaaatggactatcatatgcttaccgtaacttgaaagtatttcgatttcttggctttatatatcttgtggaaaggac

SEQ ID NO: 5812 - DNA, 231 bp, synthetic construct
  misc_feature 1..231: note = promoter
  source 1..231: mol_type = other DNA
gagggcctatttcccatgattccttcatatttgcatatacgatacaaggcttaattggaattaatttgactgtaaacacaaagatattagtacaaaatacgtgacgtagaaagtaataatttcttgggtagtttgcagttttaaaattatgttttaaaatggactatcatatgcttaccgtaacttgaaagtatttcgatttcttggctttatatatcttgtggaaaggac

SEQ ID NO: 5813 - DNA, 231 bp, synthetic construct
  misc_feature 1..231: note = promoter
  source 1..231: mol_type = other DNA
gagggcctatttcccatgattccttcatatttgcatatacgatacaaggctgaattggaattaatttgactgtaaacacaaagatattagtacaaaatacgtgacgtagaaagtaataatttcttgggtagtttgcagttttaaaattatgttttaaaatggactatcatatgcttaccgtaacttgaaagtatttcgatttcttggctttatatatcttgtggaaaggac

SEQ ID NO: 5814 - DNA, 231 bp, synthetic construct
  misc_feature 1..231: note = promoter
  source 1..231: mol_type = other DNA
gagggcctatttcccatgattccttcatatttgcatatacgatacaaggctgtattggaattaatttgactgtaaacacaaagatattagtacaaaatacgtgacgtagaaagtaataatttcttgggtagtttgcagttttaaaattatgttttaaaatggactatcatatgcttaccgtaacttgaaagtatttcgatttcttggctttatatatcttgtggaaaggac

SEQ ID NO: 5815 - DNA, 231 bp, synthetic construct
  misc_feature 1..231: note = promoter
  source 1..231: mol_type = other DNA
gagggcctatttcccatgattccttcatatttgcatatacgatacaaggctgttttggaattaatttgactgtaaacacaaagatattagtacaaaatacgtgacgtagaaagtaataatttcttgggtagtttgcagttttaaaattatgttttaaaatggactatcatatgcttaccgtaacttgaaagtatttcgatttcttggctttatatatcttgtggaaaggac

SEQ ID NO: 5816 - DNA, 231 bp, synthetic construct
  misc_feature 1..231: note = promoter
  source 1..231: mol_type = other DNA
gagggcctatttcccatgattccttcatatttgcatatacgatacaaggctgttatggaattaatttgactgtaaacacaaagatattagtacaaaatacgtgacgtagaaagtaataatttcttgggtagtttgcagttttaaaattatgttttaaaatggactatcatatgcttaccgtaacttgaaagtatttcgatttcttggctttatatatcttgtggaaaggac

SEQ ID NO: 5817 - DNA, 231 bp, synthetic construct
  misc_feature 1..231: note = promoter
  source 1..231: mol_type = other DNA
gagggcctatttcccatgattccttcatatttgcatatacgatacaaggctgttagggaattaatttgactgtaaacacaaagatattagtacaaaatacgtgacgtagaaagtaataatttcttgggtagtttgcagttttaaaattatgttttaaaatggactatcatatgcttaccgtaacttgaaagtatttcgatttcttggctttatatatcttgtggaaaggac

SEQ ID NO: 5818 - DNA, 231 bp, synthetic construct
  misc_feature 1..231: note = promoter
  source 1..231: mol_type = other DNA
gagggcctatttcccatgattccttcatatttgcatatacgatacaaggctgttagagaattaatttgactgtaaacacaaagatattagtacaaaatacgtgacgtagaaagtaataatttcttgggtagtttgcagttttaaaattatgttttaaaatggactatcatatgcttaccgtaacttgaaagtatttcgatttcttggctttatatatcttgtggaaaggac

SEQ ID NO: 5819 - DNA, 231 bp, synthetic construct; identical to SEQ ID NO: 5818
  misc_feature 1..231: note = promoter
  source 1..231: mol_type = other DNA

SEQ ID NO: 5820 - DNA, 231 bp, synthetic construct; identical to SEQ ID NO: 5818
  misc_feature 1..231: note = promoter
  source 1..231: mol_type = other DNA

SEQ ID NO: 5821 - DNA, 231 bp, synthetic construct
  misc_feature 1..231: note = promoter
  source 1..231: mol_type = other DNA
gagggcctatttcccatgattccttcatatttgcatatacgatacaaggctgttagagagttaatttgactgtaaacacaaagatattagtacaaaatacgtgacgtagaaagtaataatttcttgggtagtttgcagttttaaaattatgttttaaaatggactatcatatgcttaccgtaacttgaaagtatttcgatttcttggctttatatatcttgtggaaaggac

SEQ ID NO: 5822 - DNA, 231 bp, synthetic construct
  misc_feature 1..231: note = promoter
  source 1..231: mol_type = other DNA
gagggcctatttcccatgattccttcatatttgcatatacgatacaaggctgttagagagataatttgactgtaaacacaaagatattagtacaaaatacgtgacgtagaaagtaataatttcttgggtagtttgcagttttaaaattatgttttaaaatggactatcatatgcttaccgtaacttgaaagtatttcgatttcttggctttatatatcttgtggaaaggac

SEQ ID NO: 5823 - DNA, 231 bp, synthetic construct; identical to SEQ ID NO: 5822
  misc_feature 1..231: note = promoter
  source 1..231: mol_type = other DNA

SEQ ID NO: 5824 - DNA, 231 bp, synthetic construct; identical to SEQ ID NO: 5822
  misc_feature 1..231: note = promoter
  source 1..231: mol_type = other DNA

SEQ ID NO: 5825 - DNA, 231 bp, synthetic construct; identical to SEQ ID NO: 5822
  misc_feature 1..231: note = promoter
  source 1..231: mol_type = other DNA

SEQ ID NO: 5826 - DNA, 231 bp, synthetic construct; identical to SEQ ID NO: 5822
  misc_feature 1..231: note = promoter
  source 1..231: mol_type = other DNA

SEQ ID NO: 5827 - DNA, 231 bp, synthetic construct; identical to SEQ ID NO: 5822
  misc_feature 1..231: note = promoter
  source 1..231: mol_type = other DNA

SEQ ID NO: 5828 - DNA, 231 bp, synthetic construct
  misc_feature 1..231: note = promoter
  source 1..231: mol_type = other DNA
gagggcctatttcccatgattccttcatatttgcatatacgatacaaggctgttagagagataattggactgtaaacacaaagatattagtacaaaatacgtgacgtagaaagtaataatttcttgggtagtttgcagttttaaaattatgttttaaaatggactatcatatgcttaccgtaacttgaaagtatttcgatttcttggctttatatatcttgtggaaaggac

SEQ ID NO: 5829 - DNA, 231 bp, synthetic construct; identical to SEQ ID NO: 5828
  misc_feature 1..231: note = promoter
  source 1..231: mol_type = other DNA

SEQ ID NO: 5830 - DNA, 231 bp, synthetic construct; identical to SEQ ID NO: 5828
  misc_feature 1..231: note = promoter
  source 1..231: mol_type = other DNA

SEQ ID NO: 5831 - DNA, 231 bp, synthetic construct
  misc_feature 1..231: note = promoter
  source 1..231: mol_type = other DNA
gagggcctatttcccatgattccttcatatttgcatatacgatacaaggctgttagagagataattggaatgtaaacacaaagatattagtacaaaatacgtgacgtagaaagtaataatttcttgggtagtttgcagttttaaaattatgttttaaaatggactatcatatgcttaccgtaacttgaaagtatttcgatttcttggctttatatatcttgtggaaaggac

SEQ ID NO: 5832 - DNA, 231 bp, synthetic construct; identical to SEQ ID NO: 5831
  misc_feature 1..231: note = promoter
  source 1..231: mol_type = other DNA

SEQ ID NO: 5833 - DNA, 231 bp, synthetic construct
  misc_feature 1..231: note = promoter
  source 1..231: mol_type = other DNA
gagggcctatttcccatgattccttcatatttgcatatacgatacaaggctgttagagagataattggaatttaaacacaaagatattagtacaaaatacgtgacgtagaaagtaataatttcttgggtagtttgcagttttaaaattatgttttaaaatggactatcatatgcttaccgtaacttgaaagtatttcgatttcttggctttatatatcttgtggaaaggac

SEQ ID NO: 5834 - DNA, 231 bp, synthetic construct
  misc_feature 1..231: note = promoter
  source 1..231: mol_type = other DNA
gagggcctatttcccatgattccttcatatttgcatatacgatacaaggctgttagagagataattggaattaaaacacaaagatattagtacaaaatacgtgacgtagaaagtaataatttcttgggtagtttgcagttttaaaattatgttttaaaatggactatcatatgcttaccgtaacttgaaagtatttcgatttcttggctttatatatcttgtggaaaggac

SEQ ID NO: 5835 - DNA, 231 bp, synthetic construct; identical to SEQ ID NO: 5834
  misc_feature 1..231: note = promoter
  source 1..231: mol_type = other DNA

SEQ ID NO: 5836 - DNA, 231 bp, synthetic construct
  misc_feature 1..231: note = promoter
  source 1..231: mol_type = other DNA
gagggcctatttcccatgattccttcatatttgcatatacgatacaaggctgttagagagataattggaattaatacacaaagatattagtacaaaatacgtgacgtagaaagtaataatttcttgggtagtttgcagttttaaaattatgttttaaaatggactatcatatgcttaccgtaacttgaaagtatttcgatttcttggctttatatatcttgtggaaaggac

SEQ ID NO: 5837 - DNA, 231 bp, synthetic construct
  misc_feature 1..231: note = promoter
  source 1..231: mol_type = other DNA
gagggcctatttcccatgattccttcatatttgcatatacgatacaaggctgttagagagataattggaattaattcacaaagatattagtacaaaatacgtgacgtagaaagtaataatttcttgggtagtttgcagttttaaaattatgttttaaaatggactatcatatgcttaccgtaacttgaaagtatttcgatttcttggctttatatatcttgtggaaaggac

SEQ ID NO: 5838 - DNA, 231 bp, synthetic construct
  misc_feature 1..231: note = promoter
  source 1..231: mol_type = other DNA
gagggcctatttcccatgattccttcatatttgcatatacgatacaaggctgttagagagataattggaattaatttacaaagatattagtacaaaatacgtgacgtagaaagtaataatttcttgggtagtttgcagttttaaaattatgttttaaaatggactatcatatgcttaccgtaacttgaaagtatttcgatttcttggctttatatatcttgtggaaaggac

SEQ ID NO: 5839 - DNA, 231 bp, synthetic construct
  misc_feature 1..231: note = promoter
  source 1..231: mol_type = other DNA
gagggcctatttcccatgattccttcatatttgcatatacgatacaaggctgttagagagataattggaattaatttgcaaagatattagtacaaaatacgtgacgtagaaagtaataatttcttgggtagtttgcagttttaaaattatgttttaaaatggactatcatatgcttaccgtaacttgaaagtatttcgatttcttggctttatatatcttgtggaaaggac

SEQ ID NO: 5840 - DNA, 231 bp, synthetic construct
  misc_feature 1..231: note = promoter
  source 1..231: mol_type = other DNA
gagggcctatttcccatgattccttcatatttgcatatacgatacaaggctgttagagagataattggaattaatttgaaaagatattagtacaaaatacgtgacgtagaaagtaataatttcttgggtagtttgcagttttaaaattatgttttaaaatggactatcatatgcttaccgtaacttgaaagtatttcgatttcttggctttatatatcttgtggaaaggac

SEQ ID NO: 5841 - DNA, 231 bp, synthetic construct
  misc_feature 1..231: note = promoter
  source 1..231: mol_type = other DNA
gagggcctatttcccatgattccttcatatttgcatatacgatacaaggctgttagagagataattggaattaatttgacaagatattagtacaaaatacgtgacgtagaaagtaataatttcttgggtagtttgcagttttaaaattatgttttaaaatggactatcatatgcttaccgtaacttgaaagtatttcgatttcttggctttatatatcttgtggaaaggac

SEQ ID NO: 5842 - DNA, 231 bp, synthetic construct
  misc_feature 1..231: note = promoter
  source 1..231: mol_type = other DNA
gagggcctatttcccatgattccttcatatttgcatatacgatacaaggctgttagagagataattggaattaatttgactagatattagtacaaaatacgtgacgtagaaagtaataatttcttgggtagtttgcagttttaaaattatgttttaaaatggactatcatatgcttaccgtaacttgaaagtatttcgatttcttggctttatatatcttgtggaaaggac

SEQ ID NO: 5843 - DNA, 231 bp, synthetic construct
  misc_feature 1..231: note = promoter
  source 1..231: mol_type = other DNA
gagggcctatttcccatgattccttcatatttgcatatacgatacaaggctgttagagagataattggaattaatttgactggatattagtacaaaatacgtgacgtagaaagtaataatttcttgggtagtttgcagttttaaaattatgttttaaaatggactatcatatgcttaccgtaacttgaaagtatttcgatttcttggctttatatatcttgtggaaaggac

SEQ ID NO: 5844 - DNA, 231 bp, synthetic construct
  misc_feature 1..231: note = promoter
  source 1..231: mol_type = other DNA
gagggcctatttcccatgattccttcatatttgcatatacgatacaaggctgttagagagataattggaattaatttgactgtatattagtacaaaatacgtgacgtagaaagtaataatttcttgggtagtttgcagttttaaaattatgttttaaaatggactatcatatgcttaccgtaacttgaaagtatttcgatttcttggctttatatatcttgtggaaaggac

SEQ ID NO: 5845 - DNA, 231 bp, synthetic construct; identical to SEQ ID NO: 5844
  misc_feature 1..231: note = promoter
  source 1..231: mol_type = other DNA

SEQ ID NO: 5846 - DNA, 231 bp, synthetic construct
  misc_feature 1..231: note = promoter
  source 1..231: mol_type = other DNA
gagggcctatttcccatgattccttcatatttgcatatacgatacaaggctgttagagagataattggaattaatttgactgtaaattagtacaaaatacgtgacgtagaaagtaataatttcttgggtagtttgcagttttaaaattatgttttaaaatggactatcatatgcttaccgtaacttgaaagtatttcgatttcttggctttatatatcttgtggaaaggac

SEQ ID NO: 5847 - DNA, 231 bp, synthetic construct; identical to SEQ ID NO: 5846
  misc_feature 1..231: note = promoter
  source 1..231: mol_type = other DNA

SEQ ID NO: 5848 - DNA, 231 bp, synthetic construct
  misc_feature 1..231: note = promoter
  source 1..231: mol_type = other DNA
gagggcctatttcccatgattccttcatatttgcatatacgatacaaggctgttagagagataattggaattaatttgactgtaaactagtacaaaatacgtgacgtagaaagtaataatttcttgggtagtttgcagttttaaaattatgttttaaaatggactatcatatgcttaccgtaacttgaaagtatttcgatttcttggctttatatatcttgtggaaaggac

SEQ ID NO: 5849 - DNA, 231 bp, synthetic construct
  misc_feature 1..231: note = promoter
  source 1..231: mol_type = other DNA
gagggcctatttcccatgattccttcatatttgcatatacgatacaaggctgttagagagataattggaattaatttgactgtaaacaagtacaaaatacgtgacgtagaaagtaataatttcttgggtagtttgcagttttaaaattatgttttaaaatggactatcatatgcttaccgtaacttgaaagtatttcgatttcttggctttatatatcttgtggaaaggac

SEQ ID NO: 5850 - DNA, 231 bp, synthetic construct
  misc_feature 1..231: note = promoter
  source 1..231: mol_type = other DNA
gagggcctatttcccatgattccttcatatttgcatatacgatacaaggctgttagagagataattggaattaatttgactgtaaacacgtacaaaatacgtgacgtagaaagtaataatttcttgggtagtttgcagttttaaaattatgttttaaaatggactatcatatgcttaccgtaacttgaaagtatttcgatttcttggctttatatatcttgtggaaaggac

SEQ ID NO: 5851 - DNA, 231 bp, synthetic construct
  misc_feature 1..231: note = promoter
  source 1..231: mol_type = other DNA
gagggcctatttcccatgattccttcatatttgcatatacgatacaaggctgttagagagataattggaattaatttgactgtaaacacatacaaaatacgtgacgtagaaagtaataatttcttgggtagtttgcagttttaaaattatgttttaaaatggactatcatatgcttaccgtaacttgaaagtatttcgatttcttggctttatatatcttgtggaaaggac

SEQ ID NO: 5852 - DNA, 231 bp, synthetic construct
  misc_feature 1..231: note = promoter
  source 1..231: mol_type = other DNA
gagggcctatttcccatgattccttcatatttgcatatacgatacaaggctgttagagagataattggaattaatttgactgtaaacacaaacaaaatacgtgacgtagaaagtaataatttcttgggtagtttgcagttttaaaattatgttttaaaatggactatcatatgcttaccgtaacttgaaagtatttcgatttcttggctttatatatcttgtggaaaggac

SEQ ID NO: 5853 - DNA, 231 bp, synthetic construct; identical to SEQ ID NO: 5852
  misc_feature 1..231: note = promoter
  source 1..231: mol_type = other DNA

SEQ ID NO: 5854 - DNA, 231 bp, synthetic construct
  misc_feature 1..231: note = promoter
  source 1..231: mol_type = other DNA
gagggcctatttcccatgattccttcatatttgcatatacgatacaaggctgttagagagataattggaattaatttgactgtaaacacaaagaaaatacgtgacgtagaaagtaataatttcttgggtagtttgcagttttaaaattatgttttaaaatggactatcatatgcttaccgtaacttgaaagtatttcgatttcttggctttatatatcttgtggaaaggac

SEQ ID NO: 5855 - DNA, 231 bp, synthetic construct; identical to SEQ ID NO: 5854
  misc_feature 1..231: note = promoter
  source 1..231: mol_type = other DNA

SEQ ID NO: 5856 - DNA, 231 bp, synthetic construct
  misc_feature 1..231: note = promoter
  source 1..231: mol_type = other DNA
gagggcctatttcccatgattccttcatatttgcatatacgatacaaggctgttagagagataattggaattaatttgactgtaaacacaaagataatacgtgacgtagaaagtaataatttcttgggtagtttgcagttttaaaattatgttttaaaatggactatcatatgcttaccgtaacttgaaagtatttcgatttcttggctttatatatcttgtggaaaggac

SEQ ID NO: 5857 - DNA, 231 bp, synthetic construct; identical to SEQ ID NO: 5856
  misc_feature 1..231: note = promoter
  source 1..231: mol_type = other DNA

SEQ ID NO: 5858 - DNA, 231 bp, synthetic construct
  misc_feature 1..231: note = promoter
  source 1..231: mol_type = other DNA
gagggcctatttcccatgattccttcatatttgcatatacgatacaaggctgttagagagataattggaattaatttgactgtaaacacaaagatattacgtgacgtagaaagtaataatttcttgggtagtttgcagttttaaaattatgttttaaaatggactatcatatgcttaccgtaacttgaaagtatttcgatttcttggctttatatatcttgtggaaaggac

SEQ ID NO: 5859 - DNA, 231 bp, synthetic construct; identical to SEQ ID NO: 5858
  misc_feature 1..231: note = promoter
  source 1..231: mol_type = other DNA

SEQ ID NO: 5860 - DNA, 231 bp, synthetic construct; identical to SEQ ID NO: 5858
  misc_feature 1..231: note = promoter
  source 1..231: mol_type = other DNA

SEQ ID NO: 5861 - DNA, 231 bp, synthetic construct
  misc_feature 1..231: note = promoter
  source 1..231: mol_type = other DNA
gagggcctatttcccatgattccttcatatttgcatatacgatacaaggctgttagagagataattggaattaatttgactgtaaacacaaagatattaggtgacgtagaaagtaataatttcttgggtagtttgcagttttaaaattatgttttaaaatggactatcatatgcttaccgtaacttgaaagtatttcgatttcttggctttatatatcttgtggaaaggac

SEQ ID NO: 5862 - DNA, 231 bp, synthetic construct
  misc_feature 1..231: note = promoter
  source 1..231: mol_type = other DNA
gagggcctatttcccatgattccttcatatttgcatatacgatacaaggctgttagagagataattggaattaatttgactgtaaacacaaagatattagttgacgtagaaagtaataatttcttgggtagtttgcagttttaaaattatgttttaaaatggactatcatatgcttaccgtaacttgaaagtatttcgatttcttggctttatatatcttgtggaaaggac

SEQ ID NO: 5863 - DNA, 231 bp, synthetic construct
  misc_feature 1..231: note = promoter
  source 1..231: mol_type = other DNA
gagggcctatttcccatgattccttcatatttgcatatacgatacaaggctgttagagagataattggaattaatttgactgtaaacacaaagatattagtagacgtagaaagtaataatttcttgggtagtttgcagttttaaaattatgttttaaaatggactatcatatgcttaccgtaacttgaaagtatttcgatttcttggctttatatatcttgtggaaaggac

SEQ ID NO: 5864 - DNA, 231 bp, synthetic construct
  misc_feature 1..231: note = promoter
  source 1..231: mol_type = other DNA
gagggcctatttcccatgattccttcatatttgcatatacgatacaaggctgttagagagataattggaattaatttgactgtaaacacaaagatattagtacacgtagaaagtaataatttcttgggtagtttgcagttttaaaattatgttttaaaatggactatcatatgcttaccgtaacttgaaagtatttcgatttcttggctttatatatcttgtggaaaggac

SEQ ID NO: 5865 - DNA, 231 bp, synthetic construct; identical to SEQ ID NO: 5864
  misc_feature 1..231: note = promoter
  source 1..231: mol_type = other DNA

SEQ ID NO: 5866 - DNA, 231 bp, synthetic construct
  misc_feature 1..231: note = promoter
  source 1..231: mol_type = other DNA
gagggcctatttcccatgattccttcatatttgcatatacgatacaaggctgttagagagataattggaattaatttgactgtaaacacaaagatattagtacaagtagaaagtaataatttcttgggtagtttgcagttttaaaattatgttttaaaatggactatcatatgcttaccgtaacttgaaagtatttcgatttcttggctttatatatcttgtggaaaggac

SEQ ID NO: 5867 - DNA, 231 bp, synthetic construct
  misc_feature 1..231: note = promoter
  source 1..231: mol_type = other DNA
gagggcctatttcccatgattccttcatatttgcatatacgatacaaggctgttagagagataattggaattaatttgactgtaaacacaaagatattagtacaaatagaaagtaataatttcttgggtagtttgcagttttaaaattatgttttaaaatggactatcatatgcttaccgtaacttgaaagtatttcgatttcttggctttatatatcttgtggaaaggac

SEQ ID NO: 5868 - DNA, 231 bp, synthetic construct
  misc_feature 1..231: note = promoter
  source 1..231: mol_type = other DNA
gagggcctatttcccatgattccttcatatttgcatatacgatacaaggctgttagagagataattggaattaatttgactgtaaacacaaagatattagtacaaaaagaaagtaataatttcttgggtagtttgcagttttaaaattatgttttaaaatggactatcatatgcttaccgtaacttgaaagtatttcgatttcttggctttatatatcttgtggaaaggac

SEQ ID NO: 5869 - DNA, 231 bp, synthetic construct
  misc_feature 1..231: note = promoter
  source 1..231: mol_type = other DNA
gagggcctatttcccatgattccttcatatttgcatatacgatacaaggctgttagagagataattggaattaatttgactgtaaacacaaagatattagtacaaaatgaaagtaataatttcttgggtagtttgcagttttaaaattatgttttaaaatggactatcatatgcttaccgtaacttgaaagtatttcgatttcttggctttatatatcttgtggaaaggac

SEQ ID NO: 5870 - DNA, 231 bp, synthetic construct
  misc_feature 1..231: note = promoter
  source 1..231: mol_type = other DNA
gagggcctatttcccatgattccttcatatttgcatatacgatacaaggctgttagagagataattggaattaatttgactgtaaacacaaagatattagtacaaaataaaagtaataatttcttgggtagtttgcagttttaaaattatgttttaaaatggactatcatatgcttaccgtaacttgaaagtatttcgatttcttggctttatatatcttgtggaaaggac

SEQ ID NO: 5871 - DNA, 231 bp, synthetic construct
  misc_feature 1..231: note = promoter
  source 1..231: mol_type = other DNA
gagggcctatttcccatgattccttcatatttgcatatacgatacaaggctgttagagagataattggaattaatttgactgtaaacacaaagatattagtacaaaatacaagtaataatttcttgggtagtttgcagttttaaaattatgttttaaaatggactatcatatgcttaccgtaacttgaaagtatttcgatttcttggctttatatatcttgtggaaaggac

SEQ ID NO: 5872 - DNA, 231 bp, synthetic construct
  misc_feature 1..231: note = promoter
  source 1..231: mol_type = other DNA
gagggcctatttcccatgattccttcatatttgcatatacgatacaaggctgttagagagataattggaattaatttgactgtaaacacaaagatattagtacaaaatacgagtaataatttcttgggtagtttgcagttttaaaattatgttttaaaatggactatcatatgcttaccgtaacttgaaagtatttcgatttcttggctttatatatcttgtggaaaggac

SEQ ID NO: 5873 - DNA, 231 bp, synthetic construct
  misc_feature 1..231: note = promoter
  source 1..231: mol_type = other DNA
gagggcctatttcccatgattccttcatatttgcatatacgatacaaggctgttagagagataattggaattaatttgactgtaaacacaaagatattagtacaaaatacgtgtaataatttcttgggtagtttgcagttttaaaattatgttttaaaatggactatcatatgcttaccgtaacttgaaagtatttcgatttcttggctttatatatcttgtggaaaggac

SEQ ID NO: 5874 - DNA, 231 bp, synthetic construct; identical to SEQ ID NO: 5873
  misc_feature 1..231: note = promoter
  source 1..231: mol_type = other DNA

SEQ ID NO: 5875 - DNA, 231 bp, synthetic construct
  misc_feature 1..231: note = promoter
  source 1..231: mol_type = other DNA
gagggcctatttcccatgattccttcatatttgcatatacgatacaaggctgttagagagataattggaattaatttgactgtaaacacaaagatattagtacaaaatacgtgaaataatttcttgggtagtttgcagttttaaaattatgttttaaaatggactatcatatgcttaccgtaacttgaaagtatttcgatttcttggctttatatatcttgtggaaaggac

SEQ ID NO: 5876 - DNA, 231 bp, synthetic construct
  misc_feature 1..231: note = promoter
  source 1..231: mol_type = other DNA
gagggcctatttcccatgattccttcatatttgcatatacgatacaaggctgttagagagataattggaattaatttgactgtaaacacaaagatattagtacaaaatacgtgacataatttcttgggtagtttgcagttttaaaattatgttttaaaatggactatcatatgcttaccgtaacttgaaagtatttcgatttcttggctttatatatcttgtggaaaggac

SEQ ID NO: 5877 - DNA, 231 bp, synthetic construct
  misc_feature 1..231: note = promoter
  source 1..231: mol_type = other DNA
gagggcctatttcccatgattccttcatatttgcatatacgatacaaggctgttagagagataattggaattaatttgactgtaaacacaaagatattagtacaaaatacgtgacgtaatttcttgggtagtttgcagttttaaaattatgttttaaaatggactatcatatgcttaccgtaacttgaaagtatttcgatttcttggctttatatatcttgtggaaaggac

SEQ ID NO: 5878 - DNA, 231 bp, synthetic construct; identical to SEQ ID NO: 5877
  misc_feature 1..231: note = promoter
  source 1..231: mol_type = other DNA

SEQ ID NO: 5879 - DNA, 231 bp, synthetic construct; identical to SEQ ID NO: 5877
  misc_feature 1..231: note = promoter
  source 1..231: mol_type = other DNA

SEQ ID NO: 5880 - DNA, 231 bp, synthetic construct
  misc_feature 1..231: note = promoter
  source 1..231: mol_type = other DNA
gagggcctatttcccatgattccttcatatttgcatatacgatacaaggctgttagagagataattggaattaatttgactgtaaacacaaagatattagtacaaaatacgtgacgtagtttcttgggtagtttgcagttttaaaattatgttttaaaatggactatcatatgcttaccgtaacttgaaagtatttcgatttcttggctttatatatcttgtggaaaggac

SEQ ID NO: 5881 - DNA, 231 bp, synthetic construct
  misc_feature 1..231: note = promoter
  source 1..231: mol_type = other DNA
gagggcctatttcccatgattccttcatatttgcatatacgatacaaggctgttagagagataattggaattaatttgactgtaaacacaaagatattagtacaaaatacgtgacgtagattcttgggtagtttgcagttttaaaattatgttttaaaatggactatcatatgcttaccgtaacttgaaagtatttcgatttcttggctttatatatcttgtggaaaggac

SEQ ID NO: 5882 - DNA, 231 bp, synthetic construct
  misc_feature 1..231: note = promoter
  source 1..231: mol_type = other DNA
gagggcctatttcccatgattccttcatatttgcatatacgatacaaggctgttagagagataattggaattaatttgactgtaaacacaaagatattagtacaaaatacgtgacgtagaatcttgggtagtttgcagttttaaaattatgttttaaaatggactatcatatgcttaccgtaacttgaaagtatttcgatttcttggctttatatatcttgtggaaaggac

SEQ ID NO: 5883 - DNA, 231 bp, synthetic construct
  misc_feature 1..231: note = promoter
  source 1..231: mol_type = other DNA
gagggcctatttcccatgattccttcatatttgcatatacgatacaaggctgttagagagataattggaattaatttgactgtaaacacaaagatattagtacaaaatacgtgacgtagaaacttgggtagtttgcagttttaaaattatgttttaaaatggactatcatatgcttaccgtaacttgaaagtatttcgatttcttggctttatatatcttgtggaaaggac

SEQ ID NO: 5884 - DNA, 231 bp, synthetic construct
  misc_feature 1..231: note = promoter
  source 1..231: mol_type = other DNA
gagggcctatttcccatgattccttcatatttgcatatacgatacaaggctgttagagagataattggaattaatttgactgtaaacacaaagatattagtacaaaatacgtgacgtagaaagttgggtagtttgcagttttaaaattatgttttaaaatggactatcatatgcttaccgtaacttgaaagtatttcgatttcttggctttatatatcttgtggaaaggac

SEQ ID NO: 5885 - DNA, 231 bp, synthetic construct; identical to SEQ ID NO: 5884
  misc_feature 1..231: note = promoter
  source 1..231: mol_type = other DNA

SEQ ID NO: 5886 - DNA, 231 bp, synthetic construct
  misc_feature 1..231: note = promoter
  source 1..231: mol_type = other DNA
gagggcctatttcccatgattccttcatatttgcatatacgatacaaggctgttagagagataattggaattaatttgactgtaaacacaaagatattagtacaaaatacgtgacgtagaaagtagggtagtttgcagttttaaaattatgttttaaaatggactatcatatgcttaccgtaacttgaaagtatttcgatttcttggctttatatatcttgtggaaaggac

SEQ ID NO: 5887 - DNA, 231 bp, synthetic construct
  misc_feature 1..231: note = promoter
  source 1..231: mol_type = other DNA
gagggcctatttcccatgattccttcatatttgcatatacgatacaaggctgttagagagataattggaattaatttgactgtaaacacaaagatattagtacaaaatacgtgacgtagaaagtaaggtagtttgcagttttaaaattatgttttaaaatggactatcatatgcttaccgtaacttgaaagtatttcgatttcttggctttatatatcttgtggaaaggac

SEQ ID NO: 5888 - DNA, 231 bp, synthetic construct
  misc_feature 1..231: note = promoter
  source 1..231: mol_type = other DNA
gagggcctatttcccatgattccttcatatttgcatatacgatacaaggctgttagagagataattggaattaatttgactgtaaacacaaagatattagtacaaaatacgtgacgtagaaagtaatgtagtttgcagttttaaaattatgttttaaaatggactatcatatgcttaccgtaacttgaaagtatttcgatttcttggctttatatatcttgtggaaaggac

SEQ ID NO: 5889 - DNA, 231 bp, synthetic construct
  misc_feature 1..231: note = promoter
  source 1..231: mol_type = other DNA
gagggcctatttcccatgattccttcatatttgcatatacgatacaaggctgttagagagataattggaattaatttgactgtaaacacaaagatattagtacaaaatacgtgacgtagaaagtaatatagtttgcagttttaaaattatgttttaaaatggactatcatatgcttaccgtaacttgaaagtatttcgatttcttggctttatatatcttgtggaaaggac

SEQ ID NO: 5890 - DNA, 231 bp, synthetic construct
  misc_feature 1..231: note = promoter
  source 1..231: mol_type = other DNA
gagggcctatttcccatgattccttcatatttgcatatacgatacaaggctgttagagagataattggaattaatttgactgtaaacacaaagatattagtacaaaatacgtgacgtagaaagtaataaagtttgcagttttaaaattatgttttaaaatggactatcatatgcttaccgtaacttgaaagtatttcgatttcttggctttatatatcttgtggaaaggac

SEQ ID NO: 5891 - DNA, 231 bp, synthetic construct
  misc_feature 1..231: note = promoter
  source 1..231: mol_type = other DNA
gagggcctatttcccatgattccttcatatttgcatatacgatacaaggctgttagagagataattggaattaatttgactgtaaacacaaagatattagtacaaaatacgtgacgtagaaagtaataatgtttgcagttttaaaattatgttttaaaatggactatcatatgcttaccgtaacttgaaagtatttcgatttcttggctttatatatcttgtggaaaggac

SEQ ID NO: 5892 - DNA, 231 bp, synthetic construct
  misc_feature 1..231: note = promoter
  source 1..231: mol_type = other DNA
gagggcctatttcccatgattccttcatatttgcatatacgatacaaggctgttagagagataattggaattaatttgactgtaaacacaaagatattagtacaaaatacgtgacgtagaaagtaataatttttgcagttttaaaattatgttttaaaatggactatcatatgcttaccgtaacttgaaagtatttcgatttcttggctttatatatcttgtggaaaggac

SEQ ID NO: 5893 - DNA, 231 bp, synthetic construct; identical to SEQ ID NO: 5892
  misc_feature 1..231: note = promoter
  source 1..231: mol_type = other DNA

SEQ ID NO: 5894 - DNA, 231 bp, synthetic construct
  misc_feature 1..231: note = promoter
  source 1..231: mol_type = other DNA
gagggcctatttcccatgattccttcatatttgcatatacgatacaaggctgttagagagataattggaattaatttgactgtaaacacaaagatattagtacaaaatacgtgacgtagaaagtaataatttctgcagttttaaaattatgttttaaaatggactatcatatgcttaccgtaacttgaaagtatttcgatttcttggctttatatatcttgtggaaaggac

SEQ ID NO: 5895 - DNA, 231 bp, synthetic construct; identical to SEQ ID NO: 5894
  misc_feature 1..231: note = promoter
  source 1..231: mol_type = other DNA

SEQ ID NO: 5896 - DNA, 231 bp, synthetic construct
  misc_feature 1..231: note = promoter
  source 1..231: mol_type = other DNA
gagggcctatttcccatgattccttcatatttgcatatacgatacaaggctgttagagagataattggaattaatttgactgtaaacacaaagatattagtacaaaatacgtgacgtagaaagtaataatttcttcagttttaaaattatgttttaaaatggactatcatatgcttaccgtaacttgaaagtatttcgatttcttggctttatatatcttgtggaaaggac

SEQ ID NO: 5897 - DNA, 231 bp, synthetic construct
  misc_feature 1..231: note = promoter
  source 1..231: mol_type = other DNA
gagggcctatttcccatgattccttcatatttgcatatacgatacaaggctgttagagagataattggaattaatttgactgtaaacacaaagatattagtacaaaatacgtgacgtagaaagtaataatttcttgagttttaaaattatgttttaaaatggactatcatatgcttaccgtaacttgaaagtatttcgatttcttggctttatatatcttgtggaaaggac

SEQ ID NO: 5898 - DNA, 231 bp, synthetic construct
  misc_feature 1..231: note = promoter
  source 1..231: mol_type = other DNA
gagggcctatttcccatgattccttcatatttgcatatacgatacaaggctgttagagagataattggaattaatttgactgtaaacacaaagatattagtacaaaatacgtgacgtagaaagtaataatttcttgggttttaaaattatgttttaaaatggactatcatatgcttaccgtaacttgaaagtatttcgatttcttggctttatatatcttgtggaaaggac

SEQ ID NO: 5899 - DNA, 231 bp, synthetic construct; identical to SEQ ID NO: 5898
  misc_feature 1..231: note = promoter
  source 1..231: mol_type = other DNA

SEQ ID NO: 5900 - DNA, 231 bp, synthetic construct; identical to SEQ ID NO: 5898
  misc_feature 1..231: note = promoter
  source 1..231: mol_type = other DNA

SEQ ID NO: 5901 - DNA, 231 bp, synthetic construct
  misc_feature 1..231: note = promoter
  source 1..231: mol_type = other DNA
gagggcctatttcccatgattccttcatatttgcatatacgatacaaggctgttagagagataattggaattaatttgactgtaaacacaaagatattagtacaaaatacgtgacgtagaaagtaataatttcttgggtattaaaattatgttttaaaatggactatcatatgcttaccgtaacttgaaagtatttcgatttcttggctttatatatcttgtggaaaggac

SEQ ID NO: 5902 - DNA, 231 bp, synthetic construct
  misc_feature 1..231: note = promoter
  source 1..231: mol_type = other DNA
gagggcctatttcccatgattccttcatatttgcatatacgatacaaggctgttagagagataattggaattaatttgactgtaaacacaaagatattagtacaaaatacgtgacgtagaaagtaataatttcttgggtagtaaaattatgttttaaaatggactatcatatgcttaccgtaacttgaaagtatttcgatttcttggctttatatatcttgtggaaaggac

SEQ ID NO: 5903 - DNA, 231 bp, synthetic construct; identical to SEQ ID NO: 5902
  misc_feature 1..231: note = promoter
  source 1..231: mol_type = other DNA

SEQ ID NO: 5904 - DNA, 231 bp, synthetic construct
  misc_feature 1..231: note = promoter
  source 1..231: mol_type = other DNA
gagggcctatttcccatgattccttcatatttgcatatacgatacaaggctgttagagagataattggaattaatttgactgtaaacacaaagatattagtacaaaatacgtgacgtagaaagtaataatttcttgggtagttaaattatgttttaaaatggactatcatatgcttaccgtaacttgaaagtatttcgatttcttggctttatatatcttgtggaaaggac

SEQ ID NO: 5905 - DNA, 231 bp, synthetic construct
  misc_feature 1..231: note = promoter
  source 1..231: mol_type = other DNA
gagggcctatttcccatgattccttcatatttgcatatacgatacaaggctgttagagagataattggaattaatttgactgtaaacacaaagatattagtacaaaatacgtgacgtagaaagtaataatttcttgggtagtttaattatgttttaaaatggactatcatatgcttaccgtaacttgaaagtatttcgatttcttggctttatatatcttgtggaaaggac

SEQ ID NO: 5906 - DNA, 231 bp, synthetic construct
  misc_feature 1..231: note = promoter
  source 1..231: mol_type = other DNA
gagggcctatttcccatgattccttcatatttgcatatacgatacaaggctgttagagagataattggaattaatttgactgtaaacacaaagatattagtacaaaatacgtgacgtagaaagtaataatttcttgggtagtttgattatgttttaaaatggactatcatatgcttaccgtaacttgaaagtatttcgatttcttggctttatatatcttgtggaaaggac

SEQ ID NO: 5907 - DNA, 231 bp, synthetic construct
  misc_feature 1..231: note = promoter
  source 1..231: mol_type = other DNA
gagggcctatttcccatgattccttcatatttgcatatacgatacaaggctgttagagagataattggaattaatttgactgtaaacacaaagatattagtacaaaatacgtgacgtagaaagtaataatttcttgggtagtttgcttatgttttaaaatggactatcatatgcttaccgtaacttgaaagtatttcgatttcttggctttatatatcttgtggaaaggac

SEQ ID NO: 5908 - DNA, 231 bp, synthetic construct
  misc_feature 1..231: note = promoter
  source 1..231: mol_type = other DNA
gagggcctatttcccatgattccttcatatttgcatatacgatacaaggctgttagagagataattggaattaatttgactgtaaacacaaagatattagtacaaaatacgtgacgtagaaagtaataatttcttgggtagtttgcatatgttttaaaatggactatcatatgcttaccgtaacttgaaagtatttcgatttcttggctttatatatcttgtggaaaggac

SEQ ID NO: 5909 - DNA, 231 bp, synthetic construct
  misc_feature 1..231: note = promoter
  source 1..231: mol_type = other DNA
gagggcctatttcccatgattccttcatatttgcatatacgatacaaggctgttagagagataattggaattaatttgactgtaaacacaaagatattagtacaaaatacgtgacgtagaaagtaataatttcttgggtagtttgcagatgttttaaaatggactatcatatgcttaccgtaacttgaaagtatttcgatttcttggctttatatatcttgtggaaaggac

SEQ ID NO: 5910 - DNA, 231 bp, synthetic construct
  misc_feature 1..231: note = promoter
  source 1..231: mol_type = other DNA
gagggcctatttcccatgattccttcatatttgcatatacgatacaaggctgttagagagataattggaattaatttgactgtaaacacaaagatattagtacaaaatacgtgacgtagaaagtaataatttcttgggtagtttgcagttgttttaaaatggactatcatatgcttaccgtaacttgaaagtatttcgatttcttggctttatatatcttgtggaaaggac

SEQ ID NO: 5911 - DNA, 231 bp, synthetic construct; identical to SEQ ID NO: 5910
  misc_feature 1..231: note = promoter
  source 1..231: mol_type = other DNA

SEQ ID NO: 5912 - DNA, 231 bp, synthetic construct
  misc_feature 1..231: note = promoter
  source 1..231: mol_type = other DNA
gagggcctatttcccatgattccttcatatttgcatatacgatacaaggctgttagagagataattggaattaatttgactgtaaacacaaagatattagtacaaaatacgtgacgtagaaagtaataatttcttgggtagtttgcagtttttttaaaatggactatcatatgcttaccgtaacttgaaagtatttcgatttcttggctttatatatcttgtggaaaggac

SEQ ID NO: 5913 - DNA, 231 bp, synthetic construct; identical to SEQ ID NO: 5912
  misc_feature 1..231: note = promoter
  source 1..231: mol_type = other DNA

SEQ ID NO: 5914 - DNA, 231 bp, synthetic construct
  misc_feature 1..231: note = promoter
  source 1..231: mol_type = other DNA
gagggcctatttcccatgattccttcatatttgcatatacgatacaaggctgttagagagataattggaattaatttgactgtaaacacaaagatattagtacaaaatacgtgacgtagaaagtaataatttcttgggtagtttgcagttttattaaaatggactatcatatgcttaccgtaacttgaaagtatttcgatttcttggctttatatatcttgtggaaaggac

SEQ ID NO: 5915 - DNA, 231 bp, synthetic construct
  misc_feature 1..231: note = promoter
  source 1..231: mol_type = other DNA
gagggcctatttcccatgattccttcatatttgcatatacgatacaaggctgttagagagataattggaattaatttgactgtaaacacaaagatattagtacaaaatacgtgacgtagaaagtaataatttcttgggtagtttgcagttttaataaaatggactatcatatgcttaccgtaacttgaaagtatttcgatttcttggctttatatatcttgtggaaaggac

SEQ ID NO: 5916 - DNA, 231 bp, synthetic construct
  misc_feature 1..231: note = promoter
  source 1..231: mol_type = other DNA
gagggcctatttcccatgattccttcatatttgcatatacgatacaaggctgttagagagataattggaattaatttgactgtaaacacaaagatattagtacaaaatacgtgacgtagaaagtaataatttcttgggtagtttgcagttttaaaaaaatggactatcatatgcttaccgtaacttgaaagtatttcgatttcttggctttatatatcttgtggaaaggac

SEQ ID NO: 5917 - DNA, 231 bp, synthetic construct; identical to SEQ ID NO: 5916
  misc_feature 1..231: note = promoter
  source 1..231: mol_type = other DNA

SEQ ID NO: 5918 - DNA, 231 bp, synthetic construct
  misc_feature 1..231: note = promoter
  source 1..231: mol_type = other DNA
gagggcctatttcccatgattccttcatatttgcatatacgatacaaggctgttagagagataattggaattaatttgactgtaaacacaaagatattagtacaaaatacgtgacgtagaaagtaataatttcttgggtagtttgcagttttaaaataatggactatcatatgcttaccgtaacttgaaagtatttcgatttcttggctttatatatcttgtggaaaggac

SEQ ID NO: 5919 - DNA, 231 bp, synthetic construct
  misc_feature 1..231: note = promoter
  source 1..231: mol_type = other DNA
gagggcctatttcccatgattccttcatatttgcatatacgatacaaggctgttagagagataattggaattaatttgactgtaaacacaaagatattagtacaaaatacgtgacgtagaaagtaataatttcttgggtagtttgcagttttaaaattatggactatcatatgcttaccgtaacttgaaagtatttcgatttcttggctttatatatcttgtggaaaggac

SEQ ID NO: 5920 - DNA, 231 bp, synthetic construct; identical to SEQ ID NO: 5919
  misc_feature 1..231: note = promoter
  source 1..231: mol_type = other DNA

SEQ ID NO: 5921 - DNA, 231 bp, synthetic construct; identical to SEQ ID NO: 5919
  misc_feature 1..231: note = promoter
  source 1..231: mol_type = other DNA

SEQ ID NO: 5922 - DNA, 231 bp, synthetic construct; identical to SEQ ID NO: 5919
  misc_feature 1..231: note = promoter
  source 1..231: mol_type = other DNA

SEQ ID NO: 5923 - DNA, 231 bp, synthetic construct
  misc_feature 1..231: note = promoter
  source 1..231: mol_type = other DNA
gagggcctatttcccatgattccttcatatttgcatatacgatacaaggctgttagagagataattggaattaatttgactgtaaacacaaagatattagtacaaaatacgtgacgtagaaagtaataatttcttgggtagtttgcagttttaaaattatgtactatcatatgcttaccgtaacttgaaagtatttcgatttcttggctttatatatcttgtggaaaggac

SEQ ID NO: 5924 - DNA, 231 bp, synthetic construct
  misc_feature 1..231: note = promoter
  source 1..231: mol_type = other DNA
gagggcctatttcccatgattccttcatatttgcatatacgatacaaggctgttagagagataattggaattaatttgactgtaaacacaaagatattagtacaaaatacgtgacgtagaaagtaataatttcttgggtagtttgcagttttaaaattatgttctatcatatgcttaccgtaacttgaaagtatttcgatttcttggctttatatatcttgtggaaaggac

SEQ ID NO: 5925 - DNA, 231 bp, synthetic construct
  misc_feature 1..231: note = promoter
  source 1..231: mol_type = other DNA
gagggcctatttcccatgattccttcatatttgcatatacgatacaaggctgttagagagataattggaattaatttgactgtaaacacaaagatattagtacaaaatacgtgacgtagaaagtaataatttcttgggtagtttgcagttttaaaattatgttttatcatatgcttaccgtaacttgaaagtatttcgatttcttggctttatatatcttgtggaaaggac

SEQ ID NO: 5926 - DNA, 231 bp, synthetic construct; identical to SEQ ID NO: 5925
  misc_feature 1..231: note = promoter
  source 1..231: mol_type = other DNA

SEQ ID NO: 5927 - DNA, 231 bp, synthetic construct; identical to SEQ ID NO: 5925
  misc_feature 1..231: note = promoter
  source 1..231: mol_type = other DNA

SEQ ID NO: 5928 - DNA, 231 bp, synthetic construct
  misc_feature 1..231: note = promoter
  source 1..231: mol_type = other DNA
gagggcctatttcccatgattccttcatatttgcatatacgatacaaggctgttagagagataattggaattaatttgactgtaaacacaaagatattagtacaaaatacgtgacgtagaaagtaataatttcttgggtagtttgcagttttaaaattatgttttaacatatgcttaccgtaacttgaaagtatttcgatttcttggctttatatatcttgtggaaaggac

SEQ ID NO: 5929 - DNA, 231 bp, synthetic construct
  misc_feature 1..231: note = promoter
  source 1..231: mol_type = other DNA
gagggcctatttcccatgattccttcatatttgcatatacgatacaaggctgttagagagataattggaattaatttgactgtaaacacaaagatattagtacaaaatacgtgacgtagaaagtaataatttcttgggtagtttgcagttttaaaattatgttttaaaatatgcttaccgtaacttgaaagtatttcgatttcttggctttatatatcttgtggaaaggac

SEQ ID NO: 5930 - DNA, 231 bp, synthetic construct; identical to SEQ ID NO: 5929
  misc_feature 1..231: note = promoter
  source 1..231: mol_type = other DNA

SEQ ID NO: 5931 - DNA, 231 bp, synthetic construct; identical to SEQ ID NO: 5929
  misc_feature 1..231: note = promoter
  source 1..231: mol_type = other DNA

SEQ ID NO: 5932 - DNA, 231 bp, synthetic construct
  misc_feature 1..231: note = promoter
  source 1..231: mol_type = other DNA
gagggcctatttcccatgattccttcatatttgcatatacgatacaaggctgttagagagataattggaattaatttgactgtaaacacaaagatattagtacaaaatacgtgacgtagaaagtaataatttcttgggtagtttgcagttttaaaattatgttttaaaatgtgcttaccgtaacttgaaagtatttcgatttcttggctttatatatcttgtggaaaggac

SEQ ID NO: 5933 - DNA, 231 bp, synthetic construct
  misc_feature 1..231: note = promoter
  source 1..231: mol_type = other DNA
gagggcctatttcccatgattccttcatatttgcatatacgatacaaggctgttagagagataattggaattaatttgactgtaaacacaaagatattagtacaaaatacgtgacgtagaaagtaataatttcttgggtagtttgcagttttaaaattatgttttaaaatgggcttaccgtaacttgaaagtatttcgatttcttggctttatatatcttgtggaaaggac

SEQ ID NO: 5934 - DNA, 231 bp, synthetic construct
  misc_feature 1..231: note = promoter
  source 1..231: mol_type = other DNA
gagggcctatttcccatgattccttcatatttgcatatacgatacaaggctgttagagagataattggaattaatttgactgtaaacacaaagatattagtacaaaatacgtgacgtagaaagtaataatttcttgggtagtttgcagttttaaaattatgttttaaaatggacttaccgtaacttgaaagtatttcgatttcttggctttatatatcttgtggaaaggac

SEQ ID NO: 5935 - DNA, 231 bp, synthetic construct; identical to SEQ ID NO: 5934
  misc_feature 1..231: note = promoter
  source 1..231: mol_type = other DNA

SEQ ID NO: 5936 - DNA, 231 bp, synthetic construct; identical to SEQ ID NO: 5934
  misc_feature 1..231: note = promoter
  source 1..231: mol_type = other DNA

SEQ ID NO: 5937 - DNA, 231 bp, synthetic construct
  misc_feature 1..231: note = promoter
  source 1..231: mol_type = other DNA
gagggcctatttcccatgattccttcatatttgcatatacgatacaaggctgttagagagataattggaattaatttgactgtaaacacaaagatattagtacaaaatacgtgacgtagaaagtaataatttcttgggtagtttgcagttttaaaattatgttttaaaatggactaaccgtaacttgaaagtatttcgatttcttggctttatatatcttgtggaaaggac

SEQ ID NO: 5938 - DNA, 231 bp, synthetic construct
  misc_feature 1..231: note = promoter
  source 1..231: mol_type = other DNA
gagggcctatttcccatgattccttcatatttgcatatacgatacaaggctgttagagagataattggaattaatttgactgtaaacacaaagatattagtacaaaatacgtgacgtagaaagtaataatttcttgggtagtttgcagttttaaaattatgttttaaaatggactatccgtaacttgaaagtatttcgatttcttggctttatatatcttgtggaaaggac

SEQ ID NO: 5939 - DNA, 231 bp, synthetic construct; identical to SEQ ID NO: 5938
  misc_feature 1..231: note = promoter
  source 1..231: mol_type = other DNA

SEQ ID NO: 5940 - DNA, 231 bp, synthetic construct
  misc_feature 1..231: note = promoter
  source 1..231: mol_type = other DNA
gagggcctatttcccatgattccttcatatttgcatatacgatacaaggctgttagagagataattggaattaatttgactgtaaacacaaagatattagtacaaaatacgtgacgtagaaagtaataatttcttgggtagtttgcagttttaaaattatgttttaaaatggactatcagtaacttgaaagtatttcgatttcttggctttatatatcttgtggaaaggac

SEQ ID NO: 5941 - DNA, 231 bp, synthetic construct
  misc_feature 1..231: note = promoter
  source 1..231: mol_type = other DNA
gagggcctatttcccatgattccttcatatttgcatatacgatacaaggctgttagagagataattggaattaatttgactgtaaacacaaagatattagtacaaaatacgtgacgtagaaagtaataatttcttgggtagtttgcagttttaaaattatgttttaaaatggactatcattaacttgaaagtatttcgatttcttggctttatatatcttgtggaaaggac

SEQ ID NO: 5942 - DNA, 231 bp, synthetic construct
  misc_feature 1..231: note = promoter
  source 1..231: mol_type = other DNA
gagggcctatttcccatgattccttcatatttgcatatacgatacaaggctgttagagagataattggaattaatttgactgtaaacacaaagatattagtacaaaatacgtgacgtagaaagtaataatttcttgggtagtttgcagttttaaaattatgttttaaaatggactatcataaacttgaaagtatttcgatttcttggctttatatatcttgtggaaaggac

SEQ ID NO: 5943 - DNA, 231 bp, synthetic construct
  misc_feature 1..231: note = promoter
  source 1..231: mol_type = other DNA
gagggcctatttcccatgattccttcatatttgcatatacgatacaaggctgttagagagataattggaattaatttgactgtaaacacaaagatattagtacaaaatacgtgacgtagaaagtaataatttcttgggtagtttgcagttttaaaattatgttttaaaatggactatcatatacttgaaagtatttcgatttcttggctttatatatcttgtggaaaggac

SEQ ID NO: 5944 - DNA, 231 bp, synthetic construct
  misc_feature 1..231: note = promoter
  source 1..231: mol_type = other DNA
gagggcctatttcccatgattccttcatatttgcatatacgatacaaggctgttagagagataattggaattaatttgactgtaaacacaaagatattagtacaaaatacgtgacgtagaaagtaataatttcttgggtagtttgcagttttaaaattatgttttaaaatggactatcatatgcttgaaagtatttcgatttcttggctttatatatcttgtggaaaggac

SEQ ID NO: 5945 - DNA, 231 bp, synthetic construct; identical to SEQ ID NO: 5944
  misc_feature 1..231: note = promoter
  source 1..231: mol_type = other DNA

SEQ ID NO: 5946 - DNA, 231 bp, synthetic construct; identical to SEQ ID NO: 5944
  misc_feature 1..231: note = promoter
  source 1..231: mol_type = other DNA

SEQ ID NO: 5947 - DNA, 231 bp, synthetic construct; identical to SEQ ID NO: 5944
  misc_feature 1..231: note = promoter
  source 1..231: mol_type = other DNA

SEQ ID NO: 5948 - DNA, 231 bp, synthetic construct
  misc_feature 1..231: note = promoter
  source 1..231: mol_type = other DNA
gagggcctatttcccatgattccttcatatttgcatatacgatacaaggctgttagagagataattggaattaatttgactgtaaacacaaagatattagtacaaaatacgtgacgtagaaagtaataatttcttgggtagtttgcagttttaaaattatgttttaaaatggactatcatatgcttaaaagtatttcgatttcttggctttatatatcttgtggaaaggac

SEQ ID NO: 5949 - DNA, 231 bp, synthetic construct
  misc_feature 1..231: note = promoter
  source 1..231: mol_type = other DNA
gagggcctatttcccatgattccttcatatttgcatatacgatacaaggctgttagagagataattggaattaatttgactgtaaacacaaagatattagtacaaaatacgtgacgtagaaagtaataatttcttgggtagtttgcagttttaaaattatgttttaaaatggactatcatatgcttacaagtatttcgatttcttggctttatatatcttgtggaaaggac

SEQ ID NO: 5950 - DNA, 231 bp, synthetic construct
  misc_feature 1..231: note = promoter
  source 1..231: mol_type = other DNA
gagggcctatttcccatgattccttcatatttgcatatacgatacaaggctgttagagagataattggaattaatttgactgtaaacacaaagatattagtacaaaatacgtgacgtagaaagtaataatttcttgggtagtttgcagttttaaaattatgttttaaaatggactatcatatgcttaccagtatttcgatttcttggctttatatatcttgtggaaaggac

SEQ ID NO: 5951 - DNA, 231 bp, synthetic construct
  misc_feature 1..231: note = promoter
  source 1..231: mol_type = other DNA
gagggcctatttcccatgattccttcatatttgcatatacgatacaaggctgttagagagataattggaattaatttgactgtaaacacaaagatattagtacaaaatacgtgacgtagaaagtaataatttcttgggtagtttgcagttttaaaattatgttttaaaatggactatcatatgcttaccggtatttcgatttcttggctttatatatcttgtggaaaggac

SEQ ID NO: 5952 - DNA, 231 bp, synthetic construct
  misc_feature 1..231: note = promoter
  source 1..231: mol_type = other DNA
gagggcctatttcccatgattccttcatatttgcatatacgatacaaggctgttagagagataattggaattaatttgactgtaaacacaaagatattagtacaaaatacgtgacgtagaaagtaataatttcttgggtagtttgcagttttaaaattatgttttaaaatggactatcatatgcttaccgttatttcgatttcttggctttatatatcttgtggaaaggac

SEQ ID NO: 5953 - DNA, 231 bp, synthetic construct
  misc_feature 1..231: note = promoter
  source 1..231: mol_type = other DNA
gagggcctatttcccatgattccttcatatttgcatatacgatacaaggctgttagagagataattggaattaatttgactgtaaacacaaagatattagtacaaaatacgtgacgtagaaagtaataatttcttgggtagtttgcagttttaaaattatgttttaaaatggactatcatatgcttaccgtaatttcgatttcttggctttatatatcttgtggaaaggac

SEQ ID NO: 5954 - DNA, 231 bp, synthetic construct; identical to SEQ ID NO: 5953
  misc_feature 1..231: note = promoter
  source 1..231: mol_type = other DNA

SEQ ID NO: 5955 - DNA, 231 bp, synthetic construct
  misc_feature 1..231: note = promoter
  source 1..231: mol_type = other DNA
gagggcctatttcccatgattccttcatatttgcatatacgatacaaggctgttagagagataattggaattaatttgactgtaaacacaaagatattagtacaaaatacgtgacgtagaaagtaataatttcttgggtagtttgcagttttaaaattatgttttaaaatggactatcatatgcttaccgtaacttcgatttcttggctttatatatcttgtggaaaggac

SEQ ID NO: 5956 - DNA, 231 bp, synthetic construct; identical to SEQ ID NO: 5955
  misc_feature 1..231: note = promoter
  source 1..231: mol_type = other DNA

SEQ ID NO: 5957 - DNA, 231 bp, synthetic construct; identical to SEQ ID NO: 5955
  misc_feature 1..231: note = promoter
  source 1..231: mol_type = other DNA

SEQ ID NO: 5958 - DNA, 231 bp, synthetic construct
  misc_feature 1..231: note = promoter
  source 1..231: mol_type = other DNA
gagggcctatttcccatgattccttcatatttgcatatacgatacaaggctgttagagagataattggaattaatttgactgtaaacacaaagatattagtacaaaatacgtgacgtagaaagtaataatttcttgggtagtttgcagttttaaaattatgttttaaaatggactatcatatgcttaccgtaacttggatttcttggctttatatatcttgtggaaaggac

SEQ ID NO: 5959 - DNA, 231 bp, synthetic construct
  misc_feature 1..231: note = promoter
  source 1..231: mol_type = other DNA
gagggcctatttcccatgattccttcatatttgcatatacgatacaaggctgttagagagataattggaattaatttgactgtaaacacaaagatattagtacaaaatacgtgacgtagaaagtaataatttcttgggtagtttgcagttttaaaattatgttttaaaatggactatcatatgcttaccgtaacttgaatttcttggctttatatatcttgtggaaaggac

SEQ ID NO: 5960 - DNA, 231 bp, synthetic construct; identical to SEQ ID NO: 5959
  misc_feature 1..231: note = promoter
  source 1..231: mol_type = other DNA

SEQ ID NO: 5961 - DNA, 231 bp, synthetic construct
  misc_feature 1..231: note = promoter
  source 1..231: mol_type = other DNA
gagggcctatttcccatgattccttcatatttgcatatacgatacaaggctgttagagagataattggaattaatttgactgtaaacacaaagatattagtacaaaatacgtgacgtagaaagtaataatttcttgggtagtttgcagttttaaaattatgttttaaaatggactatcatatgcttaccgtaacttgaaattcttggctttatatatcttgtggaaaggac

SEQ ID NO: 5962 - DNA, 231 bp, synthetic construct
  misc_feature 1..231: note = promoter
  source 1..231: mol_type = other DNA
gagggcctatttcccatgattccttcatatttgcatatacgatacaaggctgttagagagataattggaattaatttgactgtaaacacaaagatattagtacaaaatacgtgacgtagaaagtaataatttcttgggtagtttgcagttttaaaattatgttttaaaatggactatcatatgcttaccgtaacttgaaagtcttggctttatatatcttgtggaaaggac

SEQ ID NO: 5963 - DNA, 231 bp, synthetic construct; identical to SEQ ID NO: 5962
  misc_feature 1..231: note = promoter
  source 1..231: mol_type = other DNA

SEQ ID NO: 5964 - DNA, 231 bp, synthetic construct
  misc_feature 1..231: note = promoter
  source 1..231: mol_type = other DNA
gagggcctatttcccatgattccttcatatttgcatatacgatacaaggctgttagagagataattggaattaatttgactgtaaacacaaagatattagtacaaaatacgtgacgtagaaagtaataatttcttgggtagtttgcagttttaaaattatgttttaaaatggactatcatatgcttaccgtaacttgaaagtattggctttatatatcttgtggaaaggac

SEQ ID NO: 5965 - DNA, 231 bp, synthetic construct; identical to SEQ ID NO: 5964
  misc_feature 1..231: note = promoter
  source 1..231: mol_type = other DNA

SEQ ID NO: 5966 - DNA, 231 bp, synthetic construct; identical to SEQ ID NO: 5964
  misc_feature 1..231: note = promoter
  source 1..231: mol_type = other DNA

SEQ ID NO: 5967 - DNA, 231 bp, synthetic construct
  misc_feature 1..231: note = promoter
  source 1..231: mol_type = other DNA
gagggcctatttcccatgattccttcatatttgcatatacgatacaaggctgttagagagataattggaattaatttgactgtaaacacaaagatattagtacaaaatacgtgacgtagaaagtaataatttcttgggtagtttgcagttttaaaattatgttttaaaatggactatcatatgcttaccgtaacttgaaagtatttgctttatatatcttgtggaaaggac

SEQ ID NO: 5968 - DNA, 231 bp, synthetic construct
  misc_feature 1..231: note = promoter
  source 1..231: mol_type = other DNA
gagggcctatttcccatgattccttcatatttgcatatacgatacaaggctgttagagagataattggaattaatttgactgtaaacacaaagatattagtacaaaatacgtgacgtagaaagtaataatttcttgggtagtttgcagttttaaaattatgttttaaaatggactatcatatgcttaccgtaacttgaaagtatttcctttatatatcttgtggaaaggac

SEQ ID NO: 5969 - DNA, 231 bp, synthetic construct
  misc_feature 1..231: note = promoter
  source 1..231: mol_type = other DNA
gagggcctatttcccatgattccttcatatttgcatatacgatacaaggctgttagagagataattggaattaatttgactgtaaacacaaagatattagtacaaaatacgtgacgtagaaagtaataatttcttgggtagtttgcagttttaaaattatgttttaaaatggactatcatatgcttaccgtaacttgaaagtatttcgtttatatatcttgtggaaaggac

SEQ ID NO: 5970 - DNA, 231 bp, synthetic construct
  misc_feature 1..231: note = promoter
  source 1..231: mol_type = other DNA
gagggcctatttcccatgattccttcatatttgcatatacgatacaaggctgttagagagataattggaattaatttgactgtaaacacaaagatattagtacaaaatacgtgacgtagaaagtaataatttcttgggtagtttgcagttttaaaattatgttttaaaatggactatcatatgcttaccgtaacttgaaagtatttcgattatatatcttgtggaaaggac

SEQ ID NO: 5971 - DNA, 231 bp, synthetic construct; identical to SEQ ID NO: 5970
  misc_feature 1..231: note = promoter
  source 1..231: mol_type = other DNA

SEQ ID NO: 5972 - DNA, 231 bp, synthetic construct; identical to SEQ ID NO: 5970
  misc_feature 1..231: note = promoter
  source 1..231: mol_type = other DNA

SEQ ID NO: 5973 - DNA, 231 bp, synthetic construct
  misc_feature 1..231: note = promoter
  source 1..231: mol_type = other DNA
gagggcctatttcccatgattccttcatatttgcatatacgatacaaggctgttagagagataattggaattaatttgactgtaaacacaaagatattagtacaaaatacgtgacgtagaaagtaataatttcttgggtagtttgcagttttaaaattatgttttaaaatggactatcatatgcttaccgtaacttgaaagtatttcgattttatatcttgtggaaaggac

SEQ ID NO: 5974 - DNA, 231 bp, synthetic construct
  misc_feature 1..231: note = promoter
  source 1..231: mol_type = other DNA
gagggcctatttcccatgattccttcatatttgcatatacgatacaaggctgttagagagataattggaattaatttgactgtaaacacaaagatattagtacaaaatacgtgacgtagaaagtaataatttcttgggtagtttgcagttttaaaattatgttttaaaatggactatcatatgcttaccgtaacttgaaagtatttcgatttcatatcttgtggaaaggac

SEQ ID NO: 5975 - DNA, 231 bp, synthetic construct
  misc_feature 1..231: note = promoter
  source 1..231: mol_type = other DNA
gagggcctatttcccatgattccttcatatttgcatatacgatacaaggctgttagagagataattggaattaatttgactgtaaacacaaagatattagtacaaaatacgtgacgtagaaagtaataatttcttgggtagtttgcagttttaaaattatgttttaaaatggactatcatatgcttaccgtaacttgaaagtatttcgatttcttatcttgtggaaaggac

SEQ ID NO: 5976 - DNA, 231 bp, synthetic construct; identical to SEQ ID NO: 5975
  misc_feature 1..231: note = promoter
  source 1..231: mol_type = other DNA

SEQ ID NO: 5977 - DNA, 231 bp, synthetic construct
  misc_feature 1..231: note = promoter
  source 1..231: mol_type = other DNA
gagggcctatttcccatgattccttcatatttgcatatacgatacaaggctgttagagagataattggaattaatttgactgtaaacacaaagatattagtacaaaatacgtgacgtagaaagtaataatttcttgggtagtttgcagttttaaaattatgttttaaaatggactatcatatgcttaccgtaacttgaaagtatttcgatttcttgtcttgtggaaaggac

SEQ ID NO: 5978 - DNA, 231 bp, synthetic construct
  misc_feature 1..231: note = promoter
  source 1..231: mol_type = other DNA
gagggcctatttcccatgattccttcatatttgcatatacgatacaaggctgttagagagataattggaattaatttgactgtaaacacaaagatattagtacaaaatacgtgacgtagaaagtaataatttcttgggtagtttgcagttttaaaattatgttttaaaatggactatcatatgcttaccgtaacttgaaagtatttcgatttcttggcttgtggaaaggac

SEQ ID NO: 5979 - DNA, 231 bp, synthetic construct; identical to SEQ ID NO: 5978
  misc_feature 1..231: note = promoter
  source 1..231: mol_type = other DNA

SEQ ID NO: 5980 - DNA, 231 bp, synthetic construct; identical to SEQ ID NO: 5978
  misc_feature 1..231: note = promoter
  source 1..231: mol_type = other DNA

SEQ ID NO: 5981 - DNA, 231 bp, synthetic construct; identical to SEQ ID NO: 5978
  misc_feature 1..231: note = promoter
  source 1..231: mol_type = other DNA

SEQ ID NO: 5982 - DNA, 231 bp, synthetic construct
  misc_feature 1..231: note = promoter
  source 1..231: mol_type = other DNA
gagggcctatttcccatgattccttcatatttgcatatacgatacaaggctgttagagagataattggaattaatttgactgtaaacacaaagatattagtacaaaatacgtgacgtagaaagtaataatttcttgggtagtttgcagttttaaaattatgttttaaaatggactatcatatgcttaccgtaacttgaaagtatttcgatttcttggcttttggaaaggac

SEQ ID NO: 5983 - DNA, 231 bp, synthetic construct
  misc_feature 1..231: note = promoter
  source 1..231: mol_type = other DNA
gagggcctatttcccatgattccttcatatttgcatatacgatacaaggctgttagagagataattggaattaatttgactgtaaacacaaagatattagtacaaaatacgtgacgtagaaagtaataatttcttgggtagtttgcagttttaaaattatgttttaaaatggactatcatatgcttaccgtaacttgaaagtatttcgatttcttggctttaggaaaggac

SEQ ID NO: 5984 - DNA, 231 bp, synthetic construct
  misc_feature 1..231: note = promoter
  source 1..231: mol_type = other DNA
gagggcctatttcccatgattccttcatatttgcatatacgatacaaggctgttagagagataattggaattaatttgactgtaaacacaaagatattagtacaaaatacgtgacgtagaaagtaataatttcttgggtagtttgcagttttaaaattatgttttaaaatggactatcatatgcttaccgtaacttgaaagtatttcgatttcttggctttatgaaaggac

SEQ ID NO: 5985 - DNA, 231 bp, synthetic construct
  misc_feature 1..231: note = promoter
  source 1..231: mol_type = other DNA
gagggcctatttcccatgattccttcatatttgcatatacgatacaaggctgttagagagataattggaattaatttgactgtaaacacaaagatattagtacaaaatacgtgacgtagaaagtaataatttcttgggtagtttgcagttttaaaattatgttttaaaatggactatcatatgcttaccgtaacttgaaagtatttcgatttcttggctttataaaaggac

SEQ ID NO: 5986 - DNA, 231 bp, synthetic construct
  misc_feature 1..231: note = promoter
  source 1..231: mol_type = other DNA
gagggcctatttcccatgattccttcatatttgcatatacgatacaaggctgttagagagataattggaattaatttgactgtaaacacaaagatattagtacaaaatacgtgacgtagaaagtaataatttcttgggtagtttgcagttttaaaattatgttttaaaatggactatcatatgcttaccgtaacttgaaagtatttcgatttcttggctttatataaggac

SEQ ID NO: 5987 - DNA, 231 bp, synthetic construct; identical to SEQ ID NO: 5986
  misc_feature 1..231: note = promoter
  source 1..231: mol_type = other DNA

SEQ ID NO: 5988 - DNA, 231 bp, synthetic construct
  misc_feature 1..231: note = promoter
  source 1..231: mol_type = other DNA
gagggcctatttcccatgattccttcatatttgcatatacgatacaaggctgttagagagataattggaattaatttgactgtaaacacaaagatattagtacaaaatacgtgacgtagaaagtaataatttcttgggtagtttgcagttttaaaattatgttttaaaatggactatcatatgcttaccgtaacttgaaagtatttcgatttcttggctttatatatggac

SEQ ID NO: 5989 - DNA, 231 bp, synthetic construct
  misc_feature 1..231: note = promoter
  source 1..231: mol_type = other DNA
gagggcctatttcccatgattccttcatatttgcatatacgatacaaggctgttagagagataattggaattaatttgactgtaaacacaaagatattagtacaaaatacgtgacgtagaaagtaataatttcttgggtagtttgcagttttaaaattatgttttaaaatggactatcatatgcttaccgtaacttgaaagtatttcgatttcttggctttatatatcgac

SEQ ID NO: 5990 - DNA, 231 bp, synthetic construct
  misc_feature 1..231: note = promoter
  source 1..231: mol_type = other DNA
gagggcctatttcccatgattccttcatatttgcatatacgatacaaggctgttagagagataattggaattaatttgactgtaaacacaaagatattagtacaaaatacgtgacgtagaaagtaataatttcttgggtagtttgcagttttaaaattatgttttaaaatggactatcatatgcttaccgtaacttgaaagtatttcgatttcttggctttatatatctac

SEQ ID NO: 5991 - DNA, 231 bp, synthetic construct
  misc_feature 1..231: note = promoter
  source 1..231: mol_type = other DNA
gagggcctatttcccatgattccttcatatttgcatatacgatacaaggctgttagagagataattggaattaatttgactgtaaacacaaagatattagtacaaaatacgtgacgtagaaagtaataatttcttgggtagtttgcagttttaaaattatgttttaaaatggactatcatatgcttaccgtaacttgaaagtatttcgatttcttggctttatatatcttc

SEQ ID NO: 5992 - DNA, 231 bp, synthetic construct
  misc_feature 1..231: note = promoter
  source 1..231: mol_type = other DNA
gagggcctatttcccatgattccttcatatttgcatatacgatacaaggctgttagagagataattggaattaatttgactgtaaacacaaagatattagtacaaaatacgtgacgtagaaagtaataatttcttgggtagtttgcagttttaaaattatgttttaaaatggactatcatatgcttaccgtaacttgaaagtatttcgatttcttggctttatatatcttg

SEQ ID NO: 5993 - DNA, 232 bp, synthetic construct
  misc_feature 1..232: note = promoter
  source 1..232: mol_type = other DNA
gagggcctatttcccatgattccttcatatttgcatatacgatacaaggctgttagagagataattggaattaatttgactgtaaacacaaagatattagtacaaaatacgtgacgtagaaagtaataatttcttgggtagtttgcagttttaaaattatgttttaaaatggactatcatatgcttaccgtaacttgaaagtatttcgatttcttggctttatatatcttgt

SEQ ID NO: 5994 - DNA, 233 bp, synthetic construct
  misc_feature 1..233: note = promoter
  source 1..233: mol_type = other DNA
gagggcctatttcccatgattccttcatatttgcatatacgatacaaggctgttagagagataattggaattaatttgactgtaaacacaaagatattagtacaaaatacgtgacgtagaaagtaataatttcttgggtagtttgcagttttaaaattatgttttaaaatggactatcatatgcttaccgtaacttgaaagtatttcgatttcttggctttatatatcttgtg

SEQ ID NO: 5995 - DNA, 234 bp, synthetic construct
  misc_feature 1..234: note = promoter
  source 1..234: mol_type = other DNA
gagggcctatttcccatgattccttcatatttgcatatacgatacaaggctgttagagagataattggaattaatttgactgtaaacacaaagatattagtacaaaatacgtgacgtagaaagtaataatttcttgggtagtttgcagttttaaaattatgttttaaaatggactatcatatgcttaccgtaacttgaaagtatttcgatttcttggctttatatatcttgtgg

SEQ ID NO: 5996 - DNA, 235 bp, synthetic construct
  misc_feature 1..235: note = promoter
  source 1..235: mol_type = other DNA
gagggcctatttcccatgattccttcatatttgcatatacgatacaaggctgttagagagataattggaattaatttgactgtaaacacaaagatattagtacaaaatacgtgacgtagaaagtaataatttcttgggtagtttgcagttttaaaattatgttttaaaatggactatcatatgcttaccgtaacttgaaagtatttcgatttcttggctttatatatcttgtgga

SEQ ID NO: 5997 - DNA, 236 bp, synthetic construct; identical to SEQ ID NO: 5756
  misc_feature 1..236: note = promoter
  source 1..236: mol_type = other DNA

SEQ ID NO: 5998 - DNA, 237 bp, synthetic construct; identical to SEQ ID NO: 5757
  misc_feature 1..237: note = promoter
  source 1..237: mol_type = other DNA

SEQ ID NO: 5999 - DNA, 238 bp, synthetic construct; identical to SEQ ID NO: 5758
  misc_feature 1..238: note = promoter
  source 1..238: mol_type = other DNA

SEQ ID NO: 6000 - DNA, 239 bp, synthetic construct; identical to SEQ ID NO: 5518
  misc_feature 1..239: note = promoter
  source 1..239: mol_type = other DNA

SEQ ID NO: 6001 - DNA, 240 bp, synthetic construct; identical to SEQ ID NO: 5278
  misc_feature 1..240: note = promoter
  source 1..240: mol_type = other DNA

SEQ ID NO: 6002 - DNA, 229 bp, synthetic construct; identical to SEQ ID NO: 3606
  misc_feature 1..229: note = promoter
  source 1..229: mol_type = other DNA

SEQ ID NO: 6003 - DNA, 229 bp, synthetic construct
  misc_feature 1..229: note = promoter
  source 1..229: mol_type = other DNA
aagggcctatttcccatggttccttcatatttgcatagaggatgcaagactgtcagagggacgattgcaattaacttggccataaacacaaacctattggcacaaactatgtgatatagaaagttatgattgttcaagaagtttgtaatttaaaaaaaggaccactatgtacttaccgtaactgaaaagtctttcgttttctcaactttatatatcttccggaaaggac

SEQ ID NO: 6004 - DNA, 229 bp, synthetic construct
  misc_feature 1..229: note = promoter
  source 1..229: mol_type = other DNA
cagggcctatttcccatggttccttcatatttgcatagaggatgcaagactgtcagagggacgattgcaattaacttggccataaacacaaacctattggcacaaactatgtgatatagaaagttatgattgttcaagaagtttgtaatttaaaaaaaggaccactatgtacttaccgtaactgaaaagtctttcgttttctcaactttatatatcttccggaaaggac

SEQ ID NO: 6005 - DNA, 229 bp, synthetic construct
  misc_feature 1..229: note = promoter
  source 1..229: mol_type = other DNA
tagggcctatttcccatggttccttcatatttgcatagaggatgcaagactgtcagagggacgattgcaattaacttggccataaacacaaacctattggcacaaactatgtgatatagaaagttatgattgttcaagaagtttgtaatttaaaaaaaggaccactatgtacttaccgtaactgaaaagtctttcgttttctcaactttatatatcttccggaaaggac

SEQ ID NO: 6006 - DNA, 229 bp, synthetic construct
  misc_feature 1..229: note = promoter
  source 1..229: mol_type = other DNA
gcgggcctatttcccatggttccttcatatttgcatagaggatgcaagactgtcagagggacgattgcaattaacttggccataaacacaaacctattggcacaaactatgtgatatagaaagttatgattgttcaagaagtttgtaatttaaaaaaaggaccactatgtacttaccgtaactgaaaagtctttcgttttctcaactttatatatcttccggaaaggac

SEQ ID NO: 6007 - DNA, 229 bp, synthetic construct
  misc_feature 1..229: note = promoter
  source 1..229: mol_type = other DNA
gggggcctatttcccatggttccttcatatttgcatagaggatgcaagactgtcagagggacgattgcaattaacttggccataaacacaaacctattggcacaaactatgtgatatagaaagttatgattgttcaagaagtttgtaatttaaaaaaaggaccactatgtacttaccgtaactgaaaagtctttcgttttctcaactttatatatcttccggaaaggac

SEQ ID NO: 6008 - DNA, 229 bp, synthetic construct
  misc_feature 1..229: note = promoter
  source 1..229: mol_type = other DNA
gtgggcctatttcccatggttccttcatatttgcatagaggatgcaagactgtcagagggacgattgcaattaacttggccataaacacaaacctattggcacaaactatgtgatatagaaagttatgattgttcaagaagtttgtaatttaaaaaaaggaccactatgtacttaccgtaactgaaaagtctttcgttttctcaactttatatatcttccggaaaggac

SEQ ID NO: 6009 - DNA, 229 bp, synthetic construct
  misc_feature 1..229: note = promoter
  source 1..229: mol_type = other DNA
gaaggcctatttcccatggttccttcatatttgcatagaggatgcaagactgtcagagggacgattgcaattaacttggccataaacacaaacctattggcacaaactatgtgatatagaaagttatgattgttcaagaagtttgtaatttaaaaaaaggaccactatgtacttaccgtaactgaaaagtctttcgttttctcaactttatatatcttccggaaaggac

SEQ ID NO: 6010 - DNA, 229 bp, synthetic construct
  misc_feature 1..229: note = promoter
  source 1..229: mol_type = other DNA
gacggcctatttcccatggttccttcatatttgcatagaggatgcaagactgtcagagggacgattgcaattaacttggccataaacacaaacctattggcacaaactatgtgatatagaaagttatgattgttcaagaagtttgtaatttaaaaaaaggaccactatgtacttaccgtaactgaaaagtctttcgttttctcaactttatatatcttccggaaaggac

SEQ ID NO: 6011 - DNA, 229 bp, synthetic construct
  misc_feature 1..229: note = promoter
  source 1..229: mol_type = other DNA
gatggcctatttcccatggttccttcatatttgcatagaggatgcaagactgtcagagggacgattgcaattaacttggccataaacacaaacctattggcacaaactatgtgatatagaaagttatgattgttcaagaagtttgtaatttaaaaaaaggaccactatgtacttaccgtaactgaaaagtctttcgttttctcaactttatatatcttccggaaaggac

SEQ ID NO: 6012 - DNA, 229 bp, synthetic construct
  misc_feature 1..229: note = promoter
  source 1..229: mol_type = other DNA
gagagcctatttcccatggttccttcatatttgcatagaggatgcaagactgtcagagggacgattgcaattaacttggccataaacacaaacctattggcacaaactatgtgatatagaaagttatgattgttcaagaagtttgtaatttaaaaaaaggaccactatgtacttaccgtaactgaaaagtctttcgttttctcaactttatatatcttccggaaaggac

SEQ ID NO: 6013 - DNA, 229 bp, synthetic construct
  misc_feature 1..229: note = promoter
  source 1..229: mol_type = other DNA
gagcgcctatttcccatggttccttcatatttgcatagaggatgcaagactgtcagagggacgattgcaattaacttggccataaacacaaacctattggcacaaactatgtgatatagaaagttatgattgttcaagaagtttgtaatttaaaaaaaggaccactatgtacttaccgtaactgaaaagtctttcgttttctcaactttatatatcttccggaaaggac

SEQ ID NO: 6014 - DNA, 229 bp, synthetic construct
  misc_feature 1..229: note = promoter
  source 1..229: mol_type = other DNA
gagtgcctatttcccatggttccttcatatttgcatagaggatgcaagactgtcagagggacgattgcaattaacttggccataaacacaaacctattggcacaaactatgtgatatagaaagttatgattgttcaagaagtttgtaatttaaaaaaaggaccactatgtacttaccgtaactgaaaagtctttcgttttctcaactttatatatcttccggaaaggac

SEQ ID NO: 6015 - DNA, 229 bp, synthetic construct
  misc_feature 1..229: note = promoter
  source 1..229: mol_type = other DNA
gaggacctatttcccatggttccttcatatttgcatagaggatgcaagactgtcagagggacgattgcaattaacttggccataaacacaaacctattggcacaaactatgtgatatagaaagttatgattgttcaagaagtttgtaatttaaaaaaaggaccactatgtacttaccgtaactgaaaagtctttcgttttctcaactttatatatcttccggaaaggac

SEQ ID NO: 6016 - DNA, 229 bp, synthetic construct
  misc_feature 1..229: note = promoter
  source 1..229: mol_type = other DNA
gaggccctatttcccatggttccttcatatttgcatagaggatgcaagactgtcagagggacgattgcaattaacttggccataaacacaaacctattggcacaaactatgtgatatagaaagttatgattgttcaagaagtttgtaatttaaaaaaaggaccactatgtacttaccgtaactgaaaagtctttcgttttctcaactttatatatcttccggaaaggac

SEQ ID NO: 6017 - DNA, 229 bp, synthetic construct
  misc_feature 1..229: note = promoter
  source 1..229: mol_type = other DNA
gaggtcctatttcccatggttccttcatatttgcatagaggatgcaagactgtcagagggacgattgcaattaacttggccataaacacaaacctattggcacaaactatgtgatatagaaagttatgattgttcaagaagtttgtaatttaaaaaaaggaccactatgtacttaccgtaactgaaaagtctttcgttttctcaactttatatatcttccggaaaggac

SEQ ID NO: 6018 - DNA, 229 bp, synthetic construct
  misc_feature 1..229: note = promoter
  source 1..229: mol_type = other DNA
gagggactatttcccatggttccttcatatttgcatagaggatgcaagactgtcagagggacgattgcaattaacttggccataaacacaaacctattggcacaaactatgtgatatagaaagttatgattgttcaagaagtttgtaatttaaaaaaaggaccactatgtacttaccgtaactgaaaagtctttcgttttctcaactttatatatcttccggaaaggac

SEQ ID NO: 6019 - DNA, 229 bp, synthetic construct
  misc_feature 1..229: note = promoter
  source 1..229: mol_type = other DNA
gaggggctatttcccatggttccttcatatttgcatagaggatgcaagactgtcagagggacgattgcaattaacttggccataaacacaaacctattggcacaaactatgtgatatagaaagttatgattgttcaagaagtttgtaatttaaaaaaaggaccactatgtacttaccgtaactgaaaagtctttcgttttctcaactttatatatcttccggaaaggac

SEQ ID NO: 6020 - DNA, 229 bp, synthetic construct
  misc_feature 1..229: note = promoter
  source 1..229: mol_type = other DNA
gagggtctatttcccatggttccttcatatttgcatagaggatgcaagactgtcagagggacgattgcaattaacttggccataaacacaaacctattggcacaaactatgtgatatagaaagttatgattgttcaagaagtttgtaatttaaaaaaaggaccactatgtacttaccgtaactgaaaagtctttcgttttctcaactttatatatcttccggaaaggac

SEQ ID NO: 6021 - DNA, 229 bp, synthetic construct
  misc_feature 1..229: note = promoter
  source 1..229: mol_type = other DNA
gagggcatatttcccatggttccttcatatttgcatagaggatgcaagactgtcagagggacgattgcaattaacttggccataaacacaaacctattggcacaaactatgtgatatagaaagttatgattgttcaagaagtttgtaatttaaaaaaaggaccactatgtacttaccgtaactgaaaagtctttcgttttctcaactttatatatcttccggaaaggac

SEQ ID NO: 6022 - DNA, 229 bp, synthetic construct
  misc_feature 1..229: note = promoter
  source 1..229: mol_type = other DNA
gagggcgtatttcccatggttccttcatatttgcatagaggatgcaagactgtcagagggacgattgcaattaacttggccataaacacaaacctattggcacaaactatgtgatatagaaagttatgattgttcaagaagtttgtaatttaaaaaaaggaccactatgtacttaccgtaactgaaaagtctttcgttttctcaactttatatatcttccggaaaggac

SEQ ID NO: 6023 - DNA, 229 bp, synthetic construct
  misc_feature 1..229: note = promoter
  source 1..229: mol_type = other DNA
gagggcttatttcccatggttccttcatatttgcatagaggatgcaagactgtcagagggacgattgcaattaacttggccataaacacaaacctattggcacaaactatgtgatatagaaagttatgattgttcaagaagtttgtaatttaaaaaaaggaccactatgtacttaccgtaactgaaaagtctttcgttttctcaactttatatatcttccggaaaggac

SEQ ID NO: 6024 - DNA, 229 bp, synthetic construct
  misc_feature 1..229: note = promoter
  source 1..229: mol_type = other DNA
gagggccaatttcccatggttccttcatatttgcatagaggatgcaagactgtcagagggacgattgcaattaacttggccataaacacaaacctattggcacaaactatgtgatatagaaagttatgattgttcaagaagtttgtaatttaaaaaaaggaccactatgtacttaccgtaactgaaaagtctttcgttttctcaactttatatatcttccggaaaggac

SEQ ID NO: 6025 - DNA, 229 bp, synthetic construct
  misc_feature 1..229: note = promoter
  source 1..229: mol_type = other DNA
gagggcccatttcccatggttccttcatatttgcatagaggatgcaagactgtcagagggacgattgcaattaacttggccataaacacaaacctattggcacaaactatgtgatatagaaagttatgattgttcaagaagtttgtaatttaaaaaaaggaccactatgtacttaccgtaactgaaaagtctttcgttttctcaactttatatatcttccggaaaggac

SEQ ID NO: 6026 - DNA, 229 bp, synthetic construct
  misc_feature 1..229: note = promoter
  source 1..229: mol_type = other DNA
gagggccgatttcccatggttccttcatatttgcatagaggatgcaagactgtcagagggacgattgcaattaacttggccataaacacaaacctattggcacaaactatgtgatatagaaagttatgattgttcaagaagtttgtaatttaaaaaaaggaccactatgtacttaccgtaactgaaaagtctttcgttttctcaactttatatatcttccggaaaggac

SEQ ID NO: 6027 - DNA, 229 bp, synthetic construct
  misc_feature 1..229: note = promoter
  source 1..229: mol_type = other DNA
gagggcctctttcccatggttccttcatatttgcatagaggatgcaagactgtcagagggacgattgcaattaacttggccataaacacaaacctattggcacaaactatgtgatatagaaagttatgattgttcaagaagtttgtaatttaaaaaaaggaccactatgtacttaccgtaactgaaaagtctttcgttttctcaactttatatatcttccggaaaggac

SEQ ID NO: 6028 - DNA, 229 bp, synthetic construct
  misc_feature 1..229: note = promoter
  source 1..229: mol_type = other DNA
gagggcctgtttcccatggttccttcatatttgcatagaggatgcaagactgtcagagggacgattgcaattaacttggccataaacacaaacctattggcacaaactatgtgatatagaaagttatgattgttcaagaagtttgtaatttaaaaaaaggaccactatgtacttaccgtaactgaaaagtctttcgttttctcaactttatatatcttccggaaaggac

SEQ ID NO: 6029 - DNA, 229 bp, synthetic construct
  misc_feature 1..229: note = promoter
  source 1..229: mol_type = other DNA
gagggcctttttcccatggttccttcatatttgcatagaggatgcaagactgtcagagggacgattgcaattaacttggccataaacacaaacctattggcacaaactatgtgatatagaaagttatgattgttcaagaagtttgtaatttaaaaaaaggaccactatgtacttaccgtaactgaaaagtctttcgttttctcaactttatatatcttccggaaaggac

SEQ ID NO: 6030 - DNA, 229 bp, synthetic construct
  misc_feature 1..229: note = promoter
  source 1..229: mol_type = other DNA
gagggcctaattcccatggttccttcatatttgcatagaggatgcaagactgtcagagggacgattgcaattaacttggccataaacacaaacctattggcacaaactatgtgatatagaaagttatgattgttcaagaagtttgtaatttaaaaaaaggaccactatgtacttaccgtaactgaaaagtctttcgttttctcaactttatatatcttccggaaaggac

SEQ ID NO: 6031 - DNA, 229 bp, synthetic construct
  misc_feature 1..229: note = promoter
  source 1..229: mol_type = other DNA
gagggcctacttcccatggttccttcatatttgcatagaggatgcaagactgtcagagggacgattgcaattaacttggccataaacacaaacctattggcacaaactatgtgatatagaaagttatgattgttcaagaagtttgtaatttaaaaaaaggaccactatgtacttaccgtaactgaaaagtctttcgttttctcaactttatatatcttccggaaaggac

SEQ ID NO: 6032 - DNA, 229 bp, synthetic construct
  misc_feature 1..229: note = promoter
  source 1..229: mol_type = other DNA
gagggcctagttcccatggttccttcatatttgcatagaggatgcaagactgtcagagggacgattgcaattaacttggccataaacacaaacctattggcacaaactatgtgatatagaaagttatgattgttcaagaagtttgtaatttaaaaaaaggaccactatgtacttaccgtaactgaaaagtctttcgttttctcaactttatatatcttccggaaaggac

SEQ ID NO: 6033 - DNA, 229 bp, synthetic construct
  misc_feature 1..229: note = promoter
  source 1..229: mol_type = other DNA
gagggcctatatcccatggttccttcatatttgcatagaggatgcaagactgtcagagggacgattgcaattaacttggccataaacacaaacctattggcacaaactatgtgatatagaaagttatgattgttcaagaagtttgtaatttaaaaaaaggaccactatgtacttaccgtaactgaaaagtctttcgttttctcaactttatatatcttccggaaaggac

SEQ ID NO: 6034 - DNA, 229 bp, synthetic construct
  misc_feature 1..229: note = promoter
  source 1..229: mol_type = other DNA
gagggcctatctcccatggttccttcatatttgcatagaggatgcaagactgtcagagggacgattgcaattaacttggccataaacacaaacctattggcacaaactatgtgatatagaaagttatgattgttcaagaagtttgtaatttaaaaaaaggaccactatgtacttaccgtaactgaaaagtctttcgttttctcaactttatatatcttccggaaaggac

SEQ ID NO: 6035 - DNA, 229 bp, synthetic construct
  misc_feature 1..229: note = promoter
  source 1..229: mol_type = other DNA
gagggcctatgtcccatggttccttcatatttgcatagaggatgcaagactgtcagagggacgattgcaattaacttggccataaacacaaacctattggcacaaactatgtgatatagaaagttatgattgttcaagaagtttgtaatttaaaaaaaggaccactatgtacttaccgtaactgaaaagtctttcgttttctcaactttatatatcttccggaaaggac

SEQ ID NO: 6036 - DNA, 229 bp, synthetic construct
  misc_feature 1..229: note = promoter
  source 1..229: mol_type = other DNA
gagggcctattacccatggttccttcatatttgcatagaggatgcaagactgtcagagggacgattgcaattaacttggccataaacacaaacctattggcacaaactatgtgatatagaaagttatgattgttcaagaagtttgtaatttaaaaaaaggaccactatgtacttaccgtaactgaaaagtctttcgttttctcaactttatatatcttccggaaaggac

SEQ ID NO: 6037 - DNA, 229 bp, synthetic construct
  misc_feature 1..229: note = promoter
  source 1..229: mol_type = other DNA
gagggcctattccccatggttccttcatatttgcatagaggatgcaagactgtcagagggacgattgcaattaacttggccataaacacaaacctattggcacaaactatgtgatatagaaagttatgattgttcaagaagtttgtaatttaaaaaaaggaccactatgtacttaccgtaactgaaaagtctttcgttttctcaactttatatatcttccggaaaggac

SEQ ID NO: 6038 - DNA, 229 bp, synthetic construct
  misc_feature 1..229: note = promoter
  source 1..229: mol_type = other DNA
gagggcctattgcccatggttccttcatatttgcatagaggatgcaagactgtcagagggacgattgcaattaacttggccataaacacaaacctattggcacaaactatgtgatatagaaagttatgattgttcaagaagtttgtaatttaaaaaaaggaccactatgtacttaccgtaactgaaaagtctttcgttttctcaactttatatatcttccggaaaggac

SEQ ID NO: 6039 - DNA, 229 bp, synthetic construct
  misc_feature 1..229: note = promoter
  source 1..229: mol_type = other DNA
gagggcctatttaccatggttccttcatatttgcatagaggatgcaagactgtcagagggacgattgcaattaacttggccataaacacaaacctattggcacaaactatgtgatatagaaagttatgattgttcaagaagtttgtaatttaaaaaaaggaccactatgtacttaccgtaactgaaaagtctttcgttttctcaactttatatatcttccggaaaggac

SEQ ID NO: 6040 - DNA, 229 bp, synthetic construct
  misc_feature 1..229: note = promoter
  source 1..229: mol_type = other DNA
gagggcctatttgccatggttccttcatatttgcatagaggatgcaagactgtcagagggacgattgcaattaacttggccataaacacaaacctattggcacaaactatgtgatatagaaagttatgattgttcaagaagtttgtaatttaaaaaaaggaccactatgtacttaccgtaactgaaaagtctttcgttttctcaactttatatatcttccggaaaggac

SEQ ID NO: 6041 - DNA, 229 bp, synthetic construct
  misc_feature 1..229: note = promoter
  source 1..229: mol_type = other DNA
gagggcctattttccatggttccttcatatttgcatagaggatgcaagactgtcagagggacgattgcaattaacttggccataaacacaaacctattggcacaaactatgtgatatagaaagttatgattgttcaagaagtttgtaatttaaaaaaaggaccactatgtacttaccgtaactgaaaagtctttcgttttctcaactttatatatcttccggaaaggac

SEQ ID NO: 6042 - DNA, 229 bp, synthetic construct
  misc_feature 1..229: note = promoter
  source 1..229: mol_type = other DNA
gagggcctatttcacatggttccttcatatttgcatagaggatgcaagactgtcagagggacgattgcaattaacttggccataaacacaaacctattggcacaaactatgtgatatagaaagttatgattgttcaagaagtttgtaatttaaaaaaaggaccactatgtacttaccgtaactgaaaagtctttcgttttctcaactttatatatcttccggaaaggac

SEQ ID NO: 6043 - DNA, 229 bp, synthetic construct
  misc_feature 1..229: note = promoter
  source 1..229: mol_type = other DNA
gagggcctatttcgcatggttccttcatatttgcatagaggatgcaagactgtcagagggacgattgcaattaacttggccataaacacaaacctattggcacaaactatgtgatatagaaagttatgattgttcaagaagtttgtaatttaaaaaaaggaccactatgtacttaccgtaactgaaaagtctttcgttttctcaactttatatatcttccggaaaggac

SEQ ID NO: 6044 - DNA, 229 bp, synthetic construct
  misc_feature 1..229: note = promoter
  source 1..229: mol_type = other DNA
gagggcctatttctcatggttccttcatatttgcatagaggatgcaagactgtcagagggacgattgcaattaacttggccataaacacaaacctattggcacaaactatgtgatatagaaagttatgattgttcaagaagtttgtaatttaaaaaaaggaccactatgtacttaccgtaactgaaaagtctttcgttttctcaactttatatatcttccggaaaggac

SEQ ID NO: 6045 - DNA, 229 bp, synthetic construct
  misc_feature 1..229: note = promoter
  source 1..229: mol_type = other DNA
gagggcctatttccaatggttccttcatatttgcatagaggatgcaagactgtcagagggacgattgcaattaacttggccataaacacaaacctattggcacaaactatgtgatatagaaagttatgattgttcaagaagtttgtaatttaaaaaaaggaccactatgtacttaccgtaactgaaaagtctttcgttttctcaactttatatatcttccggaaaggac

SEQ ID NO: 6046 - DNA, 229 bp, synthetic construct
  misc_feature 1..229: note = promoter
  source 1..229: mol_type = other DNA
gagggcctatttccgatggttccttcatatttgcatagaggatgcaagactgtcagagggacgattgcaattaacttggccataaacacaaacctattggcacaaactatgtgatatagaaagttatgattgttcaagaagtttgtaatttaaaaaaaggaccactatgtacttaccgtaactgaaaagtctttcgttttctcaactttatatatcttccggaaaggac

SEQ ID NO: 6047 - DNA, 229 bp, synthetic construct
  misc_feature 1..229: note = promoter
  source 1..229: mol_type = other DNA
gagggcctatttcctatggttccttcatatttgcatagaggatgcaagactgtcagagggacgattgcaattaacttggccataaacacaaacctattggcacaaactatgtgatatagaaagttatgattgttcaagaagtttgtaatttaaaaaaaggaccactatgtacttaccgtaactgaaaagtctttcgttttctcaactttatatatcttccggaaaggac

SEQ ID NO: 6048 - DNA, 229 bp, synthetic construct
  misc_feature 1..229: note = promoter
  source 1..229: mol_type = other DNA
gagggcctatttcccctggttccttcatatttgcatagaggatgcaagactgtcagagggacgattgcaattaacttggccataaacacaaacctattggcacaaactatgtgatatagaaagttatgattgttcaagaagtttgtaatttaaaaaaaggaccactatgtacttaccgtaactgaaaagtctttcgttttctcaactttatatatcttccggaaaggac

SEQ ID NO: 6049 - DNA, 229 bp, synthetic construct
  misc_feature 1..229: note = promoter
  source 1..229: mol_type = other DNA
gagggcctatttcccgtggttccttcatatttgcatagaggatgcaagactgtcagagggacgattgcaattaacttggccataaacacaaacctattggcacaaactatgtgatatagaaagttatgattgttcaagaagtttgtaatttaaaaaaaggaccactatgtacttaccgtaactgaaaagtctttcgttttctcaactttatatatcttccggaaaggac

SEQ ID NO: 6050 - DNA, 229 bp, synthetic construct
  misc_feature 1..229: note = promoter
  source 1..229: mol_type = other DNA
gagggcctatttcccttggttccttcatatttgcatagaggatgcaagactgtcagagggacgattgcaattaacttggccataaacacaaacctattggcacaaactatgtgatatagaaagttatgattgttcaagaagtttgtaatttaaaaaaaggaccactatgtacttaccgtaactgaaaagtctttcgttttctcaactttatatatcttccggaaaggac

SEQ ID NO: 6051 - DNA, 229 bp, synthetic construct
  misc_feature 1..229: note = promoter
  source 1..229: mol_type = other DNA
gagggcctatttcccaaggttccttcatatttgcatagaggatgcaagactgtcagagggacgattgcaattaacttggccataaacacaaacctattggcacaaactatgtgatatagaaagttatgattgttcaagaagtttgtaatttaaaaaaaggaccactatgtacttaccgtaactgaaaagtctttcgttttctcaactttatatatcttccggaaaggac

SEQ ID NO: 6052 - DNA, 229 bp, synthetic construct
  misc_feature 1..229: note = promoter
  source 1..229: mol_type = other DNA
gagggcctatttcccacggttccttcatatttgcatagaggatgcaagactgtcagagggacgattgcaattaacttggccataaacacaaacctattggcacaaactatgtgatatagaaagttatgattgttcaagaagtttgtaatttaaaaaaaggaccactatgtacttaccgtaactgaaaagtctttcgttttctcaactttatatatcttccggaaaggac

SEQ ID NO: 6053 - DNA, 229 bp, synthetic construct
  misc_feature 1..229: note = promoter
  source 1..229: mol_type = other DNA
gagggcctatttcccagggttccttcatatttgcatagaggatgcaagactgtcagagggacgattgcaattaacttggccataaacacaaacctattggcacaaactatgtgatatagaaagttatgattgttcaagaagtttgtaatttaaaaaaaggaccactatgtacttaccgtaactgaaaagtctttcgttttctcaactttatatatcttccggaaaggac

SEQ ID NO: 6054 - DNA, 229 bp, synthetic construct
  misc_feature 1..229: note = promoter
  source 1..229: mol_type = other DNA
gagggcctatttcccatagttccttcatatttgcatagaggatgcaagactgtcagagggacgattgcaattaacttggccataaacacaaacctattggcacaaactatgtgatatagaaagttatgattgttcaagaagtttgtaatttaaaaaaaggaccactatgtacttaccgtaactgaaaagtctttcgttttctcaactttatatatcttccggaaaggac

SEQ ID NO: 6055 - DNA, 229 bp, synthetic construct
  misc_feature 1..229: note = promoter
  source 1..229: mol_type = other DNA
gagggcctatttcccatcgttccttcatatttgcatagaggatgcaagactgtcagagggacgattgcaattaacttggccataaacacaaacctattggcacaaactatgtgatatagaaagttatgattgttcaagaagtttgtaatttaaaaaaaggaccactatgtacttaccgtaactgaaaagtctttcgttttctcaactttatatatcttccggaaaggac

SEQ ID NO: 6056 - DNA, 229 bp, synthetic construct
  misc_feature 1..229: note = promoter
  source 1..229: mol_type = other DNA
gagggcctatttcccattgttccttcatatttgcatagaggatgcaagactgtcagagggacgattgcaattaacttggccataaacacaaacctattggcacaaactatgtgatatagaaagttatgattgttcaagaagtttgtaatttaaaaaaaggaccactatgtacttaccgtaactgaaaagtctttcgttttctcaactttatatatcttccggaaaggac

SEQ ID NO: 6057 - DNA, 229 bp, synthetic construct
  misc_feature 1..229: note = promoter
  source 1..229: mol_type = other DNA
gagggcctatttcccatgattccttcatatttgcatagaggatgcaagactgtcagagggacgattgcaattaacttggccataaacacaaacctattggcacaaactatgtgatatagaaagttatgattgttcaagaagtttgtaatttaaaaaaaggaccactatgtacttaccgtaactgaaaagtctttcgttttctcaactttatatatcttccggaaaggac

SEQ ID NO: 6058 - DNA, 229 bp, synthetic construct
  misc_feature 1..229: note = promoter
  source 1..229: mol_type = other DNA
gagggcctatttcccatgcttccttcatatttgcatagaggatgcaagactgtcagagggacgattgcaattaacttggccataaacacaaacctattggcacaaactatgtgatatagaaagttatgattgttcaagaagtttgtaatttaaaaaaaggaccactatgtacttaccgtaactgaaaagtctttcgttttctcaactttatatatcttccggaaaggac

SEQ ID NO: 6059 - DNA, 229 bp, synthetic construct
  misc_feature 1..229: note = promoter
  source 1..229: mol_type = other DNA
gagggcctatttcccatgtttccttcatatttgcatagaggatgcaagactgtcagagggacgattgcaattaacttggccataaacacaaacctattggcacaaactatgtgatatagaaagttatgattgttcaagaagtttgtaatttaaaaaaaggaccactatgtacttaccgtaactgaaaagtctttcgttttctcaactttatatatcttccggaaaggac

SEQ ID NO: 6060 - DNA, 229 bp, synthetic construct
  misc_feature 1..229: note = promoter
  source 1..229: mol_type = other DNA
gagggcctatttcccatggatccttcatatttgcatagaggatgcaagactgtcagagggacgattgcaattaacttggccataaacacaaacctattggcacaaactatgtgatatagaaagttatgattgttcaagaagtttgtaatttaaaaaaaggaccactatgtacttaccgtaactgaaaagtctttcgttttctcaactttatatatcttccggaaaggac

SEQ ID NO: 6061 - DNA, 229 bp, synthetic construct
  misc_feature 1..229: note = promoter
  source 1..229: mol_type = other DNA
gagggcctatttcccatggctccttcatatttgcatagaggatgcaagactgtcagagggacgattgcaattaacttggccataaacacaaacctattggcacaaactatgtgatatagaaagttatgattgttcaagaagtttgtaatttaaaaaaaggaccactatgtacttaccgtaactgaaaagtctttcgttttctcaactttatatatcttccggaaaggac

SEQ ID NO: 6062 - DNA, 229 bp, synthetic construct
  misc_feature 1..229: note = promoter
  source 1..229: mol_type = other DNA
gagggcctatttcccatgggtccttcatatttgcatagaggatgcaagactgtcagagggacgattgcaattaacttggccataaacacaaacctattggcacaaactatgtgatatagaaagttatgattgttcaagaagtttgtaatttaaaaaaaggaccactatgtacttaccgtaactgaaaagtctttcgttttctcaactttatatatcttccggaaaggac

SEQ ID NO: 6063 - DNA, 229 bp, synthetic construct
  misc_feature 1..229: note = promoter
  source 1..229: mol_type = other DNA
gagggcctatttcccatggtaccttcatatttgcatagaggatgcaagactgtcagagggacgattgcaattaacttggccataaacacaaacctattggcacaaactatgtgatatagaaagttatgattgttcaagaagtttgtaatttaaaaaaaggaccactatgtacttaccgtaactgaaaagtctttcgttttctcaactttatatatcttccggaaaggac

SEQ ID NO: 6064 - DNA, 229 bp, synthetic construct
  misc_feature 1..229: note = promoter
  source 1..229: mol_type = other DNA
gagggcctatttcccatggtcccttcatatttgcatagaggatgcaagactgtcagagggacgattgcaattaacttggccataaacacaaacctattggcacaaactatgtgatatagaaagttatgattgttcaagaagtttgtaatttaaaaaaaggaccactatgtacttaccgtaactgaaaagtctttcgttttctcaactttatatatcttccggaaaggac

SEQ ID NO: 6065 - DNA, 229 bp, synthetic construct
  misc_feature 1..229: note = promoter
  source 1..229: mol_type = other DNA
gagggcctatttcccatggtgccttcatatttgcatagaggatgcaagactgtcagagggacgattgcaattaacttggccataaacacaaacctattggcacaaactatgtgatatagaaagttatgattgttcaagaagtttgtaatttaaaaaaaggaccactatgtacttaccgtaactgaaaagtctttcgttttctcaactttatatatcttccggaaaggac

SEQ ID NO: 6066 - DNA, 229 bp, synthetic construct
  misc_feature 1..229: note = promoter
  source 1..229: mol_type = other DNA
gagggcctatttcccatggttacttcatatttgcatagaggatgcaagactgtcagagggacgattgcaattaacttggccataaacacaaacctattggcacaaactatgtgatatagaaagttatgattgttcaagaagtttgtaatttaaaaaaaggaccactatgtacttaccgtaactgaaaagtctttcgttttctcaactttatatatcttccggaaaggac

SEQ ID NO: 6067 - DNA, 229 bp, synthetic construct
  misc_feature 1..229: note = promoter
  source 1..229: mol_type = other DNA
gagggcctatttcccatggttgcttcatatttgcatagaggatgcaagactgtcagagggacgattgcaattaacttggccataaacacaaacctattggcacaaactatgtgatatagaaagttatgattgttcaagaagtttgtaatttaaaaaaaggaccactatgtacttaccgtaactgaaaagtctttcgttttctcaactttatatatcttccggaaaggac

SEQ ID NO: 6068 - DNA, 229 bp, synthetic construct
  misc_feature 1..229: note = promoter
  source 1..229: mol_type = other DNA
gagggcctatttcccatggtttcttcatatttgcatagaggatgcaagactgtcagagggacgattgcaattaacttggccataaacacaaacctattggcacaaactatgtgatatagaaagttatgattgttcaagaagtttgtaatttaaaaaaaggaccactatgtacttaccgtaactgaaaagtctttcgttttctcaactttatatatcttccggaaaggac

SEQ ID NO: 6069 - DNA, 229 bp, synthetic construct
  misc_feature 1..229: note = promoter
  source 1..229: mol_type = other DNA
gagggcctatttcccatggttcattcatatttgcatagaggatgcaagactgtcagagggacgattgcaattaacttggccataaacacaaacctattggcacaaactatgtgatatagaaagttatgattgttcaagaagtttgtaatttaaaaaaaggaccactatgtacttaccgtaactgaaaagtctttcgttttctcaactttatatatcttccggaaaggac

SEQ ID NO: 6070 - DNA, 229 bp, synthetic construct
  misc_feature 1..229: note = promoter
  source 1..229: mol_type = other DNA
gagggcctatttcccatggttcgttcatatttgcatagaggatgcaagactgtcagagggacgattgcaattaacttggccataaacacaaacctattggcacaaactatgtgatatagaaagttatgattgttcaagaagtttgtaatttaaaaaaaggaccactatgtacttaccgtaactgaaaagtctttcgttttctcaactttatatatcttccggaaaggac

SEQ ID NO: 6071 - DNA, 229 bp, synthetic construct
  misc_feature 1..229: note = promoter
  source 1..229: mol_type = other DNA
gagggcctatttcccatggttctttcatatttgcatagaggatgcaagactgtcagagggacgattgcaattaacttggccataaacacaaacctattggcacaaactatgtgatatagaaagttatgattgttcaagaagtttgtaatttaaaaaaaggaccactatgtacttaccgtaactgaaaagtctttcgttttctcaactttatatatcttccggaaaggac

SEQ ID NO: 6072 - DNA, 229 bp, synthetic construct
  misc_feature 1..229: note = promoter
  source 1..229: mol_type = other DNA
gagggcctatttcccatggttccatcatatttgcatagaggatgcaagactgtcagagggacgattgcaattaacttggccataaacacaaacctattggcacaaactatgtgatatagaaagttatgattgttcaagaagtttgtaatttaaaaaaaggaccactatgtacttaccgtaactgaaaagtctttcgttttctcaactttatatatcttccggaaaggac

SEQ ID NO: 6073 - DNA, 229 bp, synthetic construct
  misc_feature 1..229: note = promoter
  source 1..229: mol_type = other DNA
gagggcctatttcccatggttccctcatatttgcatagaggatgcaagactgtcagagggacgattgcaattaacttggccataaacacaaacctattggcacaaactatgtgatatagaaagttatgattgttcaagaagtttgtaatttaaaaaaaggaccactatgtacttaccgtaactgaaaagtctttcgttttctcaactttatatatcttccggaaaggac

SEQ ID NO: 6074 - DNA, 229 bp, synthetic construct
  misc_feature 1..229: note = promoter
  source 1..229: mol_type = other DNA
gagggcctatttcccatggttccgtcatatttgcatagaggatgcaagactgtcagagggacgattgcaattaacttggccataaacacaaacctattggcacaaactatgtgatatagaaagttatgattgttcaagaagtttgtaatttaaaaaaaggaccactatgtacttaccgtaactgaaaagtctttcgttttctcaactttatatatcttccggaaaggac

SEQ ID NO: 6075 - DNA, 229 bp, synthetic construct
  misc_feature 1..229: note = promoter
  source 1..229: mol_type = other DNA
gagggcctatttcccatggttcctacatatttgcatagaggatgcaagactgtcagagggacgattgcaattaacttggccataaacacaaacctattggcacaaactatgtgatatagaaagttatgattgttcaagaagtttgtaatttaaaaaaaggaccactatgtacttaccgtaactgaaaagtctttcgttttctcaactttatatatcttccggaaaggac

SEQ ID NO: 6076 - DNA, 229 bp, synthetic construct
  misc_feature 1..229: note = promoter
  source 1..229: mol_type = other DNA
gagggcctatttcccatggttcctccatatttgcatagaggatgcaagactgtcagagggacgattgcaattaacttggccataaacacaaacctattggcacaaactatgtgatatagaaagttatgattgttcaagaagtttgtaatttaaaaaaaggaccactatgtacttaccgtaactgaaaagtctttcgttttctcaactttatatatcttccggaaaggac

SEQ ID NO: 6077 - DNA, 229 bp, synthetic construct
  misc_feature 1..229: note = promoter
  source 1..229: mol_type = other DNA
gagggcctatttcccatggttcctgcatatttgcatagaggatgcaagactgtcagagggacgattgcaattaacttggccataaacacaaacctattggcacaaactatgtgatatagaaagttatgattgttcaagaagtttgtaatttaaaaaaaggaccactatgtacttaccgtaactgaaaagtctttcgttttctcaactttatatatcttccggaaaggac

SEQ ID NO: 6078 - DNA, 229 bp, synthetic construct
  misc_feature 1..229: note = promoter
  source 1..229: mol_type = other DNA
gagggcctatttcccatggttccttaatatttgcatagaggatgcaagactgtcagagggacgattgcaattaacttggccataaacacaaacctattggcacaaactatgtgatatagaaagttatgattgttcaagaagtttgtaatttaaaaaaaggaccactatgtacttaccgtaactgaaaagtctttcgttttctcaactttatatatcttccggaaaggac

SEQ ID NO: 6079 - DNA, 229 bp, synthetic construct
  misc_feature 1..229: note = promoter
  source 1..229: mol_type = other DNA
gagggcctatttcccatggttccttgatatttgcatagaggatgcaagactgtcagagggacgattgcaattaacttggccataaacacaaacctattggcacaaactatgtgatatagaaagttatgattgttcaagaagtttgtaatttaaaaaaaggaccactatgtacttaccgtaactgaaaagtctttcgttttctcaactttatatatcttccggaaaggac

SEQ ID NO: 6080 - DNA, 229 bp, synthetic construct
  misc_feature 1..229: note = promoter
  source 1..229: mol_type = other DNA
gagggcctatttcccatggttcctttatatttgcatagaggatgcaagactgtcagagggacgattgcaattaacttggccataaacacaaacctattggcacaaactatgtgatatagaaagttatgattgttcaagaagtttgtaatttaaaaaaaggaccactatgtacttaccgtaactgaaaagtctttcgttttctcaactttatatatcttccggaaaggac

SEQ ID NO: 6081 - DNA, 229 bp, synthetic construct
  misc_feature 1..229: note = promoter
  source 1..229: mol_type = other DNA
gagggcctatttcccatggttccttcctatttgcatagaggatgcaagactgtcagagggacgattgcaattaacttggccataaacacaaacctattggcacaaactatgtgatatagaaagttatgattgttcaagaagtttgtaatttaaaaaaaggaccactatgtacttaccgtaactgaaaagtctttcgttttctcaactttatatatcttccggaaaggac

SEQ ID NO: 6082 - DNA, 229 bp, synthetic construct
  misc_feature 1..229: note = promoter
  source 1..229: mol_type = other DNA
gagggcctatttcccatggttccttcgtatttgcatagaggatgcaagactgtcagagggacgattgcaattaacttggccataaacacaaacctattggcacaaactatgtgatatagaaagttatgattgttcaagaagtttgtaatttaaaaaaaggaccactatgtacttaccgtaactgaaaagtctttcgttttctcaactttatatatcttccggaaaggac

SEQ ID NO: 6083 - DNA, 229 bp, synthetic construct
  misc_feature 1..229: note = promoter
  source 1..229: mol_type = other DNA
gagggcctatttcccatggttccttcttatttgcatagaggatgcaagactgtcagagggacgattgcaattaacttggccataaacacaaacctattggcacaaactatgtgatatagaaagttatgattgttcaagaagtttgtaatttaaaaaaaggaccactatgtacttaccgtaactgaaaagtctttcgttttctcaactttatatatcttccggaaaggac

SEQ ID NO: 6084 - DNA, 229 bp, synthetic construct
  misc_feature 1..229: note = promoter
  source 1..229: mol_type = other DNA
gagggcctatttcccatggttccttcaaatttgcatagaggatgcaagactgtcagagggacgattgcaattaacttggccataaacacaaacctattggcacaaactatgtgatatagaaagttatgattgttcaagaagtttgtaatttaaaaaaaggaccactatgtacttaccgtaactgaaaagtctttcgttttctcaactttatatatcttccggaaaggac

SEQ ID NO: 6085 - DNA, 229 bp, synthetic construct
  misc_feature 1..229: note = promoter
  source 1..229: mol_type = other DNA
gagggcctatttcccatggttccttcacatttgcatagaggatgcaagactgtcagagggacgattgcaattaacttggccataaacacaaacctattggcacaaactatgtgatatagaaagttatgattgttcaagaagtttgtaatttaaaaaaaggaccactatgtacttaccgtaactgaaaagtctttcgttttctcaactttatatatcttccggaaaggac

SEQ ID NO: 6086 - DNA, 229 bp, synthetic construct
  misc_feature 1..229: note = promoter
  source 1..229: mol_type = other DNA
gagggcctatttcccatggttccttcagatttgcatagaggatgcaagactgtcagagggacgattgcaattaacttggccataaacacaaacctattggcacaaactatgtgatatagaaagttatgattgttcaagaagtttgtaatttaaaaaaaggaccactatgtacttaccgtaactgaaaagtctttcgttttctcaactttatatatcttccggaaaggac

SEQ ID NO: 6087 - DNA, 229 bp, synthetic construct
  misc_feature 1..229: note = promoter
  source 1..229: mol_type = other DNA
gagggcctatttcccatggttccttcatctttgcatagaggatgcaagactgtcagagggacgattgcaattaacttggccataaacacaaacctattggcacaaactatgtgatatagaaagttatgattgttcaagaagtttgtaatttaaaaaaaggaccactatgtacttaccgtaactgaaaagtctttcgttttctcaactttatatatcttccggaaaggac

SEQ ID NO: 6088 - DNA, 229 bp, synthetic construct
  misc_feature 1..229: note = promoter
  source 1..229: mol_type = other DNA
gagggcctatttcccatggttccttcatgtttgcatagaggatgcaagactgtcagagggacgattgcaattaacttggccataaacacaaacctattggcacaaactatgtgatatagaaagttatgattgttcaagaagtttgtaatttaaaaaaaggaccactatgtacttaccgtaactgaaaagtctttcgttttctcaactttatatatcttccggaaaggac

SEQ ID NO: 6089 - DNA, 229 bp, synthetic construct
  misc_feature 1..229: note = promoter
  source 1..229: mol_type = other DNA
gagggcctatttcccatggttccttcatttttgcatagaggatgcaagactgtcagagggacgattgcaattaacttggccataaacacaaacctattggcacaaactatgtgatatagaaagttatgattgttcaagaagtttgtaatttaaaaaaaggaccactatgtacttaccgtaactgaaaagtctttcgttttctcaactttatatatcttccggaaaggac

SEQ ID NO: 6090 - DNA, 229 bp, synthetic construct
  misc_feature 1..229: note = promoter
  source 1..229: mol_type = other DNA
gagggcctatttcccatggttccttcataattgcatagaggatgcaagactgtcagagggacgattgcaattaacttggccataaacacaaacctattggcacaaactatgtgatatagaaagttatgattgttcaagaagtttgtaatttaaaaaaaggaccactatgtacttaccgtaactgaaaagtctttcgttttctcaactttatatatcttccggaaaggac

SEQ ID NO: 6091 - DNA, 229 bp, synthetic construct
  misc_feature 1..229: note = promoter
  source 1..229: mol_type = other DNA
gagggcctatttcccatggttccttcatacttgcatagaggatgcaagactgtcagagggacgattgcaattaacttggccataaacacaaacctattggcacaaactatgtgatatagaaagttatgattgttcaagaagtttgtaatttaaaaaaaggaccactatgtacttaccgtaactgaaaagtctttcgttttctcaactttatatatcttccggaaaggac

SEQ ID NO: 6092 - DNA, 229 bp, synthetic construct
  misc_feature 1..229: note = promoter
  source 1..229: mol_type = other DNA
gagggcctatttcccatggttccttcatagttgcatagaggatgcaagactgtcagagggacgattgcaattaacttggccataaacacaaacctattggcacaaactatgtgatatagaaagttatgattgttcaagaagtttgtaatttaaaaaaaggaccactatgtacttaccgtaactgaaaagtctttcgttttctcaactttatatatcttccggaaaggac

SEQ ID NO: 6093 - DNA, 229 bp, synthetic construct
  misc_feature 1..229: note = promoter
  source 1..229: mol_type = other DNA
gagggcctatttcccatggttccttcatatatgcatagaggatgcaagactgtcagagggacgattgcaattaacttggccataaacacaaacctattggcacaaactatgtgatatagaaagttatgattgttcaagaagtttgtaatttaaaaaaaggaccactatgtacttaccgtaactgaaaagtctttcgttttctcaactttatatatcttccggaaaggac

SEQ ID NO: 6094 - DNA, 229 bp, synthetic construct
  misc_feature 1..229: note = promoter
  source 1..229: mol_type = other DNA
gagggcctatttcccatggttccttcatatctgcatagaggatgcaagactgtcagagggacgattgcaattaacttggccataaacacaaacctattggcacaaactatgtgatatagaaagttatgattgttcaagaagtttgtaatttaaaaaaaggaccactatgtacttaccgtaactgaaaagtctttcgttttctcaactttatatatcttccggaaaggac

SEQ ID NO: 6095 - DNA, 229 bp, synthetic construct
  misc_feature 1..229: note = promoter
  source 1..229: mol_type = other DNA
gagggcctatttcccatggttccttcatatgtgcatagaggatgcaagactgtcagagggacgattgcaattaacttggccataaacacaaacctattggcacaaactatgtgatatagaaagttatgattgttcaagaagtttgtaatttaaaaaaaggaccactatgtacttaccgtaactgaaaagtctttcgttttctcaactttatatatcttccggaaaggac

SEQ ID NO: 6096 - DNA, 229 bp, synthetic construct
  misc_feature 1..229: note = promoter
  source 1..229: mol_type = other DNA
gagggcctatttcccatggttccttcatattagcatagaggatgcaagactgtcagagggacgattgcaattaacttggccataaacacaaacctattggcacaaactatgtgatatagaaagttatgattgttcaagaagtttgtaatttaaaaaaaggaccactatgtacttaccgtaactgaaaagtctttcgttttctcaactttatatatcttccggaaaggac

SEQ ID NO: 6097 - DNA, 229 bp, synthetic construct
  misc_feature 1..229: note = promoter
  source 1..229: mol_type = other DNA
gagggcctatttcccatggttccttcatattcgcatagaggatgcaagactgtcagagggacgattgcaattaacttggccataaacacaaacctattggcacaaactatgtgatatagaaagttatgattgttcaagaagtttgtaatttaaaaaaaggaccactatgtacttaccgtaactgaaaagtctttcgttttctcaactttatatatcttccggaaaggac

SEQ ID NO: 6098 - DNA, 229 bp, synthetic construct
  misc_feature 1..229: note = promoter
  source 1..229: mol_type = other DNA
gagggcctatttcccatggttccttcatattggcatagaggatgcaagactgtcagagggacgattgcaattaacttggccataaacacaaacctattggcacaaactatgtgatatagaaagttatgattgttcaagaagtttgtaatttaaaaaaaggaccactatgtacttaccgtaactgaaaagtctttcgttttctcaactttatatatcttccggaaaggac

SEQ ID NO: 6099 - DNA, 229 bp, synthetic construct
  misc_feature 1..229: note = promoter
  source 1..229: mol_type = other DNA
gagggcctatttcccatggttccttcatatttacatagaggatgcaagactgtcagagggacgattgcaattaacttggccataaacacaaacctattggcacaaactatgtgatatagaaagttatgattgttcaagaagtttgtaatttaaaaaaaggaccactatgtacttaccgtaactgaaaagtctttcgttttctcaactttatatatcttccggaaaggac

SEQ ID NO: 6100 - DNA, 229 bp, synthetic construct
  misc_feature 1..229: note = promoter
  source 1..229: mol_type = other DNA
gagggcctatttcccatggttccttcatatttccatagaggatgcaagactgtcagagggacgattgcaattaacttggccataaacacaaacctattggcacaaactatgtgatatagaaagttatgattgttcaagaagtttgtaatttaaaaaaaggaccactatgtacttaccgtaactgaaaagtctttcgttttctcaactttatatatcttccggaaaggac

SEQ ID NO: 6101 - DNA, 229 bp, synthetic construct
  misc_feature 1..229: note = promoter
  source 1..229: mol_type = other DNA
gagggcctatttcccatggttccttcatattttcatagaggatgcaagactgtcagagggacgattgcaattaacttggccataaacacaaacctattggcacaaactatgtgatatagaaagttatgattgttcaagaagtttgtaatttaaaaaaaggaccactatgtacttaccgtaactgaaaagtctttcgttttctcaactttatatatcttccggaaaggac

SEQ ID NO: 6102 - DNA, 229 bp, synthetic construct
  misc_feature 1..229: note = promoter
  source 1..229: mol_type = other DNA
gagggcctatttcccatggttccttcatatttgaatagaggatgcaagactgtcagagggacgattgcaattaacttggccataaacacaaacctattggcacaaactatgtgatatagaaagttatgattgttcaagaagtttgtaatttaaaaaaaggaccactatgtacttaccgtaactgaaaagtctttcgttttctcaactttatatatcttccggaaaggac

SEQ ID NO: 6103 - DNA, 229 bp, synthetic construct
  misc_feature 1..229: note = promoter
  source 1..229: mol_type = other DNA
gagggcctatttcccatggttccttcatatttggatagaggatgcaagactgtcagagggacgattgcaattaacttggccataaacacaaacctattggcacaaactatgtgatatagaaagttatgattgttcaagaagtttgtaatttaaaaaaaggaccactatgtacttaccgtaactgaaaagtctttcgttttctcaactttatatatcttccggaaaggac

SEQ ID NO: 6104 - DNA, 229 bp, synthetic construct
  misc_feature 1..229: note = promoter
  source 1..229: mol_type = other DNA
gagggcctatttcccatggttccttcatatttgtatagaggatgcaagactgtcagagggacgattgcaattaacttggccataaacacaaacctattggcacaaactatgtgatatagaaagttatgattgttcaagaagtttgtaatttaaaaaaaggaccactatgtacttaccgtaactgaaaagtctttcgttttctcaactttatatatcttccggaaaggac

SEQ ID NO: 6105 - DNA, 229 bp, synthetic construct
  misc_feature 1..229: note = promoter
  source 1..229: mol_type = other DNA
gagggcctatttcccatggttccttcatatttgcctagaggatgcaagactgtcagagggacgattgcaattaacttggccataaacacaaacctattggcacaaactatgtgatatagaaagttatgattgttcaagaagtttgtaatttaaaaaaaggaccactatgtacttaccgtaactgaaaagtctttcgttttctcaactttatatatcttccggaaaggac

SEQ ID NO: 6106 - DNA, 229 bp, synthetic construct
  misc_feature 1..229: note = promoter
  source 1..229: mol_type = other DNA
gagggcctatttcccatggttccttcatatttgcgtagaggatgcaagactgtcagagggacgattgcaattaacttggccataaacacaaacctattggcacaaactatgtgatatagaaagttatgattgttcaagaagtttgtaatttaaaaaaaggaccactatgtacttaccgtaactgaaaagtctttcgttttctcaactttatatatcttccggaaaggac

SEQ ID NO: 6107 - DNA, 229 bp, synthetic construct
  misc_feature 1..229: note = promoter
  source 1..229: mol_type = other DNA
gagggcctatttcccatggttccttcatatttgcttagaggatgcaagactgtcagagggacgattgcaattaacttggccataaacacaaacctattggcacaaactatgtgatatagaaagttatgattgttcaagaagtttgtaatttaaaaaaaggaccactatgtacttaccgtaactgaaaagtctttcgttttctcaactttatatatcttccggaaaggac

SEQ ID NO: 6108 - DNA, 229 bp, synthetic construct
  misc_feature 1..229: note = promoter
  source 1..229: mol_type = other DNA
gagggcctatttcccatggttccttcatatttgcaaagaggatgcaagactgtcagagggacgattgcaattaacttggccataaacacaaacctattggcacaaactatgtgatatagaaagttatgattgttcaagaagtttgtaatttaaaaaaaggaccactatgtacttaccgtaactgaaaagtctttcgttttctcaactttatatatcttccggaaaggac

SEQ ID NO: 6109 - DNA, 229 bp, synthetic construct
  misc_feature 1..229: note = promoter
  source 1..229: mol_type = other DNA
gagggcctatttcccatggttccttcatatttgcacagaggatgcaagactgtcagagggacgattgcaattaacttggccataaacacaaacctattggcacaaactatgtgatatagaaagttatgattgttcaagaagtttgtaatttaaaaaaaggaccactatgtacttaccgtaactgaaaagtctttcgttttctcaactttatatatcttccggaaaggac

SEQ ID NO: 6110 - DNA, 229 bp, synthetic construct
  misc_feature 1..229: note = promoter
  source 1..229: mol_type = other DNA
gagggcctatttcccatggttccttcatatttgcagagaggatgcaagactgtcagagggacgattgcaattaacttggccataaacacaaacctattggcacaaactatgtgatatagaaagttatgattgttcaagaagtttgtaatttaaaaaaaggaccactatgtacttaccgtaactgaaaagtctttcgttttctcaactttatatatcttccggaaaggac

SEQ ID NO: 6111 - DNA, 229 bp, synthetic construct
  misc_feature 1..229: note = promoter
  source 1..229: mol_type = other DNA
gagggcctatttcccatggttccttcatatttgcatcgaggatgcaagactgtcagagggacgattgcaattaacttggccataaacacaaacctattggcacaaactatgtgatatagaaagttatgattgttcaagaagtttgtaatttaaaaaaaggaccactatgtacttaccgtaactgaaaagtctttcgttttctcaactttatatatcttccggaaaggac

SEQ ID NO: 6112 - DNA, 229 bp, synthetic construct
  misc_feature 1..229: note = promoter
  source 1..229: mol_type = other DNA
gagggcctatttcccatggttccttcatatttgcatggaggatgcaagactgtcagagggacgattgcaattaacttggccataaacacaaacctattggcacaaactatgtgatatagaaagttatgattgttcaagaagtttgtaatttaaaaaaaggaccactatgtacttaccgtaactgaaaagtctttcgttttctcaactttatatatcttccggaaaggac

SEQ ID NO: 6113 - DNA, 229 bp, synthetic construct
  misc_feature 1..229: note = promoter
  source 1..229: mol_type = other DNA
gagggcctatttcccatggttccttcatatttgcattgaggatgcaagactgtcagagggacgattgcaattaacttggccataaacacaaacctattggcacaaactatgtgatatagaaagttatgattgttcaagaagtttgtaatttaaaaaaaggaccactatgtacttaccgtaactgaaaagtctttcgttttctcaactttatatatcttccggaaaggac

SEQ ID NO: 6114 - DNA, 229 bp, synthetic construct
  misc_feature 1..229: note = promoter
  source 1..229: mol_type = other DNA
gagggcctatttcccatggttccttcatatttgcataaaggatgcaagactgtcagagggacgattgcaattaacttggccataaacacaaacctattggcacaaactatgtgatatagaaagttatgattgttcaagaagtttgtaatttaaaaaaaggaccactatgtacttaccgtaactgaaaagtctttcgttttctcaactttatatatcttccggaaaggac

SEQ ID NO: 6115 - DNA, 229 bp, synthetic construct
  misc_feature 1..229: note = promoter
  source 1..229: mol_type = other DNA
gagggcctatttcccatggttccttcatatttgcatacaggatgcaagactgtcagagggacgattgcaattaacttggccataaacacaaacctattggcacaaactatgtgatatagaaagttatgattgttcaagaagtttgtaatttaaaaaaaggaccactatgtacttaccgtaactgaaaagtctttcgttttctcaactttatatatcttccggaaaggac

SEQ ID NO: 6116 - DNA, 229 bp, synthetic construct
  misc_feature 1..229: note = promoter
  source 1..229: mol_type = other DNA
gagggcctatttcccatggttccttcatatttgcatataggatgcaagactgtcagagggacgattgcaattaacttggccataaacacaaacctattggcacaaactatgtgatatagaaagttatgattgttcaagaagtttgtaatttaaaaaaaggaccactatgtacttaccgtaactgaaaagtctttcgttttctcaactttatatatcttccggaaaggac

SEQ ID NO: 6117 - DNA, 229 bp, synthetic construct
  misc_feature 1..229: note = promoter
  source 1..229: mol_type = other DNA
gagggcctatttcccatggttccttcatatttgcatagcggatgcaagactgtcagagggacgattgcaattaacttggccataaacacaaacctattggcacaaactatgtgatatagaaagttatgattgttcaagaagtttgtaatttaaaaaaaggaccactatgtacttaccgtaactgaaaagtctttcgttttctcaactttatatatcttccggaaaggac

SEQ ID NO: 6118 - DNA, 229 bp, synthetic construct
  misc_feature 1..229: note = promoter
  source 1..229: mol_type = other DNA
gagggcctatttcccatggttccttcatatttgcataggggatgcaagactgtcagagggacgattgcaattaacttggccataaacacaaacctattggcacaaactatgtgatatagaaagttatgattgttcaagaagtttgtaatttaaaaaaaggaccactatgtacttaccgtaactgaaaagtctttcgttttctcaactttatatatcttccggaaaggac

SEQ ID NO: 6119 - DNA, 229 bp, synthetic construct
  misc_feature 1..229: note = promoter
  source 1..229: mol_type = other DNA
gagggcctatttcccatggttccttcatatttgcatagtggatgcaagactgtcagagggacgattgcaattaacttggccataaacacaaacctattggcacaaactatgtgatatagaaagttatgattgttcaagaagtttgtaatttaaaaaaaggaccactatgtacttaccgtaactgaaaagtctttcgttttctcaactttatatatcttccggaaaggac

SEQ ID NO: 6120 - DNA, 229 bp, synthetic construct
  misc_feature 1..229: note = promoter
  source 1..229: mol_type = other DNA
gagggcctatttcccatggttccttcatatttgcatagaagatgcaagactgtcagagggacgattgcaattaacttggccataaacacaaacctattggcacaaactatgtgatatagaaagttatgattgttcaagaagtttgtaatttaaaaaaaggaccactatgtacttaccgtaactgaaaagtctttcgttttctcaactttatatatcttccggaaaggac

SEQ ID NO: 6121 - DNA, 229 bp, synthetic construct
  misc_feature 1..229: note = promoter
  source 1..229: mol_type = other DNA
gagggcctatttcccatggttccttcatatttgcatagacgatgcaagactgtcagagggacgattgcaattaacttggccataaacacaaacctattggcacaaactatgtgatatagaaagttatgattgttcaagaagtttgtaatttaaaaaaaggaccactatgtacttaccgtaactgaaaagtctttcgttttctcaactttatatatcttccggaaaggac

SEQ ID NO: 6122 - DNA, 229 bp, synthetic construct
  misc_feature 1..229: note = promoter
  source 1..229: mol_type = other DNA
gagggcctatttcccatggttccttcatatttgcatagatgatgcaagactgtcagagggacgattgcaattaacttggccataaacacaaacctattggcacaaactatgtgatatagaaagttatgattgttcaagaagtttgtaatttaaaaaaaggaccactatgtacttaccgtaactgaaaagtctttcgttttctcaactttatatatcttccggaaaggac

SEQ ID NO: 6123 - DNA, 229 bp, synthetic construct
  misc_feature 1..229: note = promoter
  source 1..229: mol_type = other DNA
gagggcctatttcccatggttccttcatatttgcatagagaatgcaagactgtcagagggacgattgcaattaacttggccataaacacaaacctattggcacaaactatgtgatatagaaagttatgattgttcaagaagtttgtaatttaaaaaaaggaccactatgtacttaccgtaactgaaaagtctttcgttttctcaactttatatatcttccggaaaggac

SEQ ID NO: 6124 - DNA, 229 bp, synthetic construct
  misc_feature 1..229: note = promoter
  source 1..229: mol_type = other DNA
gagggcctatttcccatggttccttcatatttgcatagagcatgcaagactgtcagagggacgattgcaattaacttggccataaacacaaacctattggcacaaactatgtgatatagaaagttatgattgttcaagaagtttgtaatttaaaaaaaggaccactatgtacttaccgtaactgaaaagtctttcgttttctcaactttatatatcttccggaaaggac

SEQ ID NO: 6125 - DNA, 229 bp, synthetic construct
  misc_feature 1..229: note = promoter
  source 1..229: mol_type = other DNA
gagggcctatttcccatggttccttcatatttgcatagagtatgcaagactgtcagagggacgattgcaattaacttggccataaacacaaacctattggcacaaactatgtgatatagaaagttatgattgttcaagaagtttgtaatttaaaaaaaggaccactatgtacttaccgtaactgaaaagtctttcgttttctcaactttatatatcttccggaaaggac

SEQ ID NO: 6126 - DNA, 229 bp, synthetic construct
  misc_feature 1..229: note = promoter
  source 1..229: mol_type = other DNA
gagggcctatttcccatggttccttcatatttgcatagaggctgcaagactgtcagagggacgattgcaattaacttggccataaacacaaacctattggcacaaactatgtgatatagaaagttatgattgttcaagaagtttgtaatttaaaaaaaggaccactatgtacttaccgtaactgaaaagtctttcgttttctcaactttatatatcttccggaaaggac

SEQ ID NO: 6127 - DNA, 229 bp, synthetic construct
  misc_feature 1..229: note = promoter
  source 1..229: mol_type = other DNA
gagggcctatttcccatggttccttcatatttgcatagagggtgcaagactgtcagagggacgattgcaattaacttggccataaacacaaacctattggcacaaactatgtgatatagaaagttatgattgttcaagaagtttgtaatttaaaaaaaggaccactatgtacttaccgtaactgaaaagtctttcgttttctcaactttatatatcttccggaaaggac

SEQ ID NO: 6128 - DNA, 229 bp, synthetic construct
  misc_feature 1..229: note = promoter
  source 1..229: mol_type = other DNA
gagggcctatttcccatggttccttcatatttgcatagaggttgcaagactgtcagagggacgattgcaattaacttggccataaacacaaacctattggcacaaactatgtgatatagaaagttatgattgttcaagaagtttgtaatttaaaaaaaggaccactatgtacttaccgtaactgaaaagtctttcgttttctcaactttatatatcttccggaaaggac

SEQ ID NO: 6129 - DNA, 229 bp, synthetic construct
  misc_feature 1..229: note = promoter
  source 1..229: mol_type = other DNA
gagggcctatttcccatggttccttcatatttgcatagaggaagcaagactgtcagagggacgattgcaattaacttggccataaacacaaacctattggcacaaactatgtgatatagaaagttatgattgttcaagaagtttgtaatttaaaaaaaggaccactatgtacttaccgtaactgaaaagtctttcgttttctcaactttatatatcttccggaaaggac

SEQ ID NO: 6130 - DNA, 229 bp, synthetic construct
  misc_feature 1..229: note = promoter
  source 1..229: mol_type = other DNA
gagggcctatttcccatggttccttcatatttgcatagaggacgcaagactgtcagagggacgattgcaattaacttggccataaacacaaacctattggcacaaactatgtgatatagaaagttatgattgttcaagaagtttgtaatttaaaaaaaggaccactatgtacttaccgtaactgaaaagtctttcgttttctcaactttatatatcttccggaaaggac

SEQ ID NO: 6131 - DNA, 229 bp, synthetic construct
  misc_feature 1..229: note = promoter
  source 1..229: mol_type = other DNA
gagggcctatttcccatggttccttcatatttgcatagaggaggcaagactgtcagagggacgattgcaattaacttggccataaacacaaacctattggcacaaactatgtgatatagaaagttatgattgttcaagaagtttgtaatttaaaaaaaggaccactatgtacttaccgtaactgaaaagtctttcgttttctcaactttatatatcttccggaaaggac

SEQ ID NO: 6132 - DNA, 229 bp, synthetic construct
  misc_feature 1..229: note = promoter
  source 1..229: mol_type = other DNA
gagggcctatttcccatggttccttcatatttgcatagaggatacaagactgtcagagggacgattgcaattaacttggccataaacacaaacctattggcacaaactatgtgatatagaaagttatgattgttcaagaagtttgtaatttaaaaaaaggaccactatgtacttaccgtaactgaaaagtctttcgttttctcaactttatatatcttccggaaaggac

SEQ ID NO: 6133 - DNA, 229 bp, synthetic construct
  misc_feature 1..229: note = promoter
  source 1..229: mol_type = other DNA
gagggcctatttcccatggttccttcatatttgcatagaggatccaagactgtcagagggacgattgcaattaacttggccataaacacaaacctattggcacaaactatgtgatatagaaagttatgattgttcaagaagtttgtaatttaaaaaaaggaccactatgtacttaccgtaactgaaaagtctttcgttttctcaactttatatatcttccggaaaggac

SEQ ID NO: 6134 - DNA, 229 bp, synthetic construct
  misc_feature 1..229: note = promoter
  source 1..229: mol_type = other DNA
gagggcctatttcccatggttccttcatatttgcatagaggattcaagactgtcagagggacgattgcaattaacttggccataaacacaaacctattggcacaaactatgtgatatagaaagttatgattgttcaagaagtttgtaatttaaaaaaaggaccactatgtacttaccgtaactgaaaagtctttcgttttctcaactttatatatcttccggaaaggac

SEQ ID NO: 6135 - DNA, 229 bp, synthetic construct
  misc_feature 1..229: note = promoter
  source 1..229: mol_type = other DNA
gagggcctatttcccatggttccttcatatttgcatagaggatgaaagactgtcagagggacgattgcaattaacttggccataaacacaaacctattggcacaaactatgtgatatagaaagttatgattgttcaagaagtttgtaatttaaaaaaaggaccactatgtacttaccgtaactgaaaagtctttcgttttctcaactttatatatcttccggaaaggac

SEQ ID NO: 6136 - DNA, 229 bp, synthetic construct
  misc_feature 1..229: note = promoter
  source 1..229: mol_type = other DNA
gagggcctatttcccatggttccttcatatttgcatagaggatggaagactgtcagagggacgattgcaattaacttggccataaacacaaacctattggcacaaactatgtgatatagaaagttatgattgttcaagaagtttgtaatttaaaaaaaggaccactatgtacttaccgtaactgaaaagtctttcgttttctcaactttatatatcttccggaaaggac

SEQ ID NO: 6137 - DNA, 229 bp, synthetic construct
  misc_feature 1..229: note = promoter
  source 1..229: mol_type = other DNA
gagggcctatttcccatggttccttcatatttgcatagaggatgtaagactgtcagagggacgattgcaattaacttggccataaacacaaacctattggcacaaactatgtgatatagaaagttatgattgttcaagaagtttgtaatttaaaaaaaggaccactatgtacttaccgtaactgaaaagtctttcgttttctcaactttatatatcttccggaaaggac

SEQ ID NO: 6138 - DNA, 229 bp, synthetic construct
  misc_feature 1..229: note = promoter
  source 1..229: mol_type = other DNA
gagggcctatttcccatggttccttcatatttgcatagaggatgccagactgtcagagggacgattgcaattaacttggccataaacacaaacctattggcacaaactatgtgatatagaaagttatgattgttcaagaagtttgtaatttaaaaaaaggaccactatgtacttaccgtaactgaaaagtctttcgttttctcaactttatatatcttccggaaaggac

SEQ ID NO: 6139 - DNA, 229 bp, synthetic construct
  misc_feature 1..229: note = promoter
  source 1..229: mol_type = other DNA
gagggcctatttcccatggttccttcatatttgcatagaggatgcgagactgtcagagggacgattgcaattaacttggccataaacacaaacctattggcacaaactatgtgatatagaaagttatgattgttcaagaagtttgtaatttaaaaaaaggaccactatgtacttaccgtaactgaaaagtctttcgttttctcaactttatatatcttccggaaaggac

SEQ ID NO: 6140 - DNA, 229 bp, synthetic construct
  misc_feature 1..229: note = promoter
  source 1..229: mol_type = other DNA
gagggcctatttcccatggttccttcatatttgcatagaggatgctagactgtcagagggacgattgcaattaacttggccataaacacaaacctattggcacaaactatgtgatatagaaagttatgattgttcaagaagtttgtaatttaaaaaaaggaccactatgtacttaccgtaactgaaaagtctttcgttttctcaactttatatatcttccggaaaggac

SEQ ID NO: 6141 - DNA, 229 bp, synthetic construct
  misc_feature 1..229: note = promoter
  source 1..229: mol_type = other DNA
gagggcctatttcccatggttccttcatatttgcatagaggatgcacgactgtcagagggacgattgcaattaacttggccataaacacaaacctattggcacaaactatgtgatatagaaagttatgattgttcaagaagtttgtaatttaaaaaaaggaccactatgtacttaccgtaactgaaaagtctttcgttttctcaactttatatatcttccggaaaggac

SEQ ID NO: 6142 - DNA, 229 bp, synthetic construct
  misc_feature 1..229: note = promoter
  source 1..229: mol_type = other DNA
gagggcctatttcccatggttccttcatatttgcatagaggatgcaggactgtcagagggacgattgcaattaacttggccataaacacaaacctattggcacaaactatgtgatatagaaagttatgattgttcaagaagtttgtaatttaaaaaaaggaccactatgtacttaccgtaactgaaaagtctttcgttttctcaactttatatatcttccggaaaggac

SEQ ID NO: 6143 - DNA, 229 bp, synthetic construct
  misc_feature 1..229: note = promoter
  source 1..229: mol_type = other DNA
gagggcctatttcccatggttccttcatatttgcatagaggatgcatgactgtcagagggacgattgcaattaacttggccataaacacaaacctattggcacaaactatgtgatatagaaagttatgattgttcaagaagtttgtaatttaaaaaaaggaccactatgtacttaccgtaactgaaaagtctttcgttttctcaactttatatatcttccggaaaggac

SEQ ID NO: 6144 - DNA, 229 bp, synthetic construct
  misc_feature 1..229: note = promoter
  source 1..229: mol_type = other DNA
gagggcctatttcccatggttccttcatatttgcatagaggatgcaaaactgtcagagggacgattgcaattaacttggccataaacacaaacctattggcacaaactatgtgatatagaaagttatgattgttcaagaagtttgtaatttaaaaaaaggaccactatgtacttaccgtaactgaaaagtctttcgttttctcaactttatatatcttccggaaaggac

SEQ ID NO: 6145 - DNA, 229 bp, synthetic construct
  misc_feature 1..229: note = promoter
  source 1..229: mol_type = other DNA
gagggcctatttcccatggttccttcatatttgcatagaggatgcaacactgtcagagggacgattgcaattaacttggccataaacacaaacctattggcacaaactatgtgatatagaaagttatgattgttcaagaagtttgtaatttaaaaaaaggaccactatgtacttaccgtaactgaaaagtctttcgttttctcaactttatatatcttccggaaaggac

SEQ ID NO: 6146 - DNA, 229 bp, synthetic construct
  misc_feature 1..229: note = promoter
  source 1..229: mol_type = other DNA
gagggcctatttcccatggttccttcatatttgcatagaggatgcaatactgtcagagggacgattgcaattaacttggccataaacacaaacctattggcacaaactatgtgatatagaaagttatgattgttcaagaagtttgtaatttaaaaaaaggaccactatgtacttaccgtaactgaaaagtctttcgttttctcaactttatatatcttccggaaaggac

SEQ ID NO: 6147 - DNA, 229 bp, synthetic construct
  misc_feature 1..229: note = promoter
  source 1..229: mol_type = other DNA
gagggcctatttcccatggttccttcatatttgcatagaggatgcaagcctgtcagagggacgattgcaattaacttggccataaacacaaacctattggcacaaactatgtgatatagaaagttatgattgttcaagaagtttgtaatttaaaaaaaggaccactatgtacttaccgtaactgaaaagtctttcgttttctcaactttatatatcttccggaaaggac

SEQ ID NO: 6148 - DNA, 229 bp, synthetic construct
  misc_feature 1..229: note = promoter
  source 1..229: mol_type = other DNA
gagggcctatttcccatggttccttcatatttgcatagaggatgcaaggctgtcagagggacgattgcaattaacttggccataaacacaaacctattggcacaaactatgtgatatagaaagttatgattgttcaagaagtttgtaatttaaaaaaaggaccactatgtacttaccgtaactgaaaagtctttcgttttctcaactttatatatcttccggaaaggac

SEQ ID NO: 6149 - DNA, 229 bp, synthetic construct
  misc_feature 1..229: note = promoter
  source 1..229: mol_type = other DNA
gagggcctatttcccatggttccttcatatttgcatagaggatgcaagtctgtcagagggacgattgcaattaacttggccataaacacaaacctattggcacaaactatgtgatatagaaagttatgattgttcaagaagtttgtaatttaaaaaaaggaccactatgtacttaccgtaactgaaaagtctttcgttttctcaactttatatatcttccggaaaggac

SEQ ID NO: 6150 - DNA, 229 bp, synthetic construct
  misc_feature 1..229: note = promoter
  source 1..229: mol_type = other DNA
gagggcctatttcccatggttccttcatatttgcatagaggatgcaagaatgtcagagggacgattgcaattaacttggccataaacacaaacctattggcacaaactatgtgatatagaaagttatgattgttcaagaagtttgtaatttaaaaaaaggaccactatgtacttaccgtaactgaaaagtctttcgttttctcaactttatatatcttccggaaaggac

SEQ ID NO: 6151 - DNA, 229 bp, synthetic construct
  misc_feature 1..229: note = promoter
  source 1..229: mol_type = other DNA
gagggcctatttcccatggttccttcatatttgcatagaggatgcaagagtgtcagagggacgattgcaattaacttggccataaacacaaacctattggcacaaactatgtgatatagaaagttatgattgttcaagaagtttgtaatttaaaaaaaggaccactatgtacttaccgtaactgaaaagtctttcgttttctcaactttatatatcttccggaaaggac

SEQ ID NO: 6152 - DNA, 229 bp, synthetic construct
  misc_feature 1..229: note = promoter
  source 1..229: mol_type = other DNA
gagggcctatttcccatggttccttcatatttgcatagaggatgcaagattgtcagagggacgattgcaattaacttggccataaacacaaacctattggcacaaactatgtgatatagaaagttatgattgttcaagaagtttgtaatttaaaaaaaggaccactatgtacttaccgtaactgaaaagtctttcgttttctcaactttatatatcttccggaaaggac

SEQ ID NO: 6153 - DNA, 229 bp, synthetic construct
  misc_feature 1..229: note = promoter
  source 1..229: mol_type = other DNA
gagggcctatttcccatggttccttcatatttgcatagaggatgcaagacagtcagagggacgattgcaattaacttggccataaacacaaacctattggcacaaactatgtgatatagaaagttatgattgttcaagaagtttgtaatttaaaaaaaggaccactatgtacttaccgtaactgaaaagtctttcgttttctcaactttatatatcttccggaaaggac

SEQ ID NO: 6154 - DNA, 229 bp, synthetic construct
  misc_feature 1..229: note = promoter
  source 1..229: mol_type = other DNA
gagggcctatttcccatggttccttcatatttgcatagaggatgcaagaccgtcagagggacgattgcaattaacttggccataaacacaaacctattggcacaaactatgtgatatagaaagttatgattgttcaagaagtttgtaatttaaaaaaaggaccactatgtacttaccgtaactgaaaagtctttcgttttctcaactttatatatcttccggaaaggac

SEQ ID NO: 6155 - DNA, 229 bp, synthetic construct
  misc_feature 1..229: note = promoter
  source 1..229: mol_type = other DNA
gagggcctatttcccatggttccttcatatttgcatagaggatgcaagacggtcagagggacgattgcaattaacttggccataaacacaaacctattggcacaaactatgtgatatagaaagttatgattgttcaagaagtttgtaatttaaaaaaaggaccactatgtacttaccgtaactgaaaagtctttcgttttctcaactttatatatcttccggaaaggac

SEQ ID NO: 6156 - DNA, 229 bp, synthetic construct
  misc_feature 1..229: note = promoter
  source 1..229: mol_type = other DNA
gagggcctatttcccatggttccttcatatttgcatagaggatgcaagactatcagagggacgattgcaattaacttggccataaacacaaacctattggcacaaactatgtgatatagaaagttatgattgttcaagaagtttgtaatttaaaaaaaggaccactatgtacttaccgtaactgaaaagtctttcgttttctcaactttatatatcttccggaaaggac

SEQ ID NO: 6157 - DNA, 229 bp, synthetic construct
  misc_feature 1..229: note = promoter
  source 1..229: mol_type = other DNA
gagggcctatttcccatggttccttcatatttgcatagaggatgcaagactctcagagggacgattgcaattaacttggccataaacacaaacctattggcacaaactatgtgatatagaaagttatgattgttcaagaagtttgtaatttaaaaaaaggaccactatgtacttaccgtaactgaaaagtctttcgttttctcaactttatatatcttccggaaaggac

SEQ ID NO: 6158 - DNA, 229 bp, synthetic construct
  misc_feature 1..229: note = promoter
  source 1..229: mol_type = other DNA
gagggcctatttcccatggttccttcatatttgcatagaggatgcaagactttcagagggacgattgcaattaacttggccataaacacaaacctattggcacaaactatgtgatatagaaagttatgattgttcaagaagtttgtaatttaaaaaaaggaccactatgtacttaccgtaactgaaaagtctttcgttttctcaactttatatatcttccggaaaggac

SEQ ID NO: 6159 - DNA, 229 bp, synthetic construct
  misc_feature 1..229: note = promoter
  source 1..229: mol_type = other DNA
gagggcctatttcccatggttccttcatatttgcatagaggatgcaagactgacagagggacgattgcaattaacttggccataaacacaaacctattggcacaaactatgtgatatagaaagttatgattgttcaagaagtttgtaatttaaaaaaaggaccactatgtacttaccgtaactgaaaagtctttcgttttctcaactttatatatcttccggaaaggac

SEQ ID NO: 6160 - DNA, 229 bp, synthetic construct
  misc_feature 1..229: note = promoter
  source 1..229: mol_type = other DNA
gagggcctatttcccatggttccttcatatttgcatagaggatgcaagactgccagagggacgattgcaattaacttggccataaacacaaacctattggcacaaactatgtgatatagaaagttatgattgttcaagaagtttgtaatttaaaaaaaggaccactatgtacttaccgtaactgaaaagtctttcgttttctcaactttatatatcttccggaaaggac

SEQ ID NO: 6161 - DNA, 229 bp, synthetic construct
  misc_feature 1..229: note = promoter
  source 1..229: mol_type = other DNA
gagggcctatttcccatggttccttcatatttgcatagaggatgcaagactggcagagggacgattgcaattaacttggccataaacacaaacctattggcacaaactatgtgatatagaaagttatgattgttcaagaagtttgtaatttaaaaaaaggaccactatgtacttaccgtaactgaaaagtctttcgttttctcaactttatatatcttccggaaaggac

SEQ ID NO: 6162 - DNA, 229 bp, synthetic construct
  misc_feature 1..229: note = promoter
  source 1..229: mol_type = other DNA
gagggcctatttcccatggttccttcatatttgcatagaggatgcaagactgtaagagggacgattgcaattaacttggccataaacacaaacctattggcacaaactatgtgatatagaaagttatgattgttcaagaagtttgtaatttaaaaaaaggaccactatgtacttaccgtaactgaaaagtctttcgttttctcaactttatatatcttccggaaaggac

SEQ ID NO: 6163 - DNA, 229 bp, synthetic construct
  misc_feature 1..229: note = promoter
  source 1..229: mol_type = other DNA
gagggcctatttcccatggttccttcatatttgcatagaggatgcaagactgtgagagggacgattgcaattaacttggccataaacacaaacctattggcacaaactatgtgatatagaaagttatgattgttcaagaagtttgtaatttaaaaaaaggaccactatgtacttaccgtaactgaaaagtctttcgttttctcaactttatatatcttccggaaaggac

SEQ ID NO: 6164 - DNA, 229 bp, synthetic construct
  misc_feature 1..229: note = promoter
  source 1..229: mol_type = other DNA
gagggcctatttcccatggttccttcatatttgcatagaggatgcaagactgttagagggacgattgcaattaacttggccataaacacaaacctattggcacaaactatgtgatatagaaagttatgattgttcaagaagtttgtaatttaaaaaaaggaccactatgtacttaccgtaactgaaaagtctttcgttttctcaactttatatatcttccggaaaggac

SEQ ID NO: 6165 - DNA, 229 bp, synthetic construct
  misc_feature 1..229: note = promoter
  source 1..229: mol_type = other DNA
gagggcctatttcccatggttccttcatatttgcatagaggatgcaagactgtccgagggacgattgcaattaacttggccataaacacaaacctattggcacaaactatgtgatatagaaagttatgattgttcaagaagtttgtaatttaaaaaaaggaccactatgtacttaccgtaactgaaaagtctttcgttttctcaactttatatatcttccggaaaggac

SEQ ID NO: 6166 - DNA, 229 bp, synthetic construct
  misc_feature 1..229: note = promoter
  source 1..229: mol_type = other DNA
gagggcctatttcccatggttccttcatatttgcatagaggatgcaagactgtcggagggacgattgcaattaacttggccataaacacaaacctattggcacaaactatgtgatatagaaagttatgattgttcaagaagtttgtaatttaaaaaaaggaccactatgtacttaccgtaactgaaaagtctttcgttttctcaactttatatatcttccggaaaggac

SEQ ID NO: 6167 - DNA, 229 bp, synthetic construct
  misc_feature 1..229: note = promoter
  source 1..229: mol_type = other DNA
gagggcctatttcccatggttccttcatatttgcatagaggatgcaagactgtctgagggacgattgcaattaacttggccataaacacaaacctattggcacaaactatgtgatatagaaagttatgattgttcaagaagtttgtaatttaaaaaaaggaccactatgtacttaccgtaactgaaaagtctttcgttttctcaactttatatatcttccggaaaggac

SEQ ID NO: 6168 - DNA, 229 bp, synthetic construct
  misc_feature 1..229: note = promoter
  source 1..229: mol_type = other DNA
gagggcctatttcccatggttccttcatatttgcatagaggatgcaagactgtcaaagggacgattgcaattaacttggccataaacacaaacctattggcacaaactatgtgatatagaaagttatgattgttcaagaagtttgtaatttaaaaaaaggaccactatgtacttaccgtaactgaaaagtctttcgttttctcaactttatatatcttccggaaaggac

SEQ ID NO: 6169 - DNA, 229 bp, synthetic construct
  misc_feature 1..229: note = promoter
  source 1..229: mol_type = other DNA
gagggcctatttcccatggttccttcatatttgcatagaggatgcaagactgtcacagggacgattgcaattaacttggccataaacacaaacctattggcacaaactatgtgatatagaaagttatgattgttcaagaagtttgtaatttaaaaaaaggaccactatgtacttaccgtaactgaaaagtctttcgttttctcaactttatatatcttccggaaaggac

SEQ ID NO: 6170 - DNA, 229 bp, synthetic construct
  misc_feature 1..229: note = promoter
  source 1..229: mol_type = other DNA
gagggcctatttcccatggttccttcatatttgcatagaggatgcaagactgtcatagggacgattgcaattaacttggccataaacacaaacctattggcacaaactatgtgatatagaaagttatgattgttcaagaagtttgtaatttaaaaaaaggaccactatgtacttaccgtaactgaaaagtctttcgttttctcaactttatatatcttccggaaaggac

SEQ ID NO: 6171 - DNA, 229 bp, synthetic construct
  misc_feature 1..229: note = promoter
  source 1..229: mol_type = other DNA
gagggcctatttcccatggttccttcatatttgcatagaggatgcaagactgtcagcgggacgattgcaattaacttggccataaacacaaacctattggcacaaactatgtgatatagaaagttatgattgttcaagaagtttgtaatttaaaaaaaggaccactatgtacttaccgtaactgaaaagtctttcgttttctcaactttatatatcttccggaaaggac

SEQ ID NO: 6172 - DNA, 229 bp, synthetic construct
  misc_feature 1..229: note = promoter
  source 1..229: mol_type = other DNA
gagggcctatttcccatggttccttcatatttgcatagaggatgcaagactgtcagggggacgattgcaattaacttggccataaacacaaacctattggcacaaactatgtgatatagaaagttatgattgttcaagaagtttgtaatttaaaaaaaggaccactatgtacttaccgtaactgaaaagtctttcgttttctcaactttatatatcttccggaaaggac

SEQ ID NO: 6173 - DNA, 229 bp, synthetic construct
  misc_feature 1..229: note = promoter
  source 1..229: mol_type = other DNA
gagggcctatttcccatggttccttcatatttgcatagaggatgcaagactgtcagtgggacgattgcaattaacttggccataaacacaaacctattggcacaaactatgtgatatagaaagttatgattgttcaagaagtttgtaatttaaaaaaaggaccactatgtacttaccgtaactgaaaagtctttcgttttctcaactttatatatcttccggaaaggac

SEQ ID NO: 6174 - DNA, 229 bp, synthetic construct
  misc_feature 1..229: note = promoter
  source 1..229: mol_type = other DNA
gagggcctatttcccatggttccttcatatttgcatagaggatgcaagactgtcagaaggacgattgcaattaacttggccataaacacaaacctattggcacaaactatgtgatatagaaagttatgattgttcaagaagtttgtaatttaaaaaaaggaccactatgtacttaccgtaactgaaaagtctttcgttttctcaactttatatatcttccggaaaggac

SEQ ID NO: 6175 - DNA, 229 bp, synthetic construct
  misc_feature 1..229: note = promoter
  source 1..229: mol_type = other DNA
gagggcctatttcccatggttccttcatatttgcatagaggatgcaagactgtcagacggacgattgcaattaacttggccataaacacaaacctattggcacaaactatgtgatatagaaagttatgattgttcaagaagtttgtaatttaaaaaaaggaccactatgtacttaccgtaactgaaaagtctttcgttttctcaactttatatatcttccggaaaggac

SEQ ID NO: 6176 - DNA, 229 bp, synthetic construct
  misc_feature 1..229: note = promoter
  source 1..229: mol_type = other DNA
gagggcctatttcccatggttccttcatatttgcatagaggatgcaagactgtcagatggacgattgcaattaacttggccataaacacaaacctattggcacaaactatgtgatatagaaagttatgattgttcaagaagtttgtaatttaaaaaaaggaccactatgtacttaccgtaactgaaaagtctttcgttttctcaactttatatatcttccggaaaggac

SEQ ID NO: 6177 - DNA, 229 bp, synthetic construct
  misc_feature 1..229: note = promoter
  source 1..229: mol_type = other DNA
gagggcctatttcccatggttccttcatatttgcatagaggatgcaagactgtcagagagacgattgcaattaacttggccataaacacaaacctattggcacaaactatgtgatatagaaagttatgattgttcaagaagtttgtaatttaaaaaaaggaccactatgtacttaccgtaactgaaaagtctttcgttttctcaactttatatatcttccggaaaggac

SEQ ID NO: 6178 - DNA, 229 bp, synthetic construct
  misc_feature 1..229: note = promoter
  source 1..229: mol_type = other DNA
gagggcctatttcccatggttccttcatatttgcatagaggatgcaagactgtcagagcgacgattgcaattaacttggccataaacacaaacctattggcacaaactatgtgatatagaaagttatgattgttcaagaagtttgtaatttaaaaaaaggaccactatgtacttaccgtaactgaaaagtctttcgttttctcaactttatatatcttccggaaaggac

SEQ ID NO: 6179 - DNA, 229 bp, synthetic construct
  misc_feature 1..229: note = promoter
  source 1..229: mol_type = other DNA
gagggcctatttcccatggttccttcatatttgcatagaggatgcaagactgtcagagtgacgattgcaattaacttggccataaacacaaacctattggcacaaactatgtgatatagaaagttatgattgttcaagaagtttgtaatttaaaaaaaggaccactatgtacttaccgtaactgaaaagtctttcgttttctcaactttatatatcttccggaaaggac

SEQ ID NO: 6180 - DNA, 229 bp, synthetic construct
  misc_feature 1..229: note = promoter
  source 1..229: mol_type = other DNA
gagggcctatttcccatggttccttcatatttgcatagaggatgcaagactgtcagaggaacgattgcaattaacttggccataaacacaaacctattggcacaaactatgtgatatagaaagttatgattgttcaagaagtttgtaatttaaaaaaaggaccactatgtacttaccgtaactgaaaagtctttcgttttctcaactttatatatcttccggaaaggac

SEQ ID NO: 6181 - DNA, 229 bp, synthetic construct
  misc_feature 1..229: note = promoter
  source 1..229: mol_type = other DNA
gagggcctatttcccatggttccttcatatttgcatagaggatgcaagactgtcagaggcacgattgcaattaacttggccataaacacaaacctattggcacaaactatgtgatatagaaagttatgattgttcaagaagtttgtaatttaaaaaaaggaccactatgtacttaccgtaactgaaaagtctttcgttttctcaactttatatatcttccggaaaggac

SEQ ID NO: 6182 - DNA, 229 bp, synthetic construct
  misc_feature 1..229: note = promoter
  source 1..229: mol_type = other DNA
gagggcctatttcccatggttccttcatatttgcatagaggatgcaagactgtcagaggtacgattgcaattaacttggccataaacacaaacctattggcacaaactatgtgatatagaaagttatgattgttcaagaagtttgtaatttaaaaaaaggaccactatgtacttaccgtaactgaaaagtctttcgttttctcaactttatatatcttccggaaaggac

SEQ ID NO: 6183 - DNA, 229 bp, synthetic construct
  misc_feature 1..229: note = promoter
  source 1..229: mol_type = other DNA
gagggcctatttcccatggttccttcatatttgcatagaggatgcaagactgtcagagggccgattgcaattaacttggccataaacacaaacctattggcacaaactatgtgatatagaaagttatgattgttcaagaagtttgtaatttaaaaaaaggaccactatgtacttaccgtaactgaaaagtctttcgttttctcaactttatatatcttccggaaaggac

SEQ ID NO: 6184 - DNA, 229 bp, synthetic construct
  misc_feature 1..229: note = promoter
  source 1..229: mol_type = other DNA
gagggcctatttcccatggttccttcatatttgcatagaggatgcaagactgtcagaggggcgattgcaattaacttggccataaacacaaacctattggcacaaactatgtgatatagaaagttatgattgttcaagaagtttgtaatttaaaaaaaggaccactatgtacttaccgtaactgaaaagtctttcgttttctcaactttatatatcttccggaaaggac

SEQ ID NO: 6185 - DNA, 229 bp, synthetic construct
  misc_feature 1..229: note = promoter
  source 1..229: mol_type = other DNA
gagggcctatttcccatggttccttcatatttgcatagaggatgcaagactgtcagagggtcgattgcaattaacttggccataaacacaaacctattggcacaaactatgtgatatagaaagttatgattgttcaagaagtttgtaatttaaaaaaaggaccactatgtacttaccgtaactgaaaagtctttcgttttctcaactttatatatcttccggaaaggac

SEQ ID NO: 6186 - DNA, 229 bp, synthetic construct
  misc_feature 1..229: note = promoter
  source 1..229: mol_type = other DNA
gagggcctatttcccatggttccttcatatttgcatagaggatgcaagactgtcagagggaagattgcaattaacttggccataaacacaaacctattggcacaaactatgtgatatagaaagttatgattgttcaagaagtttgtaatttaaaaaaaggaccactatgtacttaccgtaactgaaaagtctttcgttttctcaactttatatatcttccggaaaggac

SEQ ID NO: 6187 - DNA, 229 bp, synthetic construct
  misc_feature 1..229: note = promoter
  source 1..229: mol_type = other DNA
gagggcctatttcccatggttccttcatatttgcatagaggatgcaagactgtcagagggaggattgcaattaacttggccataaacacaaacctattggcacaaactatgtgatatagaaagttatgattgttcaagaagtttgtaatttaaaaaaaggaccactatgtacttaccgtaactgaaaagtctttcgttttctcaactttatatatcttccggaaaggac

SEQ ID NO: 6188 - DNA, 229 bp, synthetic construct
  misc_feature 1..229: note = promoter
  source 1..229: mol_type = other DNA
gagggcctatttcccatggttccttcatatttgcatagaggatgcaagactgtcagagggatgattgcaattaacttggccataaacacaaacctattggcacaaactatgtgatatagaaagttatgattgttcaagaagtttgtaatttaaaaaaaggaccactatgtacttaccgtaactgaaaagtctttcgttttctcaactttatatatcttccggaaaggac

SEQ ID NO: 6189 - DNA, 229 bp, synthetic construct
  misc_feature 1..229: note = promoter
  source 1..229: mol_type = other DNA
gagggcctatttcccatggttccttcatatttgcatagaggatgcaagactgtcagagggacaattgcaattaacttggccataaacacaaacctattggcacaaactatgtgatatagaaagttatgattgttcaagaagtttgtaatttaaaaaaaggaccactatgtacttaccgtaactgaaaagtctttcgttttctcaactttatatatcttccggaaaggac

SEQ ID NO: 6190 - DNA, 229 bp, synthetic construct
  misc_feature 1..229: note = promoter
  source 1..229: mol_type = other DNA
gagggcctatttcccatggttccttcatatttgcatagaggatgcaagactgtcagagggaccattgcaattaacttggccataaacacaaacctattggcacaaactatgtgatatagaaagttatgattgttcaagaagtttgtaatttaaaaaaaggaccactatgtacttaccgtaactgaaaagtctttcgttttctcaactttatatatcttccggaaaggac

SEQ ID NO: 6191 - DNA, 229 bp, synthetic construct
  misc_feature 1..229: note = promoter
  source 1..229: mol_type = other DNA
gagggcctatttcccatggttccttcatatttgcatagaggatgcaagactgtcagagggactattgcaattaacttggccataaacacaaacctattggcacaaactatgtgatatagaaagttatgattgttcaagaagtttgtaatttaaaaaaaggaccactatgtacttaccgtaactgaaaagtctttcgttttctcaactttatatatcttccggaaaggac

SEQ ID NO: 6192 - DNA, 229 bp, synthetic construct
  misc_feature 1..229: note = promoter
  source 1..229: mol_type = other DNA
gagggcctatttcccatggttccttcatatttgcatagaggatgcaagactgtcagagggacgcttgcaattaacttggccataaacacaaacctattggcacaaactatgtgatatagaaagttatgattgttcaagaagtttgtaatttaaaaaaaggaccactatgtacttaccgtaactgaaaagtctttcgttttctcaactttatatatcttccggaaaggac

SEQ ID NO: 6193 - DNA, 229 bp, synthetic construct
  misc_feature 1..229: note = promoter
  source 1..229: mol_type = other DNA
gagggcctatttcccatggttccttcatatttgcatagaggatgcaagactgtcagagggacggttgcaattaacttggccataaacacaaacctattggcacaaactatgtgatatagaaagttatgattgttcaagaagtttgtaatttaaaaaaaggaccactatgtacttaccgtaactgaaaagtctttcgttttctcaactttatatatcttccggaaaggac

SEQ ID NO: 6194 - DNA, 229 bp, synthetic construct
  misc_feature 1..229: note = promoter
  source 1..229: mol_type = other DNA
gagggcctatttcccatggttccttcatatttgcatagaggatgcaagactgtcagagggacgtttgcaattaacttggccataaacacaaacctattggcacaaactatgtgatatagaaagttatgattgttcaagaagtttgtaatttaaaaaaaggaccactatgtacttaccgtaactgaaaagtctttcgttttctcaactttatatatcttccggaaaggac

SEQ ID NO: 6195 - DNA, 229 bp, synthetic construct
  misc_feature 1..229: note = promoter
  source 1..229: mol_type = other DNA
gagggcctatttcccatggttccttcatatttgcatagaggatgcaagactgtcagagggacgaatgcaattaacttggccataaacacaaacctattggcacaaactatgtgatatagaaagttatgattgttcaagaagtttgtaatttaaaaaaaggaccactatgtacttaccgtaactgaaaagtctttcgttttctcaactttatatatcttccggaaaggac

SEQ ID NO: 6196 - DNA, 229 bp, synthetic construct
  misc_feature 1..229: note = promoter
  source 1..229: mol_type = other DNA
gagggcctatttcccatggttccttcatatttgcatagaggatgcaagactgtcagagggacgactgcaattaacttggccataaacacaaacctattggcacaaactatgtgatatagaaagttatgattgttcaagaagtttgtaatttaaaaaaaggaccactatgtacttaccgtaactgaaaagtctttcgttttctcaactttatatatcttccggaaaggac

SEQ ID NO: 6197 - DNA, 229 bp, synthetic construct
  misc_feature 1..229: note = promoter
  source 1..229: mol_type = other DNA
gagggcctatttcccatggttccttcatatttgcatagaggatgcaagactgtcagagggacgagtgcaattaacttggccataaacacaaacctattggcacaaactatgtgatatagaaagttatgattgttcaagaagtttgtaatttaaaaaaaggaccactatgtacttaccgtaactgaaaagtctttcgttttctcaactttatatatcttccggaaaggac

SEQ ID NO: 6198 - DNA, 229 bp, synthetic construct
  misc_feature 1..229: note = promoter
  source 1..229: mol_type = other DNA
gagggcctatttcccatggttccttcatatttgcatagaggatgcaagactgtcagagggacgatagcaattaacttggccataaacacaaacctattggcacaaactatgtgatatagaaagttatgattgttcaagaagtttgtaatttaaaaaaaggaccactatgtacttaccgtaactgaaaagtctttcgttttctcaactttatatatcttccggaaaggac

SEQ ID NO: 6199 - DNA, 229 bp, synthetic construct
  misc_feature 1..229: note = promoter
  source 1..229: mol_type = other DNA
gagggcctatttcccatggttccttcatatttgcatagaggatgcaagactgtcagagggacgatcgcaattaacttggccataaacacaaacctattggcacaaactatgtgatatagaaagttatgattgttcaagaagtttgtaatttaaaaaaaggaccactatgtacttaccgtaactgaaaagtctttcgttttctcaactttatatatcttccggaaaggac

SEQ ID NO: 6200 - DNA, 229 bp, synthetic construct
  misc_feature 1..229: note = promoter
  source 1..229: mol_type = other DNA
gagggcctatttcccatggttccttcatatttgcatagaggatgcaagactgtcagagggacgatggcaattaacttggccataaacacaaacctattggcacaaactatgtgatatagaaagttatgattgttcaagaagtttgtaatttaaaaaaaggaccactatgtacttaccgtaactgaaaagtctttcgttttctcaactttatatatcttccggaaaggac

SEQ ID NO: 6201 - DNA, 229 bp, synthetic construct
  misc_feature 1..229: note = promoter
  source 1..229: mol_type = other DNA
gagggcctatttcccatggttccttcatatttgcatagaggatgcaagactgtcagagggacgattacaattaacttggccataaacacaaacctattggcacaaactatgtgatatagaaagttatgattgttcaagaagtttgtaatttaaaaaaaggaccactatgtacttaccgtaactgaaaagtctttcgttttctcaactttatatatcttccggaaaggac

SEQ ID NO: 6202 - DNA, 229 bp, synthetic construct
  misc_feature 1..229: note = promoter
  source 1..229: mol_type = other DNA
gagggcctatttcccatggttccttcatatttgcatagaggatgcaagactgtcagagggacgattccaattaacttggccataaacacaaacctattggcacaaactatgtgatatagaaagttatgattgttcaagaagtttgtaatttaaaaaaaggaccactatgtacttaccgtaactgaaaagtctttcgttttctcaactttatatatcttccggaaaggac

SEQ ID NO: 6203 - DNA, 229 bp, synthetic construct
  misc_feature 1..229: note = promoter
  source 1..229: mol_type = other DNA
gagggcctatttcccatggttccttcatatttgcatagaggatgcaagactgtcagagggacgatttcaattaacttggccataaacacaaacctattggcacaaactatgtgatatagaaagttatgattgttcaagaagtttgtaatttaaaaaaaggaccactatgtacttaccgtaactgaaaagtctttcgttttctcaactttatatatcttccggaaaggac

SEQ ID NO: 6204 - DNA, 229 bp, synthetic construct
  misc_feature 1..229: note = promoter
  source 1..229: mol_type = other DNA
gagggcctatttcccatggttccttcatatttgcatagaggatgcaagactgtcagagggacgattgaaattaacttggccataaacacaaacctattggcacaaactatgtgatatagaaagttatgattgttcaagaagtttgtaatttaaaaaaaggaccactatgtacttaccgtaactgaaaagtctttcgttttctcaactttatatatcttccggaaaggac

SEQ ID NO: 6205 - DNA, 229 bp, synthetic construct
  misc_feature 1..229: note = promoter
  source 1..229: mol_type = other DNA
gagggcctatttcccatggttccttcatatttgcatagaggatgcaagactgtcagagggacgattggaattaacttggccataaacacaaacctattggcacaaactatgtgatatagaaagttatgattgttcaagaagtttgtaatttaaaaaaaggaccactatgtacttaccgtaactgaaaagtctttcgttttctcaactttatatatcttccggaaaggac

SEQ ID NO: 6206 - DNA, 229 bp, synthetic construct
  misc_feature 1..229: note = promoter
  source 1..229: mol_type = other DNA
gagggcctatttcccatggttccttcatatttgcatagaggatgcaagactgtcagagggacgattgtaattaacttggccataaacacaaacctattggcacaaactatgtgatatagaaagttatgattgttcaagaagtttgtaatttaaaaaaaggaccactatgtacttaccgtaactgaaaagtctttcgttttctcaactttatatatcttccggaaaggac

SEQ ID NO: 6207 - DNA, 229 bp, synthetic construct
  misc_feature 1..229: note = promoter
  source 1..229: mol_type = other DNA
gagggcctatttcccatggttccttcatatttgcatagaggatgcaagactgtcagagggacgattgccattaacttggccataaacacaaacctattggcacaaactatgtgatatagaaagttatgattgttcaagaagtttgtaatttaaaaaaaggaccactatgtacttaccgtaactgaaaagtctttcgttttctcaactttatatatcttccggaaaggac

SEQ ID NO: 6208 - DNA, 229 bp, synthetic construct
  misc_feature 1..229: note = promoter
  source 1..229: mol_type = other DNA
gagggcctatttcccatggttccttcatatttgcatagaggatgcaagactgtcagagggacgattgcgattaacttggccataaacacaaacctattggcacaaactatgtgatatagaaagttatgattgttcaagaagtttgtaatttaaaaaaaggaccactatgtacttaccgtaactgaaaagtctttcgttttctcaactttatatatcttccggaaaggac

SEQ ID NO: 6209 - DNA, 229 bp, synthetic construct
  misc_feature 1..229: note = promoter
  source 1..229: mol_type = other DNA
gagggcctatttcccatggttccttcatatttgcatagaggatgcaagactgtcagagggacgattgctattaacttggccataaacacaaacctattggcacaaactatgtgatatagaaagttatgattgttcaagaagtttgtaatttaaaaaaaggaccactatgtacttaccgtaactgaaaagtctttcgttttctcaactttatatatcttccggaaaggac

SEQ ID NO: 6210 - DNA, 229 bp, synthetic construct
  misc_feature 1..229: note = promoter
  source 1..229: mol_type = other DNA
gagggcctatttcccatggttccttcatatttgcatagaggatgcaagactgtcagagggacgattgcacttaacttggccataaacacaaacctattggcacaaactatgtgatatagaaagttatgattgttcaagaagtttgtaatttaaaaaaaggaccactatgtacttaccgtaactgaaaagtctttcgttttctcaactttatatatcttccggaaaggac

SEQ ID NO: 6211 - DNA, 229 bp, synthetic construct
  misc_feature 1..229: note = promoter
  source 1..229: mol_type = other DNA
gagggcctatttcccatggttccttcatatttgcatagaggatgcaagactgtcagagggacgattgcagttaacttggccataaacacaaacctattggcacaaactatgtgatatagaaagttatgattgttcaagaagtttgtaatttaaaaaaaggaccactatgtacttaccgtaactgaaaagtctttcgttttctcaactttatatatcttccggaaaggac

SEQ ID NO: 6212 - DNA, 229 bp, synthetic construct
  misc_feature 1..229: note = promoter
  source 1..229: mol_type = other DNA
gagggcctatttcccatggttccttcatatttgcatagaggatgcaagactgtcagagggacgattgcatttaacttggccataaacacaaacctattggcacaaactatgtgatatagaaagttatgattgttcaagaagtttgtaatttaaaaaaaggaccactatgtacttaccgtaactgaaaagtctttcgttttctcaactttatatatcttccggaaaggac

SEQ ID NO: 6213 - DNA, 229 bp, synthetic construct
  misc_feature 1..229: note = promoter
  source 1..229: mol_type = other DNA
gagggcctatttcccatggttccttcatatttgcatagaggatgcaagactgtcagagggacgattgcaaataacttggccataaacacaaacctattggcacaaactatgtgatatagaaagttatgattgttcaagaagtttgtaatttaaaaaaaggaccactatgtacttaccgtaactgaaaagtctttcgttttctcaactttatatatcttccggaaaggac

SEQ ID NO: 6214 - DNA, 229 bp, synthetic construct
  misc_feature 1..229: note = promoter
  source 1..229: mol_type = other DNA
gagggcctatttcccatggttccttcatatttgcatagaggatgcaagactgtcagagggacgattgcaactaacttggccataaacacaaacctattggcacaaactatgtgatatagaaagttatgattgttcaagaagtttgtaatttaaaaaaaggaccactatgtacttaccgtaactgaaaagtctttcgttttctcaactttatatatcttccggaaaggac

SEQ ID NO: 6215 - DNA, 229 bp, synthetic construct
  misc_feature 1..229: note = promoter
  source 1..229: mol_type = other DNA
gagggcctatttcccatggttccttcatatttgcatagaggatgcaagactgtcagagggacgattgcaagtaacttggccataaacacaaacctattggcacaaactatgtgatatagaaagttatgattgttcaagaagtttgtaatttaaaaaaaggaccactatgtacttaccgtaactgaaaagtctttcgttttctcaactttatatatcttccggaaaggac

SEQ ID NO: 6216 - DNA, 229 bp, synthetic construct
  misc_feature 1..229: note = promoter
  source 1..229: mol_type = other DNA
gagggcctatttcccatggttccttcatatttgcatagaggatgcaagactgtcagagggacgattgcaataaacttggccataaacacaaacctattggcacaaactatgtgatatagaaagttatgattgttcaagaagtttgtaatttaaaaaaaggaccactatgtacttaccgtaactgaaaagtctttcgttttctcaactttatatatcttccggaaaggac

SEQ ID NO: 6217 - DNA, 229 bp, synthetic construct
  misc_feature 1..229: note = promoter
  source 1..229: mol_type = other DNA
gagggcctatttcccatggttccttcatatttgcatagaggatgcaagactgtcagagggacgattgcaatcaacttggccataaacacaaacctattggcacaaactatgtgatatagaaagttatgattgttcaagaagtttgtaatttaaaaaaaggaccactatgtacttaccgtaactgaaaagtctttcgttttctcaactttatatatcttccggaaaggac

SEQ ID NO: 6218 - DNA, 229 bp, synthetic construct
  misc_feature 1..229: note = promoter
  source 1..229: mol_type = other DNA
gagggcctatttcccatggttccttcatatttgcatagaggatgcaagactgtcagagggacgattgcaatgaacttggccataaacacaaacctattggcacaaactatgtgatatagaaagttatgattgttcaagaagtttgtaatttaaaaaaaggaccactatgtacttaccgtaactgaaaagtctttcgttttctcaactttatatatcttccggaaaggac

SEQ ID NO: 6219 - DNA, 229 bp, synthetic construct
  misc_feature 1..229: note = promoter
  source 1..229: mol_type = other DNA
gagggcctatttcccatggttccttcatatttgcatagaggatgcaagactgtcagagggacgattgcaattcacttggccataaacacaaacctattggcacaaactatgtgatatagaaagttatgattgttcaagaagtttgtaatttaaaaaaaggaccactatgtacttaccgtaactgaaaagtctttcgttttctcaactttatatatcttccggaaaggac

SEQ ID NO: 6220 - DNA, 229 bp, synthetic construct
  misc_feature 1..229: note = promoter
  source 1..229: mol_type = other DNA
gagggcctatttcccatggttccttcatatttgcatagaggatgcaagactgtcagagggacgattgcaattgacttggccataaacacaaacctattggcacaaactatgtgatatagaaagttatgattgttcaagaagtttgtaatttaaaaaaaggaccactatgtacttaccgtaactgaaaagtctttcgttttctcaactttatatatcttccggaaaggac

SEQ ID NO: 6221 - DNA, 229 bp, synthetic construct
  misc_feature 1..229: note = promoter
  source 1..229: mol_type = other DNA
gagggcctatttcccatggttccttcatatttgcatagaggatgcaagactgtcagagggacgattgcaatttacttggccataaacacaaacctattggcacaaactatgtgatatagaaagttatgattgttcaagaagtttgtaatttaaaaaaaggaccactatgtacttaccgtaactgaaaagtctttcgttttctcaactttatatatcttccggaaaggac

SEQ ID NO: 6222 - DNA, 229 bp, synthetic construct
  misc_feature 1..229: note = promoter
  source 1..229: mol_type = other DNA
gagggcctatttcccatggttccttcatatttgcatagaggatgcaagactgtcagagggacgattgcaattaccttggccataaacacaaacctattggcacaaactatgtgatatagaaagttatgattgttcaagaagtttgtaatttaaaaaaaggaccactatgtacttaccgtaactgaaaagtctttcgttttctcaactttatatatcttccggaaaggac

SEQ ID NO: 6223 - DNA, 229 bp, synthetic construct
  misc_feature 1..229: note = promoter
  source 1..229: mol_type = other DNA
gagggcctatttcccatggttccttcatatttgcatagaggatgcaagactgtcagagggacgattgcaattagcttggccataaacacaaacctattggcacaaactatgtgatatagaaagttatgattgttcaagaagtttgtaatttaaaaaaaggaccactatgtacttaccgtaactgaaaagtctttcgttttctcaactttatatatcttccggaaaggac

SEQ ID NO: 6224 - DNA, 229 bp, synthetic construct
  misc_feature 1..229: note = promoter
  source 1..229: mol_type = other DNA
gagggcctatttcccatggttccttcatatttgcatagaggatgcaagactgtcagagggacgattgcaattatcttggccataaacacaaacctattggcacaaactatgtgatatagaaagttatgattgttcaagaagtttgtaatttaaaaaaaggaccactatgtacttaccgtaactgaaaagtctttcgttttctcaactttatatatcttccggaaaggac

SEQ ID NO: 6225 - DNA, 229 bp, synthetic construct
  misc_feature 1..229: note = promoter
  source 1..229: mol_type = other DNA
gagggcctatttcccatggttccttcatatttgcatagaggatgcaagactgtcagagggacgattgcaattaaattggccataaacacaaacctattggcacaaactatgtgatatagaaagttatgattgttcaagaagtttgtaatttaaaaaaaggaccactatgtacttaccgtaactgaaaagtctttcgttttctcaactttatatatcttccggaaaggac

SEQ ID NO: 6226 - DNA, 229 bp, synthetic construct
  misc_feature 1..229: note = promoter
  source 1..229: mol_type = other DNA
gagggcctatttcccatggttccttcatatttgcatagaggatgcaagactgtcagagggacgattgcaattaagttggccataaacacaaacctattggcacaaactatgtgatatagaaagttatgattgttcaagaagtttgtaatttaaaaaaaggaccactatgtacttaccgtaactgaaaagtctttcgttttctcaactttatatatcttccggaaaggac

SEQ ID NO: 6227 - DNA, 229 bp, synthetic construct
  misc_feature 1..229: note = promoter
  source 1..229: mol_type = other DNA
gagggcctatttcccatggttccttcatatttgcatagaggatgcaagactgtcagagggacgattgcaattaatttggccataaacacaaacctattggcacaaactatgtgatatagaaagttatgattgttcaagaagtttgtaatttaaaaaaaggaccactatgtacttaccgtaactgaaaagtctttcgttttctcaactttatatatcttccggaaaggac

SEQ ID NO: 6228 - DNA, 229 bp, synthetic construct
  misc_feature 1..229: note = promoter
  source 1..229: mol_type = other DNA
gagggcctatttcccatggttccttcatatttgcatagaggatgcaagactgtcagagggacgattgcaattaacatggccataaacacaaacctattggcacaaactatgtgatatagaaagttatgattgttcaagaagtttgtaatttaaaaaaaggaccactatgtacttaccgtaactgaaaagtctttcgttttctcaactttatatatcttccggaaaggac

SEQ ID NO: 6229 - DNA, 229 bp, synthetic construct
  misc_feature 1..229: note = promoter
  source 1..229: mol_type = other DNA
gagggcctatttcccatggttccttcatatttgcatagaggatgcaagactgtcagagggacgattgcaattaacctggccataaacacaaacctattggcacaaactatgtgatatagaaagttatgattgttcaagaagtttgtaatttaaaaaaaggaccactatgtacttaccgtaactgaaaagtctttcgttttctcaactttatatatcttccggaaaggac

SEQ ID NO: 6230 - DNA, 229 bp, synthetic construct
  misc_feature 1..229: note = promoter
  source 1..229: mol_type = other DNA
gagggcctatttcccatggttccttcatatttgcatagaggatgcaagactgtcagagggacgattgcaattaacgtggccataaacacaaacctattggcacaaactatgtgatatagaaagttatgattgttcaagaagtttgtaatttaaaaaaaggaccactatgtacttaccgtaactgaaaagtctttcgttttctcaactttatatatcttccggaaaggac

SEQ ID NO: 6231 - DNA, 229 bp, synthetic construct
  misc_feature 1..229: note = promoter
  source 1..229: mol_type = other DNA
gagggcctatttcccatggttccttcatatttgcatagaggatgcaagactgtcagagggacgattgcaattaactaggccataaacacaaacctattggcacaaactatgtgatatagaaagttatgattgttcaagaagtttgtaatttaaaaaaaggaccactatgtacttaccgtaactgaaaagtctttcgttttctcaactttatatatcttccggaaaggac

SEQ ID NO: 6232 - DNA, 229 bp, synthetic construct
  misc_feature 1..229: note = promoter
  source 1..229: mol_type = other DNA
gagggcctatttcccatggttccttcatatttgcatagaggatgcaagactgtcagagggacgattgcaattaactcggccataaacacaaacctattggcacaaactatgtgatatagaaagttatgattgttcaagaagtttgtaatttaaaaaaaggaccactatgtacttaccgtaactgaaaagtctttcgttttctcaactttatatatcttccggaaaggac

SEQ ID NO: 6233 - DNA, 229 bp, synthetic construct
  misc_feature 1..229: note = promoter
  source 1..229: mol_type = other DNA
gagggcctatttcccatggttccttcatatttgcatagaggatgcaagactgtcagagggacgattgcaattaactgggccataaacacaaacctattggcacaaactatgtgatatagaaagttatgattgttcaagaagtttgtaatttaaaaaaaggaccactatgtacttaccgtaactgaaaagtctttcgttttctcaactttatatatcttccggaaaggac

SEQ ID NO: 6234 - DNA, 229 bp, synthetic construct
  misc_feature 1..229: note = promoter
  source 1..229: mol_type = other DNA
gagggcctatttcccatggttccttcatatttgcatagaggatgcaagactgtcagagggacgattgcaattaacttagccataaacacaaacctattggcacaaactatgtgatatagaaagttatgattgttcaagaagtttgtaatttaaaaaaaggaccactatgtacttaccgtaactgaaaagtctttcgttttctcaactttatatatcttccggaaaggac

SEQ ID NO: 6235 - DNA, 229 bp, synthetic construct
  misc_feature 1..229: note = promoter
  source 1..229: mol_type = other DNA
gagggcctatttcccatggttccttcatatttgcatagaggatgcaagactgtcagagggacgattgcaattaacttcgccataaacacaaacctattggcacaaactatgtgatatagaaagttatgattgttcaagaagtttgtaatttaaaaaaaggaccactatgtacttaccgtaactgaaaagtctttcgttttctcaactttatatatcttccggaaaggac

SEQ ID NO: 6236 - DNA, 229 bp, synthetic construct
  misc_feature 1..229: note = promoter
  source 1..229: mol_type = other DNA
gagggcctatttcccatggttccttcatatttgcatagaggatgcaagactgtcagagggacgattgcaattaactttgccataaacacaaacctattggcacaaactatgtgatatagaaagttatgattgttcaagaagtttgtaatttaaaaaaaggaccactatgtacttaccgtaactgaaaagtctttcgttttctcaactttatatatcttccggaaaggac

SEQ ID NO: 6237 - DNA, 229 bp, synthetic construct
  misc_feature 1..229: note = promoter
  source 1..229: mol_type = other DNA
gagggcctatttcccatggttccttcatatttgcatagaggatgcaagactgtcagagggacgattgcaattaacttgaccataaacacaaacctattggcacaaactatgtgatatagaaagttatgattgttcaagaagtttgtaatttaaaaaaaggaccactatgtacttaccgtaactgaaaagtctttcgttttctcaactttatatatcttccggaaaggac

SEQ ID NO: 6238 - DNA, 229 bp, synthetic construct
  misc_feature 1..229: note = promoter
  source 1..229: mol_type = other DNA
gagggcctatttcccatggttccttcatatttgcatagaggatgcaagactgtcagagggacgattgcaattaacttgcccataaacacaaacctattggcacaaactatgtgatatagaaagttatgattgttcaagaagtttgtaatttaaaaaaaggaccactatgtacttaccgtaactgaaaagtctttcgttttctcaactttatatatcttccggaaaggac

SEQ ID NO: 6239 - DNA, 229 bp, synthetic construct
  misc_feature 1..229: note = promoter
  source 1..229: mol_type = other DNA
gagggcctatttcccatggttccttcatatttgcatagaggatgcaagactgtcagagggacgattgcaattaacttgtccataaacacaaacctattggcacaaactatgtgatatagaaagttatgattgttcaagaagtttgtaatttaaaaaaaggaccactatgtacttaccgtaactgaaaagtctttcgttttctcaactttatatatcttccggaaaggac

SEQ ID NO: 6240 - DNA, 229 bp, synthetic construct
  misc_feature 1..229: note = promoter
  source 1..229: mol_type = other DNA
gagggcctatttcccatggttccttcatatttgcatagaggatgcaagactgtcagagggacgattgcaattaacttggacataaacacaaacctattggcacaaactatgtgatatagaaagttatgattgttcaagaagtttgtaatttaaaaaaaggaccactatgtacttaccgtaactgaaaagtctttcgttttctcaactttatatatcttccggaaaggac

SEQ ID NO: 6241 - DNA, 229 bp, synthetic construct
  misc_feature 1..229: note = promoter
  source 1..229: mol_type = other DNA
gagggcctatttcccatggttccttcatatttgcatagaggatgcaagactgtcagagggacgattgcaattaacttgggcataaacacaaacctattggcacaaactatgtgatatagaaagttatgattgttcaagaagtttgtaatttaaaaaaaggaccactatgtacttaccgtaactgaaaagtctttcgttttctcaactttatatatcttccggaaaggac

SEQ ID NO: 6242 - DNA, 229 bp, synthetic construct
  misc_feature 1..229: note = promoter
  source 1..229: mol_type = other DNA
gagggcctatttcccatggttccttcatatttgcatagaggatgcaagactgtcagagggacgattgcaattaacttggtcataaacacaaacctattggcacaaactatgtgatatagaaagttatgattgttcaagaagtttgtaatttaaaaaaaggaccactatgtacttaccgtaactgaaaagtctttcgttttctcaactttatatatcttccggaaaggac

SEQ ID NO: 6243 - DNA, 229 bp, synthetic construct
  misc_feature 1..229: note = promoter
  source 1..229: mol_type = other DNA
gagggcctatttcccatggttccttcatatttgcatagaggatgcaagactgtcagagggacgattgcaattaacttggcaataaacacaaacctattggcacaaactatgtgatatagaaagttatgattgttcaagaagtttgtaatttaaaaaaaggaccactatgtacttaccgtaactgaaaagtctttcgttttctcaactttatatatcttccggaaaggac

SEQ ID NO: 6244 - DNA, 229 bp, synthetic construct
  misc_feature 1..229: note = promoter
  source 1..229: mol_type = other DNA
gagggcctatttcccatggttccttcatatttgcatagaggatgcaagactgtcagagggacgattgcaattaacttggcgataaacacaaacctattggcacaaactatgtgatatagaaagttatgattgttcaagaagtttgtaatttaaaaaaaggaccactatgtacttaccgtaactgaaaagtctttcgttttctcaactttatatatcttccggaaaggac

SEQ ID NO: 6245 - DNA, 229 bp, synthetic construct
  misc_feature 1..229: note = promoter
  source 1..229: mol_type = other DNA
gagggcctatttcccatggttccttcatatttgcatagaggatgcaagactgtcagagggacgattgcaattaacttggctataaacacaaacctattggcacaaactatgtgatatagaaagttatgattgttcaagaagtttgtaatttaaaaaaaggaccactatgtacttaccgtaactgaaaagtctttcgttttctcaactttatatatcttccggaaaggac

SEQ ID NO: 6246 - DNA, 229 bp, synthetic construct
  misc_feature 1..229: note = promoter
  source 1..229: mol_type = other DNA
gagggcctatttcccatggttccttcatatttgcatagaggatgcaagactgtcagagggacgattgcaattaacttggccctaaacacaaacctattggcacaaactatgtgatatagaaagttatgattgttcaagaagtttgtaatttaaaaaaaggaccactatgtacttaccgtaactgaaaagtctttcgttttctcaactttatatatcttccggaaaggac

SEQ ID NO: 6247 - DNA, 229 bp, synthetic construct
  misc_feature 1..229: note = promoter
  source 1..229: mol_type = other DNA
gagggcctatttcccatggttccttcatatttgcatagaggatgcaagactgtcagagggacgattgcaattaacttggccgtaaacacaaacctattggcacaaactatgtgatatagaaagttatgattgttcaagaagtttgtaatttaaaaaaaggaccactatgtacttaccgtaactgaaaagtctttcgttttctcaactttatatatcttccggaaaggac

SEQ ID NO: 6248 - DNA, 229 bp, synthetic construct
  misc_feature 1..229: note = promoter
  source 1..229: mol_type = other DNA
gagggcctatttcccatggttccttcatatttgcatagaggatgcaagactgtcagagggacgattgcaattaacttggccttaaacacaaacctattggcacaaactatgtgatatagaaagttatgattgttcaagaagtttgtaatttaaaaaaaggaccactatgtacttaccgtaactgaaaagtctttcgttttctcaactttatatatcttccggaaaggac

SEQ ID NO: 6249 - DNA, 229 bp, synthetic construct
  misc_feature 1..229: note = promoter
  source 1..229: mol_type = other DNA
gagggcctatttcccatggttccttcatatttgcatagaggatgcaagactgtcagagggacgattgcaattaacttggccaaaaacacaaacctattggcacaaactatgtgatatagaaagttatgattgttcaagaagtttgtaatttaaaaaaaggaccactatgtacttaccgtaactgaaaagtctttcgttttctcaactttatatatcttccggaaaggac

SEQ ID NO: 6250 - DNA, 229 bp, synthetic construct
  misc_feature 1..229: note = promoter
  source 1..229: mol_type = other DNA
gagggcctatttcccatggttccttcatatttgcatagaggatgcaagactgtcagagggacgattgcaattaacttggccacaaacacaaacctattggcacaaactatgtgatatagaaagttatgattgttcaagaagtttgtaatttaaaaaaaggaccactatgtacttaccgtaactgaaaagtctttcgttttctcaactttatatatcttccggaaaggac

SEQ ID NO: 6251 - DNA, 229 bp, synthetic construct
  misc_feature 1..229: note = promoter
  source 1..229: mol_type = other DNA
gagggcctatttcccatggttccttcatatttgcatagaggatgcaagactgtcagagggacgattgcaattaacttggccagaaacacaaacctattggcacaaactatgtgatatagaaagttatgattgttcaagaagtttgtaatttaaaaaaaggaccactatgtacttaccgtaactgaaaagtctttcgttttctcaactttatatatcttccggaaaggac

SEQ ID NO: 6252 - DNA, 229 bp, synthetic construct
  misc_feature 1..229: note = promoter
  source 1..229: mol_type = other DNA
gagggcctatttcccatggttccttcatatttgcatagaggatgcaagactgtcagagggacgattgcaattaacttggccatcaacacaaacctattggcacaaactatgtgatatagaaagttatgattgttcaagaagtttgtaatttaaaaaaaggaccactatgtacttaccgtaactgaaaagtctttcgttttctcaactttatatatcttccggaaaggac

SEQ ID NO: 6253 - DNA, 229 bp, synthetic construct
  misc_feature 1..229: note = promoter
  source 1..229: mol_type = other DNA
gagggcctatttcccatggttccttcatatttgcatagaggatgcaagactgtcagagggacgattgcaattaacttggccatgaacacaaacctattggcacaaactatgtgatatagaaagttatgattgttcaagaagtttgtaatttaaaaaaaggaccactatgtacttaccgtaactgaaaagtctttcgttttctcaactttatatatcttccggaaaggac

SEQ ID NO: 6254 - DNA, 229 bp, synthetic construct
  misc_feature 1..229: note = promoter
  source 1..229: mol_type = other DNA
gagggcctatttcccatggttccttcatatttgcatagaggatgcaagactgtcagagggacgattgcaattaacttggccattaacacaaacctattggcacaaactatgtgatatagaaagttatgattgttcaagaagtttgtaatttaaaaaaaggaccactatgtacttaccgtaactgaaaagtctttcgttttctcaactttatatatcttccggaaaggac

SEQ ID NO: 6255 - DNA, 229 bp, synthetic construct
  misc_feature 1..229: note = promoter
  source 1..229: mol_type = other DNA
gagggcctatttcccatggttccttcatatttgcatagaggatgcaagactgtcagagggacgattgcaattaacttggccatacacacaaacctattggcacaaactatgtgatatagaaagttatgattgttcaagaagtttgtaatttaaaaaaaggaccactatgtacttaccgtaactgaaaagtctttcgttttctcaactttatatatcttccggaaaggac

SEQ ID NO: 6256 - DNA, 229 bp, synthetic construct
  misc_feature 1..229: note = promoter
  source 1..229: mol_type = other DNA
gagggcctatttcccatggttccttcatatttgcatagaggatgcaagactgtcagagggacgattgcaattaacttggccatagacacaaacctattggcacaaactatgtgatatagaaagttatgattgttcaagaagtttgtaatttaaaaaaaggaccactatgtacttaccgtaactgaaaagtctttcgttttctcaactttatatatcttccggaaaggac

SEQ ID NO: 6257 - DNA, 229 bp, synthetic construct
  misc_feature 1..229: note = promoter
  source 1..229: mol_type = other DNA
gagggcctatttcccatggttccttcatatttgcatagaggatgcaagactgtcagagggacgattgcaattaacttggccatatacacaaacctattggcacaaactatgtgatatagaaagttatgattgttcaagaagtttgtaatttaaaaaaaggaccactatgtacttaccgtaactgaaaagtctttcgttttctcaactttatatatcttccggaaaggac

SEQ ID NO: 6258 - DNA, 229 bp, synthetic construct
  misc_feature 1..229: note = promoter
  source 1..229: mol_type = other DNA
gagggcctatttcccatggttccttcatatttgcatagaggatgcaagactgtcagagggacgattgcaattaacttggccataaccacaaacctattggcacaaactatgtgatatagaaagttatgattgttcaagaagtttgtaatttaaaaaaaggaccactatgtacttaccgtaactgaaaagtctttcgttttctcaactttatatatcttccggaaaggac

SEQ ID NO: 6259 - DNA, 229 bp, synthetic construct
  misc_feature 1..229: note = promoter
  source 1..229: mol_type = other DNA
gagggcctatttcccatggttccttcatatttgcatagaggatgcaagactgtcagagggacgattgcaattaacttggccataagcacaaacctattggcacaaactatgtgatatagaaagttatgattgttcaagaagtttgtaatttaaaaaaaggaccactatgtacttaccgtaactgaaaagtctttcgttttctcaactttatatatcttccggaaaggac

SEQ ID NO: 6260 - DNA, 229 bp, synthetic construct
  misc_feature 1..229: note = promoter
  source 1..229: mol_type = other DNA
gagggcctatttcccatggttccttcatatttgcatagaggatgcaagactgtcagagggacgattgcaattaacttggccataatcacaaacctattggcacaaactatgtgatatagaaagttatgattgttcaagaagtttgtaatttaaaaaaaggaccactatgtacttaccgtaactgaaaagtctttcgttttctcaactttatatatcttccggaaaggac

SEQ ID NO: 6261 - DNA, 229 bp, synthetic construct
  misc_feature 1..229: note = promoter
  source 1..229: mol_type = other DNA
gagggcctatttcccatggttccttcatatttgcatagaggatgcaagactgtcagagggacgattgcaattaacttggccataaaaacaaacctattggcacaaactatgtgatatagaaagttatgattgttcaagaagtttgtaatttaaaaaaaggaccactatgtacttaccgtaactgaaaagtctttcgttttctcaactttatatatcttccggaaaggac

SEQ ID NO: 6262 - DNA, 229 bp, synthetic construct
  misc_feature 1..229: note = promoter
  source 1..229: mol_type = other DNA
gagggcctatttcccatggttccttcatatttgcatagaggatgcaagactgtcagagggacgattgcaattaacttggccataaagacaaacctattggcacaaactatgtgatatagaaagttatgattgttcaagaagtttgtaatttaaaaaaaggaccactatgtacttaccgtaactgaaaagtctttcgttttctcaactttatatatcttccggaaaggac

SEQ ID NO: 6263 - DNA, 229 bp, synthetic construct
  misc_feature 1..229: note = promoter
  source 1..229: mol_type = other DNA
gagggcctatttcccatggttccttcatatttgcatagaggatgcaagactgtcagagggacgattgcaattaacttggccataaatacaaacctattggcacaaactatgtgatatagaaagttatgattgttcaagaagtttgtaatttaaaaaaaggaccactatgtacttaccgtaactgaaaagtctttcgttttctcaactttatatatcttccggaaaggac

SEQ ID NO: 6264 - DNA, 229 bp, synthetic construct
  misc_feature 1..229: note = promoter
  source 1..229: mol_type = other DNA
gagggcctatttcccatggttccttcatatttgcatagaggatgcaagactgtcagagggacgattgcaattaacttggccataaacccaaacctattggcacaaactatgtgatatagaaagttatgattgttcaagaagtttgtaatttaaaaaaaggaccactatgtacttaccgtaactgaaaagtctttcgttttctcaactttatatatcttccggaaaggac

SEQ ID NO: 6265 - DNA, 229 bp, synthetic construct
  misc_feature 1..229: note = promoter
  source 1..229: mol_type = other DNA
gagggcctatttcccatggttccttcatatttgcatagaggatgcaagactgtcagagggacgattgcaattaacttggccataaacgcaaacctattggcacaaactatgtgatatagaaagttatgattgttcaagaagtttgtaatttaaaaaaaggaccactatgtacttaccgtaactgaaaagtctttcgttttctcaactttatatatcttccggaaaggac

SEQ ID NO: 6266 - DNA, 229 bp, synthetic construct
  misc_feature 1..229: note = promoter
  source 1..229: mol_type = other DNA
gagggcctatttcccatggttccttcatatttgcatagaggatgcaagactgtcagagggacgattgcaattaacttggccataaactcaaacctattggcacaaactatgtgatatagaaagttatgattgttcaagaagtttgtaatttaaaaaaaggaccactatgtacttaccgtaactgaaaagtctttcgttttctcaactttatatatcttccggaaaggac

SEQ ID NO: 6267 - DNA, 229 bp, synthetic construct
  misc_feature 1..229: note = promoter
  source 1..229: mol_type = other DNA
gagggcctatttcccatggttccttcatatttgcatagaggatgcaagactgtcagagggacgattgcaattaacttggccataaacaaaaacctattggcacaaactatgtgatatagaaagttatgattgttcaagaagtttgtaatttaaaaaaaggaccactatgtacttaccgtaactgaaaagtctttcgttttctcaactttatatatcttccggaaaggac

SEQ ID NO: 6268 - DNA, 229 bp, synthetic construct
  misc_feature 1..229: note = promoter
  source 1..229: mol_type = other DNA
gagggcctatttcccatggttccttcatatttgcatagaggatgcaagactgtcagagggacgattgcaattaacttggccataaacagaaacctattggcacaaactatgtgatatagaaagttatgattgttcaagaagtttgtaatttaaaaaaaggaccactatgtacttaccgtaactgaaaagtctttcgttttctcaactttatatatcttccggaaaggac

SEQ ID NO: 6269 - DNA, 229 bp, synthetic construct
  misc_feature 1..229: note = promoter
  source 1..229: mol_type = other DNA
gagggcctatttcccatggttccttcatatttgcatagaggatgcaagactgtcagagggacgattgcaattaacttggccataaacataaacctattggcacaaactatgtgatatagaaagttatgattgttcaagaagtttgtaatttaaaaaaaggaccactatgtacttaccgtaactgaaaagtctttcgttttctcaactttatatatcttccggaaaggac

SEQ ID NO: 6270 - DNA, 229 bp, synthetic construct
  misc_feature 1..229: note = promoter
  source 1..229: mol_type = other DNA
gagggcctatttcccatggttccttcatatttgcatagaggatgcaagactgtcagagggacgattgcaattaacttggccataaacaccaacctattggcacaaactatgtgatatagaaagttatgattgttcaagaagtttgtaatttaaaaaaaggaccactatgtacttaccgtaactgaaaagtctttcgttttctcaactttatatatcttccggaaaggac

SEQ ID NO: 6271 - DNA, 229 bp, synthetic construct
  misc_feature 1..229: note = promoter
  source 1..229: mol_type = other DNA
gagggcctatttcccatggttccttcatatttgcatagaggatgcaagactgtcagagggacgattgcaattaacttggccataaacacgaacctattggcacaaactatgtgatatagaaagttatgattgttcaagaagtttgtaatttaaaaaaaggaccactatgtacttaccgtaactgaaaagtctttcgttttctcaactttatatatcttccggaaaggac

SEQ ID NO: 6272 - DNA, 229 bp, synthetic construct
  misc_feature 1..229: note = promoter
  source 1..229: mol_type = other DNA
gagggcctatttcccatggttccttcatatttgcatagaggatgcaagactgtcagagggacgattgcaattaacttggccataaacactaacctattggcacaaactatgtgatatagaaagttatgattgttcaagaagtttgtaatttaaaaaaaggaccactatgtacttaccgtaactgaaaagtctttcgttttctcaactttatatatcttccggaaaggac

SEQ ID NO: 6273 - DNA, 229 bp, synthetic construct
  misc_feature 1..229: note = promoter
  source 1..229: mol_type = other DNA
gagggcctatttcccatggttccttcatatttgcatagaggatgcaagactgtcagagggacgattgcaattaacttggccataaacacacacctattggcacaaactatgtgatatagaaagttatgattgttcaagaagtttgtaatttaaaaaaaggaccactatgtacttaccgtaactgaaaagtctttcgttttctcaactttatatatcttccggaaaggac

SEQ ID NO: 6274 - DNA, 229 bp, synthetic construct
  misc_feature 1..229: note = promoter
  source 1..229: mol_type = other DNA
gagggcctatttcccatggttccttcatatttgcatagaggatgcaagactgtcagagggacgattgcaattaacttggccataaacacagacctattggcacaaactatgtgatatagaaagttatgattgttcaagaagtttgtaatttaaaaaaaggaccactatgtacttaccgtaactgaaaagtctttcgttttctcaactttatatatcttccggaaaggac

SEQ ID NO: 6275 - DNA, 229 bp, synthetic construct
  misc_feature 1..229: note = promoter
  source 1..229: mol_type = other DNA
gagggcctatttcccatggttccttcatatttgcatagaggatgcaagactgtcagagggacgattgcaattaacttggccataaacacatacctattggcacaaactatgtgatatagaaagttatgattgttcaagaagtttgtaatttaaaaaaaggaccactatgtacttaccgtaactgaaaagtctttcgttttctcaactttatatatcttccggaaaggac

SEQ ID NO: 6276 - DNA, 229 bp, synthetic construct
  misc_feature 1..229: note = promoter
  source 1..229: mol_type = other DNA
gagggcctatttcccatggttccttcatatttgcatagaggatgcaagactgtcagagggacgattgcaattaacttggccataaacacaaccctattggcacaaactatgtgatatagaaagttatgattgttcaagaagtttgtaatttaaaaaaaggaccactatgtacttaccgtaactgaaaagtctttcgttttctcaactttatatatcttccggaaaggac

SEQ ID NO: 6277 - DNA, 229 bp, synthetic construct
  misc_feature 1..229: note = promoter
  source 1..229: mol_type = other DNA
gagggcctatttcccatggttccttcatatttgcatagaggatgcaagactgtcagagggacgattgcaattaacttggccataaacacaagcctattggcacaaactatgtgatatagaaagttatgattgttcaagaagtttgtaatttaaaaaaaggaccactatgtacttaccgtaactgaaaagtctttcgttttctcaactttatatatcttccggaaaggac

SEQ ID NO: 6278 - DNA, 229 bp, synthetic construct
  misc_feature 1..229: note = promoter
  source 1..229: mol_type = other DNA
gagggcctatttcccatggttccttcatatttgcatagaggatgcaagactgtcagagggacgattgcaattaacttggccataaacacaatcctattggcacaaactatgtgatatagaaagttatgattgttcaagaagtttgtaatttaaaaaaaggaccactatgtacttaccgtaactgaaaagtctttcgttttctcaactttatatatcttccggaaaggac

SEQ ID NO: 6279 - DNA, 229 bp, synthetic construct
  misc_feature 1..229: note = promoter
  source 1..229: mol_type = other DNA
gagggcctatttcccatggttccttcatatttgcatagaggatgcaagactgtcagagggacgattgcaattaacttggccataaacacaaaactattggcacaaactatgtgatatagaaagttatgattgttcaagaagtttgtaatttaaaaaaaggaccactatgtacttaccgtaactgaaaagtctttcgttttctcaactttatatatcttccggaaaggac

SEQ ID NO: 6280 - DNA, 229 bp, synthetic construct
  misc_feature 1..229: note = promoter
  source 1..229: mol_type = other DNA
gagggcctatttcccatggttccttcatatttgcatagaggatgcaagactgtcagagggacgattgcaattaacttggccataaacacaaagctattggcacaaactatgtgatatagaaagttatgattgttcaagaagtttgtaatttaaaaaaaggaccactatgtacttaccgtaactgaaaagtctttcgttttctcaactttatatatcttccggaaaggac

SEQ ID NO: 6281 - DNA, 229 bp, synthetic construct
  misc_feature 1..229: note = promoter
  source 1..229: mol_type = other DNA
gagggcctatttcccatggttccttcatatttgcatagaggatgcaagactgtcagagggacgattgcaattaacttggccataaacacaaatctattggcacaaactatgtgatatagaaagttatgattgttcaagaagtttgtaatttaaaaaaaggaccactatgtacttaccgtaactgaaaagtctttcgttttctcaactttatatatcttccggaaaggac

SEQ ID NO: 6282 - DNA, 229 bp, synthetic construct
  misc_feature 1..229: note = promoter
  source 1..229: mol_type = other DNA
gagggcctatttcccatggttccttcatatttgcatagaggatgcaagactgtcagagggacgattgcaattaacttggccataaacacaaacatattggcacaaactatgtgatatagaaagttatgattgttcaagaagtttgtaatttaaaaaaaggaccactatgtacttaccgtaactgaaaagtctttcgttttctcaactttatatatcttccggaaaggac

SEQ ID NO: 6283 - DNA, 229 bp, synthetic construct
  misc_feature 1..229: note = promoter
  source 1..229: mol_type = other DNA
gagggcctatttcccatggttccttcatatttgcatagaggatgcaagactgtcagagggacgattgcaattaacttggccataaacacaaacgtattggcacaaactatgtgatatagaaagttatgattgttcaagaagtttgtaatttaaaaaaaggaccactatgtacttaccgtaactgaaaagtctttcgttttctcaactttatatatcttccggaaaggac

SEQ ID NO: 6284 - DNA, 229 bp, synthetic construct
  misc_feature 1..229: note = promoter
  source 1..229: mol_type = other DNA
gagggcctatttcccatggttccttcatatttgcatagaggatgcaagactgtcagagggacgattgcaattaacttggccataaacacaaacttattggcacaaactatgtgatatagaaagttatgattgttcaagaagtttgtaatttaaaaaaaggaccactatgtacttaccgtaactgaaaagtctttcgttttctcaactttatatatcttccggaaaggac

SEQ ID NO: 6285 - DNA, 229 bp, synthetic construct
  misc_feature 1..229: note = promoter
  source 1..229: mol_type = other DNA
gagggcctatttcccatggttccttcatatttgcatagaggatgcaagactgtcagagggacgattgcaattaacttggccataaacacaaaccaattggcacaaactatgtgatatagaaagttatgattgttcaagaagtttgtaatttaaaaaaaggaccactatgtacttaccgtaactgaaaagtctttcgttttctcaactttatatatcttccggaaaggac

SEQ ID NO: 6286 - DNA, 229 bp, synthetic construct
  misc_feature 1..229: note = promoter
  source 1..229: mol_type = other DNA
gagggcctatttcccatggttccttcatatttgcatagaggatgcaagactgtcagagggacgattgcaattaacttggccataaacacaaacccattggcacaaactatgtgatatagaaagttatgattgttcaagaagtttgtaatttaaaaaaaggaccactatgtacttaccgtaactgaaaagtctttcgttttctcaactttatatatcttccggaaaggac

SEQ ID NO: 6287 - DNA, 229 bp, synthetic construct
  misc_feature 1..229: note = promoter
  source 1..229: mol_type = other DNA
gagggcctatttcccatggttccttcatatttgcatagaggatgcaagactgtcagagggacgattgcaattaacttggccataaacacaaaccgattggcacaaactatgtgatatagaaagttatgattgttcaagaagtttgtaatttaaaaaaaggaccactatgtacttaccgtaactgaaaagtctttcgttttctcaactttatatatcttccggaaaggac

SEQ ID NO: 6288 - DNA, 229 bp, synthetic construct
  misc_feature 1..229: note = promoter
  source 1..229: mol_type = other DNA
gagggcctatttcccatggttccttcatatttgcatagaggatgcaagactgtcagagggacgattgcaattaacttggccataaacacaaacctcttggcacaaactatgtgatatagaaagttatgattgttcaagaagtttgtaatttaaaaaaaggaccactatgtacttaccgtaactgaaaagtctttcgttttctcaactttatatatcttccggaaaggac

SEQ ID NO: 6289 - DNA, 229 bp, synthetic construct
  misc_feature 1..229: note = promoter
  source 1..229: mol_type = other DNA
gagggcctatttcccatggttccttcatatttgcatagaggatgcaagactgtcagagggacgattgcaattaacttggccataaacacaaacctgttggcacaaactatgtgatatagaaagttatgattgttcaagaagtttgtaatttaaaaaaaggaccactatgtacttaccgtaactgaaaagtctttcgttttctcaactttatatatcttccggaaaggac

SEQ ID NO: 6290 - DNA, 229 bp, synthetic construct
  misc_feature 1..229: note = promoter
  source 1..229: mol_type = other DNA
gagggcctatttcccatggttccttcatatttgcatagaggatgcaagactgtcagagggacgattgcaattaacttggccataaacacaaaccttttggcacaaactatgtgatatagaaagttatgattgttcaagaagtttgtaatttaaaaaaaggaccactatgtacttaccgtaactgaaaagtctttcgttttctcaactttatatatcttccggaaaggac

SEQ ID NO: 6291 - DNA, 229 bp, synthetic construct
  misc_feature 1..229: note = promoter
  source 1..229: mol_type = other DNA
gagggcctatttcccatggttccttcatatttgcatagaggatgcaagactgtcagagggacgattgcaattaacttggccataaacacaaacctaatggcacaaactatgtgatatagaaagttatgattgttcaagaagtttgtaatttaaaaaaaggaccactatgtacttaccgtaactgaaaagtctttcgttttctcaactttatatatcttccggaaaggac

SEQ ID NO: 6292 - DNA, 229 bp, synthetic construct
  misc_feature 1..229: note = promoter
  source 1..229: mol_type = other DNA
gagggcctatttcccatggttccttcatatttgcatagaggatgcaagactgtcagagggacgattgcaattaacttggccataaacacaaacctactggcacaaactatgtgatatagaaagttatgattgttcaagaagtttgtaatttaaaaaaaggaccactatgtacttaccgtaactgaaaagtctttcgttttctcaactttatatatcttccggaaaggac

SEQ ID NO: 6293 - DNA, 229 bp, synthetic construct
  misc_feature 1..229: note = promoter
  source 1..229: mol_type = other DNA
gagggcctatttcccatggttccttcatatttgcatagaggatgcaagactgtcagagggacgattgcaattaacttggccataaacacaaacctagtggcacaaactatgtgatatagaaagttatgattgttcaagaagtttgtaatttaaaaaaaggaccactatgtacttaccgtaactgaaaagtctttcgttttctcaactttatatatcttccggaaaggac

SEQ ID NO: 6294 - DNA, 229 bp, synthetic construct
  misc_feature 1..229: note = promoter
  source 1..229: mol_type = other DNA
gagggcctatttcccatggttccttcatatttgcatagaggatgcaagactgtcagagggacgattgcaattaacttggccataaacacaaacctataggcacaaactatgtgatatagaaagttatgattgttcaagaagtttgtaatttaaaaaaaggaccactatgtacttaccgtaactgaaaagtctttcgttttctcaactttatatatcttccggaaaggac

SEQ ID NO: 6295 - DNA, 229 bp, synthetic construct
  misc_feature 1..229: note = promoter
  source 1..229: mol_type = other DNA
gagggcctatttcccatggttccttcatatttgcatagaggatgcaagactgtcagagggacgattgcaattaacttggccataaacacaaacctatcggcacaaactatgtgatatagaaagttatgattgttcaagaagtttgtaatttaaaaaaaggaccactatgtacttaccgtaactgaaaagtctttcgttttctcaactttatatatcttccggaaaggac

SEQ ID NO: 6296 - DNA, 229 bp, synthetic construct
  misc_feature 1..229: note = promoter
  source 1..229: mol_type = other DNA
gagggcctatttcccatggttccttcatatttgcatagaggatgcaagactgtcagagggacgattgcaattaacttggccataaacacaaacctatgggcacaaactatgtgatatagaaagttatgattgttcaagaagtttgtaatttaaaaaaaggaccactatgtacttaccgtaactgaaaagtctttcgttttctcaactttatatatcttccggaaaggac

SEQ ID NO: 6297 - DNA, 229 bp, synthetic construct
  misc_feature 1..229: note = promoter
  source 1..229: mol_type = other DNA
gagggcctatttcccatggttccttcatatttgcatagaggatgcaagactgtcagagggacgattgcaattaacttggccataaacacaaacctattagcacaaactatgtgatatagaaagttatgattgttcaagaagtttgtaatttaaaaaaaggaccactatgtacttaccgtaactgaaaagtctttcgttttctcaactttatatatcttccggaaaggac

SEQ ID NO: 6298 - DNA, 229 bp, synthetic construct
  misc_feature 1..229: note = promoter
  source 1..229: mol_type = other DNA
gagggcctatttcccatggttccttcatatttgcatagaggatgcaagactgtcagagggacgattgcaattaacttggccataaacacaaacctattcgcacaaactatgtgatatagaaagttatgattgttcaagaagtttgtaatttaaaaaaaggaccactatgtacttaccgtaactgaaaagtctttcgttttctcaactttatatatcttccggaaaggac

SEQ ID NO: 6299 - DNA, 229 bp, synthetic construct
  misc_feature 1..229: note = promoter
  source 1..229: mol_type = other DNA
gagggcctatttcccatggttccttcatatttgcatagaggatgcaagactgtcagagggacgattgcaattaacttggccataaacacaaacctatttgcacaaactatgtgatatagaaagttatgattgttcaagaagtttgtaatttaaaaaaaggaccactatgtacttaccgtaactgaaaagtctttcgttttctcaactttatatatcttccggaaaggac

SEQ ID NO: 6300 - DNA, 229 bp, synthetic construct
  misc_feature 1..229: note = promoter
  source 1..229: mol_type = other DNA
gagggcctatttcccatggttccttcatatttgcatagaggatgcaagactgtcagagggacgattgcaattaacttggccataaacacaaacctattgacacaaactatgtgatatagaaagttatgattgttcaagaagtttgtaatttaaaaaaaggaccactatgtacttaccgtaactgaaaagtctttcgttttctcaactttatatatcttccggaaaggac

SEQ ID NO: 6301 - DNA, 229 bp, synthetic construct
  misc_feature 1..229: note = promoter
  source 1..229: mol_type = other DNA
gagggcctatttcccatggttccttcatatttgcatagaggatgcaagactgtcagagggacgattgcaattaacttggccataaacacaaacctattgccacaaactatgtgatatagaaagttatgattgttcaagaagtttgtaatttaaaaaaaggaccactatgtacttaccgtaactgaaaagtctttcgttttctcaactttatatatcttccggaaaggac

SEQ ID NO: 6302 - DNA, 229 bp, synthetic construct
  misc_feature 1..229: note = promoter
  source 1..229: mol_type = other DNA
gagggcctatttcccatggttccttcatatttgcatagaggatgcaagactgtcagagggacgattgcaattaacttggccataaacacaaacctattgtcacaaactatgtgatatagaaagttatgattgttcaagaagtttgtaatttaaaaaaaggaccactatgtacttaccgtaactgaaaagtctttcgttttctcaactttatatatcttccggaaaggac

SEQ ID NO: 6303 - DNA, 229 bp, synthetic construct
  misc_feature 1..229: note = promoter
  source 1..229: mol_type = other DNA
gagggcctatttcccatggttccttcatatttgcatagaggatgcaagactgtcagagggacgattgcaattaacttggccataaacacaaacctattggaacaaactatgtgatatagaaagttatgattgttcaagaagtttgtaatttaaaaaaaggaccactatgtacttaccgtaactgaaaagtctttcgttttctcaactttatatatcttccggaaaggac

SEQ ID NO: 6304 - DNA, 229 bp, synthetic construct
  misc_feature 1..229: note = promoter
  source 1..229: mol_type = other DNA
gagggcctatttcccatggttccttcatatttgcatagaggatgcaagactgtcagagggacgattgcaattaacttggccataaacacaaacctattgggacaaactatgtgatatagaaagttatgattgttcaagaagtttgtaatttaaaaaaaggaccactatgtacttaccgtaactgaaaagtctttcgttttctcaactttatatatcttccggaaaggac

SEQ ID NO: 6305 - DNA, 229 bp, synthetic construct
  misc_feature 1..229: note = promoter
  source 1..229: mol_type = other DNA
gagggcctatttcccatggttccttcatatttgcatagaggatgcaagactgtcagagggacgattgcaattaacttggccataaacacaaacctattggtacaaactatgtgatatagaaagttatgattgttcaagaagtttgtaatttaaaaaaaggaccactatgtacttaccgtaactgaaaagtctttcgttttctcaactttatatatcttccggaaaggac

SEQ ID NO: 6306 - DNA, 229 bp, synthetic construct
  misc_feature 1..229: note = promoter
  source 1..229: mol_type = other DNA
gagggcctatttcccatggttccttcatatttgcatagaggatgcaagactgtcagagggacgattgcaattaacttggccataaacacaaacctattggcccaaactatgtgatatagaaagttatgattgttcaagaagtttgtaatttaaaaaaaggaccactatgtacttaccgtaactgaaaagtctttcgttttctcaactttatatatcttccggaaaggac

SEQ ID NO: 6307 - DNA, 229 bp, synthetic construct
  misc_feature 1..229: note = promoter
  source 1..229: mol_type = other DNA
gagggcctatttcccatggttccttcatatttgcatagaggatgcaagactgtcagagggacgattgcaattaacttggccataaacacaaacctattggcgcaaactatgtgatatagaaagttatgattgttcaagaagtttgtaatttaaaaaaaggaccactatgtacttaccgtaactgaaaagtctttcgttttctcaactttatatatcttccggaaaggac

SEQ ID NO: 6308 - DNA, 229 bp, synthetic construct
  misc_feature 1..229: note = promoter
  source 1..229: mol_type = other DNA
gagggcctatttcccatggttccttcatatttgcatagaggatgcaagactgtcagagggacgattgcaattaacttggccataaacacaaacctattggctcaaactatgtgatatagaaagttatgattgttcaagaagtttgtaatttaaaaaaaggaccactatgtacttaccgtaactgaaaagtctttcgttttctcaactttatatatcttccggaaaggac

SEQ ID NO: 6309 - DNA, 229 bp, synthetic construct
  misc_feature 1..229: note = promoter
  source 1..229: mol_type = other DNA
gagggcctatttcccatggttccttcatatttgcatagaggatgcaagactgtcagagggacgattgcaattaacttggccataaacacaaacctattggcaaaaactatgtgatatagaaagttatgattgttcaagaagtttgtaatttaaaaaaaggaccactatgtacttaccgtaactgaaaagtctttcgttttctcaactttatatatcttccggaaaggac

SEQ ID NO: 6310 - DNA, 229 bp, synthetic construct
  misc_feature 1..229: note = promoter
  source 1..229: mol_type = other DNA
gagggcctatttcccatggttccttcatatttgcatagaggatgcaagactgtcagagggacgattgcaattaacttggccataaacacaaacctattggcagaaactatgtgatatagaaagttatgattgttcaagaagtttgtaatttaaaaaaaggaccactatgtacttaccgtaactgaaaagtctttcgttttctcaactttatatatcttccggaaaggac

SEQ ID NO: 6311 - DNA, 229 bp, synthetic construct
  misc_feature 1..229: note = promoter
  source 1..229: mol_type = other DNA
gagggcctatttcccatggttccttcatatttgcatagaggatgcaagactgtcagagggacgattgcaattaacttggccataaacacaaacctattggcataaactatgtgatatagaaagttatgattgttcaagaagtttgtaatttaaaaaaaggaccactatgtacttaccgtaactgaaaagtctttcgttttctcaactttatatatcttccggaaaggac

SEQ ID NO: 6312 - DNA, 229 bp, synthetic construct
  misc_feature 1..229: note = promoter
  source 1..229: mol_type = other DNA
gagggcctatttcccatggttccttcatatttgcatagaggatgcaagactgtcagagggacgattgcaattaacttggccataaacacaaacctattggcaccaactatgtgatatagaaagttatgattgttcaagaagtttgtaatttaaaaaaaggaccactatgtacttaccgtaactgaaaagtctttcgttttctcaactttatatatcttccggaaaggac

SEQ ID NO: 6313 - DNA, 229 bp, synthetic construct
  misc_feature 1..229: note = promoter
  source 1..229: mol_type = other DNA
gagggcctatttcccatggttccttcatatttgcatagaggatgcaagactgtcagagggacgattgcaattaacttggccataaacacaaacctattggcacgaactatgtgatatagaaagttatgattgttcaagaagtttgtaatttaaaaaaaggaccactatgtacttaccgtaactgaaaagtctttcgttttctcaactttatatatcttccggaaaggac

SEQ ID NO: 6314 - DNA, 229 bp, synthetic construct
  misc_feature 1..229: note = promoter
  source 1..229: mol_type = other DNA
gagggcctatttcccatggttccttcatatttgcatagaggatgcaagactgtcagagggacgattgcaattaacttggccataaacacaaacctattggcactaactatgtgatatagaaagttatgattgttcaagaagtttgtaatttaaaaaaaggaccactatgtacttaccgtaactgaaaagtctttcgttttctcaactttatatatcttccggaaaggac

SEQ ID NO: 6315 - DNA, 229 bp, synthetic construct
  misc_feature 1..229: note = promoter
  source 1..229: mol_type = other DNA
gagggcctatttcccatggttccttcatatttgcatagaggatgcaagactgtcagagggacgattgcaattaacttggccataaacacaaacctattggcacacactatgtgatatagaaagttatgattgttcaagaagtttgtaatttaaaaaaaggaccactatgtacttaccgtaactgaaaagtctttcgttttctcaactttatatatcttccggaaaggac

SEQ ID NO: 6316 - DNA, 229 bp, synthetic construct
  misc_feature 1..229: note = promoter
  source 1..229: mol_type = other DNA
gagggcctatttcccatggttccttcatatttgcatagaggatgcaagactgtcagagggacgattgcaattaacttggccataaacacaaacctattggcacagactatgtgatatagaaagttatgattgttcaagaagtttgtaatttaaaaaaaggaccactatgtacttaccgtaactgaaaagtctttcgttttctcaactttatatatcttccggaaaggac

SEQ ID NO: 6317 - DNA, 229 bp, synthetic construct
  misc_feature 1..229: note = promoter
  source 1..229: mol_type = other DNA
gagggcctatttcccatggttccttcatatttgcatagaggatgcaagactgtcagagggacgattgcaattaacttggccataaacacaaacctattggcacatactatgtgatatagaaagttatgattgttcaagaagtttgtaatttaaaaaaaggaccactatgtacttaccgtaactgaaaagtctttcgttttctcaactttatatatcttccggaaaggac

SEQ ID NO: 6318 - DNA, 229 bp, synthetic construct
  misc_feature 1..229: note = promoter
  source 1..229: mol_type = other DNA
gagggcctatttcccatggttccttcatatttgcatagaggatgcaagactgtcagagggacgattgcaattaacttggccataaacacaaacctattggcacaacctatgtgatatagaaagttatgattgttcaagaagtttgtaatttaaaaaaaggaccactatgtacttaccgtaactgaaaagtctttcgttttctcaactttatatatcttccggaaaggac

SEQ ID NO: 6319 - DNA, 229 bp, synthetic construct
  misc_feature 1..229: note = promoter
  source 1..229: mol_type = other DNA
gagggcctatttcccatggttccttcatatttgcatagaggatgcaagactgtcagagggacgattgcaattaacttggccataaacacaaacctattggcacaagctatgtgatatagaaagttatgattgttcaagaagtttgtaatttaaaaaaaggaccactatgtacttaccgtaactgaaaagtctttcgttttctcaactttatatatcttccggaaaggac

SEQ ID NO: 6320 - DNA, 229 bp, synthetic construct
  misc_feature 1..229: note = promoter
  source 1..229: mol_type = other DNA
gagggcctatttcccatggttccttcatatttgcatagaggatgcaagactgtcagagggacgattgcaattaacttggccataaacacaaacctattggcacaatctatgtgatatagaaagttatgattgttcaagaagtttgtaatttaaaaaaaggaccactatgtacttaccgtaactgaaaagtctttcgttttctcaactttatatatcttccggaaaggac

SEQ ID NO: 6321 - DNA, 229 bp, synthetic construct
  misc_feature 1..229: note = promoter
  source 1..229: mol_type = other DNA
gagggcctatttcccatggttccttcatatttgcatagaggatgcaagactgtcagagggacgattgcaattaacttggccataaacacaaacctattggcacaaaatatgtgatatagaaagttatgattgttcaagaagtttgtaatttaaaaaaaggaccactatgtacttaccgtaactgaaaagtctttcgttttctcaactttatatatcttccggaaaggac

SEQ ID NO: 6322 - DNA, 229 bp, synthetic construct
  misc_feature 1..229: note = promoter
  source 1..229: mol_type = other DNA
gagggcctatttcccatggttccttcatatttgcatagaggatgcaagactgtcagagggacgattgcaattaacttggccataaacacaaacctattggcacaaagtatgtgatatagaaagttatgattgttcaagaagtttgtaatttaaaaaaaggaccactatgtacttaccgtaactgaaaagtctttcgttttctcaactttatatatcttccggaaaggac

SEQ ID NO: 6323 - DNA, 229 bp, synthetic construct
  misc_feature 1..229: note = promoter
  source 1..229: mol_type = other DNA
gagggcctatttcccatggttccttcatatttgcatagaggatgcaagactgtcagagggacgattgcaattaacttggccataaacacaaacctattggcacaaattatgtgatatagaaagttatgattgttcaagaagtttgtaatttaaaaaaaggaccactatgtacttaccgtaactgaaaagtctttcgttttctcaactttatatatcttccggaaaggac

SEQ ID NO: 6324 - DNA, 229 bp, synthetic construct
  misc_feature 1..229: note = promoter
  source 1..229: mol_type = other DNA
gagggcctatttcccatggttccttcatatttgcatagaggatgcaagactgtcagagggacgattgcaattaacttggccataaacacaaacctattggcacaaacaatgtgatatagaaagttatgattgttcaagaagtttgtaatttaaaaaaaggaccactatgtacttaccgtaactgaaaagtctttcgttttctcaactttatatatcttccggaaaggac

SEQ ID NO: 6325 - DNA, 229 bp, synthetic construct
  misc_feature 1..229: note = promoter
  source 1..229: mol_type = other DNA
gagggcctatttcccatggttccttcatatttgcatagaggatgcaagactgtcagagggacgattgcaattaacttggccataaacacaaacctattggcacaaaccatgtgatatagaaagttatgattgttcaagaagtttgtaatttaaaaaaaggaccactatgtacttaccgtaactgaaaagtctttcgttttctcaactttatatatcttccggaaaggac

SEQ ID NO: 6326 - DNA, 229 bp, synthetic construct
  misc_feature 1..229: note = promoter
  source 1..229: mol_type = other DNA
gagggcctatttcccatggttccttcatatttgcatagaggatgcaagactgtcagagggacgattgcaattaacttggccataaacacaaacctattggcacaaacgatgtgatatagaaagttatgattgttcaagaagtttgtaatttaaaaaaaggaccactatgtacttaccgtaactgaaaagtctttcgttttctcaactttatatatcttccggaaaggac

SEQ ID NO: 6327 - DNA, 229 bp, synthetic construct
  misc_feature 1..229: note = promoter
  source 1..229: mol_type = other DNA
gagggcctatttcccatggttccttcatatttgcatagaggatgcaagactgtcagagggacgattgcaattaacttggccataaacacaaacctattggcacaaactctgtgatatagaaagttatgattgttcaagaagtttgtaatttaaaaaaaggaccactatgtacttaccgtaactgaaaagtctttcgttttctcaactttatatatcttccggaaaggac

SEQ ID NO: 6328 - DNA, 229 bp, synthetic construct
  misc_feature 1..229: note = promoter
  source 1..229: mol_type = other DNA
gagggcctatttcccatggttccttcatatttgcatagaggatgcaagactgtcagagggacgattgcaattaacttggccataaacacaaacctattggcacaaactgtgtgatatagaaagttatgattgttcaagaagtttgtaatttaaaaaaaggaccactatgtacttaccgtaactgaaaagtctttcgttttctcaactttatatatcttccggaaaggac

SEQ ID NO: 6329 - DNA, 229 bp, synthetic construct
  misc_feature 1..229: note = promoter
  source 1..229: mol_type = other DNA
gagggcctatttcccatggttccttcatatttgcatagaggatgcaagactgtcagagggacgattgcaattaacttggccataaacacaaacctattggcacaaactttgtgatatagaaagttatgattgttcaagaagtttgtaatttaaaaaaaggaccactatgtacttaccgtaactgaaaagtctttcgttttctcaactttatatatcttccggaaaggac

SEQ ID NO: 6330 - DNA, 229 bp, synthetic construct
  misc_feature 1..229: note = promoter
  source 1..229: mol_type = other DNA
gagggcctatttcccatggttccttcatatttgcatagaggatgcaagactgtcagagggacgattgcaattaacttggccataaacacaaacctattggcacaaactaagtgatatagaaagttatgattgttcaagaagtttgtaatttaaaaaaaggaccactatgtacttaccgtaactgaaaagtctttcgttttctcaactttatatatcttccggaaaggac

SEQ ID NO: 6331 - DNA, 229 bp, synthetic construct
  misc_feature 1..229: note = promoter
  source 1..229: mol_type = other DNA
gagggcctatttcccatggttccttcatatttgcatagaggatgcaagactgtcagagggacgattgcaattaacttggccataaacacaaacctattggcacaaactacgtgatatagaaagttatgattgttcaagaagtttgtaatttaaaaaaaggaccactatgtacttaccgtaactgaaaagtctttcgttttctcaactttatatatcttccggaaaggac

SEQ ID NO: 6332 - DNA, 229 bp, synthetic construct
  misc_feature 1..229: note = promoter
  source 1..229: mol_type = other DNA
gagggcctatttcccatggttccttcatatttgcatagaggatgcaagactgtcagagggacgattgcaattaacttggccataaacacaaacctattggcacaaactaggtgatatagaaagttatgattgttcaagaagtttgtaatttaaaaaaaggaccactatgtacttaccgtaactgaaaagtctttcgttttctcaactttatatatcttccggaaaggac

SEQ ID NO: 6333 - DNA, 229 bp, synthetic construct
  misc_feature 1..229: note = promoter
  source 1..229: mol_type = other DNA
gagggcctatttcccatggttccttcatatttgcatagaggatgcaagactgtcagagggacgattgcaattaacttggccataaacacaaacctattggcacaaactatatgatatagaaagttatgattgttcaagaagtttgtaatttaaaaaaaggaccactatgtacttaccgtaactgaaaagtctttcgttttctcaactttatatatcttccggaaaggac

SEQ ID NO: 6334 - DNA, 229 bp, synthetic construct
  misc_feature 1..229: note = promoter
  source 1..229: mol_type = other DNA
gagggcctatttcccatggttccttcatatttgcatagaggatgcaagactgtcagagggacgattgcaattaacttggccataaacacaaacctattggcacaaactatctgatatagaaagttatgattgttcaagaagtttgtaatttaaaaaaaggaccactatgtacttaccgtaactgaaaagtctttcgttttctcaactttatatatcttccggaaaggac

SEQ ID NO: 6335 - DNA, 229 bp, synthetic construct
  misc_feature 1..229: note = promoter
  source 1..229: mol_type = other DNA
gagggcctatttcccatggttccttcatatttgcatagaggatgcaagactgtcagagggacgattgcaattaacttggccataaacacaaacctattggcacaaactatttgatatagaaagttatgattgttcaagaagtttgtaatttaaaaaaaggaccactatgtacttaccgtaactgaaaagtctttcgttttctcaactttatatatcttccggaaaggac

SEQ ID NO: 6336 - DNA, 229 bp, synthetic construct
  misc_feature 1..229: note = promoter
  source 1..229: mol_type = other DNA
gagggcctatttcccatggttccttcatatttgcatagaggatgcaagactgtcagagggacgattgcaattaacttggccataaacacaaacctattggcacaaactatgagatatagaaagttatgattgttcaagaagtttgtaatttaaaaaaaggaccactatgtacttaccgtaactgaaaagtctttcgttttctcaactttatatatcttccggaaaggac

SEQ ID NO: 6337 - DNA, 229 bp, synthetic construct
  misc_feature 1..229: note = promoter
  source 1..229: mol_type = other DNA
gagggcctatttcccatggttccttcatatttgcatagaggatgcaagactgtcagagggacgattgcaattaacttggccataaacacaaacctattggcacaaactatgcgatatagaaagttatgattgttcaagaagtttgtaatttaaaaaaaggaccactatgtacttaccgtaactgaaaagtctttcgttttctcaactttatatatcttccggaaaggac

SEQ ID NO: 6338 - DNA, 229 bp, synthetic construct
  misc_feature 1..229: note = promoter
  source 1..229: mol_type = other DNA
gagggcctatttcccatggttccttcatatttgcatagaggatgcaagactgtcagagggacgattgcaattaacttggccataaacacaaacctattggcacaaactatgggatatagaaagttatgattgttcaagaagtttgtaatttaaaaaaaggaccactatgtacttaccgtaactgaaaagtctttcgttttctcaactttatatatcttccggaaaggac

SEQ ID NO: 6339 - DNA, 229 bp, synthetic construct
  misc_feature 1..229: note = promoter
  source 1..229: mol_type = other DNA
gagggcctatttcccatggttccttcatatttgcatagaggatgcaagactgtcagagggacgattgcaattaacttggccataaacacaaacctattggcacaaactatgtaatatagaaagttatgattgttcaagaagtttgtaatttaaaaaaaggaccactatgtacttaccgtaactgaaaagtctttcgttttctcaactttatatatcttccggaaaggac

SEQ ID NO: 6340 - DNA, 229 bp, synthetic construct
  misc_feature 1..229: note = promoter
  source 1..229: mol_type = other DNA
gagggcctatttcccatggttccttcatatttgcatagaggatgcaagactgtcagagggacgattgcaattaacttggccataaacacaaacctattggcacaaactatgtcatatagaaagttatgattgttcaagaagtttgtaatttaaaaaaaggaccactatgtacttaccgtaactgaaaagtctttcgttttctcaactttatatatcttccggaaaggac

SEQ ID NO: 6341 - DNA, 229 bp, synthetic construct
  misc_feature 1..229: note = promoter
  source 1..229: mol_type = other DNA
gagggcctatttcccatggttccttcatatttgcatagaggatgcaagactgtcagagggacgattgcaattaacttggccataaacacaaacctattggcacaaactatgttatatagaaagttatgattgttcaagaagtttgtaatttaaaaaaaggaccactatgtacttaccgtaactgaaaagtctttcgttttctcaactttatatatcttccggaaaggac

SEQ ID NO: 6342 - DNA, 229 bp, synthetic construct
  misc_feature 1..229: note = promoter
  source 1..229: mol_type = other DNA
gagggcctatttcccatggttccttcatatttgcatagaggatgcaagactgtcagagggacgattgcaattaacttggccataaacacaaacctattggcacaaactatgtgctatagaaagttatgattgttcaagaagtttgtaatttaaaaaaaggaccactatgtacttaccgtaactgaaaagtctttcgttttctcaactttatatatcttccggaaaggac

SEQ ID NO: 6343 - DNA, 229 bp, synthetic construct
  misc_feature 1..229: note = promoter
  source 1..229: mol_type = other DNA
gagggcctatttcccatggttccttcatatttgcatagaggatgcaagactgtcagagggacgattgcaattaacttggccataaacacaaacctattggcacaaactatgtggtatagaaagttatgattgttcaagaagtttgtaatttaaaaaaaggaccactatgtacttaccgtaactgaaaagtctttcgttttctcaactttatatatcttccggaaaggac

SEQ ID NO: 6344 - DNA, 229 bp, synthetic construct
  misc_feature 1..229: note = promoter
  source 1..229: mol_type = other DNA
gagggcctatttcccatggttccttcatatttgcatagaggatgcaagactgtcagagggacgattgcaattaacttggccataaacacaaacctattggcacaaactatgtgttatagaaagttatgattgttcaagaagtttgtaatttaaaaaaaggaccactatgtacttaccgtaactgaaaagtctttcgttttctcaactttatatatcttccggaaaggac

SEQ ID NO: 6345 - DNA, 229 bp, synthetic construct
  misc_feature 1..229: note = promoter
  source 1..229: mol_type = other DNA
gagggcctatttcccatggttccttcatatttgcatagaggatgcaagactgtcagagggacgattgcaattaacttggccataaacacaaacctattggcacaaactatgtgaaatagaaagttatgattgttcaagaagtttgtaatttaaaaaaaggaccactatgtacttaccgtaactgaaaagtctttcgttttctcaactttatatatcttccggaaaggac

SEQ ID NO: 6346 - DNA, 229 bp, synthetic construct
  misc_feature 1..229: note = promoter
  source 1..229: mol_type = other DNA
gagggcctatttcccatggttccttcatatttgcatagaggatgcaagactgtcagagggacgattgcaattaacttggccataaacacaaacctattggcacaaactatgtgacatagaaagttatgattgttcaagaagtttgtaatttaaaaaaaggaccactatgtacttaccgtaactgaaaagtctttcgttttctcaactttatatatcttccggaaaggac

SEQ ID NO: 6347 - DNA, 229 bp, synthetic construct
  misc_feature 1..229: note = promoter
  source 1..229: mol_type = other DNA
gagggcctatttcccatggttccttcatatttgcatagaggatgcaagactgtcagagggacgattgcaattaacttggccataaacacaaacctattggcacaaactatgtgagatagaaagttatgattgttcaagaagtttgtaatttaaaaaaaggaccactatgtacttaccgtaactgaaaagtctttcgttttctcaactttatatatcttccggaaaggac

SEQ ID NO: 6348 - DNA, 229 bp, synthetic construct
  misc_feature 1..229: note = promoter
  source 1..229: mol_type = other DNA
gagggcctatttcccatggttccttcatatttgcatagaggatgcaagactgtcagagggacgattgcaattaacttggccataaacacaaacctattggcacaaactatgtgatctagaaagttatgattgttcaagaagtttgtaatttaaaaaaaggaccactatgtacttaccgtaactgaaaagtctttcgttttctcaactttatatatcttccggaaaggac

SEQ ID NO: 6349 - DNA, 229 bp, synthetic construct
  misc_feature 1..229: note = promoter
  source 1..229: mol_type = other DNA
gagggcctatttcccatggttccttcatatttgcatagaggatgcaagactgtcagagggacgattgcaattaacttggccataaacacaaacctattggcacaaactatgtgatgtagaaagttatgattgttcaagaagtttgtaatttaaaaaaaggaccactatgtacttaccgtaactgaaaagtctttcgttttctcaactttatatatcttccggaaaggac

SEQ ID NO: 6350 - DNA, 229 bp, synthetic construct
  misc_feature 1..229: note = promoter
  source 1..229: mol_type = other DNA
gagggcctatttcccatggttccttcatatttgcatagaggatgcaagactgtcagagggacgattgcaattaacttggccataaacacaaacctattggcacaaactatgtgatttagaaagttatgattgttcaagaagtttgtaatttaaaaaaaggaccactatgtacttaccgtaactgaaaagtctttcgttttctcaactttatatatcttccggaaaggac

SEQ ID NO: 6351 - DNA, 229 bp, synthetic construct
  misc_feature 1..229: note = promoter
  source 1..229: mol_type = other DNA
gagggcctatttcccatggttccttcatatttgcatagaggatgcaagactgtcagagggacgattgcaattaacttggccataaacacaaacctattggcacaaactatgtgataaagaaagttatgattgttcaagaagtttgtaatttaaaaaaaggaccactatgtacttaccgtaactgaaaagtctttcgttttctcaactttatatatcttccggaaaggac

SEQ ID NO: 6352 - DNA, 229 bp, synthetic construct
  misc_feature 1..229: note = promoter
  source 1..229: mol_type = other DNA
gagggcctatttcccatggttccttcatatttgcatagaggatgcaagactgtcagagggacgattgcaattaacttggccataaacacaaacctattggcacaaactatgtgatacagaaagttatgattgttcaagaagtttgtaatttaaaaaaaggaccactatgtacttaccgtaactgaaaagtctttcgttttctcaactttatatatcttccggaaaggac

SEQ ID NO: 6353 - DNA, 229 bp, synthetic construct
  misc_feature 1..229: note = promoter
  source 1..229: mol_type = other DNA
gagggcctatttcccatggttccttcatatttgcatagaggatgcaagactgtcagagggacgattgcaattaacttggccataaacacaaacctattggcacaaactatgtgatagagaaagttatgattgttcaagaagtttgtaatttaaaaaaaggaccactatgtacttaccgtaactgaaaagtctttcgttttctcaactttatatatcttccggaaaggac

SEQ ID NO: 6354 - DNA, 229 bp, synthetic construct
  misc_feature 1..229: note = promoter
  source 1..229: mol_type = other DNA
gagggcctatttcccatggttccttcatatttgcatagaggatgcaagactgtcagagggacgattgcaattaacttggccataaacacaaacctattggcacaaactatgtgatatcgaaagttatgattgttcaagaagtttgtaatttaaaaaaaggaccactatgtacttaccgtaactgaaaagtctttcgttttctcaactttatatatcttccggaaaggac

SEQ ID NO: 6355 - DNA, 229 bp, synthetic construct
  misc_feature 1..229: note = promoter
  source 1..229: mol_type = other DNA
gagggcctatttcccatggttccttcatatttgcatagaggatgcaagactgtcagagggacgattgcaattaacttggccataaacacaaacctattggcacaaactatgtgatatggaaagttatgattgttcaagaagtttgtaatttaaaaaaaggaccactatgtacttaccgtaactgaaaagtctttcgttttctcaactttatatatcttccggaaaggac

SEQ ID NO: 6356 - DNA, 229 bp, synthetic construct
  misc_feature 1..229: note = promoter
  source 1..229: mol_type = other DNA
gagggcctatttcccatggttccttcatatttgcatagaggatgcaagactgtcagagggacgattgcaattaacttggccataaacacaaacctattggcacaaactatgtgatattgaaagttatgattgttcaagaagtttgtaatttaaaaaaaggaccactatgtacttaccgtaactgaaaagtctttcgttttctcaactttatatatcttccggaaaggac

SEQ ID NO: 6357 - DNA, 229 bp, synthetic construct
  misc_feature 1..229: note = promoter
  source 1..229: mol_type = other DNA
gagggcctatttcccatggttccttcatatttgcatagaggatgcaagactgtcagagggacgattgcaattaacttggccataaacacaaacctattggcacaaactatgtgatataaaaagttatgattgttcaagaagtttgtaatttaaaaaaaggaccactatgtacttaccgtaactgaaaagtctttcgttttctcaactttatatatcttccggaaaggac

SEQ ID NO: 6358 - DNA, 229 bp, synthetic construct
  misc_feature 1..229: note = promoter
  source 1..229: mol_type = other DNA
gagggcctatttcccatggttccttcatatttgcatagaggatgcaagactgtcagagggacgattgcaattaacttggccataaacacaaacctattggcacaaactatgtgatatacaaagttatgattgttcaagaagtttgtaatttaaaaaaaggaccactatgtacttaccgtaactgaaaagtctttcgttttctcaactttatatatcttccggaaaggac

SEQ ID NO: 6359 - DNA, 229 bp, synthetic construct
  misc_feature 1..229: note = promoter
  source 1..229: mol_type = other DNA
gagggcctatttcccatggttccttcatatttgcatagaggatgcaagactgtcagagggacgattgcaattaacttggccataaacacaaacctattggcacaaactatgtgatatataaagttatgattgttcaagaagtttgtaatttaaaaaaaggaccactatgtacttaccgtaactgaaaagtctttcgttttctcaactttatatatcttccggaaaggac

SEQ ID NO: 6360 - DNA, 229 bp, synthetic construct
  misc_feature 1..229: note = promoter
  source 1..229: mol_type = other DNA
gagggcctatttcccatggttccttcatatttgcatagaggatgcaagactgtcagagggacgattgcaattaacttggccataaacacaaacctattggcacaaactatgtgatatagcaagttatgattgttcaagaagtttgtaatttaaaaaaaggaccactatgtacttaccgtaactgaaaagtctttcgttttctcaactttatatatcttccggaaaggac

SEQ ID NO: 6361 - DNA, 229 bp, synthetic construct
  misc_feature 1..229: note = promoter
  source 1..229: mol_type = other DNA
gagggcctatttcccatggttccttcatatttgcatagaggatgcaagactgtcagagggacgattgcaattaacttggccataaacacaaacctattggcacaaactatgtgatataggaagttatgattgttcaagaagtttgtaatttaaaaaaaggaccactatgtacttaccgtaactgaaaagtctttcgttttctcaactttatatatcttccggaaaggac

SEQ ID NO: 6362 - DNA, 229 bp, synthetic construct
  misc_feature 1..229: note = promoter
  source 1..229: mol_type = other DNA
gagggcctatttcccatggttccttcatatttgcatagaggatgcaagactgtcagagggacgattgcaattaacttggccataaacacaaacctattggcacaaactatgtgatatagtaagttatgattgttcaagaagtttgtaatttaaaaaaaggaccactatgtacttaccgtaactgaaaagtctttcgttttctcaactttatatatcttccggaaaggac

SEQ ID NO: 6363 - DNA, 229 bp, synthetic construct
  misc_feature 1..229: note = promoter
  source 1..229: mol_type = other DNA
gagggcctatttcccatggttccttcatatttgcatagaggatgcaagactgtcagagggacgattgcaattaacttggccataaacacaaacctattggcacaaactatgtgatatagacagttatgattgttcaagaagtttgtaatttaaaaaaaggaccactatgtacttaccgtaactgaaaagtctttcgttttctcaactttatatatcttccggaaaggac

SEQ ID NO: 6364 - DNA, 229 bp, synthetic construct
  misc_feature 1..229: note = promoter
  source 1..229: mol_type = other DNA
gagggcctatttcccatggttccttcatatttgcatagaggatgcaagactgtcagagggacgattgcaattaacttggccataaacacaaacctattggcacaaactatgtgatatagagagttatgattgttcaagaagtttgtaatttaaaaaaaggaccactatgtacttaccgtaactgaaaagtctttcgttttctcaactttatatatcttccggaaaggac

SEQ ID NO: 6365 - DNA, 229 bp, synthetic construct
  misc_feature 1..229: note = promoter
  source 1..229: mol_type = other DNA
gagggcctatttcccatggttccttcatatttgcatagaggatgcaagactgtcagagggacgattgcaattaacttggccataaacacaaacctattggcacaaactatgtgatatagatagttatgattgttcaagaagtttgtaatttaaaaaaaggaccactatgtacttaccgtaactgaaaagtctttcgttttctcaactttatatatcttccggaaaggac

SEQ ID NO: 6366 - DNA, 229 bp, synthetic construct
  misc_feature 1..229: note = promoter
  source 1..229: mol_type = other DNA
gagggcctatttcccatggttccttcatatttgcatagaggatgcaagactgtcagagggacgattgcaattaacttggccataaacacaaacctattggcacaaactatgtgatatagaacgttatgattgttcaagaagtttgtaatttaaaaaaaggaccactatgtacttaccgtaactgaaaagtctttcgttttctcaactttatatatcttccggaaaggac

SEQ ID NO: 6367 - DNA, 229 bp, synthetic construct
  misc_feature 1..229: note = promoter
  source 1..229: mol_type = other DNA
gagggcctatttcccatggttccttcatatttgcatagaggatgcaagactgtcagagggacgattgcaattaacttggccataaacacaaacctattggcacaaactatgtgatatagaaggttatgattgttcaagaagtttgtaatttaaaaaaaggaccactatgtacttaccgtaactgaaaagtctttcgttttctcaactttatatatcttccggaaaggac

SEQ ID NO: 6368 - DNA, 229 bp, synthetic construct
  misc_feature 1..229: note = promoter
  source 1..229: mol_type = other DNA
gagggcctatttcccatggttccttcatatttgcatagaggatgcaagactgtcagagggacgattgcaattaacttggccataaacacaaacctattggcacaaactatgtgatatagaatgttatgattgttcaagaagtttgtaatttaaaaaaaggaccactatgtacttaccgtaactgaaaagtctttcgttttctcaactttatatatcttccggaaaggac

SEQ ID NO: 6369 - DNA, 229 bp, synthetic construct
  misc_feature 1..229: note = promoter
  source 1..229: mol_type = other DNA
gagggcctatttcccatggttccttcatatttgcatagaggatgcaagactgtcagagggacgattgcaattaacttggccataaacacaaacctattggcacaaactatgtgatatagaaaattatgattgttcaagaagtttgtaatttaaaaaaaggaccactatgtacttaccgtaactgaaaagtctttcgttttctcaactttatatatcttccggaaaggac

SEQ ID NO: 6370 - DNA, 229 bp, synthetic construct
  misc_feature 1..229: note = promoter
  source 1..229: mol_type = other DNA
gagggcctatttcccatggttccttcatatttgcatagaggatgcaagactgtcagagggacgattgcaattaacttggccataaacacaaacctattggcacaaactatgtgatatagaaacttatgattgttcaagaagtttgtaatttaaaaaaaggaccactatgtacttaccgtaactgaaaagtctttcgttttctcaactttatatatcttccggaaaggac

SEQ ID NO: 6371 - DNA, 229 bp, synthetic construct
  misc_feature 1..229: note = promoter
  source 1..229: mol_type = other DNA
gagggcctatttcccatggttccttcatatttgcatagaggatgcaagactgtcagagggacgattgcaattaacttggccataaacacaaacctattggcacaaactatgtgatatagaaatttatgattgttcaagaagtttgtaatttaaaaaaaggaccactatgtacttaccgtaactgaaaagtctttcgttttctcaactttatatatcttccggaaaggac

SEQ ID NO: 6372 - DNA, 229 bp, synthetic construct
  misc_feature 1..229: note = promoter
  source 1..229: mol_type = other DNA
gagggcctatttcccatggttccttcatatttgcatagaggatgcaagactgtcagagggacgattgcaattaacttggccataaacacaaacctattggcacaaactatgtgatatagaaagatatgattgttcaagaagtttgtaatttaaaaaaaggaccactatgtacttaccgtaactgaaaagtctttcgttttctcaactttatatatcttccggaaaggac

SEQ ID NO: 6373 - DNA, 229 bp, synthetic construct
  misc_feature 1..229: note = promoter
  source 1..229: mol_type = other DNA
gagggcctatttcccatggttccttcatatttgcatagaggatgcaagactgtcagagggacgattgcaattaacttggccataaacacaaacctattggcacaaactatgtgatatagaaagctatgattgttcaagaagtttgtaatttaaaaaaaggaccactatgtacttaccgtaactgaaaagtctttcgttttctcaactttatatatcttccggaaaggac

SEQ ID NO: 6374 - DNA, 229 bp, synthetic construct
  misc_feature 1..229: note = promoter
  source 1..229: mol_type = other DNA
gagggcctatttcccatggttccttcatatttgcatagaggatgcaagactgtcagagggacgattgcaattaacttggccataaacacaaacctattggcacaaactatgtgatatagaaaggtatgattgttcaagaagtttgtaatttaaaaaaaggaccactatgtacttaccgtaactgaaaagtctttcgttttctcaactttatatatcttccggaaaggac

SEQ ID NO: 6375 - DNA, 229 bp, synthetic construct
  misc_feature 1..229: note = promoter
  source 1..229: mol_type = other DNA
gagggcctatttcccatggttccttcatatttgcatagaggatgcaagactgtcagagggacgattgcaattaacttggccataaacacaaacctattggcacaaactatgtgatatagaaagtaatgattgttcaagaagtttgtaatttaaaaaaaggaccactatgtacttaccgtaactgaaaagtctttcgttttctcaactttatatatcttccggaaaggac

SEQ ID NO: 6376 - DNA, 229 bp, synthetic construct
  misc_feature 1..229: note = promoter
  source 1..229: mol_type = other DNA
gagggcctatttcccatggttccttcatatttgcatagaggatgcaagactgtcagagggacgattgcaattaacttggccataaacacaaacctattggcacaaactatgtgatatagaaagtcatgattgttcaagaagtttgtaatttaaaaaaaggaccactatgtacttaccgtaactgaaaagtctttcgttttctcaactttatatatcttccggaaaggac

SEQ ID NO: 6377 - DNA, 229 bp, synthetic construct
  misc_feature 1..229: note = promoter
  source 1..229: mol_type = other DNA
gagggcctatttcccatggttccttcatatttgcatagaggatgcaagactgtcagagggacgattgcaattaacttggccataaacacaaacctattggcacaaactatgtgatatagaaagtgatgattgttcaagaagtttgtaatttaaaaaaaggaccactatgtacttaccgtaactgaaaagtctttcgttttctcaactttatatatcttccggaaaggac

SEQ ID NO: 6378 - DNA, 229 bp, synthetic construct
  misc_feature 1..229: note = promoter
  source 1..229: mol_type = other DNA
gagggcctatttcccatggttccttcatatttgcatagaggatgcaagactgtcagagggacgattgcaattaacttggccataaacacaaacctattggcacaaactatgtgatatagaaagttctgattgttcaagaagtttgtaatttaaaaaaaggaccactatgtacttaccgtaactgaaaagtctttcgttttctcaactttatatatcttccggaaaggac

SEQ ID NO: 6379 - DNA, 229 bp, synthetic construct
  misc_feature 1..229: note = promoter
  source 1..229: mol_type = other DNA
gagggcctatttcccatggttccttcatatttgcatagaggatgcaagactgtcagagggacgattgcaattaacttggccataaacacaaacctattggcacaaactatgtgatatagaaagttgtgattgttcaagaagtttgtaatttaaaaaaaggaccactatgtacttaccgtaactgaaaagtctttcgttttctcaactttatatatcttccggaaaggac

SEQ ID NO: 6380 - DNA, 229 bp, synthetic construct
  misc_feature 1..229: note = promoter
  source 1..229: mol_type = other DNA
gagggcctatttcccatggttccttcatatttgcatagaggatgcaagactgtcagagggacgattgcaattaacttggccataaacacaaacctattggcacaaactatgtgatatagaaagttttgattgttcaagaagtttgtaatttaaaaaaaggaccactatgtacttaccgtaactgaaaagtctttcgttttctcaactttatatatcttccggaaaggac

SEQ ID NO: 6381 - DNA, 229 bp, synthetic construct
  misc_feature 1..229: note = promoter
  source 1..229: mol_type = other DNA
gagggcctatttcccatggttccttcatatttgcatagaggatgcaagactgtcagagggacgattgcaattaacttggccataaacacaaacctattggcacaaactatgtgatatagaaagttaagattgttcaagaagtttgtaatttaaaaaaaggaccactatgtacttaccgtaactgaaaagtctttcgttttctcaactttatatatcttccggaaaggac

SEQ ID NO: 6382 - DNA, 229 bp, synthetic construct
  misc_feature 1..229: note = promoter
  source 1..229: mol_type = other DNA
gagggcctatttcccatggttccttcatatttgcatagaggatgcaagactgtcagagggacgattgcaattaacttggccataaacacaaacctattggcacaaactatgtgatatagaaagttacgattgttcaagaagtttgtaatttaaaaaaaggaccactatgtacttaccgtaactgaaaagtctttcgttttctcaactttatatatcttccggaaaggac

SEQ ID NO: 6383 - DNA, 229 bp, synthetic construct
  misc_feature 1..229: note = promoter
  source 1..229: mol_type = other DNA
gagggcctatttcccatggttccttcatatttgcatagaggatgcaagactgtcagagggacgattgcaattaacttggccataaacacaaacctattggcacaaactatgtgatatagaaagttaggattgttcaagaagtttgtaatttaaaaaaaggaccactatgtacttaccgtaactgaaaagtctttcgttttctcaactttatatatcttccggaaaggac

SEQ ID NO: 6384 - DNA, 229 bp, synthetic construct
  misc_feature 1..229: note = promoter
  source 1..229: mol_type = other DNA
gagggcctatttcccatggttccttcatatttgcatagaggatgcaagactgtcagagggacgattgcaattaacttggccataaacacaaacctattggcacaaactatgtgatatagaaagttataattgttcaagaagtttgtaatttaaaaaaaggaccactatgtacttaccgtaactgaaaagtctttcgttttctcaactttatatatcttccggaaaggac

SEQ ID NO: 6385 - DNA, 229 bp, synthetic construct
  misc_feature 1..229: note = promoter
  source 1..229: mol_type = other DNA
gagggcctatttcccatggttccttcatatttgcatagaggatgcaagactgtcagagggacgattgcaattaacttggccataaacacaaacctattggcacaaactatgtgatatagaaagttatcattgttcaagaagtttgtaatttaaaaaaaggaccactatgtacttaccgtaactgaaaagtctttcgttttctcaactttatatatcttccggaaaggac

SEQ ID NO: 6386 - DNA, 229 bp, synthetic construct
  misc_feature 1..229: note = promoter
  source 1..229: mol_type = other DNA
gagggcctatttcccatggttccttcatatttgcatagaggatgcaagactgtcagagggacgattgcaattaacttggccataaacacaaacctattggcacaaactatgtgatatagaaagttattattgttcaagaagtttgtaatttaaaaaaaggaccactatgtacttaccgtaactgaaaagtctttcgttttctcaactttatatatcttccggaaaggac

SEQ ID NO: 6387 - DNA, 229 bp, synthetic construct
  misc_feature 1..229: note = promoter
  source 1..229: mol_type = other DNA
gagggcctatttcccatggttccttcatatttgcatagaggatgcaagactgtcagagggacgattgcaattaacttggccataaacacaaacctattggcacaaactatgtgatatagaaagttatgcttgttcaagaagtttgtaatttaaaaaaaggaccactatgtacttaccgtaactgaaaagtctttcgttttctcaactttatatatcttccggaaaggac

SEQ ID NO: 6388 - DNA, 229 bp, synthetic construct
  misc_feature 1..229: note = promoter
  source 1..229: mol_type = other DNA
gagggcctatttcccatggttccttcatatttgcatagaggatgcaagactgtcagagggacgattgcaattaacttggccataaacacaaacctattggcacaaactatgtgatatagaaagttatggttgttcaagaagtttgtaatttaaaaaaaggaccactatgtacttaccgtaactgaaaagtctttcgttttctcaactttatatatcttccggaaaggac

SEQ ID NO: 6389 - DNA, 229 bp, synthetic construct
  misc_feature 1..229: note = promoter
  source 1..229: mol_type = other DNA
gagggcctatttcccatggttccttcatatttgcatagaggatgcaagactgtcagagggacgattgcaattaacttggccataaacacaaacctattggcacaaactatgtgatatagaaagttatgtttgttcaagaagtttgtaatttaaaaaaaggaccactatgtacttaccgtaactgaaaagtctttcgttttctcaactttatatatcttccggaaaggac

SEQ ID NO: 6390 - DNA, 229 bp, synthetic construct
  misc_feature 1..229: note = promoter
  source 1..229: mol_type = other DNA
gagggcctatttcccatggttccttcatatttgcatagaggatgcaagactgtcagagggacgattgcaattaacttggccataaacacaaacctattggcacaaactatgtgatatagaaagttatgaatgttcaagaagtttgtaatttaaaaaaaggaccactatgtacttaccgtaactgaaaagtctttcgttttctcaactttatatatcttccggaaaggac

SEQ ID NO: 6391 - DNA, 229 bp, synthetic construct
  misc_feature 1..229: note = promoter
  source 1..229: mol_type = other DNA
gagggcctatttcccatggttccttcatatttgcatagaggatgcaagactgtcagagggacgattgcaattaacttggccataaacacaaacctattggcacaaactatgtgatatagaaagttatgactgttcaagaagtttgtaatttaaaaaaaggaccactatgtacttaccgtaactgaaaagtctttcgttttctcaactttatatatcttccggaaaggac

SEQ ID NO: 6392 - DNA, 229 bp, synthetic construct
  misc_feature 1..229: note = promoter
  source 1..229: mol_type = other DNA
gagggcctatttcccatggttccttcatatttgcatagaggatgcaagactgtcagagggacgattgcaattaacttggccataaacacaaacctattggcacaaactatgtgatatagaaagttatgagtgttcaagaagtttgtaatttaaaaaaaggaccactatgtacttaccgtaactgaaaagtctttcgttttctcaactttatatatcttccggaaaggac

SEQ ID NO: 6393 - DNA, 229 bp, synthetic construct
  misc_feature 1..229: note = promoter
  source 1..229: mol_type = other DNA
gagggcctatttcccatggttccttcatatttgcatagaggatgcaagactgtcagagggacgattgcaattaacttggccataaacacaaacctattggcacaaactatgtgatatagaaagttatgatagttcaagaagtttgtaatttaaaaaaaggaccactatgtacttaccgtaactgaaaagtctttcgttttctcaactttatatatcttccggaaaggac

SEQ ID NO: 6394 - DNA, 229 bp, synthetic construct
  misc_feature 1..229: note = promoter
  source 1..229: mol_type = other DNA
gagggcctatttcccatggttccttcatatttgcatagaggatgcaagactgtcagagggacgattgcaattaacttggccataaacacaaacctattggcacaaactatgtgatatagaaagttatgatcgttcaagaagtttgtaatttaaaaaaaggaccactatgtacttaccgtaactgaaaagtctttcgttttctcaactttatatatcttccggaaaggac

SEQ ID NO: 6395 - DNA, 229 bp, synthetic construct
  misc_feature 1..229: note = promoter
  source 1..229: mol_type = other DNA
gagggcctatttcccatggttccttcatatttgcatagaggatgcaagactgtcagagggacgattgcaattaacttggccataaacacaaacctattggcacaaactatgtgatatagaaagttatgatggttcaagaagtttgtaatttaaaaaaaggaccactatgtacttaccgtaactgaaaagtctttcgttttctcaactttatatatcttccggaaaggac

SEQ ID NO: 6396 - DNA, 229 bp, synthetic construct
  misc_feature 1..229: note = promoter
  source 1..229: mol_type = other DNA
gagggcctatttcccatggttccttcatatttgcatagaggatgcaagactgtcagagggacgattgcaattaacttggccataaacacaaacctattggcacaaactatgtgatatagaaagttatgattattcaagaagtttgtaatttaaaaaaaggaccactatgtacttaccgtaactgaaaagtctttcgttttctcaactttatatatcttccggaaaggac

SEQ ID NO: 6397 - DNA, 229 bp, synthetic construct
  misc_feature 1..229: note = promoter
  source 1..229: mol_type = other DNA
gagggcctatttcccatggttccttcatatttgcatagaggatgcaagactgtcagagggacgattgcaattaacttggccataaacacaaacctattggcacaaactatgtgatatagaaagttatgattcttcaagaagtttgtaatttaaaaaaaggaccactatgtacttaccgtaactgaaaagtctttcgttttctcaactttatatatcttccggaaaggac

SEQ ID NO: 6398 - DNA, 229 bp, synthetic construct
  misc_feature 1..229: note = promoter
  source 1..229: mol_type = other DNA
gagggcctatttcccatggttccttcatatttgcatagaggatgcaagactgtcagagggacgattgcaattaacttggccataaacacaaacctattggcacaaactatgtgatatagaaagttatgatttttcaagaagtttgtaatttaaaaaaaggaccactatgtacttaccgtaactgaaaagtctttcgttttctcaactttatatatcttccggaaaggac

SEQ ID NO: 6399 - DNA, 229 bp, synthetic construct
  misc_feature 1..229: note = promoter
  source 1..229: mol_type = other DNA
gagggcctatttcccatggttccttcatatttgcatagaggatgcaagactgtcagagggacgattgcaattaacttggccataaacacaaacctattggcacaaactatgtgatatagaaagttatgattgatcaagaagtttgtaatttaaaaaaaggaccactatgtacttaccgtaactgaaaagtctttcgttttctcaactttatatatcttccggaaaggac

SEQ ID NO: 6400 - DNA, 229 bp, synthetic construct
  misc_feature 1..229: note = promoter
  source 1..229: mol_type = other DNA
gagggcctatttcccatggttccttcatatttgcatagaggatgcaagactgtcagagggacgattgcaattaacttggccataaacacaaacctattggcacaaactatgtgatatagaaagttatgattgctcaagaagtttgtaatttaaaaaaaggaccactatgtacttaccgtaactgaaaagtctttcgttttctcaactttatatatcttccggaaaggac

SEQ ID NO: 6401 - DNA, 229 bp, synthetic construct
  misc_feature 1..229: note = promoter
  source 1..229: mol_type = other DNA
gagggcctatttcccatggttccttcatatttgcatagaggatgcaagactgtcagagggacgattgcaattaacttggccataaacacaaacctattggcacaaactatgtgatatagaaagttatgattggtcaagaagtttgtaatttaaaaaaaggaccactatgtacttaccgtaactgaaaagtctttcgttttctcaactttatatatcttccggaaaggac

SEQ ID NO: 6402 - DNA, 229 bp, synthetic construct
  misc_feature 1..229: note = promoter
  source 1..229: mol_type = other DNA
gagggcctatttcccatggttccttcatatttgcatagaggatgcaagactgtcagagggacgattgcaattaacttggccataaacacaaacctattggcacaaactatgtgatatagaaagttatgattgtacaagaagtttgtaatttaaaaaaaggaccactatgtacttaccgtaactgaaaagtctttcgttttctcaactttatatatcttccggaaaggac

SEQ ID NO: 6403 - DNA, 229 bp, synthetic construct
  misc_feature 1..229: note = promoter
  source 1..229: mol_type = other DNA
gagggcctatttcccatggttccttcatatttgcatagaggatgcaagactgtcagagggacgattgcaattaacttggccataaacacaaacctattggcacaaactatgtgatatagaaagttatgattgtccaagaagtttgtaatttaaaaaaaggaccactatgtacttaccgtaactgaaaagtctttcgttttctcaactttatatatcttccggaaaggac

SEQ ID NO: 6404 - DNA, 229 bp, synthetic construct
  misc_feature 1..229: note = promoter
  source 1..229: mol_type = other DNA
gagggcctatttcccatggttccttcatatttgcatagaggatgcaagactgtcagagggacgattgcaattaacttggccataaacacaaacctattggcacaaactatgtgatatagaaagttatgattgtgcaagaagtttgtaatttaaaaaaaggaccactatgtacttaccgtaactgaaaagtctttcgttttctcaactttatatatcttccggaaaggac

SEQ ID NO: 6405 - DNA, 229 bp, synthetic construct
  misc_feature 1..229: note = promoter
  source 1..229: mol_type = other DNA
gagggcctatttcccatggttccttcatatttgcatagaggatgcaagactgtcagagggacgattgcaattaacttggccataaacacaaacctattggcacaaactatgtgatatagaaagttatgattgttaaagaagtttgtaatttaaaaaaaggaccactatgtacttaccgtaactgaaaagtctttcgttttctcaactttatatatcttccggaaaggac

SEQ ID NO: 6406 - DNA, 229 bp, synthetic construct
  misc_feature 1..229: note = promoter
  source 1..229: mol_type = other DNA
gagggcctatttcccatggttccttcatatttgcatagaggatgcaagactgtcagagggacgattgcaattaacttggccataaacacaaacctattggcacaaactatgtgatatagaaagttatgattgttgaagaagtttgtaatttaaaaaaaggaccactatgtacttaccgtaactgaaaagtctttcgttttctcaactttatatatcttccggaaaggac

SEQ ID NO: 6407 - DNA, 229 bp, synthetic construct
  misc_feature 1..229: note = promoter
  source 1..229: mol_type = other DNA
gagggcctatttcccatggttccttcatatttgcatagaggatgcaagactgtcagagggacgattgcaattaacttggccataaacacaaacctattggcacaaactatgtgatatagaaagttatgattgtttaagaagtttgtaatttaaaaaaaggaccactatgtacttaccgtaactgaaaagtctttcgttttctcaactttatatatcttccggaaaggac

SEQ ID NO: 6408 - DNA, 229 bp, synthetic construct
  misc_feature 1..229: note = promoter
  source 1..229: mol_type = other DNA
gagggcctatttcccatggttccttcatatttgcatagaggatgcaagactgtcagagggacgattgcaattaacttggccataaacacaaacctattggcacaaactatgtgatatagaaagttatgattgttccagaagtttgtaatttaaaaaaaggaccactatgtacttaccgtaactgaaaagtctttcgttttctcaactttatatatcttccggaaaggac

SEQ ID NO: 6409 - DNA, 229 bp, synthetic construct
  misc_feature 1..229: note = promoter
  source 1..229: mol_type = other DNA
gagggcctatttcccatggttccttcatatttgcatagaggatgcaagactgtcagagggacgattgcaattaacttggccataaacacaaacctattggcacaaactatgtgatatagaaagttatgattgttcgagaagtttgtaatttaaaaaaaggaccactatgtacttaccgtaactgaaaagtctttcgttttctcaactttatatatcttccggaaaggac

SEQ ID NO: 6410 - DNA, 229 bp, synthetic construct
  misc_feature 1..229: note = promoter
  source 1..229: mol_type = other DNA
gagggcctatttcccatggttccttcatatttgcatagaggatgcaagactgtcagagggacgattgcaattaacttggccataaacacaaacctattggcacaaactatgtgatatagaaagttatgattgttctagaagtttgtaatttaaaaaaaggaccactatgtacttaccgtaactgaaaagtctttcgttttctcaactttatatatcttccggaaaggac

SEQ ID NO: 6411 - DNA, 229 bp, synthetic construct
  misc_feature 1..229: note = promoter
  source 1..229: mol_type = other DNA
gagggcctatttcccatggttccttcatatttgcatagaggatgcaagactgtcagagggacgattgcaattaacttggccataaacacaaacctattggcacaaactatgtgatatagaaagttatgattgttcacgaagtttgtaatttaaaaaaaggaccactatgtacttaccgtaactgaaaagtctttcgttttctcaactttatatatcttccggaaaggac

SEQ ID NO: 6412 - DNA, 229 bp, synthetic construct
  misc_feature 1..229: note = promoter
  source 1..229: mol_type = other DNA
gagggcctatttcccatggttccttcatatttgcatagaggatgcaagactgtcagagggacgattgcaattaacttggccataaacacaaacctattggcacaaactatgtgatatagaaagttatgattgttcaggaagtttgtaatttaaaaaaaggaccactatgtacttaccgtaactgaaaagtctttcgttttctcaactttatatatcttccggaaaggac

SEQ ID NO: 6413 - DNA, 229 bp, synthetic construct
  misc_feature 1..229: note = promoter
  source 1..229: mol_type = other DNA
gagggcctatttcccatggttccttcatatttgcatagaggatgcaagactgtcagagggacgattgcaattaacttggccataaacacaaacctattggcacaaactatgtgatatagaaagttatgattgttcatgaagtttgtaatttaaaaaaaggaccactatgtacttaccgtaactgaaaagtctttcgttttctcaactttatatatcttccggaaaggac

SEQ ID NO: 6414 - DNA, 229 bp, synthetic construct
  misc_feature 1..229: note = promoter
  source 1..229: mol_type = other DNA
gagggcctatttcccatggttccttcatatttgcatagaggatgcaagactgtcagagggacgattgcaattaacttggccataaacacaaacctattggcacaaactatgtgatatagaaagttatgattgttcaaaaagtttgtaatttaaaaaaaggaccactatgtacttaccgtaactgaaaagtctttcgttttctcaactttatatatcttccggaaaggac

SEQ ID NO: 6415 - DNA, 229 bp, synthetic construct
  misc_feature 1..229: note = promoter
  source 1..229: mol_type = other DNA
gagggcctatttcccatggttccttcatatttgcatagaggatgcaagactgtcagagggacgattgcaattaacttggccataaacacaaacctattggcacaaactatgtgatatagaaagttatgattgttcaacaagtttgtaatttaaaaaaaggaccactatgtacttaccgtaactgaaaagtctttcgttttctcaactttatatatcttccggaaaggac

SEQ ID NO: 6416 - DNA, 229 bp, synthetic construct
  misc_feature 1..229: note = promoter
  source 1..229: mol_type = other DNA
gagggcctatttcccatggttccttcatatttgcatagaggatgcaagactgtcagagggacgattgcaattaacttggccataaacacaaacctattggcacaaactatgtgatatagaaagttatgattgttcaataagtttgtaatttaaaaaaaggaccactatgtacttaccgtaactgaaaagtctttcgttttctcaactttatatatcttccggaaaggac

SEQ ID NO: 6417 - DNA, 229 bp, synthetic construct
  misc_feature 1..229: note = promoter
  source 1..229: mol_type = other DNA
gagggcctatttcccatggttccttcatatttgcatagaggatgcaagactgtcagagggacgattgcaattaacttggccataaacacaaacctattggcacaaactatgtgatatagaaagttatgattgttcaagcagtttgtaatttaaaaaaaggaccactatgtacttaccgtaactgaaaagtctttcgttttctcaactttatatatcttccggaaaggac

SEQ ID NO: 6418 - DNA, 229 bp, synthetic construct
  misc_feature 1..229: note = promoter
  source 1..229: mol_type = other DNA
gagggcctatttcccatggttccttcatatttgcatagaggatgcaagactgtcagagggacgattgcaattaacttggccataaacacaaacctattggcacaaactatgtgatatagaaagttatgattgttcaaggagtttgtaatttaaaaaaaggaccactatgtacttaccgtaactgaaaagtctttcgttttctcaactttatatatcttccggaaaggac

SEQ ID NO: 6419 - DNA, 229 bp, synthetic construct
  misc_feature 1..229: note = promoter
  source 1..229: mol_type = other DNA
gagggcctatttcccatggttccttcatatttgcatagaggatgcaagactgtcagagggacgattgcaattaacttggccataaacacaaacctattggcacaaactatgtgatatagaaagttatgattgttcaagtagtttgtaatttaaaaaaaggaccactatgtacttaccgtaactgaaaagtctttcgttttctcaactttatatatcttccggaaaggac

SEQ ID NO: 6420 - DNA, 229 bp, synthetic construct
  misc_feature 1..229: note = promoter
  source 1..229: mol_type = other DNA
gagggcctatttcccatggttccttcatatttgcatagaggatgcaagactgtcagagggacgattgcaattaacttggccataaacacaaacctattggcacaaactatgtgatatagaaagttatgattgttcaagacgtttgtaatttaaaaaaaggaccactatgtacttaccgtaactgaaaagtctttcgttttctcaactttatatatcttccggaaaggac

SEQ ID NO: 6421 - DNA, 229 bp, synthetic construct
  misc_feature 1..229: note = promoter
  source 1..229: mol_type = other DNA
gagggcctatttcccatggttccttcatatttgcatagaggatgcaagactgtcagagggacgattgcaattaacttggccataaacacaaacctattggcacaaactatgtgatatagaaagttatgattgttcaagaggtttgtaatttaaaaaaaggaccactatgtacttaccgtaactgaaaagtctttcgttttctcaactttatatatcttccggaaaggac

SEQ ID NO: 6422 - DNA, 229 bp, synthetic construct
  misc_feature 1..229: note = promoter
  source 1..229: mol_type = other DNA
gagggcctatttcccatggttccttcatatttgcatagaggatgcaagactgtcagagggacgattgcaattaacttggccataaacacaaacctattggcacaaactatgtgatatagaaagttatgattgttcaagatgtttgtaatttaaaaaaaggaccactatgtacttaccgtaactgaaaagtctttcgttttctcaactttatatatcttccggaaaggac

SEQ ID NO: 6423 - DNA, 229 bp, synthetic construct
  misc_feature 1..229: note = promoter
  source 1..229: mol_type = other DNA
gagggcctatttcccatggttccttcatatttgcatagaggatgcaagactgtcagagggacgattgcaattaacttggccataaacacaaacctattggcacaaactatgtgatatagaaagttatgattgttcaagaaatttgtaatttaaaaaaaggaccactatgtacttaccgtaactgaaaagtctttcgttttctcaactttatatatcttccggaaaggac

SEQ ID NO: 6424 - DNA, 229 bp, synthetic construct
  misc_feature 1..229: note = promoter
  source 1..229: mol_type = other DNA
gagggcctatttcccatggttccttcatatttgcatagaggatgcaagactgtcagagggacgattgcaattaacttggccataaacacaaacctattggcacaaactatgtgatatagaaagttatgattgttcaagaactttgtaatttaaaaaaaggaccactatgtacttaccgtaactgaaaagtctttcgttttctcaactttatatatcttccggaaaggac

SEQ ID NO: 6425 - DNA, 229 bp, synthetic construct
  misc_feature 1..229: note = promoter
  source 1..229: mol_type = other DNA
gagggcctatttcccatggttccttcatatttgcatagaggatgcaagactgtcagagggacgattgcaattaacttggccataaacacaaacctattggcacaaactatgtgatatagaaagttatgattgttcaagaattttgtaatttaaaaaaaggaccactatgtacttaccgtaactgaaaagtctttcgttttctcaactttatatatcttccggaaaggac

SEQ ID NO: 6426 - DNA, 229 bp, synthetic construct
  misc_feature 1..229: note = promoter
  source 1..229: mol_type = other DNA
gagggcctatttcccatggttccttcatatttgcatagaggatgcaagactgtcagagggacgattgcaattaacttggccataaacacaaacctattggcacaaactatgtgatatagaaagttatgattgttcaagaagattgtaatttaaaaaaaggaccactatgtacttaccgtaactgaaaagtctttcgttttctcaactttatatatcttccggaaaggac

SEQ ID NO: 6427 - DNA, 229 bp, synthetic construct
  misc_feature 1..229: note = promoter
  source 1..229: mol_type = other DNA
gagggcctatttcccatggttccttcatatttgcatagaggatgcaagactgtcagagggacgattgcaattaacttggccataaacacaaacctattggcacaaactatgtgatatagaaagttatgattgttcaagaagcttgtaatttaaaaaaaggaccactatgtacttaccgtaactgaaaagtctttcgttttctcaactttatatatcttccggaaaggac

SEQ ID NO: 6428 - DNA, 229 bp, synthetic construct
  misc_feature 1..229: note = promoter
  source 1..229: mol_type = other DNA
gagggcctatttcccatggttccttcatatttgcatagaggatgcaagactgtcagagggacgattgcaattaacttggccataaacacaaacctattggcacaaactatgtgatatagaaagttatgattgttcaagaaggttgtaatttaaaaaaaggaccactatgtacttaccgtaactgaaaagtctttcgttttctcaactttatatatcttccggaaaggac

SEQ ID NO: 6429 - DNA, 229 bp, synthetic construct
  misc_feature 1..229: note = promoter
  source 1..229: mol_type = other DNA
gagggcctatttcccatggttccttcatatttgcatagaggatgcaagactgtcagagggacgattgcaattaacttggccataaacacaaacctattggcacaaactatgtgatatagaaagttatgattgttcaagaagtatgtaatttaaaaaaaggaccactatgtacttaccgtaactgaaaagtctttcgttttctcaactttatatatcttccggaaaggac

SEQ ID NO: 6430 - DNA, 229 bp, synthetic construct
  misc_feature 1..229: note = promoter
  source 1..229: mol_type = other DNA
gagggcctatttcccatggttccttcatatttgcatagaggatgcaagactgtcagagggacgattgcaattaacttggccataaacacaaacctattggcacaaactatgtgatatagaaagttatgattgttcaagaagtctgtaatttaaaaaaaggaccactatgtacttaccgtaactgaaaagtctttcgttttctcaactttatatatcttccggaaaggac

SEQ ID NO: 6431 - DNA, 229 bp, synthetic construct
  misc_feature 1..229: note = promoter
  source 1..229: mol_type = other DNA
gagggcctatttcccatggttccttcatatttgcatagaggatgcaagactgtcagagggacgattgcaattaacttggccataaacacaaacctattggcacaaactatgtgatatagaaagttatgattgttcaagaagtgtgtaatttaaaaaaaggaccactatgtacttaccgtaactgaaaagtctttcgttttctcaactttatatatcttccggaaaggac

SEQ ID NO: 6432 - DNA, 229 bp, synthetic construct
  misc_feature 1..229: note = promoter
  source 1..229: mol_type = other DNA
gagggcctatttcccatggttccttcatatttgcatagaggatgcaagactgtcagagggacgattgcaattaacttggccataaacacaaacctattggcacaaactatgtgatatagaaagttatgattgttcaagaagttagtaatttaaaaaaaggaccactatgtacttaccgtaactgaaaagtctttcgttttctcaactttatatatcttccggaaaggac

SEQ ID NO: 6433 - DNA, 229 bp, synthetic construct
  misc_feature 1..229: note = promoter
  source 1..229: mol_type = other DNA
gagggcctatttcccatggttccttcatatttgcatagaggatgcaagactgtcagagggacgattgcaattaacttggccataaacacaaacctattggcacaaactatgtgatatagaaagttatgattgttcaagaagttcgtaatttaaaaaaaggaccactatgtacttaccgtaactgaaaagtctttcgttttctcaactttatatatcttccggaaaggac

SEQ ID NO: 6434 - DNA, 229 bp, synthetic construct
  misc_feature 1..229: note = promoter
  source 1..229: mol_type = other DNA
gagggcctatttcccatggttccttcatatttgcatagaggatgcaagactgtcagagggacgattgcaattaacttggccataaacacaaacctattggcacaaactatgtgatatagaaagttatgattgttcaagaagttggtaatttaaaaaaaggaccactatgtacttaccgtaactgaaaagtctttcgttttctcaactttatatatcttccggaaaggac

SEQ ID NO: 6435 - DNA, 229 bp, synthetic construct
  misc_feature 1..229: note = promoter
  source 1..229: mol_type = other DNA
gagggcctatttcccatggttccttcatatttgcatagaggatgcaagactgtcagagggacgattgcaattaacttggccataaacacaaacctattggcacaaactatgtgatatagaaagttatgattgttcaagaagtttataatttaaaaaaaggaccactatgtacttaccgtaactgaaaagtctttcgttttctcaactttatatatcttccggaaaggac

SEQ ID NO: 6436 - DNA, 229 bp, synthetic construct
  misc_feature 1..229: note = promoter
  source 1..229: mol_type = other DNA
gagggcctatttcccatggttccttcatatttgcatagaggatgcaagactgtcagagggacgattgcaattaacttggccataaacacaaacctattggcacaaactatgtgatatagaaagttatgattgttcaagaagtttctaatttaaaaaaaggaccactatgtacttaccgtaactgaaaagtctttcgttttctcaactttatatatcttccggaaaggac

SEQ ID NO: 6437 - DNA, 229 bp, synthetic construct
  misc_feature 1..229: note = promoter
  source 1..229: mol_type = other DNA
gagggcctatttcccatggttccttcatatttgcatagaggatgcaagactgtcagagggacgattgcaattaacttggccataaacacaaacctattggcacaaactatgtgatatagaaagttatgattgttcaagaagtttttaatttaaaaaaaggaccactatgtacttaccgtaactgaaaagtctttcgttttctcaactttatatatcttccggaaaggac

SEQ ID NO: 6438 - DNA, 229 bp, synthetic construct
  misc_feature 1..229: note = promoter
  source 1..229: mol_type = other DNA
gagggcctatttcccatggttccttcatatttgcatagaggatgcaagactgtcagagggacgattgcaattaacttggccataaacacaaacctattggcacaaactatgtgatatagaaagttatgattgttcaagaagtttgaaatttaaaaaaaggaccactatgtacttaccgtaactgaaaagtctttcgttttctcaactttatatatcttccggaaaggac

SEQ ID NO: 6439 - DNA, 229 bp, synthetic construct
  misc_feature 1..229: note = promoter
  source 1..229: mol_type = other DNA
gagggcctatttcccatggttccttcatatttgcatagaggatgcaagactgtcagagggacgattgcaattaacttggccataaacacaaacctattggcacaaactatgtgatatagaaagttatgattgttcaagaagtttgcaatttaaaaaaaggaccactatgtacttaccgtaactgaaaagtctttcgttttctcaactttatatatcttccggaaaggac

SEQ ID NO: 6440 - DNA, 229 bp, synthetic construct
  misc_feature 1..229: note = promoter
  source 1..229: mol_type = other DNA
gagggcctatttcccatggttccttcatatttgcatagaggatgcaagactgtcagagggacgattgcaattaacttggccataaacacaaacctattggcacaaactatgtgatatagaaagttatgattgttcaagaagtttggaatttaaaaaaaggaccactatgtacttaccgtaactgaaaagtctttcgttttctcaactttatatatcttccggaaaggac

SEQ ID NO: 6441 - DNA, 229 bp, synthetic construct
  misc_feature 1..229: note = promoter
  source 1..229: mol_type = other DNA
gagggcctatttcccatggttccttcatatttgcatagaggatgcaagactgtcagagggacgattgcaattaacttggccataaacacaaacctattggcacaaactatgtgatatagaaagttatgattgttcaagaagtttgtcatttaaaaaaaggaccactatgtacttaccgtaactgaaaagtctttcgttttctcaactttatatatcttccggaaaggac

SEQ ID NO: 6442 - DNA, 229 bp, synthetic construct
  misc_feature 1..229: note = promoter
  source 1..229: mol_type = other DNA
gagggcctatttcccatggttccttcatatttgcatagaggatgcaagactgtcagagggacgattgcaattaacttggccataaacacaaacctattggcacaaactatgtgatatagaaagttatgattgttcaagaagtttgtgatttaaaaaaaggaccactatgtacttaccgtaactgaaaagtctttcgttttctcaactttatatatcttccggaaaggac

SEQ ID NO: 6443 - DNA, 229 bp, synthetic construct
  misc_feature 1..229: note = promoter
  source 1..229: mol_type = other DNA
gagggcctatttcccatggttccttcatatttgcatagaggatgcaagactgtcagagggacgattgcaattaacttggccataaacacaaacctattggcacaaactatgtgatatagaaagttatgattgttcaagaagtttgttatttaaaaaaaggaccactatgtacttaccgtaactgaaaagtctttcgttttctcaactttatatatcttccggaaaggac

SEQ ID NO: 6444 - DNA, 229 bp, synthetic construct
  misc_feature 1..229: note = promoter
  source 1..229: mol_type = other DNA
gagggcctatttcccatggttccttcatatttgcatagaggatgcaagactgtcagagggacgattgcaattaacttggccataaacacaaacctattggcacaaactatgtgatatagaaagttatgattgttcaagaagtttgtactttaaaaaaaggaccactatgtacttaccgtaactgaaaagtctttcgttttctcaactttatatatcttccggaaaggac

SEQ ID NO: 6445 - DNA, 229 bp, synthetic construct
  misc_feature 1..229: note = promoter
  source 1..229: mol_type = other DNA
gagggcctatttcccatggttccttcatatttgcatagaggatgcaagactgtcagagggacgattgcaattaacttggccataaacacaaacctattggcacaaactatgtgatatagaaagttatgattgttcaagaagtttgtagtttaaaaaaaggaccactatgtacttaccgtaactgaaaagtctttcgttttctcaactttatatatcttccggaaaggac

SEQ ID NO: 6446 - DNA, 229 bp, synthetic construct
  misc_feature 1..229: note = promoter
  source 1..229: mol_type = other DNA
gagggcctatttcccatggttccttcatatttgcatagaggatgcaagactgtcagagggacgattgcaattaacttggccataaacacaaacctattggcacaaactatgtgatatagaaagttatgattgttcaagaagtttgtattttaaaaaaaggaccactatgtacttaccgtaactgaaaagtctttcgttttctcaactttatatatcttccggaaaggac

SEQ ID NO: 6447 - DNA, 229 bp, synthetic construct
  misc_feature 1..229: note = promoter
  source 1..229: mol_type = other DNA
gagggcctatttcccatggttccttcatatttgcatagaggatgcaagactgtcagagggacgattgcaattaacttggccataaacacaaacctattggcacaaactatgtgatatagaaagttatgattgttcaagaagtttgtaaattaaaaaaaggaccactatgtacttaccgtaactgaaaagtctttcgttttctcaactttatatatcttccggaaaggac

SEQ ID NO: 6448 - DNA, 229 bp, synthetic construct
  misc_feature 1..229: note = promoter
  source 1..229: mol_type = other DNA
gagggcctatttcccatggttccttcatatttgcatagaggatgcaagactgtcagagggacgattgcaattaacttggccataaacacaaacctattggcacaaactatgtgatatagaaagttatgattgttcaagaagtttgtaacttaaaaaaaggaccactatgtacttaccgtaactgaaaagtctttcgttttctcaactttatatatcttccggaaaggac

SEQ ID NO: 6449 - DNA, 229 bp, synthetic construct
  misc_feature 1..229: note = promoter
  source 1..229: mol_type = other DNA
gagggcctatttcccatggttccttcatatttgcatagaggatgcaagactgtcagagggacgattgcaattaacttggccataaacacaaacctattggcacaaactatgtgatatagaaagttatgattgttcaagaagtttgtaagttaaaaaaaggaccactatgtacttaccgtaactgaaaagtctttcgttttctcaactttatatatcttccggaaaggac

SEQ ID NO: 6450 - DNA, 229 bp, synthetic construct
  misc_feature 1..229: note = promoter
  source 1..229: mol_type = other DNA
gagggcctatttcccatggttccttcatatttgcatagaggatgcaagactgtcagagggacgattgcaattaacttggccataaacacaaacctattggcacaaactatgtgatatagaaagttatgattgttcaagaagtttgtaatataaaaaaaggaccactatgtacttaccgtaactgaaaagtctttcgttttctcaactttatatatcttccggaaaggac

SEQ ID NO: 6451 - DNA, 229 bp, synthetic construct
  misc_feature 1..229: note = promoter
  source 1..229: mol_type = other DNA
gagggcctatttcccatggttccttcatatttgcatagaggatgcaagactgtcagagggacgattgcaattaacttggccataaacacaaacctattggcacaaactatgtgatatagaaagttatgattgttcaagaagtttgtaatctaaaaaaaggaccactatgtacttaccgtaactgaaaagtctttcgttttctcaactttatatatcttccggaaaggac

SEQ ID NO: 6452 - DNA, 229 bp, synthetic construct
  misc_feature 1..229: note = promoter
  source 1..229: mol_type = other DNA
gagggcctatttcccatggttccttcatatttgcatagaggatgcaagactgtcagagggacgattgcaattaacttggccataaacacaaacctattggcacaaactatgtgatatagaaagttatgattgttcaagaagtttgtaatgtaaaaaaaggaccactatgtacttaccgtaactgaaaagtctttcgttttctcaactttatatatcttccggaaaggac

SEQ ID NO: 6453 - DNA, 229 bp, synthetic construct
  misc_feature 1..229: note = promoter
  source 1..229: mol_type = other DNA
gagggcctatttcccatggttccttcatatttgcatagaggatgcaagactgtcagagggacgattgcaattaacttggccataaacacaaacctattggcacaaactatgtgatatagaaagttatgattgttcaagaagtttgtaattaaaaaaaaggaccactatgtacttaccgtaactgaaaagtctttcgttttctcaactttatatatcttccggaaaggac

SEQ ID NO: 6454 - DNA, 229 bp, synthetic construct
  misc_feature 1..229: note = promoter
  source 1..229: mol_type = other DNA
gagggcctatttcccatggttccttcatatttgcatagaggatgcaagactgtcagagggacgattgcaattaacttggccataaacacaaacctattggcacaaactatgtgatatagaaagttatgattgttcaagaagtttgtaattcaaaaaaaggaccactatgtacttaccgtaactgaaaagtctttcgttttctcaactttatatatcttccggaaaggac

SEQ ID NO: 6455 - DNA, 229 bp, synthetic construct
  misc_feature 1..229: note = promoter
  source 1..229: mol_type = other DNA
gagggcctatttcccatggttccttcatatttgcatagaggatgcaagactgtcagagggacgattgcaattaacttggccataaacacaaacctattggcacaaactatgtgatatagaaagttatgattgttcaagaagtttgtaattgaaaaaaaggaccactatgtacttaccgtaactgaaaagtctttcgttttctcaactttatatatcttccggaaaggac

SEQ ID NO: 6456 - DNA, 229 bp, synthetic construct
  misc_feature 1..229: note = promoter
  source 1..229: mol_type = other DNA
gagggcctatttcccatggttccttcatatttgcatagaggatgcaagactgtcagagggacgattgcaattaacttggccataaacacaaacctattggcacaaactatgtgatatagaaagttatgattgttcaagaagtttgtaatttcaaaaaaggaccactatgtacttaccgtaactgaaaagtctttcgttttctcaactttatatatcttccggaaaggac

SEQ ID NO: 6457 - DNA, 229 bp, synthetic construct
  misc_feature 1..229: note = promoter
  source 1..229: mol_type = other DNA
gagggcctatttcccatggttccttcatatttgcatagaggatgcaagactgtcagagggacgattgcaattaacttggccataaacacaaacctattggcacaaactatgtgatatagaaagttatgattgttcaagaagtttgtaatttgaaaaaaggaccactatgtacttaccgtaactgaaaagtctttcgttttctcaactttatatatcttccggaaaggac

SEQ ID NO: 6458 - DNA, 229 bp, synthetic construct
  misc_feature 1..229: note = promoter
  source 1..229: mol_type = other DNA
gagggcctatttcccatggttccttcatatttgcatagaggatgcaagactgtcagagggacgattgcaattaacttggccataaacacaaacctattggcacaaactatgtgatatagaaagttatgattgttcaagaagtttgtaattttaaaaaaggaccactatgtacttaccgtaactgaaaagtctttcgttttctcaactttatatatcttccggaaaggac

SEQ ID NO: 6459 - DNA, 229 bp, synthetic construct
  misc_feature 1..229: note = promoter
  source 1..229: mol_type = other DNA
gagggcctatttcccatggttccttcatatttgcatagaggatgcaagactgtcagagggacgattgcaattaacttggccataaacacaaacctattggcacaaactatgtgatatagaaagttatgattgttcaagaagtttgtaatttacaaaaaggaccactatgtacttaccgtaactgaaaagtctttcgttttctcaactttatatatcttccggaaaggac

SEQ ID NO: 6460 - DNA, 229 bp, synthetic construct
  misc_feature 1..229: note = promoter
  source 1..229: mol_type = other DNA
gagggcctatttcccatggttccttcatatttgcatagaggatgcaagactgtcagagggacgattgcaattaacttggccataaacacaaacctattggcacaaactatgtgatatagaaagttatgattgttcaagaagtttgtaatttagaaaaaggaccactatgtacttaccgtaactgaaaagtctttcgttttctcaactttatatatcttccggaaaggac

SEQ ID NO: 6461 - DNA, 229 bp, synthetic construct
  misc_feature 1..229: note = promoter
  source 1..229: mol_type = other DNA
gagggcctatttcccatggttccttcatatttgcatagaggatgcaagactgtcagagggacgattgcaattaacttggccataaacacaaacctattggcacaaactatgtgatatagaaagttatgattgttcaagaagtttgtaatttataaaaaggaccactatgtacttaccgtaactgaaaagtctttcgttttctcaactttatatatcttccggaaaggac

SEQ ID NO: 6462 - DNA, 229 bp, synthetic construct
  misc_feature 1..229: note = promoter
  source 1..229: mol_type = other DNA
gagggcctatttcccatggttccttcatatttgcatagaggatgcaagactgtcagagggacgattgcaattaacttggccataaacacaaacctattggcacaaactatgtgatatagaaagttatgattgttcaagaagtttgtaatttaacaaaaggaccactatgtacttaccgtaactgaaaagtctttcgttttctcaactttatatatcttccggaaaggac

SEQ ID NO: 6463 - DNA, 229 bp, synthetic construct
  misc_feature 1..229: note = promoter
  source 1..229: mol_type = other DNA
gagggcctatttcccatggttccttcatatttgcatagaggatgcaagactgtcagagggacgattgcaattaacttggccataaacacaaacctattggcacaaactatgtgatatagaaagttatgattgttcaagaagtttgtaatttaagaaaaggaccactatgtacttaccgtaactgaaaagtctttcgttttctcaactttatatatcttccggaaaggac

SEQ ID NO: 6464 - DNA, 229 bp, synthetic construct
  misc_feature 1..229: note = promoter
  source 1..229: mol_type = other DNA
gagggcctatttcccatggttccttcatatttgcatagaggatgcaagactgtcagagggacgattgcaattaacttggccataaacacaaacctattggcacaaactatgtgatatagaaagttatgattgttcaagaagtttgtaatttaataaaaggaccactatgtacttaccgtaactgaaaagtctttcgttttctcaactttatatatcttccggaaaggac

SEQ ID NO: 6465 - DNA, 229 bp, synthetic construct
  misc_feature 1..229: note = promoter
  source 1..229: mol_type = other DNA
gagggcctatttcccatggttccttcatatttgcatagaggatgcaagactgtcagagggacgattgcaattaacttggccataaacacaaacctattggcacaaactatgtgatatagaaagttatgattgttcaagaagtttgtaatttaaacaaaggaccactatgtacttaccgtaactgaaaagtctttcgttttctcaactttatatatcttccggaaaggac

SEQ ID NO: 6466 - DNA, 229 bp, synthetic construct
  misc_feature 1..229: note = promoter
  source 1..229: mol_type = other DNA
gagggcctatttcccatggttccttcatatttgcatagaggatgcaagactgtcagagggacgattgcaattaacttggccataaacacaaacctattggcacaaactatgtgatatagaaagttatgattgttcaagaagtttgtaatttaaagaaaggaccactatgtacttaccgtaactgaaaagtctttcgttttctcaactttatatatcttccggaaaggac

SEQ ID NO: 6467 - DNA, 229 bp, synthetic construct
  misc_feature 1..229: note = promoter
  source 1..229: mol_type = other DNA
gagggcctatttcccatggttccttcatatttgcatagaggatgcaagactgtcagagggacgattgcaattaacttggccataaacacaaacctattggcacaaactatgtgatatagaaagttatgattgttcaagaagtttgtaatttaaataaaggaccactatgtacttaccgtaactgaaaagtctttcgttttctcaactttatatatcttccggaaaggac

SEQ ID NO: 6468 - DNA, 229 bp, synthetic construct
  misc_feature 1..229: note = promoter
  source 1..229: mol_type = other DNA
gagggcctatttcccatggttccttcatatttgcatagaggatgcaagactgtcagagggacgattgcaattaacttggccataaacacaaacctattggcacaaactatgtgatatagaaagttatgattgttcaagaagtttgtaatttaaaacaaggaccactatgtacttaccgtaactgaaaagtctttcgttttctcaactttatatatcttccggaaaggac

SEQ ID NO: 6469 - DNA, 229 bp, synthetic construct
  misc_feature 1..229: note = promoter
  source 1..229: mol_type = other DNA
gagggcctatttcccatggttccttcatatttgcatagaggatgcaagactgtcagagggacgattgcaattaacttggccataaacacaaacctattggcacaaactatgtgatatagaaagttatgattgttcaagaagtttgtaatttaaaagaaggaccactatgtacttaccgtaactgaaaagtctttcgttttctcaactttatatatcttccggaaaggac

SEQ ID NO: 6470 - DNA, 229 bp, synthetic construct
  misc_feature 1..229: note = promoter
  source 1..229: mol_type = other DNA
gagggcctatttcccatggttccttcatatttgcatagaggatgcaagactgtcagagggacgattgcaattaacttggccataaacacaaacctattggcacaaactatgtgatatagaaagttatgattgttcaagaagtttgtaatttaaaataaggaccactatgtacttaccgtaactgaaaagtctttcgttttctcaactttatatatcttccggaaaggac

SEQ ID NO: 6471 - DNA, 229 bp, synthetic construct
  misc_feature 1..229: note = promoter
  source 1..229: mol_type = other DNA
gagggcctatttcccatggttccttcatatttgcatagaggatgcaagactgtcagagggacgattgcaattaacttggccataaacacaaacctattggcacaaactatgtgatatagaaagttatgattgttcaagaagtttgtaatttaaaaacaggaccactatgtacttaccgtaactgaaaagtctttcgttttctcaactttatatatcttccggaaaggac

SEQ ID NO: 6472 - DNA, 229 bp, synthetic construct
  misc_feature 1..229: note = promoter
  source 1..229: mol_type = other DNA
gagggcctatttcccatggttccttcatatttgcatagaggatgcaagactgtcagagggacgattgcaattaacttggccataaacacaaacctattggcacaaactatgtgatatagaaagttatgattgttcaagaagtttgtaatttaaaaagaggaccactatgtacttaccgtaactgaaaagtctttcgttttctcaactttatatatcttccggaaaggac

SEQ ID NO: 6473 - DNA, 229 bp, synthetic construct
  misc_feature 1..229: note = promoter
  source 1..229: mol_type = other DNA
gagggcctatttcccatggttccttcatatttgcatagaggatgcaagactgtcagagggacgattgcaattaacttggccataaacacaaacctattggcacaaactatgtgatatagaaagttatgattgttcaagaagtttgtaatttaaaaataggaccactatgtacttaccgtaactgaaaagtctttcgttttctcaactttatatatcttccggaaaggac

SEQ ID NO: 6474 - DNA, 229 bp, synthetic construct
  misc_feature 1..229: note = promoter
  source 1..229: mol_type = other DNA
gagggcctatttcccatggttccttcatatttgcatagaggatgcaagactgtcagagggacgattgcaattaacttggccataaacacaaacctattggcacaaactatgtgatatagaaagttatgattgttcaagaagtttgtaatttaaaaaacggaccactatgtacttaccgtaactgaaaagtctttcgttttctcaactttatatatcttccggaaaggac

SEQ ID NO: 6475 - DNA, 229 bp, synthetic construct
  misc_feature 1..229: note = promoter
  source 1..229: mol_type = other DNA
gagggcctatttcccatggttccttcatatttgcatagaggatgcaagactgtcagagggacgattgcaattaacttggccataaacacaaacctattggcacaaactatgtgatatagaaagttatgattgttcaagaagtttgtaatttaaaaaagggaccactatgtacttaccgtaactgaaaagtctttcgttttctcaactttatatatcttccggaaaggac

SEQ ID NO: 6476 - DNA, 229 bp, synthetic construct
  misc_feature 1..229: note = promoter
  source 1..229: mol_type = other DNA
gagggcctatttcccatggttccttcatatttgcatagaggatgcaagactgtcagagggacgattgcaattaacttggccataaacacaaacctattggcacaaactatgtgatatagaaagttatgattgttcaagaagtttgtaatttaaaaaatggaccactatgtacttaccgtaactgaaaagtctttcgttttctcaactttatatatcttccggaaaggac

SEQ ID NO: 6477 - DNA, 229 bp, synthetic construct
  misc_feature 1..229: note = promoter
  source 1..229: mol_type = other DNA
gagggcctatttcccatggttccttcatatttgcatagaggatgcaagactgtcagagggacgattgcaattaacttggccataaacacaaacctattggcacaaactatgtgatatagaaagttatgattgttcaagaagtttgtaatttaaaaaaaagaccactatgtacttaccgtaactgaaaagtctttcgttttctcaactttatatatcttccggaaaggac

SEQ ID NO: 6478 - DNA, 229 bp, synthetic construct
  misc_feature 1..229: note = promoter
  source 1..229: mol_type = other DNA
gagggcctatttcccatggttccttcatatttgcatagaggatgcaagactgtcagagggacgattgcaattaacttggccataaacacaaacctattggcacaaactatgtgatatagaaagttatgattgttcaagaagtttgtaatttaaaaaaacgaccactatgtacttaccgtaactgaaaagtctttcgttttctcaactttatatatcttccggaaaggac

SEQ ID NO: 6479 - DNA, 229 bp, synthetic construct
  misc_feature 1..229: note = promoter
  source 1..229: mol_type = other DNA
gagggcctatttcccatggttccttcatatttgcatagaggatgcaagactgtcagagggacgattgcaattaacttggccataaacacaaacctattggcacaaactatgtgatatagaaagttatgattgttcaagaagtttgtaatttaaaaaaatgaccactatgtacttaccgtaactgaaaagtctttcgttttctcaactttatatatcttccggaaaggac

SEQ ID NO: 6480 - DNA, 229 bp, synthetic construct
  misc_feature 1..229: note = promoter
  source 1..229: mol_type = other DNA
gagggcctatttcccatggttccttcatatttgcatagaggatgcaagactgtcagagggacgattgcaattaacttggccataaacacaaacctattggcacaaactatgtgatatagaaagttatgattgttcaagaagtttgtaatttaaaaaaagaaccactatgtacttaccgtaactgaaaagtctttcgttttctcaactttatatatcttccggaaaggac

SEQ ID NO: 6481 - DNA, 229 bp, synthetic construct
  misc_feature 1..229: note = promoter
  source 1..229: mol_type = other DNA
gagggcctatttcccatggttccttcatatttgcatagaggatgcaagactgtcagagggacgattgcaattaacttggccataaacacaaacctattggcacaaactatgtgatatagaaagttatgattgttcaagaagtttgtaatttaaaaaaagcaccactatgtacttaccgtaactgaaaagtctttcgttttctcaactttatatatcttccggaaaggac

SEQ ID NO: 6482 - DNA, 229 bp, synthetic construct
  misc_feature 1..229: note = promoter
  source 1..229: mol_type = other DNA
gagggcctatttcccatggttccttcatatttgcatagaggatgcaagactgtcagagggacgattgcaattaacttggccataaacacaaacctattggcacaaactatgtgatatagaaagttatgattgttcaagaagtttgtaatttaaaaaaagtaccactatgtacttaccgtaactgaaaagtctttcgttttctcaactttatatatcttccggaaaggac

SEQ ID NO: 6483 - DNA, 229 bp, synthetic construct
  misc_feature 1..229: note = promoter
  source 1..229: mol_type = other DNA
gagggcctatttcccatggttccttcatatttgcatagaggatgcaagactgtcagagggacgattgcaattaacttggccataaacacaaacctattggcacaaactatgtgatatagaaagttatgattgttcaagaagtttgtaatttaaaaaaaggcccactatgtacttaccgtaactgaaaagtctttcgttttctcaactttatatatcttccggaaaggac

SEQ ID NO: 6484 - DNA, 229 bp, synthetic construct
  misc_feature 1..229: note = promoter
  source 1..229: mol_type = other DNA
gagggcctatttcccatggttccttcatatttgcatagaggatgcaagactgtcagagggacgattgcaattaacttggccataaacacaaacctattggcacaaactatgtgatatagaaagttatgattgttcaagaagtttgtaatttaaaaaaagggccactatgtacttaccgtaactgaaaagtctttcgttttctcaactttatatatcttccggaaaggac

SEQ ID NO: 6485 - DNA, 229 bp, synthetic construct
  misc_feature 1..229: note = promoter
  source 1..229: mol_type = other DNA
gagggcctatttcccatggttccttcatatttgcatagaggatgcaagactgtcagagggacgattgcaattaacttggccataaacacaaacctattggcacaaactatgtgatatagaaagttatgattgttcaagaagtttgtaatttaaaaaaaggtccactatgtacttaccgtaactgaaaagtctttcgttttctcaactttatatatcttccggaaaggac

SEQ ID NO: 6486 - DNA, 229 bp, synthetic construct
  misc_feature 1..229: note = promoter
  source 1..229: mol_type = other DNA
gagggcctatttcccatggttccttcatatttgcatagaggatgcaagactgtcagagggacgattgcaattaacttggccataaacacaaacctattggcacaaactatgtgatatagaaagttatgattgttcaagaagtttgtaatttaaaaaaaggaacactatgtacttaccgtaactgaaaagtctttcgttttctcaactttatatatcttccggaaaggac

SEQ ID NO: 6487 - DNA, 229 bp, synthetic construct
  misc_feature 1..229: note = promoter
  source 1..229: mol_type = other DNA
gagggcctatttcccatggttccttcatatttgcatagaggatgcaagactgtcagagggacgattgcaattaacttggccataaacacaaacctattggcacaaactatgtgatatagaaagttatgattgttcaagaagtttgtaatttaaaaaaaggagcactatgtacttaccgtaactgaaaagtctttcgttttctcaactttatatatcttccggaaaggac

SEQ ID NO: 6488 - DNA, 229 bp, synthetic construct
  misc_feature 1..229: note = promoter
  source 1..229: mol_type = other DNA
gagggcctatttcccatggttccttcatatttgcatagaggatgcaagactgtcagagggacgattgcaattaacttggccataaacacaaacctattggcacaaactatgtgatatagaaagttatgattgttcaagaagtttgtaatttaaaaaaaggatcactatgtacttaccgtaactgaaaagtctttcgttttctcaactttatatatcttccggaaaggac

SEQ ID NO: 6489 - DNA, 229 bp, synthetic construct
  misc_feature 1..229: note = promoter
  source 1..229: mol_type = other DNA
gagggcctatttcccatggttccttcatatttgcatagaggatgcaagactgtcagagggacgattgcaattaacttggccataaacacaaacctattggcacaaactatgtgatatagaaagttatgattgttcaagaagtttgtaatttaaaaaaaggacaactatgtacttaccgtaactgaaaagtctttcgttttctcaactttatatatcttccggaaaggac

SEQ ID NO: 6490 - DNA, 229 bp, synthetic construct
  misc_feature 1..229: note = promoter
  source 1..229: mol_type = other DNA
gagggcctatttcccatggttccttcatatttgcatagaggatgcaagactgtcagagggacgattgcaattaacttggccataaacacaaacctattggcacaaactatgtgatatagaaagttatgattgttcaagaagtttgtaatttaaaaaaaggacgactatgtacttaccgtaactgaaaagtctttcgttttctcaactttatatatcttccggaaaggac

SEQ ID NO: 6491 - DNA, 229 bp, synthetic construct
  misc_feature 1..229: note = promoter
  source 1..229: mol_type = other DNA
gagggcctatttcccatggttccttcatatttgcatagaggatgcaagactgtcagagggacgattgcaattaacttggccataaacacaaacctattggcacaaactatgtgatatagaaagttatgattgttcaagaagtttgtaatttaaaaaaaggactactatgtacttaccgtaactgaaaagtctttcgttttctcaactttatatatcttccggaaaggac

SEQ ID NO: 6492 - DNA, 229 bp, synthetic construct
  misc_feature 1..229: note = promoter
  source 1..229: mol_type = other DNA
gagggcctatttcccatggttccttcatatttgcatagaggatgcaagactgtcagagggacgattgcaattaacttggccataaacacaaacctattggcacaaactatgtgatatagaaagttatgattgttcaagaagtttgtaatttaaaaaaaggacccctatgtacttaccgtaactgaaaagtctttcgttttctcaactttatatatcttccggaaaggac

SEQ ID NO: 6493 - DNA, 229 bp, synthetic construct
  misc_feature 1..229: note = promoter
  source 1..229: mol_type = other DNA
gagggcctatttcccatggttccttcatatttgcatagaggatgcaagactgtcagagggacgattgcaattaacttggccataaacacaaacctattggcacaaactatgtgatatagaaagttatgattgttcaagaagtttgtaatttaaaaaaaggaccgctatgtacttaccgtaactgaaaagtctttcgttttctcaactttatatatcttccggaaaggac

SEQ ID NO: 6494 - DNA, 229 bp, synthetic construct
  misc_feature 1..229: note = promoter
  source 1..229: mol_type = other DNA
gagggcctatttcccatggttccttcatatttgcatagaggatgcaagactgtcagagggacgattgcaattaacttggccataaacacaaacctattggcacaaactatgtgatatagaaagttatgattgttcaagaagtttgtaatttaaaaaaaggacctctatgtacttaccgtaactgaaaagtctttcgttttctcaactttatatatcttccggaaaggac

SEQ ID NO: 6495 - DNA, 229 bp, synthetic construct
  misc_feature 1..229: note = promoter
  source 1..229: mol_type = other DNA
gagggcctatttcccatggttccttcatatttgcatagaggatgcaagactgtcagagggacgattgcaattaacttggccataaacacaaacctattggcacaaactatgtgatatagaaagttatgattgttcaagaagtttgtaatttaaaaaaaggaccaatatgtacttaccgtaactgaaaagtctttcgttttctcaactttatatatcttccggaaaggac

SEQ ID NO: 6496 - DNA, 229 bp, synthetic construct
  misc_feature 1..229: note = promoter
  source 1..229: mol_type = other DNA
gagggcctatttcccatggttccttcatatttgcatagaggatgcaagactgtcagagggacgattgcaattaacttggccataaacacaaacctattggcacaaactatgtgatatagaaagttatgattgttcaagaagtttgtaatttaaaaaaaggaccagtatgtacttaccgtaactgaaaagtctttcgttttctcaactttatatatcttccggaaaggac

SEQ ID NO: 6497 - DNA, 229 bp, synthetic construct
  misc_feature 1..229: note = promoter
  source 1..229: mol_type = other DNA
gagggcctatttcccatggttccttcatatttgcatagaggatgcaagactgtcagagggacgattgcaattaacttggccataaacacaaacctattggcacaaactatgtgatatagaaagttatgattgttcaagaagtttgtaatttaaaaaaaggaccattatgtacttaccgtaactgaaaagtctttcgttttctcaactttatatatcttccggaaaggac

SEQ ID NO: 6498 - DNA, 229 bp, synthetic construct
  misc_feature 1..229: note = promoter
  source 1..229: mol_type = other DNA
gagggcctatttcccatggttccttcatatttgcatagaggatgcaagactgtcagagggacgattgcaattaacttggccataaacacaaacctattggcacaaactatgtgatatagaaagttatgattgttcaagaagtttgtaatttaaaaaaaggaccacaatgtacttaccgtaactgaaaagtctttcgttttctcaactttatatatcttccggaaaggac

SEQ ID NO: 6499 - DNA, 229 bp, synthetic construct
  misc_feature 1..229: note = promoter
  source 1..229: mol_type = other DNA
gagggcctatttcccatggttccttcatatttgcatagaggatgcaagactgtcagagggacgattgcaattaacttggccataaacacaaacctattggcacaaactatgtgatatagaaagttatgattgttcaagaagtttgtaatttaaaaaaaggaccaccatgtacttaccgtaactgaaaagtctttcgttttctcaactttatatatcttccggaaaggac

SEQ ID NO: 6500 - DNA, 229 bp, synthetic construct
  misc_feature 1..229: note = promoter
  source 1..229: mol_type = other DNA
gagggcctatttcccatggttccttcatatttgcatagaggatgcaagactgtcagagggacgattgcaattaacttggccataaacacaaacctattggcacaaactatgtgatatagaaagttatgattgttcaagaagtttgtaatttaaaaaaaggaccacgatgtacttaccgtaactgaaaagtctttcgttttctcaactttatatatcttccggaaaggac

SEQ ID NO: 6501 - DNA, 229 bp, synthetic construct
  misc_feature 1..229: note = promoter
  source 1..229: mol_type = other DNA
gagggcctatttcccatggttccttcatatttgcatagaggatgcaagactgtcagagggacgattgcaattaacttggccataaacacaaacctattggcacaaactatgtgatatagaaagttatgattgttcaagaagtttgtaatttaaaaaaaggaccactctgtacttaccgtaactgaaaagtctttcgttttctcaactttatatatcttccggaaaggac

SEQ ID NO: 6502 - DNA, 229 bp, synthetic construct
  misc_feature 1..229: note = promoter
  source 1..229: mol_type = other DNA
gagggcctatttcccatggttccttcatatttgcatagaggatgcaagactgtcagagggacgattgcaattaacttggccataaacacaaacctattggcacaaactatgtgatatagaaagttatgattgttcaagaagtttgtaatttaaaaaaaggaccactgtgtacttaccgtaactgaaaagtctttcgttttctcaactttatatatcttccggaaaggac

SEQ ID NO: 6503 - DNA, 229 bp, synthetic construct
  misc_feature 1..229: note = promoter
  source 1..229: mol_type = other DNA
gagggcctatttcccatggttccttcatatttgcatagaggatgcaagactgtcagagggacgattgcaattaacttggccataaacacaaacctattggcacaaactatgtgatatagaaagttatgattgttcaagaagtttgtaatttaaaaaaaggaccactttgtacttaccgtaactgaaaagtctttcgttttctcaactttatatatcttccggaaaggac

SEQ ID NO: 6504 - DNA, 229 bp, synthetic construct
  misc_feature 1..229: note = promoter
  source 1..229: mol_type = other DNA
gagggcctatttcccatggttccttcatatttgcatagaggatgcaagactgtcagagggacgattgcaattaacttggccataaacacaaacctattggcacaaactatgtgatatagaaagttatgattgttcaagaagtttgtaatttaaaaaaaggaccactaagtacttaccgtaactgaaaagtctttcgttttctcaactttatatatcttccggaaaggac

SEQ ID NO: 6505 - DNA, 229 bp, synthetic construct
  misc_feature 1..229: note = promoter
  source 1..229: mol_type = other DNA
gagggcctatttcccatggttccttcatatttgcatagaggatgcaagactgtcagagggacgattgcaattaacttggccataaacacaaacctattggcacaaactatgtgatatagaaagttatgattgttcaagaagtttgtaatttaaaaaaaggaccactacgtacttaccgtaactgaaaagtctttcgttttctcaactttatatatcttccggaaaggac

SEQ ID NO: 6506 - DNA, 229 bp, synthetic construct
  misc_feature 1..229: note = promoter
  source 1..229: mol_type = other DNA
gagggcctatttcccatggttccttcatatttgcatagaggatgcaagactgtcagagggacgattgcaattaacttggccataaacacaaacctattggcacaaactatgtgatatagaaagttatgattgttcaagaagtttgtaatttaaaaaaaggaccactaggtacttaccgtaactgaaaagtctttcgttttctcaactttatatatcttccggaaaggac

SEQ ID NO: 6507 - DNA, 229 bp, synthetic construct
  misc_feature 1..229: note = promoter
  source 1..229: mol_type = other DNA
gagggcctatttcccatggttccttcatatttgcatagaggatgcaagactgtcagagggacgattgcaattaacttggccataaacacaaacctattggcacaaactatgtgatatagaaagttatgattgttcaagaagtttgtaatttaaaaaaaggaccactatatacttaccgtaactgaaaagtctttcgttttctcaactttatatatcttccggaaaggac

SEQ ID NO: 6508 - DNA, 229 bp, synthetic construct
  misc_feature 1..229: note = promoter
  source 1..229: mol_type = other DNA
gagggcctatttcccatggttccttcatatttgcatagaggatgcaagactgtcagagggacgattgcaattaacttggccataaacacaaacctattggcacaaactatgtgatatagaaagttatgattgttcaagaagtttgtaatttaaaaaaaggaccactatctacttaccgtaactgaaaagtctttcgttttctcaactttatatatcttccggaaaggac

SEQ ID NO: 6509 - DNA, 229 bp, synthetic construct
  misc_feature 1..229: note = promoter
  source 1..229: mol_type = other DNA
gagggcctatttcccatggttccttcatatttgcatagaggatgcaagactgtcagagggacgattgcaattaacttggccataaacacaaacctattggcacaaactatgtgatatagaaagttatgattgttcaagaagtttgtaatttaaaaaaaggaccactatttacttaccgtaactgaaaagtctttcgttttctcaactttatatatcttccggaaaggac

SEQ ID NO: 6510 - DNA, 229 bp, synthetic construct
  misc_feature 1..229: note = promoter
  source 1..229: mol_type = other DNA
gagggcctatttcccatggttccttcatatttgcatagaggatgcaagactgtcagagggacgattgcaattaacttggccataaacacaaacctattggcacaaactatgtgatatagaaagttatgattgttcaagaagtttgtaatttaaaaaaaggaccactatgaacttaccgtaactgaaaagtctttcgttttctcaactttatatatcttccggaaaggac

SEQ ID NO: 6511 - DNA, 229 bp, synthetic construct
  misc_feature 1..229: note = promoter
  source 1..229: mol_type = other DNA
gagggcctatttcccatggttccttcatatttgcatagaggatgcaagactgtcagagggacgattgcaattaacttggccataaacacaaacctattggcacaaactatgtgatatagaaagttatgattgttcaagaagtttgtaatttaaaaaaaggaccactatgcacttaccgtaactgaaaagtctttcgttttctcaactttatatatcttccggaaaggac

SEQ ID NO: 6512 - DNA, 229 bp, synthetic construct
  misc_feature 1..229: note = promoter
  source 1..229: mol_type = other DNA
gagggcctatttcccatggttccttcatatttgcatagaggatgcaagactgtcagagggacgattgcaattaacttggccataaacacaaacctattggcacaaactatgtgatatagaaagttatgattgttcaagaagtttgtaatttaaaaaaaggaccactatggacttaccgtaactgaaaagtctttcgttttctcaactttatatatcttccggaaaggac

SEQ ID NO: 6513 - DNA, 229 bp, synthetic construct
  misc_feature 1..229: note = promoter
  source 1..229: mol_type = other DNA
gagggcctatttcccatggttccttcatatttgcatagaggatgcaagactgtcagagggacgattgcaattaacttggccataaacacaaacctattggcacaaactatgtgatatagaaagttatgattgttcaagaagtttgtaatttaaaaaaaggaccactatgtccttaccgtaactgaaaagtctttcgttttctcaactttatatatcttccggaaaggac

SEQ ID NO: 6514 - DNA, 229 bp, synthetic construct
  misc_feature 1..229: note = promoter
  source 1..229: mol_type = other DNA
gagggcctatttcccatggttccttcatatttgcatagaggatgcaagactgtcagagggacgattgcaattaacttggccataaacacaaacctattggcacaaactatgtgatatagaaagttatgattgttcaagaagtttgtaatttaaaaaaaggaccactatgtgcttaccgtaactgaaaagtctttcgttttctcaactttatatatcttccggaaaggac

SEQ ID NO: 6515 - DNA, 229 bp, synthetic construct
  misc_feature 1..229: note = promoter
  source 1..229: mol_type = other DNA
gagggcctatttcccatggttccttcatatttgcatagaggatgcaagactgtcagagggacgattgcaattaacttggccataaacacaaacctattggcacaaactatgtgatatagaaagttatgattgttcaagaagtttgtaatttaaaaaaaggaccactatgttcttaccgtaactgaaaagtctttcgttttctcaactttatatatcttccggaaaggac

SEQ ID NO: 6516 - DNA, 229 bp, synthetic construct
  misc_feature 1..229: note = promoter
  source 1..229: mol_type = other DNA
gagggcctatttcccatggttccttcatatttgcatagaggatgcaagactgtcagagggacgattgcaattaacttggccataaacacaaacctattggcacaaactatgtgatatagaaagttatgattgttcaagaagtttgtaatttaaaaaaaggaccactatgtaattaccgtaactgaaaagtctttcgttttctcaactttatatatcttccggaaaggac

SEQ ID NO: 6517 - DNA, 229 bp, synthetic construct
  misc_feature 1..229: note = promoter
  source 1..229: mol_type = other DNA
gagggcctatttcccatggttccttcatatttgcatagaggatgcaagactgtcagagggacgattgcaattaacttggccataaacacaaacctattggcacaaactatgtgatatagaaagttatgattgttcaagaagtttgtaatttaaaaaaaggaccactatgtagttaccgtaactgaaaagtctttcgttttctcaactttatatatcttccggaaaggac

SEQ ID NO: 6518 - DNA, 229 bp, synthetic construct
  misc_feature 1..229: note = promoter
  source 1..229: mol_type = other DNA
gagggcctatttcccatggttccttcatatttgcatagaggatgcaagactgtcagagggacgattgcaattaacttggccataaacacaaacctattggcacaaactatgtgatatagaaagttatgattgttcaagaagtttgtaatttaaaaaaaggaccactatgtatttaccgtaactgaaaagtctttcgttttctcaactttatatatcttccggaaaggac

SEQ ID NO: 6519 - DNA, 229 bp, synthetic construct
  misc_feature 1..229: note = promoter
  source 1..229: mol_type = other DNA
gagggcctatttcccatggttccttcatatttgcatagaggatgcaagactgtcagagggacgattgcaattaacttggccataaacacaaacctattggcacaaactatgtgatatagaaagttatgattgttcaagaagtttgtaatttaaaaaaaggaccactatgtacataccgtaactgaaaagtctttcgttttctcaactttatatatcttccggaaaggac

SEQ ID NO: 6520 - DNA, 229 bp, synthetic construct
  misc_feature 1..229: note = promoter
  source 1..229: mol_type = other DNA
gagggcctatttcccatggttccttcatatttgcatagaggatgcaagactgtcagagggacgattgcaattaacttggccataaacacaaacctattggcacaaactatgtgatatagaaagttatgattgttcaagaagtttgtaatttaaaaaaaggaccactatgtacctaccgtaactgaaaagtctttcgttttctcaactttatatatcttccggaaaggac

SEQ ID NO: 6521 - DNA, 229 bp, synthetic construct
  misc_feature 1..229: note = promoter
  source 1..229: mol_type = other DNA
gagggcctatttcccatggttccttcatatttgcatagaggatgcaagactgtcagagggacgattgcaattaacttggccataaacacaaacctattggcacaaactatgtgatatagaaagttatgattgttcaagaagtttgtaatttaaaaaaaggaccactatgtacgtaccgtaactgaaaagtctttcgttttctcaactttatatatcttccggaaaggac

SEQ ID NO: 6522 - DNA, 229 bp, synthetic construct
  misc_feature 1..229: note = promoter
  source 1..229: mol_type = other DNA
gagggcctatttcccatggttccttcatatttgcatagaggatgcaagactgtcagagggacgattgcaattaacttggccataaacacaaacctattggcacaaactatgtgatatagaaagttatgattgttcaagaagtttgtaatttaaaaaaaggaccactatgtactaaccgtaactgaaaagtctttcgttttctcaactttatatatcttccggaaaggac

SEQ ID NO: 6523 - DNA, 229 bp, synthetic construct
  misc_feature 1..229: note = promoter
  source 1..229: mol_type = other DNA
gagggcctatttcccatggttccttcatatttgcatagaggatgcaagactgtcagagggacgattgcaattaacttggccataaacacaaacctattggcacaaactatgtgatatagaaagttatgattgttcaagaagtttgtaatttaaaaaaaggaccactatgtactcaccgtaactgaaaagtctttcgttttctcaactttatatatcttccggaaaggac

SEQ ID NO: 6524 - DNA, 229 bp, synthetic construct
  misc_feature 1..229: note = promoter
  source 1..229: mol_type = other DNA
gagggcctatttcccatggttccttcatatttgcatagaggatgcaagactgtcagagggacgattgcaattaacttggccataaacacaaacctattggcacaaactatgtgatatagaaagttatgattgttcaagaagtttgtaatttaaaaaaaggaccactatgtactgaccgtaactgaaaagtctttcgttttctcaactttatatatcttccggaaaggac

SEQ ID NO: 6525 - DNA, 229 bp, synthetic construct
  misc_feature 1..229: note = promoter
  source 1..229: mol_type = other DNA
gagggcctatttcccatggttccttcatatttgcatagaggatgcaagactgtcagagggacgattgcaattaacttggccataaacacaaacctattggcacaaactatgtgatatagaaagttatgattgttcaagaagtttgtaatttaaaaaaaggaccactatgtacttcccgtaactgaaaagtctttcgttttctcaactttatatatcttccggaaaggac

SEQ ID NO: 6526 - DNA, 229 bp, synthetic construct
  misc_feature 1..229: note = promoter
  source 1..229: mol_type = other DNA
gagggcctatttcccatggttccttcatatttgcatagaggatgcaagactgtcagagggacgattgcaattaacttggccataaacacaaacctattggcacaaactatgtgatatagaaagttatgattgttcaagaagtttgtaatttaaaaaaaggaccactatgtacttgccgtaactgaaaagtctttcgttttctcaactttatatatcttccggaaaggac

SEQ ID NO: 6527 - DNA, 229 bp, synthetic construct
  misc_feature 1..229: note = promoter
  source 1..229: mol_type = other DNA
gagggcctatttcccatggttccttcatatttgcatagaggatgcaagactgtcagagggacgattgcaattaacttggccataaacacaaacctattggcacaaactatgtgatatagaaagttatgattgttcaagaagtttgtaatttaaaaaaaggaccactatgtactttccgtaactgaaaagtctttcgttttctcaactttatatatcttccggaaaggac

SEQ ID NO: 6528 - DNA, 229 bp, synthetic construct
  misc_feature 1..229: note = promoter
  source 1..229: mol_type = other DNA
gagggcctatttcccatggttccttcatatttgcatagaggatgcaagactgtcagagggacgattgcaattaacttggccataaacacaaacctattggcacaaactatgtgatatagaaagttatgattgttcaagaagtttgtaatttaaaaaaaggaccactatgtacttaacgtaactgaaaagtctttcgttttctcaactttatatatcttccggaaaggac

SEQ ID NO: 6529 - DNA, 229 bp, synthetic construct
  misc_feature 1..229: note = promoter
  source 1..229: mol_type = other DNA
gagggcctatttcccatggttccttcatatttgcatagaggatgcaagactgtcagagggacgattgcaattaacttggccataaacacaaacctattggcacaaactatgtgatatagaaagttatgattgttcaagaagtttgtaatttaaaaaaaggaccactatgtacttagcgtaactgaaaagtctttcgttttctcaactttatatatcttccggaaaggac

SEQ ID NO: 6530 - DNA, 229 bp, synthetic construct
  misc_feature 1..229: note = promoter
  source 1..229: mol_type = other DNA
gagggcctatttcccatggttccttcatatttgcatagaggatgcaagactgtcagagggacgattgcaattaacttggccataaacacaaacctattggcacaaactatgtgatatagaaagttatgattgttcaagaagtttgtaatttaaaaaaaggaccactatgtacttatcgtaactgaaaagtctttcgttttctcaactttatatatcttccggaaaggac

SEQ ID NO: 6531 - DNA, 229 bp, synthetic construct
  misc_feature 1..229: note = promoter
  source 1..229: mol_type = other DNA
gagggcctatttcccatggttccttcatatttgcatagaggatgcaagactgtcagagggacgattgcaattaacttggccataaacacaaacctattggcacaaactatgtgatatagaaagttatgattgttcaagaagtttgtaatttaaaaaaaggaccactatgtacttacagtaactgaaaagtctttcgttttctcaactttatatatcttccggaaaggac

SEQ ID NO: 6532 - DNA, 229 bp, synthetic construct
  misc_feature 1..229: note = promoter
  source 1..229: mol_type = other DNA
gagggcctatttcccatggttccttcatatttgcatagaggatgcaagactgtcagagggacgattgcaattaacttggccataaacacaaacctattggcacaaactatgtgatatagaaagttatgattgttcaagaagtttgtaatttaaaaaaaggaccactatgtacttacggtaactgaaaagtctttcgttttctcaactttatatatcttccggaaaggac

SEQ ID NO: 6533 - DNA, 229 bp, synthetic construct
  misc_feature 1..229: note = promoter
  source 1..229: mol_type = other DNA
gagggcctatttcccatggttccttcatatttgcatagaggatgcaagactgtcagagggacgattgcaattaacttggccataaacacaaacctattggcacaaactatgtgatatagaaagttatgattgttcaagaagtttgtaatttaaaaaaaggaccactatgtacttactgtaactgaaaagtctttcgttttctcaactttatatatcttccggaaaggac

SEQ ID NO: 6534 - DNA, 229 bp, synthetic construct
  misc_feature 1..229: note = promoter
  source 1..229: mol_type = other DNA
gagggcctatttcccatggttccttcatatttgcatagaggatgcaagactgtcagagggacgattgcaattaacttggccataaacacaaacctattggcacaaactatgtgatatagaaagttatgattgttcaagaagtttgtaatttaaaaaaaggaccactatgtacttaccataactgaaaagtctttcgttttctcaactttatatatcttccggaaaggac

SEQ ID NO: 6535 - DNA, 229 bp, synthetic construct
  misc_feature 1..229: note = promoter
  source 1..229: mol_type = other DNA
gagggcctatttcccatggttccttcatatttgcatagaggatgcaagactgtcagagggacgattgcaattaacttggccataaacacaaacctattggcacaaactatgtgatatagaaagttatgattgttcaagaagtttgtaatttaaaaaaaggaccactatgtacttaccctaactgaaaagtctttcgttttctcaactttatatatcttccggaaaggac

SEQ ID NO: 6536 - DNA, 229 bp, synthetic construct
  misc_feature 1..229: note = promoter
  source 1..229: mol_type = other DNA
gagggcctatttcccatggttccttcatatttgcatagaggatgcaagactgtcagagggacgattgcaattaacttggccataaacacaaacctattggcacaaactatgtgatatagaaagttatgattgttcaagaagtttgtaatttaaaaaaaggaccactatgtacttaccttaactgaaaagtctttcgttttctcaactttatatatcttccggaaaggac

SEQ ID NO: 6537 - DNA, 229 bp, synthetic construct
  misc_feature 1..229: note = promoter
  source 1..229: mol_type = other DNA
gagggcctatttcccatggttccttcatatttgcatagaggatgcaagactgtcagagggacgattgcaattaacttggccataaacacaaacctattggcacaaactatgtgatatagaaagttatgattgttcaagaagtttgtaatttaaaaaaaggaccactatgtacttaccgaaactgaaaagtctttcgttttctcaactttatatatcttccggaaaggac

SEQ ID NO: 6538 - DNA, 229 bp, synthetic construct
  misc_feature 1..229: note = promoter
  source 1..229: mol_type = other DNA
gagggcctatttcccatggttccttcatatttgcatagaggatgcaagactgtcagagggacgattgcaattaacttggccataaacacaaacctattggcacaaactatgtgatatagaaagttatgattgttcaagaagtttgtaatttaaaaaaaggaccactatgtacttaccgcaactgaaaagtctttcgttttctcaactttatatatcttccggaaaggac

SEQ ID NO: 6539 - DNA, 229 bp, synthetic construct
  misc_feature 1..229: note = promoter
  source 1..229: mol_type = other DNA
gagggcctatttcccatggttccttcatatttgcatagaggatgcaagactgtcagagggacgattgcaattaacttggccataaacacaaacctattggcacaaactatgtgatatagaaagttatgattgttcaagaagtttgtaatttaaaaaaaggaccactatgtacttaccggaactgaaaagtctttcgttttctcaactttatatatcttccggaaaggac

SEQ ID NO: 6540 - DNA, 229 bp, synthetic construct
  misc_feature 1..229: note = promoter
  source 1..229: mol_type = other DNA
gagggcctatttcccatggttccttcatatttgcatagaggatgcaagactgtcagagggacgattgcaattaacttggccataaacacaaacctattggcacaaactatgtgatatagaaagttatgattgttcaagaagtttgtaatttaaaaaaaggaccactatgtacttaccgtcactgaaaagtctttcgttttctcaactttatatatcttccggaaaggac

SEQ ID NO: 6541 - DNA, 229 bp, synthetic construct
  misc_feature 1..229: note = promoter
  source 1..229: mol_type = other DNA
gagggcctatttcccatggttccttcatatttgcatagaggatgcaagactgtcagagggacgattgcaattaacttggccataaacacaaacctattggcacaaactatgtgatatagaaagttatgattgttcaagaagtttgtaatttaaaaaaaggaccactatgtacttaccgtgactgaaaagtctttcgttttctcaactttatatatcttccggaaaggac

SEQ ID NO: 6542 - DNA, 229 bp, synthetic construct
  misc_feature 1..229: note = promoter
  source 1..229: mol_type = other DNA
gagggcctatttcccatggttccttcatatttgcatagaggatgcaagactgtcagagggacgattgcaattaacttggccataaacacaaacctattggcacaaactatgtgatatagaaagttatgattgttcaagaagtttgtaatttaaaaaaaggaccactatgtacttaccgttactgaaaagtctttcgttttctcaactttatatatcttccggaaaggac

SEQ ID NO: 6543 - DNA, 229 bp, synthetic construct
  misc_feature 1..229: note = promoter
  source 1..229: mol_type = other DNA
gagggcctatttcccatggttccttcatatttgcatagaggatgcaagactgtcagagggacgattgcaattaacttggccataaacacaaacctattggcacaaactatgtgatatagaaagttatgattgttcaagaagtttgtaatttaaaaaaaggaccactatgtacttaccgtacctgaaaagtctttcgttttctcaactttatatatcttccggaaaggac

SEQ ID NO: 6544 - DNA, 229 bp, synthetic construct
  misc_feature 1..229: note = promoter
  source 1..229: mol_type = other DNA
gagggcctatttcccatggttccttcatatttgcatagaggatgcaagactgtcagagggacgattgcaattaacttggccataaacacaaacctattggcacaaactatgtgatatagaaagttatgattgttcaagaagtttgtaatttaaaaaaaggaccactatgtacttaccgtagctgaaaagtctttcgttttctcaactttatatatcttccggaaaggac

SEQ ID NO: 6545 - DNA, 229 bp, synthetic construct
  misc_feature 1..229: note = promoter
  source 1..229: mol_type = other DNA
gagggcctatttcccatggttccttcatatttgcatagaggatgcaagactgtcagagggacgattgcaattaacttggccataaacacaaacctattggcacaaactatgtgatatagaaagttatgattgttcaagaagtttgtaatttaaaaaaaggaccactatgtacttaccgtatctgaaaagtctttcgttttctcaactttatatatcttccggaaaggac

SEQ ID NO: 6546 - DNA, 229 bp, synthetic construct
  misc_feature 1..229: note = promoter
  source 1..229: mol_type = other DNA
gagggcctatttcccatggttccttcatatttgcatagaggatgcaagactgtcagagggacgattgcaattaacttggccataaacacaaacctattggcacaaactatgtgatatagaaagttatgattgttcaagaagtttgtaatttaaaaaaaggaccactatgtacttaccgtaaatgaaaagtctttcgttttctcaactttatatatcttccggaaaggac

SEQ ID NO: 6547 - DNA, 229 bp, synthetic construct
  misc_feature 1..229: note = promoter
  source 1..229: mol_type = other DNA
gagggcctatttcccatggttccttcatatttgcatagaggatgcaagactgtcagagggacgattgcaattaacttggccataaacacaaacctattggcacaaactatgtgatatagaaagttatgattgttcaagaagtttgtaatttaaaaaaaggaccactatgtacttaccgtaagtgaaaagtctttcgttttctcaactttatatatcttccggaaaggac

SEQ ID NO: 6548 - DNA, 229 bp, synthetic construct
  misc_feature 1..229: note = promoter
  source 1..229: mol_type = other DNA
gagggcctatttcccatggttccttcatatttgcatagaggatgcaagactgtcagagggacgattgcaattaacttggccataaacacaaacctattggcacaaactatgtgatatagaaagttatgattgttcaagaagtttgtaatttaaaaaaaggaccactatgtacttaccgtaattgaaaagtctttcgttttctcaactttatatatcttccggaaaggac

SEQ ID NO: 6549 - DNA, 229 bp, synthetic construct
  misc_feature 1..229: note = promoter
  source 1..229: mol_type = other DNA
gagggcctatttcccatggttccttcatatttgcatagaggatgcaagactgtcagagggacgattgcaattaacttggccataaacacaaacctattggcacaaactatgtgatatagaaagttatgattgttcaagaagtttgtaatttaaaaaaaggaccactatgtacttaccgtaacagaaaagtctttcgttttctcaactttatatatcttccggaaaggac

SEQ ID NO: 6550 - DNA, 229 bp, synthetic construct
  misc_feature 1..229: note = promoter
  source 1..229: mol_type = other DNA
gagggcctatttcccatggttccttcatatttgcatagaggatgcaagactgtcagagggacgattgcaattaacttggccataaacacaaacctattggcacaaactatgtgatatagaaagttatgattgttcaagaagtttgtaatttaaaaaaaggaccactatgtacttaccgtaaccgaaaagtctttcgttttctcaactttatatatcttccggaaaggac

SEQ ID NO: 6551 - DNA, 229 bp, synthetic construct
  misc_feature 1..229: note = promoter
  source 1..229: mol_type = other DNA
gagggcctatttcccatggttccttcatatttgcatagaggatgcaagactgtcagagggacgattgcaattaacttggccataaacacaaacctattggcacaaactatgtgatatagaaagttatgattgttcaagaagtttgtaatttaaaaaaaggaccactatgtacttaccgtaacggaaaagtctttcgttttctcaactttatatatcttccggaaaggac

SEQ ID NO: 6552 - DNA, 229 bp, synthetic construct
  misc_feature 1..229: note = promoter
  source 1..229: mol_type = other DNA
gagggcctatttcccatggttccttcatatttgcatagaggatgcaagactgtcagagggacgattgcaattaacttggccataaacacaaacctattggcacaaactatgtgatatagaaagttatgattgttcaagaagtttgtaatttaaaaaaaggaccactatgtacttaccgtaactaaaaagtctttcgttttctcaactttatatatcttccggaaaggac

SEQ ID NO: 6553 - DNA, 229 bp, synthetic construct
  misc_feature 1..229: note = promoter
  source 1..229: mol_type = other DNA
gagggcctatttcccatggttccttcatatttgcatagaggatgcaagactgtcagagggacgattgcaattaacttggccataaacacaaacctattggcacaaactatgtgatatagaaagttatgattgttcaagaagtttgtaatttaaaaaaaggaccactatgtacttaccgtaactcaaaagtctttcgttttctcaactttatatatcttccggaaaggac

SEQ ID NO: 6554 - DNA, 229 bp, synthetic construct
  misc_feature 1..229: note = promoter
  source 1..229: mol_type = other DNA
gagggcctatttcccatggttccttcatatttgcatagaggatgcaagactgtcagagggacgattgcaattaacttggccataaacacaaacctattggcacaaactatgtgatatagaaagttatgattgttcaagaagtttgtaatttaaaaaaaggaccactatgtacttaccgtaacttaaaagtctttcgttttctcaactttatatatcttccggaaaggac

SEQ ID NO: 6555 - DNA, 229 bp, synthetic construct
  misc_feature 1..229: note = promoter
  source 1..229: mol_type = other DNA
gagggcctatttcccatggttccttcatatttgcatagaggatgcaagactgtcagagggacgattgcaattaacttggccataaacacaaacctattggcacaaactatgtgatatagaaagttatgattgttcaagaagtttgtaatttaaaaaaaggaccactatgtacttaccgtaactgcaaagtctttcgttttctcaactttatatatcttccggaaaggac

SEQ ID NO: 6556 - DNA, 229 bp, synthetic construct
  misc_feature 1..229: note = promoter
  source 1..229: mol_type = other DNA
gagggcctatttcccatggttccttcatatttgcatagaggatgcaagactgtcagagggacgattgcaattaacttggccataaacacaaacctattggcacaaactatgtgatatagaaagttatgattgttcaagaagtttgtaatttaaaaaaaggaccactatgtacttaccgtaactggaaagtctttcgttttctcaactttatatatcttccggaaaggac

SEQ ID NO: 6557 - DNA, 229 bp, synthetic construct
  misc_feature 1..229: note = promoter
  source 1..229: mol_type = other DNA
gagggcctatttcccatggttccttcatatttgcatagaggatgcaagactgtcagagggacgattgcaattaacttggccataaacacaaacctattggcacaaactatgtgatatagaaagttatgattgttcaagaagtttgtaatttaaaaaaaggaccactatgtacttaccgtaactgtaaagtctttcgttttctcaactttatatatcttccggaaaggac

SEQ ID NO: 6558 - DNA, 229 bp, synthetic construct
  misc_feature 1..229: note = promoter
  source 1..229: mol_type = other DNA
gagggcctatttcccatggttccttcatatttgcatagaggatgcaagactgtcagagggacgattgcaattaacttggccataaacacaaacctattggcacaaactatgtgatatagaaagttatgattgttcaagaagtttgtaatttaaaaaaaggaccactatgtacttaccgtaactgacaagtctttcgttttctcaactttatatatcttccggaaaggac

SEQ ID NO: 6559 - DNA, 229 bp, synthetic construct
  misc_feature 1..229: note = promoter
  source 1..229: mol_type = other DNA
gagggcctatttcccatggttccttcatatttgcatagaggatgcaagactgtcagagggacgattgcaattaacttggccataaacacaaacctattggcacaaactatgtgatatagaaagttatgattgttcaagaagtttgtaatttaaaaaaaggaccactatgtacttaccgtaactgagaagtctttcgttttctcaactttatatatcttccggaaaggac

SEQ ID NO: 6560 - DNA, 229 bp, synthetic construct
  misc_feature 1..229: note = promoter
  source 1..229: mol_type = other DNA
gagggcctatttcccatggttccttcatatttgcatagaggatgcaagactgtcagagggacgattgcaattaacttggccataaacacaaacctattggcacaaactatgtgatatagaaagttatgattgttcaagaagtttgtaatttaaaaaaaggaccactatgtacttaccgtaactgataagtctttcgttttctcaactttatatatcttccggaaaggac

SEQ ID NO: 6561 - DNA, 229 bp, synthetic construct
  misc_feature 1..229: note = promoter
  source 1..229: mol_type = other DNA
gagggcctatttcccatggttccttcatatttgcatagaggatgcaagactgtcagagggacgattgcaattaacttggccataaacacaaacctattggcacaaactatgtgatatagaaagttatgattgttcaagaagtttgtaatttaaaaaaaggaccactatgtacttaccgtaactgaacagtctttcgttttctcaactttatatatcttccggaaaggac

SEQ ID NO: 6562 - DNA, 229 bp, synthetic construct
  misc_feature 1..229: note = promoter
  source 1..229: mol_type = other DNA
gagggcctatttcccatggttccttcatatttgcatagaggatgcaagactgtcagagggacgattgcaattaacttggccataaacacaaacctattggcacaaactatgtgatatagaaagttatgattgttcaagaagtttgtaatttaaaaaaaggaccactatgtacttaccgtaactgaagagtctttcgttttctcaactttatatatcttccggaaaggac

SEQ ID NO: 6563 - DNA, 229 bp, synthetic construct
  misc_feature 1..229: note = promoter
  source 1..229: mol_type = other DNA
gagggcctatttcccatggttccttcatatttgcatagaggatgcaagactgtcagagggacgattgcaattaacttggccataaacacaaacctattggcacaaactatgtgatatagaaagttatgattgttcaagaagtttgtaatttaaaaaaaggaccactatgtacttaccgtaactgaatagtctttcgttttctcaactttatatatcttccggaaaggac

SEQ ID NO: 6564 - DNA, 229 bp, synthetic construct
  misc_feature 1..229: note = promoter
  source 1..229: mol_type = other DNA
gagggcctatttcccatggttccttcatatttgcatagaggatgcaagactgtcagagggacgattgcaattaacttggccataaacacaaacctattggcacaaactatgtgatatagaaagttatgattgttcaagaagtttgtaatttaaaaaaaggaccactatgtacttaccgtaactgaaacgtctttcgttttctcaactttatatatcttccggaaaggac

SEQ ID NO: 6565 - DNA, 229 bp, synthetic construct
  misc_feature 1..229: note = promoter
  source 1..229: mol_type = other DNA
gagggcctatttcccatggttccttcatatttgcatagaggatgcaagactgtcagagggacgattgcaattaacttggccataaacacaaacctattggcacaaactatgtgatatagaaagttatgattgttcaagaagtttgtaatttaaaaaaaggaccactatgtacttaccgtaactgaaaggtctttcgttttctcaactttatatatcttccggaaaggac

SEQ ID NO: 6566 - DNA, 229 bp, synthetic construct
  misc_feature 1..229: note = promoter
  source 1..229: mol_type = other DNA
gagggcctatttcccatggttccttcatatttgcatagaggatgcaagactgtcagagggacgattgcaattaacttggccataaacacaaacctattggcacaaactatgtgatatagaaagttatgattgttcaagaagtttgtaatttaaaaaaaggaccactatgtacttaccgtaactgaaatgtctttcgttttctcaactttatatatcttccggaaaggac

SEQ ID NO: 6567 - DNA, 229 bp, synthetic construct
  misc_feature 1..229: note = promoter
  source 1..229: mol_type = other DNA
gagggcctatttcccatggttccttcatatttgcatagaggatgcaagactgtcagagggacgattgcaattaacttggccataaacacaaacctattggcacaaactatgtgatatagaaagttatgattgttcaagaagtttgtaatttaaaaaaaggaccactatgtacttaccgtaactgaaaaatctttcgttttctcaactttatatatcttccggaaaggac

SEQ ID NO: 6568 - DNA, 229 bp, synthetic construct
  misc_feature 1..229: note = promoter
  source 1..229: mol_type = other DNA
gagggcctatttcccatggttccttcatatttgcatagaggatgcaagactgtcagagggacgattgcaattaacttggccataaacacaaacctattggcacaaactatgtgatatagaaagttatgattgttcaagaagtttgtaatttaaaaaaaggaccactatgtacttaccgtaactgaaaactctttcgttttctcaactttatatatcttccggaaaggac

SEQ ID NO: 6569 - DNA, 229 bp, synthetic construct
  misc_feature 1..229: note = promoter
  source 1..229: mol_type = other DNA
gagggcctatttcccatggttccttcatatttgcatagaggatgcaagactgtcagagggacgattgcaattaacttggccataaacacaaacctattggcacaaactatgtgatatagaaagttatgattgttcaagaagtttgtaatttaaaaaaaggaccactatgtacttaccgtaactgaaaattctttcgttttctcaactttatatatcttccggaaaggac

SEQ ID NO: 6570 - DNA, 229 bp, synthetic construct
  misc_feature 1..229: note = promoter
  source 1..229: mol_type = other DNA
gagggcctatttcccatggttccttcatatttgcatagaggatgcaagactgtcagagggacgattgcaattaacttggccataaacacaaacctattggcacaaactatgtgatatagaaagttatgattgttcaagaagtttgtaatttaaaaaaaggaccactatgtacttaccgtaactgaaaagactttcgttttctcaactttatatatcttccggaaaggac

SEQ ID NO: 6571 - DNA, 229 bp, synthetic construct
  misc_feature 1..229: note = promoter
  source 1..229: mol_type = other DNA
gagggcctatttcccatggttccttcatatttgcatagaggatgcaagactgtcagagggacgattgcaattaacttggccataaacacaaacctattggcacaaactatgtgatatagaaagttatgattgttcaagaagtttgtaatttaaaaaaaggaccactatgtacttaccgtaactgaaaagcctttcgttttctcaactttatatatcttccggaaaggac

SEQ ID NO: 6572 - DNA, 229 bp, synthetic construct
  misc_feature 1..229: note = promoter
  source 1..229: mol_type = other DNA
gagggcctatttcccatggttccttcatatttgcatagaggatgcaagactgtcagagggacgattgcaattaacttggccataaacacaaacctattggcacaaactatgtgatatagaaagttatgattgttcaagaagtttgtaatttaaaaaaaggaccactatgtacttaccgtaactgaaaaggctttcgttttctcaactttatatatcttccggaaaggac

SEQ ID NO: 6573 - DNA, 229 bp, synthetic construct
  misc_feature 1..229: note = promoter
  source 1..229: mol_type = other DNA
gagggcctatttcccatggttccttcatatttgcatagaggatgcaagactgtcagagggacgattgcaattaacttggccataaacacaaacctattggcacaaactatgtgatatagaaagttatgattgttcaagaagtttgtaatttaaaaaaaggaccactatgtacttaccgtaactgaaaagtatttcgttttctcaactttatatatcttccggaaaggac

SEQ ID NO: 6574 - DNA, 229 bp, synthetic construct
  misc_feature 1..229: note = promoter
  source 1..229: mol_type = other DNA
gagggcctatttcccatggttccttcatatttgcatagaggatgcaagactgtcagagggacgattgcaattaacttggccataaacacaaacctattggcacaaactatgtgatatagaaagttatgattgttcaagaagtttgtaatttaaaaaaaggaccactatgtacttaccgtaactgaaaagtgtttcgttttctcaactttatatatcttccggaaaggac

SEQ ID NO: 6575 - DNA, 229 bp, synthetic construct
  misc_feature 1..229: note = promoter
  source 1..229: mol_type = other DNA
gagggcctatttcccatggttccttcatatttgcatagaggatgcaagactgtcagagggacgattgcaattaacttggccataaacacaaacctattggcacaaactatgtgatatagaaagttatgattgttcaagaagtttgtaatttaaaaaaaggaccactatgtacttaccgtaactgaaaagtttttcgttttctcaactttatatatcttccggaaaggac

SEQ ID NO: 6576 - DNA, 229 bp, synthetic construct
  misc_feature 1..229: note = promoter
  source 1..229: mol_type = other DNA
gagggcctatttcccatggttccttcatatttgcatagaggatgcaagactgtcagagggacgattgcaattaacttggccataaacacaaacctattggcacaaactatgtgatatagaaagttatgattgttcaagaagtttgtaatttaaaaaaaggaccactatgtacttaccgtaactgaaaagtcattcgttttctcaactttatatatcttccggaaaggac

SEQ ID NO: 6577 - DNA, 229 bp, synthetic construct
  misc_feature 1..229: note = promoter
  source 1..229: mol_type = other DNA
gagggcctatttcccatggttccttcatatttgcatagaggatgcaagactgtcagagggacgattgcaattaacttggccataaacacaaacctattggcacaaactatgtgatatagaaagttatgattgttcaagaagtttgtaatttaaaaaaaggaccactatgtacttaccgtaactgaaaagtccttcgttttctcaactttatatatcttccggaaaggac

SEQ ID NO: 6578 - DNA, 229 bp, synthetic construct
  misc_feature 1..229: note = promoter
  source 1..229: mol_type = other DNA
gagggcctatttcccatggttccttcatatttgcatagaggatgcaagactgtcagagggacgattgcaattaacttggccataaacacaaacctattggcacaaactatgtgatatagaaagttatgattgttcaagaagtttgtaatttaaaaaaaggaccactatgtacttaccgtaactgaaaagtcgttcgttttctcaactttatatatcttccggaaaggac

SEQ ID NO: 6579 - DNA, 229 bp, synthetic construct
  misc_feature 1..229: note = promoter
  source 1..229: mol_type = other DNA
gagggcctatttcccatggttccttcatatttgcatagaggatgcaagactgtcagagggacgattgcaattaacttggccataaacacaaacctattggcacaaactatgtgatatagaaagttatgattgttcaagaagtttgtaatttaaaaaaaggaccactatgtacttaccgtaactgaaaagtctatcgttttctcaactttatatatcttccggaaaggac

SEQ ID NO: 6580 - DNA, 229 bp, synthetic construct
  misc_feature 1..229: note = promoter
  source 1..229: mol_type = other DNA
gagggcctatttcccatggttccttcatatttgcatagaggatgcaagactgtcagagggacgattgcaattaacttggccataaacacaaacctattggcacaaactatgtgatatagaaagttatgattgttcaagaagtttgtaatttaaaaaaaggaccactatgtacttaccgtaactgaaaagtctctcgttttctcaactttatatatcttccggaaaggac

SEQ ID NO: 6581 - DNA, 229 bp, synthetic construct
  misc_feature 1..229: note = promoter
  source 1..229: mol_type = other DNA
gagggcctatttcccatggttccttcatatttgcatagaggatgcaagactgtcagagggacgattgcaattaacttggccataaacacaaacctattggcacaaactatgtgatatagaaagttatgattgttcaagaagtttgtaatttaaaaaaaggaccactatgtacttaccgtaactgaaaagtctgtcgttttctcaactttatatatcttccggaaaggac

SEQ ID NO: 6582 - DNA, 229 bp, synthetic construct
  misc_feature 1..229: note = promoter
  source 1..229: mol_type = other DNA
gagggcctatttcccatggttccttcatatttgcatagaggatgcaagactgtcagagggacgattgcaattaacttggccataaacacaaacctattggcacaaactatgtgatatagaaagttatgattgttcaagaagtttgtaatttaaaaaaaggaccactatgtacttaccgtaactgaaaagtcttacgttttctcaactttatatatcttccggaaaggac

SEQ ID NO: 6583 - DNA, 229 bp, synthetic construct
  misc_feature 1..229: note = promoter
  source 1..229: mol_type = other DNA
gagggcctatttcccatggttccttcatatttgcatagaggatgcaagactgtcagagggacgattgcaattaacttggccataaacacaaacctattggcacaaactatgtgatatagaaagttatgattgttcaagaagtttgtaatttaaaaaaaggaccactatgtacttaccgtaactgaaaagtcttccgttttctcaactttatatatcttccggaaaggac

SEQ ID NO: 6584 - DNA, 229 bp, synthetic construct
  misc_feature 1..229: note = promoter
  source 1..229: mol_type = other DNA
gagggcctatttcccatggttccttcatatttgcatagaggatgcaagactgtcagagggacgattgcaattaacttggccataaacacaaacctattggcacaaactatgtgatatagaaagttatgattgttcaagaagtttgtaatttaaaaaaaggaccactatgtacttaccgtaactgaaaagtcttgcgttttctcaactttatatatcttccggaaaggac

SEQ ID NO: 6585 - DNA, 229 bp, synthetic construct
  misc_feature 1..229: note = promoter
  source 1..229: mol_type = other DNA
gagggcctatttcccatggttccttcatatttgcatagaggatgcaagactgtcagagggacgattgcaattaacttggccataaacacaaacctattggcacaaactatgtgatatagaaagttatgattgttcaagaagtttgtaatttaaaaaaaggaccactatgtacttaccgtaactgaaaagtctttagttttctcaactttatatatcttccggaaaggac

SEQ ID NO: 6586 - DNA, 229 bp, synthetic construct
  misc_feature 1..229: note = promoter
  source 1..229: mol_type = other DNA
gagggcctatttcccatggttccttcatatttgcatagaggatgcaagactgtcagagggacgattgcaattaacttggccataaacacaaacctattggcacaaactatgtgatatagaaagttatgattgttcaagaagtttgtaatttaaaaaaaggaccactatgtacttaccgtaactgaaaagtctttggttttctcaactttatatatcttccggaaaggac

SEQ ID NO: 6587 - DNA, 229 bp, synthetic construct
  misc_feature 1..229: note = promoter
  source 1..229: mol_type = other DNA
gagggcctatttcccatggttccttcatatttgcatagaggatgcaagactgtcagagggacgattgcaattaacttggccataaacacaaacctattggcacaaactatgtgatatagaaagttatgattgttcaagaagtttgtaatttaaaaaaaggaccactatgtacttaccgtaactgaaaagtcttttgttttctcaactttatatatcttccggaaaggac

SEQ ID NO: 6588 - DNA, 229 bp, synthetic construct
  misc_feature 1..229: note = promoter
  source 1..229: mol_type = other DNA
gagggcctatttcccatggttccttcatatttgcatagaggatgcaagactgtcagagggacgattgcaattaacttggccataaacacaaacctattggcacaaactatgtgatatagaaagttatgattgttcaagaagtttgtaatttaaaaaaaggaccactatgtacttaccgtaactgaaaagtctttcattttctcaactttatatatcttccggaaaggac

SEQ ID NO: 6589 - DNA, 229 bp, synthetic construct
  misc_feature 1..229: note = promoter
  source 1..229: mol_type = other DNA
gagggcctatttcccatggttccttcatatttgcatagaggatgcaagactgtcagagggacgattgcaattaacttggccataaacacaaacctattggcacaaactatgtgatatagaaagttatgattgttcaagaagtttgtaatttaaaaaaaggaccactatgtacttaccgtaactgaaaagtctttccttttctcaactttatatatcttccggaaaggac

SEQ ID NO: 6590 - DNA, 229 bp, synthetic construct
  misc_feature 1..229: note = promoter
  source 1..229: mol_type = other DNA
gagggcctatttcccatggttccttcatatttgcatagaggatgcaagactgtcagagggacgattgcaattaacttggccataaacacaaacctattggcacaaactatgtgatatagaaagttatgattgttcaagaagtttgtaatttaaaaaaaggaccactatgtacttaccgtaactgaaaagtctttctttttctcaactttatatatcttccggaaaggac

SEQ ID NO: 6591 - DNA, 229 bp, synthetic construct
  misc_feature 1..229: note = promoter
  source 1..229: mol_type = other DNA
gagggcctatttcccatggttccttcatatttgcatagaggatgcaagactgtcagagggacgattgcaattaacttggccataaacacaaacctattggcacaaactatgtgatatagaaagttatgattgttcaagaagtttgtaatttaaaaaaaggaccactatgtacttaccgtaactgaaaagtctttcgatttctcaactttatatatcttccggaaaggac

SEQ ID NO: 6592 - DNA, 229 bp, synthetic construct
  misc_feature 1..229: note = promoter
  source 1..229: mol_type = other DNA
gagggcctatttcccatggttccttcatatttgcatagaggatgcaagactgtcagagggacgattgcaattaacttggccataaacacaaacctattggcacaaactatgtgatatagaaagttatgattgttcaagaagtttgtaatttaaaaaaaggaccactatgtacttaccgtaactgaaaagtctttcgctttctcaactttatatatcttccggaaaggac

SEQ ID NO: 6593 - DNA, 229 bp, synthetic construct
  misc_feature 1..229: note = promoter
  source 1..229: mol_type = other DNA
gagggcctatttcccatggttccttcatatttgcatagaggatgcaagactgtcagagggacgattgcaattaacttggccataaacacaaacctattggcacaaactatgtgatatagaaagttatgattgttcaagaagtttgtaatttaaaaaaaggaccactatgtacttaccgtaactgaaaagtctttcggtttctcaactttatatatcttccggaaaggac

SEQ ID NO: 6594 - DNA, 229 bp, synthetic construct
  misc_feature 1..229: note = promoter
  source 1..229: mol_type = other DNA
gagggcctatttcccatggttccttcatatttgcatagaggatgcaagactgtcagagggacgattgcaattaacttggccataaacacaaacctattggcacaaactatgtgatatagaaagttatgattgttcaagaagtttgtaatttaaaaaaaggaccactatgtacttaccgtaactgaaaagtctttcgtattctcaactttatatatcttccggaaaggac

SEQ ID NO: 6595 - DNA, 229 bp, synthetic construct
  misc_feature 1..229: note = promoter
  source 1..229: mol_type = other DNA
gagggcctatttcccatggttccttcatatttgcatagaggatgcaagactgtcagagggacgattgcaattaacttggccataaacacaaacctattggcacaaactatgtgatatagaaagttatgattgttcaagaagtttgtaatttaaaaaaaggaccactatgtacttaccgtaactgaaaagtctttcgtcttctcaactttatatatcttccggaaaggac

SEQ ID NO: 6596 - DNA, 229 bp, synthetic construct
  misc_feature 1..229: note = promoter
  source 1..229: mol_type = other DNA
gagggcctatttcccatggttccttcatatttgcatagaggatgcaagactgtcagagggacgattgcaattaacttggccataaacacaaacctattggcacaaactatgtgatatagaaagttatgattgttcaagaagtttgtaatttaaaaaaaggaccactatgtacttaccgtaactgaaaagtctttcgtgttctcaactttatatatcttccggaaaggac

SEQ ID NO: 6597 - DNA, 229 bp, synthetic construct
  misc_feature 1..229: note = promoter
  source 1..229: mol_type = other DNA
gagggcctatttcccatggttccttcatatttgcatagaggatgcaagactgtcagagggacgattgcaattaacttggccataaacacaaacctattggcacaaactatgtgatatagaaagttatgattgttcaagaagtttgtaatttaaaaaaaggaccactatgtacttaccgtaactgaaaagtctttcgttatctcaactttatatatcttccggaaaggac

SEQ ID NO: 6598 - DNA, 229 bp, synthetic construct
  misc_feature 1..229: note = promoter
  source 1..229: mol_type = other DNA
gagggcctatttcccatggttccttcatatttgcatagaggatgcaagactgtcagagggacgattgcaattaacttggccataaacacaaacctattggcacaaactatgtgatatagaaagttatgattgttcaagaagtttgtaatttaaaaaaaggaccactatgtacttaccgtaactgaaaagtctttcgttctctcaactttatatatcttccggaaaggac

SEQ ID NO: 6599 - DNA, 229 bp, synthetic construct
  misc_feature 1..229: note = promoter
  source 1..229: mol_type = other DNA
gagggcctatttcccatggttccttcatatttgcatagaggatgcaagactgtcagagggacgattgcaattaacttggccataaacacaaacctattggcacaaactatgtgatatagaaagttatgattgttcaagaagtttgtaatttaaaaaaaggaccactatgtacttaccgtaactgaaaagtctttcgttgtctcaactttatatatcttccggaaaggac

SEQ ID NO: 6600 - DNA, 229 bp, synthetic construct
  misc_feature 1..229: note = promoter
  source 1..229: mol_type = other DNA
gagggcctatttcccatggttccttcatatttgcatagaggatgcaagactgtcagagggacgattgcaattaacttggccataaacacaaacctattggcacaaactatgtgatatagaaagttatgattgttcaagaagtttgtaatttaaaaaaaggaccactatgtacttaccgtaactgaaaagtctttcgtttactcaactttatatatcttccggaaaggac

SEQ ID NO: 6601 - DNA, 229 bp, synthetic construct
  misc_feature 1..229: note = promoter
  source 1..229: mol_type = other DNA
gagggcctatttcccatggttccttcatatttgcatagaggatgcaagactgtcagagggacgattgcaattaacttggccataaacacaaacctattggcacaaactatgtgatatagaaagttatgattgttcaagaagtttgtaatttaaaaaaaggaccactatgtacttaccgtaactgaaaagtctttcgtttcctcaactttatatatcttccggaaaggac

SEQ ID NO: 6602 - DNA, 229 bp, synthetic construct
  misc_feature 1..229: note = promoter
  source 1..229: mol_type = other DNA
gagggcctatttcccatggttccttcatatttgcatagaggatgcaagactgtcagagggacgattgcaattaacttggccataaacacaaacctattggcacaaactatgtgatatagaaagttatgattgttcaagaagtttgtaatttaaaaaaaggaccactatgtacttaccgtaactgaaaagtctttcgtttgctcaactttatatatcttccggaaaggac

SEQ ID NO: 6603 - DNA, 229 bp, synthetic construct
  misc_feature 1..229: note = promoter
  source 1..229: mol_type = other DNA
gagggcctatttcccatggttccttcatatttgcatagaggatgcaagactgtcagagggacgattgcaattaacttggccataaacacaaacctattggcacaaactatgtgatatagaaagttatgattgttcaagaagtttgtaatttaaaaaaaggaccactatgtacttaccgtaactgaaaagtctttcgttttatcaactttatatatcttccggaaaggac

SEQ ID NO: 6604 - DNA, 229 bp, synthetic construct
  misc_feature 1..229: note = promoter
  source 1..229: mol_type = other DNA
gagggcctatttcccatggttccttcatatttgcatagaggatgcaagactgtcagagggacgattgcaattaacttggccataaacacaaacctattggcacaaactatgtgatatagaaagttatgattgttcaagaagtttgtaatttaaaaaaaggaccactatgtacttaccgtaactgaaaagtctttcgttttgtcaactttatatatcttccggaaaggac

SEQ ID NO: 6605 - DNA, 229 bp, synthetic construct
  misc_feature 1..229: note = promoter
  source 1..229: mol_type = other DNA
gagggcctatttcccatggttccttcatatttgcatagaggatgcaagactgtcagagggacgattgcaattaacttggccataaacacaaacctattggcacaaactatgtgatatagaaagttatgattgttcaagaagtttgtaatttaaaaaaaggaccactatgtacttaccgtaactgaaaagtctttcgttttttcaactttatatatcttccggaaaggac

SEQ ID NO: 6606 - DNA, 229 bp, synthetic construct
  misc_feature 1..229: note = promoter
  source 1..229: mol_type = other DNA
gagggcctatttcccatggttccttcatatttgcatagaggatgcaagactgtcagagggacgattgcaattaacttggccataaacacaaacctattggcacaaactatgtgatatagaaagttatgattgttcaagaagtttgtaatttaaaaaaaggaccactatgtacttaccgtaactgaaaagtctttcgttttcacaactttatatatcttccggaaaggac

SEQ ID NO: 6607 - DNA, 229 bp, synthetic construct
  misc_feature 1..229: note = promoter
  source 1..229: mol_type = other DNA
gagggcctatttcccatggttccttcatatttgcatagaggatgcaagactgtcagagggacgattgcaattaacttggccataaacacaaacctattggcacaaactatgtgatatagaaagttatgattgttcaagaagtttgtaatttaaaaaaaggaccactatgtacttaccgtaactgaaaagtctttcgttttcccaactttatatatcttccggaaaggac

SEQ ID NO: 6608 - DNA, 229 bp, synthetic construct
  misc_feature 1..229: note = promoter
  source 1..229: mol_type = other DNA
gagggcctatttcccatggttccttcatatttgcatagaggatgcaagactgtcagagggacgattgcaattaacttggccataaacacaaacctattggcacaaactatgtgatatagaaagttatgattgttcaagaagtttgtaatttaaaaaaaggaccactatgtacttaccgtaactgaaaagtctttcgttttcgcaactttatatatcttccggaaaggac

SEQ ID NO: 6609 - DNA, 229 bp, synthetic construct
  misc_feature 1..229: note = promoter
  source 1..229: mol_type = other DNA
gagggcctatttcccatggttccttcatatttgcatagaggatgcaagactgtcagagggacgattgcaattaacttggccataaacacaaacctattggcacaaactatgtgatatagaaagttatgattgttcaagaagtttgtaatttaaaaaaaggaccactatgtacttaccgtaactgaaaagtctttcgttttctaaactttatatatcttccggaaaggac

SEQ ID NO: 6610 - DNA, 229 bp, synthetic construct
  misc_feature 1..229: note = promoter
  source 1..229: mol_type = other DNA
gagggcctatttcccatggttccttcatatttgcatagaggatgcaagactgtcagagggacgattgcaattaacttggccataaacacaaacctattggcacaaactatgtgatatagaaagttatgattgttcaagaagtttgtaatttaaaaaaaggaccactatgtacttaccgtaactgaaaagtctttcgttttctgaactttatatatcttccggaaaggac

SEQ ID NO: 6611 - DNA, 229 bp, synthetic construct
  misc_feature 1..229: note = promoter
  source 1..229: mol_type = other DNA
gagggcctatttcccatggttccttcatatttgcatagaggatgcaagactgtcagagggacgattgcaattaacttggccataaacacaaacctattggcacaaactatgtgatatagaaagttatgattgttcaagaagtttgtaatttaaaaaaaggaccactatgtacttaccgtaactgaaaagtctttcgttttcttaactttatatatcttccggaaaggac

SEQ ID NO: 6612 - DNA, 229 bp, synthetic construct
  misc_feature 1..229: note = promoter
  source 1..229: mol_type = other DNA
gagggcctatttcccatggttccttcatatttgcatagaggatgcaagactgtcagagggacgattgcaattaacttggccataaacacaaacctattggcacaaactatgtgatatagaaagttatgattgttcaagaagtttgtaatttaaaaaaaggaccactatgtacttaccgtaactgaaaagtctttcgttttctccactttatatatcttccggaaaggac

SEQ ID NO: 6613 - DNA, 229 bp, synthetic construct
  misc_feature 1..229: note = promoter
  source 1..229: mol_type = other DNA
gagggcctatttcccatggttccttcatatttgcatagaggatgcaagactgtcagagggacgattgcaattaacttggccataaacacaaacctattggcacaaactatgtgatatagaaagttatgattgttcaagaagtttgtaatttaaaaaaaggaccactatgtacttaccgtaactgaaaagtctttcgttttctcgactttatatatcttccggaaaggac

SEQ ID NO: 6614 - DNA, 229 bp, synthetic construct
  misc_feature 1..229: note = promoter
  source 1..229: mol_type = other DNA
gagggcctatttcccatggttccttcatatttgcatagaggatgcaagactgtcagagggacgattgcaattaacttggccataaacacaaacctattggcacaaactatgtgatatagaaagttatgattgttcaagaagtttgtaatttaaaaaaaggaccactatgtacttaccgtaactgaaaagtctttcgttttctctactttatatatcttccggaaaggac

SEQ ID NO: 6615 - DNA, 229 bp, synthetic construct
  misc_feature 1..229: note = promoter
  source 1..229: mol_type = other DNA
gagggcctatttcccatggttccttcatatttgcatagaggatgcaagactgtcagagggacgattgcaattaacttggccataaacacaaacctattggcacaaactatgtgatatagaaagttatgattgttcaagaagtttgtaatttaaaaaaaggaccactatgtacttaccgtaactgaaaagtctttcgttttctcacctttatatatcttccggaaaggac

SEQ ID NO: 6616 - DNA, 229 bp, synthetic construct
  misc_feature 1..229: note = promoter
  source 1..229: mol_type = other DNA
gagggcctatttcccatggttccttcatatttgcatagaggatgcaagactgtcagagggacgattgcaattaacttggccataaacacaaacctattggcacaaactatgtgatatagaaagttatgattgttcaagaagtttgtaatttaaaaaaaggaccactatgtacttaccgtaactgaaaagtctttcgttttctcagctttatatatcttccggaaaggac

SEQ ID NO: 6617 - DNA, 229 bp, synthetic construct
  misc_feature 1..229: note = promoter
  source 1..229: mol_type = other DNA
gagggcctatttcccatggttccttcatatttgcatagaggatgcaagactgtcagagggacgattgcaattaacttggccataaacacaaacctattggcacaaactatgtgatatagaaagttatgattgttcaagaagtttgtaatttaaaaaaaggaccactatgtacttaccgtaactgaaaagtctttcgttttctcatctttatatatcttccggaaaggac

SEQ ID NO: 6618 - DNA, 229 bp, synthetic construct
  misc_feature 1..229: note = promoter
  source 1..229: mol_type = other DNA
gagggcctatttcccatggttccttcatatttgcatagaggatgcaagactgtcagagggacgattgcaattaacttggccataaacacaaacctattggcacaaactatgtgatatagaaagttatgattgttcaagaagtttgtaatttaaaaaaaggaccactatgtacttaccgtaactgaaaagtctttcgttttctcaaatttatatatcttccggaaaggac

SEQ ID NO: 6619 - DNA, 229 bp, synthetic construct
  misc_feature 1..229: note = promoter
  source 1..229: mol_type = other DNA
gagggcctatttcccatggttccttcatatttgcatagaggatgcaagactgtcagagggacgattgcaattaacttggccataaacacaaacctattggcacaaactatgtgatatagaaagttatgattgttcaagaagtttgtaatttaaaaaaaggaccactatgtacttaccgtaactgaaaagtctttcgttttctcaagtttatatatcttccggaaaggac

SEQ ID NO: 6620 - DNA, 229 bp, synthetic construct
  misc_feature 1..229: note = promoter
  source 1..229: mol_type = other DNA
gagggcctatttcccatggttccttcatatttgcatagaggatgcaagactgtcagagggacgattgcaattaacttggccataaacacaaacctattggcacaaactatgtgatatagaaagttatgattgttcaagaagtttgtaatttaaaaaaaggaccactatgtacttaccgtaactgaaaagtctttcgttttctcaattttatatatcttccggaaaggac

SEQ ID NO: 6621 - DNA, 229 bp, synthetic construct
  misc_feature 1..229: note = promoter
  source 1..229: mol_type = other DNA
gagggcctatttcccatggttccttcatatttgcatagaggatgcaagactgtcagagggacgattgcaattaacttggccataaacacaaacctattggcacaaactatgtgatatagaaagttatgattgttcaagaagtttgtaatttaaaaaaaggaccactatgtacttaccgtaactgaaaagtctttcgttttctcaacattatatatcttccggaaaggac

SEQ ID NO: 6622 - DNA, 229 bp, synthetic construct
  misc_feature 1..229: note = promoter
  source 1..229: mol_type = other DNA
gagggcctatttcccatggttccttcatatttgcatagaggatgcaagactgtcagagggacgattgcaattaacttggccataaacacaaacctattggcacaaactatgtgatatagaaagttatgattgttcaagaagtttgtaatttaaaaaaaggaccactatgtacttaccgtaactgaaaagtctttcgttttctcaaccttatatatcttccggaaaggac

SEQ ID NO: 6623 - DNA, 229 bp, synthetic construct
  misc_feature 1..229: note = promoter
  source 1..229: mol_type = other DNA
gagggcctatttcccatggttccttcatatttgcatagaggatgcaagactgtcagagggacgattgcaattaacttggccataaacacaaacctattggcacaaactatgtgatatagaaagttatgattgttcaagaagtttgtaatttaaaaaaaggaccactatgtacttaccgtaactgaaaagtctttcgttttctcaacgttatatatcttccggaaaggac

SEQ ID NO: 6624 - DNA, 229 bp, synthetic construct
  misc_feature 1..229: note = promoter
  source 1..229: mol_type = other DNA
gagggcctatttcccatggttccttcatatttgcatagaggatgcaagactgtcagagggacgattgcaattaacttggccataaacacaaacctattggcacaaactatgtgatatagaaagttatgattgttcaagaagtttgtaatttaaaaaaaggaccactatgtacttaccgtaactgaaaagtctttcgttttctcaactatatatatcttccggaaaggac

SEQ ID NO: 6625 - DNA, 229 bp, synthetic construct
  misc_feature 1..229: note = promoter
  source 1..229: mol_type = other DNA
gagggcctatttcccatggttccttcatatttgcatagaggatgcaagactgtcagagggacgattgcaattaacttggccataaacacaaacctattggcacaaactatgtgatatagaaagttatgattgttcaagaagtttgtaatttaaaaaaaggaccactatgtacttaccgtaactgaaaagtctttcgttttctcaactctatatatcttccggaaaggac

SEQ ID NO: 6626 - DNA, 229 bp, synthetic construct
  misc_feature 1..229: note = promoter
  source 1..229: mol_type = other DNA
gagggcctatttcccatggttccttcatatttgcatagaggatgcaagactgtcagagggacgattgcaattaacttggccataaacacaaacctattggcacaaactatgtgatatagaaagttatgattgttcaagaagtttgtaatttaaaaaaaggaccactatgtacttaccgtaactgaaaagtctttcgttttctcaactgtatatatcttccggaaaggac

SEQ ID NO: 6627 - DNA, 229 bp, synthetic construct
  misc_feature 1..229: note = promoter
  source 1..229: mol_type = other DNA
gagggcctatttcccatggttccttcatatttgcatagaggatgcaagactgtcagagggacgattgcaattaacttggccataaacacaaacctattggcacaaactatgtgatatagaaagttatgattgttcaagaagtttgtaatttaaaaaaaggaccactatgtacttaccgtaactgaaaagtctttcgttttctcaacttaatatatcttccggaaaggac

SEQ ID NO: 6628 - DNA, 229 bp, synthetic construct
  misc_feature 1..229: note = promoter
  source 1..229: mol_type = other DNA
gagggcctatttcccatggttccttcatatttgcatagaggatgcaagactgtcagagggacgattgcaattaacttggccataaacacaaacctattggcacaaactatgtgatatagaaagttatgattgttcaagaagtttgtaatttaaaaaaaggaccactatgtacttaccgtaactgaaaagtctttcgttttctcaacttcatatatcttccggaaaggac

SEQ ID NO: 6629 - DNA, 229 bp, synthetic construct
  misc_feature 1..229: note = promoter
  source 1..229: mol_type = other DNA
gagggcctatttcccatggttccttcatatttgcatagaggatgcaagactgtcagagggacgattgcaattaacttggccataaacacaaacctattggcacaaactatgtgatatagaaagttatgattgttcaagaagtttgtaatttaaaaaaaggaccactatgtacttaccgtaactgaaaagtctttcgttttctcaacttgatatatcttccggaaaggac

SEQ ID NO: 6630 - DNA, 229 bp, synthetic construct
  misc_feature 1..229: note = promoter
  source 1..229: mol_type = other DNA
gagggcctatttcccatggttccttcatatttgcatagaggatgcaagactgtcagagggacgattgcaattaacttggccataaacacaaacctattggcacaaactatgtgatatagaaagttatgattgttcaagaagtttgtaatttaaaaaaaggaccactatgtacttaccgtaactgaaaagtctttcgttttctcaactttctatatcttccggaaaggac

SEQ ID NO: 6631 - DNA, 229 bp, synthetic construct
  misc_feature 1..229: note = promoter
  source 1..229: mol_type = other DNA
gagggcctatttcccatggttccttcatatttgcatagaggatgcaagactgtcagagggacgattgcaattaacttggccataaacacaaacctattggcacaaactatgtgatatagaaagttatgattgttcaagaagtttgtaatttaaaaaaaggaccactatgtacttaccgtaactgaaaagtctttcgttttctcaactttgtatatcttccggaaaggac

SEQ ID NO: 6632 - DNA, 229 bp, synthetic construct
  misc_feature 1..229: note = promoter
  source 1..229: mol_type = other DNA
gagggcctatttcccatggttccttcatatttgcatagaggatgcaagactgtcagagggacgattgcaattaacttggccataaacacaaacctattggcacaaactatgtgatatagaaagttatgattgttcaagaagtttgtaatttaaaaaaaggaccactatgtacttaccgtaactgaaaagtctttcgttttctcaactttttatatcttccggaaaggac

SEQ ID NO: 6633 - DNA, 229 bp, synthetic construct
  misc_feature 1..229: note = promoter
  source 1..229: mol_type = other DNA
gagggcctatttcccatggttccttcatatttgcatagaggatgcaagactgtcagagggacgattgcaattaacttggccataaacacaaacctattggcacaaactatgtgatatagaaagttatgattgttcaagaagtttgtaatttaaaaaaaggaccactatgtacttaccgtaactgaaaagtctttcgttttctcaactttaaatatcttccggaaaggac

SEQ ID NO: 6634 - DNA, 229 bp, synthetic construct
  misc_feature 1..229: note = promoter
  source 1..229: mol_type = other DNA
gagggcctatttcccatggttccttcatatttgcatagaggatgcaagactgtcagagggacgattgcaattaacttggccataaacacaaacctattggcacaaactatgtgatatagaaagttatgattgttcaagaagtttgtaatttaaaaaaaggaccactatgtacttaccgtaactgaaaagtctttcgttttctcaactttacatatcttccggaaaggac

SEQ ID NO: 6635 - DNA, 229 bp, synthetic construct
  misc_feature 1..229: note = promoter
  source 1..229: mol_type = other DNA
gagggcctatttcccatggttccttcatatttgcatagaggatgcaagactgtcagagggacgattgcaattaacttggccataaacacaaacctattggcacaaactatgtgatatagaaagttatgattgttcaagaagtttgtaatttaaaaaaaggaccactatgtacttaccgtaactgaaaagtctttcgttttctcaactttagatatcttccggaaaggac

SEQ ID NO: 6636 - DNA, 229 bp, synthetic construct
  misc_feature 1..229: note = promoter
  source 1..229: mol_type = other DNA
gagggcctatttcccatggttccttcatatttgcatagaggatgcaagactgtcagagggacgattgcaattaacttggccataaacacaaacctattggcacaaactatgtgatatagaaagttatgattgttcaagaagtttgtaatttaaaaaaaggaccactatgtacttaccgtaactgaaaagtctttcgttttctcaactttatctatcttccggaaaggac

SEQ ID NO: 6637 - DNA, 229 bp, synthetic construct
  misc_feature 1..229: note = promoter
  source 1..229: mol_type = other DNA
gagggcctatttcccatggttccttcatatttgcatagaggatgcaagactgtcagagggacgattgcaattaacttggccataaacacaaacctattggcacaaactatgtgatatagaaagttatgattgttcaagaagtttgtaatttaaaaaaaggaccactatgtacttaccgtaactgaaaagtctttcgttttctcaactttatgtatcttccggaaaggac

SEQ ID NO: 6638 - DNA, 229 bp, synthetic construct
  misc_feature 1..229: note = promoter
  source 1..229: mol_type = other DNA
gagggcctatttcccatggttccttcatatttgcatagaggatgcaagactgtcagagggacgattgcaattaacttggccataaacacaaacctattggcacaaactatgtgatatagaaagttatgattgttcaagaagtttgtaatttaaaaaaaggaccactatgtacttaccgtaactgaaaagtctttcgttttctcaactttatttatcttccggaaaggac

SEQ ID NO: 6639 - DNA, 229 bp, synthetic construct
  misc_feature 1..229: note = promoter
  source 1..229: mol_type = other DNA
gagggcctatttcccatggttccttcatatttgcatagaggatgcaagactgtcagagggacgattgcaattaacttggccataaacacaaacctattggcacaaactatgtgatatagaaagttatgattgttcaagaagtttgtaatttaaaaaaaggaccactatgtacttaccgtaactgaaaagtctttcgttttctcaactttataaatcttccggaaaggac

SEQ ID NO: 6640 - DNA, 229 bp, synthetic construct
  misc_feature 1..229: note = promoter
  source 1..229: mol_type = other DNA
gagggcctatttcccatggttccttcatatttgcatagaggatgcaagactgtcagagggacgattgcaattaacttggccataaacacaaacctattggcacaaactatgtgatatagaaagttatgattgttcaagaagtttgtaatttaaaaaaaggaccactatgtacttaccgtaactgaaaagtctttcgttttctcaactttatacatcttccggaaaggac

SEQ ID NO: 6641 - DNA, 229 bp, synthetic construct
  misc_feature 1..229: note = promoter
  source 1..229: mol_type = other DNA
gagggcctatttcccatggttccttcatatttgcatagaggatgcaagactgtcagagggacgattgcaattaacttggccataaacacaaacctattggcacaaactatgtgatatagaaagttatgattgttcaagaagtttgtaatttaaaaaaaggaccactatgtacttaccgtaactgaaaagtctttcgttttctcaactttatagatcttccggaaaggac

SEQ ID NO: 6642 - DNA, 229 bp, synthetic construct
  misc_feature 1..229: note = promoter
  source 1..229: mol_type = other DNA
gagggcctatttcccatggttccttcatatttgcatagaggatgcaagactgtcagagggacgattgcaattaacttggccataaacacaaacctattggcacaaactatgtgatatagaaagttatgattgttcaagaagtttgtaatttaaaaaaaggaccactatgtacttaccgtaactgaaaagtctttcgttttctcaactttatatctcttccggaaaggac

SEQ ID NO: 6643 - DNA, 229 bp, synthetic construct
  misc_feature 1..229: note = promoter
  source 1..229: mol_type = other DNA
gagggcctatttcccatggttccttcatatttgcatagaggatgcaagactgtcagagggacgattgcaattaacttggccataaacacaaacctattggcacaaactatgtgatatagaaagttatgattgttcaagaagtttgtaatttaaaaaaaggaccactatgtacttaccgtaactgaaaagtctttcgttttctcaactttatatgtcttccggaaaggac

SEQ ID NO: 6644 - DNA, 229 bp, synthetic construct
  misc_feature 1..229: note = promoter
  source 1..229: mol_type = other DNA
gagggcctatttcccatggttccttcatatttgcatagaggatgcaagactgtcagagggacgattgcaattaacttggccataaacacaaacctattggcacaaactatgtgatatagaaagttatgattgttcaagaagtttgtaatttaaaaaaaggaccactatgtacttaccgtaactgaaaagtctttcgttttctcaactttatatttcttccggaaaggac

SEQ ID NO: 6645 - DNA, 229 bp, synthetic construct
  misc_feature 1..229: note = promoter
  source 1..229: mol_type = other DNA
gagggcctatttcccatggttccttcatatttgcatagaggatgcaagactgtcagagggacgattgcaattaacttggccataaacacaaacctattggcacaaactatgtgatatagaaagttatgattgttcaagaagtttgtaatttaaaaaaaggaccactatgtacttaccgtaactgaaaagtctttcgttttctcaactttatataacttccggaaaggac

SEQ ID NO: 6646 - DNA, 229 bp, synthetic construct
  misc_feature 1..229: note = promoter
  source 1..229: mol_type = other DNA
gagggcctatttcccatggttccttcatatttgcatagaggatgcaagactgtcagagggacgattgcaattaacttggccataaacacaaacctattggcacaaactatgtgatatagaaagttatgattgttcaagaagtttgtaatttaaaaaaaggaccactatgtacttaccgtaactgaaaagtctttcgttttctcaactttatataccttccggaaaggac

SEQ ID NO: 6647 - DNA, 229 bp, synthetic construct
  misc_feature 1..229: note = promoter
  source 1..229: mol_type = other DNA
gagggcctatttcccatggttccttcatatttgcatagaggatgcaagactgtcagagggacgattgcaattaacttggccataaacacaaacctattggcacaaactatgtgatatagaaagttatgattgttcaagaagtttgtaatttaaaaaaaggaccactatgtacttaccgtaactgaaaagtctttcgttttctcaactttatatagcttccggaaaggac

SEQ ID NO: 6648 - DNA, 229 bp, synthetic construct
  misc_feature 1..229: note = promoter
  source 1..229: mol_type = other DNA
gagggcctatttcccatggttccttcatatttgcatagaggatgcaagactgtcagagggacgattgcaattaacttggccataaacacaaacctattggcacaaactatgtgatatagaaagttatgattgttcaagaagtttgtaatttaaaaaaaggaccactatgtacttaccgtaactgaaaagtctttcgttttctcaactttatatatattccggaaaggac

SEQ ID NO: 6649 - DNA, 229 bp, synthetic construct
  misc_feature 1..229: note = promoter
  source 1..229: mol_type = other DNA
gagggcctatttcccatggttccttcatatttgcatagaggatgcaagactgtcagagggacgattgcaattaacttggccataaacacaaacctattggcacaaactatgtgatatagaaagttatgattgttcaagaagtttgtaatttaaaaaaaggaccactatgtacttaccgtaactgaaaagtctttcgttttctcaactttatatatgttccggaaaggac

SEQ ID NO: 6650 - DNA, 229 bp, synthetic construct
  misc_feature 1..229: note = promoter
  source 1..229: mol_type = other DNA
gagggcctatttcccatggttccttcatatttgcatagaggatgcaagactgtcagagggacgattgcaattaacttggccataaacacaaacctattggcacaaactatgtgatatagaaagttatgattgttcaagaagtttgtaatttaaaaaaaggaccactatgtacttaccgtaactgaaaagtctttcgttttctcaactttatatattttccggaaaggac

SEQ ID NO: 6651 - DNA, 229 bp, synthetic construct
  misc_feature 1..229: note = promoter
  source 1..229: mol_type = other DNA
gagggcctatttcccatggttccttcatatttgcatagaggatgcaagactgtcagagggacgattgcaattaacttggccataaacacaaacctattggcacaaactatgtgatatagaaagttatgattgttcaagaagtttgtaatttaaaaaaaggaccactatgtacttaccgtaactgaaaagtctttcgttttctcaactttatatatcatccggaaaggac

SEQ ID NO: 6652 - DNA, 229 bp, synthetic construct
  misc_feature 1..229: note = promoter
  source 1..229: mol_type = other DNA
gagggcctatttcccatggttccttcatatttgcatagaggatgcaagactgtcagagggacgattgcaattaacttggccataaacacaaacctattggcacaaactatgtgatatagaaagttatgattgttcaagaagtttgtaatttaaaaaaaggaccactatgtacttaccgtaactgaaaagtctttcgttttctcaactttatatatcctccggaaaggac

SEQ ID NO: 6653 - DNA, 229 bp, synthetic construct
  misc_feature 1..229: note = promoter
  source 1..229: mol_type = other DNA
gagggcctatttcccatggttccttcatatttgcatagaggatgcaagactgtcagagggacgattgcaattaacttggccataaacacaaacctattggcacaaactatgtgatatagaaagttatgattgttcaagaagtttgtaatttaaaaaaaggaccactatgtacttaccgtaactgaaaagtctttcgttttctcaactttatatatcgtccggaaaggac

SEQ ID NO: 6654 - DNA, 229 bp, synthetic construct
  misc_feature 1..229: note = promoter
  source 1..229: mol_type = other DNA
gagggcctatttcccatggttccttcatatttgcatagaggatgcaagactgtcagagggacgattgcaattaacttggccataaacacaaacctattggcacaaactatgtgatatagaaagttatgattgttcaagaagtttgtaatttaaaaaaaggaccactatgtacttaccgtaactgaaaagtctttcgttttctcaactttatatatctaccggaaaggac

SEQ ID NO: 6655 - DNA, 229 bp, synthetic construct
  misc_feature 1..229: note = promoter
  source 1..229: mol_type = other DNA
gagggcctatttcccatggttccttcatatttgcatagaggatgcaagactgtcagagggacgattgcaattaacttggccataaacacaaacctattggcacaaactatgtgatatagaaagttatgattgttcaagaagtttgtaatttaaaaaaaggaccactatgtacttaccgtaactgaaaagtctttcgttttctcaactttatatatctcccggaaaggac

SEQ ID NO: 6656 - DNA, 229 bp, synthetic construct
  misc_feature 1..229: note = promoter
  source 1..229: mol_type = other DNA
gagggcctatttcccatggttccttcatatttgcatagaggatgcaagactgtcagagggacgattgcaattaacttggccataaacacaaacctattggcacaaactatgtgatatagaaagttatgattgttcaagaagtttgtaatttaaaaaaaggaccactatgtacttaccgtaactgaaaagtctttcgttttctcaactttatatatctgccggaaaggac

SEQ ID NO: 6657 - DNA, 229 bp, synthetic construct
  misc_feature 1..229: note = promoter
  source 1..229: mol_type = other DNA
gagggcctatttcccatggttccttcatatttgcatagaggatgcaagactgtcagagggacgattgcaattaacttggccataaacacaaacctattggcacaaactatgtgatatagaaagttatgattgttcaagaagtttgtaatttaaaaaaaggaccactatgtacttaccgtaactgaaaagtctttcgttttctcaactttatatatcttacggaaaggac

SEQ ID NO: 6658 - DNA, 229 bp, synthetic construct
  misc_feature 1..229: note = promoter
  source 1..229: mol_type = other DNA
gagggcctatttcccatggttccttcatatttgcatagaggatgcaagactgtcagagggacgattgcaattaacttggccataaacacaaacctattggcacaaactatgtgatatagaaagttatgattgttcaagaagtttgtaatttaaaaaaaggaccactatgtacttaccgtaactgaaaagtctttcgttttctcaactttatatatcttgcggaaaggac

SEQ ID NO: 6659 - DNA, 229 bp, synthetic construct
  misc_feature 1..229: note = promoter
  source 1..229: mol_type = other DNA
gagggcctatttcccatggttccttcatatttgcatagaggatgcaagactgtcagagggacgattgcaattaacttggccataaacacaaacctattggcacaaactatgtgatatagaaagttatgattgttcaagaagtttgtaatttaaaaaaaggaccactatgtacttaccgtaactgaaaagtctttcgttttctcaactttatatatctttcggaaaggac

SEQ ID NO: 6660 - DNA, 229 bp, synthetic construct
  misc_feature 1..229: note = promoter
  source 1..229: mol_type = other DNA
gagggcctatttcccatggttccttcatatttgcatagaggatgcaagactgtcagagggacgattgcaattaacttggccataaacacaaacctattggcacaaactatgtgatatagaaagttatgattgttcaagaagtttgtaatttaaaaaaaggaccactatgtacttaccgtaactgaaaagtctttcgttttctcaactttatatatcttcaggaaaggac

SEQ ID NO: 6661 - DNA, 229 bp, synthetic construct
  misc_feature 1..229: note = promoter
  source 1..229: mol_type = other DNA
gagggcctatttcccatggttccttcatatttgcatagaggatgcaagactgtcagagggacgattgcaattaacttggccataaacacaaacctattggcacaaactatgtgatatagaaagttatgattgttcaagaagtttgtaatttaaaaaaaggaccactatgtacttaccgtaactgaaaagtctttcgttttctcaactttatatatcttcgggaaaggac

SEQ ID NO: 6662 - DNA, 229 bp, synthetic construct
  misc_feature 1..229: note = promoter
  source 1..229: mol_type = other DNA
gagggcctatttcccatggttccttcatatttgcatagaggatgcaagactgtcagagggacgattgcaattaacttggccataaacacaaacctattggcacaaactatgtgatatagaaagttatgattgttcaagaagtttgtaatttaaaaaaaggaccactatgtacttaccgtaactgaaaagtctttcgttttctcaactttatatatcttctggaaaggac

SEQ ID NO: 6663 - DNA, 229 bp, synthetic construct
  misc_feature 1..229: note = promoter
  source 1..229: mol_type = other DNA
gagggcctatttcccatggttccttcatatttgcatagaggatgcaagactgtcagagggacgattgcaattaacttggccataaacacaaacctattggcacaaactatgtgatatagaaagttatgattgttcaagaagtttgtaatttaaaaaaaggaccactatgtacttaccgtaactgaaaagtctttcgttttctcaactttatatatcttccagaaaggac

SEQ ID NO: 6664 - DNA, 229 bp, synthetic construct
  misc_feature 1..229: note = promoter
  source 1..229: mol_type = other DNA
gagggcctatttcccatggttccttcatatttgcatagaggatgcaagactgtcagagggacgattgcaattaacttggccataaacacaaacctattggcacaaactatgtgatatagaaagttatgattgttcaagaagtttgtaatttaaaaaaaggaccactatgtacttaccgtaactgaaaagtctttcgttttctcaactttatatatcttcccgaaaggac

SEQ ID NO: 6665 - DNA, 229 bp, synthetic construct
  misc_feature 1..229: note = promoter
  source 1..229: mol_type = other DNA
gagggcctatttcccatggttccttcatatttgcatagaggatgcaagactgtcagagggacgattgcaattaacttggccataaacacaaacctattggcacaaactatgtgatatagaaagttatgattgttcaagaagtttgtaatttaaaaaaaggaccactatgtacttaccgtaactgaaaagtctttcgttttctcaactttatatatcttcctgaaaggac

SEQ ID NO: 6666 - DNA, 229 bp, synthetic construct
  misc_feature 1..229: note = promoter
  source 1..229: mol_type = other DNA
gagggcctatttcccatggttccttcatatttgcatagaggatgcaagactgtcagagggacgattgcaattaacttggccataaacacaaacctattggcacaaactatgtgatatagaaagttatgattgttcaagaagtttgtaatttaaaaaaaggaccactatgtacttaccgtaactgaaaagtctttcgttttctcaactttatatatcttccgaaaaggac

SEQ ID NO: 6667 - DNA, 229 bp, synthetic construct
  misc_feature 1..229: note = promoter
  source 1..229: mol_type = other DNA
gagggcctatttcccatggttccttcatatttgcatagaggatgcaagactgtcagagggacgattgcaattaacttggccataaacacaaacctattggcacaaactatgtgatatagaaagttatgattgttcaagaagtttgtaatttaaaaaaaggaccactatgtacttaccgtaactgaaaagtctttcgttttctcaactttatatatcttccgcaaaggac

SEQ ID NO: 6668 - DNA, 229 bp, synthetic construct
  misc_feature 1..229: note = promoter
  source 1..229: mol_type = other DNA
gagggcctatttcccatggttccttcatatttgcatagaggatgcaagactgtcagagggacgattgcaattaacttggccataaacacaaacctattggcacaaactatgtgatatagaaagttatgattgttcaagaagtttgtaatttaaaaaaaggaccactatgtacttaccgtaactgaaaagtctttcgttttctcaactttatatatcttccgtaaaggac

SEQ ID NO: 6669 - DNA, 229 bp, synthetic construct
  misc_feature 1..229: note = promoter
  source 1..229: mol_type = other DNA
gagggcctatttcccatggttccttcatatttgcatagaggatgcaagactgtcagagggacgattgcaattaacttggccataaacacaaacctattggcacaaactatgtgatatagaaagttatgattgttcaagaagtttgtaatttaaaaaaaggaccactatgtacttaccgtaactgaaaagtctttcgttttctcaactttatatatcttccggcaaggac

SEQ ID NO: 6670 - DNA, 229 bp, synthetic construct
  misc_feature 1..229: note = promoter
  source 1..229: mol_type = other DNA
gagggcctatttcccatggttccttcatatttgcatagaggatgcaagactgtcagagggacgattgcaattaacttggccataaacacaaacctattggcacaaactatgtgatatagaaagttatgattgttcaagaagtttgtaatttaaaaaaaggaccactatgtacttaccgtaactgaaaagtctttcgttttctcaactttatatatcttccgggaaggac

SEQ ID NO: 6671 - DNA, 229 bp, synthetic construct
  misc_feature 1..229: note = promoter
  source 1..229: mol_type = other DNA
gagggcctatttcccatggttccttcatatttgcatagaggatgcaagactgtcagagggacgattgcaattaacttggccataaacacaaacctattggcacaaactatgtgatatagaaagttatgattgttcaagaagtttgtaatttaaaaaaaggaccactatgtacttaccgtaactgaaaagtctttcgttttctcaactttatatatcttccggtaaggac

SEQ ID NO: 6672 - DNA, 229 bp, synthetic construct
  misc_feature 1..229: note = promoter
  source 1..229: mol_type = other DNA
gagggcctatttcccatggttccttcatatttgcatagaggatgcaagactgtcagagggacgattgcaattaacttggccataaacacaaacctattggcacaaactatgtgatatagaaagttatgattgttcaagaagtttgtaatttaaaaaaaggaccactatgtacttaccgtaactgaaaagtctttcgttttctcaactttatatatcttccggacaggac

SEQ ID NO: 6673 - DNA, 229 bp, synthetic construct
  misc_feature 1..229: note = promoter
  source 1..229: mol_type = other DNA
gagggcctatttcccatggttccttcatatttgcatagaggatgcaagactgtcagagggacgattgcaattaacttggccataaacacaaacctattggcacaaactatgtgatatagaaagttatgattgttcaagaagtttgtaatttaaaaaaaggaccactatgtacttaccgtaactgaaaagtctttcgttttctcaactttatatatcttccggagaggac

SEQ ID NO: 6674 - DNA, 229 bp, synthetic construct
  misc_feature 1..229: note = promoter
  source 1..229: mol_type = other DNA
gagggcctatttcccatggttccttcatatttgcatagaggatgcaagactgtcagagggacgattgcaattaacttggccataaacacaaacctattggcacaaactatgtgatatagaaagttatgattgttcaagaagtttgtaatttaaaaaaaggaccactatgtacttaccgtaactgaaaagtctttcgttttctcaactttatatatcttccggataggac

SEQ ID NO: 6675 - DNA, 229 bp, synthetic construct
  misc_feature 1..229: note = promoter
  source 1..229: mol_type = other DNA
gagggcctatttcccatggttccttcatatttgcatagaggatgcaagactgtcagagggacgattgcaattaacttggccataaacacaaacctattggcacaaactatgtgatatagaaagttatgattgttcaagaagtttgtaatttaaaaaaaggaccactatgtacttaccgtaactgaaaagtctttcgttttctcaactttatatatcttccggaacggac

SEQ ID NO: 6676 - DNA, 229 bp, synthetic construct
  misc_feature 1..229: note = promoter
  source 1..229: mol_type = other DNA
gagggcctatttcccatggttccttcatatttgcatagaggatgcaagactgtcagagggacgattgcaattaacttggccataaacacaaacctattggcacaaactatgtgatatagaaagttatgattgttcaagaagtttgtaatttaaaaaaaggaccactatgtacttaccgtaactgaaaagtctttcgttttctcaactttatatatcttccggaagggac

SEQ ID NO: 6677 - DNA, 229 bp, synthetic construct
  misc_feature 1..229: note = promoter
  source 1..229: mol_type = other DNA
gagggcctatttcccatggttccttcatatttgcatagaggatgcaagactgtcagagggacgattgcaattaacttggccataaacacaaacctattggcacaaactatgtgatatagaaagttatgattgttcaagaagtttgtaatttaaaaaaaggaccactatgtacttaccgtaactgaaaagtctttcgttttctcaactttatatatcttccggaatggac

SEQ ID NO: 6678 - DNA, 229 bp, synthetic construct
  misc_feature 1..229: note = promoter
  source 1..229: mol_type = other DNA
gagggcctatttcccatggttccttcatatttgcatagaggatgcaagactgtcagagggacgattgcaattaacttggccataaacacaaacctattggcacaaactatgtgatatagaaagttatgattgttcaagaagtttgtaatttaaaaaaaggaccactatgtacttaccgtaactgaaaagtctttcgttttctcaactttatatatcttccggaaaagac

SEQ ID NO: 6679 - DNA, 229 bp, synthetic construct
  misc_feature 1..229: note = promoter
  source 1..229: mol_type = other DNA
gagggcctatttcccatggttccttcatatttgcatagaggatgcaagactgtcagagggacgattgcaattaacttggccataaacacaaacctattggcacaaactatgtgatatagaaagttatgattgttcaagaagtttgtaatttaaaaaaaggaccactatgtacttaccgtaactgaaaagtctttcgttttctcaactttatatatcttccggaaacgac

SEQ ID NO: 6680 - DNA, 229 bp, synthetic construct
  misc_feature 1..229: note = promoter
  source 1..229: mol_type = other DNA
gagggcctatttcccatggttccttcatatttgcatagaggatgcaagactgtcagagggacgattgcaattaacttggccataaacacaaacctattggcacaaactatgtgatatagaaagttatgattgttcaagaagtttgtaatttaaaaaaaggaccactatgtacttaccgtaactgaaaagtctttcgttttctcaactttatatatcttccggaaatgac

SEQ ID NO: 6681 - DNA, 229 bp, synthetic construct
  misc_feature 1..229: note = promoter
  source 1..229: mol_type = other DNA
gagggcctatttcccatggttccttcatatttgcatagaggatgcaagactgtcagagggacgattgcaattaacttggccataaacacaaacctattggcacaaactatgtgatatagaaagttatgattgttcaagaagtttgtaatttaaaaaaaggaccactatgtacttaccgtaactgaaaagtctttcgttttctcaactttatatatcttccggaaagaac

SEQ ID NO: 6682 - DNA, 229 bp, synthetic construct
  misc_feature 1..229: note = promoter
  source 1..229: mol_type = other DNA
gagggcctatttcccatggttccttcatatttgcatagaggatgcaagactgtcagagggacgattgcaattaacttggccataaacacaaacctattggcacaaactatgtgatatagaaagttatgattgttcaagaagtttgtaatttaaaaaaaggaccactatgtacttaccgtaactgaaaagtctttcgttttctcaactttatatatcttccggaaagcac

SEQ ID NO: 6683 - DNA, 229 bp, synthetic construct
  misc_feature 1..229: note = promoter
  source 1..229: mol_type = other DNA
gagggcctatttcccatggttccttcatatttgcatagaggatgcaagactgtcagagggacgattgcaattaacttggccataaacacaaacctattggcacaaactatgtgatatagaaagttatgattgttcaagaagtttgtaatttaaaaaaaggaccactatgtacttaccgtaactgaaaagtctttcgttttctcaactttatatatcttccggaaagtac

SEQ ID NO: 6684 - DNA, 229 bp, synthetic construct
  misc_feature 1..229: note = promoter
  source 1..229: mol_type = other DNA
gagggcctatttcccatggttccttcatatttgcatagaggatgcaagactgtcagagggacgattgcaattaacttggccataaacacaaacctattggcacaaactatgtgatatagaaagttatgattgttcaagaagtttgtaatttaaaaaaaggaccactatgtacttaccgtaactgaaaagtctttcgttttctcaactttatatatcttccggaaaggcc

SEQ ID NO: 6685 - DNA, 229 bp, synthetic construct
  misc_feature 1..229: note = promoter
  source 1..229: mol_type = other DNA
gagggcctatttcccatggttccttcatatttgcatagaggatgcaagactgtcagagggacgattgcaattaacttggccataaacacaaacctattggcacaaactatgtgatatagaaagttatgattgttcaagaagtttgtaatttaaaaaaaggaccactatgtacttaccgtaactgaaaagtctttcgttttctcaactttatatatcttccggaaagggc

SEQ ID NO: 6686 - DNA, 229 bp, synthetic construct
  misc_feature 1..229: note = promoter
  source 1..229: mol_type = other DNA
gagggcctatttcccatggttccttcatatttgcatagaggatgcaagactgtcagagggacgattgcaattaacttggccataaacacaaacctattggcacaaactatgtgatatagaaagttatgattgttcaagaagtttgtaatttaaaaaaaggaccactatgtacttaccgtaactgaaaagtctttcgttttctcaactttatatatcttccggaaaggtc

SEQ ID NO: 6687 - DNA, 229 bp, synthetic construct
  misc_feature 1..229: note = promoter
  source 1..229: mol_type = other DNA
gagggcctatttcccatggttccttcatatttgcatagaggatgcaagactgtcagagggacgattgcaattaacttggccataaacacaaacctattggcacaaactatgtgatatagaaagttatgattgttcaagaagtttgtaatttaaaaaaaggaccactatgtacttaccgtaactgaaaagtctttcgttttctcaactttatatatcttccggaaaggaa

SEQ ID NO: 6688 - DNA, 229 bp, synthetic construct
  misc_feature 1..229: note = promoter
  source 1..229: mol_type = other DNA
gagggcctatttcccatggttccttcatatttgcatagaggatgcaagactgtcagagggacgattgcaattaacttggccataaacacaaacctattggcacaaactatgtgatatagaaagttatgattgttcaagaagtttgtaatttaaaaaaaggaccactatgtacttaccgtaactgaaaagtctttcgttttctcaactttatatatcttccggaaaggag

SEQ ID NO: 6689 - DNA, 229 bp, synthetic construct
  misc_feature 1..229: note = promoter
  source 1..229: mol_type = other DNA
gagggcctatttcccatggttccttcatatttgcatagaggatgcaagactgtcagagggacgattgcaattaacttggccataaacacaaacctattggcacaaactatgtgatatagaaagttatgattgttcaagaagtttgtaatttaaaaaaaggaccactatgtacttaccgtaactgaaaagtctttcgttttctcaactttatatatcttccggaaaggat

SEQ ID NO: 6690 - DNA, 228 bp, synthetic construct
  misc_feature 1..228: note = promoter
  source 1..228: mol_type = other DNA
agggcctatttcccatggttccttcatatttgcatagaggatgcaagactgtcagagggacgattgcaattaacttggccataaacacaaacctattggcacaaactatgtgatatagaaagttatgattgttcaagaagtttgtaatttaaaaaaaggaccactatgtacttaccgtaactgaaaagtctttcgttttctcaactttatatatcttccggaaaggac

SEQ ID NO: 6691 - DNA, 228 bp, synthetic construct
  misc_feature 1..228: note = promoter
  source 1..228: mol_type = other DNA
ggggcctatttcccatggttccttcatatttgcatagaggatgcaagactgtcagagggacgattgcaattaacttggccataaacacaaacctattggcacaaactatgtgatatagaaagttatgattgttcaagaagtttgtaatttaaaaaaaggaccactatgtacttaccgtaactgaaaagtctttcgttttctcaactttatatatcttccggaaaggac

SEQ ID NO: 6692 - DNA, 228 bp, synthetic construct
  misc_feature 1..228: note = promoter
  source 1..228: mol_type = other DNA
gaggcctatttcccatggttccttcatatttgcatagaggatgcaagactgtcagagggacgattgcaattaacttggccataaacacaaacctattggcacaaactatgtgatatagaaagttatgattgttcaagaagtttgtaatttaaaaaaaggaccactatgtacttaccgtaactgaaaagtctttcgttttctcaactttatatatcttccggaaaggac

SEQ ID NO: 6693 - DNA, 228 bp, synthetic construct; identical to SEQ ID NO: 6692
  misc_feature 1..228: note = promoter
  source 1..228: mol_type = other DNA

SEQ ID NO: 6694 - DNA, 228 bp, synthetic construct; identical to SEQ ID NO: 6692
  misc_feature 1..228: note = promoter
  source 1..228: mol_type = other DNA

SEQ ID NO: 6695 - DNA, 228 bp, synthetic construct
  misc_feature 1..228: note = promoter
  source 1..228: mol_type = other DNA
gagggctatttcccatggttccttcatatttgcatagaggatgcaagactgtcagagggacgattgcaattaacttggccataaacacaaacctattggcacaaactatgtgatatagaaagttatgattgttcaagaagtttgtaatttaaaaaaaggaccactatgtacttaccgtaactgaaaagtctttcgttttctcaactttatatatcttccggaaaggac

SEQ ID NO: 6696 - DNA, 228 bp, synthetic construct; identical to SEQ ID NO: 6695
  misc_feature 1..228: note = promoter
  source 1..228: mol_type = other DNA

SEQ ID NO: 6697 - DNA, 228 bp, synthetic construct
  misc_feature 1..228: note = promoter
  source 1..228: mol_type = other DNA
gagggccatttcccatggttccttcatatttgcatagaggatgcaagactgtcagagggacgattgcaattaacttggccataaacacaaacctattggcacaaactatgtgatatagaaagttatgattgttcaagaagtttgtaatttaaaaaaaggaccactatgtacttaccgtaactgaaaagtctttcgttttctcaactttatatatcttccggaaaggac

SEQ ID NO: 6698 - DNA, 228 bp, synthetic construct
  misc_feature 1..228: note = promoter
  source 1..228: mol_type = other DNA
gagggccttttcccatggttccttcatatttgcatagaggatgcaagactgtcagagggacgattgcaattaacttggccataaacacaaacctattggcacaaactatgtgatatagaaagttatgattgttcaagaagtttgtaatttaaaaaaaggaccactatgtacttaccgtaactgaaaagtctttcgttttctcaactttatatatcttccggaaaggac

SEQ ID NO: 6699 - DNA, 228 bp, synthetic construct
  misc_feature 1..228: note = promoter
  source 1..228: mol_type = other DNA
gagggcctattcccatggttccttcatatttgcatagaggatgcaagactgtcagagggacgattgcaattaacttggccataaacacaaacctattggcacaaactatgtgatatagaaagttatgattgttcaagaagtttgtaatttaaaaaaaggaccactatgtacttaccgtaactgaaaagtctttcgttttctcaactttatatatcttccggaaaggac

SEQ ID NO: 6700 - DNA, 228 bp, synthetic construct; identical to SEQ ID NO: 6699
  misc_feature 1..228: note = promoter
  source 1..228: mol_type = other DNA

SEQ ID NO: 6701 - DNA, 228 bp, synthetic construct; identical to SEQ ID NO: 6699
  misc_feature 1..228: note = promoter
  source 1..228: mol_type = other DNA

SEQ ID NO: 6702 - DNA, 228 bp, synthetic construct
  misc_feature 1..228: note = promoter
  source 1..228: mol_type = other DNA
gagggcctatttccatggttccttcatatttgcatagaggatgcaagactgtcagagggacgattgcaattaacttggccataaacacaaacctattggcacaaactatgtgatatagaaagttatgattgttcaagaagtttgtaatttaaaaaaaggaccactatgtacttaccgtaactgaaaagtctttcgttttctcaactttatatatcttccggaaaggac

SEQ ID NO: 6703 - DNA, 228 bp, synthetic construct; identical to SEQ ID NO: 6702
  misc_feature 1..228: note = promoter
  source 1..228: mol_type = other DNA

SEQ ID NO: 6704 - DNA, 228 bp, synthetic construct; identical to SEQ ID NO: 6702
  misc_feature 1..228: note = promoter
  source 1..228: mol_type = other DNA

SEQ ID NO: 6705 - DNA, 228 bp, synthetic construct
  misc_feature 1..228: note = promoter
  source 1..228: mol_type = other DNA
gagggcctatttccctggttccttcatatttgcatagaggatgcaagactgtcagagggacgattgcaattaacttggccataaacacaaacctattggcacaaactatgtgatatagaaagttatgattgttcaagaagtttgtaatttaaaaaaaggaccactatgtacttaccgtaactgaaaagtctttcgttttctcaactttatatatcttccggaaaggac

SEQ ID NO: 6706 - DNA, 228 bp, synthetic construct
  misc_feature 1..228: note = promoter
  source 1..228: mol_type = other DNA
gagggcctatttcccaggttccttcatatttgcatagaggatgcaagactgtcagagggacgattgcaattaacttggccataaacacaaacctattggcacaaactatgtgatatagaaagttatgattgttcaagaagtttgtaatttaaaaaaaggaccactatgtacttaccgtaactgaaaagtctttcgttttctcaactttatatatcttccggaaaggac

SEQ ID NO: 6707 - DNA, 228 bp, synthetic construct
  misc_feature 1..228: note = promoter
  source 1..228: mol_type = other DNA
gagggcctatttcccatgttccttcatatttgcatagaggatgcaagactgtcagagggacgattgcaattaacttggccataaacacaaacctattggcacaaactatgtgatatagaaagttatgattgttcaagaagtttgtaatttaaaaaaaggaccactatgtacttaccgtaactgaaaagtctttcgttttctcaactttatatatcttccggaaaggac

SEQ ID NO: 6708 - DNA, 228 bp, synthetic construct; identical to SEQ ID NO: 6707
  misc_feature 1..228: note = promoter
  source 1..228: mol_type = other DNA

SEQ ID NO: 6709 - DNA, 228 bp, synthetic construct
  misc_feature 1..228: note = promoter
  source 1..228: mol_type = other DNA
gagggcctatttcccatggtccttcatatttgcatagaggatgcaagactgtcagagggacgattgcaattaacttggccataaacacaaacctattggcacaaactatgtgatatagaaagttatgattgttcaagaagtttgtaatttaaaaaaaggaccactatgtacttaccgtaactgaaaagtctttcgttttctcaactttatatatcttccggaaaggac

SEQ ID NO: 6710 - DNA, 228 bp, synthetic construct; identical to SEQ ID NO: 6709
  misc_feature 1..228: note = promoter
  source 1..228: mol_type = other DNA

SEQ ID NO: 6711 - DNA, 228 bp, synthetic construct
  misc_feature 1..228: note = promoter
  source 1..228: mol_type = other DNA
gagggcctatttcccatggttcttcatatttgcatagaggatgcaagactgtcagagggacgattgcaattaacttggccataaacacaaacctattggcacaaactatgtgatatagaaagttatgattgttcaagaagtttgtaatttaaaaaaaggaccactatgtacttaccgtaactgaaaagtctttcgttttctcaactttatatatcttccggaaaggac

SEQ ID NO: 6712 - DNA, 228 bp, synthetic construct; identical to SEQ ID NO: 6711
  misc_feature 1..228: note = promoter
  source 1..228: mol_type = other DNA

SEQ ID NO: 6713 - DNA, 228 bp, synthetic construct
  misc_feature 1..228: note = promoter
  source 1..228: mol_type = other DNA
gagggcctatttcccatggttcctcatatttgcatagaggatgcaagactgtcagagggacgattgcaattaacttggccataaacacaaacctattggcacaaactatgtgatatagaaagttatgattgttcaagaagtttgtaatttaaaaaaaggaccactatgtacttaccgtaactgaaaagtctttcgttttctcaactttatatatcttccggaaaggac

SEQ ID NO: 6714 - DNA, 228 bp, synthetic construct; identical to SEQ ID NO: 6713
  misc_feature 1..228: note = promoter
  source 1..228: mol_type = other DNA

SEQ ID NO: 6715 - DNA, 228 bp, synthetic construct
  misc_feature 1..228: note = promoter
  source 1..228: mol_type = other DNA
gagggcctatttcccatggttccttatatttgcatagaggatgcaagactgtcagagggacgattgcaattaacttggccataaacacaaacctattggcacaaactatgtgatatagaaagttatgattgttcaagaagtttgtaatttaaaaaaaggaccactatgtacttaccgtaactgaaaagtctttcgttttctcaactttatatatcttccggaaaggac

SEQ ID NO: 6716 - DNA, 228 bp, synthetic construct
  misc_feature 1..228: note = promoter
  source 1..228: mol_type = other DNA
gagggcctatttcccatggttccttctatttgcatagaggatgcaagactgtcagagggacgattgcaattaacttggccataaacacaaacctattggcacaaactatgtgatatagaaagttatgattgttcaagaagtttgtaatttaaaaaaaggaccactatgtacttaccgtaactgaaaagtctttcgttttctcaactttatatatcttccggaaaggac

SEQ ID NO: 6717 - DNA, 228 bp, synthetic construct
  misc_feature 1..228: note = promoter
  source 1..228: mol_type = other DNA
gagggcctatttcccatggttccttcaatttgcatagaggatgcaagactgtcagagggacgattgcaattaacttggccataaacacaaacctattggcacaaactatgtgatatagaaagttatgattgttcaagaagtttgtaatttaaaaaaaggaccactatgtacttaccgtaactgaaaagtctttcgttttctcaactttatatatcttccggaaaggac

SEQ ID NO: 6718 - DNA, 228 bp, synthetic construct
  misc_feature 1..228: note = promoter
  source 1..228: mol_type = other DNA
gagggcctatttcccatggttccttcattttgcatagaggatgcaagactgtcagagggacgattgcaattaacttggccataaacacaaacctattggcacaaactatgtgatatagaaagttatgattgttcaagaagtttgtaatttaaaaaaaggaccactatgtacttaccgtaactgaaaagtctttcgttttctcaactttatatatcttccggaaaggac

SEQ ID NO: 6719 - DNA, 228 bp, synthetic construct
  misc_feature 1..228: note = promoter
  source 1..228: mol_type = other DNA
gagggcctatttcccatggttccttcatattgcatagaggatgcaagactgtcagagggacgattgcaattaacttggccataaacacaaacctattggcacaaactatgtgatatagaaagttatgattgttcaagaagtttgtaatttaaaaaaaggaccactatgtacttaccgtaactgaaaagtctttcgttttctcaactttatatatcttccggaaaggac

SEQ ID NO: 6720 - DNA, 228 bp, synthetic construct; identical to SEQ ID NO: 6719
  misc_feature 1..228: note = promoter
  source 1..228: mol_type = other DNA

SEQ ID NO: 6721 - DNA, 228 bp, synthetic construct; identical to SEQ ID NO: 6719
  misc_feature 1..228: note = promoter
  source 1..228: mol_type = other DNA

SEQ ID NO: 6722 - DNA, 228 bp, synthetic construct
  misc_feature 1..228: note = promoter
  source 1..228: mol_type = other DNA
gagggcctatttcccatggttccttcatatttcatagaggatgcaagactgtcagagggacgattgcaattaacttggccataaacacaaacctattggcacaaactatgtgatatagaaagttatgattgttcaagaagtttgtaatttaaaaaaaggaccactatgtacttaccgtaactgaaaagtctttcgttttctcaactttatatatcttccggaaaggac

SEQ ID NO: 6723 - DNA, 228 bp, synthetic construct
  misc_feature 1..228: note = promoter
  source 1..228: mol_type = other DNA
gagggcctatttcccatggttccttcatatttgatagaggatgcaagactgtcagagggacgattgcaattaacttggccataaacacaaacctattggcacaaactatgtgatatagaaagttatgattgttcaagaagtttgtaatttaaaaaaaggaccactatgtacttaccgtaactgaaaagtctttcgttttctcaactttatatatcttccggaaaggac

SEQ ID NO: 6724 - DNA, 228 bp, synthetic construct
  misc_feature 1..228: note = promoter
  source 1..228: mol_type = other DNA
gagggcctatttcccatggttccttcatatttgctagaggatgcaagactgtcagagggacgattgcaattaacttggccataaacacaaacctattggcacaaactatgtgatatagaaagttatgattgttcaagaagtttgtaatttaaaaaaaggaccactatgtacttaccgtaactgaaaagtctttcgttttctcaactttatatatcttccggaaaggac

SEQ ID NO: 6725 - DNA, 228 bp, synthetic construct
  misc_feature 1..228: note = promoter
  source 1..228: mol_type = other DNA
gagggcctatttcccatggttccttcatatttgcaagaggatgcaagactgtcagagggacgattgcaattaacttggccataaacacaaacctattggcacaaactatgtgatatagaaagttatgattgttcaagaagtttgtaatttaaaaaaaggaccactatgtacttaccgtaactgaaaagtctttcgttttctcaactttatatatcttccggaaaggac

SEQ ID NO: 6726 - DNA, 228 bp, synthetic construct
  misc_feature 1..228: note = promoter
  source 1..228: mol_type = other DNA
gagggcctatttcccatggttccttcatatttgcatgaggatgcaagactgtcagagggacgattgcaattaacttggccataaacacaaacctattggcacaaactatgtgatatagaaagttatgattgttcaagaagtttgtaatttaaaaaaaggaccactatgtacttaccgtaactgaaaagtctttcgttttctcaactttatatatcttccggaaaggac

SEQ ID NO: 6727 - DNA, 228 bp, synthetic construct
  misc_feature 1..228: note = promoter
  source 1..228: mol_type = other DNA
gagggcctatttcccatggttccttcatatttgcataaggatgcaagactgtcagagggacgattgcaattaacttggccataaacacaaacctattggcacaaactatgtgatatagaaagttatgattgttcaagaagtttgtaatttaaaaaaaggaccactatgtacttaccgtaactgaaaagtctttcgttttctcaactttatatatcttccggaaaggac

SEQ ID NO: 6728 - DNA, 228 bp, synthetic construct
  misc_feature 1..228: note = promoter
  source 1..228: mol_type = other DNA
gagggcctatttcccatggttccttcatatttgcatagggatgcaagactgtcagagggacgattgcaattaacttggccataaacacaaacctattggcacaaactatgtgatatagaaagttatgattgttcaagaagtttgtaatttaaaaaaaggaccactatgtacttaccgtaactgaaaagtctttcgttttctcaactttatatatcttccggaaaggac

SEQ ID NO: 6729 - DNA, 228 bp, synthetic construct
  misc_feature 1..228: note = promoter
  source 1..228: mol_type = other DNA
gagggcctatttcccatggttccttcatatttgcatagagatgcaagactgtcagagggacgattgcaattaacttggccataaacacaaacctattggcacaaactatgtgatatagaaagttatgattgttcaagaagtttgtaatttaaaaaaaggaccactatgtacttaccgtaactgaaaagtctttcgttttctcaactttatatatcttccggaaaggac

SEQ ID NO: 6730 - DNA, 228 bp, synthetic construct; identical to SEQ ID NO: 6729
  misc_feature 1..228: note = promoter
  source 1..228: mol_type = other DNA

SEQ ID NO: 6731 - DNA, 228 bp, synthetic construct
  misc_feature 1..228: note = promoter
  source 1..228: mol_type = other DNA
gagggcctatttcccatggttccttcatatttgcatagaggtgcaagactgtcagagggacgattgcaattaacttggccataaacacaaacctattggcacaaactatgtgatatagaaagttatgattgttcaagaagtttgtaatttaaaaaaaggaccactatgtacttaccgtaactgaaaagtctttcgttttctcaactttatatatcttccggaaaggac

SEQ ID NO: 6732 - DNA, 228 bp, synthetic construct
  misc_feature 1..228: note = promoter
  source 1..228: mol_type = other DNA
gagggcctatttcccatggttccttcatatttgcatagaggagcaagactgtcagagggacgattgcaattaacttggccataaacacaaacctattggcacaaactatgtgatatagaaagttatgattgttcaagaagtttgtaatttaaaaaaaggaccactatgtacttaccgtaactgaaaagtctttcgttttctcaactttatatatcttccggaaaggac

SEQ ID NO: 6733 - DNA, 228 bp, synthetic construct
  misc_feature 1..228: note = promoter
  source 1..228: mol_type = other DNA
gagggcctatttcccatggttccttcatatttgcatagaggatcaagactgtcagagggacgattgcaattaacttggccataaacacaaacctattggcacaaactatgtgatatagaaagttatgattgttcaagaagtttgtaatttaaaaaaaggaccactatgtacttaccgtaactgaaaagtctttcgttttctcaactttatatatcttccggaaaggac

SEQ ID NO: 6734 - DNA, 228 bp, synthetic construct
  misc_feature 1..228: note = promoter
  source 1..228: mol_type = other DNA
gagggcctatttcccatggttccttcatatttgcatagaggatgaagactgtcagagggacgattgcaattaacttggccataaacacaaacctattggcacaaactatgtgatatagaaagttatgattgttcaagaagtttgtaatttaaaaaaaggaccactatgtacttaccgtaactgaaaagtctttcgttttctcaactttatatatcttccggaaaggac

SEQ ID NO: 6735 - DNA, 228 bp, synthetic construct
  misc_feature 1..228: note = promoter
  source 1..228: mol_type = other DNA
gagggcctatttcccatggttccttcatatttgcatagaggatgcagactgtcagagggacgattgcaattaacttggccataaacacaaacctattggcacaaactatgtgatatagaaagttatgattgttcaagaagtttgtaatttaaaaaaaggaccactatgtacttaccgtaactgaaaagtctttcgttttctcaactttatatatcttccggaaaggac

SEQ ID NO: 6736 - DNA, 228 bp, synthetic construct; identical to SEQ ID NO: 6735
  misc_feature 1..228: note = promoter
  source 1..228: mol_type = other DNA

SEQ ID NO: 6737 - DNA, 228 bp, synthetic construct
  misc_feature 1..228: note = promoter
  source 1..228: mol_type = other DNA
gagggcctatttcccatggttccttcatatttgcatagaggatgcaaactgtcagagggacgattgcaattaacttggccataaacacaaacctattggcacaaactatgtgatatagaaagttatgattgttcaagaagtttgtaatttaaaaaaaggaccactatgtacttaccgtaactgaaaagtctttcgttttctcaactttatatatcttccggaaaggac

SEQ ID NO: 6738 - DNA, 228 bp, synthetic construct
  misc_feature 1..228: note = promoter
  source 1..228: mol_type = other DNA
gagggcctatttcccatggttccttcatatttgcatagaggatgcaagctgtcagagggacgattgcaattaacttggccataaacacaaacctattggcacaaactatgtgatatagaaagttatgattgttcaagaagtttgtaatttaaaaaaaggaccactatgtacttaccgtaactgaaaagtctttcgttttctcaactttatatatcttccggaaaggac

SEQ ID NO: 6739 - DNA, 228 bp, synthetic construct
  misc_feature 1..228: note = promoter
  source 1..228: mol_type = other DNA
gagggcctatttcccatggttccttcatatttgcatagaggatgcaagatgtcagagggacgattgcaattaacttggccataaacacaaacctattggcacaaactatgtgatatagaaagttatgattgttcaagaagtttgtaatttaaaaaaaggaccactatgtacttaccgtaactgaaaagtctttcgttttctcaactttatatatcttccggaaaggac

SEQ ID NO: 6740 - DNA, 228 bp, synthetic construct
  misc_feature 1..228: note = promoter
  source 1..228: mol_type = other DNA
gagggcctatttcccatggttccttcatatttgcatagaggatgcaagacgtcagagggacgattgcaattaacttggccataaacacaaacctattggcacaaactatgtgatatagaaagttatgattgttcaagaagtttgtaatttaaaaaaaggaccactatgtacttaccgtaactgaaaagtctttcgttttctcaactttatatatcttccggaaaggac

SEQ ID NO: 6741 - DNA, 228 bp, synthetic construct
  misc_feature 1..228: note = promoter
  source 1..228: mol_type = other DNA
gagggcctatttcccatggttccttcatatttgcatagaggatgcaagacttcagagggacgattgcaattaacttggccataaacacaaacctattggcacaaactatgtgatatagaaagttatgattgttcaagaagtttgtaatttaaaaaaaggaccactatgtacttaccgtaactgaaaagtctttcgttttctcaactttatatatcttccggaaaggac

SEQ ID NO: 6742 - DNA, 228 bp, synthetic construct
  misc_feature 1..228: note = promoter
  source 1..228: mol_type = other DNA
gagggcctatttcccatggttccttcatatttgcatagaggatgcaagactgcagagggacgattgcaattaacttggccataaacacaaacctattggcacaaactatgtgatatagaaagttatgattgttcaagaagtttgtaatttaaaaaaaggaccactatgtacttaccgtaactgaaaagtctttcgttttctcaactttatatatcttccggaaaggac

SEQ ID NO: 6743 - DNA, 228 bp, synthetic construct
  misc_feature 1..228: note = promoter
  source 1..228: mol_type = other DNA
gagggcctatttcccatggttccttcatatttgcatagaggatgcaagactgtagagggacgattgcaattaacttggccataaacacaaacctattggcacaaactatgtgatatagaaagttatgattgttcaagaagtttgtaatttaaaaaaaggaccactatgtacttaccgtaactgaaaagtctttcgttttctcaactttatatatcttccggaaaggac

SEQ ID NO: 6744 - DNA, 228 bp, synthetic construct
  misc_feature 1..228: note = promoter
  source 1..228: mol_type = other DNA
gagggcctatttcccatggttccttcatatttgcatagaggatgcaagactgtcgagggacgattgcaattaacttggccataaacacaaacctattggcacaaactatgtgatatagaaagttatgattgttcaagaagtttgtaatttaaaaaaaggaccactatgtacttaccgtaactgaaaagtctttcgttttctcaactttatatatcttccggaaaggac

SEQ ID NO: 6745 - DNA, 228 bp, synthetic construct
  misc_feature 1..228: note = promoter
  source 1..228: mol_type = other DNA
gagggcctatttcccatggttccttcatatttgcatagaggatgcaagactgtcaagggacgattgcaattaacttggccataaacacaaacctattggcacaaactatgtgatatagaaagttatgattgttcaagaagtttgtaatttaaaaaaaggaccactatgtacttaccgtaactgaaaagtctttcgttttctcaactttatatatcttccggaaaggac

SEQ ID NO: 6746 - DNA, 228 bp, synthetic construct
  misc_feature 1..228: note = promoter
  source 1..228: mol_type = other DNA
gagggcctatttcccatggttccttcatatttgcatagaggatgcaagactgtcaggggacgattgcaattaacttggccataaacacaaacctattggcacaaactatgtgatatagaaagttatgattgttcaagaagtttgtaatttaaaaaaaggaccactatgtacttaccgtaactgaaaagtctttcgttttctcaactttatatatcttccggaaaggac

SEQ ID NO: 6747 - DNA, 228 bp, synthetic construct
  misc_feature 1..228: note = promoter
  source 1..228: mol_type = other DNA
gagggcctatttcccatggttccttcatatttgcatagaggatgcaagactgtcagaggacgattgcaattaacttggccataaacacaaacctattggcacaaactatgtgatatagaaagttatgattgttcaagaagtttgtaatttaaaaaaaggaccactatgtacttaccgtaactgaaaagtctttcgttttctcaactttatatatcttccggaaaggac

SEQ ID NO: 6748 - DNA, 228 bp, synthetic construct; identical to SEQ ID NO: 6747
  misc_feature 1..228: note = promoter
  source 1..228: mol_type = other DNA

SEQ ID NO: 6749 - DNA, 228 bp, synthetic construct; identical to SEQ ID NO: 6747
  misc_feature 1..228: note = promoter
  source 1..228: mol_type = other DNA

SEQ ID NO: 6750 - DNA, 228 bp, synthetic construct
  misc_feature 1..228: note = promoter
  source 1..228: mol_type = other DNA
gagggcctatttcccatggttccttcatatttgcatagaggatgcaagactgtcagagggcgattgcaattaacttggccataaacacaaacctattggcacaaactatgtgatatagaaagttatgattgttcaagaagtttgtaatttaaaaaaaggaccactatgtacttaccgtaactgaaaagtctttcgttttctcaactttatatatcttccggaaaggac

SEQ ID NO: 6751 - DNA, 228 bp, synthetic construct
  misc_feature 1..228: note = promoter
  source 1..228: mol_type = other DNA
gagggcctatttcccatggttccttcatatttgcatagaggatgcaagactgtcagagggagattgcaattaacttggccataaacacaaacctattggcacaaactatgtgatatagaaagttatgattgttcaagaagtttgtaatttaaaaaaaggaccactatgtacttaccgtaactgaaaagtctttcgttttctcaactttatatatcttccggaaaggac

SEQ ID NO: 6752 - DNA, 228 bp, synthetic construct
  misc_feature 1..228: note = promoter
  source 1..228: mol_type = other DNA
gagggcctatttcccatggttccttcatatttgcatagaggatgcaagactgtcagagggacattgcaattaacttggccataaacacaaacctattggcacaaactatgtgatatagaaagttatgattgttcaagaagtttgtaatttaaaaaaaggaccactatgtacttaccgtaactgaaaagtctttcgttttctcaactttatatatcttccggaaaggac

SEQ ID NO: 6753 - DNA, 228 bp, synthetic construct
  misc_feature 1..228: note = promoter
  source 1..228: mol_type = other DNA
gagggcctatttcccatggttccttcatatttgcatagaggatgcaagactgtcagagggacgttgcaattaacttggccataaacacaaacctattggcacaaactatgtgatatagaaagttatgattgttcaagaagtttgtaatttaaaaaaaggaccactatgtacttaccgtaactgaaaagtctttcgttttctcaactttatatatcttccggaaaggac

SEQ ID NO: 6754 - DNA, 228 bp, synthetic construct
  misc_feature 1..228: note = promoter
  source 1..228: mol_type = other DNA
gagggcctatttcccatggttccttcatatttgcatagaggatgcaagactgtcagagggacgatgcaattaacttggccataaacacaaacctattggcacaaactatgtgatatagaaagttatgattgttcaagaagtttgtaatttaaaaaaaggaccactatgtacttaccgtaactgaaaagtctttcgttttctcaactttatatatcttccggaaaggac

SEQ ID NO: 6755 - DNA, 228 bp, synthetic construct; identical to SEQ ID NO: 6754
  misc_feature 1..228: note = promoter
  source 1..228: mol_type = other DNA

SEQ ID NO: 6756 - DNA, 228 bp, synthetic construct
  misc_feature 1..228: note = promoter
  source 1..228: mol_type = other DNA
gagggcctatttcccatggttccttcatatttgcatagaggatgcaagactgtcagagggacgattcaattaacttggccataaacacaaacctattggcacaaactatgtgatatagaaagttatgattgttcaagaagtttgtaatttaaaaaaaggaccactatgtacttaccgtaactgaaaagtctttcgttttctcaactttatatatcttccggaaaggac

SEQ ID NO: 6757 - DNA, 228 bp, synthetic construct
  misc_feature 1..228: note = promoter
  source 1..228: mol_type = other DNA
gagggcctatttcccatggttccttcatatttgcatagaggatgcaagactgtcagagggacgattgaattaacttggccataaacacaaacctattggcacaaactatgtgatatagaaagttatgattgttcaagaagtttgtaatttaaaaaaaggaccactatgtacttaccgtaactgaaaagtctttcgttttctcaactttatatatcttccggaaaggac

SEQ ID NO: 6758 - DNA, 228 bp, synthetic construct
  misc_feature 1..228: note = promoter
  source 1..228: mol_type = other DNA
gagggcctatttcccatggttccttcatatttgcatagaggatgcaagactgtcagagggacgattgcattaacttggccataaacacaaacctattggcacaaactatgtgatatagaaagttatgattgttcaagaagtttgtaatttaaaaaaaggaccactatgtacttaccgtaactgaaaagtctttcgttttctcaactttatatatcttccggaaaggac

SEQ ID NO: 6759 - DNA, 228 bp, synthetic construct; identical to SEQ ID NO: 6758
  misc_feature 1..228: note = promoter
  source 1..228: mol_type = other DNA

SEQ ID NO: 6760 - DNA, 228 bp, synthetic construct
  misc_feature 1..228: note = promoter
  source 1..228: mol_type = other DNA
gagggcctatttcccatggttccttcatatttgcatagaggatgcaagactgtcagagggacgattgcaataacttggccataaacacaaacctattggcacaaactatgtgatatagaaagttatgattgttcaagaagtttgtaatttaaaaaaaggaccactatgtacttaccgtaactgaaaagtctttcgttttctcaactttatatatcttccggaaaggac

SEQ ID NO: 6761 - DNA, 228 bp, synthetic construct; identical to SEQ ID NO: 6760
  misc_feature 1..228: note = promoter
  source 1..228: mol_type = other DNA

SEQ ID NO: 6762 - DNA, 228 bp, synthetic construct
  misc_feature 1..228: note = promoter
  source 1..228: mol_type = other DNA
gagggcctatttcccatggttccttcatatttgcatagaggatgcaagactgtcagagggacgattgcaattacttggccataaacacaaacctattggcacaaactatgtgatatagaaagttatgattgttcaagaagtttgtaatttaaaaaaaggaccactatgtacttaccgtaactgaaaagtctttcgttttctcaactttatatatcttccggaaaggac

SEQ ID NO: 6763 - DNA, 228 bp, synthetic construct; identical to SEQ ID NO: 6762
  misc_feature 1..228: note = promoter
  source 1..228: mol_type = other DNA

SEQ ID NO: 6764 - DNA, 228 bp, synthetic construct
  misc_feature 1..228: note = promoter
  source 1..228: mol_type = other DNA
gagggcctatttcccatggttccttcatatttgcatagaggatgcaagactgtcagagggacgattgcaattaattggccataaacacaaacctattggcacaaactatgtgatatagaaagttatgattgttcaagaagtttgtaatttaaaaaaaggaccactatgtacttaccgtaactgaaaagtctttcgttttctcaactttatatatcttccggaaaggac

SEQ ID NO: 6765 - DNA, 228 bp, synthetic construct
  misc_feature 1..228: note = promoter
  source 1..228: mol_type = other DNA
gagggcctatttcccatggttccttcatatttgcatagaggatgcaagactgtcagagggacgattgcaattaactggccataaacacaaacctattggcacaaactatgtgatatagaaagttatgattgttcaagaagtttgtaatttaaaaaaaggaccactatgtacttaccgtaactgaaaagtctttcgttttctcaactttatatatcttccggaaaggac

SEQ ID NO: 6766 - DNA, 228 bp, synthetic construct; identical to SEQ ID NO: 6765
  misc_feature 1..228: note = promoter
  source 1..228: mol_type = other DNA

SEQ ID NO: 6767 - DNA, 228 bp, synthetic construct
  misc_feature 1..228: note = promoter
  source 1..228: mol_type = other DNA
gagggcctatttcccatggttccttcatatttgcatagaggatgcaagactgtcagagggacgattgcaattaacttgccataaacacaaacctattggcacaaactatgtgatatagaaagttatgattgttcaagaagtttgtaatttaaaaaaaggaccactatgtacttaccgtaactgaaaagtctttcgttttctcaactttatatatcttccggaaaggac

SEQ ID NO: 6768 - DNA, 228 bp, synthetic construct; identical to SEQ ID NO: 6767
  misc_feature 1..228: note = promoter
  source 1..228: mol_type = other DNA

SEQ ID NO: 6769 - DNA, 228 bp, synthetic construct
  misc_feature 1..228: note = promoter
  source 1..228: mol_type = other DNA
gagggcctatttcccatggttccttcatatttgcatagaggatgcaagactgtcagagggacgattgcaattaacttggcataaacacaaacctattggcacaaactatgtgatatagaaagttatgattgttcaagaagtttgtaatttaaaaaaaggaccactatgtacttaccgtaactgaaaagtctttcgttttctcaactttatatatcttccggaaaggac

SEQ ID NO: 6770 - DNA, 228 bp, synthetic construct; identical to SEQ ID NO: 6769
  misc_feature 1..228: note = promoter
  source 1..228: mol_type = other DNA

SEQ ID NO: 6771 - DNA, 228 bp, synthetic construct
  misc_feature 1..228: note = promoter
  source 1..228: mol_type = other DNA
gagggcctatttcccatggttccttcatatttgcatagaggatgcaagactgtcagagggacgattgcaattaacttggcctaaacacaaacctattggcacaaactatgtgatatagaaagttatgattgttcaagaagtttgtaatttaaaaaaaggaccactatgtacttaccgtaactgaaaagtctttcgttttctcaactttatatatcttccggaaaggac

SEQ ID NO: 6772 - DNA, 228 bp, synthetic construct
  misc_feature 1..228: note = promoter
  source 1..228: mol_type = other DNA
gagggcctatttcccatggttccttcatatttgcatagaggatgcaagactgtcagagggacgattgcaattaacttggccaaaacacaaacctattggcacaaactatgtgatatagaaagttatgattgttcaagaagtttgtaatttaaaaaaaggaccactatgtacttaccgtaactgaaaagtctttcgttttctcaactttatatatcttccggaaaggac

SEQ ID NO: 6773 - DNA, 228 bp, synthetic construct
  misc_feature 1..228: note = promoter
  source 1..228: mol_type = other DNA
gagggcctatttcccatggttccttcatatttgcatagaggatgcaagactgtcagagggacgattgcaattaacttggccataacacaaacctattggcacaaactatgtgatatagaaagttatgattgttcaagaagtttgtaatttaaaaaaaggaccactatgtacttaccgtaactgaaaagtctttcgttttctcaactttatatatcttccggaaaggac

SEQ ID NO: 6774 - DNA, 228 bp, synthetic construct; identical to SEQ ID NO: 6773
  misc_feature 1..228: note = promoter
  source 1..228: mol_type = other DNA

SEQ ID NO: 6775 - DNA, 228 bp, synthetic construct; identical to SEQ ID NO: 6773
  misc_feature 1..228: note = promoter
  source 1..228: mol_type = other DNA

SEQ ID NO: 6776 - DNA, 228 bp, synthetic construct
  misc_feature 1..228: note = promoter
  source 1..228: mol_type = other DNA
gagggcctatttcccatggttccttcatatttgcatagaggatgcaagactgtcagagggacgattgcaattaacttggccataaaacaaacctattggcacaaactatgtgatatagaaagttatgattgttcaagaagtttgtaatttaaaaaaaggaccactatgtacttaccgtaactgaaaagtctttcgttttctcaactttatatatcttccggaaaggac

SEQ ID NO: 6777 - DNA, 228 bp, synthetic construct
  misc_feature 1..228: note = promoter
  source 1..228: mol_type = other DNA
gagggcctatttcccatggttccttcatatttgcatagaggatgcaagactgtcagagggacgattgcaattaacttggccataaaccaaacctattggcacaaactatgtgatatagaaagttatgattgttcaagaagtttgtaatttaaaaaaaggaccactatgtacttaccgtaactgaaaagtctttcgttttctcaactttatatatcttccggaaaggac

SEQ ID NO: 6778 - DNA, 228 bp, synthetic construct
  misc_feature 1..228: note = promoter
  source 1..228: mol_type = other DNA
gagggcctatttcccatggttccttcatatttgcatagaggatgcaagactgtcagagggacgattgcaattaacttggccataaacaaaacctattggcacaaactatgtgatatagaaagttatgattgttcaagaagtttgtaatttaaaaaaaggaccactatgtacttaccgtaactgaaaagtctttcgttttctcaactttatatatcttccggaaaggac

SEQ ID NO: 6779 - DNA, 228 bp, synthetic construct
  misc_feature 1..228: note = promoter
  source 1..228: mol_type = other DNA
gagggcctatttcccatggttccttcatatttgcatagaggatgcaagactgtcagagggacgattgcaattaacttggccataaacacaacctattggcacaaactatgtgatatagaaagttatgattgttcaagaagtttgtaatttaaaaaaaggaccactatgtacttaccgtaactgaaaagtctttcgttttctcaactttatatatcttccggaaaggac

SEQ ID NO: 6780 - DNA, 228 bp, synthetic construct; identical to SEQ ID NO: 6779
  misc_feature 1..228: note = promoter
  source 1..228: mol_type = other DNA

SEQ ID NO: 6781 - DNA, 228 bp, synthetic construct; identical to SEQ ID NO: 6779
  misc_feature 1..228: note = promoter
  source 1..228: mol_type = other DNA

SEQ ID NO: 6782 - DNA, 228 bp, synthetic construct
  misc_feature 1..228: note = promoter
  source 1..228: mol_type = other DNA
gagggcctatttcccatggttccttcatatttgcatagaggatgcaagactgtcagagggacgattgcaattaacttggccataaacacaaactattggcacaaactatgtgatatagaaagttatgattgttcaagaagtttgtaatttaaaaaaaggaccactatgtacttaccgtaactgaaaagtctttcgttttctcaactttatatatcttccggaaaggac

SEQ ID NO: 6783 - DNA, 228 bp, synthetic construct; identical to SEQ ID NO: 6782
  misc_feature 1..228: note = promoter
  source 1..228: mol_type = other DNA

SEQ ID NO: 6784 - DNA, 228 bp, synthetic construct
  misc_feature 1..228: note = promoter
  source 1..228: mol_type = other DNA
gagggcctatttcccatggttccttcatatttgcatagaggatgcaagactgtcagagggacgattgcaattaacttggccataaacacaaaccattggcacaaactatgtgatatagaaagttatgattgttcaagaagtttgtaatttaaaaaaaggaccactatgtacttaccgtaactgaaaagtctttcgttttctcaactttatatatcttccggaaaggac

SEQ ID NO: 6785 - DNA, 228 bp, synthetic construct
  misc_feature 1..228: note = promoter
  source 1..228: mol_type = other DNA
gagggcctatttcccatggttccttcatatttgcatagaggatgcaagactgtcagagggacgattgcaattaacttggccataaacacaaacctttggcacaaactatgtgatatagaaagttatgattgttcaagaagtttgtaatttaaaaaaaggaccactatgtacttaccgtaactgaaaagtctttcgttttctcaactttatatatcttccggaaaggac

SEQ ID NO: 6786 - DNA, 228 bp, synthetic construct
  misc_feature 1..228: note = promoter
  source 1..228: mol_type = other DNA
gagggcctatttcccatggttccttcatatttgcatagaggatgcaagactgtcagagggacgattgcaattaacttggccataaacacaaacctatggcacaaactatgtgatatagaaagttatgattgttcaagaagtttgtaatttaaaaaaaggaccactatgtacttaccgtaactgaaaagtctttcgttttctcaactttatatatcttccggaaaggac

SEQ ID NO: 6787 - DNA, 228 bp, synthetic construct; identical to SEQ ID NO: 6786
  misc_feature 1..228: note = promoter
  source 1..228: mol_type = other DNA

SEQ ID NO: 6788 - DNA, 228 bp, synthetic construct
  misc_feature 1..228: note = promoter
  source 1..228: mol_type = other DNA
gagggcctatttcccatggttccttcatatttgcatagaggatgcaagactgtcagagggacgattgcaattaacttggccataaacacaaacctattgcacaaactatgtgatatagaaagttatgattgttcaagaagtttgtaatttaaaaaaaggaccactatgtacttaccgtaactgaaaagtctttcgttttctcaactttatatatcttccggaaaggac

SEQ ID NO: 6789 - DNA, 228 bp, synthetic construct; identical to SEQ ID NO: 6788
  misc_feature 1..228: note = promoter
  source 1..228: mol_type = other DNA

SEQ ID NO: 6790 - DNA, 228 bp, synthetic construct
  misc_feature 1..228: note = promoter
  source 1..228: mol_type = other DNA
gagggcctatttcccatggttccttcatatttgcatagaggatgcaagactgtcagagggacgattgcaattaacttggccataaacacaaacctattggacaaactatgtgatatagaaagttatgattgttcaagaagtttgtaatttaaaaaaaggaccactatgtacttaccgtaactgaaaagtctttcgttttctcaactttatatatcttccggaaaggac

SEQ ID NO: 6791 - DNA, 228 bp, synthetic construct
  misc_feature 1..228: note = promoter
  source 1..228: mol_type = other DNA
gagggcctatttcccatggttccttcatatttgcatagaggatgcaagactgtcagagggacgattgcaattaacttggccataaacacaaacctattggccaaactatgtgatatagaaagttatgattgttcaagaagtttgtaatttaaaaaaaggaccactatgtacttaccgtaactgaaaagtctttcgttttctcaactttatatatcttccggaaaggac

SEQ ID NO: 6792 - DNA, 228 bp, synthetic construct
  misc_feature 1..228: note = promoter
  source 1..228: mol_type = other DNA
gagggcctatttcccatggttccttcatatttgcatagaggatgcaagactgtcagagggacgattgcaattaacttggccataaacacaaacctattggcaaaactatgtgatatagaaagttatgattgttcaagaagtttgtaatttaaaaaaaggaccactatgtacttaccgtaactgaaaagtctttcgttttctcaactttatatatcttccggaaaggac

SEQ ID NO: 6793 - DNA, 228 bp, synthetic construct
  misc_feature 1..228: note = promoter
  source 1..228: mol_type = other DNA
gagggcctatttcccatggttccttcatatttgcatagaggatgcaagactgtcagagggacgattgcaattaacttggccataaacacaaacctattggcacaactatgtgatatagaaagttatgattgttcaagaagtttgtaatttaaaaaaaggaccactatgtacttaccgtaactgaaaagtctttcgttttctcaactttatatatcttccggaaaggac

SEQ ID NO: 6794 - DNA, 228 bp, synthetic construct; identical to SEQ ID NO: 6793
  misc_feature 1..228: note = promoter
  source 1..228: mol_type = other DNA

SEQ ID NO: 6795 - DNA, 228 bp, synthetic construct; identical to SEQ ID NO: 6793
  misc_feature 1..228: note = promoter
  source 1..228: mol_type = other DNA

SEQ ID NO: 6796 - DNA, 228 bp, synthetic construct
  misc_feature 1..228: note = promoter
  source 1..228: mol_type = other DNA
gagggcctatttcccatggttccttcatatttgcatagaggatgcaagactgtcagagggacgattgcaattaacttggccataaacacaaacctattggcacaaatatgtgatatagaaagttatgattgttcaagaagtttgtaatttaaaaaaaggaccactatgtacttaccgtaactgaaaagtctttcgttttctcaactttatatatcttccggaaaggac

SEQ ID NO: 6797 - DNA, 228 bp, synthetic construct
  misc_feature 1..228: note = promoter
  source 1..228: mol_type = other DNA
gagggcctatttcccatggttccttcatatttgcatagaggatgcaagactgtcagagggacgattgcaattaacttggccataaacacaaacctattggcacaaacatgtgatatagaaagttatgattgttcaagaagtttgtaatttaaaaaaaggaccactatgtacttaccgtaactgaaaagtctttcgttttctcaactttatatatcttccggaaaggac

SEQ ID NO: 6798 - DNA, 228 bp, synthetic construct
  misc_feature 1..228: note = promoter
  source 1..228: mol_type = other DNA
gagggcctatttcccatggttccttcatatttgcatagaggatgcaagactgtcagagggacgattgcaattaacttggccataaacacaaacctattggcacaaacttgtgatatagaaagttatgattgttcaagaagtttgtaatttaaaaaaaggaccactatgtacttaccgtaactgaaaagtctttcgttttctcaactttatatatcttccggaaaggac

SEQ ID NO: 6799 - DNA, 228 bp, synthetic construct
  misc_feature 1..228: note = promoter
  source 1..228: mol_type = other DNA
gagggcctatttcccatggttccttcatatttgcatagaggatgcaagactgtcagagggacgattgcaattaacttggccataaacacaaacctattggcacaaactagtgatatagaaagttatgattgttcaagaagtttgtaatttaaaaaaaggaccactatgtacttaccgtaactgaaaagtctttcgttttctcaactttatatatcttccggaaaggac

SEQ ID NO: 6800 - DNA, 228 bp, synthetic construct
  misc_feature 1..228: note = promoter
  source 1..228: mol_type = other DNA
gagggcctatttcccatggttccttcatatttgcatagaggatgcaagactgtcagagggacgattgcaattaacttggccataaacacaaacctattggcacaaactattgatatagaaagttatgattgttcaagaagtttgtaatttaaaaaaaggaccactatgtacttaccgtaactgaaaagtctttcgttttctcaactttatatatcttccggaaaggac

SEQ ID NO: 6801 - DNA, 228 bp, synthetic construct
  misc_feature 1..228: note = promoter
  source 1..228: mol_type = other DNA
gagggcctatttcccatggttccttcatatttgcatagaggatgcaagactgtcagagggacgattgcaattaacttggccataaacacaaacctattggcacaaactatggatatagaaagttatgattgttcaagaagtttgtaatttaaaaaaaggaccactatgtacttaccgtaactgaaaagtctttcgttttctcaactttatatatcttccggaaaggac

SEQ ID NO: 6802 - DNA, 228 bp, synthetic construct
  misc_feature 1..228: note = promoter
  source 1..228: mol_type = other DNA
gagggcctatttcccatggttccttcatatttgcatagaggatgcaagactgtcagagggacgattgcaattaacttggccataaacacaaacctattggcacaaactatgtatatagaaagttatgattgttcaagaagtttgtaatttaaaaaaaggaccactatgtacttaccgtaactgaaaagtctttcgttttctcaactttatatatcttccggaaaggac

SEQ ID NO: 6803 - DNA, 228 bp, synthetic construct
  misc_feature 1..228: note = promoter
  source 1..228: mol_type = other DNA
gagggcctatttcccatggttccttcatatttgcatagaggatgcaagactgtcagagggacgattgcaattaacttggccataaacacaaacctattggcacaaactatgtgtatagaaagttatgattgttcaagaagtttgtaatttaaaaaaaggaccactatgtacttaccgtaactgaaaagtctttcgttttctcaactttatatatcttccggaaaggac

SEQ ID NO: 6804 - DNA, 228 bp, synthetic construct
  misc_feature 1..228: note = promoter
  source 1..228: mol_type = other DNA
gagggcctatttcccatggttccttcatatttgcatagaggatgcaagactgtcagagggacgattgcaattaacttggccataaacacaaacctattggcacaaactatgtgaatagaaagttatgattgttcaagaagtttgtaatttaaaaaaaggaccactatgtacttaccgtaactgaaaagtctttcgttttctcaactttatatatcttccggaaaggac

SEQ ID NO: 6805 - DNA, 228 bp, synthetic construct
  misc_feature 1..228: note = promoter
  source 1..228: mol_type = other DNA
gagggcctatttcccatggttccttcatatttgcatagaggatgcaagactgtcagagggacgattgcaattaacttggccataaacacaaacctattggcacaaactatgtgattagaaagttatgattgttcaagaagtttgtaatttaaaaaaaggaccactatgtacttaccgtaactgaaaagtctttcgttttctcaactttatatatcttccggaaaggac

SEQ ID NO: 6806 - DNA, 228 bp, synthetic construct
  misc_feature 1..228: note = promoter
  source 1..228: mol_type = other DNA
gagggcctatttcccatggttccttcatatttgcatagaggatgcaagactgtcagagggacgattgcaattaacttggccataaacacaaacctattggcacaaactatgtgataagaaagttatgattgttcaagaagtttgtaatttaaaaaaaggaccactatgtacttaccgtaactgaaaagtctttcgttttctcaactttatatatcttccggaaaggac

SEQ ID NO: 6807 - DNA, 228 bp, synthetic construct
  misc_feature 1..228: note = promoter
  source 1..228: mol_type = other DNA
gagggcctatttcccatggttccttcatatttgcatagaggatgcaagactgtcagagggacgattgcaattaacttggccataaacacaaacctattggcacaaactatgtgatatgaaagttatgattgttcaagaagtttgtaatttaaaaaaaggaccactatgtacttaccgtaactgaaaagtctttcgttttctcaactttatatatcttccggaaaggac

SEQ ID NO: 6808 - DNA, 228 bp, synthetic construct
  misc_feature 1..228: note = promoter
  source 1..228: mol_type = other DNA
gagggcctatttcccatggttccttcatatttgcatagaggatgcaagactgtcagagggacgattgcaattaacttggccataaacacaaacctattggcacaaactatgtgatataaaagttatgattgttcaagaagtttgtaatttaaaaaaaggaccactatgtacttaccgtaactgaaaagtctttcgttttctcaactttatatatcttccggaaaggac

SEQ ID NO: 6809 - DNA, 228 bp, synthetic construct
  misc_feature 1..228: note = promoter
  source 1..228: mol_type = other DNA
gagggcctatttcccatggttccttcatatttgcatagaggatgcaagactgtcagagggacgattgcaattaacttggccataaacacaaacctattggcacaaactatgtgatatagaagttatgattgttcaagaagtttgtaatttaaaaaaaggaccactatgtacttaccgtaactgaaaagtctttcgttttctcaactttatatatcttccggaaaggac

SEQ ID NO: 6810 - DNA, 228 bp, synthetic construct; identical to SEQ ID NO: 6809
  misc_feature 1..228: note = promoter
  source 1..228: mol_type = other DNA

SEQ ID NO: 6811 - DNA, 228 bp, synthetic construct; identical to SEQ ID NO: 6809
  misc_feature 1..228: note = promoter
  source 1..228: mol_type = other DNA

SEQ ID NO: 6812 - DNA, 228 bp, synthetic construct
  misc_feature 1..228: note = promoter
  source 1..228: mol_type = other DNA
gagggcctatttcccatggttccttcatatttgcatagaggatgcaagactgtcagagggacgattgcaattaacttggccataaacacaaacctattggcacaaactatgtgatatagaaattatgattgttcaagaagtttgtaatttaaaaaaaggaccactatgtacttaccgtaactgaaaagtctttcgttttctcaactttatatatcttccggaaaggac

SEQ ID NO: 6813 - DNA, 228 bp, synthetic construct
  misc_feature 1..228: note = promoter
  source 1..228: mol_type = other DNA
gagggcctatttcccatggttccttcatatttgcatagaggatgcaagactgtcagagggacgattgcaattaacttggccataaacacaaacctattggcacaaactatgtgatatagaaagtatgattgttcaagaagtttgtaatttaaaaaaaggaccactatgtacttaccgtaactgaaaagtctttcgttttctcaactttatatatcttccggaaaggac

SEQ ID NO: 6814 - DNA, 228 bp, synthetic construct; identical to SEQ ID NO: 6813
  misc_feature 1..228: note = promoter
  source 1..228: mol_type = other DNA

SEQ ID NO: 6815 - DNA, 228 bp, synthetic construct
  misc_feature 1..228: note = promoter
  source 1..228: mol_type = other DNA
gagggcctatttcccatggttccttcatatttgcatagaggatgcaagactgtcagagggacgattgcaattaacttggccataaacacaaacctattggcacaaactatgtgatatagaaagtttgattgttcaagaagtttgtaatttaaaaaaaggaccactatgtacttaccgtaactgaaaagtctttcgttttctcaactttatatatcttccggaaaggac

SEQ ID NO: 6816 - DNA, 228 bp, synthetic construct
  misc_feature 1..228: note = promoter
  source 1..228: mol_type = other DNA
gagggcctatttcccatggttccttcatatttgcatagaggatgcaagactgtcagagggacgattgcaattaacttggccataaacacaaacctattggcacaaactatgtgatatagaaagttagattgttcaagaagtttgtaatttaaaaaaaggaccactatgtacttaccgtaactgaaaagtctttcgttttctcaactttatatatcttccggaaaggac

SEQ ID NO: 6817 - DNA, 228 bp, synthetic construct
  misc_feature 1..228: note = promoter
  source 1..228: mol_type = other DNA
gagggcctatttcccatggttccttcatatttgcatagaggatgcaagactgtcagagggacgattgcaattaacttggccataaacacaaacctattggcacaaactatgtgatatagaaagttatattgttcaagaagtttgtaatttaaaaaaaggaccactatgtacttaccgtaactgaaaagtctttcgttttctcaactttatatatcttccggaaaggac

SEQ ID NO: 6818 - DNA, 228 bp, synthetic construct
  misc_feature 1..228: note = promoter
  source 1..228: mol_type = other DNA
gagggcctatttcccatggttccttcatatttgcatagaggatgcaagactgtcagagggacgattgcaattaacttggccataaacacaaacctattggcacaaactatgtgatatagaaagttatgttgttcaagaagtttgtaatttaaaaaaaggaccactatgtacttaccgtaactgaaaagtctttcgttttctcaactttatatatcttccggaaaggac

SEQ ID NO: 6819 - DNA, 228 bp, synthetic construct
  misc_feature 1..228: note = promoter
  source 1..228: mol_type = other DNA
gagggcctatttcccatggttccttcatatttgcatagaggatgcaagactgtcagagggacgattgcaattaacttggccataaacacaaacctattggcacaaactatgtgatatagaaagttatgatgttcaagaagtttgtaatttaaaaaaaggaccactatgtacttaccgtaactgaaaagtctttcgttttctcaactttatatatcttccggaaaggac

SEQ ID NO: 6820 - DNA, 228 bp, synthetic construct; identical to SEQ ID NO: 6819
  misc_feature 1..228: note = promoter
  source 1..228: mol_type = other DNA

SEQ ID NO: 6821 - DNA, 228 bp, synthetic construct
  misc_feature 1..228: note = promoter
  source 1..228: mol_type = other DNA
gagggcctatttcccatggttccttcatatttgcatagaggatgcaagactgtcagagggacgattgcaattaacttggccataaacacaaacctattggcacaaactatgtgatatagaaagttatgattttcaagaagtttgtaatttaaaaaaaggaccactatgtacttaccgtaactgaaaagtctttcgttttctcaactttatatatcttccggaaaggac

SEQ ID NO: 6822 - DNA, 228 bp, synthetic construct
  misc_feature 1..228: note = promoter
  source 1..228: mol_type = other DNA
gagggcctatttcccatggttccttcatatttgcatagaggatgcaagactgtcagagggacgattgcaattaacttggccataaacacaaacctattggcacaaactatgtgatatagaaagttatgattgtcaagaagtttgtaatttaaaaaaaggaccactatgtacttaccgtaactgaaaagtctttcgttttctcaactttatatatcttccggaaaggac

SEQ ID NO: 6823 - DNA, 228 bp, synthetic construct; identical to SEQ ID NO: 6822
  misc_feature 1..228: note = promoter
  source 1..228: mol_type = other DNA

SEQ ID NO: 6824 - DNA, 228 bp, synthetic construct
  misc_feature 1..228: note = promoter
  source 1..228: mol_type = other DNA
gagggcctatttcccatggttccttcatatttgcatagaggatgcaagactgtcagagggacgattgcaattaacttggccataaacacaaacctattggcacaaactatgtgatatagaaagttatgattgttaagaagtttgtaatttaaaaaaaggaccactatgtacttaccgtaactgaaaagtctttcgttttctcaactttatatatcttccggaaaggac

SEQ ID NO: 6825 - DNA, 228 bp, synthetic construct
  misc_feature 1..228: note = promoter
  source 1..228: mol_type = other DNA
gagggcctatttcccatggttccttcatatttgcatagaggatgcaagactgtcagagggacgattgcaattaacttggccataaacacaaacctattggcacaaactatgtgatatagaaagttatgattgttcagaagtttgtaatttaaaaaaaggaccactatgtacttaccgtaactgaaaagtctttcgttttctcaactttatatatcttccggaaaggac

SEQ ID NO: 6826 - DNA, 228 bp, synthetic construct; identical to SEQ ID NO: 6825
  misc_feature 1..228: note = promoter
  source 1..228: mol_type = other DNA

SEQ ID NO: 6827 - DNA, 228 bp, synthetic construct
  misc_feature 1..228: note = promoter
  source 1..228: mol_type = other DNA
gagggcctatttcccatggttccttcatatttgcatagaggatgcaagactgtcagagggacgattgcaattaacttggccataaacacaaacctattggcacaaactatgtgatatagaaagttatgattgttcaaaagtttgtaatttaaaaaaaggaccactatgtacttaccgtaactgaaaagtctttcgttttctcaactttatatatcttccggaaaggac

SEQ ID NO: 6828 - DNA, 228 bp, synthetic construct
  misc_feature 1..228: note = promoter
  source 1..228: mol_type = other DNA
gagggcctatttcccatggttccttcatatttgcatagaggatgcaagactgtcagagggacgattgcaattaacttggccataaacacaaacctattggcacaaactatgtgatatagaaagttatgattgttcaagagtttgtaatttaaaaaaaggaccactatgtacttaccgtaactgaaaagtctttcgttttctcaactttatatatcttccggaaaggac

SEQ ID NO: 6829 - DNA, 228 bp, synthetic construct; identical to SEQ ID NO: 6828
  misc_feature 1..228: note = promoter
  source 1..228: mol_type = other DNA

SEQ ID NO: 6830 - DNA, 228 bp, synthetic construct
  misc_feature 1..228: note = promoter
  source 1..228: mol_type = other DNA
gagggcctatttcccatggttccttcatatttgcatagaggatgcaagactgtcagagggacgattgcaattaacttggccataaacacaaacctattggcacaaactatgtgatatagaaagttatgattgttcaagaatttgtaatttaaaaaaaggaccactatgtacttaccgtaactgaaaagtctttcgttttctcaactttatatatcttccggaaaggac

SEQ ID NO: 6831 - DNA, 228 bp, synthetic construct
  misc_feature 1..228: note = promoter
  source 1..228: mol_type = other DNA
gagggcctatttcccatggttccttcatatttgcatagaggatgcaagactgtcagagggacgattgcaattaacttggccataaacacaaacctattggcacaaactatgtgatatagaaagttatgattgttcaagaagttgtaatttaaaaaaaggaccactatgtacttaccgtaactgaaaagtctttcgttttctcaactttatatatcttccggaaaggac

SEQ ID NO: 6832 - DNA, 228 bp, synthetic construct; identical to SEQ ID NO: 6831
  misc_feature 1..228: note = promoter
  source 1..228: mol_type = other DNA

SEQ ID NO: 6833 - DNA, 228 bp, synthetic construct; identical to SEQ ID NO: 6831
  misc_feature 1..228: note = promoter
  source 1..228: mol_type = other DNA

SEQ ID NO: 6834 - DNA, 228 bp, synthetic construct
  misc_feature 1..228: note = promoter
  source 1..228: mol_type = other DNA
gagggcctatttcccatggttccttcatatttgcatagaggatgcaagactgtcagagggacgattgcaattaacttggccataaacacaaacctattggcacaaactatgtgatatagaaagttatgattgttcaagaagttttaatttaaaaaaaggaccactatgtacttaccgtaactgaaaagtctttcgttttctcaactttatatatcttccggaaaggac

SEQ ID NO: 6835 - DNA, 228 bp, synthetic construct
  misc_feature 1..228: note = promoter
  source 1..228: mol_type = other DNA
gagggcctatttcccatggttccttcatatttgcatagaggatgcaagactgtcagagggacgattgcaattaacttggccataaacacaaacctattggcacaaactatgtgatatagaaagttatgattgttcaagaagtttgaatttaaaaaaaggaccactatgtacttaccgtaactgaaaagtctttcgttttctcaactttatatatcttccggaaaggac

SEQ ID NO: 6836 - DNA, 228 bp, synthetic construct
  misc_feature 1..228: note = promoter
  source 1..228: mol_type = other DNA
gagggcctatttcccatggttccttcatatttgcatagaggatgcaagactgtcagagggacgattgcaattaacttggccataaacacaaacctattggcacaaactatgtgatatagaaagttatgattgttcaagaagtttgtatttaaaaaaaggaccactatgtacttaccgtaactgaaaagtctttcgttttctcaactttatatatcttccggaaaggac

SEQ ID NO: 6837 - DNA, 228 bp, synthetic construct; identical to SEQ ID NO: 6836
  misc_feature 1..228: note = promoter
  source 1..228: mol_type = other DNA

SEQ ID NO: 6838 - DNA, 228 bp, synthetic construct
  misc_feature 1..228: note = promoter
  source 1..228: mol_type = other DNA
gagggcctatttcccatggttccttcatatttgcatagaggatgcaagactgtcagagggacgattgcaattaacttggccataaacacaaacctattggcacaaactatgtgatatagaaagttatgattgttcaagaagtttgtaattaaaaaaaggaccactatgtacttaccgtaactgaaaagtctttcgttttctcaactttatatatcttccggaaaggac

SEQ ID NO: 6839 - DNA, 228 bp, synthetic construct; identical to SEQ ID NO: 6838
  misc_feature 1..228: note = promoter
  source 1..228: mol_type = other DNA

SEQ ID NO: 6840 - DNA, 228 bp, synthetic construct; identical to SEQ ID NO: 6838
  misc_feature 1..228: note = promoter
  source 1..228: mol_type = other DNA

SEQ ID NO: 6841 - DNA, 228 bp, synthetic construct
  misc_feature 1..228: note = promoter
  source 1..228: mol_type = other DNA
gagggcctatttcccatggttccttcatatttgcatagaggatgcaagactgtcagagggacgattgcaattaacttggccataaacacaaacctattggcacaaactatgtgatatagaaagttatgattgttcaagaagtttgtaatttaaaaaaggaccactatgtacttaccgtaactgaaaagtctttcgttttctcaactttatatatcttccggaaaggac

SEQ ID NO: 6842 - DNA, 228 bp, synthetic construct; identical to SEQ ID NO: 6841
  misc_feature 1..228: note = promoter
  source 1..228: mol_type = other DNA

SEQ ID NO: 6843 - DNA, 228 bp, synthetic construct; identical to SEQ ID NO: 6841
  misc_feature 1..228: note = promoter
  source 1..228: mol_type = other DNA

SEQ ID NO: 6844 - DNA, 228 bp, synthetic construct; identical to SEQ ID NO: 6841
  misc_feature 1..228: note = promoter
  source 1..228: mol_type = other DNA

SEQ ID NO: 6845 - DNA, 228 bp, synthetic construct; identical to SEQ ID NO: 6841
  misc_feature 1..228: note = promoter
  source 1..228: mol_type = other DNA

SEQ ID NO: 6846 - DNA, 228 bp, synthetic construct; identical to SEQ ID NO: 6841
  misc_feature 1..228: note = promoter
  source 1..228: mol_type = other DNA

SEQ ID NO: 6847 - DNA, 228 bp, synthetic construct; identical to SEQ ID NO: 6841
  misc_feature 1..228: note = promoter
  source 1..228: mol_type = other DNA

SEQ ID NO: 6848 - DNA, 228 bp, synthetic construct
  misc_feature 1..228: note = promoter
  source 1..228: mol_type = other DNA
gagggcctatttcccatggttccttcatatttgcatagaggatgcaagactgtcagagggacgattgcaattaacttggccataaacacaaacctattggcacaaactatgtgatatagaaagttatgattgttcaagaagtttgtaatttaaaaaaagaccactatgtacttaccgtaactgaaaagtctttcgttttctcaactttatatatcttccggaaaggac

SEQ ID NO: 6849 - DNA, 228 bp, synthetic construct; identical to SEQ ID NO: 6848
  misc_feature 1..228: note = promoter
  source 1..228: mol_type = other DNA

SEQ ID NO: 6850 - DNA, 228 bp, synthetic construct
  misc_feature 1..228: note = promoter
  source 1..228: mol_type = other DNA
gagggcctatttcccatggttccttcatatttgcatagaggatgcaagactgtcagagggacgattgcaattaacttggccataaacacaaacctattggcacaaactatgtgatatagaaagttatgattgttcaagaagtttgtaatttaaaaaaaggccactatgtacttaccgtaactgaaaagtctttcgttttctcaactttatatatcttccggaaaggac

SEQ ID NO: 6851 - DNA, 228 bp, synthetic construct
  misc_feature 1..228: note = promoter
  source 1..228: mol_type = other DNA
gagggcctatttcccatggttccttcatatttgcatagaggatgcaagactgtcagagggacgattgcaattaacttggccataaacacaaacctattggcacaaactatgtgatatagaaagttatgattgttcaagaagtttgtaatttaaaaaaaggacactatgtacttaccgtaactgaaaagtctttcgttttctcaactttatatatcttccggaaaggac

SEQ ID NO: 6852 - DNA, 228 bp, synthetic construct; identical to SEQ ID NO: 6851
  misc_feature 1..228: note = promoter
  source 1..228: mol_type = other DNA

SEQ ID NO: 6853 - DNA, 228 bp, synthetic construct
  misc_feature 1..228: note = promoter
  source 1..228: mol_type = other DNA
gagggcctatttcccatggttccttcatatttgcatagaggatgcaagactgtcagagggacgattgcaattaacttggccataaacacaaacctattggcacaaactatgtgatatagaaagttatgattgttcaagaagtttgtaatttaaaaaaaggaccctatgtacttaccgtaactgaaaagtctttcgttttctcaactttatatatcttccggaaaggac

SEQ ID NO: 6854 - DNA, 228 bp, synthetic construct
  misc_feature 1..228: note = promoter
  source 1..228: mol_type = other DNA
gagggcctatttcccatggttccttcatatttgcatagaggatgcaagactgtcagagggacgattgcaattaacttggccataaacacaaacctattggcacaaactatgtgatatagaaagttatgattgttcaagaagtttgtaatttaaaaaaaggaccatatgtacttaccgtaactgaaaagtctttcgttttctcaactttatatatcttccggaaaggac

SEQ ID NO: 6855 - DNA, 228 bp, synthetic construct
  misc_feature 1..228: note = promoter
  source 1..228: mol_type = other DNA
gagggcctatttcccatggttccttcatatttgcatagaggatgcaagactgtcagagggacgattgcaattaacttggccataaacacaaacctattggcacaaactatgtgatatagaaagttatgattgttcaagaagtttgtaatttaaaaaaaggaccacatgtacttaccgtaactgaaaagtctttcgttttctcaactttatatatcttccggaaaggac

SEQ ID NO: 6856 - DNA, 228 bp, synthetic construct
  misc_feature 1..228: note = promoter
  source 1..228: mol_type = other DNA
gagggcctatttcccatggttccttcatatttgcatagaggatgcaagactgtcagagggacgattgcaattaacttggccataaacacaaacctattggcacaaactatgtgatatagaaagttatgattgttcaagaagtttgtaatttaaaaaaaggaccacttgtacttaccgtaactgaaaagtctttcgttttctcaactttatatatcttccggaaaggac

SEQ ID NO: 6857 - DNA, 228 bp, synthetic construct
  misc_feature 1..228: note = promoter
  source 1..228: mol_type = other DNA
gagggcctatttcccatggttccttcatatttgcatagaggatgcaagactgtcagagggacgattgcaattaacttggccataaacacaaacctattggcacaaactatgtgatatagaaagttatgattgttcaagaagtttgtaatttaaaaaaaggaccactagtacttaccgtaactgaaaagtctttcgttttctcaactttatatatcttccggaaaggac

SEQ ID NO: 6858 - DNA, 228 bp, synthetic construct
  misc_feature 1..228: note = promoter
  source 1..228: mol_type = other DNA
gagggcctatttcccatggttccttcatatttgcatagaggatgcaagactgtcagagggacgattgcaattaacttggccataaacacaaacctattggcacaaactatgtgatatagaaagttatgattgttcaagaagtttgtaatttaaaaaaaggaccactattacttaccgtaactgaaaagtctttcgttttctcaactttatatatcttccggaaaggac

SEQ ID NO: 6859 - DNA, 228 bp, synthetic construct
  misc_feature 1..228: note = promoter
  source 1..228: mol_type = other DNA
gagggcctatttcccatggttccttcatatttgcatagaggatgcaagactgtcagagggacgattgcaattaacttggccataaacacaaacctattggcacaaactatgtgatatagaaagttatgattgttcaagaagtttgtaatttaaaaaaaggaccactatgacttaccgtaactgaaaagtctttcgttttctcaactttatatatcttccggaaaggac

SEQ ID NO: 6860 - DNA, 228 bp, synthetic construct
  misc_feature 1..228: note = promoter
  source 1..228: mol_type = other DNA
gagggcctatttcccatggttccttcatatttgcatagaggatgcaagactgtcagagggacgattgcaattaacttggccataaacacaaacctattggcacaaactatgtgatatagaaagttatgattgttcaagaagtttgtaatttaaaaaaaggaccactatgtcttaccgtaactgaaaagtctttcgttttctcaactttatatatcttccggaaaggac

SEQ ID NO: 6861 - DNA, 228 bp, synthetic construct
  misc_feature 1..228: note = promoter
  source 1..228: mol_type = other DNA
gagggcctatttcccatggttccttcatatttgcatagaggatgcaagactgtcagagggacgattgcaattaacttggccataaacacaaacctattggcacaaactatgtgatatagaaagttatgattgttcaagaagtttgtaatttaaaaaaaggaccactatgtattaccgtaactgaaaagtctttcgttttctcaactttatatatcttccggaaaggac

SEQ ID NO: 6862 - DNA, 228 bp, synthetic construct
  misc_feature 1..228: note = promoter
  source 1..228: mol_type = other DNA
gagggcctatttcccatggttccttcatatttgcatagaggatgcaagactgtcagagggacgattgcaattaacttggccataaacacaaacctattggcacaaactatgtgatatagaaagttatgattgttcaagaagtttgtaatttaaaaaaaggaccactatgtactaccgtaactgaaaagtctttcgttttctcaactttatatatcttccggaaaggac

SEQ ID NO: 6863 - DNA, 228 bp, synthetic construct; identical to SEQ ID NO: 6862
  misc_feature 1..228: note = promoter
  source 1..228: mol_type = other DNA

SEQ ID NO: 6864 - DNA, 228 bp, synthetic construct
  misc_feature 1..228: note = promoter
  source 1..228: mol_type = other DNA
gagggcctatttcccatggttccttcatatttgcatagaggatgcaagactgtcagagggacgattgcaattaacttggccataaacacaaacctattggcacaaactatgtgatatagaaagttatgattgttcaagaagtttgtaatttaaaaaaaggaccactatgtacttccgtaactgaaaagtctttcgttttctcaactttatatatcttccggaaaggac

SEQ ID NO: 6865 - DNA, 228 bp, synthetic construct
  misc_feature 1..228: note = promoter
  source 1..228: mol_type = other DNA
gagggcctatttcccatggttccttcatatttgcatagaggatgcaagactgtcagagggacgattgcaattaacttggccataaacacaaacctattggcacaaactatgtgatatagaaagttatgattgttcaagaagtttgtaatttaaaaaaaggaccactatgtacttacgtaactgaaaagtctttcgttttctcaactttatatatcttccggaaaggac

SEQ ID NO: 6866 - DNA, 228 bp, synthetic construct; identical to SEQ ID NO: 6865
  misc_feature 1..228: note = promoter
  source 1..228: mol_type = other DNA

SEQ ID NO: 6867 - DNA, 228 bp, synthetic construct
  misc_feature 1..228: note = promoter
  source 1..228: mol_type = other DNA
gagggcctatttcccatggttccttcatatttgcatagaggatgcaagactgtcagagggacgattgcaattaacttggccataaacacaaacctattggcacaaactatgtgatatagaaagttatgattgttcaagaagtttgtaatttaaaaaaaggaccactatgtacttacctaactgaaaagtctttcgttttctcaactttatatatcttccggaaaggac

SEQ ID NO: 6868 - DNA, 228 bp, synthetic construct
  misc_feature 1..228: note = promoter
  source 1..228: mol_type = other DNA
gagggcctatttcccatggttccttcatatttgcatagaggatgcaagactgtcagagggacgattgcaattaacttggccataaacacaaacctattggcacaaactatgtgatatagaaagttatgattgttcaagaagtttgtaatttaaaaaaaggaccactatgtacttaccgaactgaaaagtctttcgttttctcaactttatatatcttccggaaaggac

SEQ ID NO: 6869 - DNA, 228 bp, synthetic construct
  misc_feature 1..228: note = promoter
  source 1..228: mol_type = other DNA
gagggcctatttcccatggttccttcatatttgcatagaggatgcaagactgtcagagggacgattgcaattaacttggccataaacacaaacctattggcacaaactatgtgatatagaaagttatgattgttcaagaagtttgtaatttaaaaaaaggaccactatgtacttaccgtactgaaaagtctttcgttttctcaactttatatatcttccggaaaggac

SEQ ID NO: 6870 - DNA, 228 bp, synthetic construct; identical to SEQ ID NO: 6869
  misc_feature 1..228: note = promoter
  source 1..228: mol_type = other DNA

SEQ ID NO: 6871 - DNA, 228 bp, synthetic construct
  misc_feature 1..228: note = promoter
  source 1..228: mol_type = other DNA
gagggcctatttcccatggttccttcatatttgcatagaggatgcaagactgtcagagggacgattgcaattaacttggccataaacacaaacctattggcacaaactatgtgatatagaaagttatgattgttcaagaagtttgtaatttaaaaaaaggaccactatgtacttaccgtaatgaaaagtctttcgttttctcaactttatatatcttccggaaaggac

SEQ ID NO: 6872 - DNA, 228 bp, synthetic construct
  misc_feature 1..228: note = promoter
  source 1..228: mol_type = other DNA
gagggcctatttcccatggttccttcatatttgcatagaggatgcaagactgtcagagggacgattgcaattaacttggccataaacacaaacctattggcacaaactatgtgatatagaaagttatgattgttcaagaagtttgtaatttaaaaaaaggaccactatgtacttaccgtaacgaaaagtctttcgttttctcaactttatatatcttccggaaaggac

SEQ ID NO: 6873 - DNA, 228 bp, synthetic construct
  misc_feature 1..228: note = promoter
  source 1..228: mol_type = other DNA
gagggcctatttcccatggttccttcatatttgcatagaggatgcaagactgtcagagggacgattgcaattaacttggccataaacacaaacctattggcacaaactatgtgatatagaaagttatgattgttcaagaagtttgtaatttaaaaaaaggaccactatgtacttaccgtaactaaaagtctttcgttttctcaactttatatatcttccggaaaggac

SEQ ID NO: 6874 - DNA, 228 bp, synthetic construct
  misc_feature 1..228: note = promoter
  source 1..228: mol_type = other DNA
gagggcctatttcccatggttccttcatatttgcatagaggatgcaagactgtcagagggacgattgcaattaacttggccataaacacaaacctattggcacaaactatgtgatatagaaagttatgattgttcaagaagtttgtaatttaaaaaaaggaccactatgtacttaccgtaactgaaagtctttcgttttctcaactttatatatcttccggaaaggac

SEQ ID NO: 6875 - DNA, 228 bp, synthetic construct; identical to SEQ ID NO: 6874
  misc_feature 1..228: note = promoter
  source 1..228: mol_type = other DNA

SEQ ID NO: 6876 - DNA, 228 bp, synthetic construct; identical to SEQ ID NO: 6874
  misc_feature 1..228: note = promoter
  source 1..228: mol_type = other DNA

SEQ ID NO: 6877 - DNA, 228 bp, synthetic construct; identical to SEQ ID NO: 6874
  misc_feature 1..228: note = promoter
  source 1..228: mol_type = other DNA

SEQ ID NO: 6878 - DNA, 228 bp, synthetic construct
  misc_feature 1..228: note = promoter
  source 1..228: mol_type = other DNA
gagggcctatttcccatggttccttcatatttgcatagaggatgcaagactgtcagagggacgattgcaattaacttggccataaacacaaacctattggcacaaactatgtgatatagaaagttatgattgttcaagaagtttgtaatttaaaaaaaggaccactatgtacttaccgtaactgaaaatctttcgttttctcaactttatatatcttccggaaaggac

SEQ ID NO: 6879 - DNA, 228 bp, synthetic construct
  misc_feature 1..228: note = promoter
  source 1..228: mol_type = other DNA
gagggcctatttcccatggttccttcatatttgcatagaggatgcaagactgtcagagggacgattgcaattaacttggccataaacacaaacctattggcacaaactatgtgatatagaaagttatgattgttcaagaagtttgtaatttaaaaaaaggaccactatgtacttaccgtaactgaaaagctttcgttttctcaactttatatatcttccggaaaggac

SEQ ID NO: 6880 - DNA, 228 bp, synthetic construct
  misc_feature 1..228: note = promoter
  source 1..228: mol_type = other DNA
gagggcctatttcccatggttccttcatatttgcatagaggatgcaagactgtcagagggacgattgcaattaacttggccataaacacaaacctattggcacaaactatgtgatatagaaagttatgattgttcaagaagtttgtaatttaaaaaaaggaccactatgtacttaccgtaactgaaaagttttcgttttctcaactttatatatcttccggaaaggac

SEQ ID NO: 6881 - DNA, 228 bp, synthetic construct
  misc_feature 1..228: note = promoter
  source 1..228: mol_type = other DNA
gagggcctatttcccatggttccttcatatttgcatagaggatgcaagactgtcagagggacgattgcaattaacttggccataaacacaaacctattggcacaaactatgtgatatagaaagttatgattgttcaagaagtttgtaatttaaaaaaaggaccactatgtacttaccgtaactgaaaagtcttcgttttctcaactttatatatcttccggaaaggac

SEQ ID NO: 6882 - DNA, 228 bp, synthetic construct; identical to SEQ ID NO: 6881
  misc_feature 1..228: note = promoter
  source 1..228: mol_type = other DNA

SEQ ID NO: 6883 - DNA, 228 bp, synthetic construct; identical to SEQ ID NO: 6881
  misc_feature 1..228: note = promoter
  source 1..228: mol_type = other DNA

SEQ ID NO: 6884 - DNA, 228 bp, synthetic construct
  misc_feature 1..228: note = promoter
  source 1..228: mol_type = other DNA
gagggcctatttcccatggttccttcatatttgcatagaggatgcaagactgtcagagggacgattgcaattaacttggccataaacacaaacctattggcacaaactatgtgatatagaaagttatgattgttcaagaagtttgtaatttaaaaaaaggaccactatgtacttaccgtaactgaaaagtctttgttttctcaactttatatatcttccggaaaggac

SEQ ID NO: 6885 - DNA, 228 bp, synthetic construct
  misc_feature 1..228: note = promoter
  source 1..228: mol_type = other DNA
gagggcctatttcccatggttccttcatatttgcatagaggatgcaagactgtcagagggacgattgcaattaacttggccataaacacaaacctattggcacaaactatgtgatatagaaagttatgattgttcaagaagtttgtaatttaaaaaaaggaccactatgtacttaccgtaactgaaaagtctttcttttctcaactttatatatcttccggaaaggac

SEQ ID NO: 6886 - DNA, 228 bp, synthetic construct
  misc_feature 1..228: note = promoter
  source 1..228: mol_type = other DNA
gagggcctatttcccatggttccttcatatttgcatagaggatgcaagactgtcagagggacgattgcaattaacttggccataaacacaaacctattggcacaaactatgtgatatagaaagttatgattgttcaagaagtttgtaatttaaaaaaaggaccactatgtacttaccgtaactgaaaagtctttcgtttctcaactttatatatcttccggaaaggac

SEQ ID NO: 6887 - DNA, 228 bp, synthetic construct; identical to SEQ ID NO: 6886
  misc_feature 1..228: note = promoter
  source 1..228: mol_type = other DNA

SEQ ID NO: 6888 - DNA, 228 bp, synthetic construct; identical to SEQ ID NO: 6886
  misc_feature 1..228: note = promoter
  source 1..228: mol_type = other DNA

SEQ ID NO: 6889 - DNA, 228 bp, synthetic construct; identical to SEQ ID NO: 6886
  misc_feature 1..228: note = promoter
  source 1..228: mol_type = other DNA

SEQ ID NO: 6890 - DNA, 228 bp, synthetic construct
  misc_feature 1..228: note = promoter
  source 1..228: mol_type = other DNA
gagggcctatttcccatggttccttcatatttgcatagaggatgcaagactgtcagagggacgattgcaattaacttggccataaacacaaacctattggcacaaactatgtgatatagaaagttatgattgttcaagaagtttgtaatttaaaaaaaggaccactatgtacttaccgtaactgaaaagtctttcgtttttcaactttatatatcttccggaaaggac

SEQ ID NO: 6891 - DNA, 228 bp, synthetic construct
  misc_feature 1..228: note = promoter
  source 1..228: mol_type = other DNA
gagggcctatttcccatggttccttcatatttgcatagaggatgcaagactgtcagagggacgattgcaattaacttggccataaacacaaacctattggcacaaactatgtgatatagaaagttatgattgttcaagaagtttgtaatttaaaaaaaggaccactatgtacttaccgtaactgaaaagtctttcgttttccaactttatatatcttccggaaaggac

SEQ ID NO: 6892 - DNA, 228 bp, synthetic construct
  misc_feature 1..228: note = promoter
  source 1..228: mol_type = other DNA
gagggcctatttcccatggttccttcatatttgcatagaggatgcaagactgtcagagggacgattgcaattaacttggccataaacacaaacctattggcacaaactatgtgatatagaaagttatgattgttcaagaagtttgtaatttaaaaaaaggaccactatgtacttaccgtaactgaaaagtctttcgttttctaactttatatatcttccggaaaggac

SEQ ID NO: 6893 - DNA, 228 bp, synthetic construct
  misc_feature 1..228: note = promoter
  source 1..228: mol_type = other DNA
gagggcctatttcccatggttccttcatatttgcatagaggatgcaagactgtcagagggacgattgcaattaacttggccataaacacaaacctattggcacaaactatgtgatatagaaagttatgattgttcaagaagtttgtaatttaaaaaaaggaccactatgtacttaccgtaactgaaaagtctttcgttttctcactttatatatcttccggaaaggac

SEQ ID NO: 6894 - DNA, 228 bp, synthetic construct; identical to SEQ ID NO: 6893
  misc_feature 1..228: note = promoter
  source 1..228: mol_type = other DNA

SEQ ID NO: 6895 - DNA, 228 bp, synthetic construct
  misc_feature 1..228: note = promoter
  source 1..228: mol_type = other DNA
gagggcctatttcccatggttccttcatatttgcatagaggatgcaagactgtcagagggacgattgcaattaacttggccataaacacaaacctattggcacaaactatgtgatatagaaagttatgattgttcaagaagtttgtaatttaaaaaaaggaccactatgtacttaccgtaactgaaaagtctttcgttttctcaatttatatatcttccggaaaggac

SEQ ID NO: 6896 - DNA, 228 bp, synthetic construct
  misc_feature 1..228: note = promoter
  source 1..228: mol_type = other DNA
gagggcctatttcccatggttccttcatatttgcatagaggatgcaagactgtcagagggacgattgcaattaacttggccataaacacaaacctattggcacaaactatgtgatatagaaagttatgattgttcaagaagtttgtaatttaaaaaaaggaccactatgtacttaccgtaactgaaaagtctttcgttttctcaacttatatatcttccggaaaggac

SEQ ID NO: 6897 - DNA, 228 bp, synthetic construct; identical to SEQ ID NO: 6896
  misc_feature 1..228: note = promoter
  source 1..228: mol_type = other DNA

SEQ ID NO: 6898 - DNA, 228 bp, synthetic construct; identical to SEQ ID NO: 6896
  misc_feature 1..228: note = promoter
  source 1..228: mol_type = other DNA

SEQ ID NO: 6899 - DNA, 228 bp, synthetic construct
  misc_feature 1..228: note = promoter
  source 1..228: mol_type = other DNA
gagggcctatttcccatggttccttcatatttgcatagaggatgcaagactgtcagagggacgattgcaattaacttggccataaacacaaacctattggcacaaactatgtgatatagaaagttatgattgttcaagaagtttgtaatttaaaaaaaggaccactatgtacttaccgtaactgaaaagtctttcgttttctcaacttttatatcttccggaaaggac

SEQ ID NO: 6900 - DNA, 228 bp, synthetic construct
  misc_feature 1..228: note = promoter
  source 1..228: mol_type = other DNA
gagggcctatttcccatggttccttcatatttgcatagaggatgcaagactgtcagagggacgattgcaattaacttggccataaacacaaacctattggcacaaactatgtgatatagaaagttatgattgttcaagaagtttgtaatttaaaaaaaggaccactatgtacttaccgtaactgaaaagtctttcgttttctcaactttaatatcttccggaaaggac

SEQ ID NO: 6901 - DNA, 228 bp, synthetic construct
  misc_feature 1..228: note = promoter
  source 1..228: mol_type = other DNA
gagggcctatttcccatggttccttcatatttgcatagaggatgcaagactgtcagagggacgattgcaattaacttggccataaacacaaacctattggcacaaactatgtgatatagaaagttatgattgttcaagaagtttgtaatttaaaaaaaggaccactatgtacttaccgtaactgaaaagtctttcgttttctcaactttattatcttccggaaaggac

SEQ ID NO: 6902 - DNA, 228 bp, synthetic construct
  misc_feature 1..228: note = promoter
  source 1..228: mol_type = other DNA
gagggcctatttcccatggttccttcatatttgcatagaggatgcaagactgtcagagggacgattgcaattaacttggccataaacacaaacctattggcacaaactatgtgatatagaaagttatgattgttcaagaagtttgtaatttaaaaaaaggaccactatgtacttaccgtaactgaaaagtctttcgttttctcaactttataatcttccggaaaggac

SEQ ID NO: 6903 - DNA, 228 bp, synthetic construct
  misc_feature 1..228: note = promoter
  source 1..228: mol_type = other DNA
gagggcctatttcccatggttccttcatatttgcatagaggatgcaagactgtcagagggacgattgcaattaacttggccataaacacaaacctattggcacaaactatgtgatatagaaagttatgattgttcaagaagtttgtaatttaaaaaaaggaccactatgtacttaccgtaactgaaaagtctttcgttttctcaactttatattcttccggaaaggac

SEQ ID NO: 6904 - DNA, 228 bp, synthetic construct
  misc_feature 1..228: note = promoter
  source 1..228: mol_type = other DNA
gagggcctatttcccatggttccttcatatttgcatagaggatgcaagactgtcagagggacgattgcaattaacttggccataaacacaaacctattggcacaaactatgtgatatagaaagttatgattgttcaagaagtttgtaatttaaaaaaaggaccactatgtacttaccgtaactgaaaagtctttcgttttctcaactttatatacttccggaaaggac

SEQ ID NO: 6905 - DNA, 228 bp, synthetic construct
  misc_feature 1..228: note = promoter
  source 1..228: mol_type = other DNA
gagggcctatttcccatggttccttcatatttgcatagaggatgcaagactgtcagagggacgattgcaattaacttggccataaacacaaacctattggcacaaactatgtgatatagaaagttatgattgttcaagaagtttgtaatttaaaaaaaggaccactatgtacttaccgtaactgaaaagtctttcgttttctcaactttatatatttccggaaaggac

SEQ ID NO: 6906 - DNA, 228 bp, synthetic construct
  misc_feature 1..228: note = promoter
  source 1..228: mol_type = other DNA
gagggcctatttcccatggttccttcatatttgcatagaggatgcaagactgtcagagggacgattgcaattaacttggccataaacacaaacctattggcacaaactatgtgatatagaaagttatgattgttcaagaagtttgtaatttaaaaaaaggaccactatgtacttaccgtaactgaaaagtctttcgttttctcaactttatatatctccggaaaggac

SEQ ID NO: 6907 - DNA, 228 bp, synthetic construct; identical to SEQ ID NO: 6906
  misc_feature 1..228: note = promoter
  source 1..228: mol_type = other DNA

SEQ ID NO: 6908 - DNA, 228 bp, synthetic construct
  misc_feature 1..228: note = promoter
  source 1..228: mol_type = other DNA
gagggcctatttcccatggttccttcatatttgcatagaggatgcaagactgtcagagggacgattgcaattaacttggccataaacacaaacctattggcacaaactatgtgatatagaaagttatgattgttcaagaagtttgtaatttaaaaaaaggaccactatgtacttaccgtaactgaaaagtctttcgttttctcaactttatatatcttcggaaaggac

SEQ ID NO: 6909 - DNA, 228 bp, synthetic construct; identical to SEQ ID NO: 6908
  misc_feature 1..228: note = promoter
  source 1..228: mol_type = other DNA

SEQ ID NO: 6910 - DNA, 228 bp, synthetic construct
  misc_feature 1..228: note = promoter
  source 1..228: mol_type = other DNA
gagggcctatttcccatggttccttcatatttgcatagaggatgcaagactgtcagagggacgattgcaattaacttggccataaacacaaacctattggcacaaactatgtgatatagaaagttatgattgttcaagaagtttgtaatttaaaaaaaggaccactatgtacttaccgtaactgaaaagtctttcgttttctcaactttatatatcttccgaaaggac

SEQ ID NO: 6911 - DNA, 228 bp, synthetic construct; identical to SEQ ID NO: 6910
  misc_feature 1..228: note = promoter
  source 1..228: mol_type = other DNA

SEQ ID NO: 6912 - DNA, 228 bp, synthetic construct
  misc_feature 1..228: note = promoter
  source 1..228: mol_type = other DNA
gagggcctatttcccatggttccttcatatttgcatagaggatgcaagactgtcagagggacgattgcaattaacttggccataaacacaaacctattggcacaaactatgtgatatagaaagttatgattgttcaagaagtttgtaatttaaaaaaaggaccactatgtacttaccgtaactgaaaagtctttcgttttctcaactttatatatcttccggaaggac

SEQ ID NO: 6913 - DNA, 228 bp, synthetic construct; identical to SEQ ID NO: 6912
  misc_feature 1..228: note = promoter
  source 1..228: mol_type = other DNA

SEQ ID NO: 6914 - DNA, 228 bp, synthetic construct; identical to SEQ ID NO: 6912
  misc_feature 1..228: note = promoter
  source 1..228: mol_type = other DNA

SEQ ID NO: 6915 - DNA, 228 bp, synthetic construct
  misc_feature 1..228: note = promoter
  source 1..228: mol_type = other DNA
gagggcctatttcccatggttccttcatatttgcatagaggatgcaagactgtcagagggacgattgcaattaacttggccataaacacaaacctattggcacaaactatgtgatatagaaagttatgattgttcaagaagtttgtaatttaaaaaaaggaccactatgtacttaccgtaactgaaaagtctttcgttttctcaactttatatatcttccggaaagac

SEQ ID NO: 6916 - DNA, 228 bp, synthetic construct; identical to SEQ ID NO: 6915
  misc_feature 1..228: note = promoter
  source 1..228: mol_type = other DNA

SEQ ID NO: 6917 - DNA, 228 bp, synthetic construct
  misc_feature 1..228: note = promoter
  source 1..228: mol_type = other DNA
gagggcctatttcccatggttccttcatatttgcatagaggatgcaagactgtcagagggacgattgcaattaacttggccataaacacaaacctattggcacaaactatgtgatatagaaagttatgattgttcaagaagtttgtaatttaaaaaaaggaccactatgtacttaccgtaactgaaaagtctttcgttttctcaactttatatatcttccggaaaggc

SEQ ID NO: 6918 - DNA, 228 bp, synthetic construct
  misc_feature 1..228: note = promoter
  source 1..228: mol_type = other DNA
gagggcctatttcccatggttccttcatatttgcatagaggatgcaagactgtcagagggacgattgcaattaacttggccataaacacaaacctattggcacaaactatgtgatatagaaagttatgattgttcaagaagtttgtaatttaaaaaaaggaccactatgtacttaccgtaactgaaaagtctttcgttttctcaactttatatatcttccggaaagga

SEQ ID NO: 6919 - DNA, 227 bp, synthetic construct
  misc_feature 1..227: note = promoter
  source 1..227: mol_type = other DNA
gggcctatttcccatggttccttcatatttgcatagaggatgcaagactgtcagagggacgattgcaattaacttggccataaacacaaacctattggcacaaactatgtgatatagaaagttatgattgttcaagaagtttgtaatttaaaaaaaggaccactatgtacttaccgtaactgaaaagtctttcgttttctcaactttatatatcttccggaaaggac

SEQ ID NO: 6920 - DNA, 227 bp, synthetic construct; identical to SEQ ID NO: 6919
  misc_feature 1..227: note = promoter
  source 1..227: mol_type = other DNA

SEQ ID NO: 6921 - DNA, 227 bp, synthetic construct
  misc_feature 1..227: note = promoter
  source 1..227: mol_type = other DNA
gagcctatttcccatggttccttcatatttgcatagaggatgcaagactgtcagagggacgattgcaattaacttggccataaacacaaacctattggcacaaactatgtgatatagaaagttatgattgttcaagaagtttgtaatttaaaaaaaggaccactatgtacttaccgtaactgaaaagtctttcgttttctcaactttatatatcttccggaaaggac

SEQ ID NO: 6922 - DNA, 227 bp, synthetic construct; identical to SEQ ID NO: 6921
  misc_feature 1..227: note = promoter
  source 1..227: mol_type = other DNA

SEQ ID NO: 6923 - DNA, 227 bp, synthetic construct
  misc_feature 1..227: note = promoter
  source 1..227: mol_type = other DNA
gaggctatttcccatggttccttcatatttgcatagaggatgcaagactgtcagagggacgattgcaattaacttggccataaacacaaacctattggcacaaactatgtgatatagaaagttatgattgttcaagaagtttgtaatttaaaaaaaggaccactatgtacttaccgtaactgaaaagtctttcgttttctcaactttatatatcttccggaaaggac

SEQ ID NO: 6924 - DNA, 227 bp, synthetic construct
  misc_feature 1..227: note = promoter
  source 1..227: mol_type = other DNA
gagggtatttcccatggttccttcatatttgcatagaggatgcaagactgtcagagggacgattgcaattaacttggccataaacacaaacctattggcacaaactatgtgatatagaaagttatgattgttcaagaagtttgtaatttaaaaaaaggaccactatgtacttaccgtaactgaaaagtctttcgttttctcaactttatatatcttccggaaaggac

SEQ ID NO: 6925 - DNA, 227 bp, synthetic construct
  misc_feature 1..227: note = promoter
  source 1..227: mol_type = other DNA
gagggcatttcccatggttccttcatatttgcatagaggatgcaagactgtcagagggacgattgcaattaacttggccataaacacaaacctattggcacaaactatgtgatatagaaagttatgattgttcaagaagtttgtaatttaaaaaaaggaccactatgtacttaccgtaactgaaaagtctttcgttttctcaactttatatatcttccggaaaggac

SEQ ID NO: 6926 - DNA, 227 bp, synthetic construct
  misc_feature 1..227: note = promoter
  source 1..227: mol_type = other DNA
gagggcctttcccatggttccttcatatttgcatagaggatgcaagactgtcagagggacgattgcaattaacttggccataaacacaaacctattggcacaaactatgtgatatagaaagttatgattgttcaagaagtttgtaatttaaaaaaaggaccactatgtacttaccgtaactgaaaagtctttcgttttctcaactttatatatcttccggaaaggac

SEQ ID NO: 6927 - DNA, 227 bp, synthetic construct; identical to SEQ ID NO: 6926
  misc_feature 1..227: note = promoter
  source 1..227: mol_type = other DNA

SEQ ID NO: 6928 - DNA, 227 bp, synthetic construct
  misc_feature 1..227: note = promoter
  source 1..227: mol_type = other DNA
gagggcctatcccatggttccttcatatttgcatagaggatgcaagactgtcagagggacgattgcaattaacttggccataaacacaaacctattggcacaaactatgtgatatagaaagttatgattgttcaagaagtttgtaatttaaaaaaaggaccactatgtacttaccgtaactgaaaagtctttcgttttctcaactttatatatcttccggaaaggac

SEQ ID NO: 6929 - DNA, 227 bp, synthetic construct; identical to SEQ ID NO: 6928
  misc_feature 1..227: note = promoter
  source 1..227: mol_type = other DNA

SEQ ID NO: 6930 - DNA, 227 bp, synthetic construct
  misc_feature 1..227: note = promoter
  source 1..227: mol_type = other DNA
gagggcctattccatggttccttcatatttgcatagaggatgcaagactgtcagagggacgattgcaattaacttggccataaacacaaacctattggcacaaactatgtgatatagaaagttatgattgttcaagaagtttgtaatttaaaaaaaggaccactatgtacttaccgtaactgaaaagtctttcgttttctcaactttatatatcttccggaaaggac

SEQ ID NO: 6931 - DNA, 227 bp, synthetic construct
  misc_feature 1..227: note = promoter
  source 1..227: mol_type = other DNA
gagggcctatttcatggttccttcatatttgcatagaggatgcaagactgtcagagggacgattgcaattaacttggccataaacacaaacctattggcacaaactatgtgatatagaaagttatgattgttcaagaagtttgtaatttaaaaaaaggaccactatgtacttaccgtaactgaaaagtctttcgttttctcaactttatatatcttccggaaaggac

SEQ ID NO: 6932 - DNA, 227 bp, synthetic construct; identical to SEQ ID NO: 6931
  misc_feature 1..227: note = promoter
  source 1..227: mol_type = other DNA

SEQ ID NO: 6933 - DNA, 227 bp, synthetic construct
  misc_feature 1..227: note = promoter
  source 1..227: mol_type = other DNA
gagggcctatttcctggttccttcatatttgcatagaggatgcaagactgtcagagggacgattgcaattaacttggccataaacacaaacctattggcacaaactatgtgatatagaaagttatgattgttcaagaagtttgtaatttaaaaaaaggaccactatgtacttaccgtaactgaaaagtctttcgttttctcaactttatatatcttccggaaaggac

SEQ ID NO: 6934 - DNA, 227 bp, synthetic construct
  misc_feature 1..227: note = promoter
  source 1..227: mol_type = other DNA
gagggcctatttcccggttccttcatatttgcatagaggatgcaagactgtcagagggacgattgcaattaacttggccataaacacaaacctattggcacaaactatgtgatatagaaagttatgattgttcaagaagtttgtaatttaaaaaaaggaccactatgtacttaccgtaactgaaaagtctttcgttttctcaactttatatatcttccggaaaggac

SEQ ID NO: 6935 - DNA, 227 bp, synthetic construct
  misc_feature 1..227: note = promoter
  source 1..227: mol_type = other DNA
gagggcctatttcccagttccttcatatttgcatagaggatgcaagactgtcagagggacgattgcaattaacttggccataaacacaaacctattggcacaaactatgtgatatagaaagttatgattgttcaagaagtttgtaatttaaaaaaaggaccactatgtacttaccgtaactgaaaagtctttcgttttctcaactttatatatcttccggaaaggac

SEQ ID NO: 6936 - DNA, 227 bp, synthetic construct
  misc_feature 1..227: note = promoter
  source 1..227: mol_type = other DNA
gagggcctatttcccatttccttcatatttgcatagaggatgcaagactgtcagagggacgattgcaattaacttggccataaacacaaacctattggcacaaactatgtgatatagaaagttatgattgttcaagaagtttgtaatttaaaaaaaggaccactatgtacttaccgtaactgaaaagtctttcgttttctcaactttatatatcttccggaaaggac

SEQ ID NO: 6937 - DNA, 227 bp, synthetic construct
  misc_feature 1..227: note = promoter
  source 1..227: mol_type = other DNA
gagggcctatttcccatgtccttcatatttgcatagaggatgcaagactgtcagagggacgattgcaattaacttggccataaacacaaacctattggcacaaactatgtgatatagaaagttatgattgttcaagaagtttgtaatttaaaaaaaggaccactatgtacttaccgtaactgaaaagtctttcgttttctcaactttatatatcttccggaaaggac

SEQ ID NO: 6938 - DNA, 227 bp, synthetic construct
  misc_feature 1..227: note = promoter
  source 1..227: mol_type = other DNA
gagggcctatttcccatggccttcatatttgcatagaggatgcaagactgtcagagggacgattgcaattaacttggccataaacacaaacctattggcacaaactatgtgatatagaaagttatgattgttcaagaagtttgtaatttaaaaaaaggaccactatgtacttaccgtaactgaaaagtctttcgttttctcaactttatatatcttccggaaaggac

SEQ ID NO: 6939 - DNA, 227 bp, synthetic construct
  misc_feature 1..227: note = promoter
  source 1..227: mol_type = other DNA
gagggcctatttcccatggtcttcatatttgcatagaggatgcaagactgtcagagggacgattgcaattaacttggccataaacacaaacctattggcacaaactatgtgatatagaaagttatgattgttcaagaagtttgtaatttaaaaaaaggaccactatgtacttaccgtaactgaaaagtctttcgttttctcaactttatatatcttccggaaaggac

SEQ ID NO: 6940 - DNA, 227 bp, synthetic construct
  misc_feature 1..227: note = promoter
  source 1..227: mol_type = other DNA
gagggcctatttcccatggttttcatatttgcatagaggatgcaagactgtcagagggacgattgcaattaacttggccataaacacaaacctattggcacaaactatgtgatatagaaagttatgattgttcaagaagtttgtaatttaaaaaaaggaccactatgtacttaccgtaactgaaaagtctttcgttttctcaactttatatatcttccggaaaggac

SEQ ID NO: 6941 - DNA, 227 bp, synthetic construct
  misc_feature 1..227: note = promoter
  source 1..227: mol_type = other DNA
gagggcctatttcccatggttctcatatttgcatagaggatgcaagactgtcagagggacgattgcaattaacttggccataaacacaaacctattggcacaaactatgtgatatagaaagttatgattgttcaagaagtttgtaatttaaaaaaaggaccactatgtacttaccgtaactgaaaagtctttcgttttctcaactttatatatcttccggaaaggac

SEQ ID NO: 6942 - DNA, 227 bp, synthetic construct
  misc_feature 1..227: note = promoter
  source 1..227: mol_type = other DNA
gagggcctatttcccatggttcccatatttgcatagaggatgcaagactgtcagagggacgattgcaattaacttggccataaacacaaacctattggcacaaactatgtgatatagaaagttatgattgttcaagaagtttgtaatttaaaaaaaggaccactatgtacttaccgtaactgaaaagtctttcgttttctcaactttatatatcttccggaaaggac

SEQ ID NO: 6943 - DNA, 227 bp, synthetic construct
  misc_feature 1..227: note = promoter
  source 1..227: mol_type = other DNA
gagggcctatttcccatggttcctatatttgcatagaggatgcaagactgtcagagggacgattgcaattaacttggccataaacacaaacctattggcacaaactatgtgatatagaaagttatgattgttcaagaagtttgtaatttaaaaaaaggaccactatgtacttaccgtaactgaaaagtctttcgttttctcaactttatatatcttccggaaaggac

SEQ ID NO: 6944 - DNA, 227 bp, synthetic construct
  misc_feature 1..227: note = promoter
  source 1..227: mol_type = other DNA
gagggcctatttcccatggttcctttatttgcatagaggatgcaagactgtcagagggacgattgcaattaacttggccataaacacaaacctattggcacaaactatgtgatatagaaagttatgattgttcaagaagtttgtaatttaaaaaaaggaccactatgtacttaccgtaactgaaaagtctttcgttttctcaactttatatatcttccggaaaggac

SEQ ID NO: 6945 - DNA, 227 bp, synthetic construct
  misc_feature 1..227: note = promoter
  source 1..227: mol_type = other DNA
gagggcctatttcccatggttccttcatttgcatagaggatgcaagactgtcagagggacgattgcaattaacttggccataaacacaaacctattggcacaaactatgtgatatagaaagttatgattgttcaagaagtttgtaatttaaaaaaaggaccactatgtacttaccgtaactgaaaagtctttcgttttctcaactttatatatcttccggaaaggac

SEQ ID NO: 6946 - DNA, 227 bp, synthetic construct; identical to SEQ ID NO: 6945
  misc_feature 1..227: note = promoter
  source 1..227: mol_type = other DNA

SEQ ID NO: 6947 - DNA, 227 bp, synthetic construct; identical to SEQ ID NO: 6945
  misc_feature 1..227: note = promoter
  source 1..227: mol_type = other DNA

SEQ ID NO: 6948 - DNA, 227 bp, synthetic construct
  misc_feature 1..227: note = promoter
  source 1..227: mol_type = other DNA
gagggcctatttcccatggttccttcatatgcatagaggatgcaagactgtcagagggacgattgcaattaacttggccataaacacaaacctattggcacaaactatgtgatatagaaagttatgattgttcaagaagtttgtaatttaaaaaaaggaccactatgtacttaccgtaactgaaaagtctttcgttttctcaactttatatatcttccggaaaggac

(The sequence listing continues in the following parts.)
